United States Patent Application Publication US 2024/0398993 A1 - sequence listing, part 19

SEQ ID NO: 77935 - protein, 1186 aa, Homo sapiens
MPTAESEAKVKTKVRFEELLKTHSDLMREKKKLKKKLVRSEENISPDTIRSNLHYMKETTSDDPDTIRSNLPHIKETTSDDVSAANTNNLKKSTRVTKNKLRNTQLATENPNGDASVEEDKQGKPNKKVIKTVPQLTTQDLKPETPENKVDSTHQKTHTKPQPGVDHQKSEKANEGREETDLEEDEELMQAYQCHVTEEMAKEIKRKIRKKLKEQLTYFPSDTLFHDDKLSSEKRKKKKEVPVFSKAETSTLTISGDTVEGEQKKESSVRSVSSDSHQDDEISSMEQSTEDSMQDDTKPKPKKTKKKTKAVADNNEDVDGDGVHEITSRDSPVYPKCLLDDDLVLGVYIHRTDRLKSDFMISHPMVKIHVVDEHTGQYVKKDDSGRPVSSYYEKENVDYILPIMTQPYDFKQLKSRLPEWEEQIVFNENFPYLLRGSDESPKVILFFEILDFLSVDEIKNNSEVQNQECGFRKIAWAFLKLLGANGNANINSKLRLQLYYPPTKPRSPLSVVEAFEWWSKCPRNHYPSTLYVTVRGLKVPDCIKPSYRSMMALQEEKGKPVHCERHHESSSVDTEPGLEESKEVIKWKRLPGQACRIPNKHLFSLNAGERGCFCLDFSHNGRILAAACASRDGYPIILYEIPSGRFMRELCGHLNIIYDLSWSKDDHYILTSSSDGTARIWKNEINNTNTFRVLPHPSFVYTAKFHPAVRELVVTGCYDSMIRIWKVEMREDSAILVRQFDVHKSFINSLCFDTEGHHMYSGDCTGVIVVWNTYVKINDLEHSVHHWTINKEIKETEFKGIPISYLEIHPNGKRLLIHTKDSTLRIMDLRILVARKFVGAANYREKIHSTLTPCGTFLFAGSEDGIVYVWNPETGEQVAMYSDLPFKSPIRDISYHPFENMVAFCAFGQNEPILLYIYDFHVAQQEAEMFKRYNGTFPLPGIHQSQDALCTCPKLPHQGSFQIDEFVHTESSSTKMQLVKQRLETVTEVIRSCAAKVNKNLSFTSPPAVSSQQSKLKQSNMLTAQEILHQFGFTQTGIISIERKPCNHQVDTAPTVVALYDYTANRSDELTIHRGDIIRVFFKDNEDWWYGSIGKGQEGYFPANHVASETLYQELPPEIKERSPPLSPEEKTKIEKSPAPQKVGDNTGGQRSWMLLSILECRGQLPSTKNSLAKNVNRMELRAVPL

SEQ ID NO: 77936 - protein, 217 aa, Homo sapiens
MSRQAKDDFLRHYTVSDPRTHPKGYTEYKFISKKDPEDVKEVVVWKRYSDFRKLHGDLAYTHRNLFRRLEEFPAFPRAQVFGRFEASVIEERRKGAEDLLRFTVHIPALNNSPQLKEFFRGGEVTRPLEVSRDLHILPPPLIPTPPPDDPRLSQLLPAERRGLEELEVPVDPPPSSPAQEALDLLFNCESTEEASGSPARGPLTEAELALFDPFSKE

SEQ ID NO: 77937 - protein, 32 aa, Homo sapiens
MREYKLVVLGSGGVGKSALTVQFVQGIFVEKY

SEQ ID NO: 77938 - protein, 307 aa, Homo sapiens
  MOD_RES (1)..(1): Any amino acid
XTSAVTENIKALFPTEIHSGLLEVISPSPHFYPDFSRLRESFGDPKERVRWRTKQNLDYCFLMMYAQSKGIYYVQLEDDIVAKPNYLSTMKNFALQQPSEDWMILEFSQLGFIARGHSLLAGWQDPETEGQRLWKAGAAEGACEPASRGEHEPEDIPALHPGESLPARGLLLGLHPCRGGLHPLPLLPTSKTGAVLLPQWEHRAPGGQALQHVCGGAALRQPSVRQGGPAGGPHRHPPVPSEPRRLPPDRLLLQGSGRGRGGPSLRPSGSTAPLDPDGLPCVGDSERDLPEKGRLSCGLLRVPCGQP

SEQ ID NO: 77939 - protein, 132 aa, Homo sapiens
MDDDANGDVDVEESDEFLREDLNYHDPTVKHSTFHGEDKLISVEDLWKAWKSSEVYNWTVDEVVQWLITYVELPQYEETFRKLQLSGHAMPRLAVTNTTMTGTVLKMTDRSHRQKLQLKALDTVLFGPPLCE

SEQ ID NO: 77940 - protein, 1187 aa, Homo sapiens
MQRSPLEKASVVSKLFFSWTRPILRKGYRQRLELSDIYQIPSVDSADNLSEKLEREWDRELASKKNPKLINALRRCFFWRFMFYGIFLYLGEVTKAVQPLLLGRIIASYDPDNKEERSIAIYLGIGLCLLFIVRTLLLHPAIFGLHHIGMQMRIAMFSLIYKKTLKLSSRVLDKISIGQLVSLLSNNLNKFDEGLALAHFVWIAPLQVALLMGLIWELLQASAFCGLGFLIVLALFQAGLGRMMMKYRDQRAGKISERLVITSEMIENIQSVKAYCWEEAMEKMIENLRQTELKLTRKAAYVRYFNSSAFFFSGFFVVFLSVLPYALIKGIILRKIFTTISFCIVLRMAVTRQFPWAVQTWYDSLGAINKIQDFLQKQEYKTLEYNLTTTEVVMENVTAFWEETSLLMVIMGELEPSEGKIKHSGRISFCSQFSWIMPGTIKENIIFGVSYDEYRYRSVIKACQLEEDISKFAEKDNIVLGEGGITLSGGQRARISLARAVYKDADLYLLDSPFGYLDVLTEKEIFESCVCKLMANKTRILVTSKMEHLKKADKILILHEGSSYFYGTFSELQNLQPDFSSKLMGCDSFDQFSAERRNSILTETLHRFSLEGDAPVSWTETKKQSFKQTGEFGEKRKNSILNPINSIRKFSIVQKTPLQMNGIEEDSDEPLERRLSLVPDSEQGEAILPRISVISTGPTLQARRRQSVLNLMTHSVNQGQNIHRKTTASTRKVSLAPQANLTELDIYSRRLSQETGLEISEEINEEDLKECFFDDMESIPAVTTWNTYLRYITVHKSLIFVLIWCLVIFLAEVAASLVVLWLLGNTPLQDKGNSTHSRNNSYAVIITSTSSYYVFYIYVGVADTLLAMGFFRGLPLVHTLITVSKILHHKMLHSVLQAPMSTLNTLKAGGILNRFSKDIAILDDLLPLTIFDFIQLLLIVIGAIAVVAVLQPYIFVATVPVIVAFIMLRAYFLQTSQQLKQLESEGRSPIFTHLVTSLKGLWTLRAFGRQPYFETLFHKALNLHTANWFLYLSTLRWFQMRIEMIFVIFFIAVTFISILTTGEGEGRVGIILTLAMNIMSTLQWAVNSSIDVDSLMRSVSRVFKFIDMPTEGKPTKSTKPYKNGQLSKVMIIENSHVKKDDIWPSGGQMTVKDLTAKYTEGGNAILENISFSISPGQRVRFEHCLLC

SEQ ID NO: 77941 - protein, 395 aa, Homo sapiens
LTDRQTDTAPSPSYHLLPGRRRTVDAAASRGQGPEPAPGGGVEGVGARGVALKLFVQLLGCSRFGGAVVRAGEAEPSGAARSASSGREEPQPEEGEEEEEKEEERGPQWRLGARKPGSWTGEAAVCADSAPAARAPQALARASGRGGRVARRGAEESGPPHSPSRRGSASRAGPGRASETMNFLLSWVHWSLALLLYLHHAKWSQAAPMAEGGGQNHHEVVKFMDVYQRSYCHPIETLVDIFQEYPDEIEYIFKPSCVPLMRCGGCCNDEGLECVPTEESNITMQIMRIKPHQGQHIGEMSFLQHNKCECRPKKDRARQEKKSVRGKGKGQKRKRKKSRYKSWSVPCGPCSERRKHLFVQDPQTCKCSCKNTDSRCKARQLELNERTCRCDKPRR

SEQ ID NO: 77942 - protein, 184 aa, Homo sapiens
MFPSPKAWNFRGRKRKQSTQDEDAVSLCSLDISEPSNKRVKPLSRVTSLANLIPPVKATPLKRFSQTLQRSISFRSESRPDILAPRPWSRNAAPSSTKRRDSKLWSETFDVCVNQMLTSKEIKRQEAIFELSQGEEDLIEDLKLAKKAYHDPMLKLSIMTEQELNQIFGTLDSLIPLHEELLSQ

SEQ ID NO: 77943 - protein, 168 aa, Homo sapiens
MTTETGPDSEVKKAQEEAPQQPEAAAAVTTPVTPAGHGHPEANSNEKHPSQQDTRPAEQSLDMEEKDYSEADGLSERTTPSKAQKSPQKIAKKYKSAICRVTLLDASEYECEVEKHGRGQVLFDLVCEHLNLLEKDYFGLTFCDADSQKNWLDPSKEIKKQIRSSPWN

SEQ ID NO: 77944 - protein, 595 aa, Homo sapiens
MVPSCCFFRCRKQKDNRYQPNKDVVEQMEKCIQEKDEKLKTVEELLETGLIQVATKEEELNAIRTENSSLTKEVQDLKAKQNDQVSFASLVEELKKVIHEKDGKIKSVEELLEAELLKVANKEKTVQDLKQEIKALKEEIGNVQLEKAQQLSITSKVQELQNLLKGKEEQMNTMKAVLEEKEKDLANTGKWLQDLQEENESLKAHVQEVAQHNLKEASSASQFEELEIVLKEKENELKRLEAMLKERESDLSSKTQLLQDVQDENKLFKSQIEQLKQQNYQQASSFPPHEELLKVISEREKEISGLWNELDSLKDAVEHQRKKNNERQQQVEAVELEAKEVLKKLFPKVSVPSNLSYGEWLHGFEKKAKECMAGTSGSEEVKVLEHKLKEADEMHTLLQLECEKYKSVLAETEGILQKLQRSVEQEENKWKVKVDESHKTIKQMQSSFTSSEQELERLRSENKDIENLRREREHLEMELEKAEMERSTYVTEVRELKAQLNETLTKLRTEQNERQKVAGDLHKAQQSLELIQSKIVKAAGDTTVIENSDVSPETESSEKETMSVSLNQTVTQLQQLLQAVNQQLTKEKEHYQVLE

SEQ ID NO: 77945 - protein, 37 aa, Homo sapiens
MAMFEDTVEERVINEEYKIWKKNTPFLYDLVMTHALQ

SEQ ID NO: 77946 - protein, 621 aa, Homo sapiens
MGSPLRFDGRVVLVTGAGAGLGRAYALAFAERGALVVVNDLGGDFKGVGKGSLAADKVVEEIRRRGGKAVANYDSVEEGEKVVKTALDAFGRIDVVVNNAGILRDRSFARISDEDWDIIHRVHLRGSFQVTRAAWEHMKKQKYGRIIMTSSASGIYGNFGQANYSAAKLGLLGLANSLAIEGRKSNIHCNTIAPNAGSRMTQTVMPEDLVEALKPEYVAPLVLWLCHESCEENGGLFEVGAGWIGKLRWERTLGAIVRQKNHPMTPEAVKANWKKICDFENASKPQSIQESTGSIIEVLSKIDSEGGVSANHTSRATSTATSGFAGAIGQKLPPFSYAYTELEAIMYALGVGASIKDPKDLKFIYEGSSDFSCLPTFGVIIGQKSMMGGGLAEIPGLSINFAKVLHGEQYLELYKPLPRAGKLKCEAVVADVLDKGSGVVIIMDVYSYSEKELICHNQFSLFLVGSGGFGGKRTSDKVKVAVAIPNRPPDAVLTDTTSLNQAALYRLSGDWNPLHIDPNFASLAGFDKPILHGLCTFGFSARRVLQQFADNDVSRFKAIKARFAKPVYPGQTLQTEMWKEGNRIHFQTKVQETGDIVISNAYVDLAPTSGTSAKTPSELLT

SEQ ID NO: 77947 - protein, 188 aa, Homo sapiens
MAAVAGSGAAAAPSSLLLVVGSEFGSPGLLTYVLEELERGQRSLHHRGDNLETLVLLNPSDKSLYDELRNLLLDPASHKLLVLAGPCLEETGELLLQTGGFSPHHFLQVLKDREIRDILATTPPPVQPPILTITCPTFGDWAQLAPAVPGLQGALRLQLRLNPPAQLPNSEGLCEFLEYVAESLEPPS

SEQ ID NO: 77948 - protein, 212 aa, Homo sapiens
MAYFPGTGRTDQETQLDLSLCGREPESLENLFLDPDMAQEKMKLGFKSLPSSTTADGNILRRVNSAPLINGLGFNSQVLQADMLRIRTNRTTFRNRRSLLLPPPPFHGSISRLHQIKQEEAMDLINRETMSEWKLQSEIQISHSWEEGLKLNDNGLQKSSSLKCIDLTPVSSMASSIKKTGKQCFSPSLQTCVSCTGSPSSPIPSPMQQYIM

SEQ ID NO: 77949 - protein, 181 aa, Homo sapiens
MFFWCACCLMVAWRVSASDAEHCPELPPVDNSIFVAKEVEGQILGTYVCIKGYHLVGKKTLFCNASKEWDNTTTECRLGHCPDPVLVNGEFSSSGPVNVSDKITFMCNDHYILKGSNRSQCLEDHTWAPPFPICKSRDCDPPGNPVHGYFEGNNFTLGSTISYYCEDRYYLVGVQEQQCVD

SEQ ID NO: 77950 - protein, 104 aa, Homo sapiens
MGSACIKVTKYFLFLFNLIFFILGAVILGFGVWILADKSSFISVLQTSSSSLRMGAYVFIGVGAVTMLMGFLGCIGAVNEVRCLLGLYFAFLLLILIAQVTAGA

SEQ ID NO: 77951 - protein, 47 aa, Homo sapiens
MSIYKEPPPGMFVVPDTVDMTKYMDWTCLEPSPEHLLSAHLYPVPDD

SEQ ID NO: 77952 - protein, 174 aa, Homo sapiens
MRLPGAMPALALKGELLLLSLLLLLEPQISQGLVVTPPGPELVLNVSSTFVLTCSGSAPVVWERMSQEPPQEMAKAQDGTFSSVLTLTNLTGLDTGEYFCTHNDSRGLETDERKRLYIFVPDPTVGFLPNDAEELFIFLTEITEITIPCRVTDPQLVVTLHEKKGDVALPVPYD

SEQ ID NO: 77953 - protein, 167 aa, Homo sapiens
MHFTGAVMQENLRFASSGDDIKIWDASSMTLVDKFNPHTSPHGISSICWSSNNNFLVTASSSGDKIVVSSCKCKPVPLLELAEGQKQTCVNLNSTSMYLVSGGLNNTVNIWDLKSKRVHRSLKDHKDQVTCVTYNWNDCYIASGSLSGEIILHSVTTNLSSTPFGHG

SEQ ID NO: 77954 - protein, 31 aa, Homo sapiens
DDCPNHRCQNGGVCVDGVNTYNCRCPPQWTA

SEQ ID NO: 77955 - protein, 198 aa, Homo sapiens
MLPLLIICLLPAIEGKNCLRCWPELSALIDYDLQILWVTPGPPTELSQSIHSLFLEDNNFLKPWYLDRDHLEEETAKFFTQVHQAIKTLRDDKTVLLEEIYTHKNLFTERLNKISDGLKEKDIQSTLKVTSCADCRTHFLSCNDPTFCPARNRRTSLWAVSLSSALLLAIAGGGCFFYWQRKKEAVKQEQGSPHVFQK

SEQ ID NO: 77956 - protein, 197 aa, Homo sapiens
MDKTFERKLPVSSLTISRLIDNISSREEIDHAEYYLYKFRHSPNCWYLRNWTIHTWIRQCLKYDAQDKALYTLVNKVQYGIFPDNFTFNLLMDSFIKKENYKDALSVVFEVMMQEAFEVPSTQLLSLYVLFHCLAKKTDFSWEEERNFGASLLLPGLKQKNSVGFSSQLYGYALLGKLNDPYKYCSSWLELLHSSSS

SEQ ID NO: 77957 - protein, 330 aa, Homo sapiens
MSGNGNAAATALARIQTDSVVATLKASYPGLQFEIIAMSTTGDKILDTALSKIGEKSLFTKELEHALEKNEVDLVVHSLKDLPTVLPPGFTIGAICKRENPHDAVVFHPKFVGKTLETLPEKSVVGTSSLRRAAQLQRKFPHLEFRSIRGNLNTRLRKLDEQQEFSAIILATAGLQRMGWHNRVGQGALGVEVRAKDQDILDLVGVLHDPETLLRCIAERAFLRHLEGGCSVPVAVHTAMKDGQLYLTGGVWSLDGSDSIQETMQATIHVPAQHEDGPEDDPQLVGITARNIPRGPQLAAQNLGISLANLLLSKGAKNILDVARQLNDAH

SEQ ID NO: 77958 - protein, 186 aa, Homo sapiens
MAAAWPSGPSAPEAVTARLVGVLWFVSVTTGPWGAVATSAGGEESLKCEDLKVGQYICKDPKINDATQEPVNCTNYTAHVSCFPAPNITCKDSSGNETHFTGNEVGFFKPISCRNVNGYSYKVAVALSLFLGWLGADRFYLGYPALGKETVTREVKGFTESRGFPLFCDIFVVIIFVLWIGKLSRD

SEQ ID NO: 77959 - protein, 3848 aa, Homo sapiens
MEDEERQKKLEAGKAKLAQFRQRKAQSDGQSPSKKQKKKRKTSSSKHDVSAHHDLNIDQSQCNEMYINSSQRVESTVIPESTIMRTLHSGEITSHEQGFSVELESEISTTADDCSSEVNGCSFVMRTGKPTNLLREEEFGVDDSYSEQGAQDSPTHLEMMESELAGKQHEIEELNRELEEMRVTYGTEGLQQLQEFEAAIKQRDGIITQLTANLQQARREKDETMREFLELTEQSQKLQIQFQQLQASETLRNSTHSSTAADLLQAKQQILTHQQQLEEQDHLLEDYQKKKEDFTMQISFLQEKIKVYEMEQDKKVENSNKEEIQEKETIIEELNTKIIEEEKKTLELKDKLTTADKLLGELQEQIVQKNQEIKNMKLELTNSKQKERQSSEEIKQLMGTVEELQKRNHKDSQFETDIVQRMEQETQRKLEQLRAELDEMYGQQIVQMKQELIRQHMAQMEEMKTRHKGEMENALRSYSNITVNEDQIKLMNVAINELNIKLQDTNSQKEKLKEELGLILEEKCALQRQLEDLVEELSFSREQIQRARQTIAEQESKLNEAHKSLSTVEDLKAEIVSASESRKELELKHEAEVTNYKIKLEMLEKEKNAVLDRMAESQEAELERLRTQLLFSHEEELSKLKEDLEIEHRINIEKLKDNLGIHYKQQIDGLQNEMSQKIETMQFEKDNLITKQNQLILEISKLKDLQQSLVNSKSEEMTLQINELQKEIEILRQEEKEKGTLEQEVQELQLKTELLEKQMKEKENDLQEKFAQLEAENSILKDEKKTLEDMLKIHTPVSQEERLIFLDSIKSKSKDSVWEKEIEILIEENEDLKQQCIQLNEEIEKQRNTFSFAEKNFEVNYQELQEEYACLLKVKDDLEDSKNKQELEYKSKLKALNEELHLQRINPTTVKMKSSVFDEDKTFVAETLEMGEVVEKDTTELMEKLEVTKREKLELSQRLSDLSEQLKQKHGEISFLNEEVKSLKQEKEQVSLRCRELEIIINHNRAENVQSCDTQVSSLLDGVVTMTSRGAEGSVSKVNKSFGEESKIMVEDKVSFENMTVGEESKQEQLILDHLPSVTKESSLRATQPSENDKLQKELNVLKSEQNDLRLQMEAQRICLSLVYSTHVDQVREYMENEKDKALCSLKEELIFAQEEKIKELQKIHQLELQTMKTQETGDEGKPLHLLIGKLQKAVSEECSYFLQTLCSVLGEYYTPALKCEVNAEDKENSGDYISENEDPELQDYRYEVQDFQENMHTLLNKVTEEYNKLLVLQTRLSKIWGQQTDGMKLEFGEENLPKEETEFLSIHSQMTNLEDIDVNHKSKLSSLQDLEKTKLEEQVQELESLISSLQQQLKETEQNYEAEIHCLQKRLQAVSESTVPPSLPVDSVVITESDAQRTMYPGSCVKKNIDGTIEFSGEFGVKEETNIVKLLEKQYQEQLEEEVAKVIVSMSIAFAQQTELSRISGGKENTASSKQAHAVCQQEQHYFNEMKLSQDQIGFQTFETVDVKFKEEFKPLSKELGEHGKEILLSNSDPHDIPESKDCVLTISEEMFSKDKTFIVRQSIHDEISVSSMDASRQLMLNEEQLEDMRQELVRQYQEHQQATELLRQAHMRQMERQREDQEQLQEEIKRLNRQLAQRSSIDNENLVSERERVLLEELEALKQLSLAGREKLCCELRNSSTQTQNGNENQGEVEEQTFKEKELDRKPEDVPPEILSNERYALQKANNRLLKILLEVVKTTAAVEETIGRHVLGILDRSSKSQSSASLIWRSEAEASVKSCVHEEHTRVTDESIPSYSGSDMPRNDINMWSKVTEEGTELSQRLVRSGFAGTEIDPENEELMLNISSRLQAAVEKLLEAISETSSQLEHAKVTQTELMRESFRQKQEATESLKCQEELRERLHEESRAREQLAVELSKAEGVIDGYADEKTLFERQIQEKTDIIDRLEQELLCASNRLQELEAEQQQIQEERELLSRQKEAMKAEAGPVEQQLLQETEKLMKEKLEVQCQAEKVRDDLQKQVKALEIDVEEQVSRFIELEQEKNTELMDLRQQNQALEKQLEKMRKFLDEQAIDREHERDVFQQEIQKLEQQLKVVPRFQPISEHQTREVEDRKHFGAVEAKPELSLEVQLQAERDAIDRKEKEITNLEEQLEQFREELENKNEEVQQLHMQLEIQKKESTTRLQELEQENKLFKDDMEKLGLAIKESDAMSTQDQHVLFGKFAQIIQEKEVEIDQLNEQVTKLQQQLKITTDNKVIEEKNELIRDLETQIECLMSDQECVKRNREEEIEQLNEVIEKLQQELANIGQKTSMNAHSLSEEADSLKHQLDVVIAEKLALEQQVETANEEMTFMKNVLKETNFKMNQLTQELFSLKRERESVEKIQSIPENSVNVAIDHLSKDKPELEVVLTEDALKSLENQTYFKSFEENGKGSIINLETRLLQLESTVSAKDLELTQCYKQIKDMQEQGQFETEMLQKKIVNLQKIVEEKVAAALVSQIQLEAVQEYAKFCQDNQTISSEPERTNIQNLNQLREDELGSDISALTLRISELESQVVEMHTSLILEKEQVEIAEKNVLEKEKKLLELQKLLEGNEKKQREKEKKRSPQDVEVLKTTTELFHSNEESGFFNELEALRAESVATKAELASYKEKAEKLQEELLVKETNMTSLQKDLSQVRDHLAEAKEKLSILEKEDETEVQESKKACMFEPLPIKLSKSIASQTDGTLKISSSNQTPQILVKNAGIQINLQSECSSEEVTEIISQFTEKIEKMQELHAAEILDMESRHISETETLKREHYVAVQLLKEECGTLKAVIQCLRSKEGSSIPELAHSDAYQTREICSSDSGSDWGQGIYLTHSQGFDIASEGRGEESESATDSFPKKIKGLLRAVHNEGMQVLSLTESPYSDGEDHSIQQVSEPWLEERKAYINTISSLKDLITKMQLQREAEVYDSSQSHESFSDWRGELLLALQQVFLEERSVLLAAFRTELTALGTTDAVGLLNCLEQRIQEQGVEYQAAMECLQKADRRSLLSEIQALHAQMNGRKITLKREQESEKPSQELLEYNIQQKQSQMLEMQVELSSMKDRATELQEQLSSEKMVVAELKSELAQTKLELETTLKAQHKHLKELEAFRLEVKDKTDEVHLLNDTLASEQKKSRELQWALEKEKAKLGRSEERDKEELEDLKFSLESQKQRNLQLNLLLEQQKQLLNESQQKIESQRMLYDAQLSEEQGRNLELQVLLESEKVRIREMSSTLDRERELHAQLQSSDGTGQSRPPLPSEDLLKELQKQLEEKHSRIVELLNETEKYKLDSLQTRQQMEKDRQVHRKTLQTEQEANTEGQKKMHELQSKVEDLQRQLEEKRQQVYKLDLEGQRLQGIMQEFQKQELEREEKRESRRILYQNLNEPTTWSLTSDRTRNWVLQQKIEGETKESNYAKLIEMNGGGTGCNHELEMIRQKLQCVASKLQVLPQKASERLQFETADDEDFIWVQENIDEIILQLQKLTGQQGEEPSLVSPSTSCGSLTERLLRQNAELTGHISQLTEEKNDLRNMVMKLEEQIRWYRQTGAGRDNSSRFSLNGGANIEAIIASEKEVWNREKLTLQKSLKRAEAEVYKLKAELRNDSLLQTLSPDSEHVTLKRIYGKYLRAESFRKALIYQKKYLLLLLGGFQECEDATLALLARMGGQPAFTDLEVITNRPKGFTRFRSAVRVSIAISRMKFLVRRWHRVTGSVSININRDGFGLNQGAEKTDSFYHSSGGLELYGEPRHTTYRSRSDLDYIRSPLPFQNRYPGTPADFNPGSLACSQLQNYDPDRALTDYITRLEALQRRLGTIQSGSTTQFHAGMRR

SEQ ID NO: 77960 - protein, 47 aa, Homo sapiens
MEDGKPVWAPHPTDGFQMGNIVDIGPDSLTIEPLNQKGKASCSGSCL

SEQ ID NO: 77961 - protein, 184 aa, Homo sapiens
MQTSETGSDTGSTVTLQTSVASQAAVPTQVVQQVPVQQQVQQVQTVQQVQHVYPAQVQYVEGSDTVYTNGAIRTTTYPYTETQMYSQNTGGNYFDTQGSSAQVTTVVSSHSMVGTGGIQMGVTGGQLISSSGGTYLIGNSMENSGHSVTHTTRASPATIEMAIETLQKSDGLSTHRSSLLNSHV

SEQ ID NO: 77962 - protein, 297 aa, Homo sapiens
MACAGLLTVCLLRPPAPQPQPQTPRHPQLAPDPGPAGHTLFQDVFRRADKNDDGKLSFEEFQNYFADGVLSLGELQELFSGIDGHLTDNLETEKLCDYFSEHLGVYRPVLAALESLNRAVLAAMDATKLEYERASKVDQFVTRFLLRETVSQLQALQSSLEGASDTLEAQAHGWRSDAESVEAQSRLCGSRRAGRRALRSVSRSSTWSPGSSDTGRSSEAEMQWRLQVNRLQELIDQLECKRQVQVAEEGLQDFHRALRCYVDFTGAQSHCLHVSAQKMLDGASFTLYEFWQDEASW

SEQ ID NO: 77963 - protein, 133 aa, Homo sapiens
MKVLLLKDAKEDDCGQDPYIRELGLYGLEATLIPVLSFEFLSLPSFSEKLSHPEDYGGLIFTSPRAVEAAELCLEQNNKTEVWERSLKEKWNAKSVYVVGNATASLVSKIGLDTEGETCGNAEKLAEYICSSK

SEQ ID NO: 77964 - protein, 226 aa, Homo sapiens
MEKIEEQFANLHIVKCSLGTKEPTYLLGIDTSKTVQAGKENLVAVLCSNGSIRIYDKERLNVLREFSGYPGLLNGVRFANSCDSVYSACTDGTVKCWDARVAREKPVQLFKGYPSNIFISFDINCNDHIICAGTEKVDDDALLVFWDARMNSQNLSTTKDSLGAYSETHSDDVTQVRFHPSNPNMVVSGSSDGLVNVFDINIDNEEDALVTTCNSISSVSCIGWSG

SEQ ID NO: 77965 - protein, 60 aa, Homo sapiens
MKLADSVMAGKASDGSIKWQLCYDISARTWWMTPKLHRFSLNAWTQEPSSSVLPVPSTHC

SEQ ID NO: 77966 - protein, 117 aa, Homo sapiens
  MOD_RES (1)..(1): Any amino acid
XRRQHQRNVKLMRQMLMDAGLPVVHCPSHIIPVRVADAAKNTEVCDELMSRHNIYVQAINYPTVPRGEELLRIAPTPHHTPQMMNYFLGEYLGSCWCLTEELHKAVFAVFIIEALQR

SEQ ID NO: 77967 - protein, 224 aa, Homo sapiens
NVIKLSLEISLFLNKLLVLGVSESSIHIIGVSLGAHVGGMVGQLFGGQLGQITGLDPAGPEYTRASVEERLDAGDALFVEAIHTDTDNLGIRIPVGHVDYFVNGGQDQPGCPTFFYAGYSYLICDHMRAVHLYISALENSCPLMAFPCASYKAFLAGRCLDCFNPFLLSCPRIGLVEQGGVKIEPLPKEVKVYLLTTSSAPYCNAFQLLTVAPNHGISLKLGCW

SEQ ID NO: 77968 - protein, 88 aa, Homo sapiens
MSGPVPSRARVYTDVNTHRPREYWDYESHVVEWGNQDDYQLVRKLGRGKYSEVFEAINITNNEKVVVKILKYLQNTWHSARRRIQRRM

SEQ ID NO: 77969 - protein, 81 aa, Homo sapiens
MNCQQLWLGFLLPMTVSGRVLGLAEVAPVDYLSQYGYLQKPLEGSNNFKPEDITEALRESPGPCRHPRAGQCALRRRRVLD

SEQ ID NO: 77970 - protein, 106 aa, Homo sapiens
MSSKGSSTDGRTDLANGSLSSSPEEMSGAEEGRETSSGIEVEASDLSLSLTGDDGGPNRTSTESRGTDTESSGEDKDSDSMEDTGHYSINDENRVHDRSEEEEEEE

SEQ ID NO: 77971 - protein, 110 aa, Homo sapiens
FNSGEANTSDAFNWTVDSENRTNLSCEGCLSPSCLSLLHLQEKNWSALLTAVVIILTIAGNILVIMAVSLEKKLQNATNYFLMSLAIADMLLGFLVMPVSMLTILYGEWH

SEQ ID NO: 77972 - protein, 857 aa, Homo sapiens
  MOD_RES (1)..(1): Any amino acid
XHKLLSTGPTEPWSIREKLCLASSVMRSGDQNWVSVSRAIKPFAEPGRPPDWFSQKHCASQYSELLETTETPKRKRGEKGEVVETVEDVIVRKLTAERVEELKKVIKETQERYRRLKRDAELIQAGHMDSRLDELCNDIATKKKLEEEEAEVKRKATDAAYQAVKTPPRRLPTVMVRSPIDSASPGGDYPLGDLTPTTMEEATSGVTPGTLPSTPVTSFPGIPDTLPPGSAPLEAPMTPVTDDSPQKKMLGQKATPPPSPLLSELLKKGSLLPTSPRLVNESEMAVASGHLNSTGVLLEVGGVLPMIHGGEIQQTPNTVAASPAASVSQPDNCVPMEAVGDPHTVTVSMDSSEISMIINSIKEECFRSGVAEAPVGSKAPSIDGKEELDLAEKMDIAVSYTGEELDFETVGDIIAIIEDKVDDHPEVLDVAAVEAALSFCEENDDPQSLPGPWEHPIQQERDKPVPLPAPEMTVKQERLDFEETENKGIHELVDIREPSAEIKVEPAEPEPVISGAEIVAGVVPATSMEPPELRSQDLDEELGSTAAGEIVEADVAIGKGDETPLTNVKTEASPESMLSPSHGSNPIEDPLEAETQHKFEMSDSLKEESGTIFGSQIKDAPGEDEEEDGVSEAASLEEPKEEDQGEGYLSEMDNEPPVSESDDGFSIHNATLQSHTLADSIPSSPASSQFSVCSEDQEAIQAQKIWKKAIMLVWRAAANHRYANVFLQPVTDDIAPGYHSIVQRPMDLSTIKKNIENGLIRSTAEFQRDIMLMFQNAVMYNSSDHDVYHMAVEMQRDVLEQIQQFLATQLIMQTSESGISAKSLRGRDSTRKQDASEKDGGTRGRRCAIEADMKMKK

SEQ ID NO: 77973 - protein, 163 aa, Homo sapiens
  MOD_RES (1)..(1): Any amino acid
XSVVLSFDSAGQTLGSEYDRLGFLLNLDSKLPAELATKYANFSEGACKPGYASALMTAIFPRFSKPAPMFLDDSFRKWARIREFVPPFGIKGQDNLIKAILSVTKEYRLTPALDSLRCRRCIIVGNGGVLANKSLGSRIDDYDIVVSPGRTISSERKSFCGSW

SEQ ID NO: 77974 - protein, 133 aa, Homo sapiens
MAVSTVFSTSSLMLALSRHSLLSPLLSVTSFRRFYRGDSPTDSQKDMIEIPLPPWQERTDESIETKRARLLYESRKRGMLENCILLSLFAKEHLQHMTEKQLNLYDRLINEPSNDWDIYYWATGSSDSPASAS

SEQ ID NO: 77975 - protein, 18 aa, Homo sapiens
  MOD_RES (1)..(1): Any amino acid
XKEGNRKFTFGMGTQVRV

SEQ ID NO: 77976 - protein, 207 aa, Homo sapiens
MEEEGGSSGGAAGTSADGGDGGEQLLTVKHELRTANLTGHAEKVGIENFELLKVLGTGAYGKVFLVRKISGHDTGKLYAMKVLKKATIVQKAKTTEHTRTERQVLEHIRQSPFLVTLHYAFQTETKLHLILDYINGGELFTHLSQRERFTEHEVQIYVGEIVLALEHLHKLGIIYRDIKLENILLDSNGHVVLTDFGLSKEFVADET

SEQ ID NO: 77977 - protein, 479 aa, Homo sapiens
ESDEALGPTMMSWNAVEKLCAKSANAIETKGFNKKDLELALSPIHNSSALPTTGRSCVNLAKKCFSGEVSWEAVELDVNNINMDTDTSQLGFHQSNQWAVDSGGISEEHLGKRSLKRNFELVDSSPCKKIIQNKKTCVEYKHNEMTNCYTNQNTGLTVEVQDLKLSVHKSQQNDCANKENIVNSFTDKQQTPEKLPIPMIAKNLMCELDEDCEKNSKRDYLSSSFLCSDDDRASKNISMNSDSSFPGISIMESPLESQPLDSDRSIKESSFEESNIEDPLIVTPDCQEKTSPKGVENPAVQESNQKMLGPPLEVLKTLASKRNAVAFRSFNSHINASNNSEPSRMNMTSLDAMDISCAYSGSYPMAITPTQKRRSCMPHQQTPNQIKSGTPYRTPKSVRRGVAPVDDGRILGTPDYLAPELLLGRAHELKRHPLFSDVDWENLQHQTMPFIPQPDDETDTSYFEARNTAQHLTVSGFSL

SEQ ID NO: 77978 - protein, 103 aa, Homo sapiens
MITLTELKCLADAQSSYHILKPWWDVFWYYITLIMLLVAVLAGALQLTQSRVLCCLPCKVEFDNHCAVPWDILKASMNTSSNPGTPLPLPLRIQNDLHRQQYS

SEQ ID NO: 77979 - protein, 524 aa, Homo sapiens
MPLLDGDLEGSGKHSSRKVDSPFGPGSPSKGFFSRGPQPRPSSPMSAPVRPKTSPGSPKTVFPFSYQESPPRSPRRMSFSGIFRSSSKESSPNSNPATSPGGIRFFSRSRKTSGLSSSPSTPTQVTKQHTFPLESYKHEPERLENRIYASSSPPDTGQRFCPSSFQSPTRPPLASPTHYAPSKAAALAAALGPAEAGMLEKLEFEDEVEDSESGVYMRFMRSHKCYDIVPTSSKLVVFDTTLQVKKAFFALVANGVRAAPLWESKKQSFVGMLTITDFINILHRYYKSPMVQIYELEEHKIETWRELYLQETFKPLVNISPDASLFDAVYSLIKNKIHRLPVIDPISGNALYILTHKRILKFLQLFMSDMPKPAFMKQNLDELGIGTYHNIAFIHPDTPIIKALNIFVERRISALPVVDESGKVVDIYSKFDVINLAAEKTYNNLDITVTQALQHRSQYFEGVVKCNKLEILETIVDRIVRAEVHRLVVVNEADSIVGIISLSDILQALILTPAGAKQKETETE

SEQ ID NO: 77980 - protein, 146 aa, Homo sapiens
  MOD_RES (1)..(1): Any amino acid
XYMFLVKWQDLSEKVVYRRFTEIYEFHRWDFAMLPRLVSNSWTQVILPPQPPKLLGLQKTLKEMFPIEAGAINPENRIIPHLPAPKWFDGQRAAENRQGTLTEYCSTLMSLPTKISRCPHLLDFFKVRPDDLKLPTDNQTKKPETY

SEQ ID NO: 77981 - protein, 690 aa, Homo sapiens
  MOD_RES (1)..(1): Any amino acid
XACAEIPVNQWPELIPQLVANVTNPNSTEHMKESTLEAIGYICQDIDPEQLQDKSNEILTAIIQGMRKEEPSNNVKLAATNALLNSLEFTKANFDKESERHFIMQVVCEATQCPDTRVRVAALQNLVKIMSLYYQYMETYMGPALFADENDDDDDWNPCKAAGVCLMLLATCCEDDIVPHVLPFIKEHIKNPDWRYRDAAVMAFGCILEGPEPSQLKPLVIQAMPTLIELMKDPSVVVRDTAAWTVGRICELLPEAAINDVYLAPLLQCLIEGLSAEPRVASNVCWAFSSLAEAAYEAADVADDQEEPATYCLSSSFELIVQKLLETTDRPDGHQNNLRSSAYESLMEIVKNSAKDCYPAVQKTTLVIMERLQQVLQMESHIQSTSDRIQFNDLQSLLCATLQNVLRKVQHQDALQISDVVMASLLRMFQSTAGSGGVQEDALMAVSTLVEVLGGEFLKYMEAFKPFLGIGLKNYAEYQVCLAAVGLVGDLCRALQSNIIPFCDEVMQLLLENLGNENVHRSVKPQILSVFGDIALAIGGEFKKYLEVVLNTLQQASQAQVDKSDYDMVDYLNELRESCLEAYTGIVQGLKGDQENVHPDVMLVQPRVEFILSFIDHIAGDEDHTDGVVACAAGLIGDLCTAFGKDVLKLVEARPMIHELLTEGRRSKTNKAKTLATWATKELRKLKNQA

SEQ ID NO: 77982 - protein, 147 aa, Homo sapiens
  MOD_RES (1)..(1): Any amino acid
XLTSLPALAVPPPTPTKTAPPALVNGLELSEPRSWLYLEEMVNSLLNTAQQLKTLFEQAKHASTYREAATNQAKIHADAERKEQSCVNCGREAMSECTGCHKVNYCSTFCQRKDWKDHQHICGQSAAVTVQADEVHVAESVMEKVTV

SEQ ID NO: 77983 - protein, 248 aa, Homo sapiens
MSGLGRSRRGGRSRVDQEERWSLSCRKEQGKFYDHLLRDCISCASICGQHPKQCAYFCENKLRSPVNLPPELRRQRSGEVENNSDNSGRYQGLEHRGSEASPALPGLKLSADQVALVYSTLGLCLCAVLCCFLVAVACFLKKRGDPCSCQPRSRPRQSPAKSSQDHAMEAGSPVSTSPEPVETCSFCFPECRAPTQESAVTPGTPDPTCAGRKTKPPPVLTAGNCGVHRPPPETSTGSPRGQRLLWTQ

SEQ ID NO: 77984 - protein, 149 aa, Homo sapiens
MVTFKDVAVVFTEEELGLLDSVQRKLYRDVMLENFRNLLLVAHQPFKPDLISQLEREEKLLMVETETPRDGCSGRKNQQKMESIQEVTVSYFSPKELSSRQTWQQSAGGLIRCQDFLKVFQGKNSQLQEQGNSLGQVWAGIPVQISEDK

SEQ ID NO: 77985 - protein, 234 aa, Homo sapiens
  MOD_RES (1)..(1): Any amino acid
XGLRRAVKVQCTWSEHDILKSGHLYIIKSFLPEVVNTWSSIYKEDTVLHLCLREIQQQRAAQKLTFAFNQMKPKSIPYSPRFLEVFLLYCHSAGQWFAVEECMTGEFRKYNNNNGDEIIPTNTLEEIMLAFSHWTYEYTRGELLVLDLQGVGENLTDPSVIKAEEKRSCDMVFGPANLGEDAIKNFRAKHHCNSCCRKLKLPEMRSHCVTQAGLELTSSNPQCLSLTKCWDYQC

SEQ ID NO: 77986 - protein, 985 aa, Homo sapiens
MSWFNASQLSSFAKQALSQAQKSIDRVLDIQEEEPSIWAETIPYGEPGISSPVSGGWDTSTWGLKSNTEPQSPPIASPKAITKPVRRTVVDESENFFSAFLSPTDVQTIQKSPVVSKPPAKSQRPEEEVKSSLHESLHIGQSRTPETTESQVKDSSLCVSGETLAAGTSSPKTEGKHEETVNKESDMKVPTVSLKVSESVIDVKTTMESISNTSTQSLTAETKDIALEPKEQKHEDRQSNTPSPPVSTFSSGTSTTSDIEVLDHESVISESSASSRQETTDSKSSLHLMQTSFQLLSASACPEYNRLDDFQKLTESCCSSDAFERIDSFSVQSLDSRSVSEINSDDELSGKGYALVPIIVNSSTPKSKTVESAEGKSEEVNETLVIPTEEAEMEESGRSATPVNCEQPDILVSSTPINEGQTVLDKVAEQCEPAESQPEALSEKEDVCKTVEFLNEKLEKREAQLLSLSKEKALLEEAFDNLKDEMFRVKEESSSISSLKDEFTQRIAEAEKKVQLACKERDAAKKEIKNIKEELATRLNSSETADLLKEKDEQIRGLMEEGEKLSKQQLHNSNIIKKLRAKDKENENMVAKLNKKVKELEEELQHLKQVGDLRLALQRTEQAAARKEDYLRHEIGELQQRLQEAENRNQELSQSVSSTTRPLLRQIENLQATLGSQTSSWEKLEKNLSDRLGESQTLLAAAVERERAATEELLANKIQMSSMESQNSLLRQENSRFQAQLESEKNRLCKLEDENNRYQVELENLKDEYVRTLEETRKEKTLLNSQLEMERMKVEQERKKAIFTQETIKEKERKPFSVSSTPTMSRSSSISGVDMAGLQTSFLSQDESHDHSFGPMPISANGSNLYDAVRMGAGSSIIENLQSQLKLREGEITHLQLEIGNLEKTRSIMAEELVKLTNQNDELEEKVKEIPKLRTQLRDLDQRYNTILQMYGEKAEEAEELRLDLEDVKNMYKTQIDELLRQSLS

SEQ ID NO: 77987 - protein, 66 aa, Homo sapiens
MNKLQPGSVPKINRSMQNWHQLENLSNFIKAMVSYGMNPVDLFEANDLFESGNMTQVQVSLLALAG

SEQ ID NO: 77988 - protein, 191 aa, Homo sapiens
  MOD_RES (1)..(1): Any amino acid
XATGLLSHVEEGLDSDATDSSSDDDLDEYTLRKNVAVNCSTEWKWLVDRARVGSRWTWLQAQISDLECKIQQLTDIHRQIRASKGIVVLEECQLPKDILKKQMQFADQAASLNILGNPQVPQECQDPVPEQDFEMSPSSPTLLLRNIEKQSAQLTEIINSLIAPLNLSPTSSPLSSKSCSHKCLANGIYRR

SEQ ID NO: 77989 - protein, 128 aa, Homo sapiens
MGSGARFPSGTLRVRWLLLLGLVGPVLGAARPGFQQTSHLSSYEIITPWRLTRERREAPRPYSKQVSYVIQAEGKEHIIHLERNKDLLPEDFVVYTYNKEGTLITDHPNIQVMYFSLDPIANFKTIII

SEQ ID NO: 77990 - protein, 47 aa, Homo sapiens
MSIMEMQAMEVNTSASEILYSAPPGDPLSTNYSLAPNTPINQNVSLH

SEQ ID NO: 77991 - protein, 229 aa, Homo sapiens
  MOD_RES (1)..(1): Any amino acid
XPETVLQSKPENTTSQPLSNQRVVEVAIPHVGKFMIESKEGGYDDEIMMTPNMQGIIMAIGKSRSVYDRCGPEAGFFKAIKLEYARLVKLAQEDTPPETDYRLHHVVVYFIQNQAPKKIIEKTLLEQFGDRNLSFDERCHNIMKVAQAKLEMIKPEEVNLEEYEEWHQDYRKFRETTMYLIIGLENFQRESYIDSLLFLICAYQNNKELLSKGLYRGHDEELISHYRRE

SEQ ID NO: 77992 - protein, 111 aa, Homo sapiens
MALRHLALLAGLLVGVASKSMENTDTDVPAPEVLTRSTAGVRGACASQRGALRCLLGPAARVLCGCGGRQRQLPRRKSVWSRLLQALERGRERQLRPLWERNPPSLQRLRV

SEQ ID NO: 77993 - protein, 237 aa, Homo sapiens
  MOD_RES (1)..(1): Any amino acid
XRLPVARKPLSERLGRDTKKHLVVPGDTITTDTGFMRGHGTYMGEEKLIASVAGSVERVNKLICVKALKTRYIGEVGDIVVGRITEVQQKRWKVETNSRLDSVLLLSSMNLPGGELRRRSAEDELAMRGFLQEGDLISGVLVQVSPSLVKRQKTHFHDLPCGASVILGNNGFIWIYPTPEHKEEEAGGFIANLEPVSLADREVISRLRNCIISLVTQRMMLYDTSILYCYEASLPHQ

SEQ ID NO: 77994 - protein, 119 aa, Homo sapiens
MGEKGCTVTELSDFLQAMEHTEVLQLLSPPGIKITVNPESKAVLAGQFVKLCCRATGHPFVQYQWFKMNKEIPNGNTSELIFNAVHVKDAGFYVCRVNNNFTFEFSQWSQLDVCDIPES

SEQ ID NO: 77995 - protein, 168 aa, Homo sapiens
MGTFFAFMEKKNEVELGELLLSLNYLPSAGRLNVDVIRAKQLLQTDVSQGSDPFVKIQLVHGLKLVKTKKTSFLRGTIDPFYNESFSFKVPQEELENASLVFTVFGHNMKSSNDFIGRIVIGQYSSGPSETNHWRRMLNTHRTAVEQWHSLRSRAECDRVSPASLEVT

SEQ ID NO: 77996 - protein, 228 aa, Homo sapiens
MSGGLAPSKSTVYVSNLPFSLTNNDLYRIFSKYGKVVKVTIMKDKDTRKSKGVAFILFLDKDSAQNCTRAINNKQLFGRVIKASIAIDNGRAAEFIRRRNYFDKSKCYECGESGHLSYACPKNMLGEREPPKKKEKKKKKKAPEPEEEIEEVEESEDEGEDPALDSLSQAIAFQVIGFVLFFESQQAKIEEEQKKWKPSSGVPSTSDDSRRPRIKKSTYFSDEEELSD

SEQ ID NO: 77997 - protein, 39 aa, Homo sapiens
MIKTQESLTLEDVAVEFSWEEWQLLDTAQKNLYRDVMVE

SEQ ID NO: 77998 - protein, 342 aa, Homo sapiens
MAVARAALGPLVTGLYDVQAFKFGDFVLKSGLSSPIYIDLRGIVSRPRLLSQVADILFQTAQNAGISFDTVCGVPYTALPLATVICSTNQIPMLIRRKETKDYGTKRLVEGTINPGETCLIIEDVVTSGSSVLETVEVLQKEGLKVTDAIVLLDREQGGKDKLQAHGIRLHSVCTLSKMLEILEQQKKVDAETVGRVKRFIQENVFVAANHNGSPLSIKEAPKELSFGARAELPRIHPVASKLLRLMQKKETNLCLSADVSLARELLQLADALGPSICMLKTHVDILNDFTLDVMKELITLAKCHEFLIFEDRKFADIGNTVKKQYEGKCIIQESARIRNPA

SEQ ID NO: 77999 - protein, 43 aa, Homo sapiens
LLSIERLNLYAASLRVCFLLFESMREHLKFQMELRELPAMGKL

SEQ ID NO: 78000 - protein, 107 aa, Homo sapiens
  MOD_RES (1)..(1): Any amino acid
XLGEINVIGEPFLNVNCEHIKSFDKNLYRQLISYPQEVIPTFDMAVNEIFFDRYPDSILEHQIQVRPFNALKTKNMRNLNPEDQASGVSGRHACRADTTHSYPVCSQ

SEQ ID NO: 78001 - protein, 232 aa, Homo sapiens
MPGLQSTFLAMDTEEGVEVVWNELHFGDRKAFAAHEEKIQTVFEQLVLVDHPNIVKLHKYWLDTSEACARVIFITEYVSSGSLKQFLKKTKKNHKAMNARAWKRWCTQILSALSFLHACSPPIIHGNLTSDTIFIQHNGLIKIGSVWHRIFSNALPDDLRSPIRAEREELRNLHFFPPEYGEVADGTAVDIFSFGMCALEMAVLEIQTNGDTRVTEEAIARARHSLSDPNMR

SEQ ID NO: 78002 - protein, 339 aa, Homo sapiens
MVAMAEAEAGVAVEVRGLPPAVPDELLTLYFENRRRSGGGPVLSWQRLGCGGVLTFREPADVRVLEEQAQNLGLEGTLVSLARVPQARAVRVVGDGASVDLLLLELYLENERRSGGGPLEDLQRLPGPLGTVASFQQWQVAERVLQQEHRLQGSELSLVPHYDILEPEELAENTSGGDHPSTQGPRATKHALLRTGGLVTALQGAGTVTMGSGEEPGQSGASLRTGPMVQGRGIMTTGSGQEPGQSGTSLRTGPMGSLGQAEQVSSMPMGSLEHEGLVSLRPVGLQEQEGPMSLGPVGSAGPVETSKGLLGQEGLVEIAMDSPEQEGLVGPMEITMGSL

SEQ ID NO: 78003 - protein, 91 aa, Homo sapiens
MWPGNAWRAALFWVPRGRRAQSALAQLRGILEGELEGIRGAGTWKSERVITSRQGPHIRVDGVSGEHPQESRSKNSPLPPAGGCHPLSQLL

SEQ ID NO: 78004 - protein, 149 aa, Homo sapiens [sequence omitted]

SEQ ID NO: 78005 - protein, 132 aa, Homo sapiens
PAPELGSPGAVRPRVGSCAPGPMELRVSNTSCENAGMAERSQGRKVPCSTSTAPPKKSCARLSMTSALRCPAMPPFTAGRKESGRTMASTSAWAWHSCLASSSAAASSSRRKASCDSWPREPLELWMEASAT

SEQ ID NO: 78006 - protein, 128 aa, Homo sapiens
  MOD_RES (1)..(1): Any amino acid
XTPGGRGDMKYGIYAVENEHMNRLQSQRAMLLQGTESLNRATQSIERSHRIATETDQIGSEIIEELGEQRDQLERTKSRSDNQQAAAFHYHLTGARHPGRPGLLQILSQPLNFYREGFVDQNFDLVNA

SEQ ID NO: 78007 - protein, 130 aa, Homo sapiens
MITQYWPDRETAPGDISPYTIPEEDRHCIRENIVEAIIHSPELIRVQLTTCIHHIIKHDYPSRWTAIVDKIGFYLQSDNSACWLGILLCLYQLVKNYEYKKPEERSPLVAAMQHFLPVLKDRFIQLLSDQ

SEQ ID NO: 78008 - protein, 89 aa, Homo sapiens
MAAGGSTQQRRREMAAASAAAISGAGRCRLSKIGATRRPPPARVRVAVRLRPFVDGTAGASDPPCVRGMDSCSLEIANWRNHQETLKYQ

SEQ ID NO: 78009 - protein, 159 aa, Homo sapiens
  MOD_RES (1)..(1): Any amino acid
XDNFIESSFWNFDALFQPQQHPARDQHDTFFLRDPAEALQLPMDYVQRVKRTHSQGGYGSQGYKYNWKLDEARKNLLRTHTTSASARALYRLAQKKPFTPVKYFSIDRVFRNETLDATHLAEFHQIEGVVADHGLTLGQPPPSSFPPVPGPESQGQRTG

SEQ ID NO: 78010 - protein, 584 aa, Homo sapiens
MDTCGVGYVALGEAGPVGNMTVVDSPGQEVLNQLDVKTSSEMTSAEASVEMSLPTPLPGFEDSPDQRRLPPEQESLSRLEQPDLSSEMSKVSKPRASKPGRKRGGRTRKGPKRPQQPNPPSAPLVPGLLDQSNPLSTPMPKKRGRKSKAELLLLKLSKDLDRPESQSPKRPPEDFETPSGERPRRRAAQVALLYLQELAEELSTALPAPVSCPEGPKVSSPTKPKKIRQPAACPGGEEVDGAPRDEDFFLQVEAEDVEESEGPSESSSEPEPVVPRSTPRGSTSGKQKPHCRGMAPNGLPNHIMAPVWKCLHLTKDFREQKHSYWEFAEWIPLAWKWHLLSELEAAPYLPQEEKSPLFSVQREGLPEDGTLYRINRFSSITAHPERWDVSFFTGGPLWALDWCPVPEGAGASQYVALFSSPDMNETHPLSQLHSGPGLLQLWGLGTLQQESCPGNRAHFVYGIACDNGCIWDLKFCPSGAWELPGTPRKAPLLPRLGLLALACSDGKVLLFSLPHPEALLAQQPPDAVKPAIYKVQCVATLQVGSMQATDPSECGQCLSLAWMPTRPHQHLAAGYYNGKNQNKT

SEQ ID NO: 78011 - protein, 218 aa, Homo sapiens
MSGRSGKKKMSKLSRSARAGVIFPVGRLMRYLKKGTFKYRISVGAPVYMAAVIEYLAAPCSEKSCWASPDHQRDSQHQQAEILELAGNAARDNKKARIAPRHILLAVANDEELNQLLKGVTIASGGVLPRIHPELLAKKRGTKGKSETILSPPPEKRGRKATSGKKGGKKSKAAKPRTSKKSKPKDSDKEGTSNSTSEDGPGDGFTILSSKSLVLGQK

SEQ ID NO: 78012 - protein, 137 aa, Homo sapiens
MEKLAASTEPQGPRPVLGRESVQVPDDQDFRSFRSECEAEVGWNLTYSRAGVSVWVQAVEMDRTLHKIKCRMECCDVPAETLYDVLHDIEYRKKWDSNVIETFDIARLTVNADVGYYSWRCPKPLKNRDVITLRSWL

SEQ ID NO: 78013 - protein, 116 aa, Homo sapiens
  MOD_RES (1)..(1): Any amino acid
XLAKDEALKRQSSLGLSFFNSILAHGDLRNNKLNQLSVNLWHLAQRHGCADTRTMGLDMLPGTVTAIFVLALMKPTLEMMERMLPWRAVEPGPNQAFLPRETELSGHRGLPGLGCL

SEQ ID NO: 78014 - protein, 25 aa, Homo sapiens
MLARVTRKMLRHAKCFQRLAIFGSV

SEQ ID NO: 78015 - protein, 268 aa, Homo sapiens
MSRFPAVAGRAPRRQEEEEKGCTSQEGGTTPTFPIQKQRKKIIQAVRDNSFLIVTGNTGSGKTTQLPKYLYEAGFSQHGMIGVTQPRKVAAISVAQRVAEEMKCTLGSKVGYQVRFDDCSSKETAIKYMTDGCLLKHILGDPNLTKFSVIILDEAHERTLTTDILFGLLKKLFQEKSPNRKEHLKVVVMSATMELAKLSAFFGNCPIFDIPGRLYPVREKFCNLIGPRDRENTAYIQAIVKVTMDIHLNEMAGDILVFLTGQFEIEKS

SEQ ID NO: 78016 - protein, 442 aa, Homo sapiens
MSALGAVIALLLWGQLFAVDSGNDVTDIADDGCPKPPEIAHGYVEHSVRYQCKNYYKLRTEGDGVYTLNDKKQWINKAVGDKLPECEADDGCPKPPEIAHGYVEHSVRYQCKNYYKLRTEGDGEAMPCSLPHVNLRVTFTSPADVGKEGMLMMMSPSPRVYTLNNEKQWINKAVGDKLPECEAVCGKPKNPANPVQRILGGHLDAKGSFPWQAKMVSHHNLTTGATLINEQWLLTTAKNLFLNHSENATAKDIAPTLTLYVGKKQLVEIEKVVLHPNYSQVDIGLIKLKQKVSVNERVMPICLPSKDYAEVGRVGYVSGWGRNANFKFTDHLKYVMLPVADQDQCIRHYEGSTVPEKKTPKSPVGVQPILNEHTFCAGMSKYQEDTCYGDAGSAFAVHDLEEDTWYATGILSFDKSCAVAEYGVYVKVTSIQDWVQKTIAEN

SEQ ID NO: 78017 - protein, 71 aa, Homo sapiens
MAGQPAATGSPSADKDGMEPNVVARISQWADDHLRLVRNISTGMAIAGIMLLLRSIRLKSHVVLCWLSWLE

SEQ ID NO: 78018 - protein, 116 aa, Homo sapiens
MTEEYRVPDGMVGLIIGRGGEQINKIQQDSGCKVQISPDSGGLPERSVSLTGAPESVQKAKMMLDDIVSRGRGGPPGQFHDNANGGQNGTVQEIMIPAGKAGLVIGKGGETIKQLQ

SEQ ID NO: 78019 - protein, 53 aa, Homo sapiens
  MOD_RES (1)..(1): Any amino acid
XGGGVLTLLVEVSNIFLTIRMMMKISNAQDHLLYRVNKGPWAPSCWVSCSCWT

SEQ ID NO: 78020 - protein, 157 aa, Homo sapiens
MADTPRDAGLKQAPASRNEKAPVDFGYVGIDSILEQMRRKAMKQGFEFNIMVVGQSGLGKSTLINTLFKSKISRKSVQPTSEERIPKTIEIKSITHDIEEKGVRMKLTVIDTPGFGDHINNENCWQPIMKFINDQYEKYLQEEVNINRKKRIPDTRV

SEQ ID NO: 78021 - protein, 105 aa, Homo sapiens
MVLAPLPDPGPPSLAVAPEPCPQPLRSPSLDNPTPFPNLGPSENPLKRLLVPGEEWEFEVTAFYRGRQVFQQTISCPEGLRLVGSEVGDRTLPGWPVTLPDPGMS

SEQ ID NO: 78022 - protein, 139 aa, Homo sapiens
  MOD_RES (1)..(1): Any amino acid
XDNMYSCEKCKKLRNGVKFCKVQNFPEILCIHLKRFRHELMFSTKISTHVSFPLEGLDLQPFLAKDSPAQIVTYDLLSVICHHGTASSGHYIAYCRNNLNNLWYEFDDQSVTEVSESTVQNAEAYVLFYRCSSKKSWLY

SEQ ID NO: 78023 - protein, 102 aa, Homo sapiens
  MOD_RES (1)..(1): Any amino acid
XTDEQRQYYVNQFKTIQPDLNGFIPGSAAKEFFTKSKLPILELSHIWELSDFDKDGALTLDEFCAAFHLVVARKNGYDLPEKLPESLMPKLIDLEDSAALML

SEQ ID NO: 78024 - protein, 141 aa, Homo sapiens
MDPLFQQTHKQVHEIQSCMGRLETADKQSVHKNEIQASIDQIFSRLERLEILSSKEPPNKRQNARLRVDQLKYDVQHLQTALRNFQHRRHAREQQERQREELLSRTFTTNVSQARGEGRPALDRSWGLEFRSLSAICFGGV

SEQ ID NO: 78025 - protein, 911 aa, Homo sapiens
MKKASRSVGSVPKVSAISKTQTAEKIKPENSSSASTGGKLVKPGTAASLSKTKSSDDLLAGMAGGVTVTNGVKGKKSTCPSAAPSASAPAMTTVENKSKISTGTASSTKRSTSTGNKESSSTRERLRERTRLNQSKKLPSAGQGANDMALAKRSRSRTATECDVRMSKSKSDNQISDRAALEAKVKDLLTLAKTKDVEILHLRNELRDMRAQLGINEDHSEGDEKSEKETIMAHQPTDVESTLLQLQEQNTAIREELNQLKNENRMLKDRLNALGFSLEQRLDNSEKLFGYQSLSPEITPGNQSDGGGTLTSSVEGSAPGSVEDLLSQDENTLMDHQHSNSMDNLDSECSEVYQPLTSSDDALDAPSSSESEGIPSIERSRKGSSGNASEVSVACLTERIHQMEENQHSTSEELQATLQELADLQQITQELNSENERLGEEKVILMESLCQQSDKLEHFSRQIEYFRSLLDEHHISYVIDEDVKSGRYMELEQRYMDLAENARFEREQLLGVQQHLSNTLKMAEQDNKEAQEMIGALKERSHHMERIIESEQKGKAALAATLEEYKATVASDQIEMNRLKAQLENEKQKVAELYSIHNSGDKSDIQDLLESVRLDKEKAETLASSLQEDLAHTRNDANRLQDAIAKVEDEYRAFQEEAKKQIEDLNMTLEKLRSDLDEKETERSDMKETIFELEDEVEQHRAVKLHDNLIISDLENTVKKLQDQKHDMEREIKTLHRRLREESAEWRQFQADLQTAVVIANDIKSEAQEEIGDLKRRLHEAQEKNEKLTKELEEIKSRKQEEERGRVYNYMNAVERDLAALRQGMGLSRRSSTSSEPTPTVKTLIKSFDSASQVPNPAAAAIPRTPLSPSPMKTPPAAAVSPMQMESSSVAHAGMQWRDLGSLQPLPPGFK

SEQ ID NO: 78026 - protein, 37 aa, Homo sapiens
MKCFSRYLPYIFRPPNTILSSSCHTEGRILRLGAVCL

SEQ ID NO: 78027 - protein, 264 aa, Homo sapiens
MPDNRQPRNRQPRIRSGNEPRSAPAMEPDGRGAWAHSRAALDRLEKLLRCSRCTNILREPVCLGGCEHIFCSNCVSDCIGTGCPVCYTPAWIQDLKINRQLDSMIQLCSKLRNLLHDNELSGVKACLRRKVCEQEEKYEIPEGPRRSRLNREQLLPKLFDGCYFYLWGTFKHHPKDNLIKLVTAGGGQILSRKPKPDSDVTQTINTVAYHARPDSDQRFCTQYIIYEDLCNYHPERVRQGKVWKAPSSWFIDCVMSFELLPLDS

SEQ ID NO: 78028 - protein, 869 aa, Homo sapiens
MANSMNGRNPGGRGGNPRKGRILGIIDAIQDAVGPPKQAAADRRTVEKTWKLMDKVVRLCQNPKLQLKNSPPYILDILPDTYQHLRLILSKYDDNQKLAQLSENEYFKIYIDSLMKKSKRAIRLFKEGKERMYEEQSQDRRNLTKLSLIFSHMLAEIKAIFPNGQFQGDNFRITKADAAEFWRKFFGDKTIVPWKVFRQCLHEVHQISSGLEAMALKSTIDLTCNDYISVFEFDIFTRLFQPWGSILRNWNFLAVTHPGYMAFLTYDEVKARLQKYSTKPGSYIFRLSCTRLGQWAIGYVTGDGNILQTIPHNKPLFQALIDGSREGFYLYPDGRSYNPDLTGLCEPTPHDHIKVTQEQYELYCEMGSTFQLCKICAENDKDVKIEPCGHLMCTSCLTAWQESDGQGCPFCRCEIKGTEPIIVDPFDPRDEGSRCCSIIDPFGMPMLDLDDDDDREESLMMNRLANVRKCTDRQNSPVTSPGSSPLAQRRKPQPDPLQIPHLSLPPVPPRLDLIQKGIVRSPCGSPTGSPKSSPCMVRKQDKPLPAPPPPLRDPPPPPPERPPPIPPDNRLSRHIHHVESVPSRDPPMPLEAWCPRDVFGTNQLVGCRLLGEGSPKPGITASSNVNGRHSRVGSDPVLMRKHRRHDLPLEGAKVFSNGHLGSEEYDVPPRLSPPPPVTTLLPSIKCTGPLANSLSEKTRDPVEEDDDEYKIPSSHPVSLNSQPSHCHNVKPPVRSCDNGHCMLNGTHGPSSEKKSNIPDLSIYLKGDVFDSASDPVPLPPARPPTRDNPKHGSSLNRTPSDYDLLIPPLGEDAFDALPPSLPPPPPPARHSLIEHSKPPGSSSRPSSGQDLFLLPSDAPSLTAKIPLLI

SEQ ID NO: 78029 - protein, 278 aa, Homo sapiens
  MOD_RES (1)..(1): Any amino acid
XATSLSSVAYAFLPDSHSYTMQEFARRYFRRSQALLGQTDGGAAGKDTDSLVQYTKAPIQESLLSLSDDVSKLAVASFLALMRFMGDQSKPRGKDEMDLLYELLKLCQQEKLRDEIYCQVIKQVTGHPRPLMPYLTKFLQDSGPSQELARSSQEHLQRTVKYGGRRRMPPPGEMKAFLKGQAIRLLLIHLPGGVDYRTNIQTFTVAAEVQEELCRQMGITEPQEVQEFALFLIKEKSQLVRPLQPAEYLNSVVVDQDVSLHSRRLHWETPLHFDNSTY

SEQ ID NO: 78030 - protein, 129 aa, Homo sapiens
MAGPFSRLLSARPGLRLLALAGAGSLAAGFLLRPEPVRAASERRRLYPPSAEYPDLRKHNNCMASHLTPAVYARLCDKTTPTGWTLDQCIQTGVDNPGHPFIKTVGMVAGDEETYEVFADLFDPVIQER

SEQ ID NO: 78031 - protein, 76 aa, Homo sapiens
APTGWKNSVRHNLSLNKCFKKVDKERSQSIGKGSLWCIDPEYRQNLIQALKKTPYHPHPHVFNTPPTCPQAYQREG

SEQ ID NO: 78032 - protein, 225 aa, Homo sapiens
MFDRALKPFLQSCHLRMLTDPVDQCVAYHLGRVRESLPELQIEIIADYEVHPNRRPKILAQTAAHVAGAAYYYQRQDVEADPWGNQRISGVCIHPRFGGWFAIRGVVLLPGIEVPDLPPRKPHDCVPTRADRIALLEGFNFHWRDWTYRDAVTPQERYSEEQKAYFSTPPAQRLALLGLAQPSEKPSSPSPDLPFTTPAPKKPGNPSRARSWLSPRVSPPASPGP

SEQ ID NO: 78033 - protein, 391 aa, Homo sapiens
MKEPKSIIATKNKTKASSISLDHNSVSSSSENSDEPLNLTFIKKEFSNSNNLDNKSTNPVFSMNPFSAKPLYTALPPQSAFPPATFMPPVQTSIPGLRPYPGLDQMSFLPHMAYTYPTGAATFADMQQRRKYQRKQGFQGELLDGAQDYMSGLDDMTDSDSCLSRKKIKKTESGMYACDLCDKTFQKSSSLLRHKYEHTGKRPHQCQICKKAFKHKHHLIEHSRLHSGEKPYQCDKCGKRFSHSGSYSQHMNHRYSYCKREAEEREAAEREAREKGHLEPTELLMNRAYLQSITPQGYSDSEERESMPRDGESEKEHEKEGEDGYGKLGRQDGDEEFEEEEEESENKSMDTDPETIRDEEETGDHSMDDSSEDGKMETKSDHEEDNMEDGM

SEQ ID NO: 78034 - protein, 78 aa, Homo sapiens
FCAFLGSWLVPFAYLTVLDLSKSLSAALLTAALLTFASSCFSDTGCLTLSQYILLDPILMFFIMAAMLSMVKYNSCAD

SEQ ID NO: 78035 - protein, 398 aa, Homo sapiens
MSQDTEVDMKEVELNELEPEKQPMNAASGAAMSLAGAEKNGLVKIKVAEDEAEAAAAAKFTGLSKEELLKVAGSPGWVRTRWALLLLFWLGWLGMLAGAVVIIVRAPRCRELPAQKWWHTGALYRIGDLQAFQGHGAGNLAGLKGRLDYLSSLKVKGLVLGPIHKNQKDDVAQTDLLQIDPNFGSKEDFDSLLQSAKKKSIRVILDLTPNYRGENSWFSTQVDTVATKVKDALEFWLQAGVDGFQVRDIENLKDASSFLAEWQNITKGFSEDRLLIAGTNSSDLQQILSLLESNKDLLLTSSYLSDSGSTGEHTKSLVTQYLNATGNRWCSWSLSQARLLTSFLPAQLLRLYQLMLFTLPGTPVFSYGDEIGLDAAALPGQSYFLCFSAYGGSSHAVG

SEQ ID NO: 78036 - protein, 93 aa, Homo sapiens
VRFPLISKNFLSKTVQAEPLIQDNPECLKMVISGMRYHLLSPEDREELVDGTRPRRKKHDYRIALFGGSQPQSCRYFNPKLKRDAYSSTRAWK

SEQ ID NO: 78037 - protein, 152 aa, Homo sapiens
MESIYLQKHLGACLTQGLAEVARVRPVDPIEYLALWIYKYKENVTMEQLRQKEMAKLERERELALMEQEMMERLKAEELLLQQQQLALQLELEMQEKERQRIQELQRAQEQLGKEMRMNMENLVRNEDILHSEEATLDSGKTLAEISDRYGA

SEQ ID NO: 78038 - protein, 207 aa, Homo sapiens
MADIDNKEQSELDQDLDDVEEVEEEETGEETKLKARQLTVQMMQNPQILAALQERLDGLVETPTGYIESLPRVVKRRVNALKNLQVKCAQIEAKFYEEVHDLERKYAVLYQPLFDKRFEIINAIYEPTEEECEWKPDEEDEISVSTNFILEELKEKAKIEDEKKDEEKEDPKGIPEFWLTVFKNVDLLSDMVQEHDEPILKHLKDIK

SEQ ID NO: 78039 - protein, 688 aa, Homo sapiens
MLFNSVLRQPQLGVLRNAPNMEHVLAVANEEGFVRLYNTESQSFRKKCFKEWMAHWNAVFDLAWVPGELKLVTAAGDQTAKFWDVKAGELIGTCKGHQCSLKSVAFSKFEKAVFCTGGRDGNIMVWDTRCNKKDGFYRQVNQISGAHNTSDKQTPSKPKKKQNSKGLAPSVDFQQSVTVVLFQDENTLVSAGAVDGIIKVWDLRKNYTAYRQEPIASKSFLYPGSSTRKLGYSSLILDSTGSTLFANCTDDNIYMFNMTGLKTSPVAIFNGHQNSTFYVKSSLSPDDQFLVSGSSDEAAYIWKVSTPWQPPTVLLGHSQEVTSVCWCPSDFTKIATCSDDNTLKIWRLNRGLEEKPGGDKLSTVGWASQKKKESRPGLVTVTSSQSTPAKAPRAKCNPSNSSPSSAACAPSCAGDLPLPSNTPTFSIKTSPAKARSPINRRGSVSSVSPKPPSSFKMSIRNWVTRTPSSSPPITPPASETKIMSPRKALIPVSQKSSQAEACSESRNRVKRRLDSSCLESVKQKCVKSCNCVTELDGQVENLHLDLCCLAGNQEDLSKDSLGPTKSSKIEGAGTSISEPPSPISPYASESCGTLPLPLRPCGEGSEMVGKENSSPENKNWLLAMAAKRKAENPSPRSPSSQTPNSRRQSGKKLPSPVTITPSSMRKICTYFHRKSQEDFCGPEHSTEL

SEQ ID NO: 78040 - protein, 189 aa, Homo sapiens
MKKKMNEWSLGRGGSQADTQESANPFNARIPCSPRPQRACIRSWDVDPGVCNLDEQLKVFVSRHSATFSSIVKGQRSLHHRGDNLETLVLLNPSDKSLYDELRNLLLDPASHKLLVLAGPCLEETGELLLQTGGFSPHHFLQVLKDREIRDILATTPPPVQPPILTITCPTFGDWAQLAPAVPGLQGAL

SEQ ID NO: 78041 - protein, 68 aa, Homo sapiens
  MOD_RES (1)..(1): Any amino acid
XRPRLSEPQGSGRQGNSLGASDGVDNTVRPGDQGSSSQPNSEERGENTSYRMEEKSDFMLEKLETKSV

SEQ ID NO: 78042 - protein, 184 aa, Homo sapiens
MAKQLQARRLDGIDYNPWVEFVKLASEHDVVNLGQGFPDFPPPDFAVEAFQHAVSGDFMLNQYTKTFGYPPLTKILASFFGELLGQEIDPLRNVLVTVGGYGALFTAFQALVDEGDEVIIIEPFFDCYEPMTMMAGGRPVFVSLKPGPIQNGELGSSSNWQLDPMELAGKFTSRTKALVLNTPN

SEQ ID NO: 78043 - protein, 131 aa, Homo sapiens
MSQVTFSDVAIDFSHEEWACLDSAQRDLYKDVMVQNYENLVSVGLSVTKPYVIMLLEDGKEPWMMEKKLSKAYPFPLSHSVPASVNFGFSALFEHCSEVTEIFELSELCVFWVLHFLSNSPNSTVEAFFKK

SEQ ID NO: 78044 - protein, 139 aa, Homo sapiens
MAELNTHVNVKEKIYAVRSVVPNKSNNEIVLVLQQFDFNVDKAVQAFVDGSAIQVLKEWNMTGKKKNNKRKRSKSKQHQGNKDAKDKVERPEAGPLQPQPPQIQNGPMNGCEKDSSSTDSANEKPALIPREKKISILEE

SEQ ID NO: 78045 - protein, 303 aa, Homo sapiens
MFRAAAPGQLRRAASLLRFQSTLVIAEHANDSLAPITLNTITAATRLGGEVSCLVAGTKCDKVAQDLCKVAGIAKVLVAQHDVYKGLLPEELTPLILATQKQFNYTHICAGASAFGKNLLPRVAAKLEVAPISDIIAIKSPDTFVRTIYAGNALCTVKCDEKVKVFSVRGTSFDAAATSGGSASSEKASSTSPVEISEWLDQKLTKSDRPELTGAKVVVSGVGASRAAVDAGFVPNDMQVGQTGKIVAPELYIAVGISGAIQHLAGMKDSKTIVAINKDPEAPIFQVADYGIVADLFKVVPEM

SEQ ID NO: 78046 - protein, 134 aa, Homo sapiens
MWGFLKRPVVVTADINLSLVALTGMGLLSRLWRLTYPRAVVECSHHSVKANAFGISVNIFQSIGRVVLPEVLQLPKAQPFFSELVVLANTDRGRLFLCSGHQVHGCVHVRARAGCCSCPCLAPAWRPDFVQCRC

SEQ ID NO: 78047 - protein, 50 aa, Homo sapiens
MKVFFLFAVLFCLVQTNSVHISHQEARGPSFKICVGFLGPRWARGCSTGN

SEQ ID NO: 78048 - protein, 42 aa, Homo sapiens
MLENLALISSLDCPLHLCQFPDLSPCWRVCLERLLSARSALW

SEQ ID NO: 78049 - protein, 117 aa, Homo sapiens
MRSAVLKSLQPGSLPDCKAALGGSGNISTSPFWSRRHSEGQDTGTRAVLLYGAGARVCGSVTPSSFGGKSAAFGFLQWWAKDSPPRCSVESWQCPLWKTGTWCKPWEKVPMEKFNLL

SEQ ID NO: 78050 - protein, 145 aa, Homo sapiens
MADMQNLVERLERAVGRLEAVSHTSDMHRGYADSPSKAGAAPYVQAYIKEFHTTGLAWSKTGPVAKELSGLPSGPSAGSCPPPPPPCPPPPPVSTISCSYESASRSSLFAQINQGESITHALKHVSDDMKTHKNPALKAQSGPVR

SEQ ID NO: 78051 - protein, 748 aa, Homo sapiens
MSQWYELQQLDSKFLEQVHQLYDDSFPMEIRQYLAQWLEKQDWEHAANDVSFATIRFHDLLSQLDDQYSRFSLENNFLLQHNIRKSKRNLQDNFQEDPIQMSMIIYSCLKEERKILENAQRFNQAQSGNIQSTVMLDKQKELDSKVRNVKDKVMCIEHEIKSLEDLQDEYDFKCKTLQNREHETNGVAKSDQKQEQLLLKKMYLMLDNKRKEVVHKIIELLNVTELTQNALINDELVEWKRRQQSACIGGPPNACLDQLQNWFTIVAESLQQVRQQLKKLEELEQKYTYEHDPITKNKQVLWDRTFSLFQQLIQSSFVVERQPCMPTHPQRPLVLKTGVQFTVKLRLLVKLQELNYNLKVKVLFDKDVNERNTVKGFRKFNILGTHTKVMNMEESTNGSLAAEFRHLQLKEQKNAGTRTNEGPLIVTEELHSLSFETQLCQPGLVIDLETTSLPVVVISNVSQLPSGWASILWYNMLVAEPRNLSFFLTPPCARWAQLSEVLSWQFSSVTKRGLNVDQLNMLGEKLLGPNASPDGLIPWTRFCKENINDKNFPFWLWIESILELIKKHLLPLWNDGCIMGFISKERERALLKDQQPGTFLLRFSESSREGAITFTWVERSQNGGEPDFHAVEPYTKKELSAVTFPDIIRNYKVMAAENIPENPLKYLYPNIDKDHAFGKYYSRPKEAPEPMELDGPKGTGYIKTELISVSEVHPSRLQTTDNLLPMSPEEFDEVSRIVGSVEFDSMSF

SEQ ID NO: 78052 - protein, 202 aa, Homo sapiens
MYDNLYLHGIEDSEAGSADSYTSRPSDSDVSLEEDREAIRQEREQQAAIQLERAKSKPVAFAVKTNVSYCGALDEDVPVPSTAISFDAKDFLHIKEKYNNDWWIGRLVKEGCEIGFIPSPLRLENIRIQQEQKRGRFHGGKSSGNSSSSLGEMVSGTFRATPTSTDGAHSSLRCCTVNASGGVSGAVTERLRGNRHDAESPL

SEQ ID NO: 78053 - protein, 261 aa, Homo sapiens
MATDSWALAVDEQEAAAESLSNLHLKEEKIKPDTNGAVVKTNANAEKTDEEEKEDRAAQSLLNKLIRSNLVDNTNQVEVLQRDPNSPLYSVKSFEELRLKPQLLQGVYAMGFNRPSKIQENALPLMLAEPPQNLIAQSQSGTGKTAAFVLAMLSQVEPANKYPQCLCLSPTYELALQTGKVIEQMGKFYPELKLAYAVRGNKLERGQKISEQIVIGTPGTVLDWCSKLKFIDPKKIKVFVLDEADVMIATQGHQDQSIRIQ

SEQ ID NO: 78054 - protein, 188 aa, Homo sapiens
MGISRDNWHKRRKTGGKRKPYHKKRKYELGRPAANTKIGPRRIHTVRVRGGCTRKTRIIDVVYNASNNELVRTKTLVKNCIVLIDSTPYRQWYESHYALPLGRKKGAKLTPEEEEILNKKRSKKIQKKYDERKKNAKISSLLEEQFQQGKLLACIASRPGQCGRADGYVLEGKELEFYLRKIKARKGK

SEQ ID NO: 78055 - protein, 304 aa, Homo sapiens
MYTVLTGTPPFMASPLSEMYQNIREGHYPEPAHLSANARRLIVHLLAPNPAERPSLDHLLQDDFFTQGFTPDRLPAHSCHSPPIFAIPPPLGRIFRKVGQRLLTQCRPPCPFTPKEASGPGEGGPDPDSMEWDGESSLSAKEVPCLEGPIHLVAQGTLQSDLAGPEGSRRPEVEAALRHLQLCLDVGPPATQDPLGEQQPILWAPKWVDYSSKYGFGYQLLDGGRTGRHPHGPATPRRPSVLHAQLREAGSLRPEGCARPAGRQAGRAAALCRLPAAAAAGGGDPPHTCATCWTRPLPPALPGL

SEQ ID NO: 78056 - protein, 28 aa, Homo sapiens
MDTRSGSQCSVTPEAIRNNEELVLPPRI

SEQ ID NO: 78057 - protein, 114 aa, Homo sapiens
VKAKIQDKEGIPPDQQRLIFAGKQLEDGRTLSDYNIQKESTLHLVLRLRGGIIEPSLRQLAQKYNCDKMICRKSVVTPTTCVPRRRSNKVVLSLKGSLLPRPRGPGASIKCPFH

SEQ ID NO: 78058 - protein, 95 aa, Homo sapiens
MMIISTMEPQVSNGPTSNTSNGPSSNNRNCPSPMQTGATTDDSKTNLIVNYLPQNMTQEEFRSLFGSIGEIESCKLVRDKITGQSLGYGFVNYID

SEQ ID NO: 78059 - protein, 180 aa, Homo sapiens
MSHRKFSAPRHGSLGFLPRKRSSRHRGKVKSFPKDDPSKPVHLTAFLGYKAGMTHIVREVDRPGSKVNKKEVVEAVTIVETPPMVVVGIVGYVETPRGLRTFKTVFAEHISDECKRRFYKNCSARLCPMSSIQAPLAGGKGSLEAGNELHPHAVPVCLPLTPRRGDEGLHLVPSPTLLCS

SEQ ID NO: 78060 - protein, 200 aa, Homo sapiens
MESIFHEKQEGSLCAQHCLNNLLQGEYFSPVELSSIAHQLDEEERMRMAEGGVTSEDYRTFLQWFNLNSLLTGPELISDTYLALFLAQLQQEGYSIFVVKGDLPDCEADQLLQMIRVQQMHRPKLIGEELAQLKEQRVHKTDLERVLEANDGSGMLDEDEEDLQRALALSRQEIDMEDEEADLRRAIQLSMQVPETYLKI

SEQ ID NO: 78061 - protein, 345 aa, Homo sapiens
LAQRGGARRPRGDRERLGSRLRALRPGREPRQSEPPAQRGPPPSGRPPARSTASGHDRPTRGAAAGARRPRMKKKTRRRSTRSEELTRSEELTLSEEATWSEEATQSEEATQGEEMNRSQEVTRDEESTRSEEVTREEMAAAGLTVTVTHSNEKHDLHVTSQQGSSEPVVQDLAQVVEEVIGVPQSFQKLIFKGKSLKEMETPLSALGIQDGCRVMLIGKKNSPQEEVELKKLKHLEKSVEKIADQLEELNKELTGIQQGFLPKDLQAEALCKLDRRVKATIEQFMKILEEIDTLILPENFKDSRLKRKGLVKKVQAFLAECDTVEQNICQETERLQSTNFALAE

SEQ ID NO: 78062 - protein, 99 aa, Homo sapiens
MTPEFDEEVVFENSPLYQYLQDLGHTDFEICSSLSPKTEKCTTEGQQKPPTRVLPKQGILLKVAETIKSWIFFSQCNKKDDLLHKLVEPSHSSVILGLW

SEQ ID NO: 78063 - protein, 190 aa, Homo sapiens
  MOD_RES (1)..(1): Any amino acid
XDPSLQPSITWRGDGRDLQELGDSDKYFIEDGRLVIHSLDYSDQGNYSCVASTELDVVESRAQLLVVEYDIEFEDKEMAPEKWYSLGKVPGNQTSTTLKLSPYVHYTFRVTAINKYGPGEPSPVSETVVTPEAAPEKNPVDVKGEGNETTNMVITWKPLRWMDWNAPQVQYRVQWRPQGTRGPWQEQIVS

SEQ ID NO: 78064 - protein, 166 aa, Homo sapiens
MSIKWARFHEVPHITVRFIGPKHGEEKEKEKDKIKEKEKDSKDKEKDKKTVNGHTFSSIPVVGPISCSQCMKPFTNKDAYTCANCSAFVHKGCRESLASCAKVKMKQPKGSLQAHDTSSLPTVIMRNKPSQPKERPRSAVLLVDETATTPIFANRRSQQSVSLSKS

SEQ ID NO: 78065 - protein, 60 aa, Homo sapiens
MLLSVTSRPGISTFGYNRNNKKMEFRSLLLPRLECNGVISAHCNLCLPAICVIGSADGTT

SEQ ID NO: 78066 - protein, 122 aa, Homo sapiens
MRIFVNDDRHVMAKHSSVYPTQEELEAVQNMVSHTERALKAVSDWIDEQEKGSSEQAESDNMDVPPEDDSKEGAGEQKTEHMTRTLRGVMRVGLVAKGLLLKGDLDLELVLLCKEKPTTALL

SEQ ID NO: 78067 - protein, 222 aa, Homo sapiens
  MOD_RES (1)..(1): Any amino acid
XPSPYTGGAWATTGCSVAALYLDSTACFCNHSTSFAILLQIYEVQRGPEEESLLRTLSFVGCGVSFCALTTTFLLFLVAGVPKSERTTVHKNLTFSLASAEGFLMTSEWAKANEVACVAVTVAMHFLFLVAFSWMLVEGLLLWRKVVAVSMHPGPGMRLYHATGWGVPVGIVAVTLAMLPHDYVAPGHCWLNVHTNAIWAFVGPVLFVLTVSRPTPASWPVW

SEQ ID NO: 78068 - protein, 146 aa, Homo sapiens
  MOD_RES (1)..(1): Any amino acid
XRSGCALTDAVAPGNKGRGQRGNTESKTDGDDTETVPSEQSHASGKLRKKKKKQKNKKSSTGEASENGLEDIDRILERIEDSTGLNRPGPAPLSSRKHVLYVEHRCGPRPSLRLPFSAAALLCGCPSLRLPFSVAATETSWEEKVL

SEQ ID NO: 78069 - protein, 145 aa, Homo sapiens
  MOD_RES (1)..(1): Any amino acid
XSLETRDQRTPGGPVWGGRRTEPRLTRSCRGAFRSPFLPATFEKTLYCPHVERPLPKSGQADGTSEESLHLDIQKLKEKRDMLDKEISQFVSEGYSVDELEDHITQLHEYNDIKDVGQMLMGKLAVIRGVTTKELYPEFGLDMND

SEQ ID NO: 78070 - protein, 34 aa, Homo sapiens
  MOD_RES (1)..(1): Any amino acid
XSASKISQDVDKEDEFGYSWSKLCFCDAFNCKRY

SEQ ID NO: 78071 - protein, 165 aa, Homo sapiens
MGIQGLAKLIADVAPSAIRENDIKSYFGRKVAIDASMSIYQFLIAVRQGGDVLQNEEGETTSHLMGMFYRTIRMMENGIKPVYVFDGKPPQLKSGELAKRSERRAEAEKQLQQAQAAGAEQEVEKFTKRLVKVTKQHNDECKHLLSLMGIPYLDAPSEAEASCAA

SEQ ID NO: 78072 - protein, 114 aa, Homo sapiens
MFPVFSGCFQELQEKNKSLELVSFEEVAVHFTWEEWQDLDDAQRTLYRDVMLETYSSLVSLGHYITKPEMIFKLEQGAEPWIVEETPNLRLSGGSKKQVFSGICHRSLVELQEV

SEQ ID NO: 78073 - protein, 407 aa, Homo sapiens
MAALRALCGFRGVAAQVLRPGAGVRLPIQPSRGVRQWQPDVEWAQQFGGAVMYPSKETAHWKPPPWNDVDPPKDTIVKNITLNFGPQHPAAHGVLRLVMELSGEMVRKCDPHIGLLHRGTEKLIEYKTYLQALPYFDRLDYVSMMCNEQAYSLAVEKLLNIRPPPRAQWIRVLFGEITRLLNHIMAVTTHALDLGAMTPFFWLFEEREKMFEFYERVSGARMHAAYIRPGGVHQDLPLGLMDDIYQFSKNFSLRLDELEELLTNNRIWRNRTIDIGVVTAEEALNYGFSGVMLRGSGIQWDLRKTQPYDVYDQVEFDVPVGSRGDCYDRYLCRVEEMRQSLRIIAQCLNKMPPGEIKVDDAKVSPPKRAEMKSFTLIAQTGVQSRLTATSASQPPKVLELQALPWSH

SEQ ID NO: 78074 - protein, 175 aa, Homo sapiens
VQTTKRGDPHELRNIFLQYASTEVDGERYMTPEDFVQRYLGLYNDPNSNPKIVQLLAGVADQTKDGLISYQEFLAFESVLCAPDSMFIVAFQLFDKSGNGEVTFGFWIWGKGGVLWPHRWYSSSFQAHSWNRHGGSLGEECQPRSEGRNESCIPFQRKDENPISPVTSNAFFQLC

SEQ ID NO: 78075 - protein, 27 aa, Homo sapiens
  MOD_RES (1)..(1): Any amino acid
XLLNRYLIIALLNATPGPDVVKKCNQG

SEQ ID NO: 78076 - protein, 150 aa, Homo sapiens
MTVMSLSRDLKDDFHSDTVLSILNEQRIRGILCDVTIIVEDTKFKAHSNVLAASSLYFKNIFWSHTICISSHVLELDDLKAEVFTEILNYIYSSTVVVKRQETVTDLAAAGKKLGISFLEDLTDRNFSNSPGPYVFCITEKGVVKEEKNE

SEQ ID NO: 78077 - protein, 87 aa, Homo sapiens
RIPMSLGEPHAELDAKGQGCTAYDVAVNSDFYRRMQNSDFLRELVITIAREGLEDKYNLQLNPEHPLGAASSDPGAGGPVHARPRES

SEQ ID NO: 78078 - protein, 206 aa, Homo sapiens
  MOD_RES (1)..(1): Any amino acid
XGMHERYSNVQVAGPVDRTSSKDSPLHKALFWVAVAVLQLDEVNLYSAGTALLEQNLHTLDSLRIFNDKSPEEVFMAIRNPLEWHCKQMDHFVGLNFNSNFNFALVGHLLKGYRHPSPAIVARTVRILHTLLTLVNKHRNCDKFEVNTQSVAYLAALLTVSEEVRSRCSLKHRKSLLLTDISMENVPMDTYPIHHGDPSYRNKEKF

SEQ ID NO: 78079 - protein, 153 aa, Homo sapiens
MRLFYPESAHFDPKVENNPDTLLVLVAFKAMDFHWIETILSDKKRVRKGFWKQPPLIWDVNPKQIRILNPFFMEIAADKLLSLPMQQPRKIKQKPTTGLLAITLALHLCDLVHIAGFGYPDAYNKKQTIHYYEQITLKSMAGSGHNVSQEALA

SEQ ID NO: 78080 - protein, 235 aa, Homo sapiens
MSDTLTADVIGRRVEVNGEHATVRFAGVVPPVAGPWLGVEWDNPERGKHDGSHEGTVYFKCRHPTGGSFIRPNKVNFGTDFLTAIKNRYVLEDGPEEDRKEQIVTIGNKPVETIGFDSIMKQQSQLSKLQEVSLRNCAVSCAGEKGGVAEACPNIRKVDLSKNLLSSWDEVIHIADQLRHLEVLNVSENKLKFPSGSVLTGTLSVLKVLVLNQTGITWAEANRCSPDSQVIRSFL

SEQ ID NO: 78081 - protein, 40 aa, Homo sapiens
MNHDFQALALESRGMGETIQCPSLLWYREDLDRVFMETVK

SEQ ID NO: 78082 - protein, 130 aa, Homo sapiens
  MOD_RES (1)..(1): Any amino acid
XKTYLKLHNKKLAAFWLMKAKDYPAHTEEDKQEPDSPRVTLVRDVSPLRVRPITENKPQESLTFSFPCSPHLIVLVWIPELTAGLRCLFPHVHVYQSLKITRVFIIRIWKRSLFNQADLCLSFVFTMNSE

SEQ ID NO: 78083 - protein, 227 aa, Homo sapiens
MEVIRQVKGDLAFLNFQNNLQQTPLHLAVITNQPEIAEALLGAGCDPELRDFRGNTPLHLACEQGCLASVGVLTQSCTTPHLHSILKATNYNGHTCLHLASIHGYLGIVELLVSLGADVNAQEPCNGRTALHLAVDLQNPDLVSLLLKCGADVNRVTYQGYSPYQLTWGRPSTRIQQQLGQLTLENLQMLPESEDEESYDTESEFTEFTEDELPYDDCVFGGQRLTL

SEQ ID NO: 78084 - protein, 531 aa, Homo sapiens
MLKEVAQVTNSMFGASRKKFVEGVDSDYHDENMYYSQSSMFPHRSEKDMLASPSTSGQLSQFGASLYGQQSALGLPMRGMSNNTPQLNRSLSQGTQLPSHVTPTTGVPTMSLHTPPSPSRGILPMNPRNMMNHSQVGQGIGIPSRTNSMSSSGLGSPNRSSPSIICMPKQQPSRQPFTVNSMSGFGMNRNQAFGMNNSLSSNIFNGTDGSENVTGLDLSDFPALADRNRREGSGNPTPLINPLAGRAPYVGMVTKPANEQSQDFSIHNEDFPALPGSSYKDPTSSNDDSKSNLNTSGKTTSSTDGPKFPGDKSSTTQNNNQQKKGIQVLPDGRVTNIPQGMVTDQFGMIGLLTFIRAAETDPGMVHLALGSDLTTLGLNLNSPENLYPKFASPWASSPCRPQDIDFHVPSEYLTNIHIRDKLAAIKLGRYGEDLLFYLYYMNGGDVLQLLAAVELFNRDWRYHKEERVWITRAPGMEPTMKTNTYERGTYYFFDCLNWRKVAKEFHLEYDKLEERPHLPSTFNYNPAQQAF

SEQ ID NO: 78085 - protein, 858 aa, Homo sapiens
MEAPEYLDLDEIDFSDDISYSVTSLKTIPELCRRCDTQNEDRSVSSSSWNCGISTLITNTQKPTGIADVYSKFRPVKRVSPLKHQPETLENNESDDQKNQKVVEYQKGGESDLGPQPQELGPGDGVGGPPGKSSEPSTSLGELEHYDLDMDEILDVPYIKSSQQLASFTKVTSEKRILGLCTTINGLSGKACSTGSSESSSSNMAPFCVLSPVKSPHLRKASAVIHDQHKLSTEETEISPPLVKCGSAYEPENQSKDFLNKTFSDPHGRKVEKTTPDCQLRAFHLQSSAAESKPEEQVSGLNRTSSQGPEERSEYLKKVKSILNIVKEGQISLLNGQLECVRWMVSETEAIAELSCSKDFPSLIHYAGCYGQEKILLWLLQFMQEQGISLDEVDQDGNSAVHVASQHGYLGCIQTLVEYGANVTMQNHAGEKPSQSAERQGHTLCSRYLVVVETCMSLASQVVKLTKQLKEQTVERVTLQNQLQQFLEAQKSEGKSLPSSPSSPSSPASRKSQWKSPDADDDSVAKSKPGVQEGIQVLGSLSASSRARPKAKDEDSDKILRQLLGKEISENVCTQEKLSLEFQDAQASSRNSKKIPLEKRELKLARLRQLMQRSLSESDTDSNNSEDPKTTPVRKADRPRPQPIVESVESMDSAESLHLMIKKHTLASGGRRFPFSIKASKSLDGHSPSPTSESSEPDLESQYPGSGSIPPNQPSGDPQQPSPDSTAAQKVATSPKSALKSPSSKRRTSQNLKLRVTFEEPVVQMEQPSLELNGEKDKDKGRTLQRTSTSNESGDQLKRPFGAFRSIMETLSGNQNNNNNYQAANQLKTSTLPLTSLGRKTDAKGNPASSASKGKNKA

SEQ ID NO: 78086 - protein, 31 aa, Homo sapiens
  MOD_RES (1)..(1): Any amino acid
XLTAPGSVGPPDESHPGSSDSSASQCEKSQY

SEQ ID NO: 78087 - protein, 154 aa, Homo sapiens
  MOD_RES (1)..(1): Any amino acid
XYPRCIFPFIYRGKAYNSCISQGSFLGSLWCSVTSVFDEKQQWKFCETNEYGGNSLRKPCIFPSIYRNNVVSDCMEDESNKLWCPTTENMDKDGKWSFCADTRISALVPGFPCHFPFNYKNKNYFNCTNEGSKENLVWCATSYNYDQDHTWVYC

SEQ ID NO: 78088 - protein, 582 aa, Homo sapiens
  MOD_RES (1)..(1): Any amino acid
XYESMKQDFKLGIPEYFNFAKDVLDQWTDKEKAGKKPSNPAFWWINRNGEEMRWSFEELGSLSRKFANILSEACSLQRGDRVILILPRVPEWWLANVACLRTGTVLIPGTTQLTQKDILYRLQSSKANCIITNDVLAPAVDAVASKCENLHSKLIVSENSREGWGNLKELMKVFLCHPGWSTVARSWLTATSTSLVQAILSLLSSWDYRHASDSHTCVKTKHNEIMAIFFTSGTSGYPKMTAHTHSSFGLGLSVNGRFWLDLTPSDVMWNTSDTGWAKSAWSSVFSPWIQGACVFTHHLPRFEPTSILQTLSKYPITVFCSAPTVYRMLVQNDITSYKFKSLKHCVSAGEPITPDVTEKWRNKTGLDIYEGYGQTETVLICGNFKGMKIKPGSMGKPSPAFDVKIVDVNGNVLPPGQEGDIGIQVLPNRPFGLFTHYVDNPSKTASTLRGNFYITGDRGYMDKDGYFWFVARADDVILSSGYRIGPFEVENALNEHPSVAESAVVSSPDPIRGEVVKAFVVLNPDYKSHDQEQLIKEIQEHVKKTTAPYKYPRKVEFIQELPKTISGKTKRNELRKKEWKTI

SEQ ID NO: 78089 - protein, 64 aa, Homo sapiens
MEADASVDMFSKVLEHQLLQTTKLVEEHLDSEIQKLDQMDEDELERLKEKRLQALRKAQQQKQV

SEQ ID NO: 78090 - protein, 133 aa, Homo sapiens
MAEAEGVPTTPGPASGSTFRGRRDVSGSWERDQQVEAAQRALVEVLGPYEPLLSRVQAALVWERPARSALWCLGLNAAFWFFALTSLRLVFLLAFGLMIIVCIDQWKNKIWPEIKAGALCTLGCSACPSSATM

SEQ ID NO: 78091 - protein, 1044 aa, Homo sapiens [sequence omitted]

SEQ ID NO: 78092 - protein, 61 aa, Homo sapiens
MLGPAKETNIAVFWCLLTVTFSIKMFLTVTRLYFSAEEGGERSVCLTFAFLFLLLAMLVQV

SEQ ID NO: 78093 - protein, 198 aa, Homo sapiens
MGEPQGSMRILVTGGSGLVGKAIQKVVADGAGLPGEDWVFVSSKDADLTDTAQTRALFEKVQPTHVIHLAAMVGGLFRNIKYNLDFWRKNVHMNDNVLHSAFEVGARKVVSCLSTCIFPDKTTYPIDETMIHNGPPHNSNFGYSYAKRMIDVQNRAYFQQYGCTFTAVIPTNVFGPHDNFNIEDGHVLPGLIHKVHLA

SEQ ID NO: 78094 - protein, 153 aa, Homo sapiens
MAKFLSQDQINEYKECFSLYDKQQRGKIKATDLMVAMRCLGASPTPGEVQRHLQTHGIDGNGELDFSTFLTIMHMQIKQEDPKKEILLAMLMVDKEKKGYVMASDLRSKLTSLGEKLTHKEVDDLFREADIEPNGKVKYDEFIHKITLPGRDY

SEQ ID NO: 78095 - protein, 237 aa, Homo sapiens
MFRTAVMMAASLALTGAVVAHAYYLKHQFYPTVVYLTKSSPSMAVMGKVFFGQLRAAEMEHLLERSWYAVTETCLAFTVFRDDFSPRFVALFTLLLFLKCFHWLAEDRVDFMERSPNISWLFHCRIVSLMFLLGILDFLFVSHAYHSILTRGASVQLVFGFEYAILMTMVLTIFIKYVLHSVDLQSENPWDNKAVYMLYTELFTGFIKVLLYMAFMTIMIKVHTFPLFAIRPMYLAM

SEQ ID NO: 78096 - protein, 70 aa, Homo sapiens
  MOD_RES (1)..(1): Any amino acid
XVFGVLWITVLLFFWVTKRKLEVPTGPEVQTPKVWSLFFKVAGMSPWAPQVPVSPTPPYQRGHLPTAFGR

SEQ ID NO: 78097 - protein, 165 aa, Homo sapiens
MTKEERQAAQNECQVLKLLNHPNVIEYYENFLEDKALMIAMEYAPGGTLAEFIQKRCNSLLEEETILHFFVQILLALHHVHTHLILHRDLKTQNILLDKHRMVVKIGDFGISKILSSKSKAYTVVGTPCYISPELCEGKPYNQKSDIWALGCVLYELASLKRAFE

SEQ ID NO: 78098 - protein, 145 aa, Homo sapiens
  MOD_RES (1)..(1): Any amino acid
XSLLLLVTSVTLLVARVFQKAVDQSIEKKIVLRNGTEAFDSWEKPPLPVYTQFYFFNVTNPEEILRGETPRVEEVGPYTYRELRNKANIQFGDNGTTISAVSNKAYVFERDQSVGDPKIDLIRTLNIPVLSGPRCTSSGRSSRPC

SEQ ID NO: 78099 - protein, 98 aa, Homo sapiens
MDRLKSHLTVCFLPSVPFLILVSTLATAKSVTNSTLNGTNVVLGSVPVIIARTDHIIVKEGNSALINCSVYGIPDPQFKWYNSIGKLLKEEEDEKERG

SEQ ID NO: 78100 - protein, 241 aa, Homo sapiens
MDDFISISLLSLAMLVGCYVAGIIPLAVNFSEERLKLVTVLGAGLLCGTALAVIVPEGVHALYEDILEDPEAARSSNSKITTTLGLVVHAAADGVALGAAASTSQTSVQLIVFVAIMLHKAPAAFGLVSFLMHAGLERNRIRKHLLVFALAAPVMSMVTYLGLSKSSKEALSEVNATGVAMLFSAGTFLYVATVHVLPEVGGIGHSHKPDATGGRGLSRLEVAALVLGCLIPLILSVGHQH

SEQ ID NO: 78101 - protein, 242 aa, Homo sapiens
MTECFLPPTSSPSEHRRVEHGSGLTRTPSSEEISPTKFPGLYRTGEPSPPHDILHEPPDVVSDDEKDHGKKKGKFKKKEKRTEGYAAFQEDSSGDEAESPSKMKRSKGIHVFKKPSFSKKKEKDFKIKEKPKEEKHKEEKHKEEKHKEKKSKDLTAADVVKQWKEKKKKKKPIQEPEVPQIDVPNLKPIFGIPLADAVERTMMYDGIRLPAVFRECIDYVEKYGMKCEGIYRVSGTGNVHFT

SEQ ID NO: 78102 - protein, 127 aa, Homo sapiens
MAGQDAGCGRGGDDYSEDEGDSSVSRAAVEVFGKLKDLNCPFLEGLYITEPKTIQELLCSPSEYRLEILEWMCTRVWPSLQDRFSSLKGVPTEVKIQEMTKLGHELMLCAPDDQELLKRFIHVTNGL

SEQ ID NO: 78103 - protein, 201 aa, Homo sapiens
  MOD_RES (1)..(1): Any amino acid
XHWDAVYERELQTFREYGDTGEIWFGEESMNRLIRWMQKHKIPLDASVLDIGTGNGVFLVELAKFGFSNITGIDYSPSAIQLSGSIIEKEGLSNIKLKVEDFLNLSTQLSGFHICIDKGTFDAISLNPDNAIEKRKQYVKSLSRVLKVKGFFLITSCNWTKEELLNEFSEGFELLEELPTPKFSFGGRSGNSVAALVFQKM

SEQ ID NO: 78104 - protein, 77 aa, Homo sapiens
MKDIKNTTQKKYRDYSKTPGSPDNDFLFMYSVARLGNRRFVKTKCIDLIYIPLMKEHMLVSARFLSTSMKSLSLLPC

SEQ ID NO: 78105 - protein, 114 aa, Homo sapiens
MSKRGRGGSSGAKFRISLGLPVGAVINCADNTGAKNLYIISVKGIKGRLNRLPAAGVGDMVMATVKKGKPELRKKVLLCHTGWSAVTPLKLTVTLNCWTWNPPAVAFKGLQLQV

SEQ ID NO: 78106 - protein, 160 aa, Homo sapiens
MSSAEIIGSTNLIILLEDEVFADFFNTFLSLPVFGQTPFYTVENSQWSLWPEIPCNLIAKYKGLLTWLEKCRLPFFCKTNLCFHYILCQEFISFIKSPEGGEELVDFWILAENILSIDEMDLEVRDYYLSLLLMLRATHLQEGSRVVTLCNMNINAQSLV

SEQ ID NO: 78107 - protein, 137 aa, Homo sapiens
MRLLRRRHMPLRLAMVGCAFVLFLFLLHRDVSSREEATEKPWLKSLVSRKDHVLDLMLEAMNNLRDSMPKLQIRAPEAQQTLFSINQSCLPGFYTPAELKPFWERPPQDPNAPGADGKAFQKSKWTPLETQEKEEGY

SEQ ID NO: 78108 - protein, 832 aa, Homo sapiens
MKGAFTDNERIFSQHLQNRLLPDHTYSVVSGGDPLCIPELTWEQLKQFHATHYHPSNARFFTYGNFPLEQHLKQIHEEALSKFQKIEPSTVVPAQTPWDKPREFQITCGPDSFATDPSKQTTISVSFLLPDITDTFEAFTLSLLSSLLTSGPNSPFYKALIESGLGTDFSPDVGYNGYTREAYFSVGLQGIAEKDIETVRSLIDRTIDEVVEKGFEDDRIEALLHKIEIQMKHQSTSFGLMLTSYIASCWNHDGDPVELLKLGNQLAKFRQCLQENPKFLQEKVKQYFKNNQHKLTLSMRPDDKYHEKQAQVEATKLKQKVEALSPGDRQQIYEKGLELRSQQSKPQDASCLPALKVSDIEPTIPVTELDVVLTAGDIPVQYCAQPTNGMVYFRAFSSLNTLPEELRPYVPLFCSVLTKLGCGLLDYREQAQQIELKTGGMSASPHVLPDDSHMDTYEQGVLFSSLCLDRNLPDMMQLWSEIFNNPCFEEEEHFKVLVKMTAQELANGIPDSGHLYASIRAGRTLTPAGDLQETFSGMDQVRLMKRIAEMTDIKPILRKLPRIKKHLLNGDNMRCSVNATPQQMPQTEKAVEDFLRSIGRSKKERRPVRPHTVEKPVPSSSGGDAHVPHGSQVIRKLVMEPTFKPWQMKTHFLMPFPVNYVGECIRTVPYTDPDHASLKILARLMTAKFLHTEIREKGGAYGGGAKLSHNGIFTLYSYRDPNTIETLQSFGKAVDWAKSGKFTQQDIDEAKLSVFSTVDAPVAPSDKGMDHFLYGLSDEMKQAHREQLFAVSHDKLLAVSDRYLGTGKSTHGLAILGPENPKIAKDPSWIIQ

SEQ ID NO: 78109 - protein, 93 aa, Homo sapiens
MYRQRFLYSLYRHTHWVRCAKDLSLLFHFQKVESYLHQEVQTHRSYYGGLTLMNCIVKVLPKEISKDYILIHHHIFLISTQEHHIPMRKKLRL

SEQ ID NO: 78110 - protein, 52 aa, Homo sapiens
FPIEAGDSRGLAAAPESQDSPEAVATEHNPVSGPCRASISPGRFVAALDATA

SEQ ID NO: 78111 - protein, 155 aa, Homo sapiens
SRLHDSNSKVNLVALETMHKMIPLLRDHLSPIINMLIPAIVDNNLNSKNPGIYAAATNVVQALSQHVDIVTELYQRKPHATEQKVLVVLWHLLGNMTNSGSLPGAGGNIRTATAKLSKALFAQMGQNLLNQAASQPPHIKKSLEELLDMTILNEL

SEQ ID NO: 78112 - protein, 80 aa, Homo sapiens
NLVRMRSQALGQSAPSLTASLKELSLPRRGSLIDSQKWNCLVKRSLSPTPSSPGSPCSPLLAFHFWSPVCPNAGRTSPLG

SEQ ID NO: 78113 - protein, 63 aa, Homo sapiens
MSNLKMKEAALIYLDRSGGLQKFIDDCKYYNGTFSKDAELGNHILHQPLKAAEVFQSVSQKKK

SEQ ID NO: 78114 - protein, 161 aa, Homo sapiens
MADPDPRYPRSSIEDDFNYGSSVASATVHIRMAFLRKVYSILSLQVLLTTVTSTVFLYFESVRTFVHESPALILLFALGSLGLIFALILNRHKYPLNLYLLFGFTLLEALTVAVVVTFYDVYIILQAFILTTTVFFGLTVYTLQSKKDFSKFGAGFFFIVR

SEQ ID NO: 78115 - protein, 130 aa, Homo sapiens
MSYGSITFGDVAIDFSHQEWEYLSLVQKTLYQEVMMENYDNLVSLAGHSVSKPDLITLLEQGKEPWMIVREETRGECTDLDSRCEIISDGKMQLYRKHSCVTLHQRIHNGQKPYEWNTTDLRSLGLRNNL

SEQ ID NO: 78116 - protein, 62 aa, Homo sapiens
  MOD_RES (1)..(1): Any amino acid
XGSEYETMLTEIMSMGYERERVVAALRASYNNPHRAVEYLLTQERTPWSSCGTSPSSRTCGR

SEQ ID NO: 78117 - protein, 295 aa, Homo sapiens
MKKEHVLHCQFSAWYPFFRGVTIKSVILPLPQNVKDYLLDDGTLVVSGRDDPPTHSQPDSDDEAEEIQWSDDENTATLTAPEFPEFATKVQEAINSLGGSVFPKLNWSAPRDAYWIAMNSSLKCKTLSDIFLLFKSSDFITRDFTQPFIHCTDDSPDPCIEYELVLRKWCELIPGAEFRCFVKENKLIVVFDIYRDSRGKVWLIDFNPFGEVTDSLLFTWEELISENNLNGDFSEVDAQEQDSPAFRCTNSEVTVQPSPYLSYRLPKDFVDLSTGEDAHKLIDFLKLKRNQQEDD

SEQ ID NO: 78118 - protein, 68 aa, Homo sapiens
MCLFMDKKLSLKLNGGRHVQGILRGFDPFMNLVIDECVEMATSGQQNNIGMVVIRGNSIIMLEALERV

SEQ ID NO: 78119 - protein, 54 aa, Homo sapiens
  MOD_RES (1)..(1): Any amino acid
XANHVDKLPGPRDWVQILQDQIKLARRRLKRGSEIADSDERLDGIALPPTGKKA

SEQ ID NO: 78120 - protein, 593 aa, Homo sapiens
MVQGGFPEKIRQRYADLPGELHIIELEKDKNGLGLSLAGNKDRSRMSIFVVGINPEGPAAADGRMRIGDELLEINNQILYGRSHQNASAIIKTAPSKVKLVFIRNEDAVNQMAVTPFPVPSSSPSSIEDQSGTEPISSEEDGSVEVGIKQLPESESFKLAVSQMKQQKYPTKVSFSSQEIPLAPASSYHSTDADFTGYGGFQAPLSVDPATCPIVPGQEMIIEISKGRSGLGLSIVGGKDTPLNAIVIHEVYEEGAAARDGRLWAGDQILEVNGVDLRNSSHEEAITALRQTPQKVRLVVYRDEAHYRDEENLEIFPVDLQKKAGRGLGLSIVGKRNGSGVFISDIVKGGAADLDGRLIQGDQILSVNGEDMRNASQETVATILKCAQGLVQLEIGRLRAGSWTSARTTSQNSQGSQQSAHSSCHPSFAPVITGLQNLVGTKRVSDPSQKNSGTDMEPRTVEINRELSDALGISIAGGRGSPLGDIPVFIAMIQASGVAARTQKLKVGDRIVSINGQPLDGLSHADVVNLLKNAYGRIILQVVADTNISAIAAQLENMSTGYHLGSPTAEHHPEDTERCCNCPMDSPCPLLLG

SEQ ID NO: 78121 - protein, 165 aa, Homo sapiens
MVLENYSKFIMIEDNKENKDHSLERGRASLIFSLKNEVGGLIKALKIFQEKHVNLLHIESRKSKRRNSEFEIFVDCDINREQLNDIFHLLKSHTNVLSVNLPDNFTLKEDGMETVPWFPKKISDLDHCANRVLMYGSELDADHPGFKDNVYRKRRKYFADLAMNY

SEQ ID NO: 78122 - protein, 643 aa, Homo sapiens
MSTRTPLPTVNERDTENHTSHGDGRQEVTSRTSRSGARCRNSIASCADEQPHIGNYRLLKTIGKGNFAKVKLARHILTGREVAIKIIDKTQLNPTSLQKLFREVRIMKILNHPNIVKLFEVIETEKTLYLIMEYASGGEVFDYLVAHGRMKEKEARSKFRQIVSAVQYCHQKRIVHRDLKAENLLLDADMNIKIADFGFSNEFTVGGKLDTFCGSPPYAAPELFQGKKYDGPEVDVWSLGVILYTLVSGSLPFDGQNLKELRERVLRGKYRIPFYMSTDCENLLKRFLVLNPIKRGTLEQIMKDRWINAGHEEDELKPFVEPELDISDQKRIDIMVGMGYSQEEIQESLSKMKYDEITATYLLLGRKSSELDASDSSSSSNLSLAKVRPSSDLNNSTGQSPHHKVQRSVSSSQKQRRYSDHAGPAIPSVVAYPKRSQTSTADSDLKEDGISSRKSSGSAVGGKGIAPASPMLGNASNPNKADIPERKKSSTVPSSNTASGGMTRRNTYVCSERTTADRHSVIQNGKENSRNVSAEQKDENKEAKPRSLRFTWSMKTTSSMDPGDMMREIRKVLDANNCDYEQRERFLLFCVHGDGHAENLVQWEMEVCKLPRLSLNGVRFKRISGTSIAFKNIASKIANELKL

SEQ ID NO: 78123 - protein, 26 aa, Homo sapiens
MAGKQADIEGVLLNSRHCFCACLGTT

SEQ ID NO: 78124 - protein, 405 aa, Homo sapiens
MQPAEEGPSVPKIYKQRSPYSVLKTFPSLELSAESRMILDAFAQQCSRVLSLLNCGGKLLDSNHSQSMISCVKQEGSSYNERQEHCHIGKGVHSQTSDNVDIEMQYMQRKQQTSAFLRVFTDSLQNYLLSGSFPTPNPSSASEYGHLADVDPLSTSPVHTLGGWTSPATSESHGHPSSSTLPEEEEEEDEEGYCPRCQELEQEVISLQQENEELRRKLESIPVPCQTVLDYLKMVLQHHNQLLIPQPADQPTEGSKQLLNNYPVYITSKQWDEAVNSSKKDGRRLLRYLIRFVFTTDELKYSCGLGKRKRSVQSGETGPERRPLDPVKVTCLREFIRMHCTSNPDWWMPSEEQINKVFSDAVGHARQGRAVGTFLHNGGSFYEGIDHQASQDEVFNKSSQDGSGD

SEQ ID NO: 78125 - protein, 117 aa, Homo sapiens
MTAVHAGNINFKWDPKSLEIRTLAVERLLEPLVTQVTTLVNTNSKGPSNKKRGRSKKAHVLAASVEQATENFLEKGDKIAKESQFLKEELVAAVEDVRKQGDLMKAAAGEFADDPCS

SEQ ID NO: 78126 - protein, 115 aa, Homo sapiens
  MOD_RES (1)..(1): Any amino acid
XSDYGGSEGSHTEPCEEKPWRPGSPHLPHTSLGEALSRAVSPQCPEEPRAVHALQRANSFQSPTPSKYQNWRREFWWSLTPVNKRTMSPPKDPSPSLPLPSSSSHSSSPPSSSST

SEQ ID NO: 78127 - protein, 168 aa, Homo sapiens
MSGSDGGLEEEPELSITLTLRMLMHGKEVGSIIGKKGETVKRIREQSSARITISEGSCPERITTITGSTAAVFHAVSMIAFKLDEDLCAAPANGGNVSRPPVTLRLVIPASQCGSLIGKAGTKIKEIRETTGAQVQVAGDLLPNSTERAVTVSGVPDAIILCVRQICA

SEQ ID NO: 78128 - protein, 77 aa, Homo sapiens
MPSPDSMTFEDIIVDFTQEEWALLDTSQRKLFQDVMLENISHLVSIGKQLCKSVVLSQLEQVEKLSTQRISLLQGEL

SEQ ID NO: 78129 - protein, 326 aa, Homo sapiens
  MOD_RES (1)..(1): Any amino acid
XRQCLMVSRNLGSVGYDPNEKTFDKILVANRGEIACRVIRTCKKMGIKTVAIHSDVDASSVHVKMADEAVCVGPAPTSKSYLNMDAIMEAIKKTRAQAVHPGYGFLSENKEFARCLAAEDVVFIGPDTHAIQAMGDKIESKLLAKKAEVNTIPGFDGVVKDAEEAVRIAREIGYPVMIKASAGGGGKGMRIAWDDEETRDGFRLSSQEAASSFGDDRLLIEKFIDNPRHIEIQVLGDKHGNALWLNERECSIQRRNQKVVEEAPSIFLDAETRRAMGEQAVALARAVKYSSAGTVEFLVDSKKNFYFLEMNTRLQVLHIILHYFER

SEQ ID NO: 78130 - protein, 715 aa, Homo sapiens
MSVNISTAGKGVDPNTVDTYDSGDDWEIGVGNLIIDLDADLEKDRQKFEMNNSTTTTSSSNSKDCGGPASSGAGATAALADGLKFASVQASAPQGNSHKETSKSKVKRSKTSKDANKSLPSAALYGIPEISSTGKRQEVQGRPGEATGMNSALGQSVSSGGSGNPNSNSTSTSTSAATAGAGSCGKSKEEKPGKSQSSRGAKRDKDAGKSRKDKHDLLQGHQNGSGSQAPSGGHLYGFGAKSNGGGASPFHCGGTGSGSVAAAGEVSKSAPDSGLMGNSMLVKKEEEEEESHRRIKKLKTEKVDPLFTVPAPPPPISSSLTPQILPSYFSPSSSNIAAPVEQLLVRTRSVGVNTCEVGVVTEPECLGPCEPGTSVNLEGIVWHETEEGVLVVNVTWRNKTYVGTLLDCTKHDWAPPRFCESPTSDLEMRGGRGRGKRARSAAAAPGSEASFTESRGLQNKNRGGANGKGRRGSLNASGRRTPPNCAAEDIKASPSSTNKRKNKPPMELDLNSSSEDNKPGKRVRTNSRSTPTTPQGKPETTFLDQGCSSPVLIDCPHPNCNKKYKHINGLRYHQAHAHLDPENKLEFEPDSEDKISDCEEGLSNVALECSEPSTSVSAYDQLKAPASPGAGNPPGTPKGKRELMSNGPGSIIGAKAGKNSGKKKGLNNELNNLPVISNMTAALDSCSAADGSLAAEMPKLEAEGLIDKKNLGDKE

SEQ ID NO: 78131 - protein, 316 aa, Homo sapiens
  MOD_RES (1)..(1): Any amino acid
XVYSNSYGPEFAHCREIQWNSLGNGLAYEDFSFPIFLLEDENETKVIKQLFSHMHAVISTATCMRRSSIQSTFSINPEIVCDPLSDYNVWSMLKPINTTGTLKPDDRVVVAATRLDSRSFFWNVAPGAESAVASFVTQLAAAEALQKAPDVTTLPRNVMFVFFQGETFDYIGSSRMVYDMEKGKFPVQLENVDSFVELGQVALRTSLELWMHTDPVSQKNESVRNQVEDLLATLEKSGAGVPAVILRRPNQSQPLPPSSLQRFLRARNISGVVLADHSGAFHNKYYQSIYDTAENINVSYPEWLSPEEDLNFVTDT

SEQ ID NO: 78132 - protein, 598 aa, Homo sapiens
  MOD_RES (1)..(1): Any amino acid
XTEVRRLGGILPLVTILQCMKTDSIQNRTARALGNLAMEPESCGDIHCAGAVPLLVESLTACQDSQCLQSVALGLVPLLAGQLCGEAGEEEEEGREAASWDFPEERTPERAQGGSFRSLRSWLISEGYATGPDDISPDWSPEQCPPEPMEPASPAPTPTSLRAPRTQRTPGRSPAAAIEEPWGREGPALLLLSRFSQAPDPSGALVTGPALYGLLTYVTGAPGPPSPRALRILSRLTCNPACLEAFVRSYGAALLRAWLVLGVAPDDWPAPRARPTLHSRHRELGERLLQNLTVQAESPFGVGALTHLLLSGSPEDRVACALTLPFICRKPSLWRRLLLEQGGLRLLLAALTRPAPHPLFLFFAADSLSCLQDLVSPTVSPAVPQAVPMDLDSPSPCLYEPLLGPAPVPAPDLHFLLDSGLQLPAQRAASATASPFFRALLSGSFAEAQMDLVPLRGLSPGAAWPVLHHLHGCRGCGAALGPVPPPGQPLLGSEAEEALEAAGRFLLPGLEEELEEAVGRIHLGPQGGPESVGEVFRLGRPRLAAHCARWTLGSEQCPRKRGLALVGLVEAAGEEAGPLTEALLAVVMGIELGARVPA

SEQ ID NO: 78133 - protein, 91 aa, Homo sapiens
MLRTAMGLRSWLAAPWGALPPRPPLLLLLLLLLLLQPPPPTWALSPRISLPLGSEERPFLRFEAEHISNYTALLLSRDGRTLYVGAREALF

SEQ ID NO: 78134 - protein, 172 aa, Homo sapiens
MEEIDRFQDPAAASISDGDCDAREGESVAMNYKPSPLQVKLEKQRELARKGSLKNGSMGSPVNQQPKKNNVMARTRLVVPNKGYSSLDQSPDEKPLVALDTDSDDDFDMSRYSSSGYSSAEINQDLNIQLLKDGYRLDEIPDDEDLDLIPPKSVNPTCMCCQATSSTACHIQ

SEQ ID NO: 78135 - protein, 118 aa, Homo sapiens
MLHTEGHALLRAVGQGKLRLARLLLEGGAYVNEGDAQGETALMAACRARYDDPQNKARMVRYLLEQGADPNIADRLGRTALMHACAGGGGAAVASLLLAHGADPSVRDHAGASALVHA

SEQ ID NO: 78136 - protein, 177 aa, Homo sapiens
IYLERFPIFKACFSANGEEVLATSTHSKVLYVYDMLAGKLIPVHQVRGLKEKIVRSFEVSPDGSFLLINGIAGYLHLLAMKTKELIGSMKINGRVAASTFSSDSKKVYASSGDGEVYVWDVNSRKCLNRFVDEGSLYGLSIATSRNGQYVACGLKLGKLLVYISLPPFANWSLGGKF

SEQ ID NO: 78137 - protein, 96 aa, Homo sapiens
MAPERLRSRALSAFKLRGLLLRGEAIKYLTEALQSISELELEDKLEKIINAVEKQPLSSNMIERSVVEAAVQECSQSVDETMYVGTVNFFPPWRCY

SEQ ID NO: 78138 - protein, 112 aa, Homo sapiens
MSGGEQKPERYYVGVDVGTGSVRAALVDQSGVLLAFADQPIKNWEPQFNHHEQSSEDIWAACCVVTKKVVQGIDLNQIRGLGFDATCSLVVLDKQFHPLPVNQEELERDLLG

SEQ ID NO: 78139 - protein, 250 aa, Homo sapiens
  MOD_RES (1)..(1): Any amino acid
XRIQCFKTDTKEFVREIKHSSFGRNVFAISYIPGLLFAVNGKPHFGDQEPVQGFVMNFSNGEIIDIFKPVRKHFDMPHDIVASEDGTVYIGDAHTNTVWKFTLTEKLEHRSVKKAGIEVQEIKEAEAVVETKMENKPTSSELQKMQEKQKLIKEPGSGVPVVLITTLLVIPVVVLLAIAIFIRWKKSRAFGGKGSGGLNLGNFFASRKGYSRKGFDRLSTEGSDQEKEDDGSESEEEYSAPLPALAPSSS

SEQ ID NO: 78140 - protein, 138 aa, Homo sapiens
MEAYTPKLTQVLSSSAASSTITALSPGGALMQGGTQQAINQMVPNDIQSELKHLYVAVGELLRHFWSCFPVNTPFLEEKVVKMKSNLERFQVTKLCPFQEKIRRQYLSTNLVSHIEEMLQTAYNKLHTWQSRRLMKKT

SEQ ID NO: 78141 - protein, 115 aa, Homo sapiens
MKPPGGESSNLFGSPEEATPSSRPNRMASNIFGPTEEPQNIPKRTNPPGGKGSGIFDESTPVQTRQHLNPPGGKTSDIFGSPVTATSRLAHPNKPKDHVFLCEGEEPKSDLKAAR

SEQ ID NO: 78142 - protein, 736 aa, Homo sapiens
  MOD_RES (1)..(1): Any amino acid
XKKSLEIKEEKIAALEARLEESTNYNQQLRQELKTNATLQAEKQALKTQLKQLETQNNNLQAQILALQRQTVSLQEQNTTLQTQNAKLQVENSTLNSQSTSLMNQNAQLLIQQSSLENENESVIKEREDLKSLYDSLIKDHEKLELLHERQASEYESLISKHGTLKSAHKNLEVEHRDLEDRYNQLLKQKGQLEDLEKMLKVEQEKMLLENKNHETVAAEYKKLCGENDRLNHTYSQLLKETEVLQTDHKNLKSLLNNSKLEQTRLEAEFSKLKEQYQQLDITSTKLNNQCELLSQLKGNLEEENRHLLDQIQTLMLQNRTLLEQNMESKDLFHVEQRQYIDKLNELRRQKEKLEEKIMDQYKFYDPSPPRRRGNWITLKMRKLIKSKKDINRERQKSLTLTPTRSDSSEGFLQLPHQDSQDSSSVGSNSLEDGQTLGTKKSSTMNDLVQSMVLAGQWTGSTENLEVPDDISTGKRRKELGAMAFSTTAINFSTVNSSAGFRSKQLVNNKDTTSFEDISPQGVSDDSSTGSRVHASRPASLDSGRTSTSNSNNNASLHEVKAGAVNNQSRPQSHSSGEFSLLHDHEAWSSSGSSPIQYLKRQTRSSPVLQHKISETLESRHHKIKTGSPGSEVVTLQQFLEESNKLTSVQIKSSSQENLLDEVMKSLSVSSDFLGKDKPVSCGLARSVSGKTPGDFYDRRTTKPEFLRPGPRKTEDTYFISSAGKPTPGTQGKIKL

SEQ ID NO: 78143 - protein, 249 aa, Homo sapiens
EKCGTLIKLSNNNKTAERRRPLDEFNNGVVMTNRPLRDNEMFEIRIDKLVDKWSGSIEIGVTTHNPNSLEYPATMTNLQSGTIMMSGCGILTNGKGTRREYCEFSLDELQEGDHIGLTRKSNSALHFFINGIDQGVATPLTPPVVYGVVDLYGMAVKVTIVHNNNHSDRLRRNNAILRALSPEGALRRAAPAAQAEPERLLFHPNCGQKAAITHEGRTALRPHATDDFNHGVVLSSRALRDGEVFQGPG

SEQ ID NO: 78144 - protein, 150 aa, Homo sapiens
  MOD_RES (1)..(1): Any amino acid
XYRVNDVPEEFLYNPLTRVYGEPHRRPEVQNATIEFMAPSEYMLRPPQPPVYLFVFDVSHNAVETGYLNSVCQSLLDNLDLLPGNTRTKIGFITFDSTIHFYGLQESLSQPQMLIVSDIEDVFIPMPENLLVNLNESKEVRHIFLPDMFN

SEQ ID NO: 78145 - protein, 234 aa, Homo sapiens
  MOD_RES (1)..(1): Any amino acid
XPDITEEEMRKLFEKYGKAGEVFIHKDKGFGFIRLVERAVVIVDDRGRPSGKGIVEFSGKPAARKALDRCSEGSFLLTTFPRPVTVEPMDQLDDEEGLPEKLVIKNQQFHKEREQPPRFAQPGSFEYEYAMRWKALIEMEKQQQDQVDRNIKEAREKLEMEMEAARHEHQVMLMRQDLMRRQEELRRMEELHNQEVQKRKQLELRQEEERRRREEEMRRQQEEMMRRQQEGFKG

SEQ ID NO: 78146 - protein, 115 aa, Homo sapiens
MDSKDESSHVWPTSAEHEQNAAQVHFVPDTGTVAQIVYTDDQVRPPQQVVYTADGASYTSVDGPEHTLVYIHPVEAAQTLFTDPGQVAYVQQDATAQQETDFSMMKQTGTSSLSF

SEQ ID NO: 78147 - protein, 35 aa, Homo sapiens
MQEITKHFVVCHVDAPGQQVGASQFPQGYQFPSME

SEQ ID NO: 78148 - protein, 260 aa, Homo sapiens
AQQASEKIDRFRAHAASVFLTLLHFDSPPIPHVPHRGELEKLFPRSDVASVNWSAPSQAFPRITQLLGLPTYRYHVLLGLVVSLGGLTESTIRHSTQSLFEYMKGIQSDPQALGSFSGTLLQIFEDNLLNESHPFAVKLLALCKKEIKNSKDIQKLLSGIAVFCGMVQFPGDVRRQALLQLCLLLCHRFPLIRKTTASQVYETLLTYSDVVGADVLDEVVTVLSDTAWDAELAVVREQRNRLCDLLGVPRPQLVPQPGAC

SEQ ID NO: 78149 - protein, 290 aa, Homo sapiens
AGSIPATKVEITVSCRNLLDKDMFSKSDPLCVMYTQGMENKQWREFGRTEVIDNTLNPDFVRKFIVDYFFEEKQNLRFDLYDVDSKSPDLSKHDFLGQAFCTLGEIVGSPGSRLEKPLTIGAFSLNSRTGKPMPAVSNGSGLWMESLRTTGLEASGGVPGKKCGTIILSAEELSNCRDVATMQFCANKLDKKDFFGKSDPFLVFYRSNEDGTFTICHKTEVMKNTLNPVWQTFSIPVRALCNGDYDRTIKVEVYDWDRDGSHDFIGEFTTSYRELARGQSQFNIYEVVNP

SEQ ID NO: 78150 - protein, 70 aa, Homo sapiens
MLWALWPRWLADKMLPLLGAVLLQKREKRGPLWRHWRRETYPYYDLQVKVLRATNIRGTDLPSPRKPFQQ

SEQ ID NO: 78151 - protein, 135 aa, Homo sapiens
MSRVLQKDAEQESQMRAEIQDMKQELSTVNMMDEFARYARLERKINKMTDKLKTHEKCPAVSSSECHLPGPVSCDEERFLRAARVLRDPGHSVCTVRELSLWLGKQTEGPVQAQDKLDSHQGFVYCAHWEIRRKI

SEQ ID NO: 78152 - protein, 164 aa, Homo sapiens
  MOD_RES (1)..(1): Any amino acid
XTSPRSPPCCVSLKALSSQRWLRTMSTFTRRSGFTICQVQPRRYLKKLPLQANFYPMPVMAYIQDAQKRLTLHTAQALGVSSLKDGQLEVILDRRLMQDDNRGLGQGLKDNKRTCNRFRLLLERRTVGSEVQDSHSTSYPSLLSHLTSMYLNAPALALPVARMQ

SEQ ID NO: 78153 - protein, 259 aa, Homo sapiens
MVMSFRVSELQVLLGFAGRNKSGRKHELLAKALHLLKSSCAPSVQMKIKELYRRRFPRKTLGPSDLSLLSLPPGTSPVGSPGPLAPIPPTLLAPGTLLGPKREVDMHPPLPQPVHPDVTMKPLPFYEVYGELIRPTTLASTSSQRFEEAHFTFALTPQQVQQILTSREVLPGAKCDYTIQVQLRFCLCETSCPQEDYFPPNLFVKVNGKLCPLPGYLPPTKNGAEPKRPSRPINITPLARLSATVPNTIVVNWSSEFGR

SEQ ID NO: 78154 - protein, 651 aa, Homo sapiens
MYGFVNHALELLVIRNYGPEVWEDIKREEVLVCRPGCSQIPELNGSSHLGFPKCWDNRKEAQLDEEGQFLVRIIYDDSKTYDLVAAASKVLNLNAGEILQMFGKMFFVFCQESGYDTILRVLGSNVREFLQNLDALHDHLATIYPGMRAPSFRCTDAEKGKGLILHYYSEREGLQDIVIGIIKTVAQQIHGTEIDMKVIQQRNEECDHTQFLIEEKESKEEDFYEDLDRFEENGTQESRISPYTFCKAFPFHIIFDRDLVVTQCGNAIYRVLPQLQPGNCSLLSVFSLVRPHIDISFHGILSHINTVFVLRSKEGLLDVEKLECEDELTGTEISCLRLKGQMIYLPEADSILFLCSPSVMNLDDLTRRGLYLSDIPLHDATRDLVLLGEQFREEYKLTQELEILTDRLQLTLRALEDEKKKTDTLLYSVLPPSVANELRHKRPVPAKRYDNVTILFSGIVGFNAFCSKHASGEGAMKIVNLLNDLYTRFDTLTDSRKNPFVYKVETVGDKYMTVSGLPEPCIHHARSICHLALDMMEIAGQVQVDGESVQITIGIHTGEVVTGVIGQRMPRYCLFGNTVNLTSRTETTGEKGKINVSEYTYRCLMSPENSDPQFHLEHRGPVSMKGKKEPMQVWFLSRKNTGTEETKQDDD

SEQ ID NO: 78155 - protein, 83 aa, Homo sapiens
MNIDDKLEGLFLKCGGIDEMQSSRTMVVMGGVSGQSTVSGELQDSVLQDRSMPHQEILAADEVLQESEMRQQDMISHDELMVH

SEQ ID NO: 78156 - protein, 218 aa, Homo sapiens
MQKASWRTCSHTEELATKYERAIQHPADEKLQEKAWGAVVPLVGKKEILRIFSEVRSSIKRSSGSLNKYPIFSHPASRARQALAKQFAEILHFTLRFDELKMTNPAIQNDFSYYRRTLSRMRINNVPAEGENEVNNELANRMSLFYAEATPMLKTLSDATTKFVSENKNLPIENTTDCLSTMASVCRVMLETPEYRSRFTNEETVSFLEGNGGCHNTL

SEQ ID NO: 78157 - protein, 431 aa, Homo sapiens
MAALRALCGFRGVAAQVLRPGAGVRLPIQPSRGVRQWQPDVEWAQQFGGAVMYPSKETAHWKPPPWNDVDPPKDTIVKNITLNFGPQHPAAHGVLRLVMELSGEMVRKCDPHIGLLHRGTEKLIEYKTYLQALPYFDRLDYVSMMCNEQAYSLAVEKLLNIRPPPRAQWIRVLFGEITRLLNHIMAVTTHALDLGAMTPFFWLFEEREKMFEFYERVSGARMHAAYIRPGGVHQLLTNNRIWRNRTIDIGVVTAEEALNYGFSGVMLRGSGIQWDLRKTQPYDVYDQVEFDVPVGSRGDCYDRYLCRVEEMRQSLRIIAQCLNKMPPGEIKVDDAKVSPPKRAEMKTSMESLIHHFKLYTEGYQVPPGATYTAIEAPKGEFGVYLVSDGSSRPYRCKIKAPGFAHLAGLDKMSKGHMLADVVAIIGTRPIV

SEQ ID NO: 78158 - protein, 71 aa, Homo sapiens
MTKSNGEEPKMGGRMERFQQGVRKRTLLAKKKVQNITKEDVKSYLFRNAFVLLTVTAVIVQSLDLPSDHTE

SEQ ID NO: 78159 - protein, 943 aa, Homo sapiens
MVAAHAAHSSSSAEWIACLDKRPLERSSEDVDIIFTRLKEVKAFEKFHPNLLHQICLCGYYENLEKGITLFRQGDIGTNWYAVLAGSLDVKVSETSSHQDAVTICTLGIGTAFGESILDNTPRHATIVTRESSELLRIEQKDFKALWEKYRQYMAGLLAPPYGVMETGSNNDRIPDKENTPLIEPHVPLRPANTITKVPSEKILRAGKILRNAILSRAPHMIRDRKYHLKTYRQCCVGTELVDWMMQQTPCVHSRTQAVGMWQVLLEDGVLNHVDQEHHFQDKYLFYRFLDDEHEDAPLPTEEEKKECDEELQDTMLLLSQMGPDAHMRMILRKPPGQRTVDDLEIIYEELLHIKALSHLSTTVKRELAGVLIFESHAKGGTVLFNQGEEGTSWYIILKGSVNVVIYGKGVVCTLHEGDDFGKLALVNDAPRAASIVLREDNCHFLRVDKEDFNRILRDVEANTVRLKEHDQDVLVLEKVPAGNRASNQGNSQPQQKYTVMSGTPEKILEHFLETIRLEATLNEATDSVLNDFIMMHCVFMPNTQLCPALVAHYHAQPSQGTEQEKMDYALNNKRRVIRLVLQWAAMYGDLLQEDDVSMAFLEEFYVSVSDDARMIAALKEQLPELEKIVKQISEDAKAPQKKHKVLLQQFNTGDERAQKRQPIRGSDEVLFKVYCMDHTYTTIRVPVATSVKEVISAVADKLGSGEGLIIVKMSSGGEKVVLKPNDVSVFTTLTINGRLFACPREQFDSLTPLPEQEGPTVGTVGTFELMSSKDLAYQMTIYDWELFNCVHELELIYHTFGRHNFKKTTANLDLFLRRFNEIQFWVVTEICLCSQLSKRVQLLKKFIKIAAHCKEYKNLNSFFAIVMGLSNVAVSRLALTWERMIANTARTVRYYRSQPFNPDAAQANKNHQDVRSYVRQLNVIDNQRTLSQMSHRLEPRRP

SEQ ID NO: 78160 - protein, 15 aa, Homo sapiens
MSSEDREAQEDELLA

SEQ ID NO: 78161 - protein, 83 aa, Homo sapiens
MAIQFRSLFPLALPGMLALLGWWWFFSRKKGHVSSHDEQQVEAGAVQLRADPAIKEPLPVEDVCPKVVSTPPSVTEPPEKELS

SEQ ID NO: 78162 - protein, 68 aa, Homo sapiens
MPNSEPASLLELFNSIATQGELVRSLKAGNASKDEIDSAVKMLVSLKMSYKAAAGEDYKADCPPGNPA

SEQ ID NO: 78163 - protein, 275 aa, Homo sapiens
DKGKCGLPEIFDPPEELERKVWELARLVWQSSSVVFHTGAGISTASGIPDFRDKLAELHGNMFVEECAKCKTQYVRDTVVGTMGLKATGRLCTVAKARGLRACRGELRDTILDWEDSLPDRDLALADEASRNADLSITLGTSLQIRPSGNLPLATKRRGGRLVIVNLQPTKHDRHADLRIHGYVDEVMTRLMKHLGLEIPAWDGPRVLERALPPLPRPPTPKLEPKEESPTRINGSIPAGPKQEPCAQHNGSEPASPKRERPTSPAPHRPPKRVK

SEQ ID NO: 78164 - protein, 144 aa, Homo sapiens
MLLPLLLLLPMCWAVEVKRPRGVSLTNHHFYDESKPFTCLDGSATIPFDQVNDDYCDCKDGSDEPGTAACPNGSFHCTNTGYKPLYIPSNRVNDGVCDCCDGTDEYNSGVICENTCKEKGRKERESLQQMAEVTREGFRLKKIL

SEQ ID NO: 78165 - protein, 131 aa, Homo sapiens
MSEETLQSKLAAAKKKLPWGAVQGSRAMSDLLLLLLDLTLLLLLMLLGFAGYSGQLAGVAVSAGSPPIPTSSMWSPMVRLGGFSPELQHLPQTLLHRCPLGQPCMGVLTFRDVALEFSLEEWQCLDTAQQN

SEQ ID NO: 78166 - protein, 72 aa, Homo sapiens
MSREPTPPLPGDMSTGPIAESWCYTQVKVVKFSYMWTINNFSFCREEMGEVLKSSTFSSGPSDKMKCQLPQK

SEQ ID NO: 78167 - protein, 116 aa, Homo sapiens
MWNPNAGPCPPPPGAPHGNPAFPPGGPPHPVPQPGYPGCQPLGPYPPPYPPPAPGIPPVNPLAPGMVGPAVIVDKKMQKKMKKAHKKMHKHQKHHKYHKHGKHSSSSSSSSSSDSD

SEQ ID NO: 78168 - protein, 3469 aa, Homo sapiens
MANRRVGRGCWEVSPTERRPPAGLRGPAAEEEASSPPVLSLSHFCRSPFLCFGDVLLGASRTLSLALDNPNEEVAEVKISHFPAADLGFSVSQRCFVLQPKEKIVISVNWTPLKEGRVREIMTFLVNDVLKHQAILLGNAEEQKKKKRSLWDTIKKKKISASTSHNRRVSNIQNVNKTFSVSQKVDRVRSPLQACENLAMNEGGPPTENNSLILEENKIPISPISPAFNECHGATCLPLSVRRSTTYSSLHASENRELLNVHSANVSKVSFNEKAVTETSFNSVNVNGQRGENSKLSLTPNCSSTLNITQSQIHFLSPDSFVNNSHGANNELELVTCLSSDMFMKDNSQPVHLESTIAHEIYQKILSPDSFIKDNYGLNQDLESESVNPILSPNQFLKDNMAYMCTSQQTCKVPLSNENSQVPQSPEDWRKSEVSPRIPECQGSKSPKAIFEELVEMKSNYYSFIKQNNPKFSAVQDISSHSHNKQPKRRPILSATVTKRKATCTRENQTEINKPKAKRCLNSAVGEHEKVINNQKEKEDFHSYLPIIDPILSKSKSYKNEVTPSSTTASVARKRKSDGSMEDANVRVAITEHTEVREIKRIHFSPSEPKTSAVKKTKNVTTPISKRISNREKLNLKKKTDLSIFRTPISKTNKRTKPIIAVAQSSLTFIKPLKTDIPRHPMPFAAKNMFYDERWKEKQEQGFTWWLNFILTPDDFTVKTNISEVNAATLLLGIENQHKISVPRAPTKEEMSLRAYTARCRLNRLRRAACRLFTSEKMVKAIKKLEIEIEARRLIVRKDRHLWKDVGERQKVLNWLLSYNPLWLRIGLETTYGELISLEDNSDVTGLAMFILNRLLWNPDIAAEYRHPTVPHLYRDGHEEALSKFTLKKLLLLVCFLDYAKISRLIDHDPCLFCKDAEFKASKEILLAFSRDFLSGEGDLSRHLGLLGLPVNHVQTPFDEFDFAVTNLAVDLQCGVRLVRTMELLTQNWDLSKKLRIPAISRLQKMHNVDIVLQVLKSRGIELSDEHGNTILSKDIVDRHREKTLRLLWKIAFAFQVDISLNLDQLKEEIAFLKHTKSIKKTISLLSCHSDDLINKKKGKRDSGSFEQYSENIKLLMDWVNAVCAFYNKKVENFTVSFSDGRVLCYLIHHYHPCYVPFDAICQRTTQTVECTQTGSVVLNSSSESDDSSLDMSLKAFDHENTSELYKELLENEKKNFHLVRSAVRDLGGIPAMINHSDMSNTIPDEKVVITYLSFLCARLLDLRKEIRAARLIQTTWRKYKLKTDLKRHQEREKAARIIQLAVINFLAKQRLRKRVNAALVIQKYWRRVLAQRKLLMLKKEKLEKVQNKAASLIQGYWRRYSTRQRFLKLKYYSIILQSRIRMIIAVTSYKRYLWATVTIQRHWRAYLRRKQDQQRYEMLKSSTLIIQSMFRKWKQRKMQSQVKATVILQRAFREWHLRKQAKEENSAIIIQSWYRMHKELRKYIYIRSCVVIIQKRFRCFQAQKLYKRRKESILTIQKYYKAYLKGKIERTNYLQKRAAAIQLQAAFRRLKAHNLCRQIRAACVIQSYWRMRQDRVRFLNLKKTIIKFQAHVRKHQQRQKYKKMKKAAVIIQTHFRAYIFAMKVLASYQKTRSAVIVLQSAYRGMQARKMYIHILTSVIKIQSYYRAYVSKKEFLSLKNATIKLQSTVKMKQTRKQYLHLRAAALFIQQCYRSKKIAAQKREEYMQMRESCIKLQAFVRGYLVRKQMRLQRKAVISLQSYFRMRKARQYYLKMYKAIIVIQNYYHAYKAQVNQRKNFLQVKKAATCLQAAYRGYKVRQLIKQQSIAALKIQSAFRGYNKRVKYQSVLQSIIKIQRWYRAYKTLHDTRTHFLKTKAAVISLQSAYRGWKVRKQIRREHQAALKIQSAFRMAKAQKQFRLFKTAALVIQQNFRAWTAGRKQCMEYIELRHAVLVLQSMWKGKTLRRQLQRQHKCAIIIQSYYRMHVQQKKWKIMKKAALLIQKYYRAYSIGREQNHLYLKTKAAVVTLQSAYRGMKVRKRIKDCNKAAVTIQSKYRAYKTKKKYATYRASAIIIQRWYRGIKITNHQHKEYLNLKKTAIKIQSVYRGIRVRRHIQHMHRAATFIKAMFKMHQSRISYHTMRKAAIVIQVRCRAYYQGKMQREKYLTILKAVKVLQASFRGVRVRRTLRKMQTAATLIQSNYRRYRQQTYFNKLKKITKTVQQRYWAMKERNIQFQRYNKLRHSVIYIQAIFRGKKARRHLKMMHIAATLIQRRFRTLMMRRRFLSLKKTAILIQRKYRAHLCTKHHLQFLQVQNAVIKIQSSYRRWMIRKRMREMHRAATFIQSTFRMHRLHMRYQALKQASVVIQQQYQANRAAKLQRQHYLRQRHSAVILQAAFRGMKTRRHLKSMHSSATLIQSRFRSLLVRRRFISLKKATIFVQRKYRATICAKHKLYQFLHLRKAAITIQSSYRRLMVKKKLQEMQRAAVLIQATFRMYRTYITFQTWKHASILIQQHYRTYRAAKLQRENYIRQWHSAVVIQAAYKGMKARQLLREKHKASIVIQSTYRMYRQYCFYQKLQWATKIIQEKYRANKKKQKVFQHNELKKETCVQAGFQDMNIKKQIQEQHQAAIIIQKHCKAFKIRKHYLHLRATVVSIQRRYRKLTAVRTQAVICIQSYYRGFKVRKDIQNMHRAATLIQSFYRMHRAKVDYETKKTAIVVIQNYYRLYVRVKTERKNFLAVQKSVRTIQAAFRGMKVRQKLKNVSEEKMAAIVNQSALCCYRSKTQYEAVQSEGVMIQEWYKASGLACSQEAEYHSQSRAAVTIQKAFCRMVTRKLETQKCAALRIQFFLQMAVYRRRFVQQKRAAITLQHYFRTWQTRKQFLLYRKAAVVLQNHYRAFLSAKHQRQVYLQIRSSVIIIQARSKGFIQKRKFQEIKNSTIKIQAMWRRYRAKKYLCKVKAACKIQAWYRCWRAHKEYLAILKAVKIIQGCFYTKLERTRFLNVRASAIIIQRKWRAILPAKIAHEHFLMIKRHRAACLIQAHYRGYKGRQVFLRQKSAALIIQKYIRAREAGKHERIKYIEFKKSTVILQALVRGWLVRKRFLEQRAKIRLLHFTAAAYYHLNAVRIQRAYKLYLAVKNANKQRWFRARLQEKRFIQKYHSIKKIEHEGQECLSQRNRAASVIQKAVRHFLLRKKQEKFTSGIIKIQALWRGYSWRKKNDCTKIKAIRLSLQVVNREIREENKLYKRTALALHYLLTYKHLSAILEALKHLEVVTRLSPLCCENMAQSGAISKIFVLIRSCNRSIPCMEVIRYAVQVLLNVSKYEKTTSAVYDVENCIDILLELLQIYREKPGNKVADKGGSIFTKTCCLLAILLKTTNRASDVRSRSKVVDRIYSLYKLTAHKHKMNTERILYKQKKNSSISIPFIPETPVRTRIVSRLKPDWVLRRDNMEEITNPLQAIQMVMDTLGIPY

SEQ ID NO: 78169 - protein, 213 aa, Homo sapiens
MDPLETPIKDGILYQQHVKFGKKCWRKVWALLYAGGPSGVARLESWEVRDGGLGAAGDRSAGPGRRGERRVIRLADCVSVLPADGESCPRDTGAFLLTTTERSHLLAAQHRQAWMGPICQLAFPGTGEASSGSTDAQSPKRGLVPMEENSIYSSWQEVGEFPVVVQRTEAATRCQLKGPALLVLGPDAIQLREAKGTQALYSWPYHFLRKFGS

SEQ ID NO: 78170 - protein, 334 aa, Homo sapiens
MVMEKPSPLLVGREFVRQYYTLLNQAPDMLHRFYGKNSSYVHGGLDSNGKPADAVYGQKEIHRKVMSQNFTNCHTKIRHVDAHATLNDGVVVQVMGLLSNNNQALRRFMQTFVLAPEGSVANKFYVHNDIFRYQDEVFGGFVTEPQEESEEEVEEPEERQQTPEVVPDDSGTFYDQAVVSNDMEEHLEEPVAEPEPDPEPEPEQEPVSEIQEEKPEPVLEETAPEDAQKSSSPAPADIAQTVQEDLRTFSWASVTSKNLPPSGAVPVTGIPPHVVKVPASQPRPESKPESQIPPQRPQRDQRVREQRINIPPQRGPRPSKSSEGRFLVWGILSP

SEQ ID NO: 78171 - protein, 172 aa, Homo sapiens
GLEESGPRPTATPCGCVKPALETGNLLTEPVGYLESCFSAKNGTPRQPSICSYSRACLRIRKRIFNNPEHSLMGLEQFSHVWILFVFHKNGHLSCKAKVQPPRLNGAKTGVFSTRSPHRPNAIGLTLAKLEKVEGNPFHFYFYLFPHPKKPYKINSIHHWLFIQTSTNDVNS

SEQ ID NO: 78172 - protein, 91 aa, Homo sapiens
MESPQLHCILNSNSVACSFAVGAGFLAFLSCLAFLVLDTQETRIAGTRFKTAFQLLDFILAVLWAVVWFMGFCFLANQWQHSPPKEFLLGS

SEQ ID NO: 78173 - protein, 177 aa, Homo sapiens
MYQPEDDNNSDVTSDDDMTRNRRESSPPHSVHSFSGDRDWDRRGRSRDMEPRDRWSHTRNPRSRMPPRDLSLPVVAKTSFEMDREDDRDSRAYESRSQDAESYQNVVDLAEDRKPHNTIQDNMENYRKLLSLGVQLAEDDGHSHMTQGHSSRSKRSAYPSTSRGKQEAHPTEEPHNQ

SEQ ID NO: 78174 - protein, 56 aa, Homo sapiens
IPVAIFITLVNVFIGQAELAEIPEGYVPEHWEYYKGKGAGSAKIDACERRWTLVLL

SEQ ID NO: 78175 - protein, 50 aa, Homo sapiens
  MOD_RES (1)..(1): Any amino acid
XESPRFLLINRNEENRAKSGDEGRESADDAGEEGHHPGAVPLPRLPPAHP

SEQ ID NO: 78176 - protein, 144 aa, Homo sapiens
MEKIPEDGPALIIFYHGAIPIDFYYFMAKIFIHKGRTCRVVADHFVFKIPGFSLLLDVFCALHGPREKCVEILRSGHLLAISPGGVREALISDETYNIVWGHRRGFAQVAIDAKVPIIPMFTQNIREGFRSLGGTNEECCSSFD

SEQ ID NO: 78177 - protein, 510 aa, Homo sapiens
MGKRQHQKDKMYITCAEYTHFYGGKKPDLPQTNFRRLPFDHCSLSLQPFVYPVCTPDGIVFDLLNIVPWLKKYGTNPSNGEKLDGRSLIKLNFSKNSEGKYHCPVLFTVFTNNTHIVAVRTTGNVYAYEAVEQLNIKAKNFRDLLTDEPFSRQDIITLQDPTNLDKFNVSNFYHVKNNMKIIDPDEEKAKQDPSYYLKNTNAETRETLQELYKEFKGDEILAATMKAPEKKKVDKLNAAHYSTGKVSASFTSTAMVPETTHEAAAIDEDVLRYQFVKKKGYVRLHTNKGDLNLELHCDLTPKTCENFIRLCKKHYYDGTIFHRSIRNFVIQGGDPTGTGTGGESYWGKPFKDEFRPNLSHTGRGILSMANSGPNSNRSQFFITFRSCAYLDKKHTIFGRVVGGFDVLTAMENVESDPKTDRPKEEIRIDATTVFVDPYEEADAQIAQERKTQLKEASSRGRALNQCHCPHVQEEAQSGFWGLQLLVAAATCRLYLCPSFSHQSLMLKLQA

SEQ ID NO: 78178 - protein, 288 aa, Homo sapiens
  MOD_RES (1)..(1): Any amino acid
XKEDGCHERDDDTTSVNSDRSEEVFDMTKGNLTLLEKAIALETERAKAMREKMAMEAGRRDNMRSYEDQSPRQLPGEDRKPKSSDSHVKKPYYDPSRTEKKESKCPTPGCDGTGHVTGLYPHHRSLSGCPHKDRVPPEILAMHESVLKCPTPGCTGRGHVNSNRNSHRSLSGCPIAAAEKLAKAQEKHQSCDVSKSSQASDRVLRPMCFVKQLEIPQYGYRNNVPTTTPRSNLAKELEKYSKTSFEYNSYDNHTYGKRAIAPKRSGTARTPAPAAAAPAATRPAAAAT

SEQ ID NO: 78179 - protein, 222 aa, Homo sapiens
METVVIVAIGVLATIFLASFAALVLVCRQRYCRPRDLLQRYDSKPIVDLIGAMETQSEPSELELDDVVITNPHIEAILENEDWIEDASGLMSHCIAILKICHTLTEKLVAMTMGSGAKMKTSASVSDIIVVAKRISPRVDDVVKSMYPPLDPKLLDARTTALLLSVSHLVLVTRNACHLTGGLDWIDQSLSAAEEHLEVLREAALASEPDKGLPGPEGFLQE

SEQ ID NO: 78180 - protein, 86 aa, Homo sapiens
MVGKWHLGFYRKECLPTRRGFDTFLGSLTGNVDYYTYDNCDGPGVCGFDLHEGENVAWGLSGQYSTMLYAQRASHILASHSPQRPL

SEQ ID NO: 78181 - protein, 140 aa, Homo sapiens
MKGSKSFVLQKMFSCSKNPERAALYFVSGVCIGLVLTLAALVIRISCHTDCRRRPGKKFLQDRESSSDSSDSEDGSEDTVSDLSVRRHRRFERTLNKNVFTSAEELERAQRLEERERIIREIWMNGQPEVPGTRSLNRYY

SEQ ID NO: 78182 - protein, 768 aa, Homo sapiens
METGLGAPLFKAWLLISVWGLGVDPSLQIDVLTELELGESTTGVRQVPGLHNGTKAFLFQDTPRSIKASTATAEQFFQKLRNKHEFTILVTLKQTHLNSGVILSIHHLDHRYLELESSGHRNEVRLHYRSGSHRPHTEVFPYILADDKWHKLSLAISASHLILHIDCNKIYERVVEKPSTDLPLGTTFWLGQRNNAHGYFKGIMQDVQLLVMPQGFIAQCPDLNRTCPTCNDFHGLVQKIMELQDILAKTSAKLSRAEQRMNRLDQCYCERTCTMKGTTYREFESWIDGCKNCTCLNGTIQCETLICPNPDCPLKSALAYVDGKCCKECKSICQFQGRTYFEGERNTVYSSSGVCVLYECKDQTMKLVESSGCPALDCPESHQITLSHSCCKVCKGYDFCSERHNCMENSICRNLNDRAVCSCRDGFRALREDNAYCEDIDECAEGRHYCRENTMCVNTPGSFMCICKTGYIRIDDYSCTEHDECITNQHNCDENALCFNTVGGHNCVCKPGYTGNGTTCKAFCKDGCRNGGACIAANVCACPQGFTGPSCETDIDECGTGRHSCANDTICFNLDGGYDCRCPHGKNCTGDCIHDGKVKHNGQIWVLENDRCSVCSCQNGFVMCRRMVCDCENPTVDLFCCPECDPRLSSQCLHQNGETLYNSGDTWVQNCQQCRCLQGEVDCWPLPCPDVECEFSILPENECCPRCVTDPCQADTIRNDITKTCLDEMNVVRFTGSSWIKHGTECTLCQCKNGHICCSVDPQCLQEL

SEQ ID NO: 78183 - protein, 100 aa, Homo sapiens
MLGTDRCVVEEWLSEFKALPDTQITSYAATLHRKKTLVPALYKVIQDSNNEIQPPRVPLLCTGVSLKKFSSWSLSAISCLSSIVAQRFDLRGSHCSSCQN

SEQ ID NO: 78184 - protein, 339 aa, Homo sapiens
MSSNSSTSQWPRPGGQAPSSPSYENSLHSLKNRVEQQLHEHLQDAMSFLKDVCEQSRMEDRLDRLDDAIHVLRNHAVGPSTSLPAGHSDIHSLLGPSHNAPIGSLNSNYGGSSLVASSRSASMVGTHREDSVSLNGNHSVLSSTVTTSSTDLNHKTQENYRGGLQSQSGTVVTTEIKTENKEKDENLHEPPSSDDMKSDDESSQKDIKVSSRGRTSTNEDEDLNPEQKIEREKERRMANNARERLRVRDINEAFKELGRMCQLHLKSEKPQTKLLILHQAVAVILSLEQQVRERNLNPKAACLKRREEEKVSAVSAEPPTTLPGTHPGLSETTNPMGHM

SEQ ID NO: 78185 - protein, 84 aa, Homo sapiens
MLTELVHRGSVYDAREFSVHFVCGGLAACMATLTVHPVDVLRTRFAAQGEPKVYNTLRHAVGTMYRSEGPQVFYKGLAPTLIAI

SEQ ID NO: 78186 - protein, 709 aa, Homo sapiens
MGHRTAMPEPRGSSQLRVNAAFAARYNRYREREELQRLKDRYGDRDSSSDSSSESDSSDERVEFDPQQERDFYKTLSLLKKKDPRIYQKDATFYNRTASSSDSEEDPEALEKQKKVRPMYLKDYERKVILEKAGKYVDEENSDGETSNHRLQETSSQSYVEEQKQLKESFRAFVEDSEDEDGAGEGGSSLLQKRAKTRQEKAQEEADYIEWLKGQKEIRNPDSLKELTHLKEYWNDPELDEGERFLRDYILNKRYEEEEEEEEDEEEMEEEEGVHGPPVQLAVDDSSDEGELFLKKQEDFEQKYNFRFEEPDSASVKTYPRSIASSVRRKDERRKEKREETRERKKREKAKKQEELKQLKNLKRKEILAKLEKLRKVTGNEMLGLEEGDLEDDFDPAQHDQLMQKCFGDEYYGAVEEEKPQFEEEEGLEDDWNWDTWDGPEQEGDWSQQELHCEDPNFNMDADYDPSQPRKKKREAPLTGKKKRKSPFAAAVGQEKPVFEPGDKTFEEYLDEYYRLDYEDIIDDLPCRFKYRTVVPCDFGLSTEEILAADDKELNRWCSLKKTCMYRSEQEELRDKRAYSQKAQNSWKKRQVFKSLCREEAETPAEATGKPQRDEAGPQRQLPALDGSLMGPESPPAQEEEAPVSPHKKPAPQKRRRAKKARLLGPTVMLGGCEFSRQRLQAFGLNPKRLHFRQLGRQRRKQQGPKNSS

SEQ ID NO: 78187 - protein, 22 aa, Homo sapiens
  MOD_RES (1)..(1): Any amino acid
XNYGGATNKLIFGTGTLLAVQP

SEQ ID NO: 78188 - protein, 54 aa, Homo sapiens
  MOD_RES (1)..(1): Any amino acid
XLKQKLERCHSAELALNVITKKRKGYEDDDYVSKKSKHEEIAKLWHQSKVHTYH

SEQ ID NO: 78189 - protein, 151 aa, Homo sapiens
MRVHPRPHSRLAAKLAGLEPETPYPGFEFSELVTGATGTGDLTRKEPTELGASEMADEALAGLDEGALRKLLEVTADLAERRRIRSAIRELQRQELEREEEALASKRFRAERQDNKENWLHSQQREAEQRAALARLAGQLESMNDVEELTA

SEQ ID NO: 78190 - protein, 216 aa, Homo sapiens
  MOD_RES (1)..(1): Any amino acid
XAAAYLLQGSFYGHSIYATLYMDTWRKDSVVMLLHHVVTLILIVSSYAFRYHNVGILVLFLHDISDVQLEFTKLNIYFKSRGGSYHRLHALAADLGCLSFGFSWFWFRLYWFPLKVLYATSHCSLRTVPDIPFYFFFNALLLLLTLMNLYWFLYIVAFAAKVLTGQVHELKDLREYDTAEAQSLKPSKAEEAVAQSSVTFFGTGGARCRHLTHPGL

SEQ ID NO: 78191 - protein, 255 aa, Homo sapiens
ERVEYLFLIIFTVEAFLKVIAYGLLFHPNAYLRNGWNLLDFIIVVVGLFSAILEQATKADGANALGGKGAGFDVKALRAFRVLRPLRLVSGVPSLQVVLNSIIKAMVPLLHIALLVLFVIIIYAIIGLELFMGKMHKTCYNQEGIADVPAEDDPSPCALETGHGRQCQNGTVCKPGWDGPKHGITNFDNFAFAMLTVFQCITMEGWTDVLYWRVFQREGEGQGPGRFPEAAGEAAARRGSQRLPGLDHSGRRHRS

SEQ ID NO: 78192 - protein, 139 aa, Homo sapiens
MQIDVDPQEDPQNAPDVNYVVENPSLDLEQYAASYSGLMRIERLQFIADHCPTLRVEALKMALSFVQRTFNVDMYEEIHRKLSEATRELQNAPDAIPESGVEPPALDTAWVEATRKKALLKLEKLDTDLKNYKGNSIKE

SEQ ID NO: 78193 - protein, 161 aa, Homo sapiens
MKLQTLAVSVTALKFWSAYVPCQTQDRDALRLTLEQIDLIRRMCASYSELELVTSAKALNDTQKLACLIGVEGGHSLDNSLSILRTFYMLGVRYLTLTHTCNTPWAESSAKGVHSFYNNISGLTDFGEKVVAEMNRLGMMVDLSHVSDAVARRALEVSQAP

SEQ ID NO: 78194 - protein, 162 aa, Homo sapiens
MSDQDHSMDEMTAVVKIEKGVGGNNGGNGNGGGAFSQARSSSTGSSSSTGGGGQGANGWQIISSSSGATPTSKEQSGSSTNGSNGSESSKNRTVSGGQYVVAAAPNLQNQQVLTGLPGVMPNIQYQVIPQFQTVDGQQLQFAATGAQVQQDGSGQIQIIPGA

SEQ ID NO: 78195 - protein, 91 aa, Homo sapiens
MDADSDVALDILITNVVCVFRTRCHLNLRKIALEGANVIYKRDVGKVLMKLRKPRITATIWSSGKIICTGATSEEEAKFGARRLARSLQKL

SEQ ID NO: 78196 - protein, 35 aa, Homo sapiens
MRETFRNLACVGKKWEDQSIEDWYKNQGRILRNHM

SEQ ID NO: 78197 - protein, 39 aa, Homo sapiens
MATQGHLTFKDVAIEFSQEEWKCLEPVQKALYKDVMLEN

SEQ ID NO: 78198 - protein, 381 aa, Homo sapiens
ASAGNVAKVQQILLLRKNGLNDRDKMNRTALHLACANGHPEVVTLLVDRKCQLNVCDNENRTALMKAVQCQEEKCATILLEHGADPNLADVHGNTALHYAVYNEDISVATKLLLYDANIEAKNKDDLTPLLLAVSGKKQQMVEFLIKKKANVNAVDKLESSHQLISEYKEERIPKHSSQNSNSVDESSEDSLSRLSGKPGVDDSWPTSDDEDLNFDTKNVPKPSLAKLMTASQQSRKNLEATYGTVRTGNRTLFEDRDSDSQDEVVVESLPTTSIKVQCFSHPTYQSPDLLPKPSHKSLANPGLMKSISENFPQKYVDPLAGAADGKEKNIGNEQAEDVFYIPSCMSGSRNFKMAKLEDTRNVGMPVAHMESPERYLHLKP

SEQ ID NO: 78199 - protein, 225 aa, Homo sapiens
MHLLGPWLLLLVLEYLAFSDSSKWVFEHPETLYAWEGACVWIPCTYRALDGDLESFILFHNPEYNKNTSKFDGTRLYESTKDGKVPSEQKRVQFLGDKNKNCTLSIHPVHLNDSGQLGLRMESKTEKWMERIHLNVSERPFPPHIQLPPEIQESQEVTLTCLLNFSCYGYPIQLQWLLEGVPMRQAAVTSTSLTIKSVFTRSELKFSPQWSHHGKIVTCQLQDAD

SEQ ID NO: 78200 - protein, 160 aa, Homo sapiens
  MOD_RES (1)..(1): Any amino acid
XEEHMRKKQQEFENIRQQNLKLITELMNERNTLQEENKKLSEQLQQKIENDQQHQAAELECEEDVIPDSPITAFSFSGVNRLRRKENPHVRYIEQTHTKLEHSVCANEMRKVSKSSTHPQHNPNENEILVADTYDQSQSPMATTVVAETLGLGVQEESET

SEQ ID NO: 78201 - protein, 910 aa, Homo sapiens
MSKTNKSKSGSRSSRSRSASRSRSRSFSKSRSRSRSLSRSRKRRLSSRSRSRSYSPAHNRERNHPRVYQNRDFRGHNRGYRRPYYFRGRNRGFYPWGQYNRGGYGNYRSNWQNYRQAYSPRRGRSRSRSPKRRSPSPRSRSHSRNSDKSSSDRSRRSSSSRSSSNHSRVESSKRKSAKEKKSSSKDSRPSQAAGDNQGDEAKEQTFSGGTSQDTKASESSKPWPDATYGTGSASRASAVSELSPRERSPALKSPLQSVVVRRRSPRPSPVPKPSPPLSSTSQMGSTLPSGAGYQSGTHQGQFDHGSGSLSPSKKSPVGKSPPSTGSTYGSSQKEESAASGGAAYTKRYLEEQKTENGKDKEQKQTNTDKEKIKEKGSFSDTGLGDGKMKSDSFAPKTDSEKPFRGSQSPKRYKLRDDFEKKMADFHKEEMDDQDKDKAKGRKESEFDDEPKFMSKVIGANKNQEEEKSGKWEGLVYAPPGKEKQRKTEELEEESFPERSKKEDRGKRSEGGHRGFVPEKNFRVTAYKAVQEKSSSPPPRKTSESRDKLGAKGDFPTGKSSFSITREAQVNVRMDSFDEDLARPSGLLAQERKLCRDLVHSNKKEQEFRSIFQHIQSAQSQRSPSELFAQHIVTIVHHVKEHHFGSSGMTLHERFTKYLKRGTEQEAAKNKKSPEIHRRIDISPSTFRKHGLAHDEMKSPREPGYKAEGKYKDDPVDLRLDIERRKKHKERDLKRGKSRESVDSRDSSHSRERSAEKTEKTHKGSKKQKKHRRARDRSRSSSSSSQSSHSYKAEEYTEETEEREESTTGFDKSRLGTKDFVGPSERGGGRARGTFQFRARGRGWGRGNYSGNNNNNSNNDFQKRNREEEWDPEYTPKSKKYYLHDDREGEGSDKWAYVVILETFNLGNFDS

SEQ ID NO: 78202 - protein, 1154 aa, Homo sapiens
MNDTVNKTDQVDCSDLSEHNGLDREESMEVEAPVANKSGSGTSSGSHSSTAPSSSSSSSSSSGGGGSSSTGTSAITTSLPQLGDLTTLGNFSVINSNVIIENLQSTKVAVAQFSQEARCGGASGGKLAVPALMEQLLALQQQQIHQLQLIEQIRHQILLLASQNADLPTSSSPSQGTLRTSANPLSTLSSHLSQQLAAAAGLAQSLASQSASISGVKQLPPIQLPQSSSGNTIIPSNSGSSPNMNILAAAVTTPSSEKVASSAGASHVSNPAVSSSSSPAFAISSLLSPASNPLLPQQASANSVFPSPLPNIGTTAEDLNSLSALAQQRKSKPPNVTAFEAKSTSDEAFFKHKCRFCAKVFGSDSALQIHLRSHTGERPFKCNICGNRFSTKGNLKVHFQRHKEKYPHIQMNPYPVPEHLDNIPTSTGIPYGMSIPPEKPVTSWLDTKPVLPTLTTSVGLPLPPTLPSLIPFIKTEEPAPIPISHSATSPPGSVKSDSGGPESATRNLGGLPEEAEGSTLPPSGGKSEESGMVTNSVPTASSSVLSSPAADCGPAGSATTFTNPLLPLMSEQFKAKFPFGGLLDSAQASETSKLQQLVENIDKKATDPNECIICHRVLSCQSALKMHYRTHTGERPFKCKICGRAFTTKGNLKTHYSVHRAMPPLRVQHSCPICQKKFTNAVVLQQHIRMHMGGQIPNTPVPDSYSESMESDTGSFDEKNFDDLDNFSDENMEDCPEGSIPDTPKSADASQDSLSSSPLPLEMSSIAALENQMKMINAGLAEQLQASLKSVENGSIEGDVLTNDSSSVGGDMESQSAGSPAISESTSSMQALSPSNSTQEFHKSPSIEEKPQRAVPSEFANGLSPTPVNGGALDLTSSHAEKIIKEDSLGILFPFRDRGKFKNTACDICGKTFACQSALDIHYRSHTKERPFICTVCNRGFSTKGNLKQHMLTHQMRDLPSQLFEPSSNLGPNQNSAVIPANSLSSLIKTEVNGFVHVSPQDSKDTPTSHVPSGPLSSSATSPVLLPALPRRTPKQHYCNTCGKTFSSSSALQIHERTHTGEKPFACTICGRAFTTKGNLKVHMGTHMWNSTPARRGRRLSVDGPMTFLGGNPVKFPEMFQKDLAARSGSGDPSSFWNQYAAALSNGLAMKANE

SEQ ID NO: 78203 - protein, 93 aa, Homo sapiens
MREIVHLQAHTMGTVTCNWRGSTCTTTRPQEEIMSPERCWWTWNPAPWTLSVLAPSVRSFGRTTSCLANPEPATTGQRGTTRRAQSWWTLSWT

SEQ ID NO: 78204 - protein, 102 aa, Homo sapiens
KQKLETDAMFRLEHGEADRSTLKKALPTLSHIQEAQSAWKDDFALNSMLRRRFREKKKAIQEEEERDQALQAKASLTIPLVPETEDDRKLAALLKFHTLDCA

SEQ ID NO: 78205 - protein, 693 aa, Homo sapiens
MVLLRKRKPNLRRFTVSPESHSPRASGDRSRQKQQWPAKVPVPRGADQVVQQEGLMCNTKLKRPNQERRNLVPSSQPMTENAPDRAKKGDPSAPSQSELHPALSQAFQGKNSPQVLSEFSGPPLTPTTVGGPRKASFRFRDEDFYSILSLNSRRESDDTEEETQSEECLWVGVRSPCSPSHHKRSRFGGTSTPQAKNKNFEENAENCRGHSSRRSEPSHGSLRISNAMEPATERPSAGQRLSQDPGLPDRESATEKDRGGSENAKKSPLSWDTKSEPRQEVGVNAENVWSDCISVEHRPGTHDSEGYWKDYLNSSQNSLDYFISGRPISPRSSVNSSYNPPASFMHSALRDDIPVDLSMSSTSVHSSDSEGNSGFHVCQPLSPIRNRTPFASAENHNYFPVNSAHEFAVREAEDTTLTSQPQGAPLYTDLLLNPQGNLSLVDSSSSSPSRMNSEGHLHVSGSLQENTPFTFFAVSHFPNQNDNGSRMAASGFTDEKETSKIKADPEKLKKLQESLLEEDSEEEGDLCRICQIAGGSPSNPLLEPCGCVGSLQFVHQECLKKWLKVKITSGADLGAVKTCEMCKQGLLVDLGDFNMIEFYQKHQQSQAQNELMNSGLYLVLLLHLYEQRFAELMRLNHNQVERERIRSWEMEMKAAFLKARSSSKEANCGARRRPLPPALLSTSPSASLPPPLY

SEQ ID NO: 78206 - protein, 67 aa, Homo sapiens
  MOD_RES (1)..(1): Any amino acid
XIPVSTDGKHWWEYVDPTVTLELLDELTHEFLQILEKTPNRLKKIRNWRVRELTGFNRISVFYVTFT

SEQ ID NO: 78207 - protein, 92 aa, Homo sapiens
MQNGFSRTLKSGDGITFGVFGSKFRIEYEPLVACSSCLDVSGKTALNQAILQLGGFTVNNWTEECTHLVMVSVKVTIKTICALICGRPIVKP

SEQ ID NO: 78208 - protein, 135 aa, Homo sapiens
MATKAESNGPVKVWGSIKGLTEGLHGFHVHEFGDNTAGCTSAGPHFNPLSRKHGGPKDEERHVGDLGNVTADKDGVADVSIEDSVISLSGDHCIIGRTLVVHEKADDLGKGGNEESTKTGNAGSRLACGVIGIAQ

SEQ ID NO: 78209 - protein, 189 aa, Homo sapiens
HFPMVVYRKLMGKKGTFRDLGDSHPEFVNLYSDYILNKSVEKQFKAFRRGFHMVTNESPLKYLFRPEEIELLICGSRNLDFQALEETTEYDGGYTRDSVLIREFWEIVHSFTDEQKRLFLQFTTGTDRAPVGGLGKLKMIIAKNGPDTERLPTSHTCFNVLLLPEYSSKEKLKERLLKAITYAKGFGML

SEQ ID NO: 78210 - protein, 217 aa, Homo sapiens
GEKTIQTVPTGAKPAILTATRPITKMIVTQPKGIGSTVQPAAKIIPTKIVYGQQGKTQVLIKPKPVTFQATVVSEQTRQLVTETLQQASRVAEAGNSSIQEGKEEPQNYTDSSSSSTESSQSSQVSHRSQPQQPSQPQRTLLQHVAQSQTATQTSVVVKSIPASSPGAITHIMQQALSSHTAFTKHSEELGTEEGEVEEMDTLDPQTGLFYRSALTQ

SEQ ID NO: 78211 - protein, 469 aa, Homo sapiens
MAAGGDHGSPDSYRSPLASRYASPEMCFVFSDRYKFRTWRQLWLWLAEAEQTLGLPITDEQIQEMKSNLENIDFKMAAEEEKRLRHDVMAHVHTFGHCCPKAAGIIHLGATSCYVGDNTLARVISRLADFAKERASLPTLGFTHFQPAQLTTVGKRCCLWIQDLCMDLQNLKRVRDDLRFRGVKGTTGTQASFLQLFEGDDHKVEQLDKMVTEKAGFKRAFIITGQTYTRKVDIEVLSVLASLGASVHKICTDIRLLANLKEMEEPFEKQQIGSSAMPYKRNPMRSERCCSLARHLMTLVMDPLQTASVQWFERTLDDSANRRICLAEAFLTADTILNTLQNISEGLVVYPKVIERRIRQELPFMATENIIMAMVKAGGSRQDCHEKIRVLSQQAASVVKQEGGDNDLIERIQVDAYFSPIHSQLDHLLDPSSFTGRASQQVQRFLEEEVYPLLKPYESVMKVKAELCL

SEQ ID NO: 78212 - protein, 144 aa, Homo sapiens
  MOD_RES (1)..(1): Any amino acid
XDAGEVYVWGSNKHGQLANEAAFLPVPQKIEAHCFQNEKVTAIWSGWTHLVAQTETGKMFTWGRADYGQLGRKLETYEGWKLEKQDSFLPCSRPPNSMPSSPHCLTGATEVSCGSEHNLAIIVSLQGKYYYPSFADVEMELQRN

SEQ ID NO: 78213 - protein, 154 aa, Homo sapiens
MGPSCPVFLSFTKLSLWWLLLTPAGGEEAKRPPPRAPGDPLSSPSPTALPQGGSHTETEDRLFKHLFRGYNRWARPVPNTSDVVIVRFGLSIAQLIDVDEKNQMMTTNVWLKQEWSDYKLRWNPTDFGNITSLRVPSEMIWIPDIVLYNNRTAR

SEQ ID NO: 78214 - protein, 1598 aa, Homo sapiens
VLRFLRLFGPGKNVPSVWRSARRKRKKKHRELIQEEQIQEVECSVESEVSQKSLWNYDYAPPPPPEQCLSDDEITMMAPVESKFSQSTGDIDKVTDTKPRVAEWRYGPARLWYDMLGVPEDGSGFDYGFKLRKTEHEPVIKSRMIEEFRKLEENNGTDLLADENFLMVTQLHWEDDIIWDGEDVKHKGTKPQRASLAGWLPSSMTRNAMAYNVQQGFAATLDDDKPWYSIFPIDNEDLVYGRWEDNIIWDAQAMPRLLEPPVLTLDPNDENLILEIPDEKEEATSNSPSKESKKESSLKKSRILLGKTGVIKEEPQQNMSQPEVKDPWNLSNDEYYYPKQQGLRGTFGGNIIQHSIPAVELRQPFFPTHMGPIKLRQFHRPPLKKYSFGALSQPGPHSVQPLLKHIKKKAKMREQERQASGGGEMFFMRTPQDLTGKDGDLILAEYSEENGPLMMQVGMATKIKNYYKRKPGKDPGAPDCKYGETVYCHTSPFLGSLHPGQLLQAFENNLFRAPIYLHKMPETDFLIIRTRQGYYIRELVDIFVVGQQCPLFEVPGPNSKRANTHIRDFLQVFIYRLFWKSKDRPRRIRMEDIKKAFPSHSESSIRKRLKLCADFKRTGMDSNWWVLKSDFRLPTEEEIRAMVSPEQCCAYYSMIAAEQRLKDAGYGEKSFFAPEEENEEDFQMKIDDEVRTAPWNTTRAFIAAMKGKCLLEVTGVADPTGCGEGFSYVKIPNKPTQQKDDKEPQPVKKTVTGTDADLRRLSLKNAKQLLRKFGVPEEEIKKLSRWEVIDVVRTMSTEQARSGEGPMSKFARGSRFSVAEHQERYKEECQRIFDLQNKVLSSTEVLSTDTDSSSAEDSDFEEMGKNIENMLQNKKTSSQLSREREEQERKELQRMLLAAGSAASGNNHRDDDTASVTSLNSSATGRCLKIYRTFRDEEGKEYVRCETVRKPAVIDAYVRIRTTKDEEFIRKFALFDEQHREEMRKERRRIQEQLRRLKRNQEKEKLKGPPEKKPKKMKERPDLKLKCGACGAIGHMRTNKFCPLYYQTNAPPSNPVAMTEEQEEELEKTVIHNDNEELIKVEGTKIVLGKQLIESADEVRRKSLVLKFPKQQLPPKKKRRVGTTVHCDYLNRPHKSIHRRRTDPMVTLSSILESIINDMRDLPNTYPFHTPVNAKVVKDYYKIITRPMDLQTLRENVRKRLYPSREEFREHLELIVKNSATYNGPKHSLTQISQSMLDLCDEKLKEKEDKLARLEKAINPLLDDDDQVAFSFILDNIVTQKMMAVPDSWPFHHPVNKKFVPDYYKVIVNPMDLETIRKNISKHKYQSRESFLDDVNLILANSVKYNGPESQYTKTAQEIVNVCYQTLTEYDEHLTQLEKDICTAKEAALEEAELESLDPMTPGPYTPQPPDLYDTNTSLSMSRDASVFQDESNMSVLDIPSATPEKQVTQMRQGRGRLGEEDSDVDIEGYDDEEEDGKPKTPAPEGEDGDGDLADEEEGTVQQPQASVLYEDLLMSEGEDDEEDAGSDEEGDNPFSAIQLSESGSDSDVGSGGIRPKQPRMLQENTRMDMENEESMMSYEGDGGEASHGLEDSNIRYQ

SEQ ID NO: 78215 - protein, 191 aa, Homo sapiens
MSTVEEDSDTVTVETVNSVTLTQDTEGNLILHCPQNEADEIDSEDSIEPPHKRLCLSSEDDQSIDDSTPCISVVALPLSENDQSFEVTMTATTEVADDEVTEGTVTQIQILQNEQLDEISPLGNEEVSAVSQAWFTTKEDKDSLTNKGHKWKQGMWSKEEIDILMNNIERYLKARGIKDATEIIFEMSKDE

SEQ ID NO: 78216 - protein, 72 aa, Homo sapiens
  MOD_RES (1)..(1): Any amino acid
XKLGKTSERFLFKQLDSLWLLDSDGSFTLSLHEDELFTLTTLTTGRKGSYPLPPKSQPFPSTYKDDFNVGPI

SEQ ID NO: 78217 - protein, 69 aa, Homo sapiens
MPDRTEKHSTMPDSPVDVKTQSRLTPPTMPPPPTTQGAPRTSSFTPTTLTNGTSHSPTALNGAPSPPNG

SEQ ID NO: 78218 - protein, 191 aa, Homo sapiens
MLMYQHQRVSERFDVIDLDPYGSPATFLDAAVQAVSEGGLLCVTCTDMAVLAGNSGETCYSKYGAMALKSRACHEMALRIVLHSLDLRANCYQRFVVPLLSISADFYVRVFVRVFTGQAKVKASASKQALVFQCVGCGAFHLQRLGKASGVPSGRAKFSAACGPPVTPECEHCGQRHQLGGPMWAEPIHDL

SEQ ID NO: 78219 - protein, 22 aa, Homo sapiens
MDPSGVKVLETAEDIQERRQQV

SEQ ID NO: 78220 - protein, 168 aa, Homo sapiens
MRDSSAPSSASSSVTDLYCTPHSSRSDLVLPGTAGDFSLSASLSACTLLYEGAVEPMQIDVDPQEDPQNAPDVNYVVENPSLDLEQYAASYSGLMRIERLQFIADHCPTLRVEALKMALSFVQRTFNVDMYEEIHRKLSEATRELQNAPDAIPESGVEPPALDTAWVE

SEQ ID NO: 78221 - protein, 18 aa, Homo sapiens
MLKNKGHSSKKDNLAVNA

SEQ ID NO: 78222 - protein, 209 aa, Homo sapiens
MGAFCQRPSSDKEQEKEKKSVVLTEPVSKWRNVRGHNPLGLMYHDASRWGLTLQTYVQLTMLDRHTRPQVSSVRLMERSIHSARYIFVENLYRSGKMPEVDYVVLSEWFDWILRNMDVSVDLIVYLRTNPETCYQRLKKRCREEEKVIPLEYLEAIHHLHEEWLIKGSLFPMAAPVLVIEADHHMERMLELFEQNRDRILTPENRKHCP

SEQ ID NO: 78223 - protein, 56 aa, Homo sapiens
MEELLRRELGCSSVRATGHSGGGCISQGRSYDTDQGRVFVKVNPKAEVKSDPRSLA

SEQ ID NO: 78224 - protein, 590 aa, Homo sapiens
  MOD_RES (1)..(1): Any amino acid
XEEILDDLQNSQLPQLFPDTRPGAPAGSVDKQAIINDLMQLTAENSPVTPVGAQKTALRISQSRMIGNSASRPTMPSGEWAPQSSAVRVTCAATTSAMNRPVQGGMIRNPAASIPMRPSSQPGQRQTLQSQVMNIGPSELEMNMGGPQYSQQQAPPNQTAPWPESILPIDQASFASQNRQPFGSSPDDLLCPHPAAESPSDEGALLDQLYLALRNFDGLEEIDRALGIPELVSQSQAVDPEQFSSQDSNIMLEQKAPVFPQQYASQAQMAQGSYSPMQDPNFHTMGQRPSYATLRMQPRPGLRPTGLVQNQPNQLRLQLQHRLQAQQNRQPLMNQISNVSNVNLTLRPGVPTQAPINAQMLAQRQREILNQHLRQRQMHQQQQVQQRTLMMRGQGLNMTPSMVAPSGMPATMSNPRIPQANAQQFPFPPNYGISQQPDPGFTGATTPQSPLMSPRMAHTQSPMMQQSQANPAYQAPSDINGWAQGNMGGNSMFSQQSPPHFGQQANTSMYSNNMNINVSMATNTGGMSSMNQMTGQISMTSVTSVPTSGLSSMGPEQVNDPALRGGNLFPNQLPGMDMIKQEGDTTRKYC

SEQ ID NO: 78225 - protein, 127 aa, Homo sapiens
TGGILNNAIASIRNVCISLLAGIVLGFFVRYFPSEDQKKLTLKRGFLVLTMCVSAVLGSQRIGLHGSGGLCTLVLSFIAGTKWSQEKMKVQKIITTVWDIFQPLLFGLVGAEVSVSSLESNIVGKNN

SEQ ID NO: 78226 - protein, 127 aa, Homo sapiens
MLVSGRRRLLTVLLQAQKWPFQPSRDMRLVQFRAPHLVGPHLGLETGNGGGVINLNAFDPTLPKTMTQFLEQGEATLSVARRALAAQLPVLPRSEVTFLAPVTRPDKVVCVGMNYVDHCKEQNVPVP

SEQ ID NO: 78227 - protein, 219 aa, Homo sapiens
  MOD_RES (1)..(1): Any amino acid
XGSGGGGSTGGGGGTAGGGTQSTAGPGGISQHLTYTSYILKQTPQGTFLVGQPSPQTSGKQLTTGSVVQGTLGVSTSSAQGQQTLKVISGQKTTLFTQAAHGGQASLMKISDSTLKTVPATSQLSKPGTTMLRVAGGVITTATSPAVALSANGPAQQSEGMAPVSSSTVSSVTKTSGQQQVCVSQATVGTCKAATPTVVSATSLVPTPNPISGKATVSD

SEQ ID NO: 78228 - protein, 631 aa, Homo sapiens
MTPALTALLCLGLSLGPRTRMQAGPFPKPTLWAEPGSVISWGSPVTIWCQGSLEAQEYQLDKEGSPEPWDRNNPLEPKNKARFSIPSMTQHHAGRYRCHYYSSAGWSEPSDPLELVMTGFYNKPTLSALPSPVVASGGNMTLRCGSQKGYHHFVLMKEGEHQLPRTLDSQQLHSGGFQALFPVGPVTPSHRWRFTCYYYYTNTPWVWSHPSDPLEILPSGVSRKPSLLTLQGPVLAPGQSLTLQCGSDVGYDRFVLYKEGERDFLQRPGQQPQAGLSQANFTLGPVSRSYGGQYRCYGAHNLSSEWSAPSDPLDILITGQIYDTVSLSAQPGPTVASGENVTLLCQSRGYFDTFLLTKEGAAHPPLRLRSMYGAHKYQAEFPMSPVTSAHAGTYRCYGSRSSNPHLLSFPSEPLELMVSGHSGGSSLPPTGPPSTPGLGRYLEVLIGVSVAFVLLLFLLLFLLLRRQRHSKHRTSDQRKTDFQRPAGAAETEPKDRGLLRRSSPAADVQEENLYAAVKDTQSEDRVELDSQSPHDEDPQAVTYAPVKHSSPRREMASPPSSLSGEFLDTKDRQVEEDRQMDTEAAASEASQDVTYAQLHSLTLRRKATEPPPSQEGEPPAEPSIYATLAIH

SEQ ID NO: 78229 - protein, 59 aa, Homo sapiens
MKYPLMPLVNDLTFSFLVFWFCLPVGLLLLLIIWLRFLLSQDILQVRRYRYDANILTAS

SEQ ID NO: 78230 - protein, 214 aa, Homo sapiens
TNETQTSLNGVYQPPIHFQNSEFYGFSEFYYCTEDVLRMGGDYNAAKFTKAAKDYCATKWSILRERFDRGLYASHADLHRLKYQCFKSAWMFEVFHRGFSFPVNYKSLKTALQVYDKEVQWTLGAILYRTRFLPLSHRRPEPPPLLEKGAQRRRKRRGTTVESAVPARPLRIPETKKIGMLIIPCSGGCPKLCCAVWQPPPYGATKHLQCAAWN

SEQ ID NO: 78231 - protein, 159 aa, Homo sapiens
MDSELKEEIPVHEEFILCGGAETQVLKCGPWTDLFHDQSVKRPKLLIFIIPDSNAQEIKDIYGLNGQIEHKLAFLRTHVPKDMKLVLIGHSIGSYFTLQMLKRVPELPVIRAFLLFPTIERMSESPNGRIATPLLCWFRYVLYVTGYLLLKPCPETIKS

SEQ ID NO: 78232 - protein, 20 aa, Homo sapiens
MLAAALLKAKSQELVTFEDV

SEQ ID NO: 78233 - protein, 34 aa, Homo sapiens
MYNSFGCACQATVGIDFLSKTMYLEDQIVQLQLW

SEQ ID NO: 78234 - protein, 2764 aa, Homo sapiens
MVSEEEEEEDGDAEETQDSEDDEEDEMEEDDDDSDYPEEMEDDDDDASYCTESSFRSHSTYSSTPGRRKPRVHRPRSPILEEKDIPPLEFPKSSEDLMVPNEHIMNVIAIYEVLRNFGTVLRLSPFRFEDFCAALVSQEQCTLMAEMHVVLLKAVLREEDTSNTTFGPADLKDSVNSTLYFIDGMTWPEVLRVYCESDKEYHHVLPYQEAEDYPYGPVENKIKVLQFLVDQFLTTNIAREELMSEGVIQYDDHCRVCHKLGDLLCCETCSAVYHLECVKPPLEEVPEDEWQCEVCVAHKVPGVTDCVAEIQKNKPYIRHEPIGYDRSRRKYWFLNRRLIIEEDTENENEKKIWYYSTKVQLAELIDCLDKDYWEAELCKILEEMREEIHRHMDITEDLTNKARGSNKSFLAAANEEILESIRAKKGDIDNVKSPEETEKDKNETENDSKDAEKNREEFEDQSLEKDSDDKTPDDDPEQGKSEEPTEVGDKGNSVSANLGDNTTNATSEETSPSEGRSPVGCLSETPDSSNMAEKKVASELPQDVPEEPNKTCESSNTSATTTSIQPNLENSNSSSELNSSQSESAKAADDPENGERESHTPVSIQEEIVGDFKSEKSNGELSESPGAGKGASGSTRIITRLRNPDSKLSQLKSQQVAAAAHEANKLFKEGKEVLVVNSQGEISRLSTKKEVIMKGNINNYFKLGQEGKYRVYHNQYSTNSFALNKHQHREDHDKRRHLAHKFCLTPAGEFKWNGSVHGSKVLTISTLRLTITQLENNIPSSFLHPNWASHRANWIKAVQMCSKPREFALALAILECAVKPVVMLPIWRESLGHTRLHRMTSIEREEKEKVKKKEKKQEEEETMQQATWVKYTFPVKHQVWKQKGEEYRVTGYGGWSWISKTHVYRFVPKLPGNTNVNYRKSLEGTKNNMDENMDESDKRKCSRSPKKIKIEPDSEKDEVKGSDAAKGADQNEMDISKITEKKDQDVKELLDSDSDKPCKEEPMEVDDDMKTESHVNCQESSQVDVVNVSEGFHLRTSYKKKTKSSKLDGLLERRIKQFTLEEKQRLEKIKLEGGIKGIGKTSTNSSKNLSESPVITKAKEGCQSDSMRQEQSPNANNDQPEDLIQGCSESDSSVLRMSDPSHTTNKLYPKDRVLDDVSIRSPETKCPKQNSIENDIEEKVSDLASRGQEPSKSKTKGNDFFIDDSKLASADDIGTLICKNKKPLIQEESDTIVSSSKSALHSSVPKSTNDRDATPLSRAMDFEGKLGCDSESNSTLENSSDTVSIQDSSEEDMIVQNSNESISEQFRTREQDVEVLEPLKCELVSGESTGNCEDRLPVKGTEANGKKPSQQKKLEERPVNKCSDQIKLKNTTDKKNNENRESEKKGQRTSTFQINGKDNKPKIYLKGECLKEISESRVVSGNVEPKVNNINKIIPENDIKSLTVKESAIRPFINGDVIMEDFNERNSSETKSHLLSSSDAEGNYRDSLETLPSTKESDSTQTTTPSASCPESNSVNQVEDMEIETSEVKKVTSSPITSEEESNLSNDFIDENGLPINKNENVNGESKRKTVITEVTTMTSTVATESKTVIKVEKGDKQTVVSSTENCAKSTVTTTTTTVTKLSTPSTGGSVDIISVKEQSKTVVTTTVTDSLTTTGGTLVTSMTVSKEYSTRDKVKLMKFSRPKKTRSGTALPSYRKFVTKSSKKSIFVLPNDDLKKLARKGGIREVPYFNYNAKPALDIWPYPSPRPTFGITWRYRLQTVKSLAGVSLMLRLLWASLRWDDMAAKAPPGGGTTRTETSETEITTTEIIKRRDVGPYGIRSEYCIRKIICPIGVPETPKETPTPQRKGLRSSALRPKRPETPKQTGPVIIETWVAEEELELWEIRAFAERVEKEKAQAVEQQAKKRLEQQKPTVIATSTTSPTSSTTSTISPAQKVMVAPISGSVTTGTKMVLTTKVGSPATVTFQQNKNFHQTFATWVKQGQSNSGVVQVQQKVLGIIPSSTGTSQQTFTSFQPRTATVTIRPNTSGSGGTTSNSQVITGPQIRPGMTVIRTPLQQSTLGKAIIRTPVMVQPGAPQQVMTQIIRGQPVSTAVSAPNTVSSTPGQKSLTSATSTSNIQSSASQPPRPQQGQVKLTMAQLTQLTQGHGGNQGLTVVIQGQGQTTGQLQLIPQGVTVLPGPGQQLMQAAMPNGTVQRFLFTPLATTATTASTTTTTVSTTAAGTGEQRQSKLSPQMQVHQDKTLPPAQSSSVGPAEAQPQTAQPSAQPQPQTQPQSPAQPEVQTQPEVQTQTTVSSHVPSEAQPTHAQSSKPQVAAQSQPQSNVQGQSPVRVQSPSQTRIRPSTPSQLSPGQQSQVQTTTSQPIPIQPHTSLQIPSQGQPQSQPQVVMKHNAVIEHLKQKKSMTPAEREENQRMIVCNQVMKYILDKIDKEEKQAAKKRKREESVEQKRSKQNATKLSALLFKHKEQLRAEILKKRALLDKDLQIEVQEELKRDLKIKKEKDLMQLAQATAVAAPCPPVTPAPPAPPAPPPSPPPPPAVQHTGLLSTPTLPAASQKRKREEEKDSSSKSKKKKMISTTSKETKKDTKLYCICKTPYDESKFYIGCDRCQNWYHGRCVGILQSEAELIDEYVCPQCQSTEDAMTVLTPLTEKDYEGLKRVLRSLQAHKMAWPFLEPVDPNDAPDYYGVIKEPMDLATMEERVQRRYYEKLTEFVADMTKIFDNCRYYNPSDSPFYQCAEVLESFFVQKLKGFKASRSHNNKLQSTAS

SEQ ID NO: 78235 - protein, 194 aa, Homo sapiens
  MOD_RES (1)..(1): Any amino acid
XPQWVFDSVNARLLLPVAEYFSGVQLPPHLSPFVTEKEGDYVPPEKLKLLALQRGEDPGNLNESEEEEEEDDNNEGDGDEEGENEEEEEDAEAGSEKEEEARLAALEEQRMEGKPRVMAGTLKLEDKQRLAQEEESEAKRLAIMMMKKREKYLYQKIMFGKRRKIREANKLAEKRKAHDEAVRSEKKAKKARPE

SEQ ID NO: 78236 - protein, 2170 aa, Homo sapiens
MIRIAALNASSTIEDDHEGSFKSHKTQTKEAQEAEAFALYHKALDLQKHDRFEESAKAYHELLEASLLREAVSSGDEKEGLKHPGLILKYSTYKNLAQLAAQREDLETAMEFYLEAVMLDSTDVNLWYKIGHVALRLIRIPLARHAFEEGLRCNPDHWPCLDNLITVLYTLSDYTTCLYFICKALEKDCRYSKGLVLKEKIFEEQPCLRKDSLRMFLKCWKCLGESLLAMYNHLTTCEPPRPSLGKRIDLSDYQDPSQPLESSMVVTPVNVIQPSTVSTNPAVAVAEPVVSYTSVATTSFPLHSPGLLETGAPVGDISGGDKSKKGVKRKKISEESGETAKRRSARVRNTKCKKEEKVDFQELLMKFLPSRLRKLDPEEEDDSFNNYEVQSEAKLESFPSIGPQRLSFDSATFMESEKQDVHEFLLENLTNGGILELMMRYLKAMGHKFLVRWPPGLAEVVLSVYHSWRRHSTSLPNPLLRDCSNKHIKDMMLMSLSCMELQLDQWLLTKGRSSAVSPRNCPAGMVNGRFGPDFPGTHCLGDLLQLSFASSQRDLFEDGWLEFVVRVYWLKARFLALQGDMEQALENYDICTEMLQSSTAIQVEAGAERRDIVIRLPNLHNDSVVSLEEIDKNLKSLERCQSLEEIQRLYEAGDYKAVVHLLRPTLCTSGFDRAKHLEFMTSIPERPAQLLLLQDSLLRLKDYRQCFECSDVALNEAVQQMVNSGEAAAKEEWVATVTQLLMGIEQALSADSSGSILKVSSSTTGLVRLTNNLIQVIDCSMAVQEEAKEPHVSSVLPWIILHRIIWQEEDTFHSLCHQQQLQNPAEEGMSETPMLPSSLMLLNTAHEYLGRRSWCCNSDGALLRFYVRVLQKELAASTSEDTHPYKEELETALEQCFYCLYSFPSKKSKARYLEEHSAQQVDLIWEDALFMFEYFKPKTLPEFDSYKTSTVSADLANLLKRIATIVPRTERPALSLDKVSAYIEGTSTEVPCLPEGADPSPPVVNELYYLLADYHFKNKEQSKAIKFYMHDICICPNRFDSWAGMALARASRIQDKLNSNELKSDGPIWKHATPVLNCFRRALEIDSSNLSLWIEYGTMSYALHSFASRQLKQWRGELPPELVQQMEGRRDSMLETAKHCFTSAARCEGDGDEEEWLIHYMLGKVAEKQQQPPTVYLLHYRQAGHYLHEEAARYPKKIHYHNPPELAMEALEVYFRLHASILKLLGKPDSGVGAEVLVNFMKEAAEGPFARGEEKNTPKASEKEKACLVDEDSHSSAGTLPGPGASLPSSSGPGLTSPPYTATPIDHDYVKCKKPHQQATPDDRSQDSTAVALSDSSSTQDFFNEPTSLLEGSRKSYTEKRLPILSSQAGATGKDLQGATEERGKNEESLESTEGFRAAEQGVQKPAAETPASACIPGKPSASTPTLWDGKKRGDLPGEPVAFPQGLPAGAEEQRQFLTEQCIASFRLCLSRFPQHYKSLYRLAFLYTYSKTHRNLQWARDVLLGSSIPWQQLQHMPAQGLFCERNKTNFFNGIWRIPVDEIDRPGSFAWHMNRSIVLLLKVLAQLRDHSTLLKVSSMLQRTPDQGKKYLRDADRQVLAQRAFILTVKVLEDTLSELAEGSERPGPKVCGLPGARMTTDVSHKASPEDGQEGLPQPKKPPLADGSGPGPEPGGKVGLLNHRPVAMDAGDSADQSGERKDKESPRAGPTEPMDTSEATVCHSDLERTPPLLPGRPARDRGPESRPTELSLEELSISARQQPTPLTPAQPAPAPAPATTTGTRAGGHPEEPLSRLSRKRKLLEDTESGKTLLLDAYRVWQQGQKGVAYDLGRVERIMSETYMLIKQVDEEAALEQAVKFCQVHLGAAAQRQASGDTPTTPKHPKDSRENFFPVTVVPTAPDPVPADSVQRPSDAHTKPRPALAAATTIITCPPSASASTLDQSKDPGPPRPHRPEATPSMASLGPEGEELARVAEGTSFPPQEPRHSPQVKMAPTSSPAEPHCWPAEAALGTGAEPTCSQEGKLRPEPRRDGEAQEAASETQPLSSPPTAASSKAPSSGSAQPPEGHPGKPEPSRAKSRPLPNMPKLVIPSAATKFPPEITVTPPTPTLLSPKGSISEETKQKLKSAILSAQSAANVRKESLCQPALEVLETSSQESSLESETDEDDDYMDI

SEQ ID NO: 78237 - protein, 103 aa, Homo sapiens
MTRDQNGTWEMESNENFEGYMKALDIDFATRKIAVRLTQTKVIDQDGDNFKTKTTSTFRNYDVDFTVGVEFDEYTKSLDNRHVKALVTWEGDVLVCVQKGEKE

SEQ ID NO: 78238 - protein, 38 aa, Homo sapiens
MANLEESFPRGGTRKIHKPEKAFQQSVEQDNLFDVCIM

SEQ ID NO: 78239 - protein, 105 aa, Homo sapiens
MPWPLLLLLAVSGAQTTRPCFPGCQCEVETFGLFDSFSLTRVDCSGLGPHIMPVPIPLDTAHLDLSSNRLEMVNESVLAGPGYTTLAGLDLSHNLLTSISPTAFS

SEQ ID NO: 78240 - protein, 161 aa, Homo sapiens
MDPARPLGLSILLLFLTEAALGDAAQEPTDYGPCRALLLRYYYDRYTQSCRQFLYGGCEGNANNFYTWEACDDACWRIEKVPKVCRLQVSVDDQCEGSTEKYFFNLSSMTCEKFFSGGCHRNRIENRFPDEATCMGFCAPKKIPSFCYSPKDEGLCSANVT

SEQ ID NO: 78241 - protein, 292 aa, Homo sapiens
MDLIPNFAMETWVLVATSLVLLYIYGTHSHKLFKKLGIPGPTPLPFLGTILFYLRHRVDFFQQMIDSQNSKETKSHKALSDLELVAQSIIIIFAAYDTTSTTLPFIMYELATHPDVQQKLQEEIDAVLPNKAPVTYDALVQMEYLDMVVNETLRLFPVVSRVTRVCKKDIEINGVFIPKGLAVMVPIYALHHDPKYWTEPEKFCPERFSKKNKDSIDLYRYIPFGAGPRNCIGMRFALTNIKLAVIRALQNFSFKPCKETQIPLKLDNLPILQPEKPIVLKVHLRDGITSGP

SEQ ID NO: 78242 - protein, 288 aa, Homo sapiens
MLPPKHLSATKPKKSWAPNLYELDSDLTKEPDVIIGEGPTDSEFFHQRFRNLIYVEFVGPRKTLIKLRNLCLDWLQPETRTKEEIIELLVLEQYLTIIPEKLKPWVRAKKPENCEKLVTLLENYKEMYQPEDDNNSDVTSDDDMTRNRRESSPPHSVHSFSGDRDWDRRGRSRDMEPRDRWSHTRNPRSRMPPRDLSLPVVAKTSFEMDREDDRDSRAYESRSQDAESYQNVVDLAEDRKPHNTIQDNMENYRKLLSLGFLAQDSVPAEKRNTEMLDNLPSAGSQVGP

SEQ ID NO: 78243 - protein, 79 aa, Homo sapiens
  MOD_RES (1)..(1): Any amino acid
XDREERKLLLDPSSPPTKALNGAEPNYHSLPSARTDEQALLSSILAKTASNIIDVSAADSQGMEQHEYMDRARQYRSPG

SEQ ID NO: 78244 - protein, 1211 aa, Homo sapiens
MGRHVATSCHVAWLLVLISGCWGQVNRLPFFTNHFFDTYLLISEDTPVGSSVTQLLAQDMDNDPLVFGVSGEEASRFFAVEPDTGVVWLRQPLDRETKSEFTVEFSVSDHQGVITRKVNIQVGDVNDNAPTFHNQPYSVRIPENTPVGTPIFIVNATDPDLGAGGSVLYSFQPPSQFFAIDSARGIVTVIRELDYETTQAYQLTVNATDQDKTRPLSTLANLAIIITDVQDMDPIFINLPYSTNIYEHSPPGTTVRIITAIDQDKGRPRGIGYTIVSGNTNSIFALDYISGVLTLNGLLDRENPLYSHGFILTVKGTELNDDRTPSDATVTTTFNILVIDINDNAPEFNSSEYSVAITELAQVGFALPLFIQVVDKDENLGLNSMFEVYLVGNNSHHFIISPTSVQGKADIRIRVAIPLDYETVDRYDFDLFANESVPDHVGYAKVKITLINENDNRPIFSQPLYNISLYENVTVGTSVLTVLATDNDAGTFGEVSYFFSDDPDRFSLDKDTGLIMLIARLDYELIQRFTLTIIARDGGGEETTGRVRINVLDVNDNVPTFQKDAYVGALRENEPSVTQLVRLRATDEDSPPNNQITYSIVSASAFGSYFDISLYEGYGVISVSRPLDYEQISNGLIYLTVMAMDAGNPPLNSTVPVTIEVFDENDNPPTFSKPAYFVSVVENIMAGATVLFLNATDLDRSREYGQESIIYSLEGSTQFRINARSGEITTTSLLDRETKSEYILIVRAVDGGVGHNQKTGIATVNITLLDINDNHPTWKDAPYYINLVEMTPPDSDVTTVVAVDPDLGENGTLVYSIQPPNKFYSLNSTTGKIRTTHAMLDRENPDPHEAELMRKIVVSVTDCGRPPLKATSSATVFVNLLDLNDNDPTFQNLPFVAEVLEGIPAGVSIYQVVAIDLDEGLNGLVSYRMPVGMPRMDFLINSSSGVVVTTTELDRERIAEYQLRVVASDAGTPTKSSTSTLTIHVLDVNDETPTFFPAVYNVSVSEDVPREFRVVWLNCTDNDVGLNAELSYFITGGNVDGKFSVGYRDAVVRTVVGLDRETTAAYMLILEAIDNGPVGKRHTGTATVFVTVLDVNDNRPIFLQSSYEASVPEDIPEGHSILQEDLASPCISPAPPRRAFQSSGEKETSQFPGKELRREPGPSKAQNRAAFTEPLAEAPLLGSKQAQEERAPLPREQAQQLQGSEGEKGGP

SEQ ID NO: 78245 - protein, 302 aa, Homo sapiens
  MOD_RES (1)..(1): Any amino acid
XGKVEPPHSSHEDLTDGLSTRSFCHPEPHERDALLAGSLNNTLHLSNEQERGDWPGEAPKPPEPYSHHKAHGRSKHPSGSNTQPGMESDPYEAEDFVCDYHLEMLSLSQDQQNPSCIQFDDSNWQLHLTSLKPLGLNVLLNLCDASVTERLCRFSDHLCNIALQESHSAVLPVHVPWGLCELARLIGFTPGAKELFKQENHLALYRLPSAETMKETSLGRLSCVTKRRPPLSHMISLFIKDTTTSTEQMLSHGTADVVLEACTDFWDGADIYPLSGSDRKKVLDFYQRACLSGYCSAFAYKP

SEQ ID NO: 78246 - protein, 224 aa, Homo sapiens
MAETREEETVSAEASGFSDLSDSEFLEFLDLEDAQESKALVNMPGPSSESLGKDDKPISLQNWKRGLDILSPMERFHLKYLYVTDLATQNWCELQTAYGKELPGFLAPEKAAVLDTGASIHLARELELHDLVTVPVTTKEDAWAIKFLNILLLIPTLQSEGHIREFPVFGEGEGVLLVGVIDELHYTAKGELELAELKTRRRPMLPLEAQKKKDCFQVSLYKYI

SEQ ID NO: 78247 - protein, 118 aa, Homo sapiens
TGEKEKLPGELEPVQATQNKTGKYVPPSLRDGASRRGESMQPNRREDTRETDLQELFRPFGSISRIYLAKDKTTGQSKGFAFISFHRREDAARAIAGVSGFGYDHLILNVEWAKPSTN

SEQ ID NO: 78248 - protein, 336 aa, Homo sapiens
MGAVSCRQGQHTQQGEHTRVAVPHKQGGNIRGPWARGWKSLWTGLGTIRSDLEELWELRGHHYLHQESLKPAPVLVEKPLPEWPVPQFINLFLPEFPIRPIRGQQQLKILGLVAKGSFGTVLKVLDCTQKAVFAVKVVPKVKVLQRDTVRQCKEEVSIQVCTESWKGLWEELGHRWQKEEMALKHMQAELQQQQAVLAKEVRDLKETLEFADQENQVAHLELGQVECQLKTTLEVLRERSLQCENLKDTVENLTAKLASTIADNQEQDLEKTRQYSQKLGLLTEQLQSLTLFLQTKLKEKTEQETLLLSTACPPTQEHPLPNDRTFLGSILTAVAD

SEQ ID NO: 78249 - protein, 192 aa, Homo sapiens
MAVPFVEDWDLVQTLGEEPDIGMPEPDAQRFFHQLMAGVVYLHGIGITHRDIKPENLLLDERDNLKISDFGLATVFRYNNRERLLNKMCGTLPYVAPELLKRREFHAEPVDVWSCGIVLTAMLAGELPWDQPSDSCQEYSDWKEKKTYLNPWKKIDSAPLALLHKILVENPSARITIPDIKKDRWYNKPLKK

SEQ ID NO: 78250 - protein, 101 aa, Homo sapiens
MANSAKAEEYEKMSLEQAKASVNSETESSFNINENTTASGTGLSEKTSVCRQVDIARKRKEFEDDLVKESSSCGKDTPSKKRKLDPEIVPEEKDCGDAEGN

SEQ ID NO: 78251 - protein, 52 aa, Homo sapiens
MVHQDNCSYQAQKNERESIRQKLALGSFFDDGPGIYTSCSKSGKPSLSSRLE

SEQ ID NO: 78252 - protein, 132 aa, Homo sapiens
MRCSPGGVWLALAASLLHVSLQGEFQRKLYKELVKNYNPLERPVANDSQPLTVYFSLSLLQIMDVDEKNQVLTTNIWLQMSWTDHYLQWNVSEYPGVKTVRFPDGQIWKPDILLYNRHIQEFLLHRCTLVSL

SEQ ID NO: 78253 - protein, 551 aa, Homo sapiens
MYDNMSTMVYIKEDKLEKLTQDEIISKTKQVIQGLEALKNEHNSILQSLLETLKCLKKDDESNLVEEKSNMIRKSLEMLELGLSEAQVMMALSNHLNAVESEKQKLRAQVRRLCQENQWLRDELANTQQKLQKSEQSVAQLEEEKKHLEFMNQLKKYDDDISPSEDKDTDSTKEPLDDLFPNDEDDPGQGIQQQHSSAAAAAQQGGYEIPARLRTLHNLVIQYASQGRYEVAVPLCKQALEDLEKTSGHDHPDVATMLNILALVYRDQNKYKDAANLLNDALAIREKTLGKDHPAVAATLNNLAVLYGKRGKYKEAEPLCKRALEIREKVLGKDHPDVAKQLNNLALLCQNQGKYEEVEYYYQRALEIYQTKLGPDDPNVAKTKNNLASCYLKQGKFKQAETLYKEILTRAHEREFGSVDDENKPIWMHAEEREECKGKQKDGTSFGEYGGWYKACKVDSPTVTTTLKNLGALYRRQGKFEAAETLEEAAMRSRKQGLDNVHKQRVAEVLNDPENMEKRRSRESLNVDVVKYESGPDGGEEVSMSVEWNGA

SEQ ID NO: 78254 - protein, 64 aa, Homo sapiens
MAQEEEDVRDYNLTEEQKAIKAKYPPVNRKYEYQQTHLLQSPHRIYSHLHSSAIWNPYLHLMGT

SEQ ID NO: 78255 - protein, 361 aa, Homo sapiens
  MOD_RES (1)..(1): Any amino acid
XEEDARSAGVATFVLQEEFDRYSGYWWCPKAETTPSGGKILRILYEENDESEVEIIHVTSPMLETRRADSFRYPKTGTANPKVTFKMSEIMIDAEGRIQVDEVRRLVYFEGTKDSPLEHHLYVVSYVNPGEVTRLTDRGYSHSCCISQHCDFFISKYSNQKNPHCVSLYKLSSPEDDPTCKTKEFWATILDSAGPLPDYTPPEIFSFESTTGFTLYGMLYKPHDLQPGKKYPTVLFIYGGPQVQLVNNRFKGVKYFRLNTLASLGYVVVVIDNRGSCHRGLKFEGAFKYKMGQIEIDDQVEGLQYLASRYDFIDLDRVGIHGWSYGGYLSLMALMQRSDIFRVAIAGAPVTLWIFYDTGYT

SEQ ID NO: 78256 - protein, 60 aa, Homo sapiens
MGWSQDLFRALWRSLSREVKEHVGTDQFGNKYYYIPQYKNWRGEVAAWAAIAWSVIASLD

SEQ ID NO: 78257 - protein, 159 aa, Homo sapiens
MNWNKGGPGTKRGFGFGGFAISAGKKEEPKLPQQSHSAFGATSSSSGFGKSAPPQLPSFYKIGSKRANFDEENAYFEDEEEDSSNVDLPYIPAENSPTRQQFHSKPVDSDSDDDPLEAFMAEVEDQAARDMKRLEEKDKERKNVNVESSCAVWNSTLIC

SEQ ID NO: 78258 - protein, 129 aa, Homo sapiens
MQETIRNLDCIRMIWEEQNTEDQYKNPRRNLRCHMVERFSESKDSSQCGETFSLIRDSIVNNSICPGEDPCQSAECEEVIMGHLSLNSHIRVDSGHKPHEYQEYGEKPHTHKQRGKAFSYHHSFQSRGR

SEQ ID NO: 78259 - protein, 54 aa, Homo sapiens
MAQPPRLSRSGASSLWDPASPAPTSGPRPRLWEGQDVLARWTDGLLYLGTIKKC

SEQ ID NO: 78260 - protein, 132 aa, Homo sapiens
EEISLCCESLSREVESLLLQGLPPRVLPLHPDCGRAVQAVYEDMDARKVVVTHWLADFSFSLPSIQHVIDSGLELRSVYNPRIRAEFQVLRPISKCQAEARRLRARGFPPVVFFPRSFSPQDPASACILSPS

SEQ ID NO: 78261 - protein, 169 aa, Homo sapiens
MIISHFPKCVAVFALLALSVGALDTFIAAVYEHAVILPNRTETPVSKEEALLLMNKNIDVLEKAVKLAAKQQGAHIIVTPEDGIYGWIFTRESIYPYLEDIPDPGVNWIPCRDPWSMVQHAAPPLGCSLPFSMGQGHGSQSTCCKYPQHQHAHDREWNLRPRSSQGVPL

SEQ ID NO: 78262 - protein, 336 aa, Homo sapiens; identical to SEQ ID NO: 47311

SEQ ID NO: 78263 - protein, 410 aa, Homo sapiens
MNLEGGGRGGEFGMSAVSCGNGKLRQWLIDQIDSGKYPGLVWENEEKSIFRIPWKHAGKQDYNREEDAALFKAWALFKGKFREGIDKPDPPTWKTRLRCALNKSNDFEELVERSQLDISDPYKVYRIVPEGAKKGAKQLTLEDPQMSMSHPYTMTTPYPSLPAQQVHNYMMPPLDRSWRDYVPDQPHPEIPYQCPMTFGPRGHHWQGPACENGCQVTGTFYACAPPESQAPGVPTEPSIRSAEALAFSDCRLHICLYYREILVKELTTSSPEGCRISHGHTYDASNLDQVLFPYPEDNGQRKNIEKLLSHLERGVVLWMAPDGLYAKRLCQSRIYWDGPLALCNDRPNKLERDQTCKLFDTQQFLSELQAFAHHGRSLPRFQVTLCFGEEFPDPQRQRKLITAHVLRSLA

SEQ ID NO: 78264 - protein, 64 aa, Homo sapiens
MAEQWELDEEGIRRLGALTLEQPDSNKGLFIPFPNREIKDSLSTSATQGNGTRDQKLDTFPLGT

SEQ ID NO: 78265 - protein, 90 aa, Homo sapiens
MAMLAQQMQLANAMMPGAPLQPVPMFSVAPSLATNASAAAFNPYLGPVSPSLVPAEILPTAPMLVTGNPGVPVPAAAAAAAQKLMRTDRL

SEQ ID NO: 78266 - protein, 99 aa, Homo sapiens
MRIWWLLLAIEICTGNINSQDTCRQGHPGIPGNPGHNGLPGRDGRDGAKGDKGDAGEPGCPGSPGKDGTSGEKGERGADGKVEAKGIKGMFRCLWSKTE

SEQ ID NO: 78267 - protein, 453 aa, Homo sapiens
MRLLGAAAVAALGRGRAPASLGWQRKQVNWKACRWSSSGVIPNEKIRNIGISAHIDSGKTTLTERVLYYTGRIAKMHEVKGKDGVGAVMDSMELERQRGITIQSAATYTMWKDVNINIIDTPGHVDFTIEVERALRVLDGAVLVLCAVGGVQCQTMTVNRQMKRYNVPFLTFINKLDRMGSNPARALQQMRSKLNHNAAFMQIPMGLEGNFKGIVDLIEERAIYFDGDFGQIVRYGEIPAELRAAATDHRQELIECVANSDEQLGEMFLEEKIPSISDLKATIRRATLKRSFTPVFLGSALKNKGVQPLLDAVLEYLPNPSEVQNYAILNKEDDSKEKTKILMNSSRDNSHPFVGLAFKLEVGRFGQLTYVRSYQGELKKGDTIYNTRTRKKVRLQRLARMHADMMEASTEKYMPETSVHCLALTVLVETHSQTKPTAAFLWSQFMFLILSFQ

SEQ ID NO: 78268 - protein, 70 aa, Homo sapiens
MAERKSSSSRTGSKELLWSSEHRSQPELSGGKSALNSESASELELVAPTQARLTKEHRWGSALLSRNHSL

SEQ ID NO: 78269 - protein, 1357 aa, Homo sapiens
MSDPDTPPQMTFGDKDDIRLLPSALGVKKRKRGPKKQKENKPGKPRKRKKRDSEEEFGSERDEYREKSESGGSEYGTGPGRKRRRKHREKKEKKTKRRKKGEGDGGQKQVEQKSSATLLLTWGLEDVEHVFSEEDYHTLTNYKAFSQFMRPLIAKKNPKIPMSKMMTILGAKWREFSANNPFKGSAAAVAAAAAAAAAAVAEQVSAAVSSATPIAPSGPPALPPPPAADIQPPPIRRAKTKEGKGPGHKRRSKSPRVPDGRKKLRGKKMAPLKIKLGLLGGKRKKGGSYVFQSDEGPEPEAEESDLDSGSVHSASGRPDGPVRTKKLKRGRPGRKKKKVLGCPAVAGEEEVDGYETDHQDYCEVCQQGGEIILCDTCPRAYHLVCLDPELDRAPEGKWSCPHCEKEGVQWEAKEEEEEYEEEGEEEGEKEEEDDHMEYCRVCKDGGELLCCDACISSYHIHCLNPPLPDIPNGEWLCPRCTCPVLKGRVQKILHWRWGEPPVAVPAPQQADGNPDVPPPRPLQGRSEREFFVKWVGLSYWHCSWAKELQLEIFHLVMYRNYQRKNDMDEPPPLDYGSGEDDGKSDKRKVKDPHYAEMEEKYYRFGIKPEWMTVHRIINHSVDKKGNYHYLVKWRDLPYDQSTWEEDEMNIPEYEEHKQSYWRHRELIMGEDPAQPRKYKKKKKELQGDGPPSSPTNDPTVKYETQPRFITATGGTLHMYQLEGLNWLRFSWAQGTDTILADEMGLGKTIQTIVFLYSLYKEGHTKGPFLVSAPLSTIINWEREFQMWAPKFYVVTYTGDKDSRAIIRENEFSFEDNAIKGGKKAFKMKAQVKFHVLLTSYELITIDQAALGSIRWACLVVDEAHRLKNNQSKFFRVLNGYKIDHKLLLTGTPLQNNLEELFHLLNFLTPERFNNLEGFLEEFADISKEDQIKKLHDLLGPHMLRRLKADVFKNMPAKTELIVRVELSPMQKKYYKYILTRNFEALNSRGGGNQVSLLNIMMDLKKCCNHPYLFPVAAMESPKLPSGAYEGGALIKSSGKLMLLQKMLRKLKEQGHRVLIFSQMTKMLDLLEDFLDYEGYKYERIDGGITGALRQEAIDRFNAPGAQQFCFLLSTRAGGLGINLATADTVIIFDSDWNPHNDIQAFSRAHRIGQANKVMIYRFVTRASVEERITQVAKRKMMLTHLVVRPGLGSKAGSMSKQELDDILKFGTEELFKDENEGENKEEDSSVIHYDNEAIARLLDRNQDATEDTDVQNMNEYLSSFKVAQYVVREEDKIEEIEREIIKQEENVDPDYWEKLLRHHYEQQQEDLARNLGKGKRVRKQVNYNDAAQEDQDNQSEYSVGSEEEDEDFDERPE

SEQ ID NO: 78270 - protein, 1092 aa, Homo sapiens
  MOD_RES (1)..(1): Any amino acid
XSLLGDDVFSTMAGLEEADAEVSGISEADPQALLQAMKDLDGMDADILGLKKSNSAPSKKAAKDPGKGELPNHPKPAGGAIPTKKSLPSPSSSGHQNRRFSSEDLEDPLRGLLSYDEGGITKQPPVTQSKTASDKSPSTVRDQGPSIPLTPGDTPIRKKEELLFDDGDDIMATLGFGDSPKAEKRQIGDQEGPRPARSTLDELLGRGMATKLLARPGTGEHREFKLDKKYQRPQDSEDMWGDEDFTFGAYQPTVVSSEGRQSRRQSVRFFADSGADPKGEPGSKQSPPMASSPIQPRKGGADWLGLKDEDLDLFPASPTREAHRESSVPVTPSVPPPASQHSTPAGLPPSRAKPPTEGAGSPAKASQASKLRASKEEKEDWLSHALSRKKSQGLAREQHAGTSEGLHLAGTAGHPPSGSQPLTSTQGLEHAAAGGSSGTTARERPCVRPGVSGSPVTQNHAASALPTGSPKRGTAPGDLSATEPATCFPSTQKPTEPSVPVQPLLPESLARSLLPSTEYQKQLLAAQVQLQCSPAELQAELLHSQARLAELEAQVRKLELERAQHELLLGSLQQQHQADLELIESAHRSRIKVLETSYQQREERLRRENEELSARYLSQCQEAEQARAELTAQHQRRLAAIAQEKDQEMERLRELQRASILDMRRDHEEQLQRLKLLKDREVDAATSATSHTRSLNSIIHQMEKFSSSLHELSSRVEASHLTTSQERELGIRQRDEQLRALQERLGQQQRDMEEERSRQQEVIGKMEARLNEQSRLLEQERWRVTAEQSKAESMQRALEEQRKVTAQQMAMERAELERAKSALLEEQKSVMLKCGEERRRLAAEWAEFSAQQKLSKERAEREAERALQVDTQREGTLISLAKEQAELKIRASELRAEEKQLAAERAALEQERQELRLEKERINATALRVKLRAEEVESMSKVASEKYEEGERALREAQQVQAEQQARLQAVQQQQERLRKQEQHMHQEHLSLAQQRLQLDRARQDLPSSLVGLFPRAQGPAASSQSALMPPAPTTRWCSQPPTGLDPSPLHLHARLALLRHMAEQDRDFLENEQFFLETLKKGSYNLTSHSA

SEQ ID NO: 78271 - protein, 163 aa, Homo sapiens
MLLSIGMLMLSATQVYTILTVQLFAFLNLLPVEADILAYNFENASQTFDDLPARFGYRLPAEGLKGFLINSKPENACEPIVPPPVKDNSSGTFIVLIRRLDCNFDIKVLNAQRAGYKAAIVHNVDSDDLISMGSNDIEVLKKIDIPSVFIGESSANSLKDEFT

SEQ ID NO: 78272 - protein, 467 aa, Homo sapiens
MTSVWKRLQRVGKRAAKFQFVACYHELVLECTKKWQPDKLVVVWTRRNRRICSKAHSWQPGIQNPYRGTVVWMVPENVDISVTLYRDPHVDQYEAKEWTFIIENESKGQRKVLATAEVDLARHAGPVPVQVPVRLRLKPKSVKVVQAELSLTLSGVLLREGRATDDDMQSLASLMSVKPSDVGNLDDFAESDEDEAHGPGAPEARARVPQPGRGGALRPGRFPDPSRELKTLCEEEEEGQGRPQQAVASPSNAEDTSPAPAPPALVSSSQSLLEWCQEVTTGYRGVRITNFTTSWRNGLAFCAILHRFYPDKIDYASLDPLNIKQNNKQAFDGFAALGVSRLLEPADMVLLSVPDKLIVMTYLCQIRAFCTGQELQLVQLEGGGGAGTYRVGSAQPSPPDDLDAGGLAQRLRGHGAEGPQEPKEAADRADGAAPGVASRNAVAGRASKDGGAEAPRESRPAEVPAEG

SEQ ID NO: 78273 - protein, 182 aa, Homo sapiens
MMYSPICLTQDEFHPFIEALLPHVRAIAYTWFNLQARKRKYFKKHEKRMSKDEERAVKDELLSEKPEIKQKWASRLLAKLRKDIRQEYREDFVLTVTGKKHPCCVLSNPDQKDSGQSGSPSHNDPAKNPPGYLEDSFVKSGVFNVSELVRVSRTPITQGTGVNFPIGEIPSQPYYHDMNSGV

SEQ ID NO: 78274 - protein, 168 aa, Homo sapiens
MSKGPAVGIDLGTTYSCVGVFQHGKVEIIANDQGNRTTPSYVAFTDTERLIGDAAKNQVAMNPTNTVFETKSFYPEEVSSMVLTKMKEIAEAYLGKTVTNAVVTVPAYFNDSQRQATKDAGTIAGLNVLRIINEPTAAAIAYGLDKKVGAERNVLIFDLGGGTFDVSI

SEQ ID NO: 78275 - protein, 156 aa, Homo sapiens
MDRDLNEDDSVVDLSFEAESPLAPPTELLERLPSYDWLLQGGRGQIFFPPLEAPGRPQEQRSWPSFLEHRKNPASSGESSLASPAHSVSCAAIHGSEDRRAPLCARAGGCWRYKCAELWINGSQGCHGEMHEDARGGRRILSSWRCWGQKDFKSLR

SEQ ID NO: 78276 - protein, 126 aa, Homo sapiens
VSFPETPKSDSQTPSPNEIKTEQSLAGPKGSPSESEKERAKAADSSPDTSDNEAKETDGKRSRTSYTRYQTLELEKEFHFNRYLTRRRRIEIANNLCLNERQIKIWFQNRRMKWKKDSKMKSKEAL

SEQ ID NO: 78277 - protein, 142 aa, Homo sapiens
MGDTSEDASIHRLEGTDLDCQVGGLICKSKSAASEQHVFKAPAPRPSLLGLDLLASLKRREREEKDDGEDKKKSKVSSYKDWEESKDDQKDAEEEGGDQAGQNIRKDRLQMAFGSASLPPILPRRLSLLTASCLLSILVIAN

SEQ ID NO: 78278 - protein, 200 aa, Homo sapiens
MSRRKQRKPQQLISDCEGPSASENGDASEEDHPQVCAKCCAQFTDPTEFLAHQNACSTDPPVMVIIGGQENPNNSSASSEPRPEGHNNPQVMDTEHSNPPDSGSSVPTDPTWGPERRGEESSGHFLVAATEPVCGIPVKWPAHEALEFQLHLHYHSKPGPTSAVWPRNCGWEGASNNGIQGSQGEDSPPPISASCTQGSA

SEQ ID NO: 78279 - protein, 2168 aa, Homo sapiens
MLRAFVQPGTPAYQPLPSHLSANTEVKFKGTLVHEAQLNYFYISPGGSNYGSPRPAHANMNANAAAGLAPEHIPTPGAALSWQAAIDAARQAKLMGSAGNATISTVSSTQRKRQQYGKPKKQGSTTATRPPRALLCLTLKNPIRRACISIVEWKPFEIIILLTIFANCVALAIYIPFPEDDSNATNSNLERVEYLFLIIFTVEAFLKVIAYGLLFHPNAYLRNGWNLLDFIIVVVGLFSAILEQATKADGANALGGKGAGFDVKALRAFRVLRPLRLVSGVPSLQVVLNSIIKAMVPLLHIALLVLFVIIIYAIIGLELFMGKMHKTCYNQEGIADVPAEDDPSPCALETGHGRQCQNGTVCKPGWDGPKHGITNFDNFAFAMLTVFQCITMEGWTDVLYWMQDAMGYELPWVYFVSLVIFGSFFVLNLVLGVLSGEFSKEREKAKARGDFQKLREKQQLEEDLKGYLDWITQAEDIDPENEDEGMDEEKPRNMSMPTSETESVNTENVAGGDIEGENCGARLAHRISKSKFSRYWRRWNRFCRRKCRAAVKSNVFYWLVIFLVFLNTLTIASEHYNQPNWLTEVQDTANKALLALFTAEMLLKMYSLGLQAYFVSLFNRFDCFVVCGGILETILVETKIMSPLGISVLRCVRLLRIFKITRYWNSLSNLVASLLNSVRSIASLLLLLFLFIIIFSLLGMQLFGGKFNFDEMQTRRSTFDNFPQSLLTVFQILTGEDWNSVMYDGIMAYGGPSFPGMLVCIYFIILFICGNYILLNVFLAIAVDNLADAESLTSAQKEEEEEKERKKLARTASPEKKQELVEKPAVGESKEEKIELKSITADGESPPATKINMDDLQPNENEDKSPYPNPETTGEEDEEEPEMPVGPRPRPLSELHLKEKAVPMPEASAFFIFSSNNRFRLQCHRIVNDTIFTNLILFFILLSSISLAAEDPVQHTSFRNHILFYFDIVFTTIFTIEIALKMTAYGAFLHKGSFCRNYFNILDLLVVSVSLISFGIQSSAINVVKILRVLRVLRPLRAINRAKGLKHVVQCVFVAIRTIGNIVIVTTLLQFMFACIGVQLFKGKLYTCSDSSKQTEAECKGNYITYKDGEVDHPIIQPRSWENSKFDFDNVLAAMMALFTVSTFEGWPELLYRSIDSHTEDKGPIYNYRVEISIFFIIYIIIIAFFMMNIFVGFVIVTFQEQGEQEYKNCELDKNQRQCVEYALKARPLRRYIPKNQHQYKVWYVVNSTYFEYLMFVLILLNTICLAMQHYGQSCLFKIAMNILNMLFTGLFTVEMILKLIAFKPKHYFCDAWNTFDALIVVGSIVDIAITEVNPAEHTQCSPSMNAEENSRISITFFRLFRVMRLVKLLSRGEGIRTLLWTFIKSFQALPYVALLIVMLFFIYAVIGMQVFGKIALNDTTEINRNNNFQTFPQAVLLLFRCATGEAWQDIMLACMPGKKCAPESEPSNSTEGETPCGSSFAVFYFISFYMLCAFLIINLFVAVIMDNFDYLTRDWSILGPHHLDEFKRIWAEYDPEAKGRIKHLDVVTLLRRIQPPLGFGKLCPHRVACKRLVSMNMPLNSDGTVMFNATLFALVRTALRIKTEGNLEQANEELRAIIKKIWKRTSMKLLDQVVPPAGDDEVTVGKFYATFLIQEYFRKFKKRKEQGLVGKPSQRNALSLQAGLRTLHDIGPEIRRAISGDLTAEEELDKAMKEAVSAASEDDIFRRAGGLFGNHVSYYQSDGRSAFPQTFTTQRPLHINKAGSSQGDTESPSHEKLVDSTFTPSSYSSTGSNANINNANNTALGRLPRPAGYPSTVSTVEGHGPPLSPAIRVQEVAWKLSSNRCHSRESQAAMAGQEETSQDETYEVKMNHDTEACSEPSLLSTEMLSYQDDENRQLTLPEEDKRDIRQSPKRGFLRSASLGRRASFHLECLKRQKDRGGDISQKTVLPLHLVHHQALAVAGLSPLLQRSHSPASFPRPFATPPATPGSRGWPPQPVPTLRLEGVESSEKLNSSFPSIHCGSWAETTPGGGGSSAARRVRPVSLMVPSQAGAPGRQFHGSASSLVEAVLISEGLGQFAQDPKFIEVTTQELADACDMTIEEMESAADNILSGGAPQSPNGALLPFVNCRDAGQDRAGGEEDAGCVRARGRPSEEELQDSRVYVSSL

SEQ ID NO: 78280 - protein, 53 aa, Homo sapiens
  MOD_RES (1)..(1): Any amino acid
XMLADPRSFDSNAFTLLLRAAFQSLLDAQADEAVLGFFIKQKCIEQRESRSLS

SEQ ID NO: 78281 - protein, 127 aa, Homo sapiens
  MOD_RES (1)..(1): Any amino acid
XLRASRVLLVGLKGLGAEIAKNLILAGVKGLTMLDHEQVTPEDPGAQFLIRTGSVGRNRAEASLERAQNLNPMVDVKVDTEDIEKKPESFFTQFDAMGFFLGWLHSLKHQRNTFLCVSDLLLQGCHS

SEQ ID NO: 78282 - protein, 257 aa, Homo sapiens
MASCAEPSEPSAPLPAGVPPLEDFEVLDGVEDAEGEEEEEEEEEEEDDLSELPPLEDMGQPPAEEAEQPGALAREFLAAMEPEPAPAPAPEEWLDILGNGLLRKKTLVPGPPGSSRPVKGQVVTVHLQTSLENGTRVQEEPELVFTLGDCDVIQALDLSVPLMDVGETAMVTADSKYCYGPQGSRSPYIPPHAALCLEVTLKTAVDGPDLEMLTGQERVALANRKRECGNAHYQRADFVLAANSYDLAIKAITSSAK

SEQ ID NO: 78283 - protein, 147 aa, Homo sapiens
MPMPPGTARPGSRGCPIGTGGVLSSQIKVAHRPVTQQGLTGMKTGTKGPQRQILDKSYYLGLLRSKISELTTEVNKLQKGIEMYNQENSVYLSYEKRAETLAVEIKELQGQLADYNMLVDKLNTNTEMEEVMNDYNMLKAQNDRETQ

SEQ ID NO: 78284 - protein, 143 aa, Homo sapiens
MMPMILTVFLSNNEQILTEVPITPETTCRDVVEFCKEPGEGSCHLAEVWRGNGFREPSHKTYCTWPGTVAHSCNLNTLGGRERPIPFDHMMYEHLQKWGPRREEVKFFLRHEDSPTENSEQGGRQTQEQRTQRNVINVPGEKR

SEQ ID NO: 78285 - protein, 116 aa, Homo sapiens
  MOD_RES (1)..(1): Any amino acid
XDLCHMLSLEEVAPVLQQTLLQDNLLGRVHFDQFKEALILILSRTLSNEEHFQEPDCSLEAQPKYVRGGKRYGRRSLPEFQESVEEFPEVTVIEPLDEEARPSHIPAGDCSELLES

SEQ ID NO: 78286 - protein, 232 aa, Homo sapiens
MAAAKCRNRRRELTDTLQAETDQLEDEKSALQTEIANLLKEKEKLEFILAAHRPACKIPDDLGFPEEMSVASLDLTGGLPEVATPESEEAFTLPLLNDPEPKPSVEPVKSISSMELKTEPFDDFLFPASSRPSGSETARSVPDMDLSGSFYAADWEPLHSGSLGMGPMATELEPLCTPVVTCTPSCTAYTSSFVFTYPEADSFPSCAAAHRKGSSSNEPSSDSLSSPTLLAL

SEQ ID NO: 78287 - protein, 37 aa, Homo sapiens
MGEKAVPLLRRRRTRRACISRHLEAAADVSARAWPPC

SEQ ID NO: 78288 - protein, 43 aa, Homo sapiens
MEAEEDSLPEQPEDSAQLQQEKPSLYIGVRGTVVRSMQEVLWT

SEQ ID NO: 78289 - protein, 49 aa, Homo sapiens
MPASAARPRPGPGQPTASPFPLLLLAVLSGPVSGRVPRSVPRTSLPISD

SEQ ID NO: 78290 - protein, 9 aa, Homo sapiens
FEINLKEKK

SEQ ID NO: 78291 - protein, 60 aa, Homo sapiens
MSKGLPARQARHGERARDSAGLEGARGAGAGPRGGFLDGALPRPGARGLLHVPWPRGAGV

SEQ ID NO: 78292 - protein, 35 aa, Homo sapiens
MFNGGMATTSTEIELPDVEPAAFLALLKFLYSDEV

SEQ ID NO: 78293 - protein, 89 aa, Homo sapiens
MNSMNPMKPALPPAPHGDGSFAYESVPWQQSATQPAGSLSVVTTVWGVGNATQSQVLGNPMGPAGSPSGSSMMPGVAGGSSALTSPQCL

SEQ ID NO: 78294 - protein, 230 aa, Homo sapiens
  MOD_RES (1)..(1): Any amino acid
XVVMALGDYMGASCHACIGGTNVRAEVQKLQMEAPHIIVGTPGRVFDMLNRRYLSPKYIKMFVLDEADEMLSRGFKDQIYDIFQKLNSNTQVVLLSATMPSDVLEVTKKFMRDPIRILVKKEELTLEGIRQFYINVEREEWKLDTLCDLYETLTITQAVIFINTRRKVDWLTEKMHARDFTVSAMHGDMDQKERDVIMREFRSGSSRVLITTDLLGKLYPQNRSRWTVWP

SEQ ID NO: 78295 - protein, 103 aa, Homo sapiens
KSSISGTEQEIFQVELNLQNPSLNHQGIDKIYDCQGLLPPPEKLTAEVLGIICIVLMATVLKTIVLIPFLEQNNFSPNTRTQKEELGKRVCWPVLRRTPVCFL

SEQ ID NO: 78296 - protein, 236 aa, Homo sapiens
  MOD_RES (1)..(1): Any amino acid
XMPSGLCAHLFGLSDCPVLSGSGAVYRVCAGTATFHLLQAVLLVHLHSPTSPRAQLHNSFWLLKLLFLLGLCAIAFCIPDEHLFPAWHYIGICGGFAFILLQLVLITAFAHSWNKNWQTGAAQDCSWFLAVLLATLGFYSMAGVGAVLLFHYYTHPAGCLLNKMLLSLHLCFCGLISFLSIAPCIRLSGATPLWPPTSFCHQLLYHVSDFLCTVQPSSRESNPSRTESHPVPAWPE

SEQ ID NO: 78297 - protein, 38 aa, Homo sapiens
MAFGKSHRDPYATSVGHLIAQTQQLFLGRKGYICWSSD

SEQ ID NO: 78298 - protein, 33 aa, Homo sapiens
ASTVKSVLELIPELNEKEEAYNSLMKSYVPGLS

SEQ ID NO: 78299 - protein, 88 aa, Homo sapiens
MNCEARGLESHIKSYLSSWFEDVVCPIQRVVLLFQEKLTFLLHAALSYTPVEVKESDEKTKRDINRFLSVASLQGLIHEGTMTSLCMA

SEQ ID NO: 78300 - protein, 159 aa, Homo sapiens
  MOD_RES (1)..(1): Any amino acid
XVESPKILRVYSGILNQSEIKEDTSFFGVQEIIIHDQYKMAESGYDIALLKLETTVNYTDKIQNTLQKAKIPLVTNEECQKRYRGHKITHKMICAGYREGGKDACKGDSGGPLSCKHNEVWHLVGITSWGEGCAQRERPGVYTNVVEYVDWILEKTQAV

SEQ ID NO: 78301 - protein, 785 aa, Homo sapiens
MGDEKDSWKVKTLDEILQEKKRRKEQEEKAEIKRLKNSDDRDSKRDSLEEGELRDHRMEITIRNSPYRREDSMEDRNQPGQHGETLSLQKSPGLGDKPRPCLKKKLETRRSKDFTARNRPIQQEDTAMIRHFEKRRQADHEAEAGESLEPGRRSKLLFRGNDGVCLFRDRLEQLERKRERERKMREQQKEQREQKERERRAEERRKEREARREVSAHHRTMREDYSDKVKASHWSRSPPRPPRERFELGDGRKPVKEEKMEERDLLSDLQDISDSERKTSSAESSSAESGSGSEEEEEEEEEEEEEGSTSEESEEEEEEEEEEEEETGSNSEEASEQSAEEVSEEEMSEDEERENENHLLVVPESRFDRDSGESEEAEEEVGEGTPQSSALTEGDYVPDSPALSPIELKQELPKYLPALQGCRSVEEFQCLNRIEEGTYGVVYRAKDKKTDEIVALKRLKMEKEKEGFPITSLREINTILKAQHPNIVTVREIVVGSNMDKIYIVMNYVEHDLKSLMETMKQPFLPGEVKTLMIQLLRGVKHLHDNWILHRDLKTSNLLLSHAGILKVGDFGLAREYGSPLKAYTPVVVTLWYRAPELLLGAKEYSTAVDMWSVGCIFGELLTQKPLFPGKSEIDQINKVFKDLGTPSEKIWPGYSELPAVKKMTFSEHPYNNLRKRFGALLSDQGFDLMNKFLTYFPGRRISAEDGLKHEYFRETPLPIDPSMFPTWPAKSEQQRVKRGTSPRPPEGGLGYSQLGDDDLKETGFHLTTTNQGASAAGPGFSLKF

SEQ ID NO: 78302 - protein, 109 aa, Homo sapiens
  MOD_RES (1)..(1): Any amino acid
XACVRAAASGCRRRWRSPQTNYENRIYSLKVECGPKYPEAPPSVRFVTKINMNGINNSSGMVDARSIPVLAKWQNSYSIKVVLQELRRLMMSKENMKLPQPPEGQTYNN

SEQ ID NO: 78303 - protein, 323 aa, Homo sapiens
MKPILLQGHERSITQIKYNREGDLLFTVAKDPIVNVWYSVNGERLGTYMGHTGAVWCVDADWDTKHVLTGSADNSCRLWDCETGKQLALLKTNSAVRTCGFDFGGNIIMFSTDKQMGYQCFVSFFDLRDPSQIDNNEPYMKIPCNDSKITSAVWGPLGECIIAGHESGELNQYSAKSGEVLVNVKEHSRQINDIQLSRDMTMFVTASKDNTAKLFDSTTLEHQKTFRTERPVNSAALSPNYDHVVLGGGQEAMDVTTTSTRIGKFEARFFHLAFEEEFGRVKGHFGPINSVAFHPDGKSSGGEDGYVRIHYFDPQYFEFEFEA

SEQ ID NO: 78304 - protein, 202 aa, Homo sapiens
MEVYIPSFRYEESDLERGYTVVIVWHRAFQTKMESYEVIVLEIAFSNGRLTYQVFKIEVLMNGRKHFVEKRYSEFHALHKKLKKCIKTPEIPSKHVRNWVPKVLEQRRQGLETYLQAVILENEELPKLFLDFLNVRHLPSLPKAESCGSFDETESEESSKLSHQPVLLFLRDPYVLPAASDFPNVVIEGVLHGIFYPHLQPR

SEQ ID NO: 78305 - protein, 692 aa, Homo sapiens
MRRLTHPNVVAARDVPEGMQNLAPNDLPLLAMEYCQGGDLRKYLNQFENCCGLREGAILTLLSDIASALRYLHENRIIHRDLKPENIVLQQGEQRLIHKIIDLGYAKELDQGSLCTSFVGTLQYLAPELLEQQKYTVTVDYWSFGTLAFECITGFRPFLPNWQPVQWHSKVRQKSEVDIVVSEDLNGTVKFSSSLPYPNNLNSVLAERLEKWLQLMLMWHPRQRGTDPTYGPNGCFKALDDILNLKLVHILNMVTGTIHTYPVTEDESLQSLKARIQQDTGIPEEDQELLQEAGLALIPDKPATQCISDGKLNEGHTLDMDLVFLFDNSKITYETQISPRPQPESVSCILQEPKRNLAFFQLRKVWGQVWHSIQTLKEDCNRLQQGQRAAMMNLLRNNSCLSKMKNSMASMSQQLKAKLDFFKTSIQIDLEKYSEQTEFGITSDKLLLAWREMEQAVELCGRENEVKLLVERMMALQTDIVDLQRSPMGRKQGGTLDDLEEQARELYRRLREKPRDQRTEGDSQEMVRLLLQAIQSFEKKVRVIYTQLSKTVVCKQKALELLPKVEEVVSLMNEDEKTVVRLQEKRQKELWNLLKIACSKVRGPVSGSPDSMNASRLSQPGQLMSQPSTASNSLPEPAKKSEELVAEAHNLCTLLENAIQDTVREQDQSFTALDWSWLQTEEEEHSCLEQAS

SEQ ID NO: 78306 - protein, 295 aa, Homo sapiens
DEERRRQQQLEEMRKREAEDRARQEEERRRQEEERTKRDAEEKRRQEEGYYSRLEAERRRQHDEAARRLLEPEAPGLCRPPLPRDYEPPSPSPAPGAPPPPPQRNASYLKTQVLSPDSLFTAKFVAYNEEEEEEDCSLAGQDKYSSTRKSHGDLLPAPLKPRPPPCQPRPASDGVFLSNSFQPPSAKANSTAHKKGQPLPPPKKSSSYHPSHCKGRGPNSYPGSTGAAVGAHDACRDAKEKRSKSQDADSPGSSGAPENLTFKERQRLFSQGQDVSNKVKASRKLTELENELNTK

SEQ ID NO: 78307 - protein, 97 aa, Homo sapiens
MKRSGNPGAEVTNSSVAGPDCCGGLGNIDFRQADFCVMTRLLGYVDPLDPSFVAAVITITFNPLYWNVVLVAGEPGLAVGTLRLQARLHDGNTRPAS

SEQ ID NO: 78308 - protein, 716 aa, Homo sapiens
MAPYSLLVTRLQKALGVRQYHVASVLCQRAKVAMSHFEPNEYIHYDLLEKNINIVRKRLNRPLTLSEKIVYGHLDDPASQEIERGKSYLRLRPDRVAMQDATAQMAMLQFISSGLSKVAVPSTIHCDHLIEAQVGGEKDLRRAKDINQEVYNFLATAGAKYGVGFWKPGSGIIHQIILENYAYPGVLLIGTDSHTPNGGGLGGICIGVGGADAVDVMAGIPWELKCPKVIGVKLTGSLSGWSSPKDVILKVAGILTVKGGTGAIVEYHGPGVDSISCTGMATICNMGAEIGATTSVFPYNHRMKKYLSKTGREDIANLADEFKDHLVPDPGCHYDQLIEINLSELKPHINGPFTPDLAHPVAEVGKVAEKEGWPLDIRVGLIGSCTNSSYEDMGRSAAVAKQALAHGLKCKSQFTITPGSEQIRATIERDGYAQILRDLGGIVLANACGPCIGQWDRKDIKKGEKNTIVTSYNRNFTGRNDANPETHAFVTSPEIVTALAIAGTLKFNPETDYLTGTDGKKFRLEAPDADELPKGEFDPGQDTYQHPPKDSSGQHVDVSPTSQRLQLLEPFDKWDGKDLEDLQILIKKHGIRWVVIGDENYGEGSSREHAALEPRHLGGRAIITKSFARIHETNLKKQGLLPLTFADPADYNKIHPVDKLTIQGLKDFTPGKPLKCIIKHPNGTQETILLNHTFNETQIEWFRAGSALNRMKELQQ

SEQ ID NO: 78309 - protein, 103 aa, Homo sapiens
MAGRRLNLRWALSVLCVLLMAETVSGTRGSSTGAHISPQFPASGVNQTPVVDCRKVCGLNVSDRCDFIRTNPDCHSDGGYLDYLEGIFCHFPPSLLPLAVTLY

SEQ ID NO: 78310 - protein, 64 aa, Homo sapiens
MALCYGTFWGYPKMLEAANLMEGLVDIGPWVTLPRGQPEVLEWGLPKDQAGELGTVDKSGLSGL

SEQ ID NO: 78311 - protein, 171 aa, Homo sapiens
MQQVLNIISLLWKLSKQQDETHKLESWLRKNYLIDFKHHFMSRFPYVLKEITKHKRKEPNKSIKHCTVLSNNIDHLLLNLTLSDIMVSLANASTLQKDCSWIEMIRKFVTETLEDGSRLNSKQLNRLLGVSWRLMQIQPNREDTETLIKAVYTLYQQRGLILPVRTLLLKF

SEQ ID NO: 78312 - protein, 321 aa, Homo sapiens; identical to SEQ ID NO: 49154

SEQ ID NO: 78313 - protein, 15 aa, Homo sapiens
MDIPRSVQNFRFFAS

SEQ ID NO: 78314 - protein, 121 aa, Homo sapiens
MGRPLLLPLLLLLQPPAFLQPGGSTGSGPSYLYGVTQPKHLSASMGGSVEIPFSFYYPWELAIVPNVRISWRRGHFHGQSFYSTRPPSIHKDYVNRLFLNWTEGQESGFLRISNLRKEDQS

SEQ ID NO: 78315 - protein, 335 aa, Homo sapiens
MPYMRYSRKVWDQVKASNPDLKLWEIGKIIGGMWRDLTDEEKQEYLNEYEAEKIEYNESMKAYHNSPAYLAYINAKSRAEAALEEESRQRQSRMEKGEPYMSIQPAEDPDDYDDGFSMKHTATARFQRNHRLISEILSESVVPDVRSVVTTARMQVLKRQVQSLMVHQRKLEAELLQIEERHQEKKRKFLESTDSFNNELKRLCGLKVEVDMEKIAAEIAQAEEQARKRQEEREKEAAEQAERSQSSIVPEEEQAANKGEEKKDDENIPMETETTESQQNGEEGTSTPEDKESGQEGVDSMAEEGTSDSNTGSESNSATVEEPPTDPIPEDEKKE

SEQ ID NO: 78316 - protein, 189 aa, Homo sapiens
MAMMVFPREEKLSQDEIVLGTKAVIQGLETLRGEHRALLAPLVAPEAGEAEPGSQERCILLRRSLEAIELGLGEAQEEKGDVPKDTLDDLFPNEDEQSPAPSPGGGDVSGQHGGYEIPARLRTLHNLVIQYASQGRYEVAVPLCKQALEDLEKTSGHDHPDVATMLNILALVYRDQNKYKEAAHLLNDA

SEQ ID NO: 78317 - protein, 125 aa, Homo sapiens
MKYTKQNFMMSVLGIIIYVTDLIVDIWVSVRFFHEGQYVFSALALSFMLFGTLVAQCFSYSWFKADLKKAGQESQHCFLLLHCLQGGVFTRALLCHPGWPAVAPSQLIAASTSLVQEILLHQLPE

SEQ ID NO: 78318 - protein, 195 aa, Homo sapiens
RNGTTAYEGNWNPEAHPPLIHHEHHEEEETPHSTSTIQATPSSTTEETATQKEQWFGNRWHEGYRQTPKEDSHSTTGTADMDSSHSITLQPTANPNTGLVEDLDRTGPLSMTTQQSNSQSFSTSHEGLEEDKDHPTTSTLTSSNRNDVTGGRRDPNHSEGSTTLLEGYTSHYPHTKESRTFIPVTSAKTGSFGVT

SEQ ID NO: 78319 - protein, 157 aa, Homo sapiens
MFQIPEFEPSEQEDSSSAERGLGPSPAGDGPSGSGKHHRQAPGLLWDASHQQEQPTSSSHHGEGTSSPEERGHSNADAAKLQLDASLPVLVGSELGQGKLRPLPVTFAPHPETPPVPTALGSHLEYGRKYFPQAYAKRGSVLSPLEGGLTQIPFRCV

SEQ ID NO: 78320 - protein, 87 aa, Homo sapiens
MALRLLKLAATSASARVVASSTFLKRGFIIQTVPQEMGSPSPPTIMATVVWRNFTMIREAMMATVTACSPGCTAVACCSTQMPWSTC

SEQ ID NO: 78321 - protein, 276 aa, Homo sapiens [sequence omitted]

SEQ ID NO: 78322 - protein, 1225 aa, Homo sapiens
MPSSLMLEVPALADFNRAWTELTDWLSLLDQVIKSQRVMVGDLEDINEMIIKQKATMQDLEQRRPQLEELITAAQNLKNKTSNQEARTIITDRIERIQNQWDEVQEHLQNRRQQLNEMLKDSTQWLEAKEEAEQVLGQARAKLESWKEGPYTVDAIQKKITETKQLAKDLRQWQTNVDVANDLALKLLRDYSADDTRKVHMITENINASWRSIHKRVSEREAALEETHRLLQQFPLDLEKFLAWLTEAETTANVLQDATRKERLLEDSKGVKELMKQWQDLQGEIEAHTDVYHNLDENSQKILRSLEGSDDAVLLQRRLDNMNFKWSELRKKSLNIRSHLEASSDQWKRLHLSLQELLVWLQLKDDELSRQAPIGGDFPAVQKQNDVHRAFKRELKTKEPVIMSTLETVRIFLTEQPLEGLEKLYQEPRELPPEERAQNVTRLLRKQAEEVNTEWEKLNLHSADWQRKIDETLERLRELQEATDELDLKLRQAEVIKGSWQPVGDLLIDSLQDHLEKVKALRGEIAPLKENVSHVNDLARQLTTLGIQLSPYNLSTLEDLNTRWKLLQVAVEDRVRQLHEAHRDFGPASQHFLSTSVQGPWERAISPNKVPYYINHETQTTCWDHPKMTELYQSLADLNNVRFSAYRTAMKLRRLQKALCLDLLSLSAACDALDQHNLKQNDQPMDILQIINCLTTIYDRLEQEHNNLVNVPLCVDMCLNWLLNVYDTGRTGRIRVLSFKTGIISLCKAHLEDKYRYLFKQVASSTGFCDQRRLGLLLHDSIQIPRQLGEVASFGGSNIEPSVRSCFQFANNKPEIEAALFLDWMRLEPQSMVWLPVLHRVAAAETAKHQAKCNICKECPIIGFRYRSLKHFNYDICQSCFFSGRVAKGHKMHYPMVEYCTPTTSGEDVRDFAKVLKNKFRTKRYFAKHPRMGYLPVQTVLEGDNMETPVTLINFWPVDSAPASSPQLSHDDTHSRIEHYASRLAEMENSNGSYLNDSISPNESIDDEHLLIQHYCQSLNQDSPLSQPRSPAQILISLESEERGELERILADLEEENRNLQAEYDRLKQQHEHKGLSPLPSPPEMMPTSPQSPRDAELIAEAKLLRQHKGRLEARMQILEDHNKQLESQLHRLRQLLEQPQAEAKVNGTTVSSPSTSLQRSDSSQPMLLRVVGSQTSDSMGEEDLLSPPQDTSTGLEEVMEQLNNSFPSSRGRNTPGKPMREDTM

SEQ ID NO: 78323 - protein, 142 aa, Homo sapiens
MLKTPGNLLKSCDYARFEAKIHDLREQMMNHSMSSGSGSLRTNQKRSLYVRAMFDYDKSKDSGLPSQGLSFKYGDILHVINASDDEWWQARRVMLEGDSEEMGVIPSKRRVERKERARLKTVKFNAKPGVIDSKGLLEFKYA

SEQ ID NO: 78324 - protein, 81 aa, Homo sapiens
MYPESTTGSPARLSLRQTGSPGMIYSTRYGSPKRQLQFYRNLGKSGLRVSCLGLGTWVTFGGQITDEMAEQLMTLAYDNGI

SEQ ID NO: 78325 - protein, 1138 aa, Homo sapiens
MGEEGPPSLEYIQAKDLFPPKELVKEEENLQVPFTVLQGEGVEFLGRAADALIAISNYRLHIKFKDSVINVPLRMIDSVESRDMFQLHISCKDSKVVRCHFSTFKQCQEWLSRLSRATARPAKPEDLFAFAYHAWCLGLTEEDQHTHLCQPGEHIRCRQEAELARMGFDLQNVWRVSHINSNYKLCPSYPQKLLVPVWITDKELENVASFRSWKRIPVVVYRHLRNGAAIARCSQPEISWWGWRNADDEYLVTSIAKACALDPGTRATGGSLSTGNNDTSEACDADFDSSLTACSGVESTAAPQKLLILDARSYTAAVANRAKGGGCECEEYYPNCEVVFMGMANIHAIRNSFQYLRAVCSQMPDPSNWLSALESTKWLQHLSVMLKAAVLVANTVDREGRPVLVHCSDGWDRTPQIVALAKILLDPYYRTLEGFQVLVESDWLDFGHKFGDRCGHQENVEDQNEQCPVFLQWLDSVHQLLKQFPCLFEFNEAFLVLHPVCHVRALHLWTAVYLPASSPCTLGEENMDLYLSPVAQSQEFSGRSLDRLPKTRSMDDLLSACDTSSPLTRTSSDPNLNNHCQEVRVGLEPWHSNPEGSETSFVDSGVGGPQQTVGEVGLPPPLPSSQKDYLSNKPFKSHKSCSPSYKLLNTAVPREMKSNTSDPEIKVLEETKGPAPDPSAQDELGRTLDGIGEPPEHCPETEAVSALSKVISNKCDGVCNFPESSQNSPTGTPQQAQPDSMLGVPSKCVLDHSLSTVCNPPSAACQTPLDPSTDFLNQDPSGSVASISHQEQLSSVPDLTHGEEDIGKRGNNRNGQLLENPRFGKMPLELVRKPISQSQISEFSFLGSNWDSFQGMVTSFPSGEATPRRLLSYGCCSKRPNSKQMRATGPCFGGQWAQREGVKSPVCSSHSNGHCTGPGGKNQMWLSSHPKQVSSTKPVPLNCPSPVPPLYLDDDGLPFPTDVIQHRLRQIEAGYKQEVEQLRRQVRELQMRLDIRHCCAPPAEPPMDYEDDFTCLKESDGSDTEDFGSDHSEDCLSEASWEPVDKKETEVTRWVPDHMASHCYNCDCEFWLAKRRHHCRNCGNVFCAGCCHLKLPIPDQQLYDPVLVCNSCYEHIQVSRARELMSQQLKKPIATASS

SEQ ID NO: 78326 - protein, 40 aa, Homo sapiens
  MOD_RES (1)..(1): Any amino acid
XLPSEGVPATDVAKRMKSEYKNCAECDTLVCMSLLSEGTV

SEQ ID NO: 78327 - protein, 887 aa, Homo sapiens
MDRDLEQALDRAENIIEIAQQRPPRRRYSPRAGKTLQEKLYDIYVEECGKEPEDPQELRSNVNLLEKLVRRESLPCLLVNLYPGNQGYSVMLQREDGSFAETIRLPYEERALLDYLDAEELPPALGDVLDKASVNIFHSGCVIVEVRDYRQSSNMQPPGYQSRHILLRPTMQTLAHDVKMMTRDGQKWSQEDKLQLESQLILATAEPLCLDPSVAVACTANRLLYNKQKMNTDPMKRCLQRYSWPSVKPQQEQSDCPPPPELRVSTSGQKEERKVGQPCELNIAKAGSCVDTWKGRPCDLAVPSEVDVEKLAKGYQSVTAADPQLPVWPAQEVEDPFGFALEAGCQAWDTKPSIMQSFNDPLLCGKIRPRKKARQKSQKSPWQPFPDDHSACLRPGSETDAGRAVSQAQESVQSKVKGPGKMSHSSSGPASVSQLSSWKTPEQPDPVWVQSSVSGKGEKHPPPRTQLPSSSGKISSGNSFPPQQAGSPLKRPFSAAAAIAAAAAAAAAAAAAAAAAAPAPALAAAAAPALAAAAAPALAAAAAPAPAPAAAPAVAAAPAAAASAAPSHSQKPSVPLIQASRPCPAAQPPTKFIKIAPAIQLRTGSTGLKAINVEGPVQGAQALGSSFKPVQAPGSGAPAPAGISGSDLQSSGGPLPDARPGAVQASSPAPLQFFLNTPEGLRPLTLLQVPQGSAVLTGPQQQSHQLVSLQQLQQPTAAHPPQPGPQGSALGLSTQGQAFPAQQLLKVNPTRARSGLQPQPQPAVLSLLGSAQVPQQGVQLPSVLRQQQPQPQPPKLQLQPQWQPKPRQEQPQSQQQQPQHIQLQTQQLRVLQQPQHIQLQTQQLRVLQQPVFLATGAVQIVQPHPGVQVGSQLVDQRKEGKPTPPAP

SEQ ID NO: 78328 - protein, 780 aa, Homo sapiens
  MOD_RES (1)..(1): Any amino acid
XSATNLESEEDSEAPVDSTLNNNRNQEFVSSSRSISGENATSESEFTLGGDDSGVSMNPARSALALLAMAQSGDAVSVKIEEENQDLMHFNLQKKRAKGKGQVKEEDNSNQKQLKRPAQGKRQNPRGTDIYLPYTPPSSESCHDGYQHQEKMRQKIKEVEEKQPEVKTGFIASFLDFLKSGPKQQFSTLAVRMPNRTRRPGTQMVRTFCPPPLPKPSSTTPTPLVSETGGNSPSDKVDNELKNLEHLSSFSSDEDDPGYSQDAYKSVSTPLTTLDATSDKKKKTEALQVATTSPTANTTGTATTSSTTVGAVKQEPLHSTSYAVNILENISSSESSKPIELDGLPSDQFAKGQDTVAIEGFTDEEDTESGGEGQYRERDEFVVKIEDIETFKEALKTGKEPPAIWKVQKALLQKFVPEIRDGQREFAATNSYLGYFGDAKSKYKRIYVKFIENANKKEYVRVCSKKPRNKPSQTIRTVQAKPSSSSKTSDPLASKTTTTKAPSVKPKVKQPKVKAEPPPKKRKKWKEEFSSSQSDSSPEIHTSSSDDEEFEPPAPFVTRFLNTRAMKETFKSYMELLVSIALDPDTMQALEKSNDELLLPHMKKIDGMLNDNRKRLLLNLHLDQSFKNALESFPELTIITRDSKAKSGGTAISKIKMNGKAYNKKTLRTSKTTTKSAQEFAVDPEKIQLYSLYHSLHHYKYHVYLICKDEVISSHLLKKNVFQNVKETLAIVFWSVLKRVVKYMCVCILSMYSVNNDLIYCSESLCYVLCSDLPEPHHLL

SEQ ID NO: 78329 - protein, 82 aa, Homo sapiens
MALSDEPAAGGPEEEAEDETLAFGAALEAFGESAETRALLGRLREVHGGGAEREVALERFRVIMDKYQEQPHLLDPHLGSRL

SEQ ID NO: 78330 - protein, 13 aa, Homo sapiens
MQPVSPSRSFPIF

SEQ ID NO: 78331 - protein, 117 aa, Homo sapiens
MKHLWFFLLLVAAPRWVLSQVQLQESGPGLVKPSETLSLTCVVSGGSISSSNWWSWVRQPPGKGLEWIGEIYHSGSPNYNPSLKSRVTISVDKSKNQFSLKLSSVTAADRAVYYCAR

SEQ ID NO: 78332 - protein, 224 aa, Homo sapiens
MEDYTKIEKIGEGTYGVVYKGRHKTTGQVVAMKKIRLESEEEGVPSTAIREISLLKELRHPNIVSLQDVLMQDSRLYLIFEFLSMDLKKYLDSIPPGQYMDSSLVKSYLYQILQGIVFCHSRRVLHRDLKPQNLLIDDKGTIKLADFGLARAFGIPIRVYTHEVVTLWYRSPEVLLGSARYSTPVDIWSIGTIFAELATKKPLFHGDSEIDQLFRIFRNFFPVF

SEQ ID NO: 78333 - protein, 95 aa, Homo sapiens
MNAIVALCHFCELHGPRTLFCTEVLHAPLPQGDGNEDSPGQGEQAEEEEAASLQVPPAHEAGPGCPFFPHAGLARSHGEPGDLEKQRRGPRPVSF

SEQ ID NO: 78334 - protein, 95 aa, Homo sapiens
QSSALTVCSEPSPQSDRASLARCPKTNHRGPIQLWQFLLELLHDGARSSCIRWTGNSREFQLCDPKEVGQLPCPAKSAPSLLVQFSSAQGLGSTA

SEQ ID NO: 78335 - protein, 147 aa, Homo sapiens
  MOD_RES (1)..(1): Any amino acid
XIATKEEFTAFLHPEEYDYMKDIVVQETMEDIDKNADGFIDLEEYIGDMYSHDGNTDEPEWVKTEREQFVEFRDKNRDGKMDKEETKDWILPSDYDHAEAEARHLVYESDQNKDGKLTKEEIVDKYDLFVGSQATDFGEALVRHDEF

SEQ ID NO: 78336 - protein, 297 aa, Homo sapiens
MEALAMGSRALRLWLVAPGGGIKWRFIATSSASQLSPTELTEMRNDLFNKEKARQLSLTPRTEKIEVKHVGKTDPGTVFVMNKNISTPYSCAMHLSEWYCRKSILALVDGQPWDMYKPLTKSCEIKFLTFKDCDPGEVNKAYWRSCAMMMGCVIERAFKDEYMVNLVRAPEVPVLDSKLDEWMPTKENLRSFTKDAHALIYKDLPFETLEVEAKVALEIFQHSKYKVDFIEEKASQNPERIVKLHRIGDFIDVSEGPLIPRTSICFQYEVSAVHNLQPTQPSLIRRFQGVSLPVHLR

SEQ ID NO: 78337 - protein, 71 aa, Homo sapiens
MESVVKNCGQTVHDEVANKQTMEELKDLLKRQVEVNVRNKILYLIQAWAHAFRNEPKYKVVQDTYQIMKVE

SEQ ID NO: 78338 - protein, 273 aa, Homo sapiens
  MOD_RES (1)..(1): Any amino acid
XALWGLQQAGLVAPRVQAGLLDFLLFGSLISAVDPVAVLAVFEEVHVNETLFIIVFGESLLNDAVTVYKASCSRHFISEDAQERQDKEVFQQNMKRRLESFKSTKHNICFTKSKPRPRKTGRRKKDGVANAEATNGKHRGLGFQDTAAVILTVESEEEEEESDSSETEKEDDEGIIFVARATSEVLQEGKVSGSLEVCPSPRIIPPSPTCAEKELPWKSGQGDLAVYVSSETTKIVPVDMQTGWNQSISSLESLASPPCNQAPILTCLPPHPR

SEQ ID NO: 78339 - protein, 292 aa, Homo sapiens
  MOD_RES (1)..(1): Any amino acid
XNDSKEWEEAMAKAQETGHLVMDVRRYGKAGSPETKWIDATSGIYNSEKSSNLSVTTDFSESLQSSNIESKEINGIHDESNAFESKGSSDSVVPDLPVPTISAPSRWVWDQEEERKRQERWQKEQDRLLQEKYQREQEKLREEWQRAKQEAERENSKYLDEELMVLSSNSMSLTTREPSLATWEATWSEGSKSSDREGTRAGEEERRQPQEEVVHEDQGKKPQDQLVIERERKWEQQLQEEQEQKRLQAEAEEQKRPAEEQKRQAEIERETSVRIYQYRRPVDSYDIPKTEE

SEQ ID NO: 78340 - protein, 36 aa, Homo sapiens
MKVLKKATLKVRDRVRSKMERDILAEVNHPFIVKLH

SEQ ID NO: 78341 - protein, 174 aa, Homo sapiens
MENQVQTLTSYLWSRHLPVEPEELQRRARHLEKKFLENPDLSQTEEKLRGAVLHALRKTTYHWQELSYTEGLSLVYMAARLDGGFAAVSRAFHEIRARNPAFQPQTLMDFGSGTGSVTWAAHSIWGQSLREYMCVDRSAAMLVLAEKLLKGGSESGEPYIPGVFFRQFLPVSPK

SEQ ID NO: 78342 - protein, 166 aa, Homo sapiens
  MOD_RES (1)..(1): Any amino acid
XHIPQSSSYCSLHPHERLSYPSHSSADINSSLPPMSTFHRSGTNHYSTSSCTPPANGTDSIMANRGSGAAGSSQTGDALGKALASIYSPDHTNNSFSSNPSTPVGSPPSLSGSVFQIPFHHITVYKNDSPLVLPDFVGGNSLPPKSQSFNIPITDKYKGWERQITR

SEQ ID NO: 78343 - protein, 42 aa, Homo sapiens
MSLSHLYRDGEGRIDDDDDERENFEITDWDLQNEFNPNRQRH

SEQ ID NO: 78344 - protein, 158 aa, Homo sapiens
MKKQKYGRIIMTSSASGIYGNFGQANYSAAKLGLLGLANSLAIEGRKSNIHCNTIAPNAGSRMTQTVMPEDLVEALKPEYVAPLVLWLCHESCEENGGLFEVGAGWIGKLRWERTLGAIVRQKNHPMTPEAVKANWKKICDFENASKPQSIQGWSMVA

SEQ ID NO: 78345 - protein, 245 aa, Homo sapiens
MRGLGLWLLGAMMLPAIAPSRPWALMEQYEVVLPWRLPGPRVRRALPSHLGGQFRPQPCPYLSIRGTYYRPARCPGLIQPVAQLRLSQSSAGRAPACTWGLEMQWSSRRLCRHHQGLHPERVSYVLGATGHNFTLHLRKNRDLLGSGYTETYTAANGSEVTEQPRGQDHCFYQGHVEGYPDSAASLSTCAGLRGFFQVGSDLHLIEPLDEGGEGGRHAVYQAEHLLQTAGTCGVSDDSLGSLLGP

SEQ ID NO: 78346 - protein, 218 aa, Homo sapiens
MNGVRLNNRQVYVGRFKFPEERAAEVRTRDRATFTNVFVKNIGDDIDDEKLKELFCEYGPTESVKVIRDASGKSKGFGFVRYETHEAAQKAVLDLHGKSIDGKVLYVGRAQKKIERLAELRRRFERLRLKEKSRPPGVPIYIKNLDETINDEKLKEEFSSFGSISRAKVMMEVGQGKGFGVVCFSSFEEATKAVDEMNGRIVGSKPLHVTLGQARRRC

SEQ ID NO: 78347 - protein, 242 aa, Homo sapiens
MWAFSELPMPLLINLIVSLLGFVATVTLIPAFRGHFIAARLCGQDLNKTSRQQIPESQGVISGAVFLIILFCFIPFPFLNCFVKEQCKAFPHHEFVALIGALLAICCMIFLGFADDVLNLRWRHKLLLPTAASLPLLMVYFTNFGNTTIVVPKPFRPILGLHLDLGILYYVYMGLLAVFCTNAINILAGINGLEAGQSLVISASIIVFNLVELEGDCRDDHVFSLYFMIPFFFTTLGLLYHN

SEQ ID NO: 78348 - protein, 186 aa, Homo sapiens
MISNYRNGSELVCFNSGVGCFLIGCDWAFTVLVNTFFSFLRRKTDFFIGGEEGMAEKLITQTFSHHNQLAQKTRREKRARQEAERREKAERAARLAKEAKSETSGPQIKELTDEEAERLQLEIDQKKDAENHEAQLKNGSLDSPGKQDTEEDEEEDEKDKGKLKPNLGNGADLPNYRWTQTLSELD

SEQ ID NO: 78349 - protein, 32 aa, Homo sapiens
MDEQSQGMQGPPVPQFQPQKALRPDMGYNTLA

SEQ ID NO: 78350 - protein, 399 aa, Homo sapiens
MAPWPPKGLVPAMLWGLSLFLNLPGPIWLQPSPPPQSSPPPQPHPCHTCRGLVDSFNKGLERTIRDNFGGGNTAWEEENLSKYKDSETRLVEVLEGVCSKSDFECHRLLELSEELVESWWFHKQQEAPDLFQWLCSDSLKLCCPAGTFGPSCLPCPGGTERPCGGYGQCEGEGTRGGSGHCDCQAGYGGEACGQCGLGYFEAERNASHLVCSACFGPCARCSGPEESNCLQCKKGWALHHLKCVDIDECGTEGANCGADQFCVNTEGSYECRDCAKACLGCMGAGPGRCKKCSPGYQQVGSKCLDVDECETEVCPGENKQCENTEGGYRCICAEGYKQMEGICVKEQIPGEPWGGRGEVLIQREGRQAPSPGSSGSSRPCPIPTATQPPGGCTETGLYI

SEQ ID NO: 78351 - protein, 287 aa, Homo sapiens
MVRSGVPRSRGLVSGLIHSANVRTVNLEKSCVSVEWAEGGATKGKEIDFDDVAAINPELLQLLPLHPKDNLPLQENVTIQKQKRRSVNSKIPAPKESLRSRSTRMSTVSELRITAQENDMEVELPAAANSRKQFSVPPAPTRPSCPAVAEIPLRMVSEEMEEQVHSIRGSSSANPVNSVRRKSCLVKEVEKMKNKREEKKAQNSEMRMKRAQEYDSSFPNWEFARMIKEFRATLECHPLTMTDPIEEHRICVCVRKRPLNKQELAKKEIDVISIPSKCLLLVHEPKL

SEQ ID NO: 78352 - protein, 88 aa, Homo sapiens
MKWMFKEDHSLEHRCVESAKIRAKYPDRVPVIVEKVSGSQIVDIDKRKYLVPSDITVAQFMWIIRKRIQLPSEKAIFLFVDKTVPQSR

SEQ ID NO: 78353 - protein, 206 aa, Homo sapiens
  MOD_RES (1)..(1): Any amino acid
XELPHTLKLPGLPLFPNKFLISLVLLILVSSPADVAEKADRIITMLPTSINAIEAYSGANGILKKVKKGSLLIDSSTIDPAVSKELAKEVEKMGAVFMDAPVSGGVGAARSGNLTFMVGGVEDEFAAAQELLGCMGSNVVYCGAVGTGQAAKICNNMLLAISMIGTAEAMNLGIRLGLDPKLLAKILNMSSGRCWSSDTYNPVPGV

SEQ ID NO: 78354 - protein, 487 aa, Homo sapiens
MAAAAAATAAAAASIRERQTVALKRMLNFNVPHIKNSTGEPVWKVLIYDRFGQDIISPLLSVKELRDMGITLHLLLHSDRDPIPDVPAVYFVMPTEENIDRMCQDLRNQLYESYYLNFISAISRSKLEDIANAALAASAVTQVAKVFDQYLNFITLEDDMFVLCNQNKELVSYRAINRPDITDTEMETVMDTIVDSLFCFFVTLGAVPIIRCSRGTAAEMVAVKLDKKLRENLRDARNSLFTGDTLGAGQFSFQRPLLVLVDRNIDLATPLHHTWTYQALVHDVLDFHLNRVNLEESSGVENSPAGARPKRKNKKSYDLTPVDKFWQKHKGSPFPEVAESVQQELESYRAQEDEVKRLKSIMGLEGEDEGAISMLSDNTAKLTSAVSSLPELLEKKRLIDLHTNVATAVLEHIKARKLDVYFEYEEKIMSKTTLDKSLLDIISDPDAGTPEDKMRLFLIYYISTQQAPSEGFYQDGLSSGQLWQHYH

SEQ ID NO: 78355 - protein, 64 aa, Homo sapiens
MASSPAVLRASRLYQWSLKSSAQFLGSPQLRQNLGPFLGLWTCSELEVACWSIGLVCWLGRVLL

SEQ ID NO: 78356 - protein, 137 aa, Homo sapiens
  MOD_RES (1)..(1): Any amino acid
XSDTFSYRLKFNWGYRIPVIKEHSEYTEHCWAMHGEIFCYLAKYWLKGFVAFQAAINAAIIEVTTNHSVMEELTSVIGINMKIPPFISKGEIMNEWFHFTCLVSFSSFIYFASLNVARERGKFKKLMTVMGLRESAF

SEQ ID NO: 78357 - protein, 518 aa, Homo sapiens
MARRCGPVALLLGFGLLRLCSGVWGTDTEERLVEHLLDPSRYNKLIRPATNGSELVTVQLMVSLAQLISVHEREQIMTTNVWLTQEWEDYRLTWKPEEFDNMKKVRLPSKHIWLPDVVLYNNADGMYEVSFYSNAVVSYDGSIFWLPPAIYKSACKIEVKHFPFDQQNCTMKFRSWTYDRTEIDLVLKSEVASLDDFTPSGEWDIVALPGRRNENPDDSTYVDITYDFIIRRKPLFYTINLIIPCVLITSLAILVFYLPSDCGEKMTLCISVLLALTVFLLLISKIVPPTSLDVPLVGKYLMFTMVLVTFSIVTSVCVLNVHHRSPTTHTMAPWVKVVFLEKLPALLFMQQPRHHCARQRLRLRRRQREREGAGALFFREAPGADSCTCFVNRASVQGLAGAFGAEPAPVAGPGRSGEPCGCGLREAVDGVRFIADHMRSEDDDQSVSEDWKYVAMVIDRLFLWIFVFVCVFGTIGMFLQPLFQNYTTTTFLHSDHSAPSSKLKVWGARLSIRGASEF

SEQ ID NO: 78358 - protein, 171 aa, Homo sapiens
MFQIPVENLDNIRKVRKKVKGILVDIGLDSCKELLKDLKGFDPGEKYFHNTSWGDVSLWEPSGKKVRYRTKPYCCGLCKYSTKVLTSFKNHLHRYHEDEIDQELVIPCPNCVFASQPKVVGRHFRMFHAPVRKVQNYTVNILGETKSSRSDVISFTCLKCNFSNTLYYSMK

SEQ ID NO: 78359 - protein, 443 aa, Homo sapiens
NQYPPPMLEDACRLINLGGENIQNDGFQFVTELQEDFLGGNGFIGQELNSGRESPFVKTEDNGSDYLVYLPSQMFEPQKLMINYEKDQKSAEIASLTSGHENYGRKEEPDHTYEPGDVSLQEYYMDVAFLIDASQRVGSDEFKEVKAFITSVLDYFHIAPTPLTSTLGDRVAVLSYSPPGYMPNTEECPVYLEFDLVTYNSIHQMKHHLQDSQQLNGDVFIGHALQWTIDNVFVGTPNLRKNKVIFVISAGETNSLDKDVLRNVSLRAKCQGYSIFVFSFGPKHNDKELEELASHPLDHHLVQLGRTHKPDWNYIIKFVKPFVHLIRRAINKYPTEDMKATCVNMTSPNPENGGTENTVLLLPGIYEIKTENGDLFDEFDSQAQHLLVLGNNHSSGSETATDLMQKLYLLFSTEKLAMKDKEKAHLEEISALVVDKQQEKEDL

SEQ ID NO: 78360 - protein, 355 aa, Homo sapiens
MLAAMGSLAAALWAVVHPRTLLLGTVAFLLAADFLKRRRPKNYPPGPWRLPFLGNFFLVDFEQSHLEVQLFVKKYGNLFSLELGDISAVLITGLPLIKEALIHMDQNFGNRPVTPMREHIFKKNGLIMSSGQAWKEQRRFTLTALRNFGLGKKSLEERIQEEAQHLTEAIKEENGQPFDPHFKINNAVSNIICSITFGERFEYQDSWFQQLLKLLDEVTYLEASKTCQLYNVFPWIMKFLPGPHQTLFSNWKKLKLFVSHMIDKHRKDWNPAETRDFIDAYLKEMSKHTGNPTSSFHEENLICSTLDLFFAGTETTSTTLRWALLYMALYPEIQGYHDPDQFDGAAQGPHRVGHP

SEQ ID NO: 78361 - protein, 167 aa, Homo sapiens
MKPPGGESSNLFGSPEEATPSSRPNRMASNIFGPTEEPQNIPKRTNPPGGKGSGIFDESTPVQTRQHLNPPGGKTSDIFGSPVTATSRLAHPNKPKDHVFLCEGEEPKSDLKAARSIPAGAEPGEKGSARKAGPAKEQEPMPTVDSHEPRLGPRPRSHNKVLNPPGG

SEQ ID NO: 78362 - protein, 388 aa, Homo sapiens
  MOD_RES (1)..(1): Any amino acid
XAKKLPAQRTNRAVALSSSVMCPDARSRCPDGSTCCELPSGKYGCCPMPNATCCSDHLHCCPQDTVCDLIQSKCLSKENATTDLLTKLPAHTVGDVKCDMEVSCPDGYTCCRLQSGAWGCCPFTQAVCCEDHIHCCPAGFTCDTQKGTCEQGPHQVPWMEKAPAHLSLPDPQALKRDVPCDNVSSCPSSDTCCQLTSGEWGCCPIPEAVCCSDHQHCCPQGYTCVAEGQCQRGSEIVAGLEKMPARRASLSHPRDIGCDQHTSCPVGQTCCPSLGGSWACCQLPHAVCCEDRQHCCPAGYTCNVKARSCEKEVVSAQPATFLARSPHVGVKDVECGEGHFCHDNQTCCRDNRQGWACCPYRQVSANPHPGAGYGQGPGPTSSNPLAPL

SEQ ID NO: 78363 - protein, 88 aa, Homo sapiens
VVLKTFSLYKKLLTLFRAGHDQVVVLLHDVRDVSVEEEKVRYFGKGYMVVLRLATGFSHPLTQSAVMGHRSVLSLVDIPSGQVLPQGQ

SEQ ID NO: 78364 - protein, 50 aa, Homo sapiens
LHPQTATTKVPEIRDVTRIERIGAHSHIRGLGLDDALEPRQLPDVVEMPW

SEQ ID NO: 78365 - protein, 201 aa, Homo sapiens
  MOD_RES (1)..(1): Any amino acid
XSRTIAIVVGECFRGWERWADVTMADRAAAERACKDPNPIIDGRKANVNLAYLGAKPRIMQPGFAFGVQQLHPALIQRPFGIPAHYVYPQAFVQPGVVIPHVQPTAAAASTTPYIDYTGAAYAQYSAAAAAAAAAAAYDQYPYAASPAAAGYVTAGGYGYAVQQPITAAAPGTAAAAAAAAAAAAAFGQYQPQQLQTDRMQ

SEQ ID NO: 78366 - protein, 75 aa, Homo sapiens
PPPGKAGEKSVKKPAPPPAPPQATKTTAPVPEPTKPGDPREARRKERPARTPPRRRTLSGSGSGSGSSYSGSLLS

SEQ ID NO: 78367 - protein, 68 aa, Homo sapiens
MRLSALLALASKVTLPPHYRYGMSPPGSVADKRKNPPWIRRRPVVVEPISDEDWYLFCGDTVEILEGK

SEQ ID NO: 78368 - protein, 853 aa, Homo sapiens
MAWKTLPIYLLLLLSVFVIQQVSSQELSCKGRCFESFERGRECDCDAQCKKYDKCCPDYESFCAEVKDNKKNRTKKKPTPKPPVVDEAGSGLDNGDFKVTTPDTSTTQHNKVSTSPKITTAKPINPRPSLPPNSDTSKETSLTVNKETTVETKETTTTNKQTSTDGKEKTTSAKETQSIEKTSAKDLAPTSKVLAKPTPKAETTTKGPALTTPKEPTPTTPKEPASTTPKEPTPTTIKSAPTTPKEPAPTTTKSAPTTPKEPAPTTTKEPAPTTPKEPAPTTTKEPAPTTTKSAPTTPKEPAPTTPKKPAPTTPKEPAPTTPKEPTPTTPKEPAPTTKEPAPTTPKEPAPTAPKKPAPTTPKEPAPTTPKEPAPTTTKEPSPTTPKEPAPTTTKSAPTTTKEPAPTTTKSAPTTPKEPSPTTTKEPAPTTPKEPAPTTPKKPAPTTPKEPAPTTPKEPAPTTTKKPAPTTPKEPAPTTPKETAPTTPKKLTPTTPEKLAPTTPEKPAPTTPEELAPTTPEEPTPTTPEEPAPTTPKAAAPNTPKEPAPTTPKEPAPTTPKEPAPTTPKETAPTTPKGTAPTTLKEPAPTTPKKPAPKELAPTTTKEPTSTTSDKPAPTTPKGTAPTTPKEPAPTTPKEPAPTTPKGTAPTTLKEPAPTTPKKPAPKELAPTTTKGPTSTTSDKPAPTTPKETAPTTPKEPAPTTPKKPAPTTPETPPPTTSEVSTPTTTKEPTTIHKSPDESTPELSAEPTPKALENSPKEPGVPTTKTPAATKPEMTTTAKDKTTERDLRTTPETTTAAPKMTKETATTTEKTTESKITATTTQVTSTTTQDTTPFKITTLKTTTLAPKVTT

SEQ ID NO: 78369 - protein, 113 aa, Homo sapiens
MRGAAPGKKTSGLQQKNVEVKTKKNKQKTPGNGDGGSTSETPQPPRKKRARVDPTVENEETFMNRVEVKVKIPEELKPWLVDDWDLITRQKQLFYLPAKKNVDSILEDYANYK

SEQ ID NO: 78370 - protein, 264 aa, Homo sapiens
  MOD_RES (1)..(1): Any amino acid
XPCAFSGNGRQCTANGTECRSGWVGPNGGITNFDNFAFAMLTVFQCITMEGWTDVLYWVNDAIGWEWPWVYFVSLIILGSFFVLNLVLGVLSGEFSKEREKAKARGDFQKLREKQQLEEDLKGYLDWITQAEDIDPENEEEGGEEGKRNRVTVADLLKEDKKKKKFCCFRQRRAKDHASMPTSETESVNTENVSGEGENRGCCGSLCQAISKSKLSRRWRRWNRFNRRRCRAAVKSVTFYWLVIVLVFLNTLTISSEHYNQPDW

SEQ ID NO: 78371 - protein, 86 aa, Homo sapiens
  MOD_RES (1)..(1): Any amino acid
XPNGKRKRGLNDNRKGLDQNIVGAIKVFTEKYCTANHVDKLPGPRDWVQILQDQIKLARRRLKRGSEIADSDERLDGIALPPTGLY

SEQ ID NO: 78372 - protein, 281 aa, Homo sapiens [sequence omitted]

SEQ ID NO: 78373 - protein, 635 aa, Homo sapiens
  MOD_RES (1)..(1): Any amino acid
XDNLQKRVTSILRRLKHFIGQREEFETARDSILVWLTEMDLQLTNIEHFSECDVQAKIKQLKAFQQEISLNHNKIEQIIAQGEQLIEKSEPLDAAIIEEELDELRRYCQEVFGRVERYHKKLIRLPLPDDEHDLSDRELELEDSAALSDLHWHDRSADSLLSPQPSSNLSLSLAQPLRSERSGRDTPASVDSIPLEWDHDYDLSRDLESAMSRALPSEDEEGQDDKDFYLRGAVGLSGDHSALESQIRQLGKALDDSRFQIQQTENIIRSKTPTGPELDTSYKGYMKLLGECSSSIDSVKRLEHKLKEEEESLPGFVNLHSTETQTAGVIDRWELLQAQALSKELRMKQNLQKWQQFNSDLNSIWAWLGDTEEELEQLQRLELSTDIQTIELQIKKLKELQKAVDHRKAIILSINLCSPEFTQADSKESRDLQDRLSQMNGRWDRVCSLLEEWRGLLQDALMQCQIFTGQVGRPFLNIKGFHEMSHGLLLMLENIDRRKNEIVPIDSNLDAEILQDHHKQLMQIKHELLESQLRVASLQDMSCQLLVNAEGTDCLEAKEKVHVIGNRLKLLLKEVSRHIKELEKLLDVSSSQQDLSSWSSADELDTSGSVSPTSGRSTPNRQKTVHKRWLRFLPF

SEQ ID NO: 78374 - protein, 146 aa, Homo sapiens
MKPPSSIQTSEFDSSDEEPIEDEQTPIHISWLSLSRVNCSQFLGLCALPGCKFKDVRRNVQKDTEELKSCGIQDIFVFCTRGELSKYRVPNLLDLYQQCGIITHHHPIADGGTPDIASCCEIMEELTTCLKNYRKTLIQAFEGVLR

SEQ ID NO: 78375 - protein, 241 aa, Homo sapiens
MASNNHWFQSSQVPSFAQMLKKNLPVQPATKTITTPTGWSSESYGLSKMASKVTQVTGNFPEPLLSKNLSSISNPVLPPKKIPKEFIMKYKRGEINPVSALHQFAQMQRVQLDLKETVTTGNVMGPYFAFCAVVDGIQYKTGLGQNKKESRSNAAKLALDELLQLDEPEPRILETSGPPPFPAEPVVLSELAYVSKVHYEGRHIQYAKISQIVKERFNQLISNRSEYLKYSSSLAAFIIER

SEQ ID NO: 78376 - protein, 595 aa, Homo sapiens; identical to SEQ ID NO: 54102

SEQ ID NO: 78377 - protein, 37 aa, Homo sapiens
MFTRAQMMSTVEKPQKDSIREGWKMNETELQQSIKSI

SEQ ID NO: 78378 - protein, 153 aa, Homo sapiens
  MOD_RES (1)..(1): Any amino acid
XHTSLQAGLLRGSVAAAPPGVEGRGARRCADRGGVSEAGAFPGEAWAGPGCAGAEGSQGPSLPNSQPPPEVYVSLIKACGGPGNFCPSFSELQRNFVKHRPTKLKSLLRLVKHWYQQAHHPGSGRPHPQRGRRVQMGHRCSEGLPVPETGLLL

SEQ ID NO: 78379 - protein, 398 aa, Homo sapiens
MPLPPRSLQVLLLLLLLLLLLPGMWAEAGLPRAGGGSQPPFRTFSASDWGLTHLVVHEQTGEVYVGAVNRIYKLSGNLTLLRAHVTGPVEDNEKCYPPPSVQSCPHGLGSTDNVNKLLLLDYAANRLLACGSASQGICQFLRLDDLFKLGEPHHRKEHYLSSVQEAGSMAGVLIAGPPGQGQAKLFVGTPIDGKSEYFPTLSSRRLMANEEDADMFGFVYQDEFVSSQLKIPSDTLSKFPAFDIYYVYSFRSEQFVYYLTLQLDTQLTSPDAAGEHFFTSKIVRLCVDDPKFYSYVEFPIGCEQAGVEYRLVQDAYLSRPGRALAHQLGLAEDEDVLFTVFAQGQKNRVKPPKESALCLFTLRAIKEKIKERIQSCYRGEGKLSLPWLLNKELGCINS

SEQ ID NO: 78380 - protein, 127 aa, Homo sapiens
MPILKQLVSSSVHSKRRSRADLTAEMISAPLGDFRHTMHVGRAGDAFGDTSFLNSKAGEPDGESLDEQPSSSSSKRSLLSRKFRGSKRSQSVTRGEREQRDMLGSLRDSALFVKNAMSLPQLNEKEA

SEQ ID NO: 78381 - protein, 1217 aa, Homo sapiens
MRQETLAQQQLQLEQIQQLQQQLHQQLEEQKIRQIYQYNYDPSGTASPQTTTEQAILEGQYAALEGSQFWATEDATTTASAVVAIEIPQSQGWYTVQSDGVTQYIAPPGILSTVSEIPLTDVVVKEEKQPKKRSSGAKVRGQYDDMGENMTDDPRSFKKIVDSGVQTDDEDATDRSYVSRRRRTKKSVDTSVQTDDEDQDEWDMPTRSRRKARVGKYGDSMTEADKTKPLSKVSSIAVQTVAEISVQTEPVGTIRTPSIRARVDAKVEIIKHISAPEKTYKGGSLGCQTEADSDTQSPQYLSATSPPKDKKRPTPLEIGYSSHLRADSTVQLAPSPPKSPKVLYSPISPLSPGKALESAFVPYEKPLPDDISPQKVLHPDMAKVPPASPKTAKMMQRSMSDPKPLSPTADESSRAPFQYTEGYTTKGSQTMTSSGAQKKVKRTLPNPPPEEISTGTQSTFSTMGTVSRRRICRTNTMARAKILQDIDRELDLVERESAKLRKKQAELDEEEKEIDAKLRYLEMGINRRKEALLKEREKRERAYLQGVAEDRDYMSDSEVSSTRPTRIESQHGIERPRTAPQTEFSQFIPPQTQTESQLVPPTSPYTQYQYSSPALPTQAPTSYTQQSHFEQQTLYHQQVSPYQTQPTFQAVATMSFTPQVQPTPTPQPSYQLPSQMMVIQQKPRQTTLYLEPKITSNYEVIRNQPLMIAPVSTDNTFAVSHLGSKYNSLDLRIGLEERSSMASSPISSISADSFYADIDHHTPRNYVLIDDIGEITKGTAALSTAFSLHEKDLSKTDRLLRTTETRRSQEVTDFLAPLQSSSRLHSYVKAEEDPMEDPYELKLLKHQIKQEFRRGTESLDHLAGLSHYYHADTSYRHFPKSEKYSISRLTLEKQAAKQLPAAILYQKQSKHKKSLIDPKMSKFSPIQESRDLEPDYSSYMTSSTSSIGGISSRARLLQDDITFGLRKNITDQQKFMGSSLGTGLGTLGNTIRSALQDEADKPYSSGSRSRPSSRPSSVYGLDLSIKRDSSSSSLRLKAQEAEALDVSFSHASSSARTKPTSLPISQSRGRIPIVAQNSEEESPLSPVGQPMGMARAAAGPLPPISADTRDQFGSSHSLPEVQQHMREESRTRGYDRDIAFIMDDFQHAMSDSEGKLGLKLPCYSQNSNSYFSACLISLLQRCILLFLVCLLHVYFNFISCKWKFYHVYRFCSMLFFI

SEQ ID NO: 78382 - protein, 139 aa, Homo sapiens
  MOD_RES (1)..(1): Any amino acid
XGYAIASSSDDRMNEPPTSLGLVPHQIRGFLSRFDNVLPVSLAFDKCTACSSKVLDQYEREGFNFLAKVFNSSHSFLEDLTGLTLLHQETQAAEDHLSFIRPKNGTFPAHQATCTQESAACPEIDLYQLSSRTIPCIHT

SEQ ID NO: 78383 - protein, 247 aa, Homo sapiens
MAKVAKDLNPGVKKMSLGQLQSARGVACLGCKGTCSGFEPHSWRKICKSCKCSQEDHCLTSDLEDDRKIGRLLMDSKYSTLTARVKGGDGIRIYKRNRMIMTNPIATGKDPTFDTITYEWAPPGVTQKLGLQYMELIPKEKQPVTGTEGAFYRRRQLMHQLPIYDQDPSRCRGLLENELKLMEEFVKQYKSEALGVGEVALPGQGGLPKEEGKQQEKPEGAETTAATTNGSLSDPSKEVEYKPVPLV

SEQ ID NO: 78384 - protein, 128 aa, Homo sapiens
MAEPGEGLPEEVLALIFRHLSLRDRAAAARVCRAWAAAATCSAVWHDTKISCECELEGMLPPYLSACLDHIHNLRLEFEPSRKPSRRAAIELLMVLAGRAPGLRGLRLECRGEKPLFDAGRDVLEAVH

SEQ ID NO: 78385 - protein, 45 aa, Homo sapiens
MLAVPNMRFGIFLLWWGWVLATESRMHWPGREVHEMSKKGRIEAS

SEQ ID NO: 78386 - protein, 59 aa, Homo sapiens
MMAIRELKVCLLGGLMEPICSLTKCHSIGRTLDKDKEGCIPVAPPGGRWRYVLRTPATG

SEQ ID NO: 78387 - protein, 269 aa, Homo sapiens
MDLGRDATRRFFNWFYWSINLGAVLSLLVVAFIQQNISFLLGYSIPVGCVGLAFFIFLFATPVFITKPPMGSQVSSMLKLALQNCCPQLWQRHSARDRQCARVLADERSPQPGASPQEDIANFQVLVKILPVMVTLVPYWMVYFQMQSTYVLQGLHLHIPNIFPANPANISVALRAQGSSYTESWRWSAYTTSTTTRPCPSRLGRSCTTRHHCPSGGRSLSTCSLGSVRSLPASQAWSLPTQRPRAPCRAPSWASSSACRGWAHCWAPA

SEQ ID NO: 78388 - protein, 180 aa, Homo sapiens
MAHAMENSWTISKEYHIDEEVGFALPNPQENLPDFYNDWMFIAKHLPDLIESGQLRERVEKLNMLSIDHLTDHKSQRLARLVLGCITMAYVWGKGHGDVRKVLPRNIAVPYCQLSKKLELPPILVYADCVLANWKKKDPNKPLTYENMDVLFSFRDGDCSKGFFLVSLLVEIAAASAIKV

SEQ ID NO: 78389 - protein, 542 aa, Homo sapiens
  MOD_RES (1)..(1): Any amino acid
XHSYGVAQPPTFSPAVNVQAPVIGVTPSLPPHVGPQLPLMPGHYSLPQPPSQPLSSVVVNMPAQALYASPQPLAVSTLPGVGQVARPGPTAVGNGHMAGPLLPPPPPAQPSATLPSGAPATNGPPTTDSAHGLQMLRTIGVGKYEFTDPGHPREMLKELNQQRRAKAFTDLKIVVEGREFEVHQNVLASCSLYFKDLIQRSVQDSGQGGREKLELVLSNLQADVLELLLEFVYTGSLVIDSANAKTLLEAASKFQFHTFCKVCVSFLEKQLTASNCLGVLAMAEAMQCSELYHMAKAFALQIFPEVAAQEEILSISKDDFIAYVSNDSLNTKAEELVYETVIKWIKKDPATRTQYAAELLAVVRLPFIHPSYLLNVVDNEELIKSSEACRDLVNEAKRYHMLPHARQEMQTPRTRPRLSAGVAEVIVLVGGRQMVGMTQRSLVAVTCWNPQNNKWYPLASLPFYDREFFSVVSAGDNIYLSGGMESGVTLADVWCYMSLLDNWNLVSRMTVPRCRHNSLVYDGKIYTLGGLGVAGNVDHVER

SEQ ID NO: 78390 - protein, 72 aa, Homo sapiens
MLTFLQQLRVDWPAASERASSHTLRSHALEELTSANDGRTLSPGILGRLCLKELVEEQGRTAGYDPNLDNCL

SEQ ID NO: 78391 - protein, 747 aa, Homo sapiens
MVKLVEVPNDGGPLGIHVVPFSARGGRTLGLLVKRLEKGGKAEHENLFRENDCIVRINDGDLRNRRFEQAQHMFRQAMRTPIIWFHVVPAANKEQYEQLSQSEKNNYYSSRFSPDSQYIDNRSVNSAGLHTVQRAPRLNHPPEQIDSHSRLPHSAHPSGKPPSAPASAPQNVFSTTVSSGYNTKKIGKRLNIQLKKGTEGLGFSITSRDVTIGGSAPIYVKNILPRGAAIQDGRLKAGDRLIEVNGVDLVGKSQEEVVSLLRSTKMEGTVSLLVFRQEDAFHPRELKAEDEDIVLTPDGTREFLTFEVPLNDSGSAGLGVSVKGNRSKENHADLGIFVKSIINGGAASKDGRLRVNDQLIAVNGESLLGKTNQDAMETLRRSMSTEGNKRGMIQLIVARRISKCNELKSPGSPPGPELPIETALDDRERRISHSLYSGIEGLDESPSRNAALSRIMGKYQLSPTVNMPQDDTVIIEDDRLPVLPPHLSDQSSSSSHDDVGFVTADAGTWAKAAISDSADCSLSPDVDPVLAFQREGFGRQSMSEKRTKQFSDASQLDFVKTRKSKSMDLVADETKLNTVDDQKAGSPSRDVGPSLGLKKSSSLESLQTAVAEVTLNGDIPFHRPRPRIIRGRGCNESFRAAIDKSYDKPAVDDDDEGMETLEEDTEESSRSGRESVSTASDQPSHSLERQMNGNQEKGDKTDRKKDKTGKEKKKDRDKEKDKMKAKKGMLKGLGDMFSLAKLKPEKR

SEQ ID NO: 78392 - protein, 253 aa, Homo sapiens
MDDTLFQLKFTAKQLEKLAKKAEKDSKAEQAKVKKALLQKNVECARVYAENAIRKKNEGVNWLRMASRVDAVASKVQTAVTMKGVTKNMAQVTKALDKALSTMDLQKVSSVMDRFEQQVQNLDVHTSSMPLPPGDGGLHELGHHPDHAAGAGGQPHHADRRGEWPGGAGPAQPAARGRLCRGRELCAQPGGPAVTEVGRLEELAVPRRCAPPLPRDVLEGSCPLPTASCLCADPAGLRPAATLRLSPARPAWP

SEQ ID NO: 78393 - protein, 142 aa, Homo sapiens
MEGAALLRVSVLCIWMSALFLGVGVRAEEAGARVQQNVPSGTDTGDPQSKPLGDWAAGTMDPGPAGSRGDSGEPCTLRPACRGQRQHGGASRISAEGPAPMPRRRTPSTAHLRVPKTSRRNLLCMVVVLNAVEFETLFLNFK

SEQ ID NO: 78394 - protein, 320 aa, Homo sapiens
MNKNTSTVVSPSLLEKDPAFQMITIAKETGLGLKVLGGINRNEGPLVYIQEIIPGGDCYKDGRLKPGDQLVSVNKESMIGVSFEEAKSIITGAKLRLESAWEIAFIRQKSDNIQPENLSCTSLIEASGEYGPQASTLSLFSSPPEILIPKTSSTPKTNNDILSSCEIKTGYNKTVQIPITSENSTVGLSNTDVASAWTENYGLQEKISLNPSVRFKAEKLEMALNYLGIQPTKEQHQALRQQVQADSKGTVSFGDFVQVARNLFCLQLDEVNVGAHEISNILDSQLLPCDSSEADEMERLKCERDDALKEVNTLKWPGQN

SEQ ID NO: 78395 - protein, 55 aa, Homo sapiens
MATPAVPCRTMSQKMKWLLTWNLLRICMNCIKKFLQMSSSWAGTLRAMTSQSTLC

SEQ ID NO: 78396 - protein, 99 aa, Homo sapiens
MDIVDAEQEAPVEGWIAVAYVGKEQAAQFHQENKGSGPQAYPKALVQQMRRALFLGASALLLLILNHNVVRELDISQLLLRPVIVLHYSSNVTKLLDAL

SEQ ID NO: 78397 - protein, 211 aa, Homo sapiens
MKSSDIDQDLFTDSYCKVCSAQLISESQRVAHYESRKHASKVRLYYMLHPRDGGCPAKRLRSENGSDADMVDKNKCCTLCNMSFTSAVVADSHYQGKIHAKRLKLLLGEKTPLKTTATPLSPLKPPRMDTAPVVASPYQRRDSDRYCGLCAAWFNNPLMAQQHYDGKKHKKNAARVALLEQLGTTLDMGELRGLRRNYRCTICSVSLNSIE

SEQ ID NO: 78398 - protein, 584 aa, Homo sapiens
MLFPTSAQESSRGLPDANDLCLGLQSLSLTGWDRPWSTQDSDSSAQSSTHSVLSMLHNPLGNVLGKPPLSFLPLDPLGSDLVDKFPAPSVRGSRLDTRPILDSRSSSPSDSDTSGFSSGSDHLSDLISSLRISPPLPFLSLSGGGPRDPLKMGVGSRMDQEQAALAAVTPSPTSASKRWPGASVWPSWDLLEAPKDPFSIEREARLHRQAAAVNEATCTWSGQLPPRNYKNPIYSCKVFLGGVPWDITEAGLVNTFRVFGSLSVEWPGKDGKHPRCPPKGYVYLVFELEKSVRSLLQACSHDPLSPDGLSEYYFKMSSRRMRCKEVQVIPWVLADSNFVRSPSQRLDPSRTVFVGALHGMLNAEALAAILNDLFGGVVYAGIDTDKHKYPIGSGRVTFNNQRSYLKAVSAAFVEIKTTKFTKKVQIDPYLEDSLCHICSSQPGPFFCRDQGRVRTKTVKKAARVIIEKYYTRLGNDFHTNKRVCEEIAIIPSKKLRNKIAGYVTHLMKRIQRGPVRGISIKLQEEERERRDNYVPEVSALDQEIIEVDPDTKEMLKLLDFGSLSNLQVTQPTVGMNFKTPRGPV

SEQ ID NO: 78399 - protein, 449 aa, Homo sapiens
MAEDVSSAAPSPRGCADGRDADPTEEQMAETERNDEEQFECQELLECQVQVGAPEEEEEEEEDAGLVAEAEAVAAGWMLDFLCLSLCRAFRDGRSEDFRRTRNSAEAIIHGLSSLTACQLRTIYICQFLTRIAAGKTLDAQFENDERITPLESALMIWGSIEKEHDKLHEEIQNLIKIQAIAVCMENGNFKEAEEVFERIFGDPNSHMPFKSKLLMIISQKDTFHSFFQHFSYNHMMEKIKSYVNYVLSEKSSTFLMKAAAKVVESKRTRTITSQDKPSGNDVEMETEANLDTRKRSHKNLFLSKLQHGTQQQDLNKKERRVGTPQITYICLTKLTMNKKEGVRKGLCFLVLLKHYRTKKKKESRRATESRIPVSKSQPVTPEKHRARKRQAWLWEEDKNLRSGVRKYGEGNWSKILLHYKFNNRTSVMLKDRWRTMKKLKLISSDSED

SEQ ID NO: 78400 - protein, 229 aa, Homo sapiens
  MOD_RES (1)..(1): Any amino acid
XQMEKALSIGFETCRYGFIEGHVVIPRIHPNSICAANNTGVYILTSNTSQYDTYCFNASAPPEEDCTSVTDLPNAFDGPITITIVNRDGTRYVQKGEYRTNPEDIYPSNPTDDDVSSGSSSERSSTSGGYIFYTFSTVHPIPDEDSPWITDSTDRIPATISTTPRAFDHTKQNQDWTQWNPSHSNPEVLLQTTTRMTDVDRNGTTAYEGNWNPEAHPPLIHHEHHEEEE

SEQ ID NO: 78401 - protein, 78 aa, Homo sapiens
MAMDEYLWMVILGFIIAFILAFSVGANDVANSFGTAVGSGVVTLRQACILASIFETTGSVLLGAKVGETIRKGIIDVN

SEQ ID NO: 78402 - protein, 40 aa, Homo sapiens
MDAIKKKMQMLKLDKENALDRAEQAEADKKAAEDRSKQWT

SEQ ID NO: 78403 - protein, 245 aa, Homo sapiens
  MOD_RES (1)..(1): Any amino acid
XKHHHTVPPSVTPKALDRSPPCPEMFTRAAPGYHMAKLIIKLVTSIGDVVNHDPVVGDRLKVIFLENYRVSLAEKVIPAADLSQQISTAGTEASGTGNMKFMLNGALTIGTMDGANVEMAEEAGAENLFIFGLRVEDVEALDRKGYNAREYYDHLPELKQAVDQISSGFFSPKEPDCFKDIVNMLMHHDRFKVFADYEAYMQCQAQVDQLYRNPKEWTKKVIRNIACSGKFSSDRTITEYAREIW

SEQ ID NO: 78404 - protein, 167 aa, Homo sapiens
MSNKVPVVQHPHHVHPLTPLITYSNEHFTPGNPPPHLPADVDPKTGIPRPPHPPDISPYYPLSPGTVGQIPHPLGWLVPQQGQPVYPITTGGFRHPYPTALTVNASMSRFPPHMVPPHHTLHTTGIPHPAIVTPTVKQESSQSDVGSLHSSKHQDSKKEEEKKKPHI

SEQ ID NO: 78405 - protein, 50 aa, Homo sapiens
MEAVELARKLQEEATCSICLDYFTDPVMTTCGHNFCRACIQLSWEKARGK

SEQ ID NO: 78406 - protein, 401 aa, Homo sapiens
MRGANAWAPLCLLLAAATQLSRQQSPERPVFTCGGILTGESGFIGSEGFPGVYPPNSKCTWKITVPEGKVVVLNFRFIDLESDNLCRYDFVDVYNGHANGQRIGRFCGTFRPGALVSSGNKMMVQMISDANTAGNGFMAMFSAAEPNERGDQYCGGLLDRPSGSFKTPNWPDRDYPAGVTCVWHIVAPKNQLIELKFEKFDVERDNYCRYDYVAVFNGGEVNDARRIGKYCGDSPPAPIVSERNELLIQFLSDLSLTADGFIGHYIFRPKKLPTTTEQPVTTTFPVTTGLKPTVALCQQKCRRTGTLEGNYCSSDFVLLAFAFTVTSLQNVFFCSISRHCYHNHHSRWEFARHSLDHQHLQRGKFGDSAGGQEHECQADCRLQAVPSPQKRSKLHYYGPSR

SEQ ID NO: 78407 - protein, 97 aa, Homo sapiens
MKPILLQGHERSITQIKYNREGDLLFTVAKDPIVNVWYSVNGERLGTYMGHTGAVWCVDADWDTKHVLTGSADNSCRLWDCETAFSRMSSLQLQWMV

SEQ ID NO: 78408 - protein, 2341 aa, Homo sapiens
MSEPGGGGGEDGSAGLEVSAVQNVADVSVLQKHLRKLVPLLLEDGGEAPAALEAALEEKSALEQMRKFLSDPQVHTVLVERSTLKEDVGDEGEEEKEFISYNINIDIHYGVKSNSLAFIKRTPVIDADKPVSSQLRVLTLSEDSPYETLHSFISNAVAPFFKSYIRESGKADRDGDKMAPSVEKKIAELEMGLLHLQQNIEIPEISLPIHPMITNVAKQCYERGEKPKVTDFGDKVEDPTFLNQLQSGVNRWIREIQKVTKLDRDPASGTALQEISFWLNLERALYRIQEKRESPEVLLTLDILKHGKRFHATVSFDTDTGLKQALETVNDYNPLMKDFPLNDLLSATELDKIRQALVAIFTHLRKIRNTKYPIQRALRLVEAISRDLSSQLLKVLGTRKLMHVAYEEFEKVMVACFEVFQTWDDEYEKLQVLLRDIVKRKREENLKMVWRINPAHRKLQARLDQMRKFRRQHEQLRAVIVRVLRPQVTAVAQQNQGEVPEPQDMKVAEVLFDAADANAIEEVNLAYENVKEVDGLDVSKEGTEAWEAAMKRYDERIDRVETRITARLRDQLGTAKNANEMFRIFSRFNALFVRPHIRGAIREYQTQLIQRVKDDIESLHDKFKVQYPQSQACKMSHVRDLPPVSGSIIWAKQIDRQLTAYMKRVEDVLGKGWENHVEGQKLKQDGDSFRMKLNTQEIFDDWARKVQQRNLGVSGRIFTIESTRVRGRTGNVLKLKVNFLPEIITLSKEVRNLKWLGFRVPLAIVNKAHQANQLYPFAISLIESVRTYERTCEKVEERNTISLLVAGLKKEVQALIAEGIALVWESYKLDPYVQRLAETVFNFQEKVDDLLIIEEKIDLEVRSLETCMYDHKTFSEILNRVQKAVDDLNLHSYSNLPIWVNKLDMEIERILGVRLQAGLRAWTQVLLGQAEDKAEVDMDTDAPQVSHKPGGEPKIKNVVHELRITNQVIYLNPPIEECRYKLYQEMFAWKMVVLSLPRIQSQRYQVGVHYELTEEEKFYRNALTRMPDGPVALEESYSAVMGIVSEVEQYVKVWLQYQCLWDMQAENIYNRLGEDLNKWQALLVQIRKARGTFDNAETKKEFGPVVIDYGKVQSKVNLKYDSWHKEVLSKFGQMLGSNMTEFHSQISKSRQELEQHSVDTASTSDAVTFITYVQSLKRKIKQFEKQVELYRNGQRLLEKQRFQFPPSWLYIDNIEGEWGAFNDIMRRKDSAIQQQVANLQMKIVQEDRAVESRTTDLLTDWEKTKPVTGNLRPEEALQALTIYEGKFGRLKDDREKCAKAKEALELTDTGLLSGSEERVQVALEELQDLKGVWSELSKVWEQIDQMKEQPWVSVQPRKLRQNLDALLNQLKSFPARLRQYASYEFVQRLLKGYMKINMLVIELKSEALKDRHWKQLMKRLHVNWVVSELTLGQIWDVDLQKNEAIVKDVLLVAQGEMALEEFLKQIREVWNTYELDLVNYQNKCRLIRGWDDLFNKVKEHINSVSAMKLSPYYKVFEEDALSWEDKLNRIMALFDVWIDVQRRWVYLEGIFTGSADIKHLLPVETQRFQSISTEFLALMKKVSKSPLVMDVLNIQGVQRSLERLADLLGKIQKALGEYLERERSSFPRFYFVGDEDLLEIIGNSKNVAKLQKHFKKMFAGVSSIILNEDNSVVLGISSREGEEVMFKTPVSITEHPKINEWLTLVEKEMRVTLAKLLAESVTEVEIFGKATSIDPNTYITWIDKYQAQLVVLSAQIAWSENVETALSSMGGGGDAAPLHSVLSNVEVTLNVLADSVLMEQPPLRRRKLEHLITELVHQRDVTRSLIKSKIDNAKSFEWLSQMRFYFDPKQTDVLQQLSIQMANAKFNYGFEYLGVQDKLVQTPLTDRCYLTMTQALEARLGGSPFGPAGTGKTESVKALGHQLGRFVLVFNCDETFDFQAMGRIFVGLCQVGAWGCFDEFNRLEERMLSAVSQQVQCIQEALREHSNPNYDKTSAPITCELLNKQVKVSPDMAIFITMNPGYAGRSNLPDNLKKLFRSLAMTKPDRQLIAQVMLYSQGFRTAEVLANKIVPFFKLCDEQLSSQSHYDFGLRALKSVLVSAGNVKRERIQKIKREKEERGEAVDEGEIAENLPEQEILIQSVCETMVPKLVAEDIPLLFSLLSDVFPGVQYHRGEMTALREELKKVCQEMYLTYGDGEEVGGMWVEKVLQLYQITQINHGLMMVGPSGSGKSMAWRVLLKALERLEGVEGVAHIIDPKAISKDHLYGTLDPNTREWTDGLFTHVLRKIIDSVRGELQKRQWIVFDGDVDPEWVENLNSVLDDNKLLTLPNGERLSLPPNLIQ

SEQ ID NO: 78409 - protein, 103 aa, Homo sapiens
MDEIKSQELNLEGQRKISPGSIKDSKTEASGNIAIRKSAKVIFALDETELKSKPEHTWKKNLFERMEARAQAMQQKIIDKENLKKELEKKAEKKLPRDNLAKE

SEQ ID NO: 78410 - protein, 58 aa, Homo sapiens
MESMAVATDGGERPGVPAGSGLSASQRRAELRRRKLLMNSEQRINRIMGFHRPGSGAE

SEQ ID NO: 78411 - protein, 274 aa, Homo sapiens
MPMPTEGTPPPLSGTPIPVPAYFRHAEPGFSLKRPRGLSRSLPPPPPAKGSIPISRLFPPRTPGWHQLQPRRVSFRGEASETLQSPGYDPSRPESFFQQSFQRLSRLGHGSYGEVFKVRSKEDGRLYAVKRSMSPFRGPKDRARKLAEVGSHEKVGQHPCCVRLEQAWEEGGILYLQTELCGPSLQQHCEAWGASLPEAQVWGYLRDTLLALAHLHSQGLVHLDVKPANIFLGPRGRCKLGDFGLLVELGTAGAGEVQEGDPRYMAPELLQGSY

SEQ ID NO: 78412 - protein, 212 aa, Homo sapiens
MPSKKKKYNARFPPARIKKIMQTDEEIGKVAAAVPVIISRALELFLESLLKKACQVTQSRNAKTMTTSHLKQCIELEQQFDFLKDLVASVPDMQGDGEDNHMDGDKGARRWTVPSQRGRKPGSGGRKNGGMGTKSKDKKLSGTDSEQEDESEDTDTDGEEETSQPPPQASHPSAHFQSPPTPFLPFASTLPLPPAPPGPSAPDEEDEEDYDS

SEQ ID NO: 78413 - protein, 600 aa, Homo sapiens
MSEETVSESQFSLKTAALRVFDLPLTWYYSLSQIKFSPVAKKLFVVTAVSAISVIFLAHHFKRKRGKKKGKILPWEPEHLILEYTKRAASDKGSSCSSSRQNLTLSLSSTKDKGSQVCNYANGGLFSKYSGSAQSLASVQSVNSCHSCACGNSNSWDKADEDDIKLVNIPVTTPENLYLMGMELFEEALRRWEQALTFRNRQAEDEACGSIKLGAGDAIAEENVDDIISTEFIHKLEALLQRAYRLQEEFEATLGASDPNSLADDIDKDTDITMKGNVEDFGLRDTLSIASTDSFASAAELAEHREVRHTYSLESLCHCPFYEEAMHLVEEGKIYSRVLRTEMLECLGDSDFLAKLHCIRQAFQVILSESANRIFLAESGRKILSALIVKARKNPKKFEDVFDEMIYFLEQTDHWGSTEMELAARGVKNLNFYDVVLDFILMDSFEDLENPPTSIQNVVNNRWLNSSFKETAVASSCWSVLKQKRQQMKIPDGFFAHFYAICEHISPVLAWGFLGPRNSLYDLCCFFKNQVLLFLKDIFDFEKVRYSSTETLAEDLMQLLIRRTELLMAYLEADALRHTSSCLSSHGHVMSTGLLEAKVQ

SEQ ID NO: 78414 - protein, 463 aa, Homo sapiens
MIQTVPDPAAHIKEALSVVSEDQSLFECAYGTPHLAKTEMTASSSSDYGQTSKMSPRVPQQDWLSQPPARVTIKMECNPSQVNGSRNSPDECSVAKGGKMVGSPDTVGMNYGSYMEEKHMPPPNMTTNERRVIVPADPTLWSTDHVRQWLEWAVKEYGLPDVNILLFQNIDGKELCKMTKDDFQRLTPSYNADILLSHLHYLRETPLPHLTSDDVDKALQNSPRLMHARNTGGAAFIFPNTSVYPEATQRITTRPAAQPSPSTVPKTEDQRPQLDPYQILGPTSSRLANPGSGQIQLWQFLLELLSDSSNSSCITWEGTNGEFKMTDPDEVARRWGERKSKPNMNYDKLSRALRYYYDKNIMTKVHGKRYAYKFDFHGIAQALQPHPPESSLYKYPSDLPYMGSYHAHPQKMNFVAPHPPALPVTSSSFFAAPNPYWNSPTGGIYPNTRLPTSHMPSHLGTYY

SEQ ID NO: 78415 - protein, 107 aa, Homo sapiens
LEETSVLTQALAQSGQQLEWPEAWRQQLVDKHSTGGVGDKVSLVLAPALAACGCKEAPWISWSLFLDSMSSRAQSRCKCCWTRRAAVSWVRVSSWFLRTESYMQPEM

SEQ ID NO: 78416 - protein, 869 aa, Homo sapiens
MNKAPQSTGPPPAPSPGLPQPAFPPGQTAPVVFSTPQATQMNTPSQPRQGGFRSLQHFYPSRAQPPSSAASRVQSAAPARPGPAAHVYPAGSQVMMIPSQISYPASQGAYYIPGQGRSTYVVPTQQYPVQPGAPGFYPGASPTEFGTYAGAYYPAQGVQQFPTGVAPTPVLMNQPPQIAPKRERKTIRIRDPNQGGKDITEEIMSGARTASTPTPPQTGGGLEPQANGETPQVAVIVRPDDRSQGAIIADRPGLPGPEHSPSESQPSSPSPTPSPSPVLEPGSEPNLAVLSIPGDTMTTIQMSVEESTPISRETGEPYRLSPEPTPLAEPILEVEVTLSKPVPESEFSSSPLQAPTPLASHTVEIHEPNGMVPSEDLEPEVESSPELAPPPACPSESPVPIAPTAQPEELLNGAPSPPAVDLSPVSEPEEQAKEVTASMAPPTIPSATPATAPSATSPAQEEEMEEEEEEEEGEAGEAGEAESEKGGEELLPPESTPIPANLSQNLEAAAATQVAVSVPKRRRKIKELNKKEAVGDLLDAFKEANPAVPEVENQPPAGSNPGPESEGSGVPPRPEEADETWDSKEDKIHNAENIQPGEQKYEYKSDQWKPLNLEEKKRYDREFLLGFQFIFASMQKPEGLPHISDVVLDKANKTPLRPLDPTRLQGINCGPDFTPSFANLGRTTLSTRGPPRGGPGGELPRGPQAGLGPRRSQQGPRKEPRKIIATVLMTEDIKLNKAEKAWKPSSKRTAADKDRGEEDADGSKTQDLFRRVRSILNKLTPQMFQQLMKQVTQLAIDTEERLKGVIDLIFEKAISEPNFSVAYANMCRCLMALKVPTTEKPTVTVNFRKLLLNRCQKEFEKDKDDDEVF

SEQ ID NO: 78417 - protein, 44 aa, Homo sapiens
  MOD_RES (1)..(1): Any amino acid
XMKRASSLNVLNVGGKAAEDRFQERNNCLADSRALSASHTDLAH

SEQ ID NO: 78418 - protein, 144 aa, Homo sapiens
MSGELPPNINIKEPRWDQSTFIGRANHFFTVTDPRNILLTNEQLESARKIVHDYRQGIVPPGLTENELWRAKYIYDSAFHPDTGEKMILIGRMSAQVPMNMTITGCMMTFYRTTPAVLFWQWINQSFNAVVNYTNRSGDAPLTV

SEQ ID NO: 78419 - protein, 175 aa, Homo sapiens
MYRDPEAASPGAPSRDVLLVSAIITVSLSVTVVLCGLCHWCQRKLGKRYKNSLETVGTPDSGRGRSEKKAIKLPAGGKAVNTAPVPGQTPHDESDRRTEPRSSVSDLVNSLTSEMLMLSPGSEEDEAHEGCSRENLGRIQFSVGYNFQESTLTVKIMKAQELPAKDFSGTSDPFV

SEQ ID NO: 78420 - protein, 78 aa, Homo sapiens
MEVLELRTYRDLQYVRGMETLMRSLDARLRAADGSLSAKSFQELKDRMTELLPLSSVLEQYKADTRTIVRLREEAVGS

SEQ ID NO: 78421 - protein, 119 aa, Homo sapiens
MEVGGDTAAPAPGGAEDLEDTQFPSEEAREGGGVHAVPPDPEDEGLEETGAPFQDPRTRTSHPAHHHRPSQRPCQAPLGSGVLQPLRIVPHVALRVALEARAGTPVMRSGAASGSMCLC

SEQ ID NO: 78422 - protein, 253 aa, Homo sapiens
MAEPLGIQAPCPVCVHLVLPCTFRFPSTNIKITFTALSSEKREKQEASESPVKAVQPHISPLTINIPDTMAHLISPLPSPTGTISAANSCPSSPRGAGSSGYKVGRVMPSDLNLMADNSQPENEKEASGGDSPKDDSKPPYSYAQLIVQAITMAPDKQLTLNGIYTHITKNYPYYRTADKGWQNSIRHNLSLNRYFIKVPRSQEEPGKGSFWRIDPASESKLIEQAFRKRRPRGVPCFRTPLGPLSSRSAPAS

SEQ ID NO: 78423 - protein, 196 aa, Homo sapiens
MVGPRSWETGRIGDERQEETGGGRGEGRGRRQRESEDPKGWRWGWKDWGPAGKRVCSLKQEFVGQSLWVRVCGAGIETRGIGVQMLTTSLFSEQCDFTEDQTAEMNVKVLDFEHFLPMLQTVAKNKDQGTYEDYVEGLRVFDKEGNGTVMGAEIRHVLVTLGEKMTEEEVEMLVAGHEDSNGCINYEELVRMVLNG

SEQ ID NO: 78424 - protein, 145 aa, Homo sapiens
MSQLNLKQIIVSLCPPGCECSLVILAHCNLCLLSSSNSCALVSQVAEITGLTSKDLVREEKTRKRKRKAKESGMALLQGLLTFRDVAIEFSQEEWKCLDPAQRTLYRDVMLENYRNLVSLDTSSKCMMKMFSSTGQGNTEVVHTG

SEQ ID NO: 78425 - protein, 78 aa, Homo sapiens
MVEYGRYSNELYELQASRWLWKKVKPHPPPSGLPPCPRLGHSFSLYGNKCYLFGGLANESEDSNNNVPRYLNDFYELE

SEQ ID NO: 78426 - protein, 112 aa, Homo sapiens
MESRVLLRTFCLIFGLGAVWGLGVDPSLQIDVLTELELGESTTGVRQVPGLHNGTKAFLFQDTPRSIKASTATAEQFFQKLRNKHEFTILVTLKQTHLNSGVILSIHHLDHR

SEQ ID NO: 78427 - protein, 516 aa, Homo sapiens
GSFNAERGWYVSVQQPEEAEAEELSPLLSNELHRQRSPGVSFGLSVFNLMNAIMGSGILGLAYVLANTGVFGFSFLLLTVALLASYSVHLLLSMCIQTAVTSYEDLGLFAFGLPGKLVVAGTIIIQNIGAMSSYLLIIKTELPAAIAEFLTGDYSRYWYLDGQTLLIIICVGIVFPLALLPKIGFLGYTSSLSFFFMMFFALVVIIKKWSIPCPLTLNYVEKGFQISNVTDDCKPKLFHFSKESAYALPTMAFSFLCHTSILPIYCELQSPSKKRMQNVTNTAIALSFLIYFISALFGYLTFYDKVESELLKGYSKYLSHDVVVMTVKLCILFAVLLTVPLIHFPARKAVTMMFFSNFPFSWIRHFLITLALNIIIVLLAIYVPDIRNVFGVVGASTSTCLIFIFPGLFYLKLSREDFLSWKKLGGLILSHRLACSGVISAHCNLCLPDSSNPPTSASRVAETTGRDTMEMCTQRKGHARTQQEGNCLQAKGRGLRRTKRVHTLILHFPTSRTVSK

SEQ ID NO: 78428 - protein, 64 aa, Homo sapiens
MASSAEGDEGTVVALAGVLQSGFQELSLNKLATSLGASEQALRLIISIFLGTPWMKPLPAEFWQ

SEQ ID NO: 78429 - protein, 241 aa, Homo sapiens
MEVVTFGDVAVHFSREEWQCLDPGQRALYREVMLENHSSVAGLAGFLVFKPELISRLEQGEEPWVLDLQGAEGTEAPRTSKTDSTIRTENEQACEDMDILKSESYGTVVRISPQDFPQNPGFGDVSDSEVWLDSHLGSPGLKVTGFTFQNNCLNEETVVPKTFTKDAPQGCKELGSSGLDCQPLESQGESAEGMSQRCEECGKGIRATSDIALHWEINTQKISRCQECQKKLSDCLQGKHT

SEQ ID NO: 78430 - protein, 219 aa, Homo sapiens
MLKAVILIGGPQKGTRFRPLSFEVPKPLFPVAGVPMIQHHIEACAQVPGMQEILLIGFYQPDEPLTQFLEAAQQEFNLPVRYLQEFAPLGTGGGLYHFRDQILAGSPEAFFVLNADVCSDFPLSAMLEAHRRQRHPFLLLGTTANRTQSLNYGCIVENPQTHEVLHYVEKPSTFISDIINCGIYLFSPEALKPLRDVFQRNQQDGQFPGRAGPDIRASH

SEQ ID NO: 78431 - protein, 403 aa, Homo sapiens
MESISMMGSPKSLSETFLPNGINGIKDARKVTVGVIGSGDFAKSLTIRLIRCGYHVVIGSRNPKFASEFFPHVVDVTHHEDALTKTNIIFVAIHREHYTSLWDLRHLLVGKILIDVSNNMRINQYPESNAEYLASLFPDSLIVKGFNVVSAWALQLGPKDASRQVYICSNNIQARQQVIELARQLNFIPIDLGSLSSAREIENLPLRLFTLWRGPVVVAISLATFFFLYSFVRDVIHPYARNQQSDFYKIPIEIVNKTLPIVAITLLSLVYLAGLLAAAYQLYYGTKYRRFPPWLETWLQCRKQLGLLSFFFAMVHVAYSLCLPMRRSERYLFLNMAYQQVHANIENSWNEEEVWRIEMYISFGIMSLGLLSLLAVTSIPSVSNALNWREFSFIQWPSATLLS

SEQ ID NO: 78432 - protein, 15 aa, Homo sapiens
MRPWTGSWRWIMLIL

SEQ ID NO: 78433 - protein, 576 aa, Homo sapiens
MERGWPQGDSCPGERPAACRRAHSVCDSLDLHGASAGRAAAALQAALCAASEQPARPRSVCSGGPEPPPTGARGLLLGLLRPRLGRRGLAPSGPPVSPAPSPASSPAPTRRSRTRGEPTPRPRPASMTFLEVNRLELAAAEAPGAGLGRAGSAGFLRGAALWSSQRWPVLRGGRGPEGPRRGLAALRKSFSFRLRRGQEVRRSESGLLARPPRARTRSDGDAGSLGAFPSRRDLLGSDAPRAAPEPGRPRTAAGLWRLLTSRFRRREPAPAAPLWGRRAAAAPELLRAPSDSFVNSQEWTLSRSVPELKVGIVGNLSSGKSALVHRYLTGTYVQEESPEGGRFKKEIVVDGQSYLLLIRDEGGPPELQFAAWVDAVVFVFSLEDEISFQTVYNYFLRLCSFRNASEVPMVLVGTQDAISAANPRVIDDSRARKLSTDLKRCTYYETCATYGLNVERVFQDVAQKVVALRKKQQLAIGPCKSLPNSPSHSAVSAASIPAVHINQATNGGGSAFSDYSSSVPSTPSISQRELRIETIAASSTPTPIRKQSKRRSNIFTICATVSNFSSTKRPFQLLPN

SEQ ID NO: 78434 - protein, 128 aa, Homo sapiens
MAVPETRPNHTIYINNLNEKIKKDELKKSLYAIFSQFGQILDILVSRSLKMRGQAFVIFKEVSSATNALRSMQGFPFYDKPMYAKTDSDIIAKMKGTFVERDRKREKRKPKSQETPATKKAVQGGGAT

SEQ ID NO: 78435 - protein, 80 aa, Homo sapiens
MARERGQLVFLEGLKSAVDVVFQAQKEPHPLQFLREANAGNLKPLFEFVREALKPVDSGEARWTYPVLLVDDLSVLLSLG

SEQ ID NO: 78436 - protein, 122 aa, Homo sapiens
MEADASVDMFSKVLEHQLLQTTKLVEEHLDSEIQKLDQMDEDELERLKEKRLQALRKAQQQKQEWLSKGHGEYREIPSERDFFQEVKESENVVCHFYRDSTFSVAYLGVRSFSSVMLFSFSS

SEQ ID NO: 78437 - protein, 190 aa, Homo sapiens
MYLQVETRTSSRLHLKRAPGIRSWSLLVGILSIGLAAAYYSGDSLGWKLFYVTGCLFVAVQNLEDWEEAIFDKSTGKVVLKTFSLYKKLLTLFRAGHDQVVVLLHDVRDVSVEEEKVRYFGKGYMVVLRLATGFSHPLTQSAVMGHRRTRGTFPVCLSPCTAHRTRGLGFSWCLQPSWPIACSCCCLHTA

SEQ ID NO: 78438 - protein, 54 aa, Homo sapiens
MDDDANGDVDVEESDEFLREDLNYHDPTVKHSTFHGEDKLISVEDLWKAWKSSE

SEQ ID NO: 78439 - protein, 202 aa, Homo sapiens
MQAGKPILYSYFRSSCSWRVRIALALKGIDYETVPINLIKDGGQQFSKDFQALNPMKQLAIIEYLEEMRPTPRLLPQDPKKRASVRMISDLIAGGIQPLQNLSVLKQVGEEMQLTWAQNAITCGFNALEQILQSTAGIYCVGDEVTMADLCLVPQVANAERFKVDLTPYPTISSINKRLLVLEAFQVSHPCRQPDTPTELRA

SEQ ID NO: 78440 - protein, 68 aa, Homo sapiens
MAEGSRIPQARALLQQCLHARLQIRPADGDVAAQWVEVTSARQLSLSSGVRGGFFRVVSVTRPLCVSL

SEQ ID NO: 78441 - protein, 49 aa, Homo sapiens
MPGRSCVALVLLAAAVSCAVAQHAPPRTAENQPILLQDQRTEVQFHGTP

SEQ ID NO: 78442 - protein, 217 aa, Homo sapiens
MAVLIVTENYLEFGLETGFTNFSDSAMQFLEKQGLESQSPVSKLTFKFFLAIFCSFIGAFLTFPGLRLAQMHLDALNLATEKITQTLLHINFLAPLFMVLLWVKPITKDYIMNPPLGKESIPLMTEATFDTLRLWLIILLCALRLAMMRSHLQAYLNLAQKCVDQMKKEAGRISTVELQKMVIIPGVFIQNLSLPYQWIIVYCPILFTLNYHQLKGK

SEQ ID NO: 78443 - protein, 1140 aa, Homo sapiens
MPQVLWPRILTFVVPAEYTEALEPLFSIIRILIMAEEKKQHSAKESTALVVSTGAVKLPSPQQLLARLLVISMPASLGELRGAGAIGLLKILPEIIHPKLVDLWKTRLPELLQPLEGKNISTVLWETMLLQLLKESLWKISDVAWTIQLTQDFKQQMGSYSNNSTEKKFLWKALGTTLACCQDSDFVNSQIKEFLTAPNQLGDQRQGITSILGYCAENHLDIVLKVLKTFQNQEKFFMNRCKSLFSGKKSLTKTDVMVIYGAVALHAPKKQLLSRLNQDIISQVLSLHGQCSQVLGMSVMNKDMDLQMSFTRSITEIGIAVQDAEDQGFQFSYKEMLIGYMLDFIRDEPLDSLASPIRWKALIAIRYLSKLKPQLSLQDHLNILEENIRRLLPLPPLENLKSEGQTDKDKEHIQFLYERSMDALGKLLKTMMWDNVNAEDCQEMFNLLQMWLVSQKEWERERAFQITAKVLTNDIEAPENFKIGSLLGLLAPHSCDTLPTIRQAAASSTIGLFYIKGIHLEVERLQGLQEGLESDDVQVQIKISSKIAKIVSKFIPNEEILMFLEEMLDGLESLNPTCTKACGIWMITVLKQQGAALEDQLLEILGTIYHHMPVLRQKEESFQFILEAISQIASFHMDTVVVNLLQKPLPFDRDTKTLWKALAEKPASSGKLLQALIDKLETELEDDIARVEAISVACAMYEVISMGTSVTGLYPELFTLLLKLVSCTLGQKMLTCPWSHRRHVMQQGEQQQIPDPCRLSTATLKCLQAQAMREGLAKESDEGDNLWTLLSSPSTHHIGVCSLARSMAVWQHGVILDIMEQLLSSLTSSSENYRITGAAFFSELMKEPILWKHGNLRNVLILMDQSAWDSNATLRQMAIRGLGNTASGAPHKVKKHKQLMLESIIRGLYHLARTEVVCESLKALKKILELLTDRDVSFYFKEIVLQTRTFFEDEQDDVRLTAIFLFEDLAPLTGRRWKIFFAEEIKKSLISFLLHLWDPNPKIGVACRDVLMVCIPFLGLQELYGVLDRLLDQDLPRARDFYRQFCVKLAKKNQEILWILHTHSFTFFTSTWEVIRSAAVKLTDAVVLNLTSQYVELLDREQLTTRLQALRQDPCISVQRAAEAALQTLLRRCKETSIPL

SEQ ID NO: 78444 - protein, 334 aa, Homo sapiens
MDFLLGNPFSSPVGQRIEKATDGSLQSEDWALNMEICDIINETEEGPKDALRAVKKRIVGNKNFHEVLETCVKNCGHRFHVLVASQDFVESVLVRTILPKNNPPTIVHDKVLNLIQSWADAFRSSPDLTGVVTIYEDLRRKGLEFPMTDLDMLSPIHTPQRTVFNSETQSGQDSVGTDSSQQEDSGQHAAPLPAPPILSGDTPIAPTPEQIGKLRSELEMVSGNVRVMSEMLTELVPTQAEPADLELLQELNRTCRAMQQRVLELIPQIANEQLTEELLIVNDNLNNVFLRHERFERFRTGQTTKAPSEAEPAADLIDMGPDPAATGNLSSQLA

SEQ ID NO: 78445 - protein, 31 aa, Homo sapiens
  MOD_RES (1)..(1): Any amino acid
XDLQDFVSGDLADRSTWDEYKGNLKRQKGES

SEQ ID NO: 78446 - protein, 60 aa, Homo sapiens
  MOD_RES (1)..(1): Any amino acid
XNGLGIRIVGGKEIPGHSGEIGAYIAKILPGGSAEQTGKLMEDGMAVIKVGDQETQHTDE

SEQ ID NO: 78447 - protein, 617 aa, Homo sapiens
  MOD_RES (1)..(1): Any amino acid
XRAAAAEEEEEAGGSSRPWPSPRPVPTLKLWSCSAGVCPSSKRGGNCWPSSETWTTRSSSVGYTVRFDDVTSEDTRIKFLTDGMLLREAISDSLLRKYSCVILDEAHERTIHTDVLFGVVKAAQKRRKELGKLPLKVIVMSATMDVDLFSQYFNGAPVLYLEGRQHPIQVFYTKQPQNDYLHAALVSVFQIHQEAPSSQDILVFLTGQEEIEAMSKTCRDIAKHLPDGCPAMLVLPLYASLPYAQQLRVFQGAPKGYRKVIISTNIAETSITITGIKYVVDTGMVKAKKYNPDSGLEVLAVQRVSKTQAWQRTGRAGREDSGICYRLYTEDEFEKFDKMTVPEIQRCNLASVMLQLLAMKVPNVLTFDFMSKPSPDHIQAAIAQLDLLGALEHKDDQLTLTPMGRKMAAFPLEPKFAKTILMSPKFHCTEEILTIVSLLSVDSVLHNPPSRREEVQGVRKKFISSEGDHMTLLNIYRTFKNLGGNKDWCKENFVNSKNMTLVAEVRAQLRDICLKMSMPIASSRGDVESVRRCLAHSLFMSTAELQPDGTYATTDTHQPVAIHPSSVLFHCKPACVVYTELLYTNKCYMRDLCVIDAQWLYEAAPEYFRRKLRTARN

SEQ ID NO: 78448 - protein, 87 aa, Homo sapiens
  MOD_RES (1)..(1): Any amino acid
XSAPLTKPPEKGKGWSKTSHSLEAPEDDGGWSSAEEQINSSDAEEDGGLGPKKLVPTQPPVEPTRGCTFLRGDSPHPPTLYVIECCH

SEQ ID NO: 78449 - protein, 677 aa, Homo sapiens
MPAIMTMLADHAARQLLDFSQKLDINLLDNVVNCLYHGEGAQQRMAQEVLTHLKEHPDAWTRVDTILEFSQNMNTKYYGLQILENVIKTRWKILPRNQCEGIKKYVVGLIIKTSSDPTCVEKEKVYIGKLNMILVQILKQEWPKHWPTFISDIVGASRTSESLCQNNMVILKLLSEEVFDFSSGQITQVKSKHLKDSMCNEFSQIFQLCQFVMENSQNAPLVHATLETLLRFLNWIPLGYIFETKLISTLIYKFLNVPMFRNVSLKCLTEIAGVSVSQYEEQFVTLFTLTMMQLKQMLPLNTNIRLAYSNGKDDEQNFIQNLSLFLCTFLKEHDQLIEKRLNLRETLMEALHYMLLVSEVEETEIFKICLEYWNHLAAELYRESPFSTSASPLLSGSQHFDVPPRRQLYLPMLFKVRLLMVSRMAKPEEVLVVENDQGEVVREFMKDTDSINLYKNMRETLVYLTHLDYVDTERIMTEKLHNQVNGTEWSWKNLNTLCWAIGSISGAMHEEDEKRFLVTVIKDLLGLCEQKRGKDNKAIIASNIMYIVGQYPRFLRAHWKFLKTVVNKLFEFMHETHDGVQDMACDTFIKIAQKCRRHFVQVQVGEVMPFIDEILNNINTIICDLQPQQEFAGEDTSDLFLEEREIALRQADEEKHKRQMSVPGIFNPHEIPEEMCD

SEQ ID NO: 78450 - protein, 309 aa, Homo sapiens
  MOD_RES (1)..(1): Any amino acid
XEEHLGEIRNLRQRLEESICINDRLREQLEHRLTSTARGRGSTSNFYSQGLESIPQLCNENRVLREDNRRLQAQLSHVSREHSQETESLREALLSSRSHLQELEKELEHQKVERQQLLEDLREKQQEVLHFREERLSLQENDSRLQHKLVLLQQQCEEKQQLFESLQSELQIYEALYGNSKKGLKDSAVSPPVRDVGMNSPALVFPSSASSTPGSETPIINRANGLGLDTSPVMKTPPKLEGDATDGSFANKHGRHVIGHIDDYSALRQQIAEGKLLVKKIVSLVRSACSFPGLEAQGTEVLGSKGIHE

SEQ ID NO: 78451 - protein, 265 aa, Homo sapiens
MMRTCVLLSAVLWCLTGVQCPRFTLFNKKGFIYGKTGQPDKIYVELHQNSPVLICMDFKLSKKEIVDPTYLWIGPNEKTLTGNNRINITETGQLMVKDFLEPLSGLYTCTLSYKTVKAETQEEKTVKKRYDFMVFVNPFAPGWKGACNGSVDCEDTTNHNILQARDRIEDFFRSQAYIFYHNFNKTLPAMHFVDHSLQVVRLDSCRPGFGKNERLHSNCASCCVVCSPATFSPDVNVTCQTCVSVLTYGAKSCPQTSNKNQQYED

SEQ ID NO: 78452 - protein, 79 aa, Homo sapiens
MNMSQASVSFQDVTVEFTREEWQHLGPVERTLYRDVMLENYSHLISVGYCITKPKVISKLEKGEEPWSLEDEFLNQRYP

SEQ ID NO: 78453 - protein, 156 aa, Homo sapiens
MGTLWSQESTPEERLPVEGSRPWAVARRVLTAILILGLLLCFSVLLFYNFQNCGPRPCETSVCLDLRDHYLASGNTSVAPCTDFFSFACGRAKETNNSFQELATKNKNRLRRILEVQNSWHPGSGEEKAFQFYNSCMDTLAIEAAGTGPLRQVIEE

SEQ ID NO: 78454 - protein, 143 aa, Homo sapiens
MEKIPEDGPALIIFYHGAIPIDFYYFMAKIFIHKGRTCRVVADHFVFKIPGFSLLLDVFCALHGPREKCVEILRSGHLLAISPGGVREALISDETYNIVWGHRRGFAQVAIDAKVTKNAVQALIDKHQRIPGNIMSALLERFH

SEQ ID NO: 78455 - protein, 146 aa, Homo sapiens
MDPRVSGILVQLPLPDHVDERTICNGIAPEKDVDGFHIINIGRLCLDQHSLIPATASAVWEIIKRTGIQTFGKNVVVAGRSKNVGMPIAMLLHTDGEHERPGGDATVTIAHRYTPKEQLKIHTQLADIIIVAAERFHHFAQDLSNS

SEQ ID NO: 78456 - protein, 92 aa, Homo sapiens
MAAPSPSGGGGSGGGSGSGTPGPVGSPAPGHPAVSSMQGKRKALKLNFANPPFKSTARFTLNPNPTGVQNPHIEFGQQWMKKNKNNFLWIWM

SEQ ID NO: 78457 - protein, 80 aa, Homo sapiens
MGNYLLRKLSCLGENQKKPKKGNPDEERKRQEMTTFERKLQDQDKKSQEVSSTSNQENENGSGSEEVCYTVINHIPHQRS

SEQ ID NO: 78458 - protein, 102 aa, Homo sapiens
LRKKLAKKGIDYDFPSLVLRKKKKKVSGTLDTPEKTVDSQGPTPVCTPTFLERRKSQVAELNDDDKDDEIVFKQPISCVKEEIQETQTPTHSRKKRRRSSNQ

SEQ ID NO: 78459 - protein, 123 aa, Homo sapiens
MNAMLETPELPAVFDGVKLAAVAAVLYVIVRCLNLKSPTAPPDLYFQDSGLSRFLLKSCPLLTKEYIPPLIWGKSGHIQTALYGKMGRVRSPHPYGHRKFITMSDGATSTFDLFEPLAEHCVG

SEQ ID NO: 78460 - protein, 80 aa, Homo sapiens
  MOD_RES (1)..(1): Any amino acid
XDEQLSAMMHLIEKITTEGKIQAFSVASRTLFYEILCSLINPKRKDTRGFSHFAEVTENFAFSLLTNVTCGSPGEKSPAC

SEQ ID NO: 78461 - protein, 122 aa, Homo sapiens
MGLSTVPDLLLPLEPTCTMTVQARGRIRTAGSVRAAPSPLQKTTSDTASAAPNAERKWVRWRSLLAQWTGTPCVAAGRTSTGIIGVKTFSSASIAASASMGPCTSPARRNRTPCAPAMQVSF

SEQ ID NO: 78462 - protein, 91 aa, Homo sapiens
MKRAHPEYSSSDSELDETIEVEKESADENGNLSSALGSMSPTTSSQILARKRRRGIIEKRRRDRINNSLSELRRLVPSAFEKQVMEQVGIC

SEQ ID NO: 78463 - protein, 36 aa, Homo sapiens
  MOD_RES (1)..(1): Any amino acid
XQFAAAAAHSTPVRREVSPGQKTNDAVFAELLQDRL

SEQ ID NO: 78464 - protein, 91 aa, Homo sapiens
MPGIKRILTVTILALCLPSPGNAQAQCTNGFDLDRQSGQCLDIDECRTIPEACRGDMMCVNQNGGYLCIPRTNPVYRGPYSNPYSTPYSGP

SEQ ID NO: 78465 - protein, 23 aa, Homo sapiens
  MOD_RES (1)..(1): Any amino acid
XHISCVIKERTVAQIKATVKRKM

SEQ ID NO: 78466 - protein, 99 aa, Homo sapiens
NNHKPREWLEIDLGEKKKITGIRTTGSTQSNFNFYVKSFVMNFKNNNSKWKTYKGIVNNEEKVMIHWCGARQVKAPVFQLRKKMRQSQGPSPRKKHPQE

SEQ ID NO: 78467 - protein, 1474 aa, Homo sapiens
MSIAIPLGVTTSDTSYSDMAAGSDPESVEASPAVNEKSVYSTHNYGTTQRHGCRGLPYADHNYGAPPPPTPPASPPVQTIIPRSDLNGLPSPVEERCGDSPNSEGETVPTWCPCGLSQDGFLLNCDKCRGMSRGKVIRLHRRKQDNISGGDSSATESWDEELSPSTVLYTATQHTPTSITLTVRRTKPKKRKKSPEKGRAAPKTKKIKAFREGSRKSLRMKNSPSEAQNLDENTTEGWENRIRLWTDQYEEAFTNQYSADVQNALEQHLHSSKEFVGKPTILDTINKTELACNNTVIGSQMQLQLGRVTRVQKHRKILRAARDLALDTLIIEYRGKVMLRQQFEVNGHFFKKPYPFVLFYSKFNGVEMCVDARTFGNDARFIRRSCTPNAEVRHMIADGMIHLCIYAVSAITKDAEVTIAFDYEYSNCNYKVDCACHKGNRNCPIQKRNPNATELPLLPPPPSLPTIGAETRRRKARRKELEMEQQNEASEENNDQQSQEVPEKVTVSSDHEEVDNPEEKPEEEKEEVIDDQENLAHSRRTREDRKVEAIMHAFENLEKRKKRRDQPLEQSNSDVEITTTTSETPVGEETKTEAPESEVSNSVSNVTIPSTPQSVGVNTRRSSQAGDIAAEKLVPKPPPAKPSRPRPKSRISRYRTSSAQRLKRQKQANAQQAELSQAALEEGGSNSLVTPTEAGSLDSSGENRPLTGSDPTVVSITGSHVNRAASKYPKTKKYLVTEWLNDKAEKQECPVECPLRITTDPTVLATTLNMLPGLIHSPLICTTPKHYIRFGSPFIPERRRRPLLPDGTFSSCKKRWIKQALEEGMTQTSSVPQETRTQHLYQSNENSSSSSICKDNADLLSPLKKWKSRYLMEQNVTKLLRPLSPVTPPPPNSGSKSPQLATPGSSHPGEEECRNGYSLMFSPVTSLTTASRCNTPLQFELCHRKDLDLAKVGYLDSNTNSCADRPSLLNSGHSDLAPHPSLGPTSETGFPSRSGDGHQTLVRNSDQAFRTEFNLMYAYSPLNAMPRADGLYRGSPLVGDRKPLHLDGGYCSPAEGFSSRYEHGLMKDLSRGSLSPGGERACEGVPSAPQNPPQRKKVSLLEYRKRKQEAKENSAGGGGDSAQSKSKSAGAGQGSSNSVSDTGAHGVQGSSARTPSSPHKKFSPSHSSMSHLEAVSPSDSRGTSSSHCRPQENISSRWMVPTSVERLREGGSIPKVLRSSVRVAQKGEPSPTWESNITEKDSDPADGEGPETLSSALSKGATVYSPSRYSYQLLQCDSPRTESQSLLQQSSSPFRGHPTQSPGYSYRTTALRPGNPPSHGSSESSLSSTSYSSPAHPVSTDSLAPFTGTPGYFSSQPHSGNSTGSNLPRRSCPSSAASPTLQGPSDSPTSDSVSQSSTGTLSSTSFPQNSRSSLPSDLRTISLPSAGQSAVYQASRVSAVSNSQHYPHRGSGGVHQYRLQPLQGSGVKTQTGLS

SEQ ID NO: 78468 - protein, 144 aa, Homo sapiens
MGLEKPQSKLEGGMHPQLIPSVIAVVFILLLSVCFIASCLVTHHNFSRCKRGTGVHKLEHHAKLKCIKEKSELKSAEGSTWNCCPIDWRAFQSNCYFPLTDNKTWAESERNCSGMGAHLMTISTEAEQNFIIQFLDRRLSYFLG

SEQ ID NO: 78469 - protein, 182 aa, Homo sapiens
  MOD_RES (1)..(1): Any amino acid
XGPDLEMLTGQERVALANRKRECGNAHYQRADFVLAANSYDLAIKAITSSAKVDMTFEEEAQLLQLKVKCLNNLAASQLKLDHYRAALRSCSLVLEHQPDNIKALFRKGKTIHAELSKLVKKHAAQRSTETALYRKMLGNPSRLPAKCPGKGAWSIPWKWLFGATAVALGGVALSVVIAARN

SEQ ID NO: 78470 - protein, 241 aa, Homo sapiens
MAAVAVLRAFGASGPMCLRRGPWAQLPARFCSRDPAGAGRRESEPRPTSARQLDGIRSAPGRAGSSRWCRVGVRAPPLTRGGPGEPEPRLRPWGGNSPCPGPGPGSETRRNIVLSNPKKRNALSLAMLKSLQSDILHDADSNDLKVIIISAEGPVFSSGHDLKELTEEQGRDYHAEVFQTCSKVMMHIRNHPVPVIAMVNGLAAAAGCQLVASCDIAVASDKSSFATPGVNVGLFCSTPGV

SEQ ID NO: 78471 - protein, 118 aa, Homo sapiens
YIDKEIIPDFLSGECMCEVPEGGLVPKSLYRTAEELENEDLKLWTETIYQSASVFKGAPHEILIQIVDASSVITWDFDVCKGDIVFNIYHSKRSPQPPKKDSLGAHSITSPASPTPAP

SEQ ID NO: 78472 - protein, 123 aa, Homo sapiens
MSCVPWKGDKAKSESLELPQAAPPQIYHEKQRRELCALHALNNVFQDSNAFTRDTLQEIFQRLSPNTMVTPHKKSMLGNGNYDVNVIMAALQTKGYEAVWWDKRRDVGVIALTNVMGFIMNLP

SEQ ID NO: 78473 - protein, 371 aa, Homo sapiens
MFVSDFRKEFYEVVQSQRVLLFVASDVDALCACKILQALFQCDHVQYTLVPVSGWQELETAFLEHKEQIKLLIKQDDDLEVPAYEDIFRDEEEDEEHSGNDSDGSEPSEKRTRLEEEIVEQTMRRRQRREWEARRRDILFDYEQYEYHGTSSAMVMFELAWMLSKDLNDMLWWAIVGLTDQWVQDKITQMKYVTDVGVLQRHVSRHNHRNEDEENTLSVDCTRISFEYDLRLVLYQHWSLHDSLCNTSYTAARFKLWSVHGQKRLQEFLADMGLPLKQVKQKFQAMDISLKENLREMIEESANKFGMKDMRVQTFSIHFGFKHKFLASDVVFATMSLMESPEKDGSGTDHFIQALDSLSRQRTGAANCCPW

SEQ ID NO: 78474 - protein, 294 aa, Homo sapiens
MLEPQENGVIDLPDYEHVEDETFPPFPPPASPERQDGEGTEPDEESGNGAPVRVPPKRTVKRNIPKLDAQRLISERGLPALRHVFDKAKFKGKGHEAEDLKMLIRHMEHWAHRLFPKLQFEDFIDRVEYLGSKKEVQTCLKRIRLDLPILHEDFVSNNDEVAENNEHDVTSTELDPFLTNLSESEMFASELSRSLTEEQQQRIERNKQLALERRQAKLLSNSQTLGNDMLMNTPRAHTVEEVNTDEDQKEESNGLNEDILDNPCNDAIANTLNEEETLLDQSFKNVQQQLDATS

SEQ ID NO: 78475 - protein, 76 aa, Homo sapiens
MIYTMKKVHALWASVCLLLNLAPAPLNADSEEDEEHTIITDTELPPLKLMHSFCAFKADDGPCKAIMKRFFFNIFT

SEQ ID NO: 78476 - protein, 64 aa, Homo sapiens
MEIGTEISRKIRSAIKGKLQELGAYVDEELPDYIMVMVANKKSQDQMTEDLSLFLGNNTIRFTV

SEQ ID NO: 78477 - protein, 315 aa, Homo sapiens
MNVSEPNSSFAFVNEFILQGFSCEWTIQIFLFSLFTTIYALTITGNGAIAFVLWCDRRLHTPMYMFLGNFSFLEIWYVSSTVPKMLVNFLSEKKNISFAGCFLQFYFFFSLGTSECLLLTVMAFDQYLAICRPLLYPNIMTGHLYAKLVILCWVCGFLWFLIPIVLISQKPFCGPNIIDHVVCDPGPLFALDCVSAPRIQLFCYTLSSLVIFGNFLFIIGSYTLVLKAVLGMPSSTGRHKAFSTCGSHLAVVSLCYSPLMVMYVSPGLGHSTGMQKIETLFYAMVTPLFNPLIYSLQNKEIKAALRKVLGSSNII

SEQ ID NO: 78478 - protein, 559 aa, Homo sapiens
  MOD_RES (1)..(1): Any amino acid
XNITCSPDEFTCSSGRCISRNFVCNGQDDCSDGSDELDCAPPTCGAHEFQCSTSSCIPISWVCDDDADCSDQSDESLEQCGRQPVIHTKCPASEIQCGSGECIHKKWRCDGDPDCKDGSDEVNCPSRTCRPDQFECEDGSCIHGSRQCNGIRDCVDGSDEVNCKNVNQCLGPGKFKCRSGECIDISKVCNQEQDCRDWSDEPLKECHINECLVNNGGCSHICKDLVIGYECDCAAGFELIDRKTCGGKEPSLIFTNRRDIRKIGLERKEYIQLVEQLRNTVALDADIAAQKLFWADLSQKAIFSASIDDKVGRHVKMIDNVYNPAAIAVDWVYKTIYWTDAASKTISVATLDGTKRKFLFNSDLREPASIAVDPLSGFVYWSDWGEPAKIEKAGMNGFDRRPLVTADIQWPNGITLDLIKSRLYWLDSKLHMLSSVDLNGQDRRIVLKSLEFLAHPLALTIFEDRVYWIDGENEAVYGANKFTGSELATLVNNLNDAQDIIVYHELVQPSGKNWCEEDMENGGCEYLCLPAPQINDHSPKYTCSCPSGYNVEENGRDCQ

SEQ ID NO: 78479 - protein, 248 aa, Homo sapiens
  MOD_RES (1)..(1): Any amino acid
XQTTQTESRPLMGPGIRRRRVLTKDGRSNVRMEHIADKRFLYLKDLWTTFIDMQWRYKLLLFSATFAGTWFLFGVVWYLVAVAHGDLLELDPPANHTPCVVQVHTLTGAFLFSLESQTTIGYGFRYISEECPLAIVLLIAQLVLTTILEIFITGTFLAKIARPKKRAETIRFSQHAVVASHNGKPCLMIRVANMRKSLLIGCQVTGKLLQTHQTKEGENIRLNQGMERGGGTNRAVNHSTQNSKTGGN

SEQ ID NO: 78480 - protein, 103 aa, Homo sapiens
MVQQRKAQRKEDLRQKQSLLPIRTSKKQFTIPHPLSDNLFKPKERCISEKEMHMRSKRIYDNLPEVKKKKEEQRKRVILQSNRLRAEVFKKQLLDQLLQRNAV

SEQ ID NO: 78481 - protein, 631 aa, Homo sapiens
MSGFSPELIDYLEGKISFEEFERRREERKTREKKSLQEKGKLSAEENPDDSEVPSSSGINSTKSQDKDVNEGETSDGVRKSVHKVFASMLGENEDDEEEEEEEEEEEEEEETPEQPTAGDVFVLEMVLNRETKKMMKEKRPRSKLPRALRGLMGEANIRFARGEREEAILMCMEIIRQAPLAYEPFSTLAMIYEDQGDMEKSLQFELIAAHLNPSDTEEWVRLAEMSLEQDNIKQAIFCYTKALKYEPTNVRYLWERSSLYEQMGDHKMAMDGYRRILNLLSPSDGERFMQLARDMAKSYYEANDVTSAINIIDEAFSKHQGLVSMEDVNIAAELYISNKQYDKALEIITDFSGIVLEKKTSEEGTSEENKAPENVTCTIPDGVPIDITVKLMVCLVHLNILEPLNPLLTTLVEQNPEDMGDLYLDVAEAFLDVGEYNSALPLLSALVCSERYNLAVVWLRHAECLKALGYMERAAESYGKVVDLAPLHLDARISLSTLQQQLGQPEKALEALEPMYDPDTLAQDANAAQQELKLLLHRSTLLFSQGKMYGYVDTLLTMLAMLLKVAMNRAQVCLISSSKSGERHLYLIKVSRDKISDSNDQESANCDAKGLSKGGFLQRTKEEKEVVKET

SEQ ID NO: 78482 - protein, 106 aa, Homo sapiens
MDFVRLARLFARARPMGLFILQHLDPCRARWAGGREGLMRPMWAPFSSSSSQLPLGQERQENTGSLGSDPSHSNSTATQEEDEEEEESFGTLSDKYSSRRLFRKSA

SEQ ID NO: 78483 - protein, 33 aa, Homo sapiens
MAPRPPTAAPQEEWYHVDPAQRSLYRDVMLENY

SEQ ID NO: 78484 - protein, 115 aa, Homo sapiens
MAINRFRLENDLEELALYQIQLLKDLRHTENEEDKVSSSSFRQRMLGNLLRPPYERPELPTCLYVIGLTGISGSGKSSIAQRLKGLGAFVIDSDHLGHRAYAPGGPAYQPVVEAF

SEQ ID NO: 78485 - protein, 157 aa, Homo sapiens
KAARALLGCAKAESGPASLTICEKASGYLQDSLATTPASSSIDKAVQLFLCDLLLVVRTSLWRQQQPPAPAPAAQGTSSRPQASALELRGFQRDLSSLRRLAQSFRPAMRRARWRSWSRGPRGGSTRRPCCWPPATCPPASCRRPGSAWACWLRRRA

SEQ ID NO: 78486 - protein, 91 aa, Homo sapiens
MFVAVFLWLVTIVLFNLYLFQLHMKLYMVPWPLVLMIFNISATVLYITAFIACSAAVDLTSLRGTRPYNQRAAASFFACLVMIAYGVSAFF

SEQ ID NO: 78487 - protein, 238 aa, Homo sapiens
MGADGMYDKLRMLNGQTGSWGTRPGWYPGTSVPGQPTQDGCQQQEGGGENTNSISSNGEDSDEAQMRLQLKRKLQRNRTSFTQEQIEALEKEFERTHYPDVFARERLAAKIDLPEARIQVWFSNRRAKWRREEKLRNQRRQASNTPSHIPISSSFSTSVYQPIPQPTTPVSSFTSGSMLGRTDTALTNTYSALPPMPSFTMANNLPMQPPVPSQTSSYSCMLPTSPSVNGRSYDTYTP

SEQ ID NO: 78488 - protein, 63 aa, Homo sapiens
MRGAGPSPRQSPRTLRPDPGPAMSFFRRKVKGKEQEKTSDVKSIKVETEFHHVSQYGLDLLTL

SEQ ID NO: 78489 - protein, 669 aa, Homo sapiens
MESRCVTQAGVQWRSLSSLQPPPPVFKQSSCLSHQTSRWLNPLFKIGHKRRLEEDDMYSVLPEDRSQHLGEELQGFWDKEVLRAENDAQKPSLTRAIIKCYWKSYLVLGIFTLIEESAKVIQPIFLGKIINYFENYDPMDSVALNTAYAYATVLTFCTLILAILHHLYFYHVQCAGMRLRVAMCHMIYRKALRLSNMAMGKTTTGQIVNLLSNDVNKFDQVTVFLHFLWAGPLQAIAVTALLWMEIGISCLAGMAVLIILLPLQSCFGKLFSSLRSKTATFTDARIRTMNEVITGIRIIKMYAWEKSFSNLITNLRKKEISKILRSSCLRGMNLASFFSASKIIVFVTFTTYVLLGSVITASRVFVAVTLYGAVRLTVTLFFPSAIERVSEAIVSIRRIQTFLLLDEISQRNRQLPSDGKKMVHVQDFTAFWDKASETPTLQGLSFTVRPGELLAVVGPVGAGKSSLLSAVLGELAPSHGLVSVHGRIAYVSQQPWVFSGTLRSNILFGKKYEKERYEKVIKACALKKDLQLLEDGDLTVIGDRGTTLSGGQKARVNLARAVYQDADIYLLDDPLSAVDAEVSRHLFELCICQILHEKITILVTHQLQYLKAASQILILKDGKMVQKGTYTEFLKSGIDFGSLLKKDNEESEQPPVPGTPTLRNRTFSE

SEQ ID NO: 78490 - protein, 44 aa, Homo sapiens
EDNPVEDSQVIVEEVSIFPVEEQQEVPPGYLMENMESELPWDES

SEQ ID NO: 78491 - protein, 1173 aa, Homo sapiens
MVTVGTNILPSRPAASANTAREDAALFSRRIPPRHKNGAAQPGAAPGPGAPGANMGNAHSKSGDRHSALPGRPELSFYGSFPRKWSENVFLDNELLTSKILSVLRPQSERGFRAGDLRYPTHFLSTNSVLASVTASLKEHPRGTLLSDGSPALSRNVGMTVSQKGGPQPTPSPAGPGTQLGPITGEMDEADSAFLKFKQTADDSLSLTSPNTESIFVEDPYTASLRSEIESDGHEFEAESWSLAVDAAYAKKQKREVVKRQDVLYELMQTEVHHVRTLKIMLKVYSRALQEELQFSSKAIGRLFPCADDLLETHSHFLARLKERRQESLEEGSDRNYVIQKIGDLLVQQFSGENGERMKEKYGVFCSGHNEAVSHYKLLLQQNKKFQNLIKKIGNFSIVRRLGVQECILLVTQRITKYPVLVERIIQNTEAGTEDYEDLTQALNLIKDIISQVDAKVSECEKGQRLREIAGKMDLKSSSKLKNGLTFRKEDMLQRQLHLEGMLCWKTTSGRLKDILAILLTDVLLLLQEKDQKYVFASVDSKPPVISLQKLIVREVANEEKAMFLISASLQGPEMYEIYTSSKEDRNAWMAHIQRAVESCPDEEEGPFSLPEEERKVVEARATRLRDFQERLSMKDQLIAQSLLEKQQIYLEMAEMGGLEDLPQPRGLFRGGDPSETLQGELILKSAMSEIEGIQSLICRQLGSANGQAEDGGSSTGPPRRAETFAGYDCTNSPTKNGSFKKKVSSTDPRPRDWRGPPNSPDLKLSDSDIPGSSEESPQVVEAPGTESDPRLPTVLESELVQRIQTLSQLLLNLQAVIAHQDSYVETQRAAIQEREKQFRLQSTRGNLLLEQERQRNFEKQREERAALEKLQSQLRHEQQRWERERQWQHQELERAGARLQEREGEARQLRERLEQERAELERQRQAYQHDLERLREAQRAVERERERLELLRRLKKQNTAPGALPPDTLAEAQPPSHPPSFNGEGLEGPRVSMLPSGVGPEYAERPEVARRDSAPTENRLAKSDVPIQLLSATNQFQRQAAVQQQIPTKLAASTKGGKDKGGKSRGSQRWESSASFDLKQQLLLNKLMGKDESTSRNRRSLSPILPGRHSPAPPPDPGFPAPSPPPADSPSEGFSLKAGGTALLPGPPAPSPLPATPLSAKEDASKEDVIFF

SEQ ID NO: 78492 - protein, 84 aa, Homo sapiens
MAAAATLRLSAQGTVTFEDVAVNFTWEEWNLLSEAQRCLYRDVTLENLALISSLDPALDGSADNTQTGNLGQSVLPSHPEQKTA

SEQ ID NO: 78493 - protein, 433 aa, Homo sapiens
MGKEKTHINIVVIGHVDSGKSTTTGHLIYKCGGIDKRTIEKFEKEAAEMGKGSFKYAWVLDKLKAERERGITIDISLWKFETSKYYVTIIDAPGHRDFIKNMITGTSQADCAVLIVAAGVGEFEAGISKNGQTREHALLAYTLGVKQLIVGVNKMDSTEPPYSQKRYEEIVKEVSTYIKKIGYNPDTVAFVPISGWNGDNMLEPSANMPWFKGWKVTRKDGNASGTTLLEALDCILPPTRPTDKPLRLPLQDVYKIGGIGTVPVGRVETGVLKPGMVVTFAPVNVTTEVKSVEMHHEALSEALPGDNVGFNVKNVSVKDVRRGNVAGDSKNDPPMEAAGFTAQVIILNHPGQISAGYAPVLDCHTAHIACKFAELKEKIDRRSGKKLEDGPKFLKSGDAAIVDMVPGKPMCVESFSDYPPLGKDDYLNVKKLC

SEQ ID NO: 78494 - protein, 447 aa, Homo sapiens
MIPTFTALLCLGLSLGPRTHMQAGPLPKPTLWAEPGSVISWGNSVTIWCQGTLEAREYRLDKEESPAPWDRQNPLEPKNKARFSIPSMTEDYAGRYRCYYRSPVGWSQPSDPLELVMTGAYSKPTLSALPSPLVTSGKSVTLLCQSRSPMDTFLLIKERAAHPLLHLRSEHGAQQHQAEFPMSPVTSVHGGTYRCFSSHGFSHYLLSHPSDPLELIVSGSLEGPRPSPTRSVSTAAGPEDQPLMPTGSVPHSGLRRHWEVLIGVLVVSILLLSLLLFLLLQHWRQGKHRTLAQRQADFQRPPGAAEPEPKDGGLQRRSSPAADVQGENFCAAVKDTQPEDGVEMDTRSPHDEDPQAVTYAKVKHSRPRREMASPPSPLSGEFLDTKDRQAEEDRQMDTEAAASEAPQDVTYARLHSFTLRQKATEPPPSQEGASPAEPSVYATLAIH

SEQ ID NO: 78495 - protein, 79 aa, Homo sapiens
MAGRSLCLTVSSTPGSWGASGFRRLGRLTSFNFGSESLWLFYREAAFQGLRSRHPFSNPLHLDPTSSPWRKNISKKFGG

SEQ ID NO: 78496 - protein, 92 aa, Homo sapiens
MKQIFFLDDSGPPFGHMVLALGGYLGGFDGNFLWNRIGAEYSSNVPVWSLRLLPALAGALSVPMAYQIVLELHFSHCAAMGAALLMLIALFL

SEQ ID NO: 78497 - protein, 72 aa, Homo sapiens
MFLVGHLVRLPRAFRLTKDSVKIVGSTSFPVKAYVMLHQKSPHVLCVTQQLRNAELIDPSFQWYGPKGKVVS

SEQ ID NO: 78498 - protein, 101 aa, Homo sapiens
AGAGSMGSPGATTGWGLLDYKTEKYVMTRNWRVGALQRLLQFGIVVYVVGWALLAKKGYQERDLEPQFSIITKLKGVSVTQIKELGNRLWDVADFVKPPQV

SEQ ID NO: 78499 - protein, 172 aa, Homo sapiens
MPEIRLRHVVSCSSQDSTHCAENLLKADTYRKWRAAKAGEKTISVVLQVLLVTSSFMSPSESRSGSNPNRVRMFGPDKLVRAAAEKRWDRVKIVCSQPYSKDSPFGLSFVRFHSPPDKDEAEAPSQKVTVTKLGQFRVKEEDESANSLRPGALFFSRINKTSPVTASDPAGP

SEQ ID NO: 78500 - protein, 544 aa, Homo sapiens
MYEIYVETCGQNTENQVNPATFGKLVRLVFPDLGTRRLGTRGSARYHYDGICIKKSSFFYAQYCYLIGEKRYHSGDAIAFEKSTNYNSIIQQEATCEDHSPMKTDPVGSPLSEFRRCPFLEQEQAKKYSCNMMAFLADEYCNYCRDILRNVEDLLTSFWKSLQQDTVMLMSLPDVCQLFKCYDVQLYKGIEDVLLHDFLEDVSIQYLKSVQLFSKKFKLWLLNALEGVPALLQISKLKEVTLFVKRLRRKTYLSNMAKTMRMVLKSKRRVSVLKSDLQAIINQGTLATSKKALASDRSGADELENNPEMKCLRNLISLLGTSTDLRVFLSCLSSHLQAFVFQTSRSKEEFTKLAASFQLRWNLLLTAVSKAMTLCHRDSFGSWHLFHLLLLEYMIHILQSCLEEEEEEEDMGTVKEMLPDDPTLGQPDQALFHSLNSSLSQACASPSMEPLGVMPTHMGQGRYPVGVSNMVLRILGFLVDTAMGNKLIQVLLEDETTESAVKLSLPMGQEALITLKDGQQFVIQISDVPQSSEDIYFRENNANV

SEQ ID NO: 78501 - protein, 59 aa, Homo sapiens
MDSLEEPQKKVFKARKTMRVSDRQQLEAVYKVKEELLKTDVKLLNGNHENGDLDPTSPL

SEQ ID NO: 78502 - protein, 86 aa, Homo sapiens
MSIFTPTNQIRLTNVAVVRMKRAGKRFEIACYKNKVVGWRSGVEKDLDEVLQTHSVFVNVSKGQVAKKEDLISAFGTDDQTEIYFD

SEQ ID NO: 78503 - protein, 180 aa, Homo sapiens
DEHFIFQVSSKTITQRVLKFSVYHVDRQRKHQLLGQVLFPLKNETLVGDCRRVIWRDLEAESLEPPSEFGDLQFCLSYNDYLSRLTVVVLRAKGLRLQEDRGIVSVFVKVSLMNHNKFVKCKKTSAVLGSINPVYNETFSFKADATELDTASLSLTVVQNMEGDKQATTVELFLFHLTSG

SEQ ID NO: 78504 - protein, 108 aa, Homo sapiens
MEAVLTEELDEEEQLLRRHRKEKKELQAKIQGMKNAVPKNDKKRRKQLTEDVAKLEKEMEQKHREELEQLKLTTKENKIDSVAVNISNLVLENQPPRISKAQKRRVPG

SEQ ID NO: 78505 - protein, 573 aa, Homo sapiens
MQRAVPEGFGRRKLGSDMGNAERAPGSRSFGPVPTLLLLAAALLAVSDALGRPSEEDEELVVPELERAPGHGTTRLRLHAFDQQLDLELRPDSSFLAPGFTLQNVGRKSGSETPLPETDLAHCFYSGTVNGDPSSAAALSLCEGVRGAFYLLGEAYFIQPLPAASERLATAAPGEKPPAPLQFHLLRRNRQGDVGGTCGVVDDEPRPTGKAETEDEDEGTEGEDEGAQWSPQDPALQGVGQPTGTGSIRKKRFVSSHRYVETMLVADQSMAEFHGSGLKHYLLTLFSVAARLYKHPSIRNSVSLVVVKILVIHDEQKGPEVTSNAALTLRNFCNWQKQHNPPSDRDAEHYDTAILFTRQDLCGSQTCDTLGMADVGTVCDPSRSCSVIEDDGLQAAFTTAHELGHVFNMPHDDAKQCASLNGVNQDSHMMASMLSNLDHSQPWSPCSAYMITSFLDNGHGECLMDKPQNPIQLPGDLPGTSYDANRQCQFTFGEDSKHCPDAASTCSTLWCTGTSGGVLVCQTKHFPWADGTSCGEGKWCINDAFSWKLGNVGALGRLFENVRWRSPVHDEGM

SEQ ID NO: 78506 - protein, 721 aa, Homo sapiens
  MOD_RES (1)..(1): Any amino acid
XRNVSADDDAVYICETPEGSRTVAELAVQAPRKPPLQPPVDPVVKARMESSVILSWSPPPHGERPVTIDGYLVEKKKLGTYTWIRCHEAEWVATPELTVADVAEEGNFQFRVSALNSFGQSPYLEFPGTVHLAPKLAVRTPLKAVQAVEGGEVTFSVDLTVASAGEWFLDGQALKASSVYEIHCDRTRHTLTIREVPASLHGAQLKFVANGIESSIRMEVRAAPGLTANKPPAAAAREVLARLHEEAQLLAELSDQAAAVTWLKDGRTLSPGPKYEVQASAGRRVLLVRDVARDDAGLYECVSRGGRIAYQLSVQGLARFLHKDMAGSCVDAVAGGPAQFECETSEAHVHVHWYKDGMELGHSGERFLQEDVGTRHRLVAATVTRQDEGTYSCRVGEDSVDFRLRVSEPKVVFAKDQVAHSEVQAEAGASATLSCEVAQAQTEVMWYKDGKKLSSSLKVHVEAKGCRRRLVVQQAGKTDAGDYSCEARGQRVSFRLHITEPKMMFAKEQSVHNEVQAEAGASAMLSCEVAQAQTEVTWYKDGKKLSSSSKVGMEVKGCTRRLVLPQAGKADAGEYSCEAGGQRVSFHLHITEPKGVFAKEQSVHNEVQAEAGTTAMLSCEVAQPQTEVTWYKDGKKLSSSSKVRMEVKGCTRRLVVQQVGKADAGEYSCEAGGQRVSFQLHITEPKAVFAKEQLVHNEVRTEAGASATLSCEVAQAQTEVT

SEQ ID NO: 78507 - protein, 569 aa, Homo sapiens
MAGSPGSGVSLEGISLESSEEAELQREAMQQVLDNLGSLPSATGAAELDLIFLRGIMESPIVRSLAKAHERLEETKLEAVRDNNLELVQEILRDLAQLAEQSSTAAELAHILQEPHFQSLLETHDSVASKTYETPPPSPGLDPTFSNQPVPPDAVRMVGIRKTAGEHLGVTFRVEGGELVIARILHGGMVAQQGLLHVGDIIKEVNGQPVGSDPRALQELLRNASGSVILKILPSYQEPHLPRQVFVKCHFDYDPARDSLIPCKEAGLRFNAGDLLQIVNQDDANWWQACHVEGGSAGLIPSQLLEEKRKAFVKRDLELTPNSGTLCGSLSGKKKKRMMYLTTKNAEFDRHELLIYEEVARMPPFRRKTLVLIGAQGVGRRSLKNKLIMWDPDRYGTTVPYTSRRPKDSEREGQGYSFVSRGEMEADVRAGRYLEHGEYEGNLYGTRIDSIRGVVAAGKVCVLDVNPQAVKVLRTAEFVPYVVFIEAPDFETLRAMNRAALESGISTKQLTEADLRRTVEESSRIQRGYGHYFDLCLVNSNLERTFRELQTAMEKLRTEPQWVPVSWVY

SEQ ID NO: 78508 - protein, 105 aa, Homo sapiens
MVPQPAVILPGPPVDPDSQADTVHSNPELDVLLLGSVDGRHLLRTLSRAKFWPRRRFNFFVLENNLEAVARHMLIFSLALEEPEKMGLQERSETFLEVWGNALLR

SEQ ID NO: 78509 - protein, 1147 aa, Homo sapiens
APKTKKGCKGSIDDFLGDLLGDDMTLPEKPVKLASHTRDTTGVSQMFPSSKARTKSLLGDDVFSTMAGLEEADAEVSGISEADPQALLQAMKDLDGMDADILGLKKSNSAPSKKAAKDPGKGELPNHPKPAGGAIPTKKSLPSPSSSGHQNRRFSSEDLEDPLRGLLSYDEGGITKQPPVTQSKTASDKSPSTVRDQGPSIPLTPGDTPIRKKEELLFDDGDDIMATLGFGDSPKAEKRQIGDQEGPRPARSTLDELLGRGMATKLLARPGTGEHREFKLDKKYQRPQDSEDMWGDEDFTFGAYQPTVVSSEGRQSRRQSVSRFFADSGADPKGEPGSKQSPPMASSPIQPRKGGADWLGLKDEDLDLFPASPTREAHRESSVPVTPSVPPPASQHSTPAGLPPSRAKPPTEGAGSPAKASQASKLRASKEEKEDWLSHALSRKKSQGLAREQHAGTSEGLHLAGTAGHPPSGSQPLTSTQGLEHAAAGGSSGTTARERPCVRPGVSGSPVTQNHAASALPTGSPKRGTAPGDLSATEPATCFPSTQKPTEPSVPVQPLLPESLARSLLPSTEYQKQLLAAQVQLQCSPAELQAELLHSQARLAELEAQVRKLELERAQHELLLGSLQQQHQADLELIESAHRSRIKVLETSYQQREERLRRENEELSARYLSQCQEAEQARAELTAQHQRRLAAIAQEKDQEMERLRELQRASILDMRRDHEEQLQRLKLLKDREVDAATSATSHTRSLNSIIHQMEKFSSSLHELSSRVEASHLTTSQERELGIRQRDEQLRALQERLGQQQRDMEEERSRQQEVIGKMEARLNEQSRLLEQERWRVTAEQSKAESMQRALEEQRKVTAQQMAMERAELERAKSALLEEQKSVMLKCGEERRRLAAEWAEFSAQQKLSKERAEREAERALQVDTQREGTLISLAKEQAELKIRASELRAEEKQLAAERAALEQERQELRLEKERINATALRVKLRAEEVESMSKVASEKYEEGERALREAQQVQAEQQARLQAVQQQQERLRKQEQHMHQEHLSLAQQRLQLDRARQDLPSSLVGLFPRAQGPAASSQSALMPPAPTTRWCSQPPTGLDPSPLHLHARLALLRHMAEQDRDFLENEQFFLETLKKGSYNLTSHSA

SEQ ID NO: 78510 - protein, 294 aa, Homo sapiens
  MOD_RES (1)..(1): Any amino acid
XDKFWWHAAWGLCLVPLSLAQIDLNITCRFAGVFHVEKNGRYSISRTEAADLCKAFNSTLPTMAQMEKALSIGFETCRYGFIEGHVVIPRIHPNSICAANNTGVYILTSNTSQYDTYCFNASAPPEEDCTSVTDLPNAFDGPITITIVNRDGTRYVQKGEYRTNPEDIYPSNPTDDDVSSGSSSERSSTSGGYIFYTFSTVHPIPDEDSPWITDSTDRIPATRDQDTFHPSGGSHTTHGSESDGHSHGSQEGGANTTSGPIRTPQIPEWLIILASLLALALILAVCIAVNSRRS

SEQ ID NO: 78511 - protein, 122 aa, Homo sapiens
MNKSQEQVSFKDVCVDFTQEEWYLLDPAQKILYRDVILENYSNLVSVGYCITKPEVIFKIEQGEEPWILEKGFPSQCHPERKWKVDDVLESSQENEDDHFWELLFHNNKTLRFQLLGRKQFL

SEQ ID NO: 78512 - protein, 37 aa, Homo sapiens
KPASRTASTGPKDQPPALRRSAVPHSGKTKTQTWRPD

SEQ ID NO: 78513 - protein, 889 aa, Homo sapiens
MRLSDETLLEISKRFRKEMEKGLGATTHPTAAVKMLPTFVRSTPDGTEHGEFLALDLGGTNFRVLWVKVTDNGLQKVEMENQIYAIPEDIMRGSGTQLFDHIAECLANFMDKLQIKDKKLPLGFTFSFPCHQTKLDESFLVSWTKGFKSSGVEGRDVVALIRKAIQRRGDFDIDIVAVVNDTVGTMMTCGYDDHNCEIGLIVGTGSNACYMEEMRHIDMVEGDEGRMCINMEWGAFGDDGSLNDIRTEFDQEIDMGSLNPGKQLFEKMISGMYMGELVRLILVKMAKEELLFGGKLSPELLNTGRFETKDISDIEGEKDGIRKAREVLMRLGLDPTQEDCVATHRICQIVSTRSASLCAATLAAVLQRIKENKGEERLRSTIGVDGSVYKKHPHFAKRLHKTVRRLVPGCDVRFLRSEDGSGKGAAMVTAVAYRLADQHRARQKTLEHLQLSHDQLLEVKRRMKVEMERGLSKETHASAPVKMLPTYVCATPDGTEKGDFLALDLGGTNFRVLLVRVRNGKWGGVEMHNKIYAIPQEVMHGTGDELFDHIVQCIADFLEYMGMKGVSLPLGFTFSFPCQQNSLDESILLKWTKGFKASGCEGEDVVTLLKEAIHRREEFDLDVVAVVNDTVGTMMTCGFEDPHCEVGLIVGTGSNACYMEEMRNVELVEGEEGRMCVNMEWGAFGDNGCLDDFRTEFDVAVDELSLNPGKQRFEKMISGMYLGEIVRNILIDFTKRGLLFRGRISERLKTRGIFETKFLSQIESDCLALLQVRAILQHLGLESTCDDSIIVKEVCTVVARRAAQLCGAGMAAVVDRIRENRGLDALKVTVGVDGTLYKLHPHFAKVMHETVKDLAPKCDVSFLQSEDGSGKGAALITAVACRIREAGQR

SEQ ID NO: 78514 - protein, 119 aa, Homo sapiens
MQAAPRAGCGAALLLWIVSSCLCRAWTAPSTSQKCDEPLVSGLPHVAFSSSSSISGSYSPGYAKINKRGGAGGWSPSDSDHYQWLQVDFGNRKQISAIATQGRYSSSDWVTQYRMLYSD

SEQ ID NO: 78515 - protein, 488 aa, Homo sapiens
ELDMSDFEEQFKTKSQGPSLDLSALKSKAAQKAPSKATLIEANRAKNLAITLRKGNLGAERICQAIEAYDLQALGLDFLELLMRFLPTEYERSLITRFEREQRPMEELSEEDRFMLCFSRIPRLPERMTTLTFLGNFPDTAQLLMPQLNAIIAASMSIKSSDKLRQILEIVLAFGNYMNSSKRGAAYGFRLQSLDALLEMKSTDRKQTLLHYLVKVIAEKYPQLTGFHSDLHFLDKAGSVSLDSVLADVRSLQRGLELTQREFVRQDDCMVLKEFLRANSPTMDKLLADSKTAQEAFESVVEYFGENPKTTSPGLFFSLFSRFIKAYKKAEQEVEQWKKEAAAQEAGADTPGKGEPPAPKSPPKARRPQMDLISELKRRQQKEPLIYESDRDGAIEDIITGKGLARPWSYPQSVLLCFLLTQCAILWGTGCHTASCYLFCFSFLFPFSTPLHLPHPHSVIKTVPFTARTGKRTSRLLCEASLGEEMPL

SEQ ID NO: 78516 - protein, 1223 aa, Homo sapiens
MALSDEPAAGGPEEEAEDETLAFGAALEAFGESAETRALLGRLREVHGGGAEREVALERFRVIMDKYQEQPHLLDPHLEWMMNLLLDIVQDQTSPASLVHLAFKFLYIITKVRGYKTFLRLFPHEVADVEPVLDLVTIQNPKDHEAWETRYMLLLWLSVTCLIPFDFSRLDGNLLTQPGQARMSIMDRILQIAESYLIVSDKARDAAAVLVSRFITRPDVKQSKMAEFLDWSLCNLARSSFQTMQGVITMDGTLQALAQIFKHGKREDCLPYAATVLRCLDGCRLPESNQTLLRKLGVKLVQRLGLTFLKPKVAAWRYQRGCRSLAANLQLLTQGQSEQKPLILTEDDDEDDDVPEGVERVIEQLLVGLKDKDTVVRWSAAKGIGRMAGRLPRALADDVVGSVLDCFSFQETDKAWHGGCLALAELGRRGLLLPSRLVDVVAVILKALTYDEKRGACSVGTNVRDAACYVCWAFARAYEPQELKPFVTAISSALVIAAVFDRDINCRRAASAAFQENVGRQGTFPHGIDILTTADYFAVGNRSNCFLVISVFIAGFPEYTQPMIDHLVTMKISHWDGVIRELAARALHNLAQQAPEFSATQVFPRLLSMTLSPDLHMRHGSILACAEVAYALYKLAAQENRPVTDHLDEQAVQGLKQIHQQLYDRQLYRGLGGQLMRQAVCVLIEKLSLSKMPFRGDTVIDGWQWLINDTLRHLHLISSHSRQQMKDAAVSALAALCSEYYMKEPGEADPAIQETGFYCIGQAGIELLTSGDPPASASQSSGITEELITQYLAELRNPEEMTRCGFSLALGALPGFLLKGRLQQVLTGLRAVTHTSPEDVSFAESRRDGLKAIARICQTVGVKAGAPDEAVCGENVSQIYCALLGCMDDYTTDSRGDVGTWVRKAAMTSLMDLTLLLARSQPELIEAHTCERIMCCVAQQASEKIDRFRAHAASVFLTLLHFDSPPIPHVPHRGELEKLFPRSDVASVNWSAPSQAFPRITQLLGLPTYRYHVLLGLVVSLGGLTESTIRHSTQSLFEYMKGIQSDPQALGSFSGTLLQIFEDNLLNERVSVPLLKTLDHVLTHGCFDIFTTEEDHPFAVKLLALCKKEIKNSKDIQKLLSGIAVFCEMVQFPGDVRRQALLQLCLLLCHRFPLIRKTTASQVYETLLTYSDVVGADVLDEVVTVLSDTAWDAELAVVREQRNRLCDLLGVPRPQLVPQPGAC

SEQ ID NO: 78517 - protein, 102 aa, Homo sapiens
MAPEENAGTELLLQGFERRFLAVRTLRSFPWQSLEAKLRDSSDSELLRDILQKTCCIAQKPSCRWSGSCRGWLPAGSTSGLLRSTWPLPSATQRRASCSPPS

SEQ ID NO: 78518 - protein, 49 aa, Homo sapiens
MEAPDYEVLSVREQLFHERIRECIARAVHLYPGNCPGCCPAPALLHHQQ

SEQ ID NO: 78519 - protein, 283 aa, Homo sapiens
MGNSRGNTWSRKHKTLSVSQDEFWAFSYDEMAKYDLPASINFILNKTGQEQVYYVGHSQGTTIGFIAFSQIPELAKRIKMFFALGPVASVAFCTSPMAKLGRLPDHLIKDLFGDKEFLPQSAFLKWLGTHVCTHVILKELCGNLCFLLCGFNERNLNMSRVDVYTTHSPAGTSVQNMLHWSQAVKFQKFQAFDWGSSAKNYFHYNQSYPPTYNVKDMLVPTAVWSGGHDWLADVYDVNILLTQITNLVFHESIPEWEHLDFIWGLDAPWRLYNKIINLMRKYQ

SEQ ID NO: 78520 - protein, 344 aa, Homo sapiens
MEEPEEPADSGQSLVPVYIYSPEYVSMCDSLAKIPKRASMVHSLIEAYALHKQMRIVKPKVASMEEMATFHTDAYLQHLQKVSQEGDDDHPDSIEYGLGYDCPATEGIFDYAAAIGGATITAAQCLIDGMCKVAINWSGGWHHAKKDEASGFCYLNDAVLGILRLRRKFERILYVDLDLHHGDGVEDAFSFTSKVMTVSLHKFSPGFFPGTGDVSDVGLGKGRYYSVNVPIQDGIQDEKYYQICESVLKEVYQAFNPKAVVLQLGADTIAGDPMCSFNMTPVGIGKCLKYILQWQLATLILGGGGYNLANTARCWTYLTGVILGKTLSSEIPDHERQDLAMVPR

SEQ ID NO: 78521 - protein, 109 aa, Homo sapiens
SGSSHSPSLSSHYSDSRSPSRLSPKHRDEGRKTGSQRSSGSRSPSPSGGSGWGSPQRNGGSGQRSGAHGGRPGSAHSPPDVRTLRFAEGSRAAGCAVRGRAGRQRGRGR

SEQ ID NO: 78522 - protein, 1275 aa, Homo sapiens
  MOD_RES (1)..(1): Any amino acid
XLHFAKEESALMCKKLTKLAKENDSMKEELLKYRSLYGDLDSALSAEELADAPHSRETELKVHLKLVEEEANLLSRRIVELEVENRGLRAEMDDMKDHGGGCGGPEARLAFSALGGGECGESLAELRRHLQFVEEEAELLRRSSAELEDQNKLLLNELAKFRSEHELDVALSEDSCSVLSEPSQEELAAAKLQIGELSGKVKKLQYENRVLLSNLQRCDLASCQSTRPMLETDAEAGDSAQCVPAPLGETHESHAVRLCRAREAEVLPGLREQAALVSKAIDVLVADANGFTAGLRLCLDNECADFRLHEAPDNSEGPRDTKLIHAILVRLSVLQQELNAFTRKADAVLGCSVKEQQESFSSLPPLGSQGLSKEILLAKDLGSDFQPPDFRDLPEWEPRIREAFRTGDLDSKPDPSRSFRPYRAEDNDSYASEIKELQLVLAEAHDSLRGLQEQLSQERQLRKEEADNFNQKMVQLKEDQQRALLRREFELQSLSLQRRLEQKFWSQEKNMLVQESQQFKHNFLLLFMKLRWFLKRWRQGKVLPSEGDDFLEVNSMKELYLLMEEEEINAQHSDNKACTGDSWTQNTPNEYIKTLADMKVTLKELCWLLRDERRGLTELQQQFAKAKATWETERAELKGHTSQMELKTGKGAGERAGPDWKAALQREREEQQHLLAESYSAVMELTRQLQISERNWSQEKLQLVERLQGEKQQVEQQVKELQNRLSQLQKAADPWVLKHSELEKQDNSWKETRSEKIHDKEAVSEVELGGNGLKRTKSVSSMSEFESLLDCSPYLAGGDARGKKLPNNPAFGFVSSEPGDPEKDTKEKPGLSSRDCNHLGALACQDPPGRQMQRSYTAPDKTGIRVYYSPPVARRLGVPVVHDKEGKIIIEPGFLFTTAKPKESAEADGLAESSYGRWLCNFSRQRLDGGSAGSPSAAGPGFPAALHDFEMSGNMSDDMKEITNCVRQAMRSGSLERKVKSTSSQTVGLASVGTQTIRTVSVGLQTDPPRSSLHGKAWSPRSSSLVSVRSKQISSSLDKVHSRIERPCCSPKYGSPKLQRRSVSKLDSSKDRSLWNLHQGKQNGSAWARSTTTRDSPVLRNINDGLSSLFSVVEHSGSTESVWKLGMSETRAKPEPPKYGIVQEFFRNVCGRAPSPTSSAGEEGTKKPEPLSPASYHQPEGVARILNKKAAKLGSSEEVRLTMLPQVGKDGVLRDGDGAVVLPNEDAVCDCSTQSLTSCFARSSRSAIRHSPSKCRLHPSESSWGGEERALPPSE

SEQ ID NO: 78523 - protein, 115 aa, Homo sapiens
MSVGFIGAGQLAFALAKGFTAAGVLAAHKIMASSPDMDLATVSALRKMGVKLTPHNKETVQHSDVLFLAVKPHIIPFILDEIGADIEDRHIVVSCAAGVTISSIEKKLSAFRPAP

SEQ ID NO: 78524 - protein, 175 aa, Homo sapiens
MAQVLIVGAGMTGSLCAALLRRQTSGPLYLAVWDKAEDSGGRMTTACSPHNPQCTADLGAQYITCTPHYAKKHQRFYDELLAYGVLRPLSSPIEGMVMKEGDCNFVAPQGISSIIKHYLKESGAEVYFRHRVTQINLRDDKWEVSKQTGSPEQFDLIVLTMPVPEILQLQGDITT

SEQ ID NO: 78525 - protein, 597 aa, Homo sapiens
MEHRGPPPEYPFKGMPPQSVVCKPQEPGHFYSEHRLNQPGRTEGQLMRYQHPPEYGAARPAQDISLPLSARNSQPHSPTSSLTSGGSLPLLQSPPSTRLSPARHPLVPNQGDHSAHLPRPQQHFLPNQAHQGDHYRLSQPGLSQQQQQQQQQHHHHHHHQQQQQQQPQQQPGEAYSAMPRAQPSSASYQPVPADPFAIVSRAQQMVEILSDENRNLRQELEGCYEKVARLQKVETEIQRVSEAYENLVKSSSKREALEKAMRNKLEGEIRRMHDFNRDLRERLETANKQLAEKEYEGSEDTRKTISQLFAKNKESQREKEKLEAELATARSTNEDQRRHIEIRDQALSNAQAKVVKLEEELKKKQVYVDKVEKMQQALVQLQAACEKREQLEHRLRTRLERELESLRIQQRQGNCQPTNVSEYNAAALMELLREKEERILALEADMTKWEQKYLEENVMRHFALDAAATVAAQRDTTVISHSPNTSYDTALEARIQKEEEEILMANKRCLDMEGRIKTLHAQIIEKDAMIKVLQQRSRKEPSKTEQLSCMRPAKSLMSISNAGSGLLSHSSTLTGSPIMEEKRDDKSWKGSLGNDSK

SEQ ID NO: 78526 - protein, 287 aa, Homo sapiens
MIVQRVVLNSRPGKNGNPVAENFRMEEVYLPDNINEGQVQVRTLYLSVDPYMRCRMNEDTGTDYITPWQLSQVVDGGGIGIIEESKHTNLTKGDFVTSFYWPWQTKVILDGNSLEKVDPQLVDGHLSYFLGAIGMPGLTSLIGIQEKGHITAGSNKTMVVSGAAGACGSVAGQMNENSHIILCGQISQYNKDVPYPPPLSPAIEAIQKERNITRERFLVLNYKDKFEPGILQLSQWFKEGKLKIKETVINGLENMGAAFQSMMTGGYIDYPPSTTSYGKSIVFPRGI

SEQ ID NO: 78527 - protein, 182 aa, Homo sapiens
  MOD_RES (1)..(1): Any amino acid
XMELANLQPKRPKTIKQRHVRKKRKIKDMLNTPLCPSHSSLHPVLLPSDVFDQPQPVGNKRIEFHISTDMPAAFKKDLEKEQNCEEKNHGFGKIFPKPNLDITEEIKEDSDEMPSECISRRELEKGRISREEMETLSVFRSYEPGEPNCRIYVKNLAKHVQEKDLKYIFGRYVDFSSETQRI

SEQ ID NO: 78528 - protein, 648 aa, Homo sapiens
MGCAEGKAVAAAAPTELQTKGKNGDGRRRSAKDHHPGKTLPENPAGFTSTATADSRALLQAYIDGHSVVIFSRSTCTRCTEVKKLFKSLCVPYFVLELDQTEDGRALEGTLSELAAETDLPVVFVKQRKIGGHGPTLKAYQEGRLQKLLKMNGPEDLPKSYDYDLIIIGGGSGGLAAAKEAAQYGKKVMVLDFVTPTPLGTRWGLGGTCVNVGCIPKKLMHQAALLGQALQDSRNYGWKVEETVKHDWDRMIEAVQNHIGSLNWGYRVALREKKVVYENAYGQFIGPHRIKATNNKGKEKIYSAERFLIATGERPRYLGIPGDKEYCISSDDLFSLPYCPGKTLVVGASYVALECAGFLAGIGLDVTVMVRSILLRGFDQDMANKIGEHMEEHGIKFIRQFVPIKVEQIEAGTPGRLRVVAQSTNSEEIIEGEYNTVMLAIGRDACTRKIGLETVGVKINEKTGKIPVTDEEQTNVPYIYAIGDILEDKVELTPVAIQAGRLLAQRLYAGSTVKCDYENVPTTVFTPLEYGACGLSEEKAVEKFGEENIEVYHSYFWPLEWTIPSRDNNKCYAKIICNTKDNERVVGFHVLGPNAGEVTQGFAAALKCGLTKKQLDSTIGIHPVCAEVFTTLSVTKRSGASILQAGCG

SEQ ID NO: 78529 - protein, 369 aa, Homo sapiens
MEEKIEDDFLDLDPVPETPVFDCVMDIKPEADPTSLTVKSMGLQERRGSNVSLTLDMCTPGCNEEGFGYLMSPREESAREYLLSASRVLQAEELHEKALDPFLLQAEFFEIPMNFVDPKEYDIPGLVRKNRYKTILPNPHSRVCLTSPDPDDPLSSYINANYIRGYGGEEKVYIATQGPIVSTVADFWRMVWQEHTPIIVMITNIEEMNEKCTEYWPEEQVAYDGVEITVQKVIHTEDYRLRLISLKSGTEERGLKHYWFTSWPDQKTPDRAPPLLHLVREVEEAAQQEGPHCAPIIVHCSAGIGRTGCFIATSICCQQLRQEGVVDILKTTCQLRQDRGGMIQTCEQYQFVHHVMSLYEKQLSHQSPE

SEQ ID NO: 78530 - protein, 116 aa, Homo sapiens
MASASSSRAGVALPFEKSQLTLKVVSAKPKVHNRQPRINSYVEVAVDGLPSETKKTGKRIGSSELLWNEIIILNVTAQSHLDLKVWSCHTLRNELLGTASVNLSNVLKNNGGKSTF

SEQ ID NO: 78531 - protein, 75 aa, Homo sapiens
MAQTPAFDKPKVELHVHLDGSIKPETILYYGRRRGIALPANTAEGLLNVIGMDKPLTLPDFLAKFDYYMPAIARL

SEQ ID NO: 78532 - protein, 100 aa, Homo sapiens
  MOD_RES (1)..(1): Any amino acid
XDDLDCSSLTDDWESGKMNAESVITSSSSHIISQPPGGNSHSLSLQSQLTASERFQENSSDHSETRLLQEVFFQAILLAVCLIISACARNNNANHTMGED

SEQ ID NO: 78533 - protein, 460 aa, Homo sapiens
MTDCLVIKHFLRKIIMVHPKVRFHFSVKVNGILSTEIFGVENEPTLNLGNGIALLVDSQHYVSRPNFGTIESHCSRIHPVLGHPVMLFIPEDVAGMDLLGELILTPAAALCPSPKVSSNQLNRISSQLHIFLYGPLGLPLILSTWEQPMTTFFKDTSSLVDWKKYHLCMIPNLDLNLDRDLVLPDVSYQVESSEEDQSQTMDPQGQTLLLFLFVDFHSAFPVQQMEIWGVYTLLTTHLNAILVESHSVVQGSIQFTVDKVLEQHHQAAKAQQKLQASLSVAVNSIMSILTGSTRSSFRKMCLQTLQAADTQEFRTKLHKVFREITQHQFLHHCSCEVKQQLTLEKKDSAQGTEDAPDNSSLELLADTSGQAENKRLKRGSPRIEEMRALRSARAPSPSEAAPRRPEATAAPLTPRGREHREAHGRALAPGRASLGSRLEDVLWLQEVSNLSEWLSPSPGP

SEQ ID NO: 78534 - protein, 127 aa, Homo sapiens
MAPPSPSTTSSNNNSSSSSNSGWDQLSKTNLYIRGLPPHTTDQDLVKLCQPYGKIVSTKAILDKTTNKCKGYGFVDFDSPAAAQKAVSALKASGVQAQMAKQQEQDPTNLYISNLPLSMDEQELENM

SEQ ID NO: 78535 - protein, 157 aa, Homo sapiens
MNLPTVSALRKMGVNLTRSNKETVKHSDVLFLAVKPHIIPFILDEIGADVQARHIVVSCAAGVTISSVEKKLMAFQPAPKVIRCMTNTPVVVQEGATVYATGTHALVEDGQLLEQLMSSVGFCTEVEEDLIDAVTGLSGSGPAYAFMALDALADGGV

SEQ ID NO: 78536 - protein, 406 aa, Homo sapiens
MSGYSSDRDRGRDRGFGAPRFGGSRAGPLSGKKFGNPGEKLVKKKWNLDELPKFEKNFYQEHPDLARRTAQEVETYRRSKEITVRGHNCPKPVLNFYEANFPANVMDVIARQNFTEPTAIQAQGWPVALSGLDMVGVAQTGSGKTLSYLLPAIVHINHQPFLERGDGPICLVLAPTRELAQQVQQVAAEYCRACRLKSTCIYGGAPKGPQIRDLERGVEICIATPGRLIDFLECGKTNLRRTTYLVLDEADRMLDMGFEPQIRKIVDQIRPDRQTLMWSATWPKEVRQLAEDFLKDYIHINIGALELSANHNILQIVDVCHDVEKDEKLIRLMEEIMSEKENKTIVFVETKRRCDELTRKMRRDGWPAMGIHGDKSQQERDWVLNEFKHGKAPILIATDVASRGLG

SEQ ID NO: 78537 - protein, 97 aa, Homo sapiens
MEELLQNEVNRQGVDIEAARKEEERIMLRDARQWLNSGHINDVRHAKSGGTALHVAAAKGYTEVLKLLIQAGYDVNIKDYDGWTPLHAAAHWGKEEA

SEQ ID NO: 78538 - protein, 224 aa, Homo sapiens
MSGHSPTRGAMQVAMNGKARKEAVQTAAKELLKFVNRSPSPFHAVAECRNRLLQAGFSELKETEKWNIKPESKYFMTRNSSTIIAFAVGGQYVPGNGFSLIGAHTDSPCLRVKRRSRRSQVGFQQVGVETYGGGIWSTWFDRDLTLAGRVIVKCPTSGRLEQQLVHVERPILRIPHLAIHLQRNINENFGPNTEMHLSWVVPMMSSSLLLGWTICTAASVPCRP

SEQ ID NO: 78539 - protein, 128 aa, Homo sapiens
MTSMASLFSFTSPAVKRLLGWKQGDEEEKWAEKAVDALVKKLKKKKGAMEELEKALSSPGQPSKCVTIPRSLDGRLQVSHRKGLPHVIYCRVWRWPDLQSHHELKPLDICEFPFGSKQKEVCINPYHY

SEQ ID NO: 78540 - protein, 127 aa, Homo sapiens
MTDTVFSNSSNRWMYPSDRPLQSNDKEQLQAGWSVHPGGQPDRQRKQEELTDEEKEIINRVIARAEKMEEMEQERIGRLVDRLENMRKNVAGDGVNRCILCGEQLGMLGSACVVCEDCKKNVCTKCG

SEQ ID NO: 78541 - protein, 849 aa, Homo sapiens
MPPRAPPAPGPRPPPRAAAATDTAAGAGGAGGAGGAGGPGFRPLAPRPWRWLLLLALPAACSAPPPRPVYTNHWAVQVLGGPAEADRVAAAHGYLNLGQIGNLEDYYHFYHSKTFKRSTLSSRGPHTFLRMDPQVKWLQQQEVKRRVKRQVRSDPQALYFNDPIWSNMWYLHCGDKNSRCRSEMNVQAAWKRGYTGKNVVVTILDDGIERNHPDLAPNYDSYASYDVNGNDYDPSPRYDASNENKHGTRCAGEVAASANNSYCIVGIAYNAKIGGIRMLDGDVTDVVEAKSLGIRPNYIDIYSASWGPDDDGKTVDGPGRLAKQAFEYGIKKGRQGLGSIFVWASGNGGREGDYCSCDGYTNSIYTISVSSATENGYKPWYLEECASTLATTYSSGAFYERKIVTTDLRQRCTDGHTGTSVSAPMVAGIIALALEANSQLTWRDVQHLLVKTSRPAHLKASDWKVNGAGHKVSHFYGFGLVDAEALVVEAKKWTAVPSQHMCVAASDKRPRSIPLVQVLRTTALTSACAEHSDQRVVYLEHVVVRTSISHPRRGDLQIYLVSPSGTKSQLLAKRLLDLSNEGFTNWEFMTVHCWGEKAEGQWTLEIQDLPSQVRNPEKQGKLKEWSLILYGTAEHPYHTFSAHQSRSRMLELSAPELEPPKAALSPSQVEVPEDEEDYTGVCHPECGDKGCDGPNADQCLNCVHFSLGSVKTSRKCVSVCPLGYFGDTAARRCRRCHKGCETCSSRAATQCLSCRRGFYHHQEMNTCVTLCPAGFYADESQKNCLKCHPSCKKCVDEPEKCTVCKEGFSLARGSCIPDCEPGTYFDSELIRCGECHHTCGTCVGVTRTA

SEQ ID NO: 78542 - protein, 74 aa, Homo sapiens
MRKIDLCLSSEGSEVILATSSDEKHPPENIIDGNPETFWTTTGMFPQEFIICFHKHVRIERLVIQSYFGKQILH

SEQ ID NO: 78543 - protein, 1173 aa, Homo sapiens
MATAATEEPFPFHGLLPKKETGAASFLCRYPEYDGRGVLIAVLDTGVDPGAPGMQVTTDGKPKIVDIIDTTGSGDVNTATEVEPKDGEIVGLSGRVLKIPASWTNPSGKYHIGIKNGYDFYPKALKERIQKERKEKIWDPVHRVALAEACRKQEEFDVANNGSSQANKLIKEELQSQVELLNSFEKKYSDPGPVYDCLVWHDGEVWRACIDSNEDGDLSKSTVLRNYKEAQEYGSFGTAEMLNYSVNIYDDGNLLSIVTSGGAHGTHVASIAAGHFPEEPERNGVAPGAQILSIKIGDTRLSTMETGTGLIRAMIEVINHKCDLVNYSYGEATHWPNSGADGALGVSISAPGGAIASVPNWTLRGTQLMNGTSMSSPNACGGIALILSGLKANNIDYTVHSVRRALENTAVKADNIEVFAQGHGIIQVDKAYDYLVQNTSFANKLGFTVTVGNNRGIYLRDPVQVAAPSDHGVGIEPVFPENTENSEKISLQLHLALTSNSSWVQCPSHLELMNQCRHINIRVDPRGLREGLHYTEVCGYDIASPNAGPLFRVPITAVIAAKVNESSHYDLAFTDVHFKPGQIRRHFIEVPEGATWAEVTVCSCSSEVSAKFVLHAVQLVKQRAYRSHEFYKFCSLPEKGTLTEAFPVLGGKAIEFCIARWWASLSDVNIDYTISFHGIVCTAPQLNIHASEGINRFDVQSSLKYEDLAPCITLKNWVQTLRPVSAKTKPLGSRDVLPNNRQLYEMVLTYNFHQPKSGEVTPSCPLLCELLYESEFDSQLWIIFDQNKRQMGSGDAYPHQYSLKLEKGDYTIRLQIRHEQISDLERLKDLPFIVSHRLSNTLSLDIHENHSFALLGKKKSSNLTLPPKYNQPFFVTSLPDDKIPKGAGPGCYLAGSLTLSKTELGKKADVIPVHYYLIPPPTKTKNGSKDKEKDSEKEKDLKEEFTEALRDLKIQWMTKLDSSDIYNELKETYPNYLPLYVARLHQLDAEKERMKRLNEIVDAANAVISHIDQTALAVYIAMKTDPRPDAATIKNDMDKQKSTLVDALCRKGCALADHLLHTQAQDGAISTDAEGKEEEGESPLDSLAETFWETTKWTDLFDNKVLTFAYKHALVNKMYGRGLKFATKLVEEKPTKENWKNCIQLMKLLGWTHCASFTENWLPIMYPPDYCVF

SEQ ID NO: 78544 - protein, 151 aa, Homo sapiens
MLKSSFATCVLVSEEDKHAIIVEPEKRGKYVVCFDPLDGSSNIDCLVSVGTIFGIYRKKSTDEPSEKDALQPGRNLVAAGYALYGSATMLVLAMDCGVNCFMLDPAIGEFILVDKDVKIKKKGKIYSLNEGYARDFDPAVTEYIQRKKFPP

SEQ ID NO: 78545 - protein, 236 aa, Homo sapiens
MALSRVCWARSAVWGSAVTPGHFVTRRLQLGRSGLAWGAPRSSKLHLSPKADVKNLMSYVVTKTKAINGKYHRFLGRHFPRFYVLYTIFMKGLQMLWADAKKARRIKTNMWKHNIKFHQLPYREMEHLRQKALSRAMLLTSYLPPPLLRHRLKTHTTVIHQLDKALAKLGIGQLTAQEVKSACYLRGLNSTHIGEDRCRTWLGEWLQISCSLKEAELSLLLHNVVLLSTNYLGTRR

SEQ ID NO: 78546 - protein, 53 aa, Homo sapiens
MPGFDYKFLEKPKRRLLCPLCGKPMREPVQVSTCGHRFCDTCLQEFLRSLQVP

SEQ ID NO: 78547 - protein, 67 aa, Homo sapiens
MPRKIEEIKDFLLTARRKDAKSVKIKKNKDNVKFKVRCSRYLYTLVITDKEKAEKLKQSLPPVKELK

SEQ ID NO: 78548 - protein, 267 aa, Homo sapiens
MADIIARLREDGIQKRVIQEGRGELPDFQDGTKATFHYRTLHSDDEGTVLDDSRARGKPMELIIGKKFKLPVWETIVCTMREGEIAQFLCDIKVESPGTYQQDPWAMTDEEKAKAVPLIHQEGNRLYREGHVKEAAAKYYDAIACLKNLQMKEQPGSPEWIQLDQQITPLLLNYCQCKLVVEEYYEVLDHCSSILNKYDDNVKAYFKRGKAHAAVWNAQEAQADFAKVLELDPALAPVVSRELRALEARIRQKDEEDKARFRGIFSH

SEQ ID NO: 78549 - protein, 178 aa, Homo sapiens
MKPTQEMNISLVWCLLVLSFAIKVLFSLTTHYFKVEDGGERSVCVTFGFFFFVKAMAVLIVTENYLEFGLETGFTNFSDSAMQFLEKQGLESQSPVSKLTFKFFLAIFCSFIGAFLTFPGLRLAQMHLDALNLATEKITQTLLHINFLAPLFMVLLWVKPITKDYIMNPPLGKESIPL

SEQ ID NO: 78550 - protein, 373 aa, Homo sapiens
MEVAEVESPLNPSCKIMTFRPSMEEFREFNKYLAYMESKGAHRAGLAKVIPPKEWKPRQCYDDIDNLLIPAPIQQMVTGQSGLFTQYNIQKKAMTVKEFRQLANSGKYCTPRYLDYEDLERKYWKNLTFVAPIYGADINGSIYDEGVDEWNIARLNTVLDVVEEECGISIEGVNTPYLYFGMWKTTFAWHTEDMDLYSINYLHFGEPKSWYAIPPEHGKRLERLAQGFFPSSSQGCDAFLRHKMTLISPSVLKKYGIPFDKITQEAGEFMITFPYGYHAGFNHGFNCAESTNFATVRWIDYGKVAKLCTCRKDMVKISMDIFVRKFQPDRYQLWKQGKDIYTIDHTKPTPASTPEVKAWLQRRRKVRKASRRL

SEQ ID NO: 78551 - protein, 47 aa, Homo sapiens
MKVLLLTGLGALFFAYYWDDNFDPGGRELPEAGRPQGLLHRGGHGLP

SEQ ID NO: 78552 - protein, 372 aa, Homo sapiens
MRVMAPRALLLLLSGGLALTETWACSHSMRYFDTAVSRPGRGEPRFISVGYVDDTQFVRFDSDAASPRGEPRAPWVEQEGPEYWDRETQNYKRQAQADRVSLRNLRGYYNQSEDGSHTLQRMYGCDLGPDGRLLRGYDQSAYDGKDYIALNEDLRSWTAADTAAQITQRKLEAARAAEQLRAYLEGTCVEWLRRYLENGKETLQRAEPPKTHVTHHPLSDHEATLRCWALGFYPAEITLTWQRDGEDQTQDTELVETRPAGDGTFQKWAAVVVPSGQEQRYTCHMQHEGLQEPLTLSWEPSSQPTIPIMGIVAGLAVLVVLAVLGAVVTAMMCRRKSSGHFLPTGGKGGSCSQAACSNSAQGSDESLITCKA

SEQ ID NO: 78553 - protein, 196 aa, Homo sapiens
ASIMEGPLSKWTNVMKGWQYRWFVLDYNAGLLSYYTSKDKMMRGSRRGCVRLRGAVIGIDDEDDSTFTITVDQKTFHFQARDADEREKWIHALEETILRHTLQLQGLDSGFVPSVQDFDKKLTEADAYLQILIEQLKLFDDKLQNCKEDEQRKKIETLKETTNSMVESIKHCIVLLQIAKAVAIHHRVAVSLLQAT

SEQ ID NO: 78554 - protein, 205 aa, Homo sapiens
MGPLQFRDVAIEFSLEEWHCLDMAQRNLYRDVMLENYRNLVFLGIVVSKPDLITHLEQGKKPSTMQRHEMVANPSGPVLHILFFCCCFLSFFLFLSFFFFFLRWNLALLPRLKCSGAISAHCKLCLLGSSDSPTSASQVAGITGARHIAKVIFVFLVEMVFHHVGQARLKLLTSGYLPTSTSQSARITGLSYCTWPVLHILDIDL

SEQ ID NO: 78555 - protein, 336 aa, Homo sapiens
PGLDRSRGRGRAELGGEVGGLGDPGSRRRARRGAERRLRDPDTEVRRGPLSDRRLALAGELYDLDASSLQLKVLQYLQQETRASRCCLLLVSEDNLQLSCKVIGDKVLGEEVSFPLTGCLGQVVEDKKSIQLKDLTSEDVQQLQSMLGCELQAMLCVPVISRATDQVVALACAFNKLEGDLFTDEDEHVIQHCFHYTSTVLTSTLAFQKEQKLKCECQALLQVAKNLFTHLDDVSVLLQEIITEARNLSNAEICSVFLLDQNELVAKVFDGGVVDDESYEIRIPADQGIAGHVATTGQILNIPDAYAHPLFYRGVDDSTGFRTRNILCFPIKNENQ

SEQ ID NO: 78556 - protein, 62 aa, Homo sapiens
KAPQQEELPLSSDMVEKQTGKKDRRGPACPGAATREPSSGAPWAEAACPLHVDVSLEQGEKL

SEQ ID NO: 78557 - protein, 79 aa, Homo sapiens
MLRAAARFGPRLGRRLLSAAATQAVPAPNQQPEVFCNQSRLKMSTPDITVLLETIKRKWELGHPPTTPRPRAFTCVIFS

SEQ ID NO: 78558 - protein, 129 aa, Homo sapiens
MTGSCCGSTFSSLSYGGGCCQPCCCRDPCCCRPVTCQTTVCRPVTCVPRCTRPICEPCRRPVCCDPCSLQEGCCRPITCCPSSCTAVVCRPCCWATTCCQPVSVQSPCGQPSPCGQPTPCSTTCRTSSC

SEQ ID NO: 78559 - protein, 201 aa, Homo sapiens
MDEQALLGLNPNADSDFRQRALAYFEQLKISPDAWQVCAEALAQRTYSDDHVKFFCFQVLEHQVKYKYSELTTVQQQLIRETLISWLQAQMLNPQPEKTFIRNKAAQVFALLFVTEYLTKWPKFFFDILSVVDLNPRGVDLYLRILMAIDSELVDRDVVHTSEEARRNTLIKDTMREQCIPNLVESWYQILQNYQFTNSEV

SEQ ID NO: 78560 - protein, 58 aa, Homo sapiens
MAWIKRKFGERPPPKRLTREAMRNYLKERGDQTVLILHAKVAQKSYGNEKRVTWNWAH

SEQ ID NO: 78561 - protein, 32 aa, Homo sapiens
  MOD_RES (1)..(1): Any amino acid
XQSEIFADRPCLPLFMKMTKMGVLERPRSVPS

SEQ ID NO: 78562 - protein, 191 aa, Homo sapiens
MLLFVEVASKGTGLNPNAKVWQEIAPGNTDATPVTHGTESSWHEIAATSGAHPEGNAELSEDICKEYEVMYSSSCETTRNTTGIEESTDGMILGPEDLSYQIYDVSESNSAVSTEDLKECLKKQLEFCFSRENLSKDLYLISQMDSDQFIPIWTVANMEEIKKLTTDPDLILEVLRSSPMVQVDEKGEKVR

SEQ ID NO: 78563 - protein, 181 aa, Homo sapiens
MKQLPAATVRLLSSSQIITSVVSVVKELIENSLDAGATSVDVKLENYGFDKIEVRDNGEGIKAVDAPVMAMKYYTSKINSHEDLENLTTYGFRGEALGSICCIAEVLITTRTAADNFSTQYVLDGSGHILSQKPSHLGQGKKVALYTNILYLFCLNCWFKKKKLLGEYKYIALGLVLIKAS

SEQ ID NO: 78564 - protein, 724 aa, Homo sapiens
MGSNSSRIGDLPKNEYLKKLSGTESISENDPFWNQLLSFSFPAPTSSSELKLLEEATISVCRSLVENNPRTGNLGALIKVFLSRTKELKLSAECQNHIFIWQTHNALFIICCLLKVFICQMSEEELQLHFTYEEKSPGNYSSDSEDLLEELLCCLMQLITDIPLLDITYEISVEAISTMVVFLSCQLFHKEVLRQSISHKYLMRGPCLPYTSKLVKTLLYNFIRQEKPPPPGAHVFPQQSDGGGLLYGLASGVATGLWTVFTLGGVGSKAAASPELSSPLANQSLLLLLVLANLTDASDAPNPYRQAIMSFKNTQDSSPFPSSIPHAFQINFNSLYTALCEQQTSDQATLLLYTLLHQNSNIRTYMLARTDMENLVLPILEILYHVEERNSHHVYMALIILLILTEDDGFNRSIHEVILKNITWYSERVLTEISLGSLLILVVIRTIQYNMTRTRDKYLHTNCLAALANMSAQFRSLHQYAAQRIISYTCRHLRRYVYVLDKLYFPHSHCSTLQHCFSTLSDNGEELLSLTCSHILRSYASSLFSLLSKKHNKVLEQATQSLRGSLSSNDVPLPDYAQDLNVIEEVIRMMLEIINSCLTNSLHHNPNLVYALLYKRDLFEQFRTHPSFQDIMQNIDLVISFFSSRLLQAGAELSVERVLEIIKQGVVALPKDRLKKFPELKFKYVEEEQPEEFFIPYVWSLVYNSAVGLYWNPQDIQLFTMDSD

SEQ ID NO: 78565 - protein, 229 aa, Homo sapiens
QGKKAERSPNQGKKGEGAPIQGKKADSVANQGTKVEGITNQGKKAEGSPSEGKKAEGSPNQGKKADAAANQGKKTESASVQGRNTDVAQSPEAPKQEAPAKKKSGSKKKGEPGRTQSWPSFGRSSARSAKSWWRSQRLCGKMSSSGKLWKPRQLPSRSRSCSCRRPTGRVRRPCRSAWTRSAGSCATRRAATPASGRMPRRPRSNSSRWPSCTASYSPPRRRCAANARS

SEQ ID NO: 78566 - protein, 187 aa, Homo sapiens
MKKTLLHEMIHAYLFVTNNDKDREGHGPEFCKHMHRINSLTGANITVYHTFHDEVDEYRRHWWRCNGPCQHRPPYYGYVKRATNREPSAHDYWWAEHQKTCGGTYIKIKEPENYSKKGKGKAKLGKEPVLAAENKDKPNRGEAQLVIPFSGKGYVLGETSNLPSPGKLITSHAINKTQDLLNQNHSA

SEQ ID NO: 78567 - protein, 173 aa, Homo sapiens
MFSADRLIRLVVEEGLNQLPYKECMVTTPTGYKYEGVKFEKGNCGVSIMRSGEAMEQGLRDCCRSIRIGKILIQSDEETQRAKVYYAKFPPDIYRRKVLLMYPILSTGNTVIEAVKVLIEHGVQPSVIILLSLFSTPHGAKSIIQEFPEITILTTEVHPVAPTHFGQKYFGTD

SEQ ID NO: 78568 - protein, 57 aa, Homo sapiens
KEDHARLRALNGLLYKALTDLLCTPEVSQELYDLNVELSKVDEDLIIEVHQLFFSRM

SEQ ID NO: 78569 - protein, 223 aa, Homo sapiens
MGPSKWAGPAPPASAQICPPPALPRRTPAAADICFTKELHSHFFSLGKCVPVCRGAEFFQAENEGKGVLDTGRHMPGAGKRREKGDGVYQKGMDFILEKLNHGDWVHIFPEGKVNMSSEFLRFKWGIGRLIAECHLNPIILPLWHVGMNDVLPNSPPYFPRFGQKITVLIGKPFSALPVLERLRAENKSAVEMRKALTDFIQEEFQHLKTQAEQLHNHLQPGR

SEQ ID NO: 78570 - protein, 44 aa, Homo sapiens
MPKSGFTKPIQSENSDSDSNMVEKPYGRKSKDKIASYSKTPKIE

SEQ ID NO: 78571 - protein, 85 aa, Homo sapiens
MGNSDSQYTLQGSKNHSNTITGAKQIPCSLKIRGIHAKEEKSLHGWGHGSNGAGYKSRSLARSCLSHFKSNQPYASRLGGPTCKV

SEQ ID NO: 78572 - protein, 988 aa, Homo sapiens
MQILRCLQKCGKLKMMAVVRTSLQKVVVLLHRLQRMAVSSPRYQKLCKDIQAEIDAHNDIFKSIDGNRQKMVKALGNSEEATMLQHRLDDMNQRWNDLKAKSASIRAHLEASAEKWNRLLMSLEELIKWLNMKDEELKKQMPIGGDVPALQLQYDHCKALRRELKEKEYSVLNAVDQARVFLADQPIEAPEEPRRNLQSKTELTPEERAQKIAKAMRKQSSEVKEKWESLNAVTSNWQKQVDKALEKLRDLQGAMDDLDADMKEAESVRNGWKPVGDLLIDSLQDHIEKIMAFREEIAPINFKVKTVNDLSSQLSPLDLHPSLKMSRQLDDLNMRWKLLQVSVDDRLKQLQEAHRDFGPSSQHFLSTSVQLPWQRSISHNKVPYYINHQTQTTCWDHPKMTELFQSLADLNNVRFSAYRTAIKIRRLQKALCLDLLELSTTNEIFKQHKLNQNDQLLSVPDVINCLTTTYDGLEQMHKDLVNVPLCVDMCLNWLLNVYDTGRTGKIRVQSLKIGLMSLSKGLLEEKYRYLFKEVAGPTEMCDQRQLGLLLHDAIQIPRQLGEVAAFGGSNIEPSVRSCFQQNNNKPEISVKEFIDWMHLEPQSMVWLPVLHRVAAAETAKHQAKCNICKECPIVGFRYRSLKHFNYDVCQSCFFSGRTAKGHKLHYPMVEYCIPTTSGEDVRDFTKVLKNKFRSKKYFAKHPRLGYLPVQTVLEGDNLETPITLISMWPEHYDPSQSPQLFHDDTHSRIEQYATRLAQMERTNGSFLTDSSSTTGSVEDEHALIQQYCQTLGGESPVSQPQSPAQILKSVEREERGELERIIADLEEEQRNLQVEYEQLKDQHLRRGLPVGSPPESIISPHHTSEDSELIAEAKLLRQHKGRLEARMQILEDHNKQLESQLHRLRQLLEQPESDSRINGVSPWASPQHSALSYSLDPDASGPQFHQAAGEDLLAPPHDTSTDLTEVMEQIHSTFPSCCPNVPSRPQAM

SEQ ID NO: 78573 - protein, 290 aa, Homo sapiens
  MOD_RES (1)..(1): Any amino acid
XIEEKETEDVPDDLDGAPIEEELDGAPLEDVDGIPIDATPIDDLDGVPIKSLDDDLDGVPLDATEDSKKNEPIFKVAPSKWEAVDESELEAQAVTTSKWELFDQHEESEEEENQNQEEESEDEEDTQSSKSEEHHLYSNPIKEEMTESKFSKYSEMSEEKRAKLREIELKVMKFQDELESGKRPKKPGQSFQEQVEHYRDKLLQREKEKELERERERDKKDKEKLESRSKDKKEKDECTPTRKERSPSGSRTPKRSRRSRSRSPKKSGKKSRSQSRSPHRSHKKSKKNKH

SEQ ID NO: 78574 - protein, 81 aa, Homo sapiens
  MOD_RES (1)..(1): Any amino acid
XLVIRSIPDKSSGKSHIEKLIFRMAAPKIAEATFIMASYMNHCTTTVNPPTNPPGACQLWELDGRQFFSSVSCATKGPTLL

SEQ ID NO: 78575 - protein, 466 aa, Homo sapiens
MYRYLGEALLLSRAGPAALGSASADSAALLGWARGQPAAAPQPGLALAARRHYSEAVADREDDPNFFKMVEGFFDRGASIVEDKLVEDLRTRESEEQKRNRVRGILRIIKPCNHVLSLSFPIRRDDGSWEVIEGYRAQHSQHRTPCKGGIRYSTDVSVDEVKALASLMTYKCAVVDVPFGGAKAGVKINPKNYTDNELEKITRRFTMELAKKGFIGPGIDVPAPDMSTGEREMSWIADTYASTIGHYDINAHACVTGKPISQGGIHGRISATGRGVFHGIENFINEASYMSILGMTPGFGDKTFVVQIIAEGANGPTTPEADKIFLERNIMVIPDLYLNAGGVTVSYFEWLKNLNHVSYGRLTFKYERDSNYHLLMSVQESLERKFGKHGGTIPIVPTAEFQDRISGASEKDIVHSGLAYTMERSARQIMRTAMKYNLGLDLRTAAYVNAIEKVFKVYNEAGVTFT

SEQ ID NO: 78576 - protein, 149 aa, Homo sapiens
MHQSLTQQRSSDMSLPDSMGAFNRRKRNSIYVTVTLLIVSVLILTVGLAATTRTQNVTVGGYYPGVILGFGSFLGIIGSNLIENKRQMLVASIVFISFGVIAAFCCAIVDGVFAARHIDLKPLYANRCHYVPKTSQKEAEENPTLPALN

SEQ ID NO: 78577 - protein, 1303 aa, Homo sapiens [sequence omitted]

SEQ ID NO: 78578 - protein, 187 aa, Homo sapiens
  MOD_RES (1)..(1): Any amino acid
XARQSDQINWESWLLEDSSRAELPVTDKSDDSLPMGVVVDYTNQVEITISDEKTLPPAPVLMLLSTDGVLCPFYMINQNPGVKSLIKTPERLSLEGERQPKSPASLAPTPAASPVAPSAASFSFGSSGFKPTLESTPVPSVSAPNIAMKPSFPPSTSAVKVNLSEKFTAAATSTPVSSSQSAPPMSP

SEQ ID NO: 78579 - protein, 275 aa, Homo sapiens
MELTLQKYGSYEKFEQATGGSLLSKTRIWSHVRKYMMKEGCLGEIVVHLTEDLLSRASMTVVNGCPTLTINVSTAREHWLEGMLRHEIGTHYFRGINNLQQPWNSWTGRKKHELKPNNPTEEGLASIHSVLFRKDPFLWRAALLYYTVYQASQMSFCELFKDIGRFVKDPNTRWDYCVRAKRGWTDTSQPGCFSKDQVYLDGILQILRYRDTIDFHLLTALGKVSYEDVDRLKGLAVTENMRVPHFLQDHGRYMEHLEKIMEVNELTDRELKDLI

SEQ ID NO: 78580 - protein, 72 aa, Homo sapiens
MVPGVAGSAAAAGEGGGVAGVADLKHAIQSKYKIAIQHQVLVVNGGECMAADRRVCTYSAGTDTNPIFLFNK

SEQ ID NO: 78581 - protein, 632 aa, Homo sapiens
MTDPMMDFFDDANLFGETLEGLSDDAFVQPGPVSLVDELNLGAEFEPLHIDSLNHVQGTPTHQKMTDFEQLNQFDSIKFHHVNQSFGSPAEHVLSPHSQFNCSPIHPQNQPNGLFPDVSDGSPMWGHQTATTISNQNGSPFHQQGHSHSMHQNKSFVAHHDFALFQANEQQTQCTSLRSQQNRNNLNPGQNSLSQSKNFMNVSGPHRVNVNHPPQMTNASNSQQSISMQQFSQTSNPSAHFHKCSSHQEGNFNGPSPNMTSCSVSNSQQFSSHYSFSSNHISPNSLLQSSAVLASNHTNQTLSDFTGSNSFSPHRGIKQESTQHILNPNTSLNSNNFQILHSSHPQGNYSNSKLSPVHMNFPDPVDSGTQMGHFNDHVETNGFSSLEENLLHQVESQTEPFTGLDPEDLLQEGLLPHFDESTFGQDNSSHILDHDLDRQFTSHLVTRPSDMAQTQLQSQARSWHSSFSNHQHLHDRNHLCLQRQPPSSKKSDGSGTYTKLQNTQVRVMSEKKQRKKVESESKQEKANRIISEAIAKAKERGERNIPRVMSPENFPTASVEGKEEKKGRRMKSKPKDKDSKKTKTCSKLKEKTKIGKLIITLGKKQKRKNESSDEISDAEQMPQHTLKDQDSQ

SEQ ID NO: 78582 - protein, 201 aa, Homo sapiens
MLDHEYTTKEVFRKNFFNDWRKEMAVEEREVIKSLDKCDFTEIHRYFVDKAAARKVLSREEKQKLKEEAEKLQQEFGYCILDGHQEKIGNFKIEPPGLFRGRGDHPKMGMLKRRITPEDVVINCSRDSKIPEPPAGHQWKEVRSDNTVTWLAAWTESVQNSIKYIMLNPCSKLKGETAWQKFETARRLRGFVDEIRSQYRA

SEQ ID NO: 78583 - protein, 173 aa, Homo sapiens
ALAKGFTAAGVLAAHKIMASSPDMDLATVSALRKMGVKLTPHNKETVQHSDVLFLAVKPHIIPFILDEIGADIEDRHIVVSCAAGVTISSIEKKLSAFRPAPRVIRCMTNTPVVVREGATVYATGTHAQVEDGRLMEQLLSSVGFCTEVEEDLIDAVTGLSGSGPAYGAAVHG

SEQ ID NO: 78584 - protein, 45 aa, Homo sapiens
MAKRNAEKELTDRNWDQEDEAEEVGTFSMASEEVLKNRAIKKAKR

SEQ ID NO: 78585 - protein, 1269 aa, Homo sapiens
MSGPTDETAGDLPVKDTGLNLFGMGGLQETSTTRTMKSRQAVSRVSREELEDRFLRLHDENILLKQHARKQEDKIKRMATKLIRLVNDKKRYERVGGGPKRLGRDVEMEEMIEQLQEKVHELEKQNETLKNRLISAKQQLQTQGYRQTPYNNVQSRINTGRRKANENAGLQECPRKGIKFQDADVAETPHPMFTKYGNSLLEEARGEIRNLENVIQSQRGQIEELEHLAEILKTQLRRKENEIELSLLQLREQQATDQRSNIRDNVEMIKLHKQLVEKSNALSAMEGKFIQLQEKQRTLRISHDALMANGDELNMQLKEQRLKCCSLEKQLHSMKFSERRIEELQDRINDLEKERELLKENYDKLYDSAFSAAHEEQWKLKEQQLKVQIAQLETALKSDLTDKTEILDRLKTERDQNEKLVQENRELQLQYLEQKQQLDELKKRIKLYNQENDINADELSEALLLIKAQKEQKNGDLSFLVKVDSEINKDLERSMRELQATHAETVQELEKTRNMLIMQHKINKDYQMEVEAVTRKMENLQQDYELKVEQYVHLLDIRAARIHKLEAQLKDIAYGTKQYKFKPEIMPDDSVDEFDETIHLERGENLFEIHINKVTFSSEVLQASGDKEPVTFCTYAFYDFELQTTPVVRGLHPEYNFTSQYLVHVNDLFLQYIQKNTITLEVHQAYSTEYETIAACQLKFHEILEKSGRIFCTASLIGTKGDIPNFGTVEYWFRLRVPMDQAIRLYRERAKALGYITSNFKGPEHMQSLSQQAPKTAQLSSTDSTDGNLNELHITIRCCNHLQSRASHLQPHPYVVYKFFDFADHDTAIIPSSNDPQFDDHMYFPVPMNMDLDRYLKSESLSFYVFDDSDTQENIYIGKVNVPLISLAHDRCISGIFELTDHQKHPAGTIHVILKWKFAYLPPSGSITTEDLGNFIRSEEPEVVQRLPPASSVSTLVLAPRPKPRQRLTPVDKKVSFVDIMPHQSDETSPPPEDRKEISPEVEHIPEIEINMLTVPHVPKVSQEGSVDEVKENTEKMQQGKDDVSLLSEGQLAEQSLASSEDETEITEDLEPEVEEDMSASDSDDCIIPGPISKNIKQPSEKIRIEIIALSLNDSQVTMDDTIQRLFVECRFYSLPAEETPVSLPKPKSGQWVYYNYSNVIYVDKENNKAKRDILKAILQKQEMPNRSLRFTVVSDPPEDEQDLECEDIGVAHVDLADMFQEGRDLIEQNIDVFDARADGEGIGKLRVTVEALHALQSVYKQYRDDLEA

SEQ ID NO: 78586 - protein, 854 aa, Homo sapiens
  MOD_RES (1)..(1): Any amino acid
XFQVSYFAFKFAKKDCPVSNINNSSIPSALPEPMTASEAAARKSQIKARITDTIGPTETSIAPRQRPKANSATTATPSVLTIQSSATPVKVLAPGEFGNHRPKGALRPGNGPEILLGQGPPQQPPQQHRVLQQLQQGDWRLQQLHLQHRHPHQQQQQQQQQQQQQQQQQQQQQQQQQQQHHHHHHHHLLQDAYMQQYQHATQQQQMLQQQFLMHSVYQPQPSASQYPTMMPQYQQAFFQQQMLAQHQPSQQQASPEYLTSPQEFSPALVSYTSSLPAQVGTIMDSSYSANRSVADKEAIANFTNQKNISNPPDMSGWNPFGEDNFSKLTEEELLDREFDLLRSNRLEERASSDKNVDSLSAPHNHPPEDPFGSVPFISHSGSPEKKAEHSSINQENGTANPIKNGKTSPASKDQRTGKKTSVQGQVQKGNDESESDFESDPPSPKSSEEEEQDDEEVLQGEQGDFNDDDTEPENLGHRPLLMDSEDEEEEEKHSSDSDYEQAKAKYSDMSSVYRDRSGSGPTQDLNTILLTSAQLSSDVAVETPKQEFDVFGAVPFFAVRAQQPQQEKNEKNLPQHRFPAAGLEQEEFDVFTKAPFSKKVNVQECHAVGPEAHTIPGYPKSVDVFGSTPFQPFLTSTSKSESNEDLFGLVPFDEITGSQQQKVKQRSLQKLSSRQRRTKQDMSKSNGKRHHGTPTSTKKTLKPTYRTPERARRHKKVGRRDSQSSNEFLTISDSKENISVALTDGKDRGNVLQPEESLLDPFGAKPFHSPDLSWHPPHQGLSDIRADHNTVLPGRPRQNSLHGSFHSADVLKMDDFGAVPFTELVVQSITPHQSQQSQPVELDPFGAAPFPSKQ

SEQ ID NO: 78587 - protein, 240 aa, Homo sapiens
  MOD_RES (1)..(1): Any amino acid
XLDLLELERDAEVEERRSWQENISLKELQSRGVCLLKLQVSSQRTGLYGRLLVTFEPRRYGSAAALPSNSFTSGDIVGLYDAANEGSQLATGILTRVTQKSVTVAFDESHDFQLSLDRENSYRLLKLANDVTYRRLKKALIALKKYHSGPASSLIEVLFGRSAPSPASEIHPLTFFNTCLDTSQKEAVLFALSQKELAIIHGPPGTGKTTTVVEIILQAVKQGLKMVNFSLSKNNCPWDY

SEQ ID NO: 78588 - protein, 893 aa, Homo sapiens
MPHKIGFVVVSSSGHEDGFSARELMIHAPTVSGWRSPRFCQFPQEIVLQMVERCRIRKLQLLAHQYMISSKIEFYISESLPEYFAPYQAERFRRLGYVSLCDNEKTGCKARELKSVYVDAVGQFLKLIFHQNHVNKYNIYNQVALVAINIIGDPADFSDESNTASREKLIDHYLGHNSEDPALEGTYARKSDYISPLDDLAFDMYQDPEVAQIIRKLDERKREAVQKERYDYAKKLKQAIADLQKVGERLGRYEVEKRCAVEKEDYDLAKEKKQQMEQYRAEVYEQLELHSLLDAELMRRPFDLPLQPLARSGSPCHQKPMPSLPQLEERGTENQFAEPFLQEKPSSYSLTISPQHSAVDPLLPATDPHPKINAESLPYDERPLPAIRKHYGEAVVEPEMSNADISDARRGGMLGEPEPLTEKALREASSAIDVLGETLVAEAYCKTWSYREDALLALSKKLMEMPVGTPKEDLKNTLRASVFLVRRAIKDIVTSVFQASLKLLKMIITQYIPKHKLSKLETAHCVERTIPVLLTRTGDSSARLRVTAANFIQEMALFKEVKSLQIIPSYLVQPLKANSSVHLAMSQMGLLARLLKDLGTGSSGFTIDNVMKFSVSALEHRVYEVRETAVRIILDMYRQHQASILEYLPPDDSNTRRNILYKTIFEGFAKIDGRATDAEMRARRKAATEEAEKQKKEEIKALQGQLAALKEIQAEVQEKESDAVKPKNQDIQGGKAAPAEALGIPDEHYLDNLCIFCGERSESFTEEGLDLHYWKHCLMLTRCDHCKQVVEISSLTEHLLTECDKKDGFGKCYRCSEAVFKEELPRHIKHKDCNPAKPEKLANRCPLCHENFSPGEEAWKAHLMGPAGCTMNLRKTHILQKAPALQPGEGQRR

SEQ ID NO: 78589 - protein, 149 aa, Homo sapiens
MHDVIKKVKKKGEWKVLVVDQLSMRMLSSCCKMTDIMTEGITIVEDINKRREPLPSLEAVYLITPSEKSVHSLISDFKDPPTAKYRAAHVFFTDSCPDALFNELVKSRAAKVIKTLTEINIAFLPYESQVYSLDSADSFQSFYSPHKAQ

SEQ ID NO: 78590 - protein, 395 aa, Homo sapiens
MLLLWVSVVAALALAVLAPGAGEQRRRAAKAPNVVLVVSDSFDGRLTFHPGSQVVKLPFINFMKTRGTSFLNAYTNSPICCPSRAAMWSGLFTHLTESWNNFKGLDPNYTTWMDVMERHGYRTQKFGKLDYTSGHHSISNRVEAWTRDVAFLLRQEGRPMVNLIRNRTKVRVMERDWQNTDKAVNWLRKEAINYTEPFVIYLGLNLPHPYPSPSSGENFGSSTFHTSLYWLEKVSHDAIKIPKWSPLSEMHPVDYYSSYTKNCTGRFTKKEIKNIRAFYYAMCAETDAMLGEIILALHQLDLLQKTIVIYSSDHGELAMEHRQFYKMSMYEASAHVPLLMMGPGIKAGLQVSNVVSLVDIYPTMLDEKTEVEISKLLAEVHMASGILLEFLCLRT

SEQ ID NO: 78591 - protein, 189 aa, Homo sapiens
MFESFNVPGLYIAVQAVLALAASWTSRQVGERTLTGIVIDSGDGVTHVIPVAEGYVIGSCIKHIPIAGRDITYFIQQLLREREVGIPPEQSLETAKAIKEKYCYICPDIVKEFAKYDVDPQKWIKQYTGINAINQKKFVIDVGYERFLGPEIFFHPEFANPDSMESISDVVDEVIQNCPIDVRRPLYKV

SEQ ID NO: 78592 - protein, 41 aa, Homo sapiens
MPKLKAKPIRTASGIAVVAVMCKPHRCPHISFTGNICVQPP

SEQ ID NO: 78593 - protein, 64 aa, Homo sapiens
MPEGPELHLASQFVNEACRALVFGGCVEKSSVSRNPEVPFESSAYRISASARGKELRLILSPLP

SEQ ID NO: 78594 - protein, 153 aa, Homo sapiens
MFVWLPPSPCLQADGSVAENYWWRGQNTRTLCVGPFPRNVVTSVAGLSAQDISQPLQNSFIHTGHGDSDPRHCWGFPDRIDELYLGNPMDPPDLLSVELSTSRPPQHLGGVKKPTYDPVSEDQDPLSSDFKRLGLRKPGLPRGLWLAKPSARV

SEQ ID NO: 78595 - protein, 115 aa, Homo sapiens
MGLGDIISQQLVERRGLQEHQRGRTLTMVSLGCGFVGPVVGGWYKVLDRFIPGTTKVDALKKMLLDQGGFAPCFLGCFLPLVGALNGLSAQDNWAKLQRDYPDALITNYYLWPAV

SEQ ID NO: 78596 - protein, 232 aa, Homo sapiens
MALNSGSPPAIGPYYENHGYQPENPYPAQPTVVPTVYEVHPAQYYPSPVPQYAPRVLTQASNPVVCTQPKSPSGTVCTSKTKKALCITLTLGTFLVGAALAAGLLWKFMGSKCSNSGIECDSSGTCINPSNWCDGVSHCPGGEDENRCVRLYGPNFILQVYSSQRKSWHPVCQDDWNENYGRAACRDMGYKNNFYSSQGIVDDSGSTSFMKLNTSAGNVDIYKKLYHRRRLE

SEQ ID NO: 78597 - protein, 176 aa, Homo sapiens
MELSQMSELMGLSVLLGLLALMATAAVARGWLRAGEERSGRPACQKANGFPPDKSSGSKKQKQYQRIRKEKPQQHNFTHRLLAAALKSHSGNISCMDFSSNGKYLATCADDRTIRIWSTKDFLQREHRSMRANVELDHATLSLHRLAGQRGHPPCLQDDQAGGWGLHLHSHPRGLP

SEQ ID NO: 78598 - protein, 92 aa, Homo sapiens
GFFDIPVDNLYAEPAVLKWIRENISEWRNCTIVSPDAGGAKRLNVDFALIHKERKKANEVDRMVLVGDVKDRVAILVDDMADTCGTICHAAD

SEQ ID NO: 78599 - protein, 1369 aa, Homo sapiens
MAAAAASGAGGAAGAGTGGAGPAGRLLPPPAPGSPAAPAAVSPAAGQPRPPAPASRGPMPARIGYYEIDRTIGKGNFAVVKRATHLVTKAKVAIKIIDKTQLDEENLKKIFREVQIMKMLCHPHIIRLYQVMETERMIYLVTEYASGGEIFDHLVAHGRMAEKEARRKFKQIVTAVYFCHCRNIVHRDLKAENLLLDANLNIKIADFGFSNLFTPGQLLKTWCGSPPYAAPELFEGKEYDGPKVDIWSLGVVLYVLVCGALPFDGSTLQNLRARVLSGKFRIPFFMSTECEHLIRHMLVLDPNKRLSMEQICKHKWMKLGDADPNFDRLIAECQQLKEERQVDPLNEDVLLAMEDMGLDKEQTLQSLRSDAYDHYSAIYSLLCDRHKRHKTLRLGALPSMPRALAFQAPVNIQAEQAGTAMNISVPQVQLINPENQIVEPDGTLNLDSDEGEEPSPEALVRYLSMRRHTVGVADPRTEVMEDLQKLLPGFPGVNPQAPFLQVAPNVNFMHNLLPMQNLQPTGQLEYKEQSLLQPPTLQLLNGMGPLGRRASDGGANIQLHAQQLLKRPRGPSPLVTMTPAVPAVTPVDEESSDGEPDQEAVQRYLANRSKRHTLAMTNPTAEIPPDLQRQLGQQPFRSRVWPPHLVPDQHRSTYKDSNTLHLPTERFSPVRRFSDGAASIQAFKAHLEKMGNNSSIKQLQQECEQLQKMYGGQIDERTLEKTQQQHMLYQQEQHHQILQQQIQDSICPPQPSPPLQAACENQPALLTHQLQRLRIQPSSPPPNHPNNHLFRQPSNSPPPMSSAMIQPHGAASSSQFQGLPSRSAIFQQQPENCSSPPNVALTCLGMQQPAQSQQVTIQVQEPVDMLSNMPGTAAGSSGRGISISPSAGQMQMQHRTNLMATLSYGHRPLSKQLSADSAEAHSLNVNRFSPANYDQAHLHPHLFSDQSRGSPSSYSPSTGVGFSPTQALKVPPLDQFPTFPPSAHQQPPHYTTSALQQALLSPTPPDYTRHQQVPHILQGLLSPRHSLTGHSDIRLPPTEFAQLIKRQQQQRQQQQQQQQQQEYQELFRHMNQGDAGSLAPSLGGQSMTERQALSYQNADSYHHHTSPQHLLQIRAQECVSQASSPTPPHGYAHQPALMHSESMEEDCSCEGAKDGFQDSKSSSTLTKGCHDSPLLLSTGGPGDPESLLGTVSHAQELGIHPYGHQPTAAFSKNKVPSREPVIGNCMDRSSPGQAVELPDHNGLGYPARPSVHEHHRPRALQRHHTIQNSDDAYVQLDNLPGMSLVAGKALSSARMSDAVLSQSSLMGSQQFQDGENEECGASLGGHEHPDLSDGSQHLNSSCYPSTCITDILLSYKHPEVSFSMEQAGV

SEQ ID NO: 78600 - protein, 79 aa, Homo sapiens
MAAQCVTKVALNVSCANLLDKDIGSKSDPLCVLFLNTSGQQWYEVERTERIKNCLNPQFSKTFIIDYYFEVVQKLKFGV

SEQ ID NO: 78601 - protein, 150 aa, Homo sapiens
MAENSVLTSTTGRTSLADSSIFDSKVTEISKENLLIGSTSYVEEEMPQIETRVILVQEAGKQEELIKALKTIKIMEVPVIKIKESCPGKSDEKLIKSVINMDIKVGFVKMESVEEFEGLDSPEFENVFVVTDFQDSVFNDLYKADCRVIG

SEQ ID NO: 78602 - protein, 85 aa, Homo sapiens
  MOD_RES (1)..(1): Any amino acid
XDIYMIGVSLGAHISGFVGEMYDGWLGRITGFQYFKCDHQRSVYLYLSSLRESCTITAYPCDSYQDYRNGKCVSCGTSQKESCPL

SEQ ID NO: 78603 - protein, 634 aa, Homo sapiens
MQETLRNLASIGEKWKDQNIEDQYKNPRNNLRSLLGERVDENTEENHCGETSSQIPDDTLNKKTSPGVKSCESSVCGEVFVGHSSLNRHIRADTAHKPSEYQEYGQEPYKCQQRKKAFRCHPSFQMQEKAHTGEKLYDCKECGKTFISHSSIQRHMIMHNGDGTYKCKFCGKACPCLSIYLIHERVHTGEKPYKCKQCGKAFSYSTSLQIHERTHTGEKPYECKECGKAFGSPNSLYEHRRTHTGEKPYECKQCGKAFRWFHSFQIHERTHSEEKAYECTKCGKAFKCPSYLCRHEVTHSGKKPCECKQCGKALSYLNFQRHMKMHTRMRPYKCKTVEKPLILPVRFEDMKELTLERNLMNASTVVKPSIVPVPFTIMKGLTLERNPMNVSSVVKPSFLPLPFDIMKGLTLERNRMSVSNVGKPSDLPHTFKCMEGLTLKRNPMNVSSVVKPSFFPLPFDIMKGLTLERNPMSVSNVGKPSHLPHTFKCMKGLTLESNCMNLNNVKKPLDLSETFKFMKRHTLERNPIRNMEKHSTISLPFKYMQQCTEDRMPMNVKSVTKHSYLPRSFEYMQEHTLERNPMNVRNAEKRSIIFLLCVYTKGCTLERNHINVRIVGKHSVCLVPFVDIKGLTLE

SEQ ID NO: 78604 - protein, 914 aa, Homo sapiens
MITSAAGIISLLDEDEPQLKEFALHKLNAVVNDFWAEISESVDKIEVLYEDEGFRSRQFAALVASKVFYHLGAFEESLNYALGAGDLFNVNDNSEYVETIIAKCIDHYTKQCVENADLPEGEKKPIDQRLEGIVNKMFQRCLDDHKYKQAIGIALETRRLDVFEKTILESNDVPGMLAYSLKLCMSLMQNKQFRNKVLRVLVKIYMNLEKPDFINVCQCLIFLDDPQAVSDILEKLVKEDNLLMAYQICFDLYESASQQFLSSVIQNLRTVGTPIASVPGSTNTGTVPGSEKDSDSMETEEKTSSAFVGKTPEASPEPKDQTLKMIKILSGEMAIELHLQFLIRNNNTDLMILKNTKDAVRNSVCHTATVIANSFMHCGTTSDQFLRDNLEWLARATNWAKFTATASLGVIHKGHEKEALQLMATYLPKDTSPGSAYQEGGGLYALGLIHANHGGDIIDYLLNQLKNASNDIVRHGGSLGLGLAAMGTARQDVYDLLKTNLYQDDAVTGEAAGLALGLVMLGSKNAQAIEDMVGYAQETQHEKILRGLAVGIALVMYGRMEEADALIESLCRDKDPILRRSGMYTVAMAYCGSGNNKAIRRLLHVAVSDVNDDVRRAAVESLGFILFRTPEQCPSVVSLLSESYNPHVRYGAAMALGICCAGTGNKVNQFRQLYSKVINDKHDDVMAKFGAILAQGILDAGGHNVTISLQSRTGHTHMPSVVGVLVFTQFWFWFPLSHFLSLAYTPTCVIGLNKDLKMPKVQYKSNCKPSTFAYPAPLEVPKEKEKEKVSTAVLSITAKAKKKEKEKEKKEEEKMEVDEAEKKEEKEKKKEPEPNFQLLDNPARVMPAQLKVLTMPETCRYQPFKPLSIGGIIILKDTSEDIEELVEPVAAHGPKIEEEEQEPEPPEPFEYIDD

SEQ ID NO: 78605 - protein, 156 aa, Homo sapiens
MFSSVAHLARANPFNTPHLQLVHDGLGDLRSSSPGPTGQPRRPRNLAAAAVEEYSCEFGSAKYYALCGFGGVLSCGLTHTAVVPLDLVKCRMQVDPQKYKGIFNGFSVTLKEDGVRGLAKGWAPTFLGYSMQGLCKFGFYEVFKVLYSNMLGEVCN

SEQ ID NO: 78606 - protein, 296 aa, Homo sapiens
MDNSWRLGPAIGLSAGQSQLLVSLLLLLTRVQPGTDVAAPEHISYVPQLSNDTLAGRLTLSTFTLEQPLGQFSSHNISDLDTIWLVVALSNATQSFTAPRTNQDIPAPANFSQRGYYLTLRANRVLYQTRGQLHVLRVGNDTHCQPTKIGCNHPLPGPGPYRVKFLVMNDEGPVAETKWSSDTRLQQAQALRAVPGPQSPGTVVIIAILSILLAVLLTVLLAVLIYTCPSSSPSSPAQVPPLPGSPLGPSPVSVGAVCPWLLPESIAEIWTQDSGLPALGWQHWQQRPLLHREGGQ

SEQ ID NO: 78607 - protein, 235 aa, Homo sapiens
MASRKEGTGSTATSSSSTAGAAGKGKGKGGSGDSAVKQVQIDGLFSGQVSSQKPFLDPPKVVLKIIKHYQEEGQGTEVVQGVLLGLVVEDRLEITNCFPFPQHTEDDADFDEVQYQMEMMRSLRHVNIDHLHVGWYQSTYYGSFVTRALLDSQFSYQHAIEESVVLIYDPIKTAQGSLSLKAYRLTPKLMEVCKEKDFSPEALKKANITFEYMFEEVPIVIKNSHLINVLMWELE

SEQ ID NO: 78608 - protein, 121 aa, Homo sapiens
MWLKVGGLLRGTGGQLGQTVGWPCGALGPGPHRWGPCGGSWAQKFYQDGPGRGLGEEDIRRAREARPRKTPRPQLSDRSRERKVPASRISRLANFGGLAVGLGLGVLAEMAKKSMPGGRLQ

SEQ ID NO: 78609 - protein, 100 aa, Homo sapiens
MKIAVIGQSLFGQEVYCHLRKEGHEVVGVFTVPDKDGKADPLGLEAEKDGVPVFKYSRWRAKGQALPDVVAKYQALGAELNVLPFCSQFIPMEIISAPRH

SEQ ID NO: 78610 - protein, 571 aa, Homo sapiens
SGLIMNYCRNPDAVAAPYCYTRDPGVRWEYCNLTQCSDAEGTAVAPPTVTPVPSLEAPSEQAPTEQRPGVQECYHGNGQSYRGTYSTTVTGRTCQAWSSMTPHSHSRTPEYYPNAGLIMNYCRNPDAVAAPYCYTRDPGVRWEYCNLTQCSDAEGTAVAPPTVTPVPSLEAPSEQAPTEQRPGVQECYHGNGQSYRGTYSTTVTGRTCQAWSSMTPHSHSRTPEYYPNAGLIMNYCRNPDAVAAPYCYTRDPGVRWEYCNLTQCSDAEGTAVAPPTVTPVPSLEAPSEQAPTEQRPGVQECYHGNGQSYRGTYSTTVTGRTCQAWSSMTPHSHSRTPEYYPNAGLIMNYCRNPDAVAAPYCYTRDPGVRWEYCNLTQCSDAEGTAVAPPTVTPVPSLEAPSEQAPTEQRPGVQECYHGNGQSYRGTYSTTVTGRTCQAWSSMTPHSHSRTPEYYPNAGLIMNYCRNPDAVAAPYCYTRDPGVRWEYCNLTQCSDAEGTAVAPPTVTPVPSLEAPSEQAPTEQRPGVQECYHGNGQSYRGTYSTTVTGRTCQAWSSMTPHSHSRTPEYYPNA

SEQ ID NO: 78611 - protein, 111 aa, Homo sapiens
EGDFWAESSMLGLKITYFALMDGKVYDITEWAGCQRVGISPDTHRVPYHISFGSRIPGTRGRQRATPDAPPADLQDFLSRIFQSLQLLPASSDPRPAMGAAPATTPEVSRK

SEQ ID NO: 78612 - protein, 203 aa, Homo sapiens
MEKQYLSQREVDLEAYFTRNHTVLQGTRFKRAIFQGQYCRNFGCCEDRDDGCVTEFYAANALCYCDKFCDRENSDCCPDYKSFCREEKEWPPHTQPWYPEGCFKDGQHYEEGSVIKENCNSCTCSGQQWKCSQHVCLVRSELIEQVNKGDYGWTAQNYSQFWGMTLEDGFKFRLGTLPPSPMLLSMNEMTVSVPSDSRMCMYL

SEQ ID NO: 78613 - protein, 193 aa, Homo sapiens
MRNLKLFRTLEFRDIQGPGNPQCFSLRTEQGTVLIGSEHGLIEVDPVSREVKNEVSLVAEGFLPEDGSGRIVGVQDLLDQESVCVATASGDVILCSLSTQQLECVGSVASGISVMSWSPDQELVLLATGQQTLIMMTKDFEPILEQQIHQDDFGESKFITVGWGRKETQFHGSEGRQAAFQMQMVIVQVLTLQ

SEQ ID NO: 78614 - protein, 101 aa, Homo sapiens
RIQLGAKGIQIKVPGEKDTQKVVVDLSEQEEEKVELKESENLASGDQPRTAAVGEICERCLGSDLWLQTMPPPGLWISYAGMSSSMTWPTWYSRAKQMPGC

SEQ ID NO: 78615 - protein, 125 aa, Homo sapiens
MACRALAAGAAGGSATWRPAQGTSVSLLAVVVIVCGVALVAVFLFLFWKLCWMPWRNKEASSPSSANPPLEALQSPSFRGNMADKLKDPSTLGFLEAAVKISHTSPDIPAEVQMSVKEHIMRHTR

SEQ ID NO: 78616 - protein, 72 aa, Homo sapiens
  MOD_RES (1)..(1): Any amino acid
XENSRTVRSTASHTLHQYCCPTQVLDSMKLTPSGRLAESREEEEEEETEEEEEEDAHQFCCPASECSSPSSR

SEQ ID NO: 78617 - protein, 184 aa, Homo sapiens
SSSMPAGWLAAAWPPKAAPWPTAATPARCRPSWPSSACSARAVGARATTPTALMPLPRASTPTASLPPVSSESSRPSRFKGSRKDEILGIANNRLIRIDLAVGDVVKTWRFSNMRQWNVNWDIRQVAIEFDEHINVAFSCVSASCRIVHEYIGGYIFLSTRERARGEELDEDLFLQLTGGHEAF

SEQ ID NO: 78618 - protein, 58 aa, Homo sapiens
  MOD_RES (1)..(1): Any amino acid
XEAAAGEWRARVRSRSRASLGAPPRPFPGRPRCVARLRCDHHRPAWLGRARGRGAGIF

SEQ ID NO: 78619 - protein, 281 aa, Homo sapiens
  MOD_RES (1)..(1): Any amino acid
XGYIIGNYTSSLGSQVRYACREGFFSVPEDTVSSCTGLGTWESPKLHCQEINCGNPPEMRHAILVGNHSSRLGGVARYVCQEGFESPGGKITSVCTEKGTWRESTLTCTEILTKINDVSLFNDTCVRWQINSRRINPKISYVISIKGQRLDPMESVREETVNLTTDSRTPEVCLALYPGTNYTVNISTAPPRRSMPAVIGFQTAGSRNSHGRNTHIKEVDLLEDDGSFNISIFNETCLKLNRRSRKVGSEHMYQFTVLGQRWYLANFSHATSFNFTTREQV

SEQ ID NO: 78620 - protein, 37 aa, Homo sapiens
  MOD_RES (1)..(1): Any amino acid
XKQHWLEIGPPDLVERKGSLTLRSHHKKYSKPVLVYS

SEQ ID NO: 78621 - protein, 286 aa, Homo sapiens
MGLPVPRPGGGWTQVLGRSHRESFERAGKCGGSSSEESKYSWQREKLASMESPEEPGASMDENYFVNYTFKDRSHSGRVAQGIMKLCLEEELFADVTISVEGREFQLHRLVLSAQSCFFRSMFTSNLKEAHNRVIVLQDVSESVFQLLVDYIYHGTVKLRAEELQEIYEVSDMYQLTSLFEECSRFLARTVQVGNCLQVMWLADRHSDPELYTAAKHCAKTHLAQLQNTEEFLHLPHRLLTDIISDGVPCSQNPTEAIEAWINFNKEEREAFAESLRTSLKVRQIS

SEQ ID NO: 78622 - protein, 413 aa, Homo sapiens
MVDKNIYIIQGEINIVVGAIKRNARWSTHTPLDEERDPLLHSFGHLKEVLNSITELSEIEPNVFLRPFLEVIRSEDTTGPITGLALTSVNKFLSYALIDPTHEGTAEGMENMADAVTHARFVGTDPASDEVVLMKILQVLRTLLLTPVGAHLTNESVCEIMQSCFRICFEMRLSELLRKSAEHTLVDMVQLLFTRLPQFKEEPKNYVGTNMKKLKMRAGGMSDSSKWKKQKRSPRPPRHMTKVTPGSELPTPNGTTLSSNLTGGMPFIDVPTPISSASSEAASAVVSPSTDSGLEFSSQTTSKEDLTDLEQPGSPGYSTATEPGSSELGVPEQPDLQEGTHVEKSQSASVESIPEVLEECTSPADHSDSASVHDMDYVNPRGVRFTQSSQKEATQHRATKPLCCFPASMLPTV

SEQ ID NO: 78623 - protein, 104 aa, Homo sapiens
MSIHIVALGNEGDTFHQDNRPSGLIRTYLGRSPLVSGDESSLLLNAASTVARPVFTEYQASAFGNVKLVVHDCPVWVRKSSCSALRLKKLFFPFFSPSPFCPLP

SEQ ID NO: 78624 - protein, 152 aa, Homo sapiens
MFPEPPTPGPPSPDTPPDSSRISHGPVPPWALATIVLVSGLLIFSCCFCLYRKSCRRRTGKKSQAQAQVHLQEVKGLGQSYIDKVQPEVEELEPAPSGPGQQVADKHELGRLQYSLDYDFQSGQLLVGILQAMGLAALDLGGSSDPYVRVYL

SEQ ID NO: 78625 - protein, 1121 aa, Homo sapiens
MASLTAYDKDVSSGSYNLSSATTGSYYSCVSQITIGYDVAGPVAIGLTHWKNPYVQGRPTLPSDLPLFVSKDAGIPVYHRSFTRKTDQATPLSCPASLSITPVPSYSSSSQETLSQDTTGLSLSIHGAEKRLQIHQRRSVASRPASRRRLPVVRHSSLPPGRRSIKMEASSSGITNGKTKVFHPEGGVDLQGYQLDMQILPDGPKSDVDFSEILNAIQEMAKDVNILFDELEAVSSPCKDDDSLLHPGNLTSTSDDASRLEAGGETVPERNKSNGLYFRDGKCRIDYILVYRKSNPQTEKREVFERNIRAEGLQMEKESSLINSDIIFVKLHAPWEVLGRYAEQMNVRMPFRRKIYYLPRRYKFMSRIDKQISRFRRWLPKKPMRLDKETLPDLEENDCYTAPFSQQRIHHFIIHNKETFFNNATRSRIVHHILQRIKYEEGKNKIGLNRLLTNGSYEAAFPLHEGSYRSKNSIRTHGAENHRHLLYECWASWGVWYKYQPLDLVRRYFGEKIGLYFAWLGWYTGMLFPAAFIGLFVFLYGVTTLDHSQVSKEVCQATDIIMCPVCDKYCPFMRLSDSCVYAKVTHLFDNGATVFFAVFMAVWATVFLEFWKRRRAVIAYDWDLIDWEEEEEEIRPQFEAKYSKKERMNPISGKPEPYQAFTDKCSRLIVSASGIFFMICVVIAAVFGIVIYRVVTVSTFAAFKWALIRNNSQVATTGTAVCINFCIIMLLNVLYEKVALLLTNLEQPRTESEWENSFTLKMFLFQFVNLNSSTFYIAFFLGRFTGHPGAYLRLINRWRLEECHPSGCLIDLCMQMGIIMVLKQTWNNFMELGYPLIQNWWTRRKVRQEHGPERKISFPQWEKDYNLQPMNAYGLFDEYLEMILQFGFTTIFVAAFPLAPLLALLNNIIEIRLDAYKFVTQWRRPLASRAKDIGIWYGILEGIGILSVITNAFVIAITSDFIPRLVYAYKYGPCAGQGEAGQKCMVGYVNASLSVFRISDFENRSEPESDGSEFSGTPLKYCRYRDYRDPPHSLVPYGYTLQFWHVLAARLAFIIVFEHLVFCIKHLISYLIPDLPKDLRDRMRREKYLIQEMMYEAELERLQKERKERKKNGKAHHNEWP

SEQ ID NO: 78626 - protein, 82 aa, Homo sapiens
MLSEQTAALGTGWESMNVQLDGAEPQVERGSQEERPWRTVPGPLEHLCCDLEEEPQSLQEKGFPIPKLDMLSQLEGGEEQWV

SEQ ID NO: 78627 - protein, 731 aa, Homo sapiens
MPTGFVAPILCVLLPSPTREAATVASATGDSASERESAAPAAAPTAEAPPPSVVTRPEPQALPSPAIRAPLPDLYPFGTMRGGGFGDRDRDRDRGGFGARGGGGLPPKKFGNPGERLRKKKWDLSELPKFEKNFYVEHPEVARLTPYEVDELRRKKEITVRGGDVCPKPVFAFHHANFPQYVMDVLMDQHFTEPTPIQCQGFPLALSGRDMVGIAQTGSGKTLAYLLPAIVHINHQPYLERGDGPICLVLAPTRELAQQVQQVADDYGKCSRLKSTCIYGGAPKGPQIRDLERGVEICIATPGRLIDFLESGKTNLRRCTYLVLDEADRMLDMGFEPQIRKIVDQIRPDRQTLMWSATWPKEVRQLAEDFLRDYTQINVGNLELSANHNILQIVDVCMESEKDHKLIQLMEEIMAEKENKTIIFVETKRRCDDLTRRMRRDGWPAMCIHGDKSQPERDWVLNEFRSGKAPILIATDVASRGLDVEDVKFVINYDYPNSSEDYVHRIGRTARSTNKGTAYTFFTPGNLKQARELIKVLEEANQAINPKLMQLVDHRGGGGGGGKGGRSRYRTTSSANNPNLMYQDECDRRLRGVKDGGRRDSASYRDRSETDRAGYANGSGYGSPNSAFGAQAGQYTYGQGTYGAAAYGTSSYTAQEYGAGTYGASSTTSTGRSSQSSSQQFSGIGRSGQQPQPLMSQQFAQPPGATNMIGYMGQTAYQYPPPPPPPPPSRK

SEQ ID NO: 78628 - protein, 181 aa, Homo sapiens
MASQKRPSQRHGSKYLATASTMDHARHGFLPRHRDTGILDSIGRFFGGDRGAPKRGSGKDSHHPARTAHYGSLPQKSHGRTQDENPVVHFFKNICSPRFSVSFQVTPRTPPPSQGKGRGLSLSRFSWGAEGQRPGFGYGGRASDYKSAHKGFKGVDAQGTLSKIFKLGGRDSRSGSPMARR

SEQ ID NO: 78629 - protein, 53 aa, Homo sapiens
VMQLLGKIETASSEQTSNLKMVQGDYRHEMNLLEFKKSLKIKWKKNCCSFQAK

SEQ ID NO: 78630 - protein, 184 aa, Homo sapiens
MSSYNSLAKLEAGTVTKCNFTGDGKTGASWTDNIMAQKCSKGAAAEIREQGDGAEDEEWPEEIQQQIVRETFHLVLKRDDNICNFLEGGSLIGGSDYKLIYRHYATLYFVFCVDSSESELGILDLIQVFVETLDKCFENVCELDLIFHMDKVHYILQEVVMGGMVLETNMNEIVAQIEAQNRLE

SEQ ID NO: 78631 - protein, 1166 aa, Homo sapiens
MCVNPTPGGTISRASRDLLKEFPQPKNLLNSVIGRALGISHAKDKLVYVHTNGPKKKKVTLHIKWPKSVEVEGYGSKKIDAERQAAAAACQLFKGWGLLGPRNELFDAAKYRVLADRFGSPADSWWRPEPTMPPTSWRQLNPESIRPGGPGGLSRSLGREEEEDEEEELEEGTIDVTDFLSMTQQDSHAPLRDSRGSSFEMTDDDSAIRALTQFPLPKNLLAKVIQIATSSSTAKNLMQFHTVGTKTKLSTLTLLWPCPMTFVAKGRRKAEAENKAAALACKKLKSLGLVDRNNEPLTHAMYNLASLRELGETQRRPCTIQVPEPILRKIETFLNHYPVESSWIAPELRLQSDDILPLGKDSGPLSDPITGKPYVPLLEAEEVRLSQSLLELWRRRGPVWQEAPQLPVDPHRDTILNAIEQHPVVVISGDTGCGKTTRIPQLLLERYVTEGRGARCNVIITQPRRISAVSVAQRVSHELGPSLRRNVGFQVRLESKPPSRGGALLFCTVGILLRKLQSNPSLEGVSHVIVDEVHERDVNTDFLLILLKGLQRLNPALRLVLMSATGDNERFSRYFGGCPVIKVPGFMYPVKEHYLEDILAKLGKHQYLHRHRHHESEDECALDLDLVTDLVLHIDARGEPGGILCFLPGWQEIKGVQQRLQEALGMHESKYLILPVHSNIPMMDQKAIFQQPPVGVRKIVLATNIAETSITINDIVHVVDSGLHKEERYDLKTKVSCLETVWVSRANVIQRRGRAGRCQSGFAYHLFPRSRLEKMVPFQVPEILRTPLENLVLQAKIHMPEKTAVEFLSKAVDSPNIKAVDEAVILLQEIGVLDQREYLTTLGQRLAHISTDPRLAKAIVLAAIFRCLHPLLVVVSCLTRDPFSSSLQNRAEVDKVKALLSHDSGSDHLAFVRAVAGWEEVLRWQDRSSRENYLEENLLYAPSLRFIHGLIKQFSENIYEAFLVGKPSDCTLASAQCNEYSEEEELVKGVLMAGLYPNLIQVRQGKVTRQGKFKPNSVTYRTKSGNILLHKSTINREATRLRSRWLTYFMAVKSNGSVFVRDSSQVHPLAVLLLTDGDVHIRDDGRRATISLSDSDLLRLEGDSRTVRLLKELRRALGRMVERSLRSELAALPPSVQEEHGQLLALLAELLRGPCGSFDVRKTADD

SEQ ID NO: 78632 - protein, 123 aa, Homo sapiens
MVDRSKLLPTSLQNEFIPKEVLLSLTYAANAGPCPENLLPPKKIKTPKGTLPRLVDHVWHHPVRRNKFKYLIDHPVSLTGAGRDISFLYDVTYAKGQTREKAVCPPHLARSLQSHDGVIVPHK

SEQ ID NO: 78633 - protein, 78 aa, Homo sapiens
MYLQVETRTSSRLHLKRAPGIRSWSLLVGILSIGLAAAYYSGDSLGWKLFYVTGCLFVAVQNLEDWESWPRPGGGPAP

SEQ ID NO: 78634 - protein, 184 aa, Homo sapiens
VKEAQDPEDEIAVLAFLVEIGRMNWPPPLAPCRLSQDPSLPFQAGTQVNEGFQPLVEALSNIPKPEMSTTMAESSLLDLLPKEEKLRHYFRYLGSLTTPTCDEKVVWTVFREPIQLHREQILAFSQKLYYDKEQTVSMKDNVRPLQQLGQRTVIKSGAPGRPLPWALPALLGPMLACLLAGFLR

SEQ ID NO: 78635 - protein, 149 aa, Homo sapiens
MEPLCPLLLVGFSLPLARALRGNETTADSNETTTTSGPPDPGASQPLLAWLLLPLLLLLLVLLLAAYFFRFRKQRKAVVSTSDKKMPNGILEEQAKGDAAQQVTLRAQEVFSHPRGAPGGGDPYQIRRRLQAVSGGVQLIAIWTHTRNF

SEQ ID NO: 78636 - protein, 209 aa, Homo sapiens
MNNHGNYIVRLGHLVSWMGEQAEALGVEVYPGYAAAEVLFHDDGSVKGIATNDVGIQKDGAPKATFERGLELHAKVTIFAEGCHGHLAKQLYKKFDLRANCEPQTYGIGLKELWVIDEKNWKPGRVDHTVGWPLDRHTYGGSFLYHLNEGEPLVALGLVVGLDYQNPYLSPFREFQRWKHHPSIRPTLEGGKRIAYGARALNEGGFQEE

SEQ ID NO: 78637 - protein, 60 aa, Homo sapiens
MSSTQGNGEHWKSLESVGISRKELAMAEALQMEYDALSRLRHDKEENRAKQNADPSLISW

SEQ ID NO: 78638 - protein, 2395 aa, Homo sapiens
MAAEEGVASAASAGGSWGTAAMGRVLPMLLVPVPAEAMGQLGSRAQLRTQPEALGSLTAAGSLQVLSLTPGSRGGGRCCLEGPFWHFLWEDSRNSSTPTEKPKLLALGENYELLIYEFNLKDGRCDATILYSCSREALQKLIDDQDISISLLSLRILSFHNNTSLLFINKCVILHIIFPERDAAIRVLNCFTLPLPAQAVDMIIDTQLCRGILFVLSSLGWIYIFDVVDGTYVAHVDLALHKEDMCNEQQQEPAKISSFTSLKVSQDLDVAVIVSSSNSAVALNLNLYFRQHPGHLLCERILEDLPIQGPKGVDEDDPVNSAYNMKLAKFSFQIDRSWKAQLSSLNETIKNSKLEVSCCAPWFQDILHLESPESGNHSTSVQSWAFIPQDIMHGQYNVLQKDHAKTSDPGRSWKIMHISEQEEPIELKCVSVTGFTALFTWEVERMGYTITLWDLETQGMQCFSLGTKCIPVDSSGDQQLCFVLTENGLSLILFGLTQEEFLNRLMIHGSASTVDTLCHLNGWGRCSIPIHALEAGIENRQLDTVNFFLKSKENLFNPSSKSSVSDQFDHLSSHLYLRNVEELIPALDLLCSAIRESYSEPQSKHFSEQLLNLTLSFLNNQIKELFIHTEELDEHLQKGVNILTSYINELRTFMIKFPWKLTDAIDEYDVHENVPKVKESNIWKKLSFEEVIASAILNNKIPEAQTFFRIDSHSAQKLEELIGIGLNLVFDNLKKNNIKEASELLKNMGFDVKGQLLKICFYTTNKNIRDFLVEILKEKNYFSEKEKRTIDFVHQVEKLYLGHFQENMQIQSFPRYWIKEQDFFKHKSVLDSFLKYDCKDEFNKQDHRIVLNWALWWDQLTQESILLPRISPEEYKSYSPEALWRYLTARHDWLNIILWIGEFQTQHSYASLQQNKWPLLTVDVINQNTSCNNYMRNEILDKLARNGVFLASELEDFECFLLRLSRIGGVIQDTLPVQNYKTKEGWDFHSQFILYCLEHSLQHLLYVYLDCYKLSPENCPFLEKKELHEAHPWFEFLVQCRQVASNLTDPKLIFQASLANAQILIPTNQASVSSMLLEGHTLLALATTMYSPGGVSQVVQNEENENCLKKVDPQLLKMALTPYPKLKTALFPQCTPPSVLPSDITIYHLIQSLSPFDPSRLFGWQSANTLAIGDAWSHLPHFSSPDLVNKYAIVERLNFAYYLHNGRPSFAFGTFLVQELIKSKTPKQLIQQVGNEAYVIGLSSFHIPSIGAACVCFLELLGLDSLKLRVDMKVANIILSYKCRNEDAQYSFIRESVAEKLSKLADGEKTTTEELLVLLEEGTWNSIQQQEIKRLSSESSSQWALVVQFCRLHNMKLSISYLRECAKANDWLQFIIHSQLHNYHPAEVKSLIQYFSPVIQDHLRLAFENLPSVPTSKMDSDQVCNKCPQELQGSKQEMTDLFEILLQCSEEPDSWHWLLVEAVKQQAPILSVLASCLQGASAISCLCVWIITSVEDNVATEAMGHIQDSTEDHTWNLEDLSVIWRTLLTRQKSKTLIRGFQLFFKDSPLLLVMEMYELCMFFRNYKEAEAKLLEFQKSLETLNTAATKVHPVIPAMWLEDQVCFLLKLMLQQCKTQYELGKLLQLFVEREHLFSDGPDVKKLCILCQILKDTSIAINHTIITSYSIENLQHECRSILERLQTDGQFALARRVAELAELPVDNLVIKEAHVACEHPTGWSSMEERHLLLTLAGHWLAQEDVVPLDKLEELEKQIWLCRITQHTLGRNQEETEPRFSRQISTSGELSFDSLASEFSFSKLAALNTSKYLELNSLPSKETCENRLDWKEQESLNFLIGRLLDDGCVHEASRVCRYFHFYNPDVALVLHCRALASGEASMEDLHPEIHALLQSAELLEEEAPDIPLRRVHSTSSLDSQKFVTVPSSNEVVTNLEVLTSKCLHGKNYCRQVLCLYDLAKELGCSYTDVAAQDGEAMLRKILASQQPDRCKRAQAFISTQGLKPDTVAELVAEEVTRELLTSSQGTGHKQMFNPTEESQTFLQLTTLCQDRTLVGMKLLDKISSVPHGELSCTTELLILAHHCFTLTCHMEGIIRVLQAAHMLTDNHLAPSEEYGLVVRLLTGIGRYNEMTYIFDLLHKKHYFEVLMRKKLDPSGTLKTALLDYIKRCRPGDSEKHNMIALCFSMCREIGENHEAAARIQLKLIESQPWEDSLKDGHQLKQLLLKALTLMLDAAESYAKDSCVRQAQHCQRLTKLITLQIHFLNTGQNTMLINLGRHKLMDCILALPRFYQASIVAEAYDFVPDWAEILYQQVILKGDFNYLEEFKQQRLLKSSIFEEISKKYKQHQPTDMVMENLKKLLTYCEDVYLYYKLAYEHKFYEIVNVLLKDPQTGCCLKDMLAG

SEQ ID NO: 78639 - protein, 79 aa, Homo sapiens
MAASKKAVLGPLVGAVDQGTSSTRFLVFNSKTAELLSHHQVEIKQEFPREGYWCQQPEGNHCSLGQDNWRASLQCCGVA

SEQ ID NO: 78640 - protein, 92 aa, Homo sapiens
MDDFISISLLSLAMLVGCYVAGIIPLAVNFSEERLKLVTVLGAGLLCGTALAVIVPEGVHALYEDILEGVENNRQSEGLHAKGRRHLGIFSS

SEQ ID NO: 78641 - protein, 147 aa, Homo sapiens
  MOD_RES (1)..(1): Any amino acid
XRTEKERERQAKLAEEKMRKEEEEAKKRAEDDAKKKKVLSNMGAHFGGYLVKAEQKRGKRQTGREMKVRILSERKKPLDIDYMGEEQLREKAQELSDWIHQLESEKFDLMAKLKQQKYEINVLYNRISHAQKFRKGAGKGRVGGRWK

SEQ ID NO: 78642 - protein, 126 aa, Homo sapiens
  MOD_RES (1)..(1): Any amino acid
XPELRAAALKLTLASVREREPFKGWIRDVRVNSSQVLPVDSGEVKLDDEPPNSGGGSPCEAGEEGEGGVCLNGGVCSVVDDQAVCDCSRTGFRGKDCSQGLAHLMMGDQGMGSVPFPLCFQCFLVL

SEQ ID NO: 78643 - protein, 105 aa, Homo sapiens
MGKKGKKEKKGRGAEKTAAKMEKKVSKRSRKEEEDLEALIAHFQTLDAKRTQTVELPCPPPSPRLNASLSVHPEKDELILFGERTPGPKLTSPVHLRGAVLTRRW

SEQ ID NO: 78644 - protein, 560 aa, Homo sapiens
MWAVLRLALRPCARASPAGPRAYHGDSVASLGTQPDLGSALYQENYKQMKALVNQLHERVEHIKLGGGEKARALHISRGKLLPRERIDNLIDPGSPFLELSQFAGYQLYDNEEVPGGGIITGIGRVSGVECMIIANDATVKGGAYYPVTVKKQLRAQEIAMQNRLPCIYLVDSGGAYLPRQADVFPDRDHFGRTFYNQAIMSSKNIAQIAVVMGSCTAGGAYVPAMADENIIVRKQGTIFLAGPPLVKAATGEEVSAEDLGGADLHCRKSGVSDHWALDDHHALHLTRKVVRNLNYQKKLDVTIEPSEEPLFPADELYGIVGANLKRSFDVREKFFMKYFLRLDLNSYNSTWQHGFARIFGYPVGIVGNNGVLFSESAKKGTHFVQLCCQRNIPLLFLQNITGFMVGREYEAEGIAKDGAKMVAAVACAQVPKITLIIGGSYGAGNYGMCGRAYSPRFLYIWPNARISVMGGEQAANVLATITKDQRAREGKQFSSADEAALKEPIIKKFEEEGNPYYSSARVWDDGIIDPADTRLVLGLSFSAALNAPIEKTDFGIFRM

SEQ ID NO: 78645 - protein, 60 aa, Homo sapiens
MFILGFAGCIGALRENTFLLKFFSVFLGIIFFLELTAGVLAFVFKDWIKDQLYFFINNNI

SEQ ID NO: 78646 - protein, 120 aa, Homo sapiens
MSSSGAKDKPELQFPFLQDEDTVATLLECKTLFILRGLPGSGKSTLARVIVDKYRDGTKMVSADAYKITPGARGAFSEEYKRLDEDLAAYCRRRDIRILVLDDTNHERERLEQLFEMADQ

SEQ ID NO: 78647 - protein, 80 aa, Homo sapiens
MAENSGPGVRPPGWEAQINIISTRLALAHTAPAAGEAGGSCLRWEPHCQQPLPDRVPSTAILPPRLNGPWISTGCEVRPG

SEQ ID NO: 78648 - protein, 180 aa, Homo sapiens
MNSASVDGHLSGCRLFLFLSPLFRFYCDYCDTYLTHDSPSVRKTHCSGRKHKENVKDYYQKWMEEQAQSLIDKTTAAFQQGKIPPTPFSAPPPAGAMIPPPPSLPGPPRPGMMPAPHMGGPPMMPMMGPPPPGMMPVGPAPGMRPPMGGHMPMMPGPPMMRPPARPMMVPTRPGMTRPDR

SEQ ID NO: 78649 - protein, 110 aa, Homo sapiens
MSGMEATVTIPIWQNKPHGAARSVVRRIGTNLPLKPCARASFETLPNISDLCLRDVPPVPTLADIAWIAADEEETYARVRSDTRPLRHTWKPSPLIVMQRNASVPNLRGS

SEQ ID NO: 78650 - protein, 159 aa, Homo sapiens
  MOD_RES (1)..(1): Any amino acid
XDTLTADVIGRRVEVNGEHATVRFAGVVPPVAGPWLGVEWDNPERGKHDGSHEGTVYFKCRHPTGGSFIRPNKVNFGTDFLTAIKNRYVLEDGPEEDRKEQIVTIGNKPVETIGFDSIMKQQRCCGVSRGAQAWRNSTLSLTTFSFPKGQQMFSRQSSY

SEQ ID NO: 78651 - protein, 105 aa, Homo sapiens
MAPSGSLAVPLAVLVLLLWGAPWTHGRRSNVRVITDENWRELLEGDWMIEFYAPWCPACQNLQPEWESFAEWGEDLEVNIAKVDVTEQPGLSGRFIITALPTIYQ

SEQ ID NO: 78652 - protein, 149 aa, Homo sapiens
MAFASWWYKTHVSEKTSESPSKPGEKKGSDEKKAASLGSSQSSRTYAGGTASATKVSASSGATSKSSSMNPTETKAIPVSQQMEGPHLPNKKKHKKQAVKTEPEKKSQSTKPKSLPKQASDTGSNDAHNKKAVSRSAEQQPSEKSTEPK

SEQ ID NO: 78653 - protein, 53 aa, Homo sapiens
MENQAHNTMGLKCKTSITTCLSSLSDWTYTSSLENASASLKKNSVVRALTNLS

SEQ ID NO: 78654 - protein, 278 aa, Homo sapiens [sequence omitted]

SEQ ID NO: 78655 - protein, 209 aa, Homo sapiens
RFAINKEEEILLSDMNKQLTSISEEVMDLAKHLPHAFSKLENPRRVSILLKDISENLYSLRRMIIGSTNIETELRPSNNLNLLSFEDSTTGGVQQKQIREHEVLIHVEDETWDPTLDHLAKHDGEDVLGNKVERKEDGFEDGVEDNKLKENMERACLMSLDITEHELQILEQQSQEEYLSDIAYKSTEHLSPNDNENDTSYVIESDEDL

SEQ ID NO: 78656 - protein, 171 aa, Homo sapiens
MATVMAATAAERAVLEEEFRWLLHDEVHAVLKQLQDILKLMDAVMLQLTRARNRLTTPATLTLPEIAASGLTRMFAPALPSDLLVNVYINLNKLCLTVYQLHALQPNSTKNFRPAGGAVLHSPGAMFEWGSQRLEVSHVHKVECVIPWLNDALVYFTVSLQLCQQLKDKVG

SEQ ID NO: 78657 - protein, 1539 aa, Homo sapiens
MEAATTLHPGPRPALPLGGPGPLGEFLPPPECPVFEPSWEEFADPFAFIHKIRPIAEQTGICKDWQPPFACDVDKLHFTPRIQRLNELEAQTRVKLNFLDQIAKYWELQGSTLKIPHVERKILDLFQLNKLVAEEGGFAVVCKDRKWTKIATKMGFAPGKAVGSHIRGHYERILNPYNLFLSGDSLRCLQKPNLTTDTKDKEYKPHDIPQRQSVQPSETCPPARRAKRMRAEAMNIKIEPEETTEARTHNLRRRMGCPTPKCENEKEMKSSIKQEPIERKDYIVENEKEKPKSRSKKATNAVDLYVCLLCGSGNDEDRLLLCDGCDDSYHTFCLIPPLHDVPKGDWRCPKCLAQECSKPQEAFGFEQAARDYTLRTFGEMADAFKSDYFNMPVHMVPTELVEKEFWRLVSTIEEDVTVEYGADIASKEFGSGFPVRDGKIKLSPEEEEYLDSGWNLNNMPVMEQSVLAHITADICGMKLPWLYVGMCFSSFCWHIEDHWSYSINYLHWGEPKTWYGVPGYAAEQLENVMKKLAPELFVSQPDLLHQLVTIMNPNTLMTHEVPVYRTNQCAGEFVITFPRAYHSGFNQGFNFAEAVNFCTVDWLPLGRQCVEHYRLLHRYCVFSHDEMICKMASKADVLDVVVASTVQKDMAIMIEDEKALRETVRKLGVIDSERMDFELLPDDERQCVKCKTTCFMSAISCSCKPGLLVCLHHVKELCSCPPYKYKLRYRYTLDDLYPMMNALKLRAESYNEWALNVNEALEAKINKKKSLVSFKALIEESEMKKFPDNDLLRHLRLVTQDAEKCASVAQQLLNGKRQTRYRSGGGKSQNQLTVNELRQFVTQLYALPCVLSQTPLLKDLLNRVEDFQQHSQKLLSEETPSAAELQDLLDVSFEFDVELPQLAEMRIRLEQARWLEEVQQACLDPSSLTLDDMRRLIDLGVGLAPYSAVEKAMARLQELLTVSEHWDDKAKSLLKARPRHSLNSLATAVKEIEEIPAYLPNGAALKDSVQRARDWLQDVEGLQAGGRVPVLDTLIELVTRGRSIPVHLNSLPRLETLVAEVQAWKECAVNTFLTENSPYSLLEVLCPRCDIGLLGLKRKQRKLKEPLPNGKKKSTKLESLSDLERALTESKETASAMATLGEARLREMEALQSLRLANEGKLLSPLQDVDIKICLCQKAPAAPMIQCELCRDAFHTSCVAVPSISQGLRIWLCPHCRRSEKPPLEKILPLLASLQRIRVRLPEGDALRYMIERTVNWQHRAQQLLSSGNLKFVQDRVGSGLLYSRWQASAGQVSDTNKVSQPPGTTSFSLPDDWDNRTSYLHSPFSTGRSCIPLHGVSPEVNELLMEAQLLQVSLPEIQELYQTLLAKPSPAQQTDRSSPVRPSSEKNDCCRGKRDGINSLERKLKRRLEREGLSSERWERVKKMRTPKKKKIKLSHPKDMNNFKLERERSYELVRSAETHSLPSDTSYSEQEDSEDEDAICPAVSCLQPEGDEVDWVQCDGSCNQWFHQVCVGVSPEMAEKEDYICVRCTVKDAPSRK

SEQ ID NO: 78658 - protein, 87 aa, Homo sapiens
MSPAFRAMDVEPRAKGVLLEPFVHQVGGHSCVLRFNETTLCKPLVPREHQFYETLPAEMRKFTPQYKGVVSVRFEEDEDRNLCLIAY

SEQ ID NO: 78659 - protein, 63 aa, Homo sapiens
MNLTEGPLAMAEMDPTQGRVVFEDVAIYFSQEEWGHLDEAQRLLYRDVMLENLALLSSLAFLF

SEQ ID NO: 78660 - protein, 58 aa, Homo sapiens
MIAAPEIPTDFNLLQESETHFSSDTDFEDIEGKNQKQGKGKHLFFKMNFGFILSHDIL

SEQ ID NO: 78661 - protein, 78 aa, Homo sapiens
MRDSAEGPKEDEEKPSASALEQPATLQEVASQEVPPELATPAPAWEPQPEPDERLEAAACEVNDLGEEEEEEEEEDEE

SEQ ID NO: 78662 - protein, 180 aa, Homo sapiens
LRRRFGDVFSLQLAWTPVVVLNGLAAVREAMVTRGEDTADRPPVPITQILGFGPRSQGRPFRPNGLLDKAVSNVIASLTCGRRFEYDDPRFLRLLDLAQEGLKEESGFLREVLNAVPVLLHIPALAGKVLRFQKAFLTQLDELLTEHRMTWDPAQPPRDLTEAFLAEMEKWWLTCSLPGW

SEQ ID NO: 78663 - protein, 206 aa, Homo sapiens
  MOD_RES (1)..(1): Any amino acid
XKQQLELERQAWEAGRTRKEAWLLNREQELREEIRKGRDKEIELVIHRLEADMALAKEESEKAAESRIKRLRDKYEAELSELEQSERKLQERCSELKGQLGEAEGENLRLQGLVRQKERALEDAQAVNEQLSSERSNLAQVIRQEFEDRLAASEEETRQAKAELATLQARQQLELEEVHRRVKTALARKEEAVSSLRTQHEAAVKR

SEQ ID NO: 78664 - protein, 50 aa, Homo sapiens
MPRKGTQPSTARRREEGPPPPSPDGASSDAEPEPPSGRTESPATAAETAR

SEQ ID NO: 78665 - protein, 93 aa, Homo sapiens
MLRYPYFCRMYKECLSCWLESGIPNLGVWPNRIHTTAEKYREYEAREQTDQTQAQELHRSQDRDFETMAKLHIPVMVDEVVHCLSPQKGQQKK

SEQ ID NO: 78666 - protein, 94 aa, Homo sapiens
  MOD_RES (1)..(1): Any amino acid
XGMEEATVVIEHCTSCRVYGRNAAALSQALRLEAPELPVKVNPTKPRRGSFEVTLLRPDGSSAELWTGIKKGPPRKLKFPEPQEVVEELKKYLS

SEQ ID NO: 78667 - protein, 102 aa, Homo sapiens
MDLDLLDLNPRIIAAIKKAKLKSVKEVLHFSGPDLKRLTNLSSPEVWHLLRTASLHLRGSSILTALQLHQQKERFPTQHQRLSLGCPVLDALLRGGLPLDGI

SEQ ID NO: 78668 - protein, 195 aa, Homo sapiens
MHSEGLRMSQEDLDQPHLDCLGCALNQNGVHVILFDISSPAQTIPEGIKFIQGDIRHLSDVEKAFQDADVTCVFHIASYGMSGREQLNRNLIKEVNVRGTDNILQVCQRRRVPRLVYTSTFNVIFGGQVIRNGDESLPYLPLHLHPDHYSRTKSIAEQKVLEANATPLDRGDGVLRTCALRPAGIYGPGEQRHLP

SEQ ID NO: 78669 - protein, 133 aa, Homo sapiens
MPSPDSMTFEDIIVDFTQEEWALLDTSQRKLFQDVMLENISHLVSIGKQLCKSVVLSQLEQVEKLSTQRISLLQGREVGIKHQEIPFIQHIYQKGTSTISTMRSHTQEDPFLCNDLGEDFTQHIALTQNVITY

SEQ ID NO: 78670 - protein, 108 aa, Homo sapiens
MGPSCPVFLSFTKLSLWWLLLTPAGGEEAKRPPPRAPGDPLSSPSPTALPQGGSHTETEDRLFKHLFRGYNRWARPVPNTSDVVIVRFGLSIAQLIDVDEKNQMMTTN

SEQ ID NO: 78671 - protein, 133 aa, Homo sapiens
  MOD_RES (1)..(1): Any amino acid
XNKYGLDYLKNQPARVCEHCFQELQKLDHQHSPRIGSPGNHKSPSSALSSVLHSIPSGRKQKKIPAALKEVSANTEDSSMSGYLYRSKGNKKPWKHFWFVIKNKVLYTYAASEVDRSISGRHNIVAVLVSSLL

SEQ ID NO: 78672 - protein, 46 aa, Homo sapiens
ELYIAVGISGAIQHLAGMKDSKLPGLYHVPILDILASSAHLSEEPL

SEQ ID NO: 78673 - protein, 23 aa, Homo sapiens
MQGILLLVFAKYQHLPYIQILST

SEQ ID NO: 78674 - protein, 2880 aa, Homo sapiens
MRKKELSATKKDRVNHCLTICENIVAQSVRNSPEFQKLLGIAMELFLLCSDDAESDVRMVADECLNKVIKALMDSNLPRLQLELYKEIKKNGAPRSLRAALWRFAELAHLVRPQKCRPYLVNLLPCLTRTSKRPEESVQETLAAAVPKIMASFGNFANDNEIKVLLKAFIANLKSSSPTIRRTAAGSAVSICQHSRRTQYFYSWLLNVLLGLLVPVEDEHSTLLILGVLLTLRYLVPLLQQQVKDTSLKGSFGVTRKEMEVSPSAEQLVQVYELTLHHTQHQDHNVVTGALELLQQLFRTPPPELLQTLTAVGGIGQLTAAKEESGGRSRSGSIVELIAGGGSSCSPVLSRKQKGKVLLGEEEALEDDSESRSDVSSSALTASVKDEISGELAASSGVSTPGSAGHDIITEQPRSQHTLQADSVDLASCDLTSSATDGDEEDILSHSSSQVSAVPSDPAMDLNDGTQASSPISDSSQTTTEGPDSAVTPSDSSEIVLDGTDNQYLGLQIGQPQDEDEEATGILPDEASEAFRNSSMALQQAHLLKNMSHCRQPSDSSVDKFVLRDEATEPGDQENKPCRIKGDIGQSTDDDSAPLVHCVRLLSASFLLTGGKNVLVPDRDVRVSVKALALSCVGAAVALHPESFFSKLYKVPLDTTEYPEEQYVSDILNYIDHGDPQVRGATAILCGTLICSILSRSRFHVGDWMGTIRTLTGNTFSLADCIPLLRKTLKDESSVTCKLACTAVRNCVMSLCSSSYSELGLQLIIDVLTLRNSSYWLVRTELLETLAEIDFRLVSFLEAKAENLHRGAHHYTGLLKLQERVLNNVVIHLLGDEDPRVRHVAAASLIRLVPKLFYKCDQGQADPVVAVARDQSSVYLKLLMHETQPPSHFSVSTITRIYRGYNLLPSITDVTMENNLSRVIAAVSHELITSTTRALTFGCCEALCLLSTAFPVCIWSLGWHCGVPPLSASDESRKSCTVGMATMILTLLSSAWFPLDLSAHQDALILAGNLLAASAPKSLRSSWASEEEANPAATKQEEVWPALGDRALVPMVEQLFSHLLKVINICAHVLDDVAPGPAIKAALPSLTNPPSLSPIRRKGKEKEPGEQASVPLSPKKGSEASAASRQSDTSGPVTTSKSSSLGSFYHLPSYLKLHDVLKATHANYKVTLDLQNSTEKFGGFLRSALDVLSQILELATLQDIGKCVEEILGYLKSCFSREPMMATVCVQQLLKTLFGTNLASQFDGLSSNPSKSQGRAQRLGSSSVRPGLYHYCFMAPYTHFTQALADASLRNMVQAEQENDTSGWFDVLQKVSTQLKTNLTSVTKNRADKNAIHNHIRLFEPLVIKALKQYTTTTCVQLQKQVLDLLAQLVQLRVNYCLLDSDQVFIGFVLKQFEYIEVGQFRESEAIIPNIFFFLVLLSYERYHSKQIIGIPKIIQLCDGIMASGRKAVTHAIPALQPIVHDLFVLRGTNKADAGKELETQKEVVVSMLLRLIQYHQVLEMFILVLQQCHKENEDKWKRLSRQIADIILPMLAKQQMHIDSHEALGVLNTLFEILAPSSLRPVDMLLRSMFVTPNTMASVSTVQLWISGILAILRVLISQSTEDIVLSRIQELSFSPYLISCTVINRLRDGDSTSTLEEHSEGKQIKNLPEETFSRFLLQLVGILLEDIVTKQLKVEMSEQQHTFYCQELGTLLMCLIHIFKSGMFRRITAAATRLFRSDGCGGSFYTLDSLNLRARSMITTHPALVLLWCQILLLVNHTDYRWWAEVQQTPKRHSLSSTKLLSPQMSGEEEDSDLAAKLGMCNREIVRRGALILFCDYVCQNLHDSEHLTWLIVNHIQDLISLSHEPPVQDFISAVHRNSAASGLFIQAIQSRCENLSTPTMLKKTLQCLEGIHLSQSGAVLTLYVDRLLCTPFRVLARMVDILACRRVEMLLAANLQSSMAQLPMEELNRIQEYLQSSGLAQRHQRLYSLLDRFRLSTMQDSLSPSPPVSSHPLDGDGHVSLETVSPDKDWYVHLVKSQCWTRSDSALLEGAELVNRIPAEDMNAFMMNSEFNLSLLAPCLSLGMSEISGGQKSALFEAAREVTLARVSGTVQQLPAVHHVFQPELPAEPAAYWSKLNDLFGDAALYQSLPTLARALAQYLVVVSKLPSHLHLPPEKEKDIVKFVVATLEALSWHLIHEQIPLSLDLQAGLDCCCLALQLPGLWSVVSSTEFVTHACSLIYCVHFILEAVAVQPGEQLLSPERRTNTPKAISEEEEEVDPNTQNPKYITAACEMVAEMVESLQSVLALGHKRNSGVPAFLTPLLRNIIISLARLPLVNSYTRVPPLVWKLGWSPKPGGDFGTAFPEIPVEFLQEKEVFKEFIYRINTLGWTSRTQFEETWATLLGVLVTQPLVMEQEESPPEEDTERTQINVLAVQAITSLVLSAMTVPVAGNPAVSCLEQQPRNKPLKALDTRFGRKLSIIRGIVEQEIQAMVSKRENIATHHLYQAWDPVPSLSPATTGALISHEKLLLQINPERELGSMSYKLGQVSIHSVWLGNSITPLREEEWDEEEEEEADAPAPSSPPTSPVNSRKHRAGVDIHSCSQFLLELYSRWILPSSSARRTPAILISEVVRSLLVVSDLFTERNQFELMYVTLTELRRVHPSEDEILAQYLVPATCKAAAVLGMDKAVAEPVSRLLESTLRSSHLPSRVGALHGVLYVLECDLLDDTAKQLIPVISDYLLSNLKGIAHCVNIHSQQHVLVMCATAFYLIENYPLDVGPEFSASIIQMCGVMLSGSEESTPSIIYHCALRGLERLLLSEQLSRLDAESLVKLSVDRVNVHSPHRAMAALGLMLTCMYTGKEKVSPGRTSDPNPAAPDSESVIVAMERVSVLFDRTS

SEQ ID NO: 78675 - protein, 63 aa, Homo sapiens
MAGKKVLIVYAHQEPKSFNGSLKNVAVDELSRQGCTVTVSDLYAMNLEPRATDKDITGTLSNP

SEQ ID NO: 78676 - protein, 84 aa, Homo sapiens
MEPRAVGVSKQDIREQIWGYMESQNLADFPRPVHHRIPNFKGSYLACQNIKDLDVFARTQEVKVDPDKPLEGVRLLVLQVIPLP

SEQ ID NO: 78677 - protein, 13 aa, Homo sapiens
  MOD_RES (1)..(1): Any amino acid
XSIYLGLSQAGVQ

SEQ ID NO: 78678 - protein, 215 aa, Homo sapiens
MSADAAAGAPLPRLCCLEKGPNGYGFHLHGEKGKLGQYIRLVEPGSPAEKAGLLAGDRLVEVNGENVEKETHQQVVSRIRAALNAVRLLVVDPETDEQLQKLGVQVREELLRAQEAPGQAEPPAAAEVQGAGNENEPREADKSHPEQENSREALAEAALESPRPALVRSASSDTSEELNSQDSPPKQDSTAPSSTSSSDPILDFNISLAMAKERA

SEQ ID NO: 78679 - protein, 530 aa, Homo sapiens
MMSEHDLADVVQIAVEDLSPDHPVVLENHVVTDEDEPALKRQRLEINCQDPSIKSFLYSINQTICLRLDSIEAKLQALEATCKSLEEKLDLVTNKQHSPIQVPMVAGSPLGATQTCNKVRCVVPQTTVILNNDRQNAIVAKMEDPLSNRAPDSLENVISNAVPGRRQNTIVVKVPGQEDSHHEDGESGSEASDSVSSCGQAGSQSIGSNVTLITLNSEEDYPNGTWLGDENNPEMRVRCAIIPSDMLHISTNCRTAEKMALTLLDYLFHREVQAVSNLSGQGKHGKKQLDPLTIYGIRCHLFYKFGITESDWYRIKQSIDSKCRTAWRRKQRGQSLAVKSFSRRTPNSSSYCPSEPMMSTPPPASELPQPQPQPQALHYALANAQQVQIHQIGEDGQVQVIPQGHLHIAQVPQGEQVQITQDSEGNLQIHHVGQDGQLLEATRIPCLLAPSVFKASSGQVLQGAQLIAVASSDPAAAGVDGSPLQGSDIQVQYVQLAPVSDHTAGAQTAEALQPTLQPEMQLEHGAIQIQ

SEQ ID NO: 78680 - protein, 655 aa, Homo sapiens
MMEGLKKRTRKAFGIRKKEKDTDSTGSPDRDGIQPSPHEPPYNSKAECAREGGKKVSKKSNGAPNGFYAEIDWERYNSPELDEEGYSIRPEEPGSTKGKHFYSSSESEEEEESHKKFNIKIKPLQSKDILKNAATVDELKASIGNIALSPSPVGAIKRNLSSEEVARPRRSTPTPELISKKPPDDTTALAPLFGPPLESAFDEQKTEVLLDQPEIWGSGQPINPSMESPKLTRPFPTGTPPPLPPKNVPATPPRTGSPLTIGPGASSPARPATPLVPCRSTTPPPPPPRPPSRPKLPPGKPGVGDVSRPFSPPIHSSSPPPIAPLARAESTSSISSTNSLSAATTPTVVSEDDVFYDKLPSFERRCETPAGSSRGPSPLTMGAQDTLPVAAAFTETVNAYFKGADPSKCIVKITGEMVLSFPAGITRHFANNPSPAALTFRVINFSRLEHVLPNPQLLCCDNTQNDANTKEFWVNMPNLMTHLKKVSEQKPQATYYNVDMLKYQVSAQGIQSTPLNLAVNWRCEPSSTDLRIDYKYNTDAMTTAVALNNVQFLVPIDGGVTKLQAVLPPAVWNAEQQRILWKIPDISQKSENGGVGSLLARFQLSEGPSKPSPLVVQFTSEGSTLSGCDIELVGAGYRFSLIKKRFAAGKYLADN

SEQ ID NO: 78681 - protein, 419 aa, Homo sapiens
MSCAGRAGPARLAALALLTCSLWPARADNASQEYYTALINVTVQEPGRGAPLTFRIDRGRYGLDSPKAEVRGQVLAPLPLHGVADHLGCDPQTRFFVPPNIKQWIALLQRGNCTFKEKISRAAFHNAVAVVIYNNKSKEEPVTMTHPGTGDIIAVMITELRGKDILSYLEKNISVQMTIAVGTRMPPKNFSRGSLVFVSISFIVLMIISSAWLIFYFIQKIRYTNARDRNQRRLGDAAKKAISKLTTRTVKKGDKETDPDFDHCAVCIESYKQNDVVRILPCKHVFHKSCVDPWLSEHCTCPMCKLNILKALGIVPNLPCTDNVAFDMERLTRTQAVNRRSALGDLAGDNSLGLEPLRTSGISPLPQDGELTPRTGEINIAVTSGHFFHRNSLSPRSLVYESEFSTIEPSLDMYDENKT

SEQ ID NO: 78682 - protein, 56 aa, Homo sapiens
MSAHMSGLEIMDEDQLIKDVLDKFLNCHEQTYDEEFLNTFTHLSQGSCVQKGSVWN

SEQ ID NO: 78683 - protein, 168 aa, Homo sapiens
MMEGLKKRTRKAFGIRKKEKDTDSTGSPDRDGIPSPHEPPYNSKAECAREGGKKVSKKSNGAPNGFYAEIDWERYNSPELDEEGYSIRPEEPGSTKGKHFYSSSESEEEEESHKKFNIKIKPLQSKDILKNAATVDELKASIGNIALSPSPVVKKWQDPGVPHQLQNL

SEQ ID NO: 78684 - protein, 98 aa, Homo sapiens
VGPYRRCYFFSHCSTPGEPLVVLHVALTGDISSNIQAIVKEHPPSETEEKNKITAAIFYSISLTQQGLQGVELGTFLIKRVVKELQMESRSVAQAEVQ

SEQ ID NO: 78685 - protein, 129 aa, Homo sapiens
MNPSAPSYPMASLYVGDLHPDVTEAMLYEKFSPAGPILSIRVCRDMITRRSLGYAYVNFQQPADAERALDTMNFDVIKGKPVRIMWSQRDPSLRKSGVGNIFIKNLDKSIDNKALYDTFSAFGNILSCK

SEQ ID NO: 78686 - protein, 193 aa, Homo sapiens
MSVGVSTSAPLSPTSGTSVGMSTFSIMDYVVFVLLLVLSLAIGLYHACRGWGRHTVGELLMADRKMGCLPVALSLLATFQSAVAILGVPSEIYRFGTQYWFLGCCYFLGLLIPAHIFIPVFYRLHLTSAYEYLELRFNKTVRVCGTVTFIFQMVIYMGVVLYAPSLALNAVTGFDLWLSVLALGIVCTVYTAL

SEQ ID NO: 78687 - protein, 47 aa, Homo sapiens
MSLRRHIGNPEYLMKRIPQNPRYQHIKSRLDTVKEFRFKRRQTDLNE

SEQ ID NO: 78688 - protein, 24 aa, Homo sapiens
MILNKALMLGALALTTVMSPCGGE

SEQ ID NO: 78689 - protein, 130 aa, Homo sapiens
MADGQMPFSCHYPSRLRRDPFRDSPLSSRLLDDGFGMDPFPDDLTASWPDWALPRLSSAWPGTLRSGMVPRGPTATARFGVPAEGRTPPPFPGEPWKVCVNVHSFKPEELMVKTKDGYVEVSGFLQRWIL

SEQ ID NO: 78690 - protein, 178 aa, Homo sapiens
MLLILLSVALLALSSAQNLNEDVSQEESPSLIAGKPQGPPPQGGNQPQGPPPPPGKPQGPPPQGGNKPQGPPPPGKPQGPPPQGDKSRSPRSPPGKPQGPPPQGGKPQGPPPQGGSKSRSARSPPGKPQGPPQQEGNNPQGPPPPAGGNPQQPQAPPAGQPQGPPRPPQGGRPSRPPQ

SEQ ID NO: 78691 - protein, 520 aa, Homo sapiens
MTTDDTEVPAMTLAPGHAALETQTLSAETSSRASTPAGPVPEAETRGSKRISPARETRSFTKTSPNFMVLIATSVETSAASGSPEGAGMTTVQTITGSDPEEAIFDTLCTDDSSEEAKTLTMDILTLAHTSTEAKGLSSESSASSDGPHPVITPSRASESSASSDGPHPVITPSRASESSASSDGPHPVITPSRASESSASSDGPHPVITPSWSPGSDVTLLAEALVTVTNIEVINCSITEIETTTSSIPGASDTDPIPTEGVKASSTSDPPALPDSTEAKPHITEVTASAETLSTAGTTESAAPDATIGTPLPTNSTIEREVTAPGATTLSGALATGNPLEETSALSVETPSYVKVSGAAPVSIEAGSAVGKTTSFAGSSASSYSPSEAALKNFTPSETLTTDIATKGPFPTSRDPLPSVPPTTTNSSRGTNSTLAKITTSAKTTMKPPTATPTTARTRPTTDMSAGENGGFLLLRLSVASPEDLTDPRVAERLMQQLHRELHAHAPHFQVSLLRVRRG

SEQ ID NO: 78692 - protein, 38 aa, Homo sapiens
  MOD_RES (1)..(1): Any amino acid
XIACLCCDARRQLLENISPADVGGMEETRMRASTLLSK

SEQ ID NO: 78693 - protein, 328 aa, Homo sapiens
  MOD_RES (1)..(1): Any amino acid
XVGAFFEEGMWLRYNFQAPATNARDSSSRVDNAPDQQNSHPDLAQEEIRFSFSTTKAPCILLYISSFTTDFLAVLVKPTGSLQIRYNLGGTREPYNIDVDHRNMANGQPHSVNITRHEKTIFLKLDHYPSVSYHLPSSSDTLFNSPKSLFLGKVIETGKIDQEIHKYNTPGFTGCLSRVQFNQIAPLKAALRQTNASAHVHIQGELVESNCGASPLTLSPMSSATDPWHLDHLDSASADFPYNPGQGQAIRNGVNRNSAIIGGVIAVVIFTILCTLVFLIRYMFRHKGTYHTNEAKGAESAESADAAIMNNDPNFTETIDESKKEWLI

SEQ ID NO: 78694 - protein, 207 aa, Homo sapiens
MPWSSRGALLRDLVLGVLGTAAFLLDLGTDLWAAVQYALGGRYLWAALVLALLGLASVALQLFSWLWLRADPAGLHGSQPPRRCLALLHLLQLGYLYRCVQELRQGLLVWQQEEPSEFDLAYADFLALDISMLRLFETFLETAPQLTLVLAIMLQSGRAEYYQSSQETSPHSTVTRCVTWRAFLWKMEVGLDLQGPFRLASLSLYID

SEQ ID NO: 78695 - protein, 501 aa, Homo sapiens
MTTDDTEVPAMTLAPGHAALETQTLSAETSSRASTPAGPIPEAETRGAKRISPARETRSFTKTSPNFMVLIATSVETSAASGSPEGAGMTTVQTITGSDPEEAIFDTLCTDDISEEAKTLTMDILTLAHTSTEAKGLSSESSASSDGPHPVITPSRASESSASSDGPHPVITPSRASESSASSDGPHPVITPSWSPGSDVTLLAEALVTVTNIEVINCSITETTTSSIPGASDIDLIPTEGVKASSTSDPPALPDSTEAKPHITEVTASAETLSTAGTTESAAPHATVGTPLPTNSATEREVTAPGATTLSGALVTVSRNPLEETSALSVETPSYVKVSGAAPVSIEAGSAVGKTTSFAGSSASSYSPSEAALKNFTPSETPTMDIATKGPFPTSRDPLPSVPPTTTNSSRGTNSTLAKITTSAKTTMKPPTATPTTARTRPTTDVSAGENGGFLLLWLSVASPEDLTDPRVAERLMQQLHRELHAHAPHFQVSLLRVRRG

SEQ ID NO: 78696 - protein, 239 aa, Homo sapiens
  MOD_RES (1)..(1): Any amino acid
XPSLSSVLNELPSAATLRYRDPGVLPWGALEEEEEDGGRSRKAFTEVTQTELQDPHPSRELPWPMQARRAHRQRNASRDQVVYGSGTKTDRWARLLRRSKEKTKEGLRSLQPWAWTLKRIGGQFGAGTESYFSLLRFLLLLNVLASVLMACMTLLPTWLGGAPPGPPGPDISSPCGSYNPHSQGLVTFATQLFNLLSGEGYLEWSPLFYGFYPPRPRLAVTYLCWAFAVGLICLLLILH

SEQ ID NO: 78697 - protein, 64 aa, Homo sapiens
MEEDSRDVEDRSSSGSWGNGGHPSPSRNYGDGTPYDHMTSRDLGSHDNLSPPFVNSRIQKSPWR

SEQ ID NO: 78698 - protein, 214 aa, Homo sapiens
MGSGARFPSGTLRVRWLLLLGLVGPVLGAARPGFQQTSHLSSYEIITPWRLTRERREAPRPYSKQVSYVIQAEGKEHIIHLERNKDLLPEDFVVYTYNKEGTLITDHPNIQNHCHYRGYVEGVHNSSIALSDCFGLRGLLHLENASYGIEPLQNSSHFEHIIYRMDDVYKEPLKCGVSNKDIEKETAKDEEEEPPSMTQLLRRRRAVLPQTRMT

SEQ ID NO: 78699 - protein, 76 aa, Homo sapiens
MSQRQGKEAYPTPTKDLHQPSLSPASPHSQGFERGKEDISQNKDESSLSMSKSKSESKLYNGSEKDSSTSSKLTKK

SEQ ID NO: 78700 - protein, 49 aa, Homo sapiens
  MOD_RES (1)..(1): Any amino acid
XGLLLARGSKIKKLVYPPGFMGLAASLYYPQQAIVFAQPGNVKNSPGTK

SEQ ID NO: 78701 - protein, 208 aa, Homo sapiens
MKQRFSALQLLKLLLLLQPPLPRALREALCPEPCNCVPDGALRCPGPTAGLTRLSLAYLPVKVIPSQAFRGLNEVIKILIQNTKNLRYIEPGAFINLPRLKYLSICNTGIRKFPDVTKVFSSESNFILEICDNLHITTIPGNAFQGMNNESVTLKLYGNGFEEVQSHAFNGTTLTSLELKENVHLEKMHNGAFRGATGPKTLPCRAMA

SEQ ID NO: 78702 - protein, 265 aa, Homo sapiens
MDDTLFQLKFTAKQLEKLAKKAEKDSKAEQAKVKKQGAHTPPSSSSCFPPRVSGPSAEKCRVCPCVCRERHPQEERRCELASDGVPRRRSGLQGADSCDYEGGDQEYGPGDQSPGQGPEHHGPAEGLLSDGQVRAAGAEPGRPYIGDGGLHELGHHPDHAAGAGGQPHHADRRGEWPGGAGPAQPAARGRLCRGRELCAQPGGPAVTEVGRLEELAVPRRCAPPLPRDVLEGSCPLPTASCLCADPAGLRPAATLRLSPARPAWP

SEQ ID NO: 78703 - protein, 71 aa, Homo sapiens
MEPKVAFPGGANRCWNLGADAGSRLTDVFGSVMLTGSASFYDCYTSQSEDNVDLRQTYTPFSSTEYSSSVD

SEQ ID NO: 78704 - protein, 156 aa, Homo sapiens
MSLALRSELVVDKTKRKKRRELSEEQKQEIKDAFELFDTDKDEAIDYHELKVAMRALGFDVKKADVLKILKDYDREATGKITFEDFNEVVTDWILERDPHEEILKAFKLFDDDDSGKISLRNLRRVARELGENMSDEELRAMIEEFDKDGDGESKF

SEQ ID NO: 78705 - protein, 772 aa, Homo sapiens
MDCLCIVTTKKYRYQDEDTPPQEHISPQITNEVIGPELVHVSEKNLSEIENVHGFVSHSHISPIKANPPPVLVNTDSLETPTYVNGTDADYEYEEITLERGNSGLGFSIAGGTDNPHIGDDSSIFITKIITGGAAAQDGRLRVNDCILRVNEVDVRDVTHSKAVEALKEAGSIVRLYVKRRKPVSEKIMEIKLIKGPKGLGFSIAGGVGNQHIPGDNSIYVTKIIEGGAAHKDGKLQIGDKLLAVNNVCLEEVTHEEAVTALKNTSDFVYLKVAKPTSMYMNDGYAPPDITNSSSQPVDNHVSPSSFLGQTPASPARYSPVSKAVLGDDEITREPRKVVLHRGSTGLGFNIVGGEDGEGIFISFILAGGPADLSGELRKGDRIISVNSVDLRAASHEQAAAALKNAGQAVTIVAQYRPEEYSRFEAKIHDLREQMMNSSISSGSGSLRTSQKRSLYVRALFDYDKTKDSGLPSQGLNFKFGDILHVINASDDEWWQARQVTPDGESDEVGVIPSKRRVEKKERARLKTVKFNSKTRDKGEIPDDMGSKGLKHVTSNASDSESSYLILITDEYGCSKGGQEEYVLSYEPVNQQEVNYTRPVIILGPMKDRINDDLISEFPDKFGSCVPHTTRPKRDYEVDGRDYHFVTSREQMEKDIQEHKFIEAGQYNNHLYGTSVQSVREVAEKGKHCILDVSGNAIKRLQIAQLYPISIFIKPKSMENIMEMNKRLTEEQARKTFERAMKLEQEFTEHFTVPGNHLSVSMSSTFLDSTYK

SEQ ID NO: 78706 - protein, 48 aa, Homo sapiens
MATGTGKHKLLSTGPTEPWSIREKLCLASSVMRSGDQNCIVLPSTRSF

SEQ ID NO: 78707 - protein, 153 aa, Homo sapiens
MNLAEICDNAKKGREYALLGNYDSSMVYYQGVMQQIQRHCQSVRDPAIKGKWQQVRQELLEEYEQVKSIVSTLESFKIDKPPDFPVSCQDEPFRDPAVWPPPVPAEHRAPPQIRRPNREVRPLRKEMAGVGARGPVGRAHPISKSEKPSTSRD

SEQ ID NO: 78708 - protein, 94 aa, Homo sapiens
FLLAALVLSLILPRSSQYIKWIVSAGLAQVSEFSFVLGSRARRAGVISREVYLLILSVTTLSLLLAPVLWRAAITRPHLPTLAVHIEGTEAFEP

SEQ ID NO: 78709 - protein, 276 aa, Homo sapiens
  MOD_RES (1)..(1): Any amino acid
XELEQELAELHQKDSALLFSSCFVANDSTLFTLAKILPGCEIYSDAGNHASMIQGIRNSGAAKFVFRHNDPDHLKKLLEKSNPKIPKIVAFETVHSMDGAICPLEELCDVSHQYGALTFVDEVHAVGLYGSRGAGIGERDGIMHKIDIISGTLGKAFGCVGGYIASTRDLVDMVRSYAAGFIFTTSLPPMVLSGALESVRLLKGEEGQALRRAHQRNVKHMRQLLMDRGLPVIPCPSHIIPIRRSCCWLGLRWGCPSRMCLWLPAISVAVLYTLSS

SEQ ID NO: 78710 - protein, 724 aa, Homo sapiens
MAACEGRRSGALGSSQSDFLTPPVGGAPWAVATTVVMYPPPPPPPHRDFISVTLSFGENYDNSKSWRRRSCWRKWKQLSRLQRNMILFLLAFLLFCGLLFYINLADHWKALAFRLEEEQKMRPEIAGLKPANPPVLPAPQKADTDPENLPEISSQKTQRHIQRGPPHLQIRPPSQDLKDGTQEEATKRQEAPVDPRPEGDPQRTVISWRGAVIEPEQGTELPSRRAEVPTKPPLPPARTQGTPVHLNYRQKGVIDVFLHAWKGYRKFAWGHDELKPVSRSFSEWFGLGLTLIDALDTMWILGLRKEFEEARKWVSKKLHFEKDVDVNLFESTIRILGGLLSAYHLSGDSLFLRKAEDFGNRLMPAFRTPSKIPYSDVNIGTGVAHPPRWTSDSTVAEVTSIQLEFRELSRLTGDKKFQEAVEKVTQHIHGLSGKKDGLVPMFINTHSGLFTHLGVFTLGARADSYYEYLLKQWIQGGKQETQLLEDYVEAIEGVRTHLLRHSEPSKLTFVGELAHGRFSAKMDHLVCFLPGTLALGVYHGLPASHMELAQELMETCYQMNRQMETGLSPEIVHFNLYPQPGRRDVEVKTGTTCCGQRPWRACSTCTASQGTANTRTGAGRFCRASADSHGSPRVAILPSTMSRILRSPSLGTRWRASSWGRRSSICSCSSPMTQTCSAWMPTCSTPKPTLCLSGPLPRVDGCWCGDFGWAEAPCWVCGIFQGPT

SEQ ID NO: 78711 - protein, 964 aa, Homo sapiens
MQAAVAVSVPFLLLCVLGTCPPARCGQAGDASLMELEKRKENRFVERQSIVPLRLIYRSGGEDESRHDALDTRVRGDLGGPQLTHVDQASFQVDAFGTSFILDVVLNHDLLSSEYIERHIEHGGKTVEVKGGEHCYYQGHIRGNPDSFVALSTCHGLHGMFYDGNHTYLIEPEENDTTQEDFHFHSVYKSRLFEFSLDDLPSEFQQVNITPSKFILKPRPKRSKRQLRRYPRNVEEETKYIELMIVNDHLMFKKHRLSVVHTNTYAKSVVNMADLIYKDQLKTRIVLVAMETWATDNKFAISENPLITLREFMKYRRDFIKEKSDAVHLFSGSQFESSRSGAAYIGGICSLLKGGGVNEFGKTDLMAVTLAQSLAHNIGIISDKRKLASGECKCEDTWSGCIMGDTGYYLPKKFTQCNIEEYHDFLNSGGGACLFNKPSKLLDPPECGNGFIETGEECDCGTPAECVLEGAECCKKCTLTQDSQCSDGLCCKKCKFQPMGTVCREAVNDCDIRETCSGNSSQCAPNIHKMDGYSCDGVQGICFGGRCKTRDRQCKYIWGQKVTASDKYCYEKLNIEGTEKGNCGKDKDTWIQCNKRDVLCGYLLCTNIGNIPRLGELDGEITSTLVVQQGRTLNCSGGHVKLEEDVDLGYVEDGTPCGPQMMCLEHRCLPVASFNFSTCLSSKEGTICSGNGVCSNELKCVCNRHWIGSDCNTYFPHNDDAKTGITLSGNGVAGTNIIIGIIAGTILVLALILGITAWGYKNYREQRQLPQGDYVKKPGDGDSFYSDIPPGVSTNSASSSKKRSAFLSHFQISTCSITHYSISQNISLFCSRSNGLSHSWSERIPDTKHISDICENGRPRSNSWQGNLGGNKKKIRGKRFRPRSNSTEYLNPWFKRDYNVAKWVEDVNKNTEGPYFRTLSPAKSPSSSTGSIASSRKYPYPMPPLPDEDKKVNRQSARLWETSI

SEQ ID NO: 78712 - protein, 220 aa, Homo sapiens
MTGTRSRPQPAQNATTANTSRPLKSSGTRYENELALRQGVEADINGLRRVLDELTLARTDLEMQIEGLNEELAYLKKNHEEEMKEFSSQLAGQVNVEMDAAPGVDLTRVLAEMREQYEAMAEKNRRDVEAWFFSKTEELNKEVASNTEMIQTSKTEITDLRRTMQELEIELQSQLSMKAGLENSLAETECRYATQLQQIQGLIGGLEAQLSELRCEMEAQ

SEQ ID NO: 78713 - protein, 921 aa, Homo sapiens
MLRNERQFKEEKLAEQLKQAEELRQYKVLVHAQERELTQLREKLREGRDASRSLNEHLQALLTPDEPDKSQGQDLQEQLAEGCRLAQHLVQKLSPENDNDDDEDVQVEVAEKVQKSSAPREMQKAEEKEVPEDSLEECAITCSNSHGPYDCNQPHRKTKITFEEDKVDSTLIGSSSHVEWEDAVHIIPENESDDEEEEEKGPVSPRNLQESEEEEVPQESWDEGYSTLSIPPEMLASYKSYSSTFHSLEEQQVCMAVDIGRHRWDQVKKEDHEATGPRLSRELLDEKGPEVLQDSLDRCYSTPSGCLELTDSCQPYRSAFYVLEQQRVGLAVDMDEIEKYQEVEEDQDPSCPRLSRELLDEKEPEVLQDSLGRCYSTPSGYLELPDLGQPYSSAVYSLEEQYLGLALDVDRIKKDQEEEEDQGPPCPRLSRELLEVVEPEVLQDSLDRCYSTPSSCLEQPDSCQPYGSSFYALEEKHVGFSLDVGEIEKKGKGKKRRGRRSKKERRRGRKEGEEDQNPPCPRLSRELLDEKGPEVLQDSLDRCYSTPSGCLELTDSCQPYRSAFYILEQQRVGLAVDMDEIEKYQEVEEDQDPSCPRLSRELLEVVEPEVLQDSLDRCYSTPSSCLEQPDSCQPYGSSFYALEEKHVGFSLDVGEIEKYQEVEEDQDPSCPRLSRELLDEKEPEVLQDSLGRCYSTPSGYLELPDLGQPYSSAVYSLEEQYLGLALDVDRIKKDQEEEEDQGPPCPRLSRELLEVVEPEVLQDSLDRCYSTPSSCLEQPDSCQPYGSSFYALEEKHVGFSLDVGEIEKKGKGKKRRGRRSKKERRRGRKEGEEDQNPPCPRLNSMLMEVEEPEVLQDSLDICYSTPSMYFELPDSFQHYRSVFYSFEEEHISFALYVDNRFFTLTVTSLHLVFQMGVIFPQ

SEQ ID NO: 78714 - protein, 204 aa, Homo sapiens
MDSDSGEQSEGEPVTAAGPDVFSSKSLALQAQKKILSKIASKTVANMLIDDTSSEIFDELYKVTKEHTHNKKEAHKIMKDLIKVAIKIGILYRNNQFSQEELVIVEKFRKKLNQTAMTIVSFYEVEYTFDRNVLSNLLHECKDLVHELVQRHLTPRTHGRINHVFNHFADVEFLSTLYSLDGDCRPNLKRICEGINKLLDEKVL

SEQ ID NO: 78715 - protein, 75 aa, Homo sapiens
VWSFQKKQTDLLIAFYKHRITKLETAMQEAQQALVSQDNRSSSAESIPYREAGFGSLGQGGRGLQGRRTPRDSYN

SEQ ID NO: 78716 - protein, 96 aa, Homo sapiens
MQLNDKWQGLCWPMMDFLRCVTAALIYFAISITAIAKYSDGASKAAGVFGFFATIVFATDFYLIFNDVAKFLKQGDSADETTAHKTEARCWGHGDL

SEQ ID NO: 78717 - protein, 147 aa, Homo sapiens
MARDYDHLFKLLIIGDSGDLGAACLTQGRRKRSGIEWKRCSWCVAAQGGGKSIEKCGQEQFTVAFCRQHFLRQLHHHDRSGFQDPDRGDQRGEGEAADLGHSGAGALPHHHLHVLSGDPRGHCGLRRHQCRVLCQRQAVASRNQPEL

SEQ ID NO: 78718 - protein, 131 aa, Homo sapiens
  MOD_RES (1)..(1): Any amino acid
XREVRGHLKRRKPEECSCSKQSYYNKEKGVKKQEKLKSHLHPFKEAAQEVDSKLQLFKENNRRRKKERKEKRRQRKGEECSLPGLTCFTHDNNHWQTAPFWNPHKYSAHGRTRHFESATRTTNGAQKLSRI

SEQ ID NO: 78719 - protein, 878 aa, Homo sapiens
MEDGKPVWAPHPTDGFQMGNIVDIGPDSLTIEPLNQKGKTFLALINQVFPAEEDSKKDVEDNCSLMYLNEATLLHNIKVRYSKDRIYTYVANILIAVNPYFDIPKIYSSEAIKSYQGKSLGTRPPHVFAIADKAFRDMKVLKMSQSIIVSGESGAGKTENTKFVLRYLTESYGTGQDIDDRIVEANPLLEAFGNAKTVRNNNSSRFGKFVEIHFNEKSSVVGGFVSHYLLEKSRICVQGKEERNYHIFYRLCAGASEDIREKLHLSSPDNFRYLNRGCTRYFANKETDKQILQNRKSPEYLKAGSMKDPLLDDHGDFIRMCTAMKKIGLDDEEKLDLFRVVAGVLHLGNIDFEEAGSTSGGCNLKNKSAQSLEYCAELLGLDQDDLRVSLTTRVMLTTAGGTKGTVIKVPLKVEQANNARDALAKTVYSHLFDHVVNRVNQCFPFETSSYFIGVLDIAGFEYFEHNSFEQFCINYCNEKLQQFFNERILKEEQELYQKEGLGVNEVHYVDNQDCIDLIEAKLVGILDILDEENRLPQPSDQHFTSAVHQKHKDHFRLTIPRKSKLAVHRNIRDDEGFIIRHFAGAVCYETTQFVEKNNDALHMSLESLICESRDKFIRELFESSTNNNKDTKQKAGKLSFISVGNKFKTQLNLLLDKLRSTGASFIRCIKPNLKMTSHHFEGAQILSQLQCSGMVSVLDLMQGGYPSRASFHELYNMYKKYMPDKLARLDPRLFCKALFKALGLNENDYKFGLTKVFFRPGKFAEFDQIMKSDPDHLAELVKRVNHWLTCSRWKKVQWCSLSVIKLKNKIKYRAEACIKMQKTIRMWLCKRRHKPRIDGLVKVGTLKKRLDKFNEVVSVLKDGKPEMNKQIKNLEISI

SEQ ID NO: 78720 - protein, 104 aa, Homo sapiens
LDISFPPSYPYSEDARQGEQYMNTRCPAWCDRILMSPSAKELVLRSESEEKVVTYDHIGPNVCMGDHKPVFLAFRIMPGAGKRCQRHERTLREPPCSRGPNTHS

SEQ ID NO: 78721 - protein, 197 aa, Homo sapiens
MLSELQDGKSKIVQKAAPEVQEDVKAFKTDLPSSLVSVSLRKPFSGPQEQEQISGKVTHLIQNNMPGNYVFSYDQFFRDKIMEKKQDHTYRVFKTVNRWADAYPFAQHFSEASVASKDVSVWCSNDYLGMSRHPQVLQATQETLQRHGAGAGGTRNISGTSKFHVELEQELAELHQKDSALLFSSCFVANDSTLFTL

SEQ ID NO: 78722 - protein, 113 aa, Homo sapiens
MTTESGSDSESKPDQEAEPQEAAGAQGRAGAPVPEPPKEEQQQALEQFAAAAAHSTPVRREVTDKEQEFAARAAKQLEYQQLEDDKLSQKSSSSKLSRSPLKIVKKPKSMQCK

SEQ ID NO: 78723 - protein, 109 aa, Homo sapiens
  MOD_RES (1)..(1): Any amino acid
XNPKLGKASEEEMAEPGWDGGWRTDDYHLVTVAPSFPSPPAVSIASFVTVKRPGVTGENSNEVAKLVNTLNTIPSLGQSPGPVVVSNNSSAHGSQRTSGPESSMKGTIT

SEQ ID NO: 78724 - protein, 117 aa, Homo sapiens
  MOD_RES (1)..(1): Any amino acid
XSTACAHTNVTLALAPILDDGWCKERTLDNQLFFFLVEDDARGTVVLRVRPQEKGADHTQAIVLGCVGGIVAVGLGLVLAYRLSVEIYDRREYSRFEKEQQQLNWKQLLGFGSRLAS

SEQ ID NO: 78725 - protein, 891 aa, Homo sapiens
MSEFRIHHDVNELLSLLRVHGGDGAEVYIDLLQKNRTPYVTTTVSAHSAKVKIAEFSRTPEDFLKKYDELKSKNTRNLDPLVYLLSKLTEDKETLQYLQQNAKERAELAAAAVGSSTTSINVPAAASKISMQELEELRKQLGSVATGSTLQQSLELKRKMLRDKQNKKNSGQHLPIFPAWVYERPALIGDFLIGAGISTDTALPIGTLPLASQESAVVEDLLYVLVGVDGRYVSAQPLAGRQSRTFLVDPNLDLSIRELVHRILPVAASYSAVTRFIEEKSSFEYGQVNHALAAAMRTLVKEHLILVSQLEQLHRQGLLSLQKLWFYIQPAMRTMDILASLATSVDKGECLGGSTLSLLHDRSFSYTGDSQAQELCLYLTKAASAPYFEVLEKWIYRGIIHDPYSEFMVEEHELRKERIQEDYNDKYWDQRYTIVQQQIPSFLQKMADKILSTGKYLNVVRECGHDVTCPVAKEIIYTLKERAYVEQIEKAFNYASKVLLDFLMEEKELVAHLRSIKRYFLMDQGDFFVHFMDLAEEELRKPVEDITPPRLEALLELALRMSTANTDPFKDDLKLLRVLAIETKQEKAMAHADPTELALSGLEAFSFDYIVKWPLSLIINRKALTRYQMLFRHMFYCKHVERQLCSVWISNKTAKQHSLHSAQWFAGAFTLRQRMLNFVQNIQYYMMFEVMEPTWHILEKNLKSASNIDDVLGHHTGFLDTCLKDCMLTNPELLKVFSKLMSVCVMFTNCMQKFTQSMKLDGELGGQTLEHSTVLGLPAGAEERARKELARKHLAEHADTVQLVSGFEATINKFDKNFSAHLLDLLARLSIYSTSDCEHGMASVISRLDFNGFYTERLERLSAERSQKATPQVPVLRGPPAPAPRVAVTAQ

SEQ ID NO: 78726 - protein, 249 aa, Homo sapiens
MCRTALGVTTLQDLGVCWRKEHDPAEMLRVGRAELGGWKPSWEAIVKEVAAATGHTVVLVDQTEDILAKSKKGIEESLRKVAKKKFAENLKAGDEFVEKTLSTIATSTDAASVVHSTDLVVEAIVENLKVKNELFKRLDKFAAEHTIFASNTSSLQITSIANATTRQDRFAGLHFFNPVPVMKLVEVIKTPMTSQKTFESLVDFSKALGKHPVSCKDTPGFIVNRLLVPYLMEAIRLYERGPPGFPVGL

SEQ ID NO: 78727 - protein, 580 aa, Homo sapiens
MILQAHLHSLCLLMLYLATGYGQEGKFSGPLKPMTFSIYEGQEPSQIIFQFKANPPAVTFELTGETDNIFVIEREGLLYYNRALDRETRSTHNLQVAALDANGIIVEGPVPITIKVKDINDNRPTFLQSKYEGSVRQNSRPGNSIGTLTAHDRDEENTANSFLNYRIVEQTPKLPMDGLFLIQTYAGMLQLAKQSLKKQDTPQYNLTIEVSDKDFKTLCFVQINVIDINDQIPIFEKSDYGNLTLAEDTNIGSTILTIQATDADEPFTGSSKILYHIIKGDSEGRLGVDTDPHTNTGYVIIKKPLDFETAAVSNIVFKAENPEPLVFGVKYNASSFAKFTLIVTDVNEAPQFSQHVFQAKVSEDVAIGTKVGNVTAKDPEGLDISYSLRGDTRGWLKIDHVTGEIFSVAPLDREAGSPYRVQVVATEVGGSSLSSVSEFHLILMDVNDNPPRLAKDYTGLFFCHPLSAPGSLIFEATDDDQHLFRGPHFTFSLGSGSLQNDWEVSKINGTHARLSTRHTEFEEREYVVLIRINDGGRPPLEGIVSLPGIILAVVFIRIKKDKGKDNVESAQASEVKPLRS

SEQ ID NO: 78728 - protein, 894 aa, Homo sapiens
RSQVLQTYVAFLKSSEEVEMQFQSLKEFYETEIPQKEQDDAKAKHCSDSAEKQWQLFLKKSFITQDLGLEFLNLINMAKENEILDVKNEVYLMKNTMENQKAEREELSLLRLAWQLKATESKPGKQQWAAFKEQLKKTSHNLKLLQEALMPVSALDLGGSLQFILDLRQKWNDMKPQFQQLNDEVQYIMKESEELTGRGAPVKEKSQQLKDLIHFHQKQKERIQDYEDILYKVVQFHQVKEELGRLIKSRELEFVEQPKELGDAHDVQIHLRCSQEKQARVDHLHRLALSLGVDIISSVQRPHCSNVSAKNLQQQLELLEEDSMKWRAKAEEYGRTLSRSVEYCAMRDEINELKDSFKDIKKKFNNLKFNYTKKNEKSRNLKALKYQIQQVDMYAEKMQALKRKMEKVSNKTSDSFLNYPSDKVNVLLEVMKDLQKHVDDFDKVVTDYKKNLDLTEHFQEVIEECHFWYEDASATVVRVGKYSTECKTKEAVKILHQQFNKFIAPSVPQQEERIQEATDLAQHLYGLEEGQKYIEKIVTKHKEVLESVTELCESLTELEEKLKQGDVLKMNPNLEDFHYDYIDLLKEPAKNKQTIFNEERNKGQVQVADLLGINGTGEERLPQDLKVSTDKEGGVQDLLLPEDMLSGEEYECVSPDDISLPPLPGSPESPLAPSDMEVEEPVSSSLSLHISSYGVQAGTSSPGDAQESVLPPPVAFADACNDKRETFSSHFERPYLQFKAEPPLTSRGFVEKSTALHRISAEHPESMMSEVHERALQQHPQAQGGLLETREKMHADNNFTKTQDRLHASSDAFSGLRFQSGTSRGYQRQMVPREEIKSTSAKSSVVSLADQAPNFSRLLSNVTVMEGSPVTLEVEVTGFPEPTLTWWVAYNDKP

SEQ ID NO: 78729 - protein, 185 aa, Homo sapiens
  MOD_RES (1)..(1): Any amino acid
XNRALRLVDGGGACAGRVEMLEHGEWGSVCDDTWDLEDAHVVCRQLGCGWAVQALPGLHFTPGRGPIHRDQVNCSGAEAYLWDCPGLPGQHYCGHKEDAGAVCSASRSLHNLSTPEVPASVQTVTIESSVTVKIENKESRELMLLIPSIVLGILLLGSLIFIAFILLRIKGKYALPVMVNHQHLP

SEQ ID NO: 78730 - protein, 25 aa, Homo sapiens
MELRCGGLLFSSRFDSGNLAHVEKV

SEQ ID NO: 78731 - protein, 32 aa, Homo sapiens
MQGTPGGGTRPGPSPVDRRTLLVFSFILAAAL

SEQ ID NO: 78732 - protein, 67 aa, Homo sapiens
MMRTQCLLGLRTFVAFAAKLWSFFIYLLRRQIRTVIQYQTVRYDILPLSPVSRNRLGEEEDPGAGSG

SEQ ID NO: 78733 - protein, 122 aa, Homo sapiens
MMATPNQTACNAESPVALEEAKTSGAPGSPQTPPERHDSGGSLPLTPRMESHSEDEDLAGAVGGLGWNSRSPRTQSPGGCSAEAVLARKKHRRRPSKRKRHWRPYLELSWAEKQQRDERQSQ

SEQ ID NO: 78734 - protein, 11 aa, Homo sapiens
MGIQGLLQFIK

SEQ ID NO: 78735 - protein, 70 aa, Homo sapiens
VRMISDLIAGGIQPLQNLSVLKQVGEEMQLTWAQNAITCGFNALEQILQSTAGIYCVGDESRSGHTQSSH

SEQ ID NO: 78736 - protein, 240 aa, Homo sapiens
MAAAMPLALLVLLLLGPGGWCLAEPPRDSLREELVITPLPSGDVAATFQFRTRWDSELQREGVSHYRLFPKALGQLISKYSLRELHLSFTQGFWRTRYWGPPFLQAPSGAELWVWFQDTVTDVDKSWKELSNVLSGIFCASLNFIDSTNTVTPTASFKPLGLANDTDHYFLRYAVLPREVVCTENLTPWKKLLPCSSKAGLSVLLKADRLFHTSYHSQAVHIRPVCRHLLGAEADPVSCI

SEQ ID NO: 78737 - protein, 92 aa, Homo sapiens
MVLVLHHILIAVVQFLRRGQQVFLKPDEPPPPPQPCADSLQETVYTYLLDGRLSSPRSGWAAMGWASQTCQGSPWPGWWLHWLLIPKCWSCR

SEQ ID NO: 78738 - protein, 165 aa, Homo sapiens
MHGVCKEGDNCRYSHDLSDSPYSVVCKYFQRGYCIYGDRCRYEHSKPLKQEEATATELTTKSSLAASSSLSSIVGPLVEMNTGEAESRNSNFATVGAGSEDWVNAIEFVPGQPYCGRTAPSCTEAPLQGSVTKEESEKEQTAVETKKQLCPYAAVGECRYGENCV

SEQ ID NO: 78739 - protein, 262 aa, Homo sapiens
MKCEHCTRKECSKKTKTDDQENVSADAPSPAQENGEKGEFHKLADAKIFLSDCLACDSCMTAEEGVQLSQQNAKDFFRVLNLNKKCDTSKHKVLVVSVCPQSLPYFAAKFNLSVTDASRRLCGFLKSLGVHYVFDTTIAADFSILESQKEFVRRYRQHSEEERTLPMLTSACPGWVRYAERVLGRPITAHLCTAKSPQQVMGSLVKDYFARQQNLSPEKIFHVIVAPCYDKKLEALQESLPPALHGSRGADCVLTSGESQAW

SEQ ID NO: 78740 - protein, 136 aa, Homo sapiens
MAWNTNLRWRLPLTCLLLQVIMVILFGVFVRYDFEADAHWWSERTHKNLSDMENEFYYRYPSFQDVHVMVFVGFGFLMTFLQRYGFSAVGFNFLLAAFGIQWALLMQGWFHFLQDRYIVVGVENDSPGWESSKCHT

SEQ ID NO: 78741 - protein, 354 aa, Homo sapiens
  MOD_RES (1)..(1): Any amino acid
XSTAKLFVEGRDVRIRSIKKEVQVIEKQRAVVEFEVNEDDVDAHWYKDGIEINFQVQERHKYVVERRIHRMFISETRQSDAGEYTFVAGRNRSSVTLYVNAPEPPQVLQELQPVTVQSGKPARFCAVISGRPQPKISWYKEEQLLSTGFKCKFLHDGQEYTLLLIEAFPEDAAVYTCEAKNDYGVATTSASLSVEVPEVVSPDQEMPVYPPAIITPLQDTVTSEGQPARFQCRVSGTDLKVSWYSKDKKIKPSRFFRMTQFEDTYQLEIAEAYPEDEGTYTFVASNAVGQVSSTANLSLEAKESQARALTKITLGSDTKSIKTLRESQIKTTREVKRESSKKTSSLSLTSCQKP

SEQ ID NO: 78742 - protein, 123 aa, Homo sapiens
LSTSKGLIAGNLRYIEEDGTKVNCTCGATAVAVPSNIQGIRNLVTDAKFVLIVEKDATFQRLLDDNFCNKLSPCIMITSTPVFQHLKSKGKGVPDLNTRLLVKKLWDTFHVPVFTLVDADPHD

SEQ ID NO: 78743 - protein, 317 aa, Homo sapiens
MAVFVVLLALVAGVLGNEFSILKSPGSVVFRNGNWPIPGERIPDVAALSMGFSVKEDLSWPGLAVGNLFHRPRATVMVMVKGVNKLALPPGSVISYPLENRVYMVGKANSVFEDLSVTLRQLRNRLFQENSVLSSLPLNSLSRNNEVDLLFLSELQVLHDISSLLSRHKHLAKDHSPDLYSLELAGLDEIGKRYGEDSEQFRDASKILVDALQKFADDMYSLYGGNAVVELVTVKSFDTSLIRKTRTILEAKQANPASPYNLAYKYNFEYSVVFNMVLWIMIALALAVIITSYNIWNMDPGYDSIIYRMTNQKIRMD

SEQ ID NO: 78744 - protein, 96 aa, Homo sapiens
MATEEKKPETEAARAQPTPSSSATQSKPTPVKPNYALKFTLAGHTKAVSSVKFSPNGEWLASSSADKLIKIWGAYDGKFEKTISGHKLGISDVAWS

SEQ ID NO: 78745 - protein, 87 aa, Homo sapiens
MCPVDFHGIFQLDERRRDAVIALGIFLIESDLQHKDCVVPYLLRLLKGLPKVYWVEESTARKGRGALPVAESFSFCLVTLLSDVAYR

SEQ ID NO: 78746 - protein, 428 aa, Homo sapiens
MVLSQRQRDELDWFQRGEDSILNKADEARNRAIADYLRSNGYEEAYSVFKKEAELDVNEELDKKYAGLLEKKWTSVIRLQKKVMELESKLNEAKEEFTSGGPLGQKRDPKEWIPRPPEKYALSGHRSPVTRVIFHPVFSVMVSASEDATIKVWDYETGDFERTLKGHTDSVQDISFDHSGKLLASCSADMTIKLWDFQGFECIRTMHGHDHNVSSVAIMPNGDHIVSASRDKTIKMWEVQTGYCVKTFTGHREWVRMVRPNQDGTLIASCSNDQTVRVWVVATKECKAELREHEHVVECISWAPESSYSSISEATGSETKKSGKPGPFLLSGSRDKTIKMWDVSTGMCLMTLVGHDNWVRGVLFHSGGKFILSCADDKTLRVWDYKNKRCMKTLNAHEHFVTSLDFHKTAPYVVTGSVDQTVKVWECR

SEQ ID NO: 78747 - protein, 356 aa, Homo sapiens
MASLTAYDKDVSSGSYNLSSATTGSYYSCVSQITIGYDVAGPVAIGLTHWKNPYVQGRPTLPSDLPLFVSKDAGIPVYHRSFTRKTDQATPLSCPASLSITPVPSYSSSSQETLSQDTTGLSLSIHGAEKRLQIHQRRSVASRPASRRRLPVVRHSSLPPGRRSIKMEASSSGITNGKTKVFHPEGGVDLQGYQLDMQILPDGPKSDVDFSEILNAIQEMAKDVNILFDELEAVSSPCKDDDSLLHPGNLTSTSDDASRLEAGGETVPERNKSNGLYFRDGKCRIDYILVYRKSNPQTEKREVFERNIRAEGLQMEKESSLINSDIIFVKLHAPWEVLGRYAEQMNVRMPFSSNCN

SEQ ID NO: 78748 - protein, 142 aa, Homo sapiens [sequence omitted]

SEQ ID NO: 78749 - protein, 139 aa, Homo sapiens
MERPLCSHLCSCLAMLALLSPLSLAQYDSWPHYPEYFQQPAPEYHQPQAPANVAKIQLRLAGQKRKHSEGRVEVYYDGQWGTVCDDDFSIHAAHVVCRELGYVEAKSWTASSSYGKGEGPIWLDNLHCTGNEATLAACT

SEQ ID NO: 78750 - protein, 178 aa, Homo sapiens
MYPESTTGSPARLSLRQTGSPGMIYSTRYGSPKRQLQFYRNLGKSGLRVSCLGLGTWVTFGGQITDEMAEQLMTLAYDNGINLFDTAEVYAAGKAEVVLGNIIKKKGWRIFAASQPLRSSLFPSVRGNIRSSYKVGPPSSLPSKCHSESQCQGEPPPPPPWIPDTPSSCPIKFVFWQL

SEQ ID NO: 78751 - protein, 3064 aa, Homo sapiens
MGRNQRKAPQRLERPGRPASGEQESGSASADGAPSRERRSDRGQADRAKPAAEPATAGGQGTPGGRRKPTAEGNGGCRRPGAGLSPKAQERQSNAQRQGRGPRGGRGGRLEEGSLSGGEELGGRRRRKRKDKGPSARRGRRTPRSLNGDTSGGDGGSSCPDSETREAQESGSQRGTARELRPTPEPTDMGSEGTKTGPESALEPSSDGLDSDWPHADTRGREGSSGTGPLGASEHSGGDSDSSPLGTGPGRGSRAAMASRTFEDSSRAPRDTGPAKDASDNRAQRGAEPETMQASTARAPRHQVGKAVGQVPAAAGEGEAGAAAGAGPEDPAPLAALLVVRRLLARPPPGAASQAVGPRRAGLKERLLSVARALGLLRWLRRRLRLRRRPPEGEGQGTGPRASEGWGRRKPDEGRGHGRGSKGRGRGKADEGRGHERGDEGRGRGKADEGRGHERGYEGRGCGKADEGRGHERGDEGRDHQRGYEGWGREPGLRHRLALRLAGLAGLGGMPRASPGGRSPQVPTSPVPGDPFDQEDETPDPKFAVVFPRIHRAGRASSSRSSEEASADAPTGEGRGWPRAGVGGHSEGCRTSGEGVSGLRRGSLLAPTAPDGPSLDESGSSSEAELETLNDEPPVRWAQGSGPHEGPRLGAAVLLPRLSLETRLQQEGDPGLRGSLRELWEPEDEDEAVLERDLELSLRPGLEAPPFPGAKGRSLGDGLEDMEDLARLRHIFAIVASAYDLAQNTGQDPCILLCGHSGSGKTEAAKKIMQFLSSLEQDQTGNRECQVEDMLPILSSFGHAKTILNANASRFGQVFCLYLQQGVIVGASVSHYLLETSRVVFQAQAERSFHVFYKLLAGLDSIERERLSLQGPETYYYLNQGQACRLQGKEDAQDFEGLLKALQGLGLCPEELNAVWAVLAAILQLGNICFSSSERESQEVAAVSSWAEIHTAARLLRVPPECLEGAVTRRVTETPYGQVSRSLPVESAFDARDALAKALYSRLFHRLLRRTNARLAPPGEGGSIGTVTVVDAYGFEALRVNGLEQLCNNLASERLQLFSSQMLLAQEEPPRESCLDLLVDQPHSLLSILDAQTWLSQTEFGSCCPGWSAMVRSRLTATSTSQATDHTFLQKSHYHHGDHPSYAKPRLPLPVFTVRHYAGTVTYQVHKFLNRNRDQLDPAVVEMLGQSQLQLVGSLFQEAEPQSRGGRGRPTLASRFQQALEDLIARLGRSHVYFIQCLTPNPGKLPGLFDVGHVTEQLHQAAILEAVGTRSANFPVRVPFEAFLASFQALGSEGQEDLSDREKCGAVLSQVLGAESPLYHLGATKVLLQEQGWQRLEELRDQQRSQALVDLHRSFHTCISRQRVLPRMQARMRGFQARSAGVGARAEVGGPVFTHSSNSCWLTVCLIYPWARCWKRYLRRRAALGQLNTILLVAQPLLQRRQRLQLGRWQGWHSSERALERVPSMELGRLEIPAELAVMLKTAESHRDALAGSITECLPPEVPARPSLTLPADIDLFPFSSFVAIGFQEPSLPRPGQPLAKPLTQLDGDNPQRALDINKVMLRLLGDGSLESWQRQIMGAYLVRQGQCRPGLRNELFSQLVAQLWQNPDEQQSQRGWALMAVLLSAFPPLPVLQKPLLKFVSDQAPRGMAALCQHKLLGALEQSQLASGATRAHPPTQLEWLAGWRRGRMALDVFTFSEECYSAEVESWTTGEQLAGWILQSRDAWQDLAGCDFVLDLISQTEDLGDPARPRSYPITPLGSAEAIPLAPGIQAPSLPPGPPPGPAPTLPSRDHTGEVQRSGSLDGFLDQIFQPVISSGLSDLEQSWALSSRMKGGGAIGPTQQGYPMVYPGMIQMPAYQPGMVPAPMPMMPAMGTVPAMPAMVVPPQPPLPSLDAGQLAVQQQNFIQQQALILAQQMTAQAMSLSLEQQMQQRQQQARASEAASQASPSAVTSKPRKPPTPPEKPQRDLGSEGGCLRETSEEAEDRPYQPKSFQQKRNYFQRMGQPQITVRTMKPPAKVHIPQGEAQEEEEEEEEEEEQEEQEVETRAVPSPPPPPIVKKPLKQGGAKAPKEAEAEPAKETAAKGHGQGPAQGRGTVVRSSDSKPKRPQPSREIGNIIRMYQSRPGPVPVPVQPSRPPKAFLRKIDPKDEALAKLGINGAHSSPPMLSPSPGKGPPPAVAPRPKAPLQLGPSSSIKEKQGPLLDLFGQKLPIAHTPPPPPAPPLPLPEDPGTLSAERRCLTQPVEDQGVSTQLLAPSGSVCFSYTGTPWKLFLRKEVFYPRENFSHPYYLRLLCEQILRDTFSESCIRISQNERRKMKDLLGGLEVDLDSLTTTEDSVKKRIVVAARDNWANYFSRFFPVSGESGSDVQLLAVSHRALAHDPGLEVGAGGKVTSVHARSLRSFAEVLGVECRGGSTLELSLKSEQLVLHTARARAIEALVELFLNELKKDSGYVIALRSYITDNCSLLSFHRGDLIKLLPVATLEPGWQFGSAGGRSGLFPADIVQPAAAPDFSFSKEQRSGWHKGQLSNGEPGLARWDRASERPAHPWSQAHSDDSEATSLSSVAYAFLPDSHSYTMQEFARRYFRRSQALLGQTDGGAAGKDTDSLVQYTKAPIQESLLSLSDDVSKLAVASFLALMRFMGDQSKPRGKDEMDLLYELLKLCQQEKLRDEIYCQVIKQVTGHPRPEHCTRGWSFLSLLTGFFPPSTRLMPYLTKFLQDSGPSQELARSSQEHLQRTVKYGGRRRMPPPGEMKAFLVAAEVQEELCRQMGITEPQEVQEFALFLIKEKSQLVRPLQPAEYLNSVVVDQDVSLHSRRLHWETPLHFDNSTYISTHYSQVLWDYLQGKLPVSAKADAQLARLAALQHLSKANRNTPSGQDLLAYVPKQLQRQVNTASIKNLMGQELRRLEGHSPQEAQISFIADLGDQAEQVPGPQQSDFLPAPSPPAEAMSQLPLFGYTVYGVLRVSMQALSGPTLLGLNRQHLILMDPSSQSLYCRIALKSLQRLHLLSPLEEKGPPGLEVNYGSADNPQTIWFELPQAQELLYTTVFLIDSSASCTEWPSIN

SEQ ID NO: 78752 - protein, 49 aa, Homo sapiens
  MOD_RES (1)..(1): Any amino acid
XEFQRCQYVVGRERTELARQLNLSETQGQGEHPRVAEWAIIAERCRIPS

SEQ ID NO: 78753 - protein, 202 aa, Homo sapiens
MESQKEARTLQEPVARPSGASSSQTPNDKERREGGAVPAAAALGAEADDDSADGLWELPVEPAERRPECTRCSRPQKVCLCPFLPAHPLHISTHLYIIQHPAEVQLKTSISSQYVIRMQPTNRCLSTLECAAVALSILEKNNYIQETLLRPLQALCSFQLQHGAQIRLSKEHLLKNGLYPKPMPKNKRKLRKMELLMNSVKI

SEQ ID NO: 78754 - protein, 110 aa, Homo sapiens
MNSLLIGELSPEQPSFEPTKNKELTDEFRELRATVERMGLMKANHVFFLLYLLHILLLDGAAWLTLWVFGTSFLPFLLCAVLLSAVQAQAGWLQHDFGHLSVFSTSKWNH

SEQ ID NO: 78755 - protein, 762 aa, Homo sapiens
MAAAAQLSLTQLSSGNPVYEKYYRQVDTGNTGRVLASDAAAFLKKSGLPDLILGKIWDLADTDGKGILNKQEFFVALRLVACAQNGLEVSLSSLNLAVPPPRFHDTSSPLLISGTSAAELPWAVKPEDKAKYDAIFDSLSPVNGFLSGDKVKPVLLNSKLPVDILGRVWELSDIDHDGMLDRDEFAVAMFLVYCALEKEPVPMSLPPALVPPSKRKTWVVSPAEKAKYDEIFLKTDKDMDGFVSGLEVREIFLKTGLPSTLLAHIWSLCDTKDCGKLSKDQFALAFHLISQKLIKGIDPPHVLTPEMIPPSDRASLQKNIIGSSPVADFSAIKELDTLNNEIVDLQREKNNVEQDLKEKEDTIKQRTSEVQDLQDEVQRENTNLQKLQAQKQQVQELLDELDEQKAQLEEQLKEVRKKCAEEAQLARSSPELLPSGVTDENEVTTAVTEKVCSELDNNRHSKEEDPFNVDSSSLTGPVADTNLDFFQSDPFVGSDPFKDDPFGKIDPFGGDPFKGSDPFASDCFFRQSTDPFATSSTDPFSAANNSSITSVETLKHNDPFAPGGTVVAASDSATDPFASVFGNESFGGGFADFSTLSKVNNEDPFRSATSSSVSNVVITKNVFEETSVKSEDEPPALPPKIGTPTRPCPLPPGKRSINKLDSPDPFKLNDPFQPFPGNDSPKEKDPEIFCDPFTSATTTTNKEADPSNFANFSAYPSEEDMIEWAKRESEREEEQRLARLNQQEQEDLELAIALSKSEISEA

SEQ ID NO: 78756 - protein, 146 aa, Homo sapiens
  MOD_RES (1)..(1): Any amino acid
XRHLRATPNTRGSARLLCAEMPKKAGATTKGKSQSKEPERPLPPLGPVAVDPKGCVTIAIHAKPGSKQNAVTDLTAEAVNVAIAAPPSEGEANAELCRYLSKVLELRKSDVVLDKKLRDLLKIVPCKLATRTQILGLLVECSFSRL

SEQ ID NO: 78757 - protein, 99 aa, Homo sapiens
NVLKIAPESAIKFMAYEQTLKNWWLQQYSHDSADPGILVLLACGTISSTCGQIASYPLALVRTRMQAQGSSDSPASASRVAGITAGGHAMSSLMERTMW

SEQ ID NO: 78758 - protein, 639 aa, Homo sapiens
MNRYTTIRQLGDGTYGSVLLGRSIESGELIAIKKMKRKFYSWEECMNLREVKSLKKLNHANVVKLKEVIRENDHLYFIFEYMKENLYQLIKERNKLFPESAIRNIMYQILQGLAFIHKHGFFHRDLKPENLLCMGPELVKIADFGLAREIRSKPPYTDYVSTRWYRAPEVLLRSTNYSSPIDVWAVGCIMAEVYTLRPLFPGASEIDTIFKICQVLGTPKKTDWPEGYQLSSAMNFRWPQCVPNNLKTLIPNASSEAVQLLRDMLQWDPKKRPTASQALRYPYFQVGHPLGSTTQNLQDSEKPQKGILEKAGPPPYIKPVPPAQPPAKPHTRISSRQHQASQPPLHLTYPYKAEVSRTDHPSHLQEDKPSPLLFPSLHNKHPQSVSSPDSPKITAGLEHKNGEIKPKSRRRWGLISRSTKDSDDWADLDDLDFSPSLSRIDLKNKKRQSDDTLCRFESVLDLKPSEPVGTGNSAPTQTSYQRRDTPTLRSAAKQHYLKHSRYLPGISIRNGILSNPGKEFIPPNPWSSSGLSGKSSGTMSVISKVNSVGSSSTSSSGLTGNYVPSFLKKEIGSAMQRVHLAPIPDPSPGYSSLKAMRPHPGRPFFHTQPRSTPGLIPRPPAAQPVHGRTDWASKYASRR

SEQ ID NO: 78759 - protein, 118 aa, Homo sapiens
MKPDRDTLDEYFEYDAEEFLVSLALLITEGRTPECSVKGRTESFHCPPAQSCYPVTTKHECSDKLAQCRQARRTRSEVTLLWKNNLPIMVEMMLLPDCCYSDDGPTTEGIDLNDPAIK

SEQ ID NO: 78760 - protein, 183 aa, Homo sapiens
MLYLENNAQTQFSEPQYTNLGLLNSMDQQIQNGSSSTSPYNTDHAQNSVTAPSPYAQPSSTFDALSPSPAIPSNTDYPGPHSFDVSFQQSSTAKSATWTSLALSPRLECNGMISAHCNLHLLGSSGSPFSASQVGGITGTRHHAQLIFGTTSAHCNLRLLDSSDSPFSASQYSTELKKLYCQI

SEQ ID NO: 78761 - protein, 117 aa, Homo sapiens
MVGREKELSIHFVPGSCRLVEEEVNIPNRRVLVTGATGLLGRAVHKEFQQNNWHAVGCGFRRARPKFEQVNLLDSNAVHHIIHDFQLLLEHFSSTLAQIMYLMEQIHLTERKTYQLP

SEQ ID NO: 78762 - protein, 509 aa, Homo sapiens
MGCFKGVVAVGYINEAIDEGNPLRTLETLLLPTANISDVDPAHAQHYQDVLYHAKSQKLGDSESVSKVLWLDEIQQAVDDANVDKDRAKQWVTLVVDVNQCLEGKKSSDILSVLKSSTSNANDIIPECADKYYDALVKAKELKSERVSSDGSWLKLNLHKKYDYYYNTDSKESSWVTPESCLYKESWLTGKEIEDIIEEVTVGYIRENIWSASEELLLRFQATSSGPILREEFEARKSFLHEQEENVVKIQAFWKGYKQRKEYMHRRQTFIDNTDSIVKIQSWFRMATARKSYLSRLQYFRDHNNEIVKIQSLLRANKARDDYKTLVGSENPPLTVIRKFVYLLDQSDLDFQEELEVARLREEVVTKIRANQQLEKDLNLMDIKIGLLVKNRITLEDVISHSKKLNKKKGGEMEILNNTDNQGIKSLSKERRKTLETYQQLFYLLQTNPLYLAKLIFQMPQNKSTKFMDTVIFTLYNYASNQREEYLLLKLFKTALEEEIKSKVDQVQD

SEQ ID NO: 78763 - protein, 1220 aa, Homo sapiens [sequence omitted]

SEQ ID NO: 78764 - protein, 644 aa, Homo sapiens
MMEEEELEFVEELEAVLQLTPEVQLAIEQVFPSQDPLDRADFNAVEYINTLFPTEQSLANIDEVVNKIRLKIRRLDDNIRTVVRGQTNVGQDGRQVKEITRDIKQLDHAKRHLTTSITTLNHLHMLAGGVDSLEAMTRRRQYGEVANLLQGVMNVLEHFHKYMGIPQIRQLSERVKAAQTELGQQILADFEEAFPSQGTKRPGGPSNVLRDACLVANILDPRIKQEIIKKFIKQHLSEYLVLFQENQDVAWLDKIDRRYAWIKRQLVDYEEKYGRMFPREWCMAERIAVEFCHVTRAELAKIMRTRAKEIEVKLLLFAIQRTTNFEGFLAKRFSGCTLTDGTLKKLESPPPSTNPFLEDEPTPEMEELATEKGDLDQPKKPKAPDNPFHGIVSKCFEPHLYVYIESQDKNLGELIDRFVADFKAQGPPKPNTDEGGAVLPSCADLFVYYKKCMVQCSQLSTGEPMIALTTIFQKYLREYAWKILSGNLPKTTTSSGGLTISSLLKEKEGSEVAKFTLEELCLICNILSTAEYCLATTQQLEEKLKEKVDVSLIERINLTGEMDTFSTVISSSIQLLVQDLDAACDPALTAMSKVRSWEMASYKLTRAAQGGFYWPLSVASPGSSERKGSAEENGEAPEFLKALS

SEQ ID NO: 78765 - protein, 38 aa, Homo sapiens
  MOD_RES (1)..(1): Any amino acid
XAECQLQLHNFPMDEHSCPLIFSSSTILAFRLSLHAYR

SEQ ID NO: 78766 - protein, 149 aa, Homo sapiens
MASGSNWLSGVNVVLVMAYGSLVFVLLFIFVKRQIMRFAMKSRRGPHVPVGHNAPKDLKEEIDIRLSRVQDIKYEPQLLADDDARLLQLETQGNQSCYNYLYRMKALDAIRTSDGVLLCCPGWSAVARSWLTTTSTSWVQAVLLPQPPE

SEQ ID NO: 78767 - protein, 149 aa, Homo sapiens
MNTADQARVGPADDGPAPSGEEEGEGGGEAGGKEPAADAAPGPSAAFRLMVTRREPAVKLQYAVSGLEPLAWSEDHRVSVSTARSIAVLELICDVHNPGQDLVIHRTSVPAPLNSCLLKVGSKTEVAECKEKFAASKDPTAFTHCQLSP

SEQ ID NO: 78768 - protein, 70 aa, Homo sapiens
MSRRVVRQSKFRHVFGQAAKADQAYEDIRVSKVTWDSSFCAVNPKFLAIIVEAGGGGAFIVLPLAKVVTM

SEQ ID NO: 78769 - protein, 203 aa, Homo sapiens
  MOD_RES (1)..(1): Any amino acid
XRHGALAELCPPGGSHRMALGTAAALAFRFSLQVIQTHSRSEGSNVIRNEQLPLQYLADVDTSDEESIRAHVMASHHSKRRGRASSESQGLGAGVRTEADVEEEALRRKLEELTSNVSDQETSSEEEEAKDEKAEPNRDKSVGPLPQADPEVGTAAHQTNRQEKSPQDPGDPVQYNRTTDEELSELEDRVAVTASEVQQAESE

SEQ ID NO: 78770 - protein, 349 aa, Homo sapiens
MDPSDFPSPFDPLTLPEKPLAGDLPVDMEFGEDLLESQTAPTRGWAPPGPSPSSGALDLLDTPAGLEKDPGVLDGATELLGLGGLLYKAPSPPEVDHGPEGTLAWDAGDQTLEPGPGGQTPEVVPPDPGAGANSCSPEGLLEPLAPDSPITLQSPHIEEEETTSIATARRGSPGQEEELPQGQPQSPNAPPSPSVGETLGDGINSSQTKPGGSSPPAHPSLPGDGLTAKASEKPPERVQKRSERVRRAEPPKPEVVDSTESRRSGTPRTRLWRRLVLEAPSMSSAHPSVSPCMRPSSSARSPSLGIPPTLLAAAYARRLERSCTRSAMAAWYTGSAAILASPNSGPTRD

SEQ ID NO: 78771 - protein, 222 aa, Homo sapiens
MSAAFPPSLMMMQRPLGSSTAFSIDSLIGSPPQPSPGHFVYTGYPMFMPYRPVVLPPPPPPPPALPQAALQPALPPAHPHHQIPSLPTGFCSSLAQGMALTSTLMATLPGGFSASPQHQEAAAARKFAPQPLPGGGNFDKAEALQADAEDGKGFLAKEGSLLAFSAAETVQASLGRLCRSAVTWGSGRGCPRARERRVKGGRRPEGQGGELLAGERCGLQLG

SEQ ID NO: 78772 - protein, 178 aa, Homo sapiens
  MOD_RES (1)..(1): Any amino acid
XTGVDKRDRKKSIQQLVPEYKEKQTPESLPQNNNPDWHPTNLTLSDETCQRSKNLKVDDKCPSVSPSMPENQSATKELGQMNLTEREKMDTGVVLLSGNDTLHDLCQSQLPENKESKEAEQDSELTSEEEQERLKGCENKQPQKTSQEPEMAKDCDREDIPIYPVLPHVQKSEEMWIE

SEQ ID NO: 78773 - protein, 88 aa, Homo sapiens
MVKKIEISQHAKYTCSFCGKTKMKRRAVGIWHCGSCMKTVAGGAWTYKKMSAENGQQREPLMSFDHQEMPKWNQISMNSANGRRGKGR

SEQ ID NO: 78774 - protein, 376 aa, Homo sapiens
MELEVRRVRQAFLSGRSRPLRFRLQQLEALRRMVQEREKDILTAIAADLCKSEFNVYSQEVITVLGEIDFMLENLPEWVTAKPVKKNVLTMLDEAYIQPQPLGVVLIIGAWNYPFVLTIQPLIGAIAAGNAVIIKPSELSENTAKILAKLLPQYLDQEFYGENIKESPDYERIINLRHFKRILSLLEGQKIAFGGETDEATRYIAPTVLTDVDPKTKVMQEEIFGPILPIVPVKNVDEAINFINEREKPLALYVFSHNHKLIKRMIDETSSGGVTGNDVIMHFTLNSFPFGGVGSSGMGAYHGKHSFDTFSHQRPCLLKSLKREGANKLRYPPNSQSKVDWGKFFLLKRFNKEKLGLLLLTFLGIVAAVLVKAEYY

SEQ ID NO: 78775 - protein, 41 aa, Homo sapiens
  MOD_RES (1)..(1): Any amino acid
XDTPAKAIATSLHEICSKVRLWLNGRMPKRWPAAPYRKGPM

SEQ ID NO: 78776 - protein, 90 aa, Homo sapiens
MELYTGLQKLTIKNSGLRSIQPRAFAKNPHLRYINLSSNRLTTLSWQLFQTLSLRELQLEQNFFNCSCDIRWMQLWQEQGEAKLNSQNLY

SEQ ID NO: 78777 - protein, 111 aa, Homo sapiens
MMAPPTAGPLPGPALPPEDPGPDPESRWLFLSANILPVVERCMGAMQEGMQMVKLRGGSKGLVRFYYLDEHRSCIRWRPSRKNEKAKISIDSIQEVSEGRQSEVFQRYPDG

SEQ ID NO: 78778 - protein, 1133 aa, Homo sapiens
MDGKRRPGPGPGVPPKRARGGLWDDDDAPRPSQFEEDLALMEEMEAEHRLQEQEEEELQSVLEGVADGQVPPSAIDPRWLRPTPPALDPQTEPLIFQQLEIDHYVGPAQPVPGGPPPSRGSVPVLRAFGVTDEGFSVCCHIHGFAPYFYTPAPPGFGPEHMGDLQRELNLAISRDSRGGRELTGPAVLAVELCSRESMFGYHGHGPSPFLRITVALPRLVAPARRLLEQGIRVAGLGTPSFAPYEANVDFEIRFMVDTDIVGCNWLELPAGKYALRLKEKATQCQLEADVLWSDVVSHPPEGPWQRIAPLRVLSFDIECAGRKGIFPEPERDPVIQICSLGLRWGEPEPFLRLALTLRPCAPILGAKVQSYEKEEDLLQAWSTFIRIMDPDVITGYNIQNFDLPYLISRAQTLKVQTFPFLGRVAGLCSNIRDSSFQSKQTGRRDTKVVSMVGRVQMDMLQVLLREYKLRSYTLNAVSFHFLGEQKEDVQHSIITDLQNGNDQTRRRLAVYCLKDAYLPLRLLERLMVLVNAVEMARVTGVPLSYLLSRGQQVKVVSQLLRQAMHEGLLMPVVKSEGGEDYTGATVIEPLKGVRPQDRAGAAWELLALTPGRGCSPPRYYDVPIATLDFSSLYPSIMMAHNLCYTTLLRPGTAQKLGLTEDQFIRTPTGDEFVKTSVRKGLLPQILENLLSARKRAKAELAKETDPLRRQVLDGRQLALKVSANSVYGFTGAQVGKLPCLEISQSVTGFGRQMIEKTKQLVESKYTVENGYSTSAKVVYGDTDSVMCRFGVSSVAEAMALGREAADWVSGHFPSPIRLEFEKVYFPYLLISKKRYAGLLFSSRPDAHDRMDCKGLEAVRRDNCPLVANLVTASLRRLLIDRDPEGAVAHAQDVISDLLCNRIDISQLVITKELTRAASDYAGKQAHVELAERMRKRDPGSAPSLGDRVPYVIISAAKGVAAYMKSEDPLFVLEHSLPIDTQYYLEQQLAKPLLRIFEPILGEGRAEAVLLRGDHTRCKTVLTGKVGGLLAFAKRRNCCIGCRTVLSHQGAVCEFCQPRESELYQKEVSHLNALEERFSRLWTQCQRCQGSLHEDVICTSRDCPIFYMRKKVRKDLEDQEQLLRRFGPPGPEAW

SEQ ID NO: 78779 - protein, 406 aa, Homo sapiens
MLSPAPEEPLLLAELKPGRPHQFDWKSSCETWSVAFSPDGSWFAWSQGHCIVKLIPWPLEEQFIPKGFEAKSRSSKNETKGRGSPKEKTLDCGQIVWGLAFSPWPSPPSRKLWARHHPQVPDVSCLVLATGLNDGQIKIWEVQTGLLLLNLSGHQDVVRDLSFTPSGSLILVSASRDKTLRIWDLNKHGKQIQVLSGHLQWVYCCSISPDCSMLCSAAGEKSVFLWSMRSYTLIRKLEGHQSSVVSCDFSPDSALLVTASYDTNVIMWDPYTGERLRSLHHTQVDPAMDDSDVHISSLRSVCFSPEGLYLATVADDRLLRIWALELKTPIAFAPMTNGLCCTFFPHGGVIATGTRDGHVQFWTAPRVLSSLKHLCRKALRSFLTTYQVLALPIPKKMKEFLTYRTF

SEQ ID NO: 78780 - protein, 87 aa, Homo sapiens
  MOD_RES (1)..(1): Any amino acid
XFIILTLTSIGFLLDQRPKAAIMETLRCLMFLMLYRFGHLKPLVPSLSSAFESYSVISEIGLQAKENFGELLSLSDCLTAGNHPKVH

SEQ ID NO: 78781 - protein, 135 aa, Homo sapiens
  MOD_RES (1)..(1): Any amino acid
XELGDYDQSENLSGYLSDYSFIPNQPQDFEKEIAKLHQQHIGLSPAEAEFNYLNTARTLELYGVEFHYARDQSNNEIMIGVMSGGILIYKNRVRMNTFPWLKIVKISFKCKQFFIQLRKELVSTDLIIIDINEAF

SEQ ID NO: 78782 - protein, 235 aa, Homo sapiens
  MOD_RES (1)..(1): Any amino acid
XRYNEENYGVVSTYDSSLSSYTVPLERDNSEEFLKREARANQLAEEIESSAQYKARVALENDDRSEEEKYTAVQRNSSEREGHSINTRENKYIPPGQRNREVISWGSGRQNSPRMGQPGSGSMPSRSTSHTSDFNPNSGSDQRVVNGGPPRMSPKAQRHPRNHRVSAGRGSISSGLEFVSHNPPSEAATPPVARTSPSGGTWSSVVSGAKDSRLQDQRQNSPAGNKENIKPNETS

SEQ ID NO: 78783 - protein, 105 aa, Homo sapiens
MAKSGLRQDPQSTAAATVLKRAVELDSESRYPQALVCYQEGIDLLLQVLKGTKDNTKRCNLREKISKYMDRAENIKKYLDQEKEEAKETPGISLRFCCESKHLRS

SEQ ID NO: 78784 - protein, 508 aa, Homo sapiens
MVAEAGSMPAASSVKKPFGLRSKMGKWCRHCFAWCRGSGKSNVGTSGDHDDSAMKTLRSKMGKWCCHCFPWCRGSGKSNVGTSGDHDDSAMKTLRSKMGKWCCHCFPCCRGSGKNKVGPWGDYDDSAFMEPRYHVRREDLDKLHRAAWWGKVPRKDLIVMLKDTDMNKKDKQKRTALHLASANGNSEVVKLLLDRRCQLNILDNKKRTALTKAVQCQEDECALMLLEHGTDPNIPDEYGNTALHYAIYNEDKLMAKALLLYGADIESKNKHGLTPLLLGVHEQKQQVVKFLIKKKANLNALDRYGRTALILAVCCGSASIVSLLLEQNIDVSSQDLSGQTAREYAVSSRHNVICQLLSDYKEKQILKVSSENSNPEQDLKLTSEEESQRLKGSENSQPEEMSQEPEINKGGDRKVEEEMKKHGSTHMGFPENLTNGATADNGDDGLIPPRKSRTPESQQFPDTENEQYHSDEQNDTQKQLSEEQNTGILQDEILIHEEKQIEVAENEF

SEQ ID NO: 78785 - protein, 84 aa, Homo sapiens
MVLAPLPDPGPPSLAVAPEPCPQPLRSPSLDNPTPFPNLGPSENPLKRLLVPGEEWEFEVTAFYRGRQVFQQTISCPEGLRLVG

SEQ ID NO: 78786 - protein, 440 aa, Homo sapiens; identical to SEQ ID NO: 2336

SEQ ID NO: 78787 - protein, 153 aa, Homo sapiens
MSPHPTALLGLVLCLAQTIHTQEEDLPRPSISAEPGTVIPLGSHVTFVCRGPVGVQTFRLERDSRSTYNDTEDVSQASPSESEARFRIDSVREGNAGLYRCIYYKPPKWSEQSDYLELLVKESSGGPDSPDTEPGSSAGPTQRPSDNSHNERE

SEQ ID NO: 78788 - protein, 169 aa, Homo sapiens
MATLLSHPQQRPPFLRQAIKIRRRRVRDLQDPPPQMAPEIQPPSHHFSPEQRALLYEDALYTVLHRLGHPEPNHVTEASELLRYLQEAFHVEPEEHQQTLQRVRELEKPIFCLKATVKQAKGILGKDVSGFSDPYCLLGIEQGVGVPGGSPGSRHRQKAVVRHTIPEEE

SEQ ID NO: 78789 - protein, 93 aa, Homo sapiens
MGEPGQSPSPRSSHGSPPTLSTLTLLLLLCGHAHSQCKILRCNAEYVSSTLSLRGGGSSGALRGGGGGGRGGGVGSGGLCRALRSYALCTRRT

SEQ ID NO: 78790 - protein, 788 aa, Homo sapiens
MNPRQGYSLSGYYTHPFQGYEHRQLRYQQPGPGSSPSSFLLKQIEFLKGQLPEAPVIGKQTPSLPPSLPGLRPRFPVLLASSTRGRQVDIRGVPRGVHLRSQGLQRGFQHPSPRGRSLPQRGVDCLSSHFQELSIYQDQEQRILKFLEELGEGKATTAHDLSGKLGTPKKEINRVLYSLAKKGKLQKEAGTPPLWKIAVSTQAWNQHSGVVRPDGHSQGAPNSDPSLEPEDRNSTSVSEDLLEPFIAVSAQAWNQHSGVVRPDSHSQGSPNSDPGLEPEDSNSTSALEDPLEFLDMAEIKEKICDYLFNVSDSSALNLAKNIGLTKARDINAVLIDMERQGDVYRQGTTPPIWHLTDKKRERMQIKRNTNSVPETAPAAIPETKRNAEFLTCNIPTSNASNNMVTTEKVENGQEPVIKLENRQEARPEPARLKPPVHYNGPSKAGYVDFENGQWATDDIPDDLNSIRAAPGEFRAIMEMPSFYSHGLPRCSPYKKLTECQLKNPISGLLEYAQFASQTCEFNMIEQSGPPHEPRFKFQVVINGREFPPAEAGSKKVAKQDAAMKAMTILLEEAKAKDSGKSEESSHYSTEKESEKTAESQTPTPSATSFFSGKSPVTTLLECMHKLGNSCEFRLLSKEGPAHEPKFQYCVAVGAQTFPSVSAPSKKVAKQMAAEEAMKALHGEATNSMASDNQPEGMISESLDNLESMMPNKVRKIGELVRYLNTNPVGGLLEYARSHGFAAEFKLVDQSGPPHEPKFVYQAKVGGRWFPAVCAHSKKQAPSHWQHLP

SEQ ID NO: 78791 - protein, 44 aa, Homo sapiens
MAQVLHVPAPFPGTPGPASPPAFPAKDPDPPYSVETPYGYRLDL

SEQ ID NO: 78792 - protein, 167 aa, Homo sapiens
MKLWVSALLMAWFGVLSCVQAEFFTSIGHMTDLIYAEKELVQSLKEYILVEEAKLSKIKSWANKMEALTSKSAADAEGYLAHPVNAYKLVKRLNTDWPALEDLVLQDSAAGFIANLSVQRQFFPTDEDEIGAAKALMRLQDTYRLDPGTISRGELPGTKYQAMLSVD

SEQ ID NO: 78793 - protein, 153 aa, Homo sapiens
  MOD_RES (1)..(1): Any amino acid
XGICREGDQLVVGPTDDGCFLELRVCSIQRNRSACRVLRAGQAATLALGDFDRALLRKGMVMVSPEMNPTICSVFEAEIVLLFHATTFRRGFQVTVHVGNVRQTAVVEKIHAKDKLRTGEKAVARERGVLSATCSLPTFWRGAKLGVARKGQS

SEQ ID NO: 78794 - protein, 138 aa, Homo sapiens
MALVRGGWLWRQNVQPPEGRSRDGLLTVNLREGGRLHLCAETKDDALAWKTALLEANSTPVRVYSPYQDYYEVVPPNAHEATYVRSYYGPPYAGPGVTHVIVREDPCYSAGAPLAMGMLAGAATGAALGSLMWSPCWF

SEQ ID NO: 78795 - protein, 620 aa, Homo sapiens
MDKYDDLGLEASKFIEDLNMYEASKDGLFRVDKGAGNNPEFEETRRVFATKMAKIHLQQQQQQLLQEETLPRGSRGPVNGGGRLGPQARWEVVGSKLTVDGAAKPPLAASTGAPGAVTTLAAGQPPYPPQEQRSRPYLHGTRHGSQDCGSRESLATSEMSAFHQPGPCEDPSCLTHGDYYDNLSLASPKWGDKPGVSPSIGLSVGSGWPSSPGSDPPLPKPCGDHPLNHRQLSLSSSRSSEGSLGGQNSGIGGRSSEKPTGLWSTASSQRVSPGLPSPNLENGAPAVGPVQPRTPSVSAPLALSCPRQGGLPRSNSGLGGEVSGVMSKPNVDPQPWFQDGPKSYLSSSAPSSSPAGLDGSQQGAVPGLGPKPGCTDLGTGPKLSPTSLVHPVMSTLPELSCKEGPLGWSSDGSLGSVLLDSPSSPRVRLPCQPLVPGPELRPSAAELKLEALTQRLEREMDAHPKADYFGACVKCSKGVFGAGQACQAMGNLYHDTCFTCAACSRKLRGKAFYFVNGKVFCEEDFLYSGFQQSADRCFLCGHLIMDMILQALGKSYHPGCFRCVICNECLDGVPFTVDSENKIYCVRDYHKVLAPKCAACGLPILPPEVRCPSRHAPRGF

SEQ ID NO: 78796 - protein, 272 aa, Homo sapiens
MDTTRYSKWGGSSEEVPGGPWGRWVHWSRRPLFLALAVLVTTVLWAVILSILLSKASTERAALLDGHDLLRTNGSGTQAQLQTTRAELGEAQAKLMEQESALRELRERVTQGLAEAGRGREDVRTELFRALEAVRLQNNSCEPCPTSWLSFEGSCYFFSVPKTTWAAAQDHCADASAHLVIVGGLDEQGFLTRNTRGRGYWLGLRAVRHLGKVQGYQWVDGVSLSFSHWNQGEPNDAWGRENCVMMLHTGLWNDAPCDSEKDGWICEKRHNC

SEQ ID NO: 78797 - protein, 212 aa, Homo sapiens
MSLWLGAPVPDIPPDSAVELWKPGAQDASSQAQGGSSCILREEARMPHSAGGTAGVGLEAAEPTALLTRAEPPSEPTEIRPQKRKKGPAPKMLGNELCSVCGDKASGFHYNVLSCEGCKGFFRRSVIKGAHYICHSGGHCPMDTYMRRKCQECRLRKCRQAGMREECVLSEEQIRLKKLKRQEEEQAHATSLPPRASSPPQILPQLSPEQLG

SEQ ID NO: 78798 - protein, 292 aa, Homo sapiens
MAGAGRGAAVSRVQAGPGSPRRARGRQQVQPLGKQRPAPWPGLRSKEKKKVNCKPKNQDEQEIPFRLREIMRSRQEMKNPISNKKRKKAAVLQWTSVTAQVTFRKTLEKEAKGEEPDIAVPKFKQRKGESDGAYIHRMQQEAQHVLFLSKNQAIRQPEVQAAPKEKSEQKKAKKAFQKRRLDKVRRKKEEKAADRLEQELLRDTVKFGEVVLQPPELTARPQRSVSKDQPGRRSQMLRMLLSPGGVSQPLTASLARQRIVEEERERAVQAYRALKQRQQQLHGERPHLTSRK

SEQ ID NO: 78799 - protein, 76 aa, Homo sapiens
MDALCGSGELGSKFWHWGARESEEECAAGAQRHSAWLGESAPSQPLRRVRKGRFAISRGFLMEGLPSASASGKTEV

SEQ ID NO: 78800 - protein, 263 aa, Homo sapiens
  MOD_RES (1)..(1): Any amino acid
XESDLPSAVTLLKNLQEQVMAVTAQVKSLTQKVQAGAYPTEKGLSFLEVKDQLLLMYLMDLTHLILDKASGGSLQGHDAVLRLVEIRTLSSEDEEEDEAEDDQSEASGKKSVKGVSKKYVPPRLVPVHYDETEAEREKKRLERAKRRALSSSVIRELKEQYSDAPEEIRDARHPHVTRQSQEDQHRINYEESMMVRLSVSKREKGRRKRANVMSSQLHSLTHFSDISALTGGTVHLDEDQNPIKKRKKIPQKGRKKKGFRRRR

SEQ ID NO: 78801 - protein, 293 aa, Homo sapiens
MASNVTNKMDPHSVNSRVFIGNLNTLVVKKSDVEAIFSKYGKIAGCSVHKGFAFVQYDKEKNARAAVAGEDGRMIASQVAVINLAAEPKVNRGNAGVKRSAAEMYGSSFDLDYGFQRDYYDGMYSFPARVPPPPPIALAVVPSKHQRISGNTSRRGKSGFNSKSGKRGSSKSGKLKGDDLQAIKQELTQIKQKVDSLLENLEKIEKEQSKQEVEVKNAKSEEEQSSSSMKKDETHVKMESEGGAEDSAEEGDPLDDDDNEDQGDNQLHLIKNNEKDAEEGEDNRDSTNGQDDS

SEQ ID NO: 78802 - protein, 209 aa, Homo sapiens
MSVDKAELCGSLLTWLQTFHVPSPCASPQDLSSGLAVAYVLNQIDPSWFNEAWLQGISEDPGPNWKLKVTSGLLIRGQTGEEMTRDGPARHMSWVMGRKRDRCLVSNLKMVLRSLVEYSQDVLAHPVSEEHLPDVSLIGEFSDPAELGKLLQLVLGCAISCEKKQDHIQRIMTLEESVQHVVMEAIQELMTKDTPDSLSPETYGNFDSQ

SEQ ID NO: 78803 - protein, 197 aa, Homo sapiens
  MOD_RES (1)..(1): Any amino acid
XIEDGPVGVLGTLFQEYTMDVFFRQTWTDERLKFGGPTEILSLNNLMVSKIWTPDTFFRNGKKSIAHNMTTPNKLFRIMQNGTILYTMRLTINADCPMRLVNFPMDGHACPLKFGSYAYPKSEIIYTWKKGPLYSVEVPEESSSLLQYDLIGQTVSSETIKSNTGEYVIMTVYFHLQRKMGYFMIQIYTPCIMTVIL

SEQ ID NO: 78804 - protein, 341 aa, Homo sapiens; identical to SEQ ID NO: 40288

SEQ ID NO: 78805 - protein, 323 aa, Homo sapiens
  MOD_RES (1)..(1): Any amino acid
XGFAQMLKEGAKHFSGLEEAVYRNIQACKELAQTTRTAYGPNGMNKMVINHLEKLFVTNDAATILRELEVQHPAAKMIVMASHMQEQEVGDGTNFVLVFAGALLELAEELLRIGLSVSEVIEGYEIACRKAHEILPNLVCCSAKNLRDIDEVSSLLRTSIMSKQYGNEVFLAKLIAQACVSIFPDSGHFNVDNIRVCKILGTVLIKTAEELMNFSKGEENLMDAQVKAIADTGANVVVTGGKVADMALHYANKYNIMLVRLNSKWDLRRLCKTVGATALPRLTPPVLEEMGHCDSVYLSEVGDTQVVVFKHEKEDGAISTIVL

SEQ ID NO: 78806 - protein, 68 aa, Homo sapiens
MDCKVHMETTVSRPVLSPTHINATASETFTVLQQRMRIVEEQTSSLRDDLIMLDFGEKRRMQPLLKRN

SEQ ID NO: 78807 - protein, 172 aa, Homo sapiens
  MOD_RES (1)..(1): Any amino acid
XSKPAPMFLDDSFRKWARIREFVPPFGIKGQDNLIKAILSVTKEYRLTPALDSLRCRRCIIVGNGGVLANKSLGSRIDDYDIVVRLNSAPVKGFEKDVGSKTTLRITYPEGAMQRPEQYERDSLFVLAGFKWQDFKWLKYIVYKERVGLTPLPRLECSGTISAHCSLDLPGL

SEQ ID NO: 78808 - protein, 247 aa, Homo sapiens
MNPLLILAFVGAAVAAPFDDDDKIVGGYICEENSVPYQVSLNSGYHFCGGSLISEQWVVSAGHCYKSRIQVRLGEHNIEVLEGNEQFINAAKIIRHPKYNSRTLDNDILLIKLSSPAVINSRVSAISLPTAPPAAGTESLISGWGNTLSSGADYPDELQCLDAPVLSQAECEASYPGKITNNMFCVGFLEGGKDSCQGDSGGPVVSNGELQGIVSWGYGCAQKNRPGVYTKVYNYVDWIKDTIAANS

SEQ ID NO: 78809 - protein, 189 aa, Homo sapiens
MSLADLTKTNIDEHFFGVALENNRRSAACKRSPGTGDFSRNSNASNKSVDYSRSQCSCGSLSSQYDYSEDFLCDCSEKAINRNYLKQPVVKEKEKKKYNVSKISQSKGQKEISVEKKHTWNASLFNSQIHMIAQRRDAMAHRILSARLHKIKGLKNELADMHHKLEAILTENQFLKQLQLRHLKAIGKY

SEQ ID NO: 78810 - protein, 500 aa, Homo sapiens
MSGVRAVRISIESACEKQVHEVGLDGTETYLPPLSMSQNLARLAQRIDFSQGSGSEEEEAAGTEGDAQEWPGAGSSADQDDEEGVVKFQPSLWPWDSVRNNLRSALTEMCVLYDVLSIVRDKKFMTLDPVSQDALPPKQNPQTLQLISKKKSLAGAAQILLKGAERLTKSVTENQENKLQRDFNSELLRLRQHWKLRKVGDKILGDLSYRSAGSLFPHHGTFEVIKNTDLDLDKKIPEDYCPLDVQIPSDLEGSAYIKVSIQKQAPDIGDLGTVNLFKRPLPKSKPGSPHWQTKLEAAQNVLLCKEIFAQLSREAVQIKSQVPHIVVKNQIISQPFPSLQLSISLCHSSNDKKSQKFATEKQCPEDHLYVLEHNLHLLIREFHKQTLSSIMMPHPASAPFGHKRMRLSGPQAFDKNEINSLQSSEGLLEKIIKQAKHIFLRSRAAATIDSLASRIEDPQIQAHWSNINDVYESSVKVLITSQGYEQICNMCVYKGPFNCN

SEQ ID NO: 78811 - protein, 86 aa, Homo sapiens
MKQEGSARRRGADKAKPPPGGGEQEPPPPPAPQDVEMKEETFCSPSWKSPWTQRLIYSSVPAREKLRRHPSCLKWKPISNSSWSSS

SEQ ID NO: 78812 - protein, 185 aa, Homo sapiens
SALEKKVIVGGVDLLAKAEEQEKLLEESNMELEERRKRAEQLRRELEEKEQERLDIEEKYTSLQEEAQGKTKKLKKVWTMLMAAKSEEMIENYVHWNEDIGEWQLKCVAYTGNNMRKQTPVPDKKEKDPFEVDLSHVYLAYTEESLRQSLMKLERPRTSKGKARPKTGRRKRSAKPETVIDSLLQ

SEQ ID NO: 78813 - protein, 2154 aa, Homo sapiens
MPGLDRPLSRQNPHDGVVTPAASPSLPQPGLQMPGQWGPVQGGPQPSGQHRSPCPEGPVPSGVPCATSVPHFPTPSILHQGPGHEQHSPLVAPPAALPSDGRDEVSHLQSGSHLANNSDPESTFRQNPRIVNHWASPELRQNPGVKNEHRPASALVNPLARGDSPENRTHHPLGAGAGSGCAPLEADSGASGALAMFFQGGETENEENLSSEKAGLSGQADFDDFCSSPGLGRPPAPTHVGAGSLCQALLPGPSNEAAGDVWGDTASTGVPDASGSQYENVENLEFVQNQEVLPSEPLNLDPSSPSDQFRYGPLPGPAVPRHGAVCHTGAPDATLHTVHPDSVSSSYSSRSHGRLSGSARPQELVGTFIQQEVGKPEDEASGSFFKQIDSSPVGGETDETTVSQNYRGSVSQPSTPSPPKPTGIFQTSANSSFEPVKSHLVGVKPFEADRANVVGEVRETCVRQKQCRPAAALPDASPGNLEQPPDNMETLCAPQVCPLPLNSTTEAVHMLPHAGAPPLDTVYPAPEKRPSARTQGPVKCESPATTLWAQSELPDFGGNVLLAPAAPALYVCAKPQPPVVQPPEEAMSGQQSRNPSSAAPVQSRGGIGASENLENPPKMGEEEALQSQASSGYASLLSSPPTESLQNPPVLIAQPDHSYNLAQPINFSVSLSNSHEKNQSWREALVGDRPAVSSWALGGDSGENTSLSGIPTSSVLSLSLPSSVAQSNFPQGSGASEMVSNQPANLLVQPPSQPVPENLVPESQKDRKAGSALPGFANSPAGSTSVVLVPPAHGTLVPDGNKANHSSHQEDTYGALDFTLSRTLENPVNVYNPSHSDSLASQQSVASHPRQSGPGAPNLDRFYQQVTKDAQGQPGLERAQQELVPPQQQASPPQLPKAMFSELSNPESLPAQGQAQNSAQSPASLVLVDAGQQLPPRPPQSSSVSLVSSGSGQAAVPSEQPWPQPVPALAPGPPPQDLAAYYYYRPLYDAYQPQYSLPYPPEPGAASLYYQDVYSLYEPRYRPYDGAASAYAQNYRYPEPERPSSRASHSSERPPPRQGYPEGYYSSKSGWSSQSDYYASYYSSQYDYGDPGHWDRYHYSARVRDPRTYDRRYWCDAEYDAYRREHSAFGDRPEKRDNNWRYDPRFTGSFDDDPDPHRDPYGEEVDRRSVHSEHSARSLHSAHSLASRRSSLSSHSHQSQIYRSHNVAAGSYEAPLPPGSFHGDFAYGTYRSNFSSGPGFPEYGYPADTVWPAMEQVSSRPTSPEKFSVPHVCARFGPGGQLIKVIPNLPSEGQPALVEVHSMEALLQHTSEQEEMRAFPGPLAKDDTHKVDVINFAQNKAMKCLQNENLIDKESASLLWNFIVLLCRQNGTVVGTDIAELLLRDHRTVWLPGKSPNEANLIDFTNEAVEQVEEEESGEAQLSFLTGGPAAAASSLERETERFRELLLYGRKKDALESAMKNGLWGHALLLASKMDSRTHARVMTRFANSLPINDPLQTVYQLMSGRMPAASTCCGDEKWGDWRPHLAMVLSNLNNNMDVESRTMATMGDTLASRGLLDAAHFCYLMAQAGFGVYTKKTTKLVLIGSNHSLPFLKFATNEAIQRTEAYEYAQSLGAETCPLPSFQVFKFIYSCRLAEMGLATQAFHYCEAIAKSILTQPHLYSPVLISQLVQMASQLRLFDPQLKEKPEEESLAAPTWLVHLQQVERQIKEGAGVWHQDGALPQQCPGTPSSEMEQLDRPGLSQPGALGIANPLLAVPAPSPEHSSPSVRLLPSAPQTLPDGPLASPARVPMFPVPLPPGPLEPGPGCVTPGPALGFLEPSGPGLPPGVPPLQERRHLLQEARSPDPGIVPQEAPVGNSLSELSEENFDGKFANLTPSRTVPDSEAPPGWDRADSGPTQPPLSLSPAPETKRPGQAAKKETKEPKKGESWFFRWLPGKKKTEAYLPDDKNKSIVWDEKKNQWVNLNEPEEEKKAPPPPPTSMPKTVQAAPPALPGPPGAPVNMYSRRAAGTRARYVDVLNPSGTQRSEPALAPADFVAPLAPLPIPSNLFVPTPDAEEPQLPDGTGREGPAAARGLANPEPAPEPKLSRCSSMSSLSREVSQHFNQAPGDLPAAGGPPSGAMPFYNPAQLAQACATSGSSRLGRIGQRKHLVLN

SEQ ID NO: 78814 - protein, 245 aa, Homo sapiens
MSDTWSSIQAHKKQLDSLRERLQRRRKQDSGHLDLRNPEAALSPTFRSDSPVPTAPTSGGPKPSTASAVPELATDPELEKKLLHHLSDLALTLPTDAVSICLAISTPDAPATQDGVESLLQKFAAQELIEVKRGLLQDDAHPTLVTYADHSKLSAMMGAVAEKKGPGEVAGTVTGQKRRAEQDSTTVAAFASSLVSGLNSSASEPAKEPAKKSRKHAASDVDLEIESLLNQQSTKEQQSKKTNYQ

SEQ ID NO: 78815 - protein, 1462 aa, Homo sapiens
MHPENKLTNHGKTGNGGAQSQHQNVNQGPTCNVGSKGVGAGNHGAKANQISPSNSSLKNPQAGVPPFSSLKGKVKRDRSVSVDSGEQREAGTPSLDSEAKEVAPRSKRRCVLERKQPYSGDEWCSGPDSEEDDKPIGATHNCNVADPAMAAPQLGPGQTTQLPLSESSVPGAPHGPPPGLRPDAPGGGGGGGGVPGKPPSQFVYVFTTHLANTAAEAVLQGRADSILAYHQQNVPRAKLDQAPKVPPTPEPLPLSTPSAGTPQSQPPPLPPPPPPAPGSAPPALPPEGPPEDSSQDLAPNSVGAASTGGGTGGTHPNTPTATTANNPLPPGGDPSSAPGPALLGEAAAPGNGQRSLVGSEGLSKEQLEHRERSLQTLRDIERLLLRSGETEPFLKGPPGGAGEGGPPAQAPPPPQQPPTAPPSGLKKYEEPLQSMISQTQSLGGPPLEHEVPGHPPGGDMGQQMNMMIQRLGQDSLTPEQVAWRKLQEEYYEEKRRKEEQIGLHGSRPLQDMMGMGGMMVRGPPPPYHSKPGDQWPPGMGAQLRGPMDVQDPMQLRGGPPFPGPRFPGNQIQRVPGFGGMQSMPMEVPMNAMQRPVRPGMGWTEDLPPMGGPSNFAQNTMPYPGGQGEAERFMTPRVREELLRHQLLEKRSMGMQRPLGMAGSGMGQSMEMERMMQAHRQMDPAMFPGQMAGGEGLAGTPMGMEFGGGRGLLSPPMGQSGLREVDPPMGPGNLNMNMNVNMNMNMNLNVQMTPQQQMLMSQKMRGPGDLMGPQGLSPEEMARVRAQNSSGVMGGPQKMLMPSQFPNQGQQGFSGGQGPYQAMSQDMGNTQDMFSPDQSSMPMSNVGTTRLSHMPLPPASNPPGTVHSAPNRGLGRRPSDLTISINQMGSPGMGHLKSPTLSQVHSPLVTSPSANLKSPQTPSQMVPLPSANPPGPLKSPQVLGSSLSVRSPTGSPSRLKSPSMAVPSPGWVASPKTAMPSPGVSQNKQPPLNMNSSTTLSNMEQGTLPPSGPRSSSSAPPANPPSGLMNPSLPFTSSPDPTPSQNPLSLMMTQMSKYAMPSSTPLYHNAIKTIATSDDELLPDRPLLPPPPPPQGSGPGISNSQPSQMHLNSAAAQSPMGMNLPGQQPLSHEPPPAMLPSPTPLGSNIPLHPNAQGTGGPPQNSMMMAPGGPDSLNAPCGPVPSSSQMMPFPPRLQQPHGAMAPTGGGGGGPGLQQHYPSGMALPPEDLPNQPPGPMPPQQHLMGKAMAGRMGDAYPPGVLPGVASVLNDPELSEVIRPTPTGIPEFDLSRIIPSEKPSSTLQYFPKSENQPPKAQPPNLHLMNLQNMMAEQTPSRPPNLPGQQGVQRGLNMSMCHPGQMSLLGRTGVPPQQGMVPHGLHQGVMSPPQGLMTQQNFMLMKQRGVGGEVYSQPPHMLSPQGSLMGPPPQQNLMVSHPLRQRSVSLDSQMGYLPAPGGMANLPF

SEQ ID NO: 78816 - protein, 297 aa, Homo sapiens
MRDQVLPQAVEGGYSTVTFDGTPSYGHTPSHHAAQFPNHSFKHEDPMGQQGSLGEQQYSVPPPVYGCHTPTDSCTGSQALLLRTPYSSDNLYQMTSQLECMTWNQMNLGATLKGHSTGYESDNHTTPILCGAQYRIHTHGVFRGIQDVRRVPGVAPTLVRSASETSEKRPFMCAYPGCNKRYFKLSHLQMHSRKHTGEKPYQCDFKDCERRFSRSDQLKRHQRRHTGVKPFQCKTCQRKFSRSDHLKTHTRTHTGKTSEKPFSCRWPSCQKKFARSDELVRHHNMHQRNMTKLQLAL

SEQ ID NO: 78817 - protein, 65 aa, Homo sapiens
  MOD_RES (1)..(1): Any amino acid
XIRVKPHPWYSGRISRQLAEEILMKRNHLGAFLIRESESSPGEFSVSVKAQRGPCLGPKSHSRLG

SEQ ID NO: 78818 - protein, 187 aa, Homo sapiens
MSVNYAAGLSPYADKGKCGLPEIFDPPEELERKVWELARLVWQSSSVVFHTGAGISTASGIPDFRDKLAELHGNMFVEECAKCKTQYVRDTVVGTMGLKATGRLCTVAKARGLRACRGELRDTILDWEDSLPDRDLALADEASRSGPAGTCRWLPSAGEAAWSSSTCSPPSTTAMLTSASMATLTRS

SEQ ID NO: 78819 - protein, 459 aa, Homo sapiens
METFDPTELPELLKLYYRRLFPYSQYYRWLNYGGVIKNYFQHREFSFTLKDDIYIRYQSFNNQSDLEKEMQKMNPYKIDIGAVYSHRPNQHNTVKLGAFQAQEKELVFDIDMTDYDDVRRCCSSADICPKCWTLMTMAIRIIDRALKEDFGFKHRLWVYSGRRGVHCWVCDESVRKLSSAVRSGIVEYLSLVKGGQDVKKKVHLSEKIHPFIRKSINIIKKYFEEYALVNQDILENKESWDKILALVPETIHDELQQSFQKSHNSLQRWEHLKKVASRYQNNIKNDKYGPWLEWEIMLQYCFPRLDINVSKGINHLLKSPFSVHPKTESHSVTQAGVQWRDLGSLQPLPSRFKQFSASPSQVAGITGRISVPIDLQKVDQFDPFTVPTISFICRELDAISTNEEEKEENEAESDVKHRTRDYKKTSLAPYVKVFEHFLENLDKSRKGELLKKSDLQKDF

SEQ ID NO: 78820 - protein, 101 aa, Homo sapiens
MKPSLLCRPLSCFLMLLPWPLATLTSTTLWQCPPGEEPDLDPGQGTLCRPCPPGTFSAAWGSSPCQPHARCSLWRRLEAQVGMATRDTLCGDCWPGWFGPW

SEQ ID NO: 78821 - protein, 89 aa, Homo sapiens
MLMGLDLLVFAHDHVGHGQSEGERMVVSDFHVFVRDVLQHVDSMQKDYPGLPVFLLGHSMGGAIAILTAAERPGHFAGMVLISPLVLAN

SEQ ID NO: 78822 - protein, 346 aa, Homo sapiens
MAPRSLLLLLSGALALTDTWAGSHSLRYFSTAVSRPGRGEPRYIAVEYVDDTQFLRFDSDAAIPRMEPREPWVEQEGPQYWEWTTGYAKANAQTDRVALRNLLRRYNQSEAGSHTLQGMNGCDMGPDGRLLRGYHQHAYDGKDYISLNEDLRSWTAADTVAQITQRFYEAEEYAEEFRTYLEGECLELLRRYLENGKETLQRADPPKAHVAHHPISDHEATLRCWALGFYPAEITLTWQRDGEEQTQDTELVETRPAGDGTFQKWAAVVVPSGEEQRYTCHVQHEGLPQPLILRWEQSPQPTIPIVGIVAGLVVLGAVVTGAVVAAVMWRKKSSGRKGSHKSQGKV

SEQ ID NO: 78823 - protein, 39 aa, Homo sapiens
  MOD_RES (1)..(1): Any amino acid
XGTGLSGSYLSDEGHYWVGLDISPAMLGPGIPSCPAAVP

SEQ ID NO: 78824 - protein, 683 aa, Homo sapiens
RGFIGTPAPPVCDSKFLLSPSSDVRMIPCRAALTFARCLIRRKIVTLDSLEDTKLCRCLSTMDLIALGVGSTLGAGVYVLAGEVAKADSGPSIVVSFLIAALASVMAGLCYAEFGARVPKTGSAYLYTYVTVGELWAFITGWNLILSYVIGTSSVARAWSGTFDELLSKQIGQFLRTYFRMNYTGLAEYPDFFAVCLILLLAGLLSFGVKESAWVNKVFTAVNILVLLFVMVAGFVKGNVANWKISEEFLKNISASAREPPSENGTSIYGAGGFMPYGFTGTLAGAATCFYAFVGFDCIATTGEEVRNPQKAIPIGIVTSLLVCFMAYFGVSAALTLMMPYYLLDEKSPLPVAFEYVGWGPAKYVVAAGSLCALSTSLLGSIFPMPRVIYAMAEDGLLFKCLAQINSKTKTPIIATLSSGAVAALMAFLFDLKALVDMMSIGTLMAYSLVAACVLILRYQPGLSYDQPKCSPEKDGLGSSPRVTSKSESQVTMLQRQGFSMRTLFCPSLLPTQQSASLVSFLVGFLAFLVLGLSVLTTYGVHAITRLEAWSLALLALFLVLFVAIVLTIWRQPQNQQKVAFMVPFLPFLPAFSILVNIYLMVQLSADTWVRFSIWMAIGFLIYFSYGIRHSLEGHLRDENNEEDAYPDNVHAAAEEKSAIQANDHHPRNLSSPFIFHEKTSEF

SEQ ID NO: 78825 - protein, 149 aa, Homo sapiens
MVMLLLLLSALAGLFGAAEGQAFHLGKCPNPPVQENFDVNKYLGRWYEIEKIPTTFENGRCIQANYSLMENGKIKVLNQELRADGTVNQIEGEATPVNLTEPAKLEVKFSWFMPSAPYWILATDYENYALVYSCTCIIQLFHVDFAWIL

SEQ ID NO: 78826 - protein, 428 aa, Homo sapiens
MPRVHNIKKSLTPHISCVTNESDNLLDFLPDRLRAKLLPFQKDGIIFALKRNGRCMVADEMGLGKTIQAIGITYFYKEEWPLLIVVPSSLRYPWTEEIEKWIPELSPEEINVIQNKTDVRRMSTSKVTVLGYGLLTADAKTLIDALNNQNFKVVIVDESHYMKSRNATRSRILLPIVQKARRAILLTGTPALGRPEELFMQIEALFPQKFGRWTDYAKRYCNAHIRYFGKRPQWDCRGASNLNELHQLLSDIMIRRLKTEVLTQLPPKVRQRIPFDLPSAAAKELNTSFEEWEKIMRTPNSGAMETVMGLITRMFKQTAIAKAGAVKDYIKMMLQNDSLKFLVFAHHLSMLQACTEAVIENKTRYIRIDGSVSSSERIHLVNQFQKDPDTRVAILSIQAAGQDLYDKVAWGKRTLVSGLFMECFCFVP

SEQ ID NO: 78827 - protein, 116 aa, Homo sapiens
MDSCVATKSLSPGHTLIPSSAVTPPESPQSDSLGSTYSINGLLGIAQPGSDKRKMDDSDQDSCRLSIDSQSSSSGPRKHLRTDAFSQHHLEPLECPFERQHYPEAYASPSHTKGEQ

SEQ ID NO: 78828 - protein, 112 aa, Homo sapiens
  MOD_RES (1)..(1): Any amino acid
XPELGLWLETVNDKSGPLIFRKTMFNSTDIKLSVKSFHCSGPVKFTIVWHLKYHTCHNEHSNLEELFQKHKLSVDEDFCHYLKNDNCWTTKNENLDCNSDSQVFPSLNFLFL

SEQ ID NO: 78829 - protein, 58 aa, Homo sapiens
KDELYLNLVLEYVPETVYRVARHFTKAKLTIPILYVKGLCHPRWSAVVRSRLTATSAS

SEQ ID NO: 78830 - protein, 288 aa, Homo sapiens
  MOD_RES (1)..(1): Any amino acid
XRPHLQNQWRKRKMTTWSCLVAMIVSGVITAVWAVRAAPIWRSQVKQKMRIGKQGNCRPPRCICSALGLLAPWMAVVLSQGKPPTKKAKVLHKAAWSAKIGAFLHSQGTGQLADGTPTGQDALVLGFDWGKFLKDHSYKAAPVSCFKHVPLYDQWEDVMKGMKVEVLNSDAVLPSRVYWIASVIQTAGYRVLLRYEGFENDASHDFWCNLGTVDVHPIGWCAINSKILVPPRTIHAKFTDWKGYLMKRLVGSRTLPVDFHIKVGSEPLTDVPPSALPFFCILHATHWS

SEQ ID NO: 78831 - protein, 183 aa, Homo sapiens
GIAQVAAATGHTVVLVDQTEDILAKSKKGIEESLRKVAKKKFAENLKAGDEFVEKTLSTIATSTDAASVVHSTDLVVEAIVENLKVKNELFKRLDKFAAEHTIFASNTSSLQITSIANATTRQDRFAGLHFFNPVPVMKLVEVIKTPMTSQKTFESLVDFSKALGKHPVSCKVTHPKKTLTLL

SEQ ID NO: 78832 - protein, 362 aa, Homo sapiens
  MOD_RES (1)..(1): Any amino acid
XFVGRVAAAPASGALRRLTPSASLPPAQLLLRAAPTAVHPGESTVRTIAMDGTEGLVRGQKVLDSGAPIKIPVGPETLGRIMNVIGEPIDERGPIKTKQFAPIHAEAPEFMEMSVEQEILVTGIKVVDLLAPYAKGGKIGLFGGAGVGKTVLIMELINNVAKAHGGYSVFAGVGERTREGNDLYHEMIESGVINLKDATSKVALVYGQMNEPPGARARVALTGLTVAEYFRDQEGQDVLLFIDNIFRFTQAGSEVSALLGRIPSAVGYQPTLATDMGTMQERITTTKKGSITSVQAIYVPADDLTDPAPATTFAHLDATTVLSRAIAELGIYPAVDPLDSTSRIMDPNIVGSEHYDVARGVQ

SEQ ID NO: 78833 - protein, 112 aa, Homo sapiens
MCPFRHISGEKTVVCKHWLRGLCKKGDQCEFLHEYDMTKMPECYFYSKFGECSNKECPFLHIDPESKIKDCPWYDRGFCKHGPLCRHRHTRRVICVNYLVGFCPEGPSCKFM

SEQ ID NO: 78834 - protein, 397 aa, Homo sapiens
MRLHLLLLLALCGAGTTAAELSYSLRGNWSICNGNGSLELPGAVPGCVHSALFQQGLIQDSYYRFNDLNYRWVSLDNWTYSKEFKIPFEISKWQKVNLILEGVDTVSKILFNEVTIGETDNMFNRYSFDITNVVRDVNSIELRFQSAVLYAAQQSKAHTRYQVPPDCPPLVQKGECHVNFVRKEQCSFSWDWGPSFPTQGIWKDVRIEAYNICHLNYFTFSPIYDKSAQEWNLEIESTFDVVSSKPVGGQVIVAIPKLQTQQTYSIELQPGKRIVELFVNISKNITVETWWPHGHGNQTGYNMTVLFELDGGLNIEKSAKVYFRTVELIEEPIKGSPGLSFYFKINGFPIFLKGSNWIPADSFQDRVTSEFWGWVGCGPSAQLGQLVTAPFTVCCGC

SEQ ID NO: 78835 - protein, 55 aa, Homo sapiens
MGNSMKSTPAPAERPLPNPEGVTTHGSQQPLQHRPGRSSLAQMAALSAEPDREVD

SEQ ID NO: 78836 - protein, 104 aa, Homo sapiens
MAWQMMQLLLLALVTAAGSAQPRSARARTDLLNVCMNAKHHKTQPSPEDELYGQCSPWKKNACCTASTSQELHKDTSRLYNFNWDHCGKMEPTCKRHFIQDSCL

SEQ ID NO: 78837 - protein, 386 aa, Homo sapiens
MADSLESTPLPSPEDRLAKLHPSKELLEYYQKKMAECEAENEDLLKKLELYKEACEGQHKLECDLQQREEEIAELQKALSDMQVCLFQEREHVLRLYSENDRLRIRELEDKKKIQNLLALVGTDAGEVTYFCKEPPHKVTILQKTIQAVGECEQSESSAFKADPKISKRRPSRERKESSEHYQRDIQTLILQVEALQAQLGEQTKLSREQIEGLIEDRRIHLEEIQVQHQRNQNKIKELTKNLHHTQELLYESTKDFLQLRSENQNKEKSWMLEKDNLMSKIKQYRVQCKKKEDKIGKVLPVMHESHHAQSEYIKSLKDKLVQEKKLSNMYQEQCISLEEELARIREEEGMRREIFKDRTNKMGKRLQIMTKRYEALERRRILEVE

SEQ ID NO: 78838 - protein, 205 aa, Homo sapiens
  MOD_RES (1)..(1): Any amino acid
XDGTYLAVGCNDSSVDIYGVAQRYKKVGECLGSLSFITHLDWSSDSRYLQTNDGNGKRLFYRMPGGKEVTSTEEIKGVHWASWTCVSGLEVNGIWPKYSDINDINSVDGNYIGQVLVTADDYGIIKLFRYPCLRKGAKFRKYIGHSAHVTNVRWSHDYQWVISIGGADHSVFQWKFIPERKLKDAVHIAPQGYIHLYLHRHLNLM

SEQ ID NO: 78839 - protein, 99 aa, Homo sapiens
MSEQTPAEAGAAGAREDACRDYQSSLEDLTFNSKPHINMLTILAEENLPFAKEIVSLIEAQTAKVDENTRKSLFKLRSTWDEIFPLKKLYALDVRVNSL

SEQ ID NO: 78840 - protein, 150 aa, Homo sapiens
  MOD_RES (1)..(1): Any amino acid
XIQSILPGISAKLTWTSEEGSYSQDMTGVTPFQMIFEVDEKPRTLMTDCLVIKHFLRKIIMVHPKVRFHFSVKVNGILSTEIFGRPNFGTIESHCSRIHPVLGHPVMLFIPEDVAGMDLLGELILTPAAALCPSPKVSSNQLNRISSVSI

SEQ ID NO: 78841 - protein, 254 aa, Homo sapiens
MAVFADLDLRAGSDLKALRGLVETAAHRELPRLRAWPTSCHPDHRATLRIGYSVVAINHIVDFKEKKQEIEKPVAVSELFTTLPIVQGKSRPIKILTRLTIIVSDPSHCNVLRATSSRARLYDVVAVFPKTEKLFHIACTHLDVDLVCITVTEKLPFYFKRPPINVAIDRGLAFELVYSPAIKDSTMRRYTISSALNLMQICKGKNVIISSAAERPLEIRGPYDVANLGLLFGLSESDAKAAVSTNCRAALLHG

SEQ ID NO: 78842 - protein, 726 aa, Homo sapiens
MSTRTPLPTVNERDTENHTSHGDGRQEVTSRTSRSGARCRNSIASCADEQPHIGNYRLLKTIGKGNFAKVKLARHILTGRELFREVRIMKILNHPNIVKLFEVIETEKTLYLIMEYASGGEVFDYLVAHGRMKEKEARSKFRQIVSAVQYCHQKRIVHRDLKAENLLLDADMNIKIADFGFSNEFTVGGKLDTFCGSPPYAAPELFQGKKYDGPEVDVWSLGVILYTLVSGSLPFDGQNLKELRERVLRGKYRIPFYMSTDCENLLKRFLVLNPIKRGTLEQIMKDRWINAGHEEDELKPFVEPELDISDQKRIDIMVGMGYSQEEIQESLSKMKYDEITATYLLLGRKSSELDASDSSSSSNLSLAKVRPSSDLNNSTGQSPHHKVQRSVSSSQKQRRYSDHAGPAIPSVVAYPKRSQTSTADSDLKEDGISSRKSSGSAVGGKGIAPASPMLGNASNPNKADIPERKKSSTVPSSNTASGGMTRRNTYVCSERTTADRHSVIQNGKENSTIPDQRTPVASTHSISSAATPDRIRFPRGTASRSTFHGQPRERRTATYNGPPASPSLSHEATPLSQTRSRGSTNLFSKLTSKLTRRLPTEYERNGRYEGSSRNVSAEQKDENKEAKPRSLRFTWSMKTTSSMDPGDMMREIRKVLDANNCDYEQRERFLLFCVHGDGHAENLVQWEMEVCKLPRLSLNGVRFKRISGTSIAFKNIASKIANELKL

SEQ ID NO: 78843 - protein, 90 aa, Homo sapiens
GHMEGEVWGLAAHPLLPICATVSDDKTLRIWELSAQHRMLAVRKLKKVLPVGQSQPETRGQGSPLMLSMQTSFRHRAGWTRAKRGCERTN

SEQ ID NO: 78844 - protein, 1057 aa, Homo sapiens
MTTHVTLEDALSNVDLLEELPLPDQQPCIEPPPSSIMYQANFDTNFEDRNAFVTGIARYIEQATVHSSMVMGFGLYLMDGNVSNIYKLDAKKRINLSKIDKFFKQLQVVPLFGDMQIELARYIKTSAHYEENKSKWTCTQSSISPQYNICEQMVQIRDDHIRFISELARYSNSEVVTGSGLDSQKSDEEYRELFDLALRGLQLLSKWSAHVMEVYSWKLVHPTDKFCNKDCPGTAEEYERATRYNYTSEEKFAFVEVIAMIKGLQVLMGRMESVFNQAIRNTIYAALQDFAQVTLREPLRQAVRKKKNVLISVLQAIRKTICDWEGGREPPNDPCLRGEKDPKGGFDIKVPRRAVGPSSTQLYMVRTMLESLIADKSGSKKTLRSSLDGPIVLAIEDFHKQSFFFTHLLNISEALQQCCDLSQLWFREFFLELTMGRRIQFPIEMSMPWILTDHILETKEPSMMEYVLYPLDLYNDSAYYALTKFKKQFLYDEIEAEVNLCFDQFVYKLADQIFAYYKAMAGSVLLDKRFRAECKNYGVIIPYPPSNRYETLLKQRHVQLLGRSIDLNRLITQRISAAMYKSLDQAISRFESEDLTSIVELEWLLEINRLTHRLLCKHMTLDSFDAMFREANHNVSAPYGRITLHVFWELNFDFLPNYCYNGSTNRFVRTAIPFTQEPQRDKPANVQPYYLYGSKPLNIAYSHIYSSYRNFVGPPHFKTICRLLGYQGIAVVMEELLKIVKSLLQGTILQYVKTLIEVMPKICRLPRHEYGSPGILEFFHHQLKDIIEYAELKTDVFQSLREVGNAILFCLLIEQALSQEEVCDLLHAAPFQNILPRVYIKEGERLEVRMKRLEAKYAPLHLVPLIERLGTPQQIAIAREGDLLTKERLCCGLSMFEVILTRIRSYLQDPIWRGPPPTNGVMHVDECVEFHRLWSAMQFVYCIPVGTNEFTAEQCFGDGLNWAGCSIIVLLGQQRRFDLFDFCYHLLKVQRQDGKDEIIKNVPLKKMADRIRKYQILNNEVFAILNKYMKSVETDSSTVEHVRCFQPPIHQSLATTC

SEQ ID NO: 78845 - protein, 768 aa, Homo sapiens
MGRGSGTFERLLDKATSQLLLETDWESILQICDLIRQGDTQAKYAVNSIKKKVNDKNPHVALYALEVMESVVKNCGQTVHDEVANKQTMEELKDLLKRQVEVNVRNKILYLIQAWAHAFRNEPKYKVVQDTYQIMKVEGHVFPEFKESDAMFAAERAPDWVDAEECHRCRVQFGVMTRKHHCRACGQIFCGKCSSKYSTIPKFGIEKEVRVCEPCYEQLNRKAEGKATSTTELPPEYLTSPLSQQSQLPPKRDETALQEEEELQLALALSQSEAEEKERLRQKSTYTSYPKAEPMPSASSAPPASSLYSSPVNSSAPLAEDIDPELARYLNRNYWEKKQEEARKSPTPSAPVPLTEPAAQPGEGHAAPTNVVENPLPETDSQPIPPSGGPFSEPQFHNGESEESHEQFLKALQNAVTTFVNRMKSNHMRGRSITNDSAVLSLFQSINGMHPQLLELLNQLDERRLYYEGLQDKLAQIRDARGALSALREEHREKLRRAAEEAERQRQIQLAQKLEIMRQKKQEYLEVQRQLAIQRLQEQEKERQMRLEQQKQTVQMRAQMPAFPLPYAQLQAMPAAGGVLYQPSGPASFPSTFSPAGSVEGSPMHGVYMSQPAPAAGPYPSMPSTAADPSMVSAYMYPAGATGAQAAPQAQAGPTASPAYSSYQPTPTAGYQNVASQAPQSLPAISQPPQSSTMGYMGSQSVSMGYQPYNMQNLMTTLPSQDASLPPQQPYIAGQQPMYQQQQPPVAQQPQAQGPPAQGSEAQLISFD

SEQ ID NO: 78846 - protein, 293 aa, Homo sapiens
MRHAHLSREVESRVQIGDTFFEPISWHLATKVLGILCCGLFFGIVGLKIFFSKFQWKIQAELDWRRKHGQAELRDARKHAVEVTLDPETAHPKLCVSDLKTVTHRKAPQEVPHSEKRFTRKSVVASQSFQAGKHYWEVDGGHNKRWRVGVCRDDVDRRKEYVTLSPDHGYWVLRLNGEHLYFTLNPRFISVFPRTPPTKIGVFLDYECGTISFFNINDQSLIYTLTCRFEGLLRPYIEYPSYNEQNGTPIVICPVTQESEKEASWQRASAIPETSNSESSSQATTPFLPRGEM

SEQ ID NO: 78847 - protein, 54 aa, Homo sapiens
  MOD_RES (1)..(1): Any amino acid
XADKNRARVEENFLKLTHVQRQEAAQSRREEKKRAEKERIMNEEDPEKQRRLEV

SEQ ID NO: 78848 - protein, 102 aa, Homo sapiens
MQAMEGEVLLPALYEEEEEEEEEEEEVEEEEEQVQKGGSVGSLSVNKHRGLSLTETELEELRAQVLQLVAELEETRELAGQHEDDSLELQGLLEDERLASAQ

SEQ ID NO: 78849 - protein, 95 aa, Homo sapiens
MRKPRRKSRQNAEGRRSPSPYSLKCSPTRETLTYAQAQRIVEVDIDGRLHRISIYDPLKIITEDELTAQDITECNSNKENSEQPQFPGKSKKPSS

SEQ ID NO: 78850 - protein, 2554 aa, Homo sapiens
MNHPFGKEEAASQKQLFGFFCECLRRGEWELAQACVPQLQEGQGDIPKRVEDILQALVVCPNLLRCGQDINPQRVAWVWLLVLEKWLAREKKLLPVVFRRKLEFLLLSEDLQGDIPENILEELYETLTQGAVGHVPDGNPRRESWTPRLSSEAVSVLWDLLRQSPQPAQALLELLLEEDDGTGLCHWPLQNALVDLIRKALRALQGPDSVPPGVVDAIYGALRTLRCPAEPLGVELHLLCEELLEACRTEGSPLREERLLSCLLHKASRGLLSLYGHTYAEKVTEKPPRATASGKVSPDHLDPERAMLALFSNPNPAEAWKVAYFYCLSNNKHFLEQILVTALTLLKEEDFPNLGCLLDREFRPLSCLLVLLGWTHCQSLESAKRLLQTLHRTQGPGCDELLRDACDGLWAHLEVLEWCIQQSSNPIPKRDLLYHLHGGDSHSVLYTLHHLTNLPALREEDVLKLLQKVPAKDPQQEPDAVDAPVPEHLSQCQNLTLYQGFCAMKYAIYALCVNSHQHSQCQDCKDSLSEDLASATEPANDSLSSPGAANLFSTYLARCQQYLCSIPDSLCLELLENIFSLLLITSADLHPEPHLPEDYAEDDDIEGKSPSGLRSPSESPQHIAHPERKSERGSLGVPKTLAYTMPSHVKAEPKDSYPGPHRHSFLDLKHFTSGISGFLADEFAIGAFLRLLQEQLDEISSRSPPEKPKQESQSCSGSRDGLQSRLHRLSKVVSEAQWRHKVVTSNHRSEEQPSRRYQPATRHPSLRRGRRTRRSQADGRDRGSNPSLESTSSELSTSTSEGSLSAMSGRNELHSRLHPHPQSSLIPMMFSPPESLLASCILRGNFAEAHQVLFTFNLKSSPSSGELMFMERYQEVIQELAQVEHKIENQNSDAGSSTIRRTGSGRSTLQAIGSAAAAGMVFYSISDVTDKLLNTSGDPIPMLQEDFWISTALVEPTAPLREVLEDLSPPAMAAFDLACSQCQLWKTCKQLLETAERRLNSSLERRGRRIDHVLLNADGIRGFPVVLQQISKSLNYLLMSASQTKSESVEEKGGGPPRCSITELLQMCWPSLSEDCVASHTTLSQQLDQVLQSLREALELPEPRTPPLSSLVEQAAQKAPEAEAHPVQIQTQLLQKNLGKQTPSGSRQMDYLGTFFSYCSTLAAVLLQSLSSEPDHVEVKVGNPFVLLQQSSSQLVSHLLFERQVPPERLAALLAQENLSLSVPQVIVSCCCEPLALCSSRQSQQTSSLLTRLGTLAQLHASHCLDDLPLSTPSSPRTTENPTLERKPYSSPRDSSLPALTSSALAFLKSRSKLLATVACLGASPRLKVSKPSLSWKELRGRREVPLAAEQVARECERLLEQFPLFEAFLLAAWEPLRGSLQQGQSLAVNLCGWASLSTVLLGLHSPIALDVLSEAFEESLVARDWSRALQLTEVYGRDVDDLSSIKDAVLSCAVACDKEGWQYLFPVKDASLRSRLALQFVDRWPLESCLEILAYCISDTAVQEGLKCELQRKLAELQVYQKILGLQSPPVWCDWQTLRSCCVEDPSTVMNMILEAQEYELCEEWGCLYPIPREHLISLHQKHLLHLLERRDHDKALQLLRRIPDPTMCLEVTEQSLDQHTSLATSHFLANYLTTHFYGQLTAVRHREIQALYVGSKVRIHREIQALYVGSKILLTLPEQHRASYSHLSSNPLFMLEQLLMNMKVDWATVAVQTLQQLLVGQEIGFTMDEVDSLLSRYAEKALDFPYPQREKRSDSVIHLQEIVHQAADPETLPRSPSAEFSPAAPPGISSIHSPSLRERSFPPTQPSQEFVPPATPPARHQWVPDETESICMVCCREHFTMFNRRHHCRRCGRLVCSSCSTKKMVVEGCRENPARVCDQCYSYCNKDVPEEPSEKPEALDSSKNESPPYSFVVRVPKADEVEWILDLKEEENELVRSEFYYEQAPSASLCIAILNLHRDSIACGHQLIEHCCRLSKGLTNPEVDAGLLTDIMKQLLFSAKMMFVKAGQSQDLALCDSYISKVDVLNILVAAAYRHVPSLDQILQPAAVTRLRNQLLEAEYYQLGVEVSTKTGLDTTGAWHAWGMACLKAGNLTAAREKFSRCLKPPFDLNQLNHGSRLVQDVVEYLESTVRPFVSLQDDDYFATLRELEATLRTQSLSLAVIPEGKIMNNTYYQECLFYLHNYSTNLAIISFYVRHSCLREALLHLLNKESPPEVFIEGIFQPSYKSGKLHTLENLLESIDPTLESWGKYLIAACQHLQKKNYYHILYELQQFMKDQVRAAMTCIRFFSHKAKSYTELGEKLSWLLKAKDHLKIYLQETSRSSGRKKTTFFRKKMTAADVSRHMNTLQLQMEVTRFLHRCESAGTSQITTLPLPTLFGNNHMKMDVACKVMLGGKNVEDGFGIAFRVLQDFQLDAAMTYCRAARQLVEKEKYSEIQQLLKCVSESGMAAKSDGDTILLNCLEAFKRIPPQELEGLIQAIHNDDNKVRAYLICCKLRSAYLIAVKQEHSRATALVQQVQQAAKSSGDAVVQDICAQWLLTSHPRGAHGPGSRK

SEQ ID NO: 78851 - protein, 124 aa, Homo sapiens
MAGSQDIFDAIVMADERFHGEGYREGYEEGSSLGVMEGRQHGTLHGAKIGSEIGCYQGFAFAWKCLLHSCTTEKDSRKMKVLESLIGMIQKFPYDDPTYDKLHEDLDKIRGKFKQVRALCVSSC

SEQ ID NO: 78852 - protein, 115 aa, Homo sapiens
MRESQPEAEIPLQDTTAEAFTMLLKYIYTGRATLTDEKEEVLLDFLSLAHKYGFPELEDSTSEYLCTILNIQNVCMTFDVASLYSLPKLTCMCCMFMDRNAQEVLSSEGFLSLSK

SEQ ID NO: 78853 - protein, 858 aa, Homo sapiens
PGVQYNYVYDEDEYMIQEEEWDRDLLLDPAWEKQQRKTFTAWCNSHLRKAGTQIENIEEDFRNGLKLMLLLEVISGERLPKPDRGKMRFHKIANVNKALDYIASKGVKLVSIGAEEIVDGNVKMTLGMIWTIILRFAIQDISVEETSAKEGLLLWCQRKTAPYRNVNIQNFHTSWKDGLGLCALIHRHRPDLIDYSKLNKDDPIGNINLAMEIAEKHLDIPKMLDAEDLVYTARPDERAIMTYVSCYYHAFAGAQKLLEWIRRTIPWLENRTPEKTMQAMQKKLEDFRDYRRKHKPPKVQEKCQLEINFNTLQTKLRISNRPAFMPSEGKMVSDIAGAWQRLEQAEKGYEEWLLNEIRRLERLEHLAEKFRQKASTHETWAYGKEQILLQKDYESASLTEVRALLRKHEAFESDLAAHQDRVEQIAAIAQELNELDYHDAVNVNDRCQKICDQWDRLGTLTQKRREALERMEKLLETIDQLHLEFAKRAAPFNNWMEGAMEDLQDMFIVHSIEEIQSLITAHEQFKATLPEADGERQSIMAIQNEVEKVIQSYNIRISSSNPYSTVTMDELRTKWDKVKQLVPIRDQSLQEELARQHANERLRRQFAAQANAIGPWIQNKMEEIARSSIQITGALEDQMNQLKQYEHNIINYKNNIDKLEGDHQLIQEALVFDNKHTNYTMEHIRVGWELLLTTIARTINEVETQILTRDAKGITQEQMNEFRASFNHFDRRKNGLMDHEDFRACLISMGYDLGEAEFARIMTLVDPNGQGTVTFQSFIDFMTRETADTDTAEQVIASFRILASDKPYILAEELRRELPPDQAQYCIKRMPAYSGPGSVPGALDYAAFSSALYGESDL

SEQ ID NO: 78854 - protein, 420 aa, Homo sapiens
MEQINWLSLVYLVVSTPFGVAAIWILDSVGLRAATILGAWLNFAGSVLRMVPCMVVGTQNPFAFLMGGQSLCALAQSLVIFSPAKLAALWFPEHQRATANMLATMSNPLGVLVANVLSPVLVKKGEDIPLMLGVYTIPAGVVCLLSTICLWESVPPTPPSAGAASSTSEKFLDGLKLLMWNKAYVILAVCLGGMIGISASFSALLEQILCASGHSSGFSGLCGALFITFGILGALALGPYVDRTKHFTEATKIGLCLFSLACVPFALVSQLQGQTLALAATCSLLGLFGFSVGPVAMELAVECSFPVGEGAATGMIFVLGQAEGILIMLAMTALTVRRSEPSLSTCQQGEDPLDWTAASWRSSSTPHTGACRPSLGSPPPPVTPWAAQTQGRVWTEGEQEGLGSWGPARRLRSARRGGPR

SEQ ID NO: 78855 - protein, 44 aa, Homo sapiens
MAPTPVCTEKPPRVMSAKSVLSVPQAGRAIWGGGEEAEQNTPQS

SEQ ID NO: 78856 - protein, 162 aa, Homo sapiens
MASQKQMEVVTKGTGFRRRPKTITYTPGTCELLRVMMKESKLTNIQQRHIMDIMKRGDALPLQCSPTSSQRVLPSKQIASPIYLPPILAARPHLRPANMCQANGAYSREQFKPQATRDLEKEKQRLQNIFATGKDMEERKRKAPPARQKAPAPELDRFEELV

SEQ ID NO: 78857 - protein, 71 aa, Homo sapiens
MNAVGSPEGQELQKLGSGAWDNPAYSGPPSPHGTLRVCTISSTGPLQPQPKKPEDEPQETAYRTQDFGEQP

SEQ ID NO: 78858 - protein, 125 aa, Homo sapiens
MSLQDSTLSREGKPEGEIMAAVFFSVGRLSPEVTQPDEDLHLQAEETQLVKESVTFKDVAIDFTLEEWRLMDPTQRNLHKDVMLENYRNLVSLGLAVSKPDMISHLENGKGPWVTVREISRIPYP

SEQ ID NO: 78859 - protein, 335 aa, Homo sapiens
MVSIPEYYEGKNVLLTGATGFLGKVLLEKLLRSCPKVNSVYVLVRQKAGQTPQERVEEVLSGKLFDRLRDENPDFREKIIAINSELTQPKLALSEEDKEVIIDSTNIIFHCAATVRFNENLRDAVQLNVIATRQLILLAQQMKNLEVFMHVSTAYAYCNRKHIDEVVYPPPVDPKKLIDSLEWMDDGLVNDITPKLIGDRPNTYIYTKALAEYVVQQEGAKLNVAIVRPSIVGASWKEPFPGWIDNFNGPSGLFIAAGKGILRTIRASNNALADLVPVDVVVNMSLAAAWYSGVNRPRNIMVYNCTTGSTNPFHWGEVGMILPVFLNVRINLKEP

SEQ ID NO: 78860 - protein, 64 aa, Homo sapiens
MALRHLALLAGLLVGVASKSMENTDTDVPAPEVLTRSTAGVRGACASQRGALRCLLGPAARVLC

SEQ ID NO: 78861 - protein, 74 aa, Homo sapiens
MEDPADPADPARIPQPGKWALVRSLNQAFKTYAVLPGDHVWMDLRLGQEFDVPIGAVVKLCDSGQVQVVDDEDN

SEQ ID NO: 78862 - protein, 199 aa, Homo sapiens
MAAIRKKLVIVGDGACGKTCLLIVFSKDQFPEVYVPTVFENYIADIEVDGKQVELALWDTAGQEDYDRLRPLSYPDTDVILMCFSIDSPDSLENIPEKWTPEVKHFCPNVPIILVGNKKDLRKAGTWRTGSVPLATLSAQPRPRRECGRCLRWPLGLASRSARTSVGGAVPFSEIPKAFPTCPLPSQGYRNYPPTTPAS

SEQ ID NO: 78863 - protein, 141 aa, Homo sapiens
MGEIKVSPDYNWFRGTVPLKKIIVDDDDSKIWSLYDAGPRSIRCPLIFLPPVSGTADVFFRQILALTGWGYRVIALQYPVYWDHLEFCDGFRKLLDHLQLDKVHLFGASLGGFLAQKFAEYTHKSPRVHSLILCNSFSDTS

SEQ ID NO: 78864 - protein, 180 aa, Homo sapiens
MLQGTCSVLLLWGILGAIQAQQQEVISPDTTERNNNCPEKTDCPIHVYFVLDTSESVTMQSPTDILLFHMKQFVPQFISQLQNEFYLDQVALSWRYGGLHFSDQVEVFSPPGSDRASFIKNLQGISSFRRGTFTDCALANMTEQIRQDRSKGTVHFAVVITDGHVTGSPCGGIKLQAERA

SEQ ID NO: 78865 - protein, 39 aa, Homo sapiens
MTGFFKGAEDRYSSHLWRPQGGPRSKGPGPRSWNTESLR

SEQ ID NO: 78866 - protein, 179 aa, Homo sapiens
MQACGGGAAGRRAFDSICPNRMLALPGRALLCKPGKPERKFAPPRKFFPGCTGGSPVSVYEDPPDAEPTALPALTTIDLQDLADCSSLLGSDAPPGGDLAASQNHSHQTEADFNLQDFRDTVDDLISGKLILYDVAYPGQRRLPLLSLRHITIRALPLPATGPTGPAVTTAAPSRRAPA

SEQ ID NO: 78867 - protein, 562 aa, Homo sapiens
  MOD_RES (1)..(1): Any amino acid
XRSKLRKPKPVPLRKKAIGGEFSDTNAAVEGTPLPKASYHFSPEELDENTSPLLGDARFQKSPPDLKETPGTLSSDTNDSGVELGEESRSSPLKLEFDFTEDTGNIEARKALPRKLGRKLGSTLTPKIQKDGISKSAGLEQPTDPVARDGPLSQTSSKPDPSQWESPSFNPFGSHSVLQNSPPLSSEGSYHFDPDNFDESMDPFKPTTTLTSSDFCSPTGNHVNEILESPKKAKSRLITTTEQVKFLCFLLSGCKVKKHETQSLALDACSRDEGAVISQISDISNRDGHATDEEKLASTSCGQKSAGAEVKGIEKETCQKMEEDGSTVLGLLESSAEKAPVSVSCGGESPLDGICLSESDKTAVLTLIREEIITKEIEANEWKKKYEETRQEVLEMRKIVAEYEKTIAQMIDEQRTSMTSQKSFQQLTMEKEQALADLNSVERSLSDLFRRYENLKGVLEGFKKNEEALKKCAQDYLARVKQEEQRYQALKIHAEEKLDKANEEIAQVRTKAKAESAALHAGLRKEQMKVESLERALQQKNQEIEELTKICDELIAKLGKTD

SEQ ID NO: 78868 - protein, 200 aa, Homo sapiens
MELAKNKSKKRRNRTTFSTFQLEELEKVFQKTHYPDVYAREQLALRTDLTEARVQVWFQNRRAKWRKRERYGKIQEGRNPFTAAYDISVLPRTDSHPQLQNSLWASPGSGSPGGPCLVSPEGIPSPCMSPYSHPHGSVAGFMGVPAPSAAHPGIYSIHGFPPTLGGHSFEPSSDGDYKSPSLVSLRVKPKEPPGLLNWTT

SEQ ID NO: 78869 - protein, 175 aa, Homo sapiens
MAFPVDMLENCSHEELENSAEDYMSDLRCGDPENPECFSLLNITIPISLSNVGFVPLYGGDQTQKILALFAPEDSLTAVALYLADQWWAIDDIVKTSVPSREGLKQVSTLGERVVLYVLNRIIYRKQEMERNEIPFLCHSSTDYAKILWKKGEAIGFYSVKPTGSICASFLTQSY

SEQ ID NO: 78870 - protein, 352 aa, Homo sapiens
MVVSTFTDMDTFPNNFPPGGDSGLTGSQSEFQKMLIDERLRCEHHKANYQTLKAEHTRLQNEHVKLQNELKHLFNEKQTQQEKLQLLLEELRGELVEKTKDLEEMKLQILTPQKLELLRAQIQQELETPMRERFRNLDEEVEKYRAVYNKLRYEHTFLKSEFEHQKEEYARILDEGKIKYESEIARLEEDKEELRNQLLNVDLTKDSKRVEQLAREKVYLCQKLKGLEAEVAELKAEKENSEAQVENAQRIQVRQLAEMQATVRSLEAEKQSANLRAERLEKELQSSSEQNTFLINKLHKAEREINTLSSKVKELKHSNKLEITDIKLETARAKSELERERNKIQSELDGNM

SEQ ID NO: 78871 - protein, 1342 aa, Homo sapiens
MWPSQLLIFMMLLAPIIHGGKHSERHPALAAPLRHAERSPGGALPPRHLLQQPAAERTAAHRGQGPRGATRGVRGPGAQGAQIAAQAFSRAPIPMAVVRRELSCESYPIELRCPGTDVIMIESANYGRTDDKICDSDPAQMENIRCYLPDAYKIMSQRCNNRTQCAVVAGPDVFPDPCPGTYKYLEVQYECVPYKVEQKVFLCPGLLKGVYQSEHLFESDHQSGAWCKDPLQASDKIYYMPWTPYRTDTLTEYSSKDDFIAGRPTTTYKLPHRVDGTGFVVYDGALFFNKERTRNIVKFDLRTRIKSGEAIIANANYHDTSPYRWGGKSDIDLAVDENGLWVIYATEQNNGKIVISQLNPYTLRIEGTWDTAYDKRSASNAFMICGILYVVKSVYEDDDNEATGNKIDYIYNTDQSKDSLVDVPFPNSYQYIAAVDYNPRDNLLYVWNNYHVVKYSLDFGPLDSRSGQAHHGQVSYISPPIHLDSELERPSVKDISTTGPLGMGSTTTSTTLRTTTLSPGRSTTPSVSGRRNRSTSTPSPAVEVLDDMTTHLPSASSQIPALEESCEAVEAREIMWFKTRQGQIAKQPCPAGTIGVSTYLCLAPDGIWDPQGPDLSNCSSPWVNHITQKLKSGETAANIARELAEQTRNHLNAGDITYSVRAMDQLVGLLDVQLRNLTPGGKDSAARSLNKLQKRERSCRAYVQAMVETVNNLLQPQALNAWRDLTTSDQLRAATMLLHTVEESAFVLADNLLKTDIVRENTDNIKLEVARLSTEGNLEDLKFPENMGHGSTIQLSANTLKQNGRNGEIRVAFVLYNNLGPYLSTENASMKLGTEALSTNHSVIVNSPVITAAINKEFSNKVYLADPVVFTVKHIKQSEENFNPNCSFWSYSKRTMTGYWSTQGCRLLTTNKTHTTCSCNHLTNFAVLMAHVEVKHSDAVHDLLLDVITWVGILLSLVCLLICIFTFCFFRGLQSDRNTIHKNLCISLFVAELLFLIGINRTDQPIACAVFAALLHFFFLAAFTWMFLEGVQLYIMLVEVFESEHSRRKYFYLVGYGMPALIVAVSAAVDYRSYGTDKVCWLRLDTYFIWSFIGPATLIIMLNVIFLGIALYKMFHHTAILKPESGCLDNIKSWVIGAIALLCLLGLTWAFGLMYINESTVIMAYLFTIFNSLQGMFIFIFHCVLQKKVRKEYGKCLRTHCCSGKSTESSIGSGKTSGSRTPGRYSTGSQSRIRRMWNDTVRKQSESSFITGDINSSASLNRGAMANHLISNALLRPHGTNNPYNTLLGEPAVCNNPSVSMYNAQEPYRETSMGVKLNIAYQIGASEQCQGYKCHGYSTTEW

SEQ ID NO: 78872 - protein, 89 aa, Homo sapiens
  MOD_RES (1)..(1): Any amino acid
XNAFEDACEMEVVFWGLIAERIVTEKVYESESCTDSEEELNMKTSSVHRPPAMTVKKEPREERKGPKKGTAALGKANRQVSITGFFQRK

SEQ ID NO: 78873 - protein, 142 aa, Homo sapiens
  MOD_RES (1)..(1): Any amino acid
XSLELGHVLIDSVELAQQVLYMQPPTQALPLLLLHGLLLHRQLYGTRLQAHRGRWSQVTLTQVLQTQDQLWASLSNPRAAMQELAGGEWSKSHGSRERAAADRATGPTCGVGPNSWSLAGQSFQPTQPSASRQHQHTGPGHQ

SEQ ID NO: 78874 - protein, 889 aa, Homo sapiens
  MOD_RES (1)..(1): Any amino acid
XKKAITCGEKEKQDLIKSLAMLKDGFRTDRGSHSDLWSSSSSLESSSFPLPKQYLDVSSQTDISGSFGINSNNQLAEKVRLRLRYEEAKRRIANLKIQLAKLDSEAWPGVLDSERDRLILINEKEELLKEMRFISPRKWTQGEVEQLEMARKRLEKDLQAARDTQSKALTERLKLNSKRNQLVRELEEATRQVATLHSQLKSLSSSMQSLSSGSSPGSLTSSRGSLVASSLDSSTSASFTDLYYDPFEQLDSELQSKVEFLLLEGATGFRPSGCITTIHEDEVAKTQKAEGGGRLQALRSLSGTPKSMTSLSPRSSLSSPSPPCSPLMADPLLAGDAFLNSLEFEDPELSATLCELSLGNSAQERYRLEEPGTEGKQLGQAVNTAQGCGLKVACVSAAVSDESVAGDSGVYEASVQRLGASEAAAFDSDESEAVGATRIQIALKYDEKNKQFAILIIQLSNLSALLQQQDQKVNIRVAVLPCSESTTCLFRTRPLDASDTLVFNEVFWVSMSYPALHQKTLRVDVCTTDRSHLEECLGGAQISLAEVCRSGERSTRWYNLLSYKYLKKQSRELKPVGVMAPASGPASTDAVSALLEQTAVELEKRQEGRSSTQTLEDSWRYEETSENEAVAEEEEEEVEEEEGEEDVFTEKASPDMDGYPALKVDKETNTETPAPSPTVVRPKDRRVGTPSQGPFLRGSTIIRSKTFSPGPQSQYVCRLNRSDSDSSTLSKKPPFVRNSLERRSVRMKRPSSVKSLRSERLIRTSLDLELDLQATRTWHSQLTQEISVLKELKEQLEQAKSHGEKELPQWLREDERFRLLLRMLEKRMDRAEHKGELQTDKMMRAAAKDVHRLRGQSCKEPPEVQSFREKMAFFTRPRMNIPALSADDV

SEQ ID NO: 78875 - protein, 60 aa, Homo sapiens
MEDSFLQSFGRLSLQPQQQQQRQRPPRPPPRGTPPRRHSFRKHLYLLRGLPGSGKTTLAR

SEQ ID NO: 78876 - protein, 664 aa, Homo sapiens
MEDGKPVWAPHPTDGFQMGNIVDIGPDSLTIEPLNQKGKTFLALINQVFPAEEDSKKDVEDNCSLMYLNEATLLHNIKVRYSKDRIYTYVANILIAVNPYFDIPKIYSSEAIKSYQGKSLGTRPPHVFAIADKAFRDMKVLKMSQSIIVSGESGAGKTENTKFVLRYLTESYGTGQDIDDRIVEANPLLEAFGNAKTVRNNNSSRFGKFVEIHFNEKSSVVGGFVSHYLLEKSRICVQGKEERNYHIFYRLCAGASEDIREKLHLSSPDNFRYLNRGCTRYFANKETDKQILQNRKSPEEDEYLKAGSMKDPLLDDHGDFIRMCTAMKKIGLDDEEKLDLFRVVAGVLHLGNIDFEEAGSTSGGCNLKNKSAQSLEYCAELLGLDQDDLRVSLTTRVMLTTAGGTKGTVIKVPLKVEQANNARDALAKTVYSHLFDHVVNRVNQCFPFETSSYFIGVLDIAGFEYFEHNSFEQFCINYCNEKLQQFFNERILKEEQELYQKEGLGVNEVHYVDNQDCIDLIEAKLVGILDILDEENRLPQPSDQHFTSAVHQKHKDHFRLTIPRKSKLAVHRNIRDDEGFIIRHFAGAVCYETTQFVEKNNDALHMSLESLICESRDKFIRELFESSTNNNKDTKQKAGKLSFISVGNKFKRFCFSWSSPARDG

SEQ ID NO: 78877 - protein, 92 aa, Homo sapiens
MVFTNKYPRRSDHGDQGEQVGPGDRAPRLRGLQDRRGAGVLDRARCEGTYLRGDWLPGVGAAAVARRPRGRFGQTTPPLVDFLKDILRRYPE

SEQ ID NO: 78878 - protein, 124 aa, Homo sapiens
MHFQHHAKPNCFRKDPDINMHPFFFALGKILSVELGKQKKKYMPYNHQHKYFFLIGPPALLPLYFQWYIFYFVIQRKKWVDLAWMITFYVRFFLTYVPLLGLKAFLGLFFIVRFLESNWFVWVT

SEQ ID NO: 78879 - protein, 32 aa, Homo sapiens
PFITKVGSGPVKAVSLGRPGLALPLAVHGRAE

SEQ ID NO: 78880 - protein, 24 aa, Homo sapiens
  MOD_RES (1)..(1): Any amino acid
XIRGETLGIIGLGAHRKTLYTFTP

SEQ ID NO: 78881 - protein, 160 aa, Homo sapiens
MFVLVEMVDTVRIPPWQFERKLNDSIAEELNKKLANKVLGPRLAGRPWRGRASAAHWPQARPRSCQALAVGKQLNVSELFFTVKGDIEGDQKKMGLKKGVVTGSVRFHNSKLLCNCRSCTTWDSAFVCLISPNWRMPMYSLGMAHHTPKSIFAAWCFIHS

SEQ ID NO: 78882 - protein, 405 aa, Homo sapiens
  MOD_RES (1)..(1): Any amino acid
XSLVLGVITCAPERLNFPASACALKRAAWLLRGRGVFHNGLKICEKFGPNLDTCPEGTILGLRLDSSGGLHLHVNGVDQGVAVPDVPQPCHALVDLYGQCEQVTIVNPEPGAASGKSAGTQGDMEKADMVDGIKESVCWGPPPAASPLKSCEYHALCSRFQELLLLPEDYFMPPPKRSLCYCESCRKLRGDEAHRRRGEPPREYALPFGWCRFNLRVNPRLEAGTLTKKWHMAYHGSNVAAVRRVLDRGELGAGTASILSCRPLKGEPGVGFEEPGENCAPPREEQPPPVLLSPSLQYAGAETLASKVQFRDPKSQRTHQAQVAFQRSLSLCPHEAAFSGATGREWGRVGARKMGASVQLLLTLISKEPINTVSEPPPRPLSRAPLSGARVPWGATRWAREIKES

SEQ ID NO: 78883 - protein, 219 aa, Homo sapiens
MTIVDKASESSDPSAYQNQPGSSEAVSPGDMDAGSASWGAVSSLNDVSNHTLSLGPVPGAVVYSSSSVPDKSKPSPQKDQALGDGIAPPQKVLFPSEKICLKWQQTHRVGAGLQNLGNTCFANAALQCLTYTPPLANYMLSHEHSKTCHAEGFCMMCTMQAHITQALSNPGDVIKPMFVINEMRRIARHFRFGNQEDAHEFLQYTVDAMQKACLNGSNK

SEQ ID NO: 78884 - protein, 3915 aa, Homo sapiens
MEDEERQKKLEAGKAKLAQFRQRKAQSDGQSPSKKQKKKRKTSSSKHDVSAHHDLNIDQSQCNEMYINSSQRVESTVIPESTIMRTLHSGEITSHEQGFSVELESEISTTADDCSSEVNGCSFVMRTGKPTNLLREEEFGVDDSYSEQGAQDSPTHLEMMESELAGKQHEIEELNRELEEMRVTYGTEGLQQLQEFEAAIKQRDGIITQLTANLQQARREKDETMREFLELTEQSQKLQIQFQQLQASETLRNSTHSSTAADLLQAKQQILTHQQQLEEQDHLLEDYQKKKEDFTMQISFLQEKIKVYEMEQDKKVENSNKEEIQEKETIIEELNTKIIEEEKKTLELKDKLTTADKLLGELQEQIVQKNQEIKNMKLELTNSKQKERQSSEEIKQLMGTVEELQKRNHKDSQFETDIVQRMEQETQRKLEQLRAELDEMYGQQIVQMKQELIRQHMAQMEEMKTRHKGEMENALRSYSNITVNEDQIKLMNVAINELNIKLQDTNSQKEKLKEELGLILEEKCALQRQLEDLVEELSFSREQIQRARQTIAEQESKLNEAHKSLSTVEDLKAEIVSASESRKELELKHEAEVTNYKIKLEMLEKEKNAVLDRMAESQEAELERLRTQLLFSHEEELSKLKEDLEIEHRINIEKLKDNLGIHYKQQIDGLQNEMSQKIETMQFEKDNLITKQNQLILEISKLKDLQQSLVNSKSEEMTLQINELQKEIEILRQEEKEKGTLEQEVQELQLKTELLEKQMKEKENDLQEKFAQLEAENSILKDEKKTLEDMLKIHTPVSQEERLIFLDSIKSKSKDSVWEKEIEILIEENEDLKQQCIQLNEEIEKQRNTFSFAEKNFEVNYQELQEEYACLLKVKDDLEDSKNKQELEYKSKLKALNEELHLQRINPTTVKMKSSVFDEDKTFVAETLEMGEVVEKDTTELMEKLEVTKREKLELSQRLSDLSEQLKQKHGEISFLNEEVKSLKQEKEQVSLRCRELEIIINHNRAENVQSCDTQVSSLLDGVVTMTSRGAEGSVSKVNKSFGEESKIMVEDKVSFENMTVGEESKQEQLILDHLPSVTKESSLRATQPSENDKLQKELNVLKSEQNDLRLQMEAQRICLSLVYSTHVDQVREYMENEKDKALCSLKEELIFAQEEKIKELQKIHQLELQTMKTQETGDEGKPLHLLIGKLQKAVSEECSYFLQTLCSVLGEYYTPALKCEVNAEDKENSGDYISENEDPELQDYRYEVQDFQENMHTLLNKVTEEYNKLLVLQTRLSKIWGQQTDGMKLEFGEENLPKEETEFLSIHSQMTNLEDIDVNHKSKLSSLQDLEKTKLEEQVQELESLISSLQQQLKETEQNYEAEIHCLQKRLQAVSESTVPPSLPVDSVVITESDAQRTMYPGSCVKKNIDGTIEFSGEFGVKEETNIVKLLEKQYQEQLEEEVAKVIVSMSIAFAQQTELSRISGGKENTASSKQAHAVCQQEQHYFNEMKLSQDQIGFQTFETVDVKFKEEFKPLSKELGEHGKEILLSNSDPHDIPESKDCVLTISEEMFSKDKTFIVRQSIHDEISVSSMDASRQLMLNEEQLEDMRQELVRQYQEHQQATELLRQAHMRQMERQREDQEQLQEEIKRLNRQLAQRSSIDNENLVSERERVLLEELEALKQLSLAGREKLCCELRNSSTQTQNGNENQGEVEEQTFKEKELDRKPEDVPPEILSNERYALQKANNRLLKILLEVVKTTAAVEETIGRHVLGILDRSSKSQSSASLIWRSEAEASVKSCVHEEHTRVTDESIPSYSGSDMPRNDINMWSKVTEEGTELSQRLVRSGFAGTEIDPENEELMLNISSRLQAAVEKLLEAISETSSQLEHAKVTQTELMRESFRQKQEATESLKCQEELRERLHEESRAREQLAVELSKAEGVIDGYADEKTLFERQIQEKTDIIDRLEQELLCASNRLQELEAEQQQIQEERELLSRQKEAMKAEAGPVEQQLLQETEKLMKEKLEVQCQAEKVRDDLQKQVKALEIDVEEQVSRFIELEQEKNTELMDLRQQNQALEKQLEKMRKFLDEQAIDREHERDVFQQEIQKLEQQLKVVPRFQPISEHQTREVEQLANHLKEKTDKCSELLLSKEQLQRDIQERNEEIEKLEFRVRELEQALLVEDRKHFGAVEAKPELSLEVQLQAERDAIDRKEKEITNLEEQLEQFREELENKNEEVQQLHMQLEIQKKESTTRLQELEQENKLFKDDMEKLGLAIKESDAMSTQDQHVLFGKFAQIIQEKEVEIDQLNEQVTKLQQQLKITTDNKVIEEKNELIRDLETQIECLMSDQECVKRNREEEIEQLNEVIEKLQQELANIGQKTSMNAHSLSEEADSLKHQLDVVIAEKLALEQQVETANEEMTFMKNVLKETNFKMNQLTQELFSLKRERESVEKIQSIPENSVNVAIDHLSKDKPELEVVLTEDALKSLENQTYFKSFEENGKGSIINLETRLLQLESTVSAKDLELTQCYKQIKDMQEQGQFETEMLQKKIVNLQKIVEEKVAAALVSQIQLEAVQEYAKFCQDNQTISSEPERTNIQNLNQLREDELGSDISALTLRISELESQVVEMHTSLILEKEQVEIAEKNVLEKEKKLLELQKLLEGNEKKQREKEKKRSPQDVEVLKTTTELFHSNEESGFFNELEALRAESVATKAELASYKEKAEKLQEELLVKETNMTSLQKDLSQVRDHLAEAKEKLSILEKEDETEVQESKKACMFEPLPIKLSKSIASQTDGTLKISSSNQTPQILVKNAGIQINLQSECSSEEVTEIISQFTEKIEKMQELHAAEILDMESRHISETETLKREHYVAVQLLKEECGTLKAVIQCLRSKEGSSIPELAHSDAYQTREICSSDSGSDWGQGIYLTHSQGFDIASEGRGEESESATDSFPKKIKGLLRAVHNEGMQVLSLTESPYSDGEDHSIQQVSEPWLEERKAYINTISSLKDLITKMQLQREAEVYDSSQSHESFSDWRGELLLALQQVFLEERSVLLAAFRTELTALGTTDAVGLLNCLEQRIQEQGVEYQAAMECLQKADRRSLLSEIQALHAQMNGRKITLKREQESEKPSQELLEYNIQQKQSQMLEMQVELSSMKDRATELQEQLSSEKMVVAELKSELAQTKLELETTLKAQHKHLKELEAFRLEVKDKTDEVHLLNDTLASEQKKSRELQWALEKEKAKLGRSEERDKEELEDLKFSLESQKQRNLQLNLLLEQQKQLLNESQQKIESQRMLYDAQLSEEQGRNLELQVLLESEKVRIREMSSTLDRERELHAQLQSSDGTGQSRPPLPSEDLLKELQKQLEEKHSRIVELLNETEKYKLDSLQTRQQMEKDRQVHRKTLQTEQEANTEGQKKMHELQSKVEDLQRQLEEKRQQVYKLDLEGQRLQGIMQEFQKQELEREEKRESRRILYQNLNEPTTWSLTSDRTRNWVLQQKIEGETKESNYAKLIEMNGGGTGCNHELEMIRQKLQCVASKLQVLPQKASERLQFETADDEDFIWVQENIDEIILQLQKLTGQQGEEPSLVSPSTSCGSLTERLLRQNAELTGHISQLTEEKNDLRNMVMKLEEQIRWYRQTGAGRDNSSRFSLNGGANIEAIIASEKEVWNREKLTLQKSLKRAEAEVYKLKAELRNDSLLQTLSPDSEHVTLKRIYGKYLRAESFRKALIYQKKYLLLLLGGFQECEDATLALLARMGGQPAFTDLEVITNRPKGFTRFRSAVRVSIAISRMKFLVRRWHRVTGSVSININRDGFGLNQGAEKTDSFYHSSGGLELYGEPRHTTYRSRSDLDYIRSPLPFQNRYPGTPADFNPGSLACSQLQNYDPDRALTDYITRLEALQRRLGTIQSGALSLTTSWQHHSARPTAPLSLKFFHTH

SEQ ID NO: 78885 - protein, 14 aa, Homo sapiens
MSSVAVLTQESFAE

SEQ ID NO: 78886 - protein, 274 aa, Homo sapiens
MGAPLEVLQNRVLDARIFHTEFGSGVAILTGAHRFTLSANVGDLKLRRMPEVPGLQSAPSCWTVLCQDRVAHILLAVGPDLYLLDHAACSAVTPPGLAPGVSSFLQMAVSFTYRHLALFTDTGYIWMGTASLKEKLCEFNCNIRAPPKQMVWCSRPRSKERAVVVAWERRLMVVGDAPESIQYKQLTIQVLLDRLVLRRLYPLAIQICEYLRLPEVQGVSRILAHWACYKVQQKDVSDEDVARAINQKLGDTPGVSYSDIAARAYGCGRTELAI

SEQ ID NO: 78887 - protein, 480 aa, Homo sapiens
MVVSEVDIAKADPAAASHPLLLNGDATVAQKNPGSVAENNLCSQYEEKVRPCIDLIDSLRALGVEQDLALPAIAVIGDQSSGKSSVLEALSGVALPRGSGIVTRCPLVLKLKKLVNEDKWRGKVSYQDYEIEISDASEVEKEINKAQNAIAGEGMGISHELITLEISSRDVPDLTLIDLPGITRVAVGNQPADIGYKIKTLIKKYIQRQETISLVVVPSNVDIATTEALSMAQEVDPEGDRTIGILTKPDLVDKGTEDKVVDVVRNLVFHLKKGYMIVKCRGQQEIQDQLSLSEALQREKIFFENHPYFRDLLEEGKATVPCLAEKLTSELITHICKSLPLLENQIKETHQRITEELQKYGVDIPEDENEKMFFLIDKVNAFNQDITALMQGEETVGEEDIRLFTRLRHEFHKWSTIIENNFQEGHKILSRKIQKFENQYRGRELPGFVNYRTFETIVKQQIKALEEPAVDMLHTVTVQN

SEQ ID NO: 78888 - protein, 115 aa, Homo sapiens
MTSRSTARPNGQPQASKICQFKLVLLGESAVGKSSLVLRFVKGQFHEYQESTIGAAFLTQSVCLDDTTVKFEIWDTAGQERYHSLAPMYYRGAQAAIVVYDITNQETFARAKTWV

SEQ ID NO: 78889 - protein, 181 aa, Homo sapiens
MGRRPARCYRYCKNKPYPKSRFCRGVPDAKIRIFDLGRKKAKVDEFPLCGHMVSDEYEQLSSEALEAARICANKYMVKSCGKDGFHIRVRLHPFHVIRINKMLSCAGADRSTSQRSGASPSSMLMNLKTWWLKSGSSQMAVGSSTSPVVALWTSGGPCTHEGFQCAAPLLILTNKFYFLST

SEQ ID NO: 78890 - protein, 202 aa, Homo sapiens
MPGRGRCPDCGSTELVEDSHYSQSQLVCSDCGCVVTEGVLTTTFSDEGNLREVTYSRSTGENEQVSRSQQRGLRRVRDLCRVLQLPPTFEDTAVAYYQQAYRHSGIRAARLQKKEVLVGCCVLITCRQHNWPLTMGAICTLLYADLDVFSSTYMQIVKLLGLDVPSLCLAELVKTYCSSLECSGTIIAHCSLELMGSSDLPT

SEQ ID NO: 78891 - protein, 435 aa, Homo sapiens
MAMGLMCGRRELLRLLQSGRRVHSVAGPSQWLGKPLTTRLLFPAAPCCCRPHYLFLAASGPRSLSTSAISFAEVQVQAPPVVAATPSPTAVPEVASGETADVVQTAAEQSFAELGLGSYTPVGLIQNLLEFMHVDLGLPWWGAIAACTVFARCLIFPLIVTGQREAARIHNHLPEIQKFSSRIREAKLAGDHIEYYKASSEMALYQKKHGIKLYKPLILPVTQAPIFISFFIALREMANLPVPSLQTGGLWWFQDLTVSDPIYILPLAVTATMWAVLELGAETGVQSSDLQWMRNVIRMMPLITLPITMHFPTAVFMYWLSSNLFSLVQVSCLRIPAVRTVLKIPQRVVHDLDKLPPREGFLESFKKGWKNAEMTRQLREREQRMRNQLELAARGPLRQTFTHNPLLQPGKDNPPNIPSSSSKPKSKYPWHDTLG

SEQ ID NO: 78892 - protein, 89 aa, Homo sapiens
MEATTAGVGRLEEEALRRKERLKALREKTGRKDKEDGEPKTKHLREEEEEGEKHRELRLRNYVPEDEDLKKRRVPQAKPVAVEEKVKEQ

SEQ ID NO: 78893 - protein, 43 aa, Homo sapiens
  MOD_RES (1)..(1): Any amino acid
XIHTHGVFRGIQVRNHTSVTSRTVNEGFLVQTSSKDTKGDIQV

SEQ ID NO: 78894 - protein, 386 aa, Homo sapiens
MKLCSLAVLVPIVLFCEQHVFAFQSGQVLAALPRTSRQVQVLQNLTTTYEIVLWQPVTADLIVKKKQVHFFVNASDVDNVKAHLNVSGIPCSVLLADVEDLIQQQISNDTVSPRASASYYEQYHSLNEIYSWIEFITERHPDMLTKIHIGSSFEKYPLYVLKVSGKEQAAKNAIWIDCGIHAREWISPAFCLWFIGHNRMWRKNRSFYANNHCIGTDLNRNFASKHWCEEGASSSSCSETYCGLYPESEPEVKAVASFLRRNINQIKAYISMHSYSQHIVFPYSYTRSKSKDHEELSLVASEAVRAIEKISKNTRYTHGHGSETLYLAPGGGDDWIYDLGIKYSFTIELRDTGTYGFLLPERYIKPTCREAFAAVSKIAWHVIRNV

SEQ ID NO: 78895 - protein, 54 aa, Homo sapiens
  MOD_RES (1)..(1): Any amino acid
XSQGWLSSWLPTWRPTSMSQLKNVEARILQCLQNKFLARYVSLPNQNKIWTVTS

SEQ ID NO: 78896 - protein, 130 aa, Homo sapiens
MPPTRDPFQQPTLDNDDSYLGELRASKIPKDDLDFRLAALYNHHTGTFKNKSEILLNQKTTQDTYRTKIQFPGEFLTPPTPPITFLANIRHWINPKKESIHSIQGSIVSPHTAATNGGYSRKKDGGFFST

SEQ ID NO: 78897 - protein, 125 aa, Homo sapiens
MIKRVQNLLGHYLIHGFRVRPEPNGDLDLEAMVAVFGSKGLRVVKISWGQGHFWELWRSGLWNMSDWIWDARWLEGNIALALGHNSVVLYDPVVGCILQEVPCTDRCTLSSACLIGDAWKELTIV

SEQ ID NO: 78898 - protein, 84 aa, Homo sapiens
FKNEFKSSGINTASSAASKERTAPHKSNTGFPKLLCASLLIFFLLLAISFFIAFVRFHLPESARRICLFCGALRSRRSATLAMG

SEQ ID NO: 78899 - protein, 89 aa, Homo sapiens
AYERRFPTCPLIPMFVGSDTVNEFKSEDGAIHVIERRCKLDVDAPRLLKKIAGVDYVYFVQKNSLNSRERTLHIEAYNETAFSLSAGSP

SEQ ID NO: 78900 - protein, 83 aa, Homo sapiens
MSSEEDKSVEQPQPPPPPPEEPGAPAPSPAAADKRPRGRPRKDGASPFQRARKKPRSRGKTAVEDEDSMDGLETTETETIVET

SEQ ID NO: 78901 - protein, 276 aa, Homo sapiens
MDILVPLLQLLVLLLTLPLHLMALLGCWQPLCKSYFPYLMAVLTPKSNRKMESKKRELFSQIKGLTGASGKVALLELGCGTGANFQFYPPGCRVTCLDPNPHFEKFLTKSMAENRHLQYERFVVAPGEDMRQLADGSMDVVVCTLVLCSVQSPRKVLQEVRRVLRPGGVLFFWEHVAEPYGSWAFMWQQVFEPTWKHIGDGCCLTRETWKDLENAQFSEIQMERQPPPLKWLPVGPHIMGKAVKSFPSSKALICSFPSLQLEQATHQPIYLPLRGT

SEQ ID NO: 78902 - protein, 34 aa, Homo sapiens
MKEDKEELEGQEGSQSTRETPSEEEQAQKQSGME

SEQ ID NO: 78903 - protein, 169 aa, Homo sapiens; identical to SEQ ID NO: 60738

SEQ ID NO: 78904 - protein, 153 aa, Homo sapiens
KEEFQAVEKKLVEEKAAHAKTKVLLAKEEEKLQFALGEVEVLSKQLEKEKLAFEKAVKSKVLQESSKKDQLITKCNEIESHIIKQEDILNGKENEIKELQQVISQQKQIFRNHMSDFRIQKQQESYMAQVLDQKHKKASGTRQARSHQHPREK

SEQ ID NO: 78905 - protein, 1239 aa, Homo sapiens
MANGGGGGGGSSGGGGGGGGSSLRMSSNIHANHLSLDASSSSSSSSSSSSSSSSSSSSSSVHEPKMDALIIPVTMEVPCDSRGQRMWWAFLASSMVTFFGGLFIILLWRTLKYLWTVCCHCGGKTKEAQKINNGSSQADGTLKPVDEKEEAVAAEVGWMTSVKDWAGVMISAQTLTGRVLVVLVFALSIGALVIYFIDSSNPIESCQNFYKDFTLQIDMAFNVFFLLYFGLRFIAANDKLWFWLEVNSVVDFFTVPPVFVSVYLNRSWLGLRFLRALRLIQFSEILQFLNILKTSNSIKLVNLLSIFISTWLTAAGFIHLVENSGDPWENFQNNQALTYWECVYLLMVTMSTVGYGDVYAKTTLGRLFMVFFILGGLAMFASYVPEIIELIGNRKKYGGSYSAVSGRKHIVVCGHITLESVSNFLKDFLHKDRDDVNVEIVFLHNISPNLELEALFKRHFTQVEFYQGSVLNPHDLARVKIESADACLILANKYCADPDAEDASNIMRVISIKNYHPKIRIITQMLQYHNKAHLLNIPSWNWKEGDDAICLAELKLGFIAQSCLAQGLSTMLANLFSMRSFIKIEEDTWQKYYLEGVSNEMYTEYLSSAFVGLSFPTVCELCFVKLKLLMIAIEYKSANRESRSRKRILINPGNHLKIQEGTLGFFIASDAKEVKRAFFYCKACHDDITDPKRIKKCGCKRPKMSIYKRMRRACCFDCGRSERDCSCMSGRVRGNVDTLERAFPLSSVSVNDCSTSFRAFEDEQPSTLSPKKKQRNGGMRNSPNTSPKLMRHDPLLIPGNDQIDNMDSNVKKYDSTGMFHWCAPKEIEKVILTRSEAAMTVLSGHVVVCIFGDVSSALIGLRNLVMPLRASNFHYHELKHIVFVGSIEYLKREWETLHNFPKVSILPGTPLSRADLRAVNINLCDMCVILSANQNNIDDTSLQDKECILASLNIKSMQFDDSIGVLQANSQGFTPPGMDRSSPDNSPVHGMLRQPSITTGVNIPIITELVNDTNVQFLDQDDDDDPDTELYLTQPFACGTAFAVSVLDSLMSATYFNDNILTLIRTLVTGGATPELEALIAEENALRGGYSTPQTLANRDRCRVAQLALLDGPFADLGDGGCYGDLFCKALKTYNMLCFGIYRLRDAHLSTPSQCTKRYVITNPPYEFELVPTDLIFCLMQFDHNAGQSRASLSHSSHSSQSSSKKSSSVHSIPSTANRQNRPKSRESRDKQKKEMVYR

SEQ ID NO: 78906 - protein, 141 aa, Homo sapiens
MLGSGFKAERLRVNLRLVINRLKLLEKKKTELAQKARKEIADYLAAGKDERARIRVEHIIREDYLVEAMEILELYCDLLLARFGLIQSMKELDSGLAESVSTLIWAAPRLQSEVAELKILCAKYSKEYGKLCRTNQIGTVN

SEQ ID NO: 78907 - protein, 19 aa, Homo sapiens
  MOD_RES (1)..(1): Any amino acid
XPDNFRELVHIKPMAHGDL

SEQ ID NO: 78908 - protein, 118 aa, Homo sapiens
MTTEVGSVSEVKKDSSQLGTDATKEKPKEVAENQQNQSSDPEEEKGSQPPPAAESQSSLRRQKREKETSESRGISRFIPPWLKKQKSYTLVVAKDGGDKKEPTQAVVEEQVLDKEEPL

SEQ ID NO: 78909 - protein, 324 aa, Homo sapiens
MLWFRGALGVWVWLAAASQPCKNSNAGRRGQHPRRPAGSCVQRLTMRNTSKELQGATHRYAPCDWYYHVPVKRSEKAVDAPPASQIPGLSNLGDSHSENLPGTRRYWIKETDSEYVKLAKQGGRPDLLKHFAPGTRKGSPVAYSLPDWYIHHSKPPTASQQEVRAVSMPDYMVHEEFNPDQANGSYASRRGPFDFDMKTVWQREAEELEKEKKKLRLPAIDSKYLSKAGTPLGPKNPAGSRLSFPPVNGYKDEWLQQQQRADSDKRTPKTSRASVLSQSPRDLEGPQDAARLQDAEASEGPEDTPESSQSPEESVSASTPAELK

SEQ ID NO: 78910 - protein, 195 aa, Homo sapiens
MAQHFSLAACDVVGFDLDHTLCRYNLPESAPLIYNSFAQFLVKEKGYDKELLNVTPEDWDFCCKGLALDLEDGNFLKLANNGTVLRASHGTKMMTPEVLAEAYGKKEWKHFLSDTGMACRSGKYYFYDNYFDLPGALLCARVVDYLTKLNNGQKTFDFWKDIVAAIQHNYKMSAFKVRRLATSLLQDISTSFILI

SEQ ID NO: 78911 - protein, 1085 aa, Homo sapiens
MGTATRRKPHLLLVAAVALVSSSAWSSALGSQTTFGPVFEDQPLSVLFPEESTEEQVLLACRARASPPATYRWKMNGTEMKLEPGSRHQLVGGNLVIMNPTKAQDAGVYQCLASNPVGTVVSREAILRFGFLQEFSKEERDPVKAHEGWGVMLPCNPPAHYPGLSYRWLLNEFPNFIPTDGRHFVSQTTGNLYIARTNASDLGNYSCLATSHMDFSTKSVFSKFAQLNLAAEDTRLFAPSIKARFPAETYALVGQQVTLECFAFGNPVPRIKWRKVDGSLSPQWTTAEPTLQIPSVSFEDEGTYECEAENSKGRDTVQGRIIVQAQPEWLKVISDTEADIGSNLRWGCAAAGKPRPTVRWLRNGEPLASQNRVEVLAGDLRFSKLSLEDSGMYQCVAENKHGTIYASAELAVQALAPDFRLNPVRRLIPAARGGEILIPCQPRAAPKAVVLWSKGTEILVNSSRVTVTPDGTLIIRNISRSDEGKYTCFAENFMGKANSTGILSVRDATKITLAPSSADINLGDNLTLQCHASHDPTMDLTFTWTLDDFPIDFDKPGGHYRRTNVKETIGDLTILNAQLRHGGKYTCMAQTVVDSASKEATVLVRGPPGPPGGVVVRDIGDTTIQLSWSRGFDNHSPIAKYTLQARTPPAGKWKQVRTNPANIEGNAETAQVLGLTPWMDYEFRVIASNILGTGEPSGPSSKIRTREAAPSVAPSGLSGGGGAPGELIVNWTPMSREYQNGDGFGYLLSFRRQGSTHWQTARVPGADAQYFVYSNESVRPYTPFEVKIRSYNRRGDGPESLTALVYSAEEEPRVAPTKVWAKGVSSSEMNVTWEPVQQDMNGILLGYEIRYWKAGDKEAAADRVRTAGLDTSARVSGLHPNTKYHVTVRAYNRAGTGPASPSANATTMKPPPRRPPGNISWTFSSSSLSIKWDPVVPFRNESAVTGYKMLYQNDLHLTPTLHLTGKNWIEIPVPEDIGHALVQIRTTGPGGDGIPAEVHIVRNGEMALWDPIRTPPLESSPRPGRNTRHEQVEELERSAHLTILQSKEEGQALGPRALPPSPSSSSKDPDAVPDNSLGAPACPSG

SEQ ID NO: 78912 - protein, 455 aa, Homo sapiens
MLHPETSPGRGHLLAVLLALLGTAWAEVWPPQLQEQAPMAGALNRKESFLLLSLHNRLRSWVQPPAADMRRLDWSDSLAQLAQARAALCGIPTPSLASGLWRTLQVGWNMQLLPAGLASFVEVVSLWFAEGQRYSHAAGECARNATCTHYTQLVWATSSQLGCGRHLCSAGQAAIEAFVCAYSPRGNWEVNGKTIVPYKKGAWCSLCTASVSGCFKAWDHAGGLCEVPRNPCRMSCQNHGRLNISTCHCHCPPGYTGRYCQVRCSLQCVHGRFREEECSCVCDIGYGGAQCATKVHFPFHTCDLRIDGDCFMVSSEADTYYRARMKCQRKGGVLAQIKSQKVQDILAFYLGRLETTNEVIDSDFETRNFWIGLTYKTAKDSFRWATGEHQAFTSFAFGQPDNHGLVWLSAAMGFGNCVELQASAAFNWNNQRCKTRNRYICQFAQEHISRWGPGS

SEQ ID NO: 78913 - protein, 149 aa, Homo sapiens
MSVWTSPRRLVELAGQSLLKDEALAIAALELLPRELFPPLFMAAFDGRHSQTLKAMVQAWPFTCLPLGVLMKGQHLHLETFKAVLDGLDVLLAQEVRPRRWKLQVLDLRKNSHQDFWTVWSGNRASLYSFPEPEAAQPMTKKRKVDGLS

SEQ ID NO: 78914 - protein, 125 aa, Homo sapiens
MDLGLSEDHFSRPVGLFLASDVQQLRQAIEECKQVILELPEQSEKQKDAVVRLIHLRLKLQELKDPNEDEPNIRVLLEHRFYKEKSKSVKQTCDKCNTIIWGLIQTWYTCTGCYYRCHSKCLNLI

SEQ ID NO: 78915 - protein, 96 aa, Homo sapiens
MRAPGAGAASVVSLALLWLLGLPWTWSAAAALGVYVGSGGWRFLRIVCKTARRDLLSSFLHLHVGDHRAAQGCHCRAQQVLPHGSLRPPRLPHAGG

SEQ ID NO: 78916 - protein, 114 aa, Homo sapiens
MAAAALRDPAQVPVAADLLTDHEEQGYVTFEDVAVYFSQEEWRLLDDAQRLLYRNVMLENFTLLASLGKVLTPHPSILSWARLFLLFLGRGLFFPKLNCGHSFLLQYPEVAIVI

SEQ ID NO: 78917 - protein, 206 aa, Homo sapiens
SFLCPTWPSPSGAHGLREEPEFVTARAGESVVLRCDVIHPVTGQPPPYVVEWFKFGVPIPIFIKFGYYPPHVDPEYAGRASLHDKASLRLEQVRSEDQGWYECKVLMLDQQYDTFHNGSWVHLTINAPPTFTETPPQYIEAKEGGSITMTCTAFGNPKPIVTWLKEGTLLGASGKYQVSDGSLTVTSVSREDRGAYTCRAYSIQGE

SEQ ID NO: 78918 - protein, 87 aa, Homo sapiens
MELLKLNRSVQGTGPGPGASLCRPGAPLLNSSSVGNLSCEPPRIRGAGTRDRTNTDLLNTRRRTELSQSSESPGLMPVFLIPRKMMR

SEQ ID NO: 78919 - protein, 214 aa, Homo sapiens
MAGSAMSSKFFLVALAIFFSFAQVVIEANSWWSLGMNNPVQMSEVYIIGAQPLCSQLAGLSQGQKKLCHLYQDHMQYIGEGAKTGIKECQYQFRHRRWNCSTVDNTSVFGRVMQIGSRETAFTYAVSAAGVVNAMSRACREGELSTCGCSRAARPKDLPRDWLWGGCGDNIDYGYRFAKEFVDARERERIHAKGSYESARILMNLHNNEAGRRV

SEQ ID NO: 78920 - protein, 43 aa, Homo sapiens
MTEYKLVVVGAGGVGKSALTIQLIQNHFVDEYDPTIEVLLSSM

SEQ ID NO: 78921 - protein, 175 aa, Homo sapiens
MSTVEEDSDTVTVETVNSVTLTQDTEGNLILHCPQNEADEIDSEDSIEPPHKRLCLSSEDDQSIDDSTPCISVVALPLSENDQSFEVTMTATTEVADDEVTEGTVTQIQILQNEQLDEISPLGNEEVSAVSQAWFTTKEDKDSLTNKGHKWKQGMWSKEEIDILMNNIERYLKAR

SEQ ID NO: 78922 - protein, 129 aa, Homo sapiens
MMNHSMSSGSGSLRTNQKRSLYVRAMFDYDKSKDSGLPSQGLSFKYGDILHVINASDDEWWQARRVMLEGDSEEMGVIPSKRRVERKERARLKTVKFNAKPGVIDSKGDIPGLGDDGYGTKTLNTFFIC

SEQ ID NO: 78923 - protein, 158 aa, Homo sapiens
METESEQNSNSTNGSSSSGGSSRPQIAQMSLYERQAVQALQALQRQPNAAQYFHQFMLQQQLSNAQLHSLAAVQQVRGQQPAGPRGRGQALQATIAASRQASSPNTSTTQQQTTTTQASINLATTSAAQLISRSQSVSSPSATTLTQSVLLGNTTSPP

SEQ ID NO: 78924 - protein, 1226 aa, Homo sapiens
MADNLDEFIEEQKARLAEDKAELESDPPYMEMKGKLSAKLSENSKILISMAKENIPPNSQQTRGSLGIDYGLSLPLGEDYERKKHKLKEELRQDYRRYLTQKNFLSTSETDPSTLGVSLPIGERLSAKERLKLERNKEYNQFLRGKEESSEKFRQVEKSTEPKSQRNKKPIGQVKPDLTSQIQTSCENSEGPRKDVLTPSEAYEELLNQRRLEEDRYRQLDDEIELRNRRIIKKANEEVGISNLKHQRFASKAGIPDRRFHRFNEDRVFDRRYHRPDQDPEVSEEMDERFRYESDFDRRLSRVYTNDRMHRNKRGNMPPMEHDGDVIEQSNIRISSAENKSAPDNETSKSANQDTCSPFAGMLFGGEDRELIQRRKEKYRLELLEQMAEQQRNKRREKDLELRVAASGAQDPEKSWNELLTSLQLSKEEPDRLKQFSVAPRHFEEMIPPERPRIAFQTPLPPLSAPSVPPIPSVHPVPSQNEDLRSGLSSALGEMVSPRIAPLPPPPLLPPLATNYRTPYDDAYYFYGSRNTFDPSLAYYGSGMMGVQPAAYVSAPVTHQLAQPVVNTVGQNELKITSDQVINSGLIFEDKPKPSKQSLQSYQEALQQQIREREERRKKEREEKEEYEAKLEAEMRTYNPWGKGGGGAPLRDAKGNLITDLNRMHRQNIDAYHNPDARTYEDKRAVVSLDPNLATSNAENLEDAANKSSGHMQTQSSPFARGNVFGEPPTELQIKQQELYKNFLRFQIEEKKQREEAERERLRIAEEKEERRLAEQRARIQQEYEEEQEKKREKEEEQRLKNEEHIRLAEERQKEAERKKKEEEEKYNLQLQHYCERDNLIGEETKHMRQPSPIVPALQNKIASKLQRPPSVDSIIRSFIHESSMSRAQSPPVPARKNQLRAEEEKKNVIMELSEMRKQLRSEERRLQERLLHMDSDDEIPIRKKERNPMDIFDMARHRLQAPVRRQSPKGLDAATFQNVHDFNELKDRDSETRVDLKFMYLDPPRDHHTLEIQQQALLREQQKRLNRIKMQEGAKVDLDAIPSAKVREQRMPRDDTSDFLKNSLLESDSAFIGAYGETYPAIEDDVLPPPSQLPSARERRRNKWKGLDIDSSRPNVAPDGLSLKSISSVNVDELRVRNEERMRRLNEFHNKPINTDDESSLVDPDDIMKHIGDDGSNSVATEPWLRPGTSETLKRFMAEQLNQEQQQIPGKPGTFTWQGLSTAHG

SEQ ID NO: 78925 - protein, 1635 aa, Homo sapiens
MSSAQCPALVCVMSRLRFWGPWPLLMWQLLWLLVKEAQPLEWVKDPLQLTSNPLGPPESWSSHSSHFPRESPHAPTLPADPWDFDHLGPSASSEMPAPPQESTENLVPFLDTWDSAGEQPLEPEQFLASQQDLKDKLSPQERLPVSPKKLKKDPAQRWSLAEIIGITRQLSTPQSQKQTLQNEYSSTDTPYPGSLPPELRVKSDEPPGPSEQVGPSQFHLEPETQNPETLEDIQSSSLQQEAPAQLPQLLEEEPSSMQQEAPALPPESSMESLTLPNHEVSVQPPGEDQAYYHLPNITVKPADVEVTITSEPTNETESSQAQQETPIQFPEEVEPSATQQEAPIEPPVPPMEHELSISEQQQPVQPSESPREVESSPTQQETPGQPPEHHEVTVSPPGHHQTHHLASPSVSVKPPDVQLTIAAEPSAEVGTSLVHQEATTRLSGSGNDVEPPAIQHGGPPLLPESSEEAGPLAVQQETSFQSPEPINNENPSPTQQEAAAEHPQTAEEGESSLTHQEAPAQTPEFPNVVVAQPPEHSHLTQATVQPLDLGFTITPESKTEVELSPTMKETPTQPPKKVVPQLRVYQGVTNPTPGQDQAQHPVSPSVTVQLLDLGLTITPEPTTEVGHSTPPKRTIVSPKHPEVTLPHPDQVQTQHSHLTRATVQPLDLGFTITPKSMTEVEPSTALMTTAPPPGHPEVTLPPSDKGQAQHSHLTQATVQPLDLELTITTKPTTEVKPSPTTEETSTQPPDLGLAIIPEPTTETGHSTALEKTTAPRPDRVQTLHRSLTEVTGPPTELEPAQDSLVQSESYTQNKALTAPEEHKASTSTNICELCTCGDEMLSCIDLNPEQRLRQVPVPEPNTHNGTFTILNFQGNYISYIDGNVWKAYSWTEKLILRENNLTELHKDSFEGLLSLQYLDLSCNKIQSIERHTFEPLPFLKFINLSCNVITELSFGTFQAWHGMQFLHKLILNHNPLTTVEDPYLFKLPALKYLDMGTTLVPLTTLKNILMMTVELEKLILPSHMACCLCQFKNSIEAVCKTVKLHCNSACLTNTTHCPEEASVGNPEGAFMKVLQARKNYTSTELIVEPEEPSDSSGINLSGFGSEQLDTNDESDFISTLSYILPYFSAVNLDVKSLLLPFIKLPTTGNSLAKIQTVGQNRQRVKRVLMGPRSIQKRHFKEVGRQSIRREQGAQASVENAAEEKRLTSPAPREVEQPHTQQGPEKLAGNAVYTKPSFTQEHKAAVSVLKPFSKGTPSTSSPAKALPQVRDRSKDLTHAISILESAKARVTNTKTSKPIVHARKKYRFHKTRSHVTHRTTKVKKSPKVRKKSYLSRLMLANRLPFSAAKSLINSPSQGAFSSLGDLSPQENPFLEVSALSEHFIEKNNTKHTTARNAFEENDFMENTNMPEGTISENTNYNHPPEADSAGTAFNLGPTVKQTETKWEYNNVGTDLSPEPKSFNYPLLSSPGDQFEIQLTQQLQSLIPNNNVRRLIAHVIRTLKMDCSGAHVQVTCAKLISRTGHLMKLLSGQQEVKASKIEWDTDQWKIENYINESTEAQSEQKEKSLELKKEVPGYGYTDKLILALIVTGILTILIILFCLIVICCHRRSLQEDEEGFSRDSEAPTEEEESEALP

SEQ ID NO: 78926 - protein, 447 aa, Homo sapiens
MNSKLPLDVLGRVWDLSDIDKDGHLDRDEFAVAMHLVYRALEKEPVPSALPPSLIPPSKRKKTVFPGAVPVLPASPPPKDSLRSTPSHGSVSSLNSTGSLSPKHSLKQTQPTVNWVVPVADKMRFDEIFLKTDLDLDGYVSGQEVKEIFMHSGLTQNLLAHIWALADTRQTGKLSKDQFALAMYFIQQKVSKGIDPPQVLSPDMVPPSERGTPGPDSSGSLGSGEFTGVKELDDISQEIAQLQREKYSLEQDIREKEEAIRQKTSEVQELQNDLDRETSSLQELEAQKQDAQDRLDEMDQQKAKLRDMLSDVRQKCQDETQMISSLKTQIQSQESDLKSQEDDLNRAKSELNRLQQEETQLEQSIQAGRVQLETIIKSLKSTQDEINQARSKLSQLHESRQEAHRSLEQYDQVLDGAHGASLTDLANLSEGVSLAERGSFGAMVKVE

SEQ ID NO: 78927 - protein, 47 aa, Homo sapiens
MPTTQQSPQDEQEKLLDEAIQAVKVQSFQMKRCLCFLYLKELLAFLS

SEQ ID NO: 78928 - protein, 71 aa, Homo sapiens
MSKGTSSDTSLGRVSRAAFPSPTAAEMAEISRIQYEMEYTEGISQRMRVPEKLKVAPPNADLEQGFQEGVP

SEQ ID NO: 78929 - protein, 21 aa, Homo sapiens
MKTVLMVAEKPSLAQSIAKIL

SEQ ID NO: 78930 - protein, 1294 aa, Homo sapiens
MEDGKPVWAPHPTDGFQMGNIVDIGPDSLTIEPLNQKGKTFLALINQVFPAEEDSKKDVEDNCSLMYLNEATLLHNIKVRYSKDRIYTYVANILIAVNPYFDIPKIYSSEAIKSYQGKSLGTRPPHVFAIADKAFRDMKVLKMSQSIIVSGESGAGKTENTKFVLRYLTESYGTGQDIDDRIVEANPLLEAFGNAKTVRNNNSSRFGKFVEIHFNEKSSVVGGFVSHYLLEKSRICVQGKEERNYHIFYRLCAGASEDIREKLHLSSPDNFRYLNRGCTRYFANKETDKQILQNRKSPEYLKAGSMKDPLLDDHGDFIRMCTAMKKIGLDDEEKLDLFRVVAGVLHLGNIDFEEAGSTSGGCNLKNKSAQSLEYCAELLGLDQDDLRVSLTTRVMLTTAGGTKGTVIKVPLKVEQANNARDALAKTVYSHLFDHVVNRVNQCFPFETSSYFIGVLDIAGFEYFEHNSFEQFCINYCNEKLQQFFNERILKEEQELYQKEGLGVNEVHYVDNQDCIDLIEAKLVGILDILDEENRLPQPSDQHFTSAVHQKHKDHFRLTIPRKSKLAVHRNIRDDEGFIIRHFAGAVCYETTQFVEKNNDALHMSLESLICESRDKFIRELFESSTNNNKDTKQKAGKLSFISVGNKFKTQLNLLLDKLRSTGASFIRCIKPNLKMTSHHFEGAQILSQLQCSGMVSVLDLMQGGYPSRASFHELYNMYKKYMPDKLARLDPRLFCKALFKALGLNENDYKFGLTKVFFRPGKFAEFDQIMKSDPDHLAELVKRVNHWLTCSRWKKVQWCSLSVIKLKNKIKYRAEACIKMQKTIRMWLCKRRHKPRIDGLVKVGTLKKRLDKFNEVVSVLKDGKPEMNKQIKNLEISIDTLMAKIKSTMMTQEQIQKEYDALVKSSEELLSALQKKKQQEEEAERLRRIQEEMEKERKRREEDEKRRRKEEEERRMKLEMEAKRKQEEEERKKREDDEKRIQAEVEAQLARQKEEESQQQAVLEQERRDRELALRIAQSEAELISDEAQADLALRSLDSYPVTSKNDGTRPKMTPEQMAKEMSEFLSRGPAVLATKAAAGTKKYDLSKWKYAELRDTINTSCDIELLAACREEFHRRLKVYHAWKSKNKKRNTETEQRAPKSVTDYDFAPFLNNSPQQNPAAQIPARQREIEMNRQQRFFRIPFIRPADQYKDPQSKKKGWWYAHFDGPWIARQMELHPDKPPILLVAGKDDMEMCELNLEETGLTRKRGAEILPRQFEEIWERCGGIQYLQNAIESRQARPTYATAMLQSLLK

SEQ ID NO: 78931 - protein, 44 aa, Homo sapiens
MKPKLMYQELKVPAEEPANELPMNEIEAWKAAEKKARWVLLVLI

SEQ ID NO: 78932 - protein, 153 aa, Homo sapiens
MAQDSVDLSCDYQFWMQKLSVWDQASTLETQQDTCLHVAQFQEFLRKMYEALKEMDSNTVIERFPTIGQLLAKACWNPFILAYDESQKILIWCLCCLINKEPQNSGQSKLNSWIQGVLSHILSALRFDKEVALFTQGLGYAPIDYYPGLLKNM

SEQ ID NO: 78933 - protein, 191 aa, Homo sapiens
  MOD_RES (1)..(1): Any amino acid
XYTELLRKKVDTQPGAAGEAVSEALCVVLNNVELVRKAAGQALKGLAWPEGATGPEGVLPRPLLSCTQALDDDLQREAHTVTAHLTSKMVGDIRKYVQHISLSPDSIQNDEAVAPLMKYLDEKLALLNASLVKGNLSSRFHFTLEALVSFFHAEGQGLPLESLRDGSYKRLKEELRLHKCSTRECIEQFYL

SEQ ID NO: 78934 - protein, 72 aa, Homo sapiens
MGIRGLMSFVEDHSNEFFTDLKLRDTKIVIDGYALFHRLCFSSNLDLRWKTCSNQMPTEYLSPSGKSSMGFF

SEQ ID NO: 78935 - protein, 68 aa, Homo sapiens
MSKSCGNNLAAISVGISLLLLLVVCGIGCVWHWKHRVATRFTLPRFLQRRSSRRKVCTKTFLGPRIIG

SEQ ID NO: 78936 - protein, 260 aa, Homo sapiens
AQQASEKIDRFRAHAASVFLTLLHFDSPPIPHVPHRGELEKLFPRSDVASVNWSAPSQAFPRITQLLGLPTYRYHVLLGLVVSLGGLTESTIRHSTQSLFEYMKGIQSDPQALGSFSGTLLQIFEDNLLNESHPFAVKLLALCKKEIKNSKDIQKLLSGIAVFCEMVQFPGDVRRQALLQLCLLLCHRFPLIRKTTASQVYETLLTYSDVVGADVLDEVVTVLSDTAWDAELAVVREQRNRLCDLLGVPRPQLVPQPGAC

SEQ ID NO: 78937 - protein, 120 aa, Homo sapiens
MGCAFINLCILASQHAWAQLTFWEASQLYLLFLSLTLATVNARWLEPRTTAAMWALQTVEKERGLGGEVPGSHQGPDPYRQLREKDPKYSALRQNFFRYHGLSSLCNLGCVLSNGLCLAG

SEQ ID NO: 78938 - protein, 331 aa, Homo sapiens
MATYLEFIQQNEERDGVRFSWNVWPSSRLEATRMVVPLACLLTPLKERPDLPPVQYEPVLCSRPTCKAVLNPLCQVDYRAKLWACNFCFQRNQFPPAYGGISEVNQPAELMPQFSTIEYVIQRGAQSPLIFLYVVDTCLEEDDLQALKESLQMSLSLLPPDALVGLITFGRMVQVHELSCEGISKSYVFRGTKDLTAKQIQDMLGLTKPAMPMQQARPAQPQEHPFASSRFLQPVHKIDMNLTDLLGELQRDPWPVTQGKRPLRSTGVALSIAVGLLEGTFPNTGARIMLFTGGPPTQGPGMVVGDELKIPIRSWHDIEKDNARFMKKATK

SEQ ID NO: 78939 - protein, 163 aa, Homo sapiens
MCGFCVGLISAKVQTDPPSVPICDLYPNGVFPKGQECEYPPTQDGRTAAWRTTSEEKKALDQASEEIWNDFREAAEAHRQVRKYVMSWIKPGMTMIEICEKLEDCSRKLIKENGLNAGLAFPTGCSLNNCAAHYTPNAGDTTVLQYDDICKIDFGTHISGKFL

SEQ ID NO: 78940 - protein, 24 aa, Homo sapiens
MKGSNRNKDHSAEGEGVGKRPKRK

SEQ ID NO: 78941 - protein, 192 aa, Homo sapiens
MAAATGAVAASAASGQAEGKKITDLRVIDLKSELKRRNLDITGVKTVLISRLKQAIEEEGGDPDNIELTVSTDTPNKKPTKGKGKKHEADELSGDASVEDDAFIKDGEEEENEKDIAGSGDGTQEVSKPLPSEGSLAEADHTAHEEMEAHTTVKEAEDDNISVTIQAEDAITLDFDGDDLLETGKNVKITDS

SEQ ID NO: 78942 - protein, 208 aa, Homo sapiens
MPTREPPKTRGSRGHLHTHPPGPGPPLQGLAPRGLKTSAPRPPCQPQPGPHKAKTKKIVFEDELLSQALLGAKKPIGAIPKGHKPRPHPVPDYELKYPPVSSERERSRYVAVFQDQYGEFLELQHEVGCAQAKLRQLEALLSSLPPPQSQKEAQVAARVWREFEMKRMDPGFLDKQARCHYLKGKLRHLKTQIQKFDDQGDSEGSVYF

SEQ ID NO: 78943 - protein, 291 aa, Homo sapiens
MASSNTVLMRLVASAYSIAQKAGMIVRRVIAEGDLGIVEKTCATDLQTKADRLAQMSICSSLARKFPKLTIIGEEDLPSEEVDQELIEDSQWEEILKQPCPSQYSAIKEEDLVVWVDPLDGTKEYTEGLLDNVTVLIGIAYEGKAIAGVINQPYYNYENNEKQQLREHRNEAKAGPDAVLGRTIWGVLGLGAFGFQLKEVPAGKHIITTTRSHSNKLVTDCVAAMNPDAVLRVGGAGNKIIQLIEGKASAYVFASPGCKKWDTCAPEVILHAVGGKLTDIHGNVLQYHKDV

SEQ ID NO: 78944 - protein, 153 aa, Homo sapiens
  MOD_RES (1)..(1): Any amino acid
XRPRHEGNAPDLACNFSLSQNRGTVIVERWWKVPLAGEGRKPRLHRRHRVYKLVEDTKHRPKENLELILTQSVENVGVRGDLVSVKKSLGRNRLLPQGLAVYASPENKKLFEEEKLLRQEGKLEKIQTKAGLLIADPRVGERGSVVAAPQNRQ

SEQ ID NO: 78945 - protein, 108 aa, Homo sapiens
RKRRELLPLIYHHLLRAGYVRAAREVKEQSGQKCFLAQPVTLLDIYTHWQQTSELGRKRKAEEDAALQAKKTRVSDPISTSESSEEEEEAEAETAKANKVLPCCPGWS

SEQ ID NO: 78946 - protein, 65 aa, Homo sapiens
MTHGEELGSDVHQDSIVLTYLEGLLMHQAAGGSGTAVDKKSAGHNEEDQNFNISGSAFPTCQSNG

SEQ ID NO: 78947 - protein, 114 aa, Homo sapiens
METLSQDSLLECQICFNYYSPRRRPKLLDCKHTCCSVCLQQMRTSQKDVRCPWCRGVTKLPPGFSVSQLPDDPEVLAVIAIPHTSEHTPVFIKLPSNGCYMLPLPISKERALLP

SEQ ID NO: 78948 - protein, 168 aa, Homo sapiens
MDSLEEPQKKVFKARKTMRVSDRQQLEAVYKVKEELLKTDVKLLNGNHENGDLDPTSPLENMDYIKDKEEVNGIEEICFDPEGSKAEWKETPCILSVNVKNKQDDDLNCEPLSPHNITPEPVSKLPAEPVSGDPAPGDLDAGDPASGVLASGDSTSGDPTSSEPSSSD

SEQ ID NO: 78949 - protein, 374 aa, Homo sapiens
MAAQRGMPSSAVRVLEEALGMGLTAAGDARDTADAVAAEGAYYLEQVTITEASEDDYEYEEIPDDNFSIPEGEEDLAKAIQMAQEQATDTEILERKTVLPSKHAVPEVIEDFLCNFLIKMGMTRTLDCFQSEWYELIQKGVTELRTVGNVPDVYTQIMLLENENKNLKKDLKHYKQAADKAREDLLKIQKERDFHRMHHKRIVQEKNKLINDLKGLKLHYASYEPTIRVLHEKHHTLLKEKMLTSLERDKVVGQISGLQETLKKLQRGHSYHGPQIKVDHSREKENAPEGPTQKGLREAREQNKCKTKMKGNTKVMRRREELWPFREPRPRSSTSQCCDTLFGAVQFQMFPSIQTPLNSHPDLGAHSRSCLECI

SEQ ID NO: 78950 - protein, 126 aa, Homo sapiens
  MOD_RES (1)..(1): Any amino acid
XSPGTKHTCVYTWVKQCWSVAACPEEWKYPLSLALHFHNKISNMSKIDAHITQSRFLTSDISEERGKVVSVLPRALSLSCPVPHLHRWNFCDSLLQRQSDEYSYPELVKMVWYKGVTYREKRKLTQ

SEQ ID NO: 78951 - protein, 37 aa, Homo sapiens
MGSPRSALSCLLLHLLVLCLQAQVRRGARRRGPGAPV

SEQ ID NO: 78952 - protein, 77 aa, Homo sapiens
MSGHPGSWEMNSVAFEDVAVNFTQEEWALLDPSQKNLYRDVMQETFRNLASIGNKGEDQSIEDQYKNSSRNLRCTGS

SEQ ID NO: 78953 - protein, 66 aa, Homo sapiens
  MOD_RES (1)..(1): Any amino acid
XNYIVPILWLNETGTIGDEKANMFRSQVTGKINLLGLIEMILLSVGVVMFVAFMISYCACRSKTIK

SEQ ID NO: 78954 - protein, 78 aa, Homo sapiens
MGSKAKKRVLLPTRPAPPTVEQILEDVRGAPAEDPVFTILAPEGDDRGDLISPDPCGTWSLRPWETTLPRGRPEPRGP

SEQ ID NO: 78955 - protein, 39 aa, Homo sapiens
RSNVRWDHESVCKYYLCGFCPAELFTNTRSDLEEKRILL

SEQ ID NO: 78956 - protein, 123 aa, Homo sapiens
  MOD_RES (1)..(1): Any amino acid
XQNTAEIQHCLVNAGDVGCGVFECFENNSCEIRGLHGICMTFLHNAGKFDAQGKSFIKDALKCKAHALRHRFGCISRKCPAIREMVSQLQRECYLKHDLCAAAQENTRVIVEMIHFKDLLLHE

SEQ ID NO: 78957 - protein, 95 aa, Homo sapiens
MCGNGRLEQRPEDRGAFSCGDCSRVVTSPVLKRHLQVFLDCRSRPQCRVKVKLLQRSISSLLRFAAGEDGRSRDQEPWQKSSFLHLVSFWLRATK

SEQ ID NO: 78958 - protein, 102 aa, Homo sapiens
  MOD_RES (1)..(1): Any amino acid
XPEENAGTELLLQGFERRFLAVRTLRSFPWQSLEAKLRDSSDSELLRDILQKTVRHPVCVKHPPSVKYAWCFLSELIKKRQDLCCPGCPRTPGLKQSSHVSL

SEQ ID NO: 78959 - protein, 1052 aa, Homo sapiens
ARASSSPVILVGTHLDVSDEKQRKACMSKITKELLNKRGFPAIRDYHFVNATEESDALAKLRKTIINESLNFKIRDQLVVGQLIPDCYVELEKIILSERKNVPIEFPVIDRKRLLQLVRENQLQLDENELPHAVHFLNESGVLLHFQDPALQLSDLYFVEPKWLCKIMAQILTVKVEGCPKHPKGIISRRDVEKFLSKKRKFPKNYMSQYFKLLEKFQIALPIGEEYLLVPSSLSDHRPVIELPHCENSEIIIRLYEMPYFPMGFWSRLINRLLEISPYMLSGRERALRPNRMYWRQGIYLNWSPEAYCLVGSEVLDNHPESFLKITVPSCRKGCILLGQVVDHIDSLMEEWFPGLLEIDICGEGETLLKKWALYSFNDGEEHQKILLDDLMKKAEEGDLLVNPDQPRLTIPISQIAPDLILADLPRNIMLNNDELEFEQAPEFLLGDGSFGSVYRAAYEGEEVAVKIFNKHTSLRLLRQELVVLCHLHHPSLISLLAAGIRPRMLVMELASKGSLDRLLQQDKASLTRTLQHRIALHVADGLRYLHSAMIIYRDLKPHNVLLFTLYPNAAIIAKIADYGIAQYCCRMGIKTSEGTPGFRAPEVARGNVIYNQQADVYSFGLLLYDILTTGGRIVEGLKFPNEFDELEIQGKLPDPVKEYGCAPWPMVEKLIKQCLKENPQERPTSAQVFDILNSAELVCLTRRILLPKNVIVECMVATHHNSRNASIWLGCGHTDRGQLSFLDLNTEGYTSEEVADSRILCLALVHLPVEKESWIVSGTQSGTLLVINTEDGKKRHTLEKMTDSVTCLYCNSFSKQSKQKNFLLVGTADGKLAIFEDKTVKLKGAAPLKILNIGNVSTPLMCLSESTNSTERNVMWGGCGTKIFSFSNDFTIQKLIETRTSQLFSYAAFSDSNIITVVVDTALYIAKQNSPVVEVWDKKTEKLCGLIDCVHFLREVMVKENKESKHKMSYSGRVKTLCLQKNTALWIGTGGGHILLLDLSTRRLIRVIYNFCNSVRVMMTAQLALKMSCWYWATTGKILKVHKSRKRYNLA

SEQ ID NO: 78960 - protein, 173 aa, Homo sapiens
MYKRNGLMASVLVTSATPQGSSSSDSLEGQSCDYASKSYDAVVFDVLKVTPEEFASQITLMDIPVFKAIQPEELASCGWSKKEKHSLAPNVVAFTRRFNQKLLELNNLHSLMSVVSALQSAPIFRLTKTWALLNRKDKTTFEKLDYLMSKEDNYKRTREYIRSLKMVPSIPYL

SEQ ID NO: 78961 - protein, 485 aa, Homo sapiens
MIASQFLSALTLVLLIKESGAWSYNTSTEAMTYDEASAYCQQRYTHLVAIQNKEEIEYLNSILSYSPSYYWIGIRKVNNVWVWVGTQKPLTEEAKNWAPGEPNNRQKDEDCVEIYIKREKDVGMWNDERCSKKKLALCYTAACTNTSCSGHGECVETINNYTCKCDPGFSGLKCEQMVECDAVTNPANGFVECFQNPGSFPWNTTCTFDCEEGFELMGAQSLQCTSSGNWDNEKPTCKAVTCRAVRQPQNGSVRCSHSPAGEFTFKSSCNFTCEEGFMLQGPAQVECTTQGQWTQQIPVCEAVRCDAVHQPPKGLVRCAHSPIGEFTYKSSCAFSCEEGFELHGSTQLECTSQGQWTEEVPSCQVVKCSSLAVPGKINMSCSGEPVFGTVCKFACPEGWTLNGSAARTCGATGHWSGLLPTCEAPTESNIPLVAGLSAAGLSLLTLAPFLLWLRKCLRKAKKFVPASSCQSLESDGSYQKPSYIL

SEQ ID NO: 78962 - protein, 697 aa, Homo sapiens
MAACEGRRSGALGSSQSDFLTPPVGGAPWAVATTVVMYPPPPPPPHRDFISVTLSFGENYDNSKSWRRRSCWRKWKQLSRLQRNMILFLLAFLLFCGLLFYINLADHWKALAFRLEEEQKMRPEIAGLKPANPPVLPAPQKADTDPENLPEISSQTQRHIQRGPPHLQIRPPSQDLKDGTQEEATKRQEAPVDPRPEGDPQRTVISWRGAVIEPEQGTELPSRRAEVPTKPPLPPARTQGTPVHLNYRQKGVIDVFLHAWKGYRKFAWGHDELKPVSRSFSEWFGLGLTLIDALDTMWILGLRKEFEEARKWVSKKLHFEKDVDVNLFESTIRILGGLLSAYHLSGDSLFLRKAEDFGNRLMPAFRTPSKIPYSDVNIGTGVAHPPRWTSDSTVAEVTSIQLEFRELSRLTGDKKFQAVEKVTQHIHGLSGKKDGLVPMFINTHSGLFTHLGVFTLGARADSYYEYLLKQWIQGGKQETQLLEDYVEAIEGVRTHLLRHSEPSKLTFVGELAHGRFSAKMDHLVCFLPGTLALGVYHGLPASHMELAQELMETCYQMNRQMETGLSPEIVHFNLYPQPGRRDVEVKPADRHNLLRPETVESLFYLYRVTGDRKYQDWGWEILQSFSRFTRVPSGGYSSINNVQDPQKPEPRDKMESFFLGETLKYLFLLFSDDPNLLSLDAYVFNTEAHPLPIWTPA

SEQ ID NO: 78963 - protein, 72 aa, Homo sapiens
MNMFKEAVTFKDVAVAFTEEELGLLGPAQRKLYRDVMVENFRNLLSVGHPPFKQDVSPIERNEQLWIMTTAT

SEQ ID NO: 78964 - protein, 309 aa, Homo sapiens
MCARGQVGRGTQLRTGRPCSQVPGSRWRPERLLRRQRAGGRPSRPHPARARPGLSLPATLLGSRAAAAVPLPLPPALAPGDPAMPVRTECPPPAGASAASAASLIPPPPINTQQPGVATSLLYSGSKFRGHQKSKGNSYDVEVVLQHVDTGNSYLCGYLKIKGLTEEYPTLTTFFEGEIISKKHPFLTRKWDADEDVDRKHWNIGRYLDLQTLLDWTETFWVREELRRPPLVLACEVWLSQGAEPMECFLLQQFVAAFVVLSISPNFHHSWRTPRFPRGTPGALYCTWVCLRFTMSNTLHLGCHFFIIN

SEQ ID NO: 78965 - protein, 21 aa, Homo sapiens
  MOD_RES (1)..(1): Any amino acid
XGYLMMRLLLWLMIPWKASMK

SEQ ID NO: 78966 - protein, 456 aa, Homo sapiens
MEDYEQELCGVEDDFHNQFAAELEVLAELEAGASTPSPSGVPLFTAGRPPRTFEEALARGDAASSPAPAASVGSSQGGARKRQVDADLQPAGSLPHAPRIKRPRLQVVKRLNFRSEEMEEPPPPDSSPTDITPPPSPEDLAELWGHGVSEAAADVGLTRASPAARNPVLRRPPILEDYVHVTSTEGVRAYLVLRADPMAPGVQGSLLHVPWRGGGQLDLLGVSLASLKKQVDGERRERLLQEAQKLSDTLHSLRSGEEEAAQPLGAPEEEPTDGQDASSHCLWVDEFAPRHYTELLSDDFTNRCLLKWLKLWDLVVFGHERPSRKPRPSVEPARVSKEATAPGKWKSHEQVLEEMLEAGLDPSQRPKQKVALLCGPPGLGKTTLAHVIARHAGYSVVEMNASDDRSPEVFRTRIEAATQMESVLGAGGKPNCLVIDEIDGAPVVGSLMPGPPSTSS

SEQ ID NO: 78967 - protein, 244 aa, Homo sapiens
MYGCDLGPDGRLLRGYNQFAYDGKDYIALNEDLRSWTAADKAAQITQRKWEAAREAEQRRAYLEGTCVEWLRRYLENGKKTLQRAEHPKTHVTHHPVSDHEATLRCWALGFYPAEITLTWQRDGEDQTQDTELVETRPAGDGTFQKWAAVVVPSGEEQRYTCHVQHEGLPEPLTLRWGPSSQPTIPIVGIVAGLAVLAVLAVLGAVMAVVMCRRKSSGGKGGSCSQAASSNSAQGSDESLIACK

SEQ ID NO: 78968 - protein, 99 aa, Homo sapiens
AIPKRLCLVCGDIASGYHYGVASCEACKAFFKRTIQGNIEYSCPATNECEITKRRRKSCQACRFMKCLKVGMLKEELCCLIWQPPATRGSRVLVQTEVC

SEQ ID NO: 78969 - protein, 477 aa, Homo sapiens [sequence omitted]

SEQ ID NO: 78970 - protein, 195 aa, Homo sapiens
MSLEQRSPHCKPDEDLEAQGEDLGLMGAQEPTGEEEETTSSSDSKEEEVSAAGSSSPPQSPQGGASSSISVYYTLWSQFDEGSSSQEEEEPSSSVDPAQLEFMFQEALKLKVAELVHFLLHKYRVKEPVTKAEMLESVIKNYKRYFPVIFGKASEFMQVIFGTDVKEVDPAGHSYILVTALGLSCDSMLGDGHSM

SEQ ID NO: 78971 - protein, 111 aa, Homo sapiens
MLKKQSAGLVLWGAILFVAWNALLLLFFWTRPAPGRPPSVSALDGDPASLTREVIRLAQDAEVELERQRGLLQQIGDALSSQRGRVPTAAPPAQPRVPVTPAPAVIPILVI

SEQ ID NO: 78972 - protein, 40 aa, Homo sapiens
  MOD_RES (1)..(1): Any amino acid
XVWSAGCVLAELLLGQPIFPGDSGVDQLVEIIKVSPRNSI

SEQ ID NO: 78973 - protein, 135 aa, Homo sapiens
MGAAHSASEEVRELEGKTGFSSDQIEQLHRRFKQLSGDQPTIRKENFNNVPDLELNPIRSKIVRAFFDNRNLRKGPSGLADEINFEDFLTIMSYFRPIDTTMDEEQVELSRKEKLRSCGFLGLEGGCAVDVKQGP

SEQ ID NO: 78974 - protein, 201 aa, Homo sapiens
MTSKGPEEEHPSVTLFRQYLRIRTVQPKPDYGAAVAFFEETARQLGLGCQKVEVAPGYVVTVLTWPGTNPTLSSILLNSHTDVVPVFKEHWSHDPFEAFKDSEGYIYARGAQDMKCVSIQYLEAVRRLKVEGHRFPRTIHMTFVPDEEVGGHQGMELFVQRPEFHALRAGFALDEGIANPTDAFTVFYSERSPWCCSQTPT

SEQ ID NO: 78975 - protein, 100 aa, Homo sapiens
  MOD_RES (1)..(1): Any amino acid
XQMAYEPQGGSGYDYSYAGGRGSYGDLGGPIITTQVTIPKDLAGSIIGKGGQRIKQIRHESGASIKIDEPLEGSEDRIITITGTQDQIQNAQYLLQNRSV

SEQ ID NO: 78976 - protein, 87 aa, Homo sapiens
MLGTDRCVVEEWLSEFKALPDTQITSYAATLHRKKTLVPALYKVIQDSNNELLEPVCHQLFELYRSSEVRLKRFTLQFLPELMWVYL

SEQ ID NO: 78977 - protein, 118 aa, Homo sapiens
  MOD_RES (1)..(1): Any amino acid
XQENRKKEQEKSKEKGKDEKEKKKGKEEKAKKGEVDAVLQVLPSKCIPMICAGHEEYLNTWKNRCESIHPSQNYDSETLREEKRKEVELEIRIQVTKTSAGDLRFEFHLGASPHVEGC

SEQ ID NO: 78978 - protein, 631 aa, Homo sapiens
MMEEEELEFVEELEAVLQLTPEVQLAIEQVFPSQDPLDRADFNAVEYINTLFPTEQVKEITRDIKQLDHAKRHLTTSITTLNHLHMLAGGVDSLEAMTRRRQYGEVANLLQGVMNVLEHFHKYMGIPQIRQLSERVKAAQTELGQQILADFEEAFPSQGTKRPGGPSNVLRDACLVANILDPRIKQEIIKKFIKQHLSEYLVLFQENQDVAWLDKIDRRYAWIKRQLVDYEEKYGRMFPREWCMAERIAVEFCHVTRAELAKIMRTRAKEIEVKLLLFAIQRTTNFEGFLAKRFSGCTLTDGTLKKLESPPPSTNPFLEDEPTPEMEELATEKGDLDQPKKPKAPDNPFHGIVSKCFEPHLYVYIESQDKNLGELIDRFVADFKAQGPPKPNTDEGGAVLPSCADLFVYYKKCMVQCSQLSTGEPMIALTTIFQKYLREYAWKILSGNLPKTTTSSGGLTISSLLKEKEGSEVAKFTLEELCLICNILSTAEYCLATTQQLEEKLKEKVDVSLIERINLTGEMDTFSTVISSSIQLLVQDLDAACDPALTAMSKMQWQNVEHVGDQSPYVTSVILHIKQNVPIIRDNLASTRKYFTQFCVKFANSFIPKFITHLFKCKPISMVGAEQVRWT

SEQ ID NO: 78979 - protein, 490 aa, Homo sapiens
  MOD_RES (1)..(1): Any amino acid
XYTRLTEYAKIEGPAEKETETMNQASPARKLEEILHLAELCIEVLQQNEEHHAEGREAFAWWPDLLAEHAEKFWALFTVDMDTALEAQPQDSWDSFPLFQLLNNFLRNDTLLCNGKFHKHLQEIFVPLVVRYVDLMESSIAQSIHRGFEQETWQPVKNIANSLPNVALPKVPSLPLNLPQIPNISTASWMPSLYESTNGSATSEDLFWKLDALQMFVFDLHWPEQEFAHHLEQRLKLMASDMLEACVKRTRTAFELKLQKASKTTDLRIPASVCTMFNVLVDAKKQSTKLCALDGGQEQQYHSKIDDLIDNSVKEIISLLVSKFVSVLEGVLSKLSRYDEGTFFSSILSFTVKAAAKYVDVPKPGMDLADTYIMFVRQNQDILREKVNEEMYIEKLFDQWYSSSMKVICVWLTDRLDLQLHIYQLKTLIKIVKKTYRDFRLQGVLEGTLNSKTYDTVHRRLTVEEATASVSEGGGLQGITMKDSDEEEEG

SEQ ID NO: 78980 - protein, 893 aa, Homo sapiens
MPAELRQEQSPGSQASLATMPEAPDVLEETVTVEEDPGTPTSHVSIVTSEDGTTRRTETKVTKTVKTVTTRTVRQVPVGPDGLPLLDGGPPLGPFADGALDRHFLLRGGGPVATLSRAYLSSGGGFPEGPEPRDSPSYGSLSRGLGMRPPRAGPLGPGPGDGCFTLPGHREAFPVGPEPGPPGGRSLPERFQAEPYGLEDDTRSLAADDEGGPELEPDYGTATRRRPECGRGLHTRAYEDTADDGGELADERPAFPMVTAPLAQPERGSMGSLDRLVRRSPSVDSARKEPRWRDPELPEVLAMLRHPVDPVKANAAAYLQHLCFENEGVKRRVRQLRGLPLLVALLDHPRAEVRRRACGALRNLSYGRDTDNKAAIRDCGGVPALVRLLRAARDNEVRELVTGTLWNLSSYEPLKMVIIDHGLQTLTHEVIVPHSGWEREPNEDSKPRDAEWTTVFKNTSGCLRNVSSDGAEARRRLRECEGLVDALLHALQSAVGRKDTDNKSVENCVCIMRNLSYHVHKEVPGADRYQEAEPGPLGSAVGSQRRRRDDASCFGGKKAKGKKDGEMDRNFDTLDLPKRTEAAKGFELLYQPEVVRLYLSLLTESRNFNTLEAAAGALQNLSAGNWMWATYIRATVRKERGLPVLVELLQSETDKVVRAVAIALRNLSLDRRNKDLIGSYAMAELVRNVRNAQAPPRPGACLEEDTVVAVLNTIHEIVSDSLDNARSLLQARGVPALVALVASSQSVREAKAASHVLQTVWSYKELRGTLQKDGWTKARFQSAAATAKGPKGALSPGGFDDSTLPLVDKSLEGEKTGSRDVIPMDALGPDGYSTVDRRERRPRGASSAGEASEKEPLKLDPSRKAPPPGPSRPAVRLVDAVGDAKPQPVDSWV

SEQ ID NO: 78981 - protein, 142 aa, Homo sapiens
MAGLTDLQRLQARVEELERWVYGPGGARGSRKVADGLVKVQVALGNISSKRERVKILYKKIEDLIKYLDPEYIDRIAIPDASKLQFILAEEQFILSQVALLEQVNALVPMLDSAHIKAVPEHAARLQRLAQIHIQQQVWEGR

SEQ ID NO: 78982 - protein, 186 aa, Homo sapiens
  MOD_RES (1)..(1): Any amino acid
XDNSRGQLGRRGAQRGELPVVVGGCFVLFPKEPIQALETLIVDLVSCGKEHSLAVCHKGRVFAWGAGSEGQLGIGEFKEISFTPKKIMTLNDIKIIQVSCGHYHSLALSKDSQVFSWGKNSHGQLGLGKEFPSQASPQRVRSLEGIPLAQVAAGGAHSFALSLCGTSFGWGSNSAGQLALSGRNVP

SEQ ID NO: 78983 - protein, 138 aa, Homo sapiens
  MOD_RES (1)..(1): Any amino acid
XILEEIETAIKEYSEELVQQLALRDELEFEKEVKNSFISVLIEVQNKQKEHKETAKKKKKLKNGSSQNGKNERSHMPGTYLTTVIPYEKKNGPPSVEDLQILTKILRAMKEDSEKVPSLLTDYILKEPIATICEQMKP

SEQ ID NO: 78984 - protein, 111 aa, Homo sapiens
MDPAGGPRGVLPRPCRVLVLLNPRGGKGKALQLFRSHVQPLLAEAEISFTLMLTERRNHARELVRSEELGRWDALVVMSGDGLMHEVVNGLMERPDWETAIQKPLCSLPAG

SEQ ID NO: 78985 - protein, 79 aa, Homo sapiens
  MOD_RES (1)..(1): Any amino acid
XKAAKRELMPCDFPGCGRIFSNRQYLNHHKKYQHIHQKSFSCPEPACGKSFNFKKHLKEHMKLHSGKGGPDGLHDLDNN

SEQ ID NO: 78986 - protein, 126 aa, Homo sapiens
MMGSPVSHLLAGFCVWVVLGWVGGSVPNLGPAEQEQNHYLAQLFGLYGENGTLTAGGLARLLHSLGLGRVQGLRLGQHGPLTGRAASPAADNSTHRPQNPELSVDVWAGMPLGPSGWGDLEESKAP

SEQ ID NO: 78987 - protein, 302 aa, Homo sapiens
MATVYSPSLPGLLGGRASEQESVSGHLGPPAGAPAAPETPTCLPDTTPHPAPVVCSADPQLALESLDPRTLRLLWRQRELEIQALRWAIQNGEDARLCHILEEVAGLPPKRSSHSQEKLLQNQVQKLIQELKEQKERAQWEKEHLEERLLQTTRTLQEMEAELQNLQKSCLLQLARSSWVGRMLRSQTGSVEVVTAETLMDPSDLSENIQAPTGEGFRLEDVDWNSVARRYPNLFTNMEPSSKQKQPRPWPQLDTGSPESSGKHSERHHKTVEWGSLPCLNTSSSGGADSDSSSCRPGLPSF

SEQ ID NO: 78988 - protein, 257 aa, Homo sapiens
MKVTTKINHHDKINGKRKTAKKQKLSVKECEHAEKERQVSEAEENGKLDMKEIHTYMKMFQRAQELRRRAEDYHKCKIPPSARKALCNWVRMAAAEHRHSSGLPYWPYLTAETLKNRMGHQPPPPTQQHSITDNSLSLKTPPECLLTPLPPSADDNLKTPPECLLTPLPPSAPPSADDNLKTPPLATQEAEAEKPPKPKRWRAAEMESPPEPKRRRAAEVESPPEPKRRRAAEVEPSSPEPKRRRLSKLRTGHCTQA

SEQ ID NO: 78989 - protein, 44 aa, Homo sapiens
LYMYQLFRSLAYIHSFGICHRDIKPQNLLLDPDTAVLKLCDFGR

SEQ ID NO: 78990 - protein, 117 aa, Homo sapiens
MSGGGEQLDILSVGILVKERWKVGKCCTEGGISSTTKTSSENGSCCFEKAARVGIWQIFAVASPEAHSPLVPLSGWVDRFWSLLKAFILWDSCIETSNRRTSLWVAFLVHVGNVTCL

SEQ ID NO: 78991 - protein, 205 aa, Homo sapiens
MARHGCLGLGLFCCVLFAATVGPQPTPSIPGAPATTLTPVPQSEASMLSLNLGLNFKFHLRGPAAVWGSPVTETQPLSLGPGQEPGEEVASGLRTDPLWELLVGSSGNSLTEWGSTEGGSKPRASSLLPESTSRRSGPSDGPTAPYQPRRSTVTWDTALMVTALPSSAPRPHQSELELKFDMALRAGAAPTLGHRTLPLLPSLRA

SEQ ID NO: 78992 - protein, 146 aa, Homo sapiens
MPFTNPLTRSYHTWARPQSQWCPTGSRSYSSVPEASPAHTSRGGLVISPESLSPPVRELYHRLKHFMEQRVYPAEPELQSHQASAARWSPSPLIEDLKEKAKAEGLWNLFLPLEADPEKKYGAGLTNVEYAHLCELMGTSLYAPEV

SEQ ID NO: 78993 - protein, 589 aa, Homo sapiens
MFYFRGCGRWVAVSFTKQQFPLARLSSDSAAPRTPHFDVIVIGGGHAGTEAATAAARCGSRTLLLTHRVDTIGQMSCNPSFGGIGKGHLMREVDALDGLCSRICDQSGVHYKVLNRRKGPAVWGLRAQIDRKLYKQNMQKEILNTPLLTVQEGAVEDLILTEPEPEHTGKCRVSGVVLVDGSTVYAESVILTTGTFLRGMIVIGLETHPAGRLGDQPSIGLAQTLEKLGFVVGRLKTGTPPRIAKESINFSILNKHIPDNPSIPFSFTNETVWIKPEDQLPCYLTHTNPRVDEIVLKNLHLNSHVKETTRGPRYCPSIESKVLRFPNRLHQVWLEPEGMDSDLIYPQGLSMTLPAELQEKMITCIRGLEKAKVIQPGYGVQYDYLDPRQITPSLETHLVQRLFFAGQINGTTGYEEAAAQGVIAGINASLRVSRKPPFVVSRTEGYIGVLIDDLTTLGTSEPYRMFTSRVEFRLSLRPDNADSRLTLRGYKDAGCVSQQRYERACWMKSSLEEGISVLKSIEFLSSKWKKLIPEASISTSRSLPVRALDVLKYEEVDMDSLAKAVPEPLKKYTKCRELAERLKIEDRGC

SEQ ID NO: 78994 - protein, 55 aa, Homo sapiens
MHVKEAGLFGLVNNAGVAGIIGPTPWLTRDDFQRVLNVNTMGPIGVTLALLPLLQ

SEQ ID NO: 78995 - protein, 130 aa, Homo sapiens
MSTAALITLVRSGGNQVRRRVLLSSRLLQDDRRVTPTCHSSTSEPRCSRFDPDGSGSPATWDNFGIWDNRIDEPILLPPSIKYGKPIPKISLENVGCASQIGKRKENEDRFDFAQLTDEVLYFAVYDGHG

SEQ ID NO: 78996 - protein, 124 aa, Homo sapiens
MAPPSTREPRVLSATSATKSDGEMVLPGFPDADSFVKFALGSVVAVTKASGGLPQFGDEYDFYRSFPGFQAFCETQGDRLLQCMSRVMQYHGCRSNIKDRSKVTELEDKFDLLVDANDVILERV

SEQ ID NO: 78997 - protein, 251 aa, Homo sapiens
MCPTSSLRGIDVVRNKIKMFAQQKVTLPKGRHKIIILDEADSMTDGAQQALRRTMEIYSKTTRFALACNASDKIIEPIQSRCAVLRYTKLTDAQILTRLMNVIEKERVPYTDDGLEAIIFTAQGDMRQALNNLQSTFSGFGFINSENVFKVCDEPHPLLVKEMIQHCVNANIDEAYKILAHLWHLGYSPEDIIGNIFRVCKTFQMAEYLKLEFIKEIGYTHMKIAEGVNSLLQMAGLLARLCQKTMAPVAS

SEQ ID NO: 78998 - protein, 113 aa, Homo sapiens
MSSGTQMLTISRMRSDGFDEESQRYYWRPKNEISGTLEDDFLKAKSWNKKFYDYEANMPDRWGHSGYKELYPEEFETDSSDQQDITNGKKTSPQVKSSTHESRKHKKSKKSHK

SEQ ID NO: 78999 - protein, 416 aa, Homo sapiens
MPVPWFLLSLALGRSPVVLSLERLVGPQDATHCSPGLSCRLWDSDILCLPGDIVPAPGPVLAPTHLQTELVLRCQKETDCDLCLRVAVHLAVHASLQAQVVLSFQAYPTARCVLLEVQVPAALVQFGQSVGSVVYDCFEAALGSEVRIWSYTQPRYEKELNHTQQLPDCRGLEVWNSIPSCWALPWLNVSADGDNVHLVLNVSEEQHFGLSLYWNQVQGPPKPRWHKNLTGPQIITLNHTDLVPCLCIQVWPLEPDSVRTNICPFREDPRAHQNLWQAARLQLLTLQSWLLDAPCSLPAEAALCWRAPGGDPCQPLVPPLSWENVTVDKVLEFPLLKGHPNLCVQVNSSEKLQLQECLWADSLGPLKDDVLLLETRGPQDNRSLCALEPSGCTSLPSKASTRAARLGEYLLQDLQS

SEQ ID NO: 79000 - protein, 290 aa, Homo sapiens
MDLVLKRCLLHLAVIGALLAVGATKGGQVSLKVSNDGPTLIGANASFSIALNFPGSQKVLPDGQVIWVNNTIINGSQVWGGQPVYPQETDDACIFPDGGPCPSGSWSQKRSFVYVWKTWEGIESAEILQAVPSGEGDAFELTVSCQGGLPKEACMEISSPGCQPPAQRLCQPVLPSPACQLVLHQILKGGSGTYCLNVSLADTNSLAVVSTQLIMPGQEAGLGQVPLIVGILLVLMAVVLASLIYRRRLMKQDFSVPQLPHSSSHWLRLPRIFCSCPIGENSPLLSGQQV

SEQ ID NO: 79001 - protein, 96 aa, Homo sapiens
MNWTGLYTLLSGVNRHSTAIGRVWLSVIFIFRIMVLVVAAESVWGDEKSSFICNTLQPGCNSVCYDQFFPISHVRLWSLQLILVSTPALLVAMHVA

SEQ ID NO: 79002 - protein, 574 aa, Homo sapiens
MCPHFAQDLWPEQGMEDSFQKAILRRYGKYGHENLQLRKGCKSVDEYKVNKEGYNGLNQCFTTAQSKVFQCDKYLKVFYKFLNSNRPKIRHTEKKSFKCKKRVKLFCMLSHKTQHKSIYHREKSYKCKECGKTFNWSSTLTNHRKIYTEEKPYKCEEYNKSPKQLSTLTTHEIIHAGEKLYKCEECGEAFNRSSNLTTHKIIHTGEKPYKCEECGKAFIWSSTLTEHKKIHTRKKPYKCEECGKAFIWSSTLTRHKRMHTGEKPYKCEECGKAFSQSSTLTTHKIIHTGEKRYKCLECGKAFKQLSTLTTHKIIHVGEKLYKCEECGKGFNRSSNLTTHKIIHTGEKPYKCEECGKAFIWSSTLTKHKRIHTREKPYKCEECGKAFIWSSTLTRHKRMHTGEKPYKCEECGKSFSQSSTLTTHKIIHTGEKPYKCEECGKAFNWSSTLTKHKIIHTEEKPYKCEKCGKAFKQSSILTNHKRIHTGEKPYKCEECGKSFNRSSTFTKHKVIHTGVKPYKCEECGKAFFWSSTLTKHKRIHTGEQPYKWEKFGKAFNRSSHLTTDKITHWREILQV

SEQ ID NO: 79003 - protein, 126 aa, Homo sapiens
MQAHELFRYFRMPELVDFRQYVRTLPTNTLMGFGAFAALTTFWYATRPKPLKPPCDLSMQSVEVAGSGGARRSALLDSDEPLVYFYDDVTTLYEGFQRGIQVSRSLRPLCVHCNFPRVGPKAHWTL

SEQ ID NO: 79004 - protein, 148 aa, Homo sapiens
  MOD_RES (1)..(1): Any amino acid
XVVDNFLMRKGKTKAKLEERGANQDSRNGSKVRYRRAASHEESESEILISADDEMEESDVEEDLRRLTPLKPVKKKKHRFGLPLLPAREAPSETQRLHNTHHVPGWCSGSPYQEEAPPCEGRGPEGGPRKPDQEPGNQVQDLPGHARV

SEQ ID NO: 79005 - protein, 99 aa, Homo sapiens
MGTTEATLRMENVDVKEEWQDEDLPRPLPEETGVELLGSPVEDTSSPPNTLNFNGAHRKRKTLVAPEINISLDQSEGSLLSDDFLDTPDDLDINVDDIE

SEQ ID NO: 79006 - protein, 20 aa, Homo sapiens
MDGFYDQQVPYMVTNSQRGR

SEQ ID NO: 79007 - protein, 109 aa, Homo sapiens
  MOD_RES (1)..(1): Any amino acid
XPGAGALPAPGPQIRRSGAEPRGQAVRVPRRQTAGGAVWGRRHRLLLGQAGRDTVWEDAREPLAPVALPGGRQPRELWPALQTFLRGSVCCHLLHRRLSRPCCHFAAEV

SEQ ID NO: 79008 - protein, 90 aa, Homo sapiens
SQPGSMGLDKNTVHDQEHIMEHLEGVINKPEAEMSPQELQLHYFKMHDYDGNNLLDGLELSTAITHVHKEANLCTELTLRRTGTFPIKEE

SEQ ID NO: 79009 - protein, 69 aa, Homo sapiens
AKCPQGRFSINLYGTGLSLTESARWISQGNYAVSDIKKSPDGTRVVGKCGGYCGKCTPSSGTGLEVRVL

SEQ ID NO: 79010 - protein, 122 aa, Homo sapiens
MQMIIIWALLDTEAESSAKGVHSFYNNISGLTDFGEKVVAEMNRLGMMVDLSHVSDAVARRALEVSQAPVIFSHSAARGVCNSARNVPDDILQLLKKNGGVVMVSLSMGVIQCNPSANVSTV

SEQ ID NO: 79011 - protein, 257 aa, Homo sapiens
MSTTGQVIRCKAAILWKPGAPFSIEEVEVAPPKAKEVRIKVVATGLCGTEMKVLGSKHLDLLYPTILGHEGAGIVESIGEGVSTVKPVIKEISVAKIDAVAPLEKVCLISCGFSTGFGAAINTAKVTPGSTCAVFGLGGVGLSVVMGCKAAGAARIIGVDVNKEKFKKAQELGATECLNPQDLKKPIQEVLFDMTDAGIDFCFEAIGNLDVLAAALASCNESYGVCVVVGVLPASVQLKISGQLFFSGRSLKGSVFG

SEQ ID NO: 79012 - protein, 117 aa, Homo sapiens
MAGVGDAAAPGEGGGGGVDGPQRDGRGEAEQPGGSGGQGPPPAPQLTETLGFYESDRRRERRRGRTADGFWNLSVPGCVFVCVHPASFKSFPGTIQAPHFALLWLKGQTFASACPGV

SEQ ID NO: 79013 - protein, 126 aa, Homo sapiens
  MOD_RES (1)..(1): Any amino acid
XGLDRMSSSFDRMGPGIGAILERSIDMDRGFLSGPMGSGMRERIGSKGNQIFVRNLPFDLTWQKLKEKFSQCGHVMFAEIKMENGKSKGCGTVRFDSPESAEKACRIMNGIKISGREIDVRLDRNA

SEQ ID NO: 79014 - protein, 97 aa, Homo sapiens
MPPQPPGSQSESSSHPALSQSPMPQERGFMAGTQRNPQMAQYGPQQTGPSMSPHPSPGGQMHAGISSFQQSNSSGTYGPQMSQYGPQEEETELWSNT

SEQ ID NO: 79015 - protein, 30 aa, Homo sapiens
  MOD_RES (1)..(1): Any amino acid
XKIKHSIKKTVEEQDCLSQQDLSPQLKHSD

SEQ ID NO: 79016 - protein, 164 aa, Homo sapiens
MSGEENPASKPTPVQDVQGDGRWMSLHHRFVADSKDKEPEVVFIGDSLVQLMHQCEIWRELFSPLHALNFGIGGDGTQHVLWRLENGELEHIRPKIVVVWVGTNNHGHTAEQVTGGIKAIVQLVNERQPQARVVVLGLLPRGQHPNPLREKNRQVNELVRAALA

SEQ ID NO: 79017 - protein, 119 aa, Homo sapiens
  MOD_RES (1)..(1): Any amino acid
XSRFTVEQEIDLKDVLKALGITEIFIKDANLTGLSDNKEIFLSKAIHKSFLEVNEEGSEAAAVSGMIAISRMAVLYPQVIVDHPFFFLIRNRRTGTILFMGRVMHPETMNTSGHDFEEL

SEQ ID NO: 79018 - protein, 121 aa, Homo sapiens
MKMLWKLTDNIKYEDCEDRHDGTSNGTARLPQLGTPEPPARPAAAAAPRLARPEAEPGVWAPAHAPGAASPAVGPGSSQGLQAARGPPARPTRAQLRTRRPLDPLLTSRHRGGPACRRPGY

SEQ ID NO: 79019 - protein, 390 aa, Homo sapiens
  MOD_RES (1)..(1): Any amino acid
XQMKEHENDPEMLVDLQYSLAKSYASTPELRKTWLDSMARIHVKNGDLSEAAMCYVHVTALVAEYLTRKEAVQWEPPLLPHSHSACLRRSRGGVFRQGCTAFRVITPNIDEEASMMEDVGMQDVHFNEDVLMELLEQCADGLWKAERYELIADIYKLIIPIYEKRRDFERLAHLYDTLHRAYSKVTEVMHSGRRLLGTYFRVAFFGQGFFEDEDGKEYIYKEPKLTPLSEISQRLLKLYSDKFGSENVKMIQDSGKVNPKDLDSKYAYIQVTHVIPFFDEKELQERKTEFERSHNIRRFMFEMPFTQTGKRQGGVEEQCKRRTILTAIHCFPYVKKRIPVMYQHHTDLNPIEVAIDEMSKKVAELRQLCSSAEVDMIKLQLKLQGSVSVQ

SEQ ID NO: 79020 - protein, 92 aa, Homo sapiens
MSYQGKKNIPRITSDRLLIKGGRIVNDDQSFYADIYMEDGLIKQIGDNLIVPGGVKTIEANGKMVIPGGIDVHTHFQMPYKGMTTVDDFFQG

SEQ ID NO: 79021 - protein, 163 aa, Homo sapiens
MWTLVSWVALTAGLVAGTRCPDGQFCPVACCLDPGGASYSCCRPLLDKWPTTLSRHLGGPCQVDAHCSAGHSCIFTVSGTSSCCPFPEAVACGDGHHCCPRGFHCSADGRSCFQRSGNNSVGAIQCPDSQFECPDFSTCCVMVDGSWGCCPMPQASCCEDRVH

SEQ ID NO: 79022 - protein, 289 aa, Homo sapiens
MPVDNRNHNEGMVTRCIIEVLSNALSKSSAPPITPECRQVLKTSRKDVKDKETTENENTKFEVRLLRDPADASEAHESSSRGEAGAPGEEDIQGPTKADTEKWAEGGGHSRERADEPQWSLYPSDSQVSEEVKTRHSEKSQREDEEEEEGENYQKGERGEDSSEEKHLEEPGETQNAFLNERKQASAIKKEELVARSETHAAGHSQEKTHSREKSSQESGEETGSQENHPQESKGQPRSQEESEEGEEDATSEVDKRRTRPRHHHGRSRPDRSSQGGSLPSEEKGHPQE

SEQ ID NO: 79023 - protein, 435 aa, Homo sapiens
MAICQFFLQGRCRFGDRCWNEHPGARGAGGGRQQPQQQPSGNNRRGWNTTSQRYSNVIQPSSFSKSTPWGGSRDQEKPYFSSFDSGASTNRKEGFGLSENPFASLSPDEQKDEKKLLEGIVKDMEVWESSGQWMFSVYSPVKKKPNISGFTDISPEELRLEYHNFLTSNNLQSYLNSVQRLINQWRNRVNELKSLNISTKVALKCLWKIYTHLSPKIYGPDCGKFIIFLSDVKDGVNQAAPAFGFGSSQAATFMSPGFPVNNSSSDNAQNFSFKTNSGFAAASSGSPAGFGSSPAFGAAASTSSGISTSAPAFGFGKPEVTSAASFSFKSPAASSFGSPGFSGLPASLATGPVRAPVAPAFGGGSSVAGFGSPGSHSHTAFSKPSSDTFGNSSISTSLSASSSIIATDNVLFTPRDKLTVEELEQFQSKKFTLGK

SEQ ID NO: 79024 - protein, 123 aa, Homo sapiens
  MOD_RES (1)..(1): Any amino acid
XLLLAINGVTECFTFAAMSKEEVDRYNFVMLALSSSFLVLSYLLTRWCGSVGFILANCFNMGIRITQSLCFIHRYYRRSPHRPLAGLHLSPVLLGTFALSGGVTAVSERPRKPWRSSGPWCPC

SEQ ID NO: 79025 - protein, 122 aa, Homo sapiens
MAQSKLDCRSPVGLDCCNCCLDLAHRSGLQRGSSGENNNPGSPTVSNFRQLQEKLVFENLNTDKLNSIMRQDSLEPVLRDPCYLINEGICNRNIDQTMLSILLFFHSASGASVVAIDNKIEQ

SEQ ID NO: 79026 - protein, 46 aa, Homo sapiens
MTNSKGRSITDKTSGGPSSGGGFVDWTLRLNTIQSDKFLNLLLSMV

SEQ ID NO: 79027 - protein, 471 aa, Homo sapiens
MGRKKIQITRIMDERNRQVTFTKRKFGLMKKAYELSVLCDCEIALIIFNSTNKLFQYASTDMDKVLLKYTEYNEPHESRTNSDIVEALNKKENKGCESPDPDSSYALTPRTEEKYKKINEEFDNMIKSHKIPAVPPPNFEMPVSIPVSSHNSLVYSNPVSSLGNPNLLPLAHPSLQRNSMSPGVTHRPPSAGNTGGLMGGDLTSGAGTSAGNGYGNPRNSPGLLVSPGNLNKNMQAKSPPPMNLGMNNRKPDLRVLIPPGSKNTMPSVSEDVDLLLNQRINNSQSAQSLATPVVSVATPTLPGQGMGGYPSAISTTYGTEYSLSSADLSSLSGFNTASALHLGSVTGWQQQHLHNMPPSALSQLGACTSTHLSQSSNLSLPSTQSLNIKSEPVSPPRDRTTTPSRYPQHTRHEAGRSPVDSLSSCSSSYDGSDREDHRNEFHSPIGLTRPSPDERESPSVKRMRLSEGWAT

SEQ ID NO: 79028 - protein, 515 aa, Homo sapiens
MGLEALVPLAMIVAIFLLLVDLMHRHQRWAARYPPGPLPLPGLGNLLHVDFQNTPYCFDQLRRRFGDVFSLQLAWTPVVVLNGLAAVREAMVTRGEDTADRPPAPIYQVLGFGPRSQGVILSRYGPAWREQRRFSVSTLRNLGLGKKSLEQWVTEEAACLCAAFADQAGRPFRPNGLLDKAVSNVIASLTCGRRFEYDDPRFLRLLDLAQEGLKEESGFLREVLNAVPVLPHIPALAGKVLRFQKAFLTQLDELLTEHRMTWDPAQPPRDLTEAFLAKKEKAKGSPESSFNDENLRIVVGNLFLAGMVTTSTTLAWGLLLMILHLDVQRGRRVSPGCPIVGTHVCPVRVQQEIDDVIGQVRRPEMGDQAHMPYTTAVIHEVQRFGDIVPLGVTHMTSRDIEVQGFRIPKGTTLITNLSSVLKDEAVWKKPFRFHPEHFLDAQGHFVKPEAFLPFSAGRRACLGEPLARMELFLFFTSLLQHFSFSVAAGQPRPSHSRVVSFLVTPSPYELCAVPR

SEQ ID NO: 79029 - protein, 93 aa, Homo sapiens
MEENLISMREDHSFHVRYRMEASCLELALEGERLCKSGDCRAGVSFFEAAVQVGTEDLKTLSAIYSQLGNAYFYLHDYAKALEYHHHDLTLAR

SEQ ID NO: 79030 - protein, 138 aa, Homo sapiens
MSPKPRASGPPAKATEAGKRKSSSQPSPSDPKKKTTKVAKKGKAVRRGRRGKKGAATKMAAVTAPEAESGPAAPGPSDQPSQELPQHELPPEEPVSEGTQHDPLSQESELEEPLSQESEVEEPLSVTASYSPISESSD

SEQ ID NO: 79031 - protein, 267 aa, Homo sapiens
MKRLVCVLLVCSSAVAQLHKDPTLDHHWHLWKKTYGKQYKEKNEEAVRRLIWEKNLKFVMLHNLEHSMGMHSYDLGMNHLGDMTSEEVMSLMSSLRVPSQWQRNITYKSNPNRILPDSVDWREKGCVTEVKYQGSCGACWAFSAVGALEAQLKLKTGKLVSLSAQNLVDCSTEKYGNKGCNGGFMTTAFQYIIDNKGIDSDASYPYKAMDQKCQYDSKYRAATCSKYTELPYGREDVLKEAVANKGPVSVGVDARHPSFFLYRSGKK

SEQ ID NO: 79032 - protein, 59 aa, Homo sapiens
MTPEFDEEVVFENSPLYQYLQDLGHTDFEICSSLSPKTEKCTTEGQQKPPTRVLPKVSC

SEQ ID NO: 79033 - protein, 94 aa, Homo sapiens
MSGRLWSKAIFAGYKRGLRNQREHTALLKIEGVYARDETEFYLGKRCAYVYKAKNNTVTPGGKPNKTRVIWGKVTRAHGNSGMVRAKFRSNLPA

SEQ ID NO: 79034 - protein, 67 aa, Homo sapiens
MVMIFTLVTAVQEKLNEIVDQIKTRREEEKKQKEKEAEEAEKQLFHGTPVTIENFLNWKAKFDAELL

SEQ ID NO: 79035 - protein, 779 aa, Homo sapiens
MLKFKAFCLDYWQFLCLQPLHGAYKSVEGEAPSSETGTSLDSPSAYPQGPLVPGSSLSPDHYEHTSVGAYGLYSGPPGQQQRTRRPKLQHSTSILRKQAEEEAIKRSRSLSESYELSSDLQDKQVEMLERKYGGRLVTRHAARTIQTAFRQYQMNKNFERLRSSMSENRMSRRIVLSNMRMQFSFEGPEKVHSSYFEGKQVSVTNDGSQLGALVSPECGDLSEPTTLKSPAPSSDFADAITELEDAFSRQVKSLAESIDDALNCRSLHTEEAPALDAARARDTEPQTALHGMDHRKLDEMTASYSDVTLYIDEEELSPPLPLSQAGDRPSSTESDLRLRAGGAAPDYWALAHKEDKADTDTSCRSTPSLERQEQRLRVEHLPLLTIEPPSDSSVDLSDRSERGSLKRQSAYERSLGGQQGSPKHGPHSGAPKSLPREEPELRPRPPRPLDSHLAINGSANRQSKSESDYSDGDNDSINSTSNSNDTINCSSESSSRDSLREQTLSKQTYHKEARNSWDSPAFSNDVIRKRHYRIGLNLFNKKPEKGVQYLIERGFVPDTPVGVAHFLLQRKGLSRQMIGEFLGNRQKQFNRDVLDCVVDEMDFSTMELDEALRKFQAHIRVQGEAQKVERLIEAFSQRYCICNPGVVRQFRNPDTIFILAFAIILLNTDMYSPNVKPERKMKLEDFIKNLRGVDDGEDIPREMLMGIYERIRKRELKTNEDHVSQVQKVEKLIVGKKPIGSLHPGLGCVLSLPHRRLVCYCRLFEVPDPNKPQKLGLHQ

SEQ ID NO: 79036 - protein, 90 aa, Homo sapiens
  MOD_RES (1)..(1): Any amino acid
XVKPNYLKGLSHVLNRLPKPVLLPELPTAVRIAALQCMHALTRLPTPVLLPYKPQVIRALAKPLDDKKRLVRKEAVSARGEWFLLGSPGS

SEQ ID NO: 79037 - protein, 49 aa, Homo sapiens
MAEGDEAARGQQPHQGLWRRRRTSDPSAAVNHVSSTTSLGFSKLDWWKQ

SEQ ID NO: 79038 - protein, 67 aa, Homo sapiens
MPDVKESVPPKYPGDSEGRSCKPETSGPPQEDKSGSEDPPPSSTMINSWPIFVHLHLLHILEPNNFL

SEQ ID NO: 79039 - protein, 69 aa, Homo sapiens
MEGPLTPPPLQGGGAAAVPEPGARQHPGHETAAQRYSARLLQAGYEPERTIFSGLTGRCWCPDGSPSQG

SEQ ID NO: 79040 - protein, 125 aa, Homo sapiens
MSQGLSWHDDLTQYVISQEMERIPRLRPPEPRPRDRSGLAPKRPGPAGELLLQDIPTGSAPAAQHRLPQPPVGKGGAGASSSLSPLQAELLPPLLEHLLLPPQPPHPSLSYEPALLQPYLFHQFG

SEQ ID NO: 79041 - protein, 50 aa, Homo sapiens
  MOD_RES (1)..(1): Any amino acid
XDLQGELDRFGGISVRLARLDALDRLDAAAFQKGLQVEKYVEVSRRPVRA

SEQ ID NO: 79042 - protein, 366 aa, Homo sapiens
MSSSVEQKKGPTRQRKCGFCKSNRDKECGQLLISENQKVAAHHKCMLFSSALVSSHSDNESLGGFSIEDVQKEIKRGTKLMCSLCHCPGATIGCDVKTCHRTYHYHCALHDKAQIREKPSQGIYMVYCRKHKKTAHNSEAADLEESFNEHELEPSSPKSKKKSRKGRPRKTNFKGLSEDTRSTSSHGTDEMESSSYRDRSPHRSSPSDTRPKCGFCHVGEEENEARGKLHIFNAKKAAAHYKCMLFSSGTVQLTTTSRAEFGDFDIKTVLQEIKRGKRMKCTLCSQPGATIGCEIKACVKTYHYHCGVQDKAKYIENMSRGIYKLYCKNHSGNDERDEEDEERESKSRGKVEIDQQQLTQQQLNGN

SEQ ID NO: 79043 - protein, 87 aa, Homo sapiens
MDGKCKEIAEELFTRSLAESELRSAPYEFPEESPIEQLEERRQRLERQISQDVKLEPDILLRAKQDFLKTDSDSDLQLYKEQGEGQG

SEQ ID NO: 79044 - protein, 114 aa, Homo sapiens
MGQDTDMLNTYQQLVRTPSVRPGQDVRLQAPGTRTGLLKLLSTVSQDKQEPAAGLGAAAAGGAAAGRAAAGPDTACTAAGGPLPGSLRTQREPGPWGGPAQAGGAEAPGATALC

SEQ ID NO: 79045 - protein, 175 aa, Homo sapiens
MEEMSGESVVSSAVPAAATRTTSFKGTSPSSKYVKLNVGGALYYTTMQTLTKQDTMLKAMFSGRMEVLTDSEGWILIDRCGKHFGTILNYLRDGAVPLPESRREIEELLAEAKYYLVQGLVEECQAALQVPVITSSKEEQKLIATSNKPAVKLLYNRSNNKYSYTSNSDDNMLKN

SEQ ID NO: 79046 - protein, 184 aa, Homo sapiens
ATGVVDGNVARVLCRVRAIGADPSSTLVSQQLWGLAQQLVDPARPGDFNQAAMELGATVCTPQRPLCSQCPVESLCRARQRVEQEQLLASGSLSGSPDVEECGFGDLRSQLPTLDSATCACLPRSPGTRPWEWSTSPERPAASPPGRRALPPVFWNSLGPLGPKFCWCRGPTQVCWQDCGSSRP

SEQ ID NO: 79047 - protein, 221 aa, Homo sapiens
MRGHPSLRPPWHWASAARLEGGFLPWGYVSNALSREGLTEERTFERRPEGWEGASCAASELDDDVPKANCLSTESTDTPKAPVITLPSEAREQMATLGERTFNCCYPGCHFKTVHGMKDLDRHLRIHTGDKPHKCEFCDKCFSRKDNLTMHMRCHTSVKPHKCHLCDYAAVDSSSLKKHLRIHSDERPYKCQLCPYASRNSSQLTVHLRSHTGDTPFQCWL

SEQ ID NO: 79048 - protein, 179 aa, Homo sapiens
  MOD_RES (1)..(1): Any amino acid
XIFLVTMVLLGCELWSAVIMCATIAMVLVNMFGVMWLWGISLNAVSLVNLVMSCGISVEFCSHITRAFTVSMKGSRVERAEEALAHMGSSVFSGITLTKFGGIVVLAFAKSQIFQIFYFRMYLAMVLLGATHGLIFLPVLLSYIAKLLERTIYLCISQHIHYATQMAPLQCLMTASDRC

SEQ ID NO: 79049 - protein, 225 aa, Homo sapiens
MDTLEEVTWANGSTALPPPLAPNISVPHRCLLLLYEDIGTSRVRYWDLLLLIPNVLFLIFLLWKLPSARAKIRITSSPIFITFYILVFVVALVGIARAVVSMTVSTSNAATVADKILWEITRFFLLAIELSVIILGLAFGHLESKSSIKRVLAITTVLSLAYSVTQGTLEILYPDAHLSAEDFNIYGHGGRQFWLVSSCFFFLVYSLVVILPKTPLKERISLPSV

SEQ ID NO: 79050 - protein, 1086 aa, Homo sapiens
MAQALLVPPGPESFRLFTRESLAAIEKRAAEEKAKKPKKEQDNDDENKPKPNSDLEAGKNLPFIYGDIPPEMVSEPLEDLDPYYINKKTFIVMNKGKAIFRFSATSALYILTPLNPVRKIAIKILVHSLFSMLIMCTILTNCVFMTLSNPPDWTKNVEYTFTGIYTFESLIKILARGFCLEDFTFLRDPWNWLDFSVIVMAYVTEFVDLGNVSALRTFRVLRALKTISVIPGLKTIVGALIQSVKKLSDVMILTVFCLSVFALIGLQLFMGNLRNKCLQWPPSDSAFETNTTSYFNGTMDSNGTFVNVTMSTFNWKDYIGDDSHFYVLDGQKDPLLCGNGSDAGQCPEGYICVKAGRNPNYGYTSFDTFSWAFLSLFRLMTQDYWENLYQLTLRAAGKTYMIFFVLVIFLGSFYLVNLILAVVAMAYEEQNQATLEEAEQKEAEFQQMLEQLKKQQEEAQAVAAASAASRDFSGIGGLGELLESSSEASKLSSKSAKEWRNRRKKRRQREHLEGNNKGERDSFPKSESEDSVKRSSFLFSMDGNRLTSDKKFCSPHQSLLSIRGSLFSPRRNSKTSIFSFRGRAKDVGSENDFADDEHSTFEDSESRRDSLFVPHRHGERRNSNVSQGTTTETEVRKRRLSSYQISMEMLEDSSGRQRAVSIASILTNTMEELEESRQKCPPCWYRFANVFLIWDCCDAWLKVKHLVNLIVMDPFVDLAITICIVLNTLFMAMEHYPMTEQFSSVLTVGNLVFTGIFTAEMVLKIIAMDPYYYFQEGWNIFDGIIVSLSLMELGLSNVEGLSVLRSFRLLRVFKLAKSWPTLNMLIKIIGNSVGALGNLTLVLAIIVFIFAVVGMQLFGKSYKECVCKINDDCTLPRWHMNDFFHSFLIVFRVLCGEWIETMWDCMEVAGQTMCLIVFMLVMVIGNLVVLNLFLALLLSSFSSDNLAATDDDNEMNNLQIAVGRMQKGIDYVKNKMRECFQKAFFRKPKVIEIHEGNKIDSCMSNNTGIEISKELNYLRDGNGTTSGVGTGSSVEKYVIDENDYMSFINNPSLTVTVPIAVGESDFENLNTEEFSSESELEESKEE

SEQ ID NO: 79051 - protein, 157 aa, Homo sapiens
MVLEYCPGGELFDYIISQDRLSEEETRVVFRQIVSAVAYVHSQGYAHRDLKPENLLFDEYHKLKLIDFGLCAKPKGNKDYHLQTCCGSLAYAAPELIQGKSYLGSEAGVQWRDLGSLQPPTLGFKRFSCLSLPSSWDCRCLEHGHTVICSYVWISTI

SEQ ID NO: 79052 - protein, 173 aa, Homo sapiens
MKTSVIALMVSDTLLAIQAPSGTQLEVPIPEMGQNGQKKYQINLKSHSGPIHVLLINKESSSSKPVVFPVPPPDDLTQPSSQSLTPVTPQKSSMATQNLPEQHVSERSQALQQTSATDISSAGSISGDIIDELMSSDVFPLLRLSPTPADDYNFNLDDNEGVCDLFDVQILNY

SEQ ID NO: 79053 - protein, 68 aa, Homo sapiens
MQLLPPPIRTGTKTQMDAKKPRKCDLTPFLVLKARKKQKFTSAKGPTLSEIYMEETRRSQLRKQENRL

SEQ ID NO: 79054 - protein, 382 aa, Homo sapiens
MAWIKRKFGERPPPKRLTREAMRNYLKERGDQTVLILHAKVAQKSYGNEKRFFCPPPCVYLMGSGWKKKKEQMERDGCSEQESQPCAFIGIGNSDQEMQQLNLEGKNYCTAKTLYISDSDKRKHFMLSVKMFYGNSDDIGVFLSKRIKVISKPSKKKQSLKNADLCIASGTKVALFNRLRSQTVSTRYLHVEGGNFHASSQQWGAFFIHLLDDDESEGEEFTVRDGYIHYGQTVKLVCSVTGMALPRLIIRKVDKQTALLDADDPVSQLHKCAFYLKDTERMYLCLSQERIIQFQATPCPKEPNKEMINDGASWTIISTDKAEYTFYEGMGPVLAPVTPVPVVESLQVWREYALCRPRHFCIPRRLEMGPATSPGSSNFGPK

SEQ ID NO: 79055 - protein, 95 aa, Homo sapiens
MQSTPFCGFCSLGKMITAKPGKTPIQVLHEYGMKTKNIPVYECERSDVQIHVPTFTFRVTVGDITCTGEGTSKKLAKHRAAEAAINILKANASIW

SEQ ID NO: 79056 - protein, 90 aa, Homo sapiens
MVSHSELRKLFYSADAVCFDVDSTVIREEGIDELAKICGVEDAVSEIPGAVRHVNLEDIGPGWPDCWVSLLGHGEPWAGQCLSKLLSQSA

SEQ ID NO: 79057 - protein, 320 aa, Homo sapiens
MAEGSQSAPEAGNDMGNDDAIGGNVSKYIVLPTGYCGQPKKGHLIFDACFESGNLGRVDQVSEFEYDLFIRPDTCNPRFRVWFNFTVENVKESQRVIFNIVNFSKTKSLYRDGMAPMVKSTSRPKWQRLPPKNVYYYRCPDHRKNYVMSFAFCFDREEDIYQFAYCYPYTYTRFQHYLDSLQKRNMDYFFREQLGQSVQQRKLDLLTITSPDNLREGAEQKVVFITGRVHPGETPSSFVCQGIIDFLVSQHPIACVLREYLVFKIAPMLNPDGVYLGNYRCSLMGFDLNRHWLDPSPWVHPTLHGVKQLIVQMYNDPVSN

SEQ ID NO: 79058 - protein, 62 aa, Homo sapiens
MKYCKKQCRRLGHRVLGLIKPLEMLQDQGKRSVPSEKLTTAMNRFKAALEEANGEIEKFSNR

SEQ ID NO: 79059 - protein, 696 aa, Homo sapiens
MICRTSPYRTVLRDNAIPTIFDLTSHLNNPHSRHRKRIKELSEDEIRTLKQKKIDETSEQEQKHKETNNSNAQNPSEEEGEGQDEDILPLTLEEKENKEYLKSLFEILILMGKQNIPLDGHEADEIPEGLFTPDNFQALLECRINSGEEVLRKRFETTAVNTLFCSKTQQRQMLEICESCIREETLREVRDSHFFSIITDDVVDIAGEEHLPVLVRFVDESHNLREEFIGFLPYEADAEILAVKFHTMITEKWGLNMEYCRGQAYIVSSGFSSKMKVVASRLLEKYPQAIYTLCSSCALNMWLAKSVPVMGVSVALGTIEEVCSFFHRSPQLLLELDNVISVLFQNSKERGKELKEICHSQWTGRHDAFEILVELLQALVLCLDGINSDTNIRWNNYIAGRAFVLCSAVSDFDFIVTIVVLKNVLSFTRAFGKNLQGQTSDVFFAAGSLTAVLHSLNEVMENIEVYHEFWFEEATNLATKLDIQMKLPGKFRRAHQGNLESQLTSESYYKETLSVPTVEHIIQELKDIFSEQHLKALKCLSLVPSVMGQLKFNTSEEHHADMYRSDLPNPDTLSAELHCWRIKWKHRGKDIELPSTIYEALHLPDIKFFPNVYALLKVLCILPVMKVENERYENGRKRLKAYLRNTLTDQRSSNLALLNINFDIKHDLDLMVDTYIKLYTSKSELPTDNSETVENT

SEQ ID NO: 79060 - protein, 47 aa, Homo sapiens
  MOD_RES (1)..(1): Any amino acid
XYTERFMGLPTKDDNLEHYKNSTVMARAEYFRNVDYLLIHGTADGEV

SEQ ID NO: 79061 - protein, 51 aa, Homo sapiens
MFLCQGFRKYLPEHLNDLKKENFSLKLRIYFLEERMQQKYEASREDIYKRG

SEQ ID NO: 79062 - protein, 940 aa, Homo sapiens
MATAATSPALKRLDLRDPAALFETHGAEEIRGLERQVRAEIEHKKEELRQMVGERYRDLIEAADTIGQMRRCAVGLVDAVKATDQYCARLRQAGSAAPRPPRAQQPQQPSQEKFYSMAAQIKLLLEIPEKIWSSMEASQCLHATQLYLLCCHLHSLLQLDSSSSRYSPVLSRFPILIRQVAAASHFRSTILHESKMLLKCQGVSDQAVAEALCSIMLLEESSPRQALTDFLLARKATIQKLLNQPHHGAGIKAQICSLVELLATTLKQAHALFYTLPEGLLPDPALPCGLLFSTLETITGQHPAGKGTGVLQEEMKLCSWFKHLPASIVEFQPTLRTLAHPISQEYLKDTLQKWIHMCNEDIKNGITNLLMYVKSMKGLAGIRDAMWELLTNESTNHSWDVLCRRLLEKPLLFWEDMMQQLFLDRLQTLTKEGFDSISSSSKELLVSALQELESSTSNSPSNKHIHFEYNMSLFLWSESPNDLPSDAAWVSVANRGQFASSGLSMKAQAISPCVQNFCSALDSKLKVKLDDLLAYLPSDDSSLPKDVSPTQAKSSAFDRYADAGTVQEMLRTQSVACIKHIVDCIRAELQSIEEGVQGQQDALNSAKLHSVLFMARLCQSLGELCPHLKQCILGKSESSEKPAREFRALRKQGKVKTQEIIPTQAKWQEVKEVLLQQSVMGYQVWSSAVVKVLIHGFTQSLLLDDAGSVLATATSWDELEIQEEAESGSSVTSKIRLPAQPSWYVQSFLFSLCQEINRVGGHALPKVTLQEMLKSCMVQVVAAYEKLSEEKQIKKEGAFPVTQNRALQLLYDLRYLNIVLTAKGDEVKSGRSKPDSRIEKVTDHLEALIDPFDLDVFTPHLNSNLHRLVQRTSVLFGLVTGTENQLAPRSSTFNSQEPHNILPLASSQIRFGLLPLSMTSTRKAKSTRNIETKAQYDANC

SEQ ID NO: 79063 - protein, 189 aa, Homo sapiens
  MOD_RES (1)..(1): Any amino acid
XDAKAHTSSGVREYELQEALISLPHGLGPLGGSIQSRYISMSVWTSPRRLVELAGQSLLKDEALAIAALELLPRELFPPLFMAAFDGRHSQTLKAMVQAWPFTCLPLGVLMKGQHLHLETFKAVLDGLDVLLAQEVRPRRWKLQVLDLRKNSHQDFWTVWSGNRASLYSFPEPEAAQPMTKKRKVDGLS

SEQ ID NO: 79064 - protein, 129 aa, Homo sapiens
MTSSPVTGGKETDCGPSLGLAAGIPLLVATALLVALLFTLIHRRRSSIEAMEESDRPCEISEIDDNPKISENPRRSPTHEKNTMGAQEAHIYVKTVAGSEEPVHDRYRPTIEMERRRGLWWLVPRLSLE

SEQ ID NO: 79065 - protein, 91 aa, Homo sapiens
MVRTGTNAKKESHQEAEVTQDLGLVKDAIVVEAGSGRSLDPGVGSGRNRDPEAERGRNRDPEAGKENGGSGLVPAQDQDTGIGLEAGVGQG

SEQ ID NO: 79066 - protein, 76 aa, Homo sapiens
MTMTANKNSSITHGAGGTKAPRGTLSRKSFEFEDASSLQSLYPSSPTENGTENQPKFGSKSTLEENAYEDIVGDLP

SEQ ID NO: 79067 - protein, 210 aa, Homo sapiens
MGIVQICKGEYFWLEPKNAFENFQEPDIGLVALAFLQGSFAYGGWNFLNYVTEELVDPYKNLPRAIFISIPLVTFVYVFANVAYVTAMSPQELLASNAVAVTFGEKLLGVMAWIMPISVALSTFGGVNGSLFLLSAVLRWSPRGPPSQCVGHDPREALHPNPSPALHMHLHPADAGHQRHVHTHQLCGLHQLPLLWGHGCWTDSPSLEEA

SEQ ID NO: 79068 - protein, 14 aa, Homo sapiens
MLLELAGQEALKPA

SEQ ID NO: 79069 - protein, 310 aa, Homo sapiens
MDPAARVVRALWPGGCALAWRLGGRPQPLLPTQSRAGFAGAAGGPSPVAAARKGSPRLLGAAALALGGALGLYHTARWHLRAQDLHAERSAAQLSLSSRLQLTLYQYKTCPFCSKVRAFLDFHALPYQVVEVNPVRRAEIKFSSYRKVPILVAQEGESSQQLNDSSVIISALKTYLVSGQPLEEIITYYPAMKAVNEQGKEVTEFGNKYWLMLNEKEAQQVYGGKEARTEEMKWRQWADDWLVHLISPNVYRTPTEALASFDYIVREGKFGAVEGAVAKYMGAAAMYLISKRLKSSLPVWDGCSLRRLQM

SEQ ID NO: 79070 - protein, 49 aa, Homo sapiens
  MOD_RES (1)..(1): Any amino acid
XCVCHLLMDDVVSADNYTLDLWAGQQLLWKGSFKPSEHVLPPLKRSWSQ

SEQ ID NO: 79071 - protein, 195 aa, Homo sapiens
MGNSDSQYTLQGSKNHSNTITGAKQIPCSLKIRGIHAKEEKSLHGWGHGSNGAGYKSRSLARSCLSHFKSNQPYASRLGGPTCKVSRGVAYSTHRTNAPGKDFQGISAAFSTENGFHSVGHELADNHITSRDCNGHLLNCYGRNESIASTPPGEDRKSPRVLIKTLGKLDGCLRVEFHNGGNPSKVPAEDCSEPV

SEQ ID NO: 79072 - protein, 177 aa, Homo sapiens
MAGPVKDREAFQRLNFLYQVSLRQGPHGDGARRPRVTAPLPQAAHCVLAQDPENQALARFYCYTERTIAKRLVLRRDPSVKRTLCRGCSSLLVPGLTCTQRQRRCRGQRWTVQTCLTCQRSQRFLNDPGHLLWGDRPEAQLGSQADSKPLQPLPNTAHSISDRLPEEKMQTKGSSNQ

SEQ ID NO: 79073 - protein, 21 aa, Homo sapiens
  MOD_RES (1)..(1): Any amino acid
XSSGSARQLTFGSGTQLTVLP

SEQ ID NO: 79074 - protein, 57 aa, Homo sapiens
HDGKMLASASEDHFIDIAEVETVQQTHSASQKAAGPLAKRPVCSIVIIPPSLLPFES

SEQ ID NO: 79075 - protein, 130 aa, Homo sapiens
METVVTTLPREGGVGPSRKMLLLLLLLGPGSGLSAVVSQHPSRVICKSGTSVNIECRSLDFQATTMFWYRQLRKQSLMLMATSNEGSEVTYEQGVKKDKFPINHPNLTFSALTVTSAHPEDSSFYICSAR

SEQ ID NO: 79076 - protein, 615 aa, Homo sapiens
MSAAWIPALGLGVCLLLLPGPAGSEGAGEWGSWGASRRSQGLSTSGYKRDSDPAPWASALPPEEEGAKVEPPRGAPALTPAADLLLLTCFSHAPIAITCFTRGLDIRKEKADVLCPGGCPLEEFSVYGNIVYASVSSICGAAVHRGVISNSGGPVRVYSLPGRENYSSVDANGIQSQMLSRWSASFTVTKGKSSTQEATGQAVSTAHPPTGKRLKKTPEKKTGNKDCKADIAFLIDGSFNIGQRRFNLQKNFVGKVALMLGIGTEGPHVGLVQASEHPKIEFYLKNFTSAKDVLFAIKEVGFRGGNSNTGKALKHTAQKFFTVDAGVRKGIPKVVVVFIDGWPSDDIEEAGIVAREFGVNVFIVSVAKPIPEELGMVQDVTFVDKAVCRNNGFFSYHMPNWFGTTKYVKPLVQKLCTHEQMMCSKTCYNSVNIAFLIDGSSSVGDSNFRLMLEFVSNIAKTFEISDIGAKIAAVQFTYDQRTEFSFTDYSTKENVLAVIRNIRYMSGGTATGDAISFTVRNVFGPIRESPNKNFLVIVTDGQSYDDVQGPAAAAHDAGITIFSVGVAWAPLDDLKDMASKPKESHAFFTREFTGLEPIVSDVIRGICRDFLESQQ

SEQ ID NO: 79077 - protein, 51 aa, Homo sapiens
MLLLRCQLKQAPPQKVSFRFCVVMGKQQSKLKHSTYKYGQLWPIIGKLEMW

SEQ ID NO: 79078 - protein, 98 aa, Homo sapiens
MKQLQVLLLENNPLQSPPAQICTKGKVHIFKYLSIQACQIKTADSLYLHTMERPHLHQHVEDGKKDSDSGVGSDNGDKRLSATEPSDEDTVSLNVPMS

SEQ ID NO: 79079 - protein, 156 aa, Homo sapiens
MLRRRGSPGMGVHVGAALGALWFCLTGALEVQVPEDPVVALVGTDATLCCSFSPEPGFSLAQLNLIWQLTDTKQLVHSFAEGQDQGSAYANRTALFPDLLAQGNASLRLQRVRVADEGSFTCFVSIRDFGSAAVSLQVAAPYSKPSMTLEPNKDLR

SEQ ID NO: 79080 - protein, 152 aa, Homo sapiens
PWNFLGDELYEQSDEEQDSVKVALLETNPYLLALTIIVSIVHSVFEFLAFKNDIQFWNSRQSLEGLSVRSVFFGVFQSFVVLLYILDNETNFVVQVSVFIGVLIDLWKITKVMDVRLDREHRVAGIFPRLSFKDKSTYIESSTKVYDDASSP

SEQ ID NO: 79081 - protein, 273 aa, Homo sapiens
MGVPRPQPWALGLLLFLLPGSLGAESHLSLLYHLTAVSSPAPGTPAFWVSGWLGPQQYLSYNSLRGEAEPCGAWVWENQVSWYWEKETTDLRIKEKLFLEAFKALGGKEPPSMRLKARPSSPGFSVLTCSAFSFYPPELQLRFLRNGLAAGTGQGDFGPNSDGSFHASSSLTVKSGDEHHYCCIVQHAGLAQPLRVELESPAKSSVLVVGIVIGVLLLTAAAVGGALLWRRMRSGLPAPWISLRGDDTGVLLPTPGEAQDADLKDVNVIPATA

SEQ ID NO: 79082 - protein, 71 aa, Homo sapiens
  MOD_RES (1)..(1): Any amino acid
XPFSAPWWFWLSLTGVSLAGALGVKFVGLFIILQVGLNTIADLWYLFGDLSLSLCCPWLSIQPPLLFTSWC

SEQ ID NO: 79083 - protein, 283 aa, Homo sapiens
MVLEMLNPIHYNITSIVPEAMPAATMPVLLLTGLFLLVWNYEGTSSIPGPGYCMGIGPLISHGRFLWMGIGSACNYYNRVYGEFMRVWISGEETLIISKSSSMFHIMKHNHYSSRFGSKLGLQCIGMHEKGIIFNNNPELWKTTRPFFMKALSGPGLVRMVTVCAESLKTHLDRLEEVTNESGYVDVLTLLRRVMLDTSNTLFLRIPLDESAIVVKIQGYFDAWQALLIKPDIFFKISWLYKKYEKSVKDLKDAIEVLIAEKRRRISTEEKLEECMDFATELI

SEQ ID NO: 79084 - protein, 230 aa, Homo sapiens
MSRRYDSRTTIFSPEAERRNIHKLLDEVFFSEKIYKLNEDMACSVAGITSDANVLTNELRLIAQRYLLQYQEPIPCEQLVTALCDIKQAYTQFGGKRPFGVSLLYIGWDKHYGFQLYQSDPSGNYGGWKATCIGNNSAAAVSMLKQDYKEGEMTLKSALALAIKVLNKTMDVSKLSAEKVEIATLTRENGKTVIRVLKQKEVEQLIKKHEEEEAKAEREKKEKEQKEKDK

SEQ ID NO: 79085 - protein, 15 aa, Homo sapiens
  MOD_RES (1)..(1): Any amino acid
XKEQEKEKKSVSLHR

SEQ ID NO: 79086 - protein, 160 aa, Homo sapiens
MAAGSRTSLLLAFALLCLPWLQEADSIPTSSNMEETQQKSNLELLHISLLLIESRLEPVRFLRSTFTNNLVYDTSDSDDYHLLKDLEEGIQMLMGRLEDGSHLTGQTLKQTYSKFDTNSHNHDALLKNYGLLHCFRKDMDKVETFLRMVQCRSVEGSCGF

SEQ ID NO: 79087 - protein, 128 aa, Homo sapiens
MSEGGGRVSCIFAAPTRLCRWPALIECGVNLTQPLCEWMIQVARDRTLSLAWEVASLLTLSSSEVGLEGVGTIWPSSYSSEESSRNGAEQGRQLSIEGPFQGQNCPSHPAAALPLPMRGESQATSCQV

SEQ ID NO: 79088 - protein, 225 aa, Homo sapiens; identical to SEQ ID NO: 70855
  MOD_RES (1)..(1): Any amino acid

SEQ ID NO: 79089 - protein, 52 aa, Homo sapiens
MYRFRSQLFTGISAAATAHSYPRRFSTLLLAEDSPLSRPPHRRTSKKCSSIG

SEQ ID NO: 79090 - protein, 738 aa, Homo sapiens
MQFLHKLILNHNPLTTVEDPYLFKLPALKYLDMGTTLVPLTTLKNILMMTVELEKLILPSHMACCLCQFKNSIEAVCKTVKLHCNSACLTNTTHCPEEASVGNPEGAFMKVLQARKNYTSTELIVEPEEPSDSSGINLSGFGSEQLDTNDESDFISTLSYILPYFSAVNLDVKSLLLPLIKLPTTGNSLAKIQTVGQNRQRVKRVLMGPRSIQKRHFKEVGRQSIRREQGAQASVENAAEEKRLGSPAPREVEQPHTQQGPEKLAGNAVYTKPSFTQEHKAAVSVLKPFSKGAPSTSSPAKALPQVRDRWKDLTHAISILESAKARVTNTKTSKPIVHARKKYRFHKTRSHVTHRTPKVKKSPKVRKKSYLSRLMLANRLPFSAAKSLINSPSQGAFSSLGDLSPQENPFLEVSAPSEHFIEKNNTKHTTARNAFEENDFMENTNMPEGTISENTNYNHPPEADSAGTAFNLGPTVKQTETKWEYNNVGTDLSPEPKSFNYPLLSSPGDQFEIQLTQQLQSLIPNNNVRRLIAHVIRTLKMDCSGAHVQVTCAKLISRTGHLMKLLSGQQEVKASEIEWDTDQWKIENYINESTEAQSEQKEKSLELKKEVPGYGYTDKLILALIVTGILTILIILFCLIVICCHRRSLQEDEEGFSRGIFRFLPRRGCSSRRESQDGLSSFGQPLWFKDMYKPLSATRINNHAWKLHKKSSNEDKILNRDPGDSEAPTEEEESEALP

SEQ ID NO: 79091 - protein, 80 aa, Homo sapiens
DAAVSALAALCSEYYMKEPGEADPAIQEELITQYLAELRNPEEMTRCGFSLALGALPGFLLKGRLQQVLTGLRAVTHTSP

SEQ ID NO: 79092 - protein, 51 aa, Homo sapiens
  MOD_RES (1)..(1): Any amino acid
XLSEKEKKQISEQLNALNKAYHDLCDGSANQLQQLQSQLAHQTEQKSHAGR

SEQ ID NO: 79093 - protein, 194 aa, Homo sapiens
MPHKIGFVVVSSSGHEDGFSARELMIHAPTVSGWRSPRFCQFPQEIVLQMVERCRIRKLQLLAHQYMISSKIEFYISESLPEYFAPYQAERFRRLGYVSLCDNEKTGCKARELKSVYVDAVGQFLKLIFHQNHVNKYNIYNQVALVAINIIGDPADFSDESNTASREKLIDHYLGHNSEDPALEGTYARVFKSP

SEQ ID NO: 79094 - protein, 84 aa, Homo sapiens
MAAGGSGCTSSAGGGGRGVNPRRTGFESILEGLFGPALLKDLSLFKDCEPESISDWTFDENCLFCCLRRDKVKTVPGSPTPIFP

SEQ ID NO: 79095 - protein, 1098 aa, Homo sapiens
  MOD_RES (1)..(1): Any amino acid
XVSLFPYGADAGDLEFVRRTVDFTSPLFKPATGFPLGSSLRDSLYFTDNGQIIFPESDYQIFSYPNPLPTGFTGRDPVALVAPFWDDADFSTGRGTTFYQEYETFYGEHSLLVQQAESWIRKITNNGGYKARWALKVTWVNAHAYPAQWTLGSNTYQAILSTDGSRSYALFLYQSGGMQWDVAQRSGKPVLMGFSSGDGYFENSPLMSQPVWERYRPDRFLNSNSGLQGLQFYRLHREERPNYRLECLQWLKSQPRWPSWGWNQVSCPCSWQQGRRDLRFQPVSIGRWGLGSRQLCSFTSWRGGVCCSYGPWGEFREGWHVQRPWQLAQELEPQSWCCRWNDKPYLCALYQQRRPHVGCATYRPPQPAWMFGDPHITTLDGVSYTFNGLGDFLLVGAQDGNSSFLLQGRTAQTGSAQATNFIAFAAQYRSSSLGPVTVQWLLEPHDAIRVLLDNQTVTFQPDHEDGGGQETFNATGVLLSRNGSEVSASFDGWATVSVIALSNILHSSASLPPEYQNRTEGLLGVWNNNPEDDFRMPNGSTIPPGSPEEMLFHFGMTWQINGTGLLGKRNDQLPSNFTPVFYSQLQKNSSWAEHLISNCDGDSSCIYDTLALRNASIGLHTREVSKNYEQANATLNQYPPSINGGRVIEAYKGQTTLIQYTSNAEDANFTLRDSCTDLELFENGTLLWTPKSLEPFTLEILARSAKIGLASALQPRTVVCHCNAESQCLYNQTSRVGNSSLEVAGCKCDGGTFGRYCEGSEDACEEPCFPSVHCVPGKGCEACPPNLTGDGRHCAALGSSFLCQNQSCPVNYCYNQGHCYISQTLGCQPMCTCPPAFTDSRCFLAGNNFSPTVNLELPLRVIQLLLSEEENASMAEVNASVAYRLGTLDMRAFLRNSQVERIDSAAPASGSPIQHWMVISEFQYRPRGPVIDFLNNQLLAAVVEAFLYHVPRRSEEPRNDVVFQPISGEDVRDVTALNVSTLKAYFRCDGYKGYDLVYSPQSGFTCVSPCSRGYCDHGGQCQHLPSGPRCSCVSFSIYTAWGEHCEHLSMKLDAFFGIFFGALGGLLLLGVGTFVVLRFWGCSGARFSYFLNSAEALP

SEQ ID NO: 79096 - protein, 65 aa, Homo sapiens
MMKLRHKNKKPGEGSKGHKKISWPYPQPAKQNGKKATSKVPSAPHFVHPNDHANREAELKKKLRR

SEQ ID NO: 79097 - protein, 108 aa, Homo sapiens
MKKIFSKKGESPLGSFARRQRSSAGGGGEPGEGAYSQPGYHVRDRDLGKIHKAASAGNVAKVQQILLLRKNGLNDRDKMNRSKGDLGWAPVAHDCNPSTLGGPGRRIA

SEQ ID NO: 79098 - protein, 38 aa, Homo sapiens
  MOD_RES (1)..(1): Any amino acid
XAKQLVRGEPNVSYICSRYYRAPELIFGATDYTSSIAA

SEQ ID NO: 79099 - protein, 37 aa, Homo sapiens
  MOD_RES (1)..(1): Any amino acid
XVEKLQVLLNCMTEIYYQFKKDKAERTYNEEQIHKFD

SEQ ID NO: 79100 - protein, 136 aa, Homo sapiens; identical to SEQ ID NO: 69621

SEQ ID NO: 79101 - protein, 54 aa, Homo sapiens
LLSIERLNLYAASLRVCFLLFESMREHLKFQMELTKSLPGSHPDFPVSCQIHGN

SEQ ID NO: 79102 - protein, 72 aa, Homo sapiens
CLRLLTHTFNREYTHSHVCVSASESKASPPQLSEMSVTLLRDPSMSPLGVATLTPSSTCPSLVEGRYGATDL

SEQ ID NO: 79103 - protein, 223 aa, Homo sapiens; identical to SEQ ID NO: 74687

SEQ ID NO: 79104 - protein, 128 aa, Homo sapiens; identical to SEQ ID NO: 44672
  MOD_RES (1)..(1): Any amino acid

SEQ ID NO: 79105 - protein, 67 aa, Homo sapiens
  MOD_RES (1)..(1): Any amino acid
XDRVGCVWQTVRDHLYHLCVQAQDFCFLVERAVVGLLRLAIRLLRREEISAQGPSQIVSSHPTIRMT

SEQ ID NO: 79106 - protein, 252 aa, Homo sapiens
  MOD_RES (1)..(1): Any amino acid
XSAPPEPATLKGTVPDDAVEALADSLGKKEADPEDGKPVMDKVKEKAKEEDREKLGEKEETIPPDYRLEEVKKFEDAKLAAAISEVVSQTPASTTQAGAPPRDTSQSDKDLDDALDKLSDSLGQRQPDPDENKPMEDKVKEKAKAEHRDKLGERDDTIPPEYRHLLDDNGQDKPVKPPTKKSEDSKKPADDQDPIDALSGDLDSCPSTTETSQNTAKDKCKKAASSSKAPKNGGKAKDSAKTTEETSKPKDD

SEQ ID NO: 79107 - protein, 51 aa, Homo sapiens
MVAPVLETSHVFCCPNRVRGVLNWSSGPRGLLAFGTSCSVVLYDPLPLLLN

SEQ ID NO: 79108 - protein, 85 aa, Homo sapiens
MARRHCFSYWLLVCWLVVTVAEGQEEVFTPPGDSQNNADATDCQIFTLTPPPAPRSPVTRAQPITKTPRYFPRRRLQRGSSSEES

SEQ ID NO: 79109 - protein, 446 aa, Homo sapiens
MGSGARFPSGTLRVRWLLLLGLVGPVLGAARPGFQQTSHLSSYEIITPWRLTRERREAPRPYSKQVSYVIQAEGKEHIIHLERNKDLLPEDFVVYTYNKEGTLITDHPNIQNHCHYRGYVEGVHNSSIALSDCFGLRGLLHLENASYGIEPLQNSSHFEHIIYRMDDVYKEPLKCGVSNKDIEKETAKDEEEEPPSMTQLLRRRRAVLPQTRYVELFIVVDKERYDMMGRNQTAVREEMILLANYLDSMYIMLNIRIVLVGLEIWTNGNLINIVGGAGDVLGNFVQWREKFLITRRRHDSAQLVLKKGFGGTAGMAFVGTVCSRSHAGGINVFGQITVETFASIVAHELGHNLGMNHDDGRDCSCGAKSCIMNSGASGSRNFSSCSAEDFEKLTLNKGGNCLLNIPKPDEAYSAPSCGNKLVDAGEECDCGTPKLLVFLLLRNGFY

SEQ ID NO: 79110 - protein, 506 aa, Homo sapiens
MGTRSAIAAPRILCSRGLRSGSARATGSGVERSPSAAIFSFEINVSVAIITFASEPKVLMSVLNDNSRDMTEVISSLENANYKDHENGTGTNTYAALNSVYLMMNNQMRLLGMETMAWQEIRHAIILLTDGKSNMGGSPKTAVDHIREILNINQKRNDYLDIYAIGVGKLDVDWRELNELGSKKDGERHAFILQDTKALHQVFEHMLDVSKLTDTICGVGNMSANASDQERTPWHVTIKPKSQETCRGALISDQWVLTAAHCFRDGNDHSLWRVNVGDPKSQWGKEFLIEKAVISPGFDVFAKKNQGILEFYGDDIALLKLAQKVKMSTHARPICLPCTMEANLALRRPQGSTCRDHENELLNKQSVPAHFVALNGSKLNINLKMGVEWTSCAEVVSQEKTMFPNLTDVREVVTDQFLCSGTQEDESPCKGESGGAVFLERRFRFFQVGLVSWGLYNPCLGSADKNSRKRAPRSKVPPPRDFHINLFRMQPWLRQHLGDVLNFLPL

SEQ ID NO: 79111 - protein, 186 aa, Homo sapiens
MLATRLSRPLSRLPGKTLSACDRENGARRPLLLGSTSFIPIGRRTYASAAEPVGSKAVLVTGCDSGFGFSLAKHLHSKGFLVFAGCLMKDKGHDGVKELDSLNSDRLRTVQLNVCSSEEVEKVVEIVRSSLKDPEKGMWGLVNNAGISTFGEVEFTSLETYKQVAEVNLWGTVRMTKSFLPLIRRA

SEQ ID NO: 79112 - protein, 353 aa, Homo sapiens
MATVIPGPLSLGEDFYREAIEHCRSYNARLCAERSLRLPFLDSQTGVAQNNCYIWMEKTHRGPGLAPGQIYTYPARCWRKKRRLNILEDPRLRPCEYKIDCEAPLKKEGGLPEGPVLEALLCAETGEKKIELKEEETIMDCQKQQLLEFPHDLEVEDLEDDIPRRKNRAKGKAYGIGGLRKRQDTASLEDRDKPYVCDKFYKELAWVPEAQRKHTAKKAPDGTVIPNGYCDFCLGGSKKTGCPEDLISCADCGRSGHPSCLQFTVNMTAAVRTYRWQCIECKSCSLCGTSENDGASWAGLTPQDQLLFCDDCDRGYHMYCLSPPMAEPPEGSWSCHLCLRHLKEKASAYITLT

SEQ ID NO: 79113 - protein, 85 aa, Homo sapiens
MATLVELPDSVLLEIFSYLPVRDRIRISRCGPASGGKGRAEGAAGTWRCDVARGWGRSNRASPPPGSVTAGRGWWTTGGCGDMST

SEQ ID NO: 79114 - protein, 500 aa, Homo sapiens
MMKMLLDPMGGIVMTNDGNAILREIQVQHPAAKSMIEISRTQDEEVGDGTTSVIILAGEMLSVAEHFLEQQMHPTVVISAYRKALDDMISTLKKISIPVDISDSDMMLNIINSSITTKAISRWSSLACNIALDAVKMVQFEENGRKEIDIKKYARVEKIPGGIIEDSCVLRGVMINKDVTHPRMRRYIKNPRIVLLDSSLEYKKGESQTDIEITREEDFTRILQMEEEYIQQLCEDIIQLKPDVVITEKGISDLAQHYLMRANITAIRRVRKTDNNRIARACGARIVSRPEELREDDVGTGAGLLEIKKIGDEYFTFITDCKDPKACTILLRGASKEILSEVERNLQDAMQVCRNVLLDPQLVPGGGASEMAVAHALTEKSKAMTGVEQWPYRAVAQALEVIPRTLIQNCGASTIRLLTSLRAKHTQENCETWGVNGETGTLVDMKELGIWEPLAVKLQTYKTAVETAVLLLRIDDIVSGHKKKGDDQSRQGGAPDAGQE

SEQ ID NO: 79115 - protein, 438 aa, Homo sapiens
MATLGHTFPFYAGPKPTFPMDTTLASIIMIFLTALATFIVILPGIRGKTRLFWLLRVVTSLFIGAAILGTPVQQLNETINYNEEFTWRLGENYAEEYAKALEKGLPDPVLYLAEKFTPRSPCGLYRQYRLAGHYTSAMLWVAFLCWLLANVMLSMPVLVYGGYMLLATGIFQLLALLFFSMATSLTSPCPLHLGASVLHTHHGPAFWITLTTGLLCVLLGLAMAVAHRMQPHRLKAFFNQSVDEDPMLEWSPEEGGLLSPRYRSMADSPKSQDIPLSEASSTKAYYRPRRLSLVPADVRGLAPAALSALPGALLAQAWRALLPGLRCPKAGKESRLGPPHSPWRFGPEGCEERWAEHTGDSPRPLRGRGTGRLWRWGSKERRACGVRAMLPRLVSNSGLKRPSCLDLPKCWDYRRDARAFFHLLEPTPCVTSRHTPLI

SEQ ID NO: 79116 - protein, 46 aa, Homo sapiens
  MOD_RES (1)..(1): Any amino acid
XKCGKTLTSGGHAEHEGKPYCNHPCYAAMFGPKGFGRGGAESHTFK

SEQ ID NO: 79117 - protein, 402 aa, Homo sapiens
MLAAMGSLAAALWAVVHPRTLLLGTVAFLLAADFLKRRRPKNYPPGPWRLPFLGNFFLVDFEQSHLEVQLFVKKYGNLFSLELGDISAVLITGLPLIKEALIHMDQNFGNRPVTPMREHIFKKNGLIMSSGQAWKEQRRFTLTALRNFGLGKKSLEERIQEEAQHLTEAIKEENGQPFDPHFKINNAVSNIICSITFGERFEYQDSWFQQLLKLLDEVTYLEASKTCQLYNVFPWIMKFLPGPHQTLFSNWKKLKLFVSHMIDKHRKDWNPAETRDFIDAYLKEMSKHTGNPTSSFHEENLICSTLDLFFAGTETTSTTLRWALLYMALYPEIQEKVQAEIDRVIGQGQQPSTAARESMPYTNAVIHEVQRMGNIIPLNVPREVTVDTTLAGYHLPKNISPD

SEQ ID NO: 79118 - protein, 98 aa, Homo sapiens
MAARCSTRWLLVVVGTPRLPAISGRGARPPREGVVGAWLSRKLSVPAFASSLTSCGPRALLTLRPGVSLTGRSLASSHPLHLEISRPCLISLRNTSWS

SEQ ID NO: 79119 - protein, 613 aa, Homo sapiens
YLIEPEKIQEMFPLLNMNKVLAGLYNPGDGHIDPYSLTMALAAGARKCGALLKYPAPVTSLKARSDGTWDVETPQGSMRANRIVNAAGFWAREVGKMIGLEHPLIPVQHQYVVTSTISEVKALKRELPVLRDLEGSYYLRQERDGLLFGPYESQEKMKVQDSWVTNGVPPGFGKELFESDLDRIMEHIKAAMEMVPVLKKADIINVVNGPITYSPDILPMVGPHQGVRNYWVAIGFGYGIIHAGGVGKYLSDWILHGEPPFDLIELDPNRYGKWTTTQYTEAKARESYGFNNIVGYPKEERFAGRPTQRVSGLYQRLESKCSMGFHAGWEQPHWFYKPGQDTQYRPSFRRTNWFEPVGSEYKQVMQRVAVTDLSPFGKFNIKGQDSIRLLDHLFANVIPKVGFTNISHMLTPKGRVYAELTVSHQSPGEFLLITGSGSELHDLRWIEEEAVKGGYDVEIKNITDELGVLGVAGPQARKVLQKLTSEDLSDDVFKFLQTKSLKVSNIPVTAIRISYTGELGWELYHRREDSVALYDAIMNAGQEEGIDNFGTYAMNALRLEKAFRAWGLEMNCDTNPLEAGLEYFVKLNKDQNSCFAHFKEENGWVSRWAIRPY

SEQ ID NO: 79120 - protein, 192 aa, Homo sapiens
MAMFEQMRANVGKLLKGIDRYNPENLATLERYVETQAKENAYDLEANLAVLKLYQFNPAFFQTTVTAQILLKALTNLPHTDFTLCKCMIDQAHQEERPIRQILYLGDLLETCHFQAFWQALDENMDLLEGITGFEDSVRKYSQLKVWMSKYGWSADESGQIFICSQEESIKPKNIVEKIDFDSVSSIMASSQ

SEQ ID NO: 79121 - protein, 115 aa, Homo sapiens
  MOD_RES (1)..(1): Any amino acid
XNYDFPTSSVEYIHRIGRTGRAGNKGKAITFFTEDDKPLLRSVANVIQQAGCPVPEYIKGFQKLLSKQKKKMIKKPLERESISTTPKCFLEKAKDKQKKVTGQNSKKKVALEDKS

SEQ ID NO: 79122 - protein, 132 aa, Homo sapiens
MVQQHLSEPVATFFQVFSQLHELRQQDLKLDPAGRGEGQLPQVVFSDGQQRPVDPALLDELQKVFTLEMAYTIYVPFSCLLGDIIRKIIPNHELVGELAALYLESISPSSRNPASVEPTMPGTGPEWDPHGG

SEQ ID NO: 79123 - protein, 48 aa, Homo sapiens
MPVHSRGDKKETNHHDEMEVDYAENEGSSSEDEDTESSSVSEDGDSSV

SEQ ID NO: 79124 - protein, 92 aa, Homo sapiens
MAQSVLVPPGPDSFRFFTRESLAAIEQRIAEEKAKRPKQERKDEDDENGPKPNSDLEAGKSLPFIYGDIPPEMVSVPLEDLDPYYINKKVSS

SEQ ID NO: 79125 - protein, 374 aa, Homo sapiens
MARRPRHSIYSSDEDDEDFEMCDHDYDGLLPKSGKRHLGKTRWTREEDEKLKKLVEQNGTDDWKVIANYLPNRTDVQCQHRWQKVLNPELIKGPWTKEEDQRVIELVQKYGPKRWSVIAKHLKGRIGKQCRERWHNHLNPEVKKTSWTEEEDRIIYQAHKRLGNRWAEIAKLLPGRTDNAIKNHWNSTMRRKVEQEGYLQESSKASQPAVATSFQKNSHLMGFAQAPPTAQLPATGQPTVNNDYSYYHISEAQNVSSHVPYPVALHVNIVNVPQPAAAAIQRHYNDEDPEKEKRIKELELLLMSTENELKGQQVLPTQNHTCSYPGWHSTTIADHTRPHGDSAPVSCLGEHHSTPSLPADPGSLPEESASPASS

SEQ ID NO: 79126 - protein, 399 aa, Homo sapiens
ASTKGPSVFPLAPSSKSTSGGTAALGCLVKDYFPEPVTVSWNSGALTSGVHTFPAVLQSSGLYSLSSVVTVPSSSLGTQTYICNVNHKPSNTKVDKKVEPKSCDKTHTCPPCPAPELLGGPSVFLFPPKPKDTLMISRTPEVTCVVVDVSHEDPEVKFNWYVDGVEVHNAKTKPREEQYNSTYRVVSVLTVLHQDWLNGKEYKCKVSNKALPAPIEKTISKAKGQPREPQVYTLPPSRDELTKNQVSLTCLVKGFYPSDIAVEWESNGQPENNYKTTPPVLDSDGSFFLYSKLTVDKSRWQQGNVFSCSVMHEALHNHYTQKSLSLSPELQLEESCAEAQDGELDGLWTTITIFITLFLLSVCYSATVTFFKVKWIFSSVVDLKQTIIPDYRNMIGQGA

SEQ ID NO: 79127 - protein, 539 aa, Homo sapiens
MKNLSIEDPVEAIHLGSLIAAQGYIFPISDHVLTMKDDGTFYRFQAPYFWPSNCWEPENTDYAIYLCKRTMQNKARLELADYEAENLARLQRAFARKWEFIFMQAEAQVKIDRKKDKTERKILDSQERAFWDVHRPVPGCVNTTEMDIRKCRRLKNPQKVKKSVYGVTEESQAQSPVHVLSQPIRKTTKEDIRKQITFLNAQIDRHCLKMSKVAESLIAYTEQYVEYDPLITPAEPSNPWISDDVALWDIEMSKEPSQQRVKRWGFSFDEILKDQVGRDQFLRFLESEFSSENLRFWLAVQDLKKQPLQDVAKRVEEIWQEFLAPGAPSAINLDSHSYEITSQNVKDGGRYTFEDAQEHIYKLMKSDSYARFLRSNAYQDLLLAKKKPESEQGRRTSLEKFTRSVNVQNTRPAGAWSIFMAALPMAVWLRTPRSCHGLSESRLLGLPSLHDGLREGQSLPQSCPGSSSTAAEGARERASNGRSLARRQHCQCHGQGEETQLCLWSRLESSKRSQRASSLRTSKAKKKRQTVKQGPKAWP

SEQ ID NO: 79128 - protein, 531 aa, Homo sapiens
MLDHKDLEAEIHPLKNEERKSQENLGNPSKNEDNVKSAPPQSRLSRCRAAAFFLSLFLCLFVVFVVSFVIPCPDRPASQRMWRIDYSAAVIYDFLAVDDINGDRIQDVLFLYKNTNSSNNFSRSCVDEGFSSPCTFAAAVSGANGSTLWERPVAQDVALVECAVPQPRGSEAPSACILVGRPSSFIAVNLFTGETLWNHSSSFSGNASILSPLLQVPDVDGDGAPDLLVLTQEREEVSGHLYSGSTGHQIGLRGSLGVDGESGFLLHVTRTGAHYILFPCASSLCGCSVKGLYEKVTGSGGPFKSDPHWESMLNATTRRMLSHSSGAVRYLMHVPGNAGADVLLVGSEAFVLLDGQELTPRWTPKAAHVLRKPIFGRYKPDTLAVAVENGTGTDRQILFLDLGTGAVLCSLALPSLPGGPLSASLPTADHRSAFFFWGLHELGSTSETETGEARHSLYMFHPTLPRVLLELANVSTHIVAFDGSHWATAERLLDGAELAPRPACPRLVTGVWEAARLCILLPGIRWLIYWF

SEQ ID NO: 79129 - protein, 211 aa, Homo sapiens
MADKVRRQRPRRRVCWALVAVLLADLLALSDTLAVMSVDLGSESMKVAIVKPGVPMEIVLNKESRRKTPVIVTLKENERFFGDSAASMAIKNPKATLRYFQHLLGKQADNPHVALYQARFPEHELTFDPQRQTVHFQISSQLQFSPEEVLGMVLNYSRSLAEDFAEQPIKDAVITVPVFFNQAERRAVLQAARMAGLKVLQLINDNTATAL

SEQ ID NO: 79130 - protein, 9 aa, Homo sapiens
VLRYFDWLL

SEQ ID NO: 79131 - protein, 344 aa, Homo sapiens
MKCSRHKVCIAQDSQTAVCISHRRLTHRMKEAGVDHRQWRGPILSTCKQCPVVYPSPVCGSDGHTYSFQCKLEYQACVLGKQISVKCEGHCPCPSDKPTSTSRNVKRACSDLEFREVANRLRDWFKALHESGSQNKKTKTLLRPERSRFDTSILPICKDSLGWMFNRLDTNYDLLLDQSELRSIYLDKNEQCTKAFFNSCDTYKDSLISNNEWCYCFQRQQDPPCQTELSNIQKRQGVKKLLGQYIPLCDEDGYYKPTQCHGSVGQCWCVDRYGNEVMGSRINGVADCAIDFEISGDFASGDFHEWTDDEDDEDDIMNDEDEIEDDDEDEGDDDDGGDDHDVYI

SEQ ID NO: 79132 - protein, 179 aa, Homo sapiens
MQDGRKGGAYAGKMEATTAGVGRLEEEALRRKERLKALREKTGRKDKEDGEPKTKHLREEEEEGEKHRELRLRNYVPEDEDLKKRRVPQAKPVAVEEKVKEQLEAAKPEPVIEEVDLANLAPRKPDWDLKRDVAKKLEKLKKRTQRAIAELIRERLKGQEDSLASAVDAATEQKTCDSD

SEQ ID NO: 79133 - protein, 484 aa, Homo sapiens
MAGAAGRVQDRALRRFPITLPVGDLSNLHLKEEKIKPDTNGAVVKTNANAEKTDEEEKEDRAAQSLLNKLIRSNLVDNTNQVEVLQRDPNSPLYSVKSFEELRLKPQLLQGVYAMGFNRPSKIQENALPLMLAEPPQNLIAQSQSGTGKTAAFVLAMLSQVEPANKYPQCLCLSPTYELALQTGKVIEQMGKFYPELKLAYAVRGNKLERGQKISEQIVIGTPGTVLDWCSKLKFIDPKKIKVFVLDEADVMIATQGHQDQSIRIQRMLPRNCQMLLFSATFEDSVWKFAQKVVPDPNVIKLKREEETLDTIKQYYVLCSSRDEKFQALCNLYGAITIAQAMIFCHTRKTASWLAAELSKEGHQVALLSGEMMVEQRAAVIERFREGKEKVLVTTNVCARGIDVEQVSVVINFDLPVDKDGNPDNETYLHRIGRTGRFGKRGLAVNMVDSKHSMNILNRIQEHFNKKIERLDTDDLDEIEKIAN

SEQ ID NO: 79134 - protein, 104 aa, Homo sapiens
MVGEECVGAIVCKLDMHKKMFRRGYIAMLAVDSKYRRNGIGTNLVKKAIYAMVEGDCDEVVLETEITNKSALKLYENLGFVRDKRLFRYYLNGVDALRLKLWLR

SEQ ID NO: 79135 - protein, 161 aa, Homo sapiens
MTALRLLQRMKRDWMHTGRRPSGLCGAALLVAARMHDFRRTVKEVISVVKVCESTLRKRLTEFEDTPTSQLTIDEFMKIDLEEECDPPSYTAGQRKLRMKQLEQVLSKKLEEVEGEISSYQDAIEIELENSRPKAPHRGGRADGGPRASPGLFVGRPQYHS

SEQ ID NO: 79136 - protein, 593 aa, Homo sapiens
MDWGTELWDQFEVLERHTQWGLDLLDRYVKFVKERTEVEQAYAKQLRSLVKKYLPKRPAKDDPESKFSQQQSFVQILQEVNDFAGQRELVAENLSVRVCLELTKYSQEMKQERKMHFQEGRRAQQQLENGFKQLENSKRKFERDCREAEKAAQTAERLDQDINATKADVEKAKQQAHLRSHMAEESKNEYAAQLQRFNRDQAHFYFSQMPQIFDKLQDMDERRATRLGAGYGLLSEAELEVVPIIAKCLEGMKVAANAVDPKNDSHVLIELHKSGFARPGDVEFEDFSQPMNRAPSDSSLGTPSDGRPELRGPGRSRTKRWPFGKKNKTVVTEDFSHLPPEQQRKRLQQQLEERSRELQKEVDQREALKKMKDVYEKTPQMGDPASLEPQIAETLSNIERLKLEVQKYEAWLAEAESRVLSNRGDSLSRHARPPDPPASAPPDSSSNSASQDTKESSEEPPSEESQDTPIYTEFDEDFEEEPTSPIGHCVAIYHFEDLGPPPPPSQGPARALSLWPRVKTSVLWKKTKGTAGPGSGGKREARATCPPPTSESRSIEPCQRREEGGCRLLLLGHGEPQDLCTLFLTPWLRLRPV

SEQ ID NO: 79137 - protein, 748 aa, Homo sapiens
MNYQEAAIYLQEGENNDKFFTHPKDAKALAAYLFAHNHLFYLMELATALLLLLLSLCEAPAVPALRLGIYVHATLELFALMVVVFELCMKLRWLGLHTFIRHKRTMVKTSVLVVQFVEAIVVLVRQMSHVRVTRALRCIFLVDCRYCGGVRRNLRQIFQSLPPFMDILLLLLFFMIIFAILGFYLFSPNPSDPYFSTLENSIVSLFVLLTTANFPDVMMPSYSRNPWSCVFFIVYLSIELYFIMNLLLAVVFDTFNDIEKRKFKSLLLHKRTAIQHAYRLLISQRRPAGISYRQFEGLMRFYKPRMSARERYLTFKALNQNNTPLLSLKDFYDIYEVAALKWKAKKNREHWFDELPRTALLIFKGINILVKSKAFQYFMYLVVAVNGVWILVETFMLKGGNFFSKHVPWSYLVFLTIYGVELFLKVAGLGPVEYLSSGWNLFDFSVTVFAFLGLLALALNMEPFYFIVVLRPLQLLRLFKLKERYRNVLDTMFELLPRMASLGLTLLIFYYSFAIVGMEFFCGIVFPNCCNTSTVADAYRWRNHTVGNRTVVEEGYYYLNNFDNILNSFVTLFELTVVNNWYIIMEGVTSQTSHWSRLYFMTFYIVTMVVMTIIVAFILEAFVFRMNYSRKNQDSEVDGGITLEKEISKEELVAVLELYREARGASSDVTRLLETLSQMERYQQHSMVFLGRRSRTKSDLSLKMYQEEIQEWYEEHAREQEQQRQLSSSAAPAAQQPPGSRQRSQTVT

SEQ ID NO: 79138 - protein, 238 aa, Homo sapiens
MWATLPLLCAGAWLLGVPVCGAAELCVNSLEKFHFKSWMSKHRKTYSTEEYHHRLQTFASNWRKINAHNNGNHTFKMALNQFSDMSFAEIKHKYLWSEPQNCSATKSNYLRGTGPYPPSVDWRKKGNFVSPVKNQGACGSCWTFSTTGALESAIAIATGKMLSLAEQQLVDCAQDFNNHGCQGGLPSQAFEYILYNKGIMGEDTYPYQGKDGYCKFQPGKAIGFVKDVANITIRLPFS

SEQ ID NO: 79139 - protein, 90 aa, Homo sapiens
MLPKRSRRTVSKSIGPTCPFAGSCEVSKTQRRHCPACRLQKCLDAGMRKDTSSSSVHPSPALAHPGPCAASGHTLRRHQHFHGTASHQVY

SEQ ID NO: 79140 - protein, 191 aa, Homo sapiens
MKLYSLSVLYKGEAKVVLLKAAYDVSSFSFFQRSSVQEFMTFTSQLIVERSSKGTRASVKEQDYLCHVYVRNDSLAGVVIADNEYPSRVAFTLLEKVLDEFSKQVDRIDWPVGSPATIHYPALDGHLSRYQNPREADPMTKVQAELDETKIILHNTMESLLERGEKLDDLVSKSEVLGTQSKAFYKTKIFN

SEQ ID NO: 79141 - protein, 216 aa, Homo sapiens
MREQLKGHETQTTCWDHPKMTELYQSLADLNNVRFSAYRTAMKLRRLQKALCLDLLSLSAACDALDQHNLKQNDQPMDILQIINCLTTIYDRLEQEHNNLVNVPLCVDMCLNWLLNVYDTGRTGRIRVLSFKTGIISLCKAHLEDKYRYLFKQVASSTGFCDQRRLGLLLHDSIQIPRQLGEVASFGGSNIEPSVRSCFQFVRKIFSVLPRTQAQG

SEQ ID NO: 79142 - protein, 275 aa, Homo sapiens
MAGSSSLEAVRRKIRSLQEQADAAEERAGTLQRELDHERKLRETAEADVASLNRRIQLVEEELDRAQERLATALQKLEEAEKAADESERGMKVIESRAQKDEEKMEIQEIQLKEAKHIAEDADRKYEEVARKLVIIESDLERAEERAELSEGQVRQLEEQLRIMDQTLKALMAAEDKYSQKEDRYEEEIKVLSDKLKEAETRAEFAERSVTKLEKSIDDLEGKILSSVFSLILMVEYQPGKTIFQFKGIHIDTLLCTCTFFLCVLWGFSLWLLNS

SEQ ID NO: 79143 - protein, 295 aa, Homo sapiens
MSEYIRVTEDENDEPIEIPSEDDGTVLLSTVTAQFPGACGLRYRNPVSQCMRGVRLVEGILHAPDAGWGNLVYVVNYPKDNKRKMDETDASSAVKVKRAVQKTSDLIVLGLPWKTTEQDLKEYFSTFGEVLMVQVKKDLKTGHSKGFGFVRFTEYETQVKVMSQRHMIDGRWCDCKLPNSKQSQDEPLRSRKVFVGRCTEDMTEDELREFFSQYGDVMDVFIPKPFRAFAFVTFADDQIAQSLCGEDLIIKGISVHISNAEPKHNSNRQLERSGRFGVHLISNVYGRSTSLKVVL

SEQ ID NO: 79144 - protein, 204 aa, Homo sapiens
  MOD_RES (1)..(1): Any amino acid
XRILFTPEENKDYAHTLTCVTEREKFIVPIKARGARAILDFPDKLNFSTCPVKYSTQKILLVRNIGNKNAVFHIKTCRPFSIEPAIGTLNVGESMQLEVEFEPQSVGDHSGRLIVCYDTGEKVFVSLYGAAIDMNIRLDKNSLTIEKTYISLANQRTITIHNRSNIIAHFLWKVFATQQEEDREKYRWMAPFVPGQVWTWEYFL

SEQ ID NO: 79145 - protein, 37 aa, Homo sapiens
MAGPAWISKVSRLLGAFHNPKQVTRGFTGGINFAKLM

SEQ ID NO: 79146 - protein, 180 aa, Homo sapiens
MLNNLTDCEDGDGGANPGDGNPKESSPFINSTDTEKGKEYDGKNMALFEEEMDTSPMVSSLLSGLANYTNLPQGSREHEEAENNEGGKKKPVQAPRMGTFMGVYLPCLQNIFGVILFLRLTWVVGIAGIMESFCMVFICCSCTMLTAISMSAIATNGVVPAGGSYYMISRLSGWQEQSFR

SEQ ID NO: 79147 - protein, 109 aa, Homo sapiens
MEDAAAPGRTEGVLERQGAPPAAGQGGMRGGSQQGEVSSREAAGLGAPREADGGSSRLVFLGVCRRSPGGAHPDPRRPGPGEPLPHPPGRGPLRPRGARRAGAEVFSHL

SEQ ID NO: 79148 - protein, 153 aa, Homo sapiens
MQSFREQSSYHGNQQSYPQEVHGSSRLEEFSPRQAQMFQNFGGTGGSSGSSGSGSGGGRRGAAAAAAAMASETSGHQGYQGFRKEAGDFYYMAGNKDPVTTGTPQPPQRRPSGPVQSYGPPQGSSFGNQYGSEGHVGQFQAQHSGLGGVSHYQ

SEQ ID NO: 79149 - protein, 43 aa, Homo sapiens
MSVNYAAGLSPYADKGKCGLPEGSPRSLDHGGARSGPQVRHHL

SEQ ID NO: 79150 - protein, 51 aa, Homo sapiens
MRRSKADVERYIASVQGSTPSPRQKSMKGFYFAKLYYEAKEYDLAKNVQWN

SEQ ID NO: 79151 - protein, 240 aa, Homo sapiens
MAPWPPKGLVPAMLWGLSLFLNLPGPIWLQPSPPPQSSPPPQPHPCHTCRGLVDSFNKGLERTIRDNFGGGNTAWEEENLSKYKDSETRLVEVLEGVCSKSDFECHRLLELSEELVESWWFHKQQEAPDLFQWLCSDSLKLCCPAGTFGPSCLPCPGGTERPCGGYGQCEGEGTRGGSGHCDCQAGYGGEACGQCGLGYFEAERNASHLLVLAPVPDAQDLRNQTVCNARRAGPCITSSV

SEQ ID NO: 79152 - protein, 231 aa, Homo sapiens
MESVLSKYEDQITIFTDYLEEYPDTDELVWILGKQHLLKTEKSKLLSDISARLWFTYRRKFSPIGGTGPSSDAGWGCMLRCGQMMLAQALICRHLGRDWSWEKQKEQPKEYQRILQCFLDRKDCCYSIHQMEKMCRVLPLSADTAGDRPPDSLTASNQSKGTSAYCSAWKPLLLIVPLRLGINQINPVYVDAFKVTSSSSWTLIQPRPLLTLKRMERLMTRLSIACSPHSE

SEQ ID NO: 79153 - protein, 66 aa, Homo sapiens
MSILIIEAFYGGSHKQLVDLLQEELGDCVVYTLPAKKWHWRARTSALYFSQTIPISEHYRQSEITN

SEQ ID NO: 79154 - protein, 304 aa, Homo sapiens
MANETQKVGAIHFPFPFTPYSIQEDFMAELYRVLEAGKIGIFESPTGTGKSLSLICGALSWLRDFEQKKREEEARLLETGTGPLHDEKDESLCLSSSCEGAAGTPRPAGEPAWVTQFVQKKEERDLVDRLKAEQARRKQREERLQQLQHRVQLKYAAKRLRQEEEERENLLRLSREMLETGPEAERLEQLESGEEELVLAEYESDEEKKVASRVDEDEDDLEEEHITKIYYCSRTHSQLAQFVHEVKKSPFGKDVRLVSLGSRQRRRKELRRRSQRGGGRRSRQPAPSTTTSRWAFSGMRPWQR

SEQ ID NO: 79155 - protein, 95 aa, Homo sapiens
MIPMRESPPTRPCSTPTSKNRETVPKARGGPSQETRTGLCHGTAQTKAFGSGQTVVLLQPHAAVRAWIWNKWKSAGAETLEVHPCEQEDRSAEGP

SEQ ID NO: 79156 - protein, 156 aa, Homo sapiens
TAQSLVLIDEFGKGTNTVDGLALLAAVLRHWLARGPTCPHIFVATNFLSLVQLQLLPQGPLVQYLVCEGVAKASHASHTAAQAGLPDKLVARGKEVSDLIRSGKPIKPVKDLLKKNQMENCQTLVDKFMKLDLEDPNLDLNVFMSQEVLPAATSIL

SEQ ID NO: 79157 - protein, 206 aa, Homo sapiens
WALRPVLPTQSAHDPPAVHLSNGPGQEPIAVMTFDLTKITKTSSSFEVRTWDPEGVIFYGDTNPKDDWFMLGLRDGRPEIQLHNHWAQLTVGAGPRLDDGRWHQLVPALDGCLRRDSWLDKQAEISASAPTSLRSCDVESNPGIFLPPGTQAEFNLRGEDSSTSFCLNGLWAQGQRLDVDQALNRSHEIWTHSCPQSPGNGTDASH

SEQ ID NO: 79158 - protein, 96 aa, Homo sapiens
MAATNLENQLHSAQKNLLFLQREHASTLKGLHSEIRRLQQHCTDLTYELTVKSSEQTGDGTSKSSELKKRCEELEAQLKVKENENAELLKELEQKN

SEQ ID NO: 79159 - protein, 392 aa, Homo sapiens
LDNEVEKTANLVISNWNQQIKAKKKLMVSTKKHEALFQLVESSKQSMTEKEKRKLLNKLTKSTEKLEKEDENYYQKNMAGYSTRLKWENTLENCYQSILELEKERIQLLCNNLNQYSQHISLFGQTLTTCHTQIHCAISKIDIEKDIQAVMEETAILSTENKSEFLLTDYFEEDPNSAMDKERRKSLLKPKLLRLQRDIEKASKDKEGLERMLKTYSSTSSFSDAKSQKDTAALMDENNLKLDLLEANSYKLSSMLAELEQRPQPSHPCSNSIFRWREKEHTHSYVKISRPFLMKRLENIVSKASSGGQSNPGSSTPAPGAAQLSSRLCKALYSFQARQDDELNLEKGDIVIIHEKKEEGWWFGSLNGKKGHFPAAYVEELPSNAGNTATKA

SEQ ID NO: 79160 - protein, 126 aa, Homo sapiens
MAAPVGPVKFWRPGTEGPGVSISEERQSLAENSGTTVVYNPYAALSIEQQRQKLPVFKLRNHILYLIENYQTVVIVGETGCGKSTQIPQYLAEAGWTAEGRVVGVTQPRRVAAVTHDLSSQRLQGE

SEQ ID NO: 79161 - protein, 231 aa, Homo sapiens
MASNVTNKTDPRSMNSRVFIGNLNTLVVKKSDVEAIFSKYGKIVGCSVHKGFAFVQYVNERNARAAVAGEDGRMIAGQVLDINLAAEPKVNRGKAGVKRSAAEMYGSVTEHPSPSPLLSSSFDLDYDFQRDYYDRMYSYPARVPPPPPIARAVVPSKRQRVSGNTSRRGKSGFNSKSGQRGSSKSGKLKGDDLQAIKKELTQIKQKVDSLLENLEKIEKEQSKQAAGVDQG

SEQ ID NO: 79162 - protein, 66 aa, Homo sapiens
MQTVTAAVEELLVAAQRQDRLTVGVYESAKLMNVDPDSVVLCLLAIDEEEEDDIALQIHFTLIQSF

SEQ ID NO: 79163 - protein, 151 aa, Homo sapiens
MLLFNWICIVITGLAMDMQLLMIPLIMSVLYVWAQLNRDMIVSFWFGTRFKACYLPWVILGFNYIIGGSVINELIGNLVGHLYFFLMFRYPMDLGGRNFLSTPQFLYRWLPSRRGGVSGFGVPPASMRRAADQNGGGGRHNWGQGFRLGDQ

SEQ ID NO: 79164 - protein, 247 aa, Homo sapiens
  MOD_RES (1)..(1): Any amino acid
XKQQLPPKKKRRVGTTVHCDYLNRPHKSIHRRRTDPMVTLSSILESIINDMRDLPNTYPFHTPVNAKVVKDYYKIITRPMDLQTLRENVRKRLYPSREEFREHLELIVKNSATYNGPKHSLTQISQSMLDLCDEKLKEKEDKLARLEKAINPLLDDDDQVAFSFILDNIVTQKMMAVPDSWPFHHPVNKKFVPDYYKVIVNPMDLETIRKNISKHKYQSRESFLDDVNLILANSVKYNGYMCTTCRT

SEQ ID NO: 79165 - protein, 41 aa, Homo sapiens
MGTATRRKPHLLLVAAVALVSSSGEDTEAQKSSITFPRSHS

SEQ ID NO: 79166 - protein, 73 aa, Homo sapiens
MAPEENAGTELLLQSFERRFLAARTLRSFPWQSLEAKLRDSSDSELLRDILHKVRIPESLGLMTLPPESLQKT

SEQ ID NO: 79167 - protein, 39 aa, Homo sapiens
MATEEFIIRIPPYHYIHVLDQNSNVSRVECPAALGRSGW

SEQ ID NO: 79168 - protein, 243 aa, Homo sapiens
MKEYVLLLFLALCSAKPFFSPSHIALKNMMLKDMEDTDDDDDDDDDDDDDDEDNSLFPTREPRSHFFPFDLFPMCPFGCQCYSRVVHCSDLGLTSVPTNIPFDTRMLDLQNNKIKEIKENDFKGLTSLYGLILNNNKLTKIHPKAFLTTKKLRRLYLSHNQLSEIPLNLPKSLAELRIHENKVKKIQKDTFKGMNALHVLEMSANPLDNNGIEPGAFEGVTVFHIRIAEAKLTSVPKDNLPSF

SEQ ID NO: 79169 - protein, 107 aa, Homo sapiens
MALQTLQSSWVTFRKILSHFPEELSLAFVYGSGVYRQAGPSSDQKSYLTAASRTCWLPYPQSTFLQHGSLPFPVLPPVLPASLFNSRVLQDSDLSSLGEFLPPVPLI

SEQ ID NO: 79170 - protein, 198 aa, Homo sapiens
MHSFRLARLSSWRVHAGLVSHSAVRPHQGALVERIIPHPLYSAQNHDYDVALLRLQTALNFSDTVGAVCLPAKEQHFPKGSRCWVSGWGHTHPSHTYSSDMLQDTVVPLFSTQLCNSSCVYSGALTPRMLCAGYLDGRADACQGDSGGPLVCPDGDTWRLVGVVSWGRGCAEPNHPGVYAKVAEFLDWIHDTAQDSLL

SEQ ID NO: 79171 - protein, 334 aa, Homo sapiens
MLCRLGGRWLRPLPALQLWARDLPLAPVPTSGAKRPTLPVWAVAPVSAVHANGWYEALAASSPVRVAEEVLLGVHAATGLPWWGSILLSTVALRGAVTLPLAAYQHYILAKVENLQPEIKTIARHLNQEVAVRANQLGWSKRDARLTYLKNMRRLISELYVRDNCHPFKATVLVWIQLPMWIFMSFALRNLSTGAAHSEAGFSVQEQLATGGILWFPDLTAPDSTWILPISVGVINLLIVEICALQKIGMSRFQTYITYFVRAMSVLMIPIAATVPSSIVLYWLCSSFVGLSQNLLLRSPGFRQLCRIPSTKSDSETPYKDIFAAFNTKFISRK

SEQ ID NO: 79172 - protein, 69 aa, Homo sapiens
MSRYLRPPNTSLFVRNVADDTRSEDLRREFGRYGPIVDVYVPLDFYTRRPRGFAYVQYPFFRWLISEGC

SEQ ID NO: 79173 - protein, 1741 aa, Homo sapiens
MAKPTSKDSGLKEKFKILLGLGTPRPNPRSAEGKQTEFIITAEILRELSMECGLNNRIRMIGQICEVAKTKKFEEHAVEALWKAVADLLQPERPLEARHAVLALLKAIVQGQGERLGVLRALFFKVIKDYPSNEDLHERLEVFKALTDNGRHITYLEEELADFVLQWMDVGLSSEFLLVLVNLVKFNSCYLDEYIARMVQMICLLCVRTASSVDIEVSLQVLDAVVCYNCLPAESLPLFIVTLCRTINVKELCEPCWKLMRNLLGTHLGHSAIYNMCHLMEDRAYMEDAPLLRGAVFFVGMALWGAHRLYSLRNSPTSVLPSFYQAMACPNEVVSYEIVLSITRLIKKYRKELQVVAWDILLNIIERLLQQLQTLDSPELRTIVHDLLTTVEELCDQNEFHGSQERYFELVERCADQRPESSLLNLISYRAQSIHPAKDGWIQNLQALMERFFRSESRGAVRIKVLDVLSFVLLINRQFYEEELINSVVISQLSHIPEDKDHQVRKLATQLLVDLAEGCHTHHFNSLLDIIEKVMARSLSPPPELEERDVAAYSASLEDVKTAVLGLLVILQTKLYTLPASHATRVYEMLVSHIQLHYKHSYTLPIASSIRLQAFDFLLLLRADSLHRLGLPNKDGVVRFSPYCVCDYMEPERGSEKKTSGPLSPPTGPPGPAPAGPAVRLGSVPYSLLFRVLLQCLKQESDWKVLKLVLGRLPESLRYKVLIFTSPCSVDQLCSALCSMLSGPKTLERLRGAPEGFSRTDLHLAVVPVLTALISYHNYLDKTKQREMVYCLEQGLIHRCASQCVVALSICSVEMPDIIIKALPVLVVKLTHISATASMAVPLLEFLSTLARLPHLYRNFAAEQYASVFAISLPYTNPSKFNQYIVCLAHHVIAMWFIRCRLPFRKDFVPFITKGLRSNVLLSFDDTPEKDSFRARSTSLNERPKSRIQTSLTSASLGSADENSVAQADDSLKNLHLELTETCLDMMARYVFSNFTAVPKRSPVGEFLLAGGRTKTWLVGNKLVTVTTSVGTGTRSLLGLDSGELQSGPESSSSPGVHVRQTKEAPAKLESQAGQQVSRGARDRVRSMSGGHGLRVGALDVPASQFLGSATSPGPRTAPAAKPEKASAGTRVPVQEKTNLAAYVPLLTQGWAEILVRRPTGNTSWLMSLENPLSPFSSDINNMPLQELSNALMAAERFKEHRDTALYKSLSVPAASTAKPPPLPRSNTDSAVVMEEGSPGEVPVLVEPPGLEDVEAALGMDRRTDAYSRSSSVSSQEEKSLHAEELVGRGIPIERVVSSEGGRPSVDLSFQPSQPLSKSSSSPELQTLQDILGDPGDKADVGRLSPEVKARSQSGTLDGESAAWSASGEDSRGQPEGPLPSSSPRSPSGLRPRGYTISDSAPSRRGKRVERDALKSRATASNAEKVPGINPSFVFLQLYHSPFFGDESNKPILLPNESQSFERSVQLLDQIPSYDTHKIAVLYVGEGQSNSELAILSNEHGSYRYTEFLTGLGRLIELKDCQPDKVYLGGLDVCGEDGQFTYCWHDDIMQAVFHIATLMPTKDVDKHRCDKKRHLGNDFVSIVYNDSGEDFKLGTIKGQFNFVHVIVTPLDYECNLVSLQCRKDMEGLVDTSVAKIVSDRNLPFVARQMALHANMASQVHHSRSNPTDIYPSKWIARLRHIKRLRQRICEEAAYSNPSLPLVHPPSHSKAPAQTPAEPTPGYEVGQRKRLISSVEDFTEFV

SEQ ID NO: 79174 - protein, 447 aa, Homo sapiens
MRYRLAWLLHPALPSTFRSVLGARLPPPERLCGFQKKTYSKMNNPAIKRIGNHITKSPEDKREYRGLELANGIKVLLISDPTTDKSSAALDVHIGSLSDPPNIAGLSHFCEHMLFLGTKKYPKENEYSQFLSEHAGSSNAFTSGEHTNYYFDVSHEHLEGALDRFAQFFLCPLFDESCKDREVNAVDSEHEKNVMNDAWRLFQLEKATGNPKHPFSKFGTGNKYTLETRPNQEGIDVRQELLKFHSAYYSSNLMAVCVLGRESLDDLTNLVVKLFSEVENKNVPLPEFPEHPFQEEHLKQLYKIVPIKDIRNLYVTFPIPDLQKYYKSNPGHYLGHLIGHEGPGSLLSELKSKGWVNTLVGGQKEGARGFMFFIINVDLTEEGLLHVEDIILHMFQYIQKLRAEGPQEWVFQECKDLNAVAFRFKDKERPRGYTSKIAGILHGCHSF

SEQ ID NO: 79175 - protein, 246 aa, Homo sapiens
MNLLLILTFVAAAVAAPFDDDDKIVGGYICEENSVPYQVSLNSGYHFCGGSLISEQWVVSAGHCYKSAINSKLSGRGCEYHRIQVRLGEHNIEVLEGNEQFINAAKIIRHPKYNSRTLDNDILLIKLSSPAVINSRESLISGWGNTLSSGADYPDELQCLDAPVLSQAECEASYPGKITNNMFCVGFLEGGKDSCQGDSGGPVVSNGELQGIVSWGYGCAQKNRPGVYTKVYNYVDWIKDTIAANS

SEQ ID NO: 79176 - protein, 806 aa, Homo sapiens
MACSILEGCRREVRRETWKPGPGSEIADPTLAEMGKNLKEAVKMLEDSQRRTEEENGKKLISGDIPGPLQGSGQDMVSILQLVQNLMHGDEDEEPQSPRIQNIGEQGHMALLGHSLGAYISTLDKEKLRKLTTRILSDTTLWLCRIFRYENGCAYFHEEEREGLAKICRLAIHSRYEDFVVDGFNVLYNKKPVIYLSAAARPGLGQYLCNQLGLPFPCLCRVPCNTVFGSQHQMDVAFLEKLIKDDIERGRLPLLLVANAGTAAVGHTDKIGRLKELCEQYGIWLHVEGVNLATLALGYVSSSVLAAAKCDSMTMTPGPWLGLPAVPAVTLYKHDDPALTLVAGLTSNKPTDKLRALPLWLSLQYLGLDGFVERIKHACQLSQRLQESLKKVNYIKILVEDELSSPVVVFRFFQELPGSDPVFKAVPVPNMTPSGVGRERHSCDALNRWLGEQLKQLVPASGLTVMDLEAEGTCLRFSPLMTAAVLGTRGEDVDQLVACIESKLPVLCCTLQLREEFKQEVEATAGLLYVDDPNWSGIGVVRYEHANDDKSSLKSDPEGENIHAGLLKKLNELESDLTFKIGPEYKSMKSCLYVGMASDNVDAAELVETIAATAREIEENSRLLENMTEVVRKGIQEAQVELQKASEERLLEEGVLRQIPVVGSVLNWFSPVQALQKGRTFNLTAGSLESTEPIYVYKAQGAGVTLPPTPSGSRTKQRLPGQKPFKRSLRGSDALSETSSVSHIEDLEKVERLSSGPEQITLEASSTEGHPGAPSPQHTDQTEAFQKGVPHPEDDHSQVEGPESLR

SEQ ID NO: 79177 - protein, 204 aa, Homo sapiens
MTMTPGPWLGLPAVPAVTLYKHDDPALTLVAGLTSNKPTDKLRALPLWLSLQYLGLDGFVERIKHACQLSQRLQESLKKVNYIKILVEDELSSPVVVFRFFQELPGSDPVFKAVPVPNMTPSGVGRERHSCDALNRWLGEQLKQLVPASGLTVMDLEAEGTCLRFSPLMTAAGWSHCGTTTRYDCVRSRLTTRLPGSTGEQAPP

SEQ ID NO: 79178 - protein, 126 aa, Homo sapiens
MPWNVRMQSPKQRTSRCWDHHIAEGCFCLPWKKILIFEKRQDSQNENERMSSTPIQDNVDQTYSEELCYTLINHRVLCTRPSGNSAEEYYENVPCKAERPRESLGGTETEYSLLHMPSTDPRHARS

SEQ ID NO: 79179 - protein, 325 aa, Homo sapiens
MKQLEDHEAFETSSLIGHSARVYALYYKDGLLCTGSDDLSAKLWDVSTGQCVYGIQTHTCAAVKFDEQKLVTGSFDNTVACWEWSSGARTQHFRGHTGAVFSVDYNDELDILVSGSADFTVKVWALSAGTCLNTLTGHTEWVTKVVLQKCKVKSLLHSPGDYILLSADKYEIKIWPIGREINCKCLKTLSVSEDRSICLQPRLHFDGKYIVCSSALGLYQWDFASYDILRVIKTPEIANLALLGFGDIFALLFDNRYLYIMDLRTESLISRWPLPEYRKSKRGSSFLAGEASWLNGLDGHNDTGLVFATSMPDHSIHLVLWKEHG

SEQ ID NO: 79180 - protein, 633 aa, Homo sapiens
MNPSAPSYPMASLYVGDLHPDVTEAMLYEKFSPAGPILSIRVCRDMITRRSLGYAYVNFQQPADAERALDTMNFDVIKGKPVRIMWSQRDPSLRKSGVGNIFIKNLDKSIDNKALYDTFSAFGNILSCKVVCDENGSKGYGFVHFETQEAAERAIEKMNGMLLNDRKVFVGRFKSRKEREAELGARAKEFTNVYIKNFGEDMDDERLKDLFGPALSVKVMTDESGKSKGFGFVSFERHEDAQKAVDEMNGKELNGKQIYVGRAQKKVERQTELKRKFEQMKQDRITRYQGVNLYVKNLDDGIDDERLRKEFSPFGTITSAKVMMEGGRSKGFGFVCFSSPEEATKAVTEMNGRIVATKPLYVALAQRKEERQAHLTNQYMQRMASVRAVPNPVINPYQPAPPSGYFMAAIPQTQNRAAYYPPSQIAQLRPSPRWTAQGARPHPFQNMPGAIRPAAPRPPFSTMRPASSQVPRVMSTQRVANTSTQTMGPRPAAAAAAATPAVRTVPQYKYAAGVRNPQQHLNAQPQVTMQQPAVHVQGQEPLTASMLASAPPQEQKQMLGERLFPLIQAMHPTLAGKITGMLLEIDNSELLHMLESPESLRSKVDEAVAVLQAHQAKEAAQKAVNSATGVPTV

SEQ ID NO: 79181 - protein, 577 aa, Homo sapiens
MMTPQVITPQQMQQILQQQVLSPQQLQVLLQQQQALMLQQQQLQEFYKKQQEQLQLQLLQQQHAGKQPKEQQQVATQQLAFQQQLLQMQQLQQQHLLSLQRQGLLTIQPGQPALPLQPLAQGMIPTELQQLWKEVTSAHTAEETTGNNHSSLDLTTTCVSSSAPSKTSLIMNPHASTNGQLSVHTPKRESLSHEEHPHSHPLYGHGVCKWPGCEAVCEDFQSFLKHLNSEHALDDRSTAQCRVQMQVVQQLELQLAKDKERLQAMMTHLHVKSTEPKAAPQPLNLVSSVTLSKSASEASPQSLPHTPTTPTAPLTPVTQGPSVITTTSMHTVGPIRRRYSDKYNVPISSADIAQNQEFYKNAEVRPPFTYASLIRQAILESPEKQLTLNEIYNWFTRMFAYFRRNAATWKNAVRHNLSLHKCFVRVENVKGAVWTVDEVEFQKRRPQKISGNPSLIKNMQSSHAYCTPLNAALQASMAENSIPLYTTASMGNPTLGNLASAIREELNGAMEHTNSNESDSSPGRSPMQAVHPVHVKEEPLDPEEAEGPLSLVTTANHSPDFDHDRDYEDEPVNEDME

SEQ ID NO: 79182 - protein, 226 aa, Homo sapiens
MWFQWSEQRDYIDTTWNCGYLLASSFVFLNLLGQLTGCVLVLSRNFVQYACFGLFGIIALQTIAYSILWDLKFLMRNLALGGGLLLLLAESRSEGKSMFAGVPTMRESSPKQYMQLGGRVLLVLMFMTLLHFDASFFSIVQNIVGTALMILVAIGFKTKLAALTLVVWLFAINVYFNAFWTIPVYKPMHDFLKYDFFQTMSVIGGLLLVVALGPGGVSMDEKKKEW

SEQ ID NO: 79183 - protein, 324 aa, Homo sapiens
MEPAPSAGAELQPPLFANASDAYPSACPSAGANASGPPGARSASSLALAIAITALYSAVCAVGLLGNVLVMFGIVRYTKMKTATNIYIFNLALADALATSTLPFQSAKYLMETWPFGELLCKAVLSIDYYNMFTSIFTLTMMSVDRYIAVCHPVKALDFRTPAKAKLINICIWVLASGVGVPIMVMAVTRPRDGAVVCMLQFPSPSWYWDTVTKICVFLFAFVVCWAPIHIFVIVWTLVDIDRRDPLVVAALHLCIALGYANSSLNPVLYAFLDENFKRCFRQLCRKPCGRPDPSSFSRAREATARERVTACTPSDGPGGGAAA

SEQ ID NO: 79184 - protein, 210 aa, Homo sapiens
MPHTLWMVWVLGVIISLSKEESSNQASLSCDRNGICKGSSGSLNSIPSGLTEAVKSLDLSNNRITYISNSDLQSERDAYWVENLMVQELENFNPPFKLCLHKRDFIPGKWIIDNIIDSIEKSHKTVFVLSENFVKSEWCKYELDFSHFRLFDENNDAAILILLEPIEKKAIPQRFCKLRKIMNTKTYLEWPMDEAQREGFWVNLRAAIKS

SEQ ID NO: 79185 - protein, 195 aa, Homo sapiens
MATAAQGPLSLLWGWLWSERFWLPENVSWADLEGPADGYGYPRGRHILSVFPLAAGIFFVRLLFERFIAKPCALCIGIEDSGPYQAQPNAILEKVFISITKYPDKKRLEGLSKQLDWNVRKIQCWFRHRRNQDKPPTLTKFCESIHLGSGTSDSAGITIHFSLFQVGFITIISWNWPSIGPLCFLSLQTLKERTS

SEQ ID NO: 79186 - protein, 37 aa, Homo sapiens
MERVKMINVQRLLEAAEFLERRERGNGWAPLREPERY

SEQ ID NO: 79187 - protein, 252 aa, Homo sapiens
MALLDVCGAPRGQRPESALPVAGSGRRSDPGHYSFSMRSPELALPRGMQPTEFFQSLGGDGERNVQIEMAHGTTTLAFKFQHGVIAAVDSRASAGSYINCQYWERLLAKECRLYYLRNGERISVSAASKLLSNMMCQYRGMGLSMGSMICGWDKKGPGLYYVDEHGTRLSGNMFSTGSGNTYAYGVMDSGYRPNLSPEEAYDLGRRAIAYATHRDSYSGGVVNMYHMKEDGWVKVESTDVSDLLHQYREANQ

SEQ ID NO: 79188 - protein, 369 aa, Homo sapiens
MDLKFNNSRKYISITVPSKTQTMSPHIKSVDDVVVLGMNLSKFNKLTQFFICVAGVFVFYLIYGYLQELIFSVEGFKSCGWYLTLVQFAFYSIFGLIELQLIQDKRRRIPGKTYMIIAFLTVGTMGLSNTSLGYLNYPTQVIFKCCKLIPVMLGGVFIQGKRYNVADVSAAICMSLGLIWFTLADSTTAPNFNLTGVVLISLALCADAVIGNVQEKAMKLHNASNSEMVLYSYSIGFVYILLGLTCTSGLGPAVTFCAKNPVRTYGYAFLFSLTGYFGISFVLALIKIFGALIAVTVTTGRKAMTIVLSFIFFAKPFTFQYVWSGLLVVLGIFLNVYSKNMDKIRLPSLYDLINKSVEARKSRTLAQTV

SEQ ID NO: 79189 - protein, 455 aa, Homo sapiens
MSLTVVSMACVGFFLLQGAWPLMGGQDKPFLSARPSTVVPRGGHVALQCHYRRGFNNFMLYKEDRSHVPIFHGRIFQESFIMGPVTPAHAGTYRCRGSRPHSLTGWSTPSNPLVIMVTGNHRKPSLLAHPGPLLKSGETVILQCWSDVMFEHFFLHREGISEDPSRLVGQIHDGVSKANFSIGPLMPVLAGTYRCYGSVPHSPYQLSAPSDPLDIVITGLYEKPSLSAQPGPTVQAGENVTLSCSSWSSYDIYHLSREGEAHERRLRAVPKVNRTFQADFPLGPATHGGTYRCFGSFRALPCVWSNSSDPLLVSVTGNPSSSWPSPTEPSSKSGICRHLHVLIGTSVVIFLFILLLFFLLYRWCSNKKNAAVMDQEPAGDRTVNRQDSDEQDPQEVTYAQLDHCVFIQRKISRPSQRPKTPLTDTSVYTELPNAEPRSKVVSCPRAPQSGLEGVF

SEQ ID NO: 79190 - protein, 288 aa, Homo sapiens
  MOD_RES (1)..(1): Any amino acid
XKEPSAAAPTGAGGVAPGSGNNSGGPSLLVPLPVNPPSSPTPSFSDAKAAGALLNGPPQFSTAPEIKAPEPLSSLKSMAERAAISSGIEDPVPTLHLTERDIILSSTSAPPASAQPPLQLSEVNIPLSLGVCPLGPVPLTKEQLYQQAMEEAAWHHMPHPSDSERIRQYLPRNPCPTPPYHHQMPPPHSDTVEFYQRLSTETLFFIFYYLEGTKAQYLAAKALKKQSWRFHTKYMMWFQRHEEPKTITDEFEQLAQSLSLTKYSSLWLSAQPGTPPSHPPLGQLLGLL

SEQ ID NO: 79191 - protein, 183 aa, Homo sapiens
MAVFNQKSVSDMIKEFRKNWRALCNSERTTLCGADSMLLALQLSMAENNKQVQLLARKIIFSYLNLLVNSKNDLAVAYILNIPDRGLGREAFTDLKHAAREKQMSIFLVATSFIRTIELGGKGYAPPPSDPLRTHVKGLSNFINFIDKLDEILGEIPNPRGCKSICWKINNWNEFWKCSSGQK

SEQ ID NO: 79192 - protein, 346 aa, Homo sapiens
MNEPQCFYNESIAFFYNRSGKHLATEWNTVSKLVMGLGITVCIFIMLANLLVMVAIYVNRRFHFPIYYLMANLAAADFFAGLAYFYLMFNTGPNTRRLTVSTWLLRQGLIDTSLTASVANLLAIAIERHITVFRMQLHTRMSNRRVVVVIVVIWTMAIVMGAIPSVGWNCICDIENCSNMAPLYSDSYLVFWAIFNLVTFVVMVVLYAHIFGYVRQRTMRMSRHSSGPRRNRDTMMSLLKTVVIVLGAFIICWTPGLVLLLLDVCCPQCDVLAYEKFFLLLAEFNSAMNPIIYSYRDKEMSATFRQILCCQRSENPTGPTEGSDRSASSLNHTILAGVHSNDHSVV

SEQ ID NO: 79193 - protein, 96 aa, Homo sapiens
MSGGSADYNREHGGPEGMDPDGVIESNWNEIVDNFDDMNLKESLLRGIYAYGFEKPSAIQQRAIIPCIKDPKGNSGTWRLYGSHLSCLHWWNKCSK

SEQ ID NO: 79194 - protein, 54 aa, Homo sapiens
MGNGMNKILPGLYIGNFKDARDAEQLSKNKVTHILSVHDSARPMLEDKTFQRKY

SEQ ID NO: 79195 - protein, 446 aa, Homo sapiens
MGLEALVPLAVIVAIFLLLVDLMHRRQRWAARYSPGPLPLPGLGNLLHVDFQNTPYCFDQLRRRFGDVFSLQLAWTPVVVLNGLAAVREALVTHGEDTADRPPVPITQILGFGPRSQGRPFRPNGLLDKAVSNVIASLTCGRRFEYDDPRFLRLLDLAQEGLKEESGFLREVLNAVPVLLHIPALAGKVLRFQKAFLTQLDELLTEHRMTWDPAQPPRDLTEAFLAEMEKAKGNPESSFNDENLRIVVADLFSAGMVTTSTTLAWGLLLMILHPDVQRRVQQEIDDVIGQVRRPEMGDQAHMPYTTAVIHEVQRFGDIVPLGVTHMTSRDIEVQGFRIPKGTTLITNLSSVLKDEAVWEKPFRFHPEHFLDAQGHFVKPEAFLPFSAGRRACLGEPLARMELFLFFTSLLQHFSFSVPTGQPRPSHHGVFAFLVTPSPYELCAVPR

SEQ ID NO: 79196 - protein, 837 aa, Homo sapiens
MEPQVTLNVTFKNEIQSFLVSDPENTTWADIEAMVSINSQGEYEEALKMAVKQGNQLQMQVHEGHHVVDEAPPPVVGAKRLAARAGKKPLAHYSSLVRVLGSDMKTPEDPAVQSFPLVPCDTDQPQDKPPDWFTSYLETFREQVVNETVEKLEQKLHEKLVLQNPSLGSCPSEVSMPTSEETLFLPENQFSWHIACNNCQRRIVGVRYQCSLCPSYNICEDCEAGPYGHDTNHVLLKLRRPVVGSSEPFCHSKYSTPRLPAALEQVRLQKQVDKNFLKAEKQRLRAEKKQRKAEVKELKKQLKLHRKIHLWNSIHGLQSPKSPLGRPESLLQSNTLMLPLQPCTSVMPMLSAAFVDENLPDGTHLQPGTKFIKHWRMKNTGNVKWSADTKLKFMWGNLTLASTEKKDVLVPCLKAGHVGVVSVEFIAPALEGTYTSHWRLSHKGQQFGPRVWCSIIVDPFPSEESPDNIEKGMISSSKTDDLTCQQEETFLLAKEERQLGEVTEQTEGTAACIPQKAKNVASERELYIPSVDLLTAQDLLSFELLDINIVQELERVPHNTPVDVTPCMSPLPHDSPLIEKPGLGQIEEENEGAGFKALPDSMVSVKRKAENIASVEEAEEDLSGTQFVCETVIRSLTLDAAPDHNPPCRQKSLQMTFALPEGPLGNEKEEIIHIAEEEAVMEEEEDEEDEEEEDELKDEVQSQSSASSEDYIIILPECFDTSRPLGDSMYSSALSQPGLERGAEGKPGVEAGQEPAEAGERLPGGENQPQEHSISDILTTSQTLETVPLIPEVVELPPSLPRSSPCVHHHGSPGVDLPVTIPEVSSVPDQIRGANNF

SEQ ID NO: 79197 - protein, 166 aa, Homo sapiens
MFKKLKQKISEEQQQLQQALAPAQASSNSSTPTRMRSRTSSFTEQLDEGTPNRESGDTQSFAQKLQLRVPSVESLFRSPIKESLFRSSSKESLVRTSSRESLNRLDLDSSTASFDPPSDMDSEAEDLVGNSDSLNKEQLIQRLRRMERSLSSYRGKYSESWLRSSS

SEQ ID NO: 79198 - protein, 80 aa, Homo sapiens
MAEQATKSVLFVCLGNICRSPIAEAVFRKLVTDQNISENWRVDSAATSGYEIGNPPDYRGQSCMKRHGIPMSHVARQRFE

SEQ ID NO: 79199 - protein, 1241 aa, Homo sapiens
MPLHIGDFVWDSKVHSLQSSLNIFSLLPTKGRTEHLFFSHILSFHWPAFSSIRLELWINLRCEFLRSKKSSEEITQYIQSYKGFVDITGEHFVNSWVQRELPMASAYCNDSIFAYEELRLDSFKDWPRESAVGVAALAKAGLFYTGIKDIVQCFSCGGCLEKWQEGDDPLDDHTRCFPNCPFLQNMKSSAEVTPDLQSRGELCELLETTSESNLEDSIAVGPIVPEMAQGEAQWFQEAKNLNEQLRAAYTSASFRHMSLLDISSDLATDHLLGCDLSIASKHISKPVQEPLVLPEVFGNLNSVMCVEGEAGSGKTVLLKKIAFLWASGCCPLLNRFQLVFYLSLSSTRPDEGLASIICDQLLEKEGSVTEMCMRNIIQQLKNQVLFLLDDYKEICSIPQVIGKLIQKNHLSRTCLLIAVRTNRARDIRRYLETILEIKAFPFYNTVCILRKLFSHNMTRLRKFMVYFGKNQSLQKIQKTPLFVAAICAHWFQYPFDPSFDDVAVFKSYMERLSLRNKATAEILKATVSSCGELALKGFFSCCFEFNDDDLAEAGVDEDEDLTMCLMSKFTAQRLRPFYRFLSPAFQEFLAGMRLIELLDSDRQEHQDLGLYHLKQINSPMMTVSAYNNFLNYVSSLPSTKAGPKIVSHLLHLVDNKESLENISENDDYLKHQPEISLQMQLLRGLWQICPQAYFSMVSEHLLVLALKTAYQSNTVAACSPFVLQFLQGRTLTLGALNLQYFFDHPESLSLLRSIHFPIRGNKTSPRAHFSVLETCFDKSQVPTIDQDYASAFEPMNEWERNLAEKEDNVKSYMDMQRRASPDLSTGYWKLSPKQYKIPCLEVDVNDIDVVGQDMLEILMTVFSASQRIELHLNHSRGFIESIRPALELSKASVTKCSISKLELSAAEQELLLTLPSLESLEVSGTIQSQDQIFPNLDKFLCLKELSVDLEGNINVFSVIPEEFPNFHHMEKLLIQISAEYDPSKLVKLIQNSPNLHVFHLKCNFFSDFGSLMTMLVSCKKLTEIKFSDSFFQAVPFVASLPNFISLKILNLEGQQFPDEETSEKFAYILGSLSNLEELILPTGDGIYRVAKLIIQQCQQLHCLRVLSFFKTLNDDSVVEIAKVAISGGFQKLENLKLSINHKITEEGYRNFFQALDNMPNLQELDISRHFTECIKAQATTVKSLSQCVLRLPRLIRLNMLSWLLDADDIALLNVMKERHPQSKYLTILQKWILPFSPIIQK

SEQ ID NO: 79200 - protein, 328 aa, Homo sapiens
  MOD_RES (1)..(1): Any amino acid
XATLQQLEPVTGQVSVLVMCHTRELAFQISKEYERFSKYMPNVKVAVFFGGLSIKKDEEVLKKNCPHIVVGTPGRILALARNKSLNLKHIKHFILDECDKMLEQLDMRRDVQEIFRMTPHEKQVMMFSATLSKEIRPVCRKFMQDPMEIFVDDETKLTLHGLQQYYVKLKDNEKNRKLFDLLDVLEFNQVVIFVKSVQRCIALAQLLVEQNFPAIAIHRGMPQEERLSRYQQFKDFQRRILVATNLFGRGMDIERVNIAFNYDMPEDSDTYLHRVARAGRFGTKGLAITFVSDENDAKILNDVQDRFEVNISELPDEIDISSYIEQTR

SEQ ID NO: 79201 - protein, 598 aa, Homo sapiens
  MOD_RES (1)..(1): Any amino acid
XMCSEARLARRLRDALREEEPWAVEELLRCGADPNLVLEDGAAAVHLAAGARHPRGLRCLGALLRQGGDPNARSVEALTPLHVAAAWGCRRGLELLLSQGADPALRDQDGLRPLDLALQQGHLECARVLQDLDTRTRTRTRIGAETQEPEPAPGTPGLSGPTDETLDSIALQKQPCRGDNRDIGLEADPGPPSLPVPLETVDKHGSSASPPGHWDYSSDASFVTAVEVSGAEDPASDTPPWAGSLPPTRQGLLHVVHANQRVPRSQGTEAELNARLQALTLTPPNAAGFQSSPSSMPLLDRSPAHSPPRTPTPGASDCHCLWEHQTSIDSDMATLWLTEDEASSTGGREPVGPCRHLPVSTVSDLELLKGLRALGPEFSGHSLELAAALRTGCIPDVQADEDALAQQFEQPDPARRWREGVVKSSFTYLLLDPRETQDLPARAFSLTPAERLQTFIRAIFYVGKGTRARPYVHLWEALGHHGRSRKQGSRRSPTRSKGTAMEWWQAGHLLVAGAWGCTCCTVPSLSSWLKASDSFIPRTSRPGAECWGVGHPAWGEMFECSSCPMLTAAPISGFRRGVCVCVCVCVCVCVCLCVCVCV

SEQ ID NO: 79202 - protein, 60 aa, Homo sapiens
MPGPQGGRGAATMSLGKLSPVGWVSSSQGKRRLTADMISHPLGDFRHTMHVGRGGDVFGD

SEQ ID NO: 79203 - protein, 138 aa, Homo sapiens
MAEGLWEQGFLRTPEQCRTKFKSLQLSYRKVRRGRVPEPCIFYEEMNALSGSWASAPPMASDAVPGQEGSDIEAGELNHQNGEPTEVEDGTVDGADRDEKDFRNPGQEVRKLDLPVLFPNRLGKTPLALMVKGWQSPL

SEQ ID NO: 79204 - protein, 125 aa, Homo sapiens
MEERKHETMNPAHVLFDRFVQATTCKGTLKAFQELCDHLELKPKDYRSFYHKLKSKLNYWKAKALWAKLDKRGSHKDYKKGKACTNTKCLIIGAGPCGLRTAIDLSLLGAKVVVIEKRDAFSRNN

SEQ ID NO: 79205 - protein, 758 aa, Homo sapiens
MTRRCMPARPGFPSSPAPGSSPPRCHLRPGSTAHAAAGKRTESPGDRKQSIIDFFKPASKQDRHMLDSPQKSNIKYGGSRLSITGTEQFERKLSSPKESKPKRVPPEKSPIIEAFMKGVKEHHEDHGIHESRRPCLSLASKYLAKGTNIYVPSSYHLPKEMKSLKKKHRSPERRKSLFIHENNEKNDRDRGKTNADSKKQTTVAEADIFNNSSRSLSSRSSLSRHHPEESPLGAKFQLSLASYCRERELKRLRKEQMEQRINSENSFSEASSLSLKSSIERKYKPRQEQRKQNDIIPGKNNLSNVENGHLSRKRSSSDSWEPTSAGSKQNKFPEKRKRNSVDSDLKSTRESMIPKARESFLEKRPDGPHQKEKFIKHIALKTPGDVLRLEDISKEPSDETDGSSAGLAPSNSGNSGHHSTRNSDQIQVAGTKETKMQKPHLPLSQEKSAIKKASNLQKNKTASSTTKEKETKLPLLSRVPSAGSSLVPLNAKNCALPVSKKDKERSSSKECSGHSTESTKHKEHKAKTNKADSNVSSGKISGGPLRSEYGTPTKSPPAALEVVPCIPSPAAPSDKAPSEGESSGNSNAGSSALKRKLRGDFDSDEESLGYNLDSDEEEETLKSLEEIMALNFNQTPAATGKPPALSKGLRSQSSDYTGHVHPGTYTNTLERLVKEMEDTQRFVSIKINLLNLTFCLFVWLTFNLPFLKNHEKLACILDSVVNCVRIRYVGRTQWLMPVITTLWETQARLLEPRSSRLR

SEQ ID NO: 79206 - protein, 54 aa, Homo sapiens
MASVVPVKDKKLLEVKLGELPSWILMRDFSPSGIFGAFQRGYGQAASVEGAYRL

SEQ ID NO: 79207 - protein, 276 aa, Homo sapiens
MPKVKSGAIGRRRGRQEQRRELKSAGGLMFNTGIGQHILKNPLIINSIIDKVVACELDPRLVAELHKRVQGTPVASKLQVLVGDVLKTDLPFFDTCVANLPYQLLLHRPFFRCAILMFQREFALRLVAKPGDKLYCRLSINTQLLARVDHLMKVGKNNFRPPPKVESSVVRIEPKNPPPPINFQEWDGLVRITFVRKNKTLSAAFKSSAVQQLLEKNYRIHCSVHNIIIPEDFSIADKIQQILTSTGFSDKRARSMDIDDFIRLLHGFNAEGIHFS

SEQ ID NO: 79208 - protein, 143 aa, Homo sapiens
MVVGTGTSLALSSLLSLLLFAGMQMYSRQLASTEWLTIQGGLLGSGLFVFSLTAFNNLENLVFGKGFQAKIFPEILLCLLLALFASGLIHRVCVTTWYLHLLHGWSVLHQQDLLHPVPGSSSSPHTSQGHRQEQEEKLTLNVQ

SEQ ID NO: 79209 - protein, 1122 aa, Homo sapiens
EAQKINNGSSQADGTLKPVDEKEEAVAAEVGWMTSVKDWAGVMISAQTLTGRVLVVLVFALSIGALVIYFIDSSNPIESCQNFYKDFTLQIDMAFNVFFLLYFGLRFIAANDKLWFWLEVNSVVDFFTVPPVFVSVYLNRSWLGLRFLRALRLIQFSEILQFLNILKTSNSIKLVNLLSIFISTWLTAAGFIHLVENSGDPWENFQNNQALTYWECVYLLMVTMSTVGYGDVYAKTTLGRLFMVFFILGGLAMFASYVPEIIELIGNRKKYGGSYSAVSGRKHIVVCGHITLESVSNFLKDFLHKDRDDVNVEIVFLHNISPNLELEALFKRHFTQVEFYQGSVLNPHDLARVKIESADACLILANKYCADPDAEDASNIMRVISIKNYHPKIRIITQMLQYHNKAHLLNIPSWNWKEGDDAICLAELKLGFIAQSCLAQGLSTMLANLFSMRSFIKIEEDTWQKYYLEGVSNEMYTEYLSSAFVGLSFPTVCELCFVKLKLLMIAIEYKSANRESRSRKRILINPGNHLKIQEGTLGFFIASDAKEVKRAFFYCKACHDDITDPKRIKKCGCKRLKVAARSRYSKDPFEFKKETPNSRLVTEPVEDEQPSTLSPKKKQRNGGMRNSPNTSPKLMRHDPLLIPGNDQIDNMDSNVKKYDSTGMFHWCAPKEIEKVILTRSEAAMTVLSGHVVVCIFGDVSSALIGLRNLVMPLRASNFHYHELKHIVFVGSIEYLKREWETLHNFPKVSILPGTPLSRADLRAVNINLCDMCVILSANQNNIDDTSLQDKECILASLNIKSMQFDDSIGVLQANSQGFTPPGMDRSSPDNSPVHGMLRQPSITTGVNIPIITELAKPGKLPLVSVNQEKNSGTHILMITELVNDTNVQFLDQDDDDDPDTELYLTQPFACGTAFAVSVLDSLMSATYFNDNILTLIRTLVTGGATPELEALIAEENALRGGYSTPQTLANRDRCRVAQLALLDGPFADLGDGGCYGDLFCKALKTYNMLCFGIYRLRDAHLSTPSQCTKRYVITNPPYEFELVPTDLIFCLMQFDHNAGQSRASLSHSSHSSQSSSKKSSSVHSIPSTANRQNRPKSRESRDKQNATRMNRMGQGMTINGSA

SEQ ID NO: 79210 - protein, 808 aa, Homo sapiens
MAELLASAGSACSWDFPRAPPSFPPPAASRGGLGGTRSFRPHRGAESPRPGRDRDGVRVPMASSRCPAPRGCRCLPGASLAWLGTVLLLLADWVLLRTALPRIFSLLVPTALPLLRVWAVGLSRWAVLWLGACGVLRATGGSKSENAGAQGWLAALKPLAAALGLALPGLALFRELISWGAPGSADSTRLLHWGSHPTAFVVSYAAALPAAALWHKLGSLWVPGGQGGSGNPVRRLLGCLGSETRRLSLFLVLVVLSSLGEMAIPFFTGRLTDWILQDGSADTFTRNLTLMSILTIASAVLEFVGDGIYNNTMGHVHSHLQGEVFGAVLRQETEFFQQNQTGNIMSRVTEDTSTLSDSLSENLSLFLWYLVRGLCLLGIMLWGSVSLTMVTLITLPLLFLLPKKVGKWYQLLEVQVRESLAKSSQVAIEALSAMPTVRSFANEEGEAQKFREKLQEIKTLNQKEAVAYAVNSWTTSISGMLLKVGILYIGGQLVTSGAVSSGNLVTFVLYQMQFTQAVEVLLSIYPRVQKAVGSSEKIFEYLDRTPRCPPSGLLTPLHLEGLVQFQDVSFAYPNRPDVLVLQGLTFTLRPGEVTALVGPNGSGKSTVAALLQNLYQPTGGQLLLDGKPLPQYEHRYLHRQVAAVGQEPQVFGRSLQENIAYGLTQKPTMEEITAAAVKSGAHSFISGLPQGYDTEVDEAGSQLSGGQRQAVALARALIRKPCVLILDDATSALDANSQLQVEQLLYESPERYSRSVLLITQHLSLVEQADHILFLEGGAIREGGTHQQLMEKKGCYWAMVQAPADAPE

SEQ ID NO: 79211 - protein, 124 aa, Homo sapiens
MERPQPDSMPQDLSEALKEATKEVHTQAENAEFMRNFQKGQVTRDGFKLFEELQELLTHDTKDQSPSRAPGLRQRASNKVQDSAPVETPRGKPPLNTRSQAPLLRWVLTLSFLVATVAVGLYAM

SEQ ID NO: 79212 - protein, 191 aa, Homo sapiens
MVSNFFHVIQVFEKSATLISKTEHIGFVIYSWRKSTTHLGSRRKFAISIYLSEVSLQKYDCPFSGTSFVVFSLFLICAMAGDVVYADIKTVRTSPLELAFPLQRSVSFNFSTVHKSCPAKDWKVHKGKCYWIAETKKSWNKSQNDCAINNSYLMVIQDITAMLITFLLYLQMAFLQCVYISDVSVYPNFFL

SEQ ID NO: 79213 - protein, 215 aa, Homo sapiens
MNLHMRMTAFCKDHDSRSGKQPSQTLSPSDFLDKLMGRTSGYDARIRPNFKGPPVNVTCNIFINSFGSVTETTMDYRVNIFLRQQWNDSRLAYSEYPDDSLDLDPSMLDSIWKPDLFFANEKGANFHDVTTDNKLLRISKNGKVLYSIRLTLTLSCPMDLKNFPMDVQTCTMQLESFGYTMNDLIFEWLSDGPVQVAEGLTLPQFILKEEKELGY

SEQ ID NO: 79214 - protein, 128 aa, Homo sapiens
MLTARLPGKPSADESQAVQIHMGLALGMFLSRLCEEKLSDISGQEMNLLLMKSLDALENCCFDTSLEYNTGCILGVGLVLSLMSHSSQMQSRVHVAALLRKLSAHVDDSGSQSRTFQEVLAYTLSCVC

SEQ ID NO: 79215 - protein, 79 aa, Homo sapiens
MGEFNEKKTTCGTVCLKYLLFTYNCCFWLAGLAVMAVGIWTLALKSDYISLLASGTYLATAYILVVAGTVVMVTGVLGC

SEQ ID NO: 79216 - protein, 138 aa, Homo sapiens
MSRRKQTNPNKVHWDQVFAGLEEQARQAMMKTDFPGDLGSQRQAIQQLRDQDSSSSDSEGDEEETTQDEVSSHTSEEDGGVVKVEKELENTEQPVGGNEVVEHEARNLNSDPLLELCQCPLCQLDCGSREQLIAHVYQ

SEQ ID NO: 79217 - protein, 254 aa, Homo sapiens
MGPIGVKKHLAPFLPNHPVISLKRNEDACPVGTVSAAPWGSSSILPISWAYIKMMGGKGLKQATETAILNANYMAKRLETHYRILFRGARGYVGHEFILDTRPFKKSANIEAVDVAKRLQDYGFHAPTMSWPVAGTLMVEPTESEDKAELDRFCDAMISIRQEIADIEEGRIDPRVNPLKMSPHSLTCVTSSHWDRPYSREVAAFPLPFVKPENKFWPTIARIDDIYGDQHLVCTCPPMEVYESPFSEQKRASS

SEQ ID NO: 79218 - protein, 512 aa, Homo sapiens
MPPNINWKEIMKVDPDDLPRQEELADNLLISLSKVEVNELKSEKQENVIHLFRITQSLMKMKAQEVELALEEVEKAGEEQAKFENQLKTKVMKLENELEMAQQSAGGRDTRFLRNEICQLEKQLEQKDRELEDMEKELEKEKKVNEQLALRNEEAENENSKLRRENKRLKKKNEQLCQDIIDYQKQIDSQKETLLSRRGEDSDYRSQLSKKNYELIQYLDEIQTLTEANEKIEVQNQEMRKNLEESVQEMEKMTDEYNRMKAIVHQTDNVIDQLKKENDHYQLQVQELTDLLKSKNEEDDPIMVAVNAKVEEWKLILSSKDDEIIEYQQMLHNLREKLKNAQLDADKSNVMALQQGIQERDSQIKMLTEQVEQYTKEMEKNTCIIEDLKNELQRNKGASTLSQQTHMKIQSTLDILKEKTKEAERTAELAEADAREKDKELVEALKRLKDYESGVYGLEDAVVEIKNCKNQIKIRDREIEILTKEINKLELKISDFLDENEALRERALNQRQ

SEQ ID NO: 79219 - protein, 51 aa, Homo sapiens
MYLQVETRTSSRLHLKRAPGIRSWSLLVGRQSLSLHRNLVDWPGCCLLQRR

SEQ ID NO: 79220 - protein, 189 aa, Homo sapiens
MTEMSFLSSEVLVGDLMSPFDQSGLGAEESLGLLDDYLEVAKHFKPHGFSSDKAKAGSSEWLAVDGLVSPSNNSKEDAFSGTDWMLEKMDLKEFDLDALLGIDDLETMPDDLLTTLDDTCDLFAPLVQETNKQPPQTVNPIGHLPESLTKPDQVAPFTFLQPLPLSPGVLSSTPDHSFSLELGSEVDIT

SEQ ID NO: 79221 - protein, 66 aa, Homo sapiens
MPSAFSVSSFPVSIPAVLTVQQGPGESRRRRSAALSGEFSVLQRGWRKSSLARGDGSRFPEVFSAD

SEQ ID NO: 79222 - protein, 236 aa, Homo sapiens
MDLLGPSLEDLFNFCSRRFTMKTVLMLADQMISRIEYVHTKNFIHRDIKPDNFLMGIGRHCNKLFLIDFGLAKKYRDNRTRQHIPYREDKNLTGTARYASINAHLGIEQSRRDDMESLGYVLMYFNRTSLPWQGLKAATKKQKYEKISEKKMSTPVEVLCKGFPAEFAMYLNYCRGLRFEEAPDYMYLRQLFRILFRTLNHQYDYTFDWTMLKQKAAQQAASSSGQGQQAQTPTGF

SEQ ID NO: 79223 - protein, 88 aa, Homo sapiens
KWFVSESFWNWLNKLLKTLLEKSSDRRRSSMPVIQSRDPLGFSWWIITHVASFYKFDRHGVPDEMRKVESNWNFVEELLKKSISVQSC

SEQ ID NO: 79224 - protein, 80 aa, Homo sapiens
ERAIYAALSGNLKQLLPVCDTWEDTVWAYFRVMVDSLVEQEIQTSVATLDETEELPREYLGANWTLEKVFEELQATDKKV

SEQ ID NO: 79225 - protein, 123 aa, Homo sapiens
MEEGGNLGGLIKMVHLLVLSGAWGMQMWVTFVSALPAVPEPYAGHCQRPLAGTPHHSCHVGPANRGEGARPGWGGTRQPPGSRSLPPAAREGPQVQCSPPEFLPLPWAVLSLQSGLRPEQWAL

SEQ ID NO: 79226 - protein, 34 aa, Homo sapiens
MYNMANTSKRGVVILQNKSDDLPHWVLSAMKCLA

SEQ ID NO: 79227 - protein, 566 aa, Homo sapiens
MTVLEITLAVILTLLGLAILAILLTRWARRKQSEMYISRYSSEQSARLLDYEDGRGSRHAYHKVTLHMITERISKRDYTPSTNSLALSRSSIALPQGSMSSIKCLQTTEEPPSRTAGAMMQFTAPIQPELQDLSSSLKKPLCKLQDIGYNTWVTDQIASSHNHTVHLQHPGPPMAPIIISQRTASQLAAPIRIPQVHTMDSSGKITLTPVVILTGYMDEELAKKSCSKIQILKCGGTARSQNSREENKEALKNDIIFTNSVESLKSAHIKEPEREGKGTDLEKDKIGMEVKVDSDAGIPKRQETQLKISDECTTRTGSPNKEKCVRCTKRTGQVKKSESGVPKGQEAQVTKSGLVVLKGQEAQVEKSEMGVPRRQESQVKKSQSGVSKGQEAQVKKRESVVLKGQEAQVEKSELKVPKGQEGQVEKTEADVPKEQEVQEKKSEAGVLKGPESQVKNTEVSVPETLESQVKKSESGVLKGQEAQEKKESFEDKGNNDKEKERDAEKDPNKKEKGDKNTKGDKGKDKVKGKRESEINGEKSKGSKRRQIQEGSTTKKWKSKDKFFKGP

SEQ ID NO: 79228 - protein, 513 aa, Homo sapiens
MAAGGDHGSPDSYRSPLASRYASPEMCFVFSDRYKFRTWRQLWLWLAEAEQTLGLPITDEQIQEMKSNLENIDFKMAAEEEKRLRHDVMAHVHTFGHCCPKAAGIIHLGATSCYVGDNTDLIILRNALDLLLPKSLILSRGVIKAYCNLRLPGSDSSPVSVSQLARVISRLADFAKERASLPTLGFTHFQPAQLTTVGKRCCLWIQDLCMDLQNLKRVRDDLRFRGVKGTTGTQASFLQLFEGDDHKVEQLDKMVTEKAGFKRAFIITGQTYTRKVDIEVLSVLASLGASVHKICTDIRLLANLKEMEEPFEKQQIGSSAMPYKRNPMRSERCCSLARHLMTLVMDPLQTASVQWFERTLDDSANRRICLAEAFLTADTILNTLQNISEGLVVYPKVIERRIRQELPFMATENIIMAMVKAGGSRQDCHEKIRVLSQQAASVVKQEGGDNDLIERIQVDAYFSPIHSQLDHLLDPSSFTGRASQQVQRFLEEEVYPLLKPYESVMKVKAELCL

SEQ ID NO: 79229 - protein, 66 aa, Homo sapiens
MEYDEKLARFRQAHLNPFNKQSGPRQHEQGPGEEVPDVTPEEALPELPPGEPEFRCPERVMDLGLS

SEQ ID NO: 79230 - protein, 275 aa, Homo sapiens
MAAAVRQDLAQLMNSSGSHKDLAGKQYNVDYKLETYLKIARLYLEDDDPVQAEAYINRASLLQNESTNEQLQIHYKVCYARVLDYRRKFIEAAQRYNELSYKTIVHESERLEALKHALHCTILASAGQQRSRMLATLFKDERCQQLAAYGILEKMYLDRIIRGNQLQEFAAMLMPHQKATTADGSSILDRAVIEHNLLSASKLYNNITFEELGALLEIPAAKAEKIASQMITEGRMNGFIDQIDGIVHFETREALPTWDKQIQSLCFQVNNLLEK

SEQ ID NO: 79231 - protein, 144 aa, Homo sapiens
  MOD_RES (1)..(1): Any amino acid
XEVRLPNGVHARRRASVQPPAVQELCPPGHRENVLALDIFFEALNYETVEQKKAYEMSELLGDIGGQMGLFIGASLLTILEILDYLCEVFRDKVLGYFWNRQHSQRHSSTNLLQEGLGSHRTQVPHLSLGPSSRPAVCVLGAPP

SEQ ID NO: 79232 - protein, 52 aa, Homo sapiens
MSLPSRQTAIIVNPPPPEYINTKKNGRLTNQLQYLQKVVLKDLWKHSFSWPF

SEQ ID NO: 79233 - protein, 583 aa, Homo sapiens
MSGVRGLSRLLSARRLALAKAWPTVLQTGTRGFHFTVDGNKRASAKVSDSISAQYPVVDHEFDAVVVGAGGAGLRAAFGLSEAGFNTACVTKLFPTRSHTVAAQGGINAALGNMEEDNWRWHFYDTVKGSDWLGDQDAIHYMTEQAPAAVVELENYGMPFSRTEDGKIYQRAFGGQSLKFGKGGQAHRCCCVADRTGHSLLHTLYGRSLRYDTSYFVEYFALDLLMENGECRGVIALCIEDGSIHRIRAKNTVVATGGYGRTYFSCTSAHTSTGDGTAMITRAGLPCQDLEFVQFHPTGIYGAGCLITEGCRGEGGILINSQGERFMERYAPVAKDLASRDVVSRSMTLEIREGRGCGPEKDHVYLQLHHLPPEQLATRLPGISETAMIFAGVDVTKEPIPVLPTVHYNMGGIPTNYKGQVLRHVNGQDQIVPGLYACGEAACASVHGANRLGANSLLDLVVFGRACALSIEESCRPGDKVPPIKPNAGEESVMNLDKLRFADGSIRTSELRLSMQKVRIDEYDYSKPIQGQQKKPFEEHWRKHTLSYVDVGTGKVTLEYRPVIDKTLNEADCATVPPAIRSY

SEQ ID NO: 79234 - protein, 163 aa, Homo sapiens
MRKGRKVPMYVPGVLRTYPKAKLEETCEGRNSCVSCFNVSVVNTTCFWIECKDESYCSHNSTVSDCQVGNTTDFCSVSTATPVPTANSTAKPTVQPSPSTTSKTVTTSGTTNNTVTPTSQPVRKSTFDAASFIGGIVLVLGVQAVIFFLYKFCKSKERNYHTL

SEQ ID NO: 79235 - protein, 78 aa, Homo sapiens
  MOD_RES (1)..(1): Any amino acid
XIVRLNNVQEGKQIETLVQILEDLLVFTYSERASKLFQGKNIHVPLLIVLDSYMRVASVQQRWSLAMLPRWVGHFCAN

SEQ ID NO: 79236 - protein, 40 aa, Homo sapiens
MASRQPEVPETKVTEWRGNKRREAACISPVHPKHHSALFT

SEQ ID NO: 79237 - protein, 208 aa, Homo sapiens
SNHTGDLDTGSALVLTIESTLITACSSESLVSKGHFKNFCIRFADGFETSWDDWKPEIHGDLVMNACVVPDGTYEVCSRTTGQAAAGEEDIDDIADLNSVNIADLSDEDEVDTMSPTIHTSSDGSSISGDGHKLTFGQRLVNHLLGLTPPNQRHSVPAEYLCDPEMWGSPQSSQSHLKACRAHSWGNEATDYRRQAASASQPGELRGR

SEQ ID NO: 79238 - protein, 57 aa, Homo sapiens
RREEGDPSPHSGTAFILVLFCCFSPKKPVYFPNSDASLRHFIYVFMCSESPLRVSVT

SEQ ID NO: 79239 - protein, 103 aa, Homo sapiens
LQAIDLVYIDFRDGAGLLRQSREGAAMGFTGKQVIHPNQIAVVQEQFSPSPEKIKWAEELIAAFKEHQQLGKGAFTFQGSMIDMPLLKQAQNTVTLATSIKEK

SEQ ID NO: 79240 - protein, 138 aa, Homo sapiens
MAEKFDCHYCRDPLQGKKYVQKDGHHCCLKCFDKFCANTCVECRKPIGADSKEVHYKNRFWHDTCFRCAKCLHPLANETFVAKDNKILCNKCTTREDSPKCKGCFKAIVAGDQNVEYKGTVWHKDCFTCSNCKQVIGT

SEQ ID NO: 79241 - protein, 454 aa, Homo sapiens
MPQALERADGSWAWVVLLATMVTQGLTLGFPTCIGIFFTELQWEFQASNSETSWFPSILTAVLHMAGPLCSILVGRFGCRVTVMLGGVLASLGMVASSFSHNLSQLYFTAGFITGLGMCFSFQSSITVLGFYFVRRRVLANALASMGVSLGITLWPLLSRYLLENLGWRGTFLVFGGIFLHCCICGAIIRPVATSVAPETKECPPPPPETPALGCLAACGRTIQRHLAFDILRHNTGYCVYILGVMWSVLGFPLPQVFLVPYAMWHSVDEQQAALLISIIGFSNIFLRPLAGLMAGRPAFASHRKYLFSLALLLNGLTNLVCAASGDFWVLVGYCLAYSVSMSGIGALIFQVLMDIVPMDQFPRALGLFTVLDGLAFLISPPLAGLLLDATNNFSYVFYMSSFFLISAALFMGGSFYALQKKEQGKQAVAADALERDLFLEAKDGPGKQRSPEI

SEQ ID NO: 79242 - protein, 413 aa, Homo sapiens
MSKGLPARQDMEKERETLQAWKERVGQELDRVVAFWMEHSHDQEHGGFFTCLGREGRVWMYCRLYRTFERFRHAQLLDAAKAGGEFLLRYARVAPPGKKCAFVLTRDGRPVKVQRTIFSECFYTMAMNELWRATGEVRYQTEAVEMMDQIVHWVQEDASGLGRPQLQGAPAAEPMAVPMMLLNLVEQLGEADEELAGKYAELGDWCARRILQHVQRDGQAVLENVSEGGKELPGCLGRQQNPGHTLEAGWFLLRHCIRKGDPELRAHVIDKFLLLPFHSGWDPDHGGLFYFQDADNFCPTQLEWAMKLWWPHSEAMIAFLMGYSDSGDPVLLRLFYQVAEYTFRQFRDPEYGEWFGYLSREGKVALSIKGGPFKGCFHVPRCLAMCEEMLGALLSRPAPAPSPAPTPACRGAE

SEQ ID NO: 79243 - protein, 284 aa, Homo sapiens
MPKVKSGAIGRRRGRQEQRRELKSAGGLMFNTGIGQHILKNPLIINSIIDKVVACELDPRLVAELHKRVQGTPVASKLQVLVGDVLKTDLPFFDTCVANLPYQISSPFVFKLLLHRPFFRCAILMFQREFALRLVAKPGDKLYCRLSINTQLLARVDHLMKVGKNNFRPPPKVESSVVRIEPKNPPPPINFQEWDGLVRITFVRKNKTLSAAFKSSAVQQLLEKNYRIHCSVHNIIIPEDFSIADKIQQILTSTGFSDKRARSMDIDDFIRLLHGFNAEGIHFS

SEQ ID NO: 79244 - protein, 82 aa, Homo sapiens
MEASVLSPTSWEKRRAWLRQSRNWQTQVLEEEAAAALQDVPDPEPSSLDDVFQEGNPINKIEDWLQDCGYSEEGFSEEAGQF

SEQ ID NO: 79245 - protein, 71 aa, Homo sapiens
MAKATSGAAGLRLLLLLLLPLLGKDRESLCGKLPGIQWHQRPVQAAFLWCQLQHARGGHLSRGHLGDPVCE

SEQ ID NO: 79246 - protein, 186 aa, Homo sapiens
MRDNRAVSLCQQEWMCPGPAQRALYRGATQRKDSHVSLATGVPWGYEETKTLLAILSSSQFYGKLQTCQQNSQIYRAMAEGLWEQGFLRTPEQCRTKFKSLQLSYRKVRRGRVPEPCIFYEEMNALSGSWASAPPMASDAVPGQEGSDIEAGELNHQNGEPTEVEDGTVDGADRDEKDFRNPGQEV

SEQ ID NO: 79247 - protein, 96 aa, Homo sapiens
MQEKAHTGEKLYDCKECGKTFISHSSIQRHMIMHNGDGTYKCKFCGKACPCLSIYLIHERVHTGEKPYKCKQCGKAFSYSTSLQIHERTHTGEKPY

SEQ ID NO: 79248 - protein, 45 aa, Homo sapiens
  MOD_RES (1)..(1): Any amino acid
XKALERWPSTSPKGERRPLTAKDTFPQETSRPSVAKQLLAGTPQS

SEQ ID NO: 79249 - protein, 105 aa, Homo sapiens
VPDYLDHIKKPMDFFTMKQNLEAYRYLNFDDFEEDFNLIVSNCLKYNAKDTIFYRAAVRLREQGGAVLRQARRQAEKMGIDFETGMHIPHSLAGDEATHHTEDGG

SEQ ID NO: 79250 - protein, 375 aa, Homo sapiens
MLRLPTVFRQMRPVSRVLAPHLTRAYAKDVKFGADARALMLQGVDLLADAVAVTMGPKGRTVIIEQSWGSPKVTKDGVTVAKSIDLKDKYKNIGAKLVQDVANNTNEEAGDGTTTATVLARSIAKEGFEKISKGANPVEIRRGVMLAVDAVIAELKKQSKPVTTPEEIAQVATISANGDKEIGNIISDAMKKVGRKGVITVKDGKTLNDELEIIEGMKFDRGYISPYFINTSKGQKCEFQDAYVLLSEKKISSIQSIVPALEIANAHRKPLVIIAEDVDGEALSTLVLNRLKVGLQVVAVKAPGFGDNRKNQLKDMAIATGGATGCLDLSPRLECSGTILAYCNLHLLGSSNPPVSASQVAGTTGVWRRGIDPES

SEQ ID NO: 79251 - protein, 114 aa, Homo sapiens
MPPPPEGQPCHLSLPHHHSPPPIKLQSGCWTPLGAVSAHHPLCGATWSQAHCPLAGRGPSRRRCGLHRAPSTKESANASAGPRAMASLLQLMAAPTSSCTSLMWKGSMSQWKAT

SEQ ID NO: 79252 - protein, 326 aa, Homo sapiens
  MOD_RES (1)..(1): Any amino acid
XVAEVFIYWSKSHNFKREEQNFVVQNEINNMSFLITDTKSKMSKAAVSDQERKKMKRKGDRYSMQTSLIVAALKRLLPIGLNICAPGDQELIALAKNRFSLKDTEDEVRDIIRSNIHLQGKLEDPAIRWQMALYKDLPNRTDDTSDPEKTVERVLDIANVLFHLEQKSKRVGRRHYCLVEHPQRSKKAVWHKLLSKQRKRAVVACFRMAPLYNLPRHRAVNLFLQGYEKSWIETEEHYFEDKLIEDLAKPGAEPPEEDEGTKRVDPLHQLILLFSRTALTEKCKLEEDFLYMAYADIMAKSCHDEEDDDGEEEVKSFEVTGSQRSK

SEQ ID NO: 79253 - protein, 60 aa, Homo sapiens
MVDYSVWDHIEVSDDEDETHPNIDTASLFRWRHQTGPCFVTLRWQWRHLSSLQLPPSGLK

SEQ ID NO: 79254 - protein, 216 aa, Homo sapiens
MMNTPVINAAVEMGFSRSLVKQTVQRKILATGENYRLVNDLVLDLLNAEDEIREEERERATEEKESNDLLLIRKNRMALFQHLTCVIPILDSLLTAGIINEQEHDVIKQKTQTSLQARELIDTILVKGNIAATVFRNSLQEAEAVLYEHLFVQQDIKYIPTEDVSDLPVEEQLRRLQEERTCKVCMDKEVSIVFIPCGHLVVCKDCAPSLRKCPIC

SEQ ID NO: 79255 - protein, 84 aa, Homo sapiens
MSVAFAAPRQRGKGEITPAAIQKMLDDNNHLIQCIMDSQNKGKTSECSQVMNKPHLLVWFGQWSSENLMSCNHTNTQAKENLKA

SEQ ID NO: 79256 - protein, 184 aa, Homo sapiens
  MOD_RES (1)..(1): Any amino acid
XVYRFTKYQGDPTTQPARNARGLGHNGSGTAAGIRVRSAASQARAVWDPSARTPAPAKEPGEPLLGDAWAPGAAGPRAGAASVTGRYPGMAQLERSAISGFSSKSRRNSFAYDVKREVYNEETFQQEHKRKASSSGNMNINITTFRHHVQCRMDVYVSIKGLASGRLTCWYKCWPCASSPRPDT

SEQ ID NO: 79257 - protein, 171 aa, Homo sapiens
METFPLLLLSLGLVLAEASESTMKIIKEEFTDEEMQYDMAKSGQEKQTIEILMNPILLVKNTSLSMSKDDMSSTLLTFRSLHYNDPKGNSSGNDKECCNDMTVWRKVSEANGSCKWSNNFIRSSTEVMRRVHRAPSCKFVQNPGISCCESLELENTVCQFTTGKQFPRCQY

SEQ ID NO: 79258 - protein, 28 aa, Homo sapiens
EILENWNMFVGSQATNYGEDLTKNHDEL

SEQ ID NO: 79259 - protein, 341 aa, Homo sapiens
  MOD_RES (1)..(1): Any amino acid
XVVRTMSTEQARSGEGPMSKFARGSRFSVAEHQERYKEECQRIFDLQNKVLSSTEVLSTDTDSSSAEDSDFEEMGKNIENMLQNKKTSSQLSREREEQERKELQRMLLAGSAASGNNHRDDDTASVTSLNSSATGRCLKIYRTFRDEEGKEYVRCETVRKPAVIDAYVRIRTTKDEEFIRKFALFDEQHREEMRKERRRIQEQLRRLKRNQEKEKLKGPPEKKPKKMKERPDLKLKCGACGAIGHMRTNKFCPLYYQTNAPPSNPVAMTEEQEEELEKTVIHNDNEELIKVEGTKIVLGKQLIESADEVRRKSLVLKFPKQQLPPKKKRRVGTTVHCDYLN

SEQ ID NO: 79260 - protein, 158 aa, Homo sapiens
MHLLGPWLLLLEYLAFSDSSKWVFEHPETLYAWEGACVWIPCTYRALDGDLESFILFHNPEYNKNTSKFDGTRLYESTKDGKVPSEQKRVQFLGDKNKNCTLSIHPVHLNDSGQLGLRMESKTEKWMERIHLNVSDPPKKVTTVIQNPMPIREGDTVT

SEQ ID NO: 79261 - protein, 1422 aa, Homo sapiens
MKSCAVSLTTAAVAFGDEAKKMAEGKASRESEEESVSLTVEEREALGGMDSRLFGFVRLHEDGARTKTLLGKAVRCYESLILKAEGKVESDFFCQLGHFNLLLEDYSKALSAYQRYYSLQADYWKNAAFLYGLGLVYFYYNAFHWAIKAFQDVLYVDPSFCRAKEIHLRLGLMFKVNTDYKSSLKHFQLALIDCNPCTLSNAEIQFHIAHLYETQRKYHSAKEAYEQLLQTENLPAQVKATVLQQLGWMHHNMDLVGDKATKESYAIQYLQKSLEADPNSGQSWYFLGRCYSSIGKVQDAFISYRQSIDKSEASADTWCSIGVLYQQQNQPMDALQAYICAVQLDHGHAAAWMDLGTLYESCNQPQDAIKCYLNAARSKRCSNTSTLAARIKFLQNGSDNWNGGQSLSHHPVQQVYSLCLTPQKLQHLEQLRANRDNLNPAQKHQLEQLESQFVLMQQMRHKEVAQVRTTGIHNGAITDSSLPTNSVSNRQPHGALTRVSSVSQPGVRPACVEKLLSSGAFSAGCIPCGTSKILGSTDTILLGSNCIAGSESNGNVPYLQQNTHTLPHNHTDLNSSTEEPWRKQLSNSAQGLHKSQSSCLSGPNEEQPLFSTGSAQYHQATSTGIKKANEHLTLPSNSVPQGDADSHLSCHTATSGGQQGIMFTKESKPSKNRSLVPETSRHTGDTSNGCADVKGLSNHVHQLIADAVSSPNHGDSPNLLIADNPQLSALLIGKANGNVGTGTCDKVNNIHPAVHTKTDHSVASSPSSAISTATPSPKSTEQRSINSVTSLNSPHSGLHTVNGEGLGKSQSSTKVDLPLASHRSTSQILPSMSVSICPSSTEVLKACRNPGKNGLSNSCILLDKCPPPRPPTSPYPPLPKDKLNPPTPSIYLENKRDAFFPPLHQFCTNPKNPVTVIRGLAGALKLDLGLFSTKTLVEANNEHMVEVRTQLLQPADENWDPTGTKKIWRCESNRSHTTIAKYAQYQASSFQESLREENEKRTQHKDHSDNESTSSENSGRRRKGPFKTIKFGTNIDLSDNKKWKLQLHELTKLPAFARVVSAGNLLTHVGHTILGMNTVQLYMKVPGSRTPGHQENNNFCSVNINIGPGDCEWFVVPEDYWGVLNDFCEKNNLNFLMSSWWPNLEDLYEANVPVYRFIQRPGDLVWINAGTVHWVQAVGWCNNIAWNVGPLTACQYKLAVERYEWNKLKSVKSPVPMVHLSWNMARNIKVSDPKLFEMIKYCLLKILKQYQTLREALVAAGKEVIWHGRTNDEPAHYCSICEVEVFNLLFVTNESNTQKTYIVHCHDCARKTSKSLENFVVLEQYKMEDLIQVYDQFTLASPWPPMDQSAFTSSLLRPIKALGSGRAEQTSGDQLQKGATHSRASSLLRAAEMTRRPASREELPDPGLFCHSIKLLFVLFSF

SEQ ID NO: 79262 - protein, 276 aa, Homo sapiens
MCTVVDPRIVRRYLLRRQLGQGAYGIVWKAVDRRTGEVVAIKKIFDAFRDKTDAQRTFREITLLQEFGDHPNIISLLDVIRAENDRDIYLVFEFMGCPPSPPPPTAVRTLSADTDLNAVIRKGGLLQDVHVRSIFYQLLRATRFLHSGHVVHRDQKPSNVLLDANCTVKLCDFGLARSLGDLPEGPEDQAVTEYVATRWYRAPEVLLSSHRYTLGVDMWSLGCILGEMLRGRPLFPGTSTLHQLELILETIPPPSEEDLLALGSGCRASVLHQLGS

SEQ ID NO: 79263 - protein, 601 aa, Homo sapiens
LELYDLQILGTKPPMNSDTHRNFDPTATLRNQGDFTWNSMSGRSVRLRSVPIQSLSELERARLQEVAFYQLQQDCDLSCQITIPKDGQKRKKSLRKKLDSLGKEKNKDKEFIPQAFGMPLSQVIANDRAYKLKQDLQRDEQKDASDFVASLLPFGNKRQNKELSSSNSSLSSTSETPNESTSPNTPEPAPRARRRGAMSVDSITDLDDNQSRLLEALQLSLPAEAQSKKEKARDKKLSLNPIYRQVPRLVDSCCQHLEKHGLQTVGIFRVGSSKKRVRQLREEFDRGIDVSLEEEHSVHDVAALLKEFLRDMPDPLLTRELYTAFINTLLLEPEEQLGTLQLLIYLLPPCNCDTLHRLLQFLSIVARHADDNISKDGQEVTGNKMTSLNLATIFGPNLLHKQKSSDKEFSVQSSARAEESTAIIAVVQKMIENYEALFMVPPDLQNEVLISLLETDPDVVDYLLRRKASQSSSPDMLQSEVSFSVGGRHSSTDSNKASSGDISPYDNNSPVLSERSLLAMQEDAAPGGSEKLYRVPGQFMLVGHLSSSKSRESSPGPRLGKGNWSLASRRWPKQATLLLLHVAWCGALRTFSSSLPYLMFL

SEQ ID NO: 79264 - protein, 56 aa, Homo sapiens
MRILKRFLACIQLLCVCRLDTMQKLHSSVCQNLAASPQRRLENLAFILDGQVLRLG

SEQ ID NO: 79265 - protein, 86 aa, Homo sapiens
MLRRLDKIRFRGHKRDDFLDLAESPNASDTECSDEIPLKVPRTSPRDSEELRDPAGPGTLIMATGVQDFNRTEFDRLNEIKGHLEI

SEQ ID NO: 79266 - protein, 272 aa, Homo sapiens
MQFLEEVQPYRALKHSNLLQCLAQCAEVTPYLLVMEFCPLGDLKGYLRSCRVAESMAPDPRTLQRMACEVACGVLHLHRNNFVHSDLALRNCLLTADLTVKIGDYGLAHCKYREDYFVTADQLWVPLRWIAPELVDEVHSNLLVVDQTKSGNVWSLGVTIWELFELGTQPYPQHSDQQVLAYTVREQQLKLPKPQLQLTLSDRWYEVMQFCWLQPEQRPTAEEVHLLLSYLCAKGATEAEEEFERRWRSLRPGGGGVGPGPGAAGPMLGGVV

SEQ ID NO: 79267 - protein, 18 aa, Homo sapiens
MSEPQEKKLSENTDFLAP

SEQ ID NO: 79268 - protein, 100 aa, Homo sapiens
  MOD_RES (1)..(1): Any amino acid
XAAAAEQQSSNGPVKKSMREKAVERRSVNKEHNSNFKAGYIPIDEDRLHKTGLRGRKGNLAICVIILLFILAVINLILPGSQARDRRAFSGIPDAYRKKI

SEQ ID NO: 79269 - protein, 241 aa, Homo sapiens
MSIRPPGEPPSPGGAAMAELKSLSGDAYLALSHGYAAAAAGLAYGAAREPEAARGYGTPGPGGDLPAAPAPRAPAQAAESSGEQSGDEDDAFEQRRRRRGPGSAADGRRRPREQRSLRLSINARERRRMHDLNDALDGLRAVIPYAHSPSVRKLSKIATLLLAKNYILMQAQALDEMRRLVAFLNQGQGLAAPVNAAPLTPFGQATVCPFSAGAALGPCPDKCAAFSGTPSALCKHCHEKP

SEQ ID NO: 79270 - protein, 96 aa, Homo sapiens
MGLLMGEARAVLKWADGKMIKNEVDMQVLHLLGPKLEADLEKKFKVAKARLEETDRRTAKDVVENGETADQTLSLMEQLRGEALKFHKPGENYKTP

SEQ ID NO: 79271 - protein, 52 aa, Homo sapiens
  MOD_RES (1)..(1): Any amino acid
XSSTLPESFENKPSKPIPKPRVSIRKSVDLLHASHTGQEPSERHTEEALRKF

SEQ ID NO: 79272 - protein, 127 aa, Homo sapiens
MEPNSLRTKVPAFLSDLGKATLRGIRKCPRCGTYNGTRGLSCKNKTCGTIFRYGARKQPSVEAVKIITGSDLQVYSVRQRDRGPDYRCFVELGVSETTIQTVDGTIITQLSSGRCYVPSCLKAATQG

SEQ ID NO: 79273 - protein, 196 aa, Homo sapiens
MTREFLVMKRKRGRPKGSTKKSSTEEELAENIVSPTEDSPLAPEEGNSLPPSSLECSKCCRKFSNTRQLRKHICIIVLNLGEEEGEAGNESDLELEKKCKEDDREKASKRPRSQKTEKVQKISGKEARQLSGAKKPIISVVLTAHEAIPGATKIVPVEAGPPETGATNSETTSADLVPRRGYQEYAIQQTPYEQPM

SEQ ID NO: 79274 - protein, 246 aa, Homo sapiens
  MOD_RES (1)..(1): Any amino acid
XIKDVVVKTIISSEPYVTSLLKMYVRRPYSCHELFGFDIMLDENLKPWVLEVNISPSLHSSSPLDISIKGQMIRDLLNLAGFVLPNAEDIISSPSSCSSSTTSLPTSPGDKCRMAPEHVTAQKMKKAYYLTQKIPDQDFYASVLDVLTPDDVRILVEMEDEFSRRGVDLLRSWCYKGFHMGVVSDSAPVWSLPTSLLTISKDDVILNAFSKSETSKLGKQSSCEVSLLLSEDGTTPKSKKTQAGLS

SEQ ID NO: 79275 - protein, 232 aa, Homo sapiens
  MOD_RES (1)..(1): Any amino acid
XKRKKINQNSSKEKINNGQEVKIDQRNVKKEFTSHALDSHILDYYENPAIKEDVSTLIGDDLASCKDETDESSKEETEPQVLKFRVTCNRAGEKHCFTSNEAARDFGGAVQDYFKWKADMTNFDVEVLLNIHDNEVIVGIALTEESLHRRNITHFGPTTLRSTLAYGMLRLCDPLPYDIIVDPMCGTGAIPIEGATEWSDCFHIAGDNNPLAVNRAANNIASLLTKSQIKEG

SEQ ID NO: 79276 - protein, 50 aa, Homo sapiens
  MOD_RES (1)..(1): Any amino acid
XPGITEELLRSQLYPEVPPEEFRPFLAKMRGILKRQNLPISSRVVSNSWA

SEQ ID NO: 79277 - protein, 110 aa, Homo sapiens
MGKMLGGDEEKDPDAAKKEEERQEALRQAEEERKAKYAKMEAEREAVRQGIRDKYGIKKKEEREAEAQAAMEANSEGSLTRPKKAIPPGCGDEVEEEDESILDTVIKYLP

SEQ ID NO: 79278 - protein, 77 aa, Homo sapiens
AERNRPHGQMLGEEAQEALQASLPMPFATATSLWEEEGAHRTSTCALCWPAAPQPWPVSSWGSPWTDLAAGASFFSP

SEQ ID NO: 79279 - protein, 71 aa, Homo sapiens
MARCFSLVLLLTSIWTTRLLVQGSLRAEGSSFLALCSCSAIEMKPSNHFSVQLVCILLQLWLGWRWIRGHL

SEQ ID NO: 79280 - protein, 117 aa, Homo sapiens
MLENYWNLVSLGLCHFDMNIISMLEEGKEPWTVKSCVKIARKPRTPECVKGVVTDIPPKCTIKDLLPKEKSSTEAVFHTVVLERHESPDIEDFSFKEPQKNVHDFECQWRDDTGNYK

SEQ ID NO: 79281 - protein, 110 aa, Homo sapiens
MDPLTKVPCGSQIAQTILWKAKSSLSFGIQPLQTWPTKDPELESQVNLSVSEDLGCRRGDFSRKHYGSVELLISSDADGAIQRAGRFRVENGSSDENATALPGTWRRTDV

SEQ ID NO: 79282 - protein, 81 aa, Homo sapiens
MAYGVPRKNTVKTILRGSCYNVQEPWDIALLAKTWSTNLANIKLPFLEEISFGGSVQLTKCTTIKDGLLPSAESIKLEREY

SEQ ID NO: 79283 - protein, 10 aa, Homo sapiens
MITIDGKQIK

SEQ ID NO: 79284 - protein, 296 aa, Homo sapiens
MLGNELCSVCGDKASGFHYNVLSCEGCKGFFRRSVIKGAHYICHSGGHCPMDTYMRRKCQECRLRKCRQAGMREECVLSEEQIRLKKLKRQEEEQAHATSLPPRASSPPQILPQLSPEQLGMIEKLVAAQQQCNRRSFSDRLRVTVMLLETSRRYNPGSESITFLKDFSYNREDFAKAGLQVEFINPIFEFSRAMNELQLNDAEFALLIAISIFSADRPNVQDQLQVERLQHTYVEALHAYVSIHHPHDRLMFPRMLMKLVSLRTLSSVHSEQVFALRLQDKKLPPLLSEIWDVHE

SEQ ID NO: 79285 - protein, 536 aa, Homo sapiens
MSNRSSFSRLTWFRKQRKAVVSTSDKKMPNGILEEQEQQRVMLLSRSPSGPKKYFPIPVEHLEEEIRIRSADDCKQFREEFNSLPSGHIQGTFELANKEENREKNRYPNILPNDHSRVILSQLDGIPCSDYINASYIDGYKEKNKFIAAQGPKQETVNDFWRMVWEQKSATIVMLTNLKERKEEKCHQYWPDQGCWTYGNIRVCVEDCVVLVDYTIRKFCIQPQLPDGCKAPRLVSQLHFTSWPDFGVPFTPIGMLKFLKKVKTLNPVHAGPIVVHCSAGVGRTGTFIVIDAMMAMMHAEQKVDVFEFVSRIRNQRPQMVQTDMQYTFIYQALLEYYLYGDTELDVSSLEKHLQTMHGTTTHFDKIGLEEEFRKLTNVRIMKENMRTGNLPANMKKARVIQIIPCKAPVAWLGQGWGGAGAGGFHPGEAIDRLPLCTRVKSRVSSGLRLRAPVCCTKCQVEKTPVKHQLTQTVLHGSQASCFGYELADAGGQPRLISGEGFTEAGDLRQARLGIPCLIPCLPKPGQRPASPLHRGA

SEQ ID NO: 79286 - protein, 39 aa, Homo sapiens
MLKLSGEGLRDSYHSRRDQIALKNLQSDVTEAKSDFTKV

SEQ ID NO: 79287 - protein, 829 aa, Homo sapiens
MEQTVLVPPGPDSFNFFTRESLAAIERRIAEEKAKNPKPDKKDDDENGPKPNSDLEAGKNLPFIYGDIPPEMVSEPLEDLDPYYINKKTFIVLNKGKAIFRFSATSALYILTPFNPLRKIAIKILVHSLFSMLIMCTILTNCVFMTMSNPPDWTKNVEYTFTGIYTFESLIKIIARGFCLEDFTFLRDPWNWLDFTVITFAYVTEFVDLGNVSALRTFRVLRALKTISVIPGLKTIVGALIQSVKKLSDVMILTVFCLSVFALIGLQLFMGNLRNKCIQWPPTNASLEEHSIEKNITVNYNGTLINETVFEFDWKSYIQDSRYHYFLEGFLDALLCGNSSDAGQCPEGYMCVKAGRNPNYGYTSFDTFSWAFLSLFRLMTQDFWENLYQLTLRAAGKTYMIFFVLVIFLGSFYLINLILAVVAMAYEEQNQATLEEAEQKEAEFQQMIEQLKKQQEAAQQAATATASEHSREPSAAGRLSDSSSEASKLSSKSAKERRNRRKKRKQKEQSGGEEKDEDEFQKSESEDSIRRKGFRFSIEGNRLTYEKRYSSPHQSLLSIRGSLFSPRRNSRTSLFSFRGRAKDVGSENDFADDEHSTFEDNESRRDSLFVPRRHGERRNSNLSQTSRSSRMLAVFPANGKMHSTVDCNGVVSLVGGPSVPTSPVGQLLPEGTTTETEMRKRRSSSFHVSMDFLEDPSQRQRAMSIASILTNTVEELEESRQKCPPCWYKFSNIFLIWDCSPYWLKVKHVVNLVVMDPFVDLAITICIVLNTLFMAMEHYPMTDHFNNVLTVGNLVSILEGFHWDLYSRNVSENYCHGSLLLFPRRLEYL

SEQ ID NO: 79288 - protein, 166 aa, Homo sapiens
  MOD_RES (1)..(1): Any amino acid
XQERVWPAVRRGRGGSMFRLLSWSLGRGFLRAAGRRCRGCSARLLPGLAGGPGPEVQVPPSRVAPHGRGPGLLPLLAALAWFSRPAAAEEEEQQGADGAAAEDGADEAEAEIIQLLKRAKVRRLRALRPAERGSLCERGLGVAAHYSLRLAEEWMEAPRVKLPRMS

SEQ ID NO: 79289 - protein, 17 aa, Homo sapiens
KFVKGSTEKNKLRLQRG

SEQ ID NO: 79290 - protein, 98 aa, Homo sapiens
MNDVEELTALLRSAGEYEERKLIRAAIRRVRAQEIEAATLAGRLYSGRPNSGSREDSKGLAAHRLEQCEVPEREEQEQQAEVSKPTPTPEGTSQDVTT

SEQ ID NO: 79291 - protein, 110 aa, Homo sapiens
MVTIILLLSCDFWAVKNVTGRLMVGLRWWNHIDEDGKSHWVFESRKESSQENKTVSEAESRIFWLGLIACSVLWVIFAFSALFSFTVKWLAVVIMGVVLQGANLYGYIRC

SEQ ID NO: 79292 - protein, 83 aa, Homo sapiens
MSAHMSGLEIMDEDQLIKDVLDKFLNCHEQTYDEEFLNTFTHLSQEDHVSKRGVFGTDSSENIFTSAKVTHKNEADDYHLRNK

SEQ ID NO: 79293 - protein, 376 aa, Homo sapiens
  MOD_RES (1)..(1): Any amino acid
XIIPPQDWLDRGDESAPIRTPAMIGCSFVVDREYFGDIGLLDPGMEVYGGENVELGMRETEGFQQDKVNYKQNKRGRKTRQRVKRSRSEAHRAQPSPGATHGAHSRAPGPRTEPTAEPWGHARPTAALPATGVWQCGGSMEVLPCSRVAHIERTRKPYNNDIDYYAKRNALRAAEVWMDDFKSHVYMAWNIPMSNPGVDFGDVSERLALRQRLKCRSFKWYLENVYPEMRVYNNTLTYGEVRNSKASAYCLDQGAEDGDRAILYPCHGMSSQLVRYSADGLLQLGPLGSTAFLPDSKCLVDDGTGRMPTLKKCEDVARPTQRLWDFTQSGPIVSRATGRCLEVEMSKDANFGLRLVVQRCSGQKWMIRNWIKHARH

SEQ ID NO: 79294 - protein, 239 aa, Homo sapiens
MHHCKRYRSPEPDPYLSYRWKRRRSYSREHEGRLRYPSRREPPPRRSRSRSHDRLPYQRRYRERRDSDTYRCEERSPSFGEDYYGPSRSRHRRRSRERGPYRTRKHAHHCHKRRTRSCSSASSRSQQSSKRSSRSVEDDKEGHLVCRIGDWLQERYEIVGNLGEGTFGKVVECLDHARGKSQVALKIIRNVGKYREAARLEINVLKKIKEKDKENKFLCVLMSDWFNFHGHMCIAFELL

SEQ ID NO: 79295 - protein, 98 aa, Homo sapiens
MAVMEMACPGAPGSAVGQQKELPKAKEKTPPLGKKQSSVYKLEAVEKSPVFCGKWEILNDVITKGTAKEGSEAGPAAISIIAQAECENSQEFSPTFSE

SEQ ID NO: 79296 - protein, 65 aa, Homo sapiens
QQGLVRQDAHSARPGSPLLHQPLLAAESSPEPVWPDPLTEPMFWEIMRLRKEMSLAKLGFFPQEA

SEQ ID NO: 79297 - protein, 114 aa, Homo sapiens
MSQGSVTFRDVAIDFSQEEWKWLQPAQRDLYRCVMLENYGHLVSLAGLSISKPDVVSLLEQGKEPWLGKREVKRDLFSGFFSANCVSFFSWAHVDGSAFLVDGNFFCKFFRVKW

SEQ ID NO: 79298 - protein, 143 aa, Homo sapiens
MEASVILPILKKKLAFLSGGKDRRSGLILTIPLCLEQTNMDELSVTLDYLLSIPSEKCKARGFTVIVDGRKSQWNVVKTVVVMLQNVVPAEVSLVCVVKPDEFWDKKVTHFCFWKEKDRLGFEVILVSANKLTRYIEPCQLTE

SEQ ID NO: 79299 - protein, 345 aa, Homo sapiens
MMSLVGLKKRTRKAFGIRKKEKDTDSTGSPDRDGIKKSNGAPNGFYAEIDWERYNSPELDEEGYSIRPEEPGSTKGKHFYSSSESEEEEESHKKFNIKIKPLQSKDILKNAATVDELKASIGNIALSPSPVGAIKRNLSSEEVARPRRSTPTPELISKKPPDDTTALAPLFGPPLESAFDEQKTEVLLDQPEIWGSGQPINPSMESPKLTRPFPTGTPPPLPPKNVPATPPRTGSPLTIGPGASSPARPATPLVPCRSTTPPPPPPRPPSRPKLPPGKPGVGDVSRPFSPPIHSSSPPPIAPLARAESTSSISSTNSLSAATTPTVGKNSLLSFNPFVVLTGYFL

SEQ ID NO: 79300 - protein, 118 aa, Homo sapiens
MFGFRVWREARDRIVGFPGRYHAWDIPHQSWLYNSNYSCELSMVLTGAAFFHKYYAYLYSYVMPQAIRDMVDEYINCEDIAMNFLVSHITRKPPIKVTSRWTFRCPGCPQALSHDDSH

SEQ ID NO: 79301 - protein, 227 aa, Homo sapiens
TLMVAWIRANLCVYISRELWDDFLGVLSSLTEWEELINEWANIMDSLTAVLARTVYGVEMTNLPLDKLSEQKEKKQRGKGCVLDPQKGTTVGRSFSLSWRSHPDVTEPMRFRSATTSGAPGVEKARNIVRQKATAKRSQSISNCVHLSEALPATKSVPLLLHTVSALLPGLSYSSCSHRLSEVEECQQSENAPAAGSGHLTVGQQQQVLRSSSTSDIPEPLCSDSSQ

SEQ ID NO: 79302 - protein, 1434 aa, Homo sapiens
MREKGRRKKGRTWAEAAKTVLEKYPNTPMSHKEILQVIQREGLKEISGTSPLACLNAMLHTNSRGEEGIFYKVPGRMGVYTLKKDVPDGVKELSEGSEESSDGQSDSQSSENSSSSSDGGSNKEGKKSRWKRKVSSSSPQSGCPSPTIPAGKVISPSQKHSKKALKQALKQQQQKKQQQQCRPSISISSNQHLSLKTVKAASDSVPAKPATWEGKQSDGQTGSPQNSNSSFSSSVKVENTLLGLGKKSFQRSERLHTRQMKRTKCADIDVETPDSILVNTNLRALINKHTFSVLPGDCQQRLLLLLPEVDRQVGPDGLMKLNGSALNNEFFTSAAQGWKERLSEGEFTPEMQVRIRQEIEKEKKVEPWKEQFFESYYGQSSGLSLEDSKKLTASPSDPKVKKTPAEQPKSMPVSEASLIRIVPVVSQSECKEEALQMSSPGRKEECESQGEVQPNFSTSSEPLLSSALNTHELSSILPIKCPKDEDLLEQKPVTSAEQESEKNHLTTASNYNKSESQESLVTSPSKPKSPGVEKPIVKPTAGAGPQETNMKEPLATLVDQSPESLKRKSSLTQEEAPVSWEKRPRVTENRQHQQPFQVSPQPFLNRGDRIQVRKVPPLKIPVSRISPMPFHPSQVSPRARFPVSITSPNRTGARTLADIKAKAQLVKAQRAAAAAAAAAAAAASVGGTIPGPGPGGGQGPGEGGEGQTARGGSPGSDRVSETGKGPTLELAGTGSRGGTRELLPCGPETQPQSETKTTPSQAQPHSVSGAQLQQTPPVPPTPAVSGACTSVPSPAHIEKLDNEKLNPTRATATVASVSHPQGPSSCRQEKAPSPTGPALISGASPVHCAADGTVELKAGPSKNIPNPSASSKTDASVPVAVTPSPLTSLLTTATLEKLPVPQVSATTAPAGSAPPSSTLPAASSLKTPGTSLNMNGPTLRPTSSIPANNPLVTQLLQGKDVPMEQILPKPLTKVEMKTVPLTAKEERGMGALIATNTTENSTREEVNERQSHPATQQQLGKTLQSKQLPQVPRPLQLFSAKELRDSSIDTHQYHEGLSKATQDQILQTLIQRVRRQNLLSVVPPSQFNFAHSGFQLEDISTSQRFMLGFAGRRTSKPAMAGHYLLNISTYGRGSESFRRTHSVNPEDRFCLSSPTEALKMGYTDCKNATGESSSSKEDDTDEESTGDEQESVTVKEEPQVSQSAGKGDTSSGPHSRETLSTSDCLASKNVKAEIPLNEQTTLSKENYLFTRGQTFDEKTLARDLIQAAQKQMAHAVRGKAIRSSPELFSSTVLPLPADSPTHQPLLLPPLQTPKLYGSPTQIGPSYRGMINVSTSSDMDHNSAVPGSQVSSNVGDVMSFSVTVTTIPASQAMNPSSHGQTIPVQAFSEENSIEGTPSKCYCRLKAMIMCKGCGAFCHDDCIGPSKLCVSCLVVR

SEQ ID NO: 79303 - protein, 129 aa, Homo sapiens
MKGSRIELGDVTPHNIKQLKRLNQVIFPVSYNDKFYKDVLEVGELAKLGTKMLNHVLNICEKDGTFDNIYLHVQISNESAIDFYRKFGFEIIETKKNYYKRIEPADAHVLQKNLKVPSGQNADVQKTDN

SEQ ID NO: 79304 - protein, 290 aa, Homo sapiens
SRGCAEQLMLGHLLVHLKNDCHFEELPCVRPDCKEKVLRKDLRDHVEKACKYREATCSHCKSQVPMIALQGTNQQIKAHEASSAVQHVNLLKEWSNSLEKKVSLLQNESVEKNKSIQSLHNQICSFEIEIERQKEMLRNNESKILHLQRVIDSQAEKLKELDKEIRPFRQNWEEADSMKSSVESLQNRVTELESVDKSAGQVARNTGLLESQLSRHDQMLSVHDIRLADMDLRFQVLETASYNGVLIWKIRDYKRRKQEAVMGKTLSLYSQPFYTGYFGYKMCARVYLNG

SEQ ID NO: 79305 - protein, 13 aa, Homo sapiens
MTLAESYAQYVHN

SEQ ID NO: 79306 - protein, 89 aa, Homo sapiens
MPRSGAPKERPAEPLTPPPSYGHQPQTGSGESSGASGDKDHLYSTVCKPRSPKPAAPAAPPFSSSSGVLGTGLCELDRLLQELNATQFN

SEQ ID NO: 79307 - protein, 225 aa, Homo sapiens
MALCALTRALRSLNLAPPTVAAPAPSLFPAAQMMNNGLLQQPSALMLLPCRPVLTSVALNANFVSWKSRTKYTITPVKMRKSGGRDHTGRIRVHGIGGGHKQRYRMIDFLRFRPEETKSGPFEEKVIQVRYDPCRSADIALVAGGSRKRWIIATENMQAGDTILNSNHIGRMAVAAREGDAHPLGALPVGTLINNVESEPGRGAQYIRAAGAGNVRSNSRPSIQR

SEQ ID NO: 79308 - protein, 361 aa, Homo sapiens
MEQVPSAGRLVQITVTEGYDLKGFKGDTPVTFIRAEFNQVVLGDSAKITVSPEGSAKYNFTSSFEFNPEGGITSDDLAHKPVFLTVTEVLPKEKKQKEEKTLILGQAVVDLLPLLEGQSSFQTTVPLHPVQGSPLETPRSSAKQCSLEVKVLVAEPLLTTAQISGGNLLKVTLEAAYSVPESFIPTGPGQNYMVGLQVPSLGEKDYPILFKNGTLNGNHSEAKACYERTISFVVDASEMHFIFLRLGLIYLEEKEYEKAKKTYMQACKRSPSCLTWLGLGIACYRLEELTEAEDALSEANALNNYNAEVWAYLALVCLKVGRQLEAEQAYKYMIKLKLKDEALLAEIHTLQETVGFGNPSF

SEQ ID NO: 79309 - protein, 126 aa, Homo sapiens
MYPTRGVGYETILKEQKGQSMFVENKAFSMDEPVAAKRPVSPYSGYNGQLLTSVYQPTEMALMHKVPSEGAYDIILPRATANSQVMGSANSTLRAEDMYSAQSHQAATPPKDGKNSQVFRNPYVWD

SEQ ID NO: 79310 - protein, 66 aa, Homo sapiens
MKLKEVDRTAMQAWSPAQNHPIYLATGTSAQQLDATFSTNASLEIFELDLSDPSLDMKSCATFSSS

SEQ ID NO: 79311 - protein, 169 aa, Homo sapiens
VSVPTHLVCPRTPLSPPAAVHTCENEEQSLLDLFLGVCHDINVFFYTIPLAIKLKEHPIFFMFIQIAVIAIFKSYPTVGDVALYMAFFPVWNHLYRFLRNIFVLTCIIIVCSLLFPVLWHLWIYAGSANSNFFYAITLTFNVGQILLISDYFYAFLRREYYLTHGLYLT

SEQ ID NO: 79312 - protein, 1030 aa, Homo sapiens
MEGAHASLSLEDEVSGAGSRQRPLEGKGGETPAAEEPGSLKNYAVFATRDVSAAPEKEEEEAEGPLRAQDLRESYIQLVQGVQEWQDGCMYQGEFGLNMKLGYGKFSWPTGESYHGQFYRDHCHGLGTYMWPDGSSFTGTFYLSHREGYGTMYMKTRLFQGLYKADQRFGPGVETYPDGSQDVGLWFREQLIKLCTQIPSGFSLLRYPEFSSFITHSPARISLSEEEKTEWGLQEGQDPFFYDYKRFLLNDNLTLPPEMYVYSTNSDHLPMTSSFRKELDARIFLNEIPPFVEDGEPWFIINETPLLVKIQKQTYKFRNKPAHTSWNMGAILEGKRSGFAPCGPKEQLSMEMILKAEEGNHEWICRILKDNFASADVADAKGYTVLAAAATHCHNDIVNLLLDCGADVNKCSDEGLTALSMCFLLHYPAQSFKPNVAERTIPEPQEPPKFPVVPILSSSFMDTNLESLYYEVNVPSQGSYELRPPPAPLLLPRVSGSHEGGHFQDTGQCGGSIDHRSSSLKGDSPLVKGSLGHVESGLEDVLGNTDRGSLCSAETKFESNVCVCDFSIELSQAMLERSAQSHSLLKMASPSPCTSSFDKGTMRRMALSMIERRKRWRTIKLLLRRGADPNLCCVPMQVLFLAVKAGDVDGVRLLLEHGARTDICFPPQLSTLTPLHIAAALPGEEGVQIVELLLHAITDVDAKASDEDDTYKPGKLDLLPSSLKLSNEPGPPQAYYSTDTALPEEGGRTALHMACEREDDNKCARDIVRLLLSHGANPNLLWSGHSPLSLSIASGNELVVKELLTQGADPNLPLTKGLGSALCVACDLTYEHQRNMDSKLALIDRLISHGADILKPVMLRQGEKEAVGTAVDYGYFRFFQDRRIARCPFHTLMPAERETFLARKRLLEYMGLQLRQAVFAKESQWDPTWLYLCKRAELIPSHRMKKKGPSLPRGLDVKEQGQIPFFKFCYQCGRSIGVRLLPCPRCYGILTCSKYCKTKAWTEFHKKDCGDLVAIVTQLEQVSRRREEFQ

SEQ ID NO: 79313 - protein, 158 aa, Homo sapiens
SVTSKNLPPSGAVPVTGIPPHVVKVPASQPRPESKPESQIPPQRPQRDQRVREQRINIPPQRGPRPIREAGEQGDIEPRRMPFPQRNVLHITDIWYVSFIGIFLIFYVFEKPVRNTGFDNILKAGKTQIVSSLRVMTTFWCGEIAIGKFDNFDSHWYV

SEQ ID NO: 79314 - protein, 73 aa, Homo sapiens
MKTKCICELCSCGRHHCPHLPTKIYDKTEKPCLLSEYTENYPFYHSYLPRESFKPRREYQKGPIPMEGLTTSS

SEQ ID NO: 79315 - protein, 77 aa, Homo sapiens
MSQPRTPEQALDTPGDCPPGRRDEDAGEGIQCSQRMLSFSDALLSIIATVMILPVTHTEISPEQLPQQAGPLRSCSE

SEQ ID NO: 79316 - protein, 126 aa, Homo sapiens
MNEKSCSFHSKEELRDGQGERLSAGYSPSYDKDKSVLAFRGIPISELKNHGILQALTTEAYEWEPRVVSTEVVRAQEEWEAVDTIQPETGSQASSEQPGQLISFSEALQHFQTVDLSPFKKRIQPT

SEQ ID NO: 79317 - protein, 469 aa, Homo sapiens
MYQRMLRCGAELGSPGGGGGGGGGGGAGGRLALLWIVPLTLSGLLGVAWGASSLGAHHIHHFHGSSKHHSVPIAIYRSPASLRGGHAGTTYIFSKGGGQITYKWPPNDRPSTRADRLAIGFSTVQKEAVLVRVDSSSGLGDYLELHIHQGKIGVKFNVGTDDIAIEESNAIINDGKYHVVRFTRSGGNATLQVDSWPVIERYPAGNNDNERLAIARQRIPYRLGRVVDEWLLDKGRQLTIFNSQATIIIGGKEQGQPFQGQLSGLYYNGLKVLNMAAENDANIAIVGNVRLVGEVPSSMTTESTATAMQSEMSTSIMETTTTLATSTARRGKPPTKEPISQTTDDILVASAECPSDDEDIDPCEPSSANPTRAGGREPYPGSAEVIRESSSTTGMVVGIVAAAALCILILLYAMYKYRNRDEGSYHVDESRNYISNSAQSNGAVVKEKQPSSAKSSNKNKKNKDKEYYV

SEQ ID NO: 79318 - protein, 570 aa, Homo sapiens
MQKMNNEVVDKSDRLLIKGGRIINDDQSLYADVYLEDGLIKQIGENLIVPGGVKTIEANGRMVIPGGIDVNTYLQKPSQGMTAADDFFQGTRAALVGGTTMIIDHVVPEPGSSLLTSFEKWHEAADTKSCCDYSLHVDITSWYDGVREELEVLVQDKGVNSFQVYMAYKDVYQMSDSQLYEAFTFLKGLGAVILVHAENGDLIAQEQKRILEMGITGPEGHALSRPEELEAEAVFRAITIAGRINCPVYITKVMSKSAADIIALARKKGPLVFGEPIAASLGTDGTHYWSKNWAKAAAFVTSPPLSPDPTTPDYLTSLLACGDLQVTGSGHCPYSTAQKAVGKDNFTLIPEGVNGIEERMTVVWDKAVATGKMDENQFVAVTSTNAAKIFNLYPRKGRIAVGSDADVVIWDPDKLKTITAKSHKSAVEYNIFEGMECHGSPLVVISQGKIVFEDGNINVNKGMGRFIPRKAFPEHLYQRVKIRNKVFGLQGVSRGMYDGPVYEVPATPKYATPAPSAKSSPSKHQPPPIRNLHQSNFSLSGAQIDDNNPRRTGHRIVAPPGGRSNITSLG

SEQ ID NO: 79319 - protein, 66 aa, Homo sapiens
MSAQGDCEFLVQRARELVPQDLWAAKAWLITARSLYPADFNIQYEMYTIERNAERTATAGRLLYDM

SEQ ID NO: 79320 - protein, 120 aa, Homo sapiens
MLLGLAAMELKVWVDGIQRVVCGVSEQTTCQEVVIALAQAIDWPLCACAAASGEGAAVAATRVSSGRPGHLRTVCQRCPVCPEAHRGQPSWEALLRQLSTPGTLPNSCQPPCKATGCAGL

SEQ ID NO: 79321 - protein, 611 aa, Homo sapiens
KPIQRFPQFILLLQDMLKNTPRGHPDRLSLQLALTELETLAEKLNEQKRLADQVAEIQQLTKSVSDRSSLNKLLTSGQRQLLLCETLTETVYGDRGQLIKSKERRVFLLNDMLVCANINFKGQLEISSLVPLGPKYVVKWNTALPQVQVVEVGQDGGTYDKDNVLIQHSGAKKASASGQAQNKVYLGPPRLFQELQDLQKDLAVVEQITLLISTLHGTYQNLNMTVAQDWCLALQRLMRVKEEEIHSANKCRLRLLLPGKPDKSGRPISFMVVFITPNPLSKISWVNRLHLAKIGLREENQPGWLCPDEDKKSKAPFWCPILACCIPAFSSRALSLQLGALVHSPVNCPLLGFSAVSTSLPQGYLWVGGGQEGAGGQVEIFSLNRPSPRTVKSFPLAAPVLCMEYIPELEEEAESRDESPTVADPSATVHPTICLGLQDGSILLYSSVDTGTQCLVSCRSPGLQPVLCLRHSPFHLLAGLQDGTLAAYPRTSGGVLWDLESPPVCLTVGPGPVRTLLSLEDAVWASCGPRVTVLEATTLQPQQSFEAHQDEAVSVTHMVKAGSGVWMAFSSGTSIRLFHTETLEHLQEINIATRTTFLLPDRSLIKCSPRA

SEQ ID NO: 79322 - protein, 75 aa, Homo sapiens
MLSFPNLNQVLENYSDAPMTPKQILQVIEAEGLKEMRSGTSPLACLNAMLHSNSRGGEGLFYKLPGRISLFTLKV

SEQ ID NO: 79323 - protein, 684 aa, Homo sapiens; identical to SEQ ID NO: 63733

SEQ ID NO: 79324 - protein, 661 aa, Homo sapiens
MSKGILQVHPPICDCPGCRISSPVNRGRLADKRTVALPAARNLKKERTPSFSASDGDSDGSGPTCGRRPGLKQEDGPHIRIMKRRVHTHWDVNISFREASCSQDGNLPTLISSVHRSRHLVMPEHQSRCEFQRGSLEIGLRPAGDLLGKRLGRSPRISSDCFSEKRARSESPQAEALLLPRELGPSMAPEDHYRRLVSALSEASTFEDPQRLYHLGLPSHGEDPPWHDPPHHLPSHDLLRVRQEVAAAALRGPSGLEAHLPSSTAGQRRKQGLAQHREGAAPAAAPSFSERELPQPPPLLSPQNAPHVALGPHLRPPFLGVPSALCQTPGYGFLPPAQAEMFAWQQELLRKQNLARLELPADLLRQKELESARPQLLAPETALRPNDGAEELQRRGALLVLNHGAAPLLALPPQGPPGSGPPTPSRDSARRAPRKGGPGPASARPSESKEMTGARLWAQDGSEDEPPKDSDGEDPETAAVGCRGPTPGQAPAGGAGAEGKGLFPGSTLPLGFPYAVSPYFHTGAVGGLSMDGEEAPAPEDVTKWTVDDVCSFVGGLSGCGEYTRVFREQGIDGETLPLLTEEHLLTNMGLKLGPALKIRAQPPTLRAPERELGTGEQPLSPTTATSPYGGGHALAGQTSPKQENGTLALLPGAPDPSQPLC

SEQ ID NO: 79325 - protein, 76 aa, Homo sapiens
  MOD_RES (1)..(1): Any amino acid
XERVQNLALWEVYQWQKGQMQKQNGGKAVDERQLFHGTSAIFVDAICQQNFDWRVCGVHGTSYGKGRWHILSPFTL

SEQ ID NO: 79326 - protein, 662 aa, Homo sapiens
MVSKLSQLQTELLAALLESGLSKEALIQALGEPGPYLLAGEGPLDKGESCGGGRGELAELPNGLGETRGSEDETDDDGEDFTPPILKELENLSPEEAAHQKAVVETLLQEDPWRVAKMVKSYLQQHNIPQREVVDTTGLNQSHLSQHLNKGTPMKTQKRAALYTWYVRKQREVAQQFTHAGQGGLIEEPTGDELPTKKGRRNRFKWGPASQQILFQAYERQKNPSKEERETLVEECNRAECIQRGVSPSQAQGLGSNLVTEVRVYNWFANRRKEEAFRHKLAMDTYSGPPPGPGPGPALPAHSSPGLPPPALSPSKVHGVRYGQPATSETAEVPSSSGGPLVTVSTPLHQVSPTGLEPSHSLLSTEAKLVSAAGGPLPPVSTLTALHSLEQTSPGLNQQPQNLIMASLPGVMTIGPGEPASLGPTFTNTGASTLVIGLASTQAQSVPVINSMGSSLTTLQPVQFSQPLHPSYQQPLMPPVQSHVTQSPFMATMAQLQSPHALYSHKPEVAQYTHTGLLPQTMLITDTTNLSALASLTPTKQVRSRPAGPPLACDRAPHPHIPRAQEAALLPQVFTSDTEASSESGLHTPASQATTLHVPSQDPASIQHLQPAHRLSASPTVSSSSLVLYQSSDSSNGQSHLLPSNHSVIETFISTQMASSSQ

SEQ ID NO: 79327 - protein, 479 aa, Homo sapiens
MVSQSTVRQDSPVEPWEGISDHSGIIDGSPRLLNTDHPPCQLDIRLMRHKAVWINPQDVQQQPQDLQSQVPAAGNSGTHFVTDAASPSGPSPSCLGDSLAETTLSEDTTDSVGSASPHGSSEKSSSFSLSSTEVHMVRPGYSHRVSLPTSPGILATSPYPETDSAFFEPSHLTSAADEGAVQVSRRTISSNSFSPEVFVLPVDVEKENAHFYVADMIISAMEKMKCNILSQQQTESWSKEVSGLLGSDQPDSEMTFDTNIKQESGSSTSSYSGYEGCAVLQVSPVTETRTYHDVKEICKCDVDEFVILELGDFNDITETCSCSCSSSKSVTYEPDFNSAELLAKELYRVFQKCWILSVVNSQLAGSLSAAGSIVVNEECVRKDFESSMNVVQEIKFKSRIRGTEDWAPPRFQIIFNIHPPLKRDLVVAAQNFFCAGCGTPVEPTCSGMEMCVCTFVQWPCPQGACLSSFREDTLISQSL

SEQ ID NO: 79328 - protein, 104 aa, Homo sapiens
  MOD_RES (1)..(1): Any amino acid
XEETTAEAEEEIQALTAHRDEIQRKFDALRNSCTVITDLEEQLNQLTEDNAELNNQNFYLSKQLDEASGANDEIVQLRSEVDHLRREITEREMQLTSQKQEILV

SEQ ID NO: 79329 - protein, 13 aa, Homo sapiens
MPYLLISTQIRML

SEQ ID NO: 79330 - protein, 350 aa, Homo sapiens
MDESSILRRRGLQKELSLPRRGSLIDSQKWNCLVKRCRTSNRKSLIGNGQSPALPRPHSPLSAHAGNSPQDSPRNFSPSASAHFSFARRTDGRRWSLASLPSSGYGTNTPSSTVSSSCSSQEKLHQLPYQPTPDELHFLSKHFCTTESIATENRCRNTPMRPRSRSLSPGRSPACCDHEIIMMNHVYKERFPKATAQMEERLKEIITSYSPDNVLPLADGVLSFTHHQIIELARDCLDKSHQGLITSRYFLELQHKLDKLLQEAHDRSESGELAFIKQLVRKILIVIARPARLLECLEFDPEEFYYLLEAAEGHAKEGQGIKTDIPRYIISQLGLNKDPLEGESLGCSYL

SEQ ID NO: 79331 - protein, 1218 aa, Homo sapiens
MEADAVSEGGAMAEERPPRLVDYFVVAGLAGNGAPIPEETWVPEPSGPLRPPRPAEPITDVAVIARALGEEVPQGYTCIQASAGGHPLELSAGLLGGTQPVICYRRGRDKPPLVELGVLYEGKERPKPGFQVLDTTPYSHSANLAPPGPGHPRTYLTYRRAAEGAGLHALGITDLCLVLPSKGEGTPHTYCRLPRNLNPGMWGPAVYLCYKVGLAKANTLVYEAELLGRYPEEDNEAFPLPESVPVFCLPMGATIECWPAQTKYPVPVFSTFVLTGAAGDKVYGAALQFYEAFPRARLSERQARALGLLSAVERGRALGGRAVRSRRAIAVLSRWPAFPAFRAFLTFLYRYSVSGPHRLPLEAHISHFIHNVPFPSPQRPRILVQMSPYDNLLLCQPVSSPLPLSGASFLQLLQSLGPELAITLLLAVLTEHKLLVHSLRPDLLTSVCEALVSMIFPLHWQCPYIPLCPLVLADVLSAPVPFIVGIHSSYFDLHDPPADVICVDLDTNTLFQTEEKKLLSPRTLPRRPYKVLLATLTNLYQQLDQTYTGPEEEASLEFLLTDYEAVCGRRARLEREVQGAFLRFMACLLKGYRVFLRPLTQAPSEGARDVDNLFFLQGFLKSRERSSHKLYSQLLHTQMFSQFIEECSFGSARHAALEFFDSCVEKVHPEQEKPEPTPLVELEELSGSELTVFITPPEEPALPEGSESTPQYCYDGFPELRAELFESLQEQPGALPVPGPSRSAPSSPAPRRTKQEMKVAQRMAQKSAAVPELWARCLLGHCYGLWFLCLPAYVRSAPSRVQALHTAYHVLRQMESGKVVLPDEVCYRVLMQLCSHYGQPVLSVRVMLEMRQAGIVPNTITYGYYNKAVLESKWPSGTPGGRLRWAKLRNVVLGAAQFRQPLRERQQQQQQQQQQQQQQQQEQVSAHQEAGSSQAEPYLERPSPTRPLQRQTTWAGRSLRDPASPPGRLVKSGSLGSARGAQPTVEAGVAHMIEALGVLEPRGSPVPWHDGSLSDLSLTGEEPLPGGSPGGSGSALSAQSTEALEGLSGRGPKAGGRQDEAGTPRRGLGARLQQLLTPSRHSPASRIPPPELPPDLPPPARRSPMDSLLHPRERPGSTASESSASLGSEWDLSESSLSNLSLRRSSERLSDTPGSFQSPSLEILLSSCSLCRACDSLVYDEEIMAGWAPDDSNLNTTCPFCACPFVPLLSVQTLDSRP

SEQ ID NO: 79332 - protein, 120 aa, Homo sapiens
KAMFSGRVEVLTDAGGWVLIDRSGRHFGTILNYLRDGSVPLPESTRELGELLGEARYYLVQGLIEDCQLALQQKRETLSPLCLIPMVTSPREEQQLLASTSKPVVKLLHNRSNNKYSYTR

SEQ ID NO: 79333 - protein, 107 aa, Homo sapiens
MKSSLPQGVRNVASVCLQIGYPTVASVPHSIINGYKRVLALSVETDYTFPLAEKVKAFLADPSAFVAAAPVAAATTAAPAAAAAPAKVEAKEESEESDEDMGFGLFD

SEQ ID NO: 79334 - protein, 340 aa, Homo sapiens; identical to SEQ ID NO: 29582

SEQ ID NO: 79335 - protein, 214 aa, Homo sapiens
MEAEPPLYPMAGAAGPQGDEDLLGVPDGPEAPLDELVGAYPNYNEEEEERRYYRRKRLGVLKNVLAASAGGMLTYGVYLGLLQMQLILHYDETYREVKYGNMGLPDIDSKMLMGINVTPIAALLYTPVLIRFFGTKWMMFLAVGIYALFVSTNYWERYYTLVPSAVALGMAIVPLWASMGNYITSSGCRTHRSGTGRAGESLLSFVVQDGAEVP

SEQ ID NO: 79336 - protein, 322 aa, Homo sapiens
  MOD_RES (1)..(1): Any amino acid
XFPTEIHSGLLEVISPSPHFYPDFSRLRESFGDPKERVRWRTKQNLDYCFLMMYAQSKGIYYVQLEDDIVAKPNYLSTMKNFALQQPSEDWMILEFSQLGFIGKMFKSLDLSLIVEFILMFYRDKPIDWLLDHILWVKVCNPEKDAAGIKVGAHAITAVPPPLQDKDFGKQALRKEHVNPPAEVSTSLKTYQHFTLEKAYLREDFFWAFTPAAGDFIRFRFFQPLRLERFFFRSGNIEHPEDKLFNTSVEVLPFDNPQSDKEALQEGRTATLRYPRSPDGYLQIGSFYKGVAEGEVDPAFGPLEALRLSIQTDSPVWVILSE

SEQ ID NO: 79337 - protein, 54 aa, Homo sapiens
  MOD_RES (1)..(1): Any amino acid
XRMKAAITCSVLSASMTFAGFALKSGKNIVRPLEVITDVLAMKSFNTWRSNPRK

SEQ ID NO: 79338 - protein, 65 aa, Homo sapiens
MESGAYGAAKAGGSFDLRRFLTQPQVVARAVCLLSGPSCGLLVSASSPTSGQSPTRRTCWWGPTL

SEQ ID NO: 79339 - protein, 169 aa, Homo sapiens
MTRALFAANSDDVIEDPPIHPRPTSDRYRSGRILWRPFGFSGRFLKLESHSITESKSLIPVAWTSLTQMLLEAPGIFLLGQRKRFSTMPETETHERETELFSPPSDVRGMTKLDRTAFKKTVNIPVLKVRKEIVSKLMRSLKRAALQRPGIRRVIEDPEDKESRLIMLD

SEQ ID NO: 79340 - protein, 81 aa, Homo sapiens
VLGTPTREQIREMNPNYTEFKFPQIKAHPWTKRPVRTASLMNCDVWEPSCLTTAHFPLSSTSVLVNSPSNRLSTPFSSLLT

SEQ ID NO: 79341 - protein, 86 aa, Homo sapiens
MSALGVTVALLVWAAFLLLVSMWRQVHSSWNLPPGPFPLPIIGNLFQLELKNIPKSFTRLAQRFGPVFTLYVGSQRMVVMHGYKAV

SEQ ID NO: 79342 - protein, 1645 aa, Homo sapiens
MEESKTLKSENHEPKKNVICEESKAVQVIGNQTLKARNDKSVKEIENSSPNRNSSKKNKQNDICIEKTEVKSCKVNAANLPGPKDLGLVLRDQSHCKAKKFPNSPVKAEKATISQAKSEKATSLQAKAEKSPKSPNSVKAEKASSYQMKSEKVPSSPAEAEKGPSLLLKDMRQKTELQQIGKKIPSSFTSVDKVNIEAVGGEKCALQNSPRSQKQQTCTDNTGDSDDSASGIEDVSDDLSKMKNDESNKENSSEMDYLENATVIDESALTPEQRLGLKQAEERLERDHIFRLEKRSPEYTNCRYLCKLCLIHIENIQGAHKHIKEKRHKKNILEKQEESELRSLPPPSPAHLAALSVAVIELAKEHGITDDDLRVRQEIVEEMSKVITTFLPECSLRLYGSSLTRFALKSSDVNIDIKFPPKMNHPDLLIKVLGILKKNVLYVDVESDFHAKVPVVVCRDRKSGLLCRVSAGNDMACLTTDLLTALGKIEPVFIPLVLAFRYWAKLCYIDSQTDGGIPSYCFALMVMFFLQQRKPPLLPCLLGSWIEGFDPKRMDDFQLKGIVEEKFVKWECNSSSATEKNSIAEENKAKADQPKDDTKKTETDNQSNAMKEKHGKSPLALETPNRVSLGQLWLELLKFYTLDFALEEYVICVRIQDILTRENKNWPKRRIAIEDPFSVKRNVARSLNSQLVYEYVVERFRAAYRYFACPQTKGGNKSTVDFKKREKGKISNKKPVKSNNMATNGCILLGETTEKINAEREQPVQCDEMDCTSQRCIIDNNNLLVNELDFADHGQDSSSLSTSKSSEIEPKLDKKQDDLAPSETCLKKELSQCNCIDLSKSPDPDKSTGTDCRSNLETESSHQSVCTDTSATSCNCKATEDASDLNDDDNLPTQELYYVFDKFILTSGKPPTIVCSICKKDGHSKNDCPEDFRKIDLKPLPPMTNRFREILDLVCKRCFDELSPPCSEQHNREQILIGLEKFIQKEYDEKARLCLFGSSKNGFGFRDSDLDICMTLEGHENAEKLNCKEIIENLAKILKRHPGLRNILPITTAKVPIVKFEHRRSGLEGDISLYNTLAQHNTRMLATYAAIDPRVQYLGYTMKVFAKRCDIGDASRGSLSSYAYILMVLYFLQQRKPPVIPVLQEIFDGKQIPQRMVDGWNAFFFDKTEELKKRLPSLGKNTESLGELWLGLLRFYTEEFDFKEYVISIRQKKLLTTFEKQWTSKCIAIEDPFDLNHNLGAGVSRKMTNFIMKAFINGRKLFGTPFYPLIGREAEYFFDSRVLTDGELAPNDRCCRVCGKIGHYMKDCPKRKSSLLFRLKKKDSEEEKEGNEEEKDSRDVLDPRDLHDTRDFRDPRDLRCFICGDAGHVRRECPEVKLARQRNSSVAAAQLVRNLVNAQQVAGSAQQQGDQSIRTRQSSECSESPSYSPQPQPFPQNSSQSAAITQPSSQPGSQPKLGPPQQGAQPPHQVQMPLYNFPQSPPAQYSPMHNMGLLPMHPLQIPAPSWPIHGPVIHSAPGSAPSNIGLNDPSIIFAQPAARPVAIPNTSHDGHWPRTVAPNSLVNSGAVGNSEPGFRGLTPPIPWEHAPRPHFPLVPASWPYGLHQNFMHQGNARFQPNKPFYTQDRCATRRCRERCPHPPRGNVSE

SEQ ID NO: 79343 - protein, 271 aa, Homo sapiens
MKKIFSKKGESPLGSFARRQRSSAGGGGEPGEGAYSQPGYHVRDRDLGKIHKAASAGNVAKVQQILLLRKNGLNDRDKMNRTALHLACANGHPEVVTLLVDRKCQLNVCDNENRTALMKAVQCQEEKCATILLEHGADPNLADVHGNTALHYAVYNEDISVATKLLLYDANIEAKNKDDLTPLLLAVSGKKQQMVEFLIKKKANVNAVDKLESSHQLISEYKEERIPKHSSQNSNSVDESSEDSLSRSRDIESFYSWAFETILSGICAFIG

SEQ ID NO: 79344 - protein, 33 aa, Homo sapiens
MAFTFAAFCYMLALLLTAALIFFAIWHDKEEFG

SEQ ID NO: 79345 - protein, 111 aa, Homo sapiens
  MOD_RES (1)..(1): Any amino acid
XLTLQHHMGSADLNATFYGPVKKEDGSEVGVGGAQVTGSNTRKHILQVSTFQMTILMLFNNREKYTFEVTQQLKARFLPSPVVIKKRIEGLIEREYLARTPEDRKVYTYVA

SEQ ID NO: 79346 - protein, 1279 aa, Homo sapiens
MDSQELKTLINYYCQERYFHHVLLVASEGIKRYGSDPVFRFYHAYGTLMEDREAILESDARVKEQRKGAGEKALYHAGLFLWHIGRHDKAREYIDRMIKISDGSKQGHVLKAWLDITRGKEPYTKKALKYFEEGLQDGNDTFALLGKAQCLEMRQNYSGALETVNQIIVNFPSFLPAFVKKMKLQLALQDWDQTVETAQRLLLQDSQNVEALRMQALYYVCREGDIEKASTKLENLGNTLDAMEPQNAQLFYNITLAFSRTCGRSQLILQKIQTLLERAFSLNPQQSEFATELGYQMILQGRVKEALKWYKTAMTLDETSVSALVGFIQCQLIEGQLQDADQQLEFLNEIQQSIGKSAELIYLHAVLAMKKNKRQEEVINLLNDVLDTHFSQLEGLPLGIQYFEKLNPDFLLEIVMEYLSFCPMQPASPGQPLCPLLRRCISVLETVVRTVPGLLQTVFLIAKVKYLSGDIEAAFNNLQHCLEHNPSYADAHLLLAQVYLSQEKVKLCSQSLELCLSYDFKVRDYPLYHLIKAQSQKKMGEIADAIKTLHMAMSLPGMKRIGASTKSKDRKTEVDTSHRLSIFLELIDVHRLNGEQHEATKVLQDAIHEFSGTSEEVRVTIANADLALAQGDIERALSILQNVTAEQPYFIEAREKMADIYLKHRKDKMLYITCFREIAERMANPRSFLLLGDAYMNILEPEEAIVAYEQALNQNPKDGTLASKMGKALIKTHNYSMAITYYEAALKTGQKNYLCYDLAELLLKLKWYDKAEKVLQHALAHEPVNELSALMEDGRCQVLLAKVYSKMEKLGDAITALQQARELQARVLKRVQMEQPDAVPAQKHLAAEICAEIAKHSVAQRDYEKAIKFYREALVHCETDNKIMLELARLYLAQDDPDSCLRQCALLLQSDQDNEAATMMMADLMFRKQDYEQAVFHLQQLLERKPDNYMTLSRLIDLLRRCGKLEDVPRFFSMAEKRNSRAKLEPGFQYCKGLYLWYTGEPNDALRHFNKARKDRDWGQNALYNMIEICLNPDNETVGGEVFENLDGDLGNSTEKQESVQLAVRTAEKLLKELKPQTVQGHVQLRIMENYCLMATKQKSNVEQALNTFTEIAASEKEHIPALLGMATAYMILKQTPRARNQLKRIAKMNWNAIDAEEFEKSWLLLADIYIQSAKYDMAEDLLKRCLRHNRSCCKAYEYMGYIMEKEQAYTDAALNYEMAWKYSNRTNPAVGYKLAFNYLKAKRYVDSIDICHQVLEAHPTYPKIRKDILDKARASLRP

SEQ ID NO: 79347 - protein, 144 aa, Homo sapiens
  MOD_RES (1)..(1): Any amino acid
XMIKTEFTLTEAVVESSRKLVKEAMAKKALKSESAASSTGKEDKQPAPGPVEKPPREPARQLRNPPTTIGMMTLKAAFKTLSGAQDSEAAFAKLDQKDLVLPTQALPASPALKNKRPRKDENESSAPADGEGGSELQPKNKRMT

SEQ ID NO: 79348 - protein, 60 aa, Homo sapiens
MSWIKEGELSLWERFCANIIKAGPMPKHIAFIMDGNRRYAKKCQVERQEGHSQGFNKLAE

SEQ ID NO: 79349 - protein, 214 aa, Homo sapiens
MGKGRAGRVGTTALPPRLKEMKSQESAAGSKLVLRCETSSEYSSLRFKWFKNGNELNRKNKPQNIKIQKKPGKSELRINKASLADSGEYMCKVISKLGNDSASANITIVESNEIITGMPASTEGAYVSSATSTSTTGTSHLVKCAEKEKTFCVNGGECFMVKDLSNPSRYLCKGGGAVPEESADHNRHLHRPPCGRHHVCGGLLQNQETAEKAA

SEQ ID NO: 79350 - protein, 19 aa, Homo sapiens
MAKARNQLDAVLQCLLEKS

SEQ ID NO: 79351 - protein, 1199 aa, Homo sapiens
MADNLDEFIEEQKARLAEDKAELESDPPYMEMKGKLSAKLSENSKILISMAKENIPPNSQQTRGSLGIDYGLSLPLGEDYERKKHKLKEELRQDYRRYLTQERLKLERNKEYNQFLRGKEESSEKFRQVEKSTEPKSQRNKKPIGQVKPDLTSQIQTSCENSEGPRKDVLTPSEAYEELLNQRRLEEDRYRQLDDEIELRNRRIIKKANEEVGISNLKHQRFASKAGIPDRRFHRFNEDRVFDRRYHRPDQDPEVSEEMDERFRYESDFDRRLSRVYTNDRMHRNKRGNMPPMEHDGDVIEQSNIRISSAENKSAPDNETSKSANQDTCSPFAGMLFGGEDRELIQRRKEKYRLELLEQMAEQQRNKRREKDLELRVAASGAQDPEKSWNELLTSLQLSKEEPDRLKQFSVAPRHFEEMIPPERPRIAFQTPLPPLSAPSVPPIPSVHPVPSQNEDLRSGLSSALGEMVSPRIAPLPPPPLLPPLATNYRTPYDDAYYFYGSRNTFDPSLAYYGSGMMGVQPAAYVSAPVTHQLAQPVVNTVGQNELKITSDQVINSGLIFEDKPKPSKQSLQSYQEALQQQIREREERRKKEREEKEEYEAKLEAEMRTYNPWGKGGGGAPLRDAKGNLITDLNRMHRQNIDAYHNPDARTYEDKRAVVSLDPNLATSNAENLEDAANKSSGHMQTQSSPFARGNVFGEPPTELQIKQQELYKNFLRFQIEEKKQREEAERERLRIAEEKEERRLAEQRARIQQEYEEEQEKKREKEEEQRLKNEEHIRLAEERQKEAERKKKEEEEKYNLQLQHYCERDNLIGEETKHMRQPSPIVPALQNKIASKLQRPPSVDSIIRSFIHESSMSRAQSPPVPARKNQLRAEEEKKNVIMELSEMRKQLRSEERRLQERLLHMDSDDEIPIRKKERNPMDIFDMARHRLQAPVRRQSPKGLDAATFQNVHDFNELKDRDSETRVDLKFMYLDPPRDHHTLEIQQQALLREQQKRLNRIKMQEGAKVDLDAIPSAKVREQRMPRDDTSDFLKNSLLESDSAFIGAYGETYPAIEDDVLPPPSQLPSARERRRNKWKGLDIDSSRPNVAPDGLSLKSISSVNVDELRVRNEERMRRLNEFHNKPINTDDESSLVDPDDIMKHIGDDGSNSVATEPWLRPGTSETLKRFMAEQLNQEQQQIPGKPGTFTWQGLSTAHG

SEQ ID NO: 79352 - protein, 52 aa, Homo sapiens
MHQLFRLVLGQKDLSRAGDLFSLDDSEIEDSLTEALEQIKIISSSSSVERQE

SEQ ID NO: 79353 - protein, 507 aa, Homo sapiens
  MOD_RES (1)..(1): Any amino acid
XECPRGRSALLKGPPQEKPNRRSALLSVGEISELCPEITDFLCRDKKCIASHLLCDYKPDCSDRSDEAHCAHYTSTTGSCNFETSSGNWTTACSLTQDSEDDLDWAIGSRIPAKALIPDSDHTPGSGQHFLYVNSSGSKEGSVARITTSKSFPASLGMCTVRFWFYMIDPRSMGILKVYTIEESGLNILVWSVIGNKRTGWTYGSVPLSSNSPFKVAFEADLDGNEDIFIALDDISFTPECVTGGPVPVQPSPCEADQFSCIYTLQCVPLSGKCDGHEDCIDGSDEMDCPLSPTPPLCSNMEFPCSTDECIPSLLLCDGVPDCHFNEDELICSNKSCSNGALVCASSNSCIPAHQRCDGFADCMDFQLDESSCSECPLNYCRNGGTCVVEKNGPMCRCRQGWKGNRCHIKFNPPATDFTYAQNNTWTLLGIGLAFLMTHITVAVLCFLANRKVPIRKTEGSGNCAFVNPVYGNWSNPEKTESSVYSFSNPLYGTTSGSLETLSHHLK

SEQ ID NO: 79354 - protein, 175 aa, Homo sapiens
MGKQNSKLRPEVLQDLRENTEFTDHELQEWYKGFLKDCPTGHLTVDEFKKIYANFFPYGDASKFAEHVFRTFDTNGDGTIDFREFIIALSVTSRGKLEQKLKWAFSMYDLDGNGYISRSEMLEIVQAIYKMVSSVMKMPEDESTPEKRTDKIFRQMDTNNDGSAGWGRGCMCTPR

SEQ ID NO: 79355 - protein, 297 aa, Homo sapiens
MALRLLKLAATSASARVVAAGAQRVRGIHSSVQCKLRYGMWHFLLGDKASKRLTERSRVITVDGNICTGKGKLAKEIAEKLGFKHFPEAGIHYPDSTTGDGKPLATDYNGNCSLEKFYDDPRSNDGNSYRLQSWLYSSRLLQYSDALEHLLTTGQGVVLERSIFSDFVFLEAMYNQGFIRKQCVDHYNEVKSVTICDYLPPHLVIYIDVPVPEVQRRIQKKGDPHEMKITSAYLQDIENAYKKTFLPEMSEKCEVLQYSAREAQDSKKVVEDIEYLKFDKGPWLKQDNRTLYHLRLL

SEQ ID NO: 79356 - protein, 253 aa, Homo sapiens
MEAEETMECLQEFPEHHKMILDRLNEQREQDRFTDITLIVDGHHFKAHKAVLAACSKFFYKFFQEFTQEPLVEIEGVSKMAFRHLIEFTYTAKLMIQGEEEANDVWKAAEFLQMLEAIKALEVRNKENSAPLEENTTGKNEAKKRKIAETSNVITESLPSAESEPVEIEVEIAEGTIEVEDEGIETLEEVASAKQSVKYIQSTGSSDDSALALLADITSKYRQGDRKGQIKEDGCPSDPTSKQVEGAHEITLH

SEQ ID NO: 79357 - protein, 722 aa, Homo sapiens
MPLAAYCYLRVVGKGSYGEVTLVKHRRDGKQYLHEKHILHRDLKTQNVFLTRTNIIKVGDLGIARVLENHCDMASTLIGTPYYMSPELFSNKPYNYKSDVWALGCCVYEMATLKHAFNAKDMNSLVYRIIEGKLPPMPRDYSPELAELIRTMLSKRPEERPSVRSILRQPYIKRQISFFLEATKIKTSKNNIKNGDSQSKPFATVVSGEAESNHEVIHPQPLSSEGSQTYIMGEGKCLSQEKPRASGLLKSPASLKAHTCKQDLSNTTELATISSVNIDILPAKGRDSVSDGFVQENQPRYLDASNELGGICSISQVEEEMLQDNTKSSAQPENLIPMWSSDIVTGEKNEPVKPLQPLIKEQKPKDQSLALSPKLECSGTILAHSNLRLLGSSDSPASASRVAGITGVCHHAQDQVAGECIIEKQGRIHPDLQPHNSGSEPSLSRQRRQKRREQTEHRGEKRQVRRDLFAFQESPPRFLPSHPIVGKVDVTSTQKEAENQRRVVTGSVSSSRSSEMSSSKDRPLSARERRRLKQSQEEMSSSGPSVRKASLSVAGPGKPQEEDQPLPARRLSSDCSVTQERKQIHCLSEDELSSSTSSTDKSDGDYGEGKGQTNEINALVQLMTQTLKLDSKESCEDVPVANPVSEFKLHRKYRDTLILHGKVAEEAEEIHFKELPSAIMPGSEKIRRLVEVLRTDVIRGLGVQLLEQVYDLLEEEDEFDRE

SEQ ID NO: 79358 - protein, 54 aa, Homo sapiens
MDYRKSPIVHVPMSLIIQMPELRENPFKERIVAAFSEDGEGNLTFNDFVDMFSV

SEQ ID NO: 79359 - protein, 698 aa, Homo sapiens
MAACEGRRSGALGSSQSDFLTPPVGGAPWAVATTVVMYPPPPPPPHRDFISVTLSFGENYDNSKSWRRRSCWRKWKQLSRLQRNMILFLLAFLLFCGLLFYINLADHWKALAFRLEEEQKMRPEIAGLKPANPPVLPAPQKADTDPENLPEISSQTQRHIQRGPPHLQIRPPSQDLKDGTQEEATKRQEAPVDPRPEGDPQRTVISWRGAVIEPEQGTELPSRRAEVPTKPPLPPARTQGTPVHLNYRQKGVIDVFLHAWKGYRKFAWGHDELKPVSRSFSEWFGLGLTLIDALDTMWILGLRKEFEEARKWVSKKLHFEKDVDVNLFESTIRILGGLLSAYHLSGDSLFLRKAEDFGNRLMPAFRTPSKIPYSDVNIGTGVAHPPRWTSDSTVAEVTSIQLEFRELSRLTGDKKFQEAVEKVTQHIHGLSGKKDGLVPMFINTHSGLFTHLGVFTLGARADSYYEYLLKQWIQGGKQETQLLEDYVEAIEGVRTHLLRHSEPSKLTFVGELAHGRFSAKMDHLVCFLPGTLALGVYHGLPASHMELAQELMETCYQMNRQMETGLSPEIVHFNLYPQPGRRDVEVKPADRHNLLRPETVESLFYLYRVTGDRKYQDWGWEILQSFSRFTRVPSGGYSSINNVQDPQKPEPRDKMESFFLGETLKYLFLLFSDDPNLLSLDAYVFNTEAHPLPIWTPA

SEQ ID NO: 79360 - protein, 612 aa, Homo sapiens
MFRCGGLAAGALKQKLVPLVRTVCVRSPRQRNRLPGNLFQRWHVPLELQMTRQMASSGASGGKIDNSVLVLIVGLSTVGAGAYAYKTMKEDEKRYNERISGLGLTPEQKQKKAALSASEGEEVPQDKAPSHVPFLLIGGGTAAFAAARSIRARDPGARVLIVSEDPELPYMRPPLSKELWFSDDPNVTKTLRFKQWNGKERSIYFQPPSFYVSAQDLPHIENGGVAVLTGKKVVQLDVRDNMVKLNDGSQITYEKCLIATGTPRSLSAIDRAGAEVKSRTTLFRKIGDFRSLEKISREVKSITIIGGGFLGSELACALGRKARALGTEVIQLFPEKGNMGKILPEYLSNWTMEKVRREGVKVMPNAIVQSVGVSSGKLLIKLKDGRKVETDHIVAAVGLEPNVELAKTGGLEIDSDFGGFRVNAELQARSNIWVAGDAACFYDIKLGRRRVEHHDHAVVSGRLAGENMTGAAKPYWHQSMFWSDLGPDVGYEAIGLVDSSLPTVGVFAKATAQDNPKSATEQSGTGIRSESETESEASEITIPPSTPAVPQAPVQGEDYGKGVIFYLRDKVVVGIVLWNIFNRMPIARKIIKDGEQHEDLNEVAKLFNIHED

SEQ ID NO: 79361 - protein, 25 aa, Homo sapiens
MAEGLKFKDVVIYFSQKEWECLHSA

SEQ ID NO: 79362 - protein, 52 aa, Homo sapiens
  MOD_RES (1)..(1): Any amino acid
XLSDCQQELSLVRTVTRGPRAFLSREEAQHFIKACPLCAGVDCSTVRPCCSC

SEQ ID NO: 79363 - protein, 482 aa, Homo sapiens
MVCTQKSKKTEFKTLEGVITRTKHGEKVSLSSKCAEIDREMISSLGVSKAVLNNVIFCHQEDSNWPLSEGKALKQKFDEIFSATRYIKALETLRQVRQTQGQKVKEYQMELKYLKQYKEKACEIRDQITSKEAQLTSSKEIVKSYENELDPLKNRLKEIEHNLSKIMKLDNEIKALDSRKKQMEKDNSELEEKMEKVFQGTDEQLNDLYHNHQRTVREKERKLVDCHRELEKLNKESRLLNQEKSELLVEQGRLQLQADRHQEHIRARDSLIQSLATQLELDGFERGPFSERQIKNFHKLVRERQEGEAKTANQLMNDFAEKETLKQKQIDEIRDKKTGLGRIIELKSEILSKKQNELKNVKYELQQLEGSSDRILELDQELIKAERELSKAEKNSNVETLKMEVISLQNEKADLDRTLRKLDQEMEQLNHHTTTRTQMEMLTKDKADKDEQIRKIKSRHSDELTSLLGYFPNKKQLEDWLH

SEQ ID NO: 79364 - protein, 120 aa, Homo sapiens
MSISSDEVNFLVYRYLQESGFSHSAFTFGIESHISQSNINGALVPPAALISIIQKGLQYVEAEVSINEDGTLFDGRPIESLSLIDAVMPDVVQTRQQAYRDKLAQQQAAAAAAAAAAASQ

SEQ ID NO: 79365 - protein, 486 aa, Homo sapiens
MSWESGAGPGLGSQGMDLVWSAWYGKCVKGKGSLPLSAHGIVVAWLSRAEWDQVTVYLFCDDHKLQRYALNRITVWRSRSGNELPLAVASTADLIRCKLLDVTGGLGTDELRLLYGMALVRFVNLISERKTKFAKVPLKCLAQEVNIPDWIVDLRHELTHKKMPHINDCRRGCYFVLDWLQKTYWCRQLENSLRETWELEEFREGIEEEDQEEDKNIVVDDITEQKPEPQDDGKSTESDVKADGDSKGSEEVDSHCKKALSHKELYERARELLVSYEEEQFTVLEKFRYLPKAIKAWNNPSPRVECVLAELKGVTCENREAVLDAFLDDGFLVPTFEQLAALQIEYEDGQTEVQRGEGTDPKSHKNVDLNDVLVPKPFSQFWQPLLRGLHSQNFTQALLERMLSELPALGISGIRPTYILRWTVELIVANTKTGRNARRFSAGQWEARRGWRLFNCSASLDWPRMVESCLGSPCWASPQLLRIPGS

SEQ ID NO: 79366 - protein, 114 aa, Homo sapiens
MAEEKKLKLSNTVLPSESMKVVAESMGIAQIQEETCQLLTDEVSYRIKEIAQDALKFMHMGKRQKLTTSDIDYALKLKNVEPLYGFHAQEFIPFRFASGGGRELYFYEEKELIG

SEQ ID NO: 79367 - protein, 212 aa, Homo sapiens
  MOD_RES (1)..(1): Any amino acid
XILVNNGGMSQRSLCMDTSLDVYRKLIELNYLGTVSLTKCVLPHMIERKQGKIVTVNSILGIISVPLSIGYCASKHALRGFFNGLRTELATYPGIIVSNICPGPVQSNIVENSLAGEVTKTIGNNGDQSHKMTTSRCVRLMLISMANDLKEVWISEQPFLMQTLLILKSLRQNMTEKSTCTFQATGGRNGKHENSNLLMLLNNQRLICDFTF

SEQ ID NO: 79368 - protein, 56 aa, Homo sapiens
MLCSAAGEKSVFLWSMRSYTLIRKLEGHQSSVVSCDFSPDSALLVTASYDTNPHPG

SEQ ID NO: 79369 - protein, 137 aa, Homo sapiens
MDGTETRQRRLDSCGKPGELGLPHPLSTGGLPVASEDGALRAPESQSVTPKPLETEPSRETTWSIGLQVTVPFMFAGLGLSWAGMLLDYFQANTGQIDDPQEQHRVISSNLALIQVQATVVGLLAAVAALLLGVVSR

SEQ ID NO: 79370 - protein, 54 aa, Homo sapiens
MRAPSMDRAAVARVGAVASASVCALVAGVVLAQYIFTLKRKTGRKTKIIEMKIG

SEQ ID NO: 79371 - protein, 163 aa, Homo sapiens
MAAAAAAGPSPGSGPGDSPEGPEGEAPERRRKAHGMLKLYYGLSEGEAAGRPAGPDPLDPTDLNGAHFDPEVYLDKLRRECPLAQLMDSETDMVRQIRALDSDMQTLVYENYNKFISATGSALDTQMRLGASGPCLGCLWSDGAVEAQWWQLAKHLRPASDLD

SEQ ID NO: 79372 - protein, 107 aa, Homo sapiens
MAATLGPLGSWQQWRRCLSARDGSRMLLLLLLLGSGQGPQQVGAGQTFEYLKREHSLSKPYQGVGTGSSSLWNLMGNAMVMTQYIRLTPDMQSKQGALWNRVLHCLP

SEQ ID NO: 79373 - protein, 3821 aa, Homo sapiens
MEDEERQKKLEAGKAKLESEISTTADDCSSEVNGCSFVMRTGKPTNLLREEEFGVDDSYSEQGAQDSPTHLEMMESELAGKQHEIEELNRELEEMRVTYGTEGLQQLQEFEAAIKQRDGIITQLTANLQQARREKDETMREFLELTEQSQKLQIQFQQLQASETLRNSTHSSTAADLLQAKQQILTHQQQLEEQDHLLEDYQKKKEDFTMQISFLQEKIKVYEMEQDKKVENSNKEEIQEKETIIEELNTKIIEEEKKTLELKDKLTTADKLLGELQEQIVQKNQEIKNMKLELTNSKQKERQSSEEIKQLMGTVEELQKRNHKDSQFETDIVQRMEQETQRKLEQLRAELDEMYGQQIVQMKQELIRQHMAQMEEMKTRHKGEMENALRSYSNITVNEDQIKLMNVAINELNIKLQDTNSQKEKLKEELGLILEEKCALQRQLEDLVEELSFSREQIQRARQTIAEQESKLNEAHKSLSTVEDLKAEIVSASESRKELELKHEAEVTNYKIKLEMLEKEKNAVLDRMAESQEAELERLRTQLLFSHEEELSKLKEDLEIEHRINIEKLKDNLGIHYKQQIDGLQNEMSQKIETMQFEKDNLITKQNQLILEISKLKDLQQSLVNSKSEEMTLQINELQKEIEILRQEEKEKGTLEQEVQELQLKTELLEKQMKEKENDLQEKFAQLEAENSILKDEKKTLEDMLKIHTPVSQEERLIFLDSIKSKSKDSVWEKEIEILIEENEDLKQQCIQLNEEIEKQRNTFSFAEKNFEVNYQELQEEYACLLKVKDDLEDSKNKQELEYKSKLKALNEELHLQRINPTTVKMKSSVFDEDKTFVAETLEMGEVVEKDTTELMEKLEVTKREKLELSQRLSDLSEQLKQKHGEISFLNEEVKSLKQEKEQVSLRCRELEIIINHNRAENVQSCDTQVSSLLDGVVTMTSRGAEGSVSKVNKSFGEESKIMVEDKVSFENMTVGEESKQEQLILDHLPSVTKESSLRATQPSENDKLQKELNVLKSEQNDLRLQMEAQRICLSLVYSTHVDQVREYMENEKDKALCSLKEELIFAQEEKIKELQKIHQLELQTMKTQETGDEGKPLHLLIGKLQKAVSEECSYFLQTLCSVLGEYYTPALKCEVNAEDKENSGDYISENEDPELQDYRYEVQDFQENMHTLLNKVTEEYNKLLVLQTRLSKIWGQQTDGMKLEFGEENLPKEETEFLSIHSQMTNLEDIDVNHKSKLSSLQDLEKTKLEEQVQELESLISSLQQQLKETEQNYEAEIHCLQKRLQAVSESTVPPSLPVDSVVITESDAQRTMYPGSCVKKNIDGTIEFSGEFGVKEETNIVKLLEKQYQEQLEEEVAKVIVSMSIAFAQQTELSRISGGKENTASSKQAHAVCQQEQHYFNEMKLSQDQIGFQTFETVDVKFKEEFKPLSKELGEHGKEILLSNSDPHDIPESKDCVLTISEEMFSKDKTFIVRQSIHDEISVSSMDASRQLMLNEEQLEDMRQELVRQYQEHQQATELLRQAHMRQMERQREDQEQLQEEIKRLNRQLAQRSSIDNENLVSERERVLLEELEALKQLSLAGREKLCCELRNSSTQTQNGNENQGEVEEQTFKEKELDRKPEDVPPEILSNERYALQKANNRLLKILLEVVKTTAAVEETIGRHVLGILDRSSKSQSSASLIWRSEAEASVKSCVHEEHTRVTDESIPSYSGSDMPRNDINMWSKVTEEGTELSQRLVRSGFAGTEIDPENEELMLNISSRLQAAVEKLLEAISETSSQLEHAKVTQTELMRESFRQKQEATESLKCQEELRERLHEESRAREQLAVELSKAEGVIDGYADEKTLFERQIQEKTDIIDRLEQELLCASNRLQELEAEQQQIQEERELLSRQKEAMKAEAGPVEQQLLQETEKLMKEKLEVQCQAEKVRDDLQKQVKALEIDVEEQVSRFIELEQEKNTELMDLRQQNQALEKQLEKMRKFLDEQAIDREHERDVFQQEIQKLEQQLKVVPRFQPISEHQTREVEQLANHLKEKTDKCSELLLSKEQLQRDIQERNEEIEKLEFRVRELEQALLVSADTFQKVEDRKHFGAVEAKPELSLEVQLQAERDAIDRKEKEITNLEEQLEQFREELENKNEEVQQLHMQLEIQKKESTTRLQELEQENKLFKDDMEKLGLAIKESDAMSTQDQHVLFGKFAQIIQEKEVEIDQLNEQVTKLQQQLKITTDNKVIEEKNELIRDLETQIECLMSDQECVKRNREEEIEQLNEVIEKLQQELANIGQKTSMNAHSLSEEADSLKHQLDVVIAEKLALEQQVETANEEMTFMKNVLKETNFKMNQLTQELFSLKRERESVEKIQSIPENSVNVAIDHLSKDKPELEVVLTEDALKSLENQTYFKSFEENGKGSIINLETRLLQLESTVSAKDLELTQCYKQIKDMQEQGQFETEMLQKKIVNLQKIVEEKVAAALVSQIQLEAVQEYAKFCQDNQTISSEPERTNIQNLNQLREDELGSDISALTLRISELESQVVEMHTSLILEKEQVEIAEKNVLEKEKKLLELQKLLEGNEKKQREKEKKRSPQDVEVLKTTTELFHSNEESGFFNELEALRAESVATKAELASYKEKAEKLQEELLVKETNMTSLQKDLSQVRDHLAEAKEKLSILEKEDETEVQESKKACMFEPLPIKLSKSIASQTDGTLKISSSNQTPQILVKNAGIQINLQSECSSEEVTEIISQFTEKIEKMQELHAAEILDMESRHISETETLKREHYVAVQLLKEECGTLKAVIQCLRSKEGSSIPELAHSDAYQTREICSSDSGSDWGQGIYLTHSQGFDIASEGRGEESESATDSFPKKIKGLLRAVHNEGMQVLSLTESPYSDGEDHSIQQVSEPWLEERKAYINTISSLKDLITKMQLQREAEVYDSSQSHESFSDWRGELLLALQQVFLEERSVLLAAFRTELTALGTTDAVGLLNCLEQRIQEQGVEYQAAMECLQKADRRSLLSEIQALHAQMNGRKITLKREQESEKPSQELLEYNIQQKQSQMLEMQVELSSMKDRATELQEQLSSEKMVVAELKSELAQTKLELETTLKAQHKHLKELEAFRLEVKDKTDEVHLLNDTLASEQKKSRELQWALEKEKAKLGRSEERDKEELEDLKFSLESQKQRNLQLNLLLEQQKQLLNESQQKIESQRMLYDAQLSEEQGRNLELQVLLESEKVRIREMSSTLDRERELHAQLQSSDGTGQSRPPLPSEDLLKELQKQLEEKHSRIVELLNETEKYKLDSLQTRQQMEKDRQVHRKTLQTEQEANTEGQKKMHELQSKVEDLQRQLEEKRQQVYKLDLEGQRLQGIMQEFQKQELEREEKRESRRILYQNLNEPTTWSLTSDRTRNWVLQQKIEGETKESNYAKLIEMNGGGTGCNHELEMIRQKLQCVASKLQVLPQKASERLQFETADDEDFIWVQENIDEIILQLQKLTGQQGEEPSLVSPSTSCGSLTERLLRQNAELTGHISQLTEEKNDLRNMVMKLEEQIRWYRQTGAGRDNSSRFSLNGGANIEAIIASEKEVWNREKLTLQKSLKRAEAEVYKLKAELRNDSLLQTLSPDSEHVTLKRIYGKYLRAESFRKALIYQKKYLLLLLGGFQECEDATLALLARMGGQPAFTDLEVITNRPKGFTRFRSAVRVSIAISRMKFLVRRWHRVTGSVSININRDGFGLNQGAEKTDSFYHSSGGLELYGEPRHTTYRSRSDLDYIRSPLPFQNRYPGTPADFNPGSLACSQLQNYDPDRALTDYITRLEALQRRLGTIQSGSTTQFHAGMRR

SEQ ID NO: 79374 - protein, 70 aa, Homo sapiens
MTKSNGEEPKMGGRMERFQQGVRKRTLLAKKKVQNITKEDVKSYLFRNAFVLLTVTAVIVAMSKSECAMP

SEQ ID NO: 79375 - protein, 106 aa, Homo sapiens
MDNYADLSDTELTTLLRRYNIPHGPVVGSTRRLYEKKIFEYETQRRRLSPPSSSAASSYSFSDLNSTRGDADMYDLPKKEDALLYQSKGLMGSPSLPARPGLSASQ

SEQ ID NO: 79376 - protein, 801 aa, Homo sapiens [sequence omitted]

SEQ ID NO: 79377 - protein, 96 aa, Homo sapiens
  MOD_RES (1)..(1): Any amino acid
XADLEEVAQKCGLSYKALVALRRVLLAQFSAFPVNGADLYEELKTSTAILSTGIGSLDKLLDAGLYTGEVTEIVGGPGSGKTQAEALRRIQVVHAF

SEQ ID NO: 79378 - protein, 54 aa, Homo sapiens
MSSSCSGLSRVLVAVATALVSASSPCPQAWGPPGTQCPGFGMGSQSCSRDLTLG

SEQ ID NO: 79379 - protein, 159 aa, Homo sapiens
MTGDTDKYLGPQDLKELGDDSLPAEGYMGFSLGARSASLRSFSSDRSYTLNRSSYARDSMMIEELLVPSKEQHLTFTREFDSDSLRHYSWAADTLDNVNLVSSPIHSGFLVSFMVDARGGSMRGSRHHGMRIIIPPRKCTAPTRITCRLVKRHKLANPP

SEQ ID NO: 79380 - protein, 80 aa, Homo sapiens
MRAVLTWRDKAEHCINDIAFKPDGTQLILAAGSRLLVYDTSDGTLLQPLKGHKDTVYCVAYAKDGNESSSVACLGHAAGQ

SEQ ID NO: 79381 - protein, 598 aa, Homo sapiens
  MOD_RES (1)..(1): Any amino acid
XITVVAKDGGGRLHGADVVFSATTTVTVNVEDVQDMAPVFVGTPYYGYVYEDTLPGSEVLKVVAMDGDRGKPNRILYSLVNGNDGAFEINETSGAISITQSPAQLQREVYELHVQVTEMSPAGSPAAQATVPVTIRIVDLNNHPPTFYGESGPQNRFELSMNEHPPQGEILRGLKITVNDSDQGANAKFNLQLVGPRGIFRVVPQTVLNEAQVTIIVENSAAIDFEKSKVLTFKAVDPDTGPWGEVKYSTYGTGADLFLIHPSTGLIYTQPWASLDAEATARYNFYVKAEDMEGKYSVAEVFITLLDVNDHPPQFGKSVQKKTMVLGTPVKIEAIDEDAEEPNNLVDYSITHAEPANVFDINSHTGEIWLKNSIRSLDALHNITPGRDCLWSLEVQAKDRGSPSFSTTALLKIDITDAETLSRSPMAAFLIQTKDNPMKAVGVLAGTMATVVAITVLISTATFWRNKKSNKVLPMRRVLRKRPSPAPRTIRIEWLKSKSTKAATKFMLKEKPPNENCNNNSPESSLLPRAPALPPPPSVAPSTGAAQWTVPTVSGSLTPQPTQPPPKPKTMGSPVQSTLISELKQKFEKKSVHNKAYF

SEQ ID NO: 79382 - protein, 502 aa, Homo sapiens
MPAPRAREQPRVPGERQPLLPRGARGPRRWRRAAGAAVLLVEMLERAAFFGVTANLVLYLNSTNFNWTGEQATRAALVFLGASYLLAPVGGWLADVYLGRYRAVALSLLLYLAASGLLPATAFPDGRSSFCGEMPASPLGPACPSAGCPRSSPSPYCAPVLYAGLLLLGLAASSVRSNLTSFGADQVMDLGRDATRRFFNWFYWSINLGAVLSLLVVAFIQQNISFLLGYSIPVGCVGLAFFIFLFATPVFITKPPMGSQVSSMLKLALQNCCPQLWQRHSARDRQCARVLADERSPQPGASPQEDIANFQVLVKILPVMVTLVPYWMVYFQSTYVLQGLHLHIPNIFPANPANISVALRAQGSSYTESWRWSAYTTSTTTRPCPSRLGRSCTTRHHCPSGGRSLSTCSLGSVRSLPASQGTSTIAGWTSTSSCWLAFRPSRLSYLSGSLDAMRGRPRAQPPTAVSAGTGAEQALFQPPCFTLPDRRQQSQLWFPSRFILLE

SEQ ID NO: 79383 - protein, 650 aa, Homo sapiens
MTPILTVLICLGLSLGPRTHVQAGHLPKPTLWAEPGSVITQGSPVTLRCQGGQETQEYRLYREKKTAPWITRIPQELVKKGQFPIPSITWEHTGRYRCYYGSDTAGRSESSDPLELVVTGAYIKPTLSAQPSPVVNSGGNVTLQCDSQVAFDGFILCKEGEDEHPQCLNSQPHARGSSRAIFSVGPVSPSRRWWYRCYAYDSNSPYEWSLPSDLLELLVLGVSKKPSLSVQPGPIVAPEETLTLQCGSDAGYNRFVLYKDGERDFLQLAGAQPQAGLSQANFTLGPVSRSYGGQYRCYGAHNLSSEWSAPSDPLDILIAGQFYDRVSLSVQPGPTVASGENVTLLCQSQGWMQTFLLTKEGAADDPWRLRSTYQSQKYQAEFPMGPVTSAHAGTYRCYGSQSSKPYLLTHPSDPLELVVSGPSGGPSSPTTGPTSTSGPEDQPLTPTGSDPQSGLGRHLGVVIGILVAVILLLLLLLLLFLILRHRRQGKHWTSTQRKADFQHPAGAVGPEPTDRGLQWRSSPAADAQEENLYAAVKHTQPEDGVEMDTRSPHDEDPQAVTYAEVKHSRPRREMASPPSPLSGEFLDTKDRQAEEDRQMDTEAAASEAPQDVTYAQLHSLTLRREATEPPPSQEGPSPAVPSIYATLAIH

SEQ ID NO: 79384 - protein, 148 aa, Homo sapiens
MSESGHSQPGLYGIERRRRWKEPGSGGPQNLSGPGGRERDYIAPWERERRDASEETSTSVMQKTPIILSKPPAERSKQPPPPTAPAAPPAPAPLEKPIVLMKPREEGKGPVAVTGASTPEGTAPPPPAAPAPPKGEKEGQRPTQPVYQ

SEQ ID NO: 79385 - protein, 520 aa, Homo sapiens
  MOD_RES (1)..(1): Any amino acid
XFDDLLKFDDLDGTHALMSRMVQNEIPYFIWTTRRDVLDCRFLSKDQMINHYARAGSFTTKVGLCLNLRNLPWFDEVDANSFFPRCYCLGAEDDKKAFIEDFWLTAARNVLKLVVKSEWKSYPIQAVEEEASGDKQPKKQEKNPVLVSPEFVDEALCACEEYLSNLAHMDIDKDLEAPLYLTPEGWSLFLQRYYQVVHEGAELRHLDTQVQRCEDILQQLQAVVPQIDMEGDRNIWIVKPGAKSRGRGIMCMDHLEEMLKLVNGNPVVMKDGKWVVQKYIERPLLIFGTKFDLRQWFLVTDWNPLTVWFYRDSYIRFSTQPFSLKNLDNSVHLCNNSIQKHLENSCHRHPLLPPDNMWSSQRFQAHLQEMGAPNAWSTIIVPGMKDAVIHALQTSQDTVQCRKASFELYGADFVFGEDFQPWLIEINASPTMAPSTAVTARLCAGVQADTLRVVIDRMLDRNCDTGAFELIYKQPVTTSPASTPRPSCLLPMYSDTRARSSDDSTASWWALRPCRPQARP

SEQ ID NO: 79386 - protein, 124 aa, Homo sapiens
  MOD_RES (1)..(1): Any amino acid
XSKRLEKIPQVPLLFPFIFIILTNYSKMEGAVESQPSFFKTSQDIVTCTWVENCYSSFSRRPLEQMFCKHQSKNIISWTGMVAHTCNPSTLGGQDVFTSCEQWEKWTNFFGKWTFYWLKCRRQK

SEQ ID NO: 79387 - protein, 213 aa, Homo sapiens
MGSQGSPVKSYDYLLKFLLVGDSDVGKGEILESLQDGAAESPYAYSNGIDYKTTTILLDGRRVKLELWDTSGQGRFCTIFRSYSRGAQGILLVYDITNRWSFDGIDRWIKEIDEHAPGVPRILVGNRLHLAFKRQVPTEQARAYAEKNCMTFFEVSPLCNFNVIESFTELSRIVLMRHGMEKIWRPNRVFSLQDLCCRAIVSCTPVHLIDKLP

SEQ ID NO: 79388 - protein, 175 aa, Homo sapiens
  MOD_RES (1)..(1): Any amino acid
XGHSESPEKPLEGNTCLSQMHSWAPLKVLHNDSDILFPVSGVGSYSPADAPLGSLENGTGPEDHVLPDPGLRYSVEASSPGHGSPLSSLLPSASVPESMTISELRQATVAMMNRKDELEEENRSLRNLLDGEMEHSAALRQEVDTLKRKVAEQEERQGMKVQALASYLCYFVRRF

SEQ ID NO: 79389 - protein, 468 aa, Homo sapiens
MPTVVVMDVSLSMTRPVSIEGSEEYQPLSNMDDYDKTCLESALVGVCNIVQQEWGGAIPCQVVLVTDGCLGIGRGSLRHSLATQNQRSESNRFPLPFPFPSKLYIMCMANLEELQSTDSLECLERLIDLNNGEGQIFTIDGPLCLKNVQSMFGKLIDLAYTPFHAVLKCGHLTADVQVFPRPEPFVVDEEIDPIPKVINTDLEIVGFIDIADISSPPVLSRHLVLPIALNKGDEVGTGITDDNEDENSANQIAGKIPNFCVLLHGSLKVEGMVAIVQLGPEWHGMLYSQADSKKKSNLMMSLFEPGPEPLPWLGKMAQLGPISDAKENPYGEDDNKSPFPLQPKNKRSYAQNVTVWIKPSGLQTDVQKILRNARKLPEKTQTFYKELNRLRKAALAFGFLDLLKGVADMLERECTLLPETAHPDAAFQLTHAAQQLKLASTGTSEYAAYDQNITPLHTDFSGSSTERI

SEQ ID NO: 79390 - protein, 73 aa, Homo sapiens
MFKLCSNKMVSQEGSEVELLVSPGARSEHGRYLQDPIVSIDLSEWLRIIGVWLCVSHQSREPLQHGGAGGFLA

SEQ ID NO: 79391 - protein, 173 aa, Homo sapiens
MAALRQPQVAELLAEARRAFREEFGAEPELAVSAPGRVNLIGEHTDYNQGLVLPMALELMTVLVGSPRKDGLVSLLTTSEGADEPQRLQFPLPTAQRSLEPGTPRWANYVKGVIQYYPAAPLPGFSAVVVSSVPLGGGLSSSASLEVATYTFLQQLCPALASPPHPVLQTRAQ

SEQ ID NO: 79392 - protein, 99 aa, Homo sapiens
MSGCRVFIGRLNPAAREKDVERFFKGYGRIRDIDLKRGFGFVEFEDPRDADDAVYELDGKELCSERVTIEHARARSRGGRGRGRYSDRFSSRRPRNDRR

SEQ ID NO: 79393 - protein, 200 aa, Homo sapiens
MAARLVSRCGAVRAAPHSGPLVSWRRWSGASTDTVYDVVVSGGGLVGAAMACALGYDIHFHDKKILLLEAGPKKVLEKLSETYSNRVSSISPGSATLLSSFGAWDHICNMRYRAFRRMQVWDACSEALIMFDKDNLDDMGYIVENDVIMHALTKQLEAVSGTDYGLCKQMSTPLLKKDYVDEKEHPAQDPSYIFSRSYLI

SEQ ID NO: 79394 - protein, 445 aa, Homo sapiens
MAFANLRKVLISDSLDPCCRKILQDGGLQVVEKQNLSKEELIAELQDCEGLIVRSATKVTADVINAAEKLQVVGRAGTGVDNVDLEAATRKGILVMNTPNGNSLSAAELTCGMIMCLARQIPQATASMKDGKWERKKFMGTELNGKTLGILGLGRIGREVATRMQSFGMKTIGYDPIISPEVSASFGVQQLPLEEIWPLCDFITVHTPLLPSTTGLLNDNTFAQCKKGVRVVNCARGGIVDEGALLRALQSGQCAGAALDVFTEEPPRDRALVDHENVISCPHLGASTKEAQSRCGEEIAVQFVDMVKGKSLTGVVTTSHSPAAPGEQGFGECLLAVALAGAPYQAVGLVQGTTPVLQGLNGAVFRPEVPLRRDLPLLLFRTQTSDPAMLPTMIGLLAEAGVRLLSYQTSLVSDGETWHVMGISSLLPSLEAWKQHVTEAFQFHF

SEQ ID NO: 79395 - protein, 150 aa, Homo sapiens
PQTDQKSHSQRALGTQTPALQGPQLLNTDPSSEETHPHVNPDRLCHMEPANHFWHAGDLQAMISKEFHLAATQDDCRKGRTQEDILVPSSHPELFASVLPMAPEEAARLQQPQPLPPPSGIHLSASRTLALTLLYSSPPSHSPFGLSSLI

SEQ ID NO: 79396 - protein, 182 aa, Homo sapiens
MGSAKSVPVTPARPPPHNKHLARVADPRSPSAGILRTPIQVESSPQPGLPAGEQLEGLKHAQDSDPRSPTLGIARTPMKTSSGDPPSPLVKQLSEVFETEDSKSNLPPEPVLPPEAPLSSELDLPLGTQLSVEEQMPPWNQTEFPSKQVFSKEEARQPTETPVASQSSDKPSRDPETPRSSG

SEQ ID NO: 79397 - protein, 201 aa, Homo sapiens
MRFLAATFLLLALSTAAQAEPVQFKDCGSVDGVIKEVNVSPCPTQPCQLSKGQSYSVNVTFTSNIQSKSSKAVVHGILMGVPVPFPIPEPDGCKSGINCPIQKDKTYSYLNKLPVKSEYPSIKLVVEWQLQDDKNQSLFCWEIPVQIMFPCLFSAHCPMLATEHRCLQLQMETKSLRFWSRRGMSVWLPSPAGAWRRTAPF

SEQ ID NO: 79398 - protein, 104 aa, Homo sapiens
MSVLGEYERHCDSINSDFGSESGGCGDSSPGPSASQGPRAGGGAAEQEELHYIPIRVLGRGAFGEATLYRRTEEGTCMTKSFVRRTSCLRKRWWCGTYFRLFQQ

SEQ ID NO: 79399 - protein, 345 aa, Homo sapiens
  MOD_RES (1)..(1): Any amino acid
XLPNVNLPNVNLPKVPNLPVNIPLGIPQMPTFSAPSWMAAIYDADNGSGTSEDLFWKLDALQTFIRDLHWPEEEFGKHLEQRLKLMASDMIESCVKRTRIAFEVKLQKTSRSTDFRVPQSICTMFNVMVDAKAQSTKLCSMEMGQEFAKMWHQYHSKIDELIEETVKEMITLLVAKFVTILEGVLAKLSRYDEGTLFSSFLSFTVKAASKYVDVPKPGMDVADAYVTFVRHSQDVLRDKVNEEMYIERLFDQWYNSSMNVICTWLTDRMDLQLHIYQLKTLIRMVKKTYRDFRLQGVLDSTLNSKTYETIRNRLTVEEATASVSEGGGLQGISMKDSDEEDEEDD

SEQ ID NO: 79400 - protein, 111 aa, Homo sapiens
MLASLYNGSVCVWNHETQTLVKTFEVCDLPVRAAKFVARKNWVVTGADDMQIRVFNYNTLERVHMFEAHSDYIRCIAVHPTQPFILTSSDDMLIKLWDWDKKWSCSQVFEG

SEQ ID NO: 79401 - protein, 90 aa, Homo sapiens
MSLKPRVVDFDETWNKLLTTIKAVVMLEYVERATWNDRFSDIYALCVAYPEPLGERLYTETKIFLENHVRHLHKVLGRIQQGCRLYGLLI

SEQ ID NO: 79402 - protein, 153 aa, Homo sapiens
MGCVQCKDKEATKLTEERDGSLNQSSGYRYGTDPTPQHYPSFGVTSIPNYNNFHAAGGQGLTVFGGVNSSSHTGTLRTRGGTGVTLFVALYDYEARTEDDLSFHKGEKFQILNSSEGDWWEARSLTTGETGYIPSNYVAPVDSIQAEEWYFGK

SEQ ID NO: 79403 - protein, 132 aa, Homo sapiens
MDGFYDQQVPFMVPGKSRSEECRGRPVIDRKRKFLDTDLAHDSEELFQDLSQLQEAWLAEAQVPDDEQFVPDFQSDNPFLFKLPQEFMIPFQFQFVAILYSPGSLSSFSKSAVQSGASCPTSNQDQTGAAQP

SEQ ID NO: 79404 - protein, 63 aa, Homo sapiens
MEALLEGIQNRGHGGGFLTSCEAELQELMKQIDIMVAHKKSEWEGRTHALETCLKIREQELKS

SEQ ID NO: 79405 - protein, 167 aa, Homo sapiens
MDIPLDLSSSAGSGKRRRRGNLPKESVQILRDWLYEHRYNAYPSEQEKALLSQQTHLSTLQVCNWFINARRRLLPDMLRKDGKDPNQFTISRRGAKISETSSVESVMGIKNFMPALEETPFHSCTAGPNPTLGRPLSPKPSSPGSVLARPSVICHTTVTALKDVPFS

SEQ ID NO: 79406 - protein, 191 aa, Homo sapiens
MWWSSTQNAGTEGEAGPPGLPGPPGPKGAPGKPGKPGEAGLPGLPGVDGLTGRDGPPGPKGAPGERGSLGPPGPPGLGGKGLPGPPGEAGVSGPPGGIGLRGPPGPSGLPGLPGPPGPPGPPGHPGVLPEGATDLQCPSICPPGPPGPPGMPGFKGPTGYKGEQGEVGKDGEKGDPGPPGPAGLPGSVGLQ

SEQ ID NO: 79407 - protein, 1013 aa, Homo sapiens
MGELCRRDSALTALDEETLWEMMESHRHRIVRCICPSRLTPYLRQAKVLCQLDEEEVLHSPRLTNSAMRAGHLLDLLKTRGKNGAIAFLESLKFHNPDVYTLVTGLQPDVDFSNFSGLMETSKLTECLAGAIGSLQEELNQEKGQKEVLLRRCQQLQEHLGLAETRAEGLHQLEADHSRMKREVSAHFHEVLRLKDEMLSLSLHYSNALQEKELAASRCRSLQEELYLLKQELQRANMVSSCELELQEQSLRTASDQESGDEELNRLKEENEKLRSLTFSLAEKDILEQSLDEARGSRQELVERIHSLRERAVAAERQREQYWEEKEQTLLQFQKSKMACQLYREKVNALQAQVCELQKERDQAYSARDSAQREISQSLVEKDSLRRQVFELTDQVCELRTQLRQLQAEPPGVLKQEARTREPCPREKQRLVRMHAICPRDDSDCSLVSSTESQLLSDLSATSSRELVDSFRSSSPAPPSQQSLYKRVAEDFGEEPWSFSSCLEIPEGDPGALPGAKAGDPHLDYELLDTADLPQLESSLQPVSPGRLDVSESGVLMRRRPARRILSQVTMLAFQGDALLEQISVIGGNLTGIFIHRVTPGSAADQMALRPGTQIVMVDYEASEPLFKAVLEDTTLEEAVGLLRRVDGFCCLSVKVNTDGYKRLLQDLEAKVATSGDSFYIRVNLAMEGRAKGELQVHCNEVLHVTDTMFQGCGCWHAHRVNSYTMKDTAAHGTIPNYSRAQQQLIALIQDMTQQCTVTRKPSSGGPQKLVRIVSMDKAKASPLRLSFDRGQLDPSRMEGEAWILSSTGSSTCFWAESCLTLVPYTLVRPHRPARPRPVLLVPRAVGKILSEKLCLLQGFKKCLAEYLSQEEYEAWSQRGDIIQEGEVSGGRCWVTRHAVESLMEKNTHALLDVQLDSVCTLHRMDIFPIVIHVSVNEKMAKKLKKGLQRLGTSEEQLLEAARQEEGDLDRAPCLYSSLAPDGWSDLDGLLSCVRQAIADEQKKVVWTEQSPR

SEQ ID NO: 79408 - protein, 179 aa, Homo sapiens
MINAQELLTLEDVTVEFTWEEWQLLGPFQKDLYRDVMLEIYSNLLSMGYQVSKPDALSKLERGEEPWTMEDERHSRICPENNEVDDHLQDHLENQRMLKSVEQYHEHNAFGNTASQTKSLCLFRENHDTFELYIKTLKSNLSLVNQNKSCEINNSTKFSGDGKSFLHGNYEELYSAAKF

SEQ ID NO: 79409 - protein, 80 aa, Homo sapiens
MEPQEERETQVAAWLKKIFGDHPIPQYEVNPRTTEILHHLSERNRVRDRDVYLVIEDLKQKASEYESEGEIKSRVLNENK

SEQ ID NO: 79410 - protein, 186 aa, Homo sapiens
MESTLSASNMQDPSSSPLEKCLGSANGNGDLDSEEGSSLEETGFNWGEYLEETGASAAPHTSFKHVEISIQSNFQPGMKLEVANKNNPDTYWVATIITTCGQLLLLRYCGYGEDRRADFWCDVVIADLHPVGWCTQNNKVLMPPDAIKEKYTDWTEFLIRDLTGSRTAPANLLEGVCIVVIHLMYL

SEQ ID NO: 79411 - protein, 234 aa, Homo sapiens
METAIWRRSYISLISSERPVHNWRGKSVQKKQAESKSQIKLHTQSAPFGLCPKDMMLTQAPSSVVRSRNSRNHTVNSGGSCLSASTVAIPAINDSSAAMSACSTISAQPASSMDTQMHSPKKQERVNKRVIWGIEVAEELHWKGWELGKETTRNLVLKNRSLKLQKMKYRPPKTKFFFTVIPQPIFLSPGITLTLPIVFRPLEAPLTAVIYEVQATCWYGAGSRQRSSIQLQAV

SEQ ID NO: 79412 - protein, 34 aa, Homo sapiens
MSKGTSSDTSLGRVSRAAFPSPTAAEMAEISRIQ

SEQ ID NO: 79413 - protein, 477 aa, Homo sapiens
  MOD_RES (1)..(1): Any amino acid
XQQKGQAEKKELQHKIDEMEEKEQELQAKIEALQADNDFTNERLTALQVRLEHLQEKTLKECSSLEKLIVEGHLTKAVEETKLSKENQTRAKESDFSDTLSPSKEKSSDDTTDAQMDEQDLNEPLAKVSLLKDDLQGAQSEIEAKQEIQHLRKELIEAQELARTSKQKCFELQALLEEERKAYRNQVEESTKQIQVLQAQLQRLHIDTENLREEKDSEITSTRDELLSARDEILLLHQAAAKVASERDTDIASLQEELKKVRAELERWRKAASEYEKEITSLQNSFQLRCQQCEDQQREEATRLQGELEKLRKEWNALETECHSLKRENVLLSSELQRQEKELHNSQKQSLELTSDLSILQMSRKELENQVGSLKEQHLRDSADLKTLLSKAENQAKDVQKEYEKTQTVLSELKLKFEMTEQEKQSITDELKQCKNNLKLLREKGNNKPWPWMPMLAALVAVTAIVLYVPGLARASP

SEQ ID NO: 79414 - protein, 343 aa, Homo sapiens
MVAERTHKAAATGARGPGELGAPGTVALVAARAERGARLPSPGSCGLLTLALCSLALSLLAHFRTAELQARVLRLEAERGEQQMETAILGRVNQLLDEKWKLHSRRRREAPKTSPGCNCPPGPPGPTGRPGLPGVKGQPGEKGSPGDAGLSIIGPRGPPGQPGTRGFPGFPGPIGLDGKPGHPGPKGDMGLTGPPGQPGPQGQKGEKGQCGEYPHRLLPLLNSVRLAPPPVIKRRTFQGEQSQASIQGPPGPPGPPGPSGPLGHPGLPGPMGPPGLPGPPGPKGDPGIQGYHGRKGERGMPGMPGKHGAKGAPGIAVAGMKGEPGIPGTKGDPGAEGKPGPPG

SEQ ID NO: 79415 - protein, 42 aa, Homo sapiens
MEKPLFPLVPLHWFGFGYTALVVSGGIVGYVKTEKQRCFAAY

SEQ ID NO: 79416 - protein, 60 aa, Homo sapiens
MASGCKIGPSILNSDLANLGAECLRMLDSGADYLHLDAPCSSGRSVFCILFPTSPLVTLW

SEQ ID NO: 79417 - protein, 60 aa, Homo sapiens
DKEKKKKESILDLSKYIDKTIRVKFQGGREESQALAHTPEEGHLGSMLETYLPQCSHLSP

SEQ ID NO: 79418 - protein, 219 aa, Homo sapiens
MMFRDQVGILAGWFKGWNECEQTVALLSLLKRVTRTQARFLQLCLEHSLADCNDIHLLESEANSAAIVSQWQQESKEKVVSLLLSHLPLLQPGNTEAKSEYMRLLQKVLAYSIESNAFIEESRQLLSYALIHPATTLEDRNALALWLSHLEERLASGFRSRPEPSYHSRQGSDEWGGPAELGPGEAGPGWQDKPPRENGHVPFHPSSSVPPAINSIGSN

SEQ ID NO: 79419 - protein, 74 aa, Homo sapiens
MSLWGLVSKMPPEKVQRLYVDFPQHLRHLLGDWLESQPWEFLVGSDAFCCNLASALLSDTVQHLQASVGEQGEG

SEQ ID NO: 79420 - protein, 149 aa, Homo sapiens
MSTPARRRLMRDFKRLQEDPPAGVSGAPSENNIMVWNAVIFGPEGTPFEDGTFKLTIEFTEEYPNKPPTVRFVSKMFHPNDGSICLDILQNRWSPTYDVSSILTSIQSLLDEPNPNSPANSQAAQLYQENKREYEKRVSAIVEQSWRDC

SEQ ID NO: 79421 - protein, 471 aa, Homo sapiens
MDSAPLFPRPHLFQNLLLFLWALLNCGLGVSAQGPGEWTPWVSWTRCSSSCGRGVSVRSRRCLRLPGEEPCWGDSHEYRLCQLPDCPPGAVPFRDLQCALYNGRPVLGTQKTYQWVPFHGAPNQCDLNCLAEGHAFYHSFGRVLDGTACSPGAQGVCVAGRCLSAGCDGLLGSGALEDRCGRCGGANDSCLFVQRVFRDAGAFAGYWNVTLIPEGARHIRVEHRSRNHLALMGGDGRYVLNGHWVVSPPGTYEAAGTHVVYTRDTGPQETLQAAGPTSHDLLLQVLLQEPNPGIEFEFWLPRERYSPFQARVQALGWPLRQPQPRGVEPQPPAAPAVTPAQTPTLAPDPCPPCPDTRGRAHRLLHYCGSDFVFQARVLGHHHQAQETRYEVRIQLVYKNRSPLRAREYVWAPGHCPCPMLAPHRDYLMAVQRLVSPDGTQDQLLLPHAGYARPWSPAEDSRIRLTARRCPG

SEQ ID NO: 79422 - protein, 71 aa, Homo sapiens
  MOD_RES (1)..(1): Any amino acid
XRIHLFTLVQILCLAVLWILKSTVAAIIFPVMPQFPPPSVIKIPMESVQSDPQNGIHCIARKRSSSWSYSL

SEQ ID NO: 79423 - protein, 79 aa, Homo sapiens
MDETEWIHRHPKAEDLRVGLISWAGTYLTFEACKNTVTATAKSLGRRQHRVVVSERREVESTGWLCQKEEKWRAQVDHS

SEQ ID NO: 79424 - protein, 1261 aa, Homo sapiens
MSAEASARPLRVGSRVEVIGKGHRGTVAYVGATLFATGKWVGVILDEAKGKNDGTVQGRKYFTCDEGHGIFVRQSQIQVFEDGADTTSPETPDSSASKVLKREGTDTTAKTSKLRGLKPKKAPTARKTTTRRPKPTRPASTGVAGASSSLGPSGSASAGELSSSEPSTPAQTPLAAPIIPTPVLTSPGAVPPLPSPSKEEEGLRAQVRDLEEKLETLRLKRAEDKAKLKELEKHKIQLEQVQEWKSKMQEQQADLQRRLKEARKEAKEALEAKERYMEEMADTADAIEMATLDKEMAEERAESLQQEVEALKERVDELTTDLEILKAEIEEKGSDGAASSYQLKQLEEQNARLKDALVRMRDLSSSEKQEHVKLQKLMEKKNQELEVVRQQRERLQEELSQAESTIDELKEQVDAALGAEEMVEMLTDRNLNLEEKVRELRETVGDLEAMNEMNDELQENARETELELREQLDMAGARVREAQKRVEAAQETVADYQQTIKKYRQLTAHLQDVNRELTNQQEASVERQQQPPPETFDFKIKFAETKAHAKAIEMELRQMEVAQANRHMSLLTAFMPDSFLRPGGDHDCVLVLLLMPRLICKAELIRKQAQEKFELSENCSERPGLRGAAGEQLSFAAGLVYSLSLLQATLHRYEHALSQCSVDVYKKVGSLYPEMSAHERSLDFLIELLHKDQLDETVNVEPLTKAIKYYQHLYSIHLAEQPEDCTMQLADHIKFTQSALDCMSVEVGRLRAFLQGGQEATDIALLLRDLETSCSDIRQFCKKIRRRMPGTDAPGIPAALAFGPQVSDTLLDCRKHLTWVVAVLQEVAAAAAQLIAPLAENEGLLVAALEELAFKASEQIYGTPSSSPYECLRQSCNILISTMNKLATAMQEGEYDAERPPSKPPPVELRAAALRAEITDAEGLGLKLEDRETVIKELKKSLKIKGEELSEANVRLSLLEKKLDSAAKDADERIEKVQTRLEETQALLRKKEKEFEETMDALQADIDQLEAEKAELKQRLNSQSKRTIEGLRGPPPSGIATLVSGIAGEEQQRGAIPGQAPGSVPGPGLVKDSPLLLQQISAMRLHISQLQHENSILKGAQMKASLASLPPLHVAKLSHEGPGSELPAGALYRKTSQLLETLNQLSTHTHVVDITRTSPAAKSPSAQLMEQVAQLKSLSDTVEKLKDEVLKETVSQRPGATVPTDFATFPSSAFLRAKEEQQDDTVYMGKVTFSCAAGFGQRHRLVLTQEQLHQLHSRLIS

SEQ ID NO: 79425 - protein, 471 aa, Homo sapiens
MNGVLIPHTPIAVDFWSLRRAGTARLFFLSHMHSDHTVGLSSTWARPLYCSPITAHLLHRHLQVSKQWIQALEVGESHVLPLDEIGQETMTVTLLDANHCPGSVMFLFEGYFGTILYTGLYSLGKESLLEQLALEFQTWVVLSPRRLELVQLLGLADVFTVEEKAGRIHAVDHMEICHSNMLRWNQTHPTIAILPTSRKIHSSHPDIHVIPYSDHSSYSELRAFVAALKPCQVVPIVSRRPCGGFQDSLSPRISVPLIPDSVQQYMSSSSRKPSLLWLLERRLKRPRTQGVVFESPEESADQSQADRDSKKAKKEKLSPWPADLEKQPSHHPLRIKKQLFPDLYSKEWNKAVPFCESQKRVTMLTAPLGFSVHLRSTDEEFISQKTREEIGLGSPLVPMGDDDGGPEATGNQSAWMGHGSPLSHSSKGTPLLATEFRGLALKYLLTPVNFFQAGYSSRRFDQQVEKYHKPC

SEQ ID NO: 79426 - protein, 131 aa, Homo sapiens
MQRLMMLLATSGACLGLLAVAAVAAAGANPAQRDTHSLLPTHRRQKRDWIWNQMHIDEEKNTSLPHHVGKIKSSVSRKNAKYLLKGEYVGKVFRVDAETGDVFAIERLDRENISEYHLTAVIVDKDTGENL

SEQ ID NO: 79427 - protein, 301 aa, Homo sapiens
MSFSLAPFLSPQSWPPPLPPAQSEIMKVVNLKQAILQAWKERWSDYQWAINMKKFFPKGATWDILNLADALLEQAMIGPSPNPLILSYLKYAISSQFDDFSRDLCVQALLDIMDMFCDRLSCHGKAEECIGLCRALLSALHWLLRCTAASAERLREGLEAGTPAAGEKQLAMCLQRLEKTLSSTKNRALLHIAKLEEASSWTAIEHSLLKLGEILANLSNPQLRSQAEQCGTLIRSIPTMLSVHAEQMHKTGFPTVHAVILLEGTMNLTGETQSLVEQLTMVKRMQHIPTPLFVLEIWKAC

SEQ ID NO: 79428 - protein, 251 aa, Homo sapiens
MFGTESSLSMFLNTLTPKFYVALTGTSSLISGLILIFEWWYFRKYGTSFIEQVSVSHLRPLLGGVDNNSSNNSNSSNGDSDSNRQSVSECKVWRNPLNLFRGAEYNRYTWVTGREPLTYYDMNLSAQDHQTFFTCDSDHLRPADAIMQKAWRERNPQARISAAHEALEINECATAYILLAEEEATTIAEAEKLFKQALKAGDGCYRRSQQLQHHGSQYEAQHSKVSCRLMHWGIRIVKIINQSKFLVQFKI

SEQ ID NO: 79429 - protein, 594 aa, Homo sapiens
MEQLSDEEIDHGAEEDSDKEDQDLDKMFGAWLGELDKLTQSLDSDKPMEPVKRSPLRQETNMANFSYRFSIYNLNEALNQGETVDLDALMADLCSIEQELSSIGSGNSKRQITETKATQKLPVSRHTLKHGTLKGLSSSSNRIAKPSHASYSLDDVTAQLEQASLSMDEAAQQSVLEDTKPLVTNQHRRTASAGTVSDAEVHSISNSSHSSITSAASSMDSLDIDKVTRPQELDLTHQGQPITEEEQAAKLKAEKIRVALEKIKEAQVKKLVIRVHMSDDSSKTMMVDERQTVRQVLDNLMDKSHCGYSLDWSLVETVSELQMERIFEDHENLVENLLNWTRDSQNKLIFMERIEKYALFKNPQNYLLGKKETAEMADRNKEVLLEECFCGSSVTVPEIEGVLWLKDDGKKSWKKRYFLLRASGIYYVPKGKAKVSRDLVCFLQLDHVNVYYGQDYRNKYKAPTDYCLVLKHPQIQKKSQYIKYLCCDDVRTLHQWVNGIRIAKYGKQLYMNYQEALKRTESAYDWTSLSSSSIKSGSSSSSIPESQSNHSNQSDSGVSDTQPAGHVRSQSIVSSVFSEAWKRGTQLEESSKIN

SEQ ID NO: 79430 - protein, 495 aa, Homo sapiens
MSQLVECVPNFSEGKNQEVIDAISGAITQTPGCVLLDVDAGPSTNRTVYTFVGPPECVVEGALNAARVASRLIDMSRHQGEHPRMGALDVCPFIPVRGVSVDECVLCAQAFGQRLAEELDVPVYLYGEAARMDSRRTLPAIRAGEYEALPKKLQQADWAPDFGPSSFVPSWGATATGARKFLIAFNINLLGTKEQAHRIALNLREQGRGKDQPGRLKKVQGIGWYLDEKNLAQVSTNLLDFEVTALHTVYEETCREAQELSLPVVGSQLVGLVPLKALLDAAAFYCEKENLFILEEEQRIRLVVSRLGLDSLCPFSPKERIIEYLVPERGPERGLGSKSLRAFVGEVGARSAAPGGGSVAAAAAAMGAALGSMVGLMTYGRRQFQSLDTTMRRLIPPFREASAKLTTLVDADAEAFTAYLAHGGPTGGSEAGSLCAADAGGDGGLAVAGPAGTGPVWEPGLPVRPPGGGQSPGDGRVWRIFQRAHQPEGHHRRGI

SEQ ID NO: 79431 - protein, 1115 aa, Homo sapiens
MAERGGDGGESERFNPGELRMAQQQALRFRGPAPPPNAVMRGPPPLMRPPPPFGMMRGPPPPPRPPFGRPPFDPNMPPMPPPGGIPPPMGPPHLQRPPFMPPPMSSMPPPPGMMFPPGMPPVTAPGTPALPPTEEIWVENKTPDGKVYYYNARTRESAWTKPDGVKVIQQSELTPMLAAQAQVQAQAQAQAQAQAQAQAQAQAQAQAQAQAQAQAQAQAQAQAQAQAQAQAQAQAQAQAQAQVQAQVQAQVQAQAVGASTPTTSSPAPAVSTSTSSSTPSSTTSTTTTATSVAQTVSTPTTQDQTPSSAVSVATPTVSVSTPAPTATPVQTVPQPHPQTLPPAVPHSVPQPTTAIPAFPPVMVPPFRVPLPGMPIPLPGVAMMQIVSCPYVKTVATTKTGVLPGMAPPIVPMIHPQVAIAASPATLAGATAVSEWTEYKTADGKTYYYNNRTLESTWEKPQELKEKEKLEEKIKEPIKEPSEEPLPMETEEEDPKEEPIKEIKEEPKEEEMTEEEKAAQKAKPVATAPIPGTPWCVVWTGDERVFFYNPTTRLSMWDRPDDLIGRADVDKIIQEPPHKKGMEELKKLRHPTPTMLSIQKWQFSMSAIKEEQELMEEINEDEPVKAKKRKRMSKKSFMWIARASLFRRDDNKDIDSEKEAAMEAEIKAARERAIVPLEARMKQFKDMLLERGVSAFSTWEKELHKIVFDPRYLLLNPKERKQVFDQYVKTRAEEERREKKNKIMQAKEDFKKMMEEAKFNPRATFSEFAAKHAKDSRFKAIEKMKDREALFNEFVAAARKKEKEDSKTRGEKIKSDFFELLSNHHLDSQSRWSKVKDKVESDPRYKAVDSSSMREDLFKQYIEKIAKNLDSEKEKELERQARIEASLREREREVQKARSEQTKEIDREREQHKREEAIQNFKALLSDMVRSSDVSWSDTRRTLRKDHRWESGSLLEREEKEKLFNEHIEALTKKKREHFRQLLDETSAITLTSTWKEVKKIIKEDPRCIKFSSSDRKKQREFEEYIRDKYITAKADFRTLLKETKFITYRSKKLIQESDQHLKDVEKILQNDKRYLVLDCVPEERRKLIVAYVDDLDRRGPPPPPTASEPTRRSTK

SEQ ID NO: 79432 - protein, 86 aa, Homo sapiens
LPFLNPEVPDQFYRLWLSLFLHAGVVHCLVSVVFQMTILRDLEKLAGWHRIAIIFILSGITGNLASAIFLPYRAEPQGSPCLPGRS

SEQ ID NO: 79433 - protein, 540 aa, Homo sapiens
DASASEEEEEEEEEEDEDEEEEVAAWRLPPRWSQLGTSQRPRPSRPTHRKTCSQRRRRAMRAFRMLLYSKSTSLTFHWKLWGRHRGRRRGLAHPKNHLSPQQGGATPQVPSPCCRFDSPRGPPPPRLGLLGALMAEDGVRGSPPVPSGPPMEEDGLRWTPKSPLDPDSGLLSCTLPNGFGGQSGPEGERSLAPPDASILISNVCSIGDHVAQELFQGSDLGMAEEAERPGEKAGQHSPLREEHVTCVQSILDEFLQTYGSLIPLSTDEVVEKLEDIFQQEFSTPSRKGLVLQLIQSYQRMPGNAMVRGFRVAYKRHVLTMDDLGTLYGQNWLNDQVMNMYGDLVMDTVPEKVHFFNSFFYDKLRTKGYDGVKRWTKNVDIFNKELLLIPIHLEVHWSLISVDVRRRTITYFDSQRTLNRRCPKHIAKYLQAEAVKKDRLDFHQGWKGYFKMNVARQNNDSDCGAFVLQYCKHLALSQPFSFTQQDMPKLRRQIYKELCHCKLTVQGNPPIPTISLLIPSSLAHVQAVSNPSLLQGKTNNI

SEQ ID NO: 79434 - protein, 179 aa, Homo sapiens
MGSQHSAAARPSSCRRKQEDDRDGLLASGLVVFFLFPHSVLVDDDGIKVVKVTFNKQDSLVILTIMATLKIRNSNFYTVAVTSLSSQIQYMNTVVSTYVTTNVSLIPPRSEQLVNFTGKAEMGGPFSYVYFFCTVPEILVHNIVIFMRTSVKISYIGLMTQSSLETHHYVDCGGNSTAI

SEQ ID NO: 79435 - protein, 121 aa, Homo sapiens
MPREDRATWKSNYFLKIIQLLDDYPKCFIVGADNVGSKQMQQIRMSLRGKAVVLMGKNTMMRKAIRGHLENNPALEKLLPHIRGNVGFVFTKEDLTEIRDMLLANKLLPVLVPLPHVKSLC

SEQ ID NO: 79436 - protein, 87 aa, Homo sapiens
MNTDSGGCARKRAAMSVTLTSVKRVQSSPNLLAAGRDSQSPDSAWRSYNDGNQETLNGDATYSSLAAKGFRSVRPNLQDKRSPTQSQ

SEQ ID NO: 79437 - protein, 449 aa, Homo sapiens
MKIIFPILSNPVFRRTVKLLLCLLWIGYSQGTTHVLRFGGIFEYVESGPMGAEELAFRFAVNTINRNRTLLPNTTLTYDTQKINLYDSFEASKKACDQLSLGVAAIFGPSHSSSANAVQSICNALGVPHIQTRWKHQVSDNKDSFYVSLYPDFSSLSRAILDLVQFFKWKTVTVVYDDSTGLIRLQELIKAPSRYNLRLKIRQLPADTKDAKPLLKEMKRGKEFHVIFDCSHEMAAGILKQALAMGMMTEYYHYIFTTLDLFALDVEPYRYSGVNMTGFRILNTENTQVSSIIEKWSMERLQAPPKPDSGLLDGFMTTDAALMYDAVHVVSVAVQQFPQMTVSSLQCNRHKPWRFGTRFMSLIKEAHWEGLTGRITFNKTNGLRTDFDLDVISLKEEGLEKVPSRPSTSPGGALPETQLKHLLWEHAAPRHTAVGKAGLGLWPLLSTVS

SEQ ID NO: 79438 - protein, 153 aa, Homo sapiens
KQINNIFYRFIYETEHHNGIAELLEILGSIINGFALPLKEEHKIFLLKVLLPLHKVKSLSVYHPQLAYCVVQFLEKDSTLTEPVVMALLKYWPKTHSPKEVMFLNELEEILDVIEPSEFVKIMEPLFRQLAKCVSSPHFQREAKNERTGRSMG

SEQ ID NO: 79439 - protein, 125 aa, Homo sapiens
MAAETLLSSLLGLLLLGLLLPASLTGGVGSLNLEELSEMRYGIEILPLPVMGGQSQSSDVVIVSSKYKQRYECRLPAGAIHFQREREEETPAYQGPGIPELLSPMRDAPCLLKGGMERPQVENRL

SEQ ID NO: 79440 - protein, 85 aa, Homo sapiens
MAERRRHKKRIQEVGEPSKEEKAVAKYLRFNCPTKSTNMMGHRVDYFIASKAVDCLLDSKWAKAKKGEEALFTTRESVVDYCNRS

SEQ ID NO: 79441 - protein, 565 aa, Homo sapiens
MVYRYCCKLNKKLKSYSLSRKKIVHYTCFDQRKRANAAFLIGAYAVIYLKKTPEEAYRALLSGSNPPYLPFRDASFGNCTYNLTILDCLQGIRKGLQHGFFDFETFDVDEYEHYERVENGDFNWIVPGKFLAFSGPHPKSKIENGYPLHAPEAYFPYFKKHNVTAVVRLNKKIYEAKRFTDAGFEHYDLFFIDGSTPSDNIVRRFLNICENTEGAIAVHCKAGLGRTGTLIACYVMKHYRFTHAEIIAWIRICRPGSIIGPQQHFLEEKQASLWVQGDIFRSKLKNRPSSEGSINKILSGLDDMSIGGNLSKTQNMERFGEDNLEDDDVEMKNGITQGDKLRALKSQRQPRTSPSCAFRSDDTKGHPRAVSQPFRLSSSLQGSAVTLKTSKMALSPSATAKRINRTSLSSGATVRSFSINSRLASSLGNLNAATDDPENKKTSSSSKAGFTASPFTNLLNGSSQPTTRNYPELNNNQYNRSSNSNGGNLNSPPGPHSAKTEEHTTILRPSYTGLSSSSARFLSRSIPVSAQTPPPGPQNPECNFCALPSQPRLPPKKFNSAKEAF

SEQ ID NO: 79442 - protein, 152 aa, Homo sapiens
MAFTFAAFCYMLTLVLCASLIFFVIWHIIAFDELRTDFKNPIDQGNPARARERLKNIERICCLLRKLVVPEYSIHGLFCLMFLCAAEWVTLGLNIPLLFYHLWRYFHRPADGSEVMYDAVSIMNADILNYCQKESWCKLAFYLLSFFYYLYR

SEQ ID NO: 79443 - protein, 64 aa, Homo sapiens
MHTLLAATKDSLAMDPPVVNRPKKSKTKKAPIKTITKAAPAAPPVPAANEIATNKPKITWQALN

SEQ ID NO: 79444 - protein, 622 aa, Homo sapiens
MFRCGGLAAGALKQKLVPLVRTVCVRSPRQRNRLPGNLFQRWHVPLELQMTRQMASSGASGGKIDNSVLVLIVGLSTVGAGAYAYKTMKEDEKRYNERISGLGLTPEQKQKKAALSASEGEEVPQDKAPSHVPFLLIGGGTAAFAAARSIRARDPGARVLIVSEDPELPYMRPPLSKELWFSDDPNVTKTLRFKQWNGKERSIYFQPPSFYVSAQDLPHIENGGVAVLTGKKVVQLDVRDNMVKLNDGSQITYEKCLIATGGTPRSLSAIDRAGAEVKSRTTLFRKIGDFRSLEKISREVKSITIIGGGFLGSELACALGRKARALGTEVIQLFPEKGNMGKILPEYLSNWTMEKVRREGVKVMPNAIVQSVGVSSGKLLIKLKDGRKVETDHIVAAVGLEPNVELAKTGGLEIDSDFGGFRVNAELQARSNIWVAGDAACFYDIKLGRRRVEHHDHAVVSGRLAGENMTGAAKPYWHQSMFWSDLGPDVGYEAIGLVDSSLPTVGVFAKATAQDNPKSATEQSVYLFWGLATGTGIRSESETESEASEITIPPSTPAVPQAPVQGEDYGKGVIFYLRDKVVVGIVLWNIFNRMPIARKIIKDGEQHEDLNEVAKLFNIHED

SEQ ID NO: 79445 - protein, 134 aa, Homo sapiens
  MOD_RES (1)..(1): Any amino acid
XMPVIKPDIANWELSVKLHDKVHTVVASNNGSVFSVEVDGSKLNVTSTWNLASPLLSVSVDGTQRTVQCLSREAGGNMSIQFLGTVVAEGQEICVIEAMKMQNSMTAGKTGTVKSVHCQAGDTVGEGDLLVELE

SEQ ID NO: 79446 - protein, 107 aa, Homo sapiens
MIKRRQGHIVAISSIQGKMSIPFRSAYAASKHATQAFFDCLRAEMEQYEIEVTVISPGYIHTNLSVNAITADGSRYGGKLSTSLLTWKRRVSLVFTLETVDPGKSWN

SEQ ID NO: 79447 - protein, 234 aa, Homo sapiens
  MOD_RES (1)..(1): Any amino acid
XLTKNCKAAAGKSPSLIFTNRHEVRRIDLVKRNYSRLIPMLKNVVALDVEVATNRIYWCDLSYRKIYSAYMDKASDPKEQEVLIDEQLHSPEGLAVDWVHKHIYWTDSGNKTISVATVDGGRRRTLFSRNLSEPRAIAVDPLRGFMYWSDWGDQAKIEKSGLNGVDRQTLVSDNIEWPNGITLDLLSQRLYWVDSKLHQLSSIDFSGGNRKTLISSTDFLSHPFGIAVFEHPAL

SEQ ID NO: 79448 - protein, 361 aa, Homo sapiens
MKRLPLLVVFSTLLNCSYTQNCTKTPCLPNAKCEIRNGIEACYCNMGFSGNGVTICEDDNECGNLTQSCGENANCTNTEGSYYCMCVPGFRSSSNQDRFITNDGTVCIENVNANCHLDNVCIAANINKTLTKIRSIKEPVALLQEVYRNSVTDLSPTDIITYIEILAESSSLLGYKNNTISAKDTLSNSTLTEFVKTVNNFVQRDTFVVWDKLSVNHRRTHLTKLMHTVEQATLRISQSFQKTTEFDTNSTDIALKVFFFDSYNMKHIHPHMNMDGDYINIFPKRKAAYDSNGNVAVAFVYYKSIGPLLSSSDNFLLKPQNYDNSEEEERVISSVISVSMSSNPPTLYELEKITFTLSHRK

SEQ ID NO: 79449 - protein, 292 aa, Homo sapiens
MGPLSAPPCTQRITWKGVLLTVETPKPSISSSNLNPREAMEAVILTCDPATPAASYQWWMNGQSLPMTHRLQLSKTNRTLFIFGVTKYIAGPYECEIRNPVSASRSDPVTLNLLPKLSKPYITINNLNPRENKDVLTFTCEPKSKNYTYIWWLNGQSLPVSPRVKRPIENRILILPNVTRNETGPYQCEIRDRYGGIRSDPVTLNVLYGPDLPSIYPSFTYYRSGENLYLSCFAESNPRAQYSWTINGKFQLSGQKLSIPQITTKHSGLYACSVRNSATGKESSKSITVKVS

SEQ ID NO: 79450 - protein, 108 aa, Homo sapiens
MSNKVPVVQHPHHVHPLTPLITYSNEHFTPGNPPPHLPADVDPKTGIPRPPHPPDISPYYPLSPGTVGQIPHPLGWLVPQQGQPVYPITTGGFRHPYPTALTVNASMS

SEQ ID NO: 79451 - protein, 230 aa, Homo sapiens
MSQDNDTLMRDILGHELAAMRLQKLEQQRRLFEKKQRQKRQELLMVQANPDASPWLWRSCLREERLLGDRVFRNLGLQSPFLSWLPDNSDAELEEVSVENGSVSPPPFKQSPRIRRKGWQAHQRPGTRAEGESDSQDMGDAHKSPNMGPNPGMDGDCVYENLAFQKEEDLEKKREASESTGTNSSAAHNEELSKALKGEGGTDSDHMRHEASLAIRSPCPGLEEDMEAYV

SEQ ID NO: 79452 - protein, 133 aa, Homo sapiens
MTKSNGEEPKMGGRMERFQQGVRKRTLLAKKKVQNITKEDVKSYLFRNAFVLLTVTAVIVGTILGFTLRPYRMSYREVKYFSFPGELLMRMLQMLVLPLIISSLVTGTISSCWFVWFFLSVFIAKDCLEKPVL

SEQ ID NO: 79453 - protein, 101 aa, Homo sapiens
  MOD_RES (1)..(1): Any amino acid
XMDTYYLMKEDFENIMEISSWGGKPSPFSKLDPKVKAAFTRAYNKEAHLTPYSLQAIKASRHSTSPSLDSEYNEELNEDDSQSDEKDQDAIETDAMIKVVF

SEQ ID NO: 79454 - protein, 114 aa, Homo sapiens
  MOD_RES (1)..(1): Any amino acid
XSPPALELARGSVAPAPGAKAKSLEGGGAGPVDYHLLMMFTKAEHNAALQAKARVALRSLLRLAKFEAHEVLNLHFVSEEASREVAKGLLRELLPPAAGFKCKFLTSEDGTGHQ

SEQ ID NO: 79455 - protein, 482 aa, Homo sapiens
MASRLTLLTLLLLLLAGDRASSNPNATSSSSQDPESLQDRGEGKVATTVISKMLFVEPILEVSSLPTTNSTTNSATKITANTTDEPTTQPTTEPTTQPTIQPTQPTTQLPTDSPTQPTTGSFCPGPVTLCSDLESHSTEAVLGDALVDFSLKLYHAFSAMKKVETNMAFSPFSIASLLTQVLLGAGENTKTNLESILSYPKDFTCVHQALKGFTTKGVTSVSQIFHSPDLAIRDTFVNASRTLYSSSPRVLSNNSDANLELINTWVAKNTNNKISRLLDSLPSDTRLVLLNAIYLSAKWKTTFDPKKTRMEPFHFKNSVIKVPMMNSKKYPVAHFIDQTLKAKNLKHRLEDMEQALSPSVFKAIMEKLEMSKFQPTLLTLPRIKVTTSQDMLSIMEKLEFFDFSYDLNLCGLTEDPDLQVSAMQHQTVLELTETGVEAAAASAISVARTLLVFEVQQPFLFVLWDQQHKFPVFMGRVYDPRA

SEQ ID NO: 79456 - protein, 213 aa, Homo sapiens
MAHFSSEDQAMLQAMLRRLFQSVKEKITGAPSLECAEEILLHLEETDENFHNYEFVKYLRQHIGNTLGSMIEEEMEKCTSDRNQGEECGYDTVVQQVTKRTQESKEYKEMMHYLKNIMIAVVESMINKFEEDETRNQERQKKIQKEKSHSYRTDNCSDSDSSLNQSYKFCQGKLQLILDQLDPGQPKEVRYEALQTLCSAPPSDVLNCENWTT

SEQ ID NO: 79457 - protein, 271 aa, Homo sapiens [sequence omitted]

SEQ ID NO: 79458 - protein, 66 aa, Homo sapiens
MSDVTIVKEGWVQKRGEYIKNWRPRYFLLKTDGSFIGYKEKPQDVDLPYPLNNFSVASSNSNHTPI

SEQ ID NO: 79459 - protein, 76 aa, Homo sapiens
MTSLMPGAGLLPIPTPNPLTTLGVSLSSLGAIPAAALDPNIATLGEIPQPPLMGNVDPSKIDEIRRTVYVGNLNSQ

SEQ ID NO: 79460 - protein, 165 aa, Homo sapiens
MPRSGAPKERPAEPLTPPPSYGHQPQTGSGESSGASGDKDHLYSTVCKPRSPKPAAPAAPPFSSSSGVLGTGLCELDRLLQELNATQFNITDEIMSQFPSSKVASGEQKEDQSEDKKRPSLPSSPSPGLPKASATSATLELDRLMASLSDFRVQNHLPASGPTQP

SEQ ID NO: 79461 - protein, 88 aa, Homo sapiens
MVLRMVEAMSQLQDEKTQLQEELVVLQERLALRDSDQQATSTQLQNQVEHLKEKLISQAQEVSRLRSELGGTDLEKHRDLLMVENERL

SEQ ID NO: 79462 - protein, 228 aa, Homo sapiens
MMVLQVSAAPRTVALTALLMVLLTSVVQGRATPENYVYQLRQECYAFNGTQRFLERYIYNREEFVRFDSDVGEFRAVTELGRPDEDYWNSQKDLLEEKRAVPDRVCRHNYELDEAVTLQRRGSIQVRWFLNGQEETAGVVSTNLIRNGDWTFQILVMLEMTPQQGDVYICQVEHTSLDSPVTVEWKAQSDSARSKTLTGAGGFVLGLIICGVGIFMHRRSKKVQRGSA

SEQ ID NO: 79463 - protein, 184 aa, Homo sapiens
MNPIALGSRWLAYAENKLIRCHQSRGGACGDNIQSYTATVISAAKTLKSGLTMVGKVVTQLTGTLPSGVTEDDVAIHSNSRRSPLVPGIITVIDTETVGEGQVLVSEDSDSDGIVAHFPAHEKPVCCMAFNTSGMLLVTTDTLGHDFHVFQILTHPWSSSQCAVHHLYTLHRGETEAKVQDICF

SEQ ID NO: 79464 - protein, 76 aa, Homo sapiens
  MOD_RES (1)..(1): Any amino acid
XGDTCLHVAARYNHLSIIRLLLTAFCSVHEKNQAGDTALHVAAALNHKKVAKILLEAGADTTIVNNLPDCSEHNLA

SEQ ID NO: 79465 - protein, 111 aa, Homo sapiens
  MOD_RES (1)..(1): Any amino acid
XRKRRGNLPKESVKILRDWLYLHRYNAYPSEQEKLSLSGQTNLSVLQICNWFINARRRLLPDMLRKDGKDPNQFTISRRGEGFLWITAKHWDHLLCPEVFNRKMPAGTTAL

SEQ ID NO: 79466 - protein, 101 aa, Homo sapiens
MEGYPWWPCLVYNHPFDGTFIREKGKSVRVHVQFFDDSPTRGWVSKRLLKPYTGSKSKEAQKGGHFYSAKPEILRAMQRADEALNKDKIKRLELAVCDEPS

SEQ ID NO: 79467 - protein, 173 aa, Homo sapiens
MLLGEARAVLKWADGKMIKNEVDMQVLHLLGPKLEADLEKKFKVAKARLEETDRRTAKDVVENGETADQTLSLMEQLRGEALKFHKPGENYKTPGYVVTPHTMNLLKQHLEITGGQVRTRFPPEPNGILHIGHAKAINFNFGYAKANNGICFLRFDDTNPEKEEAKFFTAICD

SEQ ID NO: 79468 - protein, 31 aa, Homo sapiens
ASRCERKREEANSRQLFSHQLFPSISYLNVL

SEQ ID NO: 79469 - protein, 128 aa, Homo sapiens
MPHRKERPSGSSLHTHGSTGTAEGGNMSRLSLTRSPVSPLAAQGIPLPAQLTKSNAPVHIDVGGHMYTSSLATLTKYPDSRISRLFNGTEPIVLDSLKQHYFIDRDGEIFRYVLSFLRTSKLLLPDDF

SEQ ID NO: 79470 - protein, 337 aa, Homo sapiens
MLGKDYMLAIILVNCDDDLWGDHSLEVEAGLPPGWRKIHDAAGTYYWHVPSGSTQWQRPTWELGDAEDPGTGTEGIWGLRPPKGRSFSSLESSLDRSNSLSWYGGESYIQSMEPGAKCFAVRSLGWVEVPEEDLAPGKSSIAVNNCIQQLAQTRSRSQPPDGAWGEGQNMLMILKKDAMSLVNPLDHSLIHCQPLVHIRVWGVGSSKGRDFAFVASDKDSCMLKCHVFCCDVPAKAIASALHGLCAQILSERVEVSGDASCCSPDPISPEDLPRQVELLDAVSQAAQKYEALYMGTLPVTKAMGRGQYRGGAIVAVPCAPCDIYWCWPRPTHLWPHR

SEQ ID NO: 79471 - protein, 157 aa, Homo sapiens
MDAIKKKMQMLKLDKENALDRAEQAEADKKAAEDRSKQLEDELVSLQKKLKGTEDELDKYSEALKDAQEKLELAEKKATDAEADVASLNRRIQLVEEELDRAQERLATALQKLEEAEKAADESERWPVSWSSLRATWNVQRSGLSSQKAKSDSWKNN

SEQ ID NO: 79472 - protein, 77 aa, Homo sapiens
MLKDYLSVAQDALRTQKELYHVKEQRLALALDEYVRLNDAYKEKSSSHTSLFSGSSSSTKYDPDILKAEISTTRLRN

SEQ ID NO: 79473 - protein, 2969 aa, Homo sapiens
MDPRNTAMLGLGSDSEGFSRKSPSAISTGTLVSKREVELEKNTKEEEDLRKRNRERNIEAGKDDGLTDAQQQFSVKETNFSEGNLKLKIGLQAKRTKKPPKNLENYVCRPAIKTTIKHPRKALKSGKMTDEKNEHCPSKRDPSKLYKKADDVAAIECQSEEVIRLHSQGENNPLSKKLSPVHSEMADYINATPSTLLGSRDPDLKDRALLNGGTSVTEKLAQLIATCPPSKSSKTKPKKLGTGTTAGLVSKDLIRKAGVGSVAGIIHKDLIKKPTISTAVGLVTKDPGKKPVFNAAVGLVNKDSVKKLGTGTTAVFINKNLGKKPGTITTVGLLSKDSGKKLGIGIVPGLVHKESGKKLGLGTVVGLVNKDLGKKLGSTVGLVAKDCAKKIVASSAMGLVNKDIGKKLMSCPLAGLISKDAINLKAEALLPTQEPLKASCSTNINNQESQELSESLKDSATSKTFEKNVVRQNKESILEKFSVRKEIINLEKEMFNEGTCIQQDSFSSSEKGSYETSKHEKQPPVYCTSPDFKMGGASDVSTAKSPFSAVGESNLPSPSPTVSVNPLTRSPPETSSQLAPNPLLLSSTTELIEEISESVGKNQFTSESTHLNVGHRSVGHSISIECKGIDKEVNDSKTTHIDIPRISSSLGKKPSLTSESSIHTITPSVVNFTSLFSNKPFLKLGAVSASDKHCQVAESLSTSLQSKPLKKRKGRKPRWTKVVARSTCRSPKGLELERSELFKNVSCSSLSNSNSEPAKFMKNIGPPSFVDHDFLKRRLPKLSKSTAPSLALLADSEKPSHKSFATHKLSSSMCVSSDLLSDIYKPKRGRPKSKEMPQLEGPPKRTLKIPASKVFSLQSKEEQEPPILQPEIEIPSFKQGLSVSPFPKKRGRPKRQMRSPVKMKPPVLSVAPFVATESPSKLESESDNHRSSSDFFESEDQLQDPDDLDDSHRPSVCSMSDLEMEPDKKITKRNNGQLMKTIIRKINKMKTLKRKKLLNQILSSSVESSNKGKVQSKLHNTVSSLAATFGSKLGQQINVSKKGTIYIGKRRGRKPKTVLNGILSGSPTSLAVLEQTAQQAAGSALGQILPPLLPSSASSSEILPSPICSQSSGTSGGQSPVSSDAGFVEPSSVPYLHLHSRQGSMIQTLAMKKASKGRRRLSPPTLLPNSPSHLSELTSLKEATPSPISESHSDETIPSDSGIGTDNNSTSDRAEKFCGQKKRRHSFEHVSLIPPETSTVLSSLKEKHKHKCKRRNHDYLSYDKMKRQKRKRKKKYPQLRNRQDPDFIAELEELISRLSEIRITHRSHHFIPRDLLPTIFRINFNSFYTHPSFPLDPLHYIRKPDLKKKRGRPPKMREAMAEMPFMHSLSFPLSSTGFYPSYGMPYSPSPLTAAPIGLGYYGRYPPTLYPPPPSPSFTTPLPPPSYMHAGHLLLNPAKYHKKKHKLLRQEAFLTTSRTPLLSMSTYPSVPPEMAYGWMVEHKHRHRHKHREHRSSEQPQVSMDTGSSRSVLESLKRYRFGKDAVGERYKHKEKHRCHMSCPHLSPSKSLINREEQWVHREPSESSPLALGLQTPLQIDCSESSPSLSLGGFTPNSEPASSDEHTNLFTSAIGSCRVSNPNSSGRKKLTDSPGLFSAQDTSLNRLHRKESLPSNERAVQTLAGSQPTSDKPSQRPSESTNCSPTRKRSSSESTSSTVNGVPSRSPRLVASGDDSVDSLLQRMVQNEDQEPMEKSIDAVIATASAPPSSSPGRSHSKDRTLGKPDSLLVPAVTSDSCNNSISLLSEKLTSSCSPHHIKRSVVEAMQRQARKMCNYDKILATKKNLDHVNKILKAKKLQRQARTGNNFVKRRPGRPRKCPLQAVVSMQAFQAAQFVNPELNRDEEGAALHLSPDTVTDVIEAVVQSVNLNPEHKKGLKRKGWLLEEQTRKKQKPLPEEEEQENNKSFNEAPVEIPSPSETPAKPSEPESTLQPVLSLIPREKKPPRPPKKKYQKAGLYSDVYKTTDPKSRLIQLKKEKLEYTPGEHEYGLFPAPIHVGKYLRQKRIDFQLPYDILWQWKHNQLYKKPDVPLYKKIRSNVYVDVKPLSGYEATTCNCKKPDDDTRKGCVDDCLNRMIFAECSPNTCPCGEQCCNQRIQRHEWVQCLERFRAEEKGWGIRTKEPLKAGQFIIEYLGEVVSEQEFRNRMIEQYHNHSDHYCLNLDSGMVIDSYRMGNEARFINHSCDPNCEMQKWSVNGVYRIGLYALKDMPAGTELTYDYNFHSFNVEKQQLCKCGFEKCRGIIGGKSQRVNGLTSSKNSQPMATHKKSGRSKEKRKSKHKLKKRRGHLSEEPSENINTPTRLTPQLQMKPMSNRERNFVLKHHVFLVRNWEKIRQKQEEVKHTSDNIHSASLYTRWNGICRDDGNIKSDVFMTQFSALQTARSVRTRRLAAAEENIEVARAARLAQIFKEICDGIISYKDSSRQALAAPLLNLPPKKKNADYYEKISDPLDLITIEKQILTGYYKTVEAFDADMLKVFRNAEKYYGRKSPVGRDVCRLRKAYYNARHEASAQIDEIVGETASEADSSETSVSEKENGHEKDDDVIRCICGLYKDEGLMIQCDKCMVWQHCDCMGVNSDVEHYLCEQCDPRPVDREVPMIPRPHYAQPGCVYFICLLRDDLLLRQGDCVYLMRDSRRTPDGHPVRQSYRLLSHINRDKLDIFRIEKLWKNEKEERFAFGHHYFRPHETHHSPSRRFYHNELFRVPLYEIIPLEAVVGTCCVLDLYTYCKGRPKGVKEQDVYICDYRLDKSAHLFYKIHRNRYPVCTKPYAFDHFPKKLTPKKDFSPHYVPDNYKRNGGRYPSGRSSWKSERSKPPLKDLGQEDDALPLIEEVLASQEQAANEIPSLEEPEREGATANVSEGEKKTEESSQEPQSTCTPEERRHNQRERLNQILLNLLEKIPGKNAIDVTYLLEEGSGRKLRRRTLFIPENSFRK

SEQ ID NO: 79474 - protein, 83 aa, Homo sapiens
MLSRLRVVSTTCTLACRHLHIKEKGKPLMLNPRTNKGMAFTLQERQMLGLQGLLPPKIETQDIQALRFHRNLKKMTSPLEKHS

SEQ ID NO: 79475 - protein, 138 aa, Homo sapiens
MYPPPSSTILANIVNALASVPKFYVQVLHLMNKMNLPTPFGPITARPPMYEDYMPLHAPLPPTSPQPPEEPPLPDEDEELSSEESEYESTDDEDRQRMNKLMELANLQPKRPKTIKQRHVRKKRKIKDMLNTPLCPSH

SEQ ID NO: 79476 - protein, 238 aa, Homo sapiens
MMSYLKQPPYAVNGLSLTTSGMDLLHPSVGYPGPWASCPAATPRKQRRERTTFTRAQLDVLEALFAKTRYPDIFMREEVALKINLPESRVQVWFKNRRAKCRQQQQQQQNGGQNKVRPAKKKTSPAREVSSESGTSGQFTPPSSTSVPTIASSSAPVSIWSPASISPLSDPLSTSSSCMQRSYPMTYTQASGYSQGYAGSTSYFGGMDCGSYLTPMHHQLPGPGATLSPMGTNAVTSH

SEQ ID NO: 79477 - protein, 150 aa, Homo sapiens
MVHVSNRSIQDDLKVVRIMMTSSLGLSFLLNLILGMKFTYLIPQNKYIQLFTTILSFFSGISLLWALILYHNKLKQGQSMHFSSYRITWIMYTAYLNVFFLSVCGVLSLLECKLSTSSCTCLNIHKSDNECKESENSIEDISLPECTAMP

SEQ ID NO: 79478 - protein, 278 aa, Homo sapiens
MSSEDREAQEDELLALASIYDGDEFRKAESVQGGETRIYLDLPQNFKIFVSGNSNECLQNSGFEYTICFLPPLVLNFELPPDYPSSSPPSFTLSGKWLSPTQLSALCKHLDNLWEEHRGSVVLFAWMQFLKEETLAYLNIVSPFELKIGSQKKVQRRTAQASPNTELDFGGAAGSDVDQEEIVDERAVQDVESLSNLIQEILDFDQAQQIKCFNSKLFLCSICFCEKLGSECMYFLECRHVYCKACLKDYFEIQIRDGQVQCLNCPEPKCPSVATPGQ

SEQ ID NO: 79479 - protein, 132 aa, Homo sapiens
MSVGFIGAGQLAFALAKGFTAAGVLAAHKIMASSPDMDLATVSALRLSAFRPAPRVIRCMTNTPVVVREGATVYATGTHAQVEDGRLMEQLLSSVGFCTEVEEDLIDAVTGLSGSGPAYAFTALDALADGGV

SEQ ID NO: 79480 - protein, 13 aa, Homo sapiens
MGETEKRIETHRI

SEQ ID NO: 79481 - protein, 150 aa, Homo sapiens
  MOD_RES (1)..(1): Any amino acid
XRGGQKKKGNKHKWVPLQIDMKPEVPREKLASRPTRPPEPRHIPANRGEIKGSESATYVPVAPPTPAWQPEIKPEPAWHDQDETSSVKSDGAAHFDYQFGYRKFDGVEGPRTPKYMNNITYYFDNVSSTELYSVDQELLKDYIKRQIEYY

SEQ ID NO: 79482 - protein, 152 aa, Homo sapiens
MACRGGAGNGHRASATLSRVSPGSLYTCRTRTHNICMVSDFFYPNMGGVESHIYQLSQCLIERGHKVIIVTHAYGNRKGIRYLTSGLKVYYLPLKVMYNQSTATTLFHSLPLLRYIFVRERVTIIHSHSSFSAMAHDALFHAKTMGLQTVFT

SEQ ID NO: 79483 - protein, 45 aa, Homo sapiens
MPIRRTVNSTRETPPKSKLAEGEEEKPEPDISSEESVSTVEEQEN

SEQ ID NO: 79484 - protein, 31 aa, Homo sapiens
MAENLKRLVSNETLRTLQEKLDFWLKEYNSG

SEQ ID NO: 79485 - protein, 111 aa, Homo sapiens
  MOD_RES (1)..(1): Any amino acid
XRFPPFFTLQPNVDTRQKQLAAWCSLVLSFCRLHKQSSMTVMEAQESPLFNNVKLQRKLPVESIQIVLEELRKKEFHGLDEATLLRALQALQQEHKAEIITVSDGRGVKFF

SEQ ID NO: 79486 - protein, 164 aa, Homo sapiens
MLWFSGVGALAERYCRRSPGITCCVLLLLNCSGVPMSLASSFLTGSVAKCENEGEVLQIPFITDNPCIMCVCLVAPMKEIPITAPSNGRARLSLVFYASARRALSQSLGCAVLFIVKTLWSIWECAAPHVQAVCLRVCSIKKGRNFSQKEANVPSVPALSEESV

SEQ ID NO: 79487 - protein, 53 aa, Homo sapiens
MTFLHNAGKFDAQGKSFIKDALKCKAHALRHRFGCISRKCPAIREMVSQLQRE

SEQ ID NO: 79488 - protein, 59 aa, Homo sapiens
MIAPLLCILSYNFNTFAILNVYSKLTMFCTTNSLPMDLLLKQGSLKQEVESFCYQIVSE

SEQ ID NO: 79489 - protein, 136 aa, Homo sapiens
MTPHRLLPPLLLLLALLLAASPGGALARCPGCGQGVQAGCPGGCVEEEDGGSPAEGCAEAEGCLRREGQECGVYTPNCAPGLQCHPPKDDEAPLRALLLGRGRCLPARAPAVLSSPRTLRKLSPEPGATCSCRGES

SEQ ID NO: 79490 - protein, 921 aa, Homo sapiens
MLRNERQFKEEKLAEQLKQAEELRQYKVLFHSQERELTQLREKLREGRDASRSLNEHLQALLTPDEPDKSQGQDLQEQLAEGCRLAQHLVQKLSPENDNDDDEDVQVEVAEKVQKSSAPREMQKAEEKEVPEDSLEECAITYSNSHGPYDSNQPHRKTKITFEEDKVDSTLIGSSSHVEWEDAVHIIPENESDDEEEEEKGPVSPRNLQESEEEEVPQESWDEGYSTLSIPPEMLASYQSYSSTFHSLEEQQVCMAVDIGRHRWDQVKKEDQEATGPRLSRELLDEKGPEVLQDSLDRCYSTPSGCLELTDSCQPYRSAFYVLEQQRVGLAIDMDEIEKYQEVEEDQDPSCPRLSRELLDEKEPEVLQDSLDRCYSTPSGYLELPDLGQPYSSAVYSLEEQYLGLALDVDRIKKDQEEEEDQGPPCPRLSRELLEVVEPEVLQDSLDRCYSTPSSCLEQPDSCQPYGSSFYALEEKHVGFSLDVGEIEKKGKGKKRRGRRSKKERRRGRKEGEEDQNPPCPRLSRELLDEKGPEVLQDSLDRCYSTPSGCLELTDSCQPYRSAFYILEQQCVGLAVDMDEIEKYQEVEEDQDPSCPRLSRELLDEKGPEVLQDSLDRCYSTPSGCLELTDSCQPYRSAFYILEQQCVGLAVDMDEIEKYQEVEEDQDPSCPRLSRELLDEKEPEVLQDSLDRCYSTPSGYLELPDLGQPYSSAVYSLEEQYLGLALDVDRIKKDQEEEEDQGPPCPRLSRELLEVVEPEVLQDSLDRCYSTPSSCLEQPDSCQPYGSSFYALEEKHVGFSLDVGEIEKKGKGKKRRGRRSKKERRRGRKEGEEDQNPPCPRLNSVLMEVEEPEVLQDSLDGCYSTPSMYFELPDSFQHYRSVFYSFEEEHISFALYLDNRFFTLTVTSLHLVFQMLVIFPQ

SEQ ID NO: 79491 - protein, 1088 aa, Homo sapiens
MDFLRLYLPGLHQALRGALDSLGTFVSYLLGDAVPTVEREAQAAEELGVVAVGKTGKIVEEEAQEDLEGLRGSQNEGAGRLRGPGDDRRHEVGSSAVEQTWGWGDGSSHGSQAERQDSGAGETAKAARCQEPSAHLEARKKSKAGSGACQDRSGQAQERQESHEQEVNREERLRSWEQEEEEEEVRAREPGMARGAESEWTWHGETEGKAGAVGPKAAGDNREMEQGVREADAGETEEPGAEGAGKGEEVVVVEKACESTRAWGTWGPGAEPEDWGILGREEARTTPGREEARAILDGEEARTISGGEEAETASGGEEAETASGGEEAGTASGGEEAGIASGGEAGTASGGEEAGTASGGDEAWTTSGKEEADLLGVRQTEYGAVPGERLLEATGKVWVLEEEGDEEREAEVSPFPKQPQVLGTERTEEAAESQTAGREAVGGQEAGESFEGQVDLRGKEAEMRQDLGIRADRARMEELVQAEEAQEERGSSRDPVAELPSDGEAEGTADLEATPEARPEEELTGEESEAAQTSCGLLGVEWGGLTHSVTKGQGPELMGGAQTPTKQPEEREAGEVELMGVLALSKEEQERSLEAGPRHAGSVKPEASEAFPGAWENRTRKDMERGNTQEDAADGEQREEEETAGGQTLAAEAEGDRESELSEVPEAGGEGLTTQDAGCGTEEGEASVSENQELDGSTGADAGPCPSLGEAYARETEDEEAEADRTSRRGWRLQAVAVGLPDREDAQTGSVAAGIMGGDVVPHISAAGAGEALEGVLGQGWDSKEKEEAAAGEHAGGQEFGLEGSAEEEVTGRGSQVEAFESREGGPWGGRVEAEESAGAEDSCGLDPAGSQTARAEGMGAMVEAGGLLEKWTLLEEEAVGWQEREQREDSEGRCGDYHPEGEAPRLLDAEGLMVTGGRRAEAKETEPESLEHVRGQEEQPTHQAPAEAAPESVGEAETAEAMGSARGGAANSWSEAPLPGSLLDVSVPRSRVHLSRSSSQRRSRPSFRRTPAWEQQEEPPAPNPPEEELSAPEQRPLQLEEPLEPSPLRHDGTPVPARRRPLGHGFGLAHPGMMQELQARLGRPKPQ

SEQ ID NO: 79492 - protein, 137 aa, Homo sapiens
MEGSLEREAPAGALAAVLKHSSTLPPESTQVRGYDFNRGVNYRALLEAFGTTGFQATNFGRAVQQVNAMIEKKLEPLSQDEDQHADLTQSRRPLTSCTIFLGYTSNLISSGGRIGDHSWRRGGRPHQVPGAHILGRV

SEQ ID NO: 79493 - protein, 242 aa, Homo sapiens
MDTFSTVISSSIQLLVQDLDAACDPALTAMSKMQWQNVEHVGDQSPYVTSVILHIKQNVPIIRDNLASTRKYFTQFCVKFANSFIPKFITHLFKCKPISMVGAEQLLLDTHSLKMVLLDLPSISSQVVRKAPASYTKIVVKGMTRAEMILKVVMAPHEPLVVFVDNYIKLLTDCNTETFQKILDMKGLKRSEQSSMLELLRQRLPAPPSGAESSGSLSLTAPTPEQESSRIRKLEKLIKKRL

SEQ ID NO: 79494 - protein, 191 aa, Homo sapiens
MWTLVSWVALTAGLVAGTRCPDGQFCPVACCLDPGGASYSCCRPLLDKWPTTLSRHLGGPCQVDAHCSAGHSCIFTVSGTSSCCPFPEIKGPCQCRFLCVPQAVACGDGHHCCPRGFHCSADGRSCFQRSGNNSVGAIQCPDSQFECPDFSTCCVMVDGSWGCCPMPQASCCEDRVHCCPHGAFCDLVHTR

SEQ ID NO: 79495 - protein, 96 aa, Homo sapiens
MGPAPLPLLLGLFLPALWRRAITEAREEAKPYPLFPGPFPGSLQTDHTPLLSLPHASGYQPALMFSPTQPGRPHTGNVAIPQHNQCAAFRQWVVYL

SEQ ID NO: 79496 - protein, 104 aa, Homo sapiens
DSVVFEDVDVNFTQEEWALLDPSQKNLYRDVMQETFRNLASVGKKWKDQKIEDEYKNPRRNLSLRKWSWSLYARQTLGLDSPSVAPKRTHGQMNPSTNSPATSR

SEQ ID NO: 79497 - protein, 77 aa, Homo sapiens
  MOD_RES (1)..(1): Any amino acid
XFPFLKCPYQMFREFQLLTRTDIYKKTRHILESYSENILTSFSVVDNPINIVLQEKMKHYTDEDMLKCASVHTCVGS

SEQ ID NO: 79498 - protein, 46 aa, Homo sapiens
MFVPESTSKLQKFTSWFMGRRPEYTDPKVVAQGEGREATFRAVCQR

SEQ ID NO: 79499 - protein, 1134 aa, Homo sapiens
MWNDIELLTNDDTGSGYLSVGSRKEHGTALYQVDLLVKISSEKASLNPKIQACSLSDGFIIVADQSVILLDSICRSLQLHLVFDTEVDVVGLCQEGKFLLVGERSGNLHLIHVTSKQTLLTNAFVQKANDENRRTYQNLVIEKDGSNEGTYYMLLLTYSGFFCITNLQLLKIQQAIENVDFSTAKKGTGNCAFSKWEPDSSKKGMTVKNLIDAEIIKGAKKFQLIDNLLFVLDTDNVLSLWDIYTLTPVWNWPSLHVEEFLLTTEADSPSSVTWQGITNLKLIALTASANKKMKNLMVYSLPTMEILYSLEVSSVSSLVQTGISTDTIYLLEGVCKNDPKLSEDSVSVLVLRCLTEALPENRLSRLLHKHRFAEAESFAIQFGLDVELVYKVKSNHILEKLALSSVDASEQTEWQQLVDDAKENLHKIQDDEFVVNYCLKAQWITYETTQEMLNYAKTRLLKKEDKTALIYSDGLKEVLRAHAKLTTFYGAFGPEKFSGSSWIEFLNNEDDLKDIFLQLKEGNLVCAQYLWLRHRANFESRFDVKMLESLLNSMSASVSLQKLCPWFKNDVIPFVRRTVPEGQIILAKWLEQAARNLELTDKANWPENGLQLAEIFFTAEKTDELGLASSWHWISLKDYQNTEEVCQLRTLVNNLRELITLHRKYNCKLALSDFEKENTTTIVFRMFDKVLAPELIPSILEKFIRVYMREHDLQEEELLLLYIEDLLNRCSSKSTSLFETAWEAKAMAVIACLSDTDKPSELFELQEDEALRRVQYLLLSRPIDYSSRMLFVFATSTTTTLGMHQLTFAHRTRALQCLFYLADKETIESLFKKPIEEVKSYLRCITFLASFETLNIPITYELFCSSPKEGMIKGLWKNHSHESMAVRLVTELCLEYKIYDLQLWNGLLQKLLGFNMIPYLRKVLKAISSIHSLWQVPYFSKAWQRVIQIPLLSASCPLSPDQLSDCSESLIAVLECPVSGDLDLIGVARQYIQLELPAFALACLMLMPHSEKRHQQIKNFLGSCDPQVILKQLEEHMNTGQLAGFSHQIRSLILNNIINKKEFGILAKTKYFQMLKMHAMNTNNITELVNYLANDLSLDEASVLITEYSKHCGKPVPPDTAPCEILKMFLSGLS

SEQ ID NO: 79500 - protein, 144 aa, Homo sapiens
MVAMAAGPSGCLVPAFGLRLLLATVLQAVSAFGAEFSSEACRELGFSSNLLCSSCDLLGQFNLLQLDPDCRGCCQEEAQFETKKYSSIVSKQECHHSNCMQELFLKFVDENWEGSLKSKLLLGVINPNCSEDCKSSMSVVQTLY

SEQ ID NO: 79501 - protein, 210 aa, Homo sapiens
MAPWALLSPGVLVRTGHTVLTWGITLVLFLHDTDKSADELLATHSHSWNQHLQAFAQPGTHFPTSNCTPTPPTPVLPGPASLCSPASPELRQWEEQGELLLPLTFLLLVLGSLLLYLAVSLMDPGYVNVQPQPQEELKEEQTAMVPPAIPLRRCRYCLVLQPLRARHCRECRRCVRRYDHHCPWMENCVGERNHPLFVVYLALQLVVLLW

SEQ ID NO: 79502 - protein, 182 aa, Homo sapiens
MEEIPAQEAAGSPRVQFQSLETQSECLSPEPQFVQDTDMEQGLTGGFPISKPDGISQLEQDLQVFDLETKTREVLRDDCSDGETREENKLLIPKQKISEEVHSYKVRVGRLKHDITQVPETREVYKSEDRLERLQEILRKFLYLEREFRQITISKETFTSEKNNECHEPEKSFSLDSTIDAD

SEQ ID NO: 79503 - protein, 296 aa, Homo sapiens
MMLPSPVTSTPFSVKDILNLEQQHQHFHGAHLQADLEHHFHSAPCMLAAAEGTQFSDGGEEDEEDEGEKLSYLNSLAAADGHGDSGLCPQGYVHTVLRDSCSEPKEHEEEPEVVRDRSQKSCQLKKSLETAGDCKAAEESERPKPRSRRKPRVLFSQAQVFELERRFKQQRYLSAPEREHLASSLKLTSTQVKIWFQNRRYKCKRQRQDKSLELGAHAPPPPPRRVAVPVLVRDGKPCVTPSAQAYGAPYSVGASAYSYNSFPAYGYGNSAAAAAGPPRRPLPCSPPAARPEAAPL

SEQ ID NO: 79504 - protein, 137 aa, Homo sapiens
  MOD_RES (1)..(1): Any amino acid
XAAPWRRWPTGLLAVLRPLLTCRPLQGTTLQRDVLLFEHDRGRFFTILGLFCAGQGVFWASMAVAAVSRPPVPVQPLDAEVPNRGPFDLRSALWRYGLAVGCGAIGYSTIRNRQKQQLMTHSNNAQHQKARKSNLRG

SEQ ID NO: 79505 - protein, 1045 aa, Homo sapiens
MDLFRMRCYLASLQGGELPNPKSLLAAASRPSKLALGRLGILSVSSFHALVCSRDDSALRKRTLSLTQRGRNKKGIFSSLKGLDTLARKGKEKRPSITQIFDSSGSHGFSGTQLPQNSSNSSEVDELLHIYGSTVDGVPRDNAWEIQTYVHFQDNHGVTVGIKPEHRVEDILTLACKMRQLEPSHYGLQLRKLVDDNVEYCIPAPYEYMQQQVYDEIEVFPLNVYDVQLTKTGSVCDFGFAVTAQVDERQHLSRIFISDVLPDGLAYGEGLRKGNEIMTLNGEAVSDLDLKQMEALFSEKSVGLTLIARPPDTKATLCTSWSDSDLFSRDQKSLLPPPNQSQLLEEFLDNFKKNTANDFSNVPDITTGLKRSQTDGTLDQVSHREKMEQTFRSAEQITALCRSFNDSQANGMEGPRENQDPPPRSLARHLSDADRLRKVIQELVDTEKSYVKDLSCLFELYLEPLQNETFLTQDEMESLFGSLPEMLEFQKVFLETLEDGISASSDFNTLETPSQFRKLLFSLGGSFLYYADHFKLYSGFCANHIKVQKVLERAKTDKAFKAFLDARNPTKQHSSTLESYLIKPVQRVLKYPLLLKELVSLTDQESEEHYHLTEALKAMEKVASHINEMQKIYEDYGTVFDQLVAEQSGTEKEVTELSMGELLMHSTVSWLNPFLSLGKARKDLELTVFVFKRAVILVYKENCKLKKKLPSNSRPAHNSTDLDPFKFRWLIPISALQVRLGNPAGTENNSIWELIHTKSEIEGRPETIFQLCCSDSESKTNIVKVIRSILRENFRRHIKCELPLEKTCKDRLVPLKNRVPVSAKLAKCVFLTVASSRSLKVLKNSSSNEWTGETGKGTLLDSDEGSLSSGTQSSGCPTAEGRQDSKSTSPGKYPHPGLADFADNLIKESDILSDEDDDHRQTVKQGSPTKDIEIQFQRLRISEDPDVHPEAEQQPGPESGEGQKGGEQPKLVRGHFCPIKRKANSTKRDRGTLLKAQIRHQSLDSQSENATIDLNSVLEREFSVQSLTSVVSEECFYETESHGKS

SEQ ID NO: 79506 - protein, 336 aa, Homo sapiens
MSDHGDVSLPPEDRVRALSQLGSAVEVNEDIPPRRYFRSGVEIIRMASIYSEEGNIEHAFILYNKYITLFIEKLPKHRDYKSAVIPEKKDTVKKLKEIAFPKAEELKAELLKRYTKEYTEYNEEKKKEAEELARNMAIQQELEKEKQRVAQQKQQQLEQEQFHAFEEMIRNQELEKERLKIVQEFGKVDPGLGGPLVPDLEKPSLDVFPTLTVSSIQPSDCHTTVRPAKPPVVDRSLKPGALSNSESIPTIDGLRHVVVPGRLCPQFLQLASANTARGVETCGILCGKLMRNEFTITHVLIPKQSAGSDYCNTENEEELFLIQDQQGLITLGWIHA

SEQ ID NO: 79507 - protein, 75 aa, Homo sapiens
MERPQPDRQARGAGRGTGAFLSQPCLRPSPTPGHCHTATEPRSQKLGLWSQEHAPGFVRGPEGGHQGGAHPGREC

SEQ ID NO: 79508 - protein, 225 aa, Homo sapiens; identical to SEQ ID NO: 75317
  MOD_RES (1)..(1): Any amino acid

SEQ ID NO: 79509 - protein, 44 aa, Homo sapiens
MAERQEEQRGSPPLRAEGKADAEVKLILYHWTHSFSSQKKEHPG

SEQ ID NO: 79510 - protein, 144 aa, Homo sapiens
MVSWGRFICLVVVTMATLSLARPSFSLVEDTTLEPEEPPTKYQISQPEVYVAAPGESLEMPSHPEMMRMTPMVRKILSVRTVTTRVSNCPAPMVPERGAWREVLPVTCLLVDSSAPCCVPRPLPFPAVSTFLTFKPENKPVLLH

SEQ ID NO: 79511 - protein, 76 aa, Homo sapiens
  MOD_RES (1)..(1): Any amino acid
XLLSAGATRVYAILTHGIFSGPAISRINNACFEAVVVTNTIPQEDKMKHCSKIQPWENHLFKSLNCYTSESLEDGA

SEQ ID NO: 79512 - protein, 65 aa, Homo sapiens
  MOD_RES (1)..(1): Any amino acid
XDSQSSSDSSDSESATEEKSKKRKKKHRKNSRKHKKEKKKRKKSKKSWFVRGIEDFSHAITSLCI

SEQ ID NO: 79513 - protein, 136 aa, Homo sapiens
  MOD_RES (1)..(1): Any amino acid
XFEKPESPRAASSSSPGSPVASSPSRLSPTPDGPPPLAQPPLILQPLASPLQIPYPPLRSTKAGHSEIRTSASHQAFLDPTSGCPAGHKLFRPSQSCCCCHLDGDLKKRMLIAPAKTPNQLWDLFPPLRSIPGGSA

SEQ ID NO: 79514 - protein, 173 aa, Homo sapiens
GEYRYRCGTCEKTFRIESALEFHNCRTDDKTFQCEMCFRFFSTNSNLSKHKKKHGDKKFACEVCSKMFYRKDVMLDHQRRHLEGVRRVKREDLEAGGENLVRYKKEPSGCPVCGKDIALMDDHQREEFIGKIGISSEENDDNSDESADSEPHKYSCKRCQLTFGRGKEYLKHI

SEQ ID NO: 79515 - protein, 382 aa, Homo sapiens
  MOD_RES (1)..(1): Any amino acid
XIFSNLSLDERCLSASLVCKYWRDLCLDFQFWKQLDLSSRQQVTDELLEKIASRSQNIIEINISDCRSMSDNGVCVLAFKCPGLLRYTAYRCKQLSDTSIIAVASHCPLLQKVHVGNQDKLTDEGLKQLGSKCRELKDIHFGQCYKISDEGMIVIAKGCLKLQRIYMQENKLVTDQSVKAFAEHCPELQYVGFMGCSVTSKGVIHLTKLRNLSSLDLRHITELDNETVMEIVKRCKNLSSLNLCLNWIINDRCVEVIAKEGQNLKELYLVSCKITDYALIAIGRYSMTIETVDVGWCKEITDQGATLIAQSSKSLRYLGLMRCDKVRVDYQVVCFLHISIVNSLMSYPLSFSISTPVYYILYIHFICIYAIIAMHCLPAFVN

SEQ ID NO: 79516 - protein, 473 aa, Homo sapiens
  MOD_RES (1)..(1): Any amino acid
XKEDVMTCLIKGCNFVLKNIPHEAFVYQKDSDPEFRFQTNHPHIFPYLLVNIGSGVSIVKVETEDRFEWVGGSSIGGGTFWGLGALLTKTKKFDELLHLASRGQHSNVDMLVRDVYGGAHQTLGLSGNLIASSFGKSATADQEFSKEDMAKSLLHMISNDIGQLACLHARLHSLDRVYFGGFFIRGHPVTMRTITYSINFFSKGEVQALFLRHEGYLGAIGAFLKGAEQDNPNQYSWGENYAGSSGLMSASPELGPAQRARSGTFDLLEMDRLERPLVDLPLLLDPPSYVPDTVDLTDDALARKYWLTCFEEALDGVVKRAVASQPDSVDAAERAEKFRQKYWNKLQTLRQQPFAYGTLTVRSLLDTREHCLNEFNFPDPYSKVKQRENGVALRCFPGVVRSLDALGWEERQLALVKGLLAGNVFDWGAKAVSAVLESDPYFGFEEAKRKLQERPWLVDSYSEWLQRLKITVE

SEQ ID NO: 79517 - protein, 39 aa, Homo sapiens
MRRKTRNFKHKTVKDNKVLTEGSDQESEKDNSQCCDPAT

SEQ ID NO: 79518 - protein, 397 aa, Homo sapiens
MDDLGSSEEEEDEESGMEEGDDAEDSQGESEEDRAGDRNSEDDGVVMTFSSVKVSEEVEKGRAVKNQIALWDQLLEGRIKLQKALLTTNQLPQPDVFPLFKDKGGPEFSSALKNSHKALKALLRSLVGLQEELLFQYPDTRYLVDGTKPNAGSEEISSEDDELVEEKKQQRRRVPAKRKLEMEDYPSFMAKRFADFTVYRNRTLQKWHDKTKLASGKLGKGFGAFERSILTQIDHILMDKERLLRRTQTKRSVYRVLGKPEPAAQPVPESLPGEPEILPQAPANAHLKDLDEEIFDDDDFYHQLLRELIERKTSSLDPNDQVAMGRQWLAIQKLRSKIHKKVDRKASKGRKLRFHVLSKLLSFMAPIDHTTMNDDARTELYRSLFGQLHPPDEGHGD

SEQ ID NO: 79519 - protein, 128 aa, Homo sapiens
MAAGTAVGAWVLVLSLWGAVVGAQNITARIGEPLVLKCKGAPKKPPQRLEWKLNTGRTEAWKVLSPQGGGPWDSVARVLPNGSLFLPAVGIQDEGIFRCQAMNRNGKETKSNYRVRVYQFENLHNYSL

SEQ ID NO: 79520 - protein, 118 aa, Homo sapiens
MDQPSGRSFMQVLCEKYSPENFPYRRGPGMGVHVPATPQGSPMKDRLNLPSVLVLNSCGITCAGDEKEIAAFCAHVSELDLSDNKLEDWHEKEHVLGPSLGFANLSSTTAKLLGRRST

SEQ ID NO: 79521 - protein, 191 aa, Homo sapiens
MFKNEYQGGAFVEIFSAQGKNPGAKWKILGSPSVIWKEFDKEVKSFVFVLEGSSQTNKIQLPKENKQSLGLIQRFLVLQIYVPLGQDFSTELLITDLGNIKRRLYLSTVHKELSSTPLHAKIPLFMIKRKIWCNLCIDLVAFTSEIFKGAVFQSLDGIVVSANCKLRKIFTLKSKPQDTADKDGNSAPWNS

SEQ ID NO: 79522 - protein, 39 aa, Homo sapiens
MAENHAQNKAKLISETRRRFEAEYVTGGYSVPGIKKGVQ

SEQ ID NO: 79523 - protein, 761 aa, Homo sapiens
MGRGSGTFERLLDKATSQLLLETDWESILQICDLIRQGDTQAKYAVNSIKKKVNDKNPHVALYALEVMESVVKNCGQTVHDEVANKQTMEELKDLLKAWAHAFRNEPKYKVVQDTYQIMKVEGHVFPEFKESDAMFAAERAPDWVDAEECHRCRVQFGVMTRKHHCRACGQIFCGKCSSKYSTIPKFGIEKEVRVCEPCYEQLNRKAEGKATSTTELPPEYLTSPLSQQSQLPPKRDETALQEEEELQLALALSQSEAEEKERLRQKSTYTSYPKAEPMPSASSAPPASSLYSSPVNSSAPLAEDIDPELARYLNRNYWEKKQEEARKSPTPSAPVPLTEPAAQPGEGHAAPTNVVENPLPETDSQPIPPSGGPFSEPQFHNGESEESHEQFLKALQNAVTTFVNRMKSNHMRGRSITNDSAVLSLFQSINGMHPQLLELLNQLDERRLYYEGLQDKLAQIRDARGALSALREEHREKLRRAAEEAERQRQIQLAQKLEIMRQKKQEYLEVQRQLAIQRLQEQEKERQMRLEQQKQTVQMRAQMPAFPLPYAQLQAMPAAGGVLYQPSGPASFPSTFSPAGSVEGSPMHGVYMSQPAPAAGPYPSMPSTAADPSMVSAYMYPAGATGAQAAPQAQAGPTASPAYSSYQPTPTAGYQNVASQAPQSLPAISQPPQSSTMGYMGSQSVSMGYQPYNMQNLMTTLPSQDASLPPQQPYIAGQQPMYQQMAPSGGPPQQQPPVAQQPQAQGPPAQGSEAQLISFD

SEQ ID NO: 79524 - protein, 72 aa, Homo sapiens
MESERSKRMGNACIPLKRIAYFLCLLSALLLTEGKKPAKPKCPAVCTCTKDNALCENARSIPRTVPPDVISL

SEQ ID NO: 79525 - protein, 186 aa, Homo sapiens
MGQNDLMGTAEDFADQFLRVTKQYLPHVARLCLISTFLEDGIRMWFQWSEQRDYIDTTWNCGYLLASSFVFLNLLGQLTGCVLVLSRNFVQYACFGLFGIIALQTIAYSILWDLKFLMRNLALGGGLLLLLAESRSEGKSMFAGVPTMRESSPKQYMQLGGRVLLVLMFMTLLHFDASFFSQPSQQ

SEQ ID NO: 79526 - protein, 198 aa, Homo sapiens
MKKVRLKELESRLQQVDGFEKPKLLLEQYPTRPHIAACMLYTIHNTYDDIENKVVADLGCGCGVLSIGTAMLGAGLCVGFDIDEDALEIFNRNAEEFELTNIDMVQCDVCLLSNRMSKSFDTVIMNPPFGTKNNKGTDMAFLKTALEMARTAVYSLHKSSTREHVQKKAAEWKIKIDIIAELRYDLPASYKFHKKKSV

SEQ ID NO: 79527 - protein, 43 aa, Homo sapiens
  MOD_RES (1)..(1): Any amino acid
XNSGRVQLEFSWVSEDTSKAVSFAKPDHQGFPTCHLESKVRSW

SEQ ID NO: 79528 - protein, 133 aa, Homo sapiens
MAVSTVFSTSSLMLALSRHSLLSPLLSVTSFRRFYRGDSPTDSQKDMIEIPLPPWQERTDESIETKRARLLYESRKRGMLENCILLSLFAKEHLQHMTEKQLNLYDRLINEPSNDWDIYYWATGPLGPCPTAS

SEQ ID NO: 79529 - protein, 234 aa, Homo sapiens
MSLLVVSMACVGFFLLQGAWPHEGVHRKPSLLAHPGRLVKSEETVILQCWSDVMFEHFLLHREGMFNDTLRLIGEHHDGVSKANFSISRMTQDLAGTYRCYGSVTHSPYQVSAPSDPLDIVIIGLYEKPSLSAQPGPTVLAGENVTLSCSSRSSYDMYHLSREGEAHERRLPAGTKVNGTFQANFPLGPATHGGTYRCFGSFRDSPYEWSKSSDPLLVSVTATILLSTFMRSTF

SEQ ID NO: 79530 - protein, 228 aa, Homo sapiens
MGTHPRGDAKILDNRISQKTLSQWIAENQDSLGSKVKDTFNGNLPFLFKVLSVETPLSIQAHPNKELAEKLHLQAPQHYPDANHKPEMAIALTPFQGLCGFRPVEEIVTFLKTAAGNNMEDIFGELLLQLHQQYPGDIGCFAIYFLNLLTLKPGEAMFLEANVPHAYLKGGEPHFSSEPHCHPCWALFPYLDKGRRRVVKETPKDLAALTSEGSWAQQATAGRDDECI

SEQ ID NO: 79531 - protein, 28 aa, Homo sapiens
MRILHVNGFNGEGGEEDPQAARSNSDGI

SEQ ID NO: 79532 - protein, 534 aa, Homo sapiens
MFGTESSLSMFLNTLTPKFYVALTGTSSLISGLILIFEWWYFRKYGTSFIEQVSVSHLRPLLGGVDNNSSNNSNSSNGDSDSNRQSVSECKVWRNPLNLFRGAEYNRYTWVTGREPLTYYDMNLSAQDHQTFFTCDSDHLRPADAIMQKAWRERNPQARISAAHEALEINEIRSRVEVPLIASSTIWEIKLLPKCATAYILLAEEEATTIAEAEKLFKQALKAGDGCYRRSQQLQHHGSQYEAQHRRDTNVLVYIKRRLAMCARRLGRTREAVKMMRDLMKEFPLLSMFNIHENLLEALLELQAYADVQAVLAKYDDISLPKSATICYTAALLKARAVSDKFSPEAASRRGLSTAEMNAVEAIHRAVEFNPHVPKYLLEMKSLILPPEHILKRGDSEAIAYAFFHLAHWKRVEGALNLLHCTWEGTFRMIPYPLEKGHLFYPYPICTETADRELLPSFHEVSVYPKKELPFFILFTAGLCSFTAMLALLTHQFPELMGVFAKAFLSTLFAPLNFVMEKVESILPSSLWHQLTRI

SEQ ID NO: 79533 - protein, 341 aa, Homo sapiens
MAAMLKCVMSGSQVKVFGKAVQALSRISDEFWLDPSKKGLALRCVNSSRSAYGCVLFSPVFFQHYQWSALVKMSENELDTTLHLKCKLGMKSILPIFRCLNSLERNIEKCRIFTRSDKCKVVIQFFYRHDLSNAVHSEMFVGSDEFDFFQIGMDTEITFCFKELKGILTFSEATHAPISIYFDFPGKPLALSIDDMLVEANFILATLADEQSRASSPQSLCLSQKRKRSDLIEKKAGKNVTGQALECISKKAAPRRLYPKETLTNISALENCGSPAMKRVDGDVSEVSESSVSNTEEVPGSLCLRKCAAGKNLMEVMPNISVLSDIEQYPPLPRQPEFGVE

SEQ ID NO: 79534 - protein, 152 aa, Homo sapiens
YGVRYNTTNNGYRECLANGSWAARVNYSECQEILNEEKKSKVHYHVAVIINYLGHCISLVALLVAFVLFLRLRSIRCLRNIIHWNLISAFILRNATWFVVQLTMSPEVHQSNVVCPSPSLWPGPLGSCTTTMRSAGLAKGLGCTPTTSTRAP

SEQ ID NO: 79535 - protein, 323 aa, Homo sapiens
MYVRVSFDTKPDLLLHLMTKEWQLELPKLLISVHGGLQNFELQPKLKQVFGKGLIKAAMTTGAWIFTGGVNTGVIRHVGDALKDHASKSRGKICTIGIAPWGIVENQEDLIGRDVVRPYQTMSNPMSKLTVLNSMHSHFILADNGTTGKYGAEVKLRRQLEKHISLQKINTRIGQGVPVVALIVEGGPNVISIVLEYLRDTPPVPVVVCDGSGRASDILAFGHKYSEEGGLINESLRDQLLVTIQKTFTYTRTQAQHLFIILMECMKKKELVGNSAWVASCLHIFSHFLESHNIFSNHATFSLSGRAYSSPQAPLAPVASSPK

SEQ ID NO: 79536 - protein, 595 aa, Homo sapiens
MEVRKLSISWQFLIVLVLILQILSALDFDPYRVLGVSRTASQADIKKAYKKLAREWHPDKNKDPGAEDKFIQISKAYEILSNEEKRSNYDQYGDAGENQGYQKQQQQREYRFRHFHENFYFDESFFHFPFNSERRDSIDEKYLLHFSHYVNEVVPDSFKKPYLIKITSDWCFSCIHIEPVWKEVIQELEELGVGIGVVHAGYERRLAHHLGAHSTPSILGIINGKISFFHNAVVRENLRQFVESLLPGNLVEKVTNKNYVRFLSGWQQENKPHVLLFDQTPIVPLLYKLTAFAYKDYLSFGYVYVGLRGTEEMTRRYNINIYAPTLLVFKEHINRPADVIQARGMKKQIIDDFITRNKYLLAARLTSQKLFHELCPVKRSHRQRKYCVVLLTAETTKLSKPFEAFLSFALANTQDTVRFVHVYSNRQQEFADTLLPDSEAFQGKSAVSILERRNTAGRVVYKTLEDPWIGSESDKFILLGYLDQLRKDPALLSSEAVLPDLTDELAPVFLLRWFYSASDYISDCWDSIFHNNWREMMPLLSLIFSALFILFGTVIVQAFSDSNDERESSPPEKEEAQEKTGKTEPSFTKENSRFL

SEQ ID NO: 79537 - protein, 102 aa, Homo sapiens
MDTIFVKNVKEDGPAHRAGLRTGDRLVKVNGESVIGKTYSQVIALIQNSDDTLELSIMPKDEDILQLAYSQDAYLKGNEPYSGEARSIPEPPPICYPRKTYA

SEQ ID NO: 79538 - protein, 280 aa, Homo sapiens
METDRILTPVRAQLPLGLIPAGSTNVLAHSLHGVPHVITATLHIIMGHVQLVDVCTFSTAGKLLRFGFSAMFGFGGRTLALAEKYRWMSPNQRRDFAVVKALAKLKAEDCEISFLPFNSSDDVQERRAQGSPKSDCNDQWQMIQGQFLNVSIMAIPCLCSVAPRGLAPNTRLNNGSMALIIARNTSRPEFIKHLKRYASVKNQFNFPFVETYTVEEVKVHPRNNTGGYNPEEEEDETASENCFPWNVDGDLMEVASEVHIRLHPRLISLYGGSMEEMIPK

SEQ ID NO: 79539 - protein, 106 aa, Homo sapiens
MDGRTPRPQDAPARRKPKAKAPLPPAETKYTDVSSAADSVESTAFIMEQKENMIDKDVELSVVLPGDIIKSTTVHGRYAGVNEISGPPLLIPPLKVSVIYVLMFVL

SEQ ID NO: 79540 - protein, 74 aa, Homo sapiens
MQFRGRNLCRGAGCNRQAVAGQLLPSTWSLHAHGLAKEAPILPVKKISRSCSVNNKVSKKTTKPPTLRSFLSPI

SEQ ID NO: 79541 - protein, 136 aa, Homo sapiens
MEHKEVVLLLLLFLKSGQGEPLDDYVNTQGASLFSVTKKQLGAGSIEECAAKCEEDEEFTCRAFQYHSKEQQCVIMAENRKSSIIIRMRDVVLFEKKVYLSECKTGNGKNYRGTMSKTKNGITCQKWSSTSPHRPR

SEQ ID NO: 79542 - protein, 36 aa, Homo sapiens
MPTDHEEPCGPSHKSFCLNGGLCYVIPTIPSPFCRK

SEQ ID NO: 79543 - protein, 549 aa, Homo sapiens
MHSMISSVDVKSEVPVGLEPISPLDLRTDLRMMMPVVDPVVREKQLQQELLLIQQQQQIQKQLLIAEFQKQHENLTRQHQAQLQEHIKLQQELLAIKQQQELLEKEQKLEQQRQEQEVERHRREQQLPPLRGKDRGRERAVASTEVKQKLQEFLLSKSATKDTPTNGKNHSVSRHPKLWYTAAHHTSLDQSSPPLSGTSPSYKYTLPGAQDAKDDFPLRKTESSVSSSSPGSGPSSPNNGPTGSVTENETSVLPPTPHAEQMVSQQRILIHEDSMNLLSLYTSPSLPNITLGLPAVPSQLNASNSLKEKQKCETQTLRQGVPLPGQYGGSIPASSSHPHVTLEGKPPNSSHQALLQHLLLKEQMRQQKLLVAGGVPLHPQSPLATKERISPGIRGTHKLPRHRPLNRTQSAPLPQSTLAQLVIQQQHQQFLEKQKQYQQQIHMNKLLSKSIEQLKQPGSHLEEAEEELQGDQAMQEDRAPSSGNSTRSDSSACVDDTLGQVGAVKVKEEPVDSDEDAQIQEMESGEQAAFMQQVIGKDLAPGFVIKVII

SEQ ID NO: 79544 - protein, 191 aa, Homo sapiens
MCPFRHISGEKTVVCKHWLRGLCKKGDQCEFLHEYDMTKMPECYFYSKFGECSNKECPFLHIDPESKIKDCPWYDRGFCKHGPLCRHRHTRRVICVNYLVGFCPEGPSCKFMHPRFELPMGTTEQPPLPQQTQPPAKQRTPQVIGVMQSQNSSAGNRGPRPLEQVTCYKCGEKGHYANRCTKGHLAFLSGQ

SEQ ID NO: 79545 - protein, 15 aa, Homo sapiens
MEDFNMESDSFEDFW

SEQ ID NO: 79546 - protein, 222 aa, Homo sapiens
MSLMVIIMACVGFFLLQGAWPQEGVHRKPSFLALPGHLVKSEETVILQCWSDVMFEHFLLHREGKFNNTLHLIGEHHDGVSKANFSIGPMMPVLAGTYRCYGSVPHSPYQLSAPSDPLDMVIIGLYEKPSLSAQPGPTVQAGENVTLSCSTIYPGKGRPMNVGSLQCAASTEHSRPTFLWALPPTEGPTDASALSVTLPTSGQTRVIHCLFPSQVTPDTYMF

SEQ ID NO: 79547 - protein, 411 aa, Homo sapiens
MERKERLSKFESIRHSIAGIIRSPKSALGSSALSDMISISEKPLAEQDWYHGAIPRIEAQELLKKQGDFLVRESHGKPGEYVLSVYSDGQRRHFIIQYVDNMYRFEGTGFSNIPQLIDHHYTTKQVITKKSGVVLLNPIPKDKKWILSHEDVILGELLGKGNFGEVYKGTLKDKTSVAVKTCKEDLPQELKIKFLQEAKILKQYDHPNIVKLIGVCTQRQPVYIIMELVSGGDFLTFLRRKKDELKLKQLVKFSLDAAAGMLYLESKNCIHRDLAARNCLVGENNVLKISDFGMSRQEDGGVYSSSGLKQIPIKWTAPEALNYGRYSSESDVWSFGILLWETFSLGVCPYPGMTNQQAREQVERGYRMSAPQHCPEDISKIMMKCWDYKPENRPKFSELQKELTIIKRKLT

SEQ ID NO: 79548 - protein, 229 aa, Homo sapiens
MEIGSAGPAGAQPLLMVPRRPGYGTMGKPIKLLANCFQVEIPKIDVYLYEVDIKPDKCPRRVNREVVDSMVQHFKVTIFGDRRPVYDGKRSLYTANPLPVATTGVDLDVTLPGEGGKDRPFKVSIKFVSRVSWHLLHEVLTGRTLPEPLELDKPISTNPVHAVDVVLRHLPSMKYTPVGRSFFSAPEGYDHPLGGGREVWFGFHQSVRPAMWKMMLNIDERDLWQQCGE

SEQ ID NO: 79549 - protein, 304 aa, Homo sapiens
MATWKSPCFLYCLFILGPRLTGQNNSVDLTNEETTDSTTSKISPSEDTQQENGSMFSLITWNIDGLDLNNLSERARGVCSYLALYSPDVIFLQEVIPPYYSYLKKRSSNYEIITGHEEGYFTAIMLKKSRVKLKSQEIIPFPSTKMMRNLLCVHVNVSGNELCLMTSHLESTRGHAAERMNQLKMVLKKMQEAPESATVIFAGDTNLRDREVTRCGGLPNNIVDVWEFLGKPKHCQYTWDTQMNSNLGITAACKLRFDRIFFRAAAEEGHIIPRSLDLLGLEKLDCGRFPSDHWGLLCNLDIIL

SEQ ID NO: 79550 - protein, 56 aa, Homo sapiens
MFEEKASSPSGKMGGEEKPIGAGEEKQKEGGKKKNKEGSGDGGRAESRPGRQHRYC

SEQ ID NO: 79551 - protein, 175 aa, Homo sapiens
MGTPLDGGSRVPIGCPAKLRRVTRKKVAPDLEGWLSLAKARYAMGAKSVGPLQYASHMEPQVCLHASEAQEGLQKFKVVRAGVHAPEEVGPREAGLRRRKGPTKTPEPESSEAPQDPLNWFGILVPHSLRQAQASFRDGLQLAADIASLQNRIDWGRSQLRGLQEKLKQLEPGAA

SEQ ID NO: 79552 - protein, 62 aa, Homo sapiens
MPGTQTPAPAEDPHSGCRDPVPARPQACHPKSQETRFEGPLPPPPPAAAAPPPPAPAQTAQA

SEQ ID NO: 79553 - protein, 222 aa, Homo sapiens
MDMRQHEEYIADMALDPAKKLLLTASGDGCLGIFNIKRRRFELLSEPQSGDLTSVTLMKWGKKVACGSSEGTIYLFNWNGFGATSDRFALRAESIDCMVPVTESLLCTGSTDGVIRAVNILPNRVVGSVGQHTGEPVEELALSHCGRFLASSGHDQRLKFWDMAQLRAVVVDDYRRRKKKGGPLRALSSKTWSTDDFFAGLREEGEDSMAQEEKEETGDDSD

SEQ ID NO: 79554 - protein, 110 aa, Homo sapiens
  MOD_RES (1)..(1): Any amino acid
XQDCYSCDWRSCGHGGCAHGAQCHGLHCGGNRLVLHSSQDDVRGGHCQWGWSCLGQPCGYSAVTGVSLREMEEGGKEPKPGTVHSGRLSPKQICWVTWGVSSPLGCSLLP

SEQ ID NO: 79555 - protein, 299 aa, Homo sapiens
MVVSAGPWSSEKAEMNILEINETLRPQLAEKKQQFRNLKEKCFLTQLAGFLANRQKKYKYEECKDLIKFMLRNERQFKEEKLAEQLKQAEELRQYKVLFHSQERELTQLREKLREGRDASRSLNEHLQALLTPDEPDKSQGQDLQEQLAEGCRLAQHLVQKLSPENDNDDDEDVQVEVAEKVQKSSAPREMQKAEEKEVPEDSLEECAITYSNSHGPYDSNQPHRKTKITFEEDKVDSTLIGSSSHVEWEDAVHIIPENESDDEEEEEKGPVSPRTSLGSSEKGGPRGNRSQAQQGAAG

SEQ ID NO: 79556 - protein, 66 aa, Homo sapiens
MAAAYLDPNLNHTPNSSTKTHLGTGMERSPGAMERVLKVFHYFESNSEPTTWASIIRHGDATDVRI

SEQ ID NO: 79557 - protein, 187 aa, Homo sapiens
MSMYNLRCAAEENCLASTAYRADVRDYDHRVLLRFPQRVKNQGTSDFLPSRPRYSWEWHSCHQHYHSMDEFSHYDLLDANTQRRVAEGHKASFCLEDTSCDYGYHRRFACTAHTQGLSPGCYDTYGADIDCQWIDITDVKPGNYILKVSVNPSYLVPESDYTNNVVRCDIRYTGHHAYASGCTISPY

SEQ ID NO: 79558 - protein, 343 aa, Homo sapiens
MNRESFAAGERLVSPAYVRQGCEARRSHEHLIRLLLEKGKCPENGWDESTLELFLHELAIMDSNNFLGNCGVGEREGRVASALVARRHYRFIHGIGRSGDISAVQPKAAGSSLLNKITNSLVLDIIKLAGVHTVANCFVVPMATGMSLTLCFLTLRHKRPKAKYIIWPRIDQKSCFKSMITAGFEPVVIENVLEGDELRTDLKAVEAKVQELGPDCILCIHSTTSCFAPRVPDRLEELAVICANYDIPHIVNNAYGVQSSKCMHLIQQGARVGRIDAFVQSLDKNFMVPVGGAIIAGFNDSFIQEISKMYPGRASASPSLDVLITLLSLGSNGYKKLLKERKL

SEQ ID NO: 79559 - protein, 78 aa, Homo sapiens
MYLQVETRTSSRLHLKRAPGIRSWSLLESCRLAWLLPTTAEIAWAGSSSTSQAACLWLCRTWRTGRKPSSTRAQGRLF

SEQ ID NO: 79560 - protein, 135 aa, Homo sapiens
IRDLPGHYYETLKFLVGHLKTIADHSEKNKMEPRNLALVFGPTLVRTSEDNMTDMVTHMPDRYKIVETLIQHSDWFFSDEEDKGERILPPVVQPSPRVRGPPRRSRTPGRCWRSPSSRPSTASARSGGRRGGWAA

SEQ ID NO: 79561 - protein, 137 aa, Homo sapiens
MAQQRALPQSKETLLQSYNKRLKDDIKSIMDNFTEIIKTAKIEDETQVSRATQGEQDNYEMHVRAANIVRAGESLMKLVSDLKQFLILNDFPSVNEAIDQRNQQLRTLQEECDRKLITLRDEISIDLYELEEEYYSS

SEQ ID NO: 79562 - protein, 209 aa, Homo sapiens
MSRRKQGKPQHLSKREFSPEPLEAILTDDEPDHGPLGAPEGDHDLLTCGQCQMNFPLGDILIFIEHKRKQCNGSLCLEKAVDKPPSPSPIEMKKASNPVEVGIQVTPEDDDCLSTSSRGICPKQEHIAGKDEPSSYTCTTCKQPFTSAWFLLQHAQNTHGLRIYLESEHGSPLTPRVLHTPPFGVVPRELKMCGSFRMEAREPLSSEKI

SEQ ID NO: 79563 - protein, 536 aa, Homo sapiens
MEFSSPSREECPKPLSRVSIMAGSLTGLLLLQAVSWASGARPCIPKSFGYSSVVCVCNATYCDSFDPPTFPALGTFSRYESTRSGRRMELSMGPIQANHTGTGLLLTLQPEQKFQKVKGFGGAMTDAAALNILALSPPAQNLLLKSYFSEEGIGYNIIRVPMASCDFSIRTYTYADTPDDFQLHNFSLPEEDTKLKIPLIHRALQLAQRPVSLLASPWTSPTWLKTNGAVNGKGSLKGQPGDIYHQTWARYFVKFLDAYAEHKLQFWAVTAENEPSAGLLSGYPFQCLGFTPEHQRDFIARDLGPTLANSTHHNVRLLMLDDQRLLLPHWAKVVLTDPEAAKYVHGIAVHWYLDFLAPAKATLGETHRLFPNTMLFASEACVGSKFWEQSVRLGSWDRGMQYSHSIITNLLYHVVGWTDWNLALNPEGGPNWVRNFVDSPIIVDITKDTFYKQPMFYHLGHFSKFIPEGSQRVGLVASQKNDLDAVALMHPDGSAVVVVLNRSSKDVPLTIKDPAVGFLETISPGYSIHTYLWCRQ

SEQ ID NO: 79564 - protein, 1165 aa, Homo sapiens [sequence omitted]

SEQ ID NO: 79565 - protein, 410 aa, Homo sapiens
MVRRAAASKLGEFAKVLELDNVKSEIIPMFSNLASDEQDSVRLLAVEACVNIAQLLPQEDLEALVMPTLRQAAEDKSWRVRYMVADKFTELQKAVGPEITKTDLVPAFQNLMKDCEAEVRAAASHKVKEFCENLSADCRENVIMSQILPCIKELVSDANQHVKSALASVIMGLSPILGKDNTIEHLLPLFLAQLKDECPEVRLNIISNLDCVNEVIGIRQLSQSLLPAIVELAEDAKWRVRLAIIEYMPLLAGQLGVEFFDEKLNSLCMAWLVDHVYAIREAATSNLKKLVEKFGKEWAHATIIPKVLAMSGDPNYLHRMTTLFCINVLSEVCGQDITTKHMLPTVLRMAGDPVANVRFNVAKSLQKIGPILDNSTLQSEVKPILEKLTQDQDVDVKYFAQEALTVLSLA

SEQ ID NO: 79566 - protein, 175 aa, Homo sapiens
MAFSGCQAPYLSPAVPFSGTIQGGLQDGFQITVNGAVLSCSGTRFAVDFQTGFSGNDIAFHFNPRFEDGGYVVCNTRQKGTWGPEERKMHMPFQKGMPFDLCFLVQSSDFKVMVNGSLFVQYFHRVPFHRVDTISVNGSVQLSYISFQPMPFITTIPGGLYPSKSIILSGTVLPS

SEQ ID NO: 79567 - protein, 142 aa, Homo sapiens
MAMALPMPGPQEAVVFEDVAVYFTRIEWSCLAPDQQALYRDVMLENYGNLASLGFLVAKPALISLLEQGEEPGALILQVAEQSVAKASLCTEDPNTLPSRSQEGSPASSEGGPGEKGVAGRVAGGGAASSWPHGEHPVTPNR

SEQ ID NO: 79568 - protein, 175 aa, Homo sapiens
MVIIIVLNLIFGVIIDTFADLRSEKQKKEEILKTTCFICGLERDKFDNKTVTFEEHIKEEHNMWHYLCFIVLVKVKDSTEYTGPESYVAEMIKERNLDWFPRMRAMSLVSSDSEGEQNELRNLQEKLESTMKLVTNLSGQLSELKDQMTEQRKQKQRIGLLGHPPHMNVNPQQPA

SEQ ID NO: 79569 - protein, 815 aa, Homo sapiens
MAGNSLVLPIVLWGRKAPTHCISAVLLTDDGATIVTGCHDGQICLWDLSVELQINPRALLFGHTAVLFQQVKETIKENIKEHLLDDEEEDEEIMRQRREESDPEYRSSKSKPLTLLEYNLTMDTAKLFMSCLHAWGLNEVLDEVCLDRLGMLKPHCTVSFGLLSRGGHMSLMLPGYNQPACKLSHGKTEVGRKLPASEGVGKGTYGVSRAVTTQHLLSIISLANTLMSMTNATFIGDHMKKGPTRPPRPSTPDLSKARGSPPTSSNIVQGQIKQVAAPVVSARSDADHSGSDPPSAPALHTCFLVNEGWSQLAAMHCVMLPDLLGLDKFRPPLLEMLARRWQDRCLEVREAAQALLLAELRRIEQAGRKEAIDAWAPYLPQYIDHVISPGVTSEAAQTITTAPDASGPEAKVQEEEHDLVDDDITTGCLSSVPQMKKISTSYEERRKQATAIVLLGVIGAEFGAEIEPPKLLTRPRSSSQIPEGFGLTSGGSNYSLARHTCKALTFLLLQPPSPKLPPHSTIRRTAIDLIGRGFTVWEPYMDVSAVLMGLLELCADAEKQLANITMGLPLSPAADSARSARHALSLIATARPPAFITTIAKEVHRHTALAANTQSQQNMHTTTLARAKGEILRVIEILIEKMPTDVVDLLVEVMDIIMYCLEGSLVKKKGLQECFPAICRFYMVSYYERNHRIAVGARHGSVALYDIRTGKCQTIHGHKGPITAVAFAPDGRYLATYSNTDSHISFWQMNTSLLGSIGMLNSAPQLRCIKTYQVPPVQPASPGSHNALKLARLIWTSNRNVILMAHDGKEHRFMV

SEQ ID NO: 79570 - protein, 75 aa, Homo sapiens
MLKVHYPKFGVSEDCLYLNIYAPAHADTGSKLPVLVWFPGGAFKTGSASIFDGSALAAYEDVLVVVVQYRLGIFG

SEQ ID NO: 79571 - protein, 377 aa, Homo sapiens
MLGICRGRRKFLAASLSLLCIPAITWIYLFSGSFEDGKPVSLSPLESQAHSPRYTASSQRERESLEVRMREVEEENRALRRQLSLAQGRAPSHRRGNHSKTYSMEEGTGDSENLRAGIVAGNSSECGQQPVVEKCETIHVAIVCAGYNASRDVVTLVKSVLFHRRNPLHFHLIADSIAEQILATLFQTWMVPAVRVDFYNADELKSEVSWIPNKHYSGIYGLMKLVLTKTLPANLERVIVLDTDITFATDIAELWAVFHKFKGQQVLGLVENQSDWYLGNLWKNHRPWPALGRGYNTGVILLLLDKLRKMKWEQMWRLTAERELMGMLSTSLADQDIFNAVIKQNPFLVYQLPCFWNVQLSDHTRSEQCYRDVSDLK

SEQ ID NO: 79572 - protein, 17 aa, Homo sapiens
MPFNGEKQCVGEDQPSD

SEQ ID NO: 79573 - protein, 253 aa, Homo sapiens
MKEAAAAALKKKGWEVVESDLYAMNFNPIISRKDITGKLKDPANFQYPAESVLAYKEGHLSPDIVAEQKKLEAADLVIFQFPLQWFGVPAILKGWFERVFIGEFAYTYAAMYDKGPFRSKKAVLSITTGGSGSMYSLQGIHGDMNVILWPIQSGILHFCGFQVLEPQLTYSIGHTPADARIQILEGWKKRLENIWDETPLYFAPSSLFDLNFQAGFLMKKEVQDEEKNKKFGLSVGHHLGKSIPTDNQIKARK

SEQ ID NO: 79574 - protein, 349 aa, Homo sapiens
MLLMVVSMACVGFFLVQRAGPHVGNHRKPSLLAHPGPLVKSGERVILQCWSDIMFEHFFLHKEGISKDPSRLVGQIHDGVSKANFSIGPMMLALAGTYRCYGSVTHTPYQLSAPSDPLDIVVTGPYEKPSLSAQPGPKVQAGESVTLSCSSRSSYDMYHLSRERGAHERRLPAVRKVNRTFQADFPLGPATHGGTYRCFGSFRHSPYEWSDPSDPLLVSVTGNPSSSWPSPTEPSSKSGNPRHLHILIGTSVVIILFILLLFFLLHLWCSNKKNAAVMDQEPAGNRTANSEDSDEQDPEEVTYAQLDHCVFTQRKITRPSQRPKTPPTDTILYTELPNAKPRSKVVSCP

SEQ ID NO: 79575 - protein, 95 aa, Homo sapiens
MGNIFEKLFKSLLGKKKMRILILSLDTAGKTTILYKLKLGETVPAVPTVGFCVETVEYKNNTFAVWDVGSHFKIRPLWQHFFQNTKAAHSQSLTS

SEQ ID NO: 79576 - protein, 615 aa, Homo sapiens
MQHLCLLAAVGVTRHKSKELSRKQSQQLELLESELRKEIRDGFAELQMDKLDVVDSFGTVPFLDYKHFALRTFFPESGGFTHIFTEDMHNRDANDKNESLTALDALICNKSFLVTVIHTLEKQKNFSVKDRCLFASFLTIALQTKLVYLTSILEVLTRDLMEQCSNMQPKLMLRRTESVVEKLLTNWMSVCLSGFLRETVGEPFYLLVTTLNQKINKGPVDVITCKALYTLNEDWLLWQVPEFSTVALNVVFEKIPENESADVCRNISVNVLDCDTIGQAKEKIFQAFLSKNGSPYGLQLNEIGLELQMGTRQKELLDIDSSSVILEDGITKLNTIGHYEISNGSTIKVFKKIANFTSDVEYSDDHCHLILPDSEAFQDVQGKRHRGKHKFKVKEMYLTKLLSTKVAIHSVLEKLFRSIWSLPNSRAPFAIKYFFDFLDAQAENKKITDPDVVHIWKTNSLPLRFWVNILKNPQFVFDIKKTPHIDGCLSVIAQAFMDAFSLTEQQLGKEAPTNKLLYAKDIPTYKEEVKSYYKAIRDLPPLSSSEMEEFLTQESKKHENEFNEEVALTEIYKYIVKYFDEILNKLERERGLEEAQKQLLHVKVLFDEKKKCKWM

SEQ ID NO: 79577 - protein, 31 aa, Homo sapiens
IYLNVESVCTHRERSENMKGSRSSADSSRKH

SEQ ID NO: 79578 - protein, 79 aa, Homo sapiens
  MOD_RES (1)..(1): Any amino acid
XSRQEDPEQLRLKQKAKEMQQQELAQMRQRDANLTALAAIGPRKKRKVDCPGPGSGAEASVALSKQRAQGERPGWSPCR

SEQ ID NO: 79579 - protein, 81 aa, Homo sapiens
MRAWDRSKPLLFCPAMNTAMWEHPITAQQVDQLKAFGYVEIPCVAKKLVCGDEGLGAMAEVGTIVDKVKEVLFQHSGFQQS

SEQ ID NO: 79580 - protein, 294 aa, Homo sapiens
MKLGTWTYDGSVVAINPESDQPDLSNFMESGEWVIKESRGWKHSVTYSCCPDTPYLDITYHFVMQRLPLYFIVNVIIPCLLFSFLTGLVFYLPTDSGEKMTLSISVLLSLTVFLLVIVELIPSTSSAVPLIGKYMLFTMVFVIASIIITVIVINTHHRSPSTHVMPNWVRKVFIDTIPNIMFFSTMKRPSREKQDKKIFTEDIDISDISGKPGPPPMGFHSPLIKHPEVKSAIEGIKYIAETMKSDQESNNAAAEWKYVAMVMDHILLGVFMLVCIIGTLAVFAGRLIELNQQG

SEQ ID NO: 79581 - protein, 28 aa, Homo sapiens
MSSEPPPPYPGGPTAPLLEEKSGAPPTP

SEQ ID NO: 79582 - protein, 67 aa, Homo sapiens
MLSRSRCVSRAFSRSLSAFQKGNCPLGRRSLPGVSLCQGPGYPNSRKVVINNSVFSVRFFRTTAVCR

SEQ ID NO: 79583 - protein, 485 aa, Homo sapiens
MRRRRSTPKEVLEGIWEPKRKRRNRREKRRNQIPEAPSQTRHLIPRRLKFSSLRNTTPSGSRFQREQPWNPSVPMQKLQDIQRAMELLSACQGPARNIDEAAKHRYQFWDTQPVPKLDEVITSHGAIEPDKDNVRQEPYSLPQGFMWDTLDLSDAEVLKELYTLLNENYVEDDDNMFRFDYSPEFLLWALRPPGWLLQWHCGVRVSSNKKLVGFISAIPANIRIYDSVKKMVEINFLCVHKKLRSKRVAPVLIREITRRVNLEGIFQAVYTAGVVLPKPIATCRYWHRSLNPRKLVEVKFSHLSRNMTLQRTMKLYRLPDVTKTSGLRPMEPKDIKSVRELINTYLKQFHLAPVMDEEEVAHWFLPREHIIDTFVVESPNGKLTDFLSFYTLPSTVMHHPAHKSLKAAYSFYNIHTETPLLDLMSDALILAKSKGFDVFNALDLMENKTFLEKLKFGIGDGNLQYYLYNWRCPGTDSEKVGLVLQ

SEQ ID NO: 79584 - protein, 104 aa, Homo sapiens
MAEGERQPPPDSSEEAPPATQNFIIPKKEIHTVPDMGKWKRSQMKTGPFAEHSNQLWNISAVPSWSKVNQGLIRMYKAECLEKFPVIQHFKFGSLLPIHPVTSG

SEQ ID NO: 79585 - protein, 543 aa, Homo sapiens
MKGLSGSRSHHHGVTCDSACDSLSHHSDRKPYLLSPVEHHPADHPYYTQRNSFQAECVGPFSDPLASSTFPRRHYTSQQELKDECALVPRTLATKANRIPANLLDQFERQLPLSRDGYHTLQYKRTAVEHRSDSPGRIRHLVHSVQKLFTKSHSLEGPSKGSVNGGKASPDEAQAARYGKRSKSKERRAEPKARPSTSPGWWSSDDNLDGDMCIYHAPSGVMTMGRCPDRSASQYFLEAYNTISEQAVKASRSNNDVKCSTCANLPVSLDTPLLKKSAWSSTLTVSRAREVYQKASVNMDQAMVKSESCQQERSCQYLQVPQDEWTGYTPRGKDDEIPCRRMRSGSYIKAMGDEDSGDSDTSPKPSPKVAARRESYLKATQPSLTELTTLKISNEHSPKLQIRSHSYLRAVSEVSINRSLDSLDPAGLLTSPKFRSRNESYMRAMSTISQVSEMEVNGQFESVCESVFSELESQAVEALDLPMPGCFRMRSHSYVRAIEKGCSQDDECVSLRSSSPPRTTTTVRTIQSSTGSLDKKLESWALG

SEQ ID NO: 79586 - protein, 550 aa, Homo sapiens
MTALDLFLTNQFSEALSYLKPRTKESMYHSLTYATILEMQAMMTFDPQDILLAGNMMKEAQMLCQRHRRKSSVTDSFSSLVNRPTLGQFTEEEIHAEVCYAECLLQRAALTFLQDENMVSFIKGGIKVRNSYQTYKELDSLVQSSQYCKGENHPHFEGGVKLGVGAFNLTLSMLPTRILRLLEFVGFSGNKDYGLLQLEEGASGHSFRSVLCVMLLLCYHTFLTFVLGTGNVNIEEAEKLLKPYLNRYPKGAIFLFFAGRIEVIKGNIDAAIRRFEECCEAQQHWKQFHHMCYWELMWCFTYKGQWKMSYFYADLLSKENCWSKATYIYMKAAYLSMFGKEDHKPFGDDEVELFRAVPGLKLKIAGKSLPTEKFAIRKSRRYFSSNPISLPVPALEMMYIWNGYAVIGKQPKLTDGILEIITKAEEMLEKGPENEYSVDDECLVKLLKGLCLKYLGRVQEAEENFRSISANEKKIKYDHYLIPNALLELALLLMEQDRNEEAIKLLESAKQNYKNYSMESRTHFRIQAATLQAKSSLENSSRSMVSSVSL

SEQ ID NO: 79587 - protein, 518 aa, Homo sapiens
MAASMARRLWPLLTRRGFRPRGGCISNDSPRRSFTTEKRNRNLLYEYAREGYSALPQLDIERFCACPEEAAHALELRKGELRSADLPAIISTWQELRQLQEQIRSLEEEKAAVTEAVRALLANQDSGEVQQDPKYQGLRARGREIRKELVHLYPREAQLEEQFYLQALKLPNQTHPDVPVGDESQARVLHMVGDKPVFSFQPRGHLEIGEKLDIIRQKRLSHVSGHRSYYLRGAGALLQHGLVNFTFNKLLRRGFTPMTVPDLLRGAVFEGCGMTPNANPSQIYNIDPARFKDLNLAGTAEVGLAGYFMDHTVAFRDLPVRMVCSSTCYRAETNTGQEPRGLYRVHHFTKAGMFGVTGPGLEQSSQLLEEFLSLQMEILTELGLHFRVLDMPTQELGLPAYRKFDIEAWMPGRGRFGEVTSASNCTDFQSRRLHIMFQTEAGELQFAHTVNATACAVPRLLIALLESNQQKDGSVLVPPALQSYLGTDRITAPTHVPLQYIGPNQPRKPGLPGQPAVS

SEQ ID NO: 79588 - protein, 56 aa, Homo sapiens
MKLEFLQRKFWAATRQCSTVDGPCTQSCEDSDLDCFVIDNNGFILISKRSRESDYV

SEQ ID NO: 79589 - protein, 165 aa, Homo sapiens
MNWHMIISGLIVVVLKVVGMTLFLLYFPQIFNKSNDGFTTTRSYGTVCPKDWEFYQARCFFLSTSESSWNESRDFCKGKGSTLAIVNTPEKLKFLQDITDAEKYFIGLIYHREEKRWRWINNSVFNGNVTNQNQNFNCATIGLTKTFDAASCDISYRRICEKNAK

SEQ ID NO: 79590 - protein, 194 aa, Homo sapiens
MDPELLSMVPRPVCAVLLLFPITEKYEVFRTEEEEKIKSQGQDVTSSVYFMKQTISNACGTIGLIHAIANNKDKMHFESGSTLKKFLEESVSMSPEERARYLENYDAIRVTHETSAHEGQTEAPSIDEKVDLHFIALVHVDGHLYELDGRKPFPINHGETSDETLLEDAIEVCKKFMERDPDELRFNAIALSAA

SEQ ID NO: 79591 - protein, 164 aa, Homo sapiens
MLWLLPTDRGRSGNGNEPQDEILVQEILDLNKTTPSEMPSTASTLSTPLHAGIDENYQAGGSENYHELLENLQFSPGIEVKISNDEANANANLHGDPSENYRGPQVSPGSEKSVSSKEKNSKNTQYENLSILDQILQNIGRSSGNIFHKEQQRTSAQRRSQGSQ

SEQ ID NO: 79592 - protein, 455 aa, Homo sapiens
MDTVVFEDVVVDFTLEEWALLNPAQRKLYRDVMLETFKHLASVDNEAQLKASGSISQQDTSGEKLSLKQKIEKFTRKNIWASLLGKNWEEHSVKDKHNTKERHLRNPRVERPCKSSKGNKRGRTFRKTRNCNRHLRKNCCTSVRRYECSQCGKLFTHSSSLIRHKRAHSGQKLYKCKECGKAFSRPSYLQTHEKTHSGEKPYACQSCGKTFLRSHSLTEHVRTHTGEKPYECGQCGKGFSCPKSFRAHVMMHAGGRPYECKHCGKAFRCQKSFRVHMIMHAGGRPYECKQCGKAYCWATSFQRHVRIHNGEKPYKCGKCGKAFGWPSSLHKHARTHAKKKPVSGGSVGKSSARPRPSTDVKSQTREKVYKCETCGKTYGWSSSLHKHERKHTGEKPVNAASVGKPSGGLCSSKNVRTQIGQKPSKCEKCGKAFSCPKAFQGHVRSHTGKKSCTSK

SEQ ID NO: 79593 - protein, 143 aa, Homo sapiens
MHSDAAAVNFQLNSHLSTLANIHKIYHTLNKLNLTEDIGQDDHQTGSLRSCSSSDCFNKVMPPRKKRRPASGDDLSAKKSRHDSMYRKYDSTRIKTEEEAFSSKRCLEWFYEYAGTDDVVGPEGMEKFCEDIGVEPENVSQTY

SEQ ID NO: 79594 - protein, 46 aa, Homo sapiens
MAKLLSCVLGPRLYKIYRERDSERAPASVPETPTAVTAPHSSSWVT

SEQ ID NO: 79595 - protein, 152 aa, Homo sapiens
MPGLVFFKFANLGGGWGSRKMLEPGMCPAEMSLTPFVTRSLNLLCFSVTHRGRGKDNPLHFFLQLLAPSASASLGLGRETGPLPSPGLSPGLLSETFVSEGPLLTLQISWCGTECLMDGQGPLIHLHSQNIRISFGATQPPLLLVYEIRWNR

SEQ ID NO: 79596 - protein, 335 aa, Homo sapiens
MLSVVENGLDPQAAIPVIKKKLVGSVKALQKQYVSLDTVVTSEDGDANTMCSALEAVFIHGLHAKHIRAEAGGKRKKSAHQKPLPQPVFWPLLKAVTHKHIISELEHLTFVNTDVGRCRAWLRLALNDGLMECYLKLLLQEQARLHEYYQPTALLRDAEEGEFLLSFLQGLTSLSFELSYKSAILNEWTLTPLALSGLCPLSELDPLSTSGAELQRKESLDSISHSSGSEDIEVHHSGHKIRRNQKLTASSLSLDTASSSQLSCSLNSDSCLLQENGSKSPDHCEEPMSCDSDLGTANAEDSDRSLQEKTRAGSQRMTSTGLPGSNPWRVLQTTQ

SEQ ID NO: 79597 - protein, 129 aa, Homo sapiens
MRSGKASCTLETVWEDKHKYEEAERRFYEHEATQAAASAQQLPAEGPAMNGPGQDDPEDADEAEAPDGGSRRDPRKSQDSRKPLQKKRKRSPKSGLGPADLALLGLSAERVWLDKSLFDQAESSYRQKL

SEQ ID NO: 79598 - protein, 471 aa, Homo sapiens
MQLPRWWELGDPCAWTGQGRGTRRMSPATTGTFLLTAFLLSCADGINGTVNWKTRQANNFIISRKMAAGMKDVYSIFSKVHSDRNVYPSAGVLFVHVLEREYFKGEFPPYPKPGEISNDPITFNTNLMGYPDRPGWLRYIQRTPYSDGVLYGSPTAENVGKPTIIEITAYNRRTFETARHNLIINIMSAEDFPLPYQAEFFIKNMNVEEMLASEVLGDFLGAVKNVWQPERLNAINITSALDRGGRVPLPINDLKEGVYVMVGADVPFSSCLREVENPQNQLRCSQEMEPVITCDKKFRTQFYIDWCKISLVDKTKQVSTYQEVIRGEGILPDGGEYKPPSDSLKSRDYYTDFLITLAVPSAVALVLFLILAYIMCCRREGVEKRNMQTPDIQLVHHSAIQKSTKELRDMSKNREIAWPLSTLPVFHPVTGEIIPPLHTDNYDSTNMPLMQTQQNLPHQTQIPQQQTTGEC

SEQ ID NO: 79599 - protein, 41 aa, Homo sapiens
MWATLPLLCAGAWLLGVPVCGAAELCVNSLGTQRARRPRGC

SEQ ID NO: 79600 - protein, 963 aa, Homo sapiens
MTSPQLEWTLQTLLEQLNEDELKSFKSLLWAFPLEDVLQKTPWSEVEEADGKKLAEILVNTSSENWIRNATVNILEEMNLTELCKMAKAEMMEDGQVQEIDNPELGDAEEDSELAKPGEKEGWRNSMEKQSLVWKNTFWQGDIDNFHDDVTLRNQRFIPFLNPRTPRKLTPYTVVLHGPAGVGKTTLAKKCMLDWTDCNLSPTLRYAFYLSCKELSRMGPCSFAELISKDWPELQDDIPSILAQAQRILFVVDGLDELKVPPGALIQDICGDWEKKKPVPVLLGSLLKRKMLPRAALLVTTRPRALRDLQLLAQQPIYVRVEGFLEEDRRAYFLRHFGDEDQAMRAFELMRSNAALFQLGSAPAVCWIVCTTLKLQMEKGEDPVPTCLTRTGLFLRFLCSRFPQGAQLRGALRTLSLLAAQGLWAQMSVFHREDLERLGVQESDLRLFLDGDILRQDRVSKGCYSFIHLSFQQFLTALFYALEKEEGEDRDGHAWDIGDVQKLLSGEERLKNPDLIQVGHFLFGLANEKRAKELEATFGCRMSPDIKQELLQCKAHLHANKPLSVTDLKEVLGCLYESQEEELAKVVVAPFKEISIHLTNTSEVMHCSFSLKHCQDLQKLSLQVAKGVFLENYMDFELDIEFERCTYLTIPNWARQDLRSLRLWTDFCSLFSSNSNLKFLEVKQSFLSDSSVRILCDHVTRSTCHLQKVEIKNVTPDTAYRDFCLAFIGKKTLTHLTLAGHIEWERTMMLMLCDLLRNHKCNLQYLRLGGHCATPEQWAEFFYVLKANQSLKHLRLSANVLLDEGAMLLYKTMTRPKHFLQMLSLENCRLTEASCKDLAAVLVVSKKLTHLCLAKNPIGDTGVKFLCEGLSYPDCKLQTLVLQQCSITKLGCRYLSEALQEACSLTNLDLSINQIARGLWILCQALENPNCNLKHLRILDLLSSAIRSLKLWTWARIICGRVA

SEQ ID NO: 79601 - protein, 336 aa, Homo sapiens
MADQDPAGISPLQQMVASGTGAVVTSLFMTPLDVVKVRLQSQRPSMASGKCLLYCNGVLEPLYLCPNGARCATWFQDPTRFTGTMDAFVKIVRHEGTRTLWSGLPATLVMTVPATAIYFTAYDQLKAFLCGRALTSDLYAPMVAGALARLGTVTVISPLELMRTKLQAQHVSYRELGACVRTAVAQGGWRSLWLGWGPTALRDVPFSALYWFNYELVKSWLNGFRPKDQTSVGMSFVAGGISGTVAAVLTLPFDVVKTQRQVALGAMEAVRVNPLHVDSTWLLLRRIRAESGTKGLFAGFLPRIIKAAPSCAIMISTYEFGKSFFQRLNQDRLLGG

SEQ ID NO: 79602 - protein, 30 aa, Homo sapiens
MATDSWALAVDEQEAAAESRTELPSPYSTS

SEQ ID NO: 79603 - protein, 64 aa, Homo sapiens
MAPQKDRKPKRSTWRFNLDLTHPVEDGIFDSGNFGTFPSEYLGFSSLVLHFFCFKIGAISTGEG

SEQ ID NO: 79604 - protein, 61 aa, Homo sapiens
MELSDVTLIEGVGNEATHPSSTWGMWTTWWQAKATPSQLNSPIHQRTSRCRQQQSRGPPEI

SEQ ID NO: 79605 - protein, 11 aa, Homo sapiens
  MOD_RES (1)..(1): Any amino acid
XYYDFWTGYYT

SEQ ID NO: 79606 - protein, 361 aa, Homo sapiens
MLLPVFTLKLRHKISPRMVAIGRYDGTHPCLAAATQTGKVFIHNPHTRNQHVSASRVFQSPLESDVSLLSINQAVSCLTAGVLNPELGYDALLVGTQTNLLAYDVYNNSDLFYREVADGANAIVLGTLGDISSPLAIIGGNCALQGFNHEGSDLFWTVTGDNVNSLALCDFDGDGKKELLVGSEDFDIRVFKEDEIVAEMTETEIVTSLCPMYGSRFGYALSNGTVGVYDKTSRYWRIKSKNHAMSIHAFDLNSDGVNELITGWSNGKVDARSDRTGEVIFKDNFSSAIAGVVEGDYRMDGHIQLICCSVDGEIRGYLPGTAEMRGNLMDTSAEQDLIRELSQKKQNLLLELRNYEENAKQ

SEQ ID NO: 79607 - protein, 375 aa, Homo sapiens
MNSGISQVFQRELTCPICLNYFIDPVTIDCGHSFCRPCFYLNWQDIPILTQCFECLKTTQQRNLKTNIRLKKMASRARKASLWLFLSSEEQMCGTHRETKKIFCEVDRSLLCLLCSSSLEHRYHRHCPAEWAAEEHREKLLKKMQSLWEKVCENQRNLNVETTRISHWKAFGDILHRSESVLLHMPQPLNLELRAGPITGLRDRLNQFRVDITLPHNEANSHIFRRGDLRSICIGCDRQNAPHITATPTSFLAWGAQTFTSGKYYWEVHVGDSWNWAFGVCNKYWKGTNQNGNIHGEEGLFSLGCVKNDIQCSLFTTSPLTLQYVPRPTNHVGLFLDCEARTVSFVDVNQSSPIHTIPNCSFSPPLRPIFCCVHL

SEQ ID NO: 79608 - protein, 590 aa, Homo sapiens
MPRRSRRGIWRIPVDEIDRPGSFAWHMNRSIVLLLKVLAQLRDHSTLLKVSSMLQRTPDQGKKYLRDADRQVLAQRAFILTVKVLEDTLSELAEGSERPGPKVCGLPGARMTTDVSHKASPEDGQEGLPQPKKPPLADGSGPGPEPGGKVGLLNHRPVAMDAGDSADQSGERKDKESPRAGPTEPMDTSEATVCHSDLERTPPLLPGRPARDRGPESRPTELSLEELSISARQQPTPLTPAQPAPAPAPATTTGTRAGGHPEEPLSRLSRKRKLLEDTESGKTLLLDAYRVWQQGQKGVAYDLGRVERIMSETYMLIKQVDEEAALEQAVKFCQVHLGAAAQRQASGDTPTTPKHPKDSRENFFPVTVVPTAPDPVPADSVQRPSDAHTKPRPALAAATTIITCPPSASASTLDQSKDPGPPRPHRPEATPSMASLGPEGKLRPEPRRDGEAQEAASETQPLSSPPTAASSKAPSSGSAQPPEGHPGKPEPSRAKSRPLPNMPKLVIPSAATKFPPEITVTPPTPTLLSPKGSISEETKQKLKSAILSAQSAANVRKESLCQPALEVLETSSQESSLESETDEDDDYMDI

SEQ ID NO: 79609 - protein, 367 aa, Homo sapiens
MILCSRLCLPQSASLRMEPAPGLVEQPKCLEAGSPEPEPAPWQALPVLSEKQSGDVELVLAYAAPVLDKRQTSRLLKEVSALHPLPAQPHLKRVRPSRDAGSPHALEMLLCLAGPASGPRSLAELLPRPAVDPRGLGQPFLVPVPARPPLTRGQFEEARAHWPTSFHEDKQVTSALAGRLFSTQERAAMQSHMERAVWAARRAAARGLRAVGAVVVDPASDRVLATGHDCSCADNPLLHAVMVCVDLVARGQGRGTYDFRPFPACSFAPAAAPQAVRAGAVRKLDADEDGLPYLCTGYDLYVTREPCAMCAMALVHARILRVFYGAPSPDGALGTRFRIHARPDLNHRFQVFRGVLEEQCRWLDPDT

SEQ ID NO: 79610 - protein, 93 aa, Homo sapiens
  MOD_RES (1)..(1): Any amino acid
XSLASNISGLQCNASVDLIGTCWPRSPAGQLVVRPCPAFFYGVRYNTTNNGYRECLANGSWAARVNYSECQEILNEEEPGPQAQPGRAHRGGT

SEQ ID NO: 79611 - protein, 575 aa, Homo sapiens
MPLRRPKMKKTPEKLDNTPASPPRSPAEPNDIPIAKGTYTFDIDKWDDPNFNPFSSTSKMQESPKLPQQSYNFDPDTCDESVDPFKTSSKTPSSPSKSPASFEIPASAMEANGVDGDGLNKPAKKKKTPLKTDTFRVKKSPKRSPLSDPPSQDPTPAATPETPPVISAVVHATDEEKLAVTNQKWTCMTVDLEADKQDYPQPSDLSTFVNETKFSSPTEELDYRNSYEIEYMEKIGSSLPQDDDAPKKQALYLMFDTSQESPVKSSPVRMSESPTPCSGSSFEETEALVNTAAKNQHPVPRGLAPNQESHLQVPEKSSQKELEAMGLGTPSEAIEIREAAHPTDVSISKTALYSRIGTAEVEKPAGLLFQQPDLDSALQIARAEIITKEREVSEWKDKYEESRREVMEMRKIVAEYEKTIAQMIEDEQREKSVSHQTVQQLVLEKEQALADLNSVEKSLADLFRRYEKMKEVLEGFRKNEEVLKRCAQEYLSRVKKEEQRYQALKVHAEEKLDRANAEIAQVRGKAQQEQAAHQASLRKEQLRVDALERTLEQKNKEIEELTKICDELIAKMGKS

SEQ ID NO: 79612 - protein, 127 aa, Homo sapiens
MKLNVDGLLVYFPYDYIYPEQFSYMRELKRTLDAKGHGVLEMPSGTGKTVSLLALIMAYQRAYPLEVTKLIYCSRTVPEIEKVIEELRKLLNFYEKQEGEKLPFLGLALSSRKNLCIHPETTSASTP

SEQ ID NO: 79613 - protein, 259 aa, Homo sapiens
MALNQFSDMSFAEIKHKYLWSEPQNCSATKSNYLRGTGPYPPSVDWRKKGNFVSPVKNQGACGSCWTFSTTGALESAIAIATGKMLSLAEQQLVDCAQDFNNHGCQGGLPSQAFEYILYNKGIMGEDTYPYQGKDGYCKFQPGKAIGFVKDVANITIYDEEAMVEAVALYNPVSFAFEVTQDFMMYRTGIYSSTSCHKTPDKVNHAVLAVGYGEKNGIPYWIVKNSWGPQWGMNGYFLIERGKNMCGLAACASYPIPLV

SEQ ID NO: 79614 - protein, 311 aa, Homo sapiens
MNASHPETNLPVGYPPQYPPTAFQGPPGYSGYPGPQVSYPPPPAGHSGPGPAGFPVPNQPVYNQPVYNQPVGAAGVPWMPAPQPPLNCPPGLEYLSQIDQILIHQQIELLEVLTGFETNNKYEIKNSFGQRVYFAAEDTDCCTRNCCGPSRPFTLRIIDNMGQEVITLERPLRCSSCCCPCCLQEIEIQAPPGVPIGYVIQTWHPCLPKFTIQNEKREDVLKISGPCVVCSCCGDVDFEIKSLDEQCVVGKISKHWTGILREAFTDADNFGIQFPLDLDVKMKAVMIGACFLIDFMFFESTGSQEQKSGVW

SEQ ID NO: 79615 - protein, 57 aa, Homo sapiens
MDTSDLFASCRKGDVGRVRYLLEQRDVEVLCLLVWARGAGTLPSGQWSPLRGQHLRW

SEQ ID NO: 79616 - protein, 52 aa, Homo sapiens
MRFRFCGDLDCPDWVLAEISTLAKMSSVKLRLLCSQVLKELLGQGIDDPGWG

SEQ ID NO: 79617 - protein, 30 aa, Homo sapiens
MGHFTEEDKATITSLWGKAPGCLPMDPEVL

SEQ ID NO: 79618 - protein, 465 aa, Homo sapiens
MPATPSLKVVHELPACTLCAGPLEDAVTIPCGHTFCRLCLPALSQMGAQSSGKILLCPLCQEEEQAETPMAPVPLGPLGETYCEEHGEKIYFFCENDAEFLCVFCREGPTHQAHTVGFLDEAIQPYRDRLRSRLEALSTERDEIEDVKCQEDQKLQVLLTQIESKKHQVETAFERLQQELEQQRCLLLARLRELEQQIWKERDEYITKVSEEVTRLGAQVKELEEKCQQPASELLQDVRVNQSRCEMKTFVSPEAISPDLVKKIRDFHRKILTLPEMMRMFSENLAHHLEIDSGVITLDPQTASRSLVLSEDRKSVRYTRQKKNLPDSPLRFDGLPAVLGFPGFSSGRHRWQVDLQLGDGGGCTVGVAGEGVRRKGEMGLSAEDGVWAVIISHQQCWASTSPGTDLPLSEIPRGVRVALDYEAGQVTLHNAQTQEPIFTFTASFSGKVFPFFAVWKKGSCLTLKG

SEQ ID NO: 79619 - protein, 55 aa, Homo sapiens
MMSASRLAGTLIPAMAFLSCVRPESWEPCVEMPLLLLHLLILQKFVDLLQGERHC

SEQ ID NO: 79620 - protein, 1014 aa, Homo sapiens
MSFSLAPFLSPQSWPPPLPPAQSEIMKVVNLKQAILQAWKERWSDYQWAINMKKFFPKGATWDILNLADALLEQAMIGPSPNPLILSYLKYAISSQMVSYSSVLTAISKFDDFSRDLCVQALLDIMDMFCDRLSCHGKAEECIGLCRALLSALHWLLRCTAASAERLREGLEAGTPAAGEKQLAMCLQRLEKTLSSTKNRALLHIAKLEEASSWTAIEHSLLKLGEILANLSNPQLRSQAEQCGTLIRSIPTMLSVHAEQMHKTGFPTVHAVILLEGTMNLTGETQSLVEQLTMVKRMQHIPTPLFVLEIWKACFVGLIESPEGTEELKWTAFTFLKIPQVLVKLKKYSHGDKDFTEDVNCAFEFLLKLTPLLDKADQRCNCDCTNFLLQECGKQGLLSEASVNNLMAKRKADREHAPQQKSGENANIQPNIQLILRAEPTVTNILKTMDADHSKSPEGLLGVLGHMLSGKSLDLLLAAAAATGKLKSFARKFINLNEFTTYGSEESTKPASVRALLFDISFLMLCHVAQTYGSEVILSESRTGAEVPFFETWMQTCMPEEGKILNPDHPCFRPDSTKVESLVALLNNSSEMKLVQMKWHEACLSISAAILEILNAWENGVLAFESIQKITDNIKGKVCSLAVCAVAWLVAHVRMLGLDEREKSLQMIRQLAGPLFSENTLQFYNERVVIMNSILERMCADVLQQTATQIKFPSTGVDTMPYWNLLPPKRPIKEVLTDIFAKVLEKGWVDSRSIHIFDTLLHMGGVYWFCNNLIKELLKETRKEHTLRAVELLYSIFCLDMQQVTLVLLGHILPGLLTDSSKWHSLMDPPGTALAKLAVWCALSSYSSHKGQASTRQKKRHREDIEDYISLFPLDDVQPSKLMRLLSSNEDDANILSSPTDRSMSSSLSASQLHTVNMRDPLNRVLANLFLLISSILGSRTAGPHTQFVQWFMEECVDCLEQGGRGSVLQFMPFTTVSELVKVSAMSSPKVVLAITDLSLPLGRQVAAKAIAAL

SEQ ID NO: 79621 - protein, 35 aa, Homo sapiens
MNHDFQALALESRGMGEMQKRVQVSPLGHKRAPCS

SEQ ID NO: 79622 - protein, 89 aa, Homo sapiens
MNMFKEAVTFKDVAVAFTEEELGLLGPAQRKLYRDVMVENFRNLLSVGHPPFKQDVSPIERNEQLWIMTTATRRQGNLGKNQTVMSSYS

SEQ ID NO: 79623 - protein, 542 aa, Homo sapiens
MKLTSCLERALGDVFLLIGKECPFLLRDLLSSEELAQVFSQSVMNVLKVFVGSPCGLNLRNVLWHGFASPEEIPPKYCSMMILLTAGLGQLLKSYLQNTKLTLAHRSFISLTNLEDLIVFPDVTYEVLSVLEEVMMKSAFILKIMLPYWEVALVKFKSHRFADCAILLLTQLETGLRNVFATLNRCPKRLLTAEILAKHLNDGKINQLPLFLGEPAMEFLWDFLNHQEGPRIRDHLSHGEINLHEFSKETTNQLLAFSLVLLLRFVDDCLLSVFKEKSAVELLISLAEGYSSRCHPVFQLKKQVLSCEESIRVWALLPFPEELTRQAVRLEDNSETNACHSLITKMTDELYHHMPENRCVLKDLDRLPTETWPQLLRELCSTPVPTLFCPRIVLEVLVVLRSISEQCRRVSSQVTVASELRHRQWVERTLRSRQRQNYLRMWSSIRLLSPVLSLILLLIALELVNIHAVCGKNAHEYQQYLKFVKSILQYTENLVAYTSYEKNKWNETINLTHTALLKMWTFSEKKQMLIHLAKKSTSKVLL

SEQ ID NO: 79624 - protein, 120 aa, Homo sapiens
MAEISDLDRQIEQLRRCELIKESEVKALCAKAREILVEESNVQRVDSPVTVCGDIHGQFYDLKELFRVGGDVPETNYLFMGDFVDRGFYSVETFLLLLALKVAVPGFCTPNLGDLGPGLS

SEQ ID NO: 79625 - protein, 18 aa, Homo sapiens
  MOD_RES (1)..(1): Any amino acid
XSGANVLTFGAGSRLTVL

SEQ ID NO: 79626 - protein, 236 aa, Homo sapiens
MGLHLRPYRVGLLPDGLLFLLLLLMLLADPALPAGRHPPVVLVPGDLGNQLEAKLDKPTVVHYLCSKKTESYFTIWLNLELLLPVIIDCWIDNIRLVYNKTSRATQFPDGVDVRVPGFGKTFSLEFLDPSKSSVGSYFHTMVESLVGWGYTRGEDVRGAPYDWRRAPTAAAGLEGQVYPGLRVTGCALGGRGQDPARPGFRRQQPDPSHRAPEDPGAAAVSCLHQLAAALQLHMVT

SEQ ID NO: 79627 - protein, 184 aa, Homo sapiens
MVTSSFPISVAVFALITLQVGTQDSFIAAVYEHAVILPNKTETPVSQEDALNLMNENIDILETAIKQAAEQGARIIVTPEDALYGWKFTRETVFPYLEDIPDPQVNWIPCQDPHRFGHTPVQARLSCLAKDNSIYVLANLGDKKPCNSRDSTCPPNGYFQYNTNVVYNTEGKLVARYHKVGKSH

SEQ ID NO: 79628 - protein, 39 aa, Homo sapiens
MEAPEGGGGGPAARGPEGQPAPEARVHFRVARFIMEVSS

SEQ ID NO: 79629 - protein, 357 aa, Homo sapiens
MKNAVIGNNKQKANLIVLGAVPRLLYLLQQETSSTELKTECAVVLGSLAMGTENNVKSLLDCHIIPALLQGLLSPDLKFIEACLRCLRTIFTSPVTPEELLYTDATVIPHLMALLSRSRYTQEYICQIFSHCCKGPDHQTILFNHGAVQNIAHLLTSLSYKVRMQALKCFSVLAFENPQVSMTLVNVLVDGELLPQIFVKMLQRDKPIEMQLTSAKCLTYMCRAGAIRTDDNCIVLKTLPCLVRMCSKERLLEERVEGAETLAYLIEPDVELQRIASITDHLIAMLADYFKYPSSVSAITDIKRLDHDLKHAHELRQAAFKLYASLGANDEDIRKKVSLGEGRPPVLTASRQGVTST

SEQ ID NO: 79630 - protein, 205 aa, Homo sapiens
MTPPERLFLPRVRGTTLHLLLLGLLLVLLPGAQGLPGVGLTPSAAQTARQHPKMHLAHSTLKPAAHLIGDPSKQNSLLWRANTDRAFLQDGFSLSNNSLLVPTSGIYFVYSQVVFSGKAYSPKATSSPLYLAHEVQLFSSQYPFHVPLLSSQKMVYPGLQEPWLHSMYHGAAFQLTQGDQLSTHTDGIPHLVLSPSTVFFGAFAL

SEQ ID NO: 79631 - protein, 40 aa, Homo sapiens
MSHVAVENALGLDQQFAGLDLNSSDNQSGGSTASSWSAMV

SEQ ID NO: 79632 - protein, 564 aa, Homo sapiens
MPECLWTQGVLQEVLNSYFCGSIILSTLPWEVPGGHASRICLLLLATGENKQVECYQLSPGLSSLPDFQDSEETVTSRMLFPTSAQESSRGLPDANDLCLGLQSLSLTGWDRPWSTQDSDSSAQSSTHSVLSMLHNPLGNVLGKPPLSFLPLDPLGSDLVDKFPAPSVRGSRLDTRPILDSRSSSPSDSDTSGFSSGSDHLSDLISSLRISPPLPFLSLSGGGPRDPLKMGVGSRMDQEQAALAAVTPSPTSASKRWPGASVWPSWDLLEAPKDPFSIEREARLHRQAAAVNEATCTWSGQLPPRNYKNPIYSCKVFLGGVPWDITEAGLVNTFRVFGSLSVEWPGKDGKHPRCPPKGYVYLVFELEKSVRSLLQACSHDPLSPDGLSEYYFKMSSRRMRCKEVQVIPWVLADSNFVRSPSQRLDPSRTVFVGALHGMLNAEALAAILNDLFGGVVYAGIDTDKHKYPIGSGRVTFNNQRSYLKAVSAAFVEIKTTKFTKKVQIDPYLEDSLCHICSSQPGPFFCRDQVCFKYFCRSCWHWRHSMEGLRHHSPLMRNQKNRDSS

SEQ ID NO: 79633 - protein, 705 aa, Homo sapiens
MLVADQSMAEFHGSGLKHYLLTLFSVAARLYKHPSIRNSVSLVVVKILVIHDEQKGPEVTSNAALTLRNFCNWQKQHNPPSDRDAEHYDTAILFTRQDLCGSQTCDTLGMADVGTVCDPSRSCSVIEDDGLQAAFTTAHELGHVFNMPHDDAKQCASLNGVNQDSHMMASMLSNLDHSQPWSPCSAYMITSFLDNGHGECLMDKPQNPIQLPGDLPGTSYDANRQCQFTFGEDSKHCPDAASTCSTLWCTGTSGGVLVCQTKHFPWADGTSCGEGKWCINGKCVNKTDRKHFDTPFHGSWGMWGPWGDCSRTCGGGVQYTMRECDNPVPKNGGKYCEGKRVRYRSCNLEDCPDNNGKTFREEQCEAHNEFSKASFGSGPAVEWIPKYAGVSPKDRCKLICQAKGIGYFFVLQPKVVDGTPCSPDSTSVCVQGQCVKAGCDRIIDSKKKFDKCGVCGGNGSTCKKISGSVTSAKPGYHDIITIPTGATNIEVKQRNQRGSRNNGSFLAIKAADGTYILNGDYTLSTLEQDIMYKGVVLRYSGSSAALERIRSFSPLKEPLTIQVLTVGNALRPKIKYTYFVKKKKESFNAIPTFSAWVIEEWGECSKSCELGWQRRLVECRDINGQPASECAKEVKPASTRPCADHPCPQWQLGEWSSCSKTCGKGYKKRSLKCLSHDGGVLSHESCDPLKKPKHFIDFCTMAECS

SEQ ID NO: 79634 - protein, 62 aa, Homo sapiens
MFPLTEENKHVAQLLLNTGTCPRCIFRFCGVDFHAPYKLPYKMKKLRYREVKQPAQSYTAIK

SEQ ID NO: 79635 - protein, 120 aa, Homo sapiens
MKPTAASNTTTPGMVSTNMTSTTLKSTPKTTSVSQNTSQISTSTMTVTHNSSVTSAASSVTITTTMHSEAKKGSKFDTGSFVGGIVLTLGVLSILYIGCKMYYSRRGIRYRTIDEHDAII

SEQ ID NO: 79636 - protein, 158 aa, Homo sapiens
MEVMDVFSTDDLTGFLQTKAQQGWLVAGTVGCPSTEDPQSSEIPIMSCLEFLWERPTLLVLGNEGSGLSQEVQASCQLLLTILPRRQLPPGLESLNVSVAAGILLHSICSQRKGFPTEGERRQLLQDPQEPSARSEGLSMAQHPGLSSGPEKERQNEG

SEQ ID NO: 79637 - protein, 332 aa, Homo sapiens
MANRYTMDLTAIYESLLSLSPDVPVPSDHGGTESSPGWGSSGPWSLSPSDSSPSGVTSRLPGRSTSLVEGRSCGWVPPPPGFAPLAPRLGPELSPSPTSPTATSTTPSRYKTELCRTFSESGRCRYGAKCQFAHGLGELRQANRHPKYKTELCHKFYLQGRCPYGSRCHFIHNPSEDLAAPGHPPVLRQSISFSGLPSGRRTSPPPPGLAGPSLSSSSFSPSSSPPPPGDLPLSPSAFSAAPGTPLARRDPTPVCCPSCRRATPISVWGPLGGLVRTPSVQSLGSDPDEYASSGSSLGGSDSPVFEAGVFAPPQPVAAPRRLPIFNRISVSE

SEQ ID NO: 79638 - protein, 184 aa, Homo sapiens
  MOD_RES (1)..(1): Any amino acid
XQSSHCTLDEAFEDLDWDTEKGLEAVACDTEGFVPPKVMLISSKVPKAEYIPTIIRRDDPSIIPILYDHEHATFEDILEEIERKLNVYHKGAKIWKMLIFCQGGPGHLYLLKNKVATFAKVEKEEDMIHPSSTVRSVEWGACPLPLGDPPLSTSFWKRLSRLMSKVNPEPNVIHIMGCYILGNP

SEQ ID NO: 79639 - protein, 1084 aa, Homo sapiens
MVALRGLGSGLQPWCPLDLRLEWVDTVWELDFTETEPLDPSIEAEIIETGLAAFTKLYESLLPFATGEHGSMESIWTFFIENNVSHSTLVALFYHFVQIVHKKNVSVQYREYGLHAAGLYFLLLEVPGSVANQVFHPVMFDKCIQTLKKSWPQESNLNRKRKKEQPKSSQANPGRHRKRGKPPRREDIEMDEIIEEQEDENICFSARDLSQIRNAIFHLLKNFLRLLPKFSLKEKPQCVQNCIEVFVSLTNFEPVLHECHVTQARALNQAKYIPELAYYGLYLLCSPIHGEGDKVISCVFHQMLSVILMLEVGEGSHRAPLAVTSQVINCRNQAVQFISALVDELKESIFPVVRILLQHICAKVVDKSEYRTFAAQSLVQLLSKLPCGEYAMFIAWLYKYSRSSKIPHRVFTLDVVLALLELPEREVDNTLSLEHQKFLKHKFLVQEIMFDRCLDKAPTVRSKALSSFAHCLELTVTSASESILELLINSPTFSVIESHPGTLLRNSSAFSYQRQTSNRSEPSGEINIDSSGETVGSGERCVMAMLRRRIRDEKTNVRKSALQVLVSILKHCDVSGMKEDLWILQDQCRDPAVSVRKQALQSLTELLMAQPRCVQIQKAWLRGVVPVVMDCESTVQEKALEFLDQLLLQNIRHHSHFHSGDDSQVLAWALLTLLTTESQELSRYLNKAFHIWSKKEKFSPTFINNVISHTGTEHSAPAWMLLSKIAGSSPRLDYSRIIQSWEKISSQQNPNSNTLGHILCVIGHIAKHLPKSTRDKVTDAVKCKLNGFQWSLEVISSAVDALQRLCRASAETPAEEQELLTQVCGDVLSTCEHRLSNIVLKENGTGNMDEDLLVKYIFTLGDIAQLCPARVEKRIFLLIQSVLASSADADHSPSSQGSSEAPASQPPPQVRGSVMPSVIRAHAIITLGKLCLQHEDLAKKSIPALVRELEVCEDVAVRNNVIIVMCDLCIRYTIMVDKYIPNISMCLKDSDPFIRKQTLILLTNLLQEEFVKWKGSLFFRFVSTLIDSHPDIASFGEFCLAHLLLKRNPVMFFQHFIECIFHFNNYEKHEKYNKFPQSERALHR

SEQ ID NO: 79640 - protein, 97 aa, Homo sapiens
MNGRADFREPNAEVPRPIPHIGPDYIPTEEERRVFAECNDESFWFRSVPLAATSMLITQGLISKGILSSHPKYGSIPKLILACIMGYFAGKLSYVKT

SEQ ID NO: 79641 - protein, 44 aa, Homo sapiens
MPKRKVSSAEGAAKEEPKRRSARLSAKPPAKVEAKPKKAAAKCR

SEQ ID NO: 79642 - protein, 62 aa, Homo sapiens
MTTHLKKLKESYCQRQGVPMNSLRFLFEGQRIADNHTPKELGMEEEDVIEVYQEQTGGHSTV

SEQ ID NO: 79643 - protein, 1003 aa, Homo sapiens
MFGARTHGFHILMAMLIGIHCEEDVNECSSNPCQNGGTCENLPGNYTCHCPFDNLSRTFYGGRDCSDILLGCTHQQCLNNGTCIPHFQDGQHGFSCLCPSGYTGSLCEIATTLSFEGDGFLWVKSGSVTTKGSVCNIALRFQTVQPMALLLFRSNRDVFVKLELLSGYIHLSIQVNNQSKVLLFISHNTSDGEWHFVEVIFAEAVTLTLIDDSCKEKCIAKAPTPLESDQSICAFQNSFLGGLPVGMTSNGVALLNFYNMPSTPSFVGCLQDIKIDWNHITLENISSGSSLNVKAGCVRKDWCESQPCQSRGRCINLWLSYQCDCHRPYEGPNCLREYVAGRFGQDDSTGYVIFTLDESYGDTISLSMFVRTLQPSGLLLALENSTYQYIRVWLERGRLAMLTPNSPKLVVKFVLNDGNVHLISLKIKPYKIELYQSSQNLGFISASTWKIEKGDVIYIGGLPDKQETELNGGFFKGCIQDVRLNNQNLEFFPNPTNNASLNPVLVNVTQGCAGDNSCKSNPCHNGGVCHSRWDDFSCSCPALTSGKACEEVQWCGFSPCPHGAQCQPVLQGFECIANAVFNGQSGQILFRSNGNITRELTNITFGFRTRDANVIILHAEKEPEFLNISIQDSRLFFQLQSGNSFYMLSLTSLQSVNDGTWHEVTLSMTDPLSQTSRWQMEVDNETPFVTSTIATGSLNFLKDNTDIYVGDRAIDNIKGLQGCLSTIEIGGIYLSYFENVHGFINKPQEEQFLKISTNSVVTGCLQLNVCNSNPCLHGGNCEDIYSSYHCSCPLGWSGKHCELNIDECFSNPCIHGNCSDRVAAYHCTCEPGYTGVNCEVDIDNCQSHQCANGATCISHTNGYSCLCFGNFTGKFCRQSRLPSTVCGNEKTNLTCYNGGNCTEFQTELKCMCRPGFTGEWCEKDIDECASDPCVNGGLCQDLLNKFQCLCDVAFAGERCEVDVSSLSFYVSLLFWQNLFQLLSYLILRMNDEPVVEWGEQEDY

SEQ ID NO: 79644 - protein, 470 aa, Homo sapiens
MEHAATTGPRPGPPSRRVENVVLRAKDWLPGAPGGTAVWATSLEAEVPPDLALNKEQQLQISKELVDIQITTHHLHEQHEAEIFQLKSEILRLESRVLELELRGDGTSQGCAVPVESDPRHPRAAAQELRHKAQVPGHSDDHRFQVQPKNTMNPENEQHRLGSGLQGEVKWALEHQEARQQALVTRVATLGRQLQGAREEARAAGQRLATQAVVLCSCQGQLRQAEAENARLQLQLKKLKDEYVLRLQHCAWQAVEHADGAGQAPATTALRTFLEATLEDIRAAHRSREQQLARAARSYHKRLVDLSRRHEELLVAYRAPGNPQAIFDIASLDLEPLPVPLVTDFSHREDQHGGPGALLSSPKKRPGGASQGGTSEPQGLDAASWAQIHQKLRDFSRSTQAELERERAQLLVRATMAEEQLSELQEYVDQHLGRYKHEILRLRKLAGAGDPWKVGAVPPAKPQHPRTGSH

SEQ ID NO: 79645 - protein, 69 aa, Homo sapiens
MLSVQPDTKPKGCAGCNRKIKDRYLLKALDKYWHEDCLKCACCDCRLGEVGSTLYTKANLILCRRDYLR

SEQ ID NO: 79646 - protein, 165 aa, Homo sapiens
MVATCLQVVGFVTSFVGWIGVIVTTSTNDWVVTCGYTIPTCRKLDELGSKGLWADCVMATGLYHCKPLVDILILPGYVQACRALMIAASVLGLPAILLLLTVLPCIRMGQEPGVAKYRRAQLAGVLLILLGCQLLWAKTESSLHSQHLVQFKQKYLEDFSYLQGD

SEQ ID NO: 79647 - protein, 921 aa, Homo sapiens
MLRNERQFKEEKLAEQLKQAEELRQYKVLVHAQERELTQLREKLREGRDASRSLNEHLQALLTPDEPDKSQGQDLQEQLAEGCRLAQHLVQKLSPENDNDDDEDVQVELAEKVQKSSAPREMQKAEEKEVPEDSQEECAITYSNSHGPYDSNQPHRKTKITFEEDKVDSTLIGSSSHVEWEDAVHIIPENESDDEEEEEKGPVSPRNLQESEEEEVPQESWDEGYSTLSIPPEMLASYQSYSSTFHSLEEQQVCMAVDIGRHRWDQVKKEDQEATGPRLSRELLDEKGPEVLQDSLDRCYSTPSGCLELTDSCQPYRSAFYVLEQQRVGLAVDMDEIEKYQEVEEDQDPSCPRLSRELLDEKEPEVLQDSLDRCYSTPSGYLELPDLGQPYSSAVYSLEEQYLGLALDVDRTKKDQEEEEDQGPPCPRLSRELLEVVEPEVLQDSLDRCYSTPSSCLEQPDSCQPYGSSFYALEEKHVGFSLDVGEIEKKGKGKKRRGRRSKKERRRGRKEGEEDQNPPCPRLSRELLDEKGPEVLQDSLDRCYSTPSGCLELTDSCQPYRSAFYVLEQQRVGLAVDMDEIEKYQEVEEDQDPSCPRLSRELLDEKGPEVLQDSLDRCYSTPSGCLELTDSCQPYRSAFYVLEQQRVGLAVDMDEIEKYQEVEEDQDPSCPRLSRELLDEKEPEVLQDSLDRCYSTPSGYLELPDLGQPYSSAVYSLEEQYLGLALDVDRTKKDQEEEEDQGPPCPRLSRELLEVVEPEVLQDSLDRCYSTPSSCLEQPDSCQPYGSSFYALEEKHVGFSLDVGEIEKKGKGKKRRGRRSKKERRRGRKEGEEDQNPPCPRLNGVLMEVEEPEVLQDSLDGCYSTPSMYFELPDSFQHYRSVFYSFEEQHISFALYVDNRFFTLTVTSLHLVFQMGVIFPQ

SEQ ID NO: 79648 - protein, 284 aa, Homo sapiens
MGDVLEQFFILTGLLVCLACLAKCVRFSRCVLLNYWKVLPKSFLRSMGQWAVITGAGDGIGKAYSFELAKRGLNVVLISRTLEKLEAIATEIERTTGRSVKIIQADFTKDDIYEHIKEKLAGLEIGILVNNVGMLPNLLPSHFLNAPDEIQSLIHCNITSVVKMTQLILKHMESRQKGLILNISSGIALFPWPLYSMYSASKAFVCAFSKALQEEYKAKEVIIQVLTPYAVSTAMTKYLNTNVITKTADEFVKESLNYVTIGGETCGCLAHEILFAENDRSGLL

SEQ ID NO: 79649 - protein, 521 aa, Homo sapiens
MSDTSESGAGLTRFQAEASEKDSSSMMQTLLTVTQNVEVPETPKASSTTQLTDTQVLAAENKSLAADTKKQNADPQAVTMPATETKKVSHVADTKVNTKAQETEAAPSQAPADEPEPESAAAQSQENQDTRPKVKAKKARKVKHLDGEEDGSSDQSQASGTTGGRRVSKARRRAAKLQSSQEPEAPPPRDVALLQGRANDLVKYLLAKDQTKIPIKRSDMLKDIIKEYTDVYPEIIERAGYSLEKVFGIQLKEIDKNDHLYILLSTLEPTDAGILGTTKDSPKLGLLMVLLSIIFMNGNRSSEAVIWEVLRKLGLRPGIHHSLFGDVKKLITDEFVKQKYLDYARVPNSNPPEYEFFWGLRSYYETSKMKVLKFACKVQKKDPKEWAAQYREAMEADLKAAAEAAAEAKARAEIRARMGIGLGSENAAGPCNWDEADIGPWAKARIQAGAEAKAKAQESGSASTGASTSTNNSASASASTSGGFSAGASLTATLTFGLFAGLGGAGASTSGSSGACGFSYK

SEQ ID NO: 79650 - protein, 34 aa, Homo sapiens
  MOD_RES (1)..(1): Any amino acid
XESTRRQDTRSPTSAPTQRLSPGEALPPVSQLAQ

SEQ ID NO: 79651 - protein, 92 aa, Homo sapiens
MADKVRRQRPRRRVCWALVAVLLADLLALSDTLAVMSVDLGSESMKVAIVKPGVPMEIVLNKESRRKTPVIVTLKENERFFGDSAASMAIKN

SEQ ID NO: 79652 - protein, 273 aa, Homo sapiens
MSMSPTVIILACLGFFLDQSVWAHVGGQDKPFCSAWPSAVVPQGGHVTLRCHYRRGFNIFTLYKKDGVPVPELYNRIFWNSFLISPVTPAHAGTYRCRGFHPHSPTEWSAPSNPLVIMVTGLYEKPSLTARPGPTVRAGENVTLSCSSQSSFDIYHLSREGEAHELRLPAVPSINGTFQADFPLGPATHGETYRCFGSFHGSPYEWSDPSDPLPVSVTGNPSSSWPSPTEPSFKTGIARHLHAVIRYSVAIILFTILPFFLLHRWCSKKKMLL

SEQ ID NO: 79653 - protein, 145 aa, Homo sapiens
MISREAADQLLIVAEGSYLIRESQRQPGTYTLALRFGSQTRNFRLYYDGKHFVGEKRFESIHDLVTDGLITLYIETKAAEYIAKMTINPIYEHVGYTTLNREPAYKKHMPVLKETHDERDSTGQDGVSEKRVSSNRTGLMTCSTA

SEQ ID NO: 79654 - protein, 294 aa, Homo sapiens
MGLASWSQLASTPRAPGSRDARWERREPALRGAKDRLTIGKHLDMGSPQLRTRDRGWPSPRPEREKRTSQSARRPTCTESRWKSEEEVESDDEYLALPARLTQVSSLVSYLGSISTLVTLPTGDIKGQSPLEVSDSDGPASFPSSSSQSQLPPGAALQGSGDPEGQNPCFLRSFVRAHDSAGEGSLGSSQALGVSSGLLKTRPSLPARLDRWPFSDPDVEGQLPRKGGEQGKESLVQCVKVMTLNVRKLCVQVSCLFPQSTNIIIKHVHVDQALFMCQALCCTLSYSVLTTFTR

SEQ ID NO: 79655 - protein, 164 aa, Homo sapiens
MSSENCFVAENSSLHPESGQENDATSPHFSTRHEGSFQVPVLCAVMNVVFITILIIALIALSVGQYNCPGQYTFSMPSDSHVSSCSEDWVGYQRKCYFISTVKRSWTSAQNACSEHGATLAVIDSEKDMNFLKRYAGREEHWVGLKKEPGHPWKWSNGKEFNNW

SEQ ID NO: 79656 - protein, 1189 aa, Homo sapiens
MSVACVLKRKAVLWQDSFSPHLKHHPQEPANPNMPVVLTSGTGSQAQPQPAANQALAAGTHSSPVPGSIGVAGRSQDDAMVDYFFQRQHGEQLGGGGSGGGGYNNSKHRWPTGDNIHAEHQVRSMDELNHDFQALALEGRAMGEQLLPGKKFWETDESSKDGPKGIFLGDQWRDSAWGTSDHSVSQPIMVQRRPGQSFHVNSEVNSVLSPRSESGGLGVSMVEYVLSSSPGDSCLRKGGFGPRDADSDENDKGEKKNKGTFDGDKLGDLKEEGDVMDKTNGLPVQNGIDADVKDFSRTPGNCQNSANEVDLLGPNQNGSEGLAQLTSTNGAKPVEDFSNMESQSVPLDPMEHVGMEPLQFDYSGTQVPVDSAAATVGLFDYNSQQQLFQRPNALAVQQLTAAQQQQYALAAAHQPHIAGLAPAAFVPNPYIISAAPPGTDPYTAGLAAAATLGPAVVPHQYYGVTPWGVYPASLFQQQAAAAAAATNSANQQTTPQAQQGQQQVLRGGASQRPLTPNQNQQGQQTDPLVAAAAVNSALAFGQGLAAGMPGYPVLAPAAYYDQTGALVVNAGARNGLGAPVRLVAPAPVIISSSAAQAAVAAAAASANGAAGGLAGTTNGPFRPLGTQQPQPQPQQQPNNNLASSSFYGNNSLNSNSQSSSLFSQGSAQPANTSLGFGSSSSLGATLGSALGGFGTAVANSNTGSGSRRDSLTGSSDLYKRTSSSLTPIGHSFYNGLSFSSSPGPVGMPLPSQGPGHSQTPPPSLSSHGSSSSLNLGGLTNGSGRYISAAPGAEAKYRSASSASSLFSPSSTLFSSSRLRYGMSDVMPSGRSRLLEDFRNNRYPNLQLREIAGHIMEFSQDQHGSRFIQLKLERATPAERQLVFNEILQAAYQLMVDVFGNYVIQKFFEFGSLEQKLALAERIRGHVLSLALQMYGCRVIQKALEFIPSDQQVINEMVRELDGHVLKCVKDQNGNHVVQKCIECVQPQSLQFIIDAFKGQVFALSTHPYGCRVIQRILEHCLPDQTLPILEELHQHTEQLVQDQYGNYVIQHVLEHGRPEDKSKIVAEIRGNVLVLSQHKFASNVVEKCVTHASRTERAVLIDEVCTMNDGPHSALYTMMKDQYANYVVQKMIDVAEPGQRKIVMHKIRPHIATLRKYTYGKHILAKLEKYYMKNGVDLGPICGPPNGII

SEQ ID NO: 79657 - protein, 162 aa, Homo sapiens [sequence omitted]

SEQ ID NO: 79658 - protein, 473 aa, Homo sapiens
MDHAEENEILAATQRYYVERPIFSHPVLQERLHTKDKVPDSIADKLKQAFTCTPKKIRNIIYMFLPITKWLPAYKFKEYVLGDLVSGISTGVLQLPQGLAFAMLAAVPPIFGLYSSFYPVIMYCFLGTSRHISIGPFAVISLMIGGVAVRLVPDDIVIPGGVNATNGTEARDALRVKVAMSVTLLSGIIQFCLGVCRFGFVAIYLTEPLVRGFTTAAAVHVFTSMLKYLFGVKTKRYSGIFSVVYSTVAVLQNVKNLNVCSLGVGLMVFGLLLGGKEFNERFKEKLPAPIPLEFFAVVMGTGISAGFNLKESYNVDVVGTLPLGLLPPANPDTSLFHLVYVDAIAIAIVGFSVTISMAKTLANKHGYQVDGNQELIALGLCNSIGSLFQTFSISCSLSRSLVQEGTGGKTQLAGCLASLMILLVILATGFLFESLPQTIWLTTFVSSLFLGLDYGLITAVIIALLTVIYRTQR

SEQ ID NO: 79659 - protein, 54 aa, Homo sapiens
MASQPPPPPKPWETRRIPGAGPGPGPGPTFQLWSVAVESGICPATASTGSKVSP

SEQ ID NO: 79660 - protein, 140 aa, Homo sapiens
MAEDGDPFAKLIVETDTFGSRVRVRGAETGLYICMNKKGKLIAKSNGKGKDCVFTEIVLENNYTALQNAKYEGWYMAFTRKGRPRKGSKTRQHQREVHFMKRLPRGHHTTEQSLRFEFLNYPPFTRSLRGSQRTWAPEPR

SEQ ID NO: 79661 - protein, 168 aa, Homo sapiens
MCFPKVLSDDMKKLKARMHQAIERFYDKMQNAESGRGQVMSSLAELEELTPLLEKERDGLRCRGNRSPVPDVEDPATEEPGESFCDKVMRWFQAMLQRLQTWWHGVLAWVKEKVVALVHAVQALWKQFQSFCCSLSELFMSSFQSYGAPRGDKEELTPQKCSEPQSSK

SEQ ID NO: 79662 - protein, 273 aa, Homo sapiens
  MOD_RES (1)..(1): Any amino acid
XYYELGEDTIRQAFAPFGPIKSIDMSWDSVTMKHKGFAFVEYEVPEAAQLALEQMNSVMLGGRNIKVRQGAKASIPQACRAAPPRKPFVAGPGLTGLSISPPLPQDLSDDDIKSVFEAFGKIKSCTLARDPTTGKHKGYGFIEYEKAQSSQDAVSSMNLFDLGGQYLRVGKAVTPPMPLLTPATPGGLPPAAAVAAAAATAKITAQEAVAGAAVLGTLGTPGLVSPALTLAQPLGTLPQAVMAAQAPGVITGVTPARPPIPVTIPSVGVVNPI

SEQ ID NO: 79663 - protein, 112 aa, Homo sapiens
MLKEEHEVAVLGAPHNPAPPTSTVIHIRSETSVPDHVVWSLFNTLFMNPCCLGFIAFAYSVKSRDRKMVGDVTGAQAYASTAKCLNIWALILGILMTILLIVIPVLIFQAYG

SEQ ID NO: 79664 - protein, 177 aa, Homo sapiens
MARGAALALLLFGLLGVLVAAPDGGFDLSDALPDNENKKPTAIPKKPSAGDDFDLGDAVVDGENDDPRPPNPPKPMPNPNPNHPSSSGSFSDADLADGVSGGEGKGGSDGGGSHRKEGEEADAPGVIPGIVGAVVVAVAGAISSFIAYQKKKLCFKENGQLAGSLGPCIGIRREADG

SEQ ID NO: 79665 - protein, 97 aa, Homo sapiens
EAQKINNGSSQADGTLKPVDEKEEAVAAEVGWMTSVKDWAGVMISAQTLTGRVLVVLVFALSIGALVIYFIDSSKFEIFKSSETDTVFRNFAVSEYS

SEQ ID NO: 79666 - protein, 227 aa, Homo sapiens
MYQGEFGLNMKLGYGKFSWPTGESYHGQFYRDHCHGLGTYMWPDGSSFTGTFYLSHREGYGTMYMKTRLFQGLYKADQRFGPGVETYPDGSQDVGLWFREQLIKLCTQIPSGFSLLRYPEFSSFITHSPARISLSEEEKTEWGLQEGQDPFFYDYKRFLLNDNLTLPPEMYVYSTNSDHLPMTSSFRKELDARIFLNEIPPFVEDGEPWFIINETPLLVKIQKQTYK

SEQ ID NO: 79667 - protein, 115 aa, Homo sapiens
MAVLAPLIALVYSVPRLSRWLAQPYYLLSALLSAAFLLVRKLPPLCHGLPTQREDGNPCDFDWREVEILMFLSAIVMMKNRRSMPHEEGQRMGYRSAQPSLTCDISVFQSLWSNI

SEQ ID NO: 79668 - protein, 358 aa, Homo sapiens
MSPTVIILACLGFFLDQSVWAHVGGQDKPFCSAWPSAVVPQGGHVTLRCHCRRGFNIFTLYKKDGVPVPELYNRIFWNSFLISPVTPAHAGTYRCRGFHPHSPTEWSAPSNPLVIMVTGLYEKPSLTARPGPTVRAGENVTLSCSSQSSFDIYHLSREGEAHELRLPAVPSINGTFQADFPLGPATHGETYRCFGSFHGSPYEWSDPSDPLPVSVTGIARHLHAVIRYSVAIILFTILPFFLLHRWCSKKKNAAVMNQEPAGHRTVNREDSDEQDPQEVTYAQLDHCIFTQRKITGPSQRSKRPSTDTSVCIELPNAEPRALSPAHEHHSQALMGSSRETTALSQTQLASSNVPAAGI

SEQ ID NO: 79669 - protein, 90 aa, Homo sapiens
MMTGQTMSERGTKKRKRRRRRSPRRRSIWTMRKEGSERKRRSGSERGSTVTRRERLTTLILGRRWRWSRPQIGQSERAGHSQFSVELKML

SEQ ID NO: 79670 - protein, 304 aa, Homo sapiens
MSSSEEVSWISWFCGLRGNEFFCEVDEDYIQDKFNLTGLNEQVPHYRQALDMILDLEPDEELEDNPNQSDLIEQAAEMLYGLIHARYILTNRGIAQMLEKYQQGDFGYCPRVYCENQPMLPIVPVPDIRTCHFCLVEDPSVGCISGSEKCTISSSSLCMVITIYYDVKVRFIVRGCGQYISYRCQEKRNTYFAEYWYQAQCCQYDYCNSWSSPQLQSSLPEPHDRPLALPLSDSQIQWFYQALNLSLPLPNFHAGTEPDGLDPMVTLSLNLGLSFAELRRMYLFLNSSGLLVLPQAGLLTPHPS

SEQ ID NO: 79671 - protein, 38 aa, Homo sapiens
MSQQRPARKLPSLLLDPTEETVRRRCRDPINVEGLLKL

SEQ ID NO: 79672 - protein, 96 aa, Homo sapiens
GDGTGVASIYRGPFADENFKLRHSAPGLLSMANSGPSTNGCQFFITCSKCDWLDGKHVVFGKIIDGLLVMRKIENVPTGPNNKPKLPVVISQCGEM

SEQ ID NO: 79673 - protein, 447 aa, Homo sapiens
MIISAMEKMKCNILSQQQTESWSKEVSGLLGSDQPDSEMTFDTNIKQESGSSTSSYSGYEGCAVLQVSPVTETRTYHDVKEICKCDVDEFVILELGDFNDITETCSCSCSSSKSVTYEPDFNSAELLAKELYRVFQKCWILSVVNSQLAGSLSAAGSIVVNEECVRKDFESSMNVVQEIKFKSRIRGTEDWAPPRFQIIFNIHPPLKRDLVVAAQNFFCAGCGTPVEPKFVKRLRYCEYLGKYFCDCCHSYAESCIPARILMMWDFKKYYVSNFSKQLLDSIWHQPIFNLLSIGQSLYAKAKELDRVKEIQEQLFHIKKLLKTCRFANSALKEFEQVPGHLTDELHLFSLEDLVRIKKGLLAPLLKDILKASLAHVAGCELCQGKGFICEFCQNTTVIFPFQTATCRRCSACRACFHKQCFQSSECPRCARITARRKLLESVASAAT

SEQ ID NO: 79674 - protein, 1022 aa, Homo sapiens
MATEGAAQLGNRVAGMVCSLWVLLLVSSVLALEEVLLDTTGETSEIGWLTYPPGGWDEVSVLDDQRRLTRTFEACHVAGAPPGTGQDNWLQTHFVERRGAQRAHIRLHFSVRACSSLGVSGGTCRETFTLYYRQAEEPDSPDSVSSWHLKRWTKVDTIAADESFPSSSSSSSSSSSSAAWAVGPHGAGQRAGLQLNVKERSFGPLTQRGFYVAFQDTGACLALVAVRLFSYTCPAVLRSFASFPETQASGAGGASLVAAVGTCVAHAEPEEDGVGGQAGGSPPRLHCNGEGKWMVAVGGCRCQPGYQPARGDKACQACPRGLYKASAGNAPCSPCPARSHAPNPAAPVCPCLEGFYRASSDPPEAPCTGPPSAPQELWFEVQGSALMLHWRLPRELGGRGDLLFNVVCKECEGRQEPASGGGGTCHRCRDEVHFDPRQRGLTESRVLVGGLRAHVPYILEVQAVNGVSELSPDPPQAAAINVSTSHEVPSAVPVVHQVSRASNSITVSWPQPDQTNGNILDYQLRYYDQAEDESHSFTLTSETNTATVTQLSPGHIYGFQVRARTAAGHGPYGGKVYFQTLPQGELSSQLPERLSLVIGSILGALAFLLLAAITVLAVVFQRKRRGTGYTEQLQQYSSPGLGVKYYIDPSTYEDPCQAIRELAREVDPAYIKIEEVIGTGSFGEVRQGRLQPRGRREQTVAIQALWAGGAESLQMTFLGRAAVLGQFQHPNILRLEGVVTKSRPLMVLTEFMELGPLDSFLRQREGQFSSLQLVAMQRGVAAAMQYLSSFAFVHRSLSAHSVLVNSHLVCKVARLGHSPQGPSCLLRWAAPEVIAHGKHTTSSDVWSFGILMWEVMSYGERPYWDMSEQEVLNAIEQEFRLPPPPGCPPGLHLLMLDTWQKDRARRPHFDQLVAAFDKMIRKPDTLQAGGDPGERPSQALLTPVALDFPCLDSPQAWLSAIGLECYQDNFSKFGLCTFSDVAQLSLEDLPALGITLAGHQKKLLHHIQLLQQHLRQQGSVEV

SEQ ID NO: 79675 - protein, 32 aa, Homo sapiens
MADPGMMSLFGEDGNIFSEGLEGLGECGYPEN

SEQ ID NO: 79676 - protein, 104 aa, Homo sapiens
  MOD_RES (1)..(1): Any amino acid
XPNRIIEIANKTPKISQLYKQASGTMVYGLFMLQKKSVHKKNTIYEIQDNTGSMDVVGSGKWHNIKCEKGDKLRLFCLQLRTVDRKLKLVIKAKKNKEGPMNVN

SEQ ID NO: 79677 - protein, 184 aa, Homo sapiens
MDLGPLNICEEMTILHGGFLLAEQLFHPKALAELTKSDWERVGRPIVEALREISSAAAHSQPFAWKKKALIIIWAKVLQPHPVTPSDTETRWQEDLFFSVGNMIPTINHTILFELLKSLEASGLFIQLLMALPTTICHAELERFLEHVTVDTSAEDVAFFLDVWWERTTPRRCLQPCIWTNWPR

SEQ ID NO: 79678 - protein, 82 aa, Homo sapiens
MAAPAEPCAGQGVWNQTEPEPAATSLLSLCFLRTAGVWVPPMYLWVLGPIYLLFIHHHGRGYLRMSPLFKAKMRNQNILERP

SEQ ID NO: 79679 - protein, 63 aa, Homo sapiens
MRSCLWRCRHLSQGVQWSLLLAVLVFFLFALPSFIKEPQTKPSRMVSRAPGHLMRCQGMGVGR

SEQ ID NO: 79680 - protein, 310 aa, Homo sapiens
MEALLEGIQNRGHGGGFLTSCEAELQELMKQIDIMVAHKKSEWEGRTHALETCLKIREQELKSLRSQLDVTHKEVGMLHQQVEEHEKIKQEMTMEYKQELKKLHEELCILKRSYEKLQKKQMREFRGNTKNHREDRSEIERLTAKIEEFRQKSLDWEKQRLIYQQQVSSLEAQRKALAEQSEIIQAQLVNRKQKLESVELSSQSEIQHLSSKLERANDTICANELEIERLTMRVNDLVGTSMTVLQEQQQKEEKLRESEKLLEALQEEKRELKAALQSQENLIHEARIQKEKLQEKVKATNTQHAVEAIR

SEQ ID NO: 79681 - protein, 45 aa, Homo sapiens
MGLELYLDLLSQPCRAVYIFAKKNDIPFELRIVDLIKGDVPCFPG

SEQ ID NO: 79682 - protein, 80 aa, Homo sapiens
MALMQELYSTPASRLDSFVAQWLQPHREWKEEVLDAVRTVEEFLRQEHFQGKRGLDQDVRVLKVVKGLLFPTPSHPLRSM

SEQ ID NO: 79683 - protein, 174 aa, Homo sapiens
MAIGFVGCLGAIKENKCLLLTFFLLLLLVFLLEATIAILFFAYTDKIDRYAQQDLKKGLHLYGTQGNVGLTNAWSIIQTDFRCCGVSNYTDWFEVYNATRVPDSCCLEFSESCGLHAPGTWWKAPCYETVKVWLQENLLAVGIFGLCTALVQILGLTFAMTMYCQVVKADTYCA

SEQ ID NO: 79684 - protein, 460 aa, Homo sapiens
MAEAVFHAPKRKRRVYETYESPLPIPFGQDHGPLKEFKIFRAEMINNNVIVRNAEDIEQLYGKGYFGKGILSRSRPSFTISDPKLVAKWKDMKTNMPIITSKRYQHSVEWAAELMRRQGQDESTVRRILKDYTKPLEHPPVKRNEEAQVHDKLNSGMVSNMEGTAGGERPSVVNGDSGKSGGVGDPREPLGCLQEGSGCHPTTESFEKSVREDASPLPHVCCCKQDALILQRGLHHEDGSQHIGLLHPGDRGPDHEYVLVEEAECAMSEREAAPNEELVQRNRLICRRNPYRIFEYLQLSLEEAFFLVYALGCLSIYYEKEPLTIVKLWKAFTVVQPTFRTTYMAYHYFRSKGWVPKVGLKYGTDLLLYRKGPPFYHASYSVIIELVDDHFEGSLRRPLSWKSLAALSRVSVNVSKELMLCYLIKPSTMTDKEMESPECMKRIKVQVGKLREIHVIPKIL

SEQ ID NO: 79685 - protein, 58 aa, Homo sapiens
MGLPQPGLWLKRLWVLLEVAVHVVVGKVLLILFPDRVKRNILAMGEKTGPLAATRGHD

SEQ ID NO: 79686 - protein, 437 aa, Homo sapiens
MQDDKTGGVPIRTVKSFLSKIPSVVTGTDIVQWLMKNLSIEDPVEAIHLGSLIAAQGYIFPISDHVLTMKDDGTFYRFQAPYFWPSNCWEPENTDYAIYLCKRTMQNKARLELADYEAENLARLQRAFARKWEFIFMQAEAQVKIDRKKDKTERKILDSQERAFWDVHRPVPGCVNTTEMDIRKCRRLKNPQKVKKSVYGVTEESQAQSPVHVLSQPIRKTTKEDIRKQITFLNAQIDRHCLKMSKVAESLIAYTEQYVEYDPLITPAEPSNPWISDDVALWDIEMSKEPSQQRVKRWGFSFDEILKDQVGRDQFLRFLESEFSSENLRFWLAVQDLKKQPLQDVAKRVEEIWQEFLAPGAPSAINLDSHSYEITSQNVKDGGRYTFEDAQEHIYKLMKSDSYARFLRSNAYQDLLLAKKKGKSLAGKRLTGLMQSS

SEQ ID NO: 79687 - protein, 178 aa, Homo sapiens
MKSSVHSEEDDFVPELHRNVHPRERPDWEETLSAMARGADVPEIPGDLTLKTCGSTASMKVKHVKKSTTPGLMGCDNIHRLPFTKGHFPKMAECAHFHYENVEFGSIQLSLSEEQNEVMKNGCESKELVYLVQIACQGKSWIVKRSYEDFRVLDKHLHLCIYDRRFSQLSELPRSDTL

SEQ ID NO: 79688 - protein, 318 aa, Homo sapiens
MTTSALRRQVKNIVHNYSEAEIKVREATSNDPWGPPSSLMSEIADLTFNTVAFTEVMGMLWRRLNDSGKNWRHVYKALTLLDYLLKTGSERVAHQCRENLYTIQTLKDFQYIDRDGKDQGVNVREKVKQVMALLKDEERLRQERTHALKTKERMALEGIGIGSGQLGFSRRYGEDYSRSRGSPSSYNSSSSSPRYTSDLEQARPQTSGEEELQLQLALAMSREEAEKPVPPASHRDEDLQLQLALRLSRQEHEKEVRSWQGDGSPMANGAGAVVHHQRDREPEREERKEEEKLKTSQAPPTSEPRLPLPSTVLHPGLG

SEQ ID NO: 79689 - protein, 323 aa, Homo sapiens
IRSLGTKLAEEMRKLTSNFRLGFGSFVDKDISPFSYTAPRYQTNPCIGYKLFPNCVPSFGFRHLLPLTDRVDSFNEEVRKQRVSRNRDAPEGGFDAVLQAAVCKSIRSKVELSVWDQPEDLNLFFTATCQDGVSYPGQRKCEGLKIGDTASFEVSLEARSCPSRHTEHVFALRPVGFRDSLEVGVTYNCTCGCSVGLEPNSARCNGSGTYVCGLCECSPGYLGTRCECQDGENQSVYQNLCREAEGKPLCSGRGDCSCNQCSCFESEFGKIYGPFCECDNFSCARNKGVLCSGHGECHCGECKCHAGYIGDNCNCSTDISTCR

SEQ ID NO: 79690 - protein, 1063 aa, Homo sapiens
MPHLPLASFRPPFWGLRHSRGLPRFHSVSTQSEPHGSPISRRNREAKQKRLREKQATLEAEIAGESKSPAESIKAWRPKELVLYEIPTKPGEKKDVSGPLPPAYSPRYVEAAWYPWWVREGFFKPEYQARLPQATGETFSMCIPPPNVTGSLHIGHALTVAIQDALVRWHRMRGDQVLWVPGSDHAGIATQAVVEKQLWKERGVRRHELSREAFLREVWQWKEAKGGEICEQLRALGASLDWDRECFTMDVGSSVAVTEAFVRLYKAGLLYRNHQLVNWSCALRSAISDIEVENRPLPGHTQLRLPGCPTPVSFGLLFSVAFPVDGEPDAEVVVGTTRPETLPGDVAVAVHPDDSRYTHLHGRQLRHPLMGQPLPLITDYAVQPHVGTGAVKVTPAHSPADAEMGARHGLSPLNVIAEDGTMTSLCGDWLQGLHRFVAREKIMSVLSERGLFRGLQNHPMVLPICSRSGDVIEYLLKNQWFVRCQEMGARAAKAVESGALELSPSFHQKNWQHWFSHIGDWCVSRQLWWGHQIPAYLVVEDHAQGEEDCWVVGRSEAEAREVAAELTGRPGAELTLERDPDVLDTWFSSALFPFSALGWPQETPDLARFYPLSLLETGSDLLLFWVGRMVMLGTQLTGQLPFSKVLLHPMVRDRQGRKMSKSLGNVLDPRDIISGVEMQLLQEKLRSGNLDPAELAIVAAAQKKDFPHGIPECGTDALRFTLCSHGVQAGDLHLSVSEVQSCRHFCNKIWNALRFILNALGEKFVPQPAEELSPSSPMDAWILSRLALAAQECERGFLTRELSLVTHALHHFWLHNLCDVYLEAVKPVLWHSPRPLGPPQVLFSCADLGLRLLAPLMPFLAEELWQRLPPRPGCPPAPSISVAPYPSACSLEHWRQPELERRFSRVQEVVQVLRALRATYQLTKARPRVLLQSSEPGDQGLFEAFLEPLGTLGYCGAVGLLPPGTAAPSGWAQAPLSDTAQVYMELQGLVDPQIQLPLLAARRYKLQKQLDSLTARTPSEGEAGTQRQQKLSSLQLELSKLDKAASHLRQLMDEPPAPGSPEL

SEQ ID NO: 79691 - protein, 51 aa, Homo sapiens
MKCVFVTVGTTSFDDLIACVSAPDSLQVSEGGEQAAAWLATRHLRPYCQPR

SEQ ID NO: 79692 - protein, 339 aa, Homo sapiens
MMMMALSKTFGQKPVKFQLEDDGEFYMIGSEVGNYLRMFRGSLYKRYPSLWRRLATVEERKKIVASSHGKKTKPNTKDHGYTTLATSVTLLKASEVEEILDGNDEKYKAVSISTEPPTYLSFDDHDPAVIHENASQPEVLVPIRLDMEIDGQKLRDAFTWNMNEKLMTPEMFSEILCDDLDLNPLTFVPAIASAIRQQIESYPTDSILEDQSDQRVIIKLNIHVGNISLVDQFEWDMSEKENSPEKFALKLCSELGLGGEFVTTIAYSIRGQLSWHQKTYAFSENPLPTVEIAIRNTGDADQWCPLLETLTDAEMEKKIRDQDRNTRRMRRLANTAPAW

SEQ ID NO: 79693 - protein, 107 aa, Homo sapiens
  MOD_RES (1)..(1): Any amino acid
XYTYVKLRSDCSRPSLQWYTRAQSKMRRPSLLLKDILKCTLLVFGVWILYILKLNYTTEECDMKKMHYVDPDHVKTYTVPLKEAGPSLLKHSVSPGTSIFKPSLFSP

SEQ ID NO: 79694 - protein, 185 aa, Homo sapiens
MSLKMDNRDVAGKANRWFGVAPPKSGKMNMNILHQEELIAQKKREIEAKMEQKAKQNQVASPQPPHPGEITNAHNSSCISNKFANDGSFLQQFLKLQKAQTSTDAPTSAPSAPPSTPTPSAGKRSLLISRRTGLGLASLPGPVKSYSHAKQLPVAHRPSVFQSPDEDEEEDYEQWLEIKGRRWLR

SEQ ID NO: 79695 - protein, 287 aa, Homo sapiens
MAASSSEISEMKGVEESPKVPGEGPGHSEAETGPPQVLAGVPDQPEAPQPGPNTTAAPVDSGPKAGLAPETTETPAGASETAQATDLSLSPGGESKANCSPEDPCQETVSKPEVSKEATADQGSRLESAAPPEPAPEPAPQPDPRPDSQPTPKPALQPELPTQEDPTPEILSESVGEKQENGAVVPLQAGDGEEGPAPEPHSPPSKKSPPANGAPPRVLQQLVEEDRMRRAHSGHPGSPRGIPEQPAAGGRGRGPASGPGSQALKHRGAGGGSPHHHRLLRHQLRRV

SEQ ID NO: 79696 - protein, 141 aa, Homo sapiens
MVTAAMLLQCCPVLARGPTSLLGKVVKTHQFLFGIGRCPILATQGPNCSQIHLKATKAGGDSPSWAKGHCPFMLSELQDGKSKIVQKAAPEVQEDVKAFKTGRPCSVMVLELVAPATSQAPILPGCEIYSDAGNHASMIQG

SEQ ID NO: 79697 - protein, 128 aa, Homo sapiens
MLTQFAEGRLEDQLDKYDHWADRFEDLPLYFMTFHGQQSIRTVIDTMQHAVYVYDICHVIIDNLQFMMGHEQLSTDRIAAQDYIIGVFRKFATDNNCHVTLVIHPRKEDDDKELQTASIFGSAKVSGL

SEQ ID NO: 79698 - protein, 158 aa, Homo sapiens
MAEEQEFTQLCKLPAQPSHPHCVNNTYRSAQHSQALLRGLLALRDSGILFDVVLVVEGRHIEAHRILLAASCDYFRGMFAGGLKEMEQEEVLIHGVSYNAMCQILHFIYTSELELSLSNVQETLVAACQLQMLFTSPGLNGCHSLCRSQKLSISAVIS

SEQ ID NO: 79699 - protein, 169 aa, Homo sapiens
MANYIHVPPGSPEVPKLNVTVQDQEEHRCREGALSLLQHLRPHWDPQEVTLQLFTDGITNKLIGCYVGNTMEDVVLVRIYGNKTELLVDRDEEVKSFRVLQAHGCAPQLYCTFNNGLCYEFIQGEALDPKHVCNPAIFSLSSLTLCKGKTTRCFGLTGCRGSRLLLSFF

SEQ ID NO: 79700 - protein, 707 aa, Homo sapiens
MGSGARFPSGTLRVRWLLLLGLVGPVLGAARPGFQQTSHLSSYEIITPWRLTRERREAPRPYSKQVSYVIQAEGKEHIIHLERNKDLLPEDFVVYTYNKEGTLITDHPNIQNHCHYRGYVEGVHNSSIALSDCFGLRGLLHLENASYGIEPLQNSSHFEHIIYRMDDVYKEPLKCGVSNKDIEKETAKDEEEEPPSMTQLLRRRRAVLPQTRYVELFIVVDKERYDMMGRNQTAVREEMILLANYLDSMYIMLNIRIVLVGLEIWTNGNLINIVGGAGDVLGNFVQWREKFLITRRRHDSAQLVLKKGFGGTAGMAFVGTVCSRSHAGGINVFGQITVETFASIVAHELGHNLGMNHDDGRDCSCGAKSCIMNSGASGSRNFSSCSAEDFEKLTLNKGGNCLLNIPKPDEAYSAPSCGNKLVDAGEECDCGTPKECELDPCCEGSTCKLKSFAECAYGDCCKDCRFLPGGTLCRGKTSECDVPEYCNGSSQFCQPDVFIQNGYPCQNNKAYCYNGMCQYYDAQCQVIFGSKAKAAPKDCFIEVNSKGDRFGNCGFSGNEYKKCATGNALCGKLQCENVQEIPVFGIVPAIIQTPSRGTKCWGVDFQLGSDVPDPGMVNEGTKCGAGKICRNFQCVDASVLNYDCDVQKKCHGHGPIYANRFAVPTYAAKQPQQFPSRPPPPQPKVSSQGNLIPARPAPAPPLYSSLT

SEQ ID NO: 79701 - protein, 548 aa, Homo sapiens
MVSKLTSLQQELLSALLSSGVTKEVLVQALEELLPSPNFGVKLETLPLSPGSGAEPDTKPVFHTLTNGHAKGRLSGDEGSEDGDDYDTPPILKELQALNTEEAAEQRAEVDRMLSEDPWRAAKMIKGYMQQHNIPQREVVDVTGLNQSHLSQHLNKGTPMKTQKRAALYTWYVRKQREILRQFNQTVQSSGNMTDKSSQDQLLFLFPEFSQQSHGPGQSDDACSEPTNKKMRRNRFKWGPASQQILYQAYDRQKNPSKEEREALVEECNRAECLQRGVSPSKAHGLGSNLVTEVRVYNWFANRRKEEAFRQKLAMDAYSSNQTHSLNPLLSHGSPHHQPSSSPPNKLSGVRYSQQGNNEITSSSTISHHGNSAMVTSQSVLQQVSPASLDPGHNLLSPDGKMISVSGGGLPPVSTLTNIHSLSHHNPQQSQNLIMTPLSGVMAIAQSLNTSQAQSVPVINSVAGSLAALQPVQFSQQLHSPHQQPLMQQSPGSHMAQQPFMAAVTQLQNSHMSSTSLVMPTHHLLRAQQQGPCFPHHHPLGSCHGKAQ

SEQ ID NO: 79702 - protein, 368 aa, Homo sapiens
MRVMAPRTLILLLSGALALTETWACSHSMRYFYTAVSRPGRGEPRFIAVGYVDDTQFVQFDSDAASPRGEPRAPWVEQEGPEYWDRETQKYKRQAQTDRVNLRKLRGYYNQSEAGSHTLQRMYGCDLGPDGRLLRGYNQFAYDGKDYIALNEDLRSWTAADKAAQITQRKWEAAREAEQRRAYLEGTCVEWLRRYLENGKKTLQRAEHPKTHVTHHPVSDHEATLRCWALGFYPAEITLTWQRDGEDQTQDTELVETRPAGDGTFQKWAAVVVPSGEEQRYTCHVQHEGLPEPLTLRWGPSSQPTIPIVGIVAGLAVLAVLAVLGAVMAVVMCRRKSSAACVGLRCRISSHLSFVTSRASGISFCKGI

SEQ ID NO: 79703 - protein, 40 aa, Homo sapiens
MLTQFAEGRLEDQLDKYDHWADRFEDLPLYFMTFHGQQSI

SEQ ID NO: 79704 - protein, 67 aa, Homo sapiens
  MOD_RES (1)..(1): Any amino acid
XDPVPAARCSASRADFLPQSSVASQSSSEGKLATKGDSSERERREQNLPARALLKLTMEIKPISQLA

SEQ ID NO: 79705 - protein, 291 aa, Homo sapiens
MGSQEVLGHAARLASSGLLLQVLFRLITFVLNAFILRFLSKEIVGVVNVRLTLLYSTTLFLAREAFRRACLSGGTQRDWSQTLNLLWLTVPLGVFWSLFLGWIWLQLLEVPDPNVVPHYATGVVLFGLSAVVELLGEPFWVLAQAHMFVKLKVIAESLSVILKSVLTAFLVLWLPHWGLYIFSLAQAFINWKEAKLTWSFFKQSFLKQILTEGERYVMTFLNVLNFGDQGVYDIVNNLGSLVARLIFQPIEESFYIFFAKVLERGKDATLQKQEDVAVAAAVLESLLKLAL

SEQ ID NO: 79706 - protein, 22 aa, Homo sapiens
MEPNSLRTKVPAFLSDLGKATL

SEQ ID NO: 79707 - protein, 52 aa, Homo sapiens
MNAAVRAVVRMGIYVGAKVYFIYEGYQGMVDGGSNIAEADWESVSSILQVVL

SEQ ID NO: 79708 - protein, 568 aa, Homo sapiens [sequence omitted]

SEQ ID NO: 79709 - protein, 476 aa, Homo sapiens
MAKAAAIGIDLGTTYSCVGVFQHGKGERNVLIFDLGGGTFDVSILTIDDGIFEVKATAGDTHLGGEDFDNRLVNHFVEEFKRKHKKDISQNKRAVRRLRTACERAKRTLSSSTQASLEIDSLFEGIDFYTSITRARFEELCSDLFRSTLEPVEKALRDAKLDKAQIHDLVLVGGSTRIPKVQKLLQDFFNGRDLNKSINPDEAVAYGAAVQAAILMGDKSENVQDLLLLDVAPLSLGLETAGGVMTALIKRNSTIPTKQTQIFTTYSDNQPGVLIQVYEGERAMTKDNNLLGRFELSGIPPAPRGVPQIEVTFDIDANGILNVTATDKSTGKANKITITNDKGRLSKEEIERMVQEAEKYKAEDEVQRERVSAKNALESYAFNMKSAVEDEGLKGKISEADKKKVLDKCQEVISWLDANTLAEKDEFEHKRKELEQVCNPIISGLYQGAGGPGPGGFGAQGPKGGSGSGPTIEEVD

SEQ ID NO: 79710 - protein, 334 aa, Homo sapiens
MTMTLHTKASGMALLHQIQGNELEPLNRPQLKIPLERPLGEVYLDSSKPAVYNYPEGAAYEFNAAAAANAQVYGQTGLPYGPGSEAAAFGSNGLGGFPPLNSVSPSPLMLLHPPPQLSPFLQPHGQQVPYYLENEPSGYTVREAGPPAFYRNQGKCVEGMVEIFDMLLATSSRFRMMNLQGEEFVCLKSIILLNSGVYTFLSSTLKSLEEKDHIHRVLDKITDTLIHLMAKAGLTLQQQHQRLAQLLLILSHIRHMSNKGMEHLYSMKCKNVVPLYDLLLEMLDAHRLHAPTSRGGASVEETDQSHLATAGSTSSHSLQKYYITGEAEGFPATV

SEQ ID NO: 79711 - protein, 890 aa, Homo sapiens
MSAEASARPLRVGSRVEVIGKGHRGTVAYVGATLFATGKWVGVILDEAKGKNDGTVQGRKYFTCDEGHGIFVRQSQIQVFEDGADTTSPETPDSSASKVLKREGTDTTAKTSKLPTRPASTGVAGASSSLGPSGSASAGELSSSEPSTPAQTPLAAPIIPTPVLTSPGAVPPLPSPSKEEEGLRAQVRDLEEKLETLRLKRAEDKAKLKELEKHKIQLEQVQEWKSKMQEQQADLQRRLKEARKEAKEALEAKERYMEEMADTADAIEMATLDKEMAEERAESLQQEVEALKERVDELTTDLEILKAEIEEKGSDGAASSYQLKQLEEQNARLKDALVRMRDLSSSEKQEHVKLQKLMEKKNQELEVVRQQRERLQEELSQAESTIDELKEQVDAALGAEEMVEMLTDRNLNLEEKVRELRETVGDLEAMNEMNDELQENARETELELREQLDMAGARVREAQKRVEAAQETVADYQQTIKKYRQLTAHLQDVNRELTNQQEASVERQQQPPPETFDFKIKFAETKAHAKAIEMELRQMEVAQANRHMSLLTAFMPDSFLRPGGDHDCVLVLLLMPRLICKAELIRKQAQEKFELSENCSERPGLRGAAGEQLSFAAGLVYSLSLLQATLHRYEHALSQCSVDVYKKVGSLYPEMSAHERSLDFLIELLHKDQLDETVNVEPLTKAIKYYQHLYSIHLAEQPEDCTMQLADHIKFTQSALDCMSVEVGRLRAFLQGGQEATDIALLLRDLETSCSDIRQFCKKIRRRMPGTDAPGIPAALAFGPQVSDTLLDCRKHLTWVVAVLQEVAAAAAQLIAPLAENEGLLVAALEELAFKASEQVGLDGWVEGVGRVSDQCGAFTSALGSCRSMGPPPAAPMSVCASHATSSSVP

SEQ ID NO: 79712 - protein, 193 aa, Homo sapiens
MADTIFGSGNDQWVCPNDRQLALRAKLQTGWSVHTYQTEKQRRKQHLSPAEVEAILQVIQRAERLDVLEQQRIGRLVERLETMRRNVMGNGLSQCLLCGEVLGFLGSSSVFCKDCRKKVCTKCGIEASPGQKRPLWLCKICSEQREVWKRSGAWFYKGLPKYILPLKTPGRADDPHFRPLPTEPAEREPRSSE

SEQ ID NO: 79713 - protein, 147 aa, Homo sapiens
MELALRRSPVPRWLLLLPLLLGLNAGAVIDWPTEEGKEVWDYVTVRKDAYMFWWLYYATNSCKNFSELPLVMWLQGGPGGSSTGFGNFEEIGPFSEGPSSATLRGLPWVIPGSPLLIRCSPGDLTCTACLFSKTKVWQRCLRLQSKY

SEQ ID NO: 79714 - protein, 84 aa, Homo sapiens
  MOD_RES (1)..(1): Any amino acid
XKGVVNTAVSAAVQAVRGRGRGTLTRGAFVGATAAPGYIAPGYGTPYGYSTAAPAYEATLKEYGSHHLGGKKPMEIGTWGTQES

SEQ ID NO: 79715 - protein, 267 aa, Homo sapiens
MMRGYIKKVLKNTSYHVNQYLFIQHGWSGSGDQSVLYSCNLMRMVTRTKKIFVGGLSANTVVEDVKQYFEQFGKVEDAMLMFDKTTNRHRGFGFVTFENEDVVEKVCEIHFHEINNKMVECKKAQPKEVMFPPGTRGRARGLPYTMDAFMLGMGMLGYPNFVATYGRGYPGFAPSYGYQFPGFPAAAYGPVAAAAVAAARGSGSNPARPGGFPGANSPGPVADLYGPASQDSGVGNYISAASPQPGSGFGHGIAGPLIATAFTNGYH

SEQ ID NO: 79716 - protein, 115 aa, Homo sapiens
MSHRARPISGLIEFSVGKFRYFELNRPFPEEAILHDISSNVTFLIFQIHSQYQNTTVSFSPTLLSNSSETGTASGLVFILRPEQSTCTWYLGTSGIQPVQNMAILLSYSERDPVP

SEQ ID NO: 79717 - protein, 456 aa, Homo sapiens
MAETVWSTDTGEAVYRSRDPVRNLRLRVHLQRITSSNFLHYQPAAELGKDLIDLATFRPQPTASGHRPEEDEEEEIVIGWQEKLFSQFEVDLYQNETACQSPLDYQYRQEILKLENSGGKKNRRIFTYTDSDRYTNLEEHCQRMTTAASEVPSFLVERMANVRRRRQDRRGMEGGILKSRIVTWEPSEEFVRNNHVINTPLQTMHIMADLGPYKKLGYKKYEHVLCTLKVDSNGVITVKPDFTGLKGPYRIETEGEKQELWKYTIDNVSPHAQPEEEERERRVFKDLYGRHKEYLSSLVGTDFEMTVPGALRLFVNGEVVSAQGYEYDNLYVHFFVELPTAHWSSPAFQQLSGVTQTCTTKSLAMDKVAHFSYPFTFEAFFLHEDESSDALPEWPVLYCEVLSLDFWQRYRVEGYGAVVLPATPGPSWNRAPFRKGCGVCWTVWKGSASRVPFTMC

SEQ ID NO: 79718 - protein, 72 aa, Homo sapiens
  MOD_RES (1)..(1): Any amino acid
XTSWAKGRMTTRTEEHFVTALTFRSSREGQPGERWGPAESRALQARTGASRVHAAGRRVSPSPGTWLEEIKL

SEQ ID NO: 79719 - protein, 197 aa, Homo sapiens
MDGIVPDIAVGTKRVTPQSLFILFGVYGDVQRVKILFNKKENALVQMADGNQAQLAMSHLNGHKLHGKPIRITLSKHQNVQLPREGQEDQGLTKDYGNSPLHRFKKPGSKNFQNIFPPSATLHLSNIPPSVSEEDLKVLFSSNGGVVKGFKFFQKDRKMALIQMGSVEEAVQALIDLHNHDLGENHHLRVSFSKSTI

SEQ ID NO: 79720 - protein, 40 aa, Homo sapiens
MPLGLGRRKKAPPLVENEEAEPGRGGLGVGEPGPLGGGGS

SEQ ID NO: 79721 - protein, 68 aa, Homo sapiens
MASKGAGMSFSRKSYRLTSDAEKSRVTGIVQEKLLNDYLNRIFSSSEHAPPAATSRQPPCELRGKDGI

SEQ ID NO: 79722 - protein, 278 aa, Homo sapiens
MGTFCSVIKFENLQELKRLCHWGPIIALGVIAICSTMAMIDSVLWYWPLHTTGGSVNFIMLINWTVMILYNYFNAMFVGPGFVPLGWKPEISQDTMYLQYCKVCQAYKAPRSHHCRKCNRCVMKMDHHCPWINNCCGYQNHASFTLFLLLAPLGCIHAAFIFVMTMYTQLYHRLSFGWNTVKIDMSAARRDPLPIVPFGLAAFATTLFALGLALGTTIAVGMLFFIQTESHSVTQAREQWRELSSLQPPPSGFKQFSASACQVAGITDENNSQKQNFY

SEQ ID NO: 79723 - protein, 315 aa, Homo sapiens
MAASPHTLSSRLLTGCVGGSVWYLERRTIQDSPHKFLHLLRNVNKQWITFQHFSFLKRMYVTQLNRSHNQQVRPKPEPVASPFLEKTSSGQAKAEIYEMRPLSPPSLSLSRKPNEKELIELEPDSVIEDSIDVGKETKEEKRWKEMKLQVYDLPGILARLSKIKLTALVVSTTAAGFALAPGPFDWPCFLLTSVGTGLASCAANSINQFFEVPFDSNMNRTKNRPLVRGQISPLLAVSFATCCAVPGVAILTLGVNPLTGALGLFNIFLYTCCYTPLKRISIANTWVGAVVGAIPPVMGWTAATGSLDAVSLDLG

SEQ ID NO: 79724 - protein, 98 aa, Homo sapiens
MALWMRLLPLLALLALWGPDPAAAFVNQHLCGSHLVEALYLVCGERGFFYTPKTRREAEDLQGSLQPLALEGSLQKRGIVEQCCTSICSLYQLENYCN

SEQ ID NO: 79725 - protein, 495 aa, Homo sapiens
MVKQLENGEINIEELKKNLEYTASLLEAVYIDETRQILDTEDELQELRSDAVPSEVRDWLASTFTQQARAKGRRAEEKPKFRSIVHAVQAGIFVERMFRRTYTSVGPTYSTAVLNCLKNLDLWCFDVFSLNQAADDHALRTIVFELLTRHNLISRFKIPTVFLMSFLDALETGYGKYKNPYHNQIHAADVTQTVHCFLLRTGMVHCLSEIELLAIIFAAAIHDYEHTGTTNSFHIQTKSECAIVYNDRSVLENHHISSVFRLMQDDEMNIFINLTKDEFVELRALVIEMVLATDMSCHFQQVKTMKTALQQLERIDKPKALSLLLHAADISHPTKQWLVHSRWTKALMEEFFRQGDKEAELGLPFSPLCDRTSTLVAQSQIGFIDFIVEPTFSVLTDVAEKSVQPLADEDSKSKNQPSFQWRQPSLDVEVGDPNPDVVSFRSTWVKRIQENKQKWKERAASGITNQMSIDELSPCEEEAPPSPAEDEHNQNGNLD

SEQ ID NO: 79726 - protein, 554 aa, Homo sapiens
MPKQVEVRMHDSHLGSEEPKHRHLGLRLCDKLGKNLLLTLTVFGVILGAVCGGLLRLASPIHPDVVMLIAFPGDILMRMLKMLILPLIISSLITGLSGLDAKASGRLGTRAMVYYMSTTIIAAVLGVILVLAIHPGNPKLKKQLGPGKKNDEVSSLDAFLDLIRNLFPENLVQACFQQIQTVTKKVLVAPPPDEEANATSAVVSLLNETVTEVPEETKMVIKKGLEFKDGMNVLGLIGFFIAFGIAMGKMGDQAKLMVDFFNILNEIVMKLVIMIMWYSPLGIACLICGKIIAIKDLEVVARQLGMYMVTVIIGLIIHGGIFLPLIYFVVTRKNPFSFFAGIFQAWITALGTASSAGTLPVTFRCLEENLGIDKRVTRFVLPVGATINMDGTALYEAVAAIFIAQMNGVVLDGGQIVTVSLTATLASVGAASIPSAGLVTMLLILTAVGLPTEDISLLVAVDWLLDRMRTSVNVVGDSFGAGIVYHLSKSELDTIDSQHRVHEDIEMTKTQSIYDDMKNHRESNSNQCVYAAHNSVIVDECKVHFPFMDIETCI

SEQ ID NO: 79727 - protein, 136 aa, Homo sapiens
MEMKKKINLELRNRSPEEEDNEAPDSEEEDDEDGDEDDEEEEENEAGPPEGYEEEEEEEEEEDEDEDEDEDEAGSELGEGEEEVGLSYLMKEEIQDEEDDDDYVEEGEEEEEEEEGGLRGEKRKRDAEDDGEEEDD

SEQ ID NO: 79728 - protein, 54 aa, Homo sapiens
MSSGKSARYNRFSGGPSNLPTPDVTTGVSSVLPLDQNGNDLRTRLFSRHHHHKS

SEQ ID NO: 79729 - protein, 193 aa, Homo sapiens
  MOD_RES (1)..(1): Any amino acid
XARRPRLGLSRRRPRPAGGPSGGRPWFLLGGDERERLWAELLRTVSPELILDHEVPSLPAFPGQEPRCGPEPTEVFTVGPKTFSWTPFPPDLWGPGRSYRLLHGAGGHLESPARSLPQRPAPDPCRAPRVEQQPSVEGAAALRSCPMCQKEFAPRSKNSSGMRRHRSPKLAANNNNNKRKGRARWLTPVIPAL

SEQ ID NO: 79730 - protein, 25 aa, Homo sapiens
MNLDSLSLALSQISYLVDNLTKKNY

SEQ ID NO: 79731 - protein, 63 aa, Homo sapiens
MDHFFIKRKRNSEVKYTEACSSSSVESGIVNSDNIEKNTDSNLQTSTSFEPHFKKKKKKNLKH

SEQ ID NO: 79732 - protein, 550 aa, Homo sapiens
MDPPDLLSVELSTSRPPQHLGGVKKPTYDPVSEDQDPLSSDFKRLGLRKPGLPRGLWLAKPSARVPGTKASRGSGAEVTLIDFGEEPVVPALRPCAPSLAQLAMDACSLLDETPPQSPTRALPRPLHPTPVVDWDARPLPPPPAYDDVAQDEDDFEICSINSTLVGAGVPAGPSQGQTNYAFVPEQARPPPPLEDNLFLPPQGGGKPPSSAQTAEIFQALQQECMRQLQAPAGSPAPSPSPGGDDKPQVPPRVPIPPRPTRPHVQLSPAPPGEEETSQWPGPASPPRVPPREPLSPQGSRTPSPLVPPGSSPLPPRLSSSPGKTMPTTQSFASDPKYATPQVIQAPGPRAGPCILPIVRDGKKVSSTHYYLLPERPSYLERYQRFLREAQSPEEPTPLPVPLLLPPPSTPAPAAPTATVRPMPQAALDPKANFSTNNSNPGARPPPPRATARLPQRGCPGDGPEAGRPADKIQMLQAMVHGVTTEECQAALQCHGWSVQRAAQYLKVEQLFGLGLRPRGECHKVLEMFDWNLEQAGCHLLGSWGPAHHKR

SEQ ID NO: 79733 - protein, 69 aa, Homo sapiens
MVDTESPLCPLSPLEAGDLESPLSEEFLQEMGNIQEISQSIGEDSSGSFGFTEYQYLGSCPGSDGSVIT

SEQ ID NO: 79734 - protein, 174 aa, Homo sapiens
MFNPQLMIQTPKEEGANVLTTEALLQHLDSALQASRVHVYMYNRQWKLEHLCYKSGELITETGYMDQIIEYLYPCLIITPLDCFWEGAKLQSGTAYLLGKPPLRWTNFDPLEFLEELKKINYQVDSWEEMLNKAEVGHGYMDRPCLNPADPDCPATAPNKNSTKPLDMALVLNG

SEQ ID NO: 79735 - protein, 65 aa, Homo sapiens
MAAPGPALCLFDVDGTLTAPRQKITKEMDDFLQKLRQKIKIGVVGGSDFEKVQEQLGNDVHFWSY

SEQ ID NO: 79736 - protein, 147 aa, Homo sapiens
MDSLDHMLTDPLELGPCGDGHGTRIMEDCLLGGTRVSLPEDLLEDPEIFFDVVSLSTWQEVLSDSQREHLQQFLPQFPEDSAEQQNELILALFSGENFRFGNPLHIAQKLFRDGHFNPEVVKYRQLCFKSQYKRYLNSQQQYFHRLL

SEQ ID NO: 79737 - protein, 247 aa, Homo sapiens
MASFPPRVNEKEIVRLRTIGELLAPAAPFDKKCGRENWTVAFAPDGSYFAWSQGHRTVKLVPWSQCLQNFLLHGTKNVTNSSSLRLPRQNSDGGQKNKPREHIIDCGDIVWSLAFGSSVPEKQSRCVNIEWHRFRFGQDQLLLATGLNNGRIKIWDVYTGKLLLNLVDHTEVVRDLTFAPDGSLILVSASRDKTLRVWDLKDDGNMMKVLRGHQNWVYSCAFSPDSSMLCSVGASKAVRVKVLVHSL

SEQ ID NO: 79738 - protein, 145 aa, Homo sapiens
MEFPDLGAHCSEPSCQRLDFLPLKCDACSGIFCADHVAYAQHHCGSAYQKDIQVPVCPLCNVPVPVARGEPPDRAVGEHIDRDCRSDPAQQKRKIFTNKCERAGCRQREMMKLTCERCSRNFCIKHRHPLDHDCSGEGHPTSRAG

SEQ ID NO: 79739 - protein, 272 aa, Homo sapiens
MDEKTKKAEEMALSLTRAVAGGDEQVAMKCAIWLAEQRVPLSVQLKPEVSPTQDIRLWVSVEDAQMHTVTIWLTVRPDMTVASLKDMVFLDYGFPPVLQQWVIGQRLARDQETLHSHGVRQNGDSAYLYLLSARNTSLNPQELQRERQLRMLEDLGFKDLTLQPRGPLEPGPPKPGVPQEPGRGQPDAVPEPPPVGWQCPGCTFINKPTRPGCEMCCRARPEAYQVPASYQPDEEERARLAGEEEALRQYQQGVPAGHHPQQPGGGGLLPLH

SEQ ID NO: 79740 - protein, 127 aa, Homo sapiens
MPACCSCSDVFQYETNKVTRIQSMNYGTIKWFFHVIIFSYVCFALVSDKLYQRKEPVISSVHTKVKGIAEVKEEIVENGVKKLVHSVFDTADYTFPLQLFRRTATKPARSAEIQKDRELSTKEHQPF

SEQ ID NO: 79741 - protein, 93 aa, Homo sapiens
EFYQRLSTETLFFIFYYLEGTKAQYLAAKALKKQSWRFHTKYMMWFQRHEEPKTITDEFEQGTYIYFDYEKWGQRKKEGFTFEYRYLEDRDLQ

SEQ ID NO: 79742 - protein, 92 aa, Homo sapiens
MNHTVQTFFSPVNSGQPPNYEMLKEEHEVAVLGAPHNPAPPTSTVIHIRSETSVPDHVVWSLFNTLFMNPCCLGFIAFAYSVKVRTGRWLAT

SEQ ID NO: 79743 - protein, 626 aa, Homo sapiens
MGVWLNKDDYIRDLKRIILCFLIVYMAILVGTDQDFYSLLGVSKTASSREIRQAFKKLALKLHPDKNPNNPNAHGDFLKINRAYEVLKDEDLRKKYDKYGEKGLEDNQGGQYESWNYYRYDFGIYDDDPEIITLERREFDAAVNSGELWFVNFYSPGCSHCHDLAPTWRDFAKEVDGLLRIGAVNCGDDRMLCRMKGVNSYPSLFIFRSGMAPVKYHGDRSKESLVSFAMQHVRSTVTELWTGNFVNSIQTAFAAGIGWLITFCSKGGGKKILYDILAFAKESVNSHVTTLGPQNFPANDKEPWLVDFFAPWCPPCRALLPELRRASNLLYGQLKFGTLDCTVHEGLCNMYNIQAYPTTVVFNQSNIHEYEGHHSAEQILEFIEDLMNPSVVSLTPTTFNELVTQRKHNEVWMVDFYSPWCHPCQVLMPEWKRMARTLTGLINVGSIDCQQYHSFCAQENVQRYPEIRFFPPKSNKAYHYHSYNGWNRDAYSLRIWGLGFLPQVSTDLTPQTFSEKVLQGKNHWVIDFYAPWCGPCQNFAPEFELLARMIKGKVKAGKVDCQAYAQTCQKAGIRAYPTVKFYFYERAKRNFQEEQINTRDAKAIAALISEKLETLRNQGKRNKDEL

SEQ ID NO: 79744 - protein, 375 aa, Homo sapiens
MEPWPLLLLFSLCSAGLVLGSEHETRLVAKLFKDYSSVVRPVEDHRQVVEVTVGLQLIQLINVDEVNQIVTTNVRLKQNCSMKLGTWTYDGSVVAINPESDQPDLSNFMESGEWVIKESRGWKHSVTYSCCPDTPYLDITYHFVMQRLPLYFIVNVIIPCLLFSFLTGLVFYLPTDSGEKMTLSISVLLSLTVFLLVIVELIPSTSSAVPLIGKYMLFTMVFVIASIIITVIVINTHHRSPSTHVMPNWVRKVFIDTIPNIMFFSTMKRPSREKQDKKIFTEDIDISDISGKPGPPPMGFHSPLIKHPEVKSAIEGIKYIAETMKSDQESNNAAAEWKYVAMVMDHILLGVFMLVCIIGTLAVFAGRLIELNQQG

SEQ ID NO: 79745 - protein, 207 aa, Homo sapiens
MQSNKTFNLEKQNHTPRKHHQHHHQQQHHQQQQQQPPPPPIPANGQQASSQNEGLTIDLKNFRKPGEKTFTQRSRLFVGNLPPDITEEEMRKLFEKYGKAGEVFIHKDKGFGFIRLETRTLAEIAKVELDNMPLRGKQLRVRFACHSASLTVRNLPQYVSNELLEEAFSVFGQVERAVVIVDDRGRPSGKGIVEFSGKPAARKALDR

SEQ ID NO: 79746 - protein, 108 aa, Homo sapiens
MGVHVETISPGDWRTFPKRSQTCVMHYTGMLEDGKKFDSSRDRNKPFKFMLGKQEVIRGWEEGVVQMSVGQRAKLTISPDYAYGATGHPGIIPPHATLVFDVELLKLE

SEQ ID NO: 79747 - protein, 118 aa, Homo sapiens
MSYEQLMQLYSARQRRRLNRGLRRKQHSLLKRLRKAKKEAPPMEKPEVVKTHLRDMIILPEMVGSMVGVYNGKTFNQVEIKPEMIGHYLGEFSITYKPVKHGRPGIGATHSSRFIPLK

SEQ ID NO: 79748 - protein, 128 aa, Homo sapiens
MAAKDQLEVQVMAAQEMELAGKDPVSHEHEERKPVTETKEGDVTDEHGERGSFAETDEHTGVDTKELEDIAGMFYELFVVYENCFQPYNPYSRLYELVDDKTVLNAFFSYIAFNVICLIIFLTYFFNC

SEQ ID NO: 79749 - protein, 44 aa, Homo sapiens
MPLKTRTALSDDPDSSTSTLGNMLELPGTSSSSTSQELPFNGRR

SEQ ID NO: 79750 - protein, 126 aa, Homo sapiens
MFPPSGQWDQTRGVVVVSAWETDHLCFCNSSGSTGLIPPSHFQARPLSTLPRMAPTWLSDIPLVQPPGHQDVSERRLDTQRPQVTMWERDVSSDRQEPGRRGRSWGLEGSQALSQQAEVIVRQLQE

SEQ ID NO: 79751 - protein, 149 aa, Homo sapiens
MSNFYEERTTMIAARDLQEFVPFGRDHCKHHPNALNLQLRQLQPASELWSSDGAAGLVGSLQEVTIHEKQKESWQLRKGVSEIGEDVDYDEELYVAGNMVIWSKGSKSQALAVYKAFTVDSPVQQALWCDFIISQDKSEKAYSCKCLAH

SEQ ID NO: 79752 - protein, 539 aa, Homo sapiens
MDGYVIGPARRIVTEVAVGVKRGSDELLSGSVLSSPNSNMSSMVVTANGNDSKKFKGEDKMDGAPSRVLHIRKLPGEVTETEVIALGLPFGKVTNILMLKGKNQAFLELATEEAAITMVNYYSAVTPHLRNQPIYIQYSNHKELKTDNTLNQRAQAVLQAVTAVQTANTPLSGTTVSESAVTPAQSPVLRIIIDNMYYPVTLDVLHQIFSKFGAVLKIITFTKNNQFQALLQYGDPVNAQQAKLALDGQNIYNACCTLRIDFSKLVNLNVKYNNDKSRDYTRPDLPSGDGQPALDPAIAAAFAKETSLLAVPGALSPLAIPNAAAAAAAAAAGRVGMPGVSAGGNTVLLVSNLNEEMVTPQSLFTLFGVYGDVQRVKILYNKKDSALIQMADGNQSQLAMNHLNGQKMYGKIIRVTLSKHQTVQLPREGLDDQGLTKDFGNSPLHRFKKPGSKNFQNIFPPSATLHLSNIPPSVAEEDLRTLFANTGGTVKAFKFFQDHKMALLQMATVEEAIQALIDLHNYNLGENHHLRVSFSKSTI

SEQ ID NO: 79753 - protein, 61 aa, Homo sapiens
MAAGLARLLLLLGLSAGGPAPAGAAKMKVVEEPNAFGVNNPFLPQASRLQAKRDPSPVSGE

SEQ ID NO: 79754 - protein, 331 aa, Homo sapiens
MAPKPKPWVQTEGPEKKKGRQAGREEDPFRSTAEALKAIPAEKRIIRVDPTCPLSSNPGTQVYEDYNCTLNQTNIENNNNKFYIIQLLQDSNRFFTCWNRWGRVGEVGQSKINHFTRLEDAKKDFEKKFREKTKNNWAERDHFVSHPGKYTLIEVQAEDEAQEAVVKVDRGPVRTVTKRVQPCSLDPATQKLITNIFSKEMFKNTMALMDLDVKKMPLGKLSKQQIARGFEALEALEEALKGPTDGGQSLEELSSHFYTVIPHNFGHSQPPPINSPELLQAKKDMLLVLADIELAQALQAVSEQEKTVEEVPHPLDRDYQLLKCQLQLLDS

SEQ ID NO: 79755 - protein, 126 aa, Homo sapiens
MPRSPTSSEDEMAQSFSDYSVGSESDSSKEETIYDTIRATAEKPGGARTEESQGNTLVIRVVIHDLQQTKCIRFNPDATVWVAKQRILCTLTQSLKDVLNYGLFQPASNGRDGRSFPGVSIQEAGV

SEQ ID NO: 79756 - protein, 155 aa, Homo sapiens
MGSTVPRSASVLLLLLLLRRAEQPCGAELTFELPDNAKQCFHEEVEQGVKFSLDYQVITGGHYDVDCYVEDPQGNTIYRETKKQYDSFTYRAEVKGVYQFCFSNEFSTFSHKTVYFDFQVGDEPPILPDMGNRVTALTQGPSASPTPTPPLRVPV

SEQ ID NO: 79757 - protein, 1397 aa, Homo sapiens
MLETVRIRKAGYAVRRPFQDFYKRYKVLMRNLALPEDVRGKCTSLLQLYDASNSEWQLGKTKVFLRESLEQKLEKRREEEVSHAAMVIRAHVLGFLARKQYRKVLYCVVIIQKNYRAFLLRRRFLHLKKAAIVFQKQLRGQIARRVYRQLLAEKREQEEKKKQEEEEKKKREEEERERERERREAELRAQQEEETRKQQELEALQKSQKEAELTRELEKQKENKQVEEILRLEKEIEDLQRMKEQQELSLTEASLQKLQERRDQELRRLEEEACRAAQEFLESLNFDEIDECVRNIERSLSVGSEFSSELAESACEEKPNFNFSQPYPEEEVDEGFEADDDAFKDSPNPSEHGHSDQRTSGIRTSDDSSEEDPYMNDTVVPTSPSADSTVLLAPSVQDSGSLHNSSSGESTYCMPQNAGDLPSPDGDYDYDQDDYEDGAITSGSSVTFSNSYGSQWSPDYRCSVGTYNSSGAYRFSSEGAQSSFEDSEEDFDSRFDTDDELSYRRDSVYSCVTLPYFHSFLYMKGGLMNSWKRRWCVLKDETFLWFRSKQEALKQGWLHKKGGGSSTLSRRNWKKRWFVLRQSKLMYFENDSEEKLKGTVEVRTAKEIIDNTTKENGIDIIMADRTFHLIAESPEDASQWFSVLSQVHASTDQEIQEMHDEQANPQNAVGTLDVGLIDSVCASDSPDRPNSFVIITANRVLHCNADTPEEMHHWITLLQRSKGDTRVEGQEFIVRGWLHKEVKNSPKMSSLKLKKRWFVLTHNSLDYYKSSEKNALKLGTLVLNSLCSVVPPDEKIFKETGYWNVTVYGRKHCYRLYTKLLNEATRWSSAIQNVTDTKAPIDTPTQQLIQDIKENCLNSDVVEQIYKRNPILRYTHHPLHSPLLPLPYGDINLNLLKDKGYTTLQDEAIKIFNSLQQLESMSDPIPIIQGILQTGHDLRPLRDELYCQLIKQTNKVPHPGSVGNLYSWQILTCLSCTFLPSRGILKYLKFHLKRIREQFPGSEMEKYALFTYESLKKTKCREFVPSRDEIEALIHRQEMTSTVYCHGGGSCKITINSHTTAGEVVEKLIRGLAMEDSRNMFALFEYNGHVDKAIESRTVVADVLAKFEKLAATSEVGDLPWKFYFKLYCFLDTDNVPKDSVEFAFMFEQAHEAVIHGHHPAPEENLQVLAALRLQYLQGDYTLHAAIPPLEEVYSLQRLKARISQSTKTFTPCERLEKRRTSFLEGTLRRSFRTGSVVRQKVEEEQMLDMWIKEEVSSARASIIDKWRKFQGMNQEQAMAKYMALIKEWPGYGSTLFDVECKEGGFPQELWLGVSADAVSVYKRGEGRPLEVFQYEHILSFGAPLANTYKIVVDERELLFETSEVVDVAKLMKAYISMIVKKRYSTTRSASSQGSSR

SEQ ID NO: 79758 - protein, 114 aa, Homo sapiens
TVTEKHKMNVPETMNEVLDMSDDEVRKANAPEMLSDGEYISDVEEGNRCTWYKIPKVQEFTVKSEDAMTGDTDKYLGPQDLKELGDDSLPAEGYMGFSLGARSARYFVVAVFHS

SEQ ID NO: 79759 - protein, 73 aa, Homo sapiens
MMCQSEARQGPELRAAKWLHFPQLALRRRLGQLSCMSRPALKLRSWPLTVLYYLLPFGALRPLSRVGWRPVSR

SEQ ID NO: 79760 - protein, 92 aa, Homo sapiens
MMFVGFLGCYGAIQESQCLLGTFFTCLVILFACEVAAGIWGFVNKDQIAKDVKQFYDQALQQAVVDDDANNAKAVVKTFHETLDCCGSSTLT

SEQ ID NO: 79761 - protein, 143 aa, Homo sapiens
TPPRWLAERLGLFEELWAAQVKRLASMAQKEPRTIKISLPGGQKIDAVAWNTTPYQLARQISSTLADTAVAAQVNGEPYDLERPLETDSDLRFLTFDSPEGKADNPGLRAACFGADLPGTYSCCSTLPEARGFTGSASPVVQG

SEQ ID NO: 79762 - protein, 362 aa, Homo sapiens
MQLRNPELHLGCALALRFLALVSWDIPGARALDNGLARTPTMGWLHWERFMCNLDCQEEPDSCISEKLFMEMAELMVSEGWKDAGYEYLCIDDCWMAPQRDSEGRLQADPQRFPHGIRQLANYVHSKGLKLGIYADVGNKTCAGFPGSFGYYDIDAQTFADWGVDLLKFDGCYCDSLENLADGYKHMSLALNRTGRSIVYSCEWPLYMWPFQKPNYTEIRQYCNHWRNFADIDDSWKSIKSILDWTSFNQERIVDVAGPGGWNDPDMLVIGNFGLSWNQQVTQMALWAIMAAPLFMSNDLRHISPQAKALLQDKDVIAINQDPLGKQGYQLRQVNKSIYFKMALYTQYQLCLGPKSIFFPCS

SEQ ID NO: 79763 - protein, 473 aa, Homo sapiens
  MOD_RES (1)..(1): Any amino acid
XLIEQGALLQAHRKLMDLECSRDGLMYEQYRMDSGNTRDMTLIHGYFGSTQGLSDELAKQLWMVLQRSLVTVRRDPTLLVSVVRIIEREEKIDRRILDRKKQTGFVPPGRPKNWKEKMFTILERTVTTRIEGTQADTRESDKMWLVRHLEIIRKYVLDDLIVAKNLMVQCFPPHYEIFKNLLNMYHQALSTRMQDLASEDLEANEIVSLLTWVLNTYTSTEMMRNVELAPEVDVGTLEPLLSPHVVSELLDTYMSTLTSNIIAWLRKALETDKKDWVKETEPEADQDGYYQTTLPAIVFQMFEQNLQVAAQISEDLKTKVLVLCLQQMNSFLSRYKDEAQLYKEEHLRNRQHPHCYVQYMIAIINNCQTFKESIVSLKRKYLKNEVEEGVSPSQPSMDGILDAIAKEGCSGLLEEVFLDLEQHLNELMTKKWLLGSNAVDIICVTVEDYFNDFAKIKKPYKKVRRWDLVPSSP

SEQ ID NO: 79764 - protein, 84 aa, Homo sapiens
MALVGMASKPLHVRRLQKALRDWVTNPGLFNQPLTSLPVSSIPIYKLPEGSPTWLGISCSSYERSSNAREPHLKIPKCAATTCV

SEQ ID NO: 79765 - protein, 69 aa, Homo sapiens
MIFPVARYALRWLRRPEDRAFSRAAMEMALRGVRKVLCVAEKNDAAKGIADLLSNGRMRRAELQPSCPL

SEQ ID NO: 79766 - protein, 783 aa, Homo sapiens
MRNKRVLKTKKRRSGRGGQDPGLHPHRSEATAGRSPPTPTVTLGPDCPPPPPPPPPNNNNNNNSKHTGHKSACVPNMTERRRDELSEEINNLREKVMKQSEENNNLQSQVQKLTEENTTLREQVEPTPEDEDDDIELRGAAAAAAPPPPIEEECPEDLPEKFDGNPDMLAPFMAQCQIFMEKSTRDFSVDRVRVCFVTSMMTGRAARWASAKLERSHYLMHNYPAFMMEMKHVFEDPQRREVAKRKIRRLRQGMGSVIDYSNAFQMIAQDLDWNEPALIDQYHEGLSDHIQEELSHLEVAKSLSALIGQCIHIERRLARAAAARKPRSPPRALVLPHIASHHQVDPTEPVGGARMRLTQEEKERRRKLNLCLYCGTGGHYADNCPAKASKSSPGKLPGPAVEGPSATGPEIIRSPQDDASSPHLQVMLQIHLPGRHTLFVRAMIDSGASGNFIDHEYVAQNGIPLRIKDWPILVEAIDGRPIASGPVVHETHDLIVDLGDHREVLSFDVTQSPFFPVVLGVRWLSTHDPNITWSTRSIVFDSEYCRYHCRMYSPIPPSLPPPAPQPPLYYPVDGYRVYQPVRYYYVQNVYTPVDEHVYPDHRLVDPHIEMIPGAHSIPSGHVYSLSEPEMAALRDFVARNVKDGLITPTIAPNGAQVLQVKRGWKLQVSYDCRAPNNFTIQNQYPRLSIPNLEDQAHLATYTEFVPQIPGYQTYPTYAAYPTYPVGFAWYPVGRDGQGRSLYVPVMITWNPHWYRQPPVPQYPPPQPPPPPPPPPPPPSYSTL

SEQ ID NO: 79767 - protein, 258 aa, Homo sapiens
  MOD_RES (1)..(1): Any amino acid
XSPLGSFARRQRSSAGGGGEPGEGAYSQPGYHVRDRDLGKIHKAASAGNVAKVQQILLLRKNGLNDRDKMNRTALHLACANGHPEVVTLLVDRKCQLNVCDNENRTALMKAVQCQEEKCATILLEHGADPNLADVHGNTALHYAVYNEDISVATKLLLYDANIEAKNKDDLTPLLLAVSGKKQQMVEFLIKKKANVNAVDKLESSHQLISEYKEERIPKHSSQNSNSGFLANRVLMIHGLPQMTKTSILILRMSQNQA

SEQ ID NO: 79768 - protein, 317 aa, Homo sapiens
MCYLSEWPKSFLKAFIRHYSHHQVDFLIENDAEKDYLYDVLRMYHQTMDVAVLVGDLKLVINEPSRLPLFDAIRPLIPLKHQVEYDQLTPRRSRKLKEVRLDRLHPEGLGLSVRGGLEFGCGLFISHLIKGGQADSVGLQVGDEIVRINGYSISSCTHEEVINLIRTKKTVSIKVRHIGLIPVKSSPDEPLTWQYVDQFVSESGGVRGSLGSPGNRENKEKKVFISLVGSRGLGCSISSGPIQKPGIFISHVKPGSLSAEVGLEIGDQIVEVNGVDFSNLDHKEAVNVLKSSRSLTISIVAAAGRELFMTDRERLAE

SEQ ID NO: 79769 - protein, 75 aa, Homo sapiens
MNQRKLDHEVKTLQVQAAQFAKQTGQWIGMVENFNQALKEIGDVENWARSIELDMRTIATALEYVYKGQLQSAPS

SEQ ID NO: 79770 - protein, 52 aa, Homo sapiens
PDSPSSSCSMACSLPSGADSADGQNPAPGTGIPVAPVNCPGLSLASGQKLLW

SEQ ID NO: 79771 - protein, 483 aa, Homo sapiens
MLFPISMSATEFLLASVIFCLVFWVIRASRPQVPKGLKNPPGPWGWPLIGHMLTLGKNPHLALSRMSQQYGDVLQIRIGSTPVVVLSGLDTIRQALVRQGDDFKGRPDLYTFTLISNGQSMSFSPDSGPVWAARRRLAQNGLKSFSIASDPASSTSCYLEEHVSKEAEVLISTLQELMAGPGHFNPYRYVVVSVTNVICAICFGRRYDHNHQELLSLVNLNNNFGEVVGSGNPADFIPILRYLPNPSLNAFKDLNEKFYSFMQKMVKEHYKTFEKGHIRDITDSLIEHCQEKQLDENANVQLSDEKIINIVLDLFGAGFDTVTTAISWSLMYLVMNPRVQRKIQEELDTVIGRSRRPRLSDRSHLPYMEAFILETFRHSSFVPFTIPHRKLWVNPSEFLPERFLTPDGAIDKVLSEKVIIFGMGKRKCIGETIARWEVFLFLAILLQRVEFSVPLGVKVDMTPIYGLTMKHACCEHFQMQLRS

SEQ ID NO: 79772 - protein, 325 aa, Homo sapiens
MSMSPTVIILACLGFFLDQSVWAHVGGQDKPFCSAWPSAVVPQGGHVTLRCHCRRGFNIFTLYKKDGVPVPELYNRIFWNSFLISPVTPAHAGTYRCRGFHPHSPTEWSAPSNPLVIMVTGLYEKPSLTARPGPTVRAGENVTLSCSSQSSFDIYHLSREGEAHELRLPAVPSINGTFQADFPLGPATHGETYRCFGSFHGSPYEWSDPSDPLPVSVTDAAVMNQEPAGHRTVNREDSDEQDPQEVTYAQLDHCIFTQRKITGPSQRSKRPSTDTSVCIELPNAEPRALSPAHEHHSQALMGSSRETTALSQTQLASSNVPAAGI

SEQ ID NO: 79773 - protein, 231 aa, Homo sapiens
MAGRRLNLRWALSVLCVLLMAETVSGTRGSSTGAHISPQFPASGVNQTPVVDCRKVCGLNVSDRCDFIRTNPDCHSDGGYLDYLEGIFCHFPPSLLPLAVTLYVSWLLYLFLILGVTAAKFFCPNLSAISTTLKLSHNVAGVTFLAFGNGAPDIFSALVAFSDPHTAGLALGALFGAGVLVTTVVAGGITILHPFMAASRPFFRDIVFYMVAVFLTFLMLFRGRVTLAWAL

SEQ ID NO: 79774 - protein, 265 aa, Homo sapiens
MRVGVSLCYPGWSSVVGSWLTAVWNSWAQTILPPQPSAAEEYFACWNLLYLLKSGSFHRELTRFSQHKVGSDTRASCKMLLILLSVALLAFSSAQDLNEDVSQEDVPLVISDGGDSEQFLDEERQGPPLGGQQSQPSAGDGNQDDGPQQGPPQQGGQQQQGPPPPQGKPQGPPQQGGQQQQGPPPPQGKPQGPPQQGGHPPPPQGRPQGPPQQGGHPRPPRGRPQGPPQQGGHQQGPPPPPPGKPQGPPPQGGRPQGPPQGQSPQ

SEQ ID NO: 79775 - protein, 164 aa, Homo sapiens
MGSAFERVVRRVVQELDHGGEFIPVTSLQSSTGFQPYCLVVRKPSSSWFWKPRYKCVNLSIKDILEPDAAEPDVQRGRSFHFYDAMDGQIQGSVELAAPGQAKIAGGAAVSDSSSTSMNVYSLSVDPNTWQTLLHERHLRQPEHKVLQQLRSRGDNVYVVTEVL

SEQ ID NO: 79776 - protein, 260 aa, Homo sapiens
MAETSLLEAGASAASTAAALENLQVEASCSVCLEYLKEPVIIECGHNFCKACITRWWEDLERDFPCPVCRKTSRYRSLRPNRQLGSMVEIAKQLQAVKRKIRDESLCPQHHEALSLFCYEDQEAVCLICAISHTHRAHTVVPLDDATQEYKEKLQKCLEPLEQKLQEITRCKSSEEKKPGELKRLVESRRQQILREFEELHRRLDEEQQVLLSRLEEEEQDILQRLRENAAHLGDKRRDLAHLAAEVEGKCLQSGFEMLK

SEQ ID NO: 79777 - protein, 645 aa, Homo sapiens
MNWGPTGMDLWQLLLTLALAGSSDAFSGSEATAAILSRAPWSLQSVNPGLKTNSSKEPKFTKCRSPERETFSCHWTDEVHHGTKNLGPIQLFYTRRNTQEWTQEWKECPDYVSAGENSCYFNSSFTSIWIPYCIKLTSNGGTVDEKCFSVDEIVQPDPPIALNWTLLNVSLTGIHADIQVRWEAPRNADIQKGWMVLEYELQYKEVNETKWKMMDPILTTSVPVYSLKVDKEYEVRVRSKQRNSGNYGEFSEVLYVTLPQMSQFTCEEDFYFPWLLIIIFGIFGLTVMLFVFLFSKQQRIKMLILPPVPVPKIKGIDPDLLKEGKLEEVNTILAIHDSYKPEFHSDDSWVEFIELDIDEPDEKTEESDTDRLLSSDHEKSHSNLGVKDGDSGRTSCCEPDILETDFNANDIHEGTSEVAQPQRLKGEADLLCLDQKNQNNSPYHDACPATQQPSVIQAEKNKPQPLPTEGAESTHQAAHIQLSNPSSLSNIDFYAQVSDITPAGSVVLSPGQKNKAGMSQCDMHPEMVSLCQENFLMDNAYFCEADAKKCIPVAPHIKVESHIQPSLNQEDIYITTESLTTAAGRPGTGEHVPGSEMPVPDYTSIHIVQSPQGLILNATALPLPDKEFLSSCGYVSTDQLNKIMP

SEQ ID NO: 79778 - protein, 611 aa, Homo sapiens
MEFLLANHPLDCPICDQGGECDLQDQSMMFGNDRSRFLEGKRAVEDKNIGPLVKTIMTRCIQCTRCIRFASEIAGVDDLGTTGRGNDMQVGTYIEKMFMSELSGNIIDICPVGALTSKPYAFTARPWETRKTESIDVMDAVGSNIVVSTRTGEVMRILPRMHEDINEEWISDKTRFAYDGLKRQRLTEPMVRNEKGLLTYTSWEDALSRVAGMLQSFQGKDVAAIAGGLVDAEALVALKDLLNRVDSDTLCTEEVFPTAGAGTDLRSNYLLNTTIAGVEEADVVLLVGTNPRFEAPLFNARIRKSWLHNDLKVALIGSPVDLTYTYDHLGDSPKILQDIASGSHPFSQVLKEAKKPMVVLGSSALQRNDGAAILAAVSSIAQKIRMTSGVTGDWKVMNILHRIASQVAALDLGYKPGVEAIRKNPPKVLFLLGADGGCITRQDLPKDCFIIYQGHHGDVGAPIADVILPGAAYTEKSATYVNTEGRAQQTKVAVTPPGLAREDWKIIRALSEIAGMTLPYDTLDQVRNRLEEVSPNLVRYDDIEGANYFQQANELSKLVNQQLLADPLVPPQLTIKDFYMTDSISRASQTMAKCVKAVTEGAQAVEEPSIC

SEQ ID NO: 79779 - protein, 164 aa, Homo sapiens
MVAMAAGPSGCLVPAFGLRLLLATVLQAVSAFGAEFSSEACRELGFSSNLLCSSCDLLGQFNLLQLDPDCRGCCQEEAQFETKKLYAGAILEVCGKLGRFPQVQAFVRSDKPKLFRGLQIKYVRGSDPVLKLLDDNGNIAEELSILKWNTDSVEEFLSEKLERI

SEQ ID NO: 79780 - protein, 810 aa, Homo sapiens
MQPRFLWILCFSMEETQGELTSSCGSKTMANVSLAFRDVSIDLSQEEWECLDAVQRDLYKDVMLENYSNLVSLGYTIPKPDVITLLEQEKEPWIVMREGTRNWFTDLEYKYITKNLLSEKNVCKIYLSQLQTGEKSKNTIHEDTIFRNGLQCKHEFERQERHQMGCVSQMLIQKQISHPLHPKIHAREKSYECKECRKAFRQQSYLIQHLRIHTGERPYKCMECGKAFCRVGDLRVHHTIHAGERPYECKECGKAFRLHYHLTEHQRIHSGVKPYECKECGKAFSRVRDLRVHQTIHAGERPYECKECGKAFRLHYQLTEHQRIHTGERPYECKVCGKTFRVQRHISQHQKIHTGVKPYKCNECGKAFSHGSYLVQHQKIHTGEKPYECKECGKSFSFHAELARHRRIHTGEKPYECRECGKAFRLQTELTRHHRTHTGEKPYECKECGKAFICGYQLTLHLRTHTGEIPYECKECGKTFSSRYHLTQHYRIHTGEKPYICNECGKAFRLQGELTRHHRIHTCEKPYECKECGKAFIHSNQFISHQRIHTSESTYICKECGKIFSRRYNLTQHFKIHTGEKPYICNECGKAFRFQTELTQHHRIHTGEKPYKCTECGKAFIRSTHLTQHHRIHTGEKPYECTECGKTFSRHYHLTQHHRGHTGEKPYICNECGNAFICSYRLTLHQRIHTGELPYECKECGKTFSRRYHLTQHFRLHTGEKPYSCKECGNAFRLQAELTRHHIVHTGEKPYKCKECGKAFSVNSELTRHHRIHTGEKPYQCKECGKAFIRSDQLTLHQRNHISEEVLCIM

SEQ ID NO: 79781 - protein, 260 aa, Homo sapiens
MHSWERLAVLVLLGAAACGEEAWAWAAPPRGRILGGREAEAHARPYMASVQLNGAHLCGGVLVAEQWVLSAAHCLEDAADGKVQVLLGAHSLSQPEPSKRLYDVLRAVPHPDSQPDTIDHDLLLLQLSEKATLGPAVRPLPWQRVDRDVAPGTLCDVAGWGIVNHAGRRPDSLQHVLLPVLDRATCNRRTHHDGAITERLMCAESNRRDSCKGDSGGPLVCGGVLEGVVTSGSRVCGNRKKPGIYTRVASYAAWIDSVLA

SEQ ID NO: 79782 - protein, 45 aa, Homo sapiens
MAKNKLRGPKSRNVFHIASQKNFKAKNKAKPVTTNLKKINIMNEE

SEQ ID NO: 79783 - protein, 234 aa, Homo sapiens
  MOD_RES (1)..(1): Any amino acid
XGAPGGWGCLQCDPLVLEALGHLRSALIPSRFQLEQLQARAGAVLMGMEGPFFRDYALNVFVGKVETNQLDLVASFVKNQTQHLMGNSLKDEPLLEELVTLRANVIKEFKKVLISYELKACNPKLCRLLKEEVLDCLHCQRITPKCIHKKYCFVDRQPRVALQYQMDSKYPRNQALLGILISVSLAVFVFVVIVVSWSLALWPKLECNGAILRPWLTATAASQVQAILLPQPPE

SEQ ID NO: 79784 - protein, 201 aa, Homo sapiens
MADTIFGSGNDQWVCPNDRQLALRAKLQTGWSVHTYQTEKQRRKQHLSPAEVEAILQVIQRAERLDVLEQQRIGRLVERLETMRRNVMGNGLSQCLLCGEVLGFLGSSSVFCKDCRKKVCTKCGIEASPGQKRPLWLCKICSEQREVWKRSGAWFYKGLPKYILPLKTPGRADDPHFRPLPTEPAEREPRSSETSRIYTWA

SEQ ID NO: 79785 - protein, 158 aa, Homo sapiens
MGVPRTPSRTVLFERERTGLTYRVPSLLPVPPGPTLLAFVEQRLSPDDSHAHRLVLRRGTLAGGSVRWGALHVLGTAALAEHRSMNPCPVHDAGTGTVFLFFIAVLGHTPEAVQIATGRNAARLCCVASRDAGLSWGSARDLTEEAIGGAVQEEKAGR

SEQ ID NO: 79786 - protein, 269 aa, Homo sapiens
MSWKKALRIPGDLRVATVTLMLAMLSSLLAEGRDSPEDFVFQFKGMCYFTNGTERVRLVTRYIYNREEYARFDSDVGVYRAVTPQGRPDAEYWNSQKEVLEGTRAELDTVCRHNYEVAFRGILQRRVEPTVTISPSRTEALNHHNLLVCSVTDFYPGQIKVRWFRNDQEETAGVVSTPLIRNGDWTFQILVMLEMTPQRGDVYTCHVEHPSLQSPITVEWRAQSESAQSKMLSGVGGFVLGLIFLGLGLIIRQRSQKGPQGPPPAGLLH

SEQ ID NO: 79787 - protein, 289 aa, Homo sapiens
GDPDIDWEESVCLNLILQKKKSQQVFASPSKHPMDSKGEESKISYPNIFFMIDSFEEVFSDMTVGEGEMVCVELVASDKTNTFQGVIFQGSIRYEALKKVYDNRVSVAARMAQKMSFGFYKYSNMEFVRMKGPQGKGHAEMAVSRVSTGDTSPCGTEEDSSPASPMHERVTSFSTPPTPERNNRPAFFSPSLKRKVPRNRIAEMKKSHSANDSEEFFREDDGGADLHNATNLRSRSLSGTGRSLVGSWLKLNRADGNFLLYAHLTYVTLPLHRILTDILEVRQKPILMT

SEQ ID NO: 79788 - protein, 44 aa, Homo sapiens
MFLTYMETVTKELVSWMRGHESSVFSISVHASGKYAITTSSDTA

SEQ ID NO: 79789 - protein, 362 aa, Homo sapiens
MIFWSFVAGVVTFYCSLGPDSLLPNIFFTIKYKPKQLGLQELFPQGHSCAVCGKVKCKRHRPSLLLENYQPWLDLKISSKVDASLSEVLELVLENFVYPWYRDVTDDESFVDELRITLRFFASVLIRRIHKVDIPSIITKKLLKAAMKHIEVIVKARQKVKNTEFLQQAALEEYGPELHVALRSRRDELHYLRKLTELLFPYILPPKATDCRSLTLLIREILSGSVFLPSLDFLADPDTVNHLLIIFIDDSPPEKATEPASPLVPFLQKFAEPRNKKPSVLKLELKQIREQQDLLFRFMNFLKQEGAVHVLQFCLTRNLMIEFYDQNYQMMKCCLFMKNCRRFIKHTVWMKVLTKLDLIPSL

SEQ ID NO: 79790 - protein, 1130 aa, Homo sapiens
MDLYSTPAAALDRFVARRLQPRKEFVEKARRALGALAAALRERGGRLGAAAPRVLKTVKGGSSGRGTALKGGCDSELVIFLDCFKSYVDQRARRAEILSEMRASLESWWQNPVPGLRLTFPEQSVPGALQFRLTSVDLEDWMDVSLVPAFNVLGQAGSGVKPKPQVYSTLLNSGCQGGEHAACFTELRRNFVNIRPAKLKNLILLVKHWYHQVCLQGLWKETLPPVYALELLTIFAWEQGCKKDAFSLAEGLRTVLGLIQQHQHLCVFWTVNYGFEDPAVGQFLQRQLKRPRPVILDPADPTWDLGNGAAWHWDLLAQEAASCYDHPCFLRGMGDPVQSWKGPGLPRAGCSGLGHPIQLDPNQKTPENSKSLNAVYPRAGSKPPSCPAPGPTGAASIVPSVPGMALDLSQIPTKELDRFIQDHLKPSPQFQEQVKKAIDIILRCLHENCVHKASRVSKGGSFGRGTDLRDGCDVELIIFLNCFTDYKDQGPRRAEILDEMRAQLESWWQDQVPSLSLQFPEQNVPEALQFQLVSTALKSWTDVSLLPAFDAVGQLSSGTKPNPQVYSRLLTSGCQEGEHKACFAELRRNFMNIRPVKLKNLILLVKHWYRQVAAQNKGKGPAPASLPPAYALELLTIFAWEQGCRQDCFNMAQGFRTVLGLVQQHQQLCVYWTVNYSTEDPAMRMHLLGQLRKPRPLVLDPADPTWNVGHGSWELLAQEAAALGMQACFLSRDGTSVQPWDVMPALLYQTPAGDLDKFISEFLQPNRQFLAQVNKAVDTICSFLKENCFRNSPIKVIKVVKGGSSAKGTALRGRSDADLVVFLSCFSQFTEQGNKRAEIISEIRAQLEACQQERQFEVKFEVSKWENPRVLSFSLTSQTMLDQSVDFDVLPAFDALGQLVSGSRPSSQVYVDLIHSYSNAGEYSTCFTELQRDFIISRPTKLKSLIRLVKHWYQQCTKISKGRGSLPPQHGLELLTVYAWEQGGKDSQFNMAEGFRTVLELVTQYRQLCIYWTINYNAKDKTVGDFLKQQLQKPRQPGPQCPLGPAGQGSCSLHICPVLHGTEWHPHPAMASEGCCVKLRKSAVLLDEEKMDTSPQHEEIQGPLPDERDCVHVCVSTCVHVCAHVCMCVF

SEQ ID NO: 79791 - protein, 95 aa, Homo sapiens
MNEVSVIKEGWLHKRGEYIKTWRPRYFLLKSDGSFIGYKERPEAPDQTLPPLNNFSVAECQLMKTERPRPNTFVIRCLQWTTVIERTFHVDSPDE

SEQ ID NO: 79792 - protein, 144 aa, Homo sapiens
MARGSAVAWAALGPLLWGCALGLQGGMLYPQESPSRECKELDGLWSFRADFSDNRRRGFEEQWYRRPLWESGPTVDMPVPSSFNDISQDWRLRHFVGWVWYEREVILPERWTQDLRTRVVLRIGSAHSYAIVVSQGLLCPEHIF

SEQ ID NO: 79793 - protein, 409 aa, Homo sapiens
MDMHCKADPFSAMHPGHGGVNQLGGVFVNGRPLPDVVRQRIVELAHQGVRPCDISRQLRVSHGCVSKILGRYYETGSIKPGVIGGSKPKVATPKVVDKIAEYKRQNPTMFAWEIRDRLLAEGICDNDTVPSVSSINRIIRTKVQQPFHPTPDGAGTGVTAPGHTIVPSTASPPVSSASNDPVGSYSINGILGIPRSNGEKRKRDEDVSEGSVPNGDSQSGVDSLRKHLRADTFTQQQLEALDRVFERPSYPDVFQASEHIKSEQGNEYSLPALTPGLDEVKSSLSASTNPELGSNVSGTQTYPVVTGRDMASTTLPGYPPHVPPTGQGSYPTSTLAGMVPGSEFSGNPYSHPQYTAYNEAWRFSNPALLMPPPGAPPLPLLPLPMTATSYRGDHIKLQADSFGLHIVPV

SEQ ID NO: 79794 - protein, 1130 aa, Homo sapiens
GNETIEAQAELTVQAQPEFLKQPTNIYAHESMDIVFECEVTGKPTPTVKWVKNGDMVIPSDYFKIVKEHNLQVLGLVKSDEGFYQCIAENDVGNAQAGAQLIILEHDVAIPTLPPTSLTSATTDHLAPATTGPLPSAPRDVVASLVSTRFIKLTWRTPASDPHGDNLTYSVFYTKEGIARERVENTSHPGEMQVTIQNLMPATVYIFRVMAQNKHGSGESSAPLRVETQPEVQLPGPAPNLRAYAASPTSITVTWETPVSGNGEIQNYKLYYMEKGTDKEQDVDVSSHSYTINGLKKYTEYSFRVVAYNKHGPGVSTPDVAVRTLSDVPSAAPQNLSLEVRNSKSIMIHWQPPAPATQNGQITGYKIRYRKASRKSDVTETLVSGTQLSQLIEGLDRGTEYNFRVAALTINGTGPATDWLSAETFESDLDETRVPEVPSSLHVRPLVTSIVVSWTPPENQNIVVRGYAIGYGIGSPHAQTIKVDYKQRYYTIENLDPSSHYVITLKAFNNVGEGIPLYESAVTRPHTVPDPTPMMPPVGVQASILSHDTIRITWADNSLPKHQKITDSRYYTVRWKTNIPANTKYKNANATTLSYLVTGLKPNTLYEFSVMVTKGRRSSTWSMTAHGTTFELVPTSPPKDVTVVSKEGKPKTIIVNWQPPSEANGKITGYIIYYSTDVNAEIHDWVIEPVVGNRLTHQIQELTLDTPYYFKIQARNSKGMGPMSEAVQFRTPKASGSGGKGSRLPDLGSDYKPPMSGSNSPHGSPTSPLDSNMLLVIIVSVGVITIVVVVIIAVFCTRRTTSHQKKKRAACKSVNGSHKYKGNSKDVKPPDLWIHHERLELKPIDKSPDPNPIMTDTPIPRNSQDITPVDNSMDSNIHQRRNSYRGHESEDSMSTLAGRRGMRPKMMMPFDSQPPQPVISAHPIHSLDNPHHHFHSSSLASPARSHLYHPGSPWPIGTSMSLSDRANSTESVRNTPSTDTMPASSSQTCCTDHQDPEGATSSSYLASSQEEDSGQSLPTAHVRPSHPLKSFAVPAIPPPGPPTYDPALPSTPLLSQQALNHHIHSVKTASIGTLGRSRPPMPVVVPSAPEVQETTRMLEDSESSYEPDELTKEMAHLEGLMKDLNAITTA

SEQ ID NO: 79795 - protein, 271 aa, Homo sapiens [sequence omitted]

SEQ ID NO: 79796 - protein, 73 aa, Homo sapiens
MSGMEATVRTGRKAWIISTLSYFLSPSLTLPTLTALAAADHPNLAKQATWGCSKCSKKNWDQPTLEAVCPGVL

SEQ ID NO: 79797 - protein, 455 aa, Homo sapiens
MVDFPGYNLSGAVASFLFILLTMKQSEDFRVIGPAHPILAGVGEDALLTCQLLPKRTTMHVEVRWYRSEPSTPVFVHRDGVEVTEMQMEEYRGWVEWIENGIAKGNVALKIHNIQPSDNGQYWCHFQDGNYCGETSLLLKVAGLGSAPSIHMEGPGESGVQLVCTARGWFPEPQVYWEDIRGEKLLAVSEHRIQDEDGLFYAEATLVVRNASAESVSCLVHNPVLTEEKGSVISLPEKLQTELASLKVNGPSQPILVRVGEDIQLTCYLSPKANAQSMEVRWDRSHRYPAVHVYMDGDHVAGEQMAEYRGRTVLVSDAIDEGRLTLQILSARPSDDGQYRCLFEKDDVYQEASLDLKVVGLGSSPLITVEGQEDGEMQPMCSSDGWFPQPHVPWRDMEGKTIPSSSQALTQGSHGLFHVQTLLRVTNISAVDVTCSISIPFLGEEKIATFSLSGW

SEQ ID NO: 79798 - protein, 190 aa, Homo sapiens
MGSWALLWPPLLFTGLLVRPPGTMAQAQYCSVNKDIFEVEENTNVTEPLVDIHVPEGQEVTLGALSTPFAFRIQGNQLFLNVTPDYEEKSLLEAQLLCQSGGTLDTKVNSTVIPETQLQAEDRDKDDILFYTLQEMTAGASDYFSLVSVNRPALRLDRPLDFYERPNMTFWLLVRPSVAGHSGGECGTQP

SEQ ID NO: 79799 - protein, 339 aa, Homo sapiens
MPKAPKQQPPEPEWIGDGESTSPSDKVVKKGKKDKKIKKTFFEELAVEDKQAGEEEKVLKEKEQQQQQQQQQQQKKKRDTRKGRRKKDVDDDGEEKELMERLKKLSVPTSDEEDEVPAPKPRGGKKTKGGNVFAALIQDQSEEEEEEEKHPPKPAKPEKNRINKAVSEEQQPALKGKKGKEEKSKGKAKPQNKFAALDNEEEDKEEEIIKEKEPPKQGKEKAKKAEQGSEEEGEGEEEEEEGGESKADDPYAHLSKKEKKKLKKQMEYERQVASLKAANAAENDFSVSQAEMSSRQAMLENASDIKLEKFSISAHGKELFVNADLYIVAGRRYGLVGPN

SEQ ID NO: 79800 - protein, 110 aa, Homo sapiens
MLRWLRDFVLPTAACQDAEQPTRYETLFQALDRNGDGVVDIGELQEGLRNLGIPLGQDAEEKIFTTGDVNKDGKLDFEEFMKYLKDHEKKMKLAFKSLDKNNDALMLMGQ

SEQ ID NO: 79801 - protein, 232 aa, Homo sapiens
MYDNLYLHGIEDSEAGSADSYTSRPSDSDVSLEEDREAIRQEREQQAAIQLERAKSKPVAFAVKTNVSYCGALDEDVPVPSTAISFDAKDFLHIKEKYNNDWWIGRLVKEGCEIGFIPSPLRLENIRIQQEQKRGRFHGGKSSGNSSSSLGEMVSGTFRATPTSTAKQKQKVTEHIPPYDVVPSMRPVVLVGPSLKGYERKYKVKLKESLSWQDLCNWLFLMQTPSITQHNL

SEQ ID NO: 79802 - protein, 63 aa, Homo sapiens
MNAGAVLNFKLKKKDTQGFGEESREPSTGDNIREFLLSLRYFRIFIALWNIFMMFCMIVLFGS

SEQ ID NO: 79803 - protein, 48 aa, Homo sapiens
MATDSWALAVDEQEAAAESVLLSRPMPMQRRQMKKRKRTELPSPYSTS

SEQ ID NO: 79804 - protein, 177 aa, Homo sapiens
MRSMKALQKALSRAGSHCGRGGWGHPSRSPLLGGGVRHHLSEAAAQGRETPHSHQPQHQDHDSSESGMLSRLGDLLFYTIAEGQERIPIHKFTTALKATGLQTSDPRLRDCMSEMHRVVQESSSGGLLDRDLFRKWQPTSLSWPSQTQTCGVSPCALWMVNGTLWATQRSPSACSPV

SEQ ID NO: 79805 - protein, 459 aa, Homo sapiens
MDHPSREKDERQRTTKPMAQRSAHCSRPSGSSSSSGVLMVGPNFRVGKKIGCGNFGELRLGKNLYTNEYVAIKLEPIKSRAPQLHLEYRFYKQLGSAGEGLPQVYYFGPCGKYNAMVLELLGPSLEDLFDLCDRTFTLKTVLMIAIQLLSRMEYVHSKNLIYRDVKPENFLIGRQGNKKEHVIHIIDFGLAKEYIDPETKKHIPYREHKSLTGTARYMSINTHLGKEQSRRDDLEALGHMFMYFLRGSLPWQGLKADTLKERYQKIGDTKRNTPIEALCENFPEEMATYLRYVRRLDFFEKPDYEYLRTLFTDLFEKKGYTFDYAYDWVGRPIPTPVGSVHVDSGASAITRESHTHRDRPSQQQPLRNQNVSSERRGEWEIQPSRQTNTSYLTSHLAADRHGGSVQVVSSTNGELNVDDPTGAHSNAPITAHAEVEVVEEAKCCCFFKRKRKKTAQRHK

SEQ ID NO: 79806 - protein, 130 aa, Homo sapiens
MQRVSGLLSWTLSRVLWLSGLSEPGAARQPRIMEEKALEVYDLIRTIRDPEKPNTLEELEVVSESCVEVQEINEEEYLVIIRFTPTVPHCSLATLIGLCLRVKLQRCLPFKHKLEIYISEGTHSTEEDSK

SEQ ID NO: 79807 - protein, 167 aa, Homo sapiens
  MOD_RES (1)..(1): Any amino acid
XMTTPSLKTDGGRRTATSPPPTTSQTIISTIPSTAMHTRSTAAPIPILPERGEAIQEFPSSPMGQTPGTWSSSGGPWTSPPHSSSRRLASPLAPLSVIPSTSQTMARSSSQSQTTRFSPTPTHSQQASQAGTLWPWWLRSGTMLTSPLVGGPHFIRNTRRSMVNTAC

SEQ ID NO: 79808 - protein, 97 aa, Homo sapiens
  MOD_RES (1)..(1): Any amino acid
XTNVLLYGSLVSAGDALQQRLQGREANWRQTRRVATLVVTFHANFNYVWLRLLERALPGRAPHALLAKLLCDQVVGAPIAVSAFYVGSHSIPQAEVQ

SEQ ID NO: 79809 - protein, 111 aa, Homo sapiens
  MOD_RES (1)..(1): Any amino acid
XSSTVTWCALFSNHVAATQASLLLSFVWMPALLPVASRLLLLPRVLLTMASGSPPTQPSPASDSGSGYVPGSVSAAFVTCPNEKVAKEIARAVVEKRLAACVNLIPQITSM

SEQ ID NO: 79810 - protein, 178 aa, Homo sapiens
  MOD_RES (1)..(1): Any amino acid
XWQNETSSGNLESCAQARRVTGGLLDRLDDSPDQCRDSITSYLKGEAGKFEANGSHTEITPEAKTKSYFPESQNDVGKQSTKETLKPKIHGSGHVEEPASPLAAYQKSLEETSKLIIEETKPCVPVSMKKMSRTSPADGKPRLSLHEEEGSSGSEQKGEGFKVKTKKEIRHVEKKSHS

SEQ ID NO: 79811 - protein, 756 aa, Homo sapiens
MSFGILKPDLRIVFVHNKAVIWQKSRVSDHKMALMSVLGTAVMNNMESFQYHSEESQIYLSGFLPKCDADHSFTSLSTPERSFIFINSRPVHQKDILKLIRHHYNLKCLKESTRLYPVFFLKIDVPTADVDVNLTPDKSQVLLQNKESVLIALENLMTTCYGPLPSTNSYENNKTDVSAADIVLSKTAETDVLFNKVESSGKNYSNVDTSVIPFQNDMHNDESGKNTDDCLNHQISIGDFGYGHCSSEISNIDKNTKNAFQDISMSNVSWENSQTEYSKTCFISSVKHTQSENGNKDHIDESGENEEEAGLENSSEISADEWSRGNILKNSVGENIEPVKILVPEKSLPCKVSNNNYPIPEQMNLNEDSCNKKSNVIDNKSGKVTAYDLLSNRVIKKPMSASALFVQDHRPQFLIENPKTSLEDATLQIEELWKTLSEEEKLKYEEKATKDLERYNSQMKRAIEQESQMSLKDGRKKIKPTSAWNLAQKHKLKTSLSNQPKLDELLQSQIEKRRSQNIKMVQIPFSMKNLKINFKKQNKVDLEEKDEPCLIHNLRFPDAWLMTSKTEVMLLNPYRVEEALLFKRLLENHKLPAEPLEKPIMLTESLFNGSHYLDVLYKMTADDQRYSGSTYLSDPRLTANGFKIKLIPGVSITENYLEIEGMANCLPFYGVADLKEILNAILNRNAKEVYECRPRKVISYLEGEAVRLSRQLPMYLSKEDIQDIIYRMKHQFGNEIKECVHGRPFFHHLTYLPETT

SEQ ID NO: 79812 - protein, 374 aa, Homo sapiens
MALLRRPTVSSDLENIDTGVNSKVKSHVTIRRTVLEEIGNRVTTRAAQVAKKAQNTKVPVQPTKTTNVNKQLKPTASVKPVQMEKLAPKGPSPTPEDVSMKEENLCQAFSDALLCKIEDIDNEDWENPQLCSDYVKDIYQYLRQLEVLQSINPHFLDGRDINGRMRAILVDWLVQVHSKFRLLQETLYMCVGIMDRFLQVQPVSRKKLQLVGITALLLASKYEEMFSPNIEDFVYITDNAYTSSQIREMETLILKELKFELGRPLPLHFLRRASKAGEVDVEQHTLAKYLMELTLIDYDMVHYHPSKVAAAASCLSQKVLGQGKWNLKQQYYTGYTENEVLEVMQHMAKNVVKVNENLTKFIVSTTVFLSCGKL

SEQ ID NO: 79813 - protein, 228 aa, Homo sapiens
MRNCFRLQEEMLQREEAENTLQSFRQDVDNASLARLDLERKVESLQEEIAFLKKLHEEEIQELQAQIQEQHVQIDVDVSKPDLTAALRDVRQQYESVAAKNLQEAEEWYKSKFADLSEAANRNNDALRQAKQESTEYRRQVQSLTCEVDALKGTNESLERQMREMEENFAVEAANYQDTIGRLQDEIQNMKEEMARHLREYQDLLNVKMALDIEIATYRKLLEGEESR

SEQ ID NO: 79814 - protein, 337 aa, Homo sapiens
MLLGLAAMELKVWVDGIQRVVCGVSEQTTCQEVVIALAQAIGQTGRFVLVQRLREKERQLLPQECPVGAQATCGQFASDVQFVLRRTGASLAGRPSSDSCPPPERCLIRASLPVKPRAALGCEPRKTLTPEPAPSLSRPGPAAPVTPTPGCCTDLRGLELRVQRNAEELGHEAFWEQELRREQAREREGQARLQALSAATAEHAARLQALDAQARALEAELQLAAEAPGPPSPMASATERLHQDLAVQERQSAEVQGSLALVSRALEAAERALQAQAQELEELNRELRQCNLQQFIQQTGAALPPPPRPDRGPPGTQVGVVLGGGWEVRTWPSPTPS

SEQ ID NO: 79815 - protein, 153 aa, Homo sapiens
MGSAFERVVRRVVQELDHGGEFIPVTSLQSSTGFQPYCLVVRKPSSSWFWKPRYKCVNLSIKDILEPDAAEPDVQRGRSFHFYDAMDGQIQGSVELAAPGQAKIAGGAAVSDSSSTSMNVYSLSVDPNTWQTLLHERHLRQPEHKVLQQLRSR

SEQ ID NO: 79816 - protein, 80 aa, Homo sapiens
MATLSVIGSSSLIAYAVFHNIQKSPEIRPLFYLSFCDLLLGLCWLTETLLYGASVANKDIICYNLQAVGQFWRLEGPRLR

SEQ ID NO: 79817 - protein, 189 aa, Homo sapiens
KYGYLNEQVPKAPTSTRFSDAIRAFQWVSQLPVSGVLDRATLRQMTRPRCGVTDTNSYAAWAERISDLFARHRTKMRRKKRFAKQGGALAHAFLPRRGEAHFDQDERWSLSRRRGRNLFVVLAHEIGHTLGLTHSPAPRALMAPYYKRLGRDALLSWDDVLAVQSLYGKPLGGSVAVQLPGKLFTDFET

SEQ ID NO: 79818 - protein, 86 aa, Homo sapiens
MSGGKYVDSEVGIRGGAPARACGECPLLLSASPNIPTAALAPALSPLRSTPLALAPLRNGPGRGGEEKPGMFYVFLMERGPREPLS

SEQ ID NO: 79819 - protein, 420 aa, Homo sapiens
MEPLTASRLQVRKKNSLKDCVAVAGPLGVTHFLILSKTETNVYFKLMRLPGGPTLTFQVKKYSLVRDVVSSLRRHRMHEQQFAHPPLLVLNSFGPHGMHVKLMATMFQNLFPSINVHKVNLNTIKRCLLIDYNPDSQELDFRHYSIKVVPVGASRGMKKLLQEKFPNMSRLQDISELLATGAGLSESEAEPDGDHNITELPQAVAGRGNMRAQQSAVRLTEIGPRMTLQLIKVQEGVGEGKVMFHSFVSKTEEELQAILEAKEKKLRLKAQRQAQQAQNVQRKQEQREAHRKKSLEGMKKARVGGSDEEASGIPSRTASLELGEDDDEQEDDDIEYFCQAVGEAPSEDLFPEAKQKRLAKSPGRKRKRWEMDRGRGRLCDQKFPKTKDKSQGAQARRGPRGASRDGGRGRGRGRPGKRVA

SEQ ID NO: 79820 - protein, 474 aa, Homo sapiens
MRFTFTSRCLALFLLLNHPTPILPAFSNQTYPTIEPKPFLYVVGRKKMMDAQYKCYDRMQQLPAYQGEGPYCNRTWDGWLCWDDTPAGVLSYQFCPDYFPDFDPSEKVTKYCDEKGVWFKHPENNRTWSNYTMCNAFTPEKLKNAYVLYYLAIVGHSLSIFTLVISLGIFVFFRSLGCQRVTLHKNMFLTYILNSMIIIIHLVEVVPNGELVRRDPVSCKILHFFHQYMMACNYFWMLCEGIYLHTLIVVAVFTEKQRLRWYYLLGWGFPLVPTTIHAITRAVYFNDNCWLSVETHLLYIIHGPVMAALVVNFFFLLNIVRVLVTKMRETHEAESHMYLKAVKATMILVPLLGIQFVVFPWRPSNKMLGKIYDYVMHSLIHFQGFFVATIYCFCNNEVQTTVKRQWAQFKIQWNQRWGRRPSNRSARAAAAAAEAGDIPIYICHQELRNEPANNQGEESAEIIPLNIIEQESSA

SEQ ID NO: 79821 - protein, 256 aa, Homo sapiens
  MOD_RES (1)..(1): Any amino acid
XRLDAELQLSARLIQQEVGRAREQGEAERQQLSKVAQQLEQELQQTQESLASLGLQLEVARQGQQESTEEAASLRQELTQQQELYGQALQEKVAEVETRLREQLSDTERRLNEARREHAKAVVSLRQIQRRAAQEKERSQELRRLQEEARKEEGQRLARRLQELERDKNLMLQRLLTVLPSLLDKKKSVVSSPRPPECSASAPVAAAVPTRESIKGSLSVLLDDLQDLSEAISKEEAVCQGDNLDRCSSSNPQMSS

SEQ ID NO: 79822 - protein, 389 aa, Homo sapiens
MEFLLGNPFSTPVGQCLEKATDGSLQSEDWTLNMEICDIINETEEGPKDAIRALKKRLNGNRNYREVMLALTVLETCVKNCGHRFHILVANRDFIDSVLVKIISPKNNPPTIVQDKVLALIQIARLRSELDVVRGNTKVMSEMLTEMVPGQEDSSDLELLQELNRTCRAMQQRIVELISRVSNEEVTEELLHVNDDLNNVFLRYERFERYRSGRSVQNASNGVLNEVTEDNLIDLGPGSPAVVSPMVGNTAPPSSLSSQLAGLDLGTESVSGTLSSLQQCNPRDGFDMFAQTRGNSLAEQRKTVTYEDPQAVGGLASALDNRKQSSEGKGDDLEEGVTSEEFDKFLEERAKAAEMVPDLPSPPMEAPAPASNPSGRKKPERSEDALFAL

SEQ ID NO: 79823 - protein, 185 aa, Homo sapiens
MCNTNMSVPTDGAVTTSQIPASEQETLVRPKPLLLKLLKSVGAQKDTYTMKEVLFYLGQYIMTKRLYDEKQQHIVYCSNDLLGDLFGVPSFSVKEHSLLLSTELKTFLFENKKIYTMIYRNLVVVNQQESSDSGTSVSENRCHLEGGSDQKDLVQELQEEKPSSSHLVSRPSTSSRRRAISETGS

SEQ ID NO: 79824 - protein, 200 aa, Homo sapiens
MVPQISSDLLQIPLSTSGTVPYLAFLSRFGGIDLYINGIKRGGGNEMNCCRTLRELEIQVGEKVFKNIKTVMKAFELIDVNKTGLVRPQELRRVLETFCMKLRDEEYEKFSKHYNIHKDTAVDYNVFLKNLSINNDLNLRYCMGNQEVSLENQQAKNSKKERLLGSASSEDIWRNYSLDEIERNFCLQVRCFPKPQLPTE

SEQ ID NO: 79825 - protein, 181 aa, Homo sapiens
MPRGSRARGSKRKRSWNTECPSFPGERPLQVRRAGLRTAGAAASLSEAWLRCGEGFQNTSGNPSLTAEEKTITEKHLELCPRPKQETTTSKSTSGLTDITWSSSGSDLSDEDKTLSQLQRDELQFIDWEIDSDRAEASDCDEFEDDEGAVEISDCASCASNQSLTSDEKLSELPKVENLVY

SEQ ID NO: 79826 - protein, 599 aa, Homo sapiens
MAFPHRPDAPELPDFSMLKRLARDQLIYLLEQLPGKKDLFIEADLMSPLDRIANVSILKQHEVDKLYKVENKPALSSNEQLCFLVRPRIKNMRYIASLVNADKLAGRTRKYKVIFSPQKFYACEMVLEEEGIYGDVSCDEWAFSLLPLDVDLLSMELPEFFRDYFLEGDQRWINTVAQALHLLSTLYGPFPNCYGIGRCAKMAYELWRNLEEEEDGETKGRRPEIGHIFLLDRDVDFVTALCSQVVYEGLVDDTFRIKCGSVDFGPEVTSSDKSLKVLLNAEDKVFNEIRNEHFSNVFGFLSQKARNLQAQYDRRRGMDIKQMKNFVSQELKGLKQEHRLLSLHIGACESIMKKKTKQDFQELIKTEHALLEGFNIRESTSYIEEHIDRQVSPIESLRLMCLLSITENGLIPKDYRSLKTQYLQSYGPEHLLTFSNLRRAGLLTEQAPGDTLTAVESKVSKLVTDKAAGKITDAFSSLAKRSNFRAISKKLNLIPRVDGEYDLKVPRDMAYVFGGAYVPLSCRIIEQVLERRSWQGLDEVVRLLNCSDFAFTDMTKEDKASSESLRLILVVFLGGCTFSEISALRFLGREKVRCWRRSP

SEQ ID NO: 79827 - protein, 90 aa, Homo sapiens
MPQAFLLGSIHEPAGALMEPQPCPGSLAESFLEEELRLNAELSQLQFSEPVGIIYNPVEYAWEPHRNYVTRYCQGPKEVLFLGMNPGPFG

SEQ ID NO: 79828 - protein, 63 aa, Homo sapiens
MADSELQLVEQRIRSFPDFPTPGVVFRDISPVLKDPASFRAAIGLLARHLKATHGGRIDYIAG

SEQ ID NO: 79829 - protein, 55 aa, Homo sapiens
MAGPQPLALQLEQLLNPRPSEADPEADPEEATAARVIDRFDEGEDGEGSNYKKLC

SEQ ID NO: 79830 - protein, 589 aa, Homo sapiens
MDLYSTPAAALDRFVARRLQPRKEFVEKARRALGALAAALRERGGRLGAAAPRVLKTVKGGSSGRGTALKGGCDSELVIFLDCFKSYVDQRARRAEILSEMRASLESWWQNPVPGLRLTFPEQSVPGALQFRLTSVDLEDWMDVSLVPAFNVLGQAGSGVKPKPQVYSTLLNSGCQGGEHAACFTELRRNFVNIRPAKLKNLILLVKHWYHQVCLQGLWKETLPPVYALELLTIFAWEQGCKKDAFSLAEGLRTVLGLIQQHQHLCVFWTVNYGFEDPAVGQFLQRQLKRPRPVILDPADPTWDLGNGAAWHWDLLAQEAASCYDHPCFLRGMGDPVQSWKGPGLPRAGCSGLGHPIQLDPNQKTPENSKSLNAVYPRAGSKPPSCPAPGPTGAASIVPSVPGMALDLSQIPTKELDRFIQDHLKPSPQFQEQVKKAIDIILRCLHENCVHKASRVSKGGSFGRGTDLRDGCDVELIIFLNCFTDYKDQGPRRAEILDEMRAQLESWWQDQVPSLSLQFPEQNVPEALQFQLVSTALKSWTDVSLLPAFDAGSSVLAPNQIPRSTRGSSPVAARRASIRPASQSCGGTS

SEQ ID NO: 79831 - protein, 343 aa, Homo sapiens
MTVLQEPVQAAIWQALNHYAYRDAVFLAERLYAEVHSEEALFLLATCYYRSGKAYKAYRLLKGHSCTTPQCKYLLAKCCVDLSKLAEGEQILSGGVFNKQKSHDDIVTEFGDSACFTLSLLGHVYCKTDRLAKGSECYQKSLSLNPFLWSPFESLCEIGEKPDPDQTFKFTSLQNFSNCLPNSCTTQVPNHSLSHRQPETVLTETPQDTIELNRLNLESSNSKYSLNTDSSVSYIDSAVISPDTVPLGTGTSILSKQVQNKPKTGRSLLGGPAALSPLTPSFGILPLETPSPGDGSYLQNYTNTPPVIDVPSTGAPSKKVWFRNDLLQARKIQPCRNAFPKSA

SEQ ID NO: 79832 - protein, 455 aa, Homo sapiens
MPLELTQSRVQKIWVPVDHRPSLPRSCGPKLTNSPTVIVMVGLPARGKTYISKKLTRYLNWIGVPTKVFNVGEYRREAVKQYSSYNFFRPDNEEAMKVRKQCALAALRDVKSYLAKEGGQIAVFDATNTTRERRHMILHFAKENDFKAFFIESVCDDPTVVASNIMEVKISSPDYKDCNSAEAMDDFMKRISCYEASYQPLDPDKCDRDLSLIKVIDVGRRFLVNRVQDHIQSRIVYYLMNIHVQPRTIYLCRHGENEHNLQGRIGGDSGLSSRGKKFASALSKFVEEQNLKDLRVWTSQLKSTIQTAEALRLPYEQWKALNEIDAGVCEELTYEEIRDTYPEEYALREQDKYYYRYPTGESYQDLVQRLEPVIMELERQENVLVICHQAVLRCLLAYFLDKSAEEMPYLKCPLHTVLKLTPVAYGCRVESIYLNVESVCTHRERSEAAKSTTLC

SEQ ID NO: 79833 - protein, 35 aa, Homo sapiens
MSYYGSSYHIINADAKYPGYPPEHIIAEKRRARRR

SEQ ID NO: 79834 - protein, 45 aa, Homo sapiens
MSLVPATNYIYTPLNQLKGGTIVNVYGVVKFFKPPYLSKGTDSSI

SEQ ID NO: 79835 - protein, 203 aa, Homo sapiens
VYKCIKRLDGCVYAIKRSMKTFTELSNENSALHEVYAHAVLGHHPHVVRYYSSWAEDDHMIIQNEYCNGGSLQAAISENTKSGNHFEEPKLKDILLQISLGLNYIHNSSMVHLDIKPSNIFICHKMQSESSGVIEEVENEADWFLSANVMYKIGDLGHATSINKPKVEEGDSRFLANEILQENMIQPDAEQRPSAAALARNTV

SEQ ID NO: 79836 - protein, 45 aa, Homo sapiens
MGPLSARLLMQRGRPKSDRLGKIRSLDGVESGVVARASSPSYSRG

SEQ ID NO: 79837 - protein, 329 aa, Homo sapiens
MAKSMPSKSSRNKQGTVGVGCFERWRRCISVRETSSILAHIQKQKHFNEREASRVVRDVAAALDFLHTKGIAHRDLKPENILCESPEKVSPVKICDFDLGSGMKLNNSCTPITTPELTTPCGSAEYMAPEVVEVFTDQATFYDKRCDLWSLGVVLYIMLSGYPPFVGHCGADCGWDRGEVCRVCQNKLFESIQEGKYEFPDKDWAHISSEAKDLISKLLVRDAKQRLSAAQVLQHPWVQGQAPEKGLPTPQVLQRNSSTMDLTLFAAEAIALNRQLSQHEENELAEEPEALADGLCSMKLSPPCKSRLARRRALAQAGRGEDRSPPTAL

SEQ ID NO: 79838 - protein, 91 aa, Homo sapiens
MAQNLKDLAGRLPAGPRGMGTALKLLLGAGAVAYGVRESVFTVEGGHRAIFFNRIGGVQQDTILAEGLHFRPTDGEYLPASVVSTQCSGAS

SEQ ID NO: 79839 - protein, 162 aa, Homo sapiens
MLQQVNGHNPGSDGQAREYLREDLQEFLGGEVLLYKLDDLTRVNPVTLETVLRCLQARYMADTFYTNAGCTLVALNPFKPVPQLYSPELMREYHAAPQPQKLKPHVFTVGEQTYRNVKSLIEPVNQSIVVSGESGAGKTWTSRCLMKFYAVVATSPASWESH

SEQ ID NO: 79840 - protein, 519 aa, Homo sapiens
MAESLYEIRFRENVEKRILCHMQLSSAQVEQLRQAIEELYYFEFVVDDLPIRGFVGYMEESGFLPHSHKIGLWTHLDFHLEFHGDRIIFANVSVRDVKPHSLDGLRPDEFLGLTHTYSVRWSETSVERRSDRRRGDDGGFFPRTLEIHWLSIINSMVLVFLLVGFVAVILMRVLRNDLARYNLDEETTSAGSGDDFDQGDNGWKIIHTDVFRFPPYRGLLCAVLGVGAQFLALGTGIIVMALLGMFNVHRHGAINSAAILLYALTCCISGYVSSHFYRQIGGERWVWNIILTTSLFSVPFFLTWSVVNSVHWANGSTQALPATTILLLLTVWLLVGFPLTVIGGIFGKNNASPFDAPCRTKNIAREIPPQPWYKSTVIHMTVGGFLPFSAISVELYYIFATVWGREQYTLYGILFFVFAILLSVGACISIALTYFQLSGEDYRWWWRSVLSVGSTGLFIFLYSVFYYARRSNMSGAVQTVEFFGYSLLTGYVFFLMLGTISFFSSLKFIRYIYVNLKMD

SEQ ID NO: 79841 - protein, 83 aa, Homo sapiens
MEDCDLKEPEGLLTVSSFCLQHCKALIQTKLSGPPGSKQGRLMTCSRFLKTPSCGGGQHITIPRKRMFTPRKLKLTLFNSDVC

SEQ ID NO: 79842 - protein, 562 aa, Homo sapiens
MVKSRLNSWFQHRPPGAPPERYLGLPGSLKWEDRGPSGQGQGQFLIQQVTLKIPISIEFVFESGSAQAGGNQALPRLAGSLLTQALESHAEGFRERFEKTFQLKEKGLSSGEQVLGQAALSGLLGGIGYFYGQGLVLPDIGVEGSEQKVDPALFPPVPLFTAVPSRSFFPRGFLWDEGFHQLVVQRWDPSLTREALGHWLGLLNADGWIGREQILGDEARARVPPEFLVQRAVHANPPTLLLPVAHMLEVGDPDDLAFLRKALPRLHAWFSWLHQSQAGPLPLSYRWRGRDPALPTLLNPKTLPSGLDDYPRASHPSVTERHLDLRCWVALGARVLTRLAEHLGEAEVAAELGPLAASLEAAESLDELHWAPELGVFADFGNHTKAVQLKPRPPQGLVRVVGRPQPQLQYVDALGYVSLFPLLLRLLDPTSSRLGPLLDILADSRHLWSPFGLRSLAASSSFYGQRNSEHDPPYWRGAVWLNVNYLALGALHHYGHLEGPHQARAAKLHGELRANVVGNVWRQYQATGFLWEQYSDRDGRGMGCRPFHGWTSLVLLAMAEDY

SEQ ID NO: 79843 - protein, 284 aa, Homo sapiens
MALLLSQDRSLIASGLYGYNATLVGVLMAVFSDKGDYFWWLLLPVCAMSMTCPIFSSALNSMLSKWDLPVFTLPFNMALSMYLSATGHYNPFFPAKLVIPITTAPNISWSDLSALELLKSIPVGVGQIYGCDNPWTGGIFLGAILLSSPLMCLHAAIGSLLGIAAGLSLSAPFEDIYFGLWGFNSSLACIAMGGMFMALTWQTHLLALGCALFTAYLGVGMANFMAEVGLPACTWPFCLATLLFLIMTTKNSNIYKMPLSKVTYPEENRIFYLQAKKRMVESPL

SEQ ID NO: 79844 - protein, 46 aa, Homo sapiens
MLCCWSPEKPAYPARAPAWGCLLRVLGWFNSPRTSSGAHFAALKLL

SEQ ID NO: 79845 - protein, 126 aa, Homo sapiens
MTATEQWIFLCAAHKTPKECPAIDYTRHTLDGAACLLNSNKYFPSRVSIKESSVAKLGSVCRRIYRIFSHAYFHHRQIFDEYENETFLCHRFTKFVMKYNLMSKDNLIVPILEEEVQNSVSGESEA

SEQ ID NO: 79846 - protein, 138 aa, Homo sapiens
MSGCRVFIGRLNPAAREKDVERFFKGYGRIRDIDLKRGFGFVEFEDPRDADDAVYELDGKELCSERVTIEHARARSRGGRGRGRYSDRFSSRRPRNDRRNAPPVRTENRLIVENLSSRVSWQPVCVVGLMTRSACGLS

SEQ ID NO: 79847 - protein, 116 aa, Homo sapiens
MNTSPGTVGSDPVILATAGYDHTVRFWQAHSGICTRTVQHQDSQVNALEVTPDRSMIAAAGYQHIRMYDLNSNNPNPIISYDGVNKNIASVGFHEDGRWMYTGGEDCTARIWDLRG

SEQ ID NO: 79848 - protein, 113 aa, Homo sapiens
MRSLGQNPTEAELQDMINEVDADGNGTIDFPEFLTMMARKMKDTDSEEEIREAFRVFDKDGNGYISAAELRHVMTNLGEKLTDEEVDEMIREADIDGDGQVNYEEFVQMMTAK

SEQ ID NO: 79849 - protein, 153 aa, Homo sapiens
MDLRVGQRPPVEPPPEPTLLALQRPQRLHHHLFLAGLQQQRSVEPMRLSMDTPMPELQVGPQEQELRQLLHKDKSKRSAVASSVVKQKLAEVILKKQQAALERTVHPNSPGIPYRTLEPLETEGATRSMLSSFLPPVPSLPSDPPEHFPLRKT

SEQ ID NO: 79850 - protein, 63 aa, Homo sapiens
MWGYLSLMPVFLAVWAISGVWIVFAIAVTNRTVDLSKGFPYISRVDLHCPLPPAPGLGRQKVA

SEQ ID NO: 79851 - protein, 158 aa, Homo sapiens
MAAALKCLLTLGRWCPGLGVAPQARALAALVPGVTQVDNKSGFLQKRPHRQHPGILKLPHVRLPQALANGAQLLLLGSAGPTMENQVQTLTSYLWSRHLPVEPEELQRRARHLEKKFLENPGPDFQSLFSPQTYLRQRRNFVEQCYTHYVKLPTIGKN

SEQ ID NO: 79852 - protein, 778 aa, Homo sapiens
MQQESERCRVRARRPDMALYVPKARRGAVLLKTGDEEESCGSPNSVVKEKQKESSLSQKEVFKDKPEARRLNINPDRKEHNCREEKKSSTKLRMDTCLQKTNRVCSKRGTTESKEVLSQGQQQGAPNAGVITNAPLQRHFKPKKVECLEVETTDVTGHERILLSQACLEISEAQVPSKPFQNVEFCDFSRHEPDGEAFEDKDLEGRIETDTKVLEILYEFPRVFSSVMKPENMIVPIKLSSDSEIVQQSMQTSDGILNPSSGGITTTSVPGSPDGVFDQTCVDFEVESVGGIANSTGFILDQKDTDSIPATMGHISLSESTNDTVSPVMIRECEKNDSTADELHVKHEPPDTAVLAHETHRDSGFKNVGDITNKACMMDTTGMSCSDHVTVDSPYVVAVRIADETSINTRSFSKFVGMSADATPLHVARSGNDTEDFSNPSACSDIYGESISSHFTESTGKLIESLSDCASSLPIKKIAGSNYNTFLDSELSMLNGTKVLSDSAVGIDLGSTGDTTEALHELRTAEEFKTEEQDDSGSIEFGVSFPDRESSSMETSIEPKATETSHTEGITAIEESWESMFNDDGDCLDPRLLQELSGNTKSRESIQEPRSDYYNHEVPDIDLSDCEFPHVIEIYDFPQEFHTEDLLRVFCSYQKKGFDIKWVDDTHALGVFSSPITARDALGIKHTMVKIRPLSQATRAAKAKARAYAEFLQPAKERPETSAALARRLVISALGVRSKQSKTEREAELKKLQEARERKRLEAKQREDIWEGRDQSTV

SEQ ID NO: 79853 - protein, 86 aa, Homo sapiens
  MOD_RES (1)..(1): Any amino acid
XGGMNHLRENGIVHRDIKPGNIMRVIGEDGQSVYKLTDFGAARELEDDEQFVSLYGTEEYLLPPPAEKKLNHQSSYSSAVPSISAC

SEQ ID NO: 79854 - protein, 573 aa, Homo sapiens
MFSCFCFSLQDNSFSSTTVTECDEDPVSLHEDQTDCSSLRDENNKENYPDAGALVEEHAPPSWEPQQQNVEATVLVDSVLRPSMGNFKSRKPKSIFKAESGRSHGESQETEHVVSSQSECQVRAGTPAHESPQNNAFKCQETVRLQPRIDQRTAISPKDAFETRQDLNEEEAAQVHGVKDPAPASTQSVLADGTDSADPSPVHKDGQNEADSAPEDLHSVGTSRLLYHITDGDNPLLSPRCSIFSQSQRFNLDPESAPSPPSTQQFMMPRSSSRCSCGDGKEPQTITQLTKHIQSLKRKIRKFEEKFEQEKKYRPSHGDKTSNPEVLKWMNDLAKGRKQLKELKLKLSEEQGSAPKGPPRNLLCEQPTVPRENGKPEAAGPEPSSSGEETPDAALTCLKERREQLPPQEDSKVTKQDKNLIKPLYDRYRIIKQILSTPSLIPTIQEEEDSDEDRPQGSQQPSLADPASHLPVGDHLTYSNETEPVRALLPDEKKEVKPPALSMSNLHEATMPVLLDHLRETRADKKRLRKALREFEEQFFKQTGRYVSAERFLKLILPRELLLKMSCNFLQER

SEQ ID NO: 79855 - protein, 10 aa, Homo sapiens
MSSFLPEGGC

SEQ ID NO: 79856 - protein, 851 aa, Homo sapiens
MSLFKARDWWSTILGDKEEFDQGCLCLANVDNSGNGQDKIIVGSFMGYLRIFSPHPAKTGDGAQAEDLLLEVDLRDPVLQVEVGKFVSGTEMLHLAVLHSRKLCVYSVSGTLGNVEHGNQCQMKLMYEHNLQRTACNMTYGSFGGVKGRDLICIQSMDGMLMVFEQESYAFGRFLPGFLLPGPLAYSSRTDSFLTVSSCQQVESYKYQVLAFATDADKRQETEQQKLGSGKRLVVDWTLNIGEQALDICIVSFNQSASSVFVLGERNFFCLKDNGQIRFMKKLDWSPSCFLPYCSVSEGTINTLIGNHNNMLHIYQDVTLKWATQLPHIPVAVRVGCLHDLKGVIVTLSDDGHLQCSYLGTDPSLFQAPNVQSRELNYDELDVEMKELQKIIKDVNKSQGVWPMTEREDDLNVSVVVSPNFDSVSQATDVEVGTDLVPSVTVKVTLQNRVILQKAKLSVYVQPPLELTCDQFTFEFMTPDLTRTVSFSVYLKRSYTPSELEGNAVVSYSRPTDRNPDGIPRVIQCKFRLPLKLICLPGQPSKTASHKITIDTNKSPVSLLSLFPGFASQSDDDQVNVMGFHFLGGARITVLASKTSQRYRIQSEQFEDLWLITNELILRLQEYFEKQGVKDFACSFSGSIPLQEYFELIDHHFELRINGEKLEELLSERAVQFRAIQRRLLARFKDKTPAPLQHLDTLLDGTYKQVIALADAVEENQGNLFQSFTRLKSATHLVILLIALWQKLSADQVAILEAAFLPLQEDTQELGWEETVDAAISHLLKTCLSKSSKEQALNLNSQLNIPKDTSQLKKHITLLCDRLSKGGRLCLSTDAAAPQTMVMPALSLSTPHTSA

SEQ ID NO: 79857 - protein, 109 aa, Homo sapiens
MLTRKIKLWDINAHITCRLCSGYLIDATTVTECLHTFCRSCLVKYLEENNTCPTCRIVIHQSHPLQYIGHDRTMQDIVYKLVPGLQEAEMRKQREFYHKLGMEVPGDIK

SEQ ID NO: 79858 - protein, 507 aa, Homo sapiens
MVETPRLRRVTRGSSPSRKSTKKATNENYEDNEKSDSSGSRSSCFGFVAYSVNSGERSRVKIKTLTHQPACSDTPRAGRCLSPSPSPSPRKLRCLDQLESEKEERRERHSKKRRVKEGNPNDTLDFLWLGTPSTMTTSASSHLNKGIKQVYMSLPQGEKVQAMYIWIDGTGEGLRCKTRTLDSEPKCVEELPEWNFDGSSTLQSEGSNSDMYLVPAAMFRDPFRKDPNKLVLCEVFKYNRRPAETNLRHTCKRIMDMVSNQHPWFGMEQEYTLMGTDGHPFGWPSNGFPGPQGPYYCGVGADRAYGRDIVEAHYRACLYAGVKIAGTNAEVMPAQWEFQIGPCEGISMGDHLWVARFILHRVCEDFGVIATFDPKPIPGNWNGAGCHTNFSTKAMREENGLKYIEEAIEKLSKRHQYHIRAYDPKGGLDNARRLTGFHETSNINDFSAGVANRSASIRIPRTVGQEKKGYFEDRRPSANCDPFSVTEALIRTCLLNETGDEPFQYKN

SEQ ID NO: 79859 - protein, 174 aa, Homo sapiens
MRYNEKELQALSRQPAEMAAELGMRGPKKGSVLKRRLVKLVVNFLFYFRTDEAEPVGALLLERCRVVREEPGTFSISFIEDPERKYHFECSSEEQCQEWMEALRRASYEFMRRSLIFYRNEIRKVTGKVCAGLQRAGVGLQVAEAVLQPWLMATRPPHRTPWNSSAYPRRPGSS

SEQ ID NO: 79860 - protein, 1408 aa, Homo sapiens
MKSCGVSLATAAAAAAAFGDEEKKMAAGKASGESEEASPSLTAEEREALGGLDSRLFGFVRFHEDGARTKALLGKAVRCYESLILKAEGKVESDFFCQLGHFNLLLEDYPKALSAYQRYYSLQSDYWKNAAFLYGLGLVYFHYNAFQWAIKAFQEVLYVDPSFCRAKEIHLRLGLMFKVNTDYESSLKHFQLALVDCNPCTLSNAEIQFHIAHLYETQRKYHSAKEAYEQLLQTENLSAQVKATVLQQLGWMHHTVDLLGDKATKESYAIQYLQKSLEADPNSGQSWYFLGRCYSSIGKVQDAFISYRQSIDKSEASADTWCSIGVLYQQQNQPMDALQAYICAVQLDHGHAAAWMDLGTLYESCNQPQDAIKCYLNATRSKSCSNTSALAARIKYLQACKPHHPNTEPVLGLSQTPISQQSLPLHMIPSSQVDDLSSPAKRKRTSSPTKNTSDNWSGGHAVSHPPVQQQAHSWCLTPQKLQHLEQLRANRNNLNPAQKLMLEQLESQFVLMQQHQMRPTGVAQVRSTGIPNGPTADSSLPTNSVSGQQPQLALTRVPSVSQPGVRPACPGQPLANGPFSAGHVPCSTSRTLGSTDTILIGNNHITGSGSNGNVPYLQRNALTLPHNRTNLTSSAEEPWKNQLSNSTQGLHKGQSSHSAGPNGERPLSSTGPSQHLQAAGSGIQNQNGHPTLPSNSVTQGAALNHLSSHTATSGGQQGITLTKESKPSGNILTVPETSRHTGETPNSTASVEGLPNHVHQMTADAVCSPSHGDSKSPGLLSSDNPQLSALLMGKANNNVGTGTCDKVNNIHPAVHTKTDNSVASSPSSAISTATPSPKSTEQTTTNSVTSLNSPHSGLHTINGEGMEESQSPMKTDLLLVNHKPSPQIIPSMSVSIYPSSAEVLKACRNLGKNGLSNSSILLDKCPPPRPPSSPYPPLPKDKLNPPTPSIYLENKRDAFFPPLHQFCTNPNNPVTVIRGLAGALKLDLGLFSTKTLVEANNEHMVEVRTQLLQPADENWDPTGTKKIWHCESNRSHTTIAKYAQYQASSFQESLREENEKRSHHKDHSDSESTSSDNSGRRRKGPFKTIKFGTNIDLSDDKKWKLQLHELTKLPAFVRVVSAGNLLSHVGHTILGMNTVQLYMKVPGSRTPGHQENNNFCSVNINIGPGDCEWFVVPEGYWGVLNDFCEKNNLNFLMGSWWPNLEDLYEANVPVYRFIQRPGDLVWINAGTVHWVQAIGWCNNIAWNVGPLTACQYKLAVERYEWNKLQSVKSIVPMVHLSWNMARNIKVSDPKLFEMIKYCLLRTLKQCQTLREALIAAGKEIIWHGRTKEEPAHYCSICEVEVFDLLFVTNESNSRKTYIVHCQDCARKTSGNLENFVVLEQYKMEDLMQVYDQFTLAPPLPSASS

SEQ ID NO: 79861 - protein, 437 aa, Homo sapiens; identical to SEQ ID NO: 2951

SEQ ID NO: 79862 - protein, 335 aa, Homo sapiens
MGPPVSPTLLLSGSRVLTPHCAPVQGSRPGKNVQLTENEIRGLCLKSREIFLSQPILLELEAPLKICGDIHGQYYDLLRLFEYGGFPPESNYLFLGDYVDRGKQSLETICLLLAYKIKYPENFFLLRGNHECASINRIYGFYDECKRRYNIKLWKTFTDCFNCLPIAAIVDEKIFCCHGGLSPDLQSMEQIRRIMRPTDVPDQGLLCDLLWSDPDKDVQGWGENDRGVSFTFGAEVVAKFLHKHDLDLICRAHQVVEDGYEFFAKRQLVTLFSAPNYCGEFDNAGAMMSVDETLMCSFQILKPADKNKGKYGQFSGLNPGGRPITPPRNSAKAKK

SEQ ID NO: 79863 - protein, 8 aa, Homo sapiens
MASANSSA

SEQ ID NO: 79864 - protein, 402 aa, Homo sapiens
MPSALAIFTCRPNSHPFQERHVYLDEPIKIGRSVARCRPAQNNATFDCKVLSRNHALVWFDHKTGKFYLQDTKSSNGTFINSQRLSRGSEESPPCEILSGDIIQFGVDVTENTRKVTHGCIVSTIKLFLPDGMEARLRSDVIHAPLPSPVDKVAANTPSMYSQELFQLSQYLQEALHREQMLEQKLATLQRLLAITQEASDTSWQALIDEDRLLSRLEVMGNQLQACSKNQTEDSLRKELIALQEDKHNYETTAKESLRRVLQEKIEVVRKLSEVERSLSNTEDECTHLKEMNERTQEELRELANKYNGAVNEIKDLSDKLKVAEGKQEEIQQKGQAEKKELQHKIDEMEEKEQELQAKIEALQADNDFTNERLTALQVRLEHLQEKTLKECSSLGSLLPRL

SEQ ID NO: 79865 - protein, 155 aa, Homo sapiens
  MOD_RES (1)..(1): Any amino acid
XVFSGLFVGGLPPELRAAALKLTLASVREREPFKGWIRDVRVNSSQVLPVDSGEVKLDDEPPNSGGGSPCEAGEEGEGGVCLNGGVCSVVDDQAVCDCSRTGFRGKDCSQEDNNVEGLAHLMMGDQGKSKELMLILLCSITTQGLETAKSLIMCT

SEQ ID NO: 79866 - protein, 62 aa, Homo sapiens
MRDNTSPISVILVSSGSRGNKLLFRYPFQRSQEHPASQTSFQMLFWQQFWQPSLKCVAKNLN

SEQ ID NO: 79867 - protein, 139 aa, Homo sapiens
MDSKDESSHVWPTSAEHEQNAAQVHFVPDTGTVAQIVYTDDQVRPPQQVVYTADGASYTSVDGPEHTLVYIHPVEAAQASLPVHNQVLPSIESVDGSDPLATLQTPLGRLEAKEEEDEDEDEDTEEDEEEDGEDTDLDD

SEQ ID NO: 79868 - protein, 153 aa, Homo sapiens
MATFISVQLKKTSEVDLAKPLVKFIQQTYPSGGEEQAQYCRAAEELSKLRRAAVGRPLDKHEGALETLLRYYDQICSIEPKFPFSENQNLDNDEGLKIAAKHYQFASGAFLHIKETVLSALSREPTVDISPDTVGTLSLIMLAQAQEVFFLKA

SEQ ID NO: 79869 - protein, 565 aa, Homo sapiens
MEVGSEEEKWEKLDAEFDHFVVDMKPFVLKLPHRTERQRCALWIRKLCEPSGTGAGIMGRKNRNLYAKLLLHMLKRGALEGPFTHRPEPGTLKILPSYMSIYFDEPNPARAKGSSPEGLPAWVLGELETSEHKLNESWKLSSGEDNTLVQSPTDVYSREQYTGKLRVRSHSLSPTHREDGQNITPKICEVYSKKSPVSLDDSDIEARLNSWNLGIENPRYLRQKPIPVSLMTPKFSLRKSSSFHDDHFLSRIREKELDMKTKMMEAKFHEEKLKLQQKHDADVQKILERKNNEIEELKTLYRSKQHETEETIRKLEKKVQTLIRDCQVIRETKEDQIAELKKICEQSTESLNNDWEKKLHNAVAEMEQEKFDLQKQHTENIQELLEDTNVRLNKMESEYMAQTQSTNHMIKELEARVQQLTGEAENSNLQRQKLIQEKAELERCYQITCSELQEVKARRNTLHKEKDHLVNDYEQNMKLLQTKYDADINLLKQEHALSASKASSMIEELEQNVCQLKQQLQESELQRKQQLRDQENKFQMEKSHLKHIYEKKAHDLQSELDKGKE

SEQ ID NO: 79870 - protein, 162 aa, Homo sapiens
MDQEAEEIARCLLQKMADTNEFIQRAAGQSLRAMVENVTLARSLVVLTSAGVYHRNPLIRKYAAEHLSAVLEQIGAEKLLSGTRDSTDMLVHNLVRLAQDSNQDTRFYGRKMVNILMANTKFDAFLKQSLPSYDLQKVMAAIKQQGIEDNDELPSAKGRKVL

SEQ ID NO: 79871 - protein, 76 aa, Homo sapiens
MFHFFRKPPESKKPSVPETEADGFVLLGDTTDEQRMTARGKTSDIEANQPLEYAFSSEHTRKKRRMAPVRESDPCI

SEQ ID NO: 79872 - protein, 270 aa, Homo sapiens [sequence omitted]

SEQ ID NO: 79873 - protein, 128 aa, Homo sapiens
PHSSIMSMATGKNLQSIPKKTQHYFLLCFLLKFSLTISSCLICFGFTLQSFCDSSRDRNLTNCSSVMLPRAPAWFEDFANGLLSAQKLTAALIVLHTVFISITHVHRTKPLWRKSPLTNLWWAVTVPV

SEQ ID NO: 79874 - protein, 120 aa, Homo sapiens
MYDAERGWSLSFAGCGFLGFYHVGATRCLSEHAPHLLRDARMLFGASAGALHCVGVLSGIPLDSAGPLRSCAEGQESEHWHLPSILQLKQVPPTGSLQMPPGQCPPAHLRQNRHLSYQSV

SEQ ID NO: 79875 - protein, 1985 aa, Homo sapiens
MAERCGGPGACLAHLLAGLGVRREHRGKEISEATSRERPLDGRSCSDLAQGTTCNVSLKAQGQSCSEWDIHVGDHDDFWIWKQQGISGGPAQSLGRLQRPAVGSAFDLASHASLGPESLALEVASGESARTRLPQYPGPAPGHGEQGSSGCTCQQSPPTASEVPLRPEPPSNLEDAPLLLHPASFPRAEGTKGKPATPGTALPEPAQTLHTRPSSRRTRYYITVTLLGHRQAPGEEGEEPAQPAPHLCGPEESEGWWEPPQGPRPITGCRTAPPQEPQLRAQSHQGSTAQQQELQAGWTPGSPRRLELDHSGTRTPPDRLPGPHMEEAGGPMARAKARVVSATLTWRQRPPTQEEIKHGFHKVSLVSGAQMEAPQKEMFEFSRREEVEVNGFATQEEETVNCQGPRDTAGSKNFQSHGPIFSKKYIPPPKEKRPEGRLKEAVDQSDGSRQAPRTEPPCVGAMARTELLVPLPGPREPSPHPGVGLTSGSSRSLEEYRVTRTVRTTTVVGGHVDRRMSSSVTVRPVSSGEALPRGRQVSRMVPPVVVGSPPGSPSRSQAVKVLSNLVPAGHSPPASHLPRPTAGGPRSTGLGSTVGAALRQLPETGTAELKDSSALASTGIPASAHLPKNQDAPAACPDRDQGRAPDARACELWQVLGAPSSTELPLQTSQGQASVPSSPRLETHVPSPGLTHPAKQPVVPTHPGARLTPLVLPPKKKDGPVDPPAATVLPMVRSEHVTVPGQPPAPSTTRRKDVPSPGGLSAPSSPRNKFVQNSENVPVLPFTQREVVKGPGAPAASSPTRKEVVQGSSASAASSPTWKEVVKGPGAPAASSPTQKEVVQGSSAPAALFPTWKEVVKGPGAPDASFPTWKEVVKGPGAPAASSPTQKEVVQGSGAPAALSTTPKEVVKGPGAPAASSPTQKEVVKGPCAPAASSPTQKEVVQGSGAPAALSPKSTEVVQGPKGSSSIQKEAVQGIAGSLAPPLTKEETVQGPIAPATSLPKQDKGVQDSEGSPISSLTQKEVVQDPDALPAPSSSVDRVSPSPGGTPAPVPTGAEASTESQLVSDPTEGKTCTETSREEDEVALAADLEIFLDTLRSMEPPEILRTHRLPRAPRSSYLSMYATLPAIEEDQLGPWVLGPGPQEVPSLEEKEEEEEEEPENPYLSDDEKLQRRQEKAGPSPSRDLHPARPTQVSCSPLEMMKKHVAGTKGPHSELGLELQGGSRPTSRLGGSLLFGSLVPTAKEASTPEPLGTKLSALLPHGAPGLRKVPGQLPLLCSERSSPTEKLACSLPLEGWSPALKTQGKLNTRPGKVIFFSESGCQGSGREVWGDIVDASGWAPVASIRVVRGCWVLYEEPEFRGQKLVLPEGDMELRTPGTKWSPQGIGSLRRVVWDYSTPEISLFSEEGLKGEQVKLTEALKNSQGLEKPLQVASATVSAGLWLLYPKPLFEDTPYILEPGEYPTSEAWGTSDPSVGSLKPMRLGCPSVEKPGEPRAVVYEAPGFQGRSWEVSRDIYNLQQPEDSQSPHLASVGSLRVLGGCWVGYEKEGFRGHQYLLEEGEYPDWSHWGGYDELLTSLRVIRTDFGDPAVVLFEAMDFEGHGVEVSKALPDVELVQHGPSTQAIHVLSGVWVAYQEVGFSGEQYVLEKGVYRNCEDWGAGNSTLASLQPVLQVGEHDLHFVSKIQLFSRPDFLGDHFSFEDDQAALPASFRPQSCRVHGGSWILFDETNFEGDQHILSEGEFPTLTAMGCLASTVLGSLQKVSLHFSEPSIFLYGLECFEGKEIELSREVRSLQAEGFNNHVLSVRIKGGIWVLCEHSDFRGRQWLVGSCEITNWLTYSGTQRVGSLYPIKQRRVYFRLWNAALGGFLAVPDHVEDMKAGRVVVADPQAGGSCIWYYEDGLLKNQMAPTMSLQVIGPPSPGSKVVLWAESRLPRQTWSISESGHICSQMFEGQILDVKGGRGYDRDHVVLWEPDEDRASQIWTIHVL

SEQ ID NO: 79876 - protein, 81 aa, Homo sapiens
MGPSCPVFLSFTKLSLWWLLLTPAGGEEAKRPPPRAPGDPLSSPSPTALPQGGSHTETEDRLFKHLFRGYNRWARPVPNTS

SEQ ID NO: 79877 - protein, 53 aa, Homo sapiens
MVPWVRTMGQKLKQRLRLDVGREICRQYPLFCFLLLCLSAASLLLNRWIFHLL

SEQ ID NO: 79878 - protein, 178 aa, Homo sapiens
  MOD_RES (1)..(1): Any amino acid
XRSQVYMHPSLSPPSTMILSGGTALKPPYSAFPGMQPLEMVKPQSGSPYQPMSGNQALVYEGQLSQAAGLGASQMLDSQLPQLTMPLPRYGSGQQPLILPQSIQLPPGQSLSVGAPRRIPPPGSQPPVLNTSREPSQMEMKGFHFADSKQNVPSGGPVPSPQTYRQNNEWMRNPAWEP

SEQ ID NO: 79879 - protein, 231 aa, Homo sapiens
MADDIDIEAMLEAPYKKDENKLSSANGHEERSKKRKKSKSRSRSHERKRSKSKERKRSRDRERKKSKSRERKRSRSKERRRSRSRSRDRRFRGRYRSPYSGPKFNSAIRGKIGLPHSIKLRRRSRSKSPFRKDKSPVREPIDNLTPEERDARTVFCMQLAARIRPRDLEEFFSTVGKVRDVRMISDRNSRRSKGIAYVEFVDVSSVPLAIGLTGQRVLGVPIIVQASQAEK

SEQ ID NO: 79880 - protein, 2515 aa, Homo sapiens
MPPLLAPLLCLALLPALAARGPRCSQPGETCLNGGKCEAANGTEACVCGGAFVGPRCQDPNPCLSTPCKNAGTCHVVDRRGVADYACSCALGFSGPLCLTPLDNACLTNPCRNGGTCDLLTLTEYKCRCPPGWSGKSCQQADPCASNPCANGGQCLPFEASYICHCPPSFHGPTCRQDVNECGQKPGLCRHGGTCHNEVGSYRCVCRATHTGPNCERPYVPCSPSPCQNGGTCRPTGDVTHECACLPGFTGQNCEENIDDCPGNNCKNGGACVDGVNTYNCRCPPEWTGQYCTEDVDECQLMPNACQNGGTCHNTHGGYNCVCVNGWTGEDCSENIDDCASAACFHGATCHDRVASFYCECPHGRTGLLCHLNDACISNPCNEGSNCDTNPVNGKAICTCPSGYTGPACSQDVDECSLGANPCEHAGKCINTLGSFECQCLQGYTGPRCEIDVNECVSNPCQNDATCLDQIGEFQCICMPGYEGVHCEVNTDECASSPCLHNGRCLDKINEFQCECPTGFTGHLCQYDVDECASTPCKNGAKCLDGPNTYTCVCTEGYTGTHCEVDIDECDPDPCHYGSCKDGVATFTCLCRPGYTGHHCETNINECSSQPCRHGGTCQDRDNAYLCFCLKGTTGPNCEINLDDCASSPCDSGTCLDKIDGYECACEPGYTGSMCNINIDECAGNPCHNGGTCEDGINGFTCRCPEGYHDPTCLSEVNECNSNPCVHGACRDSLNGYKCDCDPGWSGTNCDINNNECESNPCVNGGTCKDMTSGYVCTCREGFSGPNCQTNINECASNPCLNQGTCIDDVAGYKCNCLLPYTGATCEVVLAPCAPSPCRNGGECRQSEDYESFSCVCPTGWQGQTCEVDINECVLSPCRHGASCQNTHGGYRCHCQAGYSGRNCETDIDDCRPNPCHNGGSCTDGINTAFCDCLPGFRGTFCEEDINECASDPCRNGANCTDCVDSYTCTCPAGFSGIHCENNTPDCTESSCFNGGTCVDGINSFTCLCPPGFTGSYCQHDVNECDSQPCLHGGTCQDGCGSYRCTCPQGYTGPNCQNLVHWCDSSPCKNGGKCWQTHTQYRCECPSGWTGLYCDVPSVSCEVAAQRQGVDVARLCQHGGLCVDAGNTHHCRCQAGYTGSYCEDLVDECSPSPCQNGATCTDYLGGYSCKCVAGYHGVNCSEEIDECLSHPCQNGGTCLDLPNTYKCSCPRGTQGVHCEINVDDCNPPVDPVSRSPKCFNNGTCVDQVGGYSCTCPPGFVGRRCESVINGCKGKPCKNGGTCAVASNTARGFICKCPAGFEGATCENDARTCGSLRCLNGGTCISGPRSPTCLCLGPFTGPECQFPASSPCLGGNPCYNQGTCEPTSESPFYRCLCPAKFNGLLCHILDYSFGGGAGRDIPPPLIEEACELPECQEDAGNKVCSLQCNNHACGWDGGDCSLNFNDPWKNCTQSLQCWKYFSDGHCDSQCNSAGCLFDGFDCQRAEGQCNPLYDQYCKDHFSDGHCDQGCNSAECEWDGLDCAEHVPERLAAGTLVVVVLMPPEQLRNSSFHFLRELSRVLHTNVVFKRDAHGQQMIFPYYGREEELRKHPIKRAAEGWAAPDALLGQVKASLLPGGSEGGRRRRELDPMDVRGSIVYLEIDNRQCVQASSQCFQSATDVAAFLGALASLGSLNIPYKIEAVQSETVEPPPPAQLHFMYVAAAAFVLLFFVGCGVLLSRKRRRQHGQLWFPEGFKVSEASKKKRREPLGEDSVGLKPLKNASDGALMDDNQNEWGDEDLETKKFRFEEPVVLPDLDDQTDHRQWTQQHLDAADLRMSAMAPTPPQGEVDADCMDVNVRGPDGFTPLMIASCSGGGLETGNSEEEEDAPAVISDFIYQGASLHNQTDRTGETALHLAARYSRSDAAKRLLEASADANIQDNMGRTPLHAAVSADAQGVFQILIRNRATDLDARMHDGTTPLILAARLAVEGMLEDLINSHADVNAVDDLGKSALHWAAAVNNVDAAVVLLKNGANKDMQNNREETPLFLAAREGSYETAKVLLDHFANRDITDHMDRLPRDIAQERMHHDIVRLLDEYNLVRSPQLHGAPLGGTPTLSPPLCSPNGYLGSLKPGVQGKKVRKPSSKGLACGSKEAKDLKARRKKSQDGKGCLLDSSGMLSPVDSLESPHGYLSDVASPPLLPSPFQQSPSVPLNHLPGMPDTHLGIGHLNVAAKPEMAALGGGGRLAFETGPPRLSHLPVASGTSTVLGSSSGGALNFTVGGSTSLNGQCEWLSRLQSGMVPNQYNPLRGSVAPGPLSTQAPSLQHGMVGPLHSSLAASALSQMMSYQGLPSTRLATQPHLVQTQQVQPQNLQMQQQNLQPANIQQQQSLQPPPPPPQPHLGVSSAASGHLGRSFLSGEPSQADVQPLGPSSLAVHTILPQESPALPTSLPSSLVPPVTAAQFLTPPSQHSYSSPVDNTPSHQLQVPEHPFLTPSPESPDQWSSSSPHSNVSDWSEGVSSPPTSMQSQIARIPEAFK

SEQ ID NO: 79881 - protein, 183 aa, Homo sapiens
MQRLGATLLCLLLAAAVPTAPAPAPTATSAPVKPGPALSYPQEEATLNEMFREVEELMEDTQHKLRSAVEEMEAEEAAAKASSEVNLANLPPSYHNETNTDTKVGNNTIHVHREIHKECIIDEDCGPSMYCQFASFQYTCQPCRGQRMLCTRDSECCGDQLCVWGHCTKMATRGSNGTICDNQ

SEQ ID NO: 79882 - protein, 1057 aa, Homo sapiens
DLLDAGTYVNIPDRSGDTVLIGAVRGGHVEIVRALLQKYADIDIRGQDNKTALYWAVEKGNATMVRDILQCNPDTEICTKDGETPLIKATKMRNIEVVELLLDKGAKVSAVDKKGDTPLHIAIRGRSRKLAELLLRNPKDGRLLYRPNKAGETPYNIDCSHQKSILTQIFGARHLSPTETDGDMLGYDLYSSALADILSEPTMQPPICVGLYAQWGSGKSFLLKKLEDEMKTFAGQQIEPLFQFSWLIVFLTLLLCGGLGLLFAFTVHPNLGIAVSLSFLALLYIFFIVIYFGGRREGESWNWAWVLSTRLARHIGYLELLLKLMFVNPPELPEQTTKALPVRFLFTDYNRLSSVGGETSLAEMIATLSDACEREFGFLATRLFRVFKTEDTQGKKKWKKTCCLPSFVIFLFIIGCIISGITLLAIFRVDPKHLTVNAVLISIASVVGLAFVLNCRTWWQVLDSLLNSQRKRLHNAASKLHKLKSEGFMKVLKCEVELMARMAKTIDSFTQNQTRLVVIIDGLDACEQDKVLQMLDTVRVLFSKGPFIAIFASDPHIIIKAINQNLNSVLRDSNINGHDYMRNIVHLPVFLNSRGLSNARKFLVTSATNGDVPCSDTTGIQEDADRRVSQNSLGEMTKLGSKTALNRRDTYRRRQMQRTITRQMSFDLTKLLVTEDWFSDISPQTMRRLLNIVSVTGRLLRANQISFNWDRLASWINLTEQWPYRTSWLILYLEETEGIPDQMTLKTIYERISKNIPTTKDVEPLLEIDGDIRNFEVFLSSRTPVLVARDVKVFLPCTVNLDPKLREIIADVRAAREQISIGGLAYPPLPLHEGPPRAPSGYSQPPSVCSSTSFNGPFAGGVVSPQPHSSYYSGMTGPQHPFYNRGSGPAPGPVVLLNSLNVDAVCEKLKQIEGLDQSMLPQYCTTIKKANINGRVLAQCNIDELKKEMNMNFGDWHLFRSTVLEMRNAESHVVPEDPRFLSESSSGPAPHGEPARRASHNELPHTELSSQTPYTLNFSFEELNTLGLDEGAPRHSNLSWQEENAGLEIDSSSEDPD

SEQ ID NO: 79883 - protein, 134 aa, Homo sapiens
LVRDNADLRCELPKLEKRLRATAERVKALEGALKEAKEGAMKDKRRYQQEVDRIKEAVRYKSSGKRGHSAQIASSWLFSFFIAAKPVRPGHYPASSPTNPYGTRSPECISYTNSLFQNYQNLYLQATPSSTSDM

SEQ ID NO: 79884 - protein, 185 aa, Homo sapiens
  MOD_RES (1)..(1): Any amino acid
XLKRAVEEVKKLLVPAAEGEDSLKKMQLMELAILNGTYRDANIKSPALAFSLAATAQAAPRIITGPAPVLPPAALRTPTPAGPTIMPLIRQIQTAVMPNGTPHPTAAIVPPGPEAGLIYTPYEYPYTLAPATSILEYPIEPSGVLGAVATKVRRHDMRVHPYQRIVTADRVTMATVQKILSNLRI

SEQ ID NO: 79885 - protein, 46 aa, Homo sapiens
MGMGRGAGRSALGFWPTLAFLLCSFPAAHHHLQELPGVCGPEGVPG

SEQ ID NO: 79886 - protein, 1134 aa, Homo sapiens
MSSMSSAEEQFQWQSQDGQKDIEDELTTGLELVDSCIRSLQESGILDPQDYSTGERPSLLSQSALQLNSKPEGSFQYPASYHSNQTLALGETTPSQLPARGTQARATGQSFSQGTTSRAGHLAGPEPAPPPPPPPREPFAPSLGSAFHLPDAPPAAAAAALYYSSSTLPAPPRGGSPLAAPQGGSPTKLQRGGSAPEGATYAAPRGSSPKQSPSRLAKSYSTSSPINIVVSSAGLSPIRVTSPPTVQSTISSSPIHQLSSTIGTYATLSPTKRLVHASEQYSKHSQELYATATLQRPGSLAAGSRASYSSQHGHLGPELRALQSPEHHIDPIYEDRVYQKPPMRSLSQSQGDPLPPAHTGTYRTSTAPSSPGVDSVPLQRTGSQHGPQNAAAATFQRASYAAGPASNYADPYRQLQYCPSVESPYSKSGPALPPEGTLARSPSIDSIQKDPREFGWRDPELPEVIQMLQHQFPSVQSNAAAYLQHLCFGDNKIKAEIRRQGGIQLLVDLLDHRMTEVHRSACGALRNLVYGKANDDNKIALKNCGGIPALVRLLRKTTDLEIRELVTGVLWNLSSCDALKMPIIQDALAVLTNAVIIPHSGWENSPLQDDRKIQLHSSQVLRNATGCLRNVSSAGEEARRRMRECDGLTDALLYVIQSALGSSEIDSKTVENCVCILRNLSYRLAAETSQGQHMGTDELDGLLCGEANGKDAESSGCWGKKKKKKKSQDQWDGVGPLPDCAEPPKGIQMLWHPSIVKPYLTLLSECSNPDTLEGAAGALQNLAAGSWKWSVYIRAAVRKEKGLPILVELLRIDNDRVVCAVATALRNMALDVRNKELIGKYAMRDLVHRLPGGNNSNNTASKAMSDDTVTAVCCTLHEVITKNMENAKALRDAGGIEKLVGISKSKGDKHSPKVVKAASQVLNSMWQYRDLRSLYKKDGWSQYHFVASSSTIERDRQRPYSSSRTPSISPVRVSPNNRSASAPASPREMISLKERKTDYECTGSNATYHGAKGEHTSRKDAMTAQNTGISTLYRNSYGAPAEDIKHNQVSAQPVPQEPSRKDYETYQPFQNSTRNYDESFFEDQVHHRPPASEYTMHLGLKSTGNYVDFYSAARPYSELNYETSHYPASPDSWV

SEQ ID NO: 79887 - protein, 276 aa, Homo sapiens
GKYFEIQFSPGGEPDGGKISNFLLEKSRVVMRNPGERSFHIFYQLIEGASAEQKHSLGITSMDYYYYLSLSGSYKVDDIDDRREFQETLHAMNVIGIFAEEQTLVLQIVAGILHLGNISFKEVGNYAAVESEEFLAFPAYLLGINQDRLKEKLTSRQMDSKWGGKSESIHVTLNVEQACYTRDALAKALHARVFDFLVDGVKRDLLLTPKCLYLIGREKVKQGPDKGLVKEVLKRKIEIERILSVSLSTMQDDIFILHEQEYDSLLESVFKTEFLS

SEQ ID NO: 79888 - protein, 66 aa, Homo sapiens
MKEDFLIKIETWHKPDLGTQENVHKLEPEAWKHVEAVYIDIADRSQVLSKDYKAEEDPAKFKSIKT

SEQ ID NO: 79889 - protein, 362 aa, Homo sapiens [sequence omitted]

SEQ ID NO: 79890 - protein, 108 aa, Homo sapiens
  MOD_RES (1)..(1): Any amino acid
XADRVEVYSRSAAPGSLGYQWLSDGSGVFEIAEASGVRTGTKIIIHLKSDCKEFSSEARVRDVVTKYSNFVSFPLYLNGRRMNTLQEPVQGQALHWLRPARWWRRRAW

SEQ ID NO: 79891 - protein, 195 aa, Homo sapiens
VTKLGRLVKDMKIKSLEEIYLFSLPIKAFVAIGDYNGHVGLGVKCSKEVATAIRGAIILAKLSIVPVRRGYWGNKIGKPHTVPCKVTGRCGSVLVRLIPAPRGTGIVSAPVPKKLLMMAGIDDCYTSARGCTATLGNFAKATFDAISKTYSYLTPDLWKETVFTKSPYQEFTDHLVKTHTRVSVQRTQAPAVATT

SEQ ID NO: 79892 - protein, 257 aa, Homo sapiens
MLVRGPHFELQRCKTHLFSSNYLTQVIKCKAAIAWEAGKPLCIEEVEVAPPKAHEVRIQIIATSLCHTDATVIDSKFEGLAFPVIVGHEAAGIVESIGPGVTNVKPGDKVIPLYAPLCRKCKFCLSPLTNLCGKISNLKSPASDQQLMEDKTSRFTCKGKPVYHFFGTSTFSQYTVVSDINLAKIDDDANLERVCLLGCGFSTGYGAAINNAKVTPGSTCAVFGLGGVGLSAVMGCKAAGASRIIGIDINSEKFVKA

SEQ ID NO: 79893 - protein, 201 aa, Homo sapiens
MESRKDMVVFLDGGQLGTLVGKRVSNLSEAVGSPLPEPPEKMVPRGCLSPRAVPPATRERGGGGPEEEPVDGLAGSAAGPGAEPQVAGAAMLGPGPPAPSVDSLSGQGQPSSSDTESDFYEEIEGPAPRRWSAVRTEGARPPRATAAVVGAARKAPWRAAPVTRCVVTAPPSPESRLRGWRRNSTGRTTYPGRGDVSWRPP

SEQ ID NO: 79894 - protein, 49 aa, Homo sapiens
  MOD_RES (1)..(1): Any amino acid
XQAMKAVVGEEALTSDDLLYLEFLQKFERNFIAQGVSLCRPGWSTVVRS

SEQ ID NO: 79895 - protein, 90 aa, Homo sapiens
MASLGANPRRTPQGPRPGAASSGFPSPAPVPGPREAEEEEVEEEEELAEIHLCVLWNSGYLGIAYYDTSDSTIHFMPDAPDHESLKLLQR

SEQ ID NO: 79896 - protein, 39 aa, Homo sapiens
  MOD_RES (1)..(1): Any amino acid
XVWSAGCVLAELLLGQPIFPGDSGVDQLVEIIKWGTQVK

SEQ ID NO: 79897 - protein, 181 aa, Homo sapiens
  MOD_RES (1)..(1): Any amino acid
XGRDKPPLVELGVLYEGKERPKPGFQVLDTTPYSHSANLAPPGPGHPRTYLTYRRAAEGAGLHALGITDLCLVLPSKGEGTPHTYCRLPRNLNPGMWGPAVYLCYKVGLAKANTLVYEAGVWCRPAVLRGVPKGQAIRATGTGTGPAERRGAGSGTGGQSCAQPACHRCAVPLACLPCLPR

SEQ ID NO: 79898 - protein, 107 aa, Homo sapiens
  MOD_RES (1)..(1): Any amino acid
XQIQALNMSSCPLDSKGKVCSGHGVCSNEATCICDFTWAGTDCSIRDPVRNLHPPKDEGPKEMSRREGSILLSKAPSESAALDGHRLALLDSGYDILAAVLLELLSL

SEQ ID NO: 79899 - protein, 79 aa, Homo sapiens
MVHCSCVLFRKYGNFIDKLRLFTRGGSGGMGYPRLGGEGGKGGDVWVVAQNRMTLKQLKDRYPRKRFVAGVGANSKRTQ

SEQ ID NO: 79900 - protein, 63 aa, Homo sapiens
MSSTLAKIAEIEAEMARTQKNKATAHHLGLLKARLAKLRRELITPKGGGGGGPGEAPGSPRYH

SEQ ID NO: 79901 - protein, 312 aa, Homo sapiens
  MOD_RES (1)..(1): Any amino acid
XLESLSCECEAIKQQQKMHLEKLEEQLSRSHGQEVNELKTKIEKLKVELDEARLSEKQLKHQVDHQKELLSCKSEELRVMSERVQESMSSEMLALQIELTEMESMKTTLKEEVNELQYRQEQLELLITNLMRQVDRLKEEKEEREKEAVSYYNALEKARVANQDLQVQLDQALQQALDPNSKGNSLFAEVEDRRAAMERQLISMKVKYQSLKKQNVFNREQMQRMKMKGSQTEFEQQERLLAMLEQKNGEIKHLLGEIRNLEKFKNLYDSMESKPSVDSGTLEDNTYYTDLLQMKLDNLNKEIESTKGELSI

SEQ ID NO: 79902 - protein, 368 aa, Homo sapiens
MSDIVEKTLTALPGLFLQNQPGGGPAAAKASFSSRLGSLVRGITALTSKHEEEKLIQQELSSLKATVSAPTTTLKMMKECMVRLIYCEMLGYDASFGYIHAIKLAQQGNLLEKRVGYLAVSLFLHESHELLLLLVNTVVKDLQSTNLVEVCMALTVVSQIFPCEMIPAVLPLIEDKLQHSKEIVRRKAVLALYKFHLIAPNQVQHIHIKFRKALCDRDVGVMAASLHIYLRMIKENSSGYKDLTGSFVTILKQVVGGKLPVEFNYHSVPAPWLQIQLLRILGLLGKDDQRTSELMYDVLDESLRRAELNHNVTYAILFECVHTVYSIYPKSELLEKAAKCIGKFVLSPKINLKYLGSYSGSSTPDDNN

SEQ ID NO: 79903 - protein, 244 aa, Homo sapiens
MSDQQLDCALDLMRRLPPQQIEKNLSDLIDLVPSLCEDLLSSVDQPLKIARDKVVGKDYLLCDYNRDGDSYRSPWSNKYDPPLEDGAMPSARLRKLEVEANNAFDQYRDLYFEGGVSSVYLWDLDHGFAGVILIKKAGDGSKKIKGCWDSIHVVEVQEKSSGRTAHYKLTSTVMLWLQTNKSGSGTMNLGGSLTRQMEKDETVSDCSPHIANIGRLVEDMENKIRSTLNEIYFGKTKDIVNGLR

SEQ ID NO: 79904 - protein, 140 aa, Homo sapiens
  MOD_RES (1)..(1): Any amino acid
XPRPQLGRNCQPLRLEAVAPEAGVRDKSRGVDFKMKTIEVDGIKVRIQIWDTAGQERYQTITKQYYRRAQGIFLVYDISSERSYQHIMKWVSDVDEVGDATSLPGCGEGASPGKARRGPDGKANASRKLCLPQPWMKTSG

SEQ ID NO: 79905 - protein, 2348 aa, Homo sapiens
MFFKMKNEIDNDPESEKCIKDSTIMRREPQNILSPLMLPNLEIPFSVKDIISRIERAQLHRAREDIDMQLSEIMNNVHRIMTRYTLVFNSSSERNVSLTEHKKKQRTNFLEKMATYAKTIEIREKTLANILAWLEEWNDVLSEMTLMDVDEHHHWIAQMELLPDTLKAIENNVKILSRFSTSFLDEKKKQKKKILSRGTLWKSWKERVIKRPSTARALRPDQMISDQLATNTKVSEIQGMLQELIGTTMFSTLENNAIKYISSTIVNLSTALSMLNDELKCVNFQSSTVYAHETSEAEKELSLKIIRDLSNENEMLQQKLQDAEEKCEQLIRSKIVIEQLYAKLSTSSTLKVLPGPSPQSSRAIIKVGDTEDNMDNILDKELENIVDEVQRKETKDSGIKWDSTISYTAQAERTPDLTELRQQPVASEDISEDSTKDNVSLKKGDFYQEDETDEYQSWKRSHKKATYVYETSGPNLSDNKSGQKVSEAKPSQYYELQVLKKKRKEMKSFSEDKSKSPTEAKRKHLSLTETKSQGGKSGTSMMMLEQFRKVKRESPFDKRPTAAEIKVEPTTESLDKEGKGEIRSLVEPLSMIQFDDTAEPQKGKIKGKKHHISSGTITSKEEKTEEKEELTKQVKSHQLVKSLSRVAKETSESTRVLESPDGKSEQSNLEEFQEAIMAFLKQKIDNIGKAFDKKTVPKEEELLKRAEAEKLGIIKAKMEEYFQKVAETVTKILRKYKDTKKEEQVGEKPIKQKKVVSFMPGLHFQKSPISAKSESSTLLSYESTDPVINNLIQMILAEIESERDIPTVSTVQKDHKEKEKQRQEQYLQEGQEQMSGMSLKQQLLGERNLLKEHYEKISENWEEKKAWLQMKEGKQEQQSQKQWQEEEMWKEEQKQATPKQAEQEEKQKQRGQEEEELPKSSLQRLEEGTQKMKTQGLLLEKENGQMRQIQKEAKHLGPHRRREKGKEKQKPERGLEDLERQIKTKDQMQMKETQPKELEKMVIQTPMTLSPRWKSVLKDVQRSYEGKEFQRNLKTLENLPDEKEPISITPPPSLQYSLPGALPISGQPLTKCIHLTPQQAQEVGITLTPQQAQAQGITLTLQQAQELGIPLTPQQAQALEILFTPQQAQALGIPLTPQQTQVQGITLTPQQDQAPGISLTTQQAQKLGIPLTPQQAQALGIPLTPQQAQELGIPLTPQQAQALRVSLTPQQAQELGIPLTPQQAQALGITLTLQQAQQLGIPLTPQQAQALGITLTPKQVQELGIPLTPQQAQALGITLTPKQAQELGIPLNPQQAQTLGIPLTPKQAQALGIPFTPQQAQALGIPLTPQQAQTQEITLTPQQAQALGMPLTTQQAQELGIPLTPQHAQALGMPLTTQQAQELGIPLTPQQAQALGMPLTTQQAQELGIPLTPQQAQELGIPFTPQQAQAQEITLTPQQAQALGMPLTAQQAQELGITLTPQQAQELGIPLTPQQAQALGIPLIPPQAQELGIPLTPQQAQALGILLIPPQAQELGIPLTPQQAQALGIPLIPPQAQELGIPLTPQQVQALGIPLIPPQAQELEIPLTPQQAQALGIPLTPQQAQELGIPLTPQQAQELGIPLTPQQAQAQGIPLTPQQAQALGISLTPQQAQAQGITLTPQQAQALGVPITPVNAWVSAVTLTSEQTHALESPMNLEQAQEQLLKLGVPLTLDKAHTLGSPLTLKQVQWSHRPFQKSKASLPTGQSIISRLSPSLRLSLASSAPTAEKSSIFGVSSTPLQISRVPLNQGPFAPGKPLEMGILSEPGKLGAPQTLRSSGQTLVYGGQSTSAQFPAPQAPPSPGQLPISRAPPTPGQPFIAGVPPTSGQIPSLWAPLSPGQPLVPEASSIPGDLLESGPLTFSEQLQEFQPPATAEQSPYLQAPSTPGQHLATWTLPGRASSLWIPPTSRHPPTLWPSPAPGKPQKSWSPSVAKKRLAIISSLKSKSVLIHPSAPDFKVAQVPFTTKKFQMSEVSDTSEETQILRDTFAIESFRTFQSHFTKYRTPVYQTPYTDERALLTLMKPTTSPSSLTTLLRTSQISPLEWYQKSRFPPIDKPWILSSVSDTKKPKVMVPPSSPQELEEKRYFVDVEAQKKNLILLNQAIKTCGLPSQLHTMARTLIIEILHMDTVQLGYLFRKYIAYRLIQHARNNIMKRLKAIQNTGKGYEARNLHMMLSRLDDYGKKVMQVWTEKQKSLGQKRNQCLKKMIHVFNQLKKIHELNLSQPIPLIIEEKQIPASTTFVQKPFLKLLMEEDRTSDICKKFRQQEDQTEAIWNVDLSTSSYPIAEKTSMHSLWAQLGGYPDIPRLLQLEVQSTFRKSLASLQSRSSG

SEQ ID NO: 79906 - protein, 41 aa, Homo sapiens
MLRGISQLPAVATMSWVLLPVLWLIVQTQASNCAWPKVSIQ

SEQ ID NO: 79907 - protein, 169 aa, Homo sapiens
MSEVSCKKRDDYLEWPEYFMAVAFLSAQRSKDPNSQVGACIVNSENKIVGIGYNGMPNGCSDDVLPWRRTAENKLDTKYPYVCHAELNAIMNKNSTDVKGCSMYVALFPCNECAKLIIQAGIKEVIFMSDKYHDSDEATAARLLFNMAGVTFRKFIPKCSKIVIDFDSI

SEQ ID NO: 79908 - protein, 268 aa, Homo sapiens
MSHLPGLELRREAPPLLGPLLSPFPLPAGSWHRQMLRSSLRFPITNSAGAPCKAAGRMNILAPVRRDRVLAELPQCLRKEAALHGHKDFHPRVTCACQEHRTGTVGRFKISKVIVVGDLSVGKTCLINRFCKDTFDKNYKATIGVDFEMERFEVLGIPFSLQLWDTAGQERFKCIASTYYRGAQAIIIVFNLNDVASLEHTKQWLADALKENDPSSVLLFLVGSKKDLSTPAQYALMEKDALQVAQEMKTVQRLPSPRALCHPHSSRA

SEQ ID NO: 79909 - protein, 67 aa, Homo sapiens
MTHALQWPSLTVQWLPEVTKPEGKDYALHWLVLGTHTSDEQNHLVVARVHIPNDDAQFDASHCDSDK

SEQ ID NO: 79910 - protein, 454 aa, Homo sapiens
MESHSRAGKSRKSAKFRSISRSLMLCNAKTSDDGSSPDEKYPDPFEISLAQGKEGIFHSSVQLADTSEAGPSSVPDLALASEAAQLQAAGNDRGKTCRRIFFMKESSTASSREKPGKLEAQSSNFLFPKACHQRARSNSTSVNPYCTREIDFPMTKKSAAPTDRQPYSLCSNRKSLSQQLDCPAGKAAGTSRPTRSLSTAQLVQPSGGLQASVISNIVLMKGQAKGLGFSIVGGKDSIYGPIGIYVKTIFAGGAAAADGRLQEGDEILELNGESMAGLTHQDALQKFKQAKKGLLTLTVRTRLTAPPSLCSHLSPPLCRSLSSSTCITKDSSSFALESPSAPISTAKPNYRIMVEVSLQKEAGVGLGIGLCSVPYFQCISGIFVHTLSPGSVAHLDGRLRCGDEIVEISDSPVHCLTLNEVYTILSHCDPGPVPIIVSRHPDPQKEEMEAQEVK

SEQ ID NO: 79911 - protein, 36 aa, Homo sapiens
MEEDEFIGEKTFQRYCAEFIKHSQQIGDSWEWRPSK

SEQ ID NO: 79912 - protein, 159 aa, Homo sapiens
MAAIYGGVEGGGTRSEVLLVSEDGKILAEADGLSTNHWLIGTDKCVERINEMVNRAKRKAGVDPLVPLRSLGLSLSGGDQEDAGRILIEELRDRFPYLSESYLITTDAAGSIATATPDGGVVLISGTGSNCRLINPDGSESGCGGWGHMMGDEGSALAH

SEQ ID NO: 79913 - protein, 68 aa, Homo sapiens
MPHFLDWFVPVYLVISVLILVGFGACIYYFEPGLQEAHKWRMQRPLVDRDLRKTLMVRDNLAFGGPEV

SEQ ID NO: 79914 - protein, 36 aa, Homo sapiens
  MOD_RES (1)..(1): Any amino acid
XAAVKSSDTALPPPPVPPKSEARQGFITLPRLVSKS

SEQ ID NO: 79915 - protein, 199 aa, Homo sapiens
GVHRKPSLLAHPGPLVKSEETVILQCWSDVMFEHFLLHREGTFNDTLRLTGELHDGVSKANFSIGRMTQDLAGTYRCYGSVPHSPYQLSAPSDPLDIVITGLCGKPSLSAQPRPMVKAGESVTLSCSSRSSYDIYHLSREGEAHELRFPAVPKVNGTFQANFPLGPATHGGTYRCFGSFRDSPYEWSDLSDPLLVSVTG

SEQ ID NO: 79916 - protein, 68 aa, Homo sapiens
MSGVSEPLSRVKLGTLRRPEGPAEPMVVVPVDVEKEDVRILKVCFYSNSFNPGKNFKLVKCTVQTEIR

SEQ ID NO: 79917 - protein, 111 aa, Homo sapiens
MRAWIFFLLCLAGRALAAPQQEALPDETEVVEETVAEVTEVSVGANPVQVEVGEFDDGAEETEEEVVAENPCQNHHCKHGKVCELDENNTPMCVCQDPTSCPAPIGEFEKV

SEQ ID NO: 79918 - protein, 84 aa, Homo sapiens
MENLMTSSTLPPLFADEDGSKESNDLATTGLNHPEVPYSSGATSSTNNPEFVEDLSQGQLLQSESSNAAEGNEQRHEDEDMFGS

SEQ ID NO: 79919 - protein, 126 aa, Homo sapiens
  MOD_RES (1)..(1): Any amino acid
XLNIVLTAKGDEVKSGRSKPDSRIEKVTDHLEALIDPFDLDVFTPHLNSNLHRLVQRTSVLFGLVTGTENQLAPRSSTFNSQEPHNILPLASSQIRFGLLPLSMTSTRKAKSTRNIETKAQYDANC

SEQ ID NO: 79920 - protein, 50 aa, Homo sapiens
METDLNSQDRKDLDKFIKFFALKTVQVIVQARLGEKICTRSSSSPTGSDW

SEQ ID NO: 79921 - protein, 164 aa, Homo sapiens
MATRDPWVWMASPDFQARKGKRVHQETLAPGETKDKMELLGLRGPLDLLGPGALLATLGKMAPGEHKAQRAPKESPDKTARWAQRDPQGPRVSLEYLERRATMGHQASLDHQGPRASQGAWGLGERTVWTVPQDRRGSLATEARMELQGPGVPQASRASRETQW

SEQ ID NO: 79922 - protein, 103 aa, Homo sapiens
MTIGRMENVEVFTAEGKGRGLKATKEFWAADIIFAERAYSAVVFDSLVNFVCHTCFKRQEKLHRCGQCKFAHYCDRTCQKDAWLNHKNECSAIKRYGKVLQED

SEQ ID NO: 79923 - protein, 127 aa, Homo sapiens
IVIEILIENHEKIFNTVPDMPLTNAQLHLSRKKSSDSKPPSCSERPLTLFHTVQSTEKQEQRNSIINSSLESVSSNPNSILNSSSSLQPNMNSSDPDLAVVKPTRPNSLVQPPRQLCSLPSKPALAF

SEQ ID NO: 79924 - protein, 71 aa, Homo sapiens
MPQAQKKTTSVSLTIGSSSPKTGVTTAVIQPLSVPVQQVHSPTSYLCRPDGTTTAYFPPVFTKELQNTAVA

SEQ ID NO: 79925 - protein, 1194 aa, Homo sapiens
MARRQQKLNKQQLQLLKERFQAFLNGETQIVADEAFCNAVRSYYEVFLKSDRVARMVQSGGCSANDFREVFKKNIEKRVRSLPEIDGLSKETVLSSWIAKYDAIYRGEEDLCKQPNRMALSAVSELILSKEQLYEMFQQILGIKKLEHQLLYNACQLDNADEQAAQIRRELDGRLQLADKMAKERKFPKFIAKDMENMYIEELRSSVNLLMANLESLPVSKGGPEFKLQKLKRSQNSAFLDIGDENEIQLSKSDVVLSFTLEIVIMEVQGLKSVAPNRIVYCTMEVEGEKLQTDQAEASRPQWGTQGDFTTTHPRPVVKVKLFTESTGVLALEDKELGRVILYPTSNSSKSAELHRMVVPKNSQDSDLKIKLAVRMDKPAHMKHSGYLYALGQKVWKRWKKRYFVLVQVSQYTFAMCSYREKKSEPQELMQLEGYTVDYTDPHPGLQGGCMFFNAVKEGDTVIFASDDEQDRILWVQAMYRATGQSYKPVPAIQTQKLNPKGGTLHADAQLSGKDADRFQKHGMDEFISANPCKLDHAFLFRILQRQTLDHRLNDSYSCLGWFSPGQVFVLDEYCARYGVRGCHRHLCYLAELMEHSENGAVIDPTLLHYSFAFCASHVHGNRPDGIGTVSVEEKERFEEIKERLSSLLENQISHFRYCFPFGRPEGALKATLSLLERVLMKDIATPIPAEEVKKVVRKCLEKAALINYTRLTEYAKIEGPAEKETETMNQASPARKLEEILHLAELCIEVLQQNEEHHAEAFAWWPDLLAEHAEKFWALFTVDMDTALEAQPQDSWDSFPLFQLLNNFLRNDTLLCNGKFHKHLQEIFVPLVVRYVDLMESSIAQSIHRGFEQETWQPVKNIANSLPNVALPKVPSLPLNLPQIPNISTASWMPSLYESTNGSATSEDLFWKLDALQMFVFDLHWPEQEFAHHLEQRLKLMASDMLEACVKRTRTAFELKLQKASKTTDLRIPASVCTMFNVLVDAKKQSTKLCALDGGQEQQYHSKIDDLIDNSVKEIISLLVSKFVSVLEGVLSKLSRYDEGTFFSSILSFTVKAAAKYVDVPKPGMDLADTYIMFVRQNQDILREKVNEEMYIEKLFDQWYSSSMKVICVWLTDRLDLQLHIYQLKTLIKIVKKTYRDFRLQGVLEGTLNSKTYDTVHRRLTVEEATASVSEGGGLQGITMKDSDEEEEG

SEQ ID NO: 79926 - protein, 271 aa, Homo sapiens
MPESLDSPTSGRPGVTSLTAAAAFKPVGSTGVIKSPSWQRPNQGVPSTGRISNSATYSGSVAPANSALGQTQPSDQDTLVQRAEHIPAGKRTPMCAHCNQVIRGPFLVALGKSWHPEEFNCAHCKNTMAYIGFVEEKGALYCELCYEKFFAPECGRCQRKILGEVISALKQTWHVSCFVCVACGKPIRNNVFHLEDGEPYCETDYYALFGTICHGCEFPIEAGDMFLEALGYTWHDTCFVCSVCCESLEGQTFFSKKDKPLCKKHAHSVNF

SEQ ID NO: 79927 - protein, 159 aa, Homo sapiens
MKGSNRNKDHSAEGEGVGKRPKRKCLQWHPLLAKKLLDFSEEEEEEDEEEDIDKVQLLGADGLEQDVGETEDDESPEQRARRPMNAFLLFCKRHRSLVRQEHPRLDNRGATKILADWWAVLDPKEKQKYTDMAKEYKDAFMKANPGYKWCPTTNKPVKS

SEQ ID NO: 79928 - protein, 27 aa, Homo sapiens
METDLNSQDRKDLDKFIKFFALKTVQV

SEQ ID NO: 79929 - protein, 424 aa, Homo sapiens
MAEPRQEFEVMEDHAGTYGLGDRKDQGGYTMHQDQEGDTDAGLKAEEAGIGDTPSLEDEAAGHVTQARMVSKSKDGTGSDDKKAKGADGKTKIATPRGAAPPGQKGQANATRIPAKTPPAPKTPPSSGEPPKSGDRSGYSSPGSPGTPGSRSRTPSLPTPPTREPKKVAVVRTPPKSPSSAKSRLQTAPVPMPDLKNVKSKIGSTENLKHQPGGGKVQIINKKLDLSNVQSKCGSKDNIKHVPGGGSVQIVYKPVDLSKVTSKCGSLGNIHHKPDGVVLSLPRLECNGTISAHCNLHLLDSSNSPVSASQVAGITGGGQVEVKSEKLDFKDRVQSKIGSLDNITHVPGGGNKKIETHKLTFRENAKAKTDHGAEIVYKSPVVSGDTSPRHLSNVSSTGSIDMVDSPQLATLADEVSASLAKQGL

SEQ ID NO: 79930 - protein, 171 aa, Homo sapiens
MAGEVHLCPTQCFHKKIYSRGELHHFIDGFNEEKSNWMRYVNPAHSPREQNLAACQNGMNIYFYTIKPIPANQELLVWYCRDFAERLHYPYPGELTMMNLTQTQSSLKQPSTEKNELCPKNVPKREYSVKEILKLDSNPSKGKDLYRSNISPLTSEKDLDDFRRRGSPEMP

SEQ ID NO: 79931 - protein, 66 aa, Homo sapiens
MAEYLASIFGTEKDKVNCSFYFKIGVCRHGDRCSRLHNKPTFSQTIVLLNLYRNPQNTAQTADGSH

SEQ ID NO: 79932 - protein, 830 aa, Homo sapiens
MSMRIPVDEEAFVIDFKPRASMDTVHHMLLFGCNMPSSTGSYWFCDEGTCTDKANILYAWARNAPPTRLPKGVGFRVGGETGSKYFVLQVHYGDISAFRDNNKDCSGVSLHLTRLPQPLIAGMYLMMSVDTVIPAGEKVVNSDISCHYKNYPMHVFAYRVHTHHLGKVVSGYRVRNGQWTLIGRQSPQLPQAFYPVGHPVDVSFGDLLAARCVFTGEGRTEATHIGGTSSDEMCNLYIMYYMEAKHAVSFMTCTQNVAPDMFRTIPPEANIPIPVKSDMVMMHEHHKETEYKDKIPLLQQPKREEEEVLDQGDFYSLLSKLLGEREDVVHVHKYNPTEKAESESDLVAEIANVVQKKDLGRSDAREGAEHERGNAILVRDRIHKFHRLVSTLRPPESRVFSLQQPPPGEGTWEPEHTGDFHMEEALDWPGVYLLPGQVSGVALDPKNNLVIFHRGDHVWDGNSFDSKFVYQQIGLGPIEEDTILVIDPNNAAVLQSSGKNLFYLPHGLSIDKDGNYWVTDVALHQVFKLDPNNKEGPVLILGRSMQPGSDQNHFCQPTDVAVDPGTGAIYVSDGYCNSRIVQFSPSGKFITQWGEESSGSSPLPGQFTVPHSLALVPLLGQLCVADRENGRIQCFKTDTKEFVREIKHSSFGRNVFAISYIPGLLFAVNGKPHFGDQEPVQGFVMNFSNGEIIDIFKPVRKHFDMPHDIVASEDGTVYIGDAHTNTVWKFTLTEKLEHRSVKKAGIEVQEIKADSEHKLETSSGRVLGRFRGKGSGGLNLGNFFASRKGYSRKGFDRLSTEGSDQEKEDDGSESEEEYSAPLPALAPSSS

SEQ ID NO: 79933 - protein, 80 aa, Homo sapiens
MSVTLHTDVGDIKIEVFCERTPKTCENFLALCASNYYNGCIFHRNIKGFMVQTGDPTGTGRGGNSIWGKKFEDEYSEYLK

SEQ ID NO: 79934 - protein, 624 aa, Homo sapiens
MMSALWKIKRKPRIENNDKSGDSMYRTLHLSTEQVAAFCRSLHEMNPSDQSPSPQDSTGPQLATMRQLSDADKLRKVICELLETERTYVKDLNCLMERYLKPLQKETFLTQDELDVLFGNLTEMVEFQVEFLKTLEDGVRLVPDLEKLEKVDQFKKVLFSLGGSFLYYADRFKLYSAFCASHTKVPKVLVKAKTDTAFKAFLDAQNPKQQHSSTLESYLIKPIQRILKYPLLLRELFALTDAESEEHYHLDVAIKTMNKVASHINEMQKIHEEFGAVFDQLIAEQTGEKKEVADLSMGDLLLHTTVIWLNPPASLGKWKKEPELAAFVFKTAVVLVYKDGSKQKKKLVGSHRLSIYEDWDPFRFRHMIPTEALQVRALASADAEANAVCEIVHVKSESEGRPERVFHLCCSSPESRKDFLKAVHSILRDKHRRQLLKTESLPSSQQYVPFGGKRLCALKGARPAMSRAVSAPSKSLGRRRRRLARNRFTIDSDAVSASSPEKESQQPPGGGDTDRWVEEQFDLAQYEEQDDIKETDILSDDDEFCESVKGASVDRDLQERLQATSISQRERGRKTLDSHASRMAQLKKQAALSGINGGLESASEEVIWVRREDFAPSRKLNTEI

SEQ ID NO: 79935 - protein, 189 aa, Homo sapiens
  MOD_RES (1)..(1): Any amino acid
XHLSFSRHRNDIKVSVNDFIIKAAAVTLKQMPDVNVSWDGEGPKQLPFIDISVAVATDKGLLTPIIKDAAAKGIQEIADSVKALSKKARDGKLLPEEYQGGSFSISNLGMFGIDEFTAVINPPQACILAVGRFRPVLKLTEDEEGNAKLQQRQLITVTMSSDSRVVDDELATRFLKSFKANLENPIRLA

SEQ ID NO: 79936 - protein, 69 aa, Homo sapiens
MLFKLTNKNSDRMTHCGVLEFVADEGICYLPHWMMQNLLLEEGGLVQVESVNLQVATYSKFQPQSPDFL

SEQ ID NO: 79937 - protein, 112 aa, Homo sapiens
MAPDPWFSTYDSTCQIAQEIAEKIQQRNQYERKGEKAPKLTVTIRALLQNLKEKIALLKDLLLRAVSTHQITQLEGDRRQNLLDDLVTRERLLLASFKNEGAEPDLIRSSLM

SEQ ID NO: 79938 - protein, 697 aa, Homo sapiens
MDYRGGDGTSMDYRGREAPHMNYRDRDAHAVDFRGRDAPPSDFRGRGTYDLDFRGRDGSHADFRGRDLSDLDFRAREQSRSDFRNRDVSDLDFRDKDGTQVDFRGRGSGTTDLDFRDRDTPHSDFRGRHRSRTDQDFRGREMGSCMEFKDREMPPVDPNILDYIQPSTQDREHSGMNVNRREESTHDHTIERPAFGIQKGEFEHSETREGETQGVAFEHESPADFQNSQSPVQDQDKSQLSGREEQSSDAGLFKEEGGLDFLGRQDTDYRSMEYRDVDHRLPGSQMFGYGQSKSFPEGKTARDAQRDLQDQDYRTGPSEEKPSRLIRLSGVPEDATKEEILNAFRTPDGMPVKNLQLKEYNTGYDYGYVCVEFSLLEDAIGCMEANQGTLMIQDKEVTLEYVSSLDFWYCKRCKANIGGHRSSCSFCKNPREVTEAKQELITYPQPQKTSIPAPLEKQPNQPLRPADKEPEPRKREEGQESRLGHQKREAERYLPPSRREGPTFRRDRERESWSGETRQDGESKTIMLKRIYRSTPPEVIVEVLEPYVRLTTANVRIIKNRTGPMGHTYGFIDLDSHAEALRVVKILQNLDPPFSIDGKMVAVNLATGKRRNDSGDHSDHMHYYQGKKYFRDRRGGGRNSDWSSDTNRQGQQSSSDCYIYDSATGYYYDPLAGTYYDPNTQVSLGLFFFFFFFYLCQ

SEQ ID NO: 79939 - protein, 147 aa, Homo sapiens
MSARGEGAGQPSTSAQGQPAAPAPQKRGRGRPRKQQQEPTGEPSPKRPRGRPKGSKNKSPSKAAQKKAEATGEKRPRGRPRKWAGVQWYNLGSLQPPPPRFKQFSCLRLLSSWDYRHPPPHPANFCIFSRDRVSPCWPGWSRTPDLR

SEQ ID NO: 79940 - protein, 124 aa, Homo sapiens
  MOD_RES (1)..(1): Any amino acid
XKEDVTERQSTKRSPQQTVPYVVPLSPKLPKTKEYASEGEPLFAGGSAIPKEENLSEDSKSSSLNSGNYLNPACRNPMYIHTSVSQDFSRSVPGTTSSPLVGDISPKSSPHEVKFQMQRKSEGN

SEQ ID NO: 79941 - protein, 135 aa, Homo sapiens
  MOD_RES (1)..(1): Any amino acid
XWMPAYACQRPTPLTHHNTGLSEALEILAEAAGFEGSEGRLLTFCRAASVLKALPSPVTTLSQLQGLPHFGEHSSRVVQELLEHGVCEEVERVRRSERYQTMKVRRAGLGPTPGMSCPGNDNTVHTMHGEANRGS

SEQ ID NO: 79942 - protein, 339 aa, Homo sapiens
MAEYDLTTRIAHFLDRHLVFPLLEFLSVKEIYNEKELLQGKLDLLSDTNMVDFAMDVYKNLYSDDIPHALREKRTTVVAQLKQLQAETEPIVKMFEDPETTRQMQSTRDGRMLFDYLADKHGFRQEYLDTLYRYAKFQYECGNYSGAAEYLYFFRVLVPATDRNALSSLWGKLASEILMQNWDAAMEDLTRLKETIDNNSVSSPLQSLQQRTWLIHWSLFVFFNHPKGRDNIIDLFLYQPHMLADKLNMTPEEAERWIVNLIRNARLDAKIDSKLGHVVMGNNAVSPYQQVIEKTKSLSFRSQMLAMNIEKKLNQNSRSEVRTTHLLFCLGFSNHVIVT

SEQ ID NO: 79943 - protein, 65 aa, Homo sapiens
  MOD_RES (1)..(1): Any amino acid
XSGVQVDLEARDFEGLTPLHTAILALNVAMRPSDLCPRVLSTQARDRLDCVHMLLQMGANHTSQR

SEQ ID NO: 79944 - protein, 623 aa, Homo sapiens
VEAVPSQTPDKEKAWKVKDEKSGKDDTQIIKRDEWMTVDFMSVKTVSSSSLKAEKETMRKIEQEKNQALEQSKLMERELNPYWKDGGTGLPPEDCSVSSITKVSVVEDGGLSWLRKSYLRMKEQAEKQSRNFEDIVAERYGSMEIFQSKLEDAEKAASTKEDYRRERWRKPTYSDKAQNCQESRESDLVKYGNSSRDRYATTDTAKNSNNEKFIGDEKDKRPGSLETCRRESNPRQNQEFSFGNLRAKFLRPSDDEELSFHSKGRKFEPLSSSSALVAQGSLCSGFRKPTKNSEERLTSWSRSDGRGDKKHSNQKPSETSTDEHQHVPEDPREKSQDEVLRDDPPKKEHLRDTKSTFAGSPERESIHILSVDEKNKLGAKIIKAEMMGNMELAEQLKVQLEKANKFKETITQIPKKSGVENEDQQEVILVRTDQSGRVWPVNTPGKSLESQGGRRKRQMVSTHEERERVRYFHDDDNLSLNDLVKNEKMGTAENQNKLFMRMASKFMGKTDGDYYTLDDMFVSKAAERERLGEEEENQRKKAIAEHRSLAAQMEKCLYCFDSSQFPKHLIVAIGVKVYLCLPNVRSLTEGHCLIVPLQHHRAATLLDEDIWEEIQIKSRTVIQ

SEQ ID NO: 79945 - protein, 38 aa, Homo sapiens
MGITLHLLLHSDRDPIPDVPAVYFVMPTEENIDRMCQK

SEQ ID NO: 79946 - protein, 167 aa, Homo sapiens
  MOD_RES (1)..(1): Any amino acid
XCDSLAKIPKRASMVHSLIEAYALHKQMRIVKPKVASMEEMATFHTDAYLQHLQKVSQEGDDDHPDSIEYGLGYDCPATEGIFDYAAAIGGATITAAQCLIDGMCKVAINWSGGWHHAKKDEASGFCYLNDAVLGILRLRRKFERILYVDLDLHHGDGIFFFSDKLT

SEQ ID NO: 79947 - protein, 333 aa, Homo sapiens
MWGLKVLLLPVVSFALYPEEILDTHWELWKKTHRKQYNNKVDEISRRLIWEKNLKYISIHNLEASLGVHTYELAMNHLGDMTSEEVVQKMTGLKVPLSHSRSNDTLYIPEWEGRAPDSVDYRKKGYVTPVKNQGQCGSCWAFSSVGALEGQLKKKTGKLLNLSPQNLVDCVSENDGCGGGYMTNAFQYVQKNRGIDSEDAYPYVGQEESCMYNPTGKAAKCRGYREIPEGNEKALKRAVARVGPVSVAIDASLTSFQFYSKVCILGVYYDESCNSDNLNHAVLAVGYGIQKGNKHWIIKNSWGENWGNKGYILMARNKNNACGIANLASFPKM

SEQ ID NO: 79948 - protein, 98 aa, Homo sapiens
MKEINLLPDRVLSTPSVQLVQSWYVQSLLDIMEFLDKDPEDHRTLSQFTDALVTIRNRHNDVVPTMAQGVLEYKDTYGDDPVSNQNIQYFLDRFYLSR

SEQ ID NO: 79949 - protein, 683 aa, Homo sapiens [sequence omitted]

SEQ ID NO: 79950 - protein, 106 aa, Homo sapiens
FFLPQTPYANGLVHDPVMGSQANYGMQQMAGFGRFYPVYPAPNVVANTSGSGPKKNGNVSCYNCGVSGHYAQDCKQSSMEANQQGTYRLRYAPPLPPSNDTLDSAD

SEQ ID NO: 79951 - protein, 82 aa, Homo sapiens
MASPFSGALQLTDLDDFIGPSQECIKPVKVEKRAGSGVAKIRIEDDGSYFQINQVRHRRLLHHLSCPADPKHFSLLPPVTER

SEQ ID NO: 79952 - protein, 167 aa, Homo sapiens
MVHAEAFSRPLSRNEVVGLIFRLTIFGAVTYFTIKWMVDAIDPTRKQKVEAQKQAEKLMKQIGVKNVKLSEYEMSIAAHLVDPLNMHVTWSDIAGLDDVITDLKDTVILPIKKKHLFENSRLLQPPKGVLLYGPPGCGKTLIAKATAKEAGCRFINLQPSTLTDKWY

SEQ ID NO: 79953 - protein, 173 aa, Homo sapiens
MEHRHSPQPLPAALTAPAEEGHRGLYSHLDPGWASISRGVLVCDECCSVHRSLGRHISIVKHLRHSAWPPTLLQMVHTLASNGANSIWEHSLLDPAQVQSGRRKANPQDKVHPIKSEFIRAKYQMLAFVHKLPCRDDDGVTAKDLSKQLHSSVRTGNLETCLRLLSLGAQANF

SEQ ID NO: 79954 - protein, 748 aa, Homo sapiens; identical to SEQ ID NO: 1227

SEQ ID NO: 79955 - protein, 147 aa, Homo sapiens
MIPIWKQQARPGDGPVIWDYHVVLLHVSSGGQNFIYDLDTVLPFPCLFDTYVEDAFKSDDDIHPQFRRKFRVIRADSYLKNFASDRSHMKDSSGNWREPPPPYPCIETGDSKMNLNDFISMDPKSVVQAGVQLRDPGSLQAPPPGFK

SEQ ID NO: 79956 - protein, 51 aa, Homo sapiens
MASQPPEDTAESQASDELECKICYNRYNLKQRKPKVLECCHRVCAKCLYKI

SEQ ID NO: 79957 - protein, 25 aa, Homo sapiens
MKEENTGAGAEAKSVLMREETELKT

SEQ ID NO: 79958 - protein, 151 aa, Homo sapiens
MRVIRVGTRKSQLARIQTDSVVATLKASYPGLQFEIIAMSTTGDKILDTALSKIGEKSLFTKELEHALEKNEVDLVVHSLKDLPTVLPPGFTIGAICKRENPHDAVVFHPKFVGKTLETLPEKSVVGTSSLRRAAQLQRKFPHLEFRSIWG

SEQ ID NO: 79959 - protein, 195 aa, Homo sapiens
MVTFSENHGVVIQPAYKDKINITQLGLQNSTITFWNITLEDEGCYMCLFNTFGFGKISGTACLTVYVQPIVSLHYKFSEDHLNITCSATARPAPMVFWKVPRSGIENSTVTLSHPNGTTSVTSILHIKDPKNQVGKEVICQVLHLGTVTDFKQTVNKGYWFSVPLLLSIVSLVILLVLISILLYWKRHRNQDREP

SEQ ID NO: 79960 - protein, 274 aa, Homo sapiens
APASDSIGPQILTSPSPSKSIPIPQPFRPADEDHRNQFGQRDRSSSAPNVHINTIEPVNIDDLIRDQGFRGDGGSTTGLSATPPASLPGSLTNVKALQKSPGPQRERKSSSSSEDRNRMKTLGRRDSSDDWEIPDGQITVGQRIGSGSFGTVYKGKWHGDVAVKMLNVTAPTPQQLQAFKNEVGVLRKTRHVNILLFMGYSTKPQLAIVTQWCEGSSLYHHLHIIETKFEMIKLIDIARQTAQGMEHQKSSECKIKIHTAFSQMYMHLELFCMN

SEQ ID NO: 79961 - protein, 239 aa, Homo sapiens
MASVLSYESLVHAVAGAVGSVTAMTVFFPLDTARLRLQVDEKRKSKTTHMVLLEIIKEEGLLAPYRGWFPVISSLCCSNFVYFYTFNSLKALWVKGQHSTTGKDLVVGFVAGVVNVLLTTPLWVVNTRLKLQGAKFRNEDIVPTNYKGIIDAFHQIIRDEGISALWNGTFPSLLLVFNPAIQFMFYEGLKRQLLKKRMKLSSLDVFIIGAVAKAIATTVTYPLQTVQSILRLFIHSNIY

SEQ ID NO: 79962 - protein, 121 aa, Homo sapiens
DVNLKMPRNNQLLHFAFREDKQWKLQQIQDARNHVSQAIYLLTSRDQSYQFKTGAEVLKRMFAPALPSDLLVNVYINLNKLCLTVYQLHALQPNSTKNFRPAGGAVLHSPGAMFGALSAWR

SEQ ID NO: 79963 - protein, 174 aa, Homo sapiens
MLANSASVRILIKGGKVVNDDCTHEADVYIENGIIQQVGRELMIPGGAKVIDATGKLVIPGGIDTSTHFHQTFMNATCVDDFYHGTKAALVGGTTMIIGHVLPDKETSLVDAYEKCRGLADPKVCCDYALHVGITWWAPKVKAEMETLVREKGVNSFQMFMTYKDLYMLRDSEL

SEQ ID NO: 79964 - protein, 282 aa, Homo sapiens
DNEQADIFERVQKMKPVSDQEENELVILHLRQLCEAKQKTHVHIGEGPSTISNSTIPENATSSGRFKLDILKNKAKRSLTSSLENIFSRGANRMRGRLGSVDSFERSNSLASEKDYSPGDSPPGTPPASPPSSAWQTFPEEDSDSPQFRRRAHTFSHPPSSTKRKLNLQDGRAQGVRSPLLRQSSSEQCSDGEGRKRTSSTCSNESLSVGGTSVTPRRISWRQRIFLRVASPMNKSPSAMQQQDGLDRNELLPLSPLSPTMEEEPLVVFLSGEDDPEKIEER

SEQ ID NO: 79965 - protein, 100 aa, Homo sapiens
MKVVNLKQAILQAWKERWSDYQWAINMKKFFPKGATWDILNLADALLEQAMIGPSPNPLILSYLKYAISSQMVSYSSVLTAISKLSRQSRGMHRTVPSPS

SEQ ID NO: 79966 - protein, 191 aa, Homo sapiens
  MOD_RES (1)..(1): Any amino acid
XSTTPRAFDHTKQNQDWTQWNPSHSNPEVLLQTTTRMTVQATPSSTTEETATQKEQWFGNRWHEGYRQTPKEDSHSTTGTAASAHTSHPMQGRTTPSPEDSSWTDFFNPISHPMGRGHQAGRRMDMDSSHSITLQPTANPNTGLVEDLDRTGPLSMTTQQSNSQSFSTSHEGLEEDKDHPTTSTLTSSNRN

SEQ ID NO: 79967 - protein, 148 aa, Homo sapiens
  MOD_RES (1)..(1): Any amino acid
XEMLHALLDLPCLTAVLDLQLRSAPAASERPLWDTSLRAPSCLEAFRDPQFQGLFQYLLRPKASGATERLAPLHQLLQPMAGCARVAQCAQAVPTLLQAFFSAVTQVADGSLINQLALLLLGRSDSLYPAPGYAAGVHRPLAWMGMGS

SEQ ID NO: 79968 - protein, 131 aa, Homo sapiens
MRTLFNLLWLALACSPVHTTLSKSDAKKAASKTLLEKSQFSDKPVQDRGLVVTDLKAESVVLEHRSYCSAKARDRHFAGDVLGYVTPWNSHGYDVTKVFGSKFTQISPVWLQLKRRGREMFEVTGLHDVDQ

SEQ ID NO: 79969 - protein, 354 aa, Homo sapiens
  MOD_RES (1)..(1): Any amino acid
XAYVPLIFPATWLLDTRGLRLTALLGSGLNCLGAWIKCGSVQQHLFWVTMLGQCLCSVAQVFILGLPSRIASVWFGPKEVSTACATAVLGNQLGTAVGFLLPPVLVPNTQNDTNLLACNISTMFYGTSAVATLLFILTAIGIMTGAFYSVSTLLNQMILTYYEGEEVNAGRIGLTLVVAGMVGSILCGLWLDYTKTYKQTTLIVYILSFIGMVIFTFTLDLRYIIIVFVTGGVLGFFMTGYLPLGFEFAVEITYPESEGTSSGLLNASAQIFGILFTLAQGKLTSDYGPKAGNIFLCVWMFIGIILTALIKSDLRRHNINIGITNVDVKAIPADSPTDQEPKTVMLSKQSESAI

SEQ ID NO: 79970 - protein, 456 aa, Homo sapiens
MAVLLLLLRALRRGPGPGPRPLWGPGPAWSPGFPARPGRGRPYMASRPPGDLAEAGGRALQSLQLRLLTPTFEGINGLLLKQHLVQNPVRLWQLLGGTFYFNTSRLKQKNKEKDKSKGKAPEEDEEERRRRERDDQMYRERLRTLLVIAVVMSLLNALSTSGGSISWNDFVHEMLAKGEVQRVQVVPESDVVEVYLHPGAVVFGRPRLALMYRMQVANIDKFEEKLRAAEDELNIEAKDRIPVSYKRTGFFGNALYSVGMTAVGLAILWYVFRLAGMTGREGGFSAFNQLKMARFTIVDGKMGKGVSFKDVAGMHEAKLEVREFVDYLKLGAKVPKGALLLGPPGCGKTLLAKAVATEAQVPFLAMAGPEFVEVIGGLGAARVRSLFKEARARAPCIVYIDEIDAVGKKRSTTMSGFSNTEEEQTLNQLLVEMDVFYAEIEELKLVYPYHGVLHSD

SEQ ID NO: 79971 - protein, 174 aa, Homo sapiens
MESQEFIVLYTHQKMKKSKVWQDGILKITHLGNKAILYDDKGACLESLFLKCLEVKPGDDLESDRYLITVEEVKVAGAIGIVKQNVNKEAPELNSRTFISSGRSLGCQPSGLKRKFTGFQGPRQVPKKMVIMESGESAASHEAKKTGPTIFSPFCSMPPLFPTVGKKDVNNILA

SEQ ID NO: 79972 - protein, 157 aa, Homo sapiens
MDLETPEEMQARSLGRPIKSSKQYLRQVIAEYEALDRELPCIRKFPTPPASQPLCLCMETLPEEDFTHLEVLQALEAQLPGAMESGRVSSIRFENMNVICGTAGRRNRWLIAVTDFQTRSRLLRSGLSPRGLAHQIVRHDDLLLGDYRLHLRRSLVR

SEQ ID NO: 79973 - protein, 359 aa, Homo sapiens
MPSSVSWGILLLAGLCCLVPVSLAEDPQGDAAQKTDTSHHDQDHPTFNKITPNLAEFAFSLYRQLAHQSNSTNIFFSPVSIATAFAMLSLGTKADTHDEILEGLNFNLTEIPEAQIHEGFQELLRTLNQPDSQLQLTTGNGLFLSEGLKLVDKFLEDVKKLYHSEAFTVNFGDTEEAKKQINDYVEKGTQGKIVDLVKELDRDTVFALVNYIFFKGKWERPFEVKDTEEEDFHVDQATTVKVPMMKRLGMFNIQHCKKLSSWVLLMKYLGNATAIFFLPDEGKLQHLENELTHDIITKFLENEDRRSASLHLPKLSITGTYDLKSVLGQLGITKVFSNGADLSGVTEEAPLKLSKVRSP

SEQ ID NO: 79974 - protein, 57 aa, Homo sapiens
  MOD_RES (1)..(1): Any amino acid
XNLMNAIMGSGILGLAYVLANTGVFGFSFLLLTVALLASYSVHLLLSMCIQTAYLGP

SEQ ID NO: 79975 - protein, 26 aa, Homo sapiens
MGSKRRRATSPSSSVSGDFDDGHHSV

SEQ ID NO: 79976 - protein, 100 aa, Homo sapiens
VFKSRTPPEAIALCSSLLEYTPSSRLSPLEACAHSFFDELRCLGTQLPNNRPLPPLFNFSAGACQFLFLELSIQPSLNAILIPPHLRSPAGTTTLTPSSQ

SEQ ID NO: 79977 - protein, 398 aa, Homo sapiens
MSLMVIIMACVGFFLLQGAWPQEGGQDKPLLSTWPSLVVPPEHVTLQCHSNLGFNNFSLYKDDGVPVPELYNRIFWKSLFMGPVTPSHAGTYRCRGSHTHSPSGWSAPSNPLVIMVTGVHRKPSFLALPGHLVKSEETVILQCWSDVMFEHFLLHREGKFNNTLHLIGEHHDGVSKANFSIGPMMPVLAGTYRCYGSVPHSPYQLSAPSDPLDMVIIGLYEKPSLSAQPGPTVQAGENVTLSCSSRSSYDMYHLSREGEAHERRLPAVRSINGTFQADFPLGPATHGGTYRCFGSFRDAPYEWSNSSDPLLVSVTGNPSNSWPSPTEPSSKTGNPRHLHVLIGTSVVKIPFTILLFFLLHRWCSDKKNAAVMDQEPAGNRTVNSEDSDEQDHQEVSYA

SEQ ID NO: 79978 - protein, 71 aa, Homo sapiens
MRRLNRKKTLSLVKELDAFPKVPESYVETSASGGTVSLIAFTTMALLTIMEFSVYQDTWMKYEYEVDKDFS

SEQ ID NO: 79979 - protein, 44 aa, Homo sapiens
MATSQYFDFAQGGGPQYSTLLEDGTLVWLFPAAVTAPMTAAGPH

SEQ ID NO: 79980 - protein, 4752 aa, Homo sapiens
MMMCAATASPAAASSGLGGDGFYPAATFSSSPAPGALFMPVPDGSVAAAGLGLGLPAADSRGHYQLLLSGRALADRYRRIYTAALNDRDQGGGSAGHPASRNKKILNKKKLKRKQKSKSKVKTRSKSENLENTVIIPDIKLHSNPSAFNIYCNVRHCVLEWQKKEISLAAASKNSVQSGESDSDEEEESKEPPIKLPKIIEVGLCEVFELIKETRFSHPSLCLRSLQALLNVLQGQQPEGLQSEPPEVLESLFQLLLEITVRSTGMNDSTGQSLTALSCACLFSLVASWGETGRTLQAISAILTNNGSHACQTIQVPTILNSLQRSVQAVLVGKIQIQDWFSNGIKKAALMHKWPLKEISVDEDDQCLLQNDGFFLYLLCKDGLYKIGSGYSGTVRGHIYNSTSRIRNRKEKKSWLGYAQGYLLYRDVNNHSMTAIRISPETLEQDGTVMLPDCHTEGQNILFTDGEYINQIAASRDDGFVVRIFATSTEPVLQQELQLKLARKCLHACGISLFDLEKDLHIISTGFDEESAILGAGREFALMKTANGKIYYTGKYQSLGIKQGGPSAGKWVELPITKSPKIVHFSVGHDGSHALLVAEDGSIFFTGSASKGEDGESTKSRRQSKPYKPKKIIKMEGKIVVYTACNNGSSSVISKDGELYMFGKDAIYSDSSSLVTDLKGHFVTQVAMGKAHTCVLMKNGEVWTFGVNNKGQCGRDTGAMNQGGKGFGVENMATAMDEDLEEELDEKDEKSMMCPPGMHKWKLEQCMVCTVCGDCTGYGASCVSSGRPDRVPGGICGCGSGESGCAVCGCCKACARELDGQEARQRGILDAVKEMIPLDLLLAVPVPGVNIEEHLQLRQEEKRQRVIRRHRLEEGRGPLVFAGPIFMNHREQALARLRSHPAQLKHKRDKHKDGSGERGEKDASKITTYPPGSVRFDCELRAVQVSCGFHHSVVLMENGDVYTFGYGQHGQLGHGDVNSRGCPTLVQALPGPSTQVTAGSNHTAVLLMDGQVFTFGSFSKGQLGRPILDVPYWNAKPAPMPNIGSKYGRKATWIGASGDQTFLRIDEALINSHVLATSEIFASKHIIGLVPASISEPPPFKCLLINKVDGSCKTFNDSEQEDLQGFGVCLDPVYDVIWRFRPNTRELWCYNAVVADARLPSAADMQSRCSILSPELALPTGSRALTTRSHAALHILGCLDTLAAMQDLKMGVASTEEETQAVMKVYSKEDYSVVNRFESHGGGWGYSAHSVEAIRFSADTDILLGGLGLFGGRGEYTAKIKLFELGPDGGDHETDGDLLAETDVLAYDCAAREKYAMMFDEPVLLQAGWWYVAWARVSGPSSDCGSHGQASITTDDGVVFQFKSSKKSNNGTDVNAGQIPQLLYRLPTSDGSASKGKQQTSEPVHILKRSFARTVSVECFESLLSILHWSWTTLVLGVEELRGLKGFQFTATLLDLERLRFVGTCCLRLLRVYTCEIYPVSATGKAVVEETSKLAECIGKTRTLLRKILSEGVDHCMVKLDNDPQGYLSQPLSLLEAVLQECHNTFTACFHSFYPTPALQWACLCDLLNCLDQDIQEANFKTSSSRLLAAVMSALCHTSVKLTSIFPIAYDGEVLLRSIVKQVSTENDSTLVHRFPLLVAHMEKLSQSEENISGMTSFREVLEKMLVIVVLPVRNSLRRENELFSSHLVSNTCGLLASIVSELTASALGSEVDGLNSLHSVKASANRFTKTSQGRSWNTGNGSPDAICFSVDKPGIVVVGFSVYGGGGIHEYELEVLVDDSEHAGDSTHSHRWTSLELVKGTYTTDDSPSDIAEIRLDKVVPLKENVKYAVRLRNYGSRTANGDGGMTTVQCPDGVTFTFSTCSLSSNGTNQTRGQIPQILYYRSEFDGDLQSQLLSKANEEDKNCSRALSVVSTVVRASKDLLHRALAVDADDIPELLSSSSLFSMLLPLIIAYIGPVAAAIPKVAVEVFGLVQQLLPSVAILNQKYAPPAFNPNQSTDSTTGNQPEQGLSACTTSSHYAVIESEHPYKPACVMHYKVTFPECVRWMTIEFDPQCGTAQSEDVLRLLIPVRTVQNSGYGPKLTSVHENLNSWIELKKFSGSSGWPTMVLVLPGNEALFSLETASDYVKDDKASFYGFKCFAIGYEFSPGPDEGVIQLEKELANLGGVCAAALMKKDLALPIGNELEEDLEILEEAALQVCKTHSGILGKGLALSHSPTILEALEGNLPLQIQSNEQSFLDDFIACVPGSSGGRLARWLQPDSYADPQKTSLILNKDDIRCGWPTTITVQTKDQYGDVVHVPNMKVEVKAVPVSQKKMSLQQDQAKKPQRIPGSPAVTAASSNTDMTYGGLASPKLDVSYEPMIVKEARYIAITMMKVYENYSFEELRFASPTPKRPSENMLIRVNNDGTYCANWTPGAIGLYTLHVTIDGIEIDAGLEVKVKDPPKGMIPPGTQLVKPKSEPQPNKVRKFVAKDSAGLRIRSHPSLQSEQIGIVKVNGTITFIDEIHNDDGVWLRLNDETIKKYVPNMNGYTEAWCLSFNQHLGKSLLVPVDNIFNASQGVRDLDVFSWTSKAFFPQESKTNTDDFFKDINSCCPQEATMQEQDMPFLRGGPGMYKVVKTGPSGHNIRSCPNLRGIPIGMLVLGNKVKAVGEVTNSEGTWVQLDQNSMVEFCESDEGEAWSLARDRGGNQYLRHEDEQALLDQNSQTPPPSPFSVQAFNKGASCSAQGFDYGLGNSKGDQLSAILNSIQSRPNLPAPSIFDQAAKPPSSLVHSPFVFGQPLSFQQPQLQSDRGNISTSSKPASTSGKSELSSKHSRSLKPDGRMSRTTADQKKPRGTESLSASESLILKSDAAKLRSDSHSRSLSPNHNTLQTLKSDGRMPSSSRAESPGPGSRLSSPKPKTLPANRSSPSGASSPRSSSPHDKNLPQKSTAPVKTKLDPPRERSKSDSYTLDPDTLRKKKMPLTEPLRGRSTSPKPKSVPKDSTDSPGSENRAPSPHVVQENLHSEVVEVCTSSTLKTNSLTDSTCDDSSEFKSVDEGSNKVHFSIGKAPLKDEQEMRASPKISRKCANRHTRPKKEKSSFLFKGDGSKPLEPAKQAMSPSVAECARAVFASFLWHEGIVHDAMACSSFLKFHPELSKEHAPIRSSLNSQQPTEEKETKLKNRHSLEISSALNMFNIAPHGPDISKMGSINKNKVLSMLKEPPLHEKCEDGKTETTFEMSMHNTMKSKSPLPLTLQHLVAFWEDISLATIKAASQNMIFPSPGSCAVLKKKECEKENKKSKKEKKKKEKAEVRPRGNLFGEMAQLAVGGPEKDTICELCGESHPYPVTYHMRQAHPGCGRYAGGQGYNSIGHFCGGWAGNCGDGGIGGSTWYLVCDRCREKYLREKQAAAREKVKQSRRKPMQVKTPRALPTMEAHQVIKANALFLLSLSSAAEPSILCYHPAKPFQSQLPSVKEGISEDLPVKMPCLYLQTLARHHHENFVGYQDDNLFQDEMRYLRSTSVPAPYISVTPDASPNVFEEPESNMKSMPPSLETSPITDTDLAKRTVFQRSYSVVASEYDKQHSILPARVKAIPRRRVNSGDTEVGSSLLRHPSPELSRLISAHSSLSKGERNFQWPVLAFVIQHHDLEGLEIAMKQALRKSACRVFAMEAFNWLLCNVIQTTSLHDILWHFVASLTPAPVEPEEEEDEENKTSKENSEQEKDTRVCEHPLSDIVIAGEAAHPLPHTFHRLLQTISDLMMSLPSGSSLQQMALRCWSLKFKQSDHQFLHQSNVFHHINNILSKSDDGDSEESFSISIQSGFEAMSQELCIVMCLKDLTSIVDIKTSSRPAMIGSLTDGSTETFWESGDEDKNKTKNITINCVKGINARYVSVHVDNSRDLGNKVTSMTFLTGKAVEDLCRIKQVDLDSRHIGWVTSELPGGDNHIIKIELKGPENTLRVRQVKVLGWKDGESTKIAGQISASVAQQRNCEAETLRVFRLITSQVFGKLISGDAEPTPEQEEKALLSSPEGEEKATSDADLKEHMVGIIFSRSKLTNLQKQVCAHIVQAIRMEATRVREEWEHAISSKENANSQPNDEDASSDAYCFELLSMVLALSGSNVGRQYLAQQLTLLQDLFSLLHTASPRVQRQVTSLLRRVLPEVTPSRLASIIGVKSLPPADISDIIHSTEKGDWNKLGILDMFLGCIAKALTVQLKAKGTTITGTAGTTVGKGVTTVTLPMIFNSSYLRRGESHWWMKGSTPTQISEIIIKLIKDMAAGHLSEAWSRVTKNAIAETIIALTKMEEEFRSPVRCIATTRLWLALASLCVLDQDHVDRLSSGRWMGKDGQQKQMPMCDNHDDGETAAIILCNVCGNLCTDCDRFLHLHRRTKTHQRQVFKEEEEAIKVDLHEGCGRTKLFWLMALADSKTMKAMVEFREHTGKPTTSSSEACRFCGSRSGTELSAVGSVCSDADCQEYAKIACSKTHPCGHPCGGVKNEEHCLPCLHGCDKSATSLKQDADDMCMICFTEALSAAPAIQLDCSHIFHLQCCRRVLENRWLGPRITFGFISCPICKNKINHIVLKDLLDPIKELYEDVRRKALMRLEYEGLHKSEAITTPGVRFYNDPAGYAMNRYAYYVCYKCRKAYFGGEARCDAEAGRGDDYDPRELICGACSDVSRAQMCPKHGTDFLEYKCRYCCSVAVFFCFGTTHFCNACHDDFQRMTSIPKEELPHCPAGPKGKQLEGTECPLHVVHPPTGEEFALGCGVCRNAHTF

SEQ ID NO: 79981 - protein, 193 aa, Homo sapiens
  MOD_RES (1)..(1): Any amino acid
XDHHTEEDIDKSANSVLIKNLSRTPSSCSSSLDSIKADGTSLDFSTYRSSQMESQFLRDTICEESLREFTVNTPPTPEDLMLSQYVYRPKIQIYREDCEARRQKIEELKLSASNQDKLLVDINKNLWEKMRHCSDKELKAFGIYLNKIKSCFTKMTKVFTHQGKVALYGKLVQSAQNEREKLQIKIDEMDKIL

SEQ ID NO: 79982 - protein, 653 aa, Homo sapiens
MDEQEALNSIMNDLVALQMNRRHRMPGYETMKNKDTGHSNRQKKHNSSSSALLNSPTVTTSSCAGASEKKKFLSDVRIKFEHNGERRIIAFSRPVKYEDVEHKVTTVFGQPLDLHYMNNELSILLKNQDDLDKAIDILDRSSSMKSLRILLLSQDRNHNSSSPHSGVSRQVRIKASQSAGDINTIYQPPEPRSRHLSVSSQNPGRSSPPPGYVPERQQHIARQGSYTSINSEGEFIPETSEQCMLDPLSSAENSLSGSCQSLDSPSFRKSRMSRAQSFPDNRQEYSDRETQLYDKGVKGGTYPRRYHVSVHHKDYSDGRRTFPRIRRHQGNLFTLVPSSRSLSTNGENMGLAVQYLDPRGRLRSADSENALSVQERNVPTKSPSAPINWRRGKLLGQGAFGRVYLCYDVDTGRELASKQVQFDPDSPETSKEVSALECEIQLLKNLQHERIVQYYGCLRDRAEKTLTIFMEYMPGGSVKDQLKAYGALTESVTRKYTRQILEGMSYLHSNMIVHRDIKGANILRDSAGNVKLGDFGASKRLQTICMSGTGMRSVTGTPYWMSPEVISGEGYGRKADVWSLGCTVVEMLTEKPPWAEYEAMAAIFKIATQPTNPQLPSHISEHGRDFLRRIFVEARQRPSAEELLTHHFAQLMY

SEQ ID NO: 79983 - protein, 153 aa, Homo sapiens
MVKLLPAQEAAKIYHTNYVRNSRAVGVMWGTLTICFSVLVMALFIQPYWIGDSVNTPQAGYFGLFSYCVGNVLSSELICKGGPLDFSSIPSRAFKTAMFFVALGMFLIIGSIICFSLFFICNTATVYKICAWMQLAAESHSLAQAGVQWHDLS

SEQ ID NO: 79984 - protein, 227 aa, Homo sapiens
  MOD_RES (1)..(1): Any amino acid
XLLPVLLLLLLRASCPWGQEQGARSPSEEPPEEEIPKEDGILVLSRHTLGLALREHPALLVEFYAPWCGHCQALAPEYSKAAAVLAAESMVVTLAKVDGPAQRELAEEFGVTEYPTLKFFRNGNRTHPEEYTGPRDAEGIAEWLRRRVGPSAMRLEDEAAAQALIGGRDLVVIGFFQDALDMTFGLTDRPRLFQQFGLTKDTVVLFKKFDEGRADFPVDEELGLDLG

SEQ ID NO: 79985 - protein, 532 aa, Homo sapiens
MDDKEPKRWPTLRDRLCSDGFLFPQYPIKPYHLKGIHRAVFYRDLEELKFVLLTRYDINKRDRKERTALHLACATGQPEMVHLLVSRRCELNLCDREDRTPLIKAVQLRQEACATLLLQNGADPNITDVFGRTALHYAVYNEDTSMIEKLLSYGANIEECSEDEYPPLFLAVSQRKVKMVEFLLKKKANINAVDYLGRSALIHAVTLGEKDIVILLLQHNIDVFSRDVYGKLAEDYASEAKNRVIFELIYEYERKKHEELSINSNPVSSQKQPALKATSGKEDSISNIATEIKDGQKSGTVSSQKQPALKGTSDKNDSVSNTATEIKDEQKSGTVSSQKQPALKDTSDKNDSVSNTATEIKDEQKSGTVLPAVEQCLNRSLYRPDAVAQPVTEDEFALESEIISKLYIPKRKIISPRSIEDVLPPVEEAVDRCLYLLDRFAQAVTKDKFALESENISEPYFTNRRTISQQSAEKLDAACGIDKTENGTLFEDQNVDKEGKALPATGQKANVSPEQPPLFTNLLSDLLYPRLL

SEQ ID NO: 79986 - protein, 183 aa, Homo sapiens
MSDMEDDFMCDDEEDYDLTNFPEMMNRYKQLLTYIRSAVTRNYSEKSINSILDYISTSKQMDLLQEFYETTLEALKDAKNDRLWFKTNTKLGKLYLEREEYGKLQKILRQLHQSCQTDDGEDDLKKGTQLLEIYALEIQMYTAQKNNKKLKALYEQSLHIKSAIPHPLIMGVIRECGGKMHLR

SEQ ID NO: 79987 - protein, 278 aa, Homo sapiens
MPIRRTVNSTRETPPKSKLAEGEEEKPEPDISSEESVSTVEEQENETPPATSSEAEQPKGEPENEEKEENKSSEETKKDEKDQSKEKEKKVKKTIPSWATLSASQLARAQKQTPMASSPRPKMDAILTEAIKACFQKSGASVVAIRKYIIHKYPSLELERRGYLLKQALKRELNRGVIKQVKGKGASGSFVVVQKSRKTPQKSRNRKNRSSAVDPEPQVKLEDVLPLAFTRLCEPKEASYSLIRKYVSQYYPKLRVDIRPQLLKNALQRAVERGQLEQ

SEQ ID NO: 79988 - protein, 237 aa, Homo sapiens
MASDGARKQFWKRSNSKLPGSIQHVYGAQHPPFDPLLHGTLLRSTAKMPTTPVKAKRVSTFQEFESNTSDAWDAGEDDDELLAMAAESLNSEVVMETANRVLRNHSQRQGRPTLQEGPGLQQKPRPEAEPPSPPSGDLRLVKSVSESHTSCPAESASDAAPLQRSQSLPHSATVTLGGTSDPSTLSSSALSEREASRLDKFKQLLAGPNTDLGLPSRQCRPETSHSPEKTKRIFCIY

SEQ ID NO: 79989 - protein, 1041 aa, Homo sapiens
MGDPGSEIIESVPPAGPEASESTTDENEDDIQFVSEGPLRPVLEYIDLVSSDDEEPSTSYTDENIKRKDHIDYQKDKVALTLARLARHVEVEKQQKEEKNRAFREKIDFQHAHGLQELEFIRGHSDTEAARLCVDQWLKMPGLKTGTINCGTKSSFRRGGHTWVSGKPILCPIMHCNKEFDNGHLLLGHLKRFDHSPCDPTITLHGPFFSSFACVVCYKKFVTQQQYRDHLFDKEATDDGHNNNLLPQIIQCFACPNCFLLFSRKEECSKHMSGKNHFHQSFKLGDNKGIAHPISFPSFAKKLLISLCKDVPFQVKCVACHKTLRSHMELTAHFRVHCRNAGPVAVAEKSITQVAEKFILRGYCPDCNQVFVDETSTQNHKQNSGHKVRVINSVEESVLLYCHSSEGNKDPSSDLHLLLDQSKFSSLKRTMSIKESSSLECIAIPKKKMNLKDKSHEGVACVQKEKSVVKTWFCECNQRFPSEDAVEKHVFSANTMGYKCVVCGKVCDDSGVIRLHMSRIHGGAHLNNFLFWCRTCKKELTRKDTIMAHVTEFHNGHRYFYEMDEVEGETLPSSSTTLDNLTANKPSSAITVIDHSPANSSPRGKWQCRICEDMFDSQEYVKQHCMSLASHKFHRYSCAHCRKPFHKIETLYRHCQDEHDNEIKIKYFCGLCDLIFNVEEAFLSHYEEHHSIDYVFVSEKTETSIKTEDDFPVIETSNQLTCGCRESYICKVNRKEDYSRCLQIMLDKGKLWFRCSLCSATAQNLTDMNTHIHQVHKEKSDEEEQQYVIKCGTCTKAFHDPESAQQHFHRKHCFLQKPSVAHFGSEKSNLYKFTASASHTERKLKQAINYSKSLDMEKGVENDLSYQNIEEEIVELPDLDYLRTMTHIVFVDFDNWSNFFGHLPGHLNQGTFIWGFQGGNTNWKPPLNCKIYNYLNRIGCFFLHPRCSKRKDAADFAICMHAGRLDEQLPKQIPFTILSGDQGFLELENQFKKTQRPAHILNPHHLEGDMMCALLNSISDTTKGTQLQSQCKPPKRRRLHC

SEQ ID NO: 79990 - protein, 56 aa, Homo sapiens
MAEQLMTLAYDNGINLFDTAEVYAAGKAEVVLGNIIKKKGWRRSSLVITTKIFWGG

SEQ ID NO: 79991 - protein, 170 aa, Homo sapiens
MASLLKVDQEVKLKVDSFRERITSEAEDLVANFFPKKLLELDSFLKEPILNIHDLTQLLIPRIEDGNNFGVSIQEETVAELRTVESEAASYLDQISRYYITRAKLVSKIAKYPHVEDYRRTVTEIDEKEYISLRLIISELRNQYVTLHDMILKNIEKIKRPRSSNAETLY

SEQ ID NO: 79992 - protein, 92 aa, Homo sapiens
MIAPLLCILSYNFNTFAILNVYSKLTMFCTTNSLPMDLLLKQGSLKQEVESFCYQIVSESNDQKVGILQSEDKQLQPSVSKKSEGELSRVKF

SEQ ID NO: 79993 - protein, 94 aa, Homo sapiens
MSDVTIVKEGWVQKRGEYIKNWRPRYFLLKTDGSFIGYKEKPQDVDLPYPLNNFSVASTEGKKEGNKETNLSLSVTMYQALSHMFSHFIFTTTL

SEQ ID NO: 79994 - protein, 2562 aa, Homo sapiens
MPVTEKDLAEDAPWKKIQQNTFTRWCNEHLKCVNKRIGNLQTDLSDGLRLIALLEVLSQKRMYRKYHQRPTFRQMQLENVSVALEFLDRESIKLVSIDSKAIVDGNLKLILGLVWTLILHYSISMPVWEDEGDDDAKKQTPKQRLLGWIQNKIPYLPITNFNQNWQDGKALGALVDSCAPGLCPDWESWDPQKPVDNAREAMQQADDWLGVPQVITPEEIIHPDVDEHSVMTYLSQFPKAKLKPGAPLKPKLNPKKARAYGRGIEPTGNMVKQPAKFTVDTISAGQGDVMVFVEDPEGNKEEAQVTPDSDKNKTYSVEYLPKVTGLHKVTVLFAGQHISKSPFEVSVDKAQGDASKVTAKGPGLEAVGNIANKPTYFDIYTAGAGVGDIGVEVEDPQGKNTVELLVEDKGNQVYRCVYKPMQPGPHVVKIFFAGDTIPKSPFVVQVGEACNPNACRASGRGLQPKGVRIRETTDFKVDTKAAGSGELGVTMKGPKGLEELVKQKDFLDGVYAFEYYPSTPGRYSIAITWGGHHIPKSPFEVQVGPEAGMQKVRAWGPGLHGGIVGRSADFVVESIGSEVGSLGFAIEGPSQAKIEYNDQNDGSCDVKYWPKEPGEYAVHIMCDDEDIKDSPYMAFIHPATGGYNPDLVRAYGPGLEKSGCIVNNLAEFTVDPKDAGKAPLKIFAQDGEGQRIDIQMKNRMDGTYACSYTPVKAIKHTIAVVWGGVNIPHSPYRVNIGQGSHPQKVKVFGPGVERSGLKANEPTHFTVDCTEAGEGDVSVGIKCDARVLSEDEEDVDFDIIHNANDTFTVKYVPPAAGRYTIKVLFASQEIPASPFRVKVDPSHDASKVKAEGPGLSKAGVENGKPTHFTVYTKGAGKAPLNVQFNSPLPGDAVKDLDIIDNYDYSHTVKYTPTQQGNMQVLVTYGGDPIPKSPFTVGVAAPLDLSKIKLNGLENRVEVGKDQEFTVDTRGAGGQGKLDVTILSPSRKVVPCLVTPVTGRENSTAKFIPREEGLYAVDVTYDGHPVPGSPYTVEASLPPDPSKVKAHGPGLEGGLVGKPAEFTIDTKGAGTGGLGLTVEGPCEAKIECSDNGDGTCSVSYLPTKPGEYFVNILFEEVHIPGSPFKADIEMPFDPSKVVASGPGLEHGKVGEAGLLSVDCSEAGPGALGLEAVSDSGTKAEVSIQNNKDGTYAVTYVPLTAGMYTLTMKYGGELVPHFPARVKVEPAVDTSRIKVFGPGIEGKDVFREATTDFTVDSRPLTQVGGDHIKAHIANPSGASTECFVTDNADGTYQVEYTPFEKGLHVVEVTYDDVPIPNSPFKVAVTEGCQPSRVQAQGPGLKEAFTNKPNVFTVVTRGAGIGGLGITVEGPSESKINCRDNKDGSCSAEYIPFAPGDYDVNITYGGAHIPGSPFRVPVKDVVDPSKVKIAGPGLGSGVRARVLQSFTVDSSKAGLAPLEVRVLGPRADDTDSQSWRSPLKALSEFFKGDPKGDFNKTGLVEPVNVVDNGDGTHTVTYTPSQEGPYMVSVKYADEEIPRSPFKVKVLPTYDASKVTASGPGLSSYGVPASLPVDFAIDARDAGEGLLAVQITDQEGKPKRAIVHDNKDGTYAVTYIPDKTGRYMIGVTYGGDDIPLSPYRIRATQTGDASKCLATGPGIASTVKTGEEVGFVVDAKTAGKGKVTCTVLTPDGTEAEADVIENEDGTYDIFYTAAKPGTYVIYVRFGGVDIPNSPFTVMVTEEAYVPVSDMNGLGFKPFDLVIPFAVRKGEITESPLQFYVNYPNSGSVSAYGPGLVYGVANKTATFTIVTEDAGEGGLDLAIEGPSKAEISCIDNKDGTCTVTYLPTLPGDYSILVKYNDKHIPGSPFTAKITDDSRRCSQVKLGSAADFLLDISETDLSSLTASIKAPSGRDEPCLLKRLPNNHIGISFIPREVGEHLVSIKKNGNHVANSPVSIMVVQSEIGDARRAKVYGRGLSEGRTFEMSDFIVDTRDAGYGGISLAVEGPSKVDIQTEDLEDGTCKVSYFPTVPGVYIVSTKFADEHVPGSPFTVKISGEGRVKESITRTSRAPSVATVGSICDLNLKIPEINSSDMSAHVTSPSGRVTEAEIVPMGKNSHCVRFVPQEMGVHTVSVKYRGQHVTGSPFQFTVGPLGEGGAHKVRAGGPGLERGEAGVPAEFSIWTREAGAGGLSIAVEGPSKAEITFDDHKNGSCGVSYIAQEPGNYEVSIKFNDEHIPESPYLVPVIAPSDDARRLTVMSLQESGLKVNQPASFAIRLNGAKGKIDAKVHSPSGAVEECHVSELEPDKYAVRFIPHENGVHTIDVKFNGSHVVGSPFKVRVGEPGQAGNPALVSAYGTGLEGGTTGIQSEFFINTTRAGPGTLSVTIEGPSKVKMDCQETPEGYKVMYTPMAPGNYLISVKYGGPNHIVGSPFKAKVTGQRLVSPGSANETSSILVESVTRSSTETCYSAIPKASSDASKVTSKGAGLSKAFVGQKSSFLVDCSKAGSNMLLIGVHGPTTPCEEVSMKHVGNQQYNVTYVVKERGDYVLAVKWGEEHIPGSPFHVTVP

SEQ ID NO: 79995 - protein, 252 aa, Homo sapiens
GQGIAAALIHLPSTGNKHWRPRSPEASTDCCWLHQATGSGSVTQAGVQWYDLGSLQPLPPRFKRFSCLSLPSSWDYRSSWELPDLQEGKIQAISDSDGVNYPWYGNTTETCTIVGPTKRDSKFIISMNDNFYPSVTWAVPVSESNVAKLTNIYRDQSFTTWLVATNTSTNDMIILQTLHWRMQLSIEVNPNRPLGQRARLREPIAQDQPKILSKNEPIPPSALVKPNANDAQVLMWRPKYGQPLVVIPPKHR

SEQ ID NO: 79996 - protein, 139 aa, Homo sapiens
MSFRKVVRQSKFRHVFGQPVKNDQCYEDIRVSRVTWDSTFCAVNPKFLAVIVEASGGGAFLVLPLSKTGRIDKAYPTVCGHTGPVLDIDWCPHNDEVIASGSEDCTVMVWQIPENGLTSPLTEPVVVLEGHTKRVGIIA

SEQ ID NO: 79997 - protein, 258 aa, Homo sapiens
MKSLLNAFTKKEVPFREAPAYSNRRRRPPNTLAAPRVLLRSNSDNNLNASAPDWAVCSTATSHRSLSPQLLQQMPSKPEGAAKTIGSYVPGPRSRSPSLNRLGGAGEDGKRPQPLWHVGSPFALGANKDSLSAFEYPGPKRKLYSAVPGRLFVAVKPYQPQVDGEIPLHRGDRVKVLSIGEGGFWEGSARGHIGWFPAECVEEVQCKPRDSQAETRADRSKKLFRHYTVGSYDSFDTSRLQTHLGVPATLGDSWSLDL

SEQ ID NO: 79998 - protein, 847 aa, Homo sapiens
MRYVRRCVPLPGAPARVTDVELKRLKDAFKRTCGLSYYMGQHCFIREVLGDGVPPKVAEVIYCSFGGTSKGLHFNNLIVGLVLLTRGKDEEKAKYIFSLFSSESGNYVIREEMERMLHVVDGKVPDTLRKCFSEGEKVNYEKFRNWLFLNKDAFTFSRWLLSGGVYVTLTDDSDTPTFYQTLAGVTHLEESDIIDLEKRYWLLKAQSRTGRFDLETFGPLVSPPIRPSLSEGLFNAFDENRDNHIDFKEISCGLSACCRGPLAERQKFCFKVFDVDRDGVLSRVELRDMVVALLEVWKDNRTDDIPELHMDLSDIVEGILNAHDTTKMGHLTLEDYQIWSVKNVLANEFLNLLFQVCHIVLGLRPATPEEEGQIIRGWLERESRYGLQAGHNWFIISMQWWQQWKEYVKYDANPVVIEPSSVLNGGKYSFGTAAHPMEQVEDRIGSSLSYVNTTEEKFSDNISTASEASETAGSGFLYSATPGADVCFARQHNTSDNNNQCLLGANGNILLHLNPQKPGAIDNQPLVTQEPVKATSLTLEGGRLKRTPQLIHGRDYEMVPEPVWRALYHWYGANLALPRPVIKNSKTDIPELELFPRYLLFLRQQPATRTQQSNIWVNMGNVPSPNAPLKRVLAYTGCFSRMQTIKEIHEYLSQRLRIKEEDMRLWLYNSENYLTLLDDEDHKLEYLKIQDEQHLVIEVRNKDMSWPEEMSFIANSSKIDRHKVPTEKGATGLSNLGNTCFMNSSIQCVSNTQPLTQYFISGRHLYELNRTNPIGMKGHMAKCYGDLVQELWSGTQKNVAPLKLRWTIAKYAPRFNGFQQQDSQELLAFLLDGLHEDLNRVHEKPYV

SEQ ID NO: 79999 - protein, 131 aa, Homo sapiens
MLAGLELLTSAFNLDYYTEVLDLSYLLDHLASDPFFRHYRQLNEKLVQLIEDYSLVSFIPLNIQDKESIQRVLQAVDKANGYCFRAQEQRSLEAMMSAAMGADFHFSSTLGIQEKYLAPSNQSVEQEAMQL

SEQ ID NO: 80000 - protein, 156 aa, Homo sapiens
MARQHARTLWYDRPRYVFMEFCVEDSTDVHVLIEDHRIVFSCKNADGVELYNEIEFYAKVNSKDSQDKRSSRSITCFVRKWKEKVAWPRLTKEDIKPVWLSVDFDNWRDWEGDEEMELAHVEHYAELLKKVSTKRPPPAMDDLDDDSDSADDATSN

SEQ ID NO: 80001 - protein, 170 aa, Homo sapiens
ERTQEELRELANKYNGAVNEIKDLSDKLKVAEGKQEEIQQKGQAEKKELQHKIDEMEEKEQELQAKIEALQADNDFTNERLTALQGIQVDDFLPKINGSTEKEHLLSKSGGDCTFIHQFIECQKKLIVEGHLTKAVEETKLSKENQTRAKESDFSDTLSPSKEKSSDDTT

SEQ ID NO: 80002 - protein, 122 aa, Homo sapiens
MDSGTRPVGSCCSSPAGLSREYKLVMLGAGGVGKSAMTMQFISHRFPEDHDPTIEDAYKIRIRIDDEPANLDILDTAGQAEFTAMRDQYMRAGEGFIICYSITDRRSFHEVREFKQLIYRVR

SEQ ID NO: 80003 - protein, 7 aa, Homo sapiens
MGIRGLM

SEQ ID NO: 80004 - protein, 34 aa, Homo sapiens
  MOD_RES (1)..(1): Any amino acid
XIELLKELLDLLQDMVVMLLSLLEADRPEEEEED

SEQ ID NO: 80005 - protein, 64 aa, Homo sapiens
KDELYLNLVLEYVPETVYRVARHFTKAKLTIPILYVKGVCHRDIKPQNLLVDPDTAVLKLCDFG

SEQ ID NO: 80006 - protein, 151 aa, Homo sapiens
MSDKSELKAELERKKQRLAQIREEKKRKEEERKKKETDQKKEAVAPVQEESDLEKKRREAEALLQSMGLTPESPIAEQPLRVVTADTCLFHYLVPPPMSPSSKSVSTPSEAGSQDSGDGAVGSRTLHWDTDPSVLQLHSDSDLGRGPIKLG

SEQ ID NO: 80007 - protein, 56 aa, Homo sapiens
STGIFFVETQNVQRLLETEMWAELCPSAKGAIILYNRVQGSPTGAALGSPALLPPL

SEQ ID NO: 80008 - protein, 617 aa, Homo sapiens
MARLTKRRQADTKAIQHLWAAIEIIRNQKQIANIDRITKYMSRVHGMHPKETTRQLSLAVKDGLIVETLTVGCKGSKAGIEQEGYWLPGDEIAYSMQPFSRTAAPNKDWETENHDWYCFECHLPGEVLICDLCFRVYHSKCLSDEFRLRDSSSPWQCPVCRSIKKKNTNKQEMGTYLRFIVSRMKERAIDLNKKGKDNKHPMYRRLVHSAVDVPTIQEKVNEGKYRSYEEFKADAQLLLHNTVIFYGADSEQADIARMLYKDTCHELDELQLCKNCFYLSNARPDNWFCYPCIPNHELVWAKMKGFGFWPAKVMQKEDNQVDVRFFGHHHQRAWIPSENIQDITVNIHRLHVKRSMGWKKACDELELHQRFLREGRFWKSKNEDRGEEEAESSISSTSNEQLKVTQEPRAKKGRRNQSVEPKKEEPEPETEAVSSSQEIPTMPQPIEKVSVSTQTKKLSASSPRMLHRSTQTTNDGVCQSMCHDKYTKIFNDFKDRMKSDHKRETERVVREALEKLRSEMEEEKRQAVNKAVANMQGEMDRKCKQVKEKCKEEFVEEIKKLATQHKQLISQTKKKQWCYNCEEEAMYHCCWNTSYCSIKCQQEHWHAEHKRTCRRKR

SEQ ID NO: 80009 - protein, 134 aa, Homo sapiens
MKRRSVTMTDGLTADKVTRSDGCPTSTSLPRPRDSIRSCALSMDQIPDLHSPMSPISESPSSPAYSTVTRVHAAPAAPSATALPASPVARRSSEPQLCPGSAPKTHGESDKGPHTSPSHTLGKASPSPSLSSYS

SEQ ID NO: 80010 - protein, 75 aa, Homo sapiens
MENLTKHSIECSSFRDPPQALPETQLCVSSSYSLWSSDCKAISMPRQGLSWRAMEEDRPAGCRFCSRACTMREIF

SEQ ID NO: 80011 - protein, 25 aa, Homo sapiens
MVRTDGHTLSEKRNYQVTNSMFGAS

SEQ ID NO: 80012 - protein, 292 aa, Homo sapiens
MAGARAAAAAASAGSSASSGNQPPQELGLGELLEEFSRTQYRAKDGSGTGGSKCWDLVQQTQNYLKLLLSLVNSDDDSGLLVHCISGWDRTPLFISLLRLSLWADGLIHTSLKPTEILYLTVAYDWFLFGHMLVDRLSKGEEIFFFCFNFLKHITSEEFSALKTQRRKSLPARDGGFTLEDICMLRRKDRGSTTSLGSDFSLVMESSPGATGSFTYEAVELVPAGAPTQAAWLAALSDRETRLQEVRSAFLAAYSSTVGLRAVAPSPSGAIGGLLEQFARGVGLRSISSNAL

SEQ ID NO: 80013 - protein, 107 aa, Homo sapiens
ENLKSGVYPLKEASGCPGADRNLLVYSFYEKGPLTFRDVAIEFSLEEWQCLDTAQQDLYRKVMLENYRNLVFLGIAVSKPDLITCLEQGKEPWNMKRHAMVDQPPGR

SEQ ID NO: 80014 - protein, 95 aa, Homo sapiens
MRLKISLLKEPKHQELVSCVGWTTAEELYSCSDDHQIVKWNLLTSETTQIVKLPDDIYPIDFHWFPKSLGVKKQTQAESFVLTSSDDFSNVISFR

SEQ ID NO: 80015 - protein, 239 aa, Homo sapiens
MSKIEHFMPLLVQREEEGALAPLLSHGQVHFLWIKHSNLYLVATTSKNANASLVYSFLYKTIEVFCEYFKELEEESIRDNFVIVYELLDELMDFGFPQTTDSKILQEYITQQSNKLETGKSRVPPTVTNAVSWRSEGIKYKKNEVFIDVIESVNLLVNANGSVLLSEIVGTIKLKVFLSGMPELRLGLNDRVLFELTGRSKNKSVELEDVKFHQCVRLSRFDNDRTISFIPPDGDFELM

SEQ ID NO: 80016 - protein, 150 aa, Homo sapiens
VKFEIWDTAGQERYHSLAPMYYRGAQAAIVVYDITNTDTFARAKNWVKELQRQASPNIVIALAGNKADLASKRAVEFQEAQAYADDNSLLFMETSAKTAMNVNEIFMAIGQLLLLPSSLHHSKGISPVCWSRVGLRGPFTTLFFFFFFFF

SEQ ID NO: 80017 - protein, 212 aa, Homo sapiens [sequence omitted]

SEQ ID NO: 80018 - protein, 311 aa, Homo sapiens
MEIKNYSSSTSGFILLGLSSNPQLQKPLFAIFLIMYLLAAVGNVLIIPAIYSDPRLHTPMYFFLSNLSFMDICFTTVIVPKMLVNFLSETKVISYVGCLAQMYFFMAFGNTDSYLLASMAIDRLVAICNPLHYDVVMKPRHCLLMLLGSCSISHLHSLFRVLLMSRLSFCASHIIKHFFCDTQPVLKLSCSDTSSSQMVVMTETLAVIVTPFLCIIFSYLRIMVTVLRIPSAAGKWKAFSTCGSHLTAVALFYGSIIYVYFRPLSMYSVVRDRVATVMYTVVTPMLNPFIYSLRNKDMKRGLKKLQDRIYR

SEQ ID NO: 80019 - protein, 147 aa, Homo sapiens
  MOD_RES (1)..(1): Any amino acid
XSLASDSQRLKTPNIYSDEVLRGTKLPTGVDHMASPLVQTSRSRFPPLVTETRGQNTAVPGCRLVSYRGRHLQNRVLSAMPDGTERSRLRERTATLERLSRPSTTHTFRQSDTPRKSSLTQMEFAAHTWTGQSILTGGNSKCLGPVA

SEQ ID NO: 80020 - protein, 215 aa, Homo sapiens
MRPKTGQVGCETPEELGPGPRQRWPLLLLGLAMVAHGLLRPMVAPQSGDPDPGASVGSSRSSLRSLWGSRLLLQPSPQRADPRCWPRGFWSEPQSLCYVFGTGTKVTVLGQPKANPTVTLFPPSSEELQANKATLVCLISDFYPGAVTVAWKADGSPVKAGVETTKPSKQSNNKYAASSYLSLTPEQWKSHRSYSCQVTHEGSTVEKTVAPTECS

SEQ ID NO: 80021 - protein, 126 aa, Homo sapiens
  MOD_RES (1)..(1): Any amino acid
XPASRNQRILYTVLECQPLFDSSDMTIAEWVCLAQTIKRHYEQYHGFVVIHGTDTMAFAASMLSFMLENLQKTVILTGAQVPIHALWSDGRENLLGALLMAGQYVIPELLTKDLRGEMTPPSVEER

SEQ ID NO: 80022 - protein, 165 aa, Homo sapiens
MQNLNDRLASYLEKVRALEEANADLEVKIRDWHLKQSPASPERDYSPYYKTIEELRDKILTATIENNRVILEIDNARLAADDFRLKYENELALRQSVEADINGLRRVLDELTLSKTDLEMQIESLNEELAYMKKNHEEEMKEFSNQVVGQVNVEMDATPGIDLTR

SEQ ID NO: 80023 - protein, 227 aa, Homo sapiens
MEPQGYPAFGWDHSLHKRKRLPPVKRSLVYYLKNREVRLQNETSYSRVLHGYAAQQLPSLLKEREFHLGTLNKVFASQWLNHRQVVCGTKCNTLFVVDVQTSQITKIPILKDREPGGVTQQGCGIHAIELNPSRTLLATGGDNPNSLAIYRLPTLDPVCVGDDGHKDWIFSIAWISDTMAVSGSRDGSMGLWEVTDDVLTKSDARHNVSRVPVYAHITHKALKDIPK

SEQ ID NO: 80024 - protein, 70 aa, Homo sapiens
MGEDDDSHPSEMRLYKNIPQMSFDDTEREPDQTFSLNRDLTGELEYATKISRFSNVYHLSIHISKNFGAD

SEQ ID NO: 80025 - protein, 128 aa, Homo sapiens
MENWSKDITHSYLEQETTGINKSTQPDEQLTMNSEKSMHRKSTELVNEITCENTEWPGQRSTNFQIISSYPDDESVYCTTEKYNVMEHRHNDMHYECMTPCQVTSDSDKEKTIAFLLKELDILRTSNK

SEQ ID NO: 80026 - protein, 67 aa, Homo sapiens
QTRQKALMALCDLMHDPECIYKAMNIGCMENLKALLKDSNSMVRIKTTEVLHITASHSVGSSDRKGE

SEQ ID NO: 80027 - protein, 354 aa, Homo sapiens
MAFAPMGPEASFFDVLDRHRESLLAALRRGGREPPTGGSRLASRFEDSVGLQMVSHCTTRKIKSDSPKSAQKFSLILKILSMIYKLVQSNTYATKRDIYYTDSQLFGNQTVVDNIINDISCMLKVSRRSLHILSTSKGLIAGNLRYIEEDGTKVNCTCGATAVAVPSNIQGIRNAKFVLIVEKDATFQRLLDDNFCNKLSPCIMITGKGVPDLNTRLLVKKLWDTFHVPVFTLVDADPHGIEIMCIYKYGSMSMSFEAHHLTVPAIRWLGLLPSDLKRLNVPKDSLIPLTKRDQMKLDSILRRPYVTCQPFWRKEMEIMADSKMKAEIQALTFLSSDYLSRVYLPNKLKFGGWI

SEQ ID NO: 80028 - protein, 162 aa, Homo sapiens
MGDKIWLPFPVLLLAALPPVLLPGAAGFTPSLDSDFTFTLPAGQKECFYQPMPLKASLEIEYQVLDGAGLDIDFHLASPEGKTLVFEQRKSDGVHTVETEVGDYMFCFDNTFSTISEKVIFFELILDNMGEQAQEQEDWKKYITGTDILDMKLEDILVSMVF

SEQ ID NO: 80029 - protein, 190 aa, Homo sapiens
MLPLFGRQRTEWLLQAAWCPEEAAEPQAMVPSRRTWNLGATPSLRGLWRVGRAPEPEPGMARPAPAPASPAARPFPHTGPGRLRTGRGKDTPVCGDEDSSARSAARPALAQCRALSVDWAGPGSPHGLYLTLQVEHLKEKLISQAQEVSRLRSELGGTDLEKHRDLLMVENERLRQEMRRCEAELQELRT

SEQ ID NO: 80030 - protein, 46 aa, Homo sapiens
  MOD_RES (1)..(1): Any amino acid
XINLITGHLEEPMPNPIDEMTEEQKEYEAMKLVNMLDKLSRGIHIF

SEQ ID NO: 80031 - protein, 828 aa, Homo sapiens
MDPPRPALLALLALPALLLLLLAGARAEEEMLENVSLVCPKDATRFKHLRKYTYNYEAESSSGVPGTADSRSATRINCKVELEVPQLCSFILKTSQCTLKEVYGFNPEGKALLKKTKNSEEFAAAMSRYELKLAIPEGKQVFLYPEKDEPTYILNIKRGIISALLVPPETEEAKQVLFLDTVYGNCSTHFTVKTRKGNVATEISTERDLGQCDRFKPIRTGISPLALIKGMTRPLSTLISSSQSCQYTLDAKRKHVAEAICKEQHLFLPFSYKNKYGMVAQVTQTLKLEDTPKINSRFFGEGTKKMGLAFESTKSTSPPKQAEAVLKTLQELKKLTISEQNIQRANLFNKLVTELRGLSDEAVTSLLPQLIEVSSPITLQALVQCGQPQCSTHILQWLKRVHANPLLIDVVTYLVALIPEPSAQQLREIFNMARDQRSRATLYALSHAVNNYHKTNPTGTQELLDIANYLMEQIQDDCTGDEDYTYLILRVIGNMGQTMEQLTPELKSSILKCVQSTKPSLMIQKAAIQALRKMEPKDKDQEVLLQTFLDDASPGDKRLAAYLMLMRSPSQADINKIVQILPWEQNEQVKNFVASHIANILNSEELDIQDLKKLVKEALKESQLPTVMDFRKFSRNYQLYKSVSLPSLDPASAKIEGNLIFDPNNYLPKESMLKTTLTAFGFASADLIEIGLEGKGFEPTLEALFGKQGFFPDSVNKALYWVNGQVPDGVSKVLVDHFGYTKDDKHEQDMVNGIMLSVEKLIKDLKSKEVPEARAYLRILGEELGFASLHDLQLLGKLLLMDRPDSLTIPAAQARKDACTFFRDGGLP

SEQ ID NO: 80032 - protein, 118 aa, Homo sapiens
MFKKLKQKISEEQQQLQQALAPAQASSNSSTPTRMRSRTSSFTEQLDEGTPNRELLAGMIAEPAFLSEYTIFALDSSKHPKTQSDSVNASTHASKSPDSVNGSEPSIPQSGDTQSFAQ

SEQ ID NO: 80033 - protein, 280 aa, Homo sapiens
  MOD_RES (1)..(1): Any amino acid
XRYTDIILYASGSLALAVLLLLAGLYRGQALHGRHPRPPATVQKLSRFPLARQSGSSGKSSSSLVRGVRLSSSGPALLAGLVSLDLPLDPLWEFPRDRLVLGKPLGEGCFGQVVRAEAFGMDPARPDQASTVAVKMLKDNASDKDLADLVSEMEVMKLIGRHKNIINLLGVCTQEGPLYVIVECAAKGNLREFLRARRPPGPDLSPDGPRSSEGPLSFPVLVSCAYQVARGMQYLESRKCIHRDLAARNVLVTEDNVMKIADFGLARGVHHIDYYKKTSN

SEQ ID NO: 80034 - protein, 369 aa, Homo sapiens
MAESSDKLYRVEYAKSGRASCKKCSESIPKDSLRMAIMVQSPMFDGKVPHWYHFSCFWKVGHSIRHPDVEVDGFSELRWDDQQKVKKTAEAGGVTGKGQDGIGSKAEKTLGDFAAEYAKSNRSTCKGCMEKIEKGQVRLSKKMVDPEKPQLGMIDRWYHPGCFVKNREELGFRPEYSASQLKGFSLLATEDKEALKKQLPGVKSEGKRKGDEVDGVDEVAKKKSKKEKDKDSKLEKALKAQNDLIWNIKDELKKVCSTNDLKELLIFNKQQVPSGESAILDRVADGMVFGALLPCEECSGQLVFKSDAYYCTGDVTAWTKCMVKTQTPNRKEWVTPKEFREISYLKKLKVKKQDRIFPPETSASRRWKR

SEQ ID NO: 80035 - protein, 112 aa, Homo sapiens
FHKQQGRYPGVSNYQVEEDIGKLKSCLTGFLQEYGLSVMVKDDYVHELLIKIHVSVVSFSCRYGAAEPHTIAAFLGGAAAQEVIKIITKQFVIFNNTYIYSGMSQTSATFQL

SEQ ID NO: 80036 - protein, 155 aa, Homo sapiens
MKYVKVKVNFSDRVFKAVSDICKTFNIRHPEELSLLKKPRDPTKKKKKKLDDQSEDEALELEGPLITPGSGSIYSSPGLYSKTMTPTYDAHDGSPLSPTSAWFGDSALSEGNPGILAVSQPITSPEILAKMFKPQALLDKAKINQGWLDSSRSLM

SEQ ID NO: 80037 - protein, 140 aa, Homo sapiens
MVGEDADLPCHLFPTMSAETMELRWVSSSLRQVVNVYADGKEVEDRQSAPYRGRTSILRDGITAGKAALRIHNVTASDSGKYLCYFQDGDFYEKALVELKVAALGSDLHIEVKGYEDGGIHLECRSTGWYPQPQIKWSDT

SEQ ID NO: 80038 - protein, 196 aa, Homo sapiens
GVGEAAQGGEPGQPAQPPPQPHPPPPQQQHKEEMAAEAGEAVASPMDDGDRAEWADIDPVPQNDGPNPVVQIIYSDKFRDVYDYFRAVLQRDERSERAFKLTRDAIELNAANYTVWHFRRVLLKSLQKDLHEEMNYITAIIEEQPKNYQVWHHRRVLVEWLRDPSQELEFIADILNQDAKNYHAWQHRQWVIQEFK

SEQ ID NO: 80039 - protein, 266 aa, Homo sapiens
MDKILEGLVSSSHPLPLKRVIVRKVVESAEHWLDEAQCEAMFDLTTRLILEGQDPFQRQVGHQVLEAYARYHRPEFESFFNKTFVLGLLHQGYHSLDRKDVAILDYIHNGLKLIMSCPSVLDLFSLLQVEVLRMVCERPEPQLCARLSDLLTDFVQCIPKGKLSITFCQQLVRTIGHFQCVSTQERELREYVSQVTKVSNLLQNIWKAEPATLLPSLQEVFASISSTDASFEPSVALASLVQHIPLQMITVLIRSLTTDPNVKDND

SEQ ID NO: 80040 - protein, 81 aa, Homo sapiens
MAAGTSSYWEDLRKQARQLENELDLKLVSFSKLCTSYSHSSTRDGRRDRYRKNYLENISQEILPQTETGFVELLQPNSPSK

SEQ ID NO: 80041 - protein, 21 aa, Homo sapiens
  MOD_RES (1)..(1): Any amino acid
XTQGGSEKLVFGKGTKLTVNP

SEQ ID NO: 80042 - protein, 88 aa, Homo sapiens
MAKPTSKDSGLKEKFKILLGLGTPRPNPRSAEGKQTEFIITAEILRELSMECGLNNRIRMIGQICEVAKTKKFEEPERPLEARHAVLA

SEQ ID NO: 80043 - protein, 64 aa, Homo sapiens
LSSSQGTIETSLQDIDSRLSPGGSLADAWAHQEGTHPKDRKKTTSPVKLHDRDLLSVQKRQSRT

SEQ ID NO: 80044 - protein, 1125 aa, Homo sapiens
MQRFLQLPGAVVRPGVRGACGADQEAASPVLAPEGGPPLRYQALEPEELRWLQAQEEDTTPEASLEGPCPEASQSQSQPLRHDDLKEMLDTNKDSLKLEAMKRIVAMIARGKNASDLFPAVVKNVACKNIEVKKLVYVYLVRYAEEQQDLALLSISTFQRGLKDPNQLIRASALRVLSSIRVPIIVPIMMLAIKEAASDMSPYVRKTAAHAIPKLYSLDSDQKDQLIEVIEKLLADKTTLVAGSVVMAFEEVCPERIDLIHKNYRKLCNLLIDVEEWGQVVIISMLTRYARTQFLSPTQNESLLEENAEKAFYGSEEDEAKGAGSEETAAAAAPSRKPYVMDPDHRLLLRNTKPLLQSRSAAVVMAVAQLYFHLAPKAEVGVIAKALVRLLRSHSEVQYVVLQNVATMSIKRRGMFEPYLKSFYIRSTDPTQIKILKLEVLTNLANETNIPTVLREFQTYIRSMDKDFVAATIQAIGRCATNIGRVRDTCLNGLVQLLSNRDELVVAESVVVIKKLLQMQPAQHGEIIKHLAKLTDNIQVPMARASILWLIGEYCEHVPRIAPDVLRKMAKSFTAEEDIVKLQVINLAAKLYLTNSKQTKLLTQYVLSLAKYDQNYDIRDRARFTRQLIVPSEQGGALSRHAKKLFLAPKPAPVLESSFKDRDHFQLGSLSHLLNAKATGYQELPDWPEEAPDPSVRNVEVPEWTKCSNREKRKEKEKPFYSDSEGESGPTESADSDPESESESDSKSSSESGSGESSSESDNEDQDEDEEKGRGSESEQSEEDGKRKTKKKVPERKGEASSSDEGSDSSSSSSESEMTSESEEEQLEPASWSRKTPPSSKSAPATKEISLLDLEDFTPPSVQPVSPPAIVSTSLAADLEGLTLTDSTLVPSLLSPVSGVGRQELLHRVAGEGLAVDYTFSRQPFSGDPHMVSVHIHFSNSSDTPIKGLHVGTPKLPAGISIQEFPEIESLAPGESATAVMGINFCDSTQAANFQLCTQTRQFYVSIQPPVGELMAPVFMSENEFKKEQGKLMGMNEITEKLMLPDTCRSDHIVVQKVTATANLGRVPCGTSDEYRFAGRTLTGGSLVLLTLDARPAGAAQLTVNSEKMVIGTMLVKDVIQALTQ

SEQ ID NO: 80045 - protein, 168 aa, Homo sapiens
MGKKQNKKKVEEVLEEEEEEYVVEKVLDRRVVKGKVEYLLKWKGFSDEDNTWEPEENLDCPDLIAEFLQSQKTAHETDKSEGGKRKADSDSEDKGEESKPKKKKEEVRIESEKPRGFARGLEPERIIGATDSSGELMFLMKWKNSDEADLVPAKEANVKCPQVVISFY

SEQ ID NO: 80046 - protein, 187 aa, Homo sapiens
  MOD_RES (1)..(1): Any amino acid
XSTCKKCDCSGNSDPNLIFEDCDEVTGQCRNCLRNTTGFKCERCAPGYYGDARIAKNCAVCNCGGGPCDSVTGECLEEGFEPPTGCDKCVWDLTDDLRLAALSIEEGKSGVLSVSSGAAAHRHVNEINATIYLLKTKLSERENQYALRKIQINNAENTMKSLLSDVEELVEKHWNKPRRRLELQEGV

SEQ ID NO: 80047 - protein, 141 aa, Homo sapiens
MKILDVGCGGGLLTEPGGSLFITTINKTQLSYALGIVFSEQIASIVPKGTHTWEKFVSPETLESILESNGLSVQTVVGMLYNPFSGYWHWSENTSLNYAAYAVKSRVQEHPASAEFVLKGETEELQANACTNPAVHEKLKK

SEQ ID NO: 80048 - protein, 122 aa, Homo sapiens
MARSLGVLVALPFPLPVGFNAEEAHNIVKECVDGVLGGEDYNHNNINQWTASIVEQSLTHLVKLGKAYKYIVTCAVVQKSAYGFHTASSCFWDTTSDGTCTVRWENRTMNCIVNVFAIAIVL

SEQ ID NO: 80049 - protein, 371 aa, Homo sapiens
MDKLDANVSSEEGFGSVEKVVLLTFLSTVILMAILGNLLVMVAVCWDRQLRKIKTNYFIVSLAFADLLVSVLVMPFGAIELVQDIWIYGEVFCLVRTSLDVLLTTASIFHLCCISLDRYYAICCQPLVYRNKMTPLRIALMLGGCWVIPTFISFLPIMQGWNNIGIIDLIEKRKFNQNSNSTYCVFMVNKPYAITCSVVAFYIPFLLMVLAYYRIYVTAKEHAHQIQMLQRAGASSESRPQSADQHSTHRMRTETKAAKTLCIIMGCFCLCWAPFFVTNIVDPFIDYTVPGQVWTAFLWLGYINSGLNPFLYAFLNKSFRRAFLIILCCDDERYRRPSILGQTVPCSTTTINGSTHVLRAVRGNRNSTSSA

SEQ ID NO: 80050 - protein, 184 aa, Homo sapiens
  MOD_RES (1)..(1): Any amino acid
XFIFLPRPGTSLGRIRKADKEKGKEKLEEDEAAAASTMAVSASLMPPIWDKTIPYDGESFHLEYMDLDEFLLENGIPASPTHLAHNLLLPVAELEGKESASSSTASPPSSSTAIFQPSETVSSTESSLEKERETPSPIDPNCVEVDVNFNPDPADLVLSSVPGGELFNPRKHKFAEEDLKPQPM

SEQ ID NO: 80051 - protein, 205 aa, Homo sapiens
MQSALVGSWHNNGFYGHYRSQFKSESAREYHLAAKPQPPAVFLQRCQEPAQRHFFSKHDNRTSFDKEGPYCLLQGIGRRKDLERLWQRHTFLRWAPCEIELRQQGPLESSYQADFRPGPGLSGLPQHLIHFVQVQPSHTRTTYQQNFCCPSQGGHYGSYKVGPQAPVTDVLPDLPGIPRPKLLQHYLHAGVSECLNWSRALNKDS

SEQ ID NO: 80052 - protein, 414 aa, Homo sapiens
MEDDAPVIYGLEFQARALTPQTAETDAIRFLVGTQSLKYDNQIHIIDFDDENNIINKNVLLHQAGEIWHISASPADRGVLTTCYNRTFCCVLSLDSFGALGKSAAQLFIALATSSDSKVLTCAAVWRMPKELESGSHESPDDSSSTAQTLELLCHLDNTAHGNMACVVWEPMGDGKKIISLADNHILLWDLQESSSQAVLASSASLEGKGQLKFTSGRWSPHHNCTQVATANDTTLRGWDTRSMSQIYCIENAHGQLVRDLDFNPNKQYYLASCGDDCKVKFWDTRNVTEPVKTLEEHSHWVWNVRYNHSHDQLVLTGSSDSRVILSNMVSISSEPFGHLVDDDDISDQEDHRSEEKSKEPLQDNVIATYEEHEDSVYAVDWSSADPWLFASLSYDGRLVINRVPRALKYHILL

SEQ ID NO: 80053 - protein, 59 aa, Homo sapiens
MLRRALLCLAVAALVRADAPEEEDHVLVLRKSNFAEALAAHKYLLVECPLVWPLQGSGP

SEQ ID NO: 80054 - protein, 287 aa, Homo sapiens
MAAPRVFPLSCAVQQYAWGKMGSNSEVARLLASSDPLAQIAEDKPYAELWMGTHPRGDAKILDNRISQKTLSQWIAENQDSLGSKVKDTFNGNLPFLFKVLSVETPLSIQAHPNKELAEKLHLQAPQHYPDANHKPEMAIALTPFQGLCGFRPVEEIVTFLKKVPEFQFLIGDEAATHLKQTMSHDSQAVASSLQSCFSHLMKSEKKVVVEQLNLLVKRISQQAAAGNNMEDIFGELLLQLHQQYPGDIGCFAIYFLNLLTLKPGEAMFLEANVPHAYLKGGPWLCH

SEQ ID NO: 80055 - protein, 45 aa, Homo sapiens
MAALAYNLGKREINHYFSVRSAKVLALVAVLLLAACHLASRRYRA

SEQ ID NO: 80056 - protein, 60 aa, Homo sapiens
  MOD_RES (1)..(1): Any amino acid
XLLEGNSSQGSFEVTPSSAGPWANSSLSLHGGLSSGLRLRCKAWNVHGAQSGSVFQLLPG

SEQ ID NO: 80057 - protein, 64 aa, Homo sapiens
MGRSGKLPSGVSAKLKRWKKGHSSDSNPAICRHRQAARSRFFSRPSGRSDLTVDAVKLHNELQS

SEQ ID NO: 80058 - protein, 280 aa, Homo sapiens
MEREMVLCLAQTIHTQEDLPRPSISAEPGTVIPLGSHVTFVCRGPVGVQTFRLERESRSTYNDTEDVSQASPSESEARFRIDSVSEGNAGPYRCIYYKPPKWSEQSDYLELLVKETSGGPDSPDTEPGSSAGPTQRPSDNSHNEHAPASQGLKAEHLYILIGVSVVFLFCLLLLVLFCLHRQNQIKQGPPRSKDEEQKPQQRPDLAVDVLERTADKATVNGLPEKDRETDTSALAAGSSQEVTYAQLDHWALTQRTARAVSPQSTKPMAESITYAAVARH

SEQ ID NO: 80059 - protein, 155 aa, Homo sapiens
MGKDYYKILGIPSGANEDEIKKAYRKMALKYHPDKNKEPNAEEKFKEIAEAYDVLSDPKKRGLYDQYGEEGLKTGGGTSGGSSGSFHYTFHGDPHATFASFFGGSNPFDIFFASSRSTRPFSGFDPDDMDVDEDEDPFGAFGRFGFNGLSRGPRR

SEQ ID NO: 80060 - protein, 1002 aa, Homo sapiens
MELLACFSPVLWDLLQREKSVWALQILVQAYLHMPPENLQQLVLSAEREAAQGFLTLMLQGKLQGKLQVPPSEEQALGRLTALLLQRYPRLTSQLFIDLSPLIPFLAVSDLMRFPPSLLANDSVQQGYRGSEENSLEEDKGLRPMTPRSLAAIRDYSPGMRPEQKEALAKRLLAPELFGEVPAWPQELLWAVLPLLPHLPLENFLQLSPHQIQALEDSWPAAGLGPGHARHVLRSLVNQSVQDGEEQVRRLGPLACFLSPEELQSLVPLSDPTGPVERGLLECAANGTLSPEGRVAYELLGVLRSSGGAVLSPRELRVWAPLFSQLGLRFLQELSEPQLRAMLPVLQGTSVTPAQAVLLLGRLLPRHDLLQLDSLALLANRRRYWELPWSEQQAQFLWKKMQVPTNLTLRNLQALGTLAGGMSCEFLQQINSMVDFLEVVHMIYQLPTRVRGSLRACIWAELQRRMAMPEPEWTTVGPELNGLDSKLLLDLPIQLMDRLSNESIMLVVELVQRAPEQLLALTPLHQAALAERALQNLAPKETPVSGEVLETLGPLVGFLGTESTRQIPLQILLSHLSQLQGFCLGETFATELGWLLLQESVLGKPELWSQDEVEQAGRLVFTLSTEAISLIPREALGPETLERLLEKQQSWEQSRVGQLCREPQLAAKKAALVAGVVRPAAEDLPEPVPNCADVRGTFPAAWSATQIAEMELSDFEDCLTLFAGDPGLGPEELRAAMGKAKQLWGPPRGFRPEQILQLGRLLIGLGDRELQELILVDWGVLSTLGQIDGWSTTQLRIVVSSFLRQSGRHVSHLDFVHLTALGYTLCGLRPEELQHISSWEFSQAALFLGTLHLQCSEEQLEVLAHLLVLPGGFGPISNWGPEIFTEIGTIAAGIPDLALSALLRGQIQGVTPLAISVIPPPKFAVVFSPIQLSSLTSAQAVAVTPEQMAFLSPEQRRAVAWAQHEGKESPEQQGRSTAWGLQDWSRPSWSLVLTISFLGHLL

SEQ ID NO: 80061 - protein, 252 aa, Homo sapiens
  MOD_RES (1)..(1): Any amino acid
XKPNGLILQYGTAGFRTKAEHLDHVMFRMGLLAVLRSKQTKSTIGVMVTASHNPEEDNGVKLVDPLGEMLAPSWEEHATCLANAEEQDMQRVLIDISEKEAVNLQQDAFVVIGRDTRPSSEKLSQSVIDGVTVLGGQFHDYGLLTTPQLHYMVYCRNTGGRYGKATIEGYYQKLSKAFVELTKQASCSGDEYRSLKVDCANGIGALKLREMEHYFSQGLSVQLFNDGSKGKLNHLCGADFVKSHQKPPQGTV

SEQ ID NO: 80062 - protein, 148 aa, Homo sapiens
MKTVDTGQIPHSVSRPLRSQDSVFNSIQSNTGRSQGGWSYRDGNKNTSLKTWNKNDFKPQCKRTNLVANDGKNSCPVSSGAQQQKQLRIPEPPNLSRNKETELLRQTHSSKISGCTMRGLDKNSALQTLKPNFQQNQYKKQMLDDIPE

SEQ ID NO: 80063 - protein, 176 aa, Homo sapiens
MMVNCHAHFWTTKAFLPTMLEINHGHIVTVASSLGLFSTAGVEDYCASKFGVVGFHESLSHELKAAEKDGIKTTLVCPYLVDTGMFRGCRIRKEIEPFLPPLKPDYCVKQAMKAILTDQPMICTPRLMYIVTFMKSILPFEAVVCMYRFLGADKCMYPFIAQRKQATNNNEAKNGI

SEQ ID NO: 80064 - protein, 14 aa, Homo sapiens
MGASWWARPPPPAP

SEQ ID NO: 80065 - protein, 49 aa, Homo sapiens
METTNGTETWYESLHAVLKALNATLHSNLLCRPGPGLGPDNQTEERRAS

SEQ ID NO: 80066 - protein, 13 aa, Homo sapiens
MPITQDNAVLHLP

SEQ ID NO: 80067 - protein, 157 aa, Homo sapiens
MALLTAAARLLGTKNASCLVLAARHASASSTMYGGMRGMKGLVYETSVLDPDEGIRFRGFSIPECQKLLPKAKGGEEPLPEGLFWLLVTGHIPTEEQVSWLSKEWAKRAALPSHVVTMLDNFPTNLHPMSQLSAAVTALNSESNFARAYAQGISRTK

SEQ ID NO: 80068 - protein, 174 aa, Homo sapiens
MADPWQECMDYAVTLARQAGEVVCEAIKNEMNVMLKSSPVDLVTATDQKVEKMLISSIKEKYPSHSFIGEESVAAGEKSILTDNPTWIIDPIDGTTNFVHRWSFPLVGQAEMQWRSLGSLQPPPPGFKRFFCLSLPTVSIGFAVNKKIEFGVVYSCVEGKMYTARKGKGAFCNG

SEQ ID NO: 80069 - protein, 2170 aa, Homo sapiens
MEMNLPTFSSDLIFIKSTMYQEIDARYKGKVISEAETKGYFSLAFGEANYARGTRLPLSGEGPTSQPNSSKQTVLSWQAAIDAARQAKAAQTMSTSAPPPVGSLSQRKRQQYAKSKKQGNSSNSRPARALFCLSLNNPIRRACISIVEWKPFDIFILLAIFANCVALAIYIPFPEDDSNSTNHNLEKVEYAFLIIFTVETFLKIIAYGLLLHPNAYVRNGWNLLDFVIVIVGLFSVILEQLTKETEGGNHSSGKSGGFDVKALRAFRVLRPLRLVSGVPSLQVVLNSIIKAMVPLLHIALLVLFVIIIYAIIGLELFIGKMHKTCFFADSDIVAEEDPAPCAFSGNGRQCTANGTECRSGWVGPNGGITNFDNFAFAMLTVFQCITMEGWTDVLYWVNDAIGWEWPWVYFVSLIILGSFFVLNLVLGVLSGEFSKEREKAKARGDFQKLREKQQLEEDLKGYLDWITQAEDIDPENEEEGGEEGKRNTSMPTSETESVNTENVSGEGENRGCCGSLCQAISKSKLSRRWRRWNRFNRRRCRAAVKSVTFYWLVIVLVFLNTLTISSEHYNQPDWLTQIQDIANKVLLALFTCEMLVKMYSLGLQAYFVSLFNRFDCFVVCGGITETILVELEIMSPLGISVFRCVRLLRIFKVTRHWTSLSNLVASLLNSMKSIASLLLLLFLFIIIFSLLGMQLFGGKFNFDETQTKRSTFDNFPQALLTVFQILTGEDWNAVMYDGIMAYGGPSSSGMIVCIYFIILFICGNYILLNVFLAIAVDNLADAESLNTAQKEEAEEKERKKIARKESLENKKNNKPEVNQIANSDNKVTIDDYREEDEDKDPYPPCDVPVGEEEEEEEEDEPEVPAGPRPRRISELNMKEKIAPIPEGSAFFILSKTNPIRVGCHKLINHHIFTNLILVFIMLSSAALAAEDPIRSHSFRNTILGYFDYAFTAIFTVEILLKMTTFGAFLHKGAFCRNYFNLLDMLVVGVSLVSFGIQSSAISVVKILRVLRVLRPLRAINRAKGLKHVVQCVFVAIRTIGNIMIVTTLLQFMFACIGVQLFKGKFYRCTDEAKSNPEECRGLFILYKDGDVDSPVVRERIWQNSDFNFDNVLSAMMALFTVSTFEGWPALLYKAIDSNGENIGPIYNHRVEISIFFIIYIIIVAFFMMNIFVGFVIVTFQEQGEKEYKNCELDKNQRQCVEYALKARPLRRYIPKNPYQYKFWYVVNSSPFEYMMFVLIMLNTLCLAMQHYEQSKMFNDAMDILNMVFTGVFTVEMVLKVIAFKPKGYFSDAWNTFDSLIVIGSIIDVALSEADNSEESNRISITFFRLFRVMRLVKLLSRGEGIRTLLWTFIKSFQALPYVALLIAMLFFIYAVIGMQMFGKVAMRDNNQINRNNNFQTFPQAVLLLFRCATGEAWQEIMLACLPGKLCDPESDYNPGEEYTCGSNFAIVYFISFYMLCAFLIINLFVAVIMDNFDYLTRDWSILGPHHLDEFKRIWSEYDPEAKGRIKHLDVVTLLRRIQPPLGFGKLCPHRVACKRLVAMNMPLNSDGTVMFNATLFALVRTALKIKTEGNLEQANEELRAVIKKIWKKTSMKLLDQVVPPAGDDEVTVGKFYATFLIQDYFRKFKKRKEQGLVGKYPAKNTTIALQAGLRTLHDIGPEIRRAISCDLQDDEPEETKREEEDDVFKRNGALLGNHVNHVNSDRRDSLQQTNTTHRPLHVQRPSIPPASDTEKPLFPPAGNSVCHNHHNHNSIGKQVPTSTNANLNNANMSKAAHGKRPSIGNLEHVSENGHHSSHKHDREPQRRSSVKRTRYYETYIRSDSGDEQLPTICREDPEIHGYFRDPHCLGEQEYFSSEECYEDDSSPTWSRQNYGYYSRYPGRNIDSERPRGYHHPQGFLEDDDSPVCYDSRRSPRRRLLPPTPASHRRSSFNFECLRRQSSQEEVPSSPIFPHRTALPLHLMQQQIMAVAGLDSSKAQKYSPSHSTRSWATPPATPPYRDWTPCYTPLIQVEQSEALDQVNGSLPSLHRSSWYTDEPDISYRTFTPASLTVPSSFRNKNSDKQRSADSLVEAVLISEGLGRYARDPKFVSATKHEIADACDLTIDEMESAASTLLNGNVRPRANGDVGPLSHRQDYELQDFGPGYSDEEPDPGRDEEDLADEMICITTL

SEQ ID NO: 80070 - protein, 87 aa, Homo sapiens
MTSMPVPLRSCQAVRRRQLQCGNHYSKKLARPPVRITCTLCAVPRCMFGSAAQAPKPTRRRCGLQRLHSPWPLRPHCWRLLWLWPTS

SEQ ID NO: 80071 - protein, 241 aa, Homo sapiens
MTPGTQSPFFLLLLLTVLTATTAPKPATVVTGSGHASSTPGGEKETSATQRSSVPSSTEKNAFLQIYKQGGFLGLSNIKFRPGSVVVQLTLAFREGTINVHDVETQFNQYKTEAASRYNLTISDVSVSDVPFPFSAQSGAGVPGWGIALLVLVCVLVALAIVYLIALAVCQCRRKNYGQLDIFPARDTYHPMSEYPTYHTHGRYVPPSSTDRSPYEKVSAGNGGSSLSYTNPAVAATSANL

SEQ ID NO: 80072 - protein, 266 aa, Homo sapiens
MELLEEDLTCPICCSLFDDPRVLPCSHNFCKKCLEGILEGSVRNSLWRPAPFKCPTCRKETSATGINSLQVNYSLKGIVEKYNKIKISPKMPVCKGHLGQPLNIFCLTDMQLICGICATRGEHTKHVFCSIEDAYAQERDAFESLFQSFETWRRGDALSRLDTLETSKRKSLQLLTKDSDKVKEFFEKLQHTLDQKKNEILSDFETMKLAVMQAYDPEINKLNTILQEQRMAFNIAEAFKDVSEPIVFLQQMQEFREKIKVIKETP

SEQ ID NO: 80073 - protein, 116 aa, Homo sapiens
AEEYDEKTSELLVRKWRVKSALGAMGQWQLEVGDPAPLGAGNLGPELIKESNANPIFMRKDTKMSFQWRIRNLPYPKDVYSVSVDQKERCIIVRTTNKNTRSQRRLWWPSLSYRRN

SEQ ID NO: 80074 - protein, 161 aa, Homo sapiens
  MOD_RES (1)..(1): Any amino acid
XRFNAMLAALTPSRLAVAFQAMGAMKLGLTIAIRYSHRYAGALLDEDVFQGKELVNSRSLQALVAGLKAYSTWENIRCLQDCRECTGGMGYMMENRISGLKCDTDVFATFEGDDVVMLQVVGRELLAQYTKQYEEKPLFGLLQNWAESVGDKLRTSFLAFN

SEQ ID NO: 80075 - protein, 29 aa, Homo sapiens
  MOD_RES (1)..(1): Any amino acid
XMLILGGCGTWGVVLHHRSCPLSTAPHGS

SEQ ID NO: 80076 - protein, 148 aa, Homo sapiens
MSRGSSAGFDRHITIFSPEGRLYQVEYAFKAINQGGLTSVAVRGKDCAVIVTQKKVPDKLLDSSTVTHLFKITENIGCVMTGMTADSRSQVQRARYEAANWKYKYGYEIPVDMLCKRIADISQVYTQNAEMRPLGCYCNYMPVYCSIN

SEQ ID NO: 80077 - protein, 151 aa, Homo sapiens
MAQKHPGERGLYGAHHSGGASLRTLGPSVDPEIPSFSGLRDSAGTAPNGTRCLTEHSGPKHTQHPNPAHWLDPSHGPPGGPGPPRDAEDPDQSETSSEEESGVDQELSKENETGNQKDGNSFLSIPSACNCQGTPGIPEGPYSEGGNGSSS

SEQ ID NO: 80078 - protein, 74 aa, Homo sapiens
MNDEKFNLKLVIKPAKVTPAPTRQRDFTAAFPRMLTTRGHGPAETQTLGSLPDINLTQISTLANELRDSRLAND

SEQ ID NO: 80079 - protein, 239 aa, Homo sapiens
  MOD_RES (1)..(1): Any amino acid
XGDFEKRIPREEMLQMQDIVLNEVKKVDSEYIATVCGSFRRGAESSGDMDVLLTHPSFTSESTKQPKLLHQVVEQLQKVHFITDTLSKGETKFMGVCQLPSKNDEKEYPHRRIDIRLIPKDQYYCGVLYFTGSDIFNKNMRAHALEKGFTINEYTIRPLGVTVLQATREDLMHNMLLGPQLKAIKELQENPCQWIVKKTSLITSSGNTGNPRTGANEACILPGRHNPIGVLIYFLTFAM

SEQ ID NO: 80080 - protein, 355 aa, Homo sapiens
MKRDRLGRFLSPGSSRQCGASDGGGGVSRTRGRPSLSGGPRVDGATARRAWGPVGSCGDAGEDGADEAGAGRALAMGHCRLCHGKFSSRSLRSISERAPGASMERPSAEERVLVRDFQRLLGVAVRQDPTLSPFVCKSCHAQFYQCHSLLKSFLQRVNASPAGRRKPCAKVGAQPPTGAEEGACLVDLITSSPQCLHGLVGWVHGHAASCGALPHLQRTLSSEYCGVIQVVWGCDQGHDYTMDTSSSCKAFLLDSALAVKWPWDKETAPRLPQHRGWNPGDAPQTSQGRGTGTPVGAETKTLPSTDVAQPPSDSDAVGPRSGFPPQPSLPLCRAPGQLGEKQLPSSTSDDRRRLE

SEQ ID NO: 80081 - protein, 147 aa, Homo sapiens
MLETFRNLASVDDGTQFKANGSVSLQDMYGQEKSKEQTIPNFTGNNSCAYTLEKNCEGYGTEDHHKNLRNHMVDRFCTHNEGNQYGEAIHQMPDLTLHKKVSAGEKPYECTKCRTVFTHLSSLKRHVKSHCGRKAPPGEECKQACIC

SEQ ID NO: 80082 - protein, 60 aa, Homo sapiens
  MOD_RES (1)..(1): Any amino acid
XHKQRVAEVLNDPENMEKRRSRESLNVDVVKYESGPDGGEEVSMSVEWNGHEACQLSECP

SEQ ID NO: 80083 - protein, 166 aa, Homo sapiens
MQTIKCVVVGDGAVGKTCLLISYTTNKFPSEYVPTVFDNYAVTVMIGGEPYTLGLFDTAGQEDYDRLRPLSYPQTDVFLVCFSVVSPSSFENVKEKWVPEITHHCPKTPFLLVGTQIDLRDDPSTIEKLAKNKQKPITPETAEKLARDLKAVKYVECSALTQVRMA

SEQ ID NO: 80084 - protein, 43 aa, Homo sapiens
MRANDALQVPRAQSTSTQMFRMNVGPAMRTAPRGVKDQSFKTV

SEQ ID NO: 80085 - protein, 152 aa, Homo sapiens
MSGMEATVTIPIWQNKPHGAARSVVRRIGTNLPLKPCARASFETLPNISDLCLRDVPPVPTLADIAWIAADEEETYARVRSDTRPLRHTWKPSPLIVMQRNASVPNLRGSEERLLALKKPALPALSRTTELQDELSHLRSQIAKIVAADAAS

SEQ ID NO: 80086 - protein, 99 aa, Homo sapiens
MNLSSASSTEEKAVTTVLWGCELSQERRTWTFRPQLEGKQSCRLLLHTICLGEKAKEEMHRVEILPPANQEDKKMQPVTIASLQASVLPMVSMVGVQLS

SEQ ID NO: 80087 - protein, 55 aa, Homo sapiens
MAAGIVASRRLRDLLTRRESPLALWGEMVECFNKISRDADCRAVVISGAGKMFTA

SEQ ID NO: 80088 - protein, 267 aa, Homo sapiens
MAPWLQLLSLLGLLPGAVAAPAQPRAASFQAWGPPSPELLAPTRFALEMFNRGRAAGTRAVLGLVRGRVRRAGQGSLYSLEATLEEPPCNDPMVCRLPVSKKTLLCSFQVLDELGRHVLLRKDCGPVDTKVPGAGEPKSAFTQGSAMISSLSQNHPDNRNETFSSVISLLNEDPLSQDLPVKMASIFKNFVITYNRTYESKEEARWRLSVFVNNMVRAQKIQALDRGTAQYGVTKFSDLTGGVPHYLPEYSPEERAWQQDEASQVCG

SEQ ID NO: 80089 - protein, 110 aa, Homo sapiens
  MOD_RES (1)..(1): Any amino acid
XFSSARLEEVGWLSGVGGLRSGGWCVQSSRTPGQSRVLGRGLGYKQQVRGWGHCEAVLVITLLIAAYLKLSVSLTHLKGRKETPFENLFVHLKVFTQVIHQVTHLLNQYH

SEQ ID NO: 80090 - protein, 354 aa, Homo sapiens
MFGQIQSPGYPDSYPSDSEVTWNITVPDGFRIKLYFMHFNLESSYLCEYDYVKVETEDQVLATFCGRETTDTEQTPGQEVVLSPGSFMSITFRSDFSNEERFTGFDAHYMAVDVDECKEREDEELSCDHYCHNYIGGYYCSCRFGYILHTDNRTCRVECSDNLFTQRTGVITSPDFPNPYPKSSECLYTIELEEGFMVNLQFEDIFDIEDHPEVPCPYDYIKIKVGPKVLGPFCGEKAPEPISTQSHSVLILFHSDNSGENRGWRLSYRAAGNECPELQPPVHGKIEPSQAKYFFKDQVLVSCDTGYKVLKDNVEMDTFQIECLKDGTWSNKIPTCKKNEIDLESELKSEQVTE

SEQ ID NO: 80091 - protein, 318 aa, Homo sapiens
  MOD_RES (1)..(1): Any amino acid
XGINGSEGDGAEIAEKFVFFIGSKNGGKTTIILRCLDRDEPPKPTLALEYTYGRRAKGHNTPKDIAHFWELGGGTSLLDLISIPITGDTLRTFSLVLVLDLSKPNDLWPTMENLLQATKSHVDKVIMKLGKTNAKAVSEMRQKIWNNMPKDHPDHELIDPFPVPLVIIGSKYDVFQDFESEKRKVICKTLRFVAHYYGASLMFTSKSEALLLKIRGVINQLAFGIDKSKSICVDQNKPLFITAGLDSFGQIGSPPVPENDIGKLHAHSPMELWKKVYEKLFPPKSINTLKDIKDPARDPQYAENEVDEMRIQKDLVLS

SEQ ID NO: 80092 - protein, 1962 aa, Homo sapiens
APGKDEEMAPASTEPPTPEPPIKPRLEELTVTDATPDSLSLSWTVPEGQFDHFLVQYKNGDGQPKATRVPGHEDRVTISGLEPDNKYKMNLYGFHGGQRVGPVSAIGVTAAEEETPSPTEPSMEAPEPPEEPLLGELTVTGSSPDSLSLSWTVPQGRFDSFTVQYKDRDGRPQVVRVGGEESEVTVGGLEPGRKYKMHLYGLHEGRRVGPVSTVGVTAPQEDVDETPSPTEPGTEAPGPPEEPLLGELTVTGSSPDSLSLSWTVPQGRFDSFTVQYKDRDGRPQAVRVGGQESKVTVRGLEPGRKYKMHLYGLHEGRRLGPVSAVGVTEDEAETTQAVPTMTPEPPIKPRLGELTMTDATPDSLSLSWTVPEGQFDHFLVQYRNGDGQPKAVRVPGHEDGVTISGLEPDHKYKMNLYGFHGGQRVGPISVIGVTAAEEETPSPTELSTEAPEPPEEPLLGELTVTGSSPDSLSLSWTIPQGHFDSFTVQYKDRDGRPQVMRVRGEESEVTVGGLEPGRKYKMHLYGLHEGRRVGPVSTVGVTEDEAETTQAVPTTTPEPPNKPRLGELTVTDATPDSLSLSWMVPEGQFDHFLVQYRNGDGQPKVVRVPGHEDGVTISGLEPDHKYKMNLYGFHGGQRVGPISVIGVTAAEEETPAPTEPSTEAPEPPEEPLLGELTVTGSSPDSLSLSWTIPQGRFDSFTVQYKDRDGRPQVVRVRGEESEVTVGGLEPGCKYKMHLYGLHEGQRVGPVSAVGVTAPKDEAETTQAVPTMTPEPPIKPRLGELTVTDATPDSLSLSWMVPEGQFDHFLVQYRNGDGQPKAVRVPGHEDGVTISGLEPDHKYKMNLYGFHGGQRVGPVSAIGVTEEETPSPTEPSTEAPEAPEEPLLGELTVTGSSPDSLSLSWTVPQGRFDSFTVQYKDRDGQPQVVRVRGEESEVTVGGLEPGRKYKMHLYGLHEGQRVGPVSTVGITAPLPTPLPVEPRLGELAVAAVTSDSVGLSWTVAQGPFDSFLVQYRDAQGQPQAVPVSGDLRAVAVSGLDPARKYKFLLFGLQNGKRHGPVPVEARTAPDTKPSPRLGELTVTDATPDSVGLSWTVPEGEFDSFVVQYKDKDGRLQVVPVAANQREVTVQGLEPSRKYRFLLYGLSGRKRLGPISADSTTAPLEKELPPHLGELTVAEETSSSLRLSWTVAQGPFDSFVVQYRDTDGQPRAVPVAADQRTVTVEDLEPGKKYKFLLYGLLGGKRLGPVSALGMTAPEEDTPAPELAPEAPEPPEEPRLGVLTVTDTTPDSMRLSWSVAQGPFDSFVVQYEDTNGQPQALLVDGDQSKILISGLEPSTPYRFLLYGLHEGKRLGPLSAEGTTGLAPAGQTSEESRPRLSQLSVTDVTTSSLRLNWEAPPGAFDSFLLRFGVPSPSTLEPHPRPLLQRELMVPGTRHSAVLRDLRSGTLYSLTLYGLRGPHKADSIQGTARTLSPVLESPRDLQFSEIRETSAKVNWMPPPSRADSFKVSYQLADGGEPQSVQVDGQARTQKLQGLIPGARYEVTVVSVRGFEESEPLTGFLTTVPDGPTQLRALNLTEGFAVLHWKPPQNPVDTYDVQVTAPGAPPLQAETPGSAVDYPLHDLVLHTNYTATVRGLRGPNLTSPASITFTTGLEAPRDLEAKEVTPRTALLTWTEPPVRPAGYLLSFHTPGGQNQEILLPGGITSHQLLGLFPSTSYNARLQAMWGQSLLPPVSTSFTTGGLRIPFPRDCGEEMQNGAGASRTSTIFLNGNRERPLNVFCDMETDGGGWLVFQRRMDGQTDFWRDWEDYAHGFGNISGEFWLGNEALHSLTQAGDYSMRVDLRAGDEAVFAQYDSFHVDSAAEYYRLHLEGYHGTAGDSMSYHSGSVFSARDRDPNSLLISCAVSYRGAWWYRNCHYANLNGLYGSTVDHQGVSWYHWKGFEFSVPFTEMKLRPRNFRSPAGGG

SEQ ID NO: 80093 - protein, 88 aa, Homo sapiens
  MOD_RES (1)..(1): Any amino acid
XVTLLWVEEGVADFFEVFCQQVGSSQKTKLQEPVAVSSHVVTISSLLPATAYNCSVTSFSHDSPSVPTFIAVSTMGSVELVHLSILHP

SEQ ID NO: 80094 - protein, 67 aa, Homo sapiens
MRAGGLVDGRYSPVAPQWRPPGETHTGGHGKRLHGPGRDVLSTSYDEDFNHEPCQRKGHKAHWAAQE

SEQ ID NO: 80095 - protein, 98 aa, Homo sapiens
  MOD_RES (1)..(1): Any amino acid
XHAASVYGQFTGQALLSGREMVGPTLPGYPPHIPTSGQGSYASSAIAGMVAGKERAGRKGSTAKRKYWSKEVNTLAMPMATPPTPPTARPGASPTPAC

SEQ ID NO: 80096 - protein, 118 aa, Homo sapiens
MDEERALYIVRAGEAGAIERVLRDYSDKKLCEGIFKVLIKDIPTTCQVSCLEVLRILSRDKKVLVPVTTKENMQILLRLAKLNELDDSLEKVSEFPVIVESLKCLCNIVFNSQMAQQL

SEQ ID NO: 80097 - protein, 149 aa, Homo sapiens
MAEMEKEGRPPENKRSRKPAHPVKREINEEMKNFAENTMNELLGWYGYDKVELKDGEDIEFRSYPTDGESRQHISVLKENSLPKPKLPEDSVISPYNISTGYSGLATGNGLSDSPAGSKDHGSVPIIVPLIPPPFIKPPADEKTEAQKS

SEQ ID NO: 80098 - protein, 181 aa, Homo sapiens; identical to SEQ ID NO: 66396
  MOD_RES (1)..(1): Any amino acid

SEQ ID NO: 80099 - protein, 144 aa, Homo sapiens
MRKDRLLHLCLVLLLILLSASDSNSTEPQYMVLVPSLLHTEAPKKGCVLLSHLNETVTVSASLESGRENRSLFTDLVAEKDLFHCVSFTLPRISASSEVAFLSIQIKGPTQDFRKRNTVLVLNTQSLVFVQTDKPMYKPGQTGK

SEQ ID NO: 80100 - protein, 92 aa, Homo sapiens
MVLNRSGMWQEEVTVPSVQTFLIPEAMTFEEAAALLVNYITAYMVLFDFGNLQPGHSVLVHMAAGGVGMAAVQLCRTVENVTVFGTASASKH

SEQ ID NO: 80101 - protein, 80 aa, Homo sapiens
MKITRQKHAKKHLGFFRNNFGVREPYQILLDGTFCQAALRGRIQLREQLPRYLMGETQLCTTSISQECTHSAPIMEDNSM

SEQ ID NO: 80102 - protein, 110 aa, Homo sapiens
MKFNPFVTSDRSKNRKRHFNAPSHIRRKIMSSPLSKELRQKYNVRSMPIRKDDEVQVVRGHYKGQQIGKVVQVYRKKYVIYIERVQREKANGTTVHVGIHPSKVGVFENA

SEQ ID NO: 80103 - protein, 599 aa, Homo sapiens
MAGDGRRAEAVREGWGVYVTPRAPIREGRGRLAPQNGGSSDAPAYRTPPSRQGRREVRFSDEPPEVYGDFEPLVAKERSPVGKRTRLEEFRSDSAKEEVRESAYYLRSRQRRQPRPQETEEMKTRRTTRLQQQHSEQPPLQPSPVMTRRGLRDSHSSEEDEASSQTDLSQTISKKTVRSIQEAPAVSEDLVIRLRRPPLRYPRYEATSVQQKVNFSEEGETEEDDQDSSHSSVTTVKARSRDSDESGDKTTRSSSQYIESFWQSSQSQNFTAHDKQPSVLSSGYQKTPQEWAPQTARIRTRMQTSSPGKSSIYGSFSDDDSILKSELGNQSPSTSSRQVTGQPQNASFVKRNRWWLLPLIAALASGSFWFFSTPEVETTAVQEFQNQMNQLKNKYQGQDEKLWKRSQTFLEKHLNSSHPRSQPAILLLTAARDAEEALRCLSEQIADAYSSFRSVRAIRIDGTDKATQDSDTVKLEVDQELSNGFKNGQNAAVVHRFESFPAGSTLIFYKYCDHENAAFKDVALVLTVLLEEETLGTSLGLKEVEEKVRDFLKVKFTNSNTPNSYNHMDPDKLNGLWSRISHLVLPVQPENALKRGICL

SEQ ID NO: 80104 - protein, 51 aa, Homo sapiens
  MOD_RES (1)..(1): Any amino acid
XWDETHFGKMGSYYINRTFFFDVHPPLGKHMKMRFILFNGRVSFYYVDVPC

SEQ ID NO: 80105 - protein, 427 aa, Homo sapiens
MMAAVKSTEAHPSSNKDPTQGQKSALQGNSPDSEASRQRFRQFCYQEVTGPHEAFSKLWELCCQWLRPKTHSKEEILELLVLEQFLTILPEEIQTWVREQHPENGEEAVALVEDVQRAPGQQVLDSEKDLKVLMKEMAPLGATRESLRSQWKQEVQPEEPTFKGSQSSHQRPGEQSEAWLAPQAPRNLPQNTGLHDQETGAVVWTAGSQGPAMRDNRAVSLCQQEWMCPGPAQRALYRGATQRKDSHVSLATGVPWGYEETKTLLAILSSSQFYGKLQTCQQNSQIYRAMAEGLWEQGFLRTPEQCRTKFKSLQLSYRKVRRGRVPEPCIFYEEMNALSGSWASAPPMASDAVPGQEGSDIEAGELNHQNGEPTEVEDGTVDGADRDEKDFRNPGQEVRKLDLPVLFPNRLGKTPLALMVKGWQSPL

SEQ ID NO: 80106 - protein, 414 aa, Homo sapiens
MAAAEPMGPAQGQVNFEDVFVYFSQEEWVLLDEAQRLLYRDVMLENFALMASLGHTSFMSHIVASLVMGSEPWVPDWVDMTLAVATGCWHGMEDEEIPFEQSFSIGIFSANLHQHQKQHSGEKPFRSDKSRPFLLNNCAVQSMEMSFVTGEACKDFLASSSIFEHHAPHNEWKPHSNTKCEEASHCGKRHYKCSECGKTFSRKDSLVQHQRVHTGERPYECGECGKTFSRKPILAQHQRIHTGEMPYECGICGKVFNHSSNLIVHQRVHTGARPYKCSECGKAYSHKSTLVQHESIHTGERPYECSECGKYFGHKYRLIKHWSVHTGARPYECIACGKFFSQSSDLIAHQRVHNGEKPYVCSECGKAFSHKHVLVQHHRIHTGERPYKCSECGKAFRQRASLIRHWKIHTGERP

SEQ ID NO: 80107 - protein, 225 aa, Homo sapiens
MASLPDMESNLSGLVPAAGLVPALPPAVTLGLTAAYTTLYALLFFSVYAQLWLVLLYGHKRLSYQTVFLALCLLWAALRTTLFSFYFRDTPRANRLGPLPFWLLYCCPVCLQFFTLTLMNLYFAQVVFKAKVKRRPEMSRGLLAVRGAFVGASLLFLLVNVLCAVLSHRRRAQPWALLLVRVLVSDSLFVICALSLAACLCLVARRAPSTSIYLEAKGTSVCQAA

SEQ ID NO: 80108 - protein, 493 aa, Homo sapiens
AARRLRDAAQQAALQRGRGTEPPRLPRLLPPQQLEAICVKVTSGETKGQERPMLLPTTIQPQTARKSQLPRGNSCLVGLHIASPQLLRVQPLVRTEPQSCFLSDLCQPPAQGFVQRPLPALQVVPAKRVPAPKAPDEQGSMLTPLSASDPLAVTSLSSSSAHPFISNLHTRHTEKLKKSLKVKTRSGRVSRPPKYKAKDYKFIKTEDLADGHLSDSDDYSELCVEEDEDQRERHALFDLSSCSLRPKSFKCQTCEKSYIGKGGLARHFKLNPGHGQLDPEMVLSEKASGSTLRGCTEERTLSLTSLGLSMPADPCEGGARSCLVTESARGGLQNGQSVDVEETLPSEPENGALLRSERYQGPRRRACSETLAESRTAVLQQRRAAQLPGGPAAAGEQRASPSKARLKEFLQQCDREDLVELALPQLAQVVTVYEFLLMKVEKDHLAKPFFPAIYKEFEELHKMVKKMCQDYLSSSGLCSQETLEINNDKKTQK

SEQ ID NO: 80109 - protein, 103 aa, Homo sapiens
MAEERVATRTQFPVSTESQKPRQKKAPEFPILEKQNWLIHLHYIRKDYEACKAVIKEQLQETQGLCEYAIYVQDFFWENIKLPLKYIMKQLNSTRKIGRSAIT

SEQ ID NO: 80110 - protein, 57 aa, Homo sapiens
MATNKERLFAAGALGPGSGYPGAGFPFAFPGALRGSPPFEMLSPSFRGLGQPDLPKE

SEQ ID NO: 80111 - protein, 38 aa, Homo sapiens
MVKLANPLYTEWILEAIQKIKKQKQRPSEERICHAVST

SEQ ID NO: 80112 - protein, 161 aa, Homo sapiens
MKSHRCYDLIPTSSKLVVFDTSLQVKKAFFALVTNGVRAAPLWDSKKQSFVGMLTITDFINILHRYYKSALVQIYELEEHKIETWREVYLQDSFKPLVCISPNASLFDAVSSLIRNKIHRLPVIDPESGNTLYILTHKRILKFLKLFITEFPKPEFMSKSL

SEQ ID NO: 80113 - protein, 64 aa, Homo sapiens
METVQLRNPPRRQLKKLDEDSLTKQPEEVFDVLEKLGEGWKNTLWNPARNQAEKGSKNDTPAVL

SEQ ID NO: 80114 - protein, 185 aa, Homo sapiens
MSDRPTARRWGLGSTINWGGTEKPLPVDMVLISLCFGLSIATMVQCFGHISGGHINPAVTVAMVCTRKISIAKSVFYIAAQCLGAIIGAGILYLVTPPSVVGGLGVTMVHGNLTAGHGLLVELIITFQLVFTIFASCDSKRTDVTGSIALAIGFSVAIGHLFAINYTGASMNPARSFGPAVIMGN

SEQ ID NO: 80115 - protein, 184 aa, Homo sapiens
MDPLQKRNPASPSKSSPMTAAETSQEGPAPSQPSYSEQPMMGLSNLSPGPGPSQAVPLPEGLLRQRYREEKTLEERRWERLEFLQRKKAFLRHVRRRHRDHMAPYAVGREARISPLGDRSQNRFRCECRYCQSHRPNLSGIPGESNRAPHPSSWETLVQGLSGLTLSLGTNQPGPLPEAALQPQ

SEQ ID NO: 80116 - protein, 265 aa, Homo sapiens
  MOD_RES (1)..(1): Any amino acid
XWKAVTRTETAGNSSGVYGFGKMKKMADPWQECMDYAVTLARQAGEVVCEAIKNEMNVMLKSSPVDLVTATDQKVEKMLISSIKEKYPSHSFIGEESVAAGEKSILTDNPTWIIDPIDGTTNFVHRFPFVAVSIGFAVNKKIEFGVVYSCVEGKMYTARKGKGAFCNGQKLQVSQQEDITKSLLVTELGSSRTPETVRMVLSNMEKLFCIPVHGIRSVGTAAVNMCLVATGGADAYYEMGIHCWDVAGAGIIVTEAGGVLMDVTG

SEQ ID NO: 80117 - protein, 102 aa, Homo sapiens
MLEEPRPRPPPSGLAGLLFLALCSRALSNEILGLKLPGEPPLTANTVCLTLSGLSKRQLGLCLRNPDVTASALQGLHIAVHECQHQLRDQRWNCSALEGGGR

SEQ ID NO: 80118 - protein, 278 aa, Homo sapiens
MWLFFGITGLLTAALSGHPSPAPPDQLNTSSAESELWEPGERLPVRLTNGSSSCSGTVEVRLEASWEPACGALWDSRAAEAVCRALGCGGAEAASQLAPPTPELPPPPAAGNTSVAANATLAGAPALLCSGAEWRLCEVVEHACRSDGRRARVTCAENRALRLVDGGGACAGRVEMLEHGEWGSVCDDTWDLEDAHVVCRQLGCGWAVQALPGLHFTPGRGPIHRDQVNCSGAEAYLWDCPGLPGQHYCGHKEDAGAVCSESSVTVKIENKESRELML

SEQ ID NO: 80119 - protein, 74 aa, Homo sapiens
MATLSVIGSSSLIAYAVFHNIQKSPEIRPLFYLSFCDLLLGLCWLTETLLYGASVANKDIICYNLQAVGQVSAT

SEQ ID NO: 80120 - protein, 318 aa, Homo sapiens
MEGHAEMEMLRTLKGPSTGEVSMHLVAGDSPGSGPHLPATAFIIPASSATLGLPSSALDVSCFPREPIHVGAPEQVAGCEPVSATVLPQLSAGPASSSTSTVRLLEWTEAAAPPPGGGLRFRISEYKPLNMAGVEQPPSPELRQEGVTEYEDGGAPAGDGEAGPQQAEDHPQNPPEDPNQDPPEDDSTCQCQACGPHQAAGPDLGSSNDGCPQLFQERSVIVENSSGSTSASELLKPMKKRKRREYQSPSEEESEPEAMEKQEEGKDPEGQPTASTPESEEWSSSQPGNTFQEPQWTLETMDSTEPYGYCFFSYPYLR

SEQ ID NO: 80121 - protein, 235 aa, Homo sapiens
  MOD_RES (1)..(1): Any amino acid
XNYLFQGRQECYAFNGTQRFLERYIYNREEFARFDSDVGEFRAVTELGRPAAEYWNSQKDILEEKRAVPDRMCRHNYELGGPMTLQRRVQPRVNVSPSKKGPLQHHNLLVCHVTDFYPGSIQVRWFLNGQEETAGVVSTNLIRNGDWTFQILVMLEMTPQQGDVYTCQVEHTSLDSPVTVEWKAQSDSARSKTLTGAGGFVLGLIICGVGIFMHRRSKKGEKACRFNEDLHKQGS

SEQ ID NO: 80122 - protein, 275 aa, Homo sapiens
MLEERSEARPTAQWSVEDEEEAVHEQCQHERDRQLQAQDEEGGGHVPERPKQEMLLSLKPSEAPELDEDEGFGDWSQRPEQRQQHEGAQGALDSGEPPQCRSPEGEQEDRPGLHAYEKEDSDEVHLEELSLSKEGPGPEDTVQDNLGAAGAEEEQEEHQKCQQPRTPSPLVLEGTIEQSSPPLSPTTKLIDRTESLNRSIEKSNSVKKSQPDLPISKIDQWLEQYTQAIETAGRTPKLARQASIELPSMAVASTKSRWETGEVQAQSAAKTPSCK

SEQ ID NO: 80123 - protein, 176 aa, Homo sapiens
MAGLTDLQRLQARVEELERWVYGPGGARGSRKVADGLVKVQVALGNISSKRERVKILYKKIEDLIKYLDPEYIDRIAIPDASKLQFILAEEQFILSQVALLEQVNALVPMLDSAHIKAVPEHAARLQRLAQIHIQQQIPILTLTYNQTMLLSKQFVQWDELLCQLEAATQVKPAEE

SEQ ID NO: 80124 - protein, 136 aa, Homo sapiens
MHGVCKEGDNCRYSHDLSDSPYSVVCKYFQRGYCIYGDRCRYEHSKPLKQEEATATELTTKSSLAASSSLSSIVGPLVEMNTGEAESRNSNFATVGAGSEDWVNAIEFVPGQPYCGRTAPSCTEAPLQGSVTKEES

SEQ ID NO: 80125 - protein, 486 aa, Homo sapiens
MASMGTLAFDEYGRPFLIIKDQDRKSRLMGLEALKSHIMAAKAVANTMRTSLGPNVLAGALLEEAEQLLDRGIHPIRIADGYEQAARVAIEHLDKISDSVLVDIKDTEPLIQTAKTTLGSKVVNSCHRQMAEIAVNAVLTVADMERRDVDFELIKVEGKVGGRLEDTKLIKGVIVDKDFSHPQMPKKVEDAKIAILTCPFEPPKPKTKHKLDVTSVEDYKALQKYEKEKFEEMIQQIKETGANLAICQWGFDDEANHLLLQNNLPAVRWVGGPEIELIAIATGGRIVPRFSELTAEKLGFAGLVQEISFGTTKDKMLVIEQCKNSRAVTIFIRGGNKMIIEEAKRSLHDALCVIRNLIRDNRVVYGGGAAEISCALAVSQEADKCPTLEQYAMRAFADALEVIPMALSENSGMNPIQTMTEVRARQVKEMNPALGIDCLHKGTNDMKQQHVIETLIGKKQQISLATQMVRMILKIDDIRKPGESEE

SEQ ID NO: 80126 - protein, 190 aa, Homo sapiens
  MOD_RES (1)..(1): Any amino acid
XGRGLGKNAQGIINPIEAKQRKGKGAVGAYGSERTTQSMQDFPVVDSEEEAEEWLFLAASDCILLVQEFQKELSQWRKDPSGSKKKPKYSYKTVEELKAKGRISKKLTAPQKELSQVKVIDMTGREQKVYYSYSQISHKHNVPDDGLPLQSQQLPQSGKEAKAPGFALPELEHNLQLLIDLTEQEIIQND

SEQ ID NO: 80127 - protein, 66 aa, Homo sapiens
MFCPLKLILLPVLLEHRRQMYIQDRLDSVTRRARQGRICAILLLQSQCAYWALPEPRTLDGGHLMQ

SEQ ID NO: 80128 - protein, 202 aa, Homo sapiens
  MOD_RES (1)..(1): Any amino acid
XSTIRPGCDVNPSCALCGSGSINTMPPEIHYEAPLLERLSQLDSCVHPVLAFPDDVPTSLHFQSMLKSQWQNKPFDKIKPPKKLSLKHRAPMPGSLPDSARKDRHKLVSSFLTTAMLKHHTDMSSSSYLAATHHPPHSPLVRQLSTSSDSPAPASSSSQVTASTSPVRRRRGESSFDINNIVIPMSVAATTRVEKLQYKEIL

SEQ ID NO: 80129 - protein, 91 aa, Homo sapiens
SLDIQVPNFPADETKGFHQVPFAPIVFIERTDFKEEPEPGFKRLAWGQPVGLRHTGYVIELQHVVKVRASCSLPTAVPAGAKILSLTELSH

SEQ ID NO: 80130 - protein, 98 aa, Homo sapiens
MAQRYDELPHYGGMDGVGVPASMYGDPHAPRPIPPVHHLNHGPPLHATQHYGAHAPHPNVMPASMGSAVNDALKRDKDAIYGFAPKSHFFPQIQSWTI

SEQ ID NO: 80131 - protein, 258 aa, Homo sapiens
TSNQDNLAPITAKAKVVIELLLSVSGVAKPSQVYFGGTVVGEQAMKSEDEVGSLIEYEFRESHNSRKKREITEKQIDDNRKFSLFAERKYQTLNCSVNVNCVNIRCPLRGLDSKASLILRSRLWNSTFLEEYSKLNYLDILMRAFIDVTAAAENIRLPNAGTQVRVTVFPSKTVAQYSGVPWWIILVAILAGILMLALLVFILWKCGFFKRSRYDDSVPRYHAVRIRKEEREIKDEKYIDNLEKKQWITKWNENESYS

SEQ ID NO: 80132 - protein, 62 aa, Homo sapiens
MRLLRRRHMPLRLAMVGCAFVLFLFLLHRDVSSREEATEKPWLKSLVSRKDHVLDLMLEAMN

SEQ ID NO: 80133 - protein, 1104 aa, Homo sapiens
MASELGARDDGGCTELAKPLYLQYLERALRLDHFLRQTSAIFNRNISSDDSEDGLDDSNPLLPQSGDPLIQVKEEPPNSLLGETSGAGSSGMLNTYSLNGVLQSESKCDKGNLYNFSKLKKSRKWLKSILLSDESSEADSQSEDDDEEELNLSREELHNMLRLHKYKKLHQNKYSKDKELQQYQYYSAGLLSTYDPFYEQQRHLLGPKKKKFKEEKKLKAKLKKVKKKRRRDEELSSEESPRRHHHQTKVFAKFSHDAPPPGTKKKHLSIEQLNARRRKVWLSIVKKELPKANKQKASARNLFLTNSRKLAHQCMKEVRRAALQAQKNCKETLPRARRLTKEMLLYWKKYEKVEKEHRKRAEKEALEQRKLDEEMREAKRQQRKLNFLITQTELYAHFMSRKRDMGHDGIQEEILRKLEDSSTQRQIDIGGGVVVNITQEDYDSNHFKAQALKNAENAYHIHQARTRSFDEDAKESRAAALRAANKSGTGFGESYSLANPSIRAGEDIPQPTIFNGKLKGYQLKGMNWLANLYEQGINGILADEMGLGKTVQSIALLAHLAERENIWGPFLIISPASTLNNWHQEFTRFVPKFKVLPYWGNPHDRKVIRRFWSQKTLYTQDAPFHVVITSYQLVVQDVKYFQRVKWQYMVLDEAQALKSSSSVRWKILLQFQCRNRLLLTGTPIQNTMAELWALLHFIMPTLFDSHEEFNEWFSKDIESHAENKSAIDENQLSRLHMILKPFMLRRIKKDVENELSDKIEILMYCQLTSRQKLLYQALKNKISIEDLLQSSMGSTQQAQNTTSSLMNLVMQFRKVCNHPELFERQETWSPFHISLKPYHISKFIYRHGQIRVFNHSRDRWLRVLSPFAPDYIQRSLFHRKGINEESCFSFLRFIDISPAEMANLMLQGLLARWLALFLSLKASYRLHQLRSWGAPEGESHQRYLRNKDFLLGVNFPLSFPNLCSCPLLKSLVFSSHCKAVSGYSDQVVHQRRSATSSLRRCLLTELPSFLCVASPRVTAVPLDSYCNDRSAEYERRVLKEGGSLAAKQCLLNGAPELAADWLNRRSQFFPEPAGGLWSIRPQNGWSFIRIPGIHGLQEAYLHEA

SEQ ID NO: 80134 - protein, 245 aa, Homo sapiens
MIISAMAMASVKLLAGVLRKPDAWIGLWGVLRGTPSSYKLCTSWNRYLYFSSTKLRAPNYKTLFYNIFSLRLPGLLLSPECIFPFSVRLKSNIRSTKSTKKSLQKVDEEDSDEESHHDEMSEQEEELEDDPTVVKNYKDLEKAVQSFRYDVVLKTGLDIGRNKVEDAFYKGELRLNEEKLWKKSRTVKVGDTLDLLIGEDKEAGTETVMRILLKKVFEEKTESEKYRVVLRRWKSLKLPKKRMSK

SEQ ID NO: 80135 - protein, 227 aa, Homo sapiens
MGHEQNQGAALLQMLPLLWLLPHSWAVPEAPTPMWPDDLQNHTFLHTVYCQDGSPSVGLSEAYDEDQLFFFDFSQNTRVPRLPEFADWAQEQGDAPAILFDKEFCEWMIQQIGPKLDGKIPVSRVNWQHHSIPVEGFGPTFVSAVDGLSFQAFSYLNFTPEPSDIFSCIVTHEIDRYTAIAYWVPRNALPSDLLENVLCGVAFGLGVLGIIVGIVLIIYFRKPCSGD

SEQ ID NO: 80136 - protein, 42 aa, Homo sapiens
MLKNPYTIKKQPLHQFVQRPLFPLPAAFYHPGSHYVAQAKVQ

SEQ ID NO: 80137 - protein, 294 aa, Homo sapiens
  MOD_RES (1)..(1): Any amino acid
XRTKDQPDGSSLSPAQSPSQSQPPAASSLREPGLESKEEESAMSSDRMDCGRKVRVESGYFSLEKTKQDLKAEEQQLPPPLSPPSPSTPNHRYSCPESPSQELGGPLPSPGPRLPHQMVCSISLSSLDVASQPPAYVDSGSTRGRGTERLGSAFAFKASRQYATLADVPKAIRISHREAFQVERRRLERRTRARSPGREEVARLFGNERRRSQVIEKFEALDIEKAEHMETNAVGPSPSSDTRQGRSEKRAFPRKRDFTNEAPPAPLPDASASPLSPHRRAKSLDRRSTEPSVT

SEQ ID NO: 80138 - protein, 130 aa, Homo sapiens
MSSYKVEAKGDTDRLTPEALKGLVNKPELLALTESLTPDHTVAFWMPESEMEVMELELGAGVRLKTRGDGPFLDSLAKLEAGTVTKCNFTGDGKTGASWTDNIMAQKCSKGAAAEIREQGDGAEDEEWDD

SEQ ID NO: 80139 - protein, 160 aa, Homo sapiens
MGQGLFGAIHGFRETEKSRWSEASRAILQRVQAAAFGPGQTLLSSVHVLDLEARGYIKPHVDSIKFCGATIAGLSLLSPSVMRLVHTQEPGEWLELLLEPGSLYILRGSARYDFSHEILRDEESFFGERRIPRGRRISVICRSLPEGMGPGESGQPPPAC

SEQ ID NO: 80140 - protein, 139 aa, Homo sapiens
MWQLWASLCCLLVLANARSRPSFHPLSDELVNYVNKRNTTWQAGHNFYNVDMSYLKRLCGTFLGGPKPPQRVMFTEDLKLPASFDAREQWPQCPTIKEIRDQGSCGSCWGTAAEGPARTWQPHPVGLVPAGLRGCGSHL

SEQ ID NO: 80141 - protein, 74 aa, Homo sapiens
MDLPDSASRVFCGRILSMVNTDDVNAIILAQKNMLDRFEKTNEMLLNFNNLSSARLQQMSERFLHHTRTLVEMK

SEQ ID NO: 80142 - protein, 295 aa, Homo sapiens
MVFKVQFLSSRPSLSHTQDVDCAYLRKSDLEANVEALVEESSFLRRLYEEEIRVLQAHISDTSVIVKMDNSRDLNMDCIIAEIKAQYDDVASRSRAEAESWYRSKCEEMKATVIRHGETLRRTKEEINELNRMIQRLTAEIENAKCQRAKLEAAVAEAEQQGEAALSDARCKLAELEGALQKAKQDMACLLKEYQEVMNSKLGLDIEIATYRRLLEGEEHRLCEGVGSVNVCVSSSRGGVSCGGLSYSTTPGRQITSGPSAIGGSITVVAPDSCAPCQPRSSSFSCGSSRSVRFA

SEQ ID NO: 80143 - protein, 72 aa, Homo sapiens
MAAAGVVSGKIIYEQEGVYIHSSCGKTNDQDGLISGILRVLEKDAEVIVDWRPLDDALDSSSILYARKISTG

SEQ ID NO: 80144 - protein, 1104 aa, Homo sapiens
MSVKSPFNVMSRNNLEAPPCKMTEPFNFEKNENKLPPHESLRSPGTLPNHPNFRLKSSENGNKKNNFLLCEQTKQYLASQEDNSVSSNPNGINGEVVGSKGDRKKLPAGNSVSPPSAESNSPPKEVNIKPGNNVRPAKSKKLNKLVENSLSISNPGLFTSLGPPLRSTTCHRCGLFGSLRCSQCKQTYYCSTACQRRDWSAHSIVCRPVQPNFHKLENKSSIETKDVEVNNKSDCPLGVTKEIAIWAERIMFSDLRSLQLKKTMEIKGTVTEFKHPGDFYVQLYSSEVLEYMNQLSASLKETYANVHEKDYIPVKGEVCIAKYTVDQTWNRAIIQNVDVQQKKAHVLYIDYGNEEIIPLNRIYHLNRNIDLFPPCAIKCFVANVIPAEGNWSSDCIKATKPLLMEQYCSIKIVDILEEEVVTFAVEVELPNSGKLLDHVLIEMGYGLKPSGQDSKKENADQSDPEDVGKMTTENNIVVDKSDLIPKVLTLNVGDEFCGVVAHIQTPEDFFCQQLQSGRKLAELQASLSKYCDQLPPRSDFYPAIGDICCAQFSEDDQWYRASVLAYASEESVLVGYVDYGNFEILSLMRLCPIIPKLLELPMQAIKCVLAGVKPSLGIWTPEAICLMKKLVQNKIITVKVVDKLENSSLVELIDKSETPHVSVSKVLLDAGFAVGEQSMVTDKPSDVKETSVPLGVEGKVNPLEWTWVELGVDQTVDVVVCVIYSPGEFYCHVLKEDALKKLNDLNKSLAEHCQQKLPNGFKAEIGQPCCAFFAGDGSWYRALVKEILPNGHVKVHFVDYGNIEEVTADELRMISSTFLNLPFQGIRCQLADIQSRNKHWSEEAITRFQMCVAGIKLQARVVEVTENGIGVELTDLSTCYPRIISDVLIDEHLVLKSASPHKDLPNDRLVNKHELQVHVQGLQATSSAEQWKTIELPVDKTIQANVLEIISPNLFYALPKGMPENQEKLCMLTAELLEYCNAPKSRPPYRPRIGDACCAKYTSDDFWYRAVVLGTSDTDVEVLYADYGNIETLPLCRVQPITSSHLALPFQIIRCSLEEKMYRMNCCCTELQKQVEKHEHILLFLLNNSTNQNKFIEMKKLLKS

SEQ ID NO: 80145 - protein, 210 aa, Homo sapiens
MADPDPRYPRSSIEDDFNYGSSVASATVHIRMAFLRKVYSILSLQVLLTTVTSTVFLYFESVRTFVHESPALILLFALGSLGLIFALILNRHKYPLNLYLLFGFTLLEALTVAVVVTFYDVYIILQAFILTTTVFFGLTVYTLQSKKDFSKFGAGLFALLWILPVRILEVFFYSEIMELVLAAAGALLFCGFIIYDTHSLMHKLSPKSTY

SEQ ID NO: 80146 - protein, 127 aa, Homo sapiens
MELVKAALAEALRLLRLQVPPSSLQGSGTPAPPGDSLAAPPGLPPTCTPSLVSRGTQTETEVELKSSPGPPGLSNGPPAPQGASEEPSGTQSEGGGSSSSGAGSPGPPGILRPLQPPQRADTPRRNS

SEQ ID NO: 80147 - protein, 54 aa, Homo sapiens
  MOD_RES (1)..(1): Any amino acid
XIHGQYYDLLRLFEYGGFPPESNYLFLGDYVDRGKQFITRSSIYGADSANYATN

SEQ ID NO: 80148 - protein, 504 aa, Homo sapiens
MASSYHEVVSRKKMSLKSERRGIHVDQSDLLCKKGCGYYGNPAWQGFCSKCWREEYHKARQKQIQEDWELAERLQREEEEAFASSQSSQGAQSLTFSKFEEKKTNEKTRKVTTVKKFFSASSRVGSKKEIQEAKAPSPSINRQTSIETDRVSKEFIEFLKTFHKTGQEIYKQTKLFLEGMHYKRDLSIEEQSECAQDFYHNVAERMQTRGKVPPERVEKIMDQIEKYIMTRLYKYVFCPETTDDEKKDLAIQKRIRALRWVTPQMLCVPVNEDIPEVSDMVVKAITDIIEMDSKRVPRDKLACITKCSKHIFNAIKITKNEPASADDFLPTLIYIVLKGNPPRLQSNIQYITRFCNPSRLMTGEDGYYFTNLCCAVAFIEKLDAQSLNLSQEDFDRYMSGQTSPRKQEAESWSPDACLGVKQMYKNLDLLSQLNERQERIMNEAKKLEKDLIDWTDGIAREVQDIVEKYPLEIKPPNQPLAAIDSENVENDKLPPPLQPQVYAG

SEQ ID NO: 80149 - protein, 910 aa, Homo sapiens
MSSGLWSQEKVTSPYWEERIFYLLLQECSVTDKQTQKLLKVPKGSIGQYIQDRSVGHSRIPSAKGKKNQIGLKILEQPHAVLFVDEKDVVEINEKFTELLLAITNCEERFSLFKNRNRLSKGLQIDVGCPVKVQLRSGEEKFPGVVRFRGPLLAERTVSGIFFGVELLEEGRGQGFTDGVYQGKQLFQCDEDCGVFVALDKLELIEDDDTALESDYAGPGDTMQVELPPLEINSRVSLKVGETIESGTVIFCDVLPGKESLGYFVGVDMDNPIGNWDGRFDGVQLCSFACVESTILLHINDIIPESVTQERRPPKLAFMSRGVGDKGSSSHNKPKATGSTSDPGNRNRSELFYTLNGSSVDSQPQSKSKNTWYIDEVAEDPAKSLTEISTDFDRSSPPLQPPPVNSLTTENRFHSLPFSLTKMPNTNGSIGHSPLSLSAQSVMEELNTAPVQESPPLAMPPGNSHGLEVGSLAEVKENPPFYGVIRWIGQPPGLNEVLAGLELEDECAGCTDGTFRGTRYFTCALKKALFVKLKSCRPDSRFASLQPVSNQIERCNSLAFGGYLSEVVEENTPPKMEKEGLEIMIGKKKGIQGHYNSCYLDSTLFCLFAFSSVLDTVLLRPKEKNDVEYYSETQELLRTEIVNPLRIYGYVCATKIMKLRKILEKVEAASGFTSEEKDPEEFLNILFHHILRVEPLLKIRSAGQKVQDCYFYQIFMEKNEKVGVPTIQQLLEWSFINSNLKFAEAPSCLIIQMPRFGKDFKLFKKIFPSLELNITDLLEDTPRQCRICGGLAMYECRECYDDPDISAGKIKQFCKTCNTQVHLHPKRLNHKYNPVSLPKDLPDWDWRHGCIPCQNMELFAVLCIETSHYVAFVKYGKDDSAWLFFDSMADRDAALSDPAPTAFWCGPPVA

SEQ ID NO: 80150 - protein, 41 aa, Homo sapiens
MPGFLVRILPLLLVLLLLGPTRGLRITWQLWTSGWESFCPR

SEQ ID NO: 80151 - protein, 497 aa, Homo sapiens
MAMSSLGCLCALTVLIRYCNRDFDDEKILIQHQKAKHFKCHICHKKLYTGPGLAIHCMQVHKETIDAVPNAIPGRTDIELEIYGMEGIPEKDMDERRRLLEQKTQESQKKKQQDDSDEYDDDDSAASTSFQPQPVQPQQGYIPPMAQPGLPPVPGAPGMPPGIPPLMPGVPPLMPGMPPVMPGMPPGLHHQRKYTQSFCGENIMMPMGGMMPPGPGIPPLMPGMPPGMPPPVPRPGIPPMTQAQAVSAPGILNRPPAPTATVPAPQPPVTKPLFPSAGQMGTPVTSSSTASSNSESLSASSKALFPSTAQAQAAVQGPVGTDFKPLNSTPATTTEPPKPTFPAYTQSTASTTSTTNSTAAKPAASITSKPATLTTTSATSKLIHPDEDISLEERRAQLPKYQRNLPRPGQAPIGNPPVGPIGGMMPPQPGIPQQQGMRPPMPPHGQYGGHHQGMPGYLPGAMPPYGQGPPMVPPYQGGPPRPPMGMRPPVMSQGGRY

SEQ ID NO: 80152 - protein, 84 aa, Homo sapiens
MPCGFSPSPVAHHLVPGPPDTPAQQLRCGWTVGGWLLSLVRGLLPCLPPGARTAEGPIMVLAGPLAVSLLLPSLTLLVSHLSSS

SEQ ID NO: 80153 - protein, 100 aa, Homo sapiens
MSAKELCENDDLATSLVLDPYLGFQTHKMNTSAFPSRSSRHFSKSDSFSHNNPVRFRPIKGRQEELKEVIERFKKDEHLEKAFKCLTSGEWARHYFLNKN

SEQ ID NO: 80154 - protein, 195 aa, Homo sapiens
MRNLKLFRTLEFRDIQGPGNPQCFSLRTEQGTVLIGSEHGLIEVDPVSREVKNEVSLVAEGFLPEDGSGRIVGVQDLLDQESVCVATASGDVILCSLSTQQLECVGSVASGISVMSWSPDQELVLLATGQQTLIMMTKDFEPILEQQIHQDDFGESKFITVGWGRKETQFHGSEGRQAAFQMQMTLRQFDCIYTR

SEQ ID NO: 80155 - protein, 1344 aa, Homo sapiens
NVINLADSHDRAAFAMVTHVKQEPRERENSESKEEDVEIDIELAPGDQTSTPKTKELSEKDIGNQLHMLTNRHDKFLDTLREVKTGALLSAFVQLCHISTTLAEKTWVQLFPRLWKILSDRQQHALAGEISPFLCSGSHQVQRDCQPSALNCFVEAMSQCVPPIPIRPCVLKYLGKTHNLWFRSTLMLEHQAFEKGLSLQIKPKQTTEFYEQESITPPQQEILDSLAELYSLLQEEDMWAGLWQKRCKYSETATAIAYEQHGFFEQAQESYEKAMDKAKKEHERSNASPAIFPEYQLWEDHWIRCSKELNQWEALTEYGQSKGHINPYLVLECAWRVSNWTAMKEALVQVEVSCPKEMAWKVNMYRGYLAICHPEEQQLSFIERLVEMASSLAIREWRRLPHVVSHVHTPLLQAAQQIIELQEAAQINAGLQPTNLGRNNSLHDMKTVVKTWRNRLPIVSDDLSHWSSIFMWRQHHYQAIVTAYENSSQHDPSSNNAMLGVHASASAIIQYGKIARKQGLVNVALDILSRIHTIPTVPIVDCFQKIRQQVKCYLQLAGVMGKNECMQGLEVIESTNLKYFTKEMTAEFYALKGMFLAQINKSEEANKAFSAAVQMHDVLVKAWAMWGDYLENIFVKERQLHLGVSAITCYLHACRHQNESKSRKYLAKVLWLLSFDDDKNTLADAVDKYCIGVPPIQWLAWIPQLLTCLVGSEGKLLLNLISQVGRVYPQAVYFPIRTLYLTLKIEQRERYKSDSGQQQPSSVGNQSHSASDPGPIRATAPMWRCSRIMHMQRELHPTLLSSLEGIVDQMVWFRENWHEEVLRQLQQGLAKCYSVAFEKSGAVSDAKITPHTLNFVKKLVSTFGVGLENVSNVSTMFSSAASESLARRAQATAQDPVFQKLKGQFTTDFDFSVPGSMKLHNLISKLKKWIKILEAKTKQLPKFFLIEEKCRFLSNFSAQTAEVEIPGEFLMPKPTHYYIKIARFMPRVEIVQKHNTAARRLYIRGHNGKIYPYLVMNDACLTESRREERVLQLLRLLNPCLEKRKETTKRHLFFTVPRVVAVSPQMRLVEDNPSSLSLVEIYKQRCAKKGIEHDNPISRYYDRLATVQARGTQASHQVLRDILKEVQSNMVPRSMLKEWALHTFPNATDYWTFRKMFTIQLALIGFAEFVLHLNRLNPEMLQIAQDTGKLNVAYFRFDINDATGDLDANRPVPFRLTPNISEFLTTIGVSGPLTASMIAVARCFAQPNFKVDGILKTVLRDEIIAWHKKTQEDTSSPLSAAGQPENMDSQQLVSLVQKAVTAIMTRLHNLAQFEGGESKVNTLVAAANSLDNLCRMDPAWHPWL

SEQ ID NO: 80156 - protein, 218 aa, Homo sapiens
MARCFSLVLLLTSIWTTRLLVQGSLRAEDTWTNSCIPEIITTKDPIFNTQTATQTTEFIVSDSTYSVASPYSTIPAPTTTPPAPASTSIPRRKKLICVTEVFMETSTMSTETEPFVENKAAFKNEAAGFGGVPTALLVLALLFFGAAAGLGFCYVKRYVKAFPFTNKNQQKEMIETKVVKEEKANDSNPNEESKKTDKNPEESKSPSKTTVRCLEAEV

SEQ ID NO: 80157 - protein, 180 aa, Homo sapiens
MFASDLLRALDCCPGAGSSGLLPQLGPRQLLAFTVNCLGNHRYLGFFEDLEQRHKAQVLVEDISDILEEHAEKHFHPYIAYCSNEVYQQRTLQKLISSNAAFREALREIERRPACGGLPMLSFLILPMQRVTRLPLLMDTLCLKTQGHSERYKAASRALKAISKLVRQCNEGAHRMERME

SEQ ID NO: 80158 - protein, 117 aa, Homo sapiens
MLRTALRGAPRLLSRVQPRAPCLRRLWGRGARPEVAGRRRAWAWGWRRSSSEQGPGPAAALGRVEAAHYQLVYTCKKYRRDPDGQRRAGAPCGGRGGPGTGSGGCRGPHIHCSSGSG

SEQ ID NO: 80159 - protein, 137 aa, Homo sapiens
  MOD_RES (1)..(1): Any amino acid
XAQRGLAYLRDAWGILMDMRWRWMMLVFSASFVVHWLVFAVLWYVLAEMNGDLELDHDAPPENHTICVKYITSFTAAFSFSLETQLTIGYGTMFPSGDCPSAIALLAIQMLLGLMLEAFITGGHWRNMPKEDILPTV

SEQ ID NO: 80160 - protein, 313 aa, Homo sapiens
MPVDYEINAHKYWNDFYKIHENGFFKDRHWLFTEFPELAPSQNQNHLKDWFLENKSEVPECRNNEDGPGLIMEEQHKCSSKSLEHKTQTLPVEENVTQKISDLEICADEFPGSSATYRILEVGCGVGNTVFPILQTNNDPGLFVYCCDFSSTAIELVQTNSEYDPSRCFAFVHDLCDEEKSYPVPKGSLDIIILIFVLSAIVPDKMQKAINRLSRLLKPGGMMLLRDYGRYDMAQLRFKKGQCLSGNFYVRGDGTRVYFFTQEELDTLFTTAGLEKVQNLVDRRLQVNRGKQLTMYRVWIQCKYCKPLLSSTS

SEQ ID NO: 80161 - protein, 593 aa, Homo sapiens
MLQLQKSQYLQLGPSRGQYYGGSLPNVNQIGSGTMDLPFQTPFQSSGLDTSRTTRHHGLVDRVYRERGRLGSPHRRPLSVDKHGRQADSCPYGTMYLSPPADTSWRRTNSDSALHQSTMTPTQPESFSSGSQDVHQKRVLLLTVPGMEETTSEADKNLSKQAWDTKKTGSRPKSCEVPGINIFPSADQENTTALIPATHNTGGSLPDLTNIHFPSPLPTPLDPEEPTFPALSSSSSTGNLAANLTHLGIGGAGQGMSTPGSSPQHRPAGVSPLSLSTEARRQQASPTLSPLSPITQAVAMDALSLEQQLPYAFFTQAGSQQPPPQPQPPPPPPPASQQPPPPPPPQAPVRLPPGGPLLPSASLTRGPQPPPLAVTVPSSLPQSPPENPGQPSMGIDIASAPALQQYRTSAGSPANQSPTSPVSNQGFSPGSSPQHTSTLGSVFGDAYYEQQMAARQANALSHQLEQFNMMENAISSSSLYSPGSTLNYSQAAMMGLTGSHGSLPDSQQLGYASHSGIPNIILTVTGESPPSLSKELTSSLAGVGDVSFDSDSQFPLDELKIDPLTLDGLHMLNDPDMVLADPATEDTFRMDRL

SEQ ID NO: 80162 - protein, 35 aa, Homo sapiens
MYVTTLPVPGMHFNCSPKLFGDWEAQLRRIMKLIA

SEQ ID NO: 80163 - protein, 110 aa, Homo sapiens
MLSRSRCVSRAFSRSLSAFQKGSPYARDQVTLTAGRLSLTTVSSVFAFSELQLYARMTWLQSKPQRLQNLSQREMSGGRKLLETQLQKMKWFVRLKLTRHLCRFHHQQMA

SEQ ID NO: 80164 - protein, 473 aa, Homo sapiens
MQLPRWWELGDPCAWTGQGRGTRRMSPATTGTFLLTAFLLSCADGINGTVNWKTRQANNFIISRKMAAGMKDVYSIFSKVHSDRNVYPSAGVLFVHVLEREYFKGEFPPYPKPGEISNDPITFNTNLMGYPDRPGWLRYIQRTPYSDGVLYGSPTAENVGKPTIIEITAYNRRTFETARHNLIINIMSAEDFPLPYQAEFFIKNMNVEEMLASEVLGDFLGAVKNVWQPERLNAINITSALDRGGRVPLPINDLKEGVYVMVGADVPFSSCLREVENPQNQLRCSQEMEPVITCDKKFRTQFYIDWCKISLVDKTKQVSTYQEVIRGEGILPDGGEYKPPSDSLKSRDYYTDFLITLAVPSAVALVLFLILAYIMCCRREGVEKRNMQTPDIQLVHHSAIQKSTKELRDMSKNREIAWPLSTLPVFHPVTGEIIPPLHTDNYDSTNMPLMQTQQNLPHQTQIPQQQTTGKWYP

SEQ ID NO: 80165 - protein, 166 aa, Homo sapiens
MDTLEEVTWANGSTALPPPLAPNISVPHRCLLLLYEDIGTSRVRYWDLLLLIPNVLFLIFLLWKLPSARAKIRITSSPIFITFYILVFVVALVGIARAVVSMTVSTSNAATVADKILWEITRFFLLAIELSVIILGLAFGHLESKSSIKRVLAITTVLSLAYSVTQ

SEQ ID NO: 80166 - protein, 86 aa, Homo sapiens
DRAPAESRPFGTLPPRPPGQDTSMDDNPFGTRKVRSSFGRGFFKIKSNKRTASAPNLGTYDQNAFALILPQGGKEQCLPFPYSFIH

SEQ ID NO: 80167 - protein, 27 aa, Homo sapiens
  MOD_RES (1)..(1): Any amino acid
XLLPLVMQGVSRAEMGTADLGPSSDVF

SEQ ID NO: 80168 - protein, 569 aa, Homo sapiens
MGGRPSSPLDKQQRQHLRGQVDTLLRNFLPCYRGQLAASKLPRVREHRGPLTQLRGHPPRWQPIFCVLRGDGRLEWFSHKEEYENGGHCLGSTALTGYTLLTSQREYLRLLDALCPESLGDHTQEEPDSLLEVPVSFPLFLQHPFRRHLCFSAATREAQHAWRLALQGGIRLQGIVLQRSQAPAARAFLDAVRLYRQHQGHFGDDDVTLGSDAEVLTAVLMREQLPALRAQTLPGLRGAGRARAWAWTELLDAVHAAVLAGASAGLCAFQPEKDELLASLEKTIRPDVDQLLRQRARVAGRLRTDIRGPLESCLRREVDPQLPRVVQTLLRTVEASLEAVRTLLAQGMDRLSHRLRQSPSGTRLRREVYSFGEMPWDLALMQTCYREAERSRGRLGQLAAPFGFLGMQSLVFGAQDLAQQLMADAVATFLQLADQCLTTALNCDQAAQRLERVRGRVLKKFKSDSGLAQRRFIRGWGLCIFLPFVLSQLEPGCKKELPEFEGDVLAVGSQALTTEGIYEDVIRGCLLQRIDQDEETEAEREGGACPRQPDSGAQIQPLCPPPSPGTFRS

SEQ ID NO: 80169 - protein, 83 aa, Homo sapiens
MAHLLGSQACMESLRTDLTDLQGAIVDVFSRAGPVRFPSWKFPDRMACDLDMVALLEHYDHVPGDPEFTQLSHAVLLELVIDR

SEQ ID NO: 80170 - protein, 228 aa, Homo sapiens
MIMDRFGSDLQKIYEANAKRFSRKTVLQLSLRILDILEYIHEHEYVHGDIKASNLLLNYKNPDQVYLVDYGLAYRYCPEGVHKEYKEDPKRCHDGTIEFTSIDAHNGVAPSRRGDLEILGYCMIQWLTGHLPWEDNLKDPKYVRDSKIRYRENIASLMDKCFPEKNKPGEIAKYMETVKLLDYTEKPLYENLRDILLQGLKAIGSKDDGKLDLSVVENGGLKAKTITK

SEQ ID NO: 80171 - protein, 199 aa, Homo sapiens
MDDEMKREHLAAEQRMVHRIQRIMMECHREKVEAVEKARAEERHIAQEAIQAQKSKAVEEIVNTGVTVIKDEKTSVARLMREKEHEMSILYGIAQRQRQEEVQEVLQEAEKTHQATLGNMMDKLANTQGELLSIAKQLGIMTNWKDFLEEELQETRMAFQKYINYTFPKLSPGHADFILPERKKTPSNLVIKENKTTLD

SEQ ID NO: 80172 - protein, 140 aa, Homo sapiens
MNESPDPTDLAGVIIELGPNDSPHTSEFKGAARVSPISESVLARLSKFEVEDAENVASYDSKIKKIVHSIVSSFAFGLFGVFLVLLDVTLILADLIFTDSKLYIPLEYRSISLAIALFFLMDVLLRVFVERRQQYFSDLF

SEQ ID NO: 80173 - protein, 138 aa, Homo sapiens
MSSSYPTGLADVKAGPAQTLIRPQDMKGASRSPEDSSPDAARIRVKRYRQSMNNFQGLRSFGCRFGTCTVQKLAHQIYQFTDKDKDNVAPRSKISPQGYGRRRRRSLPEAGPGRTLVSSKPQAHGAPAPPSGSAPHFL

SEQ ID NO: 80174 - protein, 748 aa, Homo sapiens
MIEKMQGSRMDEQRCSFPPPLKTEEDYIPYPSVHEVLGREGPFPLILLPQFGGYWIEGTNHEITSIPETEPLQSPTTKVKLECNPTARIYRKHFLGKEHFNYYSLDAALGHLVFSLKYDVIGDQEHLRLLLRTKCRTYHDVIPISCLTEFPNVVQMAKLVCEDVNVDRFYPVLYPKASRLIVTFDEHVISNNFKFGVIYQKLGQTSEEELFSTNEESPAFVEFLEFLGQKVKLQDFKGFRGGLDVTHGQTGTESVYCNFRNKEIMFHVSTKLPYTEGDAQQLQRKRHIGNDIVAVVFQDENTPFVPDMIASNFLHAYVVVQAEGGGPDGPLYKVSVTARDDVPFFGPPLPDPAVFRKGPEFQEFLLTKLINAEYACYKAEKFAKLEERTRAALLETLYEELHIHSQSMMGLGGDEDKMENGSGGGGFFESFKRVIRSRSQSMDAMGLSNKKPNTVSTSHSGSFAPNNPDLAKAAGISLLIPGKSASRFGRRGSAIGIGTVEEVVVRGAAGSGGCLHALFSARSQDGGHIGDVAPLPPGQAPGRAGWSGGSSDGTQHLLWGLSLIVPGKSPTRKKSGPFGSRRSSAIGIENIQEVQEKRESPPAGQKTPDSGHVSQEPKSENSSTQSSPEMPTTKNRAETAAQRAEALKDFSRSSSSASSFASVVEETEGVDGEDTGLESVSSSGTPHKRDSFIYSTWLEDSVSTTSGGSSPGPSRSPHPDAGKLGDPACPEIKIQLEASEQHMPQLGC

SEQ ID NO: 80175 - protein, 37 aa, Homo sapiens
  MOD_RES (1)..(1): Any amino acid
XELLLGTTTQTTSIDMWAFPSCHWSASTASGSSPTTT

SEQ ID NO: 80176 - protein, 630 aa, Homo sapiens
MGLPRGPEGQGLPEVETREDEEQNVKLTEILELLVAAGYFRARIKGLSPFDKVVGGMTWCITTCNFDVDVDLLFQENSTIGQKIALSEKIVSVLPRMKCPHQLEPHQIQGMDFIHIFPVVQWLVKRAIETKEEMGDYIRSYSVSQFQKTYSLPEDDDFIKRKEKAIKTVVDLSEVYKPRRKYKRHQGAEELLDEESRIHATLLEYGRYGFSRQSKMEKAEDKKTALPAGLSATEKADAHEEDELRAAEEQRIQSLMTKMTAMANEESRLTASSVGQIVGLCSAEIKQIVSEYAEKQSELSAEESPEKLGTSQLHRRKVISLNKQIAQKTKHLEELRASHTSLQARYNEAKKTLTELKTYSEKLDKEQAALEKIESKADPSILQNLRALVAMNENLKSQEQEFKAHCREEMTRLQQEIENLKAERAPRGDEKTLSSGEPPGTLTSAMTHDEDLDRRYNMEKEKLYKIRLLQARRNREIAILHRKIDEVPSRAELIQYQKRFIELYRQISAVHKETKQFFTLYNTLDDKKVYLEKEISLLNSIHENFSQAMASPAARDQFLRQMEQIVEGIKQSRMKMEKKKQENKMRRDQLNDQYLELLEKQRLYFKTVKEFKEEGRKNEMLLSKVKAKAS

SEQ ID NO: 80177 - protein, 255 aa, Homo sapiens
MKRLVCVLLVCSSAVAQLHKDPTLDHHWHLWKKTYGKQYKEKNEEAVRRLIWEKNLKFVMLHNLEHSMGMHSYDLGMNHLGDMTSEEVMSLMSSLRVPSQWQRNITYKSNPNRILPDSVDWREKGCVTEVKYQDQKCQYDSKYRAATCSKYTELPYGREDVLKEAVANKGPVSVGVDARHPSFFLYRSGVYYEPSCTQNVNHGVLVVGYGDLNGKEYWLVKNSWGHNFGEEGYIRMARNKGNHCGIASFPSYPEI

SEQ ID NO: 80178 - protein, 273 aa, Homo sapiens
MGLLSDPVRRRALARLVLRLNAPLCVLSYVAGIAWFLALVFPPLTQRTYMSENAMGSTMVEEQFAGGDRARAFARDFAAHRKKSGQAVGLLLALAAHFRGQIYWAKDIVFLVTEHDLLGTEAWLEAYHDVNVTGMQSSPLQGRAGAIQAAVALELSSDVVTSLDVAVEGLNGQLPNLDLLNLFQTFCQKGGLLCTLQGKLQPEDWTSLDGPLQGLQTLLLMVLRQASGRPHGSHGLFLRYRVEALTLRGINSFRQYKYDLVAVGKALEGMFRK

SEQ ID NO: 80179 - protein, 656 aa, Homo sapiens
MLGEEKKYVNRFWKEIHVGDFVRLRCNEIFPADILLLSSSDPDGLCHIETANLDGETNLKRRQVVRGFSELVSEFNPLTFTSVIECEKPNNDLSRFRGCIIHDNGKKAGLYKENLLLRGCTLRNTDAVVGIVIYAGHETKALLNNSGPRYKRSKLERQMNCDVLWCVLLLVCMSLFSAVGHGLWIWRYQEKKSLFYVPKSDGSSLSPVTAAVYSFLTMIIVLQVLIPISLYVSIEIVKACQVYFINQDMQLYDEETDSQLQCRALNITEDLGQIQYIFSDKTGTLTENKMVFRRCTVSGVEYSHDANAQRLARYQEADSEEEEVVPRGGSVSQRGSIGSHQSVRVVHRTQSTKSHRRTGSRAEAKRASMLSKHTAFSSPMEKDITPDPKLLEKVSECDKSLAVARHQEHLLAHLSPELSDVFDFFIALTICNTVVVTSPDQPRTKVRVRFELKSPVKTIEDFLRRFTPSCLTSGCSSIGSLAANKSSHKLGSSFPSTPSSDGMLLRLEERLGQPTSAIASNGYSSQADNWASELAQEQESERELRYEAESPDEAALVYAARAYNCVLVERLHDQVSVELPHLGRLTFELLHTLGFDSVRKRMSVVIRHPLTDEINVYTKGADSVVMDLLQPCSSEMPIGELHGFFRSVFACLKGLD

SEQ ID NO: 80180 - protein, 80 aa, Homo sapiens
MEVTADQPRWVSHHHPAVLNGQHPDTHHPGLSHSYMDAAQYPLPEEVDVLFNIDGQGNHVPPYYGNSVRATVQRYPPTHH

SEQ ID NO: 80181 - protein, 127 aa, Homo sapiens
MSSAPRRPAKGADSFCTPEPESLGPGTPGFPEQEEDELHRTLGVERFEEILQEAGSRGGEEPGRSYGEEDFEYHRQSSHHIHHPLSTHLPPDARRRKTPQGPGRKPRRRPGASPTGETPTIEEGEED

SEQ ID NO: 80182 - protein, 66 aa, Homo sapiens
MRLILNLCRGAGCNRQAVAGQLLPSTWSLHAHGLAKEAPILPVKKISRSCSVNNKVSKKTTKPPTL

SEQ ID NO: 80183 - protein, 802 aa, Homo sapiens
MGAPACALALCVAVAIVAGASSESLGTEQRVVGRAAEVPGPEPGQQEQLVFGSGDAVELSCPPPGGGPMGPTVWVKDGTGLVPSERVLVGPQRLQVLNASHEDSGAYSCRQRLTQRVLCHFSVRVTDAPSSGDDEDGEDEAEDTGAPYWTRPERMDKKLLAVPAANTVRFRCPAAGNPTPSISWLKNGREFRGEHRIGGIKLRHQQWSLVMESVVPSDRGNYTCVVENKFGSIRQTYTLDVLERSPHRPILQAGLPANQTAVLGSDVEFHCKVYSDAQPHIQWLKHVEVNGSKVGPDGTPYVTVLKTAGANTTDKELEVLSLHNVTFEDAGEYTCLAGNSIGFSHHSAWLVVLPAEEELVEADEAGSVYAGILSYGVGFFLFILVVAAVTLCRLRSPPKKGLGSPTVHKISRFPLKRQVSLESNASMSSNTPLVRIARLSSGEGPTLANVSELELPADPKWELSRARLTLGKPLGEGCFGQVVMAEAIGIDKDRAAKPVTVAVKMLKDDATDKDLSDLVSEMEMMKMIGKHKNIINLLGACTQGGPLYVLVEYAAKGNLREFLRARRPPGLDYSFDTCKPPEEQLTFKDLVSCAYQVARGMEYLASQKCIHRDLAARNVLVTEDNVMKIADFGLARDVHNLDYYKKTTNGRLPVKWMAPEALFDRVYTHQSDVWSFGVLLWEIFTLGGSPYPGIPVEELFKLLKEGHRMDKPANCTHDLYMIMRECWHAAPSQRPTFKQLVEDLDRVLTVTSTDEYLDLSAPFEQYSPGGQDTPSSSSSGDDSVFAHDLLPPAPPSSGGSRT

SEQ ID NO: 80184 - protein, 454 aa, Homo sapiens
MRHSKRTYCPDWDDKDWDYGKWRSSSSHKRRKRSHSSAQENKRCKYNHSKMCDSHYLESRSINEKDYHSRRYIDEYRNDYTQGCEPGHRQRDHESRYQNHSSKSSGRSGRSSYKSKHRIHHSTSHRRSHGDEIVDTLGEGAFGKVVECIDHKAGGRHVAVKIVKNVDRYCEAARSEIQVLEHLNTTDPNSTFRCVQMLEWFEHHGHICIVFELLGLSTYDFIKENGFLPFRLDHIRKMAYQICKSVNFLHSNKLTHTDLKPENILFVQSDYTEAYNPKIKRDERTLINPDIKVVDFGSATYDDEHHSTLVSTRHYRAPEVILALGWSQPCDVWSIGCILIEYYLGFTVFPTHDSKEHLAMMERILGPLPKHMIQKTRKRKYFHHDRLDWDEHSSAGRYVSRRCKPLKEFMLSQDVEHERLFDLIQKMLEYDPAKRITLREALKHPFFDLLKKSI

SEQ ID NO: 80185 - protein, 468 aa, Homo sapiens
MNSGTSLTMAPQSLPSSRMAPLGMLLGLLMAACFTFCLSHQNLEFALTNPEKSSTKETERKETKAEEELDAEVLEVFHPTHEWQALQPGQAVPAGSHVRLNLQTGEREAKLQYEDKFRNNLKGKRLDINTNTYTSQDLKSALAKFKEGAEMESSKEDKARQAEVKRLFRPIEELKKDFDELNVVIETDMQIMVRLINKFNSSSSSLEEKIAALFDLEYYVHQMDNAQDLLSFGGLQVVINGLNSTEPLVKEYAAFVLGAAFSSNPKVQVEAIEGGALQKLLVILATEQPLTAKKKVLFALCSLLRHFPYAQRQFLKLGGLQVLRTLVQEKGTEVLAVRVVTLLYDLVTEKMFAEEEAELTQEMSPEKLQQYRQVHLLPGLWEQGWCEITAHLLALPEHDAREKVLQTLGVLLTTCRDRYRQDPQLGRTLASLQAEYQVLASLELQDGEDEGYFQELLGSVNSLLKELR

SEQ ID NO: 80186 - protein, 183 aa, Homo sapiens
MSKGPAVGIDLGTTYSCVGVFQHGKVEIIANDQGNRTTPSYVAFTDTERLIGDAAKNQVAMNPTNTVFDAKRLIGRRFDDAVVQSDMKHWPFMVVNDAGRPKVQVEYKGETKSFYPEEVSSMVLTKMKEIAEAYLGKTVTNAVVTVPAYFNDSQRQATKDAGTIAGLNVLRIINEPTAAAIAY

SEQ ID NO: 80187 - protein, 88 aa, Homo sapiens
MGCDGRVSGLLRRNLQPTLTYWSVFFSFGLCIAFLGPTLLDLRCQTHSSLPQISWVFFSQQLCLLLGSALGGVFKRTCSISSWALVLC

SEQ ID NO: 80188 - protein, 121 aa, Homo sapiens
MLLELSEEHKEHLAFLPQVDSAVVAEFGRIAVEFLRRGANPKIYEGAARKLNVSSDTVQHGVEGLTYLLTESSKLMVRDFLDCFVLAGFLRTVWCTLHHSPGRFLNWISKTLFLFWDSLKN

SEQ ID NO: 80189 - protein, 38 aa, Homo sapiens
MAAIYLSRGFFSREPICPFEEKTKVERMVEDYLASGYQ

SEQ ID NO: 80190 - protein, 159 aa, Homo sapiens
MIMNKMKNFKRRFSLSVPRTETIEESLAEFTEQFNQLHNRRNENSGEEPGQLSPGVQFQRRQNQRRFSMEVRASGALPRQVAGCTHKGVHRRAAALQPDFDVSKRLSLPMDIRLPQEFLQKLQMESPDLPKPLSRMSRRASLSDIGFGKLETYVKLDKL

SEQ ID NO: 80191 - protein, 149 aa, Homo sapiens
MQCILTRVDFDLYYGGEAFSVEQPQSFTCPYCGKMGYTETSLQEHVTSEHAETSTEVICPICAALPGGDPNHVTDDFAAHLTLEHRAPRDLDESSGVRHVRRMFHPGRGLGGPRARRSNMHFTSSSTGGLSSSQSSYSPSNREAMDPIA

SEQ ID NO: 80192 - protein, 185 aa, Homo sapiens
MECCRRATPGTLLLFLAFLLLSSRTARSEEDRDGLWDAWGPWSECSRTCGGGASYSLRRCLSSKSCEGRNIRYRTCSNVDCPPEAGDFRAQQCSAHNDVKHHGQFYEWLPVSNDPDNPCSLKCQAKGTTLVVELAPKVLDGTRCYTESLDMCISGLCQVSADLFSFNLSRGFQCLCVNGLHSLTL

SEQ ID NO: 80193 - protein, 153 aa, Homo sapiens
MAQPLAFILDVPETPGDQGQGPSPYDESEVHDSFQQLIQEQSQCTAQEGLELQQREREVTGSSQQTLWRPEGTQSTATLRILASMPSRTIGRSRGAIISQYYNRTVQLRCRSSRPLLGNFVRSAWPSLRLYDLELDPTALEEEEKQSLLVKEL

SEQ ID NO: 80194 - protein, 100 aa, Homo sapiens
MEKFVDPGNHNSGIDLLRTYLWRCQFLLPFVSLGLMCFGALIGLCACICRSLYPTIATGILHLLAGLCTLGSVSCYVAGIELLHQKLELPDNVSGEFGWS

SEQ ID NO: 80195 - protein, 994 aa, Homo sapiens
MRPVALLLLPSLLALLAHGLSLEAPTVGKGQAPGIEETDGELTAAPTPEQPERGVHFVTTAPTLKLLNHHPLLEEFLQEGLEKGDEELRPALPFQPDPPAPFTPSPLPRLANQDSRPVFTSPTPAMAAVPTQPQSKEGPWSPESESPMLRITAPLPPGPSMAVPTLGPGEIASTTPPSRAWTPTQEGPGDMGRPWVAEVVSQGAGIGIQGTITSSTASGDDEETTTTTTIITTTITTVQTPGPCSWNFSGPEGSLDSPTDLSSPTDVGLDCFFYISVYPGYGVEIKVQNISLREGETVTVEGLGGPDPLPLANQSFLLRGQVIRSPTHQAALRFQSLPPPAGPGTFHFHYQAYLLSCHFPRRPAYGDVTVTSLHPGGSARFHCATGYQLKGARHLTCLNATQPFWDSKEPVCIGECPGVIRNATTGRIVSPGFPGNYSNNLTCHWLLEAPEGQRLHLHFEKVSLAEDDDRLIIRNGDNVEAPPVYDSYEVEYLPIEGLLSSGKHFFVELSTDSSGAAAGMALRYEAFQQGHCYEPFVKYGNFSSSTPTYPVGTTVEFSCDPGYTLEQGSIIIECVDPHDPQWNETEPACRAVCSGEITDSAGVVLSPNWPEPYGRGQDCIWGVHVEEDKRIMLDIRVLRIGPGDVLTFYDGDDLTARVLGQYSGPRSHFKLFTSMADVTIQFQSDPGTSVLGYQQGFVIHFFEVPRNDTCPELPEIPNGWKSPSQPELVHGTVVTYQCYPGYQVVGSSVLMCQWDLTWSEDLPSCQRVTSCHDPGDVEHSRRLISSPKFPVGATVQYICDQGFVLMGSSILTCHDRQAGSPKWSDRAPKCLLEQLKPCHGLSAPENGARSPEKQLHPAGATIHFSCAPGYVLKGQASIKCVPGHPSHWSDPPPICRAASLDGSTTVAAWMVAKAPAASSTLDAAHIAAAIFLPLVAMVLLVGGVYFYFSRLQGKSSLQLPRPRPRPYNRITIESAFDNPTYETGSLSFAGDERI

SEQ ID NO: 80196 - protein, 282 aa, Homo sapiens
MCGRTSCHLPRDVLTRACAYQDRRGQQRLPEWRDPDKYCPSYNKSPQSNSPVLLSRLHFEKVPLGKGRRCVVLADGFYEWQRCQGTNQRQPYFIYFPQIKTEKSGSIGAADSPENWEKVWDNWRLLTMAGIFDCWEPPEGGDVLYSYTIITVDSCKGLSDIHHRMPAILDGEEAVSKWLDFGEVSTQEALKLIHPTENITFHAVSSVVNNSRNNTPECLAPVDLVVKKELRASGSSQRMLQWLATKSPKKEDSKTPQKEESDVPQWSSQFLQKSPLPTKRGT

SEQ ID NO: 80197 - protein, 79 aa, Homo sapiens
MNLRGLFQDFNPSKFLIYACLLLFSVLLALRLDGIIQWSYWAVFAPIWLWKLMVIVGASVGTGVWARNPQYRRRNVCGV

SEQ ID NO: 80198 - protein, 1011 aa, Homo sapiens
MLLVIDQKIEGEVRERMLVSYYRYSAARSSADSNMDDICKLLRSTGYSSQPGAKRPSNYPESYFQRVPINESFISMVIGRLRSDDIYNQVSAYPLPEHRSTALANQAAMLYVILYFEPSILHTHQAKMREIVDKYFPDNWVISIYMGITVNLVDAWEPYKAAKTALNNTLDLSNVREQASRYATVSERVHAQVQQFLKEGYLREEMVLDNIPKLLNCLRDCNVAIRWLMLHTADSACDPNNKRLRQIKDQILTDSRYNPRILFQLLLDTAQFEFILKEMFKQMLSEKQTKWEHYKKEGSERMTELADVFSGVKPLTRVEKNENLQAWFREISKQILSLNYDDSTAAGRKTVQLIQALEEVQEFHQLESNLQVCQFLADTRKFLHQMIRTINIKEEVLITMQIVGDLSFAWQLIDSFTSIMQESIRVNPSMVTKLRATFLKLASALDLPLLRINQANSPDLLSVSQYYSGELVSYVRKVLQIIPESMFTSLLKIIKLQTHDIIEVPTRLDKDKLRDYAQLGPRYEVAKLTHAISIFTEGILMMKTTLVGIIKVDPKQLLEDGIRKELVKRVAFALHRGLIFNPRAKPSELMPKLKELGATMDGFHRSFEYIQDYVNIYGLKIWQEEVSRIINYNVEQECNNFLRTKIQDWQSMYQSTHIPIPKFTPVDESVTFIGRLCREILRITDPKMTCHIDQLNTWYDMKTHQEVTSSRLFSEIQTTLGTFGLNGLDRLLCFMIVKELQNFLSMFQKIILRDRTVQDTLKTLMNAVSPLKSIVANSNKIYFSAIAKTQKIWTAYLEAIMKVGQMQILRQQIANELNYSCRFDSKHLAAALENLNKALLADIEAHYQDPSLPYPKEDNTLLYEITAYLEAAGIHNPLNKIYITTKRLPYFPIVNFLFLIAQLPKLQYNKNLGMVCRKPTDPVDWPPLVLGLLTLLKQFHSRYTEQFLALIGQFICSTVEQCTSQKIPEIPADVVGALLFLEDYVRYTKLPRRVAEAHVPNFIFDEFRTVL

SEQ ID NO: 80199 - protein, 92 aa, Homo sapiens
MFSTLRFFEGFCLAGIILTLYALRIELCPPGKRFMITMVASFVAMAGQFLMPGLAALCRDWQVLQALIICPFLLMLLYWSYYLWLLSGYSQS

SEQ ID NO: 80200 - protein, 1886 aa, Homo sapiens
MTRWVPTKREEKYGVAFYNYDARGADELSLQIGDTVHILETYEGWYRGYTLRKKSKKGIFPASYIHLKEAIVEGKGQHETVIPGDLPLIQEVTTTLREWSTIWRQLYVQDNREMFRSVRHMIYDLIEWRSQILSGTLPQDELKELKKKVTAKIDYGNRILDLDLVVRDEDGNILDPELTSTISLFRAHEIASKQVEERLQEEKSQKQNIDINRQAKFAATPSLALFVNLKNVVCKIGEDAEVLMSLYDPVESKFISENYLVRWSSSGLPKDIDRLHNLRAVFTDLGSKDLKREKISFVCQIVRVGRMELRDNNTRKLTSGLRRPFGVAVMDVTDIINGKVDDEDKQHFIPFQPLALDDAIRHKPLNMSSRFSPRVAGENDFLQTVINKVIAAKEVNHKGQGLWVTLKLLPGDIHQIRKEFPHLVDRTTAVARKTGFPEIIMPGDVRNDIYVTLVQGDFDKGSKTTAKNVEVTVSVYDEDGKRLEHVIFPGAGDEAISEYKSVIYYQVKQPRWFETVKVAIPIEDVNRSHLRFTFRHRSSQDSKDKSEKIFALAFVKLMRYDGTTLRDGEHDLIVYKAEAKKLEDAATYLSLPSTKAELEEKGHSATGKSMQSLGSCTISKDSFQISTLVCSTKLTQNVDLLGLLKWRSNTSLLQQNLRQLMKVDGGEVVKFLQDTLDALFNIMMENSESETFDTLVFDALVFIIGLIADRKFQHFNPVLETYIKKHFSATLAYTKLTKVLKNYVDGAEKPGVNEQLYKAMKALESIFKFIVRSRILFNQLYENKGEADFVESLLQLFRSINDMMSSMSDQTVRVKGAALKYLPTIVNDVKLVFDPKELSKMFTEFILNVPMGLLTIQKLYCLIEIVHSDLFTQHDCREILLPMMTDQLKYHLERQEDLEACCQLLSHILEVLYRKDVGPTQRHVQIIMEKLLRTVNRTVISMGRDSELIGNFVACMTAILRQMEDYHYAHLIKTFGKMRTDVVDFLMETFIMFKNLIGKNVYPFDWVIMNMVQNKVFLRAINQYADMLNKKFLDQANFELQLWNNYFHLAVAFLTQESLQLENFSSAKRAKILNKYGDMRRQIGFEIRDMWYNLGQHKIKFIPEMVGPILEMTLIPETELRKATIPIFFDMMQCEFHSTRSFQMFENEIITKLDHEVEGGRGDEQYKVLFDKILLEHCRKHKYLAKTGETFVKLVVRLMERLLDYRTIMHDENKENRMSCTVNVLNFYKEIEREEMYIRYLYKLCDLHKECDNYTEAAYTLLLHAKLLKWSEDVCVAHLTQRDGYQATTQGQLKEQLYQEIIHYFDKGKMWEEAIALGKELAEQYENEMFDYEQLSELLKKQAQFYENIVKVIRPKPDYFAVGYYGQGFPTFLRGKVFIYRGKEYERREDFEARLLTQFPNAEKMKTTSPPGDDIKNSPGQYIQCFTVKPKLDLPPKFHRPVSEQIVSFYRVNEVQRFEYSRPIRKGEKNPDNEFANMWIERTIYTTAYKLPGILRWFEVKSVFMVEISPLENAIETMQLTNDKINSMVQQHLDDPSLPINPLSMLLNGIVDPAVMGGFANYEKAFFTDRYLQEHPEAHEKIEKLKDLIAWQIPFLAEGIRIHGDKVTEALRPFHERMEACFKQLKEKVEKEYGVRIMPSSLDDRRGSRPRSMVRSFTMPSSSRPLSVASVSSLSSDSTPSRPGSDGFALEPLLPKKMHSRSQDKLDKDDLEKEKKDKKKEKRNSKHQEIFEKEFKPTDISLQQSEAVILSETISPLRPQRPKSQVMNVIGSERRFSVSPSSPSSQQTPPPVTPRAKLSFSMQSSLELNGMTGADVADVPPPLPLKGSVADYGNLMENQDLLGSPTPPPPPPHQRHLPPPLPSKTPPPPPPKTTRKQASVDSGIVQ

SEQ ID NO: 80201 - protein, 622 aa, Homo sapiens
MDLSALRVEEVQNVINAMQKILECPICLELIKEPVSTKCDHIFCKSLQESTRFSQLVEELLKIICAFQLDTGLEYANSYNFAKKENNSPEHLKDEVSIIQSMGYRNRAKRLLQSEPENPSLQETSLSVQLSNLGTVRTLRTKQRIQPQKTSVYIELGSDSSEDTVNKATYCSVGDQELLQITPQGTRDEISLDSAKKAACEFSETDVTNTEHHQPSNNDLNTTEKRAAERHPEKYQGSSVSNLHVEPCGTNTHASSLQHENSSLLLTKDRMNVEKAEFCNKSKQPGLARSQHNRWAGSKETCNDRRTPSTEKKVDLNADPLCERKEWNKQKLPCSENPRDTEDVPWITLNSSIQKVNEWFSRSDELLGSDDSHDGESESNAKVADVLDVLNEVDEYSGSSEKIDLLASDPHEALICKSERVHSKSVESNIEDKIFGKTYRKKASLPNLSHVTENLIIGAFVTEPQIIQERPLTNKLKRKRRPTSGLHPEDFIKKADLAVQKTPEMINQGTNQTEQNGQVMNITNSGHENKTKGDSIQNEKNPNPIESLEKESAFKTKAEPISSSISNMELELNIHNSKAPKKNRLRRKSSTRHIHALELVVSRNLSPPNCTELQIDSCSSSE

SEQ ID NO: 80202 - protein, 180 aa, Homo sapiens
MGEFNEKKTTCGTVCLKYLLFTYNCCFWLAGLAVMAVGIWTLALKSDYISLLASGTYLATAYILVVAGTVVMVTGVLGCCATFKERRNLLRLYFILLLIIFLLEIIAGILAYAYYQQLNTELKENLKDTMTKRYHQPGHEAVTSAVDQLQQEFHCCGSNNSQDWRDSEWIRSQEAGGRVV

SEQ ID NO: 80203 - protein, 81 aa, Homo sapiens
MVRNNFYAVRLLPSTCVVLSQTSNCRRSHQDPLAASCICQASGCWLIGKGSLVMEGQKHLNSKKKGLKASFSLSLTFTSRL

SEQ ID NO: 80204 - protein, 132 aa, Homo sapiens
GEAGPRSQRRTVWPCYDDVSCTQPDALTSLFSEIEKLEHKLNQAPEKWQQLWERVTVDLKEEPRTDRSQRHLSRSPGIVSTNLPSYQKRSLLHLPDSSMGEEQNSSISPSNGVERRAATLYSQYTSKNDENR

SEQ ID NO: 80205 - protein, 29 aa, Homo sapiens
MVKLSIVLTPQFLSHDQGQLTKELQQHVK

SEQ ID NO: 80206 - protein, 159 aa, Homo sapiens
MHTLVFLSTRQVLQCQPAACQALPLLPRELFPLLFKVAFMDKKTVVLRELVHTWPFPLLSFQQLLQECAHCSRALLQERPSTESMQAVILGLTARLHTSEPGASTQPLCRKHALRVLDMTGLLDDGVEQDPGTMSMWDCTAAVARTCIAQQQGGAAEPG

SEQ ID NO: 80207 - protein, 91 aa, Homo sapiens
  MOD_RES (1)..(1): Any amino acid
XVSVAWLLSSSASFLASFLGWEPLKVLLEALYFSLVAKRLHPDEDDTLVESPAVTPVSARVPRVRPPHGFALFLAKEEARKVKRLHGMLRV

SEQ ID NO: 80208 - protein, 44 aa, Homo sapiens
  MOD_RES (1)..(1): Any amino acid
XTPVTTVPPGARWLTQEEFHTAAVSTAMKKVFRVYQGQQPGTCM

SEQ ID NO: 80209 - protein, 3296 aa, Homo sapiens
  MOD_RES (1)..(1): Any amino acid
XSSPLGLLGTTDEPPPSGPSTTQGAQAPLLQQRPQELGELRVLGRDETGRLRVVWTAQPDTFAYFQLRMRVPEGPGAHEEVLPGDVRQALVPPPPPGTPYELSLHGVPPGGKPSDPIIYQGIMDKDEEKPGKSSGPPRLGELTVTDRTSDSLLLRWTVPEGEFDSFVIQYKDRDGQPQVVPVEGPQRSAVITSLDPGRKYKFVLYGFVGKKRHGPLVAEAKILPQSDPSPGTPPHLGNLWVTDPTPDSLHLSWTVPEGQFDTFMVQYRDRDGRPQVVPVEGPERSFVVSSLDPDHKYRFTLFGIANKKRYGPLTADGTTAPERKEEPPRPEFLEQPLLGELTVTGVTPDSLRLSWTVAQGPFDSFMVQYKDAQGQPQAVPVAGDENEVTVPGLDPDRKYKMNLYGLRGRQRVGPESVVAKTAPQEDVDETPSPTELGTEAPESPEEPLLGELTVTGSSPDSLSLFWTVPQGSFDSFTVQYKDRDGRPQAVRVGGKESEVTVGGLEPGHKYKMHLYGLHEGQRVGPVSAVGVTAPQQEETPPATESPLEPRLGELTVTDVTPNSVGLSWTVPEGQFDSFIVQYKDKDGQPQVVPVAADQREVTVYNLEPERKYKMNMYGLHDGQRMGPLSVVIVTAPLPPAPATEASKPPLEPRLGELTVTDITPDSVGLSWTVPEGEFDSFVVQYKDRDGQPQVVPVAADQREVTIPDLEPSRKYKFLLFGIQDGKRRSPVSVEAKTVARGDASPGAPPRLGELWVTDPTPDSLRLSWTVPEGQFDSFVVQFKDKDGPQVVPVEGHERSVTVTPLDAGRKYRFLLYGLLGKKRHGPLTADGTTEARSAMDDTGTKRPPKPRLGEELQVTTVTQNSVGLSWTVPEGQFDSFVVQYKDRDGQPQVVPVEGSLREVSVPGLDPAHRYKLLLYGLHHGKRVGPISAVAITAGREETETETTAPTPPAPEPHLGELTVEEATSHTLHLSWMVTEGEFDSFEIQYTDRDGQLQMVRIGGDRNDITLSGLESDHRYLVTLYGFSDGKHVGPVHVEALTVPEEEKPSEPPTATPEPPIKPRLGELTVTDATPDSLSLSWTVPEGQFDHFLVQYRNGDGQPKAVRVPGHEEGVTISGLEPDHKYKMNLYGFHGGQRMGPVSVVGVTAAEEETPSPTEPSMEAPEPAEEPLLGELTVTGSSPDSLSLSWTVPQGRFDSFTVQYKDRDGRPQVVRVGGEESEVTVGGLEPGRKYKMHLYGLHEGRRVGPVSAVGVTAPEEESPDAPLAKLRLGQMTVRDITSDSLSLSWTVPEGQFDHFLVQFKNGDGQPKAVRVPGHEDGVTISGLEPDHKYKMNLYGFHGGQRVGPVSAVGLTAPGKDEEMAPASTEPPTPEPPIKPRLEELTVTDATPDSLSLSWTVPEGQFDHFLVQYKNGDGQPKATRVPGHEDRVTISGLEPDNKYKMNLYGFHGGQRVGPVSAIGVTAAEEETPSPTEPSMEAPEPPEEPLLGELTVTGSSPDSLSLSWTVPQGRFDSFTVQYKDRDGRPQVVRVGGEESEVTVGGLEPGRKYKMHLYGLHEGRRVGPVSTVGVTAPQEDVDETPSPTEPGTEAPGPPEEPLLGELTVTGSSPDSLSLSWTVPQGRFDSFTVQYKDRDGRPQAVRVGGQESKVTVRGLEPGRKYKMHLYGLHEGRRLGPVSAVGVTEDEAETTQAVPTMTPEPPIKPRLGELTMTDATPDSLSLSWTVPEGQFDHFLVQYRNGDGQPKAVRVPGHEDGVTISGLEPDHKYKMNLYGFHGGQRVGPISVIGVTAAEEETPSPTELSTEAPEPPEEPLLGELTVTGSSPDSLSLSWTIPQGHFDSFTVQYKDRDGRPQVMRVRGEESEVTVGGLEPGRKYKMHLYGLHEGRRVGPVSTVGVTVPTTTPEPPNKPRLGELTVTDATPDSLSLSWMVPEGQFDHFLVQYRNGDGQPKVVRVPGHEDGVTISGLEPDHKYKMNLYGFHGGQRVGPISVIGVTAAEEETPAPTEPSTEAPEPPEEPLLGELTVTGSSPDSLSLSWTIPQGRFDSFTVQYKDRDGRPQVVRVRGEESEVTVGGLEPGCKYKMHLYGLHEGQRVGPVSAVGVTVPTMTPEPPIKPRLGELTVTDATPDSLSLSWMVPEGQFDHFLVQYRNGDGQPKAVRVPGHEDGVTISGLEPDHKYKMNLYGFHGGQRVGPVSAIGVTEEETPSPTEPSTEAPEAPEEPLLGELTVTGSSPDSLSLSWTVPQGRFDSFTVQYKDRDGQPQVVRVRVEESEVTVGGLEPGRKYKMHLYGLHEGQRVGPVSTVGITAPLPTPLPVEPRLGELAVAAVTSDSVGLSWTVAQGPFDSFLVQYRDAQGQPQAVPVSGDLRAVAVSGLDPARKYKFLLFGLQNGKRHGPVPVEARTAPDTKPSPRLGELTVTDATPDSVGLSWTVPEGEFDSFVVQYKDKDGRLQVVPVAANQREVTVQGLEPSRKYRFLLYGLSGRKRLGPISADSTTAPLEKELPPHLGELTVAEETSSSLRLSWTVAQGPFDSFVVQYRDTDGQPRAVPVAADQRTVTVEDLEPGKKYKFLLYGLLGGKRLGPVSALGMTAPEEDTPAPELAPEAPEPPEEPRLGVLTVTDTTPDSMRLSWSVAQGPFDSFVVQYEDTNGQPQALLVDGDQSKILISGLEPSTPYRFLLYGLHEGKRLGPLSAEGTTGLAPAGQTSEESRPRLSQLSVTDVTTSSLRLNWEAPPGAFDSFLLRFGVPSPSTLEPHPRPLLQRELMVPGTRHSAVLRDLRSGTLYSLTLYGLRGPHKADSIQGTARTLSPVLESPRDLQFSEIRETSAKVNWMPPPSRADSFKVSYQLADGGEPQSVQVDGQARTQKLQGLIPGARYEVTVVSVRGFEESEPLTGFLTTVPDGPTQLRALNLTEGFAVLHWKPPQNPVDTYDVQVTAPGAPPLQAETPGSAVDYPLHDLVLHTNYTATVRGLRGPNLTSPASITFTTGLEAPRDLEAKEVTPRTALLTWTEPPVRPAGYLLSFHTPGGQNQEILLPGGITSHQLLGLFPSTSYNARLQAMWGQSLLPPVSTSFTTGGLRIPFPRDCGEEMQNGAGASRTSTIFLNGNRERPLNVFCDMETDGGGWLVFQRRMDGQTDFWRDWEDYAHGFGNISGEFWLGNEALHSLTQAGDYSMRVDLRAGDEAVFAQYDSFHVDSAAEYYRLHLEGYHGTAGDSMSYHSGSVFSARDRDPNSLLISCAVSYRGAWWYRNCHYANLNGLYGSTVDHQGVSWYHWKGFEFSVPFTEMKLRPRNFRSPAGGG

SEQ ID NO: 80210 - protein, 470 aa, Homo sapiens
  MOD_RES (1)..(1): Any amino acid
XITFPILFIGWGSQSSKVHIHHSTWLHFPGHNLRWILTFMLLFVLVCEIAEGILSDGVTESHHLHLYMPAGMAFMAAVTSVVYYHNIETSNFPKLLIALLVYWTLAFITKTIKFVKFLDHAIGFSQLRFCLTGLLVILYGMLLLVEVNVIRVRRYIFFKTPREVKPPEDLQDLGVRFLQPFVNLLSKGTYWWMNAFIKTAHKKPIDLRAIGKLPIAMRALTNYQRLCEAFDAQRKDIQGTQGARAIWQALSHAFGRRLVLSSTFRILADLLGFAGPLCIFGIVDHLGKENDVFQPKTQFLGVYFVSSQEFLANAYVLAVLLFLALLLQRTFLQASYYVAIETGINLRGAIQTKIYNKIMHLSTSNLSMGEMTAGQICNLVAIDTNQLMWFFFLCPNLWAMPVQIIVGVILLYYILGVSALIGAAVIILLAPVQYFVATKLSQAQRSTLVSAQSFHEHGHPHCSCPHTCKS

SEQ ID NO: 80211 - protein, 405 aa, Homo sapiens
  MOD_RES (1)..(1): Any amino acid
XGESIKAIVKDVMYICPFMGAVSGTLTVTDFKLYFKNVERDPHFILDVPLGVISRVEKIGAQSHGDNSCGIEIVCKDMRNLRLAYKQEEQSKLGIFENLNKHAFPLSNGQALFAFSYKEKFPINGWKVYDPVSEYKRQGLPNESWKISKINSNYEFCDTYPAIIVVPTSVKDDDLSKVAAFRAKGRVPVLSWIHPESQATITRCSQPLVGPNDKRCKEDEKYLQTIMDANAQSHKLIIFDARQNSVADTNKMLLAGAVRIADKIESGKTSVVVHCSDGWDRTAQLTSLAMLMLDSYYRTIKGFETLVEKEWISFGHRFALRVGHGNDNHADADRSPIFLQFVDCVWQMTRQFPSAFEFNELFLITILDHLYSCLFGTFLCNCEQQRFKEAWGAGTQRARGSLRSR

SEQ ID NO: 80212 - protein, 136 aa, Homo sapiens
MHARGPHGQLSPALPLASSVLMLLMSTLWLVGAGPGLVLAPELLLDPWQVHRLLTHALGHTALPGLLLSLLLLPTVGWQQECHLGTLRFLHASALLALASGLLAVLLAGLGLSSAAGSCGYMPVHLAMLAGEGHRP

SEQ ID NO: 80213 - protein, 212 aa, Homo sapiens
MSAEVKVTGQNQEQFLLLAKSAKGAALATLIHQVLEAPGVYVFGELLDMPNVRELAESDFASTFRLLTVFAYGTYADYLAEARNLPPLTEAQKNKLRHLSVVTLAAKVKCIPYAVLLEALALRNVRQLEDLVIEAVYADVLRGSLDQRNQRLEVDYSIGRDIQRQDLSAIARTLQEWCVGCEVVLSGIEEQVSRANQHKEQQLGLKQQIESE

SEQ ID NO: 80214 - protein, 110 aa, Homo sapiens
MEVWGQELGPSARAHRHPDQQAARLAGGQKALQPEMAESGADDPREDQCCHPGHARERRDRPAAVWVLHSLLSLPKNPGPSQRHRGLHEEYFWPILFTADEGLAGDYSSV

SEQ ID NO: 80215 - protein, 37 aa, Homo sapiens
EEWITYSNSCYYIGKERRTWEERVCWPVLRRTLICFL

SEQ ID NO: 80216 - protein, 48 aa, Homo sapiens
MGLPRGPLASLLLLQYSWAALGKSQLCLALIMMTSLCGMARQSRKEGH

SEQ ID NO: 80217 - protein, 153 aa, Homo sapiens
MSGLSGPPARRGPFPLALLLLFLLGPRLVLAISFHLPINSRKCLREEIHKDLLVTGAYEISDQSGGAGGLRSHLKITDSAGHILYSKEDATKGKFAFTTEDYDMFEVCFESKGTGRIPDQLVILDMKHGVEAKNYEEHSVSEEKVWKDNTSSL

SEQ ID NO: 80218 - protein, 156 aa, Homo sapiens
MQISSEKEEDDNEKRQDPGDNWEEGGGGGGGMEKSSGPWNKTAPVQAPPAPVIVTETPEPAMTSGVYRPPGARLTTTRKTPQGPPEIYSDTQFPSLQSTAKHVESRKDKEMEKSFEVVRHKNRGRDEVSKNQALKLQLDNQYAVLENQKSSHSQYN

SEQ ID NO: 80219 - protein, 185 aa, Homo sapiens
MGRTVVVLGGGISGLAASYHLSRAPCPPKVVLVESSERLGGWIRSVRGPNGAIFELGPRGIRPAGALGARTLLLVMLGGSWLQTLEASGCVLSQELFQQRAQEAAATQLGLKEMPSHCLVHLHKNCIPQYTLGHWQKLESARQFLTAHRLPLTLAGASYEGVAVNDCIESGRQAAVSVLGTEPNS

SEQ ID NO: 80220 - protein, 60 aa, Homo sapiens
MEVAEPSSPTEEEEEEEEHSAEPRPRTRSNPEGAEDRAVGAQASPLRSKFGHQGSTVQRK

SEQ ID NO: 80221 - protein, 140 aa, Homo sapiens
MRRRRRRDGFYPAPDFRDREAEDMAGVFDIDLDQPEDAGSEDELEEGGQLNESMDHGGVGPYELGMEHCEKFEISETSVNRGPEKIRPECFELLRVLGKGGYGKVFQVRKVTGANTGKIFAMKVLKKMISFPLGNDSKKC

SEQ ID NO: 80222 - protein, 96 aa, Homo sapiens
MVGAKAGPSPGTSLGLAQQHSGGSSVLVKSPFCQQVSTSLPCICSTPRCAAVGLLLVPAAATLGGPLSPHPLAAACSTSSSMWGPQQSAASCCQGQ

SEQ ID NO: 80223 - protein, 224 aa, Homo sapiens
MVNAWFAERVHTIPVCKEGIRGHTESCSCPLQQSPRADNSAPGTPTRKISASEFDRPLRPIVVKDSEGTVSFLSDSEKKEQMPLTPPRFDHDEGDQCSRLLELVKDISSHLDVTALCHKIFLHIHGLISADRYSLFLVCEDSSNDKFLISRLFDVAEGSTLEEVSNNCIRLEWNKGIVGHVAALGEPLNIKDAYEDPRFNAEVDQITGYKTQSILCMPIKNHRE

SEQ ID NO: 80224 - protein, 441 aa, Homo sapiens
KRRRAASMNRLGCWPARSLPRSGRGSGQRSLGLGGHPSGPRHPGTPAAKRTWESPGVRARDCPLSTSWLSEPPLGPAPHLSMVQAHGGRSRAQPLTLSLGAAMTQPPPEKTPAKKHVRLQERRGSNVALMLDVRSLGAVEPICSVNTPREVTLHFLRTAGHPLTRWALQRQPPSPKQLEEEFLKIPSNFVSPEDLDIPGHASKDRYKTILPNPQSRVCLGRAQSQEDGDYINANYIRGYDGKEKVYIATQGPMPNTVSDFWEMVWQEEVSLIVMLTQLREGKEKCVHYWPTEEETYGPFQIRIQDMKECPEYTVRQLTIQYQEERRSVKHILFSAWPDHQTPESAGPLLRLVAEVEESPETAAHPGPIVVHCSAGIGRTGCFIATRIGCQQLKARGEVDILGIVCQLRLDRGGMIQTAEQYQFLHHTLALYAGQLPEEPSP

SEQ ID NO: 80225 - protein, 145 aa, Homo sapiens
MTRDEALPDSHSAQDFYENYEPKEILGRMKRGELFDYLTEKVTLSEKETRKIMRALLEVICTLHKLNIVHRDLKPENILLDDNMNIKLTDFGFSCQLEPGERLREVCGTPSYLAPEIIECSMNEDHPGYGKEVDMWSTGVIMYTL

SEQ ID NO: 80226 - protein, 118 aa, Homo sapiens
  MOD_RES (1)..(1): Any amino acid
XPDEDSPWITDSTDRIPATSWEPNEENEDERDRHLSFSGSGIDDDEDFISSTISTTPRAFDHTKQNQDWTQWNPSHSNPEVLLQTTTRMTDVDRNGTTAYEGNWNPEAHPPLIHHEHH

SEQ ID NO: 80227 - protein, 1531 aa, Homo sapiens
MLLPSGSLFFLRIVHGRKSRPDEGVYVCVARNYLGEAVSHNASLEVAILRDDFRQNPSDVMVAVGEPAVMECQPPRGHPEPTISWKKDGSPLDDKDERITIRGGKLMITYTRKSDAGKYVCVGTNMVGERESEVAELTVLERPSFVKRPSNLAVTVDDSAEFKCEARGDPVPTVRWRKDDGELPKSRYEIRDDHTLKIRKVTAGDMGSYTCVAENMVGKAEASATLTVQEPPHFVVKPRDQVVALGRTVTFQCEATGNPQPAIFWRREGSQNLLFSYQPPQSSSRFSVSQTGDLTITNVQRSDVGYYICQTLNVAGSIITKAYLEVTDVIADRPPPVIRQGPVNQTVAVDGTFVLSCVATGSPVPTILWRKDGVLVSTQDSRIKQLENGVLQIRYAKLGDTGRYTCIASTPSGEATWSAYIEVQEFGVPVQPPRPTDPNLIPSAPSKPEVTDVSRNTVTLSWQPNLNSGATPTSYIIEAFSHASGSSWQTVAENVKTETSAIKGLKPNAIYLFLVRAANAYGISDPSQISDPVKTQDVLPTSQGVDHKQVQRELGNAVLHLHNPTVLSSSSIEVHWTVDQQSQYIQGYKILYRPSGANHGESDWLVFEVRTPAKNSVVIPDLRKGVNYEIKARPFFNEFQGADSEIKFAKTLEEGNAPPQGVTVSKNDGNGTAILVSWQPPPEDTQNGMVQEYKVWCLGNETRYHINKTVDGSTFSVVIPFLVPGIRYSVEVAASTGAGSGVKSEPQFIQLDAHGNPVSPEDQVSLAQQISDVVKQPAFIAGIGAACWIILMVFSIWLYRHRKKRNGLTSTYAGIRKVPSFTFTPTVTYQRGGEAVSSGGRPGLLNISEPAAQPWLADTWPNTGNNHNDCSISCCTAGNGNSDSNLTTYSRPADCIANYNNQLDNKQTNLMLPESTVYGDVDLSNKINEMKTFNSPNLKDGRFVNPSGQPTPYATTQLIQSNLSNNMNNGSGDSGEKHWKPLGQQKQEVAPVQYNIVEQNKLNKDYRANDTVPPTIPYNQSYDQNTGGSYNSSDRGSSTSGNQGHKKGARTPKVPKQGGMNWADLLPPPPAHPPPHSNSEEYNISVDESYDQEMPCPVPPARMYLQQDELEEEEDERGPTPPVRGAASSPAAVSYSHQSTATLTPSPQEELQPMLQDCPEETGHMQHQPDRRRQPVSPPPPPRPISPPHTYGYISGPLVSDMDTDAPEEEEDEADMEVAKMQTRRLLLRGLEQTPASSVGDLESSVTGSMINGWGSASEEDNISSGRSSVSSSDGSFFTDADFAQAVAAAAEYAGLKVARRQMQDAAGRRHFHASQCPRPTSPVSTDSNMSAAVMQKTRPAKKLKHQPGHLRRETYTDDLPPPPVPPPAIKSPTAQSKTQLEVRPVVVPKLPSMDARTDRSSDRKGSSYKGREVLDGRQVVDMRTNPGDPREAQEQQNDGKGRGNKAAKRDLPPAKTHLIQEDILPYCRPTFPTSNNPRDPSSSSSMSSRGSGSRQREQANVGRRNIAEMQVLGGYERGEDNNEELEETES

SEQ ID NO: 80228 - protein, 217 aa, Homo sapiens
MTVLAPAWSPTTYLLLLLLLSSGLSGTQDCSFQHSPISSDFAVKIRELSDYLLQDYPVTVASNLQDEELCGGLWRLVLAQRWMERLKTVAGSKMQGLLERVNTEIHFVTKCAFQETSEQLVALKPWITRQNFSRCLELQCQPDSSTLPPPWSPRPLEATAPTAPQPPLLLLLLLPVGLLLLAAAWCLHWQRTRRRTPRPGEQVPPVPSPQDLLLVEH

SEQ ID NO: 80229 - protein, 152 aa, Homo sapiens
  MOD_RES (1)..(1): Any amino acid
XENMYYSQSSMFPHRSEKDMLASPSTSGQLSQFGASLYGQQSALGLPMRGMSNNTPQLNRSLSQGTQLPSHVTPTTGVPTMSLHTPPSPSRGILPMNPRNMMNHSQVGQGIGIPSRTNSMSSSGLGSPNRSSPSIICMPKQQPSRQPFTVNR

SEQ ID NO: 80230 - protein, 185 aa, Homo sapiens
MEGCVSNLMVCNLAYSGKLEELKESILADKSLATRTDQDSRTALHWACSAGHTEIVEFLLQLGVPVNDKDDAASKNRHEIAVMLLEGGANPDAKDHYEATAMHRAAAKGNLKMIHILLYYKASTNIQDTEGNTPLHLACDEERVEEAKLLVSQGASIYIENKEEKTPLQVAKGGLGLILKRMVEG

SEQ ID NO: 80231 - protein, 111 aa, Homo sapiens
  MOD_RES (1)..(1): Any amino acid
XFLPGDTARHHRAVILDLLQEALTESGLTSQDIDCIAYTKGPGMGAPLVSVAVVARTVAQLWNKPLVGVNHCIGHIEMGRLITGATSPTVLYVSGGNTQTWGFMDFLITLR

SEQ ID NO: 80232 - protein, 269 aa, Homo sapiens
MAAVPELLQQQEEDRSKLRSVSVDLNVDPSLQIDIPDALSERDKVKFTVHTKIPPAPTKPDFDGPREKMQKLGEGEGSMTKEEFAKMKQELEAEYLAVFKKTVSSHEVFLQRLSSHPVLSKDRNFHVFLEYDQDLSVRRKNTKEMFGGFFKSVVKSADEVLFTGVKEVDDFFEQEKNFLINYYNRIKDSCVKADKMTRSHKNVADDYIHTAACLHSLALEEPTVIKKYLLKVAELFEKLRKVEGRVSSDEDLKLTELLRYYMLNIEAAK

SEQ ID NO: 80233 - protein, 50 aa, Homo sapiens
MNQPPQIAPKRERKTIRIRDPNQGGKDITEEIMSGARTASTPTPPQAELK

SEQ ID NO: 80234 - protein, 2535 aa, Homo sapiens
MVSPPLLIISVAGTIECKPDHLLWRPGSTSPQSVSFLHGKVVMESLGPPNHHSQSTLRPPLPPPHNHTLSHHHSSANSLNRNSLTNRRSQIHAPAPAPNDLATTPESVQLQDSWVLNSNVPLETRHFLFKTSSGSTPLFSSSSPGYPLTSGTVYTPPPRLLPRNTFSRKAFKLKKPSKYCSWKCAALSAIAAALLLAILLAYFIVPWSLKNSSIDSGEAEVGRRVTQEVPPGVFWRSQIHISQPQFLKFNISLGKDALFGVYIRRGLPPSHAQYDFMERLDGKEKWSVVESPRERRSIQTLVQNEAVFVQYLDVGLWHLAFYNDGKDKEMVSFNTVVLDSVQDCPRNCHGNGECVSGVCHCFPGFLGADCAKAACPVLCSGNGQYSKGTCQCYSGWKGAECDVPMNQCIDPSCGGHGSCIDGNCVCSAGYKGEHCEEVDCLDPTCSSHGVCVNGECLCSPGWGGLNCELARVQCPDQCSGHGTYLPDTGLCSCDPNWMGPDCSVEVCSVDCGTHGVCIGGACRCEEGWTGAACDQRVCHPRCIEHGTCKDGKCECREGWNGEHCTIGRQTAGTETDGCPDLCNGNGRCTLGQNSWQCVCQTGWRGPGCNVAMETSCADNKDNEGDGLVDCLDPDCCLQSACQNSLLCRGSRDPLDIIQQGQTDWPAVKSFYDRIKLLAGKDSTHIIPGENPFNSSLVSLIRGQVVTTDGTPLVGVNVSFVKYPKYGYTITRQDGTFDLIANGGASLTLHFERAPFMSQERTVWLPWNSFYAMDTLVMKTEENSIPSCDLSGFVRPDPIIISSPLSTFFSAAPGQNPIVPETQVLHEEIELPGSNVKLRYLSSRTAGYKSLLKITMTQSTVPLNLIRVHLMVAVEGHLFQKSFQASPNLAYTFIWDKTDAYGQRVYGLSDAVVSVGFEYETCPSLILWEKRTALLQGFELDPSNLGGWSLDKHHILNVKSGILHKGTGENQFLTQQPAIITSIMGNGRRRSISCPSCNGLAEGNKLLAPVALAVGIDGSLYVGDFNYIRRIFPSRNVTSILELRNNPAHKYYLAVDPVSGSLYVSDTNSRRIYRVKSLSGTKDLAGNSEVVAGTGEQCLPFDEARCGDGGKAIDATLMSPRGIAVDKNGLMYFVDATMIRKVDQNGIISTLLGSNDLTAVRPLSCDSSMDVAQVRLEWPTDLAVNPMDNSLYVLENNVILRITENHQVSIIAGRPMHCQVPGIDYSLSKLAIHSALESASAIAISHTGVLYITETDEKKINRLRQVTTNGEICLLAGAASDCDCKNDVNCNCYSGDDAYATDAILNSPSSLAVAPDGTIYIADLGNIRIRAVSKNKPVLNAFNQYEAASPGEQELYVFNADGIHQYTVSLVTGEYLYNFTYSTDNDVTELIDNNGNSLKIRRDSSGMPRHLLMPDNQIITLTVGTNGGLKVVSTQNLELGLMTYDGNTGLLATKSDETGWTTFYDYDHEGRLTNVTRPTGVVTSLHREMEKSITIDIENSNRDDDVTVITNLSSVEASYTVVQDQVRNSYQLCNNGTLRVMYANGMGISFHSEPHVLAGTITPTIGRCNISLPMENGLNSIEWRLRKEQIKGKVTIFGRKLRVHGRNLLSIDYDRNIRTEKIYDDHRKFTLRIIYDQVGRPFLWLPSSGLAAVNVSYFFNGRLAGLQRGAMSERTDIDKQGRIVSRMFADGKVWSYSYLDKSMVLLLQSQRQYIFEYDSSDRLLAVTMPSVARHSMSTHTSIGYIRNIYNPPESNASVIFDYSDDGRILKTSFLGTGRQVFYKYGKLSKLSEIVYDSTAVTFGYDETTGVLKMVNLQSGGFSCTIRYRKIGPLVDKQIYRFSEEGMVNARFDYTYHDNSFRIASIKPVISETPLPVDLYRYDEISGKVEHFGKFGVIYYDINQIITTAVMTLSKHFDTHGRIKEVQYEMFRSLMYWMTVQYDSMGRVIKRELKLGPYANTTKYTYDYDGDGQLQSVAVNDRPTWRYSYDLNGNLHLLNPGNSVRLMPLRYDLRDRITRLGDVQYKIDDDGYLCQRGSDIFEYNSKGLLTRAYNKASGWSVQYRYDGVGRRASYKTNLGHHLQYFYSDLHNPTRITHVYNHSNSEITSLYYDLQGHLFAMESSSGEEYYVASDNTGTPLAVFSINGLMIKQLQYTAYGEIYYDSNPDFQMVIGFHGGLYDPLTKLVHFTQRDYDVLAGRWTSPDYTMWKNVGKEPAPFNLYMFKSNNPLSSELDLKNYVTDVKSWLVMFGFQLSNIIPGFPRAKMYFVPPPYELSESQASENGQLITGVQQTTERHNQAFMALEGQVITKKLHASIREKAGHWFATTTPIIGKGIMFAIKEGRVTTGVSSIASEDSRKVASVLNNAYYLDKMHYSIEGKDTHYFVKIGSADGDLVTLGTTIGRKVLESGVNVTVSQPTLLVNGRTRRFTNIEFQYSTLLLSIRYGLTPDTLDEEKARVLDQARQRALGTAWAKEQQKARDGREGSRLWTEGEKQQLLSTGRVQGYEGYYVLPVEQYPELADSSSNIQFLRQNEMGKR

SEQ ID NO: 80235 - protein, 52 aa, Homo sapiens
MPTNCAAAGCATTYNKHINISFHRPGLDMNDAVREKEIFPISNHRKSLLCSR

SEQ ID NO: 80236 - protein, 119 aa, Homo sapiens
MKPKLMYQELKVPAEEPANELPMNEIEAWKAAEKKARWVLLVLILAVVGFGALMTQLFLWEYGDLHLFGPNQRPAPCYDPCEAVLVESIPEGLDFPNASTGNPSTSQAWLGLLAGAHSS

SEQ ID NO: 80237 - protein, 126 aa, Homo sapiens
MVLGPEQKMSDDSVSGDHGESASLGNINPAYSNPSLSQSPGDSEEYFATYFNEKISIPEEEYSCFSFRKLWAFTGPGFLMSIAYLDPGNIESDLQSGAVAGFKLLWILLLATLVGLLLQRLAARLG

SEQ ID NO: 80238 - protein, 89 aa, Homo sapiens
MKNGLMFVKLVNPCSGEGAIYLFNMCLQQLFEVKVFKEKHHSWFINQSVQSGGLLHFATPVDPLFLLLHYLIKADKEGKFQPLDQVVVD

SEQ ID NO: 80239 - protein, 47 aa, Homo sapiens
MAGNHRLGLEAGDTDDPPRITQNPVINGNVALSDGHNTAEEDMEDGE

SEQ ID NO: 80240 - protein, 39 aa, Homo sapiens
MASAGMQILGVVLTLLGWVNGLVSCALPMWKALLFLTLG

SEQ ID NO: 80241 - protein, 76 aa, Homo sapiens; identical to SEQ ID NO: 56417

SEQ ID NO: 80242 - protein, 75 aa, Homo sapiens
AILIIIVPGVMQLIKGQTQNFKDAFSGRDSSITRLPLAFYYGMYAYAGWFYLNFVTEEVENPEKPFLSGYWEISH

SEQ ID NO: 80243 - protein, 1099 aa, Homo sapiens
MPVRGDRGFPPRRELSGWLRAPGMEELIWEQYTVTLQKDSKRGFGIAVSGGRDNPHFENGETSIVISDVLPGGPADGLLQENDRVVMVNGTPMEDVLHSFAVQQLRKSGKVAAIVVKRPRKVQVAALQASPPLDQDDRAFEVMDEFDGRSFRSGYSERSRLNSHGGRSRSWEDSPERGRPHERARSRERDLSRDRSRGRSLERGLDQDHARTRDRSRGRSLERGLDHDFGPSRDRDRDRSRGRSIDQDYERAYHRAYDPDYERAYSPEYRRGARHDARSRGPRSRSREHPHSRSPSPEPRGRPGPIGVLLMKSRANEEYGLRLGSQIFVKEMTRTGLATKDGNLHEGDIILKINGTVTENMSLTDARKLIEKSRGKLQLVVLRDSQQTLINIPSLNDSDSEIEDISEIESNRSFSPEERRHQYSDYDYHSSSEKLKERPSSREDTPSRLSRMGATPTPFKSTGDIAGTVVPETNKEPRYQEDPPAPQPKAAPRTFLRPSPEDEAIYGPNTKMVRFKKGDSVGLRLAGGNDVGIFVAGIQEGTSAEQEGLQEGDQILKVNTQDFRGLVREDAVLYLLEIPKGEMVTILAQSRADVYRDILACGRGDSFFIRSHFECEKETPQSLAFTRGEVFRVVDTLYDGKLGNWLAVRIGNELEKGLIPNKSRAEQMASVQNAQRDNAGDRADFWRMRGQRSGVKKNLRKSREDLTAVVSVSTKFPAYERVLLREAGFKRPVVLFGPIADIAMEKLANELPDWFQTAKTEPKDAGSEKSTGVVRLNTVRQIIEQDKHALLDVTPKAVDLLNYTQWFPIVIFFNPDSRQGVKTMRQRLNPTSNKSSRKLFDQANKLKKTCAHLFTATINLNSANDSWFGSLKDTIQHQQGEAVWVSEGKMEGMDDDPEDRMSYLTAMGADYLSCDSRLISDFEDTDGEGGAYTDNELDEPAEEPLVSSITRSSEPVQHEEAKTQNKEESYDFSKSYEYKSNPSAVAGNETPGASTKGYPPPVAAKPTFGRSILKPSTPIPPQEGEEVGESSEEQDNAPKSVLGKVKIFEKMDHKARLQRMQELQEAQNARIEIAQKHPDIYAVPIKTHKPDPGTPQHTR

SEQ ID NO: 80244 - protein, 47 aa, Homo sapiens
MGAEIRHVLVTLGEKMTEEEVEMLVAGHEDSNGCINYEELVRMVLNG

SEQ ID NO: 80245 - protein, 163 aa, Homo sapiens
MDPLFQQTHKQVHEIQSCMGRLETADKQSVHIVENEIQASIDQIFSRLERLEILSSKEPPNKRQNARLRVDQLKYDVQHLQTALRNFQHRRHAREQQERQREELLSRTFTTNGTQKKILDIANMLGLSNTVMRLIEKRAFQDKYFMIENSILLCCPGWSAIAQ

SEQ ID NO: 80246 - protein, 116 aa, Homo sapiens
MKPSGEDQAALAAGPWEECFQAAVQLALRAGQIIRKALTEEKRVSTKTSAADLVTETDHLVEDLIISELRERFPSHRFIAEEAAASGAKCVLTHSPTWIIDPIDGTCNFVHSLNSE

SEQ ID NO: 80247 - protein, 92 aa, Homo sapiens
MTRVVYNGKRTSSPRSPPSSSEIFTPAHEENVRFIYEAWQGVERDLRGQVPGGERGLVEEYVEKVPNPSLKTFKPIDLSDLKRRSTQDAKKS

SEQ ID NO: 80248 - protein, 18 aa, Homo sapiens
MNGKRNGEGGKRWKWKGT

SEQ ID NO: 80249 - protein, 584 aa, Homo sapiens
MNQGSGLDLLKISYGKGARRKNRFKGSDGSTSSDTTSNSFVRQGSADSYTSRPSDSDVSLEEDREAVRREAERQAQAQLEKAKTKPVAFAVRTNVSYSAAHEDDVPVPGMAISFEAKDFLHVKEKFNNDWWIGRLVKEGCEIGFIPSPVKLENMRLQHEQRAKQGKFYSSKSGGNSSSSLGDIVPSSRKSTPPSSAKQKQKSTEHTPPYDVVPSMRPVVLVGPSLKGYEVTDMMQKALFDFLKHRFEGRISITRVTADISLAKRSVLNNPSKHAIIERSNTRSSLAEVQSEIERIFELARTLQLVVLDADTINHPAQLSKTSLAPIIVYVKISSPKVLQRLIKSRGKSQAKHLNVQMVAADKLAQCPPELFDVILDENQLEDACEHLADYLEAYWKATHPPSSSLPNPLLSRTLATSSLPLSPTLASNSQGSQGDQRTDRSAPIRSASQAEEEPSVEPVKKSQHRSSSSAPHHNHRSGTSRGLSRQETFDSETQESRDSAYVEPKEDYSHDHVDHYASHRDHNHRDETHGSSDHRHRESRHRSRDVDREQDHNECNKQRSRHKSKDRYCEKDGEVISKKRNEAG

SEQ ID NO: 80250 - protein, 59 aa, Homo sapiens
VEEFLYEKLDRKVPSRVTNGELLAQYMADAASELGPTTPYGSCCVTQTGVQWCNHSLLL

SEQ ID NO: 80251 - protein, 147 aa, Homo sapiens
MKRLEEMSNMFQSSGVQHHPPEPKAQTEGNEDSEGKEQRWEMVMDKKHFKLWRRPITGTHLYQYRVFGTYTDVTPRQFFNVQLDTEYRKKWDALVIKLEVIERDVVSGSEVLHWVTHFPYPMYSRDYVYVRRYSVDQENNMMVLVSR

SEQ ID NO: 80252 - protein, 186 aa, Homo sapiens
MRNLKLFRTLEFRDIQGPGNPQCFSLRTEQGTVLIGSEHGLIEVDPVSREVKNEVSLVAEGFLPEDGSGRIVGVQDLLDQESVCVATASGDVILCSLSTQQLECVGSVASGISVMSWSPDQELVLLATGQQTLIMMTKDFEPILEQQIHQDDFGESKFITVGWGRKETQFHGSEGRQAAFQMQMAF

SEQ ID NO: 80253 - protein, 278 aa, Homo sapiens
MAAEEEEVDSADTGERSGWLTGWLPTWCPTSISHLKEAEEKMLKCVPCTYKKEPVRISNGNKIWTLKFSHNISNKTPLVLLHGFGGGLGLWALNFGDLCTNRPVYAFDLLGFGRSSRPRFDSDAEEVENQFVESIEEWRCALGLDKMILLGHNLGGFLAAAYSLKYPSRVNHLILVEPWGFPERPDLADQDRPIPVWIRALGAALTPFNPLAGLRIAGPFGLSLVQRLRPDFKRKYSSMFEDDTVTEYIYHCNVQTPRLFLGQDIMYMQINQKNSTRK

SEQ ID NO: 80254 - protein, 86 aa, Homo sapiens
TMEERVTSPRIEAASQKRTEVNFGDKLLLNCSATGEPKPQIMWRLPSKAVVDQQHRILDFYFSEAEAMPCSCCNHKTEYPAYYCQV

SEQ ID NO: 80255 - protein, 72 aa, Homo sapiens
  MOD_RES (1)..(1): Any amino acid
XQVFQAGDVPSERPFYPPTLVSNLPPASPCAQVEAPGGHCLDQRPRPQRPFGAHRRLQGEWVFLARGPRRAV

SEQ ID NO: 80256 - protein, 103 aa, Homo sapiens
MSSTVSYWILNSTRNSIATLQGGRRLYSRYVSNRNKLKWRLFSRVPPTLNSSPCGGFTLCKAYRHTSTEEDDFHLQLSPEQINEVLRAGETTHKILDLESRVP

SEQ ID NO: 80257 - protein, 177 aa, Homo sapiens
MEEIEHTCPQPRLTLTAPAPFADETNCQCQAPHEKLTIAQARLGTPADRPVRVYADGIFDLFHSGHARALMQAKTLFPNSYLLVGVCSDDLTHKFKGFTVMNEAERYEALRHCRYVDEVIRDAPWTLTPEFLEKHKGCSFQRREQKASQHRTSLPELFVTMMFMPDVTSREGIQPRN

SEQ ID NO: 80258 - protein, 255 aa, Homo sapiens
MRRPLSKCGMEPGGGDASLTLHGLQNRSHGKIKLRKRKSTLYFNTQEKSARRRGDLLGENIYLLLFTIALRILNCFLVQTSFVPDEYWQSLEVSHHMVFKERLRSYTYPLIFASIYKILHLLGKDSVQLLIWIPRLAQALLSAVADVRLYSLMKQLENQEVARWVFFCQLCSWFTWYCCTRTLTNTMETVLTIIALFYYPLEGSKSMNSVKYSSLVALAFIIRPTAVILWTPLLFRHFCQEPRKLDLILHHFLPV

SEQ ID NO: 80259 - protein, 91 aa, Homo sapiens
MKNQNGTFKDWANANVSRQIEDTVLYGYYTLYSVILFCVFFWIPFVYFYYEEKDDDDTSKCTQIKTALKYTLGFVVICALLLLVGTDISIL

SEQ ID NO: 80260 - protein, 201 aa, Homo sapiens [sequence omitted]

SEQ ID NO: 80261 - protein, 129 aa, Homo sapiens
APESISEKELKLLCSNSAFLRVVRCRSLAEEYGLDTINKDEIISSMDNPDNEIVLYLMLRAVDRFHKQQGRYPGVSNYQVEEDIGKLKSCLTGFLQEYGLSVMVKDDYVHELSCCSRGHQNNHQTICNF

SEQ ID NO: 80262 - protein, 341 aa, Homo sapiens
MSPEVTCPRRGHLPRFHPRTWVEPVVASSQVAASLYDAGLLLVVKASYGTGGSSNHSASPSPRGALEDQQQRAISNFYIIYNLVVGLSPLLSAYGLGWLSDRYHRKISICMSLLGFLLSRLGLLLKVLLDWPVEVLYGAAALNGLFGGFSAFWSGVMALGSLGSSEGRRSVRLILIDLMLGLAGFCGSMASGHLFKQMAGHSGQGLILTACSVSCASFALLYSLLVLKVPESVAKPSQELPAVDTVSGTVGTYRTLDPDQLDQQYAVGHPPSPGKAKPHKTTIALLFVGAIIYDLAVVGTVDVIPLFVLREPLGWNQVQLEPSCCLLSSPSQPSDQLCPNS

SEQ ID NO: 80263 - protein, 50 aa, Homo sapiens
MVRMNVLADALKSINNAEKRGKRQVLIRPCSKVIVRFLTVMMKHELGKLL

SEQ ID NO: 80264 - protein, 411 aa, Homo sapiens
MGLSFSSGQKANGFPPDKSSGSKKQKQYQRIRKEKPQQHNFTHRLLAAALKSHSGNISCMDFSSNGKYLATCADDRTIRIWSTKDFLQREHRSMRANVELDHATLVRFSPDCRAFIVWLANGDTLRVFKMTKREDGGYTFTATPEDFPKKHKAPVIDIGIANTGKFIMTASSDTTVLIWSLKGQVLSTINTNQMNNTHAAVSPCGRFVASCGFTPDVKVWEVCFGKKGEFQEVVRAFELKGHSAAVHSFAFSNDSRRMASVSKDGTWKLWDTDVEYKKKQDPYLLKTGRFEEAAGAAPCRLALSPNAQVLALASGSSIHLYNTRRGEKEECFERVHGECIANLSFDITGRFLASCGDRAVRLFHNTPGHRAMVEEMQGHLKRASNESTRQRLQQQLTQAQETLKSLGALKK

SEQ ID NO: 80265 - protein, 92 aa, Homo sapiens
  MOD_RES (1)..(1): Any amino acid
XTPTRASESPARGPSGSPRTQGRGGPASVPSSSPGTSVKKPDPNIKNNAASEGVLASFFNSLLSKKTGSPGSPGAGGVQSTAKKSESRPPPP

SEQ ID NO: 80266 - protein, 165 aa, Homo sapiens
MQDYNKDDMSYRRISAVEPKTALPFNRFLPNKSRQPSYVPAPLRKKKPDKHEDNRRSWASPVYTEADGTFSRLFQKIYGENGSKSMSDVSAEDVQNLRQLRYEEMQKIKSQLKEQDQKWQDDLAKWKDRRKSYTSDLQKKKEEREEIEKQALEKSKRSSKTFKEM

SEQ ID NO: 80267 - protein, 1041 aa, Homo sapiens
  MOD_RES (1)..(1): Any amino acid
XTNADKLLEAAEQLAQTGECDPEEIYKAARHLEVRIQDFVRRVEQRKLLLDMSVSFHTHTKELWTWMEDLQKEMLEDVCADSVDAVQELIKQFQQQQTATLDATLNVIKEGEDLIQQLRDSAVSNNKTPHSSSISHIESVLQQLDDAQVQMEELFHERKIKLDIFLQLRIFEQYTIEVTAELDAWNEDLLRQMNDFNTEDLTLAEQRLQRHTERKLAMNNMTFEVIQQGQDLHQYITEVQASGIELICEKDIDLAAQVQELLEFLHEKQHELELNAEQTHKRLEQCLQLRHLQAEVKQVLGWIRNGESMLNASLVNASSLSEAEQLQREHEQFQLAIEKTHQSALQVQQKAEVLLQAGHYDADAIRECAEKVALHWQQLMLKMEDRLKLVNASVAFYKTSEQVCSVLESLEQEYRRDEDWCGGRDKLGPAAEIDHVIPLISKHLEQKEAFLKACTLARRNAEVFLKYIHRNNVSMPSVASHTRGPEQQVKAILSELLQRENRVLHFWTLKKRRLDQCQQYVVFERSAKQALDWIQETGEFYLSTHTSTGETTEETQELLKEYGEFRVPAKQTKEKVKLLIQLADSFVEKGHIHATEIRKWVTTVDKHYRDFSLRMGKYRYSLEKALGVNTEDNKDLELDIIPASLSDREVKLRDANHEVNEEKRKSARKKEFIMAELLQTEKAYVRDLHECLETYLWEMTSGVEEIPPGILNKEHIIFGNIQEIYDFHNNIFLKELEKYEQLPEDVGHCFVTWADKFQMYVTYCKNKPDSNQLILEHAGTFFDEIQQRHGLANSISSYLIKPVQRITKYQLLLKELLTCCEEGKGELKDGLEVMLSVPKKANDAMHVSMLEGFDENLDVQGELILQDAFQVWDPKSLIRKGRERHLFLFEISLVFSKEIKDSSGHTKYVYKNKLLTSELGVTEHVEGDPCKFALWSGRTPSSDNKTVLKASNIETKQEWIKNIREVIQERIIHLKGALKEPLQLPKTPAKQRNNSKRDGVEDIDSQGDGSSQPDTISIASRTSQNTVDSDKMRKTSLQEVE

SEQ ID NO: 80268 - protein, 567 aa, Homo sapiens
MEDRRAEKSCEQACESLKRQDYEMALKHCTEALLSLGQYSMADFTGPCPLEIERIKIESLLYRIASFLQLKNYVQADEDCRHVLGEGLAKGEDAFRAVLCCMQLKGKLQPVSTILAKSLTGESLNGMVTKDLTRLKTLLSETETATSNALSGYHVEDLDEGSCNGWHFRPPPRGITSSEEYTLCKRFLEQGICRYGAQCTSAHSQEELAEWQKRYASRLIKLKQQNENKQLSGSYMETLIEKWMNSLSPEKVLSECIEGVKVEHNPDLSVTVSTKKSHQTWTFALTCKPARMLYRVALLYDAHRPHFSIIAISAGDSTTQVSQEVPENCQEWIGGKMAQNGLDHYVYKVGIAFNTEIFGTFRQTIVFDFGLEPVLMQRVMIDAASTEDLEYLMHAKQQLVTTAKRWDSSSKTIIDFEPNETTDLEKSLLIRYQIPLSADQLFTQSVLDKSLTKSNYQSRLHDLLYIEEIAQYKEISKFNLKVQLQILASFMLTGVSGGAKYAQNGQLFGRFKLTETLSEDTLAGRLVMTKVNAVYLLPVPKQKLVQTQGTKEKVYEATIEEKTKEYI

SEQ ID NO: 80269 - protein, 332 aa, Homo sapiens
MVGMGQKDSYVGDEAQSKRGILTLKYPIEHGIITNWDDMEKIWHHTFYNELRVAPEEHPTLLTEAPLNPKANREKMTQIMFETFNVPAMYVAIQAVLSLYASGRTTGIVLDSGDGVTHNVPIYEGYALPHAIMRLDLAGRDLTDYLMKILTERGYSFVTTAEREIVRDIKEKLCYVALDFENEMATAASSSSLEKSYELPDGQVITIGNERFRCPETLFQPSFIGMESAGIHETTYNSIMKCDIDIRKDLYANNVMSGGTTMYPGIADRMQKEITALAPSTMKIKIIAPPERKYSVWIGGSILASLSTFQQMWITKQEYDEAGPSIVHRKCF

SEQ ID NO: 80270 - protein, 105 aa, Homo sapiens
MSCKKQRSRKHSVNEKCNMKIEHYFSPVSKEQQNNCSTSLMRMESRGDPRATTNTQAQRFHSPKKNPEDQTMPQNRTIYVTLKVNHRRNQDMKLKLTHSENSSLY

SEQ ID NO: 80271 - protein, 44 aa, Homo sapiens
MLAIGRDACTRKIGLETVGVKINEKTGKIPVTDEEQTNVPYIYA

SEQ ID NO: 80272 - protein, 70 aa, Homo sapiens
SCGDSSPDTFSDGLSSSTLPDDHSSYTVPGYMQDLEVEQALTPGELVQVWQETPQLQQMRMRKGNYLRTS

SEQ ID NO: 80273 - protein, 272 aa, Homo sapiens
MQTQEILRILRLPELGDLGQFFRSLSATTLDSGGARRSVIGSGPQLLTHYYDDARTMYQVFRRGLSISGNGPCLGFRKPKQPYQWLSYQEVADRAEFLGSGLLQHNCKACTDQFIGVFAQNRPEWIIVELACYTYSMVVVPLYDTLGPGAIRYIINTADISTVIVDKPQKAVLLLEHVERKETPGLKLIILMDPFEEALKERGQKCGVVIKSMQAVEDCGQENHQAPVPPQPDDLSIVCFTSGTTGNPKGAMLTHGNVVADFSGFLKVTEDY

SEQ ID NO: 80274 - protein, 81 aa, Homo sapiens
MHDFYRCHTCNTTDRNAICVNCIKKCHQGHDVEFIRHDRFFCDCGAGTLSNPCTLAGEPTHDTDTLYDSAPPIESNTLQHN

SEQ ID NO: 80275 - protein, 48 aa, Homo sapiens
MASSEVARHLLFQSHMATKTTCMSSQGSDDEQIVSKHYTSDCQSRYGF

SEQ ID NO: 80276 - protein, 281 aa, Homo sapiens
  MOD_RES (1)..(1): Any amino acid
XYAIIAEYGSRLYKYQARLRMPKEQLELLKKESQNLENNFRQILFLIEQIDVLKALLRDMKDGMDNNHNWNTHGDPVEDPDHTEVLDEEVSNLVNYVLKKLREDQVEMADYALKSAGASIIEAGTSESYKNNKAKLYWHGIGFLNHEMPPDIILQPDVYPGKCWAFPGSQGHTLIKLATKIIPTAVTMEHISEKVSPSGNISSAPKEFSVYGITKKCEGEEIFLGQFIYNKTGTTVQTFELQHAVSEYLLCVKLNIFSNWGHPKYTCLYRFRVHGTPGKHI

SEQ ID NO: 80277 - protein, 91 aa, Homo sapiens
QNLRALVAMNENLKSQEQEFKAHCREEMTRLQQEIENLKAERAPRGDEKTLSSGEPPGTLTSAMTHDENELQHSSSEVCWILPAAEPLGKT

SEQ ID NO: 80278 - protein, 132 aa, Homo sapiens
MAPRKRSHHGLGFLCCFGGSDIPEINLRDNHPLQFMEFSSPIPNAEELNIRFAELVDELDLTDKNREAMFALPPEKKWQIYCSKKKVPSLTPLATSQGSWHGVALAALACSCIHLMFITCQPCSRCWRNNSE

SEQ ID NO: 80279 - protein, 642 aa, Homo sapiens
MQFFDAEELLVDEEDDVFGEGLPTRLPEIMLVGSQSFSPGGPNGIIRSQSFAGFSGLQERRSRCNSFIENSSALKKPQAKLKKMHNLGHKNNNPPKEPQPKRVEEVYRALKNGLDEYLEVHQTELDKLTAQLKDMKRNSRLGVLYDLDKQIKTIERYMRRLEFHISKVDELYEAYCIQRRLQDGASKMKQAFATSPASKAARESLTEINRSFKEYTENMCTIEVELENLLGEFSIKMKGLAGFARLCPGDQYEIFMKYGRQRWKLKGKIEVNGKQSWDGEETVFLPLIVGFISIKVTELKGLATHILVGSVTCETKELFAARPQVVAVDINDLGTIKLNLEITWYPFDVEDMTASSGAGNKAAALQRRMSMYSQGTPETPTFKDHSFFSNLPDDIFENGKAAEEKMPLSLSFSDLPNGDCALTSHSTGSPSNSTNPEITITPAEFNLSSLASQNEGMDDTSSASSRNSLGEGQEPKSHLKEEDPEEPRKPASAPSEACRRQSSGAGAEHLFLENDVAEALLQESEEASELKPVELDTSEGNITKQLVKRLTSAEVPMATDRLLSEGSVGGESEGCRSFLDGSLEDAFNGLLLALEPHKEQYKEFQDLNQEVMNLDDILKDAKHLDDQKLNGAASWTEITEGE

SEQ ID NO: 80280 - protein, 21 aa, Homo sapiens
MRKGVLKDPEIADLFYKDDPE

SEQ ID NO: 80281 - protein, 43 aa, Homo sapiens
  MOD_RES (1)..(1): Any amino acid
XALILACFREKPPFFSAKNVDPNPYPETSAGFLSRLFFWWFTK

SEQ ID NO: 80282 - protein, 154 aa, Homo sapiens
MGLILANVFLYLCAIAVGIMSYYMADRKHRKAFLEARQSLEVKMNLEEQSQQQENLMLSILPKHVADEMLKDMKKDESQKDQQQFNTMYMYRHENVSILFADIVGFTQLSSACSAQELVKLLNELFARFDKLAAKYHQLRIKILGDCYYCICGL

SEQ ID NO: 80283 - protein, 447 aa, Homo sapiens
MIPTLTALLCLGLSLGPRTHMQAGPLPKPTLWAEPGSVISWGNSVTIWCQGTLEAREYRLDKEESPAPWDRQNPLEPKNKARFSIPSMTEDYAGRYRCYYRSPVGWSQPSDPLELVMTGAYSKPTLSALPSPLVTSGKSVTLLCQSRSPMDTFLLIKERAAHPLLHLRSEHGAQQHQAEFPMSPVTSVHGGTYRCFSSHGFSHYLLSHPSDPLELIVSGSLEGPRPSPTRSVSTAAGPEDQPLMPTGSVPHSGLRRHWEVLIGVLVVSILLLSLLLFLLLQHWRQGKHRTLAQRQADFQRPPGAAEPEPKDGGLQRRSSPAADVQGENFCAAVKNTQPEDGVEMDTRSPHDEDPQAVTYAKVKHSRPRREMASPPSPLSGEFLDTKDRQAEEDRQMDTEAAASEAPQDVTYARLHSFTLRQKATEPPPSQEGASPAEPSVYATLAIH

SEQ ID NO: 80284 - protein, 112 aa, Homo sapiens
MQKWFSAFDDAIIQRQWRANPSRGGGGVSFTKEVDTNVATGAPPRRQRVPGRACPWREPIRGRRGARPGGGDAGGTPGETVRHCSAPEDPIFRFSSLHSYPFPGTIKSRDMS

SEQ ID NO: 80285 - protein, 129 aa, Homo sapiens
MEENMEEGQTQKGCFECCIKCLGGIPYASLIATILLYAGVALFCGCGHEALSGTVNILQTYFEMARTAGDTLDVFTMIDIFKYVIYGIAAAFFVYGILLMVEGFFTTGAIKDLYGDFKITTCGRCVSAW

SEQ ID NO: 80286 - protein, 133 aa, Homo sapiens
MTVVGNPRSWSCQWLPILILLLGTALVQVYCHPHDCWRLPAFQCHLCGAVLHLCHSMGSGAVHFVRHPLLCLRHPAECGGLHLHCTHLLPVVWGGLPLVVAICAECWLHRPLHLPLLSFLLCPALQHVWGSTD

SEQ ID NO: 80287 - protein, 108 aa, Homo sapiens
MKQLPAATVRLLSSSQIITSVVSVVKELIENSLDAGATSVDVKLENYGFDKIEVRDNGEGIKAVDAPVMAMKYYTSKINSHEDLENLTTYGFRGEALGSICCIAEVQL

SEQ ID NO: 80288 - protein, 86 aa, Homo sapiens
  MOD_RES (1)..(1): Any amino acid
XVSIEDPFDQDDWAAWSKFTANVGIQIVGDDLTVTNPKRIERAVEEKACNCLLLKVNQIGSVTEAIQASRLVPRAVLNVWLNTTSS

SEQ ID NO: 80289 - protein, 208 aa, Homo sapiens
SPRLPEGWSRQPAEPLAKLGSPAQLRTAEPAPPRQTEPPLNTPENREYLAEGYVIGSCIKHIPIAGRDITYFIQQLLREREVGIPPEQSLETAKAIKEKYCYICPDIVKEFAKYDVDPQKWIKQYTGINAINQKKFVIDVGYERFLGPEIFFHPEFANPDSMESISDVVDEVIQNCPIDVRRPLYKMEQIPLSYPQGHGFHPLSPPFH

SEQ ID NO: 80290 - protein, 94 aa, Homo sapiens
MAMIELGFGRQNFHPLKRKSSLLLKLIAVVFAVLLFCEFLIYYLAIFQCNWPEVKTTASDGEQTTREPVLKAMFLADTHLLGEFLGHWLDKLRR

SEQ ID NO: 80291 - protein, 238 aa, Homo sapiens
MRVTLATIAWMVSFVSNYSHTANILPDIENEDFIKDCVRIHNKFRSEVKPTASDMLYMTWDPALAQIAKAWASNCQFSHNTRLKPPHKLHPNFTSLGENIWTGSVPIFSVSSAITNWYDEIQDYDFKTRICKKVCGHYTQVSQERGRDPNPKRGFLNLARENPGLFGQIVTKLAAQFNFALKFLALTLFPMEHILYATTDQEGITQLGHIREEPPAVPAPIMTSVWTISVLTDSETKS

SEQ ID NO: 80292 - protein, 29 aa, Homo sapiens
MAGEAEVSRGCLRGMRGPTRTCTFEIPCV

SEQ ID NO: 80293 - protein, 95 aa, Homo sapiens
LRLRSGLRHLRATPNTRGSARLLCAEMPKKAGATTKGKSQSKEPERPLPPLGPVAVDPKGCVTIAIHAKPGSKQNAVTALLFHSSTIGGDSGGRF

SEQ ID NO: 80294 - protein, 985 aa, Homo sapiens
ATYHANTEREQKKENERIEKERMRRLMAEDEEGYRKLIDQKKDKRLAYLLQQTDEYVANLTELVRQHKAAQVAKEKKKKKKKKKAENAEGQTPAIGPDGEPLDETSQMSDLPVKVIHVESGKILTGTDAPKAGQLEAWLEMNPGYEVAPRSDSEESGSEEEEEEEEEEQPQAAQPPTLPVEEKKKIPDPDSDDVSEVDARHIIENAKQDVDDEYGVSQALARGLQSYYAVAHAVTERVDKQSALMVNGVLKQYQIKGLEWLVSLYNNNLNGILADEMGLGKTIQTIALITYLMEHKRINGPFLIIVPLSTLSNWAYEFDKWAPSVVKVSYKGSPAARRAFVPQLRSGKFNVLLTTYEYIIKDKHILAKIRWKYMIVDEGHRMKNHHCKLTQVLNTHYVAPRRLLLTGTPLQNKLPELWALLNFLLPTIFKSCSTFEQWFNAPFAMTGEKVDLNEEETILIIRRLHKVLRPFLLRRLKKEVEAQLPEKVEYVIKCDMSALQRVLYRHMQAKGVLLTDGSEKDKKGKGGTKTLMNTIMQLRKICNHPYMFQHIEESFSEHLGFTGGIVQGLDLYRASGKFELLDRILPKLRATNHKVLLFCQMTSLMTIMEDYFAYRGFKYLRLDGTTKAEDRGMLLKTFNEPGSEYFIFLLSTRAGGLGLNLQSADTVIIFDSDWNPHQDLQAQDRAHRIGQQNEVRVLRLCTVNSVEEKILAAAKYKLNVDQKVIQAGMFDQKSSSHERRAFLQAILEHEEQDESRHCSTGSGSASFAHTAPPPAGVNPDLEEPPLKEEDEVPDDETVNQMIARHEEEFDLFMRMDLDRRREEARNPKRKPRLMEEDELPSWIIKDDAEVERLTCEEEEEKMFGRGSRHRKEVDYSDSLTEKQWLKAIEEGTLEEIEEEVRQKKSSRKRKRDSDAGSSTPTTSTRSRDKDDESKKQKKRGRPPAEKLSPNPPNLTKKMKKIVDAVIKYKDRVTEQQAHPLCVLIF

SEQ ID NO: 80295 - protein, 471 aa, Homo sapiens
MEGKWLLCMLLVLGTAIVEAHDGHDDDVIDIEDDLDDVIEEVEDSKPDTTAPPSSPKVTYKAPVPTGEVYFADSFDRGTLSGWILSKAKKDDTDDEIAKYDGKWEVEEMKESKLPGDKGLVLMSRAKHHAISAKLNKPFLFDTKPLIVQYEVNFQNGIECGGAYVKLLSKTPELNLDQFHDKTPYTIMFGPDKCGEDYKLHFIFRHKNPKTGIYEEKHAKRPDADLKTYFTDKKTHLYTLILNPDNSFEILVDQSVVNSGNLLNDMTPPVNPSREIEDPEDRKPEDWDERPKIPDPEAVKPDDWDEDAPAKIPDEEATKPEGWLDDEPEYVPDPDAEKPEDWDEDMDGEWEAPQIANPRCESAPGCGVWQRPVIDNPNYKGKWKPPMIDNPSYQGIWKPRKIPNPDFFEDLEPFRMTPFSAIGLELWSMTSDIFFDNFIICADRRIVDDWANDGWGLKKAADGAAEALWGR

SEQ ID NO: 80296 - protein, 58 aa, Homo sapiens
MAYHGLTVPLIVMSVFWGFVGFLVPWFIPKGPNRGVIITMLVTCSVCCYLLSREENAF

SEQ ID NO: 80297 - protein, 212 aa, Homo sapiens
MSQDGASQFQEVIRQELELSVKKELEKILTTASSHEFEHTKKDLDGFRKLFHRFLQEKGPSVDWGKIQRPPEDSIQPYEKIKARGLPDNISSVLNKLVVVKLNGGLGTSMGCKGPKSLIGVRNENTFLDLTVQQIEHLNKTYNTDVPLVLMNSFNTDEDTKKILQKYNHCRVKIYTFNQSRYPRINKESLLPVAKDVSYSGENTEAWYPPGH

SEQ ID NO: 80298 - protein, 218 aa, Homo sapiens
MLQEWLAAVGDDYAAVVWRPEGEPRFYPDEEGPKHWTKERHQFLMELKQEALTFARNWGADYILFADTDNILTNNQTLRLLMGQGLPVVAPMLDSQTYYSNFWCGITPQGYYRRTAEYFPTKNRQRRGCFRVPMVHSTFLASLRAEGADQLAFYPPHPNYTWPFDDIIVFAYACQAAGVSVHVCNEHRYGYMNVPVKSHQGLEDERVNFIHLILEALG

SEQ ID NO: 80299 - protein, 156 aa, Homo sapiens
MASNSWNASSSPGEAREDGPEGLDKGLDNDAEGVWSPDIEQSFQEALAIYPPCGRRKIILSDEGKMYGHEPGPGLQGQSPSEHGVHVLCPDRLCQCPAEQVQPTFPSAPGRLLHFLAVLEQPPSPGTAAWTLSGHQALCTASLPHPAAPAADAQQL

SEQ ID NO: 80300 - protein, 68 aa, Homo sapiens
MGVKLEIFRMIIYLTFPVAMFWVSNQAEWFEDDVIQRKRELWPPEKVSDLFFLPEGWRRLDSCIRDGF

SEQ ID NO: 80301 - protein, 77 aa, Homo sapiens
  MOD_RES (1)..(1): Any amino acid
XGRERMAAAAAAAAAAAAAAQCRSPRCAAERRGFRRELDSWRHRLMHCVGFESILEGLYGPRLRRDLSLFEGLYTIS

SEQ ID NO: 80302 - protein, 251 aa, Homo sapiens
MAGSSSLEAVRRKIRSLQEQADAAEERAGTLQRELDHERKLRETAEADVASLNRRIQLVEEELDRAQERLATALQKLEEAEKAADESERGMKVIESRAQKDEEKMEIQEIQLKEAKHIAEDADRKYEEVARKLVIIESDLERAEERAELSEGKCAELEEELKTVTNNLKSLEAQAEKYSQKEDRYEEEIKVLSDKLKEAETRAEFAERSVTKLEKSIDDLEDKFLCFTSPKTPSSSWMSHLSELCICLFSS

SEQ ID NO: 80303 - protein, 39 aa, Homo sapiens
MALKRIQKELTDLQRDPPAQCSAGPVGDDCCFHNQNLSP

SEQ ID NO: 80304 - protein, 100 aa, Homo sapiens
MKMAYNMTFFPNLMGHYDQSIAAVEMEHFLPLANLECSPNIETFLCKAFVPTCIEQIHVVPPCRKLCEKVYSDCKKLIDTFGIRWPEELECDSCRKKMEL

SEQ ID NO: 80305 - protein, 171 aa, Homo sapiens
LSVEARKEMTRKAIKTVKHFIEKPRKRNSEDEAQEAKDSKVTYADTLNHLEKSLAHLETLSHSFILSLKNSEQETLQKYSHLYDLSRSEKEKLHDEAVAICLDGQPLAMIQQLLEVAVGPLDISPKDIVQSAIMKIISALSGGSADLGGPRDPLKVLEGVVAAVHASVDKG

SEQ ID NO: 80306 - protein, 176 aa, Homo sapiens
  MOD_RES (1)..(1): Any amino acid
XSRFENDRTISFIPPDGEFELMSYRLNTHVKPLIWIESVIEKHSHSRIEYMIKAKSQFKRRSTANNVEIHIPVPNDADSPKFKTTVGSVKWVPENSEIVWSIKSFPGGKEYLMRAHFGLPSVEAEDKEGKPPISVKFEIPYFTTSGIQMLSLSQISIDPPGEVGFGERRQPQTFSH

SEQ ID NO: 80307 - protein, 529 aa, Homo sapiens
GQDEVSAREQHFHSQVRESTICFLLFAILYVVSYFIITRYKRKSDEQEDEDAIVNRISLFLSTFTLAVSAGAVLLLPFSIISNEILLSFPQNYYIQWLNGSLIHGLWNLASLFSNLCLFVLMPFAFFFLESEGFAGLKKGIRARILETLVMLLLLALLILGIVWVASALIDNDAASMESLYDLWEFYLPYLYSCISLMGCLLLLLCTPVGLSRMFTVMGQLLVKPTILEDLDEQIYIITLEEEALQRRLNVGMLCAGNPEVATGRQVPEEQAGQLLLGKWIQEGGDMIANPRLSSSVEYNIMELEQELENVKTLKTKLERRKKASAWERNLVYPAVMVLLLIETSISVLLVACNILCLLVDETAMPKGTRGPGIGNASLSTFGFVGAALEIILIFYLMVSSVVGFYSLRFFGNFTPKKDDTTMTKIIGNCVSILVLSSALPVMSRTLGITRFDLLGDFGRFNWLGNFYIVLSYNLLFAIVTTLCLVRKFTSAVREELFKALGLHKLHLPNTSRDSETAKPSVNGHQKAL

SEQ ID NO: 80308 - protein, 132 aa, Homo sapiens
MESNLSGLVPAAGLVPALPPAVTLGLTAAYTTLYALLFFSVYAQLWLVLLYGHKRLSYQTVFLALCLLWAALRTTLFSFYFRDTPRANRLGPLPFWLLYCCPVCLQFFTLTLMNLYFAQVVFKAKVKRRPEM

SEQ ID NO: 80309 - protein, 77 aa, Homo sapiens
MVVPEKEQSWIPKIFKKKTCTTFIVDSTDPGSLDCHWGSAHGHRPACWCGCTGPSDGQHWGHQGGGHGCGPLGCGPE

SEQ ID NO: 80310 - protein, 430 aa, Homo sapiens
MTKSNGEEPKMGGRMERFQQGVRKRTLLAKKKVQNITKEDVKSYLFRNAFVLLTVTAVIVGTILGFTLRPYRMSYREVKYFSFPGELLMRMLQMLVLPLIISSLVTGMAALDSKASGKMGMRAVVYYMTTTIIAVVIGIIIVIIIHPGKGTKENMHREGKIVRVTAADAFLDLIRYAPVGILFLIAGKIVEMEDMGVIGGQLAMYTVTVIVGLLIHAVIVLPLLYFLVTRKNPWVFIGGLLQALITALGTSSSSATLPITFKCLEENNGVDKRVTRFVLPVGATINMDGTALYEALAAIFIAQVNNFELNFGQIITISITATAASIGAAGIPQAGLVTMVIVLTSVGLPTDDITLIIAVDWFLDRLRTTTNVLGDSLGAGIVEHLSRHELKNRDVEMGNSVIEENEMKKPYQLIAQDNETEKPIDSETKM

SEQ ID NO: 80311 - protein, 163 aa, Homo sapiens
MPSIKLQSSDGEIFEVDVEIAKQSVTIKTMLEDLGMDDEGDDDPVPLPNVNAAILKKVIQWCTHHKDDPPPPEDDENKEKRTDDIPVWDQEFLKYTLRKTTVSLQAANYLDIKGLLDVTCKTVANMIKGKTPEEIRKTFNIKNDFTEEEEAQVRKENQWCEEK

SEQ ID NO: 80312 - protein, 522 aa, Homo sapiens
  MOD_RES (1)..(1): Any amino acid
XAATGPSFWLGNETLKVPLALFALNRQRLCERLRKNPAVQAGSIVVLQGGEETQRYCTDTGVLFRQESFFHWAFGVTEPGCYGVIDVDTGKSTLFVPRLPASHATWMGKIHSKEHFKEKYAVDDVQYVDEIASVLTSQKPSVLLTLRGVNTDSGSVCREASFDGISKFEVNNTILHPEIVECRVFKTDMELEVLRYTNKISSEAHREVMKAVKVGMKEYELESLFEHYCYSRGGMRHSSYTCICGSGENSAVLHYGHAGAPNDRTIQNGDMCLFDMGGEYYCFASDITCSFPANGKFTADQKAVYEAVLRSSRAVMGAMKPGVWWPDMHRLADRIHLEELAHMGILSGSVDAMVQAHLGAVFMPHGLGHFLGIDVHDVGGYPEGVERIDEPGLRSLRTARHLQPGMVLTVEPGIYFIDHLLDEALADPARASFLNREVLQRFRGFGGDGASPLSRNRQRSCKTPARSRGSHPPGKDRVRIEEDVVVTDSGIELLTCVPRTVEEIEACMAGCDKAFTPFSGPK

SEQ ID NO: 80313 - protein, 58 aa, Homo sapiens
MAQTDKPTCIPPELPKMLKEFAKAAIRAQPQDLIQWGAEYVLLSRLHLLEDGRGERVL

SEQ ID NO: 80314 - protein, 187 aa, Homo sapiens
MASVLSRRLGKRSLLGARVLGPSASEGPSAAPPSEPLLEGAAPQPFTTSDDTPCQEQPKEVLKAPSTSGLQQVAFQPGQKVYVWYGGQECTGLVEQHSWMEGQVTVWLLEQKLQVCCRVEEVWLAELQGPCPQAPPLEPGAQALAYRPVSRNIDVPKRKSDAVEMDEMMAAMVLTSLSCSPVVQSPP

SEQ ID NO: 80315 - protein, 157 aa, Homo sapiens
MNPQQQRMAAIGTDKELSDLLDFSAMFSPPVNSGKTRPTTLGSSQFSGSGIDERGGTTSWGTSGQPSPSYDSSRGFTDSPHYSDHLNDSRLGAHEGLSPTPFMNSNLMGKTSERGSFSLYSRDTGLPGCQSSLLRQDLGLGSPAQLSSSGKPGTAYY

SEQ ID NO: 80316 - protein, 1304 aa, Homo sapiens
MRRLICKRICDYKSFDDEESVDGNRPSSAASAFKVPAPKTSGNPANSARKPGSAGGPKVGGASKEGGAGAVDEDDFIKAFTDVPSIQIYSSRELEETLNKIREILSDDKHDWDQRANALKKIRSLLVAGAAQYDCFFQHLRLLDGALKLSAKDLRSQVVREACITVAHLSTVLGNKFDHGAEAIVPTLFNLVPNSAKVMATSGCAAIRFIIRHTHVPRLIPLITSNCTSKSVPVRRRSFEFLDLLLQEWQTHSLERHAAVLVETIKKGIHDADAEARVEARKTYMGLRNHFPGEAETLYNSLEPSYQKSLQTYLKSSGSVASLPQSDRSSSSSQESLNRPFSSKWSTANPSTVAGRVSAGSSKASSLPGSLQRSRSDIDVNAAAGAKAHHAAGQSVRSGRLGAGALNAGSYASLEDTSDKLDGTASEDGRVRAKLSAPLAGMGNAKADSRGRSRTKMVSQSQRSSSPDKNEGSQSANTIGAGSRSGSPGRVLTTTALSTVSSGVQRVLVNSASAQKRSKIPRSQGCSREASPSRLSVARSSRIPRPSVSQGCSREASRESSRDTSPVRSFQPLGPGYGISQSSRLSSSVSAMRVLNTGSDVEEAVADALLLGDIRTKKKPARRRYESYGMHSDDDANSDASSACSERSYSSRNGSIPTYMRQTEDVAEVLNRCASSNWSERKEGLLGLQNLLKNQRTLSRVELKRLCEIFTRMFADPHGKVFSMFLETLVDFIQVHKDDLQDWLFVLLTQLLKKMGADLLGSVQAKVQKALDVTRESFPNDLQFNILMRFTVDQTQTPSLKVKVAILKYIETLAKQMDPGDFINSSETRLAVSRVITWTTEPKSSDVRKAAQSVLISLFELNTPEFTMLLGALPKTFQDGATKLLHNHLRNTGNGTQSSMGSPLTRPTPRSPANWSSPLTSPTNTSQNTLSPSAFDYDTENMNSEDIYSSLRGVTEAIQNFSFRSQEDMNEPLKRDSKKDDGDSMCGGPGMSDPRAGGDATDSSQTALDNKASLLHSMPTHSSPRSRDYNPYNYSDSISPFNKSALKEAMFDDDADQFPDDLSLDHSDLVAELLKELSNHNERVEERKIALYELMKLTQEESFSVWDEHFKTILLLLLETLGDKEPTIRALALKVLREILRHQPARFKNYAELTVMKTLEAHKDPHKEVVRSAEEAASVLATSISPEQCIKVLCPIIQTADYPINLAAIKMQTKVIERVSKETLNLLLPEIMPGLIQGYDNSESSVRKACVFCLVAVHAVIGDELKPHLSQLTGSKMKLLNLYIKRAQTGSGGADPTTDVSGQS

SEQ ID NO: 80317 - protein, 19 aa, Homo sapiens
  MOD_RES (1)..(1): Any amino acid
XMKFTKGRTVLLKSITLFF

SEQ ID NO: 80318 - protein, 262 aa, Homo sapiens
MEKLAASTEPQGPRPVLGRESVQVPDDQDFRSFRSECEAECRMECCDVPAETLYDVLHDIEYRKKWDSNVIETFDIARLTVNADVGYYSWRCPKPLKNRDVITLRSWLPMGADYIIMNYSVKHPKYPPRKDLVRAVSIQTGYLIQSTGPKSCVITYLAQVDPKGSLPKWVVNKSSQFLAPKAMKKMYKACLKYPEWKQKHLPHFKPWLHPEQSPLPSLALSELSVQHADSLENIDESAVAESREERMGGAGGEGSDDDTSLT

SEQ ID NO: 80319 - protein, 42 aa, Homo sapiens
MKKQSDSVKGKRRDDGLSAAARKQRFCFKLIPAIWDCRPLTT

SEQ ID NO: 80320 - protein, 229 aa, Homo sapiens
  MOD_RES (1)..(1): Any amino acid
XSSFTSSLSLRYFTYGILFGCGCSFAFQPSLVILGHYFQRRLGLANGVVSAGSSIFSMSFPFLIRMLGDKIKLAQTFQVLSTFMFVLMLLSLTYRPLLPSSQDTPSKRGVRTLHQRFLAQLRKYFNMRVFRQRTYRIWAFGIAAAALGYFVPYVHLMKYVEEEFSEIKETWVLLVCIGATSGLGRLVSGHISDSIPGLKKIYLQAYSATVLGTTMWPSTLPVCPPSSGL

SEQ ID NO: 80321 - protein, 68 aa, Homo sapiens
MKETDREAVATAVQRVAGMLQRPDQLDKVEQYRRREARKKASVEARLKAAIQSQLDGVRTGLSQLHNA

SEQ ID NO: 80322 - protein, 473 aa, Homo sapiens
MPLLGLLPRRAWASLLSQLLRPPCASCTGAVRCQSQVAEAVLTSQLKAHQEKPNFIIKTPKGTRDLSPQHMVVREKILDLVISCFKRHGAKGMDTPAFELKETLTEKYGEDSGLMYDLKDQGGELLSLRYDLTVPFARYLAMNKVKKMKRYHVGKVWRRESPTIVQGRYREFCQCDFDIAGQFDPMIPDAECLKIMCEILSGLQLGDFLIKMAWKDVRHEMVVKKGLAPEVADRIGDYVQCHGGVSLVEQMFQDPRLSQNKQALEGLGDLKLLFEYLTLFGIADKISFDLSLARGLDYYTGVIYEAVLLQTPTQAGEEPLNVGSVAAGGRYDGLVGMFDPKGHKVPCVGLSIGVERIFYIVEQRMKTKGEKVRTTETQVFVATPQKNFLQERLKLIAELWDSGIKAEMLYKNNPKLLTQLHYCESTGIPLVVIIGEQELKEGVIKIRSVASREEVAIKRENFVAEIQKRLSES

SEQ ID NO: 80323 - protein, 125 aa, Homo sapiens
MVKLPFSLSLQLANSCPSPEDKATDPSMSEQDWSAIQNFCEQVNTDPNGPTHAPWLLAHKIQSPQEKEALYALTVLEMCMNHCGEKFHSEVAKFRFLNELIKVLSPKYLGSWATGKVKGRVIEIL

SEQ ID NO: 80324 - protein, 1183 aa, Homo sapiens
  MOD_RES (1)..(1): Any amino acid
XGLGGPGGSRAAVLVQQWVSYADTELIPAACGATLPALGLRSSAQDPQAVLGALGRALSPLEEWLRLHTYLAGEAPTLADLAAVTALLLPFRYVLDPPARRIWNNVTRWFVTCVRQPEFRAVLGEVVLYSGARPLSHQPGPEAPALPKTAAQLKKEAKKREKLEKFQQKQKIQQQQPPPGEKKPKPEKREKRDPGVITYDLPTPPGEKKDVSGPMPDSYSPRYVEAAWYPWWEQQGFFKPEYGRPNVSAANPRGVFMMCIPPPNVTGSLHLGHALTNAIQDSLTRWHRMRGETTLWNPGCDHAGIATQVVVEKKLWREQGLSRHQLGREAFLQEVWKWKEEKGDRIYHQLKKLGSSLDWDRACFTMDPKLSAAVTEAFVRLHEEGIIYRSTRLVNWSCTLNSAISDIEVDKKELTGRTLLSVPGYKEKVEFGVLVSFAYKVQGSDSDEEVVVATTRIETMLGDVAVAVHPKDTRYQHLKGKNVIHPFLSRSLPIVFDEFVDMDFGTGAVKITPAHDQNDYEVGQRHGLEAISIMDSRGALINVPPPFLGLPRFEARKAVLVALKERGLFRGIEDNPMVVPLCNRSKDVVEPLLRPQWYVRCGEMAQAASAAVTRGDLRILPEAHQRTWHAWMDNIREWCISRQLWWGHRIPAYFVTVSDPAVPPGEDPDGRYWVSGRNEAEAREKAAKEFGVSPDKISLQQDEDVLDTWFSSGLFPLSILGWPNQSEDLSVFYPGTLLETGHDILFFWVARMVMLGLKLTGRLPFREVYLHAIVRDAHGRKMSKSLGNVIDPLDVIYGISLQGLHNQLLNSNLDPSEVEKAKEGQKADFPAGIPECGTDALRFGLCAYMSQGRDINLDVNRILGYRHFCNKLWNATKFALRGLGKGFVPSPTSQPGGHESLVDRWIRSRLTEAVRLSNQGFQAYDFPAVTTAQYSFWLYELCDVYLECLKPVLNGVDQVAAECARQTLYTCLDVGLRLLSPFMPFVTEELFQRLPRRMPQAPPSLCVTPYPEPSECSWKDPEAEAALELALSITRAVRSLRADYNLTRIRPDCFLEVADEATGALASAVSGYVQALASAGVVAVLALGAPAPQGCAVALASDRCSIHLQLQGLVDPARELGKLQAKRVEAQRQAQRLRERRAASGYPVKVPLEVQEADEAKLQQTEAELRKVDEAIALFQKML

SEQ ID NO: 80325 - protein, 125 aa, Homo sapiens
  MOD_RES (1)..(1): Any amino acid
XAAHGGSAASSALKGLIQQFTTITGASESVGKHMLEACNNNLEMAVTMFLDGGGIAEEPSTSSASVSTVRPHTEEEVRAPIPQKQEILVEPEPLFGVRQEQELRNGGAIDKKLTTLADLFRPPID

SEQ ID NO: 80326 - protein, 249 aa, Homo sapiens
  MOD_RES (1)..(1): Any amino acid
XLRQQAVMAISQELNRRALGGPTPSTWINQVRRRSSLLGSRLEETLYSDQELAYLQQGEEAMQKALGILSNQEGWKKESQQDNGDKVMSKVVPDVGKVFRLEVVVDQPMERLYEELVERMEAMGEWNPNVKEIKVLQKIGKDTFITHELAAEAAGNLVGPRDFVSVRCAKRRGSTCVLAGMATDFGNMPEQKGVIRGGCPRASSTRSCPRPRWILPTTCASAWSPTLPLKPGVEDQPAVPNCAQLHWYT

SEQ ID NO: 80327 - protein, 36 aa, Homo sapiens
MTSDYRWPWKKAEGTQLKFQKRKSMALSHSRLRCWI

SEQ ID NO: 80328 - protein, 158 aa, Homo sapiens
MGNSMKSTPAPAERPLPNPEGLDSDFLAVLSDYPSPDISPPIFRRGEKLRVISDEGGWWKAISLSTGRESYIPGICVARVYHGWLFEGLGRDKAEELLQLPDTKVGSFMIRESETKKGFYSLSVRHRQVKHYRIFRLPNNWYYISPRLTFQCLEDLVN

SEQ ID NO: 80329 - protein, 55 aa, Homo sapiens
MSNPGGRRNGPVKLRLTGLPDPFAKVVVDGSGQCHSTDTVKNTLDPKWNQHYDLQ

SEQ ID NO: 80330 - protein, 96 aa, Homo sapiens
MREIVHIQAGQCGNQIGTKFWEVISDEHGIDPAGGYVGDSALQLERINVYYNESSSQKYVPRAALVDLEPGTMDSVRSGPFGQLFRPDNFIFELPL

SEQ ID NO: 80331 - protein, 71 aa, Homo sapiens
MSAEVPEAASAEEQKQKYFDSGDYNMAKAKMKNKQLPTAAPDKTEVTGDHIPTPQDLPQRKPSLVASKLAG

SEQ ID NO: 80332 - protein, 499 aa, Homo sapiens
MERAEEPVVYQKLLPWEPSLESEEEVEEEETSEALVLNPRRHQDSSRNKAGGLPGTWARVVAALLLLAVGCSLAVRQLQNQGRSTGSLGSVAPPPGGHSHGPGVYHHGAIISPAATCSHLGRELLVAGGNVVDAGVGAALCLAVVHPHATGLGAMFWGLFHDSSSGNSTALTSGPAQTLAPGLGLPAALPTLHLLHARFGRLPWPRLLVGPTTLAQEGFLVDTPLARALVARGTEGLCPLLCHADGTPLGAGARATNPQLAAVLRSAALAPTSDLAGDALLSLLAGDLGVEVPSAVPRPTLEPAEQLPVPQGILFTTPSPSAGPELLALLEAALRSGAPIPDPCPPFLQTAVSPESSALAAVDSSGSVLLLTSSLNCSFGSAHLSPSTGVLLSNLVAKSTTSAWACPLILRGSLDDTEADVLGLVASGTPDVARAMTHTLLRHLAARPPTQAQHQHQGQQEPTEHPSTCGQGTLLQVAAHTEHAHVSSVPHACCPFQGF

SEQ ID NO: 80333 - protein, 412 aa, Homo sapiens
  MOD_RES (1)..(1): Any amino acid
XEDTVRRLVLPAVQLEDSGEYLCEIDDESASFTVTVTEPPVRIIYPRDEVTLIAVTLECVVLMCELSREDAPVRWYKDGLEVEESEALVLERDGPRCRLVLPAAQPEDGGEFVCDAGDDSAFFTVTVTEPPVQFLALETTPSPLCVAPGEPVVLSCELSRAGAPVVWSHNGRPVQEGEGLELHAEGPRRVLCIQAAGPAHAGLYTCQSGAAPGAPSLSFTVQVAEPLLVKLVSELTPLTVHEGDDATFRCEVSPPDADVTWLRNGAVVTPGPQVEMAQNGSSRILTLRGCQLGDAGTVTLRAGSTATSARLHVRETELLFLRRLQDVRAEEGQDVCLEVETGRVGAAGAVRWVRGGQPLPHDSRLSMAQDGHIHRLFIHGVILADQGTYGCESHHDRTLARLSVRRECPVLS

SEQ ID NO: 80334 - protein, 75 aa, Homo sapiens
KMFPVICWTSPKEQADVLIKRSAYKIGQDQAPLATCLSPPAPAVCGGTWQLDHSQEKGTISPASNMQKLRPGEIK

SEQ ID NO: 80335 - protein, 68 aa, Homo sapiens
MNPVPQMEMQKSPVFGHLGSSPEVLWNTRYYTEAAIWKDHLERFFIKTEPQSIRKHPCLISMKVMRRT

SEQ ID NO: 80336 - protein, 275 aa, Homo sapiens
MPRPRRCEWLPSPLQALRITHPVTLPCPPPPSEPLATMATSKLPVVPGEEENTILMAKERLEALRTAFESGDLPQAASHLQELLASTESIRLEVGVTGESGAGKSSLINALRGLEAEDPGAALTGVMETTMQPSPYPHPQFPDVTLWDLPGAGSPGCPADKYLKQVDFSRYDFFLLVSPRRCGAVETRLAAEILCQGKKFYFVRTKVDEDLAATRTQRPSGFREAAVLQEIRDHCAERLREAGVADPRIFLVSNLSPARYDFPTLVSTWEHDLPS

SEQ ID NO: 80337 - protein, 85 aa, Homo sapiens
MASGSNWLSGVNVVLVMAYGSLVFVLLFIFVKRQIMRFAMKSRRGPHVPVGHNAPKTVSFKNAGTMPVLFTTIKPGPTHRLERGD

SEQ ID NO: 80338 - protein, 77 aa, Homo sapiens
GVFLYTLGCVCAACLYYLSPLKLEHLALIYFGGLSGSFLYTGGIGFKYVALGDLIILITFGPLAVMFAYAIQSSSSH

SEQ ID NO: 80339 - protein, 45 aa, Homo sapiens
MSLKSERRGIHVDQSDLLCKKGCGYYGNPAWQGFCSKCWREEYHK

SEQ ID NO: 80340 - protein, 135 aa, Homo sapiens
CSSGLDSLVPGDEDKPYKCQLCRSSFRYKGNLASHRTVHTGEKPYHCSICGARFNRPANLKTHSRIHSGEKPYKCETCGSRFVQVAHLRAHVLIHTGEKPYPCPTCGTRFRHLQTLKSHVRIHTGEKPYHEPVTS

SEQ ID NO: 80341 - protein, 172 aa, Homo sapiens
  MOD_RES (1)..(1): Any amino acid
XAEGSPEPGTPAAPTPESFTVHFLPLNSAQTLHHKSCYNGRFQLLYVACGMVHLLIPELGACVAPGGNLIVELARYLVDVRQEQLQGFNTRVRELAQAAGFAPQTGARPSETFARFCKSQESALGNTVPAVEPGTPPLDILAQPLEASNPALEGLTQPLQVSSGSLKQPGGD

SEQ ID NO: 80342 - protein, 117 aa, Homo sapiens
MTKFGFLRLSYEKQDTLLKLLILSMAAVLSFSTRLFAVLRFESVIHEFDPYFNYRTTRFLAEEGFYKFHNWFDDRAWYPLGRIIGGTIYPGLMITSAAIYHVLHFFHITIDIRNVCV

SEQ ID NO: 80343 - protein, 131 aa, Homo sapiens
MASKSWLNFLTFLCGSAIGFLLCSQLFSILLGEKVDTQPNVLHNDPHARHSDDNGQNHLEGQMNFNADSSQHKDENTDIAENLYQKVRILCWVMTGPQNLEKKAKHVKATWAQRCNKVLFMSSEENKDFPA

SEQ ID NO: 80344 - protein, 427 aa, Homo sapiens
MALLWGLLVLSWSCLQGPCSVFSPVSAMEPLGWQLTSGPNQEQVSPLTLLKLGNQVQPGAQNHTLQRLQQVLHAGSGPCLPHLLSRLCQDLGPGAFRLAARMYLQKGFPIKEDFLEQSEQLFGAKPVSLTGKQEDDLANINQWVKEATEGKIQEFLSGLPEDTVLLLLNAIHFQGFWRNKFDPSLTQRDSFHLDEQFTVPVEMMQARTYPLRWFLLEQPEIQVAHFPFKNNMSFVVLVPTHFEWNVSQVLANLSWDTLHPPLVWERPTKVRLPKLYLKHQMDLVATLSQLGLQELFQAPDLRGISEQSLVVSGVQHQSTLELSEVGVEAAAATSIAMSRMSLSSFSVNRPFLFFIFEDTTGLPLFVGSVRNPNPSAPRELKEQQDSPGNKDFLQSLKGFPRGDKLFGPDLKLVPPMEEDYPQFGSPK

SEQ ID NO: 80345 - protein, 78 aa, Homo sapiens
MGNLLKVLTCTDLEQGPNFFLDFENAQPTESEKEIYNQVNVVLKDAEGILEDLQSYRGAGHEIREAIQHPADEKLQEK

SEQ ID NO: 80346 - protein, 74 aa, Homo sapiens
MLSDELESKPELLVQFVQNTSIPLGQGLVESEAKDITCLSLLPVTEASECSRLMLPDDTTNHSNSSKEVPSSAV

SEQ ID NO: 80347 - protein, 168 aa, Homo sapiens
MSGVRPPIMNGPLHPRPLVALLDGRDCTVEMPILKDVATVAFCDAQSTQEIHEKVPPRGRLGLAEPHVGGSWRDGSTAGPGHSRSGCHWGRSSLCPSRPAPSGGGHGVFPGHHQEVDIGFALSPIRRWTRGFPCAPSGGGHHVCPEPHQEVDIRFALCPIRRWTRGFP

SEQ ID NO: 80348 - protein, 52 aa, Homo sapiens
  MOD_RES (1)..(1): Any amino acid
XRLRENELTYYCCKKDLCNFNEQLENGGTSLSEKTVLLLVTPFLAAAWSLHP

SEQ ID NO: 80349 - protein, 109 aa, Homo sapiens
MIAPLLCILSYNFNTFAILNVYSKLTMFCTTNSLPMDLLLKQGSLKQEVESFCYQIVSESNDQKVGILQSEDKQLQPSVSKKSEGELSRVKFISNSNKITFSKKPKRRK

SEQ ID NO: 80350 - protein, 120 aa, Homo sapiens
RGFGRGSKQLGIPTANFPEQVVDNLPADISTGIYYGWASVGSGDVHKMVVSIGWNPYYKNTKKSMETHIMHTFKEDFYGEILNVAIVGYLRPEKNFDSLAGWLLLSSGMKLMKSFKMCEV

SEQ ID NO: 80351 - protein, 168 aa, Homo sapiens
VGFVSEDEYLEIQGITREQSGDYECSASNDVAAPVVRRVKVTVNYPPYISEAKGTGVPVGQKGTLQCEASAVPSAEFQWYKDDKRLIEGKKGVKVENRPFLSKLIFFNVSEHDYGNYTCVASNKLGHTNASIMLFGPGAVSEVSNGTSRRAGCVWLLPLLVLHLLLKF

SEQ ID NO: 80352 - protein, 1617 aa, Homo sapiens
MEKKLLIKSKELQDSQDKCHKMEQEMTRLHRRVSEVEAVLSQKEVELKASETQRSLLEQDLATYITECSSLKRSLEQARMEVSQEDDKALQLLHDIREQSRKLQEIKEQEYQAQVEEMRLMMNQLEEDLVSARRRSDLYESELRESRLAAEEFKRKATECQHKLLKAKDQGKPEVGEYAKLEKINAEQQLKIQELQEKLEKAVKASTEATELLQNIRQAKERAERELEKLQNREDSSEGIRKKLVEAEERRHSLENKVKRLETMERRENRLKDDIQTKSQQIQQMADKILELEEKHREAQVSAQHLEVHLKQKEQHYEEKIKVLDNQIKKDLADKETLENMMQRHEEEAHEKGKILSEQKAMINAMDSKIRSLEQRIVELSEANKLAANSSLFTQRNMKAQEEMISELRQQKFYLETQAGKLEAQNRKLEEQLEKISHQDHSDKNRLLELETRLREVSLEHEEQKLELKRQLTELQLSLQERESQLTALQAARAALESQLRQAKTELEETTAEAEEEIQALTAHRDEIQRKFDALRNSCTVITDLEEQLNQLTEDNAELNNQNFYLSKQLDEASGANDEIVQLRSEVDHLRREITEREMQLTSQKQTMEALKTTCTMLEEQVMDLEALNDELLEKERQWEAWRSVLGDEKSQFECRVRELQRMLDTEKQSRARADQRITESRQVVELAVKEHKAEILALQQALKEQKLKAESLSDKLNDLEKKHAMLEMNARSLQQKLETERELKQRLLEEQAKLQQQMDLQKNHIFRLTQGLQEALDRADLLKTERSDLEYQLENIQVLYSHEKVKMEGTISQQTKLIDFLQAKMDQPAKKKKVPLQYNELKLALEKEKARCAELEEALQKTRIELRSAREEAAHRKATDHPHPSTPATARQQIAMSAIVRSPEHQPSAMSLLAPPSSRRKESSTPEEFSRRLKERMHHNIPHRFNVGLNMRATKCAVCLDTVHFGRQASKCLECQVMCHPKCSTCLPATCGLPAEYATHFTEAFCRDKMNSPGLQTKEPSSSLHLEGWMKVPRNNKRGQQGWDRKYIVLEGSKVLIYDNEAREAGQRPVEEFELCLPDGDVSIHGAVGASELANTAKADVPYILKMESHPHTTCWPGRTLYLLAPSFPDKQRWVTALESVVAGGRVSREKAEADAKLLGNSLLKLEGDDRLDMNCTLPFSDQVVLVGTEEGLYALNVLKNSLTHVPGIGAVFQIYIIKDLEKLLMIAGEERALCLVDVKKVKQSLAQSHLPAQPDISPNIFEAVKGCHLFGAGKIENGLCICAAMPSKVVILRYNENLSKYCIRKEIETSEPCSCIHFTNYSILIGTNKFYEIDMKQYTLEEFLDKNDHSLAPAVFAASSNSFPVSIVQVNSAGQREEYLLCFHEFGVFVDSYGRRSRTDDLKWSRLPLAFAYREPYLFVTHFNSLEVIEIQARSSAGTPARAYLDIPNPRYLGPAISSGAIYLASSYQDKLRVICCKGNLVKESGTEHHRGPSTSRSSLRSSCVASSPNKRGPPTYNEHITKRVASSPAPPEGPSHPREPSTPHRYREGRTELRRDKSPGRPLEREKSPGRMLSTRRERSPGRLFEDSSRGRLPAGAVRTPLSQVNKVWDQSSV

SEQ ID NO: 80353 - protein, 93 aa, Homo sapiens
MTEVVPSSALSEVSLRLLCHDDIDTVKHLCGDWFPIEYPDSWYRDITSNKKFFSLAATYRGAIVGMIVAEIKNRTKIHKEDGDILASNFSVDT

SEQ ID NO: 80354 - protein, 145 aa, Homo sapiens
MYLDNSSIEEASGVYPIDDDDYASASGSGADEDVESPELTTSRPLPKILLTSAAPKVETTTLNIQNKIPAQTKSPEETDKEKVHLSDSERKMDPAEEDTNVYTEKHSDSLFKRTEVLAAVIAGGVIGFLFAIFLILLLVYRMRKK

SEQ ID NO: 80355 - protein, 552 aa, Homo sapiens
MLQNVTPHNKLPGEGNAGLLGLGPEAAAPGKRIRKPSLLYEGFESPTMASVPALQLTPANPPPPEVSNPKKPGRVTNQLQYLHKVVMKALWKHQFAWPFRQPVDAVKLGLPDYHKIIKQPMDMGTIKRRLENNYYWAASECMQDFNTMFTNCYIYNKPTDDIVLMAQTLEKIFLQKVASMPQEEQELVVTIPKNSHKKGAKLAALQGSVTSAHQVPAVSSVSHTALYTPPPEIPTTVLNIPHPSVISSPLLKSLHSAGPPLLAVTAAPPAQPLAKKKGVKRKADTTTPTPTAILAPGSPASPPGSLEPKAARLPPMRRESGRPIKPPRKDLPDSQQQHQSSKKGKLSEQLKHCNGILKELLSKKHAAYAWPFYKPVDASALGLHDYHDIIKHPMDLSTVKRKMENRDYRDAQEFAADVRLMFSNCYKYNPPDHDVVAMARKLQDVFEFRYAKMPDEPLEPGPLPVSTAMPPGLAKSSSESSSEESSSESSSEEEEEEDEEDEEEEESESSDSEEERAHRLAELQEQLRAVHEQLAALSQGPISKPKRKREKK

SEQ ID NO: 80356 - protein, 453 aa, Homo sapiens
MFVLCNQNKELVSYRGAVPIIRCSRGTAAEMVAVKLDKKLRENLRDARNSLFTGDTLGAGQFSFQRPLLVLVDRNIDLATPLHHTWTYQALVHDVLDFHLNRVNLEESSGVENSPAGARPKRKNKKSYDLTPVDKFWQKHKGSPFPEVAESVQQELESYRAQEDEVKRLKSIMGLEGEDEGAISMLSDNTAKLTSAVSSLPELLEKKRLIDLHTNVATAVLEHIKARKLDVYFEYEEKIMSKTTLDKSLLDIISDPDAGTPEDKMRLFLIYYISTQQAPSEADLEQYKKALTDAGCNLNPLQYIKQWKAFTKMASAPASYGSTTTKPMGLLSRVMNTGSQFVMEGVKNLVLKQQNLPVTRILDNLMEMKSNPETDDYRYFDPKMLRGNDSSVPRNKNPFQEAIVFVVGGGNYIEYQNLVDYIKGKQGKHILYGCSELFNATQFIKQLSQLGQK

SEQ ID NO: 80357 - protein, 162 aa, Homo sapiens
MSTEKVDQKEEAGEKEVCGDQIKGPDKEEEPPAAASHGQGWRPGGRAARNARPEPGARHPALPAMVNDPPVPALLWAQEVGQVLAGRARRLLLQFGVLFCTILLLLWVSVFLYGSFYYSYMPTVSHLSPVHFYYRTDCDSSTTSLCSFPVANVSLTKGGRDR

SEQ ID NO: 80358 - protein, 323 aa, Homo sapiens
MERLLYGIGACGEVKLAFERKTCKKVAIKIISKRKFAIGSAREADPALNVETEIEILKKLNHPCIIKIKNFFDAEDYYIVLELMEGGELFDKVVGNKRLKEATCKLYFYQMLLAVQYLHENGIIHRDLKPENVLLSSQEEDCLIKITDFGHSKILGETSLMRTLCGTPTYLAPEVLVSVGTAGYNRAVDCWSLGVILFICLSGYPPFSEHRTQVSLKDQITSGKYNFIPEVWAEVSEKALDLVKKLLVVDPKARFTTEEALRHPWLQDEDMKRKFQDLLSEENESTALPQVLAQPSTSRKRPREGEAEGAETTKRPAVCAAVL

SEQ ID NO: 80359 - protein, 110 aa, Homo sapiens
MEIYKTNEDQSDQLVWRTEVVKNNLNPSWEPFRLSLHSLCSCDVHRPLKFLVYDYDSSGKHDFIGEFTSTFQEMQEGTANPGQEMQWDCINPKYRDKKKNYKSSGTVVLA

SEQ ID NO: 80360 - protein, 91 aa, Homo sapiens
MKLNISFPATGCQKLIEVDDERKLRTFYEKRMATEVAADALGEEWKVKVDKLLQVFKSETVNAIGNWYLEWGSDSGFWLLTFGKLLPNATL

SEQ ID NO: 80361 - protein, 359 aa, Homo sapiens
MGLWALLPGWVSATLLLALAALPAALAANSSGRWWGIVNVASSTNLLTDSKSLQLVLEPSLQLLSRKQRRLIRQNPGILHSVSGGLQSAVRECKWQFRNRRWNCPTAPGPHLFGKIVNRGCRETAFIFAITSAGVTHSVARSCSEGSIESCTCDYRRRGPGGPDWHWGGCSDNIDFGRLFGREFVDSGEKGRDLRFLMNLHNNEAGRTTVFSEMRQECKCHGMSGSCTVRTCWMRLPTLRAVGDVLRDRFDGASRVLYGNRGSNRASRAELLRLEPDLVYFEKSPNFCTYSGRLGTAGTAGRACNSSSPALDGCELLCCGRGHRTRTQRVTERCNCTFHWCCHVSCRNCTHTRVLHECL

SEQ ID NO: 80362 - protein, 51 aa, Homo sapiens
MIIAKNGPDTERLPTSHTCFNVLLLPEYSSKEKLKERLLKAITYAKGFGML

SEQ ID NO: 80363 - protein, 225 aa, Homo sapiens
MKIFSESHKTVFVVDHCPYMAESCRQHVEFDMLVKNRTQGIIPLAPISKSLWTCSVESSMEYCRIMYDIFPFKKLVNFIVSDSGAHVLNSWTQEDQNLQELMAALAAVGPPNPRADPECCSILHGLVAAVETLCKITEYQHEARTLLMENAERVGNRGRIICITNAKSDSHVRMLEDCVQETIHEHNKLAANSDHLMQIQKCELVLIHTYPVGEDSLVSDRSKKE

SEQ ID NO: 80364 - protein, 166 aa, Homo sapiens
MKGSNRNKDHSAEGEGVGKRPKRKCLQWHPLLAKKLLDFSEEEEEEDEEEDIDKVQLLGADGLEQDVGETEDDESPEQRARRPMNAFLLFCKRHRSLVRQEHPRLDNRGATKILADWWAVLDPKEKQKYTDMAKEYKDAFMKANPGYKWCPTTNKPVKSPTPTVNP

SEQ ID NO: 80365 - protein, 125 aa, Homo sapiens [sequence omitted]

SEQ ID NO: 80366 - protein, 12 aa, Homo sapiens
LWLIQWLLLKYK

SEQ ID NO: 80367 - protein, 135 aa, Homo sapiens
MDEDGLELQQEPNSFFDATGADGTHMDGDQIVVEVQETVFVSDVVDSDITVHNFVPDDPDSVVIQDVIEDVVIEDVQCPDIMEEADVSETVIIPEQVLDSDVTEEVSLAHCTVPDDVLASDITSASMSMPEHVLT

SEQ ID NO: 80368 - protein, 54 aa, Homo sapiens
MCSLASGATGGYPGPSAPGSSSPRPRRCGAGGRPSGTRARAGWGARRDHEGGAE

SEQ ID NO: 80369 - protein, 88 aa, Homo sapiens
FNLLQLDPDCRGCCQEEAQFETKKYSSIVSKQECHHSNCMQELFLKFVDENWEGSLKSKYVRGSDPVLKLLDDNGNIAEELSILKWNT

SEQ ID NO: 80370 - protein, 408 aa, Homo sapiens
LEGMSKRKRKRSVQEGENPDDGVRGSPPEDYRLGQVASSLFRGEHHSRGGTGRLASLFSSLEPQIQPVYVPVPKQTIKKTKRNEEEESTSQIERPLSQEPAKKVKAKKKHTNAEKKLADRESALASADLEEEIHQKQGQKRKNSQPGVKVADRKILDDTEDTVVSQRKKIQINQEEERLKNERTVFVGNLPVTCNKKIPAEGTLSKKLAAIKRKIHPDQKNINAYVVFKEESAATQALKRNGAQIADGFRIRVDLASETSSRDKRSVFVGNLPYKVEESAIEKHFLDCGSIMAVRIVRDKMTGIGKGFGYVLFENTDSVHLALKLNNSELMGRKLRVMRSVNKEKFKQQNSNPRLKNVSKPKQGLNFTSKTAEGHPKSLFIGEKAVLLKTKKKGQKKSGRPKKQRKQK

SEQ ID NO: 80371 - protein, 47 aa, Homo sapiens
MSGSTPFQMRLVHLDLKGAPPKVSYLSEAGVQWCDLGSPRTLPPGFK

SEQ ID NO: 80372 - protein, 89 aa, Homo sapiens
MDSRLQEIRERQKLRRQLLAQQLGAESADSIGAVLNSKDEQREIAETRETCRASYDTSAPNAKRKYLDEGETDEDKMEEYKASRENATG

SEQ ID NO: 80373 - protein, 51 aa, Homo sapiens
MPRRSRFDRPPARRPFDPNDRCYECGEKGHYAYDCHRYSRRRRSRAENLRR

SEQ ID NO: 80374 - protein, 251 aa, Homo sapiens
MLIPFSMKNCFQLLCNCQVPAAGFKKTVKNGLILQSISNDVYQNLAVEDWIHDHMNLEGKPILFFWQNSPSVVIGRHQNPWQECNLNLMREEGIKLARRRSGGGTVYHDMGNINLTFFTTKKKYDRMENLKLIVRALNAVQPQLDVQATKRFDLLLDGQFKISGTASKIGRTTAYHHCTLLCSTDGTFLSSLLKSPYQGIRSNATASIPSLVKNLLEKDPTLTCEVLMNAVATEYAAYHQIDNHIHLINPT

SEQ ID NO: 80375 - protein, 47 aa, Homo sapiens
MVTLRKRTLKVLTFLVLFIFLTSFFLNYSHTMVATTWFPKQMVLELS

SEQ ID NO: 80376 - protein, 124 aa, Homo sapiens
  MOD_RES (1)..(1): Any amino acid
XCRDRMILLKMEQEIIDFIADNNNHYKKFPQMSSYQRMLVHRVAAYFGLDHNVDQTGKSVIINKTSSTRIQFAPRKAFLWKTGATEMAQGEHLGVDRAAQKMNSSGLTTKGPGAAQTPTVPTAI

SEQ ID NO: 80377 - protein, 142 aa, Homo sapiens
MRKQGVSSKRLQSSGRSQSKGRRGASLAREPEVEEEMEKSALGGGKLPRGSWRSSPGRIQSLKERKGLELEVVAKTFLLGPFQFVRNSLAQLREKVQELQARRFSSRTTLGIAVFVAILHWDFIIHTSRPLLKHLRFWKDCG

SEQ ID NO: 80378 - protein, 207 aa, Homo sapiens
MQLKPMEINPEMLNKVLSRLGVAGQWRFVDVLGLEEESLGSVPAPACALLLLFPLTAQHENFRKKQIEELKGQEVSPKVYFMKQTIGNSCGTIGLIHAVANNQDKLGFEDGSVLKQFLSETEKMSPEDRAKCFEKNEVDDKVNFHFILFNNVDGHLYELDGRMPFPVNHGASSEDTLLKDAAKVCREFTEREQGEVRFSAVALCKAA

SEQ ID NO: 80379 - protein, 412 aa, Homo sapiens
MNRHLWKSQLCEMVQPSGGPAADQDVLGEESPLGKPAMLHLPSEQGAPETLQRCLEENQELRDAIRQSNQILRERCEELLHFQASQREEKEFLMCKFQEARKLVERLGLEKLDLKRQKEQALREVEHLKRCQQQMAEDKASVKAQVTSLLGELQESQSRLEAATKECQALEGRARAASEQARQLESEREALQQQHSVQVDQLRMQGQSVEAALRMERQAASEEKRKLAQLQVAYHQLFQEYDNHIKSSVGMQLEDLKQQLQQAEEALVAKQEVIDKLKEEAEQHKIVMETVPVLKAQADIYKADFQAERQAREKLAEKKELLQEQLEQLQREYSKLKASCQESARIEDMRKRHVEVSQAPLPPAPAYLSSPLALPSQRRSPPEEPPDFCCPKCQYQAPDMDTLQIHVMECIE

SEQ ID NO: 80380 - protein, 41 aa, Homo sapiens
MDEERALYIVRAGEAGAIERVLRDYSDKSVYRVDGIILPIL

SEQ ID NO: 80381 - protein, 143 aa, Homo sapiens
MSEPQPRGAERDLYRDTWVRYLGYANEVGEAFRSLVPAAVVWLSYGVASSYVLADAIDKGKKAGEALASVAIPGFTINRVCAASLYVLGTATRWPLAVRKWTTTALGLLTIPIIIHPIDRSVDFLLDSSLRKLYPTVGKPSSS

SEQ ID NO: 80382 - protein, 124 aa, Homo sapiens
MATNWGSLLQDKQQLEELARQAVDRALAEGVLLRTSQEPTSSEVVSYAPFTLFPSLVPSALLEQAYAVQMDFNLLVDAVSQNAAFLEQTLSSTIKQDDFTARLFDIHKQVLKEGIAQTCSQCPE

SEQ ID NO: 80383 - protein, 249 aa, Homo sapiens
MASCAEPSEPSAPLPAGVPPLEDFEVLDGVEDAEGEEEEEEEEEEEDDLSELPPLEDMGQPPAEEAEQPGALAREFLAAMEPEPAPAPAPEEWLDILVDMTFEEEAQLLQLKVKCLNNLAASQLKLDHYRAALRSCSLVLEHQPDNIKALFRKGKVLAQQGEYSEAIPILRAALKLEPSNKTIHAELSKLVKKHAAQRSTETALYRKMLGNPSRLPAKCPGKGAWSIPWKWLFGATAVALGGVALSVVI

SEQ ID NO: 80384 - protein, 519 aa, Homo sapiens
  MOD_RES (1)..(1): Any amino acid
XAGTLSLLLLVTSVTLLVARVFQKAVDQSIEKKIVLRNGTEAFDSWEKPPLPVYTQFYFFNVTNPEEILRGETPRVEEVGPYTYRELRNKANIQFGDNGTTISAVSNKAYVFERDQSVGDPKIDLIRTLNIPVLTGSCSVAQAGVQSVAPSQLTEASTSWAPGILLCRPGTPGVNHCSWAGPTVIEWSQVHFLREIIEAMLKAYQQKLFVTHTVDELLWGYKDEILSLIHVFRPDISPYFGLFYEKNGTNDGDYVFLTGEDSYLNFTKIVEWNGKTSLDWWITDKCNMINGTDGDSFHPLITKDEVLYVFPSDFCRSVYITFSDYESVQGLPAFRYKVPAEILANTSDNAGFCIPEGNCLGSGVLNVSICKNGAPIIMSFPHFYQADERFVSAIEGMHPNQEDHETFVDINPLTGIILKAAKRFQINIYVKKLDDFVETGDIRTMVFPVMYLNESVHIDKETASRLKSMINTTLIITNIPYIIMALGVFFGLVFTWLACKGQGSMDEGTADERAPLIRT

SEQ ID NO: 80385 - protein, 1884 aa, Homo sapiens
MVDKNIYIIQGEINIVVGAIKRNARWSTHTPLDEERDPLLHSFGHLKEVLNSITELSEIEPNVFLRPFLEVIRSEDTTGPITGLALTSVNKFLSYALIDPTHEGTAEGMENMADAVTHARFVGTDPASDEVVLMKILQVLRTLLLTPVGAHLTNESVCEIMQSCFRICFEMRLSELLRKSAEHTLVDMVQLLFTRLPQFKEEPKNYVGTNMKKISPCLLNKLELSSGEQTKALNQLERLKMRAGGMSDSSKWKKQKRSPRPPRHMTKVTPGSELPTPNGTTLSSNLTGGMPFIDVPTPISSASSEAASAVVSPSTDSGLEFSSQTTSKEDLTDLEQPGSPGYSTATEPGSSELGVPEQPDLQEGTHVEKSQSASVESIPEVLEECTSPADHSDSASVHDMDYVNPRGVRFTQSSQKEGTALVPYGLPCIRELFRFLISLTNPHDRHNSEVMIHMGLHLLTVALESAPVAQCQTLLGLIKDEMCRHLFQLLSIERLNLYAASLRVCFLLFESMREHLKFQMEMYIKKLMEIITVENPKMPYEMKEMALEAIVQLWRIPSFVTELYINYDCDYYCSNLFEELTKLLSKNAFPVSGQLYTTHLLSLDALLTVIDSTEAHCQAKVLNSLTQQEKKETARPSCEIVDGTREASNTERTASDGKAVGMASDIPGLHLPGGGRLPPEHGKSGCSDLEEAVDSGADKKFARKPPRFSCLLPDPRELIEIKNKKKLLITGTEQFNQKPKKGIQFLQEKGLLTIPMDNTEVAQWLRENPRLDKKMIGEFVSDRKNIDLLESFVSTFSFQGLRLDEALRLYLEAFRLPGEAPVIQRLLEAFTERWMNCNGSPFANSDACFSLAYAVIMLNTDQHNHNVRKQNAPMTLEEFRKNLKGVNGGKDFEQDILEDMYHAIKNEEIVMPEEQTGLVRENYVWNVLLHRGATPEGIFLRVPTASYDLDLFTMTWGPTIAALSYVFDKSLEETIIQKAISGFRKCAMISAHYGLSDVFDNLIISLCKFTALSSESIENLPSVFGSNPKAHIAAKTVFHLAHRHGDILREGWKNIMEAMLQLFRAQLLPKAMIEVEDFVDPNGKISLQREETPSNRGESTVLSFVSWLTLSGPEQSSVRGPSTENQEAKRVALECIKQCDPEKMITESKFLQLESLQELMKALVSVTPDEETYDEEDAAFCLEMLLRIVLENRDRVGCVWQTVRDHLYHLCVQAQDFCFLVERAVVGLLRLAIRLLRREEISAQVLLSLRILLLMKPSVLSRVSHQVAYGLHELLKTNAANIHSGDDWATLFTLLECIGSGVKPPAALQATARADAPDAGAQSDSELPSYHQNDVSLDRGYTSDSEVYTDHGRPGKIHRSATDADVVNSGWLVVGKDDVDNSKPGPSRPGPSPLINQYSLTVGLDLGPHDTKSLLKCVESLSFIVRDAAHITPDNFELCVKTLRIFVEASLNGGCKSQEKRGKSHKYDSKGNRFKKKSKEGSMLRRPRTSSQHASRGGQSDDDEDEGVPASYHTVSLQVSQDLLDLMHTLHTRAASIYSSWAEEQRHLETGGQKIEADSRTLWAHCWCPLLQGIACLCCDARRQVRMQALTYLQRALLVHDLQKLDALEWESCFNKVLFPLLTKLLENISPADVGGMEETRMRASTLLSKVFLQHLSPLLSLSTFAALWLTILDFMDKYMHAGSSDLLSEAIPESLKNMLLVMDTAEIFHSADARGGGPSALWEITWERIDCFLPHLRDELFKQTVIQDPMPMEPQGQKPLASAHLTSAAGDTRTPGHPPPPEIPSELGACDFEKPESPRAASSSSPGSPVASSPSRLSPTPDGPPPLAQPPLILQPLASPLQVGVPPMTLPIILNPALIEATSPVPLLATPRPTDPIPTSEVN

SEQ ID NO: 80386 - protein, 40 aa, Homo sapiens
MGETLGDSPIDPESDSFTDTLSANISQVFQDDSCLWMSLS

SEQ ID NO: 80387 - protein, 468 aa, Homo sapiens
MTVLEITLAVILTLLGLAILAILLTRWARCKQSEMYISRYSSEQSARLLDYEDGRGSRHAYSTQSERSKRDYTPSTNSLALSRSSIALPQGSMSSIKCLQTTEEPPSRTAGAMMQFTAPIPGATGPIKLSQKTIVQTPGPIVQYPGSNAGPPSAPRGPPMAPIIISQRTASQLAAPIIISQRTARIPQVHTMDSSGKITLTPVVILTGYMDEELAKKSCSKIQILKCGGTARSQNSREENKEALKNDIIFTNSVESLKSAHIKEPEREGKGTDLEKDKIGMEVKVDSDAGIPKRQETQLKISEMSIPQGQGAQIKKSVSDVPRGQESQVKKSESGVPKGQEAQVTKSGLVVLKGQEAQVEKSEMGVPRRQESQVKKSQSGVSKGQEAQVKKRESVVLKGQEAQVEKSELKVPKGQEGQVEKTEADVPKEQEVQEKKSEAGVLKGPESQVKNTECFRNKDTLIYHHPEA

SEQ ID NO: 80388 - protein, 183 aa, Homo sapiens
MAEEGAVAVCVRVRPLNSREESLGETAQVYWKTDNNVIYQVDGSKSFNFDRVFHGNETTKNVYEEIAAPIIDSAIQGYNGTIFAYGQTASGKTYTMMGSEDHLGVIPRAIHDIFQKIKKRNVYVADLTEEVVYTSEMALKWITKGEKSRHYGETKMNQRSSRSHTIFRMILESREKGEPSNCE

SEQ ID NO: 80389 - protein, 437 aa, Homo sapiens
MNSMDIRCSDIIQGDTQGPSAIAFISYSSLGNIINATFFEEMDKKDQVYLNSQVVSAAIGPKRNVSLSKSVTLTFQHVKMTPSTKKVFCVYWKSTGQGSQWSRDGCFLIHVNKSHTMCNCSHLSSFAVLMALTSQEEDPVLTVITYVGLSVSLLCLLLAALTFLLCKAIRNTSTSLHLQLSLCLFLAHLLFLVGIDRTEPKVLCSIIAGALHYLYLAAFTWMLLEGVHLFLTARNLTVVNYSSINRLMKWIMFPVGYGVPAVTVAISAASWPHLYGTADRCWLHLDQGFMWSFLGPVCAIFSANLVLFILVFWILKRKLSSLNSEVSTIQNTRMLAFKATAQLFILGCTWCLGLLQVGPAAQVMAYLFTIINSLQGFFIFLVYCLLSQQVQKQYQKWFREIVKSKSESETYTLSSKMGPDSKPSEGDVFPGQVKRKY

SEQ ID NO: 80390 - protein, 28 aa, Homo sapiens
MLLHLHQHKRIHIRENSYQCEECDKVFK

SEQ ID NO: 80391 - protein, 129 aa, Homo sapiens
MINTQDSSILPLSNCPQLQCCRHIVPGPLWCSDAPHPLSKIPGGRGGGRDPSLSALIYKDEKLTVTQDLPVNDGKPHIVHFQYEVTEVKVSSWDAVLSSQSLFVEIPDGLLADGSKEGSTPEDLQLLGL

SEQ ID NO: 80392 - protein, 246 aa, Homo sapiens
MSVGFIGAGQLAYALARGFTAAGILSAHKIIASSPEMNLPTVSALRKMGVNLTRSNKETVKHSDVLFLAVKPHIIPFILDEIGADVQARHIVVSCAAGVTISSVEKAFMALDALADGGVKMGLPRRLAIQLGAQALLGAAKMLLDSEQHPCQLKDNVCSPGGATIHALHFLESGGFRSLLINAVEASCIRTRELQSMADQEKISPAALKKTLLDRVKLESPTVSTLTPSSPGKLLTRSLALGGKKD

SEQ ID NO: 80393 - protein, 191 aa, Homo sapiens
MSQEGDYGRWTISSSDESEEEKPKPDKPSTSSLLCARQGAANEPRYTCSEAQKAAHKRKISPVKFSNTDSVLPPKRQKSGSQEDLGWCLSSSDDELQPEMPQKQAEKVVIKKEKDISAPNDGTAQRTENHGAPACHRLKEEEDEYETSGEGQDIWDMLDKGNPFQFYLTRVSGVKPKYNSGALHIKGQSYE

SEQ ID NO: 80394 - protein, 719 aa, Homo sapiens
MPSGTGKTVSLLALIMAYQRAYPLEVTKLIYCSRTVPEIEKVIEELRKLLNFYEKQEGEKLPFLGLALSSRKNLCIHPEVTPLRFGKDVDGKCHSLTASYVRAQYQHDTSLPHCRFYEEFDAHGREVPLPAGIYNLDDLKALGRRQGWCPYFLARYSILHANVVVYSYHYLLDPKIADLVSKELARKAVVVFDEAHNIDNVCIDSMSVNLTRRTLDRCQGNLETLQKTVLRIKETDEQRLRDEYRRLVEGLREASAARETDAHLANPVLPDEVLQEAVPGSIRTAEHFLGFLRRLLEYVKWRLRVQHVVQESPPAFLSGLAQRVCIQRKPLRFCAERLRSLLHTLEITDLADFSPLTLLANFATLVSTYAKGFTIIIEPFDDRTPTIANPILHFSCMDASLAIKPVFERFQSVIITSGTLSPLDIYPKILDFHPVTMATFTMTLARVCLCPMIIGRGNDQVAISSKFETREDIAVIRNYGNLLLEMSAVVPDGIVAFFTSYQYMESTVASWYEQGILENIQRNKLLFIETQDGAETSVALEKYQEACENGRGAILLSVARGKVSEGIDFVHHYGRAVIMFGVPYVYTQSRILKARLEYLRDQFQIRENDFLTFDAMRHAAQCVGRAIRGKTDYGLMVFADKRFARGDKRGKLPRWIQEHLTDANLNLTVDEGVQVAKYFLRQMAQPFHREDQLGLSLLSLEQLESEETLKRIEQIAQQL

SEQ ID NO: 80395 - protein, 732 aa, Homo sapiens
MLQVHRTGLGRLGVSLSKGLHHKAVLAVRREDVNAWERRAPLAPKHIKGITNLGYKVLIQPSNRRAIHDKDYVKAGGILQEDISEACLILGVKRPPEEKLMSRKTYAFFSHTIKAQEANMGLLDEILKQEIRLIDYEKMVDHRGVRVVAFGQWAGVAGMINILHGMGLRLLALGHHTPFMHIGMAHNYRNSSQAVQAVRDAGYEISLGLMPKSIGPLTFVFTGTGNVSKGAQAIFNELPCEYVEPHELKEVSQTGDLRKVYGTVLSRHHHLVRKTDAVYDPAEYDKHPERYISRFNTDIAPYTTCLINGIYWEQNTPRLLTRQDAQSLLAPGKFSPAGVEGCPALPHKLVAICDISADTGGSIEFMTECTTIEHPFCMYDADQHIIHDSVEGSGILMCSIDNLPAQLPIEATECFGDMLYPYVEEMILSDATQPLESQNFSPVVRDAVITSNGTLPDKYKYIQTLRESRERAQSLSMGTRRKVLVLGSGYISEPVLEYLSRDGNIEITVGSDMKNQIEQLGKKYNINPVSMDICKQEEKLGFLVAKQDLVISLLPYVLHPLVAKACITNKVNMVTASYITPALKELEKSVEDAGITIIGELGLDPGLDHMLAMETIDKAKEVGATIESYISYCGGLPAPEHSNNPLRYKFSWSPVGVLMNVMQSATYLLDGKVVNVAGGISFLDAVTSMDFFPGLNLEGYPNRDSTKYAEIYGISSAHTLLRGTLRYKGLEC

SEQ ID NO: 80396 - protein, 365 aa, Homo sapiens
MRTKAAGCAERRPLQPRTEAAAAPAGRAMPSEYTYVKLRSDCSRPSLQWYTRAQSKMRRPSLLLKDILKCTLLVFGVWILYILKLNYTTEECDMKKMHYVDPDHVKRAQKYAQQVLQKECRPKFAKTSMALLFEHRYSVDLLPFVQKAPKDSEAESKYDPPFGFRKFSSKVQTLLELLPEHDLPEHLKAKTCRRCVVIGSGGILHGLELGHTLNQFDVVIRLNSAPVEGYSEHVGNKTTIRMTYPEGAPLSDLEYYSNDLFVAVLFKSVDFNWLQAMVKKETLNVPTIGVIAVVLATHLCDEVSLAGFGYDLNQPRTPLHYFDSQCMAAMNFQTMHNVTTETKFLLKLVKEGVVKDLSGGIDREF

SEQ ID NO: 80397 - protein, 1755 aa, Homo sapiens
MTTMLQKSDSNASFLRAARAGNLDKVVEYLKGGIDINTCNQNGLNALHLAAKEGHVGLVQELLGRGSSVDSATKKGNTALHIASLAGQAEVVKVLVKEGANINAQSQNGFTPLYMAAQENHIDVVKYLLENGANQSTATEDGFTPLAVALQQGHNQAVAILLENDTKGKVRLPALHIAARKDDTKSAALLLQNDHNADVQSKSGFTPLHIAAHYGNVNVATLLLNRGAAVDFTARNGITPLHVASKRGNTNMVKLLLDRGGQIDAKTRDGLTPLHCAARSGHDQVVELLLERGAPLLARTKNGLSPLHMAAQGDHVECVKHLLQHKAPVDDVTLDYLTALHVAAHCGHYRVTKLLLDKRANPNARALNGFTPLHIACKKNRIKVMELLVKYGASIQAITESGLTPIHVAAFMGHLNIVLLLLQNGASPDVTNIRGETALHMAARAGQVEVVRCLLRNGALVDARAREEQTPLHIASRLGKTEIVQLLLQHMAHPDAATTNGYTPLHISAREGQVDVASVLLEAGAAHSLATKKGFTPLHVAAKYGSLDVAKLLLQRRAAADSAGKNGLTPLHVAAHYDNQKVALLLLEKGASPHATAKNGYTPLHIAAKKNQMQIASTLLNYGAETNIVTKQGVTPLHLASQEGHTDMVTLLLDKGANIHMSTKSGLTSLHLAAQEDKVNVADILTKHGADQDAHTKLGYTPLIVACHYGNVKMVNFLLKQGANVNAKTKNGYTPLHQAAQQGHTHIINVLLQHGAKPNATTANGNTALAIAKRLGYISVVDTLKVVTEEVTTTTTTITEKHKLNVPETMTEVLDVSDEEGDDTMTGDGGEYLRPEDLKELGDDSLPSSQFLDGMNYLRYSLEGGRSDSLRSFSSDRSHTLSHASYLRDSAVMDDSVVIPSHQVSTLAKEAERNSYRLSWGTENLDNVALSSSPIHSGFLVSFMVDARGGAMRGCRHNGLRIIIPPRKCTAPTRVTCRLVKRHRLATMPPMVEGEGLASRLIEVGPSGAQFLGPVIVEIPHFAALRGKERELVVLRSENGDSWKEHFCDYTEDELNEILNGMDEVLDSPEDLEKKRICRIITRDFPQYFAVVSRIKQDSNLIGPEGGVLSSTVVPQVQAVFPEGALTKRIRVGLQAQPMHSELVKKILGNKATFSPIVTLEPRRRKFHKPITMTIPVPKASSDVMLNGFGGDAPTLRLLCSITGGTTPAQWEDITGTTPLTFVNECVSFTTNVSARFWLIDCRQIQESVTFASQVYREIICVPYMAKFVVFAKSHDPIEARLRCFCMTDDKVDKTLEQQENFAEVARSRDVEVLEGKPIYVDCFGNLVPLTKSGQHHIFSFFAFKENRLPLFVKVRDTTQEPCGRLSFMKEPKSTRGLVHQAICNLNITLPIYTKESESDQEQEEEIDMTSEKNPQDEQERIEERLAYIADHLGFSWTELARELDFTEEQIHQIRIENPNSLQDQSHALLKYWLERDGKHATDTNLVECLTKINRMDIVHLMETNTEPLQERISHSYAEIEQTITLDHSEGFSVLQEELCTAQHKQKEEQAVSKESETCDHPPIVSEEDISVGYSTFQDGVPKTEGDSSATALFPQTHKEQVQQDFSGKMQDLPEESSLEYQQEYFVTTPGTETSETQKAMIVPSSPSKTPEEVSTPAEEEKLYLQTPTSSERGGSPIIQEPEEPSEHREESSPRKTSLVIVESADNQPETCERLDEDAAFEKGDDMPEIPPETVTEEEYIDEHGHTVVKKDNNE

SEQ ID NO: 80398 - protein, 87 aa, Homo sapiens
MAATVNLELDPIFLKALGFLHSKSKDSAEKLKALLDESLARGIDSSYRPSQKDVEPPKISSTKNISIKQEPKISSSLPSGNNNGKVL

SEQ ID NO: 80399 - protein, 156 aa, Homo sapiens
MAPAHQHSGALHQSLTPLPTLQFQDVTGPSFLPQALHQQYLLQQQLLEAQHRRLVSHPRRSQERVSVHPHRLHPSFDFGQLQTPQPRYLAEGTDWDLSVDAGLSPAQFQVRPIPQHYQHYLATPRMHHFPRNSSSTQMVVHEIRNYPYPQLHFLAL

SEQ ID NO: 80400 - protein, 119 aa, Homo sapiens
MKWSIPAFLYFLDNLIVFYVLSYLQPAMAVIFSNFSIITTALLFRIVLKRRLNWIQWASLLTLFLSIVALTAGTKTLQHNLAGRGFHHDAFFSPSNSCLLFRTSLKFRNTHLGKKGSEI

SEQ ID NO: 80401 - protein, 58 aa, Homo sapiens
MEKYEKLAKTGEGSYGVVFKCRNKTSGQVVAVKKFVESEDDPVVKKIALREIRMLKSC

SEQ ID NO: 80402 - protein, 40 aa, Homo sapiens
MRRSLAPSQLAKRKPEGRSCDDEDWQPGLVVSTQGDREDS

SEQ ID NO: 80403 - protein, 475 aa, Homo sapiens
MKNLVLKLRASSHNLQNYISSRRKSPAYDGNTSRKAPNEFLTSVVELIGAAKALLAWLDRAPFTGITDFSVTKNKIIQLCLDLTTTVQKDCFVAEMEDKVLTVVKVLNGICDKTIRSTTDPVMSQCACLEEVHLPNIKPGEGLGMYIKSTYDGLHVITGTTENSPADRSQKIHAGDEVIQVNQQTVVGWQLKNLVKKLRENPTGVVLLLKKRPTGSFNFTPAPLKNLRWKPPLVQTSPPPATTQSPESTMDTSLKKEKSAILDLYIPPPPAVPYSPRDENGSFVYGGSSKCKQPLPGPKGSESPNSFLDQESRRRRFTIADSDQLPGYSVETNILPTKMREKTPSYGKPRPLSMPADGNWMGIVDPFARPRGHGRKGEDALCRYFSNERIPPIIEESSSPPYRFSRPTTERHLVRGADYIRGSRCYINSDLHSSATIPFQEEGTKKKSGSSATKSSSTEPSLLVSWFTRLKLLTH

SEQ ID NO: 80404 - protein, 15 aa, Homo sapiens
MGLDKMKKTACGFCF

SEQ ID NO: 80405 - protein, 64 aa, Homo sapiens
MDSRLQEIRERQKLRRQLLAQQLGAESADSIGAVLNSKDEQREIAETRETCRASYDTSAPNAKR

SEQ ID NO: 80406 - protein, 84 aa, Homo sapiens
MIQSSGNTVLLLILCMQHSFPEPGRLYLDLILAILALELICSLICLLIYTVKIRRFNKAKPEPDILEEEKIYAYPSNITSETGF

SEQ ID NO: 80407 - protein, 665 aa, Homo sapiens
MQFETLRQVCNSVLSHFHGVFSSPPNILQNELFGQTLNNARKRSPSVSRDQNRRYDQREEREEYSQYATSDTAMPRSPSDYADRRSQHEPQFYEDSDHLSYRDSNRRSHRHSKEYIVDDEDVESRDEYERQRREEEYQSRYRSDPNLARYPVKPQPYEEQMRIHAEVSRARHERRHSDVSLANADLEDSRISMLRMDRPSRQRSISERRAAMENQRSYSMERTREAQGPSSYAQRTTNHSPPTPRRSPLPIDRPDLRRTDSLRKQHHLDPSSAVRKTKREKMETMLRNDSLSSDQSESVRPPPPKPHKSKKGGKMRQISLSSSEEELASTPEYTSCDDVEIESESVSEKGDMDYNWLDHTSWHSSEASPMSLHPVTWQPSKDGDRLIGRILLNKRLKDGSVPRDSGAMLGLKVVGGKMTESGRLCAFITKVKKGSLADTVGHLRPGDEVLEWNGRLLQGATFEEVYNIILESKPEPQVELVVSRPIGDIPRIPDSTHAQLESSSSSFESQKMDRPSISVTSPMSPGMLRDVPQFLSGQLSIKLWFDKVGHQLIVTILGAKDLPSREDGRPRNPYVKIYFLPDRSDKNKRRTKTVKKTLEPKWNQTFIYSPVHRREFRERMLEITLWDQARVREEESEFLGEILIELETALLDDEPHWYKLQTHDV

SEQ ID NO: 80408 - protein, 177 aa, Homo sapiens
MPSETPQAEVGPTGCPHRSGPHSAKGSLEKGSPEDKEAKEPLWIRPDAPSRCTWQLGRPASESPHHHTAPAKSPKILPDILKKIGDTPMVRINKIGKKFGLKCELLAKCEFFNAGGSVKDRISLRMIEDAERDGTLKPGDTIIEPTSGNTGIGLALAAAVRGYRCIIVMPEKMSSEK

SEQ ID NO: 80409 - protein, 248 aa, Homo sapiens
MGNPGTFKRGLLLSALSYLGFETYQVISQAAVVHATAKVEEILEQADYLYESGETEKLYQLLTQYKESEDAELLWRLARASRDVAQLSRTSEEEKKLLVYEALEYAKRALEKNESSFASHKWYAICLSDVGDYEGIKAKIANAYIIKEHFEKAIELNPKDATSIHLMGIWCYTFAEMPWYQRRIAKMLFATPPSSTYEKALGYFHRAEQGKTYLKLHNKKLAAFWLMKAKDYPAHTEEDKQVKRNRSS

SEQ ID NO: 80410 - protein, 128 aa, Homo sapiens
MKRKILLDVARTSLQTKVHAELADVLTEVVVDSVLAVRRPGYPIDLFMVEIMEMKHKLGTDTKLIQGLVLDHGARHPDMKKRVEDAFILICNVSLEYEKTEVNSGFFYKTAEEKEKLVKAERKFIEDR

SEQ ID NO: 80411 - protein, 105 aa, Homo sapiens
PALCLPESLPLIQGPVGLDQRFSLKQIEALECAYDNLCQTEGVTALPYFLIKYDENMVLVSLLKHYSDFFQGQRTKITIGVYDPCNLAQYPGWPLRNFLVLAAHR

SEQ ID NO: 80412 - protein, 343 aa, Homo sapiens
MIRRQNLDGNLSFVMWGLKVLLLPVVSFALYPEEILDTHWELWKKTHRKQYNNKVDEISRRLIWEKNLKYISIHNLEASLGVHTYELAMNHLGDMTSEEVVQKMTGLKVPLSHSRSNDTLYIPEWEGRAPDSVDYRKKGYVTPVKNQGQCGSCWAFSSVGALEGQLKKKTGKLLNLSPQNLVDCVSENDGCGGGYMTNAFQYVQKNRGIDSEDAYPYVGQEESCMYNPTGKAAKCRGYREIPEGNEKALKRAVARVGPVSVAIDASLTSFQFYSKGVYYDESCNSDNLNHAVLAVGYGIQKGNKHWIIKNSWGENWGNKGYILMARNKNNACGIANLASFPKM

SEQ ID NO: 80413 - protein, 115 aa, Homo sapiens
MARLFSPRPPPSEDLFYETYYSLSQQYPLLLLLLGIVLCALAALLAVAWASGRELTSDPSFLTTVLCALGGFSLLLGLASREQRLQRWTRPLSGLVWVALLALGHAFLFTGGVVS

SEQ ID NO: 80414 - protein, 334 aa, Homo sapiens
  MOD_RES (1)..(1): Any amino acid
XSWRQPERTILRPRFRREVEKTACPSGKKAREIDESLIFYKKWELEACVDAALLATQMDRVNAIPFTYEQLDVLKHKLDELYPQGYPESVIQHLGYLFLKMSPEDIRKWNVTSLETLKALLEVNKGHEMSPQVATLIDRFVKGRGQLDKDTLDTLTAFYPGYLCSLSPEELSSVPPSSIWAVRPQDLDTCDPRQLDVLYPKARLAFQNMNGSEYFVKIQSFLGGAPTEDLKALSQQNVSMDLATFMKLRTDAVLPLTVAEVQKLLGPHVEGLKAEERHRPVRDWILRQRQDDLDTLGLGLQGGIPNGYLVLDLSMQGPGPVLTVLALLLASTLA

SEQ ID NO: 80415 - protein, 1085 aa, Homo sapiens
MPRRKQEQPKRLPSHVSRQEEAEGELSEGEHWYGNSSETPSEASYGEVQENYKLSLEDRIQEQSTSPDTSLGSTTPSSHTLELVALDSEVLRDSLQCQDHLSPGVSSLCDDDPGSNKPLSSNLRRLLEAGSLKLDAAATANGRVESPVNVGSNLSFSPPSHHAQQLSVLARKLAEKQEQNDQYTPSNRFIWNQGKWLPNSTTTCSLSPDSAILKLKAAANAVLQDKSLTRTEETMRFESFSSPFSSQSASSTLAALSKKVSERSLTPGQEHPPPASSFLSLASMTSSAALLKEVAARAAGSLLAEKSSLLPEDPLPPPPSEKKPEKVTPPPPPPPPPPPPPPPQSLELLLLPVPKGRVSKPSNSASEEESGKPFQCPICGLVIKRKSYWKRHMVIHTGLKSHQCPLCPFRCARKDNLKSHMKVHQHQDRGETFQCQLCPFTSSRHFSLKLHMRCHQHFLRTEAKVKEEIPDPDVKGSPHLSDSACLGQQREGGGTELVGTMMTSNTPERTSQGGAGVSPLLVKEEPKEDNGLPTSFTLNAADRPANHTKLKDPSEYVANSASALFSQDISVKMASDFLMKLSAANQKEPMNLNFKVKEEPKEGESLSTTLPRSSYVFSPESEVSAPGVSEDALKPQEGKGSVLRRDVSVKAASELLMKLSAESYKETQMVKIKEEPMEVDIQDSHVSISPSRNVGYSTLIGREKTEPLQKMPEGRVPPERNLFSQDISVKMASELLFQLSEKVSKEHNHTKENTIRTTTSPFFSEDTFRQSPFTSNSKELLPSDSVLHGRISAPETEKIVLEAGNGLPSWKFNDQLFPCDVCGKVFGRQQTLSRHLSLHTEERKYKCHLCPYAAKCRANLNQHLTVHSVKLVSTDTEDIVSAVTSEGSDGKKHPYYYSCHVCGFETELNVQFVSHMSLHVDKEQWMFSICCTACDFVTMEEAEIKTHIGTKHTGEDRKTPSESNSPSSSSLSALSDSANSKDDSDGSQKNKGGNNLLVISVMPGSQPSLNSEEKPEKGFECVFCNFVCKTKNMFERHLQIHLITRMFECDVCHKFMKTPEQLLEHKKCHTVPTGGLKTVVSFRLL

SEQ ID NO: 80416 - protein, 371 aa, Homo sapiens
MKSARAKTPRKPTVKKGSQTNLKDPVGVYCRVRPLGFPDQECCIEVINNTTVQLHTPEGYRLNRNGDYKETQYSFKQVFGTHTTQKELFDVVANPLVNDLIHGKNGLLFTYGVTGSGKTHTMTGSPGEGGLLPRCLDMIFNSIGSFQAKRYVFKSNDRNSMDIQCEVDALLERQKREAMPNPKTSSSKRQVDPEFADMITVQEFCKAEEVDEDSVYGVFVSYIEIYNNYIYDLLEEVPFDPIKPKWNSCSTPMRNTDFVPPQSKLLREDKNHNMYVAGCTEVEVKSTEEAFEVFWRGQKKRRIANTHLNRESSRSHSVFNIKLVQAPLDADGDNVLQFWEAGYRILEPEFCCEKSLQIFKNPFGRSDKIRL

SEQ ID NO: 80417 - protein, 216 aa, Homo sapiens
AVLYYQLAASQGHSLAQYRYARCLLRDPASSWNPERQRAVSLLKQAADSGLREAQAFLGVLFTKEPYLDEQRAVKYLWLAANNGDSQSRYHLGICYEKGLGVQRNLGEALRCYQQSAALGNEAAQERLRALFSMGAAAPGPSDLTVTGLKSFSSPSLCSLNTLLAGTSRLPHASSTGNLGLLCRSGHLGASLEASSRAIPPHPYPLERSVVRLGFG

SEQ ID NO: 80418 - protein, 100 aa, Homo sapiens
MGPLTFMDVAIEFSLEEWQCLDTAQRNVYRHVMLENYRNLVFLAVAFTFDLSGLNILSFQSILPFVSALYVMGNRNQCLQKHLEARNKDLCVLVLPKTFG

SEQ ID NO: 80419 - protein, 367 aa, Homo sapiens
MIRNGRGAAGGAEQPGPGGRRAVRVWCDGCYDMVHYGHSNQLRQARAMGDYLIVGVHTDEEIAKHKGPPVFTQEERYKMVQAIKWVDEVVPAAPYVTTLETLDKYNCDFCVHGNDITLTVDGRDTYEEVKQAGRYRECKRTQGVSTTDLVGRMLLVTKAHHSSQEMSSEYREYADSFGKCPGGRNPWTGVSQFLQTSQKIIQFASGKEPQPGETVIYVAGAFDLFHIGHVDFLEKVHRLAERPYIIAGLHFDQEVNHYKGKNYPIMNLHERTLSVLACRYVSEVVIGAPYAVTAELLSHFKEPKRRGIFRQIDSGSNLTTDLIVQRIITNRLEYEARNQKKEAKELAFLEAARQQAAQPLGERDGDF

SEQ ID NO: 80420 - protein, 100 aa, Homo sapiens
MEEPGERPFACSWQDCNKKFARSDELARHYRTHTGEKKFSCPICEKRFMRSDHLTKHARRHANFHPGMLQRRGGGSRTGSLSDYSRSDASSPTISPASSP

SEQ ID NO: 80421 - protein, 118 aa, Homo sapiens
MPITRMRMRPWLEMQINSNQIPGLIWINKEEMIFQIPWKHAAKHGWDINKDACLFRSWAIHTGRYKAGEKEPDPKTWKANFRCAMNSLPDIEEVKDQSRNKGSSAVRVYRMLPPLTKN

SEQ ID NO: 80422 - protein, 88 aa, Homo sapiens
MDFRTACEETKTGICLLQDGNQEPFKVRLHLAKDILMIQEQDVICVSGEPFYSGVQVLRNAGEEVTLTVSFLKRAPAFLKLPLNEDCA

SEQ ID NO: 80423 - protein, 93 aa, Homo sapiens
MSSESSKKRKPKVIRSDGAPAEGKRNRSDTEQEGKYYSEEAEVDLRDPGRDYELYKYTCQELQRLMAEIQDLKSRGGKDVAIEIEERRIQSCV

SEQ ID NO: 80424 - protein, 223 aa, Homo sapiens; identical to SEQ ID NO: 74687

SEQ ID NO: 80425 - protein, 164 aa, Homo sapiens
MSVLTPLLLRGLTGSARRLPVPRAKIHSLPPEGKLGIMGKENGIGSRRICNHHRELWEAGKMEPNQCVGWRCGSGAAGLSYRSQVRRPGVPAPATGLEAHSLTTPKGIPLLGLLPRRGNEEGLASGRTAIGNPEAVGSAALFKDGGGGTSAAEAGAAGQRLRRC

SEQ ID NO: 80426 - protein, 112 aa, Homo sapiens
  MOD_RES (1)..(1): Any amino acid
XNFQQPADAERALDTMNFDVIKGKPIRIMWSQRDPSLRKSGVGNVFIKNLDKSIDNKALYDTFSAFGNILSCKVVCDENGSKGYAFVHFETQEAADKAIEKMNGMLLNDRKV

SEQ ID NO: 80427 - protein, 331 aa, Homo sapiens
  MOD_RES (1)..(1): Any amino acid
XGVFHNGLKICEKFGPNLDTCPEGTILGLRLDSSGGLHLHVNGVDQGVAVPDVPQPCHALVDLYGQCEQVTIVNPEPGAASGKSAGTQGDMEKADMVDGIKESVCWGPPPAASPLKSCEYHALCSRFQELLLLPEDYFMPPPKRSLCYCESCRKLRGDEAHRRRGEPPREYALPFGWCRFNLRVNPRLEAGTLTKKWHMAYHGSNVAAVRRVLDRGELGAGTASILSCRPLKGEPGVGFEEPGENCAPPREEQPPPVLLSPSLQYAGAETLASKVQFRDPKSQRTHQAQVAFQEPINTVSEPPPRPLSRAPLSGARVPWGATRWAREIKES

SEQ ID NO: 80428 - protein, 164 aa, Homo sapiens
  MOD_RES (1)..(1): Any amino acid
XCFGPCARCSGPEESNCLQCKKGWALHHLKCVDIDECGTEGANCGADQFCVNTEGSYECRDCAKACLGCMGAGPGRCKKCSPGYQQVGSKCLGESPADGTQAPGSASPSMNGEEAGIWADGRHLCEGADPRVSRLLLRDDRRRVGGAAADVLWHHHLCTGHAGC

SEQ ID NO: 80429 - protein, 104 aa, Homo sapiens
  MOD_RES (1)..(1): Any amino acid
XRDTFNHLTTWLEDARQHSNSNMVIMLIGNKSDLESRREVKKEEGEAFAREHGLIFMETSAKTASNVEEAFINTAKEIYEKIQEGVFDINNEVYTYKYCWSILI

SEQ ID NO: 80430 - protein, 108 aa, Homo sapiens
MWLWEDQGGLLGPFSFLLLVLLLVTRSPVNACLLTGSLFVLLRVFSFEPVPSCRALQVLKPRDRISAIAHRGGSHDAPENTLAAIRQLRMEQQAWSWTLSLLLTGFLS

SEQ ID NO: 80431 - protein, 82 aa, Homo sapiens
MENGCLLNYLRENKGKLRKEMLLSVCQDICEGMEYLERNGYIHRDLAARNCLVSSTCIVKISDFGMTRSFNVGSFYRRKNAF

SEQ ID NO: 80432 - protein, 357 aa, Homo sapiens
MEAAVKEEISLEDEAVDKNIFRDCNKIAFYRRQKQWLSKKSTYQALLDSVTTDEDSTRFQIINEASKVPLLAEIYGIEGNIFRLKINEETPLKPRFEVPDVLTSKPSTVRLISCSGDTGSLILADGKGDLKCHITANPFKVDLVSEEEVVISINSLGQLYFEHLQILHKQRAAKENEEETSVDTSQENQEDLGLWEEKFGKFVDIKANGPSSIGLDFSLHGFEHLYGIPQHAESHQLKNTGDGDAYRLYNLDVYGYQIYDKMGIYGSVPYLLAHKLGRTIGIFWLNASETLVEINTEPAVEYTLTQMGPVAAKQKVRSRTHVHWMSESGIIDVFLLTGPTPSDVFKQYSHLTDIGEK

SEQ ID NO: 80433 - protein, 143 aa, Homo sapiens
  MOD_RES (1)..(1): Any amino acid
XDDDVEETHPMDGNDSDYDPKKEAKKEGNTEQPVQTSKIGLGRREYQSLQHRHHSQRSKCRPPKGMYLTQEDVVAVSCSPNAANTILRQLDMELISLKRQVQNAKQVNSALKQKMEGGIEEFKPPEAQTPQAPRTLGPSPPAP

SEQ ID NO: 80434 - protein, 63 aa, Homo sapiens
MTSSPVSRVVYNGKRTSSPRSPPSSSEIFTPAHEENVRFIYEAFKPIDLSDLKRRSTQDAKKS

SEQ ID NO: 80435 - protein, 126 aa, Homo sapiens
EFPFTDLKPKDAGRYFCAYKTTASHEWSESSEHLQLVVTDKHDELEAPSMKTGSSSEESTKRTSHSKLPEQEAAEADLSNMERVSLSTADPQGVTYAELSTSALSEAASDTTQEPPGSHEYAALKV

SEQ ID NO: 80436 - protein, 194 aa, Homo sapiens
  MOD_RES (1)..(1): Any amino acid
XLPNPLMTFELYEEFLRAMGLQERKETIRGVYSVIDQLSRTHLNTLERLIFHLVSCVELIVVEQMNKYKARLKDISSLEFAENKAKTRLSLIRRSMGKGRIRRGNYPGPSSPVVVRLPSVSDVSEETLTSEAAMETDITEQQQAAMQQEERVLTEQIENLQKEKEELTFEMLVLEPRASDDETLESEASIGTAD

SEQ ID NO: 80437 - protein, 204 aa, Homo sapiens
  MOD_RES (1)..(1): Any amino acid
XMPERAVFRLRKWIIFRLVSIVDSLHLEMEEALTEQVARFCLFHSFFVTKKPTSQIPETKHPFSFPLENQAREAVSSAFFSLLQTLSTQFKQAPGQTQGGQPWTYHLVQFADLLLNHSHNVTTVTPFTAQQRQVNGAPGSPTEPAGQKQHQKALPKKGVLGKSPLSALARKKARLSLVIRSPSLLQSGAKKKAQTLRFTISSSK

SEQ ID NO: 80438 - protein, 461 aa, Homo sapiens
MDVVARGTTTRRSRLKRSDGSTTSTSFILRQGSADSYTSRPSDSDVSLEEDREAIRQEREQQAAIQLERAKKYNNDWWIGRLVKEGCEIGFIPSPLRLENIRIQQEQKRGRFHGGKSSGNSSSSLGEMVSGTFRATPTSTAKQKQKVTEHIPPYDVVPSMRPVVLVGPSLKGYEVTDMMQKALFDFLKHRFDGRISITRVTADISLAKRSVLNNPSKRAIIERSNTRSSLAEVQSEIERIFELARSLQLVVLDADTINHPAQLIKTSLAPIIVHVKVSSPKVLQRLIKSRGKSQSKHLNVQLVAADKLAQCPPEMFDVILDENQLEDACEHLGEYLEAYWRATHTTSSTPMTPLLGRNLGSTALSPYPTAISGLQSQRMRHSNHSTENSPIERRSLMTSDENYHNERARKSRNRLSSSSQHSRDHYPLVEEDYPDSYQDTYKPHRNRGSPGGYSHDSRHRL

SEQ ID NO: 80439 - protein, 94 aa, Homo sapiens
  MOD_RES (1)..(1): Any amino acid
XVQSGTNALLVVKHRDMNEKELEAQEARKAQLENHEPEEEEEEEMETEEKEAGGSGKSGQARLWEPWEGGKVGFISLHSLPDEEQEKGSSSEKE

SEQ ID NO: 80440 - protein, 97 aa, Homo sapiens
MPHAFKPGDLVFAKMKGYPHWPARIDDIADGAVKPPPNKYPIFFFGTHETAFLGPKDLFPYDKCKDKYGKPNKRKGFNEGLWEIQNNPHASYSAPPQ

SEQ ID NO: 80441 - protein, 93 aa, Homo sapiens
MLNICYNAVDRHIENGKGDKIAIIYDSPVTNTKATFTYKEVLEQVSKLAGVLVKHGIKKGDTVVIYMPMIPQAMYTMLACARIGAIHSLIFGG

SEQ ID NO: 80442 - protein, 94 aa, Homo sapiens
MISTARVPADKPVRIAFSLNDASDDTPPEDSIPLVFPELDQQLQPLPPCHDSEESMEVFKQHCQIAEEYHEVKKEITLLEQRKKELIAKLDQAE

SEQ ID NO: 80443 - protein, 155 aa, Homo sapiens
MGGCAGSRRRFSDSEGEETVPEPRLPLLDHQGAHWKNAVGFWLLGLCNNFSYVVMLSAAHDILSHKRTSGNQSHVDPGPTPIPHNSSSRFDCNSVSTAAVLLADILPTLVIKLLAPLGLHLLPYSPRVLVSGICAAGSFVLVAFSHSVGTSLCGP

SEQ ID NO: 80444 - protein, 54 aa, Homo sapiens
MECGIPPTLVCVGRGGGLHTVFQRQKLLYELIATSPFWFHLRSSLQKPLSTFWN

SEQ ID NO: 80445 - protein, 157 aa, Homo sapiens
MASQKRPSQRHGSKYLATASTMDHARHGFLPRHRDTGILDSIGRFFGGDRGAPKRGSGKDSHHPARTAHYGSLPQKSHGRTQDENPVVHFFKNIVTPRTPPPSQGKGRGLSLSRFSWGAEGQRPGFGYGGRASDYKSAHKGFKGVDAQGTLSKIFKL

SEQ ID NO: 80446 - protein, 150 aa, Homo sapiens
MDTMMLNVRNLFEQLVRRVEILSEGNEVQFIQLAKDFEDFRKKWQRTDHELGKYKDLLMKAETERSALDVKLKHARNQVDVEIKRRQRAEADCEKLERQIQLIREMLMCDTSGSIQLSEEQKSALAFLNRGQPSSSNAGNKRLSTIDESG

SEQ ID NO: 80447 - protein, 44 aa, Homo sapiens
MSTEHLFPTNLVAHTGKTLSSGKGSLITSCEETHPTALLQWPHE

SEQ ID NO: 80448 - protein, 112 aa, Homo sapiens
MRARSLKLFQLLVFCKMEPGGEPTGAKESSTLMESLAAVKAAFLAQAPSGSRSAEVQAAQSTEPAAEAGAPEGEGHRGGPPRALGSLGLCENQEARERPGGSPRGPVTSEKT

SEQ ID NO: 80449 - protein, 122 aa, Homo sapiens
SRGGNTSSSHGSAGPKQKHWAKKGSSDELQAEPEPSRWQQIVAFFTRRHSFIDCISVATSSTQANPPPVLVNTDSLETPTYVNGTDADYEYEEITLERGLLNSFCLVRTIHCIFHWLKNLST

SEQ ID NO: 80450 - protein, 190 aa, Homo sapiens
  MOD_RES (1)..(1): Any amino acid
XKKGGGKKSGKKSYLSGGAGAAGGGGADPGNKKWEQKQVQIKTLEGEFSVTMWSSDEKKDIDHETVVEEQIIGENSPPDYSEYMTGKKLPPGGIPGIDLSDPKQLAEFARMKPRKIKEDDAPRTIACPHKCTFEGCGKRFSLDFNLRTHVRIHTGDRPYVCPFDGCNKKFAQSTNLKSHILTHAKAKNNQ

SEQ ID NO: 80451 - protein, 162 aa, Homo sapiens
MEENLANRSHAELETALRDSSRVLQAMLATQLRSFDDHFQHLLNDSERTLQATFPGAFGELYTQNARAFRDLYSELRLYYRGANLHLEETLAEFWARLLERLFKQLHPQLLLPDDYLDCLGKQAEALRPFGEAPRELRLRATRAFVAARSFVQGLGVASDVV

SEQ ID NO: 80452 - protein, 146 aa, Homo sapiens
MAVCIAVIAKENYPLYIRSTPTENELKFHYMVHTSLDVVDEKISAMGKALVDQRELYLGLLYPTEDYKVYGYVTNSKVKFVMVVDSSNTALRDNEIRSMFRKLHNSYTDVMCNPFYNPGDRIQSSGSVSLSRAFDNMVTSMMIQVC

SEQ ID NO: 80453 - protein, 213 aa, Homo sapiens
MKPKLMYQELKVPAEEPANELPMNEIEAWKAAEKKARWVLLVLILAVVGFGALMTQLFLWEYGDLHLFGPNQRPAPCYDPCEAVLVESIPEGLDFPNASTGNPSTSQAWLGLLAGAHSSLDIASFYWTLTNNDTHTQEPSAQQGEEVLRQLQTLAPKGVNVRIAVSKPSGPQPQADLQALLQSGAQVRMVDMQKLTHGVLHTKFWVVDQTHFY

SEQ ID NO: 80454 - protein, 746 aa, Homo sapiens
MITYKNFTHPSGVGERCDTPANLLAKGCQLNFIENPVSQVEILKNKPLSVGRQKNSSDIVQIAPQSLILKLRPGGAQTLQVHVRQTEDYPVDLYYLMDLSASMDDDLNTIKELGSRLSKEMSKLTSNFRLGFGSFVEKPVSPFVKTTPEEIANPCSSIPYFCLPTFGFKHILPLTNDAERFNEIVKNQKISANIDTPEGGFDAIMQAAVCKEKIGWRNDSLHLLVFVSDADSHFGMDSKLAGIVIPNDGLCHLDSKNEYSMSTVLEYPTIGQLIDKLVQNNVLLIFAVTQEQVHLYENYAKLIPGATVGLLQKDSGNILQLIISAYEELRSEVELEVLGDTEGLNLSFTAICNNGTLFQHQKKCSHMKVGDTASFSVTVNIPHCERRSRHIIIKPVGLGDALELLVSPECNCDCQKEVEVNSSKCHHGNGSFQCGVCACHPGHMGPRCECGEDMLSTDSCKEAPDHPSCSGRGDCYCGQCICHLSPYGNIYGPYCQCDNFSCVRHKGLLCGGNGDCDCGECVCRSGWTGEYCNCTTSTDSCVSEDGVLCSGRGDCVCGKCVCTNPGASGPTCERCPTCGDPCNSKRSCIECHLSAAGQAREECVDKCKLAGATISEEEDFSKDGSVSCSLQGENECLITFLITTDNEGKTIIHSINEKDCPKPPNIPMIMLGVSLAILLIGVVLLCIWKLLVSFHDRKEVAKFEAERSKAKWQTGTNPLYRGSTSTFKNVTYKHREKQKVDLSTDC

SEQ ID NO: 80455 - protein, 112 aa, Homo sapiens
MAWTARDRGALGLLLLGLCLCAAQRGPPGEQGPPGPPGPPGVPGIDGIDGDRGPKGPPGPPGPAGEPGKPGAPGKPGTPGADAGVQWHDLGSLQPLPPGFKRFSCLSLQLPE

SEQ ID NO: 80456 - protein, 315 aa, Homo sapiens
  MOD_RES (1)..(1): Any amino acid
XESWPPPPATPGAGGLAVRTFVSHFRDRAVAGHLTRAVEPLRTFSVLEPGGPGGCAARRRATVEETARAADCRVAQNGGFFRMNSGECLGNVVSDERRVSSSGGLQNAQFGIRRDGTLVTGYLSEEEVLDTENPFVQLLSGVVWLIRNGSIYINESQATECDETQETGSFSKFVNVISARTAIGHDRKGQLVLFHADGQTEQRGINLWEMAEFLLKQDVVNAINLDGGGSATFVLNGTLASYPSDHWTAWLALTLALAFLLLISTAANLSLLLSRAERNRRLHGDYAYHPLQEMNGEPLAAEKEQPGGAHNPFKD

SEQ ID NO: 80457 - protein, 46 aa, Homo sapiens
MAPSLWKGLVGIGLFALAHAAFSAAQHRSYMRLTEKEDESLPIDDI

SEQ ID NO: 80458 - protein, 793 aa, Homo sapiens
MSVKEGAQRKWAALKEKLGPQDSDPTEANLESADPELCIRLLQMPSVVNYSGLRKRLEGSDGGWMVQFLEQSGLDLLLEALARLSGRGVARISDALLQLTCVSCVRAVMNSRQGIEYILSNQGYVRQLSQALDTSNVMVKKQVFELLAALCIYSPEGHVLTLDALDHYKTVCSQQYRFSIVMNELSGSDNVPYVVTLLSVINAVILGPEDLRARTQLRNEFIGLQLLDVLARLRDLEDADLLIQLEAFEEAKAEDEEELLRVSGGVDMSSHQEVFASLFHKVSCSPVSAQLLSVLQGLLHLEPTLRSSQLLWEALESLVNRAVLLASDAQECTLEEVVERLLSVKGRPRPSPLVKAHKSVQANLDQSQRGSSPQNTTTPKPSVEGQQPAAAAACEPVDHAQSESILKVSQPRALEQQASTPPPPPPPPLLPGSSAEPPPPPPPPPLPSVGAKALPTAPPPPPLPGLGAMAPPAPPLPPPLPGSCEFLPPPPPPLPGLGCPPPPPPLLPGMGWGPPPPPPPLLPCTCSPPVAGGMEEVIVAQVDHGLGSAWVPSHRRVNPPTLRMKKLNWQKLPSNVAREHNSMWASLSSPDAEAVEPDFSSIERLFSFPAAKPKEPTMVAPRARKEPKEITFLDAKKSLNLNIFLKQFKCSNEEVAAMIRAGDTTKFDVEVLKQLLKLLPEKHEIENLRAFTEERAKLASADHFYLLLLAIPCYQLRIECMLLCEGAAAVLDMVRPKAQLVLAACERHLGAPNQEPLSSPGCPCRPAHQPPAAHLLPADPENWELPQLRQPHR

SEQ ID NO: 80459 - protein, 327 aa, Homo sapiens
MNTSPGTVGSDPVILATAGYDHTVRFWQAHSGICTRTVQHQDSQVNALEVTPDRSMIAAAGYQHIRMYDLNSNNPNPIISYDGVNKNIASVGFHEDGRWMYTGGEDCTARIWDLRSRNLQCQRIFQVNAPINCVCLHPNQAELIVGDQSGAIHIWDLKTDHNEQLIPEPEVSITSAHIDPDASYMAAVNSTGNCYVWNLTGGIGDEVTQLIPKTKIPAHTRYALQCRFSPDSTLLATCSADQTCKIWRTSNFSLMTELSIKSGNPGESSRGWMWGCAFSGDSQYIVTGEPRPGLPHPWPPALASRASPPRLQLPLCWGRLLGLHLRS

SEQ ID NO: 80460 - protein, 284 aa, Homo sapiens
MLCVIYHLDNPVGKMSSSPLSKKRRVSGPDPKPGSNCSPAQSVLSEVPSVPTNGMAKNGSEADIDEGLYSRQLYVLGHEAMKRLQTSSVLVSGLRGLGVEIAKNIILGGVKAVTLHDQGTAQWADLSSQFYLREEDIGKNRAEVSQPRLAELNSYVPVTAYTGPLVEDFLSGFQVVVLTNTPLEDQLRVGEFCHNRGIKLVVADTRGLFGQLFCDFGEEMILTDSNGEQPLSAMVSMVTKDNPGVVTCLDEARHGFESGDFVSFSEVQGMVELNGNQPMEIKVL

SEQ ID NO: 80461 - protein, 148 aa, Homo sapiens
MEQCACVERELDKVLQKFLTYGQHCERSLEELLHYVGQLRAELASAALQGTPLSATLSLVMSQCCRKIKDTVQKLASDHKDIHSSVSRVGKAIDRNFDSEICGVVSDAVWDAREQQQQILQMAIVEHLYQQGMLSVAEELCQESTLNV

SEQ ID NO: 80462 - protein, 851 aa, Homo sapiens
MEELIWEQYTVTLQKDSKRGFGIAVSGGRDNPHFENGETSIVISDVLPGGPADGLLQENDRVVMVNGTPMEDVLHSFAVQQLRKSGKVAAIVVKRPRKVQVAALQASPPLDQDDRAFEVMDEFDGRSFRSGYSERSRLNSHGGRSRSWEDSPERGRPHERARSRERDLSRDRSRGRSLERGLDQDHARTRDRSRGRSLERGLDHDFGPSRDRDRDRSRGRSIDQDYERAYHRAYDPDYERAYSPEYRRGARHDARSRGPRSRSREHPHSRSPSPEPRGRPGPIGVLLMKSRANEEYGLRLGSQIFVKEMTRTGLATKDGNLHEGDIILKINGTVTENMSLTDARKLIEKSRGKLQLVVLRDSQQTLINIPSLNDSDSEIEDISEIESNRSFSPEERRHQYSDYDYHSSSEKLKERPSSREDTPSRLSRMGATPTPFKSTGDIAGTVVPETNKEPRYQEDPPAPQPKAAPRTFLRPSPEDEAIYGPNTKMVRFKKGDSVGLRLAGGNDVGIFVAGIQEGTSAEQEGLQEGDQILKVNTQDFRGLVREDAVLYLLEIPKGEMVTILAQSRADVYRDILACGRGDSFFIRSHFECEKETPQSLAFTRGEVFRVVDTLYDGKLGNWLAVRIGNELEKGLIPNKSRAEQMASVQNAQRDNAGDRADFWRMRGQRSGVKKNLRKSREDLTAVVSVSTKFPAYERVLLREAGFKRPVVLFGPIADIAMEKLANELPDWFQTAKTEPKDAGSEKSTGVVRLNTVRQIIEQDKHALLDVTPKAVDLLNYTQWFPIVIFFNPDSRQGVKTMRQRLNPTSNKSSRKLFDQANKLKKTCAHLFTATINLNSANDSWFGSLKDT

SEQ ID NO: 80463 - protein, 93 aa, Homo sapiens
MKKMPLFSKSHKNPAEIVKILKDNLAILEKQDKKTDKASEEVSKSLQAMKEILCGTNEKEPPTEAVAQLAQELYSSGLLVTLIADLQLIDFEV

SEQ ID NO: 80464 - protein, 1450 aa, Homo sapiens
MASLAALALSLLLRLQLPPLPGARAQSAAGGCSFDEHYSNCGYSVALGTNGFTWEQINTWEKPMLDQAVPTGSFMMVNSSGRASGQKAHLLLPTLKENDTHCIDFHYYFSSRDRSSPGALNVYVKVNGGPQGNPVWNVSGVVTEGWVKAELAISTFWPHFYQVIFESVSLKGHPGYIAVDEVRVLAHPCRKAPHFLRLQNVEVNVGQNATFQCIAGGKWSQHDKLWLQQWNGRDTALMVTRVVNHRRFSATVSVADTAQRSVSKYRCVIRSDGGSGVSNYAELIVKEPPTPIAPPELLAVGATYLWIKPNANSIIGDGPIILKEVEYRTTTGTWAETHIVDSPNYKLWHLDPDVEYEIRVLLTRPGEGGTGPPGPPLTTRTKCADPVHGPQNVEIVDIRARQLTLQWEPFGYAVTRCHSYNLTVQYQYVFNQQQYEAEEVIQTSSHYTLRGLRPFMTIRLRLLLSNPEGRMESEELVVQTEEDVPGAVPLESIQGGPFEEKIYIQWKPPNETNGVITLYEINYKAVGSLDPSADLSSQRGKVFKLRNETHHLFVGLYPGTTYSFTIKASTAKGFGPPVTTRIATKISAPSMPEYDTDTPLNETDTTITVMLKPAQSRGAPVSVYQLVVKEERLQKSRRAADIIECFSVPVSYRNASSLDSLHYFAAELKPANLPVTQPFTVGDNKTYNGYWNPPLSPLKSYSIYFQALSKANGETKINCVRLATKAPMGSAQVTPGTPLCLLTTGASTQNSNTVEPEKQVDNTVKMAGVIAGLLMFIIILLGVMLTIKRRKLAKKQKETQSGAQREMGPVASADKPTTKLSASRNDEGFSSSSQDVNGFTDGSRGELSQPTLTIQTHPYRTCDPVEMSYPRDQFQPAIRVADLLQHITQMKRGQGYGFKEEYEALPEGQTASWDTAKEDENRNKNRYGNIISYDHSRVRLLVLDGDPHSDYINANYIDGYHRPRHYIATQGPMQETVKDFWRMIWQENSASIVMVTNLVEVGRVKCVRYWPDDTEVYGDIKVTLIETEPLAEYVIRTFTVQKKGYHEIRELRLFHFTSWPDHGVPCYATGLLGFVRQVKFLNPPEAGPIVVHCSAGAGRTGCFIAIDTMLDMAENEGVVDIFNCVRELRAQRVNLVQTEEQYVFVHDAILEACLCGNTAIPVCEFRSLYYNISRLDPQTNSSQIKDEFQTLNIVTPRVRPEDCSIGLLPRNHDKNRSMDVLPLDRCLPFLISVDGESSNYINAALMDSHKQPAAFVVTQHPLPNTVADFWRLVFDYNCSSVVMLNEMDTAQFCMQYWPEKTSGCYGPIQVEFVSADIDEDIIHRIFRICNMARPQDGYRIVQHLQYIGWPAYRDTPPSKRSLLKVVRRLEKWQEQYDGREGRTVVHCLNGGGRSGTFCAICSVCEMIQQQNIIDVFHIVKTLRNNKSNMVETLEQYKFVYEVALEYLSSF

SEQ ID NO: 80465 - protein, 45 aa, Homo sapiens
MEAATGQEVELCLECIEWAKSEKRTFLRQALEARLVSLYFDTKRY

SEQ ID NO: 80466 - protein, 289 aa, Homo sapiens
MRSGALGPRGRGRASALGLPVPAMASRQCWARHPRVGLCWAAFEQESGPSCHRSEVKERLGGGRMQPEEGTGWLLELLSEVQLQQYFLRLRDDLNVTRLSHFEYVKNEDLEKIGMGRPGQRRLWEAVKRRKALCKRKSWMSKVFSGKRLEAEFPPHHSQSTFRKTSPAPGGPAGEGPLQSLTCLIGEKDLRLLEKLGDGSFGVVRRGEWDAPSGKTVSVAVKCLKPDVLSQPEAMDDFIREVNAMHSLDHRNLIRLYGVVLTPPMKMVTELAPLGSLLDRLRKHQGHFL

SEQ ID NO: 80467 - protein, 45 aa, Homo sapiens
MNGGNESSGADRAGGPVATSVPIGWQRCVREGAVLYISPSGTELS

SEQ ID NO: 80468 - protein, 180 aa, Homo sapiens
MISASRAAAARLVGAAASRGPTAARHQDSWNGLSHEAFRLVSRRDYASEAIKGAVVGIDLGTTNSCVAVMEGKQAKVLENAEGARTTPSVVAFTADGERLVGMPAKRQAVTNPNNTFYATKRLIGRRYDDPEVQKDIKNVPFKIVRASNGDAWVEAHGKLYSPSQIGAFVLMKMKETAGH

SEQ ID NO: 80469 - protein, 44 aa, Homo sapiens
MKVWLKSLMKLCSKCFPRFRMTHHLMKQEQQSDPLQRETHKKTM

SEQ ID NO: 80470 - protein, 68 aa, Homo sapiens
  MOD_RES (1)..(1): Any amino acid
XHNRVSFLRAFWRCFRTVGKNGDLLTMKEYHCLLQLLCPDFPLELTQKAARFSLSPSGLCSWTMPWTA

SEQ ID NO: 80471 - protein, 150 aa, Homo sapiens
MTDTRRRVKVYTLNEDRQWDDRGTGHVSSGYVERLKGMSLLVRAESDGSLLLESKINPNTAYQKQQDTLIVWSEAENYDLALSFQEKAGCDEIWEKICQVQGKDPSVDITQDLVDESEEERFDDMSSPGLELPSCELSRLEEIAELVASS

SEQ ID NO: 80472 - protein, 154 aa, Homo sapiens
MGKGAAAERFFSDKETFHDIAQVASEFPGAQHYVGGNAALIGQKFAANSDLKVLLCGPVGPKLHELLDDNVFVPPESLQEVDEFHLILEYQAGEEWGQLKAPHANRFIFSHDLSNGAMNMLEVFVSSLEEFQPDLVVLSGLHMMEGQSKELQRK

SEQ ID NO: 80473 - protein, 214 aa, Homo sapiens
MPPPRVFKSFLSLLFQGLSVLLSLAGDVLVSMYREVCSIRFLFTAVSLLSLFLSAFWLGLLYLVSPLENEPKEMLTLSEYHERVRSQGQQLQQLQAELDKLHKEVSTVRAANSERVAKLVFQRLNEDFVRKPDYALSSVGASIDLQKTSHDYADRNTAYFWNRFSFWNYARPPTVILEPHVFPGNCWAFEGDQGQVVIQLPGRVQLSDITLQHP

SEQ ID NO: 80474 - protein, 213 aa, Homo sapiens
MTLRIDYCQGLLVGVSSSGLNIIQIQCQAYPCSSDKECEVGRYCHSPHQGSSACMVCRRKKKRCHRDGMCCPSTRCNNGICIPVTESILTPHIPALDGTRHRDRNHGHYSNHDLGWQNLGRPHTKMSHIKGHEGDPCLRSSDCIEGFCCARHFWTKICKPVLHQGEVCTKQRKKGSHGLEIFQRCDCAKGLSCKVWKDATYSSKARLHVCQKI

SEQ ID NO: 80475 - protein, 99 aa, Homo sapiens
IKMFYEEHLHLDDEIRYILDGSGYFDVRDKEDQWIRIFMEKGDMVTLPAGIYHRFTVDEKNYTKAMRLFVGEPVWTAYNRPADHFEARGQYVKFLAQTA

SEQ ID NO: 80476 - protein, 230 aa, Homo sapiens
  MOD_RES (1)..(1): Any amino acid
XQVIFKAKSKYSPELLKYRLPLYLASLFISLVFLLVNLTCAVLVKTGNWERKVIVSVRVAINDTLFVLCAVSLSICLYKISKMSLANIYLESKGSSVCQVTAIGVTVILLYTSRACYNLFILSFSQNKSVHSFDYDWYNVSDQADLKNQLGDAGYVLFGVVLFVWELLPTTLVVYFFRVRNPTKDLTNPGMVPSHGFSPRSYFFDNPRRYDSDDDLAWNIAPQGLQGGLL

SEQ ID NO: 80477 - protein, 78 aa, Homo sapiens
MATNFSDIVKQGYVKMKSRKLGIYRRCWLVFRKSSSKGPQRLEKYPDEKSVCLRGCPKVTEISNVKCVTRLPKETKRQ

SEQ ID NO: 80478 - protein, 302 aa, Homo sapiens
MATVYSPSLPGLLGGRASEQESVSGHLGPPAGAPAAPETPTCLPDTTPHPTPVVCSADPQLALESLDPRTLRLLWRQRELEIQALRWAIQNGEDARLCHILEEVAGLPPKRSSHSQEKLLQNQVQKLIQELKEQKERAQWEKEHLEERLLQTTRTLQEMEAELQNLQKSCLLQLARSSWVGRMLRSQTGSVEVVTAETLMDPSDLSENIQAPTGEGFRLEDVDWNSVARRYPNLFTNMEPSSKQKQPRPWPQLDTGSPESSGKHSERHHKTVEWGSLPCLNTSSSGGADSDSSSCRPGLPSF

SEQ ID NO: 80479 - protein, 176 aa, Homo sapiens [sequence omitted]

SEQ ID NO: 80480 - protein, 156 aa, Homo sapiens
MADDKVAILTDDEEEQKRKYVLADPFNGISREPEPPSNETPSSTETSAIPEEEIDWIEKHCVKINNDLLISKVFYFFFYSAYGSLYPLLPVYYKQLGMSPSQSGLLVGIRYFIEFCSAPFWGVVADRFKKGKIVLLFSLLCWVLFNLGIGFVKPAT

SEQ ID NO: 80481 - protein, 45 aa, Homo sapiens
MTALRLLQRMKRDWMHTGRRPSGLCGAALLVAARMHDFRRTVKEV

SEQ ID NO: 80482 - protein, 144 aa, Homo sapiens
MTMTANKNSSITHGAGGTKAPRGTLSRSQSVSPPPVLSPPRSPIYPLSDSETSACRYPSHSSSRVLLKDRHPPAPSPQNPQDPSPDTSPPTCPFKTASFGYLDRSPSACKRDAQKESVQGAAQDVAGVAACLPLAQSTPFPGPA

SEQ ID NO: 80483 - protein, 135 aa, Homo sapiens
MCSHFAQDLWPEQSMKDSFQKVVLRRYEKCEHDNLQLKKGCISVDECKVHKEGYNELNQCLTTTPRKICQCDKYVKVLHQFPNSNGQKRGHTGKKPFKYIECGKAFKQFSTLTTHKKIHTGGKPYKCEECGKAFN

SEQ ID NO: 80484 - protein, 2322 aa, Homo sapiens
MPPNINWKEIMKVDPDDLPRQEELADNLLISLSKVEVNELKSEKQENVIHLFRITQSLMKMKAQEVELALEEVEKAGEEQAKFENQLKTKVMKLENELEMAQQSAGGRDTRFLRNEICQLEKQLEQKDRELEDMEKELEKEKKVNEQLALRNEEAENENSKLRRENKRLKKKNEQLCQDIIDYQKQIDSQKETLLSRRGEDSDYRSQLSKKNYELIQYLDEIQTLTEANEKIEVQNQEMRKNLEESVQEMEKMTDEYNRMKAIVHQTDNVIDQLKKENDHYQLQVQELTDLLKSKNEEDDPIMVAVNAKVEEWKLILSSKDDEIIEYQQMLHNLREKLKNAQLDADKSNVMALQQGIQERDSQIKMLTEQVEQYTKEMEKNTCIIEDLKNELQRNKGASTLSQQTHMKIQSTLDILKEKTKEAERTAELAEADAREKDKELVEALKRLKDYESGVYGLEDAVVEIKNCKNQIKIRDREIEILTKEINKLELKISDFLDENEALRERVGLEPKTMIDLTEFRNSKHLKQQQYRAENQILLKEIESLEEERLDLKKKIRQMAQERGKRSATSGLTTEDLNLTENISQGDRISERKLDLLSLKNMSEAQSKNEFLSRELIEKERDLERSRTVIAKFQNKLKELVEENKQLEEGMKEILQAIKEMQKDPDVKGGETSLIIPSLERLVNAIESKNAEGIFDASLHLKAQVDQLTGRNEELRQELRESRKEAINYSQQLAKANLKIDHLEKETSLLRQSEGSNVVFKGIDLPDGIAPSSASIINSQNEYLIHLLQELENKEKKLKNLEDSLEDYNRKFAVIRHQQSLLYKEYLSEKETWKTESKTIKEEKRKLEDQVQQDAIKVKEYNNLLNALQMDSDEMKKILAENSRKITVLQVNEKSLIRQYTTLVELERQLRKENEKQKNELLSMEAEVCEKIGCLQRFKEMAIFKIAALQKVVDNSVSLSELELANKQYNELTAKYRDILQKDNMLVQRTSNLEHLECENISLKEQVESINKELEITKEKLHTIEQAWEQETKLGNESSMDKAKKSITNSDIVSISKKITMLEMKELNERQRAEHCQKMYEHLRTSLKQMEERNFELETKFAELTKINLDAQKVEQMLRDELADSVSKAVSDADRQRILELEKNEMELKVEVSKLREISDIARRQVEILNAQQQSRDKEVESLRMQLLDYQAQSDEKSLIAKLHQHNVSLQLSEATALGKLESITSKLQKMEAYNLRLEQKLDEKEQALYYARLEGRNRAKHLRQTIQSLRRQFSGALPLAQQEKFSKTMIQLQNDKLKIMQEMKNSQQEHRNMENKTLEMELKLKGLEELISTLKDTKGAQKVINWHMKIEELRLQELKLNRELVKDKEEIKYLNNIISEYERTISSLEEEIVQQNKFHEERQMAWDQREVDLERQLDIFDRQQNEILNAAQKFEEATGSIPDPSLPLPNQLEIALRKIKENIRIILETRATCKSLEEKLKEKESALRLAEQNILSRDKVINELRLRLPATAEREKLIAELGRKEMEPKSHHTLKIAHQTIANMQARLNQKEEVLKKYQRLLEKAREEQREIVKKHEEDLHILHHRLELQADSSLNKFKQTAWDLMKQSPTPVPTNKHFIRLAEMEQTVAEQDDSLSSLLVKLKKVSQDLERQREITELKVKEFENIKLQLQENHEDEVKKVKAEVEDLKYLLDQSQKESQCLKSELQAQKEANSRAPTTTMRNLVERLKSQLALKEKQQKALSRALLELRAEMTAAAEERIISATSQKEAHLNVQQIVDRHTRELKTQVEDLNENLLKLKEALKTSKNRENSLTDNLNDLNNELQKKQKAYNKILREKEEIDQENDELKRQIKRLTSGLQGKPLTDNKQSLIEELQRKVKKLENQLEGKVEEVDLKPMKEKNAKEELIRWEEGKKWQAKIEGIRNKLKEKEGEVFTLTKQLNTLKDLFAKADKEKLTLQRKLKTTGMTVDQVLGIRALESEKELEELKKRNLDLENDILYMRAHQALPRDSVVEDLHLQNRYLQEKLHALEKQFSKDTYSKPSISGIESDDHCQREQELQKENLKLSSENIELKFQLEQANKDLPRLKNQVRDLKEMCEFLKKEKAEVQRKLGHVRGSGRSGKTIPELEKTIGLMKKVVEKVQRENEQLKKASGILTSEKMANIEQENEKLKAELEKLKAHLGHQLSMHYESKTKGTEKIIAENERLRKELKKETDAAEKLRIAKNNLEILNEKMTVQLEETGKRLQFAESRGPQLEGADSKSWKSIVVTRMYETKLKELETDIAKKNQSITDLKQLVKEATEREQKVNKYNEDLEQQIS

SEQ ID NO: 80485 - protein, 20 aa, Homo sapiens
  MOD_RES (1)..(1): Any amino acid
XIGFGNVLHCGSGTQVIVLP

SEQ ID NO: 80486 - protein, 123 aa, Homo sapiens
MTGQGQSASGSSAWSTVFRHVRYENLIAGVSGGVLSNLALHPLDLVKIRFAVSDGLELRPKYNGILHCLTTIWKLDGLRGLYQGVTPNIWGAGLSWGLYFFLDLFLGCLEHRMVPFSLWHMNC

SEQ ID NO: 80487 - protein, 589 aa, Homo sapiens
MNLHQVLTGAVNPGDHCFSVGSIGDQRFTAYASGCDIVILGSDFERLQIIPGAKHGNIQVGCVDCSMQQGKIAASYGNVISIFEPVNLPKQKKNLELYSQWQKSGQFFLESIAHNITWDPTGSRLLTGSSYLQLWSNTNLEKPTEDENLNKTDLNFGDWKCIWHCKTASQVHLMKFSPDGEFFATAGKDDCLLKVWYNVENWRTAVTSPDGSSEKQSQGEIDFSFVYLAHPRAVNGFSWRKTSKYMPRASVCNVLLTCCKDNVCRLWVETFLPNDCLLYGGDCSHWTESINLTNNFKRNASSKERVQNALEVNLRHFRRGRRRSLALVAHTGYLPHQQDPHHVHRNTPLHANALCHFHIAASINPATDIPLLPSITSLSLNENEEKTGPFVVHWLNNKELHFTLSMEVFLQQLRKSFEQPSSEASVEDSNQADVKSDEETDDGVDDLKINPEKKELGCDKMVPNSSFTSLSSAAIDHQIEVLLSEWSKNADMLFSIHPMDGSLLVWHVDWLDEYQPGMFRQVQVSFVSRIPVAFPTGDANSLCKSIMMYACTKNVDLAIQQGKQKPSGLTRSTSMLISSGHNKSSNSLK

SEQ ID NO: 80488 - protein, 31 aa, Homo sapiens
MSDEVFSTTLAYTKSPKVTKRTTFQDELIRA

SEQ ID NO: 80489 - protein, 789 aa, Homo sapiens
MIASLHSSLDNRFLCLKNIRTFLSTCCEKFGLKRSELFEAFDLFDVQDFGKVIYTLSALSWTPIAQNRGIMPFPTEEESVGDEDIYSGLSDQIDDTVEEDEDLYDCVENEEAEGDEIYEDLMRSEPVSMPPKMTEYDKRCCCLREIQQTEEKYTDTLGSIQQHFLKPLQRFLKPQDIEIIFINIEDLLRVHTHFLKEMKEALGTPGAANLYQVFIKYKERFLVYGRYCSQVESASKHLDRVAAAREDVQMKLEECSQRANNGRFTLRDLLMVPMQRVLKYHLLLQELVKHTQEAMEKENLRLALDAMRDLAQCVNEVKRDNETLRQITNFQLSIENLDQSLAHYGRPKIDGELKITSVERRSKMDRYAFLLDKALLICKRRGDSYDLKDFVNLHSFQVRDDSSGDRDNKKWSHMFLLIEDQGAQGYELFFKTRELKKKWMEQFEMAISNIYPENATANGHDFQMFSFEETTSCKACQMLLRGTFYQGYRCHRCRASAHKECLGRVPPCGRHGQDFPGTMKKDKLHRRAQDKKRNELGLPKMEVFQEYYGLPPPPGAIGPFLRLNPGDIVELTKAEAEQNWWEGRNTSTNEIGWFPCNRVKPYVHGPPQDLSVHLWYAGPMERAGAESILANRSDGTFLVRQRVKDAAEFAISIKYNVEVKHIKIMTAEGLYRITEKKAFRGLTELVEFYQQNSLKDCFKSLDTTLQFPFKEPEKRTISRPAVGSTKYFGTAKARYDFCARDRSELSLKEGDIIKILNKKGQQGWWRGEIYGRVGWFPANYVEEDYSEYC

SEQ ID NO: 80490 - protein, 252 aa, Homo sapiens
MTGLALLYSGVFVAFWACALAVGEAGSWRAGAASRPSWPGRNSAGKWPAGNTGPPRALHPRLWGLAPARASDSDKGDPDFQLLEEGFLTETSPFMWSNLGIGLAISLSVVGAAWGIYITGSSIIGGGVKAPRIKTKNLVSIIFCEAVAIYGIIMAIVISNMAEPFSATDPKAIGHRNYHAGYSMFGAGLTVGLSNLFCGVCVGIVGSGAALADAQNPSLFVKILIVEIFGSAIGLFGVIVAILQTSRVKMGD

SEQ ID NO: 80491 - protein, 463 aa, Homo sapiens
MGVGDRCFSVMQIKIMRSKPHEEVGDRCYEEGMYEAAKLLYSNVSNFARLASTLVHLGEYQAAVDNSRKASSTRTWKEVCFACMDGQEFRFAQLCGLHIVIHADELEELMCYYQDRGYFEELILLLEAALGLERAHMGMFTELAILYSKFKPQKMLEHLELFWSRVNIPKVLRAAEQAHLWAELVFLYDKYEEYDNAVLTMMSHPTEAWKEGQFKDIITKVANVELCYRALQFYLDYKPLLINDLLLVLSPRLDHTWTVSFFSKAGQLPLVKPYLRSVQSHNNKSVNEALNHLLTEEEDYQGLRASIDAYDNFDNISLAQQLEKHQLMEFRCIAAYLYKGNNWWAQSVELCKKDHLYKDAMQHAAESRDAELAQKLLQWFLEEGKRECFAACLFTCYDLLRPDMVLELAWRHNLVDLAMPYFIQVMREYLSKVDKLDALESLRKQEEHVTEPAPLVFDFDGHE

SEQ ID NO: 80492 - protein, 162 aa, Homo sapiens
MALRVVRSVRALLCTLRAVPSPAAPCPPRPWQLGVGAVRTLRTGPALLSVRKFTEKHEWVTTENGIGTVGISNFAQEALGDVVYCSLPEVGTKLNKQDEFGALESVKAASELYSPLSGEVTEINEALAENPGLVNKSCYEDGKLLLEISQGITTTVNILSRI

SEQ ID NO: 80493 - protein, 164 aa, Homo sapiens
MAMIELGFGRQNFHPLKRKSSLLLKLIAVVFAVLLFCEFLIYYLAIFQCNWPEVKTTASDGEQTTREPVLKAMFLADTHLLGEFLGHWLDKLRREWQMERAFQTALWLLQPEVVFILGDIFDEGKWSTPEAWADDVERFQKMFRHPSHVQLKVVAGNHDIGFHY

SEQ ID NO: 80494 - protein, 109 aa, Homo sapiens
  MOD_RES (1)..(1): Any amino acid
XLRSLLVGMCSGSGRRRSSLSPTMRPGTGAERGGLMMGHPGMHYAPMGMHPMGQRANMPPVPHGMMPQMMPPMGGPPMGQMPGMMSSVMPGMMMSHMSQASMQPALPLN

SEQ ID NO: 80495 - protein, 147 aa, Homo sapiens
  MOD_RES (1)..(1): Any amino acid
XLSCSSSLHRHERTHSGGKLYECQKCAKVFRCPTSLQAHERAHTGERPYECNKCGKTFNYPSCFRRHKKTHSGEKPYECTRCGKAFGWCSSLRRHEMTHTGEKPFDCKQCGKVFTFSNYLRLHERTHLAGRSQCFGRRQGDHLSPGV

SEQ ID NO: 80496 - protein, 503 aa, Homo sapiens
GGPSGAEARGAGLQGRGAAEPWGERPPCSLSLSAAPEPLSPAGGAGEEAPEEDEDEAEAEDPERPNAGAGGGRSGGGGSSVSGGGGGGGAGAGGCGGPGGALTRRAVTLRVLLKDALLEPGAGVLSIYYLGKKFLGDLQPDGRIMWQETGQTFNSPSAWATHCKKLVNPAKKSGCGWASVKYKGQKLDKYKATWLRLHQLHTPATAADESPASEGEEEELLMEEEEEDVLAGVSAEDKSRRPLGKSPSEPAHPEATTPGKRVDSKIRVPVRYCMLGSRDLARNPHTLVEVTSFAAINKFQPFNVAVSSNVLFLLDFHSHLTRSEVVGYLGGRWDVNSQMLTVLRAFPCRSRLGDAETAAAIEEEIYQSLFLRGLSLVGWYHSHPHSPALPSLQDIDAQMDYQLRLQGSSNGFQPCLALLCSPYYSGNPGPESKISPFWVMPPPEMLLVEFYKGSPDLVRLQEPWSQEHTYLDKLKISLASRTPKDQSLCHVLEQVCGVLKQGS

SEQ ID NO: 80497 - protein, 784 aa, Homo sapiens
MGNEHISVHPENSDCIQADVNSDDYKGDKVYHPETGRKNEKEKVGRKGKHLLTVDQKRGEHVVCGSTRNNESESTLDLEGFQNPTAKECEGLATLDNKADLDGESTEGTEELEDSLNHFTHSVQGQTSEMIPSDEEEEDDEEEEEEEEPRLTINQREDEDGMANEDELDNTYTGSGDEDALSEEDDELGEAAKYEDVKECGKHVERALLVELNKISLKEENVCEEKNSPVDQSDFFYEFSKLIFTKGKSPTVVCSLCKREGHLKKDCPEDFKRIQLEPLPPLTPKFLNILDQVCIQCYKDFSPTIIEDQAREHIRQNLESFIRQDFPGTKLSLFGSSKNGFGFKQSDLDVCMTINGLETAEGLDCVRTIEELARVLRKHSGLRNILPITTAKVPIVKFFHLRSGLEVDISLYNTLALHNTRLLSAYSAIDPRVKYLCYTMKVFTKMCDIGDASRGSLSSYAYTLMVLYFLQQRNPPVIPVLQEIYKGEKKPEIFVDGWNIYFFDQIDELPTYWSECGKNTESVGQLWLGLLRFYTEEFDFKEHVISIRRKSLLTTFKKQWTSKYIVIEDPFDLNHNLGAGLSRKMTNFIMKAFINGRRVFGIPVKGFPKDYPSKMEYFFDPDVLTEGELAPNDRCCRICGKIGHFMKDCPMRRKVRRRRDQEDALNQRYPENKEKRSKEDKEIHNKYTEREVSTKEDKPIQCTPQKAKPMRAAADLGREKILRPPVEKWKRQDDKDLREKRCFICGREGHIKKECPQFKGSSGSLSSKYMTQGKASAKRTQQES

SEQ ID NO: 80498 - protein, 866 aa, Homo sapiens
MALRGFCSADGSDPLWDWNVTWNTSNPDFTKCFQNTVLVWVPCFYLWACFPFYFLYLSRHDRGYIQMTPLNKTKTALGFLLWIVCWADLFYSFWERSRGIFLAPVFLVSPTLLGITMLLATFLIQLERRKGVQSSGIMLTFWLVALVCALAILRSKIMTALKEDAQVDLFRDITFYVYFSLLLIQLVLSCFSDRSPLFSETIHDPNPCPESSASFLSRITFWWITGLIVRGYRQPLEGSDLWSLNKEDTSEQVVPVLVKNWKKECAKTRKQPVKVVYSSKDPAQPKESSKVDANEEVEALIVKSPQKEWNPSLFKVLYKTFGPYFLMSFFFKAIHDLMMFSGPQILKLLIKFVNDTKAPDWQGYFYTVLLFVTACLQTLVLHQYFHICFVSGMRIKTAVIGAVYRKALVITNSARKSSTVGEIVNLMSVDAQRFMDLATYINMIWSAPLQVILALYLLWLNLGPSVLAGVAVMVLMVPVNAVMAMKTKTYQVAHMKSKDNRIKLMNEILNGIKVLKLYAWELAFKDKVLAIRQEELKVLKKSAYLSAVGTFTWVCTPFLVALCTFAVYVTIDENNILDAQTAFVSLALFNILRFPLNILPMVISSIVQASVSLKRLRIFLSHEELEPDSIERRPVKDGGGTNSITVRNATFTWARSDPPTLNGITFSIPEGALVAVVGQVGCGKSSLLSALLAEMDKVEGHVAIKGSVAYVPQQAWIQNDSLRENILFGCQLEEPYYRSVIQACALLPDLEILPSGDRTEIGEKTRILVTHSMSYLPQVDVIIVMSGGKISEMGSYQELLARDGAFAEFLRTYASTEQEQDAEENGVTGVSGPGKEAKQMENGMLVTDSAGKQLQRFEGHFHLTRP

SEQ ID NO: 80499 - protein, 613 aa, Homo sapiens
MHVKKYLLKGLHRLQKGPGYTYKELLVWYCDNTNTHGPKRIICEGPKKKAMWFLLTLLFAALVCWQWGIFIRTYLSWEVSVSLSVGFKTMDFPAVTICNASPFKYSKIKHLLKDLDELMEAVLERILAPELSHANATRNLNFSIWNHTPLVLIDERNPHHPMVLDLFGDNHNGLTSSSASEKICNAHGCKMAMRLATNIFAQVPQQELVEMSYPGEQMILACLFGAEPCNYRNFTSIFYPHYGNCYIFNWGMTEKALPSANPGTEFGLKLILDIGQEDYVPFLASTAGVRLMLHEQRSYPFIRDEGIYAMSGTETSIGVLVDKLQRMGEPYSPCTVNGSEVPVQNFYSDYNTTYSIQACLRSCFQDHMIRNCNCGHYLYPLPRGEKYCNNRDFPDWAHCYSDLQMSVAQRETCIGMCKESCNDTQYKMTISMADWPSEASEDWIFHVLSQERDQSTNITLSRKGIVKLNIYFQEFNYRTIEESAANNIVWLLSNLGGQFGFWMGGSVLCLIEFGEIIIDFVWITIIKLVALAKSLRQRRAQASYAGPPPTVAELVEAHTNFGFQPDTAPRSPNTGPYPSEQALPIPGTPPPNYDSLRLQPLDVIESDSEGDAI

SEQ ID NO: 80500 - protein, 158 aa, Homo sapiens
TRHYVGSAAAFAGTPEHGQFQGSPGGAYGTAQPPPHYGPTQPAYSPSQQLRAPSAFPAVQYLSQPQPQPYAVHGHFQPTQTGFLQPGGALSLQKQMEHANQQTGFSDSALHPAPGLLASPQLPVQMQPAGKSGFAATSQPGPRLPFIQHSQNPRFYHK

SEQ ID NO: 80501 - protein, 129 aa, Homo sapiens
MVFLPLKWSLATMSFLLSSLLALLTVSTPSWCQSTEASPKRSDGTPFPWNKIRLPEYVIPVHYDLLIHANLTTLTFWGTTKVEITASQPTSTIILHSHHLQISRATLRKGAGERLSEEPLQVLEHPRQE

SEQ ID NO: 80502 - protein, 89 aa, Homo sapiens
MEQLSDEEIDHGAEEDSDKEDQDLDKMFGAWLGELDKLTQSLDSDKPMEPVKRSPLRQETNMANFSYRFSIYNLNALNQGETVDLDALM

SEQ ID NO: 80503 - protein, 53 aa, Homo sapiens
MMLSLNNLQNIIYNPIPGGSAEWQQHETSSRCGLSFQSSFQKGRLHCLQYFDK

SEQ ID NO: 80504 - protein, 48 aa, Homo sapiens
MEDMEQAFETCQAAERQRLLFFKDMLLTLHQHLDLSSSEKFHELHRDL

SEQ ID NO: 80505 - protein, 53 aa, Homo sapiens
MASLDRVKVLVLGDSGVGKSSLVHLLCQNQVLGNPSWTVGCSVDVRVLFSYTT

SEQ ID NO: 80506 - protein, 163 aa, Homo sapiens
MAEGGGQNHHEVVKFMDVYQRSYCHPIETLVDIFQEYPDEIEYIFKPSCVPLMRCGGCCNDEGLECVPTEESNITMQIMRIKPHQGQHIGEMSFLQHNKCECRPKKDRARQENPCGPCSERRKHLFVQDPQTCKCSCKNTDSRCKARQLELNERTCRCDKPRR

SEQ ID NO: 80507 - protein, 215 aa, Homo sapiens
MTAVHAGNINFKWDPKSLEIRTLAVERLLEPLVTQVTTLVNTNSKGPSNKKRGRSKKAHVLAASVEQATENFLEKGDKIAKESQFLKEELVAAVEDVRKQGDLMKAAAGEFADDPCSSVKRGNMVRAARALLSAVTRLLILADMADVYKLLVQLKVVEDGILKLRNAGNEQDLGIQYKALKPEVDKLNIMAAKRQQELKDVGHRDQMAAARGILQ

SEQ ID NO: 80508 - protein, 326 aa, Homo sapiens
MKKVTAEAISWNESTSETNNSMVTEFIFLGLSDSQELQTFLFMLFFVFYGGIVFGNLLIVITVVSDSHLHSPMYFLLANLSLIDLSLSSVTAPKMITDFFSQRKVISFKGCLVQIFLLHFFGGSEMVILIAMGFDRYIAICKPLHYTTIMCGNACVGIMAVTWGIGFLHSVSQLAFAVHLLFCGPNEVDSFYCDLPRVIKLACTDTYRLDIMVIANSGVLTVCSFVLLIISYTIILMTIQHRPLDKSSKALSTLTAHITVVLLFFGPCVFIYAWPFPIKSLDKFLAVFYSVITPLLNPIIYTLRNKDMKTAIRQLRKWDAHSSVKF

SEQ ID NO: 80509 - protein, 65 aa, Homo sapiens
MAEHLELLAEMPMVGRMSTQERLKHAQKRRAQQVKMWAQAEKEAQGKKGPGERPRKEAASQGLLK

SEQ ID NO: 80510 - protein, 37 aa, Homo sapiens
ATTKRVLWTGRGSGRQSSSCCVHSFWRHHRYSDSSGL

SEQ ID NO: 80511 - protein, 259 aa, Homo sapiens
LSLIPELVTNDHEKVELTALRYAFTVVANITVYGAAWLLLHLQGSSRVEPTQDISISDQLGGQDVPVFRNLSLLVVGVGAVFSLLFHLGTRERRRPHAEEPGEHTPLLAPATAQPLLLWKHWLREPAFYQVGILYMTTRLIVNLSQTYMAMYLTYSLHLPKKFIATIPLVMYLSGFLSSFLMKPINKCIGRNNSGAFVYGSMSFLDKVANGLAVMAIQSLHPCPSELCCRACVSFYHWAMVAVTGGVGVAAALCLCSLL

SEQ ID NO: 80512 - protein, 149 aa, Homo sapiens
KKSSASFGIRRELPSTSHLVQYRGTHTCTRQGRLRELRIRCVARKFLYLWIRMTFGRVFPSKARYYLYNLMFQTWKTYVRQQQEMRNKYIRAEVHDAKQKMRQAWKSWLIYVVVRRTKLQMQTTALEFRQRIILRVWWSTWRQRLGQVR

SEQ ID NO: 80513 - protein, 1476 aa, Homo sapiens
MPLAFCGSENHSAAYRVDQGVLNNGCFVDALNVVPHVFLLFITFPILFIGWGSQSSKVHIHHSTWLHFPGHNLRWILTFMLLFVLVCEIAEGILSDGVTESHHLHLYMPAGMAFMAAVTSVVYYHNIETSNFPKLLIALLVYWTLAFITKTIKFVKFLDHAIGFSQLRFCLTGLLVILYGMLLLVEVNVIRVRRYIFFKTPREVKPPEDLQDLGVRFLQPFVNLLSKGTYWWMNAFIKTAHKKPIDLRAIGKLPIAMRALTNYQRLCEAFDAQVRKDIQGTQGARAIWQALSHAFGRRLVLSSTFRILADLLGFAGPLCIFGIVDHLGKENDVFQPKTQFLGVYFVSSQEFLANAYVLAVLLFLALLLQRTFLQASYYVAIETGINLRGAIQTKIYNKIMHLSTSNLSMGEMTAGQICNLVAIDTNQLMWFFFLCPNLWAMPVQIIVGVILLYYILGVSALIGAAVIILLAPVQYFVATKLSQAQRSTLEYSNERLKQTNEMLRGIKLLKLYAWENIFRTRVETTRRKEMTSLRAFAIYTSISIFMNTAIPIAAVLITFVGHVSFFKEADFSPSVAFASLSLFHILVTPLFLLSSVVRSTVKALVSVQKLSEFLSSAEIREEQCAPHEPTPQGPASKYQAVPLRVVNRKRPAREDCRGLTGPLQSLVPSADGDADNCCVQIMGGYFTWTPDGIPTLSNITIRIPRGQLTMIVGQVGCGKSSLLLAALGEMQKVSGAVFWSSLPDSEIGEDPSPERETATDLDIRKRGPVAYASQKPWLLNATVEENIIFESPFNKQRYKMVIEACSLQPDIDILPHGDQTQIGERGINLSGGQRQRISVARALYQHANVVFLDDPFSALDIHLSDHLMQAGILELLRDDKRTVVLVTHKLQYLPHADWIIAMKDGTIQREGTLKDFQRSECQLFEHWKTLMNRQDQELEKETVTERKATEPPQGLSRAMSSRDGLLQDEEEEEEEAAESEEDDNLSSMLHQRAEIPWRACAKYLSSAGILLLSLLVFSQLLKHMVLVAIDYWLAKWTDSALTLTPAARNCSLSQECTLDQTVYAMVFTVLCSLGIVLCLVTSVTVEWTGLKVAKRLHRSLLNRIILAPMRFFETTPLGSILNRFSSDCNTIDQHIPSTLECLSRSTLLCVSALAVISYVTPVFLVALLPLAIVCYFIQKYFRVASRDLQQLDDTTQLPLLSHFAETVEGLTTIRAFRYEARFQQKLLEYTDSNNIASLFLTAANRWLEVRMEYIGACVVLIAAVTSISNSLHRELSAGLVGLGLTYALMVSNYLNWMVRNLADMELQLGAVKRIHGLLKTEAESYEGLLAPSLIPKNWPDQGKIQIQNLSVRYDSSLKPVLKHVNALIAPGQKIGICGRTGSGKSSFSLAFFRMVDTFEGHIIIDGIDIAKLPLHTLRSRLSIILQDPVLFSGTIRCHHHRRRGEFQPGTEAAVLPGPGLREEDQHLHHGRGHGFH

SEQ ID NO: 80514 - protein, 23 aa, Homo sapiens
MRPEDRMFHIRAVILRALSLAFL

SEQ ID NO: 80515 - protein, 128 aa, Homo sapiens
MGKNKQPRGQQRQGGPPAADAAGPDDMEPKKGTGAPKECGEEEPRTCCGCRFPLLLALLQLALGIAVTVVGFLMASISSSLLVRDTPFWAGIIVCLVAYLGLFMLCVSYQVDERTCIQFSMKIHCHDF

SEQ ID NO: 80516 - protein, 823 aa, Homo sapiens
MATPRGRTKKKASFDHSPDSLPLRSSGRQAKKKATETTDEDEDGGSEKKYRKCEKAGCTATCPVCFASASERCAKNGYTSRWYHLSCGEHFCNECFDHYYRSHKDGYDKYTTWKKIWTSNGKTEPSPKAFMADQQLPYWVQCTKPECRKWRQLTKEIQLTPQIAKTYRCGMKPNTAIKPETSDHCSLPEDLRVLEVSNHWWYSMLILPPLLKDSVAAPLLSAYYPDCVGMSPSCTSTNRAAATGNASPGKLEHSKAALSVHVPGMNRYFQPFYQPNECGKALCVRPDVMELDELYEFPEYSRDPTMYLALRNLILALWYTNCKEALTPQKCIPHIIVRGLVRIRCVQEVERILYFMTRKGLINTGVLSVGADQYLLPKDYHNKSVIIIGAGPAGLAAARQLHNFGIKVTVLEAKDRIGGRVWDDKSFKGVTVGRGAQIVNGCINNPVALMCEQLGISMHKFGERCDLIQEGGRITDPTIDKRMDFHFNALLDVVSEWRKDKTQLQDVPLGEKIEEIYKAFIKESGIQFSELEGQVLQFHLSNLEYACGSNLHQVSARSWDHNEFFAQFAGDHTLLTPGYSVIIEKLAEGLDIQLKSPQVQCIDYSGDEVQVTTTDGTGYSAQKVLVTVPLALLQKGAIQFNPPLSEKKMKAINSLGAGIIEKIALQFPYRFWDSKVQGADFFGHVPPSASKRGLFAVFYDMDPQKKHSVLMSVIAGEAVASVRTLDDKQVLQQCMATLRELFKEQEVPDPTKYFVTRWSTDPWIQMAYSFVKTGGSGEAYDIIAEDIQGTVFFAGEATNRHFPQTVTGAYLSGVREASKIAAF

SEQ ID NO: 80517 - protein, 129 aa, Homo sapiens
MWRPVQLCHFHSALLHSRQKPWPSPAVFFRRNVRGLPPRFSSPTPLWRKVLSTAVVGAPLLLGARYVMAEAREKRRMRLVVDGMGRFGRSLKVGLQISLDYWWCTNVVLRGVEEPRLLGGDVCVSPAGG

SEQ ID NO: 80518 - protein, 103 aa, Homo sapiens
MNKRDYMNTSVQEPPLDYSFRSIHVIQDLVNEEPRTGLRPLKRSKSGKSLTQSLWLNNNVLNDLRDFNQVASQLLEHPENLAWIDLSFNDLTSIDPVLTTFFN

SEQ ID NO: 80519 - protein, 537 aa, Homo sapiens
FYSVSLIFHEDCSVVTEVGALFCLLLFDEVSRMDMWSVNPSNKPSLPSVFSLPVSVFRRYHLPVHVIGHHAVSPYSIVLPLSADCLALKPVSDMLRIAWNLSWYHGSDNLLKQMNSETKTQEILDALKLSTEDILTLKITHMASGLQDCLHSIVQAATHREVRAAVTRMSFYLLNDRLSLKGCPGPCGVTLKSLAWHTALNRFLQVLPACTEDEKLLIDIIHFLNKLIKEQRKNSSLELLNWILELLLRHSANPLLDLLVLTESQAREETDDIRTAVRQQLQKELIALFDTLLLNFMEVTDRKCSELLYVFQTQLALKLLQCLKVTDAPHFYGLPSLERTLRGMANLTAFPGWSSHSPLTKPLDICVKYLSGLLEVITSFYVERGGNAMSFMGKGVTKSTILCLLHLSHEMMAQAGSLEWMSLWFLPLGSHSEEHIPTQQGLAWLIPLWVDRDPEVRFTSLGLGSALTTLETGCVALANSCQNISGGLWGTVVNILLDQSECSMVRREAAFILQNLLVIPMPTEIIKDYTWQVASKS

SEQ ID NO: 80520 - protein, 45 aa, Homo sapiens
  MOD_RES (1)..(1): Any amino acid
XKKAPVAFHPLILDQEVQLLNHHLELLLKFQKLNILILLTRMSFP

SEQ ID NO: 80521 - protein, 273 aa, Homo sapiens
MEEQQKEGEAEVAEHWFSKWERQCLAEAEQEEQLPPELQEEAAAELAGLKSEKQKLWHLFQISATAVAQLYKDSGCQQQGLSMWDPFQNAAMAVTSLYKESGDAHQRSFDLGVQVGHQRRIKDVLEWVKKGRSTIRREDLISFLCGKVPPAPPPPRTPRTPPKPPTGVTSQAVATESSSSVDVDLQPFQEAIALHGLSGAMAGISMRSGDSPQDSGVASSGRRKTSFLEDDLNPFDSEELALHLDSGGIRKRTSAQCSDGITDSPIQKRNRMV

SEQ ID NO: 80522 - protein, 234 aa, Homo sapiens
  MOD_RES (1)..(1): Any amino acid
XEVTKPPPCLENSSPPSRIPEPESPAKPNVPTASTAPPADSRDRRRSYQMPVRDEESESQRKARSRLMRQSRRSTQGVTLTDLKEAEKAAGKAEPADRSQESSTLEGGPSARRQRWQRDLNPEPEPESEEPDGGFRTLYAELRRENERLREALTETTLRLAQLKVELERATQRQERFAERPALLELERFERRALERKAAELEEELKALSDLRADNQRLKDENAALIRVISKLSK

SEQ ID NO: 80523 - protein, 63 aa, Homo sapiens
MGTSSIFLCVLFLCGALGLTMSPARGRLRCYICGFTKPCHPVPTECRDDEACGISIGTSDAHC

SEQ ID NO: 80524 - protein, 473 aa, Homo sapiens
MATKTTCMSSQGSDDEQIKRENIRSLTMSGHVGFESLPDQLVNRSIQQGFCFNILCVGETGIGKSTLIDTLFNTNFEDYESSHFCPNVKLKAQTYELQESNVQLKLTIVNTVGFGDQINKEESYQPIVDYIDAQFEAYLQEELKIKRSLFTYHDSRIHVCLYFISPTGHSLKTLDLLTMKNLDSKVNIIPVIAKADTVSKTELQKFKIKLMSELVSNGVQIYQFPTDDDTIAKVNAAMNGQLPFAVVGSMDEVKVGNKMVKARQYPWGVVQVENENHCDFVKLREMLICTNMEDLREQTHTRHYELYRRCKLEEMGFTDVGPENKPVSVQETYEAKRHEFHGERQRKEEEMKQMFVQRVKEKEAILKEAERELQAKFEHLKRLHQEERMKLEEKRRLLEEEIIAFSKKKATSEIFHSQSFLATGSNLRKDKDRKKEPGCRFELLCIDVRACETNGGRKDAEKGREGHSARGQP

SEQ ID NO: 80525 - protein, 115 aa, Homo sapiens
MDGMLAIQACPTPQQVASKGTGLNPNAKVWQEIAPGNTDATPVTHGTESSWHEIAATSGAHPEGNAELSEDICKEYEVMYSSSCETTRNTTGIEESTDGMILGPEDLSYQIYDVS

SEQ ID NO: 80526 - protein, 99 aa, Homo sapiens
MPAYHSSLMDPDTKLIGNMALLPIRSQFKGPAPRETKDTDIVDEAIYYFKANVFFKNYEIKNEADRTLIYITLYISECLKKLQKCNSKSQEVMRAYLQQ

SEQ ID NO: 80527 - protein, 332 aa, Homo sapiens
SIWRGPNVNCTDSSGYTALHHAALNGHKDIVLKLLQYEASTNVADNKGYFPIHLAAWKGDVEIVKILIHHGPSHSRVNEQNNENETALHCAAQYGHSEVVAVLLEELTDPTIRNSKLETPLDLAALYGRLRVVKMIISAHPNLMSCNTRKHTPLHLAARNGHKAVVQVLLEAGMDVSCQTEKGSALHEAALFGKVDVVRVLLETGIDANIKDSLGRTVLDILKEHPSQKSLQIATLLQEYLEGVGRSTVLEEPVQEDATQETHISSPVESPSQKTKSETVTGELSKLLDEIKLCQEKDYSFEDLCHTISDHYLDNLSKISEEELGKNGSQSV

SEQ ID NO: 80528 - protein, 56 aa, Homo sapiens
MSGQQQGQDGVKVQQATIAPVTVAVGGIANATIGAVSPDQLTQVHLQQGQQTSDQE

SEQ ID NO: 80529 - protein, 658 aa, Homo sapiens
MESGHLLWALLFMQSLWPQLTDGATRVYYLGIRDVQWNYAPKGRNVITNQPLDSDIVASSFLKSDKNRIGGTYKKTIYKEYKDDSYTDEVAQPAWLGFLGPVLQAEVGDVILIHLKNFATRPYTIHPHGVFYEKDSEGSLYPDGSSGPLKADDSVPPGGSHIYNWTIPEGHAPTDADPACLTWIYHSHVDAPRDIATGLIGPLITCKRGALDGNSPPQRQDVDHDFFLLFSVVDENLSWHLNENIATYCSDPASVDKEDETFQESNRMHAINGFVFGNLPELNMCAQKRVAWHLFGMGNEIDVHTAFFHGQMLTTRGHHTDVANIFPATFVTAEMVPWEPGTWLISCQVNSHFRDGMQALYKVKSCSMAPPVDLLTGKVRQYFIEAHEIQWDYGPMGHDGSTGKNLREPGSISDKFFQKSSSRIGGTYWKVRYEAFQDETFQEKMHLEEDRHLGILGPVIRAEVGDTIQVVFYNRASQPFSMQPHGVFYEKDYEGTVYNDGSSYPGLVAKPFEKVTYRWTVPPHAGPTAQDPACLTWMYFSAADPIRDTNSGLVGPLLVCRAGALGADGKQKGVDKEFFLLFTVLDENKSWYSNANQAAAMLDFRLLSEDIEGFQDSNRMHGWTCARVTQWPGTCSAWAQRLMCMESCSRATLCSFRA

SEQ ID NO: 80530 - protein, 54 aa, Homo sapiens
DFDIEMALRKYPVRYEESMNTVLVQEMERFNKTGIIQENLVCFGCQVSFSLRPF

SEQ ID NO: 80531 - protein, 51 aa, Homo sapiens
  MOD_RES (1)..(1): Any amino acid
XDQSVYAFVATEGSRELKRELINEALETLMEQAVAAVQKMDQAEYQAKELL

SEQ ID NO: 80532 - protein, 181 aa, Homo sapiens
MTRTRAALLLFTALATSLGFNLDTEELTAFRVDSAGFGDSVVQYANSWVVVGAPQKITAANQTGGLYQCGYSTGACEPIGLQVPPEAVNMSLGLSLASTTSPSQLLLTQRLPVSRQGECRDHQGFEELTHIQLGVRWARDSLARVDQKEGIWKKSYHVLQWFLTLLPAHPADRPHAAGPFL

SEQ ID NO: 80533 - protein, 114 aa, Homo sapiens
MSRQANRGTESKKMVAFKMYLGITPSITNWSPAGDEFSLILENNPLVDFVELPDNHSSLIYSNLLCGVLRGALEMVQMAVEAKFVQDTLKGDGVTEIRMRFIRRIEDNLPAGEE

SEQ ID NO: 80534 - protein, 495 aa, Homo sapiens
MVTWLYRFLPTSNMAAKLRSLLPPDLRLQFWLHARLQKCFLSRGCGSYCAGAKASPLPGKMAMGLMCGRRELLRLLQSGRRVHSVAGPSQWLGKPLTTRLLFPAAPCCCRPHYLFLAASGPRSLSTSAISFAEVQVQAPPVVAATPSPTAVPEVASGETADVVQTAAEQSFAELGLGSYTPVGLIQNLLEFMHVDLGLPWWGAIAACTVFARCLIFPLIVTGQREAARIHNHLPEIQKFSSRIREAKLAGDHIEYYKASSEMALYQKKHGIKLYKPLILPVTQAPIFISFFIALREMANLPVPSLQTGGLWWFQDLTVSDPIYILPLAVTATMWAVLELGAETGVQSSDLQWMRNVIRMMPLITLPITMHFPTAVFMYWLSSNLFSLVQVSCLRIPAVRTVLKIPQRVVHDLDKLPPREGFLESFKKGWKNAEMTRQLREREQRMRNQLELAARGPLRQTFTHNPLLQPGKDNPPNIPSSSSKPKSKYPWHDTLG

SEQ ID NO: 80535 - protein, 35 aa, Homo sapiens
MDNSGKEAEAMALLAEAERKVKNSQSFFSGLFGGH

SEQ ID NO: 80536 - protein, 199 aa, Homo sapiens
MAYPTVPCPLHVFEPRYRLMIRRSIQTGTKQFGMCVSDTQNSFADYGCMLQIRNVHFLPDGRSVVDTVGGKRFRVLKRGMKDGYCTADIEYLEDVKVENEDEIKNLRELHDLVYSQACSWFQNLRDRFRSQILQHFGSMPEREENLQAAPNGPAWCWWLLAVLPVDPRYQLSVLSMKSLKERLTKIQHILTYFSRDQSK

SEQ ID NO: 80537 - protein, 1831 aa, Homo sapiens
MSAGGRDEERRKLADIIHHWNANRLDLFEISQPTEDLEFHGVMRFYFQDKAAGNFATKCIRVSSTATTQDVIETLAEKFRPDMRMLSSPKYSLYEVHVSGERRLDIDEKPLVVQLNWNKDDREGRFVLKNENDAIPPKKAQSNGPEKQEKEGVIQNFKRTLSKKEKKEKKKREKEALRQASDKDDRPFQGEDVENSRLAAEVYKDMPETSFTRTISNPEVVMKRRRQQKLEKRMQEFRSSDGRPDSGGTLRIYADSLKPNIPYKTILLSTTDPADFAVAEALEKYGLEKENPKDYCIARVMLPPGAQHSDEKGAKEIILDDDECPLQIFREWPSDKGILVFQLKRRPPDHIPKKTKKHLEGKTPKGKERADGSGYGSTLPPEKLPYLVELSPGRRNHFAYYNYHTYEDGSDSRDKPKLYRLQLSVTEVGTEKLDDNSIQLFGPGIQPHHCDLTNMDGVVTVTPRSMDAETYVEGQRISETTMLQSGMKVQFGASHVFKFVDPSQDHALAKRSVDGGLMVKGPRHKPGIVQETTFDLGGDIHSGTALPTSKSTTRLDSDRVSSASSTAERGMVKPMIRVEQQPDYRRQESRTQDASGPELILPASIEFRESSEDSFLSAIINYTNSSTVHFKLSPTYVLYMACRYVLSNQYRPDISPTERTHKVIAVVNKMVSMMEGVIQEVDQVDQKQKNIAGALAFWMANASELLNFIKQDRDLSRITLDAQDVLAHLVQMAFKYLVHCLQSELNNYMPAFLDDPEENSLQRPKIDDVLHTLTGAMSLLRRCRVNAALTIQLFSQLFHFINMWLFNRLVTDPDSGLCSHYWGAIIRQQLGHIEAWAEKQGLELAADCHLSRIVQATTLLTMDKYAPDDIPNINSTCFKLNSLQLQALLQNYHCAPDEPFIPTDLIENVVTVAENTADELARSDGREVQLEEDPDLQLPFLLPEDGYSCDVVRNIPNGLQEFLDPLCQRGFCRLIPHTRSPGTWTIYFEGADYESHLLRENTELAQPLRKEPEIITVTLKKQNGMGLSIVAAKGAGQDKLGIYVKSVVKGGAADVDGRLAAGDQLLSVDGRSLVGLSQERAAELMTRTSSVVTLEVAKQGAIYHGLATLLNQPSPMMQRISDRRGSGKPRPKSEGFELYNNSTQNGSPESPQLPWAEYSEPKKLPGDDRLMKNRADHRSSPNVANQPPSPGGKSAYASGTTAKITSVSTGNLCTEEQTPPPRPEAYPIPTQTYTREYFTFPASKSQDRMAPPQNQWPNYEEKPHMHTDSNHSSIAIQRVTRSQEELREDKAYQLERHRIEAAMDRKSDSDMWINQSSSLDSSTSSQEHLNHSSKSVTPASTLTKSGPGRWKTPAAIPATPVAVSQPIRTDLPPPPPPPPVHYAGDFDGMSMDLPLPPPPSANQIGLPSAQVAAAERRKREEHQRWYEKEKARLEEERERKRREQERKLGQMRTQSLNPAPFSPLTAQQMKPEKPSTLQRPQETVIRELQPQQQPRTIERRDLQYITVSKEELSSGDSLSPDPWKRDAKEKLEKQQQMHIVDMLSKEIQELQSKPDRSAEESDRLRKLMLEWQFQKRLQESKQKDEDDEEEEDDDVDTMLIMQRLEAERRARLQDEERRRQQQLEEMRKREAEDRARQEEERRRQEEERTKRDAEEKRRQEEGYYSRLEAERRRQHDEAARRLLEPEAPGLCRPPLPRDYEPPSPSPAPGAPPPPPQRNASYLKTQVLSPDSLFTAKFVAYNEEEEEEDCSLAGPNSYPGSTGAAVGAHDACRDAKEKRSKSQDADSPGSSGAPENLTFKERQRLFSQGQDVSNKVKASRKLTELENELNTK

SEQ ID NO: 80538 - protein, 53 aa, Homo sapiens
MKLLLLHPAFQSCLLLTLLGLWRTTPEAHASSLGAPAISAASFLQDLIHRYGE

SEQ ID NO: 80539 - protein, 74 aa, Homo sapiens
MTKGTSSFGKRRNKTHTLCRRCGSKAYHLQKSTCGKCGYPAKRKRKCMDSVKEQHLNPRGQLLQHPVHLKNVND

SEQ ID NO: 80540 - protein, 181 aa, Homo sapiens
MTFDLTKITKTSSSFEVRTWDPEGVIFYGDTNPKDDWFMLGLRDGRPEIQLHNHWAQLTVGAGPRLDDGRWHQLVPALDGCLRRDSWLDKQAEISASAPTSLRSCDVESNPGIFLPPGTQAEFNLRDIPQPHAEPWAFSLDLGLKQAAGSGHLLALGTPENPSWLSLHLQDQEKTLPPLFA

SEQ ID NO: 80541 - protein, 91 aa, Homo sapiens
MATSWGTVFFMLVVSCVCSAVSHRNQQTWFEGIFLSSMCPINVSASTLYGIMFDAGSTGTRIHVYTFVQKMPGHLWSLGKGGGVRCPPEKW

SEQ ID NO: 80542 - protein, 130 aa, Homo sapiens
MTEDSQRNFRSVYYEKVGFRGVEEKKSLEILLKDDRLDTEKLCTFSQRFPLPSMYRALVWKVLLGILPPHHESHAKVMMYRKEQYLDVLHALKVVRFVSDATPQAEVYLRMYQLESGKLPRSPSFPLEPD

SEQ ID NO: 80543 - protein, 155 aa, Homo sapiens
MSTVHEILCKLSLEGDHSTPPSAYGSVKAYTNFDAERDALNIETAIKTKGVDEVTIVNILTNRSNAQRQDIAFAYQRRTKKELASALKSALSGHLETVILGLLKTPAQYDASELKASMKGLGTDEDSLIEIICSRTNQELQEINRVYKESEYVQD

SEQ ID NO: 80544 - protein, 64 aa, Homo sapiens
VAAGNLLNESEKDCGQDRRAPGVQPCRLVTMTSVVKTVYSLQPPSALSGGQPAVQLLLQLQTTE

SEQ ID NO: 80545 - protein, 1146 aa, Homo sapiens
MNEKRLLFKDRHFTCSKIIGRRFACFAQRLSHRRKQSQCDLLNESTGQLPTTCSSAASNSINWNCRVKMTQQMQNLHLCQSKKHSAPSSPNAAKRLYRNLSEKLKGSHSSFDEAYFRTRTDRLSLRKTSVNFQGNEAMFEAVEQQDMDAVQILLYQYTPEELDLNTPNSEGLTPLDIAIMTNNVPIARILLRTGARESPHFVSLESRAMHLNTLVQEAQERVSELSAQVENEGFTLDNTEKEKQLKAWEWRYRLYRRMKTGFEHARAPEMPTNVCLMVTSSTSLTVSFQEPLSVNAAVVTRYKVEWSMSEDFSPLAGEIIMDNLQTLRCTITGLTMGQQYFVQVSAYNMKGWGPAQTTTPACASPSNWKDYDDREPRHKGQSEVLEGLLQQVRALHQHYSCRESTKLQTTGRKQSVSRSLKHLFHSSNKFVKTLKRGLYIAVIFYYKDNILVTNEDQVPIVEIDDSHTSSITQDFLWFTKLSCMWEDIRWLRQSIPISSSSSTVLQTRQKMLAATAQLQNLLGTHNLGRVYYEPIKDRHGNILIVTIREVEMLYSFFNGKWMQISKLQSQRKSLSTPEEPTALDILLITIQDILSYHKRSHQRLFPGLYLGYLKLCSSVDQIKVLVTQKLPNILCHVKIRENNNISREEWEWIQKLSGSESMESVDHTSDCPMQLFFYELQMAVKALLQQINIPLHQARNFRLYTQEVLEMGHNVSFLLLLPASDDVCTAPGQNNPYTPHSGFLNLPLQMFELVHFCSYREKFISLYCRLSAVVELDSLNTQQSLREAISDSEVAAAKQRHQQVLDFIQQIDEVWREMRWIMDALQYARYKQPVSGLPITKLIDPSDEQSLKKINSTSSSHIDCLPSPPPSPEMHRRKTVSDSQPCSDEEACSEVFLPTNSDYDSSDALSPRDLDLVYLSSHDIAQQTLSGLSGSAPDVLQVHDVKTPLGPGQDPQGEGPNPDHSCAEFLHSLTLTGFTPKNHAKTVSGGRPPLGFLGKRKPGKHPHYGGFSRHHRWLRIHSETQSLSLSEGIYTQHLSQACGLAQEPKEAKRAGPALDDPRGLTLAHAASLPEERNSSLQDARPSVRRLYVEPYAAAVVAQDEKPWASLSPPSGGRITLPSPTGPDVSQEGPTASPMSEILSSML

SEQ ID NO: 80546 - protein, 247 aa, Homo sapiens
MPKLQGFEFWSRTLRGARHVVAPMVDQSELAWRLLSRRHGAQLCYTPMLHAQVFVRDANYRKENLYCEVCPEDRPLIVQFCANDPEVFVQAALLAQDYCDAIDLNLGCPQMIAKRVLLAHEKLSVPVTCKIRVFPEIDKTVRYAQMLEKAGCQLLTVHGRTKEQKGPLSGAASWEHIKAVRKAVAIPVFANGNIQCLQDVERCLRDTGVQGVMSAEGNLHNPALFEGRSPAVWELAEEYLDIVREHP

SEQ ID NO: 80547 - protein, 117 aa, Homo sapiens
MVSLPPPQSDVTLPGPTRLEGERQGDLMQAPGLPGSPAPQSKHAGFSCSSFVSDGPPERTPSLPPHSPRIASPGPEQVQGHCPAGPGPGPFRLSPSDKYPGFGFEEAAASSPGRFLK

SEQ ID NO: 80548 - protein, 333 aa, Homo sapiens
MTSCLPALRFIATPRLSAMPHIDNDVKLDFKDVLLRPKRSTLKSRSEVDLTRSFSFRNSKQTYSGVPIIAANMDTVGTFEMAKVLCKFSLFTAVHKHYSLVQWQEFAGQNPDCLEHLAASSGTGSSDFEQLEQILEAIPQAGNVVTGEMVEELILSGADIIKVGIGPGSVCTTRKKTGVGYPQLSAVMECADAAHGLKGHIISDGGCSCPGDVAKAFGAGADFVMLGGMLAGHSESGGELIERDGKKYKLFYGMSSEMAMKKYAGGVAEYRASEGKTVEVPFKGDVEHTIRDILGGIRSTCTYVGAAKLKELSRRTTFIRVTQQVNPIFSEAC

SEQ ID NO: 80549 - protein, 186 aa, Homo sapiens
MLLLGLLLLLPLLAGARLLWNWWKLRSLHLPPLAPGFLHLLQPDLPIYLLGLTQKFGPIYRLHLGLQDVVVLNSKRTIEEAMVKKWADFAGRPEPLTFPTLQPPPPPADKLVSRNYPDLSLGDYSLLWKAHKKLTRSALLLGIRDSMEPVVEQLTQEFCERMRAQPGTPVAIEEEFSLLTCSIICY

SEQ ID NO: 80550 - protein, 142 aa, Homo sapiens
MHNILKKYHQYIVECHGITLLPQFLGMYRLNVDGVEIYVIVTRNVFSHRLSVYRKYDLKGSTVAREASDKEKAKELPTLKDNDFINEGQKIYIDDNNKKVFLEKLKKDVEFLAQLKLMDYSLLVGIHDVERAEQEEVECEEN

SEQ ID NO: 80551 - protein, 437 aa, Homo sapiens
MSVSARSAAAEERSVNSSTMGQQQKNLEGYVGFANLPNQVYRKSVKRGFEFTLMVVGESGLGKSTLINSLFLTDLYSPEYPGPSHRIKKTVQVEQSKVLIKEGGVQLLLTIVDTPGFGDAVDNSNCWQPVIDYIDSKFEDYLNAESRVNRRQMPDNRVQCCLYFIAPSGHGLKPLDIEFMKRLHEKVNIIPLIAKADTLTPEECQQFKKQIMKEIQEHKIKIYEFPETDDEEENKLVKKIKDRLPLAVVGSNTIIEVNGKRVRGRQYPWGVAEVENGEHCDFTILRNMLIRTHMQDLKDVTNNVHYENYRSRKLAAVTYNGVDNNKNKGQLTKSPLAQMEEERREHVAKMKKMEMEMEQVFEMKVKEKVQKLKDSEAELQRRHEQMKKNLEAQHKELEEKRRQFEDEKANWEAQQRILEQQNSSRTLEKNKKKGKIF

SEQ ID NO: 80552 - protein, 577 aa, Homo sapiens
MEIIRSNFKSNLHKVYQAIEEADFFAIDGEFSGISDGPSVSALTNGFDTPEERYQKLKKHSMDFLLFQFGLCTFKYDYTDSKYITKSFNFYVFPKPFNRSSPDVKFVCQSSSIDFLASQGFDFNKVFRNGIPYLNQEEERQLREQYDEKRSQANGAGALSYVSPNTSKCPVTIPEDQKKFIDQVVEKIEDLLQSEENKNLDLEPCTGFQRKLIYQTLSWKYPKGIHVETLETEKKERYIVISKVDEEERKRREQQKHAKEQEELNDAVGFSRVIHAIANSGKLVIGHNMLLDVMHTVHQFYCPLPADLSEFKEMTTCVFPRLLDTKLMASTQPFKDIINNTSLAELEKRLKETPFNPPKVESAEGFPSYDTASEQLHEAGYDAYITGLCFISMANYLGSFLSPPKIHVSARSKLIEPFFNKLFLMRVMDIPYLNLEGPDLQPKRDHVLHVTFPKEWKTSDLYQLFSAFGNIQISWIDDTSAFVSLSQPEQVKIAVNTSKYAESYRIQTYAEYMGRKQEEKQIKRKWTEDSWKEADSKRLNPQCIPYTLQNHYYRNNSFRISSRIPYYIWPSYLHRLL

SEQ ID NO: 80553 - protein, 143 aa, Homo sapiens
MLAGNEFQVSLSSSMSVSELKAQITQKIGVHAFQQRLAVHPSGVALQDRVPLASQGLGPGSTVLLVVDKCDEPLSILVRNNKGRSSTYEVRLTQTVAHLKQQVSGLEGVQDDLFWLTFEGKPLEDQLPLGEYGLKPLSTVFMN

SEQ ID NO: 80554 - protein, 256 aa, Homo sapiens
MTPQSLLQTTLFLLSLLFLVQGAHGRGHREDFRFCSQRNQTHRSSLHYKPTPDLRISIENSEEALTVHAPFPAAHPASRSFPDPRGLYHFCLYWNRHAGRLHLLYGKRDFLLSDKASSLLCFQHQEESLAQGPPLLATSVTSWWSPQNISLPSAASFTFSFHSPPHTAAHNASVDMCELKRDLQLLSQFLKHPQKASRRPSAAPASQQLQSLESKLTSVRFMGDMVSFEEDRINATVWKLQPTAGLQDLHIHSRQE

SEQ ID NO: 80555 - protein, 1871 aa, Homo sapiens
MDKGRERMAAAAAAAAAAAAAAQCRSPRCAAERRGFRRELDSWRHRLMHCVGFESILEGLYGPRLRRDLSLFEDCEPEELTDWSMDEKCSFCNLQREAVSDCIPSLDSSQSTPTEELSSQGQSNTDKIECQAENYLNALFRKKDLPQNCDPNIPLVAQELMKKMIRQFAIEYISKSGKTQENRNGSIGPSIVCKSIQMNQAENSLQEEQEGPLDLTVNRMQEQNTQQGDGVLDLSTKKTSIKSEESSICDPSSENSVAGSTVDAKSEEATKMEKRKSALNKVLESLCIHHQQQVLAMLKFLVQEQNAASLCCCNTSCVVSSESQKPLIEDDLCGLFCSCEYRLAERGCLQNEKQSPGLEPLPVCIKDLHCLSCQTVTVEHVKPVVNRGIADSYNSHRCCSGLLPNIHSTKSAFRSPLLSKEVCDLSVTLKDACRSRSPSPPPLSPIETEGFEKLKDVISEISALENNKLEANINQPPSLTPAEISSNKSDHQDKILKTKKSSNSYSLLSNDSNNSTTNHEKGETAVIFQDLMDRINEKLKSIETTDMTSLVKLSSSDYNTYNDLKLGDFITSLLHNAKASDYSFMELLSQHDKKVENKIIQTRFRKRQETLFAMRNSSDSPMFRRQSLQIKRELASLDENFTRKKYTEKSSRKLTQNNEISSSDKGEFYHDQGPSLQNSKRLQGKNHAETSFSPNYALQSLQLPLHSSETNLSFNEFSESFKTTSPEKMSIRKPQEKSADGKQFLQNDRKNPKLGNTQTLLRNDVSGLLSRTKRNIVPPGWYSVYVTNNYVFKKSPKAKKVSESTTKNDPVKNIHIESSHNIDLNKIAMNSNLQVVVKRLEDTISIAKKSWNNQPLSEGYKASKKLIEIDGKDQHADRNMTLTLNRMTCKEQSLSKSVVASGNIINSHCMPTVDLNNKRLENLKKSSILDMGRLISSVENVPAKYEGTESSSVSNYSSPIKLMFLSEVKSSEGVKYTLTSVGTSHSNVVLPSEKPTTHHVTEEKTETNEDISNANSENYHSSHYDTDTFQRELNKFSHAKETAGSSTMFIGDINSDKPQEEPKDNSSSATDPSFKRKPGRPKKIGPQVVKQIKRPIGRPPKPKIDQTNITVCQNEPFSAGRKSPECLISEVKEGIYKKSITVTVIYGRSRRTKRHVSEGRVNISNLMSLNNNAGDFPTEYNSPRNISEDKIDLGERISAVASLTTESEILGSGFEYVRPIKNKSVIPQPSKNIIRPNQKPLAISRKPGRPAKVKISGISVTINRTSPQEREVSISSCLPPLEQDNTSGKNLPEEKYDQQCTQMDKIRHTEADIFKNGSKRMIATVPLRHSIRDRKPSLHFLHSLASSSSLIYRNALLHKSYKLHLQKNKSQKEKHRHSKMKIAYKDTPRNRLSRNAKKCLEDNKLVPISEVSLDPIISSNPLLRWWATSASNDSLLEELNNRFEQITNAWVQVSGDEAENCIHKKREHIENDHFKVASPLETCLLELEVSPVKMLFQKKYDLNELCTWFMQTTETQSLSLVRKANARNPLEVINTRGIKLGTKYSDFNASPFRKHFKKFALSSPSKSAEKLHILHKVANSPLLNVKSNLAIARLKRTEFKRLHHERWKREGKLHNHGTVDWNSKRRNLRFFCQNQFLNKTEGETNADIPLQGKSIVDNQCVLPPEIRGDLQQRVVMPDFKIHASFENKFKSEAKENGTNCSQKDFQKGPRLENVCPNSWRSKTLKDCRIFLRKLNCLEHRNTFKLNTIIYSPESTDSGNTHQTHMEESKRFTLRSHSARQNSFKKQSKEIENANTNNPSADEFADHLGNSKLSKCVNFDKNPDSFEVLSNLNKRKRPPWKITEMSTKRHKRQSCNSGQMANYFSKSLACYK

SEQ ID NO: 80556 - protein, 893 aa, Homo sapiens
MTAEETVNVKEVEIIKLILDFLNSKKLHISMLALEKESGVINGLFSDDMLFLRFRYIILKQKFLEALCVNNAMSAEDEPQHLEFTMQEAVQCLHALEEYCPSKDDYSKLCLLLTLPRLTNHAEFKDWNPSTARVHCFEEACVMVAEFIPADRKLSEAGFKASNNRLFQLVMKGLLYECCVEFCQSKATGEEITESEVLLGIDLLCGNGCDDLDLSLLSWLQNLPSSVFSCAFEQKMLNIHVDKLLKPTKAAYADLLTPLISKLSPYPSSPMRRPQSADAYMTRSLNPALDGLTCGLTSHDKRISDLGNKTSPMSHSFANFHYPGVQNLSRSLMLENTECHSIYEESPERDTPVDAQRPIGSEILGQSSVSEKEPANGAQNPGPAKQEKNELRDSTEQFQEYYRQRLRYQQHLEQKEQQRQIYQQMLLEGGVNQEDGPDQQQNLTEQFLNRSIQKLGELNIGMDGLGNEVSALNQQCNGSKGNGSNGSSVTSFTTPPQDSSQRLTHDASNIHTSTPRNPGSTNHIPFLEESPCGSQISSEHSVIKPPLGDSPGSLSRSKGEEDDKSKKQFVCINILEDTQAVRAVAFHPAGGLYAVGSNSKTLRVCAYPDVIDPSAHETPKQPVVRFKRNKHHKGSIYCVAWSPCGQLLATGSNDKYVKVLPFNAETCNATVSGPDLEFSMHDGTIRDLAFMEGPESGGAILISAGAGDCNIYTTDCQRGQGLHALSGHTGHILALYTWSGWMIASGSQDKTVRFWDLRVPSCVRVVGTTFHGTGSAVASVAVDPSGRLLATGQEDSSCMLYDIRGGRMVQSYHPHSSDVRSVRFSPGAHYLLTGSYDMKIKVTDLQGDLTKQLPIMVVGEHKDKVIQCRWHTQDLSFLSSSADRTVTLWTYNG

SEQ ID NO: 80557 - protein, 21 aa, Homo sapiens
MMYSLTVFENLINKMWLGVPS

SEQ ID NO: 80558 - protein, 124 aa, Homo sapiens
MEKSGPSSTISEQQLQRQEGWINTKTDLAEQSLISSEKWLQLHGLKSNKLTLKQILSQIGFPHCEDYVASLGRPVASRYADGLFPQLYRAEDGRVYNGFSRACEVAGKCYSCDRTVHSYCHQLG

SEQ ID NO: 80559 - protein, 412 aa, Homo sapiens
MWVLLFCLVMASCQYSLLKSVQPDPASPIHGHNQIITYSRPIYFCVLCGLILLLDTGAKARHPPSYVVYGLKLFSPVFLQSARDYLIVFLYCFPAISLLGLFPQINTFCTYLLEQIDMLFFGGSAVSGITSAVYSVARSVLAAALLHAVCFSAVKEPWSMQHIPALFSAFCGLLVALSYHLSRQSSDPSVLMSFIQCRLFPKFLHQNLAESAADPLPKKMKDSVTDVLKWDLIVCAVVAVLSFAVSASTVFLSLRPFLSIVLFALAGAVGFVTHYVLPQLRKHHPWMWISHPILKNKEYHQREVRDVAHLMWFERLYVWLQCFEKYILYPALILNALTIDAFLISNHRRLGTHWDIFLMIIAGMKLLRTSFCNPVYQFINLSFTVIFFHFDYKDISESFLLDFFMVSILFSK

SEQ ID NO: 80560 - protein, 134 aa, Homo sapiens
  MOD_RES (1)..(1): Any amino acid
XTVYVYGQEKYLLLHDISESEFLTEAEIICDVVCLVYDVSNPKSFEYCARIFKQHFMDSRIPCLIVAAKSDLHEVKQEYSISPTDFCRKHKMPPPQAFTCNTADAPSKDIFVKLTTMAMYPHENSPGSLPWRLH

SEQ ID NO: 80561 - protein, 116 aa, Homo sapiens
MAHEAMEYDVQVQLNHAEQQPAPAGMASSQGGPALLQPVPADVVSSQGVPSILQPAPAEVISSQATPPLLQPAPQLSVDLTEVEVLGEDTVENINPRTSEQHRQGSDGNHTIPASS

SEQ ID NO: 80562 - protein, 103 aa, Homo sapiens
MPVSVSSGRTFPKRGQTCVVHYTGMLEDGKKFDSSRDRNKPFKFMLGKQEVIRGWEEGVAQMSVGQRAKLTISPDYAYGATGHPGIIPPHATLVFDVELLKLE

SEQ ID NO: 80563 - protein, 511 aa, Homo sapiens
KELIDSREIGASRLSRVESLAPEVKQNTTASGCELMHTEMQALRADWKQWEDSVFQTQSCLENLVSQMALSEQEFSGQVAQLEQALEQFSALLKTWAQQLTLLEGKNTDEEIVECWHKGQEILDALQKAEPRTEDLKSQLNELCRFSRDLSTYSGKVSGLIKEYNCLCLQASKGCQNKEQILQQRFRKAFRDFQQWLVNAKITTAKCFDIPQNISEVSTSLQKIQEFLSESENGQHKLNMMLSKGELLSTLLTKEKAKGIQAKVTAAKEDWKNFHSNLHQKESALENLKIQMKDFEVSAEPIQDWLSKTEKMVHESSNRLYDLPAKRREQQKLQSVLEEIHCYEPQLNRLKEKAQQLWEGQAASKSFRHRVSQLSSQYLALSNLTKEKVSRLDRIVAEHNQFSLGIKELQDWMTDAIHMLDSYCHPTSDKSVLDSRTLKLEVCIFTQKYLQPTEFVFLKISRLHPPGVMMSHSLHDKSQMLCECNAVCLGCTCQRIPESSDPGCFPKNKIK

SEQ ID NO: 80564 - protein, 231 aa, Homo sapiens
MDVENEQILNVNPAENAGTEEIKNEINGNWISASSINEARINAKAKRRLRKNSSRDSGRGDSVSDSGSDALRSGLTVPTSPKGRLLDRRSRSGKGRGLPKKGGAGGKGVWGTPGQVYDVEEVDVKDPNYDDDQENCVYETVVLPLDERAFEKTLTPIIQEYFEHGDTNEVAEMLRDLNLGEMKSGVPVLAVSLALEGKASHREMTSKLLSDLCGTVMSTTDVEKSFDKLLK

SEQ ID NO: 80565 - protein, 463 aa, Homo sapiens
MAAMAVALRGLGGRFRWRTQAVAGGVRGAARGAAAGQRDYDLLVVGGGSGGLACAKEGTRWGLGGTCVNVGCIPKKLMHQAALLGGLIQDAPNYGWEVAQPVPHDWRKMAEAVQNHVKSLNWGHRVQLQDRKVKYFNIKASFVDEHTVCGVAKGGKEILLSADHIIIATGGRPRYPTHIEGALEYGITSDDIFWLKESPGKTLVVGASYVALECAGFLTGIGLDTTIMMRSIPLRGFDQQMSSMVIEHMASHGTRFLRGCAPSRVRRLPDGQLQVTWEDSTTGKEDTGTFDTVLWAIGRVPDTRSLNLEKAGVDTSPDTQKILVDSREATSVPHIYAIGDVVEGRPELTPIAIMAGRLLVQRLFGGSSDLMDYDNVPTTVFTPLEYGCVGLSEEEAVARHGQEHVEVYHAHYKPLEFTVAGRDASQCYVKMVCLREPPQLVLGLHFLGPNAGEVTQGFALGIK

SEQ ID NO: 80566 - protein, 2157 aa, Homo sapiens
MSVKEAGSSGRREQAAYHLHIYPQLSTTESQASCRVTATKDSTTSDVIKDAIASLRLDGTKCYVLVEVKESGGEEWVLDANDSPVHRVLLWPRRAQDEHPQEDGYYFLLQERNADGTIKYVHMQLVAQATATRRLVERGLLPRQQADFDDLCNLPELTEGNLLKNLKHRFLQQKIYTYAGSILVAINPFKFLPIYNPKYVKMYENQQLGKLEPHVFALADVAYYTMLRKRVNQCIVISGESGSGKTQSTNFLIHCLTALSQKGYASGVERTILGAGPVLEAFGNAKTAHNNNSSRFGKFIQVSYLESGIVRGAVVEKYLLEKSRLVSQEKDERNYHVFYYLLLGVSEEERQEFQLKQPEDYFYLNQHNLKIEDGEDLKHDFERLKQAMEMVGFLPATKKQIFAVLSAILYLGNVTYKKRATGREEGLEVGPPEVLDTLSQLLKVKREILVEVLTKRKTVTVNDKLILPYSLSEAITARDSMAKSLYSALFDWIVLRINHALLNKKDVEEAVSCLSIGVLDIFGFEDFERNSFEQFCINYANEQLQYYFNQHIFKLEQEEYQGEGITWHNIGYTDNVGCIHLISKKPTGLFYLLDEESNFPHATSQTLLAKFKQQHEDNKYFLGTPVMEPAFIIQHFAGKVKYQIKDFREKNMDYMRPDIVALLRGSDSSYVRELIGMDPVAVFRWAVLRAAIRAMAVLREAGRLRAERAEKAAGMSSPGAQSHPEELPRGASTPSEKLYRDLHNQMIKSIKGLPWQGEDPRSLLQSLSRLQKPRAFILKSKGIKQKQIIPKNLLDSKSLKLIISMTLHDRTTKSLLHLHKKKKPPSISAQFQTSLNKLLEALGKAEPFFIRCIRSNAEKKELCFDDELVLQQLRYTGMLETVRIRRSGYSAKYTFQDFTEQFQVLLPKDAQPCREVISTLLEKMKIDKRNYQIGKTKVFLKETERQALQETLHREVVRKILLLQSWFRMVLERRHFLQMKRAAVTIQACWRSYRVRRALERTQAAVYLQASWRGYWQRKLYRHQKQSIIRLQSLCRGHLQRKSFSQMISEKQKAEEKEREALEAARAGAEEGGQGQAAGGQQVAEQGPEPAEDGGHLASEPEVQPSDRSPLEHSSPEKEAPSPEKTLPPQKTVAAESHEKVPSSREKRESRRQRGLEHVKFQNKHIQSCKEESALREPSRRVTQEQGVSLLEDKKESREDETLLVVETEAENTSQKQPTEQPQAMAVGKVSEETEKTLPSGSPRPGQLERPTSLALDSRVSPPAPGSAPETPEDKSKPCGSPRVQEKPDSPGGSTQIQRYLDAERLASAVELWRGKKLVAAASPSAMLSQSLDLSDRHRATGAALTPTEERRTSFSTSDVSKLLPSLAKAQPAAETTDGERSAKKPAVQKKKPGDASSLPDAGLSPGSQVDSKSTFKRLFLHKTKDKKYSLEGAEELENAVSGHVVLEATTMKKGLEAPSGQQHRHAAGEKRTKEPGGKGKKNRNVKIGKITVSEKWRESVFRQITNANELKYLDEFLLNKINDLRSQKTPIESLFIEATEKFRSNIKTMYSVPNGKIHVGYKDLMENYQIVVSNLATERGQKDTNLVLNLFQSLLDEFTRGYTKNDFEPVKQSKAQKKKRKQERAVQEHNGHVFASYQVSIPQSCEQCLSYIWLMDKALLCSVCKMTCHKKCVHKIQSHCSYTYGRKGEPGVEPGHFGVCVDSLTSDKASVPIVLEKLLEHVEMHGLYTEGLYRKSGAANRTRELRQALQTDPAAVKLENFPIHAITGVLKQWLRELPEPLMTFAQYGDFLRAVELPEKQEQLAAIYAVLEHLPEANHNSLERLIFHLVKVALLEDVNRMSPGALAIIFAPCLLRCPDNSDPLTSMKDVLKITTCVEMLIKEQMRKYKVKMEEISQLEAAESIAFRRLSLLRQNAPWPLKLGFSSPYEGVLNKSPKTRDIQEEELEVLLEEEAAGGDEDREKEILIERIQSIKEEKQDITYRLPELDPRGSDEENLDSETSASTESLLEERAGRGASEGPPAPALPCPGAPTPSPLPTVAAPPRRRPSSFVTVRVKTPRRTPIMPTANIKLPPGLPSHLPRWAPGAREAAAPVRRREPPARRPDQIHSVYITPGADLPVQGALEPLEEDGQPPGAKRRYSDPPTYCLPPASGQTNG

SEQ ID NO: 80567 - protein, 80 aa, Homo sapiens
  MOD_RES (1)..(1): Any amino acid
XASVLSPTSWEKRRAWLRQSRNWQTQVLEEEAAAALQDVPDPEPSSLDDVFQEGNPINKIEDWLQDCGKLNTTDSHWKRI

SEQ ID NO: 80568 - protein, 419 aa, Homo sapiens
MGPLPAPSCTQRITWKGLLLTASLLNFWNPPTTAEVTIEAQPPKVSEGKDVLLLVHNLPQNLPGYFWYKGEMTDLYHYIISYIVDGKIIIYGPAYSGRETVYSNASLLIQNVTRKDAGTYTLHIIKRGDETREEIRHFTFTLYLETPKPYISSSNLNPREAMEAVRLICDPETLDASYLWWMNGQSLPVTHRLQLSKTNRTLYLFGVTKYIAGPYECEIRNPVSASRSDPVTLNLLPKLPIPYITINNLNPRENKDVLAFTCEPKSENYTYIWWLNGQSLPVSPGVKRPIENRILILPSVTRNETGPYQCEIRDRYGGLRSNPVILNVLYGPDLPRIYPSFTYYRSGENLDLSCFTESNPPAEYFWTINGKFQQSGQKLFIPQITRNHSGLYACSVHNSATGKEISKSMTVKVSDWILP

SEQ ID NO: 80569 - protein, 252 aa, Homo sapiens
MALLDVCGAPRGQRPESALPVAGSGRRSDPGHYSFSMRSPELALPRGMKPTEFFQSLGGDGERNVQIEMAHGTTTLAFKFQHGVIAAVDSRASAGSYINCQYWERLLAKECRLYYLRNGERISVSAASKLLSNMMCQYRGMGLSMGSMICGWDKKGPGLYYVDEHGTRLSGNMFSTGSGNTYAYGVMDSGYRPNLSPEEAYDLGRRAIAYATHRDSYSGGVVNMYHMKEDGWVKVESTDVSDLLHQYREANQ

SEQ ID NO: 80570 - protein, 79 aa, Homo sapiens
MGRDQRAVAGPALRRWLLLGTVTVGFLAQSVLAGVKKFDVPCGGRDCSGGCQCYPEKGGRVSHSIAINNIIFLIQSCLA

SEQ ID NO: 80571 - protein, 237 aa, Homo sapiens
MNSWDRRKNFHLLKKNSKLLRELKNLDSRQCRETHKIAVFYIAEGQEDKCSILSNERGSQAYEDFVAGLGWEVDLSTHCGFMGGLQRNGSTGQTAPYYATSTVEVIFHVSTRMPSDSDDSLTKKLRHLGNDEVHIVWSEHSRDYRRGIIPTAFGDVSIIIYPMKNHMFFIAITKKPEVPFFGPLFDGAIVSGKLLPSLVCATCINASRAVKCLIPLYQSFYEERALYLEAIFRTTAK

SEQ ID NO: 80572 - protein, 151 aa, Homo sapiens
  MOD_RES (1)..(1): Any amino acid
XRKRRESTSAEEDIIDGFAMTSFVTFEALEKDVALKPQERVEKRQTPLTKKKREALTNGLSFHSKKSRLSHPHHYSSDRENDRNLCQHLGKRKKMPKALRQLKPGQNSCRDSDSESASGESKGFHRSSSRERLSDVSLSKKKKKKKINENH

SEQ ID NO: 80573 - protein, 71 aa, Homo sapiens
VTIACDAVLSSKSPYRKQDPDTWENELPVSKYANNLTQLDNGVRIPPRYVGNLPRIFDYSPLDPTQDFNTQ

SEQ ID NO: 80574 - protein, 206 aa, Homo sapiens
MPLPGGLWWLLCCRRGFTLLHRDYGDGELSGDGDEDEDEETFELRTPSPAGGGRGGSVEEGKMRRRGCLGAWQNELTSPVSKMGKLRPGDGKRLAQGSTGPLEVTLTQPVRSGPVSNRLQSWEETWSLIPEKGLPEDDPDIVVKGWLYREPRGGGARPWLPPRRAWFVLTRDSLDQFSSSGKGARRLGSLVLTSLCSVTGPERRRK

SEQ ID NO: 80575 - protein, 733 aa, Homo sapiens
MSHVAVENALGLDQQFAGLDLNSSDNQSGGSTASKGRYIPPHLRNREATKGFYDKDSSGWSSSKDKDAYSSFGSRSDSRGKSSFFSDRGSGSRGRFDDRGRSDYDGIGSRGDRSGFGKFERGGNSRWCDKSDEDDWSKPLPPSERLEQELFSGGNTGINFEKYDDIPVEATGNNCPPHIESFSDVEMGEIIMGNIELTRYTRPTPVQKHAIPIIKEKRDLMACAQTGSGKTAAFLLPILSQIYSDGPGEALRAMKENGRYGRRKQYPISLVLAPTRELAVQIYEEARKFSYRSRVRPCVVYGGADIGQQIRDLERGCHLLVATPGRLVDMMERGKIGLDFCKYLVLDEADRMLDMGFEPQIRRIVEQDTMPPKGVRHTMMFSATFPKEIQMLARDFLDEYIFLAVGRVGSTSENITQKVVWVEESDKRSFLLDLLNATGKDSLTLVFVETKKGADSLEDFLYHEGYACTSIHGDRSQRDREEALHQFRSGKSPILVATAVAARGLDISNVKHVINFDLPSDIEEYVHRIGRTGRVGNLGLATSFFNERNINITKDLLDLLVEAKQEVPSWLENMAYEHHYKGSSRGRSKSSRFSGGFGARDYRQSSGASSSSFSSSRASSSRSGGGGHGSSRGFGGGSSRSQEEMKGTISSPVQKDHAPLWSKCLHEMPYFVKKVHAGIFRSPACSHGSLRYLRPTNPPDEDNHNSCRHESNLERDAQKCVNWSVTTKMRTAC

SEQ ID NO: 80576 - protein, 140 aa, Homo sapiens
MASRGRRPEHGGPPELFYDETEARKYVRNSRMIDIQTRMAGRALELLYLPENKPCYLLDIGCGTGLSGSYLSDEGHYWVGLDISPAMLAFLLCSGSVMLTRSLKTLPSACTAFLLLFFLFSSGDPELSCSCTLRTQSSWS

SEQ ID NO: 80577 - protein, 148 aa, Homo sapiens
MSGKDRIEIFPSRMAQTIMKARLKGAQTGRNLLKKKSDALTLRFRQILKKIIETSFVTLDEAIKITNRRVNAIEHVIIPRIERTLAYIITELDEREREEFYRLKKIQEKKKILKEKSEKDLEQRRAAGEVLEPANLLAEEKDEDLLFE

SEQ ID NO: 80578 - protein, 180 aa, Homo sapiens
MEFPDLGKHCSEKTCKQLDFLPVKCDACKQDFCKDHFPYAAHKCPFAFQKDVHVPVCPLCNTPIPVKKGQIPDVVVGDHIDRDCDSHPGKKKEKIFTYRCSKEGCKKKEMLQMVCAQCHGNFCIQHRHPLDHSCRHGSRPTIKAGCSPMTVSESRPLGDFLTLAPGGLAQRLGYWFTRLM

SEQ ID NO: 80579 - protein, 187 aa, Homo sapiens
MASGDFCSPGEGMEILQQVCSKQLPPCNLSKEDLLQNPYFSKLLLNLSQHVDESGLSLTLAKEQAQAWKEVRLHKTTWLRSEILHRVIQELLVDYYVKIQDTNVTSEDKKFHETLEQRLLVTELMRLLGPSQEREIPPLLGLEKADLLELMPLSEDFVWMRARLQQEVEEQLKKKCFTLLCYYDPNS

SEQ ID NO: 80580 - protein, 155 aa, Homo sapiens
MQAARMAASLGRQLLRLGGGSSRLTALLGQPRPGPARRPYAGGAAQLALDKSDSHPSDALTRKKPAKNDALEMVEETTWQGLKELGAFGLQVPSELGGVGLCNTQYARLVEIVGMHDLGVGITLGAHQSIGFKGILLFGTKAQKEKYLPKLASGE

SEQ ID NO: 80581 - protein, 135 aa, Homo sapiens
MIITKAGRRMFPSYKVKVTGMNPKTKYILLIDIVPADDHRYKFCDNKWMVAGKAEPAMPGRLYVHPDSPATGAHWMRQLVSFQKLKLTNNHLDPFGHIILNSMHKYQPRLHIVKADENNAFGSKNTAFCTHVFPE

SEQ ID NO: 80582 - protein, 250 aa, Homo sapiens
MRGRWMLFWLLFGLLLEFISHQCIRVINTLADHHHRGTDFGGSPWLHIIIAFPTSYKVVITLWIVYLWVSLLKTIFWSRNGHDGSTDVQQRAWRSNRRRQEGNKIGLKDVITLRRHVETKVRAKIRKRKVTTKINRHDKINGKRKTARKQKMFQRAQELRRRAEDYHKCKIPPSARKALCNWVSLLVFLAFGHSLPGQDMDTFFSLQLCAQALQREMAERKAAYKHHSPIPVGNRVAQKHLHPHPVGPLI

SEQ ID NO: 80583 - protein, 132 aa, Homo sapiens
MRMESRRQATVSWDSGGSDEAPPKPSRPGYPSPRSSEGFYPSPQHMVQTNHYQVSGYPGSHGITAMAGSIYPGQASLLDQTDSWNHRPQEIAMWQPNVEDSTVLDLRGIGQVLPTHLMEERLIRQQQEMEED

SEQ ID NO: 80584 - protein, 86 aa, Homo sapiens
MAIEGGERTCGVHELICIRKDRVFLCGQAGVQWHHLGSLQLPPPGFKRFFCLSIPSNWDYSISRGSWIFVSCWGVYYLDAAPFSLY

SEQ ID NO: 80585 - protein, 79 aa, Homo sapiens
YIDSRARRNLGSINTELQDVQRIMVANIEEVLQRGEALSGWSAMARSWLTATTISWVQAIFPPYPPEYLGLQACATTPG

SEQ ID NO: 80586 - protein, 549 aa, Homo sapiens
MDVVEVAGSWWAQEREDIIMKYEKGHRAGLPEDKGPKPFRSYNNNVDHLGIVHETELPPLTAREAKQIRREISRKSKWVDMLGDWEKYKSSRKLIDRAYKGMPMNIRGPMWSVLLNIEEMKLKNPGRYQIMKEKGKRSSEHIQRIDRDISGTLRKHMFFRDRYGTKQRELLHILLAYEEYNPEVGYCRDLSHIAALFLLYLPEEDAFWALVQLLASERHSLQGFHSPNGGTVQGLQDQQEHVVATSQSKTMGHQDKKDLCGQCSPLGCLIRILIDGISLGLTLRLWDVYLVEGEQALMPITRIAFKVQQKRLTKTSRCGPWARFCNRFVDTWARDEDTVLKHLRASMKKLTRKQGDLPPPAKPEQGSSASRPVPASRGGKTLCKGDRQAPPGPPAWFPRPIWSASPPRAPRSSTPCPGGAVREDTYPVGTQGVPSPALAQGGPQGSWRFLQWNSMPRLPTDLDVEGPWFRHYDFRQSCWVRAISQEDQLAPCWQAEHPAERVRSAFAAPSTDSDQGTPFRARDEQQCAPTSGPCLCGLHLESSQFPPGF

SEQ ID NO: 80587 - protein, 499 aa, Homo sapiens
MATKVGSGNDPWSAWSASKSGNWESSEGWGAQPEGAGAQRNTNTPNNWDTAFGHPQAYQGPATGDDDDWDEDWDGPKSSSYFKDSESADAGGAQRGNSRASSSSMKIPLNKFPGFAKPGTEQYLLAKQLAKPKEKIPIIVGDYGPMWVYPTSTFDCVVADPRKGSKMYGLKSYIEYQLTPTNTNRSVNHRYKHFDWLYERLLVKFGSAIPIPSLPDKQVTGRFEEEFIKMRMERLQAWMTRMCRHPVISESEVFQQFLNFRDEKEWKTGKRKAERDELAGVMIFSTMEPEAPDLDLVEIEQKCEAVGKFTKAMDDGVKELLTVGQEHWKRCTGPLPKEYQKIGKALQSLATVFSSSGYQGETDLNDAITEAGKTYEEIASLVAEQPKKDLHFLMECNHEYKGFLGCFPDIIGTHKGAIEKVKESDKLVATSKITLQDKQNMVKRVSIMSYALQAEMNHFHSNRIYDYNSVIRLYLEQQVQFYETIAEKLRQALSRFPVM

SEQ ID NO: 80588 - protein, 150 aa, Homo sapiens
  MOD_RES (1)..(1): Any amino acid
XKTSPSGKPATLKICSWNVDGLRAWIKKKGLDWVKEEAPDILCLQETKCSENKLPAELQELPGLSHQYWSAPSDKEGYSGVGLLSRQCPLKVSYGIAYVPNAGRGLVRLEYRQRWDEAFRKFLKGLASRKPLVLCGDLNVAHEEIDLRNP

SEQ ID NO: 80589 - protein, 153 aa, Homo sapiens
MVGYDPKPDGRNNTKFQVAVAGSVSGLVTRALISPFDVIKIRFQLQHERLSRSDPSAKYHGILQASRQILQEEGPTAFWKGHVPAQILSIGYGAVQFLSFEMLTELVHRGSVYDAREFSVHFVCGGLAACMATLTVHPVDVLRTRFAAQGEPK

SEQ ID NO: 80590 - protein, 38 aa, Homo sapiens
MGTEKESPEPDCQKQFQAAVSVIQNLPKNGTPGTVWAR

SEQ ID NO: 80591 - protein, 8 aa, Homo sapiens
MKIFDAAK

SEQ ID NO: 80592 - protein, 708 aa, Homo sapiens
MQYLNIKEDCNAMAFCAKMRSSKKTEVNLEAPEPGVEVIFYLSDREPLRLGSGEYTAEELCIRAAQACRISPLCHNLFALYDENTKLWYAPNRTITVDDKMSLRLHYRMRFYFTNWHGTNDNEQSVWRHSPKKQKNGYEKKKIPDATPLLDASSLEYLFAQGQYDLVKCLAPIRDPKTEQDGHDIENECLGMAVLAISHYAMMKKMQLPELPKDISYKRYIPETLNKSIRQRNLLTRMRINNVFKDFLKEFNNKTICDSSVSTHDLKVKYLATLETLTKHYGAEIFETSMLLISSENEMNWFHSNDGGNVLYYEVMVTGNLGIQWRHKPNVVSVEKEKNKLKRKKLENKHKKDEEKNKIREEWNNFSYFPEITHIVIKESVVSINKQDNKKMELKLSSHEEALSFVSLVDGYFRLTADAHHYLCTDVAPPLIVHNIQNGCHGPICTEYAINKLRQEGSEEGMYVLRWSCTDFDNILMTVTCFEKSEQVQGAQKQFKNFQIEVQKGRYSLHGSDRSFPSLGDLMSHLKKQILRTDNISFMLKRCCQPKPREISNLLVATKKAQEWQPVYPMSQLSFDRILKKDLVQGEHLGRGTRTHIYSGTLMDYKDDEGTSEEKKIKVILKVLDPSHRDISLAFFEAASMMRQVSHKHIVYLYGVCVRDVESKCVLFQRGGWPGWGAWVLWRWWRLFPPSRCPGFLPFFLQLRRLRD

SEQ ID NO: 80593 - protein, 64 aa, Homo sapiens
MAGRPHPYDGNSSDPENWDRKLHSRPRKLYKHSSTSSRIAKGGVDHTKMSLHGASGGHERSRDR

SEQ ID NO: 80594 - protein, 128 aa, Homo sapiens
MMLRVLVGAVLPAMLLAAPPPINKLALFPDKSAWCEAKNITQIVGHSGCEAKSIQNRACLGQCFSYSVPNTFPQSTESLVHCDSCMPAQSMWEIVTLECPGHEEVPRVDKLVEKILHCSCQACGKEPS

SEQ ID NO: 80595 - protein, 49 aa, Homo sapiens
  MOD_RES (1)..(1): Any amino acid
XRTAISPKDAFETRQDLNEEEAAQVHGVKDPAPASTQSVLADGTDSAGN

SEQ ID NO: 80596 - protein, 186 aa, Homo sapiens
MEIAPQEAPPVPGADGDIEEAPAEAGSPSPASPPADGRLKAAAKRVTFPSDEDIVSGAVEPKDPWRHGEKLDYKTCEALEEVFKRLQFKVVDLEQTNLDEDGASALFDMIEYYESATHLNISFNKHIGTRGWQAAAHMMRKTSCLQYLDARNTPLLDHSAPFVARALRIRSSLAVLHLENASLSGR

SEQ ID NO: 80597 - protein, 200 aa, Homo sapiens
ELSERIESFVETLKRGGGPRSSEEMARETLGLLRQIITDHRWSNAGELMELIRREGRRMTAAQPSETTVGNMVRRVLKIIREEYGRLHGRSDESDQQESLHKLLTSGGLNEDFSFHYAQLQSNIIEAINELLVELEGTMENIAAQALEHIHSNEVIMTIGFSRTVEAFLKEAARKRKFHVIVAECAPFCQNQPFPPIAGS

SEQ ID NO: 80598 - protein, 312 aa, Homo sapiens
  MOD_RES (249)..(249): Any amino acid
MAPGAPSSSPSPILAVLLFSSLVLSPAQAIVVYTDREVHGAVGSRVTLHCSFWSSEWVSDDISFTWRYQPEGGRDAISIFHYAKGQPYIDEVGTFKERIQWVGDPRWKDGSIVIHNLDYSDNGTFTCDVKNPPDIVGKTSQVTLYVFEKVPTRYGVVLGAVIGGVLGVVLLLLLLFYVVRYCWLRRQAALQRRLSAMEKGKLHKPGKDASKRGRQTPVLYAMLDHSRSTKAVSEKKAKGLGESRKDKKXRLAGRAGDRGLGVESAKGPKVMVIEMELRKDEQSPELRPAVKSPSRTSLKNALKNMMGLNSDK

SEQ ID NO: 80599 - protein, 309 aa, Homo sapiens
MVRTDGHTLSEKRNYQVTNSMFGASRKKFVEGVDSDYHDENMYYSQSSMFPHRSEKDMLASPSTSGQLSQFGASLYGQQSALGLPMRGMSNNTPQLNRSLSQGTQLPSHVTPTTGVPTMSLHTPPSPSSMSGFGMNRNQAFGMNNSLSSNIFNGTDGSENVTGLDLSDFPALADRNRREGSGNPTPLINPLAGRAPYVGMVTKPANEQSQDFSIHNEDFPALPGSSYKDPTSSNDDSKSNLNTSGKTTSSTDGPKFPGDKSSTTQNNNQQKKGIQVLPDGRVTNIPQGMVTDQFGMIGLLTFIRAAETD

SEQ ID NO: 80600 - protein, 475 aa, Homo sapiens
MEPLAPMRLYTLSKRHFVLVFVVFFICFGLTIFVGIRGPKVIQTSAANFSLNNSKKLKPIQILSNPLSTYNQQLWLTCVVELDQSKETSIKTSFPMTVKVDGVAQDGTTMYIHNKVHNRTRTLTCAGKCAEIIVAHLGYLNYTQYTVIVGFEHLKLPIKGMNFTWKTYNPAFSRLEIWFRFFFVVLTFIVTCLFAHSLRKFSMRDWGIEQKWMSVLLPLLLLYNDPFFPLSFLVNSWLPGMLDDLFQSMFLCALLLFWLCVYHGIRVQGERKCLTFYLPKFFIVGLLWLASVTLGIWQTVNELHDPMYQYRVDTGNFQGMKVFFMVVAAVYILYLLFLIVRACSELRHMPYVDLRLKFLTALTFVVLVISIAILYLRFGAQVLQDNFVAELSTHYQNSAEFLSFYGLLNFYLYTLAFVYSPSKNALYESQLKDNPAFSMLNDSDDDVIYGSDYEEMPLQNGQAIRAKYKEESDSD

SEQ ID NO: 80601 - protein, 96 aa, Homo sapiens
MAEPDPSHPLETQAGKVQEAQATFLPQPFPQTWYHPLSSLPNPTSRAWPLHPTPSRTQIQTLREEPLVEKQTWTSCGTYSPRRSAWAARRSVCWTS

SEQ ID NO: 80602 - protein, 108 aa, Homo sapiens
MASVSSATFSGHGARSLLQFLRLVGQLKRVPRTGWVYRNVQRPESVSDHMYRMAVMAMVIKDDRLNKDRCVRLALVHDMAECIVGDIAPADNIPKEEKHRREEVSVDY

SEQ ID NO: 80603 - protein, 116 aa, Homo sapiens
MSRVLQKDAEQESQMRAEIQDMKQELSTVNMMDEFARYARLERKINKMTDKLKTHVKARTAQLAKIKWVISVAFYVLQAALMISLIWKYYSVPVAVVPSKWITPLDRLVAFPTRVA

SEQ ID NO: 80604 - protein, 103 aa, Homo sapiens
MPIPPPPPPPPGPPPPPTFHQANTEQPKLSRDEQRGRGALLQDICKGTKLKKVTNINDRSAPILEKPKGSSGGYGSGGAALQPKGGLFQGGVLKLRPVGAKDG

SEQ ID NO: 80605 - protein, 107 aa, Homo sapiens
MSMAACPEAPEPSFLREVPSSPASTQWHRPCNFRQVEANPRKEPKNLVWRDVSLGQTSRTPRGSGLELVRVCGGGMQRDKTVVEERVGEERERERERVWGERASMGR

SEQ ID NO: 80606 - protein, 69 aa, Homo sapiens
MGFPAAALLCALCCGLLAPAARAGYSEERCSWRGRPRRTRTSAAAWPPSALSCARTGAPSCPRRPTVSA

SEQ ID NO: 80607 - protein, 416 aa, Homo sapiens
ERLKLERNKEYNQFLRGKEESSEKFRQVEKSTEPKSQRNKKPIGQVKPDLTSQIQTSCENSEGPRKDVLTPSEAYEELLNQRRLEEDRYRQLDDEIELRNRRIIKKANEEVGISNLKHQRFASKAGIPDRRFHRFNEDRVFDRRYHRPDQDPEVSEEMDERFRYESDFDRRLSRVYTNDRMHRNKRGNMPPMEHDGDVIEQSNIRISSAENKSAPDNETSKSANQDTCSPFAGMLFGGEDRELIQRRKEKYRLELLEQMAEQQRNKRREKDLELRVAASGAQDPEKSPDRLKQFSVAPRHFEEMIPPERPRIAFQTPLPPLSAPSVPPIPSVHPVPSQNEDLRSGLSSALGEMVSPRIAPLPPPPLLPPLATNYRTPYDDAYYFYGSRNTFDPSLAYCKLSIGWFRNDGRTACSLC

SEQ ID NO: 80608 - protein, 244 aa, Homo sapiens
MPREDRATWKSNYFLKIIQMQQIRMSLRGKAVVLMGKNTMMRKAIRGHLENNPALEKLLPHIRGNVGFVFTKEDLTEIRDMLLANKVPAAARAGAIAPCEVTVPAQNTGLGPEKTSFFQALGITTKISRGTIEILSDVQLIKTGDKVGASEATLLNMLNISPFSFGLVIQQVFDNGSIYNPEVLDITEETLHSRFLEGVRNVASVCLQIGYPTVASVPHSIINGYKRVLALSVETDYTFPLAEK

SEQ ID NO: 80609 - protein, 1121 aa, Homo sapiens
MSAPVGPRGRLAPIPAASQPPLQPEMPDLSHLTEEERKIILAVMDRQKKEEEKEQSVLKKLHQQFEMYKEQVKKMGEESQQQQEQKGDAPTCGICHKTKFADGCGHNCSYCQTKFCARCGGRVSLRSNKEDKVVMWVCNLCRKQQEILTKSGAWFYNSGSNTPQQPDQKVLRGLRNEEAPQEKKPKLHEQTQFQGPSGDLSVPAVEKSRSHGLTRQHSIKNGSGVKHHIASDIASDRKRSPSVSRDQNRRYDQREEREEYSQYATSDTAMPRSPSDYADRRSQHEPQFYEDSDHLSYRDSNRRSHRHSKEYIVDDEDVESRDEYERQRREEEYQSRYRSDPNLARYPVKPQPYEEQMRIHAEVSRARHERRHSDVSLANADLEDSRISMLRMDRPSRQRSISERRAAMENQRSYSMERTREAQGPSSYAQRTTNHSPPTPRRSPLPIDRPDLRRTDSLRKQHHLDPSSAVRKTKREKMETMLRNDSLSSDQSESVRPPPPKPHKSKKGGKMRQISLSSSEEELASTPEYTSCDDVEIESESVSEKGDMDYNWLDHTSWHSSEASPMSLHPVTWQPSKDGDRLIGRILLNKRLKDGSVPRDSGAMLGLKVVGGKMTESGRLCAFITKVKKGSLADTVGHLRPGDEVLEWNGRLLQGATFEEVYNIILESKPEPQVELVVSRPIGDIPRIPDSTHAQLESSSSSFESQKMDRPSISVTSPMSPGMLRDVPQFLSGQLSIKLWFDKVGHQLIVTILGAKDLPSREDGRPRNPYVKIYFLPDRSDKNKRRTKTVKKTLEPKWNQTFIYSPVHRREFRERMLEITLWDQARVREEESEFLGEILIELETALLDDEPHWYKLQTHDVSSLPLPHPSPYMPRRQLHGESPTRRLQRSKRISDSEVSDYDCDDGIGVVSDYRHDGRDLQSSTLSVPEQVMSSNHCSPSGSPHRVDVIGRTRSWSPSVPPPQSRNVEQGLRGTRTMTGHYNTISRMDRHRVMDDHYSPDRDSHFLTLPRSRYSQTIDHHHRDGRDCEAADRQPYHRSRSTEQRPLLERTTTRSRSTERPDTNLMRSMPSLMTGRSAPPSPALSRSHPRTGSVQTSPSSTPVAGRRGRQLPQLPPKGTLDR

SEQ ID NO: 80610 - protein, 124 aa, Homo sapiens
MAAAAAEQQQFYLLLGNLLSPDNVVRKQAEETYENIPGQSKITFLLQAIRNTTAAEEARQMAAVLLRRLLSSAFDEVYPALPSDVQTAIKSELLMIIQMETQSSMRKKVCDIAAELARNLIGVY

SEQ ID NO: 80611 - protein, 59 aa, Homo sapiens
MQLLPPPIRTGTKTQMDAKKPRKCDLTPFLVLKARKKQKFTSAKEETRRSQLRKQENRL

SEQ ID NO: 80612 - protein, 441 aa, Homo sapiens
  MOD_RES (1)..(1): Any amino acid
XNRAASKYPKTKKYLVTEWLNDKAEKQECPVECPLRITTDPTVLATTLNMLPGLIHSPLICTTPKHYIRFGSPFIPERRRRPLLPDGTFSSCKKRWIKQALEEGMTQTSSVPQETRTQHLYQSNENSSSSSICKDNADLLSPLKKWKSRYLMEQNVTKLLRPLSPVTPPPPNSGSKSPQLATPGSSHPGEEECRNGYSLMFSPVTSLTTASRCNTPLQFENISSPESSPAHRPESLSPELCHRKDLDLAKVGYLDSNTNSCADRPSLLNSGHSDLAPHPSLGPTSETGFPSRSGDGHQTLVRNSDQAFRTEFNLMYAYSPLNAMPRADGLYRGSPLVGDRKPLHLDGGYCSPAEGFSSRYEHGLMKDLSRGSLSPGGERACEGVPSAPQNPPQRKKVSLLEYRKRKQEAKENSAGGGGDSAQSKSKSAGAGQGSSNSVSDT

SEQ ID NO: 80613 - protein, 147 aa, Homo sapiens
MERLGTPSGLDSTKDASNGGVSEQHPWPSGFERELKPETISSPGYHILRATGEENMAVSLDDDVPLILTLDEGGSAPLAPSNGLGQEELPSKNGGSYAIHDSQAPSLSSGGESSPSSPAHNWEMNYQEAAIYLQEGENNDKFFTHPK

SEQ ID NO: 80614 - protein, 112 aa, Homo sapiens
AAAVGSVATLATEPGEDAFRKLFRFYRQSRPGTADLEGVIDFSAAHAARGKGPGAQKVIKSQLNVSSVSEQNAYRAGLQPVSKWQAYGLKGYPGIKKRLNGDPEVYWRNCVG

SEQ ID NO: 80615 - protein, 203 aa, Homo sapiens
MSGARSKLALFLCGCYVVALGAHTGEESVADHHEAEYYVAAVYEHPSILSLNPLALISRQEALELMNQNLDIYEQQVMTAAQKDVQIIVFPEDGIHGFNFTRTSIYPFLDFMPSPQVVRWNPCLEPHRFNDTEGSLGGQTQAQRQKLPGGRLQLHLRKTFLTVRAAQQLNGLLGEVESLGSVQGGKITLVEGTPAFVKRLETG

SEQ ID NO: 80616 - protein, 628 aa, Homo sapiens [sequence omitted]

SEQ ID NO: 80617 - protein, 135 aa, Homo sapiens
GYSRPRYSPQVLGVRIQNGRHPLMELCARTFVPNSTECGGDKGRVKVITGPNSSGKSIYLKQVAKAVNNATAQSLVLIDEFGKGTNTVDGLALLAAVLRHWLARGPTCPHIFVATNFLSLVQLQLLPQGPLVQYL

SEQ ID NO: 80618 - protein, 59 aa, Homo sapiens
SDSLVVCEVDPELTEKLRKFRFRKETDNAAIIKHFPRGAQNGVAGETAQVRGLQLQVRA

SEQ ID NO: 80619 - protein, 220 aa, Homo sapiens
MAGQPGHMPHGGSSNNLCHTLGPVHPPDPQRHPNTLSFRCSLADFQIEKKIGRGQFSEVYKATCLLDRKTVALKKVQIFEMMDAKARQDCVKEIGLLKQLNHPNIIKYLDSFIEDNELNIVLELADAGDLSQMIKYFKKQKRLIPERTVWKYFVQLCSAVEHMHSRRVMHRDIKPANVFITATGVVKLGDLGLGRFFSSETTAAHSLVGTPYYMSPERIH

SEQ ID NO: 80620 - protein, 400 aa, Homo sapiens [sequence omitted]

SEQ ID NO: 80621 - protein, 423 aa, Homo sapiens
MPAEHVAVQVPAPEPTPGPVRILRTAQDLSSPRTRTGDVLLAEPADFESLLLSRPVLEGLRAAGFERPSPVQLKAIPLGRCGLDLIVQAKSGTGKTCVFSTIALDSLVLENLSTQILILAPTREIAVQIHSVITAIGIKMEGLECHVFIGGTPLSQDKTRLKKCHIAVGSPGRIKQLIELDYLNPGSIRLFILDEADKLLEEGSFQEQINWIYSSLPASKQMLAVSATYPEFLANALTKYMRDPTFVRLNSSDPSLIGLKQYYKVVNSYPLAHKVFEEKTQHLQELFSRIPFNQALVFSNLHSRAQHLADILSSKGFPAECISGNMNQNQRLDAMAKLKHFHCRVLISTDLTSRGIDAEKVNLVVNLDVPLDWETYMHRIGRAGRFGTLGLTVTYCCRGEEENMMMRIAQKCNINLLPLPELD

SEQ ID NO: 80622 - protein, 146 aa, Homo sapiens
MEQPRKAVVVTGFGPFGEHTVNASWIAVQELEKLGLGDSVDLHVYEIPVEYQTVQRLIPALWEKHSPQLVVHVGVSGMATTVTLEKCGHNKGYKGLDNCRFCPGSQCCVEDGPESIDSIIDMDAVCKRVTTLGLDVSVTISQDAGR

SEQ ID NO: 80623 - protein, 40 aa, Homo sapiens
CADHSAAQPVPESTEHSPNCRRITLRCSQNCRRSMGRLKR

SEQ ID NO: 80624 - protein, 59 aa, Homo sapiens
  MOD_RES (1)..(1): Any amino acid
XYEGTKPDVILRLEQEEAPWIGEAACPGCHCWVAVPFYITTSNAQGFQFLHNLAIHHLL

SEQ ID NO: 80625 - protein, 148 aa, Homo sapiens
MRPAAGAARRPRCCTSWLTRCPSPAASAPTWTRPLSCASPSATCACTASAPQATRMYPHFLGGAWEWNQVGAGGEPLDACYLKALEGFVMVLTAEGDMAYLSENVSKHLGLSQLELIGHSIFDFIHPCDQEELQDALTPQQTLSRRKV

SEQ ID NO: 80626 - protein, 628 aa, Homo sapiens
MGSGARFPSGTLRVRWLLLLGLVGPVLGAARPGFQQTSHLSSYEIITPWRLTRERREAPRPYSKQVSYVIQAEGKEHIIHLERNKDLLPEDFVVYTYNKEGTLITDHPNIQNHCHYRGYVEGVHNSSIALSDCFGLRGLLHLENASYGIEPLQNSSHFEHIIYRMDDVYKEPLKCGVSNKDIEKETAKDEEEEPPSMTQLLRRRRAVLPQTRYVELFIVVDKERYDMMGRNQTAVREEMILLANYLDSMYIMLNIRIVLVGLEIWTNGNLINIVGGAGDVLGNFVQWREKFLITRRRHDSAQLVLKKGFGGTAGMAFVGTVCSRSHAGGINVFGQITVETFASIVAHELGHNLGMNHDDGRDCSCGAKSCIMNSGASGSRNFSSCSAEDFEKLTLNKGGNCLLNIPKPDEAYSAPSCGNKLVDAGEECDCGTPKECELDPCCEGSTCKLKSFAECAYGDCCKDCRFLPGGTLCRGKTSECDVPEYCNGSSQFCQPDVFIQNGYPCQNNKAYCYNGMCQYYDAQCQVIFGSKAKAAPKDCFIEVNSKGDRFGNCGFSGNEYKKCATGNALCGKLQCENVQEIPVFGIVPAIIQTPSRGTKCWGVDFQLGSDVPDPGMVNEGTKCGAGKK

SEQ ID NO: 80627 - protein, 684 aa, Homo sapiens
MSLPSPSPSRELCPPDPAFAPLSSWPGSGPAGGSTRSGHVLYSGWLRKSPPEKKLRLFAWRKRWFILRRGQTSSDPDVLEYYKNDGSKKPLRTINLNLCEQLDVDVTLNFNKKEIQKGYMFDIKTSERTFYLVAETREDMNEWVQSICQICGFRQEESTGFLGNISSASHGLCSSPAEPSCSHQHLPQEQEPTSEPPVSHCVPPTWPIPAPPGCLRSHQHASQRAEHARSASFSQGSEAPFIMRRNTAMQNLAQHSGYSVDGVSGHIHGFHSLSKPSQHNAEFRGSTHRIPWSLASHGHTRGSLTGSEADNEGVYPFKAPRSTLFQEFGGHLVNNSGVPATPLSVHQIPRTVTLDKNLYAMVVATPGPIASLPLPKASQAEACQWGSPQQRPLVSESSRWSVAAAIPRRNTLPAVDNSRCHQASSGKYTQHGGGNASRPAESMHEGVCSFLPGRTLVGLSDSIASEGSCVPMNPGSPTLPAVKQAGDDSQGVCIPVGSCLVRFDLLGSPLTELSMHQDLSQGHEVQLPPVNRSLKPNQKANPTPPNLRNNRVINELSFKPPVTEPWSGTSHTFDSSSSQHPISTQSITNTDSEDSGERYLFPNPASAFPVSGGTSSSAPPRSTGNIHYAALDFQPSKPSIGSVTSGKKVDYVQVDLEKTQALQKTMHEQMCLRQSSEPPRGAKL

SEQ ID NO: 80628 - protein, 261 aa, Homo sapiens
MGHEQNQGAALLQMLPLLWLLPHSWAVPEAPTPMWPDDLQNHTFLHTVYCQDGSPSVGLSEAYDEDQLFFFDFSQNTRVPRLPEFADWAQEQGDAPAILFDKEFCEWMIQQIGPKLDGKIPVSRGFPIAEVFTLKPLEFGKPNTLVCFVSNLFPPMLTVNWQHHSIPVEGFGPTFVSAVDGLSFQAFSYLNFTPEPSDIFSCIVTHEIDRYTAIAYWVPRNALPSDLLENVLCGVAFGLGVLGIIVGIVLIIYFRKPCSGD

SEQ ID NO: 80629 - protein, 112 aa, Homo sapiens
MPKKAKPTGSGKEEGPAPCKQMKLEAAGGPSALNFDSPSSLFESLISPIKTETFFKEFWEQKPLLIQRDDPALATYYGSLFKLTDLKSLCSRGMYYGRDVNVCRCVNGKKKV

SEQ ID NO: 80630 - protein, 71 aa, Homo sapiens
MNTSPGTVGSDPVILATAGYDHTVRFWQAHSGICTRTVQHQDSVNALEVTPDRSMIAAAACVPRLPAHPHV

SEQ ID NO: 80631 - protein, 123 aa, Homo sapiens
SDVLELTDDNFESRISDTGSAGLMLVEFFAPWCGHCKRLAPEYEAAATRLKGIVPLAKVDCTANTNTCNKYGVSGYPTLKIFRDGEEAGAYDGPRTAGVSSYFVLHISLTSLRTRLWHIQSKK

SEQ ID NO: 80632 - protein, 146 aa, Homo sapiens
  MOD_RES (1)..(1): Any amino acid
XVQSLSSTPRVIPNVHNKANKITGNQNQDTQEKKEKRQGTAPPPMKLPPPYKALTDDSDENEEEDAFTDQKIRQRYADLPGELHIIELEKDKNGLGLSLAGNKDRSRMSIFVVGINPEGPAAADGRMRIGDELLETLTQNRIYSHP

SEQ ID NO: 80633 - protein, 110 aa, Homo sapiens
MAAPLIPLSQQIPTGNSLYESYYKQVDPAYTGRVGASEAALFLKKSGLSDIILGKIWDLADPEGKGFLDKQGFYVALRLVACAQSGHEVTLSNLNLSMPPPKFQTHPPMI

SEQ ID NO: 80634 - protein, 112 aa, Homo sapiens
MWEPVLFGTWDGVFTSCMINIFGVVLFLRTGWLVGNTGVLLGMFLVSFVILVALVTVLSGIGVGERSSIGSGGVYSMISSVLGGQTGGTIGLLYVFGQCVAGAMYITGFAES

SEQ ID NO: 80635 - protein, 535 aa, Homo sapiens
MLHKSEEGRVLVEFTCKNQPKPSLPTEWALCGEREDRLELLKLSTFALIITPGDPRLVISSGCATRLFEALEVGAVPVVLGEQVQLPYQDMLQWNEAALVVPKPRVTEVHFLLRSLSDSDLLAMRRQGRFLWETYFSTADSIFNTVLAMIRTRIQIPAAPIREEAAAEIPHRSGKAAGTDPNMADNGDLDLGPVETEPPYASPRYLRNFTLTVTDFYRSWNCAPGPFHLFPHTPFDPVLPSEAKFLGSGTGFRPIGGGAGGSGKEFQAALGGNVPREQFTVVMLTYEREEVLMNSLERLNGLPYLNKVVVVWNSPKLPSEDLLWPDIGVPIMVVRTEKNSLNNRFLPWNEIETEAILSIDDDAHLRHDEIMFGFRVWREARDRIVGFPGRYHAWDIPHQSWLYNSNYSCELSMVLTGAAFFHKYYAYLYSYVMPQAIRDMVDEYINCEDIAMNFLVSHITRKPPIKVTSRWTFRCPGCPQALSHDDSHFHERHKCINFFVKVYGYMPLLYTQFRVDSVLFKTRLPHDKTKCFKFI

SEQ ID NO: 80636 - protein, 112 aa, Homo sapiens
MESAIAEGGASRFSASSGGGGSRGAPQHYPKTAGNSEFLGKTPGQNAQKWIPARSTRRDDNSAANNSANEKERHDAIFRKVRGILNKLTPEKFDKLCLELLNVGVESKLILK

SEQ ID NO: 80637 - protein, 557 aa, Homo sapiens [sequence omitted]

SEQ ID NO: 80638 - protein, 70 aa, Homo sapiens
MAASSRAQVLSLYRAMLRESKRFSAYNYRTYAVRRIRDAFRENKNVKDPVEIQTLVNKAKRDLGVIRRQA

SEQ ID NO: 80639 - protein, 444 aa, Homo sapiens
  MOD_RES (1)..(1): Any amino acid
XKYGGFYINTGTLQFRQASDTEEDDITDNQKHKPPKVPKIKEDDIEMKKRKRKEEGEKEKKPRKKVPKQLGVVALNSHKSEKKKKRYKDSLSLAAMIRKFQKEKDALKKESNPKVPVTLSTPSLNKPPCAAAALGNDVPDLNLSSGDPDLPIFVSTNEHELFQEAENALEMLDDFDFDRLLDAASDGSPLSESGGENGTTTQPTYTSQVMPKVVPTLPEGLPVLLEKRIEDLRVAAKLFDEEGRKKFFTQDMNNILLDIELQLQELGPVIRSGVYSHLEAFVPCNKETLVKRLKKLHLNVQDDRLREPLQKLKLAVSNVMPEQLFKYQEDCQARSQAKCAKLQTDEEREKNGSEEDDDEKPGKRVIGPRKKFHWDDTIRTLLCNLVEIKLGCYELEPNKSQSAEDYLKSFMETEVKPLWPKGWMQARMLFKESRSVHNHLTSAP

SEQ ID NO: 80640 - protein, 166 aa, Homo sapiens
SPQVHNLQELRRSASLATKVFIQRDYSDGTICQFQTKFPPELDSRIERQLFEETVKTLNGFYAEAEKIGGSSYLEGCLACATAYFIFLCMETHYEKVLKKISRYIQEQNEKIFAPRGLLLTDPVERGMRVIEISIYEDRCSSGSSSSGSSSGSGSSSGGGGGAGAR

SEQ ID NO: 80641 - protein, 49 aa, Homo sapiens
GKSYLFLLSSDYERSEWREAIQKLQKKGKFLPLPRSPMMSVALMGLLYF

SEQ ID NO: 80642 - protein, 74 aa, Homo sapiens
  MOD_RES (1)..(1): Any amino acid
XDRRGEAVRALYQELLCSGRPASPALGARRLPAGHHPWDRLPGHCERHLPTVPRRRLCVASSGRPSSPSPGSGR

SEQ ID NO: 80643 - protein, 534 aa, Homo sapiens [sequence omitted]

SEQ ID NO: 80644 - protein, 120 aa, Homo sapiens
FISGILAALSAMISLEIPQVNIMTKMDLLSKKAKKEIEKFLDPDMYSLLEDSTSDLRSKKFKKLTKAICGLSDEESMNIVLQHIDFAIQYGEDLEFKEPKEREDESSSMFDEYFQECQDE

SEQ ID NO: 80645 - protein, 103 aa, Homo sapiens
MLVAAAAERNKDPILHVLRQYLDPAQRGVRVLEVASGSGQHAAHFARAFPLAEWQPSDVDQRCLDRGSSEQQDTCSNPGPCSSPTGPMPSMGRSPPRATWTLT

SEQ ID NO: 80646 - protein, 206 aa, Homo sapiens
MRILEESAERRWRWWPSPVAPVLLALELVAMEELQEPLRGQLRLCFTQAARTSLLLLRLNDAALRALQECQRQQVRPVIAFQGHRGYLRLPGPGWSCLFSFIVSQCCQEGAGGSLDLVCQRFLRSGPNSLHCLGSLRERLIIWAAMDSIPAPSSVQGHNLTEDARHPESWQNTGGYSEGDAVSQPQMALEEVSVSDPLASNQGQSL

SEQ ID NO: 80647 - protein, 1002 aa, Homo sapiens
MAAVTMSVPGRKAPPRPGPVPEAAQPFLFTPRGPSAGGGPGSGTSPQVEWTARRLVWVPSELHGFEAAALRDEGEEEAEVELAESGRRLRLPRDQIQRMNPPKFSKAEDMAELTCLNEASVLHNLRERYYSGLIYTYSGLFCVVINPYKQLPIYTEAIVEMYRGKKRHEVPPHVYAVTEGAYRSMLQDREDQSILCTGESGAGKTENTKKVIQYLAHVASSPKGRKEPGVPASVSTVSYGELERQLLQANPILEAFGNAKTVKNDNSSRFGKFIRINFDVAGYIVGANIETYLLEKSRAIRQAKDECSFHIFYQLLGGAGEQLKADLLLEPCSHYRFLTNGPSSSPGQERELFQETLESLRVLGFSHEEIISMLRMVSAVLQFGNIALKRERNTDQATMPDNTAAQKLCRLLGLGVTDFSRALLTPRIKVGRDYVQKAQTKEQADFALEALAKATYERLFRWLVLRLNRALDRSPRQGASFLGILDIAGFEIFQLNSFEQLCINYTNEKLQQLFNHTMFVLEQEEYQREGIPWTFLDFGLDLQPCIDLIERPANPPGLLALLDEECWFPKATDKSFVEKVAQEQGGHPKFQRPRHLRDQADFSVLHYAGKVDYKANEWLMKNMDPLNDNVAALLHQSTDRLTAEIWKDVEGIVGLEQVSSLGDGPPGGRPRRGMFRTVGQLYKESLSRLMATLSNTNPSFVRCIVPNHEKRAGKLEPRLVLDQLRCNGVLEGIRICRQGFPNRILFQEFRQRYEILTPNAIPKGFMDGKQACEKMIQALELDPNLYRVGQSKIFFRAGVLAQLEEERDLKVTDIIVSFQAAARGYLARRAFQKRQQQQSALRVMQRNCAAYLKLRHWQWWRLFTKVKPLLQVTRQDEVLQARAQELQKVQELQQQSAREVGELQGRVAQLEEERARLAEQLRAEAELCAEAEETRGRLAARKQELELVVSELEARVGEEEECSRQMQTEKKRLQQHIQELEAHLEAEEGARQKLQLEKVTTE

SEQ ID NO: 80648 - protein, 864 aa, Homo sapiens
QLLSFSKLPEPTSGVIARAAEIMETSIQAMKRKVNLKTQQSQHPTDALSEDLLSIIANMSGCLPYMLPPKCPNTCLANKYRPITGACNNRDHPRWGASNTALARWLPPVYEDGFSQPRGWNPGFLYNGFPLPPVREVTRHVIQVSNEVVTDDDRYSDLLMAWGQYIDHDIAFTPQSTSKAAFGGGSDCQMTCENQNPCFPIQLPEEARPAAGTACLPFYRSSAACGTGDQGALFGNLSTANPRQQMNGLTSFLDASTVYGSSPALERQLRNWTSAEGLLRVHARLRDSGRAYLPFVPPRAPAACAPEPGIPGETRGPCFLAGDGRASEVPSLTALHTLWLREHNRLAAALKALNAHWSADAVYQEARKVVGALHQIITLRDYIPRILGPEAFQQYVGPYEGYDSTANPTVSNVFSTAAFRFGHATIHPLVRRLDASFQEHPDLPGLWLHQAFFSPWTLLRGGGLDPLIRGLLARPAKLQVQDQLMNEELTERLFVLSNSSTLDLASINLQRGRDHGLPGYNEWREFCGLPRLETPADLSTAIASRSVADKILDLYKHPDNIDVWLGGLAENFLPRARTGPLFACLIGKQMKALRDGDWFWWENSHVFTDAQRRELEKHSLSRVICDNTGLTRVPMDAFQVGKFPEDFESCDSITGMNLEAWRETFPQDDKCGFPESVENGDFVHCEESGRRVLVYSCRHGYELQGREQLTCTQEGWDFQPPLCKDSGRLPRVTWISMSLAALLIGGFAGLTSTVICRWTRTGTKSTLPISETGGGTPELRCGKHQAVGTSPQRAAAQDSEQVGHTMPHVSSCHRSGWTGSGCRSSSAGAPCIFLFTPCFLVRSAPSSGRFYLQANDSEPECEPA

SEQ ID NO: 80649 - protein, 118 aa, Homo sapiens
MYTVGYSFSLISLFLALTLLLFLRKLHCTRNYIHMNLFASFILRTLAVLVKDVVFYNSYSKRPDNENGWMSYLSEMSTSCRSVQVLLHYFVGANYLWLLVEGLYLHTLLEPTVLPERR

SEQ ID NO: 80650 - protein, 106 aa, Homo sapiens
MLRPGAQLLRGLLLRSCPLQGSPGRPRSVCGREGEEKPPLSAETQWKDRAETVIIGGGCVGVSLAYHLAKAGMKDVVLLEKSELTAGSTWHAIWHNPRWWGREISQ

SEQ ID NO: 80651 - protein, 39 aa, Homo sapiens
MRRVGGRADEDATAAGTWETKVKWKHQLGMVLGRNYPIW

SEQ ID NO: 80652 - protein, 49 aa, Homo sapiens
MVRMNVLADALKSINNAEKRGKRQVLIRPCSKVIVRFLTVMMKHVSYLL

SEQ ID NO: 80653 - protein, 59 aa, Homo sapiens
MRTRTGSQLAAREVTGSGAVPRQLEGRRCQAGRDANGGTSSDGSSSMAAIYGGVEGAYL

SEQ ID NO: 80654 - protein, 155 aa, Homo sapiens
MLENYSHLISVGYCITKPKVISKLEKGEEPWSLEDEFLNQRYPGYFKVDHIKGIREKQEKPLWQEIFISDADKTLSKEGQKVLEKPFNLEIAPELSEKISCKCDSHRMNLPVASQLIISERKYSRKKTEYMNVCEKLQLDIKHEKAHAEEKSYEH

SEQ ID NO: 80655 - protein, 356 aa, Homo sapiens
MGTEAQPVVKAVILHCLPSCPHSCLLPPTRVIMSQDQESPRCTHDQHLQTFSETQSLEVAQVSKALEKTLLSSSHPLVPGKLKEAPAAKAESPLEVPQSFCSSSIAVTTTSSSESDEASSNQEEEDSPSSSEDTSDPRNVPADALDQKVAFLVNFMLHKCQMKKPITKADMLKIIIKDDESHFSEILLRASEHLEMIFGLDVVEVDPTTHCYGLFIKLGLTYDGMLSGEKGVPKTGLLIIVLGVIFMKGNRATEEEVWEVLNLTGVYSGKKHFIFGEPRMLITKDFVKEKYLEYQQVANSDPARYEFLWGPRAKAETSKMKVLEFVAKVHGSYPHSFPSQYAEALKEEEERARARI

SEQ ID NO: 80656 - protein, 183 aa, Homo sapiens
MVLLHVKRGDESQFLLQAPGSTELEELTVQVARVYNGRLKVQRLCSGLTDDQIEELKLKDEWGEKCVPSGGAVFKKDDIGRRNGQAPNEKMKQVLKKTIEEAKAIISKKQVEAGVCVTMEMVKDALDQLRGAVMIVYPMGLPPYDPIRMEFENKEDLSGTQAGLNVIKEAEAQLWWAAKELRR

SEQ ID NO: 80657 - protein, 78 aa, Homo sapiens
MAVNVYSTSITQETMSRHDIIAWVNDIVSLNYTKVEQLCSGAAYCQFMDMLFPGCISLKKVKFQAKLEHEYIHNFKLL

SEQ ID NO: 80658 - protein, 1114 aa, Homo sapiens
MVWRLVLLALWVWPSTQAGHQDKDTTFDLFSISNINRKTIGAKQFRGPDPGVPAYRFVRFDYIPPVNADDLSKITKIMRQKEGFFLTAQLKQDGKSRGTLLALEGPGLSQRQFEIVSNGPADTLDLTYWIDGTRHVVSLEDVGLADSQWKNVTVQVAGETYSLHVGCDLIDSFALDEPFYEHLQAEKSRMYVAKGSARESHFRGLLQNVHLVFENSVEDILSKKGCQQGQGAEINAISENTETLRLGPHVTTEYVGPSSERRPEVCERSCEELGNMVQELSGLHVLVNQLSENLKRVSNDNQFLWELIGGPPKTRNMSACWQDGRFFAENETWVVDSCTTCTCKKFKTICHQITCPPATCASPSFVEGECCPSCLHSVDGEEGWSPWAEWTQCSVTCGSGTQQRGRSCDVTSNTCLGPSIQTRACSLSKCDTRIRQDGGWSHWSPWSSCSVTCGVGNITRIRLCNSPVPQMGGKNCKGSGRETKACQGAPCPNGCLSNPCFPGAQCSSFPDGSWSCGSCPVGFLGNGTHCEDLDECALVPDICFSTSKVPRCVNTQPGFHCLPCPPRYRGNQPVGVGLEAAKTEKQVCEPENPCKDKTHNCHKHAECIYLGHFSDPMYKCECQTGYAGDGLICGEDSDLDGWPNLNLVCATNATYHCIKDNCPHLPNSGQEDFDKDGIGDACDDDDDNDGVTDEKDNCQLLFNPRQADYDKDEVGDRCDNCPYVHNPAQIDTDNNGEGDACSVDIDGDDVFNERDNCPYVYNTDQRDTDGDGVGDHCDNCPLVHNPDQTDVDNDLVGDQCDNNEDIDDDGHQNNQDNCPYISNANQADHDRDGQGDACDPDDDNDGVPDDRDNCRLVFNPDQEDLDGDGRGDICKDDFDNDNIPDIDDVCPENNAISETDFRNFQMVPLDPKGTTQIDPNWVIRHQGKELVQTANSDPGIAVGFDEFGSVDFSGTFYVNTDRDDDYAGFVFGYQSSSRFYVVMWKQVTQTYWEDQPTRAYGYSGVSLKVVNSTTGTGEHLRNALWHTGNTPGQVRTLWHDPRNIGWKDYTAYRWHLTHRPKTGYIRVLVHEGKQVMADSGPIYDQTYAGGRLGLFVFSQEMVYFSDLKYECRDI

SEQ ID NO: 80659 - protein, 267 aa, Homo sapiens
SADPKLSLMPWFHGKISGQEAVQQLQPPEDGLFLVRESARHPGDYVLCVSFGRDVIHYRVLHRDGHLTIDEAVFFCNLMDMVERPPGNGTGCWGSPPWGWAHGCPTILQHYSKDKGAICTKLVRPKRKHGTKSAEEELARAGWLLNLQHLTLGAQIGEGEFGAVLQGEYLGQKVAVKNIKCDVTAQAFLDETAVMTKMQHENLVRLLGVILHQGLYIVMEHVSKGNLVNFLRTRGRALVNTAQLLQFSLHVAEGMEYLESKKLVHRD

SEQ ID NO: 80660 - protein, 105 aa, Homo sapiens
MPSQEPPVDDKNEDADLPSEETDGIAYISSSRKHDSIKDDSEDLKPVIDGMDGIKISQGLGLQDFDLIRVIGRGSYAKVLLVRLKKNDQIYAMKVVKKELVHDDE

SEQ ID NO: 80661 - protein, 96 aa, Homo sapiens
MSDSKKTWLQYQLEWMVQLCGASVVKELSSFTLGTGVHPIVVVQPDAWTEDNGFHAIGQMCEAPVVTREWVLDSVALYQCQELDTYLIPQIPHSHY

SEQ ID NO: 80662 - protein, 663 aa, Homo sapiens
MIEQDDFDINTRLHTIVRGEDEAAMVESVGLALVKLPDVLNRLKPDIMIVHGDRFDALALATSAALMNIRILHIEGGEVSGTIDDSIRHAITKLAHYHVCCTRSAEQHLISMCEDHDRILLAGCPSYDKLLSAKNKDYMSIIRMWLGDDVKSKDYIVALQHPVTTDIKHSIKMFELTLDALISFNKRTLVLFPNIDAGSKEMVRVMRKKGIEHHPNFRAVKHVPFDQFIQLVAHAGCMIGNSSCGVREVGAFGTPVINLGTRQIGRETGENVLHVRDADTQDKILQALHLQFGKQYPCSKIYGDGNAVPRILKFLKSIDLQEPLQKKFCFPPVKENISQDIDHILETLSALAVDLGGTNLRVAIVSMKGEIVKKYTQFNPKTYEERINLILQMCVEAAAEAVKLNCRILGVGISTGGRVNPREGIVLHSTKLIQEWNSVDLRTPLSDTLHLPVWVDNDGNCAALAERKFGQGKGLENFVTLITGTGIGGGIIHQHELIHGSSFCAAELGHLVVSLDGPDCSCGSHGCIEAYASGMALQREAKKLHDEDLLLVEGMSVPKDEAVGALHLIQAAKLGNAKAQSILRTAGTALGLGVVNILHTMNPSLVILSGVLASHYIHIVKDVIRQQALSSVQDVDVVVSDLVDPALLGAASMVLDYTTRRIY

SEQ ID NO: 80663 - protein, 57 aa, Homo sapiens
MASSNMHEAEEWYRSKFADLTDAAARNAELLRQAKHEANDYRRQLQSLTCDLESLRG

SEQ ID NO: 80664 - protein, 28 aa, Homo sapiens
MDSELMHSIVGSYHKPPERVFVPSFTQN

SEQ ID NO: 80665 - protein, 102 aa, Homo sapiens
MTRSCSAVGCSTRDTVLSRERGLSFHQFPTDTIQRSKWIRAVNRVDPRSKKIWIPGPGAILCSKHFQESDFESYGIRRKLKKGAVPSVSLYKVFKYSSRCTS

SEQ ID NO: 80666 - protein, 209 aa, Homo sapiens
MNPTLILAAFCLGIASATLTFDHSLEAQWTKWKAMHNRLYGMNEEGWRRAVWEKNMKMIELHNQEYREGKHSFTMAMNAFGDMEESCKYNPKYSVANDTGFVDIPKQEKALMKAVATVGPISVAIDAGHESFLFYKEGIYFEPDCSSEDMDHGVLVVGYGFESTESDNNKYWLVKNSWGEEWGMGGYVKMAKDRRNHCGIASAASYPTV

SEQ ID NO: 80667 - protein, 307 aa, Homo sapiens
LGFLYYSAWKLHLLQWEEDSNSVVLSFDSAGQTLGSEYDRLGFLLNLDSKLPAELATKYANFSEGACKPGYASALMTAIFPRFSKPAPMFLDDSFRKWARIREFVPPFGIKGQDNLIKAILSVTKEYRLTPALDSLRCRRCIIVGNGGVLANKSLGSRIDDYDIVVRLNSAPVKGFEKDVGSKTTLRITYPEGAMQRPEQYERDSLFVLAGFKWQDFKWLKYIVYKERVSASDGFWKSVATRVPKEPPEIRILNPYFIQEAAFTLIGLPFNNGLMGRGSWTHNIQREKEFLRKLVKARVITDLSSGI

SEQ ID NO: 80668 - protein, 246 aa, Homo sapiens
MPREDRATWKSNYFLKIIQLLDDYPKCFIVGADNVGSKQMQQIRMSLRGKAVVLMGKNTMMRKAIRGHLENNPALEKLLPHIRGNVGFVFTKEDLTEIRDMLLANKSDVQLIKTGDKVGASEATLLNMLNISPFSFGLVIQQVFDNGSIYNPEVLDITEETLHSRFLEGVRNVASVCLQIGYPTVASVPHSIINGYKRVLALSVETDYTFPLAEKVKAFLADPSAFVAAAPVAAATTAAPAAAAAP

SEQ ID NO: 80669 - protein, 128 aa, Homo sapiens
MSTGFSFGSGTLGSTTVAAGGTSTGGVFSFGTGASSNPSVGLNFGNLGSTSTPATTSAPSSGFGTGLFGSKPATGFTLGGTNTGIATTITTGLTLENNTSVYQQSFGLDQLQTQERQPLHLQLQQASV

SEQ ID NO: 80670 - protein, 374 aa, Homo sapiens
MWTVQGAQNPSSKTLISVSKDFLRPLCRAACLLHNRCLGQSRWGELHSQLGGQEDPNSLRHKYNFIADVVEKIAPAVVHIELFRKLPFSKREVPVASGSGFIVSEDGLIVTNAHVVTNKHRVKVELKNGATYEAKIKDVDEKADIALIKIDHQGKLPVLLLGRSSELRPGEFVVAIGSPFSLQNTVTTGIVSTTQRGGKELGLRNSDMDYIQTDAIINYGNSGGPLVNLDGEVIGINTLKVTAGISFAIPSDKIKKFLTESHDRQAKGKAITKKKYIGIRMMSLTSSKAKELKDRHRDFPDVISGAYIIEVIPDTPAEAGGLKENDVIISINGQSVVSANDVSDVIKRESTLNMVVRRGNEDIMITVIPEEIDP

SEQ ID NO: 80671 - protein, 94 aa, Homo sapiens
MSFLLPKLTSKKEVDQAIKSTAEKVLVLRFGRDEDPVCLQLDDILSKTSSDLSKMAAIYLVDVDQTAVYTQYFDISYIPSTVFFFNGQHMKVDY

SEQ ID NO: 80672 - protein, 15 aa, Homo sapiens
MLENLALISSLGCWC

SEQ ID NO: 80673 - protein, 82 aa, Homo sapiens
TPQKALVLIGNVEKGFTPSLKVIILMDPFDDDLKQRGEKSGIEILSLYDAENLGKEHFRKPVPPSPEDLSVICFTSGTTACL

SEQ ID NO: 80674 - protein, 74 aa, Homo sapiens
MQNQSSTNHPGASIALSRPSLNKDFRDHAEQQHIAAQQKAALQHAHAHSSGYFITQDSAFGNLILPVLPRLDPE

SEQ ID NO: 80675 - protein, 180 aa, Homo sapiens
MELTIFILRLAIYILTFPLYLLNFLGLWSWICKKWFPYFLVRFTVIYNEQMASKKRELFSNLQEFAGPSGKLSLLEVGCGTGANFKFYPPGCRVTCIDPNPNFEKFLIKSIAENRHLQFERFVVAAGENMHQVADGSVDVVVCTLVLCSVKNQERILREVCRVLRPGGAFYFMEHVAAEC

SEQ ID NO: 80676 - protein, 146 aa, Homo sapiens
MAPPAPGPASGGSGEVDELFDVKNAFYIGSYQQCINEAQRVKLSSPERDVERDVFLYRAYLAQRKFGVVLDEIKPSSAPELQAVRMFADYLAHESRRVVRSCRMPTTSSRRWLTSARPPCCCSMGRRPATWPRAAGRPLRACCRRR

SEQ ID NO: 80677 - protein, 159 aa, Homo sapiens
  MOD_RES (1)..(1): Any amino acid
XSLASDSQRLKTPNIYSDEVLRGTKLPTGVDHMASPLVQTSRSRFPPLVTETRGQNTAVPGCRLVSYRGRHLQNRVLSAMPDGTERSRLRERTATLERLSRPSTTHTFRSDTPRKSSLTQMEFAAHTWTGQSILTGSQYVPKSFQRTTLTFKRRFQVTS

SEQ ID NO: 80678 - protein, 1162 aa, Homo sapiens [sequence omitted]

SEQ ID NO: 80679 - protein, 74 aa, Homo sapiens
  MOD_RES (1)..(1): Any amino acid
XKDQVSKDKAFQTMATMSSAQLISAPSLQAKLGPTGPQVVQASELFQFWSGGSGPPWNVPEKKLLPRSPPADFP

SEQ ID NO: 80680 - protein, 210 aa, Homo sapiens
  MOD_RES (1)..(1): Any amino acid
XQQQLSDVCYRQASQLEFRQNLLQAALEFHGVAQDLSQQLDGLLGMLCVDVAPADGASIQQTLKLLEEKLKSVDVGLQGLREKGQGLLDQISNQASWAYGKDVTIENKENVDHIQGVMEDMQLRKQRCEDMVDVRRLKMLQMVQLFKCEEDAAQAVEWLSELLDALLKTHIRLGDDAQETKVLLEKHRKFVDVAQVQNWLSSFSTSSVFE

SEQ ID NO: 80681 - protein, 537 aa, Homo sapiens
MYPQGRHPAPHQPGQPGFKFTVAESCDRIKDEFQFLQAQYHSLKVEYDKLANEKTEMQRHYVMYYEMSYGLNIEMHKQTEIAKRLNTILAQIMPFLSQEHQQQVAQAVERAKQVTMTELNAIIGQQQLQAQHLSHATHGPPVQLPPHPSGLQPPGIPPVTGSSSGLLALGALGSQAHLTVKDEKNHHELDHRERESSANNSVSPSESLRASEKHRGSADYSMEAKKRKAEEKDSLSRYDSDGDKSDDLVVDVSNEDPATPRVSPAHSPPENGLDKARSLKKDAPTSPASVASSSSTPSSKTKDLGHNDKSSTPGLKSNTPTPRNDAPTPGTSTTPGLRSMPGKPPGMDPIASALRTPISITSSYAAPFAMMSHHEMNGSLTSPGAYAGLHNIPPQMSAAAAAAAAAYGRSPMVSFGAVGFDPHPPMRATGLPSSLASIPGGKPAYSFHVSADGQMQPVPFPHDALAGPGIPRHARQINTLSHGEVVCAVTISNPTRHVYTGGKGCVKIWDISQPGSKSPISQLDCLGQLHPLLQAAP

SEQ ID NO: 80682 - protein, 41 aa, Homo sapiens
KSVVIQLWKIYEYNWIGFFPLCLCCFSWPLSKDLKDAIEVL

SEQ ID NO: 80683 - protein, 172 aa, Homo sapiens
GNGTEELCLLTSGKLSYSLSWSLDENGLPLIPMPQSLRSSYCSMLRNVDARSVPGIPWLMNEQKLFEWANEVRIDPNNPEYSDLMESVTYMRLKGQDIPKYFRLEQLQDEFNFVSEEEMAKSKRFQLLQLRNAGQLDNFLLQQMPLHDTEIPDLVFQPGAVTHACNLGTLGS

SEQ ID NO: 80684 - protein, 95 aa, Homo sapiens
MGNIFEKLFKSLLGKKKMRILILSLDTAGKTTILYKLKLGETVPAVPTVGFCVETVEYKNNTFGVWDVGSHFKIRPLWQHFFQNTKAAHSQSLTS

SEQ ID NO: 80685 - protein, 14 aa, Homo sapiens
MPTSARCDDLEALK

SEQ ID NO: 80686 - protein, 60 aa, Homo sapiens
MRPLLVLLLLGLAAGSPPLDDNKIPSLCPGHPGLPGLPGPRGDPGPRGEAGPAGPTGPAG

SEQ ID NO: 80687 - protein, 777 aa, Homo sapiens
MWRCGGRQGLCVLRRLSGGHAHHRAWRWNSNRACERALQYKLGDKIHGFTVNQVTSVPELFLTAVKLTHDDTGARYLHLAREDTNNLFSVQFRTTPMDSTGVPHILEHTVLCGSQKYPCRDPFFKMLNRSLSTFMNAFTASDYTLYPFSTQNPKDFQNLLSVYLDATFFPCLRELDFWQEGWRLEHENPSDPQTPLVFKGVVFNEMKGAFTDNERIFSQHLQNRLLPDHTYSVVSGGDPLCIPELTWEQLKQFHATHYHPSNARFFTYGNFPLEQHLKQIHEEALSKFQKIEPSTVVPAQTPWDKPREFQITCGPDSFATDPSKQTTISVSFLLPDITDTFEAFTLSLLSSLLTSGPNSPFYKALIESGLGTDFSPDVGYNGYTREAYFSVGLQGIAEKDIETVRSLIDRTIDEVVEKGFEDDRIEALLHKIEIQMKHQSTSFGLMLTSYIASCWNHDGDPVELLKLGNQLAKFRQCLQENPKFLQEKVKQYFKNNQHKLTLSMRPDDKYHEKQAQVEATKLKQKVEALSPGDRQQIYEKGLELRSQQSKPQDASCLPALKVSDIEPTIPVTELDVVLTAGDIPVQYCAQPTNGMVYFRAFSSLNTLPEELRPYVPLFCSVLTKLGCGLLDYREQAQQIELKTGGMSASPHVLPDDSHMDTYEQGVLFSSLCLDRNLPDMMQLWSEIFNNPCFEEEEHFKVLVKMTAQELANGIPDSGHLYASIRAGRTLTPAGDLQETFSGMDQVRLMKRIAEMTDIKPILRKLPRIKKHLLNGVQ

SEQ ID NO: 80688 - protein, 222 aa, Homo sapiens
MSSVQSQQEQLSQSDPSPSPNSCSSFELIDMDAGSLYEPVSPHWFYCKIIDSKETWIPFNSEDSQQLEEAYSSGKGCNGRVVPTDGGRYDVHLGERMRYAVYWDELASEVRRCTWFYKGDKDNKYVPYSESFSQVLEETYMLAVTLDEWKKKLESPNREIIILHNPKLMVHYQPVAGSDDWGSTPTEQGRPRTVKRGVENISVDIHCVNDFRSVSLNLLQTH

SEQ ID NO: 80689 - protein, 69 aa, Homo sapiens
MATQGHLTFKDVAIEFSQEEWKCLEPVQKALYKDVMLENYRNLVFLGWRIMARSHLTATSVSQVSLLNV

SEQ ID NO: 80690 - protein, 142 aa, Homo sapiens
MKRRLDDQESPVYAAQQRRIPGSTEAFPHQHRVLAPAPPVYEAVSETMQSATGIQYSVTPSYQVSAMPQSSGSHGPAIAAVHSSHHHPTAVQPHGGQVVQSHAHPAPPVAPVQGQQQFQRLKVEDALSYLDQVKLQFGSQPQ

SEQ ID NO: 80691 - protein, 168 aa, Homo sapiens
MGKNKLLHPSLVLLLLVLLPTDASVSGKPQYMVLVPSLLHTETTEKGCVLLSYLNETVTVSASLESVRGNRSLFTDLEAENDVLHCVAFAVPKSSSNEEVMFLTVQVKGPTQEFKKRTTVMVKNEDSLVFVQTDKSIYKPGQTVKFRVVSMDENFHPLNELIPLVYIQ

SEQ ID NO: 80692 - protein, 586 aa, Homo sapiens
MKGRGGESQYPPSPSLPRPWRSTLHYFPKMADPIMDLFDDPNLFGLDSLTDDSFNQVTQDPIEEALGLPSSLDSLDQMNQDGGGGDVGNSSASELVPPPEETAPTELSKESTAPAPESITLHDYTTQPASQEQPAQPVLQTSTPTSGLLQVSKSQEILSQGNPFMGVSATAVSSSSAGGQPPQSAPKIVILKAPPSSSVTGAHVAQIQAQGITSTAQPLVAGTANGGKVTFTKVLTGTPLRPGVSIVSGNTVLAAKVPGNQAAVQRIVQPSRPVKQLVLQPVKGSAPAGNPGATGPPLKPAVTLTSTPTQGESKRITLVLQQPQSGGPQGHRHVVLGSLPGKIVLQGNQLAALTQAKNAQGQPAKVVTIQLQVQQPQQKIQIVPQPPSSQPQPQQPPSTQPVTLSSVQQAQIMGPGQSPGQRLSVPVKVVLQPQAGSSQGASSGLSVVKVLSASEVAALSSPASSAPHSGGKTGMEENRRLEHQKKQEKANRIVAEAIARARARGEQNIPRVLNEDELPSVRPEEEGEKKRRKKSAGERLKEEKPKKSKTSGASKTKGKSKLNTITPVVGKKRKRNTSSDNSDVEV

SEQ ID NO: 80693 - protein, 497 aa, Homo sapiens
MDPSDFPSPFDPLTLPEKPLAGDLPVDMEFGEDLLESQTAPTRGWAPPGPSPSSGALDLLDTPAGLEKDPGVLDGATELLGLGGLLYKAPSPPEVDHGPEGTLAWDAGDQTLEPGPGGQTPEVVPPDPGAGANSCSPEGLLEPLAPDSPITLQSPHIEEEETTSIATARRGSPGQEEELPQGQPQSPNAPPSPSVGETLGDGINSSQTKPGGSSPPAHPSLPGDGLTAKASEKPPERVQKRSERVRRAEPPKPEVVDSTESIPVSDEDSDAMVDDPNDEDFVPFRPRRSPRMSLRSSVSQRAGRSAVGTKMTCAHCRTPLQKGQTAYQRKGLPQLFCSSSCLTTFSKKPSGKKTCTFCKKEIWNTKDSVVAQTGSGGSFHEFCTSVCLSLYEAQQQRPIPQSGDPADATRCSICQKTGEVLHEVSNGSVVHRLCSDSCFSKFRANKGLKTNCCDQCGAYIYTKTGSPGPELLFHEGQQKRFCNTTCLGAYKKVGPRE

SEQ ID NO: 80694 - protein, 107 aa, Homo sapiens
MKRRLDDQESPVYAAQQRRIPGSTEAFPHQHRVLAPAPPVYEAVSETMQSATGIQYSVTPSYQVSAMPQSSGSHGPAIAAVHSSHHHPTAVQPHGGQVVQSHAHPAP

SEQ ID NO: 80695 - protein, 125 aa, Homo sapiens
MQESGCRLEHPSATKFRNHVMEGDWDKAENDLNELKPLVHSPHAIVVRGALEISQTLLGIIVRMKFLLLQQKYLEYLEDGKVLEALQVLRCELTPLKYNTERIHVLSGYLMCSHAEDLRAKAEWE

SEQ ID NO: 80696 - protein, 133 aa, Homo sapiens
MSDDAGDTLATGDKAEVTEMPNSDSLPEDAEVHCDSAAVSHEPTPADPRGEGHENAAVQGAGAAAIGPPVQPQDANALEPPLNGDVTEDTLAECIDSVSLEAEPRSEIPLQEQNYLAVDSPPSGGGWAGWGSW

SEQ ID NO: 80697 - protein, 964 aa, Homo sapiens
MLSLQDSVFFEISIKSLLKSWSSSSSAPVSKVNKYCASSNFHSTWGKKNIIMSNITIDPDVKPGEYVIKSLFAEFAVQAEKKIEVVMAEPLEKLLSRSLQRGEDLQFDQLISSMSSVAEHCLPSLLRTLFDWYRRQNGTEDESYEYRPRSSTKSKGDEQQRERDYLLERRDLAVDFIFCLVLVEVLKQIPVHPVPDPLVHEVLNLAFKHFKHKEGYSGTNTGNVHIIADLYAEVIGVLAQSKFQAVRKKFVTELKELRQKEQSPHVVQSVISLIMGMKFFRVKMYPVEDFEASFQFMQECAQYFLEVKDKDIKHALAGLFVEILIPVAAAVKNEVNVPCLKNFVEMLYQTTFELSSRKKHSLALYPLITCLLCVSQKQFFLNNWHIFLQNCLSHLKNKDPKMSRVALESLYRLLWVYVIRIKCESNTVTQSRLMSIVSALFPKGSRSVVPRDTPLNIFVKIIQFIAQERLDFAMKEIIFDLLSVGKSTKTFTINPERMNIGLRVFLVIADSLQQKDGEPPMPTTGVILPSGNTLRVKKIFLNKTLTDEEAKVIGMSVYYPQVRKALDSILRHLDKEVGRPMCMTSVQMSNKEPEDMITGERKPKIDLFRTCIAAIPRLIPDGMSRTDLIELLARLTIHMDEELRALAFNTLQALMLDFPDWREDVLSGFVYFIVREVTDVHPTLLDNAVKMLVQLINQWKQAAQMHNKNQDTQHGVANGASHPPPLERSPYSNVFHVVEGFALVILCSSRPATRRLAVSVLREIRALFALLEIPKGDDELAIDVMDRLSPSILESFIHLTGADQTTLLYCPSSIDLQTLAEWNSSPISHQFDVISPSHIWIFAHVTQGQDPWIISLSSFLKQENLPKHCSTAVSYAWMFAYTRLQLLSPQVDINSPINAKKVNTTTSSDSYIGLWRNYLILCCSAATSSSSTSAGSVRCSPPETLASTPDSGYSIDSKIIGIPS

SEQ ID NO: 80698 - protein, 86 aa, Homo sapiens
MALRAGLVLGFHTLMTLLSPQEAGATKGWAGRHRRNQSPSGHPGGALQPQQSHQRASTGDRAPQVSGGAGPAQHPHLHRGQHLPPC

SEQ ID NO: 80699 - protein, 97 aa, Homo sapiens
MAAPTPARPVLTHLLVALFGMGSWAAVNGIWVELPVVVKELPEGEWEGGAGVPKTPGLRSVGSGWSYLWWSESFQRVGASPLTSLCLWLWGTWVCWW

SEQ ID NO: 80700 - protein, 455 aa, Homo sapiens
MHLKHLRTLLSPQDGAAKVTCMAWSQNNAKFAVCTVDRVVLLYDEHGERRDKFSTKPADMKYGRKSYMVKGMAFSPDSTKIAIGQTDNIIYVYKIGEDWGDKKVICNKFIQTSAVTCLQWPAEYIIVFGLAEGKVRLANTKTNKSSTIYGTESYVVSLTTNCSGKGILSGHADGTIVRYFFDDEGSGESQGKLVNHPCPPYALAWATNSIVAAGCDRKIVAYGKEGHMLQTFDYSRDPQEREFTTAVSSPGGQSVVLGSYDRLRVFNWIPRRSIWEEAKPKEITNLYTITALAWKRDGSRLCVGTLCGGVEQFDCCLRRSIYKNKFELTYVGPSQVIVKNLSSGTRVVLKSHYGYEVEEVKILGKERYLVAHTSETLLLGDLNTNRLSEIAWQGSGGNEKYFFENENVCMIFNAGELTLVEYGNNDTLGSVRTEFMNPHLISGSDWWLQHWHRQP

SEQ ID NO: 80701 - protein, 426 aa, Homo sapiens
  MOD_RES (1)..(1): Any amino acid
XVAADSAILEVLQSNIQHVLVYENPALQEKALACIPVQELKRKSQEKLSRARKLDKGINISDEDFLLLELLHWFKEEFFHWVNNVLCSKCGGQTRSRDRSLLPSDDELKWGAKEVEDHYCDACQFSNRFPRVTAHIKPKTDHVKGDWKNIFKDFKETEINTDHVWTEVYSPSQQRWLHCDACEDVCDKPLLYEIGWGKKLSYVIAFSKDEVVDVTWRYSCKHEEVIARRTKVKEALLRDTINGLNKQRKETLFIPCENEKISKQLHLCYNIVKDRYVRVSNNNQTISGWENGVWKMESIFRKVETDWHMVYLARKEGSSFAYISWKFECGSVGLKVDSISIRTSSQTFQTGTVEWKLRSDTAQVELTGDNSLHSYADFSGATEVILEAELSRGDGDVAWQHTQLFRQSLNDHEENCLEIIIKFSDL

SEQ ID NO: 80702 - protein, 517 aa, Homo sapiens
MAQPVHSLCSAFGLQCCLLFLLASWGAGATTFQEYQKTGELSTSDHIFPLTPGLVYSIPFDHIVLHSGQRPPELPKSTEIHEQKRHCNTTRHSKPTDKPTGNSKTIDHKSSTDNHEAPPTSEENSSNQGKDPMIRNQRSVDPADSTTTHKESAGKKHITPAPKSKINCRKSTTGKSTVTRKSDKTGRPLEKSMSTLDKTSTSSHKTTTSFHNSGNSQTKQKSTSFPEKITAASKTTYKTTGTPEESEKTEDSRTTVASDKLLTKTTKNIQETISANELTQSLAEPTEHGGRTANENNTPSPAEPTENRERTANENKKTICTKGKNTPVPEKPTENLGNTTLTTETIKAPVKSTENPEKTAAVTKTIKPSVKVTGDKSLTTTSSHLNKTEVTHQVPTGSFTLITSRTKLSSITSEATGNKSHPYLNKDGSQKGIHAGQMGENDSFPAWAIVIVVLVAVILLLVFLGLIFLVSYMMRTRRTLTQNTQYNDAEDEGGPNSYPVYLMEQQNLGMGQIPSPR

SEQ ID NO: 80703 - protein, 141 aa, Homo sapiens
MTERRVPFSLLRGPSWDPFRDWYPHSRLFDQAFGLPRLPEEWSQWLGGSSWPGYVRPLPPAAIESPAVAAPAYSRALSRQLSSGVSEIRHTADRWRVSLDVNHFAPDELTVKTKDGVVEITGCPPVWTPPKFPPPCPLRAH

SEQ ID NO: 80704 - protein, 143 aa, Homo sapiens
  MOD_RES (1)..(1): Any amino acid
XAVAASGNPFPCEVDPTVFEVPNGYSVLGMERNEPLRDEDDDLLQFAIQQSLLEAGTEAEQATVYEEQLQLERALQESLQLSTEPRGPGSPPRTPPAPGPPSFEEQLRLALELSSREQEERERRGQQEEEDLQRILQLSLTEH

SEQ ID NO: 80705 - protein, 49 aa, Homo sapiens
MWATLPLLCAGAWLLGVPVCGAAELCVNSLGKTAIDWSLEQVRDPKTEI

SEQ ID NO: 80706 - protein, 113 aa, Homo sapiens
WALRPVLPTQSAHDPPAVHLSNGPGQEPIAVMTFDLTKITKTSSSFEVRTWDPEGVIFYGDTNPKDDWFMLGLRDGRPEIQLHNHWAQLTVGAGPRLDDGRWHQEKTLPPLFA

SEQ ID NO: 80707 - protein, 120 aa, Homo sapiens
MGDKKSPTRPKRQPKPSSDEGYWDCSVCTFRNSAEAFKCMMCDVRKGTSTRMKNHEIISFLKEGEKKKLDHLPVTGVLLLGNLHRSTLFEVIVSASRTKEPLKFPISGSSSGCPSGRFSC

SEQ ID NO: 80708 - protein, 42 aa, Homo sapiens
MVILEAPHLLRRKEPETPGLSSRIGPSLCPGFCRKRSVSCCE

SEQ ID NO: 80709 - protein, 921 aa, Homo sapiens
MRANDALQVLGLLFSLARGSEVGNSQAVCPGTLNGLSVTGDAENQYQTLYKLYERCEVVMGNLEIVLTGHNADLSFLQWIREVTGYVLVAMNEFSTLPLPNLRVVRGTQVYDGKFAIFVMLNYNTNSSHALRQLRLTQLTEILSGGVYIEKNDKLCHMDTIDWRDIVRDRDAEIVVKDNGRSCPPCHEVCKGRCWGPGSEDCQTLTKTICAPQCNGHCFGPNPNQCCHDECAGGCSGPQDTDCFACRHFNDSGACVPRCPQPLVYNKLTFQLEPNPHTKYQYGGVCVASCPHNFVVDQTSCVRACPPDKMEVDKNGLKMCEPCGGLCPKACEGTGSGSRFQTVDSSNIDGFVNCTKILGNLDFLITGLNGDPWHKIPALDPEKLNVFRTVREITGYLNIQSWPPHMHNFSVFSNLTTIGGRSLYNRGFSLLIMKNLNVTSLGFRSLKEISAGRIYISANRQLCYHHSLNWTKVLRGPTEERLDIKHNRPRRDCVAEGKVCDPLCSSGGCWGPGPGQCLSCRNYSRGGVCVTHCNFLNGEPREFAHEAECFSCHPECQPMEGTATCNGSGSDTCAQCAHFRDGPHCVSSCPHGVLGAKGPIYKYPDVQNECRPCHENCTQGCKGPELQDCLGQTLVLIGKTHLTMALTVIAGLVVIFMMLGGTFLYWRGRRIQNKRAMRRYLERGESIEPLDPSEKANKVLARIFKETELRKLKVLGSGVFGTVHKGVWIPEGESIKIPVCIKVIEDKSGRQSFQAVTDHMLAIGSLDHAHIVRLLGLCPGSSLQLVTQYLPLGSLLDHVRQHRGALGPQLLLNWGVQIAKGMYYLEEHGMVHRNLAARNVLLKSPSQVQVADFGVADLLPPDDKQLLYSEAKTPIKWMALESIHFGKYTHQSDVWSYGQCIWMPSLPSLAPVSNLPFETPS

SEQ ID NO: 80710 - protein, 123 aa, Homo sapiens
HTLHSLVTILGTWALIQAQPCSCHALALAWTFSYLLFFRALSLLGLPTPTPFTNAVQLLLTLKLVSLASEVQDLHLAQRKEMASGFSKGPTLGLLPDVPSLMETLSYSYCYVGIMTGAPGPCC

SEQ ID NO: 80711 - protein, 45 aa, Homo sapiens
MEMRWFLSKIQDDFRGGKINLEKTQRLLEKLDIRCSYIHVKQIFK

SEQ ID NO: 80712 - protein, 64 aa, Homo sapiens
MCNTNMSVPTDGAVTTSQIPASEQETLVRPKPLLLKLLKSVGAQKDTYTMKEFATKHRAKNIPV

SEQ ID NO: 80713 - protein, 178 aa, Homo sapiens
MGWGNPIIAVFRTPFAPWLQFHWSAPFSAWLGTVLTHLHSSQQRSGTTVCPPCDNELKSEAIIEHLCASEFALRMKIKEVKKENGDKKIVPKKKKPLKLGPIKKKDLKKLVLYLKNGADCPCHQLDNLSHHFLIMGRKVKSQYLLTAIHKWDKKNKEFKNFMKKMKNHECPTFQSVFK

SEQ ID NO: 80714 - protein, 192 aa, Homo sapiens
MGDVLEQFFILTGLLVCLACLAKCVRFSRCVLLNYWKVLPKSFLRSMGQWAVITGAGDGIGKAYSFELAKRGLNVVLISRTLEKLEAIATEIERTTGRSVKIIQADFTKDDIYEHIKEKLAGLEIGILVNNVGMLPNLLPSHFLNAPDEIQAERSHPEHFFWDSPVSLASLLHVLSFQGVCVRIFQGPARGI

SEQ ID NO: 80715 - protein, 122 aa, Homo sapiens
MVTPAGRNAFREFLRTEFSEENMLFWMACEELKKEANKNIIEEKARIIYEDYISILSPKEVSLDSRVREVINRNMVEPSQHIFDDAQLQIYTLMHRDSYPRFMNSAVYKDLLQSLSEKSIEA

SEQ ID NO: 80716 - protein, 146 aa, Homo sapiens
MVYTLWAAVWVTWNVFIICFYLEVGGLLKDSELLTFSLSRHRSWWRERWPGCLHEEVPAVGLGAPHGQALVSGAGCALEPSYVEALHSCLQILIALLGFVCGCQVVSVFTEEEDSFDFIGGFDPFPLYHVNEKPSSLLSKQVYLPA

SEQ ID NO: 80717 - protein, 376 aa, Homo sapiens
MIGVNSVQSASKVRVRTSGSVKYSREDSIRRQSHRSKSMKISNSSEFSAKENKALYNSIKNEKLEWAVDDEEKKKSPSESTEEKANGTHPKTISRIGSTTNPFLDIPHDPNAAVYKSGFLARKIHADMDGKKTPRGKRGWKTFYAVLKGTVLYLQKDEYKPEKALSEEDLKNAVSVHHALASKATDYEKKPNVFKLKTADWRVLLFQTQSPEEMQGWINKINCVAAVFSAPPFPAAIGSQKKFSRPLLPATTTKLSQEEQLKSHESKLKQITTELAEHRSYPPDKKVKAKDVDEYKLKDHYLEFEKTRYEMYVSILKEGGKELLSNDESEAAGLKKSHSSPSLNPDTSPITAKVKRNVSERKDHRPETPSIKQKVT

SEQ ID NO: 80718 - protein, 774 aa, Homo sapiens
MELDMAMEPDRKAAVSHWQQQSYLDSGIHSGATTTAPSLSGKGNPEEEDVDTSQVLYEWEQGFSQSFTQEQVADIDGQYAMTRAQRVRAAMFPETLDEGMQIPSTQFDAAHPTNVQRLAEPSQMLKHAVVNLINYQDDAELATRAIPELTKLLNDEDQVVVNKAAVMVHQLSKKEASRHAIMRSPQMVSAIVRTMQNTNDVETARCTAGTLHNLSHHREGLLAIFKSGGIPALVKMLGSPVDSVLFYAITTLHNLLLHQEGAKMAVRLAGGLQKMVALLNKTNVKFLAITTDCLQILAYGNQESKLIILASGGPQALVNIMRTYTYEKLLWTTSRVLKVLSVCSSNKPAIVEAGGMQALGLHLTDPSQRLVQNCLWTLRNLSDAATKQEGMEGLLGTLVQLLGSDDINVVTCAAGILSNLTCNNYKNKMMVCQVGGIEALVRTVLRAGDREDITEPAICALRHLTSRHQEAEMAQNAVRLHYGLPVVVKLLHPPSHWPLIKATVGLIRNLALCPANHAPLREQGAIPRLVQLLVRAHQDTQRRTSMGGTQQQFVEGVRMEEIVEGCTGALHILARDVHNRIVIRGLNTIPLFVQLLYSPIENIQRVAAGVLCELAQDKEAAEAIEAEGATAPLTELLHSRNEGVATYAAAVLFRMSEDKPQDYKKRLSVELTSSLFRTEPMAWNETADLGLDIGAQGEPLGYRQDDPSYRSFHSGGYGQDALGMDPMMEHEMGGHHPGADYPVDGLPDLGHAQDLMDGLPPGDSNQLAWFDTDL

SEQ ID NO: 80719 - protein, 2092 aa, Homo sapiens
MVLKVDTSESLWHIQISRSRFLLDSDGKRLICEVSLCKINSKVLKSGQLEDTCLVELSLALDLCLKVGISSRHLTAITVDVWTLHAELHEGLFQSQLLCQGPSLASKPVPCSEVTENLVEPTLPGLFLLQQLPDQVKVKMENTSVVLSMNSQKRHLTWTLKLLQFLYHRDEDQLPLRSFTANSDMAQMSTELLLEDGLLLSQSRQRIVCLNSLKASVQVTTIDLSASLVLNTCIIHYRHQEFSHWLHLLALETQGSSSPVLKQRKKRTFPQILAPIIFSTSISNVNISIQLGDTPPFALGFNSISLDYQHLRPQSIHQRGVLTVDHLCWRVGSDSHIQRAPHPPNMHVWGEALVLDSFTLQGSYNQPLGLSSTQSDTLFLDCTIRGLQVEASDTCAQCLSRILSLMGPQSGKSAVSRHSSFGESVSLLWKVDLKVEDMNLFTLSALVGASEVRLDTLTILGSAETSTVGIQGLVLALVKSVTEKMQPCCKAPDIPTPVLSLSMLSITYHSSIRSLEVQCGAGLTLLWSPPDHMYLYQHVLATLQCRDLLRATVFPETVPSLALETSGTTSELEGRAPEPLPPKRLLNLTLEVSTAKLTAFVAEDKFITLAAESVSLSRHGGSLQAYCPELAAGFDGNSIFNFKEVEVQLLPELEEMILHRNPFPALQTLRNRVWLLSFGSVSVEFPYQYDFSRTLDEAVGVQKWLKGLHQGTRAWASPSPVPLPPDLLLKVEHFSWVFLDDVFEVKLHDNYELMKDESKESAKRLQLLDAKVAALRKQHGELLPARKIEELYASLERKNIEIYIQRSRRLYGNTPMRRALLTWSLAGLELVALADASFHGPEHVVEQVQELDPGSPFPPEGLDLVIQWCRMLKCNVKSFLVRIRDYPRYLFEIRDWRLMGRLVGTEQSGQPCSRRRQILHLGLPWGNVAVERNMPPLKFYHDFHSEIFQYTVVWGPCWDPAWTLIGQCVDLLTKPSADPSPPLPWWDKSRLLFHGDWHMDIEQANLHQLATEDPYNTTENMHWEWSHLSFHWKPGQFVFKGDLDINVRTASKYDDCCFLHLPDLCMTLDLQWLCHGNPHDHHSVTLRAPEFLPEVPLGQLHDSYRAFRSENLNLSIKMDLTRHSGTISQPRILLYSSTLRWMQNFWATWTSVTRPICRGKLFNNLKPSKKKLGQHYKQLSYTALFPQLQVHYWASFAQQRGIQIECSQGHVFTRGTQRLIPQAGTVMRRLISDWSVTQMVSDLSQVTVHLMASPTEENADHCLDPLVTKTHLLSLSSLTYQRHSNRTAEEELSARDGDPTFHTHQLHLVDLRISWTTTNRDIAFGLYDGYKKAAVLKRNLSTEALKGLKIDPQMPAKKPKRGVPTSASAPPRVNTPSFSGQPDKGSSGGAYMLQKLIEETDRFVVFTEEESGMSDQLCGIAACQTDDIYNRNCLIELVNCQMVLRGAETEGCVIVSAAKAQLLQCQHHPAWYGDTLKQKTSWTCLLDGMQYFATTESSPTEQDGRQLWLEVKNIEEHRQRSLDSVQELMESGQAVGGMVTTTTDWNQPAEAQQAQQVQRIISRCNCRMYYISYSHDIDPELATQIKPPEVLENQEKEDLLKKQEGAVDTFTLIHHELEISTNPAQYAMILDIVNNLLLHVEPKRKEHSEKKQRVRFQLEISSNPEEQRSSILHLQEAVRQHVAQIRQLEKQMYSIMKSLQDDSKNENLLDLNQKLQLQLNQEKANLQLESEELNILIRCFKDFQLQRANKMELRKQQEDVSVVRRTEFYFAQARWRLTEEDGQLGIAELELQRFLYSKVNKSDDTAEHLLELGWFTMNNLLPNAVYKAILRPQSSCQSGRQLALRLFSKVRPPVGGISVKEHFEVNVVPLTIQLTHQFFHRMMGFFFPGRSVEDDEVGDEEDKSKLVTTGIPVVKPRQLIATDDAVPLGPGKGVAQGLTRSSGVRRSFRKSPEHPVDDIDKMKERAAMNNSFIYIKIPQVPLCVSYKGEKNSVDWGDLNLVLPCLEYHNNTWTWLDFAMAVKRDSRKALVAQVIKEKLRLKSATGSEVRGKLETKSDLNMQQQEEEEKARLLIGLSVGDKNPGKKSIFGRRK

SEQ ID NO: 80720 - protein, 93 aa, Homo sapiens
MDESLQFNSSLQKVHNGMDDLILDGHNILDGLRTQRLTLKGTQKKILDIANMLGLSNTVMRLIEKRAFQDKYFMIGGMLLTCVVMFLVVQYLT

SEQ ID NO: 80721 - protein, 186 aa, Homo sapiens
MEKLYSENEGMASNQGKMENEEQPQDERKPEVTCTLEDKKLENEGKTENKGKTGDEEMLKDKGKPEIEGKPESEGEPGSETRAAGKRPAEDDVPRKAKRKTNKGLAHYLKEYKEAIHDMNFSNEDMIREFDNMAKVQDEKRKSKQKLGAFLWMQRNLQDPFYPRGPREFRGGCRAPRRDIEDIPYV

SEQ ID NO: 80722 - protein, 987 aa, Homo sapiens
MVFGASTKQIDVYRSVVCPILDEVIMGYNCTIFAYGQTGTGKTFTMEGERSPNEEYTWEEDPLAGIIPRTLHQIFEKLTDNGTEFSVKVSLLEIYNEELFDLLNPSSDVSERLQMFDDPRNKRGVIIKGLEEITVHNKDEVYQILEKGAAKRTTAATLMNAYSSRSHSVFSVTIHMKETTIDGEELVKIGKLNLVDLAGSENIGRSGAVDKRAREAGNINQSLLTLGRVITALVERTPHVPYRESKLTRILQDSLGGRTRTSIIATISPASLNLEETLSTLEYAHRAKNILNKPEVNQKLTKKALIKEYTEEIERLKRDLAAAREKNGVYISEENFRVMSGKLTVQEEQIVELIEKIGAVEEELNRVTELFMDNKNELDQCKSDLQNKTQELETTQKHLQETKLQLVKEEYITSALESTEEKLHDAASKLLNTVEETTKDVSGLHSKLDRKKAVDQHNAEAQDIFGKNLNSLFNNMEELIKDGSSKQKAMLEVHKTLFGNLLSSSVSALDTITTVALGSLTSIPENVSTHVSQIFNMILKEQSLAAESKTVLQELINVLKTDLLSSLEMILSPTVVSILKINSQLKHIFKTSLTVADKIEDQKKELDGFLSILCNNLHELQENTICSLVESQKQCGNLTEDLKTIKQTHSQELCKLMNLWTERFCALEEKCENIQKPLSSVQENIQQKSKDIVNKMTFHSQKFCADSDGFSQELRNFNQEGTKLVEESVKHSDKLNGNLEKISQETEQRCESLNTRTVYFSEQWVSSLNEREQELHNLLEVVSQCCEASSSDITEKSDGRKAAHEKQHNIFLDQMTIDEDKLIAQNLELNETIKIGLTKLNCFLEQDLKLDIPTGTTPQRKSYLYPSTLVRTEPREHLLDQLKRKQPELLMMLNCSENNKEETIPDVDVEEAVLGQYTEEPLSQEPSVDAGVDCSSIGGVPFFQHKKSHGKDKENRGINTLERSKVEETTEHLVTKSRLPLRAQINL

SEQ ID NO: 80723 - protein, 167 aa, Homo sapiens
MPRYTVHVRGEWLAVPCQDAQLTVGWLGREAVRRYIKNKPDNGGFTSVDDAHFLVRRCKGLGLLDNEDRLEVALENNEFVEVVIEGDAMSPDFIPSQPEGVYLYSKYREPEKYIELDGDRLTTEDLVNLGKGRYKIKLTPTAEKRVQKSREVIDSIIKEKTGSFRST

SEQ ID NO: 80724 - protein, 791 aa, Homo sapiens
MDVCVRLALWLLWGLLLHQGQSLSHSHSEKATGTSSGANSEESTAAEFCRIDKPLCHSEDEKLSFEAVRNIHKLMDDDANGDVDVEESDEFLREDLNYHDPTVKHSTFHGEDKLISVEDLWKAWKSSEVYNWTVDEVVQWLITYVELPQYEETFRKLQLSGHAMPRLAVTNTTMTGTVLKMTDRSHRQKLQLKALDTVLFGPPLLTRHNHLKDFMLVVSIVIGVGGCWFAYIQNRYSKEHMKKMMKDLEGLHRAEQSLHDLQERLHKAQEEHRTVEVEKVHLEKKLRDEINLAKQEAQRLKELREGTENERSRQKYAEEELEQVREALRKAEKELESHSSWYAPEALQKWLQLTHEVEVQYYNIKKQNAEKQLLVAKEGAEKIKKKRNTLFGTFHVAHSSSLDDVDHKILTAKQALSEVTAALRERLHRWQQIEILCGFQIVNNPGIHSLVAALNIDPSWMGSTRPNPAHFIMTDDVDDMDEEIVSPLSMQSPSLQSSVRQRLTEPQHGLGSQRLVEGEAGHFLTSRVSLRRMRSLSSGQSFSSEGYGTSSPSASAAASCSSSITTITTTTTTTTTFTTVHVHPVYYHHSTSYFLQMEPYPDTPPSDSTAVMPGHSESLGDLTHSDSESSLHMSDRQRVAPKPPQMSRAADEALNAMTSNGSHRLIEGVHPGSLVEKLPDSPALAKKALLALNHGLDKAHSLMELSPSAPPGGSPHLDSSRSHSPSSPDPDTPSPVGDSRALQASRNTRIPHLAGKKAVAEEDNGSIGEETDSSPGRKKFPLKIFKKPLKK

SEQ ID NO: 80725 - protein, 110 aa, Homo sapiens
MPMKGRFPIRRTLQYLSQGNVVFKDSVKVMTVNYNTHGELGEGARKFVFFNIPQIQYKNPWVQIMMFKNMTPSPFLRFYLDSGEQVLVDVETKSNKEIMEHIRKILGKNE

SEQ ID NO: 80726 - protein, 254 aa, Homo sapiens
MELLPPLPQSFLLLLPYMCHGDLLQFIRSPQRNPTVKDLISFGLQVARGMEYLAEQKFVHRDLAARNCMLDESFTVKVADFGLARDILDREYYSVQQHRHARLPVKWMALESLQTYRFTTKSDVWSFGVLLWELLTRGAPPYRHIDPFDLTHFLAQGRRLPQPEYCPDSLYQVMQQCWEADPAVRPTFRVLVGEVEQIVSALLGDHYVQLPATYMNLGPSTSHEMNVRPEQPQFSPMPGNVRRPRPLSEPPRPT

SEQ ID NO: 80727 - protein, 278 aa, Homo sapiens
MPLLLYTCLLWLPTSGLWTVQAMDPNAAYVNMSNHHRGLASANVDFAFSLYKHLVALSPKKNIFISPVSISMALAMLSLGTCGHTRAQLLQGLGFNLTERSETEIHQGFQHLHQLFAKSDTSLEMTMGNALFLDGSLELLESFSADIKHYYESEVLAMNFQDWATASRQINSYVKNKTQGKIVDLFSGLDSPAILVLVNYIFFKGIPTHPHLKAHPLWPGITAAKIQGTLLGKVFDSVKHIHIWESPSSPQSCWAHGHSPLTWQAPGRRTSMWTRQLW

SEQ ID NO: 80728 - protein, 127 aa, Homo sapiens
MTTESGSDSESKPDQEAEPQEAAGAQGRAGAPVPEPPKEEQQQALEQFAAAAAHSTPVRREVTDKEQEFAARAAKQLEYQQLEDDKLSQKSSSSKLSRSPLKIVKKPKSMQCKVILLDGSEYTCDVE

SEQ ID NO: 80729 - protein, 216 aa, Homo sapiens
MGTFILAQDWLSESNHVFCVSSMLRLQKRLASSVLRCGKKKVWLDPNETNEIANANSRQQIRKLIKDGLIIRKPVTVHSRARCRKNTLARRKGRHMGIGKRKGTANARMPEKVTWMRRMRILRRLLRRYRESKKIDRHMYHSLYLKVKGNVFKNKRILMEHIHKLKADKARKKLLADQAEARRSKTKEARKRREERLQAKKEEIIKTLSKEEETKK

SEQ ID NO: 80730 - protein, 128 aa, Homo sapiens
MADHSFSDGVPSDSVEAAKNASNTEKLTDQVMQNPRVLAALQERLDNVPHTPSSYIETLPKAVKRRINALKQLQVRCAHIEAKFYEEVHDLERKYAALYQPLFDKRREFITGDVEPTDAESEWHSENE

SEQ ID NO: 80731 - protein, 15 aa, Homo sapiens
MMTKEELEEEQRTEE

SEQ ID NO: 80732 - protein, 447 aa, Homo sapiens
MSVNISTAGKGVDPNTVDTYDSGDDWEIGVGNLIIDLDADLEKDRQKFEMNNSTTTTSSSNSKDCGGPASSGAGATAALADGLKFASVQASAPQGNSHKETSKSKVKRSKTSKDANKSLPSAALYGIPEISSTGKRQEVQGRPGEATGMNSALGQSVSSGGSGNPNSNSTSTSTSAATAGAGSCGKSKEEKPGKSQSSRGAKRDKDAGKSRKDKHDLLQGHQNGSGSQAPSGGHLYGFGAKSNGGGASPFHCGGTGSGSVAAAGEVSKSAPDSGLMGNSMLVKKEEEEEESHRRIKKLKTEKVDPLFTVPAPPPPISSSLTPQILPSYFSPSSSNIAAPVEQLLVRTRSVGVNTCEVGVVTEPECLGPCEPGTSVNLEGIVWHETEEGVLVVNVTWRNKTYVGTLLDCTKHDWAPPRTQIQEHGIIMYTSPNIWISKSQKNLIERRN

SEQ ID NO: 80733 - protein, 97 aa, Homo sapiens
MASSSPDSPCSCDCFVSVPPASAIPAVIFAKNSDRPRDEVQEVVFVPAGTHTPGSRLQAGFGTEQLCPGGLACDHRVTGALWAGGQLPGGCCAILLP

SEQ ID NO: 80734 - protein, 53 aa, Homo sapiens
MPPKTPRKTAATAAAAAAEPPAPPPPPPPEEDPEQDSGPEDLPLVRGSITNGR

SEQ ID NO: 80735 - protein, 444 aa, Homo sapiens
MSLMVVSMACVGLFLVQRAGPHMGGQDKPFLSAWPSAVVPRGGHVTLRCHYHHRFNNFMLYKEDGIHIPIFHGRIFQESFNMSPVTTAHAGNYTCRGSHPHSPTGWLAPSNPVVIMVTGNHRKPSLLAHPGPLVKSGERVILQCWSDIMFEHFFLHKEGISKDPSRLVGQIHDGVSKANFSIGPMMLALAGTYRCYGSVTHTSYQLSAPSDPLDIVVTGPYEKPSLSAQPGPKVQAGESVTLSCSSRSSYDMYHLSREGGAHERRLPAVRKVNRTFQADFPLGPATHGGTYRCFGSFRHSPYELSDPSDPLLVSVTGNPSSSWPSPTEPSSKSGNPRHLHVLIGTSVVIILFILLLFFLLHLWYSNKKNAAVMDQEPAGNRTANSEDSDEQDPQEVTYAQLDHCVFTQRKITRPSQRPKTPPTDTILYTELPNAKPRSKVVSCP

SEQ ID NO: 80736 - protein, 1692 aa, Homo sapiens
MERNTFSMDCHSKSTAMEETAIWEQHTVTLHRAPGFGFGIAISGGRDNPHFQSGETSIVISDVLKGGPAEGQLQENDRVAMVNGVSMDNVEHAFAVQQLRKSGKNAKITIRRKKKVQIPVSRPDPEPVSDNEEDSYDEEIHDPRSGRSGVVNRRSEKIWPRDRSASRERSLSPRSDRRSVASSQPAKPTKVTLVKSRKNEEYGLRLASHIFVKEISQDSLAARDGNIQEGDVVLKINGTVTENMSLTDAKTLIERSKGKLKMVVQRDERATLLNVPDLSDSIHSANASERDDISEIQSLASDHSGRSHDRPPRRSRSRSPDQRSEPSDHSRHSPQQPSNGSLRSRDEERISKPGAVSTPVKHADDHTPKTVEEVTVERNEKQTPSLPEPKPVYAQVGQPDVDLPVSPSDGVLPNSTHEDGILRPSMKLVKFRKGDSVGLRLAGGNDVGIFVAGVLEDSPAAKEGLEEGDQILRVNNVDFTNIIREEAVLFLLDLPKGEEVTILAQKKKDVYRRIVESDVGDSFYIRTHFEYEKESPYGLSFNKGEVFRVVDTLYNGKLGSWLAIRIGKNHKEVERGIIPNKNRAEQLASVQYTLPKTAGGDRADFWRFRGLRSSKRNLRKSREDLSAQPVQTKFPAYERVVLREAGFLRPVTIFGPIADVAREKLAREEPDIYQIAKSEPRDAGTDQRSSGIIRLHTIKQIIDQDKHALLDVTPNAVDRLNYAQWYPIVVFLNPDSKQGVKTMRMRLCPESRKSARKLYERSHKLRKNNHHLFTTTINLNSMNDGWYGALKEAIQQQQNQLVWVSEGKADGATSDDLDLHDDRLSYLSAPGSEYSMYSTDSRHTSDYEDTDTEGGAYTDQELDETLNDEVGTPPESAITRSSEPVREDSSGMHHENQTYPPYSPQAQPQPIHRIDSPGFKPASQQVYRKDPYPEEMMRQNHVLKQPAVSHPGHRPDKEPNLTYEPQLPYVEKQASRDLEQPTYRYESSSYTDQFSRNYEHRLRYEDRVPMYEEQWSYYDDKQPYPSRPPFDNQHSQDLDSRQHPEESSERGYFPRFEEPAPLSYDSRPRYEQAPRASALRHEEQPAPGYDTHGRLRPEAQPHPSAGPKPAESKQYFEQYSRSYEQVPPQGFTSRAGHFEPLHGAAAVPPLIPSSQHKPEALPSNTKPLPPPPTQTEEEEDPAMKPQSVLTRVKMFENKRSASLETKKDVNDTGSFKPPEVASKPSGAPIIGPKPTSQNQFSEHDKTLYRIPEPQKPQLKPPEDIVRSNHYDPEEDEEYYRKQLSYFDRRSFENKPPAHIAASHLSEPAKPAHSQNQSNFSSYSSKGKPPEADGVDRSFGEKRYEPIQATPPPPPLPSQYAQPSQPVTSASLHIHSKGAHGEGNSVSLDFQNSLVSKPDPPPSQNKPATFRPPNREDTAQAAFYPQKSFPDKAPVNGTEQTQKTVTPAYNRFTPKPYTSSARPFERKFESPKFNHNLLPSETAHKPDLSSKTPTSPKTLVKSHSLAQPPEFDSGVETFSIHAEKPKYQINNISTVPKAIPVSPSAVEEDEDEDGHTVVATARGIFNSNGGVLSSIETGVSIIIPQGAIPEGVEQEIYFKVCRDNSILPPLDKEKGETLLSPLVMCGPHGLKFLKPVELRLPHCASMTPDGWSFALKSSDSSSGDPKTWQNKCLPGDPNYLVGANCVSVLIDHF

SEQ ID NO: 80737 - protein, 642 aa, Homo sapiens
MLENYSNLVSVGYHVSKPDVIFKLEQGEEPWIVEEFSNQNYPDIDDALEKNKEIQDKHLTQTVFFSNKTLITERENVFGKTLNLGMNSVPSRKMPYKCNPGGNSLKTNSEVIVAKKSKENRKIPDGYSGFGKHEKSHLGMKKYRYNPMRKASNQNENLILHQNIQILKQPFDYNKCGKTFFKRAILITQKGRQTERKPNECNECRKTFSKRSTLIVHQRIHTGEKPYVCSDCRKTFRVKTSLTRHRRIHTGERPYECSECRKTFIDKSALIVHQKIHGGEKSYECNECGKTFFRKSALAEHFRSHTGEKPYECKECGNAFSKKSYLVVHQRTHRGEKPNECKECGKTFFCQSALTAHQRIHTGEKPYECSECEKTFFCQSALNVHRRSHTGEKPYECSQCGKFLCTKSALIAHQITHRGKKSYECNECGKFFCHKSTLTIHQRTHTGEKHGVFNKCGRISIVKSNCSQCKRMNTKENLYECSEHGHAVSKNSHLIVHQRTIWERPYECNECGRTYCRKSALTHHQRTHTGQRPYECNECGKTFCQKFSFVEHQRTHTGEKPYECNECGKSFCHKSAFRVHRRIHTGEKPYECNQCGKTYRRLWTLTEHQKIHTGEKPYECNKCEKTFRHKSNFLLHQKSHKE

SEQ ID NO: 80738 - protein, 137 aa, Homo sapiens
MGFMTGTISSMYQTKAVIIAMIITAVVSISVTIFCFQTKVDFTSCTGLFCVLGIVLLVTGIVTSIVLYFQYVYWLHMLYAALGAICFTLFLAYDTQLVLGNRKHTISPEDYITGALQIYTDIIYIFTFVLQLMGDRN

SEQ ID NO: 80739 - protein, 55 aa, Homo sapiens
MLENYRNLVFLGITVSKPDLITCLEQGKEAWSMKRHEIMVAKPTESYSVTQSGMQ

SEQ ID NO: 80740 - protein, 500 aa, Homo sapiens
MEVSTNPSSNINPGDYVEMNDSITHLPSKVVIQDITMELHCPLCNDWFRDPLMLSCGHNFCEACIQDFWRLQAKETFCPECKMLCQYNNCTFNPVLDKLVEKIKKLPLLKGHPQCPEHGENLKLFSKPDGKLICFQCKDARLSVGQSKEFLQISDAVHFFTEELAIQQGQLETTLKELQTLRNMQKEAIAAHKENKLHLQQHVSMEFLKLHQFLHSKEKDILTELREEGKALNEEMELNLSQLQEQCLLAKDMLVSIQAKTEQQNSFDFLKDITTLLHSLEQGMKVLATRELISRKLNLGQYKGPIQYMVWREMQDTLCPGLSPLTLDPKTAHPNLVLSKSQTSVWHGDIKKIMPDDPERFDSSVAVLGSRGFTSGKWYWEVEVAKKTKWTVGVVRESIIRKGSCPLTPEQGFWLLRLRNQTDLKALDLPSFSLTLTNNLDKVGIYLDYEGGQLSFYNAKTMTHIYTFSNTFMEKLYPYFCPCLNDGGENKEPLHILHPQ

SEQ ID NO: 80741 - protein, 96 aa, Homo sapiens
MTSPHFSSYDEGPLDVSMAATNLENQLHSAQKNLLFLQREHASTLKGLHSEIRRLQQHCTDLTYELTVKSSEQTGDGTSKSSELKKRCEELEAQLK

SEQ ID NO: 80742 - protein, 1736 aa, Homo sapiens
MERCSRCHRLLLLLPLVLGLSAAPGWAGAPPVDVLRALRFPSLPDGVRRAKGICPADVAYRVARPAQLSAPTRQLFPGGFPKDFSLLTVVRTRPGLQAPLLTLYSAQGVRQLGLELGRPVRFLYEDQTGRPQPPSQPVFRGLSLADGKWHRVAVAVKGQSVTLIVDCKKRVTRPLPRSARPVLDTHGVIIFGARILDEEVFEGDVQELAIVPGVQAAYESCEQKELECEGGQRERPQNQQPHRAQRSPQQQPSRLHRPQNQEPQSQPTESLYYDYKPPYYDVMTTGTTPDYQDPTPGEEEEILESSLLPPLEEEQTDLQVPPTADRFQAEEYGEGGTDPPEGPYDYTYGYGDDYREETELGPALSAETAHSGAAAHGPRGLKGEKGEPAVLEPGMLVEGPPGPEGPAGLIGPPGIQGNPGPVGDPGERGPPGRAGLPGSDGAPGPPGTSLMLPFRFGSGGGDKGPVVAAQEAQAQAILQQARLALRGPPGPMGYTGRPGPLGQPGSPGLKGESGDLGPQGPRGPQGLTGPPGKAGRRGRAGADGARGMPGDPGVKGDRGFDGLPGLPGEKGHRGDTGAQGLPGPPGEDGERGDDGEIGPRGLPGESGPRGLLGPKGPPGIPGPPGVRGMDGPQGPKGSLGPQGEPGPPGQQGTPGTQGLPGPQGAIGPHGEKGPQGKPGLPGMPGSDGPPGHPGKEGPPGTKGNQGPSGPQGPLGYPGPRGVKGVDGIRGLKGHKGEKGEDGFPGFKGDIGVKGDRGEVGVPGSRGEDGPEGPKGRTGPTGDPGPPGLMGEKGKLGVPGLPGYPGRQGPKGSLGFPGFPGASGEKGARGLSGKSGPRGERGPTGPRGQRGPRGATGKSGAKGTSGGDGPHGPPGERGLPGPQGPNGFPGPKGPPGPPGKDGLPGHPGQRGEVGFQGKTGPPGPPGVVGPQGAAGETGPMGERGHPGPPGPPGEQGLPGTAGKEGTKGDPGPPGAPGKDGPAGLRGFPGERGLPGTAGGPGLKGNEGPSGPPGPAGSPGERGAAGSGGPIGPPGRPGPQGPPGAAGEKGVPGEKGPIGPTGRDGVQGPVGLPGPAGPPGVAGEDGDKGEVGDPGQKGTKGNKGEHGPPGPPGPIGPVGQPGAAGADGEPGARGPQGHFGAKGDEGTRGFNGPPGPIGLQGLPGPSGEKGETGDVGPMGPPGPPGPRGPAGPNGADGPQGPPGGVGNLGPPGEKGEPGESGSPGIQGEPGVKGPRGERGEKGESGQPGEPGPPGPKGPTGDDGPKGNPGPVGFPGDPGPPGEGGPRGQDGAKGDRGEDGEPGQPGSPGPTGENGPPGPLGKRGPAGSPGSEGRQGGKGAKGDPGAIGAPGKTGPVGPAGPAGKPGPDGLRGLPGSVGQQGRPGATGQAGPPGPVGPPGLPGLRGDAGAKGEKGHPGLIGLIGPPGEQGEKGDRGLPGPQGSPGQKGEMGIPGASGPIGPGGPPGLPGPAGPKGAKGATGPGGPKGEKGVQGPPGHPGPPGEVIQPLPIQMPKKTRRSVDGSRLMQEDEAIPTGGAPGSPGGLEEIFGSLDSLREEIEQMRRPTGTQDSPARTCQDLKLCHPELPDGEYWVDPNQGCARDAFRVFCNFTAGGETCVTPRDDVTQFSYVDSEGSPVGVVQLTFLRLLSVSAHQDVSYPCSGAARDGPLRLRGANEDELSPETSPYVKEFRDGCQTQQGRTVLEVRTPVLEQLPVLDASFSDLGAPPRRGGVLLGPVCFMG

SEQ ID NO: 80743 - protein, 394 aa, Homo sapiens
MPIQEERFVTYVGCAFALKALQFLHKLISQITIDVFFIDWERPKGKVLKAVEGEGGVRSATVPVSIWRTYFVANEWNEIQTVRKINSLFQVLTVLFFLEVVGFKNLALMDSSSSLSRNPPSYIAPYSCILRYAVSAALWLAIGIIQVVFFAVFYERFIEDKIRQFVDLCSMSNISVFLLSHKCFGYYIHGRSVHGHADTNMEEMNMNLKREAENLCSQRGLVPNTDGQTFEIAISNQMRQHYDRIHETLIRKNGPARLLSSSASTFEQSIKAYHMMNKFLGSFIDHVHKEMDYFIKDKLLLERILGMEFMEPMEKSIFYNDEGYSFSSVLYYGNEATLLIFDLLFFCVVDLACQNFILASFLTYLQQEIFRYIRNTVGQKNLASKTLVDQRFLI

SEQ ID NO: 80744 - protein, 125 aa, Homo sapiens
MGPLMVLFCLLFLYPGLADSAPSCPQNVNISGGTFTLSHGWAPGSLLTYSCPQGLYPSPASRLCKSSGQWQTPGATRSLSKAVCKPGHCPNPGISLGAVRTGFRFGHGDKVRYRCSSNLVLTGSS

SEQ ID NO: 80745 - protein, 86 aa, Homo sapiens
MVSVIPVAESRNLYIFADELHLGMGCPANRIHTYVYEFIYLVRDCGIRTRVVSEETLLFQTELYFTPRNIDHDPQEIHLECSTSSV

SEQ ID NO: 80746 - protein, 14 aa, Homo sapiens
MVQKYQSPVRVYKY

SEQ ID NO: 80747 - protein, 109 aa, Homo sapiens
MAFTQLTFRDVAIEFSQDEWKCLNSTQRTLYRDVMLENYRNLVSLEYYPMWEHRKEPWTIESQVRVARKPKGWEWIKGVKTGWSAMVQSRLTATFASRIQMILLPQPPE

SEQ ID NO: 80748 - protein, 113 aa, Homo sapiens
MQRLQVVLGHLRGPADSGWMPQAAPCLSGAPQASAADVVVVHGRRTAICRAGRGGFKDTTPDELLSAVMTAVLKDVNLRPEQLGDICVVTSRRLCLCPLSIDSVRRGYRQWPA

SEQ ID NO: 80749 - protein, 312 aa, Homo sapiens
MGSNITSTSIIFLLTGVPGLEAFHTWISIPFCFLSVTALLGNSLILFATITQPSLHEPMYYFLSMLSATDLGLSISTLVTMLSIFWFNVREISFNACLSHMFFIKFFTVMESSVLLAMAFDRFVAVSNPLRYAMILTDSRIAQIGVASVIRGLLMLTPMVALLIRLSYCHSQVLHHSYCYHPDVMKLSCTDTRINSAVGLTAMFSTVGVDLLLILLSYVLIIRTVLSVASPEERKETFSTCVSHIVAFAIYYIPLISLSIVHRFGKQAPAYVHTMIANTYLLISPLMNPVIYSVKTKQIRRAVIKILHSKET

SEQ ID NO: 80750 - protein, 946 aa, Homo sapiens
MARGADVPEIPGDLTLKTCGSTASMKVKHVKKLPFTKGHFPKMAECAHFHYENVEFGSIQLSLSEEQNEVMKNGCESKELVYLVQIACQGKSWIVKRSYEDFRVLDKHLHLCIYDRRFSQLSELPRSDTLKDSPESVTQMLMAYLSRLSAIAGNKINCGPALTWMEIDNKGNHLLVHEESSINTPAVGAAHVIKRYTARAPDELTLEVGDIVSVIDMPPKVLSTWWRGKHGFQVGLFPGHCVELINQKVPQSVTNSVPKPVSKKHGKLITFLRTFMKSRPTKQKLKQRGILKERVFGCDLGEHLLNSGFEVPQVLQSCTAFIERYGIVDGIYRLSGVASNIQRLRHEFDSEHVPDLTKEPYVQDIHSVGSLCKLYFRELPNPLLTYQLYEKFSDAVSAATDEERLIKIHDVIQQLPPPHYRTLEFLMRHLSLLADYCSITNMHAKNLAIVWAPNLLRSKQIESACFSGTAAFMEVRIQSVVVEFILNHVDVLFSGRISMAMQEGAASLSRPKSLLVSSPSTKLLTLEEAQARTQAQVNSPIVTENKYIEVGEGPAALQGKFHTIIEFPLERKRPQNKMKKSPVGSWRSFFNLGKSSSVSKRKLQRNESEPSEMKAMALKGGRAEGTLRSAKSEESLTSLHAVDGDSKLFRPRRPRSSSDALSASFNGEMLGNRCNSYDNLPHDNESEEEGGLLHIPALMSPHSAEDVDLSPPDIGVASLDFDPMSFQCSPPKAESECLESGASFLDSPGYSKDKPSANKKDAETGSSQCQTPGSTASSEPVSPLQEKLSPFFTLDLSPTEDKSSKPSSFTEKVVYAFSPKIGRKLSKSPSMSISEPISVTLPPRVSEVIGTVSNTTAQNASSSTWDKCVEERDATNRSPTQIVKMKTNETVAQEAYESEVQPLDQVAAEEVELPGKEDQSVSSSQSKAVASGQTQTGTVCFPPFFL

SEQ ID NO: 80751 - protein, 664 aa, Homo sapiens
MEYEEITLERGNSGLGFSIAGGTDNPHIGDDPSIFITKIIPGGAAAQDGRLRVNDSILFVNEVDVREVTHSAAVEALKEAGSIVRLYVMRRKPPAEKVMEIKLIKGPKGLGFSIAGGVGNQHIPGDNSIYVTKIIEGGAAHKDGRLQIGDKILAVNSVGLEDVMHEDAVAALKNTYDVVYLKVAKPSNAYLSDSYAPPDITTSYSQHLDNEISHSSYLGTDYPTAMTPTSPRRYSPVAKDLLGEEDIPREPRRIVIHRGSTGLGFNIVGGEDGEGIFISFILAGGPADLSGELRKGDQILSVNGVDLRNASHEQAAIALKNAGQTVTIIAQYKPEEYSRFEAKIHDLREQLMNSSLGSGTASLRSNPKRGFYIRALFDYDKTKDCGFLSQALSFRFGDVLHVIDASDEEWWQARRVHSDSETDDIGFIPSKRRVERREWSRLKAKDWGSSSGSQGREDSVLSYETVTQMEVHYARPIIILGPTKDRANDDLLSEFPDKFGSCVPHTTRPKREYEIDGRDYHFVSSREKMEKDIQAHKFIEAGQYNSHLYGTSVQSVREVAEQGKHCILDVSANAVRRLQAAHLHPIAIFIRPRSLENVLEINKRITEEQARKAFDRATKLEQEFTECFSAIVEGDSFEEIYHKVKRVIEDLSGPYIWVPARERL

SEQ ID NO: 80752 - protein, 205 aa, Homo sapiens
MLQPRPHASKHRRRRGLTAAPHVTSHPRQSVPSDKQLRIFDPRTKPRASQSTQAHENSRDSRLAWMGTWEHLVSTGFNQMREREVKLWDTRFFSSALASLTLDTSLGCLVPLLDPDSGLLVLAGKGERQLYCYEVVPQQPALSPVTQCVLESVLRGAALVPRQALAVMSCEVLRVLQLSDTAIVPIGYHVPRKAVEFHEDLFPDT

SEQ ID NO: 80753 - protein, 336 aa, Homo sapiens
MEWILTHVRNEVTKLKFEGKTFYLYVSQKEEKKIILTYFAPTPEACKHLWKCGIENQAFYKLEKSSQVRTVSSSNLFFKGSRFRYSGRVAKEVMESSAKIKREPPEIHRAGMVPSRSCPSITHGPRLSSVPRTRRRAVHISIMEGLESLRDSAHSTPVRSTSHGDTFLPHVRSSRTDSNERVAVIADEAYSPADSVLPTPVAEHSLELMLLSRQINGATCSIEEEKESEASTPTATEVEALGGELRALCQGHSGPEEEQVNKFVLSVLRLLLVTMGLLFVLLLLLIILTESDLDIAFFRDIRQTPEFEQFHYQYFCPLRRWFACKIRSVVSLLIDT

SEQ ID NO: 80754 - protein, 232 aa, Homo sapiens
MEELEQGLLMQPWAWLQLAENSLLAKVFITKQGYALLVSDLQQVWHEQVDTSVVSQRAKELNKRLTAPPAAFLCHLDNLLRPLLKDAAHPSEATFSCDCVADALILRVRSELSGLPFYWNFHCMLASPSLVSQHLIRPLMGMSLALQCQVRELATLLHMKDLEIQDYQESGATLIRDRLKTEPFEENSFLEQFMIELKDIPIKTGDPAYWPRTLHAASVSFYHETARGMQHW

SEQ ID NO: 80755 - protein, 496 aa, Homo sapiens
MAAPEPARAAPPPPPPPPPPPGADRVVKAVPFPPTHRLTSEEVFDLDGIPRVDVLKNHLVKEGRVDEEIALRIINEGAAILRREKTMIEVEAPITVCGDIHGQFFDLMKLFEVGGSPANTRYLFLGDYVDRGYFSIECVLYLWVLKILYPSTLFLLRGNHECRHLTEYFTFKQECKIKYSERVYEACMEAFDSLPLAALLNQQFLCVHGGLSPEIHTLDDIRRLDRFKEPPAFGPMCDLLWSDPSEDFGNEKSQEHFSHNTVRGCSYFYNYPAVCEFLQNNNLLSIIRAHEAQDAGYRMYRKSQTTGFPSLITIFSAPNYLDVYNNKAAVLKYENNVMNIRQFNCSPHPYWLPNFMDVFTWSLPFVGEKVTEMLVNVLSICSDDELMTEGEDQFDGSAAARKEIIRNKIRAIGKMARVFSVLREESESVLTLKGLTPTGMLPSGVLAGGRQTLQSGNDVMQLAVPQMDWGTPHSFANNSHNACREFLLFFSSCLSS

SEQ ID NO: 80756 - protein, 138 aa, Homo sapiens
MVSSGCRMRSLWFIIVISFLPNTEGFSRAALPFGLVRRELSCEGYSIDLRCPGSDVIMIESANYGRTDDKICDADPFQMENTDCYLPDAFKIMTQRCNNRTQCIVVTGSDVFPDPCPGTYKYLEVQYECVPYNLVLQV

SEQ ID NO: 80757 - protein, 143 aa, Homo sapiens
MKIHSARQEETNKSFYEVINVSPGYQLVRNREQISVTLGDEMFDRKKRWESEIPDKGRFSRELKEAHEAELSELENNYKAALKAEKLAAQEKLEEMGKEYKYLKNMFRTYQDSIYDEMEEKWSKQKAKWKKDEKFERENILLQ

SEQ ID NO: 80758 - protein, 756 aa, Homo sapiens
MGEPEAGSEFANGAAAAGPMADTQYILPNDIGVSSLDCREAFRLLSPTERLYAYHLSRAAWYGGLAVLLQTSPEAPYIYALLSRLFRAQDPDQLRQHALAEGLTEEEYQAFLVYAAGVYSNMGNYKSFGDTKFVPNLPKEKLERVILGSEAAQQHPEEVRGLWQTCGELMFSLEPRLRHLGLGKEGITTYFSGNCTMEDAKLAQDFLDSQNLSAYNTRLFKEVDGEGKPYYEVRLASVLGSEPSLDSEVTSKLKSYEFRGSPFQVTRGDYAPILQKVVEQLEKAKAYAANSHQGQMLAQYIESFTQGSIEAHKRGSRFWIQDKGPIVESYIGFIESYRDPFGSRGEFEGFVAVVNKAMSAKFERLVASAEQLLKELPWPPTFEKDKFLTPDFTSLDVLTFAGSGIPAGINIPNYDDLRQTEGFKNVSLGNVLAVAYATQREKLTFLEEDDKDLYILWKGPSFDVQVGLHELLGHGSGKLFVQDEKGAFNFDQETVINPETGEQIQSWYRSGETWDSKFSTIASSYEECRAESVGLYLCLHPQVLEIFGFEGADAEDVIYVNWLNMVRAGLLALEFYTPEAFNWRQAHMQARFVILRVLLEAGEGLVTITPTTGSDGRPDARVRLDRSKIRSVGKPALERFLRRLQVLKSTGDVAGGRALYEGYATVTDAPPECFLTLRDTVLLRKESRKLIVQPNTRLEGSDVQLLEYEASAAGLIRSFSERFPEDGPELEEILTQLATADARFWKGPSEAPSGQA

SEQ ID NO: 80759 - protein, 156 aa, Homo sapiens
MNKRDYMNTSVQEPPLDYSFRSIHVIQDLVNEEPRTGLRPLKRSKSGKSLTQSLWLNNNVLNDLRDFNQVASQLLEHPENLAWIDLSFNDLTSIDPVLTTFFNLSVLYLHGNSIQRLGEVNKLAVLPRLRSLTLHGNPMEEEKGYRWSSSWAAQRT

SEQ ID NO: 80760 - protein, 1724 aa, Homo sapiens
MPPAVRRSACSMGWLWIFGAALGQCLGYSSQQQRVPFLQPPGQSQLQASYVEFRPSQGCSPGYYRDHKGLYTGRCVPCNCNGHSNQCQDGSGICVNCQHNTAGEHCERCQEGYYGNAVHGSCRACPCPHTNSFATGCVVNGGDVRCSCKAGYTGTQCERCAPGYFGNPQKFGGSCQPCSCNSNGQLGSCHPLTGDCINQEPKDSSPAEECDDCDSCVMTLLNDLATMGEQLRLVKSQLQGLSASAGLLEQMRHMETQAKDLRNQLLNYRSAISNHGSKIEGLERELTDLNQEFETLQEKAQVNSRKAQTLNNNVNRATQSAKELDVKIKNVIRNVHILLKQISGTDGEGNNVPSGDFSREWAEAQRMMRELRNRNFGKHLREAEADKRESQLLLNRIRTWQKTHQGENNGLANSIRDSLNEYEAKLSDLRARLQEAAAQAKQANGLNQENERALGAIQRQVKEINSLQSDFTKYLTTADSSLLQTNIALQLMEKSQKEYEKLAASLNEARQELSDKVRELSRSAGKTSLVEEAEKHARSLQELAKQLEEIKRNASGDELVRCAVDAATAYENILNAIKAAEDAANRAASASESALQTVIKEDLPRKAKTLSSNSDKLLNEAKMTQKKLKQEVSPALNNLQQTLNIVTVQKEVIDTNLTTLRDGLHGIQRGDIDAMISSAKSMVRKANDITDEVLDGLNPIQTDVERIKDTYGRTQNEDFKKALTDADNSVNKLTNKLPDLWRKIESINQQLLPLGNISDNMDRIRELIQQARDAASKVAVPMRFNGKSGVEVRLPNDLEDLKGYTSLSLFLQRPNSRENGGTENMFVMYLGNKDASRDYIGMAVVDGQLTCVYNLGDREAELQVDQILTKSETKEAVMDRVKFQRIYQFARLNYTKGATSSKPETPGVYDMDGRNSNTLLNLDPENVVFYVGGYPPDFKLPSRLSFPPYKGCIELDDLNENVLSLYNFKKTFNLNTTEVEPCRRRKEESDKNYFEGTGYARVPTQPHAPIPTFGQTIQTTVDRGLLFFAENGDRFISLNIEDGKLMVRYKLNSELPKERGVGDAINNGRDHSIQIKIGKLQKRMWINVDVQNTIIDGEVFDFSTYYLGGIPIAIRERFNISTPAFRGCMKNLKKTSGVVRLNDTVGVTKKCSEDWKLVRSASFSRGGQLSFTDLGLPPTDHLQASFGFQTFQPSGILLDHQTWTRNLQVTLEDGYIELSTSDSGGPIFKSPQTYMDGLLHYVSVISDNSGLRLLIDDQLLRNSKRLKHISSSRQSLRLGGSNFEGCISNVFVQRLSLSPEVLDLTSNSLKRDVSLGGCSLNKPPFLMLLKGSTRFNKTKTFRINQLLQDTPVASPRSVKVWQDACSPLPKTQANHGALQFGDIPTSHLLFKLPQELLKPRSQFAVDMQTTSSRGLVFHTGTKNSFMALYLSKGRLVFALGTDGKKLRIKSKEKCNDGKWHTVVFGHDGEKGRLVVDGLRAREGSLPGNSTISIRAPVYLGSPPSGKPKSLPTNSFVGCLKNFQLDSKPLYTPSSSFGVSSCLGGPLEKGIYFSEEGGHVVLAHSVLLGPEFKLVFSIRPRSLTGILIHIGSQPGKHLCVYLEAGKVTASMDSGAGGTSTSVTPKQSLCDGQWHSVAVTIKQHILHLELDTDSSYTAGQIPFPPASTQEPLHLGGAPANLTTLRIPVWKSFFGCLRNIHVNHIPVPVTEALEVQGPVSLNGCPDQ

SEQ ID NO: 80761 - protein, 369 aa, Homo sapiens
MQPPPPGPLGDCLRDWEDLQQDFQNIQETHRLYRLKLEELTKLQNNCTSSITRQKKRLQELALALKKCKPSLPAEAEGAAQELENQMKERQGLFFDMEAYLPKKNGLYLSLVLGNVNVTLLSKQAKFAYKDEYEKFKLYLTIILILISFTCRFLLNSRVTDAAFNFLLVWYYCTLTIRESILINNGSRIKGWWVFHHYVSTFLSGVMLTWPDGLMYQKFRNQFLSFSMYQSFVQFLQYYYQSGCLYRLRALGERHTMDLTVEGFQSWMWRGLTFLLPFLFFGHFWQLFNALTLFNLAQDPQCKEWQGCAPQVSQSAAREQEGLRLGLPLPAQRGFCPVCCGRGWEAPLECACIRGSLLFSLGFYGRCGP

SEQ ID NO: 80762 - protein, 169 aa, Homo sapiens
MERAEPGPRLQRPAGPGPALPRERGARPGPRRALRAGGMRLRERSLRQDPDLRQELASLARGCDFVLPSRFKKRLKAFQQVQTRKEEPLPPATSQSIPTFYFPRGRPQDSVNVDAVISKIESTFARFPHERATMDDMGLVAKACGCPLYWKGPLFYGAGGERTGSVSVH

SEQ ID NO: 80763 - protein, 95 aa, Homo sapiens
MSDSEEESQDRQLKIVVLGDGASGKTSLTTCFAQETFGKQYKQTIGLDFFLRRITLPGNLNVTLQIWDIGGQTIGGKMLDKYIYGAQLIWSICEQ

SEQ ID NO: 80764 - protein, 188 aa, Homo sapiens
MASPFSGALQLTDLDDFIGPSQECIKPVKVEKRAGSGVAKIRIEDDGSYFQINQDGGTRRLEKAKVSLNDCLACSGCITSAETVLITQQSHEELKKVLDANKGCTSSSTPPSQGTSASWRASESLCGDSEDRPTADRRCPCWPLPAQAGSAMPRRLTAASSSPTSAPPGPRSRSWAPWSRTSSPSSST

SEQ ID NO: 80765 - protein, 64 aa, Homo sapiens
MWTARGPFRRDRWSSEDEEAAGPSQALSPLLSVQHHGYSGPNERTTFWHGSNEGAVSLLLRYCA

SEQ ID NO: 80766 - protein, 238 aa, Homo sapiens
MAGSGAKRSRDGELETSLNTQGCTTEGDLLFAQKCKELQGFIPPLTDLLNGLKMGRFERGLSSFQQSVAMDRIQRIVGVLQKPQMGERYLGTLLQVEGMLKTWFPQIAAQKSSLGGGKHQLTKHFPSHHSDSAASSPASPMEKMDQTQLGHLALKPKQPWHLTQWPAMNLTWIHTTPICNPPLSSPGTISFSHGPLGTGTGIGVILFLQHGVQPFTHSAPTTPVPPTTASPVIPGEPM

SEQ ID NO: 80767 - protein, 289 aa, Homo sapiens
MAPACQILRWALALGLGLMFEVTHAFRSQDEFLSSLESYEIAFPTRVDHNGALLAFSPPPPRRQRRGTGATAESRLFYKVASPSTHFLLNLTRSSRLLAGHVSVEYWTREGLAWQRAARPHCLYAGHLQGQASSSHVAISTCGGLHGLIVADEEEYLIEPLHGGPKGSRSPEESGPHVVYKRSSLRHPHLDTACGVRDEKPWKGRPWWLRTLKPPPARPLGNETERGQPGLKRSVSRERYVETLVVADKMMVAYHGRRDVEQYVLAIMNIVRLPNFSRTRVWEAPLTSS

SEQ ID NO: 80768 - protein, 49 aa, Homo sapiens
MDSSREPTLGRLDAAGFWQVWQRFDADGHGHESKFAQGETAVYDYPRCL

SEQ ID NO: 80769 - protein, 53 aa, Homo sapiens
MLRNNKTIIIKYFLNLINGAFLVLGLLFMGFGAWLLLDRNNFLTAFGGVSLCH

SEQ ID NO: 80770 - protein, 199 aa, Homo sapiens
MAEAEFKDHSTAMDTEPNPGTSSVSTTTSSTTTTTITTSSSRMQQPQISVYSGSDRHAVQVIQQALHRPPSSAAQYLQQMYAAQQQHLMLHTAALQQQHLSSSQLQSLAAVQASLSSGRPSTSPTGSVTQQSNQPLHFSYTCTVNKPFPGFQFYQRQYYPTDYVTREYFPYPNGKPSSNVSPSSNADFHTRYHCGCCTV

SEQ ID NO: 80771 - protein, 79 aa, Homo sapiens
MESEDLSGRELTIDSIMNKVRDIKNKFKNEDLTDELSLNKISADTTECRLHDGRVFVCYIHRTLNGVWHMITRELLTKL

SEQ ID NO: 80772 - protein, 370 aa, Homo sapiens
MPYLHLDHQTILRAWAVKDFAPNCPLYVQILKPENKFHIKFADHVVCEEEFKYAMLALNCICPATSTLITLLVHTSRGQEGQQSPEQWQKMYGRCSGNEVYHIVLEESTFFAEYEGKSFTYASFHAHKKFGVCLIGVRREDNKNILLNPGPRYIMNSTDICFYINITKEENSAFKNQDQQRKSNVSRSFYHGPSRLPVHSIIASMGTVAIDLQDTSCRSASGPTLSLPTEGSKEIRRPSIAPVLEVADTSSIQTCDLLSDQSEDETTPDEEMSSNLEYAKGYPPYSPYIGSSPTFCHLLHEKVPFCCLRLDKSCQHNYYEDAKAYGFKNKLIIVAAETAGNGLYNFIVPLRAYYRPKKELNPIVLLLDNP

SEQ ID NO: 80773 - protein, 86 aa, Homo sapiens
MAPWPPKGLVPAMLWGLSLFLNLPGPIWLQPSPPPQSSPPPQPHPCHTCRGLVDSFNKGLERTIRDNFGGGNTAWEEENLSKYKDR

SEQ ID NO: 80774 - protein, 325 aa, Homo sapiens
MNKSRWQSRRRHGRRSHQQNPWFRLRDSEDRSDSRAAQPAHDSGHGDDESPSTSSGTAGTSSVPELPGFYFDPEKKRYFRLLPGHNNCNPLTKESIRQKEMESKRLRLLQEEDRRKKADTNSDRLFTVNDVKVGGSKYGIINLQSLKTPTLKVFMHENLYFTNRKAPLLFNGCRSGEIFAIDLRCGNQGKGWKATRLFHDSAVTSVRILQDEQYLMASDMAGKIKLWDLRTTKCVRQYEGHVNEYAYLPLHVHEEEGILVAVGQDCYTRIWSLHDARLLRTIPSPYPASKADIPSVAFSSRLGGSRGAPGLLMAVGQDLYCYSYS

SEQ ID NO: 80775 - protein, 72 aa, Homo sapiens
MAHRGGERDFQTSARRMGTSLLFQLSVHERELDLVFLDHSYAKPWSAHPDASSARPTRMLFVTPRRQHESTI

SEQ ID NO: 80776 - protein, 490 aa, Homo sapiens
MTPILTVLICLGLSLGPRTHVQAGHLPKPTLWAEPGSVIIQGSPVTLRCQGSLQAEEYHLYRENKSASWVRRIQEPGKNGQFPIPSITWEHAGRYHCQYYSHNHSSEYSDPLELVVTGAYSKPTLSALPSPVVTLGGNVTLQCVSQVAFDGFILCKEGEDEHPQRLNSHSHARGWSWAIFSVGPVSPSRRWSYRCYAYDSNSPYVWSLPSDLLELLVPGVSKKPSLSVQPGPMVAPGESLTLQCVSDVGYDRFVLYKEGERDFLQRPGWQPQAGLSQANFTLGPVSPSHGGQYRCYSAHNLSSEWSAPSDPLDILITGQFYDRPSLSVQPVPTVAPGKNVTLLCQSRGQFHTFLLTKEGAGHPPLHLRSEHQAQQNQAEFRMGPVTSAHVGTYRCYSSLSSNPYLLSLPSDPLELVVSEPLSISPSPTPAGSLGHLKTREEAAWASVGSDCDEAGVHPRCAPLERSTPAVGAAHTAPPVLTWRPLCSGHP

SEQ ID NO: 80777 - protein, 333 aa, Homo sapiens
MVPGEEPARELMAVLLTPRFRRLVSQNELPGPGLNGPSSRNRRDGFCRKRRTGVHLCQVLMNHKVFEPVGMKKLFKKEKELEFEDSNISLYRFLGNKSSYDCCKRQKDAENEFNETLRPGYEMISNPLAQEIGEERIEELIHTINGNPALCPNITVQKPFLRLSKEGVSFYTAITSDKTDVWKEQTLLCLLQLIHLPFLDNILEPPVKTQNLQLNKEEDLVITNTCLDRELIPSLCLPEIDNWLNAAIECLEYFPDQLIVTVSQQLMQNRNEETRLNSQKKILFDVIAKYYAQERDCLLTDEYFDIHSGIIELLENEKRAEALEATQLYLRLL

SEQ ID NO: 80778 - protein, 44 aa, Homo sapiens
MKKSYSDLLLDPCISNLASLHCARFSGARHRRICSCLVIFDSAR

SEQ ID NO: 80779 - protein, 143 aa, Homo sapiens
MMAQSNMFTVADVLSQDELRKKLYQTFKDRGILDTLKTQLRNQLIHELMHPVLSGELQPRSISVEGSSLLIGASNSLVADHLQRCGYEYSLSVFFPESGLAKEKVFTMQDLLQLIKINPTSSLYKSLVSGSDKENQKAIKSVT

SEQ ID NO: 80780 - protein, 341 aa, Homo sapiens
MNPTLILAAFCLGIASATLTFDHSLEAQWTKWKAMHNRLYGMNEEGWRRAVWEKNMKMIELHNQEYREGKHSFTMAMNAFGDMTSEEFRQVMNGFQNRKPRKGKVFQEPLFYEAPRSVDWREKGYVTPVKNQGQCGSCWAFSATGALEGQMFRKTGRLISLSEQNLVDCSGPQGNEGCNGGLMDYAFQYVQDNGGLDSEESYPYEATEESCKYNPKYSVANDTGFVDIPKQEKALMKAVATVGPISVAIDAGHESFLFYKEGIYFEPDCSSEDMDHGVLVVGYGFESTESDNNKYWLVKNRYKLPEILTFEIQKRILICKQCLDTVPHALRHTSEIPRSLS

SEQ ID NO: 80781 - protein, 11 aa, Homo sapiens
MMTLVPRARTR

SEQ ID NO: 80782 - protein, 627 aa, Homo sapiens
MGLLQGLLRVRKLLLVVCVPLLLLPLPVLHPSSEASCAYVLIVTAVYWVSEAVPLGAAALVPAFLYPFFGVLRSNEVAAEYFKNTTLLLVGVICVAAAVEKWNLHKRIALRMVLMAGAKPGMLLLCFMCCTTLLSMWLSNTSTTAMVMPIVEAVLQELVSAEDEQLVAGNSNTEEAEPISLDVKNSQPSLELIFVNEDRSNADLTTLMHNENLNGVPSITNPIKTANQHQGKKQHPSQEKPQVLTPSPRKQKLNRKYRSHHDQMICKCLSLSISYSATIGGLTTIIGTSTSLIFLEHFNNQYPAAEVVNFGTWFLFSFPISLIMLVVSWFWMHWLFLGCNFKETCSLSKKKKTKREQLSEKRIQEEYEKLGDISYPEMVTGFFFILMTVLWFTREPGFVPGWDSFFEKKGYRTDATVSVFLGFLLFLIPAKKPCFGKKNDGENQEHSLGTEPIITWKDFQKTMPWEIVILVGGGYALASGSKSSGLSTWIGNQMLSLSSLPPWAVTLLACILVSIVTEFVSNPATITIFLPILCSLSETLHINPLYTLIPVTMCISFAVMLPVGNPPNAIVFSYGHCQIKDMVKAGLGVNVIGLVIVMVAINTWGVSLFHLDTYPAWARVSNITDQA

SEQ ID NO: 80783 - protein, 282 aa, Homo sapiens
MGADGMYDKLRMLNGQTGSWGTRPGWYPGTSVPGQPTQDGCQQQEGGGENTNSISSNGEDSDEAQMRLQLKRKLQRNRTSFTQEQIEALEKEFERTHYPDVFARERLAAKIDLPEARIQVWFSNRRAKWRREEKLRNQRRQASNTPSHIPISSSFSTSVYQPIPQPTTPVSSFTSGSMLGRTDTALTNTYSALPPMPSFTMANNLPMQPPVPSQTSSYSCMLPTSPSVNGRSYDTYTPPHMQTHMNSQPMGTSGTTSTGLISPGVSVPVQVPGSEPDMSQYW

SEQ ID NO: 80784 - protein, 153 aa, Homo sapiens
MVMEKPSPLLVGREFVRQYYTLLNQAPDMLHRFYGKNSSYVHGGLDSNGKPADAVYGQKEIHRKVMSQNFTNCHTKIRHVDAHATLNDGVVVQVMGLLSNNNQALRRFMQTFVLAPEVHLALFLAQSLFLNQLFLQGGLVLFSYTYERTTSLC

SEQ ID NO: 80785 - protein, 207 aa, Homo sapiens
MYDNLYLHGIEDSEAGSADSYTSRPSDSDVSLEEDREAIRQEREQQAAIQLERAKSKPVAFAVKTNVSYCGALDEDVPVPSTAISFDAKDFLHIKEKYNNDWWIGRLVKEGCEIGFIPSPLRLENIRIQQEQKRGRFHGGKSSGNSSSSLGEMVSGTFRATPTSTAKQKQKVTEHIPPYDVVPSMRPVVLVGPSLKGYEDFNNESDS

SEQ ID NO: 80786 - protein, 107 aa, Homo sapiens
MDDREDLVYQAKLAEQAERYDEMVESMKKVAGMDVELTVEERNLLSVAYKNVIGARRASWRIISSIEQKEENKGGEDKLKMIREYRQMVKSRIKKRCRTWKTKISET

SEQ ID NO: 80787 - protein, 126 aa, Homo sapiens
MWTARGPFRRDRWSSEDEEAAGPSQALSPLLSDTRKIVSEGELDQLAQIRPLIFNFHEQTAIKDCLKILEEKTAAYDIMQEFMALELKNLPGEFNSGNQPSNREKNRYRDILPFQHHGYSGPNERT

SEQ ID NO: 80788 - protein, 431 aa, Homo sapiens
MGRKKIQITRIMDERNRQVTFTKRKFGLMKKAYELSVLCDCEIALIIFNSTNKLFQYASTDMDKVLLKYTEYNEPHESRTNSDIVEALNKKENKGCESPDPDSSYALTPRTEEKYKKINEEFDNMIKSHKIPAVPPPNFEMPVSIPVSSHNSLVYSNPVSSLGNPNLLPLAHPSLQRNSMSPGVTHRPPSAGNTGGLMGGDLTSGAGTSAGNGYGNPRNSPGLLVSPGNLNKNMQAKSPPPMNLGMNNRKPDLRVLIPPGSKNTMPSVNQRINNSQSAQSLATPVVSVATPTLPGQGMGGYPSAISTTYGTEYSLSSADLSSLSGFNTASALHLGSVTGWQQQHLHNMPPSALSQLGDRTTTPSRYPQHTRHEAGRSPVDSLSSCSSSYDGSDREDHRNEFHSPIGLTRPSPDERESPSVKRMRLSEGWAT

SEQ ID NO: 80789 - protein, 94 aa, Homo sapiens
MSGLHLVKQGRDRKKIDSQRDFTVASPAEFVTRFGGNKVIEKVLIANNGIAAVKCMRSIRRWSYEMFRNERAIRFVVMVTPEDLKANAEYIKMA

SEQ ID NO: 80790 - protein, 681 aa, Homo sapiens
MASEGTNIPSPVVRQIDKQFLICSICLERYKNPKVLPCLHTFCERCLQNYIPAHSLTLSCPVCRQTSILPEKGVAALQNNFFITNLMDVLQRTPGSNAEESSILETVTAVAAGKPLSCPNHDGNVMEFYCQSCETAMCRECTEGEHAEHPTVPLKDVVEQHKASLQVQLDAVNKRLPEIDSALQFISEIIHQLTNQKASIVDDIHSTFDELQKTLNVRKSVLLMELEVNYGLKHKVLQSQLDTLLQGQESIKSCSNFTAQALNHGTETEVLLVKKQMSEKLNELADQDFPLHPRENDQLDFIVETEGLKKSIHNLGTILTTNAVASETVATGEGLRQTIIGQPMSVTITTKDKDGELCKTGNAYLTAELSTPDGSVADGEILDNKNGTYEFLYTVQKEGDFTLSLRLYDQHIRGSPFKLKVIRSADVSPTTEGVKRRVKSPGSGHVKQKAVKRPASMYSTGKRKENPIEDDLIFRVGTKGRNKGEFTNLQGVAASTNGKILIADSNNQCVQIFSNDGQFKSRFGIRGRSPGQLQRPTGVAVHPSGDIIIADYDNKWVSIFSSDGKFKTKIGSGKLMGPKGVSVDRNGHIIVVDNKACCVFIFQPNGKIVTRFGSRGNGDRQFAGPHFAAVNSNNEIIITDFHNHSVKVLQAHELLLTFNCFYGEIGLRENNAILTYGTKGS

SEQ ID NO: 80791 - protein, 369 aa, Homo sapiens
MFCCLGYEWLSGGCKTWHSAWVINTLADHRHRGTDFGGSPWLLIITVFLRSYKFAISLCTSYLCVSFLKTIFPSQNGHDGSTDVQQRARRSNCRRQEGIKIVLEDIFTLWRQVETKVRAKIRKMKVTTKVNRHDKINGKRKTAKEHLRKLSMKEREHGEKERQVSEAEENGKLDMKEIHTYMEMFQRAQALRRRAEDYYRCKITPSARKPLCNRVRMAAVEHRHSSGLPYWPYLTAETLKNRMGHQPPPPTQQHSIIDNSLSLKTPSECVLYPLPPSADDNLKTPPECLLTPLPPSALPSADDNLKTPAECLLYPLPPSADDNLKTPPECLLTPLPPSAPPSADDNLKTPPECVCSLPFHPQRMIISRN

SEQ ID NO: 80792 - protein, 123 aa, Homo sapiens
MAAAMPLALLVLLLLGPGGWCLAEPPRDSLREELVITPLPSGDVAATFQFRTRWDSELQREGVSHYRLFPKALGQLISKYSLRELHLSFTQGFWRTRYWGPPFLQAPSGAELWVWFQDTVTEH

SEQ ID NO: 80793 - protein, 120 aa, Homo sapiens
MTVLEQDTQGLDGWWLCSLHGRQGIVPGNRLKILVGMYDKKPAGPGPGPPATPAQPQPGLHAPAPPASQYTPMLPNTYQPQPDSVYLVPTPSKAQQGLYQVPGPSPQFQSPPAKQTSTFS

SEQ ID NO: 80794 - protein, 249 aa, Homo sapiens
MKPILLQGHERSITQIKYNREGDLLFTVAKDPIVNVWYSVNGERLGTYMGHTGAVWCVDADWDTKHVLTGSADNSCRLWDCETGKQLALLKTNSAVRTCGFDFGGNIIMFSTDKQMGYQCFVSFFDLRDPSQIDNNEPYMKIPCNDSKITSAVWGPLGECIIAGHESGELNQYSAKSGEVLVNVKEHSRQINDIQLSRDMTMFVTASKDNTAKLFDSTTLEHQKTFRTERPVNSAALSPNYDHVLPFGL

SEQ ID NO: 80795 - protein, 322 aa, Homo sapiens
MAEAVFHAPKRKRRVYETYESPLPIPFGQDHGPLKEFKIFRAEMINNNVIVRNAEDIEQLYGKGYFGKGILSRSRPSFTISDPKLVAKWKDMKTNMPIITSKRYQHSVEWAAELMRRQGQDESTVRRILKDYTKPLEHPPVKRNEEAQVHDKLNSGMVSNMEGTAGGERPSVVNGDSGKSGGVGDPREPLGCLQEGSGCHPTTESFEKSVREDASPLPHVCCCKQDALILQRGLHHEDGSQHIGLLHPGDRGPDHEYVLVEEAECAMSEREAAPNEELVQRNRLICRRNPYRIFEYLQLSLEECYIGKALHFTMQVILSLSS

SEQ ID NO: 80796 - protein, 66 aa, Homo sapiens
MKIFLPVLLAALLGVERASSLMCFSCLNQKSNLYCLKPTICSDQDNYCVTVSASAGIASFPMQGIS

SEQ ID NO: 80797 - protein, 29 aa, Homo sapiens
MGFGDLKSPAGLQVLNDYLADKSYIEGCV

SEQ ID NO: 80798 - protein, 240 aa, Homo sapiens
MYALFLLASLLGAALAGPVLGLKECTRGSAVWCQNVKTASDCGAVKHCLQTVWNKPTVKSLPCDICKDVVTAAGDMLKDNATEEEILVYLEVSPELVCSMLHLCSGTRLPALTVHVTQPKDGGFCEVCKKLVGYLDRNLEKNSTKQEILAALEKGCSFLPDPYQKQCDQFVAEYEPVLIEILVEVMDPSFVCLKIGACPSAHKPLLGTEKCIWGPSYWCQNTETAAQCNAVEHCKRHVWN

SEQ ID NO: 80799 - protein, 204 aa, Homo sapiens
MSLTVVSMACVGFFLLQGAWPHEGLYEKPSLSAQPGPTVLAGENVTLSCSSRSSYDMYHLSREGEAHERRLPAGTKVNGTFQANFPLGPATHGGTYRCFGSFRDSPYEWSKSSDPLLVSVTGNPSNSWPSPTEPSSETGNPRHLHILIGTSVVKIPFTILLFFLLHRWCSDKKNAAVMDQEPAGNRTVNSEDSDEQDHQEVSYA

SEQ ID NO: 80800 - protein, 154 aa, Homo sapiens
MLHNASLLIDDIEDNSKLRRGFPVAHSIYGIPSVINSANYVYFLGLEKVLTLDHPDAVKLFTRQLLELHQGQGLDIYWRDNYTCPTEEEYKAMVLQKTGGLFGLAAGRLESSSVIMAHCNRELLGSSDPPTSAYMPGAGMTGTVLAVSTLYSSL

SEQ ID NO: 80801 - protein, 139 aa, Homo sapiens
MGPLMVLFCLLFLYPGLADSAPSCPQNVNISGGTFTLSHGWAPGSLLTYSCPQGLYPSPASRLCKSSGQWQTPGATRSLSKAVCKPVRCPAPVSFENGIYTPRLGSYPVGGNVSFECEDGFILRGSPVRQCRPNGMWDG

SEQ ID NO: 80802 - protein, 1182 aa, Homo sapiens
MCSTNPGKWVTFDDDPAVQSSQKSKNFPLENQGVCRPNGLKLNLPGLREFPSGSSSTSSTPLSSPIVDFYFSPGPPSNSPLSTPTKDFPGFPGIPKAGTHVLYPIPESSSDSPLAISGGESSLLPTRPTCLSHALLPSDHSCTHPTPKVGLPDEVNPQQAESLGFQSDDLPQFQYFREDCAFSSPFWKDEGSDSHFTLDPPGSKKMFSSRNKEMPIDQKSLNKCSLNYICEKLEHLQSAENQDSLRSLSMHCLCAEENASSFVPHTLFRSQPKSGWSFMLRIPEKKNMMSSRQWGPIFLKVLPGGILQMYYEQGLEKPFKEIQLDPYCRLSEPKVENFSVAGKIHTVKIEHVSYTEKRKYHSKTEVVHEPDIEQMLKLGSTSYHDFLDFLTTVEEELMKLPAVSKPKKNYEEQEISLEIVDNFWGKVTKEGKFVESAVITQIYCLCFVNGNLECFLTLNDLELPKRDESYYEKDSEKKGIDILDYHFHKCVNVQEFEQSRIIKFVPLDACRFELMRFKTLYNGDNLPFSLKSVVVVQGAYVELQAFVNMASLAQRSSYAGSLRSCDNIRIHFPVPSQWIKALWTMNLQRQKSLKAKMNRRACLGSLQELESEPVIQVTVGSAKYESAYQAVVWKIDRLPDKNSSLDHPHCLSYKLELGSDQEIPSDWYPFATVQFSVPDTCASRTEVRSLGVESDVQPQKHVQQRACYNIQPKLYRSVIEDVIEGVRNLFAEEGIEEQVLKDLKQLWETKVLQSKATEDFFRNSIQSPLFTLQLPHSLHQTLQSSTASLVIPAGRTLPSFTTAELGTSNSSANFTFPGYPIHVPAGVTLQTVSGHLYKVNVPIMVTETSGRAGILQHPIQQVFQQLGQPSVIQTSVPQLNPWSLQATTEKSQRIETVLQQPAILPSGPVDRKHLENATSDILVSPGNEHKIVPEALLCHQESSHYISLPGVVFSPQVSQTNSNVESVLSGSASMAQNLHDESLSTSPHGALHQHVTDIQLHILKNRMYGCDSVKQPRNIEEPSNIPVSEKDSNSQVDLSIRVTDDDIGEIIQVDGSGDTSSNEEIGSTRDADENEFLGNIDGGDLKVPEEEADSISNEDSATNSSDNEDPQVNIVEEDPLNSGDDVSEQDVPDLFDTDNVIVCQYDKIHRSKNKWKFYLKDGVMCFGGRDYVFAKAIGDAEW

SEQ ID NO: 80803 - protein, 430 aa, Homo sapiens
MGGHPQLRLVKALLLLGLNPVSASLQDQHCESLSLASNISGLQCNASVDLIGTCWPRSPAGQLVVRPCPAFFYGVRYNTTNNGYRECLANGSWAARVNYSECQEILNEEKKSKVHYHVAVIINYLGHCISLVALLVAFVLFLRLRPGCTHWGDQADGALEVGAPWSGAPFQVRRSIRCLRNIIHWNLISAFILRNATWFVVQLTMSPEVHQSNVGWCRLVTAAYNYFHVTNFFWMFGEGCYLHTAIVLTYSTDRLRKWMFICIGWGVPFPIIVAWAIGKLYYDNEKCWFGKRPGVYTDYIYQGPMILVLLINFIFLFNIVRILMTKLRASTTSETIQYRKAVKATLVLLPLLGITYMLFFVNPGEDEVSRVVFIYFNSFLESFQVRSAIRKRWHRWQDKHSIRARVARAMSIPTSPTRVSFHSIKQSTAV

SEQ ID NO: 80804 - protein, 838 aa, Homo sapiens
MPMDLILVVWFCVCTARTAEDMKPPVLSLIWRTRVLKSLLQQSLQGVVGFGMDPDLQMDIVTELDLVNTTLGVAQVSGMHNASKAFLFQDIEREIHAAPHVSEKLIQLFRNKSEFTILATVQQKPSTSGVILSIRELEHSYFELESSGLRDEIRYHYIHNGKPRTEALPYRMADGQWHKVALSVSASHLLLHVDCNRIYERVIDPPDTNLPPGINLWLGQRNQKHGLFKGIIQDGKIIFMPNGYITQCPNLNHTCPTCSDFLSLVQGIMDLQELLAKMTAKLNYAETRLSQLENCHCEKTCQVSGLLYRDQDSWVDGDHCRNCTCKSGAVECRRMSCPPLNCSPDSLPVHIAGQCCKVCRPKCIYGGKVLAEGQRILTKSCRECRGGVLVKITEMCPPLNCSEKDHILPENQCCRVCRGHNFCAEGPKCGENSECKNWNTKATCECKSGYISVQGDSAYCEDIDECAAKMHYCHANTVCVNLPGLYRCDCVPGYIRVDDFSCTEHDECGSGQHNCDENAICTNTVQGHSCTCKPGYVGNGTICRAFCEEGCRYGGTCVAPNKCVCPSGFTGSHCEKDIDECSEGIIECHNHSRCVNLPGWYHCECRSGFHDDGTYSLSGESCIDIDECALRTHTCWNDSACINLAGGFDCLCPSGPSCSGDCPHEGGLKHNGQVWTLKEDRCSVCSCKDGKIFCRRTACDCQNPSADLFCCPECDTRVTSQCLDQNGHKLYRSGDNWTHSCQQCRCLEGEVDCWPLTCPNLSCEYTAILEGECCPRCVSDPCLADNITYDIRKTCLDSYGVSRLSGSVWTMAGSPCTTCKCKNGRVCCSVDFECLQNN

SEQ ID NO: 80805 - protein, 211 aa, Homo sapiens
MPFGLKLRRTRRYNVLSKNCFVTRIRLLDSNVIECTLSVESTGQECLEAVAQRLELRETHYFGLWFLSKSQQARWVELEKPLKKHLDKFANEPLLFFGVMFYVPNVSWLQQEATRYQYYLQVKKDVLEGRLRCTLDQVIRLAGLAVQADFGDYNQFDSQDFLREYVLFPMDLALEEAVLEELTQKVAQEHKAHRTIMETVYTLAFSLWGFS

SEQ ID NO: 80806 - protein, 137 aa, Homo sapiens
MKVVNLKQAILQAWKERWSDYQWAINMKKFFPKGATWDILNLADALLEQAMIGPSPNPLILSYLKYAISSQMVSYSSVLTAISKFDDFSRDHKPSGHPCVRPPQPRSSLTSEELSRCKVCMCVCVCVCVCLCVFCNM

SEQ ID NO: 80807 - protein, 551 aa, Homo sapiens
MFGKMFFVFCQESGYDTILRVLGSNVREFLQNLDALHDHLATIYPGMRAPSFRCTDAEKGKGLILHYYSEREGLQDIVIGIIKTVAQQIHGTEIDMKVIQQRNEECDHTQFLIEEKESKEEDFYEDLDRFEENGTQESRISPYTFCKAFPFHIIFDRDLVVTQCGNAIYRVLPQLQPGNCSLLSVFSLVRPHIDISFHGILSHINTVFVLRSKEGLLDVEKLECEDELTGTEISCLRLKGQMIYLPEADSILFLCSPSVMNLDDLTRRGLYLSDIPLHDATRDLVLLGEQFREEYKLTQELEILTDRLQLTLRALEDEKKKTDTLLYSVLPPSVANELRHKRPVPAKRYDNVTILFSGIVGFNAFCSKHASGEGAMKIVNLLNDLYTRFDTLTDSRKNPFVYKVETVGDKYMTVSGLPEPCIHHARSICHLALDMMEIAGQVQVDGESVQITIGIHTGEVVTGVIGQRMPRYCLFGNTVNLTSRTETTGEKGKINVSEYTYRCLMSPENSDPQFHLEHRGPVSMKGKKEPMQVWFLSRKNTGTEETKQDDD

SEQ ID NO: 80808 - protein, 500 aa, Homo sapiens
MECGIPPTLVCVGRGGGLHTVGVFHVLSQLISLCTIPEVFKEKPKINIIIWYYFPSAWRTCFNISSSVGLLLTNSYKFYTTTYSTERSEHFKPCRDKDLAYCLNDGECFVIETLTGSHKHCRCKEGYQGVRCDQFLPKTDSILSDPTDHLGIEFMESEEVYQRQVLSISCIIFGIVIVGMFCAAFYFKSKKQAKQIQEQLKVPQNGKSYSLKASSTMAKSENLVKSHVQLQNYSKVERHPVTALEKMMESSFVGPQSFPEVPSPDRGSQSVKHHRSLSSCCSPGQRSGMLHRNAFRRTPPSPRSRLGGIVGPAYQQLEESRIPDQDTIPCQGYSSSGLKTQRNTSINMQLPSRETNPYFNSLEQKDLVGYSSTRASSVPIIPSVGLEETCLQMPGISEVKSIKWCKNSYSADVVNVSIPVSDCLIAEQQEVKILLETVQEQIRILTDARRSEDYELASVETEDSASENTAFLPLSPTAKSEREAQFVLRNEIQRDSALTK

SEQ ID NO: 80809 - protein, 68 aa, Homo sapiens
MVVPSLKLQDLIEEIRGAKTQAQEREVIQKECAHIRASFRDGDPVHRHRQLAKLLYVHMLGYPAHFGQ

SEQ ID NO: 80810 - protein, 1730 aa, Homo sapiens
MVGELRYREFRVPLGPGLHAYPDELIRQRVGHDGHPEYQIRWLILRRGDEGDGGSGQVDCKAEHILLWMSKDEIYANCHKMLGEDGQVIGPSQESAGEVGALDKSVLEEMETDVKSLIQRALRQLEECVGTIPPAPLLHTVHVLSAYASIEPLTGVFKDPRVLDLLMHMLSSPDYQIRWSAGRMIQALSSHDAGEGQCGEEGKAGEGLGRLRDSQDTVAGASDLIRTRTQILLSLSQQEAIEKHLDFDSRCALLALFAQATLSEHPMSFEGIQLPQVPGRVLFSLVKRYLHVTSLLDQLNDSAAEPGAQNTSAPEELSGERGQLELEFSMAMGTLISELVQAMRWDQASDRPRSSARSPGSIFQPQLADVSPGLPAAQAQPSFRRSRRFRPRSEFASGNTYALYVRDTLQPGMRVRMLDDYEEISAGDEGEFRQSNNGVPPVQVFWESTGRTYWVHWHMLEILGFEEDIEDMVEADEYQGAVASRVLGRALPAWRWRPMTELYAVPYVLPEDEDTEECEHLTLAEWWELLFFIKKLDGPDHQEVLQILQENLDGEILDDEILAELAVPIELAQDLLLTLPQRLNDSALRDLINCHVYKKYGPEALAGNQAYPSLLEAQEDVLLLDAQAQAKDSEDAAKVEAKEPPSQSPNTPLQRLVEGYGPAGKILLDLEQALSSEGTQENKVKPLLLQLQRQPQPFLALMQSLDTPETNRTLHLTVLRILKQLVDFPEALLLPWHEAVDACMACLRSPNTDREVLQELIFFLHRLTSVSRDYAVVLNQLGARDAISKALEKHLGKLELAQELRDMVFKCEKHAHLYRKLITNILGGCIQMVLGQIEDHRRTHQPINIPFFDVFLRYLCQGSSVEVKEDKCWEKVEVSSNPHRASKLTDHNPKTYWESNGSAGSHYITLHMRRGILIRQLTLLVASEDSSYMPARVVVCGGDSTSSLHTELNSVNVMPSASRVILLENLTRFWPIIQIRIKRCQQGGIDTRIRGLEILGPKPTFWPVFREQLCRHTRLFYMVRAQAWSQDMAEDRRSLLHLSSRLNGALRQEQNFADRFLPDDEAAQALGKTCWEALVSPVVQNITSPDEDGISPLGWLLDQYLECQEAVFNPQSRGPAFFSRVRRLTHLLVHVEPCEAPPPVVATPRPKGRNRSHDWSSLATRGLPSSIMRNLTRCWRAVVEKQVNNFLTSSWRDDDFVPRYCEHFNILQNSSSELFGPRAAFLLALQNGCAGALLKLPFLKAAHVSEQFARHIDQQIQGSRIGGAQEMERLAQLQQCLQAVLIFSGLEIATTFEHYYQHYMADRLLGVVSSWLEGAVLEQIGPCFPNRLPQQMLQSLSTSKELQRQFHVYQLQQLDQELLKLEDTEKKIQVGLGASGKEHKSEKEEEAGAAAVVDVAEGEEEEEENEDLYYEGAMPEVSVLVLSRHSWPVASICHTLNPRTCLPSYLRGTLNRYSNFYNKSQSHPALERGSQRRLQWTWLGWAELQFGNQTLHVSTVQMWLLLYLNDLKAVSVESLLAFSGLSADMLNQAIGPLTSSRGPLDLHEQKDIPGGVLKIRDGSKEPRSRWDIVRLIPPQTYLQAEGEDGQNLEKRRNLLNCLIVRILKAHGDEGLHIDQLVCLVLEAWQKGPCPPRGLVSSLGKGSACSSTDVLSCILHLLGKGTLRRHDDRPQVLSYAVPVTVMEPHTESLNPGSSGPNPPLTFHTLQIRSRGVPYASCTATQSFSTFR

SEQ ID NO: 80811 - protein, 42 aa, Homo sapiens
MSGGRAPAVLLGGVVSDRPRPAPSGPRSLDRYPHPKSQRLAP

SEQ ID NO: 80812 - protein, 168 aa, Homo sapiens
MESERSKRMGNACIPLKRIAYFLCLLSALLLTEGKKPAKPKCPAVCTCTKDNALCENARSIPRTVPPDVISLSFVRSGFTEISEGSFLFTPSLQLLLFTSNSFDVISDDAFIGLPHLEYLFIENNNIKSISRHTFRGLKSLIHLSLANNNLQTLPKDIFKGLDSLTNV

SEQ ID NO: 80813 - protein, 677 aa, Homo sapiens
MREFEVLKKLNHKNIVKLFAIEEETTTRHKVLIMEFCPCGSLYTVLEEPSNAYGLPESEFLIVLRDVVGGMNHLRENGIVHRDIKPGNIMRVIGEDGQSVYKLTDFGAARELEDDEQFVSLYGTEEYLHPDMYERAVLRKDHQKKYGATVDLWSIGVTFYHAATGSLPFRPFEGPRRNKEVMYKIITGKPSGAISGVQKAENGPIDWSGDMPVSCSLSRGLQVLLTPVLANILEADQEKCWGFDQFFAETSDILHRMVIHVFSLQQMTAHKIYIHSYNTATIFHELVYKQTKIISSNQELIYEGRRLVLEPGRLAQHFPKTTEENPIFVVSREPLNTIGLIYEKISLPKVHPRYDLDGDASMAKAITGVVCYACRIASTLLLYQELMRKGIRWLIELIKDDYNETVHKKTEVVITLDFCIRNIEKTVKVYEKLMKINLEAAELGEISDIHTKLLRLSSSQGTIETSLQDIDSRLSPGGSLADAWAHQEGTHPKDRNVEKLQVLLNCMTEIYYQFKKDKAERRLAYNEEQIHKFDKQKLYYHATKAMTHFTDECVKKYEAFLNKSEEWIRKMLHLRKQLLSLTNQCFDIEEEVSKYQEYTNELQETLPQKMFTASSGIKHTMTPIYPSSNTLVEMTLGMKKLKEEMEGVVKELAENNHILERFGSLTMDGGLRNVDCL

SEQ ID NO: 80814 - protein, 419 aa, Homo sapiens
MQNSHSGVNQLGGVFVNGRPLPDSTRQKIVELAHSGARPCDISRILQVSNGCVSKILGRYYETGSIRPRAIGGSKPRVATPEVVSKIAQYKRECPSIFAWEIRDRLLSEGVCTNDNIPSVSSINRVLRNLASEKQQMGADGMYDKLRMLNGQTGSWGTRPGWYPGTSVPGQPTQDGCQQQEGGGENTNSISSNGEDSDEAQMRLQLKRKLQRNRTSFTQEQIEALEKEFERTHYPDVFARERLAAKIDLPEARIQVWFSNRRAKWRREEKLRNQRRQASNTPSHIPISSSFSTSVYQPIPQPTTPVSSFTSGSMLGRTDTALTNTYSALPPMPSFTMANNLPMQPPVPSQTSSYSCMLPTSPSVNGRSYDTYTPPHMQTHMNSQPMGTSGTTSTGLISPGVSVPVQVPGSEPDMSQYWP

SEQ ID NO: 80815 - protein, 263 aa, Homo sapiens
MAFLWLLSCWALLGTTFGCGVPAIHPVLSGLSRIVNGEDAVPGSWPWQVSLQDKTGFHFCGGSLISEDWVVTAAHCGVRTSDVVVAGEFDQGSDEENIQVLKIAKVFKNPKFSILTVNNDITLLKLATPARFSQTVSAVCLPSADDDFPAGTLCATTGWGKTKYNANKTPDKLQQAALPLLSNAECKKSWGRRITDVMICAGASGVSSCMGDSGGPLVCQKDGAWTLVGIVSWGSDTCSTSSPGVYARVTKLIPWVQKILAAN

SEQ ID NO: 80816 - protein, 191 aa, Homo sapiens
MLVRLNVRCSCRGVVLGGCRKLLASLVQPKGKKAKGKKVAPAPAVVKKQEAKKVVNPLFEKRPKNFGIGQDIQPKRDLTRFVKWPRYIRLQRQRAILYKRLKVPPAINQFTQALDRQTATQLLKLAHKYRPETKQEKKQRLLARAEKKAAGKGDVPTKRPPVLRAGVNTVTTLVENKKAQLVVIAHDVDPI

SEQ ID NO: 80817 - protein, 209 aa, Homo sapiens
MRAPGRPALRPLPLPPLLLLLLAAPWGRAVPCVSGGLPKPANITFLSINMKNVLQWTPPEGLQGVKVTYTVQYFIYGQKKWLNKSECRNINRTYCDLSAETSDYEHQYYAKVKAIWGTKCSKWAESGRFYPFLETQIGPPEVALTTDEKSISVVLTAPEKWKRNPEDLPVSMQQIYSNLKYNVSVLNTKSNRTVSLKWNGAYIHVPLCS

SEQ ID NO: 80818 - protein, 247 aa, Homo sapiens
AYVEKYKFTSVVAQDLLDSFLSFFPELKEQSVDCRAGPPLAEPDLSQGSSLTRPVEALFQLWTAEPLDQAAASASAIDISKWRTFQTALFLDRLLDGSPLPQEVVMSLSKCYSSLLDSMNAEIRIRWLQIVVRNDYYPDLHRVRRFLESQMSRMYTIPLYEDLCTGALKSFALEVFYQTQGRLHPNLRRAIQQILSQGLGSSTEPASEPSTELGKAEADTDSDAQALLLGDEAPSSAISLRDVNVSA

SEQ ID NO: 80819 - protein, 184 aa, Homo sapiens
MDTKGCTTTNSPSTPCQNCSRITNVSTISSNNGCHPGGLTVNNCQPAGHVLRIPWDQGCQPTPRFCRKPIYLMNNFNARFSLDDCSWYGEGINSNEKETMQILNERLANYLQKVRMLERENAELESKIQEESNKELPVLCPDYLSYYTTIEELQQKILCTKAENSRLVSQIDNTKLTADDLRAK

SEQ ID NO: 80820 - protein, 60 aa, Homo sapiens
MEAVNLLSSNRYTEKQIGYLFISVLVNSNSELIRLINNAIKNDLASRNPTFMGLALHCIA

SEQ ID NO: 80821 - protein, 69 aa, Homo sapiens
MRWRTILLQYCFLLITCLLTALEAVPIDIDKTKVQNIHPVESAKIEPPDTGLYYDEYLKQVIDVLETDK

SEQ ID NO: 80822 - protein, 82 aa, Homo sapiens
MANLERTFIAIKPDGVQRGLVGEIIKRFEQKGFRLVAMKFLRASEEHLKQHYIDLKDRPFFPGLVKYMNSGPVVAMEHHSWQ

SEQ ID NO: 80823 - protein, 142 aa, Homo sapiens
  MOD_RES (1)..(1): Any amino acid
XAVICCRVSPLQKSEVVEMVKKQVKVVTLAIGDGANDVSMIQTAHVGVGISGNEGLQAANSSDYSIAQFKYLKNLLMIHGAWNYNRVSKCILYCFYKNIVLYIIEIWFAFVNGFSGQILFERWCIGLYNVFVRFRCLQQCLL

SEQ ID NO: 80824 - protein, 137 aa, Homo sapiens
ISSDFTAVLQTLPRSEHQVVAVAARDLSRAKEFAQKHDIPKAYGSYEELAKDPSVGHLDPLLSCLRGSEVCFGPGNSRRPPGGSGRIWEESHPRSPGRRPGPGWGGPAGHRHLLCPVHLHGLWRAEAREDFCRGKAS

SEQ ID NO: 80825 - protein, 109 aa, Homo sapiens
  MOD_RES (1)..(1): Any amino acid
XIRTIRAGRQQQVFRKPCARAECDTRRDCLAKLIYARLFDWLVSVINSSICADTDSWTTFIGSKASLCWEHSRKRAIKPWMERQEPWVHCVTLGSSFPFFVSSCICLPA

SEQ ID NO: 80826 - protein, 511 aa, Homo sapiens
MAWSQNNAKFAVCTVDRVVLLYDEHGERRDKFSTKPADMKYGRKSYMVKGMAFSPDSTKIAIGQTDNIIYVYKIGEDWGDKKVICNKFIQTSAVTCLQWPAEYIIVFGLAEGKVRLANTKTNKSSTIYGTESYVVSLTTNCSGKGILSGHADGTIVRYFFDDEGSGESQGKLVNHPCPPYALAWATNSIVAAGCDRKIVAYGKEGHMLQTFDYSRDPQEREFTTAVSSPGGQSVVLGSYDRLRVFNWIPRRSIWEEAKPKEITNLYTITALAWKRDGSRLCVGTLCGGVEQFDCCLRRSIYKNKFELTYVGPSQVIVKNLSSGTRVVLKSHYGYEVEEVKILGKERYLVAHTSETLLLGDLNTNRLSEIAWQGSGGNEKYFFENENVCMIFNAGELTLVEYGNNDTLGSVRTEFMNPHLISVRINERCQRGTEDNKKLAYLIDIKTIAIVDLIGGYNIGTVSHESRVDWLELNETGHKLLFRDRKLRVRRATKALGIGWPTEGVRQAATRD

SEQ ID NO: 80827 - protein, 380 aa, Homo sapiens
MENPEEAIYDDVPRENSDSEPDEMIYDDVENGDEGGNSSLEYGWSSSEFESYEEQSDSECKNGIPRSFLRSNHKKQMQKLVKAAKDGTKDGLERTRAAVKRGRSFIRTKSLIAQDHRSSLEEEQNLFIDVDCKHPEAILTPMPEGLSQQQVVRRYILGSVVDSEKNYVDALKRILEQYEKPLSEMEPKVLSERKLKTVFYRVKEILQCHSLFQIALASRVSEWDSVEMIGDVFVASFSKSMVLDAYSEYVNNFSTAVAVLKKTCATKPAFLEFLKQEQEASPDRTTLYSLMMKPIQRFPQFILLLQDMLKNTSKGHPDRLPLQMALTELETLAEKLNERKRDADQRCEVKQIAKAINERYLNKVERGFLQLYSKIIFALC

SEQ ID NO: 80828 - protein, 124 aa, Homo sapiens
MYIFESSTSLDLNPPLPTGTMPLPVPFLPSRGWRLRDPRKKRMVSRAPLRMRKAGPLQTPPLGLGDLLLHPLLLQGPATQPWDPARPPCSPCRLNSFWTWWLKPSPAAWRSRGPPSTPPKTPQA

SEQ ID NO: 80829 - protein, 260 aa, Homo sapiens
MEEMRDPSKIKWGDAGAEYVVESTGVFTTMEKAGAHLQGGAKRVIISAPSADAPMFVMGVNHEKYDNSLKIISNASCTTNCLAPLAKVIHDNFGIVEGLMTTVHAITATQKTVDGPSGKLWRDGRGALQNIIPASTGAAKAVGKVIPELNGKLTGMAFRVPTANVSVVDLTCRLEKPAKYDDIKKVVKQASEGPLKGILGYTEHQVVSSDFNSDTHSSTFDAGAGIALNDHFVKLISWYDNEFGYSNRVVDLMAHMASKE

SEQ ID NO: 80830 - protein, 104 aa, Homo sapiens
MACAAARSPADQDRFICIYPAYLNNKKTIAEGRRIPISKAVENPTATEIQDVCSAVGLNVFLEKNKMYSREWNRDVQYRGRVRVQLKQEDGSLCLVQFPSRKLV

SEQ ID NO: 80831 - protein, 516 aa, Homo sapiens
MREKQQAAREQERQKRRTIESYCQDVLRRQEEFEHKEEVLQELNMFPQLDDEATRKAYYKEFRKVVEYSDVILEVLDARDPLGCRCFQMEEAVLRAQGNKKLVLVLNKIDLVPKEVVEKWLDYLRNELPTVAFKASTQHQVKNLNRCSVPVDQASESLLKSKACFGAENLMRVLGNYCRLGEVRTHIRVGVVGLPNVGKSSLINSLKRSRACSVGAVPGITKFMQEVYLDKFIRLLDAPGIVPGPNSEVGTILRNCVHVQKLADPVTPVETILQRCNLEEISNYYGVSGFQTTEHFLTAVAHRLGKKKKGGLYSQEQAAKAVLADWVSGKISFYIPPPATHTLPTHLSAEIVKEMTEVFDIEDTEQANEDTMECLATGESDELLGDTDPLEMEIKLLHSPMTKIADAIENKTTVYKIGDLTGYCTNPNRHQMGWAKRNVDHRPKSNSMVDVCSVDRRSVLQRIMETDPLQQGQALASALKNKKKMQKRADKIASKLSDSMMSALDLSGNADDGVGD

SEQ ID NO: 80832 - protein, 113 aa, Homo sapiens
MIRRHKTTIFTDAKESSTVFELKRIVEGILKRPPDEQRLYKDDQLLDDGKTLGECGFTSQTARPQAPATVGLAFRADDTFEALCIEPFSSPPELPDVMKPQDSGSSANEQAVQ

SEQ ID NO: 80833 - protein, 367 aa, Homo sapiens
GVMASRTLLLLLLGALALTETWAGSHSMRYFFTSVSRPGRGEPRFIAVGYVDDTQFVRFDSDAASQKMEPRAPWIEQEGPEYWDQETRNMKAHSQTDRANLGTLRGYYNQSEDGSHTIQIMYGCDVGPDGRFLRGYRQDAYDGKDYIALNEDLRSWTAADMAAQITKRKWEAVHAAEQRRVYLEGRCVDGLRRYLENGKETLQRTDPPKTHMTHHPISDHEATLRCWALGFYPAEITLTWQRDGEDQTQDTELVETRPAGDGTFQKWAAVVVPSGEEQRYTCHVQHEGLPKPLTLRWELSSQPTIPIVGIIAGLAGLVLLGAVVTGAVVTAVMWRKKSSGGKGGSYSQAASSQSAQGSDVSLTACKA

SEQ ID NO: 80834 - protein, 162 aa, Homo sapiens
MGDYLLRGYRMLGETCADCGTILLQDKQRKIYCVACQELDSDVDKDNPALNAQAALSQAREHQLASASELPLGSRPAPQPPVPRPEHCEGAAAGLKAAQGPPAPAVPPNTDVMACTQTALLQKLTWASAELGSSTSLETSIQLCGLIRACAEALRSLQQLQH

SEQ ID NO: 80835 - protein, 23 aa, Homo sapiens
MDEEPERTKRWEGGYERTWEILK

SEQ ID NO: 80836 - protein, 99 aa, Homo sapiens
MLSVVENGLDPQAAIPVIKKKLVGSVKALQKQYVSLDTVVTSEDGDANTMCSALEAVFIHGLHAKHIRAEAGGKRKKSAHQKPLPQPVFWPLLKAVTHK

SEQ ID NO: 80837 - protein, 36 aa, Homo sapiens
MSAETPITLNIDPQDLQVQTFTVEKLLEPLIIQVKL

SEQ ID NO: 80838 - protein, 42 aa, Homo sapiens
MAEPDLECEQIRLKCIRKEGFFTVPPEHRIGPGTPRQMRLSH

SEQ ID NO: 80839 - protein, 152 aa, Homo sapiens
MSRPLLITFTPATDPSDLWKDGQQQPQPEKPESTLDGAAARAFYEALIGDESSAPDSQRSQTEPARERKRKKRRIMKAPAAEAVAEGASGRHGQGRSLEAEDKMTHRILRAAQEGDLPELRRLLEPHEAGGAGGNINARDAFWWTPLMCAAR

SEQ ID NO: 80840 - protein, 68 aa, Homo sapiens
MWAVLRLALRPCARASPAGPRAYHGDSVASLGTQPDLGSALYQEVVRKPEHFTYQEENYCPEKELTIS

SEQ ID NO: 80841 - protein, 212 aa, Homo sapiens
MGLHLRPYRVGLLPDGLLFLLLLLMLLADPALPAGRHPPVVLGDNNRIPVIGPLKIREQQRSAVSTSWLLPYNYTWSPEKVFVQTPTINYTLRDYRKFFQDIGFEDGWLMRQDTEGLVEATMPPGVQLHCLYGTGVPTPDSFYYESFPDRDPKICFGDGDGTVNLKSALQCQAWQSRQEHQVLLQELPGSEHIEMLANATTLAYLKRVLLGP

SEQ ID NO: 80842 - protein, 276 aa, Homo sapiens
MSLADELLADLEEAAEEEEGGSYGEEEEEPAIEDVQEETQLDLSGDSVKTIAKLWDSKMFAEIMMKIEEYISKQAKASEVMGPVEAAPEYRVIVDANNLTVEIENELNIIHKFIRDKYSKRFPELESLVPNALDYIRTVKELGNSLDKCKNNENLQQILTNATIMVVSVTASTTQGQQLSEEELERLEEACDMALELNASKHRIYEYVESRMSFIAPNLSIIIGASTAAKIMGVAGGLTNLSKMPACNIMLLGAQRKTLSGFSSTSVLPHTGYIYH

SEQ ID NO: 80843 - protein, 1038 aa, Homo sapiens
MRGSGPRGAGRRRPPSGGGDTPITPASLAGCYSAPRRAPLWTCLLLCAALRTLLASPSNEVNLLDSRTVMGDLGWIAFPKNGWEEIGEVDENYAPIHTYQVCKVMEQNQNNWLLTSWISNEGASRIFIELKFTLRDCNSLPGGLGTCKETFNMYYFESDDQNGRNIKENQYIKIDTIAADESFTELDLGDRVMKLNTEVRDVGPLSKKGFYLAFQDVGACIALVSVRVYYKKCPSVVRHLAVFPDTITGADSSQLLEVSGSCVNHSVTDEPPKMHCSAEGEWLVPIGKCMCKAGYEEKNGTCQVCRPGFFKASPHIQSCGKCPPHSYTHEEASTSCVCEKDYFRRESDPPTMACTRPPSAPRNAISNVNETSVFLEWIPPADTGGRKDVSYYIACKKCNSHAGVCEECGGHVRYLPRQSGLKNTSVMMVDLLAHTNYTFEIEAVNGVSDLSPGARQYVSVNVTTNQAAPSPVTNVKKGKIAKNSISLSWQEPDRPNGIILEYEIKYFEKDQETSYTIIKSKETTITAEGLKPASVYVFQIRARTAAGYGVFSRRFEFETTPVSVAASSDQSQIPVIAVSVTVGVILLAVVIGVLLSGSCCECGCGRASSLCAVAHPSLIWRCGYSKAKQDPEEEKMHFHNGHIKLPGVRTYIDPHTYEDPNQAVHEFAKEIEASCITIERVIGAGEFGEVCSGRLKLPGKRELPVAIKTLKVGYTEKQRRDFLGEASIMGQFDHPNIIHLEGVVTKSKPVMIVTEYMENGSLDTFLKKNDGQFTVIQLVGMLRGISAGMKYLSDMGYVHRDLAARNILINSNLVCKVSDFGLSRVLEDDPEAAYTTRGGKIPIRWTAPEAIAFRKFTSASDVWSYGIVMWEVVSYGERPYWEMTNQDVIKAVEEGYRLPSPMDCPAALYQLMLDCWQKERNSRPKFDEIVNMLDKLIRNPSSLKTLVNASCRVSNLLAEHSPLGSGAYRSVGEWLEAIKMGRYTEIFMENGYSSMDAVAQVTLEDLRRLGVTLVGHQKKIMNSLQEMKVQLVNGMVPL

SEQ ID NO: 80844 - protein, 99 aa, Homo sapiens
MKCEHCTRKECSKKTKTDDQENVSADAPSPAQENGEASRFFSFVSAQSKLLLLFFSLGAHSTVHITALKKTEVRGHGGSRLESQHFGRPRWTDHLRSGV

SEQ ID NO: 80845 - protein, 75 aa, Homo sapiens
MVYRDDYFIRHSISVSAVIVRAWITHKYSGRDWNVKWEENLLHAVAKNYTLLQTIPPFERPFKDHQVCLEWNMGY

SEQ ID NO: 80846 - protein, 180 aa, Homo sapiens
MAPSSPRPALPALLVLLGALFPGPGNAQTSVSPSKVILPRGGSVLVTCSTSCDQPKLLGIETPLPKKELLLPGNNRKVYELSNVQEDSQPMCYSNCPDGQSTAKTFLTVYWTPERVEGGAPRANLTVVLLRGEKELKREPAVGEPAEVTTTVLVRRDHHGANFSCRTELDLRPQGLELFE

SEQ ID NO: 80847 - protein, 51 aa, Homo sapiens
AAASEIKREEKEDEENTSAADHSEEEKKELKAPRARTRAEGRAGEGAPGGQ

SEQ ID NO: 80848 - protein, 112 aa, Homo sapiens
GERPYWDMSEQEVLNAIEQEFRLPPPPGCPPGLHLLMLDTWQKDRARRPHFDQLVAAFDKMIRKPDTLQAGGDPGERDLPALGITLAGHQKKLLHHIQLLQQHLRQQGSVEV

SEQ ID NO: 80849 - protein, 41 aa, Homo sapiens
MVGKLKQNLLLACLVISSVTVFYLGQHAMECHHRIEERSQP

SEQ ID NO: 80850 - protein, 316 aa, Homo sapiens
MENVTTMNEFLLLGLTGVQELQPFFFGIFLIIYLINLIGNGSILVMVVLEPQLHSPMYFFLGNLSCLDISYSSVTLPKLLVNLVCSRRAISFLGCIIQLHFFHFLGSTEAILLAIMAFDRFVAICNPLRYTVIMNPQVCILLAAAAWLISFFYALMHSVMTAHLSFCGSQKLNHFFYDVKPLLELACSDTLLNQWLLSIVTGSISMGAFFLTLLSCFYVIGFLLFKNRSCRILHKALSTCASHFMVVCLFYGPVGFTYIRPASATSMIQDRIMAIMYSAVTPVLNPLIYTLRNKEVMMALKKIFGRKLFKDWQQHH

SEQ ID NO: 80851 - protein, 232 aa, Homo sapiens
MRRREGHGTDSEMGQGPVRESQSSDPPALQFRISEYKPLNMAGVEQPPSPELRQEGVTEYEDGGAPAGDGEAGPQQAEDHPQNPPEDPNQDPPEDDSTCQCQACGPHQAAGPDLGSSNDGCPQLFQERSVIVENSSGSTSASELLKPMKKRKRREYQSPSEEESEPEAMEKQEEGKDPEGQPTASTPESEEWSSSQPATGEKKECWSWESYLEEQKAITAPVSLFQDPTRQG

SEQ ID NO: 80852 - protein, 96 aa, Homo sapiens
MGTALVYHEDMTATRLLWDDPECEIERPERLTAALDRLRQRGLEQRCLRLSAREASEEELGLVHRVPFTARGWPQGLDCSWWTLCSLELCKMGLPW

SEQ ID NO: 80853 - protein, 103 aa, Homo sapiens
MKSEDYPHETMAPDIHEERQYRCEDCDQLFESKAELADHQKFPCSTPHSAFSMVEEDFQQKLESENDLQEIHTIQECKECDQVFPDLQSLEKHMLSHTEEREY

SEQ ID NO: 80854 - protein, 31 aa, Homo sapiens
MAAVPELLQQQEEDRSKAVAARRHPQRGKHP

SEQ ID NO: 80855 - protein, 625 aa, Homo sapiens
MKTNGGRCRIRALCWSRREWRGAGMAQKKYLQAKLTQFLREDRIQLWKPPYTDENKKVGLALKDLAKQYSDRLECCENEVEKVIEEIRCKAIERGTGNDNYRTTGIATIEVFLPPRLKKDRKNLLETRLHITGRELRSKIAETFGLQENYIKIVINKKQLQLGKTLEEQGVAHNVKAMVLELKQSEEDARKNFQLEEEEQNEAKLKEKQIQRTKRGLEILAKRAAETVVDPEMTPYLDIANQTGRSIRIPPSERKALMLAMGYHEKGRAFLKRKEYGIALPCLLDADKYFCECCRELLDTVDNYAVLQLDIVWCYFRLEQLECLDDAEKKLNLAQKCFKNCYGENHQRLVHIKGNCGKEKVLFLRLYLLQGIRNYHSGNDVEAYEYLNKARQLFKELYIDPSKVDNLLQLGFTAQEARLGLRACDGNVDHAATHITNRREELAQIRKEEKEKKRRRLENIRFLKGMGYSTHAAQQILLSNPQMWWLNDSNPETDNRQESPSQENIDRLVYMGFDALVAEAALRVFRGNVQLAAQTLAHNGGSLPPELPLSPEDSLSPPATSPSDSAGTSSASTDEDMETEAVNEILEDIPEHEEDYLDSTLEDEEIIIAEYLSYVENRKSATKKN

SEQ ID NO: 80856 - protein, 310 aa, Homo sapiens
MAPPPARVHLACKSDEEERSPCTTTRNTACQCKPGTFRNDNSAEMCRKCSRGCPRGMVKVKDCTPWSDIECVHKESGNGHNIWVILVVTLVVPLLLVAVLIVCCCIGSGCGGDPKCMDRVCFWRLGLLRGPGAEDNAHNEILSNADSLSTFVSEQQMESQEPADLTGVTVQSPGEAQCLLGPAEAEGSQRRRLLVPANGADPTETLMLFFDKFANIVPFDSWDQLMRQLDLTKNEIDVVRAGTAGPGDALYAMLMKWVNKTGRNASIHTLLDALERMEERHAREKIQDLLVDSGKFIYLEDGTGSAVSLE

SEQ ID NO: 80857 - protein, 624 aa, Homo sapiens
MERCSRCHRLLLLLPLVLGLSAAPGWAGAPPVDVLRALRFPSLPDGVRRAKGICPADVAYRVARPAQLSAPTRQLFPGGFPKDFSLLTVVRTRPGLQAPLLTLYSAQGVRQLGLELGRPVRFLYEDQTGRPQPPSQPVFRGLSLADGKWHRVAVAVKGQSVTLIVDCKKRVTRPLPRSARPVLDTHGVIIFGARILDEEVFEGDVQELAIVPGVQAAYESCEQKELECEGGQRERPQNQQPHRAQRSPQQQPSRLHRPQNQEPQSQPTESLYYDYKPPYYDVMTTGTTPDYQDPTPGEEEEILESSLLPPLEEEQTDLQVPPTADRFQAEEYGEGGTDPPEGPYDYTYGYGDDYREETELGPALSAETAHSGAAAHGPRGLKGEKGEPAVLEPGMLVEGPPGPEGPAGLIGPPGIQGNPGPVGDPGERGPPGRAGLPGSDGAPGPPGTSLMLPFRFGSGGGDKGPVVAAQEAQAQAILQQARLALRGPPGPMGYTGRPGPLGQPGSPGLKGESGDLGPQGPRGPQGLTGPPGKAGRRGRAGADGARGMPGDPGVKGDRGFDGLPGLPGEKGHRGDTGAQGLPGPPGEDGERGDDGEIGPRGLPGESGPRGLLGPKGPPGIPGPP

SEQ ID NO: 80858 - protein, 821 aa, Homo sapiens
MVSWGRFICLVVVTMATLSLARPSFSLVEDTTLEPEEPPTKYQISQPEVYVAAPGESLEVRCLLKDAAVISWTKDGVHLGPNNRTVLIGEYLQIKGATPRDSGLYACTASRTVDSETWYFMVNVTDAISSGDDEDDTDGAEDFVSENSNNKRAPYWTNTEKMEKRLHAVPAANTVKFRCPAGGNPMPTMRWLKNGKEFKQEHRIGGYKVRNQHWSLIMESVVPSDKGNYTCVVENEYGSINHTYHLDVVERSPHRPILQAGLPANASTVVGGDVEFVCKVYSDAQPHIQWIKHVEKNGSKYGPDGLPYLKVLKVFAAGVNTTDKEIEVLYIRNVTFEDAGEYTCLAGNSIGISFHSAWLTVLPAPGREKEITASPDYLEIAIYCIGVFLIACMVVTVILCRMKNTTKKPDFSSQPAVHKLTKRIPLRRQVSAESSSSMNSNTPLVRITTRLSSTADTPMLAGVSEYELPEDPKWEFPRDKLTLGKPLGEGCFGQVVMAEAVGIDKDKPKEAVTVAVKMLKDDATEKDLSDLVSEMEMMKMIGKHKNIINLLGACTQDGPLYVIVEYASKGNLREYLRARRPPGMEYSYDINRVPEEQMTFKDLVSCTYQLARGMEYLASQKCIHRDLAARNVLVTENNVMKIADFGLARDINNIDYYKKTTNGRLPVKWMAPEALFDRVYTHQSDVWSFGVLMWEIFTLGGSPYPGIPVEELFKLLKEGHRMDKPANCTNELYMMMRDCWHAVPSQRPTFKQLVEDLDRILTLTTNEEYLDLSQPLEQYSPSYPDTRSSCSSGDDSVFSPDPMPYEPCLPQYPHINGSVKT

SEQ ID NO: 80859 - protein, 442 aa, Homo sapiens
MAPRSLLLLLSGALALTDTWAGSHSLRYFSTAVSRPGRGEPRYIAVEYVDDTQFLRFDSDAAIPRMEPREPWVEQEGPQYWEWTTGYAKANAQTDRVALRNLLRRYNQSEAGSHTLQGMNGCDMGPDGRLLRGYHQHAYDGKDYISLNEDLRSWTAADTVAQITQRFYEAEEYAEEFRTYLEGECLELLRRYLENGKETLQRADPPKAHVAHHPISDHEATLRCWALGFYPAEITLTWQRDGEEQTQDTELVETRPAGDGTFQKWAAVVVPSGEEQRYTCHVQHEGLPQPLILRWEQSPQPTIPIVGIVAGLVVLGAVVTGAVVAAVMWRKKSSDRNRGSYSQAAAYSVVSGNLMITWWSSLFLLGVLFQGYLGCLRSHSVLGRRKVGDMWILFFLWLWTSFNTAFLALQSLRFGFGFRRGRSFLLRSWHHLMKRVQIKIFD

SEQ ID NO: 80860 - protein, 102 aa, Homo sapiens
MWAFSELPMPLLINLIVSLLGFVATVTLIPAFRGHFIAARLCGQDLNKTSRQQIPESQGVISGAVFLIILFCFIPFPFLNCFVKEQCKAFPHHEVPSLPSAA

SEQ ID NO: 80861 - protein, 190 aa, Homo sapiens
MGSSRLAALLLPLLLIVIDLSDSAGIGFRHLPHWNTRCPLASHTRKLLPRRHLSEKSHHISIPSPDISHKGLRSKRTQPSDPETWESLPRLDSQRHGGPEFSFDLLPEARAIRVTISSGPEVSVRLCHQWALECEELSSPYDVQKIVSGGHTVELPYEFLLPCLCIEMARTSGSQCTSLTTASTLRWSWP

SEQ ID NO: 80862 - protein, 168 aa, Homo sapiens
MDRRNDYGYRVPLFQGPLPPPGSLGLPFPPDIQTETTEEDSVLLMHTLLAATKDSLAMDPPVVNRPKKSKTKKAPIKTITKAAPAAPPVPAANEIATNKPKITWQALNLPVITQISQALPTTEVTNTQASSVTAQPKKANKMKRVTAKAAQGSQSPTGHEGGTIQLKS

SEQ ID NO: 80863 - protein, 431 aa, Homo sapiens
MSTRSVSSSSYRRMFGGPGTASRPSSSRSYVTTSTRTYSLGSALRPSTSRSLYASSPGGVYATRSSAVRLRSSVPGVRLLQDSVDFSLADAINTEFKNTRTNEKVELQELNDRFANYIDKVRFLEQQNKILLAELEQLKGQGKSRLGDLYEEEMRELRRQVDQLTNDKARVEVERDNLAEDIMRLREKLQEEMLQREEAENTLQSFRQDVDNASLARLDLERKVESLQEEIAFLKKLHEEEIQELQAQIQEQHVQIDVDVSKPDLTAALRDVRQQYESVAAKNLQEAEEWYKSKFADLSEAANRNNDALRQAKQESTEYRRQVQSLTCEVDALKGTNESLERQMREMEENFAVEAANYQDTIGRLQDEIQNMKEEMARHLREYQDLLNVKMALDIEIATYRKLLEGEESRISLPLPNFSSLNLRGKHFISL

SEQ ID NO: 80864 - protein, 368 aa, Homo sapiens
MSNLKMKEAALIYLDRSGGLQKFIDDCKYYNDSKQSYAVYRFKILINPSDVVELDAELGNHILHQPLKAAEVFQSVCFIAVKTLSLIGQLQTETQINIVLKLTHLPPLPSYGLDLCEFPLDYTSQRFYMMQGIVIAMTTITKYTQGARFLCSDEACPLSKGFQYIRVHVPGATESATIRNDFLCNLCASSLQEDRKFRVLGDKQIVEIIATKALRAFQGYSNNQPFRFQSLTIFLRDESVNKMNIGNEYKIIGIPTCVKTSQTAVCIEANSITFCNSKVPSGISDNFRCLLSLTSSSCWKFTAILANIFASQITPPGTYNLLKLCLLMSLVQTTDRNKELEDCLDILIITSDTLLIDRYICDMNFYKY

SEQ ID NO: 80865 - protein, 269 aa, Homo sapiens
MAGLRNESEQEPLLGDTPGSREWDILETEEHYKSRWRSIRILYLTMFLSSVGFSVVMMSIWPYLQKIDPTADTSFLGWVIASYSLGQMVASPIFGLWSNYRPRKEPLIVSILISVAANCLYAYLHIPASHNKYYMLVARGLLGIGAGNVAVVRSYTAGATSLQERTSSMANISMCQALGFILGPASTDEAQVPQGNIDQVAVVAINVLFFVTLFIFALFETIITPLTMDMYAWTQEQAVLYNGIILAALGVEAVVIFLGVKLLSKKFAQ

SEQ ID NO: 80866 - protein, 254 aa, Homo sapiens; identical to SEQ ID NO: 18009

SEQ ID NO: 80867 - protein, 656 aa, Homo sapiens
MAVFNQKSVSDMIKEFRKNWRALCNSERTTLCGADSMLLALQLSMAENNKQHSGEFTVSLSDVLLTWKYLLHEKLNLPVENMDVTDHYEDVRKIYDDFLKNSNMLDLIDVYQKCRALTSNCENYNTVSPGSTIQPPSERGSLLLSRPDLLAPGEDPPVSASLTLERQKGESLLAWSWSLNFRLPGIPITVQKKRRDLKKLAAVMRQSQLLDFLSGKQYAVGDETDLSIPTSPTSKYNRDNEKVQLLARKIIFSYLNLLVNSKNDLAVAYILNIPDRGLGREAFTDLKHAAREKQMSIFLVATSFIRTIELGGKGYAPPPSDPLRTHVKGLSNFINFIDKLDEILGEIPNPSIAGGQILSVIKMQLIKGQNSRDPFCKAIEEVAQDLDLRIKNIINSQEGVVALSTTDISPARPKSHAINHGTAYCGRDTVKALLVLLDEEAANAPTKNKAELLYDEENTIHHHGTSILTLFRSPTQVNNSIKPLRERICVSMQEKKIKMKQTLIRSQFACTYKDDYMISKDNWNNVNLASKPLCVLYMENDLSEGVNPSVGRSTIGTSFGNVHLDRSKNEKVSRKSTSQTGNKSSKRKQVDLDGENILCDNRNEPPQHKNAKIPKKSNDSQNRLYGKLAKVAKSNKCTAKDKLISGQAKLTQFFRL

SEQ ID NO: 80868 - protein, 182 aa, Homo sapiens; identical to SEQ ID NO: 34931

SEQ ID NO: 80869 - protein, 265 aa, Homo sapiens
MRDVYIVQDLMETDLYKLLKSQQLSNDHICYFLYQILRGLKYIHSANVLHRDLKPSNLLINTTCDLKICDFGLARIADPEHDHTGFLTEYVATRWYRAPEIMLNSKGYTKSIDIWSVGCILAEMLSNRPIFPGKHYLDQLNHILGILGSPSQEDLNCIINMKARNYLQSLPSKTKVAWAKLFPKSDSKALDLLDRMLTFNPNKRITVEEALAHPYLEQYYDPTDEPVAEEPFTFAMELDDLPKERLKELIFQETARFQPGVLEAP

SEQ ID NO: 80870 - protein, 51 aa, Homo sapiens
MKKDVRILLVGEPRVGKTSLIMSLVSEEFPEEIVVDLNTSSFAEYLQPSTK

SEQ ID NO: 80871 - protein, 229 aa, Homo sapiens [sequence omitted]

SEQ ID NO: 80872 - protein, 163 aa, Homo sapiens
  MOD_RES (1)..(1): Any amino acid
XTFSDIRREGWLYYKQILTKKGKAEDRDDMLGWIRAIRENSRAEGEDPGCANQALISKKLNDYRKVSHSSGPKADSSPKGSRGLGGLKSEFLKQSAARGLRTQDLPAGSKDDSAAAPKTPWGINIIKKNKKAAPRAFGVRLEECQPATENQRVPLIVAACCRI

SEQ ID NO: 80873 - protein, 366 aa, Homo sapiens
MRVMAPRTLILLLSGALALTETWACSHSMRYFDTAVSRPGRGEPRFISVGYVDDTQFVRFDSDAASPRGEPRAPWVEQEGPEYWDRETQKYKRQAQADRVNLRKLRGYYNQSEDGSHTLQWMYGCDLGPDGRLLRGYDQSAYDGKDYIALNEDLRSWTAADTAAQITQRKWEAAREAEQWRAYLEGTCVEWLRRYLENGKETLQRAEHPKTHVTHHPVSDHEATLRCWALGFYPAEITLTWQRDGEDQTQDTELVETRPAGDGTFQKWAAVVVPSGEEQRYTCHVQHEGLPEPLTLRWEPSSQPTIPIVGIVAGLAVLAVLAVLGAVMAVVMCRRKSSGGKGGSCSQAASSNSAQGSDESLIACKA

SEQ ID NO: 80874 - protein, 61 aa, Homo sapiens
MAAASAVSVLLVAAERNRWHRLPSLLLPPRTWVWRQRTMKYTTATGYPSRMRFSLRKHGIC

SEQ ID NO: 80875 - protein, 938 aa, Homo sapiens
MKLKKQVTVCGAAIFCVAVFSLYLMLDRVQHDPTRHQNGGNFPRSQISVLQNRIEQLEQLLEENHEIISHIKDSVLELTANAEGPPAMLPYYTVNGSWVVPPEPRPSFFSISPQDCQFALGGRGQKPELQMLTVSEELPFDNVDGGVWRQGFDISYDPHDWDAEDLQVFVVPHSHNDPGWIKTFDKYYTEQTQHILNSMVSKLQEDPRRRFLWAEVSFFAKWWDNINVQKRAAVRRLVGNGQLEIATGGWVMPDEANSHYFALIDQLIEGHQWLERNLGATPRSGWAVDPFGYSSTMPYLLRRANLTSMLIQRVHYAIKKHFAATHSLEFMWRQTWDSDSSTDIFCHMMPFYSYDVPHTCGPDPKICCQFDFKRLPGGRINCPWKVPPRAITEANVAERAALLLDQYRKKSQLFRSNVLLVPLGDDFRYDKPQEWDAQFFNYQRLFDFFNSRPNLHVQAQFGTLSDYFDALYKRTGVEPGARPPGFPVLSGDFFSYADREDHYWTGYYTSRPFYKSLDRVLEAHLRGAEVLYSLAAAHARRSGLAGRYPLSDFTLLTEARRTLGLFQHHDAITGTAKEAVVVDYGVRLLRSLVNLKQVIIHAAHYLVLGDKETYHFDPEAPFLQVDDTRLSHDALPERTVIQLDSSPRFVVLFNPLEQERFSMVSLLVNSPRVRVLSEEGQPLAVQISAHWSSATEAVPDVYQVSVPVRLPALGLGVLQLQLGLDGHRTLPSSVRIYLHGRQLSVSRHEAFPLRVIDSGTSDFALSNRYMQVWFSGLTGLLKSIRRVDEEHEQQVDMQVLVYGTRTSKDKSGAYLFLPDGEAKPYVPKEPPVLRVTEGPFFSEVVAYYEHIHQAVRLYNLPGVEGLSLDISSLVDIRDYVNKELALHIHTDIDSQGAAPTVSEEAPPPGQLLPHASHGLYPGRTEAPHAAHCPGPGCL

SEQ ID NO: 80876 - protein, 143 aa, Homo sapiens
MFKGPEKDIEFIYTAPSSAVCGVSLDVGGKKEYLIAGKAEGDGKMHITLCDFIVPWDTLSTTQKKSLNHRYQMGCECKITRCPMIPCYISSPDECLWMDWVTEKNINGHQAKFFACIKRSDGSCAWYRGAAPPKQEFLDIEDP

SEQ ID NO: 80877 - protein, 411 aa, Homo sapiens
MRLSFIVFSSQATIILPLTGDRGKISKGLEDLKRVSPVGETYIHEGLKLANEQIQKAGGLKTSSIIIALTDGKLDGLVPSYAEKEAKISRSLGASVYCVGVLDFEQAQLERIADSKEQVFPVKGGFQALKGIINSILAQSCTEILELQPSSVCVGEEFQIVLSGRGFMLGSRNGSVLCTYTVNETYTTSVKPVSVQLNSMLCPAPILNKAGETLDVSVSFNGGKSVISGSLIVTATECSNGIAAIIVILVLLLLLGIGLMWWFWPLCCKVVIKDPPPPPAPAPKEEEEEPLPTKKWPTVDASYYGGRGVGGIKRMEVRWGDKGSTEEGARLEKAKNAVVKIPEETEEPIRPRPPRPKPTHQPPQTKWYTPIKGRLDALWALLRRQYDRVSLMRPQEGDEGRCINFSRVPSQ

SEQ ID NO: 80878 - protein, 4415 aa, Homo sapiens
  MOD_RES (1)..(1): Any amino acid
XTTEDTLITGSKTAAPVTSTGSTTATLEGQSTAASSRTSNQDISASSQNHQTKSTETTSKAQTDTLTQMMTSTLFSSPSVHNVMETAPPDEMTTSFPSSVTNTLMMTSKTITMTTSTDSTLGNTEETSTAGTESSTPVTSAVSITAGQEGQSRTTSWRTSIQDTSASSQNHWTRSTQTTRESQTSTLTHRTTSTPSFSPSVHNVTGTVSQKTSPSGETATSSLCSVTNTSMMTSEKITVTTSTGSTLGNPGETSSVPVTGSLMPVTSAALVTFDPEGQSPATFSRTSTQDTTAFSKNHQTQSVETTRVSQINTLNTLTPVTTSTVLSSPSGFNPSGTVSQETFPSGETTTSSPSSVSNTFLVTSKVFRMPTSRDSTLGNTEETSLSVSGTISAITSKVSTIWWSDTLSTALSPSSLPPKISTAFHTQQSEGAETTGRPHERSSFSPGVSQEIFTLHETTTWPSSFSSKGHTTWSQTELPSTSTGAATRLVTGNPSTGTAGTIPRVPSKVSAIGEPGEPTTYSSHSTTLPKTTGAGAQTQWTQETGTTGEALLSSPSYSVTQMIKTATSPSSSPMLDRHTSQQITTAPSTNHSTIHSTSTSPQESPAVSQRGHTQAPQTTQESQTTRSVSPMTDTKTVTTPGSSFTASGHSPSEIVPQDAPTISAATTFAPAPTGDGHTTQAPTTALQAAPSSHDATLGPSGGTSLSKTGALTLANSVVSTPGGPEGQWTSASASTSPDTAAAMTHTHQAESTEASGQTQTSEPASSGSRTTSAGTATPSSSGASGTTPSGSEGISTSGETTRFSSNPSRDSHTTQSTTELLSASASHGAIPVSTGMASSIVPGTFHPTLSEASTAGRPTGQSSPTSPSASPQETAAISRMAQTQRTRTSRGSDTISLASQATDTFSTVPPTPPSITSTGLTSPQTETHTLSPSGSGKTFTTALISNATPLPVTYASSASTGHTTPLHVTDASSVSTGHATPLPVTSPSSVSTGHTTPLPVTDTSSESTGHVTPLPVTSFSSASTGDSTPLPVTDTSSASTGHVTPLPVTSLSSASTGDTTPLPVTDTSSASTGHATSLPVTDTSSVSTGHTTPLPVTDTSSASTGHATSLPVTDTSSVSTGHTTPLHVTDASSASTGQATPLPVTSLSSVSTGDTTPLPVTSPSSASTGHATPLLVTDTSSASTGHATPLPVTDASSVSTDHATSLPVTIPSAASTGHTTPLPVTDTSSASTGQATSLLVTDTSSVSTGDTTPLPVTSTSSASTGHVTPLHVTSPSSASTGHATPLPVTSLSSASTGDTMPLPVTSPSSASTGDTTPLPVTDASSVSTGHTTPLHVTDASSASTGQATPLPVTSLSSVSTGDTTPLPVTSPSSASTGHATPLLVTDTSSASTGHATPLPVTDASSVSTDHATSLPVTIPSAASTGHTTPLPVTDTSSASTGQATSLLVTDTSSVSTGDTTPLPVTSTSSASTGHVTPLHVTSPSSASTGHATPLPVTSLSSASTGDTMPLPVTSPSSASTGDTTPLPVTDASSVSTGHTTPLPVTSPSSASTGHTTPLPVTDTSSASKGDTTPLPVTSPSSASTGHTTPLPVTDTSSASTGDTTPLPVTNASSLSTGHATPLHVTSPSSASTGHATPLPVTSTSSASTGHATPLPVTGLSSATTDDTTRLPVTDVSSASTGQATPLPVTSLSSVSTGDTTPLPVTSPSSASTGHASPLLVTDASSASTGQATPLPVTDTSSVSTAHATPLPVTGLSSASTDDTTRLPVTDVSSASTGQAIPLPVTSPSSASTGDTTPLPVTDASSASTGDTTSLPVTIPSSASSGHTTSLPVTDASSVSTGHATSLLVTDASSVSTGDTTPLPVTDTNSASTGDTTPLHVTDASSVSTGHATSLPVTSLSSASTGDTTPLPVTSPSSASSGHTTPLPVTDASSVPTGHATSLPVTDASSVSTGHATPLPVTDASSVSTGHATPLPVTDTSSVSTGQATPLPVTSLSSASTGDTTPLPVTDTSSASTGQDTPLPVTSLSSVSTGDTTPLPVTNPSSASTGHATPLLVTDASSISTGHATSLLVTDASSVSTGHATALHDTDASSLSTGDTTPLPVTSPSSTSTGDTTPLPVTETSSVSTGHATSLPVTDTSSASTGHATSLPVTDTSSASTGHATPLPVTDTSSASTGQATPLPVTSPSSASTGHAIPLLVTDTSSASTGQATPLPVTSLSSASTGDTTPLPVTDASSVSTGHATSLPVTSLSSVSTGDTTPLPVTSPSSASTGHATPLHVTDASSASTGHATPLPVTSLSSASTGDTTPLPVTSPSSASTGHATPLHVTDASSVSTGDTTPLPVTSSSSASSGHTTPLPVTDASSASTGDTTPLPVTDTSSASTGHATHLPVTGLSSASTGDTTRLPVTNVSSASTGHATPLPVTSTSSASTGDTTPLPGTDTSSVSTGHTTPLLVTDASSVSTGDTTRLPVTSPSSASTGHTTPLPVTDTPSASTGDTTPLPVTNASSLSTRHATSLHVTSPSSASTGHATSLPVTDTSAASTGHATPLPVTSTSSASTGDTTPLPVTDTYSASTGQATPLPVTSLSSVSTGDTTPLPVTSPSSASTGHATPLLVTDASSASTGQATPLPVTSLSSVSTGDTTPLPVTSPSSASTGHATSLPVTDTSSASTGDTTSLPVTDTSSAYTGDTTSLPVTDTSSSSTGDTTPLLVTETSSVSTGDTTPLPVTDTSSASTGHATPLPVTNTSSVSTGHATPLHVTSPSSASTGHTTPLPVTDASSVSTGHATSLPVTDASSVFTGHATSLPVTIPSSASSGHTTPLPVTDASSVSTGHATSLPVTDASSVSTGHATPLPVTDASSVSTGHATPLPLTSLSSVSTGDTTPLPVTDTSSASTGQATPLPVTSLSSVSTGDTTPLPVTDTSSASTGHATSLPVTDTSSASTGHATPLPDTDTSSASTGHATLLPVTDTSSASIGHATSLPVTDTSSISTGHATPLHVTSPSSASTGHATPLPVTDTSSASTGHANPLHVTSPSSASTGHATPLPVTDTSSASTGHATPLPVTSLSSVSTGDTTPLPVTSPSSASTGHTTPLPVTDTSSASTGQATALPVTSTSSASTGDTTPLPVTDTSSASTGQATPLPVTSLSSVSTGDTTPLPVTSPSSASTGHATPLLVTDASSASTGQATPLPVTSLSSVSTGDTTPLPVTSPSSASTGHATSLPVTDTSSASTGDTTSLPVTDTSSAYTGDTTSLPVTDTSSSSTGDTTPLLVTETSSVSTGHATPLLVTDASSASTGHATPLHVTSPSSASTGDTTPVPVTDTSSVSTGHATPLPVTGLSSASTGDTTRLPVTDISSASTGQATPLPVTNTSSVSTGDTMPLPVTSPSSASTGHATPLPVTSTSSASTGHATPVPVTSTSSASTGHTTPLPVTDTSSASTGDTTPLPVTSPSSASTGHTTPLHVTIPSSASTGDTSTLPVTGASSASTGHATPLPVTDTSSVSTGHATPLPVTSLSSVSTGDTTPLPVTDASSASTGQATPLPVTSLSSVSTGDTTPLLVTDASSVSTGHATPLPVTDTSSASTGDTTRLPVTDTSSASTGQATPLPVTSLSSVSTGDTTPLLVTDASSVSTGHATPLPVTDTSSASTGDTTRLPVTDTSSASTGQATPLPVTIPSSSSSGHTTPLPVTSTSSVSTGHVTPLHVTSPSSASTGHVTPLPVTSTSSASTGHATPLLVTDASSVSTGHATPLPVTDASSASTGDTTPLPVTDTSSASTGQATPLPVTSLSSVSTGDTTPLPVTDASSASTGHATPLPVTIPSSVSTGDTMPLPVTSPSSASTGHATPLPVTGLSSASTGDTTPLPVTDTSSASTRHATPLPVTDTSSASTDDTTRLPVTDVSSASTGHATPLPVTSTSSASTGDTTPLPVTDTSSVSTGHATSLPVTSRSSASTGHATPLPVTDTSSVSTGHATPLPVTSTSSVSTGHATPLPVTSPSSASTGHATPVPVTSTSSASTGDTTPLPVTNASSLSTGHATPLHVTSPSSASRGDTSTLPVTDASSASTGHATPLPLTSLSSVSTGDTTPLPVTDTSSASTGQATPLPVTSLSSVSTGDTTPLPVTIPSSASSGHTTSLPVTDASSVSTGHGTPLPVTSTSSASTGDTTPLPVTDTSSASTGHATPLPVTDTSSASTGHATPLPVTSLSSVSTGHATPLAVSSATSASTVSSDSPLKMETPGMTTPSLKTDGGRRTATSPPPTTSQTIISTIPSTAMHTRSTAAPIPILPERGVSLFPYGAGAGDLEFVRRTVDFTSPLFKPATGFPLGSSLRDSLYASQAGTLWPWWLRSGTMLTSPLVGGPHFIRATPTKPSSPRTGAGPMPCFSTRAVGCSGTWPSAQATRCSWASLVEMAISKTAH

SEQ ID NO: 80879 - protein, 118 aa, Homo sapiens
MEDHQHVPIDIQTSKLLDWLVDRRHCSLKWQSLVLTIREKINAAIQDMPESEEIAQLLSGSYIHYFHCLRILDLLKGTEASTKNIFGRYSSQRMKDWQEIIALYEKDNTYLGGKINCF

SEQ ID NO: 80880 - protein, 128 aa, Homo sapiens
MLDVLQELRGTVAQQVTGSSGTVKVVVVDSVTAVVSPLLGGQQREGLALMMQLARELKTLARDLGMAVVVTNHITRDRDSGRLKPALGRSWSFVPSTRILLDTIEGAGASGGRRMACLAKSSRQSIDS

SEQ ID NO: 80881 - protein, 552 aa, Homo sapiens
MQMELQSPEYKLSKLRTSTIMTDYNPNYCFAGKTSSISDLKEVPRKNITLIRGLGHGAFGEVYEGQVSGMPNDPSPLQVAVKTLPEVCSEQDELDFLMEALIISKFNHQNIVRCIGVSLQSLPRFILLELMAGGDLKSFLRETRPRPSQPSSLAMLDLLHVARDIACGCQYLEENHFIHRDIAARNCLLTCPGPGRVAKIGDFGMARDIYRASYYRKGGCAMLPVKWMPPEAFMEGIFTSKTDTWSFGVLLWEIFSLGYMPYPSKSNQEVLEFVTSGGRMDPPKNCPGPVYRIMTQCWQHQPEDRPNFAIILERIEYCTQDPDVINTALPIEYGPLVEEEEKVPVRPKDPEGVPPLLVSQQAKREEERSPAAPPPLPTTSSGKAAKKPTAAEISVRVPRGPAVEGGHVNMAFSQSNPPSELHKVHGSRNKPTSLWNPTYGSWFTEKPTKKNNPIAKKEPHDRGNLGLEGSCTVPPNVATGRLPGASLLLEPSSLTANMKEVPLFRLRHFPCGNVNYGYQQQGLPLEAATAPGAGHYEDTILKSKNSMNQPGP

SEQ ID NO: 80882 - protein, 1112 aa, Homo sapiens
MEMDAPRPPSLAVPGAASRPGRLLDGGHGRQQVQALSSQLLEVIPDSMRKQEVRTGREAGQGHGTGSPAEQVKALMDLLAGKGSQGSQAPQALDRTPDAPLGPCSNDSRIQRHRKALLSKVGGGPELGGPWHRLASLLLVEGLTDLQLREHDFTQVEATRGGGHPARTVALDRLFLPLSRVSVPPRVSITIGVAGMGKTTLVRHFVRLWAHGQVGKDFSLVLPLTFRDLNTHEKLCADRLICSVFPHVGEPSLAVAVPARALLILDGLDECRTPLDFSNTVACTDPKKEIPVDHLITNIIRGNLFPEVSIWITSRPSASGQIPGGLVDRMTEIRGFNEEEIKVCLEQMFPEDQALLGWMLSQVQADRALYLMCTVPAFCRLTGMALGHLWRSRTGPQDAELWPPRTLCELYSWYFRMALSGEGQEKGKASPRIEQVAHGGRKMVGTLGRLAFHGLLKKKYVFYEQDMKAFGVDLALLQGAPCSCFLQREETLASSVAYCFTHLSLQEFVAAAYYYGASRRAIFDLFTESGVSWPRLGFLTHFRSAAQRAMQAEDGRLDVFLRFLSGLLSPRVNALLAGSLLAQGEHQAYRTQVAELLQGCLRPDAAVCARAINVLHCLHELQHTELARSVEEAMESGALARLTGPAHRAALAYLLQVSDACAQEANLSLSLSQGVLQSLLPQLLYCRKLRLDTNQFQDPVMELLGSVLSGKDCRIQKISLAENQISNKGAKALARSLLVNRSLTSLDLRGNSIGPQGAKALADALKINRTLTSLSLQGNTVRDDGARSMAEALASNRTLSMLHLQKNSIGPMGAQRMADALKQNRSLKELMFSSNSIGDGGAKALAEALKVNQGLESLDLQSNSISDAGVAALMGALCTNQTLLSLSLRENSISPEGAQAIAHALCANSTLKNLDLTANLLHDQGARAIAVAVRENRTLTSLHLQWNFIQAGAAQALGQALQLNRSLTSLDLQENAIGDDGACAVARALKVNTALTALYLQVASIGASGAQVLGEALAVNRTLEILDLRGNAIGVAGAKALANALKVNSSLRRLNLQENSLGMDGAICIATALSGNHRLQHINLQGNHIGDSGARMISEAIKTNAPTCTVEM

SEQ ID NO: 80883 - protein, 230 aa, Homo sapiens
MALSCTLNRYLLLMAQEHLEFRLPEIKSLLLLFGGQFASSQETYGKSPFWILSIPSEDIARNLMKRTVCAKSIFELWGHGQSPEELYSSLKNYPVEKMVPFLHSDSTYKIKIHTFNKTLTQEEKIKRIDALEFLPFEGKVNLKKPQHVFSVLEDYGLDPNCIPENPHNIYFGRWIADGQRELIESYSVKKRHFIGNTSMDAGLSFIMANHGKVKENDIVFDPFVGTAVYL

SEQ ID NO: 80884 - protein, 85 aa, Homo sapiens
MASLQRSRVLRCCSCRLFQAHQVKKSVKWTCKACGEKQSFLQSSPDTELLLPSFLFLQEVKWMEQNLERLMVKALVLIVDAMSKS

SEQ ID NO: 80885 - protein, 108 aa, Homo sapiens
LSCSSRSSYDMYHLSREGEAHERRFSAGPKVNGTFQADFPLGPATHGGTYRCFGSFRDSPYEWSNSSDPLLVSVTGNPSNSWPSPTEPSSKTDAAVMDQEPAGNRTAN

SEQ ID NO: 80886 - protein, 578 aa, Homo sapiens
MKIPFLLLFFLWEAESHAASRPNIILVMADDLGIGDPGCYGNKTIRTPNIDRLASGGVKLTQHLAASPLCTPSRAAFMTGRYPVRSGMASWSRTGVFLFTASSGGLPTDEITFAKLLKDQGYSTALIGKWHLGMSCHSKTDFCHHPLHHGFNYFYGISLTNLRDCKPGEGSVFTTGFKRLVFLPLQIVGVTLLTLAALNCLGLLHVPLGVFFSLLFLAALILTLFLGFLHYFRPLNCFMMRNYEIIQQPMSYDNLTQRLTVEAAQFIQRNTETPFLLVLSYLHVHTALFSSKDFAGKSQHGVYGDAVEEMDWSVGQILNLLDELRLANDTLIYFTSDQGAHVEEVSSKGEIHGGSNGIYKGGKANNWEGGIRVPGILRWPRVIQAGQKIDEPTSNMDIFPTVAKLAGAPLPEDRIIDGRDLMPLLEGKSQRSDHEFLFHYCNAYLNAVRWHPQNSTSIWKAFFFTPNFNPVGSNGCFATHVCFCFGSYVTHHDPPLLFDISKDPRERNPLTPASEPRFYEILKVMQEAADRHTQTLPEVPDQFSWNNFLWKPWLQLCCPSTGLSCQCDREKQDKRLSR

SEQ ID NO: 80887 - protein, 43 aa, Homo sapiens
MDQNEHSHWGERKVKRAIWLPLSKLQRGVSGAAWLLFSEYRNV

SEQ ID NO: 80888 - protein, 880 aa, Homo sapiens
MTTETGPDSEVKKAQEEAPQQPEAAAAVTTPVTPAGHGHPEANSNEKHPSQQDTRPAEQSLDMEEKDYSEADGLSERTTPSKAQKSPQKIAKKYKSAICRVTLLDASEYECEVEKHGRGQVLFDLVCEHLNLLEKDYFGLTFCDADSQKNWLDPSKEIKKQIRSSPWNFAFTVKFYPPDPAQLTEDITRYYLCLQLRADIITGRLPCSFVTHALLGSYAVQAELGDYDAEEHVGNYVSELRFAPNQTRELEERIMELHKTYRGMTPGEAEIHFLENAKKLSMYGVDLHHAKDSEGIDIMLGVCANGLLIYRDRLRINRFAWPKILKISYKRSNFYIKIRPGEYEQFESTIGFKLPNHRSAKRLWKVCIEHHTFFRLVSPEPPPKGFLVMGSKFRYSGRTQAQTRQASALIDRPAPFFERSSSKRYTMSRSLDGAEFSRPASVSENHDAGPDGDKRDEDGESGGQRSEAEEGEVRTPTKIKELKPEQETTPRHKQEFLDKPEDVLLKHQASINELKRTLKEPNSKLIHRDRDWERERRLPSSPASPSPKGTPEKANERAGLREGSEEKVKPPRPRAPESDTGDEDQDQERDTVFLKDNHLAIERKCSSITVSSTSSLEAEVDFTVIGDYHGSAFEDFSRSLPELDRDKSDSDTEGLLFSRDLNKGAPSQDDESGGIEDSPDRGACSTPDMPQFEPVKTETMTVSSLAIRKKIEPEAVLQTRVSAMDNTQVDGSASVGREFIATTPSITTETISTTMENSLKSGKGAAAMIPGPQTVATEIRSLSPIIGKDVLTSTYGATAETLSTSTTTHVTKTVKGGFSETRIEKRIIITGDEDVDQDQALALAIKEAKLQHPDMLVTKAVVYRETDPSPEERDKKPQES

SEQ ID NO: 80889 - protein, 774 aa, Homo sapiens
MAWIRSTCILFFTLLFAHIAAVPVSRVLLFGYLEILILVYIIHFLYIYFFQIKYLPEENVHDADFGEQKDISEINLAAGLDLFQGDILLQKSRNGLRDPNTRWTFPIPYILADNLGLNAKGAILYAFEMFRLKSCVDFKPYEGESSYIIFQQFDGCWSEVGDQHVGQNISIGQGCAYKAIIEHEILHALGFYHEQSRTDRDDYVNIWWDQILSGYQHNFDTYDDSLITDLNTPYDYESLMHYQPFSFNKNASVPTITAKIPEFNSIIGQRLDFSAIDLERLNRMYNCTTTHTLLDHCTFEKANICGMIQGTRDDTDWAHQDSAQAGEVDHTLLGQCTGAGYFMQFSTSSGSAEEAALLESRILYPKRKQQCLQFFYKMTGSPSDRLVVWVRRDDSTGNVRKLVKVQTFQGDDDHNWKIAHVVLKEEQKFRYLFQGTKGDPQNSTGGIYLDDITLTETPCPTGVWTVRNFSQVLENTSKGDKLQSPRFYNSEGYGFGVTLYPNSRESSGYLRLAFHVCSGENDAILEWPVENRQVIITILDQEPDVRNRMSSSMVFTTSKSHTSPAINDTVIWDRPSRVGTYHTDCNCFRSIDLGWSGFISHQMLKRRSFLKNDDLIIFVDFEDITHLSQTEVPTKGKRLSPQGLILQGQEQQVSEEGSGKAMLEEALPVSLSQGQPSRQKRSVENTGPLEDHNWPQYFRDPCDPNPCQNDGICVNVKGMASCRCISGHAFFYTGERCQAVQVHGSVLGMVIGGTAGVIFLTFSIIAILSQRPRK

SEQ ID NO: 80890 - protein, 130 aa, Homo sapiens
MSAEVETSEGVDESEKKNSGALEKENQMRMADLSELLKEGTKEAHDRAENTQFVKDFLKGNIKKELFKLATTALYFTYSALEEEMERNKDHPAFAPLYFPMELHRKEALTKDMEYFFGENWEEQVQCPKA

SEQ ID NO: 80891 - protein, 367 aa, Homo sapiens
MYLPPHDPHVDDPMRFKPLFRIHLMERKAATVECMYGHKGPHHGHIQIVKKDEFSTKCNQTDHHRMSGGRQEEFRTWLREEWGRTLEDIFHEHMQELILMKFIYTSQYDNCLTYRRIYLPPSRPDDLIKPGLFKGTYGSHGLEIVMLSFHGRRARGTKITGDPNIPAGQQTVEIDLRHRIQLPDLENQRNFNELSRIVLEVRERVRQEQQEGGHEAGEGRGRQGPRESQPSPAQPRAEAPSKGPDGTPGEDGGEPGDAVAAAEQPAQCGQGQPFVLPVGVSSRNEDYPRTCRMCFYGTGLIAGHGFTSPERTPGVFILFDEDRFGFVWLELKSFSLYSRVQATFRNADAPSPQAFDEMLKNIQSLTS

SEQ ID NO: 80892 - protein, 305 aa, Homo sapiens
MGKRQHQKDKMYITCAEYTHFYGGKKPDLPQTNFRRLPFDHCSLSLQPFVYPVCTPDGIVFDLLNIVPWLKKYGTNPSNGEKLDGRSLIKLNFSKNSEGKYHCPVLFTVFTNNTHIVAVRTTGNVYAYEAVEQLNIKAKNFRDLLTDEPFSRQDIITLQDPTNLDKFNVSNFYHVKNNMKIIDPDEEKAKQDPSYYLKNTNAETRETLQELYKEFKGDEILAATMKAPEKKKVDKLNADLAMLSKLVLNSWLQVRASCLGLRKCWNYRPTIPQGRSALPSPPPRWSRRPHMKQLPSTRMCCATSL

SEQ ID NO: 80893 - protein, 107 aa, Homo sapiens
MADHSFSDGVPSDSVEAAKNASNTEKLTDQVMQNPRVLAALQERLDNVPHTPSSYIETLPKAVKRRINALKQLQVRCAHIEAKFYEEVHDLERKYAALYQPLFDKRR

SEQ ID NO: 80894 - protein, 54 aa, Homo sapiens
MGRKDAATIKLPVDQYRKQIGKQDYKKTKPILRATKLKAEAKKTAIGIKTHHGC

SEQ ID NO: 80895 - protein, 45 aa, Homo sapiens
MAGTVLGVGAGVFILALLWVAVLLLCVLLSRASGAASSVAFPASW

SEQ ID NO: 80896 - protein, 404 aa, Homo sapiens
MKDSCITVMAMALLSGFFFFAPASSYNLDVRGARSFSPPRAGRHFGYRVLQIKSLIPQFQGRLVANLTYTLQLDGHRTRRRGLFPGGRHELRRNIAVTTSMSCTDFSFHFPMMFNTLVNSSWGDSVELHANVTCNNEDSDLLEDNSATTIIPILYPINILIQDQEDSTLYVSFTPKGPKIHQVKHMYQVRIQPSIHDHNIPTLEAVVGVPQPPSEGPITHQWSVQMEPPVPCHYEDLERLPDAAEPCLPGALFRCPVVFRQEILVQVIGTLELVGEIEASSMFSLCSSLSISFNSSKHFHLYGSNASLAQVVMKVDVVYEKQMLYLYVLSGIGGLLLLLLIFIVLYKVGFFKRNLKEKMEAGRGVPNGIPAEDSEQLASGQEAGDPGCLKPLHEKDSESGGGKD

SEQ ID NO: 80897 - protein, 25 aa, Homo sapiens [sequence omitted]

SEQ ID NO: 80898 - protein, 233 aa, Homo sapiens
MAAQGEPQVQFKLVLVGDGGTGKTTFVKRHLTGEFEKKYVATLGVEVHPLVFHTNRGPIKFNVWDTAGQEKFGGLRDGYYIQEMGIHHVAHAGLELMSSAQCAIIMFDVTSRVTYKNVPNWHRDLVRVCENIPIVLCGNKVDIKDRKVKAKSIVFHRKKNLQYYDISAKSNYNFEKPFLWLARKLIGDPNLEFVAMPALAPPEVVMDPALAAQYEHDLEVAQTTALPDEDDDL

SEQ ID NO: 80899 - protein, 384 aa, Homo sapiens
MWQAPRERQQPAGAAAPQVSEPGAPLRSSLLGLGGSLLPAGFAAGLHCPGEPAMRGYLVAIFLSAVFLYYVLHCILWGTNVYWVAPVEMKRRNKIQPCLSKPAFASLLRFHQFHPFLCAADFRKIASLYGSDKFDLPYGMRTSAEYFRLALSKLQSCDLFDEFDNIPCKKCVVVGNGGVLKNKTLGEKIDSYDVIIRMNNGPVLGHEEEVGRRTTFRLFYPESVFSDPIHNDPNTTVILTAFKPHDLRWLLELLMGDKINTNGFWKKPALNLIYKPYQIRILDPFIIRTAAYELLHFPKVFPKNQKPKHPTTGIIAITLAFYICHEVHLAGFKYNFSDLKSPLHYYGNATMSLMNKNAYHNVTAEQLFLKDIIEKNLVINLTQD

SEQ ID NO: 80900 - protein, 551 aa, Homo sapiens
MSWGTELWDQFDNLEKHTQWGIDILEKYIKFVKERTEIELSYAKQLRNLSKKYQPKKNSKEEEEYKYTSCKAFISNLNEMNDYAGQHEVISENMASQIIVDLARYVQELKQERKSNFHDGRKAQQHIETCWKQLESSKRRFERDCKEADRAQQYFEKMDADINVTKADVEKARQQAQIRHQMAEDSKADYSSILQKFNHEQHEYYHTHIPNIFQKIQEMEERRIVRMGESMKTYAEVDRQVIPIIGKCLDGIVKAAESIDQKNDSQLVIEAYKSGFEPPGDIEFEDYTQPMKRTVSDNSLSNSRGEGKPDLKFGGKSKGKLWPFIKKNKGATPEDFSNLPPEQRRKKLQQKVDELNKEIQKEMDQRDAITKMKDVYLKNPQMGDPASLDHKLAEVSQNIEKLRVETQKFEAWLAEVEGRLPARSEQARRQSGLYDSQNPPTVNNCAQDRESPDGSYTEEQSQESEMKVLATDFDDEFDDEEPLPAIGTCKALYTFEGQNEGTISVVEGETLYVIEEDKGDGWTRIRRNEDEEGYVPTSYVEVCLDKNAKDS

SEQ ID NO: 80901 - protein, 402 aa, Homo sapiens
MLHLHHSCLCFRSWLPAMLAVLLSLAPSASSDISASRPNILLLMADDLGIGDIGCYGNNTMRTPNIDRLAEDGVKLTQHISAASLCTPSRAAFLTGRYPVRSGMVSSIGYRVLQWTGASGGLPTNETTFAKILKEKGYATGLIGRILDTLDVEGLSNSTLIYFTSDHGGSLENQLGNTQYGGWNGIYKGGKGMGGWEGGIRVPGIFRWPGVLPAGRVIGEPTSLMDVFPTVVRLAGGEVPQDRVIDGQDLLPLLLGTAQHSDHEFLMHYCERFLHAARWHQRDRGTMWKVHFVTPVFQPEGAGACYGRKVCPCFGEKVVHHDPPLLFDLSRDPSETHILTPASEPVFYQVMERVQQAVWEHQRTLSPVPLQLDRLGNIWRPWLQPCCGPFPLCWCLREDDPQ

SEQ ID NO: 80902 - protein, 476 aa, Homo sapiens
MPQLNGGGGDDLGANDELISFKDEGEQEEKSSENSSAERDLADVKSSLVNESETNQNSSSDSEAERRPPPRSESFRDKSRESLEEAAKRQDGGLFKGPPYPGYPFIMIPDLTSPYLPNGSLSPTARTYLQMKWPLLDVQAGSLQSRQALKDARSPSPAHIVSNKVPVVQHPHHVHPLTPLITYSNEHFTPGNPPPHLPADVDPKTGIPRPPHPPDISPYYPLSPGTVGQIPHPLGWLVPQQGQPVYPITTGGFRHPYPTALTVNASMSSFLSSRFPPHMVPPHHTLHTTGIPHPAIVTPTVKQESSQSDVGSLHSSKHQDSKKEEEKKKPHIKKPLNAFMLYMKEMRAKVVAECTLKESAAINQILGRRWHALSREEQAKYYELARKERQLHMQLYPGWSARDNYGKKKKRKRDKQPGETNEHSECFLNPCLSLPPITDLSAPKKCRARFGLDQQNNWCGPCRCKYSKEVSGTVRA

SEQ ID NO: 80903 - protein, 110 aa, Homo sapiens
  MOD_RES (1)..(1): Any amino acid
XQAQLAVAYSQAFQLSGDEFYSDVAKGILQYVARSLSHRSGGFYSAEDADSPPERGQRPKEGAYYVWTVKEVQQLLPEPVLGATEPLTSGQLLMKHYGLTEAGNISPSQA

SEQ ID NO: 80904 - protein, 98 aa, Homo sapiens
MESAGLEQLLRELLLPDTERIRRATEQLQIVLRAPAALPALCDLLASAADPQIRQFAAVLTRRRLNTRWRRLAAEQRESLKSLILTALQRETEWGFCC

SEQ ID NO: 80905 - protein, 101 aa, Homo sapiens
MNGGQCSSRDKCQCPPNFTGKLCQIPVHGASVPKLYQHSQQPGKALGTHVIHSTHTLPLTVTSQQGVKVKFPPNIVNIHVKHPPEASVQIHQVSRIDGPTG

SEQ ID NO: 80906 - protein, 306 aa, Homo sapiens
MAQISSGGGGQSRCLLFALGSEMGSEKEQSPEPHLPEEGEGGKPWRVDDSEGSWIPPGEKEHGQESLSDELQETHPKKPWQKVTVRARELGDPIAHPRHEADEKPFICAQCGKTFNNTSNLRTHQRIHTGEKPYKCSECGKSFSRSSNRIRHERIHLEEKHYKCPKCQESFRRRSDLTTHQQDHLGKRPYRCDICGKSFSQSATLAVHHRTHLEPAPYICCECGKSFSNSSSFGVHHRTHTGERPYECTECGRTFSDISNFGAHQRTHRGEKPYRCTVCGKHFSRSSNLIRHQKTHLGEQAGKDSS

SEQ ID NO: 80907 - protein, 312 aa, Homo sapiens
MEVGNCTILTEFILLGFSADSQWQPILFGVFLMLYLITLSGNMTLVILIRTDSHLHTPMYFFIGNLSFLDFWYTSVYTPKILASCVSEDKRISLAGCGAQLFFSCVVAYTECYLLAAMAYDRHAAICNPLLYSGTMSTALCTGLVAGSYIGGFLNAIAHTANTFRLHFCGKNIIDHFFCDAPPLVKMSCTNTRVYEKVLLGVVGFTVLSSILAILISYVNILLAILRIHSASGRHKAFSTCASHLISVMLFYGSLLFMYSRPSSTYSLERDKVAALFYTVINPLLNPLIYSLRNKDIKEAFRKATQTIQPQT

SEQ ID NO: 80908 - protein, 367 aa, Homo sapiens
MGEGTINGLLDELLQTRVLNKEEMEKVKRENATVMDKTRALIDSVIPKGAQACQICITYICEEDSYLAGTLGLSAAPQAVQDNPAMPTSSGSEGNVKLCSLEEAQRIWKQKSAEIYPIMDKSSRTRLALIICNEEFDSIPRRTGAEVDITGMTMLLQNLGYSVDVKKNLTASDMTTELEAFAHRPEHKTSDSTFLVFMSHGIREGICGKKHSEQVPDILQLNAIFNMLNTKNCPSLKDKPKVIIIQACRGDSPGVVWFKDSVGVSGNLSLPTTEEFEDDAIKKAHIEKDFIAFCSSTPDNVSWRHPTMGSVFIGRLIEHMQEYACSCDVEEIFRKVRFSFEQPDGRAQMPTTERVTLTRCFYLFPGH

SEQ ID NO: 80909 - protein, 32 aa, Homo sapiens
  MOD_RES (1)..(1): Any amino acid
XLIHGMLSGVHLYWQRSFMTMMLCLLSWKTPT

SEQ ID NO: 80910 - protein, 404 aa, Homo sapiens
MRSPRPCGRPPTDSPDAGGAGRPLDGYISALLRRRRRRGAGQPRTSPGGADGGPRRQNSVRQRPPDASPSPGSARPAREPSLERVGGHPTSPAALSRAWASSWESEAAPEPAAPPAAPSPPDSPAEGRLVKAQYIPGAQAATRGLPGRAARRKPPPLTRGRSVEQSPPRERPRAAGRRGRMAEASGRRGSPRARKASRSQSETSLLGRASAVPSGPPKYPTAEREEPRPPRPRRGPAPTLAAQAAGSCRRWRSTAEIDAADGRRVRPRAPAARVPGPGPSPSAPQRRLLYGCAGSDSECSAGRLGPLGRRGPAGGVGGGYGESESSASEGESPAFSSASSDSDGSGGLVWPQQLVAATAASGGGAGAGAPAGPAKVFVKIKASHALKKKILRFRSGSLKVMTTV

SEQ ID NO: 80911 - protein, 248 aa, Homo sapiens
MAALGHLAGEAAAAPGPGTPCASRGARLPGPVSSARNPSTVCLCPEQPTCSNADSRAHPLGDEGGTASKKQKNKKKTRNRASVANGGEKASEKLAPEEVPLSAEAQAQQLAQELAWCVEQLELGLKRQKPTPKQKEQAIGAIRTLRSKRTPLPRKRQLMHSLFGDYRAQMEAEWREALRALRAAAYSAQVQPVDGATRKKSQRVCRPRSIWRAKATLDMPDEEFSLQMPPRSPKTSPKSDEQWWRWRF

SEQ ID NO: 80912 - protein, 314 aa, Homo sapiens
RAAVHCALRSPPPEARALAMSRPPPPRVASVLGTMEMGRRMDAPASAAAVRAFLERGHTELDTAFMYSDGQSETILGGLGLGLGGGDCRVKIATKANPWDGKSLKPDSVRSQLETSLKRLQCPQVDLFYLHAPDHGTPVEETLHACQRLHQEGMYNATTRQVETELFPCLRHFGLRFYAYNPLAGGLLTGKYKYEDKDGKQPVGRFFGNSWAETYRNRFWKEHHFEAIALVEKALQAAYGASAPSVTSAALRWMYHHSQLQGAHGDAVILGMSSLEQLEQNLAATEEGPLEPAVVDAFNQAWHLVAHECPNYFR

SEQ ID NO: 80913 - protein, 304 aa, Homo sapiens
MCKISGLVQGISVAASVFTLVAIAVDRFQCVVYPFKPKLTIKTAFVIIMIIWVLAITIMSPSAVMLHVQEEKYYRVRLNSQNKTSPVYWCREDWPNQEMRKIYTTVLFANIYLAPLSLIVIMYGRIGISLFRAAVPHTGRKNQEQWHVVSRKKQKIIKMLLIVALLFILSWLPLWTLMMLSDYADLSPNELQIINIYIYPFAHWLAFGNSSVNPIIYGFFNENFRRGFQEAFQLQLCQKRAKPMEAYALKAKSHVLINTSNQLVQESTFQNPHGETLLYRKSAEKPQQELVMEELKETTNSSEI

SEQ ID NO: 80914 - protein, 277 aa, Homo sapiens
MSLMVISMACVGFFLLQGAWTHEGGQDKPLLSAWPSAVVPRGGHVTLLCRSRLGFTIFSLYKEDGVPVPELYNKIFWKSILMGPVTPAHAGTYRCRGSHPRSPIEWSAPSNPLVIVVTGNSSSSSSSPTEPSSKTGIRRHLHILIGTSVAIILFIILFFFLLHCCCSNKKNAAVMDQEPAGDRTVNREDSDDQDPQEVTYAQLDHCVFTQTKITSPSQRPKTPPTDTTMYMELPNAKPRSLSPAHKHHSQALRGSSRETTALSQNRVASSHVPAAGI

SEQ ID NO: 80915 - protein, 529 aa, Homo sapiens
MSLPKTPSTPLNSTSTSESKKLKVSVAKEGTRGLPELKEKKNMVDRSKLLPTSLQNEFIPKEVLLSLTYAANAGPCPENLLPPKKIKTPKGTLPRLVDHVWHHPVRRNKFKYLIDHPVSLTGAGRDISFLYDVTYAKGQTREKAVCPPHLARSLQSHDGVIVPHKPKTLTDTLIPEEFHIVSSTGVSGLECYDDKYTTLLTDSENRLLLFPSMKPNKRVEVAQLNDVMDTMLERAGVENQEYTGPTKMHKLLHILKKEQTIYNMIFHELIRQVSVDCADRGELLSKVRERYVQMLDQIARQMIDFYKDLVTQRVMDQRILEELYNFKHVIEELTRELCLVRAHDVKLTKETEKAHKDLAQALLNAEKNAKIVEEYHDLYTLQRERMENDMKKLVAERDIWSSATYELALKVIERNRVILARRLYLNEKGWNKYTKHFIILLSNKDTEDLALLQKLTQKWRNLVNKLKQEVEQMEESTSETLKIVKDGLIKWQEFFNEKDILSPNKGNIFNSVLLDFKQWQKVTPKFFQV

SEQ ID NO: 80916 - protein, 131 aa, Homo sapiens
MSAEVETSEGVDESEKKNSGALEKENQMRMADLSELLKEGTKEAHDRAENTQFVKDFLKGNIKKELFKLATTALYFTYSALEEEMERNKDHPAFAPLYFPMELHRKEALTKDMEYFFGENWEEQVQCPKAA

SEQ ID NO: 80917 - protein, 36 aa, Homo sapiens
MLSRNDDICIYGGLGLGGLLLLAVVLLSACLCWLHR

SEQ ID NO: 80918 - protein, 137 aa, Homo sapiens
  MOD_RES (1)..(1): Any amino acid
XSGVQELVKQVLSTLRAIAGNDDVKDAIVRAGGTESIVAAMTQHLTSPQVCEQSCAALCFLALRKPDNSRIIVEGGGAVAALQAMKAHPQKAGVQVGRAGDGGRQAGVGCAETGLHADPKPGGPRPGLLEAHPGPGG

SEQ ID NO: 80919 - protein, 245 aa, Homo sapiens
MGRQVNPRPRGNCQLDREEGTQQRVTAHRKTMSHCQVLWEDKDSQCWGHLDWVWAHVSRSSQRGLPGGGGIGADLGRKGRIWRGQQRPLTATWAEQRAWPPLRMASTLAQGKDPPMEKALSMFSDDFGSFMRPHSEPLAFPARPGGAGNIKTLGDAYEFAVDVRDFSPEDIIVTTSNNHIEVRAEKLAADGTVMNTFAHKCQLPEDVDPTSVTSALREDGSLTIRARRHPHTEHVQQTFRTEIKI

SEQ ID NO: 80920 - protein, 1679 aa, Homo sapiens
MAQILPIRFQEHLQLQNLGINPANIGFSTLTMESDKFICIREKVGEQAQVVIIDMNDPSNPIRRPISADSAIMNPASKVIALKGIKESGKTLQIFNIEMKSKMKAHTMTDDVTFWKWISLNTVALVTDNAVYHWSMEGESQPVKMFDRHSSLAGCQIINYRTDAKQKWLLLTGISAQQNRVVGAMQLYSVDRKVSQPIEGHAASFAQFKMEGNAEESTLFCFAVRGQAGGKLHIIEVGTPPTGNQPFPKKAVDVFFPPEAQNDFPVAMQISEKHDVVFLITKYGYIHLYDLETGTCIYMNRISGETIFVTAPHEATAGIIGVNRKGQVLSVCVEEENIIPYITNVLQNPDLALRMAVRNNLAGAEELFARKFNALFAQGNYSEAAKVAANAPKGILRTPDTIRRFQSVPAQPGQTSPLLQYFGILLDQGQLNKYESLELCRPVLQQGRKQLLEKWLKEDKLECSEELGDLVKSVDPTLALSVYLRANVPNKVIQCFAETGQVQKIVLYAKKVGYTPDWIFLLRNVMRISPDQGQQFAQMLVQDEEPLADITQIVDVFMEYNLIQQCTAFLLDALKNNRPSEGPLQTRLLEMNLMHAPQVADAILGNQMFTHYDRAHIAQLCEKAGLLQRALEHFTDLYDIKRAVVHTHLLNPEWLVNYFGSLSVEDSLECLRAMLSANIRQNLQICVQVASKYHEQLSTQSLIELFESFKSFEGLFYFLGSIVNFSQDPDVHFKYIQAACKTGQIKEVERICRESNCYDPERVKNFLKEAKLTDQLPLIIVCDRFDFVHDLVLYLYRNNLQKYIEIYVQKVNPSRLPVVIGGLLDVDCSEDVIKNLILVVRGQFSTDELVAEVEKRNRLKLLLPWLEARIHEGCEEPATHNALAKIYIDSNNNPERFLRENPYYDSRVVGKYCEKRDPHLACVAYERGQCDLELINVCNENSLFKSLSRYLVRRKDPELWGSVLLESNPYRRPLIDQVVQTALSETQDPEEVSVTVKAFMTADLPNELIELLEKIVLDNSVFSEHRNLQNLLILTAIKADRTRVMEYINRLDNYDAPDIANIAISNELFEEAFAIFRKFDVNTSAVQVLIEHIGNLDRAYEFAERCNEPAVWSQLAKAQLQKGMVKEAIDSYIKADDPSSYMEVVQAANTSGNWEELVKYLQMARKKARESYVETELIFALAKTNRLAELEEFINGPNNAHIQQVGDRCYDEKMYDAAKLLYNNVSNFGRLASTLVHLGEYQAAVDGARKANSTRTWKEVCFACVDGKEFRLAQMCGLHIVVHADELEELINYYQDRGYFEELITMLEAALGLERAHMGMFTELAILYSKFKPQKMREHLELFWSRVNIPKVLRAAEQAHLWAELVFLYDKYEEYDNAIITMMNHPTDAWKEGQFKDIITKVANVELYYRAIQFYLEFKPLLLNDLLMVLSPRLDHTRAVNYFSKVKQLPLVKPYLRSVQNHNNKSVNESLNNLFITEEDYQALRTSIDAYDNFDNISLAQRLEKHELIEFRRIAAYLFKGNNRWKQSVELCKKDSLYKDAMQYASESKDTELAEELLQWFLQEEKRECFGACLFTCYDLLRPDVVLETAWRHNIMDFAMPYFIQVMKEYLTKVDKLDASESLRKEEEQATETQPIVYGQPQLMLTAGPSVAVPPQAPFGYGYTAPPYGQPQPGFGYSM

SEQ ID NO: 80921 - protein, 109 aa, Homo sapiens
MTSEVIEDEKQFYSKAKTYWKQIPPTVDGMLGGYGHISSIDINSSRKFLQRFLRVGRSGVLSRRGCGSGGTAESMWGATFYTCNTAGLLAISWYLPQSLEELGWVGTVG

SEQ ID NO: 80922 - protein, 337 aa, Homo sapiens
MNESPQTNEFKGTTEEAPAKESPHTSEFKGAALVSPISKRWTHLVRLLRLIILIRIFHLLHQKRQLEKLMRRLVSENKRRYTRDGFDLDLTYVTERIIAMSFPSSGRQSFYRNPIEEVVRFLDKKHRNHYRVYNLCSERAYDPKHFHNRVSRIMIDDHNVPTLHEMVVFTKEVNEWMAQDLENIVAIHCKGGKGRTGTMVCALLIASEIFLTAEESLYYFGERRTNKTHSNKFQGVETPSQNRYVGYFAQVKHLYNWNLPPRRILFIKRFIIYSIRGDVCDLKVQVVMEKKVVFSSTSLGNCSREEGSTQGQLEGGAIQETCARLMGGSNSEREGGT

SEQ ID NO: 80923 - protein, 316 aa, Homo sapiens
MGKPGRVNQTTVSDFLLLGLSEWPEEQPLLFGIFLGMYLVTMVGNLLIILAISSDPHLHTPMYFFLANLSLTDACFTSASIPKMLANIHTQSQIISYSGCLAQLYFLLMFGGLDNCLLAVMAYDRYVAICQPLHYSTSMSPQLCALMLGVCWVLTNCPALMHTLLLTRVAFCAQKAIPHFYCDPSALLKLACSDTHVNELMIITMGLLFLTVPLLLIVFSYVRIFWAVFVISSPGGRWKAFSTCGSHLTVVLLFYGSLMGVYLLPPSTYSTERESRAAVLYMVIIPTLNPFIYSLRNRDMKEALGKLFVSGKTFFL

SEQ ID NO: 80924 - protein, 98 aa, Homo sapiens
MPGLVDSNPAPPESQEKKPLKPCCACPETKKARDAWFRGRVSVDLSRSLVPGNDGERGERQASTTHSFLQIIIEKGEEHCGHLIEAHKECMRALGFKI

SEQ ID NO: 80925 - protein, 41 aa, Homo sapiens
MRPLQIVPSRLISQLYCGLKPPASTRNQICLKMARPSSTQG

SEQ ID NO: 80926 - protein, 471 aa, Homo sapiens
MQIDVDPQEDPQNAPDVNYVVENPSLDLEQYAASYSGLMRIERLQFIADHCPTLRVEALKMALSFVQRTFNVDMYEEIHRKLSEATRELQNAPDAIPESGVEPPALDTAWVEATRKKALLKLEKLDTDLKNYKGNSIKESIRRGHDDLGDHYLDCGDLSNALKCYSRARDYCTSAKHVINMCLNVIKVSVYLQNWSHVLSYVSKAESTPEIAEQRGERDSQTQAILTKLKCAAGLAELAARKYKQAAKCLLLASFDHCDFPELLSPSNVAIYGGLCALATFDRQELQRNVISSSSFKLFLELEPQVRDIIFKFYESKYASCLKMLDEMKDNLLLDMYLAPHVRTLYTQIRNRALIQYFSPYVSADMHRMAAAFNTTVAALEDELTQLILEGLISARVDSHSKILYARDVDQRSTTFEKSLLMGKEFQRRAKAMMLRAAVLRNQIHVKSPPREGSQGELTPANSQSRMSTNM

SEQ ID NO: 80927 - protein, 1036 aa, Homo sapiens
MEPQDLELELCKKHHFGINKPEKIIPSPDDSKFLLKTFTHIKSNVSAPNKKKVKESKEKEKLERRLLEELLKMFMDSESFYYSLTYDLTNSVQRQSTGERDGRPLWQKVDDRFFWNKYMIQDLTEIGTPDVDFWIIPMIQGFVQIEELVVNYTESSDDEKSSPETPPQESTCVDDIHPRFLVALISRRSRHRAGMRYKRRGVDKNGNVANYVETEQLIHVHNHTLSFVQTRGSVPVFWSQVGYRYNPRPRLDRSEKETVAYFCAHFEEQLNIYKKQVIINLVDQAGREKIIGDAYLKQVLLFNNSHLTYVSFDFHEHCRGMKFENVQTLTDAIYDIILDMKWCWVDEAGVICKQEGIFRVNCMDCLDRTNVVQAAIARVVMEQQLKKLGVMPPEQPLPVKCNRIYQIMWANNGDSISRQYAGTAALKGDFTRTGERKLAGVMKDGVNSANRYYLNRFKDAYRQAVIDLMQGIPVTEDLYSIFTKEKEHEALHKENQRSHQELISQLLQSYMKLLLPDDEKFHGGWALIDCDPSLIDATHRDVDVLLLLSNSAYYVAYYDDEVDKVNQYQRLSLENLEKIEIGPEPTLFGKPKFSCMRLHYRYKEASGYFHTLRAVMRNPEEDGKDTLQCIAEMLQITKQAMGSDLPIIEKKLERKSSKPHEDIIGIRSQNQGSLAQGKNFLMSKFSSLNQKVKQTKSNVNIGNLRKLGNFTKPEMKVNFLKPNLKVNLWKSDSSLETMENTGVMDKVQAESDGDMSSDNDSYHSDEFLTNSKSDEDRQLANSLESVGPIDYVLPSCGIIASAPRLGSRSQSLSSTDSSVHAPSEITVAHGSGLGKGQESPLKKSPSAGDVHILTGFAKPMDIYCHRFVQDAQNKVTHLSETRSVSQQASQERNQMTNQVSNETQSESTEQTPSRPSQLDVSLSATGPQFLSVEPAHSVASQKTPTSASSMLELETGLHVTPSPSESSSSRAVSPFAKIRSSMVQVASITQAGLTHGINFAVSKVQKSPPEPEIINQVQQNELKKMFIQCQTRIIQI

SEQ ID NO: 80928 - protein, 112 aa, Homo sapiens
MQLYRKHSCVTLHQRIHNGQKPYECKQCQKSFSHLTELMVHQTIHTSEEPDQCEKFRKAFSHLTDLRKHQKINAREKPYECEECGKVFSYPANLAQHGKVHVEKPYECKECG

SEQ ID NO: 80929 - protein, 64 aa, Homo sapiens
MDSDYRKQWDQYVKELYEQECNGETVVYWEVKYPFPMSNRDVSFPQACGAFLLSVYNAGVGVLP

SEQ ID NO: 80930 - protein, 56 aa, Homo sapiens
MEIPMGTQGCFSKSLLLSASILVLWMLQGSQAALYIQKIPEQPQKNQDLLLSVQGV

SEQ ID NO: 80931 - protein, 471 aa, Homo sapiens
MDPAGAADPSVPPNPLTHLSLQDRSEMQLQSEADRRSLPGTWTRSSPEHTTILRGGVRRCLQQQCEQTVRILHAKVAQKSYGNEKRFFCPPPCVYLSGPGWRVKPGQDQAHQAGETGPTVCGYMGLDSASGSATETQKLNFEQQPDSREFGCAKTLYISDADKRKHFRLVLRLVLRGGRELGTFHSRLIKVISKPSQKKQSLKNTDLCISSGSKVSLFNRLRSQTVSTRYLSVEDGAFVASARQWAAFTLHLADGHSAQGDFPPREGYVRYGSLVQLVCTVTGITLPPMIIRKVAKQCALLDVDEPISQLHKCAFQFPGSPPGGGGTYLCLATEKVVQFQASPCPKEANRALLNDSSCWTIIGTESVEFSFSTSLACTLEPVTPVPLISTLELSGGGDVATLELHGENFHAGLKVWFGDVEAETMYRYGVEPAVPGVRGAGRGGLLQRLALAARSHHNPHEPGARRRALLP

SEQ ID NO: 80932 - protein, 91 aa, Homo sapiens
MASALWTVLPSRMSLRSLKWSLLLLSLLSFFVMWYLSLPHYNVIERVNWMYFYEIHLDVCQLRRVIAAHGFSSKEIITFWQVMLRNTTCHY

SEQ ID NO: 80933 - protein, 176 aa, Homo sapiens
LRQYLDPAQRGVRVLEVASGSGQHAAHFARAFPLAEWQPSDVDQRCLDSIAATTQAQGLTNVKAPLHLDVTWGWEHWGGILPQSLDLLLCINMAHVSPLRCTEGLFRAAGHLLKPRALLITYGGGGALSFSKPQPASLSQALWEIPRPWSSGLCPHAHSPMPSMGRSPPRATWTLT

SEQ ID NO: 80934 - protein, 77 aa, Homo sapiens
MALDVKSRAKRYEKLDFLGEGQFATVYKARDKNTNQIVAIKKIKLGHRSEAKDGINRTALREIKLLQELSHPNIIAP

SEQ ID NO: 80935 - protein, 301 aa, Homo sapiens
MHPSRRSLPFPLNCQLARVGTADYGSPSDQSDQQLDCALDLMRRLPPQQIEKNLSDLIDLVPSLCEDLLSSVDQPLKIARDKVVGKDYLLCDYNRDGDSYRSPWSNKYDPPLEDGAMPSARLRKLEVEANNAFDQYRDLYFEGGVSSVYLWDLDHGFAGVILIKKAGDGSKKIKGCWDSIHVVEVQEKSSGRTAHYKLTSTVMLWLQTNKSGSGTMNLGGSLTRQMEKDETVSDCSPHIANIGRLVEDMENKIRSTLNEIYFGKTKDIVNGLRSVQTFADKSKQEALKNDLVEALKRKQQC

SEQ ID NO: 80936 - protein, 1081 aa, Homo sapiens
  MOD_RES (1)..(1): Any amino acid
XLVRQHKAAQVAKEKKKKKKKKAENAEGQTPAIGPDGEPLDETSQMSDLPVKVIHVESGKILTGTDAPKAGQLEAWLEMNPGYEVAPRSDSEESGSEEEEEEEEEEQPQAAQPPTLPVEEKKKIPDPDSDDVSEVDARHIIENAKQDVDDEYGVSQALARGLQSYYAVAHAVTERVDKQSALMVNGVLKQYQIKGLEWLVSLYNNNLNGILADEMGLGKTIQTIALITYLMEHKRINGPFLIIVPLSTLSNWAYEFDKWAPSVVKVSYKGSPAARRAFVPQLRSGKFNVLLTTYEYIIKDKHILAKIRWKYMIVDEGHRMKNHHCKLTQVLNTHYVAPRRLLLTGTPLQNKLPELWALLNFLLPTIFKSCSTFEQWFNAPFAMTGEKVDLNEEETILIIRRLHKVLRPFLLRRLKKEVEAQLPEKVEYVIKCDMSALQRVLYRHMQAKGVLLTDGSEKDKKGKGGTKTLMNTIMQLRKICNHPYMFQHIEESFSEHLGFTGGIVQGLDLYRASGKFELLDRILPKLRATNHKVLLFCQMTSLMTIMEDYFAYRGFKYLRLDGTTKAEDRGMLLKTFNEPGSEYFIFLLSTRAGGLGLNLQSADTVIIFDSDWNPHQDLQAQDRAHRIGQQNEVRVLRLCTVNSVEEKILAAAKYKLNVDQKVIQAGMFDQKSSSHERRAFLQAILEHEEQDESRHCSTGSGSASFAHTAPPPAGVNPDLEEPPLKEEDEVPDDETVNQMIARHEEEFDLFMRMDLDRRREEARNPKRKPRLMEEDELPSWIIKDDAEVERLTCEEEEEKMFGRGSRHRKEVDYSDSLTEKQWLKAIEEGTLEEIEEEVRQKKSSRKRKRDSDAGSSTPTTSTRSRDKDDESKKQKKRGRPPAEKLSPNPPNLTKKMKKIVDAVIKYKDSSSGRQLSEVFIQLPSRKELPEYYELIRKPVDFKKIKERIRNHKYRSLNDLEKDVMLLCQNAQTFNLEGSLIYEDSIVLQSVFTSVRQKIEKEDDSEGEESEEEEEGEEEGSESESRSVKVKIKLGRKEKAQDRLKGGRRRPSRGSRAKPVVSDDDSEEEQEEDRSGSGSEED

SEQ ID NO: 80937 - protein, 135 aa, Homo sapiens
MEKPLFPLVPLHWFGFGYTALVVSGGIVGYVKTGSVPSLAAGLLFGSLAGLGAYQLYQDPRNVWGFLAATSVTFVGVMGMRSYYYGKFMPVGLIAGARYFHSITLLYHVEFSLLPRILYAFKTLLVSEYLMLCIN

SEQ ID NO: 80938 - protein, 98 aa, Homo sapiens
MSSAAGPDPSEAPEERHFLSTAEAAALERELLEDYRFGRQQLVELCGHASAVAVTKVGKLKLRGGEGPALGQRGMEAELQPRCVWLWSKPPHLEGPGG

SEQ ID NO: 80939 - protein, 84 aa, Homo sapiens
MGTRSAIAAPRILCSRGLRSGSARATGSGVERSPSAANPTLMTSLRTWPLPWALPSPTCLGPPIPPRRQRKAWAVKSKSSALVI

SEQ ID NO: 80940 - protein, 59 aa, Homo sapiens
MNIIDIVAIIPYFITLGTELAEKPEDAQQGQQAMSLAILRVIRNADLCKARRVSGEGSI

SEQ ID NO: 80941 - protein, 137 aa, Homo sapiens
MEDLEETLFEEFENYSYDLDYYSLESDLEEKVQLGVVHWVSLVLYCLAFVLGIPGNAIVIWFTGFKWKKTVTTLWFLNLAIADFIFLLFLPLYISYVAMNFHWPFGIWLCKANSFTAQLNMFASVFFLTVISLDHYI

SEQ ID NO: 80942 - protein, 1091 aa, Homo sapiens
MQVHERNKDGSQSGSRMEDWKMKDTQKCSQCEEGFDFPEDLQKHIAECHPECSPNEDRAALQCVYCHELFVEETSLMNHMEQVHSGEKKNSCSICSESFHTVEELYSHMDSHQQPESCNHSNSPSLVTVGYTSVSSTTPDSNLSVDSSTMVEAAPPIPKSRGRKRAAQQTPDMTGPSSKQAKVTYSCIYCNKQLFSSLAVLQIHLKTMHLDKPEQAHICQYCLEVLPSLYNLNEHLKQVHEAQDPGLIVSAMPAIVYQCNFCSEVVNDLNTLQEHIRCSHGFANPAAKDSNAFFCPHCYMGFLTDSSLEEHIRQVHCDLSGSRFGSPVLGTPKEPVVEVYSCSYCTNSPIFNSVLKLNKHIKENHKNIPLALNYIHNGKKSRALSPLSPVAIEQTSLKMMQAVGGAPARPTGEYICNQCGAKYTSLDSFQTHLKTHLDTVLPKLTCPQCNKEFPNQESLLKHVTIHFMITSTYYICESCDKQFTSVDDLQKHLLDMHTFVFFRCTLCQEVFDSKVSIQLHLAVKHSNEKKVYRCTSCNWDFRNETDLQLHVKHNHLENQGKVHKCIFCGESFGTEVELQCHITTHSKKYNCKFCSKAFHAIILLEKHLREKHCVFETKTPNCGTNGASEQVQKEEVELQTLLTNSQESHNSHDGSEEDVDTSEPMYGCDICGAAYTMETLLQNHQLRDHNIRPGESAIVKKKAELIKGNYKCNVCSRTFFSENGLREHMQTHLGPVKHYMCPICGERFPSLLTLTEHKVTHSKSLDTGNCRICKMPLQSEEEFLEHCQMHPDLRNSLTGFRCVVCMQTVTSTLELKIHGTFHMQKTGNGSAVQTTGRGQHVQKLYKCASCLKEFRSKQDLVKLDINGLPYGLCAGCVNLSKSASPGINVPPGTNRPGLGQNENLSAIEGKGKVGGLKTRCSSCNVKFESESELQNHIQTIHRELVPDSNSTQLKTPQVSPMPRISPSQSDEKKTYQCIKCQMVFYNEWDIQVHVANHMIDEGLNHECKLCSQTFDSPAKLQCHLIEHSFEGMGGTFKCPVCFTVFVQANKLQQHIFSAHGQEDKIYDCTQCPQKFFFQTELQNHTMTQHSS

SEQ ID NO: 80943 - protein, 1595 aa, Homo sapiens
FQHLYQEWEREFQLWEEQLHSYPHKDQLQEYEKQWKTWQGHMKATQSYLQEKVNSFQNMKNQYMGNMSMPPPFVPYSQMPPPLPTMPPPVLPPSLPPPVMPPALPATVPPPGMPPPVMPPSLPTSVPPPGMPPSLSSAGPPPVLPPPSLSSAGPPPVLPPPSLSSTAPPPVMPLPPLSSATPPPGIPPPGVPQGIPPQLTAAPVPPASSSQSSQVPEKPRPALLPTPVSFGSAPPTTYHPPLQSAGPSEQVNSKAPLSKSALPYSSFSSDQGLGESSAAPSQPITAVKDMPVRSGGLLPDPPRSSYLESPRGPRFDGPRRFEDLGSRCEGPRPKGPRFEGNRPDGPRPRYEGHPAEGTKSKWGMIPRGPASQFYITPSTSLSPRQSGPQWKGPKPAFGQQHQQQPKSQAEPLSGNKEPLADTSSNQQKNFKMQSAAFSIAADVKDVKAAQSNENLSDSQQEPPKSEVSEGPVEPSNWDQNVQSMETQIDKAQAVTQPVPLANKPVPAQSTFPSKTGGMEGGTAVATSSLTADNDFKPVGIGLPHSENNQDKGLPRPDNRDNRLEGNRGNSSSYRGPGQSRMEDTRDKGLVNRGRGQAISRGPGLVKQEDFRDKMMGRREDSREKMNRGEGSRDRGLVRPGSSREKVPGGLQGSQDRGAAGSRERGPPRRAGSQERGPLRRAGSRERIPPRRAGSRERGPPRGPGSRERGLGRSDFGRDRGPFRPEPGDGGEKMYPYHRDEPPRAPWNHGEERGHEEFPLDGRNAPMERERLDDWDRERYWRECERDYQDDTLELYNREDRFSAPPSRSHDGDRRGPWWDDWERDQDMDEDYNREMERDMDRDVDRISRPMDMYDRSLDNEWDRDYGRPLDEQESQFRERDIPSLPPLPPLPPLPPLDRYRDDRWREERNREHGYDRDFRDRGELRIREYPERGDTWREKRDYVPDRMDWERERLSDRWYPSDVDRHSPMAEHMPSSHHSSEMMGSDASLDSDQGLGGVMVLSQRQHEIILKAAQELKMLREQKEQLQKMKDFGSEPQMADHLPPQESRLQNTSSRPGMYPPPGSYRPPPPMGKPPGSIVRPSAPPARSSVPVTRPPVPIPPPPPPPPLPPPPPVIKPQTSAVEQERWDEDSFYGLWDTNDEQGLNSEFKSETAAIPSAPVLPPPPVHSSIPPPGPVPMGMPPMSKPPPVQQTVDYGHGRDISTNKVEQIPYGERITLRPDPLPERSTFETEHAGQRDRYDRERDREPYFDRQSNVIADHRDFKRDRETHRDRDRDRGVIDYDRDRFDRERRPRDDRAQSYRDKKDHSSSRRGGFDRPSYDRKSDRPVYEGPSMFGGERRTYPEERMPLPAPSLSHQPPPAPRVEKKPESKNVDDILKPPGRESRPERIVVIMRGLPGSGKTHVAKLIRDKEVEFGGPAPRVLSLDDYFITEVEKEEKDPDSGKKVKKKVMEYEYEAEMEETYRTSMFKTFKKTLDDGFFPFIILDAINDRVRHFDQFWSAAKTKGFEVYLAEMSADNQTCGKRNIHGRKLKEINKMADHWETAPRHMMRLDIRSLLQDAAIEEVEMEDFDANIEEQKEEKKDAEEEESELTSWMA

SEQ ID NO: 80944 - protein, 137 aa, Homo sapiens
MEMQQNIENYRATAGVEALQLVDREAKPHMESYNAGVKHYEADDFEMAIRHFEQALREYFVEDTECRTLCEGPQRFEEYEYLGYKAGLYEAIADHYMQVLVCQHECVRELATRPGRLSPIENFLPLHYDYLQFAYYR

SEQ ID NO: 80945 - protein, 89 aa, Homo sapiens
MPRSFLVKKHFNASKKPNYSELDTHTVIISPYLYESYSMPVIPQPEILSSGAYSPITVWTTAAPFHAQLPNGLSPLSGYSSSLGRVSPP

SEQ ID NO: 80946 - protein, 362 aa, Homo sapiens
MAALRQPQVAELLAEARRAFREEFGAEPELAVSAPGRVNLIGEHTDYNQGLVLPMALELMTVLVGSPRKDGLVSLLTTSEGADEPQRLQFPLPTAQRSLEPGTPRWANYVKGVIQYYPAAPLPGFSAVVVSSVPLGGGLSSSASLEVATYTFLQQLCPDSGTIAARAQVCQQAEHSFAGMPCGIMDQFISLMGQKGHALLIDCSEYPVRRRQCEEVARALGKESLREVQLEELEAARDLVSKEGFRRARHVVGEIRRTAQAAAALRRGDYRAFGRLMVESHRSLRDDYEVSCPELDQLVEAALAVPGVYGSRMTGGGFGGCTVTLLEASAAPHAMRHIQEHYGGTATFYLSQAADGAKVLCL

SEQ ID NO: 80947 - protein, 155 aa, Homo sapiens
MEERGDSEPTPGCSGLGPGGVRGFGDGGGAPSWAPEDAWMGTHPKYLEMMELDIGDATQVYVAFLVYLDLMESKSWHEVNCVGLPELQLICLVGTEIEGEGLQTVVPTPITASLSHNSCTQKKAHMRTQQEGGCLQAKKRGLIRDGMFLHFGLDF

SEQ ID NO: 80948 - protein, 161 aa, Homo sapiens
EQLVAKALEHCGGVDFLVCSAGVNPLVGSTLGTSEQIWDKILSVNVKSPALLLSQLLPYMENRRGAVILVSSIAAYNPVVALGVYNVSKTALLGLTRTLALELAPKDIRVNCVVPGIIKTDFSKVFHGNESLWKNFKEHHQLQRQVGFGDLVVHVWLGRGS

SEQ ID NO: 80949 - protein, 99 aa, Homo sapiens
  MOD_RES (1)..(1): Any amino acid
XHLALGSDLTTLGLNLNSPENLYPKFASPWASSPCRPQDIDFHVPSEYLTNIHIRDKLAAIKLGRYGEDLLFYLYYMNGGDVLQLLAAVELSSIWNMTN

SEQ ID NO: 80950 - protein, 137 aa, Homo sapiens
MLAKKFEMKYGGKPRKHRKDRLQDLIDIGFGYDETDPFIDNSEAYDELVPASLTTKYGGFYINTGTLQFRQASDTEEDDITDNQKHKPPKVPKIKEDDIEMKKRKRKEEGEKEKKPRKKVPKQLGVVALNSHKSEKK

SEQ ID NO: 80951 - protein, 90 aa, Homo sapiens
MEVAVPVKQEAEGLALDSPWHRFRRFHLGDAPGPREALGLLRALCRDWLRPEVHTKEQMLELLVLEQFLSALPADTQAWVCSRQPQSGEE

SEQ ID NO: 80952 - protein, 48 aa, Homo sapiens
MGTPNDQAVLQAIFNPDTPFGDIVGLDLGEEAEKEEREEENTTTRTED

SEQ ID NO: 80953 - protein, 228 aa, Homo sapiens
MARHVFLTGPPGVGKTTLIHKASEVLKSSGVPVDGFYTEEVRQGGRRIGFDVVTLSGTRGPLSRVGLEPPPGKRECRVGQYVVDLTSFEQLALPVLRNADCSSGPGQRVCVIDEIGKMELFSQLFIQAVRQTLSTPGTIILGTIPVPKGKPLALVEEIRNRKDVKVFNSPYCVIEDQSKFSSCVSQSTLTEPGWRQKLLQSLLNSEWKKRAPVVPTSVSPPFYLRWIP

SEQ ID NO: 80954 - protein, 91 aa, Homo sapiens
VTLQCANISILENKLCHWAYPGHISDSMLCAGLWEGGRGSCQGDSGGPLVCNGTLAGVVSGGAEPCSRPRRPAVYTSVCHYLDWIQEIMEN

SEQ ID NO: 80955 - protein, 60 aa, Homo sapiens
MRLFVSDGVPGCLPVLAAAGRARGRAEVLISTVGPEDCTETARCPGSPALPPKAAPAQPR

SEQ ID NO: 80956 - protein, 9 aa, Homo sapiens
MLDTMEAPG

SEQ ID NO: 80957 - protein, 333 aa, Homo sapiens
MIPIEWVCRRIATGSFLKRNPGVKEGYKFYPPKVELFFKDDANNDPQWSEEQLIAAKFCFAGLLIGQTEVDIMSHATQAIFEILEKSWLPQNCTLVDMKIEFGVDVTTKEIVLADVIDNDSWRLWPSGDRSQQKDKQSYRDLKEVTPEGLQMVKKNFEWVAERVELLLKSESQCRVVVLMGSTSDLGHCEKIKKACGNFGIPCELRVTSAHKGPDETLRIKAEYEGDGIPTVFVAVAGRSNGLGPVMSGNTAYPVISCPPLTPDWGVQDVWSSLRLPSGLGCSTVLSPEGSAQFAAQIFGLSNHLVWSKLRASILNTWISLKQADKKIRECNL

SEQ ID NO: 80958 - protein, 153 aa, Homo sapiens
MAAVEHRHSSGLPYWPYLTAETLKNRMGHQPPPPTQQHSIIDNSLSLKTPSECVLYPLPPSADDNLKTPPECLLTPLPPSALPSADDNLKTPAECLLYPLPPSADDNLKTPPECLLTPLPPSAPPSADDNLKTPPECVCSLPFHPQRMIISRN

SEQ ID NO: 80959 - protein, 93 aa, Homo sapiens
MAEPDYIEDDNPELIRPQKLINPVKTSRNHQDLHRELLMNQKRGLAPQNKPELQKVMEKRKRDQVIKQKEEEAQKKKSDLEIELLKRQQKLEQ

SEQ ID NO: 80960 - protein, 168 aa, Homo sapiens
MLLPLLLLLPMCWAVEVKRPRGVSLTNHHFYDESKPFTCLDGSATIPFDQVNDDYCDCKDGSDEPGTAACPNGSFHCTNTGYKPLYIPSNRVNDGVCDCCDGTDEYNSGVICENTCKEKGRKERESLQQMAEVTREGFRLKKILIEDWKKAREEKQKKLIELQAGKKS

SEQ ID NO: 80961 - protein, 436 aa, Homo sapiens
ERLKLERNKEYNQFLRGKEESSEKFRQVEKSTEPKSQRNKKPIGQVKPDLTSQIQTSCENSEGPRKDVLTPSEAYEELLNQRRLEEDRYRQLDDEIELRNRRIIKKANEEVGISNLKHQRFASKAGIPDRRFHRFNEDRVFDRRYHRPDQDPEVSEEMDERFRYESDFDRRLSRVYTNDRMHRNKRGNMPPMEHDGDVIEQSNIRISSAENKSAPDNETSKSANQDTCSPFAGMLFGGEDRELIQRRKEKYRLELLEQMAEQQRNKRREKDLELRVAASGAQDPEKSPDRLKQFSVAPRHFEEMIPPERPRIAFQTPLPPLSAPSVPPIPSVHPVPSQNEDLRSGLSSALGEMVSPRIAPLPPPPLLPPLATNYRTPYDDAYYFYGSRNTFDPSLAYYGSGMMGVQPAAYVSAPVTHQLAQPVVVSPCHPGWSTML

SEQ ID NO: 80962 - protein, 138 aa, Homo sapiens
MGRPLLLPLLLLLQPPAFLQPGGSTGSGPSYLYGVTQPKHLSASMGGSVEIPFSFYYPWELAIVPNVRISWRRGHFHGQSFYSTRPPSIHKDYVNRLFLNWTEGQESGFLRISNLRKEDQSVYFCRVELDTRRSGRQQ

SEQ ID NO: 80963 - protein, 314 aa, Homo sapiens
MPGPRVWGKYLWRSPHSKGCPGAMWWLLLWGVLQACPTRGSVLLAQELPQQLTSPGYPEPYGKGQESSTDIKAPEGFAVRLVFQDFDLEPSQDCAGDSVTISFVGSDPSQFCGQQGSPLGRPPGQREFVSSGRSLRLTFRTQPSSENKTAHLHKGFLALYQTVAVNYSQPISEASRGSEAINAPGDNPAKVQNHCQEPYYQAAAAASTPSLFLCLSSFTPQGHSPVQPQGPGKTDRMGRRFFSVCLSADGQSPPLPRIRRPSVLPEPSWATSPGKPSPVSTAVGAGPCWGTDGSSLLPTPSTPRTVFLSGRTRV

SEQ ID NO: 80964 - protein, 381 aa, Homo sapiens
  MOD_RES (1)..(1): Any amino acid
XKTKPLASVTNANTSSTQAAPVAVTTPTVSSGQATPTSPIKKYDFIAPIMPVVESVDPASWRQGLRKTGIVLVPSKGEKSMFPTTATKISPKEEERKDESPATWRLGLRKTGSYGALAEITASKEGQKEKDTAGVTRSASSPRLSSSLDNKEKEKDSKGTRLAYVAPTIPRRLASTSDIEEKENRDSSSLRTSSSYTRRKWEDDLKKNSSVNEGSTYHKSCSFGRRQDDLISSSVPSTTSTPTVTSAAGLQKSLLSSTSTTTKITTGSSSAGTQSSTSNRLWAEDSTEKEKDSVPTAVTIPVAPTVVNAAASTTTLTTTTAGTVSSTTEVRERRRSYLTPVRDEESESQRKARSRQARQSRRSTQGVTLTDLQEAEKTIGR

SEQ ID NO: 80965 - protein, 56 aa, Homo sapiens
MIKFQIQGIHVQERVTFKDVAVVFTKEELALLDKAQINLYQDVMLENFRNLMLVSE

SEQ ID NO: 80966 - protein, 633 aa, Homo sapiens
MNLGDGLKLETELLDGKTKLILSPYEHKSKISVKMGNKAKIAKCPLRTKTGHILKSTQDTCIGSEKLLQKKPVGSETSQAKGEKNGMTFSSTKDLCKQCIDKDCLHIQKEISPATPNMQKTRNTVNTSLVGKQKPHKKHITAENMKSSLVCLTQDQLQQILMTVNQGNRSLSLTENGKEAKSQYSLYLNSISNQPKDENIMGLFKKTEMVSSVPAENKSVLNEHQETSKQCEQKIAIENEWKPADIFSTLGERECDRSSLEAKKAQWRKELDEQVALKKKEKEVSEKWNDPWKKSESDKIIWEKHQILDQSRGEEHDRWAMHFDSLKSYPGSQSQLFSQSTHKQPEYFCVSPDTQELADVSSVCTPTTGSQVEPSEEEHIAKPIKDVVMANSKKTNFLRSMTALLDPAQIEERDRRRQKQLEHQKAITAQVEEKRRKKQLEEEQRKKEEQEEELRLAQEREEMQKQYEEDILKQKQKEEIMTLKTNELFQTMQRAQELAQRLKQEQRIRELAQKGHDTSRLIKNLGVDTIQMEYNASNISNSRHDSDEISGKMNTYMNSTTSKKDTGVQTDDLNIGIFTNAESHCGSLMERDITNCSSPEISAELIGQFSTKKNKQELTQDKGASLEKENNRC

SEQ ID NO: 80967 - protein, 492 aa, Homo sapiens
MAPWLQLLSLLGLLPGAVAAPAQPRAASFQAWGPPSPELLAPTRFALEMFNRGRAAGTRAVLGLVRGRVRRAGQGSLYSLEATLEEPPCNDPMVCRLPVSKKTLLCSFQVLDELGRHVLLRKDCGPVDTKVPGAGEPKSAFTQGSAMISSLSQNHPDNRNETFSSVISLLNEDPLSQDLPVKMASIFKNFVITYNRTYESKEEARWRLSVFVNNMVRAQKIQALDRGTAQYGVTKFSDLTEEEFRTIYLNTLLRKEPGNKMKQAKSVGDLAPPEWDWRSKGAVTKVKDQGMCGSCWAFSVTGNVEGQWFLNQGTLLSLSEQELLDCDKMDKACMGGLPSNAYSAIKNLGGLETEDDYSYQGHMQSCNFSAEKAKVYINDSVELSQNEQKLAAWLAKRGPISVAINAFGMQFYRHGISRPLRPLCSPWLIDHAVLLVGYGNRSDVPFWAIKNSWGTDWGLLLLASWVRGLWREHHGQLGGGGLKRGPQLGTWC

SEQ ID NO: 80968 - protein, 485 aa, Homo sapiens
  MOD_RES (1)..(1): Any amino acid
XAWSPGFPARPGRGRPYMASRPPGDLAEAGGRALQSLQLRLLTPTFEGINGLLLKQHLVQNPVRLWQLLGGTFYFNTSRLKQKNKEKDKSKGKAPEEDEEERRRRERDDQMYRERLRTLLVIAVVMSLLNALSTSGGSISWNDFVHEMLAKGEVQRVQVVPESDVVEVYLHPGAVVFGRPRLALMYRMQVANIDKFEEKLRAAEDELNIEAKDRIPVSYKRTGFFGNALYSVGMTAVGLAILWYVFRLAGMTGREGGFSAFNQLKMARFTIVDGKMGKGVSFKDVAGMHEAKLEVREFVDYLKSPERFLQLGAKVPKGALLLGPPGCGKTLLAKAVATEAQVPFLAMAGPEFVEVIGGLGAARVRSLFKEARARAPCIVYIDEIDAVGKKRSTTMSGFSNTEEEQTLNQLLVEMDGMGTTDHVIVLASTNRADILDGALMRPGRLDRHVFIDLPTLQRKGVALSPRLECSAAITTHCGLNLQGSS

SEQ ID NO: 80969 - protein, 216 aa, Homo sapiens
MPAPEQASLVEEGQPQTRQEAASTGPGMEPETTATTILASVKEQELQFQRLTRELEVERQIVASQLERCRLGAESPSIASTSSTEKSFPWRSTDVPNTGVSKPRVSDAVQPNNYLIRTEPEQGTLYSPEQTSLHESEGSLGNSRSSTQMNSYSDSGYQEAGSFHNSQNVSKADNRQQHSFIGSTNNHVVRNSRAEGQTLVQHRRVSFKGVSENFSG

SEQ ID NO: 80970 - protein, 219 aa, Homo sapiens
MCDLRRPAAGGMMDLAYVCEWEKWSKSTHCPSVPLACAWSCRNLIAFTMDLRSDDQDLTRMIHILDTEHPWDLHSIPSEHHEAITCLEWDQSGSRLLSADADGQIKCWSMADHLANSWESSVGSLVEGDPIVALSWLHNGVKLALHVEKSGASSFGEKFSRVKFSPSLTLFGGKPMEGWIAVTVSGLVTVSLLKPSGQVLTSTESLCGGLWWRVPLSYP

SEQ ID NO: 80971 - protein, 225 aa, Homo sapiens
MWRVCARRAQNVAPWAGLEARWTALQEVPGTPRVTSRSGPAPARRNSVTTGYGGVRALCGWTPSSGATPRNRLLLQLLGSPGRRYYSLPPHQKVPLPSLSPTMQAGTIARWEKKEGDKINEGDLIAEVETDKATVGFESLEECYMAKILVAEGTRDVPIGAIICITVGKPEDIEAFKNYTLDSSAAPTPQAAPAPTPAATASPPTPSAQAPGSSYPPHMQVRLSL

SEQ ID NO: 80972 - protein, 1262 aa, Homo sapiens
MLFPLQVAAVTSSVRDDPLEHCVSPRTRARSPEICKMADNLDEFIEEQKARLAEDKAELESDPPYMEMKGKLSAKLSENSKILISMAKENIPPNSQQTRGSLGIDYGLSLPLGEDYERKKHKLKEELRQDYRRYLTQKNFLSTSETDPSTLGVSLPIGERLSAKERLKLERNKEYNQFLRGKEESSEKFRQVEKSTEPKSQRNKKPIGQVKPDLTSQIQTSCENSEGPRKDVLTPSEAYEELLNQRRLEEDRYRQLDDEIELRNRRIIKKANEEVGISNLKHQRFASKAGIPDRRFHRFNEDRVFDRRYHRPDQDPEVSEEMDERFRYESDFDRRLSRVYTNDRMHRNKRGNMPPMEHDGDVIEQSNIRISSAENKSAPDNETSKSANQDTCSPFAGMLFGGEDRELIQRRKEKYRLELLEQMAEQQRNKRREKDLELRVAASGAQDPEKSWNELLTSLQLSKEEPDRLKQFSVAPRHFEEMIPPERPRIAFQTPLPPLSAPSVPPIPSVHPVPSQNEDLRSGLSSALGEMVSPRIAPLPPPPLLPPLATNYRTPYDDAYYFYGSRNTFDPSLAYYGSGMMGVQPAAYVSAPVTHQLAQPVVNTVGQNELKITSDQVINSGLIFEDKPKPSKQSLQSYQEALQQQIREREERRKKEREEKEEYEAKLEAEMRTYNPWGKGGGGAPLRDAKGNLITDLNRMHRQNIDAYHNPDARTYEDKRAVVSLDPNLATSNAENLEDAANKSSGHMQTQSSPFARGNVFGEPPTELQIKQQELYKNFLRFQIEEKKQREEAERERLRIAEEKEERRLAEQRARIQQEYEEEQEKKREKEEEQRLKNEEHIRLAEERQKEAERKKKEEEEKYNLQLQHYCERDNLIGEETKHMRQPSPIVPALQNKIASKLQRPPSVDSIIRSFIHESSMSRAQSPPVPARKNQLRAEEEKKNVIMELSEMRKQLRSEERRLQERLLHMDSDDEIPIRKKERNPMDIFDMARHRLQAPVRRQSPKGLDAATFQNVHDFNELKDRDSETRVDLKFMYLDPPRDHHTLEIQQQALLREQQKRLNRIKMQEGAKVDLDAIPSAKVREQRMPRDDTSDFLKNSLLESDSAFIGAYGETYPAIEDDVLPPPSQLPSARERRRNKWKGLDIDSSRPNVAPDGLSLKSISSVNVDELRVRNEERMRRLNEFHNKPINTDDESSLVDPDDIMKHIGDDGSNSVATEPWLRPGTSETLKRFMAEQLNQEQQQIPGKPGTFTWQGLSTAHG

SEQ ID NO: 80973 - protein, 287 aa, Homo sapiens
MLLMVVSMACVGLFLVQRAGPHMGNHRKPSLLAHPGPLVKSGERVILQCWSDIMFEHFFLHKEWISKDPSRLVGQIHDGVSKANFSIGSMMRALAGTYRCYGSVTHTPYQLSAPSDPLDIVVTGLYEKPSLSAQPGPKVQAGESVTLSCSSRSSYDMYHLSREGGAHERRLPAVRKVNRTFQADFPLGPATHGGTYRCFGSFRHSPYEWSDPSDPLLVSVTGNPSSSWPSPTEPSSKSGNLRHLHILIGTSVVKIPFTILLFFLLHRWCSNKKKCCCNGPRACREQK

SEQ ID NO: 80974 - protein, 155 aa, Homo sapiens
MVSDLVIILNYDRAVEAFAKGGNLTLGGNLTVAVGPLGRNLEGNVALRSSAAVFTYCKSRGLFAGVSLEGSCLIERKETNRKFYCQDIRAYDILFGDTPRPAQAEDLYEILDSFTEKYENEGQRINARKAAREQRKSSVPFGFMFHSVFSENLFL

SEQ ID NO: 80975 - protein, 113 aa, Homo sapiens
MKLPSISCPHECFEAILSLDTGYRAPVTLVRKGCWTGPPAGQTQSNADALPPDYSVVRGCTTDKCNAHLMTHDALPNLSQAPDPPTLSGAECYACIGVHQDDCAIGRSRRVQC

SEQ ID NO: 80976 - protein, 253 aa, Homo sapiens
MAALRALCGFRGVAAQVLRPGAGVRLPIQPSRGVRQWQPDVEWAQQFGGAVMYPSKETAHWKPPPWNDVDPPKDTIVKNITLNFGPQHPAAHGVLRLVMELSGEMVRKCDPHIGLLHRGTEKLIEYKTYLQALPYFDRLDYVSMMCNEQAYSLAVEKLLNIRPPPRAQWIRVLFGEITRLLNHIMAVTTHALDLGAMTPFFWLFEEREKMFEFYERVSGARMHAAYIRPGGVHQWSDASGLRHPVGPAEDPAL

SEQ ID NO: 80977 - protein, 40 aa, Homo sapiens
MSAGALGALQLPGVLTRLRADLLSYLRHVQWLRRAGGSSL

SEQ ID NO: 80978 - protein, 484 aa, Homo sapiens
MAASMFYGRLVAVATLRNHRPRTAQRAAAQVLGSSGLFNNHGLQVQQQQQRNLSLHEYMSMELLQEAGVSVPKGYVAKSPDEAYAIAKKLGSKDVVIKAQVLAGGRGKGTFESGLKGGVKIVFSPEEAKAVSSQMIGKKLFTKQTGEKGRICNQVLVCERKYPRREYYFAITMERSFQGPVLIGSSHGGVNIEDVAAESPEAIIKEPIDIEEGIKKEQALQLAQKMGFPPNIVESAAENMVKLYSLFLKYDATMIEINPMVEDSDGAGPPGSHIELSCHIHLTWNRSGILCMDAKINFDSNSAYRQKKIFDLQDWTQEDERDKDAAKANLNYIGLDGNIGCLVNGAGLAMATMDIIKLHGGTPANFLDVGGGATVHQVTEAFKLITSDKKVLAILVNIFGGIMRCDVIAQGIVMAVKDLEIKIPVVVRLQGTRVDDAKALIADSGLKILACDDLDEAARMVVKLSEIVTLAKQAHVDVKFQLPI

SEQ ID NO: 80979 - protein, 338 aa, Homo sapiens
MTHWFHRNPLKATAPVSFNYYGVVTGPSASKICNDLRSSRARLLELFTDLSCNPEMMKNAADSYFSLLQGFINSLDESTQESKLRYIQNFKWTDTLQGQVPSAQQDAVFELISMGFNVALWYTKYASRLAGKENITEDEAKEVHRSLKIAAGIFKHLKESHLPKLITPAEKGRDLESRLIEAYVIQCQAEAQEVTIARAIELKHAPGLIAALAYETANFYQKADHTLSSLEPAYSAKWRKYLHLKMCFYTAYAYCYHGETLLASDKCGEAIRSLQEAEKLYAKAEALCKEYGETKGPGPTVKPSGHLFFRKLGNLVKNTLEKCQRENGFILNPNQKKK

SEQ ID NO: 80980 - protein, 83 aa, Homo sapiens
RVPLIVAACCRIVEARGLESTGIYRVPGNNAVVSSLQEQLNRGPGDINLQDERWQDLNVISSLLKSFFRKLPEPLFTDGALLF

SEQ ID NO: 80981 - protein, 466 aa, Homo sapiens [sequence omitted]

SEQ ID NO: 80982 - protein, 29 aa, Homo sapiens
MVNLDQGEDKAKLMRAYMQEPLFVEFADC

SEQ ID NO: 80983 - protein, 92 aa, Homo sapiens
MILSIIFSILSLFLFFCQLFTLTKGGRFYITGIFQILAGLCVMSAAAIYTVRHPEWHLNSDYSYGFAYILAWVAFPLALLSGVIYVILRKRE

SEQ ID NO: 80984 - protein, 90 aa, Homo sapiens
  MOD_RES (1)..(1): Any amino acid
XCVICLEKPKYRCPACRVPYCSVVCFRKHKGESATLRSLLLNPHLRQLMVNLDQGEDKAKLMRAYMQEPLFVEFADCCLGIVEPSQNEES

SEQ ID NO: 80985 - protein, 497 aa, Homo sapiens
TVYSALGLRDACRSLPQSIQLFRDIAQEFSDDLHHIASLIGKVVDFEGSLAENRFTVLPNIDPEIDEKKRRLMGLPSFLTEVARKELENLDSRIPSCSVIYIPLIGFLLSIPRLPSMVEASDFEINGLDFMFLSEEKLHYRSARTKELDALLGDLHCEIRDQETLLMYQLQCQVLARAAVLTRVLDLASRLDVLLALASAARDYGYSRPRYSPQVLGVRIQNGRHPLMELCARTFVPNSTECGGDKGRVKVITGPNSSGKSIYLKQVGLITFMALVGSFVPAEEAEIGAVDAIFTRIHSCESISLGLSTFMIDLNQQVAKAVNNATAQSLVLIDEFGKGTNTVDGLALLAAVLRHWLARGPTCPHIFVATNFLSLVQLQLLPQGPLVQYLTMETCEDGNDLVFFYQVCEGVAKASHASHTAAQAGLPDKLVARGKEVSDLIRSGKPIKPVKDLLKKNQMENCQTLVDKFMKLDLEDPNLDLNVFMSQEVLPAATSIL

SEQ ID NO: 80986 - protein, 193 aa, Homo sapiens
MTVLEITLAVILTLLGLAILAILLTRWARRKQSEMHISRYSSEQSARLLDYEDGRGSRHAYSTQSDTSCDNRERSKRDYTPSTNSLVSMASKFSLGQTELILLLMCFILALSRSSIGSIKCLQTTEELPSRTAGAMMQFTAPIPGATGPIKLSQKTIVQTPGPIVQYPGPNAGPPSAPRGPPMAPIIISQRTA

SEQ ID NO: 80987 - protein, 196 aa, Homo sapiens
MAAPEEHDSPTEASQPIVEEEETKTFKDLGVTDVLCEACDQLGWTKPTKIQIEAIPLALQAVIVGGIDSMSQSLALAKKPHIIIATPGRLIDHLENTKGFNLRALKYLVMDEADRILNMDFETEVDKILKVIPRDRKTFLFSATMTKKVQKLQRAALKNPVKCAVSSKYQTVEKLQQYYIFIPSKFKSKRLGSLNK

SEQ ID NO: 80988 - protein, 799 aa, Homo sapiens
MLHDARDRQKFFSDVQYLRDMQHKVDSEYQACLRRQEYRRDPNEKKRDQFWGQETSFERSRFSSRSSSKQSSSEEDALTEPRSSIKISAFKCDSKLPAIDQTSVKQKHKSTMTVRKAEKVDPSEPSPDQAPMVLLRKRKPNLRRFTVSPESHSPRASGDRSRQKQQWPAKVPVPRGADQVVQQEGLMCNTKLKRPNQERRNLVPSSQPMTENAPDRAKKGDPSAPSQSELHPALSQAFQGKNSPQVLSEFSGPPLTPTTVGGPRKASFRFRDEDFYSILSLNSRRESDDTEEETQSEECLWVGVRSPCSPSHHKRSRFGGTSTPQAKNKNFEENAENCRGHSSRRSEPSHGSLRISNAMEPATERPSAGQRLSQDPGLPDRESATEKDRGGSENAKKSPLSWDTKSEPRQEVGVNAENVWSDCISVEHRPGTHDSEGYWKDYLNSSQNSLDYFISGRPISPRSSVNSSYNPPASFMHSALRDDIPVDLSMSSTSVHSSDSEGNSGFHVCQPLSPIRNRTPFASAENHNYFPVNSAHEFAVREAEDTTLTSQPQGAPLYTDLLLNPQGNLSLVDSSSSSPSRMNSEGHLHVSGSLQENTPFTFFAVSHFPNQNDNGSRMAASGFTDEKETSKIKADPEKLKKLQESLLEEDSEEEGDLCRICQIAGGSPSNPLLEPCGCVGSLQFVHQECLKKWLKVKITSGADLGAVKTCEMCKQGLLVDLGDFNMIEFYQKHQQSQAQNELMNSGLYLVLLLHLYEQRFAELMRLNHNQVERERLSRNYPQPRTEENESRFWGPVLPF

SEQ ID NO: 80989 - protein, 28 aa, Homo sapiens
DEERDPLLHSFGHLKEVLNSITGLVEKT

SEQ ID NO: 80990 - protein, 238 aa, Homo sapiens
MSLPSRQTAIIVNPPPPEYINTKKNGRLTNQLQYLQKVVLKDLWKHSFSWPFQRPVDAVKLQLPDYYTIIKNPMDLNTIKKRLENKYYAKASECIEDFNTMFSNCYLYNKPGDDIVLMAQALEKLFMQKLSQMPQEEQVVGVKERIKKGTQQNIAVSSAKEKSSPSATEKVFKQQEIPSVFPKTSISPLNVVQGASVNSSSQTAAQVTKGVKRKADTTTPATSAVKASSEFSPTFTEK

SEQ ID NO: 80991 - protein, 609 aa, Homo sapiens
MVVSEVDIAKADPAAASHPLLLNGDATVAQKNPGSVAENNLCSQYEEKVRPCIDLIDSLRALGVEQDLALPAIAVIGDQSSGKSSVLEALSGVALPRGSGIVTRCPLVLKLKKLVNEDKWRGKVSYQDYEIEISDASEVEKEINKAQNAIAGEGMGISHELITLEISSRDVPDLTLIDLPGITRVAVGNQPADIGYKIKTLIKKYIQRQETISLVVVPSNVDIATTEALSMAQEVDPEGDRTIGILTKPDLVDKGTEDKVVDVVRNLVFHLKKGYMIVKCRGQQEIQDQLSLSEALQREKIFFENHPYFRDLLEEGKATVPCLAEKLTSELITHICKSLPLLENQIKETHQRITEELQKYGVDIPEDENEKMFFLIDKVNAFNQDITALMQGEETVGEEDIRLFTRLRHEFHKWSTIIENNFQEDMVRLAFTDVSIKNFEEFFNLHRTAKSKIEDIRAEQEREGEKLIRLHFQMEQIVYCQDQVYRGALQKVREKELEEEKKKKSWDFGAFQSSSATDSSMEEIFQHLMAYHQEASKRISSHIPLIIQFFMLQTYGQQLQKAMLQLLQDKDTYSWLLKERSDTSDKRKFLKERLARLTQARRRLAQFPG

SEQ ID NO: 80992 - protein, 88 aa, Homo sapiens
MPYIDESPTMSPQLSARSQGGGDGVSPTPPEGLAPGVEAGKGLEMRKLVLSGFLASEEIYINQLEALLLPMKPLKATATTSQPVLTIQ

SEQ ID NO: 80993 - protein, 2092 aa, Homo sapiens
MVLKVDTSESLWHIQISRSRFLLDSDGKRLICEVSLCKINSKVLKSGQLEDTCLVELSLALDLCLKVGISSRHLTAITVDVWTLHAELHEGLFQSQLLCQGPSLASKPVPCSEVTENLVEPTLPGLFLLQQLPDQVKVKMENTSVVLSMNSQKRHLTWTLKLLQFLYHRDEDQLPLRSFTANSDMAQMSTELLLEDGLLLSQSRQRIVCLNSLKASVQVTTIDLSASLVLNTCIIHYRHQEFSHWLHLLALETQGSSSPVLKQRKKRTFPQILAPIIFSTSISNVNISIQLGDTPPFALGFNSISLDYQHLRPQSIHQRGVLTVDHLCWRVGSDSHIQRAPHPPNMHVWGEALVLDSFTLQGSYNQPLGLSSTQSDTLFLDCTIRGLQVEASDTCAQCLSRILSLMGPQSGKSAVSRHSSFGESVSLLWKVDLKVEDMNLFTLSALVGASEVRLDTLTILGSAETSTVGIQGLVLALVKSVTEKMQPCCKAPDIPTPVLSLSMLSITYHSSIRSLEVQCGAGLTLLWSPPDHMYLYQHVLATLQCRDLLRATVFPETVPSLALETSGTTSELEGRAPEPLPPKRLLNLTLEVSTAKLTAFVAEDKFITLAAESVSLSRHGGSLQAYCPELAAGFDGNSIFNFKEVEVQLLPELEEMILHRNPFPALQTLRNRVWLLSFGSVSVEFPYQYDFSRTLDEAVGVQKWLKGLHQGTRAWASPSPVPLPPDLLLKVEHFSWVFLDDVFEVKLHDNYELMKDESKESAKRLQLLDAKVAALRKQHGELLPARKIEELYASLERKNIEIYIQRSRRLYGNTPMRRALLTWSLAGLELVALADASFHGPEHVVEQVQELDPGSPFPPEGLDLVIQWCRMLKCNVKSFLVRIRDYPRYLFEIRDWRLMGRLVGTEQSGQPCSRRRQILHLGLPWGNVAVERNMPPLKFYHDFHSEIFQYTVVWGPCWDPAWTLIGQCVDLLTKPSADPSPPLPWWDKSRLLFHGDWHMDIEQANLHQLATEDPYNTTENMHWEWSHLSFHWKPGQFVFKGDLDINVRTASKYDDCCFLHLPDLCMTLDLQWLCHGNPHDHHSVTLRAPEFLPEVPLGQLHDSYRAFRSENLNLSIKMDLTRHSGTISQPRILLYSSTLRWMQNFWATWTSVTRPICRGKLFNNLKPSKKKLGQHYKQLSYTALFPQLQVHYWASFAQQRGIQIECSQGHVFTRGTQRLIPQAGTVMRRLISDWSVTQMVSDLSQVTVHLMASPTEENADHCLDPLVTKTHLLSLSSLTYQRHSNRTAEEELSARDGDPTFHTHQLHLVDLRISWTTTNRDIAFGLYDGYKKAAVLKRNLSTEALKGLKIDPQMPAKKPKRGVPTSASAPPRVNTPSFSGQPDKGSSGGAYMLQKLIEETDRFVVFTEEESGMSDQLCGIAACQTDDIYNRNCLIELVNCQMVLRGAETEGCVIVSAAKAQLLQCQHHPAWYGDTLKQKTSWTCLLDGMQYFATTESSPTEQDGRQLWLEVKNIEEHRQRSLDSVQELMESGQAVGGMVTTTTDWNQPAEAQQAQQVQRIISRCNCRMYYISYSHDIDPELATQIKPPEVLENQEKEDLLKKQEGAVDTFTLIHHELEISTNPAQYAMILDIVNNLLLHVEPKRKEHSEKKQRVRFQLEISSNPEEQRSSILHLQEAVRQHVAQIRQLEKQMYSIMKSLQDDSKNENLLDLNQKLQLQLNQEKANLQLESEELNILIRCFKDFQLQRANKMELRKQQEDVSVVRRTEFYFAQARWRLTEEDGQLGIAELELQRFLYSKVNKSDDTAEHLLELGWFTMNNLLPNAVYKVVLRPQSSCQSGRQLALRLFSKVRPPVGGISVKEHFEVNVVPLTIQLTHQFFHRMMGFFFPGRSVEDDEVGDEEDKSKLVTTGIPVVKPRQLIATDDAVPLGPGKGVAQGLTRSSGVRRSFRKSPEHPVDDIDKMKERAAMNNSFIYIKIPQVPLCVSYKGEKNSVDWGDLNLVLPCLEYHNNTWTWLDFAMAVKRDSRKALVAQVIKEKLRLKSATGSEVRGKLETKSDLNMQQQEEEEKARLLIGLSVGDKNPGKKSIFGRRK

SEQ ID NO: 80994 - protein, 697 aa, Homo sapiens
MIPPGECTYAGRKRRRPLQKQRPAVGAEKSNPSKRHRDRLNAELDHLASLLPFPPDIISKLDKLSVLRLSVSYLRVKSFFQVVQEQSSRQPAAGAPSPGDSCPLAGSAVLEGRLLLESLNGFALVVSAEGTIFYASATIVDYLGFHQTDVMHQNIYDYIHVDDRQDFCRQLHWAMDPPQVVFGQPPPLETGDDAILGRLLRAQEWGTGTPTEYSAFLTRCFICRVRCLLDSTSGFLTMQFQGKLKFLFGQKKKAPSGAMLPPRLSLFCIAAPVLLPSAAEMKMRSALLRAKPRADTAATADAKVKATTSLCESELHGKPNYSAGRSSRESGVLVLREQTDAGRWAQVPARAPCLCLRGGPDLVLDPKGGSGDREEEQHRMLSRASGVTGRRETPGPTKPLPWTAGKHSEDGARPRLQPSKNDPPSLRPMPRGSCLPCPCVQGTFRNSPISHPPSPSPSAYSSRTSRPMRDVGEDQVHPPLCHFPQRSLQHQLPQPGAQRFATRGYPMEDMKLQGVPMPPGDLCGPTLLLDVSIKMEKDSGCEGAADGCVPSQVWLGASDRSHPATFPTRMHLKTEPDSRQQVYISHLGHGVRGAQPHGRATAGRSRELTPFHPAHCACLEPTDGLPQSEPPHQLCARGRGEQSCTCRAAEAAPVVKREPLDSPQWATHSQGMVPGMLPKSALATLVPPQASGCTFLP

SEQ ID NO: 80995 - protein, 1522 aa, Homo sapiens
MQPQNVQGLSKVSEEPSTSSDERASLIKKEIHGSLPHVAEPSVPYRGTVFAMDPRNGYMEPHYHPPHLFPAFHPPVPIDARHHEGRYHYDPSPIPPLHMTSALSSSPTYPDLPFIRISPHRNPTAASESPFSPPHPYINPYMDYIRSLHSSPSLSMISATRGLSPTDAPHAGVSPAEYYHQMALLTGQRSPYADIIPSAATAGTGAIHMEYLHAMDSTRFSSPRLSARPSRKRTLSISPLSDHSFDLQTMIRTSPNSLVTILNNSRSSSSASGSYGHLSASAISPALSFTYSSAPVSLHMHQQILSRQQSLGSAFGHSPPLIHPAPTFPTQRPIPGIPTVLNPVQVSSGPSESSQQNKPTSESAVSSTGDPMHNKRSKIKPDEDLPSPGARGQQEQPEGTTLVKEEGDKDESKQEPEVIYETNCHWEGCAREFDTQEQLVHHINNDHIHGEKKEFVCRWLDCSREQKPFKAQYMLVVHMRRHTGEKPHKCTFEGCTKAYSRLENLKTHLRSHTGEKPYVCEHEGCNKAFSNASDRAKHQNRTHSNEKPYVCKIPGCTKRYTDPSSLRKHVKTVHGPEAHVTKKQRGDIHPRPPPPRDSGSHSQSRSPGRPTQGALGEQQDLSNTTSKREECLQVKTVKAEKPMTSQPSPGGQSSCSSQQSPISNYSNSGLELPLTDGGSIGDLSAIDETPIMDSTISTATTALALQARRNPAGTKWMEHVKLERLKQVNGMFPRLNPILPPKAPAVSPLIGNGTQSNNTCSLGGPMTLLPGRSDLSGVDVTMLNMLNRRDSSASTISSAYLSSRRSSGISPCFSSRRSSEASQAEGRPQNVSVADSYDPISTDASRRSSEASQSDGLPSLLSLTPAQQYRLKAKYAAATGGPPPTPLPNMERMSLKTRLALLGDALEPGVALPPVHAPRRCSDGGAHGYGRRHLQPHDAPGHGVRRASDPVRTGSEGLALPRVPRFSSLSSCNPPAMATSAEKRSLVLQNYTRPEGGQSRNFHSSPCPPSITENVTLESLTMDADANLNDEDFLPDDVVQYLNSQNQAGYEQHFPSALPDDSKVPHGPGDFDAPGLPDSHAGQQFHALEQPCPEGSKTDLPIQWNEVSSGSADLSSSKLKCGPRPAVPQTRAFGFCNGMVVHPQNPLRSGPAGGYQTLGENSNPYGGPEHLMLHNSPGSGTSGNAFHEQPCKAPQYGNCLNRQPVAPGALDGACGAGIQASKLKSTPMQGSGGQLNFGLPVAPNESAGSMVNGMQNQDPVGQGYLAHQLLGDSMQHPGAGRPGQQMLGQISATSHINIYQGPESCLPGAHGMGSQPSSLAVVRGYQPCASFGGSRRQAMPRDSLALQSGQLSDTSQTCRVNGIKMEMKGQPHPLCSNLQNYSGQFYDQTVGFSQQDTKAGSFSISDASCLLQGTSAKNSELLSPGANQVTSTVDSLDSHDLEGVQIDFDAIIDDGDHSSLMSGALSPSIIQNLSHSSSRLTTPRASLPFPALSMSTTNMAIGDMSSLLTSLAEESKFLAVMQ

SEQ ID NO: 80996 - protein, 502 aa, Homo sapiens
MPVLERYFHPAELGRRWTGPEGVLPSSPGSRPGCQQGPLPWDLPEMIRMVKLVWKSKSELQATKQRGILDNEDALRSFPGDIRLRGQTGVRAERRGSYPFIDFRLLNSTTYSGEIGTKKKVKRLLSFQRYFHASRLLRGIIPQAPLHLLDEDYLGQARHMLSKVGMWDFDIFLFDRLTNGNSLVTLLCHLFNTHGLIHHFKLDMVTLHRFLVMVQEDYHSQNPYHNAVHAADVTQAMHCYLKEPKLASFLTPLDIMLGLLAAAAHDVDHPGVNQPFLIKTNHHLANLYQNMSVLENHHWRSTIGMLRESRLLAHLPKEMTQDIEQQLGSLILATDINRQNEFLTRLKAHLHNKDLRLEDAQDRHFMLQIALKCADICNPCRIWEMSKQWSERVCEEFYRQGELEQKFELEISPLCNQQKDSIPSIQIGFMSYIVEPLFREWAHFTGNSTLSENMLGHLAHNKAQWKSLLPRQHRSRGSSGSGPDHDHAGQGTESEEQEGDSP

SEQ ID NO: 80997 - protein, 61 aa, Homo sapiens
MAAVAGKERRARGRPRPETLGAIPRREGGEAGLSRAFKPLAQAPLSCETSLRKLKFKGMAL

SEQ ID NO: 80998 - protein, 58 aa, Homo sapiens
MALDVKSRAKRYEKLDFLGEGQFATVYKARDKNTNQIVAIKKESLLVATTAVNVLCHT

SEQ ID NO: 80999 - protein, 76 aa, Homo sapiens
MFMDIAMLVENQGEMLDNIELNVMHTVDHVEKARDETKKAVKYQSQARKKLIIIIVLVVVLLGILALIIGLSVGLN

SEQ ID NO: 81000 - protein, 207 aa, Homo sapiens
MAMGEGAGQVGERGGSMQGLCGRLPFRHHDQLQLAVGRSRLPELPPGLHLPQLKESLLVAGSRWLGAARALHWHVGELQTGLRGHRVLGPGRHLPLLVDHQRAHCPLGRGELWAFSQYYPHPGEETGASSGQPPYPVSVLASLQVDTFPDPTLWNSLHHLQLPARQCWPGHPPPPGAGTGFLPGIRRLGLRCRFLGRSFDCQPPRGS

SEQ ID NO: 81001 - protein, 103 aa, Homo sapiens
MTLDNISRAAVDRIIRVDHAGEYGANRIYAGQMAVLGRTSVGPVIQKMWDQEKDHLKKFNELMVTFRVRPTVLMPLWNVLGFALGAGTALLGKEGAMACTVAV

SEQ ID NO: 81002 - protein, 165 aa, Homo sapiens
MERAGATSRGGQAPGFLLRLHTEGRAEAARVQEQDLRQWGLTGIHLRSYQLEGVNWLAQRFHCQNGCILGDEMGLGKTCQTIALFIYLAGRLNDEGPFLILCPLSVLSNWKEEMQRFAPGLSCVTYAGDKEERACLQQDLKQESRFHVLLTTYEICLKDASFLKS

SEQ ID NO: 81003 - protein, 35 aa, Homo sapiens
MGCVYSCCLEDYDEDLVQEASSEDVLGVHMCFVFL

SEQ ID NO: 81004 - protein, 621 aa, Homo sapiens
MAAPLLHTRLPGDAAASSSAVKKLGASRTGISNMRALENDFFNSPPRKTVRFGGTVTEVLLKYKKGETNDFELLKNQLLDPDIKRLPWLNRSQTVVEEYLAFLGNLVSAQTVFLRPCLSMIASHFVPPRVIIKEGDVDVSDSDDEDDNLPANFDTCHRALQIIARYVPSTPWFLMPILVEKFPFVRKSERTLECYVHNLLRISVYFPTLRHEILELIIEKLLKLDVNASRQGIEDAEETATQTCGGTDSTEGLFNMDEDEETEHETKAGPERLDQMVHPVAERLDILMSLVLSYMKDVCYVDGKVDNGKTKDLYRDLINIFDKLLLPTHASCHVQFFMFYLCSFKLGFAEAFLEHLWKKLQDPSNPAIIRQAAGNYIGSFLARAKFIPLITVKSCLDLLVNWLHIYLNNQDSGTKAFCDVALHGPFYSACQAVFYTFVFRHKQLLSGNLKEGLQYLQSLNFERIVMSQLNPLKICLPSVVNFFAAITNKYQLVFCYTIIERNNRQMLPVIRSTAGGDSVQICTNPLDTFFPFDPCVLKRSKKFIDPIYQVWEDMSAEELQEFKKPMKKDIVEDEDDDFLKGEVPQNDTVIGITPSSFDTHFRSPSSSVGSPPVLYMQPSPL

SEQ ID NO: 81005 - protein, 220 aa, Homo sapiens
MPMTLGYWNIRGLAHSIRLLLEYTDSSYEEKKYTMGDAPDYDRSQWLNEKFKLGLDFPNLPYLIDGTHKITQSNAILRYIARKHNLCGESEKEQIREDILENQFMDSRMQLAKLCYDPDFEKLKPEYLQALPEMLKLYSQFLGKQPWFLGDKITFVDFIAYDVLERNQVFEPSCLDAFPNLKDFISRFEEKCNVGWSSRRNLDTVCRTSQRILCQNRENE

SEQ ID NO: 81006 - protein, 67 aa, Homo sapiens
MGDKKSPTRPKRQPKPSSDEGYWDCSVCTFRNSAEAFKCMMCDVRKGTSTREEKAGSLTSNWSSPIG

SEQ ID NO: 81007 - protein, 35 aa, Homo sapiens
MVGEGSIQSSRYKKESKSGLVKPGSEADFSSSSST

SEQ ID NO: 81008 - protein, 108 aa, Homo sapiens
MSSQVVGIEPLYIKAEPASPDSPKGSSETETEPPVALAPGPAPTRCLPGHKEEEDGEGAGPGEQGGGKLVLSSLPKRLCLVCGDVASGYHYGVASCEACKAFFKRTIQ

SEQ ID NO: 81009 - protein, 197 aa, Homo sapiens
MIIYRDLISHDEMFSDIYKIREIADGLCLEVEGKMVSRTEGNIDDSLIGGNASAEGPEGEGTESTVITGVDIVMNHHLQETSFTKEAYKKYIKDYMKSIKGKLEEQRPERVKPFMTGAAEQIKHILANFKNYQFFIGENMNPDGMVALLDYREDGVTPYMIFFKDGLEMEKCDAKERNPCAFCLSLWRPRLNWGIHL

SEQ ID NO: 81010 - protein, 454 aa, Homo sapiens
MEALLEGIQNRGHGGGFLTSCEAELQELMKQIDIMVAHKKSEWEGRTHALETCLKIREQELKSLRSQLDVTHKEVGMLHQQVEEHEKIKQEMTMEYKQELKKLHEEEFRQKSLDWEKQRLIYQQQVSSLEAQRKALAEQSEIIQAQLVNRKQKLESVELSSQSEIQHLSSKLERANDTICANELEIERLTMRVNDLVGTSMTVLQEQQQKEEKLRESEKLLEALQEEKRELKAALQSQENLIHEARIQKEKLQEKVKATNTQHAVEAISLESVSATCKQLSQELMEKYEELKRMEAHNNEYKAEIKKLKEQILQGEQSYSSALEGMKMEISHLTQELHQRDITIASTKGSSSDMEKRLRAEMQKAEDKAVEHKEILDQLESLKLENRHLSEMVMKLELGLHECSLPVSPLGSIATRFLEEEELRSHHILERLDAHIEELKRESEKTVRQFTALK

SEQ ID NO: 81011 - protein, 158 aa, Homo sapiens
MLGLWGQRLPAAWVLLLLPFLPLLLLAAPAPHRASYKPVIVVHGLFDSSYSFRHLLEYINEMGQYGDTDYLKWLFPTSMRSNLYRICYSPWGQEFSICNYWHDPHHDDLYLNASSFLALINGERDHPNATVWRKNFLRVGHLVLIGGPDDGVITPWQS

SEQ ID NO: 81012 - protein, 135 aa, Homo sapiens
MAAMSLLRRVSVTAVAALSGRPLGTRLGFGGFLTRGFPKAAAPVRHSGDHGKRLFVIRPSRFYDRRFLKLLRFYIALTGIPVAIFITLVNVFIGQAELAEIPEGYVPEHWEYYKGKGAGSAKIDACERRWTLVLL

SEQ ID NO: 81013 - protein, 140 aa, Homo sapiens
MPLVKRNIDPRHLCHTALPRGIKNELECVTNISLANIIRQLSSLSKYAEDIFGELFNEAHSFSFRVNSLQERVDRLSVSVTQLDPKEEELSLQDITMRKAFRSSTIQDQQLFDRKTLPIPLQETYDVCEQPPPLNILTPY

SEQ ID NO: 81014 - protein, 613 aa, Homo sapiens
MLQNVTPHNKLPGEGNAGLLGLGPEAAAPGKRIRKPSLLYEGFESPTMASVPALQLTPANPPPPEVSNPKKPGRVTNQLQYLHKVVMKALWKHQFAWPFRQPVDAVKLGLPDYHKIIKQPMDMGTIKRRLENNYYWAASECMQDFNTMFTNCYIYNKPTDDIVLMAQTLEKIFLQKVASMPQEEQELVVTIPKNSHKKGAKLAALQGSVTSAHQVPAVSSVSHTALYTPPPEIPTTVLNIPHPSVISSPLLKSLHSAGPPLLAVTAAPPAQPLAKKKGVKRKADTTTPTPTAILAPGSPASPPGSLEPKAARLPPMRRESGRPIKPPRKDLPDSQQQHQSSKKGKLSEQLKHCNGILKELLSKKHAAYAWPFYKPVDASALGLHDYHDIIKHPMDLSTVKRKMENRDYRDAQEFAADVRLMFSNCYKYNPPDHDVVAMARKLQDVFEFRYAKMPDEPLEPGPLPVSTAMPPGLAKSSSESSSEESSSESSSEEEEEEDEEDEEEEESESSDSEEERAHRLAELQEQLRAVHEQLAALSQGPISKPKRKREKKEKKKKRKAEKHRGRAGADEDDKGPRAPRPPQPKKSKKASGSGGGSAALGPSGFGPSGGSGT

SEQ ID NO: 81015 - protein, 731 aa, Homo sapiens
MPRRKQEQPKRLPSPSEEESGKPFQCPICGLVIKRKSYWKRHMVIHTGLKSHQCPLCPFRCARKDNLKSHMKVHQHQDRGETFQCQLCPFTSSRHFSLKLHMRCHQHFLRTEAKVKEEIPDPDVKGSPHLSDSACLGQQREGGGTELVGTMMTSNTPERTSQGGAGVSPLLVKEEPKEDNGLPTSFTLNAADRPANHTKLKDPSEYVANSASALFSQDISVKMASDFLMKLSAANQKEPMNLNFKVKEEPKEGESLSTTLPRSSYVFSPESEVSAPGVSEDALKPQEGKGSVLRRDVSVKAASELLMKLSAESYKETQMVKIKEEPMEVDIQDSHVSISPSRNVGYSTLIGREKTEPLQKMPEGRVPPERNLFSQDISVKMASELLFQLSEKVSKEHNHTKENTIRTTTSPFFSEDTFRQSPFTSNSKELLPSDSVLHGRISAPETEKIVLEAGNGLPSWKFNDQLFPCDVCGKVFGRQQTLSRHLSLHTEERKYKCHLCPYAAKCRANLNQHLTVHSVKLVSTDTEDIVSAVTSEGSDGKKHPYYYSCHVCGFETELNVQFVSHMSLHVDKEQWMFSICCTACDFVTMEEAEIKTHIGTKHTGEDRKTPSESNSPSSSSLSALSDSANSKDDSDGSQKNKGGNNLLVISVMPGSQPSLNSEEKPEKGFECVFCNFVCKTKNMFERHLQIHLITRMFECDVCHKFMKTPEQLLEHKKCHTVPTGGLNSGQW

SEQ ID NO: 81016 - protein, 508 aa, Homo sapiens
MLDQDELLASTRRDYEKIQEELTRLQIENEAAKDEVKEVLQALEELAVNYDQKSQEVEDKTRANEQLTDELAQKTTTLTTTQRELSQLQELSNHQKKRATEILNLLLKDLGEIGGIIGTNDVKTLADVNGVIEEEFTMARLYISKMKSEVKSLVNRSKQLESAQMDSNRKMNASERELAACQLLISQHEAKIKSLTDYMQNMEQKRRQLEESQDSLSEELAKLRAQEKMHEVSFQDKEKEHLTRLQDAEEMKALEQQMESHREAHQKQLSRLRDEIEEKQKIIDEIRDLNQKLQLEQEKLSSDYNKLKIEDQEREMKLEKLLLLNDKREQAREDLKGLEETVSRELQTLHNLRKLFVQDLTTRVKKSVELDNDDGGGSAAQKQKISFLENNLEQLTKVHKQLVRDNADLRCELPKLEKRLRATAERVKALESALKEAKENAMRDRKRYQQEVDRIKEAVRAKNMARRAHSAQIAKPIRPGHYPASSPTAVHAIRGGGGSSSNSTHYQK

SEQ ID NO: 81017 - protein, 161 aa, Homo sapiens
MGILEKISEIEKEIARTQKNKATEYHLGLLKAKLAKYRAQLLEPSKSASSKGEGFDVMKSGDARVALIGFPSVGKLRHEAEPGLSAGDALGVLGPDLHLHQEERTEARLHRRHHSPERGLSGARVPPHPPVTRQPVQVRPGVGHQHQVQSAAGGPDPHHGA

SEQ ID NO: 81018 - protein, 287 aa, Homo sapiens
MSSTLPALLCVGLCLSQRISAQQQTLPKPFIWAEPHFMVPKEKQVTICCQGNYGAVEYQLHFEGSLFAVDRPKPPERINKVQFYIPDMNSRMAGQYSCIYRVGELWSEPSNLLDLVVTEMYDTPTLSVHPGPEVISGEKVTFYCRLDTATSMFLLLKEGRSSHVQRGYGKVQAEFPLGPVTTAHRGTYRCFGSYNNHAWSFPSEPVKLLVTGDIENTSLAPEDPTFPDHALWDHTAQNLLRMGLAFLVLVALVWFLVEDWLSRKRTRERASRASTWEGRRRLNTQTL

SEQ ID NO: 81019 - protein, 636 aa, Homo sapiens
MNTHSDDSGDDDEATTPADKSELHHTLKNLSLKLDDLSTCNDLIAKHGAALQRSLTELDGLKIPSESGEKLKVVNERATLFRITSNAMINACRDFLELAEIHSRKWQRALQYEQEQRVHLEETIEQLAKQHNSLERAFHSAPGRPANPSKSFIEGDLLTPKGEDSEEDEDTEYFDAMEDSTSFITVITEAKEDRKAEGSTGTSSVDWSSADNVLDGASLVPKGSSKVKRRVRIPNKPNYSLNLWSIMKNCIGRELSRIPMPVNFNEPLSMLQRLTEDLEYHHLLDKAVHCTSSVEQMCLVAAFSVSSYSTTVHRIAKPFNPMLGETFELDRLDDMGLRSLCEQVSHHPPSAAHYVFSKHGWSLWQEITISSKFRGKYISIMPLGAIHLEFQASGNHYVWRKSTSTVHNIIVGKLWIDQSGDIEIVNHKTNDRCQLKFLPYSYFSKEAARKVTGVVSDSQGKAHYVLSGSWDEQMECSKVMHSSPSSPSSDGKQKTVYQTLSAKLLWKKYPLPENAENMYYFSELALTLNEHEEGVAPTDSRLRPDQRLMEKGRWDEANTEKQRLEEKQRLSRRRRLEACGPGSSCSSEEEKEADAYTPLWFEKRLDPLTGEMACVYKGGYWEAKEKQDWHMCPNIF

SEQ ID NO: 81020 - protein, 64 aa, Homo sapiens
MDQFGDILEGEVDHSFFDSDFEEGKKCETNSVFDKQNDDPKERIDKDTKCKFEHWNANNRKLSY

SEQ ID NO: 81021 - protein, 175 aa, Homo sapiens
MSSDRQRSDDESPSTSSGSSDADQRDPAAPEPEEQEERKPSATQQKKNTKLSSKTTAKLSTSAKRIQKELAEITLDPPPNCSAGPKGDNIYEWRSTILGPPGSVYEGGVFFLDITFSSDYPFKPPKVTFRTRIYHCNINSQGVICLDILKDNWSPALTISKVLLSICSLLTDCNP

SEQ ID NO: 81022 - protein, 81 aa, Homo sapiens
MDGGDDGNLIIKKRFVSEAELDERRKRRQEEWEKVRKPEDPEECPEEVYDPRSLYERLQEQKDRKQQEYEEQFKFKNMFDP

SEQ ID NO: 81023 - protein, 219 aa, Homo sapiens
  MOD_RES (1)..(1): Any amino acid
XSEQSCLNEWTAMADLESLRPPSAEPGGSSEQEQMEQAIRAELWKVLDVSDLESVTSKEIRQALELRLGLPLQQYRDFIDNQMLLLVAQRDRASRIFPHLYLGSEWNAANLEELQRNRAQGTHVLVHCKMGVSRSAATVLAYAMKQYECSLEQALRHVQELRPIARPNPGFLRQLQIYQGILTASRQSHVWEQKVGGVSPEEHPAPEVSTPFPPLPPEP

SEQ ID NO: 81024 - protein, 246 aa, Homo sapiens
  MOD_RES (1)..(1): Any amino acid
XGRGLALQKMGQEEESPPREERPQQSPKVQASPGLLAAALQQSQELAKLGTSFAQNGFYHEAVVLFTQALKLNPQDHRLFGNRSFCHERLGQPAWALADAQVALTLRPGWPRGLFRLGKALMGLQETLRGGSQPDAARELRSCLLHLTLGQRGGICAPPLSPGALQPLPHAELAPSGLPSLRCPRSTALRSPGLSPLLHYPSCHRSHPNQPLSQTQSRRPHPLKPQDPSKGWDILGLGLQHLSQAR

SEQ ID NO: 81025 - protein, 639 aa, Homo sapiens
MCLFLPVLSSESAPLVVRKGSDVVAGKMATAATIPSVATATAAALGEVEDEGLLASLFRDRFPEAQWRERPDVGRYLRELSGSGLERLRREPERLAEERAQLLQQTRDLAFANYKTFIRGAECTERIHRLFGDVEASLGRLLDRLPSFQQSCRNFVKEAEEISSNRRMNSLTLNRHTEILEILEIPQLMDTCVRNSYYEEALELAAYVRRLERKYSSIPVIQGIVNEVRQSMQLMLSQLIQQLRTNIQLPACLRVIGYLRRMDVFTEAELRVKFLQARDAWLRSILTAIPNDDPYFHITKTIEASRVHLFDIITQYRAIFSDEDPLLPPAMGEHTVNESAIFHGWVLQKVSQFLQVLETDLYRGIGGHLDSLLGQCMYFGLSFSRVGADFRGQLAPVFQRVAISTFQKAIQETVEKFQEEMNSYMLISAPAILGTSNMPAAVPATQPGTLQPPMVLLDFPPLACFLNNILVAFNDLRLCCPVALAQDVTGALEDALAKVTKIILAFHRAEEAAFSSGEQELFVQFCTVFLEDLVPYLNRCLQVLFPPAQIAQTLGIPPTQLSKYGNLGHVNIGAIQEPLAFILPKRETLFTLDDQALGPELTAPAPEPPAEEPRLEPAGPACPEGGRAETQAEPPSVGP

SEQ ID NO: 81026 - protein, 66 aa, Homo sapiens
MAPEENAGTELLLQGFERRFLAVRTLRSFPWQVGGGASGEARGGRGSPGADGMGLRAETPGAPATA

SEQ ID NO: 81027 - protein, 96 aa, Homo sapiens
  MOD_RES (1)..(1): Any amino acid
XIKCISRDYVLKQIRSLVQANPEVAMDSIIHMTQHISPTQRAEVIRILSTMDSPSTLCMTSWDVRSQNPPPAHQSHLPHSVFITLARPSPPLPAQD

SEQ ID NO: 81028 - protein, 38 aa, Homo sapiens
MTTANCGAHDELDFKLVFGEDGAPAPPPPGSRPAAPGL

SEQ ID NO: 81029 - protein, 17 aa, Homo sapiens
  MOD_RES (1)..(1): Any amino acid
XIQVRGPLRITVRVTHH

SEQ ID NO: 81030 - protein, 72 aa, Homo sapiens
TRAAAGRATGSANMTKKKVSQKKQRGRPSSQPRRNIVGCRISHGWKEGDEPITQWKGTVLDQLPETTGGSDK

SEQ ID NO: 81031 - protein, 57 aa, Homo sapiens
MEKDDPPQLVTPTSVKAIILRIEAAQLTRAQEVAPEMKESLLHWDLMRRLGADPRFE

SEQ ID NO: 81032 - protein, 66 aa, Homo sapiens
MAAPGPALCLFDVDGTLTAPRQKITKEMDDFLQKLRQKIKIGVVGGSDFEKVQEQLGNDEYSKSSG

SEQ ID NO: 81033 - protein, 349 aa, Homo sapiens
MAAALGVLMGCWLEVRRPPCRTSMANTELEVKIRDWYQRQAPGPARDYSQYYRTIEELQNKILTATVDNANILLQIDNARLAADDFRTKFETEQALRLSVEADINGLRRVLDELTLARADLEMQIENLKEELAYLKKNHEEEMNALRGQVGGEINVEMDAAPGVDLSRILNEMRDQYEKMAEKNRKDAEDWFFSKTEELNREVATNSELVQSGKSEISELRRTMQALEIELQSQLSMKASLEGNLAETENRYCVQLSQIQGLIGSVEEQLAQLRCEMEQQNQEYKILLDVKTRLEQEIATYRRLLEGEDAHLTQYKKEPVTTRQVRTIVEEVQDGKVISSREQVHQTTR

SEQ ID NO: 81034 - protein, 334 aa, Homo sapiens
MVDYYEVLGVQRHASPEDIKKAYRKLALKWHPDKNPENKEEAERKFKQVAEAYEVLSDAKKRDIYDKYGKEGLNGGGGGGSHFDSPFEFGFTFRNPDDVFREFFGGRDPFSFDFFEDPFEDFFGNRRGPRGSRSRGTGSFFSAFSGFPSFGSGFSSFDTGFTSFGSLGHGGLTSFSSTSFGGSGMGNFKSISTSTKMVNGRKITTKRIVENGQERVEVEEDGQLKSLTINGVADDDALAEERMRRGQNALPAQPAGLRPPKPPRPASLLRHAPHCLSEEEGEQDRPRAPGPWDPLASAAGVQREAAVEQAQSETSLGARGQRGHKPRLGCCVLT

SEQ ID NO: 81035 - protein, 149 aa, Homo sapiens
MPRGSRSAASRPASRPAAPSAHPPAHPPPSAAAPAPAPSGQPGLMAQMATTAAGVAVGSAVGHVMGSALTGAFSGGSSEPSQPAVQQPLALYPQAPTPAAPQPLQMGPCAYEIRQFLDCSTTQSDLSLCEGFSEALKQCKYYHGLSSLP

SEQ ID NO: 81036 - protein, 136 aa, Homo sapiens
  MOD_RES (1)..(1): Any amino acid
XKEYGLPFMETSAKTGLNVDLAFTAIANNSPNKQASESPWPHTGRHGKAVFCTGRGAASGQTLPRCSAAPSWARPGEGGLGLAPRTVPNPRKAMSSAAHAQAAKGGRLPTPGTEGFTANHIVHLCVLGAACSRPTL

SEQ ID NO: 81037 - protein, 255 aa, Homo sapiens
MGLLAFLKTQFVLHLLVGFVFVVSGLVINFVQLCTLALWPVSKQLYRRLNCRLAYSLWSQLVMLLEWWSCTECTLFTDQATVERFGKEHAVIILNHNFEIDFLCGWTMCERFGVLGSSKVLAKKELLYVPLIGWTWYFLEIVFCKRKWEEDRDTVVEGLRRLSDYPEYMWFLLYCEGTRFTETKHRVSMEVAAAKGLPVLKYHLLPRTKGFTTAVKCLRGTVAAVYDVTLNFRGNKNPSLLGILYGKKYEADMCV

SEQ ID NO: 81038 - protein, 69 aa, Homo sapiens
MAEAEGESLESWLTTTETLPGRPSPDLGSRVIHWVPRAFPLPGSCRYSDPCSPVASEGAGVSVMMCSSS

SEQ ID NO: 81039 - protein, 77 aa, Homo sapiens
MIETLARKLNEKSKEQMELHHQNLNLQETLKRVANCSGLHPASNFLFQFSILDGAVSEEPQLPMALGGRFSFDAPLI

SEQ ID NO: 81040 - protein, 754 aa, Homo sapiens
MAAAFEASGALAAVATAMPAEHVAVQVPAPEPTPGPVRILRTAQDLSSPRTRTGDVLLAEPADFESLLLSRPVLEGLRAAGFERPSPVQLKAIPLGRCGLDLIVQAKSGTGKTCVFSTIALDSLVLENLSTQILILAPTREIAVQIHSVITAIGIKMEGLECHVFIGGTPLSQDKTRLKKCHIAVGSPGRIKQLIELDYLNPGSIRLFILDEADKLLEEGSFQEQINWIYSSLPASKQMLAVSATYPEFLANALTKYMRDPTFVRLNSSDPSLIGLKQYYKVVNSYPLAHKVFEEKTQHLQELFSRIPFNQALVFSNLHSRAQHLADILSSKGFPAECISGNMNQNQRLDAMAKLKHFHCRVLISTDLTSRGIDAEKVNLVVNLDVPLDWETYMHRIGRAGRFGTLGLTVTYCCRGEEENMMMRIAQKCNINLLPLPDPIPSGLMEECVDWDVEVKAAVHTYGIASVPNQPLKKQIQKIERTLQIQKAHGDHMASSRNNSVSGLSVKSKNNTKQKLPVKSHSECGIIEKATSPKELGCDRQSEEQMKNSVQTPVENSTNSQHQVKEALPVSLPQIPCLSSFKIHQPYTLTFAELVEDYEHYIKEGLEKPVEIIRHYTGPGDQTVNPQNGFVRNKVIEQRVPVLASSSQSGDSESDSDSYSSRTSSQSKGNKSYLEGSSDNQLKDSESTPVDDRISLEQPPNGSDTPNPEKYQESPGIQMKTRLKEGASQRAKQSRRNLPRRSSFRLQTEAQEDD

SEQ ID NO: 81041 - protein, 269 aa, Homo sapiens
MIEDVQSLLDEEQEQMFAFRSRARSTDTFNYATYHTLEEIYDFLDLLVAENPHLVSKIQIGNTYEGRPIYVLKFSTGGSKRPAIWIDTGIHSREWVTQASGVWFAKKITQDYGQDAAFTAILDTLDIFLEIVTNPDGFAFTHSTNRMWRKTRSHTAGSLCIGVDPNRNWDAGFGLSGASSNPCSETYHGKFANSEVEVKSIVDFVKDHGNIKAFISIHSYSQLLMYPYGYKTEPVPDQDELDQLSKAAVTALASLYGTKFNYGSIIKAI

SEQ ID NO: 81042 - protein, 111 aa, Homo sapiens
MASALWTVLPSRMSLRSLKWSLLLLSLLSFFVMWYLSLPHYNVIERVNWMYFYEYEPIYRQDFHFTLREHSNCSHQNPFLVILVTSHPSDVKARQAIRVTWGEKKSWWGYE

SEQ ID NO: 81043 - protein, 77 aa, Homo sapiens
MASSLNEDPEGSRITYVKGDLFACPKTDSLAHCISEDCRMGAGIAVLFKKKFGGVQELLNQRLDVVLIVCNGKMYLR

SEQ ID NO: 81044 - protein, 218 aa, Homo sapiens
MERVKMINVQRLLEAAEFLERRERECEHGYASSFPSMPSPRLQHSKPPRRLSRAQKHSSGSSNTSTANRRAHLRLCLERLKVLIPLGPDCTRHTTLGLLNKAKAHIKKLEEAERKSQHQLENLEREQRFLKWRLEQLQGPQEMERIRMDSIGSTISSDRSDSEREEIEVDVESTEFSHGEVDNISTTSISDIDDHSSLPSIGSDEGYSSASVKLSFTS

SEQ ID NO: 81045 - protein, 611 aa, Homo sapiens
MWRVCARRAQNVAPWAGLEARWTALQEVPGTPRVTSRSGPAPARRNSVTTGYGGVRALCGWTPSSGATPRNRLLLQLLGSPGRRYYSLPPHQKVPLPSLSPTMQAGTIARWEKKEGDKINEGDLIAEVETDKATVGFESLEECYMAKILVAEGTRDVPIGAIICITVGKPEDIEAFKNYTLDSSAAPTPQAAPAPTPAATASPPTPSAQAPGSSYPPHMQVLLPALSPTMTMGTVQRWEKKVGEKLSEGDLLAEIETDKATIGFEVQEEGYLAKILVPEGTRDVPLGTPLCIIVEKEADISAFADYRPTEVTDLKPQVPPPTPPPVAAVPPTPQPLAPTPSAPCPATPAGPKGRVFVSPLAKKLAVEKGIDLTQVKGTGPDGRITKKDIDSFVPSKVAPAPAAVVPPTGPGMAPVPTGVFTDIPISNIRRILEGRSKISVNDFIIKASALACLKVPEANSSWMDTVIRQNHVVDVSVAVSTPAGLITPIVFNAHIKGVETIANDVVSLATKAREGKLQPHEFQGGTFTISNLGMFGIKNFSAIINPPQACILAIGASEDKLVPADNEKGFDVASMMSVTLSCDHRVVDGAVGAQWLAEFRKYLEKPITMLL

SEQ ID NO: 81046 - protein, 47 aa, Homo sapiens
MDHLRPVNSANSNVLLIGRRKEEERLMESYYAGSVLYRTKEFYRRRK

SEQ ID NO: 81047 - protein, 166 aa, Homo sapiens
MDSELKEEIPVHEEFILCGGAETQVLKCGPWTDLFHDQSVKRPKLLIFIIPGNPGFSAFYVPFAKALYSLTNRRFPVWTISHAGHALAPKDKKILTTSEDSNAQEIKDIYGLNGQIEHKLAFLRTHVPKDMKLVLIGHSIGSYFTLQMLKRVPELPLMLPTLGAKK

SEQ ID NO: 81048 - protein, 371 aa, Homo sapiens
MLGSRAAGFARGLRAVALAWLPGWRGRSFALARAAGAPHGGDLQPPACPEPRGRQLSLSAAAVVDSAPRPLQPYLRLMRLDKPIGTWLLYLPCTWSIGLAAEPGCFPDWYMLSLFGTGAILMRGAGCTINDMWDQDYDKKVTRTANRPIAAGDISTFQSFVFLGGQLTLALGVLLCLNYYSIALGAGSLLLVITYPLMKRISYWPQLALGLTFNWGALLGWSAIKGSCDPSVCLPLYFSGVMWTLIYDTIYAHQDKRDDVLIGLKSTALRFGENTKPWLSGFSVAMLGALSLVGVNSGQTAPYYAALGAVGAHLTHQIYTLDIHRPEDCWNKFISNRTLGLIVFLGIVLGNLWKEKKTDKTKKGIENKIEN

SEQ ID NO: 81049 - protein, 71 aa, Homo sapiens
MKRVEEIKQKRQAKFIMNRLKKNKELQKVQDIKEVKQNIHLIRAPLAGKGKQLEEKMVQQLQEDVDMEDAP

SEQ ID NO: 81050 - protein, 53 aa, Homo sapiens
MKVSEAALSLLVLILIITSASRSQPSWSAVSRSRLTTTSASRVQVILLPQPPE

SEQ ID NO: 81051 - protein, 235 aa, Homo sapiens
MCSSKMPCSPSASSLCAASPPNCCHPSCCQTTCCRTTSCSHSCSVSSCCRPQCCHSVCCQPTCCRPSCCQTTCCRTTCCHPSCCVSSCCRPQCCHSVCFQPTCCHPSCCISSSCCPSCCESSCCCPCCCLRPVCGRVSCHVTCYHPTCVISTCPHPLCCASPPLPLPFPSPPVPLPFFLSLALPSPPRPSPPLLSPVLIPSPSPSPSLPSLSPPLPSPPLPSPHFPSVNPKSMLQ

SEQ ID NO: 81052 - protein, 155 aa, Homo sapiens
MWCLLRGLGRPGALARGALGQQQSLGARALASAGSESRDEYSYVVVGAGSAGCVLAGRLTEDPAERVLLLEAGPKDVLAGSKRLSWKIHMPAALVANLCDDRYNWCYHTEVQRGLDGRVLYWPRGRVWGGSSSLNAMVYVRGHAEDYERWQRQGA

SEQ ID NO: 81053 - protein, 400 aa, Homo sapiens
MDFNMKKLASDAGIFFTRAVQFTEEKFGQAEKTELDAHFENLLARADSTKNWTEKILRQTEVLLQPNPSARVEEFLYEKLDRKVPSRVTNGELLAQYMADAASELGPTTPYGKTLIKVAEAEKQLGAAERDFIHTASISFLTPLRNFLEGDWKTISKERRLLQNRRLDLDACKARLKKAKAAEAKATTVPDFQETRPRNYILSASASALWNDEVDKAEQELRVAQTEFDRQAEVTRLLLEGISSTHVNHLRCLHEFVKSQTTYYAQCYRHMLDLQKQLGSSQGAIFPGTFVGTTEPASPPLSSTSPTTAAATMPVVPSVASLAPPGEASLCLEEVAPPASGTRKARVLYDYEAADSSELALLADELITVYSLPGMDPDWLIGERGNKKGKVPVTYLELLS

SEQ ID NO: 81054 - protein, 56 aa, Homo sapiens
VRRIPWTAASSQLKEHFAQFGHVRRTRRLAFTEVWVGFSFLQKKDFGMHYNRKIIL

SEQ ID NO: 81055 - protein, 405 aa, Homo sapiens
MLPAGCSRRLVAELQGALDACAQRQLQLEQSLRVCRRLLHAWEPTGTRALKPPPGPETNGEDPLPACTPSPQDLKELEFLTQALEKAVRVRRGITKAGERDKAPSLKSRSIVTSSGTTASAPPHSPGQAGGHASDTRPTKGLRQTTVPAKGHPERRLLSVGDGTRVGMGARTPRPGAGLRDQQMAPSAAPQAPEAFTLKEKGHLLRLPAAFRKAASQNSSLWAQLSSTQTSDSTDAAAAKTQFLQNMQTASGGPQPRLSAVEVEAEAGRLRKACSLLRLRMREELSAAPMDWMQEYRCLLTLEGLQAMVGQCLHRLQELRAAVAEQPPRPCPVGRPPGASPSCGGRAEPAWSPQLLVYSSTQELQTLAALKLRVAVLDQQIHLEKVLLEEEVGVQQRSAALRTRG

SEQ ID NO: 81056 - protein, 54 aa, Homo sapiens
MAFIRKKQQEQQLQLYSKERFSLLLLNLEEYYFEQHRANHILHKGSHHERTYPG

SEQ ID NO: 81057 - protein, 104 aa, Homo sapiens
MLWLLPTDRGRSGNGNEPQGSPTEIPFSSKQEDMSELLDEILVQEILDLNKTTPSEMPSTASTLSTPLHAGIDENYQAGGSENYHELLENLQFSPGIEVKISND

SEQ ID NO: 81058 - protein, 268 aa, Homo sapiens
MDHYDSQQTNDYMQPEEDWDRDLLLDPAWEKQQRKTFTAWCNSHLRKAGTQIENIEEDFRDGLKLMLLLEVISGERLAKPERGKMRVHKISNVNKALDFIASKGVKLVSIGAEEIVDGNVKMTLGMIWTIILRFAIQDISVEETSAKEGLLLWCQRKTAPYKNVNIQNFHISWKDGLGFCALIHRHRPELIDYGKLRKDDPLTNLNTAFDVAEKYLDIPKMLDAEDIVGTARPDEKAIMTYVSSFYHAFSGAQKMCRHAKAGWEGRVT

SEQ ID NO: 81059 - protein, 102 aa, Homo sapiens
MEKLLCFLVLTSLSHAFGQTDMSRKAFVFPKESDTSYVSLKAPLTKPLKAFTVCLHFYTELSSTHEINTIYLGGPFSPNVLNWRALKYEVQGEVFTKPQLWP

SEQ ID NO: 81060 - protein, 1218 aa, Homo sapiens
MSWSPDQELVLLATGQQTLIMMTKDFEPILEQQIHQDDFGESKFITVGWGRKETQFHGSEGRQAAFQMQMHESALPWDDHRPQVTWRGDGQFFAVSVVCPETGARKVRVWNREFALQSTSEPVAGLGPALAWKPSGSLIASTQDKPNQQDIVFFEKNGLLHGHFTLPFLKDEVKVNDLLWNADSSVLAVWLEDLQREESSIPKTCVQLWTVGNYHWYLKQSLSFSTCGKSKIVSLMWDPVTPYRLHVLCQGWHYLAYDWHWTTDRSVGDNSSDLSNVAVIDGNRVLVTVFRQTVVPPPMCTYQLLFPHPVNQVTFLAHPQKSNDLAVLDASNQISVYKCGDCPSADPTVKLGAVGGSGFKVCLRTPHLEKRYKIQFENNEDQDVNPLKLGLLTWIEEDVFLAVSHSEFSPRSVIHHLTAASSEMDEEHGQLNVSSSAAVDGVIISLCCNSKTKSVVLQLADGQIFKYLWESPSLAIKPWKNSGGFPVRFPYPCTQTELAMIGEEECVLGLTDRCRFFINDIEVASNITSFAVYDEFLLLTTHSHTCQCFCLRDASFKTLQAGLSSNHVSHGEVLRKVERGSRIVTVVPQDTKLVLQMPRGNLEVVHHRALVLAQIRKWLDKLMFKEAFECMRKLRINLNLIYDHNPKVFLGNVETFIKQIDSVNHINLFFTELKEEDVTKTMYPAPVTSSVYLSRDPDGNKIDLVCDAMRAVMESINPHKYCLSILTSHVKKTTPELEIVLQKVHELQGNAPSDPDAVSAEEALKYLLHLVDVNELYDHSLGTYDFDLVLMVAEKSQKDPKEYLPFLNTLKKMETNYQRFTIDKYLKRYEKAIGHLSKCGPEYFPECLNLIKDKNLYNEALKLYSPSSQQYQDISIAYGEHLMQEHMYEPAGLMFARCGAHEKALSAFLTCGNWKQALCVAAQLNFTKDQLVGLGRTLAGKLVEQRKHIDAAMVLEECAQDYEEAVLLLLEGAAWEEALRLVYKYNRLDIIETNVKPSILEAQKNYMAFLDSQTATFSRHKKRLLVVRELKEQAQQAGLDDEVPHGQESDLFSETSSVVSGSEMSGKYSHSNSRISARSSKNRRKAERKKHSLKEGSPLEDLALLEALSEVVQNTENLKDEVYHILKVLFLFEFDEQGRELQKAFEDTLQLMERSLPEIWTLTYQQNSATPVLGPNSTANSIMASYQQQKTSVPVLDAELFIPPKINRRTQWKLSLLD

SEQ ID NO: 81061 - protein, 49 aa, Homo sapiens
MQHRGFLLLTLLALLALTSAVAKKKDKVKKGGPGSECAEWAWGPCTPSS

SEQ ID NO: 81062 - protein, 52 aa, Homo sapiens
  MOD_RES (1)..(1): Any amino acid
XYADARLEVGSTQLRTAGSCSHSFKRSFLGLRKKTNPSSQVSDWRAPWKVSQ

SEQ ID NO: 81063 - protein, 918 aa, Homo sapiens
MEPIYPFARPQMNTRFPSSRMVPFHFPPSKCALWNPTPTGDFIYLHLSYYRNPKLVVTEKTIRLAYRHAKQNKKNSSCFLLGSLTADEDEEGVTLTVDRFDPGREVPECLEITPTASLPGDFLIPCKVHTQELCSREMIVHSVDDFSSALKALQCHICSKDSLDCALARNLSSNLNISQVQGTYKYGYLTMDETRKLLLLLESDPKVYSLPLVGIWLSGITHIYSPQVWACCLRYIFNSSVQERVFSESGNFIIVLYSMTHKEPEFYECFPCDGKIPDFRFQLLTSKETLHLFKNVEPPDKNPIRCELSAESQNAETEFFSKASKNFSIKRSSQKLSSGKMPIHDHDSGVEDEDFSPRPIPSPHPVSQKISKIQPSVPELSLVLDGNFIESNPLPTPLEMVNNENPPLINHLEHLKPLQPQLYDEKHSPEVEAGEPSLRGIPNQLNQDKPALLRHCKVRQPPAYKKGNPHTRNSIKPSSHNGPSHDIFEKLQTVSAGNVQNEEYPIRPSTLNSRQSSLAPQSQPHDFVFSPHNSGRPMELQIPTPPLPSYCSTNVCRCCQHHSHIQYSPLNSWQGANTVGSIQDVQSEALQKHSLFHPSGCPALYCNAFCSSSSPIALRPQGDMGSCSPHSNIEPSPVARPPSHMDLCNPQPCTVCMHTPKTESDNGMMGLSPDAYRFLTEQDRQLRLLQAQIQRLLEAQSLMPCSPKTTAVEDTVQAGRQMELVSVEAQSSPGLHMRKGVSIAVSTGASLFWNAAGEDQEPDSQMKQDDTKISSEDMNFSVDINNEVTSLPGSASSLKAVDIPSFEESNIAVEEEFNQPLSVSNGQLAESVSMCLQTGPTGGASNNSETSEEPKIEHVMQPLLHQPSDNQKIYQDLLGQVNHLLNSSSKETEQPSTKAVIISHECTRTQNVYHTKKK

SEQ ID NO: 81064 - protein, 244 aa, Homo sapiens
MTVFFKTLRNHWKKTTAGLCLLTWGGHWLYGKHCDNLLRRAACQEAQVFGNQLIPPNAQVKKATVFLNPAACKGTLFEKNAAPILHLSGMDVTIVKTDYEGQAKKLLELMENTDVIIVAGGDGTLQEVVTGVLRRTDEATFSKIPIGFIPLGETSSLSHTLFAESGNKVQHITDATLAIVKGETVPLDVLQIKGEKEQPVFAMTGLRWGSFRDAGVKVSKYWYLGPLKIKAAHFFSTLKPFPKR

SEQ ID NO: 81065 - protein, 114 aa, Homo sapiens
MLFPTSAQESSRGLPDANDLCLGLQSLSLTGWDRPWSTQDSDSSAQSSTHSVLSMLHNPLGNVLGKPPLSFLPLDPLGSDLVDKFPAPSVRGSRLDTRPILDSRSSSPSDSDTS

SEQ ID NO: 81066 - protein, 344 aa, Homo sapiens
MLSEVLLVSAPGKVILHGEHAVVHGKVALAVSLNLRTFLRLQPHSNGKVDLSLPNIGIKRAWDVARLQSLDTSFLEQGDVTTPTSEQVEKLKEVAGLPDDCAVTERLAVLAFLYLYLSICRKQRWTKEDLELINKWAFQGERMIHGNPSGVDNAVSTWGGALRYHQGKISSLKRSPALQILLTNTKVPRNTRALVAGVRNRLLKFPEIVAPLLTSIDAISLECERVLGEMGEAPAPEQYLVLEELIDMNQHHLNALGVGHASLDQLCQVTRARGLHSKLTGAGGGGCGITLLKPGLEQPEVEATKQALTSCGFDCLETSIGAPGVSIHSATSLDSRVQQALDGL

SEQ ID NO: 81067 - protein, 378 aa, Homo sapiens
MAQRYDDLPHYGGMDGVGIPSTMYGDPHAARSMQPVHHLNHGPPLHSHQYPHTAHTNAMAPSMGSSVNDALKRDKDAIYGHPLFPLLALIFEKCELATCTPREPGVAGGDVCSSESFNEDIAVFAKQIRAEKPLFSSNPELDNLMIQAIQVLRFHLLELEKVHELCDNFCHRYISCLKGKMPIDLVIDDREGGSKSDSEDITRSANLTDQPSWNRDHDDTASTRSGGTPGPSSGGHTSHSGDNSSEQGDGLDNSVASPSTGDDDDPDKDKKRHKKRGIFPKVATNIMRAWLFQHLTHPYPSEEQKKQLAQDTGLTILQVNNWFINARRRIVQPMIDQSNRAVSQGTPYNPDGQPMGGFVMDGQQHMGIRAPGKTLFLW

SEQ ID NO: 81068 - protein, 131 aa, Homo sapiens; identical to SEQ ID NO: 43351

SEQ ID NO: 81069 - protein, 767 aa, Homo sapiens
MRSWAFSYLDAMDNITRQNQFYDTQVIKQENESGYERRPLEMEQQQAYRPEMKTEMKQGAPTSFLPPEASQLKPDRQQFQSRKRPYEENRGRGYFEHREDRRGRSPQPPAEEDEDDFDDTLVAIDTYNCDLHFKVARDRSSGYPLTIEGFAYLWSGARASYGVRRGRVCFEMKINEEISVKHLPSTEPDPHVVRIGWSLDSCSTQLGEEPFSYGYGGTGKKSTNSRFENYGDKFAENDVIGCFADFECGNDVELSFTKNGKWMGIAFRIQKEALGGQALYPHVLVKNCAVEFNFGQRAEPYCSVLPGFTFIQHLPLSERIRGTVGPKSKAECEILMMVGLPAAGKTTWAIKHAASNPSKKYNILGTNAIMDKMRVMGLRRQRNYAGRWDVLIQQATQCLNRLIQIAARKKRNYILDQTNVYGSAQRRKMRPFEGFQRKAIVICPTDEDLKDRTIKRTDEEGKDVPDHAVLEMKANFTLPDVGDFLDEVLFIELQREEADKLVRQYNEEGRKAGPPPEKRFDNRGGGGFRGRGGGGGFQRYENRGPPGGNRGGFQNRGGGSGGGGNYRGGFNRSGGGGYSQNRWGNNNRDNNNSNNRGSYNRAPQQQPPPQQPPPPQPPPQQPPPPPSYSPARNPPGASTYNKNSNIPGSSANTSTPTVSSYSPPQPSYSQPPYNQGGYSQGYTAPPPPPPPPPAYNYGSYGGYNPAPYTPPPPPTAQTYPQPSYNQYQQYAQQWNQYYQNQGQWPPYYGNYDYGSYSGNTQGGTSTQ

SEQ ID NO: 81070 - protein, 91 aa, Homo sapiens
MIVGKDREGFFTNGLTLGAKKCSVIRDSLYVDGDCTMDIRTKSQGGEPTYNVAVGRAGRALVIVMGKEGVHGGTLNKKAYELALYLRRSDV

SEQ ID NO: 81071 - protein, 96 aa, Homo sapiens
MTSPQLEWTLQTLLEQLNEDELKSFKSLLWAFPLEDVLQKTPWSEVEEADGKKLAEILVNTSSENWIRNATVNILEEMNLTELCKMAKAEMMEDGQ

SEQ ID NO: 81072 - protein, 520 aa, Homo sapiens
MEGKWLLCMLLVLGTAIVEAHDGHDDDVIDIEDDLDDVIEEVEDSKPDTTAPPSSPKVTYKAPVPTGEVYFADSFDRGTLSGWILSKAKKDDTDDEIAKYDGKWEVEEMKESKLPGDKGLVLMSRAKHHAISAKLNKPFLFDTKPLIVQYEVNFQNGIECGGAYVKLLSKTPELNLDQFHDKTPYTIMFGPDKCGEDYKLHFIFRHKNPKTGIYEEKHAKRPDADLKTYFTDKKTHLYTLILNPDNSFEILVDQSVVNSGNLLNDMTPPVNPSREIEDPEDRKPEDWDERPKIPDPEAVKPDDWDEDAPAKIPDEEATKPEGWLDDEPEYVPDPDAEKPEDWDEDMDGEWEAPQIANPRCESAPGCGVWQRPVIDNPNYKGKWKPPMIDNPSYQPGVVGQMIEAAEERPWLWVVYILTVALPVFLVILFCCSGKKQTSGMEYKKTDAPQPDVKEEEEEKEEEKDKGDEEEEGEEKLEEKQKSDAEEDGGTVSQEEEDRKPKAEEDEILNRSPRNRKPRRE

SEQ ID NO: 81073 - protein, 71 aa, Homo sapiens
MSAGGDFGNPLRKFKLVFLGEQSVGKTSLITRCCWQLQLRGAWFIDWGAMCTSENILTSPPSSQYTCLGQV

SEQ ID NO: 81074 - protein, 121 aa, Homo sapiens
MEKQPQNSRRGLAPREVPPAVGLLLIMALMNTLLYLCLDHFFIAPRQSTVDPTHCPYGHFRIGQMKNCSPWLSCEELRTEVRQLKRVGEGAVKRTQSLSVAQAGVQWHGLGSLQPPSPGFK

SEQ ID NO: 81075 - protein, 190 aa, Homo sapiens
MLLLSLTLSLVLLGSSWGCGIPAIKPALSFSQRIVNGENAVLGSWPWQVSLQDSSGFHFCGGSLISQSWVVTAAHCNVSPGRHFVVLGEYDRSSNAEPLQVLSVSRAITHPSWNSTTMNNDVTLLKLASPAQYTTRISPVCLASSNEALLSARRETHGCLLVLSPGAPKTAMCAHLLCILELASSAPGST

SEQ ID NO: 81076 - protein, 90 aa, Homo sapiens
MEANQCPLVVEPSYPDLVINVGEVTLGEENRKKLQKIQRDQEKERVMRAACALLNSGGGVIRMAKKVEHPVEMGLDLEQSLRELIQSSDL

SEQ ID NO: 81077 - protein, 9 aa, Homo sapiens
MVDTESPLC

SEQ ID NO: 81078 - protein, 139 aa, Homo sapiens
MAPARCFSARLRTVFQGVGHWALSTWAGLKPSRLLPQRASPRLLSVGRADLAKHQELPGKKLLSEKKLKRYFVDYRRVLVCGGNGGAGASCFHSEPRKEFGGPDGGDGGNGGHVILRGPRGHAGEGGRQSCGRPVLRGR

SEQ ID NO: 81079 - protein, 1302 aa, Homo sapiens
MRNLKLFRTLEFRDIQGPGNPQCFSLRTEQGTVLIGSEHGLIEVDPVSREVKNEVSLVAEGFLPEDGSGRIVGVQDLLDQESVCVATASGDVILCSLSTQQLECVGSVASGISVMSWSPDQELVLLATGQQTLIMMTKDFEPILEQQIHQDDFGESKFITVGWGRKETQFHGSEGRQAAFQMQMHESALPWDDHRPQVTWRGDGQFFAVSVVCPETGARKVRVWNREFALQSTSEPVAGLGPALAWKPSGSLIASTQDKPNQQDIVFFEKNGLLHGHFTLPFLKDEVKVNDLLWNADSSVLAVWLEDLQREESSIPKTCVQLWTVGNYHWYLKQSLSFSTCGKSKIVSLMWDPVTPYRLHVLCQGWHYLAYDWHWTTDRSVGDNSSDLSNVAVIDGNRVLVTVFRQTVVPPPMCTYQLLFPHPVNQVTFLAHPQKSNDLAVLDASNQISVYKCGDCPSADPTVKLGAVGGSGFKVCLRTPHLEKRYKIQFENNEDQDVNPLKLGLLTWIEEDVFLAVSHSEFSPRSVIHHLTAASSEMDEEHGQLNVSSSAAVDGVIISLCCNSKTKSVVLQLADGQIFKYLWESPSLAIKPWKNSGGFPVRFPYPCTQTELAMIGEEECVLGLTDRCRFFINDIEVASNITSFAVYDEFLLLTTHSHTCQCFCLRDASFKTLQAGLSSNHVSHGEVLRKVERGSRIVTVVPQDTKLVLQMPRGNLEVVHHRALVLAQIRKWLDKLMFKEAFECMRKLRINLNLIYDHNPKVFLGNVETFIKQIDSVNHINLFFTELKEEDVTKTMYPAPVTSSVYLSRDPDGNKIDLVCDAMRAVMESINPHKYCLSILTSHVKKTTPELEIVLQKVHELQGNAPSDPDAVSAEEALKYLLHLVDVNELYDHSLGTYDFDLVLMVAEKSQKDPKEYLPFLNTLKKMETNYQRFTIDKYLKRYEKAIGHLSKCGPEYFPECLNLIKDKNLYNEALKLYSPSSQQYQDISIAYGEHLMQEHMYEPAGLMFARCGAHEKALSAFLTCGNWKQALCVAAQLNFTKDQLVGLGRTLAGKLVEQRKHIDAAMVLEECAQDYEEAVLLLLEGAAWEEALRLVYKYNRLDIIETNVKPSILEAQKNYMAFLDSQTATFSRHKKRLLVVRELKEQAQQAGLDDEVPHGQESDLFSETSSVVSGSEMSGKYSHSNSRISARSSKNRRKAERKKHSLKEGSPLEDLALLEALSEVVQNTENLKDEVYHILKVLFLFEFDEQGRELQKAFEDTLQLMERSLPEIWTLTYQQNSATPMLSFLYHQRSTEEPSGS

SEQ ID NO: 81080 - protein, 105 aa, Homo sapiens
MSQSGAVSCCPGATNGSLGRSDGVAKMSPKDLFEQRKKYSNSNVIMHETSQYHVQHLATFIMDKSEAITSVDDAIRKLVQLSSKEKIWTQEMLLQVNDQSLRLLD

SEQ ID NO: 81081 - protein, 106 aa, Homo sapiens
MEAMAASTSLPDPGDFDRNVPRICGVCGDRATGFHFNAMTCEGCKGFFRRSMKRKALFTCPFNGDCRITKDNRRHCQACRLKRCVDIGMMKEFILTDEEVQRKREM

SEQ ID NO: 81082 - protein, 177 aa, Homo sapiens
MAGIFYFALFSCLFGICDAVTGSRVYPANEGPPSAPLNLISNVNETSVNLEWSSPQNTGGRQDISYNVVCKKCGAGDPSKCRPCGSGVHYTPQQNGLKTTKVSITDLLAHTNYTFEIWAVNGVSKYNPNPDQSVSVTVTTNQAAPSSIALVQAKEVTRYSVALAWLEPDRPNGVILE

SEQ ID NO: 81083 - protein, 82 aa, Homo sapiens
MEKKECPEKSSSSEEELPRRVYRELPCVSETLCDISHFFQEDDETEAEPLLFRAVPECQLSGGDIPRRHLLRRESNSFLLCF

SEQ ID NO: 81084 - protein, 1233 aa, Homo sapiens
MRGLPRGRGLMRARGRGRAAPPGSRGRGRGGPHRGRGRPRSLLSLPRAQASWTPQLSTGLTSPPVPCLPSQGEAPAEMGALLLEKETRGATERVHGSLGDTPRSEETLPKATPDSLEPAGPSSPASVTVTVGDEGADTPVGATPLIGDESENLEGDGDLRGGRILLGHATKSFPSSPSKGGSCPSRAKMSMTGAGKSPPSVQSLAMRLLSMPGAQGAAAAGSEPPPATTSPEGQPKVHRARKTMSKPGNGQPPVPEKRPPEIQHFRMSDDVHSLGKVTSDLAKRRKLNSGGGLSEELGSARRSGEVTLTKGDPGSLEEWETVVGDDFSLYYDSYSVDERVDSDSKSEVEALTEQLSEEEEEEEEEEEEEEEEEEEEEEEEDEESGNQSDRSGSSGRRKAKKKWRKDSPWVKPSRKRRKREPPRAKEPRGVSNDTSSLETERGFEELPLCSCRMEAPKIDRISERAGHKCMATESVDGELSGCNAAILKRETMRPSSRVALMVLCETHRARMVKHHCCPGCGYFCTAGTFLECHPDFRVAHRFHKACVSQLNGMVFCPHCGEDASEAQEVTIPRGDGVTPPAGTAAPAPPPLSQDVPGRADTSQPSARMRGHGEPRRPPCDPLADTIDSSGPSLTLPNGGCLSAVGLPLGPGREALEKALVIQESERRKKLRFHPRQLYLSVKQGELQKVILMLLDNLDPNFQSDQQSKRTPLHAAAQKGSVEICHVLLQAGANINAVDKQQRTPLMEAVVNNHLEVARYMVQRGGCVYSKEEDGSTCLHHAAKIGNLEMVSLLLSTGQVDVNAQDSGGWTPIIWAAEHKHIEVIRMLLTRGADVTLTDNEENICLHWASFTGSAAIAEVLLNARCDLHAVNYHGDTPLHIAARESYHDCVLLFLSRGANPELRNKEGDTAWDLTPERSDVWFALQLNRKLRLGVGNRAIRTEKIICRDVARGYENVPIPCVNGVDGEPCPEDYKYISENCETSTMNIDRNITHLQHCTCVDDCSSSNCLCGQLSIRCWYDKDGRLLQEFNKIEPPLIFECNQACSCWRNCKNRVVQSGIKVRLQLYRTAKMGWGVRALQTIPQGTFICEYVGELISDAEADVREDDSYLFDLDNKDGEVYCIDARYYGNISRFINHLCDPNIIPVRVFMLHQDLRFPRIAFFSSRDIRTGEELGFDYGDRFWDIKSKYFTCQCGSEKCKHSAEAIALEQSRLARLDPHPELLPELGSLPPVNT

SEQ ID NO: 81085 - protein, 47 aa, Homo sapiens
MAKTYDYLFKLLLIGDSGVGKTCLLFRFSEDAFNTTFISTIEQLPVL

SEQ ID NO: 81086 - protein, 263 aa, Homo sapiens
MLTFMASDSEEEVCDERTSLMSAESPTPRSCQEGRQGPEDGENTAQWRSQENEEDGEEDPDRYVCSGVPGRPPGLEEELTLKYGAKHVIMLFVPVTLCMIVVVATIKSVRFYTEKNGQLIYTPFTEDTPSVGQRLLNSVLNTLIMISVIVVMTIFLVVLYKYRCYKFIHGWLIMSSLMLLFLFTYIYLGEVLKTYNVAMDYPTLLLTVWNFGAVGMVCIHWKGPLVLQQAYLIMISALMALVFIKYLPEWSAWVILGAISVYG

SEQ ID NO: 81087 - protein, 22 aa, Homo sapiens
  MOD_RES (1)..(1): Any amino acid
XYSGGGADGLTFGKGTHLIIQP

SEQ ID NO: 81088 - protein, 122 aa, Homo sapiens
  MOD_RES (1)..(1): Any amino acid
XVGSPLSRIGVQLTDSAYVVASMRIMTRLGTPVLQALGDGDFVKCLHSVGQPLTGQGEPVSQWPCNPEKTLIGHVPDQREIISFGSGYGGNSLLGKKCFALRIASRLARDEGWLAEHMLVRA

SEQ ID NO: 81089 - protein, 70 aa, Homo sapiens
MTSPQLEWTLQTLLEQLNEDELKSFKSLLWAFPLEDVLQKTPWSEVEEADGKKLAEILVNTSSENWIRNA

SEQ ID NO: 81090 - protein, 86 aa, Homo sapiens
MSVPGPSSPDGALTRPPYCLEAGEPTPGLSDTSPDEGLIEDLTIEDKAVEQLAEGLLSHYLPDLQRSKQALQELTLLRLNTIMPSW

SEQ ID NO: 81091 - protein, 258 aa, Homo sapiens
MSLEEIKNRQNAARNNSPPTVGAFGHTRCSAFPLEQEADLIEAAEPGGPHSSRNGLCHPLNHSRTLAGKRPKAPRGEEAHLPPVSDLTVEFDKLNLQNIGRSVSKTPDESTKTKDQILTSRINAVERDLLEPSPADQLGNGHRRTESEMSARIAKMSLSPSSPRHEDQLEVTREPARRLFLFGEEPSKLDQDVLAALECADVDPHQFPAVHRWKSAVLCYSPSDRQSWPSPAVKGRFKSQLPDLSGPHSYSPGRNSVA

SEQ ID NO: 81092 - protein, 529 aa, Homo sapiens; identical to SEQ ID NO: 10320

SEQ ID NO: 81093 - protein, 61 aa, Homo sapiens
MMQGRFHMYEGYPLWKVTFPVRVFHLLGVDTLVVTNAAGGLNPKFEVGDIMLIRDHINLPG

SEQ ID NO: 81094 - protein, 176 aa, Homo sapiens
  MOD_RES (1)..(1): Any amino acid
XWCVPCLVSLDTLQELCRKEKLTCKSIGITKRNLNNYEVEYLCDYKVVKVITSEEAERRGQFYDNKGITYLFDLDYESDEFTVDAARYGNVSHFVNHSCDPNLQVFNVFIDNLDTRLPRIALFSTRTINAGEELTFDYQMKGSGDISSDSIDHSPAKKRVRTVCKCGAVTCRGYLN

SEQ ID NO: 81095 - protein, 43 aa, Homo sapiens
MPLYEGLGSGGEKTAVVIDLGEAFTNLSELFSIISIQKNYIPT

SEQ ID NO: 81096 - protein, 12 aa, Homo sapiens
MDPSGVKVLETA

SEQ ID NO: 81097 - protein, 486 aa, Homo sapiens
MAAALPRTLGELQLYRILQKANLLSYFDAFIQQGGDDVQQLCEAGEEEFLEIMALVGMASKPLHVRRLQKALRDWVTNPGLFNQPLTSLPVSSIPIYKLPEGSPTWLGISCSSYERSSNAREPHLKIPKCAATTCVQSLGQGKSDVVGSLALQSVGESRLWQGHHATESEHSLSPADLGSPASPKESSEALDAAAALSVAECVERMAPTLPKSDLNEVKELLKTNKKLAKMIGHIFEMNDDDPHKEEEIRKYSAIYGRFDSKRKDGKHLTLHELTVNEAAAQLCVKDNALLTRRDELFALARQISREVTYKYTYRTTKSKCGERDELSPKRIKVEDGFPDFQDSVQTLFQQARAKSEELAALSSQPEKVMAKQMEFLCNQAGYERLQHAERRLSAGLYRQSSEEHSPNGLTSDNSDGQGERPLNLRMPNLQNRQPHHFVVDGELSRLYPSEAKSHSSESLGILKDYPHSAFTLEKKVIKTEPEDSR

SEQ ID NO: 81098 - protein, 170 aa, Homo sapiens
MTDLNDNICKRYIKMITNIVILSLIICISLAFWIISMTASTYYGNLRPISPWRWLFSVVVPVLIVSNGLKKKSLDHSGALGGLVVGFILTIANFSFFTSLLMFFLSSSKLTKWKGEVKKRLDSEYKEGGQRNWVQVFCNGAVPTELALLYMIENGPGEIPVDFSKQYSAS

SEQ ID NO: 81099 - protein, 189 aa, Homo sapiens
MANNLQKGNGGPMRLYVGSLHFNITEDMLRGIFEPFGKIDNIVLMKDSDTGRSKGYGFITFSDSECARRALEQLNGFELAGRPMRVGHVTERLDGGTDITFPDGDQELDLGSAGGRFQLMAKLAEGAGIQLPSTAAAAAAAAAQAAALQLNGAVPLGALNPAALTALSPALNLASQCFQLSSLFTPQTM

SEQ ID NO: 81100 - protein, 171 aa, Homo sapiens
MLTLASKLKRDDGLKGSRTAATASDSTRRVSVRDKLLVKEVAELEANLPCTCKVHFPDPNKLHCFQLTVTPDEGYYQGGKFQFETEVPDAYNMVPPKVKCLTKIWHPNITETGEICLSLLREHSIDGTGWAPTRTLKDVVWGLNSLFTDLLNFDDPLNIEAAEHHLRDKED

SEQ ID NO: 81101 - protein, 144 aa, Homo sapiens
LKDVITLRRHVETKVRAKIRKRKVTTKINRHDKINGKRKTARKQKMFQRAQELRRRAEDYHKCKIPPSARKPLCNWVSLFVFLAFEHSLPGQDMDTFFSLQLCAQALQREMAERKAAYRHHSPIPVGNRVVQKHLHPHPVGPLI

SEQ ID NO: 81102 - protein, 87 aa, Homo sapiens
AAAASAASSSSASSSSSSSSSASSGPALLRVGPGFDAALQVSAAIGTNLRRFRAVFGESGGGGGSGEVPQLKRDEETLETVLRRLKR

SEQ ID NO: 81103 - protein, 182 aa, Homo sapiens
MFVGDSTWRRECPRWWRCKRAEGGARARSSRPHRVPGTMFGKRKKRVEISAPSNFEHRVHTGFDQHEQKFTGLPRQWQSLIEESARRPKPLVDPACITSIQPGAPKGEPHDVAPNGPSAGGLAIPQSSSSSSRPPTRARGAPSPGVLGPHASEPQLAPPACTPAAPAVPGPPGPRSPQREPQ

SEQ ID NO: 81104 - protein, 149 aa, Homo sapiens
MAAGGDHGSPDSYRSPLASRYASPEMCFVFSDRYKFRTWRQLWLWLAEAEQTLGLPITDEQIQEMKSNLENIDFKMAAEEEKRLRHDVMAHVHTFGHCCPKAAGIIHLGATSCYVGDNTACTADHSWETLLSLDSGSLHGSPELEACPR

SEQ ID NO: 81105 - protein, 145 aa, Homo sapiens
  MOD_RES (1)..(1): Any amino acid
XENNKNSLESSLRQLKCHFTWNLMEGENSLDDFEDKVFYRTEFQNREFKATMCNLLAYLKHLKGQNEAALECLRKAEELIQQEHADQAEIRSLVTWGNYAWVYYHMGRLSDVQIYVDKTQLLINETLHRCEPNPNNLDWSTIIIT

SEQ ID NO: 81106 - protein, 296 aa, Homo sapiens
MAYQIVLELHFSHCAAMGAALLMLIENALITQSRLMLLESVLIFFNLLAVLSYLKFFNCQKHSPFSLSWWFWLTLTGVACSCAVGIKYMGVFTYVLVLGVAAVHAWHLLGDQTLSNVGADVQCCMRPACMGQMQMSQGVCVFCHLLARAVALLVIPVVLYLLFFYVHLILVFRSGPHDQIMSSAFQASLEGGLARITQGQPLEVAFGSQVTLRNVFGKPVPCWLHSHQDTYPMIYENGRGSSHQQQVTCYPFKDVNNWWIVKDPRRHQLVVSSPPRPVRHGDMVQLVHGMTTRSLN

SEQ ID NO: 81107 - protein, 421 aa, Homo sapiens
MPFSVSWGILLLAGLCCLVPSSLVEDPQEDAAQKTDTSHHDQGDWEDLACQKISYNVTDLAFDLYKELADLSQTSNVLVTPTSVAMAFAMLSLGTKADTRTEILEGLNVNLTETPEAKIHECFQQVLQALSRPDTRLQLTTGSSLFVNKSMKLVDTFLEDTKKLYHSEASSINFRDTEEAKEQINNYVEKRTGRKVVDLVKHLKKDTSLALVDYISFHGKWKDKFKAEHIMVEGFHVDDKTIIRVPMINHLGRFDIHRDRELSSWVLAQHYVGNATAFFILPDPKKMWQLEEKLTYSHLENIQRAFDIRSINLHFPKLSISGTYKLKRVLRNLGITKIFSNEADLSGVSQEAPLKLSKAVHVAVLTIDEKGTEATGAPHLEEKAWSKYQTVMFNRPFLVIIKDDITNFPLFIGKVVNPTQK

SEQ ID NO: 81108 - protein, 98 aa, Homo sapiens
MKSRIPVVLLACGSFNPITNMHLRMFEVARDHLHQTGMYQVIQGIISPVNDTYGKKDLAASHHRVAMARLALQTSDWIRVDPWESEQAQWMETVKVLR

SEQ ID NO: 81109 - protein, 855 aa, Homo sapiens
MDEEEDNLSLLTALLEENESALDCNSEENNFLTRENGEPDAFDELFDADGDGESYTEEADDGETGETRDEKENLATLFGDMEDLTDEEEVPASQSTENRVLPAPAPRREKTNEELQEELRNLQEQMKALQEQLKVTTIKQTASPARLQKSPEKSPRPPLKERRVQRIQESTCFSAELDVPALPRTKRVARTPKASPPDPKSSSSRMTSAPSQPLQTISRNKPSGITRGQIVGTPGSSGETTQPICVEAFSGLRLRRPRVSSTEMNKKMTGRKLIRLSQIKEKMAREKLEEIDWVTFGVILKKVTPQSVNSGKTFSIWKLNDLRDLTQCVSLFLFGEVHKALWKTEQGTVVGILNANPMKPKDGSEEVCLSIDHPQKVLIMGEALDLGTCKAKKKNGEPCTQTVNLRDCEYCQYHVQAQYKKLSAKRADLQSTFSGGRIPKKFARRGTSLKERLCQDGFYYGGVSSASYAASIAAAVAPKKKIQTTLSNLVVKGTNLIIQETRQKLGIPQKSLSCSEEFKELMDLPTCGARNLKQHLAKATASGIMGSPKPAIKSISASALLKQQKQRMLEMRRRKSEEIQKRFLQSSSEVESPAVPSSSRQPPAQPPRTGSEFPRLEGAPATMTPKLGRGVLEGDDVLFYDESPPPRPKLSALAEAKKLAAITKLRAKGQVLTKTNPNSIKKKQKDPQDILEVKERVEKNTMFSSQAEDELEPARKKRREQLAYLESEEFQKILKAKSKHTGILKEAEAEMQERYFEPLVKKEQMEEKMRNIREVKCRVVTCKTCAYTHFKLLETCVSEQHEYHWHDGVKRFFKCPCGNRSISLDRLPNKHCSNCGLYKWERDGMLKVCHLRTNF

SEQ ID NO: 81110 - protein, 71 aa, Homo sapiens
MAGHTQQPSGRGNPRPAPSPSPVPGTVPGASERVALKKEIGLLSACTIIIAFCCSGAPSSSCTPPALLSSP

SEQ ID NO: 81111 - protein, 172 aa, Homo sapiens
MSSAAADHWAWLLVLSFVFGCNVLRILLPSFSSFMSRVLQKDAEQESQMRAEIQDMKQELSTVNMMDEFARYARLERKINKMTDKLKTHVKARTAQLAKIKWVISVAFYVLQAALMISLIWKYYSVPVAVVPSKWITPLDRLVAFPTRVAVFSSSIWTSKCFSSPDKSILEK

SEQ ID NO: 81112 - protein, 81 aa, Homo sapiens
MRSGKASCTLETVWEDKHKYEEAERRFYEHEATQAAASAQQLPAEGPAMNGPGQDDPEDADEAEAPDGGSRRDPRKSQDSR

SEQ ID NO: 81113 - protein, 297 aa, Homo sapiens
MSKHRKTYSTEEYHHRLQTFASNWRKINAHNNGNHTFKMALNQFSDMSFAEIKHKYLWSEPQNCSATKSNYLRGTGPYPPSVDWRKKGNFVSPVKNQGACGSCWTFSTTGALESAIAIATGKMLSLAEQQLVDCAQDFNNHGCQGGLPSQAFEYILYNKGIMGEDTYPYQGKDGYCKFQPGKAIGFVKDVANITIYDEEAMVEAVALYNPVSFAFEVTQDFMMYRTGIYSSTSCHKTPDKVNHAVLAVGYGEKNGIPYWIVKNSWGPQWGMNGYFLIERGKNMCGLAACASYPIPLV

SEQ ID NO: 81114 - protein, 187 aa, Homo sapiens
MPVYSVKGHKEIINAIDGIGGLGIGEGAPEIVTGSRDGTVKVWDPRQKDDPVANMEPVQGENKRDCWTVAFGNAYNQEERVVCAGYDNGDIKLFDLRNMALRWETNIKNGVCSLEFDRKDISMNKLVATSLEGKFHVFDMRTQHPTKGFASVSEKAHKSTVWQVRHLPQNRELFLTAGGAGGLHLWK

SEQ ID NO: 81115 - protein, 792 aa, Homo sapiens
MDSKKRSSTEAEGSKERGLVHIWQAGSFPITPERLPGWGGKTVLQAALGVKHGVLLTEDGEVYSFGTLPWRSGPVEICPSSPILENALVGQYVITVATGSFHSGAVTDNGVAYMWGENSAGQCAVANQQYVPEPNPVSIADSEASPLLAVRILQLACGEEHTLALSISREIWAWGTGCQLGLITTAFPVTKPQKVEHLAGRVVLQVACGAFHSLALVQCLPSQDLKPVPERCNQCSQLLITMTDKEDHVIISDSHCCPLGVTLTESQAENHASTALSPSTETLDRQEEVFENTLVANDQSVATELNAVSAQITSSDAMSSQQNVMGTTEISSARNIPSYPDTQAVNEYLRKLSDHSVREDSEHGEKPVPSQPLLEEAIPNLHSPPTTSTSALNSLVVSCASAVGVRVAATYEAGALSLKKVMNFYSTTPCETGAQAGSSAIGPEGLKDSREEQVKQESMQGKKSSSLVDIREEETEGGSRRLSLPGLLSQVSPRLLRKAARVKTRTVVLTPTYSGEADALLPSLRTEVWTWGKGKEGQLGHGDVLPRLQPLCVKCLDGKEVIHLEAGGYHSLALTAKSQVYSWGSNTFGQLGHSDFPTTVPRLAKISSENGVWSIAAGRDYSLFLVDTEDFQPGLYYSGRQDPTEGDNLPENHSGSKTPVLLSCSKLGYISRVTAGKDSYLALVDKNIMGYIASLHELATTERRFYSKLSDIKSQILRPLLSLENLGTTTTVQLLQEVASRFSKLCYLIGQHGASLSSFLHGVKEARSLVILKHSSLFLDSYTDRVSPCCPG

SEQ ID NO: 81116 - protein, 140 aa, Homo sapiens
MALWETGGGDCGRGQGAEDFHYGLILQSLWLQSDPKYHWEQQCEGLEAPGGGKGLGAAWQLLKLSQRRKLLLPPGELGDAARVFPLQSPQPLLTFESPRRRGQSSRGWDGECRASVTVRAHCRGPFSFPLGRLRFRVFLF

SEQ ID NO: 81117 - protein, 112 aa, Homo sapiens
MPADVNLSQKPQVLGPEKQDGSCEASVSFEDVTVDFSREEWQQLDPAQRCLYRDVMLELYSHLFAVGYHIPNPEVIFRMLKEKEPRVEEAEVSHQRCQGLAQLAPPFHLHHL

SEQ ID NO: 81118 - protein, 1215 aa, Homo sapiens
MSFFFKAIHDLMMFSGPQILKLLIKFVNDTKAPDWQGYFYTVLLFVTACLQTLVLHQYFHICFVSGMRIKTAVIGAVYRKALVITNSARKSSTVGEIVNLMSVDAQRFMDLATYINMIWSAPLQVILALYLLWLNLGPSVLAGVAVMVLMVPVNAVMAMKTKTYQVAHMKSKDNRIKLMNEILNGIKVLKLYAWELAFKDKVLAIRQEELKVLKKSAYLSAVGTFTWVCTPFLVALCTFAVYVTIDENNILDAQTAFVSLALFNILRFPLNILPMVISSIVQASVSLKRLRIFLSHEELEPDSIERRPVKDGGGTNSITVRNATFTWARSDPPTLNGITFSIPEGALVAVVGQVGCGKSSLLSALLAEMDKVEGHVAIKGSVAYVPQQAWIQNDSLRENILFGCQLEEPYYRSVIQACALLPDLEILPSGDRTEIGEKGVNLSGGQKQRVSLARAVYSNADIYLFDDPLSAVDAHVGKHIFENVIGPKGMLKNKTRILVTHSMSYLPQVDVIIVMSGGKISEMGSYQELLARDGAFAEFLRTYASTEQEQDAEENGSTVMDEEEAGVTGVSGPGKEAKQMENGMLVTDSAGKQLQRQLSSSSSYSGDISRHHNSTAELQKAEAKKEETWKLMEADKAQTGQVKLSVYWDYMKAIGLFISFLSIFLFMCNHVSALASNYWLSLWTDDPIVNGTQEHTKVRLSVYGALGISQGIAVFGYSMAVSIGGILASRCLHVDLLHSILRSPMSFFERTPSGNLVNRFSKELDTVDSMIPEVIKMFMGSLFNVIGACIVILLATPIAAIIIPPLGLIYFFVQRFYVASSRQLKRLESVSRSPVYSHFNETLLGVSVIRAFEEQERFIHQSDLKVDENQKAYYPSIVANRWLAVRLECVGNCIVLFAALFAVISRHSLSAGLVGLSVSYSLQVTTYLNWLVRMSSEMETNIVAVERLKEYSETEKEAPWQIQETAPPSSWPQVGRVEFRNYCLRYREDLDFVLRHINVTINGGEKVGIVGRTGAGKSSLTLGLFRINESAEGEIIIDGINIAKIGLHDLRFKITIIPQDPVLFSGSLRMNLDPFSQYSDEEVWTSLELAHLKDFVSALPDKLDHECAEGGENLSVGQRQLVCLARALLRKTKILVLDEATAAVDLETDDLIQSTIRTQFEDCTVLTIAHRLNTIMDYTRVIVLDKGEIQEYGAPSDLLQQRGLFYSMAKDAGLV

SEQ ID NO: 81119 - protein, 161 aa, Homo sapiens
MFHGIPATPGIGAPGNKPELYEEVKLYKNAREREKYDNMAELFAVVKTMQALEKAYIKDCVSPSEYTAACSRLLVQYKAAFRQVQGSEISSIDEFCRKFRLDCPLAMERIKEDRPITIKDDKGNLNRCIADVVSLFITVMDKLRLEIRAMDEIQPDLRELM

SEQ ID NO: 81120 - protein, 48 aa, Homo sapiens
MLVHLFRVGIRGGPFPGRLLPPLRFQTFSAVSCGEGVCVMAPQAREGR

SEQ ID NO: 81121 - protein, 23 aa, Homo sapiens
MRLLRRRHMPLRLAMVGCAFVLF

SEQ ID NO: 81122 - protein, 117 aa, Homo sapiens
MDEKTKKAEEMALSLTRAVAGGDEQVAMKCAIWLAEQRVPLSVQLKPEVSPTQDIRLWVSVEDAQMHTVTIWLTVRPDMTVASLKDMVFLDYGFPPVLQQWVIGQRLARDQETLHSH

SEQ ID NO: 81123 - protein, 178 aa, Homo sapiens
MGEFNEKKTTCGTVCLKYLLFTYNCCFWLAGLAVMAVGIWTLALKSDYISLLASGTYLATAYILVVAGTVVMVTGVLGCCATFKERRNLLRLLNTELKENLKDTMTKRYHQPGHEAVTSAVDQLQQEFHCCGSNNSQDWRDSEWIRSQEAGGRVVPDSCCKTVVALCGQRDHASNIYK

SEQ ID NO: 81124 - protein, 184 aa, Homo sapiens
MFYFRGCGRWVAVSFTKQQFPLARLSSDSAAPRTPHFDVIVIGGGHAGTEAATAAARCGSRTLLLTHRVDTIGQMSCNPSFGGIGKGHLMREVDALDGLCSRICDQSGVHYKVLNRRKGPAVWGLRAQIDRKLYKQNMQKEILNTPLLTVQEGAVEDLILTEPEPEHTGKCRVSGVVLGWSAMA

SEQ ID NO: 81125 - protein, 49 aa, Homo sapiens
MRVEHARMHAKHRGHEAMHAEMVLILIATLVVAQLLLVQWKQRHPRSYN

SEQ ID NO: 81126 - protein, 94 aa, Homo sapiens
MDTASHSLVLLQQLNMQREFGFLCDCTVAIGDVYFKAHRAVLAAFSNYFKMIFIHQTRKRKMSCTICGHKFPRKSQLLEHMYTHKDSKSPTLRS

SEQ ID NO: 81127 - protein, 385 aa, Homo sapiens
MNAFLDDPEFADIMLRAEQAIEVGIFPERISQGSSGSYFVKDPKRKIIGVFKPKSEEPYGQLNPKWTKYVHKVCCPCCFGRGCLIPNQGYLSEAGAYLVDNKLHLSIVPKTKVVWLVSETFNYNAIDRAKSRGKKYALEKVPKVGRKFHRIGLPPKIGSFQLFVEGYKEAEYWLRKFEADPLPENIRKQFQSQFERLVILDYIIRNTDRGNDNWLVRYEKQKCEKEIDHKESKWIDDEEFLIKIAAIDNGLAFPFKHPDEWRAYPFHWAWLPQAKVPFSEEIRNLILPYISDMNFVQDLCEDLYELFKTDKGFDKATFESQMSVMRGQILNLTQALRDGKSPFQLVQIPCVIVERSQGGSQGRIVHLSNSFTQTVNCRKPFFSSW

SEQ ID NO: 81128 - protein, 561 aa, Homo sapiens
MLKLAQQCLERAQSTAAKLGKTRLKPTMPAAAPIPQPAGRHRRVYSDEGGKLSPFLPPEIFQKLQGAESQSCKKELTPLEEASLQNQKLKAAYEARMARLDPSQAMQKTSLTLSLQRQMMENLVIAKAREETLQRKMEERRLRLQEAANRRFCSQVALTPEEREQRALYAAILEYEQDHDWPKHWKAKLKRNPGDLSLVTSLVSHLLSLPDHPIAQLLRRLQCSVYSALYPAVSRAAAPAPGCCPPTPNPGSRRLRPSQSLHCMLSPPEPSAAPRPQDSPPTPPLQPGPVGSPSPLGDTASGLPDKDSSFEDLEQFLGTSERQGRGRGVQPEPQLQQLKTAVEEIHNAVDRLLSLTLLAFEGLNTAASKDRCLACIEEPFFSPLWPLLLALYRSVHRAREAALSRSMELYRNAPPTAIGIPTKLLPQNPEAKGATGYPYCAAAQELGLLVLESCPQKKLECIVRTLRIICVCAEDYCPTPEATPQAGPPPIAAAAIGADDLLPILSFVVLRSGLPQLVSECAALEEFIHEGYLIGEEGYCLTSLQSALSYVELLPRGGLAK

SEQ ID NO: 81129 - protein, 105 aa, Homo sapiens
MSQSRHRAEAPPLEREDSGTFSLGKMITAKPGKTPIQVLHEYGMKTKNIPVYECERSDVQIHVPTFTFRVTVGDITCTGEGTSKKLAKHRAAEAAINILKANASI

SEQ ID NO: 81130 - protein, 151 aa, Homo sapiens
MAAQKDQQKDAEAEGLSGTTLLPKLIPSGAGREWLERRRATIRPWSTFVDQQRFSRPRNLGELCQRLVRNVEYYQSNYVFVFLGLILYCVVTSPMLLVALAVFFGACYILYLRTLESKLVLFGATLVVIGSHAAFHQIEAVDGEELQMEPV

SEQ ID NO: 81131 - protein, 107 aa, Homo sapiens
RSRSRHSSRTSDRRCSRSRDHKRSRSRERRRSRSRDRRRSRSHDRSERKHRSRSRDRRRSKSRDRKSYKHRSKSRDREQDRKSKEKEDKIIGLTTSPLRDNKTTLPH

SEQ ID NO: 81132 - protein, 348 aa, Homo sapiens
MSLLVVSMACVGFFLLQGAWPHEGVHRKPSLLAHPGRLVKSEETVILQCWSDVMFEHFLLHREGMFNDTLRLIGEHHDGVSKANFSISRMTQDLAGTYRCYGSVTHSPYQVSAPSDPLDIVIIGLYEKPSLSAQLGPTVLAGENVTLSCSSRSSYDMYHLSREGEAHERRLPAGPKVNGTFQADFPLGPATHGGTYRCFGSFHDSPYEWSKSSDPLLVSVTGNPSNSWPSPTEPSSKTGNPRHLHILIGTSVVIILFILLFFLLHRWCSNKKNAAVMDQESAGNRTANSEDSDEQDPQEVTYTQLNHCVFTQRKITRPSQRPKTPPTDIIVYTELPNAESRSKVVSCP

SEQ ID NO: 81133 - protein, 155 aa, Homo sapiens
MQWAVGRRWAWAALLLAVAAVLTQVVWLWLGTQSFVFQREEIAQLARQYAGLDHELAFSRLIVELRRLHPGHVLPDEELQWVFVNAGGWMGAMCLLHASLSEYVLLFGTALGSRGHSGRYWAEISDTIISGTFHQWREGTTKSEVFYPGPLTSQA

SEQ ID NO: 81134 - protein, 153 aa, Homo sapiens
MAELQEVQITEEKPLLPGQTPEAAKTHSVETPYGSVTFTVYGTPKPKRPAILTYHDVGLNYKSCFQPLFQFEDMQEIIQNFVRVHVDAPGMEEGAPVFPLGYQYPSLDQLADMIPCVLQYLNFSTIIGVGVGAGAYILARYALNHPDTVEGLV

SEQ ID NO: 81135 - protein, 552 aa, Homo sapiens
RCAFCKHLGATIKCCEEKCTQMYHYPCAAGAGTFQDFSHIFLLCPEHIDQAPERSKEDANCAVCDSPGDLLDQFFCTTCGQHYHGMCLDIAVTPLKRAGWQCPECKVCQNCKQSGEDSKMLVCDTCDKGYHTFCLQPVMKSVPTNGWKCKNCRICIECGTRSSSQWHHNCLICDNCYQQQDNLCPFCGKCYHPELQKDMLHCNMCKRWVHLECDKPTDHELDTQLKEEYICMYCKHLGAEMDRLQPDYNNEMEVEGPEDQMVFSEQAANKDVNGQESTPGIVPDAVQVHTEEQQKSHPSESLDTDSLLIAVSSQHTVNTELEKQISNEVDSEDLKMSSEVKHICGEDQIEDKMEVTENIEVVTHQITVQQEQLQLLEEPETVVSREESRPPKLVMESVTLPLETLVSPHEESISLCPEEQLVIERLQGEKEQKENSELSTGLMDSEMTPTIEGCVKDVSYQGGKSIKLSSETESSFSSSADISKADVSSSPTPSSDLPSHDMLHNYPSALSSSAGNIMPTTYISVTPKIGMGKPAITKRKFSPGRPRSKQVG

SEQ ID NO: 81136 - protein, 660 aa, Homo sapiens
MLLCRAHRVLGLRGARELAVTMAMRELVEAECGGANPLMKLAGHFTQDKALRQEGLRPGPWPPGAPASEAASKPLGVASEDELVAEFLQDQNAPLVSRAPQTFKMDDLLAEMQQIEQSNFRQAPQRAPGVADLALSENWAQEFLAAGDAVDVTQDYNETDWSQEFISEVTDPLSVSPARWAEEYLEQSEEKLWLGEPEGTATDRWYDEYHPEEDLQHTASDFVAKVDDPKLANSEFLKFVRQIGEGQVSLESGAGSGRAQAEQWAAEFIQQQGTSDAWVDQFTRPVNTSALDMEFERAKSAIESDVDFWDKLQAELEEMAKRDAEAHPWLSDYDDLTSATYDKGYQFEEENPLRDHPQPFEEGLRRLQEGDLPNAVLLFEAAVQQDPKHMEAWQYLGTTQAENEQELLAISALRRCLELKPDNQTALMALAVSFTNESLQRQACETLRDWLRYTPAYAHLVTPAEEGAGGAGLGPSKRILGSLLSDSLFLEVKELFLAAVRLDPTSIDPDVQCGLGVLFNLSGEYDKAVDCFTAALSVRPNDYLLWNKLGATLANGNQSEEAVAAYRRALELQPGYIRSRYNLGISCINLGAHREAVEHFLEALNMQRKSRGPRGEGGAMSENIWSTLRLALSMLGQSDAYGAADARDLSTLLTMFGLPQ

SEQ ID NO: 81137 - protein, 49 aa, Homo sapiens
MLGDWEKYKSSRKLIDRAYKGMPMNIRGPMWSVLLNIEEMKLKNPGRYQ

SEQ ID NO: 81138 - protein, 233 aa, Homo sapiens
MAAGTAVGAWVLVLSLWGAVVGAQNITARIGEPLVLKCKGAPKKPPQRLEWKLNTGRTEAWKVLSPQGGGPWDSVARVLPNGSLFLPAVGIQDEGIFRCQAMNRNGKETKSNYRVRVYQIPGKPEIVDSASELTAGVPNKVVEESRRSRKRPCEQEVGTCVSEGSYPAGTLSWHLDGKPLVPNEKGVSVKEQTRRHPETGLFTLQSELMVTPARGGDPRPTFSCSFSPGLPRH

SEQ ID NO: 81139 - protein, 71 aa, Homo sapiens
MNPDLRRERDSASFNPELLTHILDGSPEKTRRRREIGEGGGRDLPPFPRKAGDSLDAESGALWGLGPLAQR

SEQ ID NO: 81140 - protein, 375 aa, Homo sapiens
MSLMVISMACVGFFLLQGAWTHEGGQDKPLLSAWPSAVVPRGGHVTLLCRSRLGFTIFSLYKEDGVPVPELYNKIFWKSILMGPVTPAHAGTYRCRGSHPRSPIEWSAPSNPLVIVVTGLFGKPSLSAQPGPTVRTGENVTLSCSSRSSFDMYHLSREGRAHEPRLPAVPSVDGTFQADFPLGPATHGGTYTCFSSLHDSPYEWSDPSDPLLVSVTGNSSSSSSSPTEPSSKTGIRRHLHILIGTSVAIILFIILFFFLLHCCCSNKKNAAVMDQEPAGDRTVNREDSDDQDPQEVTYAQLDHCVFTQTKITSPSQRPKTPPTDTTMYMELPNAKPRSLSPAHKHHSQALRGSSRETTALSQNRVASSHVPAAGI

SEQ ID NO: 81141 - protein, 161 aa, Homo sapiens
MNKHQKPVLTGQRFKTRKRDEKEKFEPTVFRDTLVQGLNEAGDDLEAVAKFLDSTGSRLDYRRYADTLFDILVAGSMLAPGGTRIDDGDKTKMTNHCVFSANEDHETIRNYAQVFNKLIRRYKYLEKAFEDEMKKALRPHLLSSFSKHGWQKKMPTLLPRL

SEQ ID NO: 81142 - protein, 107 aa, Homo sapiens
MENLKSGVYPLKEASGCPGADRNLLVYSFYEKGPLTFRDVAIEFSLEEWQCLDTAQQDLYRKVMLENYRNLVFLAGIAVSKPDLITCLEQGKEPWNMKRHAMVDQPP

SEQ ID NO: 81143 - protein, 453 aa, Homo sapiens
RLLKHPNIVRLHDSISEEGFHYLVFDLVTGGELFEDIVAREYYSEADASHCIHQILESVNHIHQHDIVHRDLKPENLLLASKCKGAAVKLADFGLAIEVQGEQQAWFGFAGTPGYLSPEVLRKDPYGKPVDIWACGVILYILLVGYPPFWDEDQHKLYQQIKAGAYDFPSPEWDTVTPEAKNLINQMLTINPAKRITADQALKHPWVCQRSTVASMMHRQETVECLRKFNARRKLKGAILTTMLVSRNFSAAKSLLNKKSDGGVKPQSNNKNSLVSPAQEPAPLQTAMEPQTTVVHNATDGIKGSTESCNTTTEDEDLKVRKQEIIKITEQLIEAINNGDFEAYTKICDPGLTSFEPEALGNLVEGMDFHKFYFENLLSKNSKPIHTTILNPHVHVIGEDAACIAYIRLTQYIDGQGRPRTSQSEETRVWHRRDGKWLNVHYHCSGAPAAPLQ

SEQ ID NO: 81144 - protein, 314 aa, Homo sapiens
MGRRSSDTEEESRSKRKKKHRRRSSSSSSSDSRTYSRKKGGRKSRSKSRSWSRDLQPRSHSYDRRRRHRSSSSSSYGSRRKRSRSRSRGRGKSYRVQRSRSKSRTRRSRSRPRLRSHSRSSERSSHRRTRSRSRDRERRKGRDKEKREKEKDKGKDKELHNIKRGESGNIKAGLEHLPPAEQAKARLQLVLEAAAKADEALKAKERNEEEAKRRKEEDQATLVEQVKRVKEIEAIESDSFVQQTFRSSKEVKKSVEPSEVKQATSTSGPASAVADPPSTEKEIDPTSIPTAIKYQDDNSLAHPNVISLNFTNVS

SEQ ID NO: 81145 - protein, 57 aa, Homo sapiens
MLKREGKVQPYTKTLDGGWGWMIVIHFFLVPWLLLFVTYLERKLPPFLGLSLLLVDI

SEQ ID NO: 81146 - protein, 322 aa, Homo sapiens
MCPVDKAHRNQCQACRLKKCLQAGMNQDAVQNERQPRSTAQVHLDSMESNTESRPESLVAPPAPAGRSPRGPTPMSAARALGHHFMASLITAETCAKLEPEDADENIDVTSNDPEFPSSPYSSSSPCGLDSIHETSARLLFMAVKWAKNLPVFSSLPFRDQVILLEEAWSELFLLGAIQWSLPLDSCPLLAPPEASAAGGAQGRLTLASMETRVLQETISRFRALAVDPTEFACMKALVLFKPETRGLKDPEHVEALQDQSQVMLSQHSKAHHPSQPVRFGKLLLLLPSLRFITAERIELLFFRKTIGNTPMEKLLCDMFKN

SEQ ID NO: 81147 - protein, 79 aa, Homo sapiens
MAACEGRRSGALGSSQSDFLTPPVGGAPWAVATTVVMYPPPPPPPHRDFISVTLSFGENYDNSKSWRRRSCWRVRVAPG

SEQ ID NO: 81148 - protein, 63 aa, Homo sapiens
MLTLASKLKRDDGLKGSRTAATASDSTRRVSVRDKLLVKEVAELEANLPYRVSLCCPSWSTVA

SEQ ID NO: 81149 - protein, 311 aa, Homo sapiens
MSDTLTADVIGRRVEVNGEHATVRFAGVVPPVAGPWLGVEWDNPERGKHDGSHEGTVYFKCRHPTGGSFIRPNKVNFGTDFLTAIKNRYVLEDGPEEDRKEQIVTIGNKPVETIGFDSIMKQQSQLSKLQEVSLRNCAVSCAGEKGGVAEACPNIRKVDLSKNLLSSWDEVIHIADQLRHLEVLNVSENKLKFPSGSVLTGTLSVLKVLVLNQTGITWAEAHAQCGGSRHGLDMQKDASKFVDLCVLQKCSTSNCIISAKDHTSMRMNVAKASEVTGRFNSQFKTCAICRTVCRMGAAVCRGVPRPGGTLP

SEQ ID NO: 81150 - protein, 42 aa, Homo sapiens
MASLKCSTVVCVICLEKPKYRCPACRVPYCSVVCFRKHKVQP

SEQ ID NO: 81151 - protein, 91 aa, Homo sapiens
MPFITCDEFNGVPSYMKSRLTYNQINDVIKEINKAVISKYKILHQPKKSMNSVTRNLYHRFIDEETKDTKGRYFIVEADIKEFTTLKADKK

SEQ ID NO: 81152 - protein, 117 aa, Homo sapiens
MSLHFLYYCSEPTLDVKIAFCQGFDKQVDVSYIAKHYNMSKSKVDNQFYSVEVGDSTFTVLKRYQNLKPIGSGAQGIVCAAYDAVLDRNVAIKKLSRPFQNQTHAKRAYRELVLMKC

SEQ ID NO: 81153 - protein, 56 aa, Homo sapiens
MDEIKSQELNLEGQRKISPGSIKDSKTEASDSECSSRILSKSRFQAWITLQTTGYY

SEQ ID NO: 81154 - protein, 174 aa, Homo sapiens
MGMMCWSPPLDKMGNSVKGIHFCHDLVSLCNFHNYDNLRHFAKKLDPRREGGDQRVKSVINLLFAAYTGDVSALRRFALSAMDMEQRDYDSRTALHVAAAEGHVEVVKFLLEACKVNPFPKDRWNNTPMDEALHFGHHDVFKILQEYQVQYTPQGDSDNGKENQTVHKNLDGLL

SEQ ID NO: 81155 - protein, 66 aa, Homo sapiens
MSRVPSPPPPAEMSSGPVAESWCYTQIKVVKFSYMWTINNFSFCREEMGEVIKSSTFSSGANDKLK

SEQ ID NO: 81156 - protein, 170 aa, Homo sapiens
MAGTLLSPPSGVPLERLIRVATERGYTAQGEMFSVADMGRLAQEVLGCQAKLLSGGLGGPNRDLVLQHLVTGHPLLIPYDEDFNHEPCQRKGHKAHWAGSCWVFGLCPVSATLRTLSCRACSTQCWARPANHHPCQRRAPRELSTCCPSRARVGTISCGTTTRSGRATCS

SEQ ID NO: 81157 - protein, 40 aa, Homo sapiens
MAAAEEGCSVGAEADRELEELLERCPLRFPREVFPGTIRQ

SEQ ID NO: 81158 - protein, 242 aa, Homo sapiens
MLPKRRRARVGSPSGDAASSTPPSTRFPGVAIYLVEPRMGRSRRAFLTGLARSKGFRVLDACSSEATHVVMEETSAEEAVSWQERRMAAAPPGCTPPALLDISWLTESLGAGQPVPVECRHRLEVAGPRKGPLSPAWMPAYACQRPTPLTHHNTGLSEALEILAEAAGFEGSEGRLLTFCRAASVLKALPSPVTTLSQLQGLPHFGEHSSRVVQELLEHGVCEEVERVRRSESSSPRSSGSV

SEQ ID NO: 81159 - protein, 158 aa, Homo sapiens
MSRRKQSNPRQIKRSLGDMEAREEVQLVGASHMEQKATAPEAPSPPSADVNSPPPLPPPTSPGGPKELEGQEPEPRPTEEEPGSPWSGPDELEPVVQDGQRRIRARLSLATGLSWGPFHGSVQTRASSPRQAEPMRKLRLQDVKSIAQIPRIKQQREK

SEQ ID NO: 81160 - protein, 188 aa, Homo sapiens
MRGSGRLRTPELCCSRPPPPGPGRPWLPSCLEKGRASQRLGGKKNGGRDRAEYKSRFSGLYLTRCSNSSERQRERAGGRLGWKSRASRAALRASWEGRSGANRGLRLWPSPPADPPASGPQPLPHPRNFAHSSGRALCTGTYNTRARTRLSRRGEAILPIWGHFPAAARTRFSERLSLQLLRRWIFFG

SEQ ID NO: 81161 - protein, 343 aa, Homo sapiens
MKTPRMVVMAPRTLFLLLSGALTLTETWAGSHSMRYFSAAVSRPGRGEPRFIAMGYVDDTQFVRFDSDSACPRMEPRAPWVEQEGPEYWEEETRNTKAHAQTDRMNLQTLRGYYNQSEASSHTLQWMIGCDLGSDGRLLRGYEQYAYDGKDYLALNEDLRSWTAADTAAQISKRKCEAANVAEQRRAYLEGTCVEWLHRYLENGKEMLQRADPPKTHVTHHPVFDYEATLRCWALGFYPAEIILTWQRDGEDQTQDVELVETRPAGDGTFQKWAAVVVPSGEEQRYTCHVQHEGLPEPLMLRWKQSSLPTIPIMGIVAGLVVLAAVVTGAAVAAVLWRKKSSD

SEQ ID NO: 81162 - protein, 202 aa, Homo sapiens
MKQQQWCGMTAKMGTVLSGVFTIMAVDMYLIFEQKHLGNGSCTEITPKYRGASNIINNFIICWSFKIVLFLSFITILISCFLLYSVYAQIFRGLVIYIVWIFFYETANVVIQILTNNDFDIKEVRIMRWFGLVSRTVMHCFWMFFVINYAHITYKNRSQGNIISYKRRISTAEILHSRNKRLSISSGFSGSHLESQYFERQR

SEQ ID NO: 81163 - protein, 136 aa, Homo sapiens
  MOD_RES (1)..(1): Any amino acid
XESCEERRYLQSAQSQIHNTCWAMMGLMAVRHPDIEAQERGVRCLLEKQLPNGDWPQWPSSHRTQRFPALFGVITQAGLQCQYPCLQSSLEITSVFNPLFRGSVFFLFHEEDFLFTIGSQCRGVCSSPVGFSVLGG

SEQ ID NO: 81164 - protein, 109 aa, Homo sapiens
  MOD_RES (1)..(1): Any amino acid
XMVESMKKVAGMDVELTVEERNLLSVAYKNVIGARRASWRIISSIEQKEENKGGEDKLKMIREYRQMVETELKLICCDILDVLDKHLIPAANTGWQKQLLMMQLQNWIR

SEQ ID NO: 81165 - protein, 143 aa, Homo sapiens
  MOD_RES (1)..(1): Any amino acid
XQHWCKRTLMDDNKVLWGSWSVLGPWNRFFFAGDTGYCPAFEEIGKRFGPFDLAAIPIGAYEPRWFMKYQHVDPEEAVRIHTDVQTKKSMAIHWGTFALANEHYLEPPVKLNEALERYGLNAEDFFVLKHGESRYLNNDDENF

SEQ ID NO: 81166 - protein, 59 aa, Homo sapiens
MPAGVPMSTYLKMFAASLLAMCAGAEVVHRYYRPDLQNWITSLSVGELEGLGRVEQRRP

SEQ ID NO: 81167 - protein, 169 aa, Homo sapiens
MSLFFISQETLANLERQIYAFEGSYLEDTQMYGNIIRGWDRYLTNQKNSNSKNDRRNRKFKEAERLFSKSSVTSAAAVSALAGVQDQLIEKREPGSGTESDTSPDFHNQENEPSQEDPEDLDGSVQGVKPQKAASSTSSGSHHSSHKKRKNKNRHRIDLKLNKKPRADY

SEQ ID NO: 81168 - protein, 46 aa, Homo sapiens
MRRAALRLCALGKGQLTPGRGLTQGPQNPKKQGIFHIHEGKHGVSV

SEQ ID NO: 81169 - protein, 88 aa, Homo sapiens
MGPTRVFRARHVAPDSIRGSFGLTDTRNTTHGSDSVVSASREIAAFFPDFSEQRWYEEEEPQLRCGPVCYSPEGGVHYVAGTGGLGPA

SEQ ID NO: 81170 - protein, 75 aa, Homo sapiens
LLKTLFGTNLASQFDGLSSNPSKSQGRAQRLGSSSVRPGLYHYCFMAPYTHFTQALADASLRNMVQAEQENDTSG

SEQ ID NO: 81171 - protein, 157 aa, Homo sapiens
MGDVLEQFFILTGLLVCLACLAKCVRFSRCVLLNYWKVLPKSFLRSMGQWAVITGAGDGIGKAYSFELAKRGLNVVLISRTLEKLEAIATEIERTTGRSVKIIQADFTKDDIYEHIKEKLAGLEIGILVNNVGMLPNLLPSHFLNAPDEIQVSHRPV

SEQ ID NO: 81172 - protein, 617 aa, Homo sapiens
MAGLTAAAPRPGVLLLLLSILHPSRPGGVPGAIPGGVPGGVFYPALGPGGKPLKPVPGGLAGAGLGAGLGAFPAVTFPGALVPGGVADAAAAYKAAKAGAGLGGVPGVGGLGVSAGAVVPQPGAGVKPGKVPGVGLPGVYPGGVLPGVGPFGGPQPGVPLGYPIKAPKLPGGYGLPYTTGKLPYGYGPGGVAGAAGKAGYPTGTGVGPQAAAAAAAKAAAKFGAGAAGVLPGVGGAGVPGVPGAIPGIGGIAGVGTPAAAAAAAAAAKAAKYGAAAGLVPGGPGFGPGVVGVPGAGVPGVGVPGAGIPVVPGAGIPGAAVPGVVSPEAAAKAAAKAAKYGARPGVGVGGIPTYGVGAGGFPGFGVGVGAEAQAAAAAKAAKYGLVPGVGVAPGVGVAPGVGVAPGVGLAPGVGVAPGVGVAPGVGVAPGIGPGGVAAAAKSAAKVAAKAQLRAAAGLGAGIPGLGVGVGVPGLGVGAGVPGLGVGAGVPGFGAVPGALAAAKAAKYGAAVPGVLGGLGALGGVGIPGGVVGAGPAAAAAAAKAAAKAAQFGLVGAAGLGGLGVGGLGVPGVGGLGGIPPAAAAKAAKYGVAARPGFGLSPIFPGGACLGKACGRKRK

SEQ ID NO: 81173 - protein, 116 aa, Homo sapiens
MWPPDPDPDPDPEPAGGSRPGPAVPGLRALLPARAFLCSLKGRLLLAESGLSFITFICYVASSASAFLTAPLLEFLLALYFLFADAMQLNDKWQGLCWPMMDFLRCVTAALIYFAI

SEQ ID NO: 81174 - protein, 69 aa, Homo sapiens
MSKQVSLPEMIKDWTKEHVKKWVNEDLKINEQYGQILLSEEVTGLVLQELTEKDLVEMGLPWGPALLIK

SEQ ID NO: 81175 - protein, 173 aa, Homo sapiens
MKMFESADSTATRSGQDLWAEICSCLPNPEQEDGANNAFSDSFVDSCPEGEGQREVADFAVQPAVKPWAPLQDSEVYLASLEKKLRRIKGLNQEVTSKDMLRTLAQAKKECWDRFLQEKLASEFFVDGLDSDERPCNSRTPGSSSFSEDGAWDSHQCAEQRWRRTFPAQQSSW

SEQ ID NO: 81176 - protein, 290 aa, Homo sapiens
MAPEIHMTGPMCLIENTNGELVANPEALKILSAITQPVVVVAIVGLYRTGKSYLMNKLAGKNKGFSLGSTVKSHTKGIWMWCVPHPKKPEHTLVLLDTEGLGDVKKGDNQNDSWIFTLAVLLSSTLVYNSMGTINQQAMDQLYYVTELTHRIRSKSSPDENENEDSADFVSFFPDFVWTLRDFSLDLEADGQPLTPDEYLEYSLKLTQGTSQKDKNFNLPRLCIRKFFPKKKCFVFDLPIHRRKLAQLEKLQDEELDPEFVQQVADFCSYIFSNSKTKTLSGGIKVNGPR

SEQ ID NO: 81177 - protein, 73 aa, Homo sapiens
GDILLFGTLLMNAGAVLNFKLKKKDTQGFGEESREPSTGDNIREFLLSLRYFRIFIALWNIFMMFCMIVLFGS

SEQ ID NO: 81178 - protein, 382 aa, Homo sapiens
MPTAAAPIISSVQKLVLYETRARYFLVGSNNAETKYRVLKIDRTEPKDLVIIDDRHVYTQQEVRELLGRLDLGNRTKMGQKGSSGLFRAVSAFGVVGFVRFLEGYYIVLITKRRKMADIGGHAIYKVEDTNMIYIPNDSVRVTHPDEARYLRIFQNVDLSSNFYFSYSYDLSHSLQYNLTVLRMPLEMLKSEMTQNRQESFDIFEDEGLITQGGSGVFGICSEPYMKYVWNGELLDIIKSTVHRDWLLYIIHGFCGQSKLLIYGRPVYVTLIARRSSKFAGTRFLKRGANCEGDVANEVETEQILCDASVMSFTAGSYSSYVQVRGSVPLYWSQDISTMMPKPPITLDQADPFAHVAALHFDQMFQRFGSPIIILNLVKQAV

SEQ ID NO: 81179 - protein, 694 aa, Homo sapiens
MVEKGSDHSSDKSPSTPEQGVQRSCSSQSGRSGGKNSKKSQSWYNVLSPTYKQRNEDFRKLFKQLPDTERLIVDYSCALQRDILLQGRLYLSENWICFYSNIFRWETLLTVRLKDICSMTKEKTARLIPNAIQVCTDSEKHFFTSFGARDRTYMMMFRLWQNALLEKPLCPKELWHFVHQCYGNELGLTSDDEDYVPPDDDFNTMGYCEEIPVEENEVNDSSSKSSIETKPDASPQLPKKSITNSTLTSTGSSEAPVSFDGLPLEEEALEGDGSLEKELAIDNIMGEKIEMIAPVNSPSLDFNDNEDIPTELSDSSDTHDEGEVQAFYEDLSGRQYVNEVFNFSVDKLYDLLFTNSPFQRDFMEQRRFSDIIFHPWKKEENGNQSRVILYTITLTNPLAPKTATVRETQTMYKASQESECYVIDAEVLTHDVPYHDYFYTINRYTLTRVARNKSRLRVSTELRYRKQPWGLVKTFIEKNFWSGLEDYFRHLESELAKTESTYLAEMHRQSPKEKASKTTTVRRRKRPHAHLRVPHLEEVMSPVTTPTDEDVGHRIKHVAGSTQTRHIPEDTPNGFHLQSVSKLLLVISCVLVLLVILNMMLFYKLWMLEYTTQTLTAWQGLRLQERLPQSQTEWAQLLESQQKYHDTELQKWREIIKSSVMLLDQMKDSLINLQNGIRSRDYTSESEEKRNRYH

SEQ ID NO: 81180 - protein, 158 aa, Homo sapiens
MGRTVVVLGGGISGLAASYHLSRAPCPPKVVLVESSERLGGWIRSVRGPNGAIFELGPRGIRPAGALGARTLLLVSELGLDSEVLPVRGDHPAAQNRFLYVGGALHALPTGLRGLLRPSPPFSKPLFWAGLRELTKPRGKEPDETVHSFAQRRLGPES

SEQ ID NO: 81181 - protein, 434 aa, Homo sapiens
MFNSKFGSIPKFYVRAPGRVNIIGEHIDYCGYSVLPMAVEQDVLIAVEPVKTYALQLANTNPLYPDFSTSANNIQIDKTKPLWHNYFLCGLKGIQEHFGLSNLTGMNCLVDGNIPPSSGLSSSSALVCCAGLVTLTVLGRNLSKVELAEICAKSERYIGTEGGGMDQSISFLAEEGTAKLIEFSPLRATDVKLPSGAVFVIANSCVEMNKAATSHFNIRVMECRLAAKLLAKYKSLQWDKVLRLEEVQAKLGISLEEMLLVTEDALHPEPYNPEEICRCLGISLEELRTQILSPNTQDVLIFKLYQRAKHVYSEAARVLQFKKICEEAPENMVQLLGELMNQSHMSCRDMYECSCPELDQLVDICRKFGAQGSRLTGAGWGGCTVSMVPADKLPSFLANVHKAYYQRSDGSLAPEKQSLFATKPGGGALVLLEA

SEQ ID NO: 81182 - protein, 193 aa, Homo sapiens
MEEPEEPADSGQSLVPVYIYSPEYVSMCDSLAKIPKRASMVHSLIEAYALHKQMRIVKPKVASMEEMATFHTDAYLQHLQKVSQEGDDDHPDSIEYGLGYDCPATEGIFDYAAAIGGATITAAQCLIDGMCKVAINWSGGWHHAKKDEASGFCYLNDAVLGILRLRRKFERILYVDLDLHHGDGIFFFSDKLT

SEQ ID NO: 81183 - protein, 146 aa, Homo sapiens
MGFIIHIQQVKKQRKKLDQGLILKKEKYRKEKKCASLSFEVSSDGGTEPSALVDDNGSEEDFSYEDLCQASPRYLQPGGEQLAINELISDGNVVCAEALWDHVTMDDQELGFKAGDVIQVLEASNKDWWWGRSEDKEAWFPASFVR

SEQ ID NO: 81184 - protein, 420 aa, Homo sapiens
MEQGIQEDEQLLLRFKYYSFFDLNPKYDAVRINQLYEQARWAILLEEIDCTEEEMLIFAALQYHISKLSLSAETQDFAGESEVDEIEAALSNLEVTLEGGKADSLLEDITDIPKLADNLKLFRPKKLLPKAFKQYWFIFKDTSIAYFKNKELEQGEPLEKLNLRGCEVVPDVNVAGRKFGIKLLIPVADGMNEMYLRCDHENQYAQWMAACMLASKGKTMADSSYQPEVLNILSFLRMKNRNSASQVASSLENMDMNPECFVSPRCAKRHKSKQLAARILEAHQNVAQMPLVEAKLRFIQAWQSLPEFGLTYYLVRFKGSKKDDILGVSYNRLIKIDAATGIPVTTWRFTNIKQWNVNWETRQVVIEFDQNVFTAFTCLSADCKIVHEYIGGYIFLSTRSKDQNETLDEDLFHKLTGGQD

SEQ ID NO: 81185 - protein, 117 aa, Homo sapiens
MAAATLRDPAQQGYVTFEDVAVYFSQEEWRLLDDAQRLLYRNVMLENFTLLASLGLASSKTHEITQLESWEEPFMPAWEVVTSAILRVWLRNRSANLLTQIFFPNRQPQVAPEQGRE

SEQ ID NO: 81186 - protein, 264 aa, Homo sapiens
  MOD_RES (1)..(1): Any amino acid
XGLIDYNQLALTARLFRPRLIIAGTSAYARLIDYARMREVCDEVKAHLLADMAHISGLVAAKVIPSPFKHADIVTTTTHKTLRGARSGLIFYRKGVKAVDPKTGREIPYTFEDRINFAVFPSLQGGPHNHAIAAVAVALKQACTPMFREYSLQVLKNARAMADALLERGYSLVSGGTDNHLVLVDLRPKGLDGARAERVLELVSITANKNTCPGDRSAITPGGLRLGAPALTSRQFREDDFRRVVDFIDEGVNIGLEVKSKTGE

SEQ ID NO: 81187 - protein, 123 aa, Homo sapiens
MSVPAFIDISEEDQAAELRAYLKSKGAEISEENSEGGLHVDLAQIIEACDVCLKEDDKDVESVMNSVVSLLLILEPDKQEALIESLCEKLVKFREGERPSLRLQLLENGFLTGISPLKKSTPF

SEQ ID NO: 81188 - protein, 98 aa, Homo sapiens
MGLLSDPVRRRALARLVLRLNAPLWALPVAWLERTMRWCRAPTCTASCGPRVLPAPSRLCSPCPVALTLPTARLWGCCWHWLPTSGGRFIGPKISSSW

SEQ ID NO: 81189 - protein, 351 aa, Homo sapiens
MLLILLSVALLALSSAQSLNEDVSQEESPSVISGKPEGRRPQGGNQPQRTPPPPGKPEGRPPQGGNQSQGPPPRPGKPEGPPPQGGNQSQGPPPRPGKPEGQPPQGGNQSQGPPPRPGKPEGPPPQGGNQSQGPPPRPGKPEGPPPQGGNQSQGPPPRPGKPEGPPPQGGNQSQGPPPHPGKPEGPPPQGGNQSQGPPPRPGKPEGPPPQGGNQSQGPPPRPGKPEGPPPQGGNKPQGPPPRPGKPEGPPPQGGNQSQGPPPRPGKPEGPPSQGGNKPQGPPPHPGKPQGPPPQEGNKPQRPPPPGRPQGPPPPGGNPQQPLPPPAGKPQGPPPPPQGGRPHRPPQGQPPQ

SEQ ID NO: 81190 - protein, 65 aa, Homo sapiens
MGYLMRTRESMTSDTVLWWLGMNSGSELGKLWRKLFKGIPRLSVSHFDFYCGTCVLLGRPQIPQG

SEQ ID NO: 81191 - protein, 262 aa, Homo sapiens
MALKQISSNKCFGGLQKVFEHDSVELNCKMKFAVYLPPKAETGKCPALYWLSGLTCTEQNFISKSGYHQSASEHGLVVIAPDTSPRGCNIKGEDESWDFGTGAGFYVDATEDPWKTNYRMYSYVTEELPQLINANFPVDPQRMSIFGHSMGGHGALICALKNPGKYKSVSAFAPICNPVLCPWGKKAFSGYLGTDQSKWKAYDATHLVKSYPGSQLDILIDQGKDDQFLLDGQLLPDNFIAACTEKKIPVVFRLQEASIRKL

SEQ ID NO: 81192 - protein, 64 aa, Homo sapiens
MDASLEKIADPTLAEMGKNLKEAVKMLEDSQRRTEEENGKKLISGDIPGPLQGSGQDMALSIRA

SEQ ID NO: 81193 - protein, 211 aa, Homo sapiens
MQAMLHFGGRLAQSLRGTSKEAASDPSDSPNLPTPGSWWEQLTQASRVYASGGTEGFPLSRWAPGRHGTAAEEGAQERPLPTDEMAPGRGLWLGRLFGVPGGPAENENGALKSRRPSSWLPPTVSVLALVKRGAPPEMPSPQELEASAPRMVQTHRAVRALCDHTAARPDQLSFRRGEVLRVITTVDEDWLRCGRDGMEGLVPVGYTSLVL

SEQ ID NO: 81194 - protein, 44 aa, Homo sapiens
MSLHFLYYCSEPTLDVKIAFCQVCVPYRDSINKWMCHILPNITT

SEQ ID NO: 81195 - protein, 99 aa, Homo sapiens
MERLLHAKAHGVRVIGSSTLALCHLASGAADAYYQFGLHCWDLAAATVIIREAGGIVIDTSGGPLDLMACRVVAASTREMAMLIAQALQTINYGRDDEK

SEQ ID NO: 81196 - protein, 695 aa, Homo sapiens
MQVYDLAALRDYWSYLERRLFSRLEDIYRPTIHKLKTSLFRFYLVYTIQTNRNDKAQEFFAKQATELQNQAEWKDWFVLPFLPSPDTNPTFATYFSRQWADTFIVSLHNFLSVLFQCMPVPVILNFDAECQRTNQVQEENEVLRQKLFALQAEIHRLKKEEQQPEEEEALVQHKLPPYVSNMDRLGDSELAMVCSQRNASLSQSPRVGFLSSLLPQSKKSPSRLSPAQGPPQPQSSAKKESFGGQGTKGKDPTSGAKDGKSLLSGLATGESGWSQHRQRRLQDHGKERKELFSTTTSQCAEKKPEASGPEAEPCPELHTEPVEPLTRASSAGPEGGGVRPEQPFIVLGQEEYGEHHSSIMHCRVDCSGRRVASLDVDGVIKVWSFNPIMQTKASSISKSPLLSLEWATKRDRLLLLGSGVGTVRLYDTEAKKNLCEININDNMPRILSLACSPNGASFVCSAAAPSLTSQVDFSAPDIGSKGMNQVPGRLLLWDTKTMKQQLQFSLDPEPIAINCTAFNHNGNLLVTGAADGVIRLFDMQQHECAMSWRAHYGEVYSVEFSYDENTVYSIGEDGKFIQWNIHKSGLKVSEYSLPSDATGPFVLSGYSGYKQVQVPRGRLFAFDSEGNYMLTCSATGGVIYKLGGDEKVLESCLSLGGHRAPVVTVDWSTAMDCGTCLTASMDGKIKLTTLLAHKA

SEQ ID NO: 81197 - protein, 255 aa, Homo sapiens
MLCSLLLCECLLLVAGYAHDDDWIDPTDMLNYDAASGTMRKSQAKYGISGEKDVSPDLSCADEISECYHKLDSLTYKIDECEKKKREDYESQSNPVFRRYLNKILIEAGKLGLPDENKGDMHYDAEIILKRETLLEIQKFLNGEDWKPGALDDALSDILINFKFHDFETWKWRFEDSFGVDPYNVLMVLLCLLCIVVLVATELWTYVRWYTQLRRVLIISFLFSLGWNWMYLYKNGLEVHGPIRMTHAKNTMSSY

SEQ ID NO: 81198 - protein, 37 aa, Homo sapiens
MGVQVETISPGDGRTFPKRGQTCVVHYTGGDCILVNE

SEQ ID NO: 81199 - protein, 215 aa, Homo sapiens
MSSTLPALLCVETLPKPFIWAEPHFMVPKEKQVTICCQGNYGAVEYQLHFEGSLFAVDRPKPPERINKVQFYIPDMNSRMAGQYSCIYRVGELWSEPSNLLDLVVTEMYDTPTLSVHPGPEVISGEKVTFYCRLDTATSMFLLLKEGRSSHVQRGYGKVQAEFPLGPVTTAHRGTYRCFGSYNNHAWSFPSEPVKLLVTGDIENTSLAPEDPTFP

SEQ ID NO: 81200 - protein, 128 aa, Homo sapiens
MTDALLPAAPQPLEKENDGYFRKGCNPLAQTGRSKLQNQRAALNQQILKAVRMRTGAENLLKVATNSKVREQVRLELSFVNSDLQMLKEELEGLNISVGVYQNTEILSWNITVKMAIYMKMKLQILWI

SEQ ID NO: 81201 - protein, 139 aa, Homo sapiens
MPVARSWVCRKTYVTPRRPFEKSRLDQELKLIGEYGLRNKREVWRVKFTLAKIRKAARELLTLDEKDPRRLFEGNALLRRLVRIGVLDEGKMKLDYILGLKIEDFLERRLQTQVFKLGLAKSIHHARVLIRQRHISPRR

SEQ ID NO: 81202 - protein, 1424 aa, Homo sapiens
MQKRQGYCSYCRVQYNNLEQHLFSAQHRSLTRQSRRQICTSSLMERFLQDVLQHHPYHCQESSSTQDETHVNTGSSSEVVHLDDAFSEEEEEDEDKVEDEDATEERPSEVSEPIEELHSRPHKSQEGTQEVSVRPSVIQKLEKGQQQPLEFVHKIGASVRKCNLVDIGQATNNRSNLVRPPVICNAPASCLPESSNDRPVTANTTSLPPAAHLDSVSKCDPNKVEKYLEQPDGASRNPVPSSHVETTSFSYQKHKESNRKSLRMNSDKLVLWKDVKSQGKTLSAGLKFHERMGTKGSLRVKSPSKLAVNPNKTDMPSNKGIFEDTIAKNHEEFFSNMDCTQEEKHLVFNKTAFWEQKCSVSSEMKFDCISLQSASDQPQETAQDLSLWKEEQIDQEDNYESRGSEMSFDCSSSFHSLTDQSKVSAKEVNLSKEVRTDVQYKNNKSYVSKISSDCDDILHLVTNQSQMIVKEISLQNARHISLVDQSYESSSSETNFDCDASPQSTSDYPQQSVTEVNLPKEVHIGLVDKNYGSSSSEVSADSVFPLQSVVDRPPVAVTETKLRKKAHTSLVDNYGSSCSETSFDCDVSLESVVDHPQLTVKGRNLKGRQVHLKHKKRKPSSAKAHLDCDVSLGTVADESQRAVEKINLLKEKNADLMDMNCESHGPEMGFQADAQLADQSQVAEIERQKVDVDLENKSVQSSRSSLSSDSPASLYHSAHDEPQEALDEVNLKELNIDMEVRSYDCSSSELTFDSDPPLLSVTEQSHLDAEGKERHIDLEDESCESDSSEITFDSDIPLYSVIDQPEVAVYEEETVDLESKSNESCVSEITFDSDIPLHSGNDHPEVAVKEVIQKEEYIHLERKNDEPSGSEISSDSHAPLHSVTNSPEVAVKKLNPQKEEQVHLENKENEPIDSEVSLDYNIIFHSVTGRSEDPIKEISLHTKEHMYLENKSVFETSLDSDVPLQAATHKPEVIVKETWLQREKHAEFQGRSTEFSGSKTSLDSGVPHYSVTEPQVAVNKINRKKQYVLENKNDKCSGSEIILDSNVPPQSMTDQPQLAFLKEKHVNLKDKNSKSGDSKITFDSEQLQEAVKKIDQWKEEVIGLKNKINEPSTYKLIHHPDVSVQSVADQPKVAIKHVNLGNENHMYLEVKNSQYSCSEMNLDSGFLGQSIVNRPQITILEQEHIELEGKHNQCCGSEVSFDSDDPLQSVADRLRETVKEISLWKDEEVDTEDRRNEAKGFEIMYDSDVLQPVAGQPEEVVKEVSLWKEHVDLENKIVKPTDSRINFDSHEPLQSVTNKIPGANKEINLLREEHVCLDDKGYVPSDSEIIYVSNIPLQSVIKQPHILEEEHASLEDKSSNSYSPEESSDSNDSFQAAADELQKPVKEINLWKEDHIYLEDKSYKLGDFDVSYASHIPVQFVTDQ

SEQ ID NO: 81203 - protein, 51 aa, Homo sapiens
MREIVHIQAGQCGNQIGAKLSWEQSPRSTAGTCSRGREVEVAGRERTTPGS

SEQ ID NO: 81204 - protein, 149 aa, Homo sapiens
MEMKKKINLELRNRSPEEVTELVLDNCLCVNGEIEGLNDTFKELEFLSMANVELSSLARLPSLNKLRKLELSDNIISGGLEVLAEKCPNLTYLNLSGNKIKDLSTVEALDEEDDDDYVEEGEEEEEEEGGLRGEKRKRDAEDDGEEEDD

SEQ ID NO: 81205 - protein, 325 aa, Homo sapiens
MEEPQKSYVNTMDLERDEPLKSTGPQISVSEFSCHCCYDILVNPTTLNCGHSFCRHCLALWWASSKKTECPECREKWEGFPKVSILLRLLLTLTEEEFSKTPYTIENSSHRRAILMELERVKALGVKPPQNLWEYKAVNPGRSLFLLYALKSSPRLSLLYLYLFDYTDTFLPFIHTICPLQEDSSGEDIVTKLLDLKEPTWKQWREFLVKYSFLPYQLIAEFAWDWLEVHYWTSRFLIINAMLLSVLELFSFWRIWSRSELKTVPQRMWSHFWKVSTQGLFVAMFWPLIPQFVCNCLFYWALYFNPIINIDLVVKELRRLETQVL

SEQ ID NO: 81206 - protein, 235 aa, Homo sapiens
MEGPVLTLGLLAALAVCGSWGLNEEERLIRHLFQEKGYNKELRPVAHKEESVDVALALTLSNLISLKEVEETLTTNVWIEHGWTDNRLKWNAEEFGNISVLRLPPDMVWLPEIVLENNNDGSFQISYSCNVLVYHYGFVYWLPPAIFRSSCPISVTYFPFDWQNCSLKFRERGVGDSPPAGQGQRGPQSPSGQPQPPGHHLLPHHPPQAPLLHHQHPGALRAHLLHGQPGLLPTG

SEQ ID NO: 81207 - protein, 87 aa, Homo sapiens
  MOD_RES (1)..(1): Any amino acid
XAKLWTSQEQPQPSQQQPSVQPPSQPPPQPSTLPQAQVWPGPQPPQPQPPPQPTQPSAQARCTQHTSKCNLQDSQRPGHQPTSAGIY

SEQ ID NO: 81208 - protein, 315 aa, Homo sapiens
MQEAPAALPTEPGPSPVPAFLGKLWALVGDPGTDHLIRWSPSGTSFLVSDQSRFAKEVLPQYFKHSNMASFVRQLNMYGFRKVVSIEQGGLLRPERDHVEFQHPSFVRGREQLLERVRRKVPALRGDDGRWRPEDLGRLLGEVQALRGVQESTEARLRELRQQNEILWREVVTLRQSHGQQHRVIGKLIQCLFGPLQAGPSNAGGKRKLSLMLDEGSSCPTPAKFNTCPLPGALLQDPYFIQSPLPETNLGLSPHRARGPIISDIPEDSPSPEGTRLSPSSDGRSPPATACGCGAGHPGRERELQPRGAQECPTA

SEQ ID NO: 81209 - protein, 196 aa, Homo sapiens
MERLQLQRRLGCRTFHWFLANVYPELYPSEPRPSFSGKLHNTGLGLCADCQAEGDILGCPMVLAPCSDSRQQQYLQHTSRKEIHFGSPQHLCFAVRQEQVILQNCTEEGLAIHQQHWDFQENGMIVHILSGKCMEAVVQENNKDLYLRPCDEKPASSGVLTRSMLWMNDECQCQKEKRILAIKIQLQVNLKSLYIS

SEQ ID NO: 81210 - protein, 48 aa, Homo sapiens
METKRVEIPGSVLDDLCRDRVLHHCPGMIIAHCNFQLLDSSYPLGSAS

SEQ ID NO: 81211 - protein, 127 aa, Homo sapiens
MMPSRTNLATGIPSSKVKYSRLSSTDDGYIDLQFKKTPPKIPYKAIALATVLFLIGAFLIIIGSLLLSGYISKGSLESTSREQKKADHKHLPASRGYMMGGISGRSPEGGLSSRLPEGRGTQVSSPD

SEQ ID NO: 81212 - protein, 26 aa, Homo sapiens
  MOD_RES (1)..(1): Any amino acid
XSDLPCGYEAEDQAKLFPLHQETAAS

SEQ ID NO: 81213 - protein, 106 aa, Homo sapiens
  MOD_RES (1)..(1): Any amino acid
XLIETQMERFKVVERETKTKAYSKEGLGLAQKVDPAQKEKEEVGQWLTNTIDTLNMQVDQFESEVESLSVQTRKKKGDKDEGPSRCSAAPEPGPGLASRSRTGLRA

SEQ ID NO: 81214 - protein, 310 aa, Homo sapiens
MALTSDLGKQIKLKEVEGTLLQPATVDNWSQIQSFEAKPDDLLICTYPKAGTTWIQEIVDMIEQNGDVEKCQRAIIQHRHPFIEWARPPQPSVLVLRRCFLLSYFKGVEKAKAMPSPRILKTHLSTQLLPPSFWENNCKFLYVARNAKDCMVSYYHFQRMNHMLPDPGTWEEYFETFINGKVVWGSWFDHVKGWWEMKDRHQILFLFYEDIKRDPKHEIRKVMQFMGKKVDETVLDKIVQETSFEKMKENPMTNRSTVSKSILDQSISSFMRKGTVGDWKNHFTVAQNERFDEIYRRKMEGTSINFCMEL

SEQ ID NO: 81215 - protein, 427 aa, Homo sapiens
MTLDMDAVLSDFVRSTGAEPGLARDLLEGKNWDVNAALSDFEQLRQVHAGNLPPSFSEGSGGSRTPEKGFSDREPTRPPRPILQRQDDIVQEKRLSRGISHASSSIVSLARSHVSSNGGGGGSNEHPLEMPICAFQLPDLTVYNEDFRSFIERDLIEQSMLVALEQAGRLNWWVSVDPTSQRLLPLATTGDGNCLLHAASLGMWGFHDRDLMLRKALYALMEKGVEKEALKRRWRWQQTQQNKESGLVYTEDEWQKEWNELIKLASSEPRMHLGTNGANCGGVESSEEPVYESLEEFHVFVLAHVLRRPIVVVADTMLRDSGGEAFAPIPFGGIYLPLEVPASQCHRSPLVLAYDQAHFSALVSMEQKENTKEQAVIPLTDSEYKLLPLHFAVDPGKGWEWGKDDSDNVRLASVILSLEVKLHLLHS

SEQ ID NO: 81216 - protein, 205 aa, Homo sapiens
MSSHKGSVVAQGNGAPASNREADTVELAELGPLLEEKGKRVIANPPKAEEEQTCPVPQEEEEEVRVLTLPLQAHHAMEKMEEFVYKVWEGRWRVIPYDVLPDWLKDNDYLLHGHRPPMPSFRACFKSIFRIHTETGNIWTHLLGFVLFLFLGILTMLRPNMYFMAPLQEKVVFGMFFLGAVLCLSFSWLFHTVYCHSEKVSRTFS

SEQ ID NO: 81217 - protein, 145 aa, Homo sapiens
MQRSIMSFFHPKKEGKAKKPEKEASNSSRETEPPPKAALKEWNGVVSESDSPVKRPGRKAARVLGSEGEEEDEALSPAKGQKPALDCSQVSPPRPATSPENNASLSDTSPMDSSPSGIPKRRTARKQLPKRTIQEVLEEQSEDED

SEQ ID NO: 81218 - protein, 282 aa, Homo sapiens
MAGNFWQSSHYLQWILDKQDLLKERQKDLKFLSEEEYWKLQIFFTNVIQALGEHLKLRQQVIATATVYFKRFYARYSLKSIDPVLMAPTCVFLASKVEEFGVVSNTRLIAAATSVLKTRFSYAFPKEFPYRMNHILECEFYLLELMDCCLIVYHPYRPLLQYVQDMGQEDMLLPLAWRIVNDTYRTDLCLLYPPFMIALACLHVACVVQQKDARQWFAELSVDMEKILEIIRVILKLYEQWKNFDERKEMATILSKMPKPKPPPNRNSLSDSPLVAGPEAAR

SEQ ID NO: 81219 - protein, 139 aa, Homo sapiens
MPGAFSQNSSKSPQEAQSHSPRAQPSSPTVPQAWSHGMPPSTLQNGPSRTRQPSLTDVLYCPEAIVSLVGVLQRLAACREHKRAPEVYVAFTVRNPETCQLFTTELGRDGIRWEAEAHHDQKLFPYGEHLEMAMLNLTL

SEQ ID NO: 81220 - protein, 39 aa, Homo sapiens
MTEPQNSQGRYKGIYMEEKLYRRAQHDDSLSWTSCDHHE

SEQ ID NO: 81221 - protein, 204 aa, Homo sapiens
MSLMVVSMACVGFFLLQGAWPHEGLYEKPSLSAQPGPTVLAGESVTLSCSSRSSYDMYHLSREGEAHERRFSAGPKVNGTFQADFPLGPATHGGTYRCFGSFRDSPYEWSNSSDPLLVSVTGNPSNSWPSPTEPSSKTGNPRHLHVLIGTSVVKIPFTILLFFLLHRWCSNKKNAAVMDQEPAGNRTVNSEDSDEQDHQEVSYA

SEQ ID NO: 81222 - protein, 143 aa, Homo sapiens
MSLHFLYYCSEPTLDVKIAFCQGFDKQVDVSYIAKHYNMSKSKVDNQFYSVEVGDSTFTVLKRYQNLKPIGSGAQGIVCAAYDAVLDRNVAIKKLSRPFQNQTHAKRAYRELVLMKCVNHKNLLSNGTDGCQLMSSDSDGIRP

SEQ ID NO: 81223 - protein, 214 aa, Homo sapiens
MEAAHFFEGTEKLLEVWFSRQQPDANQGSGDLRTIPRYLYTLDFPESRVISQPDQTLEILMSELDPAVMDQFYMKDGVTAKDVTRESGIRDLIPGSVIDATMFNPCGYSMNGMKSDGTYWTIHITPEPEFSYVSFETNLSQTSYDDLIRKVVEVFKPGKFVTTLFVNQSSKCRTVLASPQKIEGFKRLDCQSAMFNDYNFVFTSFAKKQQQQQS

SEQ ID NO: 81224 - protein, 81 aa, Homo sapiens
MNKILSSTVCFGLLTLLSVLSFLQSVHGRPYLTQGNEIFPDKKYTNREELLLALLNKNFDFQRPFNTAGKAKRTASGGEGF

SEQ ID NO: 81225 - protein, 131 aa, Homo sapiens
MATAEPSGRALRLSTPGPRPSGARDRAPGAAGPPSGQIGNRALRLGERTPAAVEKRGPYMVTRAPSIQAKLQKHRDLAKAVLRRKGMLGASPNRPDSSGKRSVKFNKGYTALSQSPDENLVSLDSDRAVLF

SEQ ID NO: 81226 - protein, 468 aa, Homo sapiens
MMYFVIAAMKAQIEIIPCKICGDKSSGIHYGVITCEGCKGFFRRSQQSNATYSCPRQKNCLIDRTSRNRCQHCRLQKCLAVGMSRDAVKFGRMSKKQRDSLYAEVQKHRMQQQQRDHQQQPGEAEPLTPTYNISANGLTELHDDLSNYIDGHTPEGSKADSAVSSFYLDIQPSPDQSGLDINGIKPEPICDYTPASGFFPYCSFTNGETSPTVSMAELEHLAQNISKSHLETCQYLREELQQITWQTFLQEEIENYQNKQREVMWQLCAIKITEAIQYVVEFAKRIDGFMELCQNDQIVLLKAGSLEVVFIRMCRAFDSQNNTVYFDGKYASPDVFKSLGCEDFISFVFEFGKSLCSMHLTEDEIALFSAFVLMSADRSWLQEKVKIEKLQQKIQLALQHVLQKNHREDGILTKLICKVSTLRALCGRHTEKLMAFKAIYPDIVRLHFPPLYKELFTSEFEPAMQIDG

SEQ ID NO: 81227 - protein, 235 aa, Homo sapiens
MFVANPQARWQLRVAGRGSRVAGRRSRRSLGAEVADIKKVNNFIREQDLYALKSVKIPVRNHGILMETHKELKPLLSPSSETTVTVELPEADRAGAGTGAQAGQLMGFFKGIDQDIERAVQSEIFLHESYCMDTSHQPLLPAPPKTPMDGADCGIQWWNAVFIMLLIGIVLPVFYLVYFKIQASGETPNSLNTTVIPNGSMAMGTVPGQAPRLAVAVPAVTSADSQFSQTTQAGS

SEQ ID NO: 81228 - protein, 125 aa, Homo sapiens
MAGSVADSDAVVKLDDGHLNNSLSSPVQADVYFPRLIVPFCGHIKGGMRPGKKVLVMGIVDLNPESFAISLTCGDSEDPPADVAIELKAVFTDRQLLRNSCISGERGEEQSAIPYFPFIPDQPFR

SEQ ID NO: 81229 - protein, 45 aa, Homo sapiens
MPKRKVSSAEGAAKEEPKRRSARLSAKPPAKVEAKPKKAAAKVEV

SEQ ID NO: 81230 - protein, 278 aa, Homo sapiens
MNGQLDLSGKLIIKAQLGEDIRRIPIHNEDITYDELVLMMQRVFRGKLLSNDEVTIKYKDEDGDLITIFDSSDLSFAIQCSRILKLTLFVNGQPRPLESSQVKYLRRELIELRNKVNRLLDSLEPPGEPGPSTNIPENDTVDGREEKSASDSSGKQSTQVMAASMSAFDPLKNQDEINKNVMSAFGLTDDQVSGPPSAPAEDRSGTPDSIASSSSAAHPPGVQPQQPPYTGAQTQAGQIEGQMYQQYQQQAGYGAQQPQAPPQQPQQYGIQYSGLYIF

SEQ ID NO: 81231 - protein, 791 aa, Homo sapiens
MEGSTAWSSEAEPQEGRSQMLQRAGLTDEKVKAYLSLHPQVLDEFVSESVSAETVEKWLKRKNNKSEDESAPKEVSRYQDTNMQGVVYELNSYIEQRLDTGGDNQLLLYELSSIIKIATKADGFALYFLGECNNSLCIFTPPGIKEGKPRLIPAGPITQGTTVSAYVAKSRKTLLVEDILGDERFPRGTGLESGTRIQSVLCLPIVTAIGDLIGILELYRHWGKEAFCLSHQEVATANLAWASVAIHQVQVCRGLAKQTELNDFLLDVSKTYFDNIVAIDSLLEHIMIYAKNLVNADRCALFQVDHKNKELYSDLFDIGEEKEGKPVFKKTKEIRFSIEKGIAGQVARTGEVLNIPDAYADPRFNREVDLYTGYTTRNILCMPIVSRGSVIGVVQMVNKISGSAFSKTDENNFKMFAVFCALALHCANMYHRIRHSECIYRVTMEKLSYHSICTSEEWQGLMQFTLPVRLCKEIELFHFDIGPFENMWPGIFVYMVHRSCGTSCFELEKLCRFIMSVKKNYRRVPYHNWKHAVTVAHCMYAILQNNHTLFTDLERKGLLIACLCHDLDHRGFSNSYLQKFDHPLAALYSTSTMEQHHFSQTVSILQLEGHNIFSTLSSSEYEQVLEIIRKAIIATDLALYFGNRKQLEEMYQTGSLNLNNQSHRDRVIGLMMTACDLCSVTKLWPVTKLTANDIYAEFWAEGDEMKKLGIQPIPMMDRDKKDEVPQGQLGFYNAVAIPCYTTLTQILPPTEPLLKACRDNLSQWEKVIRGEETATWISSPSVAQKAAASED

SEQ ID NO: 81232 - protein, 352 aa, Homo sapiens
MVLEMLNPIHYNITSIVPEAMPAATMPVLLLTGLFLLVWNYEGTSSIPGPGYCMGIGPLISHGRFLWMGIGSACNYYNRVYGEFMRVWISGEETLIISKSSSMFHIMKHNHYSSRFGSKLGLQCIGMHEKGIIFNNNPELWKTTRPFFMKALSGPGLVRMVTVCAESLKTHLDRLEEVTNESGYVDVLTLLRRVMLDTSNTLFLRIPLDESAIVVKIQGYFDAWQALLIKPDIFFKISWLYKKYEKSVKDLKDAIEVLIAEKRRRISTEEKLEECMDFATELILAEKRGDLTRENVNQCILEMLIAAPDTMSVSLFFMLFLIAKHPNVEEAIIKEIQTVIGERDIKIDDIQK

SEQ ID NO: 81233 - protein, 98 aa, Homo sapiens
DSDKRFSALGFGARIPPKYEVSHDFAINFNPEDDECEAILHPADPDGRRGDRHGRHTGGHCACLTPAHVHHHRGRGQRRLHRHAGPGRRRRRPALPTG

SEQ ID NO: 81234 - protein, 911 aa, Homo sapiens
MVDYHAANQSYQYGPSSAGNGAGGGGSMGDYMAQEDDWDRDLLLDPAWEKQQRKTFTAWCNSHLRKAGTQIENIDEDFRDGLKLMLLLEVISGERLPKPERGKMRVHKINNVNKALDFIASKGVKLVSIGAEEIVDGNAKMTLGMIWTIILRFAIQDISVEETSAKEGLLLWCQRKTAPYKNVNVQNFHISWKDGLAFNALIHRHRPELIEYDKLRKDDPVTNLNNAFEVAEKYLDIPKMLDAEDIVGTLRPDEKAIMTYVSCFYHAFSGAQKAETAANRICKVLAVNQENEHLMEDYEKLASDLLEWIRRTIPWLEDRVPQKTIQEMQQKLEDFRDYRRVHKPPKVQEKCQLEINFNTLQTKLRLSNRPAFMPSEGKMVSDINNGWQHLEQAEKGYEEWLLNEIRRLERLDHLAEKFRQKASIHEAWTDGKEAMLKHRDYETATLSDIKALIRKHEAFESDLAAHQDRVEQIAAIAQELNELDYYDSHNVNTRCQKICDQWDALGSLTHSRREALEKTEKQLEAIDQLHLEYAKRAAPFNNWMESAMEDLQDMFIVHTIEEIEGLISAHDQFKSTLPDADREREAILAIHKEAQRIAESNHIKLSGSNPYTTVTPQIINSKWEKVQQLVPKRDHALLEEQSKQQSNEHLRRQFASQANVVGPWIQTKMEEIGRISIEMNGTLEDQLSHLKQYERSIVDYKPNLDLLEQQHQLIQEALIFDNKHTNYTMEHIRVGWEQLLTTIARTINEVENQILTRDAKGISQEQMQEFRASFNHFDKDHGGALGPEEFKACLISLGYDVENDRQGEAEFNRIMSLVDPNHSGLVTFQAFIDFMSRETTDTDTADQVIASFKVLAGDKNFITAEELRRELPPDQAEYCIARMAPYQGPDAVPGALDYKSFSTALYGESDL

SEQ ID NO: 81235 - protein, 134 aa, Homo sapiens
MTAELREAMALAPWGPVKVKKEEEEEENFPGQASSQQVHSENIKVWAPVQGLQTGLDGSEEEEKGQNISWDMAVVLKATQEAPAASTLGSYSLPGTLAKSEILETHGTMNFLGAETKNLQLLVPKTEICEEAEK

SEQ ID NO: 81236 - protein, 84 aa, Homo sapiens
MQKSEGSGGTQLKNRATGNYDQRTSSSTQLKHRNAVQGSKSSLSTSSPESARKLHPRPSDKLNPKTINPFGEQSRVPSAFAAIY

SEQ ID NO: 81237 - protein, 521 aa, Homo sapiens
MPVTEKDLAEDAPWKKIQQNTFTRWCNEHLKCVNKRIGNLQTDLSDGLRLIALLEVLSQKRMYRKYHQRPTFRQMQLENVSVALEFLDRESIKLVSIDSKAIVDGNLKLILGLVWTLILHYSISMPVWEDEGDDDAKKQTPKQRLLGWIQNKIPYLPITNFNQNWQDGKALGALVDSCAPGLCPDWESWDPQKPVDNAREAMQQADDWLGVPQVITPEEIIHPDVDEHSVMTYLSQFPKAKLKPGAPLKPKLNPKKARAYGRGIEPTGNMVKQPAKFTVDTISAGQGDVMVFVEDPEGNKEEAQVTPDSDKNKTYSVEYLPKVTGLHKVTVLFAGQHISKSPFEVSVDKAQGDASKVTAKGPGLEAVGNIANKPTYFDIYTAGAGVGDIGVEVEDPQGKNTVELLVEDKGNQVYRCVYKPMQPGPHVVKIFFAGDTIPKSPFVVQVGEDVASSSESYLWASLDPEAVGFLVETTGPEASCLPAIQMPAGPVAEAYNPKASVSGRPQISRLTPKLQEVGSSV

SEQ ID NO: 81238 - protein, 226 aa, Homo sapiens
  MOD_RES (1)..(1): Any amino acid
XIPASLSWCWNAEDVVAFVSHRGPLFIWTISGPDSGVIVHKDAHSFLSDICMFRWHTHQKGKVVFGHIDGSLSIFHPVSVQSPTKNHYTSSTSEAVPPPTLTQNQAFSLPPGHAVCCFLDGGVGLYDMGAKKWDFLRDLGHVETIFDCKFKPDDPNLLATASFDGTIKVWDINTLTAVYTSPGNEGVIYSLSWAPGGLNCIAGGTSRNGAFIWNVQKGKIIQRFNE

SEQ ID NO: 81239 - protein, 613 aa, Homo sapiens
MATIPDWKLQLLARRRQEEASVRGREKAERERLSQMPAWKRGLLERRRAKLGLSPGEPSPVLGTVEAGPPDPDESAVLLEAIGPVHQNRFIRQERQQQQQQQQRSEELLAERKPGPLEARERRPSPGEMRDQSPKGRESREERLSPRETRERRLGIGGAQELSLRPLEARDWRQSPGEVGDRSSRLSEAWKWRLSPGETPERSLRLAESREQSPRRKEVESRLSPGESAYQKLGLTEAHKWRPDSRESQEQSLVQLEATEWRLRSGEERQDYSEECGRKEEWPVPGVAPKETAELSETLTREAQGNSSAGVEAAEQRPVEDGERGMKPTEGWKWTLNSRKAREWTPRDIEAQTQKPEPPESAEKLLESPGVEAGEGEAEKEEAGAQGRPLRALQNCCSVPSPLPPEDAGTGGLRQQEEEAVELQPPPPAPLSPPPPAPTAPQPPGDPLMSRLFYGVKAGPGVGAPRRSGHTFTVNPRRSVPPATPATPTSPATVDAAVPGAGKKRYPTAEEILVLGGYLRLSRSCLAKGSPERHHKQLKISFSETALETTYQYPSESSVLEELGPEPEVPSAPNPPAAQPDDEEDEEELLLLQPELQGGLRTKALIVDESCRR

SEQ ID NO: 81240 - protein, 78 aa, Homo sapiens
MAAAAAGAGSGPWAAQEKQFPPALLSFFIYNPRFGPREGQEENKILFYHPNEVEKNEKIRNVGLCEAIVQFTRLFGIL

SEQ ID NO: 81241 - protein, 69 aa, Homo sapiens
MASSPAVDVSCRRREKRRQLDARRSKCRIRLGGHMEQWCLLKERLGFSLHSQLAKFLLDRFLTLPGRPV

SEQ ID NO: 81242 - protein, 73 aa, Homo sapiens
MLLAQINRDSQGMTEFPGGGMEAQHVTLCLTEAVTVADGDNLENMEGVSLQAVTLADGSTAYIQHNSKDAKLI

SEQ ID NO: 81243 - protein, 66 aa, Homo sapiens
MAEKFDCHYCRDPLQGKKYVQKDGHHCCLKCFDKFCANTCVECRKPIGADSKEVHYKNRFWHDTCF

SEQ ID NO: 81244 - protein, 185 aa, Homo sapiens
MALAPERAAPRVLFGEWLLGEISSGCYEGLQWLDEARTCFRVPWKHFARKDLSEADARIFKAWAVARGRWPPSSRGGGPPPEAETAERAGWKTNFRCALRSTRRFVMLRDNSGDPADPHKVYALSRELCWRGPGTDQTEAEAPAAVPPPQARPRPQSPRTRQSRTCHPPQAPAPRCKSPAQGRWT

SEQ ID NO: 81245 - protein, 79 aa, Homo sapiens
  MOD_RES (1)..(1): Any amino acid
XSDDTTTWNSCLPPPVNQGRHYQKEMNPPSPSNPRDWLNMLSPPIVPPSQQPAEQRPDSCESLSVQEEMSGSATAILQL

SEQ ID NO: 81246 - protein, 566 aa, Homo sapiens
MDLGAITKYSALHAKPNGLILQYGTAGFRTKAEHLDHVMFRMGLLAVLRSKQTKSTIGVMVTASHNPEEDNGVKLVDPLGEMLAPSWEEHATCLANAEEQDMQRVLIDISEKEAVNLQQDAFVVIGRDTRPSSEKLSQSVIDGVTVLGGQFHDYGLLTTPQLHYMVYCRNTGGRYGKATIEGYYQKLSKAFVELTKQASCSGDEYRSLKVDCANGIGALKLREMEHYFSQGLSVQLFNDGSKGKLNHLCGADFVKSHQKPPQGMEIKSNERCCSFDGDADRIVYYYHDADGHFHLIDGDKIATLISSFLKELLVEIGESLNIGVVQTAYANGSSTRYLEEVMKVPVYCTKTGVKHLHHKAQEFDIGVYFEANGHGTALFSTAVEMKIKQSAEQLEDKKRKAAKMLENIIDLFNQAAGDAISDMLVIEAILALKGLTVQQWDALYTDLPNRQLKVQVADRRVISTTDAERQAVTPPGLQEAINDLVKKYKLSRAFVRPSGTEDVVRVYAEADSQGSRLVVWIFIIWPLHILLKVCAKPGQSTVSALNRESGGDIWQLSCRSLSHLRV

SEQ ID NO: 81247 - protein, 760 aa, Homo sapiens
MGRNQRKAPQRLERPGRPASGEQESGSASADGAPSRERRSDRGQADRAKPAAEPATAGGQGTPGGRRKPTAEGNGGCRRPGAGLSPKAQERQSNAQRQGRGPRGGRGGRLEEGSLSGGEELGGRRRRKRKDKGPSARRGRRTPRSLNGDTSGGDGGSSCPDSETREAQESGSQRGTARELRPTPEPTDMGSEGTKTGPESALEPSSDGLDSDWPHADTRGREGSSGTGPLGASEHSGGDSDSSPLGTGPGRGSRAAMASRTFEDSSRAPRDTGPAKDASDNRAQRGAEPETMQASTARAPRHQVGKAVGQVPAAAGEGEAGAAAGAGPEDPAPLAALLVVRRLLARPPPGAASQAVGPRRAGLKERLLSVARALGLLRWLRRRLRLRRRPPEGEGQGTGPRASEGWGRRKPDEGRGHGRGSKGRGRGKADEGRGHERGDEGRGRGKADEGRGHERGYEGRGCGKADEGRGHERGDEGRDHQRGYEGWGREPGLRHRLALRLAGLAGLGGMPRASPGGRSPQVPTSPVPGDPFDQEDETPDPKFAVVFPRIHRAGRASSSRSSEEASADAPTGEGRGWPRAGVGGHSEGCRTSGEGVSGLRRGSLLAPTAPDGPSLDESGSSSEAELETLNDEPPVRWAQGSGPHEGPRLGAAVLLPRLSLETRLQQEGDPGLRGSLRELWEPEDEDEAVLERDLELSLRPGLEAPPFPGAKGRSLGDGLEDMEDLARLRLAGAVPKLPSPAHSSSYPPCPHLYELRVDPY

SEQ ID NO: 81248 - protein, 353 aa, Homo sapiens
MRCLAPRPAGSYLSEPQGSSQCATMELGPLEGGYLELLNSDADPLCLYHFYDQMDLAGEEEIELYSEPDTDTINCDQFSRLLCDMEGDEETREAYANIAELDQYVFQDSQLEGLSKDIFKHIGPDEVIGESMEMPAEVGQKSQKRPFPEELPADLKHWKPAEPPTVVTGSLLVGPVSDCSTLPCLPLPALFNQEPASGQMRLEKTDQIPMPFSSSSLSCLNLPEGPIQFVPTISTLPHGLWQISEAGTGVSSIFIYHGEVPQASQVPPPSGFTVHGLPTSPDRPGSTSPFAPSATDLPSMPEPALTSRANMTEHKTSPTQCPAAGEVSNKLPKWPGREVPRKTQLGSSLLFGT

SEQ ID NO: 81249 - protein, 393 aa, Homo sapiens
MGRKKIQITRIMDERNRQVTFTKRKFGLMKKAYELSVLCDCEIALIIFNSTNKLFQYASTDMDKVLLKYTEYNEPHESRTNSDIVEAVPPPNFEMPVSIPVSSHNSLVYSNPVSSLGNPNLLPLAHPSLQRNSMSPGVTHRPPSAGNTGGLMGGDLTSGAGTSAGNGYGNPRNSPGLLVSPGNLNKNMQAKSPPPMNLGMNNRKPDLRVLIPPGSKNTMPSVSEDVDLLLNQRINNSQSAQSLATPVVSVATPTLPGQGMGGYPSAISTTYGTEYSLSSADLSSLSGFNTASALHLGSVTGWQQQHLHNMPPSALSQLGDRTTTPSRYPQHTRHEAGRSPVDSLSSCSSSYDGSDREDHRNEFHSPIGLTRPSPDERESPSVKRMRLSEGWAT

SEQ ID NO: 81250 - protein, 300 aa, Homo sapiens
MAANVGDQRSTDWSSQYSMVAGAGRENGMETPMHENPEWEKARQALASISKSGAAGGSAKSSSNGPVASAQYVSQAEASALQQQQYYQWYQQYNYAYPYSYYYPMSMYQSYGSPSQYGMAGSYGSATPQQPSAPQHQGTLNQPPVPGMDESMSYQAPPQQLPSAQPPQPSNPPHGAHTLNSGPQPGTAPATQHSQAGPATGQAYGPHTYTEPAKPKKGQQLWNRMKPAPGTGGLKFNIQKRPFAVTTQSFGSNAEGQHSGFGPQPNPEKVQNHSGSSARGNLSGKPDDWPQDMKEYVERC

SEQ ID NO: 81251 - protein, 156 aa, Homo sapiens
  MOD_RES (1)..(1): Any amino acid
XKSKEAEIKRINKELANIRSKFKGDKALDGYSKKKYVCKLLFIFLLGHDIDFGHMEAVNLLSSNRYTEKQIGYLFISVLVNSNSELIRLINNAIKNDLASRNPTFMGLALHCIASVGSREMAEAFAGEIPKVLVAGDTMDSVKQSAALCLLRLYRT

SEQ ID NO: 81252 - protein, 45 aa, Homo sapiens
DPAQPPRDLTEAFLAKKEKAKGSPESSFNDENLRIVSVSNRRSTT

SEQ ID NO: 81253 - protein, 141 aa, Homo sapiens
MAGTVLGVGAGVFILALLWVAVLLLCVLLSRASGAARNWELPRINGNAPSWYLSRKKDFGMKRFSVIFLFFGAVIITSVLLLFPRAGEFPAPEVEVKIVDDFFIGRYVLLAFLSAIFLGGLFLVLIHYVLEPIYAKPLHSY

SEQ ID NO: 81254 - protein, 40 aa, Homo sapiens
MVVFGYEAGTKPRDSGVVPVGTEEAPKEMKHDFQNELNLS

SEQ ID NO: 81255 - protein, 255 aa, Homo sapiens
MLCGVEAIREALVDKAEAFSGRGKIAMVDPFFRGYGVIFANGNRWKVLRRFSVTTMRDFGMGKRSVEERIQEEAQCLIEELRKSKERVYREIEQVIGPHRPPELHDRAKMPYTEAVIYEIQRFSDLLPMGVPHIVTQHTSFRGYIIPKDTEVFLILSTALHDPHYFEKPDAFNPDHFLDANGALKKTEAFIPFSLGKRICLGEGIARAELFLFFTTILQNFSMASPVAPEDIDLTPQECGVGKIPPTYQIRFLPR

SEQ ID NO: 81256 - protein, 650 aa, Homo sapiens
MAGMSQRPPSMYWCVGPEESAVCPERAMETLNGAGDTGGKPSTRGGDPAARSRRTEGIRAAYRRGDRGGARDLLEEACDQCASQLEKGQLLSIPAAYGDLEMVRYLLSKRLVELPTEPTDDNPAVVAAYFGHTAVVQELLESLPGPCSPQRLLNWMLALACQRGHLGVVKLLVLTHGADPESYAVRKNEFPVIVRLPLYAAIKSGNEDIAIFLLRHGAYFCSYILLDSPDPSKHLLRKYFIEASPLPSSYPGKTALRVKWSHLRLPWVDLDWLIDISCQITELDLSANCLATLPSVIPWGLINLRKLNLSDNHLGELPGVQSSDEIICSRLLEIDISSNKLSHLPPGFLHLSKLQKLTASKNCLEKLFEEENATNWIGLRKLQELDISDNKLTELPALFLHSFKSLNSLNVSRNNLKVFPDPWACPLKCCKASRNALECLPDKMAVFWKNHLKDVDFSENALKEVPLGLFQLDALMFLRLQGNQLAALPPQEKWTCRQLKTLDLSRNQLGKNEDGLKTKRIAFFTTRGRQRSGTEAASVLEFPAFLSESLEVLCLNDNHLDTVPPSVCLLKSLSELYLGNNPGLRELPPELGQLGNLWQLDTEDLTISNVPAEIQKEGPKAMLSYLRAQLRKAEKCKLMKMIIVGPPRQG

SEQ ID NO: 81257 - protein, 279 aa, Homo sapiens
MKERKKKERKERKRKKERNGLCVGQGDTRGDGSLPKPSLSAWPSSVVPANSNVTLRCWTPARGVSFVLRKGGIILESPKPLDSTEGAAEFHLNNLKVRNAGEYTCEYYRKASPHILSQHSDVLLLLVTGHLSKPFLRTYQRGTVTAGGRVTLQCQKRDQLFVPIMFALLKAGTPSPIQLQSPAGKEIDFSLVDVTAGDAGNYSCMYYQTKSPFWASEPSDQLEILVTVPPGTTSSNYSLGNFVRLGLAAVIVVIMGAFLVEAWYSRNVSPGESEAFKPE

SEQ ID NO: 81258 - protein, 69 aa, Homo sapiens
MLGITVLAALLACATPGPTVWPWERTTWRWKTKKDPCLWVWTPSTSTRDGMPSCCAMILPSSSLQSMWS

SEQ ID NO: 81259 - protein, 85 aa, Homo sapiens
MAQGLVTFADVAIDFSQEEWACLNSAQRDLYWDVMLENYSNLVSLDLESAYENKSLPTEKNIHEIRASKRNSDRRSKSLGRNWIC

SEQ ID NO: 81260 - protein, 172 aa, Homo sapiens
MSPEEWTYLVVLLISIPIGFLFKKAGPGLKRWGAAAVGLGLTLFTCGPHTLHSLVTILGTWALIQAQPCSCHALALAWTFSYLLFFRALSLLGLPTPTPFTNAVQLLLTLKLVSLASEVQDLHLAQRKEMASGFSKGPTLGLLPDVPSLMETLSYSYCYVGIMTGPFFRYRT

SEQ ID NO: 81261 - protein, 434 aa, Homo sapiens
MIMEDWTCKLQNRVLPSEDPALSQKGYLKKENMAALCRTAESQAELQCTQLDLERKLKLNENAISRLQANQKSVLVSVSEVKAVAEMQFGELLAAVRKAQANVMLFLEEKEQAALSQANGIKAHLEYRSAEMEKSKQELERMAAISNTVQFLEEYCKFKNTEDITFPSVYVGLKDKLSGIRKVITESTVHLIQLLENYKKKLQEFSKEEEYDIRTQVSAVVQRKYWTSKPEPSTREQFLQYAYDITFDPDTAHKYLRLQEENRKVTNTTPWEHPYPDLPSRFLHWRQVLSQQSLYLHRYYFEVEIFGAGTYVGLTCKGIDRKGEERNSCISGNNFSWSLQWNGKEFTAWYSDMETPLKAGPFRRLGVYIDFPGGILSFYGVEYDTMTLVHKFACKFSEPVYAAFWLSKKENAIRIVDLGEEPEKPAPSLVGTAP

SEQ ID NO: 81262 - protein, 97 aa, Homo sapiens
MFCCLGYEWLSGGCKTWHSAWVINTLADHHHRGTDFGGSPWLHVIIAFPTSYKVVITLWIVYLWVSLLKTIFWSRNGHDGSTDVQQRAWRSNRRRQE

SEQ ID NO: 81263 - protein, 40 aa, Homo sapiens
MDSLALGRWRQRRAEDLQVPGDVTCFERLLCLKPCPRHWR

SEQ ID NO: 81264 - protein, 187 aa, Homo sapiens
MSSGLRAADFPRWKRHISEQLRRRDRLQRQAFEEIILQYNKLLEKSDLHSVLAQKLQAEKHDVPNRHEISPGHDGTWNDNQLQEMAQLRIKHQEELTELHKKRGELAQLVIDLNNQMQRKDREMQMNEAKRRQARLQKELAEAAKEPLPVEQDDDIEVIVDETSDHTEETSPVRAISRAATKRLSQP

SEQ ID NO: 81265 - protein, 174 aa, Homo sapiens
MAASSNSSLSGSSVSSVYSEPRSPRELPKYAEEYQPPIWKSYLYQLQQEAPRPKRIICPREVENRPKYYGREFHGIISREQADELLGGVEGAYILRESQRQPGCYTLALRFGNQTLNYRLFHDGKHFVGEKRFESIHDLVTDGLITLYIETKAAEYISKMTTNPIYEHIGYATL

SEQ ID NO: 81266 - protein, 30 aa, Homo sapiens
MTMTANKNSSITHGAGGTKAPRGTLSRSQS

SEQ ID NO: 81267 - protein, 202 aa, Homo sapiens
MNPQIRNPMERMYRDTFYDNFENEPILYGRSYTWLCYEVKIKRGRSNLLWDTGVFRGPVLPKRQSNHRQEVDPETHCHAERCFLSWFCDDILSPNTNYEVTWYTSWSPCPECAGEVAEFLARHSNVNLTIFTARLCYFWDTDYQEGLCSLSQEGASVKIMGYKDFVSCWKNFVYSDDEPFKPWKGLQTNFRLLKRRLREILQ

SEQ ID NO: 81268 - protein, 98 aa, Homo sapiens
MAVAGPAPGAGARPRLDLQFLQRFLQILKVLFPSWSSQNALMFLTLLCLTLLGTSASARTWSDSAGSSAAWPASSSSPRSPSSTTLTSASKAQAGSGL

SEQ ID NO: 81269 - protein, 41 aa, Homo sapiens
MSEDEEKVKLRRLEPAIQKFIKIVIPTDLERLRKHQINIEK

SEQ ID NO: 81270 - protein, 145 aa, Homo sapiens
MAAPLEAQDQAPGEGEGLLIVKVEDSSWEQESAQHEDGRDSEACRQRFRQFCYGDVHGPHEAFSQLWELCCRWLRPELRTKEQILELLVLEQFLTVLPGEIQGWVREQHPGSGEEAVALVEDLQKQPVKAWRQGVNSVSPGLVSG

SEQ ID NO: 81271 - protein, 411 aa, Homo sapiens
  MOD_RES (1)..(1): Any amino acid
XRDEDDEAYGKPVKYDPSFRGPIKNRSCTDVICCVLFLLFILGYIVVGIVAWLYGDPRQVLYPRNSTGAYCGMGENKDKPYLLYFNIFSCILSSNIISVAENGLQCPTPQVCVSSCPEDPWTVGKNEFSQTVGEVFYTKNRNFCLPGVPWNMTVITSLQQELCPSFLLPSAPALGRCFPWTNITPPALPGITNDTTIQQGISGLIDSLNARDISVKIFEDFAQSWYWILVAVGQMMSTMFYPLVTFVLLLICIAYWAMTALYLATSGQPQYVLWASNISSPGCEKVPINTSCNPTAHLVNSSCPGLMCVFQGYSSKGLIQRSVFNLQIYGVLGLFWTLNWVLALGQCVLAGAFASFYWAFHKPQDIPTFPLISAFIRTLRYHTGSLAFGALILTLVQIARVILEYIDHKLR

SEQ ID NO: 81272 - protein, 166 aa, Homo sapiens
MRRAVSLVTDSTSTFLSQTTYALIEAITEYTKAVYTLTSLYRQYTSLLGKMNSEEEDEVWQVIIGARAEMTSKHQEYLKLETTWMTAVGLSEMAAEAAYQTGADQASITARNHIQLVKLQVEEVHQLSRKAETKLAEAQIEELRQKTQEEGEERAESEQEAYLRED

SEQ ID NO: 81273 - protein, 815 aa, Homo sapiens
MVKLANPLYTEWILEAIKKVKKQKQRPSEERICNAVSSSHGLDRKTVLEQLELSVKDGTILKVSNKGLNSYKDPDNPGRIALPKPRNHGKLDNKQNVDWNKLIKRAVEGLAESGGSTLKSIERFLKGQKDVSALFGGSAASGFHQQLRLAIKRAIGHGRLLKDGPLYRLNTKATNVDGKESCESLSCLPPVSLLPHEKDKPVAEPIPICSFCLGTKEQNREKKPEELISCADCGNSGHPSCLKFSPELTVRVKALRWQCIECKTCSSCRDQGKNADNMLFCDSCDRGFHMECCDPPLTRMPKGMWICQICRPRKKGRKLLQKKAAQIKRRYTNPIGRPKNRLKKQNTVSKGPFSKVRTGPGRGRKRKITLSSQSASSSSEEGYLERIDGLDFCRDSNVSLKFNKKTKGLIDGLTKFFTPSPDGRKARGEVVDYSEQYRIRKRGNRKSSTSDWPTDNQDGWDGKQENEERLFGSQEIMTEKDMELFRDIQEQALQKVGVTGPPDPQVRCPSVIEFGKYEIHTWYSSPYPQEYSRLPKLYLCEFCLKYMKSRTILQQHMKKCGWFHPPANEIYRKNNISVFEVDGNVSTIYCQNLCLLAKLFLDHKTLYYDVEPFLFYVLTQNDVKGCHLVGYFSKEKHCQQKYNVSCIMILPQYQRKGYGRFLIDFSYLLSKREGQAGSPEKPLSDLGRLSYMAYWKSVILECLYHQNDKQISIKKLSKLTGICPQDITSTLHHLRMLDFRSDQFVIIRREKLIQDHMAKLQLNLRPVDVDPECLRWTPVIVSNSVVSEEEEEEAEEGENEEPQCQERELEISVRA

SEQ ID NO: 81274 - protein, 50 aa, Homo sapiens
MQRNGSASRGLEKTRLRLCREARIPESAFLTGLTRESWEARCWCAVEGHS

SEQ ID NO: 81275 - protein, 127 aa, Homo sapiens
MRTLEDSSGTVLHRLIQEQLRYGNLTETRTLLAIQQQALRGGAGTGGTGSPQASLEILAPEDSQVLQQATRQEPQGQEHQGGENHLAENTLYRLCPQPSKGEELPTYEEAKAHSQYYAAQQAGTRPH

SEQ ID NO: 81276 - protein, 820 aa, Homo sapiens [sequence omitted]

SEQ ID NO: 81277 - protein, 243 aa, Homo sapiens
MSPDQFLLTVSALQHARNSGEFAYPCRPQTEITDVWGPSISYPRKVLNFKGKSIQRAVDRLRLSNPPIDVKRTSIPLEIQKLQPNLKISLHSPRAQSTIPEPMIIRSRFSGSLKGGDQVTSSIERAVCSTGPLTSMQVIKPNRMLAPQVGTATLSLKKERPRIYTALDPFRVNAEFVLLTVKEEKEHQEAKMKEYQARESTGVVDPGKASKAAWIRKIKGLPIDNFTKQGKTAAPELGQNVFI

SEQ ID NO: 81278 - protein, 83 aa, Homo sapiens
MKRGTSLHSRRGKPEAPKGSPQINRKSGQEMTAVMQSGRPRSSSTTDAPTSSAMMEIACAAAAAAAACLPGEEGTAERIERLE

SEQ ID NO: 81279 - protein, 168 aa, Homo sapiens
MKIAVIGQSLFGQEVYCHLRKEGHEVVGVFTVPDKDGKADPLGLEAEKDGVPVFKYSRWRAKGQALPDVVAKYQALGAELNVLPFCSQFIPMEIISAPRHGSIIYHPSLLPRHRGASAINWTLIHGDKKGGFSIFWADDGLDTGDLLLQKECEVLPDDTVSTLYNRFL

SEQ ID NO: 81280 - protein, 276 aa, Homo sapiens
MCMVIFAPHNEECKSHFHLLFAIFAFATCGGYSGGLRLSVDCVNKTESNLSIDIAFAYPFRLHQVTFEVPTCEGKERQKLALIGDSSSSAEFFVTVAVFAFLYSLAATVVYIFFQNKYRENNRGPLIDFIVTVVFSFLWLVGSSAWAKGLSDVKVATDPKEVLLLMSACKQPSNKCMAIHSPVMSSLNTSVVFGFLNFILWAGNIWFVFKETGWHSSGQRYLSDPMEKHSSSYNQGGYNQDSYGSSSGYSQQASLGPTSDEFGQQPTGPTSFTNQI

SEQ ID NO: 81281 - protein, 113 aa, Homo sapiens
MAAPVVAPPGVVVSRANKRSGAGPGGSGGGGARGAEEEPPPPLQAVLVADSFDRRFFPISKDQPRVSAAHASSQRAGRVAGLEQVLISANYNSMPLKDLRLCCYPKTGCRGTV

SEQ ID NO: 81282 - protein, 145 aa, Homo sapiens
MSSRKSKSNSLIHTECLSQVQRILRERFCRQSPHSNLFGVQVQYKHLSELLKRTALHGESNSVLIIGPRGSGKTMLINHALKELMEIEEVSENVLQVHLNGLLQINDKIALKEITRQLNLENVVGDKVFGSFAENLSFLLEALKK

SEQ ID NO: 81283 - protein, 99 aa, Homo sapiens
MKASEDLKKHGATVLTALGGILKKKGHHEAEIKPLAQSHATKHKIPVKYLEFISECIIQVLQSKHPGDFGADAQGAMNKALELFRKDMASNYKELGFQG

SEQ ID NO: 81284 - protein, 16 aa, Homo sapiens
MCTSETFQALDTFEAR

SEQ ID NO: 81285 - protein, 746 aa, Homo sapiens
MEVKRLKVTELRSELQRRGLDSRGLKVDLAQRLQEALDAEMLEDEAGGGGAGPGGACKAEPRPVAASGGGPGGDEEEDEEEEEEDEEALLEDEDEEPPPAQALGQAAQPPPEPPEAAAMEAAAEPDASEKPAEATAGSGGVNGGEEQGLGKREEDEPEERSGDETPGSEVPGDKAAEEQGDDQDSEKSKPAGSDGERRGVKRQRDEKDEHGRAYYEFREEAYHSRSKSPLPPEEEAKDEEEDQTLVNLDTYTSDLHFQVSKDRYGGQPLFSEKFPTLWSGARSTYGVTKGKVCFEAKVTQNLPMKEGCTEVSLLRVGWSVDFSRPQLGEDEFSYGFDGRGLKAENGQFEEFGQTFGENDVIGCFANFETEEVELSFSKNGEDLGVAFWISKDSLADRALLPHVLCKNCVVELNFGQKEEPFFPPPEEFVFIHAVPVEERVRTAVPPKTIEECEVILMVGLPGSGKTQWALKYAKENPEKRYNVLGAETVLNQMRMKGLEEPEMDPKSRDLLVQQASQCLSKLVQIASRTKRNFILDQCNVYNSGQRRKLLLFKTFSRKVVVVVPNEEDWKKRLELRKEVEGDDVPESIMLEMKANFSLPEKCDYMDEVTYGELEKEEAQPIVTKYKEEARKLLPPSEKRTNRRNNRNKRNRQNRSRGQGYVGGQRRGYDNRAYGQQYWGQPGNRGGYRNFYDRYRGDYDRFYGRDYEYNRYRDYYRQYNRDGPSIFHIQENVMRHRYQRLDRHFTF

SEQ ID NO: 81286 - protein, 43 aa, Homo sapiens
MAAIYLSRGFFSREPICPFEEKTKVERMVEDYLASGYQVSAVC

SEQ ID NO: 81287 - protein, 21 aa, Homo sapiens
MSREMQDVDLAEVKPLVEKGE

SEQ ID NO: 81288 - protein, 301 aa, Homo sapiens
MGFNLTFHLSYKFRLLLLLTLCLTVVGWATSNYFVGAIQEIPKAKEFMANFHKTLILGKGKTLTNEASTKKVELDNCPSVSPYLRGQSKLIFKPDLTLEEVQAENPKVSRGRYRPQECKALQRVAILVPHRNREKHLMYLLEHLHPFLQRQQLDYGIYVIHQAEGKKFNRAKLLNVGYLEALKEENWDCFIFHDVDLVPENDFNLYKCEEHPKHLVVGRNSTGYRLRYSGYFGGVTALSREQFFKVNGFSNNYWGWGGEDDDLRLRVELQRMKISRPLPEVGKYTMVFHTRDKGNEVNAER

SEQ ID NO: 81289 - protein, 124 aa, Homo sapiens
  MOD_RES (1)..(1): Any amino acid
XRFSRMQSLTLDLLGPSELLLALNMGNTSFNEVMEAQLPSHGGPKPSAESDMGTRRDYIMAKYVEHRFARRCTPEPQRLWTAICNRDLLSVLEAFANGQDFGQPLPGPDAQVRTPPRATYNPPV

SEQ ID NO: 81290 - protein, 387 aa, Homo sapiens
MADLEAVLADVSYLMAMEKSKATPAARASKRIVLPEPSIRSVMQKYLAERNEITFDKIFNQKIGFLLFKDFCLNEINEAVPQVKFYEEIKEYEKLDNEEDRLCRSRQIYDAYIMKELLSCSHPFSKQAVEHVQSHLSKKQVTSTLFQPYIEEICESLRGDIFQKFMESDKFTRFCQWKNVELNIHLTMNEFSVHRIIGRGGFGEVYGCRKADTGKMYAMKCLDKKRIKMKQGETLALNERIMLSLVSTGDCPFIVCMTYAFHTPDKLCFILDLMNGGDLHYHLSQHGVFSEKEMRFYATEIILGLEHMHNRFVVYRDLKPANILLDEHGHARISDLGLACDFSKKKPHASVGTHGYMAPEVLQKGTAYDSSADWFSLGCMLFKLLRG

SEQ ID NO: 81291 - protein, 394 aa, Homo sapiens
MMMMALSKTFGQKPVKFQLEDDGEFYMIGSEVGNYLRMFRGSLYKRYPSLWRRLATVEERKKIVASSHDHGYTTLATSVTLLKASEVEEILDGNDEKYKAVSISTEPPTYLREQKAKRNSQWVPTLPNSSHHLDAVPCSTTINRNRMGRDKKRTFPLWCGCIAALTLRADSALVLHFDDHDPAVIHENASQPEVLVPIRLDMEIDGQKLRDAFTWNMNEKLMTPEMFSEILCDDLDLNPLTFVPAIASAIRQQIESYPTDSILEDQSDQRVIIKLNIHVGNISLVDQFEWDMSEKENSPEKFALKLCSELGLGGEFVTTIAYSIRGQLSWHQKTYAFSENPLPTVEIAIRNTGDADQWCPLLETLTDAEMEKKIRDQDRNTRRMRRLANTAPAW

SEQ ID NO: 81292 - protein, 117 aa, Homo sapiens
MADTIFGSGNDQWVCPNDRQLALRAKLQTGWSVHTYQTEKQRRKQHLSPAEVEAILQVIQRAERLDVLEQQRIGRLVERLETMRRNVMGNGLSQCLLCGEVLGFLGSSSVFCKDCRK

SEQ ID NO: 81293 - protein, 286 aa, Homo sapiens
MSPHPTALLGLVLCLAQTIHTQEDLPRPSISAEPGTVIPLGSHVTFVCRGPVGVQTFRLERESRSTYNDTEDVSQASPSESEARFRIDSVSEGNAGPYRCIYYKPPKWSEQSDYLELLVKETSGGPDSPDTEPGSSAGPTQRPSDNSHNEHAPASQGLKAEHLYILIGVSVVFLFCLLLLVLFCLHRQNQIKQGPPRSKDEEQKPQQRPDLAVDVLERTADKATVNGLPEKDRETDTSALAAGSSQEVTYAQLDHWALTQRTARAVSPQSTKPMAESITYAAVARH

SEQ ID NO: 81294 - protein, 120 aa, Homo sapiens
  MOD_RES (1)..(1): Any amino acid
XTNVLLYGSLVSAGDALQQRLQGREANWRQTRRVATLVVTFHANFNYVWLRLLERALPGRAPHALLAKLLCDQVVGAPIAVSAFYVELSPAPLSPYPAPKPPLQASTAHVPCIPAPSGYP

SEQ ID NO: 81295 - protein, 236 aa, Homo sapiens
MAASMARRLWPLLTRRGFRPRGGCISNDSPRRSFTTEKRNRNLLYEYAREGYSALPQLDIERFCACPEEAAHALELRKGELRSADLPAIISTWQELRQLQEQIRSLEEEKAAVTEAVRALLANQDSGEVQQDPKYQGLRARGREIRKELVHLYPREAQLEEQFYLQALKLPNQTHPDVPVGDESQARVLHMVGDKPGACPTCLATGPITCAGLEPSCSTAWSTSHSTSFSAGASPP

SEQ ID NO: 81296 - protein, 349 aa, Homo sapiens
MLLMVVSMACVGFFLVQRAGPHVGNHRKPSLLAHPGPLVKSGERVILQCWSDIMFEHFFLHKEGISKDPSSLVGQIHDGVSKANFSIGPMMLALAGTYRCYGSVTHTPYQLSAPSDPLDIVVTGPYEKPSLSAQPGPKVQAGESVTLSCSSRSSYDMYHLSREGGAHERRLPAVRKVNRTFQADFPLGPATHGGTYRCFGSFRHSPYEWSDPSDPLLVSVTGNPSSSWPSPTEPSSKSGNPRHLHILIGTSVVIILFILLLFFLLHLWCSNKKNAAVMDQEPAGNRTANSEDSDEQDPEEVTYAQLDHCVFTQRKITRPSQRPKTPPTDTILYTELPNAKPRSKVVSCP

SEQ ID NO: 81297 - protein, 124 aa, Homo sapiens
MEEEGTEDNGLEDDSRDGQEDMEASLENLQNMGMMDMSVLDETEVANSSAPDFGEDGTDGLLDSFCDSKEYVAAQLRQLPAQPPEHAVDGEGFKNTLETSSLNFKVTPDIEESLLEPGTDKRNT

SEQ ID NO: 81298 - protein, 157 aa, Homo sapiens
MASWAKGRSYLAPGLLQGQVAIVTGGATGIGKAIVKELLELGSNVVIASRKLERLKSAADELQANLPPTKQARVIPIQCNIRNEEEVNNLVKSTLDTFGKINFLVNNGGGQFLSPAEHISSKGWHAVLETNLTGTFYMCKAGILELQEQVFTTSPNL

SEQ ID NO: 81299 - protein, 729 aa, Homo sapiens
MVNAGAMSGSGNLMDFLDEPFPDVGTYEDFHTIDWLREKSRDTDRHRKITSKSKESIWEFIKSLLDAWSGWVVMLLIGLLAGTLAGVIDLAVDWMTDLKEGVCLSAFWYSHEQCCWTSNETTFEDRDKCPLWQKWSELLVNQSEGASAYILNYLMYILWALLFAFLAVSLVRVFAPYACGSGIPEIKTILSGFIIRGYLGKWTLLIKTVTLVLVVSSGLSLGKEGPLVHVACCCGNFFSSLFSKYSKNEGKRREVLSAAAAAGVSVAFGAPIGGVLFSLEEVSYYFPLKTLWRSFFAALVAAFTLRSINPFGNSRLVLFYVEYHTPWRRKTTRLGKYPVLEVIVVTAITAIIAYPNPYTRQSTSELISELFNDCGALESSQLCDYINDPNMTRPVDDIPDRPAGVGVYTAMWQLALALIFKIVVTIFTFGMKIPSGLFIPSMAVGAIAGRMVGIGVEQLAYHHHDWIIFRNWCRPGADCVTPGLYAMVGAAACLGGVTRMTVSLVVIMFELTGGLEYIVPLMAAAVTSKWVADAFGKEGIYEAHIHLNGYPFLDVKDEFTHRTLATDVMRPRRGEPPLSVLTQDSMTVEDVETLIKETDYNGFPVVVSRDSERLIGFAQRRELILAIKNARQRQEGIVSNSIMYFTEEPPELPANSPHPLKLRRILNLSPFTVTDHTPMETVVDIFRKLGLRQCLVTRSGRLLGIITKKDVLRHMAQMANQDPESIMFN

SEQ ID NO: 81300 - protein, 70 aa, Homo sapiens
MAFSQGLLTFRDVAIEFSQEEWKCLDPAQRTLYRDVMLENYRNLVSLGSCCVVEIHLDLLSSRDPPQSPK

SEQ ID NO: 81301 - protein, 613 aa, Homo sapiens
MEGDGSDPEPPDAGEDSKSENGENAPIYCICRKPDINCFMIGCDNCNEWFHGDCIRITEKMAKAIREWYCRECREKDPKLEIRYRHKKSRERDGNERDSSEPRDEGGGRKRPVPDPDLQRRAGSGTGVGAMLARGSASPHKSSPQPLVATPSQHHQQQQQQIKRSARMCGECEACRRTEDCGHCDFCRDMKKFGGPNKIRQKCRLRQCQLRARESYKYFPSSLSPVTPSESLPRPRRPLPTQQQPQPSQKLGRIREDEGAVASSTVKEPPEATATPEPLSDEDLPLDPDLYQDFCAGAFDDHGLPWMSDTEESPFLDPALRKRAVKVKHVKRREKKSEKKKEERYKRHRQKQKHKDKWKHPERADAKDPASLPQCLGPGCVRPAQPSSKYCSDDCGMKLAANRIYEILPQRIQQWQQSPCIAEEHGKKLLERIRREQQSARTRLQEMERRFHELEAIILRAKQQAVREDEESNEGDSDDTDLQIFCVSCGHPINPRVALRHMERCYAKYESQTSFGSMYPTRIEGAKHTVSGSRCCAPSTHGTPKCQLTRYAGAPLYVMSLSSRVTSAACPSASAIAITAGRSCGVRKWTWSACVCGTSWTSCLSRSAMCAQP

SEQ ID NO: 81302 - protein, 114 aa, Homo sapiens
MSELSDEASEPELLNRSLSMWHGLGTQVSGEELDVPLDLHTAASIGQYEVVKECVQREPICGFTPLMEAAAAGHEIIVQYFLNHSPSVAQAGVQQLTAISASRVEAILLPQPPE

SEQ ID NO: 81303 - protein, 73 aa, Homo sapiens
MATAEPSGRALRLSTPGPRPSGARDRAPGAAGPPSGQIGNRALRLGERTPAAVEKRGPYMVTRAPSIQAKLRQ

SEQ ID NO: 81304 - protein, 38 aa, Homo sapiens
MSNPFLKQVFNKDKTFRPKRKFEPGTQRFELHKKAQAS

SEQ ID NO: 81305 - protein, 110 aa, Homo sapiens
MVHGSVTFRDVAIDFSQEEWECLQPDQRTLYRDVMLENYSHLISLAGSSISKPDVITLLEQEKEPWMVVRKETSRRYPDLELKYGPEKVSPENDTSEVNLPKQVIKQIST

SEQ ID NO: 81306 - protein, 79 aa, Homo sapiens
MKTPFGKAAAGQRSRTGAGHGSVSVTMIKRKAAHKKHRSRPTSQPRGNIVGCRIQHGWKDGDEPLTQWKGTVLDQIKGS

SEQ ID NO: 81307 - protein, 213 aa, Homo sapiens
MDTERVGDGKQHRRKQSQRLRWPCCLALVPDRHPSQLSSCTLCLLAAASQWESWAHFSKWHTEASTGTHLGKAKAEGLGCTVKNTPQLSICEPSHFGPSFVHSPHLLVDHDHRAGAATGRGQAGPSRASSVSPTFCPPTTSHHPVCAKGTDPVLVLQEEEQDLDGEKGPSSEGPEEEDGEGFSFKYSPGKLRGNQYKKMMTKEELEEEQRTEE

SEQ ID NO: 81308 - protein, 65 aa, Homo sapiens
MTKSNGEEPKMGGRMERFQQGVRKRTLLAKKKVQNITKEDVKSYLFRNAFVLLTVTAVIVGESFD

SEQ ID NO: 81309 - protein, 867 aa, Homo sapiens
MPAGLTEPAGAAPPAAVSASGTVTMAPAGALPVRVESTPVALGAVTKAPVSVCVEPTASQPLRSPVGTLVTKVAPVSAPPKVSSGPRLPAPQIVAVKAPNTTTIQFPANLQLPPGTVLIKSNSGPLMLVSPQQTVTRAETTSNITSRPAVPANPQTVKICTVPNSSSQLIKKVAVTPVKKLAQIGTTVVTTVPKPSSVQSVAVPTSVVTVTPGKPLNTVTTLKPSSLGASSTPSNEPNLKAENSAAVQINLSPTMLENVKKCKNFLAMLIKLACSGSQSPEMGQNVKKLVEQLLDAKIEAEEFTRKLYVELKSSPQPHLVPFLKKSVVALRQLLPNSQSFIQQCVQQTSSDMVIATCTTTVTTSPVVTTTVSSSQSEKSIIVSGATAPRTVSVQTLNPLAGPVGAKAGVVTLHSVGPTAATGGTTAGTGLLQTSKPLVTSVANTVTTVSLQPEKPVVSGTAVTLSLPAVTFGETSGAAICLPSVKPVVSSAGTTSDKPVIGTPVQIKLAQPGPVLSQPAGIPQAVQVKQLFSLFQVVQQPSGGNEKQVTTISHSSTLTIQKCGQKTMPVNTIIPTSQFPPASILKQITLPGNKILSLQASPTQKNRIKENVTSCFRDEDDINDVTSMAGVNLNEENACILATNSELVGTLIQSCKDEPFLFIGALQKRILDIGKKHDITELNSDAVNLISQATQERLRGLLEKLTAIAQHRMTTYKASENYILCSDTRSQLKFLEKLDQLEKQRKDLEEREMLLKAAKSRSNKEDPEQLRLKQKAKELQQLELAQIQHRDANLTALAAIGPRKKRPLESGIEGLKDNLLASGTSSLTATKQLHRPRITRICLRDLIFCMEQEREMKYSRALYLALLK

SEQ ID NO: 81310 - protein, 241 aa, Homo sapiens
MQPVRTVVPVTKHRGYLGVMPAYSAAEDALTTKLVTFYEDRGITSVVPSHQATVLLFEPSNGTLLAVMDGNVITAKRTAAVSAIATKFLKPPSSEVLCILGAGVQAYSHYEIFTEQFSFKEVRIWNRTKENAEKFADTVQGEVRVCSSVQEAVAGADVIITVTLATEPILFGEWVKPGAHINAVGASRPDWRELDDELMKEAVLYVDSQEAALKESGDVLLSGAEIFAELGEVIKGVKPAH

SEQ ID NO: 81311 - protein, 184 aa, Homo sapiens
MASLVSLELGLLLAVLVVTATASPPAGLLSLLTSGQGALDQEALGGLLNTLADRVHCANGPCGKACVDIPQLLEEAVGAGAPGSAGGVLAALLDHVRSGSCFHALPSPQYFVDFVFQQHSSEVPMTLAELSALMQRLGVGREAHSDHSHRHRGASSRDPVPLISSSNSSSVWDTVCLSARDVMA

SEQ ID NO: 81312 - protein, 477 aa, Homo sapiens
  MOD_RES (1)..(1): Any amino acid
XDTCSTVGLAAREGNVKVLRKLLKKGRSVDVADNRGWMPIHEAAYHNSVECLQMLINADSSENYIKMKTFEGFCALHLAASQGHWKIVQILLEAGADPNATTLEETTPLFLAVENGQIDVLRLLLQHGANVNGSHSMCGWNSLHQASFQENAEIIKLLLRKGANKECQDDFGITPLFVAAQYGKLESLSILISSGANVNCQALDKATPLFIAAQEGHTKCVELLLSSGADPDLYCNEDSWQLPIHAAAQMGHTKILDLLIPLTNRACDTGLNKVSPVYSAVFGGHEDCLEILLRNGYSPDAQACLVFGFSSPVCMAFQKDCEFFGIVNILLKYGAQINELHLAYCLKYEKFSIFRYFLRKGCSLGPWNHIYEFVNHAIKAQAKYKEWLPHLLVAGFDPLILLCNSWIDSVSIDTLIFTLEFTNWKTLAPAVERMLSARASNAWILQQHIEQGFILQKYLGPSNSQVDFLLRGELPIG

SEQ ID NO: 81313 - protein, 139 aa, Homo sapiens
MMLIPMASVMAVTEPKWVSVWSRFLWVTLLSMVLGSLLALLLPLGAVEEQCLAVLKGLYLLRSKPDRAQHAATKCTSPSTELSITSRGATLLVAKTKASPGKTDWPSSSMLVNWIDRHRMCHVLYVGHRGIVNKSALSS

SEQ ID NO: 81314 - protein, 796 aa, Homo sapiens
QLLSYELGQGHAQASPEIRFTPFANPTHKPLAKPKSSQETPAHSSGQPPRDAKLEAKTAKASPSGQNISYIHSSSESVTPRTEGRLQQKSGSSVQKGVNSQKGKCVRNGDRFQVLIGYNAELIAVFKTLPSKNYDPDTKTWNFSMNDYSALMKAAQSLPTVNLQPLEWAYGSSESPSTSSEGQAGLPSAPSLSFVKGRCMLISRAYFEADISYSQDLIALFKQMDSRRYDVKTRKWSFLLEEHSKLIAKVRCLPQVQLDPLPTTLTLAFASQLKKTSLSLTPDVPEADLSEVDPKLVSNLMPFQRAGVNFAIAKGGRLLLADDMGLGKTIQAICIAAFYRKEWPLLVVVPSSVRFTWEQAFLRWLPSLSPDCINVVVTGKDRLTAGLINIVSFDLLSKLEKQLKTPFKVVIIVAKRVILLSGTPAMSRPAELYTQIIAVKPTFFPQFHAFGLRYCDAKRMPWGWDYSGSSNLGELKLLLEEAVMLRRLKSDVLSQLPAKQRKIVVIAPGRINARTRAALDAAAKEMTTKDKTKQQQKDALILFFNRTAEAKIPSVIEYILDLLESGREKFLVFAHHKVVLDAITQELERKHVQHIRIDGSTSSAEREDLCQQFQLSERHAVAVLSITAANMGLTFSSADLVVFAELFWNPGVLIQAEDRVHRIGQTSSVGIHYLVAKGTADDYLWPLIQEKIKVLAEAGLSETNFSEMTESTDYLYKDPKQQKIYDLFQKSFEKEGSDMELLEAAESFDPGSASGTSGSSSQNMGDTLDESSLTASPQKKRRFEFFDNWDSFTSPL

SEQ ID NO: 81315 - protein, 935 aa, Homo sapiens
MIRIFPDFSVQVTAAAAGGAAAGVPAGAGMGRAGAAANGTPQNVQGITSYQQRLQALRKEKSRDAARSRRGKENFEFYELAKLLPLPAAITSQLDKASIIRLTISYLKMRDFANQGDPPWNLRMEGPPPNTSVKVIGAQRRRSPSALAIEVFEAHLGSHILQSLDGFVFALNQEGKFLYISETVSIYLGLSQVELTGSSVFDYVHPGDHVEMAEQLGMKLPPGRGLLSQGTAEDGASSASSSSQSETPEPVESTSPSLLTTDNTLERSFFIRMKSTLTKRGVHIKSSGYKVIHITGRLRLRVSLSHGRTVPSQIMGLVVVAHALPPPTINEVRIDCHMFVTRVNMDLNIIYCENRISDYMDLTPVDIVGKRCYHFIHAEDVEGIRHSHLDLLNKGQCVTKYYRWMQKNGGYIWIQSSATIAINAKNANEKNIIWVNYLLSNPEYKDTPMDIAQLPHLPEKTSESSETSDSESDSKDTSEDNENSKSDEKGNQSENSEDPEPDRKKSGNACDNDMNCNDDGHSSSNPDSRDSDDSFEHSDFENPKAGEDGFGALGAMQIKVERYVESESDLRLQNCESLTSDSAKDSDSAGEAGAQASSKHQKRKKRRKRQKGGSASRRRLSSASSPGGLDAGLVEPPRLLSSPNSASVLKIKTEISEPINFDNDSSIWNYPPNREISRNESPYSMTKPPSSEHFPSPQGGGGGGGGGGGLHVAIPDSVLTPPGADGAAARKTQFGASATAALAPVASDPLSPPLSASPRDKHPGNGGGGGGGGGGAGGGGPSASNSLLYTGDLEALQRLQAGNVVLPLVHRVTGTLAATSTAAQRVYTTGTIRYAPAEVTLAMQSNLLPNAHAVNFVDVNSPGFGLDPKTPMEMLYHHVHRLNMSGPFGGAVSAASLTQMPAGNVFTTAEGLFSTLPFPVYSNGIHAAQTLERKE

SEQ ID NO: 81316 - protein, 964 aa, Homo sapiens
  MOD_RES (1)..(1): Any amino acid
XRAERDSALETLQGQLEEKAQELGHSQSALASAQRELAAFRTKVQDHSKAEDEWKAQVARGRQEAERKNSLISSLEEEVSILNRQVLEKEGESKELKRLVMAESEKSQKLEERLRLLQAETASNSARAAERSSALREEVQSLREEAEKQRVASENLRQELTSQAERAEELGQELKAWQEKFFQKEQALSTLQLEHTSTQALVSELLPAKHLCQQLQAEQAAAEKRHREELEQSKQAAGGLRAELLRAQRELGELIPLRQKVAEQERTAQQLRAEKASYAEQLSMLKKAHGLLAEENRGLGERANLGRQFLEVELDQAREKYVQELAAVRADAETRLAEVQREAQSTARELEVMTAKYEGAKVKVLEERQRFQEERQKLTAQVEELSKKLADSDQASKVQQQKLKAVQAQGGESQQEAQRLQAQLNELQAQLSQKEQAAEHYKLQMEKAKTHYDAKKQQNQELQEQLRSLEQLQKENKELRAEAERLGHELQQAGLKTKEAEQTCRHLTAQVRSLEAQVAHADQQLRDLGKFQVATDALKSREPQAKPQLDLSIDSLDLSCEEGTPLSITRHKALMTIIPDLSPNNPLSKLPRTQPDGTSVPGEPASPISQRLPPKVESLESLYFTPIPARSQAPLESSLDSLGDVFLDSGRKTRSARRRTTQIINITMTKKLDVEEPDSANSSFYSTRSAPASQASLRATSSTQSLARLGSPDYGNSALLSLPGYRPTTRSSARRSQAGVSSGAPPGRNSFYMGTCQDEPEQLDDWNRIAELQQRNRVCPPHLKTCYPLESRPSLSLGTITDEEMKTGDPQETLRRASMQPIQIAEGTGITTRQQRKRVSLEPHQGPGTPESKKATSCFPRPMTPRDRHEGRKQSTTEAQKKAAPASTKQADRRQSMAFSILNTPKKLGNSLLRRGASKKALSKASPNTRSGTRRSPRIATTTASAATAAAIGATPRAKGKAKH

SEQ ID NO: 81317 - protein, 348 aa, Homo sapiens
MNDDPSMEENGVERVCPESLLQSREYSSLPLPRHTSSTDGTITSSDPGLEILNMASCDLDRNSLCKKEEDTRSASPTIEAQGTSPAHDNIAFQDSTSKDKTILNLEAKEEPETIEEHKKEHASGDSVVSPLPVTTVKSVNLRQSENTSANEKEVEAEFLRLSLGFKCDWFTLEKRVKLEERSRDLAEENLKKEITNCLKLLESLTPLCEDDNQAQEIIKKLEKSIKFLSQCAARVASRAEMLGAINQESRVSKAVEVMIQHVENLKRMYAKEHAELEELKQVLLQNERSFNPLEDDDDCQIKKRSASLNSKPSSLRRVTIASLPRNIGNAGMVAGMENNDRFSRRSSS

SEQ ID NO: 81318 - protein, 325 aa, Homo sapiens
MAALMTPGTGAPPAPGDFSGEGSQGLPDPSPEPKQLPELIRMKRDGGRLSEADIRGFVAAVVNGSAQGAQIGAMLMAIRLRGMDLEETSVLTQALAQSGQQLEWPEAWRQQLVDKHSTGGVGDKVSLVLAPALAACGCKVPMISGRGLGHTGGTLDKLESIPGFNVIQSPEQMQVLLDQAGCCIVGQSEQLVPADGILYAARDVTATVDSLPLITGWRGSQPRASGRGSADRHGQAPGSLRGPRPGGGGGAALHGRRRPARLKGPGHHARGRPALAQRTRGDSGPGRCPGGRGAGRRLGPWPLRADAGGAGRGSRSGPSPVLGKS

SEQ ID NO: 81319 - protein, 372 aa, Homo sapiens
MRVMAPRTLILLLSGALALTETWACSHSMRYFDTAVSRPGRGEPRFISVGYVDDTQFVRFDSDAASPRGEPRAPWVEQEGPEYWDRETQKYKRQAQADRVNLRKLRGYYNQSEDGSHTLQWMYGCDLGPDGRLLRGYDQSAYDGKDYIALNEDLRSWTAADTAAQITQRKWEAAREAEQWRAYLEGTCVEWLRRYLENGKETLQRAEHPKTHVTHHPVSDHEATLRCWALGFYPAEITLTWQRDGEDQTQDTELVETRPAGDGTFQKWAAVVVPSGEEQRYTCHVQHEGLPEPLTLRWEPSSQPTIPIVGIVAGLAVLAVLAVLGAVMAVVMCRRKSSGHFLPTGGKGGSCSQAASSNSAQGSDESLIACKA

SEQ ID NO: 81320 - protein, 359 aa, Homo sapiens
MSVGFIGAGQLAYALARGFTAAGILSAHKIIASSPEMNLPTVSALRKMGVNLTRSNKETVKHSDVLFLAVKPHIIPFILDEIGADVQARHIVVSCAAGVTISSVEKAFMALDALADGGVKMGLPRRLAIQLGAQALLGAAKMLLDSEQHPCQLKDNVCSPGGATIHALHFLESGGFRSLLINAVEASCIRTRGGRQVPGVGGQHTPAGVRHGAAAAAQQRAGAGRAAALPGAGPQGRAAQARAAVPAQRPGPGDRRVAARPRRRLQPHLPHRLQAGVRPRERLEGLRRDRGRELLAAAEPAPAAAAATGVGAEGASGPAGVRRPQAGPLCLAGGASRAWGAPAGAAHPGPWGLWSSGRL

SEQ ID NO: 81321 - protein, 56 aa, Homo sapiens
MDCYRTSLSSSWIYPTVILCLFGFFSMMRPSEPFLIPYLSGPDKNLTSAEQVLTRF

SEQ ID NO: 81322 - protein, 878 aa, Homo sapiens
MSVKEGAQRKWAALKEKLGPQDSDPTEANLESADPELCIRLLQMPSVVNYSGLRKRLEGSDGGWMVQFLEQSGLDLLLEALARLSGRGVARISDALLQLTCVSCVRAVMNSRQGIEYILSNQGYVRQLSQALDTSNVMVKKQVFELLAALCIYSPEGHVLTLDALDHYKTVCSQQYRFSIVMNELSGSDNVPYVVTLLSVINAVILGPEDLRARTQLRNEFIGLQLLDVLARLRDLEDADLLIQLEAFEEAKAEDEEELLRVSGGVDMSSHQEVFASLFHKVSCSPVSAQLLSVLQGLLHLEPTLRSSQLLWEALESLVNRAVLLASDAQECTLEEVVERLLSVKGRPRPSPLVKAHKSVQANLDQSQRGSSPQNTTTPKPSVEGQQPAAAAACEPVDHAQSESILKVSQPRALEQQASTPPPPPPPPLLPGSSAEPPPPPPPPPLPSVGAKALPTAPPPPPLPGLGAMAPPAPPLPPPLPGSCEFLPPPPPPLPGLGCPPPPPPLLPGMGWGPPPPPPPLLPCTCSPPVAGGMEEVIVAQVDHGLGSAWVPSHRRVNPPTLRMKKLNWQKLPSNVAREHNSMWASLSSPDAEAVEPDFSSIERLFSFPAAKPKEPTMVAPRARKEPKEITFLDAKKSLNLNIFLKQFKCSNEEVAAMIRAGDTTKFDVEVLKQLLKLLPEKHEIENLRAFTEERAKLASADHFYLLLLAIPCYQLRIECMLLCEGAAAVLDMVRPKAQLVLAACESLLTSRQLPIFCQLILRIGNFLNYGSHTGDADGFKISTLLKLTETKSQQNRVTLLHHVLEEAEKSHPDLLQLPRDLEQPSQAAGINLEIIRSEASSNLKKLLETERKVSASVAEVQEQYTERLQHLGLPGTG

SEQ ID NO: 81323 - protein, 60 aa, Homo sapiens
ESSQENKTVSEAESRIFWLGLIACSVLWVIFAFSALFSFTVKWLVTVFGDRTFKDMIKIK

SEQ ID NO: 81324 - protein, 43 aa, Homo sapiens
MFSLTGVMVISSDSSPAVENEHPQETPESNNSVYTSFMKSHRC

SEQ ID NO: 81325 - protein, 156 aa, Homo sapiens
MGPRFWGGPSPGSCAFPFLRPSPSSRTPRDWSASRCWTWSGAATAPTPFSPAQQPPSSHDGLSLDPSQLEPLAPRNPGPSGLCTASFTQKLRSPPAQLLPPEPDDAFWGAPCEQPLERRYQALPALVCIMCCLFGVVYCFFGYRCFKAVLFLTGLL

SEQ ID NO: 81326 - protein, 491 aa, Homo sapiens
MNSMEAAVGTEVPLLDNLQHCNSGNMKPPLLVFIVCLLWLKDSHCAPTWKDKTAISENLKSFSEVGEIDADEEVKKALTGIKQMKIMMERKEKEHTNLMSTLKKCREEKQEALKLLNEVQEHLEEEERLCRESLADSWGECRSCLENNCMRIYTTCQPSWSSVKNKIERFFRKIYQFLFPFHEDNEKDLPISEKLIEEDAQLTQMEDVFSQLTVDVNSLFNRSFNVFRQMQQEFDQTFQSHFISDTDLTEPYFFPAFSKEPMTKADLEQCWDIPNFFQLFCNFSVSIYESVSETITKMLKAIEDLPKQDKAPDHGGLISKMLPGQDRGLCGELDQNLSRCFKFHEKCQKCQAHLSEDCPDVPALHTELDEAIRLVNVSNQQYGQILQMTRKHLEDTAYLVEKMRGQFGWVSELANQAPETEIIFNSIQVVPRIHEGNISKQDETMMTDLSILPSSNFTLKIPLEESAESSNFIGYVVAKALQHFKEHFKTW

SEQ ID NO: 81327 - protein, 18 aa, Homo sapiens
MTPPRLFWVWLLVAGTQA

SEQ ID NO: 81328 - protein, 90 aa, Homo sapiens
MSNPSAPPPYEDRNPLYPGPPPPGGYGQPSVLPGGYPAYPGYPQPGYGHPAGYPQPMPPTHPMPMNYGPGHGYDGEERAVSDSFGPGEWD

SEQ ID NO: 81329 - protein, 458 aa, Homo sapiens
MASDGARKQFWKRSNSKLPGSIQHVYGAQHPPFDPLLHGTLLRSTAKMPTTPVKAKRVSTFQEFESNTSDAWDAGEDDDELLAMAAESLNSEVVMETANRVLRNHSQRQGRPTLQEGPGLQQKPRPEAEPPSPPSGDLRLVKSVSESHTSCPAEELRRLSWSGIPKPVRPMTWKLLSGYLPANVDRRPATLQRKQKEYFAFIEHYYDSRNDEVHQDTYRQIHIDIPRMSPEALILQPKVTEIFERILFIWAIRHPASGYVQGINDLVTPFFVVFICEYIEAEEVDTVDVSGVPAEVLCNIEADTYWCMSKLLDGIQDNYTFAQPGIQMKVKMLEELVSRIDEQVHRHLDQHEVRYLQFAFRWMNNLLMREVPLRCTIRLWDTYQSEPDGFSHFHLYVCAAFLVRWRKEILEEKDFQELLLFLQNLPTAHWDDEDISLLLAEAYRLKFAFADAPNHYKK

SEQ ID NO: 81330 - protein, 201 aa, Homo sapiens
MCMVIFAPLFAIFAFATCGGYSGGLRLSVDCVNKTESNLSIDIAFAYPFRLHQVTFEVPTCEGKERQKLALIGDSSSSAEFFVTVAVFAFLYSLAATVVYIFFQNKYRENNRGPLIVFGFLNFILWAGNIWFVFKETGWHSSGQRYLSDPMEKHSSSYNQGGYNQDSYGSSSGYSQQASLGPTSDEFGQQPTGPTSFTNQI

SEQ ID NO: 81331 - protein, 95 aa, Homo sapiens
MAASAGAGAVIAAPDSRRWLWSVLAAALGLLTAGVSALEVYTPKEIFVANGTQGKLTCKFKSTSTTGGLTSVSWSFQPEGADTTVSRICLCFQFG

SEQ ID NO: 81332 - protein, 211 aa, Homo sapiens
MRAPVFQALLLCGRRLVVQPLNSDMRKLKNRVAAQTARDRKKARMSELEQQVVDLEEENQKLLLENQLLREKTHGLVVENQELRQRLGMDALVAEEEAEAKGNEVRPVAGSAESAALRLRAPLQQVQAQLSPLQNISPWILAVLTLQIQSLISCWAFWTTWTQSCSSNALPQSLPAWRSSQRSTQKDPVPYQPPFLCQWGRHQPSWKPLMN

SEQ ID NO: 81333 - protein, 216 aa, Homo sapiens
MLHNMKGQFAEHLLGAGFVSSRNPKDPESNINSDNEKIIKAVICAGLYPKVAKIRLNLGKKRKMVKVYTKTDGLVAVHPKSVNVEQTDFHYNWLIYHLKMRTSSIYLYDCTEVSPYCLLFFGGDISIQKDNDQETIAVDEWIVFQSPARIAHLVKELRKELDILLQEKIESPHPVDWNDTKSRDCAVLSAIIDLIKTQEKATPRNFPPRFQDGYYS

SEQ ID NO: 81334 - protein, 45 aa, Homo sapiens
MAAPALCSESITLGAVFEEGLSRSCCCFRGSFQRKSGPTKSWERE

SEQ ID NO: 81335 - protein, 173 aa, Homo sapiens
MEEPRSSGQPSPESQTRLRSGGARGQTGPGSACRAESPTSARTRSQAAPTRYARPPLHPEDRHDGTSNGTARLPQLGTVGQSPYTSAPPLSHTPNADFQPPYFPPPYQPIYPQSQDPYSHVNDPYSLNPLHAQPQPQHPGWPGQRQSQESGLLHTHRGLPHQLSGLDPRRDYR

SEQ ID NO: 81336 - protein, 65 aa, Homo sapiens
MMLPYPSALGDQYWEEILLPKNGENVETMKKLTQNHKAKGLPSNDTDCPQKKEGKAQIVKQNGRD

SEQ ID NO: 81337 - protein, 25 aa, Homo sapiens
MALSQGLLTFRDVAIEFSQEEWKCL

SEQ ID NO: 81338 - protein, 507 aa, Homo sapiens
MREQLKGHETQTTCWDHPKMTELYQSLADLNNVRFSAYRTAMKLRRLQKALCLDLLSLSAACDALDQHNLKQNDQPMDILQIINCLTTIYDRLEQEHNNLVNVPLCVDMCLNWLLNVYDTGRTGRIRVLSFKTGIISLCKAHLEDKYRYLFKQVASSTGFCDQRRLGLLLHDSIQIPRQLGEVASFGGSNIEPSVRSCFQFANNKPEIEAALFLDWMRLEPQSMVWLPVLHRVAAAETAKHQAKCNICKECPIIGFRYRSLKHFNYDICQSCFFSGRVAKGHKMHYPMVEYCTPTTSGEDVRDFAKVLKNKFRTKRYFAKHPRMGYLPVQTVLEGDNMETNLQAEYDRLKQQHEHKGLSPLPSPPEMMPTSPQSPRDAELIAEAKLLRQHKGRLEARMQILEDHNKQLESQLHRLRQLLEQPQAEAKVNGTTVSSPSTSLQRSDSSQPMLLRVVGSQTSDSMGEEDLLSPPQDTSTGLEEVMEQLNNSFPSSRGRNTPGKPMREDTM

SEQ ID NO: 81339 - protein, 74 aa, Homo sapiens
MGGCFSKPKPVGRAAPGPTRAMARPATSTRRSACPPLTPTPALRIAWRLLSATSRTSRMARCGKWSWAGGRCCW

SEQ ID NO: 81340 - protein, 57 aa, Homo sapiens
MIGEPTNFVHTAHVGSGDLFSGMNSVSSIQNQMQSKGGYGGGMPANVQMQLVDTKAG

SEQ ID NO: 81341 - protein, 223 aa, Homo sapiens
  MOD_RES (1)..(1): Any amino acid
XSSVFGSLPPAGQASFQAQPTPAASRMLTESYSFGSSQGTPFGATPLAPASQPNSLADVGSFLGPGVPAAGVPSSLFGMAGQVPPLQSVTMGGGGGSSTGLAFGAFTNPFTAPAAQSPLPSTNPFQPNGLAPGPGFGMSSAGPGFPQAVPPTGAFASSFPAPLFPPQTPLVQQQNGSSFGDLGSAKLGQRPLSQPAGISTNPFMTGPSSSPFASKPPTTNPFL

SEQ ID NO: 81342 - protein, 120 aa, Homo sapiens
MLNGAGLDKALKMSLPRRSRIRSSVGPVRSSLGYKKAEDEMSRATSVGDQLEAPARTIYLNQPHLNKFRDNQISTAKYSVLTFLPRFLYEQIRRAANAFFLFIALLQMYLQQEDIPPWCH

SEQ ID NO: 81343 - protein, 129 aa, Homo sapiens
MVSISGGDLPTGLDFISAPEPALSSCSLGTSAGWSPTMAAIRKKLVIVGDGACGKTCLLIVFSKDQFPEVYVPTVFENYIADIEVDGKQVELALWDTAGQEDYDRLRPLSYPDTDVILMCFSIDSPDSL

SEQ ID NO: 81344 - protein, 59 aa, Homo sapiens
  MOD_RES (1)..(1): Any amino acid
XLNQLKSNKDRDTKIFYSITGPGADSPPEGVFAVEKETGWLLLNKPLDREEIAKYEVLL

SEQ ID NO: 81345 - protein, 253 aa, Homo sapiens
MGMCSRQERIQKDIDVVIQKSRAEKDCLFADFRYSDSTFTFTYVGGPRSVSYSVHVSEDYPDNTYVSSSENDEDVLVTTEPIPVIFHRIATELRKTNDINCCLSIKSKLQKENGEESRQNSTVEEDSEGDNDSEEFYYGGQVNYDGELHKHPQLEADLSAVREIYGPHAVSLREYGAIDDVDIDLHIDVSFLDEEIAVAWEVIRTEPIIVRLHCSLTQYLNGPESCRHLLHSSGNRAKKNPIACTIKSCQRRK

SEQ ID NO: 81346 - protein, 1478 aa, Homo sapiens
MEPRMESCLAQVLQKDVGKRLQVGQELIDYFSDKQKSADLEHDQTMLDKLVDGLATSWVNSSNYKVVLLGMDILSALVTRLQDRFKAQIGTVLPSLIDRLGDAKDSVREQDQTLLLKIMDQAANPQYVWDRMLGGFKHKNFRTREGICLCLIATLNASGAQTLTLSKIVPHICNLLGDPNSQVRDAAINSLVEIYRHVGERVRADLSKKGLPQSRLNVIFTKFDEVQKSGNMIQSANDKNFDDEDSVDGNRPSSASSTSSKAPPSSRRNVGMGTTRRLGSSTLGSKSSAAKEGAGAVDEEDFIKAFDDVPVVQIYSSRDLEESINKIREILSDDKHDWEQRVNALKKIRSLLLAGAAEYDNFFQHLRLLDGAFKLSAKDLRSQVVREACITLGHLSSVLGNKFDHGAEAIMPTIFNLIPNSAKIMATSGVVAVRLIIRHTHIPRLIPVITSNCTSKSVAVRRRCFEFLDLLLQEWQTHSLERHISVLAETIKKGIHDADSEARIEARKCYWGFHSHFSREAEHLYHTLESSYQKALQSHLKNSDSIVSLPQSDRSSSSSQESLNRPLSAKRSPTGSTTSRASTVSTKSVSTTGSLQRSRSDIDVNAAASAKSKVSSSSGTTPFSSAAALPPGSYASLDGTTTKAEGRIRTRRQSSGSATNVASTPDNRGRSRAKVVSQSQRSRSANPAGAGSRSSSPGKLLGSGYGGLTGGSSRGPPVTPSSEKRSKIPRSQGCSRETSPNRIGLDRFGLGQPGRIPGSVNAMRVLSTSTDLEAAVADALLLGDSRSKKKPVRRRYEPYGMYSDDDANSDASSVCSERSYGSRNGGIPHYLRQTEDVAEVLNHCASSNWSERKEGLLGLQNLLKSQRTLSRVELKRLCEIFTRMFADPHSKVFSMFLETLVDFIIIHKDDLQDWLFVLLTQLLKKMGADLLGSVQAKVQKALDVTRDSFPFDQQFNILMRFIVDQTQTPNLKVKVAILKYIESLARQMDPTDFVNSSETRLAVSRIITWTTEPKSSDVRKAAQIVLISLFELNTPEFTMLLGALPKTFQDGATKLLHNHLKNSSNTSVGSPSNTIGRTPSRHTSSRTSPLTSPTNCSHGGLSPSMLDYDTENLNSEEIYSSLRGVTEAIEKFSFRSQEDLNEPIKRDGKKECDIVSRDGGAASPATEGRGGSEVEGGRTALDNKTSLLNTQPPRAFPGPRARDYNPYPYSDAINTYDKTALKEAVFDDDMEQLRDVPIDHSDLVADLLKELSNHNERVEERKGALLELLKITREDSLGVWEEHFKTILLLLLETLGDKDHSIRALALRVLREILRNQPARFKNYAELTIMKTLEAHKDSHKEVVRAAEEAASTLASSIHPEQCIKVLCPIIQTADYPINLAAIKMQTKVVERIAKESLLQLLVDIIPGLLQGYDNTESSVRKASVFCLVAIYSVIGEDLKPHLAQLTGSKMKLLNLYIKRAQTTNSNSSSSSDVSTHS

SEQ ID NO: 81347 - protein, 65 aa, Homo sapiens
  MOD_RES (1)..(1): Any amino acid
XAETETKVQERENGESPLELEQLDQHHEMKETNEQKLHKIANELLLTERAYVNRLDLLDQKIEWR

SEQ ID NO: 81348 - protein, 926 aa, Homo sapiens
MGLPEPGPLRLLALLLLLLLLLLLQLQHLAAAAADPLLGGQGPAKDCEKDQFQCRNERCIPSVWRCDEDDDCLDHSDEDDCPKKTCADSDFTCDNGHCIHERWKCDGEEECPDGSDESEATCTKQVCPAEKLSCGPTSHKCVPASWRCDGEKDCEGGADEAGCATLCAPHEFQCGNRSCLAAVFVCDGDDDCGDGSDERGCADPACGPREFRCGGDGGGACIPERWVCDRQFDCEDRSDEAAELCGRPGPGATSAPAACATASQFACRSGECVHLGWRCDGDRDCKDKSDEADCPLGTCRGDEFQCGDGTCVLAIKHCNQEQDCPDGSDEAGCLQGLNECLHNNGGCSHICTDLKIGFECTCPAGFQLLDQKTCGDIDECKDPDACSQICVNYKGYFKCECYPGYEMDLLTKNCKAAAGKSPSLIFTNRHEVRRIDLVKRNYSRLIPMLKNVVALDVEVATNRIYWCDLSYRKIYSAYMDKASDPKEQEVLIDEQLHSPEGLAVDWVHKHIYWTDSGNKTISVATVDGGRRRTLFSRNLSEPRAIAVDPLRGFMYWSDWGDQAKIEKSGLNGVDRQTLVSDNIEWPNGITLDLLSQRLYWVDSKLHQLSSIDFSGGNRKTLISSTDFLSHPFGIAVFEDKVFWTDLENEAIFSANRLNGLEISILAENLNNPHDIVIFHELKQPRAPDACELSVQPNGGCEYLCLPAPQISSHSPKYTCACPDTMWLGPDMKRCYRAPQSTSTTTLASTMTRTVPATTRAPGTTVHRSTYQNHSTETPSLTAAVPSSVSVPRAPSISPSTLSPATSNHSQHYANEDSKMGSTVTAAVIGIIVPIVVIALLCMSGYLIWRNWKRKNTKSMNFDNPVYRKTTEEEDEDELHIGRTAQIGHVYPADTWVEFSKFPLKHPEGCHPYRAKWRRFQISPSLL

SEQ ID NO: 81349 - protein, 64 aa, Homo sapiens
MGRLDGKVIILTAAAQGIGQAAALAFAREGAKVIATDINESKLQELEKYPVPLVLFFRYSNSCP

SEQ ID NO: 81350 - protein, 1642 aa, Homo sapiens
MMKKEALLLIPNVLKVFLENGQIKSFTFDGRTTVKDVMLTLQDRLSLRFIEHFALVLEYAGPEQNHKFLLLQDKQPLAYVVQRTHYHGMKCLFRISFFPKDPVELLRRDPAAFEYLYIQSRNDVIRERFGMDPKPEMLLGLAALHIYITVSATRPSQKISLKNVEKEWGLEPFLPPSLLQVIKEKNLRKSLSQQLKAHQTHPSCGTKGSAIQAKLQYLRILNELPTFTGVLFNTVGLDEKQSATTLLVGPRHGISHVIDLKTNLTTVLSEFSKISKIQLFRENQGVARVETSIMDAKPLVLLMEWPEATNFACLIAGYCRLLLDSRKMVFSRPASQPLPPPMIKADYMHSAHRPVTGGHLGKKESSYVGSVGTSPRKSSRCTPPPADSELVSFCYLHMREQRKEQESRTDVNENLIFFEETRPRTKSDPTSKSSGQGYEVVPDDFDAASLDHEPCASRARSYTLDNSLGAEALNFYCDSCKAKLQEQLGPRKGGKPGSSRDNIVDLMSLPPPGSEEEEEEEDETTSLLPAIAAPPPGFRDNSSDEDDPKRRAVQSQEQGRHLRGLLYDEIPVTLIDSVQTRTVRDHAQELDDALVSTLQALEALAASEDGPHPPPPQTAGLIVLATITPESSLDSGHETNSSELTDMSEMMSAMKQHQNTTYFLAQHLNKDSLLARKDLPFRIQSCAAQAVLTAPYSLGRPDPNPSLQPIATGQSPGPPGARRKLPQSEGQVQGERTYSLAVHPALSPQLSEQKNLSLLSPVPEDKGPGHTRAGLEMSLRAATSSLSEEQVSELRDNLPKEVRLSPKLILDPKSSVTPAIISAALQQVVHNKSLVTAGGALGNPPSRGERRLEASMGRPEVSMMSSSASKNLKFKISPSAPETSWNSQHQLGAEVSSSPRAPTGSRADSLHLSQQEDSLPVQNFPPKSYLLRTSRESVGKQATGEVAGKGGPVGGKPTLQKQGTISSQGEKAQLESTPKRSKLEETSLVPRATYPMALQSPSCQSRSHSPSCQPHGHSPSSQSRGQSPSCQPRGQSPLRSQAASRQVSTMPSRKLETTLNGAHSTSEGPAKPKSSRGPFRLRNLFSATFPTRQKKETDERQAQLQKVKQYELEFLEELLKPPSQGELPGTEYLQPPAPGRCSCQLRSSPVQQGPGMSREQRRSCDCKRICRGGRPQATQTPVPSLRGRERDRVLPSQRQPEAGPGVSLSSPINVQRIRSTSLESRECRSDPESGVSCLTTCASGGECLGAPNYRKLMRRYSISELDQGDRASLTSDVYPHPPLGMLPREAKEVEASLPIALGPKSRSLESPTLGDPSYVQVAPETKGPRQMAVFSLPEEVYRKPAELDEDSESSKCCSIRYCFYYRKCDMADDASDGKDELSYSIPMKILPGMKLDEQVVPVVSRTLQVLDAATCSSSSPEASRTQEIDLRVSTFEGSLAKINALRAHAYGLPDGFLAARLDTNELLTVLRQCVASPEARAPKPYVSQISEYKLELALKFKELRASCRRVANVDKSPTHMLAAITGSFQVLSSLIETFVRLVFIVRSEAQRQELLAKVEEVVRNYTFLLRAAEESTARNLNQQQQQQQQQQQQQQQQQQQQQQQQQQQVAAAAGAATEHPPGSPTSATVMSTFTHSLKTLIK

SEQ ID NO: 81351 - protein, 117 aa, Homo sapiens
MSYVKETVDRLLKGYDIRLRPDFGGPPVDVGMRIDVASIDMVSEVNMDYTLTMYFQQSWKDKRLSYSGIPLNLTLDNRVADQLWVPDTYFLNDKKSFVHGVTVKNRMIRLHPDGTVL

SEQ ID NO: 81352 - protein, 298 aa, Homo sapiens
  MOD_RES (1)..(1): Any amino acid
XERRRVFQALARIHDICYNSTTLWDVTVRDLLPSSAMIKDLSQEFGMPLSQEELTDEKLFALPPQPAPNLEDYHSRNSTLTLEIHAHQEKYLQWRSAMLMKNKDKKHSFIQKNITEAYQVSKKPPKSVAKVIKISAPANKAVYNYSTQTMNSTELAKKELYQEIAKEPRKRFTYSQDYLSAMVEPLDLKEEEKKAQKKSRQAWLTARGFQVTGLQSDTESSFQDLKLPPIKELNEEWKENSLFANVLEPVLDRDRWSWDRHHVDFDLYKKPPPFLELLPSPAPKPVTVRKKKGNSPIS

SEQ ID NO: 81353 - protein, 103 aa, Homo sapiens
MWRCGGRQGLCVLRRLSGGLALSPRLECSGVISAHCSLHFPGSSDSPASASQVSGTTGTCHHIRLIFGQAGLELLTSGDPPTQASQSAGITDTCTPQSVAMEQ

SEQ ID NO: 81354 - protein, 378 aa, Homo sapiens
MASLTVKAYLLGKEDAAREIRRFSFCCSPEPEAEAEAAAGPGPCERLLSRVAALFPALRPGGFQAHYRDEDGDLVAFSSDEELTMAMSYVKDDIFRIYIKEKKECRRDHRPPCAQEAPRNMVHPNVICDGCNGPVVGTRYKCSVCPDYDLCSVCEGKGLHRGHTKLAFPSPFGHLSEGFSHSRWLRKVKHGHFGWPGWEMGPPGNWSPRPPRAGEARPGPTAESASGPSEDPSVNFLKNVGESVAAALSPLGIEVDIDVEHGGKRSRLTPVSPESSSTEEKSSSQPSSCCSDPSKPGGNVEGATQSLAEQMRKIALECCPWASLMKAAGSPGSCRPRTMTSERLWTPSSIQSIPRRCDHFCPPLLRAPLLSHSCVKLA

SEQ ID NO: 81355 - protein, 136 aa, Homo sapiens
MTEDSQRNFRSVYYEKVGFRGVEEKKSLEILLKDDRLDTEKLCTFSQRFPLPSMYRALVWKVLLGILPPHHESHAKVMMYRKEQYLDVLHALKVVRFVSDATPQAEVYLRMYQLESGKLPRSPSFPLEPDDEVFLA

SEQ ID NO: 81356 - protein, 44 aa, Homo sapiens
  MOD_RES (1)..(1): Any amino acid
XSPKSVLVIKKMRDASLLQPFKELCTHLMEKSRRGGCGAQESHS

SEQ ID NO: 81357 - protein, 572 aa, Homo sapiens
MEVQLGLGRVYPRPPSKTYRGAFQNLFQSVREVIQNPGPRHPEAASAAPPGASLLLLQQQQQQQQQQQQQQQQQQQQQQQETSPRQQQQQQGEDGSPQAHRRGPTGYLVLDEEQQPSQPQSALECHPERGCVPEPGAAVAASKGLPQQLPAPPDEDDSAAPSTLSLLGPTFPGLSSCSADLKDILSEASTMQLLQQQQQEAVSEGSSSGRAREASGAPTSSKDNYLGGTSTISDNAKELCKAVSVSMGLGVEALEHLSPGEQLRGDCMYAPLLGVPPAVRPTPCAPLAECKGSLLDDSAGKSTEDTAEYSPFKGGYTKGLEGESLGCSGSAAAGSSGTLELPSTLSLYKSGALDEAAAYQSRDYYNFPLALAGPPPPPPPPHPHARIKLENPLDYGSAWAAAAAQCRYGDLASLHGAGAAGPGSGSPSAAASSSWHTLFTAEEGQLYGPCGGGGGGGGGGGGGGGGGGGGGGGEAGAVAPYGYTRPPQGLAGQESDFTAPDVWYPGGMVSRVPYPSPTCVKSEMGPWMDSYSGPYGDMRNTRRKRLWKLIIRSINSCICSPRETEVPVRQQK

SEQ ID NO: 81358 - protein, 63 aa, Homo sapiens
MGTATPDGREDQERFLMVQNGHSSSIQPSHHRRKGRKTPLHTLLKSIAQKLYTLLPLIPVDQN

SEQ ID NO: 81359 - protein, 238 aa, Homo sapiens
HSPPIFAIPPPLGRIFRKVGQRLLTQCRPPWVGVGGRCPPTPSLGPRLCPLQGLVPPSGPFTPKEASGPGEGGPDPDSMEWDGESSLSAKEVPCLEGPIHLVAQGTLQSDLAGPEGSRRPEVEAALRHLQLCLDVGPPATQDPLGEQQPILWAPKWVDYSSKYGFGYQLLDGGRTGRHPHGPATPRREGTLPTPVPPAGPGLCLLRFLASEHALLLLFSNGMVQVSFSGVPAQLVLSG

SEQ ID NO: 81360 - protein, 204 aa, Homo sapiens
MGEPSREEYKIQSFDAETQQLLKTALKDPGAVDLEKVANVIVDHSLQDCVFSKEAGRMCYAIIQAESKQAGQSVFRRGLLNRLQQEYQAREQLRARSLQGWVCYVTFICNIFDYLRVNNMPMMALVNPVYDCLFRLAQPDSLSKEEEVDCLVLQLHRVGEQLEKMNGQRMDELFVLIRDGFLLPTGLSSLAQLLLLEIIEFRAA

SEQ ID NO: 81361 - protein, 59 aa, Homo sapiens
MRRRAARGPGPPPPGPGLSRLPLPLLLLLALGTRGGCAAPAPAPRAEDLSLGVTRPPWP

SEQ ID NO: 81362 - protein, 87 aa, Homo sapiens
MHFSIPETESRSGDSGGSAYVAYNIHVNGVLHCRVRYSQLLGLHEQLRKEYGANVLPAFPPKKLFSLTPAEVEQRREQLEKYMQAVL

SEQ ID NO: 81363 - protein, 124 aa, Homo sapiens
MDMWTALLILQALLLPSLADGATPALRFVAVGDWGGVPNAPFHTAREMANAKEIARTVQILGADFILSLGDNFYFTGVQDINDKRFQETFEDVFSDRSLRKVPWYVLAGNHDHLGNVSAQIAYS

SEQ ID NO: 81364 - protein, 120 aa, Homo sapiens
MSREMQDVDLAEVKPLVEKGETITGLLQEFDVQEQDIETLHGSVHVTLCGTPKGNRPVILTYHDIGMNHKTCYNPLFNYEDMQEITQHFAVCHVDAPGQQDGAASFPAGYMYPSMDQLAE

SEQ ID NO: 81365 - protein, 55 aa, Homo sapiens
KHSGASARAANGGAWGYRDFRGGQKKGWCTTPQLVATMPVSPAGSHKQQNFGLEA

SEQ ID NO: 81366 - protein, 180 aa, Homo sapiens
MAVAGLLADARSLADIAREEASNFRSNFGYNIPLKHLADRVAMYVHAYTLYSAVRPFGCSFMLGSYSVNDGAQLYMIDPSGVSYGYWGCAIGKARQAAKTEIEKLQMKEMTCRDIVKEVAKIIYIVHDEVKDKAFELELSWVGELTNGRHEIVPKDIREEAEKYAKESLKEEDESDDDNM

SEQ ID NO: 81367 - protein, 282 aa, Homo sapiens
MPGLLLCEPTELYNILNQATKLSRLTDPNYLCLLDVRSKWEYDESHVITALRVKKKNNEYLLPESVDLECVKYCVVYDNNSSTLEILLKDDDDDSDSDGDGKDLVPQAAIEYGRILTRLTHHPVYILKGGYERFSGTYHFLRTQKIIWMPQELDAFQPYPIEIVPGKVFVGNFSQACDPKIQKDLKIKAHVNVSMDTGPFFAGDADKLLHIRIEDSPEAQILPFLRHMCHFIEIHHHLGSVILIFSTQGISRSCAAIIAYLMHSNEQTLQTESRSVTQAGVQ

SEQ ID NO: 81368 - protein, 75 aa, Homo sapiens
  MOD_RES (1)..(1): Any amino acid
XAEQQELETLPTTKMAQTNPTPGSLGPWKITIYDQENFQGKRMEFTSSCPNVSERSFDNVRSLKVESGAIIRSLR

SEQ ID NO: 81369 - protein, 797 aa, Homo sapiens
MDERREEQIVQLLNSVQAKNDKESEAQISWFAPEDHGYGTEVSTKNTPCSENKLDIQEKKLINQEKKMFRIRNRSYIDRDSEYLLQENEPDGTLDQKLLEDLQKKKNDLRYIEMQHFREKLPSYGMQKELVNLIDNHQVTVISGETGCGKTTQVTQFILDNYIERGKGSACRIVCTQPRRISAISVAERVAAERAESCGSGNSTGYQIRLQSRLPRKQGSILYCTTGIILQWLQSDPYLSSVSHIVLDEIHERNLQSDVLMTVVKDLLNFRSDLKVILMSATLNAEKFSEYFGNCPMIHIPGFTFPVVEYLLEDVIEKIRYVPEQKEHRSQFKRGFMQGHVNRQEKEEKEAIYKERWPDYVRELRRRYSASTVDVIEMMEDDKVDLNLIVALIRYIVLEEEDGAILVFLPGWDNISTLHDLLMSQVMFKSDKFLIIPLHSLMPTVNQTQVFKRTPPGVRKIVIATNIAETSITIDDVVYVIDGGKIKETHFDTQNNISTMSAEWVSKANAKQRKGRAGRVQPGHCYHLYNGLRASLLDDYQLPEILRTPLEELCLQIKILRLGGIAYFLSRLMDPPSNEAVLLSIRHLMELNALDKQEELTPLGVHLARLPVEPHIGKMILFGALFCCLDPVLTIAASLSFKDPFVIPLGKEKIADARRKELAKDTRSDHLTVVNAFEGWEEARRRGFRYEKDYCWEYFLSSNTLQMLHNMKGQFAEHLLGAGFVSSRNPKDPESNINSDNEKIIKAVICAGLYPKVAKIRLNLGKKRKMVKVYTKTDGLVAVHPKSVNVEQTDFHY

SEQ ID NO: 81370 - protein, 272 aa, Homo sapiens
APWAPVLLLALGLRGLQAGARRAPDPGFQERFFQQRLDHFNFERFGNKTFPQRFLVSDRFWVRGEGPIFFYTGNEGDVWAFANNSAFVAELAAERGALLVFAEHRYYGKSLPFGAQSTQRGHTELLTVEQALADFAELLRALRRDLGAQDAPAIAFGGRKPSHLSSQPPAQLGCAATLAAFPSESCTRTWPRVGICGSQKCRPPCGTCGPLRRKRGNGVLGAAALTLCPSPSYGGMLSAYLRMKYPHLVAGALAASAPVLAVAGLGDSNQFF

SEQ ID NO: 81371 - protein, 40 aa, Homo sapiens
MTTYLEFIQQNEERDGVRFSWNVWPSSRLEATRMVVPVAA

SEQ ID NO: 81372 - protein, 454 aa, Homo sapiens
MADTRSVHETRFEAAVKVIQSLPKNGSFQPTNEMMLKFYSFYKQATEGPCKLSRPGFWDPIGRYKWDAWSSLGDMTKEEAMIAYVEEMKKIIETMPMTEKVEELLRVIGPFYEIVEDKKSGRSSDITSDLGNVLTSTPNAKTVNGKAESSDSGAESEEEEAQEEVKGAEQSDNDKKMMKKSADHKNLEVIVTNGYDKDGFVQDIQNDIHASSSLNGRSTEEVKPIDENLGQTGKSAVCIHQDINDDHVEDVTGIQHLTSDSDSEVYCDSMEQFGQEESLDSFTSNNGPFQYYLGGHSSQPMENSGFREDIQVPPGNGNIGNMQVVAVEGKGHRMQHLSEGTKGRQVGSGGDGERWGSDRGSRGSLNEQIALVLMRLQEDMQNVLQRLQKLETLTALQAKSSTSTLQTAPQPTSQRPSWWPFEMSPGVLTFAIIWPFIAQWLVYLYYQRRRRKLN

SEQ ID NO: 81373 - protein, 55 aa, Homo sapiens
MDRSLGWQGNSVPEDRTEAGIKRFLEDTTDDGELSKMTRSMWALQPSPTKSTESP

SEQ ID NO: 81374 - protein, 780 aa, Homo sapiens
MSEAVRVPSPATPLVVAAPAPEERKGKESEREKLPPIVSAGAGATAGLDRGAKGQISTFSSFISAVSPKKEAAENRSSPAHLVFPNIKNVREPPPICLDVRQKQRTSMDASSSEMKAPVLPEPILPIQPKTVKDFQEDVEKVKSSGDWKAVHDFYLTTFDSFPELNAAFKKDATASFNTIEDSGINAKFVNAVYDTLLNTPQDVQKTVLKGIINSLLREWKGPRTKDDLRAYFILLQNPQFNNTSTYVIYAHLLRQIATLVEADHHFLVHWFKKQYSRLSQKRFKQLVERLLQFISLRLFPAKPEEFPPITKCSWWIPSAAKVLALLNTANNLVHPPLIPYTDFYNSTLDHIDLMEEYHTWQNFGNSHRFSFCQYPFVISVAAKKIIIQRDSEQQMINIARQSLVDKVSRRQRPDMNILFLNMKVRRTHLVSDSLDELTRKRADLKKKLKVTFVGEAGLDMGGLTKEWFLLLIRQIFHPDYGMFTYHKDSHCHWFSSFKCDNYSEFRLVGILMGLAVYNSITLDIRFPPCCYKKLLSPPIIPSDQNIPVGICNVTVDDLCQIMPELAHGLSELLSHEGNVEEDFYSTFQVFQEEFGIIKSYNLKPGGDKISVTNQNRKEYVQLYTDFLLNKSIYKQFAAFYYGFHSVCASNALMLLRPEEVEILVCGSPDLDMHALQRSTQYDGYAKTDLTIKYFWDVVLGFPLDLQKKLLHFTTGSDRVPVGGMADLNFKISKNETSTNCLPVAHTCFNQLCLPPYKSKKDLKQKLIIGISNSEGFGLE

SEQ ID NO: 81375 - protein, 41 aa, Homo sapiens
MTASLGAALGHRVGLALPATGCTSGRGDRQGLGRGLPSLLP

SEQ ID NO: 81376 - protein, 723 aa, Homo sapiens
  MOD_RES (1)..(1): Any amino acid
XRGPGRRCLLALVLFCAWGTLAVVAQKPGAGCPSRCLCFRTTVRCMHLLLEAVPAVAPQTSILDLRFNRIREIQPGAFRRLRNLNTLLLNNNQIKRIPSGAFEDLENLKYLYLYKNEIQSIDRQAFKGLASLEQLYLHFNQIETLDPDSFQHLPKLERLFLHNNRITHLVPGTFNHLESMKRLRLDSNTLHCDCEILWLADLLKTYAESGNAQAAAICEYPRRIQGRSVATITPEELNCERPRITSEPQDADVTSGNTVYFTCRAEGNPKPEIIWLRNNNELSMKTDSRLNLLDDGTLMIQNTQETDQGIYQCMAKNVAGEVKTQEVTLRYFGSPARPTFVIQPQNTEVLVGESVTLECSATGHPPPRISWTRGDRTPLPVDPRVNITPSGGLYIQNVVQGDSGEYACSATNNIDSVHATAFIIVQALPQFTVTPQDRVVIEGQTVDFQCEAKGNPPPVIAWTKGGSQLSVDRRHLVLSSGTLRISGVALHDQGQYECQAVNIIGSQKVVAHLTVQPRVTPVFASIPSDTTVEVGANVQLPCSSQGEPEPAITWNKDGVQVTESGKFHISPEGFLTINDVGPADAGRYECVARNTIGSASVSMVLSVNVPDVSRNGDPFVATSIVEAIATVDRAINSTRTHLFDSRPRSPNDLLALFRYPRDPYTVEQARAGEIFERTLQLIQEHVQHGLMVDLNGTSQCQSLFFLLHGLSNGVEHASVKSHS

SEQ ID NO: 81377 - protein, 120 aa, Homo sapiens
MDNMSITNTPTSNDACLSIVHSLMCHRQGGESETFAKRAIESLVKKLKEKKDELDSLITAITTNGAHPSKCVTIQRTLDGRLQVAGRKGFPHVIYARLWRWPDLHKNELKHVKYCQYAFD

SEQ ID NO: 81378 - protein, 222 aa, Homo sapiens
MFDTTPHSGRSTPSSSPSLRKRLQLLPPSRPPPEPEPGTMVEKGSDSSSEKGGVPGTPSTQSLGSRNFIRNSKKMQSWYSMLSPTYKQRNEDFRKLFSKLPEAERLIVDYSCALQREILLQGRLYLSENWICFYSNIFRWETTISIQLKEVTCLKKEKTAKLIPNAIQICTESEKHFFTSFGARDRCFLLIFRLWQNALLEKDPQGSGRCDRPERHHLLGGS

SEQ ID NO: 81379 - protein, 562 aa, Homo sapiens
MNFPGLFKIVADKTPYLTMEEITRTIHIGPSRLGHPCFYHQKDIKLENLIIKQGEQIMLNSVEEIDGEIMVSCAVARNHQTHSFNLPLSQEGEFYECEDERIYTLKEIVEWKIPKNRTRTVNLTDFSNKWDSTNPFPKDFYGTLILKPVYEIQGVMKFRKDIIRILPSLDVEVKDITDSYDANWFLQLLSTEDLFEMTSKEFPIVTEVIEAPEGNHLPQSILQPGKTIVIHKKYQASRILASEIRSNFPKRHFLIPTSYKGKFKRRPREFPTAYDLEIAKSEKEPLHVVATKAFHSPHDKLSSVSVGDQFLVHQSETTEVLCEGIKKVVNVLACEKILKKSYEAALLPLYMEGGFVEVIHDKKQYPISELCKQFRLPFNVKVSVRDLSIEEDVLAATPGLQLEEDITDSYLLISDFANPTECWEIPVGRLNMTVQLVSNFSRDAEPFLVRTLVEEITEEQYYMMRRYESSASHPPPRPPKHPSVEETKLTLLTLAEERTVDLPKSPKRHHVDITKKLHPNQAGLDSKVLIGSQNDLVDEEKERSNRGATAIAETFKNEKHQK

SEQ ID NO: 81380 - protein, 145 aa, Homo sapiens
MGRGSGTFERLLDKATSQLLLETDWESILQICDLIRQGDTQAKYAVNSIKKKVNDKNPHVALYALEVMESVVKNCGQTVHDEVANKQTMEELKDLLKRQVEVNVRNKILYLIQAWAHAFRNEPKYKVVQDTYQIMKVEGPRLGGR

SEQ ID NO: 81381 - protein, 31 aa, Homo sapiens
MMRWKKADQWLLQKCIGGVRGMWRFYSYLTG

SEQ ID NO: 81382 - protein, 118 aa, Homo sapiens
NAFPVSGQLYTTHLLSLDALLTVIDSTEAHCQAKVLNSLTQQEKKETARPSCEIVDGTREASNTANHWHRAVQSETKEGDSVSARERPPHHPNGQHRGCSVAPREPSAGQEDDWRVCE

SEQ ID NO: 81383 - protein, 572 aa, Homo sapiens
MSSRLLHSDRDPIPDVPAVYFVMPTEENIDRMCQDLRNQLYESYYLNFISAISRSKLEDIANAALAASAVTQVAKVFDQYLNFITLEDDMFVLCNQNKELVSYRAINRPDITDTEMETVMDTIVDSLFCFFVTLGAVPIIRCSRGTAAEMVAVKLDKKLRENLRDARNSLFTGDTLGAGQFSFQRPLLVLVDRNIDLATPLHHTWTYQALVHDVLDFHLNRVNLEESSGVENSPAGARPKRKNKKSYDLTPVDKFWQKHKGSPFPEVAESVQQELESYRAQEDEVKRLKSIMGLEGEDEGAISMLSDNTAKLTSAVSSLPELLEKKRLIDLHTNVATAVLEHIKARKLDVYFEYEEKIMSKTTLDKSLLDIISDPDAGTPEDKMRLFLIYYISTQQAPSEADLEQYKKALTDAGCNLNPLQYIKQWKAFTKMASAPASYGSTTTKPMGLLSRVMNTGSQFVMEGVKNLVLKQQNLPVTRILDNLMEMKSNPETDDYRYFDPKMLRGNDSSVPRNKNPFQEAIVFVVGGGNYIEYQNLVDYIKGKQGKHILYGCSELFNATQFIKQLSQLGQK

SEQ ID NO: 81384 - protein, 103 aa, Homo sapiens
MVSKRIAQETFDAAVRENIEEFAMGPEEAVKEAVEQFESQGVDLSNIVKTAPKVSADGSQEPTHDILQMLSDLQESVASSRPQEVSAYLTRFCDQCKQDKACR

SEQ ID NO: 81385 - protein, 792 aa, Homo sapiens
MELRPWLLWVVAATGTLVLLAADAQGQKVFTNTWAVRIPGGPAVANSVARKHGFLNLGQIFGDYYHFWHRGVTKRSLSPHRPRHSRLQREPQWLEQQVAKRRTKRDVYQEPTDPKFPQQWYLSGVTQRDLNVKAAWAQGYTGHGIVVSILDDGIEKNHPDLAGNYDPGASFDVNDQDPDPQPRYTQMNDNRHGTRCAGEVAAVANNGVCGVGVAYNARIGGVRMLDGEVTDAVEARSLGLNPNHIHIYSASWGPEDDGKTVDGPARLAEEAFFRGVSQGRGGLGSIFVWASGNGGREHDSCNCDGYTNSIYTLSISSATQFGNVPWYSEACSSTLATTYSSGNQNEKQIVTTDLRQKCTESHTGTSASAPLAAGIIALTLEANKNLTWRDMQHLVVQTSKPAHLNANDWATNGVGRKVSHSYGYGLLDAGAMVALAQNWTTVAPQRKCIIDILTEPKDIGKRLEVRKTVTACLGEPNHITRLEHAQARLTLSYNRRGDLAIHLVSPMGTRSTLLAARPHDYSADGFNDWAFMTTHSWDEDPSGEWVLEIENTSEANNYGTLTKFTLVLYGTAPEGLPVPPESSGCKTLTSSQACVVCEEGFSLHQKSCVQHCPPGFAPQVLDTHYSTENDVETIRASVCAPCHASCATCQGPALTDCLSCPSHASLDPVEQTCSRQSQSSRESPPQQQPPRLPPEVEAGQRLRAGLLPSHLPEVVAGLSCAFIVLVFVTVFLVLQLRSGFSFRGVKVYTMDRGLISYKGLPPEAWQEECPSDSEEDEGRGERTAFIKDQSAL

SEQ ID NO: 81386 - protein, 110 aa, Homo sapiens
  MOD_RES (1)..(1): Any amino acid
XLQDNVAFVLCLDTVGRGSSLHLHVSKPPREGTLQHAFLRELETVAAHQFPEVRFSMVHKRINLAEDVLAWEHERFAIRRLPAFTLSHLESHRDGQRSSIMDVRQSLTVS

SEQ ID NO: 81387 - protein, 64 aa, Homo sapiens
MAMWQGAMDNRGFQQGSFSSFQNSSSDEDLMDIPATAMDFSMRDDVPPLDREVGGIIIGDDNLS

SEQ ID NO: 81388 - protein, 57 aa, Homo sapiens
MMAYMNPGPHYSVNALALSGPSVDLMHQAVPYPSAPRKQRRERTTFTRSQLEELEAL

SEQ ID NO: 81389 - protein, 134 aa, Homo sapiens
MTLLLLPLLLASLLASCSCNKANKHKPWIEAEYQGIVMENDNTVLLNPPLFALDKDAPLRYAGEICGFRLHGSGVPFEAVILDKATGEGLIRAKEPVDCEAQKEHTFTIQAYDCGEGPDGANTKKSHKATVHVR

SEQ ID NO: 81390 - protein, 123 aa, Homo sapiens
MEKEETTRELLLPNWQGSGSHGLTIAQRDDGVFVQEVTQNSPAARTGVVKEGDQIVGATIYFDNLQSGEVTQLLNTMGHHTVGLKLHRKGDRSPEPGQTWTREVFSSCSSEVVLSGDDEEYQR

SEQ ID NO: 81391 - protein, 151 aa, Homo sapiens
MARTKQTARKSTGGKAPRKQLATKAARKSAPSTGGVKKPHRYRPGTVALREIRRYQKSTELLIRKLPFQRLVREIAQDFKTDLRFQSAAIGALQVRQRPGAGGGLGGFRSPSGINSAALVLNRRLAKRTWWVCSKIPTCVPSTLRESPSCP

SEQ ID NO: 81392 - protein, 138 aa, Homo sapiens
DLSELERDNTGRCRLSSPVPAVCRKEPCVLGVDEAGRGPVLGPMVYAICYCPLPRLADLEALKVADSKTLLESERERLFAKMEDTDFVGWALDVLSPNLISTSMLGRVKYNLNSLSHDTATGLIQYALDQGVNVTQVS

SEQ ID NO: 81393 - protein, 56 aa, Homo sapiens
MPGGLEKTCHQCISKIASNVSSLNTLGEENPPVLGMLHLFFLPMGFLRVEDCVHRS

SEQ ID NO: 81394 - protein, 90 aa, Homo sapiens
MSTVICMKQREEEFLLTIRPFANRMQKSPCYIPIVSSATLWDRSTPSAKHIPCYERTSVPCSRFINHMKNFSESPKFRSLHFLNFPGPFH

SEQ ID NO: 81395 - protein, 102 aa, Homo sapiens
  MOD_RES (1)..(1): Any amino acid
XEEGEASDFSLAWDSSVTAAGGLEGEPECDQKTSRALEDRNSVTSQEERNEDDEDMEDESIYTCDHCQQDFESLADLTDHRAHRCPGGNAKQPQDSDRWLHG

SEQ ID NO: 81396 - protein, 494 aa, Homo sapiens [sequence omitted]

SEQ ID NO: 81397 - protein, 140 aa, Homo sapiens
MRLFVSDGVPGCLPVLAAAGRARGRAEVLISTVGPEDCVVPFLTRPKVPVLQLDSGNYLFSTSAICRYFFLLSGWEQDDLTNQWLEWEATELQPALSAALYYLVVQGKKGEDVLGSVRRALTHIDHSLSRQNCPFLAGRS

SEQ ID NO: 81398 - protein, 44 aa, Homo sapiens
AATETLAEVPEHVLRGLPEEVRLFPSAVDKTRIGVLPKFGMDVH

SEQ ID NO: 81399 - protein, 152 aa, Homo sapiens
MVFVPMAVPWSPEHQLQRLQVTRKLLEMEEQAAFLVGSATPRYLYLASNHSNKWGHPRGYRIQMLSFAGEPLPQNSSMARGFSWERYQLAVTQRKEEEPSSSSVFNQNDPWAPTVDFSDFINNETIAGKDLVAWVTAGFLHIPHAEDIPNTV

SEQ ID NO: 81400 - protein, 504 aa, Homo sapiens
DAAVSALAALCSEYYMKEPGEADPAIQEELITQYLAELRNPEEMTRCGFSLALGALPGFLLKGRLQQVLTGLRAVTHTSPEDVSFAESRRDGLKAIARICQTVGVKAGAPDEAVCGENVSQIYCALLGCMDDYTTDSRGDVGTWVRKAAMTSLMDLTLLLARSQPELIEAHTCERIMCCVAQQASEKIDRFRAHAASVFLTLLHFDSPPIPHVPHRGELEKLFPRSDVASVNWSAPSQAFPRITQLLGLPTYRYHVLLGLVVSLGGLTESTIRHSTQSLFEYMKGIQSDPQALGSFSGTLLQIFEDNLLNERVSVPLLKTLDHVLTHGCFDIFTTEEDHPFAVKLLALCKKEIKNSKDIQKLLSGIAVDFPSATLACVGTVQMCAHTHLRLGAPGPHCAHGSALPRFCGMVQFPGDVRRQALLQLCLLLCHRFPLIRKTTASQVYETLLTYSDVVGADVLDEVVTVLSDTAWDAELAVVREQRNRLCDLLGVPRPQLVPQPGAC

SEQ ID NO: 81401 - protein, 107 aa, Homo sapiens
MVFMNPSHHCFHYKTPPSSSGEHNEPRRLMGLTQPEHLQGIECAKQTKQMVDCSHYKKLPPGQQRFCHHMYDPICGSDGKTYKNDCFFCSKVKKTDGTLKFVHFGKC

SEQ ID NO: 81402 - protein, 135 aa, Homo sapiens
  MOD_RES (1)..(1): Any amino acid
XVKRNYSRLIPMLKNVVALDVEVATNRIYWCDLSYRKIYSAYMDKASDPKEQEVLIDEQLHSPEGLAVDWVHKHIYWTDSGNKTISVATVDGGRRRTLFSRNLSEPRAIAVDPLRGSAEPALVLGRLQATPTVQH

SEQ ID NO: 81403 - protein, 42 aa, Homo sapiens
MASRGVVGIFFLSAVPLVCLELRRGIPDIGKCDFFPSTVTAG

SEQ ID NO: 81404 - protein, 201 aa, Homo sapiens
MAHLLGSQACMESLRTDLTDLQGAIVDVFSRAGPVRFPSWKFPDRMACDLDMVALLEHYDHVPGDPEFTQLSHAVLLELVIDRLLLLLQSCMSYLENLGSEQMMPPAQAAGPCMSVGLTVRRFWDSLLRLGTLHQQPLPQKGANQRETPTSKPTTKGEPARSPEYLTTKLIKPSSPVLGLPQTCQEPESIPVRASLQFPAT

SEQ ID NO: 81405 - protein, 933 aa, Homo sapiens
  MOD_RES (1)..(1): Any amino acid
XVPLRVVNRKRPAREDCRGLTGPLQSLVPSADGDADNCCVQIMGGYFTWTPDGIPTLSNITIRIPRGQLTMIVGQVGCGKSSLLLAALGEMQKVSGAVFWSSSLPDSEIGEDPSPERETATDLDIRKRGPVAYASQKPWLLNATVEENIIFESPFNKQRYKMVIEACSLQPDIDILPHGDQTQIGERGINLSGGQRQRISVARALYQHANVVFLDDPFSALDIHLSDHLMQAGILELLRDDKRTVVLVTHKLQYLPHADWIIAMKDGTIQREGTLKDFQRSECQLFEHWKTLMNRQDQELEKETVTERKATEPPQGLSRAMSSRDGLLQDEEEEEEEAAESEEDDNLSSMLHQRAEIPWRACAKYLSSAGILLLSLLVFSQLLKHMVLVAIDYWLAKWTDSALTLTPAARNCSLSQECTLDQTVYAMVFTVLCSLGIVLCLVTSVTVEWTGLKVAKRLHRSLLNRIILAPMRFFETTPLGSILNRFSSDCNTIDQHIPSTLECLSRSTLLCVSALAVISYVTPVFLVALLPLAIVCYFIQKYFRVASRDLQQLDDTTQLPLLSHFAETVEGLTTIRAFRYEARFQQKLLEYTDSNNIASLFLTAANRWLEVRMEYIGACVVLIAAVTSISNSLHRELSAGLVGLGLTYALMVSNYLNWMVRNLADMELQLGAVKRIHGLLKTEAESYEGLLDQGKIQIQNLSVRYDSSLKPVLKHVNALIAPGQKIGICGRTGSGKSSFSLAFFRMVDTFEGHIIIDGIDIAKLPLHTLRSRLSIILQDPVLFSGTIRFNLDPERKCSDSTLWEALEIAQLKLVVKALPGGLDAIITEGGENFSQGQRQLFCLARAFVRKTSIFIMDEATASIDMATENILQKVVMTAFADRTVVTIAHRVHTILSADLVIVLKRGAILEFDKPEKLLSRKDSVFASFVRADK

SEQ ID NO: 81406 - protein, 338 aa, Homo sapiens
MPSEQKQLFCDEKQTTLKKDYDVKNEIVDRSAPKPKISGSIHYALKNVKIDLPKINIPNEVLLKHEVDKYRKLFQSKQQTARKSISIKTVSCVEECTLLHKSERAEEEGVKMSAKILNFSCLKCRDNTRYSPNDLQKHFQMWHHGELPSYPCEMCNFSANDFQVFKQHRRTHRSTLVKCDICNNESVYTLLNLTKHFTSTHCVNGNFQCEKCKFSTQDVGTFVQHIHRHNEIHYKCGKCHHVCFTKGELQKHLHIHSGTFPFTCQYCSYGATRREHLVRHVITLHKEHLYAKEKLEKDKYEKRMAKTSAGLKLILKRYKIGASRKTFWKRKKINSGSD

SEQ ID NO: 81407 - protein, 99 aa, Homo sapiens
MAPHLRRDSKKESCFELTSQDRRSYEFTATSPAEARDWVDQISFLLKDLSSLTIPYEEDEEEEEKEETYDDIDGFDSPSCGSQCRPTILPGSVGIKEPT

SEQ ID NO: 81408 - protein, 142 aa, Homo sapiens
MTVSGKKQTMGFEVPGVSSEENGHSFHTPQKGPPIEDAIASSDVLETASKSANPPHTIQASEEQSSTPAPVKKSGKLRQQIDVKAELEKRQGGKQLLNLVVIGHVDAGKSTLMGHMLYLLGNINKRTMHKYEQESKKAGKAS

SEQ ID NO: 81409 - protein, 104 aa, Homo sapiens
MLHSFTLRQQLQTTRQELSHALYQHDAACRVIARLTKEVTAAREALATLKPQAGLIVPQAVPSSQPSVVGAGEPMDLGELVGMTPEIIQKLQDKATVLTTERKK

SEQ ID NO: 81410 - protein, 380 aa, Homo sapiens
MKSWQLIAVVGDALQDIKADCNTCVEIEDRKVSRQQMNCEREQLRGNQEAAAAPDTMAQPYASAQFAPPQNGIPAEYTAPHPHPAPEYTGQTTVPEHTLNLYPPAQTHSEQSPADTSAQTVSGTATQFGKILDVEIIFNERGSKVNNATARVMTNKKTVNPYTNGWKLNPVVGAVYSPEFYAGTVLLCQANQEGSSMYSAPSSLVYTSAMPGFPYPAATAAAAYRGAHLRGRGRTVYNTFRAAAPPPPIPAYGGVVYQDGFYGADIYGGYAAYRYAQPTPATAAAYSDRNQFVFVAADEISCNTSAVTDEFMLPTPTTTHLLQPPPTALVPCPKVPAPAQTSEELSCTLPGLCCQAAENLTASPPLLQFMFKVIVAQERK

SEQ ID NO: 81411 - protein, 341 aa, Homo sapiens
MWATLPLLCAGAWLLGVPVCGAAELCVNSLEKFHFKSWMSKHRKTYSTEEYHHRLQTFASNWRKINAHNNGNHTFKMALNQFSDMSFAEIKHKYLWSEPQNCSATKSNYLRGTGPYPPSVDWRKKGNFVSPVKNQVCLAISILSLQNGHTPRQYTRKNNSKGPQNHHKHIPASVSSRHLSSPLPLRGQGGQHFSRLLWRMQKFLFIGLKFTPFLPHAPDFPIGPRSLLQSHPKRYVPCAHLDTRTPCISSSRLHLLRATRVQPLPWLAASLWLVHVSCISKLLMAGAGLRGPCCGAQRAWQGERPCLPPWGSSLGASQHRPCPRESGPCPRCSPGLLRPLP

SEQ ID NO: 81412 - protein, 298 aa, Homo sapiens
  MOD_RES (1)..(1): Any amino acid
XPANLLSSHRSLVQRVETISLGEHPCDRGEQVTLFLFNDCLEIARKRHKVIGTFRSPHGQTRPPASLKHIHLMPLSQIKKVLDIRETEDCHNAFALLVRPPTEQANVLLSFQMTSDELPKENWLKMLCRHVANTICKADAENLIYTADPESFEVNTKDMDSTLSRASRAIKKTSKKVTRAFSFSKTPKRALRRALMTSHGSVEGRSPSSNDKHVMSRLSSTSSLAITHSVSTSNVIGFTKHVYVQRLNSTGGRSQYSWFQSVRHSAFRASFSEILEGNTDFSNFKKVLSKSSLTFVKN

SEQ ID NO: 81413 - protein, 217 aa, Homo sapiens
MQQVLENLTELPSSTGAEEIDLIFLKGIMENPIVKSLAKAHERLEDSKLEAVSDNNLELVNEILEDITPLINVDENVAELVGILKEPHFQSLLEAHDIVASKCYDSPPSSPEMNNSSINNQLLPVDAIRILGIHKRAGEPLGVTFRVENNDLVIARILHGGMIDRQGLLHVGDIIKEVNGHEVGNNPKELQELLKNISGSVTLKILPSYRDTITPQQ

SEQ ID NO: 81414 - protein, 78 aa, Homo sapiens
  MOD_RES (1)..(1): Any amino acid
XYGFQITAYFLKRGIRLRCIRSTQNAELCVFPDRFVVCVSQLAFSRDLLASQNEDLDNQSTIACFLLPEGRGKSTLHN

SEQ ID NO: 81415 - protein, 153 aa, Homo sapiens
MGNACWELYCLEHGIQPDGQMPSDKTIGGGDDSFTTFFCETGAGKHVPRAVFVDLEPTVIDEIRNGPYRQLFHPEQLITGKEDAANNYARGHYTIGKEIIDPVLDRIRKLSDQCTGLQGFLVFHSFGGGTGSGFTSLLMERLSVDYGKKSKLE

SEQ ID NO: 81416 - protein, 748 aa, Homo sapiens
  MOD_RES (1)..(1): Any amino acid
XACSNPSQQVRSRPWSRHHSKASWAEFSILRELLAQDVLCDVSKPYRLATPVYASLTPRSRPRPPKDSQASPGRPSSVEEVRIAASPKSTGPRPSLRPLRLEVKREVRRPARLQQQEEEDEEEEEEEEEEEKEEEEEWGRKRPGRGLPWTKLGRKLESSVCPVRRSRRLNPELGPWLTFADEPLVPSEPQGALPSLCLAPKAYDVERELGSPTDEDSGQDQQLLRGPQIPALESPCESGCGDMDEDPSCPQLPPRDSPRCLMLALSQSDPTFGKKSFEQTLTVELCGTAGLTPPTTPPYKPTEEDPFKPDIKHSLGKEIALSLPSPEGLSLKATPGAAHKLPKKHPERSELLSHLRHATAQPASQAGQKRPFSCSFGDHDYCQVLRPEGVLQRKVLRSWEPSGVHLEDWPQQGAPWAEAQAPGREEDRSCDAGAPPKDSTLLRDHEIRASLTKHFGLLETALEEEDLASCKSPEYDTVFEDSSSSSGESSFLPEEEEEEGEEEEEDDEEEDSGVSPTCSDHCPYQSPPSKANRQLCSRSRSSSGSSPCHSWSPATRRNFRCESRGPCSDRTPSIRHARKRREKAIGEGRVVYIQNLSSDMSSRELKRRFEVFGEIEECEVLTRNRRGEKYGFITYRCSEHAALSLTKGAALRKRNEPSFQLSYGGLRHFCWPRYTDYGWQAVPTVQRSSQLPKALGCSHSTVPTHSGRFFNHPVFVSCSLPSPLPCLFTPMPRFQFRRGPSCVREKQV

SEQ ID NO: 81417 - protein, 57 aa, Homo sapiens
MGMCSRQERIQKDIDVVIQKSRAEKDCLFAVYPTQYMYLKITQIIHMCQVQRMMKMC

SEQ ID NO: 81418 - protein, 203 aa, Homo sapiens
NSLLGLPSFYRSYFSQFRKINTLESVDVHCFGHLLYEMTYGRPPDSVPVDSFPPAPSMAVVAVLESTLSCEACKNGMPTISRLLQMPLFSDVLLTTSEKPQFKIPTKLKEALRIAKECIEKRLIEEQKQIHQHRRLTRAQSHHGSEEERKKRKILARKKSKRSALENSEEHSAKYSNSNNSAGSGASSPLTSPSSPTPPSTSG

SEQ ID NO: 81419 - protein, 258 aa, Homo sapiens
  MOD_RES (1)..(1): Any amino acid
XQDMRRLVHDLLPPEVCSLLNPAAIYANNEISLRDVEVYGFDYDYTLAQYADALHPEIFSTARDILIEHYKSLLMKIDAFHYVQLGTAYRGLQPVPDEEGPSIKQFMDIFSLPEMALLSCVVDYFLGHSLEFDQAHLYKDVTDAIRDVHVKGLMYQWIEQDMEKYILRGDETFAVLSRLVAHGKQLFLITNSPFSFVDKGMRHMVGPDWRQLFDVVIVQADKPSFFTDRRKPFRKLDEKGSLQWDRITRLEKGKIYRQ

SEQ ID NO: 81420 - protein, 154 aa, Homo sapiens
MSNRPNNNPGGSLRRSQRNTAGAQPQDDSIGGRSCSSSSAVIVPQPEDPDRANTSERQKTGQVPKKDNSRGVKRSASPDYNRTNSPSSAKKPKALQHTESPSETNKPHSKSKKRHLDQEQQLKSAQSPSTSKAHTRKSGATGGSRSQKRKRTES

SEQ ID NO: 81421 - protein, 124 aa, Homo sapiens
MFYAHFVLSKRGPLAKIWLAAHWDKKLTKAHVFECNLESSVESIISPKVKMALRTSGHLLLGVVRIYHRKAKYLLADCNEAFIKIKMAFRPGVVDLPEENREAAYNAITLPEEFHDFDQPLPDL

SEQ ID NO: 81422 - protein, 727 aa, Homo sapiens
MIDSVKLRRDSAADFFSHYEYLCALQNSVPLPAVRACLREGVLDFNADRLRGVDWAPLLSTLKINKDLPLVSIKSFFQPWLGDTGSDMNKFCRSRVPAIRYKDVTFQLCKALKGCLSISSVLKNLELNGLILRERDLTILAKGLNKSASLVHLSLANCPIGDGGLEIICQGIKSSITLKTVNFTGCNLTWQGADHMAKILKYQTMRRHEETWAESLRYRRPDLDCMAGLRRITLNCNTLIGDLGACAFADSLSEDLWLRALDLQQCGLTNEGAKALLEALETNTTLVVLDIRKNPLIDHSMMKAVIKKVLQNGRSAKSEYQWITSPSVKEPSKTAKQKRRTIILGSGHKGKATIRIVIWRHRGLATKKPVSSGRKHSLGKEYYAPAPLPPGVSGFLPWRTAERAKRHRGFPLIKTRDICNQLQQPGFPVTVTVESPSSSEVEEVDDSSESVHEVPEKTSIEQEALQEKLEECLKQLKEERVIRLKVDKRVSELEHENAQLRNINFSLSEALHAQSLTNMILDDEGVLGSIENSFQKFHAFLDLLKDAGLGQLATMAGIDQSDFQLLGHPQMTSTVSNPPKEEKKALEDEKPEPKQNALGQMQNIQVSICMQSAYNEGTLMKFQKITGDARIPLPLDSFPVPVSTPEGLGTSSNNLGVPATEQRQESFEGFIARMCSPSPDATSGTGSQRKEEELSRNSRSSSEKKTKTGEYTKKHSDKQHPGKDLHS

SEQ ID NO: 81423 - protein, 446 aa, Homo sapiens
MFTPKLEIMLEPKVWREAATQVFFALGLGFGGVIAFSSYNKRDNNCHFDAVLVSFINFFTSVLATLVVFAVLGFKANVINEKCITQNSETIMKFLKMGNISQDIIPHHINLSTVTAEDYHLVYDIIQKVKEEEFPALHLNSCKIEEELNKAVQGTGLAFIAFTEAMTHFPASPFWSVMFFLMLVNLGLGSMFGTIEGIVTPIVDTFKVRKEILTVICCLLAFCIGLIFVQRSGNYFVTMFDDYSATLPLLIVVILENIAVCFVYGIDKFMEDLKDMLGFAPSRYYYYMWKYISPLMLLSLLIASVVNMGLSPPGYNAWIEDKASEEFLSYPTWGLVVCVSLVVFAILPVPVVFIVRRFNLIDDSSGNLASVTYKRGRVLKEPVNLEGDDTSLIHGKIPSEMPSPNFGKNIYRKQSGSPTLDTAPNGRYGIGYLMADIMPDMPESDL

SEQ ID NO: 81424 - protein, 219 aa, Homo sapiens
MQEPLLGAEGPDYDTFPEKPPPSPGDRARVGTLQNKRVFLATFAAVLGNFSFGYALVYTSPVIPALERSLDPDLHLTKSQASWFGSVFTLGAAAGGLSAMILNDLLGRKLSIMFSAVPSAAGYALMAGAHGLWMLLLGRTLTGFAGGLTAACIPVYVSEIAPPGVRGALGATPQLMAVFGSLSLYALGTKRPCGRWPGCVGRTSMSTGSSSRSRTTSGD

SEQ ID NO: 81425 - protein, 39 aa, Homo sapiens
MTDTVFSNSSNRWMYPSDRPLQSNDKEQLQAGWSVHPGG

SEQ ID NO: 81426 - protein, 566 aa, Homo sapiens
MSDNQSWNSSGSEEDPETESGPPVERCGVLSKWTNYIHGWQDRWVVLKNNALSYYKSEDETEYGCRGSICLSKAVITPHDFDECRFDISVNDSVWYLRAQDPDHRQQWIDAIEQHKTESGYGSESSLRRHGSMVSLVSGASGYSATSTSSFKKGHSLREKLAEMETFRDILCRQVDTLQKYFDACADAVSKDELQRDKVVEDDEDDFPTTRSDGDFLHSTNGNKEKLFPHVTPKGINGIDFKGEAITFKATTAGILATLSHCIELMVKREDSWQKRLDKETEKKRRTEEAYKNAMTELKKKSHFGGPDYEEGPNSLINEEEFFDAVEAALDRQDKIEEQSQSEKVRLHWPTSLPSGDAFSSVGTHRFVQKVYRREVEENGIVLDPLKATHAVKGVTGHEVCNYFWNVDVRNDWETTIENFHVVETLADNAIIIYQTHKRVWPASQRDVLYLSVIRKIPALTENDPETWIVCNFSVDHDSAPLNNRCVRAKINVAMICQTLVSPPEGNQEISRDNILCKITYVANVNPGGWAPASVLRAVAKREYPKFLKRFTSYVQEKTAGKPILF

SEQ ID NO: 81427 - protein, 59 aa, Homo sapiens
MVVDSSNTALRDNEIRSMFRKLHNSYTDVMCNPFYNPGDRIQSSRAFDNMVTSMMIQVC

SEQ ID NO: 81428 - protein, 95 aa, Homo sapiens
MSTEGGFGGTSSSDAQQSLQSFWPRVMEEIRNLTVMISAEAPVLFAKAAQIFITELTLRAWIHTEDNKRRTLQRNDIAMAITKFDQFDFLIDIVP

SEQ ID NO: 81429 - protein, 449 aa, Homo sapiens
  MOD_RES (1)..(1): Any amino acid
XPRALQYEQTLMYGRYTQDLGAFAKEEAARIRLGGPEPWKGPPSSRAAPELLEYGRSRCARCRVCSVRCHKFLVSRVGEDWIFLVLLGLLMALVSWVMDYAIAACLQAQQWMSRGLNTSILLQYLAWVTYPVVLITFSAGFTQILAPQAVGSGIPEMKTILRGVVLKEYLTLKTFIAKVIGLTCALGSGMPLGKENESRNTEMLAAACAVGVGCCFAAPIGGVLFSIEVTSTFFAVRNYWRGFFAATFSAFIFRVLAVWNRDEETITALFKTRFRLDFPFDLQELPAFAVIGIASGFGGALFVYLNRKIVQVMRKQKTINRFLMRKRLLFPALVTLLISTLTFPPGFGQFMAGQLSQKETLVTLFDNRTWVRQGLVEELEPPSTSQAWNPPRANVFLTLVIFILMKHLGVWWVKAWLPGSQMEFIRTAAPTGLCLGATLWSGQLRWQER

SEQ ID NO: 81430 - protein, 80 aa, Homo sapiens
MDGVSSEANEENDNIERPVRRRHSSILKPPRSPLQDLRGPHLDTETPTEQSPRQFYCKHTTYSRRPDVKSICLPTQDTDL

SEQ ID NO: 81431 - protein, 1006 aa, Homo sapiens
VMLQNVSKESFERTINIAKGNSSLGMTVSANKDGLGMIVRSIIHGGAISRDGRIAIGDCILSINEESTISVTNAQARAMLRRHSLIGPDIKITYVPAEHLEEFKISLGQQSGRVMALDIFSSYTGRDIPELPEREEGEGEESELQNTAYSNWNQPRRVELWREPSKSLGISIVGGRGMGSRLSNGEVMRGIFIKHVLEDSPAGKNGTLKPGDRIVEAPSQSESEPEKAPLCSVPPPPPSAFAEMGSDHTQSSASKISQDVDKEDEFGYSWKNIRERYGTLTGELHMIELEKGHSGLGLSLAGNKDRSRMSVFIVGIDPNGAAGKDGRLQIADELLEINGQILYGRSHQNASSIIKCAPSKVKIIFIRNKDAVNQMAVCPGNAVEPLPSNSENLQNKETEPTVTTSDAAVDLSSFKNVQHLELPKDQGGLGIAISEEDTLSGVIIKSLTEHGVAATDGRLKVGDQILAVDDEIVVGYPIEKFISLLKTAKMTVKLTIHAENPDSQAVPSAAGAASGEKKNSSQSLMVPQSGSPEPESIRNTSRSSTPAIFASDPATCPIIPGCETTIEISKGRTGLGLSIVGGSDTLLGAIIIHEVYEEGAACKDGRLWAGDQILEVNGIDLRKATHDEAINVLRQTPQRVRLTLYRDEAPYKEEEVCDTLTIELQKKPGKGLGLSIVGKRNDTGVFVSDIVKGGIADADGRLMQGDQILMVNGEDVRNATQEAVAALLKCSLGTVTLEVGRIKAGPFHSERRPSQSSQVSEGSLSSFTFPLSGSSTSESLESSSKKNALASEIQGLRTVEMKKGPTDSLGISIAGGVGSPLGDVPIFIAMMHPTGVAAQTQKLRVGDRIVTICGTSTEGMTHTQAVNLLKNASGSIEMQVVAGGDVSVVTGHQQEPASSSLSFTGLTSSSIFQDDLGPPQCKSITLERGPDGLGFSIVGGYGSPHGDLPIYVKTVFAKGAASEDGRLKRGDQIIAVNGQSLEGVTHEEAVAILKRTKGTVTLMVLS

SEQ ID NO: 81432 - protein, 950 aa, Homo sapiens
  MOD_RES (1)..(1): Any amino acid
XSEHVLCMVLYLIELGLENSAEEESDEEASVGGPERCHDSWFPGSNLVSNMRHFINYVRVRVPETAPEVKRDSPASTSSDNLGSLQNSGTAQVFSLVAERRKKFQEIINRSSSEANQVVRPKTSSKWSAPGSAPQLTTAILEIKESILSLLIKLHHKLSGKQNSYYPPWLDDIEILIQPEIPKYSHGDGITAVERILLKAASQSRMNKRIIEEICRKVTPPVPPKKVTAAEKKTLDKEERRQKARERQQKLLAEFASRQKSFMETAMDVDSPENDIPMEITTAEPQVSEAVYDCVICGQSGPSSEDRPTGLVVLLQASSVLGQCRDNVEPKKLPISEEEQIYPWDTCAAVHDVRLSLLQRYFKDSSCLLAVSIGWEGGVYVQTCGHTLHIDCHKSYMESLRNDQVLQGFSVDKGEFTCPLCRQFANSVLPCYPGSNVENNPWQRPSNKSIQDLIKEVEELQGRPGAFPVSISSETNLSKEMESVMKDIKNTTQKKYRDYSKTPGSPDNDFLFMYSVARTNLELELIHRGGNLCSGGASTAGKRSCLNQLFHVLALHMRLYSIDSEYNPWRKLTQLEEMNPQLGYEEQQPEVPILYHDVTSLLLIQILMMPQPLRKDHFTCIVKVLFTLLYTQALAALSVKCSEEDRSAWKHAGALKKSTCDAEKSYEVLLSFVISELFKGKLYHEEGTQECAMVNPIAWSPESMEKCLQDFCLPFLRITSLLQHHLFGEDLPSCQEEEEFSVLASCLGLLPTFYQTEHPFISASCLDWPVPAFDIITQWCFEIKSFTERHAEQGKALLIQESKWKLPHLLQLPENYNTIFQYYHRKTCSVCTKVPKDPAVCLVCGTFVCLKGLCCKQQSYCECVLHSQNCGAGTGIFLLINASVIIIIRGHRFCLWGSVYLDAHGEEDRDLRRGKPLYICKERYKVLEQQWISHTFDHINKRWGPHYNGL

SEQ ID NO: 81433 - protein, 223 aa, Homo sapiens
MSGTNLDGNDEFDEQLRMQELYGDGKDGDTQTDAGGEPDSLGQQPTDTPYEWDLDKKAWFPKITEDFIATYQANYGFSNDGASSSTANVEDVHARTAEEPPQEKAPEPTDARKKGEKRKAESGWFHVEEDRNTNVYVSGLPPDITVDEFIQLMSKFGIIMRDPQTEEFKVKLYKDNQGNLKGDGLCCYLKRESVELALKLLDEDEIRGYKLHVEVAKFQLKGE

SEQ ID NO: 81434 - protein, 120 aa, Homo sapiens
MGRKKIQITRIMDERNRQVTFTKRKFGLMKKAYELSVLCDCEIALIIFNSTNKLFQYASTDMDKVLLKYTEYNEPHESRTNSDIVEALNKKENKGCESPDPDSSYALTPRTEEKYKKINE

SEQ ID NO: 81435 - protein, 440 aa, Homo sapiens
NSSGADGGDTPPLPSPPDKGDNASNCDCRAWDYGIRAGLVQNVVSKWDLVCDNAWKVHIAKFSLLVGLIFGYLITGCIADWVGRRPVLLFSIIFILIFGLTVALSVNVTMFSTLRFFEGFCLAGIILTLYALRIELCPPGKRFMITMVASFVAMAGQFLMPGLAALCRDWQVLQALIICPFLLMLLYWSIFPESLRWLMATQQFESAKRLILHFTQKNRMNPEGDIKGVIPELEKELSRRPKKVCIVKVVGTRNLWKNIVVLCVNSLTGYGIHHCFARSMMGHEVKVPLLENFYADYYTTASIALVSCLAMCVVVRFLGRRGGLLLFMILTALASLLQLGLLNLIGKYSQHPDSGMSDSVKDKFSIAFSIVGMFASHAVGSLSVFFCAEITPTVIRCVMGDTPGDAGFSEIKDESLAPGWCGINQRQLCLWLWTHQLRGS

SEQ ID NO: 81436 - protein, 166 aa, Homo sapiens
MVTLAELLVLLAALLATVSGYFVSIDAHAEECFFERVTSGTKMGLIFEVAEGGFLDIDVEITGPDNKGIYKGDRESSGKYTFAAHMDGTYKFCFSNRMSTMTPKIVMFTIDIGEAPKGQDMETEGGGDTWDAHQNKLEEMINELAVAMTAVKHEQEYMEVRERIHR

SEQ ID NO: 81437 - protein, 150 aa, Homo sapiens
MVKNVLERPEDQRLIYSGKLLLDHQCLRDLLPKVAESTEEPAGSNRGQYPEDSSSDGLRQREVLRNLSSPGWENISRPEAAQQAFQGLGPGFSGYTPYGWLQLSWFQQIYARQYYMQYLAATAASGAFVPPPSAQEIPVVSAPAPAPIHN

SEQ ID NO: 81438 - protein, 258 aa, Homo sapiens
YSIFILYRNRVPLNEIVIRALDLVTVVVPPALPAAMTVCTLYAQSRLRRQGIFCIHPLRINLGGKLQLVCFDKVLEEEPAADSAFGTQVLAVMRPPLWEPQLQAMRMSVVVAWPGATQPEAYVKGSPELVAGLCNPETVPTDFAQMLQSYTAAGYRVVALASKPLPTVPSLEAAQQLTRDTVEGDLSLLGLLVMRNLLKPQTTPVIQALRRTRIRAVMVTGDNLQTAVTVARGCGMVAPQEHLIIVHATHPERGQPAS

SEQ ID NO: 81439 - protein, 400 aa, Homo sapiens
MQNSHSGVNQLGGVFVNGRPLPDSTRQKIVELAHSGARPCDISRILQTHADAKVQVLDNQNVSNGCVSKILGRYYETGSIRPRAIGGSKPRVATPEVVSSINRVLRNLASEKQQMGADGMYDKLRMLNGQTGSWGTRPGWYPGTSVPGQPTQDGCQQQEGGGENTNSISSNGEDSDEAQMRLQLKRKLQRNRTSFTQEQIEALEKEFERTHYPDVFARERLAAKIDLPEARIQVWFSNRRAKWRREEKLRNQRRQASNTPSHIPISSSFSTSVYQPIPQPTTPVSSFTSGSMLGRTDTALTNTYSALPPMPSFTMANNLPMQPPVPSQTSSYSCMLPTSPSVNGRSYDTYTPPHMQTHMNSQPMGTSGTTSTGLISPGVSVPVQVPGSEPDMSQYWPRLQ

SEQ ID NO: 81440 - protein, 2396 aa, Homo sapiens
MNINDGGRRRFEDNEHTLRIYPGAISEGTIYCPIPARKNSTAAEVIESLINKLHLDKTKCYVLAEVKEFGGEEWILNPTDCPVQRMMLWPRMALENRLSGEDYRFLLREKNLDGSIHYGSLQSWLRVTEERRRMMERGFLPQPQQKDFDDLCSLPDLNEKTLLENLRNRFKHEKIYTYVGSILIVINPFKFLPIYNPKYVKMYDNHQLGKLEPHIYAVADVAYHAMLQRKKNQCIVISGESGSGKTQSTNFLIHHLTALSQKGFASGVEQIILGAGPVLEAFGNAKTAHNNNSSRFGKFIQVNYQETGTVLGAYVEKYLLEKSRLVYQEHNERNYHVFYYLLAGASEDERSAFHLKQPEEYHYLNQITKKPLRQSWDDYCYDSEPDCFTVEGEDLRHDFERLQLAMEMVGFLPKTRRQIFSLLSAILHLGNICYKKKTYRDDSIDICNPEVLPIVSELLEVKEEMLFEALVTRKTVTVGEKLILPYKLAEAVTVRNSMAKSLYSALFDWIVFRINHALLNSKDLEHNTKTLSIGVLDIFGFEDYENNSFEQFCINFANERLQHYFNQHIFKLEQEEYRTEGISWHNIDYIDNTCCINLISKKPTGLLHLLDEESNFPQATNQTLLDKFKHQHEDNSYIEFPAVMEPAFIIKHYAGKVKYGVKDFREKNTDHMRPDIVALLRSSKNAFISGMIGIDPVAVFRWAILRAFFRAMVAFREAGKRNIHRKTGHDDTAPCAILKSMDSFSFLQHPVHQRSLEILQRCKEEKYSITRKNPRTPLSDLQGMNALNEKNQHDTFDIAWNGRTGIRQSRLSSGTSLLDKDGIFANSTSSKLLERAHGILTRNKNFKSKPALPKHLLEVNSLKHLTRLTLQDRITKSLLHLHKKKKPPSISAQFQASLSKLMETLGQAEPYFVKCIRSNAEKLPLRFSDVLVLRQLRYTGMLETVRIRQSGYSSKYSFQDFVSHFHVLLPRNIIPSKFNIQDFFRKINLNPDNYQVGKTMVFLKEQERQHLQDLLHQEVLRRIILLQRWFRVLLCRQHFLHLRQASVIIQRFWRNYLNQKQVRDAAVQKDAFVMASAAALLQASWRAHLERQRYLELRAAAIVIQQKWRDYYRRRHMAAICIQARWKAYRESKRYQEQRKKIILLQSTCRGFRARQRFKALKEQRLRETKPEVGLVNIKGYGSLEIQGSDPSGWEDCSFDNRIKAIEECKSVIESNRISRESSVDCLKESPNKQQERAQSQSGVDLQEDVLVRERPRSLEDLHQKKVGRAKRESRRMRELEQAIFSLELLKVRSLGGISPSEDRRWSTELVPEGLQSPRGTPDSESSQGSLELLSYEESQKSKLESVISDEGDLQFPSPKISSSPKFDSRDNALSASNETSSAEHLKDGTMKEMVVCSSESITCKPQLKDSFISNSLPTFFYIPQQDPLKTNSQLDTSIQRNKLLENEDTAGEALTLDINRETRRYHCSGKDQIVPSLNTESSNPVLKKLEKLNTEKEERQKQLQQQNEKEMMEQIRQQTDILEKERKAFKTIEKPRIGECLVAPSSYQSKQRVERPSSLLSLNTSNKGELNVLGSLSLKDAALAQKDSSSAHLPPKDRPVTVFFERKGSPCQSSTVKELSKTDRMGTQLNVACKLSNNRISKREHFRPTQSYSHNSDDLSREGNARPIFFTPKDNMSIPLVSKEALNSKNPQLHKEDEPAWKPVKLAGPGQRETSQRFSSVDEQAKLHKTMSQGEITKLAVRQKASDSDIRPQRAKMRFWAKGKQGEKKTTRVKPTTQSEVSPLFAGTDVIPAHQFPDELAAYHPTPPLSPELPGSCRKEFKENKEPSPKAKRKRSVKISNVALDSMHWQNDSVQIIASVSDLKSMDEFLLKKVNDLDNEDSKKDTLVDVVFKKALKEFRQNIFSFYSSALAMDDGKSIRYKDLYALFEQILEKTMRLEQRDSLGESPVRVWVNTFKVFLDEYMNEFKTSDCTATKVPKTERKKRRKKETDLVEEHNGHIFKATQYSIPTYCEYCSSLIWIMDRASVCKLCKYACHKKCCLKTTAKCSKKYDPELSSRQFGVELSRLTSEDRTVPLVVEKLINYIEMHGLYTEGIYRKSGSTNKIKELRQGLDTDAESVNLDDYNIHVIASVFKQWLRDLPNPLMTFELYEEFLRAMGLQERKETIRGVYSVIDQLSRTHLNTLERLIFHLVRIALQEDTNRMSANALAIVFAPCILRCPDTTDPLQSVQDISKTTTCVELIVVEQMNKYKARLKDISSLEFAENKAKTRLSLIRRSMGKGRIRRGNYPGPSSPVVVRLPSVSDVSEETLTSEAAMETDITEQQQAAMQQEERVLTEQIENLQKEKEELTFEMLVLEPRASDDETLESEASIGTADSSENLNMESEYAISEKSEA

SEQ ID NO: 81441 - protein, 318 aa, Homo sapiens
MAHQTGIHATEELKEFFAKARAGSVRLIKVVIEDEQLVLGASQEPVGRWDQDYDRAVLPLLDAQQPCYLLYRLDSQNAQGFEWLFLAWSPDNSPVRLKMLYAATRATVKKEFGGGHIKDELFGTVKDDLSFAGYQKHLSSCAAPAPLTSAERELQQIRINEVKTEISVESKHQTLQGLAFPLQPEAQRALQQLKQKMVNYIQMKLDLERETIELVHTEPTDVAQLPSRVPRDAARYHFFLYKHTHEGDPLESVVFIYSMPGYKCSIKERMLYSSCKSRLLDSVEQDFHLEIAKKVGALPRASPPQALSLQSPCGALGS

SEQ ID NO: 81442 - protein, 292 aa, Homo sapiens
  MOD_RES (1)..(1): Any amino acid
XKLEENLPILQQPTEKVLADTKELVSSKVSGAQEMVSSAKDTVATQLSEAVDATRGAVQSGVDKTKSVVTGGVQSVMGSRLGQMVLSGVDTVLGKSEEWADNHLPLTDAELARIATSLDGFDVASVQQQRQEQSYFMETVKQGVDQKLVEGQEKLHQMWLSWNQKQLQGPEKEPPKPEQVESRALTMFRDIAQQLQATCTSLGSSIQGLPTNVKDQVQQARRQVEDLQATFSSIHSFQDLSSSILAQSRERVASAREALDHMVEYVAQNTPVTWLVGPFAPGITEKAPEEKK

SEQ ID NO: 81443 - protein, 116 aa, Homo sapiens
MASCAEPSEPSAPLPAGVPPLEDFEVLDGVEDAEGEEEEEEEEEEEDDLSELPPLEDMGQPPAEEAEQPGALAREFLAAMEPEPAPAPAPEEWLDILGPGSQCPTHGRGGDGHGHC

SEQ ID NO: 81444 - protein, 115 aa, Homo sapiens
MVGEDADLPCHLFPTMSAETMELKWVSSSLRQVVNVYADGKEVEDRQSAPYRGRTSILRDGITAGKAALRIHNVTASDSGKYLCYFQDGDFYEKALVELKVAALGSNLHVEVKGY

SEQ ID NO: 81445 - protein, 332 aa, Homo sapiens
MTECTSLQFVSPFAFEAMQKVDVVCLASLSDPELRLLLPCLVRMALCAPADQSQSWAQDKKLILRLLSGVEAVNSIVALLSVDFHALEQDASKEQQLRHKLGGGSGESILVSQLQHGLTLEFEHSDSPRRLRLVLSELLAIMNKVSESNGEFFFKSSELFESPVYLEEAADVLCILQAELPSLLPIVDVAEALLHVRNGAWFLCLLVANVPDSFNEVCRGLIKNGERQDEESLGGRRRTDALRFLCKMNPSQALKVRGMVVEECHLPGLGVALTLDHTKNEACEDGVSDLVCFVSGLLLGTNAKVRTWFGTFIRNGQQVRVKYLYRLRIRIL

SEQ ID NO: 81446 - protein, 148 aa, Homo sapiens
MGCTLSAEDKAAVERSKMIDRNLREDGEKAAREVKLLLLGAGESGKSTIVKQMKIIHEAGYSEEECKQYKAVVYSNTIQSIIAIIRAMGRLKIDFGDSARADQTHMKRQLHIFNVSLKTSIKERTQRKYTPTSHVPQILRMCSLFLML

SEQ ID NO: 81447 - protein, 172 aa, Homo sapiens
MGDQPNLPYVLAFLYEAMRFSSFVPVTIPHATTANTSVLGYHIPKDTVVFVNQWSVNHDPLKWPNPENFDPARFLDKDGLINKDLTSRVMIFSVGKRRCIGEELSKMQLFLFISILAHQCDFRANPNEPAKMNFSYGLTIKPKSFKVNVTLRESMELLDSAVQNLQAKETCQ

SEQ ID NO: 81448 - protein, 30 aa, Homo sapiens
MYDNVLPPQSLKAKQEIRACHGKMEGITTF

SEQ ID NO: 81449 - protein, 63 aa, Homo sapiens
  MOD_RES (1)..(1): Any amino acid
XMDLDMELSLMQPLVPERGEPELAVKGLNSPSPGPHARGPTPAGCPGGLGRPSPGPAWGFNHL

SEQ ID NO: 81450 - protein, 385 aa, Homo sapiens
MCSEARLARRLRDALREEEPWAVEELLRCGADPNLVLEDGAAAVHLAAGARHPRGLRCLGALLRQGGDPNARSVEALTPLHVAAAWGCRRGLELLLSQGADPALRDQDGLRPLDLALQQGHLECARVLQDLDTRTRTRTRIGAETQEPEPAPGTPGLSGPTDETLDSIALQKQPCRGDNRDIGLEADPGPPSLPVPLETVDKHGSSASPPGHWDYSSDASFVTAVEVSGAEDPASDTPPWAGSLPPTRQGLLHVVHANQRVPRSQGTEAELNARLQALTLTPPNAAGFQSSPSSMPLLDRSPAHSPPRTPTPGASDCHCLWEHQTSIDSDMATLWLTEDEASSTGGREPVGPCRHLPVSTVSDLELLKGLRALGRLRTCQPEPSH

SEQ ID NO: 81451 - protein, 75 aa, Homo sapiens
MAAEADGPLKRLLVPILLPEKCYDQLFVQWDLLHDISCLLTLFSLLSPLPQDSPQQRPGAGHCGWLTSSKAAPGV

SEQ ID NO: 81452 - protein, 1005 aa, Homo sapiens
MKQSPALAPEERCRRAGSPKPVLRADDNNMGNGCSQKLATANLLRFLLLVLIPCICALVLLLVILLSYVGTLQKVYFKSNGSEPLVTDGEIQGSDVILTNTIYNQSTVVSTAHPDQHVPAWTTDASLPGDQSHRNTSACMNITHSQCQMLPYHATLTPLLSVVRNMEMEKFLKFFTYLHRLSCYQHIMLFGCTLAFPECIIDGDDSHGLLPCRSFCEAAKEGCESVLGMVNYSWPDFLRCSQFRNQTESSNVSRICFSPQQENGKQLLCGRGENFLCASGICIPGKLQCNGYNDCDDWSDEAHCNCSENLFHCHTGKCLNYSLVCDGYDDCGDLSDEQNCACHSQGLVECRNGQCIPSTFQCDGDEDCKDGSDEENCSVIQTSCQEGDQRCLYNPCLDSCGGSSLCDPNNSLNNCSQCEPITLELCMNLPYNSTSYPNYFGHRTQKEASISWESSLFPALVQTNCYKYLMFFSCTILVPKCDVNTGEHIPPCRALCEHSKERCESVLGIVGLQWPEDTDCSQFPEENSDNQTCLMPDEYVEECSPSHFKCRSGQCVLASRRCDGQADCDDDSDEENCGCKERDLWECPSNKQCLKHTVICDGFPDCPDYMDEKNCSFCQDDELECANHACVSRDLWCDGEADCSDSSDEWDCVTLSINVNSSSFLMVHRAATEHHVCADGWQEILSQLACKQMGLGEPSVTKLIQEQEKEPRWLTLHSNWESLNGTTLHELLVNGQSCESRSKISLLCTKQDCGRRPAARMNKRILGGRTSRPGRWPWQCSLQSEPSGHICGCVLIAKKWVLTVAHCFEGRENAAVWKVVLGINNLDHPSVFMQTRFVKTIILHPRYSRAVVDYDISIVELSEDISETGYVRPVCLPNPEQWLEPDTYCYITGWGHMGNKMPFKLQEGEVRIISLEHCQSYFDMKTITTRMICAGYESGTVDSCMGDSGGPLVCEKPGGRWTLFGLTSWGSVCFSKVLGPGVYSNVSYFVEWIKRQIYIQTFLLN

SEQ ID NO: 81453 - protein, 115 aa, Homo sapiens
  MOD_RES (1)..(1): Any amino acid
XTQMNSFLLSTASQQEIATLDNKIHETIETINQLKTQREFMLSFARDPQGFINDWLQSQCRDLKTMTDVVGNPEEERRAEFYFQPWAQEAVCRYFYSKVQQRRQELEQALGIRNT

SEQ ID NO: 81454 - protein, 168 aa, Homo sapiens
RNKLKRLIAKRPPLQSLQERGLLRDQVFGCQLESLCQREGDTVPSFLRLCIAAVDKRGLDVDGIYRVSGNLAVVQKLRFLVDREGRLDLDSTEWDDIHVVTGALKLFLRELPQPLVPPLLLPHFRAALALSESEQCLSQIQELIGSMPKPNHDTLRYLLEHLCRVIAH

SEQ ID NO: 81455 - protein, 131 aa, Homo sapiens
MIEYQIPVSFKDVVVGFTQEEWHRLSPAQRALYRDVMLETYSNLVSVGYEGTKPDVILRLEQEEAPWIGEAACPGCHCWGKCDKSSKRGTEGGWHLWNFVQHSSLKSLESPPRASATLMTLQPPCNPTAHI

SEQ ID NO: 81456 - protein, 79 aa, Homo sapiens
MSLHFLYYCSEPTLDVKIAFCQGFDKQVDVSYIAKHYNMSKSKVDNQFYSVEVGDSTFTVLKRYQNLKPIGSGAQGIVW

SEQ ID NO: 81457 - protein, 110 aa, Homo sapiens
MGSPGMVLGLLVQIWGNAFYSNVLYRPRGAPKKSEDCSGEGKDQRGQSIYSTSFPQPAPRQPHLASRPCPSPRPCPSPRPGHPVSMVRVSPRPSPTQQPRPKGFPKVGEE

SEQ ID NO: 81458 - protein, 124 aa, Homo sapiens
MECADEPCDAYEVEQTPQGFRSTLRAPSLLYKHIVGKRGDTRKKIEMETKTSISIPKPGQDGEIVITGQHRNGVISARTRIDVLLDTFRRKQPFTHFLAFFLNEVEVQEGFLRFQEEVLAKCSM

SEQ ID NO: 81459 - protein, 162 aa, Homo sapiens
MSASAPAAEGEGTPTQPASEKEPEMPGPREESEEEEDEDDEEEEEEEKEKSLIVEGKREKKKVERLTMQVSSLQREPFTIAQGKGQKLCEIERIHFFLSKKKTDELRNLHKLLYNRPGTVRPFYTLNLLVYYFTMESISVNVSDPLVQFPHFMTEQTEVYTY

SEQ ID NO: 81460 - protein, 140 aa, Homo sapiens
GITRVRNATDAVGIVLKELKRQSSLGMFHLLVAVDGINALWGRTTLKREDKSPIAPEELALVHNLRKMMKNDWEGFDALDPFIPILVSNYNPKEFESCIQYYLENNWLQHEKAPTEEGKKELLFLSNANPSLLERHCAYL

SEQ ID NO: 81461 - protein, 416 aa, Homo sapiens
MSSPTTSSLDTPLPGNGPPQPGAPSSSPTVKEEGPEPWPGGPDPDVPGTDEASSACSTDWVIPDPEEEPERKRKKGPAPKMLGHELCRVCGDKASGFHYNVLSCEGCKGFFRRSVVRGGARRYACRGGGTCQMDAFMRRKCQQCRLRKCKEAGMREQCVLSEEQIRKKKIRKQQQESQSQSQSPVGPQGSSSSASGPGASPGGSEAGSQGSGEGEGVQLTAAQELMIQQLVAAQLQCNKRSFSDQPKVTLGREDQIALLKASTIEIMLLETARRYNHETECITFLKDFTYSKDDFHRAGLQVEFINPIFEFSRAMRRLGLDDAEYALLIAINIFSADRPNVQEPGRVEALQQPYVEALLSYTRIKRPQDQLRFPRMLMKLVSLRTLSSVHSEQVFALRLQDKKLPPLLSEIWDVHE

SEQ ID NO: 81462 - protein, 71 aa, Homo sapiens
MDLGAITKYSALHAKPNGLILQYGTAGFRTKAEHLDHVMFRMGLLAVLRSKQTKSTIGVMVTASHNPETMV

SEQ ID NO: 81463 - protein, 555 aa, Homo sapiens
MGCLWGLALPLFFFCWEVGVSGSSAGPSTRRADTAMTTDDTEVPAMTLAPGHAALETQTLSAETSSRASTPAGPVPEAETRGSKRISPARETRSFTKTSPNFMVLIATSVETSAASGSPEGAGMTTVQTITGSDPEEAIFDTLCTDDSSEEAKTLTMDILTLAHTSTEAKGLSSESSASSDGPHPVITPSRASESSASSDGPHPVITPSRASESSASSDGPHPVITPSRASESSASSDGPHPVITPSWSPGSDVTLLAEALVTVTNIEVINCSITEIETTTSSIPGASDTDPIPTEGVKASSTSDPPALPDSTEAKPHITEVTASAETLSTAGTTESAAPDATIGTPLPTNSTIEREVTAPGATTLSGALATGNPLEETSALSVETPSYVKVSGAAPVSIEAGSAVGKTTSFAGSSASSYSPSEAALKNFTPSETLTTDIATKGPFPTSRDPLPSVPPTTTNSSRGTNSTLAKITTSAKTTMKPPTATPTTARTRPTTDMSAGENGGFLLLRLSVASPEDLTDPRVAERLMQQLHRELHAHAPHFQVSLLRVRRG

SEQ ID NO: 81464 - protein, 508 aa, Homo sapiens
VVSEEFRNQIVRELVTLPANRWREQLDYYARCSQAPGCGELLFDTDTWSLQIRKTGAQTATDFPHAIRIWYKTKPEGRSVTWTSDQSGRPCVYTVGSPINNRALFPCQEPPVAMSTWQATVRAAASFVVLMSGENSAKPTQLWEECSSWYYYVTMPMPASTFTIAVGCWTEMKMETWSSNDLATERPFSPSEANFRHVGVCSHMEYPCRFQNASATTQEIIPHRVFAPVCLTGACQETLLRLIPPCLSAAHSVLGAHPFSRLDVLIVPANFPSLGMARPSKDKTGHTSDSGASVIKHGLNPEKIFMQVHYLKGYFLLRFLAKRLGDETYFSFLRKFVHTFHGQLILSQDFLQMLLENIPEEKRLELSVENIYQDWLESSGIPKPLQRERRAGAECGLARQVRAEVTKWIGVNRRPRKRKRREKEEVFEKLLPDQLVLLLEHLLEQKTLSPRTLQSLQRTYHLQDQDAEVRHRWCELIVKHKFTKAYKSVERFLQEDQVGVIFQQMGIL

SEQ ID NO: 81465 - protein, 110 aa, Homo sapiens
MRPLTEEETRVMFEKIAKYIGENLQLLVDRPDGTYCFRLHNDRVYYVSEKIMKLAANISGDKLVSLGTCFGKFTKTHKFRLHVTALDYLAPYAKVCGAVSNSATGDEVKD

SEQ ID NO: 81466 - protein, 609 aa, Homo sapiens
MLLAPQGRSFSKKRMGLNRWKRFTRKPSPKRVEKASEFAVSNAFFTRNSDLPRSPWGQITDLKTSEQIEDHDEIYAEAQELVNDWLDTKLKQELASEEEGDAKNTVSSVTIMPEANGHLKYDKFDDLCGYLEEEEESTTVQKFIDHLLHKNVVDSAMMEDLGRKENQDKKQQKDPRLTMEMRHKQVKENRLRREKELEYQRIEKTLKKSAFLEAQCLVQEEKKRKALEAKKEEEEIQREMVKLRREIIERRRTVKAAWKIEKKRQEENSQNSSEKVMFQSTHILPDEEKMVKERKRKLKEVLIQTFKENQQCQKRYFAAWHKLILDHRIKLGKAGTLSDWKIQLKVLRAWRDYTRFQKLERETQALENDLREENRKQQLATEYNRKQVLRHCFTEWQHWHGAELLKRELALTKEETRKKMDALLQAASLGKLSANGLSGISLPEEATAMVGPPVKNGQETAVPPLWEKPPLGSSGCMLSPPLGRTTTGNLQGSLQNVSLSAPGNKQHKTLGAEPSQQPGSNETLRTTSQKAEPLCLGHFHNRHVFQQQLIEKQKKKLQEQQKTILELKKNLQLAEAQWAAEHALAVTEAQSHLLSKPREEEPRTCQMLV

SEQ ID NO: 81467 - protein, 94 aa, Homo sapiens
MIKSQESLTLEDVAVEFTWEEWQLLGPAQKDLYRDVMLENYSNLVSVGYQASKPDALFKLEQGEPWTVENEIHSQICPEIKKVDNHLQMHSQKQ

SEQ ID NO: 81468 - protein, 79 aa, Homo sapiens
QIRNRALIQYFSPYVSADMHRMAAAFNTTVAALEDELTQLILEGLISARVDSHSKSPPREGSQGELTPANSQSRMSTNM

SEQ ID NO: 81469 - protein, 380 aa, Homo sapiens
MATNGSKVADGQISTEVSEAPVANDKPKTLVVKVQKKAADLPDRDTWKGRFDFLMSCVGYAIGLGNVWRFPYLCGKNGGGAFLIPYFLTLIFAGVPLFLLECSLGQYTSIGGLGVWKLAPMFKGVGLAAAVLSFWLNIYYIVIISWAIYYLYNSFTTTLPWKQCDNPWNTDRCFSNYSMVNTTNMTSAVVEFWERNMHQMTDGLDKPGQIRWPLAITLAIAWILVYFCIWKGVGWTGKVVYFSATYPYIMLIILFFRGVTLPGAKEGILFYITPNFRKLSDSEVWLDAATQIFFSYGLGLGSLIALGSYNSFHNNVYRDSIIVCCINSCTSMFAGFVIFSIVGFMAHVTKRSIADVAASVDIPRAASPAVCGASLSPPPE

SEQ ID NO: 81470 - protein, 160 aa, Homo sapiens
MTEQMTLRGTLKGHNGWVTQIATTPQFPDMILSASRDKTIIMWKLTRDETNYGIPQRALRGHSHFVSDVVISSDGQFALSGSWDGTLRLWDLTTQIVSGSRDKTIKLWNTLGVCKYTVQDESHSEWVSCVRFSPNSSNPIIVSCGWDKLVKVWNLANCKL

SEQ ID NO: 81471 - protein, 145 aa, Homo sapiens
  MOD_RES (1)..(1): Any amino acid
XETRGYILEVYGVHFELPDLGPIGANGLANPRDFLIPIAWYEDRQVPGGYTVINKYQGKLFAAKQDVSPFNVVAWHGNYTPYKYNLKNFMVINSVAFDHADPSIFTVLTAKSVRPGVAIADFVIFPPRWGVADKTFRPPYYHNLA

SEQ ID NO: 81472 - protein, 116 aa, Homo sapiens
VKHFAINAAFSANERPRHHHVMPHANMNVHYIPAEKNVDLCKEMVDGLRITFDYTLPLVLLYPYEQAQYKKVTSSKFFLPIKESATSTNSPQRVSRPPVNQPPPKGAKLSQKHCSL

SEQ ID NO: 81473 - protein, 112 aa, Homo sapiens
MATDDEKLRLPMLRVVNRCVYSTTKAAVIGLTKSVAADFIQQGIRCNCVCPGTVDTPSLQERIQARGNPEEARNDFLKRQKTGRFATAEEIAMLCVYLASDEISFLFPVSSS

SEQ ID NO: 81474 - protein, 151 aa, Homo sapiens
MDPLAPLNPLIRGPRTPGLRRWIQSLALLLPNCSSSRIPTVPRPHSGLWVQSDFPLGFLSRTEPRLTRSCRGAFRSPRPLPKSGQADGTSEESLHLDIQKLKEKRDMLDKEISQFVSEGYSVDELEDHITQLHEYNDIKDVGQMLMGKLGE

SEQ ID NO: 81475 - protein, 697 aa, Homo sapiens
KQSFPCICKNPGTQKSCVPLSVQPTEPRLNYLDLKYSDMFKEINSTANGPGIYEMFGTPVYCHVRETERDENTYYREICSAPSGRRITNKCRSSHSERKSNIRTRLSQKKTHMKCPKTSFGIKQEHKVLISKEKSSKAVHSNLHDIENGDGISEPDWQIKSSGNEFLSSKDEIHPMNLAQTPEQSMKQNEFPPVSDLSIVEEVSMEESTGDRDISNNQILTTSLRDLQELEELHHQIPFIPSEDSWAVPSEKNSNKYVQQEKQNTASLSKVNASRILTNDLEFDSVSDHSKTLTNFSFQAKQESASSQTYQYWVHYLDHDSLANKSITYQMFGKTLSGTNSISQEIMDSVNNEELTDELLGCLAAELLALDEKDNNSCQKMANETDPENLNLVLRWRGSTPKEMGRETTKVKIQRHSSGLRIYDREEKFLISNEKKIFSENSLKSEEPILWTKGEILGKGAYGTVYCGLTSQGQLIAVKQVALDTSNKLAAEKEYRKLQEEVDLLKALKHVNIVAYLGTCLQENTVSIFMEFVPGGSISSIINRFGPLPEMVFCKYTKQILQGVAYLHENCVVHRDIKGNNVMLMPTGIIKLIDFGCARRLAWAGLNGTHSDMLKSMHGTPYWMAPEVINESGYGRKSDIWSIGCTVFEMATGKPPLASMDRMAAMFYIGAHRGLMPPLPDHFSENAADFVRMCLTR

SEQ ID NO: 81476 - protein, 1905 aa, Homo sapiens
MASGLGSPSPCSAGSEEEDMDALLNNSLPPPHPENEEDPEEDLSETETPKLKKKKKPKKPRDPKIPKSKRQKKELGDSSGEGPEFVEEEEEVALRSDSEGSDYTPGKKKKKKLGPKKEKKSKSKRKEEEEEEDDDDDSKEPKSSAQLLEDWGMEDIDHVFSEEDYRTLTNYKAFSQFVRPLIAAKNPKIAVSKMMMVLGAKWREFSTNNPFKGSSGASVAAAAAAAVAVVESMVTATEVAPPPPPVEVPIRKAKTKEGKGPNARRKPKGSPRVPDAKKPKPKKVAPLKIKLGGFGSKRKRSSSEDDDLDVESDFDDASINSYSVSDGSTSRSSRSRKKLRTTKKKKKGEEEVTAVDGYETDHQDYCEVCQQGGEIILCDTCPRAYHMVCLDPDMEKAPEGKWSCPHCEKEGIQWEAKEDNSEGEEILEEVGGDLEEEDDHHMEFCRVCKDGGELLCCDTCPSSYHIHCLNPPLPEIPNGEWLCPRCTCPALKGKVQKILIWKWGQPPSPTPVPRPPDADPNTPSPKPLEGRPERQFFVKWQGMSYWHCSWVSELQLELHCQVMFRNYQRKNDMDEPPSGDFGGDEEKSRKRKNKDPKFAEMEERFYRYGIKPEWMMIHRILNHSVDKKGHVHYLIKWRDLPYDQASWESEDVEIQDYDLFKQSYWNHRELMRGEEGRPGKKLKKVKLRKLERPPETPTVDPTVKYERQPEYLDATGGTLHPYQMEGLNWLRFSWAQGTDTILADEMGLGKTVQTAVFLYSLYKEGHSKGPFLVSAPLSTIINWEREFEMWAPDMYVVTYVGDKDSRAIIRENEFSFEDNAIRGGKKASRMKKEASVKFHVLLTSYELITIDMAILGSIDWACLIVDEAHRLKNNQSKFFRVLNGYSLQHKLLLTGTPLQNNLEELFHLLNFLTPERFHNLEGFLEEFADIAKEDQIKKLHDMLGPHMLRRLKADVFKNMPSKTELIVRVELSPMQKKYYKYILTRNFEALNARGGGNQVSLLNVVMDLKKCCNHPYLFPVAAMEAPKMPNGMYDGSALIRASGKLLLLQKMLKNLKEGGHRVLIFSQMTKMLDLLEDFLEHEGYKYERIDGGITGNMRQEAIDRFNAPGAQQFCFLLSTRAGGLGINLATADTVIIYDSDWNPHNDIQAFSRAHRIGQNKKVMIYRFVTRASVEERITQVAKKKMMLTHLVVRPGLGSKTGSMSKQELDDILKFGTEELFKDEATDGGGDNKEGEDSSVIHYDDKAIERLLDRNQDETEDTELQGMNEYLSSFKVAQYVVREEEMGEEEEVEREIIKQEESVDPDYWEKLLRHHYEQQQEDLARNLGKGKRIRKQVNYNDGSQEDRDWQDDQSDNQSDYSVASEEGDEDFDERSEAPRRPSRKGLRNDKDKPLPPLLARVGGNIEVLGFNARQRKAFLNAIMRYGMPPQDAFTTQWLVRDLRGKSEKEFKAYVSLFMRHLCEPGADGAETFADGVPREGLSRQHVLTRIGVMSLIRKKVQEFEHVNGRWSMPELAEVEENKKMSQPGSPSPKTPTPSTPGDTQPNTPAPVPPAEDGIKIEENSLKEEESIEGEKEVKSTAPETAIECTQAPAPASEDEKVVVEPPEGEEKVEKAEVKERTEEPMETEPKGAADVEKVEEKSAIDLTPIVVEDKEEKKEEEEKKEVMLQNGETPKDLNDEKQKKNIKQRFMFNIADGGFTELHSLWQNEERAATVTKKTYEIWHRRHDYWLLAGIINHGYARWQDIQNDPRYAILNEPFKGEMNRGNFLEIKNKFLARRFKLLEQALVIEEQLRRAAYLNMSEDPSHPSMALNTRFAEVECLAESHQHLSKESMAGNKPANAVLHKVLKQLEELLSDMKADVTRLPATIARIPPVAVRLQMSERNILSRLANRAPEPTPQQVAQQQ

SEQ ID NO: 81477 - protein, 65 aa, Homo sapiens
MQQRGAAGSRGCALFPLLGVLFFQALIRRRKRRVWRGFVSVALSAWIQTMKRHIDESLYDTRRVT

SEQ ID NO: 81478 - protein, 767 aa, Homo sapiens
MGRGSGTFERLLDKATSQLLLETDWESILQICDLIRQGDTQAKYAVNSIKKKVNDKNPHVALYALEVMESVVKNCGQTVHDEVANKQTMEELKDLLKRQVEVNVRNKILYLIQAWAHAFRNEPKYKVVQDTYQIMKVEGHVFPEFKESDAMFAAERAPDWVDAEECHRCRVQFGVMTRKHHCRACGQIFCGKCSSKYSTIPKFGIEKEVRVCEPCYEQLNRKAEGKATSTTELPPEYLTSPLSQQSQLPPKRDETALQEEEELQLALALSQSEAEEKERLRQKSTYTSYPKAEPMPSASSAPPASSLYSSPVNSSAPLAEDIDPELARYLNRNYWEKKQEEARKSPTPSAPVPLTEPAAQPGEGHAAPTNVVENPLPETDSQPIPPSGGPFSEPQFHNGESEESHEQFLKALQNAVTTFVNRMKSNHMRGRSITNDSAVLSLFQSINGMHPQLLELLNQLDERRLYYEGLQDKLAQIRDARGALSALREEHREKLRRAAEEAERQRQIQLAQKLEIMRQKKQEYLEVQRQLAIQRLQEQEKERQMRLEQQKQTVQMRAQMPAFPLPYAQLQAMPAAGGVLYQPSGPASFPSTFSPAGSVEGSPMHGVYMSQPAPAAGPYPSMPSTAADPSMVSAYMYPAGATGAQAAPQAQAGPTASPAYSSYQPTPTAGYQNVASQAPQSLPAISQPPQSSTMGYMGSQSVSMGYQPYNMQNLMTTLPSQDASLPPQQPYIAGQQPMYQQQPPVAQQPQAQGPPAQGSEAQLISFD

SEQ ID NO: 81479 - protein, 44 aa, Homo sapiens
VMREAAFSLAEAKFTAGDFSTTVIQNVNKAQVKIRAKKDNVAAC

SEQ ID NO: 81480 - protein, 99 aa, Homo sapiens
  MOD_RES (1)..(1): Any amino acid
XPPMPFRKCSNPDVASGPGKSLKYKRQLSEDGRQLRRGSLGGALTGRYLLPNPVAGQAWPASAETSNLVRMRSQALGQSAPSLTASLKELSLPRRGSFN

SEQ ID NO: 81481 - protein, 479 aa, Homo sapiens
MWELVALLLLTLAYLFWPKRRCPGAKYPKSLLSLPLVGSLPFLPRHGHMHNNFFKLQKKYGPIYSVRMGTKTTVIVGHHQLAKEVLIKKGKDFSGRPQMATLDIASNNRKGIAFADSGAHWQLHRRLAMATFALFKDGDQKLEKIICQEISTLCDMLATHNGQSIDISFPVFVAVTNVISLICFNTSYKNGDPELNVIQNYNEGIIDNLSKDSLVDLVPWLKEKFRSDSITNMLDTLMQAKMNSDNGNAGPDQDSELLSDNHILTTIGDIFGAGVETTTSVVKWTLAFLLHNPQVKKKLYEEIDQNVGFSRTPTISDRNRLLLLEATIREVLRLRPVAPMLIPHKANVDSSIGEFAVDKGTEVIINLWALHHNEKEWHQPDQFMPERFLNPAGTQLISPSVSYLPFGAGPRSCIGEILARQELFLIMAWLLQRFDLEVPDDGQLPSLEGIPKVVFLIDSFKVKIKVRQAWREAQAEGST

SEQ ID NO: 81482 - protein, 152 aa, Homo sapiens
SFSRCARGLGRPLGRGEGGTRRRPDHLNSHVRQVHSTERPFKCEKCEAAFATKDRLRAHTVRHEEKVPCHVCGKMLSSAYISDHMKVHSQGPHHVCELCNKGTGEVCPMAAAAAAAAAAAAAAVAAPPTAVGSLSGAEGVPVSSQPLPSQPW

SEQ ID NO: 81483 - protein, 179 aa, Homo sapiens
MPVRKQDTQRALHLLEEYRSKLSQTEDRQLRSSIERVINIFQSNLFQALIDIQEFYEVTLLDNPKCIDRSKPSEPIQPVNTWEISSLPSSTVTSETLPSSLSPSVEKYRYQDEDTPPQEHISPQITNEVIGPELVHVSEKNLSEIENVHGFVSHSHISPIKANPPPVLVNTDSLETPTY

SEQ ID NO: 81484 - protein, 64 aa, Homo sapiens
MASQKRPSQRHGSKYLATASTMDHARHGFLPSGALARTHTTRQELLTTAPCPRSHTAGPKMKTP

SEQ ID NO: 81485 - protein, 101 aa, Homo sapiens
  MOD_RES (1)..(1): Any amino acid
XLDAAHIAAAIFLPLVAMVLLVGGVYFYFSRRRCHQALKKLCPSPPAMPTMAYFLGVIAHLGPFIGPMSGGIYLWEEHSWSTSINSQHPEPPHALDQPGTH

SEQ ID NO: 81486 - protein, 43 aa, Homo sapiens
KELEELQNNQENSSHQKLAGLHLEKYSFPVEMMICLPNGTVMA

SEQ ID NO: 81487 - protein, 526 aa, Homo sapiens
MENEIFTPLLEQFMTSPLVTWVKTFGPLAAGNGTNLDEYVALVDGVFLNQVMLQINPKLESQRVNKKVNNDASLRMHNLSILVRQIKFYYQETLQQLIMMSLPNVLIIGKNPFSEQGTEEVKKLLLLLLGCAVQTIIELSEERDGLHFLPHASSSAQSPCGSPGMKRTESRQHLSVELADAKAKIRRLRQELEEKTEQLLDCKQELEQMEIELKRLQQENMNLLSDARSARMYRDELDALREKAVRVDKLESEVSRYKERLHDIEFYKARVEELKEDNQVLLETKTMLEDQLEGTRARSDKLHELEKENLQLKAKLHDMEMERDMDRKKIEELMEENMTLEMAQKQSMDESLHLGWELEQISRTSELSEAPQKSLGHEVNELTSSRLLKLEMENQSLTKTVEELRTTVDSVEGNASKILKMEKENQRLSKKVEILENEIVQEKQSLQNCQNLSKDLMKEKAQLEKTIETLRENSERQIKILEQENEHLNQTVSSLRQRSQISAEARVKDIEKENKILHESIKETSS

SEQ ID NO: 81488 - protein, 161 aa, Homo sapiens
MMGHRPVLVLSQNTKRESGRKVQSGNINAAKTIADIIRTCLGPKSMMKMLLDPMGGIVMTNDGNAILREIQVQHPAAKSMIEISRTQDEEVGDGTTSVIILESHSVTMLECGGAILAHCNLCLPAGEMLSVAEHFLEQQMHPTVVISAYRKALDDMISTLK

SEQ ID NO: 81489 - protein, 68 aa, Homo sapiens
MRLHLLLLLALCGAGTTAAELSYSLRGNWSICNGNGSLELPGAVPGCVHSALFQQGLIQSLTLSPRLE

SEQ ID NO: 81490 - protein, 1038 aa, Homo sapiens
MGVRNCLYGNNMSGQRDIPPEIGEQPEQPPLEAPGAAAPGAGPSPAEEMETEPPHNEPIPVENDGEACGPPEVSRPNFQVLNPAFREAGAHGSYSPPPEEAMPFEAEQPSLGGFWPTLEQPGFPSGVHAGLEAFGPALMEPGAFSGARPGLGGYSPPPEEAMPFEFDQPAQRGCSQLLLQVPDLAPGGPGAAGVPGAPPEEPQALRPAKAGSRGGYSPPPEETMPFELDGEGFGDDSPPPGLSRVIAQVDGSSQFAAVAASSAVRLTPAANAPPLWVPGAIGSPSQEAVRPPSNFTGSSPWMEISGPPFEIGSAPAGVDDTPVNMDSPPIALDGPPIKVSGAPDKRERAERPPVEEEAAEMEGAADAAEGGKVPSPGYGSPAAGAASADTAARAAPAAPADPDSGATPEDPDSGTAPADPDSGAFAADPDSGAAPAAPADPDSGAAPDAPADPDSGAAPDAPADPDAGAAPEAPAAPAAAETRAAHVAPAAPDAGAPTAPAASATRAAQVRRAASAAPASGARRKIHLRPPSPEIQAADPPTPRPTRASAWRGKSESSRGRRVYYDEGVASSDDDSSGDESDDGTSGCLRWFQHRRNRRRRKPQRNLLRNFLVQAFGGCFGRSESPQPKASRSLKVKKVPLAEKRRQMRKEALEKRAQKRAEKKRSKLIDKQLQDEKMGYMCTHRLLLLGAGESGKSTIVKQMRILHVNGFNGEGGEEDPQAARSNSDGSEKATKVQDIKNNLKEAIETIVAAMSNLVPPVELANPENQFRVDYILSVMNVPDFDFPPEFYEHAKALWEDEGVRACYERSNEYQLIDCAQYFLDKIDVIKQADYVPSDQDLLRCRVLTSGIFETKFQVDKVNFHMFDVGGQRDERRKWIQCFNDVTAIIFVVASSSYNMVIREDNQTNRLQEALNLFKSIWNNRWLRTISVILFLNKQDLLAEKVLAGKSKIEDYFPEFARYTTPEDATPEPGEDPRVTRAKYFIRDEFLRISTASGDGRHYCYPHFTCAVDTENIRRVFNDCRDIIQRMHLRQYELL

SEQ ID NO: 81491 - protein, 24 aa, Homo sapiens
IFGEQVRSAPEVGAGEGEPPAGRT

SEQ ID NO: 81492 - protein, 108 aa, Homo sapiens
  MOD_RES (1)..(1): Any amino acid
XVVLSRVPEQEEDRTVSLQNAAAIYDLLSITLGRRGQYVMLSECLERAMKFAFGEFHLWYQVALSMVACGKSAYAVSLLRECVKLRPSDPTVPLMAAKVCIGSLRWPP

SEQ ID NO: 81493 - protein, 812 aa, Homo sapiens
MRNLKLFRTLEFRDIQGPGNPQCFSLRTEQGTVLIGSEHGLIEVDPVSREVKNEVSLVAEGFLPEDGSGRIVGVQDLLDQESVCVATASGDVILCSLSTQQLECVGSVASGISVMSWSPDQELVLLATGQQTLIMMTKDFEPILEQQIHQDDFGESKFITVGWGRKETQFHGSEGRQAAFQMQMHESALPWDDHRPQVTWRGDGQFFAVSVVCPETGARKVRVWNREFALQSTSEPVAGLGPALAWKPSGSLIASTQDKPNQQDIVFFEKNGLLHGHFTLPFLKDEVKVNDLLWNADSSVLAVWLEDLQREESSIPKTCVQLWTVGNYHWYLKQSLSFSTCGKSKIVSLMWDPVTPYRLHVLCQGWHYLAYDWHWTTDRSVGDNSSDLSNVAVIDGNRVLVTVFRQTVVPPPMCTYQLLFPHPVNQVTFLAHPQKSNDLAVLDASNQISVYKCGDCPSADPTVKLGAVGGSGFKVCLRTPHLEKRYKIQFENNEDQDVNPLKLGLLTWIEEDVFLAVSHSEFSPRSVIHHLTAASSEMDEEHGQLNVSSSAAVDGVIISLCCNSKTKSVVLQLADGQIFKYLWESPSLAIKPWKNSGGFPVRFPYPCTQTELAMIGEEECVLGLTDRCRFFINDIEVASNITSFAVYDEFLLLTTHSHTCQCFCLRDASFKTLQAGLSSNHVSHGEVLRKVERGSRIVTVVPQDTKLVLQMPRGNLEVVHHRALVLAQIRKWLDKLMFKEAFECMRKLRINLNLIYDHNPKVFLGNVETFIKQIDSVNHINLFFTELKRLKSNGIFLSDDLSPQLFNETLSK

SEQ ID NO: 81494 - protein, 343 aa, Homo sapiens
MSRDVCIHTWPCTYYLEPKRRWVTGQLSLTSLSLRFMTDSTGEILVSFPLSSIVEIKKEASHFIFSSITILEKGHAKHWFSSLRPSRNVVFSIIEHFWRELLLSQPGAVADASVPRTRGEELTGLMAGSQKRLEDTARVLHHQGQQLDSVMRGLDKMESDLEVADRLLTELESPAWWPFSSKLWKTPPETKPREDVSMTSCEPFGKEGILIKIPAVISHRTESHVKPGRLTVLVSGLEIHDSSSLLMHRFEREDVDDIKVHSPYEISIRQRFIGKPDMAYRLISAKMPEVIPILEVQFSKKMELLEDALVLRSARTSSPAEKSCSVWHADPEEDEGAGPGGRE

SEQ ID NO: 81495 - protein, 75 aa, Homo sapiens
MLPSLQESMDGDEKELESSEEGGSAEERRLEPPSSSHYCLYSYRGSRLAQQRGDSEDGSPSGTNAETPSGDDFRY

SEQ ID NO: 81496 - protein, 118 aa, Homo sapiens
MPSPRLQHSKPPRRLSRAQKHSSGSSNTSTANRSTHNELEKNRRAHLRLCLERLKVLIPLGPDCTRHTTLGLLNKAKAHIKKLEEAERKSQHQLENLEREQRFLKWRLEQLQGPQEME

SEQ ID NO: 81497 - protein, 482 aa, Homo sapiens
MQLPRWWELGDPCAWTGQGRGTRRMSPATTGTFLLTVYSIFSKVHSDRNVYPSAGVLFVHVLEREYFKGEFPPYPKPGEISNDPITFNTNLMGYPDRPGWLRYIQRTPYSDGVLYGSPTAENVGKPTIIEITAYNRRTFETARHNLIINIMSAEDGVLLSSPRLECNGTISANCNLRLLGSDFPLPYQAEFFIKNMNVEEMLASEVLGDFLGAVKNVWQPERLNAINITSALDRGGRVPLPINDLKEGVYVMVGADVPFSSCLREVENPQNQLRCSQEMEPVITCDKKFRTQFYIDWCKISLVDKTKQVSTYQEVIRGEGILPDGGEYKPPSDSLKSRDYYTDFLITLAVPSAVALVLFLILAYIMCCRREGVEKRNMQTPDIQLVHHSAIQKSTKELRDMSKNREIAWPLSTLPVFHPVTGEIIPPLHTDNYDSTNMPLMQTQQNLPHQTQIPQQQTTEIIFSITAFVNLRRFSFDNFSKI

SEQ ID NO: 81498 - protein, 295 aa, Homo sapiens
MSKVSTMFSEDDFQSTERAPYGPQLQWSQDLPRVQVFREQANLEDRSPRRTQRITGGEQVLWGPITQIFPTVRPADLTRVIMPLEQRSQHCKPEEGLQAQEEDLGLVGAQALQAEEQEAAFFSSTLNVGTLEELPAAESPSPPQSPQEESFSPTAMDAIFGSLSDEGSGSQEKEGPSTSPDLIDPESFSQDILHDKIIDLVHLLLRKYRVKGLITKAEMLGSVIKNYEDYFPEIFREASVCMQLLFGIDVKEVDPTSHSYVLVTSLNLSYDGIQCNEQSMPKSGLLIIVLGVIFM

SEQ ID NO: 81499 - protein, 190 aa, Homo sapiens
MDCRTLWPSCQRWEVTDGMMDTKMVHFLTHYADKIESVHFSDQFSGPKIMQEEGQPLKLPDTKRTLLFTFNVPGSGNTYPKDMEALLPLMNMVIYSIDKAKKFRLNREGKQKADKNRARVEENFLKLTHVQRQEAAQSRREEKKRAEKERIMNEEDPEKQRRLEEAALRREQKKLEKKQMKMKQIKVKAM

SEQ ID NO: 81500 - protein, 107 aa, Homo sapiens
MRTKAAGCAERRPLQPRTEAAAAPAGRAMPSEYTYVKLRSDCSRPSLQWYTRAQSKMRRPSLLLKDILKCTLLVFGVWILYILKLNYTTEECDMKKMHYVDPDHVKV

SEQ ID NO: 81501 - protein, 47 aa, Homo sapiens
MADYLISGGTSYVPDDGLTAQQLFNCGDGLTYKPGGPDFCSDQENHS

SEQ ID NO: 81502 - protein, 124 aa, Homo sapiens
MMDGKNSSGSKRYNRKRELSYPKNESFNNQSRRSSSQKSKTFNKMPPQRGGGSSKLFSSSFNGGRRDEVAEAQRAEFSPAQFSGPKKINLNHLLNFTFEPRGQTGHFEGSGHGSWGKRNKWGHK

SEQ ID NO: 81503 - protein, 54 aa, Homo sapiens
  MOD_RES (1)..(1): Any amino acid
XGQGCTAYDVAVNSDFYRRMQNSDFLRELVITIAREGLEDKYNLQLNPGLKSLT

SEQ ID NO: 81504 - protein, 1201 aa, Homo sapiens
MSDLDSEVLPLPPRYRFRDLLLGDPSFQNDDRVQVEFYVNENTFKERLKLFFIKNQRSSLRIRLFNFSLKLLTCLLYIVRVLLDDPALGIGCWGCPKQNYSFNDSSSEINWAPILWVERKMTLWAIQVIVAIISFLETMLLIYLSYKGNIWEQIFRVSFVLEMINTLPFIITIFWPPLRNLFIPVFLNCWLAKHALENMINDFHRAILRTQSAMFNQVLILFCTLLCLVFTGTCGIQHLERAGENLSLLTSFYFCIVTFSTVGYGDVTPKIWPSQLLVVIMICVALVVLPLQFEELVYLWMERQKSGGNYSRHRAQTEKHVVLCVSSLKIDLLMDFLNEFYAHPRLQDYYVVILCPTEMDVQVRRVLQIPLWSQRVIYLQGSALKDQDLMRAKMDNGEACFILSSRNEVDRTAADHQTILRAWAVKDFAPNCPLYVQILKPENKFHVKFADHVVCEEECKYAMLALNCICPATSTLITLLVHTSRGQEGQESPEQWQRMYGRCSGNEVYHIRMGDSKFFREYEGKSFTYAAFHAHKKYGVCLIGLKREDNKSILLNPGPRHILAASDTCFYINITKEENSAFIFKQEEKRKKRAFSGQGLHEGPARLPVHSIIASMVAMDLQGTEHRPTQSGGGGGGSKLALPTENGSGSRRPSIAPVLELADSSALLPCDLLSDQSEDEVTPSDDEGLSVVEYVKGYPPNSPYIGSSPTLCHLLPVKAPFCCLRLDKGCKHNSYEDAKAYGFKNKLIIVSAETAGNGLYNFIVPLRAYYRSRKELNPIVLLLDNKPDHHFLEAICCFPMVYYMEGSVDNLDSLLQCGIIYADNLVVVDKESTMSAEEDYMADAKTIVNVQTMFRLFPSLSITTELTHPSNMRFMQFRAKDSYSLALSKLEKRERENGSNLAFMFRLPFAAGRVFSISMLDTLLYQSFVKDYMITITRLLLGLDTTPGSGYLCAMKITEGDLWIRTYGRLFQKLCSSSAEIPIGIYRTESHVFSTSEPHDLRAQSQISVNVEDCEDTREVKGPWGSRAGTGGSSQGRHTGGGDPAEHPLLRRKSLQWARRLSRKAPKQAGRAAAAEWISQQRLSLYRRSERQELSELVKNRMKHLGLPTTGYEDVANLTASDVMNRVNLGYLQDEMNDHQNTLSYVLINPPPDTRLEPSDIVYLIRSDPLAHVASSSQSRKSSCSHKLSSCNPETRDETQL

SEQ ID NO: 81505 - protein, 60 aa, Homo sapiens
MNLRGLFQDFNPRAEGETCVEFKAMLIAVGIHLLLLMFEVLVCDRIERGSHFWLLVFMPL

SEQ ID NO: 81506 - protein, 1250 aa, Homo sapiens
MSVKEGAQRKWAALKEKLGPQDSDPTEANLESADPELCIRLLQMPSVVNYSGLRKRLEGSDGGWMVQFLEQSGLDLLLEALARLSGRGVARISDALLQLTCVSCVRAVMNSRQGIEYILSNQGYVRQLSQALDTSNVMVKKQVFELLAALCIYSPEGHVLTLDALDHYKTVCSQQYRFSIVMNELSGSDNVPYVVTLLSVINAVILGPEDLRARTQLRNEFIGLQLLDVLARLRDLEDADLLIQLEAFEEAKAEDEEELLRVSGGVDMSSHQEVFASLFHKVSCSPVSAQLLSVLQGLLHLEPTLRSSQLLWEALESLVNRAVLLASDAQECTLEEVVERLLSVKGRPRPSPLVKAHKSVQANLDQSQRGSSPQNTTTPKPSVEGQQPAAAAACEPVDHAQSESILKVSQPRALEQQASTPPPPPPPPLLPGSSAEPPPPPPPPPLPSVGAKALPTAPPPPPLPGLGAMAPPAPPLPPPLPGSCEFLPPPPPPLPGLGCPPPPPPLLPGMGWGPPPPPPPLLPCTCSPPVAGGMEEVIVAQVDHGLGSAWVPSHRRVNPPTLRMKKLNWQKLPSNVAREHNSMWASLSSPDAEAVEPDFSSIERLFSFPAAKPKEPTMVAPRARKEPKEITFLDAKKSLNLNIFLKQFKCSNEEVAAMIRAGDTTKFDVEVLKQLLKLLPEKHEIENLRAFTEERAKLASADHFYLLLLAIPCYQLRIECMLLCEGAAAVLDMVRPKAQLVLAACESLLTSRQLPIFCQLILRIGNFLNYGSHTGDADGFKISTLLKLTETKSQQNRVTLLHHVLEEAEKSHPDLLQLPRDLEQPSQAAGINLEIIRSEASSNLKKLLETERKVSASVAEVQEQYTERLQASISAFRALDELFEAIEQKQRELADYLCEDAQQLSLEDTFSTMKAFRDLFLRALKENKDRKEQAAKAERRKQQLAEEEARRPRGEDGKPVRKGPGKQEEVCVIDALLADIRKGFQLRKTARGRGDTDGGSKAASMDPPRATEPVATSNPAGDPVGSTRCPASEPGLDATTASESRGWDLVDAVTPGPQPTLEQLEEGGPRPLERRSSWYVDASDVLTTEDPQCPQPLEGAWPVTLGDAQALKPLKFSSNQPPAAGSSRQDAKDPTSLLGVLQAEADSTSEGLEDAVHSRGARPPAAGPGGDEDEDEEDTAPESALDTSLDKSFSEDAVTDSSGSGTLPRARGRASKGTGKRRKKRPSRSQEAEVPPDSDDNKTKKLCVIQ

SEQ ID NO: 81507 - protein, 54 aa, Homo sapiens
MSKSEVMRDPNTKRSRGFGFVTYATVEEVDAAMNARPHKVDGRVVEPKRAVSRE

SEQ ID NO: 81508 - protein, 121 aa, Homo sapiens
MIVFGWAVFLASRSLGQGLLLTLEEHIAHFLGTGGAATTMGNSCICRDDSGTDDSVDTQQQQAENSAVPTADTRSQPRDPVRPPRRGRGPHEPRRKKQNVDGLVLDTLAVIRTLVDNDQEP

SEQ ID NO: 81509 - protein, 150 aa, Homo sapiens
MEAMWLLCVALAVLAWGFLWVWDSSERMKSREQGGRLGAESRTLLVIAHPDDEAMFFAPTVLGLARLRHWVYLLCFSAGNYYNQGETRKKELLQSCDVLGIPLSSVMIIDNRDFPDDPGMQWDTEHVARVLLQHIEVNGINLKDRANSRL

SEQ ID NO: 81510 - protein, 194 aa, Homo sapiens
  MOD_RES (1)..(1): Any amino acid
XFDQLYAWAVELIRRGLAYVCHQRGEELKGHNTLPSPWRDRPMEESLLLFEAMRKGKFSEGEATLRMKLVMEDGKMDPVAYRVKCIYPTYDYTHCLCDSIEHITHSLCTKEFQARRSSYFWLCNALDVYCPVQWEYGRLNLHYAVVSKRKILQLVATGAVRDWDDPRLFTLTALRRRGFPPEAINNFCARVGVT

SEQ ID NO: 81511 - protein, 97 aa, Homo sapiens
MGVQVETISPGDGRTFPKRGQTCVVHYTDECGSESQTDYISRLCLWCHWAPRHHPTTCHSRLRCGASKTGMTGMASSLSSLFLDLPWRDLVPPDMCT

SEQ ID NO: 81512 - protein, 37 aa, Homo sapiens
MLKAVILIGGPQKGEELASDLCLLRCPNHCFLWQGSL

SEQ ID NO: 81513 - protein, 72 aa, Homo sapiens
MRDAGDPSPPNKMLRRSDSPENKYSDSTGHSKAKNVHTHRVRERDGGEVIPRTFCCLFIQQTWGIYCVPTFV

SEQ ID NO: 81514 - protein, 420 aa, Homo sapiens
MSTVKPLREPAPSEDVIDIKPEPDDLIDEDLNFVQENPLSQKKPTVTLTYGSSRPSIEIYRPPASRNADSGVHLNRLQFQQQQNSIHAAKQLDMQSSWVYETGRLCEPEVLNSLEETYSPFFRNNSEKMSMEDENFRKRKLPVVSSVVKVKKFNHDGEEEEEDDDYGSRTGSISSSVSVPAKPERRPSLPPSKQANKNLILKAISEAQESVTKTTNYSTVPQKQTLPVAPRTRTSQEELLAEVVQGQSRTPRISPPIKEEETKGDSVEKNQAEMSELSVAQKPEKLLERCKYWPACKNGDECAYHHPISPCKAFPNCKFAEKCLFVHPNCKYDAKCTKPDCPFTHVSRRIPVLSPKPAPPSSSQLCRYFPACKKMECPFYHPKHCRFNTQCTRPDCTFYHPTINVPPRHALKWIRPQTSE

SEQ ID NO: 81515 - protein, 229 aa, Homo sapiens
MKDSCITVMAMALLSGFFFFAPASSYNLDVRGARSFSPPRAGRHFGYRVLQVGNGVIVGAPGEGNSTGSLYQCQSGTGHCLPVTLRGSNYTSKYLGMTLATDPTDGSILFAAVQFSTSYKTEFDFSDYVKRKDPDALLKHVKHMLLLTNTFGAINYVATEVFREELGARPDATKVLIIITDGEATDSGNIDAAKDIIRYIIGVGLESIFRPRRVRRPSTNLHQNPRASL

SEQ ID NO: 81516 - protein, 1267 aa, Homo sapiens
MAADEGSAEKQAGEAHMAADGETNGSCENSDASSHANAAKHTQDSARVNPQDGTNTLTRIAENGVSERDSEAAKQNHVTADDFVQTSVIGSNGYILNKPALQAQPLRTTSTLASSLPGHAAKTLPGGAGKGRTPSAFPQTPAAPPATLGEGSADTEDRKLPAPGADVKVHRARKTMPKSVVGLHAASKDPREVREARDHKEPKEEINKNISDFGRQQLLPPFPSLHQSLPQNQCYMATTKSQTACLPFVLAAAVSRKKKRRMGTYSLVPKKKTKVLKQRTVIEMFKSITHSTVGSKGEKDLGASSLHVNGESLEMDSDEDDSEELEEDDGHGAEQAAAFPTEDSRTSKESMSEADRAQKMDGESEEEQESVDTGEEEEGGDESDLSSESSIKKKFLKRKGKTDSPWIKPARKRRRRSRKKPSGALGSESYKSSAGSAEQTAPGDSTGYMEVSLDSLDLRVKGILSSQAEGLANGPDVLETDGLQEVPLCSCRMETPKSREITTLANNQCMATESVDHELGRCTNSVVKYELMRPSNKAPLLVLCEDHRGRMVKHQCCPGCGYFCTAGNFMECQPESSISHRFHKDCASRVNNASYCPHCGEESSKAKEVTIAKADTTSTVTPVPGQEKGSALEGRADTTTGSAAGPPLSEDDKLQGAASHVPEGFDPTGPAGLGRPTPGLSQGPGKETLESALIALDSEKPKKLRFHPKQLYFSARQGELQKVLLMLVDGIDPNFKMEHQNKRSPLHAAAEAGHVDICHMLVQAGANIDTCSEDQRTPLMEAAENNHLEAVKYLIKAGALVDPKDAEGSTCLHLAAKKGHYEVVQYLLSNGQMDVNCQDDGGWTPMIWATEYKHVDLVKLLLSKGSDINIRDNEENICLHWAAFSGCVDIAEILLAAKCDLHAVNIHGDSPLHIAARENRYDCVVLFLSRDSDVTLKNKEGETPLQCASLNSQVWSALQMSKALQDSAPDRPSPVERIVSRDIARGYERIPIPCVNAVDSEPCPSNYKYVSQNCVTSPMNIDRNITHLQYCVCIDDCSSSNCMCGQLSMRCWYDKDGRLLPEFNMAEPPLIFECNHACSCWRNCRNRVVQNGLRARLQLYRTRDMGWGVRSLQDIPPGTFVCEYVGELISDSEADVREEDSYLFDLDNKDGEVYCIDARFYGNVSRFINHHCEPNLVPVRVFMAHQDLRFPRIAFFSTRLIEAGEQLGFDYGERFWDIKGKLFSCRCGSPKCRHSSAALAQRQASAAQEAQEDGLPDTSSAAAADPL

SEQ ID NO: 81517 - protein, 330 aa, Homo sapiens
MSVLNNTIAEPLIFLLMGIPGLKATQYWISIPFCLLYVVAVSGNSMILFVVLCERSLHKPMYYFLSMLSATDLSLSLCTLSTTLGVFWFEAREINLNACIAQMFFLHGFTFMESGVLLAMAFDRFVAICYPLRYTTILTNARIAKIGMSMLIRNVAVMLPVMLFVKRLSFCSSMVLSHSYCYHVDLIQLSCTDNRINSILGLFALLSTTGFDCPCILLSYILIIRSVLSIASSEERRKAFNTCTSHISAVSIFYLPLISLSLVHRYGHSAPPFVHIIMANVFLLIPPVLNPIIYSVKIKQIQKAIIKVLIQKHSKSNHQLFLIRDKAIYE

SEQ ID NO: 81518 - protein, 76 aa, Homo sapiens
MACAEFSFHVPSLEELAGVMQKGLKDNFADVQVSVVDCPDLTKEPFTFPVKGICGKTRIAEVGGVPYLLPLVNQKK

SEQ ID NO: 81519 - protein, 115 aa, Homo sapiens
MAGPCTWVLERPSLHSVATSASCQAGSTRSCFGVQTQRRNSSAASRARTHSATVKTTSRSSCRSAAVTCSPVAQQPSAPCVPTSTWRTSPWQGTRRGMSSWKMARAVVPSTRISS

SEQ ID NO: 81520 - protein, 236 aa, Homo sapiens
  MOD_RES (1)..(1): Any amino acid
XASSVYEIHCDRTRHTLTIREVPASLHGAQLKFVANGIESSIRMEVRAAPGLTANKPPAAAAREVLARLHEEAQLLAELSDQAAAVTWLKDGRTLSPGPKYEVQASAGRRVLLVRDVARDDAGLYECVSRGGRIAYQLSVQGLARFLHKDMAGSCVDAVAGGPAQFECETSEAHVHVHWYKDGMELGHSGERFLQEDVGTRHRLVAATVTRQDEGTYSCRVGEDSVDFRLRVSANG

SEQ ID NO: 81521 - protein, 328 aa, Homo sapiens
MVLDEVERRRGISAALVYPFMRSLMESPFPAPGKTIKVKTFLPGAGNEVLELRRPMDSRLEHVDFECLFTCLSVRQLIRIFASLLLERRVIFVADKLSTLSSCSHAVVALLYPFSWQHTFIPVLPASMIDIVCCPTPFLVGLLSSSLPKLKELPVEEALMVNLGSDRFIRQMDDEDTLLPRKLQAALEQALERKNELISQDSDSDSDDECNTLNGLVSEVFIRFFVETVGHYSLFLTQSEKGERAFQREAFRKSVASKSIRRFLEVFMESQMFAGFIQDRELRKCRAKGLFEQRVEQYLEELPDTEQSGMNKFLRGLGNKMKFLHKKN

SEQ ID NO: 81522 - protein, 232 aa, Homo sapiens
MVVVTGREPDSRRQDGAMSSSDAEDDFLEPATPTATQAGHALPLLPQERCAEFPALRGPPTQGACSSCVQRGPVLCHRAPPGAAGEHAATEGREGAPSVSGTHALLQRPLGADCGDRPAACGPAEGPLCQAQVVSRKKMSLKSERRGIHVDQSDLLCKKGCGYYGNPAWQGFCSKCWREEYHKARQKQIQEDWELAERVLLCYPGWSAMVQFQLTATSASWAQVILLLQPPK

SEQ ID NO: 81523 - protein, 817 aa, Homo sapiens
MNKDYQKFWSSPSDPVHFEVDTSHEKVESMSESDTMNVSNLSQGVMLSHSPICMETTGTTCDLPQNEIKNFERENEYESTLCEDAYGTLDNLLNDNNIENYSTNALIQPVDTISISSLRQFETVCKFHWVEAFDDEMTEKPEFQSQVYNYAKDNNIKQDSFKEENPMETSVSANTDQLGNEYFRQPPPRSPPLIHCSGEMLKFTEKSLAKSIAKESALNPSQPPSFLCKTAVPSKEIQNYGEIPEMSVSYEKEVTAEGVERPEIVSTWSSAGISWRSEACRENCEMPDWEQSAESLQPVQEDMALNEVLQKLKHTNRKQEVRIQELQCSNLYLEKRVKELQMKITKQQVFIDVINKLKENVEELIEDKYKIILEKNDTKKTLQNLEEVLANTQKHLQESRNDKEMLQLQFKKIKANYVCLQERYMTEMQQKNKSVSQYLEMDKTLSKKEEEVERLQQLKKELEKATASALDLLKREKEAQEQEFLSLQEEFQKLEKENLEERQKLKSRLEKLLTQVRNLQFMSENERTKNIKLQQQINEVKNENAKLKQQVARSEEQNYVPKFETAQLKDQLEEVLKSDITKDTKTTHSNLLPDCSPCEERLNPADIKRASQLASKMHSLLALMVGLLTCQDIINSDAEHFKESEKLLKHKDRITTFRELIAKEKAFQDHAIKVIDCDSDEAKSIRDVPTLLGAKLDKYHSLNEELDFLITKLGHLLESKENHCNRLIEENDKYQRHLGNLIKKVTSYEEIIECADQRLAISHSQIAHLEERNKHLEDLIRKPREKARKPRSKSLENHPKSMTMMPALFKENRNDLD

SEQ ID NO: 81524 - protein, 94 aa, Homo sapiens
MSVAFAAPRQRGKGEITPAAIQKMLDDNNHLIQCIMDSQNKGKTSECSHTKIGWTWWWIPVIPTAWEAEAGESLEPGRRRLQVSQDRTTALQPS

SEQ ID NO: 81525 - protein, 208 aa, Homo sapiens
  MOD_RES (1)..(1): Any amino acid
XSSINNIHEMEIQLKDALEKNQQWLVYDQQREVYVKGLLAKIFELEKKTETAAHSLPQQTKKPESEGYLQEEKQKCYNDLLASAKKDLEVERQTITQLSFELSEFRRKYEETQKEVHNLNQLLYSQRRADVQHLEDDRHKTEKIQKLREENDIARGKLEEEKKRSEELLSQVQFLYTSLLKQQEEQTRVALLEQQVLIRVASKFNSAC

SEQ ID NO: 81526 - protein, 125 aa, Homo sapiens
MAEQDVENDLLDYDEEEEPQAPQESTPAPPKKDIKGSYVSIHSSGFRDFLLKPELLRAIVDCGFEHPSEVQHECIPQAILGMDVLCQAKSGMGKTAVFVLATLQQIEPVNGQVTVLVMCHTRELA

SEQ ID NO: 81527 - protein, 109 aa, Homo sapiens
QLLVFKHKMKNLVWTSGISALDGEFQSASEVDFYIDKDMIHIADTKVARRYGDFFIRQIHKFEEMESCAVTHAGVQRRDLSSLQPLPPGFKRVSLLSLPHSWNYSLIEP

SEQ ID NO: 81528 - protein, 218 aa, Homo sapiens
MELQDPKMNGALPSDAVGYRQEREGFLPSRGPAPGSKPVQFMDFEGKTSFGMSVFNLSNAIMGSGILGLAYAMAHTGVIFFLALLLCIALLSSYSIHLLLTCAGIAGIRAYEQLGQRAFGPAGKVVVATVICLHNVGAMSSYLFIIKSELPLVIGTFLYMDPEGDWFLKGNLLIIIVSVLIILPLALMKHLGYLGYTSGLSLTCMLFFLVSVIYKKFQ

SEQ ID NO: 81529 - protein, 213 aa, Homo sapiens
MLRCLYHWHRPVLNRRWSRLCLPKQYLFTMKLQSPEFQSLFTEGLKSLTELFVKENHELRIAGGAVRDLLNGVKPQDIDFATTATPTQMKEMFQSAGIRMINNRGEKHGTITARLHEENFEITTLRIDVTTDGRHAEVEFTTDWQKDAERRDLTINSMFLGFDGTLFDYFNGYEDLKNKKVRFVGHAKQRIQEDYLRILRYFRFCLVGFMGEL

SEQ ID NO: 81530 - protein, 3016 aa, Homo sapiens
MASQQDSGFFEISIKYLLKSWSNTSPVGNGYIKPPVPPASGTHREKGPPTMLPINVDPDSKPGEYVLKSLFVNFTTQAERKIRIIMAEPLEKPLTKSLQRGEDPQFDQVISSMSSLSEYCLPSILRTLFDWYKRQNGIEDESHEYRPRTSNKSKSDEQQRDYLMERRDLAIDFIFSLVLIEVLKQIPLHPVIDSLIHDVINLAFKHFKYKEGYLGPNTGNMHIVADLYAEVIGVLAQAKFPAVKKKFMAELKELRHKEQNPYVVQSIISLIMGMKFFRIKMYPVEDFEASLQFMQECAHYFLEVKDKDIKHALAGLFVEILVPVAAAVKNEVNVPCLRNFVESLYDTTLELSSRKKHSLALYPLVTCLLCVSQKQLFLNRWHIFLNNCLSNLKNKDPKMARVALESLYRLLWVYMIRIKCESNTATQSRLITIITTLFPKGSRGVVPRDMPLNIFVKIIQFIAQERLDFAMKEIIFDFLCVGKPAKAFSLNPERMNIGLRAFLVIADSLQQKDGEPPMPVTGAVLPSGNTLRVKKTYLSKTLTEEEAKMIGMSLYYSQVRKAVDNILRHLDKEVGRCMMLTNVQMLNKEPEDMITGERKPKIDLFRTCVAAIPRLLPDGMSKLELIDLLARLSIHMDDELRHIAQNSLQGLLVDFSDWREDVLFGFTNFLLREVNDMHHTLLDSSLKLLLQLLTQWKLVIQTQGKVYEQANKIRNSELIANGSSHRIQSERGPHCSVLHAVEGFALVLLCSFQVATRKLSVLILKEIRALFIALGQPEDDDRPMIDVMDQLSSSILESFIHVAVSDSATLPLTHNVDLQWLVEWNAVLVNSHYDVKSPSHVWIFAQSVKDPWVLCLFSFLRQENLPKHCPTALSYAWPYAFTRLQSVMPLVDPNSPINAKKTSTAGSGDNYVTLWRNYLILCFGVAKPSIMSPGHLRASTPEIMATTPDGTVSYDNKAIGTPSVGVLLKQLVPLMRLESIEITESLVLGFGRTNSLVFRELVEELHPLMKEALERRPENKKRRERRDLLRLQLLRIFELLADAGVISDSTNGALERDTLALGALFLEYVDLTRMLLEAENDKEVEILKDIRAHFSAMVANLIQCVPVHHRRFLFPQQSLRHHLFILFSQWAGPFSIMFTPLDRYSDRNHQITRYQYCALKAMSAVLCCGPVFDNVGLSPDGYLYKWLDNILACQDLRVHQLGCEVVVLLLELNPDQINLFNWAIDRCYTGSYQLASGCFKAIATVCGSRNYPFDIVTLLNLVLFKASDTNREIYEISMQLMQILEAKLFVYSKKVAEQRPGSILYGTHGPLPPLYSVSLALLSCELARMYPELTLPLFSEVSQRFPTTHPNGRQIMLTYLLPWLHNIELVDSRLLLPGSSPSSPEDEVKDREGDVTASHGLRGNGWGSPEATSLVLNNLMYMTAKYGDEVPGPEMENAWNALANNEKWSNNLRITLQFLISLCGVSSDTVLLPYIKKVAIYLCRNNTIQTMEELLFELQQTEPVNPIVQHCDNPPFYRFTASSKASAAASGTTSSSNTVVAGQENFPDAEENKILKESDERFSNVIRAHTRLESRYSNSSGGSYDEDKNDPISPYTGWLLTITETKQPQPLPMPCTGGCWAPLVDYLPETITPRGPLHRCNIAVIFMTEMVVDHSVREDWALHLPLLLHAVFLGLDHYRPEVFEHSKKLLLHLLIALSCNSNFHSIASVLLQTREMGEAKTLTVQPAYQPEYLYTGGFDFLREDQSSPVPDSGLSSSSTSSSISLGGSSGNLPQMTQEVEDVDTAAETDEKANKLIEFLTTRAFGPLWCHEDITPKNQNSKSAEQLTNFLRHVVSVFKDSKSGFHLEHQLSEVALQTALASSSRHYAGRSFQIFRALKQPLSAHALSDLLSRLVEVIGEHGDEIQGYVMEALLTLEAAVDNLSDCLKNSDLLTVLSRSSSPDLSSSSKLTASRKSTGQLNMNPGTTSGNTATAERSRHQRSFSVPKKFGVIDRSSDPPRSATLDRIQACTQQGLSSKTRSSSSLKDSLTDPSHINHPTNLLATIFWVTVALMESDFEFEYLMALRLLSRLLAHMPLDKAENREKLEKLQAQLKWADFSGLQQLLLKGFTSLTTTDLTLQLFSLLTPVSKISMVDASHAIGFPLNVLCLLPQLIQHFENPNQFCKDIAERIAQVCLEEKNPKLSNLAHVMTLYKTHSYTRDCATWVNVVCRYLHEAYADITLNMVTYLAELLEKGLPSVQQPLLQVIYSLLSYMDLSVVPVKQFNVEVLKTIEKYVQSVHWREALNILKLVVSRSASLVLPSYQHSDLSKIEIHRVWTSASKELPGKTLDFHFDISETPIIGRRYDELQNSSGRDGKPRAMAVTRSTSSTSSGSNSNVLVPVSWKRPQYSQKRTKEKLVHVLSLCGQEVGLSKNPSVIFSSCGDLDLLEHQTSLVSSEDGAREQENMDDTNSEQQFRVFRDFDFLDVELEDGEELQGESMDNFNWGVRRRSLDSLDKCDMQILEERQLSGSTPSLNKMHHEDSDESSEEEDLTASQILEHSDLIMTLSPSEETNPMELLTTACDSTPAEPHSFNTRMSSFDASLPDMNNLQISEGSKAEAVREEEDTTVHEDDLSSSINELPAAFECSDSFSLDMTEGEEKGNRALDQFTLASFGEGDRGVSPPPSPFFSAILAAFQPAACDDAEEAWRSHINQLMCDSDGSCAVYTFHVFSSLFKNIQKRFCFLTCDAASYLGDNLRGIGSKFVSSSQMLTSCSECPTLFVDAETLLSCGLLDKLKFSVLELQEYLDTYNNRKEATLSWLANCKATFAGGSRDGVITCQPGDSEEKQLELCQRLYKLHFQLLLLFQSYCKLIGQVHEVSSMPELLNMSRELSDLKKHLKEASAVIAADPLYSDGAWSEPTFTSTEAAIQSMLECLKNNELGKALRQIRECRSLWPNDIFGSSSDDEVQTLLNIYFRHQTLGQTGTYALVGSNQSLTEICTKLMELNMEIRDMIRRAQSYRVLTTFLPDSSVSGTSL

SEQ ID NO: 81531 - protein, 130 aa, Homo sapiens
MLSRGCTSSFPAPPSSPEAPRMVRWFHRDLSGLDAETLLKGRGVHGSFLARPSRKNQGDFSLSVRVGDQVTHIRIQNSGDFYDLYGGEKFATLTELVEYYTQQQGVLQDRDGTIIHLKYPLNCSDPTSER

SEQ ID NO: 81532 - protein, 149 aa, Homo sapiens
  MOD_RES (1)..(1): Any amino acid
XENPGLGRKLSDFGQETSYIEDNCNQNGAISLIFSLKEEVGALAKVLRLFEENDVNLTHIESRPSRLKKDEYEFFTHLDKRSLPALTNIIKILRHDIGATVHELSRDKKKDTVPWFPRTIQELDRFANQILSYGAELDADHPVSPWPVG

SEQ ID NO: 81533 - protein, 200 aa, Homo sapiens
MLQGHSSVFQALLGTFFTWGMTAAGAALVFVFSSGQRRILDGSLGFAAGVMLAASYWSLLAPAVEMATSSGGFGAFAFFPVAVGFTLGAAFVYLADLLMPHLGAAEDPQTTLALNFGSTLMKKKSDPEGPALLFPESELSIRIDKSENGEAYQRKKAAATGLPEGPAVPVPSRGNLAQPGGSSWRRIALLILAITIHNVP

SEQ ID NO: 81534 - protein, 297 aa, Homo sapiens
  MOD_RES (1)..(1): Any amino acid
XADAESLNTAQKEEAEEKERKKIARKESLENKKNNKPEVNQIANSDNKVTIDDYREEDEDKDPYPPCDVPGEEEEEEEEDEPEVPAGPRPRRISELNMKEKIAPIPEGSAFFILSKTNPIRVGCHKLINHHIFTNLILVFIMLSSAALAAEDPIRSHSFRNTMLGYADYVFTGTFAFEIILKMTTFGAFLHKGAFCRNYFNLLDMLVVGVSLVSFGIQSSAISVVKILRVLRVLRPLRAINRAKGLKHVVQCVFVAIRTIGNIMIVTTLLQFMFACIGVQLFKGKFYRCTDEAKSNP

SEQ ID NO: 81535 - protein, 41 aa, Homo sapiens
  MOD_RES (1)..(1): Any amino acid
XARLLMQRGRPKSDRLGKIRSLDGVESGVVARASSPSYSRG

SEQ ID NO: 81536 - protein, 130 aa, Homo sapiens
MDCRVHMRPIGLTWVLQLTLAWILLEACGGSRPLQARSQQHHGLAADLGKGKLHLAGPCCPSEMDTTETSGPGNHPERCGVPSPECESFLEHLQRALRSRFRLRLLGVRQAQPLCEELCQAWFANCEDDI

SEQ ID NO: 81537 - protein, 97 aa, Homo sapiens
MRDPLTDCPYNKVYKNLKEFSQNGENFCKQVTSVLQQRDGVLILLLRLECSGAIIACCSLRLLCSRTPLASASQVARTAGQTWKLAMPKDFRNWQAS

SEQ ID NO: 81538 - protein, 139 aa, Homo sapiens
MPKKKTGARKKAENRREREKQLRASRSTIDLAKHPCNASMECDKCQRRQKNRAFCYFCNSVQKLPICAQCGKTKCMMKSSDCVIKHAGVYSTGLAMVGAICDFCEAWVCHGRKCLSTHACACPLTDAECVECERGVWDH

SEQ ID NO: 81539 - protein, 161 aa, Homo sapiens
  MOD_RES (1)..(1): Any amino acid
XADHVISAIPASVLSELLPAEAAPLARALSAITAVSVAVVNLQYQGAHLPVQGFGHLVPSSEDPGVLGIVYDSVAFPEQDGSPPGLRVTVMLGGSWLQTLEASGCVLSQELFQQRAQEAAATQLGLKEMPSHCLVHLHKNCIPQYTLGHWQKLGKLGKQLG

SEQ ID NO: 81540 - protein, 126 aa, Homo sapiens
MKPDRDTLDEYFEYDAEEFLVSLALLITEGRTPECSVKGRTESFHCPPAQSCYPVTTKHECSDKLAQCRQARRTRSEVTLLWKNNLPIMVEMMLLPDCCYSDDGPTTEGIDLNDPAIKQDALLLER

SEQ ID NO: 81541 - protein, 346 aa, Homo sapiens
MRGKTFRFEMQRDLVSFPLSPAVRVKLVSAGFQTAEELLEVKPSELSKEVGISKAEALETLQIIRRECLTNKPRYAGTSESHKKCTALELLEQEHTQGFIITFCSALDDILGGGVPLMKTTEICGAPGVGKTQLCMQLAVDVQIPECFGGVAGEAVFIDTEGSFMVDRVVDLATACIQHLQLIAEKHKGEEHRKALEDFTLDNILSHIYYFRCRDYTELLAQVYLLPDFLSEHSKVRLVIVDGIAFPFRHDLDDLSLRTRLLNGLAQQMISLANNHRLAVILTNQMTTKIDRNQALLVPALGESWGHAATIRLIFHWDRKQRLATLYKSPSQKECTVLFQIKVSII

SEQ ID NO: 81542 - protein, 61 aa, Homo sapiens
MAEHAPRRCCLGWDFSTQQVKVVAVDAELNVFYEESVHFDRDLPEFGNTEVYTGRLEPSRH

SEQ ID NO: 81543 - protein, 116 aa, Homo sapiens
MVDSTEYEVASQPEVETSPLGDGASPGPEQVKLKKEISLLNGVCLIVGNMIGSGIFVSPKGVLIYSASFGLSLVIWAVGGLFSVFGALCYAELGTTIKKSGASYAYILEAFGGFLA

SEQ ID NO: 81544 - protein, 56 aa, Homo sapiens
MAVVPASLSGQDVGKAWKLKRKLSLSFLNYGMNCKQINHLSPWLRNLLILIYGIST

SEQ ID NO: 81545 - protein, 127 aa, Homo sapiens
  MOD_RES (1)..(1): Any amino acid
XNGVSLVVGNMIGSGIFVSPKGVLVHTASYGMSLIVWAIGGLFSVVGALCYAELGTTITKSGASYAYILEAFGGFIAFIRLWVSLLVVEPTGQAIIAITFANYIIQPSFPSCDPPYLACRLLAAACI

SEQ ID NO: 81546 - protein, 148 aa, Homo sapiens
MASYYEILDVPRSASADDIKKAYRRKALQWHPDKNPDNKEFAEKKFKEVAEAYEVLSDKHKREIYDRYGREGLTGTGTGPSRAEAGSGGPGFTFTFRSPEEVFREFFGSGDPFAELFDDLGPFSELQNRGSRHSGPFFTFSSSFPGHS

SEQ ID NO: 81547 - protein, 311 aa, Homo sapiens
MACAAVMIPGLLRCSVGAIRIEAASLRLTLSTLRHLTLTSIMKSKRKTDHMERTASVLRREIVSAAKVCGAASESPSVKSLRLLVADQDFSFKAGQWVDFFIPGVSVVGGFSICSSPRLLEQERVIELAVKYTNHPPALWVHNTCTLDCEVAVRVGGEFFFDPQPADASRNLVLIAGGVGINPLLSILRHAADLLREQANKRNGYEIGTIKLFYSAKNTSELLFKKNILDLVNEFPEKIACSLHVTKQTTQINAELKPYITGRITEKEIRDHISKETLFYICGPPPMTDFFSKQLENNHVPKEHICFEKWW

SEQ ID NO: 81548 - protein, 154 aa, Homo sapiens
MAMQKIFAREILDSRGNPTVEVDLHTAKGRFRAAVPSGASTGIYEALELRDGDKGRYLGKGVLKAVENINNTLGPALLQKKLSVVDQEKVDKFMIELDGTENKSKFGANAILGVSLAVCKAGAAEKGVPLYRHIADLAGNPDLILPVPAFNVIN

SEQ ID NO: 81549 - protein, 136 aa, Homo sapiens
MTVRRLSLLCRDLWALWLLLKAGADEIMHQDIVPLCAADIQDQLKKRFAYLSGGRGQDGSPVITFPDYPAFSEIPDKEFQNVMTYLTSIPSGGQESSIRPVSCRLTWEGCRGGLSSDVLVPASRKMLRMSASHQTV

SEQ ID NO: 81550 - protein, 184 aa, Homo sapiens
MPARTAPARVPTLAVPAISLPDDVRRRLKDLERDSLTEKECVKEKLNLLHEFLQTEIKNQLCDLETKLRKEELSELNLHLAPGLQGKAPGKPPSHLILQRALPNGNLRKSLKEPNRMSPSRKKTKTRMRRDVELHPENELLDRFLQKNLKEQNQERALKRKKKEMKKKKRDSEVKPKNQHPNRN

SEQ ID NO: 81551 - protein, 365 aa, Homo sapiens
MAVSESQLKKMVSKYKYRDLTVRETVNVITLYKDLKPVLDSYVFNDGSSRELMNLTGTIPVPYRGNTYNIPICLWLLDTYPYNPPICFVKPTSSMTIKTGKHVDANGKIYLPYLHEWKHPQSDLLGLIQVMIVVFGDEPPVFSRPISASYPPYQATGPPNTSYMPGMPGGISPYPSGYPPNPSGYPGCPYPPGGPYPATTSSQYPSQPPVTTVGPSRDGTISEDTIRASLISAVSDKLRWRMKEEMDRAQAELNALKRTEEDLKKGHQKLEEMVTRLDQEVAEVDKNIELLKKKDEELSSALEKMENQSENNDIDEVIIPTAPLYKQILNLYAEENAIEDTIFYLGEALRRGVIDLDVFLKTSVP

SEQ ID NO: 81552 - protein, 140 aa, Homo sapiens
MENCSAASTFLTDSLELELGTEWCKPPYFSCAVDNRGGGKHFSGESYLCSGALKRLILNLDPLPTNFEEDTLEIFGIQWVTETALVNSSRELFHLFRQQLYNLETLLQSSCDFAFSTVMAFITSPLGYTLAGARNSLHAG

SEQ ID NO: 81553 - protein, 58 aa, Homo sapiens
MEDDAPVIYGLEFQARALTPQTAETDAIRFLVGTQSLKYDNQCRVGANGRWEENHFLG

SEQ ID NO: 81554 - protein, 85 aa, Homo sapiens
MAAAGVVSGKIIYEQEGVYIHSSCGKTNDQDGLISGILRVLEKDAEVIVDWRPLDDALDSSSILYARKMLQVIEMGKANGHSCSV

SEQ ID NO: 81555 - protein, 427 aa, Homo sapiens
MPFGCVTLGDKKNYNQPSEVTDRYDLGQVIKTEEFCEIFRAKDKTTGKLHTCKKFQKRDGRKVRKAAKNEIGILKMVKHPNILQLVDVFVTRKEYFIFLELNLKLENLVYYNRLKNSKIVISDFHLAKLENGLIKEPCGTPEYLAPEVVGRQRYGRPVDCWAIGVIMYILLSGNPPFYEEVEEDDYENHDKNLFRKILAGDYEFDSPYWDDISQAAKDLVTRLMEVEQDQRITAEEAISHEWISGNAASDKNIKDGVCAQIEKNFARAKWKKAVRVTTLMKRLRAPEQSSTAAAQSASATDTATPGAADRSATPATDGSATPATDGSVTPATDGSITPATDGSVTPATDRSATPATDGRATPATEESTVPTTQSSAMLATKAAATPEPAMAQPDSTAPEGATGQAPPSSKGEEAAGYAQESQREEAS

SEQ ID NO: 81556 - protein, 263 aa, Homo sapiens
MVSGRFYLSCLLLGSLGSMCILFTIYWMQYWRGGFAWNGSIYMFNWHPVLMVAGMVVFYGGASLVYRLPQSWVGPKLPWKLLHAALHLMAFVLTVVGLVAVFTFHNHGRTANLYSLHSWLGITTVFLFACQWFLGFAVFLLPWASMWLRSLLKPIHVFFGAAILSLSIASVISGINEKLFFSLKNTTRPYHSLPSEAVFANSTGMLVVAFGLLVLYILLASSWKRPEPGILTDRQLLLQLRPGSRPFPVTYVSVTGRQPYKSW

SEQ ID NO: 81557 - protein, 175 aa, Homo sapiens
MEATGTWALLLALALLLLLTLALSGTRARGHLPPGPTPLPLLGNLLQLRPGALYSGLMREEQNPGTEFTNKNMLMTVIYLLFAGTMTVSTTVGYTLLLLMKYPHVQKWVREELNRELGAGQAPSLGDRTRLPYTDAVLHEAQRLLALVPMGIPRTLMRTTRFRGYTLPQGTEVFP

SEQ ID NO: 81558 - protein, 139 aa, Homo sapiens
AGVAALATVGVASGPGPGRPGPLQDETLGVASVPSQWRAVQGIRWETKSCQTASIATASASAQARNHVDAQVQTEAPVPVSVQPPSQYDIPRLAAFLRRVEAMVIRELNKNWQSHAFDGFEVNWTEQQQMAGPWGLEHA

SEQ ID NO: 81559 - protein, 166 aa, Homo sapiens
VRNGKVGLDATNCLRITDLKSGCTSLTPGPNCDRFKLHIPYAGETLKWDIIFNAQYPELPPDFIFGEDAEFLPDPSALQNLASWNPSNPECLLLVVKELVQQYHQFQCSRLRESSRLMFEYQTLLEEPQYGENMEIYAGKKNNWVRIFENGKKDDFIHNKIINSYV

SEQ ID NO: 81560 - protein, 321 aa, Homo sapiens
MSDIVEKTLTALPGLFLQNQPGGGPAAAKASFSSRLGSLVRGITALTSKHEEEKLIQQELSSLKATVSAPTTTLKMMKECMVRLIYCEMLGYDASFGYIHAIKLAQQGNLLEKRVGYLAVSLFLHESHELLLLLVNTVVKDLQSTNLVEVCMALTVVSQIFPCEMIPAVLPLIEDKLQHSKEIVRRKAVLALYKFHLIAPNQVQHIHIKFRKALCDRDVGVMAASLHIYLRMIKENSSGYKDLTGSFVTILKQVVGGKLPVEFNYHSVPAPWLQIQLLRILGLLGKDDQRSSVLKRSLKNCFIGLEYYNSTANKISFKQDK

SEQ ID NO: 81561 - protein, 188 aa, Homo sapiens
MTGLDIEKDQIIEMACLITDSDLNILAEGPNLIIKQPDELLDSMSDWCKEHHGKSGLTKAVKESTITLQQAEYEFLSFVRQQTPPGLCPLAGNSVHEDKKFLDKYMPQFMKHLHYRIIDVSTVKELCRRWYPEEYEFAPKKAASHRALDDISESIKELQFYRNNIFKKKIDEKKRKIIENGENEKTVS

SEQ ID NO: 81562 - protein, 271 aa, Homo sapiens
EEGTDASPSSCGSLPITNSFTKMPPRSRSSIMSITAEPPGNDSIVRRYKEDAPHRSTVEEDNDSGGFDALDLDDDSHERYSFGPSSIHSSSSSHQSEGLDAYDLEQVNLMFRKFSLERPFRPSVTSVGHVRGPGPSVQHTTLNGDSLTSQLTLLGGNARGSFVHSVKPGSLAEKAGLREGHQLLLLEGCIRGERQSVPLDTCTKEEAHWTIQRCSGPVTLHYKVNHEGYRKLVKDMEDGLITSGDSFYIRLNLNISSQLDACTMSLKCDDV

SEQ ID NO: 81563 - protein, 177 aa, Homo sapiens
MRWILFIGALIGSSICGQEKFFGDQVLRINVRNGDEISKLSQLVNSNNLKLNFWKSPSSFNRPVDVLVPSVSLQAFKSFLRSQGLEYAVTIEDLQIYHEMDNIAADFPDLARRVKIGHSFENRPMYVLKFSTGKGVRRPAVWLNAGIHSREWISQATAIWTARKIVSDYQRDPAITS

SEQ ID NO: 81564 - protein, 101 aa, Homo sapiens
  MOD_RES (1)..(1): Any amino acid
XPMRRSYRYKLLNWAYQQVQQNKEDAWIEHDVWRMEIYVSLGIVGLAILALLAVTSIPSVSDSLTWREFHYIQIIHKKSDVPESLWDPCLTRFKGLNLIQS

SEQ ID NO: 81565 - protein, 216 aa, Homo sapiens
MVVPEKEQSWIPKIFKKKTCTTFIVDSTDPGGTLCQCGRPRTAHPAVAMEDAFGAAVVTVWDSDAHTTEKPTDAYGELDFTGAGRKHSNEPGLSLGVCTRASAGMLVWLYGTIRWPALGAPRWWPWVWPPGVWSGIETPSSTPRARSLRGTGGAVTRRTGSSFPWTTTTRPSSWWTTAHTAAWGARTASACAWSPTSHSRRRAWEGLELTSLSCSS

SEQ ID NO: 81566 - protein, 141 aa, Homo sapiens
MHHQWLLLAACFWVIFMFMVASKFITLTFKDPDVYSAKQEFLFLTTMPEVRKLPEEKHIPEELKPTGKELPDSQLVQPLVYMERLELIRNVCRDDALKNLSHTPVSKFVLDRIFVCDKHKILFCQTPKVGNTQWKKVLIVL

SEQ ID NO: 81567 - protein, 864 aa, Homo sapiens
MAFFRNFQQNLPSVSSLVDTISSAVEDLTTAVGEVSYALTDSVAEQVTSMMSGFRPEEESSVAEEAVDTSKQKNAGLTEVSKNTNCQKTQANLEHRAKQINTCKTSLKQDQGIHEERVFKHVNDRQQTLSEYQDTGNTGDSSLKGYMNNGGISVIRQNTRAGSICQELESTDRCKTIGVGISNNGKNDLKEVGYQEMKGNQKNANGINKLYEQKKYVGTDNCKKEEYSKSRHVYLGRDQENMGHFNKCKHLPDLGHSDHLKKAEKCVKSKASKGNECSGNECSLKDILTSNRHMTQKSIIKEDIHPAPSTNSKDKLSGKIEEQINSTKYCKVNEDIKPKKTEAISAKKGTAKSKDEKYSKIIPEKDNSYMDKDEHGSSSESEDEALGKYHEALSRTHNSRLPLADSRQRNYAWETRQKYSPLSAEYDGYSSEASIDEGNCIQRMRRTPPLDELQPPPYQDDSGSPHLSCTPSEIGDSKCEFSHCSNSPRCSYNKCPSEGSTGHEIESFHNKGYEEDVPSDSTAVLSPEDMSAQGSSSQLPKPFDPEPEAKYGTLDVTFDYDSQEQKLLVTVTAVTDIPTYNRTGGNSWQVHLVLLPIKKQRAKTSIQRGPCPVFTETFKFNHVESEMIGNYAVRFRLYGVHRMKKEKIVGEKIFYLTKLNLQGKMSLPVILEPSYNHSGCDSQMSVSEMSCSESTSSCQSLEHGSVPEILIGLLYNATTGRLSAEVIKGSHFKNLAANRPPNGLFCCLKHLIGGQVYIIRDTYVKLTLLNSMGQEMSKCKTSIRRGQPNPVYKETFVFQVALFQLSDVTLILSVYNKRSMKRKEMIGWISLGLNSSGEEELNHWTEMKESKGQQVCRWHALLES

SEQ ID NO: 81568 - protein, 159 aa, Homo sapiens
MEEGQYSEIEELPRRRCCRRGTQIVLLGLVTAALWAGLLTLLLLWHWDTTQSLKQLEERAARNVSQVSKNLESHHGDQMAQKSQSTQISQELEELRAEQQRLKSQELNERNEASDLLERLREEVTKLRMELQVSSGFVCNTCPEKWINFQRKCYYFGKG

SEQ ID NO: 81569 - protein, 161 aa, Homo sapiens
  MOD_RES (1)..(1): Any amino acid
XGARAGGSGLAAVVCGGGPRRAPGGRAVPVACKSCPCGYIFISRKLLNAKHSEKSPPSTENKHEAKRRRTERVRREKINSTVNKDLENRKRSRSNSHSDHIRRGRGRPKSASAKKHEEERGCRKPMPRTPILEGKLGKEKSAEKKEKREILPGSENNILFS

SEQ ID NO: 81570 - protein, 116 aa, Homo sapiens
MPSVSKAAAAALSGSPPQTEKPTHYSTSARSTGRSPASTGTSSTSGAAGPSAGATAPSTTAPTCTAPSTTKPPACAPTATSVPTCTGRRGTQNASTTCVTTKQEPASTRQTHVATA

SEQ ID NO: 81571 - protein, 162 aa, Homo sapiens
  MOD_RES (1)..(1): Any amino acid
XISSVVDEHFSRALSNIKSPQELTPSSQSEGVMLKNDDSMSPNQWRYSSPWTKPQPEVPVTNRAANCNLHVPGPMAVNQFSPSLARRASVRPGELWHFSSLAGTSSLEPGYSHPFPARHLVPEPQPDGKHKKLYVSRGSASTSLPNETLSELETPGKYSLTP

SEQ ID NO: 81572 - protein, 128 aa, Homo sapiens
MAAAEGPVGDGELWQTWLPNHVVFLRLREGLKNQSPTEAEKPASSSLPSSPPPQLLTRNVVFGLGGELFLWDGEDSSFLVVRLRGPSGGGEEPALSQYQAGVQWRHLGSPQPPPSSFKRFFCLSPPRE

SEQ ID NO: 81573 - protein, 168 aa, Homo sapiens
MTEKEVLESPKPSFPAETRQSGLQRLKQLLRKGSTGTKEMELPPEPQANGEAVGAGGGPIYYIYEEEEEEEEEEEEPPPEPPKLVNDKPHKFKDHFFKKPKFCDVCARMIVLNNKFGLRCKNCKTNIHEHCQSYVEMQRCFGKIPPGFHRAYSSPLYSNQQYACVKDL

SEQ ID NO: 81574 - protein, 102 aa, Homo sapiens
MLFRFSAASSDNTENLIKVIEILISTEWNERQPAPALPPKPPKPTTVANNGMNNNMSLQDAEWYWGDISREEVNEKLRDTADGTFLVRDASTKMHGDYTLTL

SEQ ID NO: 81575 - protein, 127 aa, Homo sapiens
MKTGLFFLCLLGTAAAIPTNARLLSDHSKPTAETVAPDNTAIPSLRAEAEENEKETAVSTEDDSHHKAEKSSVLKSKEESHEQSAEQGKSSSQELGLKDQEDSDGHLSVNLEYAPTEGTLDIKEDMS

SEQ ID NO: 81576 - protein, 131 aa, Homo sapiens
MRGHPSLRPPWHWASAARLEGGFLPWGYVSNALSREGLTEERTFERRPEGWEGASCAASELDDDVPKANCLSTESTDTPKAPVITLPSEAREQMATLGERTFNCCYPGCHFKTVHGMKDLDRHLRIHTASC

SEQ ID NO: 81577 - protein, 130 aa, Homo sapiens
  MOD_RES (1)..(1): Any amino acid
XLEKLQESGEVPVHKLQSLKKVLQSEFCTAIREVYQYMHETITVNGCPEFRARATAKATVAAFAASEGHSHPRVVELPKTDEGLGFNVMGGKEQNSPIYISRIIPGGVAERHGGLKRGDQLLSVNGVVCL

SEQ ID NO: 81578 - protein, 53 aa, Homo sapiens
MAVAVAMAGALIGSEPGPAEELAKLEYLSLVSKVCTELDNHLGINDKDLGFSY

SEQ ID NO: 81579 - protein, 146 aa, Homo sapiens
MLSAVWGAGGPGAGGAARGQPSRKELLLRHHLWSGPRCLSFPLGSLPASLLGLPGATSHRSCLSPNLASGLAARGTQTQSVLFGEVRLPLDGGVRGARKRSLLRAHPRTGILPGRCGMVWKDKKLQPSGCHEKAGGVFCGPSRGGV

SEQ ID NO: 81580 - protein, 75 aa, Homo sapiens
  MOD_RES (1)..(1): Any amino acid
XQILEHKNKMLKNHLRNDNQETAAMKPENLKKRKKRKKLKKRKEGAKEHNLKVASEEKQERLERSENKQPQDSQS

SEQ ID NO: 81581 - protein, 130 aa, Homo sapiens
  MOD_RES (1)..(1): Any amino acid
XDVHAVCLWDDKGPAKIHQALKEDILEFIKQAQALMLDTWNESIFSNIKNRLQDSAMKLVHAERLGEAFDSQLVIGVRESYVNLCSNPEDKLQIYRDNFEKAYLDSTERFYRTQAPSYLQQNGVQNYMKY

SEQ ID NO: 81582 - protein, 189 aa, Homo sapiens
EEERDEEEDKRRKGEEVTPISAIRHEGKTDSERTDTAADGETTATEELEKTQDDLMKHQTNISELKRTFLETSTDTAVTNEWEKRLSTSPVRLAARQEDAPMIEPLVPEEVSSQTKEETEISEKVIFLQQGSAPFLESQTKQSSGEKLMDGSEIFSLLESARKPTEFIGGVTSTSQSWVQKMETKTESS

SEQ ID NO: 81583 - protein, 78 aa, Homo sapiens
  MOD_RES (1)..(1): Any amino acid
XGRYIMTRDYLTVKVWDLNMENRPIETYQVHDYLRSKLCSLYENDCIFDKFECVWNGSDRLGRSLHVAKDPSHTDQLV

SEQ ID NO: 81584 - protein, 498 aa, Homo sapiens
MEDVTCDRTEFLSNYLTNVDDITLVPGTLGRIRSKFSNNAKYDPKAIIANLTCKKPDQHFKPYLKQHLPKRLHYANNRRIEDIHLLVERRWHVARKPLDVYKKPSGKCFFQGDHGFDNKVNSMQTVFVGYGSTFKYKTKVPPFENIELYNVMCDLLGLKPAPNNGTHGSLNHLLRTNTFRPTMPEEVTRPNYPGIMYLQSDFDLGCTCDDKNKLDELNKRLHTKGSTEERHLLYGRPAVLYRTRYDILYHTDFESGYSEIFLMPLWTSYTVSKQAEVSSVPDHLTSCVRPDVRVSPSFSQNCLAYKNDKQMSYGFLFPPYLSSSPEAKYDAFLVTNMVPMYPAFKRVWNYFQRVLVKKYASERNGVNVISGPIFDYDYDGLHDTEDKIKQYVEGSSIPVPTHYYSIITSCLDFTQPADKCDGPLSVSSFILPHRPDNEESCNSSEDESKWVEELMKMHTARVRDIEHLTSLDFFRKTSRSYPEILTLKTYLHTYESEI

SEQ ID NO: 81585 - protein, 40 aa, Homo sapiens
MEKTKWLDIKGNHGNILLYVEMALSIMSTVLPLATIRSSV

SEQ ID NO: 81586 - protein, 1797 aa, Homo sapiens
MSGASVKVAVRVRPFNSRETSKESKCIIQMQGNSTSIINPKNPKEAPKSFSFDYSYWSHTSPEDPCFASQNRVYNDIGKEMLLHAFEGYNVCIFAYGQTGAGKSYTMMGKQEESQAGIIPQLCEELFEKINDNCNEEMSYSVEVSYMEIYCERVRDLLNPKNKGNLRVREHPLLGPYVEDLSKLAVTSYTDIADLMDAGNKARTVAATNMNETSSRSHAVFTIVFTQKKHDNETNLSTEKVSKISLVDLAGSERADSTGAKGTRLKEGANINKSLTTLGKVISALAEVDNCTSKSKKKKKTDFIPYRDSVLTWLLRENLGGNSRTAMVAALSPADINYDETLSTLRYADRAKQIKCNAVINEDPNAKLVRELKEEVTRLKDLLRAQGLGDIIDIDPLIDDYSGSGSKSSMGSLTSSPSSCSLSSQVGLTSVTSIQERIMSTPGGEEAIERLKESEKIIAELNETWEEKLRKTEAIRMEREALLAEMGVAIREDGGTLGVFSPKKTPHLVNLNEDPLMSECLLYYIKDGITRVGQADAERRQDIVLSGAHIKEEHCIFRSERSNSGEVIVTLEPCERSETYVNGKRVSQPVQLRSGNRIIMGKNHVFRFNHPEQARAEREKTPSAETPSEPVDWTFAQRELLEKQGIDMKQEMEKRLQEMEILYKKEKEEADLLLEQQRLDYESKLQALQKQVETRSLAAETTEEEEEEEEVPWTQHEFELAQWAFRKWKSHQFTSLRDLLWGNAVYLKEANAISVELKKKVQFQFVLLTDTLYSPLPPELLPTEMEKTHEDRPFPRTVVAVEVQDLKNGATHYWSLEKLKQRLDLMREMYDRAGEMASSAQDESETTVTGSDPFYDRFHWFKLVGSSPIFHGCVNERLADRTPSPTFSTADSDITELADEQQDEMEDFDDEAFVDDAGSDAGTEEGSDLFSDGHDPFYDRSPWFILVGRAFVYLSNLLYPVPLIHRVAIVSEKGEVRGFLRVAVQAIAADEEAPDYGSGIRQSGTAKISFDNEYFNQSDFSSVAMTRSGLSLEELRIVEGQGQSSEVITPPEEISRINDLDLKSSTLLDGKMVMEGFSEEIGNHLKLGSAFTFRVTVLQASGILPEYADIFCQFNFLHRHDEAFSTEPLKNNGRGSPLAFYHVQNIAVEITESFVDYIKTKPIVFEVFGHYQQHPLHLQGQELNSPPQPCRRFFPPPMPLSKPVPATKLNTMSKTSLGQSMSKYDLLVWFEISELEPTGEYIPAVVDHTAGLPCQGTFLLHQGIQRRITVTIIHEKGSELHWKDVRELVVGRIRNKPEVDEAAVDAILSLNIISAKYLKSSHNSSRTFYRFEAVWDSSLHNSLLLNRVTPYGEKIYMTLSAYLELDHCIQPAVITKDVCMVFYSRDAKISPPRSLRSLFGSGYSKSPDSNRVTGIYELSLCKMSDTGSPGMQRRRRKILDTSVAYVRGEENLAGWRPRGDSLILEHQWELEKLELLHEVEKTRHFLLLRERLGDSIPKSLSDSLSPSLSSGTLSTSTSISSQISTTTFESAITPSESSGYDSGDIESLVDREKELATKCLQLLTHTFNREFSQVHGSVSDCKLSDISPIGRDPSESSFSSATLTPSSTCPSLVDSRSNSLDQKTPEANSRASSPCPEFEQFQIVPAVETPYLARAGKNEFLNLVPDIEEIRPSSVVSKKGYLHFKEPLYSNWAKHFVVVRRPYVFIYNSDKDPVERGIINLSTAQVEYSEDQQAMVKTPNTFAVCTKHRGVLLQALNDKDMNDWLYAFNPLLAGTIRPGHLASEIIREDKSVSFSCQ

SEQ ID NO: 81587 - protein, 114 aa, Homo sapiens
MWTALVLIWIFSLSLSESHAASNDPRNFVPNKMWKGLVKRNASVETVDNKTSEDVTMAAASPVTLTKGTSAAHLNSMEVTTEDTSRTDAYESYKKKDYTQVDYLINGMYADSEM

SEQ ID NO: 81588 - protein, 229 aa, Homo sapiens
MTRFGVRLYKLLVITVATKESDGFHRFMQSAKYFNYTVKVLGQGEEWRGGDGINSIGGGQKVRLMKEVMEHYADQDDLVVMFTECFDVIFAGGPEEVLKKFQKANHKVVFAADGILWPDKRLADKYPVVHIGKRYLNSGGFIGYAPYVNRIVQQWNLQDNDDDQLFYTKVYIDPLKREAINITLDHKCKIFQTLNGAVDEVVLKFENGKARAKNTFYETLPVAINGNGP

SEQ ID NO: 81589 - protein, 62 aa, Homo sapiens
MESGTSSPQPPQLDPLDAFPQKGLEPGDIAVLVLYFLFVLAVGLWVGSPSVAQGTRTQWWQS

SEQ ID NO: 81590 - protein, 73 aa, Homo sapiens
  MOD_RES (1)..(1): Any amino acid
XVLEKLVGGADLMLPGLVMPPAGLPQPRRTTTGHKEVKLQKGRGAFWRAVRSERSSLTTPRKMTWLMQTTKIL

SEQ ID NO: 81591 - protein, 830 aa, Homo sapiens
MSDSGSQLGSMGSLTMKSQLQITVISAKLKENKKNWFGPSPYVEVTVDGQSKKTEKCNNTNSPKWKQPLTVIVTPVSKLHFRVWSHQTLKSDVLLGTAALDIYETLKSNNMKLEEVVVTLQLGGDKEPTETIGDLSICLDGLQLESEVVTNGETTCSESASQNDDGSRSKDETRVSTNGSDDPEDAGAGENRRVSGNNSPSLSNGGFKPSRPPRPSRPPPPTPRRPASVNGSPSATSESDGSSTGSLPPTNTNTNTSEGATSGLIIPLTISGGSGPRPLNPVTQAPLPPGWERRVDNMGRIYYVDHFTRTTTWQRPTLESVRNYEQWQLQRSQLQGAMQQFNQRFIYGNQDLFATSQSKEFDPLGPLPPGWEKRTDSNGRVYFVNHNTRITQWEDPRSQGQLNEKPLPEGWEMRFTVDGIPYFVDHNRRTTTYIDPRTGKSALDNGPQIAYVRDFKAKVQYFRFWCQQLAMPQHIKITVTRKTLFEDSFQQIMSFSPQDLRRRLWVIFPGEEGLDYGGVAREWFFLLSHEVLNPMYCLFEYAGKDNYCLQINPASYINPDHLKYFRFIGRFIAMALFHGKFIDTGFSLPFYKRILNKPVGLKDLESIDPEFYNSLIWVKENNIEECDLEMYFSVDKEILGEIKSHDLKPNGGNILVTEENKEEYIRMVAEWRLSRGVEEQTQAFFEGFNEILPQQYLQYFDAKELEVLLCGMQEIDLNDWQRHAIYRHYARTSKQIMWFWQFVKEIDNEKRMRLLQFVTGTCRLPVGGFADLMGSNGPQKFCIEKVGKENWLPRSHTCFNRLDLPPYKSYEQLKEKLLFAIEETEGFGQE

SEQ ID NO: 81592 - protein, 96 aa, Homo sapiens
MSVACVLKRKAVLWQDSFSPHLKHHPQEPANPNMPVVLTSGTGSQAQPQPAANQALAAGTHSSPVPGSIGVAGRSQDDAMVDYFFQRQHGEQLGGG

SEQ ID NO: 81593 - protein, 123 aa, Homo sapiens
MILNSLSLCYHNKLILAPMVRVGTLPMRLLALDYGADIVYCEELIDLKMIQCKRVVNEVLSTVDFVAPDDRVVFRTCEREQNRVVFQMGTSDAERALAVARLVENDVAGIDVNMGCPKQYSTK

SEQ ID NO: 81594 - protein, 124 aa, Homo sapiens
MIPTRHCGHCPEEWITYSNSCYYIGKERRTWEESLLACTSKNSSLLSIDNEEEMKFLASILPSSWIGVFRNSSHHPWVTINGLAFKHKIKDSDNAELNCAVLQVNRLKSAQCGSSMIYHCKHKL

SEQ ID NO: 81595 - protein, 243 aa, Homo sapiens
  MOD_RES (1)..(1): Any amino acid
XPLFKRFTHTRWAAPVETLENIIATVDTRLPEFSELQGCFREELMEALHLHLVKEYIIQLSKGRLVLKTAEQQQQLAGYILANADTIQHFCTQHGSPATWLQPALPTLAEIIRLQDPSAIKIEVATYATCYPDFSKGHLSAILAIKGNLSNSEVKRIRSILDVSMGAQEPSRPLFSLIKPRAAVSGIQQWWNGRQNWKRKKEKMSSRLAGAFRVLWRAVSTASIRRHIQVAPRPLQAGPAMGP

SEQ ID NO: 81596 - protein, 111 aa, Homo sapiens
LLSAVPGGERKVLIIFNAPSLQDRLRFTSDLRESIAEVQEMEKYRVESELEKQKGMMRPNASQPGGAKDSVNGTMARSSLEDTYGAGDGLKRGALSSSLRDLSDAGRVCLG

SEQ ID NO: 81597 - protein, 256 aa, Homo sapiens
MIDHLVTMKISHWDGVIRELAARALHNLAQQAPEFSATQVFPRLLSMTLSPDLHMRHGSILACAEVAYALYKLAAQENRPVTDHLDEQAVQGLKQIHQQLYDRQLYRGLGGQLMRQAVCVLIEKLSLSKMPFRGDTVIDGWQWLINDTLRHLHLISSHSRQQMKDAAVSALAALCSEYYMKEPGEADPAIQEELITQYLAELRNPEEMTRCGFSLALGALPGFLLKGRLQQVLTGLRAVTHTSPEDVSFAESRRDG

SEQ ID NO: 81598 - protein, 4442 aa, Homo sapiens
MKGARWRRVPWVSLSCLCLCLLPHVVPGTTEDTLITGSKTAAPVTSTGSTTATLEGQSTAASSRTSNQDISASSQNHQTKSTETTSKAQTDTLTQMMTSTLFSSPSVHNVMETAPPDEMTTSFPSSVTNTLMMTSKTITMTTSTDSTLGNTEETSTAGTESSTPVTSAVSITAGQEGQSRTTSWRTSIQDTSASSQNHWTRSTQTTRESQTSTLTHRTTSTPSFSPSVHNVTGTVSQKTSPSGETATSSLCSVTNTSMMTSEKITVTTSTGSTLGNPGETSSVPVTGSLMPVTSAALVTFDPEGQSPATFSRTSTQDTTAFSKNHQTQSVETTRVSQINTLNTLTPVTTSTVLSSPSGFNPSGTVSQETFPSGETTTSSPSSVSNTFLVTSKVFRMPTSRDSTLGNTEETSLSVSGTISAITSKVSTIWWSDTLSTALSPSSLPPKISTAFHTQQSEGAETTGRPHERSSFSPGVSQEIFTLHETTTWPSSFSSKGHTTWSQTELPSTSTGAATRLVTGNPSTGTAGTIPRVPSKVSAIGEPGEPTTYSSHSTTLPKTTGAGAQTQWTQETGTTGEALLSSPSYSVTQMIKTATSPSSSPMLDRHTSQQITTAPSTNHSTIHSTSTSPQESPAVSQRGHTQAPQTTQESQTTRSVSPMTDTKTVTTPGSSFTASGHSPSEIVPQDAPTISAATTFAPAPTGDGHTTQAPTTALQAAPSSHDATLGPSGGTSLSKTGALTLANSVVSTPGGPEGQWTSASASTSPDTAAAMTHTHQAESTEASGQTQTSEPASSGSRTTSAGTATPSSSGASGTTPSGSEGISTSGETTRFSSNPSRDSHTTQSTTELLSASASHGAIPVSTGMASSIVPGTFHPTLSEASTAGRPTGQSSPTSPSASPQETAAISRMAQTQRTRTSRGSDTISLASQATDTFSTVPPTPPSITSTGLTSPQTETHTLSPSGSGKTFTTALISNATPLPVTYASSASTGHTTPLHVTDASSVSTGHATPLPVTSPSSVSTGHTTPLPVTDTSSESTGHVTPLPVTSFSSASTGDSTPLPVTDTSSASTGHVTPLPVTSLSSASTGDTTPLPVTDTSSASTGHATSLPVTDTSSVSTGHTTPLPVTDTSSASTGHATSLPVTDTSSVSTGHTTPLHVTDASSASTGQATPLPVTSLSSVSTGDTTPLPVTSPSSASTGHATPLLVTDTSSASTGHATPLPVTDASSVSTDHATSLPVTIPSAASTGHTTPLPVTDTSSASTGQATSLLVTDTSSVSTGDTTPLPVTSTSSASTGHVTPLHVTSPSSASTGHATPLPVTSLSSASTGDTMPLPVTSPSSASTGDTTPLPVTDASSVSTGHTTPLHVTDASSASTGQATPLPVTSLSSVSTGDTTPLPVTSPSSASTGHATPLLVTDTSSASTGHATPLPVTDASSVSTDHATSLPVTIPSAASTGHTTPLPVTDTSSASTGQATSLLVTDTSSVSTGDTTPLPVTSTSSASTGHVTPLHVTSPSSASTGHATPLPVTSLSSASTGDTMPLPVTSPSSASTGDTTPLPVTDASSVSTGHTTPLPVTSPSSASTGHTTPLPVTDTSSASKGDTTPLPVTSPSSASTGHTTPLPVTDTSSASTGDTTPLPVTNASSLSTGHATPLHVTSPSSASTGHATPLPVTSTSSASTGHATPLPVTGLSSATTDDTTRLPVTDVSSASTGQATPLPVTSLSSVSTGDTTPLPVTSPSSASTGHASPLLVTDASSASTGQATPLPVTDTSSVSTAHATPLPVTGLSSASTDDTTRLPVTDVSSASTGQAIPLPVTSPSSASTGDTTPLPVTDASSASTGDTTSLPVTIPSSASSGHTTSLPVTDASSVSTGHATSLLVTDASSVSTGDTTPLPVTDTNSASTGDTTPLHVTDASSVSTGHATSLPVTSLSSASTGDTTPLPVTSPSSASSGHTTPLPVTDASSVPTGHATSLPVTDASSVSTGHATPLPVTDASSVSTGHATPLPVTDTSSVSTGQATPLPVTSLSSASTGDTTPLPVTDTSSASTGQDTPLPVTSLSSVSTGDTTPLPVTNPSSASTGHATPLLVTDASSISTGHATSLLVTDASSVSTGHATALHDTDASSLSTGDTTPLPVTSPSSTSTGDTTPLPVTETSSVSTGHATSLPVTDTSSASTGHATSLPVTDTSSASTGHATPLPVTDTSSASTGQATPLPVTSPSSASTGHAIPLLVTDTSSASTGQATPLPVTSLSSASTGDTTPLPVTDASSVSTGHATSLPVTSLSSVSTGDTTPLPVTSPSSASTGHATPLHVTDASSASTGHATPLPVTSLSSASTGDTTPLPVTSPSSASTGHATPLHVTDASSVSTGDTTPLPVTSSSSASSGHTTPLPVTDASSASTGDTTPLPVTDTSSASTGHATHLPVTGLSSASTGDTTRLPVTNVSSASTGHATPLPVTSTSSASTGDTTPLPGTDTSSVSTGHTTPLLVTDASSVSTGDTTRLPVTSPSSASTGHTTPLPVTDTPSASTGDTTPLPVTNASSLSTRHATSLHVTSPSSASTGHATSLPVTDTSAASTGHATPLPVTSTSSASTGDTTPLPVTDTYSASTGQATPLPVTSLSSVSTGDTTPLPVTSPSSASTGHATPLLVTDASSASTGQATPLPVTSLSSVSTGDTTPLPVTSPSSASTGHATSLPVTDTSSASTGDTTSLPVTDTSSAYTGDTTSLPVTDTSSSSTGDTTPLLVTETSSVSTGDTTPLPVTDTSSASTGHATPLPVTNTSSVSTGHATPLHVTSPSSASTGHTTPLPVTDASSVSTGHATSLPVTDASSVFTGHATSLPVTIPSSASSGHTTPLPVTDASSVSTGHATSLPVTDASSVSTGHATPLPVTDASSVSTGHATPLPLTSLSSVSTGDTTPLPVTDTSSASTGQATPLPVTSLSSVSTGDTTPLPVTDTSSASTGHATSLPVTDTSSASTGHATPLPDTDTSSASTGHATLLPVTDTSSASIGHATSLPVTDTSSISTGHATPLHVTSPSSASTGHATPLPVTDTSSASTGHANPLHVTSPSSASTGHATPLPVTDTSSASTGHATPLPVTSLSSVSTGDTTPLPVTSPSSASTGHTTPLPVTDTSSASTGQATALPVTSTSSASTGDTTPLPVTDTSSASTGQATPLPVTSLSSVSTGDTTPLPVTSPSSASTGHATPLLVTDASSASTGQATPLPVTSLSSVSTGDTTPLPVTSPSSASTGHATSLPVTDTSSASTGDTTSLPVTDTSSAYTGDTTSLPVTDTSSSSTGDTTPLLVTETSSVSTGHATPLLVTDASSASTGHATPLHVTSPSSASTGDTTPVPVTDTSSVSTGHATPLPVTGLSSASTGDTTRLPVTDISSASTGQATPLPVTNTSSVSTGDTMPLPVTSPSSASTGHATPLPVTSTSSASTGHATPVPVTSTSSASTGHTTPLPVTDTSSASTGDTTPLPVTSPSSASTGHTTPLHVTIPSSASTGDTSTLPVTGASSASTGHATPLPVTDTSSVSTGHATPLPVTSLSSVSTGDTTPLPVTDASSASTGQATPLPVTSLSSVSTGDTTPLLVTDASSVSTGHATPLPVTDTSSASTGDTTRLPVTDTSSASTGQATPLPVTSLSSVSTGDTTPLLVTDASSVSTGHATPLPVTDTSSASTGDTTRLPVTDTSSASTGQATPLPVTIPSSSSSGHTTPLPVTSTSSVSTGHVTPLHVTSPSSASTGHVTPLPVTSTSSASTGHATPLLVTDASSVSTGHATPLPVTDASSASTGDTTPLPVTDTSSASTGQATPLPVTSLSSVSTGDTTPLPVTDASSASTGHATPLPVTIPSSVSTGDTMPLPVTSPSSASTGHATPLPVTGLSSASTGDTTPLPVTDTSSASTRHATPLPVTDTSSASTDDTTRLPVTDVSSASTGHATPLPVTSTSSASTGDTTPLPVTDTSSVSTGHATSLPVTSRSSASTGHATPLPVTDTSSVSTGHATPLPVTSTSSVSTGHATPLPVTSPSSASTGHATPVPVTSTSSASTGDTTPLPVTNASSLSTGHATPLHVTSPSSASRGDTSTLPVTDASSASTGHATPLPLTSLSSVSTGDTTPLPVTDTSSASTGQATPLPVTSLSSVSTGDTTPLPVTIPSSASSGHTTSLPVTDASSVSTGHGTPLPVTSTSSASTGDTTPLPVTDTSSASTGHATPLPVTDTSSASTGHATPLPVTSLSSVSTGHATPLAVSSATSASTVSSDSPLKMETPGMTTPSLKTDGGRRTATSPPPTTSQTIISTIPSTAMHTRSTAAPIPILPERGVSLFPYGAGAGDLEFVRRTVDFTSPLFKPATGFPLGSSLRDSLYASQAGTLWPWWLRSGTMLTSPLVGGPHFIRATPTKPSSPRTGAGPMPCFSTRAVGCSGTWPSAQATRCSWASLVEMAISKTAH

SEQ ID NO: 81599 - protein, 110 aa, Homo sapiens
  MOD_RES (1)..(1): Any amino acid
XKLAEEFFLSTEGTVLGLDLSGDPTIPNQKKETQILLDLLPDRIGHGTFLNSGEGGSLDLVDFVRQHRIPLELCLTSNVKSQTVPSYDQHHFGFWYSIAHPSVICVRCSV

SEQ ID NO: 81600 - protein, 74 aa, Homo sapiens
MFYYPNVLQRHTGCFATIWLAATRGSRLVKREYLRVNVVKTCEEILNYVLVRVQPPQPGLPRPRFSLYLSAQLQ

SEQ ID NO: 81601 - protein, 36 aa, Homo sapiens
MDDNRRIQMLADTVATLPRGRKQLALTRSSSLSDFS

SEQ ID NO: 81602 - protein, 108 aa, Homo sapiens
ARPVAIPNTSHDGHWPRTVAPNSLVNSGAVGNSEPGFRGLTPPIPWEHAPRPHFPLVPASWPYGLHQNFMHQGNARFQPNKPFYTQDRCATRRCRERCPHPPRGNVSE

SEQ ID NO: 81603 - protein, 190 aa, Homo sapiens
MFSLKPPKPTFRSYLLPPPQTDDKINSEPKIKKLEPVLLPGEIVVNEVNFVRKCIATDTSQYDLWGKLICSNFKISFITDDPMPLQKFHYRNLLLGEHDVPLTCIEQIVTVNDHKRKQKVLGPNQKLKFNPTELIIYCKDFRIVRFRFDESGPESAKKVCLAIAHYSQPTDLQLLFAFEYVGKKYHNSEA

SEQ ID NO: 81604 - protein, 156 aa, Homo sapiens
MTFNSFEGSKTCVPADINKEEEFVEEFNRLKTFANFPSGSPVSASTLARAGFLYTGEGDTVRCFSCHAAVDRWQYGDSAVGRHRKVSPNCRFINGFYLENSATQSTNSGIQNGQYKVENYLGSRDHFALDRPSETHADYLLRTGQVVDISDTIYPR

SEQ ID NO: 81605 - protein, 117 aa, Homo sapiens
MAATAVAAAVAGTESAQGPPGPAASLELWLNKATDPSMSEQDWSAIQNFCEQVNTDPNGPTHAPWLLAHKIQSPQEKEALYALTPGGEPGTTGFPPSPGGPVSVQVLEMCMNHCGEK

SEQ ID NO: 81606 - protein, 147 aa, Homo sapiens
  MOD_RES (1)..(1): Any amino acid
XAALPLAGLAGRVGTARGAPLPSYLLLASVLESLAGACGLWLLVVERSQARQRLAMGIWIKFRHSPGLLLLWTVAFAAENLALVSWNSPQWWWARADLGQQVQFSLWVLRYVVSGGLFVLGLWAPGLRPQSYTLQVHEEDQDVERSQ

SEQ ID NO: 81607 - protein, 175 aa, Homo sapiens
MSTVHEILCKLSLEGDELASALKSALSGHLETVILGLLKTPAQYDASELKASMKGLGTDEDSLIEIICSRTNQELQEINRVYKEMYKTDLEKDIISDTSGDFRKLMVALAKGRRAEDGSVIDYELIDQDARDLYDAGVKRKGTDVPKWISIMTERSVPHLQKVFDRYKSYSPYDM

SEQ ID NO: 81608 - protein, 44 aa, Homo sapiens
MLCLGWIFLWLVAGERIKGFNISGCSTKKLLWTYSTRSEEEFVL

SEQ ID NO: 81609 - protein, 38 aa, Homo sapiens
MADDLGDEWWENQPTGAGSSPGPLPVSSRVCASKYLKT

SEQ ID NO: 81610 - protein, 327 aa, Homo sapiens
LTDRQTDTAPSPSYHLLPGRRRTVDAAASRGQGPEPAPGGGVEGVGARGVALKLFVQLLGCSRFGGAVVRAGEAEPSGAARSASSGREEPQPEEGEEEEEKEEERGPQWRLGARKPGSWTGEAAVCADSAPAARAPQALARASGRGGRVARRGAEESGPPHSPSRRGSASRAGPGRASETMNFLLSWVHWSLALLLYLHHAKWSQAAPMAEGGGQNHHEVVKFMDVYQRSYCHPIETLVDIFQEYPDEIEYIFKPSCVPLMRCGGCCNDEGLECVPTEESNITMQIMRIKPHQGQHIGEMSFLQHNKCECRPKKDRARQEKCDKPRR

SEQ ID NO: 81611 - protein, 190 aa, Homo sapiens
MLLLSLTLSLVLLGSSWGQQRLPLLRWFSHQPVLGGHCCPLQCQVLSVSRVSAWAADTEEKWAVQAITHPSWNSTTMNNDVTLLKLASPAQYTTRISPVCLASSNEALTEGLTCVTTGWGRLSGVGNVTPAHLQQVALPLVTVNQCRQYWGSSITDSMICAGGAGASSCQGDSGGPLVCQKGNTWVLIGI

SEQ ID NO: 81612 - protein, 65 aa, Homo sapiens
RQVEVNVRNKILYLIQAWAHAFRNEPKYKGTSFQNSKRAMPCLLPREPQTGWTLRNATAAGCSSG

SEQ ID NO: 81613 - protein, 267 aa, Homo sapiens
MPPSGPRGTLLLLPLLLLLLLRAVLAVPLERGAPNKEETPATESPDTGLYYHRYLQEVIDVLETDGHFREKLQAANAEDIKSGKLSRELDFVSHHVRTKLDELKRQEVSRLRMLLKAKMDAEQDPNVQVDHLNLLKQFEHLDPQNQHTFEARDLELLIQTATRDLAQYDAAHHEEFKRYEMLKEHERRRYLESLGEEQRKEAERKLEEQQRRHREHPKVNVPGSQAQLKEVWEELDGLDPNRDLTHPVLGPLRYLAILFPSDINSDG

SEQ ID NO: 81614 - protein, 1083 aa, Homo sapiens
MPTNFTVVPVEAHADGGGDETAERTEAPGTPEGPEPERPSPGDGNPRENSPFLNNVEVEQESFFEGKNMALFEEEMDSNPMVSSLLNKLANYTNLSQGVVEHEEDEESRRREAKAPRMGTFIGVYLPCLQNILGVILFLRLTWIVGVAGVLESFLIVAMCCTCTMLTAISMSAIATNGVVPAGGSYYMISRSLGPEFGGAVGLCFYLGTTFAGAMYILGTIEIFLTYISPGAAIFQAEAAGGEAAAMLHNMRVYGTCTLVLMALVVFVGVKYVNKLALVFLACVVLSILAIYAGVIKSAFDPPDIPVCLLGNRTLSRRSFDACVKAYGIHNNSATSALWGLFCNGSQPSAACDEYFIQNNVTEIQGIPGAASGVFLENLWSTYAHAGAFVEKKGVPSVPVAEESRASTLPYVLTDIAASFTLLVGIYFPSVTGIMAGSNRSGDLKDAQKSIPTGTILAIVTTSFIYLSCIVLFGACIEGVVLRDKFGEALQGNLVIGMLAWPSPWVIVIGSFFSTCGAGLQSLTGAPRLLQAIARDGIVPFLQVFGHGKANGEPTWALLLTVLICETGILIASLDSVAPILSMFFLMCYLFVNLACAVQTLLRTPNWRPRFKFYHWTLSFLGMSLCLALMFICSWYYALSAMLIAGCIYKYIEYRGAEKEWGDGIRGLSLNAARYALLRVEHGPPHTKNWRPQVLVMLNLDAEQAVKHPRLLSFTSQLKAGKGLTIVGSVLEGTYLDKHMEAQRAEENIRSLMSTEKTKGFCQLVVSSSLRDGMSHLIQSAGLGGLKHNTVLMAWPASWKQEDNPFSWKNFVDTVRDTTAAHQALLVAKNVDSFPQNQERFGGGHIDVWWIVHDGGMLMLLPFLLRQHKVWRKCRMRIFTVAQVDDNSIQMKKDLQMFLYHLRISAEVEVVEMVENDISAFTYERTLMMEQRSQMLKQMQLSKNEQEREAQLIHDRNTASHTAAAARTQAPPTPDKVQMTWTREKLIAEKYRSRDTSLSGFKDLFSMKPDQSNVRRMHTAVKLNGVVLNKSQDAQLVLLNMPGPPKNRQGDENYMEFLEVLTEGLNRVLLVRGGGREVITIYS

SEQ ID NO: 81615 - protein, 123 aa, Homo sapiens
MSGLGRLFGKGKKEKGPTPEEAIQKLKETEKILIKKQEFLEQKIQQELQTAKKYGTKNKRAALQALRRKKRFEQQLAQTDGTLSTLEFQREAIENATTNAEVLRTMELAAQSMKKAYQDMWGH

SEQ ID NO: 81616 - protein, 2424 aa, Homo sapiens
MPPNINWKEIMKVDPDDLPRQEELADNLLISLSKVEVNELKSEKQENVIHLFRITQSLMKMKAQEVELALEEVEKAGEEQAKFENQLKTKVMKLENELEMAQQSAGGRDTRFLRNEICQLEKQLEQKDRELEDMEKELEKEKKVNEQLALRNEEAENENSKLRRENKRLKKKNEQLCQDIIDYQKQIDSQKETLLSRRGEDSDYRSQLSKKNYELIQYLDEIQTLTEANEKIEVQNQEMRKNLEESVQEMEKMTDEYNRMKAIVHQTDNVIDQLKKENDHYQLQVQELTDLLKSKNEEDDPIMVAVNAKVEEWKLILSSKDDEIIEYQQMLHNLREKLKNAQLDADKSNVMALQQGIQERDSQIKMLTEQVEQYTKEMEKNTCIIEDLKNELQRNKGASTLSQQTHMKIQSTLDILKEKTKEAERTAELAEADAREKDKELVEALKRLKDYESGVYGLEDAVVEIKNCKNQIKIRDREIEILTKEINKLELKISDFLDENEALRERVGLEPKTMIDLTEFRNSKHLKQQQYRAENQILLKEIESLEEERLDLKKKIRQMAQERGKRSATSGLTTEDLNLTENISQGDRISERKLDLLSLKNMSEAQSKNEFLSRELIEKERDLERSRTVIAKFQNKLKELVEENKQLEEGMKEILQAIKEMQKDPDVKGGETSLIIPSLERLVNAIESKNAEGIFDASLHLKAQVDQLTGRNEELRQELRESRKEAINYSQQLAKANLKIDHLEKETSLLRQSEGSNVVFKGIDLPDGIAPSSASIINSQNEYLIHLLQELENKEKKLKNLEDSLEDYNRKFAVIRHQQSLLYKEYLSEKETWKTESKTIKEEKRKLEDQVQQDAIKVKEYNNLLNALQMDSDEMKKILAENSRKITVLQVNEKSLIRQYTTLVELERQLRKENEKQKNELLSMEAEVCEKIGCLQRFKEMAIFKIAALQKVVDNSVSLSELELANKQYNELTAKYRDILQKDNMLVQRTSNLEHLECENISLKEQVESINKELEITKEKLHTIEQAWEQETKLGNESSMDKAKKSITNSDIVSISKKITMLEMKELNERQRAEHCQKMYEHLRTSLKQMEERNFELETKFAELTKINLDAQKVEQMLRDELADSVSKAVSDADRQRILELEKNEMELKVEVSKLREISDIARRQVEILNAQQQSRDKEVESLRMQLLDYQAQSDEKSLIAKLHQHNVSLQLSEATALGKLESITSKLQKMEAYNLRLEQKLDEKEQALYYARLEGRNRAKHLRQTIQSLRRQFSGALPLAQQEKFSKTMIQLQNDKLKIMQEMKNSQQEHRNMENKTLEMELKLKGLEELISTLKDTKGAQKVINWHMKIEELRLQELKLNRELVKDKEEIKYLNNIISEYERTISSLEEEIVQQNKFHEERQMAWDQREVDLERQLDIFDRQQNEILNAAQKFEEATGSIPDPSLPLPNQLEIALRKIKENIRIILETRATCKSLEEKLKEKESALRLAEQNILSRDKVINELRLRLPATAEREKLIAELGRKEMEPKSHHTLKIAHQTIANMQARLNQKEEVLKKYQRLLEKAREEQREIVKKHEEDLHILHHRLELQADSSLNKFKQTAWDLMKQSPTPVPTNKHFIRLAEMEQTVAEQDDSLSSLLVKLKKVSQDLERQREITELKVKEFENIKLQLQENHEDEVKKVKAEVEDLKYLLDQSQKESQCLKSELQAQKEANSRAPTTTMRNLVERLKSQLALKEKQQKALSRALLELRAEMTAAAEERIISATSQKEAHLNVQQIVDRHTRELKTQVEDLNENLLKLKEALKTSKNRENSLTDNLNDLNNELQKKQKAYNKILREKEEIDQENDELKRQIKRLTSGLQGKPLTDNKQSLIEELQRKVKKLENQLEGKVEEVDLKPMKEKNAKEELIRWEEGKKWQAKIEGIRNKLKEKEGEVFTLTKQLNTLKDLFAKADKEKLTLQRKLKTTGMTVDQVLGIRALESEKELEELKKRNLDLENDILYMRAHQALPRDSVVEDLHLQNRYLQEKLHALEKQFSKDTYSKPSISGIESDDHCQREQELQKENLKLSSENIELKFQLEQANKDLPRLKNQVRDLKEMCEFLKKEKAEVQRKLGHVRGAELEKLKAHLGHQLSMHYESKTKGTEKIIAENERLRKELKKETDAAEKLRIAKNNLEILNEKMTVQLEETGKRLQFAESRGPQLEGADSKSWKSIVVTRMYETKLKELETDIAKKNQSITDLKQLVKEATEREQKVNKYNEDLEQQIKILKHVPEGAETEQGLKRELQVLRLANHQLDKEKAELIHQIEANKDQSGAESTIPDADQLKEKIKDLETQLKMSDLEKQHLKEEIKKLKKELENFDPSFFEEIEDLKYNYKEEVKKNILLEEKVKKLSEQLGVELTSPVAASEEFEDEEESPVNFPIY

SEQ ID NO: 81617 - protein, 147 aa, Homo sapiens
MHMMVSKPEQWVKPMAVAGANQYTFHLEATENPGALIKDIRENGMKSCSVTQAEVQWHSQGPLQVGLAIKPGTSVEYLAPWANQIDMALVMTVEPGFGGQKFMEDMMPKVHWLRTQFPSLDIEVDGGVGPDTVHKCAEIGVQWRDLC

SEQ ID NO: 81618 - protein, 65 aa, Homo sapiens
MDSQGRKVVVCDNGTGFVKCGYAGSNFPEHIFPALVGRPIIRSTTKVGNIEIKALFFEQLSKRNR

SEQ ID NO: 81619 - protein, 216 aa, Homo sapiens
MNHLPEDMENALTGSQSSHASLRNIHSINPTQLMARIESYEGREKKGISDVRRTFCLFVTFDLLFVTLLWIIELNVNGGIENTLEKEVMQYDYYSSYFDIFLLAVFRFKVLILAYAVCRLRHWWAIALFSQGAFGYVLPIISFILAWIETWFLDFKVLPQEAEEENRLLIVQDASERAALIPGGLSDGQFYSPPESEAGSEEAEEKQDSEKPLLEL

SEQ ID NO: 81620 - protein, 48 aa, Homo sapiens
MAKVSVLNVAVLENPSPFHSPFRFEISFECSEALADGRRPQPIPHPRD

SEQ ID NO: 81621 - protein, 55 aa, Homo sapiens
MCMVIFAPLFAIFAFATCGGYSGGLRLSVDCVNKTESNLSIDIAFAYPFRTSLSL

SEQ ID NO: 81622 - protein, 156 aa, Homo sapiens
MLFQCSLPDTTATLGDEPRKVLLRLYGAILQMRSCNKEGSEQAQKENEFQGAEAMVLESVMFAILAERSLGPKLYGIFPQGRLEQFIPSRRLDTEELSLPDISAEIAEKMATFHGMKMPFNKEPKWLFGTMEKYLKEVLRIKFTEESRIKKLHKLL

SEQ ID NO: 81623 - protein, 371 aa, Homo sapiens
MALRLLKLAATSASARVVAAGAQRVRGIHSSVQCKLRYGMWHFLLGDKASKRLTERSRVITVDGNICTGKGKLAKEIAEKLGFKHFPEAGIHYPDSTTGDGKPLATDYNGNCSLEKFYDDPRSNDGNSYRLQSWLYSSRLLQYSDALEHLLTTGQGVVLERSIFSDFVFLEAMYNQGFIRKQCVDHYNEVKSVTICDYLPPHLVIYIDVPVPEVQRRIQKKGDVETAGLFISFFLPLSPPHEMKITSAYLQDIENAYKKTFLPEMSEKCEVLQYSAREAQDSKKVVEDIEYLKFDKGPWLKQDNRTLYHLRLLVQDKFEVLNYTSIPIFLPEVTIGAHQTDRVLHQFRELPGRKYSPGYNTEVGDKWIWLK

SEQ ID NO: 81624 - protein, 343 aa, Homo sapiens
MSHGPAWPLPQAKLEKSLEHLRKQMQDALLFQAQADETCVLWQKMVESQRQNVLGEFERLRRLLAEEEQQLLQRLEEEELEVLPRLREGAAHLGQQSAHLAELIAELEGRCQLPALGLLQDIKDALRRVQDVKLQPPEVVPMELRTVCRVPGLVETLRRFRGDVTLDPDTANPELILSEDRRSVQRGDLRQALPDSPERFDPGPCVLGQERFTSGRHYWEVEVGDRTSWALGVCRENVNRKEKGELSAGNGFWILVFLGSYYNSSERALAPLRDPPRRVGIFLDYEAGHLSFYSATDGSLLFIFPEIPFSGTLRPLFSPLSSSPTPMTICRPKGGSGDTLAPQ

SEQ ID NO: 81625 - protein, 157 aa, Homo sapiens
MFSFPAASPHATPSTLHFPTSPIIQQPGPYFSHPAIRYHPQETLKEFVQLVCPDAGQQAGQVGFLNPNGSSQGKVHNPFLPTPMLPPPPPPPMARPVPLPVPDTKPPTTSTEGGAASPTSPTYSTPSTSPANRFVSVGPRDPSFVNIPQQTQSWYLG

SEQ ID NO: 81626 - protein, 365 aa, Homo sapiens
MRLLRRRHMPLRLAMVGCAFVLFLFLLHRDVSSREEATEKPWLKSLVSRKDHVLDLMLEAMNNLRDSMPKLQIRAPEAQQTLFSINQSCLPGFYTPAELKPFWERPPQDPNAPGADGKAFQKSKWTPLETQEKEEGYKKHCFNAFASDRISLQRSLGPDTRPPECVDQKFRRCPPLATTSVIIVFHNEAWSTLLRTVYSVLHTTPAILLKEIILVDDASTEEHLKEKLEQYVKQLQVVRVVRQEERKGLITARLLGASVAQAEVLTFLDAHCECFHGWLEPLLARIAEDKTVVVSPDIVTIDLNTFEFAKPVQRGRVHSRGNFDWSLTFGWETLPPHEKQRRKDETYPIKCGSVGASWRSSPALS

SEQ ID NO: 81627 - protein, 551 aa, Homo sapiens
MEEAELVKGRLQAITDKRKIQEEISQKRLKIEEDKLKHQHLKKKALREKWLLDGISSGKEQEEMKKQNQQDQHQIQVLEQSILRLEKEIQDLEKAELQISTKEEAILKKLKSIERTTEDIIRSVKVEREERAEESIEDIYANIPDLPKSYIPSRLRKEINEEKEDDEQNRKALYAMEIKVEKDLKTGESTVLSSIPLPSDDFKGTGIKVYDDGQKSVYAVSSNHSAAYNGTDGLAPVEVEELLRQASERNSKSPTEYHEPVYANPFYRPTTPQRETVTPGPNFQERIKIKTNGLGIGVNESIHNMGNGLSEERGNNFNHISPIPPVPHPRSVIQQAEEKLHTPQKRLMTPWEESNVMQDKDAPSPKPRLSPRETIFGKSEHQNSSPTCQEDEEDVRYNIVHSLPPDINDTEPVTMIFMGYQQAEDSEEDKKFLTGYDGIIHAELVVIDDEEEEDEGEAEKPSYHPIAPHSQVYQPAKPTPLPRKRSEASPHENTNHKSPHKNSISLKEQEESLGSPVHHSPFDAQTTGDGTEDPSLTGNKNDKACHCCSVM

SEQ ID NO: 81628 - protein, 628 aa, Homo sapiens
  MOD_RES (1)..(1): Any amino acid
XKINEDEIPPPVALGKRPLAPQEPANRSPETDPPAPPALESDNPSQPETSLPGISAQPVSDLDPDPRALLSSRQREYKVAALSAKRAGELDRARELMRIGKRFGAVLEALEKGQPVDLSAMPPAPEDLKPQQASQAPTAPSVIPPAVERVQPVMAPDVPATPVAPTESQTVLDALQQRLNKYREAGIQARSGGDERKARMHERIAKQYQDAIRAHRAGRKVNFAELPVPPGFPPIPGLESTMGVEEDAVAATLAAAEKLASAEDSAPADKDEDEGEPPAQAPVAKKPARPTVPSSQRLPEPRASSSKESPSPSVREQLALLEARKLQYQRAALQAKRSQDLEQAKAYLRVAKWLEAQIIQARSGRPVDLSKVPSPLTDEEGDFILIHHEDLRLSQKAEEVYAQLQKMLLEQQEKCLLFSKQFMHQGNVAETTRFEKLAQDRKKQLEILQLAQAQGLDPPTHHFELKTFQTVRIFSELNSTEMHLIIVRGMNLPAPPGVTPDDLDAFVRFEFHYPNSDQAQKSKTAVVKNTNSPEFDQLFKLNINRNHRGFKRVIQSKGIKFEIFHKGSFFRSDKLVGTAHLKLERLENECEIREIVEVLDGRKPTGGKLEVKPMASTRRGVRPRLCRR

SEQ ID NO: 81629 - protein, 360 aa, Homo sapiens
MAASAKKKNKKGKTISLTDFLAEDGGTGGGSTYVSKPVSWADETDDLEGDVSTTWHSNDDDVYRAPPIDRSILPTAPRAAREPNIDRSRLPKSPPYTAFLGNLPYDVTEESIKEFFRGLNISAVRLPREPSNPERLKGFGYAEFEDLDSLLSALSLNEESLGNRRIRVDVADQAQDKEYRDRYDSDRYRDGYRDGYRDGPRRDMDRYGGRDRYDDRGSRDYDRGYDSRIGSGRRAFGSGYRRDDDYRGGGDRYEDRYDRRDDRSWSSRDDYSRDDYRRDDRGPPQRPKLNLKPRSTPKEDDSSASTSQSTRAASIFGGAKPVDTAAREREVEERLQKEQEKLQRQLDEPKLERRPRERHP

SEQ ID NO: 81630 - protein, 884 aa, Homo sapiens
MGRAAATAGGGGGARRWLPWLGLCFWAAGTAAARGTDNGEALPESIPSAPGTLPHFIEEPDDAYIIKSNPIALRCKARPAMQIFFKCNGEWVHQNEHVSEETLDESSGLKVREVFINVTRQQVEDFHGPEDYWCQCVAWSHLGTSKSRKASVRIAYLRKNFEQDPQGREVPIEGMIVLHCRPPEGVPAAEVEWLKNEEPIDSEQDENIDTRADHNLIIRQARLSDSGNYTCMAANIVAKRRSLSATVVVYVDGSWEVWSEWSVCSPECEHLRIRECTAPPPRNGGKFCEGLSQESENCTDGLCILDKKPLHEIKPQSIENASDIALYSGLGAAVVAVAVLVIGVTLYRRSQSDYGVDVIDSSALTGNSLLLNSAMQPDLTVSRTYSGPICLQDPLDKELMTESSLFNPLSDIKVKVQSSFMVSLGVSERAEYHGKNHSRTFPHGNNHSFSTMHPRNKMPYIQNLSSLPTRTELRTTGVFGHLGGRLVMPNTGVSLLIPHGAIPEENSWEIYMSINQGEPSLQSDGSEVLLSPEVTCGPPDMIVTTPFALTIPHCADVSSEHWNIHLKKRTQQGKWEEVMSVEDESTSCYCLLDPFACHVLLDSFGTYALTGEPITDCAVKQLKVAVFGCMSCNSLDYNLRVYCVDNTPCAFQEVVSDERHQGGQLLEEPKLLHFKGNTFSLQISVLDIPPFLWRIKPFTACQEVPFSRVWCSNRQPLHCAFSLERYTPTTTQLSCKICIRQLKGHEQILQVQTSILESERETITFFAQEDSTFPAQTGPKAFKIPYSIRQRICATFDTPNAKGKDWQMLAQKNSINRNLSYFATQSSPSAVILNLWEARHQHDGDLDSLACALEEIGRTHTKLSNISESQLDEADFNYSRQNGL

SEQ ID NO: 81631 - protein, 325 aa, Homo sapiens
MNLDSIHRLIEETQIFQMQQSSIKSRGDMVAPASPPRDTCNTCFPLHGLQSHAAHNFCAHSYNTNKWDICEELRLRELEEVKARAAQMEKTMRWWSDCTANWREKWSKVRAERNSAREEGRQLRIKLEMAMKELSTLKKKQSLPPQKEALEAKVTQDLKLPGFVEESCEHTDQFQLSSQMHESIREYLVKRQFSTKEDTNNKEQGVVIDSLKLSEEMKPNLDGVDLFNNGGSGNGETKTGLRLKAINLPLENEVTEISALQVHLDEFQKILWKEREMRTALEKEIERLESALSLWKWKYEELKESKPKNVKEFDILLGQHNDEMQ

SEQ ID NO: 81632 - protein, 25 aa, Homo sapiens
  MOD_RES (1)..(1): Any amino acid
XEKAVLLLKSFQNTVDLVIQRKHLL

SEQ ID NO: 81633 - protein, 140 aa, Homo sapiens
MSQKQEEENPAEETGEEKQDTQEKEGILPERAEEAKLKAKYPSLGQKPGGSDFLMKRLQKGVWGIVSYPLSLELKEVLRMKSVEQKYFDSGDYNMAKAKMKNKQLPSAGPDKNLVTGDHIPTPQDLPQRKSSLVTSKLAG

SEQ ID NO: 81634 - protein, 84 aa, Homo sapiens
MEPLLLGRGLIVYLMFLLLKFSKAIEIPSSVQQVPTIIKQSKVQVAFPFDEYFQIECEAKGNPEPTFSWTKDGNPFYFTDHRII

SEQ ID NO: 81635 - protein, 67 aa, Homo sapiens
MGKKGKVGKSRRDKFYHLAKETGYRSRSAFKLIQLNRRFQFLQKARALLDLCAAPGGWFVTLATGCR

SEQ ID NO: 81636 - protein, 392 aa, Homo sapiens
MYDNLYLHGIEDSEAGSADSYTSRPSDSDVSLEEDREAIRQEREQQAAIQLERAKSKPVAFAVKTNVSYCGALDEDVPVPSTAISFDAKDFLHIKEKYNNDWWIGRLVKEGCEIGFIPSPLRLENIRIQQEQKRGRFHGGKSSGNSSSSLGEMVSGTFRATPTSTAKQKQKVTEHIPPYDVVPSMRPVVLVGPSLKGYEVTDMMQKALFDFLKHRFDGRISITRVTADISLAKRSVLNNPSKRAIIERSNTRSSLAEVQSEIERIFELARSLQLVVLDADTINHPAQLIKTSLAPIIVHVKVSSPKSQRMRHSNHSTENSPIERRSLMTSDENYHNERARKSRNRLSSSSQHSRDHYPLVEEDYPDSYQDTYKPHRNRGSPGGYSHDSRHRL

SEQ ID NO: 81637 - protein, 174 aa, Homo sapiens
MRWQLSEQLRCLELQGELRRELLQELAEFMRRRAEVELEYSRGLEKLAERFSSRGGRLGSSREHQSFRKEPSLLSPLHCWAVLLQHTRQQSRESAALSEVLAGPLAQRLSHIAEDVGRLVKKSRDLEQQLQDELLEVVSELQTAKKTYQAYHMESVNAEAKLREAERQEEKRAG

SEQ ID NO: 81638 - protein, 591 aa, Homo sapiens
MEMQDLTSPHSRLSGSSESPSGPKLGNSHINSNSMTPNGTEVKTEPMSSSETASTTADGSLNNFSGSAIGSSSFSPRPTHQFSPPQIYPSKPYPHILPTPSSQTMAAYGQTQFTTGMQQATAYATYPQPGQPYGISSYGALWAGIKTEGGLSQSQSPGQTGFLSYGTSFSTPQPGQAPYSYQMQGSSFTTSSGIYTGNNSLTNSSGFNSSQQDYPSYPSFGQGQYAQYYNSSPYPAHYMTSSNTSPTTPSTNATYQLQEPPSGITSQAVTDPTAEYSTIHSPSTPIKDSDSDRLRRGSDGKSRGRGRRNNNPSPPPDSDLERVFIWDLDETIIVFHSLLTGSYANRYGRDPPTSVSLGLRMEEMIFNLADTHLFFNDLEECDQVHIDDVSSDDNGQDLSTYNFGTDGFPAAATSANLCLATGVRGGVDWMRKLAFRYRRVKEIYNTYKNNVGGLLGPAKREAWLQLRAEIEALTDSWLTLALKALSLIHSRTNCVNILVTTTQLIPALAKVLLYGLGIVFPIENIYSATKIGKESCFERIIQRFGRKVVYVVIGDGVEEEQGAKKHAMPFWRISSHSDLMALHHALELEYL

SEQ ID NO: 81639 - protein, 260 aa, Homo sapiens
MFQDSRPNMSRPLITRSPASPLNNQGIPTPAQLTKSNAPVHIDVGGHMYTSSLATLTKYPESRIGRLFDGTEPIVLDSLKQHYFIDRDGQMFRYILNFLRTSKLLIPDDFKDYTLLYEEAKYFQLQPMLLEMERWKQDRETGRFSRPCECLVVRVAPDLGERITLSGDKSLIEEVFPEIGDVMCNSVNAGWNHDSTHVIRFPLNGYCHLNSVQVLERLQQRGFEIVGSCGGGVDSSQFSEYVLRRELRRTPRVPSVIRIK

SEQ ID NO: 81640 - protein, 872 aa, Homo sapiens
LTYAANAGPCPENLLPPKKIKTPKGTLPRLVDHVWHHPVRRNKFKYLIDHPVSLTGAGRDISFLYDVTYAKGQTREKAVCPPHLARSLQSHDGVIVPHKPKTLTDTLIPEEFHIVSSTGVSGLECYDDKYTTLLTDSENRLLLFPSMKPNKRVEVAQLNDVMDTMLERAGVENQEYTGPTKMHKLLHILKKEQTIYNMIFHELIRQVSVDCADRGELLSKVRERYVQMLDQIARQMIDFYKDLVTQRVMDQRILEELYNFKHVIEELTRELCLVRAHDVKLTKETEKAHKDLAQALLNAEKNAKIVEEYHDLYTLQRERMENDMKKLVAERDIWSSATYELALKVIERNRVILARRLYLNEKGWNKYTKHFIILLSNKDTEDLALLQKLTQKWRNLVNKLKQEVEQMEESTSETLKIVKDGLIKWQEFFNEKDILSPNKGNIFNSVLLDFKQWQKILNEKKEEFTGDVLLSKYDTLKIIKHLQENWADIGLGIFNRHKSLEGEMPSERQYMEEIIKNIQKLYKEYEIRINGDNGYSKILPSLISSLDFCSFKLENLEFPDTPLEEWQEIDEKINEMKSHLDILLNLTGIVPQHIDVDSVSVLQAYIFNMIQQWLLKIGNEINNGNIELQHHMDELHISMIQWMVNLLILMIPNFTDQDCLLKLEEESAEKHDIGVARLELDAIELTRKLYQYSSYLSSCCKGMVTAMALSKSTNSHKNATEDLYEVDKLKQPSTSTEKEKLIRFIGEDENVHSKPLFETDVLSSWRESAKQGTLAQKYLEAMAVIEHMQEKLLEVENRARQAEEKFEDAYEKLHHTLIKNKDLEELVMTSRKESKEEKENQDEREVKEEEEQQEEEEVRSAENSSKSPKKGH

SEQ ID NO: 81641 - protein, 68 aa, Homo sapiens
MSYYQRPFSPSAYSLPASLNSSIVMQHGTSLDSTDTYPQHAQSLDGTTSSSIPLYRSSEEEKRVTVIK

SEQ ID NO: 81642 - protein, 164 aa, Homo sapiens; identical to SEQ ID NO: 8987

SEQ ID NO: 81643 - protein, 195 aa, Homo sapiens
MIVTGQYGRLFAVVHFASRQWKVTSEDLILIGNELDLACGERIRLEKVLLVGADNFTLLGKPLLGKDLVRVEATVIEKTESWPRIIMRFRKRKNFKKKRSKLEKVPLGPVARCWLPRRMRTEGVGHVGLGTGSPGRSQPGCHCPLATLILEGAPRGSSLAPLLLHAPRVTPPRSPSPPRSARDPTSLPFSSTLRA

SEQ ID NO: 81644 - protein, 27 aa, Homo sapiens
MNMFKEAVTFKDVAVAFTEEELGLLGP

SEQ ID NO: 81645 - protein, 47 aa, Homo sapiens
MSTRKRRGGAINSRQAQKRTREATSTPEISLEAEPIELVETGWGAVA

SEQ ID NO: 81646 - protein, 268 aa, Homo sapiens
MELERSIDISRRQSKEHICRITDLQEELRHREHHISELDKEVQHLHENISALTKELEFKGKEILRIRSESNQQIRLHEQDLNKRLEKELDVMTADHLREKNIMRADFNKTNELLKEINAALQVSLEEMEEKYLMRESKPEDIQMITELKAMLTERDQIIKKLIEDNKFYQLELVNRETNFNKVFNSSPTVGVINPLAKQKKKNDKSPTNRFVSVPNLSALESGGVGNGHPNRLDPIPNSPVHDIEFNSSKPLPQPVPPKGPKTFLRYQ

SEQ ID NO: 81647 - protein, 172 aa, Homo sapiens
MLKVSAVLCVCAAAWCSQSLAAAAAVAAAGGRSDGGNFLDDKQWLTTISQYDKEVGQWNKFRDDDYFRTWSPGKPFDQACSDLEFREVANRLRDWFKALHESGSQNKKTKTLLRPERSRFDTSILPICKDSLGWMFNRLDTNYDLLLDQSELRSIYLDKNEQCTKAFFNSCD

SEQ ID NO: 81648 - protein, 133 aa, Homo sapiens
  MOD_RES (1)..(1): Any amino acid
XPGAGPLEDAASRASELPRQQVPKPCQASPPRLGVCARPPEGGDGARDTRNSGAPRTTYLASCKAFTPARVSCSPHSAKALGHRWPCWAPAASGSPSSQGTCPPPASGGWLRLKAVVGYSGNGRANMVWRPDT

SEQ ID NO: 81649 - protein, 20 aa, Homo sapiens
  MOD_RES (1)..(1): Any amino acid
XSWDTRQMFFGTGIKLFVEP

SEQ ID NO: 81650 - protein, 120 aa, Homo sapiens
MGDKIWLPFPVLLLAALPPVLLPGAAGFTPSLDSDFTFTLPAGQKECFYQPMPLKASLEIEYQVLDGAGLDIDFHLASPEGKTLVFEQRKSDGVHTCIRSKNGPGTAVHAYNPSTFRGQV

SEQ ID NO: 81651 - protein, 201 aa, Homo sapiens
MSEYIRVTEDENDEPIEIPSEDDGTVLLSTVTAQFPGACGLRYRNPVSQCMRGVRLVEGILHAPDAGWGNLVYVVNYPKDNKRKMDETDASSAVKVKRAVQKTSDLIVLGLPWKTTEQDLKEYFSTFGEVLMVQVKKDLKTGHSKGFGFVRFTEYETQVKVMSQRHMIDGRWCDCKLPNSKQSQDEPLRSRKVFVGRCTED

SEQ ID NO: 81652 - protein, 516 aa, Homo sapiens
MAENLKRLVSNETLRTLQEKLDFWLKEYNTNTCDQNLNHCLELIEQVAKVQGQLFGILTAAAQEGGRNDGVETIKSRLLPWLEASFTAASLGKSVDSKVPSLQDTFDRERHKDPSPRDRDMQQLDSNLNSTRSQCNQVQDDLVETEKNLEESKNRSAISLLAAEEEINQLKKQLKSLQAQEDARHRNTDQRSSENRRSEPWSLEERKREQWNSLKQNADQQDTEAMSDYKKQLRNLKEEIAVLSAEKSALQGRSSRSRSPSPAPRSRSCSRSRSASPSTAVKVRRPSPNRSKLSNVARKAALLSRFSDSYSQARLDAQCLLRRCIDKAETVQRIIYIATVEAFHVAKMAFRHFKIHVRKSLTPSYVGSNDFENAVLDYVICHLDLYDSQSSVNDVIRAMNVNPKISFPPVVDFCLLSDFIQEICCIAFAMQALEPPLDIAYGADGEVFNDCKYRRSYDSDFTAPLVLYHVWPALMENDCVIMKGEAVTRRGAFVRWPCIVTIHPKCLIHNGIRCDL

SEQ ID NO: 81653 - protein, 97 aa, Homo sapiens
MQPEEGTGWLLELLSEVQLQQYFLRLRDDLNVTRLSHFEYVKNEDLEKIGMGRPGQRRLWEAVKRRKALCKRKSWMSKVFSGKRLEAEFPPHHSQST

SEQ ID NO: 81654 - protein, 68 aa, Homo sapiens
MAEVVAEVAEMPTQMSPGAVEMSTPMSAEMMEMSTEVTEMTPGEALASSLFFQHHQFMCSECGSLYNT

SEQ ID NO: 81655 - protein, 30 aa, Homo sapiens
MTRSCSAVGCSTRDTVLSRERGLSFHHVYL

SEQ ID NO: 81656 - protein, 1031 aa, Homo sapiens
MAPWRKADKERHGVAIYNFQGSGAPQLSLQIGDVVRIQETCGDWYRGYLIKHKMLQGIFPKSFIHIKEVTVEKRRNTENIIPAEIPLAQEVTTTLWEWGSIWKQLYVASKKERFLQVQSMMYDLMEWRSQLLSGTLPKDELKELKQKVTSKIDYGNKILELDLIVRDEDGNILDPDNTSVISLFHAHEEATDKITERIKEEMSKDQPDYAMYSRISSSPTHSLYVFVRNFVCRIGEDAELFMSLYDPNKQTVISENYLVRWGSRGFPKEIEMLNNLKVVFTDLGNKDLNRDKIYLICQIVRVGKMDLKDTGAKKCTQGLRRPFGVAVMDITDIIKGKAESDEEKQHFIPFHPVTAENDFLHSLLGKVIASKGDSGGQGLWVTMKMLVGDIIQIRKDYPHLVDRTTVVARKLGFPEIIMPGDVRNDIYITLLQGDFDKYNKTTQRNVEVIMCVCAEDGKTLPNAICVGAGDKPMNEYRSVVYYQVKQPRWMETVKVAVPIEDMQRIHLRFMFRHRSSLESKDKGEKNFAMSYVKLMKEDGTTLHDGFHDLVVLKGDSKKMEDASAYLTLPSYRHHVENKGATLSRSSSSVGGLSVSSRDVFSISTLVCSTKLTQNVGLLGLLKWRMKPQLLQENLEKLKIVDGEEVVKFLQDTLDALFNIMMEHSQSDEYDILVFDALIYIIGLIADRKFQHFNTVLEAYIQQHFSATLAYKKLMTVLKTYLDTSSRGEQCEPILRTLKALEYVFKFIVRSRTLFSQLYEGKEQMEFEESMRRLFESINNLMKSQYKTTILLQVAALKYIPSVLHDVEMVFDAKLLSQLLYEFYTCIPPVKLQKQKVQSMNEIVQSNLFKKQECRDILLPVITKELKELLEQKDDMQHQVLERKYCVELLNSILEVLSYQDAAFTYHHIQEIMVQLLRTVNRTVITMGRDHILISHFVACMTAILNQMGDQHYSFYIETFQTSSELVDFLMETFIMFKDLIGKNVYPGDWMAMSMVQNRVFLRAINKFAETMNQKFLEHTNFEFQGFSRTGM

SEQ ID NO: 81657 - protein, 129 aa, Homo sapiens
MDDLRYGVYPVKGASGYPGAERNLLEYSYFEKGPLTFRDVVIEFSQEEWQCLDTAQQDLYRKVMLENFRNLVFLGIDVSKPDLITCLEQGKDPWNMKRHSMVATPPGIFFVVRGGLHKTFKRYNVFQSS

SEQ ID NO: 81658 - protein, 224 aa, Homo sapiens
MRPLQIVPSRLISQLYCGLKPPASTRNQICLKMARPSSSMADFRKFFAKAKHIVIISGAGVSAESGVPTFRGAGGYWRKWQAQDLATPLAFAHNPSRVWEFYHYRREVMGSKEPNAGHRAIAECETRLGKQGRRVVVITQNIDELHRKAGTKNLLEIHGSLFKTRCTSCGVVAENYKSPICPALSGKGAPEPGTQDASIPVEKLPRRDEVSPCWPGWSRALDLR

SEQ ID NO: 81659 - protein, 155 aa, Homo sapiens
MDIAIHHPWIRRPFFPFHSPSRLFDQFFGEHLLESDLFPTSTSLSPFYLRPPSFLRAPSWFDTGLSEMRLEKDRFSVNLDVKHFSPEELKVKVLGDVIEVHGKHEERQVCSLFFCFLLIHSVHTVIVQVVLSALEAGYIPVPSHNSRDQGLQINV

SEQ ID NO: 81660 - protein, 37 aa, Homo sapiens
MFSDNSHCPDCGQQWFPSLELGHWLYQTELVENECYQ

SEQ ID NO: 81661 - protein, 200 aa, Homo sapiens
MEDVDFEEEEEEEGNEEGWVLEPQEGVVGSMEGPDDSEVTFALHSASVFCVSLDPKTNTLAVTGGEDDKAFVWRLSDGELLFECAGHKDSVTCAGFSHDSTLVATGDMSGLLKVWQVDTKEEVWSFEAGDLEWMEWHPRAPVLLAGTADGNTWMWKVPNGDCKTFQGPNCPATCGRVLPDGKRAVVGYEDGTIRIWDLKQ

SEQ ID NO: 81662 - protein, 249 aa, Homo sapiens
MAAKMEITLSSNTEASSKQERHIIAKLEEKRGPPLQKNCPDPELCRQSFRRFCYQEVSGPQEALSQLRQLCRQWLQPELHTKEQILELLVMEQFLTILPPEIQARVRHRCPMSSKEIVTLVEDFHRASKKPKQWVAVCMQGQKVLLEKTGSQLGEQELPDFQPQTPRRDLRESSPAEPSQAGAYDRLSPHHWEKSPLLQEPTPKLAGTGKHSAFSLPLISPLSPSMYLMVLQRHRPHVCVFLNVIYNSR

SEQ ID NO: 81663 - protein, 387 aa, Homo sapiens
PEPPKAELQLPPPPPPGHYGAWAAQELQAKLAEIGAPIQGNREELVERLQSYTRQTGIVLNRPVLRGEDGDKAAPPPMSAQLPGIPMPPPPLGLPPLQPPPPPPPPPPGLGLGFPMAHPPNLGPPPPLRVGEPVALSEEERLKLAQQQAALLMQQEERAKQQGDHSLKEHELLEQQKRAAVLLEQERQQEIAKMGTPVPRPPQDMGQIGVRTPLGPRAAPVGPVGPTPTVLPMGAPVPRPRGPPPPPGDENREMDDPSVGPKIPQALEKILQLKESRQEEMNSQQEEEEMETDARSSLGQSASETEEDTVSVSKKEKNRKRRNRKKKKKPQRVRGVSSESSGDREKDSTRSRGSDSPAADVEIEYVTEEPEIYEPNFIFFKRIFEAF

SEQ ID NO: 81664 - protein, 62 aa, Homo sapiens
MWTARGPFRRDRWSSEDEEAAGPSQALSPLLSGLEHLRILVSVGGPGTNSLQIQRDNSSTSI

SEQ ID NO: 81665 - protein, 113 aa, Homo sapiens
MANEVQDLLSPRKGGHPPAVKAGGMRISKKQEIGTLERHTKKTGFEKTSAIANVAKIQTLDALNDALEKEQVQLGVRNERQVQPFHHGCSWKETSGFDTRCPRHTEPRNLTGV

SEQ ID NO: 81666 - protein, 249 aa, Homo sapiens
MSAYVTVTYYNETSNYTAIETCECGVYGLASPVANAMGVVGIPKNNNYQACDHNTEFSNTKKPWIALIERGNCTFSEKIQTAGRRNADAVVIYNAPETGNQTIQMANFGAVDIVAIMIGNLKGTKILQSIQRGIQVTMVIEVGKKHGPWVNHYSIFFVSVSFFIITAATVGYFIFYSARRLRNARAQSRKQRQLKADAKKAIGRLQLRTLKQGDKEIGPDGDSCAVCIELYKPNDLVRILTCNHIFHKT

SEQ ID NO: 81667 - protein, 348 aa, Homo sapiens
MKRVLVLLLAVAFGHALERGRDYEKNKVCKEFSHLGKEDFTSLSLVLYSRKFPSGTFEQVSQLVKEVVSLTEACCAEGADPDCYDTRTSALSAKSCESNSPFPVHPGTAECCTKEGLERKLCMAALKHQPQEFPTYVEPTNDEICEAFRKDPKEYANQFMWEYSTNYGQAPLSLLVSYTKSYLSMVGSCCTSASPTVCFLKERLQLKHLSLLTTLSNRVCSQYAAYGEKKSRLSNLIKLAQKVPTADLEDVLPLAEDITNILSKCCESASEDCMAKELPEHTVKLCDNLSTKNSKFEDCCQEKTAMDVFVCTYFMPAAQLPELPDVELPTNKDVCDPGNTKVMDKALY

SEQ ID NO: 81668 - protein, 73 aa, Homo sapiens
MAPAAASPPEVIRAAQKDEYYRGGLRSAAGGALHSLAGLITLLIDEQIEIPERPHSQQVGELLFDARQLASGL

SEQ ID NO: 81669 - protein, 502 aa, Homo sapiens
MASEIHMPGPVCLTENTKGHLVVNSEALEILSAITQPVVVVAIVGLYRTGKSYLMNKLAGKNKGFPLGCTVKSETKGIWMWCVPHPSKPNHTLILLDTEGLGDMEKSDPKSDSWIFALAVLLSSSFVYNSMGTINHQALEQLHYVTELTELIRAKSCPRPDEVEDSSEFVSFFPDFIWTVRDFTLELKLDGHPITEDEYLENALKLISGKNPQIQNSNKPREWIRHFFPKQKCFVFDRPINDKKLLLHVEEVREDQLDSNFQMQSENFCSYIFTHAKTKTLREGILVTGNRLGMLVETYLDAINSGATPCLENAMAVLAQCENSAAVQRAANHYSQQMAQQVRFPTDTLQELLDVHAVCEREAIAVFMEYSFKDKSQEFQKKLVDTMEKKKEDFVLQNEEASAKYCQAELKRLSELLTESISRGTFFVPGGHNIYLEAKKKIEQDYTLVPRKGVKAKKEAAEKEQELLRQKQKEQQQMMEAQERSFQENIAQLKKKMERERE

SEQ ID NO: 81670 - protein, 147 aa, Homo sapiens
MFLVFSMTDIFHFEQFESTIGFKLPNHRAAKRLWKVCVEHHTFFRLLLPEAPPKKFLTLGSKFRYSGRTQAQTRRASALIDRPAPYFERSSSKRYTMSRSLDGASVNENHEIYMKDSMSAAEVGTGQYATTKGISQTNLITTVTPEK

SEQ ID NO: 81671 - protein, 99 aa, Homo sapiens
  MOD_RES (1)..(1): Any amino acid
XRPRRPHQIADLFRPKDQIAYSDTSPFLILSEASLADLNSRLEKKVKATNFRPNIVISGCDVYAEVTLCPFGSFLGFDFFFKIYSALNKCRLLCGGYKC

SEQ ID NO: 81672 - protein, 40 aa, Homo sapiens
  MOD_RES (1)..(1): Any amino acid
XLTGKGPSGQEKCKLENHISPDVRVLPGGGAHGSTRDQSI

SEQ ID NO: 81673 - protein, 104 aa, Homo sapiens
  MOD_RES (1)..(1): Any amino acid
XCVLLLAALLEAALGLPVKKPRLRGPRPGSLTRLAEVSGGGTGLRSALSVPPPQPAGSSRAGSGTGTHTGSDPPMERGAGAGRKLPDTGRCPGAPDFGASTPRA

SEQ ID NO: 81674 - protein, 106 aa, Homo sapiens
MATSIGVSFSVGDGVPEAEKNAGEPENTYILRPVFQQRFRPSVVKDCIHAVLKEELANAEYSPEEMPQLTKHLSENIKDKLKEMGFDRYKMVVQVVIGEQRGEGVF

SEQ ID NO: 81675 - protein, 162 aa, Homo sapiens
MDLNSASTVVLQVLTQATSQDTAVLKPAEEQLKQWETQPGFYSVLLNIFTNHTLDINVRWLAVLYFKHGIDRYWRRVAPHALSEEEKTTLRAGLITNFNEPINQIATQIAVLIAKVARLDCPRQWPELIPTLIESVKVQDDLRQHRALLTFYHVTKTLASKR

SEQ ID NO: 81676 - protein, 417 aa, Homo sapiens
  MOD_RES (1)..(1): Any amino acid
XPPPSTLCSYWALEQGKLSQASGLLLVLFSPRVSGRLGSVSVAGVNVEALFPAWPMESKTTYLEDLPPPPEYELAPSKLEEEVDDVFLIRAQGLPWSCTMEDVLNFFSDCRIRNGENGIHFLLNRDGKRRGDALIEMESEQDVQKALEKHRMYMGQRYVEVYEINNEDVDALMKSLQVKSSPVVNDGVVRLRGLPYSCNEKDIVDFFAGLNIVDITFVMDYRGRRKTGEAYVQFEEPEMANQALLKHREEIGNRYIEIFPSRRNEVRTHVGSYKGKKIASFPTAKYITEPEMVFEEHEVNEDIQPMTAFESEKEIELPKEVPEKLPEAADFGTTSSLHFVHMRGLPFQANAQDIINFFAPLKPVRITMEYSSSGKATGEADVHFETHEDAVAAMLKDRSHVHHRYIELFLNSCPKGK

SEQ ID NO: 81677 - protein, 411 aa, Homo sapiens
  MOD_RES (1)..(1): Any amino acid
XLDERLQRHRTSGGDHAPDSPSGENSPAPQGRLAEVQDSSMPVPAQPKAGGSGSYWPARHSGARVILLVLYREHLNPNGHHFLTKEELLQRCAQKSPRVAPGSARPWPALRSLLHRNLVLRTHQPARYSLTPEGLELAQKLAESEGLSLLNVGIGPKEPPGEETAVPGAASAELASEAGVQQQPLELRPGEYRVLLCVDIGETRGGGHRPELLRELQRLHVTHTVRKLHVGDFVWVAQETNPRDPAANPGELVLDHIVERKRLDDLCSSIIDGRFREQKFRLKRCGLERRVYLVEEHGSVHNLSLPESTLLQAVTNTQVIDGFFVKRTADIKESAAYLALLTRGLQRLYQGHTLRSRPWGTPGNPESGAMTSPNPLCSLLTFSDFNAGAIKNKAQSVREVFARQLMQVRGV

SEQ ID NO: 81678 - protein, 60 aa, Homo sapiens
  MOD_RES (1)..(1): Any amino acid
XWDGGSRLSPFLPHDHLGLAVFSMLCCFWPVGIAAFCLAQKHPQCLTYSRCYVSAFGIHA

SEQ ID NO: 81679 - protein, 211 aa, Homo sapiens
MDLSGVKKKSLLGVKENNKKSSTSSSSGSPSPSRRRHDNRRRSRSKSKPPKRDEKERKRRSPSPKPTKVHIGRLTRNVTKDHIMEIFSTYGKIKMIDMPVERMHPHLSKGYAYVEFENPDEAEKALKHMDGGQIDGQEITATAVLAPWPRPPPRRFSPPRRMLPPPPMWRRSPPRMRRRSRSPRRRSPVRRRSRSPGRRRHRSRSSSNSSR

SEQ ID NO: 81680 - protein, 32 aa, Homo sapiens
MMVSLGHLAKGASLDDLIDSCIQSFDADGNLC

SEQ ID NO: 81681 - protein, 558 aa, Homo sapiens
KMQEKDSLTESFPAALAKTLEDAALREENEQLSNASSSIGLCVDPLKGRCLVATKDILPGELLVQEDAFVSVLNPGELPPPHHGLDSKWDTRVTNGDLYCHRCLKHTLATVPCDGCSYAKYCSQECLQQAWELYHRTECPLGGLLLTLGVFCHIALRLTLLVGFEDVRKIITKLCDKISNKDICLPESNNQVKTLNYGLGESEKNGNIVETPIPGCDINGKYENNYNAVFNLLPHTENHSPEHKFLCALCVSALCRQLEAASLQAIPTERIVNSSQLKAAVTPELCPDVTIWGVAMLRHMLQLQCNAQAMTTIQHTGPKGSIVTDSRQVRLATGIFPVISLLNHSCSPNTSVSFISTVATIRASQRIRKGQEILHCYGPHKSRMGVAERQQKLRSQYFFDCACPACQTEAHRMAAGPRWEAFCCNSCGAPMQGDDVLRCGSRSCAESAVSRDHLVSRLQDLQQQVRVAQKLLRDGELERAVQRLSGCQRDAESFLWAEHAVVGEIADGLARACAALGDWQKSATHLQRSLYVVEVRHGPSSVEMGHELFKLAQIFFNG

SEQ ID NO: 81682 - protein, 206 aa, Homo sapiens
MSGSNGSKENSHNKARTSPYPGSKVERSQVPNEKVGWLVEWQDYKPVEYTAVSVLAGPRWADPQISESNFSPKFNEKDGHVERKSKNGLYEIENGRPRNPAGRTGLVGRGLLGRWGPNHAADPIITRWKRDSSGNKIMHPVSGKHILQFVAIKRKDCGEWAIPGGMVDPGEKISATLKREFGEEALNSLQKTSAEKREIEEKLHKL

SEQ ID NO: 81683 - protein, 87 aa, Homo sapiens
MAEASSANLGSGCEEKRHEGSSSESVPPGTTISRVKLLDTMVDTFLQKLVAAGRRSFTLVAQTGVQWRDLGSWQPPPPGFKQFSSAS

SEQ ID NO: 81684 - protein, 358 aa, Homo sapiens
  MOD_RES (1)..(1): Any amino acid
XLTDSECNQKHTSKKGSLIERKRSSGRVRRKGDEPQASGYHSEGETLKEKQAPRNASKPSSSTNRLRDFKETVSNMIHNRPSLASQTNVGSHCRGRGGDQPDKKPPRTLPLHSRDWEIESTSSESKSSSSSKYRPTWRPKRESLNIDSIFSKDKRKHCGYTQLSPFSEDSAKEFIPDEPSKPPSYDIKFGGPSPQYKRWGPARPGSHLLEQHPRLIQRMESGYESSERNSSSPVSLDAALPESSNVYRDPSAKRSAGLVPSWRHIPKSHSSSILEVDSTASMGGWTKSQPFSGEEISSKSELDELQEEVARRAQEQELRRKREKELEAAKGFNPHPSRFMDLDELQNQVNSLSRSKYC

SEQ ID NO: 81685 - protein, 123 aa, Homo sapiens
MMSEHDLADVVQIAVEDLSPDHPVVLENHVVTDEDEPALKRQRLEINCQDPSIKSFLYSINQTICLRLDSIEAKLQALEATCKSLEEKLDLVTNKQHSPIQVPMVAGSPLGATQTCNKVRCVV

SEQ ID NO: 81686 - protein, 179 aa, Homo sapiens
MAFRDVAVDFTQDEWRLLSPAQRTLYREVMLENYSNLVSLGISFSKPELITQLEQGKETWREEKKCSPATCPADPEPELYLDPFCPPGFSSQKFPMQHVLCNHPPWIFTCLCAEGNIQPGDPGPGDQEKQQQASEGRPWSDQAEGPEGEGAMPLFGRTKKRTLGAFSRPPQRQPVSSRN

SEQ ID NO: 81687 - protein, 457 aa, Homo sapiens
MSHTRDSHDSHLMPSPAPVAQPLPGHVVPCPSPFGRAQRVPSPGPPTLTSYSVLRRLTVQPKTRFTPMPSTPRVQQAQWLRGVSPQSCSEDPALPWEQVAVRLFDQESCIRSLEGSGKPPVATPSGPHSNRTPSLQEVKIQRIGILQQLLRQEVEGLVGGQCVPLNGGSSLDMVELQPLLTEISRTLNATEHNSGTSHLPGLLKHSGLPKPCLPEECGEPQPCPPAEPGPPEAFCRSEPEIPEPSLQEQLEVPEPYPPAEPRPLESCCRSEPEIPESSRQEQLEEQLEVPEPCPPAEPGPLQPSTQGQSGPPGPCPRVELGASEPCTLEHRSLESSLPPCCSQWAPATTSLIFSSQHPLCASPPICSLQSLRPPAGQAGLSNLAPRTLALRERLKSCLTAIHCFHEARLDDECAFYTSRAPPSGPTRVCTNPVATLLEWQDALCFIPVGSAAPQGSP

SEQ ID NO: 81688 - protein, 195 aa, Homo sapiens
  MOD_RES (1)..(1): Any amino acid
XEAVNGIVKHFHKPEKERGSLTLLLCGECGLVSALEQAFQHGFKSPRLFKNVFIWDFLEKAQTYYETLEKNEVVPEENWHTRARNFCRFVTAINNTPRNIGKDGKFQMLVCLGARVIMKIKSLMSVPAHAECYVRDHLLHHWIALLADCPITAHMYEDVALIKDHTLVNSLIRVLQTLQEFNITLETSLVKGIDI

SEQ ID NO: 81689 - protein, 63 aa, Homo sapiens
MSNPFLKQVFNKDKTFRPKRKFEPGTQRFELHKKAQASLNAGLDLRLAVQLPPGEDLNDWVAV

SEQ ID NO: 81690 - protein, 997 aa, Homo sapiens
MFTYICNHIKYATNRGNLRSAITVFPQRCPGRGDFRIWNSQLVRYAGYRQQDGSVRGDPANVEITELCIQHGWTPGNGRFDVLPLLLQAPDDPPELFLLPPELVLEVPLEHPTLEWFAALGLRWYALPAVSNMLLEIGGLEFPAAPFSGWYMSTEIGTRNLCDPHRYNILEDVAVCMDLDTRTTSSLWKDKAAVEINVAVLHSYQLAKVTIVDHHAATASFMKHLENEQKARGGCPADWAWIVPPISGSLTPVFHQEMVNYFLSPAFRYQPDPWKGSAAKGTGITRKKTFKEVANAVKISASLMGTVMAKRVKATILYGSETGRAQSYAQQLGRLFRKAFDPRVLCMDEYDVVSLEHETLVLVVTSTFGNGDPPENGESFAAALMEMSGPYNSSPRPEQHKSYKIRFNSISCSDPLVSSWRRKRKESSNTDSAGALGTLRFCVFGLGSRAYPHFCAFARAVDTRLEELGGERLLQLGQGDELCGQEEAFRGWAQAAFQAACETFCVGEDAKAAARDIFSPKRSWKRQRYRLSAQAEGLQLLPGLIHVHRRKMFQATIRSVENLQSSKSTRATILVRLDTGGQEGLQYQPGDHIGVCPPNRPGLVEALLSRVEDPPAPTEPVAVEQLEKGSPGGPPPGWVRDPRLPPCTLRQALTFFLDITSPPSPQLLRLLSTLAEEPREQQELEALSQDPRRYEEWKWFRCPTLLEVLEQFPSVALPAPLLLTQLPLLQPRYYSVSSAPSTHPGEIHLTVAVLAYRTQDGLGPLHYGVCSTWLSQLKPGDPVPCFIRGAPSFRLPPDPSLPCILVGPGTGIAPFRGFWQERLHDIESKGLQPTPMTLVFGCRCSQLDHLYRDEVQNAQQRGVFGRVLTAFSREPDNPKTYVQDILRTELAAEVHRVLCLERGHMFVCGDVTMATNVLQTVQRILATEGDMELDEAGDVIGVLRDQQRYHEDIFGLTLRTQEVTSRIRTQSFSLQERQLRGAVPWAFDPPGSDTNSP

SEQ ID NO: 81691 - protein, 58 aa, Homo sapiens
MAAINPWASWGALTDQSWGMTAVDPWASWGTSDLQGRGRGLHPRRVGAAGPCSEDPVP

SEQ ID NO: 81692 - protein, 69 aa, Homo sapiens
MDTVVFEDVVVDFTLEEWALLNPAQRKLYRDVMLETFKHLASIMRLSLKPVGLFLSRILLEKNYPSNRK

SEQ ID NO: 81693 - protein, 107 aa, Homo sapiens
MGVLRVGLCPGLTEEMIQLLRSHRIKTVVDLVSADLEEVAQKCGLSYKALVALRRVLLAQFSAFPVNGADLYEELKTSTAILSTGIGRYVSVWQQMWPMACSKTSYM

SEQ ID NO: 81694 - protein, 21 aa, Homo sapiens
MAWWKSWDSGILPLRNALLLG

SEQ ID NO: 81695 - protein, 393 aa, Homo sapiens
MPRVKAAQAGRQSSAKRHLAEQFAVGEIITDMAKKEWKVGLPIGQGGFGCIYLADMNSSESVGSDAPCVVKVEPSDNGPLFTELKFYQRAAKPEQIQKWIRTRKLKYLGVPKYWGSGLHDKNGKSYRFMIMDRFGSDLQKIYEANAKRFSRKTVLQLSLRILDILEYIHEHEYVHGDIKASNLLLNYKNPDQVYLVDYGLAYRYCPEGVHKEYKEDPKRCHDGTIEFTSIDAHNGVAPSRRGDLEILGYCMIQWLTGHLPWEDNLKDPKYVRDSKIRYRENIASLMDKCFPEKNKPGEIAKYMETVKLLDYTEKPLYENLRDILLQGLKAIGSKDDGKLDLSVVENGGLKAKTITKKEIEESKEPGVEDTEWSNTQTEEAIQTRSRTRKRVQK

SEQ ID NO: 81696 - protein, 189 aa, Homo sapiens
  MOD_RES (1)..(1): Any amino acid
XSIHGDRSQRDREEALHQFRSGKSPILVATAVAARGLDISNVKHVINFDLPSDIEEYVHRIGRTGRVGNLGLATSFFNERNINITKDLLDLLVEAKQEVPSWLENMAYEHHYKGSSRGRSKSSRFSGGFGARDYRQSSGASSSSFSSSRASSSRSGGGGHGSSRGFGGGSSRSQEEMKGTISSPVQKVV

SEQ ID NO: 81697 - protein, 123 aa, Homo sapiens
  MOD_RES (1)..(1): Any amino acid
XENCSSLGSPSEPPQTLDLVRALQDLENAASGDAAVHQRIASLPVEVQEVSLLDKITDKESGERLSKMVEDACMLLADYNGRLAAEIDDRKQLTRMLADFLRCQKEALAEKEHKLEVRNLFLL

SEQ ID NO: 81698 - protein, 912 aa, Homo sapiens
MAEIKEKICDYLFNVSDSSALNLAKNIGLTKARDINAVLIDMERQGDVYRQGTTPPIWHLTDKKRERMQIKRNTNSVPETAPAAIPETKRNAEFLTCNIPTSNASNNMVTTEKVENGQEPVIKLENRQEARPEPARLKPPVHYNGPSKAGYVDFENGQWATDDIPDDLNSIRAAPGEFRAIMEMPSFYSHGLPRCSPYKKLTECQLKNPISGLLEYAQFASQTCEFNMIEQSGPPHEPRFKFQVVINGREFPPAEAGSKKVAKQDAAMKAMTILLEEAKAKDSGKSEESSHYSTEKESEKTAESQTPTPSATSFFSGKSPVTTLLECMHKLGNSCEFRLLSKEGPAHEPKFQYCVAVGAQTFPSVSAPSKKVAKQMAAEEAMKALHGEATNSMASDNQVRKIGELVRYLNTNPVGGLLEYARSHGFAAEFKLVDQSGPPHEPKFVYQAKVGGRWFPAVCAHSKKQGKQEAADAALRVLIGENEKAERMGFTEVTPVTGASLRRTMLLLSRSPEAQPKTLPLTGSTFHDQIAMLSHRCFNTLTNSFQPSLLGRKILAAIIMKKDSEDMGVVVSLGTGNRCVKGDSLSLKGETVNDCHAEIISRRGFIRFLYSELMKYNSQTAKDSIFEPAKGGEKLQIKKTVSFHLYISTAPCGDGALFDKSCSDRAMESTESRHYPVFENPKQGKLRTKVENGEGTIPVESSDIVPTWDGIRLGERLRTMSCSDKILRWNVLGLQGALLTHFLQPIYLKSVTLGYLFSQGHLTRAICCRVTRDGSAFEDGLRHPFIVNHPKVGRVSIYDSKRQSGKTKETSVNWCLADGYDLEILDGTRGTVDGPRNELSRVSKKNIFLLFKKLCSFRYRRDLLRLSYGEAKKAARDYETAKNYFKKGLKDMGYGNWISKPQEEKNFYLCPV

SEQ ID NO: 81699 - protein, 116 aa, Homo sapiens
MATNFSDIVKQGYVKMKSRKLGIYRRCWLVFRKSSSKGPQRLEKYPDEKSVCLRGCPKVTEISNVKCVTRLPKETKRQAVAIIFTDDSARTFTCDSELEAEEWYKTLSVECLGSRL

SEQ ID NO: 81700 - protein, 383 aa, Homo sapiens
  MOD_RES (1)..(1): Any amino acid
XVRLWQLLGGTFYFNTSRLKQKNKEKDKSKGKAPEEDEEERRRRERDDQMYRERLRTLLVIAVVMSLLNALSTSGGSISWNDFVHEMLAKGEVQRVQVVPESDVVEVYLHPGAVVFGRPRLALMYRMQVANIDKFEEKLRAAEDELNIEAKDRIPVSYKRTGFFGNALYSVGMTAVGLAILWYVFRLAGMTGREGGFSAFNQLKMARFTIVDGKMGKGVSFKDVAGMHEAKLEVREFVDYLKSPERFLQLGAKVPKGALLLGPPGCGKTLLAKAVATEAQVPFLAMAGPEFVEVIGGLGAARVRSLFKEARARAPCIVYIDEIDAVGKKRSTTMSGFSNTEEEQTLNQLLVEMDVFYAEIEELKLVNRRAETGVSLSRCSTQK

SEQ ID NO: 81701 - protein, 524 aa, Homo sapiens
  MOD_RES (1)..(1): Any amino acid
XLVEKYCEKSITVKVNSTYGNSSRNIVNQNVRENLKTLYRLTMDLCSKLKDYGLWQLFRTLELPLIPILAVMESHAIQVNKEEMEKTSALLGARLKELEQEAHFVAGERFLITSNNQLREILFGKLKLHLLSQRNSLPRTGLQKYPSTSEALNALRDLHPLPKIILEYRQVHKIKSTFVDGLLACMKKGSISSTWNQTGTVTGRLSAKHPNIQGISKHPIQITTPKNFKGKEDKILTISPRAMFVSSKGHTFLAADFSQIELRILTHLSGDPELLKLFQESERDDVFSTLTSQWKDVPVEQVTHADREQTKKVVYAVVYGAGKERLAACLGVPIQEAAQFLESFLQKYKKIKDFARAAIAQCHQTGCVVSIMGRRRPLPRIHAHDQQLRAQAERQAVNFVVQGSAADLCKLAMIHVFTAVAASHTLTARLVAQIHDELLFEVEDPQIPECAALVRRTMESLEQVPLKVSLSAGRSWGHLVPLQEAWGPPPGPCRTESPSNSLAAPGSPASTQPPPLHFSPSFCL

SEQ ID NO: 81702 - protein, 231 aa, Homo sapiens
MFARKPPGAAPLGAMPVPDQPSSASEKTSSLSPGLNTSNGDGSETETTSAILASVKEQELQFERLTRELEAERQIVASQLERCKLGSETGSMSSMSSAEEQFQWQSQDGQKDIEDELTTGLELVDSCIRSLQESGILDPQDYSTGERPSLLSQSALQLNSKPEGSFQYPASYHSNQTLALGETTPSQLPARGTQARATGQSFSQLVPEPHTAASMGTWAQSCGPCSPQNTT

SEQ ID NO: 81703 - protein, 185 aa, Homo sapiens
MATEHVNGNGTEEPMDTTSAVIHSENFQTLLDAGLPQKVAEKLDEIYVAGLVAHSDLDERAIEALKEFNEDGALAVLQQFKDSDLSHVQNKSAFLCGVMKTYRQREKQGTKVADSSKGPDEAKIKALLERTGYTLDVTTGQRKYGGPPPDSVYSGQQPSVGTEIFVGKIPRDLFEDELVPLFEKA

SEQ ID NO: 81704 - protein, 115 aa, Homo sapiens
MAVQISKKRKFVADGIFKAELNEFLTRELAEDGYSGVEVRVTPTRTEIIILATRTQNVLGEKGRRIRELTAVVQKRFGFPEGSVEGLLWCAAVHHGEWGQRLRGCGVWETPRTEG

SEQ ID NO: 81705 - protein, 101 aa, Homo sapiens
  MOD_RES (1)..(1): Any amino acid
XYFSAGLLPYVHLPISSYLNHARWTWGDQTTLQGFLTHFLREEYGTFSLAKSEIGSSMSEILLSQVTNMRTELSFNIQALAVCANICLATKWNDSGCRAMQ

SEQ ID NO: 81706 - protein, 524 aa, Homo sapiens
MEFPEHSQQLLQSLREQRSQGFLCDCTVMVGSTQFLAHRAVLASCSPFFQLFYKERELDKRDLVCIHNEIVTAPAFGLLLDFMYAGQLTLRGDTPVEDVLAAASYLHMNDIVKVCKRRLQARALAEADSTKKEEETNSQLPSLEFLSSTSRGTQPSLASAETSGHWGKGEWKGSAAPSPTVRPPDEPPMSSGADTTQPGMEVDAPHLRAPHPPVADVSLASPSSSTETIPTNYFSSGISAVSLEPLPSLDVGPESLRVVEPKDPGGPLQGFYPPASAPTSAPAPVSAPVPSQAPAPAEAELVQVKVEAIVISDEETDVSDEQPQGPERAFPSGGAVYGAQPSQPEAFEDPGAAGLEEVGPSDHFLPTDPHLPYHLLPGAGQYHRGLVTSPLPAPASLHEPLYLSSEYEAAPGSFGVFTEDVPTCKTCGKTFSCSYTLRRHATVHTRERPYECRYCLRSYTQSGDLYRHIRKAHNEDLAKRSKPDPEVGPLLGVQPLPGSPTADRQSSSGGGPPKDFVLAPKTNI

SEQ ID NO: 81707 - protein, 56 aa, Homo sapiens
MEVLRPQLIRIDGRNYRKNPVQEQTYQHEEDEEDFYQGSMECADEPCDAYEVEQTP

SEQ ID NO: 81708 - protein, 248 aa, Homo sapiens
MIQNSRPSLLQPQDVGDTVETLMLHPVIKAFLCGSISGTCSTLLFQPLDLLKTRLQTLQPSDHGSRRVGMLAVLLKSIVRCVPGVGIYFGTLYSLKQYFLRGHPPTALESVMLGVGSRSVAGVCMSPITVIKTRYESGKYGYESIYAALRSIYHSEGHRGLFSGLTATLLRDAPFSGIYLMFYNQTKNIVPHDQVDATLIPITNFSCGIFAGILASLVTQPADVIKTHMQLYPLKFQWIGQAVTLIFK

SEQ ID NO: 81709 - protein, 174 aa, Homo sapiens
  MOD_RES (1)..(1): Any amino acid
XRRRLPGLSMSPRRTLPRPLSLCLSLCLCLCLAAALGSAQSGSCRDKKNCKVVFSQQELRKRLTPLQYHVTQEKGTESAFEGEYTHHKDPGIYKCVVCGTPLFKSETKFDSGSGWPSFHDVINSEAITFTDDFSYGMHRVETSCSQQEGPHQMLPLNLGFPGLQNCEPINFYSF

SEQ ID NO: 81710 - protein, 133 aa, Homo sapiens
MGVDIRHNKDRKVRRKEPKSQDIYLRLLVKLYRFLARRTNSTFNQVVLKRLFMSRTNRPPLSLSRMIRKMKLPGRENKTAVVVGTITDDVRVQEVPKLKAPGTPHSHTKPYVRSKGRKFERARGRRASRGYKN

SEQ ID NO: 81711 - protein, 187 aa, Homo sapiens
  MOD_RES (1)..(1): Any amino acid
XFRSQGAEGALTGKQPDGSAEKAVLEQFGFPLTGTEARCYTNHALSYDQAKRVPRWVLEHISKSKIMGDADRKHCKFKPDPNIPPTFSAFNEDYVGSGWSRGHMAPAGNNKFSSKAMAETFYLSNIVPQDFDNNSGYWNRIEMYCRELTERFEDVWVVSGPLTLPQTRGDGKKIVSYQSWEYPSLQF

SEQ ID NO: 81712 - protein, 632 aa, Homo sapiens
MAWTARDRGALGLLLLGLCLCAAQRGPPGEQGPPGPPGPPGVPGIDGIDGDRGPKGPPGPPGPAGEPGKPGAPGKPGTPGADGLTGPDGSPGSIGSKGQKGEPGVPGSRGFPGRGIPGPPGPPGTAGLPGELGRVGPVGDPGRRGPPGPPGPPGPRGTIGFHDGDPLCPNACPPGRSGYPGLPGMRGHKGAKGEIGEPGRQGHKGEEGDQGELGEVGAQGPPGAQGLRGITGIVGDKGEKGARGLDGEPGPQGLPGAPGDQGQRGPPGEAGPKGDRGAEGARGIPGLPGPKGDTGLPGVDGRDGIPGMPGTKGEPGKPGPPGDAGLQGLPGVPGIPGAKGVAGEKGSTGAPGKPGQMGNSGKPGQQGPPGEVGPRGPQGLPGSRGELGPVGSPGLPGKLGSLGSPGLPGLPGPPGLPGMKGDRGVVGEPGPKGEQGASGEEGEAGERGELGDIGLPGPKGSVSMGRAPTDQHIKQVCMRVIQEHFAEMAASLKRPDSGATGLPGRPGPPGPPGPPGENGFPGQMGIRGLPGIKGPPGALGLRGPKGDLGEKGERGPPGRGPNGLPGAIGLPGDPGPASYGRNGRDGERGPPGVAGIPGVPGPPGPPGLPGFCEPASCTMQAGQRAFNKGPDP

SEQ ID NO: 81713 - protein, 125 aa, Homo sapiens
MAEAHQAVAFQFTVTPDGVDFRLSREALKHVYLSGINSWKKRLIRIKNGILRGVYPGSPTSWLVVIMATVGSSFCNVDISLGLVSCIQRCLPQGCGPYQTPQTRALLSMAIFSTGVWVTGIFFFR

SEQ ID NO: 81714 - protein, 375 aa, Homo sapiens
MSLMVVSMACVGFFLLQGAWTHEGGQDKPLLSAWPSTVVPRGGHVTLLCRSRLGFTIFSLYKEDGVPVPELYNKIFWKSILMGPVTPAHAGTYRCRGSHPRSPIEWSAPSNPLVIVVTGLFGKPSLSAQPGPTVRTGENVTLSCSSRSSFDMYHLSREGRAHEPRLPAVPSVNGTFQADFPLGPATHGGTYTCFGSLHDSPYEWSDPSDPLLVSVTGNSSSSSSSPTEPSSKTGIRRHLHILIGTSVAIILFIILFFFLLHCCCSNKKNAAVMDQEPAGDRTVNREDSDDQDPQEVTYAQLDHCVFTQTKITSPSQRPKTPPTDTTMYMELPNAKPRSLSPAHKHHSQALRGSSRETTALSQNRVASSHVPAAGI

SEQ ID NO: 81715 - protein, 324 aa, Homo sapiens
  MOD_RES (1)..(1): Any amino acid
XSNASSQLSSPPTSPQSSPRKGGSGNQLRSFGSGQLDLTSSSSSLGSENSNKNNNAPRTYGIGYTLAPSGTVDNFSDSGHSEISSRSSIVSNSSFDSVPVSLHDERRQRHSVSIVETNLGMGRMERRTMIEPDQYSLGSYAPMSEGRGLYATATVISSPSTEELSQDQGDRASLDAADSGRGSWTSCSSGSHDNIQTIQHQRSWETLPFGHTHFDYSGDPAGLWASSSHMDQIMFSDHSTKYNRQNQSRESLEQAQSRASWASSTGYWGEDSEGDTGTIKRRGGKDVSIEAESSSLTSVTTEETKPVPMPAHIAVASSTTKGLI

SEQ ID NO: 81716 - protein, 68 aa, Homo sapiens
MKIPNIGNVMNKFEILGVVGEGAYGVVLKCRHKETHEIVAIKKFKDSEENEEVKETTLRELKMLRTLK

SEQ ID NO: 81717 - protein, 166 aa, Homo sapiens
  MOD_RES (1)..(1): Any amino acid
XEELLDVLQSLPPAWRNCVSATEEEVTPQHRLWPLLEKDSSLEARQFFYLRAFLVEGPSTCLVSLLLTPSTLFLLDEDAAGSPAEPSPPAASGEASEKVPPSGPGPAVRVREQQPLSSLSSVLLYRSAPEDLRLLFYDEVRKLRLGDVNQFAQSKVVEPGIESTVP

SEQ ID NO: 81718 - protein, 92 aa, Homo sapiens
  MOD_RES (1)..(1): Any amino acid
XTTGEPATPKRRKAEPEALQSLRRSTRHSANCDRLSESSASPQPKRRQQDTSASMPKLFLHLEKNLPVWGISYKWNHLYRHLCIADHLHLFL

SEQ ID NO: 81719 - protein, 658 aa, Homo sapiens
MPVRKQDTQRALHLLEEYRSKLSQTEDRQLRSSIERVINIFQSNLFQALIDIQEFYEVTLLDNPKCIDRSKPSEPIQPVNTWEISSLPSSTVTSETLPSSLSPSVEKYRYQDEDTPPQEHISPQITNEVIGPELVHVSEKNLSEIENVHGFVSHSHISPIKPTEAVLPSPPTVPVIPVLPVPAENTVILPTIPQANPPPVLVNTDSLETPTYVNGTDADYEYEEITLERGNSGLGFSIAGGTDNPHIGDDSSIFITKIITGGAAAQDGRLRVNDCILRVNEVDVRDVTHSKAVEALKEAGSIVRLYVKRRKPVSEKIMEIKLIKGPKGLGFSIAGGVGNQHIPGDNSIYVTKIIEGGAAHKDGKLQIGDKLLAVNNVCLEEVTHEEAVTALKNTSDFVYLKVAKPTSMYMNDGYAPPDITNSSSQPVDNHVSPSSFLGQTPASPARYSPVSKAVLGDDEITREPRKVVLHRGSTGLGFNIVGGEDGEGIFISFILAGGPADLSGELRKGDRIISVNSVDLRAASHEQAAAALKNAGQAVTIVAQYRPEEYSRFEAKIHDLREQMMNSSISSGSGSLRTSQKRSLYVRALFDYDKTKDSGLPSQGLNFKFGDILHVINASDDEWWQARQVTPDGESDEVGVIPSKRRYACFLPLECEAT

SEQ ID NO: 81720 - protein, 187 aa, Homo sapiens
MDDTLFQLKFTAKQLEKLAKKAEKDSKAEQAKVKKALLQKNVECARVYAENAIRKKNEGVNWLRMASRVDAVASKVTKNMAQVTKALDKALSTMDLQKVSSVMDRFEQQVQNLDVHTSVMEDSMSSATTLTTPQEQVDSLIMQIAEENGLEVLDQLSQLPEGASAVGESSVRSQEDQLSRRLAALRN

SEQ ID NO: 81721 - protein, 61 aa, Homo sapiens
MQLKIMPKKKRLSAGRVPLILFLCQMISALEVPLDPKLLEDLVQPPTITQQSPKDYIIDPR

SEQ ID NO: 81722 - protein, 43 aa, Homo sapiens
  MOD_RES (1)..(1): Any amino acid
XQSLASVAYLINTLANNVLQMLDIQASQLRRMESSINHISQAN

SEQ ID NO: 81723 - protein, 160 aa, Homo sapiens
MNTPSQPRQHFYPSRAQPPSSAASRVQSAAPARPGPAAHVYPAGSQVMMIPSQISYPASQGAYYIPGQQYPVQPGAPGFYPGASPTEFGTYAGAYYPAQGVQQFPTGVAPTPVLMNQPPQIAPKRERKTIRIRDPNQGGKDITEEIMSGARTASTPTPPQ

SEQ ID NO: 81724 - protein, 140 aa, Homo sapiens
MSNPSAPPPYEDRNPLYPGPPPPGGYGQPSVLPGGYPAYPGYPQPGYGHPAGYPQPMPPTHPMPMNYGPGHGYDGEERAVSDSFGPGEWDDRKVRHTFIRKVYSIISVQLLITVAIIAIFTFVEPVSAFVRRNVAVYYVS

SEQ ID NO: 81725 - protein, 99 aa, Homo sapiens
EAQKINNGSSQADGTLKPVDEKEEAVAAEVGWMTSVKDWAGVMISAQTLTGRVLVVLVFALSIGALVIYFIDSSKGVLTCRGVQTLPTSMLRLRKEVWA

SEQ ID NO: 81726 - protein, 601 aa, Homo sapiens
MVCGCSALLPLPNPRPTMPATPNFLANPSSSSRWIPLQPMPVAWAFVQKTSALLWLLLLGTSLSPAWGQAKIPLETVKLWADTFGGDLYNTVTKYSGSLLLQKKYKDVESSLKIEEVDGLELVRKFSEDMENMLRRKVEAVQNLVEAAEEADLNHEFNESLVFDYYNSVLINERDEKGNFVELGAEFLLESNAHFSNLPVNTSISSVQLPTNVYNKDPDILNGVYMSEALNAVFVENFQRDPTLTWQYFGSATGFFRIYPGIKWTPDENGVITFDCRNRGWYIQAATSPKDIVILVDVSGSMKGLRMTIAKHTITTILDTLGENDFINIIAYNDYVHYIEPCFKGILVQADRDNREHFKLLVEELMVKGVGVVDQALREAFQILKQFQEAKQGSLCNQAIMLISDGAVEDYEPVFEKYNWPDCKVRVFTYLIGREVSFADRMKWIACNNKGYYTQISTLADTQENVMEYLHVLSRPMVINHDHDIIWTEAYMDSKLLSSQAQSLTLLTTVAMPVFSKKNETRSHGILLGVVGSDVALRELMKLAPRYKMPSTNSRPNAPPPWTLAAWSARIRLSEHQQWLHPLPSRPPAPVQRGEETKTQT

SEQ ID NO: 81727 - protein, 130 aa, Homo sapiens
MDPLGTRARECLAQHGPHHRGHRGHSWALHPVVLWCLLHCGGRVCVPAGVPPGEEEEGLHHGALGTEVHDRRGEAVRALYQELLCSGRPASPALGARRLPAGHHPWDRLPGHCERHLPTGGCAWRAVDAH

SEQ ID NO: 81728 - protein, 172 aa, Homo sapiens
MWVPVVFLTLSVTWIAPPLQVLVASRGRAVCGGVLVHPQWVLTAAHCIRNKSVILLGRHSLFHPEDTGQVFQVSHSFPHPLYDMSLLKNRFLRPGDDSSHDLMLLRLSEPAELTDAVKVMDLPTQEPALGTTCYASGWGSIEPEEFLTPKKLQCVDLHVISNDVCAQVHPQK

SEQ ID NO: 81729 - protein, 68 aa, Homo sapiens
MQLYSARQRRRLNRGLRRKQHSLLKRLRKAKKEAPPMEKPEVVKTHLRDMIILPEMVGSMVGVYNGKT

SEQ ID NO: 81730 - protein, 464 aa, Homo sapiens
MTEAALVEGQVKLRDGKKWKSRWLVLRKPSPVAGAGVFFLSSAEGEQISFLFDCIVRGISPTKGPFGLRPVLPDPSPPGPSTVEERVAQEALETLQLEKRLSLLSHAGRPGSGGDDRSLSSSSSEASHLDVSASSRLTAWPEQSSSSASTSQEGPRPAAAQAAGEAMVGASRPPPKPLRPRQLQEVGRQSSSDSGIATGSHSSYSSSLSSYAGSSLDVWRATDELGSLLSLPAAGAPEPSLCTCLPGTVEYQVPTSLRAHYDTPRSLCLAPRDHSPPSQGSPGNSAARDSGGQTSAGCPSGWLGTRRRGLVMEAPQGSEATLPGPAPGEPWEAGGPHAGPPPAFFSACPVCGGLKGAAASAPGPATAHSGSPGPVAVDSPGPERPRGESPTYVNIPVSPSSRKQLHYMGLELQEASEGVRGAGASLYAQIDIMATETAHRVGVRHARAREEQLSELEQRKAAPQ

SEQ ID NO: 81731 - protein, 58 aa, Homo sapiens
MEKYENLGLVGEGSYGMVMKCRNKDTGRIVAIKKFLESDDDKMVKKIAMREIKLLKVI

SEQ ID NO: 81732 - protein, 2913 aa, Homo sapiens
MGVLASALCWLLCVWLPWGEQAAESLRVQRLAAAPVLWGSAEPQPEPAGQPSSSHQEATLAMGDKATVVGGQQAEAPDSVAMSSWERRLHRAKCAPSYLFSCFNGGECVHPAFCDCRRFNATGPRCQMVYNAGPERDSICRAWGQHHVETFDGLYYYLSGKGSYTLVGRHEPEGQSFSIQVHNDPQCGSSPYTCSRAVSLFFVGEQEIHLAKEVTHGGMRVQLPHVMGSARLQQLAGYVIVRHQSAFTLAWDGASAVYIKMSPELLGWTHGLCGNNNADPKDDLVTSSGKLTDDVVEFVHSWQEQAPNQPPGPTTSSLPRPPCLQQNPGTMQGVYEQCEALLRPPFDACHAYVSPLPFTASCTSDLCQSMGDVATWCRALAEYARACAQAGRPLQGWRTQLRQCTVHCKEKAFTYNECIACCPASCHPRASCVDSEIACVDGCYCPNGLIFEDGGCVAPAECPCEFHGTLYPPGSVVKEDCNTCTCTSGKWECSTAVCPAECSVTGDIHFTTFDGRRYTFPATCQYILAKSRSSGTFTVTLQNAPCGLNQDGACVQSVSVILHQDPRRQVTLTQAGDVLLFDQYKIIPPYTDDAFEIRRLSSVFLRVRTNVGVRVLYDREGLRLYLQVDQRWVEDTVGLCGTFNGNTQDDFLSPVGVPESTPQLFGNSWKTLSACSPLVSGSPLDPCDVHLQAASYSVQACSVLTGEMFAPCSAFLSPVPYFEQCRRDACRCGQPCLCATLAHYAHLCRRHGLPVDFRARLPACALSCEASKEYSPCVAPCGRTCQDLASPEACGVDGGDDLSRDECVEGCACPPDTYLDTQADLCVPRNQCSCHFQGVDYPPGDSDIPSLGHCHCKDGVMSCDSRAPAAACPAGQVFVNCSDLHTDLELSRERTCEQQLLNLSVSARGPCLSGCACPQGLLRHGDACFLPEECPCTWKGKEYFPGDQVMSPCHTCVCQRGSFQCTLHPCASTCTAYGDRHYRTFDGLPFDFVGACKVHLVKSTSDVSFSVIVENVNCYSSGMICRKFISINVGNSLIVFDDDSGNPSPESFLDDKQEVHTWRVGFFTLVHFPQEHITLLWDQRTTVHVQAGPQWQGQLAGLCGNFDLKTINEMRTPENLELTNPQEFGSSWAAVECPDTLDPRDMCVLNPLREPFAKKECSILLSEVFEICHPVVDVTWFYSNCLTDTCGCSQGGDCECFCASVSAYAHQCCQHGVAVDWRTPRLCPYDCDFFNKVLGKGPYQLSSLAAGGALVGMKAVGDDIVLVRTEDVAPADIVSFLLTAALYKAKAHDPDVVSLEAADRPNFFLHVTANGSLELAKWQGRDTFQQHASFLLHRGTRQAGLVALESLAKPSSFLYVSGAVLALRLYEHTEVFRRGTLFRLLDAKPSGAAYPICEWRYDACASPCFQTCRDPRAASCRDVPRVEGCVPVCPTPQVLDEVTQRCVYLEDCVEPAVWVPTEALGNETLPPSQGLPTPSDEEPQLSQESPRTPTHRPALTPAAPLTTALNPPVTATEEPVVSPGPTQTTLQQPLELTASQLPAGPTESPASKGVTASLLAIPHTPESSSLPVALQTPTPGMVSGAMETTRVTVIFAGSPNITVSSRSPPAPRFPLMTKAVTVRGHGSLPVRTTPPQPSLTASPSSRPVASPGAISRSPTSSGSHKAVLTPAVTKVISRTGVPQPTQAQSASSPSTPLTVAGTAAEQVPVSPLATRSLEIVLSTEKGEAGHSQPMGSPASPQPHPLPSAPPRPAQHTTMATRSPALPPETPAAASLSTATDGLAATPFMSLESTRPSQLLSGLPPDTSLPLAKVGTSAPVATPGPKASVITTPLQPQATTLPAQTLSPVLPFTPAAMTQAHPPTHIAPPAAGTAPGLLLGATLPTSGVLPVAEGTASMVSVVPRKSTTGKVAILSKQVSLPTSMYGSAEGGPTELTPATSHPLTPLVAEPEGAQAGTALPVPTSYALSRVSARTAPQDSMLVLLPQLAEAHGTSAGPHLAAEPVDEATTEPSGRSAPALSIVEGLAEALATTTEANTSTTCVPIAEQDCVRHICLEGQLIRVNQSQHCPQGAAPPRCGILGLAVRVGGDRCCPLWECACRCSIFPDLSFVTFDGSHVALFKEAIYILSQSPDEMLTVHVLDCKSANLGHLNWPPFCLVMLNMTHLAHQVTIDRFNRKVTVDLQPVWPPVSRYGFRIEDTGHMYMILTPSDIQIQWLHSSGLMIVEASKTSKAQGHGLCGICDGDAANDLTLKDGSVVGGAEDPAPFLDSWQVPSSLTSVGQTRFRPDSCATTDCSPCLRMVSNRTFSACHRFVPPESFCELWIRDTKYVQQPCVALTVYVAMCHKFHVCIEWRRSDYCPFLCSSDSTYQACVTACEPPKTCQDGILGPLDPEHCQVLGEGCVCSEGTILHRRHSALCIPEAKCACTDSMGVPRALGETWNSSLSGCCQHQCQAPDTIVPVDLGCPSPRPESCLRFGEVALLLPTKDPCCLGTVCVCNQTLCEGLAPTCRPGHRLLTHFQEDSCCPSYSCECDPDLCEAELVPSCRQDQILITGRLGDSCCTSYFCACGDCPDSIPECQEGEALTVHRNTTELCCPLYQCVCENFRCPQVQCGLGTALVEVWSPDRCCPYKSCECDCDTIPVPRCHLWEKSQLDEEFMHSVENVCGCAKYECVKAPVCLSRELGVMQPGQTVVELSADGVCHTSRCTTVLDPLTNFYQINTTSVLCDIHCEANQEYEHPRDLAACCGSCRNVSCLFTFPNGTTSLFLPGASWIADCARHHCSSTPLGAVLVRSPISCPPLNETECAKVGGSVVPSLEGCCRTCKEDGRSCKKVTIRMTIRKNECRSSTPVNLVSCDGRCPSASIYNYNINTYARFCKCCREVGLQRRSVQLFCATNATWVPYTVQEPTDCACQWS

SEQ ID NO: 81733 - protein, 263 aa, Homo sapiens
MSFSRALLWARLPAGRQAGHRAAICSALRPHFGPFPGVLGQVSVLATASSSASGGSKIPNTSLFVPLTVKPQGPSADGDVGAELTRPLDKNEVAVIDEIQMIRDPARGWAWTRALLGLCAEEVHLCGEPAAIDLVMELMYTTGEEVEVRDYKRLTPISVLDHALESLDNLRPGDCIVCFSKNDIYSVSRQIEIRGLESAVIYGSLPPGTKLAQAKKFNDPNDPCKILVATDAIGMGLNLSIRRIIFYSLIKPSINEKGERELE

SEQ ID NO: 81734 - protein, 277 aa, Homo sapiens
MSYGSIARGGGLGSRGPFGGPSRQGCQPLATQVDPCNLQELFQEMSANVFRINSSVTSLERSLQSLGTPSDTQELRDSLHTAQQETNKTIAASASSVKQMAELLRSSCPERLQQERPQLDRLKTQLSDAIQCYGVVQKKIAEKSRALLPMAQRGSKQQSPQAPFAELADDEKVFNGSDNMWQGQEQALLPDITEEDLEAIRLREEAILQMESNLLDVNQIIKDLASMVSEQGEAVDSIEASLEAASSHAEAARQLLAGASRHQLMRRTRPPAACGCP

SEQ ID NO: 81735 - protein, 43 aa, Homo sapiens
MLCASFLGLVVTSLSWLFGGTKEPHICRPYTSLLPWVPFWLHC

SEQ ID NO: 81736 - protein, 257 aa, Homo sapiens
MEATRLRQKAEELVKDNELLPPPSPSLGSFDPLAELTGKDSNVTASPTAPACPSDKPAPVQKPPSSGTSSEFEVVTPEEQNSPESSSHANAMALGPLPREDGNLMLHLQRLETTLSVCAEEPDHGQLFTHLGRMALEFNRLASKVHKNEQRTSILQTLCEQLRKENEALKAKLDKGLEQRDQAAERLREENLELKKLLMSNGNKEGASGRPGSPKMEGTGKKAVAGQQQASVTAGKVPEVVALGAAEKKVKMLEQQR

SEQ ID NO: 81737 - protein, 115 aa, Homo sapiens
  MOD_RES (1)..(1): Any amino acid
XAEELNGEINKIKNELSSLKETHIKLQEHYNKLCNQKTFEEDKKFQVKTKPLISTPLQSHLQAIKTTKNTSGDDDWQSLITNQLNKSENLLSLENDNQPKKRKAEETLEKNNRLK

SEQ ID NO: 81738 - protein, 212 aa, Homo sapiens
DFGYCPRVYCENQPMLPIGVLVMVGFTVGKVPVPDIRTCHFCLVEDPSVGCISGSEKCTISSSSLCMVITIYYDVKVRFIVRGCGQYISYRCQEKRNTYFAEYWYQAQCCQYDYCNSWSSPQLQSSLPEPHDRPLALPLSDSQIQWFYQALNLSLPLPNFHAGTEPDGLDPMVTLSLNLGLSFAELCRMYLFLNSSGLLVLPQAGLLTPHPS

SEQ ID NO: 81739 - protein, 287 aa, Homo sapiens
  MOD_RES (1)..(1): Any amino acid
XACVELSRLTKLSKYVYFFEACRLLQKMIDISLDGFLLTPVQKICKYPLQLAELLKYTHPQHRDFKDVEAALHAMKNVAQLINERKRRLENIDKIAQWQSSIEDWEGEDLLVRSSELIYSGELTRVTQPQAKSQQRMFFLFDHQLIYCKKDLLRRDVLYYKGRLDMDGLEVVDLEDGKDRDLHVSIKNAFRLHRGATGDSHLLCTRKPEQKQRWLKAFAREREQVQLDQETGFSITELQRKQAMLNASKQQVTGKPKGRRTAAPPPRLPGPYPADIIPFSEPQSQAS

SEQ ID NO: 81740 - protein, 33 aa, Homo sapiens
MAGAGGGNDIQWCFSQVKGAVDDDVAEDHLFET

SEQ ID NO: 81741 - protein, 192 aa, Homo sapiens
  MOD_RES (1)..(1): Any amino acid
XSKRRIPVSQPGMADPHQLFDDTSSAQSRGYGAQRAPGGLSYPAASPTPHAAFLADPVSNMAMAYGSSLAAQGKELVDKNIDRFIPITKLKYYFAVDTMYVGRKLGLLFFPYLHQDWEVQYQQDTPVAPRFDVNAPDLYIPAMAFITYVLVAGLALGTQDRMIGGVLMGLLFGKIGYYLVLGWCCVAIFVFM

SEQ ID NO: 81742 - protein, 93 aa, Homo sapiens
MTLLHYTCKSGAHGIGDVETAVKFATQLIDLGADISLRSRWTNMNALHYAAYFDVPELIRVILKTSKPKDVDATCSDFNFGTALHIAAYNLCA

SEQ ID NO: 81743 - protein, 293 aa, Homo sapiens
  MOD_RES (1)..(1): Any amino acid
XEAPKDPFSIEREARLHRQAAAVNEATCTWSGQLPPRNYKNPIYSCKVFLGGVPWDITEAGLVNTFRVFGSLSVEWPGKDGKHPRCPPKGYVYLVFELEKSVRSLLQACSHDPLSPDGLSEYYFKMSSRRMRCKEVQVIPWVLADSNFVRSPSQRLDPSRTVFVGALHGMLNAEALAAILNDLFGGVVYAGIDTDKHKYPIGSGRVTFNNQRSYLKAVSAAFVEIKTTKFTKKVQIDPYLEDSLCHICSSQPGPFFCRDQGRVRTKTVKKAARVIIEKYYTRLGNDFHTNKRV

SEQ ID NO: 81744 - protein, 220 aa, Homo sapiens
MPETSYLTRVGPDIQCWPESWGMDSLQKQDLRRPKIHGAVQASPYQPPTLASLQRLLWVRQAATLNHIDEVWPSLFLGDAYAARDKSKLIQLGITHVVNAAAGKFQVDTGAKFYRGMSLEYYGIEADDNPFFDLSVYFLPVARYIRAALSVPQGRVLVHCAMGVSRSATLVLAFLMICENMTLVEAIQTVQAHRNICPNSGFLRQLQVLDNRLGRETGRF

SEQ ID NO: 81745 - protein, 51 aa, Homo sapiens
MLAKTGVHHYSGNNIELGTACGKYYRVCTLAIIDPGDSDIIRSMPEQTGEK

SEQ ID NO: 81746 - protein, 349 aa, Homo sapiens
MEEKGSRMVQQGNQEAAAAPDTMAQPYASAQFAPPQNGIPAEYTAPHPHPAPEYTGQTTVPEHTLNLYPPAQTHSEQSPADTSAQTVSGTATQTDDAAPTDGQPQTQPSENTENKSQPKRLHVSNIPFRFRDPDLRQMFGQFGKILDVEIIFNERGSKGFGFVTFENSADADRAREKLHGTVVEGRKIEVNNATARVMTNKKTVNPYTNGWKLNPVVGAVYSPEFYAVPGFPYPAATAAAAYRGAHLRGRGRTVYNTFRAAAPPPPIPAYGGVVYQDGFYGADIYGGYAAYRYAQPTPATAAAYSDRNQFVFVAADEISCNTSAVTDEFMLPTPTTTHLLQPPPTALVP

SEQ ID NO: 81747 - protein, 165 aa, Homo sapiens
  MOD_RES (1)..(1): Any amino acid
XCPKCKFSYALARGGCMHFHCTQCRHQFCSGCYNAFYAKNDNNVMFNTEPPAGARAVPGGGCRVIEQKEVPNGLRDEACGKETPAGYAGLCQAHYKEYLVSLINAHSLDPATLYEVEELETATERYLHVRPQPLAGEDPPAYQARLLQKLTEEVPLGQSIPRRRK

SEQ ID NO: 81748 - protein, 38 aa, Homo sapiens
MHSMISSVRSSCGPGAHLTFRPKDRPQDDDARGGPCCP

SEQ ID NO: 81749 - protein, 11 aa, Homo sapiens
MSFSATILFSP

SEQ ID NO: 81750 - protein, 263 aa, Homo sapiens
MNQIEPGVQYNYVYDEDEYMIQEEEWDRDLLLDPAWEKQQRKTFTAWCNSHLRKAGTQIENIEEDFRNGLKLMLLLEVISGERLPKPDRGKMRFHKIANVNKALDYIASKGVKLVSIGAEEIVDGNVKMTLGMIWTIILRFAIQDISVEETSAKEGLLLWCQRKTAPYRNVNIQNFHTSWKDGLGLCALIHRHRPDLIDYSKLNKDDPIGNINLAMEIAEKHLDIPKMLDAEDLVYTARPDERAIMTYVSCYYHAFAGAQKTS

SEQ ID NO: 81751 - protein, 129 aa, Homo sapiens
MVGKARSSNFTLSEKLDLLKLVKPYVKILEEHTNKHSVIVEKNRCWDIIAVNYNAIGVDRPPRTAQGLRTLYKRLKEYAKQELLQQKETQSDFKSNISEPTKKVMEMIPQISSFCLVRDRNHIQSSFGS

SEQ ID NO: 81752 - protein, 1090 aa, Homo sapiens
MGANVHARDDGGLIPLHNACSFGHAEVVSLLLCQGADPNARDNWNYTPLHEAAIKGKIDVCIVLLQHGADPNIRNTDGKSALDLADPSAKAVLTGEYKKDELLEAARSGNEEKLMALLTPLNVNCHASDGRKSTPLHLAAGYNRVRIVQLLLQHGADVHAKDKGGLVPLHNACSYGHYEVTELLLKHGACVNAMDLWQFTPLHEAASKNRVEVCSLLLSHGADPTLVNCHGKSAVDMAPTPELRERLTYEFKGHSLLQAAREADLAKVKKTLALEIINFKQPQSHETALHCAVASLHPKRKQVTELLLRKGANVNEKNKDFMTPLHVAAERAHNDVMEVLHKHGAKMNALDTLGQTALHRAALAGHLQTCRLLLSYGSDPSIISLQGFTAAQMGNEAVQQILSESTPIRTSDVDYRLLEASKAGDLETVKQLCSSQNVNCRDLEGRHSTPLHFAAGYNRVSVVEYLLHHGADVHAKDKGGLVPLHNACSYGHYEVAELLVRHGASVNVADLWKFTPLHEAAAKGKYEICKLLLKHGADPTKKNRDGNTPLDLVKEGDTDIQDLLRGDAALLDAAKKGCLARVQKLCTPENINCRDTQGRNSTPLHLAAGYNNLEVAEYLLEHGADVNAQDKGGLIPLHNAASYGHVDIAALLIKYNTCVNATDKWAFTPLHEAAQKGRTQLCALLLAHGADPTMKNQEGQTPLDLATADDIRALLIDAMPPEALPTCFKPQATVVSASLISPASTPSCLSAASSIDNLTGPLAELAVGGASNAGDGAAGTERKEGEVAGLDMNISQFLKSLGLEHLRDIFETEQITLDVLADMGHEELKEIGINAYGHRHKLIKGVERLLGGQQGTNPYLTFHCVNQGTILLDLAPEDKEYQSVEEEMQSTIREHRDGGNAGGIFNRYNVIRIQKVVNKKLRERFCHRQKEVSEENHNHHNERMLFHGSPFINAIIHKGFDERHAYIGGMFGAGIYFAENSSKSNQYVYGIGGGTGCPTHKDRSCYICHRQMLFCRVTLGKSFLQFSTMKMAHAPPGHHSVIGRPSVNGLAYAEYVIYRGEQAYPEYLITYQIMKPEAPSQTATAAEQKT

SEQ ID NO: 81753 - protein, 847 aa, Homo sapiens
GKGHRMTPACPLLLSVILSLRLATAFDPAPSACSALASGVLYGAFSLQDLFPTIASGCSWTLENPDPTKYSLYLRFNRQEQVCAHFAPRLLPLDHYLVNFTCLRPSPEEAVAQAESEVGRPEEEEAEAAAGLELCSGSGPFTFLHFDKNFVQLCLSAEPSEAPRLLAPAALAFRFVEVLLINNNNSSQFTCGVLCRWSEECGRAAGRACGFAQPGCSCPGEAGAGSTTTTSPGPPAAHTLSNALVPGGPAPPAEADLHSGSSNDLFTTEMRYGEEPEEEPKVKTQWPRSADEPGLYMAQTGDPAAEEWSPWSVCSLTCGQGLQVRTRSCVSSPYGTLCSGPLRETRPCNNSATCPVEGQWLEWGPWGPCSTSCANGTQQRSRKCSVAGPAWATCTGALTDTRECSNLECPATDSKWGPWNAWSLCSKTCDTGWQRRFRMCQATGTQGYPCEGTGEEVKPCSEKRCPAFHEMCRDEYVMLMTWKKAAAGEIIYNKCPPNASGSASRRCLLSAQGVAYWGLPSFARCISHEYRYLYLSLREHLAKGQRMLAGEGMSQVVRSLQELLARRTYYSGDLLFSVDILRNVTDTFKRATYVPSADDVQRFFQVVSFMVDAENKEKWDDAQQVSPGSVHLLRVVEDFIHLVGDALKAFQSSLIVTDNLVISIQREPVSAVSSDITFPMRGRRGMKDWVRHSEDRLFLPKEVLSLSSPGKPATSGAAGSPGRGRGPGTVPPGPGHSHQRLLPADPDESSYFVIGAVLYRTLGLILPPPRPPLAVTSRVMTVTVRPPTQPPAEPLITVELSYIINGTTDPHCASWDYSRADASSGDWDTENCQTLETQAAHTRCQCQ

SEQ ID NO: 81754 - protein, 80 aa, Homo sapiens
MLASGLLLVALLACLTVMVLMSVWQQRKSRGKLPPGPTPLPFIGNYLQLNTEHICDSIMKAWRSATGSAPSSSCALPSPP

SEQ ID NO: 81755 - protein, 1043 aa, Homo sapiens
MAQFGGQKNPPWATQFTATAVSQPAALGVQQPSLLGASPTIYTQQTALAAAGLTTQTPANYQLTQTAALQQQAAAAAAALQQLQQPQQTLLTQPAVALPTSLSLSTPQPTAQITVSYPTPRSSQQQTQPQKQRVFTGVVTKLHDTFGFVDEDVFFQLSAVKGKTPQVGDRVLVEATYNPNMPFKWNAQRIQTLPNQNQSQTQPLLKTPPAVLQPIAPQTTFGVQTQPQPQSLLQAQISAASITPLLQTQPQPLLQQPQQKAGLLQPPVRIVSQPQPARRLDPPSRFSGRNDRGDQVPNRKDDRSRERERERRRSRERSPQRKRSRERSPRRERERSPRRVRRVVPRYTVQFSKFSLDCPSCDMMELRRRYQNLYIPSDFFDAQFTWVDAFPLSRPFQLGNYCNFYVMHREVESLEKNMAILDPPDADHLYSAKVMLMASPSMEDLYHKSCALAEDPQELRDGFQHPARLVKFLVGMKGKDEAMAIGGHWSPSLDGPDPEKDPSVLIKTAIRCCKALTGIDLSVCTQWYRFAEIRYHRPEETHKGRTVPAHVETVVLFFPDVWHCLPTRSEWETLSRGYKQQLVEKLQGERKEADGEQDEEEKDDGEAKEISTPTHWSKLDPKTMKVNDLRKELESRALSSKGLKSQLIARLTKQLKVEEQKEEQKELEKSEKEEDEDDDRKSEDDKEEEERKRQEEIERQRRERRYILPDEPAIIVHPNWAAKSGKFDCSIMSLSVLLDYRLEDNKEHSFEVSLFAELFNEMLQRDFGVRIYKSLLSLPEKEDKKEKDKKSKKDERKDKKEERDDETDEPKPKRRKSGDDKDKKEDRDERKKEDKRKDDSKDDDETEEDNNQDEYDPMEAEEAEDEEDDRDEEEMTKRDDKRDINRYCKERPSKDKEKEKTQMITINRDLLMAFVYFDQSHCGYLLEKDLEEILYTLGLHLSRAQVKKLLNKVVLRESCFYRKLTDTSKDEENHEESESLQEDMLGNRLLLPTPTVKQESKDVEENVGLIVYNGAMVDVGSLLQKLEKSEKVRAEVEQKLQLL

SEQ ID NO: 81756 - protein, 768 aa, Homo sapiens
MMTDKATSQLLLETDWESILQICDLIRQGDTQAKYAVNSIKKKVNDKNPHVALYALEVMESVVKNCGQTVHDEVANKQTMEELKDLLKRQVEVNVRNKILYLIQAWAHAFRNEPKYKVVQDTYQIMKVEGHVFPEFKESDAMFAAERAPDWVDAEECHRCRVQFGVMTRKHHCRACGQIFCGKCSSKYSTIPKFGIEKEVRVCEPCYEQLNRKAEGKATSTTELPPEYLTSPLSQQSQLPPKRDETALQEEEELQLALALSQSEAEEKERLRQKSTYTSYPKAEPMPSASSAPPASSLYSSPVNSSAPLAEDIDPELARYLNRNYWEKKQEEARKSPTPSAPVPLTEPAAQPGEGHAAPTNVVENPLPETDSQPIPPSGGPFSEPQFHNGESEESHEQFLKALQNAVTTFVNRMKSNHMRGRSITNDSAVLSLFQSINGMHPQLLELLNQLDERRLYYEGLQDKLAQIRDARGALSALREEHREKLRRAAEEAERQRQIQLAQKLEIMRQKKQEYLEVQRQLAIQRLQEQEKERQMRLEQQKQTVQMRAQMPAFPLPYAQLQAMPAAGGVLYQPSGPASFPSTFSPAGSVEGSPMHGVYMSQPAPAAGPYPSMPSTAADPSMVSAYMYPAGATGAQAAPQAQAGPTASPAYSSYQPTPTAGYQNVASQAPQSLPAISQPPQSSTMGYMGSQSVSMGYQPYNMQNLMTTLPSQDASLPPQQPYIAGQQPMYQQMAPSGGPPQQQPPVAQQPQAQGPPAQGSEAQLISFD

SEQ ID NO: 81757 - protein, 66 aa, Homo sapiens
MAVLSWPARLPDPWSALQRGPGCAGTRCPSERGHRWPKQHPACPAKGQSRGSQTQQPGRVCGGQAG

SEQ ID NO: 81758 - protein, 55 aa, Homo sapiens
LEKYIYIMGIQERNEKLFYRILQDDIESLMPIVYTPTVGLACSQYGHIFRRPKLL

SEQ ID NO: 81759 - protein, 32 aa, Homo sapiens
  MOD_RES (1)..(1): Any amino acid
XAISPEEYFDPNFSLESRNIGRPIEMSSKVQR

SEQ ID NO: 81760 - protein, 1962 aa, Homo sapiens
MFRQFYLWTCLASGIILGSLFEICLGQYDDDWQYEDCKLARGGPPATIVAIDEESRNGTILVDNMLIKGTAGGPDPTIELSLKDNVDYWVLMDPVKQMLFLNSTGRVLDRDPPMNIHSIVVQVQCINKKVGTIIYHEVRIVVRDRNDNSPTFKHESYYATVNELTPVGTTIFTGFSGDNGATDIDDGPNGQIEYVIQYNPDDPTSNDTFEIPLMLTGNIVLRKRLNYEDKTRYFVIIQANDRAQNLNERRTTTTTLTVDVLDGDDLGPMFLPCVLVPNTRDCRPLTYQAAIPELRTPEELNPIIVTPPIQAIDQDRNIQPPSDRPGILYSILVGTPEDYPRFFHMHPRTAELSLLEPVNRDFHQKFDLVIKAEQDNGHPLPAFAGLHIEILDENNQSPYFTMPSYQGYILESAPVGATISDSLNLTSPLRIVALDKDIEDTKDPELHLFLNDYTSVFTVTQTGITRYLTLLQPVDREEQQTYTFSITAFDGVQESEPVIVNIQVMDANDNTPTFPEISYDVYVYTDMRPGDSVIQLTAVDADEGSNGEITYEILVGAQGDFIINKTTGLITIAPGVEMIVGRTYALTVQAADNAPPAERRNSICTVYIEVLPPNNQSPPRFPQLMYSLEISEAMRVGAVLLNLQATDREGDSITYAIENGDPQRVFNLSETTGILTLGKALDRESTDRYILIITASDGRPDGTSTATVNIVVTDVNDNAPVFDPYLPRNLSVVEEEANAFVGQVKATDPDAGINGQVHYSLGNFNNLFRITSNGSIYTAVKLNREVRDYYELVVVATDGAVHPRHSTLTLAIKVLDIDDNSPVFTNSTYTVLVEENLPAGTTILQIEAKDVDLGANVSYRIRSPEVKHFFALHPFTGELSLLRSLDYEAFPDQEASITFLVEAFDIYGTMPPGIATVTVIVKDMNDYPPVFSKRIYKGMVAPDAVKGTPITTVYAEDADPPGLPASRVRYRVDDVQFPYPASIFEVEEDSGRVITRVNLNEEPTTIFKLVVVAFDDGEPVMSSSATVKILVLHPGEIPRFTQEEYRPPPVSELATKGTMVGVISAAAINQSIVYSIVSGNEEDTFGINNITGVIYVNGPLDYETRTSYVLRVQADSLEVVLANLRVPSKSNTAKVYIEIQDENNHPPVFQKKFYIGGVSEDARMFTSVLRVKATDKDTGNYSVMAYRLIIPPIKEGKEGFVVETYTGLIKTAMLFHNMRRSYFKFQVIATDDYGKGLSGKADVLVSVVNQLDMQVIVSNVPPTLVEKKIEDLTEILDRYVQEQIPGAKVVVESIGARRHGDAFSLEDYTKCDLTVYAIDPQTNRAIDRNELFKFLDGKLLDINKDFQPYYGEGGRILEIRTPEAVTSIKKRGESLGYTEGALLALAFIIILCCIPAILVVLVSYRQFKVRQAECTKTARIQAALPAAKPAVPAPAPVAAPPPPPPPPPGAHLYEELGDSSMHNLFLLYHFQQSRGNNSVSEDRKHQQVVMPFSSNTIEAHKSAHVDGSLKSNKLKSARKFTFLSDEDDLSAHNPLYKENISQVSTNSDISQRTDFVDPFSPKIQAKSKSLRGPREKIQRLWSQSVSLPRRLMRKVPNRPEIIDLQQWQGTRQKAENENTGICTNKRGSSNPLLTTEEANLTEKEEIRQGETLMIEGTEQLKSLSSDSSFCFPRPHFSFSTLPTVSRTVELKSEPNVISSPAECSLELSPSRPCVLHSSLSRRETPICMLPIETERNIFENFAHPPNISPSACPLPPPPPISPPSPPPAPAPLAPPPDISPFSLFCPPPSPPSIPLPLPPPTFFPLSVSTSGPPTPPLLPPFPTPLPPPPPSIPCPPPPSASFLSTECVCITGVKCTTNLMPAEKIKSSMTQLSTTTVCKTDPQREPKGILRHVKNLAELEKSVANMYSQIEKNYLRTNVSELQTMCPSEVTNMEITSEQNKGSLNNIVEGTEKQSHSQSTSL

SEQ ID NO: 81761 - protein, 130 aa, Homo sapiens
MDPVVLSYMDSLLRQSDVSLLDPPSWLNDHIIGFAFEYFANSQFHDCSDHVSFISPEVTQFIKCTSNPAEIAMFLEPLDLPNKRVVFLAINDNSNQAAGGTHWSLLVYLQDKNSFFHYDSHSRSNSVHAK

SEQ ID NO: 81762 - protein, 186 aa, Homo sapiens
MSSYFVNPLYSKYKAAAAAAAAAGEAINPTYYDCHFAPERQPIFTTQQEAELVQYPDCKSSSGNIGEDPDHLNQSSSPSQMFPWMRPQAAPGRRRGRQTYSRFQTLELEKEFLFNPYLTRKRRIEVSHALALTERQVKIWFQNRRMKWKKENNKDKFPVSRQEVKDGETKKEAQELEEDRAEGLTN

SEQ ID NO: 81763 - protein, 781 aa, Homo sapiens
LWLLLWAAAWRLGASACPALCTCTGTTVDCHGTGLQAIPKNIPRNTERLELNGNNITRIHKNDFAGLKQLRVLQLMENQIGAVERGAFDDMKELERLRLNRNQLHMLPELLFQNNQALSRLDLSENAIQAIPRKAFRGATDLKNLQLDKNQISCIEEGAFRALRGLEVLTLNNNNITTIPVSSFNHMPKLRTFRLHSNHLFCDCHLAWLSQWLRQRPTIGLFTQCSGPASLRGLNVAEVQKSEFSCSGQGEAGRVPTCTLSSGSCPAMCTCSNGIVDCRGKGLTAIPANLPETMTEIRLELNGIKSIPPGAFSPYRKLRRICPLSFCSPCRDLSNNQIAEIAPDAFQGLRSLNSLVLYGNKITDLPRGVFGGLYTLQLLLLNANKINCIRPDAFQDLQNLSLLSLYDNKIQSLAKGTFTSLRAIQTLHLAQNPFICDCNLKWLADFLRTNPIETSGARCASPRRLANKRIGQIKSKKFRCSAKEQYFIPGTEDYQLNSECNSDVVCPHKCRCEANVVECSSLKLTKIPERIPQSTAELRLNNNEISILEATGMFKKLTHLKKINLSNNKVSEIEDGAFEGAASVSELHLTANQLESIRSGMFRGLDGLRTLMLRNNRISCIHNDSFTGLRNVRLLSLYDNQITTVSPGAFDTLQSLSTLNLLANPFNCNCQLAWLGGWLRKRKIVTGNPRCQNPDFLRQIPLQDVAFPDFRCEEGQEEGGCLPRPQCPQECACLDTVVRCSNKHLRALPKGIPKNVTELYLDGNQFTLVPGQLSTFKYLQL

SEQ ID NO: 81764 - protein, 56 aa, Homo sapiens
  MOD_RES (1)..(1): Any amino acid
XGKKMPVSQKLTLVAPPGGPNGDSSGGTQGVAKLLTSPSLKPSAVSSVTSSTSLSR

SEQ ID NO: 81765 - protein, 69 aa, Homo sapiens
MAEEEVAKLEKHLMLLRQEYVKLQKKLAETEKRCALLAAQANKESSSESFISRLLAIVADLYEQEQYRC

SEQ ID NO: 81766 - protein, 180 aa, Homo sapiens
MSLGRLCRLLKPALLCGALAAPGLAGTMCASRDDWRCARSMHEFSAKDIDGHMVNLDKYRGFVCIVTNVASQCGKTEVNYTQLVDLHARYAECGLRILAFPCNQFGKQEPGSNEEIKEFAAGYNVKFDMFSKICVNGDDAHPLWKWMKIQPKGKGILGNSSSTRTAAWCSATDPWRSPWC

SEQ ID NO: 81767 - protein, 511 aa, Homo sapiens
MASVVEYKGLRAGYHCGYCDSKEGKASCGMWAHSMTVQDYQDLIDRGWRRSGKYVYKPVMNQTCCPQYTIRCRPLQFQPSKSHKKVLKKMLKFLAKGEVPKGSCEDEPMDSTMDDAVAGDFALINKLDIQCDLKTLSDDIKESLESEGKNSKKEEPQELLQSQDFVGEKLGSGEPSHSVKVHTVPKPGKGADLSKPPCRKAKEIRKERKRLKLMQQNPAGELEGFQAQGHPPSLFPPKAKSNQPKSLEDLIFESLPENASHKLEVRLVPVSFEDPEFKSSFSQSFSLYVKYQVAIHQDPPDECGKTEFTRFLCSSPLEAETPPNGPDCGYGSFHQQYWLDGKIIAVGVIDILPNCVSSVYLYYDPDYSFLSLGVYSALREIAFTRQLHEKTSQLSYYYMGFYIHSCPKMKYKGQYRPSDLLCPETYVWVPIEQCLPSLENSKYCRFNQDPEAVDEDRSTEPDRLQVFHKRAIMPYGVYKKQQKDPSEEAAVLQYASLVGQKCSERMLLFRN

SEQ ID NO: 81768 - protein, 57 aa, Homo sapiens
  MOD_RES (1)..(1): Any amino acid
XANQAPRCFPSALLVSAAGIRVSLFPGPSDSAWFSSGVEGCQNLFWLLPSCCSGQGR

SEQ ID NO: 81769 - protein, 78 aa, Homo sapiens
  MOD_RES (1)..(1): Any amino acid
XLRSICMHTKKRVSSFRGNKIGLKDVITLRRHVETKVRAKIRKRKVTTKINHHDKINGKRKTARKQINHILQKDYACL

SEQ ID NO: 81770 - protein, 141 aa, Homo sapiens
MPKNKKRNTPHRGSSAGGGGSGAAAATAATAGGQHRNVQPFSDEDASIETMSHCSGYSDPSSFAEDGPEVLDEEGTQEDLEYKLKGLIDLTLDKSAKTRQAALEGIKNALASKMLYEFILERRMTLTDSIERCLKKAGPWN

SEQ ID NO: 81771 - protein, 1680 aa, Homo sapiens
  MOD_RES (1)..(1): Any amino acid
XYHHMETEEEDDTNDEDFNVEIRQFSSCSHRFSKVFSSIDRITQNSAEEKEDSVDKTKSTTLPSTETLSWSSEYSEMQQLSTSNSSDTESNRHKLSSGLLPKLAISTEGEQDEAASCPGDPHEEPGKPALPPEECAQEEPEVTTPASTISSSTLSDMFAVSPLGSPMSPHSLSSDPSSSRDSSPSRDSSAASASPHQPIVIHSSGKNYGFTIRAIRVYVGDSDIYTVHHIVWNVEEGSPACQAGLKAGDLITHINGEPVHGLVHTEVIELLLKSGNKVSITTTPFENTSIKTGPARRNSYKSRMVRRSKKSKKKESLERRRSLFKKLAKQPSPLLHTSRSFSCLNRSLSSGESLPGSPTHSLSPRSPTPSYRSTPDFPSGTNSSQSSSPSSSAPNSPAGSGHIRPSTLHGLAPKLGGQRYRSGRRKSAGNIPLSPLARTPSPTPQPTSPQRSPSPLLGHSLGNSKIAQAFPSKMHSPPTIVRHIVRPKSAEPPRSPLLKRVQSEEKLSPSYGSDKKHLCSRKHSLEVTQEEVQREQSQREAPLQSLDENVCDVPPLSRARPVEQGCLKRPVSRKVGRQESVDDLDRDKLKAKVVVKKADGFPEKQESHQKSHGPGSDLENFALFKLEEREKKVYPKAVERSSTFENKASMQEAPPLGSLLKDALHKQASVRASEGAMSDGRVPAEHRQGGGDFRRAPAPGTLQDGLCHSLDRGISGKGEGTEKSSQAKELLRCEKLDSKLANIDYLRKKMSLEDKEDNLCPVLKPKMTAGSHECLPGNPVRPTGGQQEPPPASESRAFVSSTHAAQMSAVSFVPLKALTGRVDSGTEKPGLVAPESPVRKSPSEYKLEGRSVSCLKPIEGTLDIALLSGPQASKTELPSPESAQSPSPSGDVRASVPPVLPSSSGKKNDTTSARELSPSSLKMNKSYLLEPWFLPPSRGLQNSPAVSLPDPEFKRDRKGPHPTARSPGTVMESNPQQREGSSPKHQDHTTDPKLLTCLGQNLHSPDLARPRCPLPPEASPSREKPGLRESSERGPPTARSERSAARADTCREPSMELCFPETAKTSDNSKNLLSVGRTHPDFYTQTQAMEKAWAPGGKTNHKDGPGEARPPPRDNSSLHSAGIPCEKELGKVRRGVEPKPEALLARRSLQPPGIESEKSEKLSSFPSLQKDGAKEPERKEQPLQRHPSSIPPPPLTAKDLSSPAARQHCSSPSHASGREPGAKPSTAEPSSSPQDPPKPVAAHSESSSHKPRPGPDPGPPKTKHPDRSLSSQKPSVGATKGKEPATQSLGGSSREGKGHSKSGPDVFPATPGSQNKASDGIGQGEGGPSVPLHTDRAPLDAKPQPTSGGRPLEVLEKPVHLPRPGHPGPSEPADQKLSAVGEKQTLSPKHPKPSTVKDCPTLCKQTDNRQTDKSPSQPAANTDRRAEGKKCTEALYAPAEGDKLEAGLSFVHSENRLKGAERPAAGVGKGFPEARGKGPGPQKPPTEADKPNGMKRSPSATGQSSFRSTALPEKSLSCSSSFPETRAGVREASAASSDTSSAKAAGGMLELPAPSNRDHRKAQPAGEGRTHMTKSDSLPSFRVSTLPLESHHPDPNTMGGASHRDRALSVTATVGETKGKDPAPAQPPPARKQNVGRDVTKPSPAPNTDRPISLSNEKDFVVRQRRGKESLRSSPHKKAL

SEQ ID NO: 81772 - protein, 160 aa, Homo sapiens
MNRSQEVTRDEESTRSEEVTREEMAAAGLTVTVTHSNEKHDLHVTSQQGSSEPVVQDLAQVVEEVIGVPQSFQKLIFKVLQQIFIEDLLGIGHSQTPGQVSDLKSYDDGRNLTIFDEAHGQSSLARKISEGNGNTVVSTWNTRWLPGHVNWEKEQSTGRG

SEQ ID NO: 81773 - protein, 128 aa, Homo sapiens
MEPTYQLSRWTPVIKDVMEDAVEDRLDRNLWPFVSDPAPTASSQAAVSARFGHWHKNKAGIEARAGPRLIVYVMGGVAMSEMRAAYEVTRATEGKWEVLIGSSHILTPTRFLDDLKALDKKLEDIALP

SEQ ID NO: 81774 - protein, 163 aa, Homo sapiens
MDMGNPGTLSPTKPGSQYYQYSSNNPRRRPLHSSAMEVQTKKVRKVPPGLPSSVYAPSASTADYNRDSPGYPSSKPATSTFPSSFFMQDGHHSSDPWSSSSGMNQPGYAGMLGNSSHIPQSSSYCSLHPHERLSYPSHSSADINSSLPPMSTFHRSGTNHYST

SEQ ID NO: 81775 - protein, 138 aa, Homo sapiens
MLAVLAFPVGVFVVAVFWIIYAYDREMIYPKLLDNFIPGWLNHGMHTTVLPFILIEMRTSHHQYPSRSSGLTAICTFSVGYILWVCWVHHVTGMWVYPFLEHIGPGARIIFFGSTTILMNFLYLLGEVLNNYIWDTQK

SEQ ID NO: 81776 - protein, 413 aa, Homo sapiens
MAAVQVVGSWPSVQPREAPREAIPERGNGFRLLSARLCALRPDDSSSARTEIHLLFDQLISENYSEGSGVAPEDVSALLVQACRLVPLNQNHLVSKVSQLIHHLLNRLQVIVDEQHLDFLLAYTISAIHQCSSWTHREILQALAALVYCNGSKCQKYLPELLGNTGLLMKLSDLAQSDPEVRRAAVHCMANLCLSVPGQPYLEEPYQNVCFQAFLTILQSPKSSDMDDITFCMLLQNALKGIQSLLNGGRMKLTQTDELGALLAVLKKFMFHGLPGLNIEMPTVLYPTPLPQYDGRTPIKPQQSESSASRPTLNKKKKSKVKPKKIQQGEEEEKESSGEIEAAPVTGTGRVNLHEGNTWCPSSLGVQSLPLDGSGAAEKDGVSSSFSSSSWKRVSSSESDFSDAEGGMQSKMR

SEQ ID NO: 81777 - protein, 98 aa, Homo sapiens
MAVNPLLTPTGQQTIPLIPSPFGPPTVDRDVLPSTVAPTDPRQFCVPSQFGSSVLPNTNMANVLSSRIYPGWGILPPESIKAVARRNEMIQRHHTARV

SEQ ID NO: 81778 - protein, 189 aa, Homo sapiens
MACLLRSFQRISAGVFFLALWGMVVGDKLLVVPQDGSHWLSMKDIVEVLSDRGHEIVVVVPEVNLLLKESKYYTRKIYPVPYDQEELKNRYQSFGNNHFAERSFLTAPQTEYRNNMIVIGLYFINCQSLLQDRDTLNFFKESKFDALFTDPALPCGVILAEYLGLPSVYLFRGFPCSLEHTFSRSPDPV

SEQ ID NO: 81779 - protein, 553 aa, Homo sapiens
MMKYYDLAKFTIYQIAEMDKGLSELSPMQQALIYSFCENHDKAIEVLDGISWNRAEMTMCALLAKVQMKAKRTKEAVEVLKKALDAISHSDKGPDATAISADCLYNLGLCYMEEGNLQMAFDSFTKAVKANPDFAESFYQRGLCKVKLHKDSSILDFNRAITLNPKHYQAYLSRVAFYGLKGRYSKAILNCNKAIKIYPESVRAYLYRGVLKYYNKTYKLAITDLTTAISMDKNSYTAFYNRALCYTKIRELQMALTDYGIVLLLDATETVKLNTFLNRGLIYVELGQYGFALEDFKQAALISRTNGSLCHATAMCHHRINEFEEAVNFFTWALKINPCFLDAYVGRGNSYMEYGHDEATKQAQKDFLKALHINPAYIKARISFGYNLQAQGKFQKAWNHFTIAIDTDPKNYLAYEGRAVVCLQMGNNFAAMQDINAAMKISTTAEFLTNRGVIHEFMGHKQNAMKDYQDAITLNPKYSLAYFNAGNIYFHHRQFSQEESLGLAWSLSLDSFLRTGGATFSSGVNPLQTLHRRMSILSPLPPTCPRDEMDFTS

SEQ ID NO: 81780 - protein, 98 aa, Homo sapiens
MEAREPGRPTPTYHLVPNTSQSQVEEDVSSPPQRSSETMQLKKEISLLNGLLSPPVRPSSPSPLPTTSSSRPSPAVIPHTWPAVSWLLLAYVTCHLHS

SEQ ID NO: 81781 - protein, 671 aa, Homo sapiens
MGPGVLLLLLVATAWHGQGIPVIEPSVPELVVKPGATVTLRCVGNGSVEWDGPPSPHWTLYSDGSSSILSTNNATFQNTGTYRCTEPGDPLGGSAAIHLYVKDPARPWNVLAQEVVVFEDQDALLPCLLTDPVLEAGVSLVRVRGRPLMRHTNYSFSPWHGFTIHRAKFIQSQDYQCSALMGGRKVMSISIRLKVQKVIPGPPALTLVPAELVRIRGEAAQIVCSASSVDVNFDVFLQHNNTKLAIPQQSDFHNNRYQKVLTLNLDQVDFQHAGNYSCVASNVQGKHSTSMFFRVVESAYLNLSSEQNLIQEVTVGEGLNLKVMVEAYPGLQGFNWTYLGPFSDHQPEPKLANATTKDTYRHTFTLSLPRLKPSEAGRYSFLARNPGGWRALTFELTLRYPPEVSVIWTFINGSGTLLCAASGYPQPNVTWLQCSGHTDRCDEAQVLQVWDDPYPEVLSQEPFHKVTVQSLLTVETLEHNQTYECRAHNSVGSGSWAFIPISAGAHTHPPDEFLFTPVVVACMSIMALLLLLLLLLLYKYKQKPKYQVRWKIIESYEGNSYTFIDPTQLPYNEKWEFPRNNLQFGKTLGAGAFGKVVEATAFGLGKEDAVLKVAVKMLKSTAHADEKEALMSELKIMSHLGQHENIVNLLGACTHGGTVASPARVWTPMWR

SEQ ID NO: 81782 - protein, 955 aa, Homo sapiens
MDSKKRSSTEAEGSKERGLVHIWQAGSFPITPERLPGWGGKTVLQAALGVKHGVLLTEDGEVYSFGTLPWRSGPVEICPSSPILENALVGQYVITVATGSFHSGAVTDNGVAYMWGENSAGQCAVANQQYVPEPNPVSIADSEASPLLAVRILQLACGEEHTLALSISREIWAWGTGCQLGLITTAFPVTKPQKVEHLAGRVVLQVACGAFHSLALVQCLPSQDLKPVPERCNQCSQLLITMTDKEDHVIISDSHCCPLGVTLTESQAENHASTALSPSTETLDRQEEVFENTLVANDQSVATELNAVSAQITSSDAMSSQQNVMGTTEISSARNIPSYPDTQAVNEYLRKLSDHSVREDSEHGEKPVPSQPLLEEAIPNLHSPPTTSTSALNSLVVSCASAVGVRVAATYEAGALSLKKVMNFYSTTPCETGAQAGSSAIGPEGLKDSREEQVKQESMQGKKSSSLVDIREEETEGGSRRLSLPGLLSQVSPRLLRKAARVKTRTVVLTPTYSGEADALLPSLRTEVWTWGKGKEGQLGHGDVLPRLQPLCVKCLDGKEVIHLEAGGYHSLALTAKSQVYSWGSNTFGQLGHSDFPTTVPRLAKISSENGVWSIAAGRDYSLFLVDTEDFQPGLYYSGRQDPTEGDNLPENHSGSKTPVLLSCSKLGYISRVTAGKDSYLALVDKNIMGYIASLHELATTERRFYSKLSDIKSQILRPLLSLENLGTTTTVQLLQEVASRFSKLCYLIGQHGASLSSFLHGVKEARSLVILKHSSLFLDSYTEYCTSITNFLVMGGFQLLAKPAIDFLNKNQELLQDLSEVNDENTQLMEILNTLFFLPIRRLHNYAKVLLKLATCFEVASPEYQKLQDSSSCYECLALHLGRKRKEAEYTLGFWKTFPGKMTDSLRKPERRLLCESSNRALSLQHAGRFSVNWFILFNDALVHAQEWLKDNYT

SEQ ID NO: 81783 - protein, 103 aa, Homo sapiens
FKTSVGSAKYVPERNVVIWSIKSFPGGKEYLMRAHFGLPSVEKEEVEGRPPIGVKFEIPYFTVSGIQVRYMKIIEKSGYQALPWVRYITQSGGKAAQLLGTMG

SEQ ID NO: 81784 - protein, 221 aa, Homo sapiens
MLFGSEICKEGKCVNTQPGYECYCKQGFYYDGNLLECVDVDECLDESNCRNGVCENTRGGYRCACTPPAEYSPAQRQCLSPEEMERAPERRDVCWSQRGEDGMCAGPLAGPALTFDDCCCRQGRGWGAQCRPCPPRGAGSHCPTSQSESNSFWDTSPLLLGKPPRDEDSSEEDSDECRCVSGRCVPRPGGAVCECPGGFQLDASRARCVDIDECRELNQRG

SEQ ID NO: 81785 - protein, 171 aa, Homo sapiens
MACAEFSFHVPSLEELAGVMQKGLKDNFADVQVSVVDCPDLTKEPFTFPVKGICGKTRIAEVGGVPYLLPLVNQKKVYDLNKIAKEIKLPGAFILGAGAGPFQTLGFNSEFMPVIQTESEHKPPVNGSYFAHVNPADGGCLLEKYSEKCHDFQCALLANLFASEGQPGKVI

SEQ ID NO: 81786 - protein, 533 aa, Homo sapiens
MGRARPGQRGPPSPGPAAQPPAPPRRRARSLALLGALLAAAAAAAVRVCARHAEAQAAARQELALKTLGTDGLFLFSSLDTDGDMYISPEEFKPIAEKLTGSTPAASCEEEELPPDPSEETLTIEARFQPLLPETMTKSKDGFLGVSRLALSGLRNWTAAASPSAVFATRHFQPFLPPPGQELGEPWWIIPSELSMFTGYLSNNRFYPPPPKGKEGAVACLTAISDFYYTVMFRIHAEFQLSEPPDFPFWFSPAQFTGHIILSKDATHVRDFRLFVPNHRSLNVDMEWLYGASESSNMEVDIGYIPQMELEATGPSVPSVILDEDGSMIDSHLPSGEPLQFVFEEIKWQQELSWEEAARRLEVAMYPFKKVSYLPFTEAFDRAKAENKLVHSILLWGALDDQSCCGSGRTLRETVLESSPILTLLNESFISTWSLVKELEELQNNQENSSHQKLAGLHLEKYSFPVEMMICLPNGTVVHHINANYFLDITSVKPEEIESNLFSFSSTFEDPSTATYMQFLKEGLRRGLPLLQP

SEQ ID NO: 81787 - protein, 69 aa, Homo sapiens
MSRSNVQPTAAPGQKVMENSSGTPDILTRHFTIDDFEIGRPLGKGKFGNVYLAREKKSHFIVALKVLFK

SEQ ID NO: 81788 - protein, 131 aa, Homo sapiens
  MOD_RES (1)..(1): Any amino acid
XAGLAGPGPAGYSTARPTIPPRAGVISAPQSHARASAGRLTPESQSKTSETSKGSTFLPEPLKPQAAFPPQSSLPPPAQRLQEPLVPVAAPMPQSGPQPNLETPPQPPPRSRSSHSLPSEASSQPQEQPSG

SEQ ID NO: 81789 - protein, 98 aa, Homo sapiens
MMQHASPAPALTMMATQNVPPPPYQDSPQMTATAQPPSKAQAVHISAPSAAASTPVPSAPIDPQAQLEADKRAVYRHPLFPLLTLLFEKCEQATQGSE

SEQ ID NO: 81790 - protein, 162 aa, Homo sapiens
MVLAELYVSDREGSDATGDGTKEKPFKTGLKALMTVGKEPFPTIYVDSQKENERWNVISKSQLKNIKKMWHREQMKSESREKKEAEDSLRREKNLEEAKKITIKNDPSLPEPKCVKIGALEGYRGQRVKVFGWVHRLRRQVSVLQWSSLVHGEQCCSVWNAK

SEQ ID NO: 81791 - protein, 356 aa, Homo sapiens
MWELVALLLLTLAYLFWPKRRCPGAKYPKSLLSLPLVGSLPFLPRHGHMHNNFFKLQKKYGPIYSVRMGTKTTVIVGHHQLAKEVLIKKGKDFSGRPQMEKFRSDSITNMLDTLMQAKMNSDNGNAGPDQDSELLSDNHILTTIGDIFGAGVETTTSVVKWTLAFLLHNPQVKKKLYEEIDQNVGFSRTPTISDRNRLLLLEATIREVLRLRPVAPMLIPHKANVDSSIGEFAVDKGTEVIINLWALHHNEKEWHQPDQFMPERFLNPAGTQLISPSVSYLPFGAGPRSCIGEILARQELFLIMAWLLQRFDLEVPDDGQLPSLEGIPKVVFLIDSFKVKIKVRQAWREAQAEGST

SEQ ID NO: 81792 - protein, 288 aa, Homo sapiens
MAGLRNESEQEPLLGDTPGSREWDILETEEHYKSRWRSIRILYLTMFLSSVGFSVVMMSIWPYLQKIDPTADTSFLGWVIASYSLGQMVASPIFGLWSNYRPRKEPLIVSILISVAANCLYAYLHIPASHNKYYMLVARGLLGIGAGNVAVVRSYTAGATSLQERTSSMANISMCQALGFILGPVFQTCFTFLGEKGVTWDVIKLQINMYTTPVLLSAFLGILNIILILAILREHRVDDSGRQCKSINFEEASTDEAQVPQGNIDQVAVVAINVLFFVTLFIFALFET

SEQ ID NO: 81793 - protein, 83 aa, Homo sapiens
MELTQPAEDLIQTQQTPASELGDPEDPGEEAADGSDTVVLSLFPCTPEPVNPEPDASVSSPQAGSSLKHSTTLTNRQRGNEVS

SEQ ID NO: 81794 - protein, 123 aa, Homo sapiens
SSHVPISDSKSIQKSELLGLLKTYNCYHEGKSFQLRHREEEGTLIIEGLLNIAWGLRRPIRLQMQDDREQVHLPSTSWMPRRPSCPLHLAGKKGRLQPGGLPTPMQAEHVSPSLVLSLKFTRI

SEQ ID NO: 81795 - protein, 66 aa, Homo sapiens
MFDCWRFILCKRPGSNSYSSPQRPNEAKKEETDHQIDVSDVIRLVQDTPEATAMATAPRRSQSPGL

SEQ ID NO: 81796 - protein, 108 aa, Homo sapiens
  MOD_RES (1)..(1): Any amino acid
XNGFCIIENFKGFTMQQAASLRTSDLRKMVDMLQPWYFTTTYNVVKPFLKSKLLERVFVHGDDLSGFYQEIDENILPSDFGGTLPKYDGKAVAEQLFGPQAQAENTAF

SEQ ID NO: 81797 - protein, 395 aa, Homo sapiens
MDSKKRSSTEAEGSKERGLVHIWQAGSFPITPERLPGWGGKTVLQAALGVKHGVLLTEDGEVYSFGTLPWRSGPVEICPSSPILENALVGQYVITVATGSFHSGAVTDNGVAYMWGENSAGQCAVANQQYVPEPNPVSIADSEASPLLAVRILQLACGEEHTLALSISREIWAWGTGCQLGLITTAFPVTKPQKVEHLAGRVVLQVACGAFHSLALVQCLPSQDLKPVPERCNQCSQLLITMTDKEDHVIISDSHCCPLGVTLTESQAENHASTALSPSTETLDRQEEVFENTLVANDQSVATELNAVSAQITSSDAMSSQQNVMGTTEISSARNIPSYPDTQAVNEYLRKLSDHSVREDSEHGEKPVPSQPLLEEAIPNLHSPPTTSTSFPPGS

SEQ ID NO: 81798 - protein, 81 aa, Homo sapiens
LGRMVQLHLKSDKPQTKLLILHQAVAVILSLEQQVRERNLNPKAACLKRREEEKVSSEPPPLSLAGPHPGMGDASNHMGQM

SEQ ID NO: 81799 - protein, 23 aa, Homo sapiens
MAEVLRTLAGTSTSGHFLHGPLS

SEQ ID NO: 81800 - protein, 58 aa, Homo sapiens
SEAMNDILAQVATNTETSKNVGNAILYETVLTIMDIKSESGLRICGSDIFVEDCTDRS

SEQ ID NO: 81801 - protein, 304 aa, Homo sapiens
  MOD_RES (1)..(1): Any amino acid
XGYDQWATSQLIGTIFFCVGITTLLQTTFGCRTIFLVLLFSQYARNVKFPLPIYKSKKGWTAYKLQLFKMFPIILAILVSWLLCFIFTVTDVFPPDSTKYGFYARTDARQGVLLVAPWFKVPYPFQWGLPTVSAAGVIGMLSAVVASIIESIGDYYACARLSCAPPPPIHAINRGIFVEGLSCVLDGIFGTGNGSTSSSPNIGVLGITKVGSRRVIQCGAALMLALGMIGKFSALFASLPDPVLGALFCTLFGMITAVGLSNLQFIDLNSSRNLFVLGFSIFFGLVLPSYLRQNPLVTGITGID

SEQ ID NO: 81802 - protein, 161 aa, Homo sapiens
GNHDIGFHYDFVMVNSVALNGDGCGICSETEAELIEVSHRLNCSREQARGSSRCGPGPLLPTSAPVLLQHYPLYRRSDANCSGEDAAPAEERDIPFKENYDVLSREASQKLLWWLQPRLVLSGHTHSACEVHHGGRVPELSVPSFSWRNRNNPSFIMGTDA

SEQ ID NO: 81803 - protein, 546 aa, Homo sapiens
MTGCFLWQYHLPKLKTGSLGPEETSAPVRMCPRHPEPVPLAHPLPVLKEALEKVDQILRQAMSAPGVAAMSAVVIHNDTVLWTGNFGKKNGSDPASGAPNEYTMYRISSISKIFPVLMLYRLWEEGIVASLDDPLERYASTFTINNPLGLASAEQQGLMDGLEQVGPAPRPSPVTLRRMASQLSGLPRRLRSTSLLWKGSTQEALNLLKDDVLVVDPGTRCHYSTLAFSLLAHVLAAHTAQGDYQRWVSENVLEPLGMADTGFDLTPDVRARLAAGFYGSGRPAPLYDLGWYRPSGQMYSTAADLAKLAVALLGGGPRRLLRPDAAKTLLAPLLACPGAYFANETGTPWEFHAQRGYRVVRKDGDLDGYAATFSLVPPLRLGLVLLLAGPRPPGPDLVARAYDELLPALERALREAEPGPAPPPTAHPFAGYFTFANLTFYEVRAGPAGELRLRQFGPRVEALVPPAFRTLALRHLHGRVFQLHVAHEFPCALPLGDAWLSLEAQHGQLVNFYPLDHHGLSPGFDVPGLNTYRVLRLRGKPVFKTQ

SEQ ID NO: 81804 - protein, 1160 aa, Homo sapiens
MGDMTNSDFYSKNQRNESSHGGEFGCTMEELRSLMELRGTEAVVKIKETYGDTEAICRRLKTSPVEGLPGTAPDLEKRKQIFGQNFIPPKKPKTFLQLVWEALQDVTLIILEIAAIISLGLSFYHPPGEGNEGCATAQGGAEDEGEAEAGWIEGAAILLSVICVVLVTAFNDWSKEKQFRGLQSRIEQEQKFTVVRAGQVVQIPVAEIVVGDIAQVKYGDLLPADGLFIQGNDLKIDESSLTGESDQVRKSVDKDPMLLSGTHVMEGSGRMLVTAVGVNSQTGIIFTLLGAGGEEEEKKDKKAKQQDGAAAMEMQPLKSAEGGDADDRKKASMHKKEKSVLQGKLTKLAVQIGKAGLVMSAITVIILVLYFTVDTFVVNKKPWLPECTPVYVQYFVKFFIIGVTVLVVAVPEGLPLAVTISLAYSVKKMMKDNNLVRHLDACETMGNATAICSDKTGTLTTNRMTVVQAYVGDVHYKEIPDPSSINTKTMELLINAIAINSAYTTKILPPEKEGALPRQVGNKTECGLLGFVLDLKQDYEPVRSQMPEEKLYKVYTFNSVRKSMSTVIKLPDESFRMYSKGASEIVLKKCCKILNGAGEPRVFRPRDRDEMVKKVIEPMACDGLRTICVAYRDFPSSPEPDWDNENDILNELTCICVVGIEDPVRPEVPEAIRKCQRAGITVRMVTGDNINTARAIAIKCGIIHPGEDFLCLEGKEFNRRIRNEKGEIEQERIDKIWPKLRVLARSSPTDKHTLVKGIIDSTHTEQRQVVAVTGDGTNDGPALKKADVGFAMGIAGTDVAKEASDIILTDDNFSSIVKAVMWGRNVYDSISKFLQFQLTVNVVAVIVAFTGACITQDSPLKAVQMLWVNLIMDTFASLALATEPPTETLLLRKPYGRNKPLISRTMMKNILGHAVYQLALIFTLLFVGEKMFQIDSGRNAPLHSPPSEHYTIIFNTFVMMQLFNEINARKIHGERNVFDGIFRNPIFCTIVLGTFAIQIVIVQFGGKPFSCSPLQLDQWMWCIFIGLGELVWGQVIATIPTSRLKFLKEAGRLTQKEEIPEEELNEDVEEIDHAERELRRGQILWFRGLNRIQTQIEVVNTFKSGASFQGALRRQSSVTSQSQDVANLSSPSRVSLSNALSSPTSLPPAAAGHPRREGVP

SEQ ID NO: 81805 - protein, 212 aa, Homo sapiens; identical to SEQ ID NO: 43344

SEQ ID NO: 81806 - protein, 52 aa, Homo sapiens
  MOD_RES (1)..(1): Any amino acid
XENPLVYCDGHGCSVAVHQACYGIVQVPTGPWFCRKCESQERAARVLLLTVS

SEQ ID NO: 81807 - protein, 151 aa, Homo sapiens
MRGPGHPLLLGLLLVLGAAGRGRGGAEPREPADGQALLRLVVELVQELRKHHSAEHKGLQLLGRDCALGRAEAAGLGPSPEQRVEIVPRDLRMKDKFLKHLTGPLYFSPKCSKHFHRLYHNTRDCTIPAYYKRCARLLTRLAVSPVCMEDK

SEQ ID NO: 81808 - protein, 40 aa, Homo sapiens
MAASSRAQVLSLYRAMLRESKRFSAYNYRSTLANCIQLTS

SEQ ID NO: 81809 - protein, 150 aa, Homo sapiens
MEVRSESTNGDGRQSQADEHNDVQKKTFTKWINARFSKSGKPPINDMFTDLKDGRKLLDLLEGLTGTSLPKERGSTRVHALNNVNRVLQVLHQNNVELVNIGGTDIVDGNHKLTLGLLWSIILHWQVKDVMKDVMSDLQQTNSEKILLSW

SEQ ID NO: 81810 - protein, 770 aa, Homo sapiens
MFSNSTGRLPGQPTEEIQQYKVLVHSQERELTQLREKLREGRDASRSLNEHLQALLTPDEPDKSQGQDLQEQLAEGCRLAQHLVQKLSPENDEDEDEDVQVEEDEKVLESSAPREVQKAEESKVPEDSLEECAITCSNSHGPCDSIQPHKNIKITFEEDKVNSSLVVDRESSHDGCQDALNILPVPGPTSSATNVSMVVSAGPLSSEKAEMNILEINEKLCPQLAEKKQQFRSLKEKCFVTQVACFLAKQQNKYKYEECKDLIKSMLRNERQFKEEKLAEQLKQAEELRQYKVLVHSQERELTQLREKLREGRDASRSLNEHLQALLTPDEPDKSQGQDLQEQLAEGCRLAQHLVQKLSPENDNDDDEDVQVEVAEKVQKSSSPREMQKAEEKEVPEDSLEECAITCSNSHGPYDSNQPHRKTKITFEEDKVDSTLIGSSSHVEWEDAVHIIPENESDDEEEEEKGPVSPRNLQESEEEEVPQESWDEGYSTLSIPPERLASYQSYSSTFHSLEEQQVCMAVDIGRHRWDQVKKEDQEATGPRLSRELLDEKEPEVLQDSLDRCYSTPSVYLGLTDSCQPYRSAFYVLEQQRIGLAVDMDEIEKYQEVEEDQDPSCPRLSRELLAEKEPEVLQDSLDRCYSTPSGYLELPDLGQPYRSAVYSLEEQYLGLALDVDRIKKDQEEEEDQGPPCPRLSRELLEVVEPEVLQDSLDVIQLLPVVLNSLTPASPTEVPFMHWRKNMLAFLLTWEKLKRRGRGRKEGEEDQRRKEE

SEQ ID NO: 81811 - protein, 32 aa, Homo sapiens
  MOD_RES (1)..(1): Any amino acid
XHAAPSTTSALTPGPAAAAADAAASSVAKGGA

SEQ ID NO: 81812 - protein, 237 aa, Homo sapiens
  MOD_RES (1)..(1): Any amino acid
XLKFLLVGDSDVGKGEILESLQDGAAESPYAYSNGIDYKTTTILLDGRRVKLELWDTSGQGRFCTIFRSYSRGAQGILLVYDITNRWSFDGIDRWIKEIDERQVPTEQARAYAEKNCMTFFEVSPLCNFNVIESFTELSRIVLMRHGMEKIWRPNRVFSLQDLCCRAIVSCTPVHLIDKLPLPVTIKSHLKSFSMANGMNAVMMHGRSYSLASGAGGGGSKGNSLKRSKSIRPPQSP

SEQ ID NO: 81813 - protein, 77 aa, Homo sapiens
MEANHCSLGVYPSYPDLVIDVGEVTLGEENRKKLQKTQRDQERARVIRAACALLNSGGGVIQMEMANRDERPTEMGL

SEQ ID NO: 81814 - protein, 82 aa, Homo sapiens
MPHRKERPSGSSLHTHGSTGTAEGGNMSRLSLTRSPVSPLAAQGIPLPAQLTKSNAPVHIDVGGHMYTSSLATLTKYPDSRI

SEQ ID NO: 81815 - protein, 98 aa, Homo sapiens
MEELGPQAHANDPECGQRPVPALSHHGSQQPGLAELWGFEGRRDPHRRQHSGCCASDPVYLGISALLPSEACCAPTDCNPARGPSPGLWLLLAPGTQP

SEQ ID NO: 81816 - protein, 301 aa, Homo sapiens
MAGKGIPGLEHLHAWISIPFCFAYTLALLGNCTLLFIIQADAALHEPMYLFLAMLATIDLVLSSTTLPKMLAIFWFRDQEINFFACLVQMFFLHSFSIMESAVLLAMAFDRYVAICKPLHYTTVLTGSLITKIGMAAVARAVTLMTPLPFLLRRFHYCRGPVIAHCYCEHMAVVRLACGDTSFNNIYGIAVAMFIVVLDLLFVILSYVFILQAVLQLASQEARYKAFGTCVSHIGAILSTYTPVVISSVMHRVARHAAPRVHILLAIFYLLFPPMVNPIIYGVKTKQIREYVLSLFQRKNM

SEQ ID NO: 81817 - protein, 353 aa, Homo sapiens
MVMIISTMEPQVSNGPTSNTSNGPSSNNRNCPSPMQTGATTDDSKTNLIVNYLPQNMTQEEFRSLFGSIGEIESCKLVRDKITGQSLGYGFVNYIDPKDAEKAINTLNGLRLQTKTIKVSYARPSSASIRDANLYVSGLPKTMTQKELEQLFSQYGRIITSRILVDQVTGVSRGVGFIRFDKRIEAEEAIKGLNGQKPSGATEPITVKFANNPSQKSSQALLSQLYQSPNRRYPGPLHHQAQRFRFSPITIDGMTSLVGMNIPGHTGTGWCIFVYNLSPDSDESVLWQLFGPFGAVNNVKVIRDFNTNKCKGFGFVTMTNYDEAAMAIASLNGYRLGDRVLQVSFKTNKAHKS

SEQ ID NO: 81818 - protein, 234 aa, Homo sapiens
MKPFGVFEDEEELNHRLVVLGKLNNLVKEWISDVSESKNLPPSVVATVGGKIFTFGSYRLGVHTKGADIDALCVAPRHVERSDFFQSFFEKLKHQDGIRNLRAVEDAFVPVIKFEFDGIEIDLVFARLAIQTISDNLDLRDDSRLRSLDIRCIRSLNGCRVTDEILHLVPNKETFRLTLRAVKLWAKRRGIYSNMLGFLGGVSWAMLVARTCQLYPNAAASTLVHKFFLVFSKW

SEQ ID NO: 81819 - protein, 87 aa, Homo sapiens
MGMTRMLLECSLSDKLCVIQEKQYEVIIVPTLLVTIFLILLGVILWLFIREQRTQQQRSGPQGIAPVPPPRDLSWEAGHGGNVALPL

SEQ ID NO: 81820 - protein, 137 aa, Homo sapiens
MNGDSRAAVVTSPPPTTAPHKERYFDRVDENNPEYLRERNMAPDLRQDFNMMEQKKRVSMILQSPAFCEELESMIQEQFKKGKNPTGLLALQQIADFMTTNVPNVYPAAPQGGMAALNMSLGMVTPVNDLRGSDSIA

SEQ ID NO: 81821 - protein, 85 aa, Homo sapiens
MDWQPDEQGLQQVLQLLKDSQSPNTATQRIVQDKLKQLNQFPDFNNYLIFVLTRLKSEDEPTRSLSGLILKNNVKAHYQSFPPPV

SEQ ID NO: 81822 - protein, 68 aa, Homo sapiens
VFKIEVLMNGRKHFVEKRYSEFHALHKKLKKCIKTPEIPSKHVRNWVPKVLEQRRQGLETYLQRNVGA

SEQ ID NO: 81823 - protein, 99 aa, Homo sapiens
MRPLLGLLLVFAGCTFALYLLSTRLPRGRRLGSTEEAGGRSLWFPSDLAELRELSEVLREYRKEHQAYVFLLFCGAYLYKQGFAIPGSSFLGTYDGGPA

SEQ ID NO: 81824 - protein, 78 aa, Homo sapiens
MNTLFNTTFETEEASHHEACVRLRPQTYDLQESNVQLKLTIVDAVGFGDQINKDESYRPIVDYIDAQFENYLQEELKI

SEQ ID NO: 81825 - protein, 57 aa, Homo sapiens
MRTLVGLLTSNQALLQLEAARCLHELSHSEQSTVAEACLPATSYLLTYLSSHSSDFI

SEQ ID NO: 81826 - protein, 61 aa, Homo sapiens
  MOD_RES (1)..(1): Any amino acid
XKKMHYVDPDHVKMQLLKRRPGSLASIQLAHAPLSSPVAISELLRVPLATSQMFLSVLGDL

SEQ ID NO: 81827 - protein, 563 aa, Homo sapiens
MAFMEKPPAGKVLLDDTVPLTAAIEASQSLQSHTIVRRYSDFDLLNNSLQIAGLSLPLPPKKLIGNMDREFIAERQKGLQNYLNVITTNHILSNCELVKKFLDPNNYSANYTEIALQQVSMFFRSEPKWEVVEPLKDIGWRIRKKYFLMKIKNQPKERLVLSWADLGPDKYLSDKDFQCLIKLLPSCLHPYIYRVTFATANESSALLIRMFNEKGTLKDLIYKAKPKDPFLKKYCNPKKIQGLELQQIKTYGRQILEVLKFLHDKGFPYGHLHASNVMLDGDTCRLLDLENSLLGLPSFYRSYFSQFRKINTLESVDVHCFGHLLYEMTYGRPPDSVPVDSFPPAPSMAVVAVLESTLSCEACKNGMPTISRLLQMPLFSDVLLTTSEKPQFKIPTKLKEALRIAKECIEKRLIEEQKQIHQHRRLTRAQSHHGSEEERKKRKILARKKSKRSALENSEEHSAKYSNSNNSGSGASSPLTSPSSPTPPSTSAALGLSKRCKERDICITSTSSTSTTTSSSLASCEHRGTCPALVSGCEWHEPRGLAQLHPEFPKRNFEESQNL

SEQ ID NO: 81828 - protein, 234 aa, Homo sapiens
MGELASESQGSKELGDVLFQMAEVHRQIQNQLEEMLKSFHNELLTQLEQKVELDSRYLSAALKKYQTEQRSKGDALDKCQAELKKLRKKSQGSKNPQKYSDKELQYIDAISNKQGELENYVSDGYKTALTEERRRFCFLVEKQCAVAKNSAAYHSKGKELLAQKLPLWQQACADPSKIPERAVQLMQQVASNGATLPSALSASKSNLVISDPIPGAKPLPVPPELAPFVGRMSA

SEQ ID NO: 81829 - protein, 153 aa, Homo sapiens
IHLFKQNLFYLETLNTKQKLYHKKIFRTAMLFQFVNVLLQVLVHKSHDLLQEEIGIAIYNMASVDFDGFFAAFLPEFLTSCDGVDANQKSVLGRNFKMDRVRRERGRAKRRAEWARKPGTCAARRGHIEASGRGLCPPCSLAAAHEMPADLVL

SEQ ID NO: 81830 - protein, 95 aa, Homo sapiens
  MOD_RES (1)..(1): Any amino acid
XKHEEKQQEGGIVSKNFTKKIQEHNTTGSKLKQTRDEGTSKQAAGEKVLRDAPLLPTIPRCAGKEEMAFALAACLSPRTGCLCCRECKEWRLKGP

SEQ ID NO: 81831 - protein, 412 aa, Homo sapiens
MNGQLDLSGKLIIKAQLGEDIRRIPIHNEDITYDELVLMMQRVFRGKLLSNDEVTIKYKDEDGDLITIFDSSDLSFAIQCSRILKLTLFVNGQPRPLESSQVKYLRRELIELRNKVNRLLDSLEPPGEPGPSTNIPENDTVDGREEKSASDSSGKQSTQVMAASMSAFDPLKNQDEINKNVMSAFGLTDDQVSGPPSAPAEDRSGTPDSIASSSSAAHPPGVQPQQPPYTGAQTQAGQIEDVPTVPATGRLWCTAAAGSTSAASTVWYSVFRIPVNGEVSLQVAAASYSQQTGPQQPQQFQGYGQQPTSQAPAPAFSGQPQQLPAQPPQQYQASNYPAQTYTAQTSQPTNYTVAPASQPGMAPSQPGAYQPRPGFTSLPGSTMTPPPSGPNPYARNRPPFGQGYTQPGPGYR

SEQ ID NO: 81832 - protein, 40 aa, Homo sapiens
  MOD_RES (1)..(1): Any amino acid
XSEEEVEEPEERQQTPEVVPDDSGTFYDQAVVRTRTRTCI

SEQ ID NO: 81833 - protein, 314 aa, Homo sapiens
MRRQLRSRRAPSFPYSYRYRLDDPDEANQNYLADEEEEAEEEARVTVVPKSEEEEEEEEKEEEEEEEKEEEEGQGQPTGNAWWQKLQIMSEYLWDPERRMFLARTGQSWRVMIRPFAHSLNFNFNVSEPDTWQHYVISLNGFLQGYNDSLQEEMNVDCPPGQYFIQDGNEDEDKKACQFKRSFLKNCSGLEDPTFGYSTGQPCILLKMNRIVGFRPELGDPVKVSCKVQRGDENDIRSISYYPESASFDLRYYPYYGKLTHVNYTSPLVAMHFTDVVKNQAVPVQCQLKGKGVINDVINDRFVGRVIFTLNIET

SEQ ID NO: 81834 - protein, 265 aa, Homo sapiens
MSDSWVPNSASGQDPGGRRRAWAELLAGRVKREKYNPERAQKLKESAVRLLRSHQDLNALLLEVEGPLCKKLSLSKVIDCDSSEAYANHSSSFIGSALQDQASRLGVPVGILSAGMVASSVGQICTAPAETSHPVLLTVEQRSSLLLEAVWHLHVQGIVSLQELLESHPDMHAVGSWLFRNLCCLCEQMEASCQHADVARAMLSDFVQMFVLRGFQKNSDLRRTVEPEKMPQVTVDVLQRMLIFALDALAAGVQEESSTHKIVRC

SEQ ID NO: 81835 - protein, 109 aa, Homo sapiens
MPLEMEPKMSKLAFGCQRSSTSDDDSGCALEEYAWVPPGLRPEQIQLYFACLPEEKVPYVNSPGEKHRIKQLLYQLPPHDNEVRYCQSLSEEEKKELQVFSAQRKKEAL

SEQ ID NO: 81836 - protein, 442 aa, Homo sapiens
MPGGGPQGAPAAAGGGGVSHRAGSRDCLPPAACFRRRRLARRPGYMRSSTGPGIGFLSPAVGTLFRFPGGVSGEESHHSESRARQCGLDSRGLLVRSPVSKSAAAPTVTSVRGTSAHFGIQLRGGTRLPDRLSWPCGPGSAGWQQEFAAMDSSETLDASWEAACSDGARRVRAAGSLPSAELSSNSCSPGCGPEVPPTPPGSHSAFTSSFSFIRLSLGSAGERGEAEGCPPSREAESHCQSPQEMGAKAASLDGPHEDPRCLSRPFSLLATRVSADLAQAARNSSRPERDMHSLPDMDPGSSSSLDPSLAGCGGDGSSGSGDAHSWDTLLRKWEPVLRDCLLRNRRQMEVISLRLKLQKLQEDAVENDDYDKAETLQQRLEDLEQEKISLHFQLPSRQPALSSFLGHLAAQVQAALRRGATQQKKSKLSKQGCLCWKPKINS

SEQ ID NO: 81837 - protein, 330 aa, Homo sapiens
MSSTQFNKGPSYGLSAEVKNRLLSKYDPQKEAELRTWIEGLTGLSIGPDFQKGLKDGTILCTLMNKLQPGSVPKINRSMQNWHQLENLSNFIKAMVSYGMNPVDLFEANDLFESGNMTQVQVSLLALAGKGLDLGSLAALCWYSRPLSLTQAKTKGLQSGVDIGVKYSEKQERNFDDATMKAGQCVIGLQMGTNKCASQSGMTAYGTRRHLYDPKNHILPPMDHSTISLQMGTNKCASQVGMTAPGTRRHIYDTKLGTDKCDNSSMSLQMGYTQGANQSGQVFGLGRQIYDPKYCPQGTVADGAPSGTGDCPDPGEVPEYPPYYQEEAGY

SEQ ID NO: 81838 - protein, 85 aa, Homo sapiens
MGEAGAGAGASGGPEASPEAEVVKLLPFLAPGARADLQAAAVRHVLALTGCGPGRALLAGQTRAWSGWCARCARPATTPARPCTT

SEQ ID NO: 81839 - protein, 1026 aa, Homo sapiens
MPAIMTMLADHAARQLLDFSQKLDINLLDNVVNCLYHGEGAQQRMAQEVLTHLKEHPDAWTRVDTILEFSQNMNTKYYGLQILENVIKTRWKILPRNQCEGIKKYVVGLIIKTSSDPTCVEKEKVYIGKLNMILVQILKQEWPKHWPTFISDIVGASRTSESLCQNNMVILKLLSEEVFDFSSGQITQVKSKHLKDSMCNEFSQIFQLCQFVMENSQNAPLVHATLETLLRFLNWIPLGYIFETKLISTLIYKFLNVPMFRNVSLKCLTEIAGVSVSQYEEQFVTLFTLTMMQLKQMLPLNTNIRLAYSNGKDDEQNFIQNLSLFLCTFLKEHDQLIEKRLNLRETLMEALHYMLLVSEVEETEIFKICLEYWNHLAAELYRESPFSTSASPLLSGSQHFDVPPRRQLYLPMLFKVRLLMVSRMAKPEEVLVVENDQGEVVREFMKDTDSINLYKNMRETLVYLTHLDYVDTERIMTEKLHNQVNGTEWSWKNLNTLCWAIGSISGAMHEEDEKRFLVTVIKDLLGLCEQKRGKDNKAIIASNIMYIVGQYPRFLRAHWKFLKTVVNKLFEFMHETHDGVQDMACDTFIKIAQKCRRHFVQVQVGEVMPFIDEILNNINTIICDLQPQQNVDILKDPETVKQLGSILKTNVRACKAVGHPFVIQLGRIYLDMLNVYKCLSENISAAIQANGEMVTKQPLIRSMRTVKRETLKLISGWVSRSNDPQMVAENFVPPLLDAVLIDYQRNVPAAREPEVLSTMAIIVNKLGGHITAEIPQIFDAVFECTLNMINKDFEEYPEHRTNFFLLLQAVNSHCFPAFLAIPPTQFKLVLDSIIWAFKHTMRNVADTGLQILFTLLQNVAQEEAAAQSFYQTYFCDILQHIFSVVTDTSHTAGLTMHASILAYMFNLVEEGKISTSLNPGNPVNNQIFLQEYVANLLKSAFPHLQDAQVKLFVTGLFSLNQDIPAFKEHLRDFLVQIKEFAGEDTSDLFLEEREIALRQADEEKHKRQMSVPGIFNPHEIPEEMCD

SEQ ID NO: 81840 - protein, 109 aa, Homo sapiens
MGLLTFRDVAIEFSLEEWQCLDTAQKNLYRNVMLENYRNLAFLGIAVSKPDLIICLEKEKEPWNMKRDEMVDEPPGLAVSNPDLISCLEQIKEPWNVKRHETVVKYSGR

SEQ ID NO: 81841 - protein, 42 aa, Homo sapiens
MTVHNLYLFDRNGVCLHYSEWHRKKQAGIPKEEEGWLPGLPN

SEQ ID NO: 81842 - protein, 261 aa, Homo sapiens
MSWKKALRIPGGLRVATVTLMLAMLSTPVAEGRDSPEDFVYQFKGMCYFTNGTERVRGVTRYIYNREEYARFDSDVGVYRAVTPLGPPAAEYWNSQKEVLERTRAELDTVCRHNYQLELRTTLQRRVEPTVTISPSRTEALNHHNLLVCSVTDFYPAQIKVRWFRNDQEETTGVVSTPLIRNGDWTFQILVMLEMTPQRGDVYTCHVEHPSLQNPIIVEWRAQSESAQSKMLSGIGGFVLGLIFLGLGLIIHHRSQKGLLH

SEQ ID NO: 81843 - protein, 91 aa, Homo sapiens
MKHYHLKRNQSFCPTVNLDKLWTLVSEQTRVNAAKNKTGAAPIIDVVRSGYYKVLGKGKLPKQPVIVKAKFFSRRAEEKIKSVGGACVLVA

SEQ ID NO: 81844 - protein, 362 aa, Homo sapiens
MEEAQRSYILTQGPLPNTCGHFWEMVWEQKSRGVVMLNRVMEKGSLKCAQYWPQKEEKEMIFEDTNLKLTLISEDIKSYYTVRQLELENLTTQETREILHFHYTTWPDFGVPESPASFLNFLFKVRESGSLSPEHGPVVVHCSAGIGRSGTFCLADTCLLLMDKRKDPSSVDIKKVLLEMRKFRMGLIQTADQLRFSYLAVIEGAKFIMGDSSVQDQWKELSHEDLEPPPEHIPPPPRPPKRILEPHNGKCREFFPNHQWVKEETQEDKDCPIKEEKGSPLNAAPYGIESMSQDTEVRSRVVGGSLRGAQAASPAKGEPSLPEKDEDHALSYWKPFLVNMCVATVLTAGAYLCYRFLFNSNT

SEQ ID NO: 81845 - protein, 466 aa, Homo sapiens
MCNTNMSVPTDGAVTTSQIPASEQETLVLFYLGQYIMTKRLYDEKQQHIVYCSNDLLGDLFGVPSFSVKEHRKIYTMIYRNLVVVNQQESSDSGTSVSENRCHLEGGSDQKDLVQELQEEKPSSSHLVSRPSTSSRRRAISETEENSDELSGERQRKRHKSDSISLSFDESLALCVIREICCERSSSSESTGTPSNPDLDAGVSEHSGDWLDQDSVSDQFSVEFEVESLDSEDYSLSEEGQELSDEDDEVYQVTVYQAGESDTDSFEEDPEISLADYWKCTSCNEMNPPLPSHCNRCWALRENWLPEDKGKDKGEISEKAKLENSTQAEEGFDVPDCKKTIVNDSRESCVEENDDKITQASQSQESEDYSQPSTSSSIIYSSQEDVKEFEREETQDKEESVESSLPLNAIEPCVICQGRPKNGCIVHGKTGHLMACFTCAKKLKKRNKPCPVCRQPIQMIVLTYFP

SEQ ID NO: 81846 - protein, 439 aa, Homo sapiens
MQSARTQARPREPLEDGDPEDDRTLDDDELAEYDLDKYDEEGDPDAETLGESLLGLTVYGSNDQDPYVTLKDTEQYEREDFLIKPSDNLIVCGRAEQDQCNLEVHVYNQEEDSFYVHHDILLSAYPLSVEWLNFDPSPDDSTGNYIAVGNMTPVIEVWDLDIVDSLEPVFTLGSKLSKKKKKKGKKSSSAEGHTDAVLDLSWNKLIRNVLASASADNTVILWDMSLGKPAASLAVHTDKVQTLQFHPFEAQTLISGSYDKSVALYDCRSPDESHRMWRFSGQIERVTWNHFSPCHFLASTDDGFVYNLDARSDKPIFTLNAHNDEISGLDLSSQIKGCLVTASADKYVKIWDILGDRPSLVHSRDMKMGVLFCSSCCPDLPFIYAFGGQKEGLRVWDISTVSSVNEAFGRRERLVLGSARNSSISGPFGSRSSDTPMES

SEQ ID NO: 81847 - protein, 264 aa, Homo sapiens
MDLLGPSLEDLFNFCSRRFTMKTVLMLADQMISRIEYVHTKNFIHRDIKPDNFLMGIGRHCNKCLESPVGKRKRSMTVSTSQDPSFSGLNQLFLIDFGLAKKYRDNRTRQHIPYREDKNLTGTARYASINAHLGIEQSRRDDMESLGYVLMYFNRTSLPWQGLKAATKKQKYEKISEKKMSTPVEVLCKGFPAEFAMYLNYCRGLRFEEAPDYMYLRQLFRILFRTLNHQYDYTFDWTMLKQKAAQQAASSSGQGQQAQTPTGF

SEQ ID NO: 81848 - protein, 1564 aa, Homo sapiens
MDSKKRSSTEAEGSKERGLVHIWQAGSFPITPERLPGWGGKTVLQAALGVKHGVLLTEDGEVYSFGTLPWRSGPVEICPSSPILENALVGQYVITVATGSFHSGAVTDNGVAYMWGENSAGQCAVANQQYVPEPNPVSIADSEASPLLAVRILQLACGEEHTLALSISREIWAWGTGCQLGLITTAFPVTKPQKVEHLAGRVVLQVACGAFHSLALVQCLPSQDLKPVPERCNQCSQLLITMTDKEDHVIISDSHCCPLGVTLTESQAENHASTALSPSTETLDRQEEVFENTLVANDQSVATELNAVSAQITSSDAMSSQQNVMGTTEISSARNIPSYPDTQAVNEYLRKLSDHSVREDSEHGEKPVPSQPLLEEAIPNLHSPPTTSTSALNSLVVSCASAVGVRVAATYEAGALSLKKVMNFYSTTPCETGAQAGSSAIGPEGLKDSREEQVKQESMQGKKSSSLVDIREEETEGGSRRLSLPGLLSQVSPRLLRKAARVKTRTVVLTPTYSGEADALLPSLRTEVWTWGKGKEGQLGHGDVLPRLQPLCVKCLDGKEVIHLEAGGYHSLALTAKSQVYSWGSNTFGQLGHSDFPTTVPRLAKISSENGVWSIAAGRDYSLFLVDTEDFQPGLYYSGRQDPTEGDNLPENHSGSKTPVLLSCSKLGYISRVTAGKDSYLALVDKNIMGYIASLHELATTERRFYSKLSDIKSQILRPLLSLENLGTTTTVQLLQEVASRFSKLCYLIGQHGASLSSFLHGVKEARSLVILKHSSLFLDSYTEYCTSITNFLVMGGFQLLAKPAIDFLNKNQELLQDLSEVNDENTQLMEILNTLFFLPIRRLHNYAKVLLKLATCFEVASPEYQKLQDSSSCYECLALHLGRKRKEAEYTLGFWKTFPGKMTDSLRKPERRLLCESSNRALSLQHAGRFSVNWFILFNDALVHAQFSTHHVFPLATLWAEPLSEEAGGVNGLKITTPEEQFTLISSTPQEKTKWLRAISQAVDQALRGMSDLPPYGSGSSVQRQEPPISRSAKYTFYKDPRLKDATYDGRWLSGKPHGRGVLKWPDGKMYSGMFRNGLEDGYGEYRIPNKAMNKEDHYVGHWKEGKMCGQGVYSYASGEVFEGCFQDNMRHGHGLLRSGKLTSSSPSMFIGQWVMDKKAGYGVFDDITRGEKYMGMWQDDVCQGNGVVVTQFGLYYEGNFHLNKMMGNGVLLSEDDTIYEGEFSDDWTLSGKGTLTMPNGDYIEGYFSGEWGSGIKITGTYFKPSLYESDKDRPKVLKLGNLAVPADEKWKAVFDECWRQLGCEGPGQGEVWKAWDNIAVALTTSRRQHRDSPEILSRSQTQTLESLEFIPQHVGAFSVEKYDDIRKYLIKACDTPLHPLGRLVETLVAVYRMTYVGVGANRRLLQEAVKEIKSYLKRIFQLVRFLFPELPEEGSTIPLSAPLPTERKSFCTGKSDSRSESPEPGYVVTSSGLLLPVLLPRLYPPLFMLYALDNDREEDIYWECVLRLNKQPDIALLGFLGVQRKFWPATLSILGESKKVLPTTKDACFASAVECLQQIRQT

SEQ ID NO: 81849 - protein, 13 aa, Homo sapiens
VAVTAMETAARQE

SEQ ID NO: 81850 - protein, 720 aa, Homo sapiens
MAFAECIAPACVMSWLRFWGPWPLLTWQLLSLLVKEAQPLVWVKDPLQLTSNPLGPPEPWSSRSSHLPWESPHAPAPPAAPGDFDYLGPSASSQMSALPQEPTENLAPFLKELDSAGELPLGPEPFLAAHQDLNDKRTPEERLPEVVPLLNRDQNQALVQLPRLKWVQTTDLDRAAGHQADEILVPLDSKVSRPTKFVVSPKNLKKDLAERWSLPEIVGIPHQLSKPQRQKQTLPDDYLSMDTLYPGSLPPELRVNADEPPGPPEQVGLSQFHLEPKSQNPETLEDIQSSSLQEEAPAQLLQLPQEVEPSTQQEAPALPPESSMESLAQTPLNHEVTVQPPGEDQAHYNLPKFTVKPADVEVTMTSEPKNETESTQAQQEAPIQPPEEAEPSSTALRTTDPPPEHPEVTLPPSDKGQAQHSHLTEATVQPLDLELSITTEPTTEVKPSPTTEETSAQPPDPGLAITPEPTTEIGHSTALEKTRAPHPDQVQTLHRSLTEVTGPPTKLESSQDSLVQSETAPEEQKASTSTNICELCTCGDETLSCVGLSPKQRLRQVPVPEPDTYNGIFTTLNFQGNYISYLDGNVWKAYSWTEKLILSENYLTELPKDSFEGLLYLQYLDLSCNKIRYIERQTFESLPFLQYINLGCNLITKLSLGTFQAWHGMQFLHNLILNRNPLTTVEDPYLFELPALKYLDMGTTHITLTTLKNILTMTVELEKL

SEQ ID NO: 81851 - protein, 65 aa, Homo sapiens
MAAIRKKLVIVGDGACGKTCLLIVFSKDQFPEVYVPTVFENYVADIEVDGKQVIGFVGHSWAGRL

SEQ ID NO: 81852 - protein, 120 aa, Homo sapiens
MVNTVSFKRKPHTNGDAPSHRNGKSKWSFLFSLTDLKSIKQNKEGMGWSYLVFCLKDDVVLPALHFHQGDSKLLIESLEKYVVLCESPQDKRTLLVNCQNKSLSQSFENLLDEPAYGLIQ

SEQ ID NO: 81853 - protein, 81 aa, Homo sapiens
MIPPGECTYAGRKRRRPLQKQRPAVGAEKSNPSKRHRDRLNAELDHLASLLPFPPDIISKLDKLSVLRLSVSYLRVKSFFQ

SEQ ID NO: 81854 - protein, 459 aa, Homo sapiens
MIPSKILVYRHPSSRTGTELYRPGRRRKKSLGDLFHNGYRVKSGPAAPEKEEPPNFRQSLVSCCGVCASWGLRFLRALRLIQFSEILQFLNILKTSNSIKLVNLLSIFISTWLTAAGFIHLVENSGDPWENFQNNQALTYWECVYLLMVTMSTVGYGDVYAKTTLGRLFMVFFILGGLAMFASYVPEIIELIGNRKKYGGSYSAVSGRKHIVVCGHITLESVSNFLKDFLHKDRDDVNVEIVFLHNISPNLELEALFKRHFTQVEFYQGSVLNPHDLARVKIESADACLILANKYCADPDAEDASNIMRVISIKNYHPKIRIITQMLQYHNKIEEDTWQKYYLEGVSNEMYTEYLSSAFVGLSFPTVCELCFVKLKLLMIAIEYKSANRESRILINPGNHLKIQEGTLGFFIASDAKEVKRAFFYCKACHDDITDPKRIKKCGCKRLIYFEDEQPSTLS

SEQ ID NO: 81855 - protein, 882 aa, Homo sapiens
MAGNVKKSSGAGGGSGSGGSGSGGLIGLMKDAFQPHHHHHHHLSPHPPGTVDKKMVEKCWKLMDKVVRLCQNPKLALKNSPPYILDLLPDTYQHLRTILSRYEGKMETLGENEYFRVFMENLMKKTKQTISLFKEGKERMYEENSQPRRNLTKLSLIFSHMLAELKGIFPSGLFQGDTFRITKADAAEFWRKAFGEKTIVPWKSFRQALHEVHPISSGLEAMALKSTIDLTCNDYISVFEFDIFTRLFQPWSSLLRNWNSLAVTHPGYMAFLTYDEVKARLQKFIHKPGSYIFRLSCTRLGQWAIGYVTADGNILQTIPHNKPLFQALIDGFREGFYLFPDGRNQNPDLTGLCEPTPQDHIKVTQEQYELYCEMGSTFQLCKICAENDKDVKIEPCGHLMCTSCLTSWQESEGQGCPFCRCEIKGTEPIVVDPFDPRGSGSLLRQGAEGAPSPNYDDDDDERADDTLFMMKELAGAKVERPPSPFSMAPQASLPPVPPRLDLLPQRVCVPSSASALGTASKAASGSLHKDKPLPVPPTLRDLPPPPPPDRPYSVGAESRPQRRPLPCTPGDCPSRDKLPPVPSSRLGDSWLPRPIPKVPVSAPSSSDPWTGRELTNRHSLPFSLPSQMEPRPDVPRLGSTFSLDTSMSMNSSPLVGPECDHPKIKPSSSANAIYSLAARPLPVPKLPPGEQCEGEEDTEYMTPSSRPLRPLDTSQSSRACDCDQQIDSCTYEAMYNIQSQAPSITESSTFGEGNLAAAHANTGPEESENEDDGYDVPKPPVPAVLARRTLSDISNASSSFGWLSLDGDPTTNVTEGSQVPERPPKPFPRRINSERKAGSCQQGSGPAASAATASPQLSKQSPKANLRSPDLAAEEISRVLIA

SEQ ID NO: 81856 - protein, 129 aa, Homo sapiens
MKVKEEKAGVGKLDHTNHRRRFPDQKECPPIHIGLPVPTYPQRKTDQKGHLSGLQKVHWGLRPDQPQQELTGPGSGASSQDSSMDLISRTRSPAAEQLQDILGEEDEAPNPTLFTEMDTLQHDGDQMEW

SEQ ID NO: 81857 - protein, 194 aa, Homo sapiens
  MOD_RES (1)..(1): Any amino acid
XPRPLPLLGNLLQMDRRGLLKSFLRFREKYGDVFTVHLGPRPVVMLCGVEAIREALVDKAEAFSGRGKIAMVDPFFRGYGVIFANGNRWKVLRRFSVTTMRDFGMGKRSVEERIQEEAQCLIEELRKSKGALMDPTFLFQSITANIICSIVFGKRFHYQDQEFLKMLNLFYQTFSLISSVFGQTESRCFIPAGV

SEQ ID NO: 81858 - protein, 67 aa, Homo sapiens
MAVQESAAQLSMTLKVQEYPTLKNIPAWKPRCARPLHWPQKPHLSAEEPGCCLEWVSSTAWQHSHAS

SEQ ID NO: 81859 - protein, 61 aa, Homo sapiens
  MOD_RES (1)..(1): Any amino acid
XEKLDAACGIDKTENGTLFEDQNVDKEGKALPATGQKANVSPEQPPLFTNLLSDLLYPRLL

SEQ ID NO: 81860 - protein, 76 aa, Homo sapiens
MIVLGWMFFVGLVCYMGTFPELMPPTLKWQERWPVQESKTQLRRRALGTMWKGYKYPPGGTPVEVSKDDPGEVMQL

SEQ ID NO: 81861 - protein, 117 aa, Homo sapiens
MVKLDIHTLAHHLKQERLYVNSEKQLIQRLNADVLKTAEKLYRTAWIAKQQRINLDRLIITSAEASPAECCQHAKILEDTQFVDGYKQLGFQETAYGEFLSRLRENPRLIASSLVAG

SEQ ID NO: 81862 - protein, 200 aa, Homo sapiens
MYKRGLVQVWSLEQPEWHCKIDEGSAGLVASCWSPDGRHILNTTEFHLRITVWSLCTKSVSYIKYPKACLQGITFTRDGRYMALAERRDCKDYVSIFVCSDWQLLRHFDTDTQDLTGIEWAPNGCVLAVWDTCLEYKILLYSLDGRLLSTYSAYEWSLGIKSVAWSPSSQFLAVGSYDGKVRILNHVTWKMITEFGHPAA

SEQ ID NO: 81863 - protein, 97 aa, Homo sapiens
HLSPGKSVLIMDGASAFGTIAIQLAHHRGAKVISTACSLEDKQCLERFRPPIARVIDVSNGKVHVAESCLEETGGLGVDIVLDAGGYIFQHSSYIFT

SEQ ID NO: 81864 - protein, 1158 aa, Homo sapiens
KIDETREKVQVMSLELEDAKKKVAEFQKQCEEYLVIIVQQKREADEQQKALESLNKKDIGEIKSYGRPPAQVEIVMQAVMILRGNEPTWAEAKRQLGEQNFIKSLINFDKDNISDKVLKKIGAYCAQPDFQPDIIGRVSLAAKSLCMWVRAMELYGRLYRVVEPKRIRMNAALAQLREKQAALAEAQEKLREVAEKLEMLKKQYDEKLAQKEELRKKSEEMELKLERAGMLVSGLAGEKARWEETVQGLEEDLGYLVGDCLLAAAFLSYMGPFLTNYRDEIVNQIWIGKIWELQVPCSPSFAIDNFLCNPTKVRDWNIQGLPSDAFSTENGIIVTRGNRWALMIDPQAQALKWIKNMEGGQGLKIIDLQMSDYLRILEHAIHFGYPVLLQNVQEYLDPTLNPMLNKSVARIGGRLLMRIGDKEVEYNTNFRFYITTKLSNPHYSPETSAKTTIVNFAVKEQGLEAQLLGIVVRKERPELEEQKDSLVINIAAGKRKLKELEDEILRLLNEATGSLLDDVQLVNTLHTSKITATEVTEQLETSETTEINTDLAREAYRPCAQRASILFFVLNDMGCIDPMYQFSLDAYISLFILSIDKSHRSNKLEDRIDYLNDYHTYAVYRYTCRTLFERHKLLFSFHMCAKILETSGKLNMDEYNFFLRGGVVLDREGQMDNPCSSWLADAYWDNITELDKLTNFHGLMNSFEQYPRDWHLWYTNAAPEKAMLPGEWENACNEMQRMLIVRSLRQDRVAFCVTSFIITNLGSRFIEPPVLNMKSVLEDSTPRSPLVFILSPGVDPTSALLQLAEHMGMAQRFHALSLGQGQAPIAARLLREGVTQGHWVFLANCHLSLSWMPNLDKLVEQLQVEDPHPSFRLWLSSIPHPDFPISILQVSIKMTTEPPKGLKANMTRLYQLMSEPQFSRCSKPAKYKKLLFSLCFFHSVLLERKKFLQLGWNIIYGFNDSDFEVSENLLSLYLDEYEETPWDALKYLIAGINYGGHVTDDWDRRLLTTYINDYFCDQSLSTPFHRLSALETYFIPKDGSLASYKEYISLLPGMDPPEAFGQHPNADVASQITEAQTLFDTLLSLQPQITPTRAGGQTREEKVLELAADVKQKIPEMIDYEGTQKLLALDPSPLNVVLLQEIQRYNTLMQTILFSLTD

SEQ ID NO: 81865 - protein, 394 aa, Homo sapiens
MMGVFVVAAKRTPFGAYGGLLKDFTATDLSEFAAKAALSAGKVSPETVDSVIMGNVLQSSSDAIYLARHVGLRVGIPKETPALTINRLCGSGFQSIVNGCQEICVKEAEVVLCGGTESMSQAPYCVRNVRFGTKLGSDIKLEDSLWVSLTDQHVQLPMAMTAENLAVKHKISREECDKYALQSQQRWKAANDAGYFNDEMAPIEVKTKKGKQTMQVDEHARPQTTLEQLQKLPPVFKKDGTVTAGNASGVADGAGAVIIASEDAVKKHNFTPLARIVGYFVSGCDPSIMGIGPVPAISGALKKAGLSLKDMDLVEVNEAFAPQYLAVERSLDLDISKTNVNGGAIALGHPLGGSGSRITAHLVHELRRRGGKYAVGSACIGGGQGIAVIIQSTA

SEQ ID NO: 81866 - protein, 49 aa, Homo sapiens
MSDQKKEEEEEAAAAAAMATEGGKTSEPENNNKKPKTSGSQVSSKDKME

SEQ ID NO: 81867 - protein, 64 aa, Homo sapiens
  MOD_RES (1)..(1): Any amino acid
XGLKQDEPGQAGSQKSSTKQPTVGGTSSTPRAQKAIVNHPSAALMALRRGSRNLVFRDFTVSMP

SEQ ID NO: 81868 - protein, 125 aa, Homo sapiens
MAETKDAAQMLVTFKDVAVTFTREEWRQLDLAQRTLYREVMLETCGLLVSLGHRVPKPELVHLLEHGQELWIVKRGLSHATCAGQEPRKEEGPMSNSGKDRKLLEKGEEQSPAEVDGVVLRDLTY

SEQ ID NO: 81869 - protein, 148 aa, Homo sapiens
PGQVDAAMAGRIYISGMAPRPSLAKKQRFRHRNRKGYRSQRGHSRGRNQNSRRPSRATWLSLFSSEESNLGANNYDDYRMDWLVPATCEPIQSVFFFSGDKYYRVNLRTRRWQRVGFPPEKADHLQQRAATGAGEGVCSMALPQHQHP

SEQ ID NO: 81870 - protein, 166 aa, Homo sapiens
MMVGSLLATYGWYIVFSCILLYVVFQKLSARLRALRQRQLDRAAAAVEPDVVVKRQEALAAARLKMQEELNAQVEKHKEKLKQLEEEKRRQKIEMWDSMQEGKSYKGNAKKPQEEDSPGPSTSSVLKRKSDRKPLRGGGYNPLSGEGGGACSWRPGRRGPSSGGCG

SEQ ID NO: 81871 - protein, 303 aa, Homo sapiens
MEKSGPSSTISEQQLQRQEGWINTKTDLAEQSLISSEKWLQLHGLKSNKLTLKQILSQIGFPHCEDYVASLGRPVASRYADGLFPQLYRAEDGRVYNLTAKSELIYQFVEHLTQAVESYKQRMDWLTSKSRQIFGVILEQCVTIVLDFGGILEGELDLCREALTMVLQEQVAHITEFNIIRVSQEPVKWQENATPVTEQSIATAISWVEKLTVELTVSEAGRLDALLEAGRDKTELESERTCFSFGKRWRKPAARWPRSRGWWPSLPSPTWPLWTASQKQPLLRLHRIQKTPGTLRHGCRNMA

SEQ ID NO: 81872 - protein, 221 aa, Homo sapiens
  MOD_RES (1)..(1): Any amino acid
XQRGFPQLAGGVILGVALWLRHDPQTTNLLYLELGDKPAPNTFYVGIYILIAVGAVMMFVGFLGCYGAIQESQCLLGTFFTCLVILFACEVAAGIWGFVNKDQIAKDVKQFYDQALQQAVVDDDANNAKAVVKTFHETLDCCGSSTLTALTTSVLKNNLCPSGSNIISNLFKEDCHQKIDDLFSGKLYLIGIAAIVVAVIMVSGRGRRACSLGCPFRGALC

SEQ ID NO: 81873 - protein, 40 aa, Homo sapiens
MKLRGVSLAAGLFLLALSLWGQPAEAAEETLFATPVTQAF

SEQ ID NO: 81874 - protein, 159 aa, Homo sapiens
MDEDTHYDKVEDVVGSHIEDAVTFWAQSINRNKDIMKIGCSLSEVCPQASSVLGNLDPNKIYGGLFSEDQCWYRCKVLKIISVEKCLVRYIDYGNTEILNRSDIVEIPLELQFSSVAKKYKLWGLHIPSDQEVTQFDQGTTFLGSLIFEKEIKMRIKAT

SEQ ID NO: 81875 - protein, 282 aa, Homo sapiens
MEAAVKEEISLEDEAVDKNIFRDCNKIAFYRRQKQWLSKKSTYQALLDSVTTDEDSTRFQIINEASKVRCQDQSPTTLDAFKGKETTVQEETQDLSTRQHLAQKEAEEPDKQGQITWDISNVAPKTENFEDLLEQTPCSACLQGFTRDNTSSSFSEDAGISLSTSVKLPLASSSKPNENEALPNQPPSQQIRHNYRLLASTVSAEMARNRQLIWELARQSEAHLDRPVVLGEQASAQREVASILCRKSVLAINQLAATVEGTISVLQQFNELLDHPLDPGRS

SEQ ID NO: 81876 - protein, 214 aa, Homo sapiens
MFPGTEEGPEDDSTKHGGRVRTFPHERGNWATHVYVPYEAKEEFLDLLDVLLPHAQTYVPRLVRMKVFHLSLSQSVVLRHHWILPFVQALKARMTSFHRFFFTANQVKIYTNQEKTRTFIGLEVTSGHAQFLDLVSEVDRVMEEFNLTTFYQDPSFHLSLAWCVGDARLQLEGQCLQELQAIVDGFEDAEVLLRVHTEQVRCKSGNKFFSMPLK

SEQ ID NO: 81877 - protein, 99 aa, Homo sapiens
MAATMFRATLRGWRTGVQRGCGLRLLSQTQGPPDYPRFVESVDEYQFVERLLPATRIPDPPKHEHYPTPSGWQPPRDPTLPPNWLRQLSVPDSPTWSLP

SEQ ID NO: 81878 - protein, 42 aa, Homo sapiens
MDTRTATAELGWTANPASGWEEVSGYDENLNTIRTYQVCNVF

SEQ ID NO: 81879 - protein, 135 aa, Homo sapiens
MADTPRDAGLKQAPASRNEKAPVDFGYVGIDSILEQMRRKAMKQGFEFNIMVVGQSGLGKSTLINTLFKSKISRKSVQPTSEERIPKTIEIKSITHDIEEKGVRMKLTVIDTPGFGDHINNENCWQPIMKFINDQ

SEQ ID NO: 81880 - protein, 162 aa, Homo sapiens
MCAQLPNPVLDSISIIDTPGILSGEKQRISRGYDFAAVLEWFAERVDRIILLFDAHKLDISDEFSEVIKALKNHEDKIRVVLNKADQIETQQLMRVYGALMWSLGKIINTPEVVRVYIGSFWSHPLLIPDNRKLFEAEEQDLFKDIQSLPRNAALRKLNDLI

SEQ ID NO: 81881 - protein, 110 aa, Homo sapiens
MESIFHEKQEGSLCAQHCLNNLLQGEYFSPVELSSIAHQLDEEERMRMAEGGVTSEDYRTFLQQPSGNMDDSGFFSIQWFNLNSLLTGPELISDTYLALFLAQLQQEVTQ

SEQ ID NO: 81882 - protein, 148 aa, Homo sapiens
MSLGKRKPSNFYLANFLGKECILSGIMSVNGKKVLHMDRNPYYGGESASITPLEDLYKRFKIPGSPPESMGRGRDWNVDLIPKFLMANGQLVKMLLYTEVTRYLDFKVTEGSFVYKGGKIYKVPSTEAEALASSLMGLFEKRRFRKFL

SEQ ID NO: 81883 - protein, 58 aa, Homo sapiens
MSDQEAKPSTEDLGDKKEGEYIKLKVIGQDSSEIHFKVKMTTHLKKLKESYCQRQVSL

SEQ ID NO: 81884 - protein, 292 aa, Homo sapiens
RQKSTYTSYPKAEPMPSASSAPPASSLYSSPVNSSAPLAEDIDPELARYLNRNYWEKKQEEARKSPTPSAPVPLTEPAAQPGEGHAAPTNVVENPLPETDSQPIPPSGGPFSESINGMHPQLLELLNQLDERRLYYEGLQDKLAQIRDARGALSALREEHREKLRRAAEEAERQRQIQLAQKLEIMRQKKQEYLEVQRQLAIQRLQEQEKERQMRLEQQKQTVQMRAQMPAFPLPYAQLQAMPAAGGVLYQPSGPASFPSTFSPAGSVEGSPMHGVYMSQPAPAAGPYPSMP

SEQ ID NO: 81885 - protein, 642 aa, Homo sapiens
MNPTETKAIPVSQQMEGPHLPNKKKHKKQAVKTEPEKKSQSTKLSVVHEKKSQEGKPKEHTEPKSLPKQASDTGSNDAHNKKAVSRSAEQQPSEKSTEPKTKPQDMISAGGESVAGITAISGKPGDKKKEKKSLTPAVPVESKPDKPSGKSGMDAALDDLIDTLGGPEETEEENTTYTGPEVSDPMSSTYIEELGKREVTIPPKYRELLAKKEGITGPPADSSKPIGPDDAIDALSSDFTCGSPTAAGKKTEKEESTEVLKAQSAGTVRSAAPPQEKKRKVEKDTMSDQALEALSASLGTRQAEPELDLRSIKEVDEAKAKEEKLEKCGEDDETIPSEYRLKPATDKDGKPLLPEPEEKPKPRSESELIDELSEDFDRSECKEKPSKPTEKTEESKAAAPAPVSEAVCRTSMCSIQSAPPEPATLKGTVPDDAVEALADSLGKKEADPEDGKPVMDKVKEKAKEEDREKLGEKEETIPPDYRLEEVKDKDGKPLLPKESKEQLPPMSEDFLLDALSEDFSGPQNASSLKFEDAKLAAAISEVVSQTPASTTQAGAPPRDTSQSDKDLDDALDKLSDSLGQRQPDPDENKPMEDKVKEKAKAEHRDKLGERDDTIPPEYRHLLDDNGQDKPVKPPTKKSEDSK

SEQ ID NO: 81886 - protein, 320 aa, Homo sapiens
MANITWMANHTGWSDFILLGLFRQSKHPALLCVVIFVVFLMALSGNAVLILLIHCDAHLHTPMYFFISQLSLMDMAYISVTVPKMLLDQVMGVNKISAPECGMQMFFYVTLAGSEFFLLATMAYDRYVAICHPLRYPVLMNHRVCLFLSSGCWFLGSVDGFTFTPITMTFPFRGSREIHHFFCEVPAVLNLSCSDTSLYEIFMYLCCVLMLLIPVVIISSSYLLILLTIHGMNSAEGRKKAFATCSSHLTVVILFYGAAIYTYMLPSSYHTPEKDMMVSVFYTILTPVVNPLIYSLRNKDVMGALKKMLTVEPAFQKAME

SEQ ID NO: 81887 - protein, 155 aa, Homo sapiens
VAGPPFKANTLIAFTKLLGAPTHILRDCVHIMKLELFPDQATQLKWNVQFCLTIPPSAPPIAPPGTPAVVLKSKMLFFLQLTQKTSVPPQEPVSIIVPIIYDMASGTTQQADIPRQQNSSVAAPMMVSNILKRFAEMNPPRQGSIKGTGCPSDFL

SEQ ID NO: 81888 - protein, 468 aa, Homo sapiens
MQQLQQQHLLSLQRQGLLTIQPGQPALPLQPLAQGMIPTELQQLWKEVTSAHTAEETTGNNHSSLDLTTTCVSSSAPSKTSLIMNPHASTNGQLSVHTPKRESLSHEEHPHSHPLYGHGVCKWPGCEAVCEDFQSFLKHLNSEHALDDRSTAQCRVQMQVVQQLELQLAKDKERLQAMMTHLHVKSTEPKAAPQPLNLVSSVTLSKSASEASPQSLPHTPTTPTAPLTPVTQGPSVITTTSMHTVGPIRRRYSDKYNVPISSADIAQNQEFYKNAEVRPPFTYASLIRQAILESPEKQLTLNEIYNWFTRMFAYFRRNAATWKNAVRHNLSLHKCFVRVENVKGAVWTVDEVEFQKRRPQKISGNPSLIKNMQSSHAYCTPLNAALQASMAENSIPLYTTASMGNPTLGNLASAIREELNGAMEHTNSNESDSSPGRSPMQAVHPVHVKEEPLDPEEAEGPLSLVTTA

SEQ ID NO: 81889 - protein, 311 aa, Homo sapiens
MDCLCIVTTKKYRYQDEDTPPQEHISPQITNEVIGPELVHVSEKNLSEIENVHGFVSHSHISPIKANPPPVLVNTDSLETPTYVNGTDADYEYEEITLERGNSGLGFSIAGGTDNPHIGDDSSIFITKIITGGAAAQDGRLRVNDCILRVNEVDVRDVTHSKAVEALKEAGSIVRLYVKRRKPVSEKIMEIKLIKGPKGLGFSIAGGVGNQHIPGDNSIYVTKIIEGGAAHKDGKLQIGDKLLAVNNVCLEEVTHEEAVTALKNTSDFVYLKVAKPTSMYMNDGYAPPDITNWNLEKLFFIVAQRALVSTL

SEQ ID NO: 81890 - protein, 166 aa, Homo sapiens
MYRARAARAGPEPGSPGRFGILSTGQLRDLLQDEPKLDRIVRLSRKEQMEQLLLGEQSLEAFLPAFQRGRALAHLRRTQAEKLQELLRRRERSAQPAPTSAADPPKSFPAAAVLPTGAARGPPAVPRSLPPLDSRPVPPLKGSPGCPLGPAPLLSPRPSQPEPPHR

SEQ ID NO: 81891 - protein, 181 aa, Homo sapiens
MYDKILLFRHDMNSENILQLITSADEIHEGDLVEVVLSALATVEDFQIRPHTLYVHSYKAPTFCDYCGEMLWGLVRQGLKCEGCGLNYHKRCAFKIPNNCSGVRKRRLSNVSLPGPGLSVPRPLQPEYVALPSEESHVHQEPSKRIPSWSGRPIWMEKMVMCRVKVPHTFAVHSYTRPTIC

SEQ ID NO: 81892 - protein, 170 aa, Homo sapiens
MWGRLWPLLLSILTATAVPGPSLRRPSRELDATPRMTIPYEELSGTRHFKGQAQNYSTLLLEEASARLLVGARGALFSLSANDIGDGAHKEIHWEASPEMQSKCHQKGKNNQTECFNHVRFLQRLNSTHLYACGTHAFQPLCAAIDAEAFTLPTSFEEGKEKCPYDPARG

SEQ ID NO: 81893 - protein, 98 aa, Homo sapiens
MNHTVQTFFSPVNSGQPPNYEMLKEEHEVAVLGAPHNPAPPTSTVIHIRSETSVPDHVVWSLFNTLFMNPCCLGFIAFAYSVKTGTQALPESEKGTHR

SEQ ID NO: 81894 - protein, 520 aa, Homo sapiens
MVSLVSDLDPLKNWKVLRETATELAGSLPSNGTANKMNGALDHSDQPDPDAIKMFVGQIPRSWSEKELKELFEPYGAVYQINVLRDRSQNPPQSKGCCFVTFYTRKAALEAQNALHNIKTLPGMHHPIQMKPADSEKSNAVEDRKLFIGMVSKKCNENDIRVMFSPFGQIEECRILRGPDGLSRGCAFVTFSTRAMAQNAIKAMHQSQTMEGCSSPIVVKFADTQKDKEQRRLQQQLAQQMQQLNTATWGNLTGLGGLTPQYLALLQQATSSSNLGAFSGIQQMAGMNALQLQNLATLAAAAAAAQTSATSTNANPLSTTSSALGALTSPVAASTPNSTAGAAMNSLTSLGTLQGLAGATVGLNNINALAGMAALNGGLGATGLTNGTAGTMDALTQAYSGIQQYAAAALPTLYSQSLLQQQSAAGSQKEGPEGANLFIYHLPQEFGDQDILQMFMPFGNVISAKVFIDKQTNLSKCFGFVSYDNPVSAQAAIQAMNGFQIGMKRLKVQLKRSKNDSKPY

SEQ ID NO: 81895 - protein, 1009 aa, Homo sapiens
MSQMNNVGFSTAILLTPVDPTALLDYREVHQMIRELAIGIYCLNQIPSISLEANYDQSSSCQLPPAYYDTRIGQILINIDYMLKALWHGIYMPKEKRARFSELWRAIMDIDPDGKPQTNKDIFSEFSSAGLTDITKDPDFNEIYDEDVNEDPTYDPNSPEETAVFMKYAENIMLKLTFSTTQIQQYENVFIFETGYWLTNAIKYNQDYLDICTYQRLQQRLYLQKKIIQKHFEKKKDIRRGIGYLKLICFLIPFLLSLKKKMKVPYLSSLLQPFSDDKVKTERELPPFIYGRDFKCQNFHYKENQYFHVHGGIEFDISTPSIENALEDFQKNLEKIRDCAANTFIEDSGYKEYYSIPVMEFHGKSYYVIYFELETFYQQLYKTQWWGAINEIVNNLRLKRLPLTDAQLHEQFKKKLGFKRAMKCKSIPFGMKSAVERGLSAVFHTFSRKTSSSTINVSDEAGYTIFHHAALHNRVSIICQLCNANFKVNQRRFVTFSQGPTPLHLAAQACSLETTVCLLCSKADYTLSEKRGWMPIHFAAFYDNVCIIIALCRKDPSLLEAEATAENQCTPLLLAATSGALDTIQYLFSIGANWRKTDIKGNNIIHLSVLTFHTEVLKYIIKLNIPELPVWKTLVEMLQCESYKRRMMAVMSLEVICLANDQYWRCILDAGTIPALINLLKSSKIKLQCKTVGLLSNISTHKSAVHALVEAGGIPSLINLLVCDEPEVHSRCAVILYDIAQCENKDVIAKYNGIPSLINLLNLNIENVLVNVMNCIRVLCIGNENNQRAVREHKGLPYLIRFLSSDSDVLKAVSSAAIAEVGRDNKEIQDAIAMEGAIPPLVALFKGKQISVQMKGAMAVESLASHNALIQKAFLEKSLTKYLLKLLKAFQIDVKEQGAVALWALAGQTLKQQKYMAEQIGYSFIINMLLSPSAKMQYVGGEAVIALSKDSRMHQNQICEGNGIAPLVRLLRISTIAEGTLLSVIRAVGSICIGYLLKSRLCINTFCLQ

SEQ ID NO: 81896 - protein, 142 aa, Homo sapiens
MSDESSSPSMGWKHWPVTSATQDLWGMDPRCRDALGCSPPRAVLVHAADGAERTVLRRGAETCQILPRSCKEATGTTAQATRAWLYRYCPAVHTSKGCPAPPATLPLKAETFVWVNNASAHSQSVAKAKYEFLFGRSEGKAP

SEQ ID NO: 81897 - protein, 80 aa, Homo sapiens
MPNDNEERKWKPPTFQDEVALHQDVKVQRKRPKGPRGQHTPRSQVYSRQYQGLGSGLEKSWCFEYVQVQFRLLIPQPLLE

SEQ ID NO: 81898 - protein, 276 aa, Homo sapiens
MAPLRFSANLSWLFPELSGLPARVRAAGSSGFEAVEVAWPYAETPEALARAAREAGLRLVLINTPPGDQEKGEMGLGAVPGRQAAFREGLEQAVRYAKALGCPRIHLMAGRVPQGADRIAVKAEMEAVFLENLRHAAGVLAQEDLVGLLEPINTRITDPQYFLDTPQQAAAILQKVGRPNLQLQMDIFHWQIMDGNLTGNIREFLPIVGHVQVAQVPGRGEPSSPGELNFPYLFQLLEDEGYKGFVGCEYQPRGEAWPWGRELWRDPDRGCFLLVG

SEQ ID NO: 81899 - protein, 116 aa, Homo sapiens
MLAAKEEQLREFQEEMAALKENLLEDDKEPCCLPQWSVPKDTCRLYRGNDQIMTNLEQWAKQQKVANEKLGNQLREQVKYIAKLSGEKESFLLLYTRIKKDSHSQVTHTPSVLGQF

SEQ ID NO: 81900 - protein, 110 aa, Homo sapiens
MAPFPEEVDVFTAPHWRMKQLVGLYCDKLSKTNFSNNNDFRALLQSLYATFKEFKMHEQIENEYIIGLLQQRSQTIYNVHSDNKLSEMLSLFEKGLKNVKPTTVDWKPYQ

SEQ ID NO: 81901 - protein, 53 aa, Homo sapiens
MPAAPARPCNGERSSWGWCSSGLASMEYCGSSSGWGPAWASTSAFRSASASSV

SEQ ID NO: 81902 - protein, 959 aa, Homo sapiens
MAPAGVVTRAVRSGELPLTSMASAENEACAVRSVACPSQAWRLQKVLCGRCGAASCPSQTWRPRGAGSGGVRMGSRADGPRTSGHVTGKMAVFPWHSRNRNYKAEFASCRLEAVPLEFGDYHPLKPITVTESKTKKVNRKGSTSSTSSSSSSSVVDPLSSVLDGTDPLSMFAATADPAALAAAMDSSRRKRDRDDNSVVGSDFEPWTNKRGEILARYTTTEKLSINLFMGSEKGKAGTATLAMSEKVRTRLEELDDFEEGSQKELLNLTQQDYVNRIEELNQSLKDAWASDQKVKALKIVIQCSKLLSDTSVIQFYPSKFVLITDILDTFGKLVYERIFSMCVDSRSVLPDHFSPENANDTAKETCLNWFFKIASIRELIPRFYVEASILKCNKFLSKTGISECLPRLTCMIRGIGDPLVSVYARAYLCRALLTEMMERCKKLGNNALLLNSVMSAFRAEFIATRSMDFIGMIKECDESGFPKHLLFRSLGLNLALADPPESDRLQILNEAWKVITKLKNPQDYINCAEVWVEYTCKHFTKREVNTVLADVIKHMTPDRAFEDSYPQLQLIIKKVIAHFHDFSVLFSVEKFLPFLDMFQKESVRVEVCKCIMDAFIKHQQEPTKDPVILNALLHVCKTMHDSVNALTLEDEKRMLSYLINGFIKMVSFGRDFEQQLSFYVESRSMFCNLEPVLVQLIHACVAYCFITIPSLAGIFTRLNLYLHSGQVALANQCLSQADAFFKAAISLVPEVPKMINIDGKMRPSESFLLEFLCNFFSTLLIVPDHPEHGVLFLVRELLNVIQDYTWEDNSDEKIRIYTCVLHLLSAMSQETYLYHIDKVDSNDSLYGGDSKFLAENNKLCETVMAQILEHLKTLAKDEALKRQSSLGLSFFNSILAHGDLRNNKLNQLSVNLWHLAQRHGCADTRTMVKTLEYIKKQSKQPDMTHLTELALRLPLQTRT

SEQ ID NO: 81903 - protein, 174 aa, Homo sapiens
MDWLNVFKDFFSIGKVKRKPSVPDSASPADDSFVDPGERLYDLNMPAYVKFNYMAEREDELSLIKGTKCDYIRPSLTGKFAGNPWYYGKVTRHQAEMALNERGHEGDFLIRDSESSPNDFSVSLKAQGKNKHFKVQLKETVYCIGQRKFSTMEELVEHYKKAPIFTSEQGEKLY

SEQ ID NO: 81904 - protein, 252 aa, Homo sapiens
MVMEKPSPLLVGREFVRQYYTLLNKAPEYLHRFYGRNSSYVHGGVDASGKPQEAVYGQNDIHHKVLSLNFSECHTKIRHVDAHATLSDGVVVQVMGLLSNSGQPERKFMQTFVLAPEGSVPNKFYVHNDMFRYEDEVFGDSEPELDEESEDEVEEEQEERQPSPEPVQENANSGYYEAHPVTNGIEEPLEESSHEPEPEPESETKTEELKPQVEEKNLEELEEKSTTPPPAEPVSLPQEPPKMHQESCSFPT

SEQ ID NO: 81905 - protein, 22 aa, Homo sapiens
  MOD_RES (1)..(1): Any amino acid
XYYNEAFSFEVPCDQVQGRRLP

SEQ ID NO: 81906 - protein, 162 aa, Homo sapiens
MGGKVPPATQKAKSEENTKEEKPDSKKVEEDLKADEPSSEESDLEIDKEGVIEPDTDAPQEMGDENAEITEEMMDQANDKKVAAIEALNDGELQKAIDLFTDAIKLNPRLAILYAKRASVFVKLQKPNAAIRDCDRAIEINPDSAQPYKWRGKAHRLLGHWE

SEQ ID NO: 81907 - protein, 141 aa, Homo sapiens
MAVTAQVKSLTQKVQAGAYPTEKGLSFLEVKDQLLLMYLMDLTHLILDKASGGSLQGHDAVLRLVEIRTVLEKLRPLDQKLKYQIDKLIKTAVTGSLSENDPLRFKPHPSNMMSKLSSEDEEEDEAEDDQSEASGKKSVKG

SEQ ID NO: 81908 - protein, 838 aa, Homo sapiens
MFWKFDLHSSSHIDTLLEREDVTLKELMDEEDVLQECKAQNRKLIEFLLKAECLEDLVSFIIEEPPQDMDEKIRYKYPNISCELLTSDVSQMNDRLGEDESLLMKLYSFLLNDSPLNPLLASFFSKVLSILISRKPEQIVDFLKKKHDFVDLIIKHIGTSAIMDLLLRLLTCIEPPQPRQDVLNWLNEEKIIQRLVEIVHPSQEEDRHSNASQSLCEIVRLSRDQMLQIQNSTEPDPLLATLEKQEIIEQLLSNIFHKEKNESAIVSAIQILLTLLETRRPTFEGHIEICPPGMSHSACSVNKSVLEAIRGRLGSFHELLLEPPKKSVMKTTWGVLDPPVGNTRLNVIRLISSLLQTNTSSINGDLMELNSIGVILNMFFKYTWNNFLHTQVEICIALILASPFENTENATITDQDSTGDNLLLKHLFQKCQLIERILEAWEMNEKKQAEGGRRHGYMGHLTRIANCIVHSTDKGPNSALVQQLIKDLPDEVRERWETFCTSSLGETNKRNTVDLMQQMTSNFIDQFGFNDEKFADQDDIGNVSFDRVSDINFTLNTNESGNIALFEACCKERIQQFDDGGSDEEDIWEEKHIAFTPESQRRSSSGSTDSEESTDSEEEDGAKQDLFEPSSANTEDKMEVDLSEPPNWSANFDVPMETTHGAPLDSVGSDVWSTEEPMPTKETGWASFSEFTSSLSTKDSLRSNSPVEMETSTEPMDPLTPSAAALAVQPEAAGSVAMEASSDGEEDAESTDKVTETVMNGGMKETLSLTVDAKTETAVFKSEEGKLSTSQDAACKDAEECPETAEAKCAAPRPPSSSPEQRTGQPSAPGDTSVNGPV

SEQ ID NO: 81909 - protein, 1108 aa, Homo sapiens
ASMKMAQLQLENKELESEKEQLKKGLELLKASFKKTERLEVSYQGLDIENQRLQKTLENSNKKIQQLESELQDLEMENQTLQKNLEELKISSKRLEQLEKENKSLEQETSQLEKDKKQLEKENKRLRQQAEIKDTTLEENNVKIGNLEKENKTLSKEIGIYKESCVRLKELEKENKELVKRATIDIKTLVTLREDLVSEKLKTQQMNNDLEKLTHELEKIGLNKERLLHDEQSTDDSRYKLLESKLESTLKKSLEIKEEKIAALEARLEESTNYNQQLRQELKTVKKNYEALKQRQDEERMVQSSPPISGEDNKWERESQETTRELLKVKDRLIEVERNNATLQAEKQALKTQLKQLETQNNNLQAQILALQRQTVSLQEQNTTLQTQNAKLQVENSTLNSQSTSLMNQNAQLLIQQSSLENENESVIKEREDLKSLYDSLIKDHEKLELLHERQASEYESLISKHGTLKSAHKNLEVEHRDLEDRLNHTYSQLLKETEVLQTDHKNLKSLLNNSKLEQTRLEAEFSKLKEQYQQLDITSTKLNNQCELLSQLKGNLEEENRHLLDQIQTLMLQNRTLLEQNMESKDLFHVEQRQYIDKLNELRRQKEKLEEKIMDQYKFYDPSPPRRRGNWITLKMRKLIKSKKDINRERQKSLTLTPTRSDSSEGFLQLPHQDSQDSSSVGSNSLEDGQTLGTKKSSMVALKRLPFLRNRPKDKDKMKACYRRSMSMNDLVQSMVLAGQWTGSTENLEVPDDISTGKRRKELGAMAFSTTAINFSTVNSSAGFRSKQLVNNKDTTSFEDISPQGVSDDSSTGSRVHASRPASLDSGRTSTSNSNNNASLHEVKAGAVNNQSRPQSHSSGEFSLLHDHEAWSSSGSSPIQYLKRQTRSSPVLQHKISETLESRHHKIKTGSPGSEVVTLQQFLEESNKLTSVQIKSSSQENLLDEVMKSLSVSSDFLGKDKPVSCGLARSVSGKTPGDFYDRRTTKPEFLRPGPRKTEDTYFISSAGKPTPGTQGKIKLVKESSLSRQSKDSNPYATLPRASSVISTAEGTTRRTSIHDFLTKDSRLPISVDSPPAAADSNTTAASNVDKVQESRNSKSRSREQQSS

SEQ ID NO: 81910 - protein, 190 aa, Homo sapiens
MEGDFSVCRNCKRHVVSANFTLHEAYCLRFLVLCPECEEPVPKETMEEHCKLEHQQERWDLGVTEWVQSSLQERWGLRVGGRGSSPPCRLGVRCVSRACRSPRWSFIRPMSARSALLSVSSANWTCSSASWSSTSPTVAAGQSSAKAVASSSCTACSPSTEMSVAVNRPSSGKGKEFQLLKGKSTVIIAT

SEQ ID NO: 81911 - protein, 54 aa, Homo sapiens
MDVSGQETDWRSTAFRQKLVSQIEDAMRKAGVAHSKSSKDMESHVFLKAKTRIL

SEQ ID NO: 81912 - protein, 127 aa, Homo sapiens
MTEEVWMGTWRPHRPRGPIMALYSSPGPKYLIPPTTGFMKHTPTKLRAPAYSFRGAPMLLAENCSPGPRYNTVGKASQPSFSIKGRSKLGGFSDDLHKVTLTKPCAPVVTFGIKHSDYMTPLLVDVE

SEQ ID NO: 81913 - protein, 143 aa, Homo sapiens
  MOD_RES (1)..(1): Any amino acid
XPDICHELLGHVPLFSDRSFAQFSQIYWFTVEFGLCKQGDSIKAYGAGLLSSFGELQYCLSEKPKLLPLELEKTAIQNYTVTEFQPLYYVAESFNDAKEKVRNFAATIPRPFSVRYDPYTQRIEVLDNTQQLKILADSINSEI

SEQ ID NO: 81914 - protein, 393 aa, Homo sapiens
MTTYSDKGAKPERGRFLHFHSVTFWVGNAKQATSFYCSKMGFEPLAYRGLETGSREVVSHVIKQGKIVFVLSSALNPWNKEMGDHLVKHGDGVKDIAFEVEDCDYIVQKARERGAKIMREPWVEQDKFGKVKFAVLQTYGDTTHTLVEKMNYIGQFLPGYEAPAFMDPLLPKLPKCSLEMIDHIVGNQPDQEMVSASEWYLKNLQFHRFWSVDDTQVHTEYSSLRSIVVANYEESIKMPINEPAPGKKKSQIQEYVDYNGGAGVQHIALKTEDIITAIRHLRERGLEFLSVPSTYYKQLREKLKTAKIKVKENIDALEELKILVDYDEKGYLLQIFTKPVQDRPTLFLEVIQRHNHQGFGAGNFNSLFKAFEEEQNLRGNLTNMETNGVVPGM

SEQ ID NO: 81915 - protein, 25 aa, Homo sapiens
KERCQYYTASFSDYAKYYALVCYGE

SEQ ID NO: 81916 - protein, 74 aa, Homo sapiens
MGSNSSRIGDLPKNEYLKKLSGTESISENDPFWNQLLSFSFPAPTSRQSFTLVAQAGVQWHDLGSPQPLPPGIK

SEQ ID NO: 81917 - protein, 2340 aa, Homo sapiens
MVRFGDELGGRYGGPGGGERARGGGAGGAGGPGPGGLQPGQRVLYKQSIAQRARTMALYNPIPVKQNCFTVNRSLFVFSEDNVVRKYAKRITEWPPFEYMILATIIANCIVLALEQHLPDGDKTPMSERLDDTEPYFIGIFCFEAGIKIIALGFVFHKGSYLRNGWNVMDFVVVLTGILATAGTDFDLRTLRAVRVLRPLKLVSGIPSLQVVLKSIMKAMVPLLQIGLLLFFAILMFAIIGLEFYMGKFHKACFPNSTDAEPVGDFPCGKEAPARLCEGDTECREYWPGPNFGITNFDNILFAILTVFQCITMEGWTDILYNTNDAAGNTWNWLYFIPLIIIGSFFMLNLVLGVLSGEFAKERERVENRRAFLKLRRQQQIERELNGYLEWIFKAEEVMLAEEDRNAEEKSPLDAVLKRAATKKSRNDLIHAEEGEDRFADLCAVGSPFARASLKSGKTESSSYFRRKEKMFRFFIRRMVKAQSFYWVVLCVVALNTLCVAMVHYNQPRRLTTTLYFAEFVFLGLFLTEMSLKMYGLGPRSYFRSSFNCFDFGVIVGSVFEVVWAAIKPGSSFGISVLRALRLLRIFKVTKYWSSLRNLVVSLLNSMKSIISLLFLLFLFIVVFALLGMQLFGGQFNFQDETPTTNFDTFPAAILTVFQILTGEDWNAVMYHGIESQGGVSKGMFSSFYFIVLTLFGNYTLLNVFLAIAVDNLANAQELTKDEEEMEEAANQKLALQKAKEVAEVSPMSAANISIAARQQNSAKARSVWEQRASQLRLQNLRASCEALYSEMDPEERLRFATTRHLRPDMKTHLDRPLVVELGRDGARGPVGGKARPEAAEAPEGVDPPRRHHRHRDKDKTPAAGDQDRAEAPKAESGEPGAREERPRPHRSHSKEAAGPPEARSERGRGPGPEGGRRHHRRGSPEEAAEREPRRHRAHRHQDPSKECAGAKGERRARHRGGPRAGPREAESGEEPARRHRARHKAQPAHEAVEKETTEKEATEKEAEIVEADKEKELRNHQPREPHCDLETSGTVTVGPMHTLPSTCLQKVEEQPEDADNQRNVTRMGSQPPDPNTIVHIPVMLTGPLGEATVVPSGNVDLESQAEGKKEVEADDVMRSGPRPIVPYSSMFCLSPTNLLRRFCHYIVTMRYFEVVILVVIALSSIALAAEDPVRTDSPRNNALKYLDYIFTGVFTFEMVIKMIDLGLLLHPGAYFRDLWNILDFIVVSGALVAFAFSGSKGKDINTIKSLRVLRVLRPLKTIKRLPKLKAVFDCVVNSLKNVLNILIVYMLFMFIFAVIAVQLFKGKFFYCTDESKELERDCRGQYLDYEKEEVEAQPRQWKKYDFHYDNVLWALLTLFTVSTGEGWPMVLKHSVDATYEEQGPSPGYRMELSIFYVVYFVVFPFFFVNIFVALIIITFQEQGDKVMSECSLEKNERACIDFAISAKPLTRYMPQNRQSFQYKTWTFVVSPPFEYFIMAMIALNTVVLMMKFYDAPYEYELMLKCLNIVFTSMFSMECVLKIIAFGVLNYFRDAWNVFDFVTVLGSITDILVTEIAETNNFINLSFLRLFRAARLIKLLRQGYTIRILLWTFVQSFKALPYVCLLIAMLFFIYAIIGMQVFGNIALDDDTSINRHNNFRTFLQALMLLFRSATGEAWHEIMLSCLSNQACDEQANATECGSDFAYFYFVSFIFLCSFLMLNLFVAVIMDNFEYLTRDSSILGPHHLDEFIRVWAEYDPAACGRISYNDMFEMLKHMSPPLGLGKKCPARVAYKRLVRMNMPISNEDMTVHFTSTLMALIRTALEIKLAPAGTKQHQCDAELRKEISVVWANLPQKTLDLLVPPHKPDEMTVGKVYAALMIFDFYKQNKTTRDQMQQAPGGLSQMGPVSLFHPLKATLEQTQPAVLRGARVFLRQKSSTSLSNGGAIQNQESGIKESVSWGTQRTQDAPHEARPPLERGHSTEIPVGRSGALAVDVQMQSITRRGPDGEPQPGLESQGRAASMPRLAAETQPVTDASPMKRSISTLAQRPRGTHLCSTTPDRPPPSQASSHHHHHRCHRRRDRKQRSLEKGPSLSADMDGAPSSAVGPGLPPGEGPTGCRRERERRQERGRSQERRQPSSSSSEKQRFYSCDRFGGREPPKPKPSLSSHPTSPTAGQEPGPHPQGSGSVNGSPLLSTSGASTPGRGGRRQLPQTPLTPRPSITYKTANSSPIHFAGAQTSLPAFSPGRLSRGLSEHNALLQRDPLSQPLAPGSRIGSDPYLGQRLDSEASVHALPEDTLTFEEAVATNSGRSSRTSYVSSLTSQSHPLRRVPNGYHCTLGLSSGGRARHSYHHPDQDHWC

SEQ ID NO: 81918 - protein, 180 aa, Homo sapiens
MAAAAAAAGAAGSAAPAAAAGAPGSGGAPSGSQGVLIGDRLYSGVLITLENCLLPDDKLRFTPSMSSGLDTDTETDLRVVGCELIQAAGILLRLPQVRARPRASGPGGHGYRAGVVPAVLLYQVLREALHGACVNGLCPPGFQDRRGPKTHTGRHQCVSPPSTAERQKEARASTTGSRLC

SEQ ID NO: 81919 - protein, 249 aa, Homo sapiens
  MOD_RES (1)..(1): Any amino acid
XLDSQVNNLFLKSHSIVQKTAMNWRLSARNAARRDSVLAASRDYRNIIERLQDIVSALEDRLRPLVQAELSVLVDVLHRPELLFPENTDARRKCESGGFICKLIKHTKQLLEENEEKLCIKVLQTLREMMTKDRGYGEKQELEPSPPLRQLEDHKRGEALRQVLVNRYYGNVRPSGRRESLTSFGNGPLSAGGPGKPGGGGGGSGSSSMSRGEMSLAEVQCHLDKEGASNLVIDLIMNASSDRVFHESI

SEQ ID NO: 81920 - protein, 168 aa, Homo sapiens
MPASTEGAYVSSESPIRISVSTEGANTSSSTSTSTTGTSHLVKCAEKEKTFCVNGGECFMVKDLSNPSRYLCKCPNEFTGDRCQNYVMASFYKAEELYQKRVLTITGICIALLVVGIMCVVAYCKTKKQRKKLHDRLRQSLRSERNNMMNIANGPHHPNPPPENVQLV

SEQ ID NO: 81921 - protein, 71 aa, Homo sapiens
MATPASAPDTRALVADFVGYKLRQKGYVCGAGPGEGPAADPLHQAMRAAGDEFETRFRRTFSDLAAQLHVT

SEQ ID NO: 81922 - protein, 133 aa, Homo sapiens
MSVGVSTSAPLSPTSGTSVGMSTFSIMDYVVFVLLLVLSLAIGLYHACRGWGRHTVGELLMADRKMGCLPVALSLLATFQSAVAILGVPSEIYRFGTQYWFLGCCYFLGLLIPAHIFIPVFYRLHLTSAYEYL

SEQ ID NO: 81923 - protein, 1766 aa, Homo sapiens
  MOD_RES (1)..(1): Any amino acid
XDSQRKQYEEWLQETQQLLQMQQKYLEEQIGAHRKSKKALSAKQRTAKKAGREFPEEDAEQLKHVTEQQSMVQKQLEQIRKQQKEHAELIEDYRIKQQQQCAMAPPTMMPSVQPQPPLIPGATPPTMSQPTFPMVPQQLQHQQHTTVISGHTSPVRMPSLPGWQPNSAPAHLPLNPPRIQPPIAQLPIKTCTPAPGTVSNANPQSGPPPRVEFDDNNPFSESFQERERKERLREQQERQRIQLMQEVDRQRALQQRMEMEQHGMVGSEISSSRTSVSQIPFYSSDLPCDFMQPLGPLQQSPQHQQQMGQVLQQQNIQQGSINSPSTQTFMQTNERRQVGPPSFVPDSPSIPVGSPNFSSVKQGHGNLSGTSFQQSPVRPSFTPALPAAPPVANSSLPCGQDSTITHGHSYPGSTQSLIQLYSDIIPEEKGKKKRTRKKKRDDDAESTKAPSTPHSDITAPPTPGISETTSTPAVSTPSELPQQADQESVEPVGPSTPNMAAGQLCTELENKLPNSDFSQATPNQQTYANSEVDKLSMETPAKTEEIKLEKAETESCPGQEEPKLEEQNGSKVEGNAVACPVSSAQSPPHSAGAPAAKGDSGNELLKHLLKNKKSSSLLNQKPEGSICSEDDCTKDNKLVEKQNPAEGLQTLGAQMQGGFGCGNQLPKTDGGSETKKQRSKRTQRTGEKAAPRSKKRKKDEEEKQAMYSSTDTFTHLKQQLSLLPLMEPIIGVNFAHFLPYGSGQFNSGNRLLGTFGSATLEGVSDYYSQLIYKKMANGFATTEELAGKAGVLVSHEVTKTLGPKPFQLPFRPQDDLLARALAQGPKTVDVPASLPTPPHNNQEELRIQDHCGDRDTPDSFVPSSSPESVVGVEVSRYPDLSLVKEEPPEPVPSPIIPILPSTAGKSSESRRNDIKTEPGTLYFASPFGPSPNGPRSGLISVAITLHPTAAENISSVVAAFSDLLHVRIPNSYEVSSAPDVPSMGLVSSHRINPGLEYRQHLLLRGPPPGSANPPRLVSSYRLKQPNVPFPPTSNGLSGYKDSSHGIAESAALRPQWCCHCKVVILGSGVRKSFKDLTLLNKDSRESTKRVEKDIVFCSNNCFILYSSTAQAKNSENKESIPSLPQSPMRETPSKAFHQYSNNISTLDVHCLPQLPEKASPPASPPIAFPPAFEAAQVEAKPDELKVTVKLKPRLRAVHGGFEDCRPLNKKWRGMKWKKWSIHIVIPKGTFKPPCEDEIDEFLKKLGTSLKPDPVPKDYRKCCFCHEEGDGLTDGPARLLNLDLDLWVHLNCALWSTEVYETQAGALINVELALRRGLQMKCVFCHKTGATSGCHRFRCTNIYHFTCAIKAQCMFFKDKTMLCPMHKPKGIHEQELSYFAVFRRVYVQRDEVRQIASIVQRGERDHTFRVGSLIFHTIGQLLPQQMQAFHSPKALFPVGYEASRLYWSTRYANRRCRYLCSIEEKDGRPVFVIRIVEQGHEDLVLSDISPKGVWDKILEPVACVRKKSEMLQLFPAYLKGEDLFGLTVSAVARIAESLPGVEACENYTFRYGRNPLMELPLAVNPTGCARSEPKMSAHVKRPHTLNSTSTSKSFQSTVTGELNAPYSKQFVHSKSSQYRKMKTEWKSNVYLARSRIQGLGLYAARDIEKHTMVIEYIGTIIRNEVANRKEKLYESQNRGVYMFRMDNDHVIDATLTGGPARYINHSCAPNCVAEVVTFERGHKIIISSSRRIQKGEELCYDYKFDFEDDQHKIPCHCGAVNCRKWMN

SEQ ID NO: 81924 - protein, 711 aa, Homo sapiens
MVLTLGESWPVLVGRRFLSLSAADGSDGSHDSWDVERVAEWPWLSGTIRAVSHTDVTKKDLKVCVEFDGESWRKRRWIEVYSLLRRAFLVEHNLVLAERKSPEISERIVQWPAITYKPLLDKAGLGSITSVRFLGDQQRVFLSKDLLKPIQDVNSLRLSLTDNQIVSKEFQALIVKHLDESHLLKGDKNLVGSEVKIYSLDPSTQWFSATVINGNPASKTLQVNCEEIPALKIVDPSLIHVEVVHDNLVTCGNSARIGAVKRKSSENNGTLVSKQAKSCSEASPSMCPVQSVPTTVFKEILLGCTAATPPSKDPRQQSTPQAANSPPNLGAKIPQGCHKQSLPEEISSCLNTKSEALRTKPDVCKAGLLSKSSQIGTGDLKILTEPKGSCTQPKTNTDQENRLESVPQALTGLPKECLPTKASSKAELEIANPPELQKHLEHAPSPSDVSNAPEVKAGVNSDSPNNCSGKKVEPSALACRSQNLKESSVKVDNESCCSRSNNKIQNAPSRKSVLTDPAKLKKLQQSGEAFVQDDSCVNIVAQLPKCRECRLDSLRKDKEQQKDSPVFCRFFHFRRLQFNKHGVLRVEGFLTPNKYDNEAIGLWLPLTKNVVGIDLDTAKYILANIGDHFCQMVISEKEAMSTIEPHRQVAWKRAVKGVREMCDVCDTTIFNLHWVCPRCGFGVCVDCYRMKRKNCQQGENRFDSPPAPLHS

SEQ ID NO: 81925 - protein, 590 aa, Homo sapiens
IIRGYLGKWTLVIKTITLVLAVSSGLSLGKEGPLVHVACCCGNILCHCFNKYRKNEAKRREVLSAAAAAGVSVAFGAPIGGVLFSLEEVSYYFPLKTLWRSFFAALVAAFTLRSINPFGNSRLVLFYVEFHTPWHLFELVPFILLGIFGGLWGALFIRTNIAWCRKRKTTQLGKYPVIEVLVVTAITAILAFPNEYTRMSTSELISELFNDCGLLDSSKLCDYENRFNTSKGGELPDRPAGVGVYSAMWQLALTLILKIVITIFTFGMKAQFLPPVLCWSGEFRLLPDGPRIRIPSGLFIPSMAVGAIAGRLLGVGMEQLAYYHQEWTVFNSWCSQGADCITPGLYAMVGAAACLGGVTRMTVSLVVIMFELTGGLEYIVPLMAAAMTSKWVADALGREGIYDAHIRLNGYPFLEAKEEFAHKTLAMDVMKPRRNDPLLTVLTQDSMTVEDVETIISETTYSGFPVVVSRESQRLVGFVLRRDLIISIENARKKQDGVVSTSIIYFTEHSPPLPPYTPPTLKLRNILDLSPFTVTDLTPMEIVVDIFRKLGLRQCLVTHNGRLLGIITKKDVLKHIAQMANQDPDSILFN

SEQ ID NO: 81926 - protein, 212 aa, Homo sapiens
MSRRKQTNPNKVHCDSEGDEEETTQDEVSSHTSEEDGGVVKVEKELENTEQPVGGNEVVEHEVTGNLNSDPLLELCQCPLCQLDCGSREQLIAHVYQHTAAVVSAKSYMCPVCGRALSSPGSLGRHLLIHSEDQRSNCAVCGARFTSHATFNSEKLPEVLNMESLPTVHNEGPSSAEGKDIAFSPPVYPAGILLVCNNCAAYRKLLEAQTPS

SEQ ID NO: 81927 - protein, 122 aa, Homo sapiens
MQIFVKTLTGKTITLEVEPSDTIENVKAKIQDKEGIPPDQQRLIFAGKQLEDGRTLSDYNIQKESTLHLVLRLRGGMQIFVKTLTGKTITLEVEPSDTIENVKAKIQDKEGIPPDQQRLIFA

SEQ ID NO: 81928 - protein, 72 aa, Homo sapiens
  MOD_RES (1)..(1): Any amino acid
XGQKEQAVEWYKKGIEELEKGIAVIVTGQGEQCERARRLQAKMMTNLVMAKDRLQLLDATSFAIFQVTNGRL

SEQ ID NO: 81929 - protein, 212 aa, Homo sapiens
MAPGRGTLGLALVSERGSFLSGSCSFPERESRGYIGLGSSRSQVQGIGEFQGCGCGLHPGGVGSTRLPSEGLVPGCDVGELPEPSCPRTSTAQARCDLSSGTRRGAMEHAEGSPQRALSRMGAEGGALSTAGHLQRRTGPGAHHGAAPRRGAGVGAPGRCSAEESGCALGARTCHGLGRPCRGIPPQVSPLRPATRSRGGTLAGHTQERPGH

SEQ ID NO: 81930 - protein, 102 aa, Homo sapiens
  MOD_RES (1)..(1): Any amino acid
XNLIHNMGMYIFLHTVKGTPFETPDQGKARLLTHWEQMDYGVQFTASRKFLTITPIVLYFLTSFYTKYDQIHFVLNTVSLMSVLIPKLPQLHGVRIFGINKY

SEQ ID NO: 81931 - protein, 236 aa, Homo sapiens
  MOD_RES (1)..(1): Any amino acid
XLSDSAKYYLTDVDRIATLGYLPTQQDVLRVRVPTTGIIEYPFDLENIIFRMVDVGGQRSERRKWIHCFENVTSIMFLVALSEYDQVLVESDNENRMEESKALFRTIITYPWFQNSSVILFLNKKDLLEDKILYSHLVDYFPEFDGPQRDAQAAREFILKMFVDLNPDSDKIIYSHFTCATDTENIRFVFAAVKDTILQLNLKEYNLLSGDVHLSLRTLRAPSHLLSTAKAAFFWP

SEQ ID NO: 81932 - protein, 699 aa, Homo sapiens
MADPAECSIKVMCRFRPLNEAEILRGDKFIPKFKGDETVVIGQGKPYVFDRVLPPNTTQEQVYNACAKQIVKDVLEGYNGTIFAYGQTSSGKTHTMEGKLHDPQLMGIIPRIAHDIFDHIYSMDENLEFHIKVSYFEIYLDKIRDLLDVSKTNLAVHEDKNRVPYVKGCTERFVSSPEEVMDVIDEGKANRHVAVTNMNEHSSRSHSIFLINIKQENVETEKKLSGKLYLVDLAGSEKVSKTGAEGAVLDEAKNINKSLSALGNVISALAEGTKTHVPYRDSKMTRILQDSLGGNCRTTIVICCSPSVFNEAETKSTLMFGQRAKTIKNTVSVNLELTAEEWKKKYEKEKEKNKTLKNVIQHLEMELNRWRNGEAVPEDEQISAKDQKNLEPCDNTPIIDNIAPVVAGISTEEKEKYDEEISSLYRQLDDKDDEINQQSQLAEKLKQQMLDQDELLASTRRDYEKIQEELTRLQIENEAAKDEVKEVLQALEELAVNYDQKSQEVEDKTRANEQLTDELAQKTTTLTTTQRELSQLQELSNHQKKRATEILNLLLKDLGEIGGIIGTNDVKTLADVNGVIEEEFTMARLYISKMKSEVKSLVNRSKQLESAQMDSNRKMNASERELAACQLLISQHEAKIKSLTDYMQNMEQKRRQLEESQDSLSEELAKLRAQEGAGAADGEPPGSSPEAAVQTPRRN

SEQ ID NO: 81933 - protein, 50 aa, Homo sapiens
MLATRLSRPLSRLPGKTLSACDRENGARRPLLLGSTSFIPIGRRTYASAA

SEQ ID NO: 81934 - protein, 146 aa, Homo sapiens
MELEVRRVRQAFLSGRSRPLRFRLQQLEALRRMVQEREKDILTAIAADLCKSEFNVYSQEVITVLGEIDFMLENLPEWVTAKPVKKNVLTMLDEAYIQPQPLGVVLIIGAWNYPFVLTIQPLIGAIAAGNAVIIKPSELSENTAKI

SEQ ID NO: 81935 - protein, 1779 aa, Homo sapiens
MGLPLARLAAVCLALSLAGGSELQTEGRTRNHGHNVCSTWGNFHYKTFDGDVFRFPGLCDYNFASDCRGSYKEFAVHLKRGPGQAEAPAGVESILLTIKDDTIYLTRHLAVLNGAVVSTPHYSPGLLIEKSDAYTKVYSRAGLTLMWNREDALMLELDTKFRNHTCGLCGDYNGLQSYSEFLSDGVLFSPLEFGNMQKINQPDVVCEDPEEEVAPASCSEHRAECERLLTAEAFADCQDLVPLEPYLRACQQDRCRCPGGDTCVCSTVAEFSRQCSHAGGRPGNWRTATLCPKTCPGNLVYLESGSPCMDTCSHLEVSSLCEEHRMDGCFCPEGTVYDDIGDSGCVPVSQCHCRLHGHLYTPGQEITNDCEQCVCNAGRWVCKDLPCPGTCALEGGSHITTFDGKTYTFHGDCYYVLAKGDHNDSYALLGELAPCGSTDKQTCLKTVVLLADKKKNVVVFKSDGSVLLNELQVNLPHVTASFSVFRPSSYHIMVSMAIGVRLQVQLAPVMQLFVTLDQASQGQVQGLCGNFNGLEGDDFKTASGLVEATGAGFANTWKAQSSCHDKLDWLDDPCSLNIESANYAEHWCSLLKKTETPFGRCHSAVDPAEYYKRCKYDTCNCQNNEDCLCAALSSYARACTAKGVMLWGWREHVCNKDVGSCPNSQVFLYNLTTCQQTCRSLSEADSHCLEGFAPVDGCGCPDHTFLDEKGRCVPLAKCSCYHRGLYLEAGDVVVRQEERCVCRDGRLHCRQIRLIGQSCTAPKIHMDCSNLTALATSKPRALSCQTLAAGYYHTECVSGCVCPDGLMDDGRGGCVVEKECPCVHNNDLYSSGAKIKVDCNTCTCKRGRWVCTQAVCHGTCSIYGSGHYITFDGKYYDFDGHCSYVAVQDYCGQNSSLGSFSIITENVPCGTTGVTCSKAIKIFMGRTELKLEDKHRVVIQRDEGHHVAYTTREVGQYLVVESSTGIIVIWDKRTTVFIKLAPSYKGTVCGLCGNFDHRSNNDFTTRDHMVVSSELDFGNSWKEAPTCPDVSTNPEPCSLNPHRRSWAEKQCSILKSSVFSICHSKVDPKPFYEACVHDSCSCDTGGDCECFCSAVASYAQECTKEGACVFWRTPDLCPIFCDYYNPPHECEWHYEPCGNRSFETCRTINGIHSNISVSYLEGCYPRCPKDRPIYEEDLKKCVTADKCGCYVEDTHYPPGASVPTEETCKSCVCTNSSQVVCRPEEGKILNQTQDGAFCYWEICGPNGTVEKHFNICSITTRPSTLTTFTTITLPTTPTTFTTTTTTTTPTSSTVLSTTPKLCCLWSDWINEDHPSSGSDDGDRETFDGVCGAPEDIECRSVKDPHLSLEQLGQKVQCDVSVGFICKNEDQFGNGPFGLCYDYKIRVNCCWPMDKCITTPSPPTTTPSPPPTSTTTLPPTTTPSPPTTTTTTPPPTTTPSPPITTTTTPPPTTTPSPPISTTTTPPPTTTPSPPTTTPSPPTTTPSPPTTTTTTPPPTTTPSPPTTTPITPPASTTTLPPTTTPSPPTTTTTTPPPTTTPITTTTTVTPTPTPTGTQTPTTTPITTTTTVTPTPTPTGTQTPTSTPITTTTTTPTPTAITTTTTVTPTPTPTGTQTPTTTPITTTTTVTPTPTPTGTQSPTPTAITTTTTVTPTPTPTGTQTPTSTPITTTTTVTPTPTPTGTQTPTPTPISTTTTVTPTPTPTGTQTPTTTPITTTTTVTPTPTPTGTQTPTTTPTPTSTKSTTVTPITTTTTVTATPTPTGTQTPTMIPISTTTTVTP

SEQ ID NO: 81936 - protein, 116 aa, Homo sapiens
MTEQMTLRGTLKGHNGWVTQIATTPQFPDMILSASRDKTIIMWKLTRDETNYGIPQRALRGHSHFVSDVVISSDGQFALSGSWDGTLRLWDLTTQGHHHEAICGPYQGCAECGLLL

SEQ ID NO: 81937 - protein, 117 aa, Homo sapiens
MVLILGRRLNREDLGVRDSPATKRKVFEMDPKSLTGHEFFDFSSGSSHAENILQIFNEFRDSRLFTDVIICVEGKEFPCHRAVLSACSSYFRAMFCNDHRESREMLVEINGILAEAM

SEQ ID NO: 81938 - protein, 259 aa, Homo sapiens
  MOD_RES (1)..(1): Any amino acid
XTRQVAKCKCAKRFQVEQIGDNKYRFGDSQQLRLVRILRSTVMVRVGGGWMALDEFLVKNDPCRAKGRTNMELREKFILADGASQGMAAFRPRGRRSRPSSRGASPNRSTSVSSQAAQAASPQVPATTTPKGTPIQGSKLRLPGYLSGKGFHSGEDSGLITTAAARVRTQFADSKKTPSRPGSRAGSKAGSRASSRRGSDASDFDISEIQSVCSDVETVPQTHRPTPRAGSRPSTAKPSKIPTPQRKSPASKLDKSSKR

SEQ ID NO: 81939 - protein, 236 aa, Homo sapiens
MAAEGDPQNFQGNYISYIDGNVWKAYSWTEKLILRENNLTELHKDSFEGLLSLQYLDLSCNKIQSIERHTFEPLPFLKFINLSCNVITELSFGTFQAWHGMQFLHKLILNHNPLTTVEDPYLFKLPALKYLDMGTTLVPLTTLKNILMMTVELEKLIVPSHMACCLCQFKNSIEAVCKTVKLHCNSACLTNTTHCPEEASVGNPEGAFMKVLQARKNYTSTELIIEPEEPSDSSGI

SEQ ID NO: 81940 - protein, 98 aa, Homo sapiens
MMLGPEGGEGFVVKLRGLPWSCSVEDVQNFLSDCTIHDGAAGVHFIYTREGRQSGEAFVELGSEDDVKMALKKDRESMGHRYIEVFKSHRTEMDWVLK

SEQ ID NO: 81941 - protein, 583 aa, Homo sapiens
MDAMKRGLCCVLLLCGAVFVSPSQEIHARFRRGARSYQVICRDEKTQMIYQQHQSWLRPVLRSNRVEYCWCNSGRAQCHSVPVKSCSEPRCFNGGTCQQALYFSDFVCQCPEGFAGKCCEIDTRATCYEDQGISYRGTWSTAESGAECTNWNSSALAQKPYSGRRPDAIRLGLGNHNYCRNPDRDSKPWCYVFKAGKYSSEFCSTPACSEGNSDCYFGNGSAYRGTHSLTESGASCLPWNSMILIGKVYTAQNPSAQALGLGKHNYCRNPDGDAKPWCHVLKNRRLTWEYCDVPSCSTCGLRQYSQPQFRIKGGLFADIASHPWQAAIFAKHRRSPGERFLCGGILISSCWILSAAHCFQERFPPHHLTVILGRTYRVVPGEEEQKFEVEKYIVHKEFDDDTYDNDIALLQLKSDSSRCAQESSVVRTVCLPPADLQLPDWTECELSGYGKHEALSPFYSERLKEAHVRLYPSSRCTSQHLLNRTVTDNMLCAGDTRSGGPQANLHDACQNRYSLILHGTKITEIQSTHSSGDSGGPLVCLNDGRMTLVGIISWGLGCGQKDVPGVYTKVTNYLDWIRDNMRP

SEQ ID NO: 81942 - protein, 52 aa, Homo sapiens
  MOD_RES (1)..(1): Any amino acid
XIALLMKGEPGKPGPPGDAGLQGLPGVPGIPGAKGVAGEKHVFYFIFGPREK

SEQ ID NO: 81943 - protein, 83 aa, Homo sapiens
MLRFPTCFPSFRVVGEKQLPQEIIFLVWSPKRDLIALANTAGEVLLHRLASFHRVWSFPPNENTGKEFWPLLLLIPRKLFCVM

SEQ ID NO: 81944 - protein, 1931 aa, Homo sapiens
MMNEDAAQKSDSGEKFNGSSQRRKRPKKSDSNASFLRAARAGNLDKVVEYLKGGIDINTCNQNGLNALHLAAKEGHVGLVQELLGRGSSVDSATKKGNTALHIASLAGQAEVVKVLVKEGANINAQSQNGFTPLYMAAQENHIDVVKYLLENGANQSTATEDGFTPLAVALQQGHNQAVAILLENDTKGKVRLPALHIAARKDDTKSAALLLQNDHNADVQSKMMVNRTTESGFTPLHIAAHYGNVNVATLLLNRGAAVDFTARNGITPLHVASKRGNTNMVKLLLDRGGQIDAKTRDGLTPLHCAARSGHDQVVELLLERGAPLLARTKNGLSPLHMAAQGDHVECVKHLLQHKAPVDDVTLDYLTALHVAAHCGHYRVTKLLLDKRANPNARALNGFTPLHIACKKNRIKVMELLVKYGASIQAITESGLTPIHVAAFMGHLNIVLLLLQNGASPDVTNIRGETALHMAARAGQVEVVRCLLRNGALVDARAREEQTPLHIASRLGKTEIVQLLLQHMAHPDAATTNGYTPLHISAREGQVDVASVLLEAGAAHSLATKKGFTPLHVAAKYGSLDVAKLLLQRRAAADSAGKNGLTPLHVAAHYDNQKVALLLLEKGASPHATAKNGYTPLHIAAKKNQMQIASTLLNYGAETNIVTKQGVTPLHLASQEGHTDMVTLLLDKGANIHMSTKSGLTSLHLAAQEDKVNVADILTKHGADQDAHTKLGYTPLIVACHYGNVKMVNFLLKQGANVNAKTKNGYTPLHQAAQQGHTHIINVLLQHGAKPNATTANGNTALAIAKRLGYISVVDTLKVVTEEVTTTTTTITEKHKLNVPETMTEVLDVSDEEGDDTMTGDGGEYLRPEDLKELGDDSLPSSQFLDGMNYLRYSLEGGRSDSLRSFSSDRSHTLSHASYLRDSAVMDDSVVIPSHQVSTLAKEAERNSYRLSWGTENLDNVALSSSPIHSGFLVSFMVDARGGAMRGCRHNGLRIIIPPRKCTAPTRVTCRLVKRHRLATMPPMVEGEGLASRLIEVGPSGAQFLGPVIVEIPHFAALRGKERELVVLRSENGDSWKEHFCDYTEDELNEILNGMDEVLDSPEDLEKKRICRIITRDFPQYFAVVSRIKQDSNLIGPEGGVLSSTVVPQVQAVFPEGALTKRIRVGLQAQPMHSELVKKILGNKATFSPIVTLEPRRRKFHKPITMTIPVPKASSDVMLNGFGGDAPTLRLLCSITGGTTPAQWEDITGTTPLTFVNECVSFTTNVSARFWLIDCRQIQESVTFASQVYREIICVPYMAKFVVFAKSHDPIEARLRCFCMTDDKVDKTLEQQENFAEVARSRDVEVLEGKPIYVDCFGNLVPLTKSGQHHIFSFFAFKENRLPLFVKVRDTTQEPCGRLSFMKEPKSTRGLVHQAICNLNITLPIYTKESESDQEQEEEIDMTSEKNPQDEQERIEERLAYIADHLGFSWTELARELDFTEEQIHQIRIENPNSLQDQSHALLKYWLERDGKHATDTNLVECLTKINRMDIVHLMETNTEPLQERISHSYAEIEQTITLDHSEGFSVLQEELCTAQHKQKEEQAVSKESETCDHPPIVSEEDISVGYSTFQDGVPKTEGDSSATALFPQTHKEQVQQDFSGKMQDLPEESSLEYQQEYFVTTPGTETSETQKAMIVPSSPSKTPEEVSTPAEEEKLYLQTPTSSERGGSPIIQEPEEPSEHREESSPRKTSLVIVESADNQPETCERLDEDAAFEKELTEELGELEASSDEEAMVTTRVVRRRVIIQGDDMPEIPPETVTEEEYIDEHGHTVVKKVTRKIIRRYVSSEGTEKEEIMVQGMPQEPVNIEEGDGYSKVIKRVVLKSDTEQSEVTLCEPSILSSTSQFQAEPVEGRRVSKVVKTTVVLGERMEKHLGDSSLATDLPSAKDDFEEDNNE

SEQ ID NO: 81945 - protein, 296 aa, Homo sapiens
  MOD_RES (1)..(1): Any amino acid
XSQGLEKPLQVASATVSAGLWLLYPKPLFEDTPYILEPGEYPTSEAWGTSDPSVGSLKPMRLAVVYEAPGFQGRSWEVSRDIYNLQQPEDSQSPHLASVGSLRVLGGCWVGYEKEGFRGHQYLLEEGEYPDWSHWGGYDELLTSLRVIRTDFGDPAVVLFEAMDFEGHGVEVSKALPDVELVQHGPSTQAIHVLSGVWVAYQEVGFSGEQYVLEKGVYRNCEDWGAGNSTLASLQPVLQVGEHDLHFVSKIQLFSRPDFLGDHFSFEDDQAALPASFRPQSCRVHGGSWILFDETN

SEQ ID NO: 81946 - protein, 63 aa, Homo sapiens
EIHRKVMSQNFTNCHTKIRHVDAHATLNDGVVVQVMGLLSNNNQVVKFSVFIFLTVFIFRTVV

SEQ ID NO: 81947 - protein, 231 aa, Homo sapiens
  MOD_RES (1)..(1): Any amino acid
XALEKTTAPRPDRVQTLHRSLTEVTGPPTELEPAQDSLVQSESYTQNKALTAPEEHKASTSTNICELCTCGDEMLSCIDLNPEQRLRQVPVPEPNTHNGTFTILNFQGNYISYIDGNVWKAYSWTEKLILRENNLTELHKDSFEGLLSLQYLDLSCNKIQSIERHTFEPLPFLKFINLSCNVITELSFGTFQAWHGMQFLHKLIVPSHMACCLCQFKNSIEAVCKTVKLHC

SEQ ID NO: 81948 - protein, 314 aa, Homo sapiens
MIDLEPTVVDEVRAGTYRQLFHPEQLITGKEDAANNYARGHYTVGKESIDLVLDRIRKLTDACSGLQGFLIFHSFGGGTGSGFTSLLMERLSLDYGKKSKLEFAIYPAPQVSTAVVEPYNSILTTHTTLEHSDCAFMVDNEAIYDICRRNLDIERPTYTNLNRLISQIVSSITASLRFDGALNVDLTEFQTNLVPYPRIHFPLVTYAPIISAEKAYHEQLSVAEITSSCFEPNSQMVKCDPRHGKYMACCMLYRGDVVPKDVNVAIAAIKTKRTIQFVDWCPTGFKPKDPVGDLLFIYDLFGLCQSGAVPQSCL

SEQ ID NO: 81949 - protein, 110 aa, Homo sapiens
  MOD_RES (1)..(1): Any amino acid
XALRACAPWISLSGTATSRASSRWSSGIRIGLRSGRSCSLPPRAFTRASLCIAARRPSSTLAMCSLWAPCLRVQSCAAWRRSLETVASWPGHQGTMPPLSPTTLRPRRPV

SEQ ID NO: 81950 - protein, 163 aa, Homo sapiens
GYVMPDTHLKGVLRSLVEASSSGVSVLSLCEKGDAMIMEETGKIFKKEKEMKKGIAFPTSISVNNCVCHFSPLKSDQDYILKEGDLVKIDLGVHVDGFIANVAHTFVVDVAQGTQVTGRKADVIKAAHLCAEAALRLVKPGNQNTQVTEAWNKVAHSFNCTPI

SEQ ID NO: 81951 - protein, 66 aa, Homo sapiens
MVDYYEVLGVQRHASPEDIKKAYRKLALKWHPDKNPENKEEAERKFKQVAEAYEVLSDAKKRDIYD

SEQ ID NO: 81952 - protein, 81 aa, Homo sapiens
MQSLVQWGLDSYDYLQNAPPGFFPRLGVIGFAGLIGLLLARGSKIKKLVYPPGFMGLAASLYYPQQAIVFAQVSGERLYDW

SEQ ID NO: 81953 - protein, 296 aa, Homo sapiens
  MOD_RES (1)..(1): Any amino acid
XIKEQSAEEDAEAEVDNSKQLIPTLQRSVSEESANSLVSVGVEAKISEQLCAFCYCGEKSSLGQGDLKQFRITPGFILPWRNQPSNKKDIDDNSNGTYEKMQNSAPRKQRGQRKERSPQQNIVSCVSVSTQTASDDQAGKLWDELSLVGLPDAIDIQALFDSTGTCWAHHRCVEWSLGVCQMEEPLLVNVDKAVVSGSTEQSDYDVPRCGFLCIHPAWGLLSFLKLDVHFVSTLEPLSNAVKRNVPRCIIILVLQEPAPFRISVTSSCFVQNTLTKLLKDRRKMQTVQCATARETS

SEQ ID NO: 81954 - protein, 131 aa, Homo sapiens
MAKKVAVIGAGVSGLISLKCCVDEGLEPTCFERTEDIGGVWRFKENVEDGRASIYQSVVTNTSKEMSCFSDFPMPEDFPNFLHNSKLLEYFRIFAKKFDLLKYIQFQTTVLSVRKCPDFSSSGQWKVVTQS

SEQ ID NO: 81955 - protein, 473 aa, Homo sapiens
MKDIDIGKEYIIPSPGYRSVRERTSTSGTHRDREDSKFRRTRPLECQDALETAARAEGLSLDASMHSQLRILDEEHPKGKYHHGLSALKPIRTTSKHQHPVDNAGLFSCMTFSWLSSLARVAHKKGELSMEDVWSLSKHESSDVNCRRLERLWQEELNEVGPDAASLRRVVWIFCRTRLILSIVCLMITQLAGFSGPAFMVKHLLEYTQATESNLQYSLLLVLGLLLTEIVRSWSLALTWALNYRTGVRLRGAILTMAFKKILKLKNIKEKSLGELINICSNDGQRMFEAAAVGSLLAGGPVVAILGMIYNVIILGPTGFLGSAVFILFYPAMMFASRLTAYFRRKCVAATDERVQKMNEVLTYIKFIKMYAWVKAFSQSVQKIREEERRILEKAGYFQSITVGVAPIVVVIASVVTFSVHMTLGFDLTAAQAFTVVTVFNSMTFALKVTPFSVKSLSEASVAVDRFKLPSTV

SEQ ID NO: 81956 - protein, 547 aa, Homo sapiens
MIASQFLSALTLVLLIKESGAWSYNTSTEAMTYDEASAYCQQRYTHLVAIQNKEEIEYLNSILSYSPSYYWIGIRKVNNVWVWVGTQKPLTEEAKNWAPGEPNNRQKDEDCVEIYIKREKDVGMWNDERCSKKKLALCYTAACTNTSCSGHGECVETINNYTCKCDPGFSGLKCEQIVNCTALESPEHGSLVCSHPLGNFSYNSSCSISCDRGYLPSSMETMQCMSSGEWSAPIPACNVVECDAVTNPANGFVECFQNPGSFPWNTTCTFDCEEGFELMGAQSLQCTSSGNWDNEKPTCKAVTCRAVRQPQNGSVRCSHSPAGEFTFKSSCNFTCEEGFMLQGPAQVECTTQGQWTQQIPVCEAVRCDAVHQPPKGLVRCAHSPIGEFTYKSSCAFSCEEGFELHGSTQLECTSQGQWTEEVPSCQVVKCSSLAVPGKINMSCSGEPVFGTVCKFACPEGWTLNGSAARTCGATGHWSGLLPTCEAPTESNIPLVAGLSAAGLSLLTLAPFLLWLRKCLRKAKKFVPASSCQSLESDGSYQKPSYIL

SEQ ID NO: 81957 - protein, 52 aa, Homo sapiens
MASNNTASIAQARKLVEQLKMEANIDRIKSALCWSVLRRRHIIASFVCRCSL

SEQ ID NO: 81958 - protein, 136 aa, Homo sapiens
MLLAQINRDSQGMTEFPGGGMEAQHVTLCLTEAVTVADGDNLENMEGVSLQAVTLADGSTAYIQHNSKDAKLIDGQVIQLEDGSAAYVQHVPIPKSTGDSLRLEDGQAVQLEDGTTAFIHHTSKDSYDQSALQAVQ

SEQ ID NO: 81959 - protein, 489 aa, Homo sapiens
MTEGARAADEVRVPLGAPPPGPAALVGASPESPGAPGREAERGSELGVSPSESPAAERGAELGADEEQRVPYPALAATVFFCLGQTTRPRSWCLRLVCNPWFEHVSMLVIMLNCVTLGMFRPCEDVECGSERCNILEAFDAFIFAFFAVEMVIKMVALGLFGQKCYLGDTWNRLDFFIVVAGMMEYSLDGHNVSLSAIRTVRVLRPLRAINRVPSMRILVTLLLDTLPMLGNVLLLCFFVFFIFGIVGVQLWAGLLRNRCFLDSAFVRNNNLTFLRPYYQTEEGEENPFICSSRRDNGMQKCSHIPGRRELRMPCTLGWEAYTQPQAEGVGAARNACINWNQYYNVCRSGDSNPHNGAINFDNIGYAWIAIFQVITLEGWVDIMYYVMDAHSFYNFIYFILLIIVGSFFMINLCLVVIATQFSETKQRESQLMREQRARHLSNDSTLASFSEPGSCYEELLKTGPGPWPSVGPQCALPPAQPPSGHTDL

SEQ ID NO: 81960 - protein, 264 aa, Homo sapiens
MSPALQDLSQPEGLKKTLRDEINAILQKRIMVLDGGMGTMIQREKLNEEHFRGQEFKDHARPLKGNNDILSITQPDVIYQIHKEYLLAGADIIETNTFSSTSIAQADYGLEHLAYRMNMCSAGVARKAAEEVTLQTGIKRFVAGALGPTNKTLSVSPSVERPDYRNITFDELVEAYQEQAKGLLDGGVDILLIETIFDTANAKAALFALQNLFEEKYAPRPIFISGTIVDKSGRTLSGQTGEGFVISVSHGEPLWILLWMAWSI

SEQ ID NO: 81961 - protein, 154 aa, Homo sapiens
MLPADFTKLHLTDSLHPQVTHVSSSHSGCSITSDSGSSSLSDIYQATESEAGDMDLSGLPETAVDSEDDDDEEDIERASDPLMSRDIVRDCLEKDPIDRTDDDIEQLLEFMHQLPAFANMTMSVRRELCAVMVFAVVERAGTIVLNDGEELDSW

SEQ ID NO: 81962 - protein, 106 aa, Homo sapiens
MIVSSALMIWKGLMVITGSESPIVVVLSGSMEPAFHRGDLLFLTNRVEDPIRVGEIVVFRIEGREIPIVHRVLKIHEKQNGHIKFLTKGDNNAVDDRGLYKQGQHW

SEQ ID NO: 81963 - protein, 483 aa, Homo sapiens
MQWIRGGSGMLITGDSIVSAEAVWDHVTMANRELAFKAGDVIKVLDASNKDWWWGQIDDEEGWFPASFVRLWVNQEDEVEEGPSDVQNGHLDPNSDCLCLGRPLQNRDQMRANVINEIMSTERHYIKHLKDICEGYLKQCRKRRDMFSDEQLKVIFGNIEDIYRFQMGFVRDLEKQYNNDDPHLSEIGPCFLEHQDGFWIYSEYCNNHLDACMELSKLMKDSRYQHFFEACRLLQQMIDIAIDGFLLTPVQKICKYPLQLAELLKYTAQDHSDYRYVAAALAVMRNVTQQINERKRRLENIDKIAQWQASVLDWEGEDILDRSSELIYTGEMAWIYQPYGRNQQRVFFLFDHQMVLCKKDLIRRDILYYKGRIDMDKYEVVDIEDGRDDDFNVSMKNAFKLHNKETEEIHLFFAKKLEEKIRWLRAFREERKMVQEDEKIGFEISENQKRQAAMTVRKVPKQKGGTGEGEIEFVGFFAGPTPA

SEQ ID NO: 81964 - protein, 200 aa, Homo sapiens
DAARSRRGKENFEFYELAKLLPLPAAITSQLDKASIIRLTISYLKMRDFANQGDPPWNLRMEGPPPNTSVKVIGAQRRRSPSALAIEVFEAHLGSHILQSLDGFVFALNQEGKFLYISETVSIYLGLSQVELTGSSVFDYVHPGDHVEMAEQLGMKLPPGRGLLSQGTAEDGASSASSSSQSETPEPVVCFPPASDQFLL

SEQ ID NO: 81965 - protein, 641 aa, Homo sapiens
MVSNPVHGLPFLPGTSFKDSTKTAFHRSQTLSYRNGYAIVRRPTVGIGGDRLQFNQLSQAELDELASKAPVLTYGQPKQAPPADFIPAHVAFDKKVLKFDAYFQEDVPMSTEEQYRIRQVNIYYYLEDDSMSVIEPVVENSGILQGKLIKRQRLAKNDRGDHYHWKDLNRGINITIYGKTFRVVDCDQFTQVFLESQGIELNPPEKMALDPYTELRKQPLRKYVTPSDFDQLKQFLTFDKQVLRFYAIWDDTDSMYGECRTYIIHYYLMDDTVEIREVHERNDGRDPFPLLMNRQRVPKVLVENAKNFPQCVLEISDQEVLEWYTAKDFIVGKSLTILGRTFFIYDCDPFTRRYYKEKFGITDLPRIDVSKREPPPVKQELPPYNGFGLVEDSAQNCFALIPKAPKKDVIKMLVNDNKVLRYLAVLESPIPEDKDRRFVFSYFLATDMISIFEPPVRNSGIIGGKYLGRTKVVKPYSTVDNPVYYGPSDFFIGAVIEVFGHRFIILDTDEYVLKYMESNAAQYSPEALASIQNHVRKREAPAPEAESKQTEKDPGVQELEALIDTIQKQLKDHSCKDNIREAFQIYDKEASGYVDRDMFFKICESLNVPVDDSLVKEVTCKRLLLPAFTFPSPVWIPLCGL

SEQ ID NO: 81966 - protein, 120 aa, Homo sapiens
MLKNIELFDKLSLRFNGRVLFIKDVIGDEICCWSFYGQGRKIAEVCCTSIVYATEKKQTKVEFPEARIYEETLNILLYEAQDGRGPDNALLEATGGAAGRSHHLDEDEERERIERVRRIH

SEQ ID NO: 81967 - protein, 86 aa, Homo sapiens
FDYARCSKNTAWPYFLPMLNRQDPFTVHMAARIIAKLAAWGKELMEGSDLNYYFNWIKTQLSSQKLRGSGVAVETGTVSSSDHSIQ

SEQ ID NO: 81968 - protein, 27 aa, Homo sapiens
  MOD_RES (1)..(1): Any amino acid
XQVLQKEKKDRLALSQAHSLVQAEAPR

SEQ ID NO: 81969 - protein, 782 aa, Homo sapiens
MATEGMILTNHDHQIRVGVLTVSDSCFRNLAEDRSGINLKDLVQDPSLLGGTISAYKIVPDEIEEIKETLIDWCDEKELNLILTTGGTGFAPRDVTPEKFPTFPFCGLQKGATKEVIEREAPGMALAMLMGSLNVTPLGMLSRPVCGIRGKTLIINLPGSKKGSQECFQFILPALPHAIDLLRDAIVKVKEVHDELEDLPSPPPPLSPPPTTSPHKQTEDKGVQCEEEEEEKKDSGVASTEDSSSSHITAAAIAAKIPDSIISRGVQVLPRDTASLSTTPSESPRAQATSRLSTASCPTPKQIRRPDESKGVASRVGSLKARLPSCSSTYSVSEVQSRCSSKENILRASHSAVDITKVARRHRMSPFPLTSMDKAFITVLEMTPVLGTEIINYRDGMGRVLAQDVYAKDNLPPFPASVKDGYAVRAADGPGDRFIIGESQAGEQPTQTVMPGQVMRVTTGAPIPCGADAVVQVEDTELIRESDDGTEELEVRILVQARPGQDIRPIGHDIKRGECVLAKGTHMGPSEIGLLATVGVTEVEVNKFPVVAVMSTGNELLNPEDDLLPGKIRDSNRSTLLATIQEHGYPTINLGIVGDNPDDLLNALNEGISRADVIITSGGVSMGEKDYLKQVLDIDLHAQIHFGRVFMKPGLPTTFATLDIDGVRKIIFALPGNPVSAVVTCNLFVVPALRKMQGILDPRPTIIKARLSCDVKLDPRPEYHRCILTWHHQEPLPWAQSTGNQMSSRLMSMRSANGLLMLPPKTEQYVELHKGEVVDVMVIGRL

SEQ ID NO: 81970 - protein, 60 aa, Homo sapiens
MIRRPPAVVCYICGREYGTKSISIHEPQCLKKWHNENNLLPKELRRPVPKKPEVRTITDK

SEQ ID NO: 81971 - protein, 173 aa, Homo sapiens
MSFVRVNRCGPRVGVRKTPKVKKKKTSVKQEWDNTVTDLTVHRATPEDLVRRHEIHKSKNRALVHWELQEKALKRKWRKQKPETLNLEKRRLSIMKEILSDQYQMQDVLEKSDHLIAAAKELFPRRRTGFPNVTVAPDSSQGPIVVNQDPITQSIFNESVIEPQALNDVDGEE

SEQ ID NO: 81972 - protein, 58 aa, Homo sapiens
GNSGLKPKDNEFTSKPWHWPINYQRARVEFASLRAYASQGSMTQISESICLATRWFGG

SEQ ID NO: 81973 - protein, 121 aa, Homo sapiens
VVAASGAPRYFLPSKESACAILVDLLKLNVAPLAVFQMLKSMCAGQRLASEPQDPAAVSLPTSSVPETRGRNKGSAALGGALALAERSSREGSSQRMPRQPSATRLPKGGGPGKSPTRGST

SEQ ID NO: 81974 - protein, 155 aa, Homo sapiens
MAEKFDCHYCRDPLQGKKYVQKDGHHCCLKCFDKFCANTCVECRKPIGADSKEVHYKNRFWHDTCFRCAKCLHPLANETFVAKDNKILCNKCTTREDSPKCKGCFKAIVAGDQNVEYKGTVWHKDCFTCSNCKQVIGTGSFFPKGEDFYCVTCHE

SEQ ID NO: 81975 - protein, 59 aa, Homo sapiens
MKQVPTLKIDGITIHQSLAIIEYLEEMRPTPRLLPQDPKKRASVRMISDLIAGGIQPLQ

SEQ ID NO: 81976 - protein, 132 aa, Homo sapiens
MAHRGGERDFQTSARRMGTSLLFQLSVHERELDLVFLDHSYAKPWSAHPDASSARPTRMLFVTPRRQHESTIESDVPIDVETVTSTPMPLYDNQKARSVMNECERHVIFARTDADAPPPPEDWEEHVNRSQP

SEQ ID NO: 81977 - protein, 118 aa, Homo sapiens
MSSGTMKFNGYLRVRIGEAVGLQPTRWSLRHSLFKKGHQLLDPYLTVSVDQVRVGQTSTKQKTNKPTYNEEFCANVTDGGHLELAVFHETPLGYDHFVANCTLQFQELLRTTGASDTF

SEQ ID NO: 81978 - protein, 232 aa, Homo sapiens
MAATCEISNIFSNYFSAMYSSEDSTLASVPPAATFGADDLVLTLSNPQMSLEEKASWLGEQPQFWSKTQVLDWISYQVEKNKYDASAIDFSRCDMDGATLCNCALEELRLVFGPLGDQLHAQLRDLTSSSSDELSWIIELLEKDGMAFQEALDPGPFDQGSPFAQELLDDGQQASPYHPGSCGAGAPSPGSSDVSTAGTGASRSSHSSDSGGSDVDLDPTDGKLFPSDGFRD

SEQ ID NO: 81979 - protein, 272 aa, Homo sapiens
MELQDPKMNGALPSDAVGYRQEREGFLPSRGPAPGSKPVQFMDFEGKTSFGMSVFNLSNAIMGSGILGLAYAMAHTGVIFFLALLLCIALLSSYSIHLLLTCAGIAGIRAYEQLGQRAFGPAGKVVVATVICLHNVGAMSSYLFIIKSELPLVIGTFLYMDPEGDWFLKGNLLIIIVSVLIILPLALMKHLGYLGYTSGLSLTCMLFFLVSVIYKKFQLGCAIGHNETAMESEALVGLPSQGLNSSCEAQMFTVDSQMSYTVPIMAFAFVCH

SEQ ID NO: 81980 - protein, 78 aa, Homo sapiens
MDGAWRLASWGLRCMQCKTNGDCRVEECALGQDLCRTTIVRLWEEGEELELVEKSCTHSEKTNRTLSYRTGLKITSLT

SEQ ID NO: 81981 - protein, 83 aa, Homo sapiens
  MOD_RES (1)..(1): Any amino acid
XRIQFHQYLGKHKNLVQLEGCCTEKLPLYMVLEDVAQGDLLSFLWTCRRVSSRAEDVMTMDGLLYDLTEKQVYHIGKQVLLAL

SEQ ID NO: 81982 - protein, 49 aa, Homo sapiens
  MOD_RES (1)..(1): Any amino acid
XHENIVALYDVQSCSCRPGWSAMAQSQLIAPLPPEFKGFSCLSLLNSWD

SEQ ID NO: 81983 - protein, 150 aa, Homo sapiens
MEVAPEQPRWMAHPAVLNAQHPDSHHPGLAHNYMEPAQLLPPDEVDVFFNHLDSQGNPYYANPAHARARVSYSPAHARLTGGQMCRPHLLHSPGLPWLDGGKAALSAAAAHHHNPWTVSPFSKTPLHPSAAGGPGGPLSVYPGAGGGSGG

SEQ ID NO: 81984 - protein, 140 aa, Homo sapiens
MRLNQNTLLLGKKVVLVPYTSEHVPSRYHEWMKSEELQRLTASEPLTLEQEYAMQCSWQEDADKCTFIVLDAEKWQAQPGATEESCMVGDVNLFLTDLEDLTLGEIEVMIAEPSCRGKGLGTEAVLAMLSYGGDPQTDSE

SEQ ID NO: 81985 - protein, 55 aa, Homo sapiens
  MOD_RES (1)..(1): Any amino acid
XGGKSSYIKQVALITIMAQIGSYVPAEEATIGIVDGIFTSSWDFPTKWTTSYVRG

SEQ ID NO: 81986 - protein, 70 aa, Homo sapiens
MWVTVGLYLQEGHKVPQFHGKWPFSRFLFFQEPASAVASFLNGLASLVMLCRYRTFVPASSPMYHTCVAF

SEQ ID NO: 81987 - protein, 34 aa, Homo sapiens
MGGPRAWALLCLGLLLPGGGAAWSIGAAPFSGRR

SEQ ID NO: 81988 - protein, 1275 aa, Homo sapiens
MTSEEMTASVLIPVTQRKVVSAQSAADESSEKVSDINISKAHTVRRSGETSHTISQLNKLKEEPSGSNLPKILSIAREKIVSDENSNEKCWEKIMPDSAKNLNINCNNILRNHQHGLPQRQFYEMYNSVAEEDLCLETGIPSPLERKVFPGIQLELDRPSMGISPLGNQSVIIETGRAHPDSRRAVFHFHYEVDRRMSDTFCTLSENLILDDCGNCVPLPGGEEKQKKNYVAYTCKLMELAKNCDNKNEQLQCDHCDTLNDKYFCFEGSCEKVDMVYSGDSFCRKDFTDSQAAKTFLSHFEDFPDNCDDVEEDAFKSKKERSTLLVRRFCKNDREVKKSVYTGTRAIVRTLPSGHIGLTAWSYIDQKRNGPLLPCGRVMEPPSTVEIRQDGSQRLSEAQWYPIYNAVRREETENTVGSLLHFLTKLPASETAHGRISVGPCLKQCVRDTVCEYRATLQRTSISQYITGSLLEATTSLGARSGLLSTFGGSTGRMMLKERQPGPSVANSNALPSSSAGISKELIDLQPLIQFPEEVASILMEQEQTIYRRVLPVDYLCFLTRDLGTPECQSSLPCLKASISASILTTQNGEHNALEDLVMRFNEVSSWVTWLILTAGSMEEKREVFSYLVHVAKCCWNMGNYNAVMEFLAGLRSRKVLKMWQFMDQSDIETMRSLKDAMAQHESSCEYRKVVTRALHIPGCKVVPFCGVFLKELCEVLDGASGLMKLCPRYNSQEETLEFVADYSGQDNFLQRVGQNGLKNSEKESTVNSIFQVIRSCNRSLETDEEDSPSEGNSSRKSSLKDKSRWQFIIGDLLDSDNDIFEQSKEYDSHGSEDSQKAFDHGTELIPWYVLSIQADVHQFLLQGATVIHYDQDTHLSARCFLQLQPDNSTLTWVKPTTASPASSKAKLGVLNNTAEPGKFPLLGNAGLSSLTEGVLDLFAVKAVYMGHPGIDIHTVCVQNKLGSMFLSETGVTLLYGLQTTDNRLLHFVAPKHTAKMLFSGLLELTRAVRKMRKFPDQRQQWLRKQYVSLYQEDGRYEGPTLAHAVELFGGRRWSARNPSPGTSAKNAEKPNMQRNNTLGISTTKKKKKILMRGESGEVTDDEMATRKAKMHKECRSRSGSDPQDINEQEESEVNAIANPPNPLPSRRAHSLTTAGSPNLAAGTSSPIRPVSSPVLSSSNKSPSSAWSSSSWHGRIKGGMKGFQSFMVSDSNMSFVEFVELFKSFSVRSRKDLKDLFDVYAVPCNRSGSESAPLYTNLTIDENTSDLQPDLEVRA

SEQ ID NO: 81989 - protein, 83 aa, Homo sapiens
MSTDTGVSLPSYEEDQGSKLIRKAKEAPFVPVGIAGFAAIVAYGLYKLKSRGNTKMSIHLIHMRVAAQGFVVGAMTVGQDGSR

SEQ ID NO: 81990 - protein, 57 aa, Homo sapiens
MEPDGTYEPGFVVTTCCTPRKTRRTAFCSTRAGTVITSRRPTTAASMSTRSRTKWTN

SEQ ID NO: 81991 - protein, 42 aa, Homo sapiens
MNWHLPLFLLASVTLPSICSHFNPLSLEELGSNTGIQVFNQI

SEQ ID NO: 81992 - protein, 70 aa, Homo sapiens
MSPASSTTSLPVSPLTEEPVPFKDIMKDECSMLKLQLKEKDELISQLQEELLPKILCSMRGGFICLAVFL

SEQ ID NO: 81993 - protein, 594 aa, Homo sapiens
MGSILSRRIAGVEDIDIQANSAYRYPPKSGNYFASHFFMGGEKFDTPHPEGYLFGENMDLNFLGSRPVQFPYVTPAPHEPVKTLRSLVNIRKDSLRLVRYKDDADSPTEDGDKPRVLYSLEFTFDADARVAITIYCQASEEFLNGRAVYSPKSPSLQSETVHYKRGVSQQFSLPSFKIDFSEWKDDELNFDLDRGVFPVVIQAVVDEGDVVEVTGHAHVLLAAFEKHMDGSFSVKPLKQKQIVDRVSYLLQEIYGIENKNNQETKISWKVSQARFIMASGPRTTGAAPRGGSGAPGRASPQPREPSDDENSDNSNECVVCLSDLRDTLILPCRHLCLCTSCADTLRYQANNCPICRLPFRALLQIRAVRKKPGALSPVSFSPVLAQSLEHDEHSCPFKKSKPHPASLASKKPKRETNSDSVPPGYEPISLLEALNGLRAVSPAIPSAPLYEEITYSGISDGLSQASCPLAAIDHILDSSRQKGRPQSKAPDSTLRSPSSPIHEEDEEKLSEDVDAPPPLGGAELALRESSSPESFITEEVDESSSPQQGTRAASIENVLQDSSPEHCGRGPPADIYLPGRPTSMETAHGLATTS

SEQ ID NO: 81994 - protein, 167 aa, Homo sapiens
MLRVRCLRGGSRGAEAVHYIGSRANTYEKYWPFYQKQGGHYFPKDHLKKAVAEIEEMCNILKTEGVTVRRPDPIDWSLKYKTPDFESTGLYSAMPRDILIVVGNEIIEAPMAWRSRFFEYRAYRSIIKDYFHRGAKWTTAPKPTMADELYNQDYPIHSVEDRHKLAA

SEQ ID NO: 81995 - protein, 111 aa, Homo sapiens
  MOD_RES (1)..(1): Any amino acid
XEQVAEARAELRRARAEHKAQGDGKSRSVLEKKRRLLEKLQEQLAQLSVQATDKEENKQVALGTSKLNYLDPRISIAWCKRFRVPVEKIYSKTQRERFAWALAMAGEDFEF

SEQ ID NO: 81996 - protein, 223 aa, Homo sapiens
MAATAVAAAVAGTESAQGPPGPAASLELWLNKATDPSMSEQDWSAIQNFCEQVNTDPNGPTHAPWLLAHKIQSPQEKEALYALTVLEMCMNHCGEKFHSEVAKFRFLNELIKVLSPKYLGSWATGKVKGRVIEILFSWTVWFPEDIKIRDAYQMLKKQGIIKQDPKLPVDKILPPPSPWPKSSIFDADEEKSKLLTRLLKSNHPEDLQAAVLKVAVVYGITPF

SEQ ID NO: 81997 - protein, 203 aa, Homo sapiens
MAAAMPLALLVLLLLGPGGWCLAEPPRDSLREELVITPLPSGDVAATFQFRTRWDSELQREGVSHYRLFPKALGQLISKYSLRELHLSFTQGFWRTRYWGPPFLQAPSGAELWVWFQDTVTDVDKSWKELSNVLSGIFCASLNFIDSTNTVTPTASFKPLGLANDTDHYFLRYAVLPREVVCTENLTPWKKLLPCSSKASLCC

SEQ ID NO: 81998 - protein, 158 aa, Homo sapiens
MSSYQQKQTFTPPPQLQQQQVKQPSQPPPQEIFVPTTKEPCHSKVPQPGNTKIPEPGCTKVPEPGCTKVPEPGCTKVPEPGCTKVPEPGCTKVPEPGCTKVPEPGYTKVPEPGSIKVPDQGFIKFPEPGAIKVPEQGYTKVPVPGYTKLPEPCPSTVT

SEQ ID NO: 81999 - protein, 54 aa, Homo sapiens
MAAAAGRSLLLLLSSRGGGGGGAGGCGALTAGCFPGLGVSRHRQQQHHRTVLVM

SEQ ID NO: 82000 - protein, 120 aa, Homo sapiens
MTEVVPSSALSEVSLRLLCHDDIDTVKHLCGDWFPIEYPDSWYRDITSNKKFFSLAATYRGAIVGMIVAEIKNRTKIHKEDGDILASNFSVDTQVAYILSLGVVKEFRKHGIGSLLLESL

SEQ ID NO: 82001 - protein, 311 aa, Homo sapiens
  MOD_RES (1)..(1): Any amino acid
XPAVPLPDVELRLPPLYGDNLDQHFRLLAQKQSLPYLEAANLLLQAQLPPKPPAWAWAEGWTRYGPEGEAVPVAIPEERALVFDVEVCLAEGTCPTLAVAISPSAWYSWCSQRLVEERYSWTSQLSPADLIPLEVPTGASSPTQRDWQEQLVVGHNVSFDRAHIREQYLIQGSRMRFLDTMSMHMAISGLSSFQRSLWIAAKQGKHKVQPPTKQGQKSQRKARRGPAISSWDWLDISSVNSLAEVHRLYVGGPPLEKEPRELFVKGTMKDIRENFQVSPPSDSGRHAGDGCLLPACQPELGALPGRGTGHL

SEQ ID NO: 82002 - protein, 420 aa, Homo sapiens
MLAPSWEEHATCLANAEEQDMQRVLIDISEKEAVNLQQDAFVVIGRDTRPSSEKLSQSVIDGVTVLGGQFHDYGLLTTPQLHYMVYCRNTGGRYGKATIEGYYQKLSKAFVELTKQASCSGDEYRSLKVDCANGIGALKLREMEHYFSQGLSVQLFNDGSKGKLNHLCGADFVKSHQKPPQGMEIKSNERCCSFDGDADRIVYYYHDADGHFHLIDGDKIATLISSFLKELLVEIGESLNIGVVQTAYANGSSTRYLEEVMKVPVYCTKTGVKHLHHKAQEFDIGVYFEANGHGTALFSTAVEMKIKQSAEQLEDKKRKAAKMLENIIDLFNQVADRRVISTTDAERQAVTPPGLQEAINDLVKKYKLSRAFVRPSGTEDVVRVYAEADSQESADHLAHEVSLAVFQLAGGIGERPQPGF

SEQ ID NO: 82003 - protein, 75 aa, Homo sapiens
MAASQQQASAASSAAGVSGPSSAGGPGPQQQPQPPAQLVGPAQSGLLQQQQQDFDPVQRYKMLIPQLKESLQKEQ

SEQ ID NO: 82004 - protein, 44 aa, Homo sapiens
MPVTKLGRLVKDMKIKSLEEIYLFSLPIKESEIIDFFLGASLKD

SEQ ID NO: 82005 - protein, 370 aa, Homo sapiens
MGGCAGSRRRFSDSEGEETVPEPRLPLLDHQGAHWKNAVGFWLLGLCNNFSYVVMLSAAHDILSHKRTSGNQSHVDPGPTPIPHNSSSRFDCNSVSTAAVLLADILPTLVIKLLAPLGLHLLPYSPRVLVSGICAAGSFVLVAFSHSVGTSLCGVVFASISSGLGEVTFLSLTAFYPRAVISWWSSGTGGAGLLGALSYLGLTQAGLSPQQTLLSMLGIPALLLASYFLLLTSPEAQDPGGEEEAESAARQPLIRTEAPESKPGSSSSLSLRERWTVFKVRMMAGFELLFFWNTSLSHAQQYRWYQMLYQAGVFASRSSLRCCRIRFTWALALLQMESCSVTRLECSDAVSAHCSLRFWVQAILLPQPPK

SEQ ID NO: 82006 - protein, 131 aa, Homo sapiens
MNESKPGDSQNLACVFCRKHDDCPNKYGEKKTKEKWNLTVHYYCLLMSSGIWQRGKEEEGVYGFLIEDIRKEVNRASKLKCCVCKKNGASIGCVAPRCKRSYHFPCGLQRECIFQFTGNFASFCWDHRPVQ

SEQ ID NO: 82007 - protein, 477 aa, Homo sapiens
MAGVEEVAASGSHLNGDLDPDDREEGAASTAEEAAKKKRRKKKKSKGPSAGEQEPDKESGASVDEVARQLERSALEDKERDEDDEDGDGDGDGATGKKKKKKKKKRGPKVQTDPPSVPICDLYPNGVFPKGQECEYPPTQDGRTAAWRTTSEEKKALDQASEEIWNDFREAAEAHRQVRKYVMSWIKPGMTMIEICEKLEDCSRKLIKENGLNAGLAFPTGCSLNNCAAHYTPNAGDTTVLQYDDICKIDFGTHISGRIIDCAFTVTFNPKYDTLLKAVKDATNTGIKCAGIDVRLCDVGEAIQEVMESYEVEIDGKTYQVKPIRNLNGHSIGQYRIHAGKTVPIVKGGEATRMEEGEVYAIETFGSTGKGVVHDDMECSHYMKNFDVGHVPIRLPRTKHLLNVINENFGTLAFCRRWLDRLGESKYLMALKNLCDLGIVDPYPPLCDIKGSYTAQFEHTILLRPTCKEVVSRGDDY

SEQ ID NO: 82008 - protein, 70 aa, Homo sapiens
MKENYCLQAALVCLGMLCHSHAFAPERRGHLRPSFHGHHEKGKEGQVLQRSKRGWVWNQFFVIEEYTGPD

SEQ ID NO: 82009 - protein, 64 aa, Homo sapiens
ADSMLLALQLSMAENNKQSQLLDFLSGKQYAVGDETDLSIPTSPTSKYNRDNEKVLINCGHVFY

SEQ ID NO: 82010 - protein, 84 aa, Homo sapiens
MPSARGKSKSKAPITFGDLAIYFSQEEWEWLSPIQKDLYEDVMLENYRNLVSLGLSFRRPNVITLLEKGKAPWMVEPVRRRRAP

SEQ ID NO: 82011 - protein, 172 aa, Homo sapiens
  MOD_RES (1)..(1): Any amino acid
XSGDVLETFNFLENADDSDEDEENDMIEGIPEGKDKHRMNKHKIGNEGLAADLTDDPDTEEALKEFDFLVTAEDGEGAGEARSSGDGTEWDKDDLSPTAEVWDVDQGLISKLKEQYKKERKGKKGVKTEPITFPSGGGKSFIMGSDDVLLSVLGLGDLADLTVTNDADYSYD

SEQ ID NO: 82012 - protein, 242 aa, Homo sapiens
  MOD_RES (1)..(1): Any amino acid
XEGQHYNISPQDLETVFPHGLPPRFVMQVKTFSEACLMVRKPALELLHYLKNTSFAYPAIRYLLYGEKGTGKTLSLCHVIHFCAKQDWLILHIPDAHLWVKNCRDLLQSSYNKQRFDQPLEASTWLKNFKTTNERFLNQGITRVRNATDAVGIVLKELKRQSSLGMFHLLVAVDGINALWGRTTLKREDKSPIAPEELALVHNLRKMMKNDWHGGAIVSALSQTGSLFKPRKAYLPQELLGK

SEQ ID NO: 82013 - protein, 224 aa, Homo sapiens
MSWKKALRIPGGLRAATVTLMLSMLSTPVAEGRDSPEDFVYQFKGMCYFTNGTERVRLVSRSIYNREEIVRFDSDVGEFRAVTLLGLPAAEYWNSQKDILERKRAAVDRVCRHNYQLELRTTLQRRVEPTVTISPSRTEALNHHNLLVCSVTDFYPAQIKVRWFRNDQEETAGVVSTPLIRNGDWTFQILVMLEMTPQRGDVYTCHVEHPSLQSPITVEWRLLH

SEQ ID NO: 82014 - protein, 63 aa, Homo sapiens
MKVLSEGQLKLCVVQPVHLTSWLLIFFILKSISCLKPARLPIYQRKPFIAAWNAPTDQCLIKY

SEQ ID NO: 82015 - protein, 199 aa, Homo sapiens
MFEGHDTTASGLSWVLYHLAKHPEYQEQCRQEVQELLKDREPIEIEWDDLAQLPFLTMCIKESLRLHPPVPVISRCCTQDFVLPDGRVIPKGIVCLINIIGIHYNPTVWPDPEVYDPFRFDQENIKERSPLAFIPFSAGPRNCIGQAFAMAEMKVVLALTLLHFRILPTHTEPRRKPELILRAEGGLWLRVEPLGANSQ

SEQ ID NO: 82016 - protein, 9 aa, Homo sapiens
MAPKKLSCL

SEQ ID NO: 82017 - protein, 106 aa, Homo sapiens
MDELKKEVSMDDHKLSLDELHRKYGTDLSRGLTSARAAEILARDGPNALTPPPTTPEWIKFCRQLFGGFSMLLWIGAILCFLAYSIQAATEEEPQNDNLYLGVVLS

SEQ ID NO: 82018 - protein, 79 aa, Homo sapiens
MTMESGAENQQSGDAAVTEAENQQMTVQAQPQIATLAQVSMPAAHATSSAPTVTLVQLPNGQTVQVHGVIQAAQPSVIQ

SEQ ID NO: 82019 - protein, 223 aa, Homo sapiens
VEPLEQLDDEDGLPEKLAQKNPMYQKERETPPRFAQHGTFEYEYSQRWKSLDEMEKQQREQVEKNMKDAKDKLESEMEDAYHEHQANLLRQDLMRRQEELRRMEELHNQEMQKRKEMQLRQEEERRRREEEMMIRQREMEEQMRRQREESYSRMGYMDPRERDMRMGGGGAMNMGDPYGSGGQKFPPLGGGGGIGYEANPGVPPATMSGSMMGSDMVRMIDVG

SEQ ID NO: 82020 - protein, 249 aa, Homo sapiens
MSRQVVRSSKFRHVFGQPAKADQCYEDVRVSQTTWDSGFCAVNPKFVALICEASGGGAFLVLPLGKTGRVDKNAPTVCGHTAPVLDIAWCPHNDNVIASGSEDCTVMVWEIPDGGLMLPLREPVVTLEGHTKRVGIVAWHTTAQNVLLSAGCDNVIMVWDVGTGAAMLTLGPEVHPDTIYSVDWSRDGGLICTSCRDKRVRIIEPRKGTVVAEKDRPHEGTRPVRAVFVSEGKILTTGFSRMSERQVAL

SEQ ID NO: 82021 - protein, 242 aa, Homo sapiens
MPLRDKYCQTDHHHHGCCEPVYILEPGDPPLLQQPLQTSKSGIQQIIECFRSGTKQLKHILLKDVDTIFECKLCRSLFRGLPNLITHKKFYCPPSLQMDDNLPDVNDKQSQAINDLLEAIYPSVDKREYIIKLEPIETNQNAVFQYISRTDNPIEVTESSSTPEQTEVQIQETSTEQSKTVPVTDTEVETVEPPPVEIVTDEVAPTSDEQPQESQADLETSDNSDFGHQLICCLCRKEFNSR

SEQ ID NO: 82022 - protein, 218 aa, Homo sapiens
MAVNVYSTSVTSENLSRHDMLAWVNDSLHLNYTKIEQLCSGAAYCQFMDMLFPGCVHLRKVKFQAKLEHEYIHNFKVLQAAFKKMGVDKIIPVEKLVKGKFQDNFEFIQWFKKFFDANYDGKDYNPLLARQGQDVAPPPNPGDQIFNKSKKLIGTAVPQRTSPTGPKNMQTSGRLSNVAPPCILRKNPPSARNGGHETDAQILELNQQLVDLKLTVDG

SEQ ID NO: 82023 - protein, 113 aa, Homo sapiens
MGILEKISEIEKEIARTQKNKATEYHLGLLKAKLAKYRAQLLEPSKSASSKGEGFDVMKSGDARVALIGFPSVGKPKKGGGISFNSTVTLTQCSEKLVQLILHEYKIFNAEVL

SEQ ID NO: 82024 - protein, 84 aa, Homo sapiens
MLGAALRRCAVAATTRADPRGLLHSARTPGPAVAIQSVRCYSHGSQETDEEFDARWVTYFNKPDIDAWELRKDGLPQGFIDIAT

SEQ ID NO: 82025 - protein, 143 aa, Homo sapiens
MLPAGEIGASPAAPCCSESGDERKNLEEKKKEVGNDLKSLKKLDKLIEQRTVSKMQLEEQVLTISSEIPKRIRSALKNAEESKQFLNQFLEQETHLFSAINSHLLTAQPWMDDLGTMISQIEEIERHLAYLKWISQIEELSDN

SEQ ID NO: 82026 - protein, 90 aa, Homo sapiens
  MOD_RES (1)..(1): Any amino acid
XREKVIQDKTNSNIEFLLEQEKMLKANCVREEEKAAELQLKSKLFSFGEFNSDAQEILIDSLSKKITQVYKVCIGDAEDDGLNPIQKLVS

SEQ ID NO: 82027 - protein, 114 aa, Homo sapiens
  MOD_RES (1)..(1): Any amino acid
XDVAVNSDFYRRMQNSDFLRELVITIAREGLEDKYNLQLNPEWRMMKNRPFMGSISQQNIRSEQRPRIQELGDLYTPAPGRAESGPEKPHLNLWLEAPDLLLAEVDLPKLTLQI

SEQ ID NO: 82028 - protein, 148 aa, Homo sapiens
GGDSGLEAQYTCPICLEVYHRPVAIGSCGHTFCGECLQPCLQVPSPLCPLCRLPFDPKKVDKATHVEKQLSSYKAPCRGCNKKVTLAKMRVHISSCLKVQEQMANCPKFVPVVPTSQPIPSGGRAWGPGQGPAWRAGQHVNILFCSWH

SEQ ID NO: 82029 - protein, 32 aa, Homo sapiens
  MOD_RES (1)..(1): Any amino acid
XSFVHMEHEKAVLLLKSFQNTVDLVIQRKHLL

SEQ ID NO: 82030 - protein, 58 aa, Homo sapiens
GLNLKRLETVQGGREGTAYGSAPVPSRRQLCYISKSNCEPKSQHKGQKSNTYSHRGPF

SEQ ID NO: 82031 - protein, 148 aa, Homo sapiens
MTMYLWLKLLAFGFAFLDTEVFVTGQSPTPSPTDAYLNASETTTLSPSGSAVISTTTIATTPSKPTCDEKYANITVDYLYNKETKLFTAKLNVNENVECGNNTCTNNEVHNLTECKNASVSISHNSCTAPDKTLILDVPPGVEKFQLH

SEQ ID NO: 82032 - protein, 30 aa, Homo sapiens
VVLPAVVEELLSEMAAAVQESARSTGPRSS

SEQ ID NO: 82033 - protein, 241 aa, Homo sapiens
MQRADSEQPSKRPRCDDSPRTPSNTPSAEADWSPGLELHPDYKTWGPEQVCSFLRRGGFEEPVLLKNIRENEITGALLPCLDESRFENLGVSSLGERKKLLSYIQRLVQIHVDTMKVINDPIHGHIELHPLLVRIIDTPQFQRLRYIKQLGGGYYVFPGASHNRFEHSLGVGYLAGCLVHALGEKQPELQISERDVLCVQIAGLCHDLDGVSLCCPGWSAMVMGHFLTCLMDDLFHLLARR

SEQ ID NO: 82034 - protein, 460 aa, Homo sapiens
MKKGSQQKIFSKAKIPSSSHSPIPSSMSNMRSRSLSPLIGSETLPFHSGGQWCEQVEIADENNMLLDYQDHKGADSHAGVRYITEALIKKLTKQDNLALIKSLNLSLSKDGGKKFKYIENLEKCVKLEVLNLSYNLIGKIEKLDKLLKLRELNLSYNKISKIEGIENMCNLQKLNLAGNEIEHIPVWLGKKLKSLRVLNLKGNKISSLQDISKLKPLQDLISLILVENPVVTLPHYLQFTIFHLRSLESLEGQPVTTQDRQEAFERFSLEEVERLERDLEKKMIETEELKSKQTRFLEEIKNQDKLNKSLKEEAMLQKQSCEELKSDLNTKNELLKQKTIELTRACQKQYELEQELAFYKIDAKFEPLNYYPSEYAEIDKAPDESPYIGKSRYKRNMFATESYIIDSAQAVQIKKMEPDEQLRNDHMNLRGHTPLDTQLEDKEKKISAAQTRLSELHDEI

SEQ ID NO: 82035 - protein, 108 aa, Homo sapiens
MTVMEAQESPLFNNVKLQRKLPVESIQIVLEELRKKGNLEWLDKSKSSFLIMWRRPEEWGKLIYQWVSRSGQNNSVFTLYELTNGEDTEDEEFHGLDEATLLRALQAL

SEQ ID NO: 82036 - protein, 38 aa, Homo sapiens
MPAGPVQAVPPPPPVPTEPKQPLVRRSVRRRSRSQRKR

SEQ ID NO: 82037 - protein, 121 aa, Homo sapiens
MTPNSMTENGLTAWDKPKHCPDREHDWKLVGMSEACLHRKSHSERRSTLKNEQSSPHLIQTTWTSSIFHLDHDDVNDQSVSSAQTFQTEEKKCKGYIPSYLDKDELCVVCGDKATGYHYRC

SEQ ID NO: 82038 - protein, 79 aa, Homo sapiens
  MOD_RES (1)..(1): Any amino acid
XFASDPATCPIIPGCETTIEISKGRTGLGLSIVGGSDTLLGAIIIHEVYEEGAACKDGRLWAGDQILESVSHFCTGEWN

SEQ ID NO: 82039 - protein, 1081 aa, Homo sapiens
MLESRKAIAPSRRKAELTGIKWRRYNFGGHGDCGPIISAPAQDDPILLSFIRCLQANLLCVWRRDVKPDCKELWIFWWGDEPNLVGVIHHELQVVEEGLWENGLSYECRTLLFKAIHNLLERCLMDKNFVRIGKWFVRPYEKDEKPVNKSEHLSCAFTFFLHGESNVCTSVEIAQHQPIYLINEEHIHMAQSSPAPFQVLVSPYGLNGTLTGQAYKMSDPATRKLIEEWQYFYPMVLKKKEESKEEDELGYDDDFPVAVEVIVGGVRMVYPSAFVLISQNDIPVPQSVASAGGHIAVGQQGLGSVKDPSNCGMPLTPPTSPEQAILGESGGMQSAASHLVSQDGGMITMHSPKRSGKIPPKLHNHMVHRVWKECILNRTQSKRSQMSTPTLEEEPASNPATWDFVDPTQRVSCSCSRHKLLKRCAVGPNRPPTVSQPGFSAGPSSSSSLPPPASSKHKTAERQEKGDKLQKRPLIPFHHRPSVAEELCMEQDTPGQKLGLAGIDSSLEVSSSRKYDKQMAVPSRNTSKQMNLNPMDSPHSPISPLPPTLSPQPRGQETESLDPPSVPVNPALYGNGLELQQLSTLDDRTVLVGQRLPLMAEVSETALYCGIRPSNPESSEKWWHSYRLPPSDDAEFRPPELQGERCDAKMEVNSESTALQRLLAQPNKRFKIWQDKQPQLQPLHFLDPLPLSQQPGDSLGEVNDPYTFEDGDIKYIFTANKKCKQGTEKDSLKKNKSEDGFGTKDVTTPGHSTPVPDGKNAMSIFSSATKTDVRQDNAAGRAGSSSLTQVTDLAPSLHDLDNIFDNSDDDELGAVSPALRSSKMPAVGTEDRPLGKDGRAAVPYPPTVADLQRMFPTPPSLEQHPAFSPVMNYKDGISSETVTALGMMESPMVSMVSTQLTEFKMEVEDGLGSPKPEEIKDFSYVHKVPSFQPFVGSSMFAPLKMLPSHCLLPLKIPDACLFRPSWAIPPKIEQLPMPPAATFIRDGYNNVPSVGSLADPDYLNTPQMNTPVTLNSAAPASNSGAGVLPSPATPRFSVPTPRTPRTPRTPRGGGTASGQGSVKYDSTDQGSPASTPSTTRP

SEQ ID NO: 82040 - protein, 97 aa, Homo sapiens
MGRPRPRAAKTWMFLLLLGGAWAGHSRAQEDKVLGGHECQPHSQPWQAALFQGQQLLCGGVLVGGNWVLTAAHCKKPKYTVRLGDHSLQNKDGPEQE

SEQ ID NO: 82041 - protein, 131 aa, Homo sapiens
MAMSQESLTFKDVFVDFTLEEWQQLDSAQKNLYRDVMLENYSHLVSVGYLVAKPDVIFRLGPGEESWMADGGTPVRTCAGEDRPGESGRGKETRLVGESLASGMCSGALLRASDLWTCLGSDEQNCCHVQM

SEQ ID NO: 82042 - protein, 181 aa, Homo sapiens
MTATLRPYLSAVRATLQAALCLENFSSQVVERHNKPEVEVRSSKELLLQPVTISRNEKEKVLIEGSINSVRVSIAVKQADEIEKILCHKFMRFMMMRAENFFILRRKPVEGYDISFLITNFHTEQMYKHKLVDFVIHFMEEIDKEISEMKLSVNARARIVAEEFLKNVSRSSGEDPPRRLT

SEQ ID NO: 82043 - protein, 243 aa, Homo sapiens
MERAFQTALWLLQPEVVFILGDIFDEGKWSTPEAWADDVERFQKMFRHPSHVQLKVVAGNHDIGFHYEMNTYKVERFEKVFSSERLFSWKGINFVMVNSVALNGDGCGICSETEAELIEVSHRLNCSREARGSSRCGPGPLLPTSAPVLLQHYPLYRRSDANCSGEDAAPAEERDIPFKENYDVLSREASQKLLWWLQPRLVLSGHTHSACEVHHGGRVPELSVPSFSWRNRNNPSFIMGTDA

SEQ ID NO: 82044 - protein, 231 aa, Homo sapiens
MEGDGSDPEPPDAGEDSKSENGENAPIYCICRKPDINCFMIGCDNCNEWFHGDCIRITEKMAKAIREWYCRECREKDPKLEIRYRHKKSRERDGNERDSSEPRDEGGGRKRPVPDPDLQRRAGSGTGVGAMLARGSASPHKSSPQPLVATPSQHHQQQQQQIKRSARMCGECEACRRTEDCGHCDFCRDMKKFGGPNKIRQKCRLRQCQLRARESYKYFPSSLSPVTPSES

SEQ ID NO: 82045 - protein, 1069 aa, Homo sapiens
MSYNYVVTAQKPTAVNGCVTGHFTSAEDLNLLIAKNTRLEIYVVTAEGLRPVKEVGMYGKIAVMELFRPKGESKDLLFILTAKYNACILEYKQSGESIDIITRAHGNVQDRIGRPSETGIIGIIDPECRMIGLRLYDGLFKVIPLDRDNKELKAFNIRLEELHVIDVKFLYGCQAPTICFVYQQSTIVCHNRVDPNGSRYLLGDMEGRLFMLLLEKEEQMDGTVTLKDLRVELLGETSIAECLTYLDNGVVFVGSRLGDSQLVKLNVDSNEQGSYVVAMETFTNLGPIVDMCVVDLERQGQGQLVTCSGAFKEGSLRIIRNGIGIHEHASIDLPGIKGLWPLRSDPNRETDDTLVLSFVGQTRVLMLNGEEVEETELMGFVDDQQTFFCGNVAHQQLIQITSASVRLVSQEPKALVSEWKEPQAKNISVASCNSSQVVVAVGRALYYLQIHPQELRQISHTEMEHEVACLDITPLGDSNGLSPLCAIGLWTDISARILKLPSFELLHKEMLGGEIIPRSILMTTFESSHYLLCALGDGALFYFGLNIETGLLSDRKKVTLGTQPTVLRTFRSLSTTNVFACSDRPTVIYSSNHKLVFSNVNLKEVNYMCPLNSDGYPDSLALANNSTLTIGTIDEIQKLHIRTVPLYESPRKICYQEVSQCFGVLSSRIEVQDTSGGTTALRPSASTQALSSSVSSSKLFSSSTAPHETSFGEEVEVHNLLIIDQHTFEVLHAHQFLQNEYALSLVSCKLGKDPNTYFIVGTAMVYPEEAEPKQGRIVVFQYSDGKLQTVAEKEVKGAVYSMVEFNGKLLASINSTVRLYEWTTEKELRTECNHYNNIMALYLKTKGDFILVGDLMRSVLLLAYKPMEGNFEEIARDFNPNWMSAVEILDDDNFLGAENAFNLFVCQKDSAATTDEERQHLQEVGLFHLGEFVNVFCHGSLVMQNLGETSTPTQGSVLFGTVNGMIGLVTSLSESWYNLLLDMQNRLNKVIKSVGKIEHSFWRSFHTERKTEPATGFIDGDLIESFLDISRPKMQEVVANLQYDDGSGMKREATADDLIKVVEELTRIH

SEQ ID NO: 82046 - protein, 51 aa, Homo sapiens
EKGQLVPLETVLDMLRDAMVAKVNTSKGFLIDGYPREVQQGEEFERRALRP

SEQ ID NO: 82047 - protein, 143 aa, Homo sapiens
MDQLEKRSRASGSSAGSMKHKRLSRHSTASHSSSHTSGIEADTKPRDTGPEDSYSSSAIHRKLKTCSSMTSHGSSHTSGVESGGKDRLEEDLQDDEMLVDDPRDLEQMNEESLEVSPDMCIYITEDMLMSRKLNGHSGLIVKE

SEQ ID NO: 82048 - protein, 849 aa, Homo sapiens
MIFWSFVAGVVTFYCSLGPDSLLPNIFFTIKYKPKLGLQELFPQGHSCAVCGKVKCKRHRPSLLLENYQPWLDLKISSKVDASLSEVDIPSIITKKLLKAAMKHIEVIVKARQKVKNTEFLQQAALEEYGPELHVALRSRRDELHYLRKLTELLFPYILPPKATDCRSLTLLIREILSGSVFLPSLDFLADPDTVNHLLIIFIDDSPPEKATEPASPLVPFLQKFAEPRNKKPSVLKLELKQIREQQDLLFRFMNFLKQEGAVHVLQFCLTVEEFNDRILRPELSNDEMLSLHEELQKIYKTYCLDESIDKIRFDPFIVEEIQRIAEGPYIDVVKLQTMRCLFEAYEHVLSLLENVFTPMFCHSDEYFRQLLRGAESPTRNSKLNRGSLSLDDFRNTQKRGESFGISRIGSKIKGVFKSTTMEGAMLPNYGVAEGEDDFIEEGIVVMEDDSPVEAVSTPNTPRNLAAWKISIPYVDFFEDPSSERKEKKERIPVFCIDVERNDRRAVGHEPEHWSVYRRYLEFYVLESKLTEFHGAFPDAQLPSKRIIGPKNYEFLKSKREEFQEYLQKLLQHPELSNSQLLADFLSPNGGETQFLDKILPDVNLGKIIKSVPGKLMKEKGQHLEPFIMNFINSCESPKPKPSRPELTILSPTSENNKKLFNDLFKNNANRAENTERKQNQNYFMEVMTVEGVYDYLMYVGRVVFQVPDWLHHLLMGTRILFKNTLEMYTDYYLQCKLEQLFQEHRLVSLITLLRDAIFCENTEPRSLQDKQKGAKQTFEEMMNYIPDLLVKCIGEETKYESIRLLFDGLQQPVLNKQLTYVLLDIVIQELFPELNKVQKEVTSVTSWM

SEQ ID NO: 82049 - protein, 910 aa, Homo sapiens
  MOD_RES (1)..(1): Any amino acid
XNQYRRSKDSRGRGLSRGRGRGSRGRGKGMGRGRGRGGSRGGMNKGGMNDDEDFYDEDMGDGGGGSYRSRDHDKPHQQSDKKGKVICKYFVEGRCTWGDHCNFSHDIELPKKRELCKFYITGFCARAENCPYMHGDFPCKLYHTTGNCINGDDCMFSHDPLTEETRELLDKMLADDAEAGAEDEKEVEELKKQGINPLPKPPPGVGLLPTPPRPPGPQAPTSPNGRPMQGGPPPPPPPPPPPPGPPQMPMPVHEPLSPQQLQQQDMYNKKIPSLFEIVVRPTGQLAEKLGVRFPGPGGPPGPMGPGPNMGPPGPMGGPMHPDMHPDMHPDMHPDMHADMHADMPMGPGMNPGPPMGPGGPPMMPYGPGDSPHSGMMPPIPPAQNFYENFYQQQEGMEMEPGLLGDAGDTGNWYSSDEDEGGSSVTSILKTLRQQTSSRPPASVGELSSSGLGDPRLQKGHPTGSRLADPRLSRDPRLTRHVEASGGSGPGDSGPSDPRLARALPTSKPEGSLHSSPVGPSSSKGSGPPPTEEEEGERALREKAVNIPLDPLPGHPLRDPRSQLQQFSHIKKDVTLSKPSFARTVLWNPEDLIPLPIPKQDAVPPVPAALQSMPTLDPRLHRAATAGPPNARQRPGASTDSSTQGANLPDFELLSRILKTVNATGSSAAPGSSDKPSDPRVRKAPTDPRLQKPTDSTASSRAAKPGPAEAPSPTASPSGDASPPATAPYDPRVLAAGGLGQGGGGGQSSVLSGISLYDPRTPNAGGKATEPAADTGAQPKGAEGNGKSSASKAKEPPFVRKSALEQPETGKAGADGGTPTDRYNSYNRPRPKAAAAPAATTATPPPEGAPPQPGVHNLPVPTLFGTVKQTPKTGSGSPFAGNSPAREGEQDAASLKDVFKGFDPTASPFCQ

SEQ ID NO: 82050 - protein, 163 aa, Homo sapiens
MKPSGEDQAALAAGPWEECFQAAVQLALRAGQIIRKALTEEKRVSTKTSAADLVTETDHLVEDLIISELRERFPSHRFIAEEAAASGAKCVLTHSPTWIIDPIDGTCNFVHRFPTVAVSIGFAVRQEVRVWPRSPGPLPGLPLAILPFWLQPLCAWFAVCPVP

SEQ ID NO: 82051 - protein, 2941 aa, Homo sapiens
MSEPGGGGGEDGSAGLEVSAVQNVADVSVLQKHLRKLVPLLLEDGGEAPAALEAALEEKSALEQMRKFLSDPQVHTVLVERSTLKEDVGDEGEEEKEFISYNINIDIHYGVKSNSLAFIKRTPVIDADKPVSSQLRVLTLSEDSPYETLHSFISNAVAPFFKSYIRESGKADRDGDKMAPSVEKKIAELEMGLLHLQQNIEIPEISLPIHPMITNVAKQCYERGEKPKVTDFGDKVEDPTFLNQLQSGVNRWIREIQKVTKLDRDPASGTALQEISFWLNLERALYRIQEKRESPEVLLTLDILKHGKRFHATVSFDTDTGLKQALETVNDYNPLMKDFPLNDLLSATELDKIRQALVAIFTHLRKIRNTKYPIQRALRLVEAISRDLSSQLLKVLGTRKLMHVAYEEFEKVMVACFEVFQTWDDEYEKLQVLLRDIVKRKREENLKMVWRINPAHRKLQARLDQMRKFRRQHEQLRAVIVRVLRPQVTAVAQQNQGEVPEPQDMKVAEVLFDAADANAIEEVNLAYENVKEVDGLDVSKEGTEAWEAAMKRYDERIDRVETRITARLRDQLGTAKNANEMFRIFSRFNALFVRPHIRGAIREYQTQLIQRVKDDIESLHDKFKVQYPQSQACKMSHVRDLPPVSGSIIWAKQIDRQLTAYMKRVEDVLGKGWENHVEGQKLKQDGDSFRMKLNTQEIFDDWARKVQQRNLGVSGRIFTIESTRVRGRTGNVLKLKVNFLPEIITLSKEVRNLKWLGFRVPLAIVNKAHQANQLYPFAISLIESVRTYERTCEKVEERNTISLLVAGLKKEVQALIAEGIALVWESYKLDPYVQRLAETVFNFQEKVDDLLIIEEKIDLEVRSLETCMYDHKTFSEILNRVQKAVDDLNLHSYSNLPIWVNKLDMEIERILGVRLQAGLRAWTQVLLGQAEDKAEVDMDTDAPQVSHKPGGEPKIKNVVHELRITNQVIYLNPPIEECRYKLYQEMFAWKMVVLSLPRIQSQRYQVGVHYELTEEEKFYRNALTRMPDGPVALEESYSAVMGIVSEVEQYVKVWLQYQCLWDMQAENIYNRLGEDLNKWQALLVQIRKARGTFDNAETKKEFGPVVIDYGKVQSKVNLKYDSWHKEVLSKFGQMLGSNMTEFHSQISKSRQELEQHSVDTASTSDAVTFITYVQSLKRKIKQFEKQVELYRNGQRLLEKQRFQFPPSWLYIDNIEGEWGAFNDIMRRKDSAIQQQVANLQMKIVQEDRAVESRTTDLLTDWEKTKPVTGNLRPEEALQALTIYEGKFGRLKDDREKCAKAKEALELTDTGLLSGSEERVQVALEELQDLKGVWSELSKVWEQIDQMKEQPWVSVQPRKLRQNLDALLNQLKSFPARLRQYASYEFVQRLLKGYMKINMLVIELKSEALKDRHWKQLMKRLHVNWVVSELTLGQIWDVDLQKNEAIVKDVLLVAQGEMALEEFLKQIREVWNTYELDLVNYQNKCRLIRGWDDLFNKVKEHINSVSAMKLSPYYKVFEEDALSWEDKLNRIMALFDVWIDVQRRWVYLEGIFTGSADIKHLLPVETQRFQSISTEFLALMKKVSKSPLVMDVLNIQGVQRSLERLADLLGKIQKALGEYLERERSSFPRFYFVGDEDLLEIIGNSKNVAKLQKHFKKMFAGVSSIILNEDNSVVLGISSREGEEVMFKTPVSITEHPKINEWLTLVEKEMRVTLAKLLAESVTEVEIFGKATSIDPNTYITWIDKYQAQLVVLSAQIAWSENVETALSSMGGGGDAAPLHSVLSNVEVTLNVLADSVLMEQPPLRRRKLEHLITELVHQRDVTRSLIKSKIDNAKSFEWLSQMRFYFDPKQTDVLQQLSIQMANAKFNYGFEYLGVQDKLVQTPLTDRCYLTMTQALEARLGGSPFGPAGTGKTESVKALGHQLGRFVLVFNCDETFDFQAMGRIFVGLCQVGAWGCFDEFNRLEERMLSAVSQQVQCIQEALREHSNPNYDKTSAPITCELLNKQVKVSPDMAIFITMNPGYAGRSNLPDNLKKLFRSLAMTKPDRQLIAQVMLYSQGFRTAEVLANKIVPFFKLCDEQLSSQSHYDFGLRALKSVLVSAGNVKRERIQKIKREKEERGEAVDEGEIAENLPEQEILIQSVCETMVPKLVAEDIPLLFSLLSDVFPGVQYHRGEMTALREELKKVCQEMYLTYGDGEEVGGMWVEKVLQLYQITQINHGLMMVGPSGSGKSMAWRVLLKALERLEGVEGVAHIIDPKAISKDHLYGTLDPNTREWTDGLFTHVLRKIIDSVRGELQKRQWIVFDGDVDPEWVENLNSVLDDNKLLTLPNGERLSLPPNVRIMFEVQDLKYATLATVSRCGMVWFSEDVLSTDMIFNNFLARLRSIPLDEGEDEAQRRRKGKEDEGEEAASPMLQIQRDAATIMQPYFTSNGLVTKALEHAFQLEHIMDLTRLRCLGSLFSMLHQACRNVAQYNANHPDFPMQIEQLERYIQRYLVYAILWSLSGDSRLKMRAELGEYIRRITTVPLPTAPNIPIIDYEVSISGEWSPWQAKVPQIEVETHKVAAPDVVVPTLDTVRHEALLYTWLAEHKPLVLCGPPGSGKTMTLFSALRALPDMEVVGLNFSSATTPELLLKTFDHYCEYRRTPNGVVLAPVQLGKWLVLFCDEINLPDMDKYGTQRVISFIRQMVEHGGFYRTSDQTWVKLERIQFVGACNPPTDPGRKPLSHRFLRHVPVVYVDYPGPASLTQIYGTFNRAMLRLIPSLRTYAEPLTAAMVEFYTMSQERFTQDTQPHYIYSPREMTRWVRGIFEALRPLETLPVEGLIRIWAHEALRLFQDRLVEDEERRWTDENIDTVALKHFPNIDREKAMSRPILYSNWLSKDYIPVDQEELRDYVKARLKVFYEEELDVPLVLFNEVLDHVLRIDRSIGSTQGKTLMKIYGQC

SEQ ID NO: 82052 - protein, 73 aa, Homo sapiens
SGVSFHIQIGLTREFVLLPAASELAHVKQLACSIVDQKPRPPSRTSRSARTPSRCTPIGRLPSVITAGRCSSA

SEQ ID NO: 82053 - protein, 134 aa, Homo sapiens
MEAPLQTGMVLGVMIGAGVAVVVTAVLILLVVRRLRVPKTPAPDGPRYRFRKRDKVLFYGRKIMRKVSQSTSSLVDTSVSATSRPRMRKKLKMLNIAKKILRIQKETPTLQRKEPPPAVLEADLTEGDLANSHL

SEQ ID NO: 82054 - protein, 136 aa, Homo sapiens
MALPEEAKIKDAYHMLKRQGIVQSDPPIPVDRTLIPSPPPRPKNPVFDDEEKSKLLAKLLKSKNPDDLQEANKLIKSMVKEDEARIQKVTKRLHTLEEVNNNVRLLSEMLLHYSQEDSSDGDRELMKELFDQCENK

SEQ ID NO: 82055 - protein, 121 aa, Homo sapiens
MGGCFSKPKPVELKIEVVLPEKERGKEELSASGKGSPRAYQGNGTARHFHTEERLSTPHPYPSPQDCVEAAVCHVKDLENGQRSVPWSGALPLARRLLQHQHWGPGGLPWPGQSTQVPGED

SEQ ID NO: 82056 - protein, 440 aa, Homo sapiens
MGCDGRVSGLLRRNLQPTLTYWSVFFSFGLCIAFLGPTLLDLRCQTHSSLPQISWVFFSQQLCLLLGSALGGVFKRTLAQSLWALFTSSLAISLVFAVIPFCRDVKVLASVMALAGLAMGCIDTVANMQLVRMYQKDSAVFLQVLHFFVGFGALLSPLIADPFLSEANCLPANSTANTTSRGHLFHVSRVLGQHHVDAKPWSNQTFPGLTPKDGAGTRVSYAFWIMALINLPVPMAVLMLLSKERLLTCCPQRRPLLLSADELALETQPPEKEDASSLPPKFQSHLGHEDLFSCCQRKNLRGAPYSFFAIHITGALVLFMTDGLTGAYSAFVYSYAVEKPLSVGHKVAGYLPSLFWGFITLGRLLSIPISSRMKPATMVFINVVGVVVTFLVLLIFSYNVVFLFVGTASLGLFLSSTFPSMLAYTEDSLQYKDIPGSGQL

SEQ ID NO: 82057 - protein, 110 aa, Homo sapiens
MWQLWASLCCLLVLANARSRPSFHPLSDELVNYVNKRNTTWQAGHNFYNVDMSYLKRLCGTFLGGPKPPQRVMFTEDLKLPASFDAREQWPQCPTIKEIRDQGSCGSCWL

SEQ ID NO: 82058 - protein, 124 aa, Homo sapiens
KSCAARQCCNRYSSRRKQLTFHRFPFSRPELLKEWVLNIGRGNFKPKQHTVICSEHFRPECFSAFGNRKNLKHNAVPTVFAFQDPTQNLHEGRGCLPCFRPHTQDAAWHSPGARAGEGEHRPCQ

SEQ ID NO: 82059 - protein, 62 aa, Homo sapiens
MRKSQERSMSYSDESRLSNLLRRITREDDRDRRLATVKQLKEFIQQPENKLVLVKQLDNILA

SEQ ID NO: 82060 - protein, 42 aa, Homo sapiens
MDNKISPEAQVAELELDAVIGFNGPVLLKLFLVNKLPTQAKQ

SEQ ID NO: 82061 - protein, 102 aa, Homo sapiens
  MOD_RES (1)..(1): Any amino acid
XPYELPPHSPFLDDSPEYGLHGYQLHVDLHSGGVFYLCGTFRNLFTKRGNIENGHVKLIVIHLKNNREHLPLIGKVGLSWKTDIFDGCIKFPGVPEIACHTL

SEQ ID NO: 82062 - protein, 474 aa, Homo sapiens
MAGPQPLALQLEQLLNPRPSEADPEADPEEATAARVIDRFDEGEDGEGDFLVVGSIRKLASASLLDTDKRYCGKTTSRKAWNEDHWEQTLPGSSDEEISDEEGSGDEDSEGLGLEEYDEDDLGAAEEQECGDHRESKKSRSHSAKTPGFSVQSISDFEKFTKGMDDLGSSEEEEDEESGMEEGDDAEDSQGESEEDRAGDRNSEDDGVVMTFSSVKVSEEVEKGRAVKNQIALWDQLLEGRIKLQKALLTTNQLPQPDVFPLFKDKGGPEFSSALKNSHKALKALLRSLVGLQEELLFQYPDTRYLVDGTKPNAGSEEISSEDDELVEEKKQQRRRVPAKRKLEMEDYPSFMAKRFADFTVYRNRTLQKWHDKTKLASGKLGKGFGAFERSILTQIDHILMDKERLLRRTQTKRSVYRVLGKPEPAAQPVPESLPGEPEILPQAPANAHLKDLDEEIFDDDDFYHQNLLKYWTE

SEQ ID NO: 82063 - protein, 148 aa, Homo sapiens
MPVAATNSETAMQQVLDNLGSLPSATGAAELDLIFLRGIMESPIVRSLAKAHERLEETKLEAVRDNNLELVQEILRDLAQLAEQSSTAAELAHILQEPHFQSLLETHDSVASKTYETPPPSPGLDPTFSNQPVPPDAVRMVGIRKTAG

SEQ ID NO: 82064 - protein, 189 aa, Homo sapiens
MDSRDSSFGQNDSPTVLPITTREANNSLISQNIPGPLTQTQTLSAEQFHLVDQNGQAIQYELQSLGESNAQMMIVASPTENGQVLRVIPPTQTGMAQVIIPQGQLVDVNSPRDVPEEKPSNRNLPTVRVDTLADNTSNYILHPQTSFPLPKKSVTGMLEEPLLGPLQPLSSNTPIWACRLRSCEGVELW

SEQ ID NO: 82065 - protein, 87 aa, Homo sapiens
ERDVVCGPSPADLSPGASSVTPPAPAREPGHSPQIISFFLALTSTALLFLLFFLTLRFSVVKRGRKKLLYIFKQHGSSGDTFTILES

SEQ ID NO: 82066 - protein, 99 aa, Homo sapiens
MQTAGALFISPALIRCCTRGLIRPVSASFLNSPVNSSKQPSYSNFPLQVARREFQTSVVSRDIDTAAKFIGAGAATVGVAGSGAGIGTVFGSLIIGYAR

SEQ ID NO: 82067 - protein, 219 aa, Homo sapiens
  MOD_RES (1)..(1): Any amino acid
XRFVTVWKQSIPSTSQKCKHPEDSENNFFEGFPSRYWLPAFFFPQAFLAAVLQDYGRSRGIAVDALTFTHHVISNTTDKDEKFSVFMPKKLNIVRRAFKGSASSHTGVYIFGLFIEGARWNREQKILEDSLPLEMCCDFPDIYFLPTKISTKTPNASNQTDSELYAFECPVYQTPERSRILATTGLPTNFLTSVYLSTKKPPSHWITMRVALLCEKNEK

SEQ ID NO: 82068 - protein, 142 aa, Homo sapiens
  MOD_RES (1)..(1): Any amino acid
XCGTAFDFHKEIDYMFLVGTEEGKIYKCSKSYSSQFLDTYDAHNMSVDTVSWNPYHTKVFMSCSSDWTVKIWDHTIKTPMFIYDLNSAVGDVAWAPYSSTVFAAVTTDGKEKKGQEVQKGPAVEIAKLDKLLNLVREVKIKT

SEQ ID NO: 82069 - protein, 83 aa, Homo sapiens
MEICDIINETEEGPKDAIRALKKRLNGNRNYREVMLALTVLETCVKNCGHRFHILVANRDFIDSVLVKIISPKNNPPTIVQDK

SEQ ID NO: 82070 - protein, 105 aa, Homo sapiens
MDVRRLKVNELREELQRRGLDTRGLKAELAERLQAALEAEEPDDERELDADDEPGRPGHINEEMPWTILPGRTNSTIPKSSNKKTSQATRGDHWKWSSSRPIVQK

SEQ ID NO: 82071 - protein, 92 aa, Homo sapiens
MSGPVPSRARVYTDVNTHRPREYWDYESHVVEWGNQDDYQLVRKLGRGKYSEVFEAINITNNEKVVVKILKPVKKKKIKREIKILENLRGGP

SEQ ID NO: 82072 - protein, 60 aa, Homo sapiens
  MOD_RES (1)..(1): Any amino acid
XGFHPTTVCKIPSSCSLKIFNNQEFAQLLAQSVNHGFEAVYELTKMCTIRMSFVKSLQEI

SEQ ID NO: 82073 - protein, 91 aa, Homo sapiens
MSPAFRAMDVEPRAKGVLLEPFVHQVGGHSCVLRFNETTLCKPLVPREHQFYETLPAEMRKFTPQYKGVVSVRFEEDEDRNLCLIAYPLKG

SEQ ID NO: 82074 - protein, 461 aa, Homo sapiens
  MOD_RES (1)..(1): Any amino acid
XARICKGDEGGERVLQQRWTSFLKAQLLCSRPDDGFPFNVLQDVFTLSPSPQDWRDTLFYGVFTSQWHRGTTEGSAVCVFTMKDVQRVFSGLYKEVNRETQQWYTVTHPVPTPRPGACITNSARERKINSSLQLPDRVLNFLKDHFLMDGQVRSRMLLLQPQARYQRVAVHRVPGLHHTYDVLFLGTGDGRLHKAVSVGPRVHIIEELQIFSSGQPVQNLLLDTHRGLLYAASHSGVVQVPMANCSLYRSCGDCLLARDPYCAWSGSSCKHVSLYQPQLATRPWIQDIEGASAKDLCSASSVVSPSFVPTGEKPCEQVQFQPNTVNTLACPLLSNLATRLWLRNGAPVNASASCHVLPTGDLLLVGTQQLGEFQCWSLEEGFQQLVASYCPEVVEDGVADQTDEGGSVPVIISTSRVSAPAGGKASWGADRSWARTQLLDLSSLYQAVATREDSASSGEIS

SEQ ID NO: 82075 - protein, 169 aa, Homo sapiens
  MOD_RES (1)..(1): Any amino acid
XYGRPEDLQDLRARGVDPVGRLLLVRVGVISFAQKVTNAQDFGAQGVLIYPEPADFSQDPPKPSLSSQQAVYGHVHLGTGDPYTPGFPSFNQTQFPPVASSGLPSIPAQPISADIASRLLRLECSGAILAHCNLHLPGSSDSSASDSRVSRITGSSKALWPPKNGRGAS

SEQ ID NO: 82076 - protein, 32 aa, Homo sapiens
  MOD_RES (1)..(1): Any amino acid
XRIGIFFCPLLPFIQMIMLFIMFYSKNIEAFS

SEQ ID NO: 82077 - protein, 147 aa, Homo sapiens
  MOD_RES (1)..(1): Any amino acid
XSGLLQVCVRTGTETQAKFTSVELLREYISTCVPECTHPLKVGTCPKDWPSRGEITFRDYQMRYRDNTPLVLDSLNLNIQSGQTVGIVGRTGSGKSSLGMALFRLVEPASGTIFIDEVDICILSLEDLRTKLTVIPQDPVLFVGTVR

SEQ ID NO: 82078 - protein, 53 aa, Homo sapiens
ALRESCIPAQVVAAIDVNTVANEVYKYNFPHTQLLAKTIEITKITKVYSFGKC

SEQ ID NO: 82079 - protein, 96 aa, Homo sapiens
MELAALCRWGLLLALLPPGAASTQVCTGTDMKLRLPASPETHLDMLRHLYQGCQVVQGNLELTYLPTNASLSFLQTTTFLRTWDPAPSSAPCTTKR

SEQ ID NO: 82080 - protein, 129 aa, Homo sapiens
MLENFRNVVSVGHQSTPDGLPQLEREEKLWMMKMATQRDNSSGAKNLKEMETLQEVGLRYLPHEELFCSQIWQQITRELIKYQDSVVNIQRTGCQLEKRDDLHYKDEGFSNQSSHLQVHRVHTGEKPYK

SEQ ID NO: 82081 - protein, 69 aa, Homo sapiens
LTVPNSPPTHDPGLQPHPRIGDHKNISEQKSLLEVQRLQKELSSCIHKIEEVTKKVLILHCCRRDCSKT

SEQ ID NO: 82082 - protein, 193 aa, Homo sapiens
EVRESAYYLRSRQRRQPRPQETEEMKTRRTTRLQQQHSEQPPLQPSPVMTRRGLRDSHSSEEDEASSQTDLSQTISKKTVRSIQEAPVSEDLVIRLRRPPLRYPRYGETEEDDQDSSHSSVTTVKARSRDSDESGDKTTRSSSQYIESFWQSSQSQNFTAHDKQPSVLSSGYQKTPQEWAPQTARIRTRMQND

SEQ ID NO: 82083 - protein, 169 aa, Homo sapiens
MAAPVRRTLLGVAGGWRRFERLWAGSLSSRSLALAAAPSSNGSPWRLLGALCLQRPPVVSKPLTPLQEEMASLLQQIEIERSLYSDHELRALDENQRLAKKKADLHDEEDEQDILLAQDLEDMWEQKFLQFKLGARITGCDPFRPARRKGKGVFGFPNKRQLLGPCFVF

SEQ ID NO: 82084 - protein, 488 aa, Homo sapiens
MYHGMNPSNGDGFLEQQQQQQQPQSPQRLLAVILWFQLALCFGPAQLTGGFDDLQVCADPGIPENGFRTPSGGVFFEGSVARFHCQDGFKLKGATKRLCLKHFNGTLGWIPSDNSICVQEDCRIPQIEDAEIHNKTYRHGEKLIITCHEGFKIRYPDLHNMVSLCRDDGTWNNLPICQGCLRPLASSNGYVNISELQTSFPVGTVISYRCFPGFKLDGSAYLECLQNLIWSSSPPRCLALEVCPLPPMVSHGDFVCHPRPCERYNHGTVVEFYCDPGYSLTSDYKYITCQYGEWFPSYQVYCIKSEQTWPSTHETLLTTWKIVAFTATSVLLVLLLVILARMFQTKFKAHFPPRGPPRSSSSDPDFVVVDGVPVMLPSYDEAVSGGLSALGPGYMASVGQGCPLPVDDQSPPAYPGSGDTDTGPGESETCDSVSGSSELLQSLYSPPRCQESTHPASDNPDIIASTAEEVASTSPGSHHAHWVLFLRN

SEQ ID NO: 82085 - protein, 25 aa, Homo sapiens
MLVKHKETGNHYAMKILDKQKVVKL

SEQ ID NO: 82086 - protein, 67 aa, Homo sapiens
DLFEKKGYTFDYAYDWVGRPIPTPVGSVHVDSGASAITRESHTHRDRPSQQQPLRNQVDCSLANSPI

SEQ ID NO: 82087 - protein, 128 aa, Homo sapiens
MIKLHGAPKPHASCSCMKLSSTVVRSCLCVRSVGTGPRAGMACRCTSRPSTGMRGHTYVSSAATPSPKRPISTCTCAHTRVRSPSSATSVARPSEPKPAWTSTTAPTPGKGPSVASSVNSASLRRGPS

SEQ ID NO: 82088 - protein, 96 aa, Homo sapiens
MRTPRLRAQPRGAVYQAPSPPPAPVVQNLAHPPEVVLTDFQTLDGSQYNPVKQQLVRYATSCYSCCPRLASVLLYSDYGIGEVPVEPLDVPLPSTI

SEQ ID NO: 82089 - protein, 370 aa, Homo sapiens
  MOD_RES (1)..(1): Any amino acid
XSVPRDSGAMLGLKVVGGKMTESGRLCAFITKVKKGSLADTVGHLRPGDEVLEWNGRLLQGATFEEVYNIILESKPEPQVELVVSRPIGDIPRIPDSTHAQLESSSSSFESQKMDRPSISVTSPMSPGMLRDVPQFLSGQLSIKLWFDKVGHQLIVTILGAKDLPSREDGRPRNPYVKIYFLPDRSDKNKRRTKTVKKTLEPKWNQTFIYSPVHRREFRERMLEITLWDQARVREEESEFLGEILIELETALLDDEPHWYKLQTHDVSSLPLPHPSPYMPRRQLHGESPTRRLQRSKRISDSEVSDYDCDDGIGVVSDYRHDGRDLQSSTLSVPEQVMSSNHCSPSGSPHRVDVIGRTRSWSPSVPPPQR

SEQ ID NO: 82090 - protein, 113 aa, Homo sapiens
  MOD_RES (1)..(1): Any amino acid
XAVVAVCGGLGRKKLTHLVTAAVSLTHPGTHTVLWRRGCSQQVSSNEDLLLSQFVSPFTGCIYGRHITGLCGKKQKEITKAIKRAQIMGFMPVTYKDPAYLKDPKVCNIRYRE

SEQ ID NO: 82091 - protein, 177 aa, Homo sapiens
MAEAHQAVGFRPSLTSDGAEVELSAPVLQEIYLSGLRSWKRHLSRFWNDFLTGVFPASPLSWLFLFSAIQLAWFLQLDPSLGLMEKIKELLPDWGGQHHGLRGVLAAALFASCLWGALIFTLHVALRLLLSYHGWLLEPHGAMSSPTKTWLALVRIFSGRHPMLFSYQRSLPRQPVP

SEQ ID NO: 82092 - protein, 231 aa, Homo sapiens
MEKCKGTSRMAGTTSADVKMSSSEEVSWISWFCGLRGNEFFCEVDEDYIQDKFNLTGLNEQVPHYRQALDMILDLEPDEELEDNPNQSDLIEQAAEMLYGLIHARYILTNRGIAQMLEKYQQGDFGYCPRVYCENQPMLPIDIPGEAMVKLYCPKCMDVYTPKSSRHHHTDGAYFGTGFPHMLFMVHPEYRPKRPANQFVPRLYGFKIHPMAYQLQLQAASNFKSPVKTIR

SEQ ID NO: 82093 - protein, 264 aa, Homo sapiens
  MOD_RES (1)..(1): Any amino acid
XARPPGFPVLSGDFFSYADREDHYWTGYYTSRPFYKSLDRVLEAHLRGAEVLYSLAAAHARRSGLAGRYPLSDFTLLTEARRTLGLFQHHDAITGTAKEAVVVDYGVRLLRSLVNLKQVIIHAAHYLVLGDKETYHFDPEAPFLQVDDTRLSHDALPERTVIQLDSSPSPPSTHRFVVLFNPLEQERFSMVSLLVNSPRVRVLSEEGQPLAVQISAHWSSATEAVPDVYQVSVPVRLPALGLGVLQLQLGLDGHRTLPSSVRIY

SEQ ID NO: 82094 - protein, 61 aa, Homo sapiens
  MOD_RES (1)..(1): Any amino acid
XGIFVTRVQPDGPASNLLQPGDKILQANGHSFVHMEHEKAVLLLKSFQNTVDLVIQRKHLL

SEQ ID NO: 82095 - protein, 42 aa, Homo sapiens
MAPPRNVVKIAIKMRDAIPQLIQLDQAKPLAAVLKEVEPDAL

SEQ ID NO: 82096 - protein, 79 aa, Homo sapiens
MASRSSDKDGDSVHTASEVPLTPRTNSPDGRRSSSDTSKSTYSLTRRISSLESRRPSSPLIDIKPIEFGVLSAKKEPIQ

SEQ ID NO: 82097 - protein, 64 aa, Homo sapiens
AGSPWALGQRPFGAQGLKGPVCVAATAHADEKEALMSELKIMSHLGQHENIVNLLGACTHGGIS

SEQ ID NO: 82098 - protein, 454 aa, Homo sapiens
GKQMHVGKTPIQVFLGVPFSRPPLGILRFAPPEPPEPWKGIRDATTYPPGCLQESWGQLASMYVSTRERYKWLRFSEDCLYLNVYAPARAPGDPQLPVMVWFPGGAFIVGAASSYEGSDLAAREKVVLVFLQHRLGIFGFLSTDDSHARGNWGLLDQMAALRWVQENIAAFGGDPGNVTLFGQSAGAMSISGLMMSPLASGLFHRAISQSGTALFRLFITSNPLKVAKKVAHLAGCNHNSTQILVNCLRALSGTKVMRVSNKMRFLQLNFQRDPEEIIWSMSPVVDGVVIPDDPLVLLTQGKVSSVPYLLGVNNLEFNWLLPYNITKEQVPLVVEEYLDNVNEHDWKMLRNRMMDIVQDATFVYATLQTAHYHRGLSMGKEKALSLQMMKYWANFARTGNPNDGNLPCWPRYNKDEKYLQLDFTTRVGMKLKEKKMAFWMSLYQSQRPEKQRQF

SEQ ID NO: 82099 - protein, 123 aa, Homo sapiens
MSTLFPSLFPRVTETLWFNLDRPCVEETELQQQEQQHQAWLQSIAEKDNNLVPIGKPASEACRAYRLCPAHQHYDDEEEEDDEDDEDSEEDSEDDEDMQDMDEMNDYNESPDDGEVNEVGKGY

SEQ ID NO: 82100 - protein, 15 aa, Homo sapiens
  MOD_RES (1)..(1): Any amino acid
XEAAPEETRGAQAPP

SEQ ID NO: 82101 - protein, 197 aa, Homo sapiens
  MOD_RES (1)..(1): Any amino acid
XRHPLACRRRSWRAAGEAADKVVLHTGKYEELIVCSHEIAASTAQLVAASKVKANKHSPHLSRLQECSRTVNERAANVVASTKSGQEQIEDRDTMDFSGLSLIKLKKQEMETQVRVLELEKTLEAERMRLGELRKQHYVLAGASGSPGEEVAIRPSTAPRSVTTKKPPLAQKPSVAPRQDHQLDKKDGIYPAQLVNY

SEQ ID NO: 82102 - protein, 331 aa, Homo sapiens
MRGSVECTWGWGHCAPSPLLLWTLLLFAAPFGLLGEKTRQVSLEVIPNWLGPLQNLLHIRAVGTNSTLHYVWSSLGPLAVVMVATNTPHSTLSVNWSLLLSPEPDGGLMVLPKDSIQFSSALVFTRLLEFDSTNVSDTAAKPLGRPYPPYSLADFSWNNITDSLDPATLSATFQGHPMNDPTRTFANGSLAFRVQAFSRSSRPAQPPRLLHTADTCQLEVALIGASPRGNRSLFGLEVATLGQGPDCPSMQEQHSIDDEYAPAVFQVDAPGCGLPSSGRLVPTSPGHHGSGPGCPRAHAARGRLGSAAAPQEVLRVPVHKLRPALWREGHY

SEQ ID NO: 82103 - protein, 28 aa, Homo sapiens
MMLGTEGGEGFVVKVRGLPWSCSADEVQ

SEQ ID NO: 82104 - protein, 411 aa, Homo sapiens
MNIDIASIDMVSEVNMDYTLTMYFQQAWRDKRLSYNVIPLNLTLDNRVADQLWVPDTYFLNDKKSFVHGVTVKNRMIRLHPDGTVLYGLRITTTAACMMDLRRYPLDEQNCTLEIESYGYTTDDIEFYWRGDDNAVTGVTKIELPQFSIVDYKLITKKVVFSTGSYPRLSLSFKLKRNIGYFILQTYMPSILITILSWVSFWINYDASAARVALGITTVLTMTTINTHLRETLPKIPYVKAIDMYLMGCFVFVFMALLEYALVNYIFFGRGPQRQKKAAEKAASANNEKMRLDVNKMDPHENILLSTLEIKNEMATSEAVMGLGDPRSTMLAYDASSIQYRKAGLPRHSFGRNALERHVAQKKSRLRRRASQLKITIPDLTDVNAIDRWSRIFFPVVFSFFNIVYWLYYVN

SEQ ID NO: 82105 - protein, 325 aa, Homo sapiens
MRECISIHVGQAGVQIGNACWELYCLEHGIQPDGQMPSDKTIGGGDDSFNTFFSETGAGKHVPRAVFVDLEPTVIDEVRTGTYRQLFHPEQLITGKEDAANNYARGHYTIGKEIIDLVLDRIRKFQTNLVPYPRIHFPLATYAPVISAEKAYHEQLTVAEITNACFEPANQMVKCDPRHGKYMACCLLYRGDVVPKDVNAAIATIKTKRTIQFVDWCPTGFKVGINYQPPTVVPGGDLAKVQRAVCMLSNTTAVAEAWARLDHKFDLPLRRIMRRLEQIVLTERMRVKSINLCAVLLHSFVLELSYFCSVNVYCRKLLIKLKFPF

SEQ ID NO: 82106 - protein, 82 aa, Homo sapiens
MVLSQRQRDELNRAIADYLRSNGYEEAYSVFKKEAELDVNEELDKKYAGLLEKKWTSVIRLQKKVMELESKLNEAKEEFTSG

SEQ ID NO: 82107 - protein, 166 aa, Homo sapiens
MAGQRTCQRRSSRAGPGKMQEPPKSIEEFLKFQNWDYWPREIHFRDDDKWSCTLKKIKEDSSFVSIYTHLWENVPRIFEALLIMESKLKEYSLILQNHTSEIFKWKSMISETSSYRKLERYGEFLKKYHKKKKIMGVWGMGPHSVAQAGVQWRNRGSLQPLPPRFK

SEQ ID NO: 82108 - protein, 111 aa, Homo sapiens
MEIYGSAVADKLDNSRSILKRRYYRQHCTLELGSYIKDLSVVHSDLSSIVILDNSPGAYRSHPDNAIPIKSWFSDPSDTALLNLLPMLDALRFTADVRSVLSRNLHQHRLW

SEQ ID NO: 82109 - protein, 148 aa, Homo sapiens
MILFKQATYFISLFATVSCGCLTQLYENAFFRGGDVASMYTPNAQYCQMRCTFHPRCLLFSFLPASSINDMEKRFGCFLKDSVTGTLPKVHRTGAVSGHSLKQCGHQISACHRDIYKGVDMRGVNFNVSKVSSVEECQKRCTSNIRCQ

SEQ ID NO: 82110 - protein, 1498 aa, Homo sapiens
MPLAFCGSENHSAAYRVDQGVLNNGCFVDALNVVPHVFLLFITFPILFIGWGSQSSKVHIHHSTWLHFPGHNLRWILTFMLLFVLVCEIAEGILSDGVTESHHLHLYMPAGMAFMAAVTSVVYYHNIETSNFPKLLIALLVYWTLAFITKTIKFVKFLDHAIGFSQLRFCLTGLLVILYGMLLLVEVNVIRVRRYIFFKTPREVKPPEDLQDLGVRFLQPFVNLLSKGTYWWMNAFIKTAHKKPIDLRAIGKLPIAMRALTNYQRLCEAFDAQVRKDIQGTQGARAIWQALSHAFGRRLVLSSTFRILADLLGFAGPLCIFGIVDHLGKENDVFQPKTQFLGVYFVSSQEFLANAYVLAVLLFLALLLQRTFLQASYYVAIETGINLRGAIQTKIYNKIMHLSTSNLSMGEMTAGQICNLVAIDTNQLMWFFFLCPNLWAMPVQIIVGVILLYYILGVSALIGAAVIILLAPVQYFVATKLSQAQRSTLEYSNERLKQTNEMLRGIKLLKLYAWENIFRTRVETTRRKEMTSLRAFAIYTSISIFMNTAIPIAAVLIPLRVVNRKRPAREDCRGLTGPLQSLVPSADGDADNCCVQIMGGYFTWTPDGIPTLSNITIRIPRGQLTMIVGQVGCGKSSLLLAALGEMQKVSGAVFWSSSLPDSEIGEDPSPERETATDLDIRKRGPVAYASQKPWLLNATVEENIIFESPFNKQRYKMVIEACSLQPDIDILPHGDQTQIGERGINLSGGQRQRISVARALYQHANVVFLDDPFSALDIHLSDHLMQAGILELLRDDKRTVVLVTHKLQYLPHADWIIAMKDGTIQREGTLKDFQRSECQLFEHWKTLMNRQDQELEKETVTERKATEPPQGLSRAMSSRDGLLQDEEEEEEEAAESEEDDNLSSMLHQRAEIPWRACAKYLSSAGILLLSLLVFSQLLKHMVLVAIDYWLAKWTDSALTLTPAARNCSLSQECTLDQTVYAMVFTVLCSLGIVLCLVTSVTVEWTGLKVAKRLHRSLLNRIILAPMRFFETTPLGSILNRFSSDCNTIDQHIPSTLECLSRSTLLCVSALAVISYVTPVFLVALLPLAIVCYFIQKYFRVASRDLQQLDDTTQLPLLSHFAETVEGLTTIRAFRYEARFQQKLLEYTDSNNIASLFLTAANRWLEVRMEYIGACVVLIAAVTSISNSLHRELSAGLVGLGLTYALMVSNYLNWMVRNLADMELQLGAVKRIHGLLKTEAESYEGLLAPSLIPKNWPDQGKIQIQNLSVRYDSSLKPVLKHVNALIAPGQKIGICGRTGSGKSSFSLAFFRMVDTFEGHIIIDGIDIAKLPLHTLRSRLSIILQDPVLFSGTIRFNLDPERKCSDSTLWEALEIAQLKLVVKALPGGLDAIITEGGENFSQGQRQLFCLARAFVRKTSIFIMDEATASIDMATENILQKVVMTAFADRTVVTIAHRVHTILSADLVIVLKRGAILEFDKPEKLLSRKDSVFASFVRADK

SEQ ID NO: 82111 - protein, 46 aa, Homo sapiens
MRNYICRTKLADRYPQSCQMLLNQLREITGIQDPSFLHEALKASNG

SEQ ID NO: 82112 - protein, 739 aa, Homo sapiens
MSRPSSVSPRQPAPGGGGGGGPSPCGPGGGGRAKGLKDIRIDEEVKIAVNIALERFRYGDQREMEFPSSLTSTERAFIHRLSQSLGLVSKSKGKGANRYLTVKKKDGSETAHAMMTCNLTHNTKHAVRSLIQRFPVTNKERTELLPKTERGNVFAVEAENREMSKTSGRLNNGIPQIPVKRGESEFDSFRQSLPVFEKQEEIVKIIKENKVVLIVGETGSGKTTQIPQFLLDDCFKNGIPCRIFCTQPRRLAAIAVAERVAAERRERIGQTIGYQIRLESRVSPKTLLTFCTNGVLLRTLMAGDSTLSTVTHVIVDEVHERDRFSDFLLTKLRDLLQKHPTLKLILSSAALDVNLFIRYFGSCPVIYIQGRPFEVKEMFLEDILRTTGYTNKEMLKYKKEKQQEEKQQTTLTEWYSAQENSFKPESQRQRTVLNVTDEYDLLDDGGDAVFSQLTEKDVNCLEPWLIKEMDACLSDIWLHKDIDAFAQVFHLILTENVSVDYRHSETSATALMVAAGRGFASQVEQLISMGANVHSKASNGWMALDWAKHFGQTEIVDLLESYSATLEFGNLDESSLVQTNGSDLSAEDRELLKAYHHSFDDEKVDLDLIMHLLYNICHSCDAGAVLIFLPGYDEIVGLRDRILFDDKRFADSTHRYQVFMLHSNMQTSDQKKVLKNPPAGVRKIILSTNIAETSITVNDVVFVIDSGKVKEKSFDALNFVTMLKMVWISKASAIQRKGR

SEQ ID NO: 82113 - protein, 42 aa, Homo sapiens
  MOD_RES (1)..(1): Any amino acid
XQSVMPAGVDKISTAQKYVLARRRLVKVINNRAKLLSLCSWG

SEQ ID NO: 82114 - protein, 744 aa, Homo sapiens
MYPQGRHPTPLQSGQPFKFSILEICDRIKEEFQFLQAQYHSLKLECEKLASEKTEMQRHYVMYYEMSYGLNIEMHKQAEIVKRLSGICAQIIPFLTQEHQQQVLQAVERAKQVTVGELNSLIGQQQLQPLSHHAPPVPLTPRPAGLVGGSATGLLALSGALAAQAQLAAAVKEDRAGVEAEGSRVERAPSRSASPSPPESLVEEERPSGPGGGGKQRADEKEPSGPYESDEDKSDYNLVVDEDQPSEPPSPATTPCGKVPICIPARRDLVDSPASLASSLGSPLPRAKELILNDLPASTPASKSCDSSPPQDASTPGPSSASHLCQLAAKPAPSTDSVALRSPLTLSSPFTTSFSLGSHSTLNGDLSVPSSYVSLHLSPQVSSSVVYGRSPVMAFESHPHLRGSSVSSSLPSIPGGKPAYSFHVSADGQMQPVPFPSDALVGAGIPRHARQLHTLAHGEVVCAVTISGSTQHVYTGGKGCVKVWDVGQPGAKTPVAQLDCLNRDNYIRSCKLLPDGRSLIVGGEASTLSIWDLAAPTPRIKAELTSSAPACYALAVSPDAKVCFSCCSDGNIVVWDLQNQTMVRQFQGHTDGASCIDISDYGTRLWTGGLDNTVRCWDLREGRQLQQHDFSSQIFSLGHCPNQDWLAVGMESSNVEILHVRKPEKYQLHLHESCVLSLKFASCGRWFVSTGKDNLLNAWRTPYGASIFQSKESSSVLSCDISRNNKYIVTGSGDKKATVYEVVY

SEQ ID NO: 82115 - protein, 338 aa, Homo sapiens
MALTAHPSCLLALLVAGLAQGIRGPLRAQDLGPQPLELKEAFKLFQIQFNRSYLSPEEEEFGQLYGYRRAAGGVPSMGREIRSEEPEESVPFSCDWRKVASAISPIKDQKNCNCCWAMAAAGNIETLWRISFWDFVDVSVQELLDCGRCGDGCHGGFVWDAFITVLNNSGLASEKDYPFQGKVRAHRCHPKKYQKVAWIQDFIMLQNNEHRIAQYLATYGPITVTINMKPLQLYRKGVIKATPTTCDPQLVDHSVLLVGFGSVKSEEGIWAETVSSQSQPQPPHPTPYWILKNSWGAQWGEKGYFRLHRGSNTCGITKFPLTARVQKPDMKPRVSCPP

SEQ ID NO: 82116 - protein, 104 aa, Homo sapiens
MPNFCAAPNCTRKSTQSDLAFFRFPRDPARCQKWVENCRRADLEDKTPDQLNKHYRLCAKHFETSMICRTRWSFAVLPKLVLNSWGQAVYPAKASQSVGITESL

SEQ ID NO: 82117 - protein, 730 aa, Homo sapiens
MASSVAPYEQLVRQVEALKAENSHLRQELRDNSSHLSKLETETSGMKEVLKHLQGKLEQEARVLVSSGQTEVLEQLKALQMDITSLYNLKFQPPTLGPEPAARTPEGSPVHGSGPSKDSFGELSRATIRLLEELDRERCFLLNEIEKEEKEKLWYYSQLQGLSKRLDELPHVETFSMQMDLIRQQLEFEAQHIRSLMEERFGTSDEMVQRAQIRASRLEQIDKELLEAQDRVQQTEPQALLAVKSVPVDEDPETEVPTHPEDGTPQPGNSKVEVVFWLLSMLATRDQEDTARTLLAMSSSPESCVAMRRSGCLPLLLQILHGTEAAAGGRAGAPGAPGAKDARMRANAALHNIVFSQPDQGLARKEMRVLHVLEQIRAYCETCWDWLQARDGGPEGGGAGSAPIPIEPQICQATCAVMKLSFDEEYRRAMNELGGLQAVAELLQVDYEMHKMTRDPLNLALRRYAGMTLTNLTFGDVANKATLCARRGCMEAIVAQLASDSEELHQVVSSILRNLSWRADINSKKVLREAGSVTALVQCVLRATKESTLKSVLSALWNLSAHSTENKAAICQVDGALGFLVSTLTYKCQSNSLAIIESGGGILRNVSSLVATREDYRQVLRDHNCLQTLLQHLTSHSLTIVSNACGTLWNLSARSARDQELLWDLGAVGMLRNLVHSKHKMIAMGSAAALRNLLAHRPAKHQAAATAVSPGSCVPSLYVRKQRALEAELD

SEQ ID NO: 82118 - protein, 529 aa, Homo sapiens
MSTNENANTPAARLHRFKNKGKDSTEMRRRRIEVNVELRKAKKDDQMLKRRNVSSFPDDATSPLQENRNNQGTVNWSVDDIVKGINSSNVENQLQATQAARKLLSREKQPPIDNIIRAGLIPKFVSFLGRTDCSPIQFESAWALTNIASGTSEQTKAVVDGGAIPAFISLLASPHAHISEQAVWALGNIAGDGSVFRDLVIKYGAVDPLLALLAVPDMSSLACGYLRNLTWTLSNLCRNKNPAPPIDAVEQILPTLVRLLHHDDPEVLADTCWAISYLTDGPNERIGMVVKTGVVPQLVKLLGASELPIVTPALRAIGNIVTGTDEQTQVVIDAGALAVFPSLLTNPKTNIQKEATWTMSNITAGRQDQIQQVVNHGLVPFLVSVLSKADFKTQKEAVWAVTNYTSGGTVEQIVYLVHCGIIEPLMNLLTAKDTKIILVILDAISNIFQAAEKLGETEKLSIMIEECGGLDKIEALQNHENESVYKASLSLIEKYFSVEVKEDQNVVPETTSEGYTFQVQDGAPGTFNF

SEQ ID NO: 82119 - protein, 55 aa, Homo sapiens
MARTTSQLILDDSGRENSPFTARPRGIWVLLLPVAVLSVVGSPWEAECAGSPRGK

SEQ ID NO: 82120 - protein, 92 aa, Homo sapiens
GSYSLPRLECSGAIMARCNLDHLGSSDPPTSASQVAEIIVNSGDGIDYSQQKRENIGDLIQETLEAFERYGGENAFINIKYVVPTYESCLLN

SEQ ID NO: 82121 - protein, 594 aa, Homo sapiens
MPYKLKKEKEPPKVAKCTAKPSSSGKDGGGENTEEPQPQAQSQPPSSNKRPSNSTPPPTQLSKIKYSGGPQIVKKERRQSSSRFNLSKNRELQKLPALKDSPTQEREELFIQKLRQCCVLFDFVSDPLSDLKFKEVKRAGLNEMVEYITHSRDVVTEAIYPEAVTMFSVNLFRTLPPSSNPTGAEFDPEEDEPTLEAAWPHLQLVYEFFLRFLESPDFQPNIAKKYIDQKFVLALLDLFDSEDPRERDFLKTILHRIYGKFLGLRAYIRRQINHIFYRFIYETEHHNGIAELLEILGSIINGFALPLKEEHKMFLIRVLLPLHKVKSLSVYHPQLAYCVVQFLEKESSLTEPVIVGLLKFWPKTHSPKEVMFLNELEEILDVIEPSEFSKVMEPLFRQLAKCVSSPHFQVAERALYYWNNEYIMSLISDNAARVLPIMFPALYRNSKSHWNKTIHGLIYNALKLFMEMNQKLFDDCTQQYKAEKQKGRFRMKEREEMWQKIEELARLNPQYPMFRAPPPLPPVYSMETETPTAEDIQLLKRTVETEAVQMLKDIKKEKVLLRRKSELPQDVYTIKALEAHKRAEEFLTASQEAL

SEQ ID NO: 82122 - protein, 96 aa, Homo sapiens
MSRLSARLFGEVTRPTNSKSMKVVKLFSELPLAKKKETYDWYPNHHTYAELMQTLRFLGLYRDEHQDFMDEQKRLKKLRGKEKPKKGEGKRAAKRK

SEQ ID NO: 82123 - protein, 178 aa, Homo sapiens
  MOD_RES (1)..(1): Any amino acid
XNTDRPDASAVYLHDFQRFLIHEQQEHWAQDLNKVRERMTKFIDDTMRETAEPFLFVDEFLTYLFSRENSIWDEKYDAVDMQDMNNPLSHYWISSSHNTYLTGDQLRSESSPEAYIRCLRMGCRCIELDCWDGPDGKPVIYHGWTRTTKIKFDDVVQAIKDHAFVTSRCPLSWVEVLL

SEQ ID NO: 82124 - protein, 76 aa, Homo sapiens
MENLPAVTTEEPTPMGRGPVGPSGGGSTRDQVRTVVMRPSVSWEKAGPEEAKAPVRGERPGAFGAFRGARPLLGLP

SEQ ID NO: 82125 - protein, 42 aa, Homo sapiens
MAAMSLLRRVSVTAVAALSGRPLGTRLGFGGFLTRGFPKAAG

SEQ ID NO: 82126 - protein, 73 aa, Homo sapiens
  MOD_RES (1)..(1): Any amino acid
XYRPQHIFFGATIFLLSVGTALLGLKEALLFNLGFSLPLTPAGASIAHLSPRVSWPTCWACCWPASVGRCSTS

SEQ ID NO: 82127 - protein, 211 aa, Homo sapiens
MATATRLLGWRVASWRLRPPLAGFVSQRAHSLLPVDDAINGLSEEQRQLRQTMAKFLQEHLAPKAQEIDRSNEFKNLRVSWEVRAVGGSQGVGLSCTAAWKSSHSFLEFWKQLGNLGVLGITAPVQYGGSGLGYLEHVLVMEEISRASGAVGLSYGAHSNLCINQLVRNGNEAQKEKYLPKLISGEYIGALAMSEPNAGSDVVSMKLKAEK

SEQ ID NO: 82128 - protein, 306 aa, Homo sapiens
MAKTPSDHLLSTLEELVPYDFEKFKFKLQNTSVQKEHSRIPRSQIQRARPVKMATLLVTYYGEEYAVQLTLQVLRAINQRLLAEELHRAAIQEYSTQENGTDDSAASSSLGENKPRSLKTPDHPEGNEGNGPRPYGGGAASLRCSQPEAGRGLSRKPLSKRREKASEGLDAQGKPRTRSPALPGGRSPGPCRALEGGQAEVRLRRNASSAGRLQGLAGGAPGQKECRPFEVYLPSGKMRPRSLEVTISTGEKAPANPEILLTLEEKTAANLDSATEPRARPTPDGGASADLKEGPGNPEHSVTETN

SEQ ID NO: 82129 - protein, 232 aa, Homo sapiens
MWAEGESEGLQTLGIVVVVCSSLKLLHYLGLIDLSDDKIEDELEMTMVCHRPEGLEQLEAQTNFTKRELQVLYRGFKNECPSGVVNEDTFKQIYAQFFPHGDASTYAHYLFNAFDTTQTGSVKFEDFVTALSILLRGTVHEKLRWTFNLYDINKDGYINKEEMMDIVKAIYDMMGKYTYPVLKEDTPRQHVDVFFQKMDKNKDGIVTLDEFLESCQEDDNIMRSLQLFQNVM

SEQ ID NO: 82130 - protein, 184 aa, Homo sapiens
MAWIKRKFGERPPPKRLTREAMRNYLKERGDQTVLILHAKVAQKSYGNEKRFFCPPPCVYLMGSGWKKKKEQMERDGCSEQESQPCAFIGIGNSDQEMQQLNLEGKNYCTAKTLYISDSDKRKHFMLSVKMFYGNSDDIGVFLSKRIKVISKPSKKKQSLKNADYIKTFRTDCMHCLRNKGGSV

SEQ ID NO: 82131 - protein, 3058 aa, Homo sapiens
MAVDDSNLYSRTKNKLNSSQNDYKSSRRSSLPPELLIGNDIRGRLQRNIKNLDPIHLRHPKKRPSIFPASPVGNGYIKPPVPPASGTHREKGPPTMLPINVDPDSKPGEYVLKSLFVNFTTQAERKIRIIMAEPLEKPLTKSLQRGEDPQFDQVISSMSSLSEYCLPSILRTLFDWYKRQNGIEDESHEYRPRTSNKSKSDEQQRDYLMERRDLAIDFIFSLVLIEVLKQIPLHPVIDSLIHDVINLAFKHFKYKEGYLGPNTGNMHIVADLYAEVIGVLAQAKFPAVKKKFMAELKELRHKEQNPYVVQSIISLIMGMKFFRIKMYPVEDFEASLQFMQECAHYFLEVKDKDIKHALAGLFVEILVPVAAAVKNEVNVPCLRNFVESLYDTTLELSSRKKHSLALYPLVTCLLCVSQKQLFLNRWHIFLNNCLSNLKNKDPKMARVALESLYRLLWVYMIRIKCESNTATQSRLITIITTLFPKGSRGVVPRDMPLNIFVKIIQFIAQERLDFAMKEIIFDFLCVGKPAKAFSLNPERMNIGLRAFLVIADSLQQKDGEPPMPVTGAVLPSGNTLRVKKTYLSKTLTEEEAKMIGMSLYYSQVRKAVDNILRHLDKEVGRCMMLTNVQMLNKEPEDMITGERKPKIDLFRTCVAAIPRLLPDGMSKLELIDLLARLSIHMDDELRHIAQNSLQGLLVDFSDWREDVLFGFTNFLLREVNDMHHTLLDSSLKLLLQLLTQWKLVIQTQGKVYEQANKIRNSELIANGSSHRIQSERGPHCSVLHAVEGFALVLLCSFQVATRKLSVLILKEIRALFIALGQPEDDDRPMIDVMDQLSSSILESFIHVAVSDSATLPLTHNVDLQWLVEWNAVLVNSHYDVKSPSHVWIFAQSVKDPWVLCLFSFLRQENLPKHCPTALSYAWPYAFTRLQSVMPLVDPNSPINAKKTSTAGSGDNYVTLWRNYLILCFGVAKPSIMSPGHLRASTPEIMATTPDGTVSYDNKAIGTPSVGVLLKQLVPLMRLESIEITESLVLGFGRTNSLVFRELVEELHPLMKEALERRPENKKRRERRDLLRLQLLRIFELLADAGVISDSTNGALERDTLALGALFLEYVDLTRMLLEAENDKEVEILKDIRAHFSAMVANLIQCVPVHHRRFLFPQQSLRHHLFILFSQWAGPFSIMFTPLDRYSDRNHQITRYQYCALKAMSAVLCCGPVFDNVGLSPDGYLYKWLDNILACQDLRVHQLGCEVVVLLLELNPDQINLFNWAIDRCYTGSYQLASGCFKAIATVCGSRNYPFDIVTLLNLVLFKASDTNREIYEISMQLMQILEAKLFVYSKKVAEQRPGSILYGTHGPLPPLYSVSLALLSCELARMYPELTLPLFSEVSQRFPTTHPNGRQIMLTYLLPWLHNIELVDSRLLLPGSSPSSPEDEVKDREGDVTASHGLRGNGWGSPEATSLVLNNLMYMTAKYGDEVPGPEMENAWNALANNEKWSNNLRITLQFLISLCGVSSDTVLLPYIKKVAIYLCRNNTIQTMEELLFELQQTEPVNPIVQHCDNPPFYRFTASSKASAAASGTTSSSNTVVAGQENFPDAEENKILKESDERFSNVIRAHTRLESRYSNSSGGSYDEDKNDPISPYTGWLLTITETKQPQPLPMPCTGGCWAPLVDYLPETITPRGPLHRCNIAVIFMTEMVVDHSVREDWALHLPLLLHAVFLGLDHYRPEVFEHSKKLLLHLLIALSCNSNFHSIASVLLQTREMGEAKTLTVQPAYQPEYLYTGGFDFLREDQSSPVPDSGLSSSSTSSSISLGGSSGNLPQMTQEVEDVDTAAETDEKANKLIEFLTTRAFGPLWCHEDITPKNQNSKSAEQLTNFLRHVVSVFKDSKSGFHLEHQLSEVALQTALASSSRHYAGRSFQIFRALKQPLSAHALSDLLSRLVEVIGEHGDEIQGYVMEALLTLEAAVDNLSDCLKNSDLLTVLSRSSSPDLSSSSKLTASRKSTGQLNMNPGTTSGNTATAERSRHQRSFSVPKKFGVIDRSSDPPRSATLDRIQACTQQGLSSKTRSSSSLKDSLTDPSHINHPTNLLATIFWVTVALMESDFEFEYLMALRLLSRLLAHMPLDKAENREKLEKLQAQLKWADFSGLQQLLLKGFTSLTTTDLTLQLFSLLTPVSKISMVDASHAIGFPLNVLCLLPQLIQHFENPNQFCKDIAERIAQVCLEEKNPKLSNLAHVMTLYKTHSYTRDCATWVNVVCRYLHEAYADITLNMVTYLAELLEKGLPSVQQPLLQVIYSLLSYMDLSVVPVKQFNVEVLKTIEKYVQSVHWREALNILKLVVSRSASLVLPSYQHSDLSKIEIHRVWTSASKELPGKTLDFHFDISETPIIGRRYDELQNSSGRDGKPRAMAVTRSTSSTSSGSNSNVLVPVSWKRPQYSQKRTKEKLVHVLSLCGQEVGLSKNPSVIFSSCGDLDLLEHQTSLVSSEDGAREQENMDDTNSEQQFRVFRDFDFLDVELEDGEGESMDNFNWGVRRRSLDSLDKCDMQILEERQLSGSTPSLNKMHHEDSDESSEEEDLTASQILEHSDLIMTLSPSEETNPMELLTTACDSTPAEPHSFNTRMSSFDASLPDMNNLQISEGSKAEAVREEEDTTVHEDDLSSSINELPAAFECSDSFSLDMTEGEEKGNRALDQFTLASFGEGDRGVSPPPSPFFSAILAAFQPAACDDAEEAWRSHINQLMCDSDGSCAVYTFHVFSSLFKNIQKRFCFLTCDAASYLGDNLRGIGSKFVSSSQMLTSCSECPTLFVDAETLLSCGLLDKLKFSVLELQEYLDTYNNRKEATLSWLANCKATFAGGSRDGVITCQPGDSEEKQLELCQRLYKLHFQLLLLFQSYCKLIGQVHEVSSMPELLNMSRELSDLKKHLKEASAVIAADPLYSDGAWSEPTFTSTEAAIQSMLECLKNNELGKALRQIRECRSLWPNDIFGSSSDDEVQTLLNIYFRHQTLGQTGTYALVGSNQSLTEICTKLMELNMEIRDMIRRAQSYRVLTTFLPDSSVSGTSL

SEQ ID NO: 82132 - protein, 272 aa, Homo sapiens
MAPLRFSANLSWLFPELSGLPARVRAAGSSGFEAVEVAWPYAETPEALARAAREAGLRLVLINTPPGDQEKGEMGLGAVPGRQAAFREGLEQAVRSGHCLMGRKLSVPCKGAVARGGLVYLAAFLRLDMIHLMAGRVPQGADRIAVKAEMEAVFLENLRHAAGVLAQEDLVGLLEPINTRITDPQYFLDTPQQAAAILQKVGRPNLQLQMDIFHWQIMDGNLTGNIREFLPIVGHVQVAQVPGRGEPSSPGELNFPYLFQLLEDEGYKGFVG

SEQ ID NO: 82133 - protein, 50 aa, Homo sapiens
MERQVLLSEPEEAAALYRGLSRQPALSAACLGPEVTTQYGGQYRTVHTDC

SEQ ID NO: 82134 - protein, 56 aa, Homo sapiens
MADVVVGKDKGGEQRLISLPLSRIRVIMKSSPEVSSINQEALVLTAKATIYYQRRF

SEQ ID NO: 82135 - protein, 321 aa, Homo sapiens
MWAVLRLALRPCARASPAGPRAYHGDSVASLGTQPDLGSALYQENYKQMKALVNQLHERVEHIKLGGGEKARALHISRGKLLPRERIDNLIDPGSPFLELSQFAGYQLYDNEEVPGGGIITGIGRVSGVECMIIANDATVKGGAYYPVTVKKQLRAQEIAMQNRLPCIYLVDSGGAYLPRQADVFPDRDHFGRTFYNQAIMSSKNIAQIAVVMGSCTAGGAYVPAMADENIIVRKQGTIFLAGPPLVKAATGEEVSAEDLGGADLHCRVLTLSSYAAKEIFLCCSFKTLLDLWLVESMKLKELPRMVPRWWPLWPVPKCLR

SEQ ID NO: 82136 - protein, 150 aa, Homo sapiens
MAASSLTVTLGRLASACSHSILRPSGPGAASLWSASRRFNSQSTSYLPGYVPKTSLSSPPWPEVVLPDPVEETRHHAEVVKKVNEMIVTGQYGRLFAVVHFASRQWKVTSEDLILIGNELDLACGERIRLEKVLLVGADNFTLLGKPLLG

SEQ ID NO: 82137 - protein, 142 aa, Homo sapiens
MEHTQQMKLKERQKFFEEAFQQDMEQYLSTGYLQIAERREPIGSMSSMEVNVDMLEQMDLMDISDQEALDVFLNSGGEENTVLSPALGPESSTCQNEITLQVPNPSELRAKPPSSSSTCTDSATRDISEGGESPVVQSDEEE

SEQ ID NO: 82138 - protein, 114 aa, Homo sapiens
  MOD_RES (1)..(1): Any amino acid
XSSFRSRRGPGVPSPQPDVTMLSRLLKEHQAKQNERKELQEKRRREAITAATCLTEALVDHLNVGVAQAYMNQRKLDHEVKTLQVQAAQFAKQTGQWIGMVENFNQALKGFLVW

SEQ ID NO: 82139 - protein, 97 aa, Homo sapiens
LFDHMVPLVEEINRLADELNPLNASQEIELSLDRLAQALQVAMASGALLCTRDDLRTLCSRLPHNKTVVRMRPSGVCEFLILLLATWRPPQTQSSGL

SEQ ID NO: 82140 - protein, 122 aa, Homo sapiens
MGPEALSSLLLLLLVASGDADMKGHFDPAKCRYALGMQDRTIPDSDISASSSWSDSTAARHSRLESSDGDGAWCPAGSVFPKEEEYLQVDLQRLHLVALVGTQGRHAGGLGKEFSRSYRLRY

SEQ ID NO: 82141 - protein, 173 aa, Homo sapiens
ATYLRYVRRLDFFEKPDYEYLRTLFTDLFEKKGYTFDYAYDWVGRPIPTPVGSVHVDSGASAITRESHTHRDRPSQQQPLRNQNVSSERRGEWEIQPSRQTNTSYLTSHLAADRHGGSVQPRSLTSRVFCPAVRPLFPLPSTHINRNNVLEMKPGGRSSYTCKRSLIGSTLTR

SEQ ID NO: 82142 - protein, 93 aa, Homo sapiens
MSLVLNDLLICCRQLEHDRATERKKEVEKFKRLIRDPETIKHLDRHSDSKQGKYLNWDAVFRFLQKYIQKETECLRIAKPNVSASTQASRQKK

SEQ ID NO: 82143 - protein, 80 aa, Homo sapiens
MELLTFRDVAIEFSPEEWKCLDPAQQNLYRDVMLENYRNLVSLELHTEHHQRTDGHFISLGEGQVYHAVMAIPASIGVWV

SEQ ID NO: 82144 - protein, 140 aa, Homo sapiens
LEGNEVGDRVREKSKNHSRRRKLLSKVDRRVESEESGDEEGKKHSSGIVADLSEQSLKDGEERGEEDPEEEHELPVDMETINLDRDAEDVDLNHYRIGKIEGFEVLKKVKTLCLRQNLIKCIENLEELQSLRELDLYDNQ

SEQ ID NO: 82145 - protein, 306 aa, Homo sapiens
MGDILAHESELLGLVKEYLDFAEFEDTLKTFSKECKIKGKPLCKTVGGSFRDSKSLTIQKDLVAAFDNGDQKVFFDLWEEHISSSIRDGDSFAQKLEFYLHIHFAIYLLKYSVGRPDKEELDEKISYFKTYLETKGAALSQTTEFLPFYALPFVPNPMVHPSFKELFQDSWTPELKLKLIKFLALISKASNTPKLLTIYKENGQSNKEILQQLHQQLVEAERRSVTYLKRYNKIQADYHNLIGVTAELVDSLEATVSGKMITPEYLQSVCVRLFSNQMRQSLAHSVDFTRPGTEIEGCPITALLGL

SEQ ID NO: 82146 - protein, 172 aa, Homo sapiens
GHMVTARQEPRLVLISIIYENNCLIFRAPDMDQLVLPSKQPSSNKLHNCRIFGLDIKGRDCGNEAAKWFTNFLKTEAYRLVQFETNMKGRTSRKLLPTLDQNFQVAYPDYCPLLIMTDASLVDLNTRMEKKMKMENFRPNIVVTGCDAFEEDTWDELLIGSVEVKKVMACPR

SEQ ID NO: 82147 - protein, 179 aa, Homo sapiens
MGRAGAGSPGRRRQRCQSRGRRRPRAPRRRKAPACRRRRARRRRKKPCPRSLRPEIHECPKSQDPCASRDDWRCARSMHEFSAKDIDGHMVNLDKYRGFVCIVTNVASQCGKTEVNYTQLVDLHARYAECGLRILAFPCNQFGKQEPGSNEEIKEFAAGYNVKFDMFSKICVNGDDAHP

SEQ ID NO: 82148 - protein, 284 aa, Homo sapiens
QVLLSEPEEAAALYRGLSRQPALSAACLGPEVTTQYGGQYRTVHTEWTQRDLERMENIRFCRQYLVFHDGDSVVFAGPAGNSVETRGELLSRESPSGTMKAVLRKAGGTGPGEEKQFLEVWEKNRKLKSFNLSALEKHGPVYEDDCFGCLSWSHSETHLLYVAEKKRPKAESFFQTKALDVSASDDEIARLKKPDQAIKAFWAPGDAGVVFVGWWHEPFRLGIRFCTNRRSALYYVDLIGGKCELLSDDSLAVSSPRLSPDQCRIVYLQYPSLIPHHQCSQLCL

SEQ ID NO: 82149 - protein, 36 aa, Homo sapiens
MFPPSGSTGLIPPSHFQARPLSTLPRMAPTWLSDIP

SEQ ID NO: 82150 - protein, 468 aa, Homo sapiens
MLPPWTLGLLLLATVRGKEVCYGQLGCFSDEKPWAGTLQRPVKLLPWSPEDIDTRFLLYTNENPNNFQLITGTEPDTIEASNFQLDRKTRFIIHGFLDKAEDSWPSDMCKKMFEVEKVNCICVDWRHGSRAMYTQAVQNIRVVGAETAFLIQALSTQLGYSLEDVHVIGHSLGAHTAAEAGRRLGGRVGRITGLDPAGPCFQDEPEEVRLDPSDAVFVDVIHTDSSPIVPSLGFGMSQKVGHLDFFPNGGKEMPGCKKNVLSTITDIDGIWEGIGGFVSCNHLRSFEYYSSSVLNPDGFLGYPCASYDEFQESKCFPCPAEGCPKMGHYADQFKGKTSAVEQTFFLNTGESGNFTSRYKISVTLSGKEKVNGYIRIALYGSNENSKQYEIFKGSLKPDASHTCAIDVDFNVGKIQKVKFLWNKRGINLSEPKLGASQITVQSGEDGTEYNFCSSDTVEENVLQSLYPC

SEQ ID NO: 82151 - protein, 294 aa, Homo sapiens
MYQVDFLDTNIIITEPYFNFTSIQESMNEILFEEYQFQAVLRVNAGALSAHRYFRDNPSELCCIIVDSGYSFTHIVPYCRSKKKKEAIIRINVGGKLLTNHLKEIISYRQLHVMDETHVINQVKEDVCYVSQDFYRDMDIAKLKGEENTVMIDYVLPDFSTIKKGFCKPREEMVLSGKYKSGEQILRLANERFAVPEILFNPSDIGIQEMGIPEAIVYSIQNLPEGFRDRVYSEVRCLTPTDYDVSVVLPENPITYAWEGGKLISENDDFEDMVVTREDYEENGHSVCEEKFDI

SEQ ID NO: 82152 - protein, 221 aa, Homo sapiens
MDHCGALFLCLCLLTLQNATTETWEELLSYMENMQVSRGRSSVFSSRQLHQLEQMLLNTSFPGYNLTLQTPTIQSLAFKLSCDFSGLSLTSATLKRVPQAGGQHARGQHAMQFPAELTRDACKTRPRELRLICIYFSNTHFFKDENNSSLLNNYVLGAQLSHGHVNNLRDPVNISFWHNQSLVLLGAPPFPLHPCPSVTLLLNTGLTRPKPVEPSWKSITL

SEQ ID NO: 82153 - protein, 189 aa, Homo sapiens
  MOD_RES (1)..(1): Any amino acid
XCGAALPPAPQRGICSSKWKVFIDQINRSLENYEPCSSQNCSCYHGVIEEDLTPFRGGISRKMMAEVVRRKLGTHYQITKNRLYRENDCMFPSRCSGVEHFILEVIGRLPDMEMVINVRDYPQVPKWMEPAIPVFSFSKTSEYHDIMYPAWTFWEGGPAVWPIYPTGLGRWDLFREDLVRSAAQWPWKK

SEQ ID NO: 82154 - protein, 72 aa, Homo sapiens
  MOD_RES (1)..(1): Any amino acid
XAQTQLDKLKKTNVFNATFHIWHSGQFGTINNFRLGRLPSVPVEWNEINAAWGQTVLLLHALANKMGLKFQR

SEQ ID NO: 82155 - protein, 126 aa, Homo sapiens
MGPTSVLRAGLTPSCLPPPSGATNGSVSPLGRAQRVWTEPGGRGLHGATAAGPVAAACPLLAVTATAPGQPSGASTVWVREGGTAPATRMTVPLAPRTSEKCSVLNLTASLSVGNSTSGKRTGEGA

SEQ ID NO: 82156 - protein, 66 aa, Homo sapiens
MAETDPKTVQDLTSVVRDGCEGRRPRPSRAAPGQALLDRGAPTAAARGVCRGPVSGSVSGRGSRPP

SEQ ID NO: 82157 - protein, 502 aa, Homo sapiens
MPEIRVTPLGACPVLSWNLVLPPGRGSRAPSSTDTRTGFHVLPHGVNDELEIKAYYAGHVLGAAMFQIKVGSESVVYTGDYNMTPDRHLGAAWIDKCRPNLLITESTYATTIRDSKRCRERDFLKKVHETVERGGKVLIPVFALGRAQELCILLETFWERMNLKVPIYFSTGLTEKANHYYKLFIPWTNQKIRKTFVQRNMFEFKHIKAFDRAFADNPGPMVVFATPGMLHAGQSLQIFRKWAGNEKNMVIMPGYCVQGTVGHKILSGQRKLEMEGRQVLEVKMQVEYMSFSAHADAKGIMQLVGQAEPESVLLVHGEAKKMEFLKQKIEQELRVNCYMPANGETVTLPTSPSIPVGISLGLLKREMAQGLLPEAKKPRLLHGTLIMKDSNFRLVSSEQALKELGLAEHQLRFTCRVHLHDTRKEQETALRVYSHLKSVLKDHCVQHLPDGSVTVESVLLQAAAPSEDPGTKVLLVSWTYQDEELGSFLTSLLKKGLPQAPS

SEQ ID NO: 82158 - protein, 47 aa, Homo sapiens
MAMDEYLWMVILGFIIAFILAFSVGANDVANSFGTAVGSGVVTLRQA

SEQ ID NO: 82159 - protein, 157 aa, Homo sapiens
MSVTLHTDVGDIKIEVFCERTPKTCEAGVQWRDLGSLQPPPPGFKQVFCLSLPRTGRGGNSIWGKKFEDEYSEYLKHNVRGVVSMANNGPNTNGSQFFITYGKQPHLDMKYTVFGKVIDGLETLDELEKLPVNEKTYRPLNDVHIKDITIHANPFAQ

SEQ ID NO: 82160 - protein, 165 aa, Homo sapiens
MIMPLYSKLGDREKKKRKEKASRPWAAVGTMAAAAAAGPSPGSGPGDSPEGPEGEAPERRRKAHGMLKLYYGLSEGEAAGRPAGPDPLDPTDLNGAHFDPEVYLDKLRRECPLAQLMDSETDMVRQIRALDSDMQTLVYENYNKFISATDTIRKMKNDFRKMEDE

SEQ ID NO: 82161 - protein, 408 aa, Homo sapiens
MDKNIGEQLNKAYEAFRQACMDRDSAVKELQQKTENYEQRIREQQEQLSLQQTIIDKLKSQLLLVNSTQDNNYGCVPLLEDSETRKNNLTLDQPQDKVISGIAREKLPKVRRQEVSSPRKETSARSLGSPLLHERGNIEKTFWDLKEEFHKICMLAKAQKDHLSKLNIPDTATETQCSVPIQCTDKTDKQEALFKPQAKDDINRGAPSITSVTPRGLCRDEEDTSFESLSKFNVKFPPMDNDSTFLHSTPERPGILSPATSEAVCQEKFNMEFRDNPGNFVKTEETLFEIQGIDPIASAIQNLKTTDKTKPSNLVNTCIRTTLDRAACLPPGDHNALYVNSFPLLDPSDAPFPSLDSPGKAIRGPQQSVHSCFSRWHPALYICFLYYSKGNSCPFGSPFLIKTVTRWY

SEQ ID NO: 82162 - protein, 97 aa, Homo sapiens
  MOD_RES (1)..(1): Any amino acid
XAGSPSRAAGRRLQLPLLCLFLQGATAVLFAVFVRYNHKTDAALWHRSNHSNADNEFYFRYPNGVSLLLPRLECNGTISAHHNLCLPGSSDSPASVS

SEQ ID NO: 82163 - protein, 274 aa, Homo sapiens
MRAPLLPPAPVVLSLLILGSGHYAAGLDLNDTYSGKREPFSGDHSADGFEVTSRSEMSSGSEISPVSEMPSSSEPSSGADYDYSEEYDNEPQIPGYIVDDSVRVEQVVKPPQNKTESENTSDKPKRKKKGGKNGKNRRNRKKKNPCNAEFQNFCIHGECKYIEHLEAVTCKCQQEYFGERCGEKSMKTHSMIDSSLSKIALAAIAAFMSAVILTAVAVITVQISHWSHCQVIAINDESVLFPVDHKTMDPFCYDGFKLSIVTFYAISVYKGARR

SEQ ID NO: 82164 - protein, 980 aa, Homo sapiens
METAAAAAPGPGWAAEGERRRRRCSRRDRDREQRRRRGPGGDAPRALLAAPRGSSSSSSPPPPARPWSSASSGERPGGPRRRRPRPRPRPPRPRARKRPAGSGSRGEEEEEEEEEGGADDGEAEEEPEEEEEEEEDLIDGFAIASFATLEALQKDASLQPPERLEHRLKHSGKRKRGGSSGATGEPGDSSDREPGRPPGDRARKWPNKRRRKEASSRHSLEAGYICDAESDLDERVSDDDLDPSFTVSTSKASGPHGAFNGNCEAKLSVVPKVSGLERSQEQPPGPDPLLVPFPPKEPPPPPVPRPPVSPPAPLPATPSLPPPPQPQLQLRVSPFGLRTSPYGSSLDLSTGSSSRPPPKAPAPPVAQPPPSSSSSSSSSSSASSSSAQLTHRPPTPSLPLPLSTHSFPPPGLRPPPPPHHPSLFSPGPTLPPPPPLLQVPGHPGASAANALSEQDLIGQDLNSRYLNAQGGPEVVGAGGSARPLAFQFHQHNHQHQHTHQHTHQHFTPYPPGLLPPHGPHMFEKYPGKMEGLFRHNPYTAFPPAVPGLPPGLPPAVSFGSLQGAFQPKSTNPELPPRLGPVPSGLSQKGTQIPDHFRPPLRKPGKWCAMHVRVAYMILRHQEKMKGDSHKLDFRNDLLPCLPGPYGALPPGQELSHPASLFTATGAVHAAANPFTAAPGAHGPFLSPSTHIDPFGRPTSFASLAALSNGAFGGLGSPTFNSGAVFAQKESPGAPPAFASPPDPWGRLHRSPLTFPAWVRPPEAARTPGSDKERPVERREPSITKEEKDRDLPFSRPQLRVSPATPKARAGEEGPRPTKESVRVKEERKEEAAAAAAAAAAAAAAAAAAATGPQGLHLLFERPRPPPFLGPSPPDRCAGFLEPTWLAAPPRLARPPRFYEAGEELTGPGAVAAARLYGLEPAHPLLYSRLAPPPPPAAAPGTPHLLSKTPPGALLGAPPPLVPAPRPSSPPRGPGPARADR

SEQ ID NO: 82165 - protein, 53 aa, Homo sapiens
  MOD_RES (1)..(1): Any amino acid
XHIRMVISAVSCAAVIPMIVCASLISITKLEWNPREKVIQELMATMVTHYEPH

SEQ ID NO: 82166 - protein, 83 aa, Homo sapiens
MRIEKCYFCSGPIYPGHGMMFVRNDCKVFRFCKSKCHKNFKKKRNPRKVRWTKAFRKAAGKELTVVSTVSYQYSFYTFHSFSI

SEQ ID NO: 82167 - protein, 93 aa, Homo sapiens
MSSRVGDLSPQQQEALARFRENLQDLLPILPNADDYFLLRWLRARNFDLQKSEDMLRRTQVPPAHLLSPRSESLAHGVPEATRPGQHCHMAAP

SEQ ID NO: 82168 - protein, 349 aa, Homo sapiens
MLLSVPLLLGLLGLAVAEPAVYFKEQFLDGDGWTSRWIESKHKSDFGKFVLSSGKFYGDEEKDKGPDICGPGTKKVHVIFNYKGKNVLINKDIRCKDDEFTHLYTLIVRPDNTYEVKIDNSQVESGSLEDDWDFLPPKKIKDPDASKPEDWDERAKIDDPTDSKPEDWDKPEHIPDPDAKKPEDWDEEMDGEWEPPVIQNPEYKGEWKPRQIDNPDYKGTWIHPEIDNPEYSPDPSIYAYDNFGVLGLDLWQVKSGTIFDNFLITNDEAYAEEFGNETWGVTKAAEKQMKDKQDEEQRLKEEEEDKKRKEEEEAEDKEDDEDKDEDEEDEEDKEEDEEEDVPGQAKDEL

SEQ ID NO: 82169 - protein, 145 aa, Homo sapiens
MHHCKRYRSPEPDPYLSYRWKRRRSYSREHEGRLRYPSRREPPPRRSRSRSHDRLPYQRRYRERRDSDTYRCEERSPSFGEDYYGPSRSRHRRRSRERGPYRTRKHAHHCHKRRTRSCSSASSREVSGCPEDHPQRGQVPGGCPA

SEQ ID NO: 82170 - protein, 507 aa, Homo sapiens
MKAGATSMWASCCGLLNEVMGTGAVRGQQSAFAGATGPFRFTPNPEFSTYPPAATEGPNIVCKACGLSFSVFRKKHVCCDCKKDFCSVCSVLQENLRRCSTCHLLQETAFQRPQLMRLKVKDLRQYLILRNIPIDTCREKEDLVDLVLCHHGLGSEDDMDTSSLNSSRSQTSSFFTRSFFSNYTAPSATMSSFQGELMDGDQTSRSGVPAQVQSEITSANTEDDDDDDDEDDDDEEENAEDRNPGLSKERVRASLSDLSSLDDVEGMSVRQLKEILARNFVNYSGCCEKWELVEKVNRLYKENEENQKSYGERLQLQDEEDDSLCRICMDAVIDCVLLECGHMVTCTKCGKRMRMSSCKGRLRNGPESSAVTIQKDQRKVSAHSSPKRVVEQLLPWKDLQNGIALWSVVPRSKWKIKALIFVKSLPSQSPPRIYILILGLTQFLQEFFFYLPKLDTHRHLGYELLTAFLGDLLAVPQVNMTDVSTAFEEGQALISDLIAVCREEIVM

SEQ ID NO: 82171 - protein, 174 aa, Homo sapiens
  MOD_RES (1)..(1): Any amino acid
XMCADKPGSSPDPSGEVNTNVAFCSVLRSRLGSHPLLFSGEVDCTDPQAPSTQPPTCYVELKTSKEMHSPGQWRSFYRFRIGTFPTMKMFEYVRNDRDGWNPSVCMNFCAAFLSFAQSTVVQDDPRLVHLFSWEPGGPVTVSVHQDAPYAFLPIWYVEAMTQDLPSPPKTPSPK

SEQ ID NO: 82172 - protein, 152 aa, Homo sapiens
MQCKTNGDCRVEECALGQDLCRTTIVRLWEEGEELELVEKSCTHSEKTNRTLSYRTGLKITSLTEVVCGLDLCNQGNSGRAVTYSRSRYLECISCGSSDMSCERGRHQSLQCRSPEEQCLDVVTHWIQEGEEGRPKDDRHLRGCGYLPGCPG

SEQ ID NO: 82173 - protein, 21 aa, Homo sapiens
MLLILLSVALLALSSAQNLNE

SEQ ID NO: 82174 - protein, 160 aa, Homo sapiens
MIAKLAKTCTLRISPDKLNFILCDKLANGGVSMWCELEQENFFNEFQMEGVSAENNEIYLELTSENLSRALKTAQNARALKIKLTNKHFPCLTVSVELLSMSSSSRIVTHDIPIKVIPRKLWKDLQEPVVPDPDDLIFSSAGQERYLDVHESQEEKNFMA

SEQ ID NO: 82175 - protein, 114 aa, Homo sapiens
MDAFTGSGLKRKFDDVDVGSSVSNSDDEISSSDSADSCDSLNPPTTASFTPTSILKRQKQLRRKNVRFDQVTVYYFARRQGFTSVPSQGGSSLGMAQRHNSVRSYTLCEFAQEQ

SEQ ID NO: 82176 - protein, 114 aa, Homo sapiens
MAAFKLDFLPEMMVDHCSLNSSPVSKKMNGTLDHPDQPDLDAIKMFVGQVPRTWSEKDLRELFEQYGAVYEINVLRDRSQNPPQSKGCCFVTFYTRKAALEAQNALHNMKVLPG

SEQ ID NO: 82177 - protein, 279 aa, Homo sapiens
MLQLRPQVILNCLRRSRPCSLCQDYLKNLIEDAGDYRDTQDALAVVIEVANHANDTMKQGDNFQKLMQIQYSLNGHHEIVQPGRVFLKEGILMKLSRKVMQPRMFFLFNDALLYTTPVQSGMYKLNNMLSLAGMKVRKPTQEAYQNELKIESVERSFILSASSATERDEWLEAISRAIEEYAKKRITFCPSRSLDEADSENKEEVSPLGSKAPIWIPDTRATMCMICTSEFTLTWRRHHCRACGKIVCQACSSNKYGLDYLKNQPARVCEHCFQELQKL

SEQ ID NO: 82178 - protein, 74 aa, Homo sapiens
MLCEGEAQKRKAEESGMPLTQGHLTFRDVAIEFSQEEWKCLDPVQKALYRDVMLENYRNLVSLGICLPDLSIIS

SEQ ID NO: 82179 - protein, 67 aa, Homo sapiens
MENGGAGTLQIRQVLLFFVLLGMSQAGSETGNFLVMEELQSGSFVGNLAKTLGLEHLWILKQLSHTQ

SEQ ID NO: 82180 - protein, 29 aa, Homo sapiens
  MOD_RES (1)..(1): Any amino acid
XEVPELAKMSQEGMAMKSPRPSKPKLFLL

SEQ ID NO: 82181 - protein, 292 aa, Homo sapiens
MVTPQTSQRGSLAAPLGYFQVLFKTHCAENLLKADTYRKWRAAKAGEKTISVVLQLEKEEQIHSVDIGNDGSAFVEVLVGSSAGGAGEQDYEVLLVTSSFMSPSESRSGSNPNRVRMFGPDKLVRAAAEKRWDRVKIVCSQPYSKDSPFGLSFVRFHSPPDKDEAEAPSQKVTVTKLGQFRVKEEDESANSLRPGALFFSRINKTSPVTASDPAGPSYAAATLQASSAASSASPVSRAIGSTSKPQESPKGKRKLDLNQEEKKTPSKPPAQLSPSVPKRPKLPAPTRTPATA

SEQ ID NO: 82182 - protein, 62 aa, Homo sapiens
MKGTGMRPPHPGMGPPQSPMDQHSQGYMSPHPSPLGAPEHVSSPMSGGGPTPPQMPPSQPGA

SEQ ID NO: 82183 - protein, 60 aa, Homo sapiens
AFGAEVGVRLALFAAFLVTELLPPFQRLIQPEEMWLYRNPYVEAEYFPTKPMFLPALPWL

SEQ ID NO: 82184 - protein, 450 aa, Homo sapiens
MSEEPKEKNAKPAHRKRKGKKSDANASYLRAARAGHLEKALDYIKNGVDINICNQNGLNALHLASKEGHVEVVSELLQREANVDAATKKGNTALHIASLAGQAEVVKVLVTNGANVNAQSQNGFTPLYMAAQENHLEVVKFLLDNGASQSLATEDGFTPLAVALQQGHDQVVSLLLENDTKGKVRLPALHIAARKDDTKAAALLLQNDNNADVESKSGFTPLHIAAHYGNINVATLLLNRAAAVDFTARNDITPLHVASKRGNANMVKLLLDRGAKIDAKTRDGLTPLHCGARSGHEQVVEMLLDRAAPILSKTKNGLSPLHMATQGDHLNCVQLLLQHNVPVDDVTNDYLTALHVAAHCGHYKVAKVLLDKKANPNAKALNGFTPLHIACKKNRIKVMELLLKHGASIQAVTESGLTPIHVAAFMGHVNIVSQLMHHGASPNTTNVSCS

SEQ ID NO: 82185 - protein, 153 aa, Homo sapiens
MAGNAEPPPAGAACPQDRRSCSGRAGGDRVWEDGEHPAKKLKSGGDEERREKPPKRKIVLLMAYSGKGYHGMQRNVGSSQFKTIEDDLVSALVRSGCIPENHGEDMRKMSFQRCARTDKGVSAAGQVVSLKVWLIDDILEKINSHLPSHIRIL

SEQ ID NO: 82186 - protein, 451 aa, Homo sapiens
MAVFPWHSRNRNYKAEFASCRLEAVPLEFGDYHPLKPITVTESKTKKVNRKGSTSSTSSSSSSSVVDPLSSVLDGTDPLSMFAATADPAALAAAMDSSRRKRDRDDNSVVGSDFEPWTNKRGEILARYTTTEKLSINLFMGSEKGKAGTATLAMSEKVRTRLEELDDFEEGSQKELLNLTQQDYVNRIEELNQSLKDAWASDQKVKALKIVIQCSKLLSDTSVIQFYPSKFVLITDILDTFGKLVYERIFSMCVDSRSVLPDHFSPENANDTAKETCLNWFFKIASIRELIPRFYVEASILKCNKFLSKTGISECLPRLTCMIRGIGDPLVSVYARAYLCRVGMEVAPHLKETLNKNFFDFLLTFKQIHGDTVQNQLVVQGVELPSYLPLYPPAMDWIFQCISYHAPEVTARWLQCDAHLLYGDSPCPLCPLTLMGPFHNSYSNVSASQPL

SEQ ID NO: 82187 - protein, 102 aa, Homo sapiens
  MOD_RES (1)..(1): Any amino acid
XELLKHNPKRRKITSNCTIGLRGLINLGNTCFMNCIVQALTHTPLLRDFFLSDRHRCEMQSPSSCLVCEMSSLFQEWSLHHHRPLLGHQLGSPRLFHPILAP

SEQ ID NO: 82188 - protein, 184 aa, Homo sapiens
MKPRPAGFVDNKLKQRVIQYLTSNKCGKYVDIGVLASDLQRVYSIDYGRRKRNAFRIQVEKVFSIISSEKELKNLTELEDEHLAKRARQGEEDNEYTESYSDDDSSMEDYPDPQDSKDSSLLESDMKRKGKLKNKGSKRKKEDLQEVDGEIEAVLQKKAKARGLEFQISNVKFEDVGGNDMTLK

SEQ ID NO: 82189 - protein, 969 aa, Homo sapiens
MEGDRVAGRPVLSSLPVLLLLPLLMLRAAALHPDELFPHGESWGDQLLQEGDDESSAVVKLANPLHFYEARFSNLYVGTNGIISTQDFPRETQYVDYDFPTDFPAIAPFLADIDTSHGRGRVLYRVNGKVSGHLHVGHTPVHFTDVDLHAYIVGNDGRAYTAISHIPQPAAQALLPLTPIGGLFGWLFALEKPGSENGFSLAGAAFTHDMEVTFYPGEETVRITQTAEGLDPENYLSIKTNIQGQVPYVSANFTAHISPYKELYHYSDSTVTSTSSRDYSLTFGAINQTWSYRIHQNITYQVCRHAPRHPSFPTTQQLNVDRVFALYNDEERVLRFAVTNQIGPVKEDSDPTPGNPCYDGSHMCDTTARCHPGTGVDYTCECASGYQGDGRNCVDENECATGFHRCGPNSVCINLPGSYRCECRSGYEFADDRHTCILITPPANPCEDGSHTCAPAGQARCVHHGGSTFSCACLPGYAGDGHQCTDVDECSENRCHPAATCYNTPGSFSCRCQPGYYGDGFQCIPDSTSSLTPCEQQQRHAQAQYAYPGARFHIPQCDEQGNFLPLQCHGSTGFCWCVDPDGHEVPGTQTPPGSTPPHCGPSPEPTQRPPTICERWRENLLEHYGGTPRDDQYVPQCDDLGHFIPLQCHGKSDFCWCVDKDGREVQGTRSQPGTTPACIPTVAPPMVRPTPRPDVTPPSVGTFLLYTQGQQIGYLPLNGTRLQKDAAKTLLSLHGSIIVGIDYDCRERMVYWTDVAGRTISRAGLELGAEPETIVNSGLISPEGLAIDHIRRTMYWTDSVLDKIESALLDGSERKVLFYTDLVNPRAIAVDPIRGNLYWTDWNREAPKIETSSLDGENRRILINTDIGLPNGLTFDPFSKLLCWADAGTKKLECTLPDGTGRRVIQNNLKYPFSIVSYADHFYHTDWRRDGVVSVNKHSGQFTDEYLPEQRSHLYGITAVYPYCPTGRK

SEQ ID NO: 82190 - protein, 12 aa, Homo sapiens
MQDCVLVRVYGE

SEQ ID NO: 82191 - protein, 317 aa, Homo sapiens
  MOD_RES (1)..(1): Any amino acid
XDPAAYPDMESDIRSWELFLSNVTKEIEKAKVHPELLPESSGDDGQGLVTSASDVTGNHAALHRDPSVFSAGDSPGEAPSALLPGPPPGQPEATQLTGPKRAGQAALSERSPVADRKQPVPPGRAARSSQSPKKPFNSIIEHLSVVFPCYNSTELAGFIKKVRSKNKNSLSGLSIDEIVQRVTEHILDEQKKKKPNPGKDKRTYEPSSATPVTRSSQGSPSVVVAPSPKTKGQKAEDVPVRIALGASSCEICHEVFKSKNVRVLKCGHKYHKGCFKQWLKGQSACPACQGRDLLTEESPSGRGWPSQNQELPSCSSR

SEQ ID NO: 82192 - protein, 38 aa, Homo sapiens
  MOD_RES (1)..(1): Any amino acid
XKEGVNITICFQIKSLIPQFQAGWPPDQKTGVVPRRET

SEQ ID NO: 82193 - protein, 274 aa, Homo sapiens
  MOD_RES (1)..(1): Any amino acid
XVSLHVRTSDCAYFILVDRYLSWFLPTEGSVPPPLSSSPGGTSPSPPPRTPAIPFASYGLHHTSLLKRHISHQTSVNADPASHEIWRSETLLQVFVEMWLHHYSLEMYQKMQSPHAKVLEMWLSYLQPWRYAPDKQAPGSDSQPRCVSEKWAPFVQENLLMYTKLFVGFLNRALRTDLVSPKHALMVFRVAKVFAQPNLAEMIQKGEQLFLEPELVIPHRQHRLFTAPTFTGSFLSPWPPAVTDASFKVKSHVYSLEGQDCKYTPMFGPEARTL

SEQ ID NO: 82194 - protein, 108 aa, Homo sapiens
MRLLLALLGVLLSVPGPPVLSLEASEEVELEPCLAPSLEQQEQELTVALGQPVRLCCGRAERGGHWYKEGSRLAPAGRVRGWRGRLEIASFLPEDAGRYLCLARGSMI

SEQ ID NO: 82195 - protein, 56 aa, Homo sapiens
MAMTAGTTTTFPMSNHTRERVTVAKLTLENFYSNLILQHEERETRGENWKSFNKQH

SEQ ID NO: 82196 - protein, 160 aa, Homo sapiens
QAEQPSQPSSTPGSENVLPREPLIATAVKFLQNSRVRQSPLATRRAFLKKKGLTDEEIDMAFQQSGTAADEPSSLGPATQVVPVQPPHLISQPYSPAGSRWRDYGALAIIMAGIAFGFHQLYKKYLLPLILGGREDRKQLERMEAGLSELSGSVAQTGKD

SEQ ID NO: 82197 - protein, 134 aa, Homo sapiens
MSGGDTRAAIARPRMAAAHGPVAPSSPEQNGAVPSEATKRDQNLKRGNWGNQIEFVLTSVGYAVGLGNVWRFPYLCYRNGGGAFMFPYFIMLIFCGIPLFFMELSFGQFASQGCLGVWRISPMFKGVGYGMMVV

SEQ ID NO: 82198 - protein, 102 aa, Homo sapiens
MLENYRNLASLGISCFDLSIISMLEQGKEPFTLESQVQIAGNPDGWEWIKAVITALSSEFVMKDLLHKGKSNTGEVFQTVMLERQESQDIEGCSFREVQKNT

SEQ ID NO: 82199 - protein, 482 aa, Homo sapiens
MANVYTMEEFMELGNEVPEEALDAIIDTQQPNQCCVLVYTSGTTGNPKGVMLSQDNITWTARYGSQAGDIRPAEVQQEVVVSYLPLSHIAAQIYDLWTGIQWGAQVCFAEPDALKGSLVNTLREVEPTSHMGVPRVWEKIMERIQEVAAQSGFIRRKMLLWAMSVTLEQNLTCPGSDLKPFTTRLADYLVLAKVRQALGFAKCQKNFYGAAPMMAETQHFFLGLNIRLYAGYGLSETSGPHFMSSPYNYRLYSSGKLVPGCRVKLVNQDAEGIGEICLWGRTIFMGYLNMEDKTCEAIDEEGWLHTGDAGRLDADGFLYITGRLKELIITAGGENVPPVPIEEAVKMELPIISNAMLIGDQRKFLSMLLTLKCTLDPDTSDQTDNLTEQAMEFCQRVGSRATTVSEIIEKKDEAVYQAIEEGIRRVNMNAAARPYHIQKWAILERDFSISGGELGPTMKLKRLTVLEKYKGIIDSFYQEQKM

SEQ ID NO: 82200 - protein, 1665 aa, Homo sapiens
METCDSPPISRQENGQSTSKLCGTTQLDNEVPEKVAGMEPDRENSSTDDNLKTDERKSEALLGFSVENAAATQVTSAKEIPCNECATSFPSLQKYMEHHCPNARLPVLKDDNESEISELEDSDVENLTGEIVYQPDGSAYIIEDSKESGQNAQTGANSKLFSTAMFLDSLASAGEKSDQSASAPMSFYPQIINTFHIASSLGKPFTADQAFPNTSALAGVGPVLHSFRVYDLRHKREKDYLTSDGSAKNSCVSKDVPNNVDLSKFDGCVSDGKRKPVLMCFLCKLSFGYIRSFVTHAVHDHRMTLNDEEQKLLSNKCVSAIIQGIGKDKEPLISFLEPKKSTSVYPHFSTTNLIGPDPTFRGLWSAFHVENGDSLPAGFAFLKGSASTSSSAEQPLGITQMPKAEVNLGGLSSLVVNTPITSVSLSHSSSESSKMSESKDQENNCERPKESNVLHPNGECPVKSEPTEPGDEDEEDAYSNELDDEEVLGELTDSIGNKDFPLLNQSISPLSSSVLKFIEKGTSSSSATVSDDTEKKKQTAAVRASGSVASNYGISGKDFADASASKDSATAAHPSEIARGDEDSSATPHQHGFTPSTPGTPGPGGDGSPGSGIECPKCDTVLGSSRSLGGHMTMMHSRNSCKTLKCPKCNWHYKYQQTLEAHMKEKHPEPGGSCVYCKTGQPHPRLARGESYTCGYKPFRCEVCNYSTTTKGNLSIHMQSDKHLNNVQNLQNGNGEQVFGHSAPAPNTSLSGCGTPSPSKPKQKPTWRCEVCDYETNVARNLRIHMTSEKHMHNMMLLQQNMKQIQHNLHLGLAPAEAELYQYYLAQNIGLTGMKLENPADPQLMINPFQLDPATAAALAPGLVNNELPPEIRLASGQLMGDDLSLLTAGELSPYISDPALKLFQCAVCNKFTSDSLEALSVHVSSERSLPEEEWRAVIGDIYQCKLCNYNTQLKANFQLHCKTDKHMQKYQLVAHIKEGGKSNEWRLKCIAIGNPVHLKCNACDYYTNSVDKLRLHTTNHRHEAALKLYKHLQKQEGAVNPESCYYYCAVCDYTTKVKLNLVQHVRSVKHQQTEGLRKLQLHQQGLAPEEDNLSEIFFVKDCPPNELETASLGARTCDDDLTEQQLRSTSEEQSEEAEGAIKPTAVAEDDEKDTSERDNSEGKNSNKDSGIITPEKELKVSVAGGTQPLLLAKEEDVATKRSKPTEDNKFCHEQFYQCPYCNYNSRDQSRIQMHVLSQHSVQPVICCPLCQDVLSNKMHLQLHLTHLHSVSPDCVEKLLMTVPVPDVMMPNSMLLPAAASEKSERDTPAAVTAEGSGKYSGESPMDDKSMAGLEDSKANVEVKNEEQKPTKEPLEVSEWNKNSSKDVKIPDTLQDQLNEQQKRQPLSVSDRHVYKYRCNHCSLAFKTMQKLQIHSQYHAIRAATMCNLCQRSFRTFQALKKHLEAGHPELSEAELQQLYASLPVNGELWAESETMSQDDHGLEQEMEREYEVDHEGKASPVGSDSSSIPDDMGSEPKRTLPFRKGPNFTMEKFLDPSRPYKCTVCKESFTQKNILLVHYNSVSHLHKLKKVLQEASSPVPQETNSNTDNKPYKCSICNVAYSQSSTLEIHMRSVLHQTKARAAKLEPSGHVAGGHSIAANVNSPGQGMLDSMSLAAVNSKDTHL

SEQ ID NO: 82201 - protein, 1096 aa, Homo sapiens
MSPPRAAAAAGQNNMAARRITQETFDAVLQEKAKRYHMDASGEAVSETLQFKAQDLLRAVPRSRAEMYDDVHSDGRYSLSGSVAHSRDAGREGLRSDVFPGPSFRSSNPSISDDSYFRKECGRDLEFSHSDSRDQVIGHRKLGHFRSQDWKFALRGSWEQDFGHPVSQESSWSQEYSFGPSAVLGDFGSSRLIEKECLEKESRDYDVDHPGEADSVLRGGSQVQARGRALNIVDQEGSLLGKGETQGLLTAKGGVGKLVTLRNVSTKKIPTVNRITPKTQGTNQIQKNTPSPDVTLGTNPGTEDIQFPIQKIPLGLDLKNLRLPRRKMSFDIIDKSDVFSRFGIEIIKWAGFHTIKDDIKFSQLFQTLFELETETCAKMLASFKCSLKPEHRDFCFFTIKFLKHSALKTPRVDNEFLNMLLDKGAVKTKNCFFEIIKPFDKYIMRLQDRLLKSVTPLLMACNAYELSVKMKTLSNPLDLALALETTNSLCRKSLALLGQTFSLASSFRQEKILEAVGLQDIAPSPAAFPNFEDSTLFGREYIDHLKAWLVSSGCPLQVKKAEPEPMREEEKMIPPTKPEIQAKAPSSLSDAVPQRADHRVVGTIDQLVKRVIEGSLSPKERTLLKEDPAYWFLSDENSLEYKYYKLKLAEMQRMSENLRGADQKPTSADCAVRAMLYSRAVRNLKKKLLPWQRRGLLRAQGLRGWKARRATTGTQTLLSSGTRLKHHGRQAPGLSQAKPSLPDRNDAAKDCPPDPVGPSPQDPSLEASGPSPKPAGVDISEAPQTSSPCPSADIDMKTMETAEKLARFVAQVGPEIEQFSIENSTDNPDLWFLHDQNSSAFKFYRKKVFELCPSICFTSSPHNLHTGGGDTTGSQESPVDLMEGEAEFEDEPPPREAELESPEVMPEEEDEDDEDGGEEAPAPGGAGKSEGSTPADGLPGEAAEDDLAGAPALSQASSGTCFPRKRISSKSLKVGMIPAPKRVCLIQEPKVHEPVRIAYDRPRGRPMSKKKKPKDLDFAQQKLTDKNLGFQMLQKMGWKEGHGLGSLGKGIREPVSVGTPSEGEGLGADGQEHKEDTFDVFRQRMMQMYRHKRANK

SEQ ID NO: 82202 - protein, 16 aa, Homo sapiens
DAFDIWGQGTMVTVSS

SEQ ID NO: 82203 - protein, 63 aa, Homo sapiens
MVEDGAEELEDLVHFSVSELPSRGYGVMEEIRRQGKLCDVTLKPTEFSDEMRRSCFSTFELPL

SEQ ID NO: 82204 - protein, 96 aa, Homo sapiens
MWAPREQLLGWTAEALPAKDSAWPWEEKPRYLGPVTFEDVAVLFTEAEWKRLSLEQRNLYKEVMLENLRNLVSLVLELGSPRSGLLPLDLNLDLWL

SEQ ID NO: 82205 - protein, 1285 aa, Homo sapiens
MGKDQELLEAARTGNVALVEKLLSGRKGGILGGGSGPLPLSNLLSIWRGPNVNCTDSSGYTALHHAALNGHKDIVLKLLQYEASTNVADNKGYFPIHLAAWKGDVEIVKILIHHGPSHSRVNEQNNENETALHCAAQYGHSEVVAVLLEELTDPTIRNSKLETPLDLAALYGRLRVVKMIISAHPNLMSCNTRKHTPLHLAARNGHKAVVQVLLEAGMDVSCQTEKGSALHEAALFGKVDVVRVLLETGIDANIKDSLGRTVLDILKEHPSQKSLQIATLLQEYLEGVGRSTVLEEPVQEDATQETHISSPVESPSQKTKSETVTGELSKLLDEIKLCQEKDYSFEDLCHTISDHYLDNLSKISEEELGKNGSQSVRTSSTINLSPGEVEEEDDDENTCGPSGLWEALTPCNGCRNLGFPMLAQESYPKKRNYTMEIVPSASLDTFPSENENFLCDLMDTAVTKKPCSLEIARAPSPRTDNASEVAVTTPGTSNHRNSSTGPTPDCSPPSPDTALKNIVKVIRPQPKQRTSIVSSLDFHRMNHNQEYFEINTSTGCTSFTASPPASPPTSSVGTTEVKNEGTNHTDDLSRQDDNDPPKEYDPGQFAGLLHGSSPACESPENPFHLYGKREQCEKGQDEVSLANSPLPFKQSPIENNSEPLVKKIKPKVVSRTIFHKKSNQLENHTIVGTRSTRSGSRNGDQWVMNAGGFVERACTLGRIRSLPKALIDMHLSKSVSKSDSDLIAYPSNEKTSRVNWSESSTAEHSSKGNSERTPSFTSEWEEIDKIMSSIDVGINNELKEMNGETTRPRCPVQTVGQWLESIGLPQYENHLMANGFDNVQFMGSNVMEDQDLLEIGILNSGHRQRILQAIQLLPKMRPIGHDGYHPTSVAEWLDSIELGDYTKAFLINGYTSMDLLKKIWEVELINVLKINLIGHRKRILASLGDRLHDDPPQKPPRSITLREPSGNHTPPQLSPSLSQSTYTTGGSLDVPHIIMQGDARRRRNENYFDDIPRSKLERQMAQQSSVCEIWTNQNAGFPFSAIHQVHNTGDWGEPSITLRPPNEATASTPVQYWQHHPEKLIFQSCDYKAFYLGSMLIKELRGTESTQDACAKMRANCQKSTEQMKKVPTIILSVSYKGVKFIDATNKNIIAEHEIRNISCAAQDPEDLSTFAYITKDLKSNHHYCHVFTAFDVNLAYEIILTLGQAFEVAYQLALQARKGGHSSTLPESFENKPSKPIPKPRVSIRKSVQIDPSEQKTLANLPWIVEPGQEAKRGINTKYETTIF

SEQ ID NO: 82206 - protein, 437 aa, Homo sapiens
  MOD_RES (1)..(1): Any amino acid
XLPFCGIAISNAQLFAASRKEYERSRALLEVVNDLFEEQTDLEKIVKKIMHRAQTLLKCERCSVLLLEDIESPVVKFTKSFELMSPKCSADAENSFKESMEKSSYSDWLINNSIAELVASTGLPVNISDAYQDPRFDAEADQISGFHIRSVLCVPIWNSNHQIIGVAQVLNRLDGKPFDDADQRLFEVLSYHATCSKAEVDKFKAANIPLVSELAIDDIHFDDFSLDVDAMITAALRMFMELGMVQKFKIDYETLCRWLLTVRKNYRMVLYHNWRHAFNVCQLMFAMLTTAGFQDILTEVEILAVIVGCLCHDLDHRGTNNAFQAKSGSALAQLYGTSATLEHHHFNHAVMILQSEGHNIFANLSSKEYSDLMQLLKQSILATDLTLYFERRTEFFELVSKGEYDWNIKNHRDIFRSMLMTACDLGAVTKPWEISRQ

SEQ ID NO: 82207 - protein, 118 aa, Homo sapiens
  MOD_RES (1)..(1): Any amino acid
XLALLGPAGAVAPSTRPRCLPATRSSSLSSWSSSRAGAFLTASAGTAWPTWTPRSGMLEAGVDRIISQVVDPKLNHIFRPQIERAIHEFLAAQKKAAVPAPPPEPEGQDPPAPSQDTS

SEQ ID NO: 82208 - protein, 93 aa, Homo sapiens
METVVIVAIGVLATIFLASFAALVLVCRQRYCRPRDLLQRYDSKPIVDLIGAMETQSEPSELELDDVVITNPHIEAILENEDWIEDASGLMSH

SEQ ID NO: 82209 - protein, 29 aa, Homo sapiens
MRNGGLGSILDNSQMDSVEKTTNRSEQKS

SEQ ID NO: 82210 - protein, 45 aa, Homo sapiens
MLQFLLGFTLGNVVGMYLAQNYDGIGSPSVSQAGVQWWDLGSLQL

SEQ ID NO: 82211 - protein, 214 aa, Homo sapiens
LLQNTPEEIARFLYKGEGLNKTAIGDYLGEREELNLAVLHAFVDLHEFTDLNLVQALRQFLWSFRLPGEAQKIDRMMEAFAQRYCLCNPGVFQSTDTCYVLSFAVIMLNTSLHNPNVRDKPGLERFVAMNRGINEGGDLPEELLRNLYDSIRNEPFKIPEDDGNDLTHTFFNPDREGWLLKLGTCPPDPAGPSAGGHLWAWALDSASAHTCCLN

SEQ ID NO: 82212 - protein, 660 aa, Homo sapiens
MCGPAMFPAGPPWPRVRVVQVLWALLAVLLASWRLWAIKDFQECTWQVVLNEFKRVGESGVSDSFFEQEPVDTVSSLFHMLVDSPIDPSEKYLGFPYYLKINYSCEEKPSEDLVRMGHLTGLKPLVLVTFQSPVNFYRWKIEQLQIQMEAAPFRSKEPCMAEEVCSMSWYTPMPIKKGSVVMRVDISSNGLGTFIPDKRFQMNINGFLKRDRDNNIQFTVGEELFNLMPQYFVGVSSRPLWHTVDQSPVLILGGIPNEKYVLMTDTSFKDFSLVELSIDSCWVGSFYCPHSGFTATIYDTIATESTLFIRQNQLVYYFTGTYTTLYERNRGSGSWIRVLASECIKKLCPVYFHSNGSEYIMALTTGKHEGYVHFGTIRDGQVSFEMLPRQWSVCEQIGVTTCSIIWSEYIAGEYTLLLLVESGYGNASKRFQVVSYNTASDDLELLYHIPEFIPEARGLEFLMILGTESYTSTAMAPKGIFCNPYNNLIFIWGNFLLQSSNKENFIYLADFPKELSIKYMARSFRGAVAIVTETEEIWYLLEGSYRVYQLFPSKGWQVHISLKLMQQSSLYASNETMLTLFYEDSKLYQLVYLMNNQKGQLVKRLVPVEQLLMYQQHTSHYDLERKGGYLMLSFIDFCPFSVMRLRSLPSPQRYTRQERY

SEQ ID NO: 82213 - protein, 75 aa, Homo sapiens
MRPRGLPPLLVVLLGCWASVSAQTDATPAVTTEGLNSTEAALATFGTFPSTRPPGTPRAPGPSSGPRPTPVTDGG

SEQ ID NO: 82214 - protein, 45 aa, Homo sapiens
MSEDEEKVKLRRLEPAIQKFIKIVIPTDLERLRKHQINIEKVYIH

SEQ ID NO: 82215 - protein, 118 aa, Homo sapiens
MGNCHTVGPNEALVVSGGCCGSDYKQYVFGGWAWAWWCISDTQRLSLEVMTILCRCENIETSEGVPLFVTGVAQDFPRDYDVAAPLRGRRDGRGGSFNCDGCRPGEDHDGEGTPGRGL

SEQ ID NO: 82216 - protein, 223 aa, Homo sapiens
MARSGSATPPARAPGAPPRSPPQRLDVSGPLRELRPRLCHLRKGPQGYGFNLHSDKSRPGQYIRSVDPGSPAARSGLRAQDRLIEVNGQNVEGLRHAEVVASIKAREDEARLLVVDPETDEHFKRLRVTPTEEHVEGPLPSPVTNGTSPAQLNGGSACSSRSDLPGSDKDTEDGSAWKQDPFQESGLHLSPTAAEAKEKARAMRVNKRAPQMDWNRKREIFSN

SEQ ID NO: 82217 - protein, 89 aa, Homo sapiens
MKEEAFLRRRFSLCPPSSTPQKVDPRKLTRNLLLSGDNELYPLSPGKDMEPNGPSLPRDEGPPTPSSATKVPPAEYRLCNGSDKECVSP

SEQ ID NO: 82218 - protein, 322 aa, Homo sapiens
MLFDKVKAFSVQLDGATAGVEPVFSGGQAVAGRVLLELSSAARVGALRLRARGRAHVHWTESRSAGSSTAYTQSYSERVEVVSHRATLLAPGTDGGPLLQHQLCASHHLDGGTSVSPGTPAQPLSRLLFLLPADTGETTTLPPGRHEFLFSFQLPPTLVTSFEGKHGSVRYCIKATLHRPWVPARRARKVFTVIEPVDINTPALLAPQAGAREKVARSWYCNRGLVSLSAKIDRKGYTPGEVIPVFAEIDNGSTRPVLPRAAVVQTQTFMARGARKQKRAVVASLAGEPVGPGQRALWQGRALRIPPVGPSILHCRVLHVDY

SEQ ID NO: 82219 - protein, 398 aa, Homo sapiens
MRPRGLPPLLVVLLGCWASVSAQTDATPAVTTEGLNSTEAALATFGTFPSTRPPGTPRAPGPSSGPRPTPVTDVAVLCVCDLSPAQCDINCCCDPDCSSVDFSVFSACSVPVVTGDSQFCSQKAVIYSLNFTANPPQRVFELVDQINPSIFCIHITNYKPALSFINPEVPDENNFDTLMKTSDGFTLNAESYVSFTTKLDIPTAAKYEYGVPLQTSDSFLRFPSSLTSSLCTDNNPAAFLVNQAVKCTRKINLEQCEEIEALSMAFYSSPEILRVPDSRKKVPITVQSIVIQSLNKTLTRREDTDVLQPTLVNAGHFSLCVNVVLEVKYSLTYTDAGEVTKADLSFVLGTVSSVVVPLQQKFEIHFLQTDWSSPVSARSTEGEEPAVGPGLPRLRGPF

SEQ ID NO: 82220 - protein, 39 aa, Homo sapiens
MRIFIAFEGSFEPFDVSADETVEVVKLMIKTNKAGGIWS

SEQ ID NO: 82221 - protein, 277 aa, Homo sapiens
  MOD_RES (1)..(1): Any amino acid
XRKGHPLLVAVKILRPDATKNARNDFLKEVKIMSRLKDPNIIRLLGVCVQDDPLCMITDYMENGDLNQFLSAHQLEDKAAEGAPGDGQAAQGPTISYPMLLHVAAQIASGMRYLATLNFVHRDLATRNCLVGENFTIKIADFGMSRNLYAGDYYRVQGRAVLPIRWMAWECILMGKFTTASDVWAFGVTLWEVLMLCRAQPFGQLTDEQVIENAGEFFRDQGRQVRVEEREDGSEAGDRRGRVVILETKEYLFPDSHPHCHNAGVPVPAACLPAGPI

SEQ ID NO: 82222 - protein, 88 aa, Homo sapiens
MKKARNDEYENLFNMIVEIPRWTNAKMEIATKEPMNPIKQYVKDGKLRYVANIFPYKGYIWNYGTLPQTWEDPHEKDKSTNCFGDNDP

SEQ ID NO: 82223 - protein, 41 aa, Homo sapiens
IQEVVQYIKRLEEAQSKRQEKLVEKHKEIRQQILDEKPKVP

SEQ ID NO: 82224 - protein, 38 aa, Homo sapiens
MDPRKVNELRAFVKMCKQDPSVLHTEEMRFLREWVERN

SEQ ID NO: 82225 - protein, 376 aa, Homo sapiens
MTLPMSDPTAWATAMNNLGMAPLGIAGQPILPDFDPALGMMTGIPPITPMMPGLGIVPPPIPPDMPVVKEIIHCKSCTLFPPNPNLPPPATRERPPGCKTVFVGGLPENGTEQIIVEVFEQCGEIIAIRKSKKNFCHIRFAEEYMVDKALYLSGYRIRLGSSTDKKDTGRLHVDFAQARDDLYEWECKQRMLAREERHRRRMEEERLRPPSPPPVVHYSDHECSIVAEKLKDDSKFSEAVQTLLTWIERGEVNRRSANNFYSMIQSANSHVRRLVNEKAAHEKDMEEAKEKFKQALSGILIQFEQIVAVYHSASKQKAWDHFTKAQRKNISVWCKQAEEIRNIHNDELMGIRREEEMEMSDDEIEEMTETKETEES

SEQ ID NO: 82226 - protein, 95 aa, Homo sapiens
MSLPIGIYRRAVSYDDTLEDPAPMTPPPSDMGSVPWKPVIPERKYQHLAKVEEGEASLPSPAMTLSSAIDSVDKVPVVKAKATHVIMNSLITKQT

SEQ ID NO: 82227 - protein, 92 aa, Homo sapiens
  MOD_RES (1)..(1): Any amino acid
XGETAFKNMTIPYGWAKRPMLQRIGKMHPDIPVSVIFGARSCIDGNSGTSIQSLRPHSYVKTIAILGAGHYVYADQPEEFNQKVKEICDTVD

SEQ ID NO: 82228 - protein, 428 aa, Homo sapiens
MNSHSYNGSVGRPLGSGPGALGRDPPDPEAGHPPQPPHSPGLQVVVAKSEPARPSPGSPRGQPQDQDDDEDDEEDEAGRQRASGKPSNVGHRLGHRRALFEKRKRLSDYALIFGMFGIVVMVTETELSWGVYTKESLYSFALKCLISLSTAILLGLVVLYHAREIQLFMVDNGADDWRIAMTCERVFLISLELAVCAIHPVPGHYRFTWTARLAFTYAPSVAEADVDVLLSIPMFLRLYLLGRVMLLHSKIFTDASSRSIGALNKITFNTRFVMKTLMTICPGTVLLVFSISSWIIAAWTVRVCERYHDKQEVTSNFLGAMWLISITFLSIGYGDMVPHTYCGKGVCLLTGIMGAGCTALVVAVVARKLELTKAEKHVHNFMMDTQLTKRVKNAAANVLRETWLIYKHTRLVKKPDQARVRKHQRSGV

SEQ ID NO: 82229 - protein, 118 aa, Homo sapiens
MNTDSGGCARKRAAMSVTLTSVKRVQSSPNLLAAGRDSQSPDSAKGFRSVRPNLQDKRSPTQLGNQNLPASVLEVNASQTHRQTTPEASPPCPPSVVPLNRATFSPGSGTSSASLSLP

SEQ ID NO: 82230 - protein, 43 aa, Homo sapiens
MASVLSYESLVHAVAGAVPGTISRVVSSDFQSLLLQFCLFLHF

SEQ ID NO: 82231 - protein, 169 aa, Homo sapiens
MKSLLLLVLISICWADHLSDNYTLDHDRAIHIQAENGPHLLVEAEQAKVFSHRGGNVTLPCKFYRDPTAFGSGIHKIRIKWTKLTSDYLKEVDVFVSMGYHKKTYGGYQGRVFLKGGSDSDASLVITDLTLEDYGRYKCEVIEGLEDDTVVVALDLQGVVFPYFPRLGR

SEQ ID NO: 82232 - protein, 151 aa, Homo sapiens
MESLGLHTVTLSDGTTAYVQQAVKGEKLLEGQVIQLEDGTTAYIHQVTVQKEALSFEDGQPVQLEDGSMAYIHRTPREGYDPSTLEAVQLEDGSTAYIHHPVAVPSESTILAVQTEVGLEDLAAEDDEGFSADAVVALEQYASKTFPPGSS

SEQ ID NO: 82233 - protein, 13 aa, Homo sapiens
  MOD_RES (1)..(1): Any amino acid
XGAPEPQGWIHFI

SEQ ID NO: 82234 - protein, 122 aa, Homo sapiens
MDNLSDTLKKLKITAVDKTEDSLEGCLDCLLQALAQNKFMRIPCVDAGLISPLVQLLNSKDQEVLLQTGRALGNICYDSHSLQAQLINMGVIPTLVKLLGIHCQNAALTEMCLVAFGNLAEL

SEQ ID NO: 82235 - protein, 296 aa, Homo sapiens
MEDSASASLSSAAATGTSTSTPAAPTARKQLDKEQVRKAVDALLTHCKSRKNNYGLLLNENESLFLMVVLWKIPSKELRVRLTLPHSIRSDSEDICLFTKDEPNSTPEKTEQFYRKLLNKHGIKTVSQIISLQTLKKEYKSYEAKLRLLSSFDFFLTDARIRRLLPSLIGRHFYQRKNAIRIGHVGMQIEHIIENIVAVTKGLSEKLPEKWESVKLLFVKTEKSAALPIFSSFVSNWDEATKRSLLNKKKKEARRKRRERNFEKQKERKKKRQQARKTASVLSKDDVAPESGDTTV

SEQ ID NO: 82236 - protein, 155 aa, Homo sapiens
MLLPLLLSSLLGVLSFTPRPQDHNTDLTCHVDFSRKGVSAQRTVRLRVAYAPRDLVISISRDNTPALEPQPQGNVPYLEAQKGQFLRLLCAADSQPPATLSWVLQNRVLSSSHPWGPRPLGLELPGVKAGDSGRYTCRAENRLGSQQRALDLSVQ

SEQ ID NO: 82237 - protein, 207 aa, Homo sapiens
MDMGNPGTLSPTKPGSQYYQYSSNNPRRRPLHSSAMEVQTKKVRKVPPGLPSSVYAPSASTADYNRDSPGYPSSKPATSTFPSSFFMQDGHHSSDPWSSSSGMNQPGYAGMLGNSSHIPQSSSYCSLHPHERLSYPSHSSADINSSLPPMSTFHRSGTNHYSTSSCTPPANGTDSIMANRGSGAAGSSQTGDALGKALASIYSPDHT

SEQ ID NO: 82238 - protein, 189 aa, Homo sapiens
MSFSLAPFLSPQSWPPPLPPAQSEIMKVVNLKQAILQAWKERWSDYQWAINMKKFFPKGATWDILNLADALLEQAMIGPSPNPLILSYLKYAISSQFDDFSRDLCVQALLDIMDMFCDRLSCHGKAEECIGLCRALLSALHWLLRCTAASAERLREGLEAGTPAAGEKQLAMCLQRLEKTLSSTKNRAL

SEQ ID NO: 82239 - protein, 488 aa, Homo sapiens
MNPAAEAEFNILLATDSYKVTHYKQYPPNTSKVYSYFECREKKTENSKLRKVKYEETVFYGLQYILNKYLKVTKEKIQEAKDVYKEHFQDDVFNEKGWNYILEKYDGHLPIEIKAVPEGFVIPRGNVLFTVENTDPECYWLTNWIETILVQSWYPITVATNSREQKKILAKYLLETSGNLDGLEYKLHDFGYRGVSSQETAGIGASAHLVNFKGTDTVAGLALIKKYYGTKDPVPGYSVPAAEHSTITAWGKDHEKDAFEHIVTQFSSVPVSVVSDSYDIYNACEKIWGEDLRHLIVSRSTQAPLIIRPDSGNPLDTVLKVLEILGKKFPVTENSKGYKLLPPYLRVIQGDGVDINTLQEIVEGMKQKMWSIENIAFGSGGGLLQKLTRDLLNCSFKCSYVVTNGLGINVFKDPVADPNKRSKKGRLSLHRTPAGNFVTLEEGKGDLEEYGQDLLHTVFKNGKVTKSYSFDEIRKNAQLNIELEAAHH

SEQ ID NO: 82240 - protein, 35 aa, Homo sapiens
MARTTSQLRNRPGLPPGTGSLAPPPAREAEGASSC

SEQ ID NO: 82241 - protein, 37 aa, Homo sapiens
MAAFKLDFLPEMMVDHCSLNSSPVSKKMNGTLDHPDQ

SEQ ID NO: 82242 - protein, 100 aa, Homo sapiens
MKIWQASNGELRRVLEGHVFDVNCCRFFPSGLVVLSGGMDAQLKIWSAEDASCVVTFKGHKGGILDTAIVDRGRNVVSASRDGTARLWDCGRSACLGVLA

SEQ ID NO: 82243 - protein, 181 aa, Homo sapiens
MSVEADINGLRRVLDELTLARTDLEMQIEGLKEELAYLKKNHEEEISTLRGQVGGQVSVEVDSAPGTDLAKILSDMRSQYEVMAEQNRKDAEAWFTSRTEELNREVAGHTEQLQMSRSEVTDLRRTLQGLEIELQSQLSMKAALEDTLAETEARFGAQLAHIQALISGIEAQLGDVRADSE

SEQ ID NO: 82244 - protein, 82 aa, Homo sapiens
  MOD_RES (1)..(1): Any amino acid
XEDKHQQHKIEDAAITYGDWWSHGKALEPVFLPPYDSKSTQRSDFQKPSCPLVLPVKHSKMQKPSCGIETRSFCTERDKTRQ

SEQ ID NO: 82245 - protein, 108 aa, Homo sapiens
MSCPVPACCALLLVLGLCRARPRNALLLLADDGGFESGAYNNSAIATPHLDALARRSLLFRNAFTSVSSCSPSRASLLTGLPQAFLPLRRLPRPPPLWALPAPVRNLL

SEQ ID NO: 82246 - protein, 102 aa, Homo sapiens
MEKGSRGCRGGQSPASSQGPLLSSRYFENIPKGLDQEGWTRGGIQPQMPGGYALSQPVSCMEATPNPMESLRHLHPHVGRTLTSADPFYQNTPHSSRCVAHS

SEQ ID NO: 82247 - protein, 70 aa, Homo sapiens
MNGALDHSDQPDPDAIKMFVGQIPRSWSEKELKELFEPYGAVYQINVLRDRSQNPPQSKDASSHSDETCR

SEQ ID NO: 82248 - protein, 396 aa, Homo sapiens
MDLDKPSVWGSLKQRTRPLLINLSKKKVKKNPSKPPDLRARHHLDRRLSLSVPDLLEAEALAPEGRPYSGPQSSYTSVPSSLSTAGIFPKSSSSSLKQSEEELDWSQEEASHLHVVETDSEEAYASPAERRRVSSNGIFDLQKTSLGGDAPEEPEKLCGSSDLNASMTSQHFEEQSVPGEASDGLSNLPSPFAYLLTIHLKEGRNLVVRDRCGTSDPYVKFKLNGKTLYKSKVIYKNLNPVWDEIVVLPIQSLDQKLRVKVYDRDLTTSDFMGSAFVILSDLELNRTTEHILKLEDPNSLEDDMGVIVLNLNLVVKQGDFKRHRWSNRKRLSASKSSLIRNLRLSESLKKNQLWNGIISITLLEGKNVSGGSMTEMFVQLKLGDQRYKSKDGHFGH

SEQ ID NO: 82249 - protein, 261 aa, Homo sapiens
MLPTASSKRRTFAARYFTRSKSLVMGEQSRSPGRMPCPHRLGPVLKAGWLKKQRSIMKNWQQRWFVLRGDQLFYYKDKDEIKPQGFISLQGTQVTELPPGPEDPGKHLFEISPGGAGEREKVPANPEALLLMASSQRDMEDWVQAIRRVIWAPLGGGIFGQRLEETVHHERKYGPRLAPLLVEQCVDFIRERGLTEEGLFRMPGQANLVRDLQDSFDCGEKPLFDSTTDVHTVASLLKLYLRELPEPVVPFARALWSWLNK

SEQ ID NO: 82250 - protein, 233 aa, Homo sapiens
MADNFSLHDALSGSGNPNPQGWPGAWGNQPAGAGGYPGASYPGAYPGQAPPGAYPGQAPPGAYPGAPGAYPGAPAPGVYPGPPSGPGAYPSSGQPSATGAYPATGPYGAPAGPLIVPYNLPLPGGVVPRMLITILGTVKPNANRIALDFQRGNDVAFHFNPRFNENNRRVIVCNTKLDNNWGREERQSVFPFESGKPFKSLALSPGWSTVARSWLTTTSASWVQAMLLPQPPK

SEQ ID NO: 82251 - protein, 1254 aa, Homo sapiens
  MOD_RES (1)..(1): Any amino acid
XAEQELGPPPSVDEAANTLMTRLGFLLGEKVTEVQPGDQYSMEVQDENQTSAITQRISPCSTLTSSTASPPASSPCSTLPPISTNATAKDCSYGAVTSPTSTLESRDSGIIATLTSYSENVERTKYAGESSKELGSGGNIKPWQSQKSSMDSCLYRVDENMTASTYSLNKIPERNLETVLSQSVQSIPLYLMPRPNSVAATSSAHLEDLAYLDEQRHTPLRTSLRMPRQSMGGARTQQDLRVRFAPYRPPDISLKPLLFEVPSITTESVFVGRDWVFHEIDAQLQSSNASVNQGVVIVGNIGFGKTAIISRLVALSCHGTRMRQIASDSPHASPKHVDANRELPLTQPPSAHSSITSGSCPGTPEMRRRQEEAMRRLASQVVAYHYCQADNAYTCLVPEFVHNVAALLCRSPQLTAYREQLLREPHLQSMLSLRSCVQDPMASFRRGVLEPLENLHKERKIPDEDFIILIDGLNEAEFHKPDYGDTIVSFLSKMIGKFPSWLKLIVTVRTSLQEITKLLPFHRIFLDRLEENEAIDQDLQAYILHRIHSSSEIQNNISLNGKMDNTTFGKLSSHLKTLSQGSYLYLKLTFDLIEKGYLVLKSSSYKVVPVSLSEVYLLQCNMKFPTQSSFDRVMPLLNVAVASLHPLTDEHIFQAINAGSIEGTLEWEDFQQRMENLSMFLIKRRDMTRMFVHPSFREWLIWREEGEKTKFLCDPRSGHTLLAFWFSRQEGKLNRQQTIELGHHILKAHIFKGLSKKVGVSSSILQGLWISYSTEGLSMALASLRNLYTPNIKVSRLLILGGANINYRTEVLNNAPILCVQSHLGYTEMVALLLEFGANVDASSESGLTPLGYAAAAGYLSIVVLLCKKRAKVDHLDKNGQCALVHAALRGHLEVVKFLIQCDWTMAGQQQGVFKKSHAIQQALIAAASMGYTEIVSYLLDLPEKDEEEVERAQINSFDSLWGETALTAAAGRGKLEVCRLLLEQGAAVAQPNRRGAVPLFSTVRQGHWQIVDLLLTHGADVNMADKQGRTPLMMAASEGHLGTVDFLLAQGASIALMDKEGLTALSWACLKGHLSVVRSLVDNGAATDHADKNGRTPLDLAAFYGDAEVVQFLVDHGAMIEHVDYSGMRPLDRAVGCRNTSVVVTLLKKGAKIGPATWAMATSKPDIMIILLSKLMEEGDMFYKKGKVKEAAQRYQYALKKFPREGFGEDLKTFRELKVSLLLNLSRCRRKMNTVRSSLRGPERGHQAVSQQP

SEQ ID NO: 82252 - protein, 48 aa, Homo sapiens
  MOD_RES (1)..(1): Any amino acid
XRRCGDPGLRRRGRWAHPWAFPKAKRNPGKVRSKRRDPPIQFQNLRRS

SEQ ID NO: 82253 - protein, 189 aa, Homo sapiens
MIEEAYMTKCGHSFCYKCIHQSLEDNNRCPKCNYVVDNIDHLYPNFLVNELILKQKQRFEEKRFKLDHSVSSTNGHRWQIFQDWLGTDQDNLDLANVNLMLELLVQKKKQLEAESHAAQLQILMEFLKVARRNKREEMSGLYSPVSEDSTVPQFEAPSPSHSSIIDSTEYSQPPGFSGSSQTKKQPWYN

SEQ ID NO: 82254 - protein, 36 aa, Homo sapiens
MPSLHFLRKLLAWKVPRNPLEPGGTRSDPSRLLSSL

SEQ ID NO: 82255 - protein, 115 aa, Homo sapiens
MAAARDPPEVSLREATQRKLRRFSELRGKLVARGEFWDIVAITAADEKQELAYNQQLSEKLKRKELPLGVQYHVFVDPAGAKIGTRFMEMEDQHFVPFNVWKSYMEINGILLPSY

SEQ ID NO: 82256 - protein, 457 aa, Homo sapiens
MFSLMASCCGWFKRWREPVRKVTLLMVGLDNAGKTATAKGIQGEYPEDVAPTVGFSKINLRQGKFEVTIFDLGGGIRIRGIWKNYYAESYGVIFVVDSSDEERMEETKEAMSEMLRHPRISGKPILVLANKQDKEGALGEADVIECLSLEKLVNEHKCLCQIEPCSAISGYGKKIDKSIKKGLYWLLHVIARDFDALNERIQKETTEQRALEEQEKQERAERVRKLREESCGLRPLLLRRPLLLSQYSIIKSKLTFGDGKQNEQEQAELDGTSGLAELDPEPTNPFQPIASVIIENEGKLEREKKNQKMEKDSDGCHLKHKMEHEQIETQGQVNHNGQKNNEFGLVENYKEALTQQLKNEDETDRPSLESANGKKKTKKLRMKRNHRVEPLNIDDCAPESPTPPPPPPPVGWGTPKVTRLPKLEPLGETHHNDFYRKPLPPLAVPQRPNSDAHDVIS

SEQ ID NO: 82257 - protein, 25 aa, Homo sapiens
MADANSPPKPLSKPRTPRRSKSDGE

SEQ ID NO: 82258 - protein, 100 aa, Homo sapiens
MGHLTFRDVAIEFSQEEWKCLDPVQKALYRDVMLENYRNLVSLGICLPDLSIISMMKQRTEPWTVENEMKVAKNPDRWEGIKDINTDGVLFCRPGWSTVV

SEQ ID NO: 82259 - protein, 243 aa, Homo sapiens
MKWKEKLGDGVYDTFMMIDETKCPPCSNVLCNPSEPPPPRRLNMTTEQFTGDHTQHFLDGGEMKVEQLFQEFGNRKSNTIQSDGISDSEKCSPTVSQGKSSDCLNTVKSNSSSKAPKVVPLTPEQALKQYKHHLTAYEKLEIINYPEIYFVGPNAKKRHGVIGGPNNGGYDDADGAYIHVPRDHLAYRYEVLKIIGKGSFGQVARVYDHKLRQYVALKMVRNEKRFHRQAAEEIRILEHLKKQ

SEQ ID NO: 82260 - protein, 77 aa, Homo sapiens
MAISQHQFYLDRKQSKSKIHAARSLSEIAIDLTETGTLKTSKLANMGSKGKIISGSSGSLLSSGSGARRHCILLPGS

SEQ ID NO: 82261 - protein, 110 aa, Homo sapiens
MMSKRYLQKATKGKLLIIIFIVTLWGKVVSSANHHKAHHVKTGTCEVVALHRCCNKNKIEERSQTVKCSCFPGQVAGTTRAAPSCVDASIVEQKWWCHMQPCLEGEECKV

SEQ ID NO: 82262 - protein, 156 aa, Homo sapiens
MAPAPPPAASFSPSEVQRRLAAGACWVRRGARLYDLSSFVRHHPGGEQLLRARAGQDISADLDGPPHRHSANARRWLEQYYVGELRGEQQGSMENEPVALEETQKTDPAMEPRFKVVDWDKSTRWQCPSPCSPGSSCWGHSSGASSSTSSTASCST

SEQ ID NO: 82263 - protein, 157 aa, Homo sapiens
  MOD_RES (1)..(1): Any amino acid
XSLGFELTVERLVSIGYPQELLSFAYDSTFPTRGLVFDTLYGNLLKVDAYGNLLVCAHGFNFIRGPETREQYPNKFIQRDDTERFYILNTLFNLPETYLLACLVDFFTNCPRYTSEFSASERCHIANLRDGTAPAAPCRLSPPTRPLSLPVCCSHHF

SEQ ID NO: 82264 - protein, 208 aa, Homo sapiens
MISLIIPPKDQISRVAKMLADEFGTASNIKSRVNRLSVLGAITSVQQRLKLYNKVPPNGLVVYCGTIVTEEGKEKKVNIDFEPFKPINTSLYLCDNKFHTEALTALLSDDSKFGFIVIDGSGALFGTLQGNTREVLHKFTVDLPKKHGRGGQSALRFARLRMEKRHNYVRKVAETAVQLFISGDKVNVAGLVLAGSADFKTELSQSDM

SEQ ID NO: 82265 - protein, 42 aa, Homo sapiens
MNSGGGFGLGLGFGLTPTSVIQSSDSCSLCRSDAANTNGCHV

SEQ ID NO: 82266 - protein, 607 aa, Homo sapiens
MEGAMAVRVTAAHTAEAQAEAGREAGEGAVAAVAAALAPSGFLGLPAPFSEEDEDDVHRCGRCQAEFTALEDFVQHKIQKACQRAPPEALPATPATTALLGQEVVPAAPGPEEPITVAHIVVEAASLAADISHASDLVGGGHIKEVIVAAEAELGDGEMAEAPGSPRQQGLGLAGEGEQAQVKLLVNKDGRYVCALCHKTFKTGSILKAHMVTHSSRKDHECKLCGASFRTKGSLIRHHRRHTDERPYKCSKCGKSFRESGALTRHLKSLTPCTEKIRFSVSKDVVVSKEDARAGSGAGAAGLGTATSSVTGEPIETSPVIHLVTDAKGTVIHEVHVQMQELSLGMKALAPEPPVSQELPCSSEGSRENLLHQFCSRGFREKGSLVRHVRHHTGEKPFKCYKCGRGFAEHGTLNRHLRTKGGCLLEVEELLVSEDSPAAATTVLTEDPHTVLVEFSSVVADTQEYIIEATADDAETSEATEIIEGTQTEVDSHIMKVVQQIVHQASAGHQIIVQNVTMDEETALGPEAAAADTITIATPESLTEQVAMTLASAISEGTVLAARAGTSGTEQATVTMVSSEDIEILEHAGELVIASPEGQLEVQTVIV

SEQ ID NO: 82267 - protein, 380 aa, Homo sapiens
GTRAMNDIGDYVGSNLEISWLPNLDGLIAGYARNFRPGIGGPPVNVALALEVASIDHISEANMEYTMTVFLHQSWRDSRLSYNHTNETLGLDSRFVDKLWLPDTFIVNAKSAWFHDVTVENKLIRLQPDGVILYSIRITSTVACDMDLAKYPMDEQECMLDLESYGYSSEDIVYYWSESQEHIHGLDKLQLAQFTITSYRFTTELMNFKSGITTVLTMTTLMVSARSSLPRASAIKALDVYFWICYVFVFAALVEYAFAHFNADYRKKQKAKVKVSRPRAEMDVRNAIVLFSLSAAGVTQELAISRRQRRVPGNLMGSYRSVGVETGETKKEGAARSGGQGGIRARLRPIDADTIDIYARAVFPAAFAAVNVIYWAAYAM

SEQ ID NO: 82268 - protein, 162 aa, Homo sapiens
MAGIKALISLSFGGAIGLMFLMLGCALPIYNKYWPLFVLFFYILSPIPYCIARRLVDDTDAMSNACKELAIFLTTGIVVSAFGLPIVFARAHLQKQNTVHHGKDTVVRITEQPERGETPDLHSQHDVGNDQLGVGPGEGSIEQPHRPGSDKLIGKGVNQVVS

SEQ ID NO: 82269 - protein, 311 aa, Homo sapiens
MLKPSLPFTSLLFLQLPLLGVGLNTTILTPNGNEDTTADFFLTTMPTDSLSVSTLPLPEVQCFVFNVEYMNCTWNSSSEPQPTNLTLHYWYKNSDNDKVQKCSHYLFSEEITSGCQLQKKEIHLYQTFVVQLQDPREPRRQATQMLKLQNLVIPWAPENLTLHKLSESQLELNWNNRFLNHCLEHLVQYRTDWDHSWTEQSVDYRHKFSLPSVDGQKRYTFRVRSRFNPLCGSAQHWSEWSHPIHWGSNTSKENPFLFALEAVVISVGSMGLIISLLCVYFWLERTMPRIPTLKNLEDLVTEYHGNFSGTL

SEQ ID NO: 82270 - protein, 44 aa, Homo sapiens
  MOD_RES (1)..(1): Any amino acid
XGLGLLYFHGKGVPLNYAEALKYFQKAAEKGWPDAQFQLGFMYY

SEQ ID NO: 82271 - protein, 45 aa, Homo sapiens
MARVCRRQQCSVERRGFRQELDSWRHKLIHCGLKVFLKGCLDLHY

SEQ ID NO: 82272 - protein, 48 aa, Homo sapiens
  MOD_RES (1)..(1): Any amino acid
XEVECLAESHQHLSKESMAGNKPANAVLHKGSPAAVKMQTDTTSTAEQ

SEQ ID NO: 82273 - protein, 1174 aa, Homo sapiens
MHNAKPRPQLLHHDAQGCTFCTELIGGLVVMPCTTILRIWTPFPALLFGPHCQFTPDLSSCSSTFVAETEETMFQLPVNNLGSLRKARKTVKKILSDIGLEYCKEHIEDFKQFEPNDFYLKNTTWEDVGLWDPSLTKNQDYRTKPFCCSACPFSSKFFSAYKSHFRNVHSEDFENRILLNCPYCTFNADKKTLETHIKIFHAPNASAPSSSLSTFKDKNKNDGLKPKQADSVEQAVYYCKKCTYRDPLYEIVRKHIYREHFQHVAAPYIAKAGEKSLNGAVPLGSNAREESSIHCKRCLFMPKSYEALVQHVIEDHERIGYQVTAMIGHTNVVVPRSKPLMLIAPKPQDKKSMGLPPRIGSLASGNVRSLPSQQMVNRLSIPKPNLNSTGVNMMSSVHLQQNNYGVKSVGQGYSVGQSMRLGLGGNAPVSIPQQSQSVKQLLPSGNGRSYGLGSEQRSQAPARYSLQSANASSLSSGQLKSPSLSQSQASRVLGQSSSKPAAAATGPPPGNTSSTQKWKICTICNELFPENVYSVHFEKEHKAEKVPAVANYIMKIHNFTSKCLYCNRYLPTDTLLNHMLIHGLSCPYCRSTFNDVEKMAAHMRMVHIDEEMGPKTDSTLSFDLTLQQGSHTNIHLLVTTYNLRDAPAESVAYHAQNNPPVPPKPQPKVQEKADIPVKSSPQAAVPYKKDVGKTLCPLCFSILKGPISDALAHHLRERHQVIQTVHPVEKKLTYKCIHCLGVYTSNMTASTITLHLVHCRGVGKTQNGQDKTNAPSRLNQSPSLAPVKRTYEQMEFPLLKKRKLDDDSDSPSFFEEKPEEPVVLALDPKGHEDDSYEARKSFLTKYFNKQPYPTRREIEKLAASLWLWKSDIASHFSNKRKKCVRDCEKYKPGVLLGFNMKELNKVKHEMDFDAEWLFENHDEKDSRVNASKTADKKLNLGKEDDSSSDSFENLEEESNESGSPFDPVFEVEPKISNDNPEEHVLKVIPEDASESEEKLDQKEDGSKYETIHLTEEPTKLMHNASDSEVDQDDVVEWKDGASPSESGPGSQQVSDFEDNTCEMKPGTWSDESSQSEDARSSKPAAKKKATMQGDREQLKWKNSSYGKVEGFWSKDQSQWKNASENDERLSNPQIEWQNSTIDSEDGEQFDNMTDGVAEPMHGSLAGVKLSSQQA

SEQ ID NO: 82274 - protein, 170 aa, Homo sapiens
  MOD_RES (1)..(1): Any amino acid
XPGGMFCRYDRLEIWDGFPDVGPHIGRYCGQKTPGRIRSSSGILSMVFYTDSAIAKEGFSANYSVLQSSVSEDFKCMEALGMESGEIHSDQITASSQYSTNWSAERSRLNYPENGWTPGEDSYREWIQDAKYRLRVSVVRSKSSSSSTSLEPRPLSSLKLSFFSYKIKIT

SEQ ID NO: 82275 - protein, 131 aa, Homo sapiens
MSDPEMGWVPEPPTMTLGASRVELRVSCHGLLDRDTLTKPHPCVLLKLYSDEQWVEVERTEVLRSCSSPVFSRVLALEYFFEEKQPLQFHVFDAEDGATSPRNDTFLGSTECTLGQIVSQTKVTKPLLLKN

SEQ ID NO: 82276 - protein, 1169 aa, Homo sapiens
MTRTRAALLLFTALATSLGFNLDTEELTAFRVDSAGFGDSVVQYANSWVVVGAPQKITAANQTGGLYQCGYSTGACEPIGLQVPPEAVNMSLGLSLASTTSPSQLLACGPTVHHECGRNMYLTGLCFLLGPTQLTQRLPVSRQECPRQEQDIVFLIDGSGSISSRNFATMMNFVRAVISQFQRPSTQFSLMQFSNKFQTHFTFEEFRRSSNPLSLLASVHQLQGFTYTATAIQNVVHRLFHASYGARRDAAKILIVITDGKKEGDSLDYKDVIPMADAAGIIRYAIGVGLAFQNRNSWKELNDIASKPSQEHIFKVEDFDALKDIQNQLKEKIFAIEGTETTSSSSFELEMAQEGFSAVFTPDGPVLGAVGSFTWSGGAFLYPPNMSPTFINMSQENVDMRDSYLGYSTELALWKGVQSLVLGAPRYQHTGKAVIFTQVSRQWRMKAEVTGTQIGSYFGASLCSVDVDSDGSTDLVLIGAPHYYEQTRGGQVSVCPLPRGWRRWWCDAVLYGEQGHPWGRFGAALTVLGDVNGDKLTDVVIGAPGEEENRGAVYLFHGVLGPSISPSHSQRIAGSQLSSRLQYFGQALSGGQDLTQDGLVDLAVGARGQVLLLRTRPVLWVGVSMQFIPAEIPRSAFECREQVVSEQTLVQSNICLYIDKRSKNLLGSRDLQSSVTLDLALDPGRLSPRATFQETKNRSLSRVRVLGLKAHCENFNLLLPSCVEDSVTPITLRLNFTLVGKPLLAFRNLRPMLAADAQRYFTASLPFEKNCGADHICQDNLGISFSFPGLKSLLVGSNLELNAEVMVWNDGEDSYGTTITFSHPAGLSYRYVAEGQKQGQLRSLHLTCDSAPVGSQGTWSTSCRINHLIFRGGAQITFLATFDVSPKAVLGDRLLLTANVSSENNTPRTSKTTFQLELPVKYAVYTVVSSHEQFTKYLNFSESEEKESHVAMHRYQVNNLGQRDLPVSINFWVPVELNQEAVWMDVEVSHPQNPSLRCSSEKIAPPASDFLAHIQKNPVLDCSIAGCLRFRCDVPSFSVQEELDFTLKGNLSFGWVRQILQKKVSVVSVAEITFDTSVYSQLPGQEAFMRAQTTTVLEKYKVHNPTPLIVGSSIGGLLLLALITAVLYKVGFFKRQYKEMMEEANGQIAPENGTQTPSPPTPHYPQDNV

SEQ ID NO: 82277 - protein, 309 aa, Homo sapiens
MDDDIAALVVDNGSGMCKAGFAGDDAPRAVFPSIVGRPRHQGVMVGMGQKDSYVGDEAQSKRGILTLKYPIEHGIVTNWDDMEKIWHHTFYNELRVAPEEHPVLLTEAPLNPKANREKMTQAVLSLYASGRTTGIVMDSGDGVTHTVPIYEGYALPHAILRLDLAGRDLTDYLMKILTERGYSFTTTAEREIVRDIKEKLCYVALDFEQEMATAASSSSLEKSYELPDGQVITIGNERFRCPEALFQPSFLGMESCGIHETTFNSIMKCDVDIRKDLYANTVLSGGTTMYPGIADRMQKEITALAPSTM

SEQ ID NO: 82278 - protein, 103 aa, Homo sapiens
MQRRGALFGMPGGSGGRKMAAGDIGELLVPHMPTIRVPRSGDRVYKNECAFSYDSPVTIACDAVLSSKSPYRKQDPDTWENELPVSKYANNLTQLDNGVRIPP

SEQ ID NO: 82279 - protein, 90 aa, Homo sapiens
  MOD_RES (1)..(1): Any amino acid
XTQYAVYVKAVTLTMVENDHIRGAKSEILYIRTNASVNREVEPSLSAQRQPELLHCALAAAASGRLPLPAQLLLQRQNPHQEVCRRHHRH

SEQ ID NO: 82280 - protein, 122 aa, Homo sapiens
MVDIVKALGWNYVSTLASEGSYGEKGVESFTQISKEAGGLCIAQSVRIPQERKDRTIDFDRIIKQLLDTPNSRAVVIFANDEDIKQILAAAKRADQVGHFLWVGSDSWGSKINPLHQHEDIA

SEQ ID NO: 82281 - protein, 217 aa, Homo sapiens
  MOD_RES (1)..(1): Any amino acid
XLYSGSPTRSEKEQVSISSFYYKERKSRRWKSKREGSDSGNRQIKAAGKVIIQDIACLLPVHKSLGELYILNVNDIQETCQKNAASALLVGRKDLVQPSFTSSGSCSSMSDPGLNTGGWNIAGREAEHLSSPWGESSPEELRFGSLTYSDPRERERDQHDKNKRLLDPANTQQFDDFKKCYGEILYRWGLREKRAEVLKFVSCPPDPHKGIEFGVYC

SEQ ID NO: 82282 - protein, 203 aa, Homo sapiens
MGIKTALPAAELGLYSLVLSGALAYAGRGLLEASQDGAHRKAFRESVRPGWEYIGRKMDVADFEWVMWFTSFRNVIIFALSGHVLFAKLCTMVAPKLRSWMYAVYGALAVMGTMGPWYLLLLLGHCVGLYVASLLGQPWLCLGLGLASLASFKMDPLISWQSGFVTGTFDLQEVLFHGGSSFTVLRCTSFALESCAHPDRHYS

SEQ ID NO: 82283 - protein, 1072 aa, Homo sapiens
MITVVYGPDLVNISHLNLVAFQEEVAKEWTNEVFSLATNLLAQNMSRDAFLEKAYTKLKLQVTPEGRIPLKNIYRLFSADRKRVETALEACSLPSSRNDSIPQEDFTPEVYRVFLNNLCPRPEIDNIFSEFGAKSKPYLTVDQMMDFINLKQRDPRLNEILYPPLKQEQVQVLIEKYEPNNSLARKGQISVDGFMRYLSGEENGVVSPEKLDLNEDMSQPLSHYFINSSHNTYLTAGQLAGNSSVEMYRQVLLSGCRCVELDCWKGRTAEEEPVITHGFTMTTEISFKEVIEAIAECAFKTSPFPILLSFENHVDSPKQQAKMAEYCRLIFGDALLMEPLEKYPLESGVPLPSPMDLMYKILVKNKKKSHKSSEGSGKKKLSEQASNTYSDSSSMFEPSSPGAGEADTESDDDDDDDDCKKSSMDEGTAGSEAMATEEMSNLVNYIQPVKFESFEISKKRNKSFEMSSFVETKGLEQLTKSPVEFVEYNKMQLSRIYPKGTRVDSSNYMPQLFWNAGCQMVALNFQTMDLAMQINMGMYEYNGKSGYRLKPEFMRRPDKHFDPFTEGIVDGIVANTLSVKIISGQFLSDKKVGTYVEVDMFGLPVDTRRKAFKTKTSQGNAVNPVWEEEPIVFKKVVLPTLACLRIAVYEEGGKFIGHRILPVQAIRPGYHYICLRNERNQPLTLPAVFVYIEVKDYVPDTYADVIEALSNPIRYVNLMEQRAKQLAALTLEDEEEVKKEADPGETPSEAPSEARTTPAENGVNHTTTLTPKPPSQALHSQPAPGSVKAPAKTEDLIQSVLTEVEAQTIEELKQQKSFVKLQKKHYKEMKDLVKRHHKKTTDLIKEHTTKYNEIQNDYLRRRAALEKSAKKDSKKKSEPSSPDHGSSTIEQDLAALDAEMTQKLIDLKDKQQQQLLNLRQEQYYSEKYQKREHIKLLIQKLTDVAEECQNNQLKKLKEICEKEKKELKKKMDKKRQEKITEAKSKDKSQMEEEKTEMIRSYIQEVVQYIKRLEEAQSKRQEKLVEKHKEIRQQILDEKPKGEGSSSFLSETCHEDPSVSPNFTPPNPQALKW

SEQ ID NO: 82284 - protein, 305 aa, Homo sapiens
MDFSVKVDIEKEVTCPICLELLTEPLSLDCGHSFCQACITAKIKESVIISRGESSCPVCQTRFQPGNLRPNRHLANIVERVKEVKMSPQEGQKRDVCEHHGKKLQIFCKEDGKVICWVCELSQEHQGHQTFRINEVVKECQNYIQIERQKILKGFNEMRVILDNEEQRELQKLEEGEVNVLDNLAAATDQLVQQRQDASTLISDLQRRLRGSSVEMLQDVIDVMKRSESWTLKKPKSVSKKLKSVFRVPDLSGMLQVLKELTDVQYYWVDVMLNPGSATSNVAISVDQRQVKTVRTCTFKNSNPC

SEQ ID NO: 82285 - protein, 129 aa, Homo sapiens
MKTGHFEIVTMLLATMILVDIFQVKAEVLDMADNAFDDEYLKCTDRMEIKYVPQLLKEEKASHQQLDTVWENAKAKWAARKTQIFLPMNFKDNHGIALMAYISEAQEQTPFYHLFSEAVKMAGQSREDY

SEQ ID NO: 82286 - protein, 212 aa, Homo sapiens; identical to SEQ ID NO: 43344

SEQ ID NO: 82287 - protein, 120 aa, Homo sapiens
MKPAAREARLPPRSPGLRWALPLLLLLLRLGQILCAGGRPSPVFDIKAVSISPTNVILTWKSNDTAASEYKYVVKHKMENEKTITVVHQPWCNITGLRPATSYVFSITPGIGNETWGDPR

SEQ ID NO: 82288 - protein, 218 aa, Homo sapiens
MHHQKYLQRFLGGKREKKQKEACSIPGIGKRMAEKIIEILESGHLRKLDHISESVPVLELFSNIWGAGTKTAQMWYQQGFRSLEDIRSQASLTTQQAIGLKHYSDFLERMPREEATEIEQTVQKAAQAFNSGLLCVACGSYRRGKATCGDVDVLITHPDGRSHRGIFSRLLDSLRQEGFLTDDLVSQEENGQQQKYLGVCRLPGPGRRHRRLDIIVVP

SEQ ID NO: 82289 - protein, 703 aa, Homo sapiens
MSGEDAEVRAVSEDVSNGSSGSPSPGDTLPWNLGKTQRSRRSGGGAGSNGSVLDPAERAVIRIADERDRVQKKTFTKWVNKHLIKHWRAEAQRHISDLYEDLRDGHNLISLLEVLSGDSLPRERDVSRSSRLPREKGRMRFHKLQNVQIALDYLRHRQVKLVNIRNDDIADGNPKLTLGLIWTIILHFQISDIQVSGQSEDMTAKEKLLLWSQRMVEGYQGLRCDNFTSSWRDGRLFNAIIHRHKPLLIDMNKVYRQTNLENLDQAFSVAERDLGVTRLLDPEDVDVPQPDEKSIITYVSSLYDAMPRVPDVQDGVRANELQLRWQEYRELVLLLLQWMRHHTAAFEERRFPSSFEEIEILWSQFLKFKEMELPAKEADKNRSKGIYQSLEGAVQAGQLKVPPGYHPLDVEKEWGKLHVAILEREKQLRSEFERLECLQRIVTKLQMEAGLCEEQLNQADALLQSDVRLLAAGKVPQRAGEVERDLDKADSMIRLLFNDVQTLKDGRHPQGEQMYRRVYRLHERLVAIRTEYNLRLKAGVAAPATQVAQVTLQSVQRRPELEDSTLRYLQDLLAWVEENQHRVDGAEWGVDLPSVEAQLGSHRGLHQSIEEFRAKIERARSDEGQLSPATRGAYRDCLGRLDLQYAKLLNSSKARLRSLESLHSFVAAATKELMWLNEKEEEEVGFDWSDRNTNMTAKKESYS

SEQ ID NO: 82290 - protein, 233 aa, Homo sapiens
  MOD_RES (1)..(1): Any amino acid
XQKGEQGTVACTWERGRDTHLYTEYTLQLSGPKNLTWQKQCKDIYCDYLDFGINLTPESPESNFTAKVTAVNSLGSSSSLPSTFTFLDIVRPLPPWDIRIKFQKASVSRCTLYWRDEGLVLLNRLRYRPSNSRLWNMVNVTKAKGRHDLLDLKPFTEYEFQISSKLHLYKGSWSDWSESLRAQTPEEEPTGMLDVWYMKRHIDYSRQQISLFWKVSFKRQLKTQGNKTEGRKR

SEQ ID NO: 82291 - protein, 73 aa, Homo sapiens
MMLPKPGTYYLPWEVSAGQVPDGSTLRTFGRLCLYDMIQSRVTLMAQHGSDQHQVLVCTKLVEPFHAQTEAPW

SEQ ID NO: 82292 - protein, 142 aa, Homo sapiens
MPHLLVTFRDVAIDFSQEEWECLDPAQRDLYRDVMLENYSNLISLEPARTREEQHNLPVPKAGSVNLAAGFGHSRSQTGCGSSKGAEKGLQNVDFYLCPGNHPDTSCRDTYQFFCPDWTCVTLATYSGGSTRSSFHNSCFSS

SEQ ID NO: 82293 - protein, 33 aa, Homo sapiens
MSSGLWSQEKVTSPYWEERIFYLLLQECSVTDK

SEQ ID NO: 82294 - protein, 172 aa, Homo sapiens
MELPLGRCDDSRTWDDDSDPESETDPDAQAKAYVARVLSPPKSGLAFSRPSQLSTPAASPSASEPRAASRVSAVSEPGLLSLPPELLLEICSYLDARLVLHVLSRVCHALRDLVSDHVTWRLRALRRVRAPYPVVEGWVTLSVGLPRSQRQLVGPAAAGDGVQPGSDQDLRH

SEQ ID NO: 82295 - protein, 120 aa, Homo sapiens
MLLGLAAMELKVWVDGIQRVVCGVSEQTTCQEVVIALAQAIDWPLCACAAASGEGAAVAATRVSSGRPGHLRTVCQRCPVCPEAHRAQPSWEALLRQLSTPGTLPNSCQPPCKATGCAGL

SEQ ID NO: 82296 - protein, 750 aa, Homo sapiens
MPLFFRKRKPSEEARKRLEYQMCLAKEAGADDILDISKCELSEIPFGAFATCKVLQKKVLIVHTNHLTSLLPKSCSLLSLATIKVLDLHDNQLTALPDDLGQLTALQVLNVERNQLMQLPRSIGNLTQLQTLNVKDNKLKELPDTVGELRSLRTLNISGNEIQRLPQMLAHVRTLEMLSLDASAMVYPPREVCGAGTAAILQFLCKESGLEYYPPSQYLLPILEQDGIENSRDSPDGPTDRFSREELEWQNRFSDYEKRKEQKMLEKLEFERRLELGQREHTQLLQQSSSQKDEILQTVKEEQSRLEQGLSEHQRHLNAERQRLQEQLKQTEQNISSRIQKLLQDNQRQKKSSEILKSLENERERPSFYTRYSNYRLKANRGPQGLLVMRIRMEQLMSITQEETESLRRRDVASAMQQMLTESCKNRLIQMAYESQRQNLVQQACSSMAEMDERFQQILSWQQMDQNKAISQILQESAMQKAAFEALQVKKDLMHRQIRSQIKLIETELLQLTQLELKRKSLDTESLQEMISEQRWALSSLLQQLLKEKQQREEELREILTELEAKSETRQENYWLIQYQRLLNQKPLSLKLQEEGMERQLVALLEELSAEHYLPIFAHHRLSLDLLSQMSPGDLAKVGVSEAGLQHEILRRVQELLDAARIQPELKPPMGEVVTPTAPQEPPESVRPSAPPAELEVQASECVVCLEREAQMIFLNCGHVCCCQQCCQPLRTCPLCRQDIAQRLRIYHSS

SEQ ID NO: 82297 - protein, 328 aa, Homo sapiens
MATVPVYCVCRLPYDVTRFMIECDACKDWFHGSCVGVEEEEAPDIDIYHCPNCEKTHGKSTLKKKRTWHKHGPGQAPDVKAAKNSVDLDDYEEEQDHLDACFKDSDYVYPSLESDEDNPIFKSRSKKRKGSDDAPYSPTARVGPSVPRQDRPVREGTRVASIETGLAAAAAKLSQQEEQKSKKKKSAKRKLTPNTTSPSTSTSISAGTTSTSTTPASTTPASTTPASTSTASSQASQEGSSPEPPPESHSSSLADHEYTAAGTFTGAQAGRTSQPMAPGVFLTQRRPSASSPNNNTAAKGKRTKKGMATAKQRLGKILKIHRNGKLLL

SEQ ID NO: 82298 - protein, 202 aa, Homo sapiens
  MOD_RES (1)..(1): Any amino acid
XPASKPTPVQDVQGDGRWMSLHHRFVADSKDKEPEVVFIGDSLVQLMHQCEIWRELFSPLHALNFGIGGDGTQHVLWRLENGELEHIRPKIVVVWVGTNNHGHTAEQGLLPRGQHPNPLREKNRQVNELVRAALAGHPRAHFLDADPGFVHSDGTISHHDMYDYLHLSRLGYTPVCRALHSLLLRLLAQDQGQGAPLLEPAP

SEQ ID NO: 82299 - protein, 37 aa, Homo sapiens
MAPELHWGDALLSCLSFPILNVLQKSPRLVMHQRHPS

SEQ ID NO: 82300 - protein, 80 aa, Homo sapiens
KNYVRVVGRNGESSELDLQGIRIDSDISGTLKFACESIVEEYEDELIEFFSREADNVKDKLCSKRTDLCDHALHISHDEL

SEQ ID NO: 82301 - protein, 131 aa, Homo sapiens
DYFGVCSEPVIKDNVVVVYEVLEEMLDNGFPLATESNILKELIKPPTILRTVVNTITGSTITAEIQGVIDACVKLTGMPDLTLSFMNPRLLDDVSFHPCVRFKRWESERILSFIPPDGNFRLLSYHVSAQK

SEQ ID NO: 82302 - protein, 393 aa, Homo sapiens
MHRLAQGRSQDQPSSPATEEPANLSRRLCWGLSVPASRMEEGERSPLLSQETAGQKPLSVHRPPTSGCLGPVPREDQAEAWGCSCCPPETKHQALSGTPKKGPAPSLSPGSSCVKYLIFLSNFPFSLLGLLALAIGLWGLAVKGSLGSDLGGPLPADPMLGLALGGLVVSAVSLAGYLGALCENTCLLRGFSGGILAFLVLEAVAGALVVALWGPLQDSLEHTLRVAIAHYQDDPDLRFLLDQVQLGLRCCGAASYQDWQQNLYFNCSSPGVQACSLPASCCIDPREDGASVNDQCGFGVLRLDADAAQRVVYLEGCGPPLRRWLRANLAASGGYAIAVVLLQGAELLLAARLLGALAARRGAAYGPGARGEDRAGPQSPSPGAPPAAKPARG

SEQ ID NO: 82303 - protein, 30 aa, Homo sapiens
MRVISIKNYHPKIRIITQMLQYHNKAHLLN

SEQ ID NO: 82304 - protein, 293 aa, Homo sapiens
MWICPGGGGGGGGGGGGGDREDARPAPLCCGRCWRSGCAARPPRMCRDGYEPCVNEGMCVTYHNGTGYCKCPEGFLGEYCQHRDPCEKNRCQNGGTCVAQAMLGKATCRCASGFTGEDCQYSTSHPCFVSRPCLNGGTCHMLSRDTYECTCQVGFTGKECQWTDACLSHPCANGSTCTTVANQFSCKCLTGFTGQKCETDVNECDIPGHCQHGGTCLNLPGSYQCQCLQGFTGQYCDSLYVPCAPSPCVNGGTCRQTGDFTFECNCLPETVRRGTELWERDREVWNGKEHDEN

SEQ ID NO: 82305 - protein, 942 aa, Homo sapiens
MQSFRERCGFHGKQQNYQQTSQETSRLENYRQPSQAGLSCDRQRLLAKDYYNPQPYPSYEGGAGTPSGTAAAVAADKYHRGSKALPTQQGLQGRPAFPGYGVQDSSPYPGRYAGEESLQAWGAPQPPPPQPQPLPAGVAKYDENLMKKTAVPPSRQYAEQGAQVPFRTHSLHVQQPPPPQQPLAYPKLQRQKLQNDIASPLPFPQGTHFPQHSQSFPTSSTYSSSVQGGGQGAHSYKSCTAPTAQPHDRPLTASSSLAPGQRVQNLHAYQSGRLSYDQQQQQQQQQQQQQQALQSRHHAQETLHYQNLAKYQHYGQQGQGYCQPDAAVRTPEQYYQTFSPSSSHSPARSVGRSPSYSSTPSPLMPNLENFPYSQQPLSTGAFPAGITDHSHFMPLLNPSPTDATSSVDTQAGNCKPLQKDKLPENLLSDLSLQSLTALTSQVENISNTVQQLLLSKAAVPQKKGVKNLVSRTPEQHKSQHCSPEGSGYSAEPAGTPLSEPPSSTPQSTHAEPQEADYLSGSEDPLERSFLYCNQARGSPARVNSNSKAKPESVSTCSVTSPDDMSTKSDDSFQSLHGSLPLDSFSKFVAGERDCPRLLLSALAQEDLASEILGLQEAIGEKADKAWAEAPSLVKDSSKPPFSLENHSACLDSVAKSAWPRPGEPEALPDSLQLDKGGNAKDFSPGLFEDPSVAFATPDPKKTTGPLSFGTKPTLGVPAPDPTTAAFDCFPDTTAASSADSANPFAWPEENLGDACPRWGLHPGELTKGLEQGGKASDGISKGDTHEASACLGFQEEDPPGEKVASLPGDFKQEEVGGVKEEAGGLLQCPEVAKADRWLEDSRHCCSTADFGDLPLLPPTSRKEDLEAEEEYSSLCELLGSPEQRPGMQDPLSPKAPLICTKEEVEEVLDSKAGWGSPCHLSGESVILLGPTVGTESKVQSWF

SEQ ID NO: 82306 - protein, 235 aa, Homo sapiens
MAEQEPTAEQLAQIAAENEEDEHSVNYKPPAQKSIQEIQELDKDDESLRKYKEALLGRVAVSADPNVPNVVVTGLTLVCSSAPGPLELDLTGDLESFKKQSFVLKEGVEYRIKISFRVNREIVSGMKYIQHTYRKGVKIDKTDYMVGSYGPRAEEYEFLTPVEEAPKGSISPSHPRPGFRRERSSHSPGPVVAPGRVRLLLRGGAGVWDARPRGGRAVLQPRCSLASPLVAVGPV

SEQ ID NO: 82307 - protein, 185 aa, Homo sapiens
  MOD_RES (1)..(1): Any amino acid
XAELHQEHDLKDKDRLKNLDEQLSAPKKDVKQPEELPPITTTTTSTTPATNTTCTATVPPQPQYSYHDINVYSLAGLAPHITLNPTIPLFQAHPQLKQCVRQAIERAVQELVHPVVDRSIKIAMTTCEQIVRKDFALDSEESRMRIAAHHMMRNLTAGMAMITCREPLLMSISTNLKNSFASALR

SEQ ID NO: 82308 - protein, 184 aa, Homo sapiens
MAGAGPAPGLPGAGGPVVPGPGAGIPGKSGEERLKEMEAEMALFEQEVLGAPVPGIPTAVPAVPTVPTVPTVEAMQVPAAPVIRPIIATNTYQQVQQTLEARAAAAATVVPPMAKVIRDKRTGKTKGYGFVSFKDPSDYVRAMREMNGKYVGSRPIKLRKSMWKDRNLDVVRKKQKEKKKLGLR

SEQ ID NO: 82309 - protein, 251 aa, Homo sapiens
  MOD_RES (1)..(1): Any amino acid
XIKTLGTGSFGRVMLVKHKETGNHYAMKILDKQKVVKLKQIEHTLNEKRILQAVNFPFLVKLEFSFKDNSNLYMVMEYVPGGEMFSHLRRIGRFSEPHARFYAAQIVLTFEYLHSLDLIYRDLKPENLLIDQQGYIQVTDFGFAKRVKGRTWTLCGTPEYLAPEIILSKGYNKAVDWWALGVLIYEMAAGYPPFFADQPIQIYEKIVSGKVEAPFIPKFKGPGDTSNFDDYEEEEIRVSINEKCGKEFSEF

SEQ ID NO: 82310 - protein, 276 aa, Homo sapiens
MDNKKRLAYAIIQFLHDQLRHGGLSSDAQESLEVAIQCLETAFGVTVEDSDLALPQTLPEIFEAAATGKEMPQDLRSPARTPPSEEDSAEAERLKTEGNEQMKVENFEAAVHFYGKAIELNPANAVYFCNRAAAYSKLGNYAGAVQDCERAICIDPAYSKAYGRMGLALSSLNKHVEAVAYYKKALELDPDNETYKSNLKIAELKLREAPSPTGGVGSFDIAGLLNNPGFMSMASNLMNNPQIQQLMSGMISGGNNPLGTPGTSPSQNDLASLIQA

SEQ ID NO: 82311 - protein, 16 aa, Homo sapiens
  MOD_RES (1)..(1): Any amino acid
XRPLIFGKGTYLEVQQ

SEQ ID NO: 82312 - protein, 186 aa, Homo sapiens
MDVCATSRTDREIKVTLVFEHVDQDLRTYLDKAPPPGLPAETIKDLMRQFLRGLDFLHANCIVHRDLKPENILVTSGGTVKLADFGLARIYSYQMALTPVVVTLWYRAPEVLLQSTYATPVDMWSVGCIFAEMFRRKPLFCGNSEADQLGKIFDLIGLPPEDDWPRDVSLPRGAFPPRGPRPVQSV

SEQ ID NO: 82313 - protein, 906 aa, Homo sapiens
MKNDESNKENSSEMDYLENATVIDESALTPEQRLGLKQAEERLERDHIFRLEKRSPEYTNCRYLCKLCLIHIENIQGAHKHIKEKRHKKNILEKQEESELRSLPPPSPAHLAALSVAVIELAKEHGITDDDLRVRQEIVEEMSKVITTFLPECSLRLYGSSLTRFALKSSDVNIDIKFPPKMNHPDLLIKVLGILKKNVLYVDVESDFHAKVPVVVCRDRKSGLLCRVSAGNDMACLTTDLLTALGKIEPVFIPLVLAFRYWAKLCYIDSQTDGGIPSYCFALMVMFFLQQRKPPLLPCLLGSWIEGFDPKRMDDFQLKGIVEEKFVKWECNSSSATEKNSIAEENKAKADQPKDDTKKTETDNQSNAMKEKHGKSPLALETPNRVSLGQLWLELLKFYTLDFALEEYVICVRIQDILTRENKNWPKRRIAIEDPFSVKRNVARSLNSQLVYEYVVERFRAAYRYFACPQTKGGNKSTVDFKKREKGKISNKKPVKSNNMATNGCILLGETTEKINAEREQPVQCDEMDCTSQRCIIDNNNLLVNELDFADHGQDSSSLSTSKSSEIEPKLDKKQDDLAPSETCLKKELSQCNCIDLSKSPDPDKSTGTDCRSNLETESSHQSVCTDTSATSCNCKATEDASDLNDDDNLPTQELYYVFDKFILTSGKPPTIVCSICKKDGHSKNDCPEDFRKIDLKPLPPMTNRFREILDLVCKRCFDELSPPCSEQHNREQILIGLEKFIQKEYDEKARLCLFGSSKNGFGFRDSDLDICMTLEGHENAEKLNCKEIIENLAKILKRHPGLRNILPITTAKVPIVKFEHRRSGLEGDISLYNTLAQHNTRMLATYAAIDPRVQYLGYTMKVFAKIFDGKQIPQRMVDGWNAFFFDKTEELKKRLPSLGKNTESL

SEQ ID NO: 82314 - protein, 131 aa, Homo sapiens
MTSEFFAAQLRAQISDDTTHPISYYKPEFYTPVDGGTAHLSVVAEDGSAVSATSTINLYFGSKVRSPVSEILFNDEMDDFSSPNITNEFGVPPSPANFIQPGKQPLSSMCPTIMVGQDGQVRMVVGAAGGT

SEQ ID NO: 82315 - protein, 40 aa, Homo sapiens
MASRLTLLTLLLLLLAGVCAAALPQSEFGDPGTPEPETSS

SEQ ID NO: 82316 - protein, 34 aa, Homo sapiens
  MOD_RES (1)..(1): Any amino acid
XMLQAQEQCHREQLVAAVEVTEQETKVPKKTVIM

SEQ ID NO: 82317 - protein, 172 aa, Homo sapiens
  MOD_RES (1)..(1): Any amino acid
XRRVVGGQERVWPAVRRGRGGSMFRLLSWSLGRGFLRAAGRRCRGCSARLLPGLAGGPGPEVQVPPSRVAPHGRGPGLLPLLAALAWFSRPAAAEEEEQQGADGAAAEDGADEAEAEIIQLLKRAKVRRLRALRPAERGSLCERGLGVAAHYSLRLAEEWMEAPRVKLPRMS

SEQ ID NO: 82318 - protein, 255 aa, Homo sapiens
PGDKARKVLNDIISTMFNRKFMEELFKPQELYSKKALRTVYERLAHASIMKLNQASMDKLYDLMTMAFKYQVLLCPRPKDVLLVTFNHLDTIKGFIRDSPTILQQVDETLRQLTEIYGGLSAGEFQLIRQTLLIFFQDLHIRVSMFLKDKVQNNNGRFVLPVSGPVPWGTEVPGLIRMFNNKGEEVKRIEFKHGGNYVPAPKEGSFELYGDRVLKLGTNMYSVNQPVETHVSGSSKNLASWTQTSSANQARRVIL

SEQ ID NO: 82319 - protein, 135 aa, Homo sapiens
MAQEVSEYLSQNPRVAAWVEALRCDGETDKHWRHRRDFLLRNAGDLAPAGGAASASTDEAADAESGTRNRQLQQLISFSMAWANHVFLGCRYPQKVMDKILSMAEGIKVTDAPTYTTRDELVAKVKKRGISSSNG

SEQ ID NO: 82320 - protein, 1121 aa, Homo sapiens [sequence omitted]

SEQ ID NO: 82321 - protein, 59 aa, Homo sapiens
  MOD_RES (1)..(1): Any amino acid
XGYLPSSCTRMLHRPWGSSAWMWRTWAWTSLQSWGTRTENTPMIAGLGKVSPGELEEMS

SEQ ID NO: 82322 - protein, 709 aa, Homo sapiens
MVKEITRDIKQLDHAKRHLTTSITTLNHLHMLAGGVDSLEAMTRRRQYGEVANLLQGVMNVLEHFHKYMGIPQIRQLSERVKAAQTELGQQILADFEEAFPSQGTKRPGGPSNVLRDACLVANILDPRIKQEIIKKFIKQHLSEYLVLFQENQDVAWLDKIDRRYAWIKRQLVDYEEKYGRMFPREWCMAERIAVEFCHVTRAELAKIMRTRAKEIEVKLLLFAIQRTTNFEGFLAKRFSGCTLTDGTLKKLESPPPSTNPFLEDEPTPEMEELATEKGDLDQPKKPKAPDNPFHGIVSKCFEPHLYVYIESQDKNLGELIDRFVADFKAQGPPKPNTDEGGAVLPSCADLFVYYKKCMVQCSQLSTGEPMIALTTIFQKYLREYAWKILSGNLPKTTTSSGGLTISSLLKEKEGSEVAKFTLEELCLICNILSTAEYCLATTQQLEEKLKEKVDVSLIERINLTGEMDTFSTVISSSIQLLVQDLDAACDPALTAMSKMQWQNVEHVGDQSPYVTSVILHIKQNVPIIRDNLASTRKYFTQFCVKFANSFIPKFITHLFKCKPISMVGAEQLLLDTHSLKMVLLDLPSISSQVVRKAPASYTKIVVKGMTRAEMILKVVMAPHEPLVVFVDNYIKLLTDCNTETFQKILDMKGLKRSEQSSMLELLRQRLPAPPSGAESSGSLSLTAPTPEQESSRIRKLEKLIKKRL

SEQ ID NO: 82323 - protein, 158 aa, Homo sapiens
MAFITYVLLAGMALGIQKRFSPEVLGLCASTALVWVVMEVLALLLGLYLATVRSDLSTFHLLAYSGYKYVGMILSVLTGLLFGSDGYYVALAWTSSALMYFIVSLVHPPIPLPSLEGKPPPPGQASVLLSSRCALCGQQPWAPTAWGAPSPGSVSSST

SEQ ID NO: 82324 - protein, 119 aa, Homo sapiens
MMSEHDLADVVQIAVEDLSPDHPVVLENHVVTDEDEPALKRQRLEINCQDPSIKSFLYSINQTICLRLDSIEAKLQALEATCKSLEEKLDLVTNKQHSPIQVPMVAGSPLGATQTCNKV

SEQ ID NO: 82325 - protein, 113 aa, Homo sapiens
MSLPSSRAARVPGPSGSLCALLALLLLLTPPGPLASAGPVSAVLTELRCTCLRVTLRVNPKTIGKLQVFPAGPQCSKVEVVASLKNGKQVCLDPEAPFLKKVIQKILDRYLSL

SEQ ID NO: 82326 - protein, 126 aa, Homo sapiens
MNQRSHLGTTYLDTAKGAVETFMKLRARDPASRGDRYMLVTFEEPPYAIKAGWKENHATFMNELKNLQAEGLTTLGQSLRTAFDLLNLNRLVTGIDNYGQGRNPFFLEPAIIITITDGSKLTTTSG

SEQ ID NO: 82327 - protein, 1222 aa, Homo sapiens
MALSDEPAAGGPEEEAEDETLAFGAALEAFGESAETRALLGRLREVHGGGAEREVALERFRVIMDKYQEQPHLLDPHLGSGSRCVPQAGLELLAPSNPALASHSAGMTEWMMNLLLDIVQDQTSPASLVHLAFKFLYIITKVRGYKTFLRLFPHEVADVEPVLDLVTIQNPKDHEAWETRYMLLLWLSVTCLIPFDFSRLDGNLLTQPGQARMSIMDRILQIAESYLIVSDKARDAAAVLVSRFITRPDVKQSKMAEFLDWSLCNLARSSFQTMQGVITMDGTLQALAQIFKHGKREDCLPYAATVLRCLDGCRLPESNQTLLRKLGVKLVQRLGLTFLKPKVAAWRYQRGCRSLAANLQLLTQGQSEQKPLILTEDDDEDDDVPEGVERVIEQLLVGLKDKDTVVRWSAAKGIGRMAGRLPRALADDVVGSVLDCFSFQETDKAWHGGCLALAELGRRGLLLPSRLVDVVAVILKALTYDEKRGACSVGTNVRDAACYVCWAFARAYEPQELKPFVTAISSALVIAAVFDRDINCRRAASAAFQENVGRQGTFPHGIDILTTADYFAVGNRSNCFLVISVFIAGFPEYTQPMIDHLVTMKISHWDGVIRELAARALHNLAQQAPEFSATQVFPRLLSMTLSPDLHMRHGSILACAEVAYALYKLAAQENRPVTDHLDEQAVQGLKQIHQQLYDRQLYRGLGGQLMRQAVCVLIEKLSLSKMPFRGDTVIDGWQWLINDTLRHLHLISSHSRQQMKDAAVSALAALCSEYYMKEPGEADPAIQEELITQYLAELRNPEEMTRCGFSLALGALPGFLLKGRLQQVLTGLRAVTHTSPEDVSFAESRRDGLKAIARICQTVGVKAGAPDEAVCGENVSQIYCALLGCMDDYTTDSRGDVGTWVRKAAMTSLMDLTLLLARSQPELIEAHTCERIMCCVAQQASEKIDRFRAHAASVFLTLLHFDSPPIPHVPHRGELEKLFPRSDVASVNWSAPSQAFPRITQLLGLPTYRYHVLLGLVVSLGGLTESTIRHSTQSLFEYMKGIQSDPQALGSFSGTLLQIFEDNLLNERVSVPLLKTLDHVLTHGCFDIFTTEEDHPFAVKLLALCKKEIKNSKDIQKLLSGIAVFCEMVQFPGDVRRQALLQLCLLLCHRFPLIRKTTASQVYETLLTYSDVVGADVLDEVVTVLSDTAWDAELAVVREQRNRLCDLLGVPRPQLVPQPGAC

SEQ ID NO: 82328 - protein, 3591 aa, Homo sapiens
MRLISIAPGPRWQVQSHHPRSAGQNCTFQLHGPNGTVESPGFPYGYPNYANCTWTITAEEQHRIQLVFQSFALEEDFDVLSVFDGPPQPENLRTRLTGFQLPATIVSAATTLSLRLISDYAVSAQGFHATYEVLPSHTCGNPGRLPNGIQQGSTFNLGDKVRYSCNLGFFLEGHAVLTCHAGSENSATWDFPLPSCRADDACGGTLRGQSGIISSPHFPSEYHNNADCTWTILAELGDTIALVFIDFQLEDGYDFLEVTGTEGSSLWFTGASLPAPVISSKNWLRLHFTSDGNHRQRGFSAQYQVKKQIELKSRGVKLMPSKDNSQKTSVLTQVGVSQGHNMCPDPGIPERGKRLGSDFRLGSSVQFTCNEGYDLQGSKRITCMKVSDMFAAWSDHRPVCRARMCDAHLRGPSGIITSPNFPIQYDNNAHCVWIITALNPSKVIKLAFEEFDLERGYDTLTVGDGGQDGDQKTVLYILTGTSVPDLIVSTNHQMWLLFQTDGSGSSLGFKASYEEIEQGSCGDPGIPAYGRREGSRFHHGDTLKFECQPAFELVGQKAITCQKNNQWSAKKPGCVFSCFFNFTSPSGVVLSPNYPEDYGNHLHCVWLILARPESRIHLAFNDIDVEPQFDFLVIKDGATAEAPVLGTFSGNQLPSSITSSGHVARLEFQTDHSTGKRGFNITFTTFRHNECPDPGVPVNGKRFGDSLQLGSSISFLCDEGFLGTQGSETITCVLKEGSVVWNSAVLRCEAPCGGHLTSPSGTILSPGWPGFYKDALSCAWVIEAQPGYPIKITFDRFKTEVNYDTLEVRDGRTYSAPLIGVYHGTQVPQFLISTSNYLYLLFSTDKSHSDIGFQLRYETITLQSDHCLDPGIPVNGQRHGNDFYVGALVTFSCDSGYTLSDGEPLECEPNFQWSRALPSCEALCGGFIQGSSGTILSPGFPDFYPNNLNCTWIIETSHGKGVFFTFHTFHLESGHDYLLITENGSFTQPLRQLTGSRLPAPISAGLYGNFTAQVRFISDFSMSYEGFNITFSEYDLEPCEEPEVPAYSIRKGLQFGVGDTLTFSCFPGYRLEGTARITCLGGRRRLWSSPLPRCVAECGNSVTGTQGTLLSPNFPVNYNNNHECIYSIQTQPGKGIQLKARAFELSEGDVLKVYDGNNNSARLLGVFSHSEMMGVTLNSTSSSLWLDFITDAENTSKGFELHFSSFELIKCEDPGTPKFGYKVHDEGHFAGSSVSFSCDPGYSLRGSEELLCLSGERRTWDRPLPTCVAECGGTVRGEVSGQVLSPGYPAPYEHNLNCIWTIEAEAGCTIGLHFLVFDTEEVHDVLRIWDGPVESGVLLKELSGPALPKDLHSTFNSVVLQFSTDFFTSKQGFAIQFSVSTATSCNDPGIPQNGSRSGDSWEAGDSTVFQCDPGYALQGSAEISCVKIENRFFWQPSPPTCIAPCGGDLTGPSGVILSPNYPEPYPPGKECDWKVTVSPDYVIALVFNIFNLEPGYDFLHIYDGRDSLSPLIGSFYGSQLPGRIESSSNSLFLAFRSDASVSNAGFVIDYTENPRESCFDPGSIKNGTRVGSDLKLGSSVTYYCHGGYEVEGTSTLSCILGPDGKPVWNNPRPVCTAPCGGQYVGSDGVVLSPNYPQNYTSGQICLYFVTVPKDYVVFGQFAFFHTALNDVVEVHDGHSQHSRLLSSLSGSHTGESLPLATSNQVLIKFSAKGLAPARGFHFVYQAVPRTSATQCSSVPEPRYGKRLGSDFSVGAIVRFECNSGYALQGSPEIECLPVPGALAQWNVSAPTCVVPCGGNLTERRGTILSPGFPEPYLNSLNCVWKIVVPEGAGIQIQVVSFVTEQNWDSLEVFDGADNTVTMLGSFSGTTVPALLNSTSNQLYLHFYSDISVSAAGFHLEYKTVGLSSCPEPAVPSNGVKTGERYLVNDVVSFQCEPGYALQGHAHISCMPGTVRRWNYPPPLCIAQCGGTVEEMEGVILSPGFPGNYPSNMDCSWKIALPVGFGAHIQFLNFSTEPNHDYIEIRNGPYETSRMMGRFSGSELPSSLLSTSHETTVYFHSDHSQNRPGFKLEYQAYELQECPDPEPFANGIVRGAGYNVGQSVTFECLPGYQLTGHPVLTCQHGTNRNWDHPLPKCEVPCGGNITSSNGTVYSPGFPSPYSSSQDCVWLITVPIGHGVRLNLSLLQTEPSGDFITIWDGPQQTAPRLGVFTRSMAKKTVQSSSNQVLLKFHRDAATGGIFAIAFSAYPLTKCPPPTILPNAEVVTENEEFNIGDIVRYRCLPGFTLVGNEILTCKLGTYLQFEGPPPICEVHCPTNELLTDSTGVILSQSYPGSYPQFQTCSWLVRVEPDYNISLTVEYFLSEKQYDEFEIFDGPSGQSPLLKALSGNYSAPLIVTSSSNSVYLRWSSDHAYNRKGFKIRYSAPYCSLPRAPLHGFILGQTSTQPGGSIHFGCNAGYRLVGHSMAICTRHPQGYHLWSEAIPLCQALSCGLPEAPKNGMVFGKEYTVGTKAMYSCSEGYHLQAGAEATAECLDTGLWSNRNVPPQCVPVTCPDVSSISVEHGRWRLIFETQYQFQAQLMLICDPGYYYTGQRVIRCQANGKWSLGDSTPTCRIISCGELPIPPNGHRIGTLSVYGATAIFSCNSGYTLVGSRVRECMANGLWSGSEVRCLATQTKLHSIFYKLLFDVLSSPSLTKAGHCGTPEPIVNGHINGENYSYRGSVVYQCNAGFRLIGMSVRICQQDHHWSGKTPFCVPITCGHPGNPVNGLTQGNQFNLNDVVKFVCNPGYMAEGAARSQCLASGQWSDMLPTCRIINCTDPGHQENSVRQVHASGPHRFSFGTTVSYRCNHGFYLLGTPVLSCQGDGTWDRPRPQCLLVSCGHPGSPPHSQMSGDSYTVGAVVRYSCIGKRTLVGNSTRMCGLDGHWTGSLPHCSGTSVGVCGDPGIPAHGIRLGDSFDPGTVMRFSCEAGHVLRGSSERTCQANGSWSGSQPECGVISCGNPGTPSNARVVFSDGLVFSSSIVYECREGYYATGLLSRHCSVNGTWTGSDPECLVINCGDPGIPANGLRLGNDFRYNKTVTYQCVPGYMMESHRVSVLSCTKDRTWNGTKPVCKALMCKPPPLIPNGKVVGSDFMWGSSVTYACLEGYQLSLPAVFTCEGNGSWTGELPQCFPVFCGDPGVPSRGRREDRGFSYRSSVSFSCHPPLVLVGSPRRFCQSDGTWSGTQPSCIDPTLTTCADPGVPQFGIQNNSQGYQVGSTVLFRCQKGYLLQGSTTRTCLPNLTWSGTPPDCVPHHCRQPETPTHANVGALDLPSMGYTLIYSCQEGFSLKGGSEHRTCKADGSWTGKPPICLEVRPSGRPINTAREPPLTQALIPGDVFAKNSLWKGAYEYQGKKQPAMLRVTGFQVANSKVNATMIDHSGVELHLAGTYKKEDFHLLLQVYQITGPVEIFMNKFKDDHWALDGHVSSESSGATFIYQGSVKGQGFGQFGFQRLDLRLLESDPESIGRHFASNSSSVAAAILVPFIALIIAGFVLYLYKHRRRPKVPFNGYAGHENTNVRATFENPMYDRNIQPTDIMASEAEFTVSTVCTAV

SEQ ID NO: 82329 - protein, 157 aa, Homo sapiens
MRSGFRCDEPAEAVAPERQTVSGAVALASFTSPHTHPVDDGGRHYSWGSPKRILGLGPGDAAKEAGLVRPLQGQSEKILLRTRNRQPMEPPMEPSGGEQEPGAVRFLDLPWEDVLLPHVLNRVPLRQLLRLQRVSRAFRSLVQLHLAGLRRFDAAQV

SEQ ID NO: 82330 - protein, 172 aa, Homo sapiens
LQTGLEISKIIMSSVSNLKHSKEKKKSSKKTKCIKRRPPWQICSKFGALPFVAEKMRQHRDPHILQKPFNVTETRCLPKPSRTTSWCKAIPPDSEKSISICDNLSELLMAMQDELDQMSMEHQELLKQMKETESHSVCDDIECELECLLKKMEIKGEQISKLKKHQDSVRRL

SEQ ID NO: 82331 - protein, 483 aa, Homo sapiens
MRDNEKAWWQQWTSHTGLEGWGGTQEDRMGFGGAVAALRGRPSPLQSTIHESYGRPEEQVLINRQEITNKADAWDMQEFITHMYIKQLLRHPAFQLLLALLLVINAITIALRTNSYLDQKHYELFSTIDDIVLTILLCEVLLGWLNGFWIFWKDGWNILNFIIVFILLLRFFINEINIPSINYTLRALRLVHVCMAVEPLARIIRVILQSVPDMANIMVLILFFMLVFSVFGVTLFGAFVPKHFQNIQVALYTLFICITQDGWVDIYSDFQTEKREYAMEIGGAIYFTIFITIGAFIGINLFVIVVTTNLEQMMKAGEQGQQQRITFSETGAEEEEENDQLPLVHCVVARSEKSGLLQEPLAGGPLSNLSENTCDNFCLVLEAIQENLRQYKEIRDELNMIVEEVRAIRFNQEQESEVLNRRSSTSGSLETTSSKDIRQMSQQQDLLSALVSMEKVCLPSPTQWVLALTLCSAQPSRASGPFV

SEQ ID NO: 82332 - protein, 172 aa, Homo sapiens
MAAPTPARPVLTHLLVALFGMGSWAAVNGIWVELPVVVKELPEGWSLPSYVSVLVALGNLGLLVVTLWRRLAPGKDEQVPIRVVQVLGMVGTALLASLWHHVAPVAGQLHSVAFLALAFVLALACCASNVTFLPFLSHLPPRFLRSFFLGQGLSALLPCVLALVQGVGRLEC

SEQ ID NO: 82333 - protein, 93 aa, Homo sapiens
MTSAVVDSGGTILELSSNGVENQEESEKVSEYPAVIVEPVPSARLEQGYAAQVLVYDDETYMMQDVAEEQEVETENVETGGISLCHPGWSAVV

SEQ ID NO: 82334 - protein, 110 aa, Homo sapiens
MQWAVGRRWAWAALLLAVAAVLTQVVWLWLGTQSFVFQREEIAQLARQYAGLDHELAFSRLIVELRRLHPGHVLPDEELQWVFVNAGGWMGAMCLLHASLSEGDGSTRAW

SEQ ID NO: 82335 - protein, 98 aa, Homo sapiens
VINEVEKAPKELRKELMKRRKEELAQSQHAQGVAQIMIQSFQLSSCAVFNAQMQDEQEFVQKQQQELDGSLKKIIQQQKAELANIERECLNNKQQLMR

SEQ ID NO: 82336 - protein, 73 aa, Homo sapiens
SDCSRPSLQWYTRAQSKMRRPSLLLKDILKCTLLVFGVWILYILKLNYTTEECDMKKMHYVDPDHVKVKQCTS

SEQ ID NO: 82337 - protein, 79 aa, Homo sapiens
AKGDKGSPGFYGKKGAKGEKGNAGFPGLPGPAGEPGRHGKDGLMGSPGFKGEAGSPGAPGQDGTRGEPTCAYEFSHVKE

SEQ ID NO: 82338 - protein, 124 aa, Homo sapiens
MSQGLSWHDDLTQYVISQEMERIPRLRPPEPRPRDRSGLAPKRPGPAGELLLQDIPTGSAPAAQHRLPQPPVGKGGAGASSSLSPLQAELLPPLLEHLLLPPQPPHPSLSYEPALLQPYLFHQF

SEQ ID NO: 82339 - protein, 36 aa, Homo sapiens
  MOD_RES (1)..(1): Any amino acid
XWLEEQGMILKQTFWDSPETNVGPSHPGHQRGPETL

SEQ ID NO: 82340 - protein, 72 aa, Homo sapiens
MEKAHEDSEKLREIVLPMEKEIEELKAKLLRAEELIQEIQRRPRHAPSLHGSTELLPLSRDPSPPLEPLEEL

SEQ ID NO: 82341 - protein, 32 aa, Homo sapiens
MASDEGKLFVGGLSFDTNEQSLEQVFSKYGQI

SEQ ID NO: 82342 - protein, 103 aa, Homo sapiens
MAAALFVLLGFALLGTHGASGAAGTVFTTVEDLGSKILLTCSLNDSATEVTGHRWLKGGVVLKEDALPGQKTEFKVDSDDQWGEYSCVFLPEPMGTANIQLHE

SEQ ID NO: 82343 - protein, 96 aa, Homo sapiens
MMCSSLEQALAVLVTTFHKYSCQEGDKFKLSKGEMKELLHKELPSFVGHSREPCAVRAFRVHLFNPVIGDLRNQSPEGKSDCPKITQHWRKWMRRG

SEQ ID NO: 82344 - protein, 692 aa, Homo sapiens
MMESVGVYGFCGCKAKNKMKCDSRWEIAASETAPTSAYSSPARSLGDTGITPLSPSHIVNDTDSNVSEQQSFLVVVAVDFGTTSSGYAYSFTKEPECIHVMRRWEGGDPGVSNQKTPTTILLTPERKFHSFGYAARDFYHDLDPNEAKQWLYLEKFKMKLHTTGDLTMDTDLTAANGKKVKALEIFAYALQYFKEQALKELSDQAGSEFENSDVRWVITVPAIWKQPAKQFMRQAAYQAGLASPENSEQLIIALEPEAASIYCRKLRLHQMIELSSKAAVNGYSGSDTVGAGFTQAKEHIRRNRQSRTFLVENVIGEIWSELEEGDKYVVVDSGGGTVDLTVHQIRLPEGHLKELYKATGGPYGSLGVDYEFEKLLYKIFGEDFIEQFKIKRPAAWVDLMIAFESRKRAAAPDRTNPLNITLPFSFIDYYKKFRGHSVEHALRKSNVDFVKWSSQGMLRMSPDAMNALFKPTIDSIIEHLRDLFQKPEVSTVKFLFLVGGFAEAPLLQQAVQAAFGDQCRIIIPQDVGLTILKGAVLFGLDPAVIKVRRSPLTYGVGVLNRYVEGKHPPEKLLVKDGTRWCTDVFDKFISADQSVALGELVKRSYTPAKPSQLVIVINIYSSEHDNVSFITDPGVKKCGTLRLDLTGTSGTAVPARREIQTLMQFGDTEIKATAIDIATSKSVKVGIDFLNY

SEQ ID NO: 82345 - protein, 161 aa, Homo sapiens
MAPWPELGDAQPNPDKYLEGAAGQQPTAPDKSKETNKTDNTEAPVTKIELLPSYSTATLIDEPTEVDDPWNLPTLQDSGIKWSERDTKGKILCFFQGIGRLILLLGFLYFFVCSLDILSSAFQLVGGKMAGQFFSNSSIMSNPLLGLVIGVLVTVLVQSSS

SEQ ID NO: 82346 - protein, 1727 aa, Homo sapiens
MMMDWKAVAAQKLNLSSKKKKHRPSTSSAAEPPLFATSFSGILQTSPPPAPPCLLRAVNKVKDTPGLGKVKVMLRICSTLARDTSESSSFLKVDPRKKQITLYDPLTCGGQNAFQKRGNQVPPKMFAFDAVFPQDASQAEVCAGTVAEVIQSVVNGADGCVFCFGHAKLGKSYTMIGKDDSMQNLGIIPCAISWLFKLINERKEKTGARFSVRVSAVEVWGKEENLRDLLSEVATGSLQDGQSPGVYLCEDPICGTQLQNQSELRAPTAEKAAFFLDAAIASRRSHQQDCDEDDHRNSHVFFTLHIYQYRMEKSGKGGMSGGRSRLHLIDLGSCVKALSKNREGGSGLCLSLSALGNVILALVNGSKHIPYKESKLAMLLRESLGNMNCRTTMIAHISAAVGSYAETLSTIQIASRVLRMKKKKTKYTSSSSGGESSCEEGRMRRPTQLRPFHTRATVDPDFPIAHLSSDPDYSSSSEQSCDTVIYIGPNGTALSDKELTDNEGPPDFVPIVPALQKTRGDSRPAEAGEAAAGKSERDCLKCNTFAELQERLDCIDGSEEPSSFPFEELPAQFGPEQASRGPRLSQAAGASPLSESDKEDNGSEGQLTNREGPELPASKMQRSHSPVPAAAPAHSPSPASPRSVPGSSSQHSASPLVQSPSLQSSRESLNSCGFVEGKPRPMGSPRLGIASLSKTSEYKPPSSPSQRCKVYTQKGVLPSPAPLPPSSKDSGVASRESLLQPEVRTPPVGMSPQVLKKSMSAGSEGFPETPVDDEQQAATPSESKKEILSTTMVTVQQPLELNGEDELVFTLVEELTISGVLDSGRPTSIISFNSDCSARALASGSRPVSIISSISEDLECYSSTAPVSEVSITQFLPLPKMSLDEKAQDAGSRRSSISSWLSEMSAGSEGEQSCHSFIAQTCFGHGEAMAEPVASEFVSSLQNTAVVCREKPKASPDNLLILSEMGDDSFNKAAPIKGCKISTVSKAMVTISNTANLSSCEGYIPMKTNITVYPCIAMSPRNIQEPEAPTATPKAGPTLAQSRESKENSAKKEMKFEDPWLKREEEVKKETAHPNEEGMMRCETATGPSNAETRAEQEQDGKPSPGDRLSSSSGEVSASPVTDNFRRVVDGCEMALPGLATQSPVHPNKSVKSSSLPRAFQKASRQEEPDSLSYYCAAETNGVGAASGTPPSKATLEGKVASPKHCVLARPKGTPPLPPVRKSSLDQKNRASPQHSASGSGTSSPLNQPAAFPAGLPDEPSGKTKDASSSSKLFSAKLEQLASRSNSLGRATVSHYECLSLERAESLSSVSSRLHAGKDGTMPRAGRSLGRSAGTSPPSSGASPKAGQSKISAVSRLLLASPRARGPSASTTKTLSFSTKSLPQAVGQGSSSPPGGKHTPWSTQSLSRNRSSGLASKLPLRAVSGRISELLQGGAGARGLQLRAGPEAEARGGALAEDEPAAAHLLPSPYSKITPPRRPHRCSSGHGSDNSSVLSGELPPAMGKTALFYHSGGSSGYESVMRDSEATGSASSAQDSTSENSSSVGGRCRSLKTPKKRSNPGSQRRRLIPALSLDTSSPVRKPPNSTGVRWVDGPLRSSPRGLGEPFEIKVYEIDDVERLQRRRGGASKEAMCFNAKLKILEHRQQRIAEVRAKYEWLMKELEATKQYLMLDPNKWLSEFDLEQVWELDSLEYLEALECVTERLESRVNFCKAHLMMITCFDITSRRR

SEQ ID NO: 82347 - protein, 72 aa, Homo sapiens
MFRQFYLWTCLASGIILGSLFEICLGQYDDGTILVDNMLIKGTAGGPDPTIELSLKDNVDYWVLMDPVKQML

SEQ ID NO: 82348 - protein, 77 aa, Homo sapiens
MDLEEFLSENGIPPSPSQHDHSPHPPGLQPASSAAPSVMDLSSRASAPLHPGIPSPNCMQSPIRPAVASKPQYTKSH

SEQ ID NO: 82349 - protein, 138 aa, Homo sapiens
ENDAADLQKAKEQNQRLDEEILALRNRVRSLDSEKKVLGEMVERLKGEVCESQENKQLGNHSPGKTVGGEQREQILKMSQEKNEMFESEWSKEREREKQLASGLDTAEKALKVESESHGLIARFNFLSCHLGKIYQET

SEQ ID NO: 82350 - protein, 262 aa, Homo sapiens
MATTAAPAGGARNGAGPEWGGFEENIQGGGSAVIDMENMDDTSGSSFEDMGELHQRLREEEVDADAADAAAAEEEDGEFLGMKGFKGQLSRQVADQMWQAGKRQASRAFSLYANIDILRPYFDVEPAQVRSRLLESMIPIKMVNFPQKIAGELYGPLMLVFTLVAILLHGMKTSDTIIITMLQMLALLGYGLFGHCIVLFITYNIHLHALFYLFWLLVGGLSTLRMVAVLVSRTVGPTQRLLLCGTLAALHMLFLLYLHFAY

SEQ ID NO: 82351 - protein, 600 aa, Homo sapiens
MRTTKVYKLVIHKKGFGGSDDELVVNPKVFPHIKLGDIVEIAHPNDEYSPLLLQVKSLKEDLQKETISVDQTVTQVFRLRPYQDVYVNVVDPKVSTCAYITQKVEFAGIRAQAGELWVKNEKVMCGYISEDTRVVFRSTSAMVYIFIQMSCEMWDFDIYGDLYFEKAVNGFLADLFTKWKEKNCSHEVTVVLFSRTFYDAKSVDEFPEINRASIRQDHKGRFYEDFYKVVVQNERREEWTSLLVTIKKLFIQYPVLVRLEQAEGFPQGDNSTSAQGNYLEAINLSFNVFDKHYINRNFDRTGQMSVVITPGVGVFEVDRLLMILTKQRMIDNGIGVDLVCMGEQPLHAVPLFKLHNRSAPRDSRLGDDYNIPHWINHSFYTSKSQLFCNSFTPRIKLAGKKPASEKAKNGRDTSLGSPKESENALPIQVDYDAYDAQVFRLPGPSRAQCLTTCRSVRERESHSRKSASSCDVSSSPSLPSRTLPTEEVRSQASDDSSLGKSANILMIPHPHLHQYEVSSSLGYTSTRDVLENMMEPPQRDSSAPGRFHVGSAESMLHVRPGGYTPQRALINPFAPSRMPMKLTSNRRRWMHTFPVGDRAE

SEQ ID NO: 82352 - protein, 139 aa, Homo sapiens
MDASSSPWNPTPAPVSSPPLLLPIPAIVFIAVGIYLLLLGLVLLTRNCLLAQGCCADGSSPCRKQGSSGPPDCCWTCAEACNFPLPSPAHFLDACCPQPTRADWAPRCPRCCPLCDCACTCQLPDCQSLNCLCFEIKLR

SEQ ID NO: 82353 - protein, 204 aa, Homo sapiens
MRPDRAEAPGPPAMAAGGPGAGSAAPVSSTSSLPLAALNMRVRRRLSLFLNVRTQVAADWTALAEEMDFEYLEIRQLETQADPTGRLLDAWQGRPGASVGRLLELLTKLGRDDVLLELGPSIEEDCQKYILKQQQEEAEKPLQVAAVDSSVPRTAELAGITTLDDPLGAAGWWWLSLMITCRARNVTSRPNLHSASLQVPIRSD

SEQ ID NO: 82354 - protein, 170 aa, Homo sapiens
EDQVEMADYALKSAGASIIEAGTSESYKNNKAKLYWHGIGFLNHEMPPDIILQPDVYPGKCWAFPGSQGHTLIKLATKIIPTAVTMEHISEKVSPSGNISSAPKEFSVYGITKKCEGEEIFLGQFIYNKTGTTVQTFELQGPWHTRQAHLEELVQKAMPHVQNIQECLFS

SEQ ID NO: 82355 - protein, 291 aa, Homo sapiens
VMREVRARLAATQVEYISGKVFFTTCSDLNMLKKLKSAERLFLLIKKQFPLIISSVSKGKIFNEMQRLINEDPGSWLNAISIWKNLLELDAKKEKLSQRDDNQLKRKVGENEIIAKKLKIEQMQKIEENRDCQLEKQIKEETLEQRDFTTKSEKFQEEEFQNDIEKAIDTHNQNDLTFRVSCRCSGTIGKAFTAQVLYMGLSPGPRLQMHMRSQQCREERTPQTVAITRPHQLALTKFSDVKGHWSEYFINLKISQTLKGGRKSNWNCYYETLWMESRLEESTIRDLYTSK

SEQ ID NO: 82356 - protein, 688 aa, Homo sapiens
MGEIEDGEADHITTDVQGQKCALVCECTAPESVSGKDNLPFLNSVLKNPVCKLYRFPTSDNKWMRIREQMSESILSFHIPKELISLHIKEDLCRNQEIKELGELSPHWDNLRKNVLTHCDQMVNMYQDILTELSKETGSSFKSSSSKGEKTLEFVPINLHLQRMQVHSPHLKDALYDVITVGAPAAHFQGFKNGGLRKLLHRFETERRNTGYQFIYYSPENTAKAKEVLSNINQLQPLIATHADLLLNSASQHSPDSLKNSLKMLSEKTELFVHAFKDQLVRSALLALYTARPGGILKKPPSPKSSTEESSPQDQPPVMRGQDSIPHHSDYDEEEWDRVWANVGKSLNCIIAMVDKLIERDGGSEGSGGNNDGEKEPSLTDAIPSHPREDWYEQLYPLILTLKDCMGEVVNRAKQSLTFVLLQELAYSLPQCLMLTLRRDIVFSQALAGLVCGFIIKLQTSLYDPGFLQQLHTVGLIVQYEGLLSTYSDEIGMLEDMAVGISDLKKVAFKIIEAKSNDVLPVITGRREHYVVEVKLPARMFESLPLQIKEGQLLHVYPVLFNVGINEQQTLAERFGDVSLQESINQENFELLQEYYKIFMEKMPPDYISHFQEQNDLKALLENLLQNIQSKKRKNVEIMWLAATICRKLNGIRFTCCKSAKDRTSMSVTLEQCSILRDEHQLHKDFFI

SEQ ID NO: 82357 - protein, 296 aa, Homo sapiens
MGILLGLLLLGHLTVDTYGRPILEVPESVTGPWKGDVNLPCTYDPLQGYTQVLVKWLVQRGSDPVTIFLRDSSGDHIQQAKYQGRLHVSHKVPGDVSLQLSTLEMDDRSHYTCEVTWQTPDGNQVVRDKITELRVQKLSVSKPTVTTGSGYGFTVPQGMRISLQCQARGSPPISYIWYKQQTNNQEPIKVATLSTLLFKPAVIADSGSYFCTAKGQVGSEQHSDIVKFVVKDSSKLLKTKTEAPTTMTYPLKATSTVKQSWDWTTDMDGYLGETSAGPAFRHNGNMCLKWLSGNMF

SEQ ID NO: 82358 - protein, 73 aa, Homo sapiens
MAAKQPPPLMKKHSQTDLVSRLKTRKILGVGGEDDDGEVHRSKISQVLGNEIKFTIREPLGLRVWQFVSAVLF

SEQ ID NO: 82359 - protein, 39 aa, Homo sapiens
WTKQVTCRRSLSGVILVHCNLWAPPNPLRVQAILPQPPK

SEQ ID NO: 82360 - protein, 36 aa, Homo sapiens
KIWAFLDVSFVERILKSQKERQCALRVFKGMIQGKE

SEQ ID NO: 82361 - protein, 94 aa, Homo sapiens
MEFDLNNEGEIDLMSLKRMMEKLGVPKTHLEMKKMISEVTGGVSDTISYRDFVNMMLGKRSAVLKLVMMFEGKANESSPKPVGPPPERDIASLP

SEQ ID NO: 82362 - protein, 70 aa, Homo sapiens
MQAKYSSTRDMLDDDGDTTMSLHSQGSATTRHPEPRRTEHRAPSSTWRPVALTLLTLCLVLLIGLAALGL

SEQ ID NO: 82363 - protein, 153 aa, Homo sapiens
MAGLQELRFPEEKPLLRGQDATELESSDAFLLAADTDWKEHDIETPYGLLHVVIRGSPKGNRPAILTYHDVGLNHKLCFNTFFNFEDMQEITKHFVVCHVDAPGQQVGASQFPQGYQFPSMEQLAAMLPSVVQHFGFKYVIGIGVGAGAYVLA

SEQ ID NO: 82364 - protein, 140 aa, Homo sapiens
MRKVKFTQQNYHDRLSQILTDFPKLDDIHPFYADLMNILYDKDHYKLALGQINIAKNLVDNVAKDYVRLMKYGDSLYRCKQLKRAALGRMCTVIKRQKQSLEYLEQVRQHLSRLPTIDPNTRTLLLCGYPNVGKSSFINK

SEQ ID NO: 82365 - protein, 141 aa, Homo sapiens [sequence omitted]

SEQ ID NO: 82366 - protein, 253 aa, Homo sapiens
MFSLSSTVQPQVTVPLSHLINAFHTPKNTSVSLSGVSVSQNQHRDVVPEHEAPSSEPSLNLRDLGLSELKIGQIDQLVENLLPGFCKGKNISSHWHTSHVSAQSFFENKYVFIQSRGFKTLKSRTRRLQSTSERLAETQNIAPSFVKGFLLRDRGSDVESLDKLMKTKNIPEAHQDAFKTGFAEGFLKAQALTQKTNDSLRRTRLILFVLLLFGIYGLLKNPFLSVRFRTTTGLDSAVDPVQMKNVTFEHVKG

SEQ ID NO: 82367 - protein, 167 aa, Homo sapiens
MSRRKQGKPQHLSKREFSPEPLEAILTDDEPDHGPLGAPEGDHDLLTCGQCQMNFPLGDILIFIEHKRKQCNGSLCLEKAVDKPPSPSPIEMKKASNPVEVGIQVTPEDDDCLSTSSRGICPKQEHIAGNPRGSSEKSPGCQCKGPALSPRRPSGKCTGLQLFPRPL

SEQ ID NO: 82368 - protein, 260 aa, Homo sapiens
MAKREDSPGPEVQPMDKQFLVCSICLDRYQCPKVLPCLHTFCERCLQNYIPAQSLTLSCPVCRQTSILPEQGVSALQNNFFISSLMEAMQQAPDGAHDPEDPHPLSVVAGRPLSCPNHEGKTMEFYCEACETAMCGECRAGEHREHGTVLLRDVVEQHKAALQRQLEAVRGRLPQLSAAIALVGGISQQLQERKAEALAQISAAFEDLEQALQQRKQALVSDLETICGAKQKVLQSQLDTLRQGQEHIGSSCSFAEQALR

SEQ ID NO: 82369 - protein, 198 aa, Homo sapiens
MAVVSEDDFQHSSNSTYRTTSSSLRADQEALLEKLLDRPPPGLQRPEDRFCGTYIIFFSLGIGSLLPWNFFITAKEYWMFKLRNSSSPATGEDPEGSDILGCSPHPCPGLTDGHPGHLHGDNCTGEGGHFLLDPWLFCGHHCLHGDPQRCLHCLQQQHLRHDRLLSYEELPGTDIRGPAMSWGCKDEQAPVPSELMAQ

SEQ ID NO: 82370 - protein, 149 aa, Homo sapiens
MLQLSEFDPLLREIAPGPLTTPSVPGSTPGPCFLCGSAPGTLHCPSCKQALCPACDHLFHGHPSRAHHLRQTLPGVLQGTHLSPSLPASAQPRPQSTSLLALGDSSLSSPNPASAHLPWHCAACAMLNEPWAVLCVACDRPRGCKGLGL

SEQ ID NO: 82371 - protein, 118 aa, Homo sapiens
MMSEHDLADVVQIAVEDLSPDHPVVLENHVVTDEDEPALKRQRLEINCQDPSIKSFLYSINQTICLRLDSIEAKLQALEATCKSLEEKLDLVTNKQHSPIQVPMVAGSPLGATQTCNK

SEQ ID NO: 82372 - protein, 523 aa, Homo sapiens
  MOD_RES (1)..(1): Any amino acid
XPALQRCLTLLRDSRPWQRLVRIVQWGWLELPWVKQNINRQGNAPVASGRYCQPEEEVARLLTMAGVPEDELNPFHVLGVEATASDVELKKAYRQLAVMVHPDKNHHPRAEEAFKVLRAAWDIVSNAEKRKEYEMKRMAENELSRSVNEFLSKLQDDLKEAMNTMMCSRCQGKHRRFEMDREPKSARYCAECNRLHPAEEGDFWAESSMLGLKITYFALMDGKVYDITEWAGCQRVGISPDTHRVPYHISFGSRIPGTRGRQRATPDAPPADLQDFLSRIFQVPPGQMPNGNFFAAPQPAPGAAAASKPNSTVPKGEAKPKRRKKLAELKQECLARGLETKGIKQDLIHRLQAYLEEHAEEEANEEDVLGDETEEEETKPIELPVKEEEPPEKTVDVAAEKKVVKITSEIPQTERMQKRAERFNVPVSLESKKAARAARFGISSVPTKGLSSDNKPMVNLDKLKERAQRFGLNVSSISRKSEDDEKLKKRKERFGIVTSSAGTGTTEDTEAKKRKRAERFGIA

SEQ ID NO: 82373 - protein, 174 aa, Homo sapiens
MAALDSLSLFTSLGLSEQKARETLKNSALSAQLREAATQAQQTLGSTIDKATGILLYGLASRLRDTRRLSFLVSYIASKKIHTEPQLSAALEYVRSHPLDPIDTVDFERECGVGVIVTPEQIEEAVEAAINRHRPQLLVERYHFNMGLLMAPCAYASRRGSGCAEVGRWQNDQE

SEQ ID NO: 82374 - protein, 52 aa, Homo sapiens
MPLLDVFWSCFRKVKCFPLLQVKKNAEAEAKRACEWLQATGFPQYVQLFEGG

SEQ ID NO: 82375 - protein, 119 aa, Homo sapiens
LGFRLQAFPPALCRPLSCAQTKILGSDRVKLMESLVVGDIAELRPNQGTLSLFTNEAGGILDDLIVTNTSEGHLYVVSNAGCWEKDLALMQDKVRELQNQGRDVGLEVLDNALLALQVL

SEQ ID NO: 82376 - protein, 933 aa, Homo sapiens
MKSVCPVTSGFSSPSPSAAAAAQEVRSATDGNTSTTPPTSAKKRKLNSSSSSSSNSSNEREDFDSTSSSSSTPPLQPRDSASPSTSSFCLGVSVAASSHVPIQKKLRFEDTLEFVGFDAKMAEESSSSSSSSSPTAATSQQQQLKNKSILISSVASVHHANGLAKSSTTVSSFANSKPGSAKKLVIKNFKDKPKLPENYTDETWQKLKEAVEAIQNSTSIKYNLEELYQERPQDMQILFMFLWIVLRKIILRCSSSNRRIKEAVENLCSYKISANLYKQLRQICEDHIKAQIHQFREDSLDSVLFLKKIDRCWQNHCRQMIMIRSIFLFLDRTYVLQNSMLPSIWDMGLELFRAHIISDQKVQNKTIDGILLLIERERNGEAIDRSLLRSLLSMLSDLQIYQDSFEQRFLEETNRLYAAEGQKLMQEREVPEYLHHVNKRLEEEADRLITYLDQTTQKSLIATVEKQLLGEHLTAILQKGLNNLLDENRIQDLSLLYQLFSRVRGGVQVLLQQWIEYIKAFGSTIVINPEKDKTMVQELLDFKDKVDHIIDICFLKNEKFINAMKEAFETFINKRPNKPAELIAKYVDSKLRAGNKEATDEELEKMLDKIMIIFRFIYGKDVFEAFYKKDLAKRLLVGKSASVDAEKSMLSKLKHECGAAFTSKLEGMFKDMELSKDIMIQFKQYMQNQNVPGNIELTVNILTMGYWPTYVPMEVHLPPEMVKLQEIFKTFYLGKHSGRKLQWQSTLGHCVLKAEFKEGKKELQVSLFQTLVLLMFNEGEEFSLEEIKQATGIEDGELRRTLQSLACGKARVLAKNPKGKDIEDGDKFICNDDFKHKLFRIKINQIQMKETVEEQASTTERVFQDRQYQIDAAIVRIMKMRKTLSHNLLVSEVYNQLKFPVKPADLKKRIESLIDRDYMERDKENPNQYNYIA

SEQ ID NO: 82377 - protein, 188 aa, Homo sapiens
MLKTLDPKDWKNQDHYAVLGLGHVRYKATQRQIKAAHKAMVLKHHPDKRKAAGEPIKEGDNDYFTCITKAYEMLSDPVKRRAFNSVDPTFDNSVPSKSEAKDNFFEVFTPVFERNSRWSNKKNVPKLGDMNSSFEDVDIFYSFWYNFDSWREFSYLDEEEKEKAECRDERRWIEKQNRATRAQRKKEE

SEQ ID NO: 82378 - protein, 649 aa, Homo sapiens
MSSTRSQNPHGLKQIGLDQIWDDLRAGIQQVYTRQSMAKSRYMELYTHVYNYCTSVHQSNQARGAGVPPSKSKKGQTPGGAQFVGLELYKRLKEFLKNYLTNLLKDGEDLMDESVLKFYTQQWEDYRFSSKVLNGICAYLNRHWVRRECDEGRKGIYEIYSLALVTWRDCLFRPLNKQVTNAVLKLIEKERNGETINTRLISGVVQSYVELGLNEDDAFAKGPTLTVYKESFESQFLADTERFYTRESTEFLQQNPVTEYMKKAEARLLEEQRRVQVYLHESTQDELARKCEQVLIEKHLEIFHTEFQNLLDADKNEDLGRMYNLVSRIQDGLGELKKLLETHIHNQGLAAIEKCGEAALNDPKMYVQTVLDVHKKYNALVMSAFNNDAGFVAALDKACGRFINNNAVTKMAQSSSKSPELLARYCDSLLKKSSKNPEEAELEDTLNQVMVVFKYIEDKDVFQKFYAKMLAKRLVHQNSASDDAEASMISKLKQACGFEYTSKLQRMFQDIGVSKDLNEQFKKHLTNSEPLDLDFSIQVLSSGSWPFQQSCTFALPSELERSYQRFTAFYASRHSGRKLTWLYQLSKGELVTNCFKNRYTLQASTFQMAILLQYNTEDAYTVQQLTDSTQIKMDILAQVLQILLKSKLL

SEQ ID NO: 82379 - protein, 275 aa, Homo sapiens
  MOD_RES (1)..(1): Any amino acid
XPAPAEAGGAALQHTIRPELLTEGVKEPIMDSQERDSGDPLVDESLKRQGFQENYDARLSRIDIANTLREQVQDLFNKKYGEALGIKYPVQVPYKRIKSNPGSVIIEGLPPGIPFRKPCTFGSQNLERILAVADKIKFTVTRPFQGLIPKPDEDDANRLGEKVILREQVKELFNEKYGEALGLNRPVLVPYKLIRDSPDAVEVTGLPDDIPFRNPNTYDIHRLEKILKAREHVRMVIINQLQPFAEICNDAKVPAKDSSIPKRKRKRVSEGNSVS

SEQ ID NO: 82380 - protein, 539 aa, Homo sapiens
MGLCCCKDWRGHLRAPKGGAGEREKVPANPEALLLMASSQRDMEDWVQAIRRVIWAPLGGGIFGQRLEETVHHERKYGPRLAPLLVEQCVDFIRERGLTEEGLFRMPGQANLVRDLQDSFDCGEKPLFDRFLDEVQAYSNVNKMSVQNLATVFGPNILRPQVEDPVTIMEGTSLVQHLMTVLIRKHSQLFTAPVPEGPTSPRGGLQCAVGWGSEEVTRDSQGEPGGPGLPAHRTSSLDGAAVAVLSRTAPTGPGSRCSPGKKVQTLPSWKSSFRQPRSLSGSPKGGGSSLEVPIISSGGNWLMNGLSSLRGHRRASSGDRLKDSGSVQRLSTYDNVPAPGLVPGIPSVASMAWSGASSSESSVGGSLSSCTACRASDSSARSSLHTDWALEPSPLPSSSEDPKSLDLDHSMDEAGAGASNSEPSEPDSPTREHARRSEALQGLVTELRAELCRQRTEYERSVKRIEEGSADLRKRMSRLEEELDQEKKKYIMLEIKLRNSERAREDAERRNQLLQREMEEFFSTLGSLTVGAKGARAPK

SEQ ID NO: 82381 - protein, 928 aa, Homo sapiens
MSLFKARDWWSTILGDKEEFDQGCLCLANVDNSGNGQDKIIVGSFMGYLRIFSPHPAKTGDGAQAEDLLLEVDLRDPVLQVEVGKFVSRSFTLVAQTGVQWRDLSLLQPPPPRFKQFSCLSLPSSWDYRGTEMLHLAVLHSRKLCVYSVSGTLGNVEHGNQCQMKLMYEHNLQRTACNMTYGSFGGVKGRDLICIQSMDGMLMVFEQESYAFGRFLPGFLLPGPLAYSSRTDSFLTVSSCQQVESYKYQVLAFATDADKRQETEQQKLGSGKRLVVDWTLNIGEQALDICIVSFNQSASSVFVLGERNFFCLKDNGQIRFMKKLDWSPSCFLPYCSVSEGTINTLIGNHNNMLHIYQDVTLKWATQLPHIPVAVRVGCLHDLKGVIVTLSDDGHLQCSYLGTDPSLFQAPNVQSRELNYDELDVEMKELQKIIKDVNKSQGVWPMTEREDDLNVSVVVSPNFDSVSQATDVEVGTDLVPSVTVKVTLQNRVILQKAKLSVYVQPPLELTCDQFTFEFMTPDLTRTVSFSVYLKRSYTPSELEGNAVVSYSRPTDRNPDGIPRVIQCKFRLPLKLICLPGQPSKTASHKITIDTNKSPVSLLSLFPGFASQSDDDQVNVMGFHFLGGARITVLASKTSQRYRIQSEQFEDLWLITNELILRLQEYFEKQGVKDFACSFSGSIPLQEYFELIDHHFELRINGEKLEELLSERAVQFRAIQRRLLARFKDKTPAPLQHLDTLLDGTYKQVIALADAVEENQGNLFQSFTRLKSATHLVILLIALWQKLSADQVAILEAAFLPLQEDTQELGWEETVDAAISHLLKTCLSKSSKEQALNLNSQLNIPKDTSQLKKHITLLCDRLSKGGRLCLSTDAAAPQTMVMPGGCTTIPESDLEERSVEQDSTELFTNHRHLTAETPRPEVSPLQGVSE

SEQ ID NO: 82382 - protein, 65 aa, Homo sapiens
  MOD_RES (1)..(1): Any amino acid
XADDQIAQSLCGEDLIIKGISVHISNAEPKHNSNRQLERSGRFGGNPVHLISNVYGRSTSLKVVL

SEQ ID NO: 82383 - protein, 190 aa, Homo sapiens
MGPIDDSVASLVIAQLLFLQSESNKKPIHMYINSPGGVVTAGLAIYDTMQYILNPICTWCVGQAASMGSLLLAAGTPGMRHSLPNSRIMIHQPSGGARGQATDIAIQAEEIMKLKKQLYNIYAKHTKQSLQVIESAMERDRYMSPMEAQEFGILDKVLVHPPQDGEDEPTLVQKEPVEAAPAAEPVPAST

SEQ ID NO: 82384 - protein, 279 aa, Homo sapiens
DNSFRQAVMKNPPERTPQDLEIVYSYLHGMEALSNLREHQLRLMCETVRYERHEANEVLYYPDDIGTCWYILLSGSVFIKESMFLPRSSFGKRSAGSFRRGCECIVLEPSEMIVVDYMDENEEYFQRQASHRQSRRRFRKINQKGERQTIIDTVDPYPMGKPPLPRGYHTECTKSQLPADFTKLHLTDSLHPQVTHVSSSHSGCSITSDSGSSSLSDIYQATESEAGDMDLSGLPETAVDSEDDDDEEDIERASDPLMSRDIVRDCLEKDPIDRTDDDI

SEQ ID NO: 82385 - protein, 65 aa, Homo sapiens
MCIRQLKFFTTACVCECPQNILTIMQSISQHKWVSATLTWAGLKSTRKARRQSEWKHSHILVWIN

SEQ ID NO: 82386 - protein, 99 aa, Homo sapiens
MDSFDLALLQEWDLESLCVYEPDRNALRRKERERRNQETQQDDGTFNSSYSLFSEPYKTNKGDELSNRIQNTLGNYDEMKDFLTDRSNQSHLVGVPKPG

SEQ ID NO: 82387 - protein, 70 aa, Homo sapiens
MGDVKLVASSHISKTSLSVDPSRVDSMPLTEAPAFILPPRNLCIKEGATAKFEGREVLRSSLVSLLFPKP

SEQ ID NO: 82388 - protein, 270 aa, Homo sapiens
QQVMTAAQKDVQIIVFPEDGIHGFNFTRTSIYPFLDFMPSPQVVRWNPCLEPHRFNDTEVLQRLSCMAIRGDMFLVANLGTKEPCHSSDPRCPKDGRYQFNTNVVFSNNGTLVDRYRKHNLYFEAAFDVPLKVDLITFDTPFAGRFGIFTCFDILFFDPAIRVLRDYKVKHVVYPTAWMNQLPLLAAIEIQKAFAVAFGINVLAANVHHPVLGMTGSGIHTPLESFWYHDMENPKSHLIIAQVAKNPVGLIGAENATGETDPSHSKLRGS

SEQ ID NO: 82389 - protein, 18 aa, Homo sapiens
MYATDSRGHSPAFLQPQN

SEQ ID NO: 82390 - protein, 191 aa, Homo sapiens
MAIGKRLATLPTKEQKTQRLISELSLLNHKLPARVWLPTAGFDHHVVRVPHTQAVVLNSKDKAPYLIYVEVLECENFDTTSVPARIPENRIRSTRSVENLPECGITHEQRAGSFSTVPNYDNDDEAWSVDDIGELQVELPEVHTNSCDNISQFSVDSITSQESKEPVFIAAGDIRRRLSEQLAHTPTAFKR

SEQ ID NO: 82391 - protein, 1065 aa, Homo sapiens
RLAYLLQQTDEYVANLTELVRQHKAAQVAKEKKKKKKKKAENAEGQTPAIGPDGEPLDETSQMSDLPVKVIHVESGKILTGTDAPKAGQLEAWLEMNPGYEVAPRSDSEESGSEEEEEEEEEEQPQAAQPPTLPVEEKKKIPDPDSDDVSEVDARHIIENAKQDVDDEYGVSQALARGLQSYYAVAHAVTERVDKQSALMVNGVLKQYQIKGLEWLVSLYNNNLNGILADEMGLGKTIQTIALITYLMEHKRINGPFLIIVPLSTLSNWAYEFDKWAPSVVKVSYKGSPAARRAFVPQLRSGKFNVLLTTYEYIIKDKHILAKIRWKYMIVDEGHRMKNHHCKLTQVLNTHYVAPRRLLLTGTPLQNKLPELWALLNFLLPTIFKSCSTFEQWFNAPFAMTGEKVDLNEEETILIIRRLHKVLRPFLLRRLKKEVEAQLPEKVEYVIKCDMSALQRVLYRHMQAKGVLLTDGSEKDKKGKGGTKTLMNTIMQLRKICNHPYMFQHIEESFSEHLGFTGGIVQGLDLYRASGKFELLDRILPKLRATNHKVLLFCQMTSLMTIMEDYFAYRGFKYLRLDGTTKAEDRGMLLKTFNEPGSEYFIFLLSTRAGGLGLNLQSADTVIIFDSDWNPHQDLQAQDRAHRIGQQNEVRVLRLCTVNSVEEKILAAAKYKLNVDQKVIQAGMFDQKSSSHERRAFLQAILEHEEQDEEEDEVPDDETVNQMIARHEEEFDLFMRMDLDRRREEARNPKRKPRLMEEDELPSWIIKDDAEVERLTCEEEEEKMFGRGSRHRKEVDYSDSLTEKQWLKAIEEGTLEEIEEEVRQKKSSRKRKRDSDAGSSTPTTSTRSRDKDDESKKQKKRGRPPAEKLSPNPPNLTKKMKKIVDAVIKYKDSSSGRQLSEVFIQLPSRKELPEYYELIRKPVDFKKIKERIRNHKYRSLNDLEKDVMLLCQNAQTFNLEGSLIYEDSIVLQSVFTSVRQKIEKEDDSEGEESEEEEEGEEEGSESESRSVKVKIKLGRKEKAQDRLKGGRRRPSRGSRAKPVVSDDDSEEEQEEDRSGSGSEED

SEQ ID NO: 82392 - protein, 63 aa, Homo sapiens
RKNKNDISKLIFKSGDFQMSPYAEYPKNPRSQEWGREAIEMHENGSTKNLLQMTDVYYSGAFF

SEQ ID NO: 82393 - protein, 138 aa, Homo sapiens
MSLLGPKVLLFLAAFIITSDWIPLGVNSQRGDDVTQATPETFTEDPNLVNDPATDETVLAVLADIAPSTDDLASLSEKNTTAECWDEKFTCTRLYSVHRPVKQCIHQLCFTSLRRMYIVNKEICSRLVCKEHEAMKDP

SEQ ID NO: 82394 - protein, 101 aa, Homo sapiens
MFNIRNIGKTLVTRTQGTKIASDGLKGRVFEVSLADLQNDEVAFRKFKLITEDVQGKNCLTNFHGMDLTRDKMCSMVKKWQTMIEAHVDVKTTDGYLLRLF

SEQ ID NO: 82395 - protein, 424 aa, Homo sapiens
MVMEKPSPLLVGREFVRQYYTLLNKAPEYLHRFYGRNSSYVHGGVDASGKPQEAVYGQNGSVPNKFYVHNDMFRYEDEVFGDSEPELDEESEDEVEEEQEERQPSPEPVQENANSGYYEAHPVTNGIEEPLEESSHEPEPEPESETKTEELKPQVEEKNLEELEEKSTTPPPAEPVSLPQEPPKAFSWASVTSKNLPPSGTVSSSGIPPHVKAPVSQPRVEAKPEVQSQPPRVREQRPRERPGFPPRGPRPGRGDMEQNDSDNRRIIRYPDSHQLFVGNLPHDIDENELKEFFMSFGNVVELRINTKGVGGKLPNFGFVVFDDSEPVQRILIAKPIMFRGEVRLNVEEKKTRAARERETRGGGDDRRDIRRNDRGPGGPRGIVGGGMMRDRDGRGPPPRGGMAQKLGSGRGTGQMEGRFTGQRR

SEQ ID NO: 82396 - protein, 17 aa, Homo sapiens
CHGVKGQKFLLLQISRP

SEQ ID NO: 82397 - protein, 1903 aa, Homo sapiens
MEANDHFNFTGLPPAPAASGLKPSPSSGEGLYTNGSPMNFPQQGKSLNGDVNVNGLSTVSHTTTSGILNSAPHSSSTSHLHHPSVAYDCLWNYSQYPSANPGSNLKDPPLLSQFSGGQYPLNGILGGSRQPSSPSHNTNLRAGSQEFWANGTQSPMGLNFDSQELYDSFPDQNFEVMPNGPPSFFTSPQTSPMLGSSIQTFAPSQEVGSGIHPDEAAEKEMTSVVAENGTGLVGSLELEEEQPELKMCGYNGSVPSVESLHQEVSVLVPDPTVSCLDDPSHLPDQLEDTPILSEDSLEPFNSLAPEPVSGGLYGIDDTELMGAEDKLPLEDSPVISALDCPSLNNATAFSLLADDSQTSTSIFASPTSPPVLGESVLQDNSFDLNNGSDAEQEEMETQSSDFPPSLTQPAPDQSSTIQLHPATSPAVSPTTSPAVSLVVSPAASPEISPEVCPAASTVVSPAVFSVVSPASSAVLPAVSLEVPLTASVTSPKASPVTSPAAAFPTASPANKDVSSFLETTADVEEITGEGLTASGSGDVMRRRIATPEEVRLPLQHGWRREVRIKKGSHRWQGETWYYGPCGKRMKQFPEVIKYLSRNVVHSVRREHFSFSPRMPVGDFFEERDTPEGLQWVQLSAEEIPSRIQAITGKRGRPRNTEKAKTKEVPKVKRGRGRPPKVKITELLNKTDNRPLKKLEAQETLNEEDKAKIAKSKKKMRQKVQRGECQTTIQGQARNKRKQETKSLKQKEAKKKSKAEKEKGKTKQEKLKEKVKREKKEKVKMKEKEEVTKAKPACKADKTLATQRRLEERQRQQMILEEMKKPTEDMCLTDHQPLPDFSRVPGLTLPSGAFSDCLTIVEFLHSFGKVLGFDPAKDVPSLGVLQEGLLCQGDSLGEVQDLLVRLLKAALHDPGFPSYCQSLKILGEKVSEIPLTRDNVSEILRCFLMAYGVEPALCDRLRTQPFQAQPPQQKAAVLAFLVHELNGSTLIINEIDKTLESMSSYRKNKWIVEGRLRRLKTVLAKRTGRSEVEMEGPEECLGRRRSSRIMEETSGMEEEEEEESIAAVPGRRGRRDGEVDATASSIPELERQIEKLSKRQLFFRKKLLHSSQMLRAVSLGQDRYRRRYWVLPYLAGIFVEGTEGNLVPEEVIKKETDSLKVAAHASLNPALFSMKMELAGSNTTASSPARARGRPRKTKPGSMQPRHLKSPVRGQDSEQPQAQLQPEAQLHAPAQPQPQLQLQLQSHKGFLEQEGSPLSLGQSQHDLSQSAFLSWLSQTQSHSSLLSSSVLTPDSSPGKLDPAPSQPPEEPEPDEAESSPDPQALWFNISAQMPCNAAPTPPPAVSEDQPTPSPQQLASSKPMNRPSAANPCSPVQFSSTPLAGLAPKRRAGDPGEMPQSPTGLGQPKRRGRPPSKFFKQMEQRYLTQLTAQPVPPEMCSGWWWIRDPEMLDAMLKALHPRGIREKALHKHLNKHRDFLQEVCLRPSADPIFEPRQLPAFQEGIMSWSPKEKTYETDLAVLQWVEELEQRVIMSDLQIRGWTCPSPDSTREDLAYCEHLSDSQEDITWRGRGREGLAPQRKTTNPLDLAVMRLAALEQNVERRYLREPLWPTHEVVLEKALLSTPNGAPEGTTTEISYEITPRIRVWRQTLERCRSAAQVCLCLGQLERSIAWEKSVNKVTCLVCRKGDNDEFLLLCDGCDRGCHIYCHRPKMEAVPEGDWFCTVCLAQQVEGEFTQKPGFPKRGQKRKSGYSLNFSEGDGRRRRVLLRGRESPAAGPRYSEEGLSPSKRRRLSMRNHHSDLTFCEIILMEMESHDAAWPFLEPVNPRLVSGYRRIIKNPMDFSTMRERLLRGGYTSSEEFAADALLVFDNCQTFNEDDSEVGKAGHIMRRFFESRWEEFYQGKQANL

SEQ ID NO: 82398 - protein, 95 aa, Homo sapiens
MLPYTVNFKVSARTLTGALNAHNKAAVDWGWQGLIAYGCHSLVVVIDSITAQTLQVPADGTAFRTARTTVCYSYVSTVDHKKHQDVSATAGCWYK

SEQ ID NO: 82399 - protein, 126 aa, Homo sapiens
MAKRVAIVGAGVSGLASIKCCLEEGLEPTCFERSDDLGGLWRFTEHVEEGRASLYKSVVSNSCKEMSCYSDFPFPEDYPNYVPNSQFLEYLKMYANHFDLLKHIQFKSGIQLTEQQLFPISCIRDS

SEQ ID NO: 82400 - protein, 1675 aa, Homo sapiens
MGLLQLLAFSFLALCRARVRAQEPEFSYGCAEGSCYPATGDLLIGRAQKLSVTSTCGLHKPEPYCIVSHLQEDKKCFICNSQDPYHETLNPDSHLIENVVTTFAPNRLKIWWQSENGVENVTIQLDLEAEFHFTHLIMTFKTFRPAAMLIERSSDFGKTWGVYRYFAYDCEASFPGISTGPMKKVDDIICDSRYSDIEPSTEGEVIFRALDPAFKIEDPYSPRIQNLLKITNLRIKFVKLHTLGDNLLDSRMEIREKYYYAVYDMVVRGNCFCYGHASECAPVDGFNEEVEGMVHGHCMCRHNTKGLNCELCMDFYHDLPWRPAEGRNSNACKKCNCNEHSISCHFDMAVYLATGNVSGGVCDDCQHNTMGRNCEQCKPFYYQHPERDIRDPNFCERCTCDPAGSQNEGICDSYTDFSTGLIAGQCRCKLNVEGEHCDVCKEGFYDLSSEDPFGCKSCACNPLGTIPGGNPCDSETGHCYCKRLVTGQHCDQCLPEHWGLSNDLDGCRPCDCDLGGALNNSCFAESGQCSCRPHMIGRQCNEVEPGYYFATLDHYLYEAEEANLGPGVSIVERQYIQDRIPSWTGAGFVRVPEGAYLEFFIDNIPYSMEYDILIRYEPQLPDHWEKAVITVQRPGRIPTSSRCGNTIPDDDNQVVSLSPGSRYVVLPRPVCFEKGTNYTVRLELPQYTSSDSDVESPYTLIDSLVLMPYCKSLDIFTVGGSGDGVVTNSAWETFQRYRCLENSRSVVKTPMTDVCRNIIFSISALLHQTGLACECDPQGSLSSVCDPNGGQCQCRPNVVGRTCNRCAPGTFGFGPSGCKPCECHLQGSVNAFCNPVTGQCHCFQGVYARQCDRCLPGHWGFPSCQPCQCNGHADDCDPVTGECLNCQDYTMGHNCERCLAGYYGDPIIGSGDHCRPCPCPDGPDSGRQFARSCYQDPVTLQLACVCDPGYIGSRCDDCASGYFGNPSEVGGSCQPCQCHNNIDTTDPEACDKETGRCLKCLYHTEGEHCQFCRFGYYGDALQQDCRKCVCNYLGTVQEHCNGSDCQCDKATGQCLCLPNVIGQNCDRCAPNTWQLASGTGCDPCNCNAAHSFGPSCNEFTGQCQCMPGFGGRTCSECQELFWGDPDVECRACDCDPRGIETPQCDQSTGQCVCVEGVEGPRCDKCTRGYSGVFPDCTPCHQCFALWDVIIAELTNRTHRFLEKAKALKISGVIGPYRETVDSVERKVSEIKDILAQSPAAEPLKNIGNLFEEAEKLIKDVTEMMAQVEVKLSDTTSQSNSTAKELDSLQTEAESLDNTVKELAEQLEFIKNSDIRGALDSITKYFQMSLEAEERVNASTTEPNSTVEQSALMRDRVEDVMMERESQFKEKQEEQARLLDELAGKLQSLDLSAAAEMTCGTPPGASCSETECGGPNCRTDEGERKCGGPGCGGLVTVAHNAWQKAMDLDQDVLSALAEVEQLSKMVSEAKLRADEAKQSAEDILLKTNATKEKMDKSNEELRNLIKQIRNFLTQDSADLDSIEAVANEVLKMEMPSTPQQLQNLTEDIRERVESLSQVEVILQHSAADIARAEMLLEEAKRASKSATDVKVTADMVKEALEEAEKAQVAAEKAIKQADEDIQGTQNLLTSVGIHNHYMNGNTPTYTLTRKVHLLSMNRNSYNSTLKDSFNKSKLLR

SEQ ID NO: 82401 - protein, 152 aa, Homo sapiens
RLLVPILLPEKCYDQLFVQWDLLHVPCLKILLSKGLGLGIVAGSLLVKLPQVFKILGAKSAEGLSLQSVMLELVALTGTMVYSITNNFPFSSWGEALFLMLQTITICFLVMHYRGQTVKASPGSHQLPQRAHRPALSHHSLPAVWGLPGPNL

SEQ ID NO: 82402 - protein, 227 aa, Homo sapiens
MAARRALHFVFKVGNRFQTARFYRDVLGMKVLRHEEFEEGCKAACNGPYDGKWSKTMVGFGPEDDHFVAELTYNYGVGDYKLGNDFMGITLASSQAVSNARKLEWPLTEVAEGVFETEAPGGYKFYLQNRSLPQSDPVLKVTLAVSDLQKSLNYWCNLLGMKIYEKDEEKQRALLGYADNQCKLELQGVKGGVDHAAAFGRIAFSCPQKEAMAADKSDEWFAKHNKP

SEQ ID NO: 82403 - protein, 117 aa, Homo sapiens
  MOD_RES (1)..(1): Any amino acid
XRTGKAASTPLLPEVEAYLQLLVVIFMMNSKRYKEAQKISDDLMQKISTQNRRALDLVAAKCYYYHARVYEFLDKLDVVRSFLHARLRTATLRHDADGQATSPGRVLASSVGAGGEG

SEQ ID NO: 82404 - protein, 729 aa, Homo sapiens
MEPWSSRWKTKRWLWDFTVTTLALTFLFQAREVRGAAPVDVLKALDFHNSPEGISKTTGFCTNRKNSKGSDTAYRVSKQAQLSAPTKQLFPGGTFPEDFSILFTVKPKKGIQSFLLSIYNEHGIQQIGVEVGRSPVFLFEDHTGKPAPEDYPLFRTVNIADGKWHRVAISVEKKTVTMIVDCKKKTTKPLDRSERAIVDTNGITVFGTRILDEEVFEGDIQQFLITGDPKAAYDYCEHYSPDCDSSAPKAAQAQEPQIDEYAPEDIIEYDYEYGEAEYKEAESVTEGPTVTEETIAQTEANIVDDFQEYNYGTMESYQTEAPRHVSGTNEPNPVEEIFTEEYLTGEDYDSQRKNSEDTLYENKEIDGRDSDLLVDGDLGEYDFYEYKEYEDKPTSPPNEEFGPGVPAETDITETSINGHGAYGEKGQKGEPAVVEPGMLVEGPPGPAGPAGIMGPPGLQGPTGPPGDPGDRGPPGRPGLPGADGLPGPPGTMLMLPFRYGGDGSKGPTISAQEAQAQAILQQARIALRGPPGPMGLTGRPGPVGGPGSSGAKGESGDPGPQGPRGVQGPPGPTGKPGKRGRPGADGGRGMPGEPGAKGDRGFDGLPGLPGDKGHRGERGPQGPPGPPGDDGMRGEDGEIGPRGLPGEAGPRGLLGPRGTPGAPGQPGMAGVDGPPGPKGNMGPQGEPGPPGQQGNPGPQGLPGPQGPIGPPGEKMCCNLSFGILIPLQK

SEQ ID NO: 82405 - protein, 330 aa, Homo sapiens
MGEKPGTRVFKKSSPNCKLTVYLGKRDFVDHLDKVDPVDGVVLVDPDYLKDRKVFVTLTCAFRYGREDLDVLGLSFRKDLFIATYQAFPPVPNPPRPPTRLQDRLLRKLGQHAHPFFFTIPQNLPCSVTLQPGPEDTGKACGVDFEIRAFCAKSLEEKSHKRNSVRLVIRKVQFAPEKPGPQPSAETTRHFLMSDRSLHLEASLDKELYYHGEPLNVNVHVTNNSTKTVKKIKVSVRQYADICLFSTAQYKCPVAQLEQDDQREGGCQQGGAGNPGVLQGQGEAGGVSRRGCLCGAAFCSYAPQAPRPHPPPQTPVSRSGDRCPCGHQPH

SEQ ID NO: 82406 - protein, 80 aa, Homo sapiens
MVKEITRDIKQLDHAKRHLTTSITTLNHLHMLAGGVDSLEAMTRRRQYGEVANLLQGVMNVLEHFHKYMGIPQIRQLSER

SEQ ID NO: 82407 - protein, 21 aa, Homo sapiens
MLETYNHLVSLEIPSSKPKLI

SEQ ID NO: 82408 - protein, 1224 aa, Homo sapiens
  MOD_RES (1)..(1): Any amino acid
XGGHGSGSPSQPDADSHFEQLMVSMLEERDRLLDTLRETQETLALTQGKLHEVGHERDSLQRQLNTALPQEFAALTKELNVCREQLLEREEEIAELKAERNNTRLLLEHLECLVSRHERSLRMTVVKRQAQSPAGVSSEVEVLKALKSLFEHHKALDEKVRERLRVALERCSLLEEELGATHKELMILKEQNNQKKTLTDGVLDINHEQENTPSTSGKRSSDGSLSHEEDLAKVIELQEIISKQSREQSQMKERLASLSSHVTELEEDLDTARKDLIKSEEMNTKLQRDVREAMAQKEDMEERITTLEKRYLAAQREATSVHDLNDKLENEIANKDSMHRQTEDKNRQLQERLELAEQKLQQTLRKAETLPEVEAELAQRVAALSKAEERHGNIEERLRQMEAQLEEKNQELQRARQREKMNEEHNKRLSDTVDKLLSESNERLQLHLKERMAALEDKNSLLREVESAKKQLEETQHDKDQLVLNIEALRAELDHMRLRGASLHHGRPHLGSVPDFRFPMADGHTDSYSTSAVLRRPQKGRLAALRDEPSKVQTLNEQDWERAQQASVLANVAQAFESDADVSDGEDDRDTLLSSVDLLSPSGQADAHTLAMMLQEQLDAINKEIRLIQEEKENTEQRAEEIESRVGSGSLDNLGRFRSMSSIPPYPASSLASSSPPGSGRSTPRRIPHSPAREVDRLGVMTLPSDLRKHRRKLPPSREEVRDDKTTIKCETSPPSSPRALRLDRLHKGALHTVSHEDIRDIRNSTGSQDGPVSNPSSSNSSQDSLHKAPKKKGIKSSIGRLFGKKEKGRPGQTGKEALGQAGVSETDNSSQDALGLSKLGGQAEKNRKLQKKHELLEEARRQGLPFAQWDGPTVVVWLELWVGMPAWYVAACRANVKSGAIMSALSDTEIQREIGISNPLHRLKLRLAIQEIMSLTSPSAPPTSRTTTGNVWLTHEEMETLAATPQTEDEEGSWAQTLAYGDMNHEWIGNEWLPSLGLPQYRSYFMECLVDARMLDHLTKKDLRGQLKMVDSFHRNSFQCGIMCLRRLNYDRKELERKREESQSEIKDVLVWSNDRVIRWILSIGLKEYANNLIESGVHGALLALDETFDFSALALLLQIPTQNTQARAVLEREFNNLLVMGTDRRFDEDDDKSFRRAPSWRKKFRPKDIRGLAAGSAETLPANFRVTSSMSSPSMQPKKMQMDGNVSGTQRLDSATVRTYSC

SEQ ID NO: 82409 - protein, 490 aa, Homo sapiens
  MOD_RES (1)..(1): Any amino acid
XPSVRTSTETTGGSAQAGQAGGSVQAGQAGGSVQAGPVSSGLALRKLGDRVQLLNLLVTRLRQKVLREPLEPAALQRELPREVDQVHLEVLELRKQVAELGKHLRIAQHGGAEPSGRKQPPASDAVALGREGLTKRGPMEAEDQGELFLHLRSVARAPQTLSMHRLQRKLKEAARKIISLRLEKEQLIEMGNRLRAELGRPERWLLHHALPPAPEARKPGEEPRRPLDRSPPLGQVQPHFTSQDAKSAEDEAPSRHLGKHQPRSAQVGSRLDALQGPKTQHSIHTVTCKSPRQKEDRSPKPPQAPQHPEEHGRQSHSSSSFASGTLQDMWRLLDLGSSPSGVTSQGDSTPEMGSHYVTQAGLELLGSSSPAALASQSAEMTGVGPTPSLAWSGALHPNMNQEASLVRSTWAPGMRGGMNGGSSSVCKNMQRGPHWSPSQQPCSGIRTVLLSRKERTLLSCFSLPAPVVLVPLLLSGQAVTERAGHAGDIL

SEQ ID NO: 82410 - protein, 175 aa, Homo sapiens
LMIKGRKGKVNKMTAKETELQREMHEMAQKTAELQEELSGEKNRLAGELQLLLEEIKSSKDQLKELTLENSELKKSLDCMHKDQVEKEGKVREEIAEYQLRLHEAEKKHQALLLDTNKQYEVEIQTYREKLTSKEECLSSQKLEIDLLKSSKEELNNSLKATTQILEELKKTKEQ

SEQ ID NO: 82411 - protein, 111 aa, Homo sapiens
MSKLPRELTRDLERSLPAVASLGSSLSHSQSLSSHLLPPPEKRRAISDVRRTFCLFVTFDLLFISLLWIIELNTNTGIRKNLEQEIIQYNFKTSFFDIFVLAFFRFSGLLL

SEQ ID NO: 82412 - protein, 146 aa, Homo sapiens
MPKRGKKGAVAEDGDELRTEPEAKKSKTAAKKNDKEAAGEGPALYEDPPDQKTSPSGKPATLKICSWNVDGLRAWIKKKGLDWVKEEAPDILCLQETKCSENKLPAELQELPGLSHQYWSAPSDKEGYSGVGLLSRQCPLKVSYGI

SEQ ID NO: 82413 - protein, 89 aa, Homo sapiens
  MOD_RES (1)..(1): Any amino acid
XEGQRRTPQGIGLLAKTPLSRPVKRNNAKYRRIQTLIYDALERPRGWALLYHALVFLIVLGCLILAVLTTFKEYETVSGDWLLLLTSLC

SEQ ID NO: 82414 - protein, 155 aa, Homo sapiens
  MOD_RES (1)..(1): Any amino acid
XNQAAKEDTVVLKIGSVAMAPQADNPLGRSVLRKDIYHIRRHQERRAILTPVLTDFSVRITGAPAVIFTKVVSPENLHTEEILVCGHSLEVNITTNLDFFLSVAQVQLLHQLIVANMTGLEPSNKAAEISKQEQKKVDIFDGGMAETSSRYSGAQ

SEQ ID NO: 82415 - protein, 161 aa, Homo sapiens
MMLGTEGGEGFVVKVRGLPWSCSADEVQRFFSDCKIQNGAQGIRFIYTREGRPSGEAFVELESEDEVKLALKKDRETMGHRYVEVFKSNNVEMDWVLKHTGPNSPDTANDGFVRLRGLPFGCSKEEIVQFFSGILKSLRAVELKLELIMIHHESLWPCSGQ

SEQ ID NO: 82416 - protein, 265 aa, Homo sapiens
MISQFFILSSKGDPLIYKDFRGDSGGRDVAELFYRKLTGLPGDESPVVMHHHGRHFIHIRHSGLYLVVTTSENDYGYVQTTSTEMLRNFIQTEAVVSKPFSLFDLSSVGLFGAETQQSKVAPSSAASRPVLSSRSDQSQKNEVFLDVVERLSVLIASNGSLLKVDVQGEIRLKSFLPSGSEMRIGLTEEFCVGKSELRGYGPGIRVDEVSFHSSVNLDEFESHRILRLQPPQGELTVMRYQLSDDLPSPLPFRLFPSVQWDRGSG

SEQ ID NO: 82417 - protein, 69 aa, Homo sapiens
MCQVGEDYGEPAPEEPPPAPRPSREQKCVKCKEAQPVVVIRAGDAFCRCSWRGLGGLRPAPWSGRFLRA

SEQ ID NO: 82418 - protein, 107 aa, Homo sapiens
MNEVSVIKEGWLHKRGEYIKTWRPRYFLLKSDGSFIGYKERPEAPDQTLPPLNNFSVAECQLMKTERPRPNTFVIRCLQWTTVIERTFHVDSPDEREEWMRAIQMVA

SEQ ID NO: 82419 - protein, 81 aa, Homo sapiens
MEVNPPKQEHLLALKVMRLTKPTLFTNIPVTCEEKDLPGDLFNQLMRDDPSTVNGAEVLMLGEMLTLPQNFGLIFRQVLSV

SEQ ID NO: 82420 - protein, 75 aa, Homo sapiens
MLYLKGAQGRRFISDQSRRKDLSDRPLPERRSPNPQLLTIPEAATILLASLQKSPEDEEKNFDQTRFLEDSLLNW

SEQ ID NO: 82421 - protein, 90 aa, Homo sapiens
MEAVLNELVSVEDLLVRPGPDRGKGKVGGRVLRRVRAAAQREQGGTAGLRLLPGRGELPAQGIREGLKVRPRVAADRAPEQPGQGTGAAH

SEQ ID NO: 82422 - protein, 203 aa, Homo sapiens
MGKVRGLRARVHQAAVRPKGEAAPGPAPPAPEATPPPASAAGKDWAFINTNIFARTKIDPSALVQKLELDVRSVTSVRRGAEAKTVLPKKEKMKLRREQWLQKIEAIKLAEQKHREERRRRATVVVGDLHPLRDALPELLGLEAGSRRQARRKQGLCAVSNLGSILSWPSCPGSRVAGHALQAQAAPGWHPAAEAPEHWVQNR

SEQ ID NO: 82423 - protein, 129 aa, Homo sapiens
MASAVRGSRPWPRLGLQLQFAALLLGTLSPQVHTLRPENLLLVSTLDGSLHALSKQTGDLKWTLRDDPVIEGPMYVTEMAFLSDPADGSLYILGTQKQQGLMAGVQWYDHKAHCSLELLASSNPRTSVS

SEQ ID NO: 82424 - protein, 111 aa, Homo sapiens
MTVMSLSRDLKDDFHSDTVLSILNEQRIRGILCDVTIIVEDTKFKAHSNVLAASSLYFKNIFWSHTICISSHVLELDDLKAEVFTEILNYIYSSTVVVKRQETVTDLAAAG

SEQ ID NO: 82425 - protein, 369 aa, Homo sapiens
MAAAAAATAAAAASIRERQTVALKRMLNFNVPHIKNSTGEPVWKVLIYDRFGQDIISPLLSVKELRDMGITLHLLLHSDRDPIPDVPAVYFVMPTEENIDRMCQDLRNQLYESYYLNFISAISRSKLEDIANAALAASAVTQVAKVFDQYLNFITLEDDMFVLCNQNKELVSYRAINRPDITDTEMETVMDTIVDSLFCFFVTLGAVPIIRCSRGTAAEMVAVKLDKKLRENLRDARNSLFTGDTLGAGQFSFQRPLLVLVDRNIDLATPLHHTWTYQALVHDVLDFHLNRVNLEESSGVENSPAGARPKRKNKKSYDLTPVDKFWQKHKGSPFPEVAESVQQELESYRAQEDEVKRLKSIMKGKMKEP

SEQ ID NO: 82426 - protein, 170 aa, Homo sapiens
  MOD_RES (1)..(1): Any amino acid
XDAPSPSFLPAPGTWRHKAQEEDEEENKYELPPCEALPLSLAPAHLPGTEEDSLYLDHSGPLGPSKPSPPLPQPTMLKGAVSLPVAGKQGPIFGRREQGASSRVVPGPPKKPDEDLYLECEPDPVLALTQTLSFQVLMPSGPLPRTSVVPRPTTAPQETRNKEGNRLFPL

SEQ ID NO: 82427 - protein, 300 aa, Homo sapiens
MASPSLPGSDCSQIIDHSHVPEFEVATWIKITLILVYLIIFVMGLLGNSATIRVTQVLQKKGYLQKEVTDHMVSLACSDILVFLIGMPMEFYSIIWNPLTTSSYTLSCKLHTFLFEACSYATLLHVLTLSFERYIAICHPFRYKAVSGPCQVKLLIGFVWVTSALVALPLLFAMGTEYPLVNVPSHRGLTCNRSSTRHHEQPETSNMSICTNLSSRWTVFQSSIFGAFVVYLVVLLSVAFMCWNMMQVLMKSQKGSLAGGTRPPQLRKSESEESRTARRQTIIFLRLGFLPLWVCSLPDQ

SEQ ID NO: 82428 - protein, 81 aa, Homo sapiens
MPERLAEMLLDLWTPLIILWITLPPCIYMAPMNQSQVLMSGSPLELNSLGEEQRILNRSKRGWVWNQMFVLEEFSGPEPIL

SEQ ID NO: 82429 - protein, 226 aa, Homo sapiens
MSQSRACGGSEQIPGIDIQLNRKYHTTRKLSTTKDSPQPVEEKVGAFTKIIEAMGFTGPLKYRCQMPDTFNSWFLITLLHVWMCLVRMKQEGRSGKYMCRIIVHFMWEDVQQRGRVMGVNPYILKKNMILMTNHFYAAILGYDEGILSDDHGLAAALWRTFFNRKCEDPRHLELLVEYVRKQIQYLDSMNGEDLLLTGEVSWRPLVEKNPQSILKPHSPTYNDEGL

SEQ ID NO: 82430 - protein, 174 aa, Homo sapiens
MRHFLSKVYSFPMRKLILFLVFPVVRQTPTQHFKNQFPALHWEHELGLAFTKNRMNYTNKFLLIPESGDYFIYSQVTFRGMTSECSEIRQAGRPNKPDSITVVITKVTDSYPEPTQLLMGTKSVCEVGSNWFQPIYLGAMFSLQEGDKLMVNVSDISLVDYTKEDKTFFGAFLL

SEQ ID NO: 82431 - protein, 133 aa, Homo sapiens
MTREKHPDGKILIIGGSIANFTNVAATFKGIVRAIRDYQGPLKEHEVTIFVRRGGPNYQEGLRVMGEVGKTTGIPIHVFGTETHMTAIVGMALGHRPIPNQPPTAAHTANFLLNASGSTSTPAPSRTASFSES

SEQ ID NO: 82432 - protein, 98 aa, Homo sapiens
MGRKLDPTKEKRGPGRKARKQKGAETELVRFLPAVSDENSKRPNHCLESYQKGSLQELSRQLVRRDPSPYLMLLEARSAQHLAVMRKRRRKTLKKMVW

SEQ ID NO: 82433 - protein, 332 aa, Homo sapiens
MMAAMATARVRMGPRCAQALWRMPWLPVFLSLAAAAAAAAAEQQVPLVLWSSDRDLWAPAADTHEGHITSDLQLSTYLDPALELGPRNVLLFLQDKLSIEDFTAYGGVFGNKQDSAFSNLENALDLAPSSLVLPAVDWYAVSTLTTYLQEKLGASPLHVDLATLRELKLNASLPALLLIRLPYTASSGLMAPREVLTGNDEVIGQVLSTLKSEDVPYTAALTAVRPSRVARDVAVVAGGLGRQLLQKQPVSPVIHPPVSYNDTAPRILFWAQNFSVAYKDQWEDLTPLTFGVQELNLTGSFWNDSFASFPICQVGTLLLQVAARTQGSLGSH

SEQ ID NO: 82434 - protein, 73 aa, Homo sapiens
  MOD_RES (1)..(1): Any amino acid
XMVESCLGSPCWASPQLLRIACRVEAAGLGEVWTTEIFSQPKHTRGMRHMPAVTAAHLGTISCAQILPFPDKQ

SEQ ID NO: 82435 - protein, 1275 aa, Homo sapiens
  MOD_RES (1)..(1): Any amino acid
XTKFDEVQKSGNMIQSANDKNFDDEDSVDGNRPSSASSTSSKAPPSSRRNVGMGTTRRLGSSTLGSKSSAAKEGAGAVDEEDFIKAFDDVPVVQIYSSRDLEESINKIREILSDDKHDWEQRVNALKKIRSLLLAGAAEYDNFFQHLRLLDGAFKLSAKDLRSQVVREACITLGHLSSVLGNKFDHGAEAIMPTIFNLIPNSAKIMATSGVVAVRLIIRHTHIPRLIPVITSNCTSKSVAVRRRCFEFLDLLLQEWQTHSLERHISVLAETIKKGIHDADSEARIEARKCYWGFHSHFSREAEHLYHTLESSYQKALQSHLKNSDSIVSLPQSDRSSSSSQESLNRPLSAKRSPTGSTTSRASTVSTKSVSTTGSLQRSRSDIDVNAAASAKSKVSSSSGTTPFSSAAALPPGSYASLGRIRTRRQSSGSATNVASTPDNRGRSRAKVVSQSQRSRSANPAGAGSRSSSPGKLLGSGYGGLTGGSSRGPPVTPSSEKRSKIPRSQGCSRETSPNRIGLDRFGLGQPGRIPGSVNAMRVLSTSTDLEAAVADALLLGDSRSKKKPVRRRYEPYGMYSDDDANSDASSVCSERSYGSRNGGIPHYLRQTEDVAEVLNHCASSNWSERKEGLLGLQNLLKSQRTLSRVELKRLCEIFTRMFADPHSKIADSEAECEDKEGNLFPSEVSCTRVFSMFLETLVDFIIIHKDDLQDWLFVLLTQLLKKMGADLLGSVQAKVQKALDVTRDSFPFDQQFNILMRFIVDQTQTPNLKVKVAILKYIESLARQMDPTDFVNSSETRLAVSRIITWTTEPKSSDVRKAAQIVLISLFELNTPEFTMLLGALPKTFQDGATKLLHNHLKNSSNTSVGSPSNTIGRTPSRHTSSRTSPLTSPTNCSHGGLSPSMLDYDTENLNSEEIYSSLRGVTEAIEKFSFRSQEDLNEPIKRDGKKECDIVSRDGGAASPATEGRGGSEVEGGRTALDNKTSLLNTQPPRAFPGPRARDYNPYPYSDAINTYDKTALKEAVFDDDMEQLRDVPIDHSDLVADLLKELSNHNERVEERKGALLELLKITREDSLGVWEEHFKTILLLLLETLGDKDHSIRALALRVLREILRNQPARFKNYAELTIMKTLEAHKDSHKEVVRAAEEAASTLASSIHPEQCIKVLCPIIQTADYPINLAAIKMQTKVVERIAKESLLQLLVDIIPGLLQGYDNTESSVRKASVFCLVAIYSVIGEDLKPHLAQLTGSKMKLLNLYIKRAQTTNSNSSSSSDVSTHS

SEQ ID NO: 82436 - protein, 33 aa, Homo sapiens
  MOD_RES (1)..(1): Any amino acid
XEFTHLEFPRRVLPKELGQRMLYRDQNMTGWLG

SEQ ID NO: 82437 - protein, 378 aa, Homo sapiens
  MOD_RES (1)..(1): Any amino acid
XQAGDSAKMRRYDRGLKTLENLLASIRKGNAIDEADIPPPVAIGKGPASTPTYSPAPTQPAPRIASAPEPRVTLEGPSATAPASSPGLAKPQMPPGPCSPGPLAQLQSRQRDYKLAALHAKQQGDTTAAARHFRVAKSFDAVLEALSRGEPVDLSCLPPPPDQLPPDPPSPPSQPPTPATAPSTTEVPPPPRTLLEALEQRMERYQVAAAQAKSKGDQRKARMHERIVKQYQDAIRAHKAGRAVDVAELPVPPAEQPCGPHSPAQSPTLKNSPVGISPNSQSAPQSHIHQSPAAAGLPRGPQEAAPAGRTASQAEKRRGGCQDAPAPSQGTGAYAGGLAQWAACGHHQGAACPCQQGRLCPGPAAWPGSVSGGRPALW

SEQ ID NO: 82438 - protein, 67 aa, Homo sapiens
MWAFSELPMPLLINLIVSLLGFVATVTLIPAFRGHFIAARLCGQDLNKTSRQQMSSVRHSPTMNLWP

SEQ ID NO: 82439 - protein, 137 aa, Homo sapiens
MLALEAAQLDGPHFSCLYPDGVFYDLDSCKHSSYPDSEGAPDSLWDWTVAPPVPATPYEAFDPAAAAFSHPQAAQLCYEPPTYSPAGNLELAPSLEAPGPGLPAYPTENFASQPCAIRGGRLTVGQPCPGGLGQRVG

SEQ ID NO: 82440 - protein, 68 aa, Homo sapiens; identical to SEQ ID NO: 57933

SEQ ID NO: 82441 - protein, 797 aa, Homo sapiens
MLLFFTLGLLIHFVFFASIFDIYFTSPLVHGMTPQFTPLPPPARRLVLFVADGLRADALYELDENGNSRAPFIRNIIMHEGSWGISHTRVPTESRPGHVALIAGFYEDVSAVAKGWKENPVEFDSLFNESKYTWSWGSPDILPMFAKGASGDHVYTYSYDAKREDFGAQDATKLDTWVFDNVKDFFHHARNNQSLFSKINEEKIVFFLHLLGIDTNGHAHRPSSRDYKHNIKKVDDGVKEIVSMFNHFYGNDGKTTFIFTSDHGMTDWGSHGAGHPSETLTPLVTWGAGIKYPQRVSAQQFDDAFLKEWRLENWKRLDVNQADIAPLMTSLIGVPFPLNSVGILPVDYLNNTDLFKAESMFTNAVQILEQFKVKMTQKKEVTLPFLFTPFKFQVIQDLVVSVLTYPLSHFVGYLLAFTLGIEVLVLSFFYRYMLTAGLTAFAAWPFLTRLWTRAKMTSLSWTFFSLLLAVFPLMPVVGRKPDISLVMGAGLLVLLLSLCVVTSLMKRKDSFIKEELLVHLLQVLSTVLSMYVVYSTQSSLLRKQGLPLMNQIISWATLASSLVVPLLSSPVLFQRLFSILLSLMSTYLLLSTGYEALFPLVLSCLMFVWINIEQETLQQSGVCCKQKLTSIQFSYNTDITQFRQLYLDDIRRAFFLVFFLVTAFFGTGNIASINSFDLASVYCFLTVFSPFMMGALMMWKILIPFVLVMCAFEAVQLTTQLSSKSLFLIVLVISDIMALHFFFLVKDYGSWLDIGTSISHYVIVMSMTIFLVFLNGLAQLLTTKKLRLCGKPKSHFM

SEQ ID NO: 82442 - protein, 117 aa, Homo sapiens
MDMRVPAQLLGLLLLWLPGARCVIWMTQSPSLLSASTGDRVTISCRMSQGISSYLAWYQQKPGKAPELLIYAASTLQSGVPSRFSGSGSGTDFTLTISCLQSEDFATYYCQQYYSFP

SEQ ID NO: 82443 - protein, 64 aa, Homo sapiens
MGEKPGTRVFKKSSPNCKLTVYLGKRDFVDHLDKVDPVDTPESSMLRHTAARPRGYRKGLRRRL

SEQ ID NO: 82444 - protein, 514 aa, Homo sapiens
MAGPQPLALQLEQLLNPRPSEADPEADPEEATAARVIDRFDEGEDGEGDFLVVGSIRKLASASLLDTDKRYCGKTTSRKAWNEDHWEQTLPGSSDEEISDEEGSGDEDSEGLGLEEYDEDDLGAAEEQECGDHRESKKSRSHSAKTPGFSVQSISDFEKFTKGMDDLGSSEEEEDEESGMEEGDDAEDSQGESEEDRAGDRNSEDDGVVMTFSSVKVSEEVEKGRAVKNQIGHKALKALLRSLVGLQEELLFQYPDTRYLVDGTKPNAGSEEISSEDDELVEEKKQQRRRVPAKRKLEMEDYPSFMAKRFADFTVYRNRTLQKWHDKTKLASGKLGKGFGAFERSILTQIDHILMDKERLLRRTQTKRSVYRVLGKPEPAAQPVPESLPGEPEILPQAPANAHLKDLDEEIFDDDDFYHQLLRELIERKTSSLDPNDQVAMGRQWLAIQKLRSKIHKKVDRKASKGRKLRFHVLSKLLSFMAPIDHTTMNDDARTELYRSLFGQLHPPDEGHGD

SEQ ID NO: 82445 - protein, 127 aa, Homo sapiens
  MOD_RES (1)..(1): Any amino acid
XNKPRVRSIRFAAGHDAEGSHSHVHFDEKLHDSVVMVTQESDSSFLVKVGFLKILHRYEITFTLPPVHRLSKDVREAPVPSLHLKLLSVVPVPEDRHHGTPMLLDGVKCVGAELEYDSEHSDWHGFD

SEQ ID NO: 82446 - protein, 250 aa, Homo sapiens
MVGQPQPRDDVGSPRPRVIVGTIRPRVIVGTIRPRVIVGSARARPPPDGTPRPQLAAEESPRPRVIFGTPRARVILGSPRPRVIVSSPWPAVVVASPRPRTPVGSPWPRVVVGTPRPRVIVGSPRARVADADPASAPSQGALQGRRQDEHSGTRAEGSRPGGAAPDLRSPRSLWWGTCRWGRLASLIGSAKTPLIRITRPPLEWTSRWNDLRCWAFPSVCSFGIPLGRRGSNALHQPTIEELKPSSLSST

SEQ ID NO: 82447 - protein, 67 aa, Homo sapiens
MALSTIVSQRKQIKRKAPRGFLKRVFKRKKPQLRLEKSGDLLKSPGQTLVRVNVESLTRSMYWPQQR

SEQ ID NO: 82448 - protein, 332 aa, Homo sapiens
MSKRPSYAPPPTPAPATASSGITIPKPPKPPDKPLMPYMRYSRKVWDQVKASNPDLKLWEIGKIIGGMWRDLTDEEKQEYLNEYEAEKIEYNESMKAYHNSPAYLAYINAKSRAEAALEEESRQRQSRMEKGEPYMSIQPAEDPDDYDDGFSMKHTATARFQRNHRLISEILSESVVPDVRSVVTTARMQVLKRQVQSLMVHQRKLEAELLQIEERHQEKKRKFLESTDSFNNELKRLCGLKVEVDMEKIAAEIAQAEEQARKRQEEREKEAAEQAERSQSSIVPEEEQAANKGEEKKDDENIPMETGNPLATNAEAVPRLCTAVFNLGFSF

SEQ ID NO: 82449 - protein, 80 aa, Homo sapiens
MFQGIILFSAIVGFIYGYVAEQFGWTVYIVMAGFAFSCLLTLPPWPIYRRHPLKWLPVQESSTDDKKPGERKIKRHAKNN

SEQ ID NO: 82450 - protein, 210 aa, Homo sapiens
MVIVVGNPANTNCLTASKSAPSIPKENFSCLTRLDHNRAKAQIALKLGVTANDVKNVIIWGNHSSTQYPDVNHAKVKLQGKEVGVYEALKDDSWLKGEFVTTVQQRGAAVIKARKLSSAMSAAKAICDHVRDIWFGTPEGEFVSMGVISDGNSYGVPDDLLYSFPVVIKNKTWKFVEGLPINDFSREKMDLTAKELTEEKESAFEFLSSA

SEQ ID NO: 82451 - protein, 2753 aa, Homo sapiens
MARKKLKKFTTLEIVLSVLLLVLFIISIVLIVLLAKESLKSTAPDPGTTGTPDPGTTGTPDPGTTGTTHARTTGPPDPGTTGTTPVSAECPVVNELERINCIPDQPPTKATCDQRGCCWNPQGAVSVPWCYYSKNHSYHVEGNLVNTNAGFTARLKNLPSSPVFGSNVDNVLLTAEYQTSNRFHFKLTDQTNNRFEVPHEHVQSFSGNAAASLTYQVEISRQPFSIKVTRRSNNRVLFDSSIGPLLFADQFLQLSTRLPSTNVYGLGEHVHQQYRHDMNWKTWPIFNRDTTPNGNGTNLYGAQTFFLCLEDASGLSFGVFLMNSNAMEVVLQPAPAITYRTIGGILDFYVFLGNTPEQVVQEYLELIGRPALPSYWALGFHLSRYEYGTLDNMREVVERNRAAQLPYDVQHADIDYMDERRDFTYDSVDFKGFPEFVNELHNNGQKLVIIVDPAISNNSSSSKPYGPYDRGSDMKIWVNSSDGVTPLIGEVWPGQTVFPDYTNPNCAVWWTKEFELFHNQVEFDGIWIDMNEVSNFVDGSVSGCSTNNLNNPPFTPRILDGYLFCKTLCMDAVQHWGKQYDIHNLYGYSMAVATAEAAKTVFPNKRSFILTRSTFAGSGKFAAHWLGDNTATWDDLRWSIPGVLEFNLFGIPMVGPDICGFALDTPEELCRRWMQLGAFYPFSRNHNGQGYKDQDPASFGADSLLLNSSRHYLNIRYTLLPYLYTLFFRAHSRGDTVARPLLHEFYEDNSTWDVHQQFLWGPGLLITPVLDEGAEKVMAYVPDAVWYDYETGSQVRWRKQKVEMELPGDKIGLHLRGGYIFPTQQPNTTTLASRKNPLGLIIALDENKEAKGELFWDNGETKDTVANKVYLLCEFSVTQNRLEVNISQSTYKDPNNLAFNEIKILGTEEPSNVTVKHNGVPSQTSPTVTYDSNLKVAIITDIDLLLGEAYTVEWSIKIRDEEKIDCYPDENGASAENCTARGCIWEASNSSGVPFCYFVNDLYSVSDVQYNSHGATADISLKSSVYANAFPSTPVNPLRLDVTYHKNEMLQFKIYDPNKNRYEVPVPLNIPSMPSSTPEGQLYDVLIKKNPFGIEIRRKSTGTIIWDSQLLGFTFSDMFIRISTRLPSKYLYGFGETEHRSYRRDLEWHTWGMFSRDQPPGYKKNSYGVHPYYMGLEEDGSAHGVLLLNSNAMDVTFQPLPALTYRTTGGVLDFYVFLGPTPELVTQQYTELIGRPVMVPYWSLGFQLCRYGYQNDSEIASLYDEMVAAQIPYDVQYSDIDYMERQLDFTLSPKFAGFPALINRMKADGMRVILILDPAISGNETQPYPAFTRGVEDDVFIKYPNDGDIVWGKVWPDFPDVVVNGSLDWDSQVELYRAYVAFPDFFRNSTAKWWKREIEELYNNPQNPERSLKFDGMWIDMNEPSSFVNGAVSPGCRDASLNHPPYMPHLESRDRGLSSKTLCMESQQILPDGSLVQHYNVHNLYGWSQTRPTYEAVQEVTGQRGVVITRSTFPSSGRWAGHWLGDNTAAWDQLKKSIIGMMEFSLFGISYTGADICGFFQDAEYEMCVRWMQLGAFYPFSRNHNTIGTRRQDPVSWDAAFVNISRNVLQTRYTLLPYLYTLMQKAHTEGVTVVRPLLHEFVSDQVTWDIDSQFLLGPAFLVSPVLERNARNVTAYFPRARWYDYYTGVDINARGEWKTLPAPLDHINLHVRGGYILPWQEPALNTHLSRKNPLGLIIALDENKEAKGELFWDDGQTKDTVAKKVYLLCEFSVTQNHLEVTISQSTYKDPNNLAFNEIKILGMEEPSNVTVKHNGVPSQTSPTVTYDSNLKVAIITDINLFLGEAYTVEWSIKIRDEEKIDCYPDENGDSAENCTARGCIWEASNSSGVPFCYFVNDLYSVSDVQYNSHGATADISLKSSVHANAFPSTPVNPLRLDVTYHKNEMLQFKIYDPNNNRYEVPVPLNIPSVPSSTPEGQLYDVLIKKNPFGIEIRRKSTGTIIWDSQLLGFTFNDMFIRISTRLPSKYLYGFGETEHTSYRRDLEWHTWGMFSRDQPPGYKKNSYGVHPYYMGLEEDGSAHGVLLLNSNAMDVTFQPLPALTYRTTGGVLDFYVFLGPTPELVTQQYTELIGRPVMVPYWSLGFQLCRYGYQNDSEISSLYDEMVAAQIPYDVQYSDIDYMERQLDFTLSPKFAGFPALINRMKADGMRVILILDPAISGNETQPYPAFTRGVEDDVFIKYPNDGDIVWGKVWPDFPDVVVNGSLDWDSQVELYRAYVAFPDFFRNSTAKWWKREIEELYNNPQNPERSLKFDGMWIDMNEPSSFVNGAVSPGCRDASLNHPPYMPYLESRDRGLSSKTLCMESQQILPDGSPVQHYNVHNLYGWSQTRPTYEAVQEVTGQRGVVITRSTFPSSGRWAGHWLGDNTAAWDQLKKSIIGMMEFSLFGISYTGADICGFFQDAEYEMCVRWMQLGAFYPFSRNHNTIGTRRQDPVSWDVAFVNISRTVLQTRYTLLPYLYTLMHKAHTEGVTVVRPLLHEFVSDQVTWDIDSQFLLGPAFLVSPVLERNARNVTAYFPRARWYDYYTGVDINARGEWKTLPAPLDHINLHVRGGYILPWQEPALNTHLSRQKFMGFKIALDDEGTAGGWLFWDDGQSIDTYGKGLYYLASFSASQNTMQSHIIFNNYITGTNPLKLGYIEIWGVGSVPVTSVSISVSGMVITPSFNNDPTTQVLSIDVTDRNISLHNFTSLTWISTL

SEQ ID NO: 82452 - protein, 117 aa, Homo sapiens
  MOD_RES (1)..(1): Any amino acid
XEQAHFALFFNQGQCCCAGSRTFVQEDIYDEFVERSVARAKSRVVGNPFDSKTEQGPQVDETQFKKILGYINTGKQEGAKLLCGGGIAADRGYFIQPTVFGDVQDGMTIAKEEGQLL

SEQ ID NO: 82453 - protein, 165 aa, Homo sapiens
MLLSIGMLMLSATQVYTILTVQLFAFLNLLPVEADILAYNFENASQTFDDLPARFGYRLPAEGLKGFLINSKPENACEPIVPPPVKDNSSGTFIVLIRRLDCNFDIKVLNAQRAGYKAAIVHNVDSDDLISMGSNDIEVLKKIDIPSVFIGESSANSLKDEFTYE

SEQ ID NO: 82454 - protein, 227 aa, Homo sapiens
MPGTVATLRFQLLPPEPDDAFWGAPCEQPLERRYQALPALVCIMCCLFGVVYCFFGYRCFKAVLFLTGLLFGSVVIFLLCYRERVLETQLSAGASAGIALGIGLLCGLVAMLVRSVGLFLVGLLLGLLLAAAALLGSAPYYQPGSVWGPLGLLLGGGLLCALLTLRWPRPLTTLATAVTGAALIATAADYFAELLLLGRYVVERLRAAPVPPLCWRSWALLALWPLL

SEQ ID NO: 82455 - protein, 174 aa, Homo sapiens
MASILRSPQALQLTLALIKPDAVAHPLILEAVHQQILSNKFLIVRMRELLWRKEDCQRFYREHEGRFFYQRLVEFMASGPIRAYILAHKDAIQLWRTLMGPTRVFRARHVAPDSIRGSFGLTDTRNTTHGSDSVVSASREIAAFFPDFSEQRWYEEEEPQLRCGPVCYSPEGGV

SEQ ID NO: 82456 - protein, 680 aa, Homo sapiens
MPSEGRCWETLKALRSSDKGRLCYYRDWLLRREDVLEECMSLPKLSSYSGWVVEHVLPHMQENQPLSETSPSSTSASALDQPSFVPKSPDASSAFSPASPATPNGTKGKDESQHTESMVLQSSRGIKVEGCVRMYELVHRMKGTEGLRLWQEEQERKVQALSEMASEQLKRFDEWKELKQHKEFQDLREVMEKSSREALGHQEKLKAEHRHRAKILNLKLREAEQQRVKQAEQERLRKEEGQIRLRALYALQEEMLQLSQQLDASEQHKALLKVDLAAFQTRGNQLCSLISGIIRASSESSYPTAESQAEAERALREMRDLLMNLGQEITRACEDKRRQDEEEAQVKLQEAQMQQGPEAHKEPPAPSQGPGGKQNEDLQVKVQDITMQWYQQLQDASMQCVLTFEGLTNSKDSQAKKIKMDLQKAATIPVSQISTIAGSKLKEIFDKIHSLLSGKPVQSGGRSVSVTLNPQGLDFVQYKLAEKFVKQGEEEVASHHEAAFPIAVVASGIWELHPRVGDLILAHLHKKCPYSVPFYPTFKEGMALEDYQRMLGYQVKDSKVEQQDNFLKRMSGMIRLYAAIIQLRWPYGNRQEIHPHGLNHGWRWLAQILNMEPLSDVTATLLFDFLEVCGNALMKQYQVQFWKMLILIKEDYFPRIEAITSSGQMGSFIRLKQFLEVRCP

SEQ ID NO: 82457 - protein, 63 aa, Homo sapiens
MSRKQNQKDSSGFIFDLQSNTVLAQGGAFENMKEKAGVQWRDLSSLHTSASRVQVILLPQPPV

SEQ ID NO: 82458 - protein, 49 aa, Homo sapiens
MALPPGPAALRHTLLLLPALLSSAQYQPCLSPSQRPPAVFQVGGSWSHK

SEQ ID NO: 82459 - protein, 56 aa, Homo sapiens
  MOD_RES (1)..(1): Any amino acid
XLAYGSVITVKNLRMAIGYLHSHRHLYPEGIGARQQQTHKDCSPTTHLHRVHTRAS

SEQ ID NO: 82460 - protein, 502 aa, Homo sapiens
  MOD_RES (1)..(1): Any amino acid
XFFDLRKEFKKCCPGSPDIDKLDVATMTEYLNFEKSSSVSRYGASQVEDMGNIILAMISEPYNHRFSDPERVNYKFESGTCSKMELIDDNTVVRARGLPWQSSDQDIARFFKGLNIAKGGAALCLNAQGRRNGEALVRFVSEEHRDLALQRHKHHMGTRYIEVYKATGEDFLKIAGGTSNEVAQFLSKENQVIVRMRGLPFTATAEEVVAFFGQHCPITGGKEGILFVTYPDGRPTGDAFVLFACEEYAQNALRKHKDLLGKRYIELFRSTAAEVQQVLNRFSSAPLIPLPTPPIIPVLPQQFVPPTNVRDCIRLRGLPYAATIEDILDFLGEFATDIRTHGVHMVLNHQGRPSGDAFIQMKSADRAFMAAQKCHKKNMKDRYVEVFQCSAEEMNFVLMGGTLNRNGLSPPPCKLPCLSPPSYTFPAPAAVIPTEAAIYQPSVILNPRALQPSTAYYPAGTQLFMNYTAYYPSMQPRMDLYTQMTRPGLYPKNGFVFKGPSS

SEQ ID NO: 82461 - protein, 76 aa, Homo sapiens
MKRNHRVEPLNIDDCAPESPTPPPPPPPVGWGTPKVTRLPKLEPLGETHHNDFYRKPLPPLAVPQRPNSDAHDVIS

SEQ ID NO: 82462 - protein, 117 aa, Homo sapiens
MLETYNHLVSLEIPSSKPKLIAQLERGEAPWREERKCPLDLCPVSLCCLGWSAVARSRLTATSTSWFQAVLCLSLPISWDYRWSLALLPGWNTVVLYRLTATSASWVQAIPLPQPPE

SEQ ID NO: 82463 - protein, 157 aa, Homo sapiens
MEASLGIQMDEPMAFSPQRDRFQAEGSLKKNEQNFKLAGVKKDIEKLYEAVPQLSNVFKIEDKIGEGTFSSVYLATAQLQVGPEEKIALKHLIPTSHPIRIAAELQCLTVAGGQDNVMGVKYCFRKNDHVVIAMPYLEHESFLDILNSLSFQEVREY

SEQ ID NO: 82464 - protein, 820 aa, Homo sapiens
MLKGGSKGPALLALRSGTDPRAQMSDDPAEGTLDPCSAPGLTDEKVKAYLSLHPQVLDEFVSESVSAETVEKWLKRKNNKSEDESAPKEVSRYQDTNMQGVVYELNSYIEQRLDTGGDNQLLLYELSSIIKIATKADGFALYFLGECNNSLCIFTPPGIKEGKPRLIPAGPITQGTTVSAYVAKSRKTLLVEDILGDERFPRGTGLESGTRIQSVLCLPIVTAIGDLIGILELYRHWGKEAFCLSHQEVATANLAWASVAIHQVQVCRGLAKQTELNDFLLDVSKTYFDNIVAIDSLLEHIMIYAKNLVNADRCALFQVDHKNKELYSDLFDIGEEKEGKPVFKKTKEIRFSIEKGIAGQVARTGEVLNIPDAYADPRFNREVDLYTGYTTRNILCMPIVSRGSVIGVVQMVNKISGSAFSKTDENNFKMFAVFCALALHCANMYHRIRHSECIYRVTMEKLSYHSICTSEEWQGLMQFTLPVRLCKEIELFHFDIGPFENMWPGIFVYMVHRSCGTSCFELEKLCRFIMSVKKNYRRVPYHNWKHAVTVAHCMYAILQNNHTLFTDLERKGLLIACLCHDLDHRGFSNSYLQKFDHPLAALYSTSTMEQHHFSQTVSILQLEGHNIFSTLSSSEYEQVLEIIRKAIIATDLALYFGNRKQLEEMYQTGSLNLNNQSHRDRVIGLMMTACDLCSVTKLWPVTKLTANDIYAEFWAEGDEMKKLGIQPIPMMDRDKKDEVPQGQLGFYNAVAIPCYTTLTQILPPTEPLLKACSHHRNLPGHVVLVTMSEGPTQCRCAELCHRTVWLVFKTKSRNPLFSFS

SEQ ID NO: 82465 - protein, 39 aa, Homo sapiens
MYQNEDYLQNGLPTETTVLGFGITGSLSIISGKQSTKPF

SEQ ID NO: 82466 - protein, 933 aa, Homo sapiens
MADPAECSIKVMCRFRPLNEAEILRGDKFIPKFKGDETVVIGQGKPYVFDRVLPPNTTQEQVYNACAKQIVKDVLEGYNGTIFAYGQTSSGKTHTMEGKLHDPQLMGIIPRIAHDIFDHIYSMDENLEFHIKVSYFEIYLDKIRDLLDVSKTNLAVHEDKNRVPYVKGCTERFVSSPEEVMDVIDEGKANRHVAVTNMNEHSSRSHSIFLINIKQENVETEKKLSGKLYLVDLAGSEKVSKTGAEGAVLDEAKNINKSLSALGNVISALAEGTKTHVPYRDSKMTRILQDSLGGNCRTTIVICCSPSVFNEAETKSTLMFGQRAKTIKNTVSVNLELTAEEWKKKYEKEKEKNKTLKNVIQHLEMELNRWRNGEAVPEDEQISAKDQKNLEPCDNTPIIDNIAPVVAGISTEEKEKYDEEISSLYRQLDDKDDEINQQSQLAEKLKQQMLDQDELLASTRRDYEKIQEELTRLQIENEAAKDEVKEVLQALEELAVNYDQKSQEVEDKTRANEQLTDELAQKTTTLTTTQRELSQLQELSNHQKKRATEILNLLLKDLGEIGGIIGTNDVKTLADVNGVIEEEFTMARLYISKMKSEVKSLVNRSKQLESAQMDSNRKMNASERELAACQLLISQHEAKIKSLTDYMQNMEQKRRQLEESQDSLSEELAKLRAQEKMHEVSFQDKEKEHLTRLQDAEEMKKALEQQMESHREAHQKQLSRLRDEIEEKQKIIDEIRDLNQKLQLEQEKLSSDYNKLKIEDQEREMKLEKLLLLNDKREQAREDLKGLEETVSVELDNDDGGGSAAQKQKISFLENNLEQLTKVHKQLVRDNADLRCELPKLEKRLRATAERVKALESALKEAKENAMRDRKRYQQEVDRIKEAVRAKNMARRAHSAQIAKPIRPGHYPASSPTAVHAIRGGGGSSSNSTHYQK

SEQ ID NO: 82467 - protein, 100 aa, Homo sapiens
MESTFVTQAGMQWGDLGLLQPLPPRFKGFSCLSLPSSPLHSSPLDLHQLYSVHLDGFLFCRVRYSQLHGWNEQLRRVFGNCLPPFPPKYYLAMTTAMADE

SEQ ID NO: 82468 - protein, 863 aa, Homo sapiens
MDLNSASTVVLQVLTQATSQDTAVLKPAEEQLKQWETQPGFYSVLLNIFTNHTLDINVRWLAVLYFKHGIDRYWRRVAPHALSEEEKTTLRAGLITNFNEPINQIATQIAVLIAKVARLDCPRQWPELIPTLIESVKVQDDLRQHRALLTFYHVTKTLASKRLAADRKLFYDLASGIYNFACSLWNHHTDTFLQEVSSGNEAAILSSLERTLLSLKVLRKLTVNGFVEPHKNMEVMGFLHGIFERLKQFLECSRSIGTDNVCRDRLEKTIILFTKVLLDFLDQHPFSFTPLIQRSLEFSVSYVFTEVGEGVTFERFIVQCMNLIKMIVKNYAYKPSKNFEDSSPETLEAHKIKMAFFTYPTLTEICRRLVSHYFLLTEEELTMWEEDPEGFTVEETGGDSWKYSLRPCTEVLFIDIFHEYNQTLTPVLLEMMQTLQGPTNVEDMNALLIKDAVYNAVGLAAYELFDSVDFDQWFKNQLLPELQVIHNRYKPLRRRVIWLIGQWISVKFKSDLRPMLYEAICNLLQDQDLVVRIETATTLKLTVDDFEFRTDQFLPYLETMFTLLFQLLQQVTECDTKMHVLHVLSCVIERVNMQIRPYVGCLVQYLPLLWKQSEEHNMLRCAILTTLIHLVQGLGADSKNLYPFLLPVIQLSTDVSQPPHVYLLEDGLELWLVTLENSPCITPELLRIFQNMSPLLELSSENLRTCFKIINGYIFLSSTEFLQTYAVGLCQSFCELLKEITTEGQVQVLKVVENALKVNPILGPQMFQPILPYVFKGIIEGERYPVVMSTYLGVMGRVLLQNTSFFSSLLNEMAHKFNQEMDQLLGNMIEMWVDRMDNITQPERRKLSALALLSLLPSDNSQF

SEQ ID NO: 82469 - protein, 407 aa, Homo sapiens
MPRGQKSKLRARGKRRETHDQPQGLTGPQATAEKQEESRSSSSSSAVCQGARRRSSGSSVPQESQGASPTGYPDAGASCSKYDVAAMGQDEKSPSTSRDASVSQESQGASPIGPPDAGISCSKSDEAAKGQNEKSPSTSRDASVPQESQGASPTGSPDADVSGSKSDVAAKGQDEESLSSSKRAAFFTTTDGDPIKRKANKMVQFLQKKFEKKEPILKADMLKRLRRQYKPCFPEILKRTSEHLTVFFGVELKETDSSGESYTLVSKLGLSNEGSLSGDNALPKSGLLMSILGLIFMRGNRATEEEVWKFLGLLGIYDGILHSIYGDARKIITEDLVQDKYVVYRQVCNSDPPCYEFLWGPRAYAETTKMRVLRVLAEINNTSPGLYPHLYEDALTDEVERALRLRA

SEQ ID NO: 82470 - protein, 461 aa, Homo sapiens
MPVFNWVALKPNQINGTVFNEIDDERILEDLNVDEFEEIFKTKAQGPAIDLSSSKQKIPQKGSNKVTLLEANRAKNLAITLRKAGKTADEICKAIHVFDLKTLPVDFVECLMRFLPTENEVKVLRLYERERKPLENLSDEDRFMMQFSKIERLMQKMTIMAFIGNFAESIQMLTPQLHAIIAASVSIKSSQKLKKILEIILALGNYMNSSKRGAVYGFKLQSLDLLLDTKSTDRKQTLLHYISNVVKEKYHQVSLFYNELHYVEKAAAVSLENVLLDVKELQRGMDLTKREYTMHDHNTLLKEFILNNEGKLKKLQDDAKIAQDAFDDVVKYFGENPKTTPPSVFFPVFVRFVKAYKQAEEENELRKKQEQALMEKLLEQEALMEQQDPKSPSHKSKRQQQELIAELRRRQVKDNRHVYEGKDGAIEDIITVLKTVPFTARTAKRGSRFFCEPVLTEEYHY

SEQ ID NO: 82471 - protein, 232 aa, Homo sapiens
QRLRKAQGQLDSQPEDQRERLLQGVQEMREQLDVAQRAYEDLEFQQLERESRQEEEDRDSPGPQVPDPKVQELQASMAQHRHRIRVLEEQLKSLGEQMAAESRGLSRKKEEALQALSQERSRLLELNCLQGTPGGDFSEPNPALTKLLFTQKTDRQLLVLQDAVAHSAATPTSSCLFSVHSSLQAPPTPPHPPGPRILDLRQHLEGWGHNPENCPHVQVSGCCCRGPLVKMG

SEQ ID NO: 82472 - protein, 89 aa, Homo sapiens
MRHSKRTHCPDWDSRESWGHESYRGSHKRKRRSHSSTQENRHCKPHHQFKESDWTCVDIKTNALTLIRLGYLKGYSEIFTGHSVDILKN

SEQ ID NO: 82473 - protein, 165 aa, Homo sapiens
MCHLVPYVLKSCAEFIETHGIVDGIYRLSGVTSNIQRLRQEFGSDQCPDLTREVYLQDIHCVGSLCKLYFRELPNPLLTYELYEKFTEAVSHCPEEGQLARIQNVIQELPPSHYRTLEYLIRHLAHIASFSSKTNMHARNLALVWAPNLLRSKEIEATGCNGDAA

SEQ ID NO: 82474 - protein, 89 aa, Homo sapiens
MKYTKQNFMMSVLGIIIYVTDLIVDIWVSVRFFHEGQYVFSALALSFMLFGTLVAQCFSYSWFKADLKKAGQESQHCFLLLHCLQGGVF

SEQ ID NO: 82475 - protein, 119 aa, Homo sapiens
MSKISEAVKRARAAFSSGRTRPLQFRIQQLEALQRLIQEQEQELVGALAADLHKNEWNAYYEEVVYVLEEIEYMIQKLPEWAADEPVEKTPQTQQDELYIHSEPLGVVLVIGTWNYPFN

SEQ ID NO: 82476 - protein, 211 aa, Homo sapiens
  MOD_RES (1)..(1): Any amino acid
XWVGSLSMGMIFFCCPIVSVFTDLFGCRKTAVVGAAVGFVGLMSSSFVSSIEPLYLTYGIIFACGCSFAYQPSLVILGHYFKKRLGLVNGIVTAGSSVFTILLPLLLRVLIDSVGLFYTLRVLCIFMFVLFLAGFTYRPLATSTKDKESGGSGSSLFSRKKFSPPKKIFNFAIFKVTAYAVWAVGIPLALFGYFVPYVHLAKFSFVILKYE

SEQ ID NO: 82477 - protein, 154 aa, Homo sapiens
MAASMFYGRLVAVATLRNHRPRTAQRAAAQGPVLIGSSHGGVNIEDVAAESPEAIIKEPIDIEEGIKKEQALQLAQKMGFPPNIVESAAENMVKLYSLFLKYDATMIEINPMVEDSDGAVLCMDAKINFDSNSAYRQKKIFDLQDWTQEDERDK

SEQ ID NO: 82478 - protein, 80 aa, Homo sapiens
VITDRQTGKSRGYGFVTMADRAAAERACKDPNPIIDGRKANVNLAYLGAKPRIMQPGFAFGVQQLHPALIQRPFGDKQAG

SEQ ID NO: 82479 - protein, 717 aa, Homo sapiens
MVTSLNEDNESVTVEWIENGDTKGKEIDLESIFSLNPDLVPDEEIEPSPETPPPPASSAKVNKIVKNRRTVASIKNDPPSRDNRVVGSARARPSQFPEQSSSAQQNGSVSDISPVQAAKKEFGPPSRRKSNCVKEVEKLQEKREKRRLQQQELREKRAQDVDATNPNYEIMCMIRDFRGSLDYRPLTTADPIDEHRICVCVRKRPLNKKETQMKDLDVITIPSKDVVMVHEPKQKVDLTRYLENQTFRFDYAFDDSAPNEMVYRFTARPLVETIFERGMATCFAYGQTGSGKTHTMGGDFSGKNQDCSKGIYALAARDVFLMLKKPNYKKLELQVYATFFEIYSGKVFDLLNRKTKLRVLEDGKQQVQVVGLQEREVKCVEDVLKLIDIGNSCRTSGQTSANAHSSRSHAVFQIILRRKGKLHGKFSLIDLAGNERGADTSSADRQTRLEGAEINKSLLALKECIRALGRNKPHTPFRASKLTQVLRDSFIGENSRTCMIATISPGMASCENTLNTLRYANRVKEFGISPSDIPFSQGSGSRPDLSPSYEYDDFSPSVTRVKELTVDPTAAGDVRPIMHHPPNQIDDLETQWGVGSSPQRDDLKLLCEQNEEEVSPQLFTFHEAVSQMVEMEEQVVEDHRAVFQESIRWLEDEKALLEMTEEVDYDVDSYATQLEAILEQKIDILTELRDKVKSFRAALQEEEQASKQINPKRPRAL

SEQ ID NO: 82480 - protein, 74 aa, Homo sapiens
MWASCCGLLNEVMGTGAVRGQQSAFAGATGPFRFTPNPEFSTYPPAATEGPNIVCKACGLSFSVFRKKHVCCDC

SEQ ID NO: 82481 - protein, 199 aa, Homo sapiens
MTECTSLQFVSPFAFEAMQKVDVVCLASLSDPELRLLLPCLVRMALCAPADQSQSWAQDKKLILRLLSGVEAVNSIVALLSVDFHALEQDASKEQQLRHKLGGGSGESILVSQLQHGLTLEFEHSDSPRRLRLVLSELLAIMNKVSESNGEFFFKSSELFESPVYLEEAADVLCILQAETESCSVAQAGVQWQDHSPLA

SEQ ID NO: 82482 - protein, 131 aa, Homo sapiens
  MOD_RES (1)..(1): Any amino acid
XSSPCWPPGPVLAEPSGGWDRGYRDRSYDPPCPGHWTPEAPGSGTTCPGLPRASDPDEAGGPEGSEAVQSGTPEEPEPELEAEASKEAEPEPEPEPELEPEAEAEPEPELEPEPDPEPEPDFEERDESEDS

SEQ ID NO: 82483 - protein, 789 aa, Homo sapiens
MSTRTPLPTVNERDTENHTSHGDGRQEVTSRTSRSGARCRNSIASCADEQPHIGNYRLLKTIGKGNFAKVKLARHILTGREVAIKIIDKTQLNPTSLQKLFREVRIMKILNHPNIVKLFEVIETEKTLYLIMEYASGGEVFDYLVAHGRMKEKEARSKFRQIVSAVQYCHQKRIVHRDLKAENLLLDADMNIKIADFGFSNEFTVGGKLDTFCGSPPYAAPELFQGKKYDGPEVDVWSLGVILYTLVSGSLPFDGQNLKELRERVLRGKYRIPFYMSTDCENLLKRFLVLNPIKRGTLEQIMKDRWINAGHEEDELKPFVEPELDISDQKRIDIMVGMGYSQEEIQESLSKMKYDEITATYLLLGRKSSEVRPSSDLNNSTGQSPHHKVQRSVSSSQKQRRYSDHAGPAIPSVVAYPKRSQTSTADSDLKEDGISSRKSSGSAVGGKGIAPASPMLGNASNPNKADIPERKKSSTVPSSNTASGGMTRRNTYVCSERTTADRHSVIQNGKENSLTEMFAYAASPASVCTSTCRLRHQKSMSMSASGHPKMMLPPIDSEGDNFKAITIPDQRTPVASTHSISSAATPDRIRFPRGTASRSTFHGQPRERRTATYNGPPASPSLSHEATPLSQTRSRGSTNLFSKLTSKLTRRNMSFRFIKRLPTEYERNGRYEGSSRNVSAEQKDENKEAKPRSLRFTWSMKTTSSMDPGDMMREIRKVLDANNCDYEQRERFLLFCVHGDGHAENLVQWEMEVCKLPRLSLNGVRFKRISGTSIAFKNIASKIANELKL

SEQ ID NO: 82484 - protein, 71 aa, Homo sapiens
MSPSMLTGNSPRGCRLPSISSTTCGRQLEKVPEKRDSGMTEVERTYKSTTKAESLINYLTGSHSSGEVYYL

SEQ ID NO: 82485 - protein, 333 aa, Homo sapiens
MSPWSWFLLQTLCLLPTGAASRRGAPGTANCELKPQQSELNSFLWTIKRDPPSYFFGTIHVPYTRVWDFIPDNSKEAFLQSSIVYFELDLTDPYTISALTSCQMLPQGENLQDVLPRDIYCRLKRHLEYVKLMMPLWMTPDQRGKGLYADYLFNAIAGNWERKRPVWVMLMVNSLTEVDIKSRGVPVLDLFLAQEAERLRKQTGAVEKVEEQCHPLNGLNFSQVIFALNQTLLQQESLRAGSLQIPYTTEDLIKHYNCGDLSSVILSHDSSQVPNFINATLPPQERITAQEIDSYLRRELIYKRNERIGKRVKALLEEFPDKGFFFAFGAASQ

SEQ ID NO: 82486 - protein, 347 aa, Homo sapiens
MASESGKLWGGRFVGAVDPIMEKFNASIAYDRHLWEVDVQGSKAYSRGLEKAGLLTKAEMDQILHGLDKVAEEWAQGTFKLNSNDEDIHTANERRLKELIGATAGKLHTGRSRNDQVVTDLRLWMRQTCSTLSGLLWELIRTMVDRAEAERDVLFPGYTHLQRAQPIRWSHWILSGAIAGNPLGVDRELLRAELNFGAITLNSMDATSERDFVAEFLFWASLCMTHLSRMAEDLILYCTKEFSFVQLSDAYSTGSSLMPQKKNPDSLELIRSKAGRVFGRCAGLLMTLKGLPSTYNKDLQEDKEAVFEVSDTMSAVLQVATGVISTLQIHQENMGQALSPDMLATDL

SEQ ID NO: 82487 - protein, 402 aa, Homo sapiens
MDSHLVEKLGQHLLPWMDRLSLEHLNPSIYVGLRLSSLQAGTKEDLYLHSLKLGYQQCLLGSAFSEDDGDCQGKPSMGQLALYLLALRANCEFVRGHKGDRLVSQLKWFLEDEKRAIGHDHKGHPHTSYYQYGLGILALCLHQKRVHDSVVDKLLYAVEPFHQGHHSVDTAAMAGLAFTCLKRSNFNPGRRQRITMAIRTVREEILKAQTPEGHFGNVYSTPLALQFLMTSPMRGAELGTACLKARVALLASLQDGAFQNALMISQLLPVLNHKTYIDLIFPDCLAPRVMLEPAAETIPQTQEIISVTLQVLSLLPPYRQSISVLAGSTVEDVLKKAHELGGFTYETQASLSGPYLTSVMGKAAGEREFWQLLRDPNTPLLQGIADYRPKDGETIELRLVSW

SEQ ID NO: 82488 - protein, 118 aa, Homo sapiens
MQAVRNAGSRFLRSWTWPQTAGRVVARTPAGTICTGARQLQDAAAKQKVEQNAAPSHTKFSIYPPIPGEESSLRWAGKKFEEIPIAHIKASHNKGISECQEGHRHRSTDSRHSRSGES

SEQ ID NO: 82489 - protein, 145 aa, Homo sapiens
MWDVAEELKAMLVFAEHRYYGESLPFGDNSFKDSRHLNFLTSEQALADFAELIKHLKRTIPGAENQPVIAIGGSYGGMLAAWFRMKYPHMVVGALAASAPIWQFEDLVPCGVFMKIVTTDFRKSGPHCSESIHRSWDAINRLSNT

SEQ ID NO: 82490 - protein, 242 aa, Homo sapiens
MFPQELAQKIKGYQEQIASLNSKCKMLTMKAKHATMLLTVTEVEGLAEGTEDLDGELLPTPSAHPSVVMDIAYYQALSAERLQTDAAKIHPSTSASQEFYEPGLEPSATAKLGDLQRSWETLKNVISEKQRTLYEALERQQKYQDSLQSISTKMEAIELKLSESPEPGRSPESQMAEHQALMDEILMLQDEINELQSSLAEELVSESCEADPAEQLALQSTLTVLAERMSTIRMKASGKRQL

SEQ ID NO: 82491 - protein, 108 aa, Homo sapiens
MASLMSAFTLVQQEIYQWCGSSCNKYERLKANQVATGIRYNERKGRSELIVVEEGSEPSELIKVLGEKPELPDGGDDDDIIADISNRKMAKLYMVSDASGSMRVTVVA

SEQ ID NO: 82492 - protein, 128 aa, Homo sapiens
MVAMAEAEAGVAVEVRGLPPAVPDELLTLYFENRRRSGGGPVLSWQRLGCGGVLTFREPADAERVLAQADHELHGAQLSLRPAPPRAPARLLLQGLPPGTTPQRLEQHVQALLRASGLPVQPCCALAS

SEQ ID NO: 82493 - protein, 257 aa, Homo sapiens
VLDWHRLIPLTWACMARQTPHLGEQRRTTASLLRKLTTASNGGVIEELSCVRSNNYVQEPECRRNLVQCLLEKQGTPVVQGSLELERVMSSLLDMGFSNAHINELLSVRRGASLQQLLDIISEFILLGLNPEPVCVVLKKSPQLLKLPIMQMRKRSSYLQKLGLGEGKLKRVLYCCPEIFTMRQQDINDTVRLLKEKCLFTVQQVTKILHSCPSVLREDLGQLEYKFQKNTTSSFCPFSLLPLFPPTPLFPAPCFSG

SEQ ID NO: 82494 - protein, 157 aa, Homo sapiens
MAKLRQKNPRAVRQAEEVRGLEHLHMDVAVNFSQGALLSPHLHNVCAEAVDAIYTRQEDVRFWLEQGVDSSVFEALPKASEQAELPRCRQVGDHGKPCVCRYGLSLAWYPCMLKYCHSRDRPTPYKCGIRSCQKSYSFDFYVPQRQLCLWDEDPYPG

SEQ ID NO: 82495 - protein, 131 aa, Homo sapiens
NDSGPRLVSIAGTRPSVRNGQLLVSTGLPALDQLLGGGLAVGTVLLIEEDKYNIYSPLLFKYFLAEGIVNGHTLLVASAKEDPANILQIKKELFLVSLLIRNFQHHYLMINVKRNLMKMYTIIKHQNLILR

SEQ ID NO: 82496 - protein, 626 aa, Homo sapiens
MKIFCSRANPTTGSVEWLEEDEHYDYHQEIARSSYADMLHDKDRNVKYYQGIRAAVSRVKDRGQKALVLDIGTGTGLLSMMAVTAGADFCYAIEVFKPMADAAVKIVEKNGFSDKIKVINKHSTEVTVGPEGDMPCRANILVTELFDTELIGEGALPSYEHAHRHLVEENCEAVPHRATVYAQLVESGRMWSWNKLFPIHVQTSLGEQVIVPPVDVESCPGAPSVCDIQLNQVSPADFTVLSDVLPMFSIDFSKQVSSSAACHSRRFEPLTSGRAQVVLSWWDIEMDPEGKIKCTMAPFWAHSDPEEMQWRDHWMQCVYFLPQEEPVVQGSALYLVAHHDDYCVWYSLQRTSPEKNERVRQMRPVCDCQAHLLWNRPRFGEINDQDRTDRYVQALRTVLKPDSVCLCVSDGSLLSVLAHHLGVEQVFTVESSAASHKLLRKIFKANHLEDKINIIEKRPELLTNEDLQGRKVSLLLGEPFFTTSLLPWHNLYFWYVRTAVDQHLGPGAMVMPQAASLHAVVVEFRDLWRIRSPCGDCEGFDVHIMDDMIKRALDFRESREAEPHPLWEYPCRSLSEPWQILTFDFQQPVPLQPLCAEGTVELRSSGRWELTSCGHRCTIFLNPPGS

SEQ ID NO: 82497 - protein, 98 aa, Homo sapiens
MVDYYEVLGVQRHASPEDIKKAYRKLALKWHPDKNPENKEEAERKFKQVAEAYEVLSDAKKRDIYDKYGKEGLNGGGGGGSHFDSPFEFGFTFRNPDD

SEQ ID NO: 82498 - protein, 108 aa, Homo sapiens
MASGRPEELWEAVVGAAERFRARTGTELVLLTAAPPPPPRPGPCAYAAHGRGALAEAARRCLHDIALAHRAATAARPPAPPPAPQPPSPTPSPPRPTLAREDNEEDED

SEQ ID NO: 82499 - protein, 89 aa, Homo sapiens
MAALTTLFKYIDENQDRYIKVLSVKQYERVSLFPQYKQFLKSLTQSTRDGSVLFPISLFNCSSHRGNSQNGWLSRVCLRGRRREAKSGG

SEQ ID NO: 82500 - protein, 337 aa, Homo sapiens
  MOD_RES (1)..(1): Any amino acid
XIPQRMVDGWNAFFFDKTEELKKRLPSLGKNTESLGELWLGLLRFYTEEFDFKEYVISIRQKKLLTTFEKQWTSKCIAIEDPFDLNHNLGAGVSRKMTNFIMKAFINGRKLFGTPFYPLIGREAEYFFDSRVLTDGELAPNDRCCRVCGKIGHYMKDCPKRKRLKKKDSEEEKEGNEEEKDSRDVLDPRDLHDTRDFRDPRDLRCFICGDAGHVRRECPEVKLARQRNSSVAAAQLVRNLVNAQQVAGSAQQQGDQSIRTRQSSECSESPSYSPQPQPFPQNSSQSAAITQPSSQPGSQPKLGPPQQGAQPPHQVQMPLYNFPQSPPAQYSPMHNMG

SEQ ID NO: 82501 - protein, 77 aa, Homo sapiens
MEKKCTLYFLVLLPFFMILVTAELEESPEDSIQLGVTRNKIMTAQYECYQKIMQDPIQQAEGVYCNRTWDGWLCWND

SEQ ID NO: 82502 - protein, 354 aa, Homo sapiens
MALSLPLGPRLGSEPLNHPPGAPREADIVGCTVCPASGEESTSPEQAQTLGQDSLGPPEHFQGGPRGNEPAAHPPRWSTPSSYEDPAGGKHCEHPISGLEVLEAEQNSLHLCLLGLGRRLQDLEQGLGHWALAQSGMVQLQALQVDLRGAAERVEALLAFGEGLAQRSEPRAWAALEQILRALGAYRDSIFRRLWQLQAQLVSYSLVFEEANTLDQDLEVEGDSDWPGPGSRHLSLPTGHAGVWPRPPETLSTSPKTLPAPEASGQEEASISSSPGCEAGGESRGPRSCIQAASDLPPYPLPPLPPPGGCHVSPARVRRPLLLSCPNTQDTLPGAQLCQWSSPSLMCVINGHCQ

SEQ ID NO: 82503 - protein, 79 aa, Homo sapiens
MVKRKETKEWCPDWEFGRETKNLSPKENIYEIRSPQQEKARVIREIRCQVERQQGHQEGHFRPAVIPFTSMQCTAHREY

SEQ ID NO: 82504 - protein, 183 aa, Homo sapiens
  MOD_RES (1)..(1): Any amino acid
XDTLVNWDFVEQVRICSHEVPSCPICLYPPTAAKITRCGHIFCWACILHYLSLSEKTWSKCPICYSSVHKKDLKSVVATESHQYVVGDTITMQLMKREKGVLVALPKSKWMNVDHPIHLGDEQHSQYSKLLLASKEQVLHRVVLEEKVALEQQLAEEKHTPESCFIEAAIQELKGVLEYLSAF

SEQ ID NO: 82505 - protein, 66 aa, Homo sapiens
MTTSAPRRTLPARSGAPTSASKQFSGNPTPSGWRIKGQCVATWPSSSASSPLQCRNMLALYLGRKT

SEQ ID NO: 82506 - protein, 203 aa, Homo sapiens
MLQQDSNDDTEDVSLFDAEEETTNRPRKAKIRHPVASFFHLFFRVSAIIVYLLCGLLSSSFITCMVTIILLLSCDFWAVKNVTGRLMVGLRWWNHIDEDGKSHWVFESRKESSQENKTVSEAESRIFWLGLIACPVLWVIFAFSALFSFRVKWLAVVIMGVVLQGANLYGYIRCKVRSRKHLTSMATSYFGKQFLRQVSVFWM

SEQ ID NO: 82507 - protein, 756 aa, Homo sapiens
MEPWSSRWKTKRWLWDFTVTTLALTFLFQAREVRGAAPVDVLKALDFHNSPEGISKTTGFCTNRKNSKGSDTAYRVSKQAQLSAPTKQLFPGGTFPEDFSILFTVKPKKGIQSFLLSIYNEHGIQQIGVEVGRSPVFLFEDHTGKPAPEDYPLFRTVNIADGKWHRVAISVEKKTVTMIVDCKKKTTKPLDRSERAIVDTNGITVFGTRILDEEVFEGDIQQFLITGDPKAAYDYCEHYSPDCDSSAPKAAQAQEPQIDEYAPEDIIEYDYEYGEAEYKEAESVTEGPTVTEETIAQTEANIVDDFQEYNYGTMESYQTEAPRHVSGTNEPNPVEEIFTEEYLTGEDYDSQRKNSEDTLYENKEIDGRDSDLLVDGDLGEYDFYEYKEYEDKPTSPPNEEFGPGVPAETDITETSINGHGAYGEKGQKGEPAVVEPGMLVEGPPGPAGPAGIMGPPGLQGPTGPPGDPGDRGPPGRPGLPGADGLPGPPGTMLMLPFRYGGDGSKGPTISAQEAQAQAILQQARIALRGPPGPMGLTGRPGPVGGPGSSGAKGESGDPGPQGPRGVQGPPGPTGKPGKRGRPGADGGRGMPGEPGAKGDRGFDGLPGLPGDKGHRGERGPQGPPGPPGDDGMRGEDGEIGPRGLPGEAGPRGLLGPRGTPGAPGQPGMAGVDGPPGPKGNMGPQGEPGPPGQQGNPGPQGLPGPQGPIGPPGEKVSFSFSLFYKKVIKFACDKRFVGRHDERKVVKLSLPLYLIYE

SEQ ID NO: 82508 - protein, 148 aa, Homo sapiens
MFSEQAAQRAHTLLSPPSANNATFARVPVATYTNSSQPFRLGERSFSRQYAHIYATRLIQMRPFLENRAQQHWGSGVGVKKLCELQPEEKCCVVGTLFKAMPLQPSILREVSEEHNLLPQPPRSKYIHPDDELVLEDELQRIKLKGTI

SEQ ID NO: 82509 - protein, 118 aa, Homo sapiens
MNDDPSMEENGVERVCPESLLQSREYSSLPLPRHTSSTDGTITSSDPGLEILNMASCDLDRNSLCKKEEDTRSASPTIEAQGTSPAHDNIAFQDSTSKDKTILNLEAKEEPETIEEHK

SEQ ID NO: 82510 - protein, 252 aa, Homo sapiens
MEEAILVPCVLGLLLLPILAMLMALCVHCHRLPGSYDSTSSDSLYPRGIQFKRPHTVAPWPPAYPPVTSYPPLSQPDLLPIPRSPQPLRDSDGANSVASYENEGASGIRGAQAGWGVWGPSWTRLTPVSLPPEPACEDADEDEDDYHNPGYLVVLPDSTPATSTAAPSAPALSTPGIRDSAFSMESIDDYVNVPESGESAEASLDGSREYVNVSQELHPGAAKTEPAALSSQEAEEVEEEGAPDYENLQELN

SEQ ID NO: 82511 - protein, 56 aa, Homo sapiens
MSDIEEVVEEYEEEEQEEAAVEEQEEAAEEDAEAEAETEETRAEEDEEEEEAKEAD

SEQ ID NO: 82512 - protein, 60 aa, Homo sapiens
MKPHRIRMTHNLLLNYGLYRKMEIYRPHKATAEEMTKYHSDEYIKFLRSIRPDNMSEYSK

SEQ ID NO: 82513 - protein, 339 aa, Homo sapiens [sequence omitted]

SEQ ID NO: 82514 - protein, 135 aa, Homo sapiens
MEADASVDMFSKVLEHQLLQTTKLVEEHLDSEIQKLDQMDEDELERLKEKRLQALRKAQQQKQEWLSKGHGEYREIPSERDFFQEVKESENVVCHFYRDSTFRCKILDRHLAILSKKHLETKFLKLNVEKAPFLC

SEQ ID NO: 82515 - protein, 427 aa, Homo sapiens
MELRVGNRYRLGRKIGSGSFGDIYLGTDIAAGEEVAIKLECVKTKHPQLHIESKIYKMMQGGVGIPTIRWCGAEGDYNVMVMELLGPSLEDLFNFCSRKFSLKTVLLLADQMISRIEYIHSKNFIHRDVKPDNFLMGLGKKGNLVYIIDFGLAKKYRDARTHQHIPYRENKNLTGTARYASINTHLGIEQSRRDDLESLGYVLMYFNLGSLPWQGLKAATKRQKYERISEKKMSTPIEVLCKGYPSEFATYLNFCRSLRFDDKPDYSYLRQLFRNLFHRQGFSYDYVFDWNMLKFGASRAADDAERERRDREERLRHSRNPATRGLPSTASGRLRGTQEVAPPTPLTPTSHTANTSPRPVSGMERERKVSMRLHRGAPVNISSSDLTGRQDTSRMSTSQRSRDMASLRLHAARQGTRCRPQRPRRTY

SEQ ID NO: 82516 - protein, 1440 aa, Homo sapiens
MAAVGSGGYARNDAGEKLPSVMAGVPARRGQSSPPPAPPICLRRRTRLSTASEETVQNRVSLEKVLGITAQNSSGLTCDPGTGHVAYLAGCVVVILDPKENKQQHIFNTARKSLSALAFSPDGKYIVTGENGHRPAVRIWDVEEKNQVAEMLGHKYGVACVAFSPNMKHIVSMGYQHDMVLNVWDWKKDIVVASNKVSCRVIALSFSEDSSYFVTVGNRHVRFWFLEVSTETKVTSTVPLVGRSGILGELHNNIFCGVACGRGRMAGSTFCVSYSGLLCQFNEKRVLEKWINLKVSLSSCLCVSQELIFCGCTDGIVRIFQAHSLHYLANLPKPHYLGVDVAQGLEPSFLFHRKAEAVYPDTVALTFDPIHQWLSCVYKDHSIYIWDVKDINRVGKVWSELFHSSYVWNVEVYPEFEDQRACLPSGSFLTCSSDNTIRFWNLDSSPDSHWQKNIFSNTLLKVVYVENDIQHLQDMSHFPDRGSENGTPMDVKAGVRVMQVSPDGQHLASGDRSGNLRIHELHFMDELVKVEAHDAEVLCLEYSKPETGLTLLASASRDRLIHVLNVEKNYNLEQTLDDHSSSITAIKFAGNRDIQMISCGADKSIYFRSAQQGSDGLHFVRTHHVAEKTTLYDMDIDITQKYVAVACQDRNVRVYNTVNGKQKKCYKGSQGDEGSLLKVHVDPSGTFLATSCSDKSISVIDFYSGECIAKMFGHSEIITSMKFTYDCHHLITVSGDSCVFIWHLGPEITNCMKQHLLEIDHRQQQQHTNDKKRSGHPRQDTYVSTPSEIHSLSPGEQTEDDLEEECEPEEMLKTPSKDSLDPDPRCLLTNGKLPLWAKRLLGDDDVADGLAFHAKRSYQPHGRWAERAGQEPLKTILDAQDLDCYFTPMKPESLENSILDSLEPQSLASLLSESESPQEAGRGHPSFLPQQKESSEASELILYSLEAEVTVTGTDSQYCRKEVEAGPGDQQGDSYLRVSSDSPKDQSPPEELFPAALGDVEASEAEDHFFNPRLSISTQFLSSLQKASRFTHTFPPRATQCLVKSPEVKLMDRGGSQPRAGTGYASPDRTHVLAAGKAEETLEAWRPPPPCLTSLASCVPASSVLPTDRNLPTPTSAPTPGLAQGVHAPSTCSYMEATASSRARISRSISLGDSEGPIVATLAQPLRRPSSVGELASLGQELQAITTATTPSLDSEGQEPALRSWGNHEARANLRLTLSSACDGLLQPPVDTQPGVTVPAVSFPAPSPVEESALRLHGSAFRPSLPAPESPGLPAHPSNPQLPEARPGIPGGTASLLEPTSGALGLLQGSPARWSEPWVPVEALPPSPLELSRVGNILHRLQTTFQEALDLYRVLVSSGQVDTGQQQARTELVSTFLWIHSQLEAECLVGTSVAPAQALPSPGPPSPPTLYPLASPDLQALLEHYSELLVQAVRRKARGH

SEQ ID NO: 82517 - protein, 2341 aa, Homo sapiens
MSARKLRNLSYKKAVRRQKLLEQSIQSAQETEKSLHLIQESLTFIDKQLAAYIADKVDAAQMPQEAQKIQSDLTSHEISLEEMKKHNQGKEAAQRVLSQIDVAQKKLQDVSMKFRLFQKPANFEQRLQESKMILDEVKMHLPALETKSVEQEVVQSQLNHCVNLYKSLSEVKSEVEMVIKTGRQIVQKKQTENPKELDERVTALKLHYNELGAKVTERKQQLEKCLKLSRKMRKEMNVLTEWLAATDMELTKRSAVEGMPSNLDSEVAWGKATQKEIEKQKVHLKSITEVGEALKTVLGKKETLVEDKLSLLNSNWIAVTSRAEEWLNLLLEYQKHMETFDQNVDHITKWIIQADTLLDESEKKKPQQKEDVLKRLKAELNDIRPKVDSTRDQAANLMANRGDHCRKLVEPQISELNHRFAAISHRIKTGKASIPLKELEQFNSDIQKLLEPLEAEIQQGVNLKEEDFNKDMNEDNEGTVKELLQRGDNLQQRITDERKREEIKIKQQLLQTKHNALKDLRSQRRKKALEISHQWYQYKRQADDLLKCLDDIEKKLASLPEPRDERKIKEIDRELQKKKEELNAVRRQAEGLSEDGAAMAVEPTQIQLSKRWREIESKFAQFRRLNFAQIHTVREETMMVMTEDMPLEISYVPSTYLTEITHVSQALLEVEQLLNAPDLCAKDFEDLFKQEESLKNIKDSLQQSSGRIDIIHSKKTAALQSATPVERVKLQEALSQLDFQWEKVNKMYKDRQGRFDRSVEKWRRFHYDIKIFNQWLTEAEQFLRKTQIPENWEHAKYKWYLKELQDGIGQRQTVVRTLNATGEEIIQQSSKTDASILQEKLGSLNLRWQEVCKQLSDRKKRLEEQKNILSEFQRDLNEFVLWLEEADNIASIPLEPGKEQQLKEKLEQVKLLVEELPLRQGILKQLNETGGPVLVSAPISPEEQDKLENKLKQTNLQWIKVSRALPEKQGEIEAQIKDLGQLEKKLEDLEEQLNHLLLWLSPIRNQLEIYNQPNQEGPFDVKETEIAVQAKQPDVEEILSKGQHLYKEKPATQPVKRKLEDLSSEWKAVNRLLQELRAKQPDLAPGLTTIGASPTQTVTLVTQPVVTKETAISKLEMPSSLMLEVPALADFNRAWTELTDWLSLLDQVIKSQRVMVGDLEDINEMIIKQKATMQDLEQRRPQLEELITAAQNLKNKTSNQEARTIITDRIERIQNQWDEVQEHLQNRRQQLNEMLKDSTQWLEAKEEAEQVLGQARAKLESWKEGPYTVDAIQKKITETKQLAKDLRQWQTNVDVANDLALKLLRDYSADDTRKVHMITENINASWRSIHKRVSEREAALEETHRLLQQFPLDLEKFLAWLTEAETTANVLQDATRKERLLEDSKGVKELMKQWQDLQGEIEAHTDVYHNLDENSQKILRSLEGSDDAVLLQRRLDNMNFKWSELRKKSLNIRSHLEASSDQWKRLHLSLQELLVWLQLKDDELSRQAPIGGDFPAVQKQNDVHRAFKRELKTKEPVIMSTLETVRIFLTEQPLEGLEKLYQEPRELPPEERAQNVTRLLRKQAEEVNTEWEKLNLHSADWQRKIDETLERLRELQEATDELDLKLRQAEVIKGSWQPVGDLLIDSLQDHLEKVKALRGEIAPLKENVSHVNDLARQLTTLGIQLSPYNLSTLEDLNTRWKLLQVAVEDRVRQLHEAHRDFGPASQHFLSTSVQGPWERAISPNKVPYYINHETQTTCWDHPKMTELYQSLADLNNVRFSAYRTAMKLRRLQKALCLDLLSLSAACDALDQHNLKQNDQPMDILQIINCLTTIYDRLEQEHNNLVNVPLCVDMCLNWLLNVYDTGRTGRIRVLSFKTGIISLCKAHLEDKYRYLFKQVASSTGFCDQRRLGLLLHDSIQIPRQLGEVASFGGSNIEPSVRSCFQFANNKPEIEAALFLDWMRLEPQSMVWLPVLHRVAAAETAKHQAKCNICKECPIIGFRYRSLKHFNYDICQSCFFSGRVAKGHKMHYPMVEYCTPTTSGEDVRDFAKVLKNKFRTKRYFAKHPRMGYLPVQTVLEGDNMETPVTLINFWPVDSAPASSPQLSHDDTHSRIEHYASRLAEMENSNGSYLNDSISPNESIDDEHLLIQHYCQSLNQDSPLSQPRSPAQILISLESEERGELERILADLEEENRNLQAEYDRLKQQHEHKGLSPLPSPPEMMPTSPQSPRDAELIAEAKLLRQHKGRLEARMQILEDHNKQLESQLHRLRQLLEQPQAEAKVNGTTVSSPSTSLQRSDSSQPMLLRVVGSQTSDSMGEEDLLSPPQDTSTGLEEVMEQLNNSFPSSRGRNTPGKPMREDTM

SEQ ID NO: 82518 - protein, 149 aa, Homo sapiens
  MOD_RES (1)..(1): Any amino acid
XTPDGIPTLSNITIRIPRGQLTMIVGQVGCGKSSLLLAALGEMQKVSGAVFWSSSLPDSEIGEDPSPERETATDLDIRKRGPVAYASQKPWLLNATVEENIIFESPFNKQRYKMVIEACSLQPDIDILPHGDQTQIGERMVPSAYTMNL

SEQ ID NO: 82519 - protein, 49 aa, Homo sapiens
MAHLMMFRDVAVDFSQEEWECLDLEQRDLYRDVMLENYSNMVSLGFCIY

SEQ ID NO: 82520 - protein, 846 aa, Homo sapiens
MEAPLRPAADILRRNPQQDYELVQRVGSGTYGDVYKARNVHTGELAAVKIIKLEPGDDFSLIQQEIFMVKECKHCNIVAYFGSYLSREKLWICMEYCGGGSLQDIYHVTGPLSELQIAYVCRETLQGLAYLHTKGKMHRDIKGANILLTDHGDVKLADFGVAAKITATIAKRKSFIGTPYWMAPEVAAVEKNGGYNQLCDIWAVGITAIELGELQPPMFDLHPMRALFLMSKSNFQPPKLKDKTKWSSTFHNFVKIALTKNPKKRPTAERLLTHTFVAQPGLSRALAVELLDKVNNPDNHAHYTEADDDDFEPHAIIRHTIRSTNRNARAERTASEINFDKLQFEPPLRKETEARDEMGLSSDPNFMLQWNPFVDGANTGKSTSKRAIPPPLPPKPRISSYPEDNFPDEEKASTIKHCPDSESRAPQILRRQSSPSCGPVAETSSIGNGDGISKLMSENTEGSAQAPQLPRKKDKRDFPKPAINGLPPTPKVLMGACFSKVFDGCPLKINCATSWIHPDTKDQYIIFGTEDGIYTLNLNELHEATMEQLFPRKCTWLYVINNTLMSLSEGKTFQLYSHNLIALFEHAKKPGLAAHIQTHRFPDRILPRKFALTTKIPDTKGCHKCCIVRNPYTGHKYLCGALQSGIVLLQWYEPMQKFMLIKHFDFPLPSPLNVFEMLVIPEQEYPMVCVAISKGTESNQVVQFETINLNSASSWFTEIGAGSQQLDSIHVTQLERDTVLVCLDKFVKIVNLQGKLKSSKKLASELSFDFRIESVVCLQDSVLAFWKHGMQGKSFKSDEVTQEISDETRVFRLLGSDRVVVLESRPTENPTAHSNLYILAGHENSY

SEQ ID NO: 82521 - protein, 18 aa, Homo sapiens
  MOD_RES (1)..(1): Any amino acid
XLNGLLADIVHIHARTES

SEQ ID NO: 82522 - protein, 102 aa, Homo sapiens
  MOD_RES (1)..(1): Any amino acid
XGLHACLQLGRLKDQDKAAPEMVSLLKRNNCGKALDIARQARDMLGGNGISDEYHVIRHAMNLEAVNTYEGELIHSTAAAETMTPTEPSPDPHPTPSSGSES

SEQ ID NO: 82523 - protein, 1186 aa, Homo sapiens
MCEVMPTINEGDRLGPPHGADADANFEQLMVNMLDEREKLLESLRESQETLAATQSRLQDAIHERDQLQRHLNSALPQEFATLTRELSMCREQLLEREEEISELKAERNNTRLLLEHLECLVSRHERSLRMTVVKRQAQSPSGVSSEVEVLKALKSLFEHHKALDEKVRERLRAALERVTTLEEQLAGAHQQVSALQQGAGVRDGAAEEEGTVELGPKRLWKEDTGRVEELQELLEKQNFELSQARERLVTLTTTVTELEEDLGTARRDLIKSEELSSKHQRDLREALAQKEDMEERITTLEKRYLAAQREATSIHDLNDKLENELANKESLHRQCEEKARHLQELLEVAEQKLQQTMRKAETLPEVEAELAQRIAALTKAEERHGNIEEHLRQLEGQLEEKNQELARVRQREKMNEDHNKRLSDTVDRLLSESNERLQLHLKERMAALEEKGRLSEEIEKLRQEVDQLKGRGGPFVDGVHSRSHMGSAADVRFSLGTTTHAPPGVHRRYSALREESAKDWETSPLPGMLAPAAGPAFDSDPEISDVDEDEPGGLVGSADVVSPSGHSDAQTLAMMLQEQLDAINEEIRMIQEEKESTELRAEEIETRVTSGSMEALNLKQLRKRGSIPTSLTALSLASASPPLSGRSTPKLTSRSAAQDLDRMGVMTLPSDLRKHRRKLLSPVSREENREDKATIKCETSPPSSPRTLRLEKLGHPALSQEEGKSALEDQGSNPSSSNSSQDSLHKGAKRKGIKSSIGRLFGKKEKGRLIQLSRDGATGHVLLTDSEFSMQEPMVPAKLGTQAEKDRRLKKKHQLLEDARRKGMPFAQWDGPTVVSWLELWVGMPAWYVAACRANVKSGAIMSALSDTEIQREIGISNALHRLKLRLAIQEMVSLTSPSAPPTSRTSSGNVWVTHEEMETLETSTKTDSEEGSWAQTLAYGDMNHEWIGNEWLPSLGLPQYRSYFMECLVDARMLDHLTKKDLRVHLKMVDSFHRTSLQYGIMCLKRLNYDRKELEKRREESQHEIKDVLVWTNDQVVHWVQSIGLRDYAGNLHESGVHGALLALDENFDHNTLALILQIPTQNTQARQVMEREFNNLLALGTDRKLDDGDDKVFRRAPSWRKRFRPREHHGRGGMLSASAETLPAGFRVSTLGTLQPPPAPPKKIMPEAHSHYLYGHMLSAFRD

SEQ ID NO: 82524 - protein, 149 aa, Homo sapiens
MHKDEFHLKFFMCVIQSRQLVRTPQRTAGEASTSSMLIPKPPPKTDILKSLDTMDDPDTVGSIPVFKTEWIMTHEEHHAAKTLGIGKAIAVLTSGGDAQGMNAAVRAVVRVGIFTGARVFFVHEGYQGLVDGGDHIKEATWESVSMMLQ

SEQ ID NO: 82525 - protein, 64 aa, Homo sapiens
MAHIDAGKTTTTERILYYSGYTRSLGDVDDGDTVTDFMAQERERGITIQSAAVTFDWKGYRVNL

SEQ ID NO: 82526 - protein, 70 aa, Homo sapiens
MPGPQGGRGAATMSLGKLSPVGWVSSSQGKRRLTADMISHPLGDFRHTMHVGRGGDVFGDTSFLSNHGGS

SEQ ID NO: 82527 - protein, 124 aa, Homo sapiens
SISPSTLSPATSNHSQHYANEDSKMGSTVTAAVIGIIVPIVVIALLCMSGYLIWRNWKRKNTKSMNFDNPVYRKTTEEEDEDELHIGRTAQIGHVYPAVTAAPTPEEPSFRAACRQIQASGIKP

SEQ ID NO: 82528 - protein, 89 aa, Homo sapiens
  MOD_RES (1)..(1): Any amino acid
XFPAEVAPVRQQGSVAGARAGVVSLLGCRSSWTAAMELSAEYLREKLQRDLEAEHVEVEDTTLNRCSCSFRVLVVSAKFEGKPLLQRHR

SEQ ID NO: 82529 - protein, 101 aa, Homo sapiens
MLSGGSDGVIVLYDLENSSRQSYYTCKAVCSIGRDHPDVHRYSVETVQWYPHDTGMFTSSSFDKTLKVWDTNTLQTESRSVTHAGVQWPVAQSQLTATSPS

SEQ ID NO: 82530 - protein, 40 aa, Homo sapiens
  MOD_RES (1)..(1): Any amino acid
XYELFAFISHMGTSTMSGHYICHIKKEGSLKMKSQDFKHL

SEQ ID NO: 82531 - protein, 182 aa, Homo sapiens
ANILAQKQLRSIILTHVIRAQRAINNEMAHQLYVLQVLTFNLLEDRMMTKMDPQDQAQRDIIFELRRIAFDAESEPNNSSGSMEKRKSMYTRDYKKLGFINHVNPAMDFTQTPPGMLALDNMLYFAKHHQDAYIRIVLENSSREDKHECPFGRSSIELTKMLCEILKVGELHHLSPEKFTLP

SEQ ID NO: 82532 - protein, 123 aa, Homo sapiens
MVAMAAGPSGCLVPAFGLRLLLATVLQAVSAFGAEFSSEACRELGFSSNLLCSSCDLLGQFNLLQLDPDCRGCCQEEAQFETKKLYAGAILEVCGKLGRFPQVQVCPWFRPCIKAFGRQWEHC

SEQ ID NO: 82533 - protein, 33 aa, Homo sapiens
MSIETLLEAARFLEWQAQQQQRARVPEEEGEGI

SEQ ID NO: 82534 - protein, 33 aa, Homo sapiens
MSRKQNQKDSSGFIFDLQSNTVLAQGGAFENMK

SEQ ID NO: 82535 - protein, 130 aa, Homo sapiens
  MOD_RES (1)..(1): Any amino acid
XMVGTLYDKVDPSGEIVELAKGACPWKEHLYHLESGLSPPVAIFFVIYTDQAGQWRIQCVPKEPHSFQSRLPLPEPWRGLRDEALDQVSGIPGCIFVHASGFTGGHHTREGALSMARATLAQRSYLPQIS

SEQ ID NO: 82536 - protein, 309 aa, Homo sapiens [sequence omitted]

SEQ ID NO: 82537 - protein, 23 aa, Homo sapiens
MFPVAPKPQDSSQPSDRLMTEKQ

SEQ ID NO: 82538 - protein, 177 aa, Homo sapiens
MQLLLWGGRRVASAIHRCLSYSLHCLFQRYEVKTRNLGKSGLRVSCLGLGTWVTFGGQISDEVAERLMTIAYESGVNLFDTAEVYAAGKAEVILGSIIKKKGWRRSSLVITTKLYWGGKAETERGLSRKHIIEGLKGSLQRLQLEYVDVVFANRPDSNTPMEEIVRAMTHVINQGMA

SEQ ID NO: 82539 - protein, 222 aa, Homo sapiens
MVLRRMHRPRSCSYQLLLEHQRPSCIQGLRWTPLTNSEESLDFSESLEQASTERVLRAGRQLHRHLLATCPNLIRDRKYHLRLYRQCCSGRELVDGILALGLGVHSRSQVVGICQVLLDEGALCHVKHDWAFQDRDAQFYRFPGPEPEPVRTHEMEEELAEAVALLSQRGPDALLTVALRKPPGQRTDEELDLIFEELLHIKAVAHLSNSVKRELAAVLLFE

SEQ ID NO: 82540 - protein, 376 aa, Homo sapiens
MDQLEEAQKYTGKIGNVCKKLSSPSNYKLECPETDCEKGWALLKFGGKYYQKAKAAFEKALEVEPDNPEFNIGYAITVYRLDDSDREGSVKSFSLGPLRKAVTLNPDNSYIKVFLALKLQDVHAEAEGEKYIEEILDQISSQPYVLRYAAKFYRRKNSWNKALELLKKALEVTPTSSFLHHQMGLCYRAQMIQIKKATHNRPKGKDKLKVDELISSAIFHFKAAMERDSMFAFAYTDLANMYAEGGQYSNAEDIFRKALRLENITDDHKHQIHYHYGRFQEFHRKSENTAIHHYLEALKVKDRSPLRTKLTSALKKLSTKRLCHNALDVQSLSALGFVYKLEGEKRQAAEYYEKAQKIDPENAEFLTALCELRLSI

SEQ ID NO: 82541 - protein, 62 aa, Homo sapiens
GSVPNKFYVHNDMFRYEDEVFGDSEPELDEEDEVEEEQEERQPSPEPVQENANSGYYEAHPV

SEQ ID NO: 82542 - protein, 130 aa, Homo sapiens
MKIIHQDGYSLEECLEFIAIIYGNTLQSILAIVRAMTTLNIQYGDSARQDDARKLMHMADTIEEGTMPKEMSDIIQRLWKDSGIQACFERASEYQLNDSAGYYLSDLERLVTPGYVPTEQDVLRSRVKTT

SEQ ID NO: 82543 - protein, 62 aa, Homo sapiens
MAALRPLVKPKIVKKRTKKFIRHQSDRYVKIKRNWRKPRGIDNRVRRRFKGQILMPNIGYGS

SEQ ID NO: 82544 - protein, 110 aa, Homo sapiens
SLPKSCTSVSKQESSKGSHRTGGQCHLPIKSHQHCYSWSDESLSMTQSETTSDQSDIEGRIRALKDELRKRKSVVNQLKKEQKKRQKERLKAQEASLIKQLEVRHRKKGV

SEQ ID NO: 82545 - protein, 336 aa, Homo sapiens
MPLRDKYCQTDHHHHGCCEPVYILEPGDPPLLQQPLQTSKSGIQQIIECFRSGTKQLKHILLKDVDTIFECKLCRSLFRGLPNLITHKKFYCPPSLQMDDNLPDVNDKQSQAINDLLEAIYPSVDKREYIIKLEPIETNQNAVFQYISRTDNPIEVTESSSTPEQTEVQIQETSTEQSKTVPVTDTEVETVEPPPVEIVTDEVAPTSDEQPQESQADLETSDNSDFGHQLICCLCRKEFNSRRGVRRHIRKVHKKKMEELKKYIETRKNPNQSSKGRSKNVLVPLSRSCPVCCKSFATKANVRRHFDEVHRGLRRDSITPDIATKPGQPLFLDSIS

SEQ ID NO: 82546 - protein, 223 aa, Homo sapiens
MESIFHEKQPSGNMDDSGFFSIQWFNLNSLLTGPELISDTYLALFLAQLQQEGYSIFVVKGDLPDCEADQLLQMIRVQQMHRPKLIGEELAQLKEQRVHKTDLERVLEANDGSGMLDEDEEDLQRALALSRQEIDMEDEEADLRRAIQLSMQGSSRNISQDMTQTSGTNLTSEELRKRREAYFEKQQQKQQQQQQQQQQGDLSGQSSHPCERPATSSGALGSD

SEQ ID NO: 82547 - protein, 142 aa, Homo sapiens
MNGDSRAAVVTSPPPTTAPHKERYFDRVDENNPEYLRERNMAPDLRQDFNMMEQKKRVSMILQSPTRVNSEQEHFLIVPFGLLYSEVTASSLVKINLQGDIVDRGSTNLGVNQAGFTLHSAIYAARPDVKCVVHIHTPAGAA

SEQ ID NO: 82548 - protein, 13 aa, Homo sapiens
  MOD_RES (1)..(1): Any amino acid
XAQNTALRRKVDP

SEQ ID NO: 82549 - protein, 84 aa, Homo sapiens
MLMLSGNTSAKYFFSFACGQSKVFLLPSSVLTAAIYLKNMVTQYWPDREPPPGEAIFPFNIHENDRQQIRDNIVEGIIRSPDLV

SEQ ID NO: 82550 - protein, 318 aa, Homo sapiens
MAEYDLTTRIAHFLDRHLVFPLLEFLSVKEVPATDRNALSSLWGKLASEILMQNWDAAMEDLTRLKETIDNNSVSSPLQSLQQRTWLIHWSLFVFFNHPKGRDNIIDLFLYQPQYLNAIQTMCPHILRYLTTAVITNKDVRKRRQVLKDLVKVIQQESYTYKDPITEFVECLYVNFDFDGAQKKLRECESVLVNDFFLVACLEDFIENARLFIFETFCRIHQCISINMLADKLNMTPEEAERWIVNLIRNARLDAKIDSKLGHVVMGNNAVSPYQQVIEKTKSLSFRSQMLAMNIEKKLNQNSRSEAPNWATQDSGFY

SEQ ID NO: 82551 - protein, 479 aa, Homo sapiens
MGDAPSPEEKLHLITRNLQVTILFADLHAYLDNMKAPWELLELRVSYYENVIKAMLESIGVPLEKLKFIKGTDYQLSKEYTLDVYRLSSVVTQHDSKKAGAEVVKQVEHPLLSGLLYPGLQALDEEYLKVDAQFGGIDQRKIFTFAEKYLPALGYSKRVHLMNPMVPGLTGSKMSSSEEESKIDLLDRKEDVKKKLKKAFCEPGNVENNGVLSFIKHVLFPLKSEFVILRDEKWGGNKTYTAYVDLEKDFAAEVVHPGDLKNSVEVALNKLLDPIREKFNTPALKKLASAAYPDPSKQKPMAKGPAKNSEPEEVIPSRLDIRVGKIITVEKHPDADSLYVEKIDVGEAEPRTVVSGLVQFVPKEELQDRLVVVLCNLKPQKMRGVESQGMLLCASIEGINRQVEPLDPPAGSAPGEHVFVKGYEKGQPDEELKPKKKVFEKLQADFKISEECIAQWKQTNFMTKLGSISCKSLKGGNIS

SEQ ID NO: 82552 - protein, 574 aa, Homo sapiens
MELLPPLPQSFLLLLLLPAKPAAGEDWQCPRTPYAASRDFDVKYVVPSFSAGGLVQAMVTYEGDRNESAVFVAIRNRLHVLGPDLKSVQSLATGPAGDPGCQTCAACGPGPHGPPGDTDTKVLVLDPALPALVSCGSSLQGRCFLHDLEPQGTAVHLAAPACLFSAHHNRPDDCPDCVASPLGTRVTVVEQGQASYFYVASSLDAAVAASFSPRSVSIRRLKADASGFAPGFVALSVLPLLLLVAALATALVFSYWWRRKQLVLPPNLNDLASLDQTAGATPLPILYSGSDYRSGLALPAIDGLDSTTCVHGASFSDSEDESCVPLLRKESIQLRDLDSALLAEVKDVLIPHERVVTHSDRVIGKGHFGVVYHGEYIDQAQNRIQCAIKSLSRITEMQQVEAFLREGLLMRGLNHPNVLALIGIMLPPEGLPHVLLPYMCHGDLLQFIRSPQRNPTVKDLISFGLQVARGMEYLAEQKFVHRDLAARNCMYQVMQQCWEADPAVRPTFRVLVGEVEQIVSALLGDHYVQLPATYMNLGPSTSHEMNVRPEQPQFSPMPGNVRRPRPLSEPPRPT

SEQ ID NO: 82553 - protein, 929 aa, Homo sapiens
MPVVSAISSRIIKTPRRFIEDEDYDPPIKIARLESTPNSRFSAPSCGSSEKSSAASQHSSQMSSDSSRSSSPSVDTSTDSQASEEIQVLPEERSDTPEVHPPLPISQSPENESNDRRSRRYSVSERSFGSRTTKKLSTLQSAPQQQTSSSPPPPLLTPPPPLQPASSISDHTPWLMPPTIPLASPFLPASTAPMQGKRKSILREPTFRWTSLKHSRSEPQYFSSAKYAKEGLIRKPIFDNFRPPPLTPEDVGFASGFSASGTAASARLFSPLHSGTRFDMHKRSPLLRAPRFTPSEAHSRIFESVTLPSNRTSAGTSSSGVSNRKRKRKVFSPIRSEPRSPSHSMRTRSGRLSSSELSPLTPPSSVSSSLSISVSPLATSALNPTFTFPSHSLTQSGESAEKNQRPRKQTSAPAEPFSSSSPTPLFPWFTPGSQTERGRNKDKAPEELSKDRDADKSVEKDKSRERDREREKENKRESRKEKRKKGSEIQSSSALYPVGRVSKEKVVGEDVATSSSAKKATGRKKSSSHDSGTDITSVTLGDTTAVKTKILIKKGRGNLEKTNLDLGPTAPSLEKEKTLCLSTPSSSTVKHSTSSIGSMLAQADKLPMTDKRVASLLKKAKAQLCKIEKSKSLKQTDQPKAQGQESDSSETSVRGPRIKHVCRRAAVALGRKRAVFPDDMPTLSALPWEEREKILSSMGNDDKSSIAGSEDAEPLAPPIKPIKPVTRNKAPQEPPVKKGRRSRRCGQCPGCQVPEDCGVCTNCLDKPKFGGRNIKKQCCKMRKCQNLQWMPSKAYLQKQAKAVKKKEKKSKTSEKKDSKESSVVKNVVDSSQKPTPSAREDPAPKKSSSEPPPRKPVEEKSEEGNVSAPGPESKQATTPASRKSSKQVSQPALVIPPQPPTTGPPRKEVPKTTPSEPKKKQPPPPESGE

SEQ ID NO: 82554 - protein, 117 aa, Homo sapiens
MIKLTTGKEAALSYGFYGCHCGVGGRGSPKDATDRCCVTHDCCYKRLEKRGCGTKFLSYKFSNSGSRITCAKQDSCRSQLCECDKAAATCFARNKTTYNKKYQYYSNKHCRGSTPRC

SEQ ID NO: 82555 - protein, 182 aa, Homo sapiens
GNELSDFQTNVDPAGDSVSYSIHSTARVVLTRGDVHSQVICEIAHITLQGDPLRGTANLSEAIRVPPTLEVTQQPMRAENQANVTCQVSNFYPRGLQLTWLENGNVSRTETASTLIENKDGTYNWMSWLLVNTCAHRDDVVLTCQVEHDGQQAVSKSYALEISAHQKEHGSDITHGAVTSHF

SEQ ID NO: 82556 - protein, 151 aa, Homo sapiens
MGTQGAMAQEAAQRRALCLGGGRGAQPRAPERREGEEDCAKPASTAHMGNCLGWLCLTPGNQVVQRIKAVEGQTRLLVVDQETDEELRRRQLTCTEEMAQRGLPPAHDPWEPKPDWAHTGSHSSEAGKKDVSGPLRELRPRLCHLRKGPQG

SEQ ID NO: 82557 - protein, 91 aa, Homo sapiens
  MOD_RES (1)..(1): Any amino acid
XDLSSKTQLLQDVQDENKLFKSQIEQLKQQNYQQASSFPPHEELLKVISEREKEISGLWNELDSLKDAVEHQRKKNNEGMVMQQQQQRWRH

SEQ ID NO: 82558 - protein, 58 aa, Homo sapiens
  MOD_RES (1)..(1): Any amino acid
XCGVISPRFDVQLKDLEKWQNNLLPSRQFGIYTLQIMRLVPWLKVFSLHGCCITVSLY

SEQ ID NO: 82559 - protein, 130 aa, Homo sapiens
GGKQGLLGAPPAMPLLNGPALSTALLQLALQTQGQKKPGILGDSPLGALQPGAQPANPLLGELPAGLTAGGAPQGLPDSPESLPEPTQPAPGQQPGGPWRWQQQQQSLPAQVPPAQPPQQRPPAPRTRTV

SEQ ID NO: 82560 - protein, 120 aa, Homo sapiens
MENSTTTISREELEELQEAFNKIDIDNSGYVSDYELQDLFKEASLPLPGYKVREIVEKILSVADSNKDGKISFEEFVSLMQELKSKDISKTFRKIINKREGITAIGGTSTISSEGTQHSY

SEQ ID NO: 82561 - protein, 458 aa, Homo sapiens
MGGLGPRRAGTSRERLVVTGRAGWMGMGRGAGRSALGFWPTLAFLLCSFPAATSPCKILKCNSEFWSATSGSHAPASDDTPEFCAALRSYALCTRRTARTCRGDLAYHSAVHGIEDLMSQHNCSKDGPTSQPRLRTLPPAGDSQERSDSPEICHYEKSFHKHSATPNYTHCGLFGDPHLRTFTDRFQTCKVQGAWPLIDNNYLNVQVTNTPVLPGSAATATSKLTIIFKNFQECVDQKVYQAEMDELPAAFVDGSKNGGDKHGANSLKITEKVSGQHVEIQAKYIGTTIVVRQVGRYLTFAVRMPEEVVNAVEDWDSQGLYLCLRGCPLNQQIDFQAFHTNAEGTGARRLAAASPAPTAPETFPYETAVAKCKEKLPVEDLYYQACVFDLLTTGDVNFTLAAYYALEDVKMLHSNKDKLHLYERTRDLPGRAAAGLPLAPRPLLGALVPLLALLPVFC

SEQ ID NO: 82562 - protein, 285 aa, Homo sapiens
MEEPQSDPSVEPPLSQETFSDLWKLLPENNVLSPLPSQAMDDLMLSPDDIEQWFTEDPGPDEAPRMPEAAPPVAPAPAAPTPAAPAPAPSWPLSSSVPSQKTYQGSYGFRLGFLHSGTAKSVTCTYSPALNKMFCQLAKTCPVQLWVDSTPPPGTRVRAMAIYKQSQHMTEVVRRCPHHERCSDSDGLAPPQHLIRVEGNLRVEYLDDRNTFRHSVVVPYEPPEVGSDCTTIHYNYMCNSSCMGGMNRRPILTIITLEDSRPRQVDHLRSGVQDSLANIAKSHLY

SEQ ID NO: 82563 - protein, 322 aa, Homo sapiens
MLSPLPTGPLEACFSVQSRTSSPMEPPIPQSAPLTPNSVMVQPLLDSRMSHSRLQHPLTILPIDQVKTSHVENDYIDNPSLALTTGPKRTRGGAPELAPTPARCDQDVTHHWISFSGRPSSVSSSSSTSSDQRLLDHMAPPPVADQASPRAVRIQPKVVHCQPLDLKGPAVPPELDKHFLLCEACGKCKCKECASPRTLPSCWVCNQECLCSAQTLVNYGTCMCLVQGIFYHCTNEDDEGSCADHPCSCSRSNCCARWSFMGALSVVLPCLLCYLPATGCVKLAQRGYDRLRRPGCRCKHTNSVICKAASGDAKTSRPDKPF

SEQ ID NO: 82564 - protein, 126 aa, Homo sapiens
MTEEACRTRSQKRALERDPTEDDVESKKIKMERGLLASDLNTDGDMRVTPEPGAGPTQGLLRATEATAMAMGRGEGLVGDGPVDMRTSHSDMKSERRPPSPDVIVLSDNEQPSSPRVNGLTTVALK

SEQ ID NO: 82565 - protein, 67 aa, Homo sapiens
MIELNFKDAFDSFERLKNESRWSQCYYAYLTAVCQGATGDVDGAQIVFKEVQKLFKRKNNQIEQFSV

SEQ ID NO: 82566 - protein, 89 aa, Homo sapiens
MGSRKKEIALQVNISTQELWEEMLSSKGLTGTKGECIGRNTGISWNSKDGRRARHHWDLNLGLQSLGNSRPLSMGLLIPILLASVICCT

SEQ ID NO: 82567 - protein, 29 aa, Homo sapiens
MFLLLPFDSLIVNLLGISLTVLFTLLLVF

SEQ ID NO: 82568 - protein, 356 aa, Homo sapiens
MPALEPAPPLLADLGPALEPESPAALGPPGYLHSAPGPAPAPGEGPPPGTVLEPQSAPESSCPCRGSVKNQPSEELPDMTTFPPRLLAEQLTLMDAELFKKVVLHECLGCIWGQGHLKGNEHMAPTVRATIAHFNRLTNCITTSCLGDHSMRARDRARVVEHWIKVARECLSLNNFSSVHVIVSALCSNPIGQLHKTWAGVSSKSMKELKELCKKDTAVKRDLLIKAGSFKVATQERNPQRVQMRLRRQKKGVVPFLGDFLTELQRLDSAIPDDLDGNTNKRSKEVRVLQEMQLLQVAAMNYRLRPLEKFVTYFTRMEQLSDKERWGFTMMSRIVSNSWPQAIHPPQPPKVLTLQV

SEQ ID NO: 82569 - protein, 445 aa, Homo sapiens
MCASVKYNIRGPALIPRMKTKHRIYYITLFSIVLLGLIATGMFQFWPHSIESSNDWNVEKRSIRDVPVVRLPADSPIPERGDLSCRMHTCFDVYRCGFNPKNKIKVYIYALKKYVDDFGVSVSNTISREYNELLMAISDSDYYTDDINRACLFVPSIDVLNQNTLRIKETAQAMAQLSRWDRGTNHLLFNMLPGGPPDYNTALDVPRDRALLAGGGFSTWTYRQGYDVSIPVYSPLSAEVDLPEKGPGPRQYFLLSSQVGLHPEYREDLEALQVKHGESVLVLDKCTNLSEGVLSVRKRCHKHQVFDYPQVLQEATFCVVLRGARLGQAVLSDVLQAGCVPVVIADSYILPFSEVLDWKRASVVVPEEKMSDVYSILQSIPQRQIEEMQRQARWFWEAYFQSIKAIALATLQIINDRIYPYAAISYEEWNDPPAVILSGPKSGFH

SEQ ID NO: 82570 - protein, 735 aa, Homo sapiens
MTMYLWLKLLAFGFAFLDTEVFVTGQSPTPSPTGVSSVQTPHLPTHADSQTPSAGTDTQTFSGSAANAKLNPTPGSNAISDVPGERSTASTFPTDPVSPLTTTLSLAHHSSAALPARTSNTTITANTSDAYLNASETTTLSPSGSAVISTTTIATTPSKPTCDEKYANITVDYLYNKETKLFTAKLNVNENVECGNNTCTNNEVHNLTECKNASVSISHNSCTAPDKTLILDVPPGVEKFQLHDCTQVEKADTTICLKWKNIETFTCDTQNITYRFQCGNMIFDNKEIKLENLEPEHEYKCDSEILYNNHKFTNASKIIKTDFGSPGEPQIIFCRSEAAHQGVITWNPPQRSFHNFTLCYIKETEKDCLNLDKNLIKYDLQNLKPYTKYVLSLHAYIIAKVQRNGSAAMCHFTTKSAPPSQVWNMTVSMTSDNSMHVKCRPPRDRNGPHERYHLEVEAGNTLVRNESHKNCDFRVKDLQYSTDYTFKAYFHNGDYPGEPFILHHSTSYNSKALIAFLAFLIIVTSIALLVVLYKIYDLHKKRSCNLDEQQELVERDDEKQLMNVEPIHADILLETYKRKIADEGRLFLAEFQSIPRVFSKFPIKEARKPFNQNKNRYVDILPYDYNRVELSEINGDAGSNYINASYIDGFKEPRKYIAAQGPRDETVDDFWRMIWEQKATVIVMVTRCEEGNRNKCAEYWPSMEEGTRAFGDVVVKINQHKRCPDYIIQKLNIVN

SEQ ID NO: 82571 - protein, 296 aa, Homo sapiens
MATPNNLTPTNCSWWPISALESDAAKPAEAPDAPEAASPAHWPRESLVLYHWTQSFSSQKVRLVIAEKGLVCEERDVSLPQSEHKEPWFMRLNLGEEVPVIIHRDNIISDYDQIIDYVERTFTGEHVVALMPEVGSLQHARVLQYRELLDALPMDAYTHGCILHPELTTDSMIPKYATAEIRRQKCELWLCGCAFTLADVLLGATLHRLKFLGLSKKYWEDGSRPNLQSFFERVQRRFAFRKVLGDIHTTLLSAVIPNAFRLVKRKPPSFFGASFLMGSLGGMGYFAYWYLKKKYI

SEQ ID NO: 82572 - protein, 65 aa, Homo sapiens
MVYYPELFVWVSQEPFPNKDMEGRLPKGRLPVPKEVNRKKNDETNAASLTPLGSSELRSPRISYL

SEQ ID NO: 82573 - protein, 88 aa, Homo sapiens
MESISMMGSPKSLSETFLPNGINGIKDARKVTVGVIGSGDFAKSLTIRLIRCGYHVVIGSRNPKFASEFFPHVVDVTHHEDALTKTNI

SEQ ID NO: 82574 - protein, 199 aa, Homo sapiens
MPKFKQRRRKLKAKAERLFKKKEASHFQSKLITPPPPPPSPERVGISSIDISQSRSWLTSSWNFNFPNIRDAIKLWTNRVWSIYSWCQNCITQSLEVLKDTIFPSRICHRELYSVKQQFCILESKLCKLQEALKTISESSSCPSCGQTCHMSGKLTNVPACVLITPGDSKAVLPPTLPQPASHFPPPPPPPPLPPPPPP

SEQ ID NO: 82575 - protein, 134 aa, Homo sapiens
MGFAHSWLLTPLIFPLHSPGPLALKIAGRIAEFFPDAVLIMLDNQKLVPQPRVPPVIVLENQGLRWVPKDKNLVMWRDWEESRQMVGALLEDRAHQHLVDFDCHLDDIRQDWTNQRLNTQITQWVGPTNGNGNA

SEQ ID NO: 82576 - protein, 123 aa, Homo sapiens
MLGWILITLATIAALVSCCVAKCCSPLTSLQHCYWTSHLQNERELFEQAAEQHSRLLMMHRIKKLFGFIPGSEDVKHIRIPSCQDWKDISVPTLLCMGDDLQGHYSFLGNRVDEDNEEDRSRG

SEQ ID NO: 82577 - protein, 460 aa, Homo sapiens
MMDLVLEEDVTVPGTLSGCSGLVPSVPDDLDGINPNAGLGNVLPNVSEETVSPTRARNMKDFENQITELKKENFNLKLRIYFLEERMQQEFHGPTEHIYKTNIELKVEVESLKRELQEREQLLIKASKAVESLAEAGGSEIQRVKEDARKKVQQVEDLLTKRILLLEKDVTAAQAELEKAFAGTETEKALRLRLESKLSEMKKMHEGDLAMALVLDEKDRLIEELKLSLKSKEALIQCLKEEKSQMACPDENVSSGELRGLCAAPREEKERETEAAQMEHQKERNSFEERIQALEEDLREKEREIATEKKNSLKRDKAIQGLTMALKSKEKKVEELNSEIEKLSAAFAKAREALQKAQTQEFQGSEDYETALSGKEALSAALRSQNLTKSTENHRLRRSIKKITQELSDLQQERERLEKDLEEAHREKSKGDCTIRGLTLFPGLFLNSWAQVILPPQFLE

SEQ ID NO: 82578 - protein, 137 aa, Homo sapiens
MKFLIFAFFGGVHLLSLCSGKAICKNGISKRTFEEIKEEIASCGDVAKAIINLAVYGKAQNRSYERLALLVDTVGPRLSGSKNLEKAIQIMYQNLQQDGLEKVHLEPVRIPHWERGEESAVMLEPRIHKIAILGLGS

SEQ ID NO: 82579 - protein, 460 aa, Homo sapiens
MWGFLKRPVVVTADINLSLVALTGMGLLSRLWRLTYPRAVVFDEVYYGQYISFYMKQIFFLDDSGPPFGHMVLALGGYLGGFDGNFLWNRIGAEYSSNVPVWSLRLLPALAGALSVPMAYQIVLELHFSHCAAMGAALLMLIENALITQSRLMLLESVLIFFNLLAVLSYLKFFNCQKHSPFSLSWWFWLTLTGVACSCAVGIKYMGVFTYVLVLGVAAVHAWHLLGDQTLSNVCVFCHLLARAVALLVIPVVLYLLFFYVHLILVFRSGPHDQIMSSAFQASLEGGLARITQGQPLEVAFGSQVTLRNVFGKPVPCWLHSHQDTYPMIYENGRGSSHQQQVTCYPFKDVNNWWIVKDPRRHQLVVSSPPRPVRHGDMVQLVHGMTTRSLNTHDVAAPLSPHSQEVSCYIDYNISMPAQNLWRLEIVNRGSDTDVWKTILSEVRFVHVNTSAVLKDGIPM

SEQ ID NO: 82580 - protein, 847 aa, Homo sapiens
MLLFFTLGLLIHFVFFASIFDIYFTSPLVHGMTPQFTPLPPPARRLVLFVADGLRADALYELDENGNSRAPFIRNIIMHEGSWGISHTRVPTESRPGHVALIAGFYEDVSAVAKGWKENPVEFDSLFNESKYTWSWGSPDILPMFAKGIDTNGHAHRPSSRDYKHNIKKVDDGVKEIVSMFNHFYGNDGKTTFIFTSDHGMTDWGSHGAGHPSETLTPLVTWGAGIKYPQRVSAQQFDDAFLKEWRLENWKRLDVNQGILPVDYLNNTDLFKAESMFTNAVQILEQFKVKMTQKKEVTLPFLFTPFKLLSDSKQFNILRKARSYIKHRKFDEVVSLCKELIHLALKGLSYYHTYDRFFLGVNVVIGFVGWISYASLLIIKSHSNLIKGVSKEVKKPSHLLPCSFVAIGILVAFFLLIQACPWTYYVYGLLPLPIWYAVLREFQVIQDLVVSVLTYPLSHFVGYLLAFTLGIEVLVLSFFYRYMLTAGLTAFAAWPFLTRLWTRAKMTSLSWTFFSLLLAVFPLMPVVGRKPDISLVMGAGLLVLLLSLCVVTSLMKRKDSFIKEELLVHLLQVLSTVLSMYVVYSTQSSLLRKQGLPLMNQIISWATLASSLVVPLLSSPVLFQRLFSILLSLMSTYLLLSTGYEALFPLVLSCLMFVWINIEQETLQQSGVCCKQKLTSIQFSYNTDITQFRQLYLDDIRRAFFLVFFLVTAFFGTGNIASINSFDLASVYCFLTVFSPFMMGALMMWKILIPFVLVMCAFEAVQLTTQLSSKSLFLIVLVISDIMALHFFFLVKDYGSWLDIGTSISHYVIVMSMTIFLVFLNGLAQLLTTKKLRLCGKPKSHFM

SEQ ID NO: 82581 - protein, 271 aa, Homo sapiens
MASSSPDSPCSCDCFVSVPPASAIPAVIFAKNSDRPRDEVQEVVFVPAGTHTPGSRLQCTYIEVEQVSKTHAVILSRPSWLWGAEMGANEHGVCIGNEAVWTKEPVGEGEALLGMDLLRLALERSSSAQEALHVITGLLEHYGQGGNCLEDAAPFSYHSTFLLADRTEAWVLETAGRLWAAQRIQEGARNISNQLSIGTDISAQHPELRTHAQAKGWWDGQGAFDFAQIFSLTQQPVRMEAAKARFQAGRELLRQRQASPSTPWQGASRQR

SEQ ID NO: 82582 - protein, 577 aa, Homo sapiens [sequence omitted]

SEQ ID NO: 82583 - protein, 577 aa, Homo sapiens
MAPIGLKAVVGEKIMHDVIKKVKKKGEWKVLVVDQLSMRMLSSCCKMTDIMTEGITIVEDINKRREPLPSLEAVYLITPSEKSVHSLISDFKDPPTAKYRAAHVFFTDSCPDALFNELVKSRAAKVIKTLTEINIAFLPYESQVYSLDSADSFQSFYSPHKAQMKNPILERLAEQIATLCATLKEYPAVRYRGEYKDNALLAQLIQDKLDAYKADDPTMGEGPDKARSQLLILDRGFDPSSPVLHELTFQAMSYDLLPIENDVYKYETSGIGEARVKEVLLDEDDDLWIALRHKHIAEVSQEVTRSLKDFSSSKRMNTGEKTTMRDLSQMLKKMPQYQKELSKYSTHLHLAEDCMKHYQGTVDKLCRVEQDLAMGTDAEGEKIKDPMRAIVPILLDANVSTYDKIRIILLYIFLKNGITEENLNKLIQHAQIPPEDSEIITNMAHLGVPIVTDSTLRRRSKPERKERISEQTYQLSRWTPIIKDIMEDTIEDKLDTKHYPYISTRSSASFSTTAVSARYGHWHKNKAPGEYRSGPRLIIFILGGVSLNEMRCAYEVTQANGKWEVLIGEWPFRTLAR

SEQ ID NO: 82584 - protein, 1048 aa, Homo sapiens
MNGNTALAIAKRLGYISVVDTLKVVTEEVTTTTTTITEKHKLNVPETMTEVLDVSDEEGDDTMTGDGGEYLRPEDLKELGDDSLPSSQFLDGMNYLRYSLEGGRSDSLRSFSSDRSHTLSHASYLRDSAVMDDSVVIPSHQVSTLAKEAERNSYRLSWGTENLDNVALSSSPIHSGFLVSFMVDARGGAMRGCRHNGLRIIIPPRKCTAPTRVTCRLVKRHRLATMPPMVEGEGLASRLIEVGPSGAQFLGPVIVEIPHFAALRGKERELVVLRSENGDSWKEHFCDYTEDELNEILNGMDEVLDSPEDLEKKRICRIITRDFPQYFAVVSRIKQDSNLIGPEGGVLSSTVVPQVQAVFPEGALTKRIRVGLQAQPMHSELVKKILGNKATFSPIVTLEPRRRKFHKPITMTIPVPKASSDVMLNGFGGDAPTLRLLCSITGGTTPAQWEDITGTTPLTFVNECVSFTTNVSARFWLIDCRQIQESVTFASQVYREIICVPYMAKFVVFAKSHDPIEARLRCFCMTDDKVDKTLEQQENFAEVARSRDVEVLEGKPIYVDCFGNLVPLTKSGQHHIFSFFAFKENRLPLFVKVRDTTQEPCGRLSFMKEPKSTRGLVHQAICNLNITLPIYTKESESDQEQEEEIDMTSEKNPQDEQERIEERLAYIADHLGFSWTELARELDFTEEQIHQIRIENPNSLQDQSHALLKYWLERDGKHATDTNLVECLTKINRMDIVHLMETNTEPLQERISHSYAEIEQTITLDHSEGFSVLQEELCTAQHKQKEEQAVSKESETCDHPPIVSEEDISVGYSTFQDGVPKTEGDSSATALFPQTHKEQVQQDFSGKMQDLPEESSLEYQQEYFVTTPGTETSETQKAMIVPSSPSKTPEEVSTPAEEEKLYLQTPTSSERGGSPIIQEPEEPSEHREESSPRKTSLVIVESADNQPETCERLDEDAAFEKGDDMPEIPPETVTEEEYIDEHGHTVVKKVTRKIIRRYVSSEGTEKEEIMVQGMPQEPVNIEEGDGYSKVIKRVVLKSDTEQSEDNNE

SEQ ID NO: 82585 - protein, 282 aa, Homo sapiens
MAGRGGAARPNGPAAGNKICQFKLVLLGESAVGKSSLVLRFVKGQFHEYQESTIGAAFLTQTVCLDDTTVKFEIWDTAGQERYHSLAPMYYRGAQAAIVVYDITNTDTFARAKNWVKELQRQASPNIVIALAGNKADLASKRAVEFQANETCKCNGWKNPKPPTAPRMDLQQPAANLSELCRSCEHPLADHVSHLENVSEDEINRLLGMVVDVENLFMSVHKEEDTDTKQVYFYLFKLLRKCILQMTRPVVEGSLGSPPFEKPNIEQGVLNFVQYKFSHLAP

SEQ ID NO: 82586 - protein, 1031 aa, Homo sapiens
MLCMPKGLAFKTQADPREPQFHAFIITREDGSRTFGFALTFYEEVTSKQICSAMQTLYHMHNAEYDVLHAPPADDRDQSSMEDGEDTPVTKLQRFNSYDISRDTLYVSKCICLITPMSFMKACRSVLEQLHQAVTSPQPPPLPLESYIYNVLYEVPLPPPGRSLKFSGVYGPIICQRPSTNELPLFDFPVKEVFELLGVENVFQLFTCALLEFQILLYSQHYQRLMTVAETITALMFPFQWQHVYVPILPASLLHFLDAPVPYLMGLHSNGLDDRSKLELPQEANLCFVDIDNHFIELPEDLPQFPNKLEFVQEVSEILMAFGIPPEGNLHCSESASKLKRLRASELVSDKRNGNIAGSPLHSYELLKENETIARLQALVKRTGVSLEKLEVREDPSSNKDLKVQCDEEELRIYQLNIQIREVFANRFTQMFADYEVFVIQPSQDKESWFTNREQMQNFDKASFLSDQPEPYLPFLSRFLETQMFASFIDNKIMCHDDDDKDPVLRVFDSRVDKIRLLNVRTPTLRTSMYQKCTTVDEAEKAIELRLAKIDHTAIHPHLLDMKIGQGKYEPGFFPKLQSDVLSTGPASNKWTKRNAPAQWRRKDRQKQHTEHLRLDNDQREKYIQEARTMGSTIRQPKLSNLSPSVIAQTNWKFVEGLLKECRNKTKRMLVEKMGREAVELGHGEVNITGVEENTLIASLCDLLERIWSHGLQVKQGKSALWSHLLHYQDNRQRKLTSGSLSTSGILLDSERRKSDASSLMPPLRISLIQDMRHIQNIGEIKTDVGKARAWVRLSMEKKLLSRHLKQLLSDHELTKKLYKRYAFLRCDDEKEQFLYHLLSFNAVDYFCFTNVFTTILIPYHILIVPSKKLGGSMFTANPWICISGELGETQIMQIPRNVLEMTFECQNLGKLTTVQIGHDNSGLYAKWLVEYVMVRNEITGHTYKFPCGRWLGKGMDDGSLERILVGELLTSQPEVDERPCRTPPLQQSPSVIRRLVTISPNNKPTRQSDAVALWRVWPCLGLGTGFPAWI

SEQ ID NO: 82587 - protein, 121 aa, Homo sapiens
MPLPKVGGGFGGERSSLYTQYLSCTGILLLEYSYGKTFSSAIKALDGRSQVSTPRFGKTFDAPPALPKATRKALGTVNRATEKSVKTKGPLKQKQPSFSAKKMTEKTVKAKSSVPASDDAY

SEQ ID NO: 82588 - protein, 1196 aa, Homo sapiens
MDALIIPVTMEVPCDSRGQRMWWAFLASSMVTFFGGLFIILLWRTLKYLWTVCCHCGGKTKEAQKINNGSSQADGTLKPVDEKEEAVAAEVGWMTSVKDWAGVMISAQTLTGRVLVVLVFALSIGALVIYFIDSSNPIESCQNFYKDFTLQIDMAFNVFFLLYFGLRFIAANDKLWFWLEVNSVVDFFTVPPVFVSVYLNRSWLGLRFLRALRLIQFSEILQFLNILKTSNSIKLVNLLSIFISTWLTAAGFIHLVENSGDPWENFQNNQALTYWECVYLLMVTMSTVGYGDVYAKTTLGRLFMVFFILGGLAMFASYVPEIIELIGNRKKYGGSYSAVSGRKHIVVCGHITLESVSNFLKDFLHKDRDDVNVEIVFLHNISPNLELEALFKRHFTQVEFYQGSVLNPHDLARVKIESADACLILANKYCADPDAEDASNIMRVISIKNYHPKIRIITQMLQYHNKAHLLNIPSWNWKEGDDAICLAELKLGFIAQSCLAQGLSTMLANLFSMRSFIKIEEDTWQKYYLEGVSNEMYTEYLSSAFVGLSFPTVCELCFVKLKLLMIAIEYKSANRESRILINPGNHLKIQEGTLGFFIASDAKEVKRAFFYCKACHDDITDPKRIKKCGCKRLIYFEDEQPSTLSPKKKQRNGGMRNSPNTSPKLMRHDPLLIPGNDQIDNMDSNVKKYDSTGMFHWCAPKEIEKVILTRSEAAMTVLSGHVVVCIFGDVSSALIGLRNLVMPLRASNFHYHELKHIVFVGSIEYLKREWETLHNFPKVSILPGTPLSRADLRAVNINLCDMCVILSANQNNIDDTSLQDKECILASLNIKSMQFDDSIGVLQANSQGFTPPGMDRSSPDNSPVHGMLRQPSITTGVNIPIITELAKPGKLPLVSVNQEKNSGTHILMITELVNDTNVQFLDQDDDDDPDTELYLTQPFACGTAFAVSVLDSLMSATYFNDNILTLIRTLVTGGATPELEALIAEENALRGGYSTPQTLANRDRCRVAQLALLDGPFADLGDGGCYGDLFCKALKTYNMLCFGIYRLRDAHLSTPSQCTKRYVITNPPYEFELVPTDLIFCLMQFDHNAGQSRASLSHSSHSSQSSSKKSSSVHSIPSTANRQNRPKSRESRDKQNATRMNRMGQAEKKWFTDEPDNAYPRNIQIKPMSTHMANQINQYKSTSSLIPPIREVEDEC

SEQ ID NO: 82589 - protein, 50 aa, Homo sapiens
MRPWTGSWRWIMLILFAWGTLLFYIGGHLVRDNDHPDHSSRELSKILAKL

SEQ ID NO: 82590 - protein, 48 aa, Homo sapiens
MAFSPNYMSMLLFRLLQGLVSKGNWMAGYTLITEFVGSGSRRTVAIMY

SEQ ID NO: 82591 - protein, 623 aa, Homo sapiens
  MOD_RES (1)..(1): Any amino acid
XTNFATLRWIDYGKVATQCTCRKDMVKISMDVFVRILQPERYELWKQGKDLTVLDHTRPTALTSPELSSWSASRASLKAKLLRRQISLKENRHWRKTEEERKPSLERKKEQTKRPGLSSHRKRSQPKKPKPEDPKFPGEGTAGAALLEEAGGSVKEEAGPEVDPEEEEEEPQPLPHGREAEGAEEDGRGKLRPTKAKSERKKKSFGLLPPQLPPPPAHFPSEEALWLPSPLEPPVLGPGPAAMEESPLPAPLNVVPPEVPSEELEAKPRPIIPMLYVVPRPGKAAFNQEHVSCQQAFEHFAQKGPTWKEPVSPMELTGPEDGAASSGAGRMETKARAGEGQAPSTFSKLKMEIKKSRRHPLGRPPTRSPLSVVKQEASSDEEASPFSGEEDVSDPDALRPLLSLQWKNRAASFQAERKFNAAAARTEPYCAICTLFYPYCQALQTEKEAPIASLGEGCPATLPSKSRQKTRPLIPEMCFTSGGENTEPLPANSYIGDDGTSPLIACGKCCLQVHASCYGIRPELVNEGWTCSRCAAHAWTAECCLCNLRGGALQMTTDRRWIHVICAIAVPEARFLNVIERHPVDISAIPEQRWKLVRSLGPGGAWPIMAWAAALQGCLLHTL

SEQ ID NO: 82592 - protein, 253 aa, Homo sapiens
VKEITRDIKQLDHAKRHLTTSITTLNHLHMLAGGVDSLEAMTRRRQYGEVANLLQGVMNVLEHFHKYMGIPQIRQLSERVKAAQTELGQQILADFEEAFPSQGTKRPGGPSNVLRDACLVANILDPRIKQEIIKKFIKQHLSEYLVLFQENQDVAWLDKIDRRYAWIKRQLVDYEEKYGRMFPREWCMAERIAVEFCHVTRAELAKIMRTRAKEIEVKLLLFAIQRTTNFEGFLAKRFSGCTLTDGTLWLTPV

SEQ ID NO: 82593 - protein, 167 aa, Homo sapiens
YCRDIHTKYSSEWGAGALEDKSRLQIWDTAGQERFRSITQSYYRSANALILTYDITCEESFRCLPEWLREIEQYASNKVITVLVGNKIDLAERREVSQQRAEEFSEAQDMYYLETSAKESDNVEKLFLDLACRLISEARQNTLVNNVSSPLPGEGKSISYLTCCNFN

SEQ ID NO: 82594 - protein, 455 aa, Homo sapiens
MGKEQELLEAARTGHLPAVEKLLSGKRLSSGFGGGGGGGSGGGGGGSGGGGGGLGSSSHPLSSLLSMWRGPNVNCVDSTGYTPLHHAALNGHKDVVEVLLRNDALTNVADSKGCYPLHLAAWKGDAQIVRLLIHQGPSHTRVNEQNALEIKELKKYGPFDPYINAKNNDNETALHCAAQYGHTEVVKVLLEELTDPTMRNNKFETPLDLAALYGRLEVVKMLLNAHPNLLSCNTKKHTPLHLAARNGHKAVVQVLLDAGMDSNYQTEMGSALHEAALFGKTDVVQILLAAGTDVNIKDNHGLTALDTVRELPSQKSQQIAALIEDHMTGKRSTKEVDKTPPPQPPLISSMDSISQKSQGDVEKAVTELIIDFDANAEEEGPYEALYNAISCHSLDSMASGRSSDQDSTNKEAEAAGVKPAGVRPRERPPPPAKPPPDEEEEDHIDKKYFPLTASE

SEQ ID NO: 82595 - protein, 87 aa, Homo sapiens
MWLWWYSTAGAQEAPIKKKRPPVKDEDLKGARGNLTKNQEIKSKTYQVMRECEQAGSAAPSVFSRTRTGTETVFEKPKAGPTKSVFG

SEQ ID NO: 82596 - protein, 125 aa, Homo sapiens
MSILKIHAREIFDSRGNPTVEVDLFTSKGLFRAAVPSGASTGIYEALELRDNDKTRYMGKGVSKAVEHINKTIAPALVSKKLNVTEQEKIDKLMIEMDGTENKSKFGANAILGVSLAVCKAGAVE

SEQ ID NO: 82597 - protein, 61 aa, Homo sapiens
MSLQRLLQHSSNGNLADFCAGPAYSSYSTLTGSLTMDDNRRIQMLADTVATLPRGRKQNDF

SEQ ID NO: 82598 - protein, 86 aa, Homo sapiens
MIFWSFVAGVVTFYCSLGPDSLLPNIFFTIKYKPKLGLQELFPQGHSCAVCGKVKCKRHRPSLLLENYQPWLDLKISSKVDASLSE

SEQ ID NO: 82599 - protein, 172 aa, Homo sapiens
MPLISSTCDMVSAAYASTKESYPHIKTVCDAAEKGVRTLTAAAVSGAQPILSKLEPQIASASEYAHRGLDKLEENLPILQQPTEKVLADTKELVSSKVSGAQEMVSSAKDTVATQLSEAVDATRGAVQSGVDKTKSVVTGGVQSVMGSRLGQMVLSGVDTVLGKSEEWADNH

SEQ ID NO: 82600 - protein, 125 aa, Homo sapiens
MAVFLQLLPLLLSRAQGNPGASLDGRPGDRVNLSCGGVSHPIRWVWAPSFPACKGLSKGRRPILWASSSGTPTVPPLQPFVGRLRSLDSAPDPAAGRWVGARTGSFGPGLVAAQAPAPATDSTTP

SEQ ID NO: 82601 - protein, 200 aa, Homo sapiens
MNGHISNHPSSFGMYPSQMNGYGSSPTFSQTDREHGSKTSAKALYEQRKNYARDSVSSVSDISQYRVEHLTTFVLDRKDAMITVDDGIRKLKLLDAKGKVWTQDMILQVDDRAVSLIDLESKNELENFPLNTIQHCQAVMHSCSYDSVLALVCKEPTQNKPDLHLFQCDEVKANLISEDIESAISDSKGGKQKRRPDALS

SEQ ID NO: 82602 - protein, 172 aa, Homo sapiens
MDNRFATAFVIACVLSLISTIYMAASIGTDFWYEYRSPVQENSSDLNKSIWDEFISDEADEKTYNDALFRYNGTVGLWRRCITIPKNMHWYSPPERTESFDVVTKCVSFTLTEQFMEKFVDPGNHNSGIDLLRTYLWRCQFLLPFVSLGLMCFGALIGLCACICRSLYPTIA

SEQ ID NO: 82603 - protein, 179 aa, Homo sapiens
  MOD_RES (1)..(1): Any amino acid
XDDGVSIPGEYTSFLAPISSSKLYNEVRACREKDRDPEAQFEMPYVVRLHNFHQLSAPQPCFTFSHPNRDPMIDNNRYCTLEFPVEVNTVLHGFAGYFETVLYQDITLSIRPETHSPGMFSWFPILFPIKPITVREGQTICVRFWRCSNSKKVWYEWAVTAPVCSAIHNPTGRSYTIGL

SEQ ID NO: 82604 - protein, 94 aa, Homo sapiens
MAAMPLKAQYQEMVTFEDVAVHFTKTEWTGLSPAQRALYRSVMLENFGNLTALGYPVPKPALISLLERGDMAWGLEAQDDPPAERTKNVCKVIL

SEQ ID NO: 82605 - protein, 2963 aa, Homo sapiens
MLPINVDPDSKPGEYVLKSLFVNFTTQAERKIRIIMAEPLEKPLTKSLQRGEDPQFDQVISSMSSLSEYCLPSILRTLFDWYKRQNGIEDESHEYRPRTSNKSKSDEQQRDYLMERRDLAIDFIFSLVLIEVLKQIPLHPVIDSLIHDVINLAFKHFKYKEGYLGPNTGNMHIVADLYAEVIGVLAQAKFPAVKKKFMAELKELRHKEQNPYVVQSIISLIMGMKFFRIKMYPVEDFEASLQFMQECAHYFLEVKDKDIKHALAGLFVEILVPVAAAVKNEVNVPCLRNFVESLYDTTLELSSRKKHSLALYPLVTCLLCVSQKQLFLNRWHIFLNNCLSNLKNKDPKMARVALESLYRLLWVYMIRIKCESNTATQSRLITIITTLFPKGSRGVVPRDMPLNIFVKIIQFIAQERLDFAMKEIIFDFLCVGKPAKAFSLNPERMNIGLRAFLVIADSLQQKDGEPPMPVTGAVLPSGNTLRVKKTYLSKTLTEEEAKMIGMSLYYSQVRKAVDNILRHLDKEVGRCMMLTNVQMLNKEPEDMITGERKPKIDLFRTCVAAIPRLLPDGMSKLELIDLLARLSIHMDDELRHIAQNSLQGLLVDFSDWREDVLFGFTNFLLREVNDMHHTLLDSSLKLLLQLLTQWKLVIQTQGKVYEQANKIRNSELIANGSSHRIQSERGPHCSVLHAVEGFALVLLCSFQVATRKLSVLILKEIRALFIALGQPEDDDRPMIDVMDQLSSSILESFIHVAVSDSATLPLTHNVDLQWLVEWNAVLVNSHYDVKSPSHVWIFAQSVKDPWVLCLFSFLRQENLPKHCPTALSYAWPYAFTRLQSVMPLVDPNSPINAKKTSTAGSGDNYVTLWRNYLILCFGVAKPSIMSPGHLRASTPEIMATTPDGTVSYDNKAIGTPSVGVLLKQLVPLMRLESIEITESLVLGFGRTNSLVFRELVEELHPLMKEALERRPENKKRRERRDLLRLQLLRIFELLADAGVISDSTNGALERDTLALGALFLEYVDLTRMLLEAENDKEVEILKDIRAHFSAMVANLIQCVPVHHRRFLFPQQSLRHHLFILFSQWAGPFSIMFTPLDRYSDRNHQITRYQYCALKAMSAVLCCGPVFDNVGLSPDGYLYKWLDNILACQDLRVHQLGCEVVVLLLELNPDQINLFNWAIDRCYTGSYQLASGCFKAIATVCGSRNYPFDIVTLLNLVLFKASDTNREIYEISMQLMQILEAKLFVYSKKVAEQRPGSILYGTHGPLPPLYSVSLALLSCELARMYPELTLPLFSEVSQRFPTTHPNGRQIMLTYLLPWLHNIELVDSRLLLPGSSPSSPEDEVKDREGDVTASHGLRGNGWGSPEATSLVLNNLMYMTAKYGDEVPGPEMENAWNALANNEKWSNNLRITLQFLISLCGVSSDTVLLPYIKKVAIYLCRNNTIQTMEELLFELQQTEPVNPIVQHCDNPPFYRFTASSKASAAASGTTSSSNTVVAGQENFPDAEENKILKESDERFSNVIRAHTRLESRYSNSSGGSYDEDKNDPISPYTGWLLTITETKQPQPLPMPCTGGCWAPLVDYLPETITPRGPLHRCNIAVIFMTEMVVDHSVREDWALHLPLLLHAVFLGLDHYRPEVFEHSKKLLLHLLIALSCNSNFHSIASVLLQTREMGEAKTLTVQPAYQPEYLYTGGFDFLREDQSSPVPDSGLSSSSTSSSISLGGSSGNLPQMTQEVEDVDTAAETDEKANKLIEFLTTRAFGPLWCHEDITPKNQNSKSAEQLTNFLRHVVSVFKDSKSGFHLEHQLSEVALQTALASSSRHYAGRSFQIFRALKQPLSAHALSDLLSRLVEVIGEHGDEIQGYVMEALLTLEAAVDNLSDCLKNSDLLTVLSRSSSPDLSSSSKLTASRKSTGQLNMNPGTTSGNTATAERSRHQRSFSVPKKFGVIDRSSDPPRSATLDRIQACTQQGLSSKTRSSSSLKDSLTDPSHINHPTNLLATIFWVTVALMESDFEFEYLMALRLLSRLLAHMPLDKAENREKLEKLQAQLKWADFSGLQQLLLKGFTSLTTTDLTLQLFSLLTPVSKISMVDASHAIGFPLNVLCLLPQLIQHFENPNQFCKDIAERIAQVCLEEKNPKLSNLAHVMTLYKTHSYTRDCATWVNVVCRYLHEAYADITLNMVTYLAELLEKGLPSVQQPLLQVIYSLLSYMDLSVVPVKQFNVEVLKTIEKYVQSVHWREALNILKLVVSRSASLVLPSYQHSDLSKIEIHRVWTSASKELPGKTLDFHFDISETPIIGRRYDELQNSSGRDGKPRAMAVTRSTSSTSSGSNSNVLVPVSWKRPQYSQKRTKEKLVHVLSLCGQEVGLSKNPSVIFSSCGDLDLLEHQTSLVSSEDGAREQENMDDTNSEQQFRVFRDFDFLDVELEDGEGESMDNFNWGVRRRSLDSLDKCDMQILEERQLSGSTPSLNKMHHEDSDESSEEEDLTASQILEHSDLIMTLSPSEETNPMELLTTACDSTPAEPHSFNTRMSSFDASLPDMNNLQISEGSKAEAVREEEDTTVHEDDLSSSINELPAAFECSDSFSLDMTEGEEKGNRALDQFTLASFGEGDRGVSPPPSPFFSAILAAFQPAACDDAEEAWRSHINQLMCDSDGSCAVYTFHVFSSLFKNIQKRFCFLTCDAASYLGDNLRGIGSKFVSSSQMLTSCSECPTLFVDAETLLSCGLLDKLKFSVLELQEYLDTYNNRKEATLSWLANCKATFAGGSRDGVITCQPGDSEEKQLELCQRLYKLHFQLLLLFQSYCKLIGQVHEVSSMPELLNMSRELSDLKKHLKEASAVIAADPLYSDGAWSEPTFTSTEAAIQSMLECLKNNELGKALRQIRECRSLWPNDIFGSSSDDEVQTLLNIYFRHQTLGQTGTYALVGSNQSLTEICTKLMELNMEIRDMIRRAQSYRVLTTFLPDSSVSGTSL

SEQ ID NO: 82606 - protein, 75 aa, Homo sapiens
MGAGPSLLLAALLLLLSGDGAVRCDTPANCTYLDLLGTWVFQVGSSGSQRDVNCSVMGKPPARQSSGSSFLPLSP

SEQ ID NO: 82607 - protein, 168 aa, Homo sapiens
LIDAAKEEYNGVIEEFLATGEKLFGPYVWGRYDLLFMPPSFPFGGMENPCLTFVTPCLLAGDRSLADVIIHEISHSWFGNLVTNANWGEFWLNEGFTMYAQRRISTILFGVDPDDTYNETPYEKGFCFVSYLAHLVGDQDQFDSFLKAYVHEFKFRSILADDFLDFYL

SEQ ID NO: 82608 - protein, 99 aa, Homo sapiens
MKPYVEVAIGKGYRVEFHEPETWWKFDPEELEKRNKHGVSRKKIAQMLDRYEYQMSISIVMNSVEPSHKSTQRPPPPQGRQRWGGSLGSHNRVCVTNNH

SEQ ID NO: 82609 - protein, 170 aa, Homo sapiens
MDVKERRPYCSLTKSRREKERRYTNSSADNEECRVPTQKSYSSSETLKAFDHDSSRLLYGNRVKDLVHREADEFTRQGQNFTLRQLGVCEPATRRGLAFCAEMGLPHRGYSISAGSDADTENEAVMSPEHAMRLWGRGVKSGRSSCLSSRSNSALTLTDTEHENKSDSEN

SEQ ID NO: 82610 - protein, 96 aa, Homo sapiens
MRVFCVGLLLFSVTWAAPTFQPQTEKTKQSCVEEQRAPQASLLQNSGSQNLPDPHPMPRPTSRSASGPVAAGVILMDLSRKKKTKTILVFTIWARE

SEQ ID NO: 82611 - protein, 174 aa, Homo sapiens
NEMFFGDQVDKCYKCSVKQGQTLFIPTGWIHAVLTPVDCLAFGGNFLHSLNIEMQLKAYEIEKRLSTADLFRFPNFETICWYVGKHILDIFRGLRENRRHPASYLVHGGKALNLAFRAWTRKEALPDHEDEIPETVRTVQLIKDLAREIRLVEFSRGEDDYKAMFQQVAYTTRQ

SEQ ID NO: 82612 - protein, 116 aa, Homo sapiens
MSICSSLARKFPKLTIIGEEDLPSEEVDQELIEDSQWEEILKQPCPSQYSAIKEEDLVVWVDPLDGTKEYTEGLLDNVTVLIGIAYEGKAIAGVINQPYYNYEAGPDAVLGRTIWG

SEQ ID NO: 82613 - protein, 48 aa, Homo sapiens
MMFPQSRHSGSSHLPQQLKFTTSDSCDRIKDEFQLLQAQYHRLRSSKG

SEQ ID NO: 82614 - protein, 41 aa, Homo sapiens
MEKIQPALQEKHAMKQAVMEMMSQKIQQLTALGAAQATAKA

SEQ ID NO: 82615 - protein, 429 aa, Homo sapiens
SRFPSGIPVEESGGVLSKGTWRNEGEDLDLAVPETARLDSSLHKARAQLLAKGRRHRPSRSRLRDSASSAEDGEGSDGPGGKVTDGCGSPLHRLRSPLHSGPGSPAGGSFCLDPPGLRRSLDEDEPPPSPLTRYRPLHNAASHEGLAAASCSPPRSAPSSDSSPSFVRRHPRAEPHSEDDSRDASPPEPASPTIGLDKKTRRKFLDLGVTLRRASTGKSRKEKGSNRLSMGSRESVEGSGRSGGSPFLPFSWFTDSGKGSASSGSTTSPTCSPKHEGFSPKKSASQESTLSDDSTPPSSSPKIPSGPWQEAKCSYPYHTLSQSSDEFLDEPLPPVHHWTSQQVGQWLQSLNLEQYAAEFAARQVDGPQLLQLDGSKLKSLGLSNSHDRALVKRKLKEMAAAAEKERKAQEKAARQREKLRRREQEAKKS

SEQ ID NO: 82616 - protein, 262 aa, Homo sapiens
MAKAGVQWRDLDSLQPLPPRFKRFSHLCLLSSWDYRMESTEKCEAIITHFNGKYIKTPPGVPAPSDPLLCKFADGGPKKRQNQGKFVQNGRAWPRNADMGVMALTYDPTTALQNGFYPAPYNITPNRMLAQSALSPYLSSPVSSYQRVTQTSPLQVPNPSWMHHHSYLMQPSGSVLTPGMDHPISLQPASMMGPLTQQLGHLSLSSTGTYMPTAAAMQGAYISQYTPVPSSSVSVEESSGQQNQVAVDAPSEHGVYSFQFNK

SEQ ID NO: 82617 - protein, 1154 aa, Homo sapiens
MPTAESEAKVKTKVRFEELLKTHSDLMREKKKLKKKLVRSEENISPDTIRSNLHYMKETTSDDPDTIRSNLPHIKETTSDDVSAANTNNLKKSTRVTKNKLRNTQLATENPNGDASVEEDKQGKPNKKVIKTVPQLTTQDLKPETPENKVDSTHQKTHTKPQPGVDHQKSEKANEGREETDLEEDEELMQAYQCHVTEEMAKEIKRKIRKKLKEQLTYFPSDTLFHDDKLSSEKRKKKKEVPVFSKAETSTLTISGDTVEGEQKKESSVRSVSSDSHQDDEISSMEQSTEDSMQDDTKPKPKKTKKKTKAVADNNEDVDGDGVHEITSRDSPVYPKCLLDDDLVLGVYIHRTDRLKSDFMISHPMVKIHVVDEHTGQYVKKDDSGRPVSSYYEKENVDYILPIMTQPYDFKQLKSRLPEWEEQIVFNENFPYLLRGSDESPKVILFFEILDFLSVDEIKNNSEVQNQECGFRKIAWAFLKLLGANGNANINSKLRLQLYYPPTKPRSPLSVVEAFEWWSKCPRNHYPSTLYVTVRGLKVPDCIKPSYRSMMALQEEKGKPVHCERHHESSSVDTEPGLEESKEVIKWKRLPGQACRIPNKHLFSLNAGERGCFCLDFSHNGRILAAACASRDGYPIILYEIPSGRFMRELCGHLNIIYDLSWSKDDHYILTSSSDGTARIWKNEINNTNTFRVLPHPSFVYTAKFHPAVRELVVTGCYDSMIRIWKVEMREDSAILVRQFDVHKSFINSLCFDTEGHHMYSGDCTGVIVVWNTYVKINDLEHSVHHWTINKEIKETEFKGIPISYLEIHPNGKRLLIHTKDSTLRIMDLRILVARKFVGAANYREKIHSTLTPCGTFLFAGSEDGIVYVWNPETGEQVAMYSDLPFKSPIRDISYHPFENMVAFCAFGQNEPILLYIYDFHVAQQEAEMFKRYNGTFPLPGIHQSQDALCTCPKLPHQGSFQIDEFVHTESSSTKMQLVKQRLETVTEVIRSCAAKVNKNLSFTSPPAVSSQQSKLKQSNMLTAQEILHQFGFTQTGIISIERKPCNHQVDTAPTVVALYDYTANRSDELTIHRGDIIRVFFKDNEDWWYGSIGKGQEGYFPANHVASETLYQELPPEIKERSPPLSPEEKTKIEKSPAPQKAGSRPVTQVGVQ

SEQ ID NO: 82618 - protein, 331 aa, Homo sapiens
MAVEGSTITSRIKNLLRSPSIKLRRSKAGNRREDLSSKVTLEKVLGITVSGGRGLACDPRSGLVAYPAGCVVVLFNPRKHKQHHILNSSRKTITALAFSPDGKYLVTGESGHMPAVRVWDVAEHSQVAELQEHKYGVACVAFSPSAKYIVSVGYQHDMIVNVWAWKKNIVVASNKVSSRVTAVSFSEDCSYFVTAGNRHIKFWYLDDSKTSKVNATVPLLGRSGLLGELRNNLFTDVACGRGKKADSTFCITSSGLLCEFSDRRLLDKWVELRTTVAHCISVSQDYIFCGCADGTVRLFNPSNLHFLSTLPRPHALGTDIASVTEARSTPR

SEQ ID NO: 82619 - protein, 179 aa, Homo sapiens
  MOD_RES (1)..(1): Any amino acid
XQSRRIEPVMGRLLLCASHGEIEKHPSLHASSYGLVAIKEAHDIETRLNEVEKLLKTIISMPCKYSRSEVVLTFFERSPLDQVLKNDNVHKIQPSFQSPVKISEIMRSNGFCLANTETIVIDHSIPNGRDQQLGVDPTEHLFENGSEFPSELEDGDDPAAYVTNLSYYHLVPFETDIWD

SEQ ID NO: 82620 - protein, 145 aa, Homo sapiens
MLHTNSRGEEGIFYKVPGRMGVYTLKKDVPDGVKELSEGSEESSDGQSDSQSSENSSSSSDGGSNKEGKKSRWKRKVSSSSPQSGCPSPTIPAGKVISPSQKHSKKALKQALKQQQQKKQQQQCRPSISISSNQHLSLKTVKAAS

SEQ ID NO: 82621 - protein, 27 aa, Homo sapiens
MLKALFLTMLTLALVKSQDTEETITYT

SEQ ID NO: 82622 - protein, 83 aa, Homo sapiens
MELSCSEAPLYGQMMIYAKFDKNVYLPEDAEFYFTYDGSHQRHVMIAERIEDNVLQSSVPGHGLQETVTVSVCLCSEGYSPVT

SEQ ID NO: 82623 - protein, 28 aa, Homo sapiens
MDPGSLPPLDSEDLFQDLSHFQETWLAE

SEQ ID NO: 82624 - protein, 212 aa, Homo sapiens
EIEKPVAVSELFTTLPIVQGKSRPIKILTRLTIIVSDPSHCNVLRATSSRARLYDVVAVFPKTEKLFHIACTHLDVDLVCITVTEKLPFYFKRPPINVAIDRGLAFELVYSPAIKDSTMRRYTISSALNLMQICKGKPLEIRGPYDVANLGLLFGLSESDAKAAVSTNCRAALLHGETRKTAFGIISTVKKPRPSEGDEDCLPASKKAKCEG

SEQ ID NO: 82625 - protein, 56 aa, Homo sapiens
MAHYKAADSKREQFRRYLEKSGVLDTLTKASLRSCYSRKSRNRAASPRTGRNEREV

SEQ ID NO: 82626 - protein, 98 aa, Homo sapiens
MASQSQGIQQLLQAEKRAAEKVSEARKRKNRRLKQAKEEAQAEIEQYRLQREKEFKAKEAANIYICKNRCDTLVNPLLNLRTKTLTNNGIGIPWQLQH

SEQ ID NO: 82627 - protein, 81 aa, Homo sapiens
MAKPYEFNWQKEVPSFLQEGAVFDRYEEESFVFEPNCLFKVDEFGFFLTWRSEGKEGQVLECSLINSIRSGAIPKDPKILA

SEQ ID NO: 82628 - protein, 171 aa, Homo sapiens
MAPLLLQLAVLGAALAAAALVLISIVAFTTATKMPALHRHEEEKFFLNAKGQKETLPSIWDSPTKQLSVVVPSYNEEKRLPVMMDEALSYLEKRQKRDPAFTYEVIVVDDGSKDQTSKVAFKYCQKYGSDKVRVITLVKNRGKGGAIRMNQMAIACGSRAHLEKESIAQGI

SEQ ID NO: 82629 - protein, 111 aa, Homo sapiens
MASLRREGRKSGLLQHWPVETRISSSMLEEKAKIHQSTCRILPLSWIVLKPRKDSYYSAVCLTHYHSLREVLQLKLQQRRTREELVSQGIMPPLKSPAAFHEQRRSLERAR

SEQ ID NO: 82630 - protein, 92 aa, Homo sapiens
MFPFYSCWRTGLLLLLLAVAVRESWQTEEKTCDLVGEKGKESEKELALVKRLKPLFNKSFESTVGQGSDTYIYIFRVCREAGNHTSGAGLVQ

SEQ ID NO: 82631 - protein, 368 aa, Homo sapiens
MASSSGSKAEFIVGGKYKLVRKIGSGSFGDIYLAINITNGEEVAVKLESQKARHPQLLYESKLYKILQGGVGIPHIRWYGQEKDYNVLVMDLLGPSLEDLFNFCSRRFTMKTVLMLADQMISRIEYVHTKNFIHRDIKPDNFLMGIGRHCNKLFLIDFGLAKKYRDNRTRQHIPYREDKNLTGTARYASINAHLGIEQSRRDDMESLGYVLMYFNRTSLPWQGLKRQCLTVLPRLVSNSWAQVILLLQHPKELGLQAATKKQKYEKISEKKMSTPVEVLCKGFPAEFAMYLNYCRGLRFEEAPDYMYLRQLFRILFRTLNHQYDYTFDWTMLKQKAAQQAASSSGQGQQAQTPTGKQTDKTKSNMKGF

SEQ ID NO: 82632 - protein, 51 aa, Homo sapiens
MSGRVGDLSPKQAETLAKMESLSSRLECCGAISAHCSLCLPGSSNSPASAS

SEQ ID NO: 82633 - protein, 94 aa, Homo sapiens
  MOD_RES (1)..(1): Any amino acid
XDYLRPRIPSPIGFTPGPQQLLGDPFQGMRKPMSPITAQMSQLELQQAALEGLALPHDLAVQAANFYQPGFGKPQVDRTRDGFRNRFNVLIKLP

SEQ ID NO: 82634 - protein, 783 aa, Homo sapiens
MSEGDAPTPFSRGSRTRASLPVVRSTNQTKERSLGVLYLQYGDETKQLRMPNEITSADTIRALFVSAFPQQLTMKMLESPSVAIYIKDESRNVYYELNDVRNIQDRSLLKVYNKDPAHAFNHTPKTMNGDMRMQRELVYARGDGPGAPRPGSTAHPPHAIPNSPPSTPVPHSMPPSPSRIPYGGTRSMVVPGNATIPRDRISSLPVSRPISPSPSAILERRDVKPDEDMSGKNIAMYRNEGFYADPYLYHEGRMSIASSHGGHPLDVPDHIIAYHRTAIRSASAYCNPSMQAEMHMEQSLYRQKSRKYPDSHLPTLGSKTPPASPHRVSDLRMIDMHAHYNAHGPPHTMQPDRASPSRQAFKKEPGTLVYIEKPRSAAGLSSLVDLGPPLMEKQVFAYSTATIPKDRETSEKMMKTTANRNHTDSAGTPHVSGGKMLSALESTVPPSQPPPVGTSAIHMSLLEMRRSVAELRLQLQQMRQLQLQNQELLRAMMKKAELEISGKVMETMKRLEDPVQRQRVLVEQERQKYLHEEEKIVKKLCELEDFVEDLKKDSTAASRLVTLKDVEDGAFLLRQVGEAVATLKGEFPTLQNKMRAILRIEVEAVRFLKEEPHKLDSLLKRVRSMTDVLTMLRRHVTDGLLKGTDAAQAAQYMAMEKATAAEVLKSQEEAAHTSGQPFHSTGAPGDAKSEVVPLSGMMVRHAQSSPVVIQPSQHSVALLNPAQNLPHVASSPAVPQEATSTLQMSQAPQSPQIPMNGSAMQSLFIEEIHSVSAKNRAVSIEKA

SEQ ID NO: 82635 - protein, 45 aa, Homo sapiens
MEDEVVRFAKKMDKMVQKKNAAGALDLLKELKNIPMTLELLQWLP

SEQ ID NO: 82636 - protein, 194 aa, Homo sapiens
EPVQPHWFYCKEVEYKQLWMPFSVFDSLNLEEIYNSVQPDPESVVLGTDGGRYDVYLYDRIRKAAYWEEEPAEVRRCTWFYKGDTDSRFIPYTEEFSEKLEVIVQFQPSSVPDEWGTTQDGQTRPRVVKRGIDDNLDEIPDGEMPQVDHLVFVVHGIGPVCDLRFRSIIECVDDFRVVSLKLLRTHFKKSLDDG

SEQ ID NO: 82637 - protein, 45 aa, Homo sapiens
MAGAENWPGQQLELDEDEASCCRWGAQHAGARELAALYSPVPFTL

SEQ ID NO: 82638 - protein, 94 aa, Homo sapiens
MTAEGDAPELPEERELMTNCSNMSLRKVPADLTPATTTLDLSYNLLFQLQSSDFHSVSKLRVLILCHNRIQQLDLKTFEFNKELRYLDLSNNRL

SEQ ID NO: 82639 - protein, 2530 aa, Homo sapiens
MTTLLWVFVTLRVITAAVTVETSDHDNSLSVSIPQPSPLRVLLGTSLTIPCYFIDPMHPVTTAPSTAPLAPRIKWSRVSKEKEVVLLVATEGRVRVNSAYQDKVSLPNYPAIPSDATLEVQSLRSNDSGVYRCEVMHGIEDSEATLEVVVKGIVFHYRAISTRYTLDFDRAQRACLQNSAIIATPEQLQAAYEDGFHQCDAGWLADQTVRYPIHTPREGCYGDKDEFPGVRTYGIRDTNETYDVYCFAEEMEGEVFYATSPEKFTFQEAANECRRLGARLATTGQLYLAWQAGMDMCSAGWLADRSVRYPISKARPNCGGNLLGVRTVYVHANQTGYPDPSSRYDAICYTGEDFVDIPENFFGVGGEEDITVQTVTWPDMELPLPRNITEGEARGSVILTVKPIFEVSPSPLEPEEPFTFAPEIGATAFAEVENETGEATRPWGFPTPGLGPATAFTSEDLVVQVTAVPGQPHLPGGVVFHYRPGPTRYSLTFEEAQQACLRTGAVIASPEQLQAAYEAGYEQCDAGWLRDQTVRYPIVSPRTPCVGDKDSSPGVRTYGVRPSTETYDVYCFVDRLEGEVFFATRLEQFTFQEALEFCESHNATLATTGQLYAAWSRGLDKCYAGWLADGSLRYPIVTPRPACGGDKPGVRTVYLYPNQTGLPDPLSRHHAFCFRGISAVPSPGEEEGGTPTSPSGVEEWIVTQVVPGVAAVPVEEETTAVPSGETTAILEFTTEPENQTEWEPAYTPVGTSPLPGILPTWPPTGAATEESTEGPSATEVPSASEEPSPSEVPFPSEEPSPSEEPFPSVRPFPSVELFPSEEPFPSKEPSPSEEPSASEEPYTPSPPVPSWTELPSSGEESGAPDVSGDFTGSGDVSGHLDFSGQLSGDRASGLPSGDLDSSGLTSTVGSGLPVESGLPSGDEERIEWPSTPTVGELPSGAEILEGSASGVGDLSGLPSGEVLETSASGVGDLSGLPSGEVLETTAPGVEDISGLPSGEVLETTAPGVEDISGLPSGEVLETTAPGVEDISGLPSGEVLETTAPGVEDISGLPSGEVLETTAPGVEDISGLPSGEVLETTAPGVEDISGLPSGEVLETAAPGVEDISGLPSGEVLETAAPGVEDISGLPSGEVLETAAPGVEDISGLPSGEVLETAAPGVEDISGLPSGEVLETAAPGVEDISGLPSGEVLETAAPGVEDISGLPSGEVLETAAPGVEDISGLPSGEVLETAAPGVEDISGLPSGEVLETAAPGVEDISGLPSGEVLETAAPGVEDISGLPSGEVLETAAPGVEDISGLPSGEVLETAAPGVEDISGLPSGEVLETAAPGVEDISGLPSGEVLETAAPGVEDISGLPSGEVLETAAPGVEDISGLPSGEVLETAAPGVEDISGLPSGEVLETTAPGVEEISGLPSGEVLETTAPGVDEISGLPSGEVLETTAPGVEEISGLPSGEVLETSTSAVGDLSGLPSGGEVLEISVSGVEDISGLPSGEVVETSASGIEDVSELPSGEGLETSASGVEDLSRLPSGEEVLEISASGFGDLSGLPSGGEGLETSASEVGTDLSGLPSGREGLETSASGAEDLSGLPSGKEDLVGSASGDLDLGKLPSGTLGSGQAPETSGLPSGFSGEYSGVDLGSGPPSGLPDFSGLPSGFPTVSLVDSTLVEVVTASTASELEGRGTIGISGAGEISGLPSSELDISGRASGLPSGTELSGQASGSPDVSGEIPGLFGVSGQPSGFPDTSGETSGVTELSGLSSGQPGISGEASGVLYGTSQPFGITDLSGETSGVPDLSGQPSGLPGFSGATSGVPDLVSGTTSGSGESSGITFVDTSLVEVAPTTFKEEEGLGSVELSGLPSGEADLSGKSGMVDVSGQFSGTVDSSGFTSQTPEFSGLPSGIAEVSGESSRAEIGSSLPSGAYYGSGTPSSFPTVSLVDRTLVESVTQAPTAQEAGEGPSGILELSGAHSGAPDMSGEHSGFLDLSGLQSGLIEPSGEPPGTPYFSGDFASTTNVSGESSVAMGTSGEASGLPEVTLITSEFVEGVTEPTISQELGQRPPVTHTPQLFESSGKVSTAGDISGATPVLPGSGVEVSSVPESSSETSAYPEAGFGASAAPEASREDSGSPDLSETTSAFHEANLERSSGLGVSGSTLTFQEGEASAAPEVSGESTTTSDVGTEAPGLPSATPTASGDRTEISGDLSGHTSQLGVVISTSIPESEWTQQTQRPAETHLEIESSSLLYSGEETHTVETATSPTDASIPASPEWKRESESTAADIDECLSSPCLNGATCVDAIDSFTCLCLPSYEGDLCEIDQEVCEEGWNKYQGHCYRHFPDRETWVDAERRCREQQSHLSSIVTPEEQEFVNNNAQDYQWIGLNDRTIEGDFRWSDGHPMQFENWRPNQPDNFFAAGEDCVVMIWHEKGEWNDVPCNYHLPFTCKKGTVACGEPPVVEHARTFGQKKDRYEINSLVRYQCTEGFVQRHMPTIRCQPSGHWEEPQITCTDPTTYKRRLQKRSSRHPRRSRPSTAH

SEQ ID NO: 82640 - protein, 184 aa, Homo sapiens
  MOD_RES (1)..(1): Any amino acid
XGKLFSPSKEAELTFRQHLNSISMQSDFFLPKPRKLRNRHLRKPLVVQRTLLPRPSENQSHNVCSFSILSNSSVTGAIDLAATSAGILSGNPLPALDTEGLSGISPLSSDEVTGAISGQDSTGTHQDGDTLPTVGGSSVLSLSELPKAPLQNGLSIPLSSSESSSTRLSPPDVSALLDISLPGP

SEQ ID NO: 82641 - protein, 459 aa, Homo sapiens
MAAPCEGQAFAVGVEKNWGAVVRSPEGTPQKIRQLIDEGIAPEEGGVDAKDTSATSQSVNGSPQAEQPSLESTSKEAFFSRVETFSSLKWAGKPFELSPLVCAKYGWVTVECDMLKCSSCQAFLCASLQPAFDFDRYKQRCAELKKALCTAHEKFCFWPDSPSPDRFGMLPLDEPAILVSEFLDRFQSLCHLDLQLPSLRPEDLKTMCLTEDKISLLLHLLEDELDHRTDERKTTIKLGSDIQVHVTACILSVCGWACSSPIPGLEGRPERLPLVPESPRRMMTRSQDATFSPGSEQAEKSPGPIVSRTRSWDSSSPVDRPEPEAASPTTRTRPVTRSMGTGDTPGLEVPSSPLRKAKRARLCSSSSSDTSSRSFFDPTSQHRDWCPWVNITLGKESRENGGTEPDASAPAEPGWKAVLTILLAHKQSSQPAETDSMSLSEKSRKVFRIFRQWESLCSC

SEQ ID NO: 82642 - protein, 278 aa, Homo sapiens
MVNTVSFKRKPHTNGDAPSHRNGKSKWSFLFSLTDLKSIKQNKEGMGWSYLVFCLKDDVVLPALHFHQGDSKLLIESLEKYVVLCESPQDKRTLLVNCQNKSLSQSFENLLDEPAYGLIQKIKKDPYTATMIGFSKVTNYIFDSLRGSDPSTHQRPPSEMADFLSDAIPGLKINQQEEPGFEVITRIDLGERPVVQRREPVSLEEWTKNIDSEGRILNVDNMKQMIFRGGLSHALRKQAWKFLLGYFPWDSTKEERTQLQKQKTDEYFRMKLQWKSIS

SEQ ID NO: 82643 - protein, 150 aa, Homo sapiens
MPWPLLLLLAVSGAQTTRPCFPGCQCEVETFGLFDSFSLTRVDCSGLGPHIMPVPIPLDTAHLDLSSNRLEMVNESVLAGPGYTTLAGLDLSHNLLTSISPTAFSRLRYLESLDLSHNGLTALPAESFTSSPLSDVNLSHNQLREVSVSA

SEQ ID NO: 82644 - protein, 74 aa, Homo sapiens
MEGAHASLSLEDEVSGAGSRQRPLEGKGGETPAAEEPGSLKNYAVFATRDVSAAPEKEEEEAEGPLRAQDLRES

SEQ ID NO: 82645 - protein, 87 aa, Homo sapiens
MELIQDTSRPPLEYVKGVPLIKYFAEALGPLQSFQARPDDLLINTYPKSGTTWVSQILDMIYQGGDLEKCNRAPIYVRVPFLEGWRL

SEQ ID NO: 82646 - protein, 61 aa, Homo sapiens
MKRKQKRFLQMTLLFTVALIFLPNVGLWSLYKDKHLVKSAEPGEQQVSATQRKITQGLVRQ

SEQ ID NO: 82647 - protein, 145 aa, Homo sapiens
MLVHDYDDERTLEEEEMMDEGKNFSSEIEDLEKEGTMPLEDLLAFYGYEPTIPAVANSSANSSPSELADELPDMTLDKEEIAKDLLSGDDEETQSSADDLTPSVTSHETSDFFPRPLRSNTACDGDKESEVEDVETDSGNSPEDL

SEQ ID NO: 82648 - protein, 834 aa, Homo sapiens
MGLPEPGPLRLLALLLLLLLLLLLQLQHLAAAAADPLLGGQGPAKDCEKDQFQCRNERCIPSVWRCDEDDDCLDHSDEDDCPKKTCADSDFTCDNGHCIHERWKCDGEEECPDGSDESEATCTKQVCPAEKLSCGPTSHKCVPASWRCDGEKDCEGGADEAGCATSLGTCRGDEFQCGDGTCVLAIKHCNQEQDCPDGSDEAGCLQGLNECLHNNGGCSHICTDLKIGFECTCPAGFQLLDQKTCGDIDECKDPDACSQICVNYKGYFKCECYPGYEMDLLTKNCKAAAGKSPSLIFTNRHEVRRIDLVKRNYSRLIPMLKNVVALDVEVATNRIYWCDLSYRKIYSAYMDKASDPKEQEVLIDEQLHSPEGLAVDWVHKHIYWTDSGNKTISVATVDGGRRRTLFSRNLSEPRAIAVDPLRGFMYWSDWGDQAKIEKSGLNGVDRQTLVSDNIEWPNGITLDLLSQRLYWVDSKLHQLSSIDFSGGNRKTLISSTDFLSHPFGIAVFEDKVFWTDLENEAIFSANRLNGLEISILAENLNNPHDIVIFHELKQPRAPDACELSVQPNGGCEYLCLPAPQISSHSPKYTCACPDTMWLGPDMKRCYRAPQSTSTTTLASTMTRTVPATTRAPGTTVHRSTYQNHSTETPSLTAAVPSSVSVPRAPSISPSTLSPATSNHSQHYANEDSKMGSTVTAAVIGIIVPIVVIALLCMSGYLIWRNWKRKNTKSMNFDNPVYRKTTEEEDEDELHIGRTAQIGHVYPAAISSFDRPLWAEPCLGETREPEDPAPALKELFVLPGEPRSQLHQLPKNPLSELPVVKSKRVALSLEDDGLP

SEQ ID NO: 82649 - protein, 928 aa, Homo sapiens
MRYRLAWLLHPALPSTFRSVLGARLPPPERLCGFQKKTYSKMNNPAIKRIGNHITKSPEDKREYRGLELANGIKVLLISDPTTDKSSAALDVHIGSLSDPPNIAGLSHFCEHMLFLGTKKYPKENEYSQFLSEHAGSSNAFTSGEHTNYYFDVSHEHLEGALDRFAQFFLCPLFDESCKDREVNAVDSEHEKNVMNDAWRLFQLEKATGNPKHPFSKFGTGNKYTLETRPNQEGIDVRQELLKFHSAYYSSNLMAVCVLGRESLDDLTNLVVKLFSEVENKNVPLPEFPEHPFQEEHLKQLYKIVPIKDIRNLYVTFPIPDLQKYYKSNPGHYLGHLIGHEGPGSLLSELKSKGWVNTLVGGQKEGARGFMFFIINVDLTEEGLLHVEDIILHMFQYIQKLRAEGPQEWVFQECKDLNAVAFRFKDKERPRGYTSKIAGILHYYPLEEVLTAEYLLEEFRPDLIEMVLDKLRPENVRVAIVSKSFEGKTDRTEEWYGTQYKQEAIPDEVIKKWQNADLNGKFKLPTKNEFIPTNFEILPLEKEATPYPALIKDTAMSKLWFKQDDKFFLPKACLNFEFFSPFAYVDPLHCNMAYLYLELLKDSLNEYAYAAELAGLSYDLQNTIYGMYLSVKGYNDKQPILLKKIIEKMATFEIDEKRFEIIKEAYMRSLNNFRAEQPHQHAMYYLRLLMTEVAWTKDELKEALDDVTLPRLKAFIPQLLSRLHIEALLHGNITKQAALGIMQMVEDTLIEHAHTKPLLPSQLVRYREVQLPDRGWFVYQQRNEVHNNCGIEIYYQTDMQSTSENMFLELFCQIISEPCFNTLRTKEQLDNTEVAYLKTLTKEDIIKFYKEMLAVDAPRRHKVSVHVLAREMDSCPVVGEFPCQNDINLSQAPALPQPEVIQNMTEFKRGLPLFPLVKPHINFMAAKL

SEQ ID NO: 82650 - protein, 734 aa, Homo sapiens
MKQSPALAPEERCRRAGSPKPVLRADDNNMGNGCSQKLATANLLRFLLLVLIPCICALVLLLVILLSYVGTLQKVYFKSNGSEPLVTDGEIQGSDVILTNTIYNQSTVVSTAHPDQHVPAWTTDASLPGDQSHRNTSACMNITHSQCQMLPYHATLTPLLSVVRNMEMEKFLKFFTYLHRLSCYQHIMLFGCTLAFPECIIDGDDSHGLLPCRSFCEAAKEGCESVLGMVNYSWPDFLRCSQFRNQTESSNVSRICFSPQQENGKQLLCGRGENFLCASGICIPGKLQCNGYNDCDDWSDEAHCNCSENLFHCHTGKCLNYSLVCDGYDDCGDLSDEQNCACHSQGLVECRNGQCIPSTFQCDGDEDCKDGSDEENCSVIQTSCQEGDQRCLYNPCLDSCGGSSLCDPNNSLNNCSQCEPITLELCMNLPYNSTSYPNYFGHRTQKEASISWESSLFPALVQTNCYKYLMFFSCTILVPKCDVNTGEHIPPCRALCEHSKERCESVLGIVGLQWPEDTDCSQFPEENSDNQTCLMPDEYVEECSPSHFKCRSGQCVLASRRCDGQADCDDDSDEENCGCKERDLWECPSNKQCLKHTVICDGFPDCPDYMDEKNCSFCQDDELECANHACVSRDLWCDGEADCSDSSDEWDCGELLVSAICCTLSCLSATEAEWILNYFLDFTDQVHLFCFTVIKADSADLCVLFPTHRKFPHEATSLFEISILYGKTFGFKML

SEQ ID NO: 82651 - protein, 239 aa, Homo sapiens
  MOD_RES (1)..(1): Any amino acid
XHRCGLGDHPLRRPRHLLWPEKPLPFAPRGLDGGGATAIPKPSGDQRAPPLPPLHLPRGGPTAFEAYKEKMKELSVLSLICSCFYTQPHPNTVYQYGDMEVKQLDKRASGQSFEVILKSPSDLSPESPMLSSPPKKKDTSLEELQKRLEAAEERRKTQEAQVLKQLAERREHEREVLHKALEENNNFSRQAEEKLNYKMELSKEIREAHLAALRERLREKELHAAEVRRNKEQREEMSG

SEQ ID NO: 82652 - protein, 148 aa, Homo sapiens
  MOD_RES (1)..(1): Any amino acid
XLGRQGSPKILEHLESRLRALGLSFVRLLLSEIFPSKLSLLPEVDVWVQVACPRLSIDWGTAFPKPLLTPYEAAVALRDISWQQPYPMDFYAGSSLGPWTVNHGQDRRPHAPGRPARGKVQEGSARPPSAVACEDCSCRDEKVAPLAP

SEQ ID NO: 82653 - protein, 153 aa, Homo sapiens
MVLELPKRWGKNSEFEGGKSTVNCSTTPVAERFFTSSTSLTLKHAAWYPSEILDPHVVLLTSDNVIRIYSLREPQTPTNVIILSEAEEESLVLNKGRAYTASLGETAVAFDFGPLAAVPKTLFGQNGKDEVVAYPLYILYENGETFLTYISLL

SEQ ID NO: 82654 - protein, 58 aa, Homo sapiens
  MOD_RES (1)..(1): Any amino acid
XKQDTKSPRPLIQELSDEDPSGQLLMPPTCQRDAAPLTSSGDRDSDFLAASSPAAKCI

SEQ ID NO: 82655 - protein, 167 aa, Homo sapiens
  MOD_RES (1)..(1): Any amino acid
XATEASAVEQTAESCEVQEMLKVARAEKDLLELSCNELRQELLKANGEIKHVSSLLAKVEKDYSYLKEICDHQAEQLSRTSLKLQEKASESDAEIKDMKETIFELEDQVEQHRAVKLHNNQLISELESSVIKLEEQKSDLERQLKTLTKQMKKDSPALAMIGSRSHL

SEQ ID NO: 82656 - protein, 37 aa, Homo sapiens
MRRWGRRRRISPSGESELSGCVVASRKPVALAAWLTN

SEQ ID NO: 82657 - protein, 384 aa, Homo sapiens
MAKPTSKDSGLKEKFKILLGLGTPRPNPRSAEGKQTEFIITAEILRELSMECGLNNRIRMIGQICEVAKTKKFEEHAVEALWKAVADLLQPERPLEARHAVLALLKAIVQGQGERLGVLRALFFKVIKDYPSNEDLHERLEVFKALTDNGRHITYLEEELADFVLQWMDVGLSSEFLLVLVNLVKFNSCYLDEYIARMVQMICLLCVRTASSVDIEVSLQVLDAVVCYNCLPAESLPLFIVTLCRTINVKELCEPCWKLMRNLLGTHLGHSAIYNMCHLMEDRAYMEDAPLLRGAVFFVGMALWGAHRLYSLRNSPTSVLPSFYQAMACPNEVVSYEIVLSITRLIKKYRKELQVVAWDILLNIIERLLQQLQWRSSTFHRRQV

SEQ ID NO: 82658 - protein, 40 aa, Homo sapiens
MERGKMAEAESLETAAEHERILREIESTDTACIGPTLRIK

SEQ ID NO: 82659 - protein, 1655 aa, Homo sapiens
MELMFAEWEDGERFSFEDSDRFEEDSLCSFISEAESLCQNWRGWRKQSAGPNSPTGGGGGGGSGGTRMRDGLVIPLVELSAKQVAFHIPFEVVEKVYPPVPEQLQLRIAFWSFPENEEDIRLYSCLANGSADEFQRGDQLFRMRAVKDPLQIGFHLSATVVPPQMVPPKGAYNVAVMFDRCRVTSCSCTCGAGAKWCTHVVALCLFRIHNASAVCLRAPVSESLSRLQRDQLQKFAQYLISELPQQILPTAQRLLDELLSSQSTAINTVCGAPDPTAGPSASDQSTWYLDESTLTDNIKKTLHKFCGPSPVVFSDVNSMYLSSTEPPAAAEWACLLRPLRGREPEGVWNLLSIVREMFKRRDSNAAPLLEILTDQCLTYEQITGWWYSVRTSASHSSASGHTGRSNGQSEVAAHACASMCDEMVTLWRLAVLDPALSPQRRRELCTQLRQWQLKVIENVKRGQHKKTLERLFPGFRPAVEACYFNWEEAYPLPGVTYSGTDRKLALCWARALPSRPGASRSGGLEESRDRPRPLPTEPAVRPKEPGTKRKGLGEGVPSSQRGPRRLSAEGGDKALHKMGPGGGKAKALGGAGSGSKGSAGGGSKRRLSSEDSSLEPDLAEMSLDDSSLALGAEASTFGGFPESPPPCPLHGGSRGPSTFLPEPPDTYEEDGGVYFSEGPEPPTASVGPPGLLPGDVCTQDDLPSTDESGNGLPKTKEAAPAVGEEDDDYQAYYLNAQDGAGGEEEKAEGGAGEEHDLFAGLKPLEQESRMEVLFACAEALHAHGYSSEASRLTVELAQDLLANPPDLKVEPPPAKGKKNKVSTSRQTWVATNTLSKAAFLLTVLSERPEHHNLAFRVGMFALELQRPPASTKALEVKLAYQESEVAALLKKIPLGPSEMSTMRCRAEELREGTLCDYRPVLPLMLASFIFDVLCAPGSRPPSRNWNSETPGDEELGFEAAVAALGMKTTVSEAEHPLLCEGTRREKGDLALALMITYKDDQAKLKKILDKLLDRESQTHKPQTLSSFYSSSRPTTASQRSPSKHGGPSAPGALQPLTSGSAGPAQPGSVAGAGPGPTEGFTEKNVPESSPHSPCEGLPSEAALTPRPEGKVPSRLALGSRGGYNGRGWGSPGRPKKKHTGMASIDSSAPETTSDSSPTLSRRPLRGGWAPTSWGRGQDSDSISSSSSDSLGSSSSSGSRRASASGGARAKTVEVGRYKGRRPESHAPHVPNQPSEAAAHFYFELAKTVLIKAGGNSSTSIFTHPSSSGGHQGPHRNLHLCAFEIGLYALGLHNFVSPNWLSRTYSSHVSWITGQAMEIGSAALTILVECWDGHLTPPEVASLADRASRARDSNMVRAAAELALSCLPHAHALNPNEIQRALVQCKEQDNLMLEKACMAVEEAAKVHPYHTEPGLPLPTSVACELWGQGTVSSVHPASTFPAIQGASLPALTTQPSPLVSGGFPPPEEETHSQPVNPHSLHHLHAAYRVGMLALEMLGRRAHNDHPNNFSRSPPYTDDVKWLLGLAAKLGVNYVHQFCVGAAKGVLSPFVLQEIVMETLQRLSPAHAHNHLRAPAFHQLVQRCQQAYMQYIHHRLIHLTPADYDDFVNAIRSARSAFCLTPMGMMQFNDILQNLKRSKQTKELWQRVSLEMATFSP

SEQ ID NO: 82660 - protein, 62 aa, Homo sapiens
DSLLTRCLEKLQPAYQVTLPGQEPIVKKGRICPIDITLAQRASNKKITKLRLSLRNMPVVPC

SEQ ID NO: 82661 - protein, 187 aa, Homo sapiens
MLLSAGRTIKLWVLETKEVYRHFTGHATPVSSLMFTTIRPPNESQPFDGITGLYFLSGAVHDRLLNVWQVRSENKEKSAVMSFTVTDEPVYIDLTLSENKEEPVKLAVVCRDGQVHLFEHILNGYCKKPLTSNCTIQIATPGKGKKSTPKPIPILAAGFCSDKMSLLLVYGSWFQPTIERVALNSRE

SEQ ID NO: 82662 - protein, 91 aa, Homo sapiens
MSNNGADLTFGYISCFVAILLFGSNFVPLKKFDTGDGMFLQWVLCAAIWLVALVVNLILHCPKFWPFAMLGGCIWATGNIAVVPIIKTIGL

SEQ ID NO: 82663 - protein, 475 aa, Homo sapiens
LHPGSAAAVHPVQQHTSSAAAAAAAAAAAAAMLNPGQQQPYFPSPAPGQAPGPAAAAPAQVQAAAAATVKAHHHQHSHHPQQQLDIEPDRPIGYGAFGVVWSVTDPRDGKRVALKKMPNVFQNLVSCKRVFRELKMLCFFKHDNVLSALDILQPPHIDYFEEIYVVTELMQSDLHKIIVSPQPLSSDHVKVFLYQILRGLKYLHSAGILHRDIKPGNLLVNSNCVLKICDFGLARVEELDESRHMTQEVVTQYYRAPEILMGSRHYSNAIDIWSVGCIFAELLGRRILFQAQSPIQQLDLITDLLGTPSLEAMRTACEGAKAHILRGPHKQPSLPVLYTLSSQATHEAVHLLCRMLVFDPSKRISAKDALAHPYLDEGRLRYHTCMCKCCFSTSTGRVYTSDFEPVTNPKFDDTFEKNLSSVRQVKEIIHQFILEQQKGNRVPLCINPQSAAFKSFISSTVAQPSEMPPSPLVWE

SEQ ID NO: 82664 - protein, 114 aa, Homo sapiens
MPNSEPASLLELFNSIATQGELVRSLKAGNASKDEIDSAVKMLVSLKMSYKAAAGEDYKADCPPGNPAPTSNHGPDATEAEEDFVDPWTVQTSSAKGIDYDKLIVRFGSSKIDK

SEQ ID NO: 82665 - protein, 122 aa, Homo sapiens
MTMTANKNSSITHGAGGTKAPRGTLSRSQSVSPPPVLSPPRSPIYPLSDSETSACRYPSHSSSRVLLKDRHPPAPSPQNPQDPSPDTSPPTCPFKTASFGYLDRSPSACKRDAQKESVQGAA

SEQ ID NO: 82666 - protein, 1669 aa, Homo sapiens
MSKIRRKVTVENTKTISDSTSRRPSVFERLGPSTGSTAETQCRNWLKTGNCLYGNTCRFVHGPSPRGKGYSSNYRRSPERPTGDLRERMKNKRQDVDTEPQKRNTEESSSPVRKESSRGRHREKEDIKITKERTPESEEENVEWETNRDDSDNGDINYDYVHELSLEMKRQKIQRELMKLEQENMEKREEIIIKKEVSPEVVRSKLSPSPSLRKSSKSPKRKSSPKSSSASKKDRKTSAVSSPLLDQQRNSKTNQSKKKGPRTPSPPPPIPEDIALGKKYKEKYKVKDRIEEKTRDGKDRGRDFERQREKRDKPRSTSPAGQHHSPISSRHHSSSSQSGSSIQRHSPSPRRKRTPSPSYQRTLTPPLRRSASPYPSHSLSSPQRKQSPPRHRSPMREKGRHDHERTSQSHDRRHERREDTRGKRDREKDSREEREYEQDQSSSRDHRDDREPRDGRDRRDARDTRDRRELRDSRDMRDSREMRDYSRDTKESRDPRDSRSTRDAHDYRDREGRDTHRKEDTYPEESRSYGRNHLREESSRTEIRNESRNESRSEIRNDRMGRSRGRVPELPEKGSRGSRGSQIDSHSSNSNYHDSWETRSSYPERDRYPERDNRDQARDSSFERRHGERDRRDNRERDQRPSSPIRHQGRNDELERDERREERRVDRVDDRRDERARERDRERERDRERERERERERDREREKERELERERAREREREREKERDRERDRDRDHDRERERERERDREKEREREREERERERERERERERERERERERARERDKERERQRDWEDKDKGRDDRREKREEIREDRNPRDGHDERKSKKRYRNEGSPSPRQSPKRRREHSPDSDAYNSGDDKNEKHRLLSQVVRPQESRSLSPSHLTEDRQGRWKEEDRKPERKESSRRYEEQELKEKVSSVDKQREQTEILESSRMRAQDIIGHHQSEDRETSDRAHDENKKKAKIQKKPIKKKKEDDVGIERGNIETTSEDGQVFSPKKGQKKKSIEKKRKKSKGDSDISDEEAAQQSKKKRGPRTPPITTKEELVEMCNGKNGILEDSQKKEDTAFSDWSDEDVPDRTEVTEAEHTATATTPGSTPSPLSSLLPPPPPVATATATTVPATLAATTAAAATSFSTSAITISTSATPTNTTNNTFANEDSHRKCHRTRVEKVETPHVTIEDAQHRKPMDQKRSSSLGSNRSNRSHTSGRLRSPSNDSAHRSGDDQSGRKRVLHSGSRDREKTKSLEITGERKSRIDQLKRGEPSRSTSSDRQDSRSHSSRRSSPESDRQVHSRSGSFDSRDRLQERDRYEHDRERERERRDTRQREWDRDADKDWPRNRDRDRLRERERERERDKRRDLDRERERLISDSVERDRDRDRDRTFESSQIESVKRCEAKLEGEHERDLESTSRDSLALDKERMDKDLGSVQGFEETNKSERTESLEAGDDESKLDDAHSLGSGAGEGYEPISDDELDEILAGDAEKREDQQDEEKMPDPLDVIDVDWSGLMPKHPKEPREPGAALLKFTPGAVMLRVGISKKLAGSELFAKVKETCQRLLEKPKDADNLFEHELGALNMAALLRKEERASLLSNLGPCCKALCFRRDSAIRKQLVKNEKGTIKQAYTSAPMVDNELLRLSLRLFKRKTTCHAPGHEKTEDNKLSQSSIQQELCVS

SEQ ID NO: 82667 - protein, 114 aa, Homo sapiens
  MOD_RES (1)..(1): Any amino acid
XMVYGLDQSKMNCDRVFNVFCLYGNVEKICDELGVKRPSSVKVFSGKSERSSSGLLEWESKSDALETLGFLNHYQMKNPSIDLMDMASDILQPKGDDVARISWYLRDIITRYQE

SEQ ID NO: 82668 - protein, 44 aa, Homo sapiens
MPGGGPQGAPAAAGGGGVSHRAAGIAYHLQRAFGGGGWHGGRAT

SEQ ID NO: 82669 - protein, 1142 aa, Homo sapiens
MHPPETTTKMASVRFMVTPTKIDDIPGLSDTSPDLSSRSSSRVRFSSRESVPETSRSEPMSEMSGATTSLATVALDPPSDRTSHPQDVIEDLSQNSITGEHSQLLDDGHKKARNAYLNNSNYEEGDEYFDKNLALFEEEMDTRPKVSSLLNRMANYTNLTQGAKEHEEAENITEGKKKPTKTPQMGTFMGVYLPCLQNIFGVILFLRLTWVVGTAGVLQAFAIVLICCCCTMLTAISMSAIATNGVVPAGGSYFMISRALGPEFGGAVGLCFYLGTTFAAAMYILGAIEIFLVYIVPRAAIFHSDDALKESAAMLNNMRVYGTAFLVLMVLVVFIGVRYVNKFASLFLACVIVSILAIYAGAIKSSFAPPHFPVCMLGNRTLSSRHIDVCSKTKEINNMTVPSKLWGFFCNSSQFFNATCDEYFVHNNVTSIQGIPGLASGIITENLWSNYLPKGEIIEKPSAKSSDVLGSLNHEYVLVDITTSFTLLVGIFFPSVTGIMAGSNRSGDLKDAQKSIPIGTILAILTTSFVYLSNVVLFGACIEGVVLRDKFGDAVKGNLVVGTLSWPSPWVIVIGSFFSTCGAGLQSLTGAPRLLQAIAKDNIIPFLRVFGHSKANGEPTWALLLTAAIAELGILIASLDLVAPILSMFFLMCYLFVNLACALQTLLRTPNWRPRFRYYHWALSFMGMSICLALMFISSWYYAIVAMVIAGMIYKYIEYQGAEKEWGDGIRGLSLSAARFALLRLEEGPPHTKNWRPQLLVLLKLDEDLHVKHPRLLTFASQLKAGKGLTIVGSVIVGNFLENYGEALAAEQTIKHLMEAEKVKGFCQLVVAAKLREGISHLIQSCGLGGMKHNTVVMGWPNGWRQSEDARAWKTFIGTVRVTTAAHLALLVAKNISFFPSNVEQFSEGNIDVWWIVHDGGMLMLLPFLLKQHKVWRKCSIRIFTVAQLEDNSIQMKKDLATFLYHLRIEAEVEVVEMHDSDISAYTYERTLMMEQRSQMLRHMRLSKTERDREAQLVKDRNSMLRLTSIGSDEDEETETYQEKVHMTWTKDKYMASRGQKAKSMEGFQDLLNMRPDQSNVRRMHTAVKLNEVIVNKSHEAKLVLLNMPGPPRNPEGDENCSVTMEIVFGKKLQAGCRGSHL

SEQ ID NO: 82670 - protein, 213 aa, Homo sapiens
MSEQSICQARAAVMVYDDANKKWVPAGGSTGFSRVHIYHHTGNNTFRVVGRKIQDHQVVINCAIPKGLKYNQATQTFHQWRDARQVYGLNFGSKEDANVFASAMMHALEVLNSQETAQSKVTATQDSTNLRCIFCGPTLPRQNSQLPAQVQNGPSQEELEIQRRQLQEQQRQKELERERLERERMERERLERERLERERLERERLEQEQLERE

SEQ ID NO: 82671 - protein, 322 aa, Homo sapiens
MFIKMSQPKKRAETLMFSEHAVISMRDGKLTLMFRVGNLRNSHMVSAQIRCKLLKSRQTPEGEFLPLDQLELDVGFSTGADQLFLVSPLTICHVIDAKSPFYDLSQRSMQTEQFEIVVILEGIVETTGMTCQARTSYTEDEVLWGHRFFPVISLEEGFFKVDYSQFHATFEVPTPPYSVKEQEEMLLMSSPLIAPAITNSKERHNSVECLDGLDDITTKLPSKLQKITGREDFPKKLLRMSSTTSEKAYSLGDLPMKLQRISSVPGNSEEKLVSKTTKMLSDPMSQSVADLPPKLQKMAGGAARMEGNLPAKLRKMNSDRFT

SEQ ID NO: 82672 - protein, 37 aa, Homo sapiens
MWRLKKSLVSTCAYITQKVEFAGIRAQAGELWVKNEK

SEQ ID NO: 82673 - protein, 57 aa, Homo sapiens
MKVEKDHLAKPFFPAIYKEFEELHKMVKKMCQDYLSSSGLCSQETLEINNDKVAESL

SEQ ID NO: 82674 - protein, 488 aa, Homo sapiens
MAQAEEETRSRSAIVIKAGGRYLGKKVQFRKPAPGATDAVPSRKRATPINLASAIRKSGASAVSGGSGVSQRPFRDRVLHLLALRPYRKAELLLRLQKDGLTQADKDALDGLLQQVANMSAKDGTCTLQDCMYKDVQKDWPGYSEGDQQLLKRVLVRKLCQPQSTGSLLGDPAASSPPGERGRSASPPQKRLQPPDFIDPLANKKPRISHFTQRAQPAVNGKLGVPNGREALLPTPGPPASTDTLSSSTHLPPRLEPPRAHDPLADVSNDLGHSGRDCEHGEAAAPAPTVRLGLPLLTDCAQPSRPHGSPSRSKPKKKSKKHKDKERAAEDKPRAQLPDCAPATHATPGAPADTPGLNGTCSVSSVPTSTSETPDYLLKYAAISSSEQRQSYKNDFNAEYSEYRDLHARIERITRRFTQLDAQLRQLSQGSEEYETTRGQILQEYRKIKKTNTNYSQEKHRCEYLHSKLAHIKRLIAEYDQRQLQAWP

SEQ ID NO: 82675 - protein, 81 aa, Homo sapiens
MKYGNHCYYFSVEEKDWNSSLEFCLARDSHLLVITDNQEMSLLQVFLSEAFCWIGLRNNSGWRWEDGSPLNFSRISSNSFV

SEQ ID NO: 82676 - protein, 89 aa, Homo sapiens
MPKRKAAGQGDMRQEPKRRSARLSAMLVPVTPEVKPKRTSSSRKMKTKSDMMEENIDTSAQAVAETKQEAVVEEDYNENAKNGEAKITE

SEQ ID NO: 82677 - protein, 175 aa, Homo sapiens
  MOD_RES (1)..(1): Any amino acid
XAAVGAGGSTAAPGPGAVSAGALEPGTASAAHRRLKYISLAVLVVQNASLILSIRYARTLPGDRFFATTAVVMAEVLKGLTCLLLLFAQKRGNVKHLVLFLHEAVLVQYVDTLKLAVPSLIYTLQNNLQYVAISNLPAATFQVAHQGEGFLAAGIEDIGLASFSLLALGPAGTKL

SEQ ID NO: 82678 - protein, 141 aa, Homo sapiens
MERKNPSRESPRRLSAKVGKGTEMKKVARQLGMAAAESDKDSGFSDGSSECLSSAEQMESEDMLSALGWSREDRPRQNSKTAKNAFPTLSPMVVMKNVLVKQGSSSSQLQSWTVQPSFEVISAQPQLLFLHPPVPSPVSPC

SEQ ID NO: 82679 - protein, 63 aa, Homo sapiens
MPGVARLPLLLGLLLLPRPGRPLDLADYTYDLAEEDDSEPLNYKDPCKAAAFLGDIALDEEDL

SEQ ID NO: 82680 - protein, 392 aa, Homo sapiens
MPFLHGFRRIIFEYQPLVDAILGSLGIQDPERQESLDRPSYVASEESRILVLTELLERKAHSPFYQEGVSNALLKMAELGLTRAADVLLRHGANLNFEDPVTYYTALHIAVLRNQPDMVELLVHHGADVNRRDRIHESSPLDLASEEPERLPCLQRLLDLGADVNAADKHGADVKATTKDGDTVFTCIIFLLGETVGGDKEEAQMINRFCFQVTRLLLAHGADPSECPAHESLTHICLKSFKLHFPLLRFLLESGAAYNCSLHGASCWSGFHIIFERLCSHPGCTEDESHADLLRKAETVLDLMVTNSQKLQLPENFDIHPVGSLAEKIQALHFSLRQLESYPPPLKHLCRVAIRLYLQPWPVDVKVKALPLPDRLKWYLLSEHSGSVEDDI

SEQ ID NO: 82681 - protein, 263 aa, Homo sapiens
  MOD_RES (1)..(1): Any amino acid
XAVEAAAEPVTVVAAVGPKAKDEEEEEEEPLPPCEAVRWAPVGAVAEARPGATAFLEEATAEEPGAAPGSPPDSPGRTLRRLRAERRRLDSALLALSSHFAQVQFRLRQVVRGAPAEQQRLLRELEDFAFRGCPHVLGYEGPGDPASDEGDGLPGDRPWLRGEDQSEQEKQERLETQREKQKELILQLKTQLDDLETFAYQEGSYDSLPQSVVLERQRMKWEAPCRQVVDTVSARPVGRQEMAAAEQAAAERLQETAKQRQRM

SEQ ID NO: 82682 - protein, 706 aa, Homo sapiens [sequence omitted]

SEQ ID NO: 82683 - protein, 202 aa, Homo sapiens
  MOD_RES (1)..(1): Any amino acid
XDDQRPVCLVCRESQEHQTHAMAPIDEAFESYREKLLKSQRNLVAKMKKVMHLQDVEVKNATQWKDKIKSQRMRISTEFSKLHNFLVEEEDLFLQRLNKEEEETKKKLNENTLKLNQTIASLKKLILEVGEKSQAPTLELLQNPKEVLTRSEIQDVNYSLEAVKVKTVCQIPLMKEMLKRFQGIEKGDNVAEESDLSGRLHP

SEQ ID NO: 82684 - protein, 124 aa, Homo sapiens
MTTAMADERRDQLEQYLQNVTMDPNVLRSDVFVEFLKLAQLNTFDIATKKAYLDIFLPNEQSIRIEIITSDTAERVLEVVSHKIGLCRELLGYFGLFLIRFGKEGKLSVVKKLADFELPYVSLG

SEQ ID NO: 82685 - protein, 131 aa, Homo sapiens
MNTSPGTVGSDPVILATAGYDHTVRFWQAHSGICTRTVQHQDSQVNALEVTPDRSMIAAAGYQHIRMYDLNSNNPNPIISYDGVNKNIASVGFHEDGRWMYTGGEDCTARIWDLRQSSSWVTRAGLSTSGT

SEQ ID NO: 82686 - protein, 299 aa, Homo sapiens
MTTLSPENSLSARQSASFILVKRKPPIDKTEWDSFFDESGHLAKSRDFICVNILERGLHPFVRTEAWKFLTGYFSWQSSQDERLTVDSMRRKNYKALCQMYEKIQPLLENLHRNFTETRNNIEYQQGFHEMMMLFQLMVEHDHETFWLFQFFLQKTEHSCVINIGVAKNLDMLSTLITFLDPVFAEHLKGKGAGAVQSLFPWFCFCFQRAFKSFDDVWRLWEVLLTGKPCRNFQVLVAYSMLQMVREQVLQESMGGDDILLACNNLIDLDADELISAACVVYAELIQKDVPQTLKDFFL

SEQ ID NO: 82687 - protein, 85 aa, Homo sapiens
MNGANLTAQDDRGCTPLHLAATHGHSFTLQIMLRSGVDPSVTDKREWRPVHYAAFHGRLGCLQLLVKWGCSIEDVDYNGNLPEPP

SEQ ID NO: 82688 - protein, 126 aa, Homo sapiens
MGPLTFMDVAIEFSLEEWQCLDTAQRNVYRHVMLENYRNLVFLDLITCLEQGKEPWNMKRHEMVVAKHSAVAFTFDLSGLNILSFQSILPFVSALYVMGNRNQCLQKHLEARNKDLCVLVLPKTFG

SEQ ID NO: 82689 - protein, 200 aa, Homo sapiens
MFRRLRQFRQAQPTPQYRFRKRDKVMFYGRKIMRKVTTLPNTLVENTALPRQRARKRTKVLSLAKRILRFKKEYPALQPKEPPPSLLEADLTEFDVKNSHLPSEVLYMLKNVRVLGHFEKPLFLELCKHIVFVQLQEGEHVFQPREPDPSICVVQDGRLEVCIQDTVPAALMAPQRCRPVAPLPWAGLSLRQAPRSQPQT

SEQ ID NO: 82690 - protein, 2819 aa, Homo sapiens
MVVSAGPWSSEKAEMNILEINETLRPQLAEKKQQFRNLKEKCFLTQLAGFLANQQKKYKYEECKDLIKFMLRNERQFKEEKLAEQLKQAEELRQYKVLVHSQERELTQLREKLREGRDASRSLYEHLQALLTPYEPDKSQGQDLQEQLAEGCRLAQHLVQKLSPENDEDEDEDVQVEEAEKVLESSAPREVQKAEESKVPEDSLEECAITCSNSHGPCDSNQPHKNIKITFEEDEVNSTLVVDRESSHDECQDALNILPVPGPTSSATNVSMVVSAGPLSSEKAEMNILEINEKLRPQLAEKKQQFRNLKEKCFLTQLSGFLANQQKKYKYEECKDLIKFMLRNERQFKEEKLAEQLKQAEELRQYKVLVHAQERELTQLREKLREGRDASRSLNEHLQALLTPDEPDKSQGQDLQEQLAEGCRLAQHLVQKLSPENDNDDDEDVQVEVAEKVQKSSAPREMQKAEEKEVPEDSLEECAITYSNSHGSYDSNQPHRKTKITFEEDKVDSTLIGSSSHVEWEDAVHIIPENESDDEEEEEKGPVSPRNLQESEEEEVPQESWDEGYSTLSIPPEMLASYQSYSSTFHSLEEQQVCMAVDIGRHRWDQVKKEDQEATGPRLSRELLDEKGPEVLQDSLDRCYSTPSGCLELTDSCQPYRSAFYVLEQQRVGLAVDMDEIEKYQEVEEDQDPSCPRLSRELLDEKEPEVLQDSLDRCYSTPSGYLELPDLGQPYSSAVYSLEEQYLGLALDVDRIKKDEEEEEDQDPPCPRLSRELLEVVEPEVLQDSLDRCYSTPSSCLEQPDSCQPYGSSFYALEEKHVGFSLDVGEIEKKGKGKKRRGRRSKKERRRGRKEGEEDQNPPCPRLSRELLDEKGPEVLQDSLDRCYSTPSGCLELTDSCQPYRSAFYVLEQQRVGLAVDMDEIEKYQEVEEDQDPSCPRLSRELLDEKEPEVLQDSLDRCYSTPSGYLELPDLGQPYSSAVYSLEEQYLGLALDVDRIKKDEEEEEDQDPPCPRLSRELLEVVEPEVLQDSLDRCYSTPSSCLEQPDSCQPYGSSFYALEEKHVGFSLDVGEIEKKGKGKKRRGRRSKKERRRGRKEGEEDQNPPCPRLSRELLDEKGPEVLQDSLDRCYSTPSGCLELTDSCQPYRSAFYVLEQQRVGLAVDMDEIEKYQEVEEDQDPSCPRLSRELLDEKEPEVLQDSLDRCYSTPSGYLELPDLGQPYSSAVYSLEEQYLGLALDVDRIKKDEEEEEDQDPPCPRLSRELLEVVEPEVLQDSLDRCYSTPSSCLEQPDSCQPYGSSFYALEEKHVGFSLDVGEIEKKGKGKKRRGRRSKKERRRGRKEGEEDQNPPCPRLSRELLHEKGPEVLQDSLDRCYSTPSGCLELTDSCQPYRSAFYILEQQRVGLAVDMDEIEKYKEVEEDQDPSCPRLSRELLDEKEPEVLQDSLDRCYSTPSGYLELPDLGQPYSSAVYSLEEQYLGLALDVDRFKKDEEEEEDQDPPCPRLSRELLEVVEPEVLQDSLDRCYSTPSSCLEQPDSCQPYGSSFYALEEKHVGFSLDVGEIEKKGKGKKRRGRRSKKERRRGRKEGEEDQNPPCPRLSRELLDEKGPEVLQDSLDRCYSTPSGCLELTDSCQPYRSAFYVLEQQRVGLAVDMDEIEKYKEVEEDQDPSCPRLSRELLDEKEPEVLQDSLDRCYSTPSGYLELPDLGQPYSSAVYSLEEQYLGLALDVDRIKKDQEEEEDQGPPCPRLSRELLEVVEPEVLQDSLDRCYSTPSSCLEQPDSCQPYGSSFYALEEKHVGFSLDVGEIEKKGKGKKRRGRRSKKERRRGRKEGEEDQNPPCPRLSRELLDEKGPEVLQDSLDRCYSTPSGCLELTDSCQPYRSAFYVLEQQRVGLAVDMDEIEKYKEVEEDQDPSCPRLSRELLDEKEPEVLQDSLDRCYSTPSGYLELPDLGQPYSSAVYSLEEQYLGLALDVDRIKKDQEEEEDQGPPCPRLSRELLEVVEPEVLQDSLDRCYSTPSSCLEQPDSCQPYGSSFYALEEKHVGFSLDVGEIEKKGKGKKRRGRRSKKERRRGRKEGEEDQNPPCPRLSRELLDEKGPEVLQDSLDRCYSTPSGCLELTDSCQPYRSAFYVLEQQRVGLAVDMDEIEKYKEVEEDQDPSCPRLSRELLDEKEPEVLQDSLDRCYSTPSGYLELPDLGQPYSSAVYSLEEQYLGLALDVDRIKKDQEEEEDQGPPCPRLSRELLEVVEPEVLQDSLDRCYSTPSSCLEQPDSCQPYGSSFYALEEKHVGFSLDVGEIEKKGKGKKRRGRRSKKERRRGRKEGEEDQNPPCPRLSRELLDEKGPEVLQDSLDRCYSTPSGCLELTDSCQPYRSAFYVLEQQRVGLAVDMDEIEKYKEVEEDQDPSCPRLSRELLDEKEPEVLQDSLDRCYSTPSGYLELPDLGQPYSSAVYSLEEQYLGLALDVDRIKKDQEEEEDQGPPCPRLSRELLEVVEPEVLQDSLDRCYSTPSSCLEQPDSCQPYGSSFYALEEKHVGFSLDVGEIEKKGKGKKRRGRRSKKERRRGRKEGEEDQNPPCPRLSRELLDEKGPEVLQDSLDRCYSTPSGCLELTDSCQPYRSAFYVLEQQRVGLAVDMDEIEKYQEVEEDQDPSCPRLSRELLDEKDPEVLQDSLDRCYSTPSGYLELPDLGQPYSSAVYSLEEQYLGLALDVDKIEKKGKGKKRRGRRSKKERRRGRKEGEEDQNPPCPRLNGVLMEVEEREVLQDSLDRCYSTPSMYFELPDSFQHYRSVFYSFEEQHISFALYVDNRFFTLTVTSLHLVFQMGVIFPQ

SEQ ID NO: 82691 - protein, 127 aa, Homo sapiens
MEYDEKLARFRQAHLNPFNKQSGPRQHEQGPGEEVPDVTPEEALPELPPGEPEFRCPERVMDLGLSEDHFSRPVQLRQAIEECKQVILELPEQSEKQKDAVVRLIHLRLKLQELKDPNEDEPNIRVL

SEQ ID NO: 82692 - protein, 292 aa, Homo sapiens
MITLLPRGSDQDPPEEDDGGATPVQDERDSGSDGEDDVNEQHSGSDTGSVERHSENETSDREDGLPKGHHVTDSENDEPLNLNASDSESEELHRQKDSDSESEERAEPPASDSENEDVNQHGSDSESEETRKLPGSDSENEELLNGHASDSENEDVGKHPASDSEIEELQKSPASDSETEDALKPQISDSESEEPPRHQASDSENEEPPKPRMSDSESEELPKPQVSDSESEEPPRHQASDSENEELPKPRISDSESEDPPRHQASDSENEELPKPRISDSESEDPPRNQAS

SEQ ID NO: 82693 - protein, 139 aa, Homo sapiens
MRPADLPPRPMEESPASSSAPTETEEPGSSAEVMEEVTTCSFNSPLFRQEDDRGITYRIPALLYIPPTHTFLAFAEKRSTRRDEDALHLVLRRGLRIGQLVQRWGFAMLPRLVSNSWTQAILKCWDYSMSHCAWPFGGP

SEQ ID NO: 82694 - protein, 488 aa, Homo sapiens
MKRSLQALYCQLLSFLLILALTEALAFAIQEPSPRESLQVLPSGTPPGTMVTAPHSSTRHTSVVMLTPNPDGPPSQAAAPMATPTPRAEGHPPTHTISTIAATVTAPHSESSLSTGPAPAAMATTSSKPEGRPRGQAAPTILLTKPPGATSRPTTAPPRTTTRRPPRPPGSSRKGAGNSSRPVPPAPGGHSRSKEGQRGRNPSSTPLGQKRPLGKIFQIYKGNFTGSVEPEPSTLTPRTPLWGYSSSPQPQTVAATTVPSNTSWAPTTTSLGPAKDKPGLRRAAQGGGSTFTSQGGTPDATAASGAPVSPQAAPVPSQRPHHGDPQDGPSHSDSWLTVTPGTSRPLSTSSGVFTAATGPTPAAFDTSVSAPSQGIPQGASTTPQAPTHPSRVSESTISGAKEETVATLTMTDRVPSPLSTVVSTATGNFLNRLVPAGTWKPGTAGNISHVAEGDKPQHRATICLSKMDIAWVILAISVPISSCSDPIT

SEQ ID NO: 82695 - protein, 69 aa, Homo sapiens
  MOD_RES (1)..(1): Any amino acid
XMLGAWLSTEGKTVEVPFKGDVEHTIRDILGGIRSTCTYVGAAKLKELSRRTTFIRVTQQVNPIFSEAC

SEQ ID NO: 82696 - protein, 286 aa, Homo sapiens
  MOD_RES (1)..(1): Any amino acid
XRHLNPDTELKRYFGARAILGEQRPRQRQRVYPKCTWLTTPKSTWPRYSKPGLSMRLLESKKGLSFFAFEHSEEYQQAQHKFLVAVESMEPNNIVLSDACRFQEDQEMARDLVERALYSMECAFHPLFSLTSGACRLDYRRPENRSFYLALYKQMSFLEKRGCPRTALEYCKLILSLEPDEDPLCMLLLIDHLALRARNYEYLIRLFQEWEAHRNLSQLPNFAFSVPLAYFLLSQQTDLPECEQSSARQKASLLIQQALTMFPGVLLPLLESCSVRPDASVSSHRF

SEQ ID NO: 82697 - protein, 75 aa, Homo sapiens
  MOD_RES (1)..(1): Any amino acid
XVVYQDGFYGAEIYGGYAAYRYAQPAAAAAAYSDSYGRVYAAADPYHHTIGPAATYSIGTMASLCRGGYSRFTPY

SEQ ID NO: 82698 - protein, 78 aa, Homo sapiens
  MOD_RES (1)..(1): Any amino acid
XCHTSQLTPGTPPPSALHACTTGEEILAQYLQQQQPGVMSSSHLLLTPCRVAPPYPHLFSSCSPPGMVLDGSPKGAGM

SEQ ID NO: 82699 - protein, 131 aa, Homo sapiens
MNPGFDLSRRNPQEDFELIQRIGSGTYGDVYKARNVNTGELAAIKVIKLEPGEDFAVVQQEIIMMKDCKHPNIVAYFGSYLRRDKLWICMEFCGGGSLQDIYHGWLQKLQLLRGRGVTINSVISGQWESLP

SEQ ID NO: 82700 - protein, 186 aa, Homo sapiens
MGSVTVRYFCYGCLFTSATWTVLLFVYFNFSEVTQPLKNVPVKGSGPHGPSPKKFYPRFTRGPSRVLEPQFKANKIDDVIDSRVEDPEEGHLKFSSELGMIFNERDQELRDLGYQKHAFNMLISDRLGYHRDVPDTRNAACKEKFYPPDLPAASVVICFYNEAFSALLRTVHSVIDRTPAHLLHEI

SEQ ID NO: 82701 - protein, 889 aa, Homo sapiens
MRALAVLSVTLVMACTEAFFPFISRGKELLWGKPEESRVSSVLEESKRLVDTAMYATMQRNLKKRGILSPAQLLSFSKLPEPTSGVIARAAEIMETSIQAMKRKVNLKTQQSQHPTDALSEDLLSIIANMSGCLPYMLPPKCPNTCLANKYRPITGACNNRDHPRWGASNTALARWLPPVYEDGFSQPRGWNPGFLYNGFPLPPVREVTRHVIQVSNEVVTDDDRYSDLLMAWGQYIDHDIAFTPQSTSKAAFGGGSDCQMTCENQNPCFPIQLPEEARPAAGTACLPFYRSSAACGTGDQGALFGNLSTANPRQQMNGLTSFLDASTVYGSSPALERQLRNWTSAEGLLRVHARLRDSGRAYLPFVPPRAPAACAPEPGIPGETRGPCFLAGDGRASEVPSLTALHTLWLREHNRLAAALKALNAHWSADAVYQEARKVVGALHQIITLRDYIPRILGPEAFQQYVGPYEGYDSTANPTVSNVFSTAAFRFGHATIHPLVRRLDASFQEHPDLPGLWLHQAFFSPWTLLRGGGLDPLIRGLLARPAKLQVQDQLMNEELTERLFVLSNSSTLDLASINLQRGRDHGLPGYNEWREFCGLPRLETPADLSTAIASRSVADKILDLYKHPDNIDVWLGGLAENFLPRARTGPLFACLIGKQMKALRDGDWFWWENSHVFTDAQRRELEKHSLSRVICDNTGLTRVPMDAFQVGKFPEDFESCDSITGMNLEAWRETFPQDDKCGFPESVENGDFVHCEESGRRVLVYSCRHGYELQGREQLTCTQEGWDFQPPLCKDSGRLPRVTWISMSLAALLIGGFAGLTSTVICRWTRTGTKSTLPISETGGGTPELRCGKHQAVGTSPQRAAAQDSEQESAGMEGRDTHRLPRAL

SEQ ID NO: 82702 - protein, 87 aa, Homo sapiens
MSPVLHFYVRPSGHEGAAPGHTRRKLQGKLPELQGVETELCYNVNWTAEALPSAEETKKLMWLFGCPLLLDDVARESWLLPGSNDLL

SEQ ID NO: 82703 - protein, 22 aa, Homo sapiens
MNGEEEFFDAVTGFDSDNSSGE

SEQ ID NO: 82704 - protein, 56 aa, Homo sapiens
TVGTGLYWLIFFKAQKSVSVLLPMPIQEERFVTYVGCAFALKVFYYMSFSGTTIFA

SEQ ID NO: 82705 - protein, 112 aa, Homo sapiens
  MOD_RES (1)..(1): Any amino acid
XMGSEDWIALVKAAAAAAAKNKTGSKPRTSANSNKDKDKDERKWFKVPSKKEETSTCIATPDVEKKEDLPTSSETFDKLSYMCSVESRTSCRERSKDGLSTAREHIIKQEEK

SEQ ID NO: 82706 - protein, 159 aa, Homo sapiens
MSGAGVAAGTRPPSSPTPGSRRRRQRPSVGVQSLRPQSPQLRQSDPQKRNLDLEKSLQFLQQQHSEMLAKLHEEIEHLKRENKGEPARGPRPALPPQAHSTLPLPQHRNTAINSSTRLGSGGTQDDLRYKLIMNQTSQKKGENWALQFLMGCSCHPGEP

SEQ ID NO: 82707 - protein, 13 aa, Homo sapiens
MSAEASARPLRVG

SEQ ID NO: 82708 - protein, 123 aa, Homo sapiens
MAVSAGSARTSPSSDKVQKDKAELISGPRQDSRIGKLLGFEWTDLSSWRRLVTLLNRPTDPASLAVFRFLFGFLMVLDIPQERGLSSLDRKYLDGLDVCRFPLLDALRPLPLDWMETGPVVIS

SEQ ID NO: 82709 - protein, 222 aa, Homo sapiens
VWDPFLNTSAAYIPAHTYACSFEAGEGSCASLELFFIGFIIMGFFFYILITRLTPIKYDVNLILTAVTGSVGGMFLVAVWWRFGILSICMLCVGLVLGFLISSVTFFTPLGNLKIFHDDGVFWVTFSCIAILIPVVFMGCLRILNILTCGVIGSYSVVLAIDSYWSTSLSYITLNVLKRALNKDFHRAFTNVPFQTNDFIILAVWGMLAVSGITLQIRRERG

SEQ ID NO: 82710 - protein, 23 aa, Homo sapiens
MSIMEMQAMEVNTSASEILYSAP

SEQ ID NO: 82711 - protein, 1018 aa, Homo sapiens [sequence omitted]

SEQ ID NO: 82712 - protein, 33 aa, Homo sapiens
MGQKGSSGLFRAVSAFGVVGFVRFLEGYYIVLI

SEQ ID NO: 82713 - protein, 459 aa, Homo sapiens
MTDCLVIKHFLRKIIMVHPKVRFHFSVKVNGILSTEIFGVENEPTLNLGNGIALLVDSQHYVRPNFGTIESHCSRIHPVLGHPVMLFIPEDVAGMDLLGELILTPAAALCPSPKVSSNQLNRISSQLHIFLYGPLGLPLILSTWEQPMTTFFKDTSSLVDWKKYHLCMIPNLDLNLDRDLVLPDVSYQVESSEEDQSQTMDPQGQTLLLFLFVDFHSAFPVQQMEIWGVYTLLTTHLNAILVESHSVVQGSIQFTVDKVLEQHHQAAKAQQKLQASLSVAVNSIMSILTGSTRSSFRKMCLQTLQAADTQEFRTKLHKVFREITQHQFLHHCSCEVKQQLTLEKKDSAQGTEDAPDNSSLELLADTSGQAENKRLKRGSPRIEEMRALRSARAPSPSEAAPRRPEATAAPLTPRGREHREAHGRALAPGRASLGSRLEDVLWLQEVSNLSEWLSPSPGP

SEQ ID NO: 82714 - protein, 1962 aa, Homo sapiens
MANFLLPRGTSSFRRFTRESLAAIEKRMAEKQARGSTTLQESREGLPEEEAPRPQLDLQASKKLPDLYGNPPQELIGEPLEDLDPFYSTQKTFIVLNKGKTIFRFSATNALYVLSPFHPIRRAAVKILVHSLFNMLIMCTILTNCVFMAQHDPPPWTKYVEYTFTAIYTFESLVKILARGFCLHAFTFLRDPWNWLDFSVIIMAYVSENIKLGNLSALRTFRVLRALKTISVIPGLKTIVGALIQSVKKLADVMVLTVFCLSVFALIGLQLFMGNLRHKCVRNFTALNGTNGSVEADGLVWESLDLYLSDPENYLLKNGTSDVLLCGNSSDAGTCPEGYRCLKAGENPDHGYTSFDSFAWAFLALFRLMTQDCWERLYQQTLRSAGKIYMIFFMLVIFLGSFYLVNLILAVVAMAYEEQNQATIAETEEKEKRFQEAMEMLKKEHEALTIRGVDTVSRSSLEMSPLAPVNSHERRSKRRKRMSSGTEECGEDRLPKSDSEDGPRAMNHLSLTRGLSRTSMKPRSSRGSIFTFRRRDLGSEADFADDENSTAGESESHHTSLLVPWPLRRTSAQGQPSPGTSAPGHALHGKKNSTVDCNGVVSLLGAGDPEATSPGSHLLRPVMLEHPPDTTTPSEEPGGPQMLTSQAPCVDGFEEPGARQRALSAVSVLTSALEELEESRHKCPPCWNRLAQRYLIWECCPLWMSIKQGVKLVVMDPFTDLTITMCIVLNTLFMALEHYNMTSEFEEMLQVGNLVFTGIFTAEMTFKIIALDPYYYFQQGWNIFDSIIVILSLMELGLSRMSNLSVLRSFRLLRVFKLAKSWPTLNTLIKIIGNSVGALGNLTLVLAIIVFIFAVVGMQLFGKNYSELRDSDSGLLPRWHMMDFFHAFLIIFRILCGEWIETMWDCMEVSGQSLCLLVFLLVMVIGNLVVLNLFLALLLSSFSADNLTAPDEDREMNNLQLALARIQRGLRFVKRTTWDFCCGLLRQRPQKPAALAAQGQLPSCIATPYSPPPPETEKVPPTRKETRFEEGEQPGQGTPGDPEPVCVPIAVAESDTDDQEEDEENSLGTEEESSKQTPEDSCSEGSTADMTNTAELLEQIPDLGQDVKDPEDCFTEGCVRRCPCCAVDTTQAPGKVWWRLRKTCYHIVEHSWFETFIIFMILLSSGALAFEDIYLEERKTIKVLLEYADKMFTYVFVLEMLLKWVAYGFKKYFTNAWCWLDFLIVDVSLVSLVANTLGFAEMGPIKSLRTLRALRPLRALSRFEGMRVVVNALVGAIPSIMNVLLVCLIFWLIFSIMGVNLFAGKFGRCINQTEGDLPLNYTIVNNKSQCESLNLTGELYWTKVKVNFDNVGAGYLALLQVATFKGWMDIMYAAVDSRGYEEQPQWEYNLYMYIYFVIFIIFGSFFTLNLFIGVIIDNFNQQKKKLGGQDIFMTEEQKKYYNAMKKLGSKKPQKPIPRPLNKYQGFIFDIVTKQAFDVTIMFLICLNMVTMMVETDDQSPEKINILAKINLLFVAIFTGECIVKLAALRHYYFTNSWNIFDFVVVILSIVGTVLSDIIQKYFFSPTLFRVIRLARIGRILRLIRGAKGIRTLLFALMMSLPALFNIGLLLFLVMFIYSIFGMANFAYVKWEAGIDDMFNFQTFANSMLCLFQITTSAGWDGLLSPILNTGPPYCDPTLPNSNGSRGDCGSPAVGILFFTTYIIISFLIVVNMYIAIILENFSVATEESTEPLSEDDFDMFYEIWEKFDPEATQFIEYSVLSDFADALSEPLRIAKPNQISLINMDLPMVSGDRIHCMDILFAFTKRVLGESGEMDALKIQMEEKFMAANPSKISYEPITTTLRRKHEEVSAMVIQRAFRRHLLQRSLKHASFLFRQQAGSGLSEEDAPEREGLIAYVMSENFSRPLGPPSSSSISSTSFPPSYDSVTRATSDNLQVRGSDYSHSEDLADFPPSPDRDRESIV

SEQ ID NO: 82715 - protein, 220 aa, Homo sapiens
KIEDELEMTMVCHRPEGLEQLEAQTNFTKRELQVLYRGFKNECPSGVVNEDTFKQIYAQFFPHGALPCLEGSPCVEFLPPSPALLFCLVDASTYAHYLFNAFDTTQTGSVKFEDFVTALSILLRGTVHEKLRWTFNLYDINKDGYINKEEMMDIVKAIYDMMGKYTYPVLKEDTPRQHVDVFFQKMDKNKDGIVTLDEFLESCQEDDNIMRSLQLFQNVM

SEQ ID NO: 82716 - protein, 180 aa, Homo sapiens
MHGLCSNSSKTSWRVCEAIKNEMNVMLKSSPVDLVTATDQKVEKMLISSIKEKYPSHSFIGEESVAAGEKSILTDNPTWIIDPIDGTTNFVHRFPFVAVSIGFAVNKKIEFGVVYSCVEGKMYTARKGKGAFCNGQKLQVSQQEDITKSLLVTELGSSRTPETVRMVLSNMEKLFCIPVH

SEQ ID NO: 82717 - protein, 934 aa, Homo sapiens
MEERRPHLDARPRNSHTNHRGPVDGELPPRARNQANNPPANALRGGASHPGRHPRANNHPAAYWQREERFRAMGRNPHQGRRNQEGHASDEARDQRHDQENDTRWRNGNQDCRNRRPPWSNDNFQQWRTPHQKPTEQPQQAKKLGYKFLESLLQKDPSEVVITLATSLGLKELLSHSSMKSNFLELICQVLRKACSSKMDRQSVLHVLGILKNSKFLKVCLPAYVVGMITEPIPDIRNQYPEHISNIISLLQDLVSVFPASSVQETSMLVSLLPTSLNALRASGVDIEEETEKNLEKVQTIIEHLQEKRREGTLRVDTYTLVQPEAEDHVESYRTMPIYPTYNEVHLDERPFLRPNIISGKYDSTAIYLDTHFRLLREDFVRPLREGILELLQSFEDQGLRKRKFDDIRIYFDTRIITPMCSSSGIVYKVQFDTKPLKFVRWQNSKRLLYGSLVCMSKDNFETFLFATVSNREQEDLCRGIVQLCFNEQSQQLLAEVQPSDSFLMVETTAYFEAYRHVLEGLQEVQEEDVPFQRNIVECNSHVKEPRYLLMGGRYDFTPLIENPSATGEFLRNVEGLRHPRINVLDPGQWPSKEALKLDDSQMEALQFALTRELAIIQGPPGTGKTYVGLKIVQALLTNESVWQISLQKFPILVVCYTNHALDQFLEGIYNCQKTSIVRVGGRSNSEILKQFTLRELRNKREFRRNLPMHLRRAYMSIMTQMKESEQELHEGAKTLECTMRGVLREQYLQKYISPQHWESLMNGPVQDSEWICFQHWKHSMMLEWLGLGVGSFTQSVSPAGPENTAQAEGDEEEEGEEESSLIEIAEEADLIQADRVIEEEEVVRPQRRKKEESGADQELAKMLLAMRLDHCGTGTAAGQEQATGEWQTQRNQKKKMKKRVKDELRKLNTMTAAEANEIEDVWQLDLSSRWQLY

SEQ ID NO: 82718 - protein, 258 aa, Homo sapiens
MAVFVVLLALVAGVLGNEFSILKSPGSVVFRNGNWPIPGERIPDVAALSMGFSVKEDLSWPGLAVGNLFHRPRATVMVMVKGVNKLALPPGSVISYPLENAVPFSLDSVANSIHSLFSEETPVVLQLAPSEERVYMVGKANSVFEDLSVTLRQLRNRLFQENSVLSSLPLNSLSRNNEVDLLFLSELQVLHDISSLLSRHKHLAKDHSPDLYSLELAGLDEIGKRYGEDSEQFRDASKILVDALQKMTCTVFMVGMQW

SEQ ID NO: 82719 - protein, 563 aa, Homo sapiens
LTHELVMFRDVAIDVSQEEWECLNPAQRNLYKEVMLENYSNLVSLGLSVSKPAVISSLEQGKEPWMVVREETGRWCPGTWKTWGFHNNFLDNNEATDINADLASRDEPQKLSPKRDIYETELSQWVNMEEFKSHSPERSIFSAIWEGNCHFEQHQGQEEGYFRQLMINHENMPIFSQHTLLTQEFYDREKISECKKCRKIFSYHLFFSHHKRTHSKELSECKECTEIVNTPCLFKQQTIQNGDKCNECKECWKAFVHCSQLKHLRIHNGEKRYECNECGKAFNYGSELTLHQRIHTGEKPYECKECGKAFRQRSQLTQHQRLHTGEKPYECKQCGKAFIRGFQLTEHLRLHTGEKPYECKECGKTFRHRSHLTIHQRIHTGEKPYECRECGKAFSYHSSFSHHQKIHSGKKPYECHECGKAFCDGLQLTLHQRIHTGEKPYECKECGKTFRQCSHLKRHQRIHTGEKPHECMICGKAFRLHSHLIQHQRIHTGEKPYECKECGKAFSYHSSFSHHQRIHSGKKPYQCGKAFNHRLQLNLHQTLHTGEKPVRFPLLPPHPSLAS

SEQ ID NO: 82720 - protein, 142 aa, Homo sapiens
  MOD_RES (1)..(1): Any amino acid
XVWSLSGSDWLGTIAAGDISGELIAAILPDMALNPINVKRPVERRFPIYKADLIPYQDSPEGPDHSSASSGVPNPPKARTYTETVNHHYLLFQDTDLGSFHDLLRREPMLRMQEGEGHSQLCLDRLQLEAIHKGNHHVCPRG

SEQ ID NO: 82721 - protein, 88 aa, Homo sapiens
CNPTIDLQGELELATAKSDMNRHLHEYMEMCSMKRGLDVQMETCRRLIKGSADRNSPSPSSVASSDSGSTDEIQDEFEREADVEPMVS

SEQ ID NO: 82722 - protein, 256 aa, Homo sapiens
MAERQEEQRGSPPLRAEGKADAEVKLILYHWTHSFSSQKVRLVIAEKALKCEEHDKEHPGQIGNTESELKKLAEENPDLQEAYIAKQKRLKSKLLDHDNVKYLKKILDELEKVLDQVETELQRRNEETPEEGQQPWLCGESFTLADVSLAVTLHRLKFLGFARRNWGNGKRPNLETYYERVLKRKTFNKVLGHVNNILISAVLPTAFRVAKKRAPKVLGTTLVVGLLAGVGYFAFMLFRKRLGSMILAFRPRPNYF

SEQ ID NO: 82723 - protein, 794 aa, Homo sapiens
MTLQGRADLSGNQGNAAGRLATVHEPVVTQWAVHPPAPAHPSLLDKMEKAPPQPQHEGLKSKEHLPQQPAEGKTASRRVPRLRAVVESQAFKNILVDEMDMMHARAATLIQANWRGYWLRQKLISQMMAAKAIQEAWRRFNKRHILHSSKSLVKKTRAEEGDIPYHAPQQVRFQHPEENRLLSPPIMVNKETQFPSCDNLVLCRPQSSPLLQPPAAQGTPEPCVQGPHAARVRGLAFLPHQTVTIRFPCPVSLDAKCQPCLLTRTIRSTCLVHIEGDSVKTNASSQRHPPCLSQRPLAAPLTKASSQGHLPTELTKTPSLAHLDTCLSKMHSQTHLATGAVKVQSQAPLATCLTKTQSRGQPITDITTCLIPAHQAADLSSNTHSQVLLTGSKVSNHACQRLGGLSAPPWAKPEDRQTQPQPHGHVPGKTTQGGPCPAACEVQGMLVPPMAPTGHSTCNVESWGDNGATRAQPSMPGQAVPCQEDTGPADAGVVGGQSWNRAWEPARGAASWDTWRNKAVVPPRRSGEPMVSMQAAEEIRILAVITIQAGVRGYLARRRIRLWHRGAMVIQATWRGYRVRRNLAHLCRATTTIQSAWRGYSTRRDQARHWQMLHPVTWVELGSRAGVMSDRSWFQDGRARTVSDHRCFQSCQAHACSVCHSLSSRIGSPPSVVMLVGSSPRTCHTCGRTQPTRVVQGMGQGTEGPGAVSWASAYQLAALSPRQPHRQDKAATAIQSAWRGFKIRQQMRQQQMAAKIVQATWRGHHTRSCLKNTEALLGPADPSASSRHMHWPGI

SEQ ID NO: 82724 - protein, 240 aa, Homo sapiens
  MOD_RES (1)..(1): Any amino acid
XKMFKSLDLSLIVEFILMFYRDKPIDWLLDHILWVKVCNPEKDAKHCDRQKANLRIRFKPSLFQHVGTHSSLAGKIQKLKDKDFGKQALRKEHVNPPAEVSTSLKTYQHFTLEKAYLREDFFWAFTPAAGDFIRFRFFQPLRLERGNIEHPEDKLFNTSVEVLPFDNPQSDKEALQEGRTATLRYPRSPDGYLQIGSFYKGVAEGEVDPAFGPLEALRLSIQTDSPVWVILSEIFLKKAD

SEQ ID NO: 82725 - protein, 163 aa, Homo sapiens
MNLSESLLRGIYAYGFEKPSAIQQRAILPCIKGYDVIAQAQSGTGKTATFAISILQQIELDLKATQALVLAPTRELAQQIQKVVMALGDYMGASCHACIGGTNVRAEVQKLQMEAPHIIVGTPGRVFDMLNRRYLSPKYIKMFVLDEADEMLSRGFKDQIYDI

SEQ ID NO: 82726 - protein, 48 aa, Homo sapiens
MEDDSMDLIDSDELLDPEDLKKPDPASLRAASCGEGKKRKACKNCTCG

SEQ ID NO: 82727 - protein, 718 aa, Homo sapiens
MASEGTNIPSPVVRQIDKQFLICSICLERYKNPKVLPCLHTFCERCLQNYIPAHSLTLSCPVCRQTSILPEKGVAALQNNFFITNLMDVLQRTPGSNAEESSILETVTAVAAGKPLSCPNHDGNVMEFYCQSCETAMCRECTEGEHAEHPTVPLKDVVEQHKASLQVQLDAVNKRLPEIDSALQFISEIIHQLTNQKASIVDDIHSTFDELQKTLNVRKSVLLMELEVNYGLKHKVLQSQLDTLLQGQESIKSCSNFTAQALNHGTETEVLLVKKQMSEKLNELADQDFPLHPRENDQLDFIVETEGLKKSIHNLGTILTTNAVASETVATGEGLRQTIIGQPMSVTITTKDKDGELCKTGNAYLTAELSTPDGSVADGEILDNKNGTYEFLYTVQKEGDFTLSLRLYDQHIRGSPFKLKVIRSADVSPTTEGVKRRVKSPGSGHVKQKAVKRPASMYSTGKRKENPIEDDLIFRVGTKGRNKGEFTNLQGVAASTNGKILIADSNNQCVQIFSNDGQFKSRFGIRGRSPGQLQRPTGVAVHPSGDIIIADYDNKWVSIFSSDGKFKTKIGSGKLMGPKGVSVDRNGHIIVVDNKACCVFIFQPNGKIVTRFGSRGNGDRQFAGPHFAAVNSNNEIIITDFHNHSVKVFNQEGEFMLKFGSNGEGNGQFNAPTGVAVDSNGNIIVADWGNSRIQLLLPGTVAHACNPSTLGGQGGWVA

SEQ ID NO: 82728 - protein, 114 aa, Homo sapiens
MSLKPFTYPFPETRFLHAGPNVYKFKIRYGKSIRGEEIENKEVITQELEVGKEAYDFWKSYSLRMHPHSGFNYFLQTESQPPLDNLASSCYISFAKELYVFPWEFKACILSQFS

SEQ ID NO: 82729 - protein, 61 aa, Homo sapiens
MAETNNECSIKVLCRFRPLNQAEILRGDKFIPIFQGDDSVVIGRLSPQRDWINILGEAICF

SEQ ID NO: 82730 - protein, 696 aa, Homo sapiens
MDHRKARVLPAGHYCPSLGIWASQVGSVRSSVPPSIRNPAMVNEARGNSSLNPCLEGSASSGSESSKDSSRCSTPGLDPERHERLREKMRRRLESGDKWFSLEFFPPRTAEGAVNLISRFDRMAAGGPLYIDVTWHPAGDPGSDKETSSMMIASTAVNYCGLETILHMTCCRQRLEEITGHLHKAKQLGLKNIMALRGDPIGDQWEEEEGGFNYAVDLVKHIRSEFGDYFDICVAGYPKGHPEAGSFEADLKHLKEKVSAGADFIITQLFFEADTFFRFVKACTDMGITCPIVPGIFPIQGYHSLRQLVKLSKLEVPQEIKDVIEPIKDNDAAIRNYGIELAVSLCQELLASGLVPGLHFYTLNREMATTEVLKRLGMWTEDPRRPLPWALSAHPKRREEDVRPIFWASRPKSYIYRTQEWDEFPNGRWGNSSSPAFGELKDYYLFYLKSKSPKEELLKMWGEELTSEESVFEVFVLYLSGEPNRNGHKVTCLPWNDEPLAAETSLLKEELLRVNRQGILTINSQPNINGKPSSDPIVGWGPSGGYVFQKAYLEFFTSRETAEALLQVLKKYELRVNYHLVNVKGENITNAPELQPNAVTWGIFPGREIIQPTVVDPVSFMFWKDEAFALWIERWGKLYEEESPSRTIIQYIHDNYFLVNLVDNDFPLDNCLWQVVEDTLELLNRPTQNARETEAP

SEQ ID NO: 82731 - protein, 138 aa, Homo sapiens
METVVIVAIGVLATIFLASFAALVLVCRQRYCRPRDLLQRYDSKPIVDLIGAMETQSEPSELELDDVVITNPHIEAILENEDWIEDASGLMSHCIAILKICHTLTEKLVAMTMGSGAKMKTSASVSDIIVVAKRISPR

SEQ ID NO: 82732 - protein, 208 aa, Homo sapiens
MTGPCIRQLSLQILFPLCVAVDVWSTLADFCNILTAVNQSEVPLYKDPDDDLTLLILEEDRLLSGFVPLLAAPQDPCYVEKTSDKVIAADCKRVTVLKYFLEALCGQEEPLLAFKGGKYVSVAPVPDTMGKEMGSQEGTRLEDEEEDVVIEDFEEDSEAEGSGGEDDIRELRAKKLALARKIAEQQRRQEKIQAVLEDHSQMRQMELE

SEQ ID NO: 82733 - protein, 146 aa, Homo sapiens
MRGYLVAIFLSAVFLYYVLHCILWGTNVYWVAPVEMKRRNKIQPCLSKPAFASLLRFHQFHPFLCAADFRKIASLYGSDKFDLPYGMRTSAEYFRLALSKLQSCDLFDEFDKNREPRTMRLPPAGQQGLPVASQLFSQSLSEARLL

SEQ ID NO: 82734 - protein, 525 aa, Homo sapiens
MKNKIQVVVLENEGLQQQLKSQRQEETLREQTLLDASEKLKLTYEEKCEIEESQLKFLRNDLAEYQRTCEDLKEQLKHKEFLLAANTCNRVGGLCLKCAQHEAVLSQTHTNVHMQTIERLVKERDDLMSALVSVRSSLADTQQREASAYEQVKQVLQISEEANFEKTKALIQCDQLRKELERQAERLEKELASQQEKRAIEKDMMKKEITKEREYMGSKMLILSQNIAQLEAQVEKVTKEKISAINQLEEIQSQLASREMDVTKVCGEMRYQLNKTNMEKDEAEKEHREFRAKTNRDLEIKDQEIEKLRIELDESKQHLEQEQQKAALAREECLRLTELLGESEHQLHLTRQEKDSIQQSFSKEAKAQALQAQQREQELTQKIQQMEAQHDKTENEQYLLLTSQNTFLTKLKEECCTLAKKLEQISQKTRSEIAQLSQEKRYTYDKLGKLQRRNEELEEQCVQHGRVHETMKQRLRQLDKHSQATAQQLVQLLSKQNQLLLERQSLSEEVDRLRTQLPSMPQSDC

SEQ ID NO: 82735 - protein, 63 aa, Homo sapiens
  MOD_RES (1)..(1): Any amino acid
XSSRSSSGPGPGPASRPWKVMAPLLSTTSRPAPRGTPASTAAATVKKIFGSSVNTSKTMTSIL

SEQ ID NO: 82736 - protein, 106 aa, Homo sapiens
  MOD_RES (1)..(1): Any amino acid
XLKREDKSPIAPEELALVHNLRKMMKNDWHGGAIVSALSQTGSLFKPRKAYLPQELLGKEFESCIQYYLENNWLQHEKAPTEEGKKELLFLSNANPSLLERHCAYL

SEQ ID NO: 82737 - protein, 298 aa, Homo sapiens
MYGQPYRVTLELELPESPVNQDLGMFLVTISCYTRGGRIISTSSRSVMLHYRSDLLQMLDTLVFSSLLLFGFAEQKQLLEVELYADYRENSYVPTTGAIIEIHSKRIQLYGAYLRIHAHFTGLRYLLYNFPMTCAFIGVASNFTFLSVIVLFSYMQWVWGGIWPRHRFSLQVNIRKRDNSRKEVQRRISAHQPGPEGQEESTPQSDVTEDGESPEDPSGTEGQLSEEEKPDQQPLSGEEELEPEASDGSGSWEDAALLTEANLPAPAPASASAPVLETLGSSEPAGGALRQRPTCSSS

SEQ ID NO: 82738 - protein, 145 aa, Homo sapiens
MRDSSRLRLVYADTCFSTIKLKAEDASGREHLITLKLKAKYPAESPDYFVDFPVPFCASWTPQVNSPQSSLISIYSQFLAAIESLKAFWDVMDEIDEKTWVLEPEKPPRSATARRIALGNNVSINIEVDPRHPTMLPECFFLGAD

SEQ ID NO: 82739 - protein, 120 aa, Homo sapiens
MTSQPVPNETIIVLPSNVINFSQAEKPEPTNQGQDSLKKHLHAEIKVIGTIQILCGMMVLSLGIILASASFSPNFTQVTSTLLNSAYPFIGPFFSMVMNFWVVMMSLSSLALYQSPQRKG

SEQ ID NO: 82740 - protein, 231 aa, Homo sapiens
MRGYLVAIFLSAVFLYYVLHCILWGTNVYWVAPVEMKRRNKIQPCLSKPAFASLLRFHQFHPFLCAADFRKIASLYGSDKFDLPYGMRTSAEYFRLALSKLQSCDLFDEFDNIPCKKCVVVGNGGVLKNKTLGEKIDSYDVIIRMNNGPVLGHEEEVGRRTTFRLFYPESVFSDPIHNDPNTTVILTAFKPHDLRWLLELLMGDKINTNGFWKKPALNLIYKPYQIRILDP

SEQ ID NO: 82741 - protein, 83 aa, Homo sapiens
VVDVSKGIVNAVKDPDANGKSFAFVGPSRYLLFHLVKYIFAVAHRLFLPFPLPLFAYRWVARVFEISPFEPWITRDKVERKKV

SEQ ID NO: 82742 - protein, 100 aa, Homo sapiens
MEELSQALASSFSVSQDLNSTAAPHPRLSQYKSKYSSLEQSERRRRLLELQKSKRLDYVNHARRLAEDDWTGMESEEENKKDDEEMDIDTVKKLPKHYAN

SEQ ID NO: 82743 - protein, 46 aa, Homo sapiens
  MOD_RES (1)..(1): Any amino acid
XYLLALKKLTATDVSALFCCNKAFVFLLSWIVLKDRFMGVRIAGKP

SEQ ID NO: 82744 - protein, 147 aa, Homo sapiens
MTVFLEIMGSLPVLYSCFSFRKLWAFTGPGFLMSIAYLDPGNIESDLQSGAVAGFKLLWILLLATLVGLLLQRLAARLGVVTGLHLAEVCHRQYPKVPRVILWLMVELAIIGSDMQEVIGSAIAINLLSVGRIPLWGGVLITIADTF

SEQ ID NO: 82745 - protein, 140 aa, Homo sapiens
  MOD_RES (1)..(1): Any amino acid
XGESLLMALKDVALSSGSACTSASLEPSYVLRAIGTDEDLAHSSIRFGIGRFTTEEEVDYTVEKCIQHVKRLREMSLKVGFNWLPTGLTWPLLLVKEIHLLFYQVCVVSAQHGCGHPFARSPNCGGDHGHSPLLLWIDHS

SEQ ID NO: 82746 - protein, 50 aa, Homo sapiens
ELYEEWLELRNGCLCCSVKDSGLRAIENLMQKKGKFDYILLETTGLADPE

SEQ ID NO: 82747 - protein, 58 aa, Homo sapiens
  MOD_RES (1)..(1): Any amino acid
XTERQQFRDFRDLNKDGHLDGSEDGRLSKAEILGNWNMFVGSQATNYGEDLTRHHDEL

SEQ ID NO: 82748 - protein, 137 aa, Homo sapiens
MSGIALSRLAQERKAWRKDHPFGFVAVPTKNPDGTMNLMNWECAIPGKKGTPWEGGLFKLRMLFKDDYPSSPPKCKFEPPLFHPNVYPSGTVCLSILEEDKDWRPAITIKQILLGIQELLNEPNIQDPAQAEAYTIY

SEQ ID NO: 82749 - protein, 791 aa, Homo sapiens
METPLQFQRGFFPEQPPPPPRSSHLHCQQQQQSQDKPCPPFAPLPHPHHHPHLAHQQPASGGSSPCLRCNSCASSGAPAAGAGDNLSLLLRTSSPGGAFRTRTSSPLSGSSCCCCCCSSRRGSQLNVSELTPSSHASALRQQYAQQSAQQSASASQYHQCHSLQPAASPTGSLGSLGSGPPLSHHHHHPHPAHHQHHQPQARRESNPFTEIAMSSCRYNGGVMRPLSNLSASRRNLHEMDSEAQPLQPPASVGGGGGASSPSAAAAAAAAVSSSAPEIVVSKPEHNNSNNLALYGTGGGGSTGGGGGGGGSGHGSSSGTKSSKKKNQNIGYKLGHRRALFEKRKRLSDYALIFGMFGIVVMVIETELSWGAYDKASLYSLALKCLISLSTIILLGLIIVYHAREIQLFMVDNGADDWRIAMTYERIFFICLEILVCAIHPIPGNYTFTWTARLAFSYAPSTTTADVDIILSIPMFLRLYLIARVMLLHSKLFTDASSRSIGALNKINFNTRFVMKTLMTICPGTVLLVFSISLWIIAAWTVRACERYHDQQDVTSNFLGAMWLISITFLSIGYGDMVPNTYCGKGVCLLTGIMGAGCTALVVAVVARKLELTKAEKHVHNFMMDTQLTKRVKNAAANVLRETWLIYKNTKLVKKIDHAKVRKHQRKFLQAIHQLRSVKMEQRKLNDQANTLVDLAKTQNIMYDMISDLNERSEDFEKRIVTLETKLETLIGSIHALPGLISQTIRQQQRDFIEAQMESYDKHVTYNAERSRSSSRRRRSSSTAPPTSSESS

SEQ ID NO: 82750 - protein, 46 aa, Homo sapiens
  MOD_RES (1)..(1): Any amino acid
XTARSRWRLRNSISAFLFTVTFAWCPPGLSNLTILSCPEMRSCCVA

SEQ ID NO: 82751 - protein, 200 aa, Homo sapiens
MMYSPICLTQDEFHPFIEALLPHVRAIAYTWFNLQARKRKYFKKHEKRMSKDEERAVKDELLSEKPEIKQKWASRLLAKLRKDIRQEYREDFVLTVTGKKHPCCVLSNPDQKGKIRRIDCLRQADKVWRLDLVMVILFKGIPLESTDGERLMKSPHCTNPALCVQPHHITVSVKELDLFLAYYVQEQGKNFFSSNKCIKI

SEQ ID NO: 82752 - protein, 118 aa, Homo sapiens
MRVAVAGCCHGELDKIYETLALAERRGPGPVDLLLCCGDFQAVRNEADLRCMAVPPKYRHMQTFYRYYSGEKKAPVLTLFIGGNHEASNHLQELPYGGWVAPNIYYLAEAAYRYILVS

SEQ ID NO: 82753 - protein, 77 aa, Homo sapiens
  MOD_RES (1)..(1): Any amino acid
XFVSVTTGPWGAVATSAGGEESLKCEDLKVGQYPLWRTPPHGGEGLTLSPWLEYSGTISAHCSLRLPGSVNSPASAS

SEQ ID NO: 82754 - protein, 138 aa, Homo sapiens
MICFSDNTIQSVFCCCCCCSVQKRQMRTQISLSTDEELPEKYTQRRRPWLSQLSNKKQSNTGRVQPSKRKPLPPLPPSEVAEEKIQVKALYDFLPREPCNLALRRAEEYLILEKYNPHWWKARDRLGNEGLIPSNYVT

SEQ ID NO: 82755 - protein, 751 aa, Homo sapiens
MAESDSTDFDLLWYLENLSDKEFQSFKKYLARKILDFKLPQFPLIQMTKEELANVLPISYEGQYIWNMLFSIFSMMRKEDLCRKIIGRRNRNQEACKAVMRRKFMLQWESHTFGKFHYKFFRDVSSDVFYILQLAYDSTSYYSANNLNVFLMGERASGKTIVINLAVLRWIKGEMWQNMISYVVHLTAHEINQMTNSSLAELIAKDWPDGQAPIADILSDPKKLLFILEDLDNIRFELNVNESALCSNSTQKVPIPVLLVSLLKRKMAPGCWFLISSRPTRGNNVKTFLKEVDCCTTLQLSNGKREIYFNSFFKDRQRASAALQLVHEDEILVGLCRVAILCWITCTVLKRQMDKGRDFQLCCQTPTDLHAHFLADALTSEAGLTANQYHLGLLKRLCLLAAGGLFLSTLNFSGEDLRCVGFTEADVSVLQAANILLPSNTHKDRYKFIHLNVQEFCTAIAFLMAVPNYLIPSGSREYKEKREQYSDFNQVFTFIFGLLNANRRKILETSFGYQLPMVDSFKWYSVGYMKHLDRDPEKLTHHMPLFYCLYENREEEFVKTIVDALMEVTVYLQSDKDMMVSLYCLDYCCHLRTLKLSVQRIFQNKEPLIRPTASQMKSLVYWREICSLFYTMESLRELHIFDNDLNGISERILSKALEHSSCKLRTLKLSYVSTASGFEDLLKALARNRSLTYLSINCTSISLNMFSLLHDILHEPTCQISHLRWSFALVAQARVQWHSLSSPQPLTSRFK

SEQ ID NO: 82756 - protein, 60 aa, Homo sapiens
ISLEHEILLHPRYFGPNLLNTVKQKLFTEVEGTCTGKIKTVWGRPENLHFKKMILRHPED

SEQ ID NO: 82757 - protein, 683 aa, Homo sapiens
MLDSCKLKSACNLPFICNKKIINTAGTSNAEVPLADPGMYQLDITLRRGQSLAARDRGGTSDPYVKFKIGGKEVFRSKIIHKNLNPVWEEKACILVDHLREPLYIKVFDYDFGLQDDFMGSAFLDLTQLELNRPTDVTLTLKDPHYPDHDLGIILLSVILTPKEGESRDVFQTQSLRLSDLHRKSHLWRGIVSITLIEGRDLKAMDSNGLSDPYVKFRLGHQKYKSKIMPKTLNPQWREQFDFHLYEERGGVIDITAWDKDAGKRDDFIGRCQVDLSALSREQTHKLELQLEEGEGHLVLLVTLTASATVSISDLSVNSLEDQKEREEILKRYSPLRIFHNLKDVGFLQVKVIRAEGLMAADVTGKSDPFCVVELNNDRLLTHTVYKNLNPEWNKVFTFNIKDIHSVLEVTVYDEDRDRSADFLGKVAIPLLSIQNGEQKAYVLKNKQLTGPTKGVIYLEIDVIFNAVKASLRTLIPKEQKYIEEENRLSKQLLLRNFIRMKRCVMVLVNAAYYVNSCFDWDSPPRSLAAFVLFLFVVWNFELYMIPLVLLLLLTWNYFLIISGKDNRQRDTVVEDMLEDEEEEDDKDDKDSEKKGFINKIYAIQEVCVSVQNILDEVASFGERIKNTFNWTVPFLSWLAIVALCVFTAILYCIPLRYIVLVWGINKFTKKLRSPYAIDNNEL

SEQ ID NO: 82758 - protein, 121 aa, Homo sapiens
MKVELCSFSGYKIYPGHGRRYARTDGKVFQFLNAKCESAFLSKRNPRQINWTVLYRRKHKKGQSEEIQKKRTRRAVKFQRAITGASLADIMAKRNQKPEVRKAQREQAIRHLQRQHLSKRL

SEQ ID NO: 82759 - protein, 171 aa, Homo sapiens
TSSHNSSDDKNRRNSSEERSRPNSGDEKRKLSLSEGKVKKNMGEGKKRVSSGSSERGSKSPLKRAQEQSPRKRGRPPKDEKDLTIPESSTVKGMMAGPMAAFKWQPTASEPVKDADPHFHHFLLSQTEKPAVCYQAITKKLKICEEETGSTSIQAADSTAVNGSITPTDKK

SEQ ID NO: 82760 - protein, 112 aa, Homo sapiens
MCKDSQKPSVPSHGPKTPSCKGVKAPHSSRPRAWKQDLEQSLAAAYVPVVVDSKGQNPDKLRFNFYTSQYSNSLNPFYTLQKPTCGYLYRRDTDHTRKRFDVPPANLVLWRS

SEQ ID NO: 82761 - protein, 123 aa, Homo sapiens
METFPAVAEKVLKEFQVLLQHSPSPIGSTRMLQLMTINMFAVHNSQLKDCFSEECRSVIQEQAAALGLAMFSLLVRRCTCLLKESAKAQLSSPEDQDDQDDIKVSSFVPDLKELLPSVKVWSD

SEQ ID NO: 82762 - protein, 43 aa, Homo sapiens
MALLCLDGVFLSSAENDFVHRIQEELDRFLLQKQLSKVLLFPP

SEQ ID NO: 82763 - protein, 55 aa, Homo sapiens
DVVHPFFLAQKCHTLQSMNNHLEAVLKEKRSLRQRLLKPMCQENLPIEAVYHRLD

SEQ ID NO: 82764 - protein, 479 aa, Homo sapiens
MLCASFLGLGLSVAIVGPTFQDLATNVNRNISSLSFIFVGRALGYLSGSVIGGFLVDVMNYFLLLGGNVLILAIWGDKGAPHMQALHFSFALGAFLAPLLAKLALGPTASAENHTESDFHPALNQSSDADSEALFGVPNDKNLLWAYAVIGTYMFLVSVIFFCLFLKNSSKQEKARASAETFRRAKYHNALLCLLFLFFFFYVGAEVTYGSYVFSFATTHAGMKESEAAGLNSIFWGTFAACRGLAIFFATCLQPGTMIVLSNIGSLTSSLFLVLFDKNPICLWIATSVYGASMATTFPSGVSWIEQYTTIHGKSAAFFVIGASLGEMAIPAVIGILQGKYPDLPVVLYTSLGASIATGILFPVLYKLATSPLDRQRKEDRKSEDQKALLSSSGLNEYEEENEEEDAEKWNEMDFEMIETNDTMRHSIIETSRSSLTEPTAEVYNQYPSNALVFESSPFNTGSAHVKHLPETRTKGTNV

SEQ ID NO: 82765 - protein, 143 aa, Homo sapiens
  MOD_RES (1)..(1): Any amino acid
XIPIVVEQTGRGERAYDIYSRLLRERIVCVMGPIDDSVASLVIAQLLFLQSESNKKPIHMWCGDRGPGHLRHDAVHPQPDLHLVRGPGRQHGLPASRRRHPRHAPLAPQLPYHDPPALRRRPGPSHRHCHPGRGDHEAQEAAL

SEQ ID NO: 82766 - protein, 133 aa, Homo sapiens
MVRAATVGYGILREGGSAVDAVEGAVVALEDDPEFNAGCGSVLNTNGEVEMDASIMDGKDLSAGAVSAVQCIANPIKLARLVMEKTPHCFLTDQGAAQFAAAMGVPEIPGEKLVTERNKKRLEKEKHEKGAQK

SEQ ID NO: 82767 - protein, 99 aa, Homo sapiens
MRGPSGPPGLLYVPHLLLCLLCLLPPPLQYAAGQSQMPKDQPLWALLEQYCHTIMTLTNLSVTPGAHSHSLSARGCGTRWTRHCSTACWRPTAAWRWLK

SEQ ID NO: 82768 - protein, 163 aa, Homo sapiens
MEALILEPSLYTVKAILILDNDGDRLFAKYYDDTYPSVKEQKAFEKNIFNKTHRTDSEIALLEGLTVVYKSSIDLYFYVIGSSYENELMLMAVLNCLFDSLSQMLRKNVEKRALLENMEGLFLAVDEIVDGGVILESDPQQVVHRVALRGEDVPLTEQTVSQV

SEQ ID NO: 82769 - protein, 172 aa, Homo sapiens
MAQFDTEYQRLEASYSDSPPGEEDLLVHVAEGSKSPWHHIENLDLFFSRVYNLHQKNGFTCMLIGEIFELMQFLFVVAFTTFLVSCVDYDILFANKMVNHSLHPTEPVKVTLPDAFLPAQVCSARIQENGSLITILVIAGVFWIHRLIKFIYNICCYWEIHSFYLHALRIPM

SEQ ID NO: 82770 - protein, 46 aa, Homo sapiens
MAAAGAFRLRRAASALLLRSPRLPARELSAPARLYHKKVSQICEVL

SEQ ID NO: 82771 - protein, 181 aa, Homo sapiens
MLLVDADQPEPMRSGARELALFLTPEPGAEAKEVEETIEGMLLRLEEFCSLADLIRSDTSQILEENIPVLKAKLTEMRGIYAKVDRLEAFVKMVGHHVAFLEADVLQAERDHGAFPQALRRWLGSAGLPSFRNVECSGTIPARCNLRLPGSSDSPASASQVAGITEVTCTGARDVRAAHTV

SEQ ID NO: 82772 - protein, 616 aa, Homo sapiens
MEKIIQVAKTSAAQAIHPGCGFLSENMEFAELCKQEGIIFIGPPPSAIRDMGIKSTSKSIMAAAGVPVVEGYHGEDQSDQCLKEHARRIGYPVMIKAVRGGGGKGMRIVRSEQEFQEQLESARREAKKSFNDDAMLIEKFVDTPRHVEVQVFGDHHGNAVYLFERDCSVQRRHQKIIEEAPAPGIKSEVRKKLGEAAVRAAKAVNYVGAGTVEFIMDSKHNFCFMEMNTRLQVEHPVTEMITGTDLVEWQLRIAAGEKIPLSQEEITLQGHAFEARIYAEDPSNNFMPVAGPLVHLSTPRADPSTRIETGVRQGDEVSVHYDPMIAKLVVWAADRQAALTKLRYSLRQYNIVGLHTNIDFLLNLSGHPEFEAGNVHTDFIPQHHKQLLLSRKAAAKESLCQAALGLILKEKAMTDTFTLQAHDQFSPFSSSSGRRLNISYTRNMTLKDGKNNVAIAVTYNHDGSYSMQIEDKTFQVLGNLYSEGDCTYLKCSVNGVASKAKLIILENTIYLFSKEGSIEIDIPVPKYLSSVSSQETQGGPLAPMTGTIEKVFVKAGDKVKAGDSLMVMIAMKMEHTIKSPKDGTVKKVFYREGAQANRHTPLVEFEEEESDKRESE

SEQ ID NO: 82773 - protein, 177 aa, Homo sapiens
MGWSQDLFRALWRSLSREVKEHVGTDQFGNKYYYIPQYKNWRGQTIREKRIVEAANKKEVDYEAGDIPTEWEAWIRRTRKTPPTMESCSVTKAGIQWHDLSSLQPLPPRFKQFPCLSLPKSWDYRHVPPHPANFCILVEMRFYHIGQAGLKLLASSNLPTLASPKCWDYRHEPLRPA

SEQ ID NO: 82774 - protein, 234 aa, Homo sapiens
RRRRLRLRRLNCASAIFPASVGRARRRFWKLVLVGDGGTGKTTFVKRHLTGEFEKKYVATLGVEVHPLVFHTNRGPIKFNVWDTAGQEKFGGLRDGYYIQAQCAIIMFDVTSRVTYKNVPNWHRDLVRVCENIPIVLCGNKVDIKDRKVKAKSIVFHRKKNLQYYDISAKSNYNFEKPFLWLARKLIGDPNLEFVAMPALAPPEVVMDPALAAQYEHDLEVAQTTALPDEDDDL

SEQ ID NO: 82775 - protein, 161 aa, Homo sapiens
MESIFHEKQEGSLCAQHCLNNLLQGEYFSPVELSSIAHQLDEEERMRMAEGGVTSEDYRTFLQQPSGNMDDSGFFSIQVISNALKVWGLELILFNSPEYQRLRIDPINERSFICNYKEHWFTVRKLGKQWFNLNSLLTGPELISDTYLALFLAQLQQEVTQ

SEQ ID NO: 82776 - protein, 219 aa, Homo sapiens
MKMRFLGLVVCLVLWTLHSEGSGGKLTAVDPETNMNVSEIISYWGFPSEEYLVETEDGYILCLNRIPHGRKNHSDKGPKPVVFLQHGLLADSSNWVTNLANSSLGFILADAGFDVWMGNSRGNTWSRKHKTLSVSQDEFWAFSYDEMAKYDLPASINFILNKTGQEQVYYVGHSQGTTIGFIAFSQIPELAKRIKMFFALGPVASVAFCTSPMAKLGRL

SEQ ID NO: 82777 - protein, 200 aa, Homo sapiens
  MOD_RES (1)..(1): Any amino acid
XWFHGMLSRLKAAQLVLTGGTGSHGVFLVRQSETRRGEYVLTFNFQGKAKHLRLSLNEEGQCRVQHLWFQSIFDMLEHFRVHPIPLESGGSSDVVLVSYVPSSQRQQGEQSRSAGEEVPVHPRSENRPPPMTHPSPLNPLHGQIPHSLGQKRRRGRQKWRQQQPQQPKRGKRKRKRAVEGSRKSWSPWLSWSPWLNWKRP

SEQ ID NO: 82778 - protein, 1297 aa, Homo sapiens
MVIKTDELPAAAPADSAREHGSQAGGKGRPGAAELPSVMLLNGDCPESLKKEAAAAEPPRENGLDEAGPGDETTGQEVIVIQDTGFSVKILAPGIEPFSLQVSPQEMVQEIHQVLMDREDTCHRTCFSLHLDGNVLDHFSELRSVEGLQEGSVLRVVEEPYTVREARIHVRHVRDLLKSLDPSDAFNGVDCNSLSFLSVFTDGDLGDSGKRKKGLEMDPIDCTPPEYILPGSRERPLCPLQPQNRDWKPLQCLKVLTMSGWNPPPGNRKMHGDLMYLFVITAEDRQVSITASTRGFYLNQSTAYHFNPKPASPRFLSHSLVELLNQISPTFKKNFAVLQKKRVQRHPFERIATPFQVYSWTAPQAEHAMDCVRAEDAYTSRLGYEEHIPGQTRDWNEELQTTRELPRKNLPERLLRERAIFKVHSDFTAAATRGAMAVIDGNVMAINPSEETKMQMFIWNNIFFSLGFDVRDHYKDFGGDVAAYVAPTNDLNGVRTYNAVDVEGLYTLGTVVVDYRGYRVTAQSIIPGILERDQEQSVIYGSIDFGKTVVSHPRYLELLERTSRPLKILRHQVLNDRDEEVELCSSVECKGIIGNDGRHYILDLLRTFPPDLNFLPVPGEELPEECARAGFPRAHRHKLCCLRQELVDAFVEHRYLLFMKLAALQLMQQNASQLETPSSLENGGPSSLESKSEDPPGQEAGSEEEGSSASGLAKVKELAETIAADDGTADPRSREVIRNACKAVGSISSTAFDIRFNPDIFSPGVRFPESCQDEVRDQKQLLKDAAAFLLSCQIPGLKIGIGELITRSAKHIFKTYLQGVELSGLSAAISHFLNCFLSSYPNPVAHLPADELVSKKRNKRRKNRPPGAADNTAWAVMTPQELWKNICQEAKNYFDFDLECETVDQAVETYGLQKITLLREISLKTGIQVLLKEYSFDSRHKPAFTEEDVLNIFPVVKHVNPKASDAFHFFQSGQAKVQQGFLKEGCELINEALNLFNNVYGAMHVETCACLRLLARLHYIMGDYAEALSNQQKAVLMSERVMGTEHPNTIQEYMHLALYCFASSQLSTALSLLYRARYLMLLVFGEDHPEMALLDNNIGLVLHGVMEYDLSLRFLENALAVSTKYHGPKALKVALSHHLVARVYESKAEFRSALQHEKEGYTIYKTQLGEDHEKTKESSEYLKCLTQQAVALQRTMNEIYRNGSSANIPPLKFTAPSMASVLEQLNVINGILFIPLSQKDLENLKAEVARRHQLQEASRNRDRAEEPMATEPAPAGAPGDLGSQPPAAKDPSPSVQG

SEQ ID NO: 82779 - protein, 418 aa, Homo sapiens
MPPSLANFCIFSRDGVSPCWSGWSRTPDLVIHSPWPPKVLQLQVFGNQLIPPNAQVKKATVFLNPAACKGKARTLFEKNAAPILHLSGMDVTIVKTDYEGQAKKLLELMENTDVIIVAGGDGTLQEVVTGVLRRTDEATFSKIPIGFIPLGETSSLSHTLFAESGNKVQHITDATLAIVKGETVPLDVLQIKGEKEQPVFAMTGLRWGSFRDAGVKVSKYWYLGPLKIKAAHFFSTLKEWPQTHQASISYTGPTERPPNEPEETPVQRPSLYRRILRRLASYWAQPQDALSQEVSPEVWKDVQLSTIELSITTRNNQLDPTSKEDFLNICIEPDTISKGDFITIGSRKVRNPKLHVEGTECLQASQCTLLIPEGAGGSFSIDSEEYEAMPVEVKLLPRKLQFFCDPRKREQMLTSPTQ

SEQ ID NO: 82780 - protein, 195 aa, Homo sapiens
MPLPFGLKLKRTRRYTVSSKSCLVARIQLLNNEFVEFTLSVESTGQESLEAVAQRLELREVTYFSLWYYNKQNQRRWVDLEKPLKKQLDKYALEPTVYFGVVFYVPSVSQLQQEITRYQYYLQLKKDILEGSIPCTLEQAIQLAGLAVQADFGDFDQYESQDFLQKFALFPVGWLQDEKVLEEATQKVALLHQKY

SEQ ID NO: 82781 - protein, 231 aa, Homo sapiens
MTLAAYKEKMKELPLVSLFCSCFLADPLNKSSYKYEADTVDLNWCVISDMEVIELNKCTSGQSFEVILKPPSFDGVPEFNASLPRRRDPSLEEIQKKLEAAEERRKYQEAELLKHLAEKREHEREVIQKAIEENNNFIKMAKEKLAQKMESNKENREAHLAAMLERLQEKVRGPWLERSFLGHAVFLLQQVCGDLLIISGRKQPQAKIRIFFLGRIFREFRRMIREVRGKK

SEQ ID NO: 82782 - protein, 92 aa, Homo sapiens
  MOD_RES (1)..(1): Any amino acid
XRSSTSPCGTSKSPNREWEGKSVAYMPYAEVKRALEQEAQMHNTAARSASPCRLSPREVSKAAPQPDMSAARYSVPPVLQPAPHQVITNLPE

SEQ ID NO: 82783 - protein, 83 aa, Homo sapiens
MSMLKPSGLKAPTKILKPGSTALKTPTAVVAPVEKTISSEKASSTPSSETQEEFVDDFRVGERVWVNGNKPGFIQFLGETQFA

SEQ ID NO: 82784 - protein, 877 aa, Homo sapiens
MSYTLDSLGNPSAYRRVTETRSSFSRVSGSPSSGFRSQSWSRGSPSTVSSSYKRSMLAPRLAYSSAMLSSAESSLDFSQSSSLLNGGSGPGGDYKLSRSNEKEQLQGLNDRFAGYIEKVHYLEQQNKEIEAEIQALRQKQASHAQLGDAYDQEIRELRATLEMVNHEKAQVQLDSDHLEEDIHRLKERFEEEARLRDDTEAAIRALRKDIEEASLVKVELDKKVQSLQDEVAFLRSNHEEEVADLLAQIQASHITVERKDYLKTDISTALKEIRSQLESHSDQNMHQAEEWFKCRYAKLTEAAEQNKEAIRSAKEEIAEYRRQLQSKSIELESVRGTKESLERQLSDIEERHNHDLSSYQDTIQQLENELRGTKWEMARHLREYQDLLNVKMALDIEIAAYRKLLEGEETRFSTFAGSITGPLYTHRPPITISSKIQKPKVEAPKLKVQHKFVEEIIEETKVEDEKSEMEEALTAITEELAVSMKEEKKEAAEEKEEEPEAEEEEVAAKKSPVKATAPEVKEEEGEKEEEEGQEEEEEEDEGAKSDQAEEGGSEKEGSSEKEEGEQEEGETEAEAEGEEAEAKEEKKVEEKSEEVATKEELVADAKVEKPEKAKSPVPKSPVEEKGKSPVSKSPVEEKAKSPVPKSPVEEAKSKAEVGKGEQKEEEEKEVKEAPKEEKVEKKEEKPKDVPEKKKAESPVKEEAVAEVVTITKSVKVHLEKETKEEGKPLQQEKEKEKAGGEGGSEEEGSDKGAKGSRKEDIAVNGEVEGKEEVEQETKEKGSGREEEKGVVTNGLDLSPADEKKGGDKSEEKVVVTKTVEKITSEGGDGATKYITKSVTVTQKVEEHEETFEEKLVSTKKVEKVTSHAIVKEVTQSD

SEQ ID NO: 82785 - protein, 62 aa, Homo sapiens
MYPESTTGSPARLSLRQTGSPGMIYRNLGKSGLRVSCLGLAGARRRGCQTWNMGDLRRPDHR

SEQ ID NO: 82786 - protein, 225 aa, Homo sapiens
  MOD_RES (1)..(1): Any amino acid
XPQFLHSRSLPCGAVRLRTPAVAEVRLPSATLCYFCRCRLGLGAALFPRSARALAASALPAQGSRWPVLSSPGLPAAFASFPACPQRSYSTEEKPQQHQKTKMIVLGFSNPINWVRTRIKAFLIWAYFDKEFSITEFSEGAKQAFAHVSKLLSQCKFDLLEELVAKEVLHALKEKVTSLPDNHKNALAANIDEIVFTSTGDISIYYDEKGKYLSVELLDYERKRP

SEQ ID NO: 82787 - protein, 583 aa, Homo sapiens
VHEPKMDALIIPVTMEVPCDSRGQRMWWAFLASSMVTFFGGLFIILLWRTLKYLWTVCCHCGGKTKEAQKINNGSSQADGTLKPVDEKEEAVAAEVGWMTSVKDWAGVMISAQTLTGRVLVVLVFALSIGALVIYFIDSSNPIESCQNFYKDFTLQIDMAFNVFFLLYFGLRFIAANDKLWFWLEVNSVVDFFTVPPVFVSVYLNRSWLGLRFLRALRLIQFSEILQFLNILKTSNSIKLVNLLSIFISTWLTAAGFIHLVENSGDPWENFQNNQALTYWECVYLLMVTMSTVGYGDVYAKTTLGRLFMVFFILGGLAMFASYVPEIIELIGNRKKYGGSYSAVSGRKHIVVCGHITLESVSNFLKDFLHKDRDDVNVEIVFLHNISPNLELEALFKRHFTQVEFYQGSVLNPHDLARVKIESADACLILANKYCADPDAEDASNIMRVISIKNYHPKIRIITQMLQYHNKAHLLNIPSWNWKEGDDAICLAELKLGFIAQSCLAQGLSTMLANLFSMRSFIKIEEDTWQKYYLEGVSNEMYTEYLSSAFVGLSFPTVCELCFVKLKLLMIAIEYKSANRESR

SEQ ID NO: 82788 - protein, 492 aa, Homo sapiens
MAQDSVDLSCDYQFWMQKLSVWDQASTLETQQDTCLHVAQFQEFLRKMYEALKEMDSNTVIERFPTIGQLLAKACWNPFILAYDESQKILIWCLCCLINKEPQNSGQSKLNSWIQGVLSHILSALRFDKEVALFTQGLGYAPIDYYPGLLKNMVLSLASELRENHLNGFNTQRRMAPERVASLSRVCVPLITLTDVDPLVEALLICHGREPQEILQPEFFEAVNEAILLKKISLPMSAVVCLWLRHLPSLEKAMLHLFEKLISSERNCLRRIECFIKDSSLPQAACHPAIFRVVDEMFRCALLETDGALEIIATIQVFTQCFVEALEKASKQLRFALKTYFPYTSPSLAMVLLQDPQDIPRGHWLQTLKHISELLREAVEDQTHGSCGGPFESWFLFIHFGGWAEMVAEQLLMSAAEPPTALLWLLAFYYGPRDGRQQRAQTMMAYVMATCRHGDLQPCGQRRSPVPTEVARDETLPAHSPAKRRPFFPKVI

SEQ ID NO: 82789 - protein, 169 aa, Homo sapiens
MPSPDSMTFEDIIVDFTQEEWALLDTSQRKLFQDVMLENISHLVSIGKQLCKSVVLSQLEQVEKLSTQRISLLQGREVGIKHQEIPFIQHIYQKGTSTISTMRSHTQEDPFLCNDLGEDFTQHIALTQNVITYMRTKHFESGRSSEHRSVVTATSIKTWLHWIFLFGFW

SEQ ID NO: 82790 - protein, 173 aa, Homo sapiens
MESWWGLPCLAFLCFLMHARDIYPKPKPPYYPQPENPDSGGNIYPRPKPRPQPQPGNSGNSGGYFNDVDRDDGRYPPRPRPRPPAGGGGGGYSSYGNSDNTHGRGGYRLNSRYGNTYGGDHHSTYGNPEGNMVAKIVSPIVSVVVVTLLGAAASYFKLNNRRNCFRTHEPENV

SEQ ID NO: 82791 - protein, 126 aa, Homo sapiens
MRIASISKSLTMVALAKLWEAGKLDLDIPVQHYVPEFPEKEYEGEKVSVTTRLLISHLSGIRHYEKDIKKVKEEKAYKALKMMKENVAFEQEKEGKSNEKNDFTKFKTEQENEAKCRNSKPGKKKN

SEQ ID NO: 82792 - protein, 148 aa, Homo sapiens
MDTDLYDEFGNYIGPELDSDEDDDELGRETKDLDEMDDDDDDDDVGDHDDDHPGMEVVLHEDKKYYPTAEEVYGPEVETIVQEEDTQPLTEPIIKPVKTKKFTLMEQTLPVTVYEMDFLADLMDNSELIRNVTLCGHLHHGKTCFVDC

SEQ ID NO: 82793 - protein, 181 aa, Homo sapiens
MYNIKQSTDTKEAAAIEARRNREKERQNRFFNVRNRVMGVDVQALNNQVGDRKRREAAERSKEAAYGTSQVQYDVVVQMLEKEEADRTRQLAKKVQEFREQKQQLKNGREFSLWDPGQVWKGLPTYLSYSNTYPGPASLQYFSGEDLDRDTRLRMQQGQFRYNLERQQQEQQQAKVDENYT

SEQ ID NO: 82794 - protein, 80 aa, Homo sapiens
MTEVVPSSALSEVSLRLLCHDDIDTVKHLCGDWFPIEYPDSWYRDITSNKKFFSLAATYRGAIVGMIVAEIKNRTKIHKE

SEQ ID NO: 82795 - protein, 158 aa, Homo sapiens
MGILEKISEIEKEIARTQKNKATEYHLGLLKAKLAKYRAQLLEPSKSASSKGEGFDVMKSGDARVALIGFPSVGKFHSCCPSWSTMARSQLTTTSASQSTFLSLMTSTASEAASYEFTTLTCIPGVIEYKGANIQLLDLPGIIEGAAQGKGRGRQVIA

SEQ ID NO: 82796 - protein, 59 aa, Homo sapiens
MTQVDCSIYKKYPVVAIPCPITYLPVCGSDYITYGNECHLCTESLKSNGRVQFLHDGSC

SEQ ID NO: 82797 - protein, 286 aa, Homo sapiens
MILTKAQYDEIAQCLVSVPPTRQSLRKLKQRFPSQSQATLLSIFSQEYQKHIKRTHAKHHTSEAIESYYQRYLNGVVKNGAAPVLLDLANEVDYAPSLMARLILERFLQEHEETPPSKSIINSMLRDPSQIPDGVLANQVYQCIVNDCCYGPLVDCIKHAIGHEHEVLLRDLLLEKNLSFLDEDQLRAKGYDKTPDFILQVPVAVEGHIIHWIESKASFGDECSHHAYLHDQFWSYWNRDGISQCSSGWCGTPGLSDSSASATQSAGITGARKHFLPGIFMKCVCK

SEQ ID NO: 82798 - protein, 92 aa, Homo sapiens
MAGNKGRGRAAYTFNIEAVGFSKGEKLPDVVLKPPPLFPDTDYKPVPLKTGEGEEYMLALKQELRETMKRMPYFIETPEERQDIERYSKRYM

SEQ ID NO: 82799 - protein, 214 aa, Homo sapiens
EKRQAKFMEHKLKCTKARNEYLLSLASVNAAVSNYYLHDVLDLMDCCDTGFHLALGQVLRSYTAAESRTQASQVQGLGSLEEAVEALDPPGDKAKVLEVHATVFCPPLRFDYHPHDGDEVAEICVEMELRDEILPRAQNIQSRLDRQTIETEETSPSTESLKSTSSDPGSRQAGRRRGQQQETETFYLTKLQEYLSGRSILAKLQAKHEKLQEA

SEQ ID NO: 82800 - protein, 27 aa, Homo sapiens
  MOD_RES (1)..(1): Any amino acid
XRVCDTHPTWEMFALTHDLLGYCHVKS

SEQ ID NO: 82801 - protein, 94 aa, Homo sapiens
MSLADLTKTNIDEHFFGVALENNRRSAACKRSPGTGDFSRNSNASNKSVDYSRSQCSCGSLSSQYDYSEDFLCDCSEKAINRNYLKQPVVKEKE

SEQ ID NO: 82802 - protein, 76 aa, Homo sapiens
MCASSKSAASATAGARCCWTWASQDSGPSCGSWASASSPISGSARRQGRPRRRRGTRRGPPSPSASSPSSAGWRSP

SEQ ID NO: 82803 - protein, 263 aa, Homo sapiens
MFLTGDTSPAEDNREATLPQCSLPELYACIENFNKESKKSNLLKMHGISLNEAQEVLARNLNVMSFTRGADVRGDLQPVIRCTVVKKEKQASMIELLYRSLLASSLSPMERLSRSQQRLSQCGISPPKHTFPYEILTDHSNALAQVTVQKVPSPKILCSLGISSATPEKFISEDKLCRSFLVDPGKQFMNLRDLEWRYFKGLAKWRRTTAISFGDIKYNTEKRFVESQDMPDVIFPPIVRKSLVIYPQIDYQNEGSYSLKWNM

SEQ ID NO: 82804 - protein, 397 aa, Homo sapiens
  MOD_RES (1)..(1): Any amino acid
XALGKLKQFDAYPKTLEDFRVKTCGGATVTIVSGLLMLLLFLSELQYYLTTEVHPELYVDKSRGDKLKINIDVLFPHMPCAYLSIDAMDVAGEQQLDVEHNLFKQRLDKDGIPVSSEAERHELGKVEVTVFDPDSLDPDRCESCYGAEAEDIKCCNTCEDVREAYRRRGWAFKNPDTIEQCRREGFSQKMQEQKNEGCQVYGFLEVNKVAGNFHFAPGKSFQQSHVHGCVCRLKMIARSLACVHDLQSFGLDNINMTHYIQHLSFGEDYPGIVNPLDHTNVTAPQASMMFQYFVKVVPTVYMKVDGEVLRTNQFSVTRHEKVANGLLGDQGLPGVFVLYELSPMMVKLTEKHRSFTHFLTGVCAIIGGMFTVAGLIDSLIYHSARAIQKKIDLGKTT

SEQ ID NO: 82805 - protein, 194 aa, Homo sapiens
MLSSPLRVAVVCVSNVNRSMEAHSILRRKGLSVRSFGTESHVRLPGPRPNRPVVYDFATTYKQMYNDLLRKDRERYTRNGILHILGRNERIKPGPERFQECTDSFDVIFTCEESVYDTVVEDLCSREQQTFQPVHVINMDIQDTLEDATLGAFLICEICQCLQQSDDIEDNLEELLLQMEEKAGKSFLHTVCFY

SEQ ID NO: 82806 - protein, 410 aa, Homo sapiens
MALNSGSPPAIGPYYENHGYQPENPYPAQPTVVPTVYEVHPAQYYPSPVPQYAPRVLTQASNPVVCTQPKSPSGTVCTSKTKKALCITLTLGTFLVGAALAAGLLWKFMGSKCSNSGIECDSSGTCINPSNWCDGVSHCPGGEDENRCVRLYGPNFILQVYSSQRKSWHPVCQDDWNENYGRAACRDMGYKNNFYSSQGIVDDSGSTSFMKLNTSAGNVDIYKKLYHSDACSSKAVVSLRCIACGVNLNSSRQSRIVGGESALPGAWPWQVSLHVQNVHVCGGSIITPEWIVTAAHCVEKPLNNPWHWTAFAGILRQSFMFYGAGYQVEKVISHPNYDSKTKNNDIALMKLQKPLTFNDLVKPVCLPNPGMMLQPEQLCWISGWGATEEKDPTEPPMRERAFLGSAEPPQ

SEQ ID NO: 82807 - protein, 209 aa, Homo sapiens
MALVHKLLRGTYFLRKFSKPTSALYPFLGIRFAEYSSSLQKPVASPGKASSQRKTEGDLQGDHQKEVALDITSSEEKPDVSFDKAIRDEAIYHFRLLKDEIVDHWRGPEGHPLHEVLLEQAKVVWQFRGKEDLDKWTVTSDKTIGGRSEVFLKMGKNNQSALLYGTLSSEAPQDGESTRSGYCAMISRIPRGAFERKMSYDWSQFNTLY

SEQ ID NO: 82808 - protein, 728 aa, Homo sapiens
MRNYDSGPPPSTVINQNETFANIIFKPTVVQQARIAQNGILGDFIIRYDVNREQSIGDIQVLNGYFVHYFAPKDLPPLPKNVVFVLDSSASMVGTKLRQTKDALFTILHDLRPQDRFSIIGFSNRIKVWKDHLISVTPDSIRDGKVYIHHMSPTGGTDINGALQRAIRLLNKYVAHSGIGDRSVSLIVFLTDGKPTVGETHTLKILNNTREAARGQVCIFTIGIGNDVDFRLLEKLSLENCGLTRRVHEEEDAGSQLIGFYDEIRTPLLSDIRIDYPPSSVVQATKTLFPNYFNGSEIIIAGKLVDRKLDHLHVEVTASNSKKFIILKTDVPVRPQKAGKDVTGSPRPGGDGEGDTNHIERLWSYLTTKELLSSWLQSDDEPEKERLRQRAQALAVSYRFLTPFTSMKLRGPVPRMDGLEEAHGMSAAMGPEPVVQSVRGAGTQPGPLLKKPYQPRIKISKTSVDGDPHFVVDFPLSRLTVCFNIDGQPGDILRLVSDHRDSGVTVNGELIGAPAPPNGHKKQRTYLRTITILINKPERSYLEITPSRVILDGGDRLVLPCNQSVVVGSWGLEVSVSANANVTVTIQGSIAFVILIHLYKKPAPFQRHHLGFYIANSEGLSSNCHGLLGQFLNQDARLTEDPAGPSQNLTHPLLLQVGEGPEAVLTVKGHQVPVVWKQRKIYNGEEQIDCWFARNNAAKLIDGEYKDYLASHPFDTGMTLGRGMSREL

SEQ ID NO: 82809 - protein, 140 aa, Homo sapiens
MQPLPPPQTNHEEPSRSRNHKTAKRKKPPFSDKPSIPAGRSLGEHLPKIQKPPLPPTTERHERSSPLPGKKPPVPKHGWGPDRRENDEDDVHQRPLPQPALLPMSSNTFPSRSTKPSPMNPLPSSHMPGAFSESNSSFPQ

SEQ ID NO: 82810 - protein, 68 aa, Homo sapiens
  MOD_RES (1)..(1): Any amino acid
XTWSKRSLSQEDAPQTPRPVAGDFIQTVSLGISPDGGKALRTGSCFTREFLGALSKLCHPSSTKIQKP

SEQ ID NO: 82811 - protein, 132 aa, Homo sapiens
MNEVSVIKEGWLHKRGEYIKTWRPRYFLLKSDGSFIGYKERPEAPDQTLPPLNNFSVAECQLMKTERPRPNTFVIRCLQWTTVIERTFHVDSPDEREEWMRAIQMVANSLKQRAPGEDPMDYKCGSPSDSST

SEQ ID NO: 82812 - protein, 515 aa, Homo sapiens
MGLEALVPLAMIVAIFLLLVDLMHRHQRWAARYPPGPLPLPGLGNLLHVDFQNTPYCFDQLRRRFGDVFSLQLAWTPVVVLNGLAAVREAMVTRGEDTADRPPAPIYQVLGFGPRSQGVFLSRYGPAWREQRRFSVSTLRNLGLGKKSLEQWVTEEAACLCAAFADQAGRPFRPNGLLDKAVSNVIASLTCGRRFEYDDPRFLRLLDLAQEGLKEESGFLREVLNAVPVLLHIPALAGKVLRFQKAFLTQLDELLTEHRMTWDPAQPPRDLTEAFLAKKEKAKGSPESSFNDENLRIVVGNLFLAGMVTTLTTLAWGLLLMILHLDVQRRRRVSPGCPIVGTHVCPVRVQQEIDDVIGQVRRPEMGDQAHMPYTTAVIHEVQRFGDIIPLSVTHMTSHDIEVQGFRIPKGTTLITNLSSVLKDEAVWKKPFRFHPEHFLDAQGHFVKPEAFLPFSAGRRACLGEPLARMELFLFFTSLLQHFSFSVAAGQPRPSHSRVVSFLVTPSPYELCAVPR

SEQ ID NO: 82813 - protein, 480 aa, Homo sapiens
MLSRLRVVSTTCTLACRHLHIKEKGKPLMLNPRTNKGMAFTLQERQMLGLQGLLPPKIETQDIQALRFHRNLKKMTSPLEKYIYIMGIQERNEKLFYRILQDDIESLMPIVYTPTVGLACSQYGHIFRRPKGLFISISDRGHVRSIVDNWPENHVKAVVVTDGERILGLGDLGVYGMGIPVGKLCLYTACAGIRPDRCLPVCIDVGTDNIALLKDPFYMGLYQKRDRTQQYDDLIDEFMKAITDRYGRNTLIQFEDFGNHNAFRFLRKYREKYCTFNDDIQGTAAVALAGLLAAQKVISKPISEHKILFLGAGEAALGIANLIVMSMVENGLSEQEAQKKIWMFDKYGLLVKGRKAKIDSYQEPFTHSAPESIPDTFEDAVNILKPSTIIGVAGAGRLFTPDVIRAMASINERPVIFALSNPTAQAECTAEEAYTLTEGRCLFASGSPFGPVKLTDGRVFTPGQGNNVYIFPGPDKPIDR

SEQ ID NO: 82814 - protein, 216 aa, Homo sapiens
  MOD_RES (1)..(1): Any amino acid
XTLSDLLRFVEEDHIPYINAFQHFPEQMKLYGRDRGIFGIESWPDYEDIYKKTVEVGTFLDLPRFPDITEDCYLHPNILCMKYLMEVNLPDEMHSLTCHVVKMTGMGEVDFLTFDPIAKMAKTVKYDVQAVAIIVVVLKLLFLLDDSFEWSLSNLAEKHNEKNKKDKPWFDFRKWYQIMKKAFDEKKQKWEEARAKYVLLPGLDAPALLLCLLLYI

SEQ ID NO: 82815 - protein, 495 aa, Homo sapiens
MAANCTSSWSLGESCNRPGLELPRSMASSETQLGNHDVDPEISHVNFRMFSCPKESDPIQALRKLTELCHLWLRPDLHTKEQILDMLVMEQFMISMPQELQVLVMMNGVQSCKDLEDLLRNNRRPKKWSVVTFHGKEYIVQDSDIEMAEAPSSVRDDLKDVSSQRASSVNQMRPGEGQAHRELQILPRVPALSRRQGEDFLLHKSIDVTGDPKSLRPKQTLEKDLKENREENPGLTSPEPQLPKSPNLVRAKEGKDPPKIASVENVDADTPSACVVEREASTHSGNRGDALNLSSPKRSKPDASSISQEEPQGEATPVGNRESPGQAGMNSIHSPGPASPVSHPDGQEAKALPPFACDVCEKRFTCNSKLVIHKRSHTGERLFQCNLCGKRFMQLISLQFHQRTHTGERPYTCDVCQKQFTQKSYLKCHKRSHTGEKPFECKDCKKVFTYRGSLKEHQRIHSGEKPYKCSKCPRAFSRLKLLRRHQKTHPEATSQ

SEQ ID NO: 82816 - protein, 208 aa, Homo sapiens
  MOD_RES (1)..(1): Any amino acid
XSWADNSVPKNQKTSEVRLYTVRWRTSFSASAKYKSEDTTSLSYTATGLKPNTMYEFSVMVTKNRRSSTWSMTAHATTYEAAPTSAPKDLTVITREGKPRAVIVSWQPPLEANGKITAYILFYTLDKNIPIDDWIMETISGDRLTHQIMDLNLDTMYYFRIQARNSKGVGPLSDPILFRTLKVEHPDKMANDQDTGVTINLVNEVLLG

SEQ ID NO: 82817 - protein, 8 aa, Homo sapiens
  MOD_RES (1)..(1): Any amino acid
XWQVTCSN

SEQ ID NO: 82818 - protein, 677 aa, Homo sapiens
MQTQEILRILRLPELGDLGQFFRSLSATTLDSGGARRSVIGSGPQLLTHYYDDARTMYQVFRRGLSISGNGPCLGFRKPKQPYQWLSYQEVADRAEFLGSGLLQHNCKACTDQFIGVFAQNRPEWIIVELACYTYSMVVVPLYDTLGPGAIRYIINTGLSCQEGASATASTQADISTVIVDKPQKAVLLLEHVERKETPGLKLIILMDPFEEALKERGQKCGVVIKSMQAVEDCGQENHQAPVPPQPDDLSIVCFTSGTTGNPKGAMLTHGNVVADFSGFLKVTEKVIFPRQDDVLISFLPLAHMFERVIQSVVYCHGGRVGFFQGDIRLLSDDMKALCPTIFPVVPRLLNRMYDKIFSQANTPLKRWLLEFAAKRKQAEVRSGIIRNDSIWDELFFNKIQASLGGCVRMIVTGAAPASPTVLGFLRAALGCQVYEGYGQTECTAGCTFTTPGDWTSGHVGAPLPCNHIKLVDVEELNYWACKGEGEICVRGPNVFKGYLKDPDRTKEALDSDGWLHTGDIGKWLPAGTLKIIDRKKHIFKLAQGEYVAPEKIENIYIRSQPVAQIYVHGDSLKAFLVGIVVPDPEVMPSWAQKRGIEGTYADLCTNKDLKKAILEDMVRLGKESGLHSFEQVKAIHIHSDMFSVQNGLLTPTLKAKRPELREYFKKQIEELYSISM

SEQ ID NO: 82819 - protein, 1014 aa, Homo sapiens
MSDLRKRELGALFTSRGTGGVEWDGTQVSPGAHYCSPTGAGCPRPCADTPGPQPQPMDLRVGQRPPVEPPPEPTLLALQRPQRLHHHLFLAGLQQQRSVEPMRLSMDTPMPELQVGPQEQELRQLLHKDKSKRSAVASSVVKQKLAEVILKKQQAALERTVHPNSPGIPYRTLEPLETEGATRSMLSSFLPPVPSLPSDPPEHFPLRKTVSEPNLKLRYKPKKSLERRKNPLLRKESAPPSLRRRPAETLGDSSPSSSSTPASGCSSPNDSEHGPNPILGSEALLGQRLRLQETSVAPFALPTVSLLPAITLGLPAPARADSDRRTHPTLGPRGPILGSPHTPLFLPHGLEPEAGGTLPSRLQPILLLDPSGSHAPLLTVPGLGPLPFHFAQSLMTTERLSGSGLHWPLSRTRSEPLPPSATAPPPPGPMQPRLEQLKTHVQVIKRSAKPSEKPRLRQIPSAEDLETDGGGPGQVVDDGLEHRELGHGQPEARGPAPLQQHPQVLLWEQQRLAGRLPRGSTGDTVLLPLAQGGHRPLSRAQSSPAAPASLSAPEPASQARVLSSSETPARTLPFTTGLIYDSVMLKHQCSCGDNSRHPEHAGRIQSIWSRLQERGLRSQCECLRGRKASLEELQSVHSERHVLLYGTNPLSRLKLDNGKLAGLLAQRMFVMLPCGGVGVDTDTIWNELHSSNAARWAAGSVTDLAFKVASRELKNGFAVVRPPGHHADHSTAMGFCFFNSVAIACRQLQQQSKASKILIVDWDVHHGNGTQQTFYQDPSVLYISLHRHDDGNFFPGSGAVDEVGAGSGEGFNVNVAWAGGLDPPMGDPEYLAAFRIVVMPIAREFSPDLVLVSAGFDAAEGHPAPLGGYHVSAKCFGYMTQQLMNLAGGAVVLALEGGHDLTAICDASEACVAALLGNRVDPLSEEGWKQKPNLNAIRSLEAVIRVHMGALTLSQIPGHGSSQQQAGGAFSWPGHPCRAAVVMVNTGAACSAWPPVQTPGCLECQGLTKKKWRQ

SEQ ID NO: 82820 - protein, 10 aa, Homo sapiens
MGSCCSCPDK

SEQ ID NO: 82821 - protein, 741 aa, Homo sapiens
  MOD_RES (1)..(1): Any amino acid
XHNKVQFTPTGGLGLNLALNPFEYYIFFFALSLITQKPLPVSLHVRTSDCAYFILVDRYLSWFLPTEGSVPPPLSSSPGGTSPSPPPRTPAIPFASYGLHHTSLLKRHISHQTSVNADPASHEIWRSETLLQVFVEMWLHHYSLEMYQKMQSPHAKLEVLHYRLSVSSALYSPAQPSLQALHAYQESFTPTEEHVLVVRLLLKHLHAFANSLKPEQASPSAHSHATSPLEEFKRMGLNLPEVPSALPRRSQPSLMGALGSSVSRASLLGKQQVTLPIPCRAAVPRFVQQKLYLFLQHCFGHWPLDASFRAVLEMWLSYLQPWRYAPDKQAPGSDSQPRCVSEKWAPFVQENLLMYTKLFVGFLNRALRTDLVSPKHALMVFRVAKVFAQPNLAEMIQKGEQLFLEPELVIPHRQHRLFTAPTFTGSFLSPWPPAVTDASFKVKSHVYSLEGQDCKYTPMFGPEARTLVLRLAQLITQAKHTAKSISDQCAESPAGHSFLSWLGFSSMDTNGSYTANDLDEMGQDSVRKTDEYLEKALEYLRQIFRLSEAQLRQFTLALGTTQDENGKKQLPDCIVGEDGLILTPLGRYQIINGLRRFEIEYQGDPELQPIRSYEIASLVRTLFRLSSAINHRFAGQMAALCSRDDFLGSFCRYHLTEPGLASRHLLSPVGRRQVAGHTRGPRLSLRFLGSYRTLVSLLLAFFVASLFCVGPLPCTLLLTLGYVLYASAMTLLTERGKLHQP

SEQ ID NO: 82822 - protein, 856 aa, Homo sapiens
MGNRGMEDLIPLVNRLQDAFSAIGQNADLDLPQIAVVGGQSAGKSSVLENFVGRDFLPRGSGIVTRRPLVLQLVNATTEYAEFLHCKGKKFTDFEEVRLEIEAETDRVTGTNKGISPVPINLRVYSPHVLNLTLVDLPGMTKVPVGDQPPDIEFQIRDMLMQFVTKENCLILAVSPANSDLANSDALKVAKEVDPQGQRTIGVITKLDLMDEGTDARDVLENKLLPLRRGYIGVVNRSQKDIDGKKDITAALAAERKFFLSHPSYRHLADRMGTPYLQKVLNQQLTNHIRDTLPGLRNKLQSQLLSIEKEVEEYKNFRPDDPARKTKALLQMVQQFAVDFEKRIEGSGDQIDTYELSGGARINRIFHERFPFELVKMEFDEKELRREISYAIKNIHGIRTGLFTPDMAFETIVKKQVKKIREPCLKCVDMVISELISTVRQCTKKLQQYPRLREEMERIVTTHIREREGRTKEQVMLLIDIELAYMNTNHEDFIGFANAQQRSNQMNKKKTSGNQDEILVIRKGWLTINNIGIMKGGSKEYWFVLTAENLSWYKDDEEKEKKYMLSVDNLKLRDVEKGFMSSKHIFALFNTEQRNVYKDYRQLELACETQEEVDSWKASFLRAGVYPERVGDKEKASETEENGSDSFMHSMDPQLERQVETIRNLVDSYMAIVNKTVRDLMPKTIMHLMINNTKEFIFSELLANLYSCGDQNTLMEESAEQAQRRDEMLRMYHALKEALSIIGDINTTTVSTPMPPPVDDSWLQVQSVPAGRRSPTSSPTPQRRAPAVPPARPGSRGPAPGPPPAGSALGGAPPVPSRPGASPDPFGPPPQVPSRPNRAPPGVPSQPIGSGKSIPS

SEQ ID NO: 82823 - protein, 171 aa, Homo sapiens
MMCSRVPSEQSSGTSLLPKDGAPFSWDSLDEDGLDDSLLELSEGEEDDGDVNYTEEEIDALLKEDDPSYEQSSGEDDGGHVEKGERGSQILLDTPREKNSSYSLGPVAETPDLFKLPQLSTSSGHGPAHTKPLNRRSVLEKNLIKVTVAPFNPTVCDALLDKDETDSSKDT

SEQ ID NO: 82824 - protein, 141 aa, Homo sapiens
MSLWGLVSKMPPEKVQRLYVDFPQHLRHLLGDWLESQPWEFLVGSDAFCCNLASALLSDTVQHLQASSIYQRDPLKLVATFRQILQGEKKAVMEQFRHLPMPFHWKQEELKFKTGLRRLQHRVGEIHLLREALQKGAEAGQ

SEQ ID NO: 82825 - protein, 69 aa, Homo sapiens
  MOD_RES (1)..(1): Any amino acid
XGQRSERKKWIHCFEDVTAIIFCVALSGYDQVLHEDETTAPIPMKTQPPTSKHNLKAKTAHPTKKYIVT

SEQ ID NO: 82826 - protein, 143 aa, Homo sapiens
MFVGSDTVNEFKSEDGAIHVIERRCKLDVDAPRLLKKIAGVDYVYFVQKNSLNSRERTLHIEAYNETFSNRVIINEHCCYTVHPENEDWTCFEQSASLDIKSFFGFESTVEKIAMKQYTSNIKKGKEIIEYYLRQLEEEGITF

SEQ ID NO: 82827 - protein, 127 aa, Homo sapiens
MSVPQIHVEEVGAEEGAGAAAPPDDHLRSLKALTEKLRLETRRPSYLEWQARLEEHTWPFPRPAAEPQASLEEGERGGQEPLLPLREAGQHPPSARSASQGARPLSTGKLEGFQSIDEAIAWLRKEL

SEQ ID NO: 82828 - protein, 164 aa, Homo sapiens
  MOD_RES (1)..(1): Any amino acid
XPEPLPPKGLQYLVLLSHAHSRECSLVPGLRGPGGQDGGLVWECSAGHTFSWGPSLSPTPSEAPKPASLPHTTRRSWCSEATSGQELADLESEHDERTQEARLPRRVGPPPETFPPPGEEEVVSLMPPDYCLPLSPAHLKRGRHHQPLQHSPVLLLCRPCQHPH

SEQ ID NO: 82829 - protein, 93 aa, Homo sapiens
MLENFKLEGAGSRTKKKTVVSVKKLLQDLGGHQPWGCPWAYLSNRQRRFSILGGPILGTSVASHLAELLHEELVLRWEQLLLDEACTGGALAW

SEQ ID NO: 82830 - protein, 73 aa, Homo sapiens
MQSLVLLPRLECSDVILAYCNLHLPGSRNSPASASRVAGITGACYHAQLIFCIFNRDGVSPCWPSWSQTPDLR

SEQ ID NO: 82831 - protein, 351 aa, Homo sapiens
MEEEIAALVIDNGSGMCKAGFAGDDAPRAVFPSIVGRPRHQGVMVGMGQKDSYVGDEAQSKRGILTLKYPIEHGIVTNWDDMEKIWHHTFYNELRVAPEEHPVLLTEAPLNPKAVLSLYASGRTTGIVMDSGDGVTHTVPIYEGYALPHAILRLDLAGRDLTDYLMKILTERGYSFTTTAEREIVRDIKEKLCYVALDFEQEMATAASSSSLEKSYELPDGQVITIGNERFRCPEALFQPSFLGMESCGIHETTFNSIMKCDVDIRKDLYANTVLSGGTTMYPGIADRMQKEITALAPSTMKIKIIAPPERKYSVWIGGSILASLSTFQQMWISKQEYDESGPSIVHRKCF

SEQ ID NO: 82832 - protein, 119 aa, Homo sapiens
MKMASFLAFLLLNFRVCLLLLQLLMPHSAQFSVLGPSGPILAMVGEDADLPCHLFPTMSAETMELKWVSSSLRQVVNVYADGKEVEDRQSAPYRGRTSILRDGITAGKAALRIHNVTAS

SEQ ID NO: 82833 - protein, 289 aa, Homo sapiens
  MOD_RES (1)..(1): Any amino acid
XQSILQTLEEQVSGERQRLVETHATRVIALINDQRRAALEGFLAALQADPPQAERVLLALRRYLRAEQKEQRHTLRHYQHVAAVDPEKAQQMRFQVHTHLQVIEERVNQSLGLLDQNPHLAQELRPQIQELLHSEHLGPSELEAPAPGGSSEDKGGLQPPDSKDGSTEQDAASPEKEKMNPLEQYERKVNASVPRGFPFHSSEIQRDELAPAGTGVSREAVSGLLIMGAGGGSLIVLSMLLLRRKKPYGAISHGVVEVDPMLTLEEQQLRELQRHGYENPTYRFLEERP

SEQ ID NO: 82834 - protein, 66 aa, Homo sapiens
LLAQSFILLKPVFHCLNEILDLCHSFCSLVSQNLGPLDERGAAQLSILVKVRLPGSMQPCRKDRGL

SEQ ID NO: 82835 - protein, 490 aa, Homo sapiens
MPLPVQVFNLQGAVEPMQIDVDPQEDPQNAPDVNYVVENPSLDLEQYAASYSGLMRIERLQFIADHCPTLRVEALKMALSFVQRTFNVDMYEEIHRKLSEATRSSLRELQNAPDAIPESGVEPPALDTAWVEATRKKALLKLEKLDTDLKNYKGNSIKESIRRGHDDLGDHYLDCGDLSNALKCYSRARDYCTSAKHVINMCLNVIKVSVYLQNWSHVLSYVSKAESTPEIAERGERDSQTQAILTKLKCAAGLAELAARKYKQAAKCLLLASFDHCDFPELLSPSNVAIYGGLCALATFDRQELQRNVISSSSFKLFLELEPQVRDIIFKFYESKYASCLKMLDEMKDNLLLDMYLAPHVRTLYTQIRNRALIQYFSPYVSADMHRMAAAFNTTVAALEDELTQLILEGLISARVDSHSKILYARDVDQRSTTFEKSLLMGKEFQRRAKAMMLRAAVLRNQIHVKSPPREGSQGELTPANSQSRMSTNM

SEQ ID NO: 82836 - protein, 53 aa, Homo sapiens
MGDVKESKMQITPETPGRIPVLNPFESPSDYSNLHEQTLASPSVFKSTKLPNR

SEQ ID NO: 82837 - protein, 236 aa, Homo sapiens
LSFWYHLHGPQIGTLRLAMRREGEETHLWSRSGTQGNRWHEAWATLSHQPGSHAQYQLLFEGLRDGYHGTMALDDVAVRPGPCWAPNYCSFEDSDCGFSPGGQGLWRRQANASGHAAWGPPTDHTTETAQGHYMVVDTSPDALPRGQTASLTSKEHRPLAQPACLTFWYHGSLRSPGTLRVYLEERGRHQVLSLSAHGGLAWRLGSMDVQAERAWRVSAGWGAPPPPPPPRAAWTR

SEQ ID NO: 82838 - protein, 99 aa, Homo sapiens
MQQRAGSKTAGPPCQWSRMASEGTNIPSPVVRQIDKQFLICSICLERYKNPKVLPCLHTFCESVPPDLHPARERGGRAPEQFLHHKPDGRAAANSRQQR

SEQ ID NO: 82839 - protein, 94 aa, Homo sapiens
MSKSKVDNQFYSVEVGDSTFTVLKRYQNLKPIGSGAQGIVCAAYDAVLDRNVAIKKLSRPFQNQTHAKRAYRELVLMKCVNHKNIISLLNVFTP

SEQ ID NO: 82840 - protein, 104 aa, Homo sapiens
MASPADSCIQFTRHASDVLLNLNRLRSRDILTDVVIVVSREQFRAHKTVLMACSGLFYSIFTDQLKCNLSVINLDPEINPEGFCILLDFMYTSRLNLREGNIMA

SEQ ID NO: 82841 - protein, 55 aa, Homo sapiens
MQLRPTEPLPSQCCGSGCSPCVFDLYHRDLARWEAAQASKDRSLLRGPESQRDSR

SEQ ID NO: 82842 - protein, 47 aa, Homo sapiens
MWRECDWGLGAVKSDLACVPSAKRREPLAREETGLLMNANRRSSICA

SEQ ID NO: 82843 - protein, 497 aa, Homo sapiens
MASRCWRWWGWSAWPRTRLPPAGSTPSFCHHFSTQEKTPQICVVGSGPAGFYTAQHLLKHPQAHVDIYEKQPVPFGLVRFGVAPDHPEVKNVINTFTQTAHSGRCAFWGNVEVGRDVTVPELQEAYHAVVLSYGAEDHRALEIPGEELPGVCSARAFVGWYNGLPENQELEPDLSCDTAVILGQGNVALDVARILLTPPEHLEALLLCQRTDITKAALGVLRQSRVKTVWLVGRRGPLQVAFTIKELREMIQLPGARPILDPVDFLGLQDKIKEVPRPRKRLTELLLRTATEKPGPAEAARQASASRAWGLRFFRSPQQVLPSPDGRRAAGVRLAVTRLEGVDEATRAVPTGDMEDLPCGLVLSSIGYKSRPVDPSVPFDSKLGVIPNVEGRVMDVPGLYCSGWVKRGPTGVIATTMTDSFLTGQMLLQDLKAGLLPSGPRPGYAAIQALLSSRGVRPVSFSDWEKLDAEEVARGQGTGKPREKLVDPQEMLRLLGH

SEQ ID NO: 82844 - protein, 396 aa, Homo sapiens
ASTKGPSVFPLAPCSRSTSESTAALGCLVKDYFPEPVTVSWNSGALTSGVHTFPAVLQSSGLYSLSSVVTVPSSSLGTKTYTCNVDHKPSNTKVDKRVESKYGPPCPSCPAPEFLGGPSVFLFPPKPKDTLMISRTPEVTCVVVDVSQEDPEVQFNWYVDGVEVHNAKTKPREEQFNSTYRVVSVLTVLHQDWLNGKEYKCKVSNKGLPSSIEKTISKAKGQPREPQVYTLPPSQEEMTKNQVSLTCLVKGFYPSDIAVEWESNGQPENNYKTTPPVLDSDGSFFLYSRLTVDKSRWQEGNVFSCSVMHEALHNHYTQKSLSLSLELQLEESCAEAQDGELDGLWTTITIFITLFLLSVCYSATVTFFKVKWIFSSVVDLKQTIVPDYRNMIRQGA

SEQ ID NO: 82845 - protein, 124 aa, Homo sapiens
MASVLSRRLGKRSLLGARVLGPSASEGPSAAPPSEPLLEGAAPQPFTTSDDTPCQEQPKEVLKAPSTSGLQQVAFQPGQKVYVWYGGQECTGLVEQHSWMEGQVTVWLLEQKLQVCCRVEEVWL

SEQ ID NO: 82846 - protein, 188 aa, Homo sapiens
MDPRGILKAFPKRQKIHADASSKVLAKIPRREEGEEAEEWLSSLRAHVVRTGIGRARAELFEKQIVQHGGQLCPAQGPGVTHIVVDEGMDYERALRLLRLPQLPPGAQLVKSAWLSLCLQERRLVDVAGFSIFIPSRYLDHPQPSKAEQDASIPPGTHEALLQTALSPPPPPTRPVSPPQKAKEAPNT

SEQ ID NO: 82847 - protein, 51 aa, Homo sapiens
MSVNVNRSVSDQFYRYKMPRLIAKVEGKGNGIKTVIVNMVDVAKALNRPPT

SEQ ID NO: 82848 - protein, 75 aa, Homo sapiens
MSRFKFIDDLQDVIGRAVEIGVKKFMITGGNLQDSKDALHLAQTNDILKNSLNCQNKQNYQCFFIVETHMLNFWT

SEQ ID NO: 82849 - protein, 137 aa, Homo sapiens
  MOD_RES (1)..(1): Any amino acid
XTIITGYLGAGKTTLLNYILTEQHSKRVAVILNESGEGSALEKSLAVSQGGELYEEWLELRNGCLCCSVKDNGLRAIENLMQKKGKFDDILLETTGLADPGAVASMFWVDAELGSDIYLDGIITIVDSKYGLKVKYH

SEQ ID NO: 82850 - protein, 604 aa, Homo sapiens
MDVTKKNKRDGTEVTERIVTETVTTRLTSLPPKGGTSNGYAKTASLGGGSRLEKQSLTHGSSGYINSTGSTRGHASTSSYRRAHSPASTLPNSPGSTFERKTHVTRHAYEASSSTRGRSQTRESEIRVRLQSASPSTRWTELDDVKRLLKGSRSASVSPTRNSSNTLPIPKKGTVETKIVTASSQSVSGTYDATILDANLPSHVWSSTLPAGSSMGTYHNNMTTQSSSLLNTNAYSAGSVFGVPNNMASCSPTLHPGLSTSSSVFGMQNNLAPSLTTLSHGTTTTSTAYGVKKNMPQSPAAVNTGVSTSAACTTSVQSDDLLHKDCKFLILEKDNTPAKKEMELLIMTKDSGKVFTASPASIAATSFSEDTLKKEKQAAYNADSGLKAEANGDLKTVSTKGKTTTADIHSYGSSGGGGSGGGGGVGGAGGGPWGPAPAWCPCGSCCSWWKWLLGLLLTWLLLLGLLFGLIALAEEVRKLKARVDELERIRRSILPYGDSMDRIEKDRLQGMAPAAGADLDKIGLHSDSQEELWMFVRKKLMMEQENGNLRGSPGPKGDMGSPGPKGDRGFPGTPGIPGPLGHPGPQGPKGQKGSVGDPGMEGPM

SEQ ID NO: 82851 - protein, 193 aa, Homo sapiens
METKLPPASTPTSPSSPGLSPVPPPDKVDGFSRRSLRRARPRRSHSSSQFRYQSNQQELTPLPLLKDVPASELHELLSRKLAQCGVMFDFLDCVADLKGKEVKRAALNELVECVGSTRGVLIEPVYPDIIRMISVNIFRTLPPSENPEFDPEEDEPNLEPSWPHLQLVYEFFLRFLESPDFQPSVAKRYVDQK

SEQ ID NO: 82852 - protein, 761 aa, Homo sapiens
MLSLKKYLTEGLLQFTILLSLIGVRVDVDTYLTSQLPPLREIILGPSSAYTQTQFHNLRNTLDGYGIHPKSIDLDNYFTARRLLSQVRALDRFQVPTTEVNAWLVHRDPEGSVSGSQPNSGLALESSSGLQDVTGPDNGVRESETEQGFGEDLEDLGAVAPPVSGDLTKEDIDLGAGREVFDYSHRQKEQDVEKELRDGGEQDTWAGEGAEALARNLLVDGETGESFPAQVPSGEDQTALSLEECLRLLEATCPFGENAEFPADISSITEAVPSESEPPALQNNLLSPLLTGTESPFDLEQQWQDLMSIMEMQAMEVNTSASEILYSAPPGDPLSTNYSLAPNTPINQNVSLHQASLGGCSQDFLLFSPEVESLPVASSSTLLPLAPSNSTSLNSTFGSTNLTGLFFPPQLNGTANDTAGPELPDPLGGLLDEAMLDEISLMDLAIEEGFNPVQASQLEEEFDSDSGLSLDSSHSPSSLSSSEGSSSSSSSSSSSSSSASSSASSSFSEEGAVGYSSDSETLDLEEAEGAVGYQPEYSKFCRMSYQDPAQLSCLPYLEHVGHNHTYNMAPSALDSADLPPPSALKKGSKEKQADFLDKQMSRDEHRARAMKIPFTNDKIINLPVEEFNELLSKYQLSEAQLSLIRDIRRRGKNKMAAQNCRKRKLDTILNLERDVEDLQRDKARLLREKVEFLRSLRQMKQKVQSLYQEVFGRLRDENGRPYSPSQYALQYAGDGSVLLIPRTMADQQARRQERKPKDRRK

SEQ ID NO: 82853 - protein, 468 aa, Homo sapiens
  MOD_RES (1)..(1): Any amino acid
XEKPEAFTANFFKGLEIYQTKLLRVCILSQVTEEPLEEETEDVANLWNSFNDEEEEEAMVFFVLQESTGYMAPTLRALAIIHTIISLVCVVGYYCLKVPLVVFKREKEIARKLEFDGLYITEQPSEDDIKGQWDRLVINTPSFPNNYWDKFVKRKVINKYGDLYGAERIAELLGLDKNALDFSPVEETKAEAASLVSWLSSIDMKYHIWKLGVVFTDNSFLYLAWYTTMSVLGHYNNFFFAAHLLDIAMGFKTLRTILSSVTHNGKQLVLTVGLLAVVVYLYTVVAFNFFRKFYNKSEDDDEPDMKCDDMMTCYLFHMYVGVRAGGGIGDEIEDPAGDPYEMYRIVFDITFFFFVIVILLAIIQGLIIDAFGELRDQQEQVREDMETKCFICGIGNDYFDTTPHGFETHTLQEHNLANYLFFLMYLINKDETEHTGQESYVWKMYQERCWDFFPAGDCFRKQYEDQLG

SEQ ID NO: 82854 - protein, 91 aa, Homo sapiens
MLENYRNLVSLGLVVSKPDLITFLEQRKEPWNVKSEETVAIQPDVFSHYNKDLLTEHCTEASFQKVISRRHGSCDLENLHLRKRWKREECE

SEQ ID NO: 82855 - protein, 211 aa, Homo sapiens
MAKMELSKAFSGQRTLLSAILSMLSLSFSTTSLLSNYWFVGTQKVPKPLCEKGLAAKCFDMPVSLDGDTNTSTQEVVQYNWETGDDRFSFRSFRSGMWLSCEETVEEPAKSEMEEELKKCVYLHLYLLLCHLALLHPQSWKQFRALRSSGTAAAKGERCRSFIELTPPAKRGEKGLLEFATLQGPCHPTLRFGGKRLMEKASLPSPPLGLC

SEQ ID NO: 82856 - protein, 244 aa, Homo sapiens
  MOD_RES (1)..(1): Any amino acid
XELTIFILRLAIYILTFPLYLLNFLGLWSWICKKWFPYFLVRFTVIYNEQMASKKRELFSNLQEFAGPSGKLSLLEVGCGTGANFKFYPPGCRVTCIDPNPNFEKFLIKSIAENRHLQFERFVVAAGENMHQVADGSVDVVVCTLVLCSVKNQERILREVCRVLRPGGAFYFMEHVAAECSTWNYFWQQVLDPAWHLLFDGCNLTRESWKALERASFSKLKLQHIQAPLSWELVRPHIYGYAVK

SEQ ID NO: 82857 - protein, 251 aa, Homo sapiens
VVDQIDTLTSDLQLEDEMTDSSKTDTLNSSSSGTTASSLEKIKVQANAPLIKPPAHPSAILTVLRKPNPPPPPPRLTPVKCEDPKRVVPTANPVKTNGTLLRNGGLPGGPNKIPNGDICCIPNSNLDKAPVQLLMHRPEKDRCPQAGPRERVRFNEKVQYHGYCPDCDTRYNIKNREVHLHSEPVHPPGKIPHQGPPLPPTPHLPPFPLENGGMGISHSNSFPPIRPATVPPPTAPKPQKTILRKSTTTTV

SEQ ID NO: 82858 - protein, 44 aa, Homo sapiens
MHDSGLLNITKVSFSDRGKYTCVASNIYGTVNNTVTLRVIFTSG

SEQ ID NO: 82859 - protein, 245 aa, Homo sapiens
MAFVTRQFMRSVSSSSTASASAKKIIVKHVTVIGGGLMGAGIAQVAAATGHTVVLVDQTEDILAKSKKGIEESLRKVAKKKFAENLKAGDEFVEKTLSTIATSTDAASVVHSTDLVVEAIVENLKVKNELFKRLDKFAAEHTIFASNTSSLQITSIANATTRQDRFAGLHFFNPVPVMKLVEVIKTPMTSQKTFESLVDFSKALGKHPVSCKDTPGFIVNRLLVPYLMEAIRLYERGPPGFPVGL

SEQ ID NO: 82860 - protein, 116 aa, Homo sapiens
MNAPPAFESFLLFEGEKITINKDTKVPNACLFTINKEDHTLGNIIKSRACFPFAFCRDCQFPEASPATLPVQPAELCPRAHQLCAPALKRHLGGEAHPVHLHAGAASRPVQQPQHL

SEQ ID NO: 82861 - protein, 44 aa, Homo sapiens
MDGIVTEVAVGVKPMVMIVKNLKEKIKWMVLLLVYFIFENYLGK

SEQ ID NO: 82862 - protein, 114 aa, Homo sapiens
  MOD_RES (1)..(1): Any amino acid
XLYNKGFIYLDVPISDDSCIAVPPLEGFVMNRVQGDYFETLLYKIFVSIDEHTNVAELANVLEIDLSLVKNAVSMYCRLGFAHKKGQVINLDQLHSSWKNVPSVNRLKGGVSPC

SEQ ID NO: 82863 - protein, 138 aa, Homo sapiens
ELDTSERKIEFDSASGTYTLYLIIGDATLKNPILWNVADVVIKFPEEEAPSTVLSQNLFTPKQEIQWIRIGANVSNFTFAPSTIIFHLGHAAMLGLMYVYWTQLNMFQTLKYLAILGSVTFLAGNRMLAQQAVKRTAH

SEQ ID NO: 82864 - protein, 167 aa, Homo sapiens
  MOD_RES (1)..(1): Any amino acid
XRPLQLPGAEGPAISDGEEGGGEPGAGGGAAGAAGAGRRDFVEAPPPKVNPWTKNALPPVLTTVNGQSPPEHSAPAKVVRAAVPKQRKGSKPQSHKPQPTRKLPPKKDMKEQEKGEGSDSKESPKTKSDESGEEKNGDEDCQRGGQKKKGNKHKWVPLQIDMKPEVP

SEQ ID NO: 82865 - protein, 432 aa, Homo sapiens
METVQLRNPPRRQLKKLDEDSLTKQPEEVFDVLEKLGEGSYGSVYKAIHKETGQIVAIKQVPVESDLQEIIKEISIMQQCDSPHVVKYYGSYFKNTDLWIVMEYCGAGSVSDIIRLRNKTDTMAKRNTVIGTPFWMAPEVIQEIGYNCVADIWSLGITAIEMAEGKPPYADIHPMRAIFMIPTNPPPTFRKPELWSDNFTDFVKQCLVKSPEQRATATQLLQHPFVRSAKGVSILRDLINEAMDVKLKRQESQQREVDQDDEENSEEDEMDSGTMVRAVGDEMGTVRVASTMTDGANTMIEHDDTLPSQLGTMVINAEDEEEEGTMKRRDETMQPAKPSFLEYFEQKEKENQINSFGKSVPGPLKNSSDWKIPQDGDYEFLKSWTVEDLQKRLLALDPMMEQEIEEIRQKYQSKRQPILDAIEAKKRRQQNF

SEQ ID NO: 82866 - protein, 270 aa, Homo sapiens
MNGQLDLSGKLIIKAQLGEDIRRIPIHNEDITYDELVLMMQRVFRGKLLSNDEVTIKYKDEDGDLITIFDSSDLSFAIQCSRILKLTLFVNGQPRPLESSQVKYLRRELIELRNKVNRLLDSLEPPGEPGPSTNIPENDTVDGREEKSASDSSGKQSTQVMAASMSAFDPLKNQDEINKNVMSAFGLTDDQVSGPPSAPAEDRSGTPDSIASSSSAAHPPGVQPQQPPYTGAQTQADVPTVPATGRLWCTAAAGSTSAASTVWYSVFSKL

SEQ ID NO: 82867 - protein, 34 aa, Homo sapiens
VECNSKLDPTKTTLLKVQGKQWGWRTVAASRRSP

SEQ ID NO: 82868 - protein, 18 aa, Homo sapiens
  MOD_RES (1)..(1): Any amino acid
XLTEEFLNAPLPSIKEIK

SEQ ID NO: 82869 - protein, 41 aa, Homo sapiens
  MOD_RES (1)..(1): Any amino acid
XVYSFQEEEPVLDPHLAKHLAHFGIDMLHMHGVCRKPSQNI

SEQ ID NO: 82870 - protein, 891 aa, Homo sapiens
  MOD_RES (858)..(858): Any amino acid
MEAGPSGAAAGAYLPPLQQVFQAPRRPGIGTVGKPIKLLANYFEVDIPKIDVYHYEVDIKPDKCPRRVNREVVEYMVQHFKPQIFGDRKPVYDGKKNIYTVTALPIGNERVDFEVTIPGEGKDRIFKVSIKWLAIVSWRMLHEALVSGQIPVPLESVQALDVAMRHLASMRYTPVGRSFFSPPEGYYHPLGGGREVWFGFHQSVRPAMWKMMLNIDVSATAFYKAQPVIEFMCEVLDIRNIDEQPKPLTDSQRVRFTKEIKGLKVEVTHCGQMKRKYRVCNVTRRPASHQTFPLQLESGQTVECTVAQYFKQKYNLQLKYPHLPCLQVGQEQKHTYLPLEVCNIVAGQRCIKKLTDNQTSTMIKATARSAPDRQEEISRLMKNASYNLDPYIQEFGIKVKDDMTEVTGRVLPAPILQYGGRNRAIATPNQGVWDMRGKQFYNGIEIKVWAIACFAPQKQCREEVLKNFTDQLRKISKDAGMPIQGQPCFCKYAQGADSVEPMFRHLKNTYSGLQLIIVILPGKTPVYAEVKRVGDTLLGMATQCVQVKNVVKTSPQTLSNLCLKINVKLGGINNILVPHQRSAVFQQPVIFLGADVTHPPAGDGKKPSITAVVGSMDAHPSRYCATVRVQRPRQEIIEDLSYMVRELLIQFYKSTRFKPTRIIFYRDGVPEGQLPQILHYELLAIRDACIKLEKDYQPGITYIVVQKRHHTRLFCADKNERIGKSGNIPAGTTVDTNITHPFEFDFYLCSHAGIQGTSRPSHYYVLWDDNRFTADELQILTYQLCHTYVRCTRSVSIPAPAYYARLVAFRARYHLVDKEHDSGEGSHISGQSNGRDPQALAKAVQVHQDTLRTMYFAXRQNAVTSLDRRKLSKPQELCHPNPEEARRREVG

SEQ ID NO: 82871 - protein, 17 aa, Homo sapiens
MTSPHFSSYDEGPLDVS

SEQ ID NO: 82872 - protein, 257 aa, Homo sapiens
MAPSPTKRKDRSDEKSKDRSKDKGATKESSEKDRGRDKTRKRRSASSGSSSTRSRSSSTSSSGSSTSTGSSSGSSSSSASSRSGSSSTSRSSSSSSSSGSPSPSRRRHDNRRRSRSKSKPPKRDEKERKRRSPSPKPTKVHIGRLTRNVTKDHIMEIFSTYGKIKMIDMPVERMHPHLSKGYAYVEFENPDEAEKALKHMDGGPAPRGAGPPCAGDHGPRAAAATGAAPAPTPPDKQATEALAPVTYTPPSSVLSLF

SEQ ID NO: 82873 - protein, 185 aa, Homo sapiens
  MOD_RES (1)..(1): Any amino acid
XYTSEEKFALVEVIAMIKGLQVLMGRMESVFNHAIRHTVYAALQDFSQVTLREPLRQAIKKKKNVIQSVLQAIRKTVCDWETGHEPFNDPALRGEKDPKSGFDIKVPRRAVGPSSTQLYLVRTMAESLGSAELLRQLKSLGMERLLHAVNTFLRQSCTYLPLLTFGETLQQCCDLSQLWFREFFL

SEQ ID NO: 82874 - protein, 214 aa, Homo sapiens
MGQKGSSGLFRAVSAFGVVGFVRFLEGYYIVLITKRRKMADIGGHAIYKVEDTNMIYIPNDSVRVTHPDEARYLRIFQNVDLSSNFYFSYSYDLSHSLQYNLTVLRMPLEMLKSEMTQNRQESFDIFEDEGLITQGGSGVFGICSEPYMKYVWNGELLDIIKSTVHRDWLLYIIHGFCGQSSILSEEKENLPMILCSRNTKKNADYLNRPVIYT

SEQ ID NO: 82875 - protein, 53 aa, Homo sapiens
  MOD_RES (1)..(1): Any amino acid
XKCAMISAHYGLSDVFDNLIISLCKFTALSSEVEDFVDPNGKISLQREETPSN

SEQ ID NO: 82876 - protein, 16 aa, Homo sapiens
MPPPRCPESRSDSEKG

SEQ ID NO: 82877 - protein, 198 aa, Homo sapiens
MTERRVPFSLLRGPSWDPFRDWYPHSRLFDQAFGLPRLPEEWSQWLGGSSWPGYVRPLPPAAIESPAVAAPAYSRALSRQLSSGVSEIRHTADRWRVSLDVNHFAPDELTVKTKDGVVEITGKHEERQDEHGYISRLPPGVDPTQVSSSLSPEGTLTVEAPMPKLATQSNEITIPVTFESRAQLGGPEAAKSDETAAK

SEQ ID NO: 82878 - protein, 72 aa, Homo sapiens
MADESETAVKPPAPPLPQMMEGNGNGHEHCSDCENEEDNSYNRGLSASGALRGPARWKLWEARVDSWFESSQ

SEQ ID NO: 82879 - protein, 235 aa, Homo sapiens
  MOD_RES (1)..(1): Any amino acid
XNYLFQGRQECYAFNGTQRFLERYIYNREEFVRFDSDVGEFRAVTELGRPDEEYWNSQKDILEEERAVPDRMCRHNYELGGPMTLQRRVQPRVNVSPSKKGPLQHHNLLVCHVTDFYPGSIQVRWFLNGQEETAGVVSTNLIRNGDWTFQILVMLEMTPQQGDVYTCQVEHTSLDSPVTVEWKAQSDSARSKTLTGAGGFVLGLIICGVGIFMHRRSKKGEKACRFNEDLHKQGS

SEQ ID NO: 82880 - protein, 34 aa, Homo sapiens
  MOD_RES (1)..(1): Any amino acid
XLSSNPPLATILIPPHARIQAAASTPTNATAASD

SEQ ID NO: 82881 - protein, 289 aa, Homo sapiens
MASLGEETLASASSSSDSDTGGASPPPRKKPRASAAEGVGEPGASAGRAGLSPPSSSSSSSSSSSSSVVVVVGLPPAAAPPAAAAVPHRSSGHSLVSGSIMQANGAGGGGGGGGGGGGGGGGGGGQGQTPELACLSAQNGESSPSSSSSAGDLAHANGLLPSAPSAASNNSNSLNVNNGVPGGAAAASSATVAAASATTAASSSLATPELGSSLKKKKRLSQSDEDVIRLIGQHLNGLGLNVSWRHLCGTPPHPQPWQTTTQANYQSGKTITYKCLWERRGWDHLERGC

SEQ ID NO: 82882 - protein, 254 aa, Homo sapiens
MHRGLIHPQSSAVGGDAMTPILTVLICLGLSLDPRTHVQAGPLPKPTLWAEPGSVITQGSPVTLRCQGSLETQEYHLYREKKTALWITRIPQELVKKGQFPILSITWEHAGRYCCIYGSHTAGLSESSDPLELVVTGAYSKPTLSALPSPVVTSGGNVTIQCDSQVAFDGFILCKEGEDEHPQCLNSHSHARGSSRAIFSVGPVSPSRRWSYRCYGYDSRAPYVWSLPSDLLGLLVPGAAETLSPPQNKSDSKA

SEQ ID NO: 82883 - protein, 416 aa, Homo sapiens
MKMQKGNVLLMFGLLLHLEAATNSNETSTSANTGSSVISSGASTATNSGSSVTSSGVSTATISGSSVTSNGVSIVTNSEFHTTSSGISTATNSEFSTASSGISIATNSESSTTSSGASTATNSESSTPSSGASTATNSDSSTTSSGASTATNSESSTTSSGASTATNSESSTTSSGASTATNSESSTTSSGANTATNSESSTVSSGASTATNSESSTTSSGVSTATNSESSTTSSGASTATNSDSSTTSSEASTATNSESSTVSSGISTVTNSESSTTSSGANTATNSGSSVTSAGSGTAALTGMHTTSHSASTAVSEAKPGGSLVPWEIFLITLVSVVAAVGLFAGLFFCVRNSLSLRNTFNTAVYHPHGLNHGLGPGPGGNHGAPHRPRWSPNWFWRRPVSSIAMEMSGRNSGP

SEQ ID NO: 82884 - protein, 94 aa, Homo sapiens
  MOD_RES (1)..(1): Any amino acid
XAPAPVSEAVCRTSMCSIQSAPPEPATLKGTVPDDAVEALADSLGKKEADPEDGKPVMDKVKEKAKEEDREKLGEKEETIPPDYRLEEVKSLGF

SEQ ID NO: 82885 - protein, 72 aa, Homo sapiens
  MOD_RES (1)..(1): Any amino acid
XDKKFARKPPRFSCLLPDPRELIEIKNKKKSSSIRNQRRGFSFCKRKASSPSQWTTQRLLSGSERTLGWTRR

SEQ ID NO: 82886 - protein, 255 aa, Homo sapiens
LQQAAEVSQLRGARVITPEDLLFLMRKDKKKLRRLLKYMFIRDYKSKIVKGIDEDDLLEDKLSGSNNANKRQKIAQDFLNSIDQTGELLAMFEDDEIDEVKQERMERAERQTRIMDSAQYAEFCESRQLSFSKKASKFRDWLDCSSMEIKPNVVAMEILAYLAYETVAQLVDLALLVRQDMVTKAGDPFSHAISATFIQYHNSAESTAACGVEAHSDAIQPCHIREAIRRYSHRIGPLSPFTNAFFPSFIFFSCC

SEQ ID NO: 82887 - protein, 449 aa, Homo sapiens
LDNEVEKTANLVISNWNQQIKAKKKLMVSTKKHEALFQLVESSKQSMTEKEKRKLLNKLTKSTEKLEKEDENYYQKNMAGYSTRLKWENTLENCYQVTHSICLYAFWVKRAWGKCVSDLRYQDIFLPGNLPPLWFGYDIVKRLIMRLCSVCLQSILELEKERIQLLCNNLNQYSQHISLFGQTLTTCHTQIHCAISKIDIEKDIQAVMEETAILSTENKSEFLLTDYFEEDPNSAMDKERRKSLLKPKLLRLQRDIEKASKDKEGLERMLKTYSSTSSFSDAKSQKDTAALMDENNLKLDLLEANSYKLSSMLAELEQRPQPSHPCSNSIFRWREKEHTHSYVKISRPFLMKRLENIVSKASSGGQSNPGSSTPAPGAAQLSSRLCKALYSFQARQDDELNLEKGDIVIIHEKKEEGWWFGSLNGKKGHFPAAYVEELPSNAGNTATKA

SEQ ID NO: 82888 - protein, 34 aa, Homo sapiens
NPLPETDSQPIPPSGGPFSENPALPAATVPQWRV

SEQ ID NO: 82889 - protein, 369 aa, Homo sapiens
MNGQLDLSGKLIIKAQLGEDIRRIPIHNEDITYDELVLMMQRVFRGKLLSNDEVTIKYKDEDGDLITIFDSSDLSFAIQCSRILKLTLFVNGQPRPLESSQVKYLRRELIELRNKVNRLLDSLEPPGEPGPSTNIPENDTVDGREEKSASDSSGKQSTQVMAASMSAFDPLKNQDEINKNVMSAFGLTDDQVSGPPSAPAEDRSGTPDSIASSSSAAHPPGVQPQQPPYTGAQTQAGQIEGQMYQQYQQQAGYGAQQPQAPPQQPQQYGIQYSAIVSRLDLNNLSSSRDMASNQLPRHQLLPFLVSLNNCLLSRHSSTRRAIILHKLTLPKLLSLLIILWLLPLNLEWLQANLGPINQDQVLLHFLEVP

SEQ ID NO: 82890 - protein, 82 aa, Homo sapiens
DYLHSLGKARTAQVQKDARIGEAEAKRDAGIREAKAKQEKVSAQYLSEIEMAKAQRDYELKKAAYDIEVNTRRAQADLAYQL

SEQ ID NO: 82891 - protein, 837 aa, Homo sapiens
MAANVGDQRSTDWSSQYSMVAGAGRENGMETPMHENPEWEKARQALASISKSGAAGGSAKSSSNGPVASAQYVSQAEASALQQQQYYQWYQQYNYAYPYSYYYPMPPVPGMDESMSYQAPPQQLPSAQPPQPSNPPHGAHTLNSGPQPGTAPATQHSQAGPATGQAYGPHTYTEPAKPKKGQQLWNRMKPAPGTGGLKFNIQKRPFAVTTQSFGSNAEGQHSGFGPQPNPEKVQNHSGSSARGNLSGKPDDWPQDMKEYVERCFTACESEEDKDRTEKLLKEVLQARLQDGSAYTIDWSREPLPGLTREPVAESPKKKRWEAASSLHPPRGAGSATRGGGAPSQRGTPGAGGAGRARGNSFTKFGNRNVFMKDNSSSSSTDSRSRSSSRSPTRHFRRSDSHSDSDSSYSGNECHPVGRRNPPPKGRGGRGAHMDRGRGRAQRGKRHDLAPTKRSRKKMAALECEDPERELKKQKRAARFQHGHSRRLRLEPLVLQMSSLESSGADPDWQELQIVGTCPDITKHYLRLTCAPDPSTVRPVAVLKKSLCMVKCHWKEKQDYAFACEQMKSIRQDLTVQGIRTEFTVEVYETHARIALEKGDHEEFNQCQTQLKSLYAENLPGNVGEFTAYRILYYIFTKNSGDITTELAYLTRELKADPCVAHALALRTAWALGNYHRFFRLYCHAPCMSGYLVDKFADRERKVALKAMIKTYVVPSSLLPLLFPSFRLAPPLRPAPGRRPPPAPNPCPGPCFPIIFLHSALPSPVPLALLVGHLCVPGHSSPSPHCSQLTASGASSPPHLCVSSSCSLLPGPPSSLLALGFLRTLRSLLSQLVAVLPP

SEQ ID NO: 82892 - protein, 240 aa, Homo sapiens
  MOD_RES (1)..(1): Any amino acid
XAADLDTQRSDIATLLKTSLRKGDTWYLVDSRWFKQWKKYVGFDSWDKYQMGDQNVYPGPIDNSGLLKDGDAQSLKEHLIDELDYILLPTEGWNKLVSWYTLMEGQEPIARKVVEQGMFVKHCKVEVYLTELKLCENGNMNNVVTRRFSKADTIDTIEKEIRKIFSIPDEKETRLWNKYMSNTFEPLNKPDSTIQDAGLYQGQVLVIEQKNEDGTWPRGPSTPNTISFLFIPTTLVLGFV

SEQ ID NO: 82893 - protein, 83 aa, Homo sapiens
  MOD_RES (1)..(1): Any amino acid
XDDRAFYLEARFVSLRDGFVCALLRFRQHLLGTSPERVVQHLCQRRVEPPELPADLQHWISYNEASSQLLRMESGLSDVTKDQ

SEQ ID NO: 82894 - protein, 140 aa, Homo sapiens
MLLSIGMLMLSATQVYTILTVQLFAFLNLLPVEADILAYNFENASQTFDDLPARFGYRLPAEGLKGFLINSKPENACEPIVPPPVKDNSSGTFIVLIRRLDCNFDIKVLNAQRAGYKAAIVHNVDSDDLISMGSNDSKYS

SEQ ID NO: 82895 - protein, 128 aa, Homo sapiens
MGSRNSSSAGSGSGDPSEGLPRRGAGLRRSEEEEEEDEDVDLAQALLDSEEENDRAWDGRLGDRYNPPVDATPDTRELEFNEIKTQVELATGQLGLRRAAQKHSFPRMLHQRERGLCHRGSFSLGEQS

SEQ ID NO: 82896 - protein, 125 aa, Homo sapiens
MSAEVKVTGQNQEQFLLLAKSAKGAALATLIHQVLEAPGVYVFGELLDMPNVRELAESDFASTFRLLTVFAYGTYADYLAEARNLPPLTEAQKNKLRHLSVVTLAAKVKCIPYAVLLEALALRNV

SEQ ID NO: 82897 - protein, 63 aa, Homo sapiens
MSDAQDGPRVRYNPYTTRPNRRGDTWHDRDRIHVTVRRDRAPPERGGAGTSQDGTSKNWFKIT

SEQ ID NO: 82898 - protein, 359 aa, Homo sapiens
MQRAVSVVARLGFRLQAFPPALCRPLSCAQEVLRRTPLYDFHLAHGGKMVAFAGWSLPVQYRDSHTDSHLHTRQHCSLFDVSHMLQGTLSLFTNEAGGILDDLIVTNTSEGHLYVVSNAGCWEKDLALMQDKVRELQNQGRDVGLEVLDNALLALQGPTAAQVLQAGVADDLRKLPFMTSAVMEVFGVSGCRVTRCGYTGEDGVEISVPVAGAVHLATAILKNPEVKLAGLAARDSLRLEAGLCLYGNDIDEHTTPVEGSLSWTLGKRRRAAMDFPGAKVIVPQLKGRVQRRRVGLMCEGAPMRAHSPILNMEGTKIGTVTSGCPSPSLKKNVAMGYVPCEYSRPGTMLLVELPSGPCF

SEQ ID NO: 82899 - protein, 1314 aa, Homo sapiens
MKQRKGQGSGGSRGRKKRGLSDISPSTSLPPLVEGQLRCFLKLTVNRVIWKIAKPPTCVLVRVRWWGETSDGTLFCPRDALQTEPKAVRTTTRYAIRCGPKQFTSYLTDMAVLVLEVITKLDGLPIGRVQINGLAQLSPTHQINGFFTIVSSTSKKLGELQVSLALEPLSETYDSYHPLPTTDMTENVLLSKQGFRENTEPSSTQFQVPSRPRDIHTIKIDGKELAANSSRSTTPRGKDHVCFAENPDTIKDSSFGLQHSLNSGQSLESVTLKGRAPRKQMSLLNSSEFQPQIRTVAKSHSDSCILSSNNLPTKDLLSALLEQGNKLRNAMVISAMKSSPETSMLLDQVHPPINEDSLRASTQIRAFSRNRFKDHIEDHLLPSTENTFWRHDTKADTRAIQLLLGSAELSQGNFWDGLGSPPDSPSPGSDVYCISELNDPQYDQSLLENLFYTAPKSDTSISDFLSEEDDIVPSKKISQSTALARSSKVLESSDHKLKKRSAGKRNRNLVEQQMLSETPEDAQTMTLSVDRLALLGRTHSVRIIIETMGVPPDSPQMTPGKKSYAGPPPKVTTAKKRTFFVEYHFPVGFSESGLGKTALITEVVRLASSKITDGKVKFQQRFVFPVQFGGPMIEHWWNSNLTFQIYVKKTPQKKPEVIGSVSLSLRAVIQSELLSFSDQLPVQQENGQSPFGPLKVTMELITDNKDFTGINTKLSGNTHYTPLCAPTSPNKALPELNQDMTCTKNPQNLNQIHEETAKKAQNLVLPNRKSPSPVAPHPSTFVATPASHNLVNQTNGTTKESALLLHVLLMVPDGKDFISGESEKQSPCNVYLNCKLFSTEEVTRSVIAWGTTQPVFNFSQVIPVSLSSKYLERLKNNVMVIETWNKVRSPGQDKLLGLVKLPLHQFYMSFKDAKISRLLLDAQYPVVAVDSYMPVIDVFSGHQNGSLRVFLAMGSSNQIMALQRLKNEEGTLPPFSPRPAHFLDQPTAASVAMAEDRGNGLMEHCFEIHIEMVKGLAPLQATVWGEADCYVQYYFPVQHSQSSVLKGPEFLENGITLKPFRTATTLCVPDPIFNSEHHHSLLLPAEVPVQRLLLSAFSAQGLVPGGGVQFEIWCRYYYPNVRDQKVAKGTLPLSRICAMVTTQHREDVGIQTFNLPLTPRIENRKELRNQSSGLLDVGLRYRRSPRTAEGVLAARTVSISVQIIRACGLQAAAKALAEREPALQFSATVGVNASVTTHLSFLPQGEQRRTHPVACSFCPEFSHHVEFTCNLVTQHCSGEACFLAELLEFAEVIFAVYHENTKSGEHHMTCHNQN

SEQ ID NO: 82900 - protein, 151 aa, Homo sapiens
  MOD_RES (1)..(1): Any amino acid
XQPQPFPQNSSQSAAITQPSSQPGSQPKLGPPQQGAQPPHQPAARPVAIPNTSHDGHWPRTVAPNSLVNSGAVGNSEPGFRGLTPPIPWEHAPRPHFPLVPASWPYGLHQNFMHQGNARFQPNKPFYTQDRCATRRCRERCPHPPRGNVSE

SEQ ID NO: 82901 - protein, 181 aa, Homo sapiens
MKEPTKLLKKHSTQVYLGPSKKTSVSNAGQWLYEEKPHKMDLLHENGPRPGLHENGISDIDEEFILKQFDIDYETKPSHDALHTMKLNQVPLELKRSVGLSKLQETEFFQKLGYERKLQKPQNPYKPKWVKMRYGAWYLNPKLWKKQRVDEPLVDPEVSHKAQEENFKKELQEQVCIYTEI

SEQ ID NO: 82902 - protein, 227 aa, Homo sapiens
EPVVNAVSIHQVKKQSQLSLLDYFLQEHGSYTTEAFLSAQRNFVQSCAGYCLVCYLLQVKDRHNGNILLDAEGHIIHIDFGFILSSSPRNLGFETSAFKLTTEFVDVMGGLDGDMFNYYKMLMLQGLIAARKHMDKVVQIVEIMQQGCRRCSGSSPSGPMMTVAQVICSQLPCFHGSSTIRNLKERFHMSMTEEQLQLLVEQMVDGSMRSITTKLYDGFQYLTNGIM

SEQ ID NO: 82903 - protein, 104 aa, Homo sapiens
  MOD_RES (1)..(1): Any amino acid
XQPTGQIKIKREDYESLPKEVASAKPKVLLDVKLKAEDFIVDVSQLLPEKFAEQLIRVYCKKVDRKSLYAARQYFVQWCADRNFTKPQVGGLLLTNFAQFFIFK

SEQ ID NO: 82904 - protein, 505 aa, Homo sapiens
MKDSNRCCCGQFTNQHIPPLPSATPSKNEEESKQVETQPEKWSVAKHTQSYPTDSYGVLEFQGGGYSNKAMYIRVSYDTKPDSLLHLMVKDWQLELPKLLISVHGGLQNFEMQPKLKQVFGKGLIKAAMTTGAWIFTGGVSTAPCGENLYDEEGKRLPPCIPGAWLTPALMACYLLVANILLVNLLIAVFNNTFFEVKSISNQVWKFQRYQLIMTFHDRPVLPPPMIILSHIYIIIMRLSGRCRKKREGDQEERDRGLKLFLSDEELKRLHEFEEQCVQEHFREKEDEQQSSSDERIRVTSERVENMSMRLEEINERETFMKTSLQTVDLRLAQLEELSNRMVNALENLAGIDRSDLIQARSRASSECEATYLLRQSSINSADGYSLYRYHFNGEELLFEDTSLSTSPGTGVRKKTCSFRIKEEKDVKTHLVPECQNSLHLSLGTSTSATPDGSHLAVDDLKNAEESKLGPDIGISKEDDERQTDSKKEETISPSLNKTDVIHGQ

SEQ ID NO: 82905 - protein, 132 aa, Homo sapiens
MITEHTSNDPYCFVEFYEHRDAAAALAAMNGRKILGKEVKVNWATTPSSQKKDTSNHFHVFVGDLSPEITTEDIKSAFAPFGKISDARVVKDMATGKSKGYGFVSFYNKLDAENAIVHMGGQWLGGRQIRTN

SEQ ID NO: 82906 - protein, 59 aa, Homo sapiens; identical to SEQ ID NO: 55061

SEQ ID NO: 82907 - protein, 218 aa, Homo sapiens; identical to SEQ ID NO: 43869
  MOD_RES (1)..(1): Any amino acid

SEQ ID NO: 82908 - protein, 77 aa, Homo sapiens
MKLLTGLVFCSLVLGVSSRSFFSFLGEAFDGARDMWRAYSDMREANYIGSDKYFHARGNYDAAKRGPGGAWAAEVIT

SEQ ID NO: 82909 - protein, 360 aa, Homo sapiens
  MOD_RES (1)..(1): Any amino acid
XFPLRVIDSGTSDFALSNRYMQVWFSGLTGLLKPYVPKEPPVLRVTEGPFFSEVVAYYEHIHQAVRLYNLPGVEGLSLDISSLVDIRDYVNKELALHIHTDIDSQGIFFTDLNGFQVQPRRYLKKLPLQANFYPMPVMAYIQDAQKRLTLHTAQALGVSSLKDGQLEVILDRRLMQDDNRGLGQGLKDNKRTCNRFRLLLERRTVGSEVQDSHSTSYPSLLSHLTSMYLNAPALALPVARMQLPGPGLRSFHPLASSLPCDFHLLNLRTLQAEEDTLPSAETALILHRKGFDCGLEAKNLGFNCTTSQGKVALGSLFHGLDVVFLQPTSLTLLYPLASPSNSTDVYLEPMEIATFRLRLG

SEQ ID NO: 82910 - protein, 76 aa, Homo sapiens
MVVQNSADAGDMRAGVQLEPFLHQVGGHMSVMKYDEHTVCKPLVSREQRFYESLPLAMKRFTPQYKGTVTVHLWKD

SEQ ID NO: 82911 - protein, 81 aa, Homo sapiens
MPPPADIVKVAIEWPGAYPKLMEIDQKKPLSAIIKEVCDGWSLANHEYFALQHADSSNFYITEKNRNEIKNGTILRLTTSP

SEQ ID NO: 82912 - protein, 757 aa, Homo sapiens
MGRGSGTFERLLDKATSQLLLETDWESILQICDLIRQGDTQAKYAVNSIKKKVNDKNPHVALYALEVMESVVKNCGQTVHDEVANKQTMEELKDLLKRQVEVNVRNKILYLIQAWAHAFRNEPKYKVVQDTYQIMKVEGHVFPEFKESDAMFAAERAPDWVDAEECHRCRVQFGVMTRKHHCRACGQIFCGKCSSKYSTIPKFGIEKEVRVCEPCYEQLNRKAEGKATSTTELPPEYLTSPLSQQSQLPPKRDETALQEEEELQLALALSQSEAEEKERLRQKSTYTSYPKAEPMPSASSAPPASSLYSSPVNSSAPLAEDIDPELARYLNRNYWEKKQEEARKSPTPSAPVPLTEPAAQPGEGHAAPTNVVEPQFHNGESEESHEQFLKALQNAVTTFVNRMKSNHMRGRSITNDSAVLSLFQSINGMHPQLLELLNQLDERRLYYEGLQDKLAQIRDARGALSALREEHREKLRRAAEEAERQRQIQLAQKLEIMRQKKQEYLEVQRQLAIQRLQEQEKERQMRLEQQKQTVQMRAQMPAFPLPYAQLQAMPAAGGVLYQPSGPASFPSTFSPAGSVEGSPMHGVYMSQPAPAAGPYPSMPSTAADPSMVSAYMYPAGATGAQAAPQAQAGPTASPAYSSYQPTPTAGYQNVASQAPQSLPAISQPPQSSTMGYMGSQSVSMGYQPYNMQNLMTTLPSQDASLPPQQPYIAGQQPMYQQMAPSGGPPQQQPPVAQQPQAQGPPAQGSEAQLISFD

SEQ ID NO: 82913 - protein, 845 aa, Homo sapiens
MTIPDVFPHLPLIAITRNPVFPRFIKIIEVKNKKLVELLRRKVRLAQPYVGVFLKRDDSNESDVVESLDEIYHTGTFAQIHEMQDLGDKLRMIVMGHRRVHISRQLEVEPEEPEAENKHKPRRKSKRGKKEAEDELSARHPAELAMEPTPELPAEVLMVEVENVVHEDFQVTEEVKALTAEIVKTIRDIIALNPLYRESVLQMMQAGQRVVDNPIYLSDMGAALTGAESHELQDVLEETNIPKRLYKALSLLKKEFELSKLQQRLGREVEEKIKQTHRKYLLQEQLKIIKKELGLEKDDKDAIEEKFRERLKELVVPKHVMDVVDEELSKLGLLDNHSSEFNVTRNYLDWLTSIPWGKYSNENLDLARAQAVLEEDHYGMEDVKKRILEFIAVSQLRGSTQGKILCFYGPPGVGKTSIARSIARALNREYFRFSVGGMTDVAEIKGHRRTYVGAMPGKIIQCLKKTKTENPLILIDEVDKIGRGYQGDPSSALLELLDPEQNANFLDHYLDVPVDLSKVLFICTANVTDTIPEPLRDRMEMINVSGYVAQEKLAIAERYLVPQARALCGLDESKAKLSSDVLTLLIKQYCRESGVRNLQKQVEKVLRKSAYKIVSGEAESVEVTPENLQDFVGKPVFTVERMYDVTPPGVVMGLAWTAMGGSTLFVETSLRRPQDKDAKGDKDGSLEVTGQLGEVMKESARIAYTFARAFLMQHAPANDYLVTSHIHLHVPEGATPKDGPSAGCTIVTALLSLAMGRPVRQNLAMTGEVSLTGKILPVGGIKEKTIAAKRAGVTCIVLPAENKKDFYDLAAFITEGLEVHFVEHYREIFDIAFPDEQAEALAVER

SEQ ID NO: 82914 - protein, 1107 aa, Homo sapiens
MAKMEVKTSLLDNMIGVGDMVLLEPLNEETFINNLKKRFDHSEIYTYIGSVVISVNPYRSLPIYSPEKVEEYRNRNFYELSPHIFALSDEAYRSLRDQDKDQCILITGESGAGKTEASKLVMSYVAAVCGKGAEVNQVKEQLLQSNPVLEAFGNAKTVRNDNSSRFGKYMDIEFDFKGDPLGGVISNYLLEKSRVVKQPRGERNFHVFYQLLSGASEELLNKLKLERDFSRYNYLSLDSAKVNGVDDAANFRTVRNAMQIVGFMDHEAESVLAVVAAVLKLGNIEFKPESRVNGLDESKIKDKNELKEICELTGIDQSVLERAFSFRTVEAKQEKVSTTLNVAQAYYARDALAKNLYSRLFSWLVNRINESIKAQTKVRKKVMGVLDIYGFEIFEDNSFEQFIINYCNEKLQQIFIELTLKEEQEEYIREDIEWTHIDYFNNAIICDLIENNTNGILAMLDEECLRPGTVTDETFLEKLNQVCATHQHFESRMSKCSRFLNDTSLPHSCFRIQHYAGKVLYQVEGFVDKNNDLLYRDLSQAMWKASHALIKSLFPEGNPAKINLKRPPTAGSQFKASVATLMKNLQTKNPNYIRCIKPNDKKAAHIFNEALVCHQIRYLGLLENVRVRRAGYAFRQAYEPCLERYKMLCKQTWPHWKGPARSGVEVLFNELEIPVEEYSFGRSKIFIRNPRTLFKLEDLRKQRLEDLATLIQKIYRGWKCRTHFLLMKKSQIVIAAWYRRYAQQKRYQQTKSSALVIQSYIRGWKARKILRELKHQKRCKEAVTTIAAYWHGTQARRELKRLKEEARRKHAVAVIWAYWLGLKVRREYRKFFRANAGKKIYEFTLQRIVQKYFLEMKNKMPSLSPIDKNWPSRPYLFLDSTHKELKRIFHLWRCKKYRDQFTDQQKLIYEEKLEASELFKDKKALYPSSVGQPFQGAYLEINKNPKYKKLKDAIEEKIIIAEVVNKINRANGKSTSRIFLLTNNNLLLADQKSGQIKSEVPLVDVTKVSMSSQNDGFFAVHLKEGSEAASKGDFLFSSDHLIEMATKLYRTTLSQTKQKLNIEISDEFLVQFRQDKVCVKFIQGNQKNGSVPTCKRKNNRLLEVAVP

SEQ ID NO: 82915 - protein, 77 aa, Homo sapiens
MHKEEHEVAVLGPPPSTILPRSTVINIHSETSVPDHVVWSLFNTLFLNWCCLGFIAFAYSVKTGTQALPESEKGTHR

SEQ ID NO: 82916 - protein, 82 aa, Homo sapiens
MSGLVLGQRDEPAGHRLSQEEILGSTRLVSQGLEALRSEHQAVLQSLSQTIECLQQGGHEEGLVHEKARQLRRSMENIELGL

SEQ ID NO: 82917 - protein, 155 aa, Homo sapiens
MVKLFIGNLPREATEQEIRSLFEQYGKVLECDIIKNYGFVHIEDKTAAEDAIRNLHHYKLHGVNINVEASKNKSKTSTKLHVGNISPTCTNKELRAKFEEYGPVIECDIVKDYAFVHMERAEDAVEAIRGLDNTEFQVETGFHRVNQDGLDLLTS

SEQ ID NO: 82918 - protein, 294 aa, Homo sapiens
MDADEGQDMSQVSVIKEETNHSEMAEDLCKIGSERSLVLDRLASNVAKRKSSMPQKFLGDKGLSDTPYDSSASYEKENEMMKSHVMDQAINNAINYLGAESLRPLVQTPPGGSEVVPVISPMYQLHKPLAEGTPRSNHSAQDSAVENLLLLSKAKLVPSEREASPSNSCQDSTDTESNNEEQRSGLIYLTNHIAPHARNGLSLKEEHRAYDLLRAASENSQDALRVVSTSGEQMKVYKCEHCRVLFLDHVMYTIHMGCHGFRDPFECNMCGYHSQDRYEFSSHITRGEHRFHMS

SEQ ID NO: 82919 - protein, 167 aa, Homo sapiens
MQLSGGADMAKSKNHTTHNQSRKWHRNGIKKPRSQRYESLKGVDPKFLRNMRFAKKHNKKGLKKMQANNAKAMSARAEAIKALVKPKEVKPKIPKGVSRKLDRLAYIAHPKLGKRARARIAKGLRLCRPKAKAKAKAKDQTKAQAAAPASVPAQAPKRTQAPTKASE

SEQ ID NO: 82920 - protein, 618 aa, Homo sapiens
MALVRFVNLISERKTKFAKVPLKCLAQEVNIPDWIVDLRHELTHKKMPHINDCRRGCYFVLDWLQKTYWCRQLENSLRETWELEEFREGIEEEDQEEDKNIVVDDITEQKPEPQDDGKSTESDVKADGDSKGSEEVDSHCKKALSHKELYERARELLVSYEEEQFTVLEKFRYLPKAIKAWNNPSPRVECVLAELKGVTCENREAVLDAFLDDGFLVPTFEQLAALQIEYEDGQTEVQRGEGTDPKSHKNVDLNDVLVPKPFSQFWQPLLRGLHSQNFTQALLERMLSELPALGISGIRPTYILRWTVELIVANTKTGRNARRFSAGQWEARRGWRLFNCSASLDWPRMVESCLGSPCWASPQLLRIIFKAMGQGLPDEEQEKLLRICSIYTQSGENSLVQEGSEASPIGKSPYTLDSLYWSVKPASSSFGSEAKAQQQEEQGSVNDVKEEEKEEKEVLPDQVEEEEENDDQEEEEEDEDDEDDEEEDRMEVGPFSTGQESPTAENARLLAQKRGALQGSAWQVSSEDVRWDTFPLGRMPGQTEDPAELMLENYDTMYLLDQPVLEQRLEPSTCKTDTLGLSCGVGSGNCSNSSSSNFEGLLWSQGQLHGLKTGLQLF

SEQ ID NO: 82921 - protein, 135 aa, Homo sapiens
MEPFSCDTFVALPPATVDNRIIFGKNSDRLYDEVQEVVYFPAVVHDNLGERLKCTYIEIDQVPETYAVVLSRPAWLWGAEMGANEHGVCIGNEAVWGREEVCDEEALLGMDLVRLGLERADTAEKALNVIVDLLE

SEQ ID NO: 82922 - protein, 178 aa, Homo sapiens
MNCKEGTDSSCGCRGNDEKKMLKCVVVGDGAVGKTCLLMSYANDAFPEEYVPTVFDHYAVTVTVGGKQHLLGLYDTAGQEDYNQLRPLSYPNTDVFLICFSVVNPASYHNVQEEWVPELKDCMPHVPYVLIGTQIDLRDDPKTLARLLYMKEKPLTYEHGVKLAKAVQSDLNFILNVC

SEQ ID NO: 82923 - protein, 128 aa, Homo sapiens
MSHRAWAEGKKRNPGLKIPKEAFEQPQTSSTPPRDLDSKACISIGNQNFEVKADDLEPIMELGRGAYGVVEKMRHVPSGQIMAVKRIRATVNSQEQKRLLMDLDISMRTVDCPFTVTFYGALFREGDV

SEQ ID NO: 82924 - protein, 277 aa, Homo sapiens
MAPRPRARPGVAVACCWLLTVVLRCCVSFNVDVKNSMTFSGPVEDMFGYTVQQYENEEGKWVLIGSPLVGQPKNRTGDVYKCPVGRGESLPCVKLDLPVNTSIPNVTEVKENMTFGSTLVTNPNGGFLACGPLYAYRCGHLHYTTGICSDVSPTFQVVNSIAPVQECSTQLDIVIVLDGSNSIYPWDSVTAFLNDLLERMDIGPKQTQVGIVQYGENVTHEFNLNKYSSTEEVLVAAKKIVQRGGRQTMTALGIDTARRHSRKPGVPEEELKKSWLL

SEQ ID NO: 82925 - protein, 1061 aa, Homo sapiens
MDLYSTPAAALDRFVARRLQPRKEFVEKARRALGALAAALRERGGRLGAAAPRVLKTVKSYVDQRARRAEILSEMRASLESWWQNPVPGLRLTFPEQSVPGALQFRLTSVDLEDWMDVSLVPAFNVLGQAGSGVKPKPQVYSTLLNSGCQGGEHAACFTELRRNFVNIRPAKLKNLILLVKHWYHQVCLQGLWKETLPPVYALELLTIFAWEQGCKKDAFSLAEGLRTVLGLIQQHQHLCVFWTVNYGFEDPAVGQFLQRQLKRPRPVILDPADPTWDLGNGAAWHWDLLAQEAASCYDHPCFLRGMGDPVQSWKGPGLPRAGCSGLGHPIQLDPNQKTPENSKSLNAVYPRAGSKPPSCPAPGPTGAASIVPSVPGMALDLSQIPTKELDRFIQDHLKPSPQFQEQVKKAIDIILRCLHENCVHKASRVSKGGSFGRGTDLRDGCDVELIIFLNCFTDYKDQGPRRAEILDEMRAQLESWWQDQVPSLSLQFPEQNVPEALQFQLVSTALKSWTDVSLLPAFDAVGQLSSGTKPNPQVYSRLLTSGCQEGEHKACFAELRRNFMNIRPVKLKNLILLVKHWYRQVAAQNKGKGPAPASLPPAYALELLTIFAWEQGCRQDCFNMAQGFRTVLGLVQQHQQLCVYWTVNYSTEDPAMRMHLLGQLRKPRPLVLDPADPTWNVGHGSWELLAQEAAALGMQACFLSRDGTSVQPWDVMPALLYQTPAGDLDKFISEFLQPNRQFLAQVNKAVDTICSFLKENCFRNSPIKVIKVVKGGSSAKGTALRGRSDADLVVFLSCFSQFTEQGNKRAEIISEIRAQLEACQQERQFEVKFEVSKWENPRVLSFSLTSQTMLDQSVDFDVLPAFDALGQLVSGSRPSSQVYVDLIHSYSNAGEYSTCFTELQRDFIISRPTKLKSLIRLVKHWYQQCTKISKGRGSLPPQHGLELLTVYAWEQGGKDSQFNMAEGFRTVLELVTQYRQLCIYWTINYNAKDKTVGDFLKQQLQKPRPIILDPADPTGNLGHNARWDLLAKEAAACTSALCCMGRNGIPIQPWPVKAAV

SEQ ID NO: 82926 - protein, 120 aa, Homo sapiens
MELFQAKDHYILQQGERALWCSRRDGGLQLRPATDLLLAWNPICLGLVEGVIGKIQLHSDSNWGHVYSAYLLCLCVLAHCRAIQKYSLHSTPLHGCAIVYSTTVLYLDIRLFPVFIVIIK

SEQ ID NO: 82927 - protein, 64 aa, Homo sapiens
MSTPARRRLMRDFKRLQEDPPAGVSGAPSENNIMVWNAVIFGPEGTPFEDDGVAPCHPGWSAMV

SEQ ID NO: 82928 - protein, 94 aa, Homo sapiens
MSSPQAPEDGQGCGDRGDPPGDLRSVLVTTVLNLEPLDEDLFRGRHYWVPAKRLFGGQIVGQALVAAAKSVSEDVHVHSLHCYFVRADALMCSA

SEQ ID NO: 82929 - protein, 156 aa, Homo sapiens
MTEDSQRNFRSVYYEKVGFRGVEEKKSLEILLKDDRLDTEKLCTFSQRFPLPSMYRALVWKVLLGILPPHHESHAKVMMYRKEQYLDVLHALKVVRFVSDATPQAEVYLRMYQLESGKLPRSPSFPLEPDDEVFLAIAKAMEEMVEDSVDCYWITR

SEQ ID NO: 82930 - protein, 182 aa, Homo sapiens
MEKIPEDGPALIIFYHGAIPIDFYYFMAKIFIHKGRTCRVVADHFVFKIPGFSLLLDVFCALHGPREKCVEILRSGHLLAISPGGVREALISDETYNIVWGHRRGFAQVAIDAKVPIIPMFTQNIREGFRSLGGTRLFRWLYEKFRYPFAPMYGGFPVKLRTYLGDPIPYDPQITAEELAEK

SEQ ID NO: 82931 - protein, 66 aa, Homo sapiens
MSGQTLTDRIAAAQYSVTGSAVARAVCKATTHEVMGPKKKHLDYLIQATNETNVNIPQMADTLFER

SEQ ID NO: 82932 - protein, 342 aa, Homo sapiens
MAEAMDLGKDPNGPTHSSTLFVRDDGSSMSFYVRPSPAKRRLSTLILHGGGTVCRVQEPGAVLLAQPGEALAEASGDFISTQYILDCVERNERLELEAYRLGPASAADTGSEAKPGALAEGAAEPEPQRHAGRIAFTDADDVAILTYVKENARSPSSVTGNALWKAMEKSSLTQHSWQSLKDRYLKHLRGQEHKYLLGDAPVSPSSQKLKRKAEEDPEAADSGEPQNKRTPDLPEEEYVKEEIQENEEAVKKMLVEATREFEEVVVSISSQSWLILSSTFGRFSCIWAGYAFSTSGSHSHHPECSAVARSQLSAASISQAQAILPPQPPEKLELQECATASG

SEQ ID NO: 82933 - protein, 122 aa, Homo sapiens
MEDVNSNVNADQEVIAHSEYQKSKRISIFLSMQDEIETEEIIKDIFQRGKICFIPRYRFQSNHMDMVRIESPEEISLLPKTSWNIPQPGEGDVREEALSTGGLDLIFMPGLGFDKHGNRLGR

SEQ ID NO: 82934 - protein, 113 aa, Homo sapiens
  MOD_RES (1)..(1): Any amino acid
XCRNKIVAIKRYRANTYCSKSDVDMFCREVSILCQLNHPCVIQFVGACLNDPSQFAIVTQYISGGSLFSLLHEQKRILDLQSKLIIAVDVAKGMEYLHNLTQPIIHRDLNRAS

SEQ ID NO: 82935 - protein, 197 aa, Homo sapiens
MAQLGAVVAVASSFFCASLFSAVHKIEEGHIGVYYSGGVMIYFDRIEVVNFLVPNAVYDIVKNYTADYDKALIFNKIHHELNQFCSVHTLQEVYIELFDQIDENLKLALQQDLTSMAPGLVIQAVRVTKPNIPEAIRRNYELMESEKTKLLIAAQKQKVVEKEAETERKKALIEAEKVAQVAEITYGQKVMEKETEK

SEQ ID NO: 82936 - protein, 115 aa, Homo sapiens
MSGSTPFQMRLVHLDLKGAPPKVSYLSEIFPLFRALGANGLLIEYEDMFPYEGPLRLLRAKYAYRLECSGAILAHRELCLPGSSDSPASASRVAGITAPLKSKRSCIWLDSMSWR

SEQ ID NO: 82937 - protein, 50 aa, Homo sapiens
MLERPPALAMPMPTEGTPPPLSGTPIPVPAYFRHAEPGFSLKRPRGLSRS

SEQ ID NO: 82938 - protein, 284 aa, Homo sapiens
MDAIKKKMQMLKLDKENAIDRAEQAEADKKQAEDRCKQLEEEQQALQKKLKGTEDEVEKYSESVKEAQEKLEQAEKKATDAEADVASLNRRIQLVEEELDRAQERLATALQKLEEAEKAADESERGMKVIENRAMKDEEKMELQEMQLKEAKHIAEDSDRKYEEVARKLVILEGELERSEERAEVAESKCGDLEEELKIVTNNLKSLEAQADKYSTKEDKYEEEIKLLEEKLKEAETRAEFAERSVAKLEKTIDDLEETLASAKEENVEIHQTLDQTLLELNNL

SEQ ID NO: 82939 - protein, 777 aa, Homo sapiens
MGRGSGTFERLLDKATSQLLLETDWESILQICDLIRQGDTQAKYAVNSIKKKVNDKNPHVALYALEVMESVVKNCGQTVHDEVANKQTMEELKDLLKRQVEVNVRNKILYLIQAWAHAFRNEPKYKVVQDTYQIMKVEGHVFPEFKESDAMFAAERAPDWVDAEECHRCRVQFGVMTRKHHCRACGQIFCGKCSSKYSTIPKFGIEKEVRVCEPCYEQLNRKAEGKATSTTELPPEYLTSPLSQQSQLPPKRDETALQEEEELQLALALSQSEAEEKERLRQKSTYTSYPKAEPMPSASSAPPASSLYSSPVNSSAPLAEDIDPELARYLNRNYWEKKQEEARKSPTPSAPVPLTEPAAQPGEGHAAPTNVVENPLPETDSQPIPPSGGPFSEPQFHNGESEESHEQFLKALQNAVTTFVNRMKSNHMRGRSITNDSAVLSLFQSINGMHPQLLELLNQLDERRLYYEGLQDKLAQIRDARGALSALREEHREKLRRAAEEAERQRQIQLAQKLEIMRQKKQEYLEVQRQLAIQRLQEQEKERQMRLEQQKQTVQMRAQMPAFPLPYAQLQAMPAAGGVLYQPSGPASFPSTFSPAGSVEGSPMHGVYMSQPAPAAGPYPSMPSTAADPSMVSAYMYPAGATGAQAAPQAQAGPTASPAYSSYQPTPTAGYQNVASQAPQSLPAISQPPQSSTMGYMGSQSVSMGYQPYNMQNLMTTLPSQDASLPPQQPYIAGQQPMYQQGETHTRGPFSADRTRTQVSGQIRASASVDRKNREFT

SEQ ID NO: 82940 - protein, 54 aa, Homo sapiens
MGCKGDASGVCYKMGVLVVLTVLWLFSSVKADSKAITTSLTTKWFSTPLLLEAR

SEQ ID NO: 82941 - protein, 626 aa, Homo sapiens
MSGCGLFLRTTAAARACRGLVVSTANRRLLRTSPPVRAFAKELFLGKIKKKEVFPFPEVSQDELNEINQFLGPVEKFFTEEVDSRKIDQEGKIPDETLEKLKSLGLFGLQVPEEYGGLGFSNTMYSRLGEIISMDGSITVTLAAHQAIGLKGIILAGTEEQKAKYLPKLASGEHIAAFCLTEPASGSDAASIRSRATLSEDKKHYILNGSKVWITNGGLANIFTVFAKTEVVDSDGSVKDKITAFIVERDFGGVTNGKPEDKLGIRGSNTCEVHFENTKIPVENILGEVGDGFKVAMNILNSGRFSMGSVVAGLLKRLIEMTAEYACTRKQFNKRLSEFGLIQEKFALMAQKAYVMESMTYLTAGMLDQPGFPDCSIEAAMVKVFSSEAAWQCVSEALQILGGLGYTRDYPYERILRDTRILLIFEGTNEILRMYIALTGLQHAGRILTTRIHELKQAKVSTVMDTVGRRLRDSLGRTVDLGLTGNHGVVHPSLADSANKFEENTYCFGRTVETLLLRFGKETKTGKDAAQGGTMWGTGLGSESPLGASVIPDHHGGAAGTEAGGQHPHQPVWHDGRAVAGQPLHPHWAPQPRPRGSLGQHLLRGSLLAESLQPLSAGQVCSRKPR

SEQ ID NO: 82942 - protein, 116 aa, Homo sapiens
MSAPAQPPAEGTEGTAPGGGPPGPPPNMTSNRRLQQTQAQVEEVVDIIRVNVDKVLERDQKLSELDDRADALQAGASQFESSAAKLKRKYWWKNCKMMIMLGAICAIIVVVIVRRG

SEQ ID NO: 82943 - protein, 965 aa, Homo sapiens
VLMEHKATTIQKHVRGWMARRHFQRLRDAAIVIQCAFRMLKARRELKALRIEARSAEHLKRLNVGMENKVVQLQRKIDEQNKEFKTLSEQLSVTTSTYTMEVERLKKELVHYQQSPGEDTSLRLQEEVESLRTELQRAHSERKILEDAHSREKDELRKRVADLEQENALLKDEKEQLNNQILCQSKDEFAQNSVKENLMKKELEEERSRYQNLVKEYSQLEQRYDNLRDEMTIIKQTPGHRRNPSNQSSLESDSNYPSISTSEIGDTEDALQQVEEIGLEKAAMDMTVFLKLQKRVRELEQERKKLQVQLEKREQQDSKKVQAEPPQTDIDLDPNADLAYNSLKRQELESENKKLKNDLNELRKAVADQATQNNSSHGSPDSYSLLLNQLKLAHEELEVRKEEVLILRTQIVSADQRRLAGRNAEPNINARSSWPNSEKHVDQEDAIEAYHGVCQTNRLLEAQLQAQSLEHEEEVEHLKAQLEALKEEMDKQQQTFCQTLLLSPEAQVEFGVQQEISRLTNENLDLKELVEKLEKNERKLKKQLKIYMKKAQDLEAAQALAQSERKRHELNRQVTVQRKEKDFQGMLEYHKEDEALLIRNLVTDLKPQMLSGTVPCLPAYILYMCIRHADYTNDDLKVHSLLTSTINGIKKVLKKHNDDFEMTSFWLSNTCRLLHCLKQYSGDEGFMTQNTAKQNEHCLKNFDLTEYRQVLSDLSIQIYQQLIKIAEGVLQPMIVSAMLENESIQGLSGVKPTGYRKRSSSMADGDNSYCLEAIIRQMNAFHTVMCDQGLDPEIILQVFKQLFYMINAVTLNNLLLRKDVCSWSTGMQLRYNISQLEEWLRGRNLHQSGAVQTMEPLIQAAQLLQLKKKTQEDAEAICSLCTSLSTQQIVKILNLYTPLNEFEERVTVAFIRTIQAQLQERNDPQQLLLDAKHMFPVLFPFNPSSLTMDSIHIPACLNLEFLNEV

SEQ ID NO: 82944 - protein, 94 aa, Homo sapiens
MKDEPRSTNLFMKLDSVFIWKEPFGLVLIIAPWNYPLNLTLVLLVGALAAGSCVVLKPSEISQGTEKVLAEVLPQYLDQSCFAVVLGGPQETGQ

SEQ ID NO: 82945 - protein, 54 aa, Homo sapiens
MEKTHRGPGLAPGQIYTYPARCWRKKRRLNILEDPRLRPCEYKIDCEAPLKKEG

SEQ ID NO: 82946 - protein, 1160 aa, Homo sapiens
MPLHIGDFVWDSKVHSLQSSLNIFSLLPTKGRTEHLFFSHILSFHWPAFSSIRLELWINLRCEFLRSKKSSEEITQYIQSYKGFVDITGEHFVNSWVQRELPMASAYCNDSIFAYEELRLDSFKDWPRESAVGVAALAKAGLFYTGIKDIVQCFSCGGCLEKWQEGDDPLDDHTRCFPNCPFLQNMKSSAEVTPDLQSRGELCELLETTSESNLEDSIAVGPIVPEMAQGEAQWFQEAKNLNEQLRAAYTSASFRHMSLLDISSDLATDHLLGCDLSIASKHISKPVQEPLVLPEVFGNLNSVMCVEGEAGSGKTVLLKKIAFLWASGCCPLLNRFQLVFYLSLSSTRPDEGLASIICDQLLEKEGSVTEMCMRNIIQQLKNQVLFLLDDYKEICSIPQVIGKLIQKNHLSRTCLLIAVRTNRARDIRRYLETILEIKAFPFYNTVCILRKLFSHNMTRLRKFMVYFGKNQSLQKIQKTPLFVAAICAHWFQYPFDPSFDDVAVFKSYMERLSLRNKATAEILKATVSSCGELALKGFFSCCFEFNDDDLAEAGVDEDEDLTMCLMSKFTAQRLRPFYRFLSPAFQEFLAGMRLIELLDSDRQEHQDLGLYHLKQINSPMMTVSAYNNFLNYVSSLPSTKAGPKIVSHLLHLVDNKESLENISENDDYLKHQPEISLQMQLLRGLWQICPQAYFSMVSEHLLVLALKTAYQSNTVAACSPFVLQFLQGRTLTLGALNLQYFFDHPESLSLLRSIHFPIRGNKTSPRAHFSVLETCFDKSQVPTIDQDYASAFEPMNEWERNLAEKEDNVKSYMDMQRRASPDLSTGYWKLSPKQYKIPCLEVDVNDIDVVGQDMLEILMTVFSASQRIELHLNHSRGFIESIRPALELSKASVTKCSISKLELSAAEQELLLTLPSLESLEVSGTIQSQDQIFPNLDKFLCLKELSVDLEGNINVFSVIPEEFPNFHHMEKLLIQISAEYDPSKLVKLIQNSPNLHVFHLKCNFFSDFGSLMTMLVSCKKLTEIKFSDSFFQAVPFVASLPNFISLKILNLEGQQFPDEETSEKFAYILGSLSNLEELILPTGDGIYRVAKLIIQQCQQLHCLRVLSFFKTLNDDSVVEIAKVAISGGFQKLENLKLSINHKITEEGYRNFFQALDNMPN

SEQ ID NO: 82947 - protein, 290 aa, Homo sapiens
MAPGRAVAGLLLLAAAGLGGVAEGPGLAFSEDVLSVFGANLSLSAAQLQHLLEQMGAASRVGVPEPGQLHFNQCLTAEEIFSLHGFSNATQITSSKFSVICPAVLQQLNFHPCEDRPKHKTRPSHSEVWGYGFLSVTIINLASLLGLILTPLIKKSYFPKILTFFVGLAIGTLFSNAIFQLIPEAFGFDPKVDSYVEKAVAVFGGFYLLFFFERMLKMLLKTYGQNGHTHFGNDNFGPQEKTHQPKALPAINGVTCYANPAVTEANGHIHFDNVSVVSLQFGNTESRPAP

SEQ ID NO: 82948 - protein, 57 aa, Homo sapiens
  MOD_RES (1)..(1): Any amino acid
XILLGATCGLKTILTLTGVSTLGDVKNNQESDCVSKKKMVPDFYVDSIADLLPALQG

SEQ ID NO: 82949 - protein, 214 aa, Homo sapiens
MLLPAPALRRALLSRPWTGAGLRWKHTSSLKVANEPVLAFTQGSPERDALQKALKDLKGRMEAIPCVVGDEEVWTSDVQYQVSSLLNKAIEAALAARKEWDLKPIADRAQIFLKAADMLSGPRRAEILAKTMVGQGKTVIQAEIDAAAELIDFFRFNAKYAVELEGQQPISVPPSTNSTVYRGLEGFVAAISPFNFTAIGGNLAGAPALMVRCG

SEQ ID NO: 82950 - protein, 48 aa, Homo sapiens
  MOD_RES (1)..(1): Any amino acid
XHCSNYSTQELLRFPKLHDAIVEVVTCLLRKRLPVTNEMCIWVLGSGW

SEQ ID NO: 82951 - protein, 107 aa, Homo sapiens
MADGVDHIDIYADVGEEFNQEAEYGGHDQIDLYDDVISPSANNGDAPEDRDYMDTLPPTVGDDVGKGAAPNVVYTYTGKRIALYIGNLTWGETEFAKLCHPGWSAVV

SEQ ID NO: 82952 - protein, 18 aa, Homo sapiens
QKLLSRIARDKWPHSLSF

SEQ ID NO: 82953 - protein, 87 aa, Homo sapiens
MARMNRPAPVEVSYKHMRFLITHNPTNATLSTFIESGMKYEDAIQFIRQKRRGAINSKQLTYLEKYRPKQRLRFKDPHTHKTRCCVM

SEQ ID NO: 82954 - protein, 106 aa, Homo sapiens
MAGIKALISLSFGGAIGLMFLMLGCALPIYNKYWPLFVLFFYILSPIPYCIARRLVDDTDAMSNACKELAIFLTTGIVVSAFGLPIVFARAHLCEDCSWSSCMCRK

SEQ ID NO: 82955 - protein, 465 aa, Homo sapiens [sequence omitted]

SEQ ID NO: 82956 - protein, 193 aa, Homo sapiens
CFQHVKPCIADFMPILGTNLNPEFISVCNNATWAIGEISIQMGIEMQPYIPMVLHQLVEIINRPNTPKTLLENTAITIGRLGYVCPQEVAPMLQQFIRPWCTSLRNIRDNEEKDSAFRGICTMISVNPSGVIQDFIFFCDAVASWINPKDDLRDMFCKILHGFKNQVGDENWRRFSDQFPLPLKERLAAFYGV

SEQ ID NO: 82957 - protein, 66 aa, Homo sapiens
MAEHAPRRCCLGWDFSTQQVKVVAVDAELNVFYEESVHFDRDLPEFGATLEAHVEHDRATINLVPE

SEQ ID NO: 82958 - protein, 471 aa, Homo sapiens
MNILLQYVVKSFDRSTKVIDFHYPNELLQEYNWELADQPQNLEEILMHCQTTLKYAIKTGHPRYFNQLSTGLDMVGLAADWLTSTANTNMFTYEIAPVFVLLEYVTLKKMREIIGWPGGSGDGIFSPGGAISNMYAMMIARFKMFPEVKEKGMAALPRLIAFTSEHSHFSLKKGAAALGIGTDSVILIKCDERGKMIPSDLERRILEAKQKGFVPFLVSATAGTTVYGAFDPLLAVADICKKYKIWMHVDAAWGGGLLMSRKHKWKLSGVERANSVTWNPHKMMGVPLQCSALLVREEGLMQNCNQMHASYLFQQDKHYDLSYDTGDKALQCGRHVDVFKLWLMWRAKGTTGFEAHVDKCLELAEYLYNIIKNREGYEMVFDGKPQHTNVCFWYIPPSLRTLEDNEERMSRLSKVAPVIKARMMEYGTTMVSYQPLGDKVNFFRMVISNPAATHQDIDFLIEEIERLGQDL

SEQ ID NO: 82959 - protein, 380 aa, Homo sapiens
MADCSLDLPGSSSPPSHLSLLRSWDHRRVPPCPALQGTPLSATLSLVMSQCCRKIKDTVQKLASDHKDIHSSVSRVGKAIDRNFDSEICGVVSDAVWDAREQQQQILQMAIVEHLYQQGMLSVAEELCQESTLNVDLDFKQPFLELNRILEALHEQDLGPALEWAVSHRQRLLELNSSLEFKLHRLHFIRLLAGGPAKQLEALSYARHFQPFARLHQREIQVMMGSLVYLRLGLEKSPYCHLLDSSHWAEICETFTRDACSLLGLSVESPLSVSFASGCVALPVLMNIKAVIEQRQCTGVWNHKDELPIEIELGMKCWYHSVFACPILRQQTSDSNPPIKLICGHVISRDALNKLINGGKLKCPYCPMEQNPADGKRIIF

SEQ ID NO: 82960 - protein, 234 aa, Homo sapiens
MDPGKDKEGVPQPSGPPARKKFVIPLDEDEVPPGVAKPLFRSTQSLPTVDTSAQAAPQTYAEYAISQPLEGAGATCPTGSEPLAGETPNQALKPGAKSNSIIVSPRQRGNPVLKFVRNVPWEFGDVIPDYVLGQSTCALFLSLRYHNLHPDYIHGRLQSLGKNFALRVLLVQVDVKDPQQALKELAKMCILADCTLILAWSPEEAGRYLETYKAYEQKPADLLMEKLEQDFVSR

SEQ ID NO: 82961 - protein, 56 aa, Homo sapiens
MPGAMGETALHIAALYDNLEAAMVLMEAAPELVFEPMTSELYEGQTALHIAVVNQN

SEQ ID NO: 82962 - protein, 728 aa, Homo sapiens
  MOD_RES (1)..(1): Any amino acid
XDTLAVFMASSGTTDVTNRNSPATPPNTLNLRSSHNELLNAEIKHTETKNSTPPKCRKKYALTNIQAAMGLSDPAAQPLLGNGSANIKLVKNGENQLRKAAEQGQQDPNKNLSPTAVINITSEKLEGKEPHPQDSSSCEILPSQPRRTKSFLNYYADLETSARELEQNRGNHHGTAEEKSQPVQGQASTIIGNGDLLLQKPNRPQSSPEDGQVATVSSSPETKKDHPKTGAKTDCALHRIQNLAPSDEESSWTTLSQDSASPSSPDETADIWSDHSFQTDPDLPPGWKRVSDIAGTYYWHIPTGTTQWERPVSIPADLQGSRKGSLSSVTPSPTPENEDLHAATVNPDPSLKEFEGATLRYASLKLRNAPHPDDDDSCSINSDPEAKCFAVRSLGWVEMAEEDLAPGKSSVAVNNCIRQLSYCKNDIRDTVGIWGEGKDMYLILENDMLSLVDPMDRSVLHSQPIVSIRVWGVGRDNGRDFAYVARDKDTRILKCHVFRCDTPAKAIATSLHEICSKIMAERKNAKALACSSLQERANVNLDVPLQVDFPTPKTELVQKFHVQYLGMLPVDKPVGMDILNSAIENLMTSSNKEDWLSVNMNVADATVTVISEKNEEEVLVECRVRFLSFMGVGKDVHTFAFIMDTGNQRFECHVFWCEPNAGNVSEAVQAACMLRYQKCLVARPPSQKVRPPPPPADSVTRRVTTNVKRGVLSLIDTLKQKRPVTEMP

SEQ ID NO: 82963 - protein, 92 aa, Homo sapiens
MLAANPGKTPISLLQEYGTRIGKTPVYDLLKAEGQAHQPNFTFRVTVGDTSCTGQGPSKKAAKHKAAEVALKHLKGGSMLEPALEDSRLFTA

SEQ ID NO: 82964 - protein, 106 aa, Homo sapiens
MTGAGISTESGIPDYRSEKVGLYARTDRRPIQHGDFVRSAPIRQRYWARNFVGWPQFSSHQPNPAHWALSTWEKLGKLYWLVTQNVDALHTKAGSRRLTELHGCMD

SEQ ID NO: 82965 - protein, 225 aa, Homo sapiens
  MOD_RES (1)..(1): Any amino acid
XLFLAGRRVLVTGAGKGIGRGTVQALHATGARVVAVSRTQADLDSLVRECPGIEPVCVDLGDWEATERALGSVGPVDLLVNNAAVALLQPFLEVTKEAFDRSFEVNLRAVIQVSQIVARGLIARGVPGAIVNVSSQCSQRAVTNHSVYCSTKGALDMLTKVMALELGPHKIRVNAVNPTVVMTSMGQATWSDPHKAKTMLNRIPLGKFAGESGGSPASVVPAVPR

SEQ ID NO: 82966 - protein, 657 aa, Homo sapiens
MLSSRWWPSSWGILGLGPRSPPRGSQLCALYAFTYTGADGQQVSLAEGDRFLLLRKTNSDWWLARRLEAPSTSRPIFVPAAYMIEESIPSQSPTTVIPGQLLWTPGPKLFHGSLEELSQALPSRAQASSEQPPPLPRKMCRSVSTDNLSPSLLKPFQEGPSGRSLSQEDLPSEASASTAGPQPLMSEPPVYCNLVDLRRCPRSPPPGPACPLLQRLDAWEQHLDPNSGRCFYINSLTGCKSWKPPRRSRSETNPGSMEGTQTLKRNNDVLQPQAKGFRSDTGTPEPLDPQGSLSLSQRTSQLDPPALQAPRPLPQLLDDPHEVEKSGLLNMTKIAQGGRKLRKNWGPSWVVLTGNSLVFYREPPPTAPSSGWGPAGSRPESSVDLRGAALAHGRHLSSRRNVLHIRTIPGHEFLLQSDHETELRAWHRALRTVIERLDRENPLELRLSGSGPAELSAGEDEEEESELVSKPLLRLSSRRSSIRGPEGTEQNRVRNKLKRLIAKRPPLQSLQERGLLRDQVFGCQLESLCQREGDTVPSFLRLCIAAVDKRGLDVDGIYRVSGNLAVVQKLRFLVDRERAVTSDGRYVFPEQPGQEGRLDLDSTEWDDIHVVTGALKLFLRELPQPLVPPLLLPHFRAALAVPLSDTRINRLNAKAQP

SEQ ID NO: 82967 - protein, 378 aa, Homo sapiens
MERDGCAGGGSRGGEGGRAPREGPAGNGRDRGRSHAAEAPGDPQAAASLLAPMDVGEEPLEKAARARTAKDPNTYKVLSLVLSVCVLTTILGCIFGLKPSCAKEVKSCKGRCFERTFGNCRCDAACVELGNCCLDYQETCIEPEHIWTCNKFRCGEKRLTRSLCACSDDCKDKGDCCINYSSVCQGEKSWVEEPCESINEPQCPAGFETPPTLLFSLDGFRAEYLHTWGGLLPVISKLKKCGTYTKNMRPVYPTKTFPNHYSIVTGLYPESHGIIDNKMYDPKMNASFSLKSKEKFNPEWYKGEPIWVTAKYQGLKSGTFFWPGSDVEINGIFPDIYKMYNGSVPFEERILAVLQWLQLPKDERRTRFFRSFIWTSQQ

SEQ ID NO: 82968 - protein, 119 aa, Homo sapiens
MKSAKPQVNHSQHGESQRALSPLQSTLSSAASPSQAYETYIENGLICLKHKIRNIEKKKLKLEDYKDRLKSGEHLNPDQLEAVEKYEEVLHNLEFAKELQKTFSGLSLDLLKAQKKAQR

SEQ ID NO: 82969 - protein, 192 aa, Homo sapiens
MSRQAKDDFLRHYTVSDPRTHPKGYTEYKVTAQVVVWKRYSDFRKLHGDLAYTHRNLFRRLEEFPAFPRAQVFGRFEASVIEERRKGAEDLLRFTVHIPALNNSPQLKEFFRGGEVTRPLEVSRDLHILPPPLIPTPPPDDPRLSQLLPAERRGLEELEVPVDPPPSSPAQEALDLLFNCESTEEASGSPAR

SEQ ID NO: 82970 - protein, 155 aa, Homo sapiens
MAPLDLLLSCLAVSRIFLQLFIFYVNVIVIFFIEFIMCSANCAILLFINELELWLATWLGVFYCAKVASVRHPLFIWLKMRISKLVPWMILGSLLYVSMICVFHSKYAGFMVPYFLRKFFSQNATIQKEDTLAIQIFSFVAEFSVPLLIFLFAVL

SEQ ID NO: 82971 - protein, 134 aa, Homo sapiens
MSALRPLLLLLLPLCPGPGPGPGSEAKVTRSCAETRQVLGARGYSLNLIPPALISGEHLRVCPQEYTCCSSETEQRLIRETEATFRGLVEDSGSFLVHTLAARHRKFDDNPDPGGCPSLCAGPGDWKKCGQRSA

SEQ ID NO: 82972 - protein, 201 aa, Homo sapiens
MASPSGSSEATGKPRGRDGRPRREEDDVPPEEKRLRLGLEGGSAQPEDCEDGKDAPRPGREETGTQTGGDGRGDLLCLPYSLVEGQDYKSENSTLLPGAKNSLQDSVSRSILLNRLDFETTFASFSASLVSVINHREWFLPETDLAGELTGFEGNKFSRALAQFLSLGPYSQPLVHGVRAVFCPLKKTRPTWWTDPGHSGW

SEQ ID NO: 82973 - protein, 512 aa, Homo sapiens
MTGTVLKMTDRSHRQKLQLKALDTVLFGPPLLTRHNHLKDFMLVVSIVIGVGGCWFAYIQNRYSKEHMKKMMKDLEGLHRAEQSLHDLQERLHKAQEEHRTVEVEKVHLEKKLRDEINLAKQEAQRLKELREGTENERSRQKYAEEELEQVREALRKAEKELESHSSWYAPEALQKWLQLTHEVEVQYYNIKKQNAEKQLLVAKEGAEKIKKKRNTLFGTFHVAHSSSLDDVDHKILTAKQALSEVTAALRERLHRWQQIEILCGFQIVNNPGIHSLVAALNIDPSWMGSTRPNPAHFIMTDDVDDMDEEIVSPLSMQSPSLQSSVRQRLTEPQHGLGSQRDLTHSDSESSLHMSDRQRVAPKPPQMSRAADEALNAMTSNGSHRLIEGVHPGSLVEKLPDSPALAKKALLALNHGLDKAHSLMELSPSAPPGGSPHLDSSRSHSPSSPDPDTPSPVGDSRALQASRNTRIPHLAGKKAVAEEDNGSIGEETDSSPGRKKFPLKIFKKPLKK

SEQ ID NO: 82974 - protein, 377 aa, Homo sapiens
MALTESALSQHGLSKVVYSGPHPQREMLTAQNRFEVLTFLLLCYNAALTYMPSVSLQSLCQICSRICVCGYPRQHVRKYKGISSRIPVSSGFMVQMLTGIYFAFYNGEWDLAQKALDDIIYRAQLELYPEPLLVANAIKASLPHGPMKSNKEGTRCIQVEITPTSSRISRNAVTSMSIRGHRWKRHGNTELTGQEELMEISEVDEGFYSRAASSTSQSGLSNSSHNCSNKPSIGKNHRRSGGSKTGGKEKETTGESCKDHFARKQTQRAQSENLELLSLKRLTLTTSQSLPKPSSHGLAKTAATVFSKSFEQVSGVTVPHNPSSAVGCGAGTDANRFSACSLQEEKLIYVSERTELPMKHQSGQQRPPSISITLSTD

SEQ ID NO: 82975 - protein, 32 aa, Homo sapiens
MPHTLWMVWVLGVIISLSKEESSNQASLSCDR

SEQ ID NO: 82976 - protein, 194 aa, Homo sapiens
MQEAPAALPTEPGPSPVPAFLGKLWALVGDPGTDHLIRWSPSGTSFLVSDQSRFAKEVLPQYFKHSNMASFVRQLNMYGFRKVVSIEQGGLLRPERDHVEFQHPSFVRGREQLLERVRRKVPALRGDDGRWRPEDLGRLLGEAERDLVAGGGDTSAEPRSAAPGHWQADPVSLWATSGGAEQCRRQEKAVPDAG

SEQ ID NO: 82977 - protein, 298 aa, Homo sapiens
MVHAEAFSRPLSRNEVVGLIFRLTIFGAVTYFTIKWMVDAIDPTRKQKVEAQKQAEKLMKQIGVKNVKLSEYEMSIAAHLVDPLNMHVTWSDIAGLDDVITDLKDTVILPIKKKHLFENSRLLQPPKGVLLYGPPGCGKTLIAKATAKEAGCRFINLQPSTLTDKWYGESQKLAAAVFSLAIKLQPSIIFIDEIDSFLRNRSSSDHEATAMMKAQFMSLWDGLDTDHSCQVIVMGATNRPQDLDSAIMRRMPTRFHINQPALKQREAILKLILKNENDSTVWTFWNLVNQCHIEGHLD

SEQ ID NO: 82978 - protein, 1507 aa, Homo sapiens
MGTALLQRGGCFLLCLSLLLLGCWAELGSGLEFPGAEGQWTRFPKWNACCESEMSFQLKTRSARGLVLYFDDEGFCDFLELILTRGGRLQLSFSIFCAEPATLLADTPVNDGAWHSVRIRRQFRNTTLFIDQVEAKWVEVKSKRRDMTVFSGLFVGGLPPELRAAALKLTLASVREREPFKGWIRDVRVNSSQVLPVDSGEVKLDDEPPNSGGGSPCEAGEEGEGGVCLNGGVCSVVDDQAVCDCSRTGFRGKDCSQEDNNVEGLAHLMMGDQGKSKGKEEYIATFKGSEYFCYDLSQNPIQSSSDEITLSFKTLQRNGLMLHTGKSADYVNLALKNGAVSLVINLGSGAFEALVEPVNGKFNDNAWHDVKVTRNLRQHSGIGHAMVTISVDGILTTTGYTQEDYTMLGSDDFFYVGGSPSTADLPGSPVSNNFMGCLKEVVYKNNDVRLELSRLAKQGDPKMKIHGVVAFKCENVATLDPITFETPESFISLPKWNAKKTGSISFDFRTTEPNGLILFSHGKPRHQKDAKHPQMIKVDFFAIEMLDGHLYLLLDMGSGTIKIKALLKKVNDGEWYHVDFQRDGRSGTISVNTLRTPYTAPGESEILDLDDELYLGGLPENKAGLVFPTEVWTALLNYGYVGCIRDLFIDGQSKDIRQMAEVQSTAGVKPSCSKETAKPCLSNPCKNNGMCRDGWNRYVCDCSGTGYLGRSCEREATVLSYDGSMFMKIQLPVVMHTEAEDVSLRFRSQRAYGILMATTSRDSADTLRLELDAGRVKLTVNLDCIRINCNSSKGPETLFAGYNLNDNEWHTVRVVRRGKSLKLTVDDQQAMTGQMAGDHTRLEFHNIETGIITERRYLSSVPSNFIGHLQSLTFNGMAYIDLCKNGDIDYCELNARFGFRNIIADPVTFKTKSSYVALATLQAYTSMHLFFQFKTTSLDGLILYNSGDGNDFIVVELVKGYLHYVFDLGNGANLIKGSSNKPLNDNQWHNVMISRDTSNLHTVKIDTKITTQITAGARNLDLKSDLYIGGVAKETYKSLPKLVHAKEGFQGCLASVDLNGRLPDLISDALFCNGQIERGCEGPSTTCQEDSCSNQGVCLQQWDGFSCDCSMTSFSGPLCNDPGTTYIFSKGGGQITYKWPPNDRPSTRADRLAIGFSTVQKEAVLVRVDSSSGLGDYLELHIHQGKIGVKFNVGTDDIAIEESNAIINDGKYHVVRFTRSGGNATLQVDSWPVIERYPAGNNDNERLAIARQRIPYRLGRVVDEWLLDKGRQLTIFNSQATIIIGGKEQGQPFQGQLSGLYYNGLKVLNMAAENDANIAIVGNVRLVGEVPSSMTTESTATAMQSEMSTSIMETTTTLATSTARRGKPPTKEPISQTTDDILVASAECPSDDEDIDPCEPSSGGLANPTRAGGREPYPGSAEVIRESSSTTGMVVGIVAAAALCILILLYAMYKYRNRDEGSYHVDESRNYISNSAQSNGAVVKEKQPSSAKSSNKNKKNKDKEYYV

SEQ ID NO: 82979 - protein, 98 aa, Homo sapiens
MDKNELVQKAKLAEQAERYDDMAACMKSVTEQGAELSNEERNLLSVAYKNVVGARRSSWRVVSSIEQKTEGAEKKQQMAREYREKIETELRDICNDVL

SEQ ID NO: 82980 - protein, 176 aa, Homo sapiens
  MOD_RES (1)..(1): Any amino acid
XHLHAKGKEEKMSKSLKNYITIKDFLKTFSPDVFRFFCLRSSYRSAIDYSDSAMLQAQQLLLGLGSFLEDARAYMKGQLACGSVREAMLWERLSSTKRAVKAALADDFDTPRVVDAILGLAHHGNGQLRASLKEPEGPRSPAVFGAIISYFEQFFETVGISLANQQLANSRAQNQR

SEQ ID NO: 82981 - protein, 368 aa, Homo sapiens
MQNSHSGVNQLGGVFVNGRPLPDSTRQKIVELAHSGARPCDISRILQTHADAKVQVLDNQNVSNGCVSSINRVLRNLASEKQQMGADGMYDKLRMLNGQTGSWGTRPGWYPGTSVPGQPTQDGCQQQEGGGENTNSISSNGEDSDEAQMRLQLKRKLQRNRTSFTQEQIEALEKEFERTHYPDVFARERLAAKIDLPEARIQVWFSNRRAKWRREEKLRNQRRQASNTPSHIPISSSFSTSVYQPIPQPTTPVSSFTSGSMLGRTDTALTNTYSALPPMPSFTMANNLPMQPPVPSQTSSYSCMLPTSPSVNGRSYDTYTPPHMQTHMNSQPMGTSGTTSTGLISPGVSVPVQVPGSEPDMSQYWPRL

SEQ ID NO: 82982 - protein, 104 aa, Homo sapiens
MTVHDKFLALGTHYGKVYLLDVQGNITQKFDVSPVKINQISLDESGEHMGVCSEDGKVQVFGLYSGEEFHETFDCPIKIIAVHPHFVRSSCKQFVTGGKKVSAV

SEQ ID NO: 82983 - protein, 121 aa, Homo sapiens
MQFRLFSFALIILNCMDYSHCQGNRWRRSKRASYVSNPICKGCLSCSKDNGCSRCQQKLFFFLRREGMRQYGECLHSCPSGYYGHRAPDMNRCARCRIENCDSCFSKDFCTKCKVGFYLHR

SEQ ID NO: 82984 - protein, 109 aa, Homo sapiens
MLQEWLAAVGDDYAAVVWRPEGEPRFYPDEEGPKHWTKERHQFLMELKQEALTFARNWGADYILFADTDNILTNNQTLRLLMGQGLPVVAPMLDSQTYYSNFWCGITPQ

SEQ ID NO: 82985 - protein, 167 aa, Homo sapiens
  MOD_RES (1)..(1): Any amino acid
XKIRQRQSILPPPQGPAPIPFQHRGGDSPEAKNRVGPQVPLSEPGFRRRESQEEPRAVLAQKIEKETQILNCALDDIEWFVARLQKAAEAFKQLNQRKKGKKKGKKAPAGKAAEAHPEPQRRGARALPLRASGPDRQHLQWPRHRTLRLLPTALPRCRGLPARPPGP

SEQ ID NO: 82986 - protein, 79 aa, Homo sapiens
MDAANFEQFLQERIKVNGKAGNLGGGVVTIERSKSKITVTSEVPFSKRYLKYLTKKYLKKNNLRDWLRVVANSKESYEL

SEQ ID NO: 82987 - protein, 198 aa, Homo sapiens
MYSPLCLTQDEFHPFIEALLPHVRAFAYTWFNLQARKRKYFKKHEKRMSKEEERAVKDELLSEKPEVKQKWASRLLAKLRKDIRPEYREDFVLTVTGKKPPCCVLSNPDQKGKMRRIDCLRQADKVWRLDLVMVILFKGIPLESTDGERLVKSPQCSNPGLCVQPHHIGVSVKELDLYLAYFVHAAGVKMKKKLYLML

SEQ ID NO: 82988 - protein, 44 aa, Homo sapiens
MAQEEEDVRDYNLTEEQKAIKAKYPPVNRKYELDCITQSMNILL

SEQ ID NO: 82989 - protein, 84 aa, Homo sapiens
MYSSSCETTRNTTGIEESTDGMILGPEDLSYQIYDVSGESNSAVSTEDLKECLKKQLEFCFSRENLSKDLYLISQMDSDQFIPI

SEQ ID NO: 82990 - protein, 20 aa, Homo sapiens
PQTIAPSTYVSTYLKRSIKM

SEQ ID NO: 82991 - protein, 81 aa, Homo sapiens
MSENAMGSTMVEEQFAGGDRARAFARDFAAHRKKSGALPVAWLERTMRSVGLEVYTQSFSRKLPFPDETHERYMVSGTNVY

SEQ ID NO: 82992 - protein, 120 aa, Homo sapiens
MWKRSEQMKIKSGKCNMAAAMETEQLGVEIFETADCEENIESQDRPKLEPFYVERYSWSQLKKLLADTRKYHGYMMAKAPHDFMFVKRNDPDGPHSDRIYYLAMSGENRENTLFYSEIPK

SEQ ID NO: 82993 - protein, 117 aa, Homo sapiens
SDTKPIINKVASVAENKGLFEEAAKLYDLAKNADKVLELMNKLLSPVVPQISAPQSNKERLKNMALSIAERYRAQGISANKFVDSTFYLLLDLITFFDEYHSGHIDRAFDVSFRKGV

SEQ ID NO: 82994 - protein, 382 aa, Homo sapiens
MASRLTLLTLLLLLLAGDRASSNPNATSSSSQDPESLQDRGEGKVATTVISKMLFVEPILEVSSLPTTNSTTNSATKITANTTDEPTTQPTTEPTTQPTIQPTQPTTQLPTDSPTQPTTGSFCPGPVTLCSDLESHSTEAVLGDALVDFSLKLYHAFSAMKKVETNMAFSPFSIASLLTQVLLGAGENTKTNLESILSYPKDFTCVHQALKGFTTKGVTSVSQIFHSPDLAIRDTFVNASRTLYSSSPRVLSNNSDANLELINTWVAKNTNNKISRLLDSLPSDTRLVLLNAIYLSAKWKTTFDPKKTRMEPFHFKNSVIKVPMMNSKKYPVAHFIDQTLKAKPWPRQTLYILGWKQDSQVSSCISTILNGKMWGSCSSPTI

SEQ ID NO: 82995 - protein, 64 aa, Homo sapiens
MGEEPSPFRGRSRSAPPNLWAAQRYGRELRRMSDEFVDSFKKGLPRPKSAGTATQMRQSSSWTR

SEQ ID NO: 82996 - protein, 90 aa, Homo sapiens
MAAIYLSRGFFSREPICPFEEKTKVERMVEDYLASGYQDSVTFDDVAVDFTPEEWALLDTTEKYLYRDVMLENYMNLASVDKRLQWMETL

SEQ ID NO: 82997 - protein, 61 aa, Homo sapiens
MKSSDIDQDLFTDSYCKVCSAQLISESQRVAHYEGPEFLRKGNFIRHTKPKEDVTLKKVAV

SEQ ID NO: 82998 - protein, 39 aa, Homo sapiens
  MOD_RES (1)..(1): Any amino acid
XAKLWTSQEQPQPSQQQPSVQPPSQPPPQPSTLPQAQVS

SEQ ID NO: 82999 - protein, 601 aa, Homo sapiens
MAAAAAATAAAAASIRERQTVALKRMLNFNVPHIKNSTGEPVWKVLIYDRFGQDIISPLLSVKELRDMGITLHLLLHSDRDPIPDVPAVYFVMPTEENIDRMCQVFDQYLNFITLEDDMFVLCNQNKELVSYRAINRPDITDTEMETVMDTIVDSLFCFFVTLGAVPIIRCSRGTAAEMVAVKLDKKLRENLRDARNSLFTGDTLGAGQFSFQRPLLVLVDRNIDLATPLHHTWTYQALVHDVLDFHLNRVNLEESSGVENSPAGARPKRKNKKSYDLTPVDKFWQKHKGSPFPEVAESVQQELESYRAQEDEVKRLKSIMGLEGEDEGAISMLSDNTAKLTSAVSSLPELLEKKRLIDLHTNVATAVLEHIKARKLDVYFEYEEKIMSKTTLDKSLLDIISDPDAGTPEDKMRLFLIYYISTQQAPSEADLEQYKKALTDAGCNLNPLQYIKQWKAFTKMASAPASYGSTTTKPMGLLSRVMNTGSQFVMEGVKNLVLKQQNLPVTRILDNLMEMKSNPETDDYRYFDPKMLRGNDSSVPRNKNPFQEAIVFVVGGGNYIEYQNLVDYIKGKQGKHILYGCSELFNATQFIKQLSQLGQK

SEQ ID NO: 83000 - protein, 40 aa, Homo sapiens
SQSLENVSGYYADARLEVGSTQLRTAGSCSHSFKRSFLGE

SEQ ID NO: 83001 - protein, 145 aa, Homo sapiens
MKLSLTKVVNGCRLGKIKNLGKTGDHTMDIPGCLLYTKTGSAPHLTHHTLHNIHGVPAMAQLTLSSLAEHHEVLTEYKEGVGKFIGMPESLLYCSLHDPVSPCPAGYVTNKVLQKSVIIGVIEGGDVMEERLRSARETAKRPVGG

SEQ ID NO: 83002 - protein, 159 aa, Homo sapiens
MADNSSDECEEENNKVLREGMPQAPGHRGKDMDPVPPAPASLKCHQTPSHVLERVGWYRESQKHRKEKKKTSQLTPQRGFSENEDDDDDDDDSSETDSDSDDDDEEHGAPLEGAYDPADYEHLPVSAEIKELFQYISRYTPQLIDLDHKLKPFIPDFIP

SEQ ID NO: 83003 - protein, 105 aa, Homo sapiens
  MOD_RES (1)..(1): Any amino acid
XDEAEKCVEIAREALNAGNREKAQRFLQKAEKLYPLPSARALLEIIMKNGSTAGNSPHCRKPSGSGDQSKPNCTKDSTSGSGEGGKGYTKDQVDGVLRALWILEH

SEQ ID NO: 83004 - protein, 157 aa, Homo sapiens
MAQESVMFSDVSVDFSQEEWECLNDDQRDLYRDVMLENYSNLVSMAGHSISKPNVISYLEQGKEPWLADRELTRGQWPVLESRCETKKLFLKKEIYEIESTQWEIMEKLTRRDFQCSSFRDDWECNRQFKKELGSQGGHFNQLVFTHEDLPTLSHHP

SEQ ID NO: 83005 - protein, 116 aa, Homo sapiens
MNKRGKYTTLNLEEKMKVLSRIEAGRSLKSVMDEFGISKSTFYDIKKNKKLILDFVLKQDMPLVGAEKRKRTTGAKYGDVDDAVYMWYQQKRSAGVPVRGVELQAAAERFARCFGR

SEQ ID NO: 83006 - protein, 90 aa, Homo sapiens
MVHLTPEEKSAVTALWGKVNVDEVGGEALGRLLVVYPWTQRFFESFGDLSTPDAVMGNPKVKAHGKKVLGAFSDGLAHLDNLKGTFATLS

SEQ ID NO: 83007 - protein, 203 aa, Homo sapiens
MDPSKIAHTEYPVNTIIIHEDFDNNSMSNNIALLKTDTAMHFGNLVQSICFLGRMLHTPPVLQNCWVSGWNPTSATGNHMTMSVLRKIFVKDLDMCPLYKLQKTECGSHTKEETKTACLGDPGSPMMCQLQQFDLWVLRGVLNFGGETCPGLFLYTKVEDYSKWITSKAERAGPPLSSLHHWEKLISFSHHGPNATMTQKTYS

SEQ ID NO: 83008 - protein, 37 aa, Homo sapiens
MQPRTPLVLCVLLSQSGGPVCKSQFQALPLAVQWLGV

SEQ ID NO: 83009 - protein, 259 aa, Homo sapiens
MPSTPGFVGYNPYSHLAYNNYRLGGNPGTNSRVTASSGITIPKPPKPPDKPLMPYMRYSRKVWDQVKASNPDLKLWEIGKIIGGMWRDLTDEEKQEYLNEYEAEKIEYNESMKAYHNSPAYLAYINAKSRAEAALEEESRQRQSRMEKGEPYMSIQPAEDPDDYDDGFSMKHTATARFQRNHRLISEILSESVVPDVRSVVTTARMQVLKRQVQSLMVHQRKLEAELLQIEERHQEKKRKFLESTDSFNNELKRLCGLK

SEQ ID NO: 83010 - protein, 65 aa, Homo sapiens
MADQLTEEQIAEFKEAFSLFDKDGDGTITTKELGTVMRSLGQNPTEAELQDMINEVDADGWQWLY

SEQ ID NO: 83011 - protein, 163 aa, Homo sapiens
MLEEDLLALKSPSKENIASVLENYHTESKIDRDKSFILEEHMDKINSCFSANTVEEIIENLQQDGSSFALEQLKVINKMSPTSLKITLRQLMEGSSKTLQEVLTMEYRLSQACMRGHDFHEGVRAVLIDKDQSPKWKPADLKEVTEEDLNNHFKSLGSSDLKF

SEQ ID NO: 83012 - protein, 319 aa, Homo sapiens
MAAFSEMGVMPEIAQAVEEMDWLLPTDIQAESIPLILGGGDVLMAAETGSGKTGAFSIPVIQIVYETLKDQQEGKKGKTTIKTGASVLNKWQMNPYDRGSAFAIGSDGLCCQSREVKEWHGCRATKGLMKGKHYYEVSCHDQGLCRVGWSTMQASLDLGTDKFGFGFGGTGKKSHNKQFDNYGEEFTMHDTIGCYLDIDKGHVKFSKNGKDLGLAFEIPPHMKNQALFPACVLKNAELKFNFGEEEFKFPPKDGFVALSKAPDGYIVKSQHSGNAQVTQTKFLPNAPKALIVEPSRELAEQTLNNIKQFKKYIDNPKLR

SEQ ID NO: 83013 - protein, 206 aa, Homo sapiens
CTRVMWTPPLRESFSYPFLVLQMLLVTHILRATKLYRGSLIALCISNVFFMLPWQFAQFVLLTQIASLFAVYVVGYIDICKLRKIIYIHMGILAMKPHFLKINVSELSLWVIQGCFWLFGTVILKYLTSKIFGIADDAHIGNLLTSKFFSYKDFDTLLYTCAAEFDFMEKETPLRYTKTLLLPVVLVVFVAIVRKIISDMWGVLAK

SEQ ID NO: 83014 - protein, 660 aa, Homo sapiens
MSSRRKRAPPVRVDEEKRQQLHWNMHEDRRNEPIIISDDDEQPCPGEDVEKQKKEPMSICDKGILVESSFSGEMLEDLGWLQKKRRIKLYQKPEGNHIIKVGIYLLEAGLAKLDFLSDANSRMKKFNQLMKKVMEKLHNSIIPDVLEEDEDDPESEPEGQDIDELYHFVKQTHQQETQSIQVDVQHPALIPVLRPYQREAVNWMLQQECFRSSPATESALHFLWREIVTSEGLKLYYNPYTGCIIREYPNSGPQLLGGILADEMGLGKTVEVLALILTHTRQDVKQDALTLPEGKVVNYFIPSHYFGGKLKKTEIQNIEFEPKEKVQCPPTRVMILTAVKEMNGKKGVSILSIYKYVSSIYRYDVQRNRSLLKRMLKCLIFEGLVKQIKGHGFSGTFTLGKNYKEEDICDKTKKQAVGSPRKIQKETRKSGNKDTDSEYLPSDTSDDDDDPYYYYYKSRRNRSKLRKKLVPSTKKGKSQPFINPDSQGHCPATSDSGITDVAMSKSTCISEFNQEHETEDCAESLNHADSDVPPSNTMSPFNTSDYRFECICGELDQIDRKPRVQCLKCHLWQHAKCVNYDEKNLKIKPFYCPHCLVAMEPVSTRATLIISPSSICHQWVDEINRHVRSSSLRVLVYQGVKKDGFLQPHFGRTGYSYHYL

SEQ ID NO: 83015 - protein, 145 aa, Homo sapiens
MNIRNARPEDLMNMQHCNLLCLPENYQMKYYFYHGLSWPQLSYIAEDENGKIVGEEDPDDVPHGHITSLAVKRSHRRLGLAQKLMDQASRAMIENFNAKYVSLHVRKSNRAALHLYSNTLNFQISEVEPKYYADGEDAYAMKRDL

SEQ ID NO: 83016 - protein, 116 aa, Homo sapiens
MDAGKLARHPTDTGSERAVPALAEIRPWWAPPLRPQGEGSYFCYDNPAALQTQVKRDMQVNTTKFMLLYAWYSWPNVVLCFFGGFLIDRVFGIRWGTIIFSCFVCIGQVVFALGGI

SEQ ID NO: 83017 - protein, 152 aa, Homo sapiens
  MOD_RES (1)..(1): Any amino acid
XAEAEGESLESWLNKATNPSNRQEDWEYIIGFCDQINKELEGPQIAVRLLAHKIQSPQEWEALQALTVLEACMKNCGRRFHNEVGKFRFLNELIKVVSPKYLGDRVSEKVKTKVIELLYSWTMALPEEAKIKDAYHMLKRQGLDHRDVALGV

SEQ ID NO: 83018 - protein, 113 aa, Homo sapiens
MARTKQTARKSTGGKAPRKQLATKAARKSAPSTGGVKKPHRYRPGTVALREIRRYQKSTELLIRKLPFQRRLAKRTWWVCSKIPTCVPSTLRESPSCPKTSSWLAGYGERELK

SEQ ID NO: 83019 - protein, 9 aa, Homo sapiens
MSDILRELL

SEQ ID NO: 83020 - protein, 369 aa, Homo sapiens
  MOD_RES (1)..(1): Any amino acid
XCVFIWHLGPEITNCMKQHLLEIDHRQQQQHTNDKKRSGHPRQDTYVSTPSEIHSLSPGEQTEDDLEEECEPEEMLKTPSKDSLDPDPRCLLTNGKLPLWAKRLLGDDDVADGLAFHAKRSYQPHGRWAERAGQEPLKTILDAQDLDCYFTPMKPESLENSILDSLEPQSLASLLSESESPQEAGRGHPSFLPQQKESSEASELILYSLEAEVTVTGTDSQYCRKEVEAGPGDQQGDSYLRVSSDSPKDQSPPEDSGESEADLECSFAAIHSPAPPPDPAPRFATSLPHFPGCAGPTEDELSLPEGPSVPSSSLPQTPEQEKFLRHHFETLTESPCREMRFHHVGQTGLKLLPQMICPPWPPKVLGLQA

SEQ ID NO: 83021 - protein, 75 aa, Homo sapiens
  MOD_RES (1)..(1): Any amino acid
XLDPLVKQAFQATARANVYVTENADIACLYVILVGEMQEPVVLRPAELEKQLYSLPHWRTDGHNHVIINLSRGPY

SEQ ID NO: 83022 - protein, 39 aa, Homo sapiens
MDPNCSCATGCCSCCPVGCAKCAQGCVCKGASEKCSCCA

SEQ ID NO: 83023 - protein, 109 aa, Homo sapiens
MASSPDMDLATVSALRKMGVKLTPHNKETVQHSDVLFLAVKPHIIPFILDEIGADIEDRHIVVSCAAGVTISSIEKKLSAFRPAPRVIRCMTNTPVVVREGATVYATGT

SEQ ID NO: 83024 - protein, 88 aa, Homo sapiens
MAAPALSWRLPLLILLLPLATSWASAAVNGTSQFTCFYNSRANISCVWSQDGALQDTSCQVHAWPDRRRWNQTCELLPVSQASWACNL

SEQ ID NO: 83025 - protein, 193 aa, Homo sapiens
HKSKWNITMESYVVHTNYDEYAIFLTKKFSRHHGPTITAKLYGRAPQLRETLLQDFRVVAQGVGIPEDSIFTMADRGECVPGEQEPEPILIPRVRRAVLPQEEEGSGGGQLVTEVTKKEDSCQLGYSAGPCMGMTSRYFYNGTSMACETFQYGGCMGNGNNFVTVRGPCRAFIQLWAFDAVKGKCVLFPYGGC

SEQ ID NO: 83026 - protein, 132 aa, Homo sapiens
MEISLVKCSEANVCRLRLTVPPESPVPEQCEKKIERKEQLLDLSNGEPTRKLPQGVVYGVVRRSDQNQQKEMVVYGWSTSQLKEEMNYIKDVRATLEKVRKRMYGDYDEMRQKIRQLTQELSVSHAQQEYLE

SEQ ID NO: 83027 - protein, 176 aa, Homo sapiens
MGGCAGSRRRFSDSEGEETVPEPRLPLLDHQGAHWKNAVGFCPRVLVSGICAAGSFVLVAFSHSVGTSLCGVVFASISSGLGEVTFLSLTAFYPRAVISWWSSGTGGAGLLGALSYLGLTQAGLSPQQTLLSMLGIPALLLASYFLLLTSPEAQDPGGEEEAESAARQPLIRTEAP

SEQ ID NO: 83028 - protein, 382 aa, Homo sapiens
MTPALTALLCLGLSLGPRTRVQAGPFPKPTLWAEPGSVISWGSPVTIWCQGSLEAQEYQLDKEGSPEPWDRNNPLEPKNKARFSIPSMTQHHAGRYRCHYYSSAGWSEPSDPLELVMTGFYNKPTLSALPSPVVASGGNMTLRCGSQKGYHHFVLMKEGEHQLPRTLDSQQLHSGGFQALFPVGPVTPSHRWRFTCYYYYTNTPWVWSHPSDPLEILPSGQIYDTVSLSAQPGPTVASGENVTLLCQSRGYFDTFLLTKEGAAHPPLRLRSMYGAHKYQAEFPMSPVTSAHAGTYRCYGSRSSNPHLLSHPSEPLELMVSGPSGGSSLPPTGPPSTPASHAKDYTVENLIRMGMAGLVLVFLGILLFEAQHSQRNPQDAAGR

SEQ ID NO: 83029 - protein, 273 aa, Homo sapiens
MAVNQSHTENRRGALIPNGESLLKRSPNVELSFPQRSEGSNVFSGRKTGTLFLTSYRVIFITSCSISDPMLSFMMPFDLMTNLTVEQPVFAANFIKGTIQAAPYGGWEGQATFKLVFRNGDAIEFAQLMVKAASAVIVYGAPPAGYGAPPPGYGAPPAGYGAQPVGNEGPPVGYRASPVRYGAPPLGYGAPPAGYGAPPLGYGAPPLGYGTPPLGYGAPPLGYGAPPAGNEGPPAGYRASPAGSGARPQESTAAQAPENEASLPSASSSQVHS

SEQ ID NO: 83030 - protein, 535 aa, Homo sapiens
MRKPRAAVGSGHRKQAASQEGRQKHAKNNSQAKPSACDACAGMIAECPGAPAGLARQPEEVVLQASVSSYHLFRDVAEVTAFRGSLLSWYDQEKRDLPWRRRAEDEMDLDRRAYAVWVSEVMLQQTQVATVINYYTGWMQKWPTLQDLASASLEEVNQLWAGLGYYSRGRRLQEGARKVVEELGGHMPRTAETLQQLLPGVGRYTAGAIASIAFGQATGVVDGNVARVLCRVRAIGADPSSTLVSQQLWGLAQQLVDPARPGDFNQAAMELGATVCTPQRPLCSQCPVESLCRARQRVEQEQLLASGSLSGSPDVEECAPNTGQCHLCLPPSEPWDQTLGVVNFPRKASRKPPREESSATCVLEQPGALGAQILLVQRPNSGLLAGLWEFPSVTWEPSEQLQRKALLQELQRWAGPLPATHLRHLGEVVHTFSHIKLTYQVYGLALEGQTPVTTVPPGARWLTQEEFHTAAVSTAMKKVFRVYQGQQPGTCMGSKRSQVSSPCSRKKPRMGQQVLDNFFRSHISTDAHSLNSAAQ

SEQ ID NO: 83031 - protein, 407 aa, Homo sapiens
MTSQRSPLAPLLLLSLHGVAASLEVSESPGSIQVARGQPAVLPCTFTTSAALINLNVIWMVTPLSNANQPEQVILYQGGQMFDGAPRFHGRVGFTGTMPATNVSIFINNTQLSDTGTYQCLVNNLPDIGGRNIGVTGLTVLVPPSAPHCQIQGSQDIGSDVILLCSSEEGIPRPTYLWEKLDNTLKLPPTATQDQVQGTVTIRNISALSSAQPRNIGLIAGAIGTGAVIIIFCIALILGAFFYWRSKNKEEEEEEIPNEIREDDLPPKCSSAKAFHTEISSSDNNTLTSSNAYNSRYWSNNPKVHRNTESVSHFSDLGQSFSFHSGNANIPSIYANGTHLVPGQHKTLVVTANRGSSPQVMSRSNGSVSRKPRPPHTHSYTISHATLERIGAVPVMVPAQSRAGSLV

SEQ ID NO: 83032 - protein, 90 aa, Homo sapiens
  MOD_RES (1)..(1): Any amino acid
XDKDGSKVTTVVATPGQGPDRPQEVSYTDTKVIGNGSFGVVYQAKLCDSGELVAIKKVLQDKRFKGSLCMEAQMSSLCCGIAERVRRHRV

SEQ ID NO: 83033 - protein, 2826 aa, Homo sapiens
MGNENSTSDNQRTLSAQTPRSAQPPGNSQNIKRKQQDTPGSPDHRDASSIGSVGLGGFCTASESSASLDPCLVSPEVTEPRKDPQGARGPEGSLLPSPPPSQEREHPSSSMPFAECPPEGCLASPAAAPEDGPQTQSPRREPAPNAPGDIAAAFPAERDSSTPYQEIAAVPSAGRERQPKEEGQKSSFSFSSGIDQSPGMSPVPLREPMKAPLCGEGDQPGGFESQEKEAAGGFPPAESRQGVASVQVTPEAPAAAQQGTESSAVLEKSPLKPMAPIPQDPAPRASDRERGQGEAPPQYLTDDLEFLRACHLPRSNSGAAPEAEVNAASQESCQQPVGAYLPHAELPWGLPSPALVPEAGGSGKEALDTIDVQGHPQTGMRGTKPNQVVCVAAGGQPEGGLPVSPEPSLLTPTEEAHPASSLASFPAAQIPIAVEEPGSSSRESVSKAGMPVSADAAKEVVDAGLVGLERQVSDLGSKGEHPEGDPGEVPAPSPQERGEHLNTEQSHEVQPGVPPPPLPKEQSHEVQPGAPPPPLPKAPSESARGPPGPTDGAKVHEDSTSPAVAKEGSRSPGDSPGGKEEAPEPPDGGDPGNLQGEDSQAFSSKRDPEVGKDELSKPSSDAESRDHPSSHSAQPPRKGGAGHTDGPHSQTAEADASGLPHKLGEEDPVLPPVPDGAGEPTVPEGAIWEGSGLQPKCPDTLQSREGLGRMESFLTLESEKSDFPPTPVAEVAPKAQEGESTLEIRKMGSCDGEGLLTSPDQPRGPACDASRQEFHAGVPHPPQGENLAADLGLTALILDQDQQGIPSCPGEGWIRGAASEWPLLSSEKHLQPSQAQPETSIFDVLKEQAQPPENGKETSPSHPGFKDQGADSSQIHVPVEPQEDNNLPTHGGQEQALGSELQSQLPKGTLSDTPTSSPTDMVWESSLTEESELSAPTRQKLPALGEKRPEGACGDGQSSRVSPPAADVLKDFSLAGNFSRKETCCTGQGPNKSQQALADALEEGSQHEEACQRHPGASEAADGCSPLWGLSKREMASGNTGEAPPCQPDSVALLDAVPCLPALAPASPGVTPTQDAPETEACDETQEGRQQPVPAPQQKMECWATSDAESPKLLASFPSAGEQGGEAGAAETGGSAGAGDPGKQQAPEKPGEATLSCGLLQTEHCLTSGEEASTSALRESCQAEHPMASCQDALLPARELGGIPRSTMDFSTHQAVPDPKELLLSGPPEVAAPDTPYLHVDSAAQRGAEDSGVKAVSSADPRAPGESPCPVGEPPLALENAASLKLFAGSLAPLLQPGAAGGEIPAVQASSGSPKARTTEGPVDSMPCLDRMPLLAKGKQATGEEKAATAPGAGAKASGEGMAGDAAGETEGSMERMGEPSQDPKQGTSGGVDTSSEQIATLTGFPDFREHIAKIFEKPVLGALATPGEKAGAGRSAVGKDLTRPLGPEKLLDGPPGVDVTLLPAPPARLQVEKKQQLAGEAEISHLALQDPASDKLLGPAGLTWERNLPGAGVGKEMAGVPPTLREDERPEGPGAAWPGLEGQAYSQLERSRQELASGLPSPAATQELPVERAAAFQVAPHSHGEEAVAQDRIPSGKQHQETSACDSPHGEDGPGDFAHTGVPGHVPRSTCAPSPQREVLTVPEANSEPWTLDTLGGERRPGVTAGILEMRNALGNQSTPAPPTGEVADTPLEPGKVAGAAGEAEGDITLSTAETQACASGDLPEAGTTRTFSVVAGDLVLPGSCQDPACSDKAPGMEGTAALHGDSPARPQQAKEQPGPERPIPAGDGKVCVSSPPEPDETHDPKLQHLAPEELHTDRESPRPGPSMLPSVPKKDAPRVMDKVTSDETRGAEGTESSPVADDIIQPAAPADLESPTLAASSYHGDVVGQVSTDLIAQRSSDSEEAFETPESTTPVKAPPAPPPPPPEVIPEPEVSTQPPPEEPGCGSETVPVPDGPRSDSVEGSPFRPPSHSFSAVFDEDKPIASSGTYNLDFDNIELVDTFQTLEPRASDAKNQEGKVNTRRKSTDSVPISKSTLSRSLSLQASDFDGASSSGNPEAVALAPDAYSTGSSSASSTLKRTKKPRPPSLKKKQTTKKPTETPPVKETQQEPDEESLVPSGENLASETKTESAKTEGPSPALLEETPLEPAVGPKAACPLDSESAEGVVPPASGGGRVQNSPPVGRKTLPLTTAPEAGEVTPSDSGGQEDSPAKGLSVRLEFDYSEDKSSWDNQQENPPPTKKIGKKPVAKMPLRRPKMKKTPEKLDNTPASPPRSPAEPNDIPIAKGTYTFDIDKWDDPNFNPFSSTSKMQESPKLPQQSYNFDPDTCDESVDPFKTSSKTPSSPSKSPASFEIPASAMEANGVDGDGLNKPAKKKKTPLKTDTFRVKKSPKRSPLSDPPSQDPTPAATPETPPVISAVVHATDEEKLAVTNQKWTCMTVDLEADKQDYPQPSDLSTFVNETKFSSPTEELDYRNSYEIEYMEKIGSSLPQDDDAPKKQALYLMFDTSQESPVKSSPVRMSESPTPCSGSSFEETEALVNTAAKNQHPVPRGLAPNQESHLQVPEKSSQKELEAMGLGTPSEAIEIREAAHPTDVSISKTALYSRIGTAEVEKPAGLLFQQPDLDSALQIARAEIITKEREVSEWKDKYEESRREVMEMRKIVAEYEKTIAQMIEDEQREKSVSHQTVQQLVLEKEQALADLNSVEKSLADLFRRYEKMKEVLEGFRKNEEVLKRCAQEYLSRVKKEEQRYQALKVHAEEKLDRANAEIAQVRGKAQQEQAAHQASLRKEQLRVDALERTLEQKNKEIEELTKICDELIAKMGKS

SEQ ID NO: 83034 - protein, 154 aa, Homo sapiens
MALVRGGWLWRQMHLEYRTGSILRRWKRNWFALWLDGTLGYYHDETAQDEEDRVLIHFNVRDIKIGPECHDVQPPEGRSRDGLLTVNLREGGRLHLCAETKDDALAWKTALLEANSTPAPAGATVPPRSRRVCSKVRCVTRSWSPCKVERRIWV

SEQ ID NO: 83035 - protein, 41 aa, Homo sapiens
MARRLLPAHVQESVTFRDVAVFFSQDEWLHLDSAQRALYRE

SEQ ID NO: 83036 - protein, 51 aa, Homo sapiens
ERKMHMPFQKGMPFDLCFLVQSSDFKEHGWSWKPLQEQKTKHRKFSLISRS

SEQ ID NO: 83037 - protein, 162 aa, Homo sapiens
MDAQQTKTNEARLWGDHGQEALESAHVCLINATATGTEILKNLVLPGIGSFTIIDGNQVSGEDAGNNFFLQRSSIGKNRAEAAMEFLQELNSDVSGSFVEESPENLLDNDPSFFCRFTVVVATQLPESTSLRLADVLWNSQIPLLICRTYGLVGYMRIIIKE

SEQ ID NO: 83038 - protein, 107 aa, Homo sapiens
MLRYPYFCRMYKECLSCWLESGIPNLGVWPNRIHTTAEKYREYEAREQTDQTQAQELHRSQDRDFETMAKLHIPVMVDEVVHCLSPQKGQQLLLRKSGRRPLLTASC

SEQ ID NO: 83039 - protein, 180 aa, Homo sapiens
MLREEAAQKRKGKESGMALPQGRLTFRDVAIEFSLAEWKFLNPAQRALYREVMLENYRNLEAVDISSKHMMKEVLSTGQGNREVIHTGTLQRHQSYHIGDFCFQEIEKEIHNIEFQCQEDERNGHEAPTTKIKKLTGSTDQHDHRHAGNKPIKDQLGSSFYSHLPELHIFQIKGEIANQL

SEQ ID NO: 83040 - protein, 841 aa, Homo sapiens
MTTEKSLVTEAENSQHQQKEEGEEAINSGQQEPQQEESCQTAAEGDNWCEQKLKASNGDTPTHEDLTKNKERTSESRGLSRLFSSFLKRPKSQVSEEEGKEVESDKEKGEGGQKEIEFGTSLDEEIILKAPIAAPEPELKTDPSLDLHSLSSAETQPAQEELREDPDFEIKEGEGLEECSKIEVKEESPQSKAETELKASQKPIRKHRNMHCKVSLLDDTVYECVVEKHAKGQDLLKRVCEHLNLLEEDYFGLAIWDNATSKTWLDSAKEIKKQVRGVPWNFTFNVKFYPPDPAQLTEDITRYYLCLQLRQDIVAGRLPCSFATLALLGSYTIQSELGDYDPELHGVDYVSDFKLAPNQTKELEEKVMELHKSYRSMTPAQADLEFLENAKKLSMYGVDLHKAKDLEGVDIILGVCSSGLLVYKDKLRINRFPWPKVLKISYKRSSFFIKIRPGEQEQYESTIGFKLPSYRAAKKLWKVCVEHHTFFRLTSTDTIPKSKFLALGSKFRYSGRTQAQTRQASALIDRPAPHFERTASKRASRSLDGAAAVDSADRSPRPTSAPAITQGQVAEGGVLDASAKKTVVPKAQKETVKAEVKKEDEPPEQAEPEPTEAWKVEKTHIEVTVPTSNGDQTQDLDKSQEEIKKHHASISELKKNFMESVPEPRPSEWDKRLSTHSPFRTLNINGQIPTGEGVKKTSVLPSERKPPLVKTQTVTISDNANAVKSEIPTKDVPIVHTETKTITYEAAQTDDNSGDLDPGVLLTAQTITSETPSSTTTTQITKTVKGGISETRIEKRIVITGDADIDHDQVLVQAIKEAKEQHPDMSVTKVVVHQETEIADE

SEQ ID NO: 83041 - protein, 347 aa, Homo sapiens
MGVVQYGDNPATHFNLKTHTNSRDLKTAIEKITQRGGLSNVGRAISFVTKNFFSKANGNRSGAPNVVVVMVDGWPTDKVEEASRLARESGINIFFITIEGAAENEKQYVVEPNFANKAVCRTNGFYSLHVQSWFGLHKTLQPLVKRVCDTDRLACSKTCLNSADIGFVIDGSSSVGTGNFRTVLQFVTNLTKEFEISDTDTRIGAVQYTYEQRLEFGFDKYSSKPDILNAIKRVGYWSGGTSTGAAINFALEQLFKKSKPNKRKLMILITDGRSYDDVRIPAMAAHLKGVITYAIGVAWAAQEELEVIATHPARDHSFFVDEFDNLHQYVPRIIQNICTEFNSQPRN

SEQ ID NO: 83042 - protein, 705 aa, Homo sapiens
MGLLQLLAFSFLETAGPGASLEWRSLETTPEPQGLSMGSPSSGKRRPPRAPAPRPQRSAGDPRACTHTHSRFPSSQISTRTLTPRMRGLPRARGFTCVALCRARVRAQEPEFSYGCAEGSCYPATGDLLIGRAQKLSVTSTCGLHKPEPYCIVSHLQEDKKCFICNSQDPYHETLNPDSHLIENVVTTFAPNRLKIWWQSENGVENVTIQLDLEAEFHFTHLIMTFKTFRPAAMLIERSSDFGKTWGVYRYFAYDCEASFPGISTGPMKKVDDIICDSRYSDIEPSTEGEVIFRALDPAFKIEDPYSPRIQNLLKITNLRIKFVKLHTLGDNLLDSRMEIREKYYYAVYDMVVRGNCFCYGHASECAPVDGFNEEVEGMVHGHCMCRHNTKGLNCELCMDFYHDLPWRPAEGRNSNACKKCNCNEHSISCHFDMAVYLATGNVSGGVCDDCQHNTMGRNCEQCKPFYYQHPERDIRDPNFCERCTCDPAGSQNEGICDSYTDFSTGLIAGQCRCKLNVEGEHCDVCKEGFYDLSSEDPFGCKSCACNPLGTIPGGNPCDSETGHCYCKRLVTGQHCDQCLPEHWGLSNDLDGCRPCDCDLGGALNNSCFAESGQCSCRPHMIGRQCNEVEPGYYFATLDHYLYEAEEANLGPGVSIVERQYIQDRIPSWTGAGFVRVPEGAYLEFFIDNIPYSMEYDILIRYEPQ

SEQ ID NO: 83043 - protein, 497 aa, Homo sapiens
MIEEPSNKRVKPLSRVTSLANLIPPVKATPLKRFSQTLQRSISFRSESRPDILAPRPWSRNAAPSSTKRRDSKLWSETFDVCVNQMLTSKEIKRQEAIFELSQGEEDLIEDLKLAKKAYHDPMLKLSIMTEQELNQIFGTLDSLIPLHEELLSQLRDVRKPDGSTEHVGPILVGWLPCLSSYDSYCSNQVAAKALLDHKKQDHRVQDFLQRCLESPFSRKLDLWNFLDIPRSRLVKYPLLLREILRHTPNDNPDQQHLEEAINIIQGIVAEINTKTGESECRYYKERLLYLEEGQKDSLIDSSRVLCCHGELKNNRGVKLHVFLFQEVLVITRAVTHNEQLCYQLYRQPIPVKDLLLEDLQDGEVRLGGSLRGAFSNNERIKNFFRVSFKNGSQSQTHSLQANDTFNKQQWLNCIRQAKETVLCAAGQAGVLDSEGSFLNPTTGSRELQGETKLEQMDQSDSESDCSMDTSEVSLDCERMEQTDSSCGNSRHGESNV

SEQ ID NO: 83044 - protein, 471 aa, Homo sapiens
MEFVTALADLRAEASCPICLDYLKDPVTISCGHNFCLSCIIMSWKDLHDSFPCPFCHFCCPERKFISNPQLGSLTEIAKQLQIRSKKRKRQEEKHVCKKHNQVLTFFCQKDLELLCPRCSLSTDHQHHCVWPIKKAASYHRKKLEEYNAPWKERVELIEKVITMQTRKSLELKKKVKHRAEEVKSEFEQLRLFLQNEQETVLRQLQDEEMDILAQLNESLTKFSDYTSSLKYLLKEIESIYVKSELELLANVKDIYHRYENLKFPELFLFKLKKYGYHLPPQYSGLDKIIKRFQVDVILDPETAHRKLIVSEDRKTVRYGNTTQNVPHNPRRFYLLPAVLGSKGYSCGRQYWEVEVKDKPEWILGVCNDCLPRRRKSQPILVQDGLWGIWRSSQNNYIVLGHREIILLPQVIPSKIGIFLDYEMNEVSFYNLNDRSLLYTFNDNFTGALWPYFYTGTDSKPLKISTVTDSE

SEQ ID NO: 83045 - protein, 45 aa, Homo sapiens
MARSLVCLGVIILLSAFSGPGVRGGPMPKLADRKLCADQECSHPI

SEQ ID NO: 83046 - protein, 144 aa, Homo sapiens
MSRRSQRLTRYSQGDDDGSSSSGGSSVAGSQSTLFKDSPLRTLKRKSSNMKRLSPAPQLGPSSDAHTSYYSESLVHESWFPPRSSLEELHGDANWGEDLRVRRRRGTGGSESSRASGLVGRKATEDFLGSSSGYSSEDDYVGRR

SEQ ID NO: 83047 - protein, 89 aa, Homo sapiens
MFPACADVILILAYLLVELKEKLAFLKREYSKTLARLQRAQRAEKIKHSIKKTVEEQDCLSQQDLSPQLKHSEPKNKICVYDKLHIKTH

SEQ ID NO: 83048 - protein, 27 aa, Homo sapiens
ATGAPGRNRGVDLQENNPASRSQCCSN

SEQ ID NO: 83049 - protein, 295 aa, Homo sapiens
MSDVTIVKEGWVQKRGEYIKNWRPRYFLLKTDGSFIGYKEKPQDVDLPYPLNNFSVAKCQLMKTERPKPNTFIIRCLQWTTVIERTFHVDTPEEREEWTEAIQAVADRLQRQEEERMNCSPTSQIDNIGEEEMDASTTHHKRKTMNDFDYLKLLGKGTFGKVILVREKASGKYYAMKILKKEVIIAKDEVAHTLTESRVLKNTRHPFLTSLKYSFQTKDRLCFVMEYVNGGELFFHLSRERVFSEDRTRFYGAEIVSALDYLHSGKIVYRDLKGWYFFITKNCKRGYRLTLQNKI

SEQ ID NO: 83050 - protein, 332 aa, Homo sapiens
MGRPLHLVLLSASLAGLLLLGESLFIRREQANNILARVTRANSFLEEMKKGHLERECMEETCSYEEAREVFEDSDKTNEFWNKYKDGDQCETSPCQNQGKCKDGLGEYTCTCLEGFEGKNCELFTRKLCSLDNGDCDQFCHEEQNSVVCSCARGYTLADNGKACIPTGPYPCGKQTLERRKRSVAQATSSSGEAPDSITWKPYDAADLDPTENPFDLLDFNQTQPERGDNNLTRIVGGQECKDGECPWQALLINEENEGFCGGTILSEFYILTAAHCLYQAKRFKGTGTRSRRRAVRRCTRWRWSSSTTGSQRRPMTSTSPCSGSRPPSPSA

SEQ ID NO: 83051 - protein, 123 aa, Homo sapiens
LGWYTTGGPPDPSDIHVHKQVCEIIESPLFLKLNPMTKHTDLPVSVFESVIDIINGEATMLFAELTYTLATEEAERIGVDHVARMTATGSGENSTVAEHLIAQHSAIKMLHSRVKLILERGPL

SEQ ID NO: 83052 - protein, 158 aa, Homo sapiens
MGTSHPAFLVLGCLLTGLSLILCQLSLPSILPNENEKVVQLNSSFSLRCFGESEVSWQYPMSEEESSDVEIRNEENNSGLFVTVLEVSSASAAHTGLYTCYYNHTQTEENELEGRHIYIYVPDPDVAFVPLGMTDYLVIVEDDDSAIIPCRTTDPETP

SEQ ID NO: 83053 - protein, 519 aa, Homo sapiens
MTAWFNGVEELGRDECFVCLELDPSNGSFLNAKLYISNWILIYFTRTLQLPAPFNTCTSSKSRGEPGCDSKRECISIHVGQAGVQIGNACWELYCLEHGIQPDGQMPSDKTIGGGDDSFNTFFSETGAGKHVPRAVFVDLEPTVIDEVRTGTYRQLFHPEQLITGKEDAANNYARGHYTIGKEIIDLVLDRIRKLADQCTGLQGFLVFHSFGGGTGSGFTSLLMERLSVDYGKKSKLEFSIYPAPQVSTAVVEPYNSILTTHTTLEHSDCAFMVDNEAIYDICRRNLDIERPTYTNLNRLISQIVSSITASLRFDGALNVDLTEFQTNLVPYPRIHFPLATYAPVISAEKAYHEQLTVAEITNACFEPANQMVKCDPRHGKYMACCLLYRGDVVPKDVNAAIATIKTKRTIQFVDWCPTGFKVGINYQPPTVVPGGDLAKVQRAVCMLSNTTAVAEAWARLDHKFDLMYAKRAFVHWYVGEGMEEGEFSEAREDMAALEKDYEEVGADSADGEDEGEEY

SEQ ID NO: 83054 - protein, 184 aa, Homo sapiens
MVLLRLLVFLFAPVVSDLCSLPCFINVSESQGPGTVLQFLSFNCSSYTPTPTLELLNVQPPTTFFNPPSLARWQGTYVGKLTLSSSAQLDALMVNHYKVQLKFTCGNHVMEGSLSVDVQRDLSHIQCAGQFASPAGEMIQVPETVTPGARLYTLLLPGLELHGAQVSPEHGTVGDRMGVGGWRE

SEQ ID NO: 83055 - protein, 40 aa, Homo sapiens
MEQGKGLAVLILAIILLQGTLAQSIKGRRNGFFLYSDSEY

SEQ ID NO: 83056 - protein, 120 aa, Homo sapiens
  MOD_RES (1)..(1): Any amino acid
XSLATCELPLAKSEWQKKLTPEQFYVTREKGTEPPFSGIYLNNKEAGMYHCVCCDSPLFRSLLDIQKEVFSIKGSRSPSTSRGNGFDSEVLRKSTALALGGLRFPRLMVRLALMKATQGS

SEQ ID NO: 83057 - protein, 93 aa, Homo sapiens
MAEDADMRNELEEMQRRADQLADESLESTRRMLQLVEESKDAGIRTLVMLDEQGEQLERIEEGMDQINKDMKEAEKNLTDLGKFCGLCVCPCN

SEQ ID NO: 83058 - protein, 151 aa, Homo sapiens
  MOD_RES (1)..(1): Any amino acid
XKYRMGLIQTPDQLRFSYMAIIEGAKCIKGDSSIQKRWKELSKEDLSPAFDHSPNKIMTEKYNGNRIGLEEEKLTGDRCTGLSSKMQDTMEENSESALRKRIREDRKATTAQKVQQMKQRLNENERKRKRHRLLLIHQISAVKNFSYFEFS

SEQ ID NO: 83059 - protein, 643 aa, Homo sapiens
MGNGESQLSSVPAQKLGWFIQEYLKPYEECQTLIDEMVNTICDVLQEPEQFPLVQGVAIGGSYGRKTVLRGNSDGTLVLFFSDLKQFQDQKRSQRDILDKTGDKLKFCLFTKWLKNNFEIQKSLDGFTIQVFTKNQRISFEVLAAFNALSLNDNPSPWIYRELKRSLDKTNASPGEFAVCFTELQQKFFDNRPGKLKDLILLIKHWHQQCQKKIKDLPSLSPYALELLTVYAWEQGCRKDNFDIAEGVRTVLELIKCQEKLCIYWMVNYNFEDETIRNILLHQLQSARPVILDPVDPTNNVSGDKICWQWLKKEAQTWLTSPNLDNELPAPSWNVLPAPLFTTPGHLLDKFIKEFLQPNKCFLEQIDSAVNIIRTFLKENCFRQSTAKIQIVRGGSTAKGTALKTGSDADLVVFHNSLKSYTSQKNERHKIVKEIHEQLKAFWREKEEELEVSFEPPKWKAPRVLSFSLKSKVLNESVSFDVLPAFNALGQLSSGSTPSPEVYAGLIDLYKSSDLPGGEFSTCFTVLQRNFIRSRPTKLKDLIRLVKHWYKECERKLKPKGSLPPKYALELLTIYAWEQGSGVPDFDTAEGFRTVLELVTQYQQLCIFWKVNYNFEDETVRKFLLSQLQKTRCLHPSPVLFLT

SEQ ID NO: 83060 - protein, 185 aa, Homo sapiens
MGFDAYFTSRTLENNRRNVWFAEYWEENFNCKLTISGSKKEDTDRKCTGQERIGKDSNYEQEGKVQFVIDAVYAMAHALHHMNKDLCADYRGVCPEMEQAGGKKLLKYIRNVNFNGSAGTPVMFNKNGDAPGRYDIFQYQTTNTSNPGYRLIGQWTDELQLNIEDMQWGKGVREIPASVCTLPCK

SEQ ID NO: 83061 - protein, 74 aa, Homo sapiens [sequence omitted]

SEQ ID NO: 83062 - protein, 87 aa, Homo sapiens
MCHLVRLSHASPFSLLHFPGFIPRRRMEETRAKLVCLQSSCRAWRDLSSMIIQGELDQVLLRPAAWMLYIQKDPVGIEIQLTHAYFL

SEQ ID NO: 83063 - protein, 81 aa, Homo sapiens
  MOD_RES (1)..(1): Any amino acid
XPQEPVNIEEGDGYSKVIKRVVLKSDTEQSEALSYTGSHMKVHLPSLVENEILKEDGSIIKRTTMSKAITQKRAVVKDQHG

SEQ ID NO: 83064 - protein, 54 aa, Homo sapiens
MAALLRSARWLLRAGAAPRLPLSLRLLPGGPGRLHAASYLPAARAGPVAGWPRW

SEQ ID NO: 83065 - protein, 140 aa, Homo sapiens
MAQVSINNDYSEWDLSTDAGERARLLQSPCVDTAPKSEWEASPGGLDRGTTSTLGAIFIVVNACLGAGLLNFPAAFSTAGGVAAGIALQMGMLVFIISGLVILAYCSQASNERTYQEVVWAVCGKLTGVLCEVAIAVYTF

SEQ ID NO: 83066 - protein, 150 aa, Homo sapiens
  MOD_RES (1)..(1): Any amino acid
XYWCLLRGKSSFMENMPWYMARWTKEDLELINKWAFQGERMIHGNPSGVDNAVSTWGGALRYHQGKISSLKRVGGFPDCSQSCPSSSILSSVWTCLLFTLQVASSPDPADQHQSPSQYQGPCGWRQKQAAQVPRDRGPPPDLNRCHLPGV

SEQ ID NO: 83067 - protein, 115 aa, Homo sapiens
MDDLLAEMQQIEQSNFRQAPQRAPGVADLALSENWAQEFLAAGDAVDVTQDYNETDWSQEFISEVTDPLSVSPARWAEEYLEQSEEKLWLGEPEGTATDRWYDEYHPEEDLQHTA

SEQ ID NO: 83068 - protein, 221 aa, Homo sapiens
MQRGLALSLVSGARRQSHAAASAGRDARGNRAGVAPPEQEGDRYTYEDYKNTAEWLLSHTKHRPQVAIICGSGLGGLTDKLTQAQIFDYGEIPNFPRSTVPGHAGRLVFGFLNGRACVMMQGRFHMYEGYPLWKVTFPVRVFHLLGVDTLVVTNAAGGLNPKFEVGDIMLIRDHINLPGFSGQNPLRGPNDERFGDRFPAMSDAYDRTMRQRALSTWKQMG

SEQ ID NO: 83069 - protein, 106 aa, Homo sapiens
MRENVPGEKKPQNGIPLPPQIFNEEQYCGDFDSFFSAKEENIIYSFLGLAPPPDSKGSEKAEEGGETEAQKEGSEDVGNLPEAQEKNEEEGETATEETEEIAMEGA

SEQ ID NO: 83070 - protein, 128 aa, Homo sapiens
IAWVEGHEPGCRSIGALMAHVDAVIRHCAGRLGSYVINGRTKVHGGLLQIFPEGRPVVANIEPLFDRLLIFWSDRRNPHEVKPAYATRYAITVWYFDAKERAAAKDKYQLASGQKGVQVPVSQPPTPT

SEQ ID NO: 83071 - protein, 324 aa, Homo sapiens
MSEESDMDKAIKDAPVKLCDFGFAKIDQGDLMTPQFTPYYVAPQVLEAQRRHQKEKSGIIPTSPTPYTYNKSCDLWSLGVIIYVMLCGYPPFYSKHHSRTIPKDMRRKIMTGSFEFPEEEWSQISEMAKDVVRKLLKVKPEERLTIEGVLDHPWLNSTEALDNVLPSAQLMMDKAVVAGIQQAHAEQLANMRIQDLKVSLKPLHSVNNPILRKRKLLGTKPKDSVYIHDHENGAEDSNVALEKLRDVIAQCILPQAGKGENEDEKLNEVMQEAWKYNRECKLLRDTLQSFSWNGRGFTDKVDRLKLAEIVKQVIEEQTTSHESQ

SEQ ID NO: 83072 - protein, 205 aa, Homo sapiens
MFGGYETIEAYEDDLYRDESSSELSVDSEVEFQLYSQIHYAQDLDDVIREEEHEEKNSGNSESSSSKPNQKKLIVLSDSEVIQLSDGSEVITLSDEDSIYRCKGKNVRVQAQENAHGLSSSLQSNELVDKKCKSDIEKPKSEERSGVIREVMIIEVSSSEEEESTISEGDNVESWMLLGCEVDDKDDDILLNLVGCENSVTEGQE

SEQ ID NO: 83073 - protein, 125 aa, Homo sapiens
MVACYPGNGLGYVRHVDNPHGDGRCITCIYYLNQNWDVKVHGGLLQIFPEGRPVVANIEPLFDRLLIFWSDRRNPHEVKPAYATRYAITVWYFDAKERAAAKDKYQLASGQKGVQVPVSQPPTPT

SEQ ID NO: 83074 - protein, 98 aa, Homo sapiens
MEERTITIEIPEVLKKQLEDDCYYINRRKRLVKLPCQTNIITILESYVKHFAINAAFSANERPRHHHVMPHANMNVHYIPAEKNVDLCKEMVDGLRIT

SEQ ID NO: 83075 - protein, 161 aa, Homo sapiens
MAVEALHCGLNPRGIDHPAHAEGIKLQIEGEGVESQSIKNKNFQKVPDQKGTPKRLQAEAETAKSATVKLSKPVALWTQQDVCKWLKKHCPNQYQIYSESFKQHDITGRALLRLTDKKLERMGIAQENLRQHILQQVLQLKVREEVRNLQLLTQASSEGSP

SEQ ID NO: 83076 - protein, 117 aa, Homo sapiens
MLSEVLLVSAPGKVILHGEHAVVHGKVALAVSLNLRTFLRLQPHSNGKVDLSLPNIGIKRAWDVARLQSLDTSFLGSHSVMQPGVQWCDHSSLFLQPPGLKRSSCLSLLSSWDHRAR

SEQ ID NO: 83077 - protein, 160 aa, Homo sapiens
MSRQSTLYSFFPKSPALSDANKASARASREGGRAAAAPGASPSPGGDAAWSEAGPGPRPLARSASPPKAKNLNGGLRRSVAPAAPTSCDFSPGDLVWAKMEGYPWWPCLVYNHPFDGTFIREKGKSVRVHVQFFDDSPTRGWVSKRLLKPYTGRHNLRNR

SEQ ID NO: 83078 - protein, 131 aa, Homo sapiens
MLCWGYWSLGQPGISTNLQGIVAEPQVCGFISDRSVKEVACGGNHSVFLLEDGEVYTCGLNTKGQLGHEREGNKPEQIGALADQHIIHVACGESHSLALSDRGQLFSWGAGSDGQLGLMTTEDSVAVPRLI

SEQ ID NO: 83079 - protein, 104 aa, Homo sapiens
  MOD_RES (1)..(1): Any amino acid
XKEAFRLQPYNGVALRPWDGNSDDRVLLDLSAFLKTIALNGVEDVRTVLEHYALEDDPLAAFKQRQSRLEQEEQQRLAELSKSNKQNLFLGSLTSRLWPRSKQP

SEQ ID NO: 83080 - protein, 143 aa, Homo sapiens
MGGLSTVGACPGILGAQQGNECPSKVGPREPLFSPPQSRWASGSFLSIRAGHLARGLGPSGFPGTRGLSGLGLRGSGSLGLWLSPLAPSGSATYESGRADVYGSTLSAAEHPNKETPLFLSEWICLDWGDAGRAGEKQKRKQK

SEQ ID NO: 83081 - protein, 69 aa, Homo sapiens
  MOD_RES (1)..(1): Any amino acid
XVLRRKGMLGASPNRPDSSGKRSVKFNKGYTALSQSPDENLVSLDSDRPFMYIPGPFSSEQYPFPGWLG

SEQ ID NO: 83082 - protein, 233 aa, Homo sapiens
MLILMTSLAWDPTTVSTVEVLKKIDIPSVFIGESSANSLKDEFTYEKGGHLILVPEFSLPLEYYLIPFLIIVGICLILIVIFMITKFVQDRHRARRNRLRKDQLKKLPVHKFKKGDEYDVCAICLDEYEDGDKLRILPCSHAYHCKCVDPWLTKTKKTCPVCKQKVVPSQGDSDSDTDSSQEENEVTEHTPLLRPLASVSAQSFGALSESRSHQNMTESSDYEEDDNEDTDSS

SEQ ID NO: 83083 - protein, 199 aa, Homo sapiens
MLSVRVAAAVVRALPRRAGLVSRNALGSSFIAARNFHASNTHLQKTAIVDVPVGEELLGRVVDALGNAIDGKGPIGSKTRRRVGLKAPGIIPRISVREPMQTGIKAVDSLVPIGRGQRELIIGDRQTGKTSIAIDTIINQKRFNDGSDEKKKLYCIYVAIGQKRSTVAQLVKRLTDADAMKYTIVVSATASDAAPLQYL

SEQ ID NO: 83084 - protein, 131 aa, Homo sapiens
MFTLICKIQEDSPAHCAGLQAGDVLANINGVSTEGFTYKQVVDLIRSSGNLLTIETLNGTMILKRTELEAKLQVLKQTLKQKWVEYRSLQLQEHRLLHGDAANCPSLENMDLDELSLFGPLPGPGPALVDR

SEQ ID NO: 83085 - protein, 32 aa, Homo sapiens
MMFPLARNALSSLKIQSILQSMARHSHVKHSP

SEQ ID NO: 83086 - protein, 77 aa, Homo sapiens
MRYKTSLVMRKRLRLYRNTLKESSSSSGHHGPQLTAASSPSVFPGLHEEPPQASPSRPLNGLLRLGLPGDMYARPEP

SEQ ID NO: 83087 - protein, 144 aa, Homo sapiens
MPQVTFNDVAIDFTHEEWGWLSSAQRDLYKDVMVQNYENLVSVGLSVTKPYVITLLEDGKEPWMMEKKLSKGMIPDWESRWENKELSTKKDNYDEDSPQTVIIEKVVKQSYEFSNSKKNLEYIEKLEGKHGSQVDHFRPAILTS

SEQ ID NO: 83088 - protein, 183 aa, Homo sapiens
MGVWLNKDDYIRDLKRIILCFLIVYMAILVGTDQDFYSLLGVSKTASSREIRQAFKKLALKLHPDKNPNNPNAHGDFLKINRAYEVLKDEDLRKKYDKYGEKGLEDNQGGQYESWNYYRYDFGIYDDDPEIITLERREFVETGFHHVGQADLELLTSGDPPTLASQSARITGMSHHIWPRVAF

SEQ ID NO: 83089 - protein, 779 aa, Homo sapiens
MPGSATALRHERLKKTNARPIPLGLFTINEEDEQQKNGNSRRPKAPDSYKVQDKKNASSRPASAISGQNNNHSGNKPDPPPVLRVDDRQRLARERREEREKQLAAREIVWLEREERARQHYEKHLEERKKRLEEQRQKEERRRAAVEEKRRQRLEEDKERHEAVVRRTMERSQKPKQKHNRWSWGGSLHGSPSIHSADPDRRSVSTMNLSKYVDPVISKRLSSSSATLLNSPDRARRLQLSPWESSVVNRLLTPTHSFLARSKSTAALSGEAVIPICPRSASCSPIIMPYKAAHSRNSMDRPKLFVTPPEGSSRRRIIHGTASYKKERERENVLFLTSGTRRAVSPSNPKARQPARSRLWLPSKSLPHLPGTPRPTSSLPPGSVKAAPAQVRPPSPGNIRPVKREVKVEPEKKDPEKEPQKVANEPSLKGRAPLVKVEEATVEERTPAEPEVGPAAPAMAPAPASAPAPASAPAPAPVPTPAMVSAPSSTVNASASVKTSAGTTDPEEATRLLAEKRRLAREQREKEERERREQEELERQKREELAQRVAEERTTRREEESRRLEAEQAREKEEQLQRQAEERALREREEAERAQRQKEEEARVREEAERVRQEREKHFQREEQERLERKKRLEEIMKRTRRTEATDKKTSDQRNGDIAKGALTGGTEVSALPCTTNAPGNGKPVGSPHVVTSHQSKVTVESTPDLEKQPNENGVSVQNENFEEIINLPIGSKPSRLDVTNSESPEIPLNPILAFDDEGTLGPLPQVDGVQTQQTAEVI

SEQ ID NO: 83090 - protein, 149 aa, Homo sapiens
MAELQEVQITEEKPLLPGQTPEAAKTHSVETPYGSVTFTVYGTPKPKRPAILTYHDVGLNYKSCFQPLFQFEDMQEIIQNFVRVHVDAPGMEEGAPVFPLGYQYPSLDQLADMIPCVLQYLNFSTIIGVGVGAGAYILARYALNHPDTV

SEQ ID NO: 83091 - protein, 153 aa, Homo sapiens
MAALRPLVKPKIVKKRTKKFIRHQSDRYVKIKEEFALCTDANPPVYYFLQRNWRKPRGIDNRVRRRFKGQILMPNIGYGSNKKTKHMLPSGFRKFLVHNVKELEVLLMCNKSYCAEIAHNVSSKNRKAIVERAAQLAIRVTNPNARLRSEENE

SEQ ID NO: 83092 - protein, 45 aa, Homo sapiens
DLFLYVVGSSYENEEERGEALVAGEHGRSLLGAGRDCGWRCDSGE

SEQ ID NO: 83093 - protein, 339 aa, Homo sapiens
MAGGPGPGEPAAPGAQHFLYEVPPWVMCRFYKVMDALEPADWCQFGGWRRAAGGREARGLLAPTPDAPRPAAALIVRDQTELRLCERSGQRTASVLWPWINRNARVADLVHILTHLQLLRARDIITAWHPPAPLPSPGTTAPRPSSIPAPAEAEAWSPRKLPSSASTFLSPAFPGSQTHSGPELGLVPSPASLWPPPPSPAPSSTKPGPESSVSLLQGARPFPFCWPLCEISRGTHNFSEELKIGEGGFGCVYRAVMRNTVYAVKRLKENADLEWTAVKQSFLTEVEQLSRPRPAHLSPGLSDWTSFWVQPGQFSFYIRTAPASSMETSRVPTSFWMRG

SEQ ID NO: 83094 - protein, 145 aa, Homo sapiens
MDGEDIPDFSSLKEETAYWKELSLKYKQSFQEARDELVEFQEGSRELEAELEAQLVQAEQRNRDLQADNQRLKYEVEALKEKLEHQYAQSYKQVSVLEDDLSQTRAIKEQLHKYVRELEQANDDLERAKRATIVSLEDFEQRLNQ

SEQ ID NO: 83095 - protein, 119 aa, Homo sapiens
MIKCVIPGSDPFLEYNNYGCYCGLGGSGTPVDELDKCCQTHDNCYDQAKKLDSCKFLLDNPYTHTYSYSCSGSAITCSSKNKECEAFICNCDRNAAICFSKAPYNKAHKNLDTKKYCQS

SEQ ID NO: 83096 - protein, 863 aa, Homo sapiens
MNQIEPGVQYNYVYDEDEYMIQEEEWDRDLLLDPAWEKQQRKTFTAWCNSHLRKAGTQIENIEEDFRNGLKLMLLLEVISGERLPKPDRGKMRFHKIANVNKALDYIASKGVKLVSIGAEEIVDGNVKMTLGMIWTIILRFAIQDISVEETSAKEGLLLWCQRKTAPYRNVNIQNFHTSWKDGLGLCALIHRHRPDLIDYSKLNKDDPIGNINLAMEIAEKHLDIPKMLDAEDIVNTPKPDERAIMTYVSCFYHAFAGAEQLLEWIRRTIPWLENRTPEKTMQAMQKKLEDFRDYRRKHKPPKVQEKCQLEINFNTLQTKLRISNRPAFMPSEGKMVSDIAGAWQRLEQAEKGYEEWLLNEIRRLERLEHLAEKFRQKASTHETWAYGKEQILLQKDYESASLTEVRALLRKHEAFESDLAAHQDRVEQIAAIAQELNELDYHDAVNVNDRCQKICDQWDRLGTLTQKRREALERMEKLLETIDQLHLEFAKRAAPFNNWMEGAMEDLQDMFIVHSIEEIQSLITAHEQFKATLPEADGERQSIMAIQNEVEKVIQSYNIRISSSNPYSTVTMDELRTKWDKVKQLVPIRDQSLQEELARQHANERLRRQFAAQANAIGPWIQNKMEEIARSSIQITGALEDQMNQLKQYEHNIINYKNNIDKLEGDHQLIQEALVFDNKHTNYTMEHIRVGWELLLTTIARTINEVETQILTRDAKGITQEQMNEFRASFNHFDRRKNGLMDHEDFRACLISMGYDLGEAEFARIMTLVDPNGQGTVTFQSFIDFMTRETADTDTAEQVIASFRILASDKPYILAEELRRELPPDQAQYCIKRMPAYSGPGSVPGALDYAAFSSALYGESDL

SEQ ID NO: 83097 - protein, 52 aa, Homo sapiens
MDASLSMLANCEKLSLSTNCIEKIANLNGLKNLRILSLGRNNIKNLNGLEAV

SEQ ID NO: 83098 - protein, 108 aa, Homo sapiens
MTTYLEFIQQNEERDGVRFSWNVWPSSRLEATRMVVPVAALFTPLKERPDLPPIQYEPVLCSRTTCRAVLNPLCQVDYRAKLWACNFCYQRNQVRKHPLHAGRSGSCL

SEQ ID NO: 83099 - protein, 140 aa, Homo sapiens
MSRSRQPPLVTGISPNEGIPWTKVTIRGENLGTGPTDLIGLTICGHNCLLTAEWMSASKIVCRVGQAKNDKGDIIVTTKSGGRGTSTVSFKLLKPEKIGILDQSAVWVDEMNYYDMRTDRNKGIPPLSLRPANPLGIEIE

SEQ ID NO: 83100 - protein, 234 aa, Homo sapiens
MVSGNNSDGAHCMGPGLRGKETTLVTPQDSPGKCPINGRSEEATADGHTNGRTKKFMSSPLTFHSDDKSGSVVIFGGIDSSYYTGSLNWVPVTVEGYWQITVDSITMNGETIACAEGCQAIVDTGTSLLTGPTSPIANIQSDIGASENSDGDMVVSCSAISSLPDIVFTINGVQYPVPPSAYILQSEGSCISGFQGMNVPTESGELWILGDVFIRQYFTVFDRANNQVGLAPVA

SEQ ID NO: 83101 - protein, 220 aa, Homo sapiens; identical to SEQ ID NO: 61935

SEQ ID NO: 83102 - protein, 203 aa, Homo sapiens
  MOD_RES (1)..(1): Any amino acid
XDSELSDEEASILESGGFSVSRATTPQLTDVSEDLDQQSLPSEPEETLSRDLGEGEEGELAPPEDLLGRPQALSRQALDSEEEEEDVAAKETLLRLSSPLHFVNTHFNGAGSPPDGVKCSPGGPVETLSPETDSPQPLPAPEEEEALTTEDFELLDQGELEQLNAELGLEPETPPKPPDAPPLGPDIHSLVQSDQEAQAVAEP

SEQ ID NO: 83103 - protein, 1133 aa, Homo sapiens
MPSSLMLEVPALADFNRAWTELTDWLSLLDQVIKSQRVMVGDLEDINEMIIKQKATMQDLEQRRPQLEELITAAQNLKNKTSNQEARTIITDRIERIQNQWDEVQEHLQNRRQQLNEMLKDSTQWLEAKEEAEQVLGQARAKLESWKEGPYTVDAIQKKITETKQLAKDLRQWQTNVDVANDLALKLLRDYSADDTRKVHMITENINASWRSIHKRVSEREAALEETHRLLQQFPLDLEKFLAWLTEAETTANVLQDATRKERLLEDSKGVKELMKQWQDLQGEIEAHTDVYHNLDENSQKILRSLEGSDDAVLLQRRLDNMNFKWSELRKKSLNIRSHLEASSDQWKRLHLSLQELLVWLQLKDDELSRQAPIGGDFPAVQKQNDVHRAFKRELKTKEPVIMSTLETVRIFLTEQPLEGLEKLYQEPRELPPEERAQNVTRLLRKQAEEVNTEWEKLNLHSADWQRKIDETLERLRELQEATDELDLKLRQAEVIKGSWQPVGDLLIDSLQDHLEKVKALRGEIAPLKENVSHVNDLARQLTTLGIQLSPYNLSTLEDLNTRWKLLQVAVEDRVRQLHEAHRDFGPASQHFLSTSVQGPWERAISPNKVPYYINHETQTTCWDHPKMTELYQSLADLNNVRFSAYRTAMKLRRLQKALCLDLLSLSAACDALDQHNLKQNDQPMDILQIINCLTTIYDRLEQEHNNLVNVPLCVDMCLNWLLNVYDTGRTGRIRVLSFKTGIISLCKAHLEDKYRYLFKQVASSTGFCDQRRLGLLLHDSIQIPRQLGEVASFGGSNIEPSVRSCFQFANNKPEIEAALFLDWMRLEPQSMVWLPVLHRVAAAETAKHQAKCNICKECPIIGFRYRSLKHFNYDICQSCFFSGRVAKGHKMHYPMVEYCTPTTSGEDVRDFAKVLKNKFRTKRYFAKHPRMGYLPVQTVLEGDNMETNLQAEYDRLKQQHEHKGLSPLPSPPEMMPTSPQSPRDAELIAEAKLLRQHKGRLEARMQILEDHNKQLESQLHRLRQLLEQPQAEAKVNGTTVSSPSTSLQRSDSSQPMLLRVVGSQTSDSMGEEDLLSPPQDTSTGLEEVMEQLNNSFPSSRGHNVGSLFHMADDLGRAMESLVSVMTDEEGAE

SEQ ID NO: 83104 - protein, 162 aa, Homo sapiens
MADPDPRYPRSSIEDDFNYGSSVASATVHIRMAFLRKVYSILSLQVLLTTVTSTVFLYFESVRTFVHESPALILLFALGSLGLIFALILNRHKYPLNLYLLFGFTLLEALTVAVVVTFYDVYIILQAFILTTTVFFGLTVYTLQSKKDFSKFGAGIMDIFFL

SEQ ID NO: 83105 - protein, 248 aa, Homo sapiens
  MOD_RES (1)..(1): Any amino acid
XEALENGIKSSRRLENFCRDFELQKVCYLPLNTFLLRPLHRLMHYKQVLERLCKHHPPSHADFRDCRAALAEITEMVAQLHGTMIKMENFQKLHELKKDLIGIDNLVVPGRFNDVLLYTSRGLTASNQFKVHGQLPLYGMTIEESEDEWGVPHCLTLRGQRQSIIVAASSRSEMEKWVEDIQMAIDLAEKSSSPAPEFLASSPPDNKSPDEATAADQESEDDLSASRTSLERQAPHRGNTMVHVCWHR

SEQ ID NO: 83106 - protein, 995 aa, Homo sapiens
MSRLLWRKVAGATVGPGPVPAPGRWVSSSVPASDPSDGQRRRQQQQQQQQQQQQQPQQPQVLSSEGGQLRHNPLDIQMLSRGLHEQIFGQGGEMPGEAAVRRSVEHLQKHGLWGQPAVPLPDVELRLPPLYGDNLDQHFRLLAQKQSLPYLEAANLLLQAQLPPKPPAWAWAEGWTRYGPEGEAVPVAIPEERALVFDVEVCLAEGTCPTLAVAISPSAWYSWCSQRLVEERYSWTSQLSPADLIPLEVPTGASSPTQRDWQEQLVVGHNVSFDRAHIREQYLIQGSRMRFLDTMSMHMAISGLSSFQRSLWIAAKQGKHKVQPPTKQGQKSQRKARRGPAISSWDWLDISSVNSLAEVHRLYVGGPPLEKEPRELFVKGTMKDIRENFQDLMQYCAQDVWATHEVFQQQLPLFLERCPHPVTLAGMLEMGVSYLPVNQNWERYLAEAQGTYEELQREMKKSLMDLANDACQLLSGERYKEDPWLWDLEWDLQEFKQKKAKKVKKEPATASKLPIEGAGAPGDPMDQEDLGPCSEEEEFQQDVMARACLQKLKGTTELLPKRPQHLPGHPGWYRKLCPRLDDPAWTPGPSLLSLQMRVTPKLMALTWDGFPLHYSERHGWGYLVPGRRDNLAKLPTGTTLESAGVVCPYRAIESLYRKHCLEQGKQQLMPQEAGLAEEFLLTDNSAIWQTVEELDYLEVEAEAKMENLRAAVPGQPLALTARGGPKDTQPSYHHGNGPYNDVDIPGCWFFKLPHKDGNSCNVGSPFAKDFLPKMEDGTLQAGPGGASGPRALEINKMISFWRNAHKRISSQMVVWLPRSALPRAVIRHPDYDEEGLYGAILPQVVTAGTITRRAVEPTWLTASNARPDRVGSELKAMVQAPPGYTLVGADVDSQELWIAAVLGDAHFAGMHGCTAFGWMTLQGRKSRGTDLHSKTATTVGISREHAKIFNYGRIYGAGQPFAERLLMQFNHRLTQQEAAEKAQQMYAATKGLRWH

SEQ ID NO: 83107 - protein, 204 aa, Homo sapiens
RRFYRQLLLTADDRVNPCIGGVILFHETLYQKADDGRPFPQVIKSKGGVVGIKVDKGVVPLAGTNGETTTQGLDGLSERCAQYKKDGADFAKWRCVLKIGEHTPSALAIMENANVLARYASICQQVLAAVYKALSDHHIYLEGTLLKPNMVTPGHACTQKFSHEEIAMATVTALRRTVPPAVTGITFLSGGQSEEEASINLNAI

SEQ ID NO: 83108 - protein, 512 aa, Homo sapiens
MSFVAGVIRRLDETVVNRIAAGEVIQRPANAIKEMIENCLDAKSTSIQVIVKEGGLKLIQIQDNGTGIRKEDLDIVCERFTTSKLQSFEDLASISTYGFRGEALASISHVAHVTITTKTADGKCAYRASYSDGKLKAPPKPCAGNQGTQITVEDLFYNIATRRKALKNPSEEYGKILEVVGRYSVHNAGISFSVKKQGETVADVRTLPNASTVDNIRSIFGNAVSRKRHREDSDVEMVEDDSRKEMTAACTPRRRIINLTSVLSLQEEINEQGHEVLREMLHNHSFVGCVNPQWALAQHQTKLYLLNTTKLSEELFYQILIYDFANFGVLRLSEPAPLFDLAMLALDSPESGWTEEDGPKEGLAEYIVEFLKKKAEMLADYFSLEIDEEGNLIGLPLLIDNYVPPLEGLPIFILRLATEVNWDEEKECFESLSKECAMFYSIRKQYISEESTLSGQQSEVPGSIPNSWKWTVEHIVYKALRSHILPPKHFTEDGNILQLANLPDLYKVFERC

SEQ ID NO: 83109 - protein, 98 aa, Homo sapiens
MSFDDTEREPDQTFSLNRDLTGELEYATKISRFSNVYHLSIHISKNFGADTTKVFYIGLRGEWTELRRHEVTICNYEASANPADHRVHQVTPQTHFIS

SEQ ID NO: 83110 - protein, 727 aa, Homo sapiens
FLGEYCQHRDPCEKNRCQNGGTCVAQAMLGKATCRCASGFTGEDCQYSTPHPCFVSRPCLNGGTCHMLSRDTYECTCQVGFTGKECQWTDACLSHLCANGSTCTTVANQFSCKCLTGFTGQKCETDVNECDIPGHCQHGGTCLNLPGSYQCQCLQGFTGQYCDRLYVPCAHSPCVNGGTCRQTGDFTFECNCLPEYEECKDLIKFMLRNERQFKEEKLAEQLKQAEELRQYKVLVHSQERELTQLKEKLREGRDASRSLNEHLQALLTPDEPDKSQGQDLQEQLAEGCRLAQHLVQKLSPENDEDEDEDVQVEEDEKVLESSAPREVQKTEESKVPEDSLEECAITCSNSHGPCDSNQPHKNIKITFEEDEVNSTLVVDRESSHDECQDALNILPVPGPTSSATNVSMVVSAGPLSGEKAAINILEINEKLRPQLAEKKQQFRNLKEKCFLTQLAGFLANQQNKYKYEECKDLIKSMLRNERQFKEEKLAEQLKQAEELRQYKVLVHAQERELTQLREKLREGRDASRSLNEHLQALLTPDEPDKSQGQDLQEQLAEGCRLAQHLVQKLSPENDNDDDEDVQVEVAEKVQKSSAPREMQKAEEKEVPEDSLEECAITCSNSHGPYDCNQPHRKTKITFEEDKVDSTLIGSSSHVEWEDAVHIIPENESDDEEEEEKGPVSPRNLQESEEEEVPQESWDEGHRWDQVKKEDHEATGPRLSRELLDEKG

SEQ ID NO: 83111 - protein, 80 aa, Homo sapiens
TQIQYDKTNVLADFEQLRDILDWEESNELQNLEKEEEDILKSLTNSETEMVQQTQSLRELISDLEHRLQGSVMELLQKTR

SEQ ID NO: 83112 - protein, 387 aa, Homo sapiens
  MOD_RES (1)..(1): Any amino acid
XSFPPLETGRNLKKEVSRVLCKRCALPPRLKEMKSQESAAGSKLVLRCETSSEYSSLRFKWFKNGNELNRKNKPQNIKIQKKPGKSELRINKASLADSGEYMCKVISKLGNDSASANITIVESNATSTSTTGTSHLVKCAEKEKTFCVNGGECFMVKDLSNPSRYLCKGGGAVPEESADHNRHLHRPPCGRHHVCGGLLQNQQYVSKNVISSEHIVEREAETSFSTSHYTSTAHHSTTVTQTPSHSWSNGHTESILSESHSVIVMSSVENSRHSSPTGGPRGRLNGTGGPRECNSFLRHARETPDSYRDSPHSERREKPMGQQILIELAEKDLYFFLAVHLFSNKNPGCLCDDSGRGGFVHSQEEIGPPYLPFGCREYEQTSLRPKN

SEQ ID NO: 83113 - protein, 181 aa, Homo sapiens
MAYAYLFKYIIIGDTGVGKSCLLLQFTDKRFQPVHDLTIGVEFGARMITIDGKQIKLQIWDTAGQESFRSITRSYYRGAAGALLVYDITRRDTFNHLTTWLEDARQHSNSNMVIMLIGNKRHLLIQQKKFMKKFKKESLTLIMRQMALKLALSMLLPMQHMQAIREDSRLGAAAVESVFTV

SEQ ID NO: 83114 - protein, 198 aa, Homo sapiens
DIPGARALDNGLARTPTMGWLHWERFMCNLDCQEEPDSCISEKLFMEMAELMVSEGWKDAGYEYLCIDDCWMAPQRDSEGRLQADPQRFPHGIRQLANYVHSKGLKLGIYADVGNKTCAGFPGSFGYYDIDAQTFADWGVDLLKFDGCYCDSLENLADGESRLSIGHRERSIFIPAFPQYTHHLCTTSSEQSQQSGRL

SEQ ID NO: 83115 - protein, 258 aa, Homo sapiens
MEASKVLDKSKAAAIGDQSRPLCSRKGLSGGGSGGGPPWRARSQPGHCGSLKPKSSCCFCTPPVPPSCAGPLRGIISPKTGMERPLCSHLCSCLAMLALLSPLSLAQYDSWPHYPEYFQQPAPEYHQPQAPANVAKIQLRLAGQKRKHSEGRVEVYYDGQWGTVCDDDFSIHAAHVVCRELGYVEAKSWTASSSYGKGEGPIWLDNLHCTGNEATLAACTSNGWGVTDCKHTEDVGVVCSDKRIPGFKFDNSLINQIE

SEQ ID NO: 83116 - protein, 127 aa, Homo sapiens
MFEGEMASLTAILKTNTVKVPKPIKVLDAPGGGSVLVMEHMDMRHLSSHAAKLGAQLADLHLDNKKLGEMRLKEAGTVGRGGGQEERPFVARFGFDVVTCCGYLPQAPGFEKRLQLYQLFHYLNHWN

SEQ ID NO: 83117 - protein, 300 aa, Homo sapiens
GHLLVEADDVRAWSCPQHNAYRLYHCEAEQVAVCQYCCYYSGAHQGHSVCDVEIRRNEIRKMLMKQQDRLEEREQDIEDQLYKLESDKRLVEEKVNQLKEEVRLQYEKLHQLLDEDLRQTVEVLDKAQAKFCSENAAQALHLGERMQEAKKLLGSLQLLFDKTEDVSFMKNTKSVKILMDRTQTCTSSSLSPTKIGHLNSKLFLNEVAKKEKQLRKMLEGPFSTPVPFLQSVPLYPCGVSSSGAEKRKHSTAFPEASFLETSSGPVGGQYGAAGTASVSQWLRRPAAHAPPVWRPQDSRL

SEQ ID NO: 83118 - protein, 56 aa, Homo sapiens
MAATLDLKSKEEKDAELDKRIEALRRKNEALIRRYQEIEEDRKKAELEGVAVTAPR

SEQ ID NO: 83119 - protein, 894 aa, Homo sapiens
MSGRPAPVSRKQRLMAAVGERAAGGAPLSCFICGGGIGRGKELKLQVKQPAAGAGTPAQPFFPFLQQQEPAPGARELSPADGCVLVCAVCRCFLGEQWAAFERARTPVDKRMYWLKRPHQCDAGAGGRRGGAGAPREWNVAYALGSATGDDDEDDGGGPRLRGAAEETRDSDLSELSDTDPLSEPDPPARDAASPHQDGAPGPGPRGGRGQEWRPAPGPAPGQGAEASAQGRAEEEGLPAKAHADGEPKSGVRRRRKGVGRHWVPEARASVLRSIQDPWQGPLVQEAPADGMKGPPSGRATKTLESRPLGETLRGFCTSEDSDINITSGEEDHKEQPFPGVCNPKEKNSGRVPRALQDSRAAPAEGLCCYICGAPLSPASHHQVHVQKQEKLAQAPFFPFLWLHSPPPGAQPISEGGSTLVCASCFSSLTQQWQSFELANVPVLQRLYVVPLDSHAPGMASKGRRLPREEGLPSGALREACYLCGEDCTPDARAVPSRILNGNARSAMHFPFLSLLPCPPNAQGPNKRCEVRSCPKCFSVLEDVWALYRACQNEELITSVQGFLGRYHQAFSASDPALSELPASAQGGPVSICYICGAELGPGKEFQLNVNPASRLGEKEPFFPFLTVYPPAPRARPVDSTGLVATCVLCYHDLLAQWLQHEARSSHHAVSAWSRQYQVETFVCFFCQQEKKRCLGLKSVRVARLPLFLYTLRASHSLLVDDGQQLIIGACVECGTLVCAGQGLTRQGPMSWSSPVAAATKPVCGSLEASAASHPPTRESETRPRAPTETLPRGPRMAQELRPAQCLQSSREEDGPDLTGAGMSHEPKSPSLGMLSTATRTTATVNPLTPSPLNGALVPSGSPATSSALSAQAAPSSSFAAALRKLAKQAEEPR

SEQ ID NO: 83120 - protein, 44 aa, Homo sapiens
MTSATSPIILKWDPKSLEIRTLTVERLLEPLVTQCIFFSTGYFK

SEQ ID NO: 83121 - protein, 326 aa, Homo sapiens
MYSPLCLTQDEFHPFIEALLPHVRAFAYTWFNLQARKRKYFKKHEKRMSKEEERAVKDELLSEKPEVKQKWASRLLAKLRKDIRPEYREDFVLTVTGKKPPCCVLSNPDQKGKMRRIDCLRQADKVWRLDLVMVILFKGIPLESTDGERLVKSPQCSNPGLCVQPHHIGVSVKELDLYLAYFVHAADSSQSESPSQPSDADIKDQPENGHLGFQDSFVTSGVFSVTELVRVSQTPIAAGTGPNFSLSDLESSSYYSMSPGAMRRSLPSTSSTSSTKRLKSVEDEMDSPGEEPFYTGQGRSPGSGSQSSGWHEVEPVFNSSVVLLHP

SEQ ID NO: 83122 - protein, 178 aa, Homo sapiens
MAGAQPGVHALQLKPVCVSDSLKKGTKFVKWDDDSTIVTPIILRTDPQGFFFYWTDQNKETELLDLSLVKDARCGRHAKAPKDPKLRELLDVGNIGRLEQRMITVVYGPDLVNISHLNLVAFQEEVAKEWTNEVFSLATNLLAQNMSRDAFLEKAYTKLKLQVTPEGRIPLKNRSEAS

SEQ ID NO: 83123 - protein, 51 aa, Homo sapiens
MTSTGQDSTTTRQRRSRQNPQSPPQDSSVTSKRNIKKGAVPRSIPNLAEVK

SEQ ID NO: 83124 - protein, 178 aa, Homo sapiens
MLATRRLLGWSLPARVSVRFSGDTTAPKKTSFGSLKDEDRIFTNLLKGSLSRGDWYKTKEILLKGPDWILGEIKTSGLRGRGGAGFPTGLKWSFMNKPSDGRPKYLVVNADEGEPGTCKDREILRHDPHKLLEGCLVGGRAMGARAAYIYIRGEFYNEASNLQVAIREAYEAGLIGKN

SEQ ID NO: 83125 - protein, 617 aa, Homo sapiens
  MOD_RES (1)..(1): Any amino acid
XPAGCGDPQGGQPRHSLHLTALVQLVKEIPEFLFGEVKGAMDSPESESRGASLDGERASPEAAAREPCPLRGLLSCLPDGPTSQPHLATTPTDSSCSSGPTGDGVQGSPLPIKTADKPWPTRKEGPGALGGEPSPPTHSPSRRKSHRGQERGTSEAGISPGNSPLQGLINCLKEILVPGPRHPETSPSFLPPLPSLGTSRLTRADLGPGSPPWAVKTEAVSGDCPLQGLLHCLKELPEAQDRHPSPSGVGNRRLQENPGAWKRGSGGPGYLLTPPPHPDLGAGGLLSVKMENSWVQSPPGPASCQPGRQPLSPSATGDTRGVPQPSWGPEAQAASASSSPLEALEACLKGIPPNGSSPSQLPPTSCSQNPQPGDSRSQKPELQPHRSHSEEATREPVLPLGLQSCVRDGPSRPLAPRGTPTSFSSSSSTDWDLDFGSPVGNQGQHPGKGSPPGSSPLQGLENCLKEIPVPVLRPAWPCSSAADRGPRRAEPRNWTADKEGSAPKPSPLHCLESALRGILPVRPLRFACVGGPSPSPSPGSSSSFSGSEGEDPRPEPDLWKPLPQERDRLPSCKPPVPLSPCPGGTPAGSSGGSPGEDPRRTEPRYCSGLGAGEPGVS

SEQ ID NO: 83126 - protein, 479 aa, Homo sapiens
MRFVVALVLLNVAAAGAVPLLATESVKQEEAGVRPSAGNVSTHPSLSQRPGGSTKSHPEPQTPKDSPSKSSAEAQTPEDTPNKSGAEAKTQKDSSNKSGAEAKTQKGSTSKSGSEAQTTKDSTSKSHPELQTPKDSTGKSGAEAQTPEDSPNRSGAEAKTQKDSPSKSGSEAQTTKDVPNKSGADGQTPKDGSSKSGAEDQTPKDVPNKSGAEKQTPKDGSNKSGAEEQGPIDGPSKSGAEEQTSKDSPNKVVPEQPSRKDHSKPISNPSDNKELPKADTNQLADKGKLSPHAFKTESGEETDLISPPQEEVKSSEPTEDVEPKEAEDDDTGPEEGSPPKEEKEKMSGSASSENREGTLSDSTGSEKDDLYPNGSGNGSAESSHFFAYLVTAAILVAVLYIAHHNKRKIIAFVLEGKRSKVTRRPKASDYQRLDQKYVLILNVFPAPPKRSFFPVLTEWYIPLEKDERHQWIVLLSFQL

SEQ ID NO: 83127 - protein, 305 aa, Homo sapiens
MTMEKGMSSGEGLPSRSSQVSAGKITAKELETKQSYKEKRGGFVLVHAGAGYHSESKAKEYKHVCKRACQKDSPFTNAGMGSNLNLLGEIECDASIMDGKSLNFGAVGALSGIKNPVSVANRLLCEGQKGKLSAGRIPPCFLVGEGAYRWAVDHGIPSCPPNIMTTRFSLAAFKRNKRKLELAERVDTDFMQLKKRRQSSEKENDSGTLDTVGAVVVDHEGNVAAAVSSGGLALKHPGRVGQAALYGCGCWAENTGAHNPYSTAVSTSGCGEHLVRTILARECSHALQAEDAHQALLETMQNKFI

SEQ ID NO: 83128 - protein, 108 aa, Homo sapiens
MWGFLKRPVVVTADINLSLVALTGMGLLSRLWRLTYPRAVVGPPFGHMVLALGGYLGGFDGNFLWNRIGAEYSSNVPVWSLRLLPALAGALSVPMAYQIVLELHFSHC

SEQ ID NO: 83129 - protein, 141 aa, Homo sapiens
DMDMADYSAALDPAYTTLEFENVQVLTMGNDTSPSEGTNLNAPNSLGVSALCAICGDRATGKHYGASSCDGCKGFFRRSVRKNHMYSCRFSRQCVVDKDKRNQCRYCRLKKCFRAGMKKEGTARGARCLSFRSQGQMPQFP

SEQ ID NO: 83130 - protein, 367 aa, Homo sapiens
MQPISQSQAEIRKQILGSSSSGKFFCLYTEEFASKDMTPLKPAEMQEANLTSMVLFMKRIDIAGLGHCDFMNRPAPESLMQALEDLDYLAALDNDGNLSEFGIIMSEFPLDPQLSKSILASCEFDCVDEVLTIAAMVTAPNCFSHVPHGAEEAALTCWKTFLHPEGDHFTLISIYKAYQDTTLNSSSEYCVEKWCRDYFLNCSALRMADVIRAELLEIIKRIELPYAEPAFGSKENTLNIKKALLSGYFMQIARDVDGSGNYLMLTHKQVAQLHPLSGYSITKKMPEWVLFHKFSISENNYIRITSEISPELFMQLVPQYYFSNLPPSESKDILQQVVDHLSPVSTMNKEQQMCETCPETEQRCTLQ

SEQ ID NO: 83131 - protein, 191 aa, Homo sapiens
MELQDPKMNGALPSDAVGYRQEREGFLPSRGPAPGSKPVQFMDFEGKTSFGMSVFNLSNAIMGSGILGLAYAMAHTGVIFFLALLLCIALLSSYSIHLLLTCAGIAGIRAYEQLGQRAFGPAGKVVVATVICLHNVGAMSSYLFIIKSELPLVIGTFLYMDPEGDWFLKGNLLIIIVSVLIILPLALMKHL

SEQ ID NO: 83132 - protein, 159 aa, Homo sapiens
MGRKLDPTKEKRGPGRKARKQKGAETELVRFLPAVSDENSKRLSSRARKRAAKRRLGSVEAPKTNKSPEAKPLPGKLPKGISAGAVQTAGKKGPQSLFNAPRGKKRPAPGSDEEEEEEDSEEDGMVNHGDLWGSEDDADTVDDYGADSNSEDEEEGEAV

SEQ ID NO: 83133 - protein, 81 aa, Homo sapiens
MPGRSCVALVLLAAAVSCAVAQHAPPVSELEPRRREGRAGAGADGGAGVAARAVDRGLQKINLSSFRTNVQRCSSMVHHKS

SEQ ID NO: 83134 - protein, 84 aa, Homo sapiens
MYEKEAKQQEEKIEKMRAEDGENYDIKKQAEILQESRMMIPDCQRRLEAAYLDLQRILENEKDLEEAEEYKEARLVLDSVKLEA

SEQ ID NO: 83135 - protein, 93 aa, Homo sapiens
  MOD_RES (1)..(1): Any amino acid
XPRSSPWTLTKLARWPQPPFRQCFWRSCVWLGAQPVKPHSTSSTTCWPVGMAPSGQSSTSTTWQRTMCLGLCHWPSLRKSRRQLSSLVSCRRP

SEQ ID NO: 83136 - protein, 95 aa, Homo sapiens
MLKKQSAGLVLWGAILFVAWNALLLLFFWTRPAPGRPPSVSALDGDPASLTREVIRLAQDAEVELERQRGLLQQIGDALSSQRGRVPTAAPPAQP

SEQ ID NO: 83137 - protein, 169 aa, Homo sapiens
MDNRQNVTPALIFAITVATIGSFQFGYNTGVINAPETIIKEFINKTLTDKANAPPSEVLLTNLWSLSVAIFSVGGMIGSFSVGLFVNRFGRRNSMLIVNLLAATGGCLMGLCKIAESVEMLILGRLVIGLFCGLCTGFVPMYIGEISPTALRGAFGTLNQLGIVIGILV

SEQ ID NO: 83138 - protein, 231 aa, Homo sapiens
MAHCVTLVQLSISCDHLIDKDIGSKSDPLCVLLQDVGGGSWAELGRTERVRNCSSPEFSKTLQLEYRFETVQKLRFGIYDIDNKTPELRDDDFLGGAECSLGQIVSSQVLTLPLMLKPGKPAGRGTITVSAQELKDNRVVTMEVEARNLDKKDFLGKSDPFLEFFRQGDGKWHLVYRSEVIKNNLNPTWKRFSVPVQHFCGGNPSTPIQVQCSDYDSDGSHDLIGTFHTSL

SEQ ID NO: 83139 - protein, 696 aa, Homo sapiens
MSWHPSGYRGRGCRVFIHNPHTRNQHVSASRVFQSPLESDVSLLSINQAVSCLTAGVLNPELGYDALLVGTQTNLLAYDVYNNSDLFYREVADGANAIVLGTLGDISSPLAIIGGNCALQGFNHEGSDLFWTVTGDNVNSLALCDFDGDGKKELLVGSEDFDIRVFKEDEIVAEMTETEIVTSLCPMYGSRFGYALSNGTVGVYDKTSRYWRIKSKNHAMSIHAFDLNSDGVNELITGWSNGKVDARSDRTGEVIFKDNFSSAIAGVVEGDYRMDGHIQLICCSVDGEIRGYLPGTAEMRGNLMDTSAEQDLIRELSQKKQNLLLELRNYEENAKAELASPLNEADGHRGIIPANTRLHTTLSVSLGNETQTAHTELRISTSNDTIIRAVLIFAEGIFTGESHVVHPSIHNLSSSICIPIVPPKDVPVDLHLKAFVGYRSSTQFHVFESTRQLPRFSMYALTSLDPASEPISYVNFTIAERAQRVVVWLGQNFLLPEDTHIQNAPFQVCFTSLRNGGHLHIKIKLSGEITINTDDIDLAGDIIQSMASFFAIEDLQVEADFPVYFEELRKVLVKVDEYHSVHQKLSADMADHSNLIRSLLVGAEDARLMRDMKTMKSRYMELYDLNRDLLNGYKIRCNNHTELLGNLKAVNQAIQRAGRLRVGKPKNQVITACRDAIRSNNINTLFKIMRVGTASS

SEQ ID NO: 83140 - protein, 101 aa, Homo sapiens
MAAAAAEQQQFYLLLGNLLSPDNVVRKQAEETYENIPGQSKITFLLQAIRNTTAAEEARQMAAVLLRRLLSSAFDEVYPALPSDVQTAIKSELLMIIQMET

SEQ ID NO: 83141 - protein, 64 aa, Homo sapiens
  MOD_RES (1)..(1): Any amino acid
XFSEKSVGLTLIARPPDTKATLCTSWSDSDLFSRDQKSLLPPPNQSQLLEEFLDNFKKNTANEC

SEQ ID NO: 83142 - protein, 97 aa, Homo sapiens
MAQFDTEYQRLEASYSDSPPGEEDLLVHVAEGSKSPWHHIENLDLFFSRVYNLHQKNGFTCMLIGEIFELMQFLFVVAFTTFLVSCVDYDILFANKM

SEQ ID NO: 83143 - protein, 550 aa, Homo sapiens
MASASSGPSSSVGFSSFDPAVPSCTLSSAASGIKRPMASEVPYASGMPIKKIGHRSVDSSGETTYKKTTSSALKGAIQLGITHTVGSLSTKPERDVLMQDFYVVESIFFPSEGSNLTPAHHYNDFRFKTYAPVAFRYFRELFGIRPDDYLYSLCSEPLIELCSSGASGSLFYVSSDDEFIIKTVQHKEAEFLQKLLPGYYMNLNQNPRTLLPKFYGLYCVQAGGKNIRIVVMNNLLPRSVKMHIKYDLKGSTYKRRASQKEREKPLPTFKDLDFLQDIPDGLFLDADMYNALCKTLQRDCLVLQSFKIMDYSLLMSIHNIDHAQREPLSSETQYSVDTRRPAPQKALYSTAMESIQGEARRGGTMETDDHMGGIPARNSKGERLLLYIGIIDILQSYRFVKKLEHSWKALVHDGDTVSVHRPGFYAERFQRFMCNTVFKKIPLKPSPSKKFRSGSSFSRRAGSSGNSCITYQPSVSGEHKAQVTTKAEVEPGVHLGRPDVLPQTPPLEEISEGSPIPDPSFSPLVGETLQMLTTSTTLEKLEVAESEFTH

SEQ ID NO: 83144 - protein, 2152 aa, Homo sapiens
MVNENTRMYIPEENHQGSNYGSPRPAHANMNANAAAGLAPEHIPTPGAALSWQAAIDAARQAKLMGSAGNATISTVSSTQRKRQQYGKPKKQGSTTATRPPRALLCLTLKNPIRRACISIVEWKPFEIIILLTIFANCVALAIYIPFPEDDSNATNSNLERVEYLFLIIFTVEAFLKVIAYGLLFHPNAYLRNGWNLLDFIIVVVGLFSAILEQATKADGANALGGKGAGFDVKALRAFRVLRPLRLVSGVPSLQVVLNSIIKAMVPLLHIALLVLFVIIIYAIIGLELFMGKMHKTCYNQEGIADVPAEDDPSPCALETGHGRQCQNGTVCKPGWDGPKHGITNFDNFAFAMLTVFQCITMEGWTDVLYWVNDAVGRDWPWIYFVTLIIIGSFFVLNLVLGVLSGEFSKEREKAKARGDFQKLREKQQLEEDLKGYLDWITQAEDIDPENEDEGMDEEKPRNRGTPAGMLDQKKGKFAWFSHSTETHVSMPTSETESVNTENVAGGDIEGENCGARLAHRISKSKFSRYWRRWNRFCRRKCRAAVKSNVFYWLVIFLVFLNTLTIASEHYNQPNWLTEVQDTANKALLALFTAEMLLKMYSLGLQAYFVSLFNRFDCFVVCGGILETILVETKIMSPLGISVLRCVRLLRIFKITRYWNSLSNLVASLLNSVRSIASLLLLLFLFIIIFSLLGMQLFGGKFNFDEMQTRRSTFDNFPQSLLTVFQILTGEDWNSVMYDGIMAYGGPSFPGMLVCIYFIILFICGNYILLNVFLAIAVDNLADAESLTSAQKEEEEEKERKKLARTASPEKKQELVEKPAVGESKEEKIELKSITADGESPPATKINMDDLQPNENEDKSPYPNPETTGEEDEEEPEMPVGPRPRPLSELHLKEKAVPMPEASAFFIFSSNNRFRLQCHRIVNDTIFTNLILFFILLSSISLAAEDPVQHTSFRNHILFYFDIVFTTIFTIEIALKMTAYGAFLHKGSFCRNYFNILDLLVVSVSLISFGIQSSAINVVKILRVLRVLRPLRAINRAKGLKHVVQCVFVAIRTIGNIVIVTTLLQFMFACIGVQLFKGKLYTCSDSSKQTEAECKGNYITYKDGEVDHPIIQPRSWENSKFDFDNVLAAMMALFTVSTFEGWPELLYRSIDSHTEDKGPIYNYRVEISIFFIIYIIIIAFFMMNIFVGFVIVTFQEQGEQEYKNCELDKNQRQCVEYALKARPLRRYIPKNQHQYKVWYVVNSTYFEYLMFVLILLNTICLAMQHYGQSCLFKIAMNILNMLFTGLFTVEMILKLIAFKPKGYFSDPWNVFDFLIVIGSIIDVILSETNNAEENSRISITFFRLFRVMRLVKLLSRGEGIRTLLWTFIKSFQALPYVALLIVMLFFIYAVIGMQVFGKIALNDTTEINRNNNFQTFPQAVLLLFRCATGEAWQDIMLACMPGKKCAPESEPSNSTEGETPCGSSFAVFYFISFYMLCAFLIINLFVAVIMDNFDYLTRDWSILGPHHLDEFKRIWAEYDPEAKGRIKHLDVVTLLRRIQPPLGFGKLCPHRVACKRLVSMNMPLNSDGTVMFNATLFALVRTALRIKTEGNLEQANEELRAIIKKIWKRTSMKLLDQVVPPAGDDEVTVGKFYATFLIQEYFRKFKKRKEQGLVGKPSQRNALSLQAGLRTLHDIGPEIRRAISGDLTAEEELDKAMKEAVSAASEDDIFRRAGGLFGNHVSYYQSDGRSAFPQTFTTQRPLHINKAGSSQGDTESPSHEKLVDSTFTPSSYSSTGSNANINNANNTALGRLPRPAGYPSTVSTVEGHGPPLSPAIRVQEVAWKLSSNRCHSRESQAAMAGQEETSQDETYEVKMNHDTEACSEPSLLSTEMLSYQDDENRQLTLPEEDKRDIRQSPKRGFLRSASLGRRASFHLECLKRQKDRGGDISQKTVLPLHLVHHQALAVAGLSPLLQRSHSPASFPRPFATPPATPGSRGWPPQPVPTLRLEGVESSEKLNSSFPSIHCGSWAETTPGGGGSSAARRVRPVSLMVPSQAGAPGRQFHGSASSLVEAVLISEGLGQFAQDPKFIEVTTQELADACDMTIEEMESAADNILSGGAPQSPNGALLPFVNCRDAGQDRAGGEEDAGCVRARGRPSEEELQDSRVYVSSL

SEQ ID NO: 83145 - protein, 725 aa, Homo sapiens
MPRLNRPLTLSEKIVYGHLDDPASQEIERGKSYLRLRPDRVAMQDATAQMAMLQFISSGLSKVAVPSTIHCDHLIEAQVGGEKDLRRAKDINQEVYNFLATAGAKYGVGFWKPGSGIIHQIILENYAYPGVLLIGTDSHTPNGGGLGGICIGVGGADAVDVMAGIPWELKCPKVIGVKLTGSLSGWSSPKDVILKVAGILTVKGGTGAIVEYHGPGVDSISCTGMATICNMGAEIGATTSVFPYNHRMKKYLSKTGREDIANLADEFKDHLVPDPGCHYDQLIEINLSELKPHINGPFTPDLAHPVAEVGKVAEKEGWPLDIRVGLIGSCTNSSYEDMGRSAAVAKQALAHGLKCKSQFTITPGSEQIRATIERDGYAQILRDLGGIVLANACGPCIGQWDRKDIKKGEKNTIVTSYNRNFTGRNDANPETHAFVTSPEIVTALAIAGTLKFNPETDYLTGTDGKKFRLEAPDADELPKGEFDPGQDTYQHPPKDSSGQHVDVSPTSQRLQLLEPFDKWDGKDLEDLQILIKVKGKCTTDHISAAGPWLKFRGHLDNISNNLLIGAINIENGKANSVRNAVTQEFGPVPDTARYYKKHGIRWVVIGDENYGEGSSREHAALEPRHLGGRAIITKSFARIHETNLKKQGLLPLTFADPADYNKIHPVDKLTIQGLKDFTPGKPLKCIIKHPNGTQETILLNHTFNETQIEWFRAGSALNRMKELQQ

SEQ ID NO: 83146 - protein, 61 aa, Homo sapiens
MIYTMKKVHALWASVCLLLNLAPAPLNADSEEDEEHTIITDTELPPLKLMHSFCAFKADDG

SEQ ID NO: 83147 - protein, 45 aa, Homo sapiens
  MOD_RES (1)..(1): Any amino acid
XAADRRPVKMQAGIATPGMKTAAQAKAKTTGASRAGSQMLLRRPC

SEQ ID NO: 83148 - protein, 249 aa, Homo sapiens
MPRSVVGTACMYFKRFYLNNSVMEYHPRIIMLTCAFLACKVDEFNVSSPQFVGNLRESPLGQEKALEQILEYELLLIQQLNFHLIVHNPYRPFEGFLIDLKTRYPILENPEILRKTADDFLNRIALTDAYLLYTPSQIALTAILSSASRAGITMESYLSESLMLKENRTCLSQLLDIMKSMRNLVKKYEPPRSEEVAVLKQKLERCHSAELALNVITKKRKGYEDDDYVSKKSKHEEEEWTDDDLVESL

SEQ ID NO: 83149 - protein, 379 aa, Homo sapiens
MEFPGGNDNYLTITGPSHPFLSGAETFHTPSLGDEEFEIPPISLDSDPSLAVSDVVGHFDDLADPSSSQDGSFSAQYGVQTLDMPVGMTHEPPALSPSIVVNSTLSSYVANQASSGAGGQPNITKLIITKQMLPSSITMSQGGMVTVIPATVVTSRGLQLGQTSTATIQPSQQAQIVTRSVLQAAAAAAAAASMQLPPPRLQPPPLQQMPQPPTQQQVTILQQPPPLQAMQQPPPQKVRINLQQQPPPLQIKSVPLPTLKMQTTLVPPTVESSPERPMNNSPEAHTVEAPSPETICEMITDVVPEVESPSQMDVELVSGSPVALSPQPRCVRSGCENPPIVSKDWDNEYCSNECVVKHCRDVFLAWVASRNSNTVVFVK

SEQ ID NO: 83150 - protein, 125 aa, Homo sapiens
LWWPHSEAMIAFLMGYSDSGDPVLLRLFYQVAEYTFRQAGAQWRDLSSLQPPPPVFKLFSRLSLPSILLGLQFRDPEYGEWFGYLSREGKVALSIKGGPFKGCFHVPRCLAMCEEMLGALLSRPA

SEQ ID NO: 83151 - protein, 181 aa, Homo sapiens
MLPYNNKDRDALKRRNKSKKNNSSSRSTHNEMEKNRRAHLRLCLEKLKGLVPLGPESSRHTTLSLLTKAKLHIKKLEDCDRKAVHQIDQLQREQRHLKRQLEKLGIERIRMDSIGSTVSSERSDSDREEIDVDVESTDYLTGDLDWSSSSVSDSDERGSMQSLGSDEGYSSTSIKRIKLQD

SEQ ID NO: 83152 - protein, 177 aa, Homo sapiens
MSQSRHRAEAPPLEREDSGTFSLGKMITAKPGKTPIQVLHEYGMKTKNIPVYECERSDVQIHVPTFTFRVTVGDITCTGEGTSKKLAKHRAAEAAINILKANASICFAVPDPLMPDPSKQPKNQLNPIGSLQELAIHHGWRLPEYTLSQEGGPAHKREYTTICRKGGIKKASQKECC

SEQ ID NO: 83153 - protein, 35 aa, Homo sapiens
MVEALRAGSARLVAAPVATANPARCLALNVSLREW

SEQ ID NO: 83154 - protein, 88 aa, Homo sapiens
MGLLAFRDVALEFSPEEWECLDPAQRSLYRDVMLENYRNLISLGEDSFNMQFLFHSLAMSKPELIICLEARKEPWNVNTEKTARHSAM

SEQ ID NO: 83155 - protein, 548 aa, Homo sapiens
MLDLIMGCIKSKENKSPAIKYRPENTPEPVSTSVSHYGAEPTTVSPCPSSSAKGTAVNFSSLSMTPFGGSSGVTPFGGASSSFSVVPSSYPAGLTGGVTIFVALYDYEARTTEDLSFKKGERFQIINNTEGDWWEARSIATGKNGYIPSNYVAPADSIQAEEWYFGKMGRKDAERLLLNPGNQRGIFLVRESETTKGAYSLSIRDWDEIRGDNVKHYKIRKLDNGGYYITTRAQFDTLQKLVKHYTEHADGLCHKLTTVCPTVKPQTQGLAKDAWEIPRESLRLEVKLGQGCFGEVWMGTWNGTTKVAIKTLKPGTMMPEAFLQEAQIMKKLRHDKLVPLYAVVSEEPIYIVTEFMSKGSLLDFLKEGDGKYLKLPQLVDMAAQIADGMAYIERMNYIHRDLRAANILVGENLVCKIADFGLARLIEDNEYTARQGAKFPIKWTAPEAALYGRFTIKSDVWSFGILQTELVTKGRVPYPGMVNREVLEQVERGYRMPCPQGCPESLHELMNLCWKKDPDERPTFEYIQSFLEDYFTATEPQYQPGENL

SEQ ID NO: 83156 - protein, 44 aa, Homo sapiens
DGDVIAPLITPQKKEWNDSTSVQNPTRLREASKSRVQLFKDDPM

SEQ ID NO: 83157 - protein, 251 aa, Homo sapiens
MRNMESNAVQLTRMEYAMKSLSLLYPKSLSRHVSVRTSVVTQQLLSEPSPKAPRARPCRVSTADRSVRKGIMAYSLEDLLLKVRDTLMLADKPFFLVLEEDGTTVETEEYFQALAGDTVFMVLQKGQKWQPPSEQGTRHPLSLSHKPAKKIDVARVTFDLYKLNPQDFIGCLNVKATFYDTYSLSYDLHCCGAKRIMKEAFRWALFSMQATGHVLLGTSCYLQQLLDATEEGQPPKGKASSLIPTCLKILQ

SEQ ID NO: 83158 - protein, 1154 aa, Homo sapiens
MANDSPAKSLVDIDLSSLRDPAGIFELVEVVGNGTYGQVYKGRHVKTGQLAAIKVMDVTEDEEEEIKLEINMLKKYSHHRNIATYYGAFIKKSPPGHDDQLWLVMEFCGAGSITDLVKNTKGNTLKEDWIAYISREILRGLAHLHIHHVIHRDIKGQNVLLTENAEVKLVDFGVSAQLDRTVGRRNTFIGTPYWMAPEVIACDENPDATYDYRSDLWSCGITAIEMAEGAPPLCDMHPMRALFLIPRNPPPRLKSKKWSKKFFSFIEGCLVKNYMQRPSTEQLLKHPFIRDQPNERQVRIQLKDHIDRTRKKRGEKDETEYEYSGSEEEEEEVPEQEGEPSSIVNVPGESTLRRDFLRLQQENKERSEALRRQQLLQEQQLREQEEYKRQLLAERQKRIEQQKEQRRRLEEQQRREREARRQQEREQRRREQEEKRRLEELERRRKEEEERRRAEEEKRRVEREQEYIRRQLEEEQRHLEVLQQQLLQEQAMLLHDHRRPHPQHSQQPPPPQQERSKPSFHAPEPKAHYEPADRAREVPVRTTSRSPVLSRRDSPLQGSGQQNSQAGQRNSTSIEPRLLWERVEKLVPRPGSGSSSGSSNSGSQPGSHPGSQSGSGERFRVRSSSKSEGSPSQRLENAVKKPEDKKEVFRPLKPADLTALAKELRAVEDVRPPHKVTDYSSSSEESGTTDEEDDDVEQEGADESTSGPEDTRAASSLNLSNGETESVKTMIVHDDVESEPAMTPSKEGTLIVRQTQSASSTLQKHKSSSSFTPFIDPRLLQISPSSGTTVTSVVGFSCDGMRPEAIRQDPTRKGSVVNVNPTNTRPQSDTPEIRKYKKRFNSEILCAALWGVNLLVGTESGLMLLDRSGQGKVYPLINRRRFQQMDVLEGLNVLVTISGKKDKLRVYYLSWLRNKILHNDPEVEKKQGWTTVGDLEGCVHYKVVKYERIKFLVIALKSSVEVYAWAPKPYHKFMAFKSFGELVHKPLLVDLTVEEGQRLKVIYGSCAGFHAVDVDSGSVYDIYLPTHIQCSIKPHAIIILPNTDGMELLVCYEDEGVYVNTYGRITKDVVLQWGEMPTSVAYIRSNQTMGWGEKAIEIRSVETGHLDGVFMHKRAQRLKFLCERNDKVFFASVRSGGSSQVYFMTLGRTSLLSW

SEQ ID NO: 83159 - protein, 128 aa, Homo sapiens
MKKMPLFSKSHKNPAEIVKILKDNLAILEKQDKKTDKASEEVSKSLQAMKEILCGTNEKEPPTEAVAQLAQELYSSGLLVTLIADLQLIDFEGKKDVTQIFNNILRRQIGTRSPTVEYISAHPHILFM

SEQ ID NO: 83160 - protein, 184 aa, Homo sapiens
  MOD_RES (1)..(1): Any amino acid
XHSEKNVVYRDLKLENLMLDKDGHIKITDFGLCKEGIKDGATMKTFCGTPEYLAPEDHEKLFELILMEEIRFPRTLGPEAKSLLSGLLKKDPKQRLGGGSEDAKEIMQHRFFAGIVWQHVYEKKLSPPFKPQVTSETDTRYFDEEFTAQMITITPPDQDDSMECVDSERRPHFPQFSYSASGTA

SEQ ID NO: 83161 - protein, 283 aa, Homo sapiens
MSSPSHTPNPSPTQSPSQSRSNNIVTPPGQQPAPSPSPTRGSSSRPPSHPPTPNASQPSSRTSSLNPSPQVQHVPRGAAQTPTPPTSKSPSQSGFKSLSRNPSLTPAVPPKSSFYSPATSSSYIGPIQNIPSYITPYVPRFLKEPPFFQPPTAPLPQNPCFACPSPCPARKPPPPPDSLYLPLLPPPPHHPQFNCPFPTPPGLFMPPSSLSYTPPVEVLVSGKPHVVPNVLPATFYTPFSRYYSQPRSYRSGYRGYSGALTLPSISPLQYDGSGRSVHFYHGS

SEQ ID NO: 83162 - protein, 133 aa, Homo sapiens
MECPHLSSSVCIAPDSAKFPNGSPSSWCCSVCRSNKSPWVCLTCSSVHCGSYRCDDFVVNDTKLGLVQKVREHLQNLENSAFTADRHKKRKLLENSTLNSKLLKVNGSTTAICATGLRNLGNTCFMNAILQSL

SEQ ID NO: 83163 - protein, 107 aa, Homo sapiens
  MOD_RES (1)..(1): Any amino acid
XAEQEKDQLRTQVVRLQAEKADLLGIVSELQLKLNSSGSSEDSFVEIRMAEGEAEGSVKEIKHSPGPTRTVSTGTYVKEDSGCQADRLGRLVTGCLSPEVKCCDLRK

SEQ ID NO: 83164 - protein, 139 aa, Homo sapiens
MELTFYCRRQTTPEQIDQIDVYLAKSLAEKLYLFQYPVRPASMTYDDIPHLSAKIKPKQQKVELEMAIDTLNPNYCRSKGEQIALNVDGACADETSTYSSKLMDKQTFCSSQTTSNTSRYAAALYRQGELHLTPLHGIL

SEQ ID NO: 83165 - protein, 171 aa, Homo sapiens
MNNSLQVNLPRSWAAPSGSLQEKSEHSFFLFYYYRMEDEAVLDRGASFLKHVCDEEEVEGHHTIYIGVHVPKSYRRRRRHKRKTGHKEKKEKERISENYSDKSDIENADESSSSILKPLISPAAERIRFILGEEDDSPAPPQLFTELDELLAVDGQEMEWKETARWIKFEE

SEQ ID NO: 83166 - protein, 1153 aa, Homo sapiens
MEEFDLVKTLHKTSSSVGSDENSLHSLGLNLNTDRSSPHLSTNGVSSFSGKTRPSVIQGTVEVLTSLMQELQNSGKTDSELWKNCEHIQEEIKNLVKLQTSSASLASCEGNSSNKQVSSESQMGFFSLSSERNESVIHYPESTEPEIQQEMSTSQPDCNVDSCSVSSGYGTFCISELNLYKSKDPKEFMEHIDVPKGQYVAPAVPAESLVDGVKNENFYIQTPEECHVSLKEDVSISPGEFEHNFLGENKVSEVYSGKTNSNAITSWAQKLKQNQPKRAHVEDGGSRSKQGNEQSKKTPIEKSDFAAATHPRAFYLSKPDETPNAWMSDSGTGLTYWKLEEKDMHHSLPETLEKTFISLSSTDVSPNQSNTSNEMKLPSLKDIYYKKQRENKQLPERNLTSASNPNHPPEVLTLDPTLHMKPKQQISGIQPHGLPNALDDRISFSPDSVLEPSMSSPSDIDSFSQASNVTSQLPGFPKYPSHTKASPVDSWKNQTFQNESRTSSTFPSVYTITSNDISVNTVDEENTVMVASASVSQSQLPGTANSVPECISLTSLEDPVILSKIRQNLKEKHARHIADLRAYYESEINSLKQKLEAKEISGVEDWKITNQILVDRCGQLDSALHEATSRVRTLENKNNLLEIEVNDLRERFSAASSASKILQERIEEMRTSSKEKDNTIIRLKSRLQDLEEAFENAYKLSDDKEAQLKQENKMFQDLLGEYESLGKEHRRVKDALNTTENKLLDAYTQISDLKRMISKLEAQVKQVEHENMLSLRHNSRIHVRPSRANTLATSDVSRRKWLIPGAEYSIFTGQPLDTQDSNVDNQLEETCSLGHRSPLEKDSSPGSSSTSLLIKKQRETSDTPIMRALKELDEGKIFKNWGTQTEKEDTSNINPRQTETSVNASRSPEKCAQQRQKRLNSASQRSSSLPPSNRKSSTPTKREIMLTPVTVAYSPKRSPKENLSPGFSHLLSKNESSPIRFDILLDDLDTVPVSTLQRTNPRKQLQFLPLDDSEEKTYSEKATDNHVNHSSCPEPVPNGVKKVSVRTAWEKNKSVSYEQCKPVSVTPQGNDFEYTAKIRTLAETERFFDELTKEKDQIEAALSRMPSPGGRITLQTRLNQEALEDRLERINRELGSVRMTLKKFHVLRTSANL

SEQ ID NO: 83167 - protein, 533 aa, Homo sapiens
MASTTTCTRFTDEYQLFEELGKGAFSVVRRCMKIPTGQEYAAKIINTKKLSARDHQKLEREARICRLLKHPNIVRLHDSISEEGFHYLVFDLVTGGELFEDIVAREYYSEADASHCIQQILEAVLHCHQMGVVHRDLKPENLLLASKSKGAAVKLADFGLAIEVQGDQQAWFGFAGTPGYLSPEVLRKDPYGKPVDMWACGVILYILLVGYPPFWDEDQHRLYQQIKAGAYDFPSPEWDTVTPEAKDLINKMLTINPAKRITASEALKHPWICQRSTVASMMHRQETVDCLKKFNARRKLKGAILTTMLATRNFSAAKSLLKKPDGVKINNKANVVTSPKENIPTPALEPQTTVIHNPDGNKESTESSNTTIEDEDVKARKQEIIKVTEQLIEAINNGDFEAYTKICDPGLTAFEPEALGNLVEGMDFHRFYFENALSKSNKPIHTIILNPHVHLVGDDAACIAYIRLTQYMDGSGMPKTMQSEETRVWHRRDGKWQNVHFHRSGSPTVPIKPPCIPNGKENFSGGTSLWQNI

SEQ ID NO: 83168 - protein, 198 aa, Homo sapiens
  MOD_RES (1)..(1): Any amino acid
XSSLNSKLSAQERKELLADLEREKPQTKILYITPEMAASSSFQPTLNSLVSRHLLSYLVVDEAHCVSQWGHDFRPDYLRLGALRSRLGHAPCVALTATATPQVQEDVFAALHLKKPVAIFKTPCFRANLFYDVQFKELISDPYGNLKDFCLKALGQEADKGVCRPLEYCQVYGWVLPGVWPGWQGWEAFLVPSLLLQE

SEQ ID NO: 83169 - protein, 580 aa, Homo sapiens
MDRVLLRWISLFWLTAMVEGLQVTVPDKKKVAMLFQPTVLRCHFSTSSHQPAVVQWKFKSYCQDRMGESLGMSSTRAQSLSKRNLEWDPYLDCLDSRRTVRVVASKQGSTVTLGDFYRGREITIVHDADLQIGKLMWGDSGLYYCIITTPDDLEGKNEDSVELLVLGRTGLLADLLPSFAVEIMPEWVFVGLVLLGVFLFFVLVGICWCQCCPHSCCCYVRCPCCPDSCCCPQAFRKGYRIQADKERDSMKVLYYVEKELAQFDPARRMRGRYNNTISELSSLHEEDSNFRQSFHQMRSKQFPVSGDLESNPDYWSGVMGGSSGASRGPSAMEYNKEDRESFRHSQPRSKSEMLSRKNFATGVPAVSMDELAAFADSYGQRPRRADGNSHEARGGSRFERSESRAHSGFYQDDSLEEYYGQRSRSREPLTDADRGWAFSPARRRPAEDAHLPRLVSRTPGTAPKYDHSYLGSARERQARPEGASRGGSLETPSKRSAQLGPRSASYYAWSPPGTYKAGSSQDDQEDASDDALPPYSELELTRGPSYRGRDLPYHSNSEKKRKKEPAKKTNDFPTRMSLVV

SEQ ID NO: 83170 - protein, 620 aa, Homo sapiens
MAAAAAATAAAAASIRERQTVALKRMLNFNVPHIKNSTGEPVWKVLIYDRFGQDIISPLLSVKELRDMGITLHLLLHSDRDPIPDVPAVYFVMPTEENIDRMCQDLRNQLYESYYLNFISAISRSKLEDIANAALAASAVTQVAKVFDQYLNFITLEDDMFVLCNQNKELVSYRAINRPDITDTEMETVMDTIVDSLFCFFVTLGAVPIIRCSRGTAAEMVAVKLDKKLRENLRDARNSLFTGDTLGAGQFSFQRPLLVLVDRNIDLATPLHHTWTYQALVHDVLDFHLNRVNLEESSGVENSPAGARPKRKNKKSYDLTPVDKFWQKHKGSPFPEVAESVQQELESYRAQEDEVKRLKSIMGLEGEDEGAISMLSDNTAKLTSAVSSLPELLEKKRLIDLHTNVATAVLEHIKARKLDVYFEYEEKIMSKTTLDKSLLDIISDPDAGTPEDKMRLFLIYYISTQQAPSEADLEQYKKALTDAGCNLNPLQYIKQWKAFTKMASAPASYGSTTTKPMGLLSRVMNTGSQFVMEGVKNLVLKQQNLPVTRILDNLMEMKSNPETDDYRYFDPKMLRGNDSSVPRNKNPFQEGKQGKHILYGCSELFNATQFIKQLSQLGQK

SEQ ID NO: 83171 - protein, 264 aa, Homo sapiens
MRPDRAEAPGPPAMAAGGPGAGSAAPVSSTSSLPLAALNMRVRRRLSLFLNVRTQVAADWTALAEEMDFEYLEIRQLETQADPTGRLLDAWQGRPGASVGRLLELLTKLGRDDVLLELGPSIGHMPERFDAFICYCPSDIQFVQEMIRQLEQTNYRLKLCVSDRDVLPGTCVWSIASELIEKRCRRMVVVVSDDYLQSKECDFQTKFALSLSPGAHQKRLIPIKYKAMKKEFPSILRFITVCDYTNPCTKSWFWTRLAKALSLP

SEQ ID NO: 83172 - protein, 73 aa, Homo sapiens
MLYWHKHGDGWKTPVPMEEDPLLDTDMLMSEFSDTLFSTLSSHQPVAWPNPREIAHLGNADMIQPGLIPLQPN

SEQ ID NO: 83173 - protein, 12 aa, Homo sapiens
  MOD_RES (1)..(1): Any amino acid
XGYGGGGFGGGS

SEQ ID NO: 83174 - protein, 136 aa, Homo sapiens
MVGGCLGGSKSSHSAWEGPILPKCKSSRGVTELANRLVCLVFLLHVDIILLILLPGPPQGYRKVKSSPEPIMSSLLTEGTAGYVVPPGLVLAAGGGAGSPRFLSAFLNASRVRELANGKFIRVALAEKDRSGMPTQ

SEQ ID NO: 83175 - protein, 542 aa, Homo sapiens
  MOD_RES (1)..(1): Any amino acid
XSLNAGERGCFCLDFSHNGRILAAACASRDGYPIILYEIPSGRFMRELCGHLNIIYDLSWSKDDHYILTSSSDGTARIWKNEINNTNTFRVLPHPSFVYTAKFHPAVRELVVTGCYDSMIRIWKVEMREDSAILVRQFDVHKSFINSLCFDTEGHHMYSGDCTGVIVVWNTYVKINDLEHSVHHWTINKEIKETEFKGIPISYLEIHPNGKRLLIHTKDSTLRIMDLRILVARKFVGAANYREKIHSTLTPCGTFLFAGSEDGIVYVWNPETGEQVAMYSDLPFKSPIRDISYHPFENMVAFCAFGQNEPILLYIYDFHVAQQEAEMFKRYNGTFPLPGIHQSQDALCTCPKLPHQGSFQIDEFVHTESSSTKMQLVKQRLETVTEVIRSCAAKVNKNLSFTSPPAVSSQQSKLKQSNMLTAQEILHQFGFTQTGIISIERKPCNHQVDTAPTVVALYDYTANRSDELTIHRGDIIRVFFKDNEDWWYGSIGKGQEGYFPANHVASETLYQELPPEIKERSPPLSPEEKTKIEKSPAPQKVK

SEQ ID NO: 83176 - protein, 121 aa, Homo sapiens
MDRFLVKGAQGGLLRKQEEQEPTGEEPAVLGGDKESTRKRPRREAPGNGGHSAGPSWRHIRAEGLDCSYTVLFGKAEADEIFQELEKEVEYFTGALARVQVFGKWHSVPRKQATYGDAGLT

SEQ ID NO: 83177 - protein, 2649 aa, Homo sapiens
MPIGSKERPTFFEIFKTRCNKADLGPISLNWFEELSSEAPPYNSEPAEESEHKNNNYEPNLFKTPQRKPSYNQLASTPIIFKEQGLTLPLYQSPVKELDKFKLDLGRNVPNSRHKSLRTVKTKMDQADDVSCPLLNSCLSESPVVLQCTHVTPQRDKSVVCGSLFHTPKFVKGRQTPKHISESLGAEVDPDMSWSSSLATPPTLSSTVLIVRNEEASETVFPHDTTANVKSYFSNHDESLKKNDRFIASVTDSENTNQREAASHGFGKTSGNSFKVNSCKDHIGKSMPNVLEDEVYETVVDTSEEDSFSLCFSKCRTKNLQKVRTSKTRKKIFHEANADECEKSKNQVKEKYSFVSEVEPNDTDPLDSNVANQKPFESGSDKISKEVVPSLACEWSQLTLSGLNGAQMEKIPLLHISSCDQNISEKDLLDTENKRKKDFLTSENSLPRISSLPKSEKPLNEETVVNKRDEEQHLESHTDCILAVKQAISGTSPVASSFQGIKKSIFRIRESPKETFNASFSGHMTDPNFKKETEASESGLEIHTVCSQKEDSLCPNLIDNGSWPATTTQNSVALKNAGLISTLKKKTNKFIYAIHDETSYKGKKIPKDQKSELINCSAQFEANAFEAPLTFANADSGLLHSSVKRSCSQNDSEEPTLSLTSSFGTILRKCSRNETCSNNTVISQDLDYKEAKCNKEKLQLFITPEADSLSCLQEGQCENDPKSKKVSDIKEEVLAAACHPVQHSKVEYSDTDFQSQKSLLYDHENASTLILTPTSKDVLSNLVMISRGKESYKMSDKLKGNNYESDVELTKNIPMEKNQDVCALNENYKNVELLPPEKYMRVASPSRKVQFNQNTNLRVIQKNQEETTSISKITVNPDSEELFSDNENNFVFQVANERNNLALGNTKELHETDLTCVNEPIFKNSTMVLYGDTGDKQATQVSIKKDLVYVLAEENKNSVKQHIKMTLGQDLKSDISLNIDKIPEKNNDYMNKWAGLLGPISNHSFGGSFRTASNKEIKLSEHNIKKSKMFFKDIEEQYPTSLACVEIVNTLALDNQKKLSKPQSINTVSAHLQSSVVVSDCKNSHITPQMLFSKQDFNSNHNLTPSQKAEITELSTILEESGSQFEFTQFRKPSYILQKSTFEVPENQMTILKTTSEECRDADLHVIMNAPSIGQVDSSKQFEGTVEIKRKFAGLLKNDCNKSASGYLTDENEVGFRGFYSAHGTKLNVSTEALQKAVKLFSDIENISEETSAEVHPISLSSSKCHDSVVSMFKIENHNDKTVSEKNNKCQLILQNNIEMTTGTFVEEITENYKRNTENEDNKYTAASRNSHNLEFDGSDSSKNDTVCIHKDETDLLFTDQHNICLKLSGQFMKEGNTQIKEDLSDLTFLEVAKAQEACHGNTSNKEQLTATKTEQNIKDFETSDTFFQTASGKNISVAKESFNKIVNFFDQKPEELHNFSLNSELHSDIRKNKMDILSYEETDIVKHKILKESVPVGTGNQLVTFQGQPERDEKIKEPTLLGFHTASGKKVKIAKESLDKVKNLFDEKEQGTSEITSFSHQWAKTLKYREACKDLELACETIEITAAPKCKEMQNSLNNDKNLVSIETVVPPKLLSDNLCRQTENLKTSKSIFLKVKVHENVEKETAKSPATCYTNQSPYSVIENSALAFYTSCSRKTSVSQTSLLEAKKWLREGIFDGQPERINTADYVGNYLYENNSNSTIAENDKNHLSEKQDTYLSNSSMSNSYSYHSDEVYNDSGYLSKNKLDSGIEPVLKNVEDQKNTSFSKVISNVKDANAYPQTVNEDICVEELVTSSSPCKNKNAAIKLSISNSNNFEVGPPAFRIASGKIVCVSHETIKKVKDIFTDSFSKVIKENNENKSKICQTKIMAGCYEALDDSEDILHNSLDNDECSTHSHKVFADIQSEEILQHNQNMSGLEKVSKISPCDVSLETSDICKCSIGKLHKSVSSANTCGIFSTASGKSVQVSDASLQNARQVFSEIEDSTKQVFSKVLFKSNEHSDQLTREENTAIRTPEHLISQKGFSYNVVNSSAFSGFSTASGKQVSILESSLHKVKGVLEEFDLIRTEHSLHYSPTSRQNVSKILPRVDKRNPEHCVNSEMEKTCSKEFKLSNNLNVEGGSSENNHSIKVSPYLSQFQQDKQQLVLGTKVSLVENIHVLGKEQASPKNVKMEIGKTETFSDVPVKTNIEVCSTYSKDSENYFETEAVEIAKAFMEDDELTDSKLPSHATHSLFTCPENEEMVLSNSRIGKRRGEPLILVGEPSIKRNLLNEFDRIIENQEKSLKASKSTPDGTIKDRRLFMHHVSLEPITCVPFRTTKERQEIQNPNFTAPGQEFLSKSHLYEHLTLEKSSSNLAVSGHPFYQVSATRNEKMRHLITTGRPTKVFVPPFKTKSHFHRVEQCVRNINLEENRQKQNIDGHGSDDSKNKINDNEIHQFNKNNSNQAVAVTFTKCEEEPLDLITSLQNARDIQDMRIKKKQRQRVFPQPGSLYLAKTSTLPRISLKAAVGGQVPSACSHKQLYTYGVSKHCIKINSKNAESFQFHTEDYFGKESLWTGKGIQLADGGWLIPSNDGKAGKEEFYSCSGLCVTLQVWIQSLFLEFGFIITIDGSYGNWQLWNVPFLRNLLIDA

SEQ ID NO: 83178 - protein, 52 aa, Homo sapiens
MDVRALPWLPWLLWLLCRGGGDADSRAPFTPTWPRSREREAAAFRAPQQWHY

SEQ ID NO: 83179 - protein, 147 aa, Homo sapiens
  MOD_RES (1)..(1): Any amino acid
XAEAAAGVEPPEAAPGGREPRCGPEPTEVFTVGPKTFSWTPFPPDLWGPGRSYRLLHGAGGHLESPARSLPQRPAPDPCRAPRVEQQPSVEGAAALRSCPMCQKEFAPRSKNSSGMRRHRSPKLAANNNNNKRKGRARWLTPVIPAL

SEQ ID NO: 83180 - protein, 232 aa, Homo sapiens
MADYSTVPPPSSGSAGGGGGGGGGGGVNDAFKDALQRARQIAAKIGGDAGTSLNSNDYGYGGQKRPLEDGDGSWTSPSSTTHWEGMPSPFKDQPDAKKVAPQNDSFGTQLPPMHQQQRSVMTEEYKVPDGMVGFIIGRGGEQISRIQQESGCKIQIAPDSGGLPERSCMLTGTPESVQSAKRLLDQIVEKGRPAPGFHHGDGPGNAVQEIMIPASKAGLVIGKGGETIKQLQ

SEQ ID NO: 83181 - protein, 634 aa, Homo sapiens
  MOD_RES (1)..(1): Any amino acid
XSSPLGLLGTTDEPPPSGPSTTQGAQAPLLQQRPQELGELRVLGRDETGRLRVVWTAQPDTFAYFQLRMRVPEGPGAHEEVLPGDVRQALVPPPPPGTPYELSLHGVPPGGKPSDPIIYQGIMDKDEEKPGKSSGPPRLGELTVTDRTSDSLLLRWTVPEGEFDSFVIQYKDRDGQPQVVPVEGPQRSAVITSLDPGRKYKFVLYGFVGKKRHGPLVAEAKILPQSDPSPGTPPRLGNLWVTDPTPDSLHLSWTVPEGQFDTFMVQYRDRDGRPQVVPVEGPERSFVVSSLDPDHKYRFTLFGIANKKRYGPLTADGTTAPERKEEPPRPEFLEQPLLGELTVTGVTPDSLRLSWTVAQGPFDSFMVQYKDAQGQPQAVPVAGDENEVTVPGLDPDRKYKMNLYGLRGRQRVGPESVVAKTAPQEDVDETPSPTELGTEAPESPEEPLLGELTVTGSSPDSLSLFWTVPQGSFDSFTVQYKDRDGRPRAVRVGGKESEVTVGGLEPGHKYKMHLYGLHEGQRVGPVSAVGVTAPQQEETPPATESPLEPRLGELTVTDVTPNSVGLSWTVPEGQFDSFIVQYKDKDGQPQVVPVAADQREVTVYNLEPERKYKMNMYGLHDGQRMGPLSVVIVT

SEQ ID NO: 83182 - protein, 684 aa, Homo sapiens
MACLGFLLPVGFLLLISTVAGGKYGVAHVVSENWSKDYCILFSSDYITLPRDLHHAPLLPLYDGTKAPWCPGEDSPHQAQLRSPSQRPLRQTTAMVMRGNCSFHTKGWLAQGQGAHGLLIVSRVSDQQCSDTTLAPQDPRQPLADLTIPVAMLHYADMLDILSHTRGEAVVRVAMYAPPEPIIDYNMLVIFILAVGTVAAGGYWAGLTEANRLQRRRARRGGGPGGHHQLQEAAAAEGAQKEDNEDIPVDFTPAMTGVVVTLSCSLMLLLYFFYDHFVYVTIGIFGLGAGIGLYSCLSPLVCRLSLRQYQRPPHSLWASLPLPLLLLASLCTTVIIFWVAYRNEDRWAWLLQDTLGISYCLFVLHRVRLPTLKNCSSFLLALLAFDVFFVFVTPFFTKTGESIMAQVALGPAESSSHERLPMVLKVPRLRVSALTLCSQPFSILGFGDIVVPGFLVAYCCPFDVQVCSRQVYFVACTVAYAVGLLVTFMAMVLMQMGQPALLYLVSSTLLTSLAVAACRQELSLFWTGQGRAKMCGLGCAPSAGSRQKQEGAADAHTASTLERGTSRGAGDLDSNPGEDTTEIVTISENEATNPEDRSDSPEGWSDAHLDPNELPFIPPRASEELMPLMPMAMLIPLMPLMPRPSELGHVHAQAQAHETGLPWAGLHKRKGLKVRKSMSTQAPL

SEQ ID NO: 83183 - protein, 104 aa, Homo sapiens
MKGPIAMQSGPKPLFRRMSSLVGPTQSFFMRESKTLGAVQIMNGLFHIALGGLLMIPAGIYAPICVTVWYPLWGGIMYIISGSLLAATEKNSRKCLVKGKMIMN

SEQ ID NO: 83184 - protein, 152 aa, Homo sapiens
MVQGRYQPAQGCSLPCAAWAQKHREVTHPPRILWRPFGFSGRFLKLESHSITESKSLIPVAWTSLTQMLLEAPGIFLLGQRKRFSTMPETETHERETELFSPPSDVRGMTKLDRTAFKKTVNIPVLKVRKEIVSKLMRSLKRAALQRPGIRR

SEQ ID NO: 83185 - protein, 88 aa, Homo sapiens
MKKFKRRLSLTLRGSQTIDESLSELAEQMTIEENSSKDNEPIVKNGRPPTSHSMHSFLHQYTGSFKKPPLRRPHSVIGGSLGSFMAMP

SEQ ID NO: 83186 - protein, 344 aa, Homo sapiens
MQSISFASGGDPDTTDYVAYVAKDPVNQRACHILECHNGMAQDVISTIGQAFELRFKQYLKNPSLNTSCESEEVHIDSHAEEREDHEYYNEIPGKQPPVGGVSDMRIKVQATEQMAYCPIQCEKLCYLPGNSKCSSVYENCLEQSRAIGNVHPRGVQSQRDTSLLKHTCRVDLFDDPCYINTQALQSTPGSAGNQRSAQPLGSPWHCGKAPETVQPGATAQPASSHSLPHIKQQLWSEECYHGKLSRKAAESLLVKDGDFLVRESATSPGQYVLSGLQGGQAKHLLLVDPEGKVRTKDHVFDNVGHLIRYHMDNSLPIISSGSEVSLKQPVRKDNNPALLHSNK

SEQ ID NO: 83187 - protein, 868 aa, Homo sapiens
RMYHRVLVHSNCLSLQEVEDFCRLRCLCVAFQLHLPLSQRACSRVITCSWIRNSDSFLKMNKWCEYFILSNLNVFGCWNLNLNHVSDLYDEQLLKNIAFYYEFESTQEPHLNLGDSIRRDYEDLWNVVSHLVKEFNVGKSFPLRTTRRHFLRQEKSVIQEISLEKMPSVGFIPMTSAVIDEFVGDMMKDLPILKSDDPVVPSLFKQKTSDELLHWHAQRLLSDDYDRIKCHVDEQSRDPHVLDFLKKIQDYQQFYGKSLESISTKVIVTQTTRPKEDSSGASGEILQNTKPHQITKKSKKKSFLKEDQNKAQQNDDLLFSIEEEMKNNLHSGIRKLEDYLTSCASNSVKFGVEMLGLIACFKAWKKHCRGEGKISKDLSIAVQMMKRIHSLLERYPEILEAEHHQYIAKCLKYLGFNDLANSLDPTLIGDDKNKKKYSIDIGPARFQLQYMGHYLIRDERKDRDPRVQDFIPNAWQQELLDVVDKNESAVIVAPTSSGKTYASYYCMEKVLRESDVGVVVYVAPAKSLVGQVAATVENRFTKTLPAGRTLCGAFTRDYCHNVLNCQVHYLGREVGAKFWELLLVIIRCPFLVLSATINNPNLLTKWLQSVKQYWKQADKIMEEKCISEKQADKCLNFLQDHSYKNQSYEVRLVLCGERYNDLEKHICSVKHDDVYFDHFHPCAALTTDIIEKYGFPPDLTLTPQESIQLYDTMAQVWETWPRAQELCPEEFILFKNKIVIKKLDARKYEENLKAELTNWIKNGQVKKVKRVLKNLSPDSLSSSKDMVKMFPLLVEKLRQMDKLPAIFFLFKNDDVGKRAGSVCTFLEKTETKSHPHTECHSYVFAIDEVLEKVRKTQKRITKKNPKKA

SEQ ID NO: 83188 - protein, 119 aa, Homo sapiens
  MOD_RES (1)..(1): Any amino acid
XMSGSSRSLEREYSCTVRLLDDSEYTCTIQRDAKGQYLFDLLCHHLNLLEKDYFGIRFVDPDKQRHWLEFTKSVVKQLRSQPPFTMCFRVKFYPADPAALKEEITSAVATEWTSFLQEV

SEQ ID NO: 83189 - protein, 189 aa, Homo sapiens
MDSVRSGAFGHLFRPDNFIFGQSGAGNNWAKGHYTEGAELVDSVLDVVRKECENCDCLQGFQLTHSLGGGTGSGMGTLLISKVREEYPDRIMNTFSVVPSPKVSDTVVEPYNATLSIHQLVENTDETYCIDNEALYDICFRTLKLATPTYGDLNHLVSATMSGVTTSLRFPGQLNADLRKLAVNMVPFP

SEQ ID NO: 83190 - protein, 136 aa, Homo sapiens
MVDGKPVNLGLWDTAGQEDYDRLRPLSYPQTDVFLICFSLVSPASFENVRAKWYPEVRHHCPHTPILLVGTKLDLRDDKDTIERLRDKKLAPITYPQGLAMAREIGSVKYLECSALTQRGLKTVFDEAIRAVLCPP

SEQ ID NO: 83191 - protein, 258 aa, Homo sapiens
  MOD_RES (1)..(1): Any amino acid
XHQEQQDRAHLCQAVPVRGLLGPALWGRPADQVVSYAKFLYPTNALVTHKSDSHGLLPTPRPSVPRTLPGSRHKPAPTKSAPASTELGSDVGDTLEYNPNLLDDPQWPCGKHKRVLIFASYMTTVIEYVKPSDLKKDMNETFREKFPHVKLTLSKIRSLKREMRSLSEECSLEPVTVAMAYVYFEKLVLQGKLSKQNRKLCAGACVLLAAKISSDLRKSGVTQLIDKLEERFRFNRRDLIGFEFTVLVALELALYLPE

SEQ ID NO: 83192 - protein, 134 aa, Homo sapiens
MDVTIVKTDYEGQAKKLLELMENTDVIIVAGGDGTLQEVVTGVLRRTDEATFSKIPIGFIPLGETSSLSHTLFAESGNKVQHITDATLAIVKGETVPLDVLQIKTFILHPMDQGIISTFKFYYLINKLWTKGHQ

SEQ ID NO: 83193 - protein, 28 aa, Homo sapiens
MLSATPLYGNVHSWMNSERVRMCGASED

SEQ ID NO: 83194 - protein, 1394 aa, Homo sapiens
MGLPLARLAAVCLALSLAGGSELQTEGRTRNHGHNVCSTWGNFHYKTFDGDVFRFPGPCDYNFASDCRGSYKEFAVHLKRGPGQAEAPAGVESILLTIKDDTIYLTRHLAVLNGAVVSTPHYSPGLLIEKSDAYTKVYSRAGLTLMWNREDALMLELDTKFRNHTCGLCGDYNGLQSYSEFLSDGVLFSPLEFGNMQKINQPDVVCEDPEEEVAPASCSEHRAECERLLTAEAFADCQDLVPLEPYLRACQQDRCRCPGGDTCVCSTVAEFSRQCSHAGGRPGNWRTATLCPKTCPGNLVYLESGSPCMDTCSHLEVSSLCEEHRMDGCFCPEGTVYDDIGDSGCVPVSQCHCRLHGHLYTPGQEITNDCEQCVCNAGRWVCKDLPCPGTCALEGGSHITTFDGKTYTFHGDCYYVLAKGDHNDSYALLGELAPCGSTDKQTCLKTVVLLADKKKNVVVFKSDGSVLLNELQVNLPHVTASFSVFRPSSYHIMVSMAIGVRLQVQLAPVMQLFVTLDQASQGQVQGLCGNFNGLEGDDFKTASGLVEATGAGFANTWKAQSTCHDKLDWLDDPCSLNIESANYAEHWCSLLKKTETPFGRCHSAVDPAEYYKRCKYDTCNCQNNEDCLCAALSSYARACTAKGVMLWGWREHVCNKDVGSCPNSQVFLYNLTTCQQTCRSLSEADSHCLEGFAPVDGCGCPDHTFLDEKGRCVPLAKCSCYHRGLYLEAGDVVVRQEERCVCRDGRLHCRQIRLIGQSCTAPKIHMDCSNLTALATSKPRALSCQTLAAGYYHTECVSGCVCPDGLMDDGRGGCVVEKECPCVHNNDLYSSGAKIKVDCNTCTCKRGRWVCTQAVCHGTCSIYGSGHYITFDGKYYDFDGHCSYVAVQDYCGQNSSLGSFSIITENVPCGTTGVTCSKAIKIFMGRTELKLEDKHRVVIQRDEGHHVAYTTREVGQYLVVESSTGIIVIWDKRTTVFIKLAPSYKGTVCGLCGNFDHRSNNDFTTRDHMVVSSELDFGNSWKEAPTCPDVSTNPEPCSLNPHRRSWAEKQCSILKSSVFSICHSKVDPKPFYEACVHDSCSCDTGGDCECFCSAVASYAQECTKEGACVFWRTPDLCPIFCDYYNPPHECEWHYEPCGNRSFETCRTINGIHSNISVSYLEGCYPRCPKDRPIYEEDLKKCVTADKCGCYVEDTHYPPGASVPTEETCKSCVCTNSSQVVCRPEEGKILNQTQDGAFCYWEICGPNGTVEKHFNICSITTRPSTLTTFTTITLPTTPTTFTTTTTTTTPTSSTVLSTTPKLCCLWSDWINEDHPSSGSDDGDRETFDGVCGAPEDIECRSVKDPHLSLEQLGQKVQCDVSVGFICKNEDQFGNGPFGLCYDYKIRVNCCWPMDK

SEQ ID NO: 83195 - protein, 105 aa, Homo sapiens
MVSGRFYLSCLLLGSLGSMCILFTIYWMQYWRGGFAWNGSIYMFNWHPVLMVAGMVVFYGGVVPGLCCLPPALGVHVAAQPPKTYPRLFWSRHPLSVHRIRHFGH

SEQ ID NO: 83196 - protein, 360 aa, Homo sapiens
MAGKRSGWSRAALLQLLLGVNLVVMPPTRARSLRFVTLLYRHGDRSPVKTYPKDPYQEEEWPQGFGQLTKEGMLQHWELGQALRQRYHGFLNTSYHRQEVYVRSTDFDRTLMSAEANLAGLFPPNGMQRFNPNISWQPIPVHTVPITEDRQTHGLRLPPWASPQTMQRLSRLKDFSFRFLFGIYQQAEKARLQGGVLLAQIRKNLTLMATTSQLPKLLVYSAHDTTLVALQMALDVYNGEQAPYASCHIFELYQEDSGNFSVEMYFRNESDKAPWPLSLPGCPHRCPLQDFLRLTEPVVPKDWQQECQLASGPADTEVIVALAVCGSILFLLIVLLLTVLFRMQAQPPGYRHVADGEDHA

SEQ ID NO: 83197 - protein, 170 aa, Homo sapiens
MEEGGNLGGLIKMVHLLVLSGAWGMQMWVTFVSGFLLFRSLPRHTFGLVQSKLFPFYFHISMGCAFINLCILASQHAWAQLTFWEASQLYLLFLSLTLATVNARWLEPRTTAAMWALQTVEKERGLGGEVPGSHQGPDPYRQLREKDPKYSALRQNFFRYHGLSSLCNLG

SEQ ID NO: 83198 - protein, 134 aa, Homo sapiens
MTCHKRYKIQKKVREHHRKLRKEAKKRGHKKPRKDPGVPNSAPFKEALLREAELRKQRLEELKQQQKLDRQKELEKKRKLETNPDIKPSNVEPMEKEFGLCKTENKAKSGKQNSKKLYCQELKKVIEASDVVLE

SEQ ID NO: 83199 - protein, 144 aa, Homo sapiens
MDEPMGEEEINPQTVFLVKKISGSDARQLYAMKVLKKATLKVRDRVRTKMERDILVEVNHPFIVKLHYAFQTEGKLYLILDFLRGGDLFTRLSKEVMFTEEDVKFYLAELALALDHLHSLGIIYRDLKPENILLDEEGHIKLTV

SEQ ID NO: 83200 - protein, 86 aa, Homo sapiens
MQCLSRIEEGENLDCSFDMEAELTPLESAINVLEMIKTEFTLTEAVVESSRKLVKEAAVIICIKNKEFEKASKILKKHMSKDPTTQ

SEQ ID NO: 83201 - protein, 140 aa, Homo sapiens
RTREVGIQEIHHKVRPYQVELVRRDYVANGGWETFLSYEDPDQDILIGLLRLRKCSEETFRFELGGGVSIVRELHVYGSVVPVSSRDPTKFQHQGFGMLLMEEAERIAREEHGSGKIAVISGVDVLGQRQRGGHHRSCSL

SEQ ID NO: 83202 - protein, 388 aa, Homo sapiens
  MOD_RES (1)..(1): Any amino acid
XGRGTRRMSPATTGTFLLTGEISNDPITFNTNLMGYPDRPGWLRYIQRTPYSDGVLYGSPTAENVGKPTIIEITAYNRRTFETARHNLIINIMSAEDFPLPYQAEFFIKNMNVEEMLASEVLGDFLGAVKNVWQPERLNAINITSALDRGGRVPLPINDLKEGVYVMVGADVPFSSCLREVENPQNQLRCSQEMEPVITCDKKFRTQFYIDWCKISLVDKTKQVSTYQEVIRGEGILPDGGEYKPPSDSLKSRDYYTDFLITLAVPSAVALVLFLILAYIMCCRREGVIQLVHHSAIQKSTKELRDMSKNREIAWPLSTLPVFHPVTGEIIPPLHTDNYDSTNMPLMQTQQNLPHQTQIPQQQTTEIIFSITAFVNLRRFSFDNFSKI

SEQ ID NO: 83203 - protein, 1372 aa, Homo sapiens
MSEPGGGGGEDGSAGLEVSAVQNVADVSVLQKHLRKLVPLLLEDGGEAPAALEAALEEKSALEQMRKFLSDPQVHTVLVERSTLKEDVGDEGEEEKEFISYNINIDIHYGVKSNSLAFIKRTPVIDADKPVSSQLRVLTLSEDSPYETLHSFISNAVAPFFKSYIRESGKADRDGDKMAPSVEKKIAELEMGLLHLQQNIEIPEISLPIHPMITNVAKQCYERGEKPKVTDFGDKVEDPTFLNQLQSGVNRWIREIQKVTKLDRDPASGTALQEISFWLNLERALYRIQEKRESPEVLLTLDILKHGKRFHATVSFDTDTGLKQALETVNDYNPLMKDFPLNDLLSATELDKIRQALVAIFTHLRKIRNTKYPIQRALRLVEAISRDLSSQLLKVLGTRKLMHVAYEEFEKVMVACFEVFQTWDDEYEKLQVLLRDIVKRKREENLKMVWRINPAHRKLQARLDQMRKFRRQHEQLRAVIVRVLRPQVTAVAQQNQGEVPEPQDMKVAEVLFDAADANAIEEVNLAYENVKEVDGLDVSKEGTEAWEAAMKRYDERIDRVETRITARLRDQLGTAKNANEMFRIFSRFNALFVRPHIRGAIREYQTQLIQRVKDDIESLHDKFKVQYPQSQACKMSHVRDLPPVSGSIIWAKQIDRQLTAYMKRVEDVLGKGWENHVEGQKLKQDGDSFRMKLNTQEIFDDWARKVQQRNLGVSGRIFTIESTRVRGRTGNVLKLKVNFLPEIITLSKEVRNLKWLGFRVPLAIVNKAHQANQLYPFAISLIESVRTYERTCEKVEERNTISLLVAGLKKEVQALIAEGIALVWESYKLDPYVQRLAETVFNFQEKVDDLLIIEEKIDLEVRSLETCMYDHKTFSEILNRVQKAVDDLNLHSYSNLPIWVNKLDMEIERILGVRLQAGLRAWTQVLLGQAEDKAEVDMDTDAPQVSHKPGGEPKIKNVVHELRITNQVIYLNPPIEECRYKLYQEMFAWKMVVLSLPRIQSQRYQVGVHYELTEEEKFYRNALTRMPDGPVALEESYSAVMGIVSEVEQYVKVWLQYQCLWDMQAENIYNRLGEDLNKWQALLVQIRKARGTFDNAETKKEFGPVVIDYGKVQSKVNLKYDSWHKEVLSKFGQMLGSNMTEFHSQISKSRQELEQHSVDTASTSDAVTFITYVQSLKRKIKQFEKQVELYRNGQRLLEKQRFQFPPSWLYIDNIEGEWGAFNDIMRRKDSAIQQQVANLQMKIVQEDRAVESRTTDLLTDWEKTKPVTGNLRPEEALQALTIYEGKFGRLKDDREKCAKAKEALELTDTGLLSGSEERVQVALEELQDLKGVWSELSKVWEQIDQMKEQPWVSVQPRKTEFRSCCPGWSAMA

SEQ ID NO: 83204 - protein, 134 aa, Homo sapiens
  MOD_RES (1)..(1): Any amino acid
XTNFTVYITCGVIAFVIVAGVFAKVSYDKAHRPPREMNIHRALADILRQQGPIPIAHCERETISAIDTSPKENTPVRSSSKNHYTPVRTAKQTPGHYGKDAYRSGGPDLHNFISSGFVTLGRGHTKGTVETIFY

SEQ ID NO: 83205 - protein, 106 aa, Homo sapiens
  MOD_RES (1)..(1): Any amino acid
XPGPGPAPCTGGPKPLSPASSQDKLPPLPPLPNQEENYVTPIGDGPAVDYENQDVASSSWPVILKPKKLPKPPAKLPKPPVGPKPGLADMTAELQKKLEKRRALEH

SEQ ID NO: 83206 - protein, 205 aa, Homo sapiens
MHFRNFNYSFSSLIACVANSDIFSESETRAKFESLFRTYDKDITFQYFKSFKRVRINFSNPFSAADARLQLHKTEFLGKEMKLYFAQTLHIGSSHLAPPNPDKQFLISPPASPPVGWKQVEDATPVINYDLLYAISKLGPGEQGPRVGGRQGETQLLPCTREQYHHYPRSSPEPMPACFVSFSVFFCATVPCAGSMPASWHHLQC

SEQ ID NO: 83207 - protein, 773 aa, Homo sapiens
MSSFGAGKTKEVIFSVEDGSVKMFLRGRPVPMMIPDELAPTYSLDTRSELPSCRLKLEWVYGYRGRDCRANLYLLPTGEIVYFVASVAVLYSVEEQRQRHYLGHNDDIKCLAIHPDMVTIATGQVAGTTKEGKPLPPHVRIWDSVSLSTLHVLGLGVFDRAVCCVGFSKSNGGNLLCAVDESNDHMLSVWDWAKETKVVDVKCSNEAVLVATFHPTDPTVLITCGKSHIYFWTLEGGSLSKRQGLFEKHEKPKYVLCVTFLEGGDVVTGDSGGNLYVWGKGGNRITQAVLGAHDGGVFGLCALRDGTLVSGGGRDRRVVLWGSDYSKLQEVEVPEDFGPVRTVAEGHGDTLYVGTTRNSILQGSVHTGFSLLVQGHVEELWGLATHPSRAQFVTCGQDKLVHLWSSDSHQPLWSRIIEDPARSAGFHPSGSVLAVGTVTGRWLLLDTETHDLVAIHTDGNEQISVVSFSPDGAYLAVGSHDNLVYVYTVDQGGRKVSRLGKCSGHSSFITHLDWAQDSSCFVTNSGDYEILYWDPATCKQITSADAVRNMEWATATCVLGFGVFGIWSEGADGTDINAVARSHDGKLLASADDFGKVHLFSYPCCQPRVLGKWPSAAEAALSSGIRVLFRPLVASLGPAWKNVPRKFCWKSAGDSPRDPPPRPQGHSQPSFPSSGPWETAVCKFYRQGRWREVRVFASWAPPCIPHSQWLWFPSSEPQFLWELELSLETGNRLPPCPFCPRLAMASCPLRMVPWGRPILCGFLHSAHPSINCP

SEQ ID NO: 83208 - protein, 145 aa, Homo sapiens
MVDYYEVLGVQRHASPEDIKKAYRKLALKWHPDKNPENKEEAERKFKQVAEAYEVLSDAKKRDIYDKYGKEGLNGGGGGGSHFDSPFEFGFTFRNPDDVFREFFGGRDPFSFDFFEDPFEDFFGNRRGPRGSRSRGTGSFFSAFS

SEQ ID NO: 83209 - protein, 113 aa, Homo sapiens
MIGGLFIYNHKGEVLISRVYRDDIGRNAVDAFRVNVIHARQQVRSPVTNIARTSFFHVKRSNIWLAAVTKQNVNAAMVFEFLYKMCDVMAAYFGKISEENIKNNFVLIYELLD

SEQ ID NO: 83210 - protein, 339 aa, Homo sapiens
  MOD_RES (1)..(1): Any amino acid
XSIFNFTADRLINGVRSPQTRQAGQTRTRIQNPSAYAKREAGPGRVEPGSLESSPGLGRGRKNSFGYRKKREEKFTSSQTQSPTPPKPPSPSFELGLSSFPPLPGAAGNLKTEDLFENRLSSLIIGPSKERTLSADASVNTLPVVVSREPSVPASCAVSATYERSPSPAHLPDDPKVAEKQRETHSVDRLPSALTATACKSVQVNGAATVRTSCLPSCTTAARLWCEQTLRTPAPARFLITSNLELRKPSYAEICQRTSKEPPSSPLQPQKEQKPNTVGCGKEEKKLAEPAERYREPPALKSTPGAPRDQRRPAGGRPSPSAMGKRLSREQSTPPKSPQ

SEQ ID NO: 83211 - protein, 47 aa, Homo sapiens
  MOD_RES (1)..(1): Any amino acid
XPSVEDSQEVCTTSFSTSPPSQDSLPEKLAVHEKNVREFDAFVETLQ

SEQ ID NO: 83212 - protein, 30 aa, Homo sapiens
MSSCPSVGEKQNQENLKSGESKKLRCLGSS

SEQ ID NO: 83213 - protein, 76 aa, Homo sapiens
MGTISLCIGVCAFEGANTSTSFYKLVYTAILSYSIQDLLPEQDMKDLCQKVTLTRHRSWGLDNLHLVKDWRTVNEG

SEQ ID NO: 83214 - protein, 45 aa, Homo sapiens
  MOD_RES (1)..(1): Any amino acid
XRRQRDPLQALRRRNQELKQQRTPEAEYGTDFLFGVCRTSNQQPL

SEQ ID NO: 83215 - protein, 283 aa, Homo sapiens
MKRRCGTLLILDPDEAGLRLFRSFDWNDGLFDVTWSENNEHVLITCSGDGSLQLWDTAKAAGPLQVYKEHAQEVYSVDWSQTRGEQLVVSGSWDQTVKLWDPTVGKSLCTFRGHESIIYSTIWSPHIPGCFASASGDQTLRIWDVKAAGVRIVIPAHQAEILSCDWCKYNENLLVTGAVDCSLRGWDLRNVRQPVFELLGHTYAIRRVKFSPFHASVLASCSYDFTVRFWNFSKPDSLLETVEHHTEFTCGLDFSLQSPTQVADCSWDETIKIYDPACLTIPA

SEQ ID NO: 83216 - protein, 132 aa, Homo sapiens
  MOD_RES (1)..(1): Any amino acid
XSVAQDIPKLQKLGITHVLNAAEGRSFMHVNTNANFYKDSGITYLGIKANDTQEFNLSAYFERAADFIDQALAQKNDGVSLLLPRLKSNGAILAHRNLHLPGSSDSPASASRLSLPSSWDYRPGARPLPGRL

SEQ ID NO: 83217 - protein, 140 aa, Homo sapiens
MQQVLDNLGSLPSATGAAELDLIFLRGIMESPIVRSLAKAHERLEETKLEAVRDNNLELVQEILRDLAQLAEQSSTAAELAHILQEPHFQSLLETHDSVASKTYETPPPSPGLDPTFSNQPVPPDAVRMVGIRKTAGEHL

SEQ ID NO: 83218 - protein, 244 aa, Homo sapiens
MSDEEVEQVEEEAQEEEEVQEEEKPRPKLTAPKIPEGEKVDFDDIQKKRQNKDLMELQALIDSHFEARKKEEEELVALKERIEKRRAERAEQQRIRAEKERERQNRLAEEKARREEEDAKRRAEDDLKKKKALSSMGANYSSYLAKADQKRGKKQTAREMKKKILAERRKPLNIDHLGEDKLRDKAKELWETLHQLEIDKFEFGEKLKRQKYDITTLRSRIDQAQKHSKKAGTPAKGKVGGRWK

SEQ ID NO: 83219 - protein, 123 aa, Homo sapiens
MNSSTSTMSEEPDALSVVNQLRDLAADPLNRRAIVQDQGCLPGLILFMDHPNPPVVHSALLALRYLAECRANREKMKGELGMMLSLQNVIQKTTTPGETKLLASEIYDILQSSNMADGDSFNE

SEQ ID NO: 83220 - protein, 742 aa, Homo sapiens
MSSPASTPSRRGSRRGRATPAQTPRSEDARSSPSQRRRGEDSTSTGELQPMPTSPGVDLQSPAAQDVLFSSPPQMHSSAIPLDFDVSSPLTYGTPSSRVEGTPRSGVRGTPVRQRPDLGSAQKGLQVDLQSDGAAAEDIVASEQSLGQKLVIWGTDVNVAACKENFQRFLQRFIDPLAKEEENVGIDITEPLYMQRLGEINVIGEPFLNVNCEHIKSFDKNLYRQLISYPQEVIPTFDMAVNEIFFDRYPDSILEHQIQVRPFNALKTKNMRNLNPEDIDQLITISGMVIRTSQLIPEMQEAFFQCQVCAHTTRVEMDRGRIAEPSVCGRCHTTHSMALIHNRSLFSDKQMIKLQESPEDMPAGQTPHTVILFAHNDLVDKVQPGDRVNVTGIYRAVPIRVNPRVSNVKSVYKTHIDVIHYRKTDAKRLHGLDEEAEQKLFSEKRVELLKELSRKPDIYERLASALAPSIYEHEDIKKGILLQLFGGTRKDFSHTGRGKFRAEINILLCGDPGTSKSQLLQYVYNLVPRGQYTSGKGSSAVGLTAYVMKDPETRQLVLQTGALVLSDNGICCIDEFDKMNESTRSVLHEVMEQQTLSIAKAGIICQLNARTSVLAAANPIESQWNPKKTTIENIQLPHTLLSRFDLIFLLLDPQDEAYDRRLAHHLVALYYQSEEQAEEELLDMAVLKDYIAYAHSTIMPRLSEEASQALIEAITKDMFEEALRALADDDFLTVTGKTVRLL

SEQ ID NO: 83221 - protein, 154 aa, Homo sapiens
  MOD_RES (1)..(1): Any amino acid
XISFSRCWEFLLWMDPSNYGGIKGKVSSRIHCGLQDSQKAGGAEDEQENEDDEEERDGEEEEEAEESNVEDLLENNWNILQFLPQAASCQNYFLMIVSAYIVAVYHCMKDGLRRSAPGSTPVRRRGASQLSQEAEGAVGALPDSEESHRLSELH

SEQ ID NO: 83222 - protein, 467 aa, Homo sapiens
MLWGCRAKACWGPRLSDLVASLSPQRECISVHVGQAGVQIGNACWELFCLEHGIQADGTFDAQASKINDDDSFTTFFSETGNGKHVPRAVMIDLEPTVVDEVRAGTYRQLFHPEQLITGKEDAANNYARGHYTVGKESIDLVLDRIRKLTDACSGLQGFLIFHSFGGGTGSGFTSLLMERLSLDYGKKSKLEFAIYPAPQVSTAVVEPYNSILTTHTTLEHSDCAFMVDNEAIYDICRRNLDIERPTYTNLNRLISQIVSSITASLRFDGALNVDLTEFQTNLVPYPRIHFPLVTYAPIISAEKAYHEQLSVAEITSSCFEPNSQMVKCDPRHGKYMACCMLYRGDVVPKDVNVAIAAIKTKRTIQFVDWCPTGFKVGINYQPPTVVPGGDLAKVQRAVCMLSNTTAIAEAWARLDHKFDLMYAKRAFVHWYVGEGMEEGEFSEAREDLAALEKDYEEVGTDSFEEE

SEQ ID NO: 83223 - protein, 86 aa, Homo sapiens
MDNGMFSGFIMIKNLLLFCISMNLSSHFGFSQMPTSSVKDETNDNITIFTRILDGLLDGYDNRLRPGLGERITQVRTDIYVTSFGP

SEQ ID NO: 83224 - protein, 88 aa, Homo sapiens
  MOD_RES (1)..(1): Any amino acid
XEMMLALFRHHHWSRAALVYSDDKLERNCYFTLEGVHEVFQEEGLHTSIYSFDETKDLDLEDIVRNIQASERVLGLICWNPSGRKFSS

SEQ ID NO: 83225 - protein, 310 aa, Homo sapiens
MEYPAPATVQAADGGAAGPYSSSELLEGQEPDGVRFDRERARRLWEAVSGAQPVGREEVEHMIQKNQCLFTNTQCKVCCALLISESQKLAHYQSKKHANKVKRYLAIHGMETLKGETKKLDSDQKSSRSKDKNQCCPICNMTFSSPVVAQSHYLGKTHAKNLKLKQQSTKVEALSKRLTNPFLVASTLALHQNREMIDPDKFCSLCHATFNDPVMAQQHYVGKKHRKQETKLKLMARYGRLADPAVTDFPAGKGYPCKTCKIVLNSIEQYQAHVSGFKHKNQSPKTVASSLGQIPMQRQPIQKDSTTLED

SEQ ID NO: 83226 - protein, 188 aa, Homo sapiens
MDRRSMGETESGDAFLDLKKPPASKCPHRYTKEELLDIKELPHSKQRPSCLSEKYDSDGVWDPEKWHASLYPASGRSSPVESLKKELDTDRPSLVRRIVDPRERVKEDDLDVVLSPQRRSFGGGCHVTAAVSSRRSGSPLEKDSDGLRLLGGRRIGSGRIISARTFEKDHRLSDKDLRDLRDRDRERD

SEQ ID NO: 83227 - protein, 143 aa, Homo sapiens
  MOD_RES (1)..(1): Any amino acid
XAPRGRYGPPSRRSENRVVVSGLPPSGSWQDLKDHMREAGDVCYADVYRDGTGVVEFVRKEDMTYAVRKLDNTKFRSHEGETAYIRVKVDGPRSPSYGRSRSRSRSRSRSRSRSNSRSRSYSPRRSRGSPRYSPRHSRSRSRT

SEQ ID NO: 83228 - protein, 167 aa, Homo sapiens
MKTPADTGDSGKVTTVVATLGQGPERSQEVAYTDIKVIGNGSFGVVYQARLAETRELVAIKKVLQDKRFKNRELQIMRKLDHCNIVRLRYFFYSSGEKKDELYLNLVLEYVPETVYRVARHFTKAKLTIPILYVKVYMYQLFRSLAYIHSQGVCHRDIKPQNLLVDP

SEQ ID NO: 83229 - protein, 118 aa, Homo sapiens
MGLSTVPDLLLPLVLLELLVGIYPSGVIGLVPHLGDREKRDSVCPQGKYIHPQNNSICCTKCHKGPGQDTDCRECESGSFTASENHLRHCLSCSKCRKEMGQVEISSCTVDRDTVCGC

SEQ ID NO: 83230 - protein, 244 aa, Homo sapiens
MKKVRLKELESRLQQVDGFEKPKLLLEQYPTRPHIAACMLYTIHNTYDDIENKVVADLGCGCGVLSIGTAMLGAGLCVGFDIDEDALEIFNRNAEEFELTNIDMVQCDVCLLSNRMSKSFDTVIMNPPFGTKNNKGTDMAFLKTALEMARTAVYSLHKSSTREHVQKKAAEWKIKIDIIAELRYDLPASYKFHKKKSVSLLILAGLHSVLKSFLGRMWWFMPVIPATREAEARESLELRRQRLQ

SEQ ID NO: 83231 - protein, 218 aa, Homo sapiens; identical to SEQ ID NO: 43869
  MOD_RES (1)..(1): Any amino acid

SEQ ID NO: 83232 - protein, 171 aa, Homo sapiens
TLHLIGEHHDGVSKANFSIGPMMPVLAGTYRCYGSVTHSPYQLSAPSDPLDMVIIGLYEKPSLSAQPGPTVQAGENVTLSCSSIYPGKGRPMNVGSLQCAASTEHSRPTFLWALPPTEGPTDASALSVTLPTSGQTRVIHCLFPSQETLQIVGLHPLNQAPKPVTPDTYMF

SEQ ID NO: 83233 - protein, 48 aa, Homo sapiens
  MOD_RES (1)..(1): Any amino acid
XLSIQPSLNAILIPPHLRSPAGTTTLTPSSQDMEFHHVGQAGLELLTL

SEQ ID NO: 83234 - protein, 569 aa, Homo sapiens
MGCLWGLALPLFFFCWEVGVSGSSAGPSTRRADTAMTTDDTEVPAMTLAPGHAALETQTLSAETSSRASTPAGPVPEAETRGSKRISPARETRSFTKTSPNFMVLIATSVETSAASGSPEGAGMTTVQTITGSDPEEAIFDTLCTDDSSEEAKTLTMDILTLAHTSTEAKGLSSESSASSDGPHPVITPSRASESSASSDGPHPVITPSRASESSASSDGPHPVITPSRASESSASSDGPHPVITPSWSPGSDVTLLAEALVTVTNIEVINCSITEIETTTSSIPGASDTDPIPTEGVKASSTSDPPALPDSTEAKPHITEVTASAETLSTAGTTESAAPDATIGTPLPTNSTIEREVTAPGATTLSGALATGNPLEETSALSVETPSYVKVSGAAPVSIEAGSAVGKTTSFAGSSASSYSPSEAALKNFTPSETLTTDIATKGPFPTSRDPLPSVPPTTTNSSRGTNSTLAKITTSAKTTMKPPTATPTTARTRPTTDMSAGENGGFLLLRLSVASPEDLTDPRVAERLMQQMERSLALSPRLECSGVISAHCKLHLLGSRDSPASAS

SEQ ID NO: 83235 - protein, 198 aa, Homo sapiens
MFPTGFSSPSPSAAAAAQEVRSATDGNTSTTPPTSAKKRKLNSSSSSSSNSSNEREDFDSTSSSSSTPPLQPRDSASPSTSSFCLGVSVAASSHVPIQKKLRFEDTLEFVGFDAKMAEESSSSSSSSSPTAATSQQQQLKNKSILISSVASVHHANGLAKSSTTVSSFANSKPGSAKKLVIKNFKAIQSIGEKPHLQF

SEQ ID NO: 83236 - protein, 85 aa, Homo sapiens
MPLFFRKRKPSEEARKRLEYQMCLAKEAGADDILDISKYSIWSFCNMQSSAEEGADRPHESPHFPASQILQPPESGNHQGSRSPR

SEQ ID NO: 83237 - protein, 16 aa, Homo sapiens
  MOD_RES (1)..(1): Any amino acid
XYFDYWGQGTLVTVSS

SEQ ID NO: 83238 - protein, 67 aa, Homo sapiens
PGTIKSRDMSWKRHHLIPETFGVKRRRKRGPVESDPLRGEPEGASRAGGDQNRPAGLRLGCPWNYLH

SEQ ID NO: 83239 - protein, 39 aa, Homo sapiens
  MOD_RES (1)..(1): Any amino acid
XLSSNPPLATILIPPHARIQAAASTPTNATAASGPQIWY

SEQ ID NO: 83240 - protein, 12 aa, Homo sapiens
  MOD_RES (1)..(1): Any amino acid
XINVTTAVSECS

SEQ ID NO: 83241 - protein, 49 aa, Homo sapiens
  MOD_RES (1)..(1): Any amino acid
XVTSIADSLIHHHLLDYVAWILLCTYPFRFGFTFIYLDPFLAKYPLGPK

SEQ ID NO: 83242 - protein, 141 aa, Homo sapiens; identical to SEQ ID NO: 62519
  MOD_RES (1)..(1): Any amino acid

SEQ ID NO: 83243 - protein, 157 aa, Homo sapiens
  MOD_RES (1)..(1): Any amino acid
XLQQCSITKLGCRYLSEALQEACSLTNLDLSINQIARGLWILCQALENPNCNLKHLRLWSCSLMPFYCQHLGSALLSNQKLETLDLGQNHLWKSGIIKLFGVLRQRTGSLKILRLKTYETNLEIKKLLEEVKEKNPKLTIDCNASGATAPPCCDFFC

SEQ ID NO: 83244 - protein, 261 aa, Homo sapiens
  MOD_RES (1)..(1): Any amino acid
XRVMAPRTLILLLSGALALTETWACSHSMRYFYTAVSRPGRGEPRFIAVGYVDDTQFVQFDSDAASPRGEPRAPWVEQEGPEYWDRETQKYKRQAQTDRVNLRKLRGYYNQSEAGSHTLQRMYGCDLGPDGRLLRGYNQFAYDGKDYIALNEDLRSWTAADKAAQITQRKWEAAREAEQRRAYLEGTCVEWLRRYLENGKKTLQRAEHPKTHVTHHPVSDHEASRRWNLPEVGSCGGAFWRRAEIHVPCAARGAARAPHPE

SEQ ID NO: 83245 - protein, 41 aa, Homo sapiens
MLRLFETFLETAPQLTLVLAIMLQSGRAEYYQCTGLLGDPK

SEQ ID NO: 83246 - protein, 189 aa, Homo sapiens
MNSFSTIPPGEDSKDVAAPHRQPLTSSERIDKQIRYILDGISALRKETCNKSNMCESSKEALAENNLNLPKMAEKDGCFQSGFNEETCLVKIITGLLEFEVYLEYLQNRFESSEEQARAVQMSTKVLIQFLQKKAKNLDAITTPDPTTNASLLTKLQAQNQWLQDMTTHLILRSFKEFLQSSLRALRQM

SEQ ID NO: 83247 - protein, 31 aa, Homo sapiens
  MOD_RES (1)..(1): Any amino acid
XLVDLEPGTMDSVRSGPFGQLFRPDNFIFGV

SEQ ID NO: 83248 - protein, 182 aa, Homo sapiens
  MOD_RES (1)..(1): Any amino acid
XKALPRRLVGLASLRAVSTSSMGTLPKRVKIVEVGPRDGLQNEKVTKKFYSMGCYEISLGDTIGVGTPGIMKDMLSAVMQEVPLAALAVHCHDTYGQALANTLMALQMGVSVVDSSVAGLGGCPYAQGASGNLATEDLVYMLEGLGIHTGVNLQKLLEAGNFICQALNRKTSSKVAQATCKL

SEQ ID NO: 83249 - protein, 41 aa, Homo sapiens
MAGPAAAFRRLGALSGAAALGFASYGAHGAQFPDAYGKEAA

SEQ ID NO: 83250 - protein, 36 aa, Homo sapiens
MAQLEACVRSIQLDGLVWGASKLVPVGYGIRKLQIQ

SEQ ID NO: 83251 - protein, 322 aa, Homo sapiens
KSRISKKPQVPKKPREWKNPESQRGLSGTQDPFPGPAPVPVEVVQKFCRIDKSRKLPHSKAKTRSRLEVAEAEEEETSIKAARSELLLAEEPGFLEGEDGEDTAKICQADIVEAVDIASAAKFGPYRLNYSRTGRHLAFGGRRGHVAALDWVTKKLMCEINVMEAVRDIRFLHSEALLAVAQNRWLHIYDNQGIELHCIRRCDRVTRLEFLPFHFLLATASETGFLTYLDVSVGKIVAALNARAGRLDVMSQNPYNAVIHLGHSNGTVSLWSPAMKEPLAKILCHRGGVRAVAVDSTGTYMATSGLDHQLKIFDLRGTYQPL

SEQ ID NO: 83252 - protein, 57 aa, Homo sapiens
MSGSDGGLEEEPELSITLTLRMLMHGKEVGSIIGKKGETVKRIREQCPDHHLRGLLP

SEQ ID NO: 83253 - protein, 305 aa, Homo sapiens
MKVLNELYSVMKTYHMYNADSISAQSKLKEAEKQEEKQIGKSVKQEDRQTPRSPDSTANVRIEEKHVRRSSVKKIEKMKEKRQAKYTENKLKAIKARNEYLLALEATNASVFKYYIHDLSDLIDCCDLGYHASLNRALRTFLSAELNLEQSKHEGLDAIENAVENLDATSDKQRLMEMYNNVFCPPMKFEFQPHMGDMASQLCAQQPVQSELLQRCQQLQSRLSTLKIENEEVKKTMEATLQTIQDIVTVEDFDVSDCFQYSNSMESVKSTVSETFMSKPSIAKRRANQQETEQFYFTVRECYGF

SEQ ID NO: 83254 - protein, 53 aa, Homo sapiens
MKENYCLQAALVCLGMLCHSHAFAPERRGHLRPSFHGHHEKGKEGQVLQRSKR

SEQ ID NO: 83255 - protein, 819 aa, Homo sapiens
MALIMEPVSKWSPSQVVDWMKGLDDCLQQYIKNFEREKISGDQLLRITHQELEDLGVSRIGHQELILEAVDLLCALNYGLETENLKTLSHKLNASAKNLQNFITGRRRSGHYDGRTSRKLPNDFLTSVVDLIGAAKSLLAWLDRSPFAAVTDYSVTRNNVIQLCLELTTIVQQDCTVYETENKILHVCKTLSGVCDHIISLSSDPLVSQSAHLEVIQLANIKPSEGLGMYIKSTYDGLHVITGTTENSPADRCKKIHAGDEVIQVNHQTVPLIPRSPTSSVATPSSTISTPTKRDSSALQDLYIPPPPAEPYIPRDEKGNLPCEDLRGHMVGKPVHKGSESPNSFLDQEYRKRFNIVEEDTVLYCYEYEKGRSSSQGRRESTPTYENSLLRYMSNEKIAQEEYMFQRNSKKDTGKKSKKKGDKSNSPTHYSLLPSLQMDALRQDIMGTPVPETTLYHTFQQSSLQHKSKKKNKGPIAGKSKRRISCKDLGRGDCEGWLWKKKDAKSYFSQKWKKYWFVLKDASLYWYINEEDEKAEGFISLPEFKIDRASECRKKYAFKACHPKIKSFYFAAEHLDDMNRWLNRINMLTAGYAERERIKQEQDYWSESDKEEADTPSTPKQDSPPPPYDTYPRPPSMSCASPYVEAKHSRLSSTETSQSQSSHEEFRQEVTGSSAVSPIRKTASQRRSWQDLIETPLTSSGLHYLQTLPLEDSVFSDSAAISPEHRRQSTLPTQKCHLQDHYGPYPLAESERMQVLNGNGGKPRSFTLPRDSGFNHCCLNAPVSACDPQDDVQPPEVEEEEEEEEEEGEAAGENIGEKS

SEQ ID NO: 83256 - protein, 114 aa, Homo sapiens
APRPKRATASALGTESPRFLDRPDFFDYPDSDQARLLAVAQFIGEKPIVFINSGSSPGLFHHILVGLLVVAFFFLLFQFCTHIIVGGKEKTRRCPQTKRHRYSAKISPGQAAKR

SEQ ID NO: 83257 - protein, 215 aa, Homo sapiens
DDMEHKTLKITDFGLAREWHKTTQMSAAGTYAWMAPEVIKASTFSKGSDVWSFGVLLWELLTGEVPYRGIDCLAVAYGVAVNKLTLPIPSTCPEPFAQLMAGRLEARDPGSLRRAASQGKGTTEPRGGADASGARAAVTGGAAAAARAPAGPVGARGVRARADAAAAAGGPRATARAPPPRDIQAQQAPGARRRRAYQHATRLQAPHHRAGLTRP

SEQ ID NO: 83258 - protein, 1010 aa, Homo sapiens
MLLTLIILLPVVSKFSFVSLSAPQHWSCPEGTLAGNGNSTCVGPAPFLIFSHGNSIFRIDTEGTNYEQLVVDAGVSVIMDFHYNEKRIYWVDLERQLLQRVFLNGSRQERVCNIEKNVSGMAINWINEEVIWSNQQEGIITVTDMKGNNSHILLSALKYPANVAVDPVERFIFWSSEVAGSLYRADLDGVGVKALLETSEKITAVSLDVLDKRLFWIQYNREGSNSLICSCDYDGGSVHISKHPTQHNLFAMSLFGDRIFYSTWKMKTIWIANKHTGKDMVRINLHSSFVPLGELKVVHPLAQPKAEDDTWEPDVNECAFWNHGCTLGCKNTPGSYYCTCPVGFVLLPDGKRCHQLVSCPRNVSECSHDCVLTSEGPLCFCPEGSVLERDGKTCSGCSSPDNGGCSQLCVPLSPVSWECDCFPGYDLQLDEKSCAASGPQPFLLFANSQDIRHMHFDGTDYGTLLSQQMGMVYALDHDPVENKIYFAHTALKWIERANMDGSQRERLIEEGVDVPEGLAVDWIGRRFYWTDRGKSLIGRSDLNGKRSKIITKENISQPRGIAVHPMAKRLFWTDTGINPRIESSSLQGLGRLVIASSDLIWPSGITIDFLTDKLYWCDAKQSVIEMANLDGSKRRRLTQNDVGHPFAVAVFEDYVWFSDWAMPSVMRVNKRTGKDRVRLQGSMLKPSSLVVVHPLAKPGADPCLYQNGGCEHICKKRLGTAWCSCREGFMKASDGKTCLALDGHQLLAGGEVDLKNQVTPLDILSKTRVSEDNITESQHMLVAEIMVSDIDECQLGEHSCGENASCTNTEGGYTCMCAGRLSEPGLICPDSTPPPHLREDDHHYSVRNSDSECPLSHDGYCLHDGVCMYIEALDKYACNCVVGYIGERCQYRDLKWWELRHAGHGQQQKVIVVAVCVVVLVMLLLLSLWGAHYYRTQKLLSKNPKNPYEESSRDVRSRRPADTEDGMSSCPQPWGQCNQLHGGRSPSYVEWAQSKAAGFQYPVIRAPVPR

SEQ ID NO: 83259 - protein, 293 aa, Homo sapiens
  MOD_RES (1)..(1): Any amino acid
XINDLEHSVHHWTINKEIKETEFKGIPISYLEIHPNGKRLLIHTKDSTLRIMDLRILVARKFVGAANYREKIHSTLTPCGTFLFAGSEDGIVYVWNPETGEQVAMYSDLPFKSPIRDISYHPFENMVAFCAFGQNEPILLYIYDFHVAQQEAEMFKRYNGTFPLPGIHQSQDALCTCPKLPHQGSFQIDEFVHTESSSTKMQLVKQRLETVTEVIRSCAAKVNKNLSFTSPPAVSSQQSKLKQSNMLTAQEILHQFGFTQTGIISIERKPCNHQVDTAPTWLFMTTQRIDQMN

SEQ ID NO: 83260 - protein, 220 aa, Homo sapiens
MGASGGQGYGSLSAVPKVSACLRARSHPPGAGLRAGEPPQLSTRACTSQPGCFWGAKRRLLKASSLQVTSFPVVQLHMNRTAMRASQKDFENSMNQVKLLKKDPGNEVKLKLYALYKQATEGPCNMPKPGVFDLINKAKWDAWNALGSLPKEAARQNYVDLVSSLSPSLESSSQVEPGTDRKSTGFETLVVTSEDGITKIMFNRPKKKNAINTEMYHEIM

SEQ ID NO: 83261 - protein, 150 aa, Homo sapiens
MNLWLLACLVAGFLGAWAPAVHTQGVFEDCCLAYHYPIGWAVLRRAWTYRIQEVSGSCNLPAAIFYLPKRHRKVCGNPKSREVQRAMKLLDARNKVFAKLHHNTQTFQAGPHAVKKLSSGNSKLSSSKFSNPISSSKRNVSLLISANSGK

SEQ ID NO: 83262 - protein, 391 aa, Homo sapiens
MDRRKKPLDVTASSLVDLKAELFRKQEEFKQEKLLKDSGVFGKPKTTNKKPSIWSKQNVGVSNRAEKDAEQKIEEQKTLDKAREKLEEKAKLYEKMTKGDFIDEEVEDMYLVDFTQKIIDKRKEMEASGAHRDSQKAGERDDDEENLPEGEIPPPQDPSEEWVDYVDSLGRSRRCMRKDLPDLLEMDKNLQGRLFISPANEKTLLSEDMRKELQRQQWEEEEREALKRPMGPVHYEDIRENDGDVIGPLPPEPEAVPTPRPAAQSSKVEVIVQERKDTKPGVPHIREWDRGKEFSFGYWSKRQSDLRAERDPEFAPPSDYFVGQKRTGFSSSQAWSRPGPAQSDPGQCPDQSHGPSPEHTSPTPAPDNPPQAPTVTFKTLDDMISYYKQVT

SEQ ID NO: 83263 - protein, 79 aa, Homo sapiens
MSSKQATSPFACAADGEDAMTQDLTSREKEEGSDQHVASHLPLHPIMHNKPHSEELPTLVSTIQQDADWDSVLSSQQRM

SEQ ID NO: 83264 - protein, 110 aa, Homo sapiens
MESVPGDYSKRVYQGVRVKHTVKDLLAEKRSGQTSNSRLNVRRSRQVTTVSEDLSYLTQTSTTVNSFQMTSTPPAWGSRFPVSPPQGRAMRLSWSPTSPRSPTETTGLRR

SEQ ID NO: 83265 - protein, 1330 aa, Homo sapiens
MMEIQMDEGGGVVVYQDDYCSGSVMSERVSGLAGSIYREFERLIHCYDEEVVKELMPLVVNVLENLDSVLSENQEHEVELELLREDNEQLLTQYEREKALRRQAEEKFIEFEDALEQEKKELQIQVEHYEFQTRQLELKAKNYADQISRLEERESEMKKEYNALHQRHTEMIQTYVEHIERSKMQQVGGNSQTESSLPGRRKERPTSLNVFPLADGTVRAQIGGKLVPAGDHWHLSDLGQLQSSSSYQCPQDEMSESGQSSAAATPSTTGTKSNTPTSSVPSAAVTPLNESLQPLGDYGVGSKNSKRAREKRDSRNMEVQVTQEMRNVSIGMGSSDEWSDVQDIIDSTPELDMCPETRLDRTGSSPTQGIVNKAFGINTDSLYHELSTAGSEVIGDVDEGADLLGEFSGMGKEVGNLLLENSQLLETKNALNVVKNDLIAKVDQLSGEQEVLRGELEAAKQAKVKLENRIKELEEELKRVKSEAIIARREPKEEAEDVSSYLCTESDKIPMAQRRRFTRVEMARVLMERNQYKERLMELQEAVRWTEMIRASREHPSVQEKKKSTIWQFFSRLFSSSSSPPPAKRPYPSVNIHYKSPTTAGFSQRRNHAMCPISAGSRPLEFFPDDDCTSSARREQKREQYRQVREHVRNDDGRLQACGWSLPAKYKQLSPNGGQEDTRMKNVPVPVYCRPLVEKDPTMKLWCAAGVNLSGWRPNEDDAGNGVKPAPGRDPLTCDREGDGEPKSAHTSPEKKKAKELPEMDATSSRVWILTSTLTTSKVVIIDANQPGTVVDQFTVCNAHVLCISSIPAASDSDYPPGEMFLDSDVNPEDPGADGVLAGITLVGCATRCNVPRSNCSSRGDTPVLDKGQGEVATIANGKVNPSQSTEEATEATEVPDPGPSEPETATLRPGPLTEHVFTDPAPTPSSGPQPGSENGPEPDSSSTRPEPEPSGDPTGAGSSAAPTMWLGAQNGWLYVHSAVANWKKCLHSIKLKDSVLSLVHVKGRVLVALADGTLAIFHRGEDGQWDLSNYHLMDLGHPHHSIRCMAVVYDRVWCGYKNKVHVIQPKTMQIEKSFDAHPRRESQVRQLAWIGDGVWVSIRLDSTLRLYHAHTHQHLQDVDIEPYVSKMLGTGKLGFSFVRITALLVAGSRLWVGTGNGVVISIPLTETVVLHRGQLLGLRANKTSPTSGEGARPGGIIHVYGDDSSDRAASSFIPYCSMAQAQLCFHGHRDAVKFFVSVPGNVLATLNGSVLDSPAEGPGPAAPASEVEGQKLRNVLVLSGGEGYIDFRIGDGEDDETEEGAGDMSQVKPVLSKAERSHIIVWQVSYTPE

SEQ ID NO: 83266 - protein, 164 aa, Homo sapiens
MAETVWSTDTGEAVYRSRDPVRNLRLRVHLQRITSSNFLHYQPAAELGKDLIDLATFRPQPTASGHRPEEDEEEEIVIGWQEKLFSQFEVDLYQNETACQSPLDYQYRQEILKLENSGGKKNRRIFTYTDSDRYTNLEEGGRHPQVTHRHLGALRRVCQEQPRH

SEQ ID NO: 83267 - protein, 157 aa, Homo sapiens
MEILGAVILGFGVWILADKSSFISVLQTSSSSLRMGAYVFIGVGAVTMLMGFLGCIGAVNEVRCLLGLYFAFLLLILIAQVTAGALFYFNMGKLKQEMGGIVTELIRDYNSSREDSLQDAWDYVQAQVKCCGWVSFYNWTDNAELMNRPEVTYPCSC

SEQ ID NO: 83268 - protein, 157 aa, Homo sapiens
  MOD_RES (1)..(1): Any amino acid
XVFLDPFDACGLIVAKYFSLPSVVFARGIFCHYLEEGAQCPAPLSYVPRLLLGFSDAMTFKERVWNHIMHLEEHLFCPYFFKNVLEIASEILQTPVTAYDLYSHTSIWLLRTDFVLEYPKPVMPNMIFIGGINCHQGKPVPMGQDLLLSPHWNMSQA

SEQ ID NO: 83269 - protein, 327 aa, Homo sapiens
MFYFRGCGRWVAVSFTKQQFPLARLSSDSAAPRTPHFDVIVIGGGHAGTEAATAAARCGSRTLLLTHRVDTIGQMSCNPSFGGIGKGHLMREVDALDGLCSRICDQSGVHYKVLNRRKGPAVWGLRAQIDRKLYKQNMQKEILNTPLLTVQEGAVEDLILTEPEPEHTGKCRVSGVVLVDGSTVYAESVILTTGTFLRGMIVIGLETHPAGRLGDQPSIGLAQTLEKLGFVVGRLKTGTPPRIAKESINFSILNKHIPDNPSIPFSFTNETVWIKPEDQLPCYLTHTNPRVDEIVLKNLHLNSHVKETTRGPRFAFSKPSTSGLVGT

SEQ ID NO: 83270 - protein, 919 aa, Homo sapiens
MKFAYRFSNLLGTVYRRGNLNFTCNGNSVISPVGNRVTVFDLKNNKSDTLPLATRYNVKCVGLSPDGRLAIIVDEGGDALLVSLVCRSVLHHFHFKGSVHSVSFSPDGRKFVVTKGNIAQMYHAPGKKREFNAFVLDKTYFGPYDETTCIDWTDDSRCFVVGSKDMSTWVFGAERWDNLIYYALGGHKDAIVACFFESNSLDLYSLSQDGVLCMWQCDTPPEGLRLKPPAGWKADLLQREEEEEEEEDQEGDRETTIRGKATPAEEEKTGKVKYSRLAKYFFNKEGDFNNLTAAAFHKKSHLLVTGFASGIFHLHELPEFNLIHSLSISDQSIASVAINSSGDWIAFGCSGLGQLLVWEWQSESYVLKQQGHFNSMVALAYSPDGQYIVTGGDDGKVKVWNTLSGFCFVTFTEHSSGVTGVTFTATGYVVVTSSMDGTVRAFDLHRYRNFRTFTSPRPTQFSCVAVDASGEIVSAGAQDSFEIFVWSMQTGRLLDVLSGHEGPISGLCFNPMKSVLASASWDKTVRLWDMFDSWRTKETLALTSDALAVTFRPDGAELAVATLNSQITFWDPENAVQTGSIEGRHDLKTGRKELDKITAKHAAKGKAFTALCYSADGHSILAGGMSKFVCIYHVREQILMKRFEISCNLSLDAMEEFLNRRKMTEFGNLALIDQDAGQEDGVAIPLPGVRKGDMSSRHFKPEIRVTSLRFSPTGRCWAATTTEGLLIYSLDTRVLFDPFELDTSVTPGRVREALRQQDFTRAILMALRLNESKLVQEALEAVPRGEIEVVTSSLPELYVEKVLEFLASSFEVSRHLEFYLLWTHKLLMLHGQKLKSRAGTLLPVIQFLQKSIQRHLDDLSKLCSWNHYNMQYALAVSKQRGTKRSLDPLGSEEEAEASEDDSLHLLGGGGRDSEEEMLA

SEQ ID NO: 83271 - protein, 2568 aa, Homo sapiens
MTTLLWVFVTLRVITAAVTVETSDHDNSLSVSIPQPSPLRVLLGTSLTIPCYFIDPMHPVTTAPSTAPLAPRIKWSRVSKEKEVVLLVATEGRVRVNSAYQDKVSLPNYPAIPSDATLEVQSLRSNDSGVYRCEVMHGIEDSEATLEVVVKGIVFHYRAISTRYTLDFDRAQRACLQNSAIIATPEQLQAAYEDGFHQCDAGWLADQTVRYPIHTPREGCYGDKDEFPGVRTYGIRDTNETYDVYCFAEEMEGEVFYATSPEKFTFQEAANECRRLGARLATTGQLYLAWQAGMDMCSAGWLADRSVRYPISKARPNCGGNLLGVRTVYVHANQTGYPDPSSRYDAICYTGEDFVDIPENFFGVGGEEDITVQTVTWPDMELPLPRNITEGEARGSVILTVKPIFEVSPSPLEPEEPFTFAPEIGATAFAEVENETGEATRPWGFPTPGLGPATAFTSEDLVVQVTAVPGQPHLPGGVVFHYRPGPTRYSLTFEEAQQACLRTGAVIASPEQLQAAYEAGYEQCDAGWLRDQTVRYPIVSPRTPCVGDKDSSPGVRTYGVRPSTETYDVYCFVDRLEGEVFFATRLEQFTFQEALEFCESHNATLATTGQLYAAWSRGLDKCYAGWLADGSLRYPIVTPRPACGGDKPGVRTVYLYPNQTGLPDPLSRHHAFCFRGISAVPSPGEEEGGTPTSPSGVEEWIVTQVVPGVAAVPVEEETTAVPSGETTAILEFTTEPENQTEWEPAYTPVGTSPLPGILPTWPPTGAATEESTEGPSATEVPSASEEPSPSEVPFPSEEPSPSEEPFPSVRPFPSVELFPSEEPFPSKEPSPSEEPSASEEPYTPSPPVPSWTELPSSGEESGAPDVSGDFTGSGDVSGHLDFSGQLSGDRASGLPSGDLDSSGLTSTVGSGLPVESGLPSGDEERIEWPSTPTVGELPSGAEILEGSASGVGDLSGLPSGEVLETSASGVGDLSGLPSGEVLETTAPGVEDISGLPSGEVLETTAPGVEDISGLPSGEVLETTAPGVEDISGLPSGEVLETTAPGVEDISGLPSGEVLETTAPGVEDISGLPSGEVLETTAPGVEDISGLPSGEVLETAAPGVEDISGLPSGEVLETAAPGVEDISGLPSGEVLETAAPGVEDISGLPSGEVLETAAPGVEDISGLPSGEVLETAAPGVEDISGLPSGEVLETAAPGVEDISGLPSGEVLETAAPGVEDISGLPSGEVLETAAPGVEDISGLPSGEVLETAAPGVEDISGLPSGEVLETAAPGVEDISGLPSGEVLETAAPGVEDISGLPSGEVLETAAPGVEDISGLPSGEVLETAAPGVEDISGLPSGEVLETAAPGVEDISGLPSGEVLETAAPGVEDISGLPSGEVLETAAPGVEDISGLPSGEVLETTAPGVEEISGLPSGEVLETTAPGVDEISGLPSGEVLETTAPGVEEISGLPSGEVLETSTSAVGDLSGLPSGGEVLEISVSGVEDISGLPSGEVVETSASGIEDVSELPSGEGLETSASGVEDLSRLPSGEEVLEISASGFGDLSGLPSGGEGLETSASEVGTDLSGLPSGREGLETSASGAEDLSGLPSGKEDLVGSASGDLDLGKLPSGTLGSGQAPETSGLPSGFSGEYSGVDLGSGPPSGLPDFSGLPSGFPTVSLVDSTLVEVVTASTASELEGRGTIGISGAGEISGLPSSELDISGRASGLPSGTELSGQASGSPDVSGEIPGLFGVSGQPSGFPDTSGETSGVTELSGLSSGQPGISGEASGVLYGTSQPFGITDLSGETSGVPDLSGQPSGLPGFSGATSGVPDLVSGTTSGSGESSGITFVDTSLVEVAPTTFKEEEGLGSVELSGLPSGEADLSGKSGMVDVSGQFSGTVDSSGFTSQTPEFSGLPSGIAEVSGESSRAEIGSSLPSGAYYGSGTPSSFPTVSLVDRTLVESVTQAPTAQEAGEGPSGILELSGAHSGAPDMSGEHSGFLDLSGLQSGLIEPSGEPPGTPYFSGDFASTTNVSGESSVAMGTSGEASGLPEVTLITSEFVEGVTEPTISQELGQRPPVTHTPQLFESSGKVSTAGDISGATPVLPGSGVEVSSVPESSSETSAYPEAGFGASAAPEASREDSGSPDLSETTSAFHEANLERSSGLGVSGSTLTFQEGEASAAPEVSGESTTTSDVGTEAPGLPSATPTASGDRTEISGDLSGHTSQLGVVISTSIPESEWTQQTQRPAETHLEIESSSLLYSGEETHTVETATSPTDASIPASPEWKRESESTAAAPARSCAEEPCGAGTCKETEGHVICLCPPGYTGEHCNIDIDECLSSPCLNGATCVDAIDSFTCLCLPSYEGDLCEIDQEVCEEGWNKYQGHCYRHFPDRETWVDAERRCREQQSHLSSIVTPEEQEFVNNNAQDYQWIGLNDRTIEGDFRWSDGHPMQFENWRPNQPDNFFAAGEDCVVMIWHEKGEWNDVPCNYHLPFTCKKGTVACGEPPVVEHARTFGQKKDRYEINSLVRYQCTEGFVQRHMPTIRCQPSGHWEEPQITCTDPTTYKRRLQKRSSRHPRRSRPSTAH

SEQ ID NO: 83272 - protein, 134 aa, Homo sapiens
MGENEDEKQAQAGQVFENFVQASTCKGTLQAFNILTRHLDLDPLDHRNFYSKLKSKVTTWKAKALWYKLDKRGSHKEYKRGKSCTNTKCLIVGGGPCGLRTAIELAYLGAKVVVVEKRDSFSRNNVLHLWPFTI

SEQ ID NO: 83273 - protein, 69 aa, Homo sapiens
MSENAVRQNGQLVRNDSLVTPSPQQARVCPPHMLPEDGANLSSARGILSLIQSSTRRAYQQILDVLDEN

SEQ ID NO: 83274 - protein, 226 aa, Homo sapiens
MSDPEMGWVPEPPTMTLGASRVELRVSCHGLLDRDTLTKPHPCVLLKLYSDEQWVEVERTEVLRSCSSPVFSRVLALEYFFEEKQPLQFHVFDAEDGATSPRNDTFLGSTECTLGQIVSQTKVTKPLLLKNGKTAGKSTITIVAEEVSGTNDYVQLTFRAYKLDNKDLFSKSDPFMEIYKTNEDQSDQLVWRTEVVKNNLNPSWEPFRLSLHSLCSCDVHRPLKFL

SEQ ID NO: 83275 - protein, 459 aa, Homo sapiens
PKTTKGLPQTAVCNLNITLPAHKKETESDQDDEIEKTDRRQSFASLALRKRYSYLTEPGMSPQSPCERTDIRMAIVADHLGLSWTELARELNFSVDEINQIRVENPNSLISQSFMLLKKWVTRDGKNATTDALTSVLTKINRIDIVTLLEGPIFDYGNISGTRSFADENNVFHDPVDGYPSLQVELETPTGLHYTPPTPFQQDDYFSDISSIESPLRTPSRLSDGLVPSQGNIEHSADGPPVVTAEDASLEDSKLEDSVPLTEMPEAVDVDESQLENVCLSWQNETSSGNLESCAQARRVTGGLLDRLDDSPDQCRDSITSYLKGEAGKFEANGSHTEITPEAKTKSYFPESQNDVGKQSTKETLKPKIHGSGHVEEPASPLAAYQKSLEETSKLIIEETKPCVPVSMKKMSRTSPADGKPRLSLHEEEGSSGSEQKQGEGFKVKTKKEIRHVEKKSHS

SEQ ID NO: 83276 - protein, 292 aa, Homo sapiens
MKVLLLKDAKEDDCGQDPYIRELGLYGLEATLIPVLSFEFLSLPSFSEKLSHPEDYGGLIFTSPRAVEAAELCLEQNNKTEVWERSLKEKWNAKSVYVVGNATASLVSKIGLDTEGETCGNAEKLAEYICSRESSALPLLFPCGNLKREILPKALKDKGIAMESITVYQTVAHPGIQGNLNSYYSQQGVPASITFFSPSGLTYSLKHIQELSGDNIDQIKTQGPQHPKKNCLQLEPLRKDCTDTAVMFAAIGPTTARALAAQGLPVSCTAESPTPQALATGIRKALQPHGCC

SEQ ID NO: 83277 - protein, 455 aa, Homo sapiens
MSLTVVSMACVGFFLLQGAWPLMGGQDKPFLSARPSTVVPRGGHVALQCHYRRGFNNFMLYKEDRSHVPIFHGRIFQESFIMGPVTPAHAGTYRCRGSRPHSLTGWSTPSNPLVIMVTGNHRKPSLLAHPGPLLKSGETVILQCWSDVMFEHFFLHREGISEDPSRLVGQIHDGVSKANFSIGPLMPVLAGTYRCYGSVPHSPYQLSAPSDPLDIVITGLYEKPSLSAQPGPTVQAGENVTLSCSSWSSYDIYHLSRGGEAHERRLRAVPKVNRTFQADFPLGPATHGGTYRCFGSFRALPCVWSNSSDPLLVSVTGNPSSSWPSPTEPSSKSGICRHLHVLIGTSVVIFLFILLLFFLLYRWCSNKKNAAVMDQEPAGDRTVNRQDSDEQDPQEVMYAQLDHCVFIQRKISRPSQRPKTPLTDTSVYTELPNAEPRSKVVSCPRAPQSGLEGVF

SEQ ID NO: 83278 - protein, 137 aa, Homo sapiens
MGTKFTVYDRGICPMKGRGLVGAAHTRQELAAISYETNVLGFKGPRKMSVIIPGMTLNHKQIPYQPQNNHDSLLSRWQNRTMENLVELHNKAPVWNSDTQSYVLNFRGRVTQASVKNFQIVHKNDPDYIVMQFGRVA

SEQ ID NO: 83279 - protein, 126 aa, Homo sapiens
MDSPKHQSDPSEDEDERSSQKLHSTSQNINLGPSGNPHAKPTDFDFLKVIGKGSFGKVLLAKRKLDGKFYAVKVLQKKIVLNRKEQKHIMAERNVLLKNVKHPFLVGLHYSFQTTEKLYFVLDFVN

SEQ ID NO: 83280 - protein, 126 aa, Homo sapiens
MDPSLLRERELFKKRALSTPVVEKRSASSESSSSSSKKKKTKVEHGGSSGSKQNSDHSNGSFNLKALSGSSGYKFGVLAKIVNYMKTRHQRGDTHPLTLDEILDETQHLDIGLKQKQWLMTEALVN

SEQ ID NO: 83281 - protein, 116 aa, Homo sapiens
MSGALDVLQMKEEDVLKFLAAGTHLGGTNLDFQMEQYIYKRKSDGIYIINLKRTWEKLLLAARAIVAIENPADVSVISSRNTGQRAVLKFAAATGATPIAGRFTPGTFTNQIQAAF

SEQ ID NO: 83282 - protein, 49 aa, Homo sapiens
LVHDKELAAEDEQVFLMKQQSLLAKQPATPTRASDKRLCCQMFRKNWIE

SEQ ID NO: 83283 - protein, 213 aa, Homo sapiens
  MOD_RES (1)..(1): Any amino acid
XDLSSASEDDFDSEDSEQELKGYACRHCFTTTSKDWHHGGRENILLCTDCRIHFKKYGELPPIEKPVDPPPFMFKPVKEEDDGLSGKHSMRTRRSRGSVSPLGPWGSWQLLQFPGMCGGLSLPGGGSESLVYQTKSWRGAALPEAVACLWAGKSSLFSPSRGPRVASCSGFCSKLLASGSVQALQGPSCSPRLLLVVSLPLYQISAILNLQAL

SEQ ID NO: 83284 - protein, 46 aa, Homo sapiens
VIPLQCSCPVDFEFYITLIQSHQAFAIEPTSGTRSIIYAHLPGILC

SEQ ID NO: 83285 - protein, 1372 aa, Homo sapiens
MDPSDFPSPFDPLTLPEKPLAGDLPVDMEFGEDLLESQTAPTRGWAPPGPSPSSGALDLLDTPAGLEKDPGVLDGATELLGLGGLLYKAPSPPEVDHGPEGTLAWDAGDQTLEPGPGGQTPEVVPPDPGAGANSCSPEGLLEPLAPDSPITLQSPHIEEEETTSIATARRGSPGQEEELPQGQPQSPNAPPSPSVGETLGDGINSSQTKPGGSSPPAHPSLPGDGLTAKASEKPPERVQKRSERVRRAEPPKPEVVDSTESIPVSDEDSDAMVDDPNDEDFVPFRPRRSPRMSLRSSVSQRAGRSAVGTKMTCAHCRTPLQKGQTAYQRKGLPQLFCSSSCLTTFSKKPSGKKTCTFCKKEIWNTKDSVVAQTGSGGSFHEFCTSVCLSLYEAQQQRPIPQSGDPADATRCSICQKTGEVLHEVSNGSVVHRLCSDSCFSKFRANKGLKTNCCDQCGAYIYTKTGSPGPELLFHEGQQKRFCNTTCLGAYKKKNTRVYPCVWCKTLCKNFEMLSHVDRNGKTSLFCSLCCTTSYKVKQAGLTGPPRPCSFCRRSLSDPCYYNKVDRTVYQFCSPSCWTKFQRTSPEGGIHLSCHYCHSLFSGKPEVLDWQDQVFQFCCRDCCEDFKRLRGVVSQCEHCRQEKLLHEKLRFSGVEKSFCSEGCVLLYKQDFTKKLGLCCITCTYCSQTCQRGVTEQLDGSTWDFCSEDCKSKYLLWYCKAARCHACKRQGKLLETIHWRGQIRHFCNQQCLLRFYSQQNQPNLDTQSGPESLLNSQSPESKPQTPSQTKVENSNTVRTPEENGNLGKIPVKTRSAPTAPTPPPPPPPATPRKNKAAMCKPLMQNRGVSCKVEMKSKGSQTEEWKPQVIVLPIPVPIFVPVPMHLYCQKVPVPFSMPIPVPVPMFLPTTLESTDKIVETIEELKVKIPSNPLEADILAMAEMIAEAEELDKASSDLCDLVSNQSAEGLLEDCDLFGPARDDVLAMAVKMANVLDEPGQDLEADFPKNPLDINPSVDFLFDCGLVGPEDVSTEQDLPRTMRKGQKRLVLSESCSRDSMSSQPSCTGLNYSYGVNAWKCWVQSKYANGETSKGDELRFGPKPMRIKEDILACSAAELNYGLAQFVREITRPNGERYEPDSIYYLCLGIQQYLLENNRMVNIFTDLYYLTFVQELNKSLSTWQPTLLPNNTVFSRVEEEHLWECKQLGVYSPFVLLNTLMFFNTKFFGLQTAEEHMQLSFTNVVRQSRKCTTPRGTTKVVSIRYYAPVRQRKGRDTGPGKRKREDEAPILEQRENRMNPLRCPVKFYEFYLSKCPESLRTRNDVFYLQPERSCIAESPLWYSVIPMDRSMLESMLNRILAVREIYEELGRPGEEDLD

SEQ ID NO: 83286 - protein, 134 aa, Homo sapiens
  MOD_RES (1)..(1): Any amino acid
XPRPCLHSATPSTPQTDPTGPEGPHLGQSRLFLLCHKEALMKRNFCVPPGASPEVPKPALSFYVLGSWLGGTQRKEGTGWGLPEPQGNDDNDQKVHLIFFGSSVRWFEFLHPGQVYRLIAPGPAFHRFLGVFLR

SEQ ID NO: 83287 - protein, 148 aa, Homo sapiens
MYSHFAQDLWSEQSIKDSFQKVILRRYEKCRHDNLQLKKGCESVDECPVHKRGYNGLKQCLATTQRKIFQCDEYVKFLHKFSNSNKHKIRDTGKKSFKCIEYGKTFNQSSTRTTYKKIDAGEKRYKCEECGKAYKQSSHLTTHKKIHT

SEQ ID NO: 83288 - protein, 232 aa, Homo sapiens
MAEEKKLKLSNTVLPSESMKVVAESMGIAQIQEETCQLLTDEVSYRIKEIAQDALKFMHMGKRQKLTTSDIDYALKLKNVEPLYGFHAQEFIPFRFASGGGRELYFYEEKEVDLSDIINTPLPRVPLDVCLKAPKEQQKAEATEPLKSAKPGQEEDGPLKGKGQGATTADGKGKEKKAPPLLEGAPLRLKPRSIHELSVEQQLYYKEITEACVGSCEAKRAEALQSIATDPG

SEQ ID NO: 83289 - protein, 120 aa, Homo sapiens
AILPAPQNLSVLSTNMKHLLMWSPVIAPGETVYYSVEYQGEYESLYTSHIWIPSSWCSLTEGPECDVTDDITATVPYNLRVRATLGSQTSAWSILKHPFNRNSRTAFLLSVHLCPELVGS

SEQ ID NO: 83290 - protein, 101 aa, Homo sapiens
MPDRTEKHSTMPDSPVDVKTQSRLTPPTMPPPPTTQGAPRTSSFTPTTLTNGTSHSPTALNGAPSPPNGFSNGPSSSSSSSLANQQLPPACGARQLSKLKR

SEQ ID NO: 83291 - protein, 38 aa, Homo sapiens
MAGYLRVVRSLCRASGSRPAWAPAALTAPTSQEQPRRH

SEQ ID NO: 83292 - protein, 53 aa, Homo sapiens
QKFEDEKKQLIRDNDQAIKVLQDELENRSNQVRCAEKKLQHKELESQEQMKCR

SEQ ID NO: 83293 - protein, 124 aa, Homo sapiens
MDSFGQPRPEDNQSVVRRMQKKYWKTKQVFIKATGKKEDEHLVASDAELDAKLEVFHSVQETCTELLKIIEKYQLRLNVISEEENELGLFLKFQAERDATQAGKMMDATGKALCSSAKQRLALC

SEQ ID NO: 83294 - protein, 222 aa, Homo sapiens
  MOD_RES (1)..(1): Any amino acid
XADASVPRTRGEELTGLMAGSQKRLEDTARVLHHQGQQLDSVMRGLDKMESDLEVADRLLTELESPAWWPFSSKLWKTPPETKPREDVSMTSCEPFGKEGILIKIPAVISHRTESHVKPGRLTVLVSGLEIHDSSSLLMHRFEREDVDDIKVHSPYEISIRQRFIGKPDMAYRLISAKMPEVIPILEVQFSKKMELLEDALVLRSARTSSPAEKSCSVWHAG

SEQ ID NO: 83295 - protein, 394 aa, Homo sapiens
  MOD_RES (1)..(1): Any amino acid
XPPHEADNLDPSDDSLGQSFYDYTEKQAVPISVPRYKHVEQNGEKFVVYNVYMAGRQLCSKRYREFAILHQNLKREFANFTFPRLPGKWPFSLSEQQLDARRRGLEEYLEKVCSIRVIGESDIMQEFLSESDENYNGVSDVELRVALPDGTTVTVRVKKNSTTDQVYQAIAAKVGMDSTTVNYFALFEVISHSFVRKLAPNEFPHKLYIQNYTSAVPGTCLTIRKWLFTTEEEILLNDNDLAVTYFFHQAVDDVKKGYIKAEEKSYQLQKLYEQRKMVMYLNMLRTCEGYNEIIFPHCACDSRRKGHVITAISITHFKLHACTEEGQLENQVIAFEWDEMQRWDTDEEGMAFCFEYARGEKKPRWVKIFTPYACGQIPGTLTSISVFLGILVRD

SEQ ID NO: 83296 - protein, 86 aa, Homo sapiens
  MOD_RES (1)..(1): Any amino acid
XTRILWLTTRQGLPFTIFQGGMPRASYGDRHCISVIHDGQQTAFDFTSRVIGFTVLTEADPAATVGADHCRRQPAERTLLHHGVAN

SEQ ID NO: 83297 - protein, 65 aa, Homo sapiens
MLRHSPSLWELVEEHVPLRERREVKRILGEAAVDLSLELRAEVGRGKQRSQRSQHHQGPTERVQH

SEQ ID NO: 83298 - protein, 187 aa, Homo sapiens
MELRVGNRYRLGRKIGSGSFGDIYLVGIPTIRWCGAEGDYNVMVMELLGPSLEDLFNFCSRKFSLKTVLLLADQMISRIEYIHSKNFIHRDVKPDNFLMGLGKKGNLVYIIDFGLAKKYRDARTHQHIPYRENKNLTGTARYASINTHLGIEQSRRDDLESLGYVLMYFNLGSLPWQGLKAATKRQK

SEQ ID NO: 83299 - protein, 102 aa, Homo sapiens
MQALRHVVCALSGGVDSAVAALLLRRRGADAIATGHYARTSLEDEEVFEQKHVKKPEGLFRNRFEVRNAVKLLQAADSFKDQTFFLSQVSQDALRRTIFPLG

SEQ ID NO: 83300 - protein, 41 aa, Homo sapiens
MSVAFAAPRQRGKGEITPAAIQKVSADVAHKLGIPCYNSRF

SEQ ID NO: 83301 - protein, 195 aa, Homo sapiens
GSKAPSIDGKEELDLAEKMDIAVSYTGEELDFETVGDIIAIIEDKASPESMLSPSHGSNPIEDPLEAETQHKFEMSDSLKEESGTIFGSQIKDAPGEDEEEDGVSEAASLEEPKEEDQGEGYLSEMDNEPPVSESDDGFSIHNATLQSHTLADSIPSSPASSQFSVCSEDQEAIQAQKIWKKAIMLVWRAAANHR

SEQ ID NO: 83302 - protein, 207 aa, Homo sapiens
  MOD_RES (1)..(1): Any amino acid
XNMQKLKLIRMCPYYEEWPTLSIYELIALLKWKKFPPGHVIVESGNIISFVGYINSGCCNIYRSIIGFVKLRSNKVKRSQKLVYMGKLKEKESFGEISVLLQVPFTCTIITKKEVEMAIIEDKDLFELDPVTKQLMLQTAKPTFGHLTDEDVKNEYLKKEQQKEWKDFKDKTVKNSLYYKGIIPGFGKWDHYCTSIPRNLKDTLVNY

SEQ ID NO: 83303 - protein, 149 aa, Homo sapiens
MGWCEAREQDPLQDRVYSPTFLALRGSCLYKFLAPPVTTWDWTRAEKTFSVYEIMCKILKAVLWRYKFSQLKGSSDDGKSKIKFLFQNPDTKQIEAKELEFSNLFAVLHCIHSFFAAKVACLDPLFLGNQATASTAASSATTSKAKYTT

SEQ ID NO: 83304 - protein, 827 aa, Homo sapiens
MSPEKQHREEDEVDSVLLSASKILNSSEGVKESGCSDTEYGCIAESENQIQPQSALKVLQQQLESFQALRMQTLQNVSMVQSEISEILNKSIIEVENPQFSSEKNLVFGTRIEKDLPTENQEENLSMEKSHHFEDSKTLHSVEEKLSGDSVNSLPQSVNVPSQIHSEDTLTLRTSTDNLSSNIIIHPSENSDILKNYNNFYRFLPTAPPNVMSQADTVILDKSKITVPFLKHGFCENLDDICHSIKQMKEELQKSHDGEVALTNELQTLQTDPDVHRNGKYDMSPIHQDKMNFIKEENLDGNLNEDIKSKRISELEALVKKLLPFRETVSKFHVHFCRKCKKLSKSEMHRGKKNEKNNKEIPITGKNITDLKFHSRVPRYTLSFLDQTKHEMKDKERQPFLVKQGSIISENEKTSKVNSVTEQCVAKIQYLQNYLKESVQIQKKVMELESENLNLKSKMKPLIFTTQSLIQKVETYEKQLKNLVEEKSTIQSKLSKTEEYSKECLKEFKKIISKYNVLQGQNKTLEEKNIQLSLEKQQMMEALDQLKSKEHKTQSDMAIVNNENNRMSIEMEAMKTNILLIQDEKEMLEKKTHQLLKEKSSLGNELKESQLEIIQLKEKERLAKTEQETLLQIIETVKDEKLNLETTLQESTAARQIMEREIENIQTYQSTAEENFLQEIKNAKSEASIYKNSLSEIGKECEMLSKMVMETKTDNQILKEELKKHSQENIKFENSISRLTEDKILLENYVRSIENERDTLEFEMRHLQREYLSLSDKICNQHNDPSKTTYISRREKFHFDNYTHEDTSSPQSRPLASDLKDLSLEQM

SEQ ID NO: 83305 - protein, 126 aa, Homo sapiens
MGPEALSSLLLLLLVASGDADMKGHFDPAKCRYALGMQDRTIPDSDISASSSWSDSTAARHSRLESSDGDGAWCPAGSVFPKEEEYLQVDLQRLHLVALVGTQGRHAGGLGKEFSRSYRLRYSRDG

SEQ ID NO: 83306 - protein, 119 aa, Homo sapiens
MAEAITYADLRFVKAPLKKSISSRLGQDPGADDDGEITYENVQVPAVLGVPSSLASSVLGDKAAVKSEQPTASWRAVTSPAVGRILPCRTTCLRYLLLGLLLTCLLLGVTAICLGVRCE

SEQ ID NO: 83307 - protein, 546 aa, Homo sapiens
MSSSGYPPNQGAFSTEQSRYPPHSVQYTFPNTRHQQEFAVPDYRSSHLEVSQASQLLQQQQQQQLRRRPSLLSEFHPGSDRPQERRTSYEPFHPGPSPVDHDSLESKRPRLEQVSDSHFQRVSAAVLPLVHPLPEGLRASADAKKDPAFGGKHEAPSSPISGQPCGDDQNASPSKLSKEELIQSMDRVDREIAKVEQQILKLKKKQQQLEEEAAKPPEPEKPVSPPPVEQKHRSIVQIIYDENRKKAEEAHKIFEGLGPKVELPLYNQPSDTKVYHENIKTGVPARRMMKNQVMRKKLILFFKRRNHARKQREQKICQRYDQLMEAWEKKVDRIENNPRRKAKESKTREYYEKQFPEIRKQREQQERFQRVGQRGAGLSATIARSEHEISEIIDGLSEQENNEKQMRQLSVIPPMMFDAEQRRVKFINMNGLMEDPMKVYKDRQFMNVWTDHEKEIFKDKFIQHPKNFGLIASYLERKSVPDCVLYYYLTKKNENYKALVRRNYGKRRGRNQQQIARPSQEEKVEEKEEDKAEKTEKKEEEKKDEE

SEQ ID NO: 83308 - protein, 111 aa, Homo sapiens
MTMTANKNSSITHGAGGTKAPRGTLSRSQSVSPPPVLSPPRSPIYPLSDSETSACRYPSHSSSRVLLKDRHPPAPSPQNPQDPSPDTSPPTCPFKTASFGYLDRSPSACKR

SEQ ID NO: 83309 - protein, 151 aa, Homo sapiens
MLETFRNLASVDDGTQFKANGSVSLQDMYGQEKSKEQTIPNFTGNNSCAYTLEKNCEGYGTEDHHKNLRNHMVDRFCTHNEGNQYGEAIHQMPDLTLHKKVSAGEKPYECTKCRTVFTHLSSLKRHVKSHCGRKAPPGEECKQACICPSHL

SEQ ID NO: 83310 - protein, 258 aa, Homo sapiens
MLRTILDAPQRLLKEGRASRQLVLVVVFVALLLDNMLFTVVVPIVPTFLYDMEFKEVNSSLHLGHAGSSPHALASPAFSTIFSFFNNNTVAVEESVPSGIAWMNDTASTIPPPATEAISAHKNNCLQGTGFLEEEITRVGVLFASKAVMQLLVNPFVGPLTNRIGYHIPMFAGFVIMFLSTVSLGMLASVYTDDHERGRAMGTALGGLALGLLVGAPFGSVMYEFVGKSAPFLILAFLALLDGALQLCILQPSKVSPE

SEQ ID NO: 83311 - protein, 1838 aa, Homo sapiens
MTTMLQKSDSNASFLRAARAGNLDKVVEYLKGGIDINTCNQNGLNALHLAAKEGHVGLVQELLGRGSSVDSATKKGNTALHIASLAGQAEVVKVLVKEGANINAQSQNGFTPLYMAAQENHIDVVKYLLENGANQSTATEDGFTPLAVALQQGHNQAVAILLENDTKGKVRLPALHIAARKDDTKSAALLLQNDHNADVQSKSGFTPLHIAAHYGNVNVATLLLNRGAAVDFTARNGITPLHVASKRGNTNMVKLLLDRGGQIDAKTRDGLTPLHCAARSGHDQVVELLLERGAPLLARTKNGLSPLHMAAQGDHVECVKHLLQHKAPVDDVTLDYLTALHVAAHCGHYRVTKLLLDKRANPNARALNGFTPLHIACKKNRIKVMELLVKYGASIQAITESGLTPIHVAAFMGHLNIVLLLLQNGASPDVTNIRGETALHMAARAGQVEVVRCLLRNGALVDARAREEQTPLHIASRLGKTEIVQLLLQHMAHPDAATTNGYTPLHISAREGQVDVASVLLEAGAAHSLATKKGFTPLHVAAKYGSLDVAKLLLQRRAAADSAGKNGYTPLHIAAKKNQMQIASTLLNYGAETNIVTKQGVTPLHLASQEGHTDMVTLLLDKGANIHMSTKSGLTSLHLAAQEDKVNVADILTKHGADQDAHTKLGYTPLIVACHYGNVKMVNFLLKQGANVNAKTKNGYTPLHQAAQQGHTHIINVLLQHGAKPNATTANGNTALAIAKRLGYISVVDTLKVVTEEVTTTTTTITEKHKLNVPETMTEVLDVSDEEGDDTMTGDGGEYLRPEDLKELGDDSLPSSQFLDGMNYLRYSLEGGRSDSLRSFSSDRSHTLSHASYLRDSAVMDDSVVIPSHQVSTLAKEAERNSYRLSWGTENLDNVALSSSPIHSGFLVSFMVDARGGAMRGCRHNGLRIIIPPRKCTAPTRVTCRLVKRHRLATMPPMVEGEGLASRLIEVGPSGAQFLGPVIVEIPHFAALRGKERELVVLRSENGDSWKEHFCDYTEDELNEILNGMDEVLDSPEDLEKKRICRIITRDFPQYFAVVSRIKQDSNLIGPEGGVLSSTVVPQVQAVFPEGALTKRIRVGLQAQPMHSELVKKILGNKATFSPIVTLEPRRRKFHKPITMTIPVPKASSDVMLNGFGGDAPTLRLLCSITGGTTPAQWEDITGTTPLTFVNECVSFTTNVSARFWLIDCRQIQESVTFASQVYREIICVPYMAKFVVFAKSHDPIEARLRCFCMTDDKVDKTLEQQENFAEVARSRDVEVLEGKPIYVDCFGNLVPLTKSGQHHIFSFFAFKENRLPLFVKVRDTTQEPCGRLSFMKEPKSTRGLVHQAICNLNITLPIYTKESESDQEQEEEIDMTSEKNPQDEQERIEERLAYIADHLGFSWTELARELDFTEEQIHQIRIENPNSLQDQSHALLKYWLERDGKHATDTNLVECLTKINRMDIVHLMETNTEPLQERISHSYAEIEQTITLDHSEGFSVLQEELCTAQHKQKEEQAVSKESETCDHPPIVSEEDISVGYSTFQDGVPKTEGDSSATALFPQTHKEQVQQDFSGKMQDLPEESSLEYQQEYFVTTPGTETSETQKAMIVPSSPSKTPEEVSTPAEEEKLYLQTPTSSERGGSPIIQEPEEPSEHREESSPRKTSLVIVESADNQPETCERLDEDAAFEKGDDMPEIPPETVTEEEYIDEHGHTVVKKVTRKIIRRYVSSEGTEKEEIMVQGMPQEPVNIEEGDGYSKVIKRVVLKSDTEQSEVTLCEPSILSSTSQFQAEPVEGRRVSKVVKTTVVLGERMEKHLGDSSLATDLPSAKDDFEEDNNE

SEQ ID NO: 83312 - protein, 457 aa, Homo sapiens
TGFTWQDDYTQYVMDQELADLPKTYLRRPEASSPARPSKHSVGSERRYSREGGAALANALRRHLPFLEALSQAPASDVLARTHTAQDRPPAEGDDRFSESILTYVAHTSALTYPPGSRTQLREDLLPRTLGQLQPDELSPKVDSGVDRHHLMAALSAYAAQRPPAPPGEGSLEPQYLLRAPSRMPRPLLAPAAPQKWPSPLGDSEDPSSTGDGARIHTLLKDLQRQPAEVRGLSGLELDGMAELMAGLMQGVDHGVARGSPGRAALGESGEQADGPKATLRGDSFPDDGVQDDDDRLYQEVHRLSATLGGLLQDHGSRLLPGALPFARPLDMERKKSEHPESSLSSEEETAGVENVKSQTYSKDLLGQQPHSEPGAAAFGELQNQMPGPSKEEQSLPAGAQEALSDGLQLEVQPSEEEARGYIVTDRDPLRPEEGRRLVEDVARLLQVPSSAFADVE

SEQ ID NO: 83313 - protein, 74 aa, Homo sapiens
MAYQSLRLEYLQIPPVSRAYTTACVLTTAAVQLELITPFQLYFNPELIFKHFQVLQLDTYIFSWKMYFPINLVE

SEQ ID NO: 83314 - protein, 200 aa, Homo sapiens
MSLPSRQTAIIVNPPPPEYINTKKNGRLTNQLQYLQKVVLKDLWKHSFSWPFQRPVDAVKLQLPDYYTIIKNPMDLNTIKKRLENKYYAKASECIEDFNTMFSNCYLYNKPGDDIVLMAQALEKLFMQKLSQMPQEEQVVGVKERIKKGTQQNIAVSSAKEKSSPSATEKVFKQQEIPSVFPKTSISPLNVVQGASVNSS

SEQ ID NO: 83315 - protein, 606 aa, Homo sapiens
MWAVLRLALRPCARASPAGPRAYHGDSVASLGTQPDLGSALYQENYKQMKALVNQLHERVEHIKLGGGEKARALHISRGKLLPRERIDNLIDPGSPFLELSQFAGYQLYDNEEVPGGGIITGIGRVSGVECMIIANDATVKGGAYYPVTVKKQLRAQEIAMQNRLPCIYLVDSGGAYLPRQADVFPDRDHFGRTFYNQAIMSSKNIAQIAVVMGSCTAGGAYVPAMADENIIVRKQGTIFLAGPPLHVIEYSKMNKSQFLPPRNSQHRGDDRHNMHITELHSDTCRVGGVKAATGEEVSAEDLGGADLHCRKSGVSDHWALDDHHALHLTRKVVRNLNYQKKLDVTIEPSEEPLFPADELYGIVGANLKRSFDVREVIARIVDGSRFTEFKAFYGDTLVTGFARIFGYPVGIVGNNGVLFSESAKKGTHFVQLCCQRNIPLLFLQNITGFMVGREYEAEGIAKDGAKMVAAVACAQVPKITLIIGGSYGAGNYGMCGRAYSPRFLYIWPNARISVMGGEQAANVLATITKDQRAREGKQFSSADEAALKEPIIKKFEEEGNPYYSSARVWDDGIIDPADTRLVLGLSFSAALNAPIEKTDFGIFRM

SEQ ID NO: 83316 - protein, 122 aa, Homo sapiens
MTTLKEAVTFKDVAVVFTEEELRLLDLAQRKLYREVMLENFRNLLSVGHQSLHRDTFHFLKEEKFWMMETATQREGNLGGKIQMEMETVSESGTHEGLFSHQTWEQISSDLTRFQDSMVNSF

SEQ ID NO: 83317 - protein, 117 aa, Homo sapiens
MVLSGALCFRMKDSALKVLYLHNNQLLAGGLHAGKVIKGEEISVVPNRWLDASLSPVILGVQGGSQCLSCGVGQEPTLTLEPVNIMELYLGAKESKSFTFYRRDMGLTSSFESAAYP

SEQ ID NO: 83318 - protein, 101 aa, Homo sapiens
VYMYQLFRSLAYIHSQGVCHRDIKPQNLLVDPDTAVLKLCDFGRCLVSWLCTGRAPLGPAHLPWGQWGGPAGGDHQGAGNTNPGTNPRDEPQLHGVQVPSD

SEQ ID NO: 83319 - protein, 213 aa, Homo sapiens
MHSSLGDRGRLHSQKKKKKLGKKEKGPTPEEAIQKLKETEKILIKKQEFLEQKIQQELQTAKKYGTKNKRAALQALRRKKRFEQQLAQTDGTLSTLEFQREAIENATTNAEVLRTMELAAQSMKKAYQDMDIDKVDELMTDITEQQEVAQQISDAISRPMGFGDDVDEDELLEELEELEQEELAQELLNVGDKEEEPSVKLPSVPSTHLPAGP

SEQ ID NO: 83320 - protein, 53 aa, Homo sapiens
MTTFKEGLTFKDVAVVFTEEELGLLDPVQRNLYQDVMLENFRNLLSVGPIRLK

SEQ ID NO: 83321 - protein, 168 aa, Homo sapiens
MMAQKSQGSDNLQEGQEKSKREILKCTKSAWAPLDEWLPPDPEEESQSLTIPMLEDSKQESIQQWLDSGFFVSANENFQQVIDRTVSLYEQGMVQMTVKDYMRSLHQFSETPILSRGTSFNSCYSTASVPQSIPEWLEFWEIDPVEILLDLGFGADEPDICMQIPARF

SEQ ID NO: 83322 - protein, 112 aa, Homo sapiens
MTEKAPEPHVEEDDDDELDSKLNYKPPPQKSLKELQEMDKDDESLIKYKKTLLGDGPVVTDPKAPNVVVTRLTLVCESAPGPITMDLTGDLEALKKETIVLKEGSEYRVKIH

SEQ ID NO: 83323 - protein, 64 aa, Homo sapiens
MGNPGTFKRGLLLSALSYLGFETYQVISQAAVVHATAKESRCVTEGRVWRCDLSSLQPLPPGFK

SEQ ID NO: 83324 - protein, 26 aa, Homo sapiens
  MOD_RES (1)..(1): Any amino acid
XLKRAYRGLEEVQWCLEQLLTSPSPS

SEQ ID NO: 83325 - protein, 132 aa, Homo sapiens
MTVLEITLAVILTLLGLAILAILLTRWARCKQSEMYISRYSSEQSARLLDYEDGRDFSSQRSKRGRGSRHAYSTQSERSKRDYTPSTNSLALSRSSIALPQGSMSSIKCLQTTEEPPSRTAGAMMQFTAPIP

SEQ ID NO: 83326 - protein, 870 aa, Homo sapiens
MNHLNVLAKALYDNVAESPDELSFRKGDIMTVLEQDTQGLDGWWLCSLHGRQGIVPGNRLKILVGMYDKKPAGPGPGPPATPAQPQPGLHAPAPPASQYTPMLPNTYQPQPDSVYLVPTPSKAQQGLYQVPGPSPQFQSPPAKQTSTFSKQTPHHPFPSPATDLYQVPPGPGGPAQDIYQVPPSAGMGHDIYQVPPSMDTRSWEGTKPPAKVVVPTRVGQGYVYEAAQPEQDEYDIPRHLLAPGPQDIYDVPPVRGLLPSQYGQEVYDTPPMAVKGPNGRDPLLEVYDVPPSVEKGLPPSNHHAVYDVPPSVSKDVPDGPLLREETYDVPPAFAKAKPFDPARTPLVLAAPPPDSPPAEDVYDVPPPAPDLYDVPPGLRRPGPGTLYDVPRERVLPPEVADGGVVDSGVYAVPPPAEREAPAEGKRLSASSTGSTRSSQSASSLEVAGPGREPLELEVAVEALARLQQGVSATVAHLLDLAGSAGATGSWRSPSEPQEPLVQDLQAAVAAVQSAVHELLEFARSAVGNAAHTSDRALHAKLSRQLQKMEDVHQTLVAHGQALDAGRGSSGATLEDLDRLVACSRAVPEDAKQLASFLHGNASLLFRRTKATAPGPEGGGTLHPNPTDKTSSIQSRPLPSPPKFTSQDSPDGQYENSEGGWMEDYDYVHLQGKEEFEKTQKELLEKGSITRQGKSQLELQQLKQFERLEQEVSRPIDHDLANWTPAQPLAPGRTGGLGPSDRQLLLFYLEQCEANLTTLTNAVDAFFTAVATNQPPKIFVAHSKFVILSAHKLVFIGDTLSRQAKAADVRSQVTHYSNLLCDLLRGIVATTKAAALQYPSPSAAQDMVERVKELGHSTQQFRRVLGQLAAA

SEQ ID NO: 83327 - protein, 186 aa, Homo sapiens
MAPSAWAICWLLGGLLLHGGSSGPSPGPSVPRLRLSYRGAMVRKPSSTMWMETFSRYLLSANRSAIFLGPQGSLNLQAMYLDEYRDRLFLGGLDALYSLRLDQAWPDPREVLWPPQPGQREECVRKGRDPLTECANFVRVLQPHNRTHLLACGTGAFQPTCALITVGHRGEHVLHLEPGSVESGRG

SEQ ID NO: 83328 - protein, 73 aa, Homo sapiens
  MOD_RES (1)..(1): Any amino acid
XLTKHKITHIGDTSYKYLECDKAFSQSSTLTKHKNIHTEEEPYECEEYGKAFNKSSILTRHKIILAGCGGSHL

SEQ ID NO: 83329 - protein, 742 aa, Homo sapiens
MQRAGSKTAGPPCQWSRMASEGTNIPSPVVRQIDKQFLICSICLERYKNPKVLPCLHTFCERCLQNYIPAHSLTLSCPVCRQTSILPEKGVAALQNNFFITNLMDVLQRTPGSNAEESSILETVTAVAAGKPLSCPNHDGNVMEFYCQSCETAMCRECTEGEHAEHPTVPLKDVVEQHKASLQVQLDAVNKRLPEIDSALQFISEIIHQLTNQKASIVDDIHSTFDELQKTLNVLQSQLDTLLQGQESIKSCSNFTAQALNHGTETEVLLVKKQMSEKLNELADQDFPLHPRENDQLDFIVETEGLKKSIHNLGTILTTNAVASETVATGEGLRQTIIGQPMSVTITTKDKDGELCKTGNAYLTAELSTPDGSVADGEILDNKNGTYEFLYTVQKEGDFTLSLRLYDQHIRGSPFKLKVIRSADVSPTTEGVKRRVKSPGSGHVKQKAVKRPASMYSTGKRKENPIEDDLIFRVGTKGRNKGEFTNLQGVAASTNGKILIADSNNQCVQIFSNDGQFKSRFGIRGRSPGQLQRPTGVAVHPSGDIIIADYDNKWVSIFSSDGKFKTKIGSGKLMGPKGVSVDRNGHIIVVDNKACCVFIFQPNGKIVTRFGSRGNGDRQFAGPHFAAVNSNNEIIITDFHNHSVKVFNQEGEFMLKFGSNGEGNGQFNAPTGVAVDSNGNIIVADWGNSRIQVFDGSGSFLSYINTSADPLYGPQGLALTSDGHVVVADSGNHCFKVYRYLQ

SEQ ID NO: 83330 - protein, 37 aa, Homo sapiens
  MOD_RES (1)..(1): Any amino acid
XFLQLQDLSSKKQQSHNILDLLRTWNIRMVTIMSIML

SEQ ID NO: 83331 - protein, 136 aa, Homo sapiens
MINTQDSSILPLSNCPQLQCCRHIVPGPLWCSDAPHPLSKIPGGRGGGRDPSLSALIYKGRKRTWCWGKAWAFESGRPGFESHLCHSLSLEPWDEKLTVTQDLPVNDGKPHIVHFQYEVTEVKVSSWDAVLSSQSL

SEQ ID NO: 83332 - protein, 90 aa, Homo sapiens
MLLLVTSLLLCELPHPAFLLIPEKSDLRTVAPASSLNVRFDSRTMNLSWDCQENTTFSKCFLTDKKNRVVEPRMEFPSCCPDRTIAHQPA

SEQ ID NO: 83333 - protein, 160 aa, Homo sapiens
MAGLTDLQRLQARVEELERWVYGPGGARGSRKVADGLVKVQVALGNISSKRERVKILYKKIEDLIKYLDPEYIDRIAIPDASKLQFILAGNAGLHVYMHLRMWVVGEVKHRDGLSIQSSGGYKPWMLLSGIVAWFWVEDPMDPLVDIEYSIPLHQLQAMV

SEQ ID NO: 83334 - protein, 165 aa, Homo sapiens
MRGEQGAAGARVLQFTNCRILRGGKLLREDLWVRGGRILDPEKLFFEERRVADERRDCGGRILAPGFIDVQINGGFGVDFSQATEDVGSGVALVARRILSHGVTSFCPTLVTSPPEVYHKGCTWRAPSSAGRSGARTPRPTSAPSRPMPSRTCWPPTGPWTMSAS

SEQ ID NO: 83335 - protein, 155 aa, Homo sapiens
MANERMNLMNMAKLSIKGLIESALNLGRTLDSDYAPLQQFFVVMEHCLKHGLKAKKTFLGQNKSFWGPLELVEKLVPEAAEITASVKDLPGLKTPVGRGRAWLRLALMQKKLSEYMKALINKKELLSEFYEPNALMMEEEGAIIAGLLVGLNVID

SEQ ID NO: 83336 - protein, 242 aa, Homo sapiens
MSVKANSPPVIVNTDTLEAPGYELQVNGTEGEMEYEEITLERGNSGLGFSIAGGTDNPHIGDDPSIFITKIIPGGAAAQDGRLRVNDSILFVNEVDVREVTHSAAVEALKEAGSIVRLYVMRRKPPAEKVMEIKLIKGPKGLGFSIAGGVGNQHIPGDNSIYVTKIIEGGAAHKDGRLQIGDKILAVNSVGLEDVMHEDAVAALKNTYDVVYLKVAKPSNAYLSDSYAPPDITTSYSQHLDN

SEQ ID NO: 83337 - protein, 128 aa, Homo sapiens
MTATPESLFPTGDELDSSQLQMESDEVDTLKEGEDPADRMHPFLAIYELQSLKVHPLVFAPGVPVTAQVVGTERYTSGSKVGTCTLYSVRLTHGDFSWTTKKKYRHFQELHRDLLRHKVLMSLLPLAR

SEQ ID NO: 83338 - protein, 99 aa, Homo sapiens
MAMSFEWPWQYRFPPFFTLQPNVDTRQKQLAAWCSLVLSFCRLHKQSSMTVMEAQESPLFNNVKLQRILPQALPQPIHMHFCAFTHAQTPPRASPLLPM

SEQ ID NO: 83339 - protein, 857 aa, Homo sapiens
MDKYDVIKAIGQGAFGKAYLAKGKSDSKHCVIKEINFEKMPIQEKEASKKEVILLEKMKHPNIVAFFNSFQENGRLFIVMEYCDGGDLMKRINRQRGVLFSEDQILGWFVQISLGLKHIHDRKILHRDIKAQNIFLSKNGMVAKLGDFGIARVLNNSMELARTCIGTPYYLSPEICQNKPYNNKTDIWSLGCVLYELCTLKHPFEGNNLQQLVLKICQAHFAPISPGFSRELHSLISQLFQVSPRDRPSINSILKRPFLENLIPKYLTPEVIQEEFSHMLICRAGAPASRHAGKVVQKCKIQKVRFQGKCPPRSRISVPIKRNAILHRNEWRPPAGAQKARSIKMIERPKIAAVCGHYDYYYAQLDMLRRRAHKPSYHPIPQENTGVEDYGQETRHGPSPSQWPAEYLQRKFEAQQYKLKVEKQLGLRPSSAEPNYNQRQELRSNGEEPRFQELPFRKNEMKEQEYWKQLEEIRQQYHNDMKEIRKKMGREPEENSKISHKTYLVKKSNLPVHQDASEGEAPVQMEFRSCCPGWSAMARSWLTATSASQDIEKDLKQMRLQNTKESKNPEQKYKAKKGVKFEINLDKCISDENILQEEEAMDIPNETLTFEDGMKFKEYECVKEHGDYTDKAFEKLHCPEAGFSTQTVAAVGNRRQWDGGAPQTLLQMMAVADITSTCPTGPDNGQVIVIEGIPGNRKQWRHEAPGTLMSVLAAAHLTSSSFSADEEFAMGTLKQWLPKEEDEGKVEMVSGIEVDEEQLEPRSDDDDTNFEESEDELRDEVVEYLEKLATFKGEEKTEEASSTSKDSRKSREREGISMQKSEELREGLENISTTSNDHICITDEDQGTSTTSQNIQV

SEQ ID NO: 83340 - protein, 975 aa, Homo sapiens
MKQSPALAPEERCRRAGSPKPVLRADDNNMGNGCSQKLATANLLRFLLLVLIPCICALVLLLVILLSYVGACMNITHSQCQMLPYHATLTPLLSVVRNMEMEKFLKFFTYLHRLSCYQHIMLFGCTLAFPECIIDGDDSHGLLPCRSFCEAAKEGCESVLGMVNYSWPDFLRCSQFRNQTESSNVSRICFSPQQENGKQLLCGRGENFLCASGICIPGKLQCNGYNDCDDWSDEAHCNCSENLFHCHTGKCLNYSLVCDGYDDCGDLSDEQNCDCNPTTEHRCGDGRCIAMEWVCDGDHDCVDKSDEVNCSCHSQGLVECRNGQCIPSTFQCDGDEDCKDGSDEENCSVIQTSCQEGDQRCLYNPCLDSCGGSSLCDPNNSLNNCSQCEPITLELCMNLPYNSTSYPNYFGHRTQKEASISWESSLFPALVQTNCYKYLMFFSCTILVPKCDVNTGEHIPPCRALCEHSKERCESVLGIVGLQWPEDTDCSQFPEENSDNQTCLMPDEYVEECSPSHFKCRSGQCVLASRRCDGQADCDDDSDEENCGCKERDLWECPSNKQCLKHTVICDGFPDCPDYMDEKNCSFCQDDELECANHACVSRDLWCDGEADCSDSSDEWDCVTLSINVNSSSFLMVHRAATEHHVCADGWQEILSQLACKQMGLGEPSVTKLIQEQEKEPRWLTLHSNWESLNGTTLHELLVNGQSCESRSKISLLCTKQDCGRRPAARMNKRILGGRTSRPGRWPWQCSLQSEPSGHICGCVLIAKKWVLTVAHCFEGRENAAVWKVVLGINNLDHPSVFMQTRFVKTIILHPRYSRAVVDYDISIVELSEDISETGYVRPVCLPNPEQWLEPDTYCYITGWGHMGNKMPFKLQEGEVRIISLEHCQSYFDMKTITTRMICAGYESGTVDSCMGDSGGPLVCEKPGGRWTLFGLTSWGSVCFSKVLGPGVYSNVSYFVEWIKRQIYIQTFLLN

SEQ ID NO: 83341 - protein, 117 aa, Homo sapiens
  MOD_RES (1)..(1): Any amino acid
XNKTLSNSSQSELENRLHQLTETLIQKQTMLESLSTEKNSLVFQLERLEQQMNSASGSSSNGSSINMSGIDNGEGTRLRNVPVLFNDTETNLAGMYGKVRKAASSIDQFRLCFTSGS

SEQ ID NO: 83342 - protein, 225 aa, Homo sapiens
MCFPKVLSDDMKKLKARMVMLLPTSAQGLGAWVSACDTEDTVGHLGPWRDKDPALWCQLCLSSQHQAIERFYDKMQNAESGRGQDDFKEGYLETVAAYYEEQHPELTPLLEKERDGLRCRGNRSPVPDVEDPATEEPGESFCDKVMRWFQAMLQRLQTWWHGVLAWVKEKVVALVHAVQALWKQFQSFCCSLSELFMSSFQSYGAPRGDKEELTPQKCSEPQSSK

SEQ ID NO: 83343 - protein, 91 aa, Homo sapiens
MPKGRQKVPHLDAPLGLPTCLWLELAGLFLLVPWVMGLAGTGGPDGQGTGGPSWAVHLESLEGDGEEETLEQQADALAQAAGLVNAGRIGE

SEQ ID NO: 83344 - protein, 531 aa, Homo sapiens
MAEQVLPQALYLSNMRKAVKIRERTPEDIFKPTNGIIHHFKTMHRYTLEMFRTCQFCPQFREIIHKALIDRNIQATLESQKKLNWCREVRKLVALKTNGDGNCLMHATSQYMWGVQDTDLVLRKALFSTLKETDTRNFKFRWQLESLKSQEFVETGLCYDTRNWNDEWDNLIKMASTDTPMARSGLQYNSLEEIHIFVLCNILRRPIIVISDKMLRSLESGSNFAPLKVGGIYLPLHWPAQECYRYPIVLGYDSHHFVPLVTLKDSGPEIRAVPLVNRDRGRFEDLKVHFLTDPENEMKEKLLKEYLMVIEIPVQGWDHGTTHLINAAKLDEANLPKEINLVDDYFELVQHEYKKWQENSEQGRREGHAQNPMEPSVPQLSLMDVKCETPNCPFFMSVNTQPLCHECSERRQKNQNKLPKLNSKPGPEGLPGMALGASRGEAYEPLAWNPEESTGGPHSAPPTAPSPFLFSETTAMKCRSPGCPFTLNVQHNGFCERCHNARQLRQPRPRPHKALGSREVPSLPPGCYQDI

SEQ ID NO: 83345 - protein, 93 aa, Homo sapiens
MSAAPAYSEDKGGSAGPGEPEYGHDPASGGIFSSDYKRHDDLKEMLDTNKDSLKLEAMKRIVAMIARGKNASDLFPAVVKNVACKNIEVSTTW

SEQ ID NO: 83346 - protein, 153 aa, Homo sapiens
  MOD_RES (1)..(1): Any amino acid
XIITKEREVSEWKDKYEESRREVMEMRKIVAEYEKTIAQMIEDEQREKSVSHQTVQQLVLEKEQALADLNSVEKSLADLFRRYEKMKEVLEGFRKNEEVLKRCAQEYLSRFHGQVLFSLFRMHYCISFLNKIDLIVCSTKETIRISCYWFAFS

SEQ ID NO: 83347 - protein, 167 aa, Homo sapiens
MRRGAADRETEGPCSAVSAASSTLAAAAAPRARATAAASTLSATAMREIVHLQAGQCGNQIGAKFWEVISDEHGIDPTGTYHGDSDLQLERINVYYNEATGGNYVPRAVLVDLEPGTMDSVRSGPFGQIFRPDNFVFGQSGAGNNWAKGHYTEGAELVDAVLDVVRK

SEQ ID NO: 83348 - protein, 66 aa, Homo sapiens
MLSRNDDICIYGGLGLGGLLLLAVVLLSACLCWLHRRVKRLERSWRLPVPSSEGPDLRGRDKRGTK

SEQ ID NO: 83349 - protein, 1197 aa, Homo sapiens
MAAEEGVASAASAGGSWGTAAMGRVLPMLLVPVPAEAMGQLGSRAQLRTQPEALGSLTAAGSLQVLSLTPGSRGGGRCCLEGPFWHFLWEDSRNSSTPTEKPKLLALGENYELLIYEFNLKDGRCDATILYSCSREALQKLIDDQDISISLLSLRILSFHNNTSLLFINKCVILHIIFPERDAAIRVLNCFTLPLPAQAVDMIIDTQLCRGILFVLSSLGWIYIFDVVDGTYVAHVDLALHKEDMCNEQQQEPAKISSFTSLKVSQDLDVAVIVSSSNSAVALNLNLYFRQHPGHLLCERILEDLPIQGPKGVDEDDPVNSAYNMKLAKFSFQIDRSWKAQLSSLNETIKNSKLEVSCCAPWFQDILHLESPESGNHSTSVQSWAFIPQDIMHGQYNVLQKDHAKTSDPGRSWKIMHISEQEEPIELKCVSVTGFTALFTWEVERMGYTITLWDLETQGMQCFSLGTKCIPVDSSGDQQLCFVLTENGLSLILFGLTQEEFLNRLMIHGSASTVDTLCHLNGWGRCSIPIHALEAGIENRQLDTVNFFLKSKENLFNPSSKSSVSDQFDHLSSHLYLRNVEELIPALDLLCSAIRESYSEPQSKHFSEQLLNLTLSFLNNQIKELFIHTEELDEHLQKGVNILTSYINELRTFMIKFPWKLTDAIDEYDVHENVPKVKESNIWKKLSFEEVIASAILNNKIPEAQTFFRIDSHSAQKLEELIGIGLNLVFDNLKKNNIKEASELLKNMGFDVKGQLLKICFYTTNKNIRDFLVEILKEKNYFSEKEKRTIDFVHQVEKLYLGHFQENMQIQSFPRYWIKEQDFFKHKSVLDSFLKYDCKDEFNKQDHRIVLNWALWWDQLTQESILLPRISPEEYKSYSPEALWRYLTARHDWLNIILWIGEFQTQHSYASLQQNKWPLLTVDVINQNTSCNNYMRNEILDKLARNGVFLASELEDFECFLLRLSRIGGVIQDTLPVQNYKTKEGWDFHSQFILYCLEHSLQHLLYVYLDCYKLSPENCPFLEKKELHEAHPWFEFLVQCRQVASNLTDPKLIFQASLANAQILIPTNQASVSSMLLEGHTLLALATTMYSPGGVSQVVQNEENENCLKKVDPQLLKMALTPYPKLKTALFPQCTPPSVLPSDITIYHLIQSLSPFDPSRLFGWQSANTLAIGGIRSQCEKSLEFHEKTQLYFRNKL

SEQ ID NO: 83350 - protein, 1604 aa, Homo sapiens
MREAAAALVPPPAFAVTPAAAMEEPPPPPPPPPPPPEPETESEPECCLAARQEGTLGDSACKSPESDLEDFSDETNTENLYGTSPPSTPRQMKRMSTKHQRNNVGRPASRSNLKEKMNAPNQPPHKDTGKTVENVEEYSYKQEKKIRAALRTTERDRKKNVQCSFMLDSVGGSLPKKSIPDVDLNKPYLSLGCSNAKLPVSVPMPIARPARQTSRTDCPADRLKFFETLRLLLKLTSVSKKKDREQRGQENTSGFWLNRSNELIWLELQAWHAGRTINDQDFFLYTARQAIPDIINEILTFKVDYGSFAFVRDRAGFNGTSVEGQCKATPGTKIVGYSTHHEHLQRQRVSFEQVKRIMELLEYIEALYPSLQALQKDYEKYAAKDFQDRVQALCLWLNITKDLNQKLRIMGTVLGIKNLSDIGWPVFEIPSPRPSKGNEPEYEGDDTEGELKELESSTDESEEEQISDPRVPEIRQPIDNSFDIQSRDCISKKLERLESEDDSLGWGAPDWSTEAGFSRHCLTSIYRPFVDKALKQMGLRKLILRLHKLMDGSLQRARIALVKNDRPVEFSEFPDPMWGSDYVQLSRTPPSSEEKCSAVSWEELKAMDLPSFEPAFLVLCRVLLNVIHECLKLRLEQRPAGEPSLLSIKQLVRECKEVLKGGLLMKQYYQFMLQEVLEDLEKPDCNIDAFEEDLHKMLMVYFDYMRSWIQMLQQLPQASHSLKNLLEEEWNFTKEITHYIRGGEAQAGKLFCDIAGMLLKSTGSFLEFGLQESCAEFWTSADDSSASDEIRRSVIEISRALKELFHEARERASKALGFAKMLRKDLEIAAEFRLSAPVRDLLDVLKSKQYVKVQIPGLENLQMFVPDTLAEEKSIILQLLNAAAGKDCSKDSDDVLIDAYLLLTKHGDRARDSEDSWGTWEAQPVKVVPQVETVDTLRSMQVDNLLLVVMQSAHLTIQRKAFQQSIEGLMTLCQEQTSSQPVIAKALQQLKNDALELCNRISNAIDRVDHMFTSEFDAEVDESESVTLQQYYREAMIQGYNFGFEYHKEVVRLMSGEFRQKIGDKYISFARKWMNYVLTKCESGRGTRPRWATQGFDFLQAIEPAFISALPEDDFLSLQALMNECIGHVIGKPHSPVTAIHRNSPRPMKVPRCHSDPPNPHLIIPTPEGFSTRSMPSDARSHGSPAAAAAAAAAAVAASRPSPSGGDSVLPKSISSAHDTRGSSVPENDRLASIAAELQFRSLSRHSSPTEERDEPAYPRGDSSGSTRRSWELRTLISQSKDTASKLGPIEAIQKSVRLFEEKRYREMRRKNIIGQVCDTPKSYDNVMHVGLRKVTFKWQRGNKIGEGQYGKVYTCISVDTGELMAMKEIRFQPNDHKTIKETADELKIFEGIKHPNLVRYFGVELHREEMYIFMEYCDEGTLEEVSRLGLQEHVIRLYSKQITIAINVLHEHGIVHRDIKGANIFLTSSGLIKLGDFGCSVKLKNNAQTMPGEVNSTLGTAAYMAPEVITRAKGEGHGRAADIWSLGCVVIEMVTGKRPWHEYEHNFQIMYKVGMGHKPPIPERLSPEGKDFLSHCLESDPKMRWTASQLLDHSFVKVCTDEE

SEQ ID NO: 83351 - protein, 347 aa, Homo sapiens
MSALGAVIALLLWGQLFAVDSGNDVTDIADDGCPKPPEIAHGYVEHSVRYQCKNYYKLRTEGDGVYTLNDKKQWINKAVGDKLPECEAVCGKPKNPANPVQRILGGHLDAKGSFPWQAKMVSHHNLTTGATLINEQWLLTTAKNLFLNHSENATAKDIAPTLTLYVGKKQLVEIEKVVLHPNYSQVDIGLIKLKQKVSVNERVMPICLPSKDYAEVGRVGYVSGWGRNANFKFTDHLKYVMLPVADQDQCIRHYEGSTVPEKKTPKSPVGVQPILNEHTFCAGMSKYQEDTCYGDAGSAFAVHDLEEDTWYATGILSFDKSCAVAEYGVYVKVTSIQDWVQKTIAEN

SEQ ID NO: 83352 - protein, 191 aa, Homo sapiens
MHLLGPWLLLLEYLAFSDSSKWVFEHPETLYAWEGACVWIPCTYRALDGDLESFILFHNPEYNKNTSKFDGTRLYESTKDGKVPSEQKRVQFLGDKNKNCTLSIHPVHLNDSGQLGLRMESKTEKWMERIHLNVSVAPRGGSNEAGCCHLDLLDHQVCLHPERAQVLPTVESPWEDCDLPASGCRWEVPLQ

SEQ ID NO: 83353 - protein, 116 aa, Homo sapiens
MQLSFWSHCRCFCMFSIPLLMCRVRDQICDCPECTLQENPFFSQPGAPILQCMGCCFSRAYPTPLRSKKTMLVQKNVTSESTCCVAKSYNRVTVMGGFKVENHTACHCSTCYYHKS

SEQ ID NO: 83354 - protein, 225 aa, Homo sapiens
GGSRWQRGFPQLAGGVILGVALWLRHDPQTTNLLYLELGDKPAPNTFYVGIYILIAVGAVMMFVGFLGCYGAIQESQCLLGTFFTCLVILFACEVAAGIWGFVNKDQIAKDVKQFYDQALQQAVVDDDANNAKAVVKTFHETLDCCGSSTLTALTTSVLKNNLCPSGSNIISNLFKEDCHQKIDDLFSGKLYLIGIAAIVVAVIMIFEMILSMVLCCGIRNSSVY

SEQ ID NO: 83355 - protein, 128 aa, Homo sapiens
MAAWKSWTALRLCATVVVLDMVVCKGFVEDLDESFKENRNDDIWLVDFYAPWCGHCKKLEPIWNEVGLEMKSIGSPVKVGKMDATSYSSIASEFGVRGYPTIKLRFPGGLKIGVWPFFIGEIKRGLGI

SEQ ID NO: 83356 - protein, 146 aa, Homo sapiens
MSIDHEQPWQQPVPAGERPAAGPGGLAAAAAGKPAAESTAHAPAPADHDPRARAALPAPKRLHSADGQRRGHWGQPGLCPAPISAHLPPDQVLLFSWRASDEDAADAGVTSHCLQPGHRYGIPGQQGHGADGDAGSCVLHGDHHHR

SEQ ID NO: 83357 - protein, 296 aa, Homo sapiens
MRGEQGAAGARVLQFTNCRILRGGKLLREDLWVRGGRILDPEKLFFEERRVADERRDCGGRILAPGFIDVQINGGFGVDFSQATEDVGSGVALVARRILSHGVTSFCPTLVTSPPEVYHKVVPQIPVKSGGPHGAGVLGHSVADLRAAEDAVWSGATFITHLFNAMLPFHHRDPGIVGLLTSDRLPAGRCIFYGMIADGTHTNPAALRIAHRAHPQGLVLVTDAIPALGLGNGRHTLGQQEVEVDGLTAYVAGERPDPLGPRSQPACQVAHDPPRACPLCSQGTKTLSGSIAPMDV

SEQ ID NO: 83358 - protein, 40 aa, Homo sapiens
VVSAFSTMMSVHRGEVPCTVTSASACLELLGSSDPPALAS

SEQ ID NO: 83359 - protein, 441 aa, Homo sapiens
  MOD_RES (1)..(1): Any amino acid
XQAERKADNHTAHRIADQTALRVPSQAESSIFSQATNGVAEQNGHSTPGQAGRRASNPADVSDLRADDQVNQTPSEQTKGKASSQANNVQHEQSDGQVSGLTEERTAEQTERRLPTQAERRTSGQIDGRLAMPSDQRGSRQTDHRMAGQSERRASEQMDRRMSGEAERRTSEQITHRLSKLSERRPSVQIDSGSSVPSDQSPSVQIDSGSSVPSDQRPSVQIDRRMSGKVRRRSSEKTDYRLAGLADPGTSEQTDLRLYGLVDHKTSVKTHHQVYGQATELAEHQAIDQAHSNADQPPVDNAHYTESDQTDHLADRQANHKDQLSYYETRGQSEDRIFPQLGNSKEDKEADYRVQPCKFEDSQVDLNSKPSVEMETQNATTIPPYNPVDARFTSNFQAKDQALFPRLPSISSKLNYTSSQEKTQAIVTKSVQEMMKKRDKM

SEQ ID NO: 83360 - protein, 580 aa, Homo sapiens
MENFILYEEIGRGSKTVVYKGRRKGTINFVAILCTDKCKRPEITNWVRLTREIKHKNIVTFHEWYETSNHLWLVVELCTGGSLKTVIAQDENLPEDVVREFGIDLISGLHHLHKLGILFCDISPRKILLEGPGTLKFSNFCLAKVEGENLEEFFALVAAEEGGGDNGENVLKKSMKSRVKGSPVYTAPEVVRGADFSISSDLWSLGCLLYEMFSGKPPFFSESISELTEKILCEDPLPPIPKDSSRPKASSDFINLLDGLLQRDPQKRLTWTRLLQHSFWKKAFAGADQESSVEDLSLSRNTMECSGPQDSKELLQNSQSRQAKGHKSGQPLGHSFRLENPTEFRPKSTLEGQLNESMFLLSSRPTPRTSTAVEVSPGEDMTHCSPQKTSPLTKITSGHLSQQDLESQMRELIYTDSDLVVTPIIDNPKIMKQPPVKFDAKILHLPTYSVDKLLFLKDQDWNDFLQQVCSQIDSTEKSMGASRAKLNLLCYLCVVAGHQEVATRLLHSPLFQLLIQHLRIAPNWDIRAKVAHVIGLLASHTAELQENTPVVETTSSIGIGILNCLVQHSTPVPRQCLVYV

SEQ ID NO: 83361 - protein, 95 aa, Homo sapiens
MDRLGPFSNDPSDKPPCRGCSSYLMEPYIKCAECGPPPFFLCLQCFTRGFEYKKHQSDHTYEIMTSDFPVLDPSWTAQEEMALLEAVMDCGFGNW

SEQ ID NO: 83362 - protein, 739 aa, Homo sapiens
MGQGWATAGLPSLLFLLLCYGHPLLVPSQEASQQVTVTHGTSSQATTSSQTTTHQATAHQTSAQSPNLVTDEAEASKFVEEYDRTSQVVWNEYAEANWNYNTNITTETSKILLQKNMQIANHTLKYGTQARKFDVNQLQNTTIKRIIKKVQDLERAALPAQELEEYNKILLDMETTYSVATVCHPNGSCLQLEPDLTNVMATSRKYEDLLWAWEGWRDKAGRAILQFYPKYVELINQAARLNGYVDAGDSWRSMYETPSLEQDLERLFQELQPLYLNLHAYVRRALHRHYGAQHINLEGPIPAHLLGNMWAQTWSNIYDLVVPFPSAPSMDTTEAMLKQGWTPRRMFKEADDFFTSLGLLPVPPEFWNKSMLEKPTDGREVVCHASAWDFYNGKDFRIKQCTTVNLEDLVVAHHEMGHIQYFMQYKDLPVALREGANPGFHEAIGDVLALSVSTPKHLHSLNLLSSEGGSDEHDINFLMKMALDKIAFIPFSYLVDQWRWRVFDGSITKENYNQEWWSLRLKYQGLCPPVPRTQGDFDPGAKFHIPSSVPYIRYFVSFIIQFQFHEALCQAAGHTGPLHKCDIYQSKEAGQRLATAMKLGFSRPWPEAMQLITGQPNMSASAMLSYFKPLLDWLRTENELHGEKLGWPQYNWTPNSDDFYNETETKIFLQFYDQTGIWDHGAPHLLPPSQARGTREAPVYMSKRAASSGPPGSPKLPPAAQGHGEVPVHDLLWHPGPPV

SEQ ID NO: 83363 - protein, 601 aa, Homo sapiens
MSEETVSESQFSLKTAALRVFDLPLTWYYSLSQIKFSPVAKKLFVVTAVSAISVIFLAHHFKRKRGKKKGKILPWEPEHLILEYTKRAASDKGSSCSSSRQNLTLSLSSTKDKGSQVCNYANGGLFSKYSGSAQSLASVQSVNSCHSCACGNSNSWDKADEDDIKLVNIPVTTPENLYLMGMELFEEALRRWEQALTFRNRQAEDEACGSIKLGAGDAIAEENVDDIISTEFIHKLEALLQRAYRLQEEFEATLGASDPNSLADDIDKDTDITMKGNVEDFGLRDTLSIASTDSFASAAELAEHREVRHTYSLESLCHCPFYEEAMHLVEEGKIYSRVLRTEMLECLGDSDFLAKLHCIRQAFQVILSESANRIFLAESGRKILSALIVKARKNPKKFEDVFDEMIYFLEQTDHWGSTEMELAARGVKNLNFYDVVLDFILMDSFEDLENPPTSIQNVVNNRWLNSSFKETAVASSCWSVLKQKRQQMKQIPDGFFAHFYAICEHISPVLAWGFLGPRNSLYDLCCFFKNQVLLFLKDIFDFEKVRYSSTETLAEDLMQLLIRRTELLMAYLEADALRHTSSCLSSHGHVMSTGLLEAKVQ

SEQ ID NO: 83364 - protein, 179 aa, Homo sapiens
  MOD_RES (1)..(1): Any amino acid
XKMFKQYDAGRDGFIDLMELKLMMEKLGAPQTHLGLKNMIKEVDEDFDSKLSFREFLLIFRKAAAGELQEDSGLCVLARLSEIDVSSEGVKGAKSFFEAKWNWVCRWAPRTGSRGSGWQQLERLPSSALALQQPQNIGPGHQRVQPLRGGDQGRAGGKEEAGGGDEAAESGLQGAAVHL

SEQ ID NO: 83365 - protein, 1186 aa, Homo sapiens
MEVDTEEKRHRTRSKGVRVPVEPAIQELFSCPTPGCDGSGHVSGKYARHRSVYGCPLAKKRKTQDKQPQEPAPKRKPFAVKADSSSVDECDDSDGTEDMDEKEEDEGEEYSEDNDEPGDEDEEDEEGDREEEEEIEEEDEDDDEDGEDVEDEEEEEEEEEEEEEEEENEDHQMNCHNTRIMQDTEKDDNNNDEYDNYDELVAKSLLNLGKIAEDAAYRARTESEMNSNTSNSLEDDSDKNENLGRKSELSLDLDSDVVRETVDSLKLLAQGHGVVLSENMNDRNYADSMSQQDSRNMNYVMLGKPMNNGLMEKMVEESDEEVCLSSLECLRNQCFDLARKLSETNPQERNPQQNMNIRQHVRPEEDFPGRTPDRNYSDMLNLMRLEEQLSPRSRVFASCAKEDGCHERDDDTTSVNSDRSEEVFDMTKGNLTLLEKAIALETERAKAMREKMAMEAGRRDNMRSYEDQSPRQLPGEDRKPKSSDSHVKKPYYDPSRTEKKESKCPTPGCDGTGHVTGLYPHHRSLSGCPHKDRVPPEILAMHESVLKCPTPGCTGRGHVNSNRNSHRSLSGCPIAAAEKLAKAQEKHQSCDVSKSSQASDRVLRPMCFVKQLEIPQYGYRNNVPTTTPRSNLAKELEKYSKTSFEYNSYDNHTYGKRAIAPKVQTRDISPKGYDDAKRYCKDPSPSSSSTSSYAPSSSSNLSCGGGSSASSTCSKSSFDYTHDMEAAHMAATAILNLSTRCREMPQNLSTKPQDLCATRNPDMEVDENGTLDLSMNKQRPRDSCCPILTPLEPMSPQQQAVMNNRCFQLGEGDCWDLPVDYTKMKPRRIDEDESKDITPEDLDPFQEALEERRYPGEVTIPSPKPKYPQCKESKKDLITLSGCPLADKSIRSMLATSSQELKCPTPGCDGSGHITGNYASHRSLSGCPRAKKSGIRIAQSKEDKEDQEPIRCPVPGCDGQGHITGKYASHRSASGCPLAAKRQKDGYLNGSQFSWKSVKTEGMSCPTPGCDGSGHVSGSFLTHRSLSGCPRATSAMKKAKLSGEQMLTIKQRASNGIENDEEIKQLDEEIKELNESNSQMEADMIKLRTQVTITTMESNLKTIEEENKVIEQQNESLLHELANLSQSLIHSLANIQLPHMDPINEQNFDAYVTTLTEMYTNQDRYQSPENKALLENIKQAVRGIQV

SEQ ID NO: 83366 - protein, 124 aa, Homo sapiens
MTMTANKNSSITHGAGGTKAPRGTLSRSQSVSPPPVLSPPRSPIYPLSDSETSACRYPSHSSSRVLLKDRHPPAPSPQNPQDPSPDTSPPTCPFKTASFGYLDRSPSACKRDAQKESVQGAAQD

SEQ ID NO: 83367 - protein, 150 aa, Homo sapiens
MSQFKRQRINPLPGGRNFSGTASTSLLGPPPGLLTPPVATELSQNARHLQGGEKQRVFTGIVTSLHDYFGVVDEEVFFQLSVVKGRLPQLGEKVLVKAAYNPGQAVPWNAVKVQTLSNQPLLKSPAPPLLHVAALGQKQGILGAQPQLIF

SEQ ID NO: 83368 - protein, 284 aa, Homo sapiens
  MOD_RES (1)..(1): Any amino acid
XDTVTVKDETATMKDLEAEVKDTTRVENLIKSENYGKILVEKNEHCIENNIDLQSSSKLKLVRSLAVCEESPPPPAPEISQENQEKIQIQLTQSFEKEEKPSKDEAEKEKASDKLPRKMLSRDSSQEYTDSTGIDLHEFLVNTLKNNPRDRMMLLKLEQEILDFIGNNESPRKKFPPMTSYHRMLLHRVAAYFGLDHNVDQSGKSVIVNKTSNTRIPDQKFNEHIKDDKGEDFQKRYILKRDNSSFDKDDNQMRIRLKDDRRSKSIEEREEEYQRARDRIFSQD

SEQ ID NO: 83369 - protein, 548 aa, Homo sapiens
VENQSEKELLCRLQKLHLQHQNVTCEKEKLLERQQQLQEELQCHEAELQHLRDTVASFKESNEKDTETHAQLQEMKQLYQASKDELERQKHMYDQLEQDLLLCQLELKELKASHPIPEDKGKCANKCDTLLSRLTELQEKYKASQKEMGQLQMEQCELLEDQRRMQEEQGQLQEELHRLTLPLPKSGLLLKSQELLTKLEDLCELQLLYQGMQEEQKKLIQNQDCVLKEQLEIHEELRRFKESHFQEVLENPDDSKLAKSSKCNRNKQSKLLMEQMQALQVMYDAGQAKQELLQQEQGRLLEERKRLQADLQLCLEEMQLLQVQSPSIKMSLESYGKSYGSMVPSNENCRKTYDTTVDDNESYYKSYTSTQTSSKSFLKSYDSSTSASEAYGKSYCTTSNSSITYKKSYGSTSSSDTCQKSFVSSCTDEEPAEPEDMERFEEMVVKVLIKLQAVQAMYQISQEEHSQLQEQMEKLLAKQKDLKEELDACEREFKECMECLEKPMAPQNDKNENMFGLWKPMVFLAIAAVALYVLPNMRQQESEFCLME

SEQ ID NO: 83370 - protein, 108 aa, Homo sapiens
MPPKGKSGSGKAGKGGAASGSDSADKKAQGPKGGGNAVKVRHILCEKHGKIMEAMEKLKSGMRFNEVAAQYSEDKARQGIPSLQQHAGHHRDLRSTLISLVSYLQTTP

SEQ ID NO: 83371 - protein, 317 aa, Homo sapiens
MAGVSFSGHRLELLAAYEEVIREESAADWALYTYEDGSDDLKLAASGGGLQELSGHFENQKVMYGFCSVKDSQAALPKYVLINWVGEDVPDARKCACASHVAKVAEFFQGVDVIVNASSVEDIDAGAIGQRLSNGLARLSSPVLHRLRLREDENAEPVGTTYQKTDAAVEMKRINREQFWEQAKKEEELRKEEERKKALDERLRFEQERMEQERQEQEERERRYREREQQIEEHRRKQQTLEAEEAKRRLKEQSIFGDHRDEEEETHMKKSESEVEEAAAIIAQRPDNPREFFKQQERVASASAGSCDVPSPFNHRP

SEQ ID NO: 83372 - protein, 69 aa, Homo sapiens
  MOD_RES (1)..(1): Any amino acid
XSAFLALSLPRKKRGPKQRRPGEERRHLFLLFEDSIACSRGVCFHSSRKLWVCGSTMWPQSCANGPRWR

SEQ ID NO: 83373 - protein, 23 aa, Homo sapiens
MAAVRRARSYCRCLVRFSDRELC

SEQ ID NO: 83374 - protein, 125 aa, Homo sapiens
MSLRRHIGNPEYLMKRIPQNPRYQHIKSRLDTGNSMTKYTEKLEEIKKNYRYKKDELFKRLKVTTFAQLIIQVASLSDQTLEVTAEEIQRLEDNDSAASDPDAETTARTNGKGNPVSSVVLGNWI

SEQ ID NO: 83375 - protein, 622 aa, Homo sapiens
MRRGRVRERVLKKTGHRLSKTKQKRNRKRNKKQNSQNRIMEENSLEFLSDLTPGDQDPSQSEEEDIEKTRRESEYPFIDGLQNEVGDFVTGYKEKRWKNKDPKDSFQNVMSIVELDNTPKNYLSKEGDNLFVSLLLRPNEISVTCPILTQNLSCVTTDDCSGMKVEKHIRNRHTIALDTQDLSAETSCLFMKKREIVDKNLSHEPILCHQHGIRMSDKVLREEQVYTTKINHWAFFTTNLSDEDLQLGSDRQPYFGSWPAGPHKFICEQRPKKDRACKLAGPDSRGQWIQMIFTSVAASEPGNNPEILTDKLLIGNEDFSPPPETMDSFIETNLFRSCLPQPDIPKNALESTKNKKRRKKRIFNLVPNFDLLGQSRIGVKEREKCDLLTKNHGLKITLGEEKDRISERNSEEENKQKLMTFDHHPLWFYLDIIKATPLNIDGQRYSHCLSFNRLRCSASLYKNYIPSFVLHNLSSIWKPSFTNKKLFLTFESQTRVGNKLNDAGFISPEILHSHPDTSCSLGVTSDFHFLNERFDRKLKRWEEPKELPAEDSQDLTSTDYRSLELPLSQGFAFQLVKLFGSPGVPMESLLPDDYVVPLDWKTLKMIYLQWKMSVEKRQKKIG

SEQ ID NO: 83376 - protein, 45 aa, Homo sapiens
MMVRGRHRGLGQLSRDGRRGGGSGRGSGGGSGLPSGMPVPPGRDG

SEQ ID NO: 83377 - protein, 114 aa, Homo sapiens
  MOD_RES (1)..(1): Any amino acid
XVKGENGHPGSPGEKGEKGETGQAGSPGTPGPIGVPGPAGPKGERGSKGDPGMTGPTGAAGLPGLHGPPGDKGNRGHRGFKGEKGEPGLPGLDGLDAPCPLGEDGLPVQGCWNK

SEQ ID NO: 83378 - protein, 206 aa, Homo sapiens
MSEELAQGPKESPPAPRAGPREVWKKGGRLLSVLLAVNVLLLACTLISGGAFNKVAVYDTDVFALLTAMMLLATLWILFYLLRTVRCPCAVPYRDAHAGPIWLRGGLVLFGICTLIMDVFKTGYYSSFFECQSAIKILHPLIQAVFVIIQLWIMPAFGARPHFSNTVEVDFYGYSLWAVIVNICLPFGIFYRMHAVSSLLEVYVLS

SEQ ID NO: 83379 - protein, 285 aa, Homo sapiens
MNGQLDLSGKLIIKAQLGEDIRRIPIHNEDITYDELVLMMQRVFRGKLLSNDEVTIKYKDEDGDLITIFDSSDLSFAIQCSRILKLTLFVNGQPRPLESSQVKYLRRELIELRNKVNRLLDSLEPPGEPGPSTNIPENDTVDGREEKSASDSSGKQSTQVMAASMSAFDPLKNQDEINKNVMSAFGLTDDQVSGPPSAPAEDRSGTPDSIASSSSAAHPPGVQPQQPPYTGAQTQAGQMYQQYQQQAGYGAQQPQAPPQQPQQYGIQYSVLFMDYVIKVSFMSKF

SEQ ID NO: 83380 - protein, 878 aa, Homo sapiens
MPTAAAPIISSVQKLVLYETRARYFLVGSNNAETKYRVLKIDRTEPKDLVIIDDRHVYTQQEVRELLGRLDLGNRTKMGQKGSSGLFRAVSAFGVVGFVRFLEGYYIVLITKRRKMADIGGHAIYKVEDTNMIYIPNDSVRVTHPDEARYLRIFQNVDLSSNFYFSYSYDLSHSLQYNLTVLRMPLEMLKSEMTQNRQESFDIFEDEGLITQGGSGVFGICSEPYMKYVWNGELLDIIKSTVHRDWLLYIIHGFCGQSKLLIYGRPVYVTLIARRSSKFAGTRFLKRGANCEGDVANEVETEQILCDASVMSFTAGSYSSYVQVRGSVPLYWSQDISTMMPKPPITLDQADPFAHVAALHFDQMFQRFGSPIIILNLVKEREKRKHERILSEELVAAVTYLNQFLPPEHTIVYIPWDMAKYTKSKLCNVLDRLNVIAESVVKKTGFFVNRPDSYCSILRPDEKWNELGGCVIPTGRLQTGILRTNCVDCLDRTNTAQFMVGKCALAYQLYSLGLIDKPNLQFDTDAVRLFEELYEDHGDTLSLQYGGSQLVHRVKTYRKIAPWTQHSKDIMQTLSRYYSNAFSDADRQDSINLFLGVFHPTEGKPHLWELPTDFYLHHKNTMRLLPTRRSYTYWWTPEVIKHLPLPYDEVICAVNLKKLIVKKFHKYEEEIDIHNEFFRPYELSSFDDTFCLAMTSSARDFMPKTVGIDPSPFTVRKPDETGKSVLGNKSNREEAVLQRKTAASAPPPPSEEAVSSSSEDDSGTDREEEGSVSQRSTPVKMTDAGDSAKVTENVVQPMKELYGINLSDGLSEEDFSIYSRTPISAFSQDNIYEVQPPRVDRKSTEIFQAHIQASQGIMQPLGKEDSSMYREYIRNRYL

SEQ ID NO: 83381 - protein, 34 aa, Homo sapiens
  MOD_RES (1)..(1): Any amino acid
XEVRLVSLHIQALVDAGVPARDIAVVSPYNLQAP

SEQ ID NO: 83382 - protein, 54 aa, Homo sapiens
  MOD_RES (1)..(1): Any amino acid
XALIALKKYHSGPASSLIEVLFGRSAPSPASEIRSVLRPLQHRRGQSGGAPGSV

SEQ ID NO: 83383 - protein, 155 aa, Homo sapiens
MAGYLKLVCVSFQRQGFHTVGSRCKNRTGAEHLWLTRHLRDPFVKAAKVESYRCRSAFKLLEVNERHQILRPGLRVLDCGAAPGAWSQVAVQKVNAAGTDGVSLLPRLQCNGVISAHCNLCLPGSSDSPASASQVAGITGARHRTQLIFSFCFFK

SEQ ID NO: 83384 - protein, 31 aa, Homo sapiens
MVMEKPSPLLVGREFVRQYYTLLNKAPEYLH

SEQ ID NO: 83385 - protein, 47 aa, Homo sapiens
MAAGMYLEHYLDSIENLPFELQRNFQLMRDLDQRTEEALDTISSLEH

SEQ ID NO: 83386 - protein, 364 aa, Homo sapiens
MNVYHFKKGTEICNYSYSSNILSIRLNRQRLLVCLEESIYIHNIKDMKLLKTLLDIPANPTGLCALSINHSNSYLAYPGSLTSGEIVLYDGNSLKTVCTIAAHEGTLAAITFNASGSKLASASEKGTVIRVFSVPDGQKLYEFRRGMKRYVTISSLVFSMDSQFLCASSNTETVHIFKLEQVTNSRPEEPSTWSGYMGKMFMAATNYLPTQVSDMMHQDRAFATARLNFSGQRNICTLSTIQKLPRLLVASSSGHLYMYNLDPQDGGECVLIKTHSLLGSGTTEENKENDLRPSLPQSYAATVARPSASSASTVPGYSEDGGALRGEVIPEHEFATGPVCLDDENEFPPIILCRGNQKGKTKQS

SEQ ID NO: 83387 - protein, 166 aa, Homo sapiens
MGHEQNQGAALLQMLPLLWLLPHSWAVPEGFPIAEVFTLKPLEFGKPNTLVCFVSNLFPPMLTVNWQHHSVPVEGFGPTFVSAVDGLSFQAFSYLNFTPEPSDIFSCIVTHEIDRYTAIAYWVPRNALPSDLLENVLCGVAFGLGVLGIIVGIVLIIYFRKPCSGD

SEQ ID NO: 83388 - protein, 283 aa, Homo sapiens
MPPTPCRPPGCTATCTSSLCLPPHSTPSCAPASPATPVSWSWKALGSVRSSAQEPSPIHSCSTTSHSFIGLAPGRFDYIGEGTPGPAREEAGADAFPEHRMNWATATSYSTSVQCWAPTSSWRQCWLIWDHAEPGWPHRNLPWAWQAQWPHWSWLQLGTYSLLLLSQPPCFGPPVHALCCRVAHWRGVPRPNNSEAPSLTLSWRGQRPGPSADEEPRFGPNQVGTHLSLEPTGAEERGHRREGREEEGCLGGLAECERDREGALDGSGRSAEGLRGEMHACPG

SEQ ID NO: 83389 - protein, 196 aa, Homo sapiens
MEYPAPATVQAADGGAAGPYSSSELLEGQEPDGVRFDRERARRLWEAVSGAQPVGREEALSKRLTNPFLVASTLALHQNREMIDPDKFCSLCHATFNDPVMAQQHYVGKKHRKQETKLKLMARYGRLADPAVTDFPAGKGYPCKTCKIVLNSIEQYQAHVSGFKHKNQSPKTVASSLGQIPMQRQPIQKDSTTLED

SEQ ID NO: 83390 - protein, 72 aa, Homo sapiens
MAEAHQAVGFRPSLTSDGAEVELSAPVLQEIYLSGLRSWKRHLSRFWCHPACLVPPAGSFLRTDGEDQRVAA

SEQ ID NO: 83391 - protein, 82 aa, Homo sapiens
MANCERTFIAIKPDGVQRGLVGEIIKRFEQKGFRLVGLKFMQASEDLLKEHYVDLKDRPFFAGLVKYMHSGPVVAMLPDFLL

SEQ ID NO: 83392 - protein, 563 aa, Homo sapiens
MQLKPSTSSHLLKTVKPRVWKPGDWSREQLNETTVLAPHETIFRAEDLSVILKAYVLVTSLTPLRAFIHSTGTVWNPPKKKRFTVKLQTFFETFLRASSPQQAFDIMKEAIGKLLLAAEVFSETSTLGPKTFHRCRFCFQLLTFDIGYGSFMYPVVLQVHEHLNFQDYDNMDFEDQNTEEFLLNDTFNFLFPNESSLSIFSEIFQRLYRSDVFKGENYQKELNQCLSLEEINSIMTFIKELGSLGQFQLLFPSTTPGIQSLMHEFYDVANPVGNPGSVLTQYWSLLNVFEQFQFMNKKTQPHPLEWNSFTEDKNIEKPQVPFDAIENKKAAVPQIKNENKEIHCSDDENTPCHIKQIFTHPHLELNPDFHPKIKDYYCEVPFDVVTVTIGVETPKCLCKVHLYEQAGPSFASYPLGLGMNKISIFVVDESPAHGETLITYKLTIYREDRPSLPLFEAFTACGFVQDCGLLIHPEETCGLQPISSDYIEAILQSELKRCPSGDMKGQWIVPCLSCSDNRTCDWREITWQPHNCQYGVLTKPQLQQCLGGRKLGVDVQRVPRSRN

SEQ ID NO: 83393 - protein, 89 aa, Homo sapiens
MPARTAPARVPTLAVPAISLPDDVRRRLKDLERDSLTEKECVKEKLNLLHEFLQTEIKNQLCDLETKLRKEELSEICPWRTVLMLTTGK

SEQ ID NO: 83394 - protein, 395 aa, Homo sapiens
MLDDNNHLIQCIMDSQNKGKTSECSQYQQMLHTNLVYLATIADSNQNMQSLLPAPPTQNMPMGPGGMNQSGPPPPPRSHNMPSDGMVGGGPPAPHMQNQMNGQMPGPNHMPMQGPGPNQLNMTNSSMNMPSSSHGSMGGYNHSVPSSQSMPVQNQMTMSQGQPMGNYGPRPNMSMQPNQGPMMHQQPPSQQYNMPQGGGQHYQGQQPPMGMMGQVNQGNHMMGQRQIPPYRPPQQGPPQQYSGQEDYYGDQYSHGGQGPPEGMNQQYYPDGHNDYGYQQPSYPEQGYDRPYEDSSQHYYEGGNSQYGQQQDAYQGPPPQQGYPPQQQQYPGQQGYPGQQQGYGPSQGGPGPQYPNYPQGQGQQYGGYRPTQPGPPQPPQQRPYGYDQGQYGNYQQ

SEQ ID NO: 83395 - protein, 421 aa, Homo sapiens
MQKPPLLLRRPLPPKFTKLSLHEKKTHTAKTGKIESLHVAFTEDETTSIKMDRTRFPDVLRNQSLTPINIQNIFLDHCVQERVTAISSPQKSTKHVREQIPDTATGSIFFPHCNSASTRIFGKQTNKMESSRKFKTMKDVYTEKRLENILILSSKFSKPKSTPGSVIAQKLEKMHPKHQPLPESPGYTYQHISRDLSATVPSPPPMTVSMKPEGQWPEHFKSTATLTLRVTEFPGFVSLPTPVLPRKPHRQSVIETLVTENGNIESVPKQIPPRPPEGLTKTEKIESEIHVVRGEGFKTVAATRYETITAMTNLAIVNCQVYGRNALNLKGFFILNCPDLTPLAFQLIYLNLSFNDLHYFPTEILCLKNLQILKLRNNPIKEIPSEIQQLEFLRIFTIAFNLITVLPIGICMHIRGRMTAY

SEQ ID NO: 83396 - protein, 142 aa, Homo sapiens
SLINEQWVVSAGHCYKSRIQVRLGEHNIEVLEGNEQFINAAKIIRHPQYDRKTLNNDIMLIKLSSRAVINARVSTISLPTAPPATGTKCLISGWGNTASSGADYPDELQCLDAPVLSQAKCEASYPGKITSNMFCVGFLEGG

SEQ ID NO: 83397 - protein, 392 aa, Homo sapiens
MAHSPVAVQVPGMQNNIADPEELFTKLERIGKGSFGEVFKGIDNRTQQVVAIKIIDLEEAEDEIEDIQQEITVLSQCDSSYVTKYYGSYLKGSKLWIIMEYLGGGSALDLLRAGPFDEFQIATMLKEILKGLDYLHSEKKIHRDIKAANVLLSEQGDVKLADFGVAGQLTDTQIKRNTFVGTPFWMAPEVIQQSAYDSKADIWSLGITAIELAKGEPPNSDMHPMRVLFLIPKNNPPTLVGDFTKSFKEFIDACLNKDPSFRPTAKELLKHKFIVKNSKKTSYLTELIDRFKRWKAEGHSDDESDSEGSDSESTSRENNTHPEWSFTTVRKKPDPKKVQNGAQDENNASRNQAIEELEKSIAVAEAACPGITDKMVKKLIEKFQKCSADESP

SEQ ID NO: 83398 - protein, 63 aa, Homo sapiens
MVVLRLATGFSHPLTQSAVMGHRSDVEAIAKLITSFLELHCLESPTELSQSSDSEAGDPASQS

SEQ ID NO: 83399 - protein, 52 aa, Homo sapiens
MAFVTRQFMRSVSSSSTASASAKKIIVKHVTVIGGGLMGAGIAQERGWPQQQ

SEQ ID NO: 83400 - protein, 410 aa, Homo sapiens
MSLMVVSMACVGFFLLEGPWPHVGGQDKPFLSAWPGTVVSEGQHVTLQCRSRLGFNEFSLSKEDGMPVPELYNRIFWNSFLMGPVTPAHAGTYRCCSSHPHSPTGWSAPSNPVVIMVTGVHRKPSLLAHPGPLVKSGETVILQCWSDVRFERFLLHREGITEDPLRLIGQLHDAGSQVNYSMGPMTPALAGTYRCFGSVTHLPYELSAPSDPLDIVVVGLYGKPSLSAQPGPTVQAGENVTLSCSSRSLFDIYHLSREAEAGELRLTAVLRVNGTFQANFPLGPVTHGGNYRCFGSFRALPHAWSDPSDPLPVSVTGNSRNLHVLIGTSVVIIPFAILLFFLLHRWCANKKNAVVMDQEPAGNRTVNREDSDEQDPQEVTYAQLNHCVFTQRKITRPSQRPKTPPTDTSV

SEQ ID NO: 83401 - protein, 115 aa, Homo sapiens
MSTRTPLPTVNERDTENHTSHGDGRQEVTSRTSRSGARCRNSIASCADEQPHIGNYRLLKTIGKGNFAKVKLARHILTGREMESRSVARLECSGGISANCNLHLPGLSNSPASAS

SEQ ID NO: 83402 - protein, 166 aa, Homo sapiens
MSLHSSPTLPTSLYQSCDLSVGGPSLLTWVWRRERRCCKVFSVSHCLEAGPAKAWAHSCTGSPRGRTGWGSRACEALGKGMGLWGRGGMGFRSICTIRKVLRSFFLEGTLSSLSLFLDLGLELRMGRCAQGGTHQSTREGGYLGVSQGLCQCLQPTSRSLEFGEWG

SEQ ID NO: 83403 - protein, 55 aa, Homo sapiens
MERAGATSRGGQAPGFLLRLHTEGRAEAARVQEQDLRQWGLTDYCSLHLFGRKIK

SEQ ID NO: 83404 - protein, 95 aa, Homo sapiens
MKNNIINTQQSFVTMPNVIVPDIEKEIRRMENGACSSFSEDDDSASTSEESENENPHARGSFSYKSLRKGGPSQREQYLPGAIALFNVNNSSNKD

SEQ ID NO: 83405 - protein, 105 aa, Homo sapiens
MGFTGAGIAASSIAAKMMSAAAIANGGGVSAGSLVATLQSVGAAGLSTSSNILLASVGSVLGACLGNSPSSSLPAEPEAKEDEARENVPQGEPPKPPLKSEKHEE

SEQ ID NO: 83406 - protein, 81 aa, Homo sapiens
MAARVGAFLKNAWDKEPVLVVSFVVGGLAVILPPLSPYFKYSVMINKATPYNYPAAGEKGHRIELSSHSTQRQSCPGARRS

SEQ ID NO: 83407 - protein, 152 aa, Homo sapiens
MSVTYDDSVGVEVSSDSFWEVGNYKRTVKRIDDGHRLCSDLMNCLHERARIEKAYAQQLTEWARRWRQLVEKGPQYGTVEKAWMAFMSEAERVSELHLEVKASLMNDDFEKIKNWQKEAFHKQMMGGFKETKEAEDGFRKAQKPWAKKLKEV

SEQ ID NO: 83408 - protein, 310 aa, Homo sapiens
VDPGNHSSVTESILAGLSEQPELQLRLFLLFLGICVVTVVGNLGMITLIGLSSHLHTPMYYFLSSLSFIDFCHSTVITPKMLVNFATEKNIISYPECMAQLYLFSIFAIAECHMLAAMAYDCYVAICSPLLYNVIMSYHHCFWLTVGVYILGILGSTIHTSFMLRLFLCKTNVINHYFCDLFPLLGLSCSSTYINELLVLVLSAFNILMPALTILASYIFIIASILRIHSTEGRSKAFSTCSSHILAVAVFFGSAAFMYLQPSSVSSMDQRKVSSVFYTTIVPMLNPLIYSLRNKDVKLAVKKILHQTAC

SEQ ID NO: 83409 - protein, 163 aa, Homo sapiens
MTGDKGPQRLSGSSYGSISSPTSPTSPGPQQAPPRETYLSEKIPIPDTKPGTFSLRKLWAFTGPGFLMSIAFLDPGNIESDLQAGAVAGFKLLWVLLWATVLGLLCQRLAARLGVVTGKDLGEVCHLYYPKSESRSVAQSGVQWCDVSSLQPLPPRCPAPSSG

SEQ ID NO: 83410 - protein, 148 aa, Homo sapiens
MSLLGPKVLLFLAAFIITSDWIPLGVNSQRGDDVTQATPETFTEDPNLVNDPATDETECWDEKFTCTRLYSVHRPVKQCIHQLCFTSLRRMYIVNKEICSRLVCKEHEAMKDELCRQMAGLPPRRLRRSNYFRLPPCENVDLQRPNGL

SEQ ID NO: 83411 - protein, 444 aa, Homo sapiens
MLLMVVSMACVGFFLVQRAGPHVGGQDKPFLSAWPSAVVPRGGHVTLRCHYRHRFNNFMLYKEDRIHVPIFHGRLFQESFNMSPVTTAHAGNYTCRGSHPHSPTGWSAPSNPVVIMVTGNHRKPSLLAHPGPLVKSGERVILQCWSDIMFEHFFLHKEGISKDPSRLVGQIHDGVSKANFSIGPMMLALAGTYRCYGSVTHTPYQLSAPSDPLDIVVTGPYEKPSLSAQPGPKVQAGESVTLSCSSRSSYDMYHLSRERGAHERRLPAVRKVNRTFQADFPLGPATHGGTYRCFGSFRHSPYEWSDPSDPLLVSVTGNPSSSWPSPTEPSSKSGNPRHLHILIGTSVVIILFILLLFFLLHLWCSNKKNAAVMDQEPAGNRTANSEDSDEQDPEEVTYAQLDHCVFTQRKITRPSQRPKTPPTDTILYTELPNAKPRSKVVSCP

SEQ ID NO: 83412 - protein, 211 aa, Homo sapiens
MSSEMEPLLLAWSYFRRRKFQLCADLCTQMLEKSPYDQKISWAWWHVPVIPATWEAEAGELLEPRKRRLQQAEITPLYSSLGNKSKTPSQKAAWILKARALTEMVYIDEIDVDQEGIAEMMLDENAIAQVPRPGTSLKLPGTNQTGGPSQAANHTSWKTHYRFPQAQHAEWKARHYGTGYQNTQNRLHSPPYHQLLRKICQAGNGFHAYKS

SEQ ID NO: 83413 - protein, 735 aa, Homo sapiens
MKTWVKIVFGVATSAVLALLVMCIVLRPSRVHNSEENTMRALTLKDILNGTFSYKTFFPNWISGQEYLHQSADNNIVLYNIETGQSYTILSNRTMLWRYSYTATYYIYDLSNGEFVRGNELPRPIQYLCWSPVGSKLAYVYQNNIYLKQRPGDPPFQITFNGRENKIFNGIPDWVYEEEMLATKYALWWSPNGKFLAYAEFNDTDIPVIAYSYYGDEQYPRTINIPYPKAGAKNPVVRIFIIDTTYPAYVGPQEVPVPAMIASSDYYFSWLTWVTDERVCLQWLKRVQNVSVLSICDFREDWQTWDCPKTQEHIEESRTGWAGGFFVSTPVFSYDAISYYKIFSDKDGYKHIHYIKDTVENAIQITSGKWEAINIFRVTQDSLFYSSNEFEEYPGRRNIYRISIGSYPPSKKCVTCHLRKERCQYYTASFSDYAKYYALVCYGPGIPISTLHDGRTDQEIKILEENKELENALKNIQLPKEEIKKLEVDEITLWYKMILPPQFDRSKKYPLLIQVYGGPCSQSVRSVFAVNWISYLASKEGMVIALVDGRGTAFQGDKLLYAVYRKLGVYEVEDQITAVRKFIEMGFIDEKRIAIWGWSYGGYVSSLALASGTGLFKCGIAVAPVSSWEYYASVYTERFMGLPTKDDNLEHYKNSTVMARAEYFRNVDYLLIHGTADDNVHFQNSAQIAKALVNAQVDFQAMWYSDQNHGLSGLSTNHLYTHMTHFLKQCFSLSD

SEQ ID NO: 83414 - protein, 90 aa, Homo sapiens
MAQEEGGSLPEVRARVRAAHGIPDLAQKLHFYDRWAPDYDQDVATLLYRAPRLAVDCLTQALPGPPHSALILDVACGTGLVAAEGPSTRC

SEQ ID NO: 83415 - protein, 188 aa, Homo sapiens
MFPPSGSTGLIPPSHFQARPLSTLPRMAPTWLSDIPLVQPPGHQDVSERRLDTQRPQVTMWERDVSSDRQEPGRRGRSWGLEGSQALSQQAEVIVRQLQELRRLEEEVRLLRETSLQQKMRLEAQAMELEALARAEKAGRAEAEGLRAALAGAEVVRKNLEEGSQRELEEVQRLHQEQLSSLTQAHEE

SEQ ID NO: 83416 - protein, 1018 aa, Homo sapiens
MYNGIGLPTPRGSGTNGYVQRNLSLVRGRRGERPDYKGEEELRRLEAALVKRPNPDILDHERKRRVELRCLELEEMMEEQGYEEQQIQEKVATFRLMLLEKDVNPGGKEETPGQRPAVTETHQLAELNEKKNERLRAAFGISDSYVDGSSFDPQRRAREAKQPAPEPPKPYSLVRESSSSRSPTPKQKKKKKKKDRGRRSESSSPRRERKKSSKKKKHRSESESKKRKHRSPTPKSKRKSKDKKRKRSRSTTPAPKSRRAHRSTSADSASSSDTSRSRSRSAAAKTHTTALAGRSPSPASGRRGEGDAPFSEPGTTSTQRPSSPETATKQPSSPYEDKDKDKKEKSATRPSPSPERSSTGPEPPAPTPLLAERHGGSPQPLATTPLSQEPVNPPSEASPTRDRSPPKSPEKLPQSSSSESSPPSPQPTKVSRHASSSPESPKPAPAPGSHREISSSPTSKNRSHGRAKRDKSHSHTPSRRMGRSRSPATAKRGRSRSRTPTKRGHSRSRSPQWRRSRSAQRWGRSRSPQRRGRSRSPQRPGWSRSRNTQRRGRSRSARRGRSHSRSPATRGRSRSRTPARRGRSRSRTPARRRSRSRTPTRRRSRSRTPARRGRSRSRTPARRRSRTRSPVRRRSRSRSPARRSGRSRSRTPARRGRSRSRTPARRGRSRSRTPARRSGRSRSRTPARRGRSRSRTPRRGRSRSRSLVRRGRSHSRTPQRRGRSGSSSERKNKSRTSQRRSRSNSSPEMKKSRISSRRSRSLSSPRSKAKSRLSLRRSLSGSSPCPKQKSQTPPRRSRSGSSQPKAKSRTPPRRSRSSSSPPPKQKSKTPSRQSHSSSSPHPKVKSGTPPRQGSITSPQANEQSVTPQRRSCFESSPDPELKSRTPSRHSCSGSSPPRVKSSTPPRQSPSRSSSPQPKVKAIISPRQRSHSGSSSPSPSRVTSRTTPRRSRSVSPCSNVESRLLPRYSHSGSSSPDTKVKPETPPRQSHSGSISPYPKVKAQTPPGPSLSGSKSPCPQ

SEQ ID NO: 83417 - protein, 157 aa, Homo sapiens
MTAALAVVTTSGLEDGVPRSRGEGTGEVVLERGPGAAYHMFVVMEDLVEKLKLLRYEEEFLRKSNLKAPSRWVPASPSARVPASPQGDALLGPAGNQFRESGHYFALPTNPGEQFYMFCTLAAWLINKAGRPFEQPQEYDDPNATISNILSELRSFV

SEQ ID NO: 83418 - protein, 138 aa, Homo sapiens
  MOD_RES (1)..(1): Any amino acid
XVSTFRELPSLEQKLLTPITTLTSEQIQKLLASTRYPPPVREFRELPNIEERIMNSFGPSAATPAPPGVDTPPPSRPEKKKADIVFLLDGSINFRRDSFQEVLRFVSEIVDTVYEDGDSIQVGLVQYNSDPTDEFFLK

SEQ ID NO: 83419 - protein, 38 aa, Homo sapiens
MPECWDGVGEGNAGAVKLAGLGDPRWSPGHLLSPGHQA

SEQ ID NO: 83420 - protein, 115 aa, Homo sapiens
MRKAYSPLQVLRGCLLLPSLLHALSLQEQPMVWPLTRGPSSASDALSSGGPYHPSECCFTYTTYKIPRQRIMDYYETNSQCSKPGIVFITKRGHSVCTNPSDKWVQDYIKDMKEN

SEQ ID NO: 83421 - protein, 68 aa, Homo sapiens
EEKLAGEELAGEEAPQEKAEDKPSTDLSAPVNGEATSQKGESAEDKEHEEGRDSEEGPRCGSSEDLHD

SEQ ID NO: 83422 - protein, 1057 aa, Homo sapiens
MVLAGPLAVSLLLPSLTLLVSHLSSSQDVSSEPSSEQQLCALSKHPTVAFEDLQPWVSNFTYPGARDFSQLALDPSGNQLIVGARNYLFRLSLANVSLLQATEWASSEDTRRSCQSKGKTEEECQNYVRVLIVAGRKVFMCGTNAFSPMCTSRQVGNLSRTIEKINGVARCPYDPRHNSTAVISSQGELYAATVIDFSGRDPAIYRSLGSGPPLRTAQYNSKWLNEPNFVAAYDIGLFAYFFLRENAVEHDCGRTVYSRVARVCKNDVGGRFLLEDTWTTFMKARLNCSRPGEVPFYYNELQSAFHLPEQDLIYGVFTTNVNSIAASAVCAFNLSAISQAFNGPFRYQENPRAAWLPIANPIPNFQCGTLPETGPNENLTERSLQDAQRLFLMSEAVQPVTPEPCVTQDSVRFSHLVVDLVQAKDTLYHVLYIGTESGTILKALSTASRSLHGCYLEELHVLPPGRREPLRSLRILHSARALFVGLRDGVLRVPLERCAAYRSQGACLGARDPYCGWDGKQQRCSTLEDSSNMSLWTQNITACPVRNVTRDGGFGPWSPWQPCEHLDGDNSGSCLCRARSCDSPRPRCGGLDCLGPAIHIANCSRNGAWTPWSSWALCSTSCGIGFQVRQRSCSNPAPRHGGRICVGKSREERFCNENTPCPVPIFWASWGSWSKCSSNCGGGMQSRRRACENGNSCLGCGVEFKTCNPEGCPEVRRNTPWTPWLPVNVTQGGARQEQRFRFTCRAPLADPHGLQFGRRRTETRTCPADGSGSCDTDALVEVLLRSGSTSPHTVSGGWAAWGPWSSCSRDCELGFRVRKRTCTNPEPRNGGLPCVGDAAEYQDCNPQACPGEDICLGLHTEEALCATQACPEGWSPWSEWSKCTDDGAQSRSRHCEELLPGSSACAGNSSQSRPCPYSEIPVILPASSMEEATDCAGFNLIHLVATGISCFLGSGLLTLAVYLSCQHCQRQSQESTLVHPATPNHLHYKGGGTPKNEKYTPMEFKTLNKNNLIPDDRANFYPLQQTNVYTTTYYPSPLNKHSFRPEASPGQRCFPNS

SEQ ID NO: 83423 - protein, 232 aa, Homo sapiens
MNEDTVERIVRCIIQNEANAEALKEMLGDSEGEGTVQLSSVDATSSLQDGAPSHHHTVHLGSAAPCLHCSRSKRPPLVRQGRSKEGKSRPRTGETTVFSVGRFRVTHIEKRYGLHEHRDGSPTDRSWGSGGGQDPGGGQGSGGGQPKAGMPAMERLPPERPQPQVLASPPVQNGGLRDSSLTPRALEGNPRASAEPTLRAGGRGPSPGLPTQEANGQPSKPDTSDHQSPSLC

SEQ ID NO: 83424 - protein, 57 aa, Homo sapiens
MDLKEKHLGEPPSALGLSTRKALSVLKEQLEAVLEGHLRERKKCLTWKEVWRSSFLH

SEQ ID NO: 83425 - protein, 76 aa, Homo sapiens
LKISFSETALETTYQYPSESSVLEELGPEPEVPSAPNPPAAQPDDEEDEEELLLLQPELQGGLRTKALIVDESCRR

SEQ ID NO: 83426 - protein, 389 aa, Homo sapiens
  MOD_RES (1)..(1): Any amino acid
XCQGFSGMNRFNSRTYSKFKNSLVVSFLSYCDYYRPRFFLLENVRNFVSFKRSMVLKLTLRCLVRMGYQCTFGVLQAGQYGVAQTRRRAIILAAAPGEKLPLFPEPLHVFAPRACQLSVVVDDKKFVSNITRLSSGPFRTITVRDTMSDLPEVRNGASALEISYNGEPQSWFQRQLRGAQYQPILRDHICKDMSALVAARMRHIPLAPGSDWRDLPNIEVRLSDGTMARKLRYTHHDRKNGRSSSGALRGVCSCVEAGKACDPAARQFNTLIPWCLPHTGNRHNHWAGLYGRLEWDGFFSTTVTNPEPMGKQGRVLHPEQHRVVSVRECARSQGFPDTYRLFGNILDKHRQVSGAAPAGSGQEGGFCACHQVGLGPAQSLPGGRLLAAG

SEQ ID NO: 83427 - protein, 17 aa, Homo sapiens
MVVLRLATGFSHPLTQS

SEQ ID NO: 83428 - protein, 191 aa, Homo sapiens
MKQILHPALETTDPCSTGFVFPAMTLFPVLLFLVAGLLPSFPANEDKDPAFTALLTTQTQVQREIVNKHNELRRAVSPPARNMLKMEWNKEAAANAQKWANQCNYRHSNPKDRMTSLKCGENLYMSSASSSWSQAIQSWFDEYNDFDFGVGPKTPNAVVGHYTQVVWYSSYLVGCGNAYCPNQKVLKYYYV

SEQ ID NO: 83429 - protein, 191 aa, Homo sapiens
MELKNLEYRPVKVRGCFDHSKELYMMPRTMVDPVREAREGGLISSSTQSGAYVVTPFHCTDLGVTILVNRGFVPRKKVNPETRQKGQIEGEVDLIGMVRLTETRQPFVPENNPERNHWHYRDLEAMARITGAEPIFIDANFQSTVPGGPIGGQTRVTLRNEHLQYIVTWYGLSAATSYLWFKKFLRGTPGV

SEQ ID NO: 83430 - protein, 116 aa, Homo sapiens
VQCRCPLVRGRVSAAAAAGPAQSGILVDREVVSLFLHFTVNPKPRVEFIDRPRCCLRGKECSINRFQQVESRWGYSGTSDRIRFSVNKRIFVVGFGLYGSIHGPTDYQVNIQIIHT

SEQ ID NO: 83431 - protein, 194 aa, Homo sapiens
DPHNNLMRPHTLNSTSMSKAYQSTFTGETNTPYSKQFVHSKSSQYRRLRTEWKNNVYLARSRIQGLGLYAAKDLEKHTMVIEYIGTIIRNEVANRREKIYEEQNRGIYMFRINNEHVIDATLTGGPARYINHSCAPNCVAEVVTFDKEDKIIIISSRRIPKGEELTYDYQFDFEDDQHKIPCHCGAWNCRKWMN

SEQ ID NO: 83432 - protein, 136 aa, Homo sapiens
MSTAVLENPGLGRKLSDFGQETSYIEDNCNQNGAISLIFSLKEEVGALAKVLRLFEENDVNLTHIESRPSRLKKDEYEFFTHLDKRSLPALTNIIKILRHDIGATVHELSRDKKKDTVPWFPRTIQELDRFANQIL

SEQ ID NO: 83433 - protein, 228 aa, Homo sapiens
MMVLQVSAAPRTVALTALLMVLLTSVVQGRATPENYLFQGRQECYAFNGTQRFLERYIYNREEFVRFDSDVGEFRAVTELGRPDEEYWNSQKDILEEKRAVPDRMCRHNYELGGPMTLQRRGSIQVRWFLNGQEETAGVVSTNLIRNGDWTFQILVMLEMTPQQGDVYTCQVEHTSMDSPVTVEWKAQSDSARSKTLTGAGGFVLGLIICGVGIFMHRRSKKVQRGSA

SEQ ID NO: 83434 - protein, 84 aa, Homo sapiens
MAVAAAAAAGPVFWRRLLGLLPGRPGLAALLGRLSDRLGRNRDRQRRSCSPGHLPTLLPVSRRRAPVPVDQKPGSRIWSLQFSR

SEQ ID NO: 83435 - protein, 238 aa, Homo sapiens
MSSSGTPDLPVLLTDLKIQYTKIFINNEWHDSVSGKKFPVFNPATEEELCQVEEGDKEDVDKAVKAARQAFQIGSPWRTMDASERGRLLYKLADLIERDRLLLATMESMNGGKLYSNAYLNDLAGCIKTLRYCAGWADKIQGRTIPIDGNFFTYTRHEPIGVCGQIIPWNFPLVMLIWKIGPALSCGNTVVVKPAEQTPLTALHVASLIKEAGFPPGVVNIVPGYGPTAGAAISSHMD

SEQ ID NO: 83436 - protein, 73 aa, Homo sapiens
  MOD_RES (1)..(1): Any amino acid
XDCSRPSLQWYTRAQSKMRRPSLLLKDILKCTLLVFGVWILYILKLNYTTEECDMKKMHYVDPDHVKVVSSSF

SEQ ID NO: 83437 - protein, 60 aa, Homo sapiens
  MOD_RES (1)..(1): Any amino acid
XLGGPRRQPLLAGHVRSLQELEQTRLGTVALLQLMETPELAGQEDAVRMQQLKMNSHPLL

SEQ ID NO: 83438 - protein, 77 aa, Homo sapiens
GTSRMYYSRRGVITDQNSDGYCQTGTMSRHQNQNTIQELLQNCSDCLMRAELIVQPVSFPCSHRFSQSLGHTRLSSG

SEQ ID NO: 83439 - protein, 267 aa, Homo sapiens
  MOD_RES (1)..(1): Any amino acid
XRQFMRSVSSSSTASASAKKIIVKHVTVIGGGLMGAGIAQAGDEFVEKTLSTIATSTDAASVVHSTDLVVEAIVENLKVKNELFKRLDKFAAEHTIFASNTSSLQITSIANATTRQDRFAGLHFFNPVPVMKLVEVIKTPMTSQKTFESLVDFSKALGKHPVSCKDTPGFIVNRLLVPYLMEAIRLYERGDASKEDIDTAMKLGAGYPMGPFELLDYVGLDTTKFIVDGWHEMDAENPLHQPSPSLNKLVAENKFGKKTGEGFYKYK

SEQ ID NO: 83440 - protein, 235 aa, Homo sapiens
MAKDAGLIEANGELKVFIDQNLSPGKGVVSLVAVHPSTVNPLGKQLLPKTFGQSNVNIAQQVVIGTPQRPAASNTLVVGSPHTPSTHFASQNQPSDSSPWSAGKRNRKGEKNGKGLRHFSMKVCEKVQRKGTTSYNEVADELVAEFSAADNHILPNESAYDQKNIRRRVYDALNVLMAMNIISKEKKEIKWIGLPTNSAQECQNLEVERQRRLERIKQKQSQLQELILQQIAFKN

SEQ ID NO: 83441 - protein, 755 aa, Homo sapiens
MEPIDLSIPKNFRKGDKDLATPSEAKKPEEEAGSSEQPSPCPAPGPSLPVTLGPSGILESPMAPAPAATPEPPAQPLQGPVQLAVPIYSSALVSSPPLVGSSALLSGTALLRPLRPKPPLLLPKPPVTEELPPLASIAQIISSVSSAPTLLKTKVADPGPASTGSNTTASDSLGGSVPKAATTATPAATTSPKESSEPPAPASSPEAASPTEQGPAGTSKKRGRKRGMRSRPRANSGGVDLDSSGEFASIEKMLATTDTNKFSPFLQTAEDNTQDEVAGAPADHHGPSDEEQGSPPEDKLLRAKRNSYTNCLQKITCPHCPRVFPWASSLQRHMLTHTDSQSDAETAAAAGEVLDLTSRDREQPSEGATELRQVAGDAPVEQATAETASPVHREEHGRGESHEPEEEHGTEESTGDADGGRGRVEQPEPGPGLRHQAHGLQAGGGRRRGRAGGAASQEQKLACDTCGKSFKFLGTLSRHRKAHGRQEPKDEKGDGASTAEEGPQPAPEQEEKPPETPAEVVESAPGAGEAPAEKLAEETEGPSDGESAAEKRSSEKSDDDKKPKTDSPKSVASKADKRKKVCSVCNKRFWSLQDLTRHMRSHTGERPYKCQTCERTFTLKHSLVRHQRIHQKARHAKHHGKDSDKEERGEEDSENESTHSGNNAVSENEAELAPNASNHMAVTRSRKEGLASATKDCSHREEKVTAGWPSEPGQGDLNPESPAALGQDLLEPRSKRPAHPILATADGASQLVGME

SEQ ID NO: 83442 - protein, 33 aa, Homo sapiens
PMPSNKDYVVRPKWNVEMESSRVLLLLLSVVTP

SEQ ID NO: 83443 - protein, 188 aa, Homo sapiens
MKKGIRYETSRKTSYIFQPQHGPWQTRMRKISNHGSLRVAKVAYPLGLCVGVFIYVAYIKWHRATATQAFFSITRAAPGARWGQQAHSPLGTAADGHEVFYGIMFDAGSTGTRVHVFQFTRPPRETPTLTHETFKALKPGLSAYADDVEKSAQGIRELLDVAKQDIPFDFWKATPLVLKATAGLRLLP

SEQ ID NO: 83444 - protein, 30 aa, Homo sapiens
MHGAPRLTFPCASEYLWHAREKAYQDHRRK

SEQ ID NO: 83445 - protein, 226 aa, Homo sapiens
MGKRGRPRKEARCEGAGLAPAAPPAVPPAVAAPQPPALPEDPAGAKPRCPFSDIFNTSENSMEKHINTFLQNVQILLEAASYLEQIEKENKKCEHGYASSFPSMPSPRLQHSKPPRRLSRAQKHSSGSSNTSTANRRAHLRLCLERLKVLIPLGPDCTRHTTLGLLNKAKAHIKKLEEAERKSQHQLENLEREQRFLKWRLEQLQGPQEMERIRMDSIGSTISSDR

SEQ ID NO: 83446 - protein, 102 aa, Homo sapiens
MRMQFWKKTVEDIYCDNPPHQPVAIELWKAVKRHNLTKRWLMKIVDEREKNLDDKAYRNIKELENYAENTQSSLLYLTLEILGIKDLHADHAASHIGKAQGI

SEQ ID NO: 83447 - protein, 95 aa, Homo sapiens
MMAAGAALALALWLLMPPVEVGGAGPPPIQDGEFTFLLPAGRKQCFYQSAPANASLETEYQVIGGAGLDVDFTLESPQGVLLGGANGGRGLQAVL

SEQ ID NO: 83448 - protein, 116 aa, Homo sapiens
MATMSSAQLISAPSLQAKLGPTGPQASELFQFWSGGSGPPWNVPDVKPFSQTPFTLSLTPPSTDLPGYEPPQALSPLPPPTPSPPAWQARGLGTARLQLVEFSAFVEPPDAVDSYQ

SEQ ID NO: 83449 - protein, 54 aa, Homo sapiens
MTPQSLLQTTLFLLSLLFLVQGAHGRGHREDFRFCSQRNQTHRSSLHYKPTPDL

SEQ ID NO: 83450 - protein, 270 aa, Homo sapiens
MLSPWYDEFLDEEDYWFLLFTTQNRFISSRQHKREFIGKEENILLYKRIQQSLELSQALADMKEMDYRQWRKIATEDLKQGGSLQVELTSPVFLTDITKMSFEELCYKNPKMAIQKISDDYKIYCEKAPKIDFKMEIIKETKTVSRSNRKMSLLKRTLVRKPSMRPRNLTEVLLNTQHLEFFREFLKERKAKIPLQFLTAVQKISIETNEKICKSLIENVIKTFFQGQLSPEEMLQCDAPIIKEIASMRHVTTSTLLTLQGHVMKSIEEK

SEQ ID NO: 83451 - protein, 295 aa, Homo sapiens
MAGPNQLCIRRWTTKHVAVWLKDEGFFEYVDILCNKHRLDGITLLTLTEYDLRSPPLEIKVLGDIKRLMLSVRKLQKIHIDVLEEMGYNSDSPMGSMTPFISALQSTDWLCNGELSHDCDGPITDLNSDQYQYMNGKNKHSVRRLDPEYWKTILSCIYVFIVFGFTSFIMVIVHERVPDMQTYPPLPDIFLDSVPRIPWAFAMTEVCGMILCYIWLLVLLLHKHRSILLRRLCSLMGTVFLLRCFTMFVTSLSVPGQHLQCTGKKGKAGQCIISRYMAVYGRNYIEPLPFGVALV

SEQ ID NO: 83452 - protein, 188 aa, Homo sapiens
MRPFFLLCFALPGLLHAQQACSRGACYPPVGDLLVGRTRFLRASSTCGLTKPETYCTQYGEWQMKCCKCDSRQPHNYYSHRVENVASSSGPMRWWQSQNDVNPVSLQLDLDRRFQLQEVMMEFQGPMPAGMLIERSSDFGKTWRVYQYLAADCTSTFPRVRQGRPQSWQDVRCQSLPQRPNARLNGGK

SEQ ID NO: 83453 - protein, 179 aa, Homo sapiens
  MOD_RES (1)..(1): Any amino acid
XNPILLNSSIPEDPSIKADINKWRIKLDNYSTQELGKTIVYLDGSSQSCRFRECNMGNLICDAMINNNLRHTDEMFWNHVSMCILNGGGIRSPIDERNNGTITWENLAAVLPFGGTFDLVQLKGSTLKKAFEHSVHRYGQSTGEFLQVGDLKECCPICINQDDSWKEQPTAQTYLNTWF

SEQ ID NO: 83454 - protein, 52 aa, Homo sapiens
GFFDIPVDNLYAEPAVLKWIRENISEWRNCTIVSPDAGGAKSNFNRTDKLRT

SEQ ID NO: 83455 - protein, 713 aa, Homo sapiens
VPSAGEPGEEAPYLVKVHQVWAVKAGGLKKDSLLTVRLGTWGHPAFPSCGRLKEDSRYIFFMEPDANSTSRAPAAFRASFPPLETGRNLKKEVSRVLCKRCALPPRLKEMKSQESAAGSKLVLRCETSSEYSSLRFKWFKNGNELNRKNKPQNIKIQKKPGKSELRINKASLADSGEYMCKVISKLGNDSASANITIVESNEIITGMPASTEGAYVSSESPIRISVSTEGANTSSSTSTSTTGTSHLVKCAEKEKTFCVNGGECFMVKDLSNPSRYLCKCPNEFTGDRCQNYVMASFYKHLGIEFMEAEELYQKRVLTITGICIALLVVGIMCVVAYCKTKKQRKKLHDRLRQSLRSERNNMMNIANGPHHPNPPPENVQLVNQYVSKNVISSEHIVEREAETSFSTSHYTSTAHHSTTVTQTPSHSWSNGHTESILSESHSVIVMSSVENSRHSSPTGGPRGRLNGTGGPRECNSFLRHARETPDSYRDSPHSERYVSAMTTPARMSPVDFHTPSSPKSPPSEMSPPVSSMTVSMPSMAVSPFMEEERPLLLVTPPRLREKKFDHHPQQFSSFHHNPAHDSNSLPASPLRIVEDEEYETTQEYEPAQEPVKKLANSRRAKRTKPNGHIANRLEVDSNTSSQSSNSESETEDERVGEDTPFLGIQNPLAASLEATPAFRLADSRTNPAGRFSTQEEIQARLSSVIANQDPIAV

SEQ ID NO: 83456 - protein, 162 aa, Homo sapiens
  MOD_RES (1)..(1): Any amino acid
XADSELQLVEQRIRSFPDFPTPGVVFRDISPVLKDPASFRAAIGLLARHLKATHGGRIDYIAGLDSRGFLFGPSLAQELGLGCVLIRKRGKLPGPTLWASYSLEYGKAELEIQKDALEPGQRVVVVDDLLATGGAGLEHLLSAAQANWGPHPPIPRNHERCL

SEQ ID NO: 83457 - protein, 438 aa, Homo sapiens
MLLNRMSSDDRHLGSSCGSFIKTEPSSPSSGIDALSHHSPSGSSDASGGFGLALGTHANGLDSPPMFAGAGLGGTPCRKSYEDCASGIMEDSAIKCEYMLNAIPKRLCLVCGDIASGYHYGVASCEACKAFFKRTIQGNIEYSCPATNECEITKRRRKSCQACRFMKCLKVGMLKEGVRLDRVRGGRQKYKRRLDSESSPYLSLQISPPAKKPLTKIVSYLLVAEPDKLYAMPPPGMPEGDIKALTTLCDLADRELVVIIGWAKHIPGFSSLSLGDQMSLLQSAWMEILILGIVYRSLPYDDKLVYAEDYIMDEEHSRLAGLLELYRAILQLVRRYKKLKVEKEEFVTLKALALANSDSMYIEDLEAVQKLQDLLHEALQDYELSQRHEEPWRTGKLLLTLPLLRQTAAKAVQHFYSVKLQGKVPMHKLFLEMLEAKV

SEQ ID NO: 83458 - protein, 189 aa, Homo sapiens
  MOD_RES (1)..(1): Any amino acid
XLRRAESTRRVLGLELNKDRDVERIHGGGINTLDIEPVEGRYMLSGGSDGVIVLYDLENSSRQSYYTCKAVCSIGRDHPDVHRYSVETVQWYPHDTGMFTSSSFDKTLKVWDTNTLQTADVFNFEETVYSHHMSPVSTKHCLVAVGTRGPKVQLCDLKSGSCSHILQGIFILFQTATTLSKRFNKKKRY

SEQ ID NO: 83459 - protein, 213 aa, Homo sapiens
  MOD_RES (1)..(1): Any amino acid
XYFRDPYHVWYQGNASLGGHLTHVLEGPDTNTTIIQLQPLQEPESWARTQSGLQSYLLQFHGLVRLVHQERTLAFPLTIRCFLGCELPPEGSRAHVFFEVAVNGSSFVSFRPERALWQADTQVTSGVVTFTLQQLNAYNRTRYELREFLEDTCVQYVQKHISAENTKDNGVGAGSLWPILQRQTESPEAFKRYNQINKSSTIKIQHSILPDLY

SEQ ID NO: 83460 - protein, 395 aa, Homo sapiens
MAAVATCGSVAASTGSAVATASKSNVTSFQRRGPRASVTNDSGPRLVSIAGTRPSVRNGQLLVSTGLPALDQLLGGGLAVGTVLLIEEDKYNIYSPLLFKYFLAEGIVNGHTLLVASAKEDPANILQELPAPLLDDKCKKEFDEDVYNHKTPESNIKMKIAWRYQLLPKMEIGPVSSSRFGHYYDASKRMPQELIEASNWHGFFLPEKISSTLKVEPCSLTPGYTKLLQFIQNIIYEEGFDGSNPQKKQRNILRIGIQNLGSPLWGDDICCAENGGNSHSLTKFLYVLRGLLRTSLSACIITMPTHLIQNKAIIARVTTLSDVVVGLESFIGSERETNPLYKDYHGLIHIRQIPRLNNLICDESDVKDLAFKLKRKLFTIEDWRKSLWSFPNLKI

SEQ ID NO: 83461 - protein, 145 aa, Homo sapiens
  MOD_RES (1)..(1): Any amino acid
XECPVFEPSWEEFADPFAFIHKIRPIAEQTGICKVRPPPDWQPPFACDVDKLHFTPRIQRLNELELVAEEGGFAVVCKDRKWTKIATKMGFAPGKAVGSHIRGHYERILNPYNLFLSGDSLRVSLGASLNLFYLTTYWYIVFSGK

SEQ ID NO: 83462 - protein, 107 aa, Homo sapiens
HNDYMCPATNQCTIDKNRRKSCQACRLRKCYEVGMMKGGFVDLTLHDQVHLLECAWLEILMIGLVWRSMEHPGKLLFAPNLLLDRNQGKCVEGMVEIFDMLLATSSR

SEQ ID NO: 83463 - protein, 114 aa, Homo sapiens
DPLVSPVSPSPVQMMKRSVSHPGSCSSERSSHSIKEPVSTLHRLSQRRRRTYSDTDSCSDIPLEDPDNVGGEMKERNREGEGRKKLSWANQARPGREEEERRRVKEVEYVKKVI

SEQ ID NO: 83464 - protein, 46 aa, Homo sapiens
  MOD_RES (1)..(1): Any amino acid
XSTYLPDTEGAFTVTIATRIDRPSIHSQEMLGQFLQEVSIMAVMKT

SEQ ID NO: 83465 - protein, 43 aa, Homo sapiens
  MOD_RES (1)..(1): Any amino acid
XGPFPLPIIGNLFQLELKNIPKSFTRESFLIMDLPGRTSGGFP

SEQ ID NO: 83466 - protein, 296 aa, Homo sapiens
MSDKMSSFLHIGDICSLYAEGSTNGFISTLGLVDDRCVVQPETGDLNNPPKKFRDCLFKLCPMNRYSAQKQFWKAAKPGANSTTDAVLLNKLHHAADLEKKQNETENRKLLGTVIQYGNVIQLLHLKSNKYLTVNKRLPALLEKNAMRVTLDEAGNEGSWFYIQPFYKLRSIGDSVVIGDKVVLNPVNAGQPLHASSHQLVDNPGCNEVNSVNCNTSWKIVLFMKWSDNKDDILKGGDVVRLFHAEQEKFLTCDEHRKKQHVFLRTTGRQSATSATSSKALWEVEVRVGWRKGSWV

SEQ ID NO: 83467 - protein, 198 aa, Homo sapiens
FRYLVMEIRKILAKISICFQGHRICLALESIISEEERKTRSAPFFPIIIGRKPGSTSSPKALSPPPSVDSNYPTRERASFNRMVMHSAASPTQAPILNPSMVTNEGLGLTTTASGTDISSNSLKDCLPKSAQLLKSVFVKNVGWATQLTSGAVWVQFNDGSQLVVQAGVSSISYTSPNGQTTRYGENEKLPDYIKQKL

SEQ ID NO: 83468 - protein, 103 aa, Homo sapiens
MQSLRPEQTRGLLEPERTKTLLPRESRAWEKPPHPACTKDWEAVEVGASSHDSDEKGLCGVVKSSTTNNHSLGSVRAFFVPGFNGDAYDVSHLTIMVAVVLKV

SEQ ID NO: 83469 - protein, 106 aa, Homo sapiens
MALTQGPLKFMDVAIEFSQEEWKCLDPAQRTLYRDVMLENYRNLVSLGICLPDLSVTSMLEQKRDPWTLQSEEKIANDPDGRECIKGVNTGESSGGQSGGPIIFVF

SEQ ID NO: 83470 - protein, 161 aa, Homo sapiens
MLKVSAVLCVCAAAWCSQSLAAAAAVAAAGGRSDGGNFLDDKQWLTTISQYDKEVGQWNKFRDDDYFRTWSPGKPFDQALDPAKDPCLKMKCSRHKVCIAQDSQTAVCISHRRLTHRMKEAGVDHRQWRGPILSTCKQCPVVYPSPVCGSDGHTYSFQCKL

SEQ ID NO: 83471 - protein, 402 aa, Homo sapiens
MNCVQERAKIEKAYGQQLTDWAKRWRQLIEKGPQYGSLERAWGAIMTEADKVSELHQEVKNNLLNEDLEKVKNWQKDAYHKQIMGGFKETKEAEDGFRKAQKPWAKKMKELEAAKKAYHLACKEEKLAMTREMNSKTEQSVTPEQQKKLQDKVDKCKQDVQKTQEKYEKVLEDVGKTTPQYMENMEQVFEQCQQFEEKRLVFLKEVLLDIKRHLNLAENSSYIHVYRELEQAIRGADAQEDLRWFRSTSGPGMPMNWPQFEEWNPDLPHTTTKKEKQPKKAEGVALTNATGAVESTSQAGDRGSVSSYDRGQPYATEWSDDESGNPFGGSETNGGANPFEDDSKGVRVRALYDYDGQEQDELSFKAGDELTKLGEEDEQGWCRGRLDSGQLGLYPANYVEAI

SEQ ID NO: 83472 - protein, 545 aa, Homo sapiens
METELCAAHLPTESDAPNHYQAVCRALFAETMELHTFLTKIKSAKENLKKIQEMEKSDESSTDLEELKNADWARFWVQVMRDLRNGVKLKKVQERQYNPLPIEYQLTPYEMLMDDIRCKRYTLRKVMVNGDIPPRLKKSAHEIILDFIRSRPPLNPVSARKLKPTPPRPRSLHERILEEIKAERKLRPVSPEEIRRSRLDVTTPESTKNLVESSMVNGGLTSQTKENGLSTSQQVPAQRKKLLRAPTLAELDSSESEEETLHKSTSSSSVSPSFPEEPVLEAVSTRKKPPKFLPISSTPQPERRQPPQRRHSIEKETPTNVRQFLPPSRQSSRSLEEFCYPVECLALTVEEVMHIRQVLVKAELEKYQQYKDIYTALKKGKLCFCCRTRRFSFFTWSYTCQFCKRPVCSQCCKKMRLPSKPYSTLPIFSLGPSALQRGESSMRSEKPSTAHHRPLRSIARFSSKSKSMDKSDEELQFPKELMEDWSTMEVCVDCKKFISEIISSSRRSLVLANKRARLKRKTQSFYMSSPGPSEYCPSERTISEI

SEQ ID NO: 83473 - protein, 163 aa, Homo sapiens
  MOD_RES (1)..(1): Any amino acid
XPSARFPHQRRKKRREMDDGLAEGGPQRSNTYVIKLFDRSVDLAQFSENTPLYPICRAWMRNSPSGSEVTNSKSRDVYKLPPPTPPGPPGDACRSRIPSPLQPEMQGTPDDEPSEPEPSPSTLIYRNMQRWKRIRQRWKEASHRNQLRYSESMKILREMYERQ

SEQ ID NO: 83474 - protein, 45 aa, Homo sapiens
MDVRGPEAPGGRALRDAAENLFQELQEHFQALTATLNLRNILFYL

SEQ ID NO: 83475 - protein, 115 aa, Homo sapiens
MSESGHSQPGLYGIERRRRWKEPGSGGPQNLSGPGGRERDYIAPWERERRDASEETSTSVMQKTPIILSKPPAERSKQPPPPTAPAAPPAPAPLEKPIVLMKPREEGKGPVAVTG

SEQ ID NO: 83476 - protein, 121 aa, Homo sapiens
MGRKTSRVQQGPPRSPACSAHGERSWGLEFPPFRWLLGIAGRTHLAALPPFQWVLAFEIFIPLVLFFILLGLRQKKPTISVKEVSFYTAAPLTSAGILPVMQSLCPDGQRDEFGFLQYANS

SEQ ID NO: 83477 - protein, 83 aa, Homo sapiens
METLYRVPFLVLECPNLKLKKPPWLHMPSAMTVYALVVVSYFLITGGIIYDVIVEPPSVGSMTDEHGHQRPVAFLAYRGYLMG

SEQ ID NO: 83478 - protein, 159 aa, Homo sapiens
  MOD_RES (1)..(1): Any amino acid
XWIETTAYALLHLLLHEGKAEMADQAAAWLTRQGSFQGGFRSTQDTVIALDALSAYWIASHTTEERGLNVTLSSTGRNGFKSHALQLNNRQIRGLEEELQFSLGSKINVKVGGNSKGTLKVLRTYNVLDMKNTTCQDLQIEVTVKGHVEYTTRDTPAAV

SEQ ID NO: 83479 - protein, 18 aa, Homo sapiens
  MOD_RES (1)..(1): Any amino acid
XVPPDSDDNKTKKLCVIQ

SEQ ID NO: 83480 - protein, 60 aa, Homo sapiens
  MOD_RES (1)..(1): Any amino acid
XINHSNNAIVKPPEMTPQAAAKELEEVMKRVREAQSFISAAIEPGWLHSTSLCNDFLGCF

SEQ ID NO: 83481 - protein, 267 aa, Homo sapiens
MPERDSEPFSNPLAPDGHDVDDPHSFHQSKLTNEDFRKLLMTPRAAPTSAPPSKSRHHEMPREYNEDEDPAARRRKKKSYYAKLRQQEIERERELAEKYRDRAKERRDGVNKDYEETELISTTANYRAVGPTAEADKSAAEKRRQLIQESKFLGGDMEHTHLVKGLDFALLQKVRAEIASKEKEEEELMEKPQKETKKDEDPENKIEFKTRLGRNVYRMLFKSKAYERNELFLPGRMAYVVDLDDEYADTDIPTTLIRSKADCPTME

SEQ ID NO: 83482 - protein, 166 aa, Homo sapiens
MELFLFLSPTSYPSPVWGLGVDPSLQIDVLTELELGESTTGVRQVPGLHNGTKAFLFQDTPRSIKASTATAEQFFQKLRNKHEFTILVTLKQTHLNSGVILSIHHLDHRYLELESSGHRNEVRLHYRSGSHRPHTEVFPYILADDKWHKLSLAISASHLILHIDCN

SEQ ID NO: 83483 - protein, 228 aa, Homo sapiens
  MOD_RES (1)..(1): Any amino acid
XLPEKKNKHMLAYMQLLEDYSEPQPSMFYQTPQNEHIYQQKNKLLMEVYGFSDSFSGVDSVQELAPPPALPPKQRQLQASCAASSFSSVSHCVQQTKVAFTPEDGSAAQGLSVSVSNSFLSRHGSLPVPSYKSVFRSYSQDFVPHHQASVPPFLPPTSSSSPHFPPAHQSQSSDLAVPTMAGPPPSTVDGPLSASQESSFHGNTVCLPSETSFTDSEPPAGKDGHPRD

SEQ ID NO: 83484 - protein, 182 aa, Homo sapiens
MVGYDPKPDGRNNTKFQVAVAGSVSGLVTRALISPFDVIKIRFQLQHERLSRSDPSAKYHGILQASRQILQEEGPTAFWKGHVPAQILSIGYGAVQFLSFEMLTELVHRGSVYDAREFSVHFVCGGLAACMATLTVHPVDVLRTRFAAQGEPKVRRYKGLMDCAKQVLQKEGALGFFKGLSP

SEQ ID NO: 83485 - protein, 11 aa, Homo sapiens
  MOD_RES (1)..(1): Any amino acid
XCGCLLSRLHP

SEQ ID NO: 83486 - protein, 134 aa, Homo sapiens
MEESPLSRAPSRGGVNFLNVARTYIPNTKVECHYTLPPGTMPSASDWIGIFKVEAACVRDYHTFVWSSVPESTTDGSPIHTSVQFQASYLPKPGAQLYQFRYVNRQGQVCGQSPPFQFREPRPMDELVTLEEAD

SEQ ID NO: 83487 - protein, 102 aa, Homo sapiens
GGGGGVPAPRSPAREPRPRSCLLLPPPWGAAMTVYREGLGCQPTGSPDCGCGRFWIFSCPKPRPICSTSRRDGCRSWTSLESLPPPRSPPPLLRSGRNIGLC

SEQ ID NO: 83488 - protein, 252 aa, Homo sapiens
MDLHKQWENTETNWHKEKMELLDQFDNERKEWESQWKIMQKKIEEASTLVLLSTELSLCREVKLWRKININESAKIIDLYHEKTIPEKVIESSPNYPDLGQSEFIRTNHKDGLRKENKREQSLVSGGNQMCKEQKATKKSKVGFLDPLATDNQKECEAWPDLRTSEEDSKSCSGALSTALEELAKVSEELCSFQEEIRKRSNHRRMKSDSFLQEMPNVTNIPHGDPMINNDQCILPISLEKEKQKNRKNLSC

SEQ ID NO: 83489 - protein, 114 aa, Homo sapiens
MSLEQRSPHCKPDEDLEAQGEDLGLMGAQEPTGEEEETTSSSDSKEEEVSAAGSSSPPQSPQGGASSSISVYYTLWSQFDEGSSSQEEEEPSSSVDPAQLEFMFQEALKLKVAE

SEQ ID NO: 83490 - protein, 47 aa, Homo sapiens
MIDLEPTVVDEVRAGTYRQLFHPEQLITGKEDAANNYARGHYTVGKE

SEQ ID NO: 83491 - protein, 82 aa, Homo sapiens
MEMQDLTSPHSRLSGSSESPSGPKLGNSHINSNSMTPNGTEVKTEPMSSSETASTTADGSLNNFSGSGRDYFSNNSAGNWEQ

SEQ ID NO: 83492 - protein, 53 aa, Homo sapiens
MRITAAILTARSRWRLRNSISAFLFTVTFAWCPPGLSNLTILSCPEMRSCCVA

SEQ ID NO: 83493 - protein, 71 aa, Homo sapiens
PLFNSYGKYVVKLYWMGCWRKITIDDFLPFDEDNNLLLPATTYEFELWPMLLSKAIIKLANIEYVMTLSLT

SEQ ID NO: 83494 - protein, 164 aa, Homo sapiens
  MOD_RES (1)..(1): Any amino acid
XAGTGPGSKGERAEDSGQRPRRWCPPPFFYRRRFVRGPRPPNQQQPIEGTDRVEPKETAPLEGHQQQGDERVPPPRFRPRYRRPFRPRPRQQPTTEGGDGETKPSQGPADGSRPEPQRPRNRPYFQRRRQQAPGPQQAPGPRQPAAPETSAPVNSGDPTTTILE

SEQ ID NO: 83495 - protein, 161 aa, Homo sapiens
MKAAAGEFADDPCSSVKRGNMVRAARALLSAVTRLLILADMADVYKLLVQLKVVEDGILKLRNAGNEQDLGIQYKALKPEVDKLNIMAAKRQQELKDVGHRDQMAAARGILQKNVPILYTASQACLQHPDVAAYKANRDLIYKQLQQAVTGISNAAQATAS

SEQ ID NO: 83496 - protein, 59 aa, Homo sapiens
MSHQTGIQASEDVKEIFARARNGKYRLLKISIENVSAPQSISNVSASISGMEITKQSNL

SEQ ID NO: 83497 - protein, 102 aa, Homo sapiens
MREYGVERDLAVYNQLLNIFPKEVFRPRNIIQRIFVHYPRQQECGIAVLEQMENHGVMPNKETEFLLIQIFGRKSYPMLKLVRLKLWFPRFMNVNPFPVPRD

SEQ ID NO: 83498 - protein, 112 aa, Homo sapiens
MVPQPAVILPGPPVDPDSQADTVHSNPELDVLLLGSVDGRHLLRTLSRAKFWPRRRFNFFVLENNLEAVARHMLIFSLALEEPEKMGLQERSETFLEVWGNALLRPPVAAFV

SEQ ID NO: 83499 - protein, 65 aa, Homo sapiens
MRGSQEVLLMWLLVLAVGGTEHAYRPGRRVCAVRAHGDPVSESFVQRVYQPFLTTCDGHRACSTY

SEQ ID NO: 83500 - protein, 746 aa, Homo sapiens
MPSALAIFTCRPNSHPFQERHVYLDEPIKIGRSVARCRPAQNNATFDCKVLSRNHALVWFDHKTGKFYLQDTKSSNGTFINSQRLSRGSEESPPCEILSGDIIQFGVDVTENTRKVTHGCIVSTIKLFLPDGMEARLRSDVIHAPLPSPVDKVAANTPSMYSQELFQLSQYLQEALHREQMLEQKLATLQRLLAITQEASDTSWQALIDEDRLLSRLEVMGNQLQACSKNQTEDSLRKELIALQEDKHNYETTAKESLRRVLQEKIEVVRKLSEVERSLSNTEDECTHLKEMNERTQEELRELANKYNGAVNEIKDLSDKLKVAEGKQEEIQQKGQAEKKELQHKIDEMEEKEQELQAKIEALQADNDFTNERLTALQEKLIVEGHLTKAVEETKLSKENQTRAKESDFSDTLSPSKEKSSDDTTDAQMDEQDLNEPLAKVSLLKALLEEERKAYRNQVEESTKQIQVLQAQLQRLHIDTENLREEKDSEITSTRDELLSARDEILLLHQAAAKVASERDTDIASLQEELKKVRAELERWRKAASEYEKEITSLQNSFQLRCQQCEDQQREEATRLQGELEKLRKEWNALETECHSLKRENVLLSSELQRQEKELHNSQKQSLELTSDLSILQMSRKELENQVGSLKEQHLRDSADLKTLLSKAENQAKDVQKEYEKTQTVLSELKLKFEMTEQEKQSITDELKQCKNNLKLLREKGNNPSILQPVPAVFIGLFLAFLFWCFGPLW

SEQ ID NO: 83501 - protein, 604 aa, Homo sapiens
MSDCCSAPGISWEAGVGRPAVPGLELQIRRGAMSEETIKFSPVAKKLFVVTAVSAISVIFLAHHFKRKRGKKKGKILPWEPEHLILEYTKRAASDKGSSCSSSRQNLTLSLSSTKDKGSQVCNYANGGLFSKYSGSAQSLASVQSVNSCHSCACGNSNSWDKADEDDIKLVNIPVTTPENLYLMGMELFEEALRRWEQALTFRNRQAEDEACGSIKLGAGDAIAEENVDDIISTEFIHKLEALLQRAYRLQEEFEATLGASDPNSLADDIDKDTDITMKGNVEDFGLRDTLSIASTDSFASAAELAEHREVRHTYSLESLCHCPFYEEAMHLVEEGKIYSRVLRTEMLECLGDSDFLAKLHCIRQAFQVILSESANRIFLAESGRKILSALIVKARKNPKKFEDVFDEMIYFLEQTDHWGSTEMELAARGVKNLNFYDVVLDFILMDSFEDLENPPTSIQNVVNNRWLNSSFKETAVASSCWSVLKQKRQQMKIPDGFFAHFYAICEHISPVLAWGFLGPRNSLYDLCCFFKNQVLLFLKDIFDFEKVRYSSTETLAEDLMQLLIRRTELLMAYLEADALRHTSSCLSSHGHVMSTGLLEAKVQ

SEQ ID NO: 83502 - protein, 641 aa, Homo sapiens
MGPERTGAAPLPLLLVLALSQGILNCCLAYNVGLPEAKIFSGPSSEQFGYAVQQFINPKGNWLLVGSPWSGFPENRMGDVYKCPVDLSTATCEKLNLQTSTSIPNVTEMKTNMSLGLILTRNMGTGGFLTCGPLWAQQCGNQYYTTGVCSDISPDFQLSASFSPATQPCPSLIDVVVVCDESNSIYPWDAVKNFLEKFVQGLDIGPTKTQVGLIQYANNPRVVFNLNTYKTKEEMIVATSQTSQYGGDLTNTFGAIQYARKYAYSAASGGRRSATKVMVVVTDGESHDGSMLKAVIDQCNHDNILRFGIAVLGYLNRNALDTKNLIKEIKAIASIPTERYFFNVSDEAALLEKAGTLGEQIFSIEGTVQGGDNFQMEMSQVGFSADYSSQNDILMLGAVGAFGWSGTIVQKTSHGHLIFPKQAFDQILQDRNHSSYLGYSVAAISTGESTHFVAGAPRANYTGQIVLYSVNENGNITVIQAHRGDQIGSYFGSVLCSVDVDKDTITDVLLVGAPMYMSDLKKEEGRVYLFTIKEGILGQHQFLEGPEGIENTRFGSAIAALSDINMDGFNDVIVGSPLENQNSGAVYIYNGHQGTIRTKYSQLLCTIISCQTCSFRKSWDPMEPLGAISSTLGGPWMAMEI

SEQ ID NO: 83503 - protein, 95 aa, Homo sapiens
  MOD_RES (1)..(1): Any amino acid
XKKYASDKYKDIYTELSIAKAKADCDISRLKEQLKAATEALGEKSPDSATVSGYDIMKSKSNPDFLKKDRSCVTRQLRNIRSKVSLGSSPLVGGA

SEQ ID NO: 83504 - protein, 63 aa, Homo sapiens
  MOD_RES (1)..(1): Any amino acid
XFGYSSLEAIMGLESSSELFTISVNGVLYLQMGQWTSVFLDNASGCSLTVRSGSHFSAVLLGV

SEQ ID NO: 83505 - protein, 163 aa, Homo sapiens
MTAPSCAFPVQFRQPSVSGLSQITKSLYISNGVAANNKLMLSSNQITMVINVSVEVVNTLYEDIQYMQVPVADSPNSRLCDFFDPIADHIHSVEMKQGRTLLHCAAGVSRSAALCLAYLMKYHAMSLLDAHTWTKSCRPIIRPNSGFWEQLIHYEFQLFGKNT

SEQ ID NO: 83506 - protein, 131 aa, Homo sapiens
MANMNSDSRHLGTSEVDHERDPGPMNIQFEPSDLRSKRPFCIEPTNIVNVNHVIQRVSDHASAMNKRIHYYSRLTTPADKALIAPDHVVPAPEECYVYSPLGSAYKLQSYTEGYGKNTSLVTIFMIWNTMM

SEQ ID NO: 83507 - protein, 115 aa, Homo sapiens
EKIPLPFFAMSLSLSPGTHLLAVGFAGLHRPPGCSSRPPATRSLCGRSPASEMQQGLWWWASRLVMPGTWTQAWQRRQVVNGLMLGQARIHVNRLEQAVVNLAPCEYFHTCCPFA

SEQ ID NO: 83508 - protein, 89 aa, Homo sapiens
MAQSRVLLLLLLLPPQLHLGPVLAVRAPGFGRSGGHSLSPEENEFAEEEPVLVLSPEEPGPGPAAVSCPRDCACSQEGVVDCGGIDLRE

SEQ ID NO: 83509 - protein, 925 aa, Homo sapiens
MDSTLTASEIRQRFIDFFKRNEHTYVHSSATIPLDDPTLLFANAGMNQFKPIFLNTIDPSHPMAKLSRAANTQKCIRAGGKHNDLDDVGKDVYHHTFFEMLGSWSFGDYFKELACKMALELLTQEFGIPIERLYVTYFGGDEAAGLEADLECKQIWQNLGLDDTKILPGNMKDNFWEMGDTGPCGPCSEIHYDRIGGRDAAHLVNQDDPNVLEIWNLVFIQYNRAQVPDHTLGKLVLRMPMGLTWPTGCWLTTLGPSLWHWLMVAGLTTQGVVFASYRYVLRRILRRAVRYAHEKLNASRGFFATLVDVVVQSLGDAFPELKKDPDMVKDIINEEEVQFLKTLSRGRRILDRKIQSLGDSKTIPGDTAWLLYDTYGFPVDLTGLIAEEKGLVVDMDGFEEERKLAQLKSQGKGAGGEDLIMLDIYAIEELRARGLEVTDDSPKYNYHLDSSGSYVFENTVATVMALRREKMFVEEVSTGQECGVVLDKTCFYAEQGGQIYDEGYLVKVDDSSEDKTEFTVKNAQVRGGYVLHIGTIYGDLKVGDQVWLFIDEPRRRPIMSNHTATHILNFALRSVLGEADQKGSLVAPDRLRFDFTAKGAMSTQQIKKAEEIANEMIEAAKAVYTQDCPLAAAKAIQGLRAVFDETYPDPVRVVSIGVPVSELLDDPSGPAGSLTSVEFCGGTHLRNSSHAGAFVIVTEEAIAKGIRRIVAVTGAEAQKALRKAESLKKCLSVMEAKVKAQTAPNKDVQREIADLGEALATAVIPQWQKDELRETLKSLKKVMDDLDRASKADVQKRVLEKTKQFIDSNPNQPLVILEMESGASAKALNEALKLFKMHSPQTSAMLFTVDNEAGKITCLCQVPQNAANRGLKASEWVQQVSGLMDGKGGGKDVSAQATGKNVGCLQEALQLATSFAQLRLGDVKN

SEQ ID NO: 83510 - protein, 62 aa, Homo sapiens
CAPMKINVNVNSAAGLLDQFYEKQRLLIISAPDPSNRYYKMQISMLQAISAPHSLLLQHGVD

SEQ ID NO: 83511 - protein, 117 aa, Homo sapiens
ATLKGNLSFDWYIKTSHNHLLIVSTAEILFNDSVFTLLPGQGAFVRSQTETKVEPFEVPNPLPLIVGSSVGGLLLLALITAALYKVLPAAPPPPPFILSGLALQLRASVSPAGLPAV

SEQ ID NO: 83512 - protein, 272 aa, Homo sapiens
MRLWKAVVVTLAFMSVDICVTTAIYVFSHLDRSLLEDIRHFNIFDSVLDLWAACLYRSCLLLGATIGVAKNSALGPRRLRASWLVITLVCLFVGIYAMVKLLLFSEVRRPIRDPWFWALFVWTYISLGASFLLWWLLSTVRPGTQALEPGAATEAEGFPGSGRPPPEQASGATLQKLLSYTKPDVAFLVAASFFLIVAALGETFLPYYTGRAIDGIVIQKSMDQFSTAVVIVCLLAIGRYSGRHFYPHICQTEHSPSKLSLPLTGVPGDKLL

SEQ ID NO: 83513 - protein, 96 aa, Homo sapiens
MAKREDSPGPEVQPMDKQFLVCSICLDRYQCPKVLPCLHTFCERCLQNYIPAQSLTLSCPVCRQTSILPEQGVSALQNNFFISSLMEAMQQAPDGA

SEQ ID NO: 83514 - protein, 289 aa, Homo sapiens
  MOD_RES (1)..(1): Any amino acid
XCIVGQSEQLVPADGILYAARDVTATVDSLPLITAPGSPLSPTSSASPKASILSKKLVEGLSALVVDVKFGGAAVFPNQEQARELAKTLVGVGASLGLRVAAALTAMDKPLGRCVGHALEVEEALLCMDGAGPPDLRDLVTTLGGALLWLSGHAGTQAQGAARVAAALDDGSALGRFERMLAAQGVDPGLARALCSGSPAERRQLLPRAREQEELLAPADGTVELVRALPLALVLHELGAGRSRAGEPLRLGVGAELLVDVGQRLRRGTPWLRVHRDGPALSGPQSRAL

SEQ ID NO: 83515 - protein, 82 aa, Homo sapiens
MIHELLLALSGYPGSIFTWNKRSGLQVSQDFPFLHPSETSVLNRLCRLGTDYIRFTEFIEQYTGHVQQQVSGPELRSWLLFV

SEQ ID NO: 83516 - protein, 75 aa, Homo sapiens
MCRKCSRGCPRGMVKVKDCTPWSDIECVHKESGNGHNIWVILVVTLVVPLLLVAVLIVCCCIGSGCGGDPKCMDR

SEQ ID NO: 83517 - protein, 117 aa, Homo sapiens
MREWWVQVGLLAVPLLAAYLHIPPPQLSPALHSWKSSGKFFTYKGLRIFYQDSVGVVGSPEIVVLLHGFPTSSYDWYKIWEGLTLRFHRVIALDFLGFGFSDKPRPHHYSIFEQASI

SEQ ID NO: 83518 - protein, 44 aa, Homo sapiens
MPGRSSSNSGSTGFISFSGVESALSSLKNFQACINSGMDTASSV

SEQ ID NO: 83519 - protein, 858 aa, Homo sapiens
MKKLWVKKRFQKTGHSRRAFGRLTHDSETAEDDISDVQGTQRLELRDDGAFSTPTGGSDTLVGTSLDTPPTSVTGTSEEQVSWWGSGQTVLEQEAGSGGGTRRLPGSPRQAQATGAGPRHLGVEPLVRASRANLVGASWGSEDSLSVASDLYGSAFSLYRGRALSIHVSVPQSGLRREEPDLQPQLASEAPRRPAQPPPSKSALLPPPSPRVGKRSPPGPPAQPAATPTSPHRRTQEPVLPEDTTTEEKRGKKSKSSGPSLAGTAESRPQTPLSEASGRLSALGRSPRLVRAGSRILDKLQFFEERRRSLERSDSPPAPLRPWVPLRKARSLEQPKSERGAPWGTPGASQEELRAPGSVAERRRLFQQKAASLDERTRQRSPASDLELRFAQELGRIRRSTSREELVRSHESLRATLQRAPSPREPGEPPLFSRPSTPKTSRAVSPAAAQPPSPSSAEKPGDEPGRPRSRGPAGRTEPGEGPQQEVRRRDQFPLTRSRAIQECRSPVPPPAADPPEARTKAPPGRKREPPAQAVRFLPWATPGLEGAAVPQTLEKNRAGPEAEKRLRRGPEEDGPWGPWDRRGARSQGKGRRARPTSPELESSDDSYVSAGEEPLEAPVFEIPLQNVVVAPGADVLLKCIITANPPPQVSWHKDGSALRSEGRLLLRAEGERHTLLLREARAADAGSYMATATNELGQATCAASLTVRPGGSTSPFSSPITSDEEYLSPPEEFPEPGETWPRTPTMKPSPSQNRRSSDTGSKAPPTFKVSLMDQSVREGQDVIMSIRVQGEPKPVVSWLRNRQPVRPDQRRFAEEAEGGLCRLRILAAERGDAGFYTCKAVNEYGARQCEARLEVRGE

SEQ ID NO: 83520 - protein, 1587 aa, Homo sapiens
MGDVKALLFVAAARARRLGGAAASESLAVSEAFCRVRSCQPKKCAGPQRCLNPVPAVPSPSPSVRKRQVSLNWQPLTLQEARALLKRRRPRGPGGRGLLRRRPPQRAPAGKAPVLCPLICHNGGVCVKPDRCLCPPDFAGKFCQLHSSGARPPAPAVPGLTRSVYTMPLANHRDDEHGVASMVSVHVEHPQEASVVVHQVERVSGPWEEADAEAVARAEAAARAEAAAPYTVLAQSAPREDGYSDASGFGYCFRELRGGECASPLPGLRTQEVCCRGAGLAWGVHDCQLCSERLGNSERVSAPDGPCPTGFERVNGSCEDVDECATGGRCQHGECANTRGGYTCVCPDGFLLDSSRSSCISQHVISEAKGPCFRVLRDGGCSLPILRNITKQICCCSRVGKAWGRGCQLCPPFGSEGFREICPAGPGYHYSASDLRYNTRPLGQEPPRVSLSQPRTLPATSRPSAGFLPTHRLEPRPEPRPDPRPGPELPLPSIPAWTGPEIPESGPSSGMCQRNPQVCGPGRCISRPSGYTCACDSGFRLSPQGTRCIDVDECRRVPPPCAPGRCENSPGSFRCVCGPGFRAGPRAAECLDVDECHRVPPPCDLGRCENTPGSFLCVCPAGYQAAPHGASCQDVDECTQSPGLCGRGACKNLPGSFRCVCPAGFRGSACEEDVDECAQEPPPCGPGRCDNTAGSFHCACPAGFRSRGPGAPCQDVDECARSPPPCTYGRCENTEGSFQCVCPMGFQPNTAGSECEDVDECENHLACPGQECVNSPGSFQCRTCPSGHHLHRGRCTDVDECSSGAPPCGPHGHCTNTEGSFRCSCAPGYRAPSGRPGPCADVNECLEGDFCFPHGECLNTDGSFACTCAPGYRPGPRGASCLDVDECSEEDLCQSGICTNTDGSFECICPPGHRAGPDLASCLDVDECRERGPALCGSQRCENSPGSYRCVRDCDPGYHAGPEGTCDDVDECQEYGPEICGAQRCENTPGSYRCTPACDPGYQPTPGGGCQDVDECRNRSFCGAHAVCQNLPGSFQCLCDQGYEGARDGRHCVDVNECETLQGVCGAALCENVEGSFLCVCPNSPEEFDPMTGRCVPPRTSAGTFPGSQPQAPASPVLPARPPPPPLPRRPSTPRQGPVGSGRRECYFDTAAPDACDNILARNVTWQECCCTVGEGWGSGCRIQQCPGTETAEYQSLCPHGRGYLAPSGDLSLRRDVDECQLFRDQVCKSGVCVNTAPGYSCYCSNGYYYHTQRLECIDNDECADEEPACEGGRCVNTVGSYHCTCEPPLVLDGSQRRCVSNESQSLDDNLGVCWQEVGADLVCSHPRLDRQATYTECCCLYGEAWGMDCALCPAQDSDDFEALCNVLRPPAYSPPRPGGFGLPYEYGPDLGPPYQGLPYGPELYPPPALPYDPYPPPPGPFARREAPYGAPRFDMPDFEDDGGPYGESEAPAPPGPGTRWPYRSRDTRRSFPEPEEPPEGGSYAGSLAEPYEELEAEECGILDGCTNGRCVRVPEGFTCRCFDGYRLDMTRMACVDINECDEAEAASPLCVNARCLNTDGSFRCICRPGFAPTHQPHHCAPARPRA

SEQ ID NO: 83521 - protein, 121 aa, Homo sapiens
  MOD_RES (1)..(1): Any amino acid
XPGPFWSPFGEAQSGSSAGDAVWSGHSPPPPQENWVSFADTPPTSTLLTMHPASVQDQTTVRTVASATTAIEIRRQSSSYDDPWKITDEQRQYYVNQFKTIQPDLNGFIPGNSQTLIKMVH

SEQ ID NO: 83522 - protein, 67 aa, Homo sapiens
MIQAQESITLEDVAVDFTWEEWQLLGAAQKDLYRDVMLENYSNLVAVGYQASKPDALFKLEQGEQLW

SEQ ID NO: 83523 - protein, 124 aa, Homo sapiens
  MOD_RES (1)..(1): Any amino acid
XRRKKRTSIETNVRFALEKSFLANQKPTSEEILLIAEQLHMEKEVIRVWFCNRRQKEKRINPCSAAPMLPSPGKPASYSPHMVTPQGGAGTLPLSQASSSLSTTGQGGQKMVRGDWEDVAQAGA

SEQ ID NO: 83524 - protein, 949 aa, Homo sapiens
MEEASLCLGVSSAEPEAEPHLSGPVLNGQYAMSQKLHQITSQLSHAFPELHPRPNPEEKPPASLEEKAHVPMSGQPMGSQMALLANQLGREVDTSLNGRVDLQQFLNGQNLGIMSQMSDIEDDARKNRKYPCPLCGKRFRFNSILSLHMRTHTGEKPFKCPYCDHRAAQKGNLKIHLRTHKLGNLGKGRGRVREENRLLHELEERAILRDKQLKGSLLQPRPDLKPPPHAQQAPLAACTLALQANHSVPDVAHPVPSPKPASVQEDAVAPAAGFRCTFCKGKFKKREELDRHIRILHKPYKCTLCDFAASQEEELISHVEKAHITAESAQGQGPNGGGEQSANEFRCEVCGQVFSQAWFLKGHMRKHKDSFEHCCQICGRRFKEPWFLKNHMKVHLNKLSVKNKSPSDPEVPVPMGGMSQEAHANLYSRYLSCLQSGFMTPDKAGLSEPSQLYGKGELPMKEKEALGKLLSPISSMAHGVPEGDKHSLLGCLNLVPPLKSSCIERLQAAAKAAEMDPVNSYQAWQLMARGMAMEHGFLSKEHPLQRNHEDTLANAGVLFDKEKREYVLVGADGSKQKMPADLVHSTKVGSQRDLPSKLDPLESSRDFLSHGLNQTLEYNLQGPGNMKEKPTECPDCGRVFRTYHQVVVHSRVHKRDRKGEEDGLHVGLDERRGSGSDQESQSVSRSTTPGSSNVTEESGVGGGLSQTGSAQEDSPHPSSPSSSDIGEEAGRSAGVQQPALLRDRSLGSAMKDCPYCGKTFRTSHHLKVHLRIHTGEKPYKCPHCDYAGTQSASLKYHLERHHRERQNGAGPLSGQPPNQDHKDEMSSKASLFIRPDILRGAFKGLPGIDFRGGPASQQWTSGVLSSGDHSGQATGMSSEVPSDALKGTDLPSKSTHFSEIGRAYQSIVSNGVNFQGSLQAFMDSFVLSSLKKEKDMKDKALADPPSMKV

SEQ ID NO: 83525 - protein, 117 aa, Homo sapiens
MDVANLAKVFGPTIVAHAVPNPDPVTMLQDIKRQPKVVERLLSLPLEYWSQFMMVEQENIDPLHVIENSNAFSTPQTPDIKAVPGGGLCVHFTAGEAEIQKGPPSCGQNKSTAAFNY

SEQ ID NO: 83526 - protein, 47 aa, Homo sapiens
MVGSALRRGAHAYVYLVSKASHISRGHQHQAWGSRPPAAECATQRAP

SEQ ID NO: 83527 - protein, 1647 aa, Homo sapiens
MDDDSLDELVARSPGPDGHPQVGPADPAGDFESSVGSSGDSGDDSDSEHGDGTDGEDEGASEEEDLEDRSGSEDSEDDGETLLEVAGTQGKLEAAGSFNSDDDAESCPICLNAFRDQAVGTPENCAHYFCLDCIVEWSKNANSCPVDRTLFKCICIRAQFGGKILRKIPVENTKASEEEEDPTFCEVCGRSDREDRLLLCDGCDAGYHMECLDPPLQEVPVDEWFCPECAAPGVVLAADAGPVSEEEVSLLLADVVPTTSRLRPRAGRTRAIARTRQSERVRATVNRNRISTARRVQHTPGRLGSSLLDEAIEAVATGLSTAVYQRPLTPRTPARRKRKTRRRKKVPGRKKTPSGPSAKSKSSATRSKKRQHRVKKRRGKKVKSEATTRSRIARTLGLRRPVHSSCIPSVLKPVEPSLGLLRADIGAASLSLFGDPYELDPFDSEELSANPLSPLSAKRRALSRSALQSHQPVARPVSVGLSRRRLPAAVPEPDLEEEPVPDLLGSILSGQSLLMLGSSDVIIHRDGSLSAKRAAPVSFQRNSGSLSRGEEGFKGCLQPRALPSGSPAQGPSGNRPQSTGLSCQGRSRTPARTAGAPVRLDLPAAPGAVQARNLSNGSVPGFRQSHSPWFNGTNKHTLPLASAASKISSRDSKPPCRSVVPGPPLKPAPRRTDISELPRIPKIRRDDGGGRRDAAPAHGQSIEIPSACISRLTGREGTGQPGRGTRAESEASSRVPREPGVHTGSSRPPAPSSHGSLAPLGPSRGKGVGSTFESFRINIPGNMAHSSQLSSPGFCNTFRPVDDKEQRKENPSPLFSIKKTKQLRSEVYDPSDPTGSDSSAPGSSPERSGPGLLPSEITRTISINSPKAQTVQAVRCVTSYTVESIFGTEPEPPLGPSSAMSKLRGAVAAEGASDTEREEPTESQGLAARLRRPSPPEPWDEEDGASCSTFFGSEERTVTCVTVVEPEAPPSPDVLQAATHRVVELRPPSRSRSTSSSRSRKKAKRKRVSREHGRTRSGTRSESRDRSSRSASPSVGEERPRRQRSKAKSRRSSSDRSSSRERAKRKKAKDKSREHRRGPWGHSRRTSRSRSGSPGSSSYEHYESRKKKKRRSASRPRGRECSPTSSLERLCRHKHQRERSHERPDRKESVAWPRDRRKRRSRSPSSEHRAREHRRPRSREKWPQTRSHSPERKGAVREASPAPLAQGEPGREDLPTRLPALGEAHVSPEVATADKAPLQAPPVLEVAAECEPDDLDLDYGDSVEAGHVFDDFSSDAVFIQLDDMSSPPSPESTDSSPERDFPLKPALPPASLAVAAIQREVSLMHDEDPSQPPPLPEGTQEPHLLRPDAAEKAEAPSSPDVAPAGKEDSPSASGRVQEAARPEEVVSQTPLLRSRALVKRVTWNLQESESSAPAEDRAPRAPLHRPQKPREGAWDMEDVAPTGVRQVFSELPFPSHVLPEPGFPDTDPSQVYSPGLPPAPAQPSSIPPCALVSQPTVQFILQGSLPLVGCGAAQTLAPVPAALTPASEPASQATAASNSEEKTPAPRLAAEKTKKEEYMKKLHMQERAVEEVKLAIKPFYQKREVTKEEYKDILRKAVQKICHSKSGEINPVKVANLVKAYVDKYRHMRRHKKPEAGEEPPTQGAEG

SEQ ID NO: 83528 - protein, 136 aa, Homo sapiens
MSMSPKHTTPFSVSDILSPLEESYKKVGMEGGGLGAPLAAYRQGQAAPPTAAMQQHAVGHHGAVTAAYHMTAAGVPQLSHSAVGGYCNGNLGNMSELPPYQDTMRNSASGPGWYGANPDPRFPASSFSSGSGTETD

SEQ ID NO: 83529 - protein, 326 aa, Homo sapiens
MSKSESPKEPEQLRKLFIGGLSFETTDESLRSHFEQWGTLTDCVVMRDPNTKRSRGFGFVTYATVEEVDAAMNARPHKVDGRVVEPKRAVSREDSQRPGAHLTVKKIFVGGIKEDTEEHHLRDYFEQYGKIEVIEIMTDRGSGKKRGFAFVTFDDHDSVDKIVIQKYHTVNGHNCEVRKALSKQEMASASSSQRGRSGSGNFGGGRGGGFGGNDNFGRGGNFSGRGGFGGSRGGGGYGGSGDGYNGFGNDGSNFGGGGSYNDFGNYNNQSSNFGPMKGGNFGGRSSGPYGGGGQYFAKPRNQEKLYFSGGYGGSSSSSSYGSGRRF

SEQ ID NO: 83530 - protein, 54 aa, Homo sapiens
FNQVIMMKEFERLSSPLIVEIVRRKQQPPPRTPLDQPVDIGHEGIPGGSGRGIL

SEQ ID NO: 83531 - protein, 150 aa, Homo sapiens
MHEANCSSPGETGEKSPLQTIGEEQTQNPYTELLVLKAHHDIVRFLVQLDDYRFASAGDDGIVVVWNAQTGEKLLELNGHTQKITAIITFPSLESCEEKNQLILTASADRTVIVWDGDTTRQVQRISCFQSTVKCLTVLQRLDVWLSGGN

SEQ ID NO: 83532 - protein, 90 aa, Homo sapiens
  MOD_RES (1)..(1): Any amino acid
XFFPRLGVIGFAGLIGLLLARGSKIKKLVYPPGFMGLAASLYYPQQAIVFAQVSGERLYDWGLRGYIVIEDLWKENFQKPGNVKNSPGTK

SEQ ID NO: 83533 - protein, 208 aa, Homo sapiens
MLVIPSALMYSFVLYWRLALYVYEYLLHVGAQKSAQTFLSEIRWEKNITLGEPPGFLHSWWCVFWDLYCAAPERRETCEHSSEAKAFHDYSAAAAPSPVLGNIPPGDGMPVGPVPPGFFQPFMSPRYPGGPRPPLRIPNQALGGVPGSQPLLPSGMDPTRQQGHPNMGGPMQRMTPPRGMVPLGPQNYGGAMRPPLNALGGPGMPGMN

SEQ ID NO: 83534 - protein, 144 aa, Homo sapiens
MEDLGENTMVLSTLRSLNNFISQRVEGGSGLDISTSAPGSLQMQYQQSMQREVDRNQELLTRIRQLQEREAGAEEKMQEQLERNRQCQQNLDAASKRLREKEDSLAQAGETINALKGRISELQWSVMDQEMRVKRLESEKQELQ

SEQ ID NO: 83535 - protein, 1272 aa, Homo sapiens [sequence omitted]

SEQ ID NO: 83536 - protein, 170 aa, Homo sapiens
  MOD_RES (1)..(1): Any amino acid
XGRRGAAPLPARLLWLPRGLVRLSAAPAAATASRAGGADRGHAQQVYLALGLTQAEINEFFTGPAFLAWGRMGNLHTWDGPLPPSWHIKQLYLQHRVLDQMRSFGMTPVLPAFAGHVPEAVTRVFPQVNVTKMGSWGHFNCSYSCSFLLAPEDPIFPIIGSLFLRELIKE

SEQ ID NO: 83537 - protein, 74 aa, Homo sapiens
MAELQLDPAMAGLGGGAGSRTTRAGRGRRRGPLGQAERGRHLLRDHQTDLRPGAQVISLPPLLPGGPGAGLRQG

SEQ ID NO: 83538 - protein, 527 aa, Homo sapiens
LCILNIVFSPFVLVIIVFSTLLSSPLLPLFTLPVFLVGFPRPIQSWPGAAGTTACVCADTVYYYQMVPRLTAVLQTAMAAGSLGLLLPGSHYLGRFQDRLMWIMILECGYTYCSINIKGLELQETSCHTAEARRVDEVFEDAFEQEYTRVCSLNEHFGNVLTPCTVLPVKLYSDARNVLSGIIDSHENLKEFKGDLIKVLVWILVQYCSKRPGMKENVHNTENKGKAPLMLPALNTLPPPKSPEDIDSLNSETFNDWSDDNIFDDEPTIKKVIEEKHQLKDLPGTNLFIPGSVESQRVGDHSTGTVPENDLYKAVLLGYPAVDKGKQEDMPYIPLMEFSCSHSHLVCLPAEWRTSCMPSSKMKEMSSLFPEDWYQFVLRQLECYHSEEKASNVLEEIAKDKVLKDFYVHTVMTCYFSLFGIDNMAPSPGHILRVYGGVLPWSVALDWLTEKPELFQLALKAFRYTLKLMIDKASLGPIEDFRELIKYLEEYERDWYIGLVSDEKWKEAILQEKPYLFSLGYDSNMYL

SEQ ID NO: 83539 - protein, 312 aa, Homo sapiens [sequence omitted]

SEQ ID NO: 83540 - protein, 57 aa, Homo sapiens
MAFRLTGGTKDYIVVGSDSGRIVILEYQPSKNMFEKIHQETFGKSGCRRIVPGQFLA

SEQ ID NO: 83541 - protein, 135 aa, Homo sapiens
MAETNNECSIKVLCRFRPLNQAEILRGDKFIPIFQGDDSVVIGVSVAQEGIRGGGRWLNLPAPRRALVSAGPFAPPPRRSSFILFPAAPPLPCIRMAGCGLARPAAESLQSGRGLLSYLREIQLPFAAVCSVSTR

SEQ ID NO: 83542 - protein, 1349 aa, Homo sapiens
MPQPLLPALPPLSSPSGAGSCGPSGGEVKQEPVGGRGRREWRVAPSSRPRSSPRLALPTQCSGRRLFRRRARGLRSDNMEAVKTFNSELYSLNDYKPPISKAKMTQITKAAIKAIKFYKHVVQSVEKFIQKCKPEYKVPGLYVIDSIVRQSRHQFGQEKDVFAPRFSNNIISTFQNLYRCPGDDKSKIVRVLNLWQKNNVFKSEIIQPLLDMAAGIPPPVVTPVLASTTTAMSNTPGTPVTPVTPANVVQGLPDPWVSQITNTDTLAAVAQILQSPQGQQLQQLIQTLQIQQQKPQPSILQALDAGLVVQLQALTAQLTAAAAAANTLTPLEQGVSFNKKLMDRFDFGEDSEHSEEPKKEIPASQLSHVSESVNNSIFHQIAEQLQQQNLEHLRQQLLEQQQPQKATPQDSQEGTFGSEHSASPSQGSSQQHFLEPEVNLDDSIDIQQQDMDIDEGQDGVEEEVFEQEAKKVAVRSRSRTHSRSRSRSPRKRRSRSRSGSRKRKHRKRSRSRSRERKRKSSRSYSSERRAREREKERQKKGLPPIRSKTLSVCSTTLWVGQVDKKATQQDLTNLFEEFGQIESINMIPPRGCAYVCMVHRQDAFRALQKLSSGSYKIGSKVIKIAWALNKGVKTEYKQFWDVDLGVTYIPWEKVKVDDLEGFAEGGMIDQETVNTEWETVKSSEPVKETVQTTQSPTPVEKETVVTTQAEVFPPPVAMLQIPVAPAVPTVSLVPPAFPVSMPVPPPGFSPIPPPPFLRASFNPSQPPPGFMPPPVPPPVVPPPTIPPVVPTSLVQPSLSMTPETVKDVGFGSLVIPGGSVASNLATSALPAGNVFNAPTKQAEPEEKVPHLIDHQISSGENTRSVIPNDISSNAAILGGQPPNVTSNSGILGVQRPNVSSNSEILGVRPSNVSSSSGIIAAQPPNILNNSGILGIQPPSVSNSSGLLGVLPPNIPNNSGLVGVQPPNVPNTPGLLGTQPPAGPQNLPPLSIPNQRMPTMPMLDIRPGLIPQAPGPRFPLIQPGIPPQRGIPPPSVLDSALHPPPRGPFPPGDIFSQPERPFLAPGRQSVDNVTNPEKRIPLGNDNIQQEGDRDYRFPPIETRESISRPPPVDVRDVVGRPIDPREGPGRPPLDGRDHFGRPPVDIRENLVRPGIDHLGRRDHFGFNPEKPWGHRGDFDEREHRVLPVYGGPKGLHEERGRFRSGNYRFDPRSGPWNRGFGQEVHRDFDDRRRPWERQRDRDDRDFDFCREMNGNRLGRDRIQNTWVPPPHARVFDYFEGATSQRKGDNVPQVNGENTERHAQPPPIPVQNDPELYEKLTSSNEINKEKSDTVADIESEPVVESTETEGT

SEQ ID NO: 83543 - protein, 108 aa, Homo sapiens
MAMAPSPSLVQVYTSPAAVAVWEWQDGLGTWHPYSATVCSFIEQQFVQQKGQRFGLGSLAHSIPLGQADPSLAPYIIDLPSWTQFRQDTGTMRAVRRHLFPQHSAPGR

SEQ ID NO: 83544 - protein, 94 aa, Homo sapiens
MVMVANKKSQDQMTEDLSLFLGNNTIRFTVWLHGVLDKLRSVTTEPSSLKSSDTNIFDSNVPSNKSNFSRGDERRHEAAVPPLAIPSARPEKRD

SEQ ID NO: 83545 - protein, 267 aa, Homo sapiens
  MOD_RES (1)..(1): Any amino acid
XIVASRRLRDLLTRRLTGSNYPGLSISLRLTGSSAQEEASGVALGEAPDHSYESLRVTSAQKHVLHVQLNRPNKRNAMNKVFWREMVECFNKISRDADCRAVVISGAGKMFTAGIDLMDMASDILQPKGDDVARISWYLRDIITRYQETFNVIERCPKPVIAAVHGGCIGGGVDLVTACDIRYCAQDAFFQVKEVDVGLAADVGTLQRLPKVIGNQSRVFPDKEVMLDAALALAAEISSKSPVAVQSTKVNLLYSRDHSVAESLNYV

SEQ ID NO: 83546 - protein, 130 aa, Homo sapiens
LRVFKLAKSWPTLNMLIKIIGNSVGALGNLTLVLAIIVFIFAVVGMQLFGKSYKECVCKISNDCELPRWHMHDFFHSFLIVFRVLCGEWIETMWDCMEVAGQTMCLTVFMMVMVIGNLVVSQRQNGITSF

SEQ ID NO: 83547 - protein, 104 aa, Homo sapiens
MFCVTPPELETKMNITKGGLVLFSANSNSSCMELSKKIAERLGVEMGKVQVYQEPNRETRVQIQESVRGKDVFIIQTVSKDVNTTIMELLIMVYACKTSCAKSI

SEQ ID NO: 83548 - protein, 69 aa, Homo sapiens
MFATSGAVAAGKPYSCSECGKSFCYSSVLLRHERAHGGDGRFRCLECGERCARAADLRAHRRTHAGQTL

SEQ ID NO: 83549 - protein, 76 aa, Homo sapiens
MASRCWRWWGWSAWPRTRLPPAGSTPREDPPDLCGGQWPSWLLHGPTPAKAAPPGPRGHLRETACALWPGALWCGA

SEQ ID NO: 83550 - protein, 43 aa, Homo sapiens
  MOD_RES (1)..(1): Any amino acid
XGWFCGSVSQDLRQFWGRKLSGSSGLGGEGSILLSLMLWVQGA

SEQ ID NO: 83551 - protein, 221 aa, Homo sapiens
METLSFPRYNVAEIVIHIRNKILTGADGKNLTKNDLYPNPKPEVLHMIYMRALQIVYGIRLEHFYMMPVNSEVMYPHLMEGFLPFSNLVTHLDSFLPICRVNDFETADILCPKAKRTSRFLSGIINFIHFREACRETYMEFLWQYKSSADKMQQLNAAHQEALMKLERLDSVPVEEQEEFKQLSDGIQELQQSLNQDFHQKTCCKREIPKRSQIFQRKPSV

SEQ ID NO: 83552 - protein, 472 aa, Homo sapiens
MDFRTACEEERTVTIRRQTVGGFGLSIKGGAEHNIPVVVSKISKEQRAELSGLLFIGDAILQINGINVRKCRHEEVVQVLRNAGEEVTLTVSFLKRAPAFLKLPLNEDCACAPSDQSSGTSSPLCDSGLHLNYHPNNTDTLSCSSWPTSPGLRWEKRWCDLRLIPLLHSRFSQYVPGTDLSRQNAFQVIAVDGVCTGIIQCLSAEDCVDWLQAIATNISNLTKHNIKKINRNFPVNQQIVYMGWCEAREQDPLQDRVYSPTFLALRGSCLYKFLAPPVTTWDWTRAEKTFSVYEIMCKILKDSDLLDRRKQCFTVQSESGEDLYFSVELESDLAQWERAFQTATFLEVERIQCKTYACVLESHLMGLTIDFSTGFICFDAATKAVLWRYKFSQLKGSSDDGKSKIKFLFQNPDTKQIEAKELEFSNLFAVLHCIHSFFAAKVACLDPLFLGNQATASTAASSATTSKAKYTT

SEQ ID NO: 83553 - protein, 97 aa, Homo sapiens
MNHTVQTFFSPVNSGQPPNYEMLKEEHEVAVLGAPHNPAPPTSTVIHIRSETSVPDHVVWSLFNTLFMNPCCLGFIAFAYSVKLGDPGPLTISSPPV

SEQ ID NO: 83554 - protein, 221 aa, Homo sapiens
MSGSSGTPYLGSKISLISKAQIRYEGILYTIDTDNSTVALAKVRSFGTEDRPTDRPAPPREEIYEYIIFRGSDIKDITVCEPPKAQHTLPQDPAIVQSSLGSASASPFQPHVPYSPFRGMAPYGPLAASSLLSQQYAASLGLEKLVSPPASAAASSPSSSPSPQPVSELDLSSEPQQLTAKGNSSLGELHAVLQTILRARGKAADRMTVAVADHLPSPCSR

SEQ ID NO: 83555 - protein, 550 aa, Homo sapiens
MAEAVERTDELVREYLLFRGFTHTLRQLDAEIKADKEKGFRVDKIVDQLQQLMQVYDLAALRDYWSYLERRLFSRLEDIYRPTIHKLKTSLFRFYLVYTIQTNRNDKAQEFFAKQATELQNQAEWKDWFVLPFLPSPDTNPTFATYFSRQWADTFIVSLHNFLSVLFQCMPVPVILNFDAECQRTNQVQEENEVLRQKLFALQAEIHRLKKEEQQPEEEEALVQHKLPPYVSNMDRLGDSELAMVCSQRNASLSQSPRVGFLSSLLPQSKKSPSRLSPAQGPPQPQSSAKKESFGGQGTKGKDPTSGAKDGKSLLSGLATGESGWSQHRQRRLQDHGKERKELFSTTTSQCAEKKPEASGPEAEPCPELHTEPVEPLTRASSAGPEGGGVRPEQPFIVLGQEEYGEHHSSIMHCRVDCSGRRVASLDVDGVIKVWSFNPIMQTKASSISKSPLLSLEWATKRDRLNPVSCVQPQRGLFRLFGSSSEPHFPGGLLSTRHRQQGHEPGSWQAAAVGHENHEAAAPVLPGSRTHCYQLYSLQSQREPAGHRGS

SEQ ID NO: 83556 - protein, 131 aa, Homo sapiens
MNDTVTIRTRKFMTNRLLQRKQMVIDVLHPGKATVPKTEIREKLAKMYKTTPDVIFVFGFRTHFGGGKTTGFGMIYDSLDYAKKNEPKHRLARHGLYEKKKTSRKQRKERKNRMKKVRGTAKANVGAGKKQ

SEQ ID NO: 83557 - protein, 40 aa, Homo sapiens
  MOD_RES (1)..(1): Any amino acid
XALELNERLIKEDQVEYHEGLKSNFRDMVKELSDIIHEQL

SEQ ID NO: 83558 - protein, 183 aa, Homo sapiens
MGKQKKTRNKEKDRLKPKKKEKKDPSALKEREVPQHPSCLFFQYNTQLGPPYHILVDTNFINFSIKAKLDLVQSMMDCLYAKCIPCITDCVMAEIEKLGQKYRVALRIAKDPRFERLPCTHKGTYADDCLVQRVTQHKCYIVATVDRDLKRRIRKIPGVPIMYISNHRYNIERMPDDYGAPRF

SEQ ID NO: 83559 - protein, 122 aa, Homo sapiens
MAAAYLDPNLNHTPNSSTKTHLGTGMERSPGAMERVLKVFHYFESNSEPTTWASIIRHGDATDVRVKSDYMLEIADQVDQEIALKLGCLEIRKDVGLKRFFPKSLLDSVKAKTLRKLIQQTF

SEQ ID NO: 83560 - protein, 1548 aa, Homo sapiens
MKGSEVSLEKKKKIKMPVKRLREVVSQNHGDHLVLLKDELPCVPPALSANKRLPVGTGTSLNGTSRGSSDLTSARNCYQPLLENPMVSESDFSKDVAVQVLPLDKIEENNKQKANDIFISQYTMGQKDALRTVLKQKAQSMPVFKEVKVHLLEDAGIEKDAVTQETRISPSGIDSATTVAAATAAAIATAAPLIKVQSDLEAKVNSVTELLSKLQETDKHLQRVTEQQTSIQRKQEKLHCHDHEKQMNVFMEQHIRHLEKLQQQQIDIQTHFISAALKTSSFQPVSMPSSRAVEKYSVKPEHPNLGSCNPSLYNTFASKQAPLKEVEDTSFDKQKSPLETPAPRRFAPVPVSRDDELSKRENLLEEKENMEVSCHRGNVRLLEQILNNNDSLTRKSESSNTTSLTRSKIGWTPEKTNRFPSCEELETTKVTMQKSDDVLHDLGQKEKETNSMVQPKESLSMLKLPDLPQNSVKLQTTNTTRSVLKDAEKILRGVQNNKKVLEENLEAIIRAKDGAAMYSLINALSTNREMSEKIRIRKTVDEWIKTISAEIQDELSRTDYEQKRFDQKNQRTKKGQNMTKDIRTNTQDKTVNKSVIPRKHSQKQIEEHFRNLPMRGMPASSLQKERKEGLLKATTVIQDEDYMLQVYGKPVYQGHRSTLKKGPYLRFNSPSPKSRPQRPKVIERVKGTKVKSIRTQTDFYATKPKKMDSKMKHSVPVLPHGDQQYLFSPSREMPTFSGTLEGHLIPMAILLGQTQSNSDTMPPAGVIVSKPHPVTVTTSIPPSSRKVETGVKKPNIAIVEMKSEKKDPPQLTVQVLPSVDIDSISNSSADVLSPLSSPKEASLPPVQTWIKTPEIMKVDEEEVKFPGTNFDEIIDVIQEEEKCDEIPDSEPILEFNRSVKADSTKYNGPPFPPVASTFQPTADILDKVIERKETLENSLIQWVEQEIMSRIISGLFPVQQQIAPSISVSVSETSEPLTSDIVEGTSSGALQLFVDAGVPVNSNVIKHFVNEALAETIAVMLGDREAKKQGPVATGVSGDASTNETYLPARVCTPLPTPQPTPPCSPSSPAKECVLVKTPDSSPCDSDHDMAFPVKEICAEKGDDMPAIMLVNTPTVTPTTTPPPAAAVFTPTLSDISIDKLKVSSPELPKPWGDGDLPLEEENPNSPQEELHPRAIVMSVAKDEEPESMDFPAQPPPPEPVPFMPFPAGTKAPSPSQMPGSDSSTLESTLSVTVTETETLDKPISEGEILFSCGQKLAPKILEDIGLYLTNLNDSLSSTLHDAVEMEDDPPSEGQVIRMSHKKFHADAILSFAKQNQESAVSQQAVYHSEDLENSVGELSEGQRPQLTAAAENILMGHSLYMQPPVTNTQSLDQQCDPKPLSRQFDTVSGSIYEDSCASHGPMSLGELELEPNSKLVLPTTLLTAQENDVNLPVAAEDFSQYQLKQNQDVKQVEHKPSQSYLRVRNKSDIAPSQQQVSPGDMDRTQIELNPYLTCVFSGGKAVPLSASQMPPAKMSVMLPSVNLEDCSQSLSLSTMQEDMESSGADTF

SEQ ID NO: 83561 - protein, 87 aa, Homo sapiens
EKKQYDKAEELYERALDIRRRALAPDHPSLAYTVKHLAILYKKMGKLDKAVPLYELAVEIRQKSFGPKHPSVATALVNLAVLYSQML

SEQ ID NO: 83562 - protein, 70 aa, Homo sapiens
MAAALARLGLRPVKQVRVQFCPFEKNVESTRRRASPDYARRSSHRSGNAHRLRLPHPGQGRGGQRGQAGR

SEQ ID NO: 83563 - protein, 343 aa, Homo sapiens
MKTPRMVVMAPRTLFLLLSGALTLTETWAGSHSMRYFSAAVSRPGRGEPRFIAMGYVDDTQFVRFDSDSACPRMEPRAPWVEQEGPEYWEEETRNTKAHAQTDRMNLQTLRGYYNQSEASSHTLQWMIGCDLGSDGRLLRGYEQYAYDGKDYLALNEDLRSWTAADTAAQISKRKCEAANVAEQRRAYLEGTCVEWLHRYLENGKEMLQRADPPKTHVTHHPVFDYEATLRCWALGFYPAEIILTWQRDGEDQTQDVELVETRPAGDGTFQKWAAVVVPSGEEQRYMCHVQHEGLPEPLMLRWKQSSLPTIPIMGIVAGLVVLAAVVTGAAVAAVLWRKKSSD

SEQ ID NO: 83564 - protein, 1120 aa, Homo sapiens
VEDRKHFGAVEAKPELSLEVQLQAERDAIDRKEKEITNLEEQLEQFREELENKNEEVQQLHMQLEIQKKESTTRLQELEQENKLFKDDMEKLGLAIKESDAMSTQDQHVLFGKFAQIIQEKEVEIDQLNEQVTKLQQQLKITTDNKVIEEKNELIRDLETQIECLMSDQECVKRNREEEIEQLNEVIEKLQQELANIGQKTSMNAHSLSEEADSLKHQLDVVIAEKLALEQQVETANEEMTFMKNVLKETNFKMNQLTQELFSLKRERESVEKIQSIPENSVNVAIDHLSKDKPELEVVLTEDALKSLENQTYFKSFEENGKGSIINLETRLLQLESTVSAKDLELTQCYKQIKDMQEQGQFETEMLQKKIVNLQKIVEEKVAAALVSQIQLEAVQEYAKFCQDNQTISSEPERTNIQNLNQLREDELGSDISALTLRISELESQVVEMHTSLILEKEQVEIAEKNVLEKEKKLLELQKLLEGNEKKQREKEKKRSPQDVEVLKTTTELFHSNEESGFFNELEALRAESVATKAELASYKEKAEKLQEELLVKETNMTSLQKDLSQVRDHLAEAKEKLSILEKEDETEVQESKKACMFEPLPIKLSKSIASQTDGTLKISSSNQTPQILVKNAGIQINLQSECSSEEVTEIISQFTEKIEKMQELHAAEILDMESRHISETETLKREHYVAVQLLKEECGTLKAVIQCLRSKEGSSIPELAHSDAYQTREICSSDSGSDWGQGIYLTHSQGFDIASEGRGEESESATDSFPKKIKGLLRAVHNEGMQVLSLTESPYSDGEDHSIQQVSEPWLEERKAYINTISSLKDLITKMQLQREAEVYDSSQSHESFSDWRGELLLALQQVFLEERSVLLAAFRTELTALGTTDAVGLLNCLEQRIQEQGVEYQAAMECLQKADRRSLLSEIQALHAQMNGRKITLKREQESEKPSQELLEYNIQQKQSQMLEMQVELSSMKDRATELQEQLSSEKMVVAELKSELAQTKLELETTLKAQHKHLKELEAFRLEVKDKTDEVHLLNDTLASEQKKSRELQWALEKEKAKLGRSEERDKEELEGRGTGILFWSPHCLRTFKVNIGPFQRDTPLLCKALSSRQAALSICF

SEQ ID NO: 83565 - protein, 158 aa, Homo sapiens
MAAKQPPPLMKKHSQTDLVSRLKTRKILGVGGEDDDGEVHRSKISQVLGNEIKFTIREPLGLRVWQFVSAVLFSGIAIMALAFPDQLYDAVFDGAQVTSKTPIRLYGGALLSISLIMWNALYTAEKVIIRWTLLTEACYFGVQFLVVTATLAETGLMS

SEQ ID NO: 83566 - protein, 45 aa, Homo sapiens
SLLRPHFLNTPDKSPGDRLTEICTKITDVDIDKVMINLKTEEFVL

SEQ ID NO: 83567 - protein, 387 aa, Homo sapiens
MERSGPSEVTGSDASGPDPQLAVTMGFTGFGKKARTFDLEAMFEQTRRTAVERSRKTLEAREKEEEMNREKELRRQNEDIEPTSSRSNVVRDCSKSSSRDTSSSESEQSSDSSDDELIGPPLPPKMVGKPVNFMEEDILGPLPPPLNEEEEEAEEEEEEEEEEENPVHKIPDSHEITLKHGTKTVSALGLDPSGARLVTGGYDYDVKFWDFAGMDASFKAFRSLQPCECHQIKSLQYSNTGDMILVVSGSSQAKVIDRDGFEVMECIKGDQYIVDMANTKGHTAMLHTGSWHPKIKGEFMTCSNDATVRTWEVENPKKQKSVFKPRTMQGKKVIPTTCTYSRDGNLIAAACQNGSIQIWDRNLTSNKLRLSYGTVCMLWAHTEVCVM

SEQ ID NO: 83568 - protein, 174 aa, Homo sapiens
  MOD_RES (1)..(1): Any amino acid
XPVGSWYNVTILVKMDFKELQQVDPRLLNHMRLLHSLVTSALQPMASTVHHLHSAPGNASTTVSRLLLGLPRPLPVADVSTLLGDIAKRVYEVISVQVQDVNECFYEELNACSGRELCANLEGSYWCVCHQEAPATSPRKLNLEWEARGLEIHLELRATSTSHGTPLSSAENCL

SEQ ID NO: 83569 - protein, 230 aa, Homo sapiens
MPGVANSGPSTSSRETANPCSRKKVHFGSIHDAVRAGDVKQLSEIVVRGASINELDVLHKFTPLHWAAHSGSLECLHWLLWHGADITHVTTRGWTASHIAAIRGQDACVQALIMNGANLTAQDDRGCTPLHLAATHGHSFTLQIMLRSGVDPSVTDKREWRPVHYAAFHGRLGCLQLLVKWGCSIEDVDYNGNLPGGSHLLLSIMATLRPLVKPRIIKKRTKKFFRHQTD

SEQ ID NO: 83570 - protein, 180 aa, Homo sapiens
MVKISFQPAVAGIKGDKADKASASAPAPASATEILLTPAREEQPPQHRSKRGGSVGGVCYLSMGMVVLLMGLVFASVYIYRYFFLAQLARDNFFRCGVLYEDSLSSQVRTQMELEEDVKIYLDENYERINVPVPQFGGGDPADIIHDFQRGLTAYHDISLDKCYVIELNTTIVLPPRNFW

SEQ ID NO: 83571 - protein, 92 aa, Homo sapiens
GNYAERVGAGAPVYLAAVLEYLTAEILELAGNAARDNKKTRIIPRHLQLAIRNDEELNKLLGKVTIAQGGVLPNIQAVLLPKKTESQKTKSK

SEQ ID NO: 83572 - protein, 169 aa, Homo sapiens
MGQGLWRVVRNQQLQQEGYSEQGYLTREQSRRMAASNISNTNHRKQVQGGIDIYHLLKARKSKEQEGFINLEMLPPELSFTILSYLNATDLCLASCVWQDLANDELLWQGLCKSTWGHCSIYNKNPPLGFSFRKLYMQLDEGSLTFNANPDEPQGTRFSKGHRSCHGYG

SEQ ID NO: 83573 - protein, 806 aa, Homo sapiens
MLKGGSKGPALLALRSGTDPRAQMSDDPAEGTLDPCSAPGLTDEKVKAYLSLHPQVLDEFVSESVSAETVEKWLKRKNNKSEDESAPKEVSRYQDTNMQGVVYELNSYIEQRLDTGGDNQLLLYELSSIIKIATKADGFALYFLGECNNSLCIFTPPGIKEGKPRLIPAGPITQGTTVSAYVAKSRKTLLVEDILGDERFPRGTGLESGTRIQSVLCLPIVTAIGDLIGILELYRHWGKEAFCLSHQEVATANLAWASVAIHQVQVCRGLAKQTELNDFLLDVSKTYFDNIVAIDSLLEHIMIYAKNLVNADRCALFQVDHKNKELYSDLFDIGEEKEGKPVFKKTKEIRFSIEKGIAGQVARTGEVLNIPDAYADPRFNREVDLYTGYTTRNILCMPIVSRGSVIGVVQMVNKISGSAFSKTDENNFKMFAVFCALALHCANMYHRIRHSECIYRVTMEKLSYHSICTSEEWQGLMQFTLPVRLCKEIELFHFDIGPFENMWPGIFVYMVHRSCGTSCFELEKLCRFIMSVKKNYRRVPYHNWKHAVTVAHCMYAILQNNHTLFTDLERKGLLIACLCHDLDHRGFSNSYLQKFDHPLAALYSTSTMEQHHFSQTVSILQLEGHNIFSTLSSSEYEQVLEIIRKAIIATDLALYFGNRKQLEEMYQTGSLNLNNQSHRDRVIGLMMTACDLCSVTKLWPVTKLTANDIYAEFWAEGDEMKKLGIQPIPMMDRDKKDEVPQGQLGFYNAVAIPCYTTLTQILPPTEPLLKACRDNLSQWEKVIRGEETATWISSPSVAQKAAASED

SEQ ID NO: 83574 - protein, 1260 aa, Homo sapiens
MDASYDGTEVTVVMEEIEEAYCYTSPGPPKKKKKYKIHGEKTKKPRSAYLLYYYDIYLKVQQELPHLPQSEINKKISESWRLLSVAERSYYLEKAKLEKEGLDPNSKLSALTAVVPDIPGFRKILPRSDYIIIPKSSLQEDRSCPQLELCVAQNQMSPKGPPLVSNTAPETVPSHAGMAEQCLAVEALAEEVGALTQSGAVQEIATSEILSQDVLLEDASLEVGESHQPYQTSLVIEETLVNGSPDLPTGSLAVPHPQVGESVSVVTVMRDSSESSSSAPATQFIMLPLPAYSVVENPTSIKLTTTYTRRGHGTCTSPGCSFTYVTRHKPPKCPTCGNFLGGKWIPKEKPAKVKVELASGVSSKGSVVKRNQQPVTTEQNSSKENASKLTLENSEAEAPGNCGTAVTKTPVVKSGVQPEVTLGTTDNDSPGADVPTPSEGTSTSSPLPAPKKPTGADLLTPGSRAPELKGRARGKPSLLAAARPMRAILPAPVNVGRGSSMGLPRARQAFSLSDKTPSVRTCGLKPSTLKQLGQPIQQPSGPGEVKLPSGPSNRTSQVKVVEVKPDMFPPYKYSCTVTLDLGLATSRGRGKCKNPSCSYVYTNRHKPRICPSCGVNLAKDRTEKTTKAIEVSSPLPDVLNATEPLSTAQREIQRQSTLQLLRKVLQIPENESELAEVFALIHELNSSRLILSNVSEETVTIEQTSWSNYYESPSTQCLLCSSPLFKGGQNSLAGPQECWLLTASRLQTVTAQVKMCLNPHCLALHSFIDIYTGLFNVGNKLLVSLDLLFAIRNQIKLGEDPRVSINVVLKSVQEQTEKTLTSEELSQLQELLCNGYWAFECLTVRDYNDMICGICGVAPKVEMAQRSEENVLALKSVEFTWPEFLGSNEVNVEDFWATMETEVIEQVAFPASIPITKFDASVIAPFFPPLMRGAVVVNTEKDKNLDVQPVPGSGSALVRLLQEGTCKLDEIGSYSEEKLQHLLRQCGIPFGAEDSKDQLCFSLLALYESVQNGARAIRPPRHFTGGKIYKVCPHQVVCGSKYLVRGESARDHVDLLASSRHWPPVYVVDMATSVALCADLCYPELTNQMWGRNQGCFSSPTEPPVSVSCPELLDQHYTVDMTETEHSIQHPVTKTATRRIVHAGLQPNPGDPSAGHHSLALCPELAPYATILASIVDSKPNGVRQRPIAFDNATHYYLYNRLMDFLTSREIVNRQIHDIVQSCQPGEVVIRDTLYRLGVAQIKTETEEEGEEEEVAAVAE

SEQ ID NO: 83575 - protein, 39 aa, Homo sapiens
MTSKGPEEEHPSVTLFRQYLRIRTVQPKPDYGTLESRPL

SEQ ID NO: 83576 - protein, 285 aa, Homo sapiens
MTAPGAAGRCPPTIDSQMETSCQITFEFVDQEQLKDPVCYLKKAFLLVQDIMEDTMRFRDNTPNAIAIVQLQELSLRLKSCFTKDYEEHDKACVRTFYETPLQLLEKVKNVFNETKNLLDKDWNIFSKNCNNSFAECSSQDVVTKPDCNCLYPKAIPSSDPASVSPHQPLAPSMAPVAGLTWEDSEGTEGSSLLPGEQPLHTVDPGSAKQRPPRSTCQSFEPPETPVVKDSTIGGSPQPRPSVGAFNPGMEDILDSAMGTNWVPEEASGEASEIPVPQGTELSPS

SEQ ID NO: 83577 - protein, 82 aa, Homo sapiens
MLSLKKYLTEGLLQFTILLSLIGVRVDVDTYLTSQLPPLREIILGPSSAYTQTQFHNLRNTLDGYGIHPKSIDLDNYFTARR

SEQ ID NO: 83578 - protein, 1702 aa, Homo sapiens
MHQRRPAEVEIKAGEGAGPWGQGAAVKTGSELSPVDGPVPGQMDSGPVYHGDSRQLSASGVPVNGAREPAGPSLLGTGGPWRVDQKPDWEAAPGPAHTARLEDAHDLVAFSAVAEAVSSYGALSTRLYETFNREMSREAGNNSRGPRPGPEGCSAGSEDLDTLQTALALARHGMKPPNCNCDGPECPDYLEWLEGKIKSVVMEGGEERPRLPGPLPPGEAGLPAPSTRPLLSSEVPQISPQEGLPLSQSALSIAKEKNISLQTAIAIEALTQLSSALPQPSHSTPQASCPLPEALSPPAPFRSPQSYLRAPSWPVVPPEEHSSFAPDSSAFPPATPRTEFPEAWGTDTPPATPRSSWPMPRPSPDPMAELEQLLGSASDYIQSVFKRPEALPTKPKVKVEAPSSSPAPAPSPVLQREAPTPSSEPDTHQKAQTALQQHLHHKRSLFLEQVHDTSFPAPSEPSAPGWWPPPSSPVPRLPDRPPKEKKKKLPTPAGGPVGTEKAAPGIKPSVRKPIQIKKSRPREAQPLFPPVRQIVLEGLRSPASQEVQAHPPAPLPASQGSAVPLPPEPSLALFAPSPSRDSLLPPTQEMRSPSPMTALQPGSTGPLPPADDKLEELIRQFEAEFGDSFGLPGPPSVPIQDPENQQTCLPAPESPFATRSPKQIKIESSGAVTVLSTTCFHSEEGGQEATPTKAENPLTPTLSGFLESPLKYLDTPTKSLLDTPAKRAQAEFPTCDCVEQIVEKDEGPYYTHLGSGPTVASIRELMEERYGEKGKAIRIEKVIYTGKEGKSSRGCPIAKWVIRRHTLEEKLLCLVRHRAGHHCQNAVIVILILAWEGIPRSLGDTLYQELTDTLRKYGNPTSRRCGLNDDRTCACQGKDPNTCGASFSFGCSWSMYFNGCKYARSKTPRKFRLAGDNPKEEEVLRKSFQDLATEVAPLYKRLAPQAYQNQVTNEEIAIDCRLGLKEGRPFAGVTACMDFCAHAHKDQHNLYNGCTVVCTLTKEDNRCVGKIPEDEQLHVLPLYKMANTDEFGSEENQNAKVGSGAIQVLTAFPREVRRLPEPAKSCRQRQLEARKAAAEKKKIQKEKLSTPEKIKQEALELAGITSDPGLSLKGGLSQQGLKPSLKVEPQNHFSSFKYSGNAVVESYSVLGNCRPSDPYSMNSVYSYHSYYAQPSLTSVNGFHSKYALPSFSYYGFPSSNPVFPSQFLGPGAWGHSGSSGSFEKKPDLHALHNSLSPAYGGAEFAELPSQAVPTDAHHPTPHHQQPAYPGPKEYLLPKAPLLHSVSRDPSPFAQSSNCYNRSIKQEPVDPLTQAEPVPRDAGKMGKTPLSEVSQNGGPSHLWGQYSGGPSMSPKRTNGVGGSWGVFSSGESPAIVPDKLSSFGASCLAPSHFTDGQWGLFPGEGQQAASHSGGRLRGKPWSPCKFGNSTSALAGPSLTEKPWALGAGDFNSALKGSPGFQDKLWNPMKGEEGRIPAAGASQLDRAWQSFGLPLGSSEKLFGALKSEEKLWDPFSLEEGPAEEPPSKGAVKEEKGGGGAEEEEEELWSDSEHNFLDENIGGVAVAPAHGSILIECARRELHATTPLKKPNRCHPTRISLVFYQHKNLNQPNHGLALWEAKMKQLAERARARQEEAARLGLGQQEAKLYGKKRKWGGTVVAEPQQKEKKGVVPTRQALAVPTDSAVTVSSYAYTKVTGPYSRWI

SEQ ID NO: 83579 - protein, 246 aa, Homo sapiens
MATNFSDIVKQGYVKMKSRKLGIYRRCWLVFRKSSSKGPQRLEKYPDEKSVCLRGCPKVTEISNVKCVTRLPKETKRQAVAIIFTDDSARTFTCDSELEAEEWYKTLSVECLGSRLNDISLGEPDLLAPGVQCEQTDRFNVFLLPCPNLDVYGECKLQITHENIYLWDIHNPRVKLVSWPLCSLRRYGRDATRFTFEAGRMCDAGEGLYTFQTQEGEQIYQRVHSATLAIAEQHKRVLLEMEKNVR

SEQ ID NO: 83580 - protein, 672 aa, Homo sapiens
  MOD_RES (1)..(1): Any amino acid
XGASQGLHALLEERIHNYREAAASAKEAGEAAKARRCERGLKTLESQLASVRRGRKINEDEIPPPVALGKRPLAPQEPANRSPETDPPAPPALESDPDPRALLSSRQREYKVAALSAKRAGELDRARELMRIGKRFGAVLEALEKGQPVDLSAMPPAPEDLKPQQASQAPTAPSVIPPAVERVQPVMAPDVPATPVAPTESQTVLDALQQRLNKYREAGIQARSGGDERKARMHERIAKQYQDAIRAHRAGRKVNFAELPVPPGFPPIPGLESTMGVEEDAVAATLAAAEKLASAEDSAPADKDEDEGEPPAQAPVAKKPARPTVPSSQRLPEPRASSSKESPSPSVREQLALLEARKLQYQRAALQAKRSQDLEQAKAYLRVAKWLEAQIIQARSGRPVDLSKVPSPLTDEEGDFILIHHEDLRLSQKAEEVYAQLQKMLLEQQEKCLLFSKQFMHQGNVAETTRFEKLAQDRKKQLEILQLAQAQGLDPPTHHFELKTFQTVRIFSELNSTEMHLIIVRGMNLPAPPGVTPDDLDAFVRFEFHYPNSDQAQKSKTAVVKNTNSPEFDQLFKLNINRNHRGFKRVIQSKGIKFEIFHKGSFFRSDKLVGTAHLKLERLENECEIREIVEVLDGRKPTGGKLEVKVRLREPLSGQDVQMVTENWLVLEPRGL

SEQ ID NO: 83581 - protein, 1193 aa, Homo sapiens
  MOD_RES (1)..(1): Any amino acid
XKLFCRIQESSQVLYKLEQSKSKREPENELTKQHPSVSLQQYKNFMSSICNSLFEALFPGSSYSTRFSALTILGSIAEVFHVPEGRIYTVYQLSHDIDVGRFQTLMECFTSTFEDVKILAFDLLMKLSKTAVHFQDSGKLQGLFQAALELSTSTKPYDCVTASYLLNFLIWQDALPSSLSAYLTQQVACDNGDRPAAVVERNTLMVIKCLMENLEEEVSQAENSLLQAAAAFPMYGRVHCITGALQKLSLNSLQLVSEWRPVVEKLLLMSYRLSTVVSPVIQSSSPEGLIPMDTDSESASRLQMILNEIQPRDTNDYFNQAKILKEHDSFDMKDLNASVVNIDTSTEIKGKEVKTCDVTAQMVLVCCWRSMKEVALLLGMLCQLLPMQPVPESSDGLLTVEQVKEIGDYFKQHLLQSRHRGAFELAYTGFVKLTEVLNRCPNVSLQKLPEQWLWSVLEEIKCSDPSSKLCATRRSAGIPFYIQALLASEPKKGRMDLLKITMKELISLAGPTDDIQSTVPQVHALNILRALFRDTRLGENIIPYVADGAKAAILGFTSPVWAVRNSSTLLFSALITRIFGVKRAKDEHSKTNRCGHSPVYHSREMAARALVPFVMIDHIPNTIRTLLSTLPSCTDQCFRQNHIHGTLLQVFHLLQAYSDSKHGTNSDFQHELTDITVCTKAKLWLAKRQNPCLVTRAVYIDILFLLTCCLNRSAKDNQPVLESLGFWEEVRGIISGSELITGFPWAFKVPGLPQYLQSLTRLAIAAVWAAAAKSGERETNVPISFSQLLESAFPEVRSLTLEALLEKFLAAASGLGEKGVPPLLCNMGEKFLLLAMKENHPECFCKILKILHCMDPGEWLPQTEHCVHLTPKEFLIWTMDIASNERSEIQSVALRLASKVISHHMQTCVENRELIAAELKQWVQLVILSCEDHLPTESRLAVVEVLTSTTPLFLTNPHPILELQDTLALWKCVLTLLQSEEQAVRDAATETVTTAMSQENTCQSTEFAFCQVDASIALALALAVLCDLLQQWDQLAPGLPILLGWLLGESDDLVACVESMHQVEEDYLFEKAEVNFWAETLIFVKYLCKHLFCLLSKSGWRPPSPEMLCHLQRMVSEQCHLLSQFFRELPPAAEFVKTVEFTRLRIQEERTLACLRLLAFLEGKEGEDTLVLSVWDSYAESRQLTLPRTEAAC

SEQ ID NO: 83582 - protein, 75 aa, Homo sapiens
MLEGVKYLCIPAADSPSQNLTRHFKESIKFIHECRLRGESCLVHCLAGVSRSVTLVIAYIMTVTDFGWEDALHTV

SEQ ID NO: 83583 - protein, 69 aa, Homo sapiens
MGAGGASFRALAWASLPLLGPPACALCEDTLCCGESPQERPGSRRSLPGSLSEKSPSMEPSAATPFRVT

SEQ ID NO: 83584 - protein, 83 aa, Homo sapiens
MAAPLIPLSQQIPTGNSLYESYYKQVDPAYTGRVGASEAALFLKKSGLSDIILGKKRPNLMGFLKASCPSMVCSLETKSSQSS

SEQ ID NO: 83585 - protein, 483 aa, Homo sapiens
MTEVEYTQLQHILCSHMEAAADGELETRLNSALLAAAGPGAGAGGFAAGGQGGAAPVYPVLCPSALAADAPCLGHIDFQELRMMLLSEAGAAEKTSGGGDGARARADGAAKEGAGAAAAAAGPDGAPEARAKPAVRVRLEDRFNSIPAEPPPAPRGPEPPEPGGALNNLVTLIRHPSELMNVPLQQQNKCTALVKNKTAATTTALQFTYPLFTTNACSTSGNSNLSQTQSSSNSCSVLEAAKHQDIGLPRAFSFCYQQEIESTKQTLGSRNKVLPEQVWIKVGEAALCKQALKRNRSRMRQLDTNVERRALGEIQNVGEGATATQGAWQSSESSQANLGEQAQSGPQGGRSQRRERHNRMERDRRRRIRICCDELNLLVPFCNAETDKATTLQWTTAFLKYIQERHGDSLKKVLSTNSRYVMLWTCFLKMKSAVDGKNPQHAYRTANHKWLCLHEARSFAFEVSIWAHFQLFRVRIPEGFLSI

SEQ ID NO: 83586 - protein, 387 aa, Homo sapiens
  MOD_RES (1)..(1): Any amino acid
XHMQTQSSPFARGNVFGEPPTELQIKQQELYKNFLRFQIEEKKQREEAERERLRIAEEKEERRLAEQRARIQQEYEEEQEKKREKEEEQRLKNEEHIRLAEERQKEAERKKKEEEEKYNLQLQHYCERDNLIGEETKHMRQPSPIVPALQNKIASKLQRPPSVDSIIRSFIHESSMSRAQSPPVPARKNQLRAEEEKKNVIMELSEMRKQLRSEERRLQERLLHMDSDDEIPIRKKERNPMDIFDMARHRLQAPVRRQSPKGLDAATFQNVHDFNELKDRDSETRVDLKFMYLDPPRDHHTLEIQQQALLREQQKRLNRIKMQEGAKVDLDAIPSAKVREQRMPRDDTSDFLKNSLLESDSAFIGIIFFKGVAEVTVDVVGYLSMSN

SEQ ID NO: 83587 - protein, 421 aa, Homo sapiens
MDEADRRLLRRCRLRLVEELQVDQLWDALLSRELFRPHMIEDIQRAGSGSRRDQARQLIIDLETRGSQALPLFISCLEDTGQDMLASFLRTNRQAAKLSKPTLENLTPVVLRPEIRKPEVLRPETPRPVDIGSGGFGDVGALESLRGNADLAYILSMEPCGHCLIINNVNFCRESGLRTRTGSNIDCEKLRRRFSSLHFMVEVKGDLTAKKMVLALLELAQQDHGALDCCVVVILSHGCQASHLQFPGAVYGTDGCPVSVEKIVNIFNGTSCPSLGGKPKLFFIQACGGEQKDHGFEVASTSPEDESPGSNPEPDATPFQEGLRTFDQLDAISSLPTPSDIFVSYSTFPGFVSWRDPKSGSWYVETLDDIFEQWAHSEDLQSLLLRVSAAFLCKGEGRLLRGSVSSWGWGFGVSRAGPNQG

SEQ ID NO: 83588 - protein, 86 aa, Homo sapiens
MAHKYVGLQYHGSVTFEDVAIAFSQQEWESLDSSQRGLYRDVMLENYRNLVSMAGHSRSKPHVIALLEQWKEPEVTVRKDGRRWCT

SEQ ID NO: 83589 - protein, 598 aa, Homo sapiens
MENCLGESRHEVEKSEISENTDASGKIEKYNVPLNRLKMMFEKGEPTQTKILRAQSRSASGRKISENSYSLDDLEIGPGQLSSSTFDSEKNESRRNLELPRLSETSIKDRMAKYQAAVSKQSSSTNYTNELKASGGEIKIHKMEQKENVPPGPEVCITHQEGEKISANENSLAVRSTPAEDDSRDSQVKSEVQQPVHPKPLSPDSRASSLSESSPPKAMKFQAPARETCVECQKTVYPMERLLANQQVFHISCFRCSYCNNKLSLGTYASLHGRIYCKPHFNQLFKSKGNYDEGFGHRPHKDLWASKNENEEILERPAQLANARETPHSPGVEDAPIAKVGVLAASMEAKASSQQEKEDKPAETKKLRIAWPPPTELGSSGSALEEGIKMSKPKWPPEDEISKPEVPEDVDLDLKKLRRSSSLKERSRPFTVAASFQSTSVKSPKTVSPPIRKGWSMSEQSEESVGGRVAERKQVENAKASKKNGNVGKTTWQNKESKGETGKRSKEGHSLEMENENLVENGADSDEDDNSFLKQQSPQEPKSLNWSSFVDNTFAEEFTTQNQKSQDVELWEGEVVKELSVEEQIKRNRYYDEDEDEE

SEQ ID NO: 83590 - protein, 77 aa, Homo sapiens
MAQTDKPTCIPPELPKMLKEFAKAAIRVQPQDLIQWAADYFEALSRGETPPVRERSERVALCNRAELTPELLKILHS

SEQ ID NO: 83591 - protein, 172 aa, Homo sapiens
MLAKQYGHMKIVALMDTYSPSLPKSLYRSPEKYEDLSSSDESCPAPQRQRPCRKKGVSIHEGPRALARITGIGLGGRAPRPRYEQAPPRGYVTFNSSGENPLEEEGLCCRDVTSPINERDVESSSSSSSREEHAFCANLGPVQSSSSSEGLARAQGLSSEASVESNEDSDHA

SEQ ID NO: 83592 - protein, 60 aa, Homo sapiens
MCQGGDFTRHNGTGGKSIYGEKFEDENFILKHTGPGILSMANAGPNTNGSQFFICTAKTE

SEQ ID NO: 83593 - protein, 167 aa, Homo sapiens
MNIKGSPWKGSLLLLLVSNLLLCQSVAPLPICPGGAARCQVTLRDLFDRAVVLSHYIHNLSSEMFSEFDKRYTHGRGFITKAINSCHTSSLATPEDKEQAQQMNVHPETKENEIYPVWSGLPSLQMADEESRLSAYYNLLHCLRRDSHKIDNYLKLLKCRIIHNNNC

SEQ ID NO: 83594 - protein, 164 aa, Homo sapiens
MWEPCGSQGDTVSLDAEIVKEAEVPQAALGVPAQGTGDNGHTPVEEEVGGIPVPAPGLLQVTERRQPLSSVSSLEVHFDLLDLTELTDMSDQELAEVFADSDDENLNTESPAGLHPLPRAGYLRSPSWTRTRAEQSHEKQPLGDPERQATVLDTFLTVERPQED

SEQ ID NO: 83595 - protein, 49 aa, Homo sapiens
LNKKLQFCHQRLQIISQALSSWVKSDMSSPFQDFVEQIQKTKYLQGLMS

SEQ ID NO: 83596 - protein, 156 aa, Homo sapiens
MTVPAAGDSRDMSREMQDVDLAEVKPLVEKGETITGLLQEFDVQEQDIETLHGSVHVTLCGTPKGNRPVILTYHDIGMNHKTCYNPLFNYEDMQEITQHFAVCHVDAPGQQDGAASFPAGYMYPSMDQLAEMLPGVLQQFGLKSIIGMGTGAGAYI

SEQ ID NO: 83597 - protein, 248 aa, Homo sapiens
MEEEASSPGLGCSKPHLEKLTLGITRILESSPGVTEVTIIEKPPAERHMISSWEQKNNCVMPEDVKNFYLMTNGFHMTWSVKLDEHIIPLGSMAINSISKLTQLTQSSMYSLPNAPTLADLEDDTHEASDDQPEKPHFDSRSVIFELDSCNGSGKVCLVYKSGKPALAEDTEIWFLDRALYWHFLTDTFTAYYRLLITHLGLPQWQYAFTSYGISPQAKALLGLFDGSSPPVDLNNPRGRTGIRSRRF

SEQ ID NO: 83598 - protein, 139 aa, Homo sapiens
MGEGTAGPGPRSLETRDQRTPGGPVWGGRRTEPRLTRSCRGAFRSPRPLPKSGQADGTSEESLHLDIQKLKEKRDMLDKEISQFVSEGYSVDELEDHITQLHEYNDIKDVGQMLMGKLAVIRGVTTKELYPEFGLDMND

SEQ ID NO: 83599 - protein, 754 aa, Homo sapiens
MVQKSRNGGVYPGPSGEKKLKVGFVGLDPGAPDSTRDGALLIAGSEAPKRGSILSKPRAGGAGAGKPPKRNAFYRKLQNFLYNVLERPRGWAFIYHAYVFLLVFSCLVLSVFSTIKEYEKSSEGALYILEIVTIVVFGVEYFVRIWAAGCCCRYRGWRGRLKFARKPFCVIDIMVLIASIAVLAAGSQGNVFATSALRSLRFLQILRMIRMDRRGGTWKLLGSVVYAHSKELVTAWYIGFLCLILASFLVYLAEKGENDHFDTYADALWWGLITLTTIGYGDKYPQTWNGRLLAATFTLIGVSFFALPAGILGSGFALKVQEQHRQKHFEKRRNPAAGLIQSAWRFYATNLSRTDLHSTWQYYERTVTVPMYRLIPPLNQLELLRNLKSKSGLAFRKDPPPEPSPSPRGVAAKGKGSPQAQTVRRSPSADQSLEDSPSKVPKSWSFGDRSRARQAFRIKGAASRQNSEEASLPGEDIVDDKSCPCEFVTEDLTPGLKVSIRAVCVMRFLVSKRKFKESLRPYDVMDVIEQYSAGHLDMLSRIKSLQSRIDMIVGPPPPSTPRHKKYPTKGPTAPPRESPQYSPRVDQIVGRGPAITDKDRTKGPAEAELPEDPSMMGRLGKVEKQVLSMEKKLDFLVNIYMQRMGIPPTETEAYFGAKEPEPAPPYHSPEDSREHVDRHGCIVKIVRSSSSTGQKNFSAPPAAPPVQCPPSTSWQPQSHPRQGHGTSPVGDHGSLGRAPETRAGQEGSHGGVSH

SEQ ID NO: 83600 - protein, 88 aa, Homo sapiens
MLPCLVVLLAALLSLRLGSDAHVESPGWLALWQSGARVLPYSGKPGSQAHLLWKWKRLKLTGTDGLGRIEKYAQGQTPNPQTSSSTHF

SEQ ID NO: 83601 - protein, 26 aa, Homo sapiens
  MOD_RES (1)..(1): Any amino acid
XSTHNCDRPPSTGVMECRKTFGEPYL

SEQ ID NO: 83602 - protein, 163 aa, Homo sapiens
CLDLEQCSLKVLEPEGSPSLCLLKLMGEKGCTVTELSDFLQAMEHTEVLQLLSPPGIKITVNPESKAVLAGQFVKLCCRATGHPFVQYQWFKMNKEIPNGNTSELIFNAVHVKDAGFYVCRVNNNFTFEFSQWSQLDVCDIPESFQSALCGFGTPRNLLVSCI

SEQ ID NO: 83603 - protein, 418 aa, Homo sapiens
MPWRNKEASSPSSANPPLEALQSPSFRGNMADKLKDPSTLGFLEAAVKISHTSPDIPAEVQMSVKEHIMRHTRLQRQTTEPASSTRHTSFKRHLPRQMHVSSVDYGNELPPAAEQPTSIGRIKPELYKQKSVDGEDAKSEATKSCGKINFSLRYDYETETLIVRILKAFDLPAKDFCGSSDPYVKIYLLPDRKCKLQTRVHRKTLNPTFDENFHFPVPYEELADRKLHLSVFDFDRFSRHDMIGEVILDNLFEASDLSRETSIWKDIQYATSESVDLGEIMFSLCYLPTAGRLTLTVIKCRNLKAMDITGYSDPYVKVSLLCDGRRLKKKKTTIKKNTLNPVYNEAIIFDIPPENMDQVSLLISVMDYDRVGHNEIIGVCRVGITAEGLGRDHWNEMLAYPRKPIAHWHSLVEGNPRL

SEQ ID NO: 83604 - protein, 431 aa, Homo sapiens
MENTEGYRCDDFVVNDTKLGLVQKVREHLQNLENSAFTADRHKKRKLLENSTLNSKLLKVNGSTTAICATGLRNLGNTCFMNAILQSLSNIEQFCCYFKELPAVELRNGKTAGRRTYHTRSQGDNNVSLVEEFRKTLCALWQGSQTAFSPESLFYVVWKIMPNFRGYQQQDAHEFMRYLLDHLHLELQGGFNGVSRSAILQENSTLSASNKCCINGASTVVTAIFGGILQNEVNCLICGTESRKFDPFLDLSLDIPSQFRSKRSKNQENGPVCSLRDCLRSFTDLEELDETELYMCHKCKKKQKSTKKFWIQKLPKVLCLHLKRFHWTAYLRNKVDTYVEFPLRGLDMKCYLLEPENSGPESCLYDLAAVVVHHGSGVGSGHYTAYATHEGRWFHFNDSTVTLTDEETVVKAKAYILFYVEHQAKAGSDKL

SEQ ID NO: 83605 - protein, 383 aa, Homo sapiens
MGLGRVLLFLAVAFPFAPPAAAAEPHSLRYNLMVLSQDGSVQSGFLAEGHLDGQPFLRYDRQKRRAKPQGQWAEDVLGAKTWDTETEDLTENGQDLRRTLTHIKDQKGGLHSLQEIRVCEIHEDSSTRGSRHFYYDGELFLSQNLETQESTVPQSSRAQTLAMNVTNFWKEDAMKTKTHYRAMQADCLQKLQRYLKSGVAIRRTVPPMVNVICSEVSEGNITVTCRASSFYPRNITLTWRQDGVSLSHNTQQWGDVLPDGNGTYQTWVATRIRQGEEQRFTCYMEHSGNHGTHPVPSGKALVLQSQRTDFPYVSAAMPCFVIIIILCVPCCKKKTSAAEGPELVSLQVLDQHPVGTGDHRDAAQLGFQPLMSATGSTGSTEGT

SEQ ID NO: 83606 - protein, 1216 aa, Homo sapiens
MAAMAPGGSGSGGGVNPFLSDSDEDDDEVAATEERRAVLRLGAGSGLDPGSAGSLSPQDPVALGSSARPGLPGEASAAAVALGGTGETPARLSIDAIAAQLLRDQYLLTALELHTELLESGRELPRLRDYFSNPGNFERQSGTPPGMGAPGVPGAAGVGGAGGREPSTASGGGQLNRAGSISTLDSLDFARYSDDGNRETDEKVAVLEFELRKAKETIQALRANLTKAAEHEVPLQERKNYKSSPEIQEPIKPLEKRALNFLVNEFLLKNNYKLTSITFSDENDDQDFELWDDVGLNIPKPPDLLQLYRDFGNHQVTGKDLVDVASGVEEDELEALTPIISNLPPTLETPQPAENSMLVQKLEDKISLLNSEKWSLMEQIRRLKSEMDFLKNEHFAIPAVCDSVQPPLDQLPHKDSEDSGQHPDVNSSDKGKNTDIHLSISDEADSTIPKENSPNSFPRREREGMPPSSLSSKKTVHFDKPNRKLSPAFHQALLSFCRMSADSRLGYEVSRIADSEKSVMLMLGRCLPHIVPNVLLAKREELIPLILCTACLHPEPKERDQLLHILFNLIKRPDDEQRQMILTGCVAFARHVGPTRVEAELLPQCWEQINHKYPERRLLVAESCGALAPYLPKEIRSSLVLSMLQQMLMEDKADLVREAVIKSLGIIMGYIDDPDKYHQGFELLLSALGDPSERVVSATHQVFLPAYAAWTTELGNLQSHLILTLLNKIEKLLREGEHGLDEHKLHMYLSALQSLIPSLFALVLQNAPFSSKAKLHGEVPQIEVTRFPRPMSPLQDVSTIIGSREQLAVLLQLYDYQLEQEGTTGWESLLWVVNQLLPQLIEIVGKINVTSTACVHEFSRFFWRLCRTFGKIFTNTKVKPQFQEILRLSEENIDSSAGNGVLTKATVPIYATGVLTCYIQEEDRKLLVGFLEDVMTLLSLSHAPLDSLKASFVELGANPAYHELLLTVLWYGVVHTSALVRCTAARMFELLVKGVNETLVAQRVVPALITLSSDPEISVRIATIPAFGTIMETVIQRELLERVKMQLASFLEDPQYQDQHSLHTEIIKTFGRVGPNAEPRFRDEFVIPHLHKLALVNNLQIVDSKRLDIATHLFEAYSALSCCFISEDLMVNHFLPGLRCLRTDMEHLSPEHEVILSSMIKECEQKVENKTVQEPQGSMSIAASLVSEDTKTKFLNKMGQLTTSGAMLANVFQRKK

SEQ ID NO: 83607 - protein, 23 aa, Homo sapiens
MATEGGGKEMNEIKTQFTTREGC

SEQ ID NO: 83608 - protein, 159 aa, Homo sapiens
MFCTLNTHKVDMDKLLGGQIGLEDFIFAHVKGQRKEVEVFKSEDALGLTITDNGAGYAFIKRIKEGSVIDHIHLISVGDMIEAINGQSLLGCRHYEVARLLKELPRGRTFTLKLTEPRKAFDMISQRSAGGRPGSGPQLGTGRGTLRLRSRGPATVEDL

SEQ ID NO: 83609 - protein, 21 aa, Homo sapiens
  MOD_RES (1)..(1): Any amino acid
XGRAGYPAPRDEGVLRPRAHA

SEQ ID NO: 83610 - protein, 54 aa, Homo sapiens
MGCTLSAEERAALERSKAIEKNLKEDGISAAKDVKLLLLGAGESGKSTIVKQMK

SEQ ID NO: 83611 - protein, 90 aa, Homo sapiens
TFELSDDGRFEVWNAMTRGQHCDTWSYVLIPAAQPGQFTVDHGVDTRAGWPSSGSACWAGAGCCLPGRWTSSSAWAELRASRMTTSSSQM

SEQ ID NO: 83612 - protein, 229 aa, Homo sapiens
MASLSRPSLPSCLCSFLLLLLLQVSSSYAGQFRVIGPRHPIRALVGDEVELPCRISPGKNATGMEVGWYRPPFSRVVHLYRNGKDQDGDQAPEYRGRTELLKDAIGEGKVTLRIRNVRFSDEGGFTCFFRDHSYQEEAAMELKVEDPFYWVSPGVLVLLAVLPVLLLQITLGLVFLCLQYRLRGKLRAEIENLHRTFESFGVLGPQVKEPKKTGQFLEELLFHLEALSG

SEQ ID NO: 83613 - protein, 608 aa, Homo sapiens
MATNGSKVADGQISTEVSEAPVANDKPKTLVVKVQKKAADLPDRDTWKGRFDFLMSCVGYAIGLGNVWRFPYLCGKNGGGAFLIPYFLTLIFAGVPLFLLECSLGQYTSIGGLGVWKLAPMFKGVGLAAAVLSFWLNIYYIVIISWAIYYLYNSFTTTLPWKQCDNPWNTDRCFSNYSMVNTTNMTSAVVEFWERNMHQMTDGLDKPGQIRWPLAITLAIAWILVYFCIWKGVGWTGKVVYFSATYPYIMLIILFFRGVTLPGAKEGILFYITPNFRKLSDSEVWLDAATQIFFSYGLGLGSLIALGSYNSFHNNVYRDSIIVCCINSCTSMFAGFVIFSIVGFMAHVTKRSIADVAASGPGLAFLAYPEAVTQLPISPLWAILFFSMLLMLGIDSQVADLCSHLKFCTVEGFITALVDEYPRLLRNRRELFIAAVCIISYLIGLSNITQGGIYVFKLFDYYSASGMSLLFLVFFECVSISWFYGVNRFYDNIQEMVGSRPCIWWKLCWSFFTPIIVAGVFIFSAVQMTPLTMGNYVFPKWGQGVGWLMALSSMVLIPGYMAYMFLTLKGSLKQRIQVMVQPSEDIVRPENGPEQPQAGSSTSKEAYI

SEQ ID NO: 83614 - protein, 138 aa, Homo sapiens
MKLLSLVAVVGCLLVPPAEANKSSEDIRCKCICPPYRNISGHIYNQNVSQKDCNCLHVVEPMPVPGHDVEAYCLLCECRYEERSTTTIKVIIVIYLSVVGALLLYMAFLMLVDPLIRKPDAYTEQLHNEEENEDARSM

SEQ ID NO: 83615 - protein, 182 aa, Homo sapiens
MEEPAAPSEAHEAAGAQAGAEAAREGVSGPDLPVCEPSGESAAPDSALPHAARGWAPFPVAPVPAHLRRGGLRPAPASGGGAWPSPLPSRSSGIWTKQIICRCIRRWRSARQFENRIVKSCPQCRVTSELVIPSEFWVEEEEEKQKLIQQYKEAMSNKACRFTAVKNLPGVSDETLDFGLLS

SEQ ID NO: 83616 - protein, 172 aa, Homo sapiens
MVLPEDPKYALKKVDEIREMVDNDLGFQQAPLMCYSRTKTLLFISNDKKVVGCLIAEHIQWGYRVIEEKLPVIRSEEEKVRFERQKAWCCSTLPEPAICGISRIWVFSMMRRKKIASRMIECLRSNFIYGSYLSKEEIAFSDPTPDGKLFATQYCGTGQFLVYNFINGQNST

SEQ ID NO: 83617 - protein, 32 aa, Homo sapiens
MLQLSEFDPLLREIAPGPLTTPSVPGSTPGPC

SEQ ID NO: 83618 - protein, 421 aa, Homo sapiens
MCWVRSDNKRPCLEFSQLSVKDSFRDLFIPRIETILMMYTRNNLNCAEPLFEQNNSLNVNFNTQKKTVWLIHGYRPVGSIPLWLQNFVRILLNEEDMNVIVVDWSRGATTFIYNRAVKNTRKVAVSLSVHIKNLLKHGASLDNFHFIGVSLGAHISGFVGKIFHGQLGRITGLDPAGPRFSRKPPYSRLDYTDAKFVDVIHSDSNGIQFIKCNHQRAVHLFMASLETNCNFISFPCRSYKDYKTSLCVDCDCFKEKSCPRLGYQAKLFKGVLKERMEGRPLRTTVFLDTSGTYPFCTYYFVLSIIVPDKTMMDGSFSFKLLNQLGMIEEPRLYEKNKPFYKLQEVKILAQFYNDFVNISSIGLTYFQSSNLQCSTCTYKIQSLMLKSLTYPERPPLCRYNIVLKDREEVFLNPNTCTPKNT

SEQ ID NO: 83619 - protein, 72 aa, Homo sapiens
MCAINGRRSGADAWPRGPRCAAPRACAVPRRRLPGLTPNEAPRRRPQAKTSFVLPLEEAKRGLLLLKEAGSL

SEQ ID NO: 83620 - protein, 43 aa, Homo sapiens
MKQLIDNILEESDIDRDGTINLSEFQHVISRSPDFASSFKIVL

SEQ ID NO: 83621 - protein, 371 aa, Homo sapiens
MRLRKLAQQIANCKQCIERSASLISQAEHSLKENDHARFLQTAKNITERVSMATASSQVLIPEINLNDTFDTFALDFSREKKLLECLDYLTAPNPPTIREELCTASYDTITVHWTSDDEFSVVSYELQYTIFTGQANVVSLCNSADSWMIVPNIKQNHYTVHGLQSGTKYIFMVKAINQAGSRSSEPGKLKTNSQPFKLDPKSAHRKLKVSHDNLTVERDESSSKKSHTPERFTSQGSYGVAGNVFIDSGRHYWEVVISGSTWYAIGLAYKSAPKHEWIGKNSASWALCRCNNNWVVRHNSKEIPIEPAPHLRRVGILLDYDNGSIAFYDALNSIHLYTFDVAFAQPVCPTFTVWNKCLTIITGLPIPDHL

SEQ ID NO: 83622 - protein, 415 aa, Homo sapiens
MLNFTDVTEFILLGLTSRREWQVLFFIIFLVVYIITMVGNIGMMVLIKMESYSLAQAGVQWHCLDSLLPLPPRFKRFSCLSLPSGWDYRHPTSCPGNTDLAYTKAMPNFTDVTEFTLLGLTCRQELQVLFFVVFLAVYMITLLGNIGMIILISISPQLQSPMYFFLSHLSFADVCFSSNVTPKMLENLLSETKTISYVGCLVQCYFFIAVVHVEVYILAVMAFDRYMAGCNPLLYGSKMSRTVCVRLISVPYVYGFSVSLICTLWTYGLYFCGNFEINHFYCADPPLIQIACGRVHIKEITMIVIAGINFTYSLSVVLISYTLIVVAVLRMRSADGRRKAFSTCGSHLTAVSMFYGTPIFMYLRRPTEESVEQGKMVAVFYTTVIPMLNPMIYSLRNKDVKEAVNKAITKTYVRQ

SEQ ID NO: 83623 - protein, 67 aa, Homo sapiens
MGCMKSKQTFPFPTIYEGEKQHESEEPFMPEERCLPRMASPVNVKEEVKEPPGTNTVILEYAHRLSQ

SEQ ID NO: 83624 - protein, 736 aa, Homo sapiens
MAEPRQEFEVMEDHAGTYGLGDRKDQGGYTMHQDQEGDTDAGLKESPLQTPTEDGSEEPGSETSDAKSTPTAEAEEAGIGDTPSLEDEAAGHVTQEELRVPGRQRKAPERPLANEISAHVQPGPCGEASGVSGPCLGEKEPEAPVPLTASLPQHRPVCPAPPPTGGPQEPSLEWGQKGGDWAEKGPAFPKPATTAYLHTEPESGKVVQEGFLREPGPPGLSHQLMSGMPGAPLLPEGPREATRQPSGTGPEDTEGGRHAPELLKHQLLGDLHQEGPPLKGAGGKERPGSKEEVDEDRDVDESSPQDSPPSKASPAQDGRPPQTAAREATSIPGFPAEGAIPLPVDFLSKVSTEIPASEPDGPSVGRAKGQDAPLEFTFHVEITPNVQKEQAHSEEHLGRAAFPGAPGEGPEARGPSLGEDTKEADLPEPSEKQPAAAPRGKPVSRVPQLKARMVSKSKDGTGSDDKKAKGADGKTKIATPRGAAPPGQKGQANATRIPAKTPPAPKTPPSSGEPPKSGDRSGYSSPGSPGTPGSRSRTPSLPTPPTREPKKVAVVRTPPKSPSSAKSRLQTAPVPMPDLKNVKSKIGSTENLKHQPGGGKVQIVYKPVDLSKVTSKCGSLGNIHHKPGGGQVEVKSEKLDFKDRVQSKIGSLDNITHVPGGGNKKIETHKLTFRENAKAKTDHGAEIVYKSPVVSGDTSPRHLSNVSSTGSIDMVDSPQLATLADEVSASLAKQGL

SEQ ID NO: 83625 - protein, 859 aa, Homo sapiens
  MOD_RES (1)..(1): Any amino acid
XMTVPISITNPDLLRHSTELFMDSGFSPLCQRMGAMVAFRRFEDFTRNFDEVISCFANVPKDTPLFSEARTSLYSEDDCKSLREEPIHILNVSIQCADHLEDEALVPILRTFVQSKKNILVDYGLRRITFLIAQEKEFPKFFTFRARDEFAEDRIYRHLEPALAFQLELNRMRNFDLTAVPCANHKMHLYLGAAKVKEGVEVTDHRFFIRAIIRHSDLITKEASFEYLQNEGERLLLEAMDELEVAFNNTSVRTDCNHIFLNFVPTVIMDPFKIEESVRYMVMRYGSRLWKLRVLQAEVKINIRQTTTGSAVPIRLFITNESGYYLDISLYKEVTDSRSGNIMFHSFGNKQGPQHGMLINTPYVTKDLLQAKRFQAQTLGTTYIYDFPEMFRQALFKLWGSPDKYPKDILTYTELVLDSQGQLVEMNRLPGGNEVGMVAFKMRFKTQEYPEGRDVIVIGNDITFRIGSFGPGEDLLYLRASEMARAEGIPKIYVAANSGARIGMAEEIKHMFHVAWVDPEDPHKGFKYLYLTPQDYTRISSLNSVHCKHIEEGGESRYMITDIIGKDDGLGVENLRGSGMIAGESSLAYEEIVTISLVTCRAIGIGAYLVRLGQRVIQVENSHIILTGASALNKVLGREVYTSNNQLGGVQIMHYNGVSHITVPDDFEGVYTILEWLSYMPKDNHSPVPIITPTDPIDREIEFLPSRAPYDPRWMLAGRPHPTLKGTWQSGFFDHGSFKEIMAPWAQTVVTGRARLGGIPVGVIAVETRTVEVAVPADPANLDSEAKIIQQAGQVWFPDSAYKTAQAVKDFNREKLPLMIFANWRGFSGGMKGCLGTWRDVSWWKIRAMLPMHIGEGSV

SEQ ID NO: 83626 - protein, 211 aa, Homo sapiens
MPGEATETVPATEQELPQPQAETESDSDESVPELEEQDSTQATTQQAQLAAAAEIDEEPVSKAKQSRSEKKARKAMSKLGLRQVTGVTRVTIRKSKNILFVITKPDVYKSPASDTYIVFGEAKIEDLSQQAQLAAAEKFKVQGEAVSNIQENTQTPTVQEESEEEEVDETGVEVKDIELVMSQANVSRAKAVRALKNNSNDIVNAIMELTM

SEQ ID NO: 83627 - protein, 68 aa, Homo sapiens
MESSGTPSVTLIVGSGLSCLALITLAVVYAALWRYIRSERSIILINFCLSIISSNILILVGQTQTHNK

SEQ ID NO: 83628 - protein, 63 aa, Homo sapiens
MKFNPFVTSDRSKNRKRHFNAPSHIRRKIMSSPLSKELRQKYNVRSMPIRKDDEVQEVSMFGH

SEQ ID NO: 83629 - protein, 84 aa, Homo sapiens
MLRTLAQAKKECWDRFLQEKLASEFFVDGLDSDESTLEHFKRWLQPDKVAVSTEEVQYLIPPESQVEKPVAEDEPAAGDKPAAA

SEQ ID NO: 83630 - protein, 200 aa, Homo sapiens
MSQSNRELVVDFLSYKLSQKGYSWSQFSDVEENRTEAPEGTESEMETPSAINGNPSWHLADSPAVNGATGHSSSLDAREVIPMAAVKQALREAGDEFELRYRRAFSDLTSQLHITPGTAYQSFEQVVNELFRDGVNWGRIVAFFSFGGALCVESVDKEMQVLVSRIAAWMATYLNDHLEPWIQENGGWVPDASFRFWLHH

SEQ ID NO: 83631 - protein, 122 aa, Homo sapiens
MCIAEIDLIPRDRPFVCAPSSKTGSVTTTYCCNQDHCNKIELPTTVKSSPGLGPVELAAVIAGPVCFVCISLMLMVYICHNRTVIHHRVPNEEDPSLDRPFISEGTTLKDLIYDMTTSGSGS

SEQ ID NO: 83632 - protein, 234 aa, Homo sapiens
  MOD_RES (1)..(1): Any amino acid
XDAYWEKLYVDQAAGTPLLYVHALRDAPEEVPSFRLGQHLYGTYRTRLHENNWICIQEDTGLLYLNRSLDHSSWEKLSVRNRGFPLLTVYLKVFLSPTSLREGECQWPGCARVYFSFFNTSFPACSSLKPRELCFPETRPSFRIRENRPPGTFHQFRLLPVQFLCPNISVAYRLLEGECRPCGAAPQCLLLLVLLCEPLTQAIWFILHLHAISSFNIPEVPLACLPGARYCSRS

SEQ ID NO: 83633 - protein, 99 aa, Homo sapiens
MKLRNTGQKKTLDKKDGRRMSFQKPKGTIEYTVESRDSLNSIALKFDTTPNELVQLNKLFSRAVVTGQVLYVPDPEYVSSVESSPSLSPVSPLSPTSSE

SEQ ID NO: 83634 - protein, 200 aa, Homo sapiens
STLCYCHETTSCPGLSWEEYCCPADCAHFQLSSFDLRSRLCRIIAEAPQELALPPEEAEMLSTEALRLWAVAASYGQGGYLYRELYPVLMRALQVVPRELSTHPPQPLSMQRIASLLTLLTQLTLAAGSTPAETISDSAEASLSATPSLVTWTQVSGLQPLVEPCLRQTLKLLSRPEMWRAVGPVPVACLLFLGAYYQAW

SEQ ID NO: 83635 - protein, 95 aa, Homo sapiens
  MOD_RES (1)..(1): Any amino acid
XGRTWYILSLTLCRFLAWNYFAHLRLEVLQLTRHPENWTLQARWRLVGLPVHLLFLRFYKRDKDEHYRTYDAYSTFYLNSSGLICRHRLDKVSPS

SEQ ID NO: 83636 - protein, 522 aa, Homo sapiens
MVKLANPLYTEWILEAIQKIKKQKQRPSEERICHAVSTSHGLDKKTVSEQLELSVQDGSVLKVTNKGLASYKDPDNPGRFSSVKPGTFPKSAKGSRGSCNDLRNVDWNKLLRRAIEGLEEPNGSSLKNIEKYLRSQSDLTSTTNNPAFQQRLRLGAKRAVNNGRLLKDGPQYRVNYGSLDGKGAPQYPSAFPSSLPPVSLLPHEKDQPRADPIPICSFCLGTKESNREKKPEELLSCADCGSSGHPSCLKFCPELTTNVKALRWQCIECKTCSACRVQGRNAEKLCQQKYNVSCIMIMPQHQRQGFGRFLIDFSYLLSRREGQAGSPEKPLSDLGRLSYLAYWKSVILEYLYHHHERHISIKAISRATGMCPHDIATTLQHLHMIDKRDGRFVIIRREKLILSHMEKLKTCSRANELDPDSLRWTPILISNAAVSEEEREAEKEAERLMEQASCWEKEEQEILSTRANSRQSPAKVQSKNKYLHSPESRPVTGERGQLLELSKESSEEEEEEEDEEEEEEEE

SEQ ID NO: 83637 - protein, 261 aa, Homo sapiens
  MOD_RES (1)..(1): Any amino acid
XDEDIKKIQTQISSGMTNNASLLQNYLKTWDMYREIWEINKDSFIHRYQRLNPPVSSFVADIARYTEVANNVQKEETVTNIQFVLLDCSHLKFSLVQHCNEWQNKFATLLREMAAGRLLELHTYLKENAEKISRPPQTLEELGVSLQLVDALKHDLANVETQIPPIHEQFAILEKYEVPVEDSVLEMLDSLNGEWVVFQQTLLDSKQMLKKHKEKFKTGLIHSADDFKKKAHTLLEDFEFKGARCPPANLGDRTRLGGELE

SEQ ID NO: 83638 - protein, 145 aa, Homo sapiens
  MOD_RES (1)..(1): Any amino acid
XRGAICSGCYAQMYIQAYKTSNLRMKIIKNDFPSHPLYLEGALTRSTHYQQYQPVVTLQKGYTIHWDQTAPAELAIWLINFNKGDWIRVGLCYPRGTTFSILSDVHNRLLKQTSKTGVFVRTLQMDKVEQSYPGRSHYYWDEDSG

SEQ ID NO: 83639 - protein, 220 aa, Homo sapiens
MATNESVSIFSSASLAVEYVDSLLPENPLQEPFKNAWNYMLNNYTKFQIATWGSLIVHEALYFLFCLPGFLFQFIPYMKKYKIQKDKPETWENQWKCFKVLLFNHFCIQLPLICGTYYFTEYFNIPYDWERMPRWYFLLARCFGCAVIEDTWHYFLHRLLHHKRIYKYIHKVHHEFQAPFGMEAEYAHPLETLILGTGFFIGIVLLCDHVILLWAWVTIR

SEQ ID NO: 83640 - protein, 35 aa, Homo sapiens
  MOD_RES (1)..(1): Any amino acid
XAAIGWGSASNAGSGSGFNGGFGSSMDSKSSGWGM

SEQ ID NO: 83641 - protein, 710 aa, Homo sapiens
MLTFFLVSGGSLWLFVEFVLSLLEKMQTQEILRILRLPELGDLGQFFRSLSATTLVSMGALAAILAYWFTHRPKALQPPCNLLMQSEEVEDSGGARRSVIGSGPQLLTHYYDDARTMYQVFRRGLSISGNGPCLGFRKPKQPYQWLSYQEVADRAEFLGSGLLQHNCKACTDQFIGVFAQNRPEWIIVELACYTYSMVVVPLYDTLGPGAIRYIINTADISTVIVDKPQKAVLLLEHVERKETPGLKLIILMDPFEEALKERGQKCGVVIKSMQAVEHFLLSGLWPRESPGSCGNPKGAMLTHGNVVADFSGFLKVTESQWAPTCADVHISYLPLAHMFERMVQSVVYCHGGRVGFFQGDIRLLSDDMKALCPTIFPVVPRLLNRMYDKIFSQANTPLKRWLLEFAAKRKQAEVRSGIIRNDSIWDELFFNKIQASLGGCVRMIVTGAAPASPTVLGFLRAALGCQVYEGYGQTECTAGCTFTTPGDWTSGHVGAPLPCNHIKLVDVEELNYWACKGEGEICVRGPNVFKGYLKDPDRTKEALDSDGWLHTGDIGKWLPAGTLKIIDRKKHIFKLAQGEYVAPEKIENIYIRSQPVAQIYVHGDSLKAFLVGIVVPDPEVMPSWAQKRGIEGTYADLCTNKDLKKAILEDMVRLGKESGLHSFEQVKAIHIHSDMFSVQNGLLTPTLKAKRPELREYFKKQIEELYSISM

SEQ ID NO: 83642 - protein, 282 aa, Homo sapiens
MIEVQEGQNLKITITGYRTAYSCYGTVSSLNGEPEQGVAMEAVGQNDCSIYGEDTVTDEEGKFRLRGLLPGCVYHVQLKAEGNDHIERALPHHRVIEVGNNDIDDVNIIVFRQINQFDLSGNVITSSEYLPTLWVKLYKSENLDNPIQTVSLGQSLFFHFPPLLRDGENYVVLLDSTLPRSQYDYILPQVSFTAVGYHKHITLIFNPTRKLPEQDIAQGSYIALPLTLLVLLAGYNHDKLIPLLLQLTSRLQGVGALGQAASDNSGPEDAKRQAKKQKTRRT

SEQ ID NO: 83643 - protein, 131 aa, Homo sapiens
  MOD_RES (1)..(1): Any amino acid
XAGMSQKTVTITKEDESTEKLSSVCMGQEDNMTSVTNHFSQSKLDSPEELEPDREEDSSSCIDIQEVLSSSESDSCNSSSSDIIRDLLEEEEAWEASHKLYFSKRRYIFQGSCVSTNPFFCKRTACFYSKL

SEQ ID NO: 83644 - protein, 115 aa, Homo sapiens
MTQNIFNSTTTAEEKIDSYLEKQVVTFLDYSTDLDTTERQQLIFLLGVSSLQLFVQSNWTGPPVDLHPQDFLSSVLFQQFSEVKGLDAFVLSLLTLDGESIYSLTSKPILLLLAR

SEQ ID NO: 83645 - protein, 133 aa, Homo sapiens
MGSPAAPEGALGYVREFTRHSSDVLGNLNELRLRGILTDVTLLVGGQPLRAHKAVLIACSGFFYSIFRGRAGVGVDVLSLPGGPEARGFAPLLDFMYTSRLRLSPATAPAVLAAATYLQMEHVVQACHRFIQA

SEQ ID NO: 83646 - protein, 102 aa, Homo sapiens
MLPPQKKPWESMAKGLVLGALFTSFLLLVYSYAVPPLHAGLASTTPEAAASCSPPALEPEAVIRANGSAGECQPRRNIVFLKTHKTASSTLLNILFRFGQKH

SEQ ID NO: 83647 - protein, 49 aa, Homo sapiens
MSFLKSFPPPGPAEGLLRQQPDTEAVLNGKGLGTGTLYIAERRIKRTCC

SEQ ID NO: 83648 - protein, 291 aa, Homo sapiens
MLWFSGVGALAERYCRRSPGITCCVLLLLNCSGVPMSLASSFLTGSVAKCENEGEVLQIPFITDNPCIMCVCLNKEVTCKREKCPVLSRDCALAIKQRGACCEQCKGCTYEGNTYNSSFKWQSPAEPCVLRQCQEGVVTESGVRCVVHCKNPLEHLGMCCPTCPGCVFEGVQYQEGEEFQPEGSKCTKCSCTVRGKCLTSLLGAASFEVMFMTMDPHFCTITAQLVPAGTLLWFARGSAPTLVAVTKARRAVVKSASYECPQKTSKYANLATRFSRARRLHGVWRSPLQHF

SEQ ID NO: 83649 - protein, 239 aa, Homo sapiens
MEPAAALHFSLPASLLLLLLLLLLSLCALVSAQFTVVGPANPILAMVGENTTLRCHLSPEKNAEDMEVRWFRSQFSPAVFVYKGGRERTEEQMEEYRGRITFVSKDINRGSVALVIHNVTAQENGIYRCYFQEGRSYDEAILRLVVAGLGSKPLIEIKAQEDGSIWLECISGGWYPEPLTVWRDPYGEVVPALKEVSIADADGLFMVTTAVIIRDKYVRNVSCSVNNTLLGQEKETVIF

SEQ ID NO: 83650 - protein, 219 aa, Homo sapiens
MELKVWVDGVQRIVCGVTEVTTCQEVVIALAQAIGRTGRYTLIEKWRDTERHLAPHENPIISLNKWGQYASDVQLILRRTGPSLSERPTSDSVARIPERTLYRQSLPPLAKLRPQIDKSIKRREPKRKSLTFTGGAKGLMDIFGKGKETEFKQKVLNNCKTTADELKKLIRLQTEKLQSIEKQLESNEIEIRFWEQKYNSNLEEEIVRLEQKIKRNDVE

SEQ ID NO: 83651 - protein, 184 aa, Homo sapiens
MTARGTPSRFLASVLHNGLGRYVQQLQRLSFSVSRDGASSRGAREFVEREVIDFARRNPGVVIYVNSRPCCVPRVVAEYLNGAVREESIHCKSVEEISTLVQKLADQSGLDVIRIRKPFHTDNPSIQGQWHPFTNKPTTFRGLRPREVQDPAPAQDTGLRLSAVAPQILLPGWPDPTRATRATR

SEQ ID NO: 83652 - protein, 193 aa, Homo sapiens
MRLQKRLASSVLRCGKKKVWLDPNETNEIANANSRQQIRKLIKDGLIIRKPVTVHSRARCRKNTLARRKGRHMGIGKRKGTANARMPEKVTWMRRMRILRRLLRRYRESKKIDRHMYHSLYLKVKGNVFKNKRILMEHIHKLKADKARKKLLADQAEARRSKTKEARKRREERLQAKKEEIIKTLSKEEETKK

SEQ ID NO: 83653 - protein, 625 aa, Homo sapiens
SQYQELAVALESSSVTINQLNENIESLKQQKKQVEHQLEEAKKTNNEIHKAQMEQLETINILTLEKADLKTTLYHTKRAARHFEEESKDLAGRLQYSLQHIQELERALCAVSTQQQEEDRSSSCREAVLQRRLQQTIKERALLNAHVTQVTESLKQVQLERDEYAKHIKGERARWQERMWKMSVEARTLKEEKKRDIHRIQELERSLSELKNQMAEPPSLAPPAVTSVVEQLQDEAKHLRQEVEGLEGKLQSQVENNQALSLLSKEQKQRLQEQEEMLREQEAQRVREQERLCEQNERLREQQKTLQEQGERLRKQEQRLRKQEERLRKEEERLQKQEKRLWDQEERLWKKEERLQKQEERLALSQNHKLDKQLAEPQCSFEDLNNEKKSALQLEQQVKELQEKLDEEHLEAASQRNQQLETQLSLVALPGEGDGGQHLDSEEEEAPRPTPNIPEDLESREATSSFMDLPKEKADGTEQVERRELGFVQPSGVTDGMRESFTVYESQGAVPNTRHQEMEDVIRLAQKEEEMKVKLLELQELVLPLVGNHEGHGKFLIAAQNPADEPTPGAPAPQELGAAGEQDVFYEVSLDNNVEPAPGVAREGSPHNNPTVQQIVQLSPVMQDT

SEQ ID NO: 83654 - protein, 837 aa, Homo sapiens
MVVDEQQRLTAQLTLQRQKIQELTTNAKETHTKLALAEARVQEEEQKATRLEKELQTQTTKFHQDQDTIMAKLTNEDSQNRQLQQKLAALSRQIDELEETNRSLRKAEEELQDIKEKISKGEYGNAGIMAEVEELRKRVLDMEGKDEELIKMEEQCRDLNKRLERETLQSKDFKLEVEKLSKRIMALEKLEDAFNKSKQECYSLKCNLEKERMTTKQLSQELESLKVRIKELEAIESRLEKTEFTLKEDLTKLKTLTVMFVDERKTMSEKLKKTEDKLQAASSQLQVEQNKVTTVTEKLIEETKRALKSKTDVEEKMYSVTKERDDLKNKLKAEEEKGNDLLSRVNMLKNRLQSLEAIEKDFLKNKLNQDSGKSTTALHQENNKIKELSQEVERLKLKLKDMKAIEDDLMKTEDEYETLERRYANERDKAQFLSKELEHVKMELAKYKLAEKTETSHEQWLFKRLQEEEAKSGHLSREVDALKEKIHEYMATEDLICHLQGDHSVLQKKLNQQENRNRDLGREIENLTKELERYRHFSKSLRPSLNGRRISDPQVFSKEVQTEAVDNEPPDYKSLIPLERAVINGQLYEESENQDEDPNDEGSVLSFKCSQSTPCPVNRKLWIPWMKSKEGHLQNGKMQTKPNANFVQPGDLVLSHTPGQPLHIKVTPDHVQNTATLEITSPTTESPHSYTSTAVIPNCGTPKQRITILQNASITPVKSKTSTEDLMNLEQGMSPITMATFARAQTPESCGSLTPERTMSPIQVLAVTGSASSPEQGRSPEPTEISAKHAIFRVSPDRQSSWQFQRSNSNSSSVITTEDNKIHIHLGSPYMQAVASP

SEQ ID NO: 83655 - protein, 123 aa, Homo sapiens
NAPAAPVSPGPSVPVAVVPSGSSVPAPGTSSVWLDLRTQSTVESLSKRIPGNNNFVKSKTGLPLSTYFSAVKLRWLLDNVRKVQKAVEEKRALFGTIDSWLIWSLTGGVNGGVHCTDVTNASR

SEQ ID NO: 83656 - protein, 71 aa, Homo sapiens
DILGEAGLHFDELNKLRVLDPEVTQQTIELKEECKDFVDKIGQFQKIVGGLIELVDQLAKEAENEKMKVSG

SEQ ID NO: 83657 - protein, 450 aa, Homo sapiens
  MOD_RES (1)..(1): Any amino acid
XCVVQTSNDTQCLNKSDNIDGKASLQIGEKMPVTASVLSEEEQTHCLEIGSNTRHGKSNLSEGKKSAELNSPLRERLSPENRTTDLKCDSSSGSEGEILTREHIEVEEKRASPPVSPIPVSEYCESENKWSQEKHSPWEGVSDHLAHREPKSQKPFRKMQEEEEESWSTSSDLTISISEDDLILESPEPQPNPGGKMEGEDGIEALKLIHAEQERVALSTEKNCILQTLSSPDSEKESSTNAPTREPGQTPDSDVPRAQATALLRKALTEECGRRSAIHSSESSCSLPSILNDNSGIKEAKPAVWLNSVPTREQEVSSGCGDKSKKENVAADIPITETEAYQLLKKATLQDNTNQTENRFQKTDASVSHLSGLNIGSGAFETKTANKIASEASFSSSEGSPLSRHENKKKPVINLKSNALWDESDDSNSEIEAALRPRNHNTDDSDDFYD

SEQ ID NO: 83658 - protein, 16 aa, Homo sapiens
MATIEEIAHQIIEQQM

SEQ ID NO: 83659 - protein, 3903 aa, Homo sapiens
MTTMLQKSDSNASFLRAARAGNLDKVVEYLKGGIDINTCNQNGLNALHLAAKEGHVGLVQELLGRGSSVDSATKKGNTALHIASLAGQAEVVKVLVKEGANINAQSQNGFTPLYMAAQENHIDVVKYLLENGANQSTATEDGFTPLAVALQQGHNQAVAILLENDTKGKVRLPALHIAARKDDTKSAALLLQNDHNADVQSKMMVNRTTESGFTPLHIAAHYGNVNVATLLLNRGAAVDFTARNGITPLHVASKRGNTNMVKLLLDRGGQIDAKTRDGLTPLHCAARSGHDQVVELLLERGAPLLARTKNGLSPLHMAAQGDHVECVKHLLQHKAPVDDVTLDYLTALHVAAHCGHYRVTKLLLDKRANPNARALNGFTPLHIACKKNRIKVMELLVKYGASIQAITESGLTPIHVAAFMGHLNIVLLLLQNGASPDVTNIRGETALHMAARAGQVEVVRCLLRNGALVDARAREEQTPLHIASRLGKTEIVQLLLQHMAHPDAATTNGYTPLHISAREGQVDVASVLLEAGAAHSLATKKGFTPLHVAAKYGSLDVAKLLLQRRAAADSAGKNGLTPLHVAAHYDNQKVALLLLEKGASPHATAKNGYTPLHIAAKKNQMQIASTLLNYGAETNIVTKQGVTPLHLASQEGHTDMVTLLLDKGANIHMSTKSGLTSLHLAAQEDKVNVADILTKHGADQDAHTKLGYTPLIVACHYGNVKMVNFLLKQGANVNAKTKNGYTPLHQAAQQGHTHIINVLLQHGAKPNATTANGNTALAIAKRLGYISVVDTLKVVTEEVTTTTTTITEKHKLNVPETMTEVLDVSDEEGDDTMTGDGGEYLRPEDLKELGDDSLPSSQFLDGMNYLRYSLEGGRSDSLRSFSSDRSHTLSHASYLRDSAVMDDSVVIPSHQVSTLAKEAERNSYRLSWGTENLDNVALSSSPIHSGFLVSFMVDARGGAMRGCRHNGLRIIIPPRKCTAPTRVTCRLVKRHRLATMPPMVEGEGLASRLIEVGPSGAQFLGPVIVEIPHFAALRGKERELVVLRSENGDSWKEHFCDYTEDELNEILNGMDEVLDSPEDLEKKRICRIITRDFPQYFAVVSRIKQDSNLIGPEGGVLSSTVVPQVQAVFPEGALTKRIRVGLQAQPMHSELVKKILGNKATFSPIVTLEPRRRKFHKPITMTIPVPKASSDVMLNGFGGDAPTLRLLCSITGGTTPAQWEDITGTTPLTFVNECVSFTTNVSARFWLIDCRQIQESVTFASQVYREIICVPYMAKFVVFAKSHDPIEARLRCFCMTDDKVDKTLEQQENFAEVARSRDVEVLEGKPIYVDCFGNLVPLTKSGQHHIFSFFAFKENRLPLFVKVRDTTQEPCGRLSFMKEPKSTRGLVHQAICNLNITLPIYTKESESDQEQEEEIDMTSEKNDETESTETSVLKSHLVNEVPVLASPDLLSEVSEMKQDLIKMTAILTTDVSDKAGSIKVKELVKAAEEEPGEPFEIVERVKEDLEKVNEILRSGTCTRDESSVQSSRSERGLVEEEWVIVSDEEIEEARQKAPLEITEYPCVEVRIDKEIKGKVEKDSTGLVNYLTDDLNTCVPLPKEQLQTVQDKAGKKCEALAVGRSSEKEGKDIPPDETQSTQKQHKPSLGIKKPVRRKLKEKQKQKEEGLQASAEKAELKKGSSEESLGEDPGLAPEPLPTVKATSPLIEETPIGSIKDKVKALQKRVEDEQKGRSKLPIRVKGKEDVPKKTTHRPHPAASPSLKSERHAPGSPSPKTERHSTLSSSAKTERHPPVSPSSKTEKHSPVSPSAKTERHSPASSSSKTEKHSPVSPSTKTERHSPVSSTKTERHPPVSPSGKTDKRPPVSPSGRTEKHPPVSPGRTEKRLPVSPSGRTDKHQPVSTAGKTEKHLPVSPSGKTEKQPPVSPTSKTERIEETMSVRELMKAFQSGQDPSKHKTGLFEHKSAKQKQPQEKGKVRVEKEKGPILTQREAQKTENQTIKRGQRLPVTGTAESKRGVRVSSIGVKKEDAAGGKEKVLSHKIPEPVQSVPEEESHRESEVPKEKMADEQGDMDLQISPDRKTSTDFSEVIKQELEDNDKYQQFRLSEETEKAQLHLDQVLTSPFNTTFPLDYMKDEFLPALSLQSGALDGSSESLKNEGVAGSPCGSLMEGTPQISSEESYKHEGLAETPETSPESLSFSPKKSEEQTGETKESTKTETTTEIRSEKEHPTTKDITGGSEERGATVTEDSETSTESFQKEATLGSPKDTSPKRQDDCTGSCSVALAKETPTGLTEEAACDEGQRTFGSSAHKTQTDSEVQESTATSDETKALPLPEASVKTDTGTESKPQGVIRSPQGLELALPSRDSEVLSAVADDSLAVSHKDSLEASPVLEDNSSHKTPDSLEPSPLKESPCRDSLESSPVEPKMKAGIFPSHFPLPAAVAKTELLTEVASVRSRLLRDPDGSAEDDSLEQTSLMESSGKSPLSPDTPSSEEVSYEVTPKTTDVSTPKPAVIHECAEEDDSENGEKKRFTPEEEMFKMVTKIKMFDELEQEAKQKRDYKKEPKQEESSSSSDPDADCSVDVDEPKHTGSGEDESGVPVLVTSESRKVSSSSESEPELAQLKKGADSGLLPEPVIRVQPPSPLPSSMDSNSSPEEVQFQPVVSKQYTFKMNEDTQEEPGKSEEEKDSESHLAEDRHAVSTEAEDRSYDKLNRDTDQPKICDGHGCEAMSPSSSAAPVSSGLQSPTGDDVDEQPVIYKESLALQGTHEKDTEGEELDVSRAESPQADCPSESFSSSSSLPHCLVSEGKELDEDISATSSIQKTEVTKTDETFENLPKDCPSQDSSITTQTDRFSMDVPVSDLAENDEIYDPQITSPYENVPSQSFFSSEESKTQTDANHTTSFHSSEVYSVTITSPVEDVVVASSSSGTVLSKESNFEGQDIKMESQQESTLWEMQSDSVSSSFEPTMSATTTVVGEQISKVIITKTDVDSDSWSEIREDDEAFEARVKEEEQKIFGLMVDRQSQGTTPDTTPARTPTEEGTPTSEQNPFLFQEGKLFEMTRSGAIDMTKRSYADESFHFFQIGQESREETLSEDVKEGATGADPLPLETSAESLALSESKETVDDEADLLPDDVSEEVEEIPASDAQLNSQMGISASTETPTKEAVSVGTKDLPTVQTGDIPPLSGVKQISCPDSSEPAVQVQLDFSTLTRSVYSDRGDDSPDSSPEEQKSVIEIPTAPMENVPFTESKSKIPVRTMPTSTPAPPSAEYESSVSEDFLSSVDEENKADEAKPKSKLPVKVPLQRVEQQLSDLDTSVQKTVAPQGQDMASIAPDNRSKSESDASSLDSKTKCPVKTRSYTETETESRERAEELELESEEGATRPKILTSRLPVKSRSTTSSCRGGTSPTKESKEHFFDLYRNSIEFFEEISDEASKLVDRLTQSEREQEIVSDDESSSALEVSVIENLPPVETEHSVPEDIFDTRPIWDESIETLIERIPDENGHDHAEDPQDEQERIEERLAYIADHLGFSWTELARELDFTEEQIHQIRIENPNSLQDQSHALLKYWLERDGKHATDTNLVECLTKINRMDIVHLMETNTEPLQERISHSYAEIEQTITLDHSEGFSVLQEELCTAQHKQKEEQAVSKESETCDHPPIVSEEDISVGYSTFQDGVPKTEGDSSATALFPQTHKEQVQQDFSGKMQDLPEESSLEYQQEYFVTTPGTETSETQKAMIVPSSPSKTPEEVSTPAEEEKLYLQTPTSSERGGSPIIQEPEEPSEHREESSPRKTSLVIVESADNQPETCERLDEDAAFEKGDDMPEIPPETVTEEEYIDEHGHTVVKKVTRKIIRRYVSSEGTEKEEIMVQGMPQEPVNIEEGDGYSKVIKRVVLKSDTEQSEDNNE

SEQ ID NO: 83660 - protein, 236 aa, Homo sapiens
KGSCPFQTATELMETTRIREQAPQPERGGEHEPPSRPCGLLDEDGSEPLPGPRGEVPGGSAHYGGPSPEKKAKSSSGGSSLAKGRASKKQQLLATAAHKDSQSIARFFCRRVESPALLASAPEAEGACPSCEGVQGPPMAPEKYTGEEDGAGGHSPAPPQTEECLRERPRPPGMREPPGPSAVMPALPSTSTCPPRDQGTPEVQPTPAKDTWKGKRPRSQQENPESQPQKRPRPSA

SEQ ID NO: 83661 - protein, 136 aa, Homo sapiens
MGRPGRAGHCPNPGISLGAVRTGFRFGHGDKVRYRCSSNLVLTGSSERECQGNGVWSGTEPICRQPYSYDFPEDVAPALGTSFSHMLGATNPTQKTKESLGRKIQIQRSGHLNLYLLLDCSQSVSENDFLIFKESA

SEQ ID NO: 83662 - protein, 45 aa, Homo sapiens
MGNLLKVLTCTDLEQGPNFFLDFENAQPTESEKEIYNQVNVVLKD

SEQ ID NO: 83663 - protein, 77 aa, Homo sapiens
  MOD_RES (1)..(1): Any amino acid
XEWITYSNSCYYIGKERRTWEESLLACTSKNSSLLSIDNEEEMKFLSIISPSSWIGVFRNSSHHPWVTMNGLAFKHE

SEQ ID NO: 83664 - protein, 43 aa, Homo sapiens
MNSRQAWRLFLSQGRGDRWVSRPRGHFSPALRRGEARRRVIDA

SEQ ID NO: 83665 - protein, 175 aa, Homo sapiens
MPPKKDVPVKKPAGPSISKPAAKPAAAGAPPAKTKAEPAVPQAPQKTQEPPVDLSKVVIEFNKDQLEEFKEAFELFDRVGDGKILYSQCGDVMRALGQNPTNAEVLKVLGNPKSDELKSRRVDFETFLPMLQAVAKNRGQGEKMTEEEVETVLAGHEDSNGCINYEAFLKHILSV

SEQ ID NO: 83666 - protein, 71 aa, Homo sapiens
MSVAGGEIPRCRVDLPLAVLSKMDINRRRYPAHLARSSSRKYTELPHGAISEDQAVGPADIPCDSTGQTST

SEQ ID NO: 83667 - protein, 167 aa, Homo sapiens
MAENGKNCDQRRVAMNKEHHNGNFTDPSSVNEKKRREREERQNIVLWRQPLITLQYFSLEILVILKEWTSKLWHRQSIVVSFLLLLAVLIATYYVEGVHQQYVQRIEKQFLLYAYWIGLGILSSVGLGTGLHTFLLYLIICPDEEGTEGTISLWSIISKVRIEACMW

SEQ ID NO: 83668 - protein, 503 aa, Homo sapiens
MKCEHCTRKECSKKTKTDDQENVSADAPSPAQENGEKGEFHKLADAKIFLSDCLACDSCMTAEEGVQLSQQNAKDFFRVLNLNKKCDTSKHKVLVVSVCPQSLPYFAAKFNLSVTDASRRLCGFLKSLGVHYVFDTTIAADFSILESQKEFVRRYRQHSEEERTLPMLTSACPGWVRYAERVLGRPITAHLCTAKSPQQVMGSLVKDYFARQQNLSPEKIFHVIVAPCYDKKLEALQESLPPALHGSRGADCVLTSGKVLISWWCTPVITATQEAAARESLEPGRQRLQRDKIAPLDSSLGGGGEIAQIMEQGDLSVRDAAVDTLFGDLKEDKVTRHDGASSDGHLAHIFRHAAKELFNEDVEEVTYRALRNKDFQEVTLEKNGEVVLRFAAAYGFRNIQNMILKLKKGKFPFHFVEVLACAGGCLNGRGQAQTPDGHADKALLRQMEGIYADIPVRRPESSAHVQELYQEWLEGINSPKAREVLHTTYQSQERGTHSLDIKW

SEQ ID NO: 83669 - protein, 1391 aa, Homo sapiens
MLESYVTPILMSYVNRYIKNLKPSDLQLSLWGGDVVLSKLELKLDVLEQELKLPFTFLSGHIHELRIHVPWTKLGSEPVVITINTMECILKLKDGIQDDHESCGSNSTNRSTAESTKSSIKPRRMQQAAPTDPDLPPGYVQSLIRRVVNNVNIVINNLILKYVEDDIVLSVNITSAECYTVGELWDRAFMDISATDLVLRKVINFSDCTVCLDKRNASGKIEFYQDPLLYKCSFRTRLHFTYENLNSKMPSVIKIHTLVESLKLSITDQQLPMFIRIMQLGIALYYGEIGNFKEGEIEDLTCHNKDMLGNITGSEDETRIDMQYPAQHKGQELYSQQDEEQPQGWVSWAWSFVPAIVSYDDGEEDFVGNDPASTMHQQKAQTLKDPIVSIGFYCTKATVTFKLTEMQVESSYYSPQKVKSKEVLCWEQEGTTVEALMMGEPFFDCQIGFVGCRAMCLKGIMGVKDFEENMNRSETEACFFICGDNLSTKGFTYLTNSLFDYRSPENNGTRAEFILDSTHHKETYTEIAGMQRFGAFYMDYLYTMENTSGKGSTNQQDFSSGKSEDLGTVQEKSTKSLVIGPLDFRLDSSAVHRILKMIVCALEHEYEPYSRLKSDIKDENETILNPEEVALLEEYIPTRHTSVTLLKCTCTISMAEFNLLDHLLPVIMGEKNSSNFMNTTNFQSLRPLPSIRILVDKINLEHSVPMYAEQLVHVVSSLTQPSDNLLHYCYVHCYLKIFGFQAGLTSLDCSGSYCLPVPVIPSFSTALYGKLLKLPTCWTKRSQIAITEGIFELPNLTIQATRAQTLLLQAIYQSWSHLGNVSSSAVIEALINEIFLSIGVKSKNPLPTLEGSIQNVELKYCSTSLVKCASGTMGSIKICAKAPVDSGKEKLIPLLQGPSDTKDLHSTKWLNESRKPESLLAPDLMAFTIQVPQYIDYCHNSGAVLLCSIQGLAVNIDPILYTWLIYQPQKRTSRHMQQQPVVAVPLVMPVCRRKEDEVSIGSAPLAKQQSYQASEYASSPVKTKTVTESRPLSVPVKAMLNISESCRSPEERMKEFIGIVWNAVKHLTLQLEVQSCCVFIPNDSLPSPSTIVSGDIPGTVRSWYHGQTSMPGTLVLCLPQIKIISAGHKYMEPLQEIPFVIPRPILEEGDAFPWTISLHNFSIYTLLGKQVTLCLVEPMGCTSTLAVTSQKLLATGPDTRHSFVVCLHVDLESLEIKCSNPQVQLFYELTDIMNKVWNKIQKRGNLNLSPTSPETMAGPVPTSPVRSSIGTAPPDTSTCSPSADIGTTTEGDSIQAGEESPFSDSVTLEQTTSNIGGTSGRVSLWMQWVLPKITIKLFAPDPENKGTEVCMVSELEDLSASIDVQDVYTKVKCKIESFNIDHYRSRQLQNF

SEQ ID NO: 83670 - protein, 105 aa, Homo sapiens
MALEAAGGPPEETLSLWKREQARLKAHVVDRDTEAWQRDPAFSGLQRVGGVDVSFVKGDSVRACASLVVLSFPELEFCLQVAKQNGSSLPSACQPFCCWKQLPAP

SEQ ID NO: 83671 - protein, 137 aa, Homo sapiens
MLVNELNHSKEKECQYEKEKAEREVAVRQLQQKRDDVLNKGSATKALLDASSRHCTYLENGMQDSRKKLDQMRSQFQEIQDQLTATIRCTKEMEGDTQKLEVEHVMMRKIIKKQDDQIERLEKILQHSSLMLQVFES

SEQ ID NO: 83672 - protein, 570 aa, Homo sapiens
MKDDSIEGIYDTLKQCALISKSAGGIGVAVSCIRATGSYIAGTNGNSNGLVPMLRVYNNTARYVDQGGNKRPGAFAIYLEPWHLDIFEFLDLKKNTGKEEQRARDLFFALWIPDLFMKRVETNQDWSLMCPNECPGLDEVWGEEFEKLYASYEKQGRVRKVVKAQQLWYAIIESQTETGTPYMLYKDSCNRKSNQQNLGTIKCSNLCTEIVEYTSKDEVAVCNLASLALNMYVTSEHTYDFKKLAEVTKVVVRNLNKIIDINYYPVPEACLSNKRHRPIGIGVQGLADAFILMRYPFESAEAQLLNKQIFETIYYGALEASCDLAKEQGPYETYEGSPVSKGILQYDMWNVTPTDLWDWKVLKEKIAKYGIRNSLLIAPMPTASTAQILGNNESIEPYTSNIYTRRVLSGEFQIVNPHLLKDLTERGLWHEEMKNQIIACNGSIQSIPEIPDDLKQLYKTVWEISQKTVLKMAAERGAFIDQSQSLNIHIAEPNYGKLTSMHFYGWKQGLKTGMYYLRTRPAANPIQFTLNKEKLKDKEKVSKEEEEKERNTAAMVCSLENRDECLMCGS

SEQ ID NO: 83673 - protein, 110 aa, Homo sapiens
MAALGTVLFSVRRLHCSVAAWAGGQWRLQQGLAANPSGYGPLTELPDWSYADGRPAPPMKGQLRRKAERETFAVSETSCTAVTGNGRWITSMAAQAAEVAGRTKEAGKCS

SEQ ID NO: 83674 - protein, 133 aa, Homo sapiens
MAPRGCAGHPPPPSPQACVCPGKMLAMGALAGFWILCLLTYGYLSWGQALEEEEEGALLAQAGEKLEPSTTSTSQPHLIFILADDQGFRDVGYHGSEIKTPTLDKLAAEGVKLENYYVQPICTPSRSQFITGK

SEQ ID NO: 83675 - protein, 653 aa, Homo sapiens
MRLPDLRPWTSLLLVDAALLWLLQGPLGTLLPQGLPGLWLEGTLRLGGLWGLLKLRGLLGFVGTLLLPLCLATPLTVSLRALVAGASRAPPARVASAPWSWLLVGYGAAGLSWSLWAVLSPPGAQEKEQDQVNNKVLMWRLLKLSRPDLPLLVAAFFFLVLAVLGETLIPHYSGRVIDILGGDFDPHAFASAIFFMCLFSFGSSLSAGCRGGCFTYTMSRINLRIREQLFSSLLRQDLGFFQETKTGELNSRLSSDTTLMSNWLPLNANVLLRSLVKVVGLYGFMLSISPRLTLLSLLHMPFTIAAEKVYNTRHQEVLREIQDAVARAGQVVREAVGGLQTVRSFGAEEHEVCRYKEALEQCRQLYWRRDLERALYLLIRRVLHLGVQMLMLSCGLQQMQDGELTQGSLLSFMIYQESVGSYVQTLVYIYGDMLSNVGAAEKVFSYMDRQPNLPSPGTLAPTTLQGVVKFQDVSFAYPNRPDRPVLKGLTFTLRPGEVTALVGPNGSGKSTVAALLQNLYQPTGGQVLLDEKPISQYEHCYLHSQVVSVGQEPVLFSGSVRNNITYGLQSCEDDKVMAAAQAAHADDFIQEMEHGIYTDVGEKGSQLAAGQKQRLAIARALVRDPRVLILDEATSALDVQCEQAKTLWKFMIF

SEQ ID NO: 83676 - protein, 49 aa, Homo sapiens
MGIRGLMSFVEDHSNEFFTDLKLRDTKIVIDGYALFHRLCFSSNLDLRY

SEQ ID NO: 83677 - protein, 80 aa, Homo sapiens
MEALGFLKLEVNGPMVTVALSVALLALLKWYSTSAFSRLEKLGLRHPKPSPFIGNLTFFRQGFWESQMELRKLYGPLCGL

SEQ ID NO: 83678 - protein, 55 aa, Homo sapiens
MSHAVTIEEPQAQPQVSQTRYRERSRAGSHISSNRAYDFLYGKDRRRPSSASVAS

SEQ ID NO: 83679 - protein, 82 aa, Homo sapiens
MERAGATSRGGQAPGFLLRLHTEGRAEAARVQEQDLRQWGLTGIHLRSYQLEGVNWLAQRFHCQNGCILGDEMGLGKTCQED

SEQ ID NO: 83680 - protein, 319 aa, Homo sapiens
MELDFGHFDERDKTSRNMRGSRMNGLPSPTHSAHCSFYRTRTLQALSNEKKAKKVRFYRNGDRYFKGIVYAVSSDRFRSFDALLADLTRSLSDNINLPQGVRYIYTIDGSRKIGSMDELEEGESYVCSSDNFFKKVEYTKNVNPNWSVNVKTSANMKAPQSLASSNSAQARENKDFVRPKLVTIIRSGVKPRKAVRVLLNKKTAHSFEQVLTDITEAIKLETGVVKKLYTLDGKQVTCLHDFFGDDDVFIACGPEKFRYAQDDFSLDENECRVMKGNPSATAGPKASPTPQKTSAKSPGPMRRSKSPADSGPVPASVLG

SEQ ID NO: 83681 - protein, 133 aa, Homo sapiens
MGAYKYIQELWRKKQSDVMRFLLRVRCWQYRQLSALHRAPRPTRPDKARRLGYKAKQGYVIYRIRVRRGGRKRPVPKGATYGKPVHHGVNQLKFARSLQSVAEERAGRHCGALRVLNSYWVGEDSTYKFFEVI

SEQ ID NO: 83682 - protein, 210 aa, Homo sapiens
MTPPRLFWVWLLVAGTQGVNDGDMRLADGGATNQGRVEIFYRGQWGTVCDNLWDLTDASVVCRALGFENATQALGRAAFGQGSGPIMLDEVQCTGTEASLADCKSLGWLKSNCRHERDAGVVCTNETRSTHTLDLSRELSEALGQIFDSQRGCDLSISVNVQGEDALGFCGHTVILTANLEAQALWKEPGSNVTMSVDAECVPMVRDLLR

SEQ ID NO: 83683 - protein, 48 aa, Homo sapiens
GEITQSQAFDFEFTHVEKPYESYTGQNVKLRGFVLSVCTAERKVLKPV

SEQ ID NO: 83684 - protein, 904 aa, Homo sapiens
MPLRLDIKRKLTARSDRVKSVDLHPTEPWMLASLYNGSVCVWNHETQTLVKTFEVCDLPVRAAKFVARKNWVVTGADDMQIRVFNYNTLERVHMFEAHSDYIRCIAVHPTQPFILTSSDDMLIKLWDWDKKWSCSQVFEGHTHYVMQIVINPKDNNQFASASLDRTIKVWQLGSSSPNFTLEGHEKGVNCIDYYSGGDKPYLISGADDRLVKIWDYQNKTCVQTLEGHAQNVSCASFHPELPIIITGSEDGTVRIWHSSTYRLESTLNYGMERVWCVASLRGSNNVALGYDEGSIIVKLGREEPAMSMDANGKIIWAKHSEVQQANLKAMGDAEIKDGERLPLAVKDMGSCEIYPQTIQHNPNGRFVVVCGDGEYIIYTAMALRNKSFGSAQEFAWAHDSSEYAIRESNSIVKIFKNFKEKKSFKPDFGAESIYGGFLLGVRSVNGLAFYDWDNTELIRRIEIQPKHIFWSDSGELVCIATEESFFILKYLSEKVLAAQETHEGVTEDGIEDAFEVLGEIQEIVKTGLWVGDCFIYTSSVNRLNYYVGGEIVTIAHLDRTMYLLGYIPKDNRLYLGDKELNIISYSLLVSVLEYQTAVMRRDFSMADKVLPTIPKEQRTRVAHFLEKQGFKQQALTVSTDPEHRFELALQLGELKIAYQLAVEAESEQKWKQLAELAISKCQFGLAQECLHHAQDYGGLLLLATASGNANMVNKLAEGAERDGKNNVAFMSYFLQGKVDACLELLIRTGRLPEAAFLARTYLPSQVSRVVKLWRENLSKVNQKAAESLADPTEYENLFPGLKEAFVVEEWVKETHADLWPAKQYPLVTPNEERNVMEEGKDFQPSRSTAQQELDGKPASPTPVIVASHTANKEEKQPDPWPLEPTGHLDGARDTAGPSWLHHRF

SEQ ID NO: 83685 - protein, 111 aa, Homo sapiens
MWTLVSWVALTAGLVAGTRCPDGQFCPVACCLDPGGASYSCCRPLLDKWPTTLSRHLGGPCQVDAHCSAGHSCIFTVSGTSSCCPFPEAVACGDGHHCCPRGFHCSADGRS

SEQ ID NO: 83686 - protein, 42 aa, Homo sapiens
MPEFQKSSVRIKNPTRVEEIICGLIKGGAAKLQIITDFDMTL

SEQ ID NO: 83687 - protein, 212 aa, Homo sapiens
  MOD_RES (1)..(1): Any amino acid
XDPEKPVRLNVKYDKDASFLAGGLFTDFMISVISEDDSIIKNINPARISMKMWKLSTSGNRPPANAETFSCNKIKDNDKEDGCFYFRDKVIPNKVGTYCIQFGFMMDKTNILNSEQVIVEVLPNQPVKLVPKIKPPTPAVSNVRSVASRTLVRDLHLSITDDYDNHTGIDLVGTIIATIKGSNEEDTDTPLFIGKVRTLEFPFVNGSAEIML

SEQ ID NO: 83688 - protein, 105 aa, Homo sapiens
MASSPAVDVSCRRREKRRQLDARRSKCRIRLGGHMEQWCLLKERLGFSLHSQLAKFLLDRYTSSGCVLCAAESAAWCPGFGGLAAKMGGLCGSAQQAIPSPGDPL

SEQ ID NO: 83689 - protein, 233 aa, Homo sapiens
  MOD_RES (1)..(1): Any amino acid
XDFENGPQNIYNLYEQVSYNCFIAAGLYLLLGGFSFCQVRLNKRKEYMVGEIFSAAGAAFTKLGELTMQLHPVADSSPAGAKWTETEIEMLRAAVKRFGDDLNHISCVIKERTVAQIKATVKRKVYEDSGIPLPAESPKKGPKKVASGVLSPPPAAPPPSSSSVPEAGGPPIKKQKADVTLSALNDSDANSDVVDIEGLGETPPAKKLNFDQDSLTLDSGLLMTSADPPLLSC

SEQ ID NO: 83690 - protein, 55 aa, Homo sapiens
MLPPQPSAAHQGRGGRSGLLPKGWQDPLPQPSCWPMRVGSLMTSSSGTSLRTSST

SEQ ID NO: 83691 - protein, 111 aa, Homo sapiens
ADIMRGEDFTPAEEFVPQEELGAAKKVPAEEGVMEEAELVSEETEGWEEVELELDEATRMNVVTSALEASGLGPSHLDMNYVLQQLANWQDAHYRRQLRWKMLQKEPQPRT

SEQ ID NO: 83692 - protein, 553 aa, Homo sapiens
MSLSRSEEMHRLTENVYKRVEEKYQRNLFPIFSPSALKPESRNFRGESWQGTIMEQFNPSLRNFIAMGKNYEKALAGVTYAAKGYFDALVKMGELASESQGSKELGDVLFQMAEVHRQIQNQLEEMLKSFHNELLTQLEQKVELDSRYLSAALKKYQTEQRSKGDALDKCQAELKKLRKKSQGSKNPQKYSDKELQYIDAISNKQGELENYVSDGYKTALTEERRRFCFLVEKQCAVAKNSAAYHSKGKELLAQKLPLWQQACADPSKIPERAVQLMQQVASNGATLPSALSASKSNLVISDPIPGAKPLPVPPELAPFVGRMSAQESTPIMNGVTGPDGEDYSPWADRKAAQPKSLSPPQSQSKLSDSYSNTLPVRKSVTPKNSYATTENKTLPRSSSMAAGLERNGRMRVKAIFSHAAGDNSTLLSFKEGDLITLLVPEARDGWHYGESEKTKMRGWFPFSYTRVLDSDGSDRLHMSLQQGKSSSTGNLLDKDDLAIPPPDYGAASRAFPAQTASGFKQRPYSVAVPAFSQGLDDYGARSMSSADVEVARF

SEQ ID NO: 83693 - protein, 110 aa, Homo sapiens
MMAQSNMFTVADVLSQDELRKKLYQTFKDRGILDTLKTQLRNQLIHELMHPVLSGELQPRSISVEGSSLLIGASNSLVADHLQRCGYEYSLSVFFPESGLAKEKVFLCIF

SEQ ID NO: 83694 - protein, 302 aa, Homo sapiens
MWLAKACWSIQSEMPCIQAQYGTPAPSPGPRDHLASDPLTPEFIKPTMDLASPEAAPAAPTALPSFSTFMDGYTGEFDTFLYQLPGTVQPCSSASSSASSTSSSSATSPASASFKFEDFQVYGCYPGPLSGPVDEALSSSGSDYYGSPCSAPSPSTPSFQPPQLSPWDGSFGHFSPSQTYEGLRAWTEQLPKASGPPQPPAFFSFSPPTGPSPSLAQSPLKLFPSQATHQLGEGESYSMPTAFPGLAPTSPHLEGSGILDTPVTSTKARSGAPGGSEGRCAVCGDNASCQHYGVRTCEGCKG

SEQ ID NO: 83695 - protein, 166 aa, Homo sapiens
MTLHNNSTTSPLFPNISSSWIHSPSDAGLPPGTVTHFGSYNVSRAAGNFSSPDGTTDDPLGGHTVWQVVFIAFLTGILALVTIIGNILVIVSFKVNKQLKTVNNYFLLSLACADLIIGVISMNLFTTYIIMNRWALGNLACDLWLAIDYVASNASVMNLLVISFDR

SEQ ID NO: 83696 - protein, 11 aa, Homo sapiens
MAHLKRLVKLH

SEQ ID NO: 83697 - protein, 220 aa, Homo sapiens
  MOD_RES (1)..(1): Any amino acid
XWTGSRTAPYTPNLPHHQNGHLQHHPPMPPHPGHYWPVHNELAFQPPISNHPAPEYWCSIAYFEMDVQVGETFKVPSSCPIVTVDGYVDPSGGDRFCLGQLSNVHRTEAIERARLHIGKGVQLECKGEGDVWVRCLSDHAVFVQSYYLDREAGRAPGDAVHKIYPSAYIKVFDLRQCHRQMQQQAATAQAAAAAQAAAVAGNIPGPGSVGGIAPAIKLNS

SEQ ID NO: 83698 - protein, 189 aa, Homo sapiens
  MOD_RES (1)..(1): Any amino acid
XVDECSEEDLCQSGICTNTDGSFECICPPGHRAGPDLASCLDVDECRERGPALCGSQRCENSPGSYRCVRDCDPGYHAGPEGTCDDVDECRNRSFCGAHAVCQNLPGSFQCLCDQGYEGARDGRHCVDVNECETLQGVCGAALCENVEGSFLCVCPNSPEEFDPMTGRCVPPRTSAGTFPGSQPQAPAS

SEQ ID NO: 83699 - protein, 195 aa, Homo sapiens
MALRWGIVSVGLISSDFTAVLQTLPRSEHQVVAVAARDLSRAKEFAQKHDIPKAYGSYEELAKDPSVGVDDTVTVLLQYPGEVHGSFTCSITVQLSNTASVSGTKGMVQLLNPCWCPTELVVKGEHKEFPLPPVPKDCNFDNGAGMSYEAKHVWECLRKGMKESPVIPLSESELLADILEEVRKAIGVTFPQDKR

SEQ ID NO: 83700 - protein, 104 aa, Homo sapiens
MDLPGDSSPPGQPRLCRQPLTRALWGARSPKRPRLQLPGAPSPLEKASRRVLAVVLEDVMAVHMVPVVPSKQTSIPQHHSYHQDPVHRQPPASPPRQAGWSSQA

SEQ ID NO: 83701 - protein, 154 aa, Homo sapiens
MRRSEVLAEESIVCLQKALNHLREIWELIGIPEDQRLQRTEVVKKHIKEEGETTILQLEKDLRTQVELMRKQKKERKQELKLLQEQDQELCEILCMPHYDIDSASVPSLEELNQFRQHVTTLRETKASRREEFVSIKRQIILCMEALDHTPDTS

SEQ ID NO: 83702 - protein, 126 aa, Homo sapiens
MADVPGAQRAVPGDGPEPRDPLDCWACAVLVTAQNLLVAAFNLLLLVLVLGTILLPAVTMLGFGFLCHSQDLKPGIFRPALPPPLPERSPSIPLGAAASVDPVLRKAPTSRKTHFPFTTHISILNI

SEQ ID NO: 83703 - protein, 39 aa, Homo sapiens
MQSPAATAEGLSGPLFGAYTFPTFKFQPRHDSMDWRRIS

SEQ ID NO: 83704 - protein, 157 aa, Homo sapiens
MYPESTTGSPARLSLRQTGSPGMIYSTRYGSPKRQLQFYRNLGKSGLRVSCLGLGTWVTFGGQITDEMAEQLMTLAYDNGINLFDTAEVYAAGKAEVVLGNIIKKKGWRRSSLVITTKIFWGGKAETERGLSRKHIIEGLKASLERLQLEYVDVVFA

SEQ ID NO: 83705 - protein, 108 aa, Homo sapiens
MNSLEQAEDLKAFERRLTEYIHCLQPATGRWRMLLIVVSVCTATGAWNWLIDPETQKVSFFTSLWNHPFFTISCITLIGLFFAGIHKRVVAPSICSMSNGISRIQYVL

SEQ ID NO: 83706 - protein, 177 aa, Homo sapiens
VFVELVPWADRSRENNLASGRETLPGLRHPLSSTQAQTATREVQVSGTSEVSAGPDRAQVVVRVSSTKEAAAEAKKSVCRRLDYITQSLQQQGVQAENITVTKDFRRVENAYHMEAEVCITFTEFGKMQNICNFLVEKLDSSVVISPPQFYHTPGSVENLRNSWNPSSTSQPTITPR

SEQ ID NO: 83707 - protein, 158 aa, Homo sapiens
MVKLNSNPSEKGTKPPSVEDGFQTVPLITPLEVNHLQLPAPEKVIVKTRTEYQPEQKNKGKFRVPKIAEFTVTILVSLALAFLACIVFLVVYKAFTYDHSCPEGFVYKHKRCIPASLDAYYSSQDPNSRSRFYTVISHYSVAKQSTARAIGPWLSAAA

SEQ ID NO: 83708 - protein, 185 aa, Homo sapiens
MRDVIDGGDQYRKTTPQELKRFENFIKSRPPFDVVIDGLNVAKMFPKVRESQLLLNVVSQLAKRNLRLLVLGRKHMLRRSSQWSRDEMEEVQKQASCFFADDISEDDPFLLYATLHSGNHCRFITRDLMRDHKACLPDAKTQRLFFKWQQGHQLAIVNRFPGSKLTFQRILSYDTVVQTTGDSWH

SEQ ID NO: 83709 - protein, 210 aa, Homo sapiens
MMAADIPRVTTPLSSLVQVPQEEDRQEEEVTTMILEDDSWVQEAVLQEDGPESEPFPQSAGKGGPQEEVTRGPQGALGRLRELCRRWLRPEVHTKEQMLTMLPKEIQAWLQEHRPESSEEAAALVEDLTQTLQDSDFEIQSENGENCNQDMFENESRKIFSEMPEGESAQHSDGESDFERDAGIQRLQGHSPVETGFHRVSQDGFDLLSS

SEQ ID NO: 83710 - protein, 219 aa, Homo sapiens
RAAVAASGLNTMLEGNGQYTLLAPTNEAFEKIPSETLNRILGDPEALRDLLNNHILKSAMCAEAIVAGLSVETLEGTTLEVGCSGDMLTINGKAIISNKDILATNGVIHYIDELLIPDSAKTLFELAAESDVSTAIDLFRQAGLGNHLSGSERLTLLAPLNSVFKDGTPPIDAHTRNLLRNHIIKDQLASKYLYHGQTLETLGGKKLRVFVYRNVSSGS

SEQ ID NO: 83711 - protein, 98 aa, Homo sapiens
MPVPWFLLSLALGRSPVVLSLERLVGPQDATHCSPGLSCRLWDSDILCLPGDIVPAPGPVLAPTHLQTELVLRCQKETDCDLCLRVAVHLAVHGLCGI

SEQ ID NO: 83712 - protein, 108 aa, Homo sapiens
MEVEAAEARSPAPGYKRSGRRYKCLSCTKTFPNAPRAARHAATHGPADCSEEVAEVPHRRAPLPLLRVREELLPLILAHVPPAHPRGTEALPLPGLRQGLHAAQFLPE

SEQ ID NO: 83713 - protein, 273 aa, Homo sapiens
MRKDMILSAEALALRRAKQAQRRAQQTPVQLSKEQEELIRTLLGAHTRHMGTMFEQFVQFRPPAHLFIHHQPLPTLAPVLPLVTHFADINTFMVLQVIKFTKDLPVFRSLPIEDQISLLKGAAVEICHIVLNTTFCLQTQNFLCGPLRYTIEDGARVGFQVEFLELLFHFHGTLRKLQLQEPEYVLLAAMALFSPDRPGVTQRDEIDQLQEEMALTLQSYIKGQQRRPRDRFLYAKLLGLLAELRSINEAYGYQIQHIQGLSAMMPLLQEICS

SEQ ID NO: 83714 - protein, 197 aa, Homo sapiens
MVMHARSGGNLEVMGLMLGKVDGETMIIMDSFALPVEGTETRVNAQAAAYEYMAAYIENAKQVGRLENAIGWYHSHPGYGCWLSGIDVSTQMLNQQFQEPFVAVVIDPTRTISAGKVNLGAFRTYPKGYKPPDEGPSEYQTIPLNKIEDFGVHCKQYYALEVSYFKSSLDRKLLELLWNKYWVNTLSSSSLLTRQVY

SEQ ID NO: 83715 - protein, 49 aa, Homo sapiens
MVTLRKRTLKVLTFLVLFIFLTSFFLNYSHTMVATTWFPKQMVLELSEN

SEQ ID NO: 83716 - protein, 97 aa, Homo sapiens
MAGTLDLDKGCTVEELLRGCIEAFDDSGKVRDPQLVRMFLMMHPWYIPSSQLAAKLLHIYQQSRKDNSNSLQVKTCHLVRYWISAFPAEFDLNPELA

SEQ ID NO: 83717 - protein, 100 aa, Homo sapiens
MFIWTSGRTSSSYRHDEKRNIYQKIRDHDLLDKRKTVTALKAGEDRAILLGLAMMVCSIMMYFLLGITLLRSYMQSVWTEESQCTLLNASITETFNCSFS

SEQ ID NO: 83718 - protein, 150 aa, Homo sapiens
MRRFLRPGHDPVRERLKRDLFQFNKTVEHGFPHQPSALGYSPSLRILAIGTRSGAIKLYGAPGVEFMGLHQENNAVTQIHLLPGQCQLVTLLDDNSLHLWSLKVKGGASELQEDESFTLRGPPGAAPSATQITVVLPHSSCELLYLGTES

SEQ ID NO: 83719 - protein, 116 aa, Homo sapiens
MVKLAAKCILADPAVGKTALAQIFRSDGAHFQKSYTLTTGMDLVVKTVPVPDTGDSVELFIFDSAGKELFSEMLDKLWESPNVLCLVYDVTNEESFNNCSKWLEKARSQAPGISLP

SEQ ID NO: 83720 - protein, 44 aa, Homo sapiens
MSPRRTLPRPLSLCLSLCLCLCLAAALGSAQSALAPVLCFSFCW

SEQ ID NO: 83721 - protein, 194 aa, Homo sapiens
  MOD_RES (1)..(1): Any amino acid
XYCLGTILSMQISFVGFQPVLSSEHMAAFGVFGLCQIHAFVDYLRSKLNPQQFEVLFRSVISLEKYLPGRGVSTRCWIPLMLRTTSPSLLLCLSISPQPGPHTILTCSSSSSCFQVRLMLVLAPVMCILSGIGVSQVLSTYMKNLDISRPDKKSKKQQDSTYPIKNEVASGMILVMAFFLITYTFHSTWVTSEA

SEQ ID NO: 83722 - protein, 422 aa, Homo sapiens
GRGSGFPGKRRPRGAGLSGRGGRGRSKLKSGIGAVVLPGVSTADISSNKDDEENSMHNTVVLFSSSDKFTLNQDMCVVCGSFGQGAEGRLLACSQCGQCYHPYCVSIKITKVVLSKGWRCLECTVCEACGKATDPGRLLLCDDCDISYHTYCLDPPLQTVPKGGWKCKWCVWCRHCGATSAGLRCEWQNNYTQCAPCASLSSCPVCYRNYREEDLILQCRQCDRWMHAVCQNLNTEEEVENVADIGFDCSMCRPYMPASNVPSSDCCESSLVAQIVTKVKELDPPKTYTQDGVCLTESGMTQLQSLTVTVPRRKRSKPKLKLKIINQNSVAVLQTPPDIQSEHSRDGEMDDSREGELMDCDGKSESSPEREAVDDETKGVEGTDGVKKRKRKPYRPGIVPEVLVDLWCGKEVELGKGKPKDL

SEQ ID NO: 83723 - protein, 212 aa, Homo sapiens; identical to SEQ ID NO: 43344

SEQ ID NO: 83724 - protein, 119 aa, Homo sapiens
MDPNGLSDPYVKLKLIPDPKSESKQKTKTIKCSLNPEWNETFRFQLKESDKDRRLSVEIWDWDLTSRNDFMGSLSFGISELQKASVDGWFKLLSQEEGEYFNVPVPPEGSEANEELRQK

SEQ ID NO: 83725 - protein, 507 aa, Homo sapiens
MVDGVMILPVLIMIALPSPSMEDEKPKVNPKLYMCVCEGLSCGNEDHCEGQQCFSSLSINDGFHVYQKGCFQVYEQGKMTCKTPPSPGQAVECCQGDWCNRNITAQLPTKGKSFPGTQNFHLEVGLIILSVVFAVCLLACLLGVALRKFKRRNQERLNPRDVEYGTIEGLITTNVGDSTLADLLDHSCTSGSGSGLPFLVQRTVARQITLLECVGKGRYGEVWRGSWQGENVAVKIFSSRDEKSWFRETELYNTVMLRHENILGFIASDMTSRHSSTQLWLITHYHEMGSLYDYLQLTTLDTVSCLRIVLSIASGLAHLHIEIFGTQGKPAIAHRDLKSKNILVKKNGQCCIADLGLAVMHSQSTNQLDVGNNPRVGTKRYMAPEVLDETIQVDCFDSYKRVDIWAFGLVLWEVARRMVSNVEDYKPPFYDVVPNDPSFEDMRKVVCVDQQRPNIPNRWFSDPTLTSLAKLMKECWYQNPSARLTALRIKKTLTKIDNSLDKLKTDC

SEQ ID NO: 83726 - protein, 113 aa, Homo sapiens
MMLTIGDVIKQLIEAHEQGKDIDLNKVKTKTAAKYGLSAQPRLVDIIAAVPPQYRKVLMPKLKAKPIRTASGIAVVAVMCKPHRCPHISFTGNICVYCPGGPDSDFEYSTQSY

SEQ ID NO: 83727 - protein, 155 aa, Homo sapiens
MDMGNPGTLSPTKPGSQYYQYSSNNPRRRPLHSSAMEVQTKKVRKVPPGLPSSVYAPSASTADYNRDSPGYPSSKPATSTFPSSFFMQDGHHSSDPWSSSSGMNQPGYAGMLGNSSHIPQSSSYCSLHPHERLSYPSHSSADINSSLPPMSTFHR

SEQ ID NO: 83728 - protein, 234 aa, Homo sapiens
  MOD_RES (1)..(1): Any amino acid
XSSTLKVEPCSLTPGYTKLLQFIQNIIYEEGFDGSNPQKKQRNILRIGIQNLGSPLWGDDICCAENGGNSHSLTKFLYVLRGLLRTSLSACIITMPTHLIQNKAIIARVTTLSDVVVGLESFIGSERETNPLYKDYHGLIHIRQIPRLNNLICDESDVKDLAFKLKRKLFTIEAEVQKGVSTATFLLDGPRKKLFPCLFQLLEVACIPWLMASSSVFKASNIGIGGRVCGLFQT

SEQ ID NO: 83729 - protein, 19 aa, Homo sapiens
MVNKIVQYSLIEGNCEHFV

SEQ ID NO: 83730 - protein, 77 aa, Homo sapiens
MLPEAGSLWLLKLLRDIQLAQFYWPILEELNVTRPEHFDFVKPEDLDGIGMGRPALILASHSPAQTVRSSEKATFWA

SEQ ID NO: 83731 - protein, 129 aa, Homo sapiens
MAAAAPGNGRASAPRLLLLFLVPLLWAPAAVRAGPDEDLSHRNKEPPAPAQQLQPQPVAVQGPEPARVEDPYGVAVGGTVGHCLCTGLAVIGGRMIAQKISVRTVTIIGGIVFLAFAFSALFISPDSGF

SEQ ID NO: 83732 - protein, 208 aa, Homo sapiens
MEGCLGVAELRKLSTFSAYLEDHSYNVEQIWRDIEDVIIKTLISAHPIIRHNYHTCFPNHTLNSACFEILGFDILLDHKLKPWLLEVNHSPSFSTDSRLDKEVKDGLLYDTLVLINLESCDKKKVLEEERQRGQFLQQCCSREMRIEEAKGFRAVQLKKTETYEKENCGGFRLIYPSLNSEKYEKFFQDNNSLFQNTVASRAREEYAR

SEQ ID NO: 83733 - protein, 599 aa, Homo sapiens
MHGILGACGRLRLEPATPLTPLLCAERDECRAHPCRNGGSCRNLPGAYVCRCPAGFVGVHCETEVDACDSSPCQHGGRCESGGGAYLCVCPESFFGYHCETVSDPCFSSPCGGRGYCLASNGSHSCTCKVGYTGEDCAKELFPPTALKMERVEESGVSISWNPPNGPAARQMLDGYAVTYVSSDGSYRRTDFVDRTRSSHQLQALAAGRAYNISVFSVKRNSNNKNDISRPAVLLARTRPRPVEGFEVTNVTASTISVQWALHRIRHATVSGVRVSIRHPEALRDQATDVDRSVDRFTFRALLPGKRYTIQLTTLSGLRGEEHPTESLATAPTHVWTRPLPPANLTAARVTATSAHVVWDAPTPGSLLEAYVINVTTSQSTKSRYVPNGKLASYTVRDLLPGRRYQLSVIAVQSTELGPQHSEPAHLYIITSPRDGADRRWHQGGHHPRVLKNRPPPARLPELRLLNDHSAPETPTQPPRFSELVDGRGRVSARFGGSPSKAATVRSHVPGNCSENPCQNGGTCVPGADAHSCDCGPGFKGRRCELACIKVSRPCTRLFSETKAFPVWEGGVCHHVYKRVYRVHQDICFKESCESTSLK

SEQ ID NO: 83734 - protein, 38 aa, Homo sapiens
MNKILSSTVCFGLLTLLSVLSFLQSVHGRPYLTQGNEI

SEQ ID NO: 83735 - protein, 95 aa, Homo sapiens
MSSKEVKTALKSARDAIRNKEYKEALKHCKTVLKQEKNNYNAWVFIGVAAAELEQPDQAQSAYKKAAELEPDQLLAWQGLANLYEKYNHINAKDD

SEQ ID NO: 83736 - protein, 194 aa, Homo sapiens
  MOD_RES (1)..(1): Any amino acid
XHSECQWREHSLRPLPFLTPFSSLSQQESLCSAMRHLYLLCPFPPMAGCWAGPRPSRASCWQPGTRTSTSPGVSEDCLYLNVFIPQNVAPNASVLVFFHNTMDREESEGWPAIDGSFLAAVGNLIVVTASYRVGVFGFLSSGSGEVSGNWGLLDQVAALTWVQTHIRGFGGDPRRVSLAADRGGADVASIHLLT

SEQ ID NO: 83737 - protein, 1171 aa, Homo sapiens
KQEKINQNVTVIRNNPHIPCKPQMVLNLYQLNQLDCPGGRLIGGWEDNPFKGDLKIVLRGNHTTQDWALPEGPNQGAKVLGVFGELDLHGIPHSIYKTKLSETAFAGSKVLSLMDAVDWQEGEEIVITTTSYDFHQTETRSIVKILHDHKILILNDSLSYTHFAEKYHVPGTGESYTLAADVGILSRNIKIVGEDYPGWSEDSFGARVLVGSFTENMMTFKGNARISNVEFYHSGQEGFRDSTDPRYAVTFLNLGQIQEHGSSYIRGCAFHHGFSPAIGVFGTDGLDIDDNIIHFTVGEGIRIWGNANRVRGNLIALSVWPGTYQNRKDLSSTLWHAAIEINRGTNTVLQNNVVAGFGRAGYRIDGEPCPGQFNPVEKWFDNEAHGGLYGIYMNQDGLPGCSLIQGFTIWTCWDYGIYFQTTESVHIYNVTLVDNGMAIFPMIYMPAAISHKISSKNVQIKSSLIVGSSPGFNCSDVLTNDDPNIELTAAHRSPRSPSGGRSGICWPTFASAHNMAPRKPHAGIMSYNAISGLLDISGSTFVGFKNVCSGETNVIFITNPLNEDLQHPIHVKNIKLVDTTEQSKIFIHRPDISKVNPSDCVDMVCDAKRKSFLRDIDGSFLGNAGSVIPQAEYEWDGNSQVGIGDYRIPKAMLTFLNGSRIPVTEKAPHKGIIRDSTCKYLPEWQSYQCFGMEYAMMVIESLDPDTETRRLSPVAIMGNGYVDLINGPQDHGWCAGYTCQRRLSLFHSIVALNKSYEVYFTGTSPQNLRLMLLNVDHNKAVLVGIFFSTLQRLDVYVNNLLVCPKTTIWNAQQKHCELNNHLYKDQFLPNLDSTVLGENYFDGTYQMLYLLVKGTIPVEIHTATVIFVSFQLSVATEDDFYTSHNLVKNLALFLKIPSDKIRISKIRGKSLRRKRSMGFIIEIEIGDPPIQFISNGTTGQMQLSELQEIAGSLGQAVILGNISSILGFNISSMSITNPLPSPSDSGWIKVTAQPVERSAFPVHHVAFVSSLLVITQPVAAQPGQPFPQQPSVKATDSDGNCVSVGITALTLRAILKDSNNNQVNGLSGNTTIPFSSCWANYTDLTPLRTGKNYKIEFILDNVVGVESRTFSLLAESVSSSGSSSSSNSKASTVGTYAQIMTVVISCLVGRMWLLEIFMAAVSTLNITLRSY

SEQ ID NO: 83738 - protein, 186 aa, Homo sapiens
  MOD_RES (1)..(1): Any amino acid
XKRQEPEPEQPPRPEPHELGPLNGDTAITVQLCASEEAERHQKDITRILQQHEEEKKKWAQQVEKERELELRDRLDEQQRVLEGKNEEALQVLRASYEQEKEALTHSFREASSTQQETIDRLTSQLEAFQAKMKRVEESILSRNYKKHIQDYGSPSQFWEQELESLHFVIEMKNERIHELDRKRKI

SEQ ID NO: 83739 - protein, 426 aa, Homo sapiens
MKQIDIMVAHKKSEWEGRTHALETCLKIREQELKSLRSQLDVTHKEVGMLHQQVEEHEKIKQEMTMEYKQELKKLHEEEFRQKSLDWEKQRLIYQQQVSSLEAQRKALAEQSEIIQAQLVNRKQKLESVELSSQSEIQHLSSKLERANDTICANELEIERLTMRVNDLVGTSMTVLQEQQQKEEKLRESEKLLEALQEEKRELKAALQSQENLIHEARIQKEKLQEKVKATNTQHAVEAISLESVSATCKQLSQELMEKYEELKRMEAHNNEYKAEIKKLKEQILQGEQSYSSALEGMKMEISHLTQELHQRDITIASTKGSSSDMEKRLRAEMQKAEDKAVEHKEILDQLESLKLENRHLSEMVMKLELGLHECSLPVSPLGSIATRFLEEEELRSHHILERLDAHIEELKRESEKTVRQFTALK

SEQ ID NO: 83740 - protein, 60 aa, Homo sapiens
RCKKGFSQDKQCFLLSGNAQETRKVEFFGFSGQPLEKLAPGWGSSCRCKGEVDSPFQSVL

SEQ ID NO: 83741 - protein, 97 aa, Homo sapiens
MLSSSRDQRVVTSEDQVQEGTKVLKLKTKMADKENMKRPAESKNNTVVGKHCIPLKPSNELTNSTVVIDTHKPKDSNQTPHLLLTEDDPQSQHMTLS

SEQ ID NO: 83742 - protein, 1068 aa, Homo sapiens
  MOD_RES (1)..(1): Any amino acid
XLAYLLQQTDEYVANLTELVRQHKAAQVAKEKKKKKKKKKAENAEGQTPAIGPDGEPLDETSQMSDLPVKVIHVESGKILTGTDAPKAGQLEAWLEMNPGYEVAPRSDSEESGSEEEEEEEEEEQPQAAQPPTLPVEEKKKIPDPDSDDVSEVDARHIIENAKQDVDDEYGVSQALARGLQSYYAVAHAVTERVDKQSALMVNGVLKQYQIKGLEWLVSLYNNNLNGILADEMGLGKTIQTIALITYLMEHKRINGPFLIIVPLSTLSNWAYEFDKWAPSVVKVSYKGSPAARRAFVPQLRSGKFNVLLTTYEYIIKDKHILAKIRWKYMIVDEGHRMKNHHCKLTQVLNTHYVAPRRLLLTGTPLQNKLPELWALLNFLLPTIFKSCSTFEQWFNAPFAMTGEKVDLNEEETILIIRRLHKVLRPFLLRRLKKEVEAQLPEKVEYVIKCDMSALQRVLYRHMQAKGVLLTDGSEKDKKGKGGTKTLMNTIMQLRKICNHPYMFQHIEESFSEHLGFTGGIVQGLDLYRASGKFELLDRILPKLRATNHKVLLFCQMTSLMTIMEDYFAYRGFKYLRLDGTTKAEDRGMLLKTFNEPGSEYFIFLLSTRAGGLGLNLQSADTVIIFDSDWNPHQDLQAQDRAHRIGQQNEVRVLRLCTVNSVEEKILAAAKYKLNVDQKVIQAGMFDQKSSSHERRAFLQAILEHEEQDESRHCSTGSGSASFAHTAPPPAGVNPDLEEPPLKEEDEVPDDETVNQMIARHEEEFDLFMRMDLDRRREEARNPKRKPRLMEEDELPSWIIKDDAEVERLTCEEEEEKMFGRGSRHRKEVDYSDSLTEKQWLKTLKAIEEGTLEEIEEEVRQKKSSRKRKRDSDAGSSTPTTSTRSRDKDDESKKQKKRGRPPAEKLSPNPPNLTKKMKKIVDAVIKYKDSSSGRQLSEVFIQLPSRKELPEYYELIRKPVDFKKIKIYEDSIVLQSVFTSVRQKIEKEDDSEGEESEEEEEGEEEGSESESRSVKVKIKLGRKEKAQDRLKGGRRRPSRGSRAKPVVSDDDSEEEQEEDRSGSGSEED

SEQ ID NO: 83743 - protein, 213 aa, Homo sapiens
MENEIFTPLLEQFMTSPLVTWVKTFGPLAAGNGTNLDEYVALVDGVFLNQVMLQINPKLESQRVNKKVNNDASLRMHNLSILVRQIKFYYQETLQQLIMMSLPNVLIIGKNPFSEQGTEEVKKLLLLLLGCAVQCQKKEEFIERIQGLDFDTKAAVAAHIQEVTHNQENVFDLQWMEVTDMSQEDIEPLLKNMALHLKRLIDERDEHSEGGKD

SEQ ID NO: 83744 - protein, 39 aa, Homo sapiens
MGDREQLLQRARLAEQAERYDDMASAMKAVRRICVSLHS

SEQ ID NO: 83745 - protein, 24 aa, Homo sapiens
MTSIRQFVQKFKMKKIPLHVLINN

SEQ ID NO: 83746 - protein, 156 aa, Homo sapiens
MRLNQNTLLLGKKVVLVPYTSEHVPRYHEWMKSEELQRLTASEPLTLEQEYAMQCSWQEDADKCTFIVLDAEKWQAQPGATEESCMVGDVNLFLTDLEDLTLGEIEVMIAGGGPPVSAPSWSSVSPKWLLTIPMRQHTDSMRMVMIVATSELLRIK

SEQ ID NO: 83747 - protein, 25 aa, Homo sapiens
MWTALVLIWIFSLSLSESHAASNDP

SEQ ID NO: 83748 - protein, 1053 aa, Homo sapiens
  MOD_RES (1)..(1): Any amino acid
XLDDRRPITLCVCVRARVCDLEPDDCASIYIFNVDPPPSTLTTPLCLPHHGLPSHSSVLSPSFQLQSHKNYEGTCEIPESKYSPLGGPKPFECPSIQITSISPNCHQELDAHEDDLQINDPEREFLERPSRDHLYLPLEPSYRESSLSPSPASSISSRSWFSDASSCESLSHIYDDVDSELNEAAARFTLGSPLTSPGGSPGGCPGEETWHQQYGLGHSLSPRQSPCHSPRSSVTDENWLSPRPASGPSSRPTSPCGKRRHSSAEVCYAGSLSPHHSPVPSPGHSPRGSVTEDTWLNASVHGGSGLGPAVFPFQYCVETDIPLKTRKTSEDQAAILPGKLELCSDDQGSLSPARETSIDDGLGSQYPLKKDSCGDQFLSVPSPFTWSKPKPGHTPIFRTSSLPPLDWPLPAHFGQCELKIEVQPKTHHRAHYETEGSRGAVKASTGGHPVVKLLGYNEKPINLQMFIGTADDRYLRPHAFYQVHRITGKTVATASQEIIIASTKVLEIPLLPENNMSASIDCAGILKLRNSDIELRKGETDIGRKNTRVRLVFRVHIPQPSGKVLSLQIASIPVECSQRSAQELPHIEKYSINSCSVNGGHEMVVTGSNFLPESKIIFLEKGQDGRPQWEVEGKIIREKCQGAHIVLEVPPYHNPAVTAAVQVHFYLCNGKRKKSQSQRFTYTPVLMKQEHREEIDLSSVPSLPVPHPAQTQRPSSDSGCSHDSVLSGQRSLICSIPQTYASMVTSSHLPQLQCRDESVSKEQHMIPSPIVHQPFQVTPTPPVGSSYQPMQTNVVYNGPTCLPINAASSQEFDSVLFQQDATLSGLVNLGCQPLSSIPFHSSNSGSTGHLLAHTPHSVHTLPHLQSMGYHCSNTGQRSLSSPVADQITGQPSSQLQPITYGPSHSGSATTASPAASHPLASSPLSGPPSPQLQPMPYQSPSSGTASSPSPATRMHSGQHSTQAQSTGQGGLSAPSSLICHSLCDPASFPPDGATVSIKPEPEDREPNFATIGLQDITLDDDQFISDLEHQPSGSAEKWPNHSVLSCPAPFWRI

SEQ ID NO: 83749 - protein, 496 aa, Homo sapiens
  MOD_RES (1)..(1): Any amino acid
XQVRHLYDTGETKDIHLEMESLVNSRTTPKLTRNESVARSSKLLGWCQRQTDGYAGVNVTDLTMSWKSGLALCAIIHRYRPDLIDFDSLDEQNVEKNNQLAFDIAEKELGISPIMTGKEMASVGEPDKLSMVMYLTQFYEMFKDSLPSSDTLDLNAEEKAVLIASTRSPISFLSKLGQTISRKRSPKDKKEKDLDGAGKRRKTSQSEEEEAPRGHRGERPTLVSTLTDRRMDVAVGNQNKVKYMATQLLAKFEENAPAQSIGIRRQLTQERGASQPSCCLPGQVRPAPTPRWKQGSMKKEFPQNLGGSDTCYFCQKRVYVMERLSAEGKFFHRSCFKCEYCATTLRLSAYAYDIEDGKFYCKPHYCYRLSGYAQRKRPAVAPLSGKEAKGPLQDGATTDANGRANAVASSTERTPGSLTSLFGWVARHSLGLCDKAKGMSQHLQSNISSFGQQVAQNPLDSFFMCQLLAFGVPFLYGLSEVLVQIRGEFHWQAVAQ

SEQ ID NO: 83750 - protein, 109 aa, Homo sapiens
MCTMFIVVCALVGVLVPELPDFSDPLLGFEPRGTAIGQRLVTWNNMVKNTGYKATLANYPFKYADEQAKSHRDDRWSDDHYEREKREVDWNFHKDSFFCDVPSDRYSRV

SEQ ID NO: 83751 - protein, 57 aa, Homo sapiens
MEDMNEYSNIEEFAEGSKINASKNQQDDGLKILNFPWIQKQMKEEDFVLSHILMKSQ

SEQ ID NO: 83752 - protein, 123 aa, Homo sapiens
MHGSQKDTTFTKIFVGGLPYHTTDASLRKYFEGFGDIEEAVVITDRQTGKSRGYGFVTMADRAAAERACKDPNPIIDGRKANVNLAYLGAKPRSLQTGFAIGVQQLHPTLIQRTYGGDFMFRK

SEQ ID NO: 83753 - protein, 228 aa, Homo sapiens
MVDYYEVLGVQRHASPEDIKKAYRKLALKWHPDKNPENKEEAERKFKQVAEAYEVLSDAKKRDIYDKYGKEGLNGGGGGGSHFDSPFEFGFTFRNPDDVFREFFGGRDPFSFDFFEDPFEDFFGNRRGPRGSRSRGTGSFFSAFSGFPSFGSGFSSFDTGFTSFGSLGHGGLTSFSSTSFGGSGMGNFKSISTSTKMVNGRKITTKRIVENGQERVEVEEDGQLKSLT

SEQ ID NO: 83754 - protein, 111 aa, Homo sapiens
MEWWASSPLRLWLLLFLLPSAQGRQKESGGLRAVPSLPLGLGVWPESRGAPPRGRLPGRCRGRCSSELGRRHRGALRRRVQNGKYLLTKLTGLWRITNHVQVKTAAATMVS

SEQ ID NO: 83755 - protein, 46 aa, Homo sapiens
MDTSSKENIQLFCKTSVQPVGRPSFKTEYPSSEEKQPCCGELKVQI

SEQ ID NO: 83756 - protein, 37 aa, Homo sapiens
MKNEFDKLVCNCKHNTYGVDCEKCLPFFNDRPWRRAT

SEQ ID NO: 83757 - protein, 74 aa, Homo sapiens
PRVEAKPEVQSQPPRVREQRPRERPGFPPRGPRPGFGNVVELRINTKGVGGKLPNFGFVVFDDSEPVQRILIAK

SEQ ID NO: 83758 - protein, 165 aa, Homo sapiens
EEKKLLVYEALEYAKRALEKNESSFASHKWYAICLSDVGDYEGIKAKIANAYIIKEHFEKAIELNPKDATSIHLMGIWCYTFAEMPWYQRRIAKMLFATPPSSTYEKALGYFHRAEQGKTYLKLHNKKLAAFWLMKAKDYPAHTEEDKQIQTEAAQLLTSFSEKN

SEQ ID NO: 83759 - protein, 27 aa, Homo sapiens
MLNDQLMLLERTFLNPRAFPEERYYSH

SEQ ID NO: 83760 - protein, 128 aa, Homo sapiens
  MOD_RES (1)..(1): Any amino acid
XPYQLVLQHSRLRGRQHGPNVCAVQKVIGTNRKYFTNCKQWYQRKICGKSTVISYECCPGYEKVPGEKGCPAALPLSNLYETLGVVGSTTTQLYTDRTEKLRPEMEGPGSFTIFAPSNEAWASLPAVR

SEQ ID NO: 83761 - protein, 130 aa, Homo sapiens
  MOD_RES (1)..(1): Any amino acid
XEWPEEQEVGVRAFDRVRTGSIMKDAAEELSFARVLLQRVDELEKLFKDREQFLELVSRKLSLVPGAEEVTMVTWEELEQAITDGWRASQAAGVQWCDLGSLQPSPLGLKQSSCLSLPGSWDHSQKDHTS

SEQ ID NO: 83762 - protein, 961 aa, Homo sapiens
MDRRSMGETESGDAFLDLKKPPASKCPHRYTKEELLDIKELPHSKQRPSCLSEKYDSDGVWDPEKWHASLYPASGRSSPVESLKKELDTDRPSLVRRIVDPRERVKEDDLDVVLSPQRRSFGGGCHVTAAVSSRRSGSPLEKDSDGLRLLGGRRIGSGRIISARTFEKDHRLSDKDLRDLRDRDRERDFKDKRFRREFGDSKRVFGERRRNDSYTEEEPEWFSAGPTSQSETIELTGFDDKILEEDHKGRKRTRRRTASVKEGIVECNGGVAEEDEVEVILAQEPAADQEVPRDAVLPEQSPGDFDFNEFFNLDKVPCLASMIEDVLGEGSVSASRFSRWFSNPSRSGSRSSSLGSTPHEELERLAGLEQAILSPGQNSGNYFAPIPLEDHAENKVDILEMLQKAKVDLKPLLSSLSANKEKLKESSHSGVVLSVEEVEAGLKGLKVDQQVKNSTPFMAEHLEETLSAVTNNRQLKKDGDMTAFNKLVSTMKASGTLPSQPKVSELLGQPVQRPASSNLLSGLMGSLEPTTSLLGQRAPSPPLSQVFQTRAASADYLRPRIPSPIGFTPGPQQLLGDPFQGMRKPMSPITAQMSQLELQQAALEGLALPHDLAVQAANFYQPGFGKPQVDRTRDGFRNRQQRVTKSPAPVHRGNSSSPAPAASITSMLSPSFTPTSVIRKMYESKEKSKEEPASGKAALGDSKEDTQKASEENLLSSSSVPSADRDSSPTTNSKLSALQRSSCSTPLSQANRYTKEQDYRPKATGRKTPTLASPVPTTPFLRPVHQVPLVPHVPMVRPAHQLHPGLVQRMLAQGVHPQHLPSLLQTGVLPPGMDLSHLQGISGPILGQPFYPLPAASHPLLNPRPGTPLHLAMVQQQLQRSVLHPPGSGSHAAAVSVQTTPQNVPSRSGLPHMHSQLEHRPSQRSSSPVGLAKWFGSDVLQQPLPSMPAKVISVDELEYRQ

SEQ ID NO: 83763 - protein, 256 aa, Homo sapiens
MLLWLLLLILTPGREQSGVAPKAVLLLNPPWSTAFKGEKVALICSSISHSLAQGDTYWYHDEKLLKIKHDKIQITEPGNYQCKTRGSSLSDAVHVEFSPDWLILQALHPVFEGDNVILRCQGKDNKNTHQKVYYKDGKQLPNSYNLEKITVNSVSRDNSKYHCTAYRKFYILDIEVTSKPLNIQVQELFLHPVLRASSSTPIEGSPMTLTCETQLSPQRPDVQLQFSLFRDSQTLGLGWSRSPRLQIPAMWTEDSG

SEQ ID NO: 83764 - protein, 85 aa, Homo sapiens
MALLALLLVVALPRVWTDANLTARQRDPEDSQRTDEGDNRVWCHVCERENTFECQNPRRCKWTEPYCVIAAVSEYLRSCWGPKGR

SEQ ID NO: 83765 - protein, 28 aa, Homo sapiens
MASADKNGGSVSSVSSSRLQSRKPPNLS

SEQ ID NO: 83766 - protein, 293 aa, Homo sapiens
VKEITRDIKQLDHAKRHLTTSITTLNHLHMLAGGVDSLEAMTRRRQYGEVANLLQGVMNVLEHFHKYMGIPQIRQLSERVKAAQTELGQQILADFEEAFPSQGTKRPGGPSNVLRDACLVANILDPRIKQEIIKKFIKQHLSEYLVLFQENQDVAWLDKIDRRYAWIKRQLVDYEEKYGRMFPREWCMAERIAVEFCHVTRAELAKIMRTRAKEIEVKLLLFAIQRTTNFEGFLAKRFSGCTLTDGTLKKLESPPPSTNPFLEDEPTPEMEELATEKGDLDQEPRRADRSVCG

SEQ ID NO: 83767 - protein, 22 aa, Homo sapiens
  MOD_RES (1)..(1): Any amino acid
XEESDLERGYTVRVLQCCPGRP

SEQ ID NO: 83768 - protein, 339 aa, Homo sapiens
MSDSKCDSQFYSVQVADSTFTVLKRYQQLKPIGSGAQGIVCAAFDTVLGINVAVKKLSRPFQNQTHAKRAYRELVLLKCVNHKNIISLLNVFTPQKTLEEFQDVYLVMELMDANLCQVIHMELDHERMSYLLYQMLCGIKHLHSAGIIHRDLKPSNIVVKSDCTLKILDFGLARTACTNFMMTPYVVTRYYRAPEVILGMGYKENASQARDLLSKMLVIDPDKRISVDEALRHPYITVWYDPAEAEAPPPQIYDAQLEEREHAIEEWKELIYKEVMDWEERSKNGVVKDQPSDAAVSSNATPSQSSSINDISSMSTEQTLASDTDSSLDASTGPLEGCR

SEQ ID NO: 83769 - protein, 139 aa, Homo sapiens
MAAFTKLSIEPAFTPGPNIELQKDSDCCSCQEKWVGYRCNCYFISSEQKTWNESRHLCASQKSSLLQLQNTDELDFMSSSQQFYWIGLSYSEEHTAWLWENGSALSQYLFPSFETFNTKNCIAYNPNGNALDESCEDKN

SEQ ID NO: 83770 - protein, 143 aa, Homo sapiens
MPGNIVFVLKKGNDNWATVMFNGQKGLVPCNYLEPVELRIHPQQQPQEESSPQSDIPAPPSSKAPGRPQLSPGQKQKEEPKEVKLSVPMPYTLKVHYKYTVVMKTQPGLPYSQVRDMVSKKLELRLEHTKLSYRPRDSNELVP

SEQ ID NO: 83771 - protein, 246 aa, Homo sapiens
  MOD_RES (1)..(1): Any amino acid
XLSVAPQDRMKDPTFLGKLPSGFDLIPPAEKCPSESLTQLNSYFSDPSAYILEVSTALDLLAEHPQSPCVSDGICDAGFSLVMTPDPEFLVSEAEVRKETETKKDSEEMLKAKKRVFPLSPASNLRVQPKRKASMPHMVQSKKVNLCRPFPKRTASRADNSSDSPTTLKLVKGQFPQKRKRVKGETASKLQSEISRGCQEDGISINSVQPENTTAAHNDLPENSIVNYDSQALNMLADLALSSATS

SEQ ID NO: 83772 - protein, 105 aa, Homo sapiens
MGGAVSAGEDNDDLIDNLKEAQYIRTERVEQAFRAIDRGDYYLEGYRDNAYKDLAWKHGNIHLSAPCIYSEVMEALKLQPGLSFLNLGSGTGYLSTMYFDLRVLN

SEQ ID NO: 83773 - protein, 64 aa, Homo sapiens
MEMFTFLLTCIFLPLLRGHSLFTCEPITVPRCMKMAYNMTFFPNLMGHYDQSIAAVEMEGTQTG

SEQ ID NO: 83774 - protein, 113 aa, Homo sapiens
EPAPTLGLFSNYSTMDPVQKAVLSHTFGGPLLKTKRPVISCNICQIRFNSQSQAEAHYKGNRHARRVKGIEAAKTRGREPGVREPGDPAPPGSTPTNGDGVAPRPAFRRLVRV

SEQ ID NO: 83775 - protein, 2084 aa, Homo sapiens
MLEAIDKNRALHAAERLQTKLRERGDVANEDKLSLLKSVLQSPLFSQILSLQTSVQQLKDQVNIATSATSNIEYAHVPHLSPAVIPTLQNESFLLSPNNGNLEALTGPGIPHINGKPACDEFDQLIKNMAQGRHVEVFELLKPPSGGLGFSVVGLRSENRGELGIFVQEIQEGSVAHRDGRLKETDQILAINGQALDQTITHQQAISILQKAKDTVQLVIARGSLPQLVSPIVSRSPSAASTISAHSNPVHWQHMETIELVNDGSGLGFGIIGGKATGVIVKTILPGGVADQHGRLCSGDHILKIGDTDLAGMSSEQVAQVLRQCGNRVKLMIARGAIEERTAPTALGITLSSSPTSTPELRVDASTQKGEESETFDVELTKNVQGLGITIAGYIGDKKLEPSGIFVKSITKSSAVEHDGRIQIGDQIIAVDGTNLQGFTNQQAVEVLRHTGQTVLLTLMRRGMKQEAELMSREDVTKDADLSPVNASIIKENYEKDEDFLSSTRNTNILPTEEEGYPLLSAEIEEIEDAQKQEAALLTKWQRIMGINYEIVVAHVSKFSENSGLGISLEATVGHHFIRSVLPEGPVGHSGKLFSGDELLEVNGITLLGENHQDVVNILKELPIEVTMVCCRRTVPPTTQSELDSLDLCDIELTEKPHVDLGEFIGSSETEDPVLAMTDAGQSTEEVQAPLAMWEAGIQHIELEKGSKGLGFSILDYQDPIDPASTVIIIRSLVPGGIAEKDGRLLPGDRLMFVNDVNLENSSLEEAVEALKGAPSGTVRIGVAKPLPLSPEEGYVSAKEDSFLYPPHSCEEAGLADKPLFRADLALVGTNDADLVDESTFESPYSPENDSIYSTQASILSLHGSSCGDGLNYGSSLPSSPPKDVIENSCDPVLDLHMSLEELYTQNLLQRQDENTPSVDISMGPASGFTINDYTPANAIEQQYECENTIVWTESHLPSEVISSAELPSVLPDSAGKGSEYLLEQSSLACNAECVMLQNVSKESFERTINIAKGNSSLGMTVSANKDGLGMIVRSIIHGGAISRDGRIAIGDCILSINEESTISVTNAQARAMLRRHSLIGPDIKFSAAPADDRAPFYVITYVPAEHLEEFKISLGQQSGRVMALDIFSSYTGRDIPELPEREEGEGEESELQNTAYSNWNQPRRVELWREPSKSLGISIVGGRGMGSRLSNGEVMRGIFIKHVLEDSPAGKNGTLKPGDRIVEVDGMDLRDASHEQAVEAIRKAGNPVVFMVQSIINRPRKSPLPSLLHNLYPKYNFSSTNPFADSLQINADKAPSQSESEPEKAPLCSVPPPPPSAFAEMGSDHTQSSASKISQDVDKEDEFGYSWKNIRERYGTLTGELHMIELEKGHSGLGLSLAGNKDRSRMSVFIVGIDPNGAAGKDGRLQIADELLEINGQILYGRSHQNASSIIKCAPSKVKIIFIRNKDAVNQMAVCPGNAVEPLPSNSENLQNKETEPTVTTSDAAVDLSSFKNVQHLELPKDQGGLGIAISEEDTLSGVIIKSLTEHGVAATDGRLKVGDQILAVDDEIVVGYPIEKFISLLKTAKMTVKLTIHAENPDSQAVPSAAGAASGEKKNSSQSLMVPQSGSPEPESIRNTSRSSTPAIFASDPATCPIIPGCETTIEISKGRTGLGLSIVGGSDTLLGAIIIHEVYEEGAACKDGRLWAGDQILEVNGIDLRKATHDEAINVLRQTPQRVRLTLYRDEAPYKEEEVCDTLTIELQKKPGKGLGLSIVGKRNDTGVFVSDIVKGGIADADGRLMQGDQILMVNGEDVRNATQEAVAALLKCSLGTVTLEVGRIKAGPFHSERRPSQSSQVSEGSLSSFTFPLSGSSTSESLESSSKKNALASEIQGLRTVEMKKGPTDSLGISIAGGVGSPLGDVPIFIAMMHPTGVAAQTQKLRVGDRIVTICGTSTEGMTHTQAVNLLKNASGSIEMQVVAGGDVSVVTGHQQEPASSSLSFTGLTSSSIFQDDLGPPQCKSITLERGPDGLGFSIVGGYGSPHGDLPIYVKTVFAKGAASEDGRLKRGDQIIAVNGQSLEGVTHEEAVAILKRTKGTVTLMVLS

SEQ ID NO: 83776 - protein, 1127 aa, Homo sapiens
MEVDTEEKRHRTRSKGVRVPVEPAIQELFSVYGCPLAKKRKTQDKQPQEPAPKRKPFAVKADSSSVDECDDSDGTEDMDEKEEDEGEEYSEDNDEPGDEDEEDEEGDREEEEEIEEEDEDDDEDGEDVEDEEEEEEEEEEEEEEEENEDHQMNCHNTRIMQDTEKDDNNNDEYDNYDELVAKSLLNLGKIAEDAAYRARTESEMNSNTSNSLEDDSDKNENLGRKSELSLDLDSDVVRETVDSLKLLAQGHGVVLSENMNDRNYADSMSQQDSRNMNYVMLGKPMNNGLMEKMVEESDEEVCLSSLECLRNQCFDLARKLSETNPQERNPQQNMNIRQHVRPEEDFPGRTPDRNYSDMLNLMRLEEQLSPRSRVFASCAKEDGCHERDDDTTSVNSDRSEEVFDMTKGNLTLLEKAIALETERAKAMREKMAMEAGRRDNMRSYEDQSPRQLPGEDRKPKSSDSHVKKPYYGKDPSRTEKKESKCPTPGCDGTGHVTGLYPHHRSLSGCPHKDRVPPEILAMHESVLKCPTPGCTGRGHVNSNRNSHRSLSGCPIAAAEKLAKAQEKHQSCDVSKSSQASDRVLRPMCFVKQLEIPQYGYRNNVPTTTPRSNLAKELEKYSKTSFEYNSYDNHTYGKRAIAPKVQTRDISPKGYDDAKRYCKDPSPSSSSTSSYAPSSSSNLSCGGGSSASSTCSKSSFDYTHDMEAAHMAATAILNLSTRCREMPQNLSTKPQDLCATRNPDMEVDENGTLDLSMNKQRPRDSCCPILTPLEPMSPQQQAVMNNRCFQLGEGDCWDLPVDYTKMKPRRIDEDESKDITPEDLDPFQEALEERRYPGEVTIPSPKPKYPQCKESKKDLITLSGCPLADKSIRSMLATSSQELKCPTPGCDGSGHITGNYASHRSLSGCPRAKKSGIRIAQSKEDKEDQEPIRCPVPGCDGQGHITGKYASHRSASGCPLAAKRQKDGYLNGSQFSWKSVKTEGMSCPTPGCDGSGHVSGSFLTHRSLSGCPRATSAMKKAKLSGEQMLTIKQRASNGIENDEEIKQLDEEIKELNESNSQMEADMIKLRTQITTMESNLKTIEEENKVIEQQNESLLHELANLSQSLIHSLANIQLPHMEDGVWWGQ

SEQ ID NO: 83777 - protein, 416 aa, Homo sapiens
MQEAPAALPTEPGPSPVPAFLGKLWALVGDPGTDHLIRWSPSGTSFLVSDQSRFAKEVLPQYFKHSNMASFVRQLNMYGFRKVVSIEQGGLLRPERDHVEFQHPSFVRGREQLLERVRRKVPALRGDDGRWRPEDLGRLLGEVQALRGVQESTEARLRELRQQNEILWREVVTLRQSHGQQHRVIGKLIQCLFGPLQAGPSNAGGKRKLSLMLDEGSSCPTPAKFNTCPLPGALLQDPYFIQSPLPETNLGLSPHRARGPIISDIPEDSPSPEGTRLSPSSDGRRGPLGLESGDRSPESLLPPMLLQPPQESVEPAGPLDVLGPSLQGREWTLMDLDMELSLMQPLVPERGEPELAVKGLNSPSPGKDPTLGAPLLLDVQAALGGPALGLPGALTIYSTPESRTASYLGPEASPSP

SEQ ID NO: 83778 - protein, 187 aa, Homo sapiens
PEDSEKKRTNYQAYRSYLNREGPKALGSKEIPKGAENCLEGLIFVITGVLESIERDEAKSLIERYGGKVTGNVSKKTNYLVMGRDSGQSKSDKAAALGTKIIDEDGLLNLIRTMPGKKSKYEIAVETEELGYSYVELNASDTRSKSSLKAIVAESLNNTSIKGFYSNGAASSVSTKHALIMDEVDGM

SEQ ID NO: 83779 - protein, 5058 aa, Homo sapiens
MGHAGCQFKALLWKNWLCRLRNPVLFLAEFFWPCILFVILTVLRFQEPPRYRDICYLQPRDLPSCGVIPFVQSLLCNTGSRCRNFSYEGSMEHHFRLSRFQTAADPKKVNNLAFLKEIQDLAEEIHGMMDKAKNLKRLWVERSNTPDSSYGSSFFTMDLNKTEEVILKLESLHQQPHIWDFLLLLPRLHTSHDHVEDGMDVAVNLLQTILNSLISLEDLDWLPLNQTFSQVSELVLNVTISTLTFLQQHGVAVTEPVYHLSMQNIVWDPQKVQYDLKSQFGFDDLHTEQILNSSAELKEIPTDTSLEKMVCSVLSSTSEDEAEKWGHVGGCHPKWSEAKNYLVHAVSWLRVYQQVFVQWQQGSLLQKTLTGMGHSLEALRNQFEEESKPWKVVEALHTALLLLNDSLSADGPKDNHTFPKILQHLWKLQSLLQNLPQWPALKRFLQLDGALRNAIAQNLHFVQEVLICLETSANDFKWFELNQLKLEKDVFFWELKQMLAKNAVCPNGRFSEKEVFLPPGNSSIWGGLQGLLCYCNSSETSVLNKLLGSVEDADRILQEVITWHKNMSVLIPEEYLDWQELEMQLSEASLSCTRLFLLLGADPSPENDVFSSDCKHQLVSTVIFHTLEKTQFFLEQAYYWKAFKKFIRKTCEVAQYVNMQESFQNRLLAFPEESPCFEENMDWKMISDNYFQFLNNLLKSPTASISRALNFTKHLLMMEKKLHTLEDEQMNFLLSFVEFFEKLLLPNLFDSSIVPSFHSLPSLTEDILNISSLWTNHLKSLKRDPSATDAQKLLEFGNEVIWKMQTLGSHWIRKEPKNLLRFIELILFEINPKLLELWAYGISKGKRAKLENFFTLLNFSVPENEILSTSFNFSQLFHSDWPKSPAMNIDFVRLSEAIITSLHEFGFLEQEQISEALNTVYAIRNASDLFSALSEPQKQEVDKILTHIHLNVFQDKDSALLLQIYSSFYRYIYELLNIQSRGSSLTFLTQISKHILDIIKQFNFQNISKAFAFLFKTAEVLGGISNVSYCQQLLSIFNFLELQAQSFMSTEGQELEVIHTTLTGLKQLLIIDEDFRISLFQYMSQFFNSSVEDLLDNKCLISDNKHISSVNYSTSEESSFVFPLAQIFSNLSANVSVFNKFMSIHCTVSWLQMWTEIWETISQLFKFDMNVFTSLHHGFTQLLDELEDDVKVSKSCQGILPTHNVARLILNLFKNVTQANDFHNWEDFLDLRDFLVALGNALVSVKKLNLEQVEKSLFTMEAALHQLKTFPFNESTSREFLNSLLEVFIEFSSTSEYIVRNLDSINDFLSNNLTNYGEKFENIITELREAIVFLRNVSHDRDLFSCADIFQNVTECILEDGFLYVNTSQRMLRILDTLNSTFSSENTISSLKGCIVWLDVINHLYLLSNSSFSQGHLQNILGNFRDIENKMNSILKIVTWVLNIKKPLCSSNGSHINCVNIYLKDVTDFLNIVLTTVFEKEKKPKFEILLALLNDSTKQVRMSINNLTTDFDFASQSNWRYFTELILRPIEMSDEIPNQFQNIWLHLITLGKEFQKLVKGIYFNILENNSSSKTENLLNIFATSPKEKDVNSVGNSIYHLASYLAFSLSHDLQNSPKIIISPEIMKATGLGIQLIRDVFNSLMPVVHHTSPQNAGYMQALKKVTSVMRTLKKADIDLLVDQLEQVSVNLMDFFKNISSVGTGNLVVNLLVGLMEKFADSSHSWNVNHLLQLSRLFPKDVVDAVIDVYYVLPHAVRLLQGVPGKNITEGLKDVYSFTLLHGITISNITKEDFAIVIKILLDTIELVSDKPDIISEALACFPVVWCWNHTNSGFRQNSKIDPCNVHGLMSSSFYGKVASILDHFHLSPQGEDSPCSNESSRMEITRKVVCIIHELVDWNSILLELSEVFHVNISLVKTVQKFWHKILPFVPPSINQTRDSISELCPSGSIKQVALQIIEKLKNVNFTKVTSGENILDKLSSLNKILNINEDTETSVQNIISSNLERTVQLISEDWSLEKSTHNLLSLFMMLQNANVTGSSLEALSSFIEKSETPYNFEELWPKFQQIMKDLTQDFRIRHLLSEMNKGIKSINSMALQKITLQFAHFLEILDSPSLKTLEIIEDFLLVTKNWLQEYANEDYSRMIETLFIPVTNESSTEDIALLAKAIATFWGSLKNISRAGNFDVAFLTHLLNQEQLTNFSVVQLLFENILINLINNLAGNSQEAAWNLNDTDLQIMNFINLILNHMQSETSRKTVLSLRSIVDFTEQFLKTFFSLFLKEDSENKISLLLKYFHKDVIAEMSFVPKDKILEILKLDQFLTLMIQDRLMNIFSSLKETIYHLMKSSFILDNGEFYFDTHQGLKFMQDLFNALLRETSMKNKTENNIDFFTVVSQLFFHVNKSEDLFKLNQDLGSALHLVRECSTEMARLLDTILHSPNKDFYALYPTLQEVILANLTDLLFFINNSFPLRNRATLEITKRLVGAISRASEESHVLKPLLEMSGTLVMLLNDSADLRDLATSMDSIVKLLKLVKKVSGKMSTVFKTHFISNTKDSVKFFDTLYSIMQQSVQNLVKEIATLKKIDHFTFEKINDLLVPFLDLAFEMIGVEPYISSNSDIFSMSPSILSYMNQSKDFSDILEEIAEFLTSVKMNLEDMRSLAVAFNNETQTFSMDSVNLREEILGCLVPINNITNQMDFLYPNPISTHSGPQDIKWEIIHEVIPFLDKILSQNSTEIGSFLKMVICLTLEALWKNLKKDNWNVSNVLMTFTQHPNNLLKTIETVLEASSGIKSDYEGDLNKSLYFDTPLSQNITHHQLEKAIHNVLSRIALWRKGLLFNNSEWITSTRTLFQPLFEIFIKATTGKNVTSEKEERTKKEMIDFPYSFKPFFCLEKYLGGLFVLTKYWQQIPLTDQSVVEICEVFQQTVKPSEAMEMLQKVKMMVVRVLTIVAENPSWTKDILCATLSCKQNGIRHLILSAIQGVTLAQDHFQEIEKIWSSPNQLNCESLSKNLSSTLESFKSSLENATGQDCTSQPRLETVQQHLYMLAKSLEETWSSGNPIMTFLSNFTVTEDVKIKDLMKNITKLTEELRSSIQISNETIHSILEANISHSKVLFSALTVALSGKCDQEILHLLLTFPKGEKSWIAAEELCSLPGSKVYSLIVLLSRNLDVRAFIYKTLMPSEANGLLNSLLDIVSSLSALLAKAQHVFEYLPEFLHTFKITALLETLDFQQVSQNVQARSSAFGSFQFVMKMVCKDQASFLSDSNMFINLPRVKELLEDDKEKFNIPEDSTPFCLKLYQEILQLPNGALVWTFLKPILHGKILYTPNTPEINKVIQKANYTFYIVDKLKTLSETLLEMSSLFQRSGSGQMFNQLQEALRNKFVRNFVENQLHIDVDKLTEKLQTYGGLLDEMFNHAGAGRFRFLGSILVNLSSCVALNRFQALQSVDILETKAHELLQQNSFLASIIFSNSLFDKNFRSESVKLPPHVSYTIRTNVLYSVRTDVVKNPSWKFHPQNLPADGFKYNYVFAPLQDMIERAIILVQTGQEALEPAAQTQAAPYPCHTSDLFLNNVGFFFPLIMMLTWMVSVASMVRKLVYEQEIQIEEYMRMMGVHPVIHFLAWFLENMAVLTISSATLAIVLKTSGIFAHSNTFIVFLFLLDFGMSVVMLSYLLSAFFSQANTAALCTSLVYMISFLPYIVLLVLHNQLSFVNQTFLCLLSTTAFGQGVFFITFLEGQETGIQWNNMYQALEQGGMTFGWVCWMILFDSSLYFLCGWYLSNLIPGTFGLRKPWYFPFTASYWKSVGFLVEKRQYFLSSSLFFFNENFDNKGSSLQNREGELEGSAPGVTLVSVTKEYEGHKAVVQDLSLTFYRDQITALLGTNGAGKTTIISMLTGLHPPTSGTIIINGKNLQTDLSRVRMELGVCPQQDILLDNLTVREHLLLFASIKAPQWTKKELHQQVNQTLQDVDLTQHQHKQTRALSGGLKRKLSLGIAFMGMSRTVVLDEPTSGVDPCSRHSLWDILLKYREGRTIIFTTHHLDEAEALSDRVAVLQHGRLRCCGPPFCLKEAYGQGLRLTLTRQPSVLEAHDLKDMACVTSLIKIYIPQAFLKDSSGSELTYTIPKDTDKACLKGLFQALDENLHQLHLTGYGISDTTLEEVFLMLLQDSNKKSHIALGTESELQNHRPTGHLSGYCGSLARPATVQGVQLLRAQVAAILARRLRRTLRAGKSTLADLLLPVLFVALAMGLFMVRPLATEYPPLRLTPGHYQRAETYFFSSGGDNLDLTRVLLRKFRDQDLPCADLNPRQKNSSCWRTDPFSHPEFQDSCGCLKCPNRSASAPYLTNHLGHTLLNLSGFNMEEYLLAPSEKPRLGGWSFGLKIPSEAGGANGNISKPPTLAKVWYNQKGFHSLPSYLNHLNNLILWQHLPPTVDWRQYGITLYSHPYGGALLNEDKILESIRQCGVALCIVLGFSILSASIGSSVVRDRVIGAKRLQHISGLGYRMYWFTNFLYDMLFYLVSVCLCVAVIVAFQLTAFTFRKNLAATALLLSLFGYATLPWMYLMSRIFSSSDVAFISYVSLNFIFGLCTMLITIMPRLLAIISKAKNLQNIYDVLKWVFTIFPQFCLGQGLVELCYNQIKYDLTHNFGIDSYVSPFEMNFLGWIFVQLASQGTVLLLLRVLLHWDLLRWPRGHSTLQGTVKSSKDTDVEKEEKRVFEGRTNGDILVLYNLSKHYRRFFQNIIAVQDISLGIPKGECFGLLGVNGAGKSTTFKMLNGEVSLTSGHAIIRTPMGDAVDLSSAGTAGVLIGYCPQQDALDELLTGWEHLYYYCSLRGIPRQCIPEVAGDLIRRLHLEAHADKPVATYSGGTKRKLSTALALVGKPDILLLDEPSSGMDPCSKRYLWQTIMKEVREGCAAVLTSHSMEECEALCTRLAIMVNGSFKCLGSPQHIKNRFGDGYTVKVWLCKEANQHCTVSDHLKLYFPGIQFKGQHLNLLEYHVPKRWGCLADLFKVIENNKTFLNIKHYSINQTTLEQVFINFASEQQQTLQSTLDPSTDSHHTHHLPI

SEQ ID NO: 83780 - protein, 362 aa, Homo sapiens
GVMASRTLLLLLLGALALTETWAGSHSMRYFFTSVSRPGRGEPRFIAVGYVDDTQFVRFDSDAASQRMEPRAPWIEQEGPEYWDGETRKVKAHSQTHRVDLGTLRGYYNQSEAGSHTVQRMYGCDVGSDWRFLRGYHQYAYDGKDYIALKEDLRSWTAADMAAQTTKHKWEAAHVAEQLRAYLEGTCVEWLRRYLENGKETLQRTDAPKTHMTHHAVSDHEATLRCWALSFYPAEITLTWQRDGEDQTQDTELVETRPAGDGTFQKWAAVVVPSGQEQRYTCHVQHEGLPKPLTLRWEPSSQPTIPIVGIIAGLVLFGAVITGAVVAAVMWRRKSSGGKGGSYSQAASSDSAQGSDVSLTAC

SEQ ID NO: 83781 - protein, 333 aa, Homo sapiens
MRTTKVYKLVIHKKGFGGSDDELVVNPKVFPHIKLGDIVEIAHPNDEYSPLLLQVKSLKEDLQKETISVDQTVTQVFRLRPYQDVYVNVVDPKDVTLDLVELTFKDQYIGRGDMWRLKKSLVSTCAYITQKVEFAGIRAQAGELWVKNEKVMCGYISEDTRVVFRSTSAMVYIFIQMSCEMWDFDIYGDLYFEKAVNGFLADLFTKWKEKNCSHEVTVVLFSRTFYDAKSVDEFPEINRASIRQDHKGRFYEDFYKVVVQNERREEWTSLLVTIKKLFIQYPVLVRLEQRAFLKEIILPQHKETTWRPSICHSMCLISTTSTATLTELGRCQW

SEQ ID NO: 83782 - protein, 152 aa, Homo sapiens
GALLEDVAHNPRPRRIAQRGRNTSRMAEDTSPNMNDNILLPVRNNDQALGLTQCMLGCVSWFTCFACSLRTQAQQVLFNTCRCKLLCQKLMEKTGILLLCAFGVSQGPAQSQVEVSLGPGTDYRTLGKTLHCHVTQFPHLPDGCCCENYEMK

SEQ ID NO: 83783 - protein, 196 aa, Homo sapiens
  MOD_RES (1)..(1): Any amino acid
XSLLLLLLVASGDADMKGHFDPAKCRYALGMQDRTIPDSDISASSSWLESSDGDGAWCPAGSVFPKEEEYLQVDLQRLHLVALVGTQGRHAGGLGKEFSRSYRLRYSRDGRRWMGWKDRWGQEVISGNEDPEGVVLKDLGPPMVARLVRFYPRADRVMSVCLRVELYGCLWRDGLLSYTAPVGQTMYLSEAVYLND

SEQ ID NO: 83784 - protein, 1058 aa, Homo sapiens
MPEFLLRSMKKEPLSSTAKKMFLIVAPLSVLYNWKDELDTWGYFRVTVLHGNRKDNELIRVKQRKCEIALTTYETLRLCLDELNSLEWSAVIVDEAHRIKNPKARVTEVMKALKCNVRIGLTGTILQNNMKELWCVMDWAVPGLLGSGTYFKKQFSDPVEHGQRHTATKRELATGRKAMQRLAKKMSGWFLRRTKTLIKDQLPKKEDRMVYCSLTDFQKAVYQTVLETEDVTLILQSSEPCTCRSGQKRRNCCYKTNSHGETVKTLYLSYLTVLQKVANHVALLQAASTSKQQETLIKRICDQVFSRFPDFVQKSKDAAFETLSDPKYSGKMKVLQQLLNHCRKNRDKVLLFSFSTKLLDVLQQYCMASGLDYRRLDGSTKSEERLKIVKEFNSTQDVNICLVSTMAGGLGLNFVGANVVVLFDPTWNPANDLQAIDRAYRIGQCRDVKVLRLISLGTVEEIMYLRQIYKQQLHCVVVGSENAKRYFEAVQGSKEHQGELFGIHNLFKFRSQGSCLTKDILEREGQVEAGIMTATTWLKEGPPAHKLEMPRQPDCQECRGTEQAAEPLAKEACDLCSDFSDEEPVGATGIKTAKNKAPDSSKASSSPGQLTLLQCGFSKLLETKCKAVEDSDGNTASDDESSDEQPTCLSTEAKDAGCEKNQDSLGTSKHQKLDNILNPKEKHIFYKSEKILEQNISSKSDEKKIKNTDKHCILQNVTESEDSDVICPTQYTTERFPDNSIRFKPPLEGSEDSETEHTVKTRNNDNSRNTDDKRNGIISKKLSPENTTLKSILKRKGTSDISDESDDIEISSKSRVRKRASSLRFKRIKETKKELHNSPKTMNKTNQVYAANEDHNSQFIDDYSSSDESLSVSHFSFSKQSHRPRTIRDRTSFSSKLPSHNKKNSTFIPRKPMKCSNEKVVNQEQSYESMDKFLDGVQEVAYIHSNQNVIGSSKAENHMSRWAAHDVFELKQFSQLPANIAVCSSKTYKEKVDADTLPHTKKGQQPSEGSISLPLYISNPVNQKKKKVYHTNQTTFIIGETPKGIRRYIVSDNTILEE

SEQ ID NO: 83785 - protein, 162 aa, Homo sapiens
MMRRTLENRNAQTKQLQTAVSNVEKHFGELCQIFAAYVRKTARLRDKADLLVNEINAYAATETPHLKLGLMNFADEFAKLQDYRQAEVERLEAKVVEPLKTYGTIVKMKRDDLKATLTARNREAKQLTQLERTRQRNPSDRHVIVSFEFGSLKKCLRYGVQK

SEQ ID NO: 83786 - protein, 89 aa, Homo sapiens
MIISTPQRLTSSGSVLIGSPYTPAPAMVTQTHIAEATGWVPGDRKRARKFIDSDFSESKRSKKGDKNGKGLRHFSMKVCEKVQRKGTTS

SEQ ID NO: 83787 - protein, 45 aa, Homo sapiens
MAKYQGEVQSLKLDDDSVIEGVSDQVLVAVVVSFALIATLVYALF

SEQ ID NO: 83788 - protein, 200 aa, Homo sapiens
MFNLTLVHYKASRGAQTAAATAPRIKKFAIYRWDPDKAGDKPHMQTYEVDLNKCGPMVLDALIKIKNEVDSTLTFRRSCREGICGSCAMNINGGNTLACTRRIDTNLNKVSKIYPLPHMYVIKDLVPDLSNFYAQYKSIEPYLKKKDESQEGKQQYLQSIEEREKLDGLYECILCACCSTSCPSYWWNGDKYLGPAVLMQ

SEQ ID NO: 83789 - protein, 172 aa, Homo sapiens
MNRYSVDTSASTFNHRGSLHPSSSLYCKRQNSGDSHLGGGPAATAGGPRTSPMSSGGPSAPGLRPPASSPKRNTTSLEGNRCASSPSQDAQDARRPRSRNPSAWTVEDVVWFVKDADPQALGPHVELFRKHEIDGNALLLLKSDMVMKYLGLKLGPALKLCYHIDKLKQAKF

SEQ ID NO: 83790 - protein, 65 aa, Homo sapiens
MDNSVFLDDDSNQPMPVSRFFGNVELMQDLPPASSSCPSMSRREFRKMHFRAKDDDDDDDDDAEM

SEQ ID NO: 83791 - protein, 61 aa, Homo sapiens
MGVKLEIFRRELWPPEKGPRGHSPVGPRRPGQAERLQGRHSQSGRGPRENPLPAADNGPGS

SEQ ID NO: 83792 - protein, 107 aa, Homo sapiens
VFQVRKVQGTNLGKIYAMKVLRKAKIVRNAKDTAHTRAERNILESVKHPFIVELAYAFQTGGKLYLILECLSGGELFTHLEREGIFLEDTAWPHQTDRLWTLQGVYP

SEQ ID NO: 83793 - protein, 23 aa, Homo sapiens
MDASSSEMKAPVLPEPILPIQPK

SEQ ID NO: 83794 - protein, 113 aa, Homo sapiens
MTATLRPYLSAVRATLQAALCLENFSSQVVERHNKPEVEVRSSKELLLQPVTISRNEKEKVLIEGSINSVRVSIAVKQADEIEKILCHKFMRFMMMRAENFFILRRKPVEIIL

SEQ ID NO: 83795 - protein, 234 aa, Homo sapiens
MTALRLLQRMKRDWMHTGRRPSGLCGAALLVAARMHDFRRTVKEVISVVKVCESTLRKRLTEFEDTPTSQLTIDEFMKIDLEEECDPPSYTAGQRKLRMKQLEQVLSKKLEEVEGEISSYQDAIEIELENSRPKAKGGLASLAKDGSTEDTASSLCGEEDTEDEELEAAASHLNKDLYRELLGGAPGSSEAAGSPEWGGRPPALGSLLDPLPTAASLGISDSIRECISSQSSDP

SEQ ID NO: 83796 - protein, 50 aa, Homo sapiens
MRKFAYCKVVLATSLIWVLLDMFLLLYFSECNKCDEKKERGLPAGDAQVN

SEQ ID NO: 83797 - protein, 129 aa, Homo sapiens
MMKEVLSTGQGNTEVIHTGTLQRHESHHIGDFCFQEIEKEIHDIEFQCQEDERNGLEAPMTKIKKLTGSTDQHDHRHAGNKPIKDQLGSSFYSHLPELHIFQIKGEIGNQLEKSTNDAPSVSTFQRISC

SEQ ID NO: 83798 - protein, 150 aa, Homo sapiens
MIRVQQMHRPKLIGEELAQLKEQRVHKTDLERVLEANDGSGMLDEDEEDLQRALALSRQEIDMEDEEADLRRAIQLSMQGSSRNISQDMTQTSGTNLTSEELRKRREAYFEKQQQKQQQQQQQQQQGDLSGQSSHPCERPATSSGALGSD

SEQ ID NO: 83799 - protein, 89 aa, Homo sapiens
MDSLEEPQKKVFKARKTMRVSDRQQLEAVYKVKEELLKTDVKLLNGNHENGDLDPTSPLENMDYIKDKEEVNGIEEICFDPEGSKAEWK

SEQ ID NO: 83800 - protein, 136 aa, Homo sapiens
  MOD_RES (1)..(1): Any amino acid
XSPTPATALAVRYASKKSGGSSKNLGGKSSGRRQGIKKMEGHYVHAGNIIATQRHFRWHPGAHVCVLQVGVGKNKCLYALEEGIVRYTKEVYVPHPRNTEAVDLITRLPKGAVLYKTFVHVVPAKPEGTFKLVAML

SEQ ID NO: 83801 - protein, 44 aa, Homo sapiens
MAEVEETLKRIQSHKGVIGTMVVNAEGKKTNTMSQSKNFRADSL

SEQ ID NO: 83802 - protein, 20 aa, Homo sapiens
  MOD_RES (1)..(1): Any amino acid
XFSDGQKLLFARGTMLKVDL

SEQ ID NO: 83803 - protein, 91 aa, Homo sapiens
MAMLVLVPGRVMRPLGGQLWRFLPRGLEFWGPAEGTARVLLRQFCARQAEAWRASGRPGYCLGTRPLSTARPPPPWSQKGPGDSTRPSKPG

SEQ ID NO: 83804 - protein, 40 aa, Homo sapiens
MMQHASPAPALTMMATQNVPPPPYQDSPQAPSFPAPDAAV

SEQ ID NO: 83805 - protein, 405 aa, Homo sapiens
MQPSSLLPLALCLLAAPASALVRIPLHKFTSIRRTMSEVGGSVEDLIAKGPVSKYSQAVPAVTEGPIPEVLKNYMDAQYYGEIGIGTPPQCFTVVFDTGSSNLWVPSIHCKLLDIACWIHHKYNSDKSSTYVKNGTSFDIHYGSGSLSGYLSQDTVSVPCQSASSASALGGVKVERQVFGEATKQPGITFIAAKFDGILGMAYPRISVNNVLPVFDNLMQQKLVDQNIFSFYLSRDPDAQPGGELMLGGTDSKYYKGSLSYLNVTRKAYWQVHLDQVEVASGLTLCKEGCEAIVDTGTSLMVGPVDEVRELQKAIGAVPLIQGEVSTLPAITLKLGGKGYKLSPEDYTLKVSQAGKTLCLSGFMGMDIPPPSGPLWILGDVFIGRYYTVFDRDNNRVGFAEAARL

SEQ ID NO: 83806 - protein, 892 aa, Homo sapiens
MADDDVLFEDVYELCEVIGKGPFSVVRRCINRETGQQFAVKIVDVAKFTSSPGLSTEDLKREASICHMLKHPHIVELLETYSSDGMLYMVFEFMDGADLCFEIVKRADAGFVYSEAVASHYMRQILEALRYCHDNNIIHRDVKPHCVLLASKENSAPVKLGGFGVAIQLGESGLVAGGRVGTPHFMAPEVVKREPYGKPVDVWGCGVILFILLSGCLPFYGTKERLFEGIIKGKYKMNPRQWSHISESAKDLVRRMLMLDPAERITVYEALNHPWLKERDRYAYKIHLPETVEQLRKFNARRKLKGAVLAAVSSHKFNSFYGDPPEELPDFSEDPTSSGAVSQVLDSLEEIHALTDCSEKDLDFLHSVFQDQHLHTLLDLYDKINTKSSPQIRNPPSDAVQRAKEVLEEISCYPENNDAKELKRILTQPHFMALLQTHDVVAHEVYSDEALRVTPPPTSPYLNGDSPESANGDMDMENVTRVRLVQFQKNTDEPMGITLKMNELNHCIVARIMHGGMIHRQGTLHVGDEIREINGISVANQTVEQLQKMLREMRGSITFKIVPSYRTQSSSCEDLPSTTQPKGRQIYVRAQFEYDPAKDDLIPCKEAGIRFRVGDIIQIISKDDHNWWQGKLENSKNGTAGLIPSPELQEWRVACIAMEKTKQEQQASCTWFGKKKKQYKDKYLAKHNADLVTYEEVVKLPAFKRKTLVLLGAHGVGRRHIKNTLITKHPDRFAYPIPHTTRPPKKDEENGKNYYFVSHDQMMQDISNNEYLEYGSHEDAMYGTKLETIRKIHEQGLIAILDVEPQALKVLRTAEFAPFVVFIAAPTITPGLNEDESLQRLQKESDILQRTYAHYFDLTIINNEIDETIRHLEEAVELVCTAPQWVPVSWVY

SEQ ID NO: 83807 - protein, 780 aa, Homo sapiens
MAVLLLLLRALRRGPGPGPRPLWGPGPAWSPGFPARPGRGRPYMASRPPGDLAEAGGRALQSLQLRLLTPTFEGINGLLLKQHLVQNPVRLWQLLGGTFYFNTSRLKQKNKEKDKSKGKAPEEDEEERRRRERDDQMYRERLRTLLVIAVVMSLLNALSTSGGSISWNDFVHEMLAKGEVQRVQVVPESDVVEVYLHPGAVVFGRPRLALMYRMQVANIDKFEEKLRAAEDELNIEAKDRIPVSYKRTGFFGNALYSVGMTAVGLAILWYVFRLAGMTGREGGFSAFNQLKMARFTIVDGKMGKGVSFKDVAGMHEAKLEVREFVDYLKSPERFLQLGAKVPKGALLLGPPGCGKTLLAKAVATEAQVPFLAMAGPEFVEVIGGLGAARVRSLFKEARARAPCIVYIDEIDAVGKKRSTTMSGFSNTEEEQTLNQLLVEMDGMGTTDHVIVLASTNRADILDGALMRPGRLDRHVFIDLPTLQERREIFEQHLKSLKLTQSSTFYSQRLAELTPGFSGADIANICNEAALHAAREGHTSVHTLNFEYAVERVLAGTAKKSKILSKEEQKVVAFHESGHALVGWMLEHTEAVMKMLPRDQHLFTKEQLFERMCMALGGRASEALSFNEVTSGAQDDLRKVTRIAYSMVKQFGMAPGIGPISFPEAQEGLMGIGRRPFSQGLQQMMDHEARLLVAKAYRHTEKVLQDNLDKLQALANALLEKEVINYEDIEALIGPPPHGPKKMIAPQRWIDAQREKQDLGEEETEETQQPPLGGEEPTWPK

SEQ ID NO: 83808 - protein, 439 aa, Homo sapiens
MAALTIATGTGNWFSALALGVTLLKCLLIPTYHSTDFEVHRNWLAITHSLPISQWYYEATSEWTLDYPPFFAWFEYILSHVAKYFDQEMLNVHNLNYSSSRTLLFQRFSVIFMDVLFVYAVRECCKCIDGKKVGKELTEKPKFILSVLLLWNFGLLIVDHIHFQYNGFLFGLMLLSIARLFQKRHMEGAFLFAVLLHFKHIYLYVAPAYGVYLLRSYCFTANKPDGSIRWKSFSFVRVISLGLVVFLVSALSLGPFLALPSIFCLWFKPQGPRGFLRCLTLCALSSFMFGWHVHEKAILLAILPMSLLSVGKAGDASIFLILTTTGHYSLFPLLFTAPELPIKILLMLLFTIYSISSLKTLFRKEKPLFNWMETFYLLGLGPLEVCCEFVFPFTSWKVKYPFIPLLLTSVYCAVGITYAWFKLYVSVLIDSAIGKTKKQ

SEQ ID NO: 83809 - protein, 934 aa, Homo sapiens
MADPAECSIKVMCRFRPLNEAEILRGDKFIPKFKGDETVVIGQGKPYVFDRVLPPNTTQEQVYNACAKQIVKDVLEGYNGTIFAYGQTSSGKTHTMEGKLHDPQLMGIIPRIAHDIFDHIYSMDENLEFHIKVSYFEIYLDKIRDLLDVSKTNLAVHEDKNRVPYVKGCTERFVSSPEEVMDVIDEGKANRHVAVTNMNEHSSRSHSIFLINIKQENVETEKKLSGKLYLVDLAGSEKVSKTGAEGAVLDEAKNINKSLSALGNVISALAEGTKTHVPYRDSKMTRILQDSLGGNCRTTIVICCSPSVFNEAETKSTLMFGQRAKTIKNTVSVNLELTAEEWKKKYEKEKEKNKTLKNVIQHLEMELNRWRNGEAVPEDEQISAKDQKNLEPCDNTPIIDNIAPVVAGISTEEKEKYDEEISSLYRQLDDKLLASTRRDYEKIQEELTRLQIENEAAKDEVKEVLQALEELAVNYDQKSQEVEDKTRANEQLTDELAQKTTTLTTTQRELSQLQELSNHQKKRATEILNLLLKDLGEIGGIIGTNDVKTLADVNGVIEEEFTMARLYISKMKSEVKSLVNRSKQLESAQMDSNRKMNASERELAACQLLISQHEAKIKSLTDYMQNMEQKRRQLEESQDSLSEELAKLRAQEKMHEVSFQDKEKEHLTRLQDAEEMKKALEQQMESHREAHQKQLSRLRDEIEEKQKIIDEIRDLNQKLQLEQEKLSSDYNKLKIEDQEREMKLEKLLLLNDKREQAREDLKGLEETVSRELQTLHNLRKLFVQDLTTRVKKSVELDNDDGGGSAAQKQKISFLENNLEQLTKVHKQLVRDNADLRCELPKLEKRLRATAERVKALESALKEAKENAMRDRKRYQQEVDRIKEAVRAKNMARRAHSAQIAKPIRPGHYPASSPTAVHAIRGGGGSSSNSTHYQK

SEQ ID NO: 83810 - protein, 136 aa, Homo sapiens
SSQVLPVDSGEVKLDDEPPNSGGGSPCEAGEEGEGGVCLNGGVCSVVDDQAVCDCSRTGFRGKDCSQEIKFGLQCVLPVLLHDNDQGKYCCINTAKPLTEKDNNVEGLAHLMMGDQGKSKEKLEIFRWIRKDFTNF

SEQ ID NO: 83811 - protein, 177 aa, Homo sapiens
MSGELPPNINIKEPRWDQSTFIGRANHFFTVTDPRNILLTNEQLESARKIVHDYRQGIVPPGLTENELWRAKYIYDSAFHPDTGEKMILIGRMSAQVPMNMTITGCMMTFYRTTPAVLFWQWINQSFNAVVNYTNRSGDAPLTVNELGTAYVSATTGAVATALGLNALTKVLRFLFP

SEQ ID NO: 83812 - protein, 158 aa, Homo sapiens
MKEQKLEAKKKRDEEIEAERQILDLEEEIYKQGKRKKAIENAKQYQFYQTERVKNFHSGLLLSRVMKERDAQIEFRKSKIKSDKKWEEQLKLNIEKAFKEEQEKAEKRHRERVALAKDHLKQIKEHEEEEERRKKYEEKDAEEIKRQNALYEIEMRKK

SEQ ID NO: 83813 - protein, 101 aa, Homo sapiens
MAAAMPLALLVLLLLGPGGWCLAEPPRDSLREELVITPLPSGDVAATFQFRTRWDSELQREGDTDHYFLRYAVLPREVVCTENLTPWKKLLPCSSKASLCC

SEQ ID NO: 83814 - protein, 115 aa, Homo sapiens
  MOD_RES (1)..(1): Any amino acid
XSFWWTVQIILASWNPKLSLMIYCSSLLTLAPNALMTDETISNVPILILGNKIDRTDAISEEKLREIFGLYGQTTGKGNVTLKELNARPMEVFMCSVLKRQGYGEGFRWLSQYID

SEQ ID NO: 83815 - protein, 15 aa, Homo sapiens
MCAASASPDVKWNLK

SEQ ID NO: 83816 - protein, 3277 aa, Homo sapiens
MAAAARPRGRALGPVLPPTPLLLLVLRVLPACGATARDPGAAAGLSLHPTYFNLAEAARIWATATCGERGPGEGRPQPELYCKLVGGPTAPGSGHTIQGQFCDYCNSEDPRKAHPVTNAIDGSERWWQSPPLSSGTQYNRVNLTLDLGQLFHVAYILIKFANSPRPDLWVLERSVDFGSTYSPWQYFAHSKVDCLKEFGREANMAVTRDDDVLCVTEYSRIVPLENGEVVVSLINGRPGAKNFTFSHTLREFTKATNIRLRFLRTNTLLGHLISKAQRDPTVTRRYYYSIKDISIGGQCVCNGHAEVCNINNPEKLFRCECQHHTCGETCDRCCTGYNQRRWRPAAWEQSHECEACNCHGHASNCYYDPDVERQQASLNTQGIYAGGGVCINCQHNTAGVNCEQCAKGYYRPYGVPVDAPDGCIPCSCDPEHADGCEQGSGRCHCKPNFHGDNCEKCAIGYYNFPFCLRIPIFPVSTPSSEDPVAGDIKGCDCNLEGVLPEICDAHGRCLCRPGVEGPRCDTCRSGFYSFPICQACWCSALGSYQMPCSSVTGQCECRPGVTGQRCDRCLSGAYDFPHCQGSSSACDPAGTINSNLGYCQCKLHVEGPTCSRCKLLYWNLDKENPSGCSECKCHKAGTVSGTGECRQGDGDCHCKSHVGGDSCDTCEDGYFALEKSNYFGCQGCQCDIGGALSSMCSGPSGVCQCREHVVGKVCQRPENNYYFPDLHHMKYEIEDGSTPNGRDLRFGFDPLAFPEFSWRGYAQMTSVQNDVRITLNVGKSSGSLFRVILRYVNPGTEAVSGHITIYPSWGAAQSKEIIFLPSKEPAFVTVPGNGFADPFSITPGIWVACIKAEGVLLDYLVLLPRDYYEASVLQLPVTEPCAYAGPPQENCLLYQHLPVTRFPCTLACEARHFLLDGEPRPVAVRQPTPAHPVMVDLSGREVELHLRLRIPQVGHYVVVVEYSTEAAQLFVVDVNVKSSGSVLAGQVNIYSCNYSVLCRSAVIDHMSRIAMYELLADADIQLKGHMARFLLHQVCIIPIEEFSAEYVRPQVHCIASYGRFVNQSATCVSLAHETPPTALILDVLSGRPFPHLPQQSSPSVDVLPGVTLKAPQNQVTLRGRVPHLGRYVFVIHFYQAAHPTFPAQVSVDGGWPRAGSFHASFCPHVLGCRDQVIAEGQIEFDISEPEVAATVKVPEGKSLVLVRVLVVPAENYDYQILHKKSMDKSLEFITNCGKNSFYLDPQTASRFCKNSARSLVAFYHKGALPCECHPTGATGPHCSPEGGQCPCQPNVIGRQCTRCATGHYGFPRCKPCSCGRRLCEEMTGQCRCPPRTVRPQCEVCETHSFSFHPMAGCEGCNCSRRGTIEAAMPECDRDSGQCRCKPRITGRQCDRCASGFYRFPECVPCNCNRDGTEPGVCDPGTGACLCKENVEGTECNVCREGSFHLDPANLKGCTSCFCFGVNNQCHSSHKRRTKFVDMLGWHLETADRVDIPVSFNPGSNSMVADLQELPATIHSASWVAPTSYLGDKVSSYGGYLTYQAKSFGLPGDMVLLEKKPDVQLTGQHMSIIYEETNTPRPDRLHHGRVHVVEGNFRHASSRAPVSREELMTVLSRLADVRIQGLYFTETQRLTLSEVGLEEASDTGSGRIALAVEICACPPAYAGDSCQGCSPGYYRDHKGLYTGRCVPCNCNGHSNQCQDGSGICVNCQHNTAGEHCERCQEGYYGNAVHGSCRACPCPHTNSFATGCVVNGGDVRCSCKAGYTGTQCERCAPGYFGNPQKFGGSCQPCSCNSNGQLGSCHPLTGDCINQEPKDSSPAEECDDCDSCVMTLLNDLATMGEQLRLVKSQLQGLSASAGLLEQMRHMETQAKDLRNQLLNYRSAISNHGSKIEGLERELTDLNQEFETLQEKAQVNSRKAQTLNNNVNRATQSAKELDVKIKNVIRNVHMLNRIRTWQKTHQGENNGLANSIRDSLNEYEAKLSDLRARLQEAAAQAKQANGLNQENERALGAIQRQVKEINSLQSDFTKYLTTADSSLLQTNIALQLMEKSQKEYEKLAASLNEARQELSDKVRELSRSAGKTSLVEEAEKHARSLQELAKQLEEIKRNASGDELVRCAVDAATAYENILNAIKAAEDAANRAASASESALQTVIKEDLPRKAKTLSSNSDKLLNEAKMTQKKLKQEVSPALNNLQQTLNIVTVQKEVIDTNLTTLRDGLHGIQRGDIDAMISSAKSMVRKANDITDEVLDGLNPIQTDVERIKDTYGRTQNEDFKKALTDADNSVNKLTNKLPDLWRKIESINQQLLPLGNISDNMDRIRELIQQARDAASKVAVPMRFNGKSGVEVRLPNDLEDLKGYTSLSLFLQRPNSRENGGTENMFVMYLGNKDASRDYIGMAVVDGQLTCVYNLGDREAELQVDQILTKSETKEAVMDRVKFQRIYQFARLNYTKGATSSKPETPGVYDMDGRNSNTLLNLDPENVVFYVGGYPPDFKLPSRLSFPPYKGCIELDDLNENVLSLYNFKKTFNLNTTEVEPCRRRKEESDKNYFEGTGYARVPTQPHAPIPTFGQTIQTTVDRGLLFFAENGDRFISLNIEDGKLMVRYKLNSELPKERGVGDAINNGRDHSIQIKIGKLQKRMWINVDVQNTIIDGEVFDFSTYYLGGIPIAIRERFNISTPAFRGCMKNLKKTSGVVRLNDTVGVTKKCSEDWKLVRSASFSRGGQLSFTDLGLPPTDHLQASFGFQTFQPSGILLDHQTWTRNLQVTLEDGYIELSTSDSGGPIFKSPQTYMDGLLHYVSVISDNSGLRLLIDDQLLRNSKRLKHISSSRQSLRLGGSNFEGCISNVFVQRLSLSPEVLDLTSNSLKRDVSLGGCSLNKPPFLMLLKGSTRFNKTKTFRINQLLQDTPVASPRSVKVWQDACSPLPKTQANHGALQFGDIPTSHLLFKLPQELLKPRSQFAVDMQTTSSRGLVFHTGTKNSFMALYLSKGRLVFALGTDGKKLRIKSKEKCNDGKWHTVVFGHDGEKGRLVVDGLRAREGSLPGNSTISIRAPVYLGSPPSGKPKSLPTNSFVGCLKNFQLDSKPLYTPSSSFGVSSCLGGPLEKGIYFSEEGGHVVLAHSVLLGPEFKLVFSIRPRSLTGILIHIGSQPGKHLCVYLEAGKVTASMDSGAGGTSTSVTPKQSLCDGQWHSVAVTIKQHILHLELDTDSSYTAGQIPFPPASTQEPLHLGGAPANLTTLRIPVWKSFFGCLRNIHVNHIPVPVTEALEVQGPVSLNGCPDQ

SEQ ID NO: 83817 - protein, 225 aa, Homo sapiens
MERVGCTLTTTYAHPRPTPTNFLPAISTMASSYRDRFPHSNLTHSLSLPWRPSTYYKVASNSPSVAPYCTRSQRVSENTMLPFVSNRTTFFTRYTPDDWYRSNLTNYQESNTSRHNSEKLRVDTSRLIQDKYQQTRKTQADTTQNLGERVNDIGFWKSEIIHELDEMIGETNALTDVKKRLERALMETEAPLQVARECLFHREKRMGIDLVHDEVEAQLLTDIVT

SEQ ID NO: 83818 - protein, 68 aa, Homo sapiens
  MOD_RES (1)..(1): Any amino acid
XPRFLCTGGVSPYADPNTCRGDSGGPLIVHKRSRFIQVSPPFPIWGDAKWSAWAPKQESSMHVASNSR

SEQ ID NO: 83819 - protein, 92 aa, Homo sapiens
MAHVGSRKRSRSRSRSRGRGSEKRKKKSRKDTSRNCSASTSQGRKASTAPGAEVLLAPLLPPRPPPLPPVMAGRSGGSTRTRGGRRRRRGRS

SEQ ID NO: 83820 - protein, 128 aa, Homo sapiens
MVDHLANTEINSQRIAAVESCFGASGQPLALPGRVLLGEGVLTKECRKKAKPRIFFLFNDILVYGSIVLNKRKYRSQHIIPLEEVTLELLPETLQAKNRWMIKTAKKSFVVSAASATERQEWISHIEE

SEQ ID NO: 83821 - protein, 169 aa, Homo sapiens
MAQILPVRFQEHFQLQNLGINPANIGFSTLTMESDKFICIREKVGEQAQVTIIDMSDPMAPIRRPISAESAIMNPASKVIALKGAPGFCSPASNSQSPGSSLCPAGKTLQIFNIEMKSKMKAHTMAEEVIFWKWVSVNTVALVTETAVYHWSMEGDSQPMKMFDRHTSL

SEQ ID NO: 83822 - protein, 107 aa, Homo sapiens
MLRGVLGKTFRLVGYTIQYGCIAHCAFEYVGGVVMCSGPSMEPTIQNSDIVFAENLSRHFYGIQRGDIVIAKSPSDPKSNICKRVIGLEGDKILTTSPSDFFKSHSY

SEQ ID NO: 83823 - protein, 177 aa, Homo sapiens
MELGCWTQLGLTFLQLLLISSLPREYTVINEACPGAEWNIMCRECCEYDQIECVCPGKREVVGYTIPCCRNEENECDSCLIHPGCTIFENCKSCRNGSWGGTLDDFYVKGFYCAECRAGWYGGDCMPCSSSPCFHDGTCVLDKAGSYKCACLAGYTGQRCENLLEERNCSDPGGPVN

SEQ ID NO: 83824 - protein, 151 aa, Homo sapiens
MDFWLWPLYFLPVSGALRILPEVKVEGELGGSVTIKCPLPEMHVRIYLCREMAGSGTCGTVVSTTNFIKAEYKGRVTLKQYPRKNLFLVEVTQLTESDSGVYACGAGMNTDRGKTQKVTLNVHSEYEPSWEEQPMPETPKWFHLPYLFQMP

SEQ ID NO: 83825 - protein, 252 aa, Homo sapiens
AQAEERYGKELVQIARKAGGQTEINSLRASFDSLKQQMENVGSSHIQLALTLREELRSLEEFRERQKEQRKKGMAVPRQSDCMEVKSPSWEYEAVMDRVQKSKLSLYKKAMESKKTYEQKCRDADDAEQAFERISANGHQKQVEKSQNKARQCKDSATEAERVYRQSIAQLEKVRAEWEQEHRTTCEAFQLQEFDRLTILRNALWVHSNQLSMQCVKDDELYEEVRLTLEGCSIDADIDSFIQAKSTGTEPP

SEQ ID NO: 83826 - protein, 126 aa, Homo sapiens
MATATGVAEERLLAALAYLQCAVGCAVFARNRQTNSVYGRHALPSHRLRVPARAAWVVQELPSLALPLYQYASESAPRLRSAPNCILLAMFLVHYGHRKCWYASTCSVPTSQMPAHGTHCLPGSES

SEQ ID NO: 83827 - protein, 1329 aa, Homo sapiens
  MOD_RES (1)..(1): Any amino acid
XDSELLKFYRSRSRCGIINDPSNSSFLECHGVVNVTAYYRTCLFRLCQSGGNESELCDSVARYASACKNADVEVGPWRTYDFCPLECPENSHFEECITCTETCETLTLGPICVDSCSEGCQCDEGYALLGSQCVTRSECGCNFEGHQLATNETFWVDLDCQIFCYCSGTDNRVHCETIPCKDDEYCMEEGGLYYCQARTDASCIVSGYGHYLTFDGFPFDFQTSCPLILCTTGSRPSSDSFPKFVVTAKNEDRDPSLALWVKQVDVTVFGYSIVIHRAYKHTVLVNSERLYLPLKLGQGKINIFSFGFHVVVETDFGLKVVYDWKTFLSITVPRSMQNSTYGLCGRYNGNPDDDLEMPMGLLASSVNEFGQSWVKRDTFCQVGCGDRCPSCAKVEGFSKVQQLCSLIPNQNAAFSKCHSKVNPTFFYKNCLFDSCIDGGAVQTACSWLQNYASTCQTQGITVTGWRNYTSCTVTCPPNSHYESCVSVCQPRCAAIRLKSDCSHYCVEGCHCDAGYVLNGKSCILPHSCGCYSDGKYYEPKQLFWNSDCTRRCRCFRRNVIQCDPRQCKSDEECALRNGVRGCFSTKTSYCLAAGGGVFRTFDGAFLRFPANCAFVLSTICQKLPDISFQLIINFDKWSAPNLTIISPVYFYINEEQILINDRNTVKVNGTQVNVPFITGLATKIYSSEGFLVIDTSPDIQIYYNGFNVIKISISERLQNKVCGLCGNFNGDLTDDYVTLRGKPVVSSVVLAQSWKTNGMQKSCNELQFSQYAAMCDNVHIQKMQGDGYCLKLTDMKGFFQPCYGLLDPLPFYESCYLDGCYSHKKFQLCGSLAAYGEACRSFGILSTEWIEKENCSGVVEDPCVGADCPNRTCELGNGRELCGCIEPPPYGNNSHDIIDAEVTCKAAQMEVSISKCKLFQLGFEREGVRINDRQCTGIEGEDFISFQINNTKGNCGNIVQSNGTHIMYKNTLWIESANNTGNIITRDRTINVEFSCAYELDIKISLDSVVKPMLSVINLTVPTQEGSFITKMALYKNASYKHPYRQGEVVLTTRDVLYVGVFVVGADATHLILTLNKCYATPTRDSNDKLRYFIIEGGCQNLKDNTIGIEENAVSLTCRFHVTVFKFIGDYDEVHLHCAVSLCDSEKYSCKITCPHNSRIATDYTKEPKEQIISVGPIRRKRLDWCEDNGGCEQICTSRVDGPLCSCVTGTLQEDGKSCRGRHSSTLGQAAGRHGRFFTTRRRNSDLKATRSATLPRKLQKLRRKDGEHAQGILGPLNKQTNNNNKKTLLFHLKYKASNSSMELQVWTLLLIMIQISLWHFVYKSGTTS

SEQ ID NO: 83828 - protein, 345 aa, Homo sapiens
MAVFVVLLALVAGVLGNEFSILKSPGSVVFRNGNWPIPGERIPDVAALSMGFSVKEDLSWPGLAVGNLFHRPRATVMVMVKGVNKLALPPGSVISYPLENAVPFSLDSVANSIHSLFSEETPVVLQLAPSEERVYMVGKANSVFEDLSVTLRQLRNRLFQENSVLSSLPLNSLSRNNEVDLLFLSELQVLHDISSLHLAKDHSPDLYSLELAGLDEIGKRYGEDSEQFRDASKILVDALQKFADDMYSLYGGNAVVELVTVKSFDTSLIRKTRTILEAKQAKNPASPYNLAYKYNFEYSVVFNMVLWIMIALALAVIITSYNIWNMDPGYDSIIYRMTNQKIRMD

SEQ ID NO: 83829 - protein, 1267 aa, Homo sapiens
MLVGQGAGPLGPAVVTAAVVLLLSGVGPAHGSEDIVVGCGGFVKSDVEINYSLIEIKLYTKHGTLKYQTDCAPNNGYFMIPLYDKGDFILKIEPPLGWSFEPTTVELHVDGVSDICTKGGDINFVFTGFSVNGKVLSKGQPLGPAGVQVSLRNTGTEAKIQSTVTQPGGKFAFFKVLPGDYEILATHPTWALKEASTTVRVTNSNANAASPLIVAGYNVSGSVRSDGEPMKGVKFLLFSSLVTKEDVLGCNVSPVPGFQPQDESLVYLCYTVSREDGSFSFYSLPSGGYTVIPFYRGERITFDVAPSRLDFTVEHDSLKIEPVFHVMGFSVTGRVLNGPEGDGVPEAVVTLNNQIKVKTKADGSFRLENITTGTYTIHAQKEHLYFETVTIKIAPNTPQLADIIATGFSVCGQISIIRFPDTVKQMNKYKVVLSSQDKDKSLVTVETDAHGSFCFKAKPGTYKVQVMVPEAETRAGLTLKPQTFPLTVTNRPMMDVAFVQFLASVSGKVSCLDTCGDLLVTLQSLSRQGEKRSLQLSGKVNAMTFTFDNVLPGKYKISIMHEDWCWKNKSLEVEVLEDDMSAVEFRQTGYMLRCSLSHAITLEFYQDGNGRENVGIYNLSKGVNRFCLSKPGVYKVTPRSCHRFEQAFYTYDTSSPSILTLTAIRHHVLGTITTDKMMDVTVTIKSSIDSEPALVLGPLKSVQELRREQQLAEIEARRQEREKNGNEEGEERMTKPPVQEMVDELQGPFSYDFSYWARSGEKITVTPSSKELLFYPPSMEAVVSGESCPGKLIEIHGKAGLFLEGQIHPELEGVEIVISEKGASSPLITVFTDDKGAYSVGPLHSDLEYTVTSQKEGYVLTAVEGTIGDFKAYALAGVSFEIKAEDDQPLPGVLLSLSGGLFRSNLLTQDNGILTFSNLSPGQYYFKPMMKEFRFEPSSQMIEVQEGQNLKITITGYRTAYSCYGTVSSLNGEPEQGVAMEAVGQNDCSIYGEDTVTDEEGKFRLRGLLPGCVYHVQLKAEGNDHIERALPHHRVIEVGNNDIDDVNIIVFRQINQFDLSGNVITSSEYLPTLWVKLYKSENLDNPIQTVSLGQSLFFHFPPLLRDGENYVVLLDSTLPRSQYDYILPQVSFTAVGYHKHITLIFNPTRKLPEQDIAQGSYIALPLTLLVLLAGYNHDKLIPLLLQLTSRLQGVRALGQAASDNSGPEDAKRQAKKQKTRRTLRLQGEFQLTWCLVPWRGTLGIHLFSSLPFASEILLETTATCIHY

SEQ ID NO: 83830 - protein, 217 aa, Homo sapiens
  MOD_RES (1)..(1): Any amino acid
XQIRAASPGPSWEAQSFNPSIEVQTLGEAASGSRDQSPAIVVTVVTISALLVLGSVMSVLAIWRRPCSYGKGGGDAHDEEELYFHFKVPTRRTFLDPQSCGDLLQAVHLFAKELDAKSVTLERSLGGGLCSCLEALPPHQAHPPPRKSLACLIIGKRMAEGSVTLSWSSRAVWGAVLWLLAAPRSPGAARSRAYAEGQRLRLTEARLPGRGPHAGPV

SEQ ID NO: 83831 - protein, 171 aa, Homo sapiens
  MOD_RES (1)..(1): Any amino acid
XGVEHMECEIKLEGPVSPDVEPGKEETEESKKRKRKPYRPGIGGFMVRQRKSHTRTKKGPAAQAEVLSGDGQPDEGETVIPADLPAEGAVEQSLAEGDEKKKQQRRGRKKSKLEDMFPAYLQEAFFGKELLDLSRKALFAVGVGRPSFGLGTPKAKGDGGSERKELPTSQK

SEQ ID NO: 83832 - protein, 66 aa, Homo sapiens
MANDIDELIGIPFPNHSSEVLCSLNEQRHDGLLCDVLLVVQEQEYRTHRSVLAACSKYFKKLFTAG

SEQ ID NO: 83833 - protein, 62 aa, Homo sapiens
MPDSPAEVKTQPRSTPPSMPPPPPAASQGATRPPSFTPHTHREDGPATLPHGRFHGCLKWSM

SEQ ID NO: 83834 - protein, 140 aa, Homo sapiens
MADLTSVLTSVMFSPSSKMFIGGLSWQTSPDSLRDYFSKFGEIRECMVMRDPTTKRSRGFGFVTFADPASVDKVLGQPHHELDSKTIDPKVAFPRRAQPKMVTRTKKIFVGGLSANTVVEDVKQYFEQFGKVSAGSPGLS

SEQ ID NO: 83835 - protein, 589 aa, Homo sapiens
MADALLADLESTTSHISKRPVFLSEETPYSYPTGNHTYQEIAVPPPVPPPPSSEALNGTILDPLDQWQPSSSRFIHQQPQSSSPVYGSSAKTSSVSNPQDSVGSPCSRVGEEEHVYSFPNKQKSAEPSPTVMSTSLGSNLSELDRLLLELNAVQHNPPGFPADEANSSPPLPGALSPLYGVPETNSPLGGKAGPLTKEKPKRNGGRGLEDVRPSVESLLDELESSVPSPVPAITVNQGEMSSPQRVTSTQQQTRISASSATRELDELMASLSDFKIQGLEQRADGERCWAAGWPRDGGRSSPGGQDEGGFMAQGKTGSSSPPGGPPKPGSQLDSMLGSLQSDLNKLGVATVAKGVCGACKKPIAGQVVTAMGKTWHPEHFVCTHCQEEIGSRNFFERDGQPYCEKDYHNLFSPRCYYCNGPILDKVVTALDRTWHPEHFFCAQCGAFFGPEGFHEKDGKAYCRKDYFDMFAPKCGGCARAILENYISALNTLWHPECFVCRECFTPFVNGSFFEHDGQPYCEVHYHERRGSLCSGCQKPITGRCITAMAKKFHPEHFVCAFCLKQLNKGTFKEQNDKPYCQNCFLKLFC

SEQ ID NO: 83836 - protein, 135 aa, Homo sapiens
MYVSTRERYKWLRFSEDCLYLNVYAPARAPGDPQLPVMVWFPGGAFIVGAASSYEGSDLAAREKVVLVFLQHRLGIFGFLRWRGRYPLGPQLWPERRGLARTTATRAGTGGCWTRWRLCAGCRRTSQPSGETQEM

SEQ ID NO: 83837 - protein, 131 aa, Homo sapiens
  MOD_RES (1)..(1): Any amino acid
XIGAKALVKLIKPKKEGSRERLKSTVDSPPWQLESSDPASPAASQPLRSQAENPDTPALGSNCAEERDAHNGSVGKAPPRKKSPFLKSKNKDKDKSPTTHPALSKRLRFWSSSDIPSSPNEPLSFSDIGDF

SEQ ID NO: 83838 - protein, 339 aa, Homo sapiens
MATTVPDGCRNGLKSKYYRLCDKAEAWGIVLETVATAGVVTSVAFMLTLPILVCKVQDSNRRKMLPTQFLFLLGVLGIFGLTFAFIIGLDGSTGPTRFFLFGILFSICFSCLLAHAVSLTKLVRGRKPLSLLVILGLAVGFSLVQDVIAIEYIVLTMNRTNVNVFSELSAPRRNEDFVLLLTYVLFLMALTFLMSSFTFCGSFTGWKRHGAHIYLTMLLSIAIWVAWITLLMLPDFDRRWDDTILSSALAANGWVFLLAYVSPEFWLLTKQRNPMDYPVEDAFCKPQLVKKSYGVENRAYSQEEITQGFEETGDTLYAPYSTHFQLQVSDFFLPLHQRH

SEQ ID NO: 83839 - protein, 339 aa, Homo sapiens
MLSWRLQTGPEKAELQELNARLYDYVCRVRELERENLLLEEELRGRRGREGLWAEGQARCAEEARSLRQQLDELSWATALAEGERDALRRELRELQRLDAEERAARGRLDAELGAQQRELQEALGARAALEALLGRLQAERRGLDAAHERDVRELRARAASLTMHFRARATGPAAPPPRLREVHDSYALLVAESWRETVQLYEDEVRELEEALRRGQESRLQAEEETRLCAQEAEALRREALGLEQLRARLEDALLRMREEYGIQAEERQRVIDCLEDEKATLTLAMADWLRDYQDLLQVKTGLSLEVATYRALLEGESNPEIVIWAEHVENMPSDGCE

SEQ ID NO: 83840 - protein, 123 aa, Homo sapiens
MPSAGTLPWVQGIICNANNPCFRYPTPGEAPGVVGNFNKSIVARLFSDARRLLLYSQKDTSMKDMRKVLRTLQQIKKSSSNLKLQDFLVDNETFSGFLYHNLSLPKSTVDKMLRADVILHKVS

SEQ ID NO: 83841 - protein, 846 aa, Homo sapiens
MARSSPYLRQLQGPLLPPRDLVEEDDDYLNDDVEEDEESVFIDAEELCSGGVKAGSLPGCLRVSICDENTQETCKVFGRFPITGAWWRVKVQVKPVVGSRSYQYQVQGFPSYFLQSDMSPPNQKHICALFLKECEVSSDDVNKFLTWVKEVSNYKNLNFENLRETLRTFHKETGRKDQKQPTQNGQEELFLDNEMSLPLENTIPFRNVMTALQFPKIMEFLPVLLPRHFKWIIGSGSKEMLKEIEEILGTHPWKLGFSKITYREWKLLRCEASWIAFCQCESLLQLMTDLEKNALIMYSRLKQICREDGHTYVEVNDLTLTLSNHMSFHAASESLKFLKDIGVVTYEKSCVFPYDLYHAERAIAFSICDLMKKPPWHLCVDVEKVLASIHTTKPENSSDDALNESKPDEVRLENPVDVVDTQDNGDHIWTNGENEINAEISEVQLDQDQVEVPLDRDQVAALEMICSNPVTVISGKGGCGKTTIVSRLFKHIEQLEEREVKKACEDFEQDQNASEEWITFTEQSQLEADKAIEVLLTAPTGKAAGLLRQKTGLHAYTLCQVNYSFYSWTQTMMTTNKPWKFSSVRVLVVDEGSLVSVGIFKSVLNLLCEHSKLSKLIILGDIRQLPSIEPGNLLKDLFETLKSRNCAIELKTNHRAESQLIVDNATRISRRQFPKFDAELNISDNPTLPISIQDKTFIFVRLPEEDASSQSSKTNHHSCLYSAVKTLLQENNLQNAKTSQFIAFRRQDCDLINDCCCKHYTGHLTKDHQSRLVFGIGDKICCTRNAYLSDLLPENISGSQQNNDLDASSEDFSGTLPDFAKNKRDFESNVRLCNGEIFFITNIEYL

SEQ ID NO: 83842 - protein, 747 aa, Homo sapiens
MMASFQRSNSHDKVRRIVAEEGRTARNLIAWSVPLESKDDDGKPKCQTGGKSKRTIQGTHKTTKQSTAVDCKITSSTTGDKHFDKSPTKTRHPRKIDLRARYWAFLFDNLRRAVDEIYVTCESDQSVVECKEVLMMLDNYVRDFKALIDWIQLQEKLEKTDAQSRPTSLAWEVKKMSPGRHVIPSPSTDRINVTSNARRSLNFGGSTGTVPAPRLAPTGVSWADKVKAHHTGSTASSEITPAQSCPPMTVQKASRKNERKDAEGWETVQRGRPIRSRSTAVMPKVSLATEATRSKDDSDKENVCLLPDESIQKGQFVGDGTSNTIESHPKDSLHSCDHPLAEKTQFTVSTLDDVKNSGSIRDNYVRTSEISAVHIDTECVSVMLQAGTPPLQVNEEKFPAEKARIENEMDPSDISNVSAANLSMAEVLAKKEELADRLEKANEEAIASAIAEEEQLTREIEAEENNDINIETDNDSDFSASMGSGSVSFCGMSMDWNDVLADYEARESWRQNTSWGDIVEEEPARPPGHGIHMHEKLSSPSRKRTIAESKKKHEEKQMKAQQLREKLREEKTLKLQKLLEREKDVRKWKEELLDQRRRMMEEKLLHAEFKREVQLQAIVKKAQEEEAKVNEIAFINTLEAQNKRHDVLSKLKEYEQRLNELQEERQRRQEEKQARDEAVQERKRALEAERQARVEELLMKRKEQEARIEQQRQEKEKAREDAARERARDREERLAALTAAQQEAMEE

SEQ ID NO: 83843 - protein, 45 aa, Homo sapiens
  MOD_RES (1)..(1): Any amino acid
XREVHCFCVVSHSVLDAFRAHCPRLRTYTLKLTREPHPWRPTLVA

SEQ ID NO: 83844 - protein, 646 aa, Homo sapiens
MEPQDLELELCKKHHFGINKPEKIIPSPDDSKFLLKTFTHIKSNVSAPNKKKVKESKEKEKLERRLLEELLKMFMDSESFYYSLTYDLTNSVQRQSTGERDGRPLWQKVDDRFFWNKYMIQDLTEIGTPDVDFWIIPMIQGFVQIEELVVNYTESSDDEKSSPETPPQESTCVDDIHPRFLVALISRRSRHRAGMRYKRRGVDKNGNVANYVETEQLIHVHNHTLSFVQTRGSVPVFWSQVGYRYNPRPRLDRSEKETVAYFCAHFEEQLNIYKKQVIINLVDQAGREKIIGDAYLKQVLLFNNSHLTYVSFDFHEHCRGMKFENVQTLTDAIYDIILDMKWCWVDEAGVICKQEGIFRVNCMDCLDRTNVVQAAIARVVMEQQLKKLGVMPPEQPLPVKCNRIYQIMWANNGDSISRQYAGTAALKGDFTRTGERKLAGVMKDGVNSANRYYLNRFKDAYRQAVIDLMQGIPVTEDLYSIFTKEKEHEALHKENQRSHQELISQLLQSYMKLLLPDDEKFHGGWALIDCDPSLIDATHRDVDVLLLLSNSAYYVAYYDDEVDKVNQYQRLSLENLEKIEIGPEPTLFGKPKFSCMRLHYRYKEASGYFHTLRAVMRNPEEDGKDTLQCIAEMLQITKQAMGSDLP

SEQ ID NO: 83845 - protein, 725 aa, Homo sapiens
MATANFGKIQIGIYVEIKRSDGRIHQAMVTSLNEDNESVTVEWIENGDTKGKEIDLESIFSLNPDLVPDEEIEPSPETPPPPASSAKVNKIVKNRRTVASIKNDPPSRDNRVVGSARARPSQFPEQSSSAQQNARRKSNCVKEVEKLQEKREKRRLQQQELREKRAQDVDATNPNYEIMCMIRDFRGSLDYRPLTTADPIDEHRICVCVRKRPLNKKETQMKDLDVITIPSKDVVMVHEPKQKVDLTRYLENQTFRFDYAFDDSAPNEMVYRFTARPLVETIFERGMATCFAYGQTGSGKTHTMGGDFSGKNQDCSKGIYALAARDVFLMLKKPNYKKLELQVYATFFEIYSGKVFDLLNRKTKLRVLEDGKQQVQVVGLQEREVKCVEDVLKLIDIGNSCRTSGQTSANAHSSRSHAVFQIILRRKGKLHGKFSLIDLAGNERGADTSSADRQTRLEGAEINKSLLALKECIRALGRNKPHTPFRASKLTQVLRDSFIGENSRTCMIATISPGMASCENTLNTLRYANRVKEFGISPSDIPFSQGSGSRPDLSPSYEYDDFSPSVTRVKELTVDPTAAGDVRPIMHHPPNQIDDLETQWGVGSSPQRDDLKLLCEQNEEEVSPQLFTFHEAVSQMVEMEEQVVEDHRAVFQESIRWLEDEKALLEMTEEVDYDVDSYATQLEAILEQKIDILTELRDKVKSFRAALQEEEQASKQINPKRPRAL

SEQ ID NO: 83846 - protein, 90 aa, Homo sapiens
MGGGYDLNLFASPPDSNFVCSVCHGVLKRPARLPCSHIFCKKCILRWLARGGAGLGEKAGESHLQRETSAALGRPDIAEFGSWLYCLVAV

SEQ ID NO: 83847 - protein, 102 aa, Homo sapiens
MTAQGGLVANRGRRFKWAIELSGPGGGSRGRSDRGSGQGDSLYPVGYLDKQVPDTSVQETDRILVEKRCWDIALGPLKQIPMNLFIMYMAGNTISIFPTMMA

SEQ ID NO: 83848 - protein, 186 aa, Homo sapiens
MRKLAQRIDIQMRDNRDAQHVLERDLEDKSSAQCIDEKCFNLRNTSDCISFFHGMEKIDGTISVPETWAKFSNDNIKHSQNMRANSIQLREEAEHLFETLSDQMWRQFTDTNLAFNARISEVTDVKNKLQTQLAKTLQEIFQAENTIMLLERSIMAKEGPLKVAQTRLECRTRRPNMELCRDIPQL

SEQ ID NO: 83849 - protein, 138 aa, Homo sapiens
MKLKQRVVLLAILLVIFIFTKVFLIDNLDTSAANREDQRAFHRMMTGLRVELAPKLDHTLQSPWEIAAQWVVPREVYPEETPELGAVMHAMATKKIIKADVGYKGTQLKALLILEGGQKVVFKPKRYSRDHVVEGEPY

SEQ ID NO: 83850 - protein, 221 aa, Homo sapiens
VERLTCEEEEEKMFGRGSRHRKEVDYSDSLTEKQWLKAIEEGTLEEIEEEVRQKKSSRKRKRDSDAGSSTPTTSTRSRDKDDESKKQKKRGRPPAEKLSPNPPNLTKKMKKIVDAVIKYKDSSGRQLSEVFIQLPSRKELPEYYELIRKPVDFKKIKERIRNHKYRSLNDLEKDVMLLCQNAQTFNLEGSLVRAPLGVGDGPLPQLGFDPTRPSFPSELMG

SEQ ID NO: 83851 - protein, 108 aa, Homo sapiens
IEEEKKRTARTDYWLQPEIIVKIITKKLGEKYHKKKAIVKEVIDKYTAVVKMIDSGDKLKLDQTHLETVIPAPGKRILVLNGGYRGNEGTLESINEKTFSATIVIETV

SEQ ID NO: 83852 - protein, 353 aa, Homo sapiens
MGQDQTKQQIEKGLQLYQSNQTEKALQVWTKVLEKSSDLMGRFRVLGCLVTAHSEMGRYKEMLKFAVVQIDTARELEDADFLLESYLNLARSNEKLCEFHKTISYCKTCLGLPGTRAGAQLGGQVSLSMGNAFLGLSVFQKALESFEKALRYAHNNDDAMLECRVCCSLGSFYAQVKDYEKALFFPCKAAELVNNYGKGWSLKYRAMSQYHMAVAYRLLGRLGSAMECCEESMKIALQHGDRPLQALCLLCFADIHRSRGDLELSQLKLHCLSESIYRSKGLQRELRAHVVRFHECVEETELYCGLCGESIGEKNSRLQALPCSHIFHLRWGLLGGWTGVGRISSGHSRAQLA

SEQ ID NO: 83853 - protein, 386 aa, Homo sapiens
  MOD_RES (1)..(1): Any amino acid
XKGDPGFQGMPGIGGSPGITGSKGDMGPPGVPGFQGPKGLPGLQGIKGDQGDQGVPGAKGLPGPPGPPGPYDIIKGEPGLPGPEGPPGLKGLQGLPGPKGQQGVTGLVGIPGPPGIPGFDGAPGQKGEMGPAGPTGPRGFPGPPGPDGLPGSMGPPGTPSVDHGFLVTRHSQTIDDPQCPSGTKILYHGYSLLYVQGNERAHGQDLGTAGSCLRKFSTMPFLFCNINNVCNFASRNDYSYWLSTPEPMPMSMAPITGENIRPFISRCAVCEAPAMVMAVHSQTIQIPPCPSGWSSLWIGYSFVMHTSAGAEGSGQALASPGSCLEEFRSAPFIECHGRGTCNYYANAYSFWLATIERSEMKPTPSTLKAGELRTHVSRCQVCMRRT

SEQ ID NO: 83854 - protein, 135 aa, Homo sapiens
MLLELSEEHKEHLAFLPQVDSAVVAEFGRIAVEFLRRGANPKIYEGAARKLNVSSDTVQHGVEGLTYLLTESSKLMISELDFQDSVFVLGFSEELNKLLLQLYLDNRKEIRTILSELAPSLPSYHNLEWRLDVQM

SEQ ID NO: 83855 - protein, 94 aa, Homo sapiens
MPFGCVTLGDKKNYNQPSEVTDRYDLGQVIKTEEFCEIFRAKDKTTGKLHTCKKFQKRDGRKGEASQHPTAGGCVCDPQGVLYLPGAGHGEGGV

SEQ ID NO: 83856 - protein, 318 aa, Homo sapiens
MSELSDEASEPELLNRSLSMWHGLGTQVSGEELDVPLDLHTAASIGQYEVVKECVQREPICGFTPLMEAAAAGHEIIVQYFLNHGVKVDARDHSGATARMLAKQYGHMKIVALMDTYSPSLPKSLYRSPEKYEDLSSSDESCPAPQRQRPCRKKGVSIHEGPRALARITGIGLGGRAPRPRYEQAPPRGYVTFNSSGENPLEEEGLCCRDVTSPINERDVESSSSSSSREEHAFCANLGPVQSSSSSEGLARAQGLSSEASVESNEDSDHACKSSARKQAKSYMKTKNPDSQWPPRAATDREGFLAESSPQTQRAPYS

SEQ ID NO: 83857 - protein, 63 aa, Homo sapiens
MSKSVPAFLQDESDDRETDTASESSYQLSRHKKSPSSLTNLSSSSGMTSLSSVSGSVMSVYSG

SEQ ID NO: 83858 - protein, 526 aa, Homo sapiens
MLSVGLGFLRTELGLDLGLEPKRYPGWVILVGTGALGLLLLFLLGYGWAAACAGARKKRRSPPRKREEAAAVPAAAPDDLALLKNLRSEEQKKKNRKKLSEKPKPNGRTVEVAEGEAVRTPQSVTAKQPPEIDKKNEKSKKNKKKSKSDAKAVQNSSRHDGKEVDEGAWETKISHREKRQQRKRDKVLTDSGSLDSTIPGIENTITVTTEQLTTASFPVGSKKNKGDSHLNVQVSNFKSGKGDSTLQVSSGLNENLTVNGGGWNEKSVKLSSQISAGEEKWNSVSPASAGKRKTEPSAWSQDTGDANTNGKDWGRSWSDRSIFSGIDGLSSADPNSDWNAPAEEWGNWVDEERASLLKSQEPIPDDQKVSDDDKEKGEGALPTGKSKKKKKKKKKQGEDNSTAQDTEELEKEIREDLPVNTSKTRPKQEKAFSLKTISTSDPAEVLVKNSQPIKTLPPATSTEPSVILSKSDSDKSSSQVPPILQETDKSKSNTKQNSVPPSQTKSETSWESPKQIKKKKKARRET

SEQ ID NO: 83859 - protein, 903 aa, Homo sapiens
MTSGSKCPSTDSGKEEYIATFKGSEYFCYDLSQNPIQSSSDEITLSFKTLQRNGLMLHTGKSADYVNLALKNGAVSLVINLGSGAFEALVEPVNGKFNDNAWHDVKVTRNLRQVTISVDGILTTTGYTQEDYTMLGSDDFFYVGGSPSTADLPGSPVSNNFMGCLKEVVYKNNDVRLELSRLAKQGDPKMKIHGVVAFKCENVATLDPITFETPESFISLPKWNAKKTGSISFDFRTTEPNGLILFSHGKPRHQKDAKHPQMIKVDFFAIEMLDGHLYLLLDMGSGTIKIKALLKKVNDGEWYHVDFQRDGRSGTISVNTLRTPYTAPGESEILDLDDELYLGGLPENKAGLVFPTEVWTALLNYGYVGCIRDLFIDGQSKDIRQMAEVQSTAGVKPSCSKETAKPCLSNPCKNNGMCRDGWNRYVCDCSGTGYLGRSCEREATVLSYDGSMFMKIQLPVVMHTEAEDVSLRFRSQRAYGILMATTSRDSADTLRLELDAGRVKLTVNLGKGPETLFAGYNLNDNEWHTVRVVRRGKSLKLTVDDQQAMTGQMAGDHTRLEFHNIETGIITERRYLSSVPSNFIGHLQSLTFNGMAYIDLCKNGDIDYCELNARFGFRNIIADPVTFKTKSSYVALATLQAYTSMHLFFQFKTTSLDGLILYNSGDGNDFIVVELVKGYLHYVFDLGNGANLIKGSSNKPLNDNQWHNVMISRDTSNLHTVKIDTKITTQITAGARNLDLKSDLYIGGVAKETYKSLPKLVHAKEGFQGCLASVDLNGRLPDLISDALFCNGQIERGCEGPSTTCQEDSCSNQGVCLQQWDGFSCDCSMTSFSGPLCNDPGTTYIFSKGGGQITYKWPPNDRPSTRADRLAIGFSTVQKEAVLVRVDSSSGLGDYLELHITLQ

SEQ ID NO: 83860 - protein, 668 aa, Homo sapiens
MHRGLIHPQSRAVGGDAMTPILTVLICLGLSLGPRTHVQAGHLPKPTLWAEPGSVITQGSPVTLRCQGGQETQEYRLYREKKTALWITRIPQELVKKGQFPIPSITWEHAGRYRCYYGSDTAGRSESSDPLELVVTGAYIKPTLSAQPSPVVNSGGNVILQCDSQVAFDGFSLCKEGEDEHPQCLNSQPHARGSSRAIFSVGPVSPSRRWWYRCYAYDSNSPYEWSLPSDLLELLVLGVSKKPSLSVQPGPIVAPEETLTLQCGSDAGYNRFVLYKDGERDFLQLAGAQPQAGLSQANFTLGPVSRSYGGQYRCYGAHNLSSEWSAPSDPLDILIAGQFYDRVSLSVQPGPTVASGENVTLLCQSQGWMQTFLLTKEGAADDPWRLRSTYQSQKYQAEFPMGPVTSAHAGTYRCYGSQSSKPYLLTHPSDPLELVVSGPSGGPSSPTTGPTSTSGPEDQPLTPTGSDPQSGLGRHLGVVIGILVAVILLLLLLLLLFLILRHRRQGKHWTSTQRKADFQHPAGAVGPEPTDRGLQWRSSPAADAQEENLYAAVKHTQPEDGVEMDTRQSPHDEDPQAVTYAEVKHSRPRREMASPPSPLSGEFLDTKDRQAEEDRQMDTEAAASEAPQDVTYAQLHSLTLRREATEPPPSQEGPSPAVPSIYATLAIH

SEQ ID NO: 83861 - protein, 1792 aa, Homo sapiens
  MOD_RES (1)..(1): Any amino acid
XDSQRKQYEEWLQETQQLLQMQQKYLEEQIGAHRKSKKALSAKQRTAKKAGREFPEEDAEQLKHVTEQQSMVQKQLEQIRKQQKEHAELIEDYRIKQQQQCAMAPPTMMPSVQPQPPLIPGATPPTMSQPTFPMVPQQLQHQQHTTVISGHTSPVRMPSLPGWQPNSAPAHLPLNPPRIQPPIAQLPIKTCTPAPGTVSNANPQSGPPPRVEFDDNNPFSESFQERERKERLREQQERQRIQLMQEVDRQRALQQRMEMEQHGMVGSEISSSRTSVSQIPFYSSDLPCDFMQPLGPLQQSPQHQQQMGQVLQQQNIQQGSINSPSTQTFMQTNERRQVGPPSFVPDSPSIPVGSPNFSSVKQGHGNLSGTSFQQSPVRPSFTPALPAAPPVANSSLPCGQDSTITHGHSYPGSTQSLIQLYSDIIPEEKGKKKRTRKKKRDDDAESTKAPSTPHSDITAPPTPGISETTSTPAVSTPSELPQQADQESVEPVGPSTPNMAAGQLCTELENKLPNSDFSQATPNQQTYANSEVDKLSMETPAKTEEIKLEKAETESCPGQEEPKLEEQNGSKVEGNAVACPVSSAQSPPHSAGAPAAKGDSGNELLKHLLKNKKSSSLLNQKPEGSICSEDDCTKDNKLVEKQNPAEGLQTLGAQMQGGFGCGNQLPKTDGGSETKKQRSKRTQRTGEKAAPRSKKRKKDEEEKQAMYSSTDTFTHLKQLSLLPLMEPIIGVNFAHFLPYGSGQFNSGNRLLGTFGSATLEGVSDYYSQLIYKNNLSNPPTPPASLPPTPPPMACQKMANGFATTEELAGKAGVLVSHEVTKTLGPKPFQLPFRPQDDLLARALAQGPKTVDVPASLPTPPHNNQEELRIQDHCGDRDTPDSFVPSSSPESVVGVEVSRYPDLSLVKEEPPEPVPSPIIPILPSTAGKSSESRRNDIKTEPGTLYFASPFGPSPNGPRSGLISVAITLHPTAAENISSVVAAFSDLLHVRIPNSYEVSSAPDVPSMGLVSSHRINPGLEYRQHLLLRGPPPGSANPPRLVSSYRLKQPNVPFPPTSNGLSGYKDSSHGIAESAALRPQWCCHCKVVILGSGVRKSFKDLTLLNKDSRESTKRVEKDIVFCSNNCFILYSSTAQAKNSENKESIPSLPQSPMRETPSKAFHQYSNNISTLDVHCLPQLPEKASPPASPPIAFPPAFEAAQVEAKPDELKVTVKLKPRLRAVHGGFEDCRPLNKKWRGMKWKKWSIHIVIPKGTFKPPCEDEIDEFLKKLGTSLKPDPVPKDYRKCCFCHEEGDGLTDGPARLLNLDLDLWVHLNCALWSTEVYETQAGALINVELALRRGLQMKCVFCHKTGATSGCHRFRCTNIYHFTCAIKAQCMFFKDKTMLCPMHKPKGIHEQELSYFAVFRRVYVQRDEVRQIASIVQRGERDHTFRVGSLIFHTIGQLLPQQMQAFHSPKALFPVGYEASRLYWSTRYANRRCRYLCSIEEKDGRPVFVIRIVEQGHEDLVLSDISPKGVWDKILEPVACVRKKSEMLQLFPAYLKGEDLFGLTVSAVARIAESLPGVEACENYTFRYGRNPLMELPLAVNPTGCARSEPKMSAHVKRFVLRPHTLNSTSTSKSFQSTVTGELNAPYSKQFVHSKSSQYRKMKTEWKSNVYLARSRIQGLGLYAARDIEKHTMVIEYIGTIIRNEVANRKEKLYESQNRGVYMFRMDNDHVIDATLTGGPARYINHSCAPNCVAEVVTFERGHKIIISSSRRIQKGEELCYDYKFDFEDDQHKIPCHCGAVNCRKWMN

SEQ ID NO: 83862 - protein, 440 aa, Homo sapiens
MAVSASPVISATSSGAGVPGGLFRAEPLYSTPREPPRLTPNMINSFVVNNHSNSAGGGGRGNTNTNECRMVDMHGMKVASFLMDGQELICLPQVFDLFLKHLVGGLHTVYTKLKRLDISPVVCTVEQVRILRGLGAIQPGVNRCKLITRKDFETLFTDCTNARRKRQMTRKQAVNSSRPGRPPKRSLGVLQENARLLTHAVPGLLSPGLITPTGITAAAMAEAMKLQKMKLMAMNTLQGNGSQNGTESEPDDLNSNTGGSESSWDKDKMQSPFAAPGPQHGIAHAALAGQPGIGGAPTLNPLQQNHLLTNRLDLPFMMMPHPLLPVSLPPASVAMAMNQMNHLNTIANMAAAAQIHSPLSRAGTSVIKERIPESPSPAPSLEENHRPGSQTSSHTSSSVSSSPSQMDHHLERMVMMPNNREELIVDQDNGLTIKKFQKDN

SEQ ID NO: 83863 - protein, 85 aa, Homo sapiens
MARVAWGLLWLLLGSAGAQYEKYSFRGFPPEDLMPLAAAYGHALEQYEGESWRESARYLEAALRLHRLLRDSEAFCHANCSGPAP

SEQ ID NO: 83864 - protein, 135 aa, Homo sapiens
MALYQRWRCLRLQGLQACRLHTAVVSTPPRWLAERLGLFEELWAAQVKRLASMAQKEPRTIKISLPGGQKIDAVAWNTTPYQLARQISSTLADTAVVQVQNMAFTMISSWERRGVAHWLTFARAPTFGILDRLED

SEQ ID NO: 83865 - protein, 1315 aa, Homo sapiens
MDSQELKTLINYYCQERYFHHVLLVASEGIKRYGSDPVFRFYHAYGTLMEGKTQEALREFEAIKNKQDVSLCSLLALIYAHKMSPNPDREAILESDARVKEQRKGAGEKALYHAGLFLWHIGRHDKAREYIDRMIKISDGSKQGHVLKAWLDITRGKEPYTKKALKYFEEGLQDGNDTFALLGKAQCLEMRQNYSGALETVNQIIVNFPSFLPAFVKKMKLQLALQDWDQTVETAQRLLLQDSQNVEALRMQALYYVCREGDIEKASTKLENLGNTLDAMEPQNAQLFYNITLAFSRTCGRSQLILQKIQTLLERAFSLNPQQSEFATELGYQMILQGRVKEALKWYKTAMTLDETSVSALVGFIQCQLIEGQLQDADQQLEFLNEIQQSIGKSAELIYLHAVLAMKKNKRQEEVINLLNDVLDTHFSQLEGLPLGIQYFEKLNPDFLLEIVMEYLSFCPMQPASPGQPLCPLLRRCISVLETVVRTVPGLLQTVFLIAKVKYLSGDIEAAFNNLQHCLEHNPSYADAHLLLAQVYLSQEKVKLCSQSLELCLSYDFKVRDYPLYHLIKAQSQKKMGEIADAIKTLHMAMSLPGMKRIGASTKSKDRKTEVDTSHRLSIFLELIDVHRLNGEQHEATKVLQDAIHEFSGTSEEVRVTIANADLALAQGDIERALSILQNVTAEQPYFIEAREKMADIYLKHRKDKMLYITCFREIAERMANPRSFLLLGDAYMNILEPEEAIVAYEQALNQNPKDGTLASKMGKALIKTHNYSMAITYYEAALKTGQKNYLCYDLAELLLKLKWYDKAEKVLQHALAHEPVNELSALMEDGRCQVLLAKVYSKMEKLGDAITALQQARELQARVLKRVQMEQPDAVPAQKHLAAEICAEIAKHSVAQRDYEKAIKFYREALVHCETDNKIMLELARLYLAQDDPDSCLRQCALLLQSDQDNEAATMMMADLMFRKQDYEQAVFHLQQLLERKPDNYMTLSRLIDLLRRCGKLEDVPRFFSMAEKRNSRAKLEPGFQYCKGLYLWYTGEPNDALRHFNKARKDRDWGQNALYNMIEICLNPDNETVGGEVFENLDGDLGNSTEKQESVQLAVRTAEKLLKELKPQTVQGHVQLRIMENYCLMATKQKSNVEQALNTFTEIAASEEHIPALLGMATAYMILKQTPRARNQLKRIAKMNWNAIDAEEFEKSWLLLADIYIQSAKYDMAEDLLKRCLRHNRSCCKAYEYMGYIMEKEQAYTDAALNYEMAWKYSNRTNPAVGYKLAFNYLKAKRYVDSIDICHQVLEAHPTYPKIRKDILDKARASLRP

SEQ ID NO: 83866 - protein, 148 aa, Homo sapiens
MISLPGPLVTNLLRFLFLGLSALVPPAPPSCRLQGVPHVGANVTLSCQSPRSKPAVQYQWDRQLPSFQTFFAPALDVIRGSLSLTNLSSSMAGVYVCKAHNEVGTAQCNVTLEVSTGPGAAVVAGAVVGTLVGLGLLAGLVLLYHRRG

SEQ ID NO: 83867 - protein, 118 aa, Homo sapiens
GVAAGPLLPQPHPHHPVHGPAGGAAARALPSRGSCKWIRTPAIIYSVHTMTTLIPILSTFLFEDFSKASGFKGQRPETLHERLTLVSVYAPYLLIPFILLIFMLRSPYYKYEEKRKKK

SEQ ID NO: 83868 - protein, 142 aa, Homo sapiens
MTEFFHDCTTNERKREIEELLNNFAQQIGAWRFCLYFLSSTRNDYVMMYSLTVFENLINKMWLGVPSQDKMEIRSCLPKLLLAHHKTLPYFIRNKLCKVIVDIGRQDWPMFYHDFFTNILQLIQSPVTTPLGLIMLKTTSEE

SEQ ID NO: 83869 - protein, 123 aa, Homo sapiens
MLSLFPSPGPGSSRCKDKLNALAISVMNQWPGVKLRVTEGWDEDGHHSEESLHYEGRAVDITTSDRDRSKYGMLARLAVEAGFDWVYYESKAHIHCSVKAVQSDFKSVESEPEAPGTAAPLAV

SEQ ID NO: 83870 - protein, 450 aa, Homo sapiens
MMQFAWQSYKRYAMGKNELRPLTKDGYEGNMFGGLSGATVIDSLDTLYLMELKEEFQEAKAWVGESFHLNVSGEASLFEVNIRYIGGLLSAFYLTGEEVFRIKAIRLGEKLLPAFNTPTGIPKGVVSFKSGNWGWATAGSSSILAEFGSLHLEFLHLTELSGNQVFAEKVRNIRKVLRKIEKPFGLYPNFLSPVSGNWVQHHVSVGGLGDSFYEYLIKSWLMSGKTDMEAKNMYYEALEAIETYLLNVSPGGLTYIAEWRGGILDHKMGHLACFSGGMIALGAEDAKEEKRAHYRELAAQITKTCHESYARSDTKLGPEAFWFNSGREAVATQLSESYYILRPEVVESYMYLWRQTHNPIYREWGWEVVLALEKYCRTEAGFSGIQDVYSSTPNHDNKQQSFFLAETLKYLYLLFSEDDLLSLEDWVFNTEAHPLPVNHSDSSGRAWGRH

SEQ ID NO: 83871 - protein, 216 aa, Homo sapiens
MYLNRDIWKPAPCQICVCDNGAILCDKIECQDVLDCADPVTPPGECCPVCSQTPGGGNTNFGRGRKGQKGEPGLVPVVTGIRGRPGPAGPPGSQGPRGERGPKGRPGPRGPQGIDGEPGVPGQPGAPGPPGHPSHPGPDGLSRPFSAQMAGLDEKSGLGSQVGLMPGSVGPVGPRGPQGLQGQQGGAGPTGPPGEPGDPGPMGPIGSRGPEGPPGK

SEQ ID NO: 83872 - protein, 126 aa, Homo sapiens
MSVPGPYQAATGPSSAPSAPPSYEETVAVNSYYPTPPAPMPGPTTGLVTGPDGKGMNPPSYYTQPAPIPNNNPITVQTVYVQHPITFLDRPIQMCCPSCNKMIVSQLSYNAGALTWLSCGSLCLLG

SEQ ID NO: 83873 - protein, 140 aa, Homo sapiens
SSKYCCDTGNHGSEDFLLVLDCCDLSVLKVEEVDVAAVPGLEKFTRSPELTVVSEEFRNQIVRELVTLPANRWREQLDYYARCSQAPGCGELLFDTDTWSLQIRKTGAQTATDFPHAIRIWYKTKPEGRSVTWTSDQSGR

SEQ ID NO: 83874 - protein, 161 aa, Homo sapiens
MPKRKPKRRSARLSAMLVPVTPEVKPKRTSSSRKMKTKSDMMEENIDTSAQAVAETKQEAVVEEDYNENAKNGEAKITEAPASEKEIVEVKEENIEDATEKGGEKKEAVAAEVKNEEEDQKEDEEDQNEEKGEAGKEDKDEKGEEDGKEDKNGNEKGEDAK

SEQ ID NO: 83875 - protein, 127 aa, Homo sapiens
  MOD_RES (1)..(1): Any amino acid
XLCAELAGHRRAVGHLHHLLCHRQRGVLHPALLDRRRRGHPASRLFRALPLLHRQRLLPGADLQGQLHGLLHAALGRLQSRLLLYRPLHDAHHCLHHLLYPLLLLQHGHCVQDMCLDAAHLRKITPT

SEQ ID NO: 83876 - protein, 107 aa, Homo sapiens
MLRSCAARLRTLGALCLPPVGRRLPGSEPRPELRSFSSEEVILKDCSVPNPSWNKDLRLLFDQFMKKCEDGSWKRLPSYKRTPTEWIQDFKTHFLAWLMAGRCGSRL

SEQ ID NO: 83877 - protein, 303 aa, Homo sapiens
MNQPGGAAAPQADGASAAGRKSTASRERLKRSQKSTKVEGPEPVPAEASLSAEQGTMTEVKVKTELPDDYIQEVIWQGEAKEEKKAVSKDGTSDVPAEICVVIGGVRNQQTLGSYECGICGKKYKYYNCFQTHVRAHRDTEATSGEGASQSNNFRYTCDICGKKYKYYSCFQEHRDLHAVDDPFDQGVVATDEVKEEPPEPFQKIGPMNNITSDIFKKKEVRQCQKRETGNYTCEFCGKQYKYYTPYQEHVALHAPITTQTQTFRTPNSGSPASKATAESAFSRRVEGKAQNHFEETNSSSQN

SEQ ID NO: 83878 - protein, 260 aa, Homo sapiens
IDINVDELDTPDEADSFEYTGHDPTANKDSGQESESIPEYTAEEEREDNRLWRTVVIGEQEQRIDMKVIEPYRRVISHGGDSGYYGDGLNAIIVFAACFLPDSSRADYHYVMENLFLYVISTLELMVAEDYMIVYLNGATPRRRMPGLGWMKKCYQMIDRRLRKNLKSFIIVHPSWFIRTILAVTRPFISSKFSSKIKYVNSLSELSGLIPMDCIHIPESIIKYDEERSYKRSVRTSCLYNDPEMSSMEKDIDLKLKEKP

SEQ ID NO: 83879 - protein, 1990 aa, Homo sapiens
MADERKDEAKAPHWTSAPLTEASAHSHPPEIKDQGGAGEGLVRSANGFPYREDEEGAFGEHGSQGTYSNTKENGINGELTSADRETAEEVSARIVQVVTAEAVAVLKGEQEKEAQHKDQTAALPLAAEETANLPPSPPPSPASEQTVTVEEDEGAEDQVGPLHRFPSHEPATSGERRGLLAPSISVSVPDDDPYNSDEEYYEHPLFSSERTTSSVLPSVTAQSAEAHLGQEKEEETLESRMAEEEKPAALPEKECGAAKSSDQPKGLSKGQMESSAEAQIVPEESAPAGAPHEKSVKEVKEVSPEVKTPSSAGEDLLTASKMEFHDQQELTPSTAEPSDQKEKESEKQSKPGEDLKHAALVSQPETTKTYPDKKDMQGTEEEKAPLALFGHTLVASLEDMKQKTEPSLVVPGIDLPKEPPTPKEQKDWFIEMPTEAKKDEWGLVAPISPGPLTPMREKDVFDDIPKWEGKQFDSPMPSPFQGGSFTLPLDVMKNEIVTETSPFAPAFLQPDDKKSLQQTSGPATAKDSFKIEEPHEAKPDKMAEAPPSEAMTLPKDAHIPVVEEHVMGKVLEEEKEAINQETVQQRDTFTPSGQEPILTEKETELKLEEKTTISDKEAVPKESKPPKPADEEIGIIQTSTEHTFSEQKDQEPTTDMLKQDSFPVSLEQAVTDSAMTSKTLEKAMTEPSALIEKSSIQELFEMRVDDKDKIEGVGAATSAELDMPFYEDKSGMSKYFETSALKEEATKSIEPGSDYYELSDTRESVHESIDTMSPMHKNGDKEFQTGKESQPSPPAQEAGYSTLAQSYPSDLPEEPSSPQERMFTIDPKVYGEKRDLHSKNKDDLTLSRSLGLGGRSAIEQRSMSINLPMSCLDSIALGFNFGRGHDLSPLASDILTNTSGSMDEGDDYLPATTPALEKAPCFPVESKEEEQIEKVKATGEESTQAEISCESPFLAKDFYKNGTVMAPDLPEMLDLAGTRSRLASVSADAEVARRKSVPSETVVEDSRTGLPPVTDENHVIVKTDSQLEDLGYCVFNKYTVPLPSPVQDSENLSGESGTFYEGTDDKVRRDLATDLSLIEVKLAAAGRVKDEFSVDKEASAHISGDKSGLSKEFDQEKKANDRLDTVLEKSEEHADSKEHAKKTEEAGDEIETFGLGVTYEQALAKDLSIPTDASSEKAEKGLSSVPEIAEVEPSKKVEQGLDFAVQGQLDVKISDFGQMASGLNIDDRRATELKLEATQDMTPSSKAPQEADAFMGVESGHMKEGTKVSETEVKEKVAKPDLVHQEAVDKEESYESSGEHESLTMESLKADEGKKETSPESSLIQDEIAVKLSVEIPCPPAVSEADLATDERADVQMEFIQGPKEESKETPDISITPSDVAEPLHETIVSEPAEIQSEEEEIEAQGEYDKLLFRSDTLQITDLGVSGAREEFVETCPSEHKGVIESVVTIEDDFITVVQTTTDEGESGSHSVRFAALEQPEVERRPSPHDEEEFEVEEAAEAQAEPKDGSPEAPASPEREEVALSEYKTETYDDYKDETTIDDSIMDADSLWVDTQDDDRSIMTEQLETIPKEEKAEKEARRSSLEKHRKEKPFKTGRGRISTPERKVAKKEPSTVSRDEVRRKKAVYKKAELAKKTEVQAHSPSRKFILKPAIKYTRPTHLSCVKRKTTAAGGESALAPSVFKQAKDKVSDGVTKSPEKRSSLPRPSSILPPRRGVSGDRDENSFSLNSSISSSARRTTRSEPIRRAGKSGTSTPTTPGSTAITPGTPPSYSSRTPGTPGTPSYPRTPHTPGTPKSAILVPSEKKVAIIRTPPKSPATPKQLRLINQPLPDLKNVKSKIGSTDNIKYQPKGGQVQIVTKKIDLSHVTSKCGSLKNIRHRPGGGRVKIESVKLDFKEKAQAKVGSLDNAHHVPGGGNVKIDSQKLNFREHAKARVDHGAEIITQSPGRSSVASPRRLSNVSSSGSINLLESPQLATLAEDVTAALAKQGL

SEQ ID NO: 83880 - protein, 181 aa, Homo sapiens
MSSMSSAEEQFQWQSQDGQKDIEDELTTGLELVDSCIRSLQESGILDPQDYSTGERPSLLSQSALQLNSKPEGSFQYPASYHSNQTLALGETTPSQLPARGTQARATGQSFSQGTTSRAGHLAGPEPAPPPPPPPREPFAPSLGSAFHLPDAPPAAAAAALYYSSSTLPAPPRGGSPLAAP

SEQ ID NO: 83881 - protein, 91 aa, Homo sapiens
MSGSDGGLEEEPELSITLTLRMLMHGKEVGSIIGKKGETVKRIREQSSARITISEGSCPERITTITGSTAAVFHAVSMIAFKLDEDLCAAP

SEQ ID NO: 83882 - protein, 45 aa, Homo sapiens
MYRVPEFYARRKRLGGQTPYLMDQLGLRLGMWYWKDETRTLEFRR

SEQ ID NO: 83883 - protein, 55 aa, Homo sapiens
MALLLSVLRVLLGGFFALVGLAKLSEEISAPVSERMVRDEQQCWGPGCWRLQPLG

SEQ ID NO: 83884 - protein, 81 aa, Homo sapiens
MDLSALRVEEVQNVINAMQKILECPICLELIKEPVSTKCDHIFCKQCLPLTPRLEFSGVIIVHFYLAIWVQAISHLSPSSS

SEQ ID NO: 83885 - protein, 37 aa, Homo sapiens
MEEKDYSEADGLSERTTPSKAQKSPQKIAKKYKSAIC

SEQ ID NO: 83886 - protein, 500 aa, Homo sapiens
MDAPARLLAPLLLLCAQQLRGTRAMNDIGDYVGSNLEISWLPNLDGLIAGYARNFRPGIGGPPVNVALALEVASIDHISEANMEYTMTVFLHQSWRDSRLSYNHTNETLGLDSRFVDKLWLPDTFIVNAKSAWFHDVTVENKLIRLQPDGVILYSIRITSTVACDMDLAKYPMDEQECMLDLESYGYSSEDIVYYWSESQEHIHGLDKLQLAQFTITSYRFTTELMNFKSAGQFPRLSLHFHLRRNRGVYIIQSYMPSVLLVAMSWVSFWISQAAVPARVSLGITTVLTMTTLMVSARSSLPRASAIKALDVYFWICYVFVFAALVEYAFAHFNADYRKKQKAKVKVSRPRAEVRAWGRARDSTAGGPNQDPSAAPAHCGSQLCSLSVGGWSCWSRRGPRMGTPVVQGPGSCTPVLSPVSPTGLRADGREERHCPLLPLCCRRHAGAGHLPPAAPRPGEPDGLLQVGGGGDRGDEEGGGSPLRRPGGHPCPAQAHRRRHH

SEQ ID NO: 83887 - protein, 126 aa, Homo sapiens
MAAATGDPGLSKLQFAPFSSALDVGFWHELTQKKLNEYRLDEAPKDIKGYYYNGDSAGLPARLTLEFSAFDMSAPTPARCCPAIGTLYNTNTLESFKTADKKLLLEQAANEIWESIKSGTALENPV

SEQ ID NO: 83888 - protein, 177 aa, Homo sapiens
MVSDVDANPIWWGKQALKESQFTLSKCIDAVMVLGNSHLFMNRSNKLAVIASHIQESRFLYPGKNGRLGDFFGDPGNPPEFNPSGSKDGKYELLTSANEVIVEEIKDLMTKSDIKGQHTETLLAGSLAKALCYIHRMNKEVKDNQEMKSRILVIKAAEDSALQYMNFMNVIFAAQKQ

SEQ ID NO: 83889 - protein, 86 aa, Homo sapiens
MALSQGLLTFRDVAIEFSQEEWKCLDPAQRTLYRDVMLENYRNLVSLDISSKCMMNTLSSTGQGNTEVIHTGTLQRQASYHIGAFC

SEQ ID NO: 83890 - protein, 70 aa, Homo sapiens
MAAVDSFYLLYREIARSCNCYMEALALVGAWYTARKSITVICDFYSLIRLHFIPRLGSRADLIKQYGRWA

SEQ ID NO: 83891 - protein, 51 aa, Homo sapiens
MRLAGPLRIVVLVVSVGVTWIVVSILLGGPGSGFPRIQQLFTSPESSVTAG

SEQ ID NO: 83892 - protein, 166 aa, Homo sapiens
  MOD_RES (1)..(1): Any amino acid
XRDAQGLCIPCQAGEPGLLVGQINQQDPLRRFDGYVSESATSKKIAHSVFSKGDSAYLSGDVLVMDELGYMYFRDRSGDTFRWRGENVSTTEVEGVLSRLLGQTDVAVYGVAVPGTFKIQKTRLQREGFDPRQTSDRLFFLDLKQGHYLPLNEAVYTRICSGAFAL

SEQ ID NO: 83893 - protein, 408 aa, Homo sapiens
MNKHQKPVLTGQRFKTRKRDEKEKFEPTVFRDTLVQGLNEAGDDLEAVAKFLDSTGSRLDYRRYADTLFDILVAGSMLAPGGTRIDDGDKTKMTNHCVFSANEDHETIRNYAQVFNKLIRRYKYLEKAFEDEMKKLLLFLKAFSETEQTKLAMLSGILLGNGTLPATILTSLFTDSLVKEGIAASFAVKLFKAWMAEKDANSVTSSLRKANLDKRLLELFPVNRQSVDHFAKYFTDAGLKELSDFLRVQQSLGTRKELQKELQERLSQECPIKEVVLYVKEEMKRNDLPETAVIGLLWTCIMNAVEWNKKEELVAEQALKHLKQYAPLLAVFSSQGQSELILLQKVQEYCYDNIHFMKAFQKIVVLFYKADVLSEEAILKWYKEAHVAKGKSVFLDQMKKFVEWLQNA

SEQ ID NO: 83894 - protein, 615 aa, Homo sapiens
  MOD_RES (1)..(1): Any amino acid
XPELENLTVTEVGWDGLRLNWTAADQAYEHFIIQVQEANKVEAARNLTVPGSLRAVDIPGLKAATPYTVSIYGVIQGYRTPVLSAEASTAKEPEIGNLNVSDITPESFNLSWMATDGIFETFTIEIIDSNRLLETVEYNISGAERTAHISGLPPSTDFIVYLSGLAPSIRTKTISATATTEAEPEVDNLLVSDATPDGFRLSWTADEGVFDNFVLKIRDTKKQSEPLEITLLAPERTRDITGLREATEYEIELYGISKGRRSQTVSAIATTAMGSPKEVIFSDITENSATVSWRAPTAQVESFRITYVPITGGTPSMVTVDGTKTQTRLVKLIPGVEYLVSIIAMKGFEESEPVSGSFTTALDGPSGLVTANITDSEALARWQPAIATVDSYVISYTGEKVPEITRTVSGNTVEYALTDLEPATEYTLRIFAEKGPQKSSTITAKFTTDLDSPRDLTATEVQSETALLTWRPPRASVTGYLLVYESVDGTVKEVIVGPDTTSYSLADLSPSTHYTAKIQALNGPLRSNMIQTIFTTIGLLYPFPKDCSQAMLNGDTTSGLYTIYLNGDKAEALEVFCDMTSDGGGWIVFLRRKNGRENFYQNWKAYAAGFGDRRE

SEQ ID NO: 83895 - protein, 100 aa, Homo sapiens
MNHKTCYNPLFNYEDMQEITQHFAVCHVDAPGQQDGAASFPAGYMYPSMDQLAEMLPGVLQQFGLKSIIGMGTGAGAYILTRFALNNPEMVEGLVLINVN

SEQ ID NO: 83896 - protein, 162 aa, Homo sapiens
MSQFKRQRINPLPGGRNFSGTASTSLLGPPPGLLTPPVATELSQNARHLQGGEKQRVFTGIVTSLHDYFGVVDEEVFFQLSVVKGRLPQLGEKVLVKAAYNPGQAVPWNAVKVQTLSNQPLLKSPAPPLLHVAALGQKQGILGAQPQLIFQPHRIPPLFPQK

SEQ ID NO: 83897 - protein, 77 aa, Homo sapiens
VVWWLNLLSIALYLLSGSIIAVAMQRGARLPAEVAGNQGTMRLRNLPQDIQLGCPRSCFEEAARSCSAGHSITSRFS

SEQ ID NO: 83898 - protein, 28 aa, Homo sapiens
MEADKDDTQQILKEHSPDEFIKDEQNKG

SEQ ID NO: 83899 - protein, 127 aa, Homo sapiens
MENWGLVTYRETALLIDPKNSCSSSRQWVALVVGHELAHQWFGNLVTMEWWTHLWLNEGFASWIEYLCVDHCFPEYDIWTQFVSADYTRAQELDALDNSHPIEYYRLSASCHNPESHCLPGQCGPSI

SEQ ID NO: 83900 - protein, 276 aa, Homo sapiens
MSPAEQLKQMAAQQQQRAKLMQQKQQQQQQQQQQQQQQHSNQTSNWSPLGPPSSPYGAAFTAEKPNSPMMYPQAFNNQNPIVPPMANNLQKTTMNNYLPQNHMNMINQQPNNLGTNSLNKQHNILTYGNTKPLTHFNADLSQRMTPPVANPNKNPLMPYIQQQQQQQQQQQQQQQQQQPPPPQLQAPRAHLSEDQKRLLLMKQKGVMNQPMAYAALPSHGQVSVKVTHSSSSSCGAFDCRCVMFYKSTVVGSNCLQKTSLHPQVVARFGVFFFHFS

SEQ ID NO: 83901 - protein, 216 aa, Homo sapiens
  MOD_RES (1)..(1): Any amino acid
XRDRIKLLFFDILVFLSVFLLFLLFLVDIMANNTTSLGSPWPENFWEDLIMSFTVSMAIGLVLGGFIWAVFICLSRRRRASAPISQWSSSRRSRSSYTHGLNRTGFYRHSGCERRSNLSLASLTFQRQASLEQANSFPRKSSFRASTFHPFLQCPPLPVETESQLVTLPSSNISPTISTSHSLSRPDYWSSNSLRVGLSTPPPPAYESIIKAFPDS

SEQ ID NO: 83902 - protein, 324 aa, Homo sapiens
MAPYSLLVTRLQKALGVRQYHVASVLCQRAKVAMSHFEPNEYIHYDLLEKNINIVRKRLNRPLTLSEKIVYGHLDDPASQEIERGKSYLRLRPDRVAMQDATAQMAMLQFISSGLSKVAVPSTIHCDHLIEAQVGGEKDLRRAKDINQEVYNFLATAGAKYGVGFWKPGSGIIHQIILENYAYPGVLLIGTDSHTPNGGGLGGICIGVGGADAVDVMAGIPWELKCPKVIGVKLTGSLSGWSSPKDVILKVAGILTVKGGTGAIVEYHGPGVDSISCTGMATICNMGAEIGATTSVFPYNHRMKKYLSKTGREGNSGNDMDRFC

SEQ ID NO: 83903 - protein, 116 aa, Homo sapiens
MSDKSDLKAELERKKQRLAQIREEKKRKEEERKKKEADMQQKKEPVQDDSDLDRKRRETEALLQSIGISPEPPLVPTPMSPSSKSVSTPSEAGSQDSGDLGPLTRDEALLYSPGWS

SEQ ID NO: 83904 - protein, 157 aa, Homo sapiens
MDTIFLWSLLLLFFGSQASRCSAQKNTEFAVDLYQEVSLSHKDNIIFSPLGITLVLEMVQLGAKGKAQQQIRQTLKQQETSAEKKQEFTFNLANALYLQEGFTVKEQYLHGNKEFFQSAIKLVDFQDAKACAEMISTWVERKTDGKIKDMFSGEEFG

SEQ ID NO: 83905 - protein, 105 aa, Homo sapiens
MWQLLLPTALLLLVSAGMRTDLPKAVVFLEPQWYRVLEKDSVTLKCQGAYSPEDNSTQWFHNESLISSQASSYFIDAATVDDSGEYRCQTNLSTLSDPVQLEVHI

SEQ ID NO: 83906 - protein, 80 aa, Homo sapiens
MAEAEGVPTTPGPASGSTFRGRRDVSGSWERDQQVEAAQRALVEVLGPYEPLLSRVQAALVWERPARSALWCLGLNAAFW

SEQ ID NO: 83907 - protein, 150 aa, Homo sapiens
MLILMTSLAWDPTTVSTVEVLKKIDIPSVFIGESSANSLKDEFTYEKGGHLILVPEFSLPLEYYLIPFLIIVGICLILIVIFMITKFVQDRHRARRNRLRKDQLKKLPVHKFKKGDEYDVCAICLDEYEDGDKLRILPCSHAYHCKCVDP

SEQ ID NO: 83908 - protein, 98 aa, Homo sapiens
MEKCKGTSRMAGTTSADVKMSSSEEVSWISWFCGLRGNEFFCEVDEDYIQDKFNLTGLNEQVPHYRQALDMILDLEPVAFGRAVFQMKNWKTTPTRVT

SEQ ID NO: 83909 - protein, 31 aa, Homo sapiens
TVERGVVSLFGVRSALFVAMNSKGRLYATVK

SEQ ID NO: 83910 - protein, 100 aa, Homo sapiens
MFLPMLLTEGVHQHTALPDRQMYTGDHHVHVTSRGSGNQWPQHLCLAPVQVITCSYHLLSMYRVPGTKLCVLYTFSCNVCDSVGHFIPTLHGKTETTRNN

SEQ ID NO: 83911 - protein, 131 aa, Homo sapiens
MIQEEEWDRDLLLDPAWEKQQRKTFTAWCNSHLRKAGTQIENIEEDFRNGLKLMLLLEVISGERLPKPDRGKMRFHKIANVNKALDYIASKGVKLVSIGAEEIVDGNVKMTLGMIWTIILRFAIQDISVEG

SEQ ID NO: 83912 - protein, 491 aa, Homo sapiens
MVARPLHSTEGQPESLGKMFSVQLSLGEQTWESEGSSIKKAQQAVANKALTESTLPKPVQKPPKSNVNNNPGSITPTVELNGLAMKRGEPAIYRPLDPKPFPNYRANYNFRGMYNQRYHCPVPKIFYVQLTVGNNEFFGEGKTRQAARHNAAMKALQALQNEPIPERSPQNGESGKDVDDDKDANKSEISLVFEIALKRNMPVSFEVIKESGPPHMKSFVTRVSVGEFSAEGEGNSKKLSKKRAATTVLQELKKLPPLPVVEKPKLFFKKRPKTIVKAGPEYGQGMNPISRLAQIQQAKKEKEPDYVLLSERGMPRRREFVMQVKVGNEVATGTGPNKKIAKKNAAEAMLLQLGYKASTNLQDQLEKTGENKGWSGPKPGFPEPTNNTPKGILHLSPDVYQEMEASRHKVISGTTLGYLSPKDMNQPSSSFFSISPTSNSSATIARELLMNGTSSTAEAIGLKGSSPTPPCSPVQPSKQLEYLARIQGFQV

SEQ ID NO: 83913 - protein, 87 aa, Homo sapiens
  MOD_RES (1)..(1): Any amino acid
XGYGGGGPGYSGGSRGYGSGGQGYGNQGSGYGGSGSYDSYNNGGGGGFGGGSGRKFWRQKLWPLWRWRPILCKTTKPRWLWRFQQQQ

SEQ ID NO: 83914 - protein, 74 aa, Homo sapiens
MGARLGRRAGPEAGSEAGAAAGCGPAPYERRVRWLREIQSTLRERRPERARQLLRLLRQDPGDSGPWREDPGLV

SEQ ID NO: 83915 - protein, 302 aa, Homo sapiens
MSGQRGDWTSALWQLLFRVLSPLPAGNALASLALEVQARLVKSALCSQGYPRLALAQLPEDGSQGSRELLLALSWLLARGPVPEQMLAQARVPLGDEMTVCQCEALASPGPPAPHMEAEGPVDVRHVQWLMGKLRFRWRQLVSSQQEQCALLSKIHLYTRGCHSDQSLSHLSVTEAEMLRDPEGGQQLLRTLERENQRLEAVLAWRRSELVFWRWMDTVLGTCAPEVPAAASQPTFLPWVPERGGGELDLVVRELQALEEELREAAERRRAAWEAKAGGCGRGPEWSAARRASREAVEKELG

SEQ ID NO: 83916 - protein, 137 aa, Homo sapiens
LKDRGFCVEVNTAFEDFAHVISFDKRAAALDAGNIKLTFNSLLEKAEAREREREKEEARRMRRREAAFRSMLRQAVPALELGTAWEEVRERFVCDSAFEQITLESERIRLFREFLQVLETECQHLHTKGRKHGRKGL

SEQ ID NO: 83917 - protein, 537 aa, Homo sapiens
SPLRRTFKSKVLAHYPQNIEWNPFDQDAVNMLCMPKGLSFRTQTDNKDPQFHSFIITREDGSRTYGFVLTFYEEVTSKQICTAMQTLYQMHNAEHYSSVYASSSCSMDSLASSLDEGDTTSLLKLQRYNSYDISRDTLYVSKSICLITPLPFMQACKKFLIQLYKAVTSQQPPPLPLESYIHNILYEVPLPPPGRSLKFYGVYEPVICQRPGPSELPLSDYPLREAFELLGLENLVQVFTCVLLEMQILLYSQDYQRLMTVAEGITTLLFPFQWQHVYVPILPASLLHFLDAPVPYLMGLQSKEGTDRSKLELPQEANLCFVDIDNHFIELPEEFPQFPNKVDFIQELSEVLVQFGIPPEGSLHCSESTSKLKNMVLKDLVNDKKNGNVCTNNISMYELLKGNETIARLQALAKRTGVAVEKMDLSASLGEKDKDLKLHCEEAELRDYQLNVQLREVFANRFTQMFADYEAFVIQTAQDMESWLTNREQMQNFDKVKRTIVFLLWLLVALLLILTFLNFLFFCAYAYPYIIDFVNLF

SEQ ID NO: 83918 - protein, 202 aa, Homo sapiens
  MOD_RES (1)..(1): Any amino acid
XGSWGTVCDDSWDTNDANVVCRQLGCGWAMSAPGNARFGQGSGPIVLDDVRCSGHESYLWSCPHNGWLSHNCGHSEDAGVICSDTWPTSHASTAGSESSLALRLVNGGDRCQGRVEVLYRGSWGTVCDDYWDTNDANVVCRQLGCGWAMSAPGNARFGQGSGPIVLDDVRCSGHESYLWSCPHNGWLSHNCGHHEDAGVICS

SEQ ID NO: 83919 - protein, 104 aa, Homo sapiens
  MOD_RES (1)..(1): Any amino acid
XFQKIRRQMEAPGAPPRTLTWEAMEQIRWHFSTPLEPVPRRSKGCAASPWLTQWPRPRRSQKQQPQPQGLGESTSPHMGARGQCQRCGTGRRRRSSGWPRTGRR

SEQ ID NO: 83920 - protein, 147 aa, Homo sapiens
MAAACGPGAAGYCLLLGLHLFLLTAGPALGWNDPALTLHYDRYTTSRRLDPIPQLKCVGGTAGCDSYTPKVIQCQNKGWDGYDVQWECKTDLDIAYKFGKTVVSCEGYESSEDQYVLRGSCGLEYNLDYTELGLQKLKESGKQHGFA

SEQ ID NO: 83921 - protein, 308 aa, Homo sapiens
MAMIELGFGRQNFHPLKRKSSLLLKLIAVVFAVLLFCEFLIYYLAIFQCNWPEVKTTASDGEQTTREPVLKAMFLADTHLLGEFLGHWLDKLRREWQMERAFQTALWLLQPEVVFILGDIFDEGKWSTPEAWADDVERFQKMFRHPSHVQLKVVAGNHDIGFHYEMNTYKVERFEKVFSSERLFSWKGINFVMVNSVALNGDGCGICSETEAELIEVSHRLNCSREARGSSRCGPGPLLPTSAPVLLQHYPLYRRSDANCSGEDAAPAEERDIPFKENYDVLSREASQKLLWWLQPRLVLSGHTHSAC

SEQ ID NO: 83922 - protein, 108 aa, Homo sapiens
  MOD_RES (1)..(1): Any amino acid
XDKEHVSPIATEKASVNAELLPRFRSPISETQVPRPENEALRESGSQKARVGTKSPQRKSIMEEILVEESPDVDSTKSPWEPDGLPLLEWNLCLEDFRKNGAHDPARQ

SEQ ID NO: 83923 - protein, 130 aa, Homo sapiens
MDTMMLNVRNLFEQLVRRVEILSEGNEVQFIQLAKDFEDFRKKWQRTDHELGKYKDLLMKAETERSALDVKLKHARNQVDVEIKRRQRAEADCEKLERQIQLIREMLMCDTSGSIQLSEEQKSALAFLNR

SEQ ID NO: 83924 - protein, 156 aa, Homo sapiens
MRRFLLLYATQQGQAKAIAEEICEQAVVHGFSADLHCISESDKYDLKTETAPLVVVVSTTGTGDPPDTARKFVKEIQNQTLPVDFFAHLRYGLLGLGDSEYTYFCNGGKIIDKRLQELGARHFYDTGHADDCVGLELVVEPWIAGLWPALRKHFRS

SEQ ID NO: 83925 - protein, 130 aa, Homo sapiens
MSWIKEGELSLWERFCANIIKAGPMPKHIAFIMDGNRRYAKKCQVERQEGHSQGFNKLAETLRWCLNLGILEVTVYAFSIENFKRSKSEVDGLMDLARQKFSRLMEEKEKLQKHGVCIRVLGDLHLLPLD

SEQ ID NO: 83926 - protein, 354 aa, Homo sapiens
MVLQNEQRKSRQVVFHLSWGLSLQLCHIFSLRMKVMLEDGRSKGFGFVCFSSPEEATKAVTEMNGRIVGSKPLYVALAQRKEERKAHLTNQYMQRVAGMRALPANAILNQFQPAAGGYFVPAVPQAQGRPPYYTPNQLAQMRPNPRWQQGGRPQGFQGMPSAIRQSGPRPTLRHLAPTGSECPDRLAMDFGGAGAAQQGLTDSCQSGGVPTAVQNLAPRAAVAAAAPRAVAPYKYASSVRSPHPAIQPLQAPQPAVHVQGQEPLTASMLAAAPPQEQKQMLGERLFPLIQTMHSNLAGKITGMLLEIDNSELLHMLESPESLRSKVDEAVAVLQAHHAKKEAAQKVGAVAAATS

SEQ ID NO: 83927 - protein, 1254 aa, Homo sapiens
  MOD_RES (1)..(1): Any amino acid
XRVAREIVETERAYVRDLRSIVEDYLGPLLDGGVLGLSVEQVGTLFANIEDIYEFSSELLEDLENSSSAGGIAECFVQRSEDFDIYTLYCMNYPSSLALLRELSLSPPAALWLQERQAQLRHSLPLQSFLLKPVQRILKYHLLLQELGKHWAEGPGTGGREMVEEAIVSMTAVAWYINDMKRKQEHAARLQEVQRRLGGWTGPELSAFGELVLEGAFRGGGGGGPRLRGGERLLFLFSRMLLVAKRRGLEYTYKGHIFCCNLSVSESPRDPLGFKVSDLTIPKHRHLLQAKNQEEKRLWIHCLQRLFFENHPASIPAKAKQVLLENSLHCAPKSKPVLEPLTPPLGSPRPRDARSFTPGRRNTAKPGFKHAGSEGELYPPESQPPVSGSAPPEDLEDAGPPTLDPSGTSITEEILELLNQRGLRDPGPSTHDIPKFPGDSQVPGDSETLTFQALPSRDSSEEEEEEEEGLEMDERGPSPLHVLEGLESSIAAEMPSIPCLTKIPDVPNLPEIPSRCEIPEGSRLPSLSDISDVFEMPCLPAIPSVPNTPSLSSTPTLSCDSWLQGPLQEPAEAPATRRELFSGSNPGKLGEPPSGGKAGPEEDEEGVSFTDFQPQDVTQHQGFPDELAFRSCSEIRSAWQALEQGQLARPGFPEPLLILEDSDLGGDSGSGKAGAPSSERTASRVRELARLYSERIQQMQRAETRASANAPRRRPRVLAQPQPSPCLPQEQAEPGLLPAFGHVLVCELAFPLTCAQESVPLGPAVWVQAAIPLSKQGGSPDGQGLHVSNLPKQDLPGIHVSAATLLPEQGGSRHVQAPAATPLPKQEGPLHLQVPALTTFSDQGHPEIQVPATTPLPEHRSHMVIPAPSTAFCPEQGHCADIHVPTTPALPKEICSDFTVSVTTPVPKQEGHLDSESPTNIPLTKQGGSRDVQGPDPVCSQPIQPLSWHGSSLDPQGPGDTLPPLPCHLPDLQIPGTSPLPAHGSHLDHRIPANAPLSLSQELPDTQVPATTPLPLPQVLTDIWVQALPTSPKQGSLPDIQGPAAAPPLPEPSLTDTQVQKLTPSLEQKSLIDAHVPAATPLPERGGSLDIQGLSPTPVQTTMVLSKPGGSLASHVARLESSDLTPPHSPPPSSRQLLGPNAAALSRYLAASYISQSLARRQGPGGGAPAASRGSWSSAPTSRASSPPPQPQPPPPPARRLSYATTVNIHVGGGGRLRPAKAQVRLNHPALLASTQESMGLHRAQGAPDAPFHM

SEQ ID NO: 83928 - protein, 4408 aa, Homo sapiens
MSEPGGGGGEDGSAGLEVSAVQNVADVSVLQKHLRKLVPLLLEDGGEAPAALEAALEEKSALEQMRKFLSDPQVHTVLVERSTLKEDVGDEGEEEKEFISYNINIDIHYGVKSNSLAFIKRTPVIDADKPVSSQLRVLTLSEDSPYETLHSFISNAVAPFFKSYIRESGKADRDGDKMAPSVEKKIAELEMGLLHLQQNIEIPEISLPIHPMITNVAKQCYERGEKPKVTDFGDKVEDPTFLNQLQSGVNRWIREIQKVTKLDRDPASGTALQEISFWLNLERALYRIQEKRESPEVLLTLDILKHGKRFHATVSFDTDTGLKQALETVNDYNPLMKDFPLNDLLSATELDKIRQALVAIFTHLRKIRNTKYPIQRALRLVEAISRDLSSQLLKVLGTRKLMHVAYEEFEKVMVACFEVFQTWDDEYEKLQVLLRDIVKRKREENLKMVWRINPAHRKLQARLDQMRKFRRQHEQLRAVIVRVLRPQVTAVAQQNQGEVPEPQDMKVAEVLFDAADANAIEEVNLAYENVKEVDGLDVSKEGTEAWEAAMKRYDERIDRVETRITARLRDQLGTAKNANEMFRIFSRFNALFVRPHIRGAIREYQTQLIQRVKDDIESLHDKFKVQYPQSQACKMSHVRDLPPVSGSIIWAKQIDRQLTAYMKRVEDVLGKGWENHVEGQKLKQDGDSFRMKLNTQEIFDDWARKVQQRNLGVSGRIFTIESTRVRGRTGNVLKLKVNFLPEIITLSKEVRNLKWLGFRVPLAIVNKAHQANQLYPFAISLIESVRTYERTCEKVEERNTISLLVAGLKKEVQALIAEGIALVWESYKLDPYVQRLAETVFNFQEKVDDLLIIEEKIDLEVRSLETCMYDHKTFSEILNRVQKAVDDLNLHSYSNLPIWVNKLDMEIERILGVRLQAGLRAWTQVLLGQAEDKAEVDMDTDAPQVSHKPGGEPKIKNVVHELRITNQVIYLNPPIEECRYKLYQEMFAWKMVVLSLPRIQSQRYQVGVHYELTEEEKFYRNALTRMPDGPVALEESYSAVMGIVSEVEQYVKVWLQYQCLWDMQAENIYNRLGEDLNKWQALLVQIRKARGTFDNAETKKEFGPVVIDYGKVQSKVNLKYDSWHKEVLSKFGQMLGSNMTEFHSQISKSRQELEQHSVDTASTSDAVTFITYVQSLKRKIKQFEKQVELYRNGQRLLEKQRFQFPPSWLYIDNIEGEWGAFNDIMRRKDSAIQQQVANLQMKIVQEDRAVESRTTDLLTDWEKTKPVTGNLRPEEALQALTIYEGKFGRLKDDREKCAKAKEALELTDTGLLSGSEERVQVALEELQDLKGVWSELSKVWEQIDQMKEQPWVSVQPRKLRQNLDALLNQLKSFPARLRQYASYEFVQRLLKGYMKINMLVIELKSEALKDRHWKQLMKRLHVNWVVSELTLGQIWDVDLQKNEAIVKDVLLVAQGEMALEEFLKQIREVWNTYELDLVNYQNKCRLIRGWDDLFNKVKEHINSVSAMKLSPYYKVFEEDALSWEDKLNRIMALFDVWIDVQRRWVYLEGIFTGSADIKHLLPVETQRFQSISTEFLALMKKVSKSPLVMDVLNIQGVQRSLERLADLLGKIQKALGEYLERERSSFPRFYFVGDEDLLEIIGNSKNVAKLQKHFKKMFAGVSSIILNEDNSVVLGISSREGEEVMFKTPVSITEHPKINEWLTLVEKEMRVTLAKLLAESVTEVEIFGKATSIDPNTYITWIDKYQAQLVVLSAQIAWSENVETALSSMGGGGDAAPLHSVLSNVEVTLNVLADSVLMEQPPLRRRKLEHLITELVHQRDVTRSLIKSKIDNAKSFEWLSQMRFYFDPKQTDVLQQLSIQMANAKFNYGFEYLGVQDKLVQTPLTDRCYLTMTQALEARLGGSPFGPAGTGKTESVKALGHQLGRFVLVFNCDETFDFQAMGRIFVGLCQVGAWGCFDEFNRLEERMLSAVSQQVQCIQEALREHSNPNYDKTSAPITCELLNKQVKVSPDMAIFITMNPGYAGRSNLPDNLKKLFRSLAMTKPDRQLIAQVMLYSQGFRTAEVLANKIVPFFKLCDEQLSSQSHYDFGLRALKSVLVSAGNVKRERIQKIKREKEERGEAVDEGEIAENLPEQEILIQSVCETMVPKLVAEDIPLLFSLLSDVFPGVQYHRGEMTALREELKKVCQEMYLTYGDGEEVGGMWVEKVLQLYQITQINHGLMMVGPSGSGKSMAWRVLLKALERLEGVEGVAHIIDPKAISKDHLYGTLDPNTREWTDGLFTHVLRKIIDSVRGELQKRQWIVFDGDVDPEWVENLNSVLDDNKLLTLPNGERLSLPPNVRIMFEVQDLKYATLATVSRCGMVWFSEDVLSTDMIFNNFLARLRSIPLDEGEDEAQRRRKGKEDEGEEAASPMLQIQRDAATIMQPYFTSNGLVTKALEHAFQLEHIMDLTRLRCLGSLFSMLHQACRNVAQYNANHPDFPMQIEQLERYIQRYLVYAILWSLSGDSRLKMRAELGEYIRRITTVPLPTAPNIPIIDYEVSISGEWSPWQAKVPQIEVETHKVAAPDVVVPTLDTVRHEALLYTWLAEHKPLVLCGPPGSGKTMTLFSALRALPDMEVVGLNFSSATTPELLLKTFDHYCEYRRTPNGVVLAPVQLGKWLVLFCDEINLPDMDKYGTQRVISFIRQMVEHGGFYRTSDQTWVKLERIQFVGACNPPTDPGRKPLSHRFLRHVPVVYVDYPGPASLTQIYGTFNRAMLRLIPSLRTYAEPLTAAMVEFYTMSQERFTQDTQPHYIYSPREMTRWVRGIFEALRPLETLPVEGLIRIWAHEALRLFQDRLVEDEERRWTDENIDTVALKHFPNIDREKAMSRPILYSNWLSKDYIPVDQEELRDYVKARLKVFYEEELDVPLVLFNEVLDHVLRIDRIFRQPQGHLLLIGVSGAGKTTLSRFVAWMNGLSVYQIKVHRKYTGEDFDEDLRTVLRRSGCKNEKIAFIMDESNVLDSGFLERMNTLLANGEVPGLFEGDEYATLMTQCKEGAQKEGLMLDSHEELYKWFTSQVIRNLHVVFTMNPSSEGLKDRAATSPALFNRCVLNWFGDWSTEALYQVGKEFTSKMDLEKPNYIVPDYMPVVYDKLPQPPSHREAIVNSCVFVHQTLHQANARLAKRGGRTMAITPRHYLDFINHYANLFHEKRSELEEQQMHLNVGLRKIKETVDQVEELRRDLRIKSQELEVKNAAANDKLKKMVKDQQEAEKKKVMSQEIQEQLHKQQEVIADKQMSVKEDLDKVEPAVIEAQNAVKSIKKQHLVEVRSMANPPAAVKLALESICLLLGESTTDWKQIRSIIMRENFIPTIVNFSAEEISDAIREKMKKNYMSNPSYNYEIVNRASLACGPMVKWAIAQLNYADMLKRVEPLRNELQKLEDDAKDNQQKANEVEQMIRDLEASIARYKEEYAVLISEAQAIKADLAAVEAKVNRSTALLKSLSAERERWEKTSETFKNQMSTIAGDCLLSAAFIAYAGYFDQQMRQNLFTTWSHHLQQANIQFRTDIARTEYLSNADERLRWQASSLPADDLCTENAIMLKRFNRYPLIIDPSGQATEFIMNEYKDRKITRTSFLDDAFRKNLESALRFGNPLLVQDVESYDPVLNPVLNREVRRTGGRVLITLGDQDIDLSPSFVIFLSTRDPTVEFPPDLCSRVTFVNFTVTRSSLQSQCLNEVLKAERPDVDEKRSDLLKLQGEFQLRLRQLEKSLLQALNEVKGRILDDDTIITTLENLKREAAEVTRKVEETDIVMQEVETVSQQYLPLSTACSSIYFTMESLKQIHFLYQYSLQFFLDIYHNVLYENPNLKGVTDHTQRLSIITKDLFQVAFNRVARGMLHQDHITFAMLLARIKLKGTVGEPTYDAEFQHFLRGNEIVLSAGSTPRIQGLTVEQAEAVVRLSCLPAFKDLIAKVQADEQFGIWLDSSSPEQTVPYLWSEETPATPIGQAIHRLLLIQAFRPDRLLAMAHMFVSTNLGESFMSIMEQPLDLTHIVGTEVKPNTPVLMCSVPGYDASGHVEDLAAEQNTQITSIAIGSAEGFNQADKAINTAVKSGRWVMLKNVHLAPGWLMQLEKKLHSLQPHACFRLFLTMEINPKVPVNLLRAGRIFVFEPPPGVKANMLRTFSSIPVSRICKSPNERARLYFLLAWFHAIIQERLRYAPLGWSKKYEFGESDLRSACDTVDTWLDDTAKGRQNISPDKIPWSALKTLMAQSIYGGRVDNEFDQRLLNTFLERLFTTRSFDSEFKLACKVDGHKDIQMPDGIRREEFVQWVELLPDTQTPSWLGLPNNAERVLLTTQGVDMISKMLKMQMLEDEDDLAYAETEKKTRTDSTSDGRPAWMRTLHTTASNWLHLIPQTLSHLKRTVENIKVL

SEQ ID NO: 83929 - protein, 287 aa, Homo sapiens
MAEKILEKLDVLDKQAEIILARRTKINRLQSEGRKTTMAIPLTFDFQLEFEEALATSASKAISKIKEDKSCSITKSKMHVSFKCEPEPRKSNFEKSNLRPFFIQTNVKNKESESTEPVEEHLKSRSIRPYLYLKDTTEMENAGPLNVLYSQHRQACRRSLGSTDFSPMFNIQSNAHKKEKDSTLFTAQIEKKPRKPLDSVGLLEGDRNKRKKSPQMNDFNIKENKSVRNYQLSKYRSVRKKSLLPLCFEDELKNPHAKIVNVSPTKTVTSHMEQKDTNPIIFHDTEY

SEQ ID NO: 83930 - protein, 213 aa, Homo sapiens
MANGGGGGGGSSGGGGGGGGSSLRMSSNIHANHLSLDASSSSSSSSSSSSSSSSSSSSSSVHEPKMDALIIPVTMEVPCDSRGQRMWWAFLASSMVTFFGGLFIILLWRTLKYLWTVCCHCGGKTKGCWRLRLGPGSGTHRLGCRGAGWGQPTQRGRRKLGAAGCVFCTAHLPGLGSWRWARGSTSAHTLGTCWGDEFVGSERREKSFGQGRE

SEQ ID NO: 83931 - protein, 954 aa, Homo sapiens
MSAYYRNNWSEEDPDYPDYSGSQNRTQGYLKTQGYPDVPGPLNNPDYPGTRSNPYSVASRTRPDYPGSLAEPNYPRSLSNPDYSGTRSNAYSAASRTSPDHPTSLPEPDYSEFQSHPYHRASSRQPDYPGSQRNPDFAGSSSSGNYAGSRTHPDHFGSLEPDYPGAQSNSDHPGPRANLNHPGSRKNLEHTSFRINPYADSLGKPDYPGADIQPNSPPFFGEPDYPSAEDNQNLPSTWREPDYSDAENGHDYGSSETPKMTRGVLSRTSSIQPSFRHRSDDPVGSLWGENDYPEGIEMASMEMANSYGHSLPGAPGSGYVNPAYVGESGPVHAYGNPPLSECDWHKSPQGQKLIASLIPMTSRDRIKAIRNQPRTMEEKRNLRKIVDKEKSKQTHRILQLNCCIQCLNSISRAYRRSKNSLSEILNSISLWQKTLKIIGGKFGTSVLSYFNFLRWLLKFNIFSFILNFSFIIIPQFTVAKKNTLQFTGLEFFTGVGYFRDTVMYYGFYTNSTIQHGNSGASYNMQLAYIFTIGACLTTCFFSLLFSMAKYFRNNFINPHIYSGGITKLIFCWDFTVTHEKAVKLKQKNLSTEIRFLKTHSNPGAVLLLPFVVSCINLAVPCIYSMFRLVERYEMPRHEVYVLLIRNIFLKISIIGILCYYWLNTVALSGEECWETLIGQDIYRLLLMDFVFSLVNSFLGEFLRRIIGMQLITSLGLQEFDIARNVLELIYAQTLVWIGIFFCPLLPFIQMIMLFIMFYSKNISLMMNFQPPSKAWRASQMMTFFIFLLFFPSFTGVLCTLAITIWRLKPSADCGPFRGLPLFIHSIYSWIDTLSTRPGYLWVVWIYRNLIGSVHFFFILTLIVLIITYLYWQITEGRKIMIRLLHEQIINEGKDKMFLIEKLIKLQDMEKKANPSSLVLERREVEQQGFLHLGEHDGSLDLRSRRSVQEGNPRA

SEQ ID NO: 83932 - protein, 99 aa, Homo sapiens
VPSAQSPGVHADADQVQNLAVRNQQASAQGPQMQGSTQKAIPPGASPVSSLSQASSQALAVAQASSGATNQSLNLSQAGGGSGNSIPGSMGPGGEVGFF

SEQ ID NO: 83933 - protein, 214 aa, Homo sapiens
MGRAGAAAVIPGLALLWAVGLGSAAPSPPRLRLSFQELQAWHGLQTFSLERTCCYQALLVDEERGRLFVGAENHVASLNLDNISKRAKKLAWPAPVEWREECNWAGKDIGTECMNFVKLLHAYNRTHLLACGTGAFHPTCAFVEVGHRAEEPVLRLDPGRIEDGKGKSPYDPRHRAASVLVGEELYSGVAADLMGRDFTIFRSLGQRPSLRTEP

SEQ ID NO: 83934 - protein, 445 aa, Homo sapiens
MTVWILLLLSLYPGFTSQKSDDDYEDYASNKTWVLTPKVPEGDVTVILNNLLEGYDNKLRPDIGVKPTLIHTDMYVNSIGPVNAINMEYTIDIFFAQTWYDRRLKFNSTIKVLRLNSNMVGKIWIPDTFFRNSKKADAHWITTPNRMLRIWNDGRVLYTLRLTIDAECQLQLHNFPMDEHSCPLEFSSYGYPREEIVYQWKRSSVEVGDTRSWRLYQFSFVGLRNTTEVVKTTSGDYVVMSVYFDLSRRMGYFTIQTYIPCTLIVVLSWVSFWINKDAVPARTSLGITTVLTMTTLSTIARKSLPKVSYVTAMDLFVSVCFIFVFSALVEYGTLHYFVSNRKPSKDKDKKKKNPAPTIDIRPRSATIQMNNATHLQERDEEYGYECLDGKDCASFFCCFEDCRTGAWRHGRIHIRIAKMDSYARIFFPTAFCLFNLVYWVSYLYL

SEQ ID NO: 83935 - protein, 88 aa, Homo sapiens
MTALSSENCSFQYQLRQTNQPLDVNYLLFLIILGKILLNILTLGMRRKNTCQNFMEYFCISLAFVDLLLLVNISIILYFRDFVLLSIR

SEQ ID NO: 83936 - protein, 158 aa, Homo sapiens
MATQAYTELQAAPPPSQPPQAPPQAQPQPPPPPPPAAPQPPQPPTAAATPQPQYVTELQSPQPQAQPPGGQKQYVTELPAVPAPSQPTGAPTPSPAPQQYIVVTVSEGAMRASETVSEASPGSTASQTGVPTQVVQQVQGTQQMCTAAARHPTTPGLP

SEQ ID NO: 83937 - protein, 281 aa, Homo sapiens
MAAATELNRPSSGDRNLERRCRPNLSREVLYEIFRSLHTLVGQLDLRDDVVKITIDWNKLQSLSAFQPALLFSALEQHILYLQMELCCSQPFLAKLQSPIKEENTTAVEEIGRTEMGNKNEVNDKFSIGDLQEEEKHKESDLRDVKKTQIHFDPEVVQIKAGKAEIDRRISAFIERKQAEINENNVREFCNVIDCNQENSCARTDAIFTPYPGFKSHVKVSRVVNTYGPQTRPEGIPGSGHKPNSMLRDCGNQAVEERLQNIEAHLRLQTGGPVPRDIYQR

SEQ ID NO: 83938 - protein, 874 aa, Homo sapiens
MFKTVSKQHAQRHFSGISVLDRFKCSGSEKMSPSIKNLDCFSPMLCHCKVACSNSTISLMFGCKKYRYQDEDTPPQEHISPQITNEVIGPELVHVSEKNLSEIENVHGFVSHSHISPIKPTEAVLPSPPTVPVIPVLPVPAENTVILPTIPQANPPPVLVNTDSLETPTYVNGTDADYEYEEITLERGNSGLGFSIAGGTDNPHIGDDSSIFITKIITGGAAAQDGRLRVNDCILRVNEVDVRDVTHSKAVEALKEAGSIVRLYVKRRKPVSEKIMEIKLIKGPKGLGFSIAGGVGNQHIPGDNSIYVTKIIEGGAAHKDGKLQIGDKLLAVNNVCLEEVTHEEAVTALKNTSDFVYLKVAKPTSMYMNDGYAPPDITNSSSQPVDNHVSPSSFLGQTPASPARYSPVSKAVLGDDEITREPRKVVLHRGSTGLGFNIVGGEDGEGIFISFILAGGPADLSGELRKGDRIISVNSVDLRAASHEQAAAALKNAGQAVTIVAQYRPEEYSRFEAKIHDLREQMMNSSISSGSGSLRTSQKRSLYVRALFDYDKTKDSGLPSQGLNFKFGDILHVINASDDEWWQARQVTPDGESDEVGVIPSKRRVEKKERARLKTVKFNSKTRDKGEIPDDMGSKGLKHVTSNASDSESSYLILITDEYGCSKGGQEEYVLSYEPVNQQEVNYTRPVIILGPMKDRINDDLISEFPDKFGSCVPHTTRPKRDYEVDGRDYHFVTSREQMEKDIQEHKFIEAGQYNNHLYGTSVQSVREVAEKGKHCILDVSGNAIKRLQIAQLYPISIFIKPKSMENIMEMNKRLTEEQARKTFERAMKLEQEFTEHFTAIVQGDTLEDIYNQVKQIIEEQSGSYIWVPAKEKL

SEQ ID NO: 83939 - protein, 77 aa, Homo sapiens
MDCSADTMTNRLLQRSRSSLPVDDTTKTIAKRLEAYYRASIPVIAYYETKTQLHKINAEGTPEDVFLQLCTAIDSIF

SEQ ID NO: 83940 - protein, 134 aa, Homo sapiens
MAAFRDIEEVSQGLLSLLGANRAEAQQRRLLGRHEQVVERLLETQDGAEKQLRGLQTRGMFLASGGKWNHLLSALLGEGQTLGSLLLSTLQRSSPWRRKWPRAFSMRRSRCTREAWSCSSWKLGFRRLGRRTPV

SEQ ID NO: 83941 - protein, 174 aa, Homo sapiens
MAQLCGLRRSRAFLALLGSLLLSGVLAADRERSIHDFCLVSKVVGRCRASMPRWWYNVTDGSCQLFVYGGCDGNSNNYLTKEECLKKCATVTAPRRQDSEDHSSDMFNYEEYCTANAVTGPCRASFPRWYFDVERNSCNNFIYGGCRGNKNSYRSEEACMLRCFRQQENPPLPL

SEQ ID NO: 83942 - protein, 67 aa, Homo sapiens
  MOD_RES (1)..(1): Any amino acid
XILKEVVTETLKKHSITETHECFTACSQRLFEISKFYLKDLKTSRGLFEEMKKTANNNAVQGIPCSC

SEQ ID NO: 83943 - protein, 113 aa, Homo sapiens
MLSSFNEWFWQDRFWLPPNVTWTELEDRDGRVYPHPQDLLAALPLALVLLAMRLAFERFIGLPLSRWLGVRDQTRRQVKPNATLEKHFLTEGHRPKEPQLSLLAAQCGLTLQQ

SEQ ID NO: 83944 - protein, 63 aa, Homo sapiens
MVVLRSSLELHNHSAASATGSLDLSSDFLSLEHIGRRRLRSAGAAQKKPAATTAKAGVRWVIS

SEQ ID NO: 83945 - protein, 279 aa, Homo sapiens
MMNRTTPDQELVPASEPVWERPWSVEEIRRSSQSWSLAADAGRVYDEEVEEPVLKAEAEKTEQEKTREQKEVDLIPKVQEAVNYGLQVLDSAFEQLDIKAGNSDSEEDDANGRVELILEPKDLYIDRPLPYLIGSKLFMEQEDVGLGELSSEEGSVGSDRGSIVDTEEEKEEEESDEDFAHHSDNEQNQHTTQMSDEEEDDDGCDLFADSEKEEEDIEDIEENTRPKRSRPTSFADELAARIKGDAMGRVDEEPTTLPSGEAKPRKTLKEKKERRTPSD

SEQ ID NO: 83946 - protein, 229 aa, Homo sapiens
MSKPEDLKVVKNCANTTRSFCDLTDEWRSTHEAYVTVLEGFSGNTTLFSCSHNFWLAIDMSFEPPEFEIVGFTNHINVMVKFPSIVEEELQFDLSLVIEEQSEGIVKKHKPEIKGNMSGNFTYIIDKLIPNTNYCVSVYLEHSDEQAVIKSPLKCTLLPPGQESESAESAKIGGIITVFLIALVLTSTIVTLKWIGYICLRNSLPKVLNFHNFLAWPFPNLPPLEAMDM

SEQ ID NO: 83947 - protein, 361 aa, Homo sapiens
MATLNSASTTGTTPSPGHNAPSLPSDTFSSSTPSDPVTKDPPAASSTSENMRSSEPGGQLLESGCGLVPPKEIGEPQEGPDCGHFPPNDPGVEKDKEQEEEEEGLPPMDLSNHLFFTAGGEAYLVAKLSLPGGSELLLPKGFPWGEAGIKEEPSLPFLAYPPPSHLTALHIQHGFDPIQGFSSSDQILSHDTSAPSPAACEERHGAFWSYQLAPNPPGDPKDGPMGNSGGNHVAVFWLCLLCRLGFSKPQAFMDHTQSHGVKLTPAQYQGLSGSPAVLQEGDEGCKALISFLEPKLPARPSSDIPLDNSSTVNMEANVAQTEDGPPEAEVQALILLDEEVMALSPPSPPTATWDPSPTQAK

SEQ ID NO: 83948 - protein, 180 aa, Homo sapiens
MNVNQSVPPVPPFGQPQPIYPGYHQSSYGGQSGSTAPAIPYGAYNGPVPGYQQTPPQGCLGLSHLGPHWPLWATSHLCFSPMALPRQVHRWLRSCLECRSAVLWPQPLLLQGWALAHQHRWLQPQEVSLTLVCMAPILRARLLPLARPKVILGSRLPSDLPHHRPPASHPQLQGVLGCLR

SEQ ID NO: 83949 - protein, 114 aa, Homo sapiens
KEDKDEKKKGEDEDKGPPCGPVNCNEKIVVLLQRLKPEIKDVIEQLNLVTTWLQLQIPRIEDGNNFGVAVQEKVFELMTSLHTKLEGFHTQISKYFSERGDAVTKAAKQPHVVG

SEQ ID NO: 83950 - protein, 353 aa, Homo sapiens
  MOD_RES (1)..(1): Any amino acid
XELLRAQRELGELIPLRQKVAEQERTAQQLRAEKASYAEQLSMLKKAHGLLAEENRGLGERANLGRQFLEVELDQAREKYVQELAAVRADAETRLAEVQREAQSTARELEVMTAKYEGAKVKVLEERQRFQEERQKLTAQVEELSKKLADSDQASKVQQQKLKAVQAQGGESQQEAQRLQAQLNELQAQLSQKEQAAEHYKLQMEKAKTHYDAKKQQNQELQEQLRSLEQLQKENKELRAEAERLGHELQQAGLKTKEAEQTCRHLTAQVRSLEAQVAHADQQLRDLGKFQVATDALKSREPQAKPQLDLSIDSLDLSCEEGTPLSITRSGGSLPPYVCLWSACCLSGCILVR

SEQ ID NO: 83951 - protein, 147 aa, Homo sapiens
MSFDVENGPSPGRSPLDPQASSSAGLVLHATFPGHSQRRESFLYRSDSDYDLSPKAMSRNSSLPSEQHGDDLIVTPFAQVLASLRSVRNNFTILTNLHGTSNKRSPAASQPPVSRVNPQEESYQKLAMETLEELDWCLDQLETIQTY

SEQ ID NO: 83952 - protein, 448 aa, Homo sapiens
MPASPLGPACPSAGCPRSSPSPYCAPVLYAGLLLLGLAASSVRSNLTSFGADQVMDLGRDATRRFFNWFYWSINLGAVLSLLVVAFIQQNISFLLGYSIPVGCVGLAFFIFLFATPVFITKPPMGSQVSSMLKLALQNCCPQLWQRHSARDRQCARVLADERSPQPGASPQEDIANFQVLVKILPVMVTLVPYWMVYFQMQSTYVLQGLHLHIPNIFPANPANISVALRAQGSSYTIPEAWLLLANVVVVLILVPLKDRLIDPLLLRCKLLPSALQKMALGMFFGFTSVIVAGVLEMERLHYIHHNETVSQQIGEVLYNAAPLSIWWQIPQYLLIGISEIFASIPGLEFAYSEAPRSMQGAIMGIFFCLSGVGSLLGSSLVALLSLPGGWLHCPKDFGNINNCRMDLYFFLLAGIQAVTALLFVWIAGRYERASQGPASHSRFSRDRG

SEQ ID NO: 83953 - protein, 262 aa, Homo sapiens
  MOD_RES (1)..(1): Any amino acid
XDSLLALGGLVLLRDSVEWEGRSLLKALVKKSALCGEQVHILGCEVSEEEFREGFDSDINNRLVYHDFFRDPLNWSKTEEAFPGGPLGALRAMCKRTDPVPVTIALDSLSWLLLRLPCTTLCQVLHAVSHQDSCPGDSSSVGKVSVLGLLHEELHGPGPVGALSSLAQTEVTLGGTMGQASAHILCRRPRQRPTDQTQWFSILPDFSLDLQEGPSVESQPYSDPHIPPVDPTTHLTFNLHLSKKEREARDSLILPFQFSSEK

SEQ ID NO: 83954 - protein, 36 aa, Homo sapiens
MTPVRMQHSLAGQTYAVPFIQPDLRREEAVQQMADA

SEQ ID NO: 83955 - protein, 136 aa, Homo sapiens
MCTALSPKVRSGPGLSDMHQYSQWLASRHEANLLPMKEDLALWLTNLLGKEITAETFMEKLDNGALLCQLAETMQEKFKESMDANKPTKNLPLKKIPCKTSAPSGSFFARDNTANFLSWCRDLGVDETCLFESEGL

SEQ ID NO: 83956 - protein, 169 aa, Homo sapiens
KIINTAGTSNAEVPLADPGMYQLDITLRRGQSLAARDRGGTSDPYVKFKIGGKEVFRSKIIHKNLNPVWEEKACILVDHLREPLYIKVFDYDFGLQDDFMGSAFLDLTQLELNRPTDVTLTLKDPHYPDHDLGIILLSVILTPKEGESRDVTMLMRKSWKRSSKVILSL

SEQ ID NO: 83957 - protein, 92 aa, Homo sapiens
MLPPGEWMCHRCTVRRKKREQKKELGHVNGLVDKSGKRTTSPSSDTDLLDRSASKTELKAIAHARILERRASRPGTPTSSASTETPTSEQND

SEQ ID NO: 83958 - protein, 58 aa, Homo sapiens
MDAFTGSGLKRKFDDVDVGSSVSNSDDEISSSDSADSCDSLNPPTTASFTPTSILKRQ

SEQ ID NO: 83959 - protein, 325 aa, Homo sapiens
  MOD_RES (1)..(1): Any amino acid
XLEFDVSDGATSKRAPPPRRLGERSGLKPPLRKAAVRQQKAPQEVEEDDGRSGAGEDPPMPASRGSYHLDWDKMDDPNFIPFGGDTKSGCSEAQPPESPETRLGQPAAEQLHAGPATEEPGPCLSQQLHSASAEDTPVVQLAAETPTAESKERALNSASTSLPTSCPGSEPVPTHQQGQPALELKEESFRDPAEVLGTGAEVDYLEQFGTSSFKESALRKQSLYLKFDPLLRDSPGRPVPVATETSSMHGANETPSGRPREAKLVEFDFLGALDIPVPGPPPGVPAPGGPPLSTGPIVDLLQYSQKDLDAVWPQVSSPQRPVMWP

SEQ ID NO: 83960 - protein, 191 aa, Homo sapiens
MARNVVYPLYRLGGPQLRVFRTNFFIQLVRPGVAQPEDTVQFRIPMEMTRVDLRNYLEGIYNVPVAAVRTRVQHGSNKRRDHRNVRIKKPDYKVAYVQLPSQTPSKEQNGQGSTLCFRSSCSKGWSTWGTRDPRPAWSPVGGRIPRKAGSGGPANRIAQDGRLLLKNLRPRVPRREQPATRFPLWRRGVLA

SEQ ID NO: 83961 - protein, 28 aa, Homo sapiens
MALLLSQDRSLIASGLYGYNATLVGVLM

SEQ ID NO: 83962 - protein, 30 aa, Homo sapiens
  MOD_RES (1)..(1): Any amino acid
XMPDPKTFKQHFESKHPKTPLPPELADVQA

SEQ ID NO: 83963 - protein, 71 aa, Homo sapiens
MGWSQDLFRALWRSLSREVKEHVGTDQFGNKYYYIPQYKNWRGEVAAWAAIAWSVIARTNYSREKNCRSSK

SEQ ID NO: 83964 - protein, 29 aa, Homo sapiens
MIPHEEPGSPTEIKCDFPFIRLKSEPSRQ

SEQ ID NO: 83965 - protein, 24 aa, Homo sapiens
MLDVLQELRGTVAQQVTGSSGTVK

SEQ ID NO: 83966 - protein, 133 aa, Homo sapiens
MTLQWAAVATFLYAEIGLILIFCLPFIPPQRWQKIFSFNVWGKIATFWNKAFLTIIILLIVLFLDAVREVRKYSSVHTIEKSSTSRPDAYEHTQMKLFRSQRNLYISGFSLFFWLVLRRLVTLITQLAKELSN

SEQ ID NO: 83967 - protein, 59 aa, Homo sapiens
  MOD_RES (1)..(1): Any amino acid
XDSFSQFRFAEEKEWDSEASCPKQNSAFYVDSELLVRALQELPLCLRLNVAAELVQMHL

SEQ ID NO: 83968 - protein, 90 aa, Homo sapiens
MAPTWGPGMVSVVGPMGLLVVLLVGGCAAEEPPRFIKEPKDQIGVSGGVASFVCQATGDPKPRVTWNKKGKKVNSQRFETIEFDESAGAV

SEQ ID NO: 83969 - protein, 339 aa, Homo sapiens
MAAAAAQGGGGGEPRRTEGVGPGVPGEVEMVKGQPFDVGPRYTQLQYIGEGAYGMVSSAYDHVRKTRVAIKKISPFEHQTYCQRTLREIQILLRFRHENVIGIRDILRASTLEAMRDVYIVQDLMETDLYKLLKSQQLSNDHICYFLYQILRGLKYIHSANVLHRDLKPSNLLINTTCDLKICDFGLARIADPEHDHTGFLTEYVATRWYRAPEIMLNSKGYTKSIDIWSVGCILAEMLSNRPIFPGKHYLDQLNHILGILGSPSQEDLNCIINMKARNYLQSLPSKTKVAWAKLFPKSDSKALDLLDRMLTFNPNKRITWPRSPSPSPWSWMTYLRSG

SEQ ID NO: 83970 - protein, 199 aa, Homo sapiens
MAASKTQGAVARMQEDRDGSCSTVGGVGYGDSKDCILEPLSLPESPGGTTTLEGSPSVPCIFCEEHFPVAEQDKLLKHMIIEHKIVIADVKLVADFQRSVILNHMAREHAFNIGLPDNIVNCNEFLCTLQKKLDNLQCLYCEKTFRDKNTLKDHMRKKQHRKINPKNREYDRFYVINYLELGKSWEEVQLEDDRELLDH

SEQ ID NO: 83971 - protein, 146 aa, Homo sapiens
MTPQSLLQTTLFLLSLLFLVQASASSGAHGRGHREDFRFCSQRNQTHRSSLHYKPTPDLRISIENSEEALTVHAPFPAAHPASRSFPDPRGLYHFCLYWNRHAGRLHLLYGKRDFLLSDKASSLLCFQHQEESLAQGPPLLATSVT

SEQ ID NO: 83972 - protein, 89 aa, Homo sapiens
MSAHLQWMVVRNCSSFLIKRNKQTYSTEPNNLKARNSFRYNGLIHRKTVGVEPAADGKGVVVASGSLPPPMCGPPSTRMLAPRSAASDT

SEQ ID NO: 83973 - protein, 59 aa, Homo sapiens
  MOD_RES (1)..(1): Any amino acid
XSDIDESSVMQLAEMGFPLEACRKAVYFTGNMGAEVAFNWIIVHMEEPDLGVVIFLRFC

SEQ ID NO: 83974 - protein, 913 aa, Homo sapiens
MAALLRSARWLLRAGAAPRLPLSLRLLPGGPGRLHAASYLPAARAGPVAGGLLSPARLYAIAAKEKDIQEESTFSSRKISNQFDWALMRLDLSVRRTGRIPKKLLQKVFNDTCRSGGLGGSHALLLLRSCGSLLPELKLEERTEFAHRIWDTLQKLGAVYDVSHYNALLKVYLQNEYKFSPTDFLAKMEEANIQPNRVTYQRLIASYCNVGDIEGASKILGFMKTKDLPVTEAVFSALVTGHARAGDMENAENILTVMRDAGIEPGPDTYLALLNAYAEKGDIDHVKQTLEKVEKSELHLMDRDLLQIIFSFSKAGYPQYVSEILEKVTCERRYIPDAMNLILLLVTEKLEDVALQILLACPVSKEDGPSVFGSFFLQHCVTMNTPVEKLTDYCKKLKEVQMHSFPLQFTLHCALLANKTDLAKALMKAVKEEGFPIRPHYFWPLLVGRRKEKNVQGIIEILKGMQELGVHPDQETYTDYVIPCFDSVNSARAILQENGCLSDSDMFSQAGLRSEAANGNLDFVLSFLKSNTLPISLQSIRSSLLLGFRRSMNINLWSEITELLYKDGRYCQEPRGPTEAVGYFLYNLIDSMSDSEVQAKEEHLRQYFHQLEKMNVKIPENIYRGIRNLLESYHVPELIKDAHLLVESKNLDFQKTVQLTSSELESTLETLKAENQPIRDVLKQLILVLCSEENMQKALELKAKYESDMVTGGYAALINLCCRHDKVEDALNLKEEFDRLDSSAVLDTGKYVGLVRVLAKHGKLQDAINILKEMKEKDVLIKDTTALSFFHMLNGAALRGEIETVKQLHEAIVTLGLAEPSTNISFPLVTVHLEKGDLSTALEVAIDCYEKYKVLPRIHDVLCKLVEKGETDLIQKAMDFVSQEQGEMVMLYDLFFAFLQTGNYKEAKKIIEV

SEQ ID NO: 83975 - protein, 116 aa, Homo sapiens
  MOD_RES (1)..(1): Any amino acid
XDAIYQPSPLEPVISTMPSQTVLPPEPVQLCKSEQRPSSLPVGPVLATLGHHQTPTPNSTGSGHSPPSSSLTSPSHVNLSPNTVPEFSYSSSEDEFYDADEFHQSGSSPKRLIEPV

SEQ ID NO: 83976 - protein, 678 aa, Homo sapiens
MAAMAPALTDAAAEAHHIRFKLAPPSSTLSPGSAENNGNANILIAANGTKRKAIAAEDPSLDFRNNPTKEDLGKLQPLVASYLCSDVTSVPSKESLKLQGVFSKQTVLKSHPLLSQSYELRAELLGRQPVLEFSLENLRTMNTSGQTALPQAPVNGLAKKLTKSSTHSDHDNSTSLNGGKRALTSSALHGGEMGGSESGDLKGGMTNCTLPHRSLDVEHTTLYSNNSTANKSSVNSMEQPALQGSSRLSPGTDSSSNLGGVKLEGKKSPLSSILFSALDSDTRITALLRRQADIESRARRLQKRLQVVQAKQVERHIQHQLGGFLEKTLSKLPNLESLRPRSQLMLTRKAEAALRKAASETTTSEGLSNFLKSNSISEELERFTASGIANLRCSEQAFDSDVTDSSSGGESDIEEEELTRADPEQRHVPLRRRSEWKWAADRAAIVSRWNWLQAHVSDLEYRIRQQTDIYKQIRANKGLIVLGEVPPPEHTTDLFLPLSSEVKTDHGTDKLIESVSQPLENHGAPIIGHISESLSTKSCGALRPVNGVINTLQPVLADHIPGDSSDAEEQLHKKQRLNLVSSSSDGTCVAARTRPVLSCKKRRLVRPNSIVPLSKKVHRNSTIRPGCDVNPSCALCGSGSINTMPPEIHYEAPLLERLSQLDSCVHPVLAFPDDVPTS

SEQ ID NO: 83977 - protein, 83 aa, Homo sapiens
  MOD_RES (1)..(1): Any amino acid
XFAGAMPTMASVKLSALRPIVNHPHYEDAGLRPGCSMPEIWDVEDPANAGKTPLCNLLVKDSKPHFTTVFQNSVYKVLEVVKE

SEQ ID NO: 83978 - protein, 241 aa, Homo sapiens
MEMGAAKVWGEVGRWLVIALVQLAKAVLRMLLLLWFKAGLQTSPPIVPLDRETQAQPPDGDHSPGNHEQSYVGKRSNRVVRTLQNTPSLHSRHWGAPQQREGRQQQHHEELSATPTPLGLQETIAEFLYIARPLLHLLSLGLWGQRSWKPWLLAGVVDVTSLSLLSDRKGLTRRERRELRRRTILLLYYLLRSPFYDRFSEARILFLLQLLADHVPGVGLVTRPLMDYLPTWQKIYFYSWG

SEQ ID NO: 83979 - protein, 1047 aa, Homo sapiens
MQFFDAEELLVDEEDDVFGEGLPTRLPEIMLVGSQSFSPGGPNGIIRSQSFAGFSGLQERRSRCNSFIENSSALKKPQAKLKKMHNLGHKNNNPPKEPQPKRVEEVYRALKNGLDEYLEVHQTELDKLTAQLKDMKRNSRLGVLYDLDKQIKTIERYMRRLEFHISKVDELYEAYCIQRRLQDGASKMKQAFATSPASKAARESLTEINRSFKEYTENMCTIEVELENLLGEFSIKMKGLAGFARLCPGDQYEIFMKYGRQRWKLKGKIEVNGKQSWDGEETVFLPLIVGFISIKVTELKGLATHILVGSVTCETKELFAARPQVVAVDINDLGTIKLNLEITWYPFDVEDMTASSGAGNKAAALQRRMSMYSQGTPETPTFKDHSFFSNLPDDIFENGKAAEEKMPLSLSFSDLPNGDCALTSHSTGSPSNSTNPEITITPAEFNLSSLASQNEGMDDTSSASSRNSLGEGQEPKSHLKEEDPEEPRKPASAPSEACRRQSSGAGAEHLFLENDVAEALLQESEEASELKPVELDTSEGNITKQLVKRLTSAEVPMATDRLLSEGSVGGESEGCRSFLDGSLEDAFNGLLLALEPHKEQYKEFQDLNQEVMNLDDILKCKPAVSRSRSSSLSLTVESALESFDFLNTSDFDEEEDGDEVCNVGGGADSVFSDTETEKHSYRSVHPEARGHLSEALTEDTGVGTSVAGSPLPLTTGNESLDITIVRHLQYCTQLVQQIVFSSKTPFVARSLLEKLSRQIQVMEKLAAVSDENIGNISSVVEAIPEFHKKLSLLSFWTKCCSPVGVYHSPADRVMKQLEASFARTVNKEYPGLADPVFRTLVSQILDRAEPLLSSSLSSEVVTVFQYYSYFTSHGVSDLESYLSQLARQVSMVQTLQSLRDEKLLQTMSDLAPSNLLAQQEVLRTLALLLTREDNEVSEAVTLYLAAASKNQHFREKALLYYCEALTKTNLQLQKAACLALKILEATESIKMLVTLCQSDTEEIRNVASETLLSLGEDGRLAYEQLDKFPRDCVKVGGRHGTEVATAF

SEQ ID NO: 83980 - protein, 380 aa, Homo sapiens
MSPALQDLSQPEGLKKTLRDEINAILQKRIMVLDGGMGTMIQREKLNEEHFRGQEFKDHARPLKGNNDILSITQPDVIYQIHKEYLLAGADIIETNTFSSTSIAQADYGLEHLAYRMNMCSAGVARKAAEEVTLQTGIKRFVAGALGPTNKTLSVSPSVERPDYRNITFDELVEAYQEQAKGLLDGGVDILLIETIFDTANAKAALFALQNLFEEKYAPRPIFISGTIVDKSGRTLSGQTGEGFVISVSHGEPLCIGLNCALGAAEMRPFIEIIGKCTTAYVLCYPNAGLPNTFGDYDETPSMMAKHLKDFAMDGLVNIVGGCCGSTPDHIREIAEAVKNCKPRVPPATAFEGHMLLSGSLVCCQSAGGNGSPGVGCQHG

SEQ ID NO: 83981 - protein, 132 aa, Homo sapiens
MPPSKPHPPVVGKVTHHSIELYWDLEKKAKRQGPQEQWFRFSIEEEDPKMHTYGIIYTGYATKHVVEGLEPRTLYRFRLKVTSPSGECEYSPLVSVSTTSSIWLGGEPISSEHLHRAVSVNDEDLLVRILQG

SEQ ID NO: 83982 - protein, 105 aa, Homo sapiens
  MOD_RES (1)..(1): Any amino acid
XSAVYDCTLNFRNNENPTLLGVLNGKKYHADLYVRRIPLEDIPEDDDECSAWLHKLYQEKGWGDTEFSKQYVSVSRPGRLALCPSEKIAEQQVEVVHGFSKQSGE

SEQ ID NO: 83983 - protein, 302 aa, Homo sapiens
  MOD_RES (1)..(1): Any amino acid
XATTLSNAVSSLASTGLSLTKVDEREKQAALEEEQARLKALKEQRLKELAKKPHTSLTTAASPVSTSAGGIMTAPAIDIFSTPSSSNSTSKLPNDLLDLQQPTFHPSVHPMSTASQVASTWGDPFSATVDAVDDAIPSLNPFLTKSSGDVHLSISSDVSTFTTRTPTHEMFVGFTPSPVAQPHPSAGLNVDFESVFGNKSTNVIVDSGGGLLKPTVASQNQNLPVAKLPPSKLVSDDLDSSLANLVGNLGIGNGTTKNDVNWSQPGEKKLTGGSNWQPKVAPTTAWNAATMAPPVMAYPATT

SEQ ID NO: 83984 - protein, 51 aa, Homo sapiens
MAWTKYQLFLAGLMLVTGSINTLSAKWADNFMAEGCGGSKEHSFQHPFLQL

SEQ ID NO: 83985 - protein, 415 aa, Homo sapiens
MSLRLQSSSASYGGGFGGGSCQLGGGRGVSTCSTRFVSGGSAGGYGGGVSCGFGGGAGSGFGGGYGGGLGGGYGGGLGGGFGGGFAGGFVDFGACDGGLLTGNEKITMQNLNDRLASYLEKVRALEEANADLEVKIRDWHLKQSPASPERDYSPYYKTIEELRDKILTATIENNRVILEIDNARLAADDFRLKYENELALRQSVEADINGLRRVLDELTLSKTDLEMQIESLNEELAYMKKNHEEEMKEFSNQVVGQVNVEMDATPGIDLTRVLAEMREQYEAMAERNRRDAEEWFHTKSAELNKEVSTNTAMIQTSKTEITELRRTLQGLEIELQSQLSMKAGLENTVAETECRYALQLQQIQGLISSIEAQLSELRSEMECQNQEYKMLLDIKTRLEQEIATYRSLLEGQDAK

SEQ ID NO: 83986 - protein, 119 aa, Homo sapiens
MKGSNRNKDHSAEGEGVGKRPKRKCLQWHPLLAKKLLDFSEEEEEEDEEEDIDKTRIEAQYKNRGLACLVLSSCLRNENGAWHIVQLLGADGLEQDVGETEDDESPEQRARRPMNAFLL

SEQ ID NO: 83987 - protein, 51 aa, Homo sapiens
MRPAALRGALLGCLCLALLCLGGADKRLRDNHEWKKLIMVQHWPETVCEAR

SEQ ID NO: 83988 - protein, 1874 aa, Homo sapiens
MARLADYFIVVGYDHEKPGSGEGLGKIIQRFPQKDWDDTPFPQGIELFCQPGGWQLSRERKQPTFFVVVLTDIDSDRHYCSCLTFYEAEINLQGTKKEEIEGEAKVSGLIQPAEVFAPKSLVLVSRLYYPEIFRACLGLIYTVYVDSLNVSLESLIANLCACLVPAAGGSQKLFSLGAGDRQLIQTPLHDSLPITGTSVALLFQQLGIQNVLSLFCAVLTENKVLFHSASFQRLSDACRALESLMFPLKYSYPYIPILPAQLLEVLSSPTPFIIGVHSVFKTDVHELLDVIIADLDGGTIKIPECIHLSSLPEPLLHQTQSALSLILHPDLEVADHAFPPPRTALSHSKMLDKEVRAVFLRLFAQLFQGYRSCLQLIRIHAEPVIHFHKTAFLGQRGLVENDFLTKVLSGMAFAGFVSERGPPYRSCDLFDELVAFEVERIKVEENNPVKMIKHVRELAEQLFKNENPNPHMAFQKVPRPTEGSHLRVHILPFPEINEARVQELIQENVAKNQNAPPATRIEKKCVVPAGPPVVSIMDKVTTVFNSAQRLEVVRNCISFIFENKILETEKTLPAALRALKGKAARQCLTDELGLHVQQNRAILDHQQFDYIIRMMNCTLQDCSSLEEYNIAAALLPLTSAFYRKLAPGVSQFAYTCVQDHPIWTNQQFWETTFYNAVQEQVRSLYLSAKEDNHAPHLKQKDKLPDDHYQEKTAMDLAAEQLRLWPTLSKSTQQELVQHEESTVFSQAIHFANLMVNLLVPLDTSKNKLLRTSAPGDWESGSNSIVTNSIAGSVAESYDTESGFEDSENTDIANSVVRFITRFIDKVCTESGVTQDHIKSLHCMIPGIVAMHIETLEAVHRESRRLPPIQKPKILRPALLPGEEIVCEGLRVLLDPDGREEATGGLLGGPQLLPAEGALFLTTYRILFRGTPHDQLVGEQTVVRSFPIASITKEKKITMQNQLQQNMQEGLQITSASFQLIKVAFDEEVSPEVVEIFKKQLMKFRYPQSIFSTFAFAAGQTTPQIILPKQKEKNTSFRTFSKTIVKGAKRAGKMTIGRQYLLKKKTGTIVEERVNRPGWNEDDDVSVSDESELPTSTTLKASEKSTMEQLVEKACFRDYQRLGLGTISGSSSRSRPEYFRITASNRMYSLCRSYPGLLVVPQAVQDSSLPRVARCYRHNRLPVVCWKNSRSGTLLLRSGGFHGKGVVGLFKSQNSPQAAPTSSLESSSSIEQEKYLQALLNAVSVHQKLRGNSTLTVRPAFALSPVHGYRDKCFTQSNPKSSAKGRVHNQGVWASLRSSTRLISSPTSFIDVGARLAGKDHSASFSNSSYLQNQLLKRQAALYIFGEKSQLRNFKVEFALNCEFVPVEFHEIRQVKASFKKLMRACIPSTIPTDSEVTFLKALGDSEWFPQLHRIMQLAVVVSEVLENGSSVLVCLEEGWDITAQVTSLVQLLSDPFYRTLEGFQMLVEKEWLSFGHKFSQRSSLTLNCQGSGFAPVFLQFLDCVHQVHNQYPTEFEFNLYYLKFLAFHYVSNRFKTFLLDSDYERLEHGTLFDDKGEKHAKKGVCIWECIDRMHKRSPIFFNYLYSPLEIEALKPNVNVSSLKKWDYYIEETLSTGPSYDWMMLTPKHFPSEDSDLAGEAGPRSQRRTVWPCYDDVSCTQPDALTSLFSEIEKLEHKLNQAPEKWQQLWERVTVDLKEEPRTDRSQRHLSRSPGIVSTNLPSYQKRSLLHLPDSSMGEEQNSSISPSNGVERRAATLYSQYTSKNDENRSFEGTLYKRGALLKGWKPRWFVLDVTKHQLRYYDSGEDTSCKGHIDLAEVEMVIPAGPSMGAPKHTSDKAFFDLKTSKRVYNFCAQDGQSAQQWMDKIQSCISDA

SEQ ID NO: 83989 - protein, 77 aa, Homo sapiens
  MOD_RES (1)..(1): Any amino acid
XVDPEEKKKYCLTCRVKAAHFDVEWGVEDDSRLLLGIYEHGYGNWELIKTDPELKLTDKLQGFPAPGRRKSTTAGML

SEQ ID NO: 83990 - protein, 125 aa, Homo sapiens
MTDTVFSNSSNRWMYPSDRPLQSNDKEQLQAGWSVHPGGQPDRQRKQEELTDEEKEIINRVIARAEKMEEMEQERIGRLVDRLENMRKNVAGDGVNRCILCGEQLGMLGSACVVCEDCKKNVCTK

SEQ ID NO: 83991 - protein, 171 aa, Homo sapiens
FRAFELLHLHLDLRAEFGPPGPGAGSRGLSGTAVLDLRCLEPEGAAELRLDSHPCLEVTAAALRRERPGSEEPPAEPVSFYTQPFSHYGQALCVSFPQPCRAAERLQVLLTYRVGEGPGVCWLAPEQTAGKKKPFVYTQGQAVLNRAFFPCFDTPAVKYKYSALIEEPGVG

SEQ ID NO: 83992 - protein, 1928 aa, Homo sapiens
MGAMTQLLAGVFLAFLALATEGGVLKKVIRHKRQSGVNATLPEENQPVVFNHVYNIKLPVGSQCSVDLESASGEKDLAPPSEPSESFQEHTVDGENQIVFTHRINIPRRACGCAAAPDVKELLSRLEELENLVSSLREQCTAGAGCCLQPATGRLDTRPFCSGRGNFSTEGCGCVCEPGWKGPNCSEPECPGNCHLRGRCIDGQCICDDGFTGEDCSQLACPSDCNDQGKCVNGVCICFEGYAGADCSREICPVPCSEEHGTCVDGLCVCHDGFAGDDCNKPLCLNNCYNRGRCVENECVCDEGFTGEDCSELICPNDCFDRGRCINGTCYCEEGFTGEDCGKPTCPHACHTQGRCEEGQCVCDEGFAGVDCSEKRCPADCHNRGRCVDGRCECDDGFTGADCGELKCPNGCSGHGRCVNGQCVCDEGYTGEDCSQLRCPNDCHSRGRCVEGKCVCEQGFKGYDCSDMSCPNDCHQHGRCVNGMCVCDDGYTGEDCRDRQCPRDCSNRGLCVDGQCVCEDGFTGPDCAELSCPNDCHGQGRCVNGQCVCHEGFMGKDCKEQRCPSDCHGQGRCVDGQCICHEGFTGLDCGQHSCPSDCNNLGQCVSGRCICNEGYSGEDCSEVSPPKDLVVTEVTEETVNLAWDNEMRVTEYLVVYTPTHEGGLEMQFRVPGDQTSTIIQELEPGVEYFIRVFAILENKKSIPVSARVATYLPAPEGLKFKSIKETSVEVEWDPLDIAFETWEIIFRNMNKEDEGEITKSLRRPETSYRQTGLAPGQEYEISLHIVKNNTRGPGLKRVTTTRLDAPSQIEVKDVTDTTALITWFKPLAEIDGIELTYGIKDVPGDRTTIDLTEDENQYSIGNLKPDTEYEVSLISRRGDMSSNPAKETFTTGLDAPRNLRRVSQTDNSITLEWRNGKAAIDSYRIKYAPISGGDHAEVDVPKSQQATTKTTLTGLRPGTEYGIGVSAVKEDKESNPATINAATELDTPKDLQVSETAETSLTLLWKTPLAKFDRYRLNYSLPTGQWVGVQLPRNTTSYVLRGLEPGQEYNVLLTAEKGRHKSKPARVKASTEQAPELENLTVTEVGWDGLRLNWTAADQAYEHFIIQVQEANKVEAARNLTVPGSLRAVDIPGLKAATPYTVSIYGVIQGYRTPVLSAEASTGETPNLGEVVVAEVGWDALKLNWTAPEGAYEYFFIQVQEADTVEAAQNLTVPGGLRSTDLPGLKAATHYTITIRGVTQDFSTTPLSVEVLTEEVPDMGNLTVTEVSWDALRLNWTTPDGTYDQFTIQVQEADQVEEAHNLTVPGSLRSMEIPGLRAGTPYTVTLHGEVRGHSTRPLAVEVVTEDLPQLGDLAVSEVGWDGLRLNWTAADNAYEHFVIQVQEVNKVEAAQNLTLPGSLRAVDIPGLEAATPYRVSIYGVIRGYRTPVLSAEASTAMGSPKEVIFSDITENSATVSWRAPTAQVESFRITYVPITGGTPSMVTVDGTKTQTRLVKLIPGVEYLVSIIAMKGFEESEPVSGSFTTALDGPSGLVTANITDSEALARWQPAIATVDSYVISYTGEKVPEITRTVSGNTVEYALTDLEPATEYTLRIFAEKGPQKSSTITAKFTTDLDSPRDLTATEVQSETALLTWRPPRASVTGYLLVYESVDGTVKEVIVGPDTTSYSLADLSPSTHYTAKIQALNGPLRSNMIQTIFTTIGLLYPFPKDCSQAMLNGDTTSGLYTIYLNGDKAEALEVFCDMTSDGGGWIVFLRRKNGRENFYQNWKAYAAGFGDRREEFWLGLDNLNKITAQGQYELRVDLRDHGETAFAVYDKFSVGDAKTRYKLKVEGYSGTAGDSMAYHNGRSFSTFDKDTDSAITNCALSYKGAFWYRNCHRVNLMGRYGDNNHSQGVNWFHWKGHEHSIQFAEMKLRPSNFRNLEGRRKRA

SEQ ID NO: 83993 - protein, 222 aa, Homo sapiens
  MOD_RES (1)..(1): Any amino acid
XVIKGSILQKHPRIRFHTGLVDAHLYCLKKYIVDFLMENGSITSIRSELIPYLVRKQFSSASSQQGQEEKEEDLKKKELKSLDIYSFIKEANTLNLAPYDACWNACRGDRWEDLSRSQVRCYVHIMKEGLCSRVSTLGLYMEANRQVPKLLSALCPEEPPVHSSAQIVSKHLVGVDSLIGPETQIGEKSSIKRSVIGSSCLIKDRVTITNCLLMNSVTVEEG

SEQ ID NO: 83994 - protein, 164 aa, Homo sapiens
MEEIDRFQVPTAHSEMQPLDPAAASISDGDCDAREEKQRELARKGSLKNGSMGSPVNQQPKKNNVMARTRLVVPNKGYSSLDQSPDEKPLVALDTDSDDDFDMSRYSSSGYSSAEQINQDLNIQLLKDGYRLDEIPDDEDLDLIPPNQVSPCSLIYFQEGVWKT

SEQ ID NO: 83995 - protein, 137 aa, Homo sapiens
  MOD_RES (1)..(1): Any amino acid
XDGANDVSMIQVADVGVGISGQEGMQEMLRETTAMETLAGHARTVFRMGIFLPCCVPCILRREDKSDARSASPVTGIPLPLKAVMASDFAVPKFRYLERLLILHGHWCYSRLANMVLYFFYKNTMFVGLLFWFQFFC

SEQ ID NO: 83996 - protein, 224 aa, Homo sapiens
MDHLNEATQGKEHSEMSNNVSDPKGPPAKIARLEQNGSPLGRGRLGSTGAKMQGVPLKHSGHLMKTNLRKGTMLPVFCVVEHYENAIEYDCKEEHAEFVLVRKDMLFNQLIEMALLSLGYSHSSAAQAKGLIQVGKWNPVPLSYVTDAPDATVADMLQDVYHVVTLKIQLHSCPKLEDLPPEQWSHTTVRNALKDLLKDMNQSSLAKECPLSQSMISSIVNSTY

SEQ ID NO: 83997 - protein, 256 aa, Homo sapiens
MKFLLDILLLLPLLIVCSLESFVKLFIPKRRKSVTGEIVLITGAGHGIGRLTAYEFAKLKSKLVLWDINKHGLEETAAKCKGLGAKVHTFVVDCSNREDIYSSAKKTTKAFLPAMTKNNHGHIVTVASAAGHVSVPFLLAYCSSKFAAVGFHKTLTDELAALQITGVKTTCLCPNFVNTGFIKNPSTSLGPTLEPEEVVNRLMHGILTEQKMIFIPSSIAFLTTLERILPERFLAVLKRKISVKFDAVIGYKMKAQ

SEQ ID NO: 83998 - protein, 136 aa, Homo sapiens
MVVPSLKLQDLIEEIRGAKTQAQEREVIQKECAHIRASFRDGDPVHRHRQLAKLLYVHMLGYPAHFGQMECLKLIASSRFTDKRVGYLGAMLLLDERHDAHLLITNSIKNDLSQGIQPVQGLALCTLSTMGSAEMC

SEQ ID NO: 83999 - protein, 416 aa, Homo sapiens
  MOD_RES (1)..(1): Any amino acid
XLCIFGIVDHLGKENDVFQPKTQFLGVYFVSSQEFLANAYVLAVLLFLALLLQRTFLQASYYVAIETGINLRGAIQTKIYNKIMHLSTSNLSMGEMTAGQICNLVAIDTNQLMWFFFLCPNLWAMPVQAQPKLAEEHPDGLHLSTTNEGLDARDKSRRVMLQGRPGKRIIVGVILLYYILGVSALIGAAVIILLAPVQYFVATKLSQAQRSTLEYSNERLKQTNEMLRGIKLLKLYAWENIFRTRVETTRRKEMTSLRAFAIYTSISIFMNTAIPIAAVLITFVGHVSFFKEADFSPSVAFASLSLFHILVTPLFLLSSVVRSTVKALVSVQKLSEFLSSAEIREEQCAPHEPTPQGPASKYQAVPLRVVNRKRPAREDCRGLTGPLQSLVPSADGDADNCCVQIMGGYFTWTPDG

SEQ ID NO: 84000 - protein, 1047 aa, Homo sapiens
MKTAQALHRMWIQAVKKLRRWKGRAPGMEELIWEQYTVTLQKDSKRGFGIAVSGGRDNPHFENGETSIVISDVLPGGPADGLLQENDRVVMVNGTPMEDVLHSFAVQQLRKSGKVAAIVVKRPRKVQVAALQASPPLDQDDRAFEVMDEFDGRSFRSGYSERSRLNSHGGRSRSWEDSPERGRPHERARSRERDLSRDRSRGRSLERGLDQDHARTRDRSRGRSLERGLDHDFGPSRDRDRDRSRGRSIDQDYERAYHRAYDPDYERAYSPEYRRGARHDARSRGPRSRSREHPHSRSPSPEPRGRPGPIGVLLMKSRANEEYGLRLGSQIFVKEMTRTGLATKDGNLHEGDIILKINGTVTENMSLTDARKLIEKSRGKLQLVVLRDSQQTLINIPSLNDSDSEIEDISEIESNRSFSPEERRHQYSDYDYHSSSEKLKERPSSREDTPSRLSRMGATPTPFKSTGDIAGTVVPETNKEPRYQEDPPAPQPKAAPRTFLRPSPEDEAIYGPNTKMVRFKKGDSVGLRLAGGNDVGIFVAGIQEGTSAEQEGLQEGDQILKVNTQDFRGLVREDAVLYLLEIPKGEMVTILAQSRADVYRDILACGRGDSFFIRSHFECEKETPQSLAFTRGEVFRVVDTLYDGKLGNWLAVRIGNELEKGLIPNKSRAEQMASVQNAQRDNAGDRADFWRMRGQRSGVKKNLRKSREDLTAVVSVSTKFPAYERVLLREAGFKRPVVLFGPIADIAMEKLANELPDWFQTAKTEPKDAGSEKSTGVVRLNTVRQIIEQDKHALLDVTPKAVDLLNYTQWFPIVIFFNPDSRQGVKTMRQRLNPTSNKSSRKLFDQANKLKKTCAHLFTATINLNSANDSWFGSLKDTIQHQQGEAVWVSEGKMEGMDDDPEDRMSYLTAMGADYLSCDSRLISDFEDTDGEGGAYTDNELDEPAEEPLVSSITRSSEPVQHEEIEIAQKHPDIYAVPIKTHKPDPGTPQHTSSRPPEPQKAPSRPYQDTRGSYGSDAEEEEYRQQLSEHSKRGYYGQSARYRDTEL

SEQ ID NO: 84001 - protein, 73 aa, Homo sapiens
MAAMPLKAQYQEMVTFEDVAVHFTKTEWTGLSPAQRALYRSVMLENFGNLTALGYPVPKPALISLLERGDMAW

SEQ ID NO: 84002 - protein, 11 aa, Homo sapiens
MDPSGVKVLET

SEQ ID NO: 84003 - protein, 243 aa, Homo sapiens
MIDKNQTCGVGQDSVPYMICLIHILEEWFGVEQLEDYLNFANYLLWVFTPLILLILPYFTIFLLYLTIIFLHIYKRKNVLKEAYSHNLWDGARKTVATLWDGHAAVWHGYEVHGMEKIPEDGPALIIFYHGAIPIDFYYFMAKIFIHKGRTCRVVADHFVFKIPGFSLLLDVFCALHGPREKCVEILRSGHLLAISPGGVREALISDETYNIVWGHRRGFAQVAIDAKVPIIPMFTQNIREGF

SEQ ID NO: 84004 - protein, 197 aa, Homo sapiens
RNSISDDRLETQSLPSRSPPGTPNHRNSTFTQEGTRLRPSSVGHLVDHMVHTSPSEVFVNQRSPSSTQANSIVLESSPSQETPGDGKPPALPPKQSKKNSWNQIHYSHSQQDLESHINETFDIPSSPEKPTPNGGIPHDNLVLIRMKPDENGRFGFNVKGGYDQKMPVIVSRVAPGTPVSYLNVSNKSCFQEYVLIL

SEQ ID NO: 84005 - protein, 341 aa, Homo sapiens
MNCCIGLGEKARGSHRASYPSLSALFTEASILGFGSFAVKAQWTEDCRKSTYPPSGPTYRGAVPWYTINLDLPPYKRWHELMLDKAPVLKVIVNSLKNMINTFVPSGKIMQVVDEKLPGLLGNFPGPFEEEMKGIAAVTDIPLGEIISFNIFYELFTICTSIVAEDKKGHLIHGRNMDFGVFLGWNINNDTWVITEQLKPLTVNLDFQRNNKTVFKASSFAGYVGMLTGFKPGLFSLTLNERFSINGGYLGILEWILGKKDVMWIGFLTRTVLENSTSYEEAKNLLTKTKILAPAYFILGGNQSGEGCVITRDRKESLDVYEISHLKPCMMSCQQNLSSTS

SEQ ID NO: 84006 - protein, 23 aa, Homo sapiens
EAPGAPPRTLTWEAMEQIRYLSS

SEQ ID NO: 84007 - protein, 38 aa, Homo sapiens
MGQACGHSILCRSQQYPAARPAEPQPGPPCKGARTPRE

SEQ ID NO: 84008 - protein, 52 aa, Homo sapiens
MSDPEMGWVPEPPTMTLGASRVELRVSCHGLLDRDTLTKPHPCVLLKLYSDE

SEQ ID NO: 84009 - protein, 263 aa, Homo sapiens
IELYGSNDPYRREPRSPRKSRQPSGGVLIVTSCMCGLSSLYSESMKKLRSSFLTGLCDISEGTVVPEDRCKSPTSAKMSRKLSLPTDLKPDLDVKDNSFSRSRSSSVTSIDKESREAISALHFCETFTRKTDSSPSPCLWVGTTLGTVLVIALNLPPGGEQRLLQPVIVSPSGTILRLKGAILRMAFLDTTGCLIPPAYEPWREHNVPEEKDEKEKLKKRRPVSVSPSSSQEISENQYAVICSEKQAKVISLPTQNCAYKQNI

SEQ ID NO: 84010 - protein, 1940 aa, Homo sapiens
MAQGSGGREGALRTPAGGWHSPPSPDMQELLRSVERDLSIDPRQLAPAPGGTHVVALVPARWLASLRDRRLPLGPCPRAEGLGEAEVRTLLQRSVQRLPAGWTRVEVHGLRKRRLSYPLGGGLPFEDGSCGPETLTRFMQEVAAQNYRNLWRHAYHTYGQPYSHSPAPSAVPALDSVRQALQRVYGCSFLPVGETTQCPSYAREGPCPPRGSPACPSLLRAEALLESPEMLYVVHPYVQFSLHDVVTFSPAKLTNSQAKVLFILFRVLRAMDACHRQGLACGALSLYHIAVDEKLCSELRLDLSAYERPEEDENEEAPVARDEAGIVSQEEQGGQPGQPTGQEELRSLVLDWVHGRISNFHYLMQLNRLAGRRQGDPNYHPVLPWVVDFTTPHGRFRDLRKSKFRLNKGDKQLDFTYEMTRQAFVAGGAGGGEPPHVPHHISDVLSDITYYVYKARRTPRSVLCGHVRAQWEPHEYPASMERMQNWTPDECIPEFYTDPSIFRSIHPDMPDLDVPAWCSSSQEFVAAHRALLESREVSRDLHHWIDLTFGYKLQGKEAVKEKNVCLHLVDAHTHLASYGVVQLFDQPHPQRLAGAPALAPEPPLIPKLLVQTIQETTGREDFTENPGQLPNGVGRPVLEATPCEASWTRDRPVAGEDDLEQATEALDSISLAGKAGDQLGSSSQASPGLLSFSVASASRPGRRNKAAGADPGEGEEGRILLPEGFNPMQALEELEKTGNFLAKGLGGLLEVPEQPRVQPAVPLQCLLHRDMQALGVLLAEMVFATRVRTLQPDAPLWVRFQAVRGLCTRHPKEVPVSLQPVLDTLLQMSGPEVPMGAERGKLDQLFEYRPVSQGLPPPCPSQLLSPFSSVVPFPPYFPALHRFILLYQARRVEDEAQGRELVFALWQQLGAVLKDITPEGLEILLPFVLSLMSEEHTAVYTAWYLFEPVAKALGPKNANKYLLKPLIGAYESPCQLHGRFYLYTDCFVAQLMVRLGLQAFLTHLLPHVLQVLAGAEASQEESKDLAGAAEEESGLPGAGPGSCAFGEEIPMDGEPPASSGLGLPDYTSGVSFHDQADLPETEDFQAGLYVTESPQPQEAEAVSLGRLSDKSSTSETSLGEERAPDEGGAPVDKSSLRSGDSSQDLKQSEGSEEEEEEEDSCVVLEEEEGEQEEVTGASELTLSDTVLSMETVVAGGSGGDGEEEEEALPEQSEGKEQKILLDTACKMVRWLSAKLGPTVASRHVARNLLRLLTSCYVGPTRQQFTVSSGESPPLSAGNIYQKRPVLGDIVSGPVLSCLLHIARLYGEPVLTYQYLPYISYLVAPGSASGPSRLNSRKEAGLLAAVTLTQKIIVYLSDTTLMDILPRISHEVLLPVLSFLTSLVTGFPSGAQARTILCVKTISLIALICLRIGQEMVQQHLSEPVATFFQVFSQLHELRQQDLKLDPAGRGEGQLPQVVFSDGQQRPVDPALLDELQKVFTLEMAYTIYVPFSCLLGDIIRKIIPNHELVGELAALYLESISPSSRNPASVEPTMPGTGPEWDPHGGGCPQDDGHSGTFGSVLVGNRIQIPNDSRPENPGPLGPISGVGGGGLGSGSDDNALKQELPRSVHGLSGNWLAYWQYEIGVSQQDAHFHFHQIRLQSFPGHSGAVKCVAPLSSEDFFLSGSKDRTVRLWPLYNYGDGTSETAPRLVYTQHRKSVFFVGQLEAPQHVVSCDGAVHVWDPFTGKTLRTVEPLDSRVPLTAVAVMPAPHTSITMASSDSTLRFVDCRKPGLQHEFRLGGGLNPGLVRALAISPSGRSVVAGFSSGFMVLLDTRTGLVLRGWPAHEGDILQIKAVEGSVLVSSSSDHSLTVWKELEQKPTHHYKSASDPIHTFDLYGSEVVTGTVSNKIGVCSLLEPPSQATTKLSSENFRGTLTSLALLPTKRHLLLGSDNGVIRLLA

SEQ ID NO: 84011 - protein, 325 aa, Homo sapiens
MSFICGLQSAARNHVFFRFNSLSNWRKCNTLASTSRGCHQVQVNHIVNKYQGLGVNQCDRWSFLPGNFHFYSTFNNKRTGGLSSTKSKEIWRITSKCTVWNDAFSRQLLIKEVTAVPSLSVLHPLSPASIRAIRNFHTSPRFQAAPVPLLLMILKPVQKLFAIIVGRGIRKWWQALPPNKKEVVKENIRKNKWKLFLGLSSFGLLFVVFYFTHLEVSPITGRSKLLLLGKEQFRLLSELEYEAWMEEFKNDMLTEKDARYLAVKEVLCHLIECNKDVPGISQINWVIHVVDSPIINAFVLPNGQMFVFTGFLNSVTDIHQLSFLL

SEQ ID NO: 84012 - protein, 434 aa, Homo sapiens
MASLGLLLLLLLTALPPLWSSSLPGLDTAESKATIADLILSALERATVFLEQRLPEINLDGMVGVRVLEEQLKSVREKWAQEPLLQPLSLRVGMLGEKLEAAIQRSLHYLKLSDPKYLREFQLTLQPGFWKLPHAWIHTDASLVYPTFGPQDSFSEERSDVCLVQLLGTGTDSSEPCGLSDLCRSLMTKPGCSGYCLSHQLLFFLWARMRGCTQGPLQQSQDYINLFCANMMDLNRRAEAIGYAYPTRDIFMENNVTGHPVFYLPLCDSFLPPKAAPVTELYTDGPVMFCGMGGFSDFYKLRWLEAILSWQKQQEGCFGEPDAEDEELSKAIQYQQHFSRRVKRREKQFPDSRSVAQAGVQWRNLGSLQPLPPGFKQFSCLILPSSWDYRSVPPYLANFYIFLVETGFHHVAHAGLELLISRDPPTSGSQSVGL

SEQ ID NO: 84013 - protein, 97 aa, Homo sapiens
MLTCAFRYGRDDLEVIGLTFRKDLYVQTLQVVPAESSSPQGPLTVLQERLLHKLGDNAYPFTLQMVTNLPCSVTLQPGPEDAGKPCGIDFEVKSFCA

SEQ ID NO: 84014 - protein, 164 aa, Homo sapiens
MHLLGPWLLLLVLEYLAFSDSSKWVFEHPETLYAWEGACVWIPCTYRALDGDLESFILFHNPEYNKNTSKFDGTRLYESTKDGKVPSEQKRVQFLGDKNKNCTLSIHPVHLNDSGQLGLRMESKTEKWMERIHLNVSDPPKKVTTVIQNPMPIREGDTVTLSCN

SEQ ID NO: 84015 - protein, 402 aa, Homo sapiens
MSKSKVDNQFYSVEVGDSTFTVLKRYQNLKPIGSGAQGIVCAAYDAVLDRNVAIKKLSRPFQNQTHAKRAYRELVLMKCVNHKNIISLLNVFTPQKTLEEFQDVYLVMELMDANLCQVIQMELDHERMSYLLYQMLCGIKHLHSAGIIHRDLKPSNIVVKSDCTLKILDFGLARTAGTSFMMTPYVVTRYYRAPEVILGMGYKENDIDQWNKVIEQLGTPCPEFMKKLQPTVRNYVENRPKYAGLTFPKLFPDSLFPADSEHNKLKASQARDLLSKMLVIDPAKRISVDDALQHPYINVWYDPAEVEAPPPQIYDKQLDEREHTIEEWKELIYKEVMNSEEKTKNGVVKGQPSPSGAAVNSSESLPPSSSVNDISSMSTDQTLASDTDSSLEASAGPLGCCR

SEQ ID NO: 84016 - protein, 19 aa, Homo sapiens
MGWLTRIVCLFWGVLLTAR

SEQ ID NO: 84017 - protein, 96 aa, Homo sapiens
MDLIPNFAMETWVLVATSLVLLYIYGTHSHKLFKKLGIPGPTPLPFLGTILFYLRPLGPMGFLKSALSFAEDEEWKRIRTLLSPAFTSVKFKEVRK

SEQ ID NO: 84018 - protein, 56 aa, Homo sapiens
MQESQETHISNHLDEVVAAVSITHRKKFQNKLLQTALFQPPREKLHLCEEKAKSYS

SEQ ID NO: 84019 - protein, 149 aa, Homo sapiens
MGRVFLTGEKANSILKRYPRANGFFEEIRQGNIERECKEEFCTFEEAREAFENNEKTKEFWSTYTKAQQGESNRGSDWFQFYLTFPLIFGLFIILLVIFLIWRCFLRNKTRRQTVTEGHIPFPQHLNIITPPPPPDEVFDSSGLSPGFL

SEQ ID NO: 84020 - protein, 13 aa, Homo sapiens
  MOD_RES (1)..(1): Any amino acid
XDREVRLQLARKR

SEQ ID NO: 84021 - protein, 37 aa, Homo sapiens
EGARLGRTPAEVVSTCDITFACVSDPKAAKDLIEIRK

SEQ ID NO: 84022 - protein, 66 aa, Homo sapiens
MERRLIKKEMKKLLGDYIGIRLRENEFDPKGRRQLTFLDDMAHYDLAISVALQWLDPSEDLTWLEW

SEQ ID NO: 84023 - protein, 381 aa, Homo sapiens
  MOD_RES (1)..(1): Any amino acid
XGAVDLDALTDEKERKALEGMINNFGQTPCQLLKITISMNYVIGTHGWLPYDRNISNYFTFIKDQTVTNPKTQRSINGSFAPGLEITSKLFVVSHDAKLLFSAGYWDNSIQVMSLTKGKIISHIIRHMDIVTCLATDYCGIHLISGSRDTTCMIWQITQQGGVPVGLASKPFQILYGHTNEVLSVGISTELDMAVSGSRDGTVIIHTIQKGQYMRTLRPPCESSLFLTIPNLAISWEGHIVVYSSTEEKTTLKDKNALHLFSINGKYLGSQILKEQVSDICIIGEHIVTGSIQGFLSIRDLHSLNLSINPLAMRLPIHCVCVTKEYSHILVGLEDGKLIVVGVGKPAEMRSGQLSRKFWGSSKRLSQISAGETEYNTQDSK

SEQ ID NO: 84024 - protein, 242 aa, Homo sapiens
MNKDYQKFWSSPSDPVHFEVDTSHEKVESMSESDTMNVSNLSQGVMLSHSPICMETTGTTCDLPQNEIKNFERENEYESTLCEDAYGTLDNLLNDNNIENYSTNALIQPVDTISISSLRQFETVCKFHWVEAFDDEMTEKPEFQSQVYNYAKDNNIKQDSFKEENPMETSVSANTDQLGNEYFRQPPPRSPPLIHCSGEMLKFTEKSLAKSIAKESALNPSQPPSFLYCSSFKRNTELWGDS

SEQ ID NO: 84025 - protein, 495 aa, Homo sapiens
MAAAMPLALLVLLLLGPGGWCLAEPPRDSLREELVITPLPSGDVAATFQFRTRWDSELQREGVSHYRLFPKALGQLISKYSLRELHLSFTQGFWRTRYWGPPFLQAPSGAELWVWFQDTVTDVDKSWKELSNVLSGIFCASLNFIDSTNTVTPTASFKPLGLANDTDHYFLRYAVLPREVVCTENLTPWKKLLPCSSKAGLSVLLKADRLFHTSYHSQAVHIRPVCRNARCTSISWELRQTLSVVFDAFITGQGKKDWSLFRMFSRTLTEPCPLASESRVYVDITTYNQDNETLEVHPPPTTTYQDVILGTRKTYAIYDLLDTAMINNSRNLNIQLKWKRPPENEAPPVPFLHAQRYVSGYGLQKGELSTLLYNTHPYRAFPVLLLDTVPWYLRLYVHTLTITSKGKENKPSYIHYQPAQDRLQPHLLEMLIQLPANSVTKVSIQFERALLKWTEYTPDPNHGFYVSPSVLSALVPSMVAAKPVDWEESPLFNSL

SEQ ID NO: 84026 - protein, 177 aa, Homo sapiens
MPVPERPAAGPDSPRPGTRRAAPRVLFGEWLLGEISSGCYEGLQWLDEARTCFRVPWKHFARKDLSEADARIFKAWAVARGRWPPSSRGGGPPPEAETAERAGWKTNFRCALRSTRRFVMLRDNSGDPADPHKVYALSRELCWREGPGTDQTEAEAPAAVPPPQAQGSLLGSCTGGQ

SEQ ID NO: 84027 - protein, 842 aa, Homo sapiens
MKSCGVSLATAAAAAAAFGDEEKKMAAGKASGESEEASPSLTAEEREALGGLDSRLFGFVRFHEDGARTKALLGKAVRCYESLILKAEGKVESDFFCQLGHFNLLLEDYPKALSAYQRYYSLQSDYWKNAAFLYGLGLVYFHYNAFQWAIKAFQEVLYVDPSFCRAKEIHLRLGLMFKVNTDYESSLKHFQLALVDCNPCTLSNAEIQFHIAHLYETQRKYHSAKEAYEQLLQTENLSAQVKATVLQQLGWMHHTVDLLGDKATKESYAIQYLQKSLEADPNSGQSWYFLGRCYSSIGKVQDAFISYRQSIDKSEASADTWCSIGVLYQQQNQPMDALQAYICAVQLDHGHAAAWMDLGTLYESCNQPQDAIKCYLNATRSKSCSNTSALAARIKYLQACKPHHPNTEPVLGLSQTPISQQSLPLHMIPSSQVDDLSSPAKRKRTSSPTKNTSDNWSGGHAVSHPPVQQQAHSWCLTPQKLQHLEQLRANRNNLNPAQKLMLEQLESQFVLMQQHQMRPTGVAQVRSTGIPNGPTADSSLPTNSVSGQQPQLALTRVPSVSQPGVRPACPGQPLANGPFSAGHVPCSTSRTLGSTDTILIGNNHITGSGSNGNVPYLQRNALTLPHNRTNLTSSAEEPWKNQLSNSTQGLHKGQSSHSAGPNGERPLSSTGPSQHLQAAGSGIQNQNGHPTLPSNSVTQGAALNHLSSHTATSGGQQGITLTKESKPSGNILTVPETSRHTGETPNSTASVEGLPNHVHQMTADAVCSPSHGDSKSPGLLSSDNPQLSALLMGKANNNPFQQQHLLQNPLSRQPQTVLPALTALTVGYTQLMEKGWKNLRAP

SEQ ID NO: 84028 - protein, 664 aa, Homo sapiens
MQAHELFRYFRMPELVDFRQYVRTLPTNTLMGFGAFAALTTFWYATRPKPLKPPCDLSMQSVEVAGSGGARRSALLDSDEPLVYFYDDVTTLYEGFQRGIQVSNNGPCLGSRKPDQPYEWLSYKQWVIIEQGCFAYSMVIVPLYDTLGNEAITYIVNKAELSLVFVDKPEKAKLLLEGVENKLIPGLKIIVVMDAYGSELVERGQRCGVEVTSMKAMEDLGRANRRKPKPPAPEDLAVICFTSGTTGNPKGAMVTHRNIVSDCSAFVKATENTVNPCPDDTLISFLPLAHMFERVVECVMLCHGAKIGFFQGDIRLLMDDLKVLQPTVFPVVPRLLNRMFDRIFGQANTTLKRWLLDFASKRKEAELRSGIIRNNSLWDRLIFHKVQSSLGGRVRLMVTGAAPVSATVLTFLRAALGCQFYEGYGQTECTAGCCLTMPGDWTAGHVGAPMPCNLIKLVDVEEMNYMAAEGEGEVCVKGPNVFQGYLKDPAKTAEALDKDGWLHTGDIGKWLPNGTLKIIDRKKHIFKLAQGEYIAPEKIENIYMRSEPVAQVFVHGESLQAFLIAIVVPDVETLCSWAQKRGFEGSFEELCRNKDVKKAILEDMVRLGKDSGLKPFEQVKGITLHPELFSIDNGLLTPTMKAKRPELRNYFRSQIDDLYSTIKV

SEQ ID NO: 84029 - protein, 1241 aa, Homo sapiens
MSVKEGAQRKWAALKEKLGPQDSDPTEANLESADPELCIRLLQMPSVVNYSGLRKRLEGSDGGWMVQFLEQSGLDLLLEALARLSGRGVARISDALLQLTCVSCVRAVMNSRQGIEYILSNQGYVRQLSQALDTSNVMVKKQVFELLAALCIYSPEGHVLTLDALDHYKTVCSQQYRFSIVMNELSGSDNVPYVVTLLSVINAVILGPEDLRARTQLRNEFIGLQLLDVLARLRDLEDADLLIQLEAFEEAKAEDEEELLRVSGGVDMSSHQEVSCSPVSAQLLSVLQGLLHLEPTLRSSQLLWEALESLVNRAVLLASDAQECTLEEVVERLLSVKGRPRPSPLVKAHKSVQANLDQSQRGSSPQNTTTPKPSVEGQQPAAAAACEPVDHAQSESILKVSQPRALEQQASTPPPPPPPPLLPGSSAEPPPPPPPPPLPSVGAKALPTAPPPPPLPGLGAMAPPAPPLPPPLPGSCEFLPPPPPPLPGLGCPPPPPPLLPGMGWGPPPPPPPLLPCTCSPPVAGGMEEVIVAQVDHGLGSAWVPSHRRVNPPTLRMKKLNWQKLPSNVAREHNSMWASLSSPDAEAVEPDFSSIERLFSFPAAKPKEPTMVAPRARKEPKEITFLDAKKSLNLNIFLKQFKCSNEEVAAMIRAGDTTKFDVEVLKQLLKLLPEKHEIENLRAFTEERAKLASADHFYLLLLAIPCYQLRIECMLLCEGAAAVLDMVRPKAQLVLAACESLLTSRQLPIFCQLILRIGNFLNYGSHTGDADGFKISTLLKLTETKSQQNRVTLLHHVLEEAEKSHPDLLQLPRDLEQPSQAAGINLEIIRSEASSNLKKLLETERKVSASVAEVQEQYTERLQASISAFRALDELFEAIEQKQRELADYLCEDAQQLSLEDTFSTMKAFRDLFLRALKENKDRKEQAAKAERRKQQLAEEEARRPRGEDGKPVRKGPGKQEEVCVIDALLADIRKGFQLRKTARGRGDTDGGSKAASMDPPRATEPVATSNPAGDPVGSTRCPASEPGLDATTASESRGWDLVDAVTPGPQPTLEQLEEGGPRPLERRSSWYVDASDVLTTEDPQCPQPLEGAWPVTLGDAQALKPLKFSSNQPPAAGSSRQDAKDPTSLLGVLQAEADSTSEGLEDAVHSRGARPPAAGPGGDEDEDEEDTAPESALDTSLDKSFSEDAVTDSSGSGTLPRARGRASKGTGKRRKKRPSRSQEEVPPDSDDNKTKKLCVIQ

SEQ ID NO: 84030 - protein, 5070 aa, Homo sapiens; identical to SEQ ID NO: 24945

SEQ ID NO: 84031 - protein, 716 aa, Homo sapiens
MSQWYELQQLDSKFLEQVHQLYDDSFPMEIRQYLAQWLEKQDWEHAANDVSFATIRFHDLLSQLDDQYSRFSLENNFLLQHNIRKSKRNLQDNFQEDPIQMSMIIYSCLKEERKILENAQRFNQAQSGNIQSTVMLDKQKELDSKVRNVKDKVMCIEHEIKSLEDLQDEYDFKCKTLQNREHETNGVAKSDQKQEQLLLKKMYLMLDNKRKEVVHKIIELLNVTELTQNALINDELVEWKRRQQSACIGGPPNACLDQLQNWFTIVAESLQQVRQQLKKLEELEQKYTYEHDPITKNKQVLWDRTFSLFQQLIQSSFVVERQPCMPTHPQRPLVLKTGVQFTVKLRLLVKLQELNYNLKVKVLFDKDVNERNTVKGFRKFNILGTHTKVMNMEESTNGSLAAEFRHLQLKEQKNAGTRTNEGPLIVTEELHSLSFETQLCQPGLVIDLETTSLPVVVISNVSQLPSGWASILWYNMLVAEPRNLSFFLTPPCARWAQLSEVLSWQFSSVTKRGLNVDQLNMLGEKLLGPNASPDGLIPWTRFCKENINDKNFPFWLWIESILELIKKHLLPLWNDGCIMGFISKERERALLKDQQPGTFLLRFSESSREGAITFTWVERSQNGGEPDFHAVEPYTKKELSAVTFPDIIRNYKVMAAENIPENPLKYLYPNIDKDHAFGKYYSRPKEAPEPMELDGPKGTGYIKTELISVSEVTVLG

SEQ ID NO: 84032 - protein, 880 aa, Homo sapiens
  MOD_RES (1)..(1): Any amino acid
XGGQAPGFLLRLHTEGRAEAARVQEQDLRQWGLTGIHLRSYQLEGVNWLAQRFHCQNGCILGDEMGLGKTCQTIALFIYLAGRLNDEGPFLILCPLSVLSNWKEEMQRFAPGLSCVTYAGDKEERACLQQDLKQESRFHVLLTTYEICLKDASFLKSFPWSVLVVDEAHRLKNQSSLLHKTLSEFSVVFSLLLTGTPIQNSLQELYSLLSFVEPDLFSKEEVGDFIQRYQDIEKESESASELHKLLQPFLLRRVKAEVATELPKKTEVVIYHGMSALQKKYYKAILMKDLDAFENETAKKVKLQNILSQLRKCVDHPYLFDGVEPEPFEVGDHLTEASGKLHLLDKLLAFLYSGGHRVLLFSQMTQMLDILQDYMDYRGYSYERVDGSVRGEERHLAIKNFGQQPIFVFLLSTRAGGVGMNLTAADTVIFVDSDFNPQNDLQAAARAHRIGQNKSVKVIRLIGRDTVEEIVYRKAASKLQLTNMIIEGGHFTLGAQKPAADADLQLSEILKFGLDKLLASEGSTMDEIDLESILGETKDGQWVSDALPAAEGGSRDQEEGKNHMYLFEGKDYSKEPSKEDRKSFEQLVNLQKTLLEKASQEGRSLRNKGSVLIPGLVEGSTKRKRVLSPEELEDRQKKRQEAAAKRRRLIEEKKRQKEEAEHKKKMAWWESNNYQSFCLPSEESEPEDLENGEESSAELDYQDPDATSLKYVSGDVTHPQAGAEDALIVHCVDDSGHWGRGGLFTALEKRSAEPRKIYELAGKMKDLSLGGVLLFPVDDKESRNKGQDLLALIVAQHRDRSNVLSGIKMAALEEGLKKIFLAAKKKKGRLHPPGIFIVILQMRWQRTRHEATWSYVVDMCSSLHNSKCSSSTYWTCHERF

SEQ ID NO: 84033 - protein, 68 aa, Homo sapiens
MRVNVDKVLERDQKLSELDDRADALQAGASQFETSAAKLKRKYWWKNLKMMIILGVICAIILIIIIGE

SEQ ID NO: 84034 - protein, 110 aa, Homo sapiens
MSMLRLQKRLASSVLRCGKKKVWLDPNETNEIANANSRQQIRKLIKDGLIIRKPVTVHSRARCRKNTLARRKGRHMGIGKSEGYSQCPNAREGHMDEENEDFAPAAQKIP

SEQ ID NO: 84035 - protein, 91 aa, Homo sapiens
SCGDSSPDTFSDGLSSSTLPDDHSSYTVPGYMQDLEVEQALTPALSPTGTSQWKLCRTAPVICTTSRCHPCPPPLKLQQMRMRKGNYLRTS

SEQ ID NO: 84036 - protein, 527 aa, Homo sapiens
MPAPRAREQPRVPGERQPLLPRGARGPRRWRRAAGAAVLLVEMLERAAFFGVTANLVLYLNSTNFNWTGEQATRAALVFLGASYLLAPVGGWLADVYLGRYRAVALSLLLYLAASGLLPATAFPDGRSSFCGEMPASPLGPACPSAGCPRSSPSPYCAPVLYAGLLLLGLAASSVRSNLTSFGADQVMDLGRDATRRFFNWFYWSINLGAVLSLLVVAFIQQNISFLLGYSIPVGCVGLAFFIFLFATPVFITKPPMGSQVSSMLKLALQNCCPQLWQRHSARDRQCARVLADERSPQPGASPQEDIANFQVLVKILPVMVTLVPYWMVYFQSTYVLQGLHLHIPNIFPANPANISVALRAQGSSYTIPEAWLLLANVVVVLILVPLKDRLIDPLLLRCKLLPSALQKMALGMFFGFTSVIVAGVLEMERLHYIHHNETVSQQIGEVLYNAAPLSIWWQIPQYLLIGISEIFASIPGNINNCRMDLYFFLLAGIQAVTALLFVWIAGRYERASQGPASHSRFSRDRG

SEQ ID NO: 84037 - protein, 82 aa, Homo sapiens
IQVRTRGWMPGLSVPTKSSRPSFKTRRGSCWEKLARRSSRGTTRTSVWASRHPRRLLRAPTLTRNAPSLVMCPFEGGSSLAW

SEQ ID NO: 84038 - protein, 7 aa, Homo sapiens
  MOD_RES (1)..(1): Any amino acid
XLRGPLF

SEQ ID NO: 84039 - protein, 131 aa, Homo sapiens
PAAGAVASYDYLVIGGGSGGLASARRAAELGARAAVVESHKLGGTCVNVGCVPKKVMWNTAVHSEFMHDHADYGFPSCEGKFNWRVIKEKRDAYVSRLNAIYQNNLTKPQRHCWCRLHCCGDGRDPVSPGF

SEQ ID NO: 84040 - protein, 68 aa, Homo sapiens
MECDLMETDILESLEDLGYKGPLLEDGALSQAVSAGASSPEFTKLCAWLVSELRVLCKLEENVQATNS

SEQ ID NO: 84041 - protein, 998 aa, Homo sapiens
METRAAENTAIFMCKCCNLFSPNQSELLSHVSEKHMEEGVNVDEIIIPLRPLSTPEPPNSSKTGDEFLVMKRKRGRPKGSTKKSSTEEELAENIVSPTEDSPLAPEEGNSLPPSSLECSKCCRKFSNTRQLRKHICIIVLNLGEEEGEAGNESDLELEKKCKEDDREKASKRPRSQKTEKVQKISGKEARQLSGAKKPIISVVLTAHEAIPGATKIVPVEAGPPETGATNSETTSADLVPRRGYQEYAIQQTPYEQPMKSSRLGPTQLKIFTCEYCNKVFKFKHSLQAHLRIHTNEKPYKCPQCSYASAIKANLNVHLRKHTGEKFACDYCSFTCLSKGHLKVHIERVHKKIKQHCRFCKKKYSDVKNLIKHIRDAHDPQDKKVKEALDELCLMTREGKRQLLYDCHICERKFKNELDRDRHMLVHGDKWPFACELCGHGATKYQALELHVRKHPFVYVCAVCRKKFVSSIRLRTHIKEVHGAAQEALVFTSSINQSFCLLEPGGDIQQEALGDQLQLVEEEFALQGVNALKEEACPGDTQLEEGRKEPEAPGEMPAPAVHLASPQAESTALPPCELETTVVSSSDLHSQEVVSDDFLLKNDTSSAEAHAAPEKPPDMQHRSSVQTQGEVITLLLSKAQSAGSDQESHGAQSPLGEGQNMAVLSAGDPDPSRCLRSNPAEASDLLPPVAGGGDTITHQPDSCKAAPEHRSGITAFMKVLNSLQKKQMNTSLCERIRKVYGDLECEYCGKLFWYQVHFDMHVRTHTREHLYYCSQCHYSSITKNCLKRHVIQKHSNILLKCPTDGCDYSTPDKYKLQAHLKVHTALDKRSYSCPVCEKSFSEDRLIKSHIKTNHPEVSMSTISEVLGRRVQLKGLIGKRAMKCPYCDFYFMKNGSDLQRHIWAHEGVKPFKCSLCEYATRSKSNLKAHMNRHSTEKTHLCDMCGKKFKSKGTLKSHKLLHTADGKQFKCTVCDYTAAQKPQLLRHMEQHVSFKKRSIAL

SEQ ID NO: 84042 - protein, 37 aa, Homo sapiens
MASQSQGIQQLLQAEKRAAEKVSEARKSIGIPWQLQH

SEQ ID NO: 84043 - protein, 128 aa, Homo sapiens
GGGGGRPGAPAAGDGKTEQKGGDKKRGVKRPREDHGRGYFEYIEENKYSRAKSPQPPVEEEDEHFDDTVVCLDTYNCDLHFKISRDRLSASSLTMESFAFLWAGGRASYGVSKGYREDPSKAFIYKRY

SEQ ID NO: 84044 - protein, 134 aa, Homo sapiens
QELTIYAPLGRSVEVTKMSCQIPQEPQRLIYSYSIVGGNSQNRFILQGAILVHSDLVLGPFWPEQPRTYELLICVADAGPSTPHLSTTATIIVHLVPRRASTVATSTHRTTVGPAAASTQQTSPGFAAKQHPGN

SEQ ID NO: 84045 - protein, 38 aa, Homo sapiens
MEEPAAPSEAHEAAGAQVNGMDSENQEESQVIKGSVPE

SEQ ID NO: 84046 - protein, 1027 aa, Homo sapiens
MLPLGSEPALNELLLRKEEEWRALQAHRTQLQEAALQDTRSQLEEAQGKLRCLQEDFVYNLQVLEERDLELERYDAAFAQAREWEEARRAEVSELKIEAAKLRQALAREARKVEELQQQQQLAFQEHRLELERVHSDKNGEIDHHREQYENLKWTLERKLEELDGELALQRQELLLEFESKMRKREHEFRLQADNMSNTALSRELKVKLLHKELEALKEAGAKAAESLQRAEATNAELERKLQSRAGELQDLEAMSRARVKDLEDKLHSVQLTRKKEEETFKRKHEELDRLAREKDAVLVAVKGAHVEQLQELQTRVLELQAHCETLEAQLRRAEWRQADTAKEKDAAIDQLREDASTVKSAWDAQIAQLSKEMVSRDLQIQTLQEEEVKLKAQVARSQQDIERYKQQLSLAVERERSLERDQVQLGLDWQRRCDDIERDQIQKSEALIQGLSMAKSQVAAKLQETEQALQEQEVVLKAVTLERDQAVQALRMHGLPRPGAQMLLRQHEEEISKDFPSSEIQRLREQNTSLRNAIAQMRKEMEALSHQIPPPIQTAAESTDANQPDPEAGGDAATPDYVLALEAEIRTLKHKFKTLEKHLEDVLDPLKMSSPHAESQPSVRTSTETTGGSAQAGQAGGSVQAGQAGGSVQAGPVSSGLALRKLGDRVQLLNLLVTRLRQKVLREPLEPAALQRELPREVDQVHLEVLELRKQVAELGKHLRIAQHGGAEPSGRKQPPASDAVALGREGLTKRGPMEAEDQGELFLHLRSVARAPQTLSMHRLQRKLKEAARKIISLRLEKEQLIEMGNRLRAELGRPERWLLHHALPPAPEARKPGEEPRRPLDRSPPLGQVQPHFTSQDAKSAEDEAPSRHLGKHQPRSAQVGSRLDALQGPKTQHSIHTVTCKSPRQKEDRSPKPPQAPQHPEEHGRQSHSSSSFASGTLQDMWRLLDLGSSPSGVTSQGDSTPELPAPPAADRRPVKMQAGIATPGMKTAAQAKAKTTGASRSHPAKAKGCQRPPKIRNYNIMD

SEQ ID NO: 84047 - protein, 228 aa, Homo sapiens
  MOD_RES (1)..(1): Any amino acid
XRPLQDAAEDLKAKLEKSLEHLRKQMQDALLFQAQADETCVLWQDIKDALRRVQDVKLQPPEVVPMELRTVCRVPGLVETLRRFRGDVTLDPDTANPELILSEDRRSVQRGDLRQALPDSPERFDPGPCVLGQERFTSGRHYWEVEVGDRTSWALGVCRENVNRKEKGELSAGNGFWILVFLGSYYNSSERALAPLRDPPRRVGIFLDYEAGHLSFYSATDGSLLFIF

SEQ ID NO: 84048 - protein, 403 aa, Homo sapiens
  MOD_RES (1)..(1): Any amino acid
XIGLQNFEIAKDFVVKVIDRLSRDELVKFEPGQSYAGVVQYSHSQMQEHVSLRSPSIRNVQELKEAIKSLQWMAGGTFTGEALQYTRDQLLPPSPNNRIALVITDGRSDTQRDTTPLNVLCSPGIQVVSVGIKDVFDFIPGSDQLNVISCQGLAPSQGRPGLSLVKENYAELLEDAFLKNVTAQICIDKKCPDYTCPITFSSPADITILLDGSASVGSHNFDTTKRFAKRLAERFLTAGRTDPAHDVRVAVVQYSGTGQQRPERASLQFLQNYTALASAVDAMDFINDATDVNDALGYVTRFYREASSGAAKKRLLLFSDGNSQGATPAAIEKAVQEAQRAGIEIFVVVVGRQLGAAIGLCLVLGNQGQEAVADINLGDSAPSPEGPAGDRPGPWPYSPGGRC

SEQ ID NO: 84049 - protein, 371 aa, Homo sapiens
MLRVRCLRGGSRGAEAVHYIGSRLGRTLTGWVQRTFQSTQAATASSRNSCAADDKATEPLPKDCPVSSYNEWDPLEEVIVGRAENACVPPFTIEVKANTYEKYWPFYQKQGGHYFPKDHLKKAVAEIEEMCNILKTEGVTVRRPDPIDWSLKYKTPDFESTGLYSAMPRDILIVVGNEIIEAPMAWRSRFFEYRAYRSIIKDYFHRGAKWTTAPKPTMADELYNQDYPIHSVEDRHKLAAQGKFVTTEFEPCFDAADFIRAGRDIFAQRSQVTNYLGIEWMRRHLAPDYRVHIISFKDPNPMHIDATFNIIGPGIVLSNPDRPCHQIDLFKKAGWTIITPPTPIIPDVVAVFRSSTLDVIQMAFHECLNAR

SEQ ID NO: 84050 - protein, 22 aa, Homo sapiens
  MOD_RES (1)..(1): Any amino acid
XRKSKSSRDAKSKAKRKQLHSA

SEQ ID NO: 84051 - protein, 285 aa, Homo sapiens
MEVTDRIASLEQRVQMQEDDIQLLKSALADVVRRLNITEEQQAVLNRKGPTKARPLMQTLPLRTTVNNGTVLPKKPTGSLPSPSGVRKETAVPATKSNIKRTSSSERVSPGGRRESNGDSRGNRNRTGSTSSSSSGKKNSESKPKEPVFSAEEGYVKMFLRGRPVTMYMPKDQVDSYSLEAKVELPTKRLKLEWVYGYRGRDCRNNLYLLPTGETVYFIASVVVLYNVEEQLQRHYAGHNDDVKCLAVHPDRITIATGQVAGTSKDGKQLPPHVRIWDSVTLNTL

SEQ ID NO: 84052 - protein, 56 aa, Homo sapiens
  MOD_RES (1)..(1): Any amino acid
XLLLNLVLIGRQDRLKRREVERRLRGIIDQIQDGAWTWPCPDQSLPWTMSGSQCSR

SEQ ID NO: 84053 - protein, 171 aa, Homo sapiens
RSVLQLLHSTSDVVRQYMARLINAFASLAEGRLYLAQNTKVLQMLEGRLKEEDKDIITRENVLGALQKFSLRRPLQTAMIQDGLIFWLVDVLKDPDCLSDYTLEYSVALLMNLCLRSTGKNMCAKVAGLVLKVLSDLLGHENHEIQPYVNGALYSILSVPSIREEARAMVP

SEQ ID NO: 84054 - protein, 187 aa, Homo sapiens
  MOD_RES (1)..(1): Any amino acid
XLTADARIVINRARVECQSHRLTVEDPVTVEYITRYIASLKQRYTQSNGRRPFGISALIVGFDFDGTPRLYQTDPSGTYHAWKANAIGRGAKSVREFLEKNYTDEAIETDDLTIKLVIKALLEGKVVNAPVFCPFKVVQSGGKNIELAVMRRDQSLKILNPEEIEKYVAEIEKEKEENEKKKQKKAS

SEQ ID NO: 84055 - protein, 130 aa, Homo sapiens
DYLEVKRLIFPRFYFLSNAELLDILADSRNPESVQPHLVKCFENIKQLLIWKQDIGPPAVKMLISAEGEGLVLPKYDKCYKLFRFCTTSLFKISALKFLIYYKSALSKLFLQRLYPYVNILLPFHIPYNT

SEQ ID NO: 84056 - protein, 26 aa, Homo sapiens
  MOD_RES (1)..(1): Any amino acid
XPPIVPPSQQPAEQRPDSCESLSVQG

SEQ ID NO: 84057 - protein, 331 aa, Homo sapiens
MSLMVVSMACVGFFLLQGAWPHEGVHRKPSLLAHPGRLVKSEETVILQCWSDVRFEHFLLHREGKFKDTLHLIGEHHDGVSKANFSIGPMMQDLAGTYRCYGSVTHSPYQLSAPSDPLDIVITGLYEKPSLSAQPGPTVLAGESVTLSCSSRSSYDMYHLSREGEAHECRFSAGPKVNGTFQADFPLGPATHGGTYRCFGSFRDSPYEWSNSSDPLLVSVTGNPRHLHILIGTSVVIILFILLFFLLHRWCSNKKNAAVMDQESAGNRTANSEDSDEQDPQEVTYTQLNHCVFTQRKITRPSQRPKTPPTDIIVYTELPNAESRSKVVSCP

SEQ ID NO: 84058 - protein, 830 aa, Homo sapiens
MTSLPRLRLNTRDQAIQLGTRVWLRENGQHFPSTVNSCAEGIVVFRTDYGQVFTYKQSTITHQKVTAMHPTNEEGVDDMASLTELHGGSIMYNLFQRYKRNQIYTYIGSILASVNPYQPIAGLYEPATMEQYSRRHLGELPPHIFAIANECYRCLWKRHDNQCILISGESGAGKTESTKLILKFLSVISQQSLELSLKEKTSCVERAILESSPIMEAFGNAKTVYNNNSSRFGKFVQLNICQKGNIQGGRIVDYLLEKNRVVRQNPGERNYHIFYALLAGLEHEEREEFYLSTPENYHYLNQSGCVEDKTISDQESFREVITAMDVMQFSKEEVREVSRLLAGILHLGNIEFITAGGAQVSFKTALGRSAELLGLDPTQLTDALTQRSMFLRGEEILTPLNVQQAVDSRDSLAMALYACCFEWVIKKINSRIKGNEDFKSIGILDIFGFENFEVNHFEQFNINYANEKLQEYFNKHIFSLEQLEYSREGLVWEDIDWIDNGECLDLIEKKLGLLALINEESHFPQATDSTLLEKLHSQHANNHFYVKPRVAVNNFGVKHYAGEVQYDVRGILEKNRDTFRDDLLNLLRESRFDFIYDLFEHVSSRNNQDTLKCGSKHRRPTVSSQFKDSLHSLMATLSSSNPFFVRCIKPNMQKMPDQFDQAVVLNQLRYSGMLETVRIRKAGYAVRRPFQDFYKRYKVLMRNLALPEDVRGKCTSLLQLYDASNSEWQLGKTKVFLRESLEQKLEKRREEEVSHAAMVIRAHVLGFLARKQYRKVLYCVVIIQKNYRAFLLRRRFLHLKKAAIVFQKQLRGQIARRVYRQLLAEKREQE

SEQ ID NO: 84059 - protein, 272 aa, Homo sapiens
MTHIVREVDRPGSKVNKKEVVEAVTIVETPPMVVVGIVGYVETPRGLRTFKTVFAEHISDECKRRFYKNWHKSKKKAFTKYCKKWQDEDGKKQLEKDFSSMKKYCQVIRVIAHTQMRLLPLRQKKAHLMEIQVNGGTVAEKLDWARERLEQQVPVNQVFGQDEMIDVIGVTKGKGYKGVTSRWHTKKLPRKTHRGLRKVACIGAWHPARVAFSVARAGQKGYHHRTEINKKIYKIGQGYLIKDGKLIKNNASTDYDLSDKSINPLGGFVHYG

SEQ ID NO: 84060 - protein, 41 aa, Homo sapiens
MWVRTTLTIERWTKEKTEPKARSWDESRCRGAKATDLSLWQ

SEQ ID NO: 84061 - protein, 111 aa, Homo sapiens
MVSKSRWKLLAMLALVLVVMVWYSISREDRYIELFYFPIPEKKEPCLQGEAESKASKLFGNYSRDQPIFLRLEDYFWVKTPSAYELPYGTKGSEDLLLRVLAITSSSIPKN

SEQ ID NO: 84062 - protein, 1843 aa, Homo sapiens
MVDKNIYIIQGEINIVVGAIKRNARWSTHTPLDEERDPLLHSFGHLKEVLNSITELSEIEPNVFLRPFLEVIRSEDTTGPITGLALTSVNKFLSYALIDPTHEGTAEGMENMADAVTHARFVGTDPASDEVVLMKILQVLRTLLLTPVGAHLTNESVCEIMQSCFRICFEMRLSELLRKSAEHTLVDMVQLLFTRLPQFKEEPKNYVGTNMKKLKMRAGGMSDSSKWKKQKRSPRPPRHMTKVTPGSELPTPNGTTLSSNLTGGMPFIDVPTPISSASSEAASAVVSPSTDSGLEFSSQTTSKEDLTDLEQPGSPGYSTATEPGSSELGVPEQPDLQEGTHVEKSQSASVESIPEVLEECTSPADHSDSASVHDMDYVNPRGVRFTQSSQKEGTALVPYGLPCIRELFRFLISLTNPHDRHNSEVMIHMGLHLLTVALESAPVAQCQTLLGLIKDEMCRHLFQLLSIERLNLYAASLRVCFLLFESMREHLKFQMEMYIKKLMEIITVENPKMPYEMKEMALEAIVQLWRIPSFVTELYINYDCDYYCSNLFEELTKLLSKNAFPVSGQLYTTHLLSLDALLTVIDSTEAHCQAKVLNSLTQQEKKETARPSSERTASDGKAVGMASDIPGLHLPGGGRLPPEHGKSGCSDLEEAVDSGADKKFARKPPRFSCLLPDPRELIEIKNKKKLLITGTEQFNQKPKKGIQFLQEKGLLTIPMDNTEVAQWLRENPRLDKKMIGEFVSDRKNIDLLESFVSTFSFQGLRLDEALRLYLEAFRLPGEAPVIQRLLEAFTERWMNCNGSPFANSDACFSLAYAVIMLNTDQHNHNVRKQNAPMTLEEFRKNLKGVNGGKDFEQDILEDMYHAIKNEEIVMPEEQTGLVRENYVWNVLLHRGATPEGIFLRVPTASYDLDLFTMTWGPTIAALSYVFDKSLEETIIQKAISGFRKCAMISAHYGLSDVFDNLIISLCKFTALSSESIENLPSVFGSNPKAHIAAKTVFHLAHRHGDILREGWKNIMEAMLQLFRAQLLPKAMIEVEDFVDPNGKISLQREETPSNRGESTVLSFVSWLTLSGPEQSSVRGPSTENQEAKRVALECIKQCDPEKMITESKFLQLESLQELMKALVSVTPDEETYDEEDAAFCLEMLLRIVLENRDRVGCVWQTVRDHLYHLCVQAQDFCFLVERAVVGLLRLAIRLLRREEISAQVLLSLRILLLMKPSVLSRVSHQVAYGLHELLKTNAANIHSGDDWATLFTLLECIGSGVKPPAALQATARADAPDAGAQSDSELPSYHQNDVSLDRGYTSDSEVYTDHGRPGKIHRSATDADVVNSGWLVVGKDDVDNSKPGPSRPGPSPLINQYSLTVGLDLGPHDTKSLLKCVESLSFIVRDAAHITPDNFELCVKTLRIFVEASLNGGCKSQEKRGKSHKYDSKGNRFKKKSKEGSMLRRPRTSSQHASRGGQSDDDEDEGVPASYHTVSLQLLDLMHTLHTRAASIYSSWAEEQRHLETGGQKIEADSRTLWAHCWCPLLQGIACLCCDARRQVRMQALTYLQRALLVHDLQKLDALEWESCFNKVLFPLLTKLLENISPADVGGMEETRMRASTLLSKVFLQHLSPLLSLSTFAALWLTILDFMDKYMHAGSSDLLSEAIPESLKNMLLVMDTAEIFHSADARGGGPSALWEITWERIDCFLPHLRDELFKQTVIQDPMPMEPQGQKPLASAHLTSAAGDTRTPGHPPPPEIPSELGACDFEKPESPRAASSSSPGSPVASSPSRLSPTPDGPPPLAQPPLILQPLASPLQVGVPPMTLPIILNPALIEATSPVPLLATPRPTDPIPTSEVN

SEQ ID NO: 84063 - protein, 38 aa, Homo sapiens
  MOD_RES (1)..(1): Any amino acid
XLIDKDQSPKWKPADLKEVTEEDLNNHFKSLGSSDLKF

SEQ ID NO: 84064 - protein, 833 aa, Homo sapiens
MAEPRQEFEVMEDHAGTYGLGDRKDQGGYTMHQDQEGDTDAGLKESPLQTPTEDGSEEPGSETSDAKSTPTAEAEEAGIGDTPSLEDEAAGHVTQEELRVPGRQRKAPERPLANEISAHVQPGPCGEASGVSGPCLGEKEPEAPVPLTASLPQHRPVCPAPPPTGGPQEPSLEWGQKGGDWAEKGPAFPKPATTAYLHTEPESGKVVQEGFLREPGPPGLSHQLMSGMPGAPLLPEGPREATRQPSGTGPEDTEGGRHAPELLKHQLLGDLHQEGPPLKGAGGKERPGSKEEVDEDRDVDESSPQDSPPSKASPAQDGRPPQTAAREATSIPGFPAEGAIPLPVDFLSKVSTEIPASEPDGPSVGRAKGQDAPLEFTFHVEITPNVQKEQAHSEEHLGRAAFPGAPGEGPEARGPSLGEDTKEADLPEPSEKQPAAAPRGKPVSRVPQLKARMVSKSKDGTGSDDKKAKTSTRSSAKTLKNRPCLSPKHPTPGSSDPLIQPSSPAVCPEPPSSPKYVSSVTSRTGSSGAKEMKLKGADGKTKIATPRGAAPPGQKGQANATRIPAKTPPAPKTPPSSGEPPKSGDRSGYSSPGSPGTPGSRSRTPSLPTPPTREPKKVAVVRTPPKSPSSAKSRLQTAPVPMPDLKNVKSKIGSTENLKHQPGGGKVQIINKKLDLSNVQSKCGSKDNIKHVPGGGSVQIVYKPVDLSKVTSKCGSLGNIHHKPGGGQVEVKSEKLDFKDRVQSKIGSLDNITHVPGGGNKKIETHKLTFRENAKAKTDHGAEIVYKSPVVSGDTSPRHLSNVSSTGSIDMVDSPQLATLADEVSASLAKQGL

SEQ ID NO: 84065 - protein, 157 aa, Homo sapiens
MPDSNFAERSEEQVSGAKVIAQALKTQDVEYIFGIVGIPVTEIAIAAQQLGIKYIGMRNEQAVEACRLYTKFSARPSSIEAIPFVIEKAVRSSIYGRPGACYVDIPADFVNLQVNVNSIKYMERCMSPPISMAETSAVCTAASVIRNAKQPLLIIGK

SEQ ID NO: 84066 - protein, 457 aa, Homo sapiens
MRNYLKERGDQTVLILHAKVAQKSYGNEKRFFCPPPCVYLMGSGWKKKKEQMERDGCSEQESQPCAFIGIGNSDQEMQQLNLEGKNYCTAKTLYISDSDKRKHFMLSVKMFYGNSDDIGVFLSKRIKVISKPSKKKQSLKNADLCIASGTKVALFNRLRSQTVSTRYLHVEGGNFHASSQQWGAFFIHLLDDDESEGEEFTVRDGYIHYGQTVKLVCSVTGMALPRLIIRKVDKQTALLDADDPVSQLHKCAFYLKDTERMYLCLSQERIIQFQATPCPKEPNKEMINDGASWTIISTDKAEYTFYEGMGPVLAPVTPVPVVESLQLNGGGDVAMLELTGQNFTPNLRVWFGDVEAETMYRCGESMLCVVPDISAFREGWRWVRQPVQVPVTLVRNDGIIYSTSLTFTYTPEPGPRPHCSAAGAILRANSSQVPPNESNTNSEGSYTNASTNSTSVT

SEQ ID NO: 84067 - protein, 350 aa, Homo sapiens
  MOD_RES (1)..(1): Any amino acid
XGYPQGPYPQEGYPQGPYPQGGYPQGPYPQSPFPPNPYGQPQVFPGQDPDSPQHGNYQEEGPPSYYDNQDFPATNWDDKSIRQAFIRKVFLVLTLQLSVTLSTVSVFTFVAEVKGFVRENVWTYYVSYAVFFISLIVLSCCGDFRRKHPWNLVALVTPKPEPLCLGPAMQSHTPTLPGLVTVVLLVLMRQGPAGVAWGHTPKVSLCLPTAVGPDRQPVVHGGDDRQLLQHRGSHHGRGHHHSRLLHRRHLLHADPLRLHLMHGRAPGEHGGALHLRHSLHLHPEPHPGDRVRLTGRSALHLLPRSGHPAATGEQAAVPEPRRVCVCCAEPVHRHHQHLPVHPHHHWPRQG

SEQ ID NO: 84068 - protein, 494 aa, Homo sapiens [sequence omitted]

SEQ ID NO: 84069 - protein, 926 aa, Homo sapiens
MEDGKPVWAPHPTDGFQMGNIVDIGPDSLTIEPLNQKGKTFLALINQVFPAEEDSKKDVEDNCSLMYLNEATLLHNIKVRYSKDRIYTYVANILIAVNPYFDIPKIYSSEAIKSYQGKSLGTRPPHVFAIADKAFRDMKVLKMSQSIIVSGESGAGKTENTKFVLRYLTESYGTGQDIDDRIVEANPLLEAFGNAKTVRNNNSSRFGKFVEIHFNEKSSVVGGFVSHYLLEKSRICVQGKEERNYHIFYRLCAGASEDIREKLHLSSPDNFRYLNRGCTRYFANKETDKQILQNRKSPEYLKAGSMKDPLLDDHGDFIRMCTAMKKIGLDDEEKLDLFRVVAGVLHLGNIDFEEAGSTSGGCNLKNKSAQSLEYCAELLGLDQDDLRVSLTTRVMLTTAGGTKGTVIKVPLKVEQANNARDALAKTVYSHLFDHVVNRVNQCFPFETSSYFIGVLDIAGFEYFEHNSFEQFCINYCNEKLQQFFNERILKEEQELYQKEGLGVNEVHYVDNQDCIDLIEAKLVGILDILDEENRLPQPSDQHFTSAVHQKHKDHFRLTIPRKSKLAVHRNIRDDEGFIIRHFAGAVCYETTQFVEKNNDALHMSLESLICESRDKFIRELFESSTNNNKDTKQKAGKLSFISVGNKFKTQLNLLLDKLRSTGASFIRCIKPNLKMTSHHFEGAQILSQLQCSGMVSVLDLMQGGYPSRASFHELYNMYKKYMPDKLARLDPRLFCKALFKALGLNENDYKFGLTKVFFRPGKFAEFDQIMKSDPDHLAELVKRVNHWLTCSRWKKVQWCSLSVIKLKNKIKYRAEACIKMQKTIRMWLCKRRHKPRIDGLVKVGTLKKRLDKFNEVVSVLKDGKPEMNKQIKNLEISIDTLMAKIKSTMMTQEQIQKEYDALVKSSEELLSALQKKKQQEEEAERL

SEQ ID NO: 84070 - protein, 174 aa, Homo sapiens
MVRYSLDPENPTKSCKSRGSNLRVHFKNTRETAQAIKGMHIRKATKYLKDVTLQKQCVPFRRYNGGVGRCAQAKQWGWTQGRWPKKSAEFLLHMLKNAESNAELKGLDVDSLVIEHIQVNKAPKMRRRTYRAHGRINPYMSSPCHIEMILTEKEQIVPKPEEEVAQKKKISQKK

SEQ ID NO: 84071 - protein, 276 aa, Homo sapiens
MHQRHPRARCPPLCVAGILACGFLLGCWGPSHFQQSCLQALEPQAVSSYLSPGAPLKGRPPSPGFQRQRQRQRRAAGGILHLELLVAVGPDVFQAHQEDTERYVLTNLNIGAELLRDPSLGAQFRVHLVKMVILTEPEGAPNITANLTSSLLSVCGWSQTINPEDDTDPGHADLVLYITRFDLELPDGNRQVRGVTQLGGACSPTWSCLITEDTGFDLGVTIAHEIGHRICARPSPATQTRWTKAAAAASSFLSWMGQNVAWRSGAPRVAAAPWWS

SEQ ID NO: 84072 - protein, 477 aa, Homo sapiens
MTKAQESLTLEDVAVDFTWEEWQFLSPAQKDLYRDVMLENYSNLVSVGYQAGKPDALTKLEQGEPLWTLEDEIHSPAHPEIEKADDHLQQPLQNQKILKRTGQRYEHGRTLKSYLGLTNQSRRYNRKEPAEFNGDGAFLHDNHEQMPTEIEFPESRKPISTKSQFLKHQQTHNIEKAHECTDCGKAFLKKSQLTEHKRIHTGKKPHVCSLCGKAFYKKYRLTEHERAHKGEKPYGCSECGKAFPRKSELTEHQRIHTGIKPHQCSECGRAFSRKSLLVVHQRTHTGEKPHTCSECGKGFIQKGNLNIHQRTHTGEKPYGCIDCGKAFSQKSCLVAHQRYHTGKTPFVCPECGQPCSQKSGLIRHQKIHSGEKPYKCSDCGKAFLTKTMLIVHHRTHTGERPYGCDECEKAYFYMSCLVKHKRIHSREKRGDSVKVENPSTASHSLSPSEHVQGKSPVNMVTVAMVAGQCEFAHILHS

SEQ ID NO: 84073 - protein, 436 aa, Homo sapiens
MAEQESLEFGKADFVLMDTVSMPEFMANLRLRFEKGRIYTFIGEVVVSVNPYKLLNIYGRDTIEQYKGRELYERPPHLFAIADAAYKAMKRRSKDTCIVISGESGAGKTEASKYIMQYIAAITNPSQRAEVERVKNMLLKSNCVLEAFGNAKTNRNDNSSRFGKYMDINFDFKGDPIGGHINNYLLEKSRVIVQQPGERSFHSFYQLLQGGSEQMLRSLHLQKSLSSYNYIHVGAQLKSSINDAAEFRVVADAMKVIGFKPEEIQTVYKILAAILHLGNLKFVVDGDTPLIENGKVVSIIAELLSTKTDMVEKALLYRTVATGRDIIDKQHTEQEASYGRDAFAKAIYERLFCWIVTRINDIIEVKNYDTTIHGKNTVIGVLDIYGFEIFDNNSFEQFCINYCNEKLQQLFIQLVLKQEQEEYQREGIPWKHVGLL

SEQ ID NO: 84074 - protein, 2273 aa, Homo sapiens
MMPQKKRRRKKDIDFLALYEAELLNYASEDDEGELEHEYYKARVYEVVTATGDVRGAGTDANVFITLFGENGLSPKLQLTSKSKSAFEKGNVDVFRVRTNNVGLIYKVRIEHDNTGLNASWYLDHVIVTDMKRPHLRYYFNCNNWLSKVEGDRQWCRDLLASFNPMDMPRGNKYEVKVYTGDVIGAGTDADVFINIFGEYGDTGERRLENEKDNFEKGAEDRFILDAPDLGQLMKINVGHNNKGGSAGWFLSQIVIEDIGNKRKYDFPLNRWLALDEDDGKIQRDILVGGAETTAITYIVTVFTGDVRGAGTKSKIYLVMYGARGNKNSGKIFLEGGVFDRGRTDIFHIELAVLLSPLSRVSVGHGNVGVNRGWFCEKVVILCPFTGIQQTFPCSNWLDEKKADGLIERQLYEMVSLRKKRLKKFPWSLWVWTTDLKKAGTNSPIFIQIYGQKGRTDEILLNPNNKWFKPGIIEKFRIELPDLGRFYKIRVWHDKRSSGSGWHLERMTLMNTLNKDKYNFNCNRWLDANEDDNEIVREMTAEGPTVRRIMGMARYHVTVCTGELEGAGTDANVYLCLFGDVGDTGERLLYNCRNNTDLFEKGNADEFTIESVTMRNVRRVRIRHDGKGSGSGWYLDRVLVREEGQPESDNVEFPCLRWLDKDKDDGQLVRELLPSDSSATLKNFRYHISLKTGDVSGASTDSRVYIKLYGDKSDTIKQVLLVSDNNLKDYFERGRVDEFTLETLNIGNINRLVIGHDSTGMHASWFLGSVQIRVPRQGKQYTFPANRWLDKNQADGRLEVELYPSEVVEIQKLVHYEVEIWTGDVGGAGTSARVYMQIYGEKGKTEVLFLSSRSKVFERASKDTFQLEAADVGEVYKLRLGHTGEGFGPSWFVDTVWLRHLVVREVDLTPEEEARKKKEKDKLRQLLKKERLKAKLQRKKKKRKGSDEEDEGEEEESSSSEESSSEEEEMEEEEEEEEFGPGMQEVIEQHKFEAHRWLARGKEDNELVVELVPAGKPGPERNTYEVQVVTGNVPKAGTDANVYLTIYGEEYGDTGERPLKKSDKSNKFEQGQTDTFTIYAIDLGALTKIRIRHDNTGNRAGWFLDRIDITDMNNEITYYFPCQRWLAVEEDDGQLSRELLPVDESYVLPQSEEGRGGGDNNPLDNLALEQKDKSTTFSVTIKTGVKKNAGTDANVFITLFGTQDDTGMTLLKSSKTNSDKFERDSIEIFTVETLDLGDLWKVRLGHDNTGKAPGWFVDWVEVDAPSLGKCMTFPCGRWLAKNEDDGSIIRDLFHAELQTRLYTPFVPYEITLYTSDVFAAGTDANIFIIIYGCDAVCTQQKYLCTNKREQKQFFERKSASRFIVELEDVGEIIEKIRIGHNNTGMNPGWHCSHVDIRRLLPDKDGAETLTFPCDRWLATSEDDKKTIRELVPYDIFTEKYMKDGSLRQVYKEVEEPLDIVLYSVQIFTGNIPGAGTDAKVYITIYGDLGDTGERYLGKSENRTNKFERGTADTFIIEAADLGVIYKIKLRHDNSKWCADWYVEKVEIWNDTNEDEFLFLCGRWLSLKKEDGRLERLFYEKEYTGDRSSNCSSPADFWEIALSSKMADVDISTVTGPMADYVQEGPIIPYYVSVTTGKHKDAATDSRAFIFLIGEDDERSKRIWLDYPRGKRGFSRGSVEEFYVAGLDVGIIKKIELGHDGASPESCWLVEELCLAVPTQGTKYMLNCNCWLAKDRGDGITSRVFDLLDAMVVNIGVKVLYEMTVWTGDVVGGGTDSNIFMTLYGINGSTEEMQLDKKKARFEREQNDTFIMEILDIAPFTKMRIRIDGLGSRPEWFLERILLKNMNTGDLTMFYYGDWLSQRKGKKTLVCEMCAVIDEEEMMEWTSYTVAVKTSDILGAGTDANVFIIIFGENGDSGTLALKQSANWNKFERNNTDTFNFPDMLSLGHLCKLRVWHDNKGIFPGWHLSYVDVKDNSRDETFHFQCDCWLSKSEGDGQTVRDFACANNKICDELEETTYEIVIETGNGGETRENVWLILEGRKNRSKEFLMENSSRQRAFRKGTTDTFEFDSIYLGDIASLCVGHLAREDRFIPKRELAWHVKTITITEMEYGNVYFFNCDCLIPLKRKRKYFKVFEVTKTTESFASKVQSLVPVKYEVIVTTGYEPGAGTDANVFVTIFGANGDTGKRELKQKMRNLFERGSTDRFFLETLELGELRKVRLEHDSSGYCSGWLVEKVEVTNTSTGVATIFNCGRWLDKKRGDGLTWRDLFPSV

SEQ ID NO: 84075 - protein, 213 aa, Homo sapiens
MERASCLLLLLLPLVHVSATTPEPCELDDEDFRCVCNFSEPQPDWSEAFQCVSAVEVEIHAGGLNLEPFLKRVDADADPRQYADTVKALRVRRLTVGAAQVPAQLLVGALRVLAYSRLKELTLEDLKITGTMPPLPLEATGLALSSLRLRNVSWATGRSWLAELQQWLKPGLKVLSIAQAHSPAFSCEQVRAFPALTSLDLSDNPGLGERGLM

SEQ ID NO: 84076 - protein, 252 aa, Homo sapiens
MALVLILQLLTLFPPASYHPKPWLGAQPATVVTPGVNVTLRCRAPQPAWRFGLFKPGEIAPLLFRDVSSELAEFFLEEVTPAQGGSYRCCYRRPDWGPGVWSQPSDVLELLVTEELPRPSLVALPGPVVGPGANVSLRCAGRLRNMSFVLYREGVAAPLQYRHSAQPWADFTLLGARAPGTYSCYYHTPSAPYVLSQRSEVLVISWEDSGSSDYTRGNLVRLGLAGLVLISLGALVTFDWRSQNRAPAGIRP

SEQ ID NO: 84077 - protein, 125 aa, Homo sapiens
PHLDVYIEDPHLPPSLGLLPGARVHFSQLEKRVSRSHNVYCCFRSSTYVQVLSFPPETTISIPLPHIYLAELLQGGQSPFQATASCHIVSVFSLQLFWSSARVDEPMTMFLWTLCTSPSVLRPIV

SEQ ID NO: 84078 - protein, 81 aa, Homo sapiens
MSVPGPYQAATGPSSAPSAPPSYEETVAVNSYYPTPPAPMPGPTTGLVTGPDGKGMNPPSYYTQPAPIPNNNPMNAIGLVS

SEQ ID NO: 84079 - protein, 339 aa, Homo sapiens
MALRLLKLAATSASARVVAAGAQRVRGIHSSVQCKLRYGMWHFLLGDKASKRLTERSRVITVDGNICTGKGKLAKEIAEKLGFKHFPEAGIHYPDSTTGDGKPLATDYNGNCSLEKFYDDPRSNDGNSYRLQSWLYSSRLLQYSDALEHLLTTGQGVVLERSIFSDFVFLEAMYNQGFIRKQCVDHYNEVKSVTICDYLPPHLVIYIDVPVPEVQRRIQKKGDPHEMKITSAYLQDIENAYKKTFLPEMSEKCEVLQYSAREAQDSKKVVEDIEYLKFDKGPWLKQDNRTLYHLRLLVQDKFEVLNYTSIPIFLPEVTIGAHQTDRVLHQFREAAIIPT

SEQ ID NO: 84080 - protein, 143 aa, Homo sapiens
  MOD_RES (1)..(1): Any amino acid
XEAQDAESDLVDGRHSPPMVRSVAAIHPSLEIPMLIPKEKPPITVVGDVGGRIAIIVDDIIDDVDSFLAAAETLKERGAYKIFVMATHGLLSSDAPRRIEESAIDEICLFWTFHINEIIQCVVFCVWLSSLNIIFSRFIHVGA

SEQ ID NO: 84081 - protein, 68 aa, Homo sapiens
MCCPSCNKMIVSQLSYNAGALTWLSCGSLCLLGCIAGCCFIPFCVDALQDVDHYCPNCRALLGTYKRL

SEQ ID NO: 84082 - protein, 2163 aa, Homo sapiens
MVNENTRMYIPEENHQGSNYGSPRPAHANMNANAAAGLAPEHIPTPGAALSWQAAIDAARQAKLMGSAGNATISTVSSTQRKRQQYGKPKKQGSTTATRPPRALLCLTLKNPIRRACISIVEWKPFEIIILLTIFANCVALAIYIPFPEDDSNATNSNLERVEYLFLIIFTVEAFLKVIAYGLLFHPNAYLRNGWNLLDFIIVVVGLFSAILEQATKADGANALGGKGAGFDVKALRAFRVLRPLRLVSGVPSLQVVLNSIIKAMVPLLHIALLVLFVIIIYAIIGLELFMGKMHKTCYNQEGIADVPAEDDPSPCALETGHGRQCQNGTVCKPGWDGPKHGITNFDNFAFAMLTVFQCITMEGWTDVLYWVNDAVGRDWPWIYFVTLIIIGSFFVLNLVLGVLSGEFSKEREKAKARGDFQKLREKQQLEEDLKGYLDWITQAEDIDPENEDEGMDEEKPRNRGTPAGMLDQKKGKFAWFSHSTETHVSMPTSETESVNTENVAGGDIEGENCGARLAHRISKSKFSRYWRRWNRFCRRKCRAAVKSNVFYWLVIFLVFLNTLTIASEHYNQPNWLTEVQDTANKALLALFTAEMLLKMYSLGLQAYFVSLFNRFDCFVVCGGILETILVETKIMSPLGISVLRCVRLLRIFKITRYWNSLSNLVASLLNSVRSIASLLLLLFLFIIIFSLLGMQLFGGKFNFDEMQTRRSTFDNFPQSLLTVFQILTGEDWNSVMYDGIMAYGGPSFPGMLVCIYFIILFICGNYILLNVFLAIAVDNLADAESLTSAQKEEEEEKERKKLARTASPEKKQELVEKPAVGESKEEKIELKSITADGESPPATKINMDDLQPNENEDKSPYPNPETTGEEDEEEPEMPVGPRPRPLSELHLKEKAVPMPEASAFFIFSSNNRFRLQCHRIVNDTIFTNLILFFILLSSISLAAEDPVQHTSFRNHILFYFDIVFTTIFTIEIALKMTAYGAFLHKGSFCRNYFNILDLLVVSVSLISFGIQSSAINVVKILRVLRVLRPLRAINRAKGLKHVVQCVFVAIRTIGNIVIVTTLLQFMFACIGVQLFKGKLYTCSDSSKQTEAECKGNYITYKDGEVDHPIIQPRSWENSKFDFDNVLAAMMALFTVSTFEGWPELLYRSIDSHTEDKGPIYNYRVEISIFFIIYIIIIAFFMMNIFVGFVIVTFQEQGEQEYKNCELDKNQRQCVEYALKARPLRRYIPKNQHQYKVWYVVNSTYFEYLMFVLILLNTICLAMQHYGQSCLFKIAMNILNMLFTGLFTVEMILKLIAFKPKHYFCDAWNTFDALIVVGSIVDIAITEVNPAEHTQCSPSMNAEENSRISITFFRLFRVMRLVKLLSRGEGIRTLLWTFIKSFQALPYVALLIVMLFFIYAVIGMQVFGKIALNDTTEINRNNNFQTFPQAVLLLFRCATGEAWQDIMLACMPGKKCAPESEPSNSTEGETPCGSSFAVFYFISFYMLCAFLIINLFVAVIMDNFDYLTRDWSILGPHHLDEFKRIWAEYDPEAKGRIKHLDVVTLLRRIQPPLGFGKLCPHRVACKRLVSMNMPLNSDGTVMFNATLFALVRTALRIKTEGNLEQANEELRAIIKKIWKRTSMKLLDQVVPPAGDDEVTVGKFYATFLIQEYFRKFKKRKEQGLVGKPSQRNALSLQAGLRTLHDIGPEIRRAISGDLTAEEELDKAMKEAVSAASEDDIFRRAGGLFGNHVSYYQSDGRSAFPQTFTTQRPLHINKAGSSQGDTESPSHEKLVDSTFTPSSYSSTGSNANINNANNTALGRLPRPAGYPSTVSTVEGHGPPLSPAIRVQEVAWKLSSNRCHSRESQAAMAGQEETSQDETYEVKMNHDTEACSEPSLLSTEMLSYQDDENRQLTLPEEDKRDIRQSPKRGFLRSASLGRRASFHLECLKRQKDRGGDISQKTVLPLHLVHHQALAVAGLSPLLQRSHSPASFPRPFATPPATPGSRGWPPQPVPTLRLEGVESSEKLNSSFPSIHCGSWAETTPGGGGSSAARRVRPVSLMVPSQAGAPGRQFHGSASSLVEAVLISEGLGQFAQDPKFIEVTTQELADACDMTIEEMESAADNILSGGAPQSPNGALLPFVNCRDAGQDRAGGEEDAGCVRARGRPSEEELQDSRVYVSSL

SEQ ID NO: 84083 - protein, 514 aa, Homo sapiens
MGDWNLLGDTLEEVHIHSTMIGKIWLTILFIFRMLVLGVAAEDVWNDEQSGFICNTEQPGCRNVCYDQAFPISLIRYWVLQVIFVSSPSLVYMGHALYRLRVLEEERQRMKAQLRVELEEVEFEMPRDRRRLEQELCQLEKRKLNKAPLRGTLLCTYVIHIFTRSVVEVGFMIGQYLLYGFHLEPLFKCHGHPCPNIIDCFVSRPTEKTIFLLFMQSIATISLFLNILEIFHLGFKKIKRGLWGKYKLKKEHNEFHANKAKQNVAKYQSTSANSLKRLPSAPDYNLLVEKQTHTAVYPSLNSSSVFQPNPDNHSVNDEKCILDEQETVLSNEISTLSTSCSHFQHISSNNNKDTHKIFGKELNGNQLMEKRETEGKDSKRNYYSRGHRSIPGVAIDGENNMRQSPQTVFSLPANCDWKPRWLRATWGSSTEHENRGSPPKVPGSKATASSLLLILQRPTSSQPRLKETPKIKAEAKIYDSKHPPRLLQSTVSTFSGREPRSPAPMGHHSFRGPR

SEQ ID NO: 84084 - protein, 39 aa, Homo sapiens
  MOD_RES (1)..(1): Any amino acid
XPSRKPLPKRKNTWNFLKCAYMVMTYLFVSYNKGDWGRS

SEQ ID NO: 84085 - protein, 125 aa, Homo sapiens
MSSEPPPPPQPPTHQASVGLLDTPRSRERSPSPLRGNVVPSPLPTRRTRTFSATVRASQGPVYKGVCKCFCRSKGHGFITPADGGPDIFLHISDVEGEYVPVEGDEVTYKMCSIPPKNEKLQAVE

SEQ ID NO: 84086 - protein, 298 aa, Homo sapiens
  MOD_RES (1)..(1): Any amino acid
XLNGVSCEVGTETQVSVAFQVTNAMEKYSPKFEIYSENILNSLKDITVKGPSLLNANLLDSLWDTFQNKSAARGKVVLLFSDGLDDDVEKLEQKSDELRKEGLNALITVALDGPADSSDLADLPYIEFGKGFEYRTQLSIGMRELGSRLSKQLVNVAERTCCCLFCKCIGGDGTMGDPGPPGKRGPPGFKGSEGYLGEEGIAGERGAPGPVGEQGTKGCYGTKGPKGNRGLNGQEGEVGENGIDGLNGEQGDNGLPGRKGEKGDEGSQGSPGKRGTPGDRGAKGLRGDPVSARAANWS

SEQ ID NO: 84087 - protein, 30 aa, Homo sapiens
QTPPQTQPGPSHVMPYVFSFKMPQEQGQNI

SEQ ID NO: 84088 - protein, 517 aa, Homo sapiens
MLSRLMSGSSRSLEREYSCTVRLLDDSEYTCTIQRDAKGQYLFDLLCHHLNLLEKDYFGIRFVDPDKQRHWLEFTKSVVKQLRSQPPFTMCFRVKFYPADPAALKEEITRYLVFLQIKRDLYHGRLLCKTSDAALLAAYILQAEIGDYDSGKHPEGYSSKFQFFPKHSEKLERKIAEIHKTELSGQTPATSELNFLRKAQTLETYGVDPHPCKDVSGNAAFLAFTPFGFVVLQGNKRVHFIKWNEVTKLKFEGKTFYLYVSQKEEKKIILTYFAPTPEACKHLWKCGIENQAFYKLEKSSQVRTVSSSNLFFKGSRFRYSGRVAKEVMESSAKIKREPPEIHRAGMVPSRSCPSITHGPRLSSVPRTRRRAVHISIMEGLESLRDSAHSTPVRSTSHGDTFLPHVRSSRTDSNERVAVIADEAYSPADSVLPTPVAEHSLELMLLSRQINGATCSIEEEKESEASTPTATEVEALGGELRALCQGHSGPEEEQSGHLKGPPLQQQQHQGWGKSVPLV

SEQ ID NO: 84089 - protein, 164 aa, Homo sapiens
MAEAVLIDLFGLKLNSQKNCHQTLLKTLNAVQYHHAAKAKFLCIMCCSNISYERDGEQDNCEIETSNGLSALLEEFEIVSCPSMAATLYTIKQKIDEKNLSSIKVIVPRHRKTLMKAFIDQLFTDVYNFEFEDLQVTFRGGLFKQSIEINVITAQELRGIQNEI

SEQ ID NO: 84090 - protein, 1645 aa, Homo sapiens
MDDDSLDELVARSPGPDGHPQVGPADPAESSVGSSGDSGDDSDSEHGDGTDGEDEGASEEEDLEDRSGSEDSEDDGETLLEVAGTQGKLEAAGSFNSDDDAESCPICLNAFRDQAVGTPENCAHYFCLDCIVEWSKNANSCPVDRTLFKCICIRAQFGGKILRKIPVENTKASEEEEDPTFCEVCGRSDREDRLLLCDGCDAGYHMECLDPPLQEVPVDEWFCPECAAPGVVLAADAGPVSEEEVSLLLADVVPTTSRLRPRAGRTRAIARTRQSERVRATVNRNRISTARRVQHTPGRLGSSLLDEAIEAVATGLSTAVYQRPLTPRTPARRKRKTRRRKKVPGRKKTPSGPSAKSKSSATRSKKRQHRVKKRRGKKVKSEATTRSRIARTLGLRRPVHSSCIPSVLKPVEPSLGLLRADIGAASLSLFGDPYELDPFDSSEELSANPLSPLSAKRRALSRSALQSHQPVARPVSVGLSRRRLPAAVPEPDLEEEPVPDLLGSILSGQSLLMLGSSDVIIHRDGSLSAKRAAPVSFQRNSGSLSRGEEGFKGCLQPRALPSGSPAQGPSGNRPQSTGLSCQGRSRTPARTAGAPVRLDLPAAPGAVQARNLSNGSVPGFRQSHSPWFNGTNKHTLPLASAASKISSRDSKPPCRSVVPGPPLKPAPRRTDISELPRIPKIRRDDGGGRRDAAPAHGQSIEIPSACISRLTGREGTGQPGRGTRAESEASSRVPREPGVHTGSSRPPAPSSHGSLAPLGPSRGKGVGSTFESFRINIPGNMAHSSQLSSPGFCNTFRPVDDKEQRKENPSPLFSIKKTKQLRSEVYDPSDPTGSDSSAPGSSPERSGPGLLPSEITRTISINSPKAQTVQAVRCVTSYTVESIFGTEPEPPLGPSSAMSKLRGAVAAEGASDTEREEPTESQGLAARLRRPSPPEPWDEEDGASCSTFFGSEERTVTCVTVVEPEAPPSPDVLQAATHRVVELRPPSRSRSTSSSRSRKKAKRKRVSREHGRTRSGTRSESRDRSSRSASPSVGEERPRRQRSKAKSRRSSSDRSSSRERAKRKKAKDKSREHRRGPWGHSRRTSRSRSGSPGSSSYEHYESRKKKKRRSASRPRGRECSPTSSLERLCRHKHQRERSHERPDRKESVAWPRDRRKRRSRSPSSEHRAREHRRPRSREKWPQTRSHSPERKGAVREASPAPLAQGEPGREDLPTRLPALGEAHVSPEVATADKAPLQAPPVLEVAAECEPDDLDLDYGDSVEAGHVFDDFSSDAVFIQLDDMSSPPSPESTDSSPERDFPLKPALPPASLAVAAIQREVSLMHDEDPSQPPPLPEGTQEPHLLRPDAAEKAEAPSSPDVAPAGKEDSPSASGRVQEAARPEEVVSQTPLLRSRALVKRVTWNLQESESSAPAEDRAPRAPLHRPQKPREGAWDMEDVAPTGVRQVFSELPFPSHVLPEPGFPDTDPSQVYSPGLPPAPAQPSSIPPCALVSQPTVQFILQGSLPLVGCGAAQTLAPVPAALTPASEPASQATAASNSEEKTPAPRLAAEKTKKEEYMKKLHMQERAVEEVKLAIKPFYQKREVTKEEYKDILRKAVQKICHSKSGEINPVKVANLVKAYVDKYRHMRRHKKPEAGEEPPTQGAEG

SEQ ID NO: 84091 - protein, 116 aa, Homo sapiens
MPPKKGGDGIKPPPIIGRFGTSLKIGIVGLPNVGKSTFFNVLTNSQASAENFPFCTIDPNESRVPVPDERFDFLCQYHKPASKIPAFLNVVDIAGLVKGAHNGQGLGNAFLSHISA

SEQ ID NO: 84092 - protein, 83 aa, Homo sapiens
MNPTLILAAFCLGIASATLTFDHSLEAQWTKWKAMHNRLYGMNEEGWRRAVWEKNMKMIELHNQEYREGKHSFTMAMNAFGDM

SEQ ID NO: 84093 - protein, 401 aa, Homo sapiens
  MOD_RES (1)..(1): Any amino acid
XKNSKGKITVVQDTPEILRVKENQKNFSSVLYKEDVSPGTAIGKTPEMMRVKQTQDHISSVKYKEAIGQGTPIPDLPEVKRVKETQKHISSVMYKENLGTGIPTTVTPEIERVKRNQENFSSVLYKENLGKGIPTPITPEMERVKRNQENFSSILYKENLSKGTPLPVTPEMERVKLNQENFSSVLYKENLGTGIPIPITPEMQRVKHNQENLSSVLYKENMGKGTPLPVTPEMERVKHNQENISSVLYKENMGKGTPLPVTPEMERVKHNQENISSVLYKENMGKGTPLAVTPEMERVKHNQENISSVLYKENVGKATATPVTPEMQRVKRNQENISSVLYKENLGKATPTPFTPEMERVKRNQENFSSVLYKENMRKATPTPVTPEMERAKRNQENISS

SEQ ID NO: 84094 - protein, 67 aa, Homo sapiens
MDFGDIISSQQEINRLSNEVSRLESEVGHWRHIAQTSKAQGTDNSDQSEICKLQNIIKELKQNRSQE

SEQ ID NO: 84095 - protein, 125 aa, Homo sapiens
MKSLKAKFRKSDTNEWNKNDDRLLQAVENGDAEKVASLLGKKGASATKHDSEGKTAFHLAAAKGHVECLRVMITHGVDVTAQDTTGHSALHLAAKNSHHECIRKLLQSKCPAESVDSSGKTALHY

SEQ ID NO: 84096 - protein, 96 aa, Homo sapiens
MRNSKENRLRGNKAFCASSGSDSGGSSSSSSSSINSPDRASGPEGSLSQTMAGSSPNTPQPVPEQSALCQGLYFHINQTLREAHFHSLQHRGRPLT

SEQ ID NO: 84097 - protein, 217 aa, Homo sapiens
IDPAAWLSHTAALTGALPRYGTSPCSSAVTRTSSSSLTSSVPGAPQLEEAPLTVKSDMSAVVRVMQLPDSGLEIRDRMWLKITIANAVIGADVVDWLYTHVEGFKERREARKYASSLLKHGFLRHTVNKITFSEQCYYVFGDLCSNLATLNLNSGSSGTSDQDTLAPLPHPAAPWPLGQGYPYQYPGPPPCFPPAYQDPGFSYGSGSTGSQQSEALD

SEQ ID NO: 84098 - protein, 47 aa, Homo sapiens
YIPEDILKNLVEELPQPRKIPKRLDEYTQEEIDAFPRLWTPPEDYRL

SEQ ID NO: 84099 - protein, 220 aa, Homo sapiens
  MOD_RES (1)..(1): Any amino acid
XTFDNSTVPHPGSITIGGSLLQSSAPVNIPGSLGSSASFHSASPSPPVSLSSHFLQQPQGHLSQSENTFLGTSASHGSLGPGAAELARLRQELDEANSTIKQWEESWKQAKQACDAWKKEAEEAGERASAAGAECELAREQRDALEVQVKKLQEELERLHAGPEPQALPAFSDLEALSLSTLYSLQKQLRAHLEQVDKAVFHMQSVKCLKCQEQKRAVLP

SEQ ID NO: 84100 - protein, 195 aa, Homo sapiens
MASRGGGRGRGRGQLTFNVEAVGIGKGDALPPPTLQPSPLFPPLEFRPVPLPSGEEGEYVLALKQELRGAMRQLPYFIRPAVPKRDWRRLPRELKIRVRKLQKERITILLPKRPPKTTEDKEETIQKLETLEKKEEEVTSEEDEEKEEEEEKEEEEEEEYDEEEHEEETDYIMSYFDNGEDFGGDSDDNMDEAIY

SEQ ID NO: 84101 - protein, 409 aa, Homo sapiens
MALTPGWGSSAGPVRPELWLLLWAAAWRLGASACPALCTCTGTTVDCHGTGLQAIPKNIPRNTERLELNGNNITRIHKNDFAGLKQLRVLQLMENQIGAVERGAFDDMKELERLRLNRNQLHMLPELLFQNNQALSRLDLSENAIQAIPRKAFRGATDLKNLQLDKNQISCIEEGAFRALRGLEVLTLNNNNITTIPVSSFNHMPKLRTFRLHSNHLFCDCHLAWLSQWLRQRPTIGLFTQCSGPASLRGLNVAEVQKSEFSCSGQGEAGRVPTCTLSSGSCPAMCTCSNGIVDCRGKGLTAIPANLPETMTEIRLELNGIKSIPPGAFSPYRKLRRIDLSNNQIAEIAPDAFQGLRSLNSLHTGPVTCPHTTGTHSSHCRAFAVAVPHSRNDLEAMFEEEVPRIFYSA

SEQ ID NO: 84102 - protein, 353 aa, Homo sapiens
MVGFDPHPPMRATGLPSSLASIPGGKPAYSFHVSADGQMQPVPFPHDALAGPGIPRHARQINTLSHGEVVCAVTISNPTRHVYTGGKGCVKIWDISQPGSKSPISQLDCLNRDNYIRSCKLLPDGRTLIVGGEASTLTIWDLASPTPRIKAELTSSAPACYALAISPDAKVCFSCCSDGNIAVWDLHNQTLVRQFQGHTDGASCIDISHDGTKLWTGGLDNTVRSWDLREGRQLQQHDFTSQIFSLGYCPTGEWLAVGMESSNVEVLHHTKPDKYQLHLHESCVLSLKFAYCGKWFVSTGKDNLLNAWRTPYGASIFQSKESSSVLSCDISADDKYIVTGSGDKKATVYEVIY

SEQ ID NO: 84103 - protein, 833 aa, Homo sapiens
MPAKLLRVKPIPAEGIKSNPSKRHRDRLNTELDRLASLLPFPQDVINKLDKLSVLRLSVSYLRAKSFFDVALKSSPTERNGGQDNCRAANFREGLNLQEGEFLLQALNGFVLVVTTDALVFYASSTIQDYLGFQQSDVIHQSVYELIHTEDRAEFQRQLHWALNPSQCTESGQGIEEATGLPQTVVCYNPDQIPPENSPLMERCFICRLRCLLDNSSGFLAMNFQGKLKYLHGQKKKGKDGSILPPQLALFAIATPLQPPSILEIRTKNFIFRTKHKLDFTPIGCDAKGRIVLGYTEAELCTRGSGYQFIHAADMLYCAESHIRMIKTGESGMIVFRLLTKNNRWTWVQSNARLLYKNGRPDYIIVTQRPLTDEEGTEHLRKRNTKLPFMFTTGEAVLYEATNPFPAIMDPLPLRTKNGTSGKDSATTSTLSKDSLNPSSLLAAMMQQDESIYLYPASSTSSTAPFENNFFNESMNECRNWQDNTAPMGNDTILKHEQIDQPQDVNSFAGGHPGLFQDSKNSDLYSIMKNLGIDFEDIRHMQNEKFFRNDFSGEVDFRDIDLTDEILTYVQDSLSKSPFIPSDYQQQQSLALNSSCMVQEHLHLEQQQQHHQKQVVVEPQQQLCQKMKHMQVNGMFENWNSNQFVPFNCPQQDPQQYNVFTDLHGISQEFPYKSEMDSMPYTQNFISCNQPVLPQHSKCTELDYPMGSFEPSPYPTTSSLEDFVTCLQLPENQKHGLNPQSAIITPQTCYAGAVSMYQCQPEPQHTHVGQMQYNPVLPGQQAFLNKFQNGVLNETYPAELNNINNTQTTTHLQPLHHPSEARPFPDLTSSGFL

SEQ ID NO: 84104 - protein, 485 aa, Homo sapiens
  MOD_RES (1)..(1): Any amino acid
XMAEGERTECAEPPRDEPPADGALKRAEELKTQANDYFKAKDYENAIKFYSQAIELNPSNAIYYGNRSLAYLRTECYGYALGDATRAIELDKKYIKGYYRRAASNMALGKFRAALRDYETVVKVKPHDKDAKMKYQECNKIVKQKAFERAIAGDEHKRSVVDSLDIESMTIEDEYSGPKLEDGKVTISFMKELMQWYKDQKKLHRKCAYQILVQVKEVLSKLSTLVETTLKETEKITVCGDTHGQFYDLLNIFELNGLPSETNPYIFNGDFVDRGSFSVEVILTLFGFKLLYPDHFHLLRGNHETDNMNQIYGFEGEVKAKYTAQMYELFSEVFEWLPLAQCINGKVLIMHGGLFSEDGVTLDDIRKIERNRQPPDSGPMCDLLWSDPQPQNGRSISKRGVSCQFGPDVTKAFLEENNLDYIIRSHEVKAEGYEVAHGGRCVTVFSAPNYCDQMGNKASYIHLQGSDLRPQFHQFTAVGRPSSGS

SEQ ID NO: 84105 - protein, 46 aa, Homo sapiens
MDSLDHMLTDPLELGPCGDGHGTRIMEDCLLGGTRVSLPEDLLEDV

SEQ ID NO: 84106 - protein, 256 aa, Homo sapiens
MAVPETRPNHTIYINNLNEKIKKDELKKSLYAIFSQFGQILDILVSRSLKMRGQAFVIFKERIQYAKTDSDIIAKMKGTFVERDRKREKRKPKSQETPATKKAVQGGGATPVVGAVQGPVPGMPPMTQAPRIMHHMPGQPPYMPPPGMIPPPGLAPGQIPPGAMPPQQLMPGQMPPAQPLSENPPNHILFLTNLPEETNELMLSMLFNQFPGFKEVRLVPGRHDIAFVEFDNEVQAGAARDALQGFKITQNNAMKI

SEQ ID NO: 84107 - protein, 45 aa, Homo sapiens
MSGSFELSVQDLNDLLSDGSGCYSLPSQPCNEVTPRIYVGNAKNV

SEQ ID NO: 84108 - protein, 102 aa, Homo sapiens
MATHSPQKSHQCAHCEKTFNRKDHLKNHLQTHDPNKMAFGCEECGKKYNTMLGYKRHLALHAASSGDLTCGVCALELGSTEVLLDHLKAHAEEKPPSGTKEK

SEQ ID NO: 84109 - protein, 898 aa, Homo sapiens
  MOD_RES (1)..(1): Any amino acid
XKKKVLEKYGDMRVTMGCEIFSMWQNLGEHKLHFIPALIGPFLEVTLIPQPDLRNVMIPIFHDMMDWEQRRSGNFKQVEAKLIDKLDSLMSEGKGDETYRELFNSILLKKIERETWRESGVSLIATVTRLMERLLDYRDCMKMGEVDGKKIGCTVSLLNFYKTELNKEEMYIRYIHKLYDLHLKAQNFTEAAYTLLLYDELLEWSDRPLREFLTYPMQTEWQRKEHLHLTIIQNFDRGKCWENGIILCRKIAEQYESYYDYRNLSKMRMMEASLYDKIMDQQRLEPEFFRVGFYGKKFPFFLRNKEFVCRGHDYERLEAFQQRMLNEFPHAIAMQHANQPDETIFQAEAQYLQIYAVTPIPESQEVLQREGVPDNIKSFYKVNHIWKFRYDRPFHKGTKDKENEFKSLWVERTSLYLVQSLPGISRWFEVEKREVVEMSPLENAIEVLENKNQQLKTLISQCQTRQMQNINPLTMCLNGVIDAAVNGGVSRYQEAFFVKEYILSHPEDGEKIARLRELMLEQEFSACMQASPVHFPNGSPRVCRNSAPASVSPDGTRVIPRRSPLSYPAVNRYSSSSLSSQASAEVSNITGQSESSDEVFNMQPSPSTSSLSSTHSASPNVTSSAPSSARASPLLSDKHKHSRENSCLSPRERPCSAIYPTPVEPSQRMLFNHIGDGALPRSDPNLSAPEKAVNPTPSSWSLDSGKEAKNMSDSGKLISPPVPPRPTQTASPARHTTSVSPSPAGRSPLKGSVQSFTPSPVEYHSPGLISNSPVLSGSYSSGISSLSRCSTSETSGFENQVNEQSAPLPVPVPVPVPSYGGEEPVRKESKTPPPYSVYERTLRRPVPLPHSLSIPVTSEPPALPPKPLAARSSHLENGARRTDPGPRPRPLPRKVSQL

SEQ ID NO: 84110 - protein, 1253 aa, Homo sapiens
MSGPTDETAGDLPVKDTGLNLFGMGGLQETSTTRTMKSRQAVSRVSREELEDRFLRLHDENILLKQHARKQEDKIKRMATKLIRLVNDKKRYERVGGGPKRLGRDVEMEEMIEQLQEKVHELEKQNETLKNRLISAKQQLQTQGYRQTPYNNVQSRINTGRRKANENAGLQECPRKGIKFQDADVAETPHPMFTKYGNSLLEEARGEIRNLENVIQSQRGQIEELEHLAEILKTQLRRKENEIELSLLQLREQQATDQRSNIRDNVEMIKLHKQLVEKSNALSAMEGKFIQLQEKQRTLRISHDALMANGDELNMQLKEQRLKCCSLEKQLHSMKFSERRIEELQDRINDLEKERELLKENYDKLYDSAFSAAHEEQWKLKEQQLKVQIAQLETALKSDLTDKTEILDRLKTERDQNEKLVQENRELQLQYLEQKQQLDELKKRIKLYNQENDINADELSEALLLIKAQKEQKNGDLSFLVKVDSEINKDLERSMRELQATHAETVQELEKTRNMLIMQHKINKDYQMEVEAVTRKMENLQQDYELKVEQYVHLLDIRAARIHKLEAQLKDIAYGTKQYKFKPEIMPDDSVDEFDETIHLERGENLFEIHINKVTFSSEVLQASGDKEPVTFCTYAFYDFELQTTPVVRGLHPEYNFTSQYLVHVNDLFLQYIQKNTITLEVHQAYSTEYETIAACQLKFHEILEKSGRIFCTASLIGTKGDIPNFGTVEYWFRLRVPMDQAIRLYRERAKALGYITSNFKGPEHMQSLSQQAPKTAQLSSTDSTDGNLNELHITIRCCNHLQSRASHLQPHPYVVYKFFDFADHDTAIIPSSNDPQFDDHMYFPVPMNMDLDRYLKSESLSFYVFDDSDTQENIYIGKVNVPLISLAHDRCISGIFELTDHQKHPAGTIHVILKWKFAYLPPSGSITTEDLGNFIRSEEPEVVQRLPPASSVSTLVLAPRPKPRQRLTPVDKKVSFVDIMPHQSDETSPPPEDRKEISPEVEHIPEIEINMLTVPHVPKVSQEGSVDEVKENTEKMQQGKDDVSLLSEGQLAEQSLASSEDETEITEDLEPEVEEDMSASDSDDCIIPGPISKNIKQPSEKIRIEIIALSLNDSQVTMDDTIQRLFVECRFYSLPAEETPVSLPKPKSGQWVYYNYSNVIYVDKENNKAKRDILKAILQKQEMPNRSLRFTVVSDPPEDEQDLECEDIGVAHVDLADMFQEGRDLIEQNIDGMGESVAQFVQPTIAELQTLY

SEQ ID NO: 84111 - protein, 843 aa, Homo sapiens
MDERFRYESDFDRRLSRVYTNDSAPDNETSKSANQDTCSPFAGMLFGGEDRELIQRRKEKYRLELLEQMAEQQRNKRREKDLELRVAASGAQDPEKSPDRLKQFSVAPRHFEEMIPPERPRIAFQTPLPPLSAPSVPPIPSVHPVPSQNEDLRSGLSSALGEMVSPRIAPLPPPPLLPPLATNYRTPYDDAYYFYGSRNTFDPSLAYYGSGMMGVQPAAYVSAPVTHQLAQPVVNTVGQNELKITSDQVINSGLIFEDKPKPSKQSLQSYQEALQQQIREREERRKKEREEKEEYEAKLEAEMRTYNPWGKGGGGAPLRDAKGNLISHMQTQSSPFARGNVFGEPPTELQIKQQELYKNFLRFQIEEKKQREEAERERLRIAEEKEERRLAEQRARIQQEYEEEQEKKREKEEEQRLKNEEHIRLAEERQKEAERKKKEEEEKYNLQLQHYCERDNLIGEETKHMRQPSPIVPALQNKIASKLQRPPSVDSIIRSFIHESSMSRAQSPPVPARKNQLRAEEEKKNVIMELSEMRKQLRSEERRLQERLLHMDSDDEIPIRKKERNPMDIFDMARHRLQAPVRRQSPKGLDAATFQNVHDFNELKDRDSETRVDLKFMYLDPPRDHHTLEIQQQALLREQQKRLNRIKMQEGAKVDLDAIPSAKVREQRMPRDDTSDFLKNSLLESDSAFIGAYGETYPAIEDDVLPPPSQLPSARERRRNKWKGLDIDSSRPNVAPDGLSLKSISSVNVDELRVRNEERMRRLNEFHNKPINTDDESSLVDPDDIMKHIGDDGSNSVATEPWLRPGTSETLKRFMAEQLNQEQQQIPGKPGTFTWQGLSTAHG

SEQ ID NO: 84112 - protein, 481 aa, Homo sapiens
MKRTPTAEEREREAKKLRLLEELEDTWLPYLTPKDDEFYQQWQLKYPKLILREASSVSEELHKEVQEAFLTLHKHGCLFRDLVRIQGKDLLTPVSRILIGNPGCTYKYLNTRLFTVPWPVKGSNIKHTEAEIAAACETFLKLNDYLQIETIQALEELAAKEKANEDAVPLCMSADFPRVGMGSSYNGQDEVDIKSRAAYNVTLLNFMDPQKMPYLKEEPYFGMGKMAVSWHHDENLVDRSAVAVYSYSCEGPEEESEDDSHLEGRDPDIWHVGFKISWDIETPGLAIPLHQGDCYFMLDDLNATHQHCVLAGSQPRFSSTHRVAECSTGTLDYILQRCQLALQNVCDDVDNDDVSLKSFEPAVLKQGEEIHNEVEFEWLRQFWFQGNRYRKCTDWWCQPMAQLEALWKKMEGVTNAVLHEVKREGLPVEQRNEILTAILASLTARQNLRREWHARKMDQFTDSSRENASPISSLAAWNITV

SEQ ID NO: 84113 - protein, 41 aa, Homo sapiens
MKLSGMFLLLSLALFCFLTGVFSQGGQVDCGEFQDPKVYCT

SEQ ID NO: 84114 - protein, 318 aa, Homo sapiens
MRLRRLNSEKVAALIQKLNSDPQFVLAQNVGTTHDLLDICLKRATVQRAQHVFQHAVPQEGKPITNQKSSGRCWIFSCLNVMRLPFMKKLNIEEFEFSQSYLFFWDKVERCYFFLSAFVDTAQRKEPEDGRLVQFLLMNPANDGGQWDMLVNIVEKYGVIPKKCFPESYTTEATRRMNDILNHKMREFCIRLRNLVHSGATKGEISATQDVMMEEIFRVVCICLGNPPETFTWEYRDKDKNYQKIGPITPLEFYREHVKPLFNMEDKVVNDPRPQHKYNKLYTVEYLSNMVGGRKTLYNNQPIDFLKKMVAASIKDGE

SEQ ID NO: 84115 - protein, 1059 aa, Homo sapiens
ARVRDPRTYDRRYWCDAEYDAYRREHSAFGDRPEKRDNNWRYDPRFTGSFDDDPDPHRDPYGEEVDRRSVHSEHSARSLHSAHSLASRRSSLSSHSHQSQIYRSHNVAAGSYEAPLPPGSFHGDFAYGTYRSNFSSGPGFPEYGYPADTVWPAMEQVSSRPTSPEKFSVPHVCARFGPGGQLIKVIPNLPSEGQPALVEVHSMEALLQHTSEQEEMRAFPGPLAKDDTHKVDVINFAQNKAMKCLQNENLIDKESASLLWNFIVLLCRQNGTVVGTDIAELLLRDHRTVWLPGKSPNEANLIDFTNEAVEQVEEEESGEAQLSFLTGGPAAAASSLERETERFRELLLYGRKKDALESAMKNGLWGHALLLASKMDSRTHARVMTRFANSLPINDPLQTVYQLMSGRMPAASTCCGDEKWGDWRPHLAMVLSNLNNNMDVESRTMATMGDTLASRGLLDAAHFCYLMAQAGFGVYTKKTTKLVLIGSNHSLPFLKFATNEAIQRTEAYEYAQSLGAETCPLPSFQVFKFIYSCRLAEMGLATQAFHYCEAIAKSILTQPHLYSPVLISQLVQMASQLRLFDPQLKEKPEEESLAAPTWLVHLQQVERQIKEGAGVWHQDGALPQQCPGTPSSEMEQLDRPGLSQPGALGIANPLLAVPAPSPEHSSPSVRLLPSAPQTLPDGPLASPARVPMFPVPLPPGPLEPGPGCVTPGPALGFLEPSGPGLPPGVPPLQERRHLLQEARSPDPGIVPQEAPVGNSLSELSEENFDGKFANLTPSRTVPDSEAPPGWDRADSGPTQPPLSLSPAPETKRPGQAAKKETKEPKKGESWFFRWLPGKKKTEAYLPDDKNKSIVWDEKKNQWVNLNEPEEEKKAPPPPPTSMPKTVQAAPPALPGPPGAPVNMYSRRAAGTRARYVDVLNPSGTQRSEPALAPADFVAPLAPLPIPSNLFVPTPDAEEPQLPDGTGREGPAAARGLANPEPAPEPKVLSSAASLPGSELPSSRPEGSQGGEAPGDLPAAGGPPSGAMPFYNPAQLAQACATSGSSRLGRIGQRKHLVLN

SEQ ID NO: 84116 - protein, 204 aa, Homo sapiens
MGLEKLHPFDAGKWGKVINFLKEEKLLSDSMLVEAREASEEDLLVVHTRRYLNELKWSFAVATITEIPPVIFLPNFLVQRKVLRPLRTQTGGTIMAGKLAVERGWAINVGGGFHHCSSDRGGGFCAYADITLAIKFLFERVEGISRATIIDLDAHQGNGHERDFMDDKRVYIMDVYNRHIYPGDRFAKQAIRRKVELEWGTEDD

SEQ ID NO: 84117 - protein, 696 aa, Homo sapiens
GKTPDSEDKLFSPVIARNLADEIESYMNLKSPLGSKSSSMELHREENRESGMTTAFIHALERRSSLPLDHGSPAQENPESEKSSPAVSRSKTFTGRFKQQTPSRTHKERSTSLSALVRSSPHGSLGSVVNSLSGLKLDNILSGPKIDVLKSGMKQAATVASKMWVAVASAYSYSDDEEETNRDYSFPAGLEDHILGENISPNTSISGLVPSELTQSNTSLGSSSSSGDVGKLHYPTGEVPFPRGMKGQDFEKSDHGSSQNTSMSSIYQNCAMEVLMSSCSQCRACGALVYDEEIMAGWTADDSNLNTACPFCKSNFLPLLNIEFKDLRGSASFFLKPSTSGDSLQSGSIPLANESLEHKPVSSLAEPDLINFMDFPKHNQIITEETGSAVEPSDEIKRASGDVQTMKISSVPNSLSKRNVSLTRSHSVGGPLQNIDFTQRPFHGISTVSLPNSLQEVVDPLGKRPNPPPVSVPYLSPLVLRKELESLLENEGDQVIHTSSFINQHPIIFWNLVWYFRRLDLPSNLPGLILTSEHCNEGVQLPLSSLSQDSKLVYIQLLWDNINLHQEPREPLYVSWRNFNSEKKSSLLSEEQQETSTLVETIRQSIQHNNVLKPINLLSQQMKPGMKRQRSLYREILFLSLVSLGRENIDIEAFDNEYGIAYNSLSSEILERLQKIDAPPSASVEWCRKCFGAPLI

SEQ ID NO: 84118 - protein, 175 aa, Homo sapiens
MSYFGEHFWGEKNHGFEVLYHSVKQGPISTKELADFIRERATIEETYSKAMAKLSKLASNGTPMGTFAPLWEVFRVSSDKLALCHLELTRKLQDLIKDVLRYGEEQLKTHKKCKEEVVSTLDAVQVLSGVSQLLPKSRENYLNRCMDQERLRRESTSQKEMDKAETKTKKAAESL

SEQ ID NO: 84119 - protein, 59 aa, Homo sapiens
MRSLGQNPTEAELQDMINEVDADGNGTIDFPEFLTMMARKMKDTDSEEEIREAFRVFDK

SEQ ID NO: 84120 - protein, 157 aa, Homo sapiens
MPLTSAFRAVDNDPGIIVWRIEKMELALVPVSAHGNFYEGDCYVILSTRRVASLLSQDIHFWIGKDSSQDEQSCAAIYTTQLDDYLGGSPVQHREVQYHESDTFRGYFKQGIIYKQGGVASGMKHVETNTYDVKRLLHVKGKRNIRATEVEMSWDSF

SEQ ID NO: 84121 - protein, 409 aa, Homo sapiens
MSLAAYCVICCRRIGTSTSPPKSGTHWRDIRNIIKFTGSLILGGSLFLTYEVLALKKAVTLDTQVVEREKMKSYIYVHTVSLDKGENHGIAWQARKELHKAVRKVLATSAKILRNPFADPFSTVDIEDHECAVWLLLRKSKSDDKTTRLEAVREMSETHHWHDYQYRIIAQACDPKTLIGLARSEESDLRFFLLPPPLPSLKEDSSTEEELRQLLASLPQTELDECIQYFTSLALSESSQSLAAQKISTHCDKIEANGGLQLLQRLYRLHKDCPKVQRNIMRVIGNMALNEHLHSSIVRSGWVSIMAEAMKSPHIMESSHAARILANLDRETVQEKYQDGVYVLHPQYRTSQPIKADVLFIHGLMGAAFKTWRQQDSEQAVIEKPMEDEDRYTTCWPKKVHCIQKQRTS

SEQ ID NO: 84122 - protein, 79 aa, Homo sapiens
LRIDVTTDGRHAEVEFTTDWQKDAERRDLTINSMFLAFEICHVCQDGSLLKVTMHIKLLTAWKELSIKCELTNVLLLLG

SEQ ID NO: 84123 - protein, 81 aa, Homo sapiens
MEATTAGVGRLEEEALRRKERLKALREKTGRKDKEDGEPKTKHLREEEEEGEKHRELRLRNYVPEDEDLKKRRVPQAKPVA

SEQ ID NO: 84124 - protein, 76 aa, Homo sapiens
  MOD_RES (1)..(1): Any amino acid
XQARHGSVSADEAARTAPFHLDLWFYFTLQNWVLDFGRPIAMLVFPLEWFPLNKPSVGDYFHMAYNVITPFLLLKP

SEQ ID NO: 84125 - protein, 179 aa, Homo sapiens
MAHLMMFRDVAVDFSQEEWECLDLEQRDLYRDVMLENYSNMVSLGFCIYQPEAFSLLEKGKEPWKILRDETRGPCPDMQSRCQTKKLLPKNGIFEREIAQLEIMRICKNHSLDCLCFRGDWEGNTQFQTLQDNQEECFKQVIRTCEKRPTFNQHTVFNLHQRLNTGDKLNEFKELGKAF

SEQ ID NO: 84126 - protein, 73 aa, Homo sapiens
EAGAGAGPPEAPAEPDHDGPREDDEPNLVPGPQRLQPRPPQQLCLLAPPRHTQQSSWSRQPGCPEEFLVGFLH

SEQ ID NO: 84127 - protein, 567 aa, Homo sapiens
MADERKDEAKAPHWTSAPLTEASAHSHPPEIKDQGGAGEGLVRSANGFPYREDEEGAFGEHGSQGTYSNTKENGINGELTSADRETAEEVSARIVQVVTAEAVAVLKGEQEKEAQHKDQTAALPLAAEETANLPPSPPPSPASEQTVTVEEEEETLESRMAEEEKPAALPEKECGAAKSSDQPKGLSKGQMESSAEAQIVPEESAPAGAPHEKSVKEVKEVSPEVKTPSSAGEDLLTASKMEFHDQQELTPSTAEPSDQKEKESEKQSKPGEDLKHAALVSQPETTKTYPDKKDMQGTEEEKAPLALFGHTLVASLEDMKQKTEPSLVVPGIDLPKEPPTPKEQKDWFIEMPTEAKKDEWGLVAPISPGPLTPMREKDVFDDIPKWEGKQFDSPMPSPFQGGSFTLPLDVMKNEIVTETSPFAPAFLQPDDKKSLQQTSGPATAKDSFKIEEPHEAKPDKMAEAPPSEAMTLPKDAHIPVVEEHVMGKVLEEEKEAINQETVQQRDTFTPSGQEPILTEKETELKLEEKTTISDKEAVPKESKPPKPADEEIGIIQTSTEHTFSEQK

SEQ ID NO: 84128 - protein, 125 aa, Homo sapiens
MYGGIYCFLCQDYIYDKDMEIIAKEEQRKAWKMQGVGEKFSTWEPTKRELELLKHNPKRRKITSNCTIGLRGLINLGNTCFMNCIVQALTHTPLLRDFFLSDRHRCEMQSPSSCLVCEMSSLFQE

SEQ ID NO: 84129 - protein, 751 aa, Homo sapiens
MGIKVQRPRCFFDIAINNQPAGRVVFELFSDVCPKTCENFRCLCTGEKGTGKSTQKPLHYKSCLFHRVVKDFMVQGGDFSEGNGRGGESIYGGFFEDESFAVKHNKEFLLSMANRGKDTNGSQFFITTKPTPHLDGHHVVFGQVISGQEVVREIENQKTDAASKPFAEVRILSCGELIPKSKVKKEEKKRHKSSSSSSSSSSDSDSSSDSQSSSDSSDSESATEEKSKKRKKKHRKNSRKHKKEKKKRKKSKKSESEAENLEAQPQSTVRPEEIPPIPENRFLMRKSPPKADEKERKNRERERERECNPPNSQPASYQRRLLVTRSGRKIKGRGPRRYRTPSRSRSRDRFRRSETPPHWRQEMQRAQRMRVSSGERWIKGDKSELNEIKENQRSPVRVKERKITDHRNVSESPNRKNEKEKKVKDHKSNSKERDIRRNSEKDDKYKNKVKKRAKSKSRSKSKEKSKSKERDSKHNRNEEKRMRSRSKGRDHENVKEKEKQSDSKGKDQERSRSKEKSKQLESKSNEHDHSKSKEKDRRAQSRSRECDITKGKHSYNSRTRERSRSRDRSRRVRSRTHDRDRSRSKEYHRYREQEYRRRGRSRSRERRTPPGRSRSKDRRRRRRDSRSSEREESQSRNKDKYRNQESKSSHRKENSESEKRMYSKSRDHNSSNNSREKKADRDQSPFSKIKQSSQDNELKSSMLKNKEDEKIRSSVEKENQKSKGQENDHVHEKNKKFDHESSPGTDEDKSG

SEQ ID NO: 84130 - protein, 24 aa, Homo sapiens
  MOD_RES (1)..(1): Any amino acid
XIPNLAMKEVIDAFISENGWVEDY

SEQ ID NO: 84131 - protein, 153 aa, Homo sapiens
MLTLASKLKRDDGLKGSRTAATASDSTRRVSVRDKLLVKGTCKVHFPDPNKLHCFQLTVTPDEGYYQGGKFQFETEVPDAYNMVPPKVKCLTKIWHPNITETGEICLSLLREHSIDGTGWAPTRTLKDVVWGLNSLFTDLLNFDDPLNIEAAE

SEQ ID NO: 84132 - protein, 10 aa, Homo sapiens
MGVLTFRDVA

SEQ ID NO: 84133 - protein, 376 aa, Homo sapiens
MLPAVGSVDEEEDPAEEDCPELVPIETTQSEEEEKSGLGAKIPVTIITGYLGAGKTTLLNYILTEQHSKRVAVILNESGEGSALEKSLAVSQGGELYEEWLELRNGCLCCSVKDNGLRAIENLMQKKGKFDDILLETTGLADPGAVASMFWVDAELGSDIYLDGIITIVDSKYGLKHLTEEKPDGLINEATRQVALADIILINKTDLVPEEDVKKLRTTLRSINGLGQILETQRSSLQKKLQHVPGTQPHLDQSIVTITFDVPGNAKEEHLNMFIQNLLWEKNVRNKDNHCMEVIRLKGLVSIKDKSQQVIVQGVHELCDLEETPVSWKDDTERTNRLVLIGRNLDKDILKQLFIATVTETEKQWTTHFKEDQVCT

SEQ ID NO: 84134 - protein, 66 aa, Homo sapiens
  MOD_RES (1)..(1): Any amino acid
XWMLLTGKLWEMLAYVLLPLLYLLVRKHINRAGIGNTFQGGANCIMFVLCTRAVRTRLFSLCCCCC

SEQ ID NO: 84135 - protein, 159 aa, Homo sapiens
MGQAVSCVLGRLQPVKCTGARRVGRRGLRKQTSQECLWCNTNKACLDYPVTSVLPPASLCKLSSARWGVCWVNFEALIITMSVVGGTLLLGIAICCCCCCRRKRSRKPDRSEEKAMREREERRIRQEERRAEMKTRHDEIRKKYGLFKEENPYARFENN

SEQ ID NO: 84136 - protein, 786 aa, Homo sapiens
MFAPPTALPPPPPLTSGSLQVAGHPAGSTYSEQDILRQELNTRFLASQSADRGASLGPPPYLRTEFHQHQHQHQHTHQHTHQHTFTPFPHAIPPTAIMPTPAPPMLFHSYPPAVSGIPPMIPPTGPFGSLQGAFQPKTSNPIDVAARPGTVPHTLLQKDPRLTDPFRPMLRKPGKWCAMHVHIAWQIYHHQQKVKKQMQSDPHKLDFGLKPEFLSRPPGPSLFGAIHHPHDLARPSTLFSAAGAAHPTGTPFGPPPHHSNFLNPAAHLEPFNRPSTFTGLAAVGGNAFGGLGNPSVTPNSMFGHKDGPSVQNFSNPHEPWNRLHRTPPSFPTPPPWLKPGELERSASAAAHDRDRDVDKRDSSVSKDDKERESVEKRHSSHPSPAPVLPVNALGHTRSSTEQIRAHLNTEAREKDKPKERERDHSESRKDLAADEHKAKEGHLPEKDGHGHEGRAAGEEAKQLARVPSPYVRTPVVESARPNSTSSREAEPRKGEPAYENPKKSSEVKVKEERKEDHDLPPEAPQTHRASEPPPPNSSSSVHPGPLASMPMTVGVTGIHPMNSISSLDRTRMMTPFMGISPLPGGERFPYPSFHWDPIRDPLRDPYRELDIHRRDPLGRDFLLRNDPLHRLSTPRLYEADRSFRDREPHDYSHHHHHHHHPLSVDPRREHERGGHLDERERLHMLREDYEHTRLHSVHPASLDGHLPHPSLITPGLPSMHYPRISPTAGNQNGLLNKTPPTAALSAPPPLISTLGGRPVSPRRTTPLSAEIRERPPSHTLKDIEAR

SEQ ID NO: 84137 - protein, 47 aa, Homo sapiens
MAFRDVAVDFTQDEWRLLSPAQRTLYREVMLENYSNLVSLVTYFLFL

SEQ ID NO: 84138 - protein, 186 aa, Homo sapiens
MDCLCIVTTKKYRYQDEDTPPQEHISPQITNEVIGPELVHVSEKNLSEIENVHGFVSHSHISPIKVNGTDADYEYEEITLERGNSGLGFSIAGGTDNPHIGDDSSIFITKIITGGAAAQDGRLRVNDCILRVNEVDVRDVTHSKAVEALKEAGSIVRLYVKRRKPVSEKIMEIKLIKGPKGMWSWV

SEQ ID NO: 84139 - protein, 85 aa, Homo sapiens
MKDKQKKKKERTWAEAARLVLENYSDAPMTPKQILQVIEAEGLKEMRSGTSPLACLNAMLHSNSRGGEGLFYKLPGRISLFTLKR

SEQ ID NO: 84140 - protein, 209 aa, Homo sapiens
MDFSRNLYDIGEQLDSEDLASLKFLSLDYIPQRKQEPIKDALMLFQRLQEKRMLEESNLSFLKELLFRINRLDLLITYLNTRKEEMERELQTPGRAQISAYRVMLYQISEEVSRSELRSFKFLLQEEISKCKLDDDMNLLDIFIEMEKRVILGEGKLDILKRVCAQINKSLLKIINDYEEFSKDFGQSLPNEKQTSGILSDHQQSQFCK

SEQ ID NO: 84141 - protein, 73 aa, Homo sapiens
VEKVEEKSAIDLTPIVVEDKEEKKEEEEKKEVMLQNGETPKDLNDEKQKKNIKQRFMFNIADGGFTVALPLAE

SEQ ID NO: 84142 - protein, 95 aa, Homo sapiens
  MOD_RES (1)..(1): Any amino acid
XGSFLLNFTGCAVCSKRDFMLITNKSLKEEDGEEIVTYDHLCKNCHHVIARHEYTFSIMDEFQVAIQIAMPGGLKQWKYLRTVKDLEEDVFLFYF

SEQ ID NO: 84143 - protein, 321 aa, Homo sapiens
  MOD_RES (1)..(1): Any amino acid
XRKGPAPAGRSRASPVSGREGGSSRPLEEGTGSSPACVRGAAPGSQDAFYPTRAKQARVSQELKKAAKRTVSISEGPDTLGDGMRERRETLALAPEPEPLEKEACEKWKRPFRSASATSLTLSHCVDVVKGLLDFKKRRGHSIGGAPEQRYQIIPVCVAARLPTRAQDVLDAHLSEVNAVRFGPNSSLLATGGADRLIHLWNVVGSRLEANQTLEGAGGSITSVDFDPSGYQVLAATYNQAAQLWKVGEAQSKETLSGHKDKVTAAKFKLTRHQAVTGSRDRTVKEWDLGRAYCSRTINVLSYCNDVVCGDHIIISGHNDQ

SEQ ID NO: 84144 - protein, 217 aa, Homo sapiens
  MOD_RES (1)..(1): Any amino acid
XGSHHKVSVSPVVHVRGLCESVVEADLVEALEKFGTICYVMMMPFKRQALVEFENIDSAKECVTFAADEPVYIAGQQAFFNYSTSKRITRPGNTDDPSGGNKVLLLSIQNPLYPITVDVLYTVCNPVGKVQRIVIFKRNGIQAMVEFESVLCAQKAKAALNGADIYAGCCTLKIEYARPTRLNVIRNDNDSWDYTKPYLGRRGCCWLMLKLLERSPL

SEQ ID NO: 84145 - protein, 101 aa, Homo sapiens
MESKPSRIPRRISVQPSSSLSARMMSGSRGSSLNDTYHSRDSSFRLDSEYQSTSASASASPFQSAWYSESEITQGARSRSQNQQRDHDSKRPKLSCTNCTT

SEQ ID NO: 84146 - protein, 135 aa, Homo sapiens
  MOD_RES (1)..(1): Any amino acid
XTMESSLEFTQSHLGQATNVFVNMEEDFMKPVISIVDELLEAGINVTVYNGQLDLIVDTMGQEAWVRKLKWPELPKFSQLKWKALYSDPKSLETSAFVKSYKNLAFYWILKAGHMVPSDQGDMALKMMRLVTQQE

SEQ ID NO: 84147 - protein, 105 aa, Homo sapiens
MKCTAREWLRVTTVLFMARAIPAMVVPNATLLEKLLEKYMDEDGEWWIAKQRGKRAITDNDMQSILDLHNKLRSQVYPTASNMEYMTWDVELERSAESWAESCLW

SEQ ID NO: 84148 - protein, 1679 aa, Homo sapiens
MASYVDNSFRQAVMKNPPERTPQDLEIVYSYLHGMEALSNLREHQLRLMCETVRYERHEANEVLYYPDDIGTCWYILLSGSVFIKESMFLPRSSFGKRSAGSFRRGCECIVLEPSEMIVVDYMDENEEYFQRQASHRQSRRRFRKINQKGERQTIIDTVDPYPMGKPPLPRGYHTLPADFTKLHLTDSLHPQVTHVSSSHSGCSITSDSGSSSLSDIYQATESEAGDMDLSGLPETAVDSEDDDDEEDIERASDPLMSRDIVRDCLEKDPIDRTDDDIEQLLEFMHQLPAFANMTMSVRRELCAVMVFAVVERAGTIVLNDGEELDSWSVILNGSVEVTYPDGKAEILCMGNSFGVSPTMDKEYMKGVMRTKVDDCQFVCIAQQDYCRILNQVEKNMQKVEEEGEIVMVKEHRELDRTGTRKGHIVIKGTSERLTMHLVEEHSVVDPTFIEDFLLTYRTFLSSPMEVGKKLLEWFNDPSLRDKVTRVVLLWVNNHFNDFEGDPAMTRFLEEFENNLEREKMGGHLRLLNIACAAKAKRRLMTLTKPSREAPLPFILLGGSEKGFGIFVDSVDSGSKATEAGLKRGDQILEVNGQNFENIQLSKAMEILRNNTHLSITVKTNLFVFKELLTRLSEEKRNGAPHLPKIGDIKKASRYSIPDLAVDVEQVIGLEKVNKKSKANTVGGRNKLKKILDKTRISILPQKPYNDIGIGQSQDDSIVGLRQTKHIPTALPVSGTLSSSNPDLLQSHHRILDFSATPDLPDQVLRVFKADQQSRYIMISKDTTAKEVVIQAIREFAVTATPDQYSLCEVSVTPEGVIKQRRLPDQLSKLADRIQLSGRYYLKNNMETETLCSDEDAQELLRESQISLLQLSTVEVATQLSMRNFELFRNIEPTEYIDDLFKLRSKTSCANLKRFEEVINQETFWVASEILRETNQLKRMKIIKHFIKIALHCRECKNFNSMFAIISGLNLAPVARLRTTWEKLPNKYEKLFQDLQDLFDPSRNMAKYRNVLNSQNLQPPIIPLFPVIKKDLTFLHEGNDSKVDGLVNFEKLRMIAKEIRHVGRMASVNMDPALMFRTRKKKWRSLGSLSQGSTNATVLDVAQTGGHKKRVRRSSFLNAKKLYEDAQMARKVKQYLSNLELEMDEESLQTLSLQCEPATNTLPKNPGDKKPVKSETSPVAPRAGSQQKAQSLPQPQQQPPPAHKINQGLQVPAVSLYPSRKKVPVKDLPPFGINSPQALKKILSLSEEGSLERHKKQAEDTISNASSQLSSPPTSPQSSPRKGGSGNQLRSFGSGQLDLTSSSSSLGSYTLAPSGTVDNFSDSGHSEISSRSSIVSNSSFDSVPVSLHDERRQRHSVSIVETNLGMGRMERRTMIEPDQYSLGSYAPMSEGRGLYATATVISSPSTEELSQDQGDRASLDAADSGRGSWTSCSSGSHDNIQTIQHQRSWETLPFGHTHFDYSGDPAGLWASSSHMDQIMFSDHSTKYNRQNQSRESLEQAQSRASWASSTGYWGEDSEGDTGTIKRRGGKDVSIEAESSSLTSVTTEETKPVPMPAHIAVASSTTKGLIARKEGRYREPPPTPPGYIGIPITDFPEGHSHPARKPPDYNVALQRSRMVARSSDTAGPSSVQQPHGHPTSSRPVNKPQWHKPNESDPRLAPYQSQGFSTEEDEDEQVSAV

SEQ ID NO: 84149 - protein, 220 aa, Homo sapiens
MKLCSLAVLVPIVLFCEQHVFAFQSGQVLAALPRTSRQVQVLQNLTTTYEIVLWQPVTADLIVKKKQVHFFVNASDVDNVKAHLNVSGIPCSVLLADVEDLIQQQISNDTVSPRASASYYEQYHSLNEIYSWIEFITERHPDMLTKIHIGSSFEKYPLYVLKVSGKEQAAKNAIWIDCGIHAREWISPAFCLWFIGHRKVHPVPHARKPTVDFILSQNQK

SEQ ID NO: 84150 - protein, 280 aa, Homo sapiens
REPSAAHLSMGYCPQSDAIFELLTGREHLELLARLRGVPEAQVAQTAGSGLARLGLSWYADRPAGTYSGGNKRKLATALALVGDPAVVFLDEPTTGMDPSARRFLWNSLLAVVREGRSVMLTSHSMEECEALCSRLAIMVNGRFRCLGSPQHLKGRFAAGHTLTLRVPAARSQPAAAFVAAEFPGAELREAHGGRLRFQLPPGGRCALARVFGELAVHGAEHGVEDFSVSQTMLEEDQGKDEDTEEQKEAGVGVDPAPGLQHPKRVSQFLDDPSTAETVL

SEQ ID NO: 84151 - protein, 162 aa, Homo sapiens
MNEKSCSFHSKEELRDGQGERLSAGYSPSYDKDKSVLAFRGIPISELKNHGILQALTTEAYEWEPRVVSTEVVRAQEEWEAVDTIQPETGSQASSEQPGQLISFSEALQHFQTVDLSPFKKRIQPTIRRTGLAALRHYLFGPPKLHQRLREERDLVLTIAQY

SEQ ID NO: 84152 - protein, 63 aa, Homo sapiens
METTPLAENQDEDPLEDPHLHLNIEESNQEFMVKSEELYDSLMNCHWQPLDTVHSEIPDETPK

SEQ ID NO: 84153 - protein, 166 aa, Homo sapiens
MNVAMPSWFDIIGLSPDSQEDESGIKQAAENIKALIDQEVKNGIPSNRIILGGFSQGGALSLYTALTTQQKLAGVTALSCWLPLRASFPQGPIGGANRDISILQCHGDCDPLVPLMFGSLTVEKLKTLVNPANVTFKTYEGMMHSSCQQEMMDVKQFIDKLLPPID

SEQ ID NO: 84154 - protein, 154 aa, Homo sapiens
  MOD_RES (1)..(1): Any amino acid
XNLLLQSYEERELQQRLLQQQEEEEACLEEEEEEEDSDEEDQRSGKDSEAWVPDSEERLILREEFTSRMHQRFLDGKDGDFDYRCSCASTSPSPSPASHGLWSHAEPLTSCGGLPLWSYKAPKQFQDVGLNSQRKRLGDLGLALSISDPQSPHL

SEQ ID NO: 84155 - protein, 39 aa, Homo sapiens
MEAGEGKERVPKQRTCPGLGCRNQQSPKLHNQSQFPLSS

SEQ ID NO: 84156 - protein, 77 aa, Homo sapiens
MSKGLLLLLLLSMGGTWASKEPLRPRCRPINATLAVEKEGCPVCITVNTTICAGYCPTMTRVLQGVLPALPQVVCNY

SEQ ID NO: 84157 - protein, 184 aa, Homo sapiens
METESEQNSNSTNGSSSSGGSSRPQIAQMSLYERQAVQALQALQRQPNAAQYFHQFMLQQQLSNAQLHSLAAVQQATIAASRQASSPNTSTTQQQTTTTQASINLATTSAAQLISRSQSVSSPSATTLTQSVLLGNTTSPPLNQSQAQMYLRPQLGNLLQSSRRCHLLSLLEFMQMQIRFRTWQ

SEQ ID NO: 84158 - protein, 118 aa, Homo sapiens
  MOD_RES (1)..(1): Any amino acid
XRIVNVSSLAHHLGRIHFHNLQGEKFYNAGLAYCHSKLANILFTQELARRLKGSGVTTYSVHPGTVQSELVRHSSFMRWMWWLFSFFIKTPQQGAQTSLHCALTEGLEILSGNHFRGD

SEQ ID NO: 84159 - protein, 740 aa, Homo sapiens
MMHLRLFCILLAAVSGAEGWGYYGCDEELVGPLYARSLGASSYYSLLTAPRFARLHGISGWSPRIGDPNPWLQIDLMKKHRIRAVATQGSFNSWDWVTRYMLLYGDRVDSWTPFYQRGHNSTFFGNVNESAVVRHDLHFHFTARYIRIVPLAWNPRGKIGLRLGLYGCPYKADILYFDGDDAISYRFPRGVSRSLWDVFAFSFKTEEKDGLLLHAEGAQGDYVTLELEGAHLLLHMSLGSSPIQPRPGHTTVSAGGVLNDQHWHYVRVDRFGRDVNFTLDGYVQRFILNGDFERLNLDTEMFIGGLVGAARKNLAYRHNFRGCIENVIFNRVNIADLAVRRHSRITFEGKVAFRCLDPVPHPINFGGPHNFVQVPGFPRRGRLAVSFRFRTWDLTGLLLFSRLGDGLGHVELTLSEGQVNVSIAQSGRKKLQFAAGYRLNDGFWHEVNFVAQENHAVISIDDVEGAEVRVSYPLLIRTGTSYFFGGCPKPASRWDCHSNQTAFHGCMELLKVDGQLVNLTLVEGRRLGFYAEVLFDTCGITDRCSPNMCEHDGRCYQSWDDFICYCELTGYKGETCHTPLYKESCEAYRLSGKTSGNFTIDPDGSGPLKPFVVYCDIRENRAWTVVRHDRLWTTRVTGSSMERPFLGAIQYWNASWEEVSALANASQHCEQWIEFSCYNSRLLNTAAFGLAEMRSSTSTGEAPSLGSSAVPVVWTGAVWTLPCTATVTLTSPSGELTRDC

SEQ ID NO: 84160 - protein, 18 aa, Homo sapiens
MTLPLAPGTSFLTRENTD

SEQ ID NO: 84161 - protein, 68 aa, Homo sapiens
MGETEGKKDEADYKRLQTFPLVRHSDMPEEMRVETMELCVTACEKFSNNNEVLPAVQAAPRAFDGPCG

SEQ ID NO: 84162 - protein, 108 aa, Homo sapiens
MAVRASFENNCEIGCFAKLTNTYCLVAIGGSENFYSVFEGELSDTIPVVHASIAGCRIIGRMCVGNRHGLLVPNNTTDQELQHIRNSLPDTVQIRRVEERLSALGNVT

SEQ ID NO: 84163 - protein, 239 aa, Homo sapiens
  MOD_RES (1)..(1): Any amino acid
XSVGVVLALVLNLLQIQRNVTLFPEEVIATIFSSAWWVPPCCGTAAAVVGLLYPCIDSHLGEPHKFKREWASVMRCIAVFVGINHASAKLDFANNVQLSLTLAALSLGLWWTFDRSRSGLGLGITIAFLATLITQFLVYNGVYQYTSPDFLYIRSWLPCIFFSGGVTVGNIGRQLAMLIPFCEELNLKTTWLFHKTRSNYRVFLKSPIVIESSKPPILRARKILEENLTVDYDKDYLFS

SEQ ID NO: 84164 - protein, 210 aa, Homo sapiens
MFRGIYRGVQKHQGMFFSTVGCHPTRCGEFEKNNPDLYLKELLNLAENNKGKVVAIGECGLDFDRLQFCPKDTQLKYFEKQFELSEQTKLPMFLHCRNSHAEFLDIMKRNRDRCVGGVVHSFDGTKEAAAALIDLDLYIGFNGCSLKTEANLEVLKSIPSEKLMIETDAPWCGVKSTHAGSKYIRTAFPTKKKWESGHCLKDRNEPCHIM

SEQ ID NO: 84165 - protein, 167 aa, Homo sapiens
IAAMMQIQNIFVVPPNQKSHAHNKDSKWCQEHFLNYKGLVRAATVREQLKKLLVKFQVPRKSSEGDPDLVLRCIVSGFFANAARFHSTGAYRTIRDDHELHIHPASVLYAEKPPRWVIYNEVIQTSKYYMRDVTAIESAWLLELAPHFYQQGTHLSLKAKRAKVQDP

SEQ ID NO: 84166 - protein, 94 aa, Homo sapiens
MAAQRGMPSSAVRVLEEALGMGLTAAGDARDTADAVAAEGAYYLEQVTITEASEDDYEYEEIPDDNFSIPEGEEDLAKAIQMAQEQATDTEILV

SEQ ID NO: 84167 - protein, 34 aa, Homo sapiens
MRMSVGLSLLLPLSGRTFLLLLSVVMAQSHWPSE

SEQ ID NO: 84168 - protein, 160 aa, Homo sapiens
MSKPPAPNPTPPRNLDSRTFITIGDRNFEVEADDLVTISELGRGAYGVVEKVRHAQSGTIMAVKRIRATVNSQEQKRLLMDLDINMRTVDCFYTVTFYGALFREGDVWICMELMDTSLDKFYRKVLDKNMTIPEDILGEIAVSIVRALEHLHSKLSVIHR

SEQ ID NO: 84169 - protein, 37 aa, Homo sapiens
MTQTHRAKSASSCPNLLVPETWPHQVSASHAGRSKQP

SEQ ID NO: 84170 - protein, 81 aa, Homo sapiens
LTCTQQARGSSRCGPGPLLPTSAPVLLQHYPLYRRSDANCSGEDAAPAEERDIPFKENYDVLSREASQKERSDGQRPSAER

SEQ ID NO: 84171 - protein, 153 aa, Homo sapiens
MKVLGHRLELLTGLLLHDVTMAGLQELRFPEEKPLLRGQDATELESSDAFLLAADTDWKVGEGNAGAVKLAGLGDPRWSPGHLLSPGHQEHDIETPYGLLHVVIRGSPKGNRPAILTYHDVGLNHKLCFNTFFNFEDMQEITKHFVVCHVDAP

SEQ ID NO: 84172 - protein, 45 aa, Homo sapiens
MEYVLFVLYFSFFLCLCALVCLYFSGCQEMTYKHEEACCGDIFWI

SEQ ID NO: 84173 - protein, 147 aa, Homo sapiens
MGETEKRIETHRIRCLSKLKMFLLAITCAFVSKTLSGSYMNSMLTQIERQFNIPTSLVGFINGSFEIGNLLLIIFVSYFGTKLHRPIMIGIGCVVMGLGCFLKSLPHFLMNQYEYESTVSVSGNLSSNSFLCMENGTQILRPTQDPS

SEQ ID NO: 84174 - protein, 135 aa, Homo sapiens
MAFPHLQQPSFLLASLKADSINKPFAQQCQDLVKVIEDFPAKELHTIFPWLVESIFGSLDGVLVGWNLRCLQGRVNPVEYSIVMEFLDPGGPMMKLVYKLQAEDYKFDFPVSYLPGPVKASIQECILPDSPLYHN

SEQ ID NO: 84175 - protein, 197 aa, Homo sapiens
MKYPLMPLVNDLTFSFLVFWFCLPVGLLLLLIIWLRFLLSQDSEENDSSVCLDWEPWSKGPAEFCWKGTLHGQEKERPCCLVFLESAGQWQWQKWMGETCQGGKRTLATVVPPWNPQLISSSDRHVKASRGPSPSPASQMTSSPAGSRSSLGGHGSSEQAHGEKLANLIQRGLKAGLGRRVWVHIKEARVFPYPGDP

SEQ ID NO: 84176 - protein, 120 aa, Homo sapiens
MLRWLIGGGREPQGLAEKSPLQTIDLSFVTGSHVGELIIWDALDWTMQAYERNFWDPSPQLDTQQEIKLCQKSNDISIHHFTCDEENVFAAVGRGLYVYSLQMKRVIACQKTAHDSNVLH

SEQ ID NO: 84177 - protein, 51 aa, Homo sapiens
MSTNICSFKDRCVSILCCKFCKQVLSSRGMKAVLLADTEIDLFSTDIPPTK

SEQ ID NO: 84178 - protein, 600 aa, Homo sapiens
MLVPLAKLSCLAYQCFHALKIKKNYLPLCATRWSSTSTVPRITTHYTIYPRDKDKRWEGVNMERFAEEADVVIVGAGPAGLSAAVRLKQLAVAHEKDIRVCLVEKAAQIGAHTLSGACLDPGAFKELFPDWKEKGAPLNTPVTEDRFGILTEKYRIPVPILPVSWMGEQAEALGVEVYPGYAAAEVLFHDDGSVKGIATNDVGIQKDGAPKATFERGLELHAKVTIFAEGCHGHLAKQLYKKFDLRANCEPQTYGIGLKELWVIDEKNWKPGRVDHTVGWPLDRHTYGGSFLYHLNEGEPLVALGLVVGLDYQNPYLSPFREFQRWKHHPSIRPTLEGGKRIAYGARALNEGGFQSIPKLTFPGGLLIGCSPGFMNVPKIKGTHTAMKSGILAAESIFNQLTSENLQSKTIGLHVTEYEDNLKNSWVWKELYSVRNIRPSCHGVLGVYGGMIYTGIFYWILRGMEPWTLKHKGSDFERLKPAKDCTPIEYPKPDGQISFDLLSSVALSGTNHEHDQPAHLTLRDDSIPVNRNLSIYDGPEQRFCPAGVYEFVPVEQGDGFRLQINAQNCVHCKTCDIKDPSQNINWVVPEGGGGPAYNGM

SEQ ID NO: 84179 - protein, 114 aa, Homo sapiens
MQPSGLEGPGTFGRWPLLSLLLLLLLLQPVTCAYTTPGPPRALTTLGAPRAHTMPGTYAPSTTLSSPSTQGLQEQARALMRDFPLVDGHNDLPLVLRQVYQKGLQDVNLRNFSY

SEQ ID NO: 84180 - protein, 730 aa, Homo sapiens
MAIGVWQLLLDMGIMLSVDQHLYFQDTYVFYQFSSDECSYLYCEFEREEEWQNGVKLLLQLVPLIPARGGICELSHQKIEDSEESSDEILVRLTSAVQRELAAVIALKARKSAIEQDEENNDKHVAVTEAESVPDSQAGVMCKLQERDEIGRIELVQKLAKENYQFLQTDKKEQEKSEHQDDEVTTVQVKEQDQSVLVLKKVQCCGPAPTAGSAESHWRYVVVSGTPEKILEHLLNDLHLEEVQDKETETLLDDFLLTYTVFMTTDDLCQALLRHYSAKKYQGKEENSDVPRRKRKVLHLVSQWIALYKDWLPEDEHSKMFLKTIYRNVLDDVYEYPILEKELKEFQKILGMHRRHTVDEYSPQKKNKALFHQFSLKENWLQHRGTVTETEEIFCHVYITEHSYVSVKAKVSSIAQEILKVVAEKIQYAEEDLALVAITFSGEKHELQPNDLVISKSLEASGRIYVYRKDLADTLNPFAENEESQQRSMRILGMNTWDLALELMNFDWSLFNSIHEQELIYFTFSRQGSGEHTANLSLLLQRCNEVQLWVATEILLCSQLGKRVQLVKKFIKIAAHCKAQRNLNSFFAIVMGLNTASVSRLSQTWEKIPGKFKKLFSELESLTDPSLNHKAYRDAFKKMKPPKIPFMPLLLKDVTFIHEGNKTFLDNLVNFEKLHMIADTVRTLRHCRTNQFGDLSPKEHQELKSYVNHLYVIDSQQALFELSHRIEPRV

SEQ ID NO: 84181 - protein, 403 aa, Homo sapiens
MLGPCPVTCSSSNLSSPWLSAPSCTWTPRGDWFLKGNLLIIIVSVLIILPLALMKHLGYLGYTSGLSLTCMLFFLVSVIYKKFQLGCAIGHNETAMESEALVGLPSQGLNSSCEAQMFTVDSQMSYTVPIMAFAFVCHPEVLPIYTELCRPSKRRMQAVANVSIGAMFCMYGLTATFGYLTFYSSVKAEMLHMYSQKDPLILCVRLAVLLAVTLTVPVVLFPIRRALQQLLFPGKAFSWPRHVAIALILLVLVNVLVICVPTIRDIFGVIGSTSAPSLIFILPSIFYLRIVPSEVEPFLSWPKIQALCFGVLGVLFMAVSLGFMFANWATGRAACLDTDQALLAQVPVRMHMEGSGPLPRVPPAQHVEVAGSHERGCQRRGTAEAADWPTSLLPRDAKLGSWP

SEQ ID NO: 84182 - protein, 51 aa, Homo sapiens
MDKNELVQKAKLAEQAERYDDMAACMKSVTEQGAELSNEERNLLSVAYKNV

SEQ ID NO: 84183 - protein, 87 aa, Homo sapiens
MSLHFLYYCSEPTLDVKIAFCQGFDKQVDVSYIAKHYNMSKSKVDNQFYSVEVGDSTFTVLKRYQNLKPIGSGAQGIVWEMQPQIYF

SEQ ID NO: 84184 - protein, 373 aa, Homo sapiens
  MOD_RES (1)..(1): Any amino acid
XGGGVWAARVNKHKPWLEPTYHGIVTENDNTVLLDPPLIALDKDAPLRFAGEICGFKIHGQNVPFDAVVVDKSTGEGVIRSKEKLDCELQKDYSFTIQAYDCGKGPDGTNVKKSHKATVHIQVNDVNEYAPVFKEKSYKATVIEGKQYDSILRVEAVDADCSPQFSQICSYEIITPDVPFTVDKDGYIKNTEKLNYGKEHQYKLTVTAYDCGKKRATEDVLVKISIKPTCTPGWQGWNNRIEYEPGTGALAVFPNIHLETCDEPVASVQATVELETSHIGKGCDRDTYSEKSLHRLCEMGFHHVGEARLQLLTSSDPPTSASQSAGIICMSHCAWPYSRCGRGHCRAAAIPEWIPQLDHGPAHRQWPRQRPGV

SEQ ID NO: 84185 - protein, 358 aa, Homo sapiens
MKTDLNLLLECLKYQMDNAFSQKEALVTIHSICQQNSNASVYFREIGGLMFVKNLAKSSEHSMVKEAALYTLGAIAEKNVYCQQTLCTSELFEDLTWFLSNDSNINLKRMSVYVILVLVSNNRTGQTLVRETGCITVLSRLFRTVISKHELDLSDKNVFQSYQLWSSVCSTLCVCVNNPQNDENQMFCCSLFPHANEWLKNCTTPEIIRPICSFIGLTLANNTYVQKYFVSVGGLDVLSQVLMQLESDSHETLSSAKLAVVVTKTVDACIADNPTFGIVLSKYHIVSKLLALLLHESLDSGEKFSIMLTLGHCTEDCEENQYDLFKNNGLPLMIQALTESQNEELNKAATFVLHNCKK

SEQ ID NO: 84186 - protein, 132 aa, Homo sapiens
  MOD_RES (1)..(1): Any amino acid
XEGKARPPDSRLPENDERPAAEYEQPWEWKKEQIVRALSVQFEGAERPSFREETVRQHHRQKSWTQKILKPALSDHSEGEKVDPGLPLEKQPWYHGAISRAEAESRLQPCKEAGYLVRNSESGNSRYSIALK

SEQ ID NO: 84187 - protein, 237 aa, Homo sapiens
MAEGDNRSTNLLAAETASLEEQLQGWGEVMLMADKVLRWERAWFPPAIMGVVSLVFLIIYYLDPSVLSGVSCFVMFLCLADYLVPILAPRIFGSNKWTTEQQQRFHEICSNLVKTRRRAVGWWKRLFTLKEEKPKMYFMTMIVSLAAVAWVGQQVHNLLLTYLIATMVRMNVLADALKSINNAEKRGKRQVLIRPCSKVIVRFLTVMMKHGYIGEFEIIDDHRAGKIVVNLTGRLNK

SEQ ID NO: 84188 - protein, 748 aa, Homo sapiens
MSKRGMSSRAKGDKAEALAALQAANEDLRAKLTDIQIELQQEKSKVSKVEREKNQELRQVREHEQHKTAVLLTELKTKLHEEKMKELQAVRETLLRQHEAELLRVIKIKDNENQRLQALLSALRDGGPEKVKTVLLSEAKEEAKKGFEVEKVKMQQEISELKGAKRQVEEALTLVIQADKIKAAEIRSVYHLHQEEITRIKKECEREIRRLQLDEKDARRFQLKIAELSAIIRKLEDRNALLSEERNELLKRVREAESQYKPLLDKNKRLSRKNEDLSHALRRMENKLKFVTQENIEMRQRAGIIRRPSSLNDLDQSQDEREVDFLKLQIVEQQNLIDELSKTLETAGYVKSVLERDKLLRFRKQRKKMAKLPKPVVVETFFGYDEEASLESDGSSVSYQTDRTDQTPCTPDDDLEEGMAKEETELRFRQLTMEYQALQRAYALLQEQVGGTLDAEREVKTREQLQAEVQRAQARIEDLEKALAEQGQDMKWIEEKQALYRRNQELVEKIKQMETEEARLRHEVQDARDQNELLEFRILELEERERKSPAISFHHTPFVDGKSPLQVYCEAEGVTDIVVAELMKKLDILGDNAWLQQIEETEAALQRKMVDLESEKELFSKQKGYLDEELDYRKQALDQANKHILELEAMLYDALQQEAGAKVAELLSEEEREKLKVAVEQWKRQVMSELRERDAQILRERMELLQLAQQRIKELEERIEAQKRQIKELEEKFLFLFLFFSLAFILWS

SEQ ID NO: 84189 - protein, 301 aa, Homo sapiens
DVKLNSPSSLIGQALTEILQHPERARDALRVLLHLVEKSLQRIQNGQRNAMYTSQQSVENKVGGIPGWQALLTAVGFRLDPPTSGLPAAVFFPTSDPGDRLQQCSSTLQSLLGLPNPALQALCKLITASETGEQLISRLHQVLVQLQAGEKEQDLASAPIQVSISVQLWRLPGCHEFLAALGFDLCEVGQEEVILKTGKQANRRTVHFALQSLLSLFDSTELPKRLSLDSSSSLESLASAQSVSNALPLGYQQPPFSPTGADSIASDAISVYSLSSIASSMSFVSKPEGGSEGGGPGGRQD

SEQ ID NO: 84190 - protein, 190 aa, Homo sapiens
MQFSIRRPKLPSSETHPEESMYKRLGVSAWLNHLNELGQVEEEYKLRKVWPFLLRYYSHESTSEEREALRLQKRKEYSEIQQKRLSMTPEEHRAFWRNVQFTVDKDVVRTDRNNQFFRGEDNPNVESMRRILLNYAVYNPAVGYSQGMSDLVAPILAEVLDESDTFWCFVGLMQNTIFVSSPRDEDMEKQ

SEQ ID NO: 84191 - protein, 83 aa, Homo sapiens
MAGTLDLDKGCTVEELLRGCIEAFDDSGKVRDPQLVRMFLMMHPWYIPSSQLAAKLLHIYQQSRKDNSNSLQVKTCHLVRYWI

SEQ ID NO: 84192 - protein, 76 aa, Homo sapiens
MMLGSPTSPKPGVNAQFLPGFLMGDLPAPVTPQPRSISGPSVGVMEMRSPLLAGGSPPQPVVPAHKDKSGAPPVRS

SEQ ID NO: 84193 - protein, 55 aa, Homo sapiens
IVIWEPSPSGTLVIGVISGIAVFVVILFIGILFIILRKRQGSRGAMGHYVLAERF

SEQ ID NO: 84194 - protein, 91 aa, Homo sapiens
MASMLLAQRLACSFQHSYRLLVPGSNPGSRHISQAAAKVDVEFDYDGPLMKTEVPGPRSQELMKQLNIIQNAEAVHFFCNYEESRGNYLVD

SEQ ID NO: 84195 - protein, 236 aa, Homo sapiens
ISTHFAPGDFQGFALVNPQRNSRLTGEFTVEPVPEGAQLSFGNFAQLGHESFYWQLPETYQGDKGEAYFARMRRAHQNRTSLSEEQLRAAVTAGRIPEPPEGRDWAQRASQVDEAQRRMDAEIWQLLSSFAAQPQPPPQGLSPHPQPAAALRAAPPPSSSSSSSSSSASLSFSPGSQFSLSYEGFSLLPGSLYYWQLPRAFLGDKVAAYGGKLRYTLSYTAGPQGSPLSDPDVQIT

SEQ ID NO: 84196 - protein, 550 aa, Homo sapiens
  MOD_RES (1)..(1): Any amino acid
XNVFIKNLDKSIDNKALYDTFSAFGNILSCKVVCDENGSKGYAFVHFETQEAADKAIEKMNGMLLNDRKVFVGRFKSRKEREAELGAKAKEFTNVYIKNFGEEVDDESLKELFSQFGKTLSVKVMRDPNGKSKGFGFVSYEKHEDANKAVEEMNGKEISGKIIFVGRAQKKVERQAELKRKFEQLKQERISRYQGVNLYIKNLDDTIDDEKLRKEFSPFGSITSAKVMLEDGRSKGFGFVCFSSPEEATKAVTEMNGRIVGSKPLYVALAQRKEERKAHLTNQYMQRVAGMRALPANAILNQFQPAAGGYFVPAVPQAQGRPPYYTPNQLAQMRPNPRWQQGGRPQGFQGMPSAIRQSGPRPTLRHLAPTGNAPASRGLPTTTQRVGSECPDRLAMDFGGAGAAQQGLTDSCQSGGVPTAVQNLAPRAAVAAAAPRAVAPYKYASSVRSPHPAIQPLQPLTASMLAAAPPQEQKQMLGERLFPLIQTMHSNLAGKITGMLLEIDNSELLHMLESPESLRSKVDEAVAVLQAHHAKKEAAQKVGAVAAATS

SEQ ID NO: 84197 - protein, 54 aa, Homo sapiens
MELSAEYLREKLQRDLEAEHVEVEDTTLNRCSCSFRVLVVSAKFEGKPLLQRHR

SEQ ID NO: 84198 - protein, 293 aa, Homo sapiens
MTEEEAEWESINVLLMMHGLKPLSLVKRTDLKDLIIFDKQSSQRMRQNLKLLVEETSCQQNMIQELIETNQQLRNELQLEQSRAANQEQRANDLEQIMESVKSKIGELEDESLSRACHQQNKIKDLQKEQKTLQVKCQHYKKKRTEQEETIASLQMEVCRLKKEEEDRIVTQNRVFAYLCKRVPHTVLDRQLLCLIDYYESKIRKIHTQRQYKEDESQSEEENDYRNLDASPTYKGLLMSLQNQLKESKSKIDALSSEKLNLQKDLETRPTQHELRLYKQQVKKLEKALKKNV

SEQ ID NO: 84199 - protein, 106 aa, Homo sapiens
  MOD_RES (1)..(1): Any amino acid
XKQLVESGAAIFASTISDIETAADKCEEMEEGYIQCSQFLYGKLQLENGLNGAHFSRQRPQCESYSFQEPLYGNMSSVAAQCVCLPVPTLLGRLGGSASCSSSPKG

SEQ ID NO: 84200 - protein, 77 aa, Homo sapiens
MLLQPAPCAPSAGFPRPLAAPGAMHGSQKDTTFTKIFVGGLPYHTTDASLRKYFEGFGDIEEAVVITDRQTGDYFCP

SEQ ID NO: 84201 - protein, 23 aa, Homo sapiens
MAAAAALRAPAQMHLWVAPSLQP

SEQ ID NO: 84202 - protein, 42 aa, Homo sapiens
MYGKIIFVLLLSGDGANPENSGKRGQKAEGRARAKILKQQKL

SEQ ID NO: 84203 - protein, 45 aa, Homo sapiens
MSTVKEQLIEKLIEDDENSQCKITIVGTGAVGMACAISILLKWIF

SEQ ID NO: 84204 - protein, 50 aa, Homo sapiens
MTELQSALLLRRQLAELNKNPVEGFSAGLIDDNDLYRWEVLIIGPPDTLY

SEQ ID NO: 84205 - protein, 347 aa, Homo sapiens
EINYAKEEACRLRELREGAECELSRRQYAEQELEQVRMALKKAEKEFELRSSWSVPDALQKWLQLTHEVEVQYYNIKRQNAEMQLAIAKDEAEKIKKKRSTVFGTLHVAHSSSLDEVDHKILEAKKALSELTTCLRERLFRWQQIEKICGFQIAHNSGLPSLTSSLYSDHSWVVMPRVSIPPYPIAGGVDDLDEDTPPIVSQFPGTMAKPPGSLARSSSLCRSRRSIVPSSPQPQRAQLAPHAPHPSHPRHPHHPQHTPHSLPSPDPDILSVSSCPALYRNEEEEEAIYFSAEKQWNTRECAVGDSQGPHVHGLVRFDKDFGSYSEYERKHWEVSRKCQTQLQNVTP

SEQ ID NO: 84206 - protein, 295 aa, Homo sapiens
MLNKQQSEEDVLRLFQPFGVIDECTVLRGPDGSSKGCAFVKFSSHTEAQAAIHALHGSQTMPGASSSLVVKFADTDKERTLRRMQQMVGQLGILTPSLTLPFSPYSAYAQALMQQQTTVLSTSGSYLSPGVAFSPCHIQQIGAVSLNGLPATPIAPASGLHSPPLLGTTAVPGLVAPITNGFAGVVPFPGGHPALETVYANGLVPYPAQSPTVAETLHPAFSGVQQYTAMYPTAAITPIAHSVPQPPPLLQQQQREGVWRHGADADVPTLRQYHFLQGVYGSSYQPEQVFRLREL

SEQ ID NO: 84207 - protein, 588 aa, Homo sapiens
  MOD_RES (1)..(1): Any amino acid
XHSENSRATPGACLSPQHSQDGAWRRPAAAEETLGVRDGHQACRDFLELAEIHSRKWQRALQYEQEQRVHLEETIEQLAKQHNSLERAFHSAPGRPANPSKSFIEGSLLTPKGEDSEEDEDTEYFDAMEDSTSFITVITEAKEDSRKAEGSTGTSSVDWSSADNVLDGASLVPKGSSKVKRRVRIPNKPNYSLNLWSIMKNCIGRELSRIPMPVNFNEPLSMLQRLTEDLEYHHLLDKAVHCTSSVEQMCLVAAFSVSSYSTTVHRIAKPFNPMLGETFELDRLDDMGLRSLCEQVSHHPPSAAHYVFSKHGWSLWQEITISSKFRGKYISIMPLGAIHLEFQASGNHYVWRKSTSTVHNIIVGKLWIDQSGDIEIVNHKTNDRCQLKFLPYSYFSKEAARKVTGVVSDSQGKAHYVLSGSWDEQMECSKVMHSSPSSPSSDGKQKTVYQTLSAKLLWKKYPLPENAENMYYFSELALTLNEHEEGVAPTDSRLRPDQRLMEKGRWDEANTEKQRLEEKQRLSRRRRLEACGPGSSCSSEEEKEADAYTPLWFEKRLDPLTGEMACVYKGGYWEAKEKQDWHMCPNIF

SEQ ID NO: 84208 - protein, 271 aa, Homo sapiens
VAIDGKEEDLGSPTGELTSKILSSIKVLEGFLDIDTKFSENRCQKALPMAHSAYQSNLPHNYTMTVHKNQLAQALRVYSQHARGPAFHKYAMQLHEDCYKFWSNGHQLCEERSLTDQHCVHKFHSLPKSGEKPEADRNPPVLYHNSRARSTGACNCGRKQAPRDDPFDIKAANYDFYQLLEEKCCGKLDHINFPVFEPSTPDPAPAKNESSPAPPDSDADKLKEKEPQTQGESTSLSLALSLGQSTDSLGSARPTTMSGILPRKTRNHPST

SEQ ID NO: 84209 - protein, 16 aa, Homo sapiens
MAAFSEMGVMPEIAQA

SEQ ID NO: 84210 - protein, 419 aa, Homo sapiens
MDSRDSSFGQNDSPTVLPITTREANNSLISQNIPGPLTQTQTLSAEQFHLVDQNGQAIQYELQSLGESNAQMMIVASPTENGQVLRVIPPTQTGMAQVIIPQGQLVDVNSPRDVPEEKPSNRNLPTVRVDTLADNTSNYILHPQTSFPLPKKSVTGMLEEPLLGPLQPLSSNTPIWACRLRSCEKIGDSYRGYCVSETELESVLTFHKQQTQSVWGTRQSPSPAKPATRLMWKSQYVPYDGIPFVNAGSRAVVMECQYGPRRKGFQLKKVSEQESRSCQLYKATCPARIYIKKVQKFPEYRVPTDPKIDKKIIRMEQEKAFNMLKKNLVDAGGVLRWYVQLPTQQAHQYHELETPCLTLSPSPFPVSSLEEEETAVRDENCALPSRLHPQVAHKIQELVSQGIEQVYAVRKQLSPSYFI

SEQ ID NO: 84211 - protein, 163 aa, Homo sapiens
MSSSRKDHLGASSSEPLPVIIVGNGPSGICLSYLLSGYTPYTKPDAIHPHPLLQRKLTEAPGVSILDQDLDYLSEGLEGRSQSPVALLFDALLRPDTDFGGNMKSVLTWKHRKEHAIPHVVLGRNLPGGAWHSIEGSMVILSQGQWMGLPDLEVKDWMQKKRR

SEQ ID NO: 84212 - protein, 163 aa, Homo sapiens
  MOD_RES (1)..(1): Any amino acid
XSRNVLVKSNLQCCIADLGLAVMHSQGSDYLDIGNNPRVGTKRYMAPEVLDEQIRTDCFESYKWTDIWAFGLVLWEIARRTIVNGIVEDYRPPFYDVVPNDPSFEDMKKVVCVDQQTPTIPNRLAADPVRPLLGLGWRGVVAHGWDFWAQELVSEASASSHRY

SEQ ID NO: 84213 - protein, 158 aa, Homo sapiens
MLLRCFTCDRLCGGCTAPAPPAHQGIVLQPVMPSCDPGPGPACLPTKTFRSYLPRCHRTYSCVHCRAHLAKHDELISKSFQGSHGRAYLFNSVVNVGCGPAEQRLLLTGLHSVADIFCESCKTTLGWKYEQAFETSQKYKEGKYIIEMSHMVKDNGWD

SEQ ID NO: 84214 - protein, 53 aa, Homo sapiens
MTQSVVVQVGQCGNQIGCCFWDLALREHAAVNQKGIYDEAISSFFRNVDTRQS

SEQ ID NO: 84215 - protein, 198 aa, Homo sapiens
  MOD_RES (1)..(1): Any amino acid
XTLNEEKRKEEESKFEEMKKKHENHPKVNHPGSKDQLKEVWEETDGLDPNDFDPKTFFKLHDVNSDGFLDEQELEALFTKELEKVYDPKNEEDDMVEMEEERLRMREHVMNETLDQQQFFTEEELKEYENIIALQENELKKKADELQKQKEELQRQHDQLEAQKLEYHQVIQQMEQKKLQQGIPPSGPAGELKFEPHI

SEQ ID NO: 84216 - protein, 204 aa, Homo sapiens
MSEGVDLIDIYADEEFNQDPEFNNTDQIDLYDDVLTATSQPSDDRSSSTEPPPPVRQEPSPKPNNKTPAILYTYSGLRNRRAAVYVGSFSWWTTDQQLIQVIRSIGVYDVVELKFAENRANGQSKGYAEVVVASENSVHKLLELLPGKVLNGEKVDVRPATRQNLSQFEAQARKRIPPRAHSRDSSDSADGRATPSENLVPSSA

SEQ ID NO: 84217 - protein, 170 aa, Homo sapiens
  MOD_RES (1)..(1): Any amino acid
XEHVSGGELFDYLVKKGRLTPKEARKFFRQIISALDFCHSHSICHRDLKPENLLLDEKNNIRIADFGMASLQVGDSLLETSCGSPHYACPEVIRGEKYDGRKADVWSCGVILFALLVGALPFDDDNLRQLLEKVKRGVFHMPHFIPPDCQSLLRGMIEVDAARRLTRGQE

SEQ ID NO: 84218 - protein, 251 aa, Homo sapiens
MVSWGRFICLVVVTMATLSLARPSFSLVEDTTLEPEGAPYWTNTEKMEKRLHAVPAANTVKFRCPAGGNPMPTMRWLKNGKEFKQEHRIGGYKVRNQHWSLIMESVVPSDKGNYTCVVENEYGSINHTYHLDVVERSPHRPILQAGLPANASTVVGGDVEFVCKVYSDAQPHIQWIKHVEKNGSKYGPDGLPYLKVLKHSGINSSNAEVLALFNVTEADAGEYICKVSNYIGQANQSAWLTVLPKQQGRRC

SEQ ID NO: 84219 - protein, 209 aa, Homo sapiens
MAALSGGGGGGAEPGQALFNGDMEPEAGAGAGAAASSAADPAIPEEVWNIKQMIKLTQEHIEALLDKFGGEHNPPSIYLEAYEEYTSKLDALQQREQQLLESLGNGTDFSVSSSASMDTVTSSSSSSLSVLPSSLSVFQNPTDVARSNPKSPQKPIVRVFLPNKQRTVVPARCGVTVRDSLKKALMMRGLIPECCAVYRIQDGSFLELT

SEQ ID NO: 84220 - protein, 176 aa, Homo sapiens
MLNYSAPSAGGCLLDRKAVGTPAGGGFPRRHSVTLPSSKFHQNQLLSSLKGEPAPALSSRDSRFRDRSFSEGGERLLPTQKQPGGGQVNSSRYKTELCRPFEENGACKYGDKCQFAHGIHELRSLTRHPKYKTELCRTFHTIGFCPYGPRCHFIHNAEERRALAGARDLSADRPRL

SEQ ID NO: 84221 - protein, 281 aa, Homo sapiens
MELIQDTSRPPLEYVKGVPLIKYFAEALGPLQSFQARPDDLLISTYPKSGTTWVSQILDMIYQGGDLEKCHRAPIFMRVPFLEFKAPGIPSGMETLKDTPAPRLLKTHLPLALLPQTLLDQKVKVVYVARNAKDVAVSYYHFYHMAKVHPEPGTWDSFLEKFMVGEVSYGSWYQHVQEWWELSRTHPVLYLFYEDMKENPKREIQKILEFVGRSLPEETVDFVVQHTSFKEMKKNPMTNYTTVPQEFMDHSISPFMRKGMAGDWKTTFTVAQNERFDADYA

SEQ ID NO: 84222 - protein, 110 aa, Homo sapiens
MLNLFVAVIMDNFEYLTRDSSILGPHHLDEFVRVWAEYDRAACGRIPYKDMYKLVRVISPPLGLGENCPYRVACKRLVLMNMPVAEDMTVHFTSTLMALIRTALDIKIAK

SEQ ID NO: 84223 - protein, 51 aa, Homo sapiens
MNILAPVRRDRVLAELPQCLRKEAALHGHKDFHPRVTCACQEHRTGTVGRF

SEQ ID NO: 84224 - protein, 143 aa, Homo sapiens
MGTRWGLGRKPCSPHLRASGLLQTDWTEPWLMGLATFHALCVLLTCLSSRSYRLQIGHFLCLVILVYCAEYINEAAAMNWRLFSKYQYFDSRGMFISIVFSAPLLVNAMIIVVMWVWKTLNVMTDLKNAQERRKEKKRRRKED

SEQ ID NO: 84225 - protein, 211 aa, Homo sapiens
MDNRKEPPFFNDDNMGPFYYRLHFCDTMELFIETLTGTCFELRVSPFETVISVKAKIRRLEGIPICRQHLIWNNMELENDYCLNDYNISEGCTLKLVLAMRGGPINTRRVPTDDPLRKMAEYLDSSRVEVWEKTSCSKQVTFLVYQEGDQLNFFPAVDRGDGTLTPLSDSSKKIDFHLHVLRRKGEHRMSENLLRMTKNLYFSPVPNLKKF

SEQ ID NO: 84226 - protein, 118 aa, Homo sapiens
  MOD_RES (1)..(1): Any amino acid
XGDPILDEEFQRLKTEVSHKRVVRNQEEKIKEFHPTFDPLINNTWLSRSRAQKRFQQVARKVMIQGRLFNMLSAVREMDKESILRKIGQAKQSIAQGEVWLQSTEMPRLIMPLSVNFP

SEQ ID NO: 84227 - protein, 181 aa, Homo sapiens
MISPVLILFSSFLCHVAIAGRTCPKPDDLPFSTVVPLKTFYEPGEEITYSCKPGYVSRGGMRKFICPLTGLWPINTLKCTPRVCPFAGILENGAVRYTTFEYPNTISFSCNTGFYLNGADSAKCTEEGKWSPELPVCAPIICPPPSIPTFATLRVYKPSAGNNSLYRDTAVFECLPQHAMF

SEQ ID NO: 84228 - protein, 230 aa, Homo sapiens
MSRSNVQPTAAPGQKVMENSSGTPDILTRRHFTIDDFEIGRPLGKGKFGNVYLAREKKSHFIVALKVLFKSQIEKEGVEHQLRREIEIQAHLHHPNILRLYNYFYDRRRIYLILEYAPRGELYKELQKSCTFDEQRTATIMEELADALMYCHGKKVIHRDIKPENLLLGLKGELKIADFGWSVHAPSLRRKTMCGTLDYLPPEMIEGRMHNEKVDLWCIGVLCYELLVGN

SEQ ID NO: 84229 - protein, 281 aa, Homo sapiens
MEDHQHVPIDIQTSKLLDWLVDRRHCSLKWQSLVLTIREKINAAIQDMPESEEIAQLLSGSYIHYFHCLRILDLLKGTEASTKNIFGRYSSQRMKDWQEIIALYEKDNTYLVELSSLLVRNVNYEIPSLKKQIAKCQQLQQEYSRKEEECQAGAAEMREQFYHSCKQYGITGENVRGELLALVKDLPSQLAEIGAAAQQSLGEAIDVYQASVGPTEQVLPMLRFVQKRGNSTVYEWRTGTEPSVVERPHLEELPEQVAEDAIDWGDFGVEAVSEGTDSGIS

SEQ ID NO: 84230 - protein, 188 aa, Homo sapiens
MTALDLFLTNQFSEALSYLKPRTKESMYHSLTYATILEMQAMMTFDPQDILLAGNMMKEAQMLCQRHRRKSSVTDSFSSLVNRPTLGQFTEEEIHAEVCYAECLLQRAALTFLQGSSHGGAVRPRALHDPSHACSCPPGPGRQHLFLLQDENMVSFIKGGIKVRNSYQTYKELDSLVQSSQYCKGENH

SEQ ID NO: 84231 - protein, 942 aa, Homo sapiens
MSEMSGATTSLATVALDPPSDRTSHPQDVIEDLSQNSITGEHSQLLDDGHKKARNAYLNNSNYEEGDEYFDKNLALFEEEMDTRPKVSSLLNRMANYTNLTQGAKEHEEAENITEGKKKPTKTPQMGTFMGVYLPCLQNIFGVILFLRLTWVVGTAGVLQAFAIVLICCCCTMLTAISMSAIATNGVVPAGGSYFMISRALGPEFGGAVGLCFYLGTTFAAAMYILGAIEIFLVYIVPRAAIFHSDDALKESAAMLNNMRVYGTAFLVLMVLVVFIGVRYVNKFASLFLACVIVSILAIYAGAIKSSFAPPHFPVCMLGNRTLSSRHIDVCSKTKEINNMTVPSKLWGFFCNSSQFFNATCDEYFVHNNVTSIQGIPGLASGIITENLWSNYLPKGEIIEKPSAKSSDVLGSLNHEYVLVDITTSFTLLVGIFFPSVTGIMAGSNRSGDLKDAQKSIPIGTILAILTTSFVYLSNVVLFGACIEGVVLRDKFGDAVKGNLVVGTLSWPSPWVIVIGSFFSTCGAGLQSLTGAPRLLQAIAKDNIIPFLRVFGHSKANGEPTWALLLTAAIAELGILIASLDLVAPILSMFFLMCYLFVNLACALQTLLRTPNWRPRFRYYHWALSFMGMSICLALMFISSWYYAIVAMVIAGMIYKYIEYQGAEKEWGDGIRGLSLSAARFALLRLEEGPPHTKNWRPQLLVLLKLDEDLHVKHPRLLTFASQLKAGKGLTIVGSVIVGNFLENYGEALAAEQTIKHLMEAEKVKGFCQLVVAAKLREGISHLIQSCGLGGMKHNTVVMGWPNGWRQSEDARAWKTFIGTVRVTTAAHLALLVAKNISFFPSNVEQFSEGNIDVWWIVHDGGMLMLLPFLLKQHKVWRKCSIRIFTVAQLEDNSIQMKKDLATFLYHLRIEAEVEVVEMVRKLSLRYKSMTVIYQHILTSAL

SEQ ID NO: 84232 - protein, 128 aa, Homo sapiens
  MOD_RES (1)..(1): Any amino acid
XRPSPSTLVDKDQSLQLSPGQYNVLPAPVPKYASRSCVFRSTVQRFPTTYFIPHEGPGPGHYNVKMPPTSSVTSCFQSRVPRFLPSCSKTPGPGAYTTLRQFPKQSPTIAKMGQEHSLFFNNNNWLLK

SEQ ID NO: 84233 - protein, 101 aa, Homo sapiens
MMQPQQPYTGQIYQPTQAYTPASPQPFYGNNFEDEPPLLEELGINFDHIWQKTLTVLHPLKVADGSIMNETDLAGPMVFCLAFGATLLLAGKIQFGYVYGI

SEQ ID NO: 84234 - protein, 109 aa, Homo sapiens
  MOD_RES (1)..(1): Any amino acid
XLQYYYSSSEDEDSDHEDKDRGRCAPASSSVPAEAELAGEGISVNTGPKGVINDWRRFKQLETEQREEQCREMERLIKKLSMTCRSHLDEEEEQQKQKDLQEKISGKER

SEQ ID NO: 84235 - protein, 157 aa, Homo sapiens
MVTLHRMGPNLQLIEGDAKQLAGMITFTCNLAENVSSKVRQLDLAKNRLYQAIQRADDILDLKFCMDGVQTALRSEDYEQAAAHTHRYLCLDKSVIELSRQGKEGSMIDANLKLLQEAEQRLKAIVAEKFAIATKEGDLPQVERFFKIFPLLGLHEE

SEQ ID NO: 84236 - protein, 16 aa, Homo sapiens
MMVSMGAVSKETPVVT

SEQ ID NO: 84237 - protein, 78 aa, Homo sapiens
MASKPEKRVASSVFITLAPPRRDVAVAEEVRQAVCEARRGRPWEAPAPMKTPEAGLAGRPSPWTTPGRAAATVPAAPM

SEQ ID NO: 84238 - protein, 2308 aa, Homo sapiens
MNIVRKLNLMIPWSIFLLHVLLFSLQEYICASSILMGTSKNGFNENRQKRALLAAQFEATSPRYFFHDAINWGESKIKGSCPYECLNGAFCSKTGTCDCQIFQALGTRCQIIPNMGNGRDGICKTWGQYHFETFDGIYYYFPGNCSYIFAKDCGDLEPRYTVWVHNSPKCLGSVYSCYRSISLFFSNQEEIRIYGHEIKKNGISLTLPQTIGQIFIEKLADYILVKTTFGFSLAWDGISGIYLKLSEDHKGKSCGLCGNYNDIQSDDFIILQEDYTEDIAMFANSWSVQTPDDTKCVLTPSDFPNPCSSGMPAFEAIFFKCQILLQFPFLSCHEYIDPYLYIASCVNDLCKTDDDETYCRAATEYARACSHAGYPIQDWRDDFPACTDKCDDSFVHRDCISCCPPTCTFEKQCLGSNLHCLDGCYCPDGLVMDNGTCISLENCPCGFHGLAYSVGSKIEQECTECVCVGGVWNCTEQDCPVQCSVVGDSHFTTFDGRHYSFIGMCQYILVKGTGKDKFTITLQKAPCEQNLGLVCLQSITLILEDDFNKQVTLGRGGQILTSPNQGFNLNGIVEIQTLSSLFILLKTTFGLKILFAIDGERIYIQLTSAWKRRTLGLCGTFNGNIRDDFLSPSGMIEGTPQLHANAWRVSSTCFAPVHVPVVDPCNINQQNIGYAAHCDVIHQELFAPCHIYISPGLYYQLCRHDACKCGSSCLCNALAHYAYLCGQHGVPIDFRTQISFCAVVCQKGMLYHHCSSFCLHSCISLSSPEQCSDDCAEGCNCPEGKFYEDTLNFCVPIFHCRCHYRGSVYQPGELIPTPSGLCQCSNGTVKCDELATPSAVHICPEGKEYFDCRFPDPELPAGGVNCETTCANLAMNFTCTPSSPCISGCVCAPGMAEHRGKCYVPESCPCIWKDWEYLSGEVIATPCYTCVCRRGMFNCTYYPCPAVCTIYGDRHYYSFDGLEYDYISDCQVFLIKKQSGFFLENKSTYQLWKAGYYIVVYFPEKDITILWDRKTTIHIKVGPQWKNKLSGLCGNFDKCTSNDMTTSNNLEVRNARVFGDSWALGQCESPDETIKPCEAHQNKFPYAKKECSILYSDIFASCRNVIDVTSFAKNCHEDTCNCNLGGDCECLCTSIAAYAYKCCQEGISIHWRSSTVCSLDCEYYNEGLGEGPYMLASYGQSGLVLGANMTSRSVFCLPRSSVHTSLFFYFMITPGLFKEKVSSLALVSLESAERPNYFLYVHDNDTLSLELWEANSAFHRRATFFHHQGLWIPGYSAFELYSKKGFFIIFTDSSVKASKYDDSEEFKHSSSFSIEEIQAAVPYRKMCEWRYEPCATPCFKTCSDPEALACKFLPPVEGCLPYCPKNMILDEVTLKCVYPRDCIPVIPTEPTLMPPAKPTVPMFTVWEMITPSDITVFDMLTPTTGLECEPQKFDPVYDCSQYICLNMEWQLYNWSLNCPKDVEMPDCGFRGRPVQVNSDICCPEWECPCRCSMLSELSIITFDGNNAALYSMASYILVRIPGEIIVAHIEKCSMNQNGNSLKKLAPSGRISGLCFKKLNVTTPIHKIIVNRLARKVEVDSIVVPLPFSSQELSIEDSGSMYVITTPAGLIIKWSHLTGIIDIHFGFRFNLSSYTEGLCGICNEDPDDDLRMQNGTIITNMEDIGLFIESWEIEKSFEVTMRRPVRNCTEHDCSQCIDLLNRRIFIPCHDKVSPEDFCEKMWINYTYFWNYECDALSAYVALCNKFDICIQWRTPDYCSLSCPEGKEYQPCVRPCEARTCLNQWFYGHTSCLNLREDCVCKVGTILHRPHSAQCIPEKECACTDSEDQPRTAGEIWNGGIDECTLYKCLENGSIIPIEPDCDEEPTPVCEREAEVVMGIIDKWTCCSKEVCGCDTTLCETSIPTCTNSQKLIVGHSPLSCCPQYKCECDPLKCPSISTPECREDQFMIQVRQEEPCCFSPFCVCESCTKPVPLCHDGEFLTVDLNSTHFCCPQYYCVCEPNLCPMPLLNCAEDMNLVKENVSGQCCPTWHCECNCENLIMPTCEVGEFTAIDHNFQSDCGCIQYLCEKDDVCVFQEVSVLNPGQSMIKYLEEDFCYAIECLEEKDNHTGFHTLNFTLVNCSKKCDVHQVYTPSPSDYGCCGTCKNVSCKFHMENGTSVVYAVGSTWHYNCTTYECVKTDEGAIILNYTMVCPPFNETECKMNEGIVKLYNEGCCKICKREERICQKVIIKSVIRKQDCMSQSPINVASCDGKCPSATIYNINIESHLRFCKCCRENGVRNLSVPLYCSGNGTEIMYTLQEPIDCTCQWN

SEQ ID NO: 84239 - protein, 570 aa, Homo sapiens
  MOD_RES (1)..(1): Any amino acid
XGEASENGLEDIDRILERIEDSTGLNRPGPAPLSSRKHVLYVEHRHLNPDTELKRYFGARAILGEQRPRQRQRVYPKCTWLTTPKSTWPRYSKPGLSMRLLESKKGLSFFAFEHSEEYQQAQHKFLVAVESMEPNNIVVLLQTSPYHVDSLLQLSDACRFQEDQEMARDLVERALYSMECAFHPLFSLTSGACRLDYRRPENRSFYLALYKQMSFLEKRGCPRTALEYCKLILSLEPDEDPLCMLLLIDHLALRARNYEYLIRLFQEWEAHRNLSQLPNFAFSVPLAYFLLSQQTDLPECEQSSARQKASLLIQQALTMFPGVLLPLLESCSVRPDASVSSHRFFGPNAEISQPPALSQLVNLYLGRSHFLWKEPATMSWLEENVHEVLQAVDAGDPAVEACENRRKVLYQRAPRNIHRHVILSEIKEAVAALPPDVTTQSVMGFDPLPPSDTIYSYVRPERKGEEERNSVIWGSQLCVCRPRSFPSPPNVQALACRPLWQAKSYQPWKHHCSLLPVTVAKLYHGGGEARGRSGWGSEPQPGPEQADAGCARHDGQLPPQRPGGAARGRR

SEQ ID NO: 84240 - protein, 738 aa, Homo sapiens
  MOD_RES (1)..(1): Any amino acid
XPEKPVKQEEMAALDVDSGGGGGGGGGHGEYLQQQQQHGNGAVAAAAAAQTGDLASAQLGGAPNRWEVLSATPTTIKDEAGNLVQIPSAATSSGQYVLPLQNLQNQQIFSVAPGSDSSNGTVSSVQYQVIPQIQSADGQQVQIGFTGSSDNGGINQESSQIQIIPGSNQTLLASGTPSANIQNLIPQTGQVQVQGVAIGGSSFPGQTQVVANVPLGLPGNITFVPINSVDLDSLGLSGSSQTMTAGINADGHLINTGQAMDSSDNSERTGERVSPDINETNTDTDLFVPTSSSSQLPVTIDSTGILQQNTNSLTTSSGQVHSSDLQGNYIQSPVSEETQAQNIQVSTAQPVVQHLQLQESQQPTSQAQIVQGITPQTIHGVQASGQNISQQALQNLQLQLNPGTFLIQAQTVTPSGQVTWQTFQVQGVQNLQNLQIQNTAAQQITLTPVQTLTLGQVAAGGAFTSTPVSLSTGQLPNLQTVTVNSIDSAGIQLHPGENADSPADIRIKEEEPDPEEWQLSGDSTLNTNDLTHLRVQVVDEEGDQQHQEGKRLRRVACTCPNCKEGGGRGTNLGKKKQHICHIPGCGKVYGKTSHLRAHLRWHSGERPFVCNWMYCGKRFTRSDELQRHRRTHTGEKKFVCPECSKRFMRSDHLAKHIKTHQNKKGIHSSSTVLASVEAARDDTLITAGGTTLILANIQQGSVSGIGTVNTSATSNQDILTNTEIPLQLVTVSGNETME

SEQ ID NO: 84241 - protein, 43 aa, Homo sapiens
MTHTLREVHRPGLKISKREEVEAVTIVETPPLVVVGVVGYVAT

SEQ ID NO: 84242 - protein, 292 aa, Homo sapiens
MGLEEIAPCTSKRKTQCRCQPGMFCAAWALECTHCELLSDCPPGTEAELKDEVGKGNNHCVPCKAGHFQNTSSPSARCQPHTRCENQGLVEAAPGTAQSDTTCKNPLEPLPPEMSGSLLKRRPQGEGPNPVAGSWEPPKAHPYFPDLVQPLLPISGDVSPVSTGLPAAPVLEAGVPQQQSPLDLTREPQLEPGEQSQVAHGTNGIHVTGGSMTITGNIYIYNGPVLGGPPGPGDLPATPEPPYPIPEEGDPGPPGLSTPHQEDGKAWHLAETEHCGATPSNRGPRNQFITHD

SEQ ID NO: 84243 - protein, 208 aa, Homo sapiens
MAAPCGSELPANSPLKIPKMEVLSPASPGGLSDGNPSLSDPSTPRGASPLGPGSAAGSGAAASGGLGLGLGGRSAASSSVSFSPGGGGGGAAAAAAAACRGMSWTPAETNALIAVWGNERLVEARYQQLEGAGTVFGSKAPGPAMYERVSRALAELGYERTPSQCRERIKWLVPGAGVRWQHYGGLFTGGLGKPQSGSPWLSNRSGIG

SEQ ID NO: 84244 - protein, 68 aa, Homo sapiens
  MOD_RES (1)..(1): Any amino acid
XSLLMNRRKFLYQFKNVRWAKGRRETYLCYVVKRRDSATSFSLDFGYLRNKPLYEVDDLRDAFRTLGL

SEQ ID NO: 84245 - protein, 148 aa, Homo sapiens
MGNSALRAHVETAQKTGVFQLKDRGLTEFPADLQKLTSNLRTIDLSNNKIESLPPLLIGKFTLLKSLSLNNNKLTVLPDEICNLKKLETLSLNNNHLRELPSTFGQLSALKTLSLSGNQLGALPPQLCSLRHLDVMDLSKNQIRSIPD

SEQ ID NO: 84246 - protein, 451 aa, Homo sapiens
  MOD_RES (1)..(1): Any amino acid
XEIYSENSVSIREYGTIDDVDIDLHINISFLDEEVSTAWKVLRTEPIVLRLRFSLSQYLDGPEPSIEVFQPSNKEGFGLGLQLKKILGMFTSQQWKHLSNDFLKTQQEKRHSWFKASGTIKKFRAGLSIFSPIPKSPSFPIIQDSMLKGKLGVPELRVGRLMNRSISCTMKNPKVEVFGYPPSPQVSGHCKNIPTLEYGFLVQIMKYAEQRIPTLNEYCVVCDEQHVFQNGSMLKPAVCTRELCVFSFYTLGVMSGAAEEVATGAEVVDLLVAMCRAALESPRKSIIFEPYPSVVDPTDPKTLAFNPKKKNYERLQKALDSVMSIREMTQGSYLEIKKQMDKLDPLAHPLLQWIISSNRSHIVKLPLSRLKFMHTSHQFLLLSSPPAKEARFRTAKKLYGSTFAFHGSHIENWHSILRNGLVNASYTKLQEWEKDSTGCPPRMSWSRDTTG

SEQ ID NO: 84247 - protein, 137 aa, Homo sapiens
MRNLKLFRTLEFRDIQGPGNPQCFSLRTEQGTVLIGSEHGLIEVDPVSREVKNEVSLVAEGFLPEDGSGRIVGVQDLLDQESVCVATASGDVILCSLSTQQLECVGSVASGISVMSWSPDQELVLLATDPDYDDKRF

SEQ ID NO: 84248 - protein, 83 aa, Homo sapiens
HFCIDMLNAKLAVQKYEELFPAFSDSRECKLMKKLLEAHEEQNVDSYTESVKEYDSISRLDQWLTTMLLRIKKTIQGDEEDLR

SEQ ID NO: 84249 - protein, 59 aa, Homo sapiens
MDSHSGEPALLPCGTCDMVFRSSALLATHTQRFCIGHPTQEMTFGAQASVATEPQRAAN

SEQ ID NO: 84250 - protein, 168 aa, Homo sapiens
  MOD_RES (1)..(1): Any amino acid
XAMGAAYSSARLLVRGPDEPEEKPASDVHEQLVPPRMLERFTPKKVKKGSSITFSVKVEGRPVPTVHWLREEAERGVLWIGPDTPGYTVASSAQQHSLVLLDVGRQHQGTYTCIASNAAGQALCSASLHVSGLPKVEEQEKVKEALISTFLQGRASGCQGGPRPPVPR

SEQ ID NO: 84251 - protein, 115 aa, Homo sapiens
  MOD_RES (1)..(1): Any amino acid
XGGSTPPGITAPAVPSIPSPIGVNGFTGLPPQANGQPAAEAVFANGIHPYPAQSPTAADPLQQAYAGVQQYAGRFVSFDNPASAQTAIQAMNGFQIGMKRLKVQLKRPKDANRPY

SEQ ID NO: 84252 - protein, 733 aa, Homo sapiens
MASGADSKGDDLSTAILKQKNRPNRLIVDEAINEDNSVVSLSQPKMDELQLFRGDTVLLKGKKRREAVCIVLSDDTCSDEKIRMNRVVRNNLRVRLGDVISIQPCPDVKYGKRIHVLPIDDTVEGITGNLFEVYLKPYFLEAYRPIRKGDIFLVRGGMRAVEFKVVETDPSPYCIVAPDTVIHCEGEPIKREDEEESLNEVGYDDIGGCRKQLAQIKEMVELPLRHPALFKAIGVKPPRGILLYGPPGTGKTLIARAVANETGAFFFLINGPEIMSKLAGESESNLRKAFEEAEKNAPAIIFIDELDAIAPKREKTHGEVERRIVSQLLTLMDGLKQRAHVIVMAATNRPNSIDPALRRFGRFDREVDIGIPDATGRLEILQIHTKNMKLADDVDLEQVANETHGHVGADLAALCSEAALQAIRKKMDLIDLEDETIDAEVMNSLAVTMDDFRWALSQSNPSALRETVVEVPQVTWEDIGGLEDVKRELQELVQYPVEHPDKFLKFGMTPSKGVLFYGPPGCGKTLLAKAIANECQANFISIKGPELLTMWFGESEANVREIFDKARQAAPCVLFFDELDSIAKARGGNIGDGGGAADRVINQILTEMDGMSTKKNVFIIGATNRPDIIDPAILRPGRLDQLIYIPLPDEKSRVAILKANLRKSPVAKDVDLEFLAKMTNGFSGADLTEICQRALSWPAWTLFPGGGGACPGEGPGVRPQPAPFSSLNSSATV

SEQ ID NO: 84253 - protein, 106 aa, Homo sapiens
MDGGDDGNLIIKKRFVSEAELDERRKRRQEEWEKVRKPEDPEECPEEVYDPRSLYERLQEQKDRKQQEYEEQFKFKNMVRGLDEDETNFLDEVSRQQELIEKQRRE

SEQ ID NO: 84254 - protein, 288 aa, Homo sapiens
MPGRSCVALVLLAAAVSCAVAQHAPPWTEDCRKSTYPPSGPTYRGAVPWYTINLDLPPYKRWHELMLDKAPVLKVIVNSLKNMINTFVPSGKIMQVVDEKLPGLLGNFPGPFEEEMKGIAAVTDIPLGILEWILGKKDVMWIGFLTRTVLENSTSYEEAKNLLTKTKILAPAYFILGGNQSGEGCVITRDRKESLDVYELDAKQGRWYVVQTNYDRWKHPFFLDDRRTPAKMCLNRTSQENISFETMYDVLSTKPVLNKLTVYTTLIDVTKGQFETYLRDCPDPCIGW

SEQ ID NO: 84255 - protein, 42 aa, Homo sapiens
TSAGTGSRRAMALYHTEERGQPCSQNYRLFFRKWHSYEESTK

SEQ ID NO: 84256 - protein, 155 aa, Homo sapiens
  MOD_RES (1)..(1): Any amino acid
XTFPQRFLVSDRFWVRGEGPIFFYTGNEGDVWAFANNSAFVAELAAERGALLVFAEHRYYGKSLPFGAQSTQRGHTELLTVEQALADFAELLRALRRDLGAQDAPAIAFGGSLRHGPLGVRHLPAAVRREGPDPALHVRPECLHRAGHDGLPLPH

SEQ ID NO: 84257 - protein, 108 aa, Homo sapiens
MAEDLSAATSYTEDDFYCPVCQEVLKTPVRTTACQHVFCRKCFLTAMRESGAHCPLCRGNVTRRERACPERALDLENIMRKFSGSCRCCAKQIKFYRMRHHYKSCKKY

SEQ ID NO: 84258 - protein, 63 aa, Homo sapiens
AIEEGVNHMWTVSAFQQHPRTIFVCDEDATLELRVKTVKYFKEMALSYHKLIQENYLLNSVQG

SEQ ID NO: 84259 - protein, 317 aa, Homo sapiens
MASYLYGVLFAVGLCAPIYCVSPANAPSAYPRPSSTKSTPASQVYSLNTDFAFRLYRRLVLETPSQNIFFSPARINSHVKKKTQGKVVDIIQGLDLLTAMVLVNHIFFKAKWEKPFHPEYTRKNFPFLVGEQVTVHVPMMHQKEQFAFGVDTELNCFVLQMDYKGDAVAFFVLPSKGKMRQLEQALSARTLRKWSHSLQKRWIEVFIPRFSISASYNLETILPKMGIQNVFDKNADFSGIAKRDSLQVSKATHKAVLDVSEEGTEATAATTTKFIVRSKDGPSYFTVSFNRTFLMMITNKATDGILFLGKVENPTKS

SEQ ID NO: 84260 - protein, 275 aa, Homo sapiens
  MOD_RES (1)..(1): Any amino acid
XSIISSHGSLKSSNCVVDSRFVLKITDYGLASFRSTAEPDDSHALYASMQKADVYSFGIILQEIALRSGPFYLEGLDLSPKEIVQKVRNGQRPYFRPSIDRTQLNEELVLLMERCWAQDPAERPDFGQIKGFIRRFNKEGGTSILDNLLLRMEQYANNLEKLVEERTQAYLEEKRKAEALLYQILPHSVAEQLKRGETVQAEAFDSVTIYFSDIVGFTALSAESTPMQVVTLLNDLYTCFDAIIDNFDVYKVETIGDAYMVVSGLPGRNGQRHAP

SEQ ID NO: 84261 - protein, 29 aa, Homo sapiens
MAQQGQQGQMASGDSNLNFRFPQMLWSVV

SEQ ID NO: 84262 - protein, 250 aa, Homo sapiens
MSPAPRPPRCLLLPLLTLGTALASLGSAQSSSFSPEAWLQQYGYLPPGDLRTHTQRSPQSLSAAIAAMQKFYGLQVTGKADADTMKAMRRPRCGVPDKFGAEIKANVRRKRYAIQGLKWQHNEITFCIQNYTPKVGEYATYEAIRKAFRVWESATPLRFREVPYAYIREGHEKQADIMIFFAEGFHGDSTPFDGEGGFLAHAYFPGPNIGGDTHFDSAEPWTVRNEDLNGLPGIGVLLPSTLSPPPRGAC

SEQ ID NO: 84263 - protein, 62 aa, Homo sapiens
MYCLQWLLPVLLIPKPLNPALWFSHSMFMGFYLLSFLLERKPCTICALVFLAALFLICYSCW

SEQ ID NO: 84264 - protein, 1251 aa, Homo sapiens
MKLKEVDRTAMQAWSPAQNHPIYLATGTSAQQLDATFSTNASLEIFELDLSDPSLDMKSCATFSSSHRYHKLIWGPYKMDSKGDVSGVLIAGGENGNIILYDPSKIIAGDKEVVIAQNDKHTGPVRALDVNIFQTNLVASGANESEIYIWDLNNFATPMTPGAKTQPPEDISCIAWNRQVQHILASASPSGRATVWDLRKNEPIIKVSDHSNRMHCSGLAWHPDVATQMVLASEDDRLPVIQMWDLRFASSPLRVLENHARGILAIAWSMADPELLLSCGKDAKILCSNPNTGEVLYELPTNTQWCFDIQWCPRNPAVLSAASFDGRISVYSIMGGSTDGLRQKQVDKLSSSFGNLDPFGTGQPLPPLQIPQQTAQHSIVLPLKKPPKWIRRPVGASFSFGGKLVTFENVRMPSHQGAEQQQQQHHVFISQVVTEKEFLSRSDQLQQAVQSQGFINYCQKKIDASQTEFEKNVWSFLKVNFEDDSRGKYLELLGYRKEDLGKKIALALNKVDGANVALKDSDQVAQSDGEESPAAEEQLLGEHIKEEKEESEFLPSSGGTFNISVSGDIDGLITQALLTGNFESAVDLCLHDNRMADAIILAIAGGQELLARTQKKYFAKSQSKITRLITAVVMKNWKEIVESCDLKNWREALAAVLTYAKPDEFSALCDLLGTRLENEGDSLLQTQACLCYICAGNVEKLVACWTKAQDGSHPLSLQDLIEKVVILRKAVQLTQAMDTSTVGVLLAAKMSQYANLLAAQGSIAAALAFLPDNTNQPNIMQLRDRLCRAQGEPVAGHESPKIPYEKQQLPKGRPGPVAGHHQMPRVQTQQYYPHVRIAPTVTTWSNKTPTALPSHPPAASPSDTQGENPPPPGFIMHGNVNPNAAGQLPTSPGHMHTQVPPYPQPQPYQPAQPYPFGTGGSAMYRPQQPVAPPTSNAYPNTPYISSASSYTGQSQLYAAQHQASSPTSSPATSFPPPPSSGASFQHGGPGAPPSSSAYALPPGTTGTLPAASELPASQRTGPQNGWNDPPALNRVPKKKKMPENFMPPVPITSPIMNPLGDPQSQMLQQQPSAPVPLSSQSSFPQPHLPGGQPFHGVQQPLGQTGMPPSFSKPNIEGAPGAPIGNTFQHVQSLPTKKITKKPIPDEHLILKTTFEDLIQRCLSSATDPQTKRKLDDASKRLEFLYDKLREQTLSPTITSGLHNIARSIETRNYSEGLTMHTHIVSTSNFSETSAFMPVLKVVLTQANKLGV

SEQ ID NO: 84265 - protein, 208 aa, Homo sapiens
INGELTSADRETAEEVSARIVQVVTAEAVAVLKGEQEKEAQHKDQTAALPLAAEETANLPPSPPPSPASEQTVTVEEAAGGESALAPSVFKQAKDKVSGVHVQACYKGILRDAENSTLSKIPALQGSTKSPRYSSACPSTTKRATFSDSLLIQPTSAGSTDRLPYSKSGNKDGVTKSPEKRSSLPRPSSILPPRRGVSGDRDENSFSL

SEQ ID NO: 84266 - protein, 210 aa, Homo sapiens
  MOD_RES (1)..(1): Any amino acid
XSGFSLKSCALSNLACIRDIFPNTVFADSNIDSVMAPDAFVCGRICTHHPGCLFFTFFSQEWPKESQRNLCLLKTSESGLPSTRIKKSKALSGFSLQSCRHSIPVFCHSSFYHDTDFLGEELDIVAAKSHEACQKLCTNAVRCQFFTYTPAQASCNEGKGKCYLKLSSNGSPTKILHGRGGISGYTLRLCKMDNELRGAPMKISGWLKTS

SEQ ID NO: 84267 - protein, 197 aa, Homo sapiens
MSYSDESRLSNLLRRITREDDRDRRLATVKQLKEFIQQPENKLVLVKQLDNILAAVHDVLNESSKLLQELRQEGACCLGLLCASLSYEAEKIFKWIFSKFSSSAKDEVKLLYLCATYKALETVGEKKAFSSVMQLVMTSLQSILENVDTPELLCKCVKCILLVARCYPHIFSTNFRVSSSFRFSDHGVRGMVVCVRI

SEQ ID NO: 84268 - protein, 94 aa, Homo sapiens
MAEGAAGREDPAPPDAAGGEDDPRVGPDAAGDCVTAASGGRMRDRRSGVALPGAAGTPADSEAGLLEAARATPRRSSIIKMGLCSCRKTAQSFH

SEQ ID NO: 84269 - protein, 388 aa, Homo sapiens
IGTYLNYECRPGYSGRPFSIICLKNSVWTSAKDKCKRKSCRNPPDPVNGMAHVIKDIQFRSQIKYSCPKGYRLIGSSSATCIISGNTVIWDNKTPVCDRIICGLPPTIANGDFTSISREYFHYGSVVTYHCNLGSRGKKVFELVGEPSIYCTSKDDQVGIWSGPAPQCIIPNKCTPPNVENGILVSDNRSLFSLNEVVEFRCQPGFGMKGPSHVKCQALNKWEPELPSCSRVCQPPPDVLHAERTQRDKDNFSPGQEVFYSCEPGYDLRGSTYLHCTPQGDWSPAAPRCEVKSCDDFLGQLPNGHVLFPLNLQLGAKVDFVCDEGFQLKGSSASYCVLAGMESLWNSSVPVCERKSCETPPVPVNGMVHVITDIHVGSRINYSCTTGF

SEQ ID NO: 84270 - protein, 52 aa, Homo sapiens
MLGNYEEVKEFLSTKSHTHRLDASENRLGKPKYPLIPDKGSSIPSSSFHTSV

SEQ ID NO: 84271 - protein, 8 aa, Homo sapiens
MSNPSAPP

SEQ ID NO: 84272 - protein, 162 aa, Homo sapiens
NFNIYKRIFTDMVSSPGTNCAEAYHSWADLRDVLFNLCENLVKSSEANSPAHEEFKTMLLIAHYYATRSAAQSVKQLETVAARLSVSLLRHTQLLPVDKAFYEAGIAAKAVGWDNMAFIFLNRFLDLTDAIEEGTLDGLDHSDFQDTDIPFEVPLPAKQHVP

SEQ ID NO: 84273 - protein, 150 aa, Homo sapiens
MGTENTPGGKASPDPQDVRPSVFHNIKLFVLCHSLLQLAQLMISGYLKSSISTVEKRFGLSSQTSGLLASFNEVGNTALIVFVSYFGSRVHRPRMIGYGAILVALAGLLMTLPHFISEPYRYDNTSPEDMPQDFKASLCLPTTSAPASAP

SEQ ID NO: 84274 - protein, 501 aa, Homo sapiens
MSPEKKNQTDVKQEEKNKDNIGFHHLGKRINQELSSKENIVQERKKDLSLSEASENKGSSKSQNYFTNRQRLNKEYSISNKENTHNGLRMSIYPKSTGNKGFEDGDDAISKLHDQEEYGAALIRNNMQHIMGPVTAIKLLGEENKENTPRNVLNIIPASMNYAKAHSKDKKKPQRDSQAQKSPVKSKSTHRIQHNIDYLKHLSKVKKIPSDFEGSGYTDLQERGDNDISPFSGDGQPFKDIPGKGEATGPDLEGKDIQTGFAGPSEAESTHLDTKKPGYNEIPEREENGGNTIGTRDETAKEADAVDVSLVEGSNDIMGSTNFKELPGREGNRVDAGSQNAHQGKVEFHYPPAPSKEKRKEGSSDAAESTNYNEIPKNGKGSTRKGVDHSNRNQATLNEKQRFPSKGKSQGLPIPSRGLDNEIKNEMDSFNGPSHENIITHGRKYHYVPHRQNNSTRNKGMPQGKGSWGRQPHSNRRFSSRRRDDSSESSDSGSSSESDGD

SEQ ID NO: 84275 - protein, 46 aa, Homo sapiens
MPLTTQQCGADPQRGRPREVCSGMEAAAAASCYGRHLPGTPLPTGH

SEQ ID NO: 84276 - protein, 163 aa, Homo sapiens
MAPQSLPSSRMAPLGMLLGLLMAACFTFCLSHQNLKEFALTNPEKSSTKETERKETKAEEELDAEVLEVFHPTHEWQALQPGQAVPAGSHVRLNLQTGEREAKLQYEDKFRNNLKGKRLDINTNTYTSQDLKSALAKFKEGAEMESSKEDKARQAEVKRLFRP

SEQ ID NO: 84277 - protein, 882 aa, Homo sapiens
MAAVGSGGYARNDAGEKLPSVMAGVPARRGQSSPPPAPPICLRRRTRLSTASEETVQNRVSLEKVLGITAQNSSGLTCDPGTGHVAYLAGCVVVILDPKENKQQHIFNTARKSLSALAFSPDGKYIVTGENGHRPAVRIWDVEEKNQVAEMLGHKYGVACVAFSPNMKHIVSMGYQHDMVLNVWDWKKDIVVASNKVSCRVIALSFSEDSSYFVTVGNRHVRFWFLEVSTETKVTSTVPLVGRSGILGELHNNIFCGVACGRGRMAGSTFCVSYSGLLCQFNEKRVLEKWINLKVSLSSCLCVSQELIFCGCTDGIVRIFQAHSLHYLANLPKPHYLGVDVAQGLEPRKAEAVYPDTVALTFDPIHQWLSCVYKDHSIYIWDVKDINRVGKVWSELFHSSYVWNVEVYPEFEDQRACLPSGSFLTCSSDNTIRFWNLDSSPDSHWQKNIFSNTLLKVVYVENDIQHLQDMSHFPDRGSENGTPMDVKAGVRVMQVSPDGQHLASGDRSGNLRIHELHFMDELVKVEAHDAEVLCLEYSKPETGLTLLASASRDRLIHVLNVEKNYNLEQTLDDHSSSITAIKFAGNRDIQMISCGADKSIYFRSAQQGSDGLHFVRTHHVAEKTTLYDMDIDITQKYVAVACQDRNVRVYNTVNGKQKKCYKGSQGDEGSLLKVHVDPSGTFLATSCSDKSISVIDFYSGECIAKMFGHSEIITSMKFTYDCHHLITVSGDSCVFIWHLGPEITNCMKQHLLEIDHRQQQQHTNDKKRSGHPRQDTYVSTPSEIHSLSPGEQTEDDLEEECEPEEMLKTPSKDSLDPDPRCLLTNGKLPLWAKRLGTMMWQMAWPSTPSAATSPTAAGQSGPAKSPSRPSWMPRTWIATLPP

SEQ ID NO: 84278 - protein, 177 aa, Homo sapiens
MGGTEVPRGSFVLGVQLKAVDGEAILSLCVDSGLSDTSPDEGLIEDLTIEDKAVEQLAEGLLSHYLPDLQRSKQALQELTQNQVVLLDTLEQEISKFKECHSMLDINALFAEAKHYHAKLVNIRKEMLMLHEKTSKLKKRALKLQQKRQKEELEREQQREKEFEREKQLTARPAKRM

SEQ ID NO: 84279 - protein, 113 aa, Homo sapiens
  MOD_RES (1)..(1): Any amino acid
XGSEQKFLIGLGKSQIYTWDGRQSDRWIKLDLKTELPRDTLLSVEIVHELKGEGKAQRKISAIHILDVLVLNGTDVREQHFNQRSDLGPRVGRVGVGQGSLGGQRPPEVWPLI

SEQ ID NO: 84280 - protein, 153 aa, Homo sapiens
MRRQQGIVHSSSLSLEDGLGRRGSRPERRRLQQGQISSAACGYGFTLLSSKTADVTKVWGMGLNKDSQLGFHRSRKDKTRGYEYVLEPSPVSLPLDRPQETRVLQVSCGRAHSLVLTDREGVFSMGNNSYGQCGRKVVENEIYSESHRVHRMQ

SEQ ID NO: 84281 - protein, 67 aa, Homo sapiens
MAEAASPHLSLPSGLLELCALLGAPRDSLRSLEQRSCPFSCLLLSVKRTVKWPVPTAALSVKPGCAP

SEQ ID NO: 84282 - protein, 701 aa, Homo sapiens
MAENSESLGTVPEHERILQEIESTDTACVGPTLRSVYDDQPNAHKKFMEKLDACIRNHDKEIEKMCNFHHQGFVDAITELLKVRTDAEKLKVQVTDTNRRFQDAGKEVIVHTEDIIRCRIQQRNITTVVEKLQLCLPVLEMYSKLKEQMSAKRYYSALKTMEQLENVYFPWVSQYRFCQLMIENLPKLREDIKEISMSDLKDFLESIRKHSDKIGETAMKQAQHQKTFSVSLQKQNKMKFGKNMYINRDRIPEERNETVLKHSLEEEDENEEEGDEETFENYYRKQRKKQARLVLQPQSNMGYGFPVNRLFDLLFEIRDQYNETLLKKWAGVFRDIFEEDNYSPIPVVNEEEYKIVISKFPFQDPDLEKQSFPKKFPMSQSVPHIYIQVKEFIYASLKFSESLHRSSTEIDDMLRKSTNLLLTRTLSSCLLNLIRKPHIGLTELVQIIINTTHLEQACKYLEDFITNITNISQETVHTTRLYGLSTFKDARHAAEGEIYTKLNQKIDEFVQLADYDWTMSEPDGRASGYLMDLINFLRSIFQVFTHLPGKVAQTACMSACQHLSTSLMQMLLDSELKQISMGAVQQFNLDVIQCELFASSEPVPGFQGDTLQLAFIDLRQLLDLFMVWDWSTYLADYGQPASKYLRVNPNTALTLLEKMKDTSKKNNIFAQFRKNDRDKQKLIETVVKQLRSLVNGMSQHM

SEQ ID NO: 84283 - protein, 383 aa, Homo sapiens
MILLQHAVLPPPKQPSPSPPMSVATRSTGTLQLPPQKPFGQEASLPLAGEEELSKGGEQDCALEELCKPLYCKLCNVTLNSAQQAQAHYQGKNHGKKLRNYYAANSCPPPARMSNVVEPAATPVVPVPPQMGSFKPGGRVILATENDYCKLCDASFSSPAVAQAHYQGKNHAKRLRLAEAQSNSFSESSELGQRRARKEGNEFKMMPNRRNMYTVQNNSGPYFNPRSRQRIPRDLAMCVTPSGQFYCSMCNVGAGEEMEFRQHLESKQHKSKDTEMLSALRCHCWGMEGFCVSNSRLFFLPFGASFSDMKLKPDLKGQWCSGKRVDVGIRPKLNLRPSSYRRCHHESLLQPLDTVSSLLESIKENGKRDSRHTKRINMELKAM

SEQ ID NO: 84284 - protein, 73 aa, Homo sapiens
MFVSDFRKEFYEVVQSQRVLLFVASDVDALCACKILQALGSGTFQKAWKLNRHFSPMFYFGNLQNSQNGLVPV

SEQ ID NO: 84285 - protein, 70 aa, Homo sapiens
  MOD_RES (1)..(1): Any amino acid
XRKPIVLKRIVAHAVEVPAVQSPRRSPRAAGPALASRGCWGQKTCPESRQWCAPNSPRSPGFVQSPGPQT

SEQ ID NO: 84286 - protein, 110 aa, Homo sapiens
MPGPRVWGKYLWRSPHSKGCPGAISHSSVRIQASSVVSKAPLWAGPLVRGSFQPISEASRGSEAINAPGDNPAKVQNHCQEPYYQAAAAGCGSYADPITDQPSVRFSPQL

SEQ ID NO: 84287 - protein, 64 aa, Homo sapiens
MSKSKVDNQFYSVEVGDSTFTVLKRYQNLKPIGSGAQGIVCAAYDAVLDRNVAIKKLSRPFQNQ

SEQ ID NO: 84288 - protein, 1695 aa, Homo sapiens
  MOD_RES (1)..(1): Any amino acid
XELSDYEERIEELENLLQQGGSGVIETDLSKIYEMQKTIQVLQIEKVESTKKMEQLEDKIKDINKKLSSAENDRDILRREQEQLNVEKRQIMEECENLKLECSKLQPSAVKQSDTMTEKERILAQSASVEEVFRLQQALSDAENEIMRLSSLNQEELQMSLLKLNNEYEVIKSTATRDISLDSELHDLRLNLEAKEQELNQSISEKETLIAEIEELDRQNQEATKHMILIKDQLSKQQNEGDSIISKLKQDLNDEKKRVHQLEDDKMDITKELDVQKEKLIQSEVALNDLHLTKQKLEDKVENLVDQLNKSQESNVSIQKENLELKEHIRQNEEELSRIRNELMQSLNQDSNSNFKDTLLKEREAEVRNLKQNLSELEQLNENLKKVAFDVKMENEKLVLACEDVRHQLEECLAGNNQLSLEKNTIVETLKMEKGEIEAELCWAKKRLLEEANKYEKTIEELSNARNLNTSALQLEHEHLIKLNQKKDMEIAELKKNIEQMDTDHKETKDVLSSSLEEQKQLTQLINKKEIFIEKLKERSSKLQEELDKYSQALRKNEILRQTIEEKDRSLGSMKEENNHLQEELERLREEQSRTAPVADPKTLDSVTELASEVSQLNTIKEHLEEEIKHHQKIIEDQNQSKMQLLQSLQEQKKEMDEFRYQHEQMNATHTQLFLEKDEEIKSLQKTIEQIKTQLHEERQDIQTDNSDIFQETKVQSLNIENGSEKHDLSKAETERLVKGIKERELEIKLLNEKNISLTKQIDQLSKDEVGKLTQIIQQKDLEIQALHARISSTSHTQDVVYLQQQLQAYAMEREKVFAVLNEKTRENSHLKTEYHKMMDIVAAKEAALIKLQDENKKLSTRFESSGQDMFRETIQNLSRIIREKDIEIDALSQKCQTLLAVLQTSSTGNEAGGVNSNQFEELLQERDKLKQQVKKMEEWKQQVMTTVQNMQHESAQLQEELHQLQAQVLVDSDNNSKLQVDYTGLIQSYEQNETKLKNFGQELAQVQHSIGQLCNTKDLLLGKLDIISPQLSSASLLTPQSAECLRASKSEVLSESSELLQQELEELRKSLQEKDATIRTLQENNHRLSDSIAATSELERKEHEQTDSEIKQLKEKQDVLQKLLKEKDLLIKAKSDQLLSSNENFTNKVNENELLRQAVTNLKERILILEMDIGKLKGENEKIVETYRGKETEYQALQETNMKFSMMLREKEFECHSMKEKALAFEQLLKEKEQGKTGELNQLLNAVKSMQEKTVVFQQERDQVMLALKQKQMENTALQNEVQRLRDKEFRSNQELERLRNHLLESEDSYTREALAAEDREAKLRKKVTVLEEKLVSSSNAMENASHQASVQVESLQEQLNVVSKQRDETALQLSVSQEQVKQYALSLANLQMVLEHFQQEEKAMYSAELEKQKQLIAEWKKNAENLEGKVISLQECLDEANAALDSASRLTEQLDVKEEQIEELKRQNELRQEMLDDVQKKLMSLANSSEGKVDKVLMRNLFIGHFHTPKNQRHEVLRLMGSILGVRREEMEQLFHDDQGGVTRWMTGWLGGGSKSVPNTPLRPNQQSVVNSSFSELFVKFLETESHPSIPPPKLSVHDMKPLDSPGRRKRDTNAPESFKDTAESRSGRRTDVNPFLAPRSAAVPLINPAGLGPGGPGHLLLKPISDVLPTFTPLPALPDNSAGVVLKDLLKQ

SEQ ID NO: 84289 - protein, 118 aa, Homo sapiens
MYGKIIFVLLLSEIVSISALSTTEVAMHTSTSSSVTKSYISSQTNGERVQLAHHFSEPEITLIIFGVMAGVIGTILLISYGIRRLIKKSPSDVKPLPSPDTDVPLSSVEIENPETSDQ

SEQ ID NO: 84290 - protein, 84 aa, Homo sapiens
EICENPRFIIDGANRTDICQGELDGRTGALWTKMRRPVCSTRSLRMESSGCPMRISSTISQSWRSATSRPMLCSLTSFRPGQCL

SEQ ID NO: 84291 - protein, 564 aa, Homo sapiens
  MOD_RES (1)..(1): Any amino acid
XEIYSENSVSIREYGTIDDVDIDLHINISFLDEEVSTAWKVLRTEPIVLRLRFSLSQYLDGPEPSIEVFQPSNKEGFGLGLQLKKILGMFTSQQWKHLSNDFLKTQQEKRHSWFKASGTIKKFRAGLSIFSPIPKSPSFPIIQDSMLKGKLGVPELRVGRLMNRSISCTMKNPKVEVFGYPPSPQVSGHCKNIPTLEYGFLVQIMKYAEQRIPTLNEYCVVCDEQHVFQNGSMLKPAVCTRELCVFSFYTLGVMSGAAEEVATGAEVVDLLVAMCRAALESPRKSIIFEPYPSVVDPTDPKTLAFNPKKKNYERLQKALDSVMSIREMTQGSYLEIKKQMDKLDPLAHPLLQWIISSNRSHIVKLPLSRQLKFMHTSHQFLLLSSPPAKEARFRTAKKLYGSTFAFHGSHIENWHSILRNGLVNASYTKLQLHGAAYGKGIYLSPISSISFGYSGMGKGQHRMPSKDELVQRYNRMNTIPQTRSIQSRFLQSRNLNCIALCEVITSKDLQKHGNIWVCPVSDHVCTRFFFVYEDGQVGDANINTQDPKIQKEIMRVIGTQVYTN

SEQ ID NO: 84292 - protein, 150 aa, Homo sapiens
MSSAMLVTCLPDPSSSFREDAPRPPVPGEEGETPPCQPGVGKGQVTKPMPVSSNTRRNEDGLGEPEGRASPDSPLTRWTKSLHSLLGDQDGAYLFRTFLEREKCVDTLDFWFACNGFRQMNLKDTKTLRVAKAIYKRYIENNSIVSKQLK

SEQ ID NO: 84293 - protein, 103 aa, Homo sapiens
  MOD_RES (1)..(1): Any amino acid
XTTGEPATPKRRKAEPEALQSLRRSTRHSANCDRLSESSASPQPKRRQQDTSASMPKLFLHLEKTSPAVLTPSGVLLSIILLELPKVIPVPFCLSVGGIVPGA

SEQ ID NO: 84294 - protein, 518 aa, Homo sapiens
MWLKVGGLLRGTGGQLGQTVGWPCGALGPGPHRWGPCGGSWAQKFYQDGPGRGLGEEDIRRAREARPRKTPRPQLSDRSRERKVPASRISRLANFGEGGSGLDSSPFLSEANAERIVQTLCTVRGAALKVGQMLSIQDNSFISPQLQHIFERVRQSADFMPRWQMLRVLEEELGRDWQAKVASLEEVPFAAASIGQVHQGLLRDGTEVAVKIQYPGIAQSIQSDVQNLLAVLKMSAALPAGLFAEQSLQALQQELAWECDYRREAACAQNFRQLLANDPFFRVPAVVKELCTTRVLGMELAGGVPLDQCQGLSQDLRNQICFQLLTLCLRELFEFRFMQTDPNWANFLYDASSHQVTLLDFGASREFGTEFTDHYIEVVKAAADGDRDCVLQKSRDLKFLTGFETKAFSDAHVEAVMILGEPFATQGPYDFGSGETARRIQDLIPVLLRHRLCPPPEETYALHRKLAGAFLACAHLRAHIACRDLFQDTYHRYWASRQPDAATAGSLPTKGDSWVDPS

SEQ ID NO: 84295 - protein, 68 aa, Homo sapiens
MFPLKDAEMGAFTFFASALPHDVCGSNGLPLTPNSIKILGRFQILKTITHPRLCQYVDISRGKHERLV

SEQ ID NO: 84296 - protein, 460 aa, Homo sapiens
MLRTCYVLCSQAGPPSRGWQSLSFDGGAFHLKGTGELTRALLVLRLCAWPPLVTHGLLLQAWSRRLLGSRLSGAFLRASVYGQFVAGETAEEVKGCVQQLRTLSLRPLLAVPTEEEPDSAAKSGEAWYEGNLGAMLRCVDLSRGLLEPPSLAEASLMQLKVTALTSTRLCKELASWVRRPGASLELSPERLAEAMDSGQNLQVSCLNAEQNQHLRASLSRLHRVAQYARAQHVRLLVDAEYTSLNPALSLLVAALAVRWNSPGEGGPWVWNTYQACLKDTFERLGRDAEAAHRAGLAFGVKLVRGAYLDKERAVAQLHGMEDPTQPDYEATSQSYSRCLELMLTHVARHGPMCHLMVASHNEESVRQATKRMWELGIPLDGTVCFGQLLGMCDHVSLALGQAGYVVYKSIPYGSLEEVIPYLIRRAQENRSVLQGARREQELLSQELWRRLLPGCRRIPH

SEQ ID NO: 84297 - protein, 730 aa, Homo sapiens
MNNSSSETRGHPHSASSPSERVFPMPLPRKAPLNIPGTPVLEDFPQNDDEKERLQRRRSRVFDLQFSTDSPRLLASPSSRSIDISATIPKFTNTQITEHYSTCIKLSTENKITTKNAFGLHLIDFMSEILKQKDTEPTNFKVAAGTLDASTKIYAVRVDAVHADVYRVLGGLGKDAPSLEEVEGHVADGSATEMGTTKKAVKPKKKHLHRTIEQNINNLNVSEADRKCEIDPMFQKTAASFDECSTAGVFLSTLHCQDYRSELLFPSDVQTLSTGEPLELPELGCVEMTDLKAPLQQCAEDRQICPSLAGFQFTQWDSETHNESVSALVDKFKKNDQVFDINAEVDESDCGDFPDGSLGDDFDANDEPDHTAVGDHEEFRSWKEPCQVQSCQEEMISLGDGDIRTMCPLLSMKPGEYSYFSPRTMSMWAGPDHWRFRPRRKQDAPSQSENKKKSTKKDFEIDFEDDIDFDVYFRKTKAATILTKSTLENQNWRATTLPTDFNYNVDTLVQLHLKPGTRLLKMAQGHRVETEHYEEIEDYDYNNPNDTSNFCPGLQAADSDDEDLDDLFVGPVGNSDLSPYPCHPPKTAQQNGDTPEAQGLDITTYGESNLVAEPQKVNKIEIHYAKTAKKMDMKKLKQSMWSLLTALSGKEADAEANHREAGKEAALAEVADEKMLSGLTKDLQRSLPPVMAQNLSIPLAFACLLHLANEKNLKLEGTEDLSDVLVRQGD

SEQ ID NO: 84298 - protein, 169 aa, Homo sapiens
MPKRSCPFADVAPLQLKVRVSQRELSRGVCAERYSQEVFEKTKRLLFLGAQAYLDHVWDEGCAVVHLPESPKPGPTGAPRAARGQMLIGPDGRLIRSLGQASEADPSGVASIACSSCVRAVDGKAVCGQCERALCGQCVRTCWGCGSVACTLCGLVEGYSPGGWEWTVW

SEQ ID NO: 84299 - protein, 372 aa, Homo sapiens
MQGPAGNASRGLPGGPPSTVASGAGRCESGALMHSFGIFLQGLLGVVAFSTLMLKRFREPKHERRPWRIWFLDTSKQAIGMLFIHFANVYLADLTEEDPCSLYLINFLLDATVGMLLIYVGVRAVSVLVEWQQWESLRFGEYGDPLQCGAWVGQCALYIVIMIFEKSVVFIVLLILQWKKVALLNPIENPDLKLAIVMLIVPFFVNALMFWVVDNFLMRKGKTKAKLEERGANQDSRNGSKVRYRRAASHEESESEILISADDEMEESDVEEDLRRLTPLKPVKKKKHRFGLPAGAQEAPIKKKRPPVKDEDLKGARGNLTKNQEIKSKTYQVMRECEQAGSAAPSVFSRTRTGTETVFEKPKAGPTKSVFG

SEQ ID NO: 84300 - protein, 114 aa, Homo sapiens
MADDKVAILTDDEEEQKRKYVLADPFNGISREPEPPSNETPSSTETSAIPEEEIDWIEKHCVKINNDLLISKVFYFFFYSAYGSLYPLLPVYYKQLGMSPSQSGLLVGIRYFIE

SEQ ID NO: 84301 - protein, 282 aa, Homo sapiens
MLLLAPQMLNLLLLALPVLASRAYAAPAPGQALQRVGIVGGQEAPRSKWPWQVSLRVHGPYWMHFCGGSLIHPQWVLTAAHCVGPDVKDLAALRVQLREQHLYYQDQLLPVSRIIVHPQFYTAQIGADIALLELEEPVNVSSHVHTVTLPPASETFPPGMPCWVTGWGDVDNDERLPPPFPLKQVKVPIMENHICDAKYHLGAYTGDDVRIVRDDMLCAGNTRRDSCQGDSGGPLVCKVNGTWLQAGVVSWGEGCAQPNRPGIYTRVTYYLDWIHHYVPKKP

SEQ ID NO: 84302 - protein, 96 aa, Homo sapiens
  MOD_RES (1)..(1): Any amino acid
XTILCDKFSGHPKGFAYIEFSDKESVRTSLALDESLFRGRQIKVIPKRTNRPGISTTDRGFPRARYRARTTNYNSSRSRFYSGFNSRPRGRVYRSG

SEQ ID NO: 84303 - protein, 91 aa, Homo sapiens
MKQPIMADGPRCKRRKQANPRRKNVVNYDNVVDTGSETDEEDKLHIAEDDGIANPLDQETSPASVPNHESSPHVSQALLPREEEEDEIREG

SEQ ID NO: 84304 - protein, 132 aa, Homo sapiens
MAGAGGGNDIQWCFSQVKGAVDDDVAEADIISTVEFNHSGELLATGDKGGRVVIFQQEQENKIQSHSRGEYNVYSTFQSHEPEFDYLKSLEIEEKINKIRWLPQKNAAQFLLSTNVQAGFSDSLPKNRIWQG

SEQ ID NO: 84305 - protein, 119 aa, Homo sapiens
MENSSIIACYNELIQIEHGEVRSQFKLRACNSVFTALDHCHEAIEITSDDHVIQYVNPAFERMMGYHKGELLGKELADLPKSDKNRADLLDTINTCIKKGKEWQGVYYARRKSGDSIQQ

SEQ ID NO: 84306 - protein, 43 aa, Homo sapiens
MLRQDSIQSAELKKKESPFRAKCHEIFCCPLKQVHHKENTEPE

SEQ ID NO: 84307 - protein, 76 aa, Homo sapiens
MRSLGQNPTEAELQDMINEVDADGNGTIDFPEFLTMMARKMKDTDSEEEIREAFRVFDKCSRTTSRHDKLRRKTNR

SEQ ID NO: 84308 - protein, 250 aa, Homo sapiens
MHHQQQQQQIKRSARMCGECEACRRTEDCGHCDFCRDMKKFGGPNKIRQKCRLRQCQLRARESYKYFPSSLSPVTPSESLPRPRRPLPTQQQPQPSQKLGRIREDEGAVASSTVKEPPEATATPEPLSDEDLPLDPDLYQDFCAGAFDDHGLPWMSDTEESPFLDPALRKRAVKVKHVKRREKKSEKKVMERKEERYKRHRQKQKHKDKWKHPERADAKDPASLPQCLGPGCVRPAQPSSKYCSDDCGMK

SEQ ID NO: 84309 - protein, 267 aa, Homo sapiens
MDLSHGGPRDGPPGGLLGEQIQPPSHHFSPEQRALLYEDALYTVLHRLGHPEPNHVTEASELLRYLQEAFHVEPEEHQQTLQRVRELEKPIFCLKATVKQAKGILGKDVSGFSDPYCLLGIEQGVGVPGGSPGSRHRQKAVVRHTIPEEETHRTQVITQTLNPVWDETFILEFEDITNASFHLDMWDLDTVESVRQKLGELTDLHGLRRIFKEARKDKGQDDFLGNVVLRLQDLRCREDQWYPLEPRTETYPDRGQCHLQFQLIHKR

SEQ ID NO: 84310 - protein, 187 aa, Homo sapiens
IKQLGKTKEMDVYGITDKQPSLELLAFPAYLLGINQDRLKEKLTSRQMDSKWGGKSESIHVTLNVEQACYTRDALAKALHARVFDFLVDSINKAMEKDHEEYNIGVLDIYGFEIFQKNGFEQFCINFVNEKLQQIFIELTLKAEQEEYVQEGIRWTPIEYFNNKIVCDLIENKVNPPGIMSILDDVC

SEQ ID NO: 84311 - protein, 105 aa, Homo sapiens
MRSRKLTGAVRSSARLKARSCSAARLASAQEVAGSTSAKTACLRAMESCWPIAVQPHRQRLEEKGRVGGERNLMPSAVHPSPAIDSEERVPELTGEVEPLHGAYS

SEQ ID NO: 84312 - protein, 415 aa, Homo sapiens
MGRAPRAGRLPGIRRWPPRRKKKDLDVPEMPSIPNPFPELCCSPFTSVLSADLFPKANSRKKQVIKVYSEDETSRALDVPSDITARDVCQLLILKNHYIDDHSWTLFEHLPHIGVERTIEDHELVIEVLSNWGIEEENKLYFRKNYAKYEFFKNPMYFFPEHMVSFATETNGEISPTQILQMFLSSSTYPEIHGFLHAKEQGKKSWKKIYFFLRRSGLYFSTKGTSKEPRHLQFFSEFGNSDIYVSLAGKKKHGAPTNYGFCFKPNKAGGPRDLKMLCAEEEQSRTCWVTAIRLLKYGMQLYQNYMHPYQGRSGCSSQSISPMRSISENSLVAMDFSGQKSRVIENPTEALSVAVEEGLAWRKKGCLRLGTHGSPTASSQSSATNMAIHRSQPWFHHKISRDEAQRLIIQQGLVD

SEQ ID NO: 84313 - protein, 112 aa, Homo sapiens
  MOD_RES (1)..(1): Any amino acid
XAYFERAADFIDQALAQKNDGVSLLLPRLKSNGAILAHRNLHLPGRVLVHCREGYSRSPTLVIAYLMMRQKMDVKSALSIVRQNREIGPNDGFLAQLCQLNDRLAKEGKLKP

SEQ ID NO: 84314 - protein, 134 aa, Homo sapiens
MAKLSKLASNGTPMGTFAPLWEVFRVSSDKLALCHLELTRKLQDLIKDVLRYGEEQLKTHKKCKEEVVSTLDAVQVLSGVSQLLPKSRENYLNRCMDQERLRRESTSQKEMDKAETKTKKAAESLRRSVEKYNS

SEQ ID NO: 84315 - protein, 162 aa, Homo sapiens
MEHHTDWVNDIVLCCNGKTLISASSDTTVKVWNAHKGFCMSTLRTHKDYVKALAYAKDKELVASAGLDRQIFLWDVNTLTALTASNNTVTTSSLSGNKDSIYSLAMNQLGTIIVSGSTEKVLRVWDPRTCAKLMKLKGHTDNVKALLLNRDGTQCLSGSSDG

SEQ ID NO: 84316 - protein, 47 aa, Homo sapiens
MLEPNLSVHSQKSTQNSKQGIFQLWNCPLNEGSTIEKREFKKSSVET

SEQ ID NO: 84317 - protein, 158 aa, Homo sapiens
MTMFENVTRALARQLNPRGDLTPLDSLIDFKRFHPFCLVLRKRKSTLFWGARYVRTDYTLLDVLEPGSSPSDPTDTGNFGFKNMLDTRVEGDVDVPKTVKVKGTAGLSQNSTLEVQTLSVAPKALETVQERKLAADHPFLKEMQDQGENLYVVMEVVE

SEQ ID NO: 84318 - protein, 282 aa, Homo sapiens
MATHGQTCARPMCIPPSYADLGKAARDIFNKGFGFGLVKLDVKTKSCSGVEFSTSGSSNTDTGKVTGTLETKYKWCEYGLTFTEKWNTDNTLGTEIAIEDQICQGLKLTFDTTFSPNTGKKSGKIKSSYKRECINLGCDVDFDFAGPAIHGSAVFGYEGWLAGYQMTFDSAKSKLTRNNFAVGYRTGDFQLHTNVNDGTEFGGSIYQKVCEDLDTSVNLAWTSGTNCTRFGIAAKYQLDPTASISAKVNNSSLIGVGYTQTLRPGVKLTLSALVDGKSINAG

SEQ ID NO: 84319 - protein, 253 aa, Homo sapiens
  MOD_RES (1)..(1): Any amino acid
XKYVTLCDNGVLTYHPSLHDYMQNVHGKEIDLLRTTVKVPGKRPPRATSACAPISSPKTNGLSKDMSSLHISPNSGNVTSASGSQMASGISLVSFNSRPDGMHQRSYSVSSADQWSEATVIANSAISSDTGLGDSVCSSPSISSTTSPKLDPPPSPHANRKKHRRKKSTSNFKADGLSGTAEAKRKAWKLNRVGSLRNIYSSSTNTEEQEENFEFIIVSLTGQTWHFEATTYEERDAWVQAIESQILASLQSC

SEQ ID NO: 84320 - protein, 177 aa, Homo sapiens
MSTLRSGRKKQPASPDGRTSPINEDIRSSGRNSPSAASTSSNDSKAETVKKSAKKVKEEASSPLKSNKRQREKVASDTEEADRTSSKKTKTQEISRPNSPSEGSAGPVHPLVDPLTAGPHLARFPYPPGTLPNPLLGQPPHEHEMLRHPVFGTPYPRDLPGAIPPPMSAAHQLQAMH

SEQ ID NO: 84321 - protein, 105 aa, Homo sapiens
MAQEKMKLGFKSLPSSTTADGNILRRVNSAPLINGLGFNSQVLQADMLRIRTNRTTFRNRRSLLLPPPPFHGSISRLHQIKQSPSDAERKLDCTAAISAHCNLPA

SEQ ID NO: 84322 - protein, 40 aa, Homo sapiens
MDAILNYRSEDTEDYYTLLGCDELSSMEFHSCCLGWSAMA

SEQ ID NO: 84323 - protein, 133 aa, Homo sapiens
MGGFAIWCKKAKAPRPVPKPRGLSRDMQGLSLDAASQPSKGGLLERTASRLGSRASTLRRNDSIYEASSLYGISAMDGVPFTLHPRFEGKSCSPLAFSAFGDLTIKSLADIEEEYNYGFVVEKTAAARLPPSV

SEQ ID NO: 84324 - protein, 888 aa, Homo sapiens
MLTHRPQEAEQRGRTPGPSFEWNVLAKALYDNVAESPDELSFRKGDIMTVLEQDTQGLDGWWLCSLHGRQGIVPGNRLKILVGMYDKKPAGPGPGPPATPAQPQPGLHAPAPPASQYTPMLPNTYQPQPDSVYLVPTPSKAQQGLYQVPGPSPQFQSPPAKQTSTFSKQTPHHPFPSPATDLYQVPPGPGGPAQDIYQVPPSAGMGHDIYQVPPSMDTRSWEGTKPPAKVVVPTRVGQGYVYEAAQPEQDEYDIPRHLLAPGPQDIYDVPPVRGLLPSQYGQEVYDTPPMAVKGPNGRDPLLEVYDVPPSVEKGLPPSNHHAVYDVPPSVSKDVPDGPLLREETYDVPPAFAKAKPFDPARTPLVLAAPPPDSPPAEDVYDVPPPAPDLYDVPPGLRRPGPGTLYDVPRERVLPPEVADGGVVDSGVYAVPPPAEREAPAEGKRLSASSTGSTRSSQSASSLEVAGPGREPLELEVAVEALARLQQGVSATVAHLLDLAGSAGATGSWRSPSEPQEPLVQDLQAAVAAVQSAVHELLEFARSAVGNAAHTSDRALHAKLSRQLQKMEDVHQTLVAHGQALDAGRGSSGATLEDLDRLVACSRAVPEDAKQLASFLHGNASLLFRRTKATAPGPEGGGTLHPNPTDKTSSIQSRPLPSPPKFTSQDSPDGQYENSEGGWMEDYDYVHLQGKEEFEKTQKELLEKGSITRQGKSQLELQQLKQFERLEQEVSRPIDHDLANWTPAQPLAPGRTGGLGPSDRQLLLFYLEQCEANLTTLTNAVDAFFTAVATNQPPKIFVAHSKFVILSAHKLVFIGDTLSRQAKAADVRSQVTHYSNLLCDLLRGIVATTKAAALQYPSPSAAQDMVERVKELGHSTQQFRRVLGQLAAA

SEQ ID NO: 84325 - protein, 103 aa, Homo sapiens
MAAHLVKRCTCLLREAARQAPAMAPVGRLRLAWVAHKTLTSSATSPISHLPGSLMEPVEKERASTPYIEKQVDHLIKKATRPEELLELLGGSHDLDSNQAAMV

SEQ ID NO: 84326 - protein, 41 aa, Homo sapiens
MASGQARPPFEEESPQPSTTVRSPEVVVDDEVPGPSGEPLG

SEQ ID NO: 84327 - protein, 34 aa, Homo sapiens
MGSSGLGKAATLDELLCTCIEMFDDNGELDNSYL

SEQ ID NO: 84328 - protein, 655 aa, Homo sapiens
MMEELHSLDPRRQELLEARFTGVGVSKGPLNSESSNQSLCSVGSLSDKEVETPEKKQNDQRNRKRKAEPYETSQGKGTPRGHKISDYFERRVEQPLYGLDGSAAKEATEEQSALPTLMSVMLAKPRLDTEQLAQRGAGLCFTFVSANCDLRRQIDEQQKMLEKYKERLNRCVTMSKKLLIEKSKQEKMACRDKSMQDRLRLGHFTTVRHGASFTEQWTDGYAFQNLIKQQERINSQREEIERQRKMLAKRKPPAMGQAPPATNEQKQRKSKTNGAENETLTLAEYHEQEEIFKLRLGHLKKEEAEIQAELERLERVRNLHIRELKRIHNEDNSQFKDHPTLNDRYLLLHLLGRGGFSEVYKAFDLTEQRYVAVKIHQLNKNWRDEKKENYHKHACREYRIHKELDHPRIVKLYDYFSLDTDSFCTVLEYCEGNDLDFYLKQHKLMSEKEARSIIMQIVNALKYLNEIKPPIIHYDLKPGNILLVNGTACGEIKITDFGLSKIMDDDSYNSVDGMELTSQGAGTYWYLPPECFVVGKEPPKISNKVDVWSVGVIFYQCLYGRKPFGHNQSQQDILQENTILKATEVQFPPKPVVTPEAKAFIRRCLAYRKEDRIDVQQLACDPYLLPHIRKSVSTSSPAGAAIASTSGASNNSSSN

SEQ ID NO: 84329 - protein, 140 aa, Homo sapiens
MVAEESGPGAQNSPYQLRRKTLLPKRTACPTKNSMEGASTSTTENFGHRAKRARVSGKSQDLSAAPAEQYLQEKLPDEVVLKIFSYLLEQDLCRAACVCKRFSELANDPILWKRLYMEVFEYTRPMMHPEPGKFYQINPE

SEQ ID NO: 84330 - protein, 2019 aa, Homo sapiens
MGAMTQLLAGVFLAFLALATEGGVLKKVIRHKRQSGVNATLPEENQPVVFNHVYNIKLPVGSQCSVDLESASGEKDLAPPSEPSESFQEHTVDGENQIVFTHRINIPRRACGCAAAPDVKELLSRLEELENLVSSLREQCTAGAGCCLQPATGRLDTRPFCSGRGNFSTEGCGCVCEPGWKGPNCSEPECPGNCHLRGRCIDGQCICDDGFTGEDCSQLACPSDCNDQGKCVNGVCICFEGYAGADCSREICPVPCSEEHGTCVDGLCVCHDGFAGDDCNKPLCLNNCYNRGRCVENECVCDEGFTGEDCSELICPNDCFDRGRCINGTCYCEEGFTGEDCGKPTCPHACHTQGRCEEGQCVCDEGFAGVDCSEKRCPADCHNRGRCVDGRCECDDGFTGADCGELKCPNGCSGHGRCVNGQCVCDEGYTGEDCSQLRCPNDCHSRGRCVEGKCVCEQGFKGYDCSDMSCPNDCHQHGRCVNGMCVCDDGYTGEDCRDRQCPRDCSNRGLCVDGQCVCEDGFTGPDCAELSCPNDCHGQGRCVNGQCVCHEGFMGKDCKEQRCPSDCHGQGRCVDGQCICHEGFTGLDCGQHSCPSDCNNLGQCVSGRCICNEGYSGEDCSEVSPPKDLVVTEVTEETVNLAWDNEMRVTEYLVVYTPTHEGGLEMQFRVPGDQTSTIIQELEPGVEYFIRVFAILENKKSIPVSARVATYLPAPEGLKFKSIKETSVEVEWDPLDIAFETWEIIFRNMNKEDEGEITKSLRRPETSYRQTGLAPGQEYEISLHIVKNNTRGPGLKRVTTTRLDAPSQIEVKDVTDTTALITWFKPLAEIDGIELTYGIKDVPGDRTTIDLTEDENQYSIGNLKPDTEYEVSLISRRGDMSSNPAKETFTTGLDAPRNLRRVSQTDNSITLEWRNGKAAIDSYRIKYAPISGGDHAEVDVPKSQQATTKTTLTGLRPGTEYGIGVSAVKEDKESNPATINAATELDTPKDLQVSETAETSLTLLWKTPLAKFDRYRLNYSLPTGQWVGVQLPRNTTSYVLRGLEPGQEYNVLLTAEKGRHKSKPARVKASTEQAPELENLTVTEVGWDGLRLNWTAADQAYEHFIIQVQEANKVEAARNLTVPGSLRAVDIPGLKAATPYTVSIYGVIQGYRTPVLSAEASTGETPNLGEVVVAEVGWDALKLNWTAPEGAYEYFFIQVQEADTVEAAQNLTVPGGLRSTDLPGLKAATHYTITIRGVTQDFSTTPLSVEVLTEDLPQLGDLAVSEVGWDGLRLNWTAADNAYEHFVIQVQEVNKVEAAQNLTLPGSLRAVDIPGLEAATPYRVSIYGVIRGYRTPVLSAEASTAKEPEIGNLNVSDITPESFNLSWMATDGIFETFTIEIIDSNRLLETVEYNISGAERTAHISGLPPSTDFIVYLSGLAPSIRTKTISATATTEAEPEVDNLLVSDATPDGFRLSWTADEGVFDNFVLKIRDTKKQSEPLEITLLAPERTRDITGLREATEYEIELYGISKGRRSQTVSAIATTAMGSPKEVIFSDITENSATVSWRAPTAQVESFRITYVPITGGTPSMVTVDGTKTQTRLVKLIPGVEYLVSIIAMKGFEESEPVSGSFTTALDGPSGLVTANITDSEALARWQPAIATVDSYVISYTGEKVPEITRTVSGNTVEYALTDLEPATEYTLRIFAEKGPQKSSTITAKFTTDLDSPRDLTATEVQSETALLTWRPPRASVTGYLLVYESVDGTVKEVIVGPDTTSYSLADLSPSTHYTAKIQALNGPLRSNMIQTIFTTIGLLYPFPKDCSQAMLNGDTTSGLYTIYLNGDKAEALEVFCDMTSDGGGWIVFLRRKNGRENFYQNWKAYAAGFGDRREEFWLGLDNLNKITAQGQYELRVDLRDHGETAFAVYDKFSVGDAKTRYKLKVEGYSGTAGDSMAYHNGRSFSTFDKDTDSAITNCALSYKGAFWYRNCHRVNLMGRYGDNNHSQGVNWFHWKGHEHSIQFAEMKLRPSNFRNLEGRRKRA

SEQ ID NO: 84331 - protein, 178 aa, Homo sapiens
MKPLSLLIEILIILGVTIKTIKAEEHNKRQKERNVTTQVSVNEIKQYLSHILEQRTSSNVINKRENLLEKKKNQRKIRIKGIQNKDILKRNKNHLQKQAEKNFTDEGDQLFKMGIKVLQQSKSQKQKEEILMPTWMFLCLRSFLPGLLCSSFCPRAAYFSLSMDGLYIKSLPTFCQSS

SEQ ID NO: 84332 - protein, 514 aa, Homo sapiens
MYTPNAQYCQMRCTFHPRCLLFSFLPASSINDMEKRFGCFLKDSVTGTLPKVHRTGAVSGHSLKQCGHQISACHRDIYKGVDMRGVNFNVSKVSSVEECQKRCTSNIRCQFFSYATQTFHKAEYRNNCLLKYSPGGTPTAIKVLSNVESGFSLKPCALSEIGCHMNIFQHLAFSDVDVARVLTPDAFVCRTICTYHPNCLFFTFYTNVWKIESQRNVCLLKTSESGTPSSSTPQENTISGYSLLTCKRTLPEPCHSKIYPGVDFGGEELNVTFVKGVNVCQETCTKMIRCQFFTYSLLPEDCKEEKCKCFLRLSMDGSPTRIAYGTQGSSGYSLRLCNTGDNSVCTTKTSTRIVGGTNSSWGEWPWQVSLQVKLTAQRHLCGGSLIGHQWVLTAAHCFDGLPLQDVWRIYSGILNLSDITKDTPFSQIKEIIIHQNYKVSEGNHDIALIKLQAPLNYTEFQKPICLPSKGDTSTIYTNCWVTGWGFSKEKGRFRWSLSLQTQWNVAFGGHHQLG

SEQ ID NO: 84333 - protein, 150 aa, Homo sapiens
MRENVVVSNMERESGKPVAVVAVVTEPWFTQRYREYLQRQKLFDTQHRVEKMPDGSVALPVLGETLPEQHLQELRNRVAPGSPCMLTQLPDPVPSKRAQGCSPAQKLCLEQVHGKPWKTQILHIQPVKSYAPHVDHIVLDLECCPCPSVG

SEQ ID NO: 84334 - protein, 44 aa, Homo sapiens
MGIKVLQQSKSQKQKEEAYLLFAKAADMGNLKAMEKMADALLFG

SEQ ID NO: 84335 - protein, 304 aa, Homo sapiens
MVMEKPSPLLVGREFVRQYYTLLNQAPDMLHRFYGKNSSYVHGGLDSNGKPADAVYGQKEIHRKVMSQNFTNCHTKIRHVDAHATLNDGVVVQVMGLLSNNNQALRRFMQTFVLAPEGSVANKFYVHNDIFRYQDEVFGGFVTEPQEESEEEVEEPEERQQTPEVVPDDSGTFYDQAVVSNDMEEHLEEPVAEPEPDPEPEPEQEPVSEIQEEKPEPVLEETAPEDAQKSSSPAPADIAQTVQEDLRTFSWASVTSKNLPPSGAVPVTGIPPHVVKVPASQSLSLNLRFHHKDLSGIKECENNE

SEQ ID NO: 84336 - protein, 18 aa, Homo sapiens
EAKGDFSSSELCCKYYLF

SEQ ID NO: 84337 - protein, 53 aa, Homo sapiens
  MOD_RES (1)..(1): Any amino acid
XDGSITASLTESKSAHVQTQTGQNSIPALAQLPLVTCQLTRSELLLLLCHREW

SEQ ID NO: 84338 - protein, 257 aa, Homo sapiens
  MOD_RES (1)..(1): Any amino acid
XSITCKARIRRENIVVYDVCATIDQCPTRIEETSPIVLRYKTPYFKASARVVMPPIPRHETWVVGWIQACNQMEFFNTYSDLGMSSWELPDLREGRVKAISDSDGVSYPWYGNTTETVTLVGPTNKISRFSVSMNDNFYPSVTWAVPVSDSNVPLLTRIKRDQSFTTWLVAMNTTTKEKIILQTIKWRMRVDIEVDPLQLLGQRARLVGRTQQEQPRILSRMEPIPPNALVKPNANDAQVLMWRPKRGPPLVVIPPK

SEQ ID NO: 84339 - protein, 67 aa, Homo sapiens
MLTQAAVRLVRGSLRKTSWAEWGHRELRLGQLAPFTAPHKDKSFSDQRSTSVSCHETRRQEGECSNH

SEQ ID NO: 84340 - protein, 120 aa, Homo sapiens
MVNPTVFFDIAVDGEPLGRVSFELFADKVPKTAENFRALSTGEKGFGYKGSCFHRIIPGFMCQGGDFTRHNGTGGKSIYGEKFEDENFILKHTGPGILSMANAGPNTNGSQFFICTAKTE

SEQ ID NO: 84341 - protein, 184 aa, Homo sapiens
MTLFHFGNCFALAYFPYFITYKCSGLSEYNAFWKCVQAGVTYLFVQLCKMLFLATFFPTWEGGIYDFIGEFMKASVDVADLIGLNLVMSRNAGKGEYKIMVAALGWATAELIMSRCIPLWVGARGIEFDWKYIQMSIDSNISLVHYIVASAQVWMITRYDLYHTFRPAVLLLMFLSVYKAFVME

SEQ ID NO: 84342 - protein, 115 aa, Homo sapiens
MVLLESEQFLTELTRLFQKCRTSGSVYITLKKYDGRTKPIPKKGTVEGFEPADNKCLLRATDGKKKISTVVSSKEVNKFQMVSFGCSLCFPSQGKSQYDSEHWVRLILGFTALRR

SEQ ID NO: 84343 - protein, 139 aa, Homo sapiens
RVSPQASVVLEHREIADDPLQEPGAQQGIPDTTSELAGQRDHLPHSADQGTWADSLAVELDFLLDSQIQDALDASDFEAPPEQLFPSGNKPGPCWPGPSSHANGDPVAVAKAQPRGRLCPCLLPSLPVTCTCCATGHLP

SEQ ID NO: 84344 - protein, 33 aa, Homo sapiens
MGKKGKVGKSRRDKFYHLAKETGYRSRSAFKLI

SEQ ID NO: 84345 - protein, 310 aa, Homo sapiens
GWKCFVYHFAVFLIVLVCLIFSVLSTIEQYAALATGTLFWMVTVTTIGYGDKVPQTWVGKTIASCFSVFAISFFALPATAWRCYAAENPDSSTWKIYIRKAPRSHTLLSPSPKPKKSVVVKKKKFKLDKDNGVTPGEKMLTVPHITCDPPEERRLDHFSVDGYDSSVRKSPTLLEVSMPHFMRTNSFAEDLDLEGETLLTPITHISQLREHHRATIKVIRRMQYFVAKKKFQQARKPYDVRDVIEQYSQGHLNLMVRIKELQRRLDQSIGKPSLFISVSEKSKDRGSNTIGARLNRVEDKSTKKRPSPGS

SEQ ID NO: 84346 - protein, 174 aa, Homo sapiens
MADEAPRKGSFSALVGRTNGLTKPAALAAAPAKPGGAGGSKKLVIKNFRDRPRLPDNYTQDTWRKLHEAVRAVQSSTSIRYNLEELYQAVENLCSHKVSPMLYKQLRQACEDHVQAQILPFREDSLDSVLFLKKINTCWQDHCRQMIMIRSIFLFLDRTYVLQNSTLPSICQNH

SEQ ID NO: 84347 - protein, 73 aa, Homo sapiens
MPILKQLVSSSVHSKRRSRADLTAEMISAPLGDFRHTMHVGRAGDAFGDTSFLNSKAGEPDGESLDEQPSSSS

SEQ ID NO: 84348 - protein, 488 aa, Homo sapiens
MGRARPGQRGPPSPGPAAQPPAPPRRRARSLALLGALLAAAAAAAVRVCARHAEAQAAARQELALKTLGTDGLFLFSSLDTDGDMYISPEEFKPIAEKLTGSTPAASCEEEELPPDPSEETLTIEARFQPLLPETMTKSKDGFLGVSRLALSGLRNWTAAASPSAVFATRHFQPFLPPPGQELGEPWWIIPSELSMFTGYLSNNRFYPPPPKGKEVIIHRLLSMFHPRPFVKTRFAPQGAVACLTAISDFYYTVMFRIHAEFQLSEPPDFPFWFSPAQFTGHIILSKDATHVRDFRLFVPNHRSLNVDMEWLYGASESSNMEVDIGYIPQMELEATGPSVPSVILDEDGSMIDSHLPSGEPLQFVFEEIKWQQELSWEEAARRLEVAMYPFKKVSYLPFTEAFDRAKAENKLVHSILLWGALDDQSCCGRGTACVKALGHRAFIGFKKLSLSASPQGQVQGGLSGRLSWKVRPSSPCSTRASSAPGPW

SEQ ID NO: 84349 - protein, 562 aa, Homo sapiens
MTVLEITLAVILTLLGLAILAILLTRWARRKQSEMHISRYSSEQSARLLDYEDGRGSRHAYSTQSDTSCDNRERSKRDYTPSTNSLALSRSSIALPQGSMSSIKCLQTTEELPSRTAGAMMQFTAPIPGATGPIKLSQKTIVQTPGPIVQYPGPNVRSHPHTITGPPSAPRGPPMAPIIISQRTASQLAAPIRIPQVHTMDSSGKITLTPVVILTGYMDEELAKKPCSKIQILKCGGTARSQNSREENKEALKNDIIFTNSVESLKSAHIKEPEREGKGTDLEKDKIGMEVKVDSDAGIPKRQETQLKISEMSIPQGQGAQIKKSVSDVPRGQESQVKKSESGVPKGQEAQVTKSGLVVLKGQEAQVEKSEMGVPRRQESQVKKSQSGVSKGQEAQVKKRESVVLKGQEAQVEKSELKVPKGQEGQVEKTEADVPKEQEVQEKKSEAGVLKGPESQVKNTEVSVPETLESQVKKSESGVLKGQEAQEKKESFEDKGNNDKEKERDAEKDPNKKEKGDKNTKGDKGKDKVKGKRESEINGEKSKGSKRAKANTGRKYNKKVEE

SEQ ID NO: 84350 - protein, 91 aa, Homo sapiens
MSDQALEALSASLGTRQAEPELDLRSIKEVDEDKDGKPLLPEPEEKPKPRSESELIDELSEDFDRSECKEKPSKPTEKTEESKAAAPAPVS

SEQ ID NO: 84351 - protein, 388 aa, Homo sapiens
MSGCGLFLRTTAAARACRGLVVSTANRRLLRTSPPVRAFAKELFLGKIKKKEVFPFPEVSQDELNEINQFLGPVEKFFTEEVDSRKIDQEGKIPDETLEKLKSLGLFGLQVPEEYGGLGFSNTMYSRLGEIISMDGSITVTLAAHQAIGLKGIILAGTEEQKAKYLPKLASGEHIAAFCLTEPASGSDAASIRSRATLSEDKKHYILNGSKVWITNGGLANIFTVFAKTEVVDSDGSVKDKITAFIVERDFGGVTNGKPEDKLGIRGSNTCEVHFENTKIPVENILGEVGDGFKVAMNILNSGRFSMGSVVAGLLKRLIEMTAEYACTRKQFNKRLSEFGLIQEKFALMAQKAYVMESMTYLTAGMLDQPGFPDCSIEAAMVKMLQKT

SEQ ID NO: 84352 - protein, 89 aa, Homo sapiens
MESQNLADFPRPVHHRIPNFKGSYLACQNIKDLDVFARTQEVKVDPDKPLEGVRLLVLQSKKTLLVPTPRLRTGLFNKITPPPGATKDI

SEQ ID NO: 84353 - protein, 94 aa, Homo sapiens
MPRSFLVKKIKGDGFQCSGVPAPTYHPLETAYVLPGARGPPGDNDGVQKVSATGGRQSRNSWLPPSSPVFSSWQGGPRQRAPHRCPLDQRGPGR

SEQ ID NO: 84354 - protein, 106 aa, Homo sapiens
MVDSTEYEVASQPEVETSPLGDGASPGPEQVKLKKEISLLNGVCLIVGNMIGSGIFVSPKGVLIYSASFGLSLVIWAVGGLFSVFGALCYAELGTTIKKSGASYAY

SEQ ID NO: 84355 - protein, 341 aa, Homo sapiens
  MOD_RES (1)..(1): Any amino acid
XGMPPGIPPLMPGVPPLMPGMPPVMPGMPPGLHHQRKYTQSFCGENIMMPMGGMMPPGPGIPPLMPGMPPGMPPPVPRPGIPPMTQAQAVSAPGILNRPPAPTATVPAPQPPVTKPLFPSAGQMGTPVTSSSTASSNSESLSASSKALFPSTAQAQAAVQGPVGTDFKPLNSTPATTTEPPKPTFPAYTQSTASTTSTTNSTAAKPAASITSKPATLTTTSATSKLIHPDEDISLEERRAQLPKYQRNLPRPGQAPIGNPPVGPIGGMMPPQPGIPQQQGMRPPMPPHGQYGGHHQGMPGYLPGAMPPYGQGPPMVPPYQGGPPRPPMGMRPPVMSQGGRY

SEQ ID NO: 84356 - protein, 680 aa, Homo sapiens
MKMHSTESLLKKIERETWRESGVSLIATVTRLMERLLDYRDCMKMGEVDGKKIGCTVSLLNFYKTELNKEEMYIRYIHKLYDLHLKAQNFTEAAYTLLLYDELLEWSDRPLREFLTYPMQTEWQRKEHLHLTIIQNFDRGKCWENGIILCRKIAEQYESYYDYRNLSKMRMMEASLYDKIMDQQRLEPEFFRVGFYGKKFPFFLRNKEFVCRGHDYERLEAFQQRMLNEFPHAIAMQHANQPDETIFQAEAQYLQIYAVTPIPESQEVLQREGVPDNIKSFYKVNHIWKFRYDRPFHKGTKDKENEFKSLWVERTSLYLVQSLPGISRWFEVEKREVVEMSPLENAIEVLENKNQQLKTLISQCQTRQMQNINPLTMCLNGVIDAAVNGGVSRYQEAFFVKEYILSHPEDGEKIARLRELMLEQAQILEFGLAVHEKFVPQDMRPLHKKLVDQFFVMKSSLGIQEFSACMQASPVHFPNGSPRVCRNSAPASVSPDGTRVIPRRSPLSYPAVNRYSSSSLSSQASAEVSNITGQSESSDEVFNMQPSPSTSSLSSTHSASPNVTSSAPSSARASPLLSDKHKHSRENSCLSPRERPCSAIYPTPVEPSQRMLFNHIGDGALPRSDPNLSAPEKGLCAVFHPLSSGVPLARTHLQLPCLVGQLQQWDFFSQPVQHVGNLRL

SEQ ID NO: 84357 - protein, 524 aa, Homo sapiens
PHVFLLFITFPILFIGWGSQSSKVHIHHSTWLHFPGHNLRWILTFMLLFVLVCEIAEGILSDGVTESHHLHLYMPAGMAFMAAVTSVVYYHNIETSNFPKLLIALLVYWTLAFITKTIKFVKFLDHAIGFSQLRFCLTGLLVILYGMLLLVEVNVIRVRRYIFFKTPREVKPPEDLQDLGVRFLQPFVNLLSKGTYWWMNAFIKTAHKKPIDLRAIGKLPIAMRALTNYQRLCEAFDAQVRKDIQGTQGARAIWQALSHAFGRRLVLSSTFRILADLLGFAGPLCIFGIVDHLGKENDVFQPKTQFLGVYFVSSQEFLANAYVLAVLLFLALLLQRTFLQASYYVAIETGINLRGAIQTKIYNKIMHLSTSNLSMGEMTAGQICNLVAIDTNQLMWFFFLCPNLWAMPVQIIVGVILLYYILGVSALIGAAVIILLAPVQYFVATKLSQAQRSTLEYSNERLKQTNEMLRGIKLLKLYAWENIFRTRVETTRRKEMTSLRAFAIYTSISIFMNTAIPIAAVLIC

SEQ ID NO: 84358 - protein, 3915 aa, Homo sapiens
MTTMLQKSDSNASFLRAARAGNLDKVVEYLKGGIDINTCNQNGLNALHLAAKEGHVGLVQELLGRGSSVDSATKKGNTALHIASLAGQAEVVKVLVKEGANINAQSQNGFTPLYMAAQENHIDVVKYLLENGANQSTATEDGFTPLAVALQQGHNQAVAILLENDTKGKVRLPALHIAARKDDTKSAALLLQNDHNADVQSKMMVNRTTESGFTPLHIAAHYGNVNVATLLLNRGAAVDFTARNGITPLHVASKRGNTNMVKLLLDRGGQIDAKTRDGLTPLHCAARSGHDQVVELLLERGAPLLARTKNGLSPLHMAAQGDHVECVKHLLQHKAPVDDVTLDYLTALHVAAHCGHYRVTKLLLDKRANPNARALNGFTPLHIACKKNRIKVMELLVKYGASIQAITESGLTPIHVAAFMGHLNIVLLLLQNGASPDVTNIRGETALHMAARAGQVEVVRCLLRNGALVDARAREEQTPLHIASRLGKTEIVQLLLQHMAHPDAATTNGYTPLHISAREGQVDVASVLLEAGAAHSLATKKGFTPLHVAAKYGSLDVAKLLLQRRAAADSAGKNGLTPLHVAAHYDNQKVALLLLEKGASPHATAKNGYTPLHIAAKKNQMQIASTLLNYGAETNIVTKQGVTPLHLASQEGHTDMVTLLLDKGANIHMSTKSGLTSLHLAAQEDKVNVADILTKHGADQDAHTKLGYTPLIVACHYGNVKMVNFLLKQGANVNAKTKNGYTPLHQAAQQGHTHIINVLLQHGAKPNATTANGNTALAIAKRLGYISVVDTLKVVTEEVTTTTTTITEKHKLNVPETMTEVLDVSDEEGDDTMTGDGGEYLRPEDLKELGDDSLPSSQFLDGMNYLRYSLEGGRSDSLRSFSSDRSHTLSHASYLRDSAVMDDSVVIPSHQVSTLAKEAERNSYRLSWGTENLDNVALSSSPIHSGRASPCLERDNSSFLVSFMVDARGGAMRGCRHNGLRIIIPPRKCTAPTRVTCRLVKRHRLATMPPMVEGEGLASRLIEVGPSGAQFLGPVIVEIPHFAALRGKERELVVLRSENGDSWKEHFCDYTEDELNEILNGMDEVLDSPEDLEKKRICRIITRDFPQYFAVVSRIKQDSNLIGPEGGVLSSTVVPQVQAVFPEGALTKRIRVGLQAQPMHSELVKKILGNKATFSPIVTLEPRRRKFHKPITMTIPVPKASSDVMLNGFGGDAPTLRLLCSITGGTTPAQWEDITGTTPLTFVNECVSFTTNVSARFWLIDCRQIQESVTFASQVYREIICVPYMAKFVVFAKSHDPIEARLRCFCMTDDKVDKTLEQQENFAEVARSRDVEVLEGKPIYVDCFGNLVPLTKSGQHHIFSFFAFKENRLPLFVKVRDTTQEPCGRLSFMKEPKSTRGLVHQAICNLNITLPIYTKESESDQEQEEEIDMTSEKNDETESTETSVLKSHLVNEVPVLASPDLLSEVSEMKQDLIKMTAILTTDVSDKAGSIKVKELVKAAEEEPGEPFEIVERVKEDLEKVNEILRSGTCTRDESSVQSSRSERGLVEEEWVIVSDEEIEEARQKAPLEITEYPCVEVRIDKEIKGKVEKDSTGLVNYLTDDLNTCVPLPKEQLQTVQDKAGKKCEALAVGRSSEKEGKDIPPDETQSTQKQHKPSLGIKKPVRRKLKEKQKQKEEGLQASAEKAELKKGSSEESLGEDPGLAPEPLPTVKATSPLIEETPIGSIKDKVKALQKRVEDEQKGRSKLPIRVKGKEDVPKKTTHRPHPAASPSLKSERHAPGSPSPKTERHSTLSSSAKTERHPPVSPSSKTEKHSPVSPSAKTERHSPASSSSKTEKHSPVSPSTKTERHSPVSSTKTERHPPVSPSGKTDKRPPVSPSGRTEKHPPVSPGRTEKRLPVSPSGRTDKHQPVSTAGKTEKHLPVSPSGKTEKQPPVSPTSKTERIEETMSVRELMKAFQSGQDPSKHKTGLFEHKSAKQKQPQEKGKVRVEKEKGPILTQREAQKTENQTIKRGQRLPVTGTAESKRGVRVSSIGVKKEDAAGGKEKVLSHKIPEPVQSVPEEESHRESEVPKEKMADEQGDMDLQISPDRKTSTDFSEVIKQELEDNDKYQQFRLSEETEKAQLHLDQVLTSPFNTTFPLDYMKDEFLPALSLQSGALDGSSESLKNEGVAGSPCGSLMEGTPQISSEESYKHEGLAETPETSPESLSFSPKKSEEQTGETKESTKTETTTEIRSEKEHPTTKDITGGSEERGATVTEDSETSTESFQKEATLGSPKDTSPKRQDDCTGSCSVALAKETPTGLTEEAACDEGQRTFGSSAHKTQTDSEVQESTATSDETKALPLPEASVKTDTGTESKPQGVIRSPQGLELALPSRDSEVLSAVADDSLAVSHKDSLEASPVLEDNSSHKTPDSLEPSPLKESPCRDSLESSPVEPKMKAGIFPSHFPLPAAVAKTELLTEVASVRSRLLRDPDGSAEDDSLEQTSLMESSGKSPLSPDTPSSEEVSYEVTPKTTDVSTPKPAVIHECAEEDDSENGEKKRFTPEEEMFKMVTKIKMFDELEQEAKQKRDYKKEPKQEESSSSSDPDADCSVDVDEPKHTGSGEDESGVPVLVTSESRKVSSSSESEPELAQLKKGADSGLLPEPVIRVQPPSPLPSSMDSNSSPEEVQFQPVVSKQYTFKMNEDTQEEPGKSEEEKDSESHLAEDRHAVSTEAEDRSYDKLNRDTDQPKICDGHGCEAMSPSSSAAPVSSGLQSPTGDDVDEQPVIYKESLALQGTHEKDTEGEELDVSRAESPQADCPSESFSSSSSLPHCLVSEGKELDEDISATSSIQKTEVTKTDETFENLPKDCPSQDSSITTQTDRFSMDVPVSDLAENDEIYDPQITSPYENVPSQSFFSSEESKTQTDANHTTSFHSSEVYSVTITSPVEDVVVASSSSGTVLSKESNFEGQDIKMESQQESTLWEMQSDSVSSSFEPTMSATTTVVGEQISKVIITKTDVDSDSWSEIREDDEAFEARVKEEEQKIFGLMVDRQSQGTTPDTTPARTPTEEGTPTSEQNPFLFQEGKLFEMTRSGAIDMTKRSYADESFHFFQIGQESREETLSEDVKEGATGADPLPLETSAESLALSESKETVDDEADLLPDDVSEEVEEIPASDAQLNSQMGISASTETPTKEAVSVGTKDLPTVQTGDIPPLSGVKQISCPDSSEPAVQVQLDFSTLTRSVYSDRGDDSPDSSPEEQKSVIEIPTAPMENVPFTESKSKIPVRTMPTSTPAPPSAEYESSVSEDFLSSVDEENKADEAKPKSKLPVKVPLQRVEQQLSDLDTSVQKTVAPQGQDMASIAPDNRSKSESDASSLDSKTKCPVKTRSYTETETESRERAEELELESEEGATRPKILTSRLPVKSRSTTSSCRGGTSPTKESKEHFFDLYRNSIEFFEEISDEASKLVDRLTQSEREQEIVSDDESSSALEVSVIENLPPVETEHSVPEDIFDTRPIWDESIETLIERIPDENGHDHAEDPQDEQERIEERLAYIADHLGFSWTELARELDFTEEQIHQIRIENPNSLQDQSHALLKYWLERDGKHATDTNLVECLTKINRMDIVHLMETNTEPLQERISHSYAEIEQTITLDHSEGFSVLQEELCTAQHKQKEEQAVSKESETCDHPPIVSEEDISVGYSTFQDGVPKTEGDSSATALFPQTHKEQVQQDFSGKMQDLPEESSLEYQQEYFVTTPGTETSETQKAMIVPSSPSKTPEEVSTPAEEEKLYLQTPTSSERGGSPIIQEPEEPSEHREESSPRKTSLVIVESADNQPETCERLDEDAAFEKGDDMPEIPPETVTEEEYIDEHGHTVVKKVTRKIIRRYVSSEGTEKEEIMVQGMPQEPVNIEEGDGYSKVIKRVVLKSDTEQSEDNNE

SEQ ID NO: 84359 - protein, 211 aa, Homo sapiens
  MOD_RES (1)..(1): Any amino acid
XEFIQPNVISGIPIYRVMDRQGQIINPSEDPHLPKEKVLKLYKSMTLLNTMDRILYESQRQGRISFYMTNYGEEGTHVGSAAALDNTDLVFGQYREAEARPHHVAQAGLQLLGSSDPPTSASQSAGITGVLMYRDYPLELFMAQCYGNISDLGKGRQMPVHYGCKERHFVTISSPLATQIPQAVGAAYAAKRANANRVVICYFGEGAASEG

SEQ ID NO: 84360 - protein, 57 aa, Homo sapiens
MELSAEYLREKLQRDLEAEHVLPSPGGVGQVRGETAASETQAGERVPSRRAPAHPCL

SEQ ID NO: 84361 - protein, 123 aa, Homo sapiens
MEEIPAQEAAGSPRVQFQSLETQSECLSPEPQFVQDTDMEQGLTGAPPVPQVPALPREGSPGDQAAALLTARYQEFVTFEDVAVHLTREEWGYLDPVQRDLYREVMLENYGNVVSLGTVGSWD

SEQ ID NO: 84362 - protein, 40 aa, Homo sapiens
MAVLGVQLVVTLLTATLMHRLAPHCSFARWLLCNGRLPSN

SEQ ID NO: 84363 - protein, 1260 aa, Homo sapiens
MGSVTGAVLKTLLLLSTQNWNRVEAGNSYDCDDPLVSALPQASFSSSSELSSSHGPGFARLNRRDGAGGWSPLVSNKYQWLQIDLGERMEVTAVATQGGYGSSNWVTSYLLMFSDSGWNWKQYRQEDSIWGFSGNANADSVVYYRLQPSIKARFLRFIPLEWNPKGRIGMRIEVFGCAYRSEVVDLDGKSSLLYRFDQKSLSPIKDIISLKFKTMQSDGILLHREGPNGDHITLQLRRARLFLLINSGEAKLPSTSTLVNLTLGSLLDDQHWHSVLIQRLGKQVNFTVDEHRHHFHARGEFNLMNLDYEGNVSFSCSQPQSMPVTFLSSRSYLALPDFSGEEEVSATFQFRTWNKAGLLLFSELQLISGGILLFLSDGKLKSNLYQPGKLPSDITAGVELNDGQWHSVSLSAKKNHLSVAVDGQMASAAPLLGPEQIYSGGTYYFGGCPDKSFGSKCKSPLGGFQGCMRLISISGKVVDLISVQQGSLGNFSDLQIDSCGISDRCLPNYCEHGGECSQSWSTFHCNCTNTGYRGATCHNSIYEQSCEAYKHRGNTSGFYYIDSDGSGPLEPFLLYCNMTETAWTIIQHNGSDLTRVRNTNPENPYAGFFEYVASMEQLQATINRAEHCEQEFTYYCKKSRLVNKQDGTPLSWWVGRTNETQTYWGGSSPDLQKCTCGLEGNCIDSQYYCNCDADRNEWTNDTGLLAYKEHLPVTKIVITDTGRLHSEAAYKLGPLLCQGDRSFWNSASFDTEASYLHFPTFHGELSADVSFFFKTTASSGVFLENLGIADFIRIELRSPTVVTFSFDVGNGPFEISVQSPTHFNDNQWHHVRVERNMKEASLQVDQLTPKTQPAPADGHVLLQLNSQLFVGGTATRQRGFLGCIRSLQLNGMTLDLEERAQVTPEVQPGCRGHCSSYGKLCRNGGKCRERPIGFFCDCTFSAYTGPFCSNEISAYFGSGSSVIYNFQENYLLSKNSSSHAASFHGDMKLSREMIKFSFRTTRTPSLLLFVSSFYKEYLSVIIAKNGDLQIRYKLNKYQEPDVVNFDFKNMADGQLHHIMINREEGVVFIEIDDNRRRQVHLSSGTEFSAVKSLVLGRILEHSDVDQDTALAGAQGFTGCLSAVQLSHVAPLKAALHPSHPDPVTVTGHVTESSCMAQPGTDATSRERTHSFADHSGTIDDREPLANAIKSDSAVIGGLIAVVIFILLCITAIAVRIYQQKRLYKRSEAKRSENVDSAEAVLKSELNIQNAVNENQKEYFF

SEQ ID NO: 84364 - protein, 1307 aa, Homo sapiens
MLKIMQDYDWHVFSLVTTIFPGYREFISFVKTTVDNSFVGWDMQNVITLDTSFEDAKTQVQLKKIHSSVILLYCSKDEAVLILSEARSLGLTGYDFFWIVPSLVSGNTELIPKEFPSGLISVSYDDWDYSLEARVRDGIGILTTAASSMLEKFSYIPEAKASCYGQMERPEVPMHTLHPFMVNVTWDGKDLSFTEEGYQVHPRLVVIVLNKDREWEKVGKWENHTLSLRHAVWPRYKSFSDCEPDDNHLSIVTLEEAPFVIVEDIDPLTETCVRNTVPCRKFVKINNSTNEGMNVKKCCKGFCIDILKKLSRTVKFTYDLYLVTNGKHGKKVNNVWNGMIGEVVYQRAVMAVGSLTINEERSEVVDFSVPFVETGISVMVSRSNGTVSPSAFLEPFSASVWVMMFVMLLIVSAIAVFVFEYFSPVGYNRNLAKGKAPHGPSFTIGKAIWLLWGLVFNNSVPVQNPKGTTSKIMVSVWAFFAVIFLASYTANLAAFMIQEEFVDQVTGLSDKKFQRPHDYSPPFRFGTVPNGSTERNIRNNYPYMHQYMTKFNQKGVEDALVSLKTGKLDAFIYDAAVLNYKAGRDEGCKLVTIGSGYIFATTGYGIALQKGSPWKRQIDLALLQFVGDGEMEELETLWLTGICHNEKNEVMSSQLDIDNMAGVFYMLAAAMALSLITFIWEHLFYWKLRFCFTGVCSDRPGLLFSISRGIYSCIHGVHIEEKKKSPDFNLTGSQSNMLKLLRSAKNISSMSNMNSSRMDSPKRAADFIQRGSLIMDMVSDKGNLMYSDNRSFQGKESIFGDNMNELQTFVANRQKDNLNNYVFQGQHPLTLNESNPNTVEVAVSTESKANSRPRQLWKKSVDSIRQDSLSQNPVSQRDEATAENRTHSLKSPRYLPEEMAHSDISETSNRATCHREPDNSKNHKTKDNFKRSVASKYPKDCSEVERTYLKTKSSSPRDKIYTIDGEKEPGFHLDPPQFVENVTLPENVDFPDPYQDPSENFRKGDSTLPMNRNPLHNEEGLSNNDQYKLYSKHFTLKDKGSPHSETSERYRQNSTHCRSCLSNMPTYSGHFTMRSPFKCDACLRMGNLYDIDEDQMLQETGNPATGEQVYQQDWAQNNALQLQKNKLRISRQHSYDNIVDKPRELDLSRPSRSISLKDRERLLEGNFYGSLFSVPSSKLSGKKSSLFPQGLEDSKRSKSLLPDHTSDNPFLHSHRDDQRLVIGRCPSDPYKHSLPSQAVNDSYLRSSLRSTASYCSRDSRGHNDVYISEHVMPYAANKNNMYSTPRVLNSCSNRRVYKKMPSIESDV

SEQ ID NO: 84365 - protein, 351 aa, Homo sapiens
MQRAVSVVARLGFRLQAFPPALCRPLSCAQEVLRRTPLYDFHLAHGGKMVAFAGWSLPVQYRDSHTDSHLHTRQHCSLFDVSHMLQTKILGSDRVKLMESLVVGDIAELRPNQGTLSLFTNEAGGILDDLIVTNTSEGHLYVVSNAGCWEKDLALMQDKVRELQNQGRDVGLEVLDNALLALQGPTAAQVLQAGVADDLRKLPFMTSAVMEVFGVSGCRVTRCGYTGEDGVEISVPVAGAVHLATAILKNPEVKLAGLAARDSLRLEAGLCLYGNDIDEHTTPVEGSLSWTLGTVTSGCPSPSLKKNVAMGYVPCEYSRPGTMLLVEVRRKQQMAVVSKMPFVPTNYYTLK

SEQ ID NO: 84366 - protein, 82 aa, Homo sapiens
MFCTKLKDLKITGECPFSLLAPGQVPNESSEEAAGSSESCKATVPICQDIPEKNIQESLPQRKTSGDHWRCLLCSWGITQRE

SEQ ID NO: 84367 - protein, 588 aa, Homo sapiens
  MOD_RES (1)..(1): Any amino acid
XPVVSSRVSPGTRPTAMGSFSSHMTEFPRKRKGSDSDPSHQNPLTYLLSTRIEISASSGSREAHSQTEKRRRDKMNNLIEELSAMIPQCNPMARKLDKLTVLRMAVQHLRSLKGLTNSYVGSNYRPSFLQDNELRHLILKTAEGFLFVVGCERGKILFVSKSVSKILNYDQASLTGQSLFDFLHPKDVAKVKEQLSSFDISPREKLIDAKTGLQVHSNLHAGRTRVYSGSRRSFFCRIKSCKISVKEEHGCLPNSKKKEHRKFYTIHCTGYLRSWPPNIVGMEEERNSKKDNSNFTCLVAIGRLQPYIVPQNSGEINVKPTEFITRFAVNGKFVYVDQRATAILGYLPQELLGTSCYEYFHQDDHNNLTDKHKAVLQSKEKILTDSYKFRAKDGSFVTLKSQWFSFTNPWTKELEYIVSVNTLVLGHSEPGEASFLPCSSQSSEESSRQSCMSVPGMSTGTVLGAGSIGTDIANEILDLQRLQSSSYLDDSSPTGLMKDTHTVNCRSMSNKELFPPSPSEMGELEATRQNQSTVAVHSHEPLLSDGAQLDFDALCDNDDTAMAAFMNYLEAEGGLGDPGDFSDIQWTL

SEQ ID NO: 84368 - protein, 119 aa, Homo sapiens
  MOD_RES (1)..(1): Any amino acid
XREAPSRSSASSGPQILREHQPFSLQCEAVYKALKMPYRILPRQLPQKERQVATAVQWTKAEGSYGVPLWIIILAILFGLLLLGLLIYILYKLGFFKRSLPYGTAMEKAQLKPPATSDA

SEQ ID NO: 84369 - protein, 29 aa, Homo sapiens
MSTQDERQINTEYAVSLLEQLKLFYEQQL

SEQ ID NO: 84370 - protein, 124 aa, Homo sapiens
  MOD_RES (1)..(1): Any amino acid
XRPPTRPSRGEELGGAEGDTSSPDPAGRSRPRYTRDSKAYSMILLPAEEEATLGARPDKRRPLERGETELAPSFEQRVQVMLQRIGVSRGSGGAEGKRKQSKDGEIKKAGSDGLVPESPAPPCR

SEQ ID NO: 84371 - protein, 63 aa, Homo sapiens
MDLNTIKKRLENKYYAKASECIEDFNTMFSNCYLYNKPGDDIVLMAQALEKLFMQKLSQMPQE

SEQ ID NO: 84372 - protein, 532 aa, Homo sapiens
MAGPRPPGDSPAIKEDSTGLGPTHEPFSGQPNSTSGDVLLSRRGPGHAIRPPGRAMVLMQDKGSSQQWPGLGGEGGGTGPLSMLRAALLLISLPWGAQGTASTSLSTAGGHTVPPTGGRYLSIGDGSVMEFEFPEDSEGIIVISSQYPGQANRTAPGPMLRVTSLDTEVLTIKNVSAITWGGGGGFVVSIHSGLAGLAPLHIQLVDAHEAPPTLIEERRDFCIKVSPAEDTPATLSADLAHFSENPILYLLLPLIFVNKCSFGCKVELEVLKGLMQSPQPMLLGLLGQFLVMPLYAFLMAKVFMLPKALALGLIITCSSPGGGGSYLFSLLLGGDVTLAISMTFLSTVAATGFLPLSSAIYSRLLSIHETLHVPISKILGTLLFIAIPIAVGVLIKSKLPKFSQLLLQVVKPFSFVLLLGGLFLAYRMGVFILAGIRLPIVLVGITVPLVGLLVGYCLATCLKLPVAQRRTVSIEVGVQNSLLALAMLQLSLRRLQADYASQAPFIVALSGTSEMLALVIGHFIYSSLFPVP

SEQ ID NO: 84373 - protein, 272 aa, Homo sapiens
MEYCRTPCTVSCNIPVVSGKECEEIIRKGGETSEMYLIQPDSSVKPYRVYCDMNTENGGWTVIQNRQDGSVDFGRKWDPYKQGFGNVATNTDGKNYCGLPGEYWLGNDKISQLTRMGPTELLIEMEDWKGDKVKAHYGGFTVQNEANKYQISVNKYRGTAGNALMDGASQLMGENRTMTIHNGMFFSTYDRDNDGWLTSDPRKQCSKEDGGGWWYNRCHAANPNGRYYWGGQYTWDMAKHGTDDGVVWMNWKGSWYSMRKMSMKIRPFFPQQ

SEQ ID NO: 84374 - protein, 39 aa, Homo sapiens
MEDSASASLSSAAATGTSTSTPAAPTARKQLDKEQDLAS

SEQ ID NO: 84375 - protein, 890 aa, Homo sapiens
MLEDMTTGTESETKAFMAVCIETAKRYNLDDYRTPVFIFERLCSIIYPEENEVTEFFVTLEKDPQQEDFLQGRMPGNPYSSNEPGIGPLMRDIKNKICQDCDLVALLEDDSGMELLVNNKIISLDLPVAEVYKKVWCTTNEGEPMRIVYRMRGLLGDATEEFIESLDSTTDEEEDEEEVYKMAGVMAQCGGLECMLNRLAGIRDFKQGRHLLTVLLKLFSYCVKVKVNRQQLVKLEMNTLNVMLGTLNLALVAEQESKDSGGAAVAEQVLSIMEIILDESNAEPLSEDKGNLLLTGDKDQLVMLLDQINSTFVRSNPSVLQGLLRIIPYLSFGEVEKMQILVERFKPYCNFDKYDEDHSGDDKVFLDCFCKIAAGIKNNSNGHQLKDLILQKGITQNALDYMKKHIPSAKNLDADIWKKFLSRPALPFILRLLRGLAIQHPGTQVLIGTDSIPNLHKLEQVSSDEGIGTLAENLLEALREHPDVNKKIDAARRETRAEKKRMAMAMRQKALGTLGMTTNEKGQVVTKTALLKQMEELIEEPGLTCCICREGYKFQPTKVLGIYTFTKRVALEEMENKPRKQQGYSTVSHFNIVHYDCHLAAVRLARGREEWESAALQNANTKCNGLLPVWGPHVPESAFATCLARHNTYLQECTGQREPTYQLNIHDIKLLFLRFAMEQSFSADTGGGGRESNIHLIPYIIHTVLYVLNTTRATSREEKNLQGFLEQPKEKWVESAFEVDGPYYFTVLALHILPPEQWRATRVEILRRLLVTSQARAVAPGGATRLTDKAVKDYSAYRSSLLFWALVDLIYNMFKKVPTSNTEGGWSCSLAEYIRHNDMPIYEAADKALKTFQEEFMPVETFSEFLDVAGLLSEITDPESFLKDLLNSVP

SEQ ID NO: 84376 - protein, 110 aa, Homo sapiens
MLTALLAPRKSRTAKPLVEEIGASEIPEEVVDDEEFDWEIEQTPCEEVSESALNPQCHYGFGNLRSGVLQRLQDELSDVIDIKDPDFTPAAERRQKRLAAELAKFDPDHY

SEQ ID NO: 84377 - protein, 40 aa, Homo sapiens
MSRVPSPPPPAEMSSGPVAESWCYTQIKVVKFSYMWTINN

SEQ ID NO: 84378 - protein, 55 aa, Homo sapiens
MVSWMICRLVVLVFGMLCPAYASYKAVKTKNIREYVSVGVWVRWMMYWIVFALFM

SEQ ID NO: 84379 - protein, 72 aa, Homo sapiens
MEARSMLVPPQASVCFEDVAMAFTQEEWEQLDLAQRTLYREVTLETWEHIVSLAGARRGPVQGRAGGPPRNQ

SEQ ID NO: 84380 - protein, 1538 aa, Homo sapiens
MAAGSGGSGGSGGGPGPGPGGGGGPSGSGSGPGSNGGLGSGGELHPRTGRLVSLSACGRTARRQQPGQEFNHGLVLSREPLRDGRVFTVRIDRKVNSWSGSIEIGVTALDPSVLDFPSSATGLKGGSWVVSGCSVLRDGRSVLEEYGQDLDQLGEGDRVGVERTVAGELRLWVNGRDCGVAATGLPPRVWAVVDLYGKCTQITVLPPEPGFSPPTPIPTPPLEPLAPTEDSALAEQGTSADEDFANMELSEVVSNTILSAYNGGLLNVNLSSPPAGEGLGSSGAATSPILTSNDALLFHEKCGTLIKLSNNNKTAERRRPLDEFNNGVVMTNRPLRDNEMFEIRIDKLVDKWSGSIEIGVTTHNPNSLEYPATMTNLQSGTIMMSGCGILTNGKGTRREYCEFSLDELQEGDHIGLTRKSNSALHFFINGIDQGVATPLTPPVVYGVVDLYGMAVKVTIVHNNNHSDRLRRNNAILRALSPEGALRRAAPAAQAEPERLLFHPNCGQKAAITHEGRTALRPHATDDFNHGVVLSSRALRDGEVFQVRIDKMVDKWAGSIEIGVTTHNPAYLQLPSTMTNLRSGTWMMTGNGVMHNGTTILDEYGHNLDRLKAGDTVGVVRREDGTLHFFVNGMTQGPAAWNVPPGVYAVVDLYGQAAQATIVDDVEVAPVPEPLPEGNNQVSPSSPSSGAGGSDLRFHQLHGSNAVITNGGRTALRHNCRSEFNDAIVISNRALRDGELFEIVIQKMVDRWSGSIEAGVTAIRPEDLEFPNTMTDIDYDTWMLSGTAIMQDGNTMRNNYGCDLDALGTGARIGMMRTAKGDLHYFINGQDQGAACSGLPPEVYAVVDLYGQCVQVSITNATGPMDNSLATSNTATEKSFPLHSPVAGVAHRFHSTCGKNVTLEEDGTRAVRAAGYAHGLVFSTKELRAEEVFEVKVEELDEKWAGSLRLGLTTLAPGEMGPGAGGGGPGLPPSLPELRTKTTWMVSSCEVRRDGQLQRMNYGRNLERLGVGSRVGVRRGADDTMHILVDGEDMGPAATGIAKNVWAVLDLYGPVRGVSIVSSTRLEESEGTQPPSPSSDTGSEGEEDDEGEEHGLGGQNEVGIIPTTLEFLENHGKNILLSNGNRTATRVASYNQGIVVINQPLVPQLLVQVRIDFLNRQWTSSLVLGVITCAPERLNFPASACALKRAAWLLRGRGVFHNGLKICEKFGPNLDTCPEGTILGLRLDSSGGLHLHVNGVDQGVAVPDVPQPCHALVDLYGQCEQVTIVNPEPGAASGKSAGTQGDMEKADMVDGIKESVCWGPPPAASPLKSCEYHALCSRFQELLLLPEDYFMPPPKRSLCYCESCRKLRGDEAHRRRGEPPREYALPFGWCRFNLRVNPRLEAGTLTKKWHMAYHGSNVAAVRRVLDRGELGAGTASILSCRPLKGEPGVGFEEPGENCAPPREEQPPPVLLSPSLQYAGAETLASKVQFRDPKSQRTHQAQVAFQVCVRPGSYTPGPPSAALGEPPDPHFSPAELEWVTKEKGATLLCALLVRVE

SEQ ID NO: 84381 - protein, 174 aa, Homo sapiens
MRRGRQRGKDCRSENLPVFVTSSALAIIVYRLPWTWKCSKLLMKSIHAGLNAVAAILAIISVVAVFENHNVNNIANMYSLHSWVGLIAVICYLLQLLSGFSVFLLPWAPLSLRAFLMPIHVYSGIVIFGTVIATALMGLTEKLIFSLRDPAYSTFPPEGVFVNTLGLLILVFGA

SEQ ID NO: 84382 - protein, 85 aa, Homo sapiens
MVGYDPKPDGRNNTKFQVAVAGSVSGLVTRALISPFDVIKIRFQLQHERLSRSDPSAKYHGILQASRQILQEEGPTAFWKGHVPA

SEQ ID NO: 84383 - protein, 182 aa, Homo sapiens
MGATTMDQKSLWAGVVVLLLLQGGSAYKLVCYFTNWSQDRQEPGKFTPENIDPFLCSHLIYSFASIENNKVIIKDKSEVMLYQTINSLKTKNPKLKILLSIGGYLFGSKGFHPMVDSSTSRLEFINSIILFLRNHNFDGLDELAEAFQKDFTKSTKERLLLTAGVSAGRQMIDNSYQVEKLA

SEQ ID NO: 84384 - protein, 93 aa, Homo sapiens
MFVSDFRKEFYEVVQSQRVLLFVASDVDALCACKILQALFQCDHVQYTLVPVSGWQELETAFLEHKEQFHYFILINCGANVDLLDILQPDEDT

SEQ ID NO: 84385 - protein, 47 aa, Homo sapiens
MKVLEVHENLDRQLQDSCEEDLSEKEKAIVREMCNVVWRKLGDAASS

SEQ ID NO: 84386 - protein, 99 aa, Homo sapiens
MCVGEKRRAIIPSHLAYGKRGFPPSVPADAVVQYDVELIALIRANYWLKLVKGILPLVGMAMVPALLGLIGYHLYRKANRPKVSKKKLKEEKRNKSKKK

SEQ ID NO: 84387 - protein, 945 aa, Homo sapiens
MASSPELPTEDEQGSWGIDDLHISLQAEQEDTQKKAFTCWINSQLARHTSPSVISDLFTDIKKGHVLLDLLEVLSGQQLPRDKGSNTFQCRINIEHALTFLRNRSIKLINIHVTDIIDGNPSIILGLIWTIILHFHIEKLAQTLSCNYNQPSLDDVSVVDSSPASSPPAKKCSKVQARWQMSARKALLLWAQEQCATYESVNVTDFKSSWRNGMAFLAIIHALRPDLIDMKSVKHRSNKDNLREAFRIAEQELKIPRLLEPEDVDVVDPDEKSIMTYVAQFLQYSKDAPGTGEEAQGKVKDAMGWLTLQKEKLQKLLKDSENDTYFKKYNSLLSFMESFNEEKKSFLDVLSIKRDLDELDKDHLQLREAWDGLDHQINAWKIKLNYALPPPLHQTEAWLQEVEELMDEDLSASQDHSQAVTLIQEKMTLFKSLMDRFEHHSNILLTFENKDENHLPLVPPNKLEEMKRRINNILEKKFILLLEFHYYKCLVLGLVDEVKSKLDIWNIKYGSRESVELLLEDWHKFIEEKEFLARLDTSFQKCGEIYKNLAGECQNINKQYMMVKSDVCMYRKNIYNVKSTLQKVLACWATYVENLRLLRACFEETKKEEIKEVPFETLAQWNLEHATLNEAGNFLVEVSNDVVGSSISKELRRLNKRWRKLVSKTQLEMNLPLMIKKQDQPTFDNSGNILSKEEKATVEFSTDMSVELPENYNQNIKAGEKHEKENEEFTGQLKVAKDVEKLIGQVEIWEAEAKSVLDQDDVDTSMEESLKHLIAKGSMFDELMARSEDMLQMDIQNISSQESFQHVLTTGLQAKIQEAKEKVQINVVKLIAALKNLTDVSPDLDIRLKMEESQKELESYMMRAQQLLGQRESPGELISKHKEALIISNTKSLAKYLKAVEELKNNVTEDIKMSLEEKSRDVCAKWESLHHELSLYVQQLKIDIE

SEQ ID NO: 84388 - protein, 26 aa, Homo sapiens
MGKVYRADRKSVQRIKARDIVPGDIV

SEQ ID NO: 84389 - protein, 158 aa, Homo sapiens
MSCLLQTSFTDPGILPRATVCEAAALEKQIDNTGSSTYRPPPRTREVLINGQMVKLKYCFTCKMFRPPRTSHCSVCDNCVERFDHHCPWVGNCVGRRNYRFFYAFILSLSFLTAFIFACVVTHLTLRAQGSNFLSTLKETPASVLELVICFFSIWSIL

SEQ ID NO: 84390 - protein, 506 aa, Homo sapiens
  MOD_RES (1)..(1): Any amino acid
XCTGSLASLEQYSEQLKDMVAFFLGCSFSLEEALEKAGLPRRDPAGHSQAGAYKTTVPCVTHAGFCCPLVVTMRPIPKDKLEGLVRACCSLGGEQGQPVHMGDPELLGIKELSKPAYGDAMVCPPGEVPVFWPSPLTSLGAVSSCETPLAFASIPGCTVMTDLKDAKAPPGCLTPERIPEVHHISQDPLHYSIASVSASQKIRELESMIGIDPVLITTGFPTHFNHEPPEETDGPPGAVALVAFLQALEKEVAIIVDQRAWNLHQKIVEDAVEQGVLKTQIPILTYQGGSVEAAQAFLCKNGDPQTPRFDHLVAIERAGRAADGNYYNARKMNIKHLVDPIDDLFLAAKKIPGISSTGVGDGGNELGMGKVKEAVRRHIRHGDVIACDVEADFAVIAGEHSDGRPVRPATQGVSNWGGYALACALYILYSCAVHSQYLRKAVGPSRAPGDQAWTQALPSVIKVTNPSQPLAWKQLLPWMSSRPEVPSRKPRAGTLLPLKSQRQSQP

SEQ ID NO: 84391 - protein, 109 aa, Homo sapiens
  MOD_RES (1)..(1): Any amino acid
XEDIYLFNSSHSDGAQYVKRYKGHRNNATVKGVNFYGPKSEFVVSGSDCGHIFLWEKSSCQIIQFMEGDKGGVRDAGLNALSQASICPFSKSILQASLLLAQPMPGFDD

SEQ ID NO: 84392 - protein, 169 aa, Homo sapiens
MRRVVRQSKFRHVFGQAVKNDQCYDDIRVSRVTWDSSFCAVNPRFVAIIIEASGGGAFLVLPLHKTGRIDKSYPTVCGHTGPVLDIDWCPHNDQVIASGSEDCTVMVWQIPENGLTLSLTEPVVILEGHSKRVGIVAWHPTARNVLLSAGCDNAIIIWNVGTGEALINL

SEQ ID NO: 84393 - protein, 154 aa, Homo sapiens
MPGFQTPSEFLENPSQSSRLTAPFRKHVRPKKQHEIRRLGEGHLSRFMALGLGLMVKSIEGDQRLVERAQRLDQELLQALEKEEKRNPQICAAGATASGARSPAATESGCPSGPRGPGEPCGGLLQPGSTACPTGGDAYSTGPAAVPSGTGFPC

SEQ ID NO: 84394 - protein, 264 aa, Homo sapiens
MSVSVLSPSRLLGDVSGILQAASLLILLLLLIKAVQLYLHRQWLLKALQQFPCPPSHWLFGHIQELQQDQELQRIQKWVETFPSACPHWLWGGKVRVQLYDPDYMKVILGRSDPKSHGSYRFLAPWIGYGLLLLNGQTWFQHRRMLTPAFHYDILKPYVGLMADSVRVMLDKWEELLGQDSPLEVFQHVSLMTLDTIMKCAFSHQGSIQVDRPSDPTEEGSTTEGGGAGEDQEEEAFGFSGYPPLGQRTTWTRCPTPPCALRRH

SEQ ID NO: 84395 - protein, 214 aa, Homo sapiens
MAGLTAAAPRPGVLLLLLSILHPSRPGGVPGAIPGGVPGGVFYPGAGLGALGGGALGPGGKPLKPVPGGLAGAGLGAGLGAFPAVTFPGALVPGGVADAAAAYKAAKAGAGLGGVPGVGGLGVSAGAVVPQPGAGVKPGKVPGVGLPGVYPGGVLPGVGPFGGPQPGVPLGYPIKAPKLPGGYGLPYTTGKLPYGYGPGGVAGAAGKAGYPTGT

SEQ ID NO: 84396 - protein, 77 aa, Homo sapiens
MEVAVPVKQEAEGLALDSPWHRFRRFHLGDAPGPREALGLLRALCRDWLRPEVHTKEQMLELLVLEQFLSALPADTQ

SEQ ID NO: 84397 - protein, 146 aa, Homo sapiens
MDHHQPGTGRYQVLLNEEDNSESSAIEQPPTSNPAPQIVQAASSAPALETDSSPPPYSSITVEVPTTSDTEVYGEFYPVPPPYSVATSLPTYDEAEKAKAAAMAAAAAETSQRIQEEECPPRDDFSDADQLRVGNDGIFMLAFFIF

SEQ ID NO: 84398 - protein, 149 aa, Homo sapiens
VRELEAELDAEQKKHAEALKGVRKHERRVKELAYQVGDRVSLGSGPGAGPAQASPESPLPAQAEEDRKNLARMQDLVDKLQSKVKSYKRQFEEAEQQANTNLAKYRKAQHELDDAEERADMAETQANKLRARTRDALGPKLSLSPQHKE

SEQ ID NO: 84399 - protein, 61 aa, Homo sapiens
MSVSRTMEDSCELDLVYVTERIIAVSFPSTANEENFRSNLREVAQMLKSKHGGNYLLFNLS

SEQ ID NO: 84400 - protein, 89 aa, Homo sapiens
MLCAENRKEMEDWISSLKSVQTREPYEVAQFNVEHFSGMHNWYACSHARPTFCNVCRESLSGVTSHGLSCEGTHCLQRFIPSNMSTWSM

SEQ ID NO: 84401 - protein, 141 aa, Homo sapiens
MAELQEVQITEEKPLLPGQTPEAAKEAELAARILLDQGQTHSVETPYGSVTFTVYGTPKPKRPAILTYHDVGLNYKSCFQPLFQFEDMQEIIQNFVRVHVDAPGMEEGAPVFPLGYQYPSLDQLADMIPCVLQYLNFSTII

SEQ ID NO: 84402 - protein, 178 aa, Homo sapiens
MLHLHHSCLCFRSWLPAMLAVLLSLAPSASSDISASRPNILLLMADDLGIGDIGCYGNNTMRTPNIDRLAEDGVKLTQHISAASLCTPSRAAFLTGRYPVRSGMVSSIGYRVLQWTGASGGLPTNETTFAKILKEKGYATGLIGKWHLGLNCESASDHCHHPLHHGFDHFYGMPFSLM

SEQ ID NO: 84403 - protein, 760 aa, Homo sapiens
MQFFGRLVNTFSGVTNLFSNPFRVKEVAVADYTSSDRVREEGQLILFQNTPNRTWDCVLVNPRNSQSGFRLFQLELEADALVNFHQYSSQLLPFYESSPQVLHTEVLQHLTDLIRNHPSWSVAHLAVELGIRECFHHSRIISCANCAENEEGCTPLHLACRKGDGEILVELVQYCHTQMDVTDYKGETVFHYAVQGDNSQVLQLLGRNAVAGLNQVNNQGLTPLHLACQLGKQEMVRVLLLCNARCNIMGPNGYPIHSAMKFSQKGCAEMIISMDSSQIHSKDPRYGASPLHWAKNAEMARMLLKRGCNVNSTSSAGNTALHVAVMRNRFDCAIVLLTHGANADARGEHGNTPLHLAMSKDNVEMIKALIVFGAEVDTPNDFGETPTFLASKIGRPCPALCLTELQDLMHISRARKPAFILGSMRDEKRTHDHLLCLDGGGVKGLIIIQLLIAIEKASGVATKDLFDWVAGTSTGGILALAILHSKSMAYMRGMYFRMKDEVFRGSRPYESGPLEEFLKREFGEHTKMTDVRKPKVMLTGTLSDRQPAELHLFRNYDAPETVREPRFNQNVNLRPPAQPSDQLVWRAARSSGAAPTYFRPNGRFLDGGLLANNPTLDAMTEIHEYNQDLIRKGQANKVKKLSIVVSLGTGRSPQVPVTCVDVFRPSNPWELAKTVFGAKELGKMVVDCCTDPDGRAVDRARAWCEMVGIQYFRLNPQLGTDIMLDEVSDTVLVNALWETEVYIYEHREEFQKLIQLLLSP

SEQ ID NO: 84404 - protein, 139 aa, Homo sapiens
MTPGLQHPPTVVQRPGMPSGARMPHQGAPMGPPGSPYMGSPAVRPGLAPAGMEPARKRAAPPPGQSQAQSQGQPVPTAPARSRSAKRRKMADKILPQRIRELVPESQAYMDLLAFERKLDQTIMRKRVDIQEALKRPMK

SEQ ID NO: 84405 - protein, 71 aa, Homo sapiens
MSIVIPLGVDTAETSYLEMAAGSEPESVEASPVVVEKSNSYPHQLYTSSSHHSHSYIGLPYADHNYGARPP

SEQ ID NO: 84406 - protein, 247 aa, Homo sapiens
GNVPTRESIHMYYQNHIMNLSRESGLDTIDEHPGAASGAQTAHRMDSLDSHDSISSCYTEATMLFSRQSTLDDLDGQEIPKTSERARPRLRKMLSMDMSSSSADSGSLASSEPTQCTMLYSRQGTTETIEEVEAEQEEEAGSTAPEPREAKEYEATGYDVGAMGAEEASLTPEEELTQFSTLDGDVEAPPSYSKAVSFEHLSFGSQDDSAGKNRMAVSPDDSRTDKLGSSILPPLTHELTASELLLK

SEQ ID NO: 84407 - protein, 143 aa, Homo sapiens
MELGPEPPHRRRLLFACSPPPASQPVVKALFGASAAGGLSPVTNLTVTMDQLQGLGSDYEQPLEVKNNSNLQRMGSSESTDSGFCLDSPGPLDSKENLENPMRRIHSLPQKLLGCSPALKRSHSDSLDHDIFQLIDPDENKEN

SEQ ID NO: 84408 - protein, 355 aa, Homo sapiens
MTGNAGEWCLMESDPGVFTELIKGFGCRGAQVEEIWSLEPENFEKLKPVHGLIFLFKWQPGEEPAGSVVQDSRLDTIFFAKQVINNACATQAIVSVLLNCTHQDVHLGETLSEFKEFSQSFDAAMKGLALSNSDVIRQVHNSFARQQMFEFDTKTSAKEEDAFHFVSYVPVNGRLYELDGLREGPIDLGACNQDDWISAVRPVIEKRIQKDGFSPCCPGWSQTPELKPSACLDLPKWYSEGEIRFNLMAIVSDRKMIYEQKIAELQRQLAEEPMDTDQGNSMLSAIQSEVAKNQMLIEEEVQKLKRYKIENIRRKHNYLPFIMELLKTLAEHQQLIPLVEKAKEKQNAKKAQETK

SEQ ID NO: 84409 - protein, 332 aa, Homo sapiens
MFLPLYLNLVLYFVFWLHWTNCDFSLAVRGSKPGKNVQLQENEIRGLCLKSREIFLSQPILLELEAPLKICGDIHGQYYDLLRLFEYGGFPPESNYLFLGDYVDRGKQSLETICLLLAYKIKYPENFFLLRGNHECASINRIYGFYDECKRRYNIKLWKTFTDCFNCLPIAAIVDEKIFCCHGGLSPDLQSMEQIRRIMRPTDVPDQGLLCDLLWSDPDKDVLGWGENDRGVSFTFGAEVVAKFLHKHDLDLICRAHQVVEDGYEFFAKRQLVTLFSAPNYCGEFDNAGAMMSVDETLMCSFQILKPAEKKKPNATRPVTPPRGMITKQAKK

SEQ ID NO: 84410 - protein, 90 aa, Homo sapiens
MAAIRKKLVIVGDGACGKTCLLIVFSKDQFPEVYVPTVFENYVADIEVDGKQKTSQKSGPQKSSISVPTCPSSWLGIRRIFGMMSTQGGS

SEQ ID NO: 84411 - protein, 103 aa, Homo sapiens
MNIEVVEVLTLNQEVAGPRNAQIQALYAEDGSLSADAPSEQVQQQGKHPGDPEAARQRFRQFRYKDMTGPREALDQLRELCHQWLQPKARSKEQILELLVLEQ

SEQ ID NO: 84412 - protein, 28 aa, Homo sapiens
MAGQDPALSTSHPFYDVARHGILQVAGI

SEQ ID NO: 84413 - protein, 20 aa, Homo sapiens
MFSNSDEAVINKKLPKELLL

SEQ ID NO: 84414 - protein, 130 aa, Homo sapiens
MDAKARNCLLQHREALEKDIKTSYIMDHMISDGFLTISEEEKVRNEPTQQQRAAMLIKMILKKDNDSYVSFYNALLHEGYKDLAALLHDGIPVVSSSSGKDSVSGITSYGLYPLYLLSLCYQNCFGFVLL

SEQ ID NO: 84415 - protein, 150 aa, Homo sapiens
ERVKFVFETENGLLALMHHSNHVDSSRCYQCVKFLVTLAQKCPAAKEYFKENSHHWSWAVQWLQKKMSEHYWTPQSNVSNETSTGKTFQRTISAQDTLAYATALLNEKEQSGSSNGSESSPANENGDRHLQQVTESPSFALTSLPGNVDS

SEQ ID NO: 84416 - protein, 208 aa, Homo sapiens
  MOD_RES (1)..(1): Any amino acid
XEPPFPALVPKSCLVAESAVSKLLLSASEFQVRGLDELDGVKAACPCPQSSPPEQKEAEPEKRPKKVSQIRIRKTIPRPDPNLTPMGLPRPKRLKKKEFSLEEIYTNKNYKSPPANRCLETIFEEPKERNGTLISISQQKRKRVLEFQDFTVPRKRRARGKVKVAGSFTRAQKAAVQSRELDALLIQKLMELETFFAKEEEQEQSSGC

SEQ ID NO: 84417 - protein, 94 aa, Homo sapiens
MALCALTRALRSLNLAPPTVAAPAPSLFPAAQVIHLTREEGCFHSGCRRWGLRACEAGVASLVRSHADDEQWPPPTALCLDVAPLPPSSYFCGP

SEQ ID NO: 84418 - protein, 88 aa, Homo sapiens
  MOD_RES (1)..(1): Any amino acid
XQVGAWRTGALGLALLLLLGLGLGLEAAASPLSTPTSAQAAGPSSGSCPPTKFQCRTSGLCVPLTWRCDRDLDCSDGSDEEECTAWPA

SEQ ID NO: 84419 - protein, 126 aa, Homo sapiens
  MOD_RES (1)..(1): Any amino acid
XAASRYRRFLKLCEEWPVDETKRGRDLGAYLRQRVAQAFREGENTQVAEPEACDQMYESLARLHSNYYKHKYPRPRDTSFSGLSLEEYKLILSTDTLEELKEIDKGMWKKLQEKFAPKGPEEDHKA

SEQ ID NO: 84420 - protein, 135 aa, Homo sapiens
MEIPPVELPPEEPPNICQLIPELELLPEKEKEKEKEKEDDEEEEDEDASGGDQDQEERRWNKRTQQMLHGLQRALAKTGAESISLLELCRNTNRKQAAAKFYSFLVLKKQQAIELTQEEPYSDIIATPGPRFHII

SEQ ID NO: 84421 - protein, 591 aa, Homo sapiens
  MOD_RES (1)..(1): Any amino acid
XSICVVFAMSFVPASFTLVLIEERVTRAKHLQLMGGLSPTLYWLGNFLWDMCNYLVPACIVVLIFLAFQQRAYVAPANLPALLLLLLLYGTAYVVLTCINLFIGINGSMATFVLELFSDQKLQEVSRILKQVFLIFPHFCLGRGLIDMVRNQAMADAFERLGDRQFQSPLRWEVVGKNLLAMVIQGPLFLLFTLLLQHRSQLLPQPRVRSLPLLGEEDEDVARERERVVQGATQGDVLVLRNLTKVYRGQRMPAVDRLCLGIPPGECFGLLGVNGAGKTSTFRMVTGDTLASRGEAVLAGHSVAREPSAAHLSMGYCPQSDAIFELLTGREHLELLARLRGVPEAQVAQTAGSGLARLGLSWYADRPAGTYSGGNKRKLATALALVGDPAVVFLDEPTTGMDPSARRFLWNSLLAVVREGRSVMLTSHSMEECEALCSRLAIMVNGRFRCLGSPQHLKGRFAAGHTLTLRVPAARSQPAAAFVAAEFPGAELREAHGGRLRFQLPPGGRCALARVFGELAVHGAEHGVEDFSVSQTMLEEVFLYFSKDQGKDEDTEEQKEAGVGVDPAPGLQHPKRVSQFLDDPSTAETVL

SEQ ID NO: 84422 - protein, 655 aa, Homo sapiens
MALSDEPAAGGPEEEAEDETLAFGAALEAFGESAETRALLGRLREVHGGGAEREVALERFRVIMDKYQEQPHLLDPHLEWMMNLLLDIVQDQTSPASLVHLAFKFLYIITKVRGYKTFLRLFPHEVADVEPVLDLVTIQNPKDHEAWETRYMLLLWLSVTCLIPFDFSRLDGNLLTQPGQARMSIMDRILQIAESYLIVSDKARDAAAVLVSRFITRPDVKQSKMAEFLDWSLCNLARSSFQTMQGVITMDGTLQALAQIFKHGKREDCLPYAATVLRCLDGCRLPESNQTLLRKLGVKLVQRLGLTFLKPKVAAWRYQRGCRSLAANLQLLTQGQSEQKPLILTEDDDEDDDVPEGVERVIEQLLVGLKDKDTVVRWSAAKGIGRMAGRLPRALADDVVGSVLDCFSFQETDKAWHGGCLALAELGRRGLLLPSRLVDVVAVILKALTYDEKRGACSVGTNVRDAACYVCWAFARAYEPQELKPFVTAISSALVIAAVFDRDINCRRAASAAFQENVGRQGTFPHGIDILTTADYFAVGNRSNCFLVISVFIAGFPEYTQPMIDHLVTMKISHWDGVIRELAARALHNLAQQAPEFSATQVFPRLLSMTLSPDLHMRHGSILACAEVAYALYKLAAQENSSMIVSYTGVWEDSS

SEQ ID NO: 84423 - protein, 118 aa, Homo sapiens
MASYPSGSGKPKAKYPFKKRASLQASTAAPEARGGLGAPPLQSARSLPGPAPCLKHFPLDLRTSMDGKCKEIAEELFTRSLAESELRSAPYEFPEESPIEQLEERRQRLERQISQDVK

SEQ ID NO: 84424 - protein, 52 aa, Homo sapiens
MELDLSPPHLSSSPEDLCPAPGTPPGTPRPPDTPLPEEVCGGGSRCHSSPRV

SEQ ID NO: 84425 - protein, 482 aa, Homo sapiens
MSRVLVPCHVKGSVALQVGDVRTSQGRPGVLVIDVTFPSVAPFELQEITFKNYYTAFLSIRVRQYTSAHTPAKWVTCLRDYCLMPDPHSEEGAQEYVSLFKHQMLCDMARISELRLILRQPSPLWLSFTVEELQIYQQGPKSPSVTFPKWLSHPVPCEQPALLRETKILGSDRVKLMESLVVGDIAELRPNQGTLSLFTNEAGGILDDLIVTNTSEGHLYVVSNAGCWEKDLALMQDKVRELQNQGRDVGLEVLDNALLALQGPTAAQVLQAGVADDLRKLPFMTSAVMEVFGVSGCRVTRCGYTGEDGVEISVPVAGAVHLATAILKNPEVKLAGLAARDSLRLEAGLCLYGNDIDEHTTPVEGSLSWTLGKRRRAAMDFPGAKVIVPQLKGRVQRRRVGLMCEGAPMRAHSPILNMEGTKIGTVTSGCPSPSLKKNVAMGYVPCEYSRPGTMLLVEVRRKQQMAVVSKMPFVPTNYYTLK

SEQ ID NO: 84426 - protein, 41 aa, Homo sapiens
MGEPSREEYKIQSFDAETQQLLKTALKGEQHAHDGPGEPCL

SEQ ID NO: 84427 - protein, 75 aa, Homo sapiens
MALLTAAARLLGTKNASCLVLAARHASASSTNLKDILADLIPKEQARIKTFRQQHGKTVVGQITVDMACCSGSCL

SEQ ID NO: 84428 - protein, 211 aa, Homo sapiens
MEGSRPRAPSGHLAPSPPAFDGELDLQRYSNGPAVSAGSLGMGAVSWSESRAGERRFPCPVCGKRFRFNSILALHLRAHPGAQAFQCPHCGHRAAQRALLRSHLRTHQPERPRSPAARLLLELEERALLREARLGRARSSGGMQATPATEGLARPQAPSSSAFRCPYCKGKFRTSAERERHLHILHRPWKCGLCSFGSSQEEELLHHSLTA

SEQ ID NO: 84429 - protein, 112 aa, Homo sapiens
MLPPQKKPWESMAKGLVLGALFTSFLLLVYSYAVPPLHAGLASTRTPEAAASCSPPALEPEAVIRANGSAGECQPRRNIVFLKTHKTASSTLLNILFRFGQKHRLKFAFPNG

SEQ ID NO: 84430 - protein, 969 aa, Homo sapiens
MKYLLNFIGQGPATYGPFCAERLRRTYANGVRAEPPTWLELQAVKSKKHIPIQVILATGESLTVPVDSASTSREMCMHIAHKQGLSDHLGFSLQVAVYDKFWSLGSGRDHMMDAIARCEQMAQERGESQRQSPWRIYFRKEFFTPWHDSREDPVSTELIYRQVLRGVWSGEYSFEKEEELVELLARHCYVQLGASAESKAVQELLPSCIPHKLYRTKPPDRWASLVTAACAKAPYTQKQVTPLAVREQVVDAARLQWPLLFSRLFEVITLSGPRLPKTQLILAVNWKGLCFLDQQEKMLLELSFPEVMGLATNREAQGGQRLLLSTMHEEYEFVSPSSVAIAELVALFLEGLKERSIFAMALQDRKATDDTTLLAFKKGDLLVLTKKQGLLASENWTLGQNDRTGKTGLVPMACLYTIPTVTKPSAQLLSLLAMSPEKRKLAAQEGQFTEPRPEEPPKEKLHTLEEFSYEFFRAPEKDMVSMAVLPLARARGHLWAYSCEPLRQPLLKRVHANVDLWDIACQIFVAILRYMGDYPSRQAWPTLELTDQIFTLALQHPALQDEVYCQILKQLTHNSNRHSEERGWQLLWLCTGLFPPSKGLLPHAQKFIDTRRGKLLAPDCSRRIQKVLRTGPRKQPPHQVEVEAAEQNVSRICHKIYFPNDTSEMLEVVANTRVRDVCDSIATRLQLASWEGCSLFIKISDKVISQKEGDFFFDSLREVSDWVKKNKPQKEGAPVTLPYQVYFMRKLWLNISPGKDVNADTILHYHQELPKYLRGFHKCSREDAIHLAGLIYKAQFNNDRSQLASVPKILRELVPENLTRLMSSEEWKKSILLAYDKHKDKTVEEAKVAFLKWICRWPTFGSAFFEVKQTSEPSYPDVILIAINRHGVLLIHPKTKDLLTTYPFTKISSWSSGSTYFHMALGSLGRGSRLLCETSLGYKMDDLLTSYVQQLLSAMNKQRGSKAPALAST

SEQ ID NO: 84431 - protein, 26 aa, Homo sapiens
  MOD_RES (1)..(1): Any amino acid
XSLVNASISSSVVKSYFSSEIYYIYH

SEQ ID NO: 84432 - protein, 1176 aa, Homo sapiens
MKGARWRRVPWVSLSCLCLCLLPHVVPGMTTPSLKTDGGRRTATSPPPTTSQTIISTIPSTAMHTRSTAAPIPILPERGVSLFPYGADAGDLEFVRRTVDFTSPLFKPATGFPLGSSLRDSLYFTDNGQIIFPESDYQIFSYPNPLPTGFTGRDPVALVAPFWDDADFSTGRGTTFYQEYETFYGEHSLLVQQAESWIRKMTNNGGYKARWALKVTWVNAHAYPAQWTLGSNTYQAILSTDGSRSYALFLYQSGGMQWDVAQRSGNPVLMGFSSGDGYFENSPLMSQPVWERYRPDRFLNSNSGLQGLQFYRLHREERPNYRLECLQWLKSQPRWPSWGWNQVSCPCSWQQGRRDLRFQPVSIGRWGLGSRQLCSFTSWRGGVCCSYGPWGEFREGWHVQRPWQLAQELEPQSWCCRWNDKPYLCALYQQRRPHVGCATYRPPQPAWMFGDPHITTLDGVSYTFNGLGDFLLVGAQDGNSSFLLQGRTAQTGSAQATNFIAFAAQYRSSSLGPVTVQWLLEPHDAIRVLLDNQTVTFQPDHEDGGGQETFNATGVLLSRNGSEVSASFDGWATVSVIALSNILHASASLPPEYQNRTEGLLGVWNNNPEDDFRMPNGSTIPPGSPEEMLFHFGMTWQINGTGLLGKRNDQLPSNFTPVFYSQLQKNSSWAEHLISNCDGDSSCIYDTLALRNASIGLHTREVSKNYEQANATLNQYPPSINGGRVIEAYKGQTTLIQYTSNAEDANFTLRDSCTDLELFENGTLLWTPKSLEPFTLEILARSAKIGLASALQPRTVVCHCNAESQCLYNQTSRVGNSSLEVAGCKCDGGTFGRYCEGSEDACEEPCFPSVHCVPGKGCEACPPNLTGDGRHCAALGSSFLCQNQSCPVNYCYNQGHCYISQTLGCQPMCTCPPAFTDSRCFLAGNNFSPTVNLELPLRVIQLLLSEEENASMAEVNASVAYRLGTLDMRAFLRNSQVERIDSAAPASGSPIQHWMVISEFQYRPRGPVIDFLNNQLLAAVVEAFLYHVPRRSEEPRNDVVFQPISGEDVRDVTALNVSTLKAYFRCDGYKGYDLVYSPQSGFTCVSPCSRGYCDHGGQCQHLPSGPRCSCVSFSIYTAWGEHCEHLSMKLDAFFGIFFGALGGLLLLGVGTFVVLRFWGCSGARFSYFLNSAEALP

SEQ ID NO: 84433 - protein, 581 aa, Homo sapiens
MARRPRHSIYSSDEDDEDFEMCDHDYDGLLPKSGKRHLGKTRWTREEDEKLKKLVEQNGTDDWKVIANYLPNRTDVQCQHRWQKVLNPELIKGPWTKEEDQRVIELVQKYGPKRWSVIAKHLKGRIGKQCRERWHNHLNPEVKKTSWTEEEDRIIYQAHKRLGNRWAEIAKLLPGRTDNAIKNHWNSTMRRKVEQEGYLQESSKASQPAVATSFQKNSHLMGFAQAPPTAQLPATGQPTVNNDYSYYHISEAQNVSSHVPYPVALHVNIVNVPQPAAAAIQRHYNDEDPEKEKRIKELELLLMSTENELKGQQVLPTQNHTCSYPGWHSTTIADHTRPHGDSAPVSCLGEHHSTPSLPADPGSLPEESASPARCMIVHQGTILDNVKNLLEFAETLQFIDSFLNTSSNHENSDLEMPSLTSTPLIGHKLTVTTPFHRDQTVKTQKENTVFRTPAIKRSILESSPRTPTPFKHALAAQEIKYGPLKMLPQTPSHLVEDLQDVIKQESDESGIVAEFQENGPPLLKKIKQEVNTQPFGSNKLRILPPLFLVCSLMCLPLALCNTTTFRARFSYKVQRKGTARL

SEQ ID NO: 84434 - protein, 249 aa, Homo sapiens
MAAFGRQVLDWHRLIPLTWACMARQTPHLGEQRRTTASLLRKLTTASNGGVIEELSCVRSNNYVQEPECRRNLVQCLLEKQGTPVVQGSLELERVMSSLLDMGFSNAHINELLSVRRGASLQQLLDIISEFILLGLNPEPVCVVLKKSPQLLKLPIMQMRKRSSYLQKLGLGEECTPSTYEKKLTIKWPQAGPSGGFQKKASLSQEVAAPCVLLGHDVEVEEGLIYYCATASPAHSSYAKRPAQARNKT

SEQ ID NO: 84435 - protein, 293 aa, Homo sapiens
METPGASASSLLLPAASRPPRKREAGEAGAATSKQRVLDEEEYIEGLQTVIQRDFFPDVEKLQAQKEYLEAEENGDLERMRQIAIKFGSALGKMSREPPPPYVTPATFETPEVHAGTGVVGNKPRPRGRGLEDGEAGEEEEKEPLPSLDVFLSRYTSEDNASFQEIMEVAKERSRARHAWLYQAEEEFEKRQKDNLELPSAEHQAIESSQASVETWKYKAKNSLMYYPEGVPDEEQLFKKPRQVVHKNTRFLRDPFSQALSRCQLQQAAALNAQGPSLSFSKKAANPRAPALP

SEQ ID NO: 84436 - protein, 146 aa, Homo sapiens
MVNVPGRGSPEEGEGRSEAAGTLFEVTEHLTGWAPAPVPSVEGLLTFRDVAIEFSREEWEHLDSDQKLLYGDVMLENYGNLVSLGLAVSKPDLITFLEQRKEPWNVKSAETVAIQPDIFSHDTQGLLRKKLIEASFQKVILDGYGS

SEQ ID NO: 84437 - protein, 214 aa, Homo sapiens
MSLSPPCFTEEDRFSLEALQTIHKQMDDDKDGGIEVEESDEFIREDMKYKDATNKHSHLHREDKHITIEDLWKRWKTSEVHNWTLEDTLQWLIEFVELPQYEKNFRDNNVKGTTLPRIAVHEPSFMISQLKISDRSHRQKLQLKALDVVLFGPLTRPPHNWMKDFILTVSIVIGVGGCWFAYTQNKTSKEHVAKMMKDLESLQTAEQSLMDLQE

SEQ ID NO: 84438 - protein, 68 aa, Homo sapiens
VGVLQKGSVGLVICDEGHRLKNSENQTYQALDSLNTSRRVLISGTPIQNDLLEYFSLVHFVNSGILDA

SEQ ID NO: 84439 - protein, 216 aa, Homo sapiens
  MOD_RES (1)..(1): Any amino acid
XQFTDLFQRYFCREVRDGRAPGRDYRDTGRGPPAKAEASPEPGPGPAAPGLPKARSSEELAPPRPPGPCSFQHFRRSLRHIFRRRSAGELPAAHTAAAPGTPGEAAETPARPGLAKKFLPWSLAREPPPEALKEAVLRYSLADEASMDSGARWQRGRLALRRAPGPDGPDRVLELFDPPKWPEPELSRLRFRLKQGLSCAHVPTRCNLAGASGIGH

SEQ ID NO: 84440 - protein, 113 aa, Homo sapiens
MSLEDPFFVVRGEVQKAVNTARGLYQRWCELLQESAAVGREELDWTTNELRNGLRSIEWDLEDLEETIDILGLYTRRQASCPEVTQRPAGCQRSLGHISLHRGAAGHTAADHG

SEQ ID NO: 84441 - protein, 73 aa, Homo sapiens
GLLDMNKGLSLQHIGRPHSGIGSALACLDSAWGEGAGSFLPELTPLEPQRHLRNWFLPDTRLFFSSNHRWKNG

SEQ ID NO: 84442 - protein, 56 aa, Homo sapiens
MASAGAERRPGVQEATVVGQGQLTEEPGSAQTSEVFSDGSLCPLPGHGDRWPVCHL

SEQ ID NO: 84443 - protein, 3852 aa, Homo sapiens
KTESWHCLPQEMDSSQTLDTSQTRFNVRTEDTEVTDFPSLEEGILTQSENQVKEPNRDLFCSPLLVIQDSFASPDLPLLTCLTQDQEFAPDSLFHQSELSFAPLRGIPDKSEDTEWSSRPSEVSEALFQATAEVASDLASSRFSVSQHPLIGSTAVGSQCPFLPSEQGNNEETISSVDELKIPKDCDRYDDLCSYMSWKTRKDTQWPENNLADKDQVSVATSFDITDENIATKRSDHFDAARSYGQYWTQEDSSKQAETYLTKGLQGKVESDVITLDGLNENAVVCSERVAELQRKVGHSNLGINESFSFLLPSFVPHKPTRESEYHSSDLRMLRMSPDTVPKAPKHLKAGDTSKGGIAKVTQSNLKSGITTTPVDSDIGSHLSLSLEDLSQLAVSSPLETTTGQHTDTLNQKTLADTHLTEETLKVTAIPEPADQKTATPTVLSSSHSHRGKPSIFYQQGLPDSHLTEEALKVSAAPGLADQTTGMSTLTSTSYSHREKPGTFYQQELPESNLTEEPLEVSAAPGPVEQKTGIPTVSSTSHSHVEDLLFFYRQTLPDGHLTDQALKVSAVSGPADQKTGTATVLSTPHSHREKPGIFYQQEFADSHQTEETLTKVSATPGPADQKTEIPAVQSSSYSQREKPSILYPQDLADSHLPEEGLKVSAVAGPADQKTGLPTVPSSAYSHREKLLVFYQQALLDSHLPEEALKVSAVSGPADGKTGTPAVTSTSSASSSLGEKPSAFYQQTLPNSHLTEEALKVSIVPGPGDQKTGIPSAPSSFYSHREKPIIFSQQTLPDFLFPEEALKVSAVSVLAAQKTGTPTVSSNSHSHSEKSSVFYQQELPDSDLPRESLKMSAIPGLTDQKTVPTPTVPSGSFSHREKPSIFYQQEWPDSYATEKALKVSTGPGPADQKTEIPAVQSSSYPQREKPSVLYPQVLSDSHLPEESLKVSAFPGPADQMTDTPAVPSTFYSQREKPGIFYQQTLPESHLPKEALKISVAPGLADQKTGTPTVTSTSYSQHREKPSIFHQQALPGTHIPEEAQKVSAVTGPGNQKTWIPRVLSTFYSQREKPGIFYQQTLPGSHIPEEAQKVSPVLGPADQKTGTPTPTSASYSHTEKPGIFYQQVLPDNHPTEEALKISVASEPVDQTTGTPAVTSTSYSQYREKPSIFYQQSLPSSHLTEEAKNVSAVPGPADQKTVIPILPSTFYSHTEKPGVFYQQVLPHSHPTEEALKISVASEPVDQTTGTPTVTSTSYSQHTEKPSIFYQQSLPGSHLTEEAKNVSAVPGPGDRKTGIPTLPSTFYSHTEKPGSFYQQVLPHSHLPEEALEVSVAPGPVDQTIGTPTVTSPSSSFGEKPIVIYKQAFPEGHLPEESLKVSVAPGPVGQTTGAPTITSPSYSQHRAKSGSFYQLALLGSQIPEEALRVSSAPGPADQTTGIPTITSTSYSFGEKPIVNYKQAFPDGHLPEEALKVSIVSGPTEKKTDIPAGPLGSSALGEKPITFYRQALLDSPLNKEVVKVSAAPGPADQKTETLPVHSTSYSNRGKPVIFYQQTLSDSHLPEEALKVPPVPGPDAQKTETPSVSSSLYSYREKPIVFYQQALPDSELTQEALKVSAVPQPADQKTGLSTVTSSFYSHTEKPNISYQQELPDSHLTEEALKVSNVPGPADQKTGVSTVTSTSYSHREKPIVSYQRELPHFTEAGLKILRVPGPADQKTGINILPSNSYPQREHSVISYEQELPDLTEVTLKAIGVPGPADQKTGIQIASSSSYSNREKASIFHQQELPDVTEEALNVFVVPGQGDRKTEIPTVPLSYYSRREKPSVISQQELPDSHLTEEALKVSPVSIPAEQKTGIPIGLSSSYSHSHKEKLKISTVHIPDDQKTEFPAATLSSYSQIEKPKISTVIGPNDQKTPSQTAFHSSYSQTVKPNILFQQQLPDRDQSKGILKISAVPELTDVNTGKPVSLSSSYFHREKSNIFSPQELPGSHVTEDVLKVSTIPGPAGQKTVLPTALPSSFSHREKPDIFYQKDLPDRHLTEDALKISSALGQADQITGLQTVPSGTYSHGENHKLVSEHVQRLIDNLNSSDSSVSSNNVLLNSQADDRVVINKPESAGFRDVGSEEIQDAENSAKTLKEIRTLLMEAENMALKRCNFPAPLARFRDISDISFIQSKKVVCFKEPSSTGVSNGDLLHRQPFTEESPSSRCIQKDIGTQTNLKCRRGIENWEFISSTTVRSPLQEAESKVSMALEETLRQYQAAKSVMRSEPEGCSGTIGNKIIIPMMTVIKSDSSSDASDGNGSCSWDSNLPESLESVSDVLLNFFPYVSPKTSITDSREEEGVSESEDGGGSSVDSLAAHVKNLLQCESSLNHAKEILRNAEEEESRVRAHAWNMKFNLAHDCGYSISELNEDDRRKVEEIKAELFGHGRTTDLSKGLQSPRGMGCKPEAVCSHIIIESHEKGCFRTLTSEHPQLDRHPCAFRSAGPSEMTRGRQNPSSCRAKHVNLSASLDQNNSHFKVWNSLQLKSHSPFQNFIPDEFKISKGLRMPFDEKMDPWLSELVEPAFVPPKEVDFHSSSQMPSPEPMKKFTTSITFSSHRHSKCISNSSVVKVGVTEGSQCTGASVGVFNSHFTEEQNPPRDLKQKTSSPSSFKMHSNSQDKEVTILAEGRRQSQKLPVDFERSFQEEKPLERSDFTGSHSEPSTRANCSNFKEIQISDNHTLISMGRPSSTLGVNRSSSRLGVKEKNVTITPDLPSCIFLEQRELFEQSKAPRADDHVRKHHSPSPQHQDYVAPDLPSCIFLEQRELFEQCKAPYVDHQMRENHSPLPQGQDSIASDLPSPISLEQCQSKAPGVDDQMNKHHFPLPQGQDCVVEKNNQHKPKSHISNINVEAKFNTVVSQSAPNHCTLAASASTPPSNRKALSCVHITLCPKTSSKLDSGTLDERFHSLDAASKARMNSEFNFDLHTVSSRSLEPTSKLLTSKPVAQDQESLGFLGPKSSLDFQVVQPSLPDSNTITQDLKTIPSQNSQIVTSRQIQVNISDFEGHSNPEGTPVFADRLPEKMKTPLSAFSEKLSSDAVTQITTESPEKTLFSSEIFINAEDRGHEIIEPGNQKLRKAPVKFASSSSVQQVTFSRGTDGQPLLLPYKPSGSTKMYYVPQLRQIPPSPDSKSDTTVESSHSGSNDAIAPDFPAQVLGTRDDDLSATVNIKHKEGIYSKRVVTKASLPVGEKPLQNENADASVQVLITGDENLSDKKQQEIHSTRAVTEAAQAKEKESLQKDTADSSAAAAAEHSAQVGDPEMKNLPDTKAITQKEEIHRKKTVPEEAWPNNKESLQINIEESECHSEFENTTRSVFRSAKFYIHHPVHLPSDQDICHESLGKSVFMRHSWKDFFQHHPDKHREHMCLPLPYQNMDKTKTDYTRIKSLSINVNLGNKEVMDTTKSQVRDYPKHNGQISDPQRDQKVTPEQTTQHTVSLNELWNKYRERQRQQRQPELGDRKELSLVDRLDRLAKILQNPITHSLQVSESTHDDSRGERSVKEWSGRQQQRNKLQKKKRFKSLEKSHKNTGELKKSKVLSHHRAGRSNQIKIEQIKFDKYILSKQPGFNYISNTSSDCRPSEESELLTDTTTNILSGTTSTVESDILTQTDREVALHERSSSVSTIDTARLIQAFGHERVCLSPRRIKLYSSITNQQRRYLEKRSKHSKKVLNTGHPLVTSEHTRRRHIQESLQFHRPDFISRSGERIKRLKLIVQERKLQSMLQTERDALFNIDRERQGHQNRMCPLPKRVFLAIQKNKPISKKEMIQRSKRIYEQLPEVQKKREEEKRKSEYKSYRLRAQLYKKRVTNQLLGRKVPWD

SEQ ID NO: 84444 - protein, 306 aa, Homo sapiens
MWATLPLLCAGAWLLGVPVCGAAELCVNSLEKFHFKSWMSKHRKTYSTEEYHHRLQTFASNWRKINAHNNGNHTFKMALNQFSDMSFAEIKHKYLWSEPQNCSATKSNYLRGTGPYPPSVDWRKKGNFVSPVKNQAEQQLVDCAQDFNNHGCQGGLPSQAFEYILYNKGIMGEDTYPYQGKDGYCKFQPGKAIGFVKDVANITIYDEEAMVEAVALYNPVSFAFEVTQDFMMYRTGIYSSTSCHKTPDKVNHAVLAVGYGEKNGIPYWIVKNSWGPQWGMNGYFLIERGKNMCGLAACASYPIPLV

SEQ ID NO: 84445 - protein, 249 aa, Homo sapiens
MPALGWAVAAILMLQTAMAEPSPGTLPRKAGVFSDLSNQELKAVHSFLWSKKELRLQPSSTTTMAKNTVFLIEMLLPKKYHVLRFLDKGERHPVREARAVIFFGDQEHPNVTEFAVGPLPGPCYMRALSPRPGYQSSWASRPISTAEYALLYHTLQEATKPLHQFFLNTTGFSFQDCHDRCLAFTDVAPRGVASGQRRSWLIIQRYVEGYFLHPTGLELLVDHGSTDAGHWAVEQVWYNGKFYGSPEEL

SEQ ID NO: 84446 - protein, 628 aa, Homo sapiens
MATKARVMYDFAAEPGNNELTVNEGEIITITNPDVGGGWLEGRNIKGERGLVPTDYVEILPSDGKDQFSCGNSVADQAFLDSLSASTAQASSSAASNNHQVGSGNDPWSAWSASKSGNWESSEGWGAQPEGAGAQRNTNTPNNWDTAFGHPQAYQGPATGDDDDWDEDWDGPKSSSYFKDSESADAGGAQRGNSRASSSSMKIPLNKFPGFAKPGTEQYLLAKQLAKPKEKIPIIVGDYGPMWVYPTSTFDCVVADPRKGSKMYGLKSYIEYQLTPTNTNRSVNHRYKHFDWLYERLLVKFGSAIPIPSLPDKQVTGRFEEEFIKMRMERLQAWMTRMCRHPVISESEVFQQFLNFRDEKEWKTGKRKAERDELAGVMIFSTMEPEAPDLDLVEIEQKCEAVGKFTKAMDDGVKELLTVGQEHWKRCTGPLPKEYQKIGKALQSLATVFSSSGYQGETDLNDAITEAGKTYEEIASLVAEQPKKDLHFLMECNHEYKGFLGCFPDIIGTHKGAIEKVKESDKLVATSKITLQDKQNMVKRVSIMSYALQAEMNHFHSNRIYDYNSVIRLYLEQQVQFYETVSGRPRAFRMCLRRGFLVNHFDHVKLICLYSLILSNKPKEPKFWTGFF

SEQ ID NO: 84447 - protein, 136 aa, Homo sapiens
  MOD_RES (1)..(1): Any amino acid
XSSLEETIASLKAEVEGFKQERQAVHSEMLLRVQQLVQDLKKLTCQVATLNNNASTEGTCCPVNWVEHQDSCYWFSHSGMSWAEAEKYCQLKNAHLVVINSREEQELEARPARRLAGARAGWRRGLCSLPSRRQVE

SEQ ID NO: 84448 - protein, 145 aa, Homo sapiens
MPQGLLSSELSPVSFRGKIPGFCREGAELGTGQSLSSPVLLIALFSEWLRLLPFLGVLALLGYLAVRPFLPKKKQQKDSLINLKIQKENPKVVNEINIEDLCLTKAAYCRCWRSKTFPACDGSHNKHNELTGDNVGPLILKKKEV

SEQ ID NO: 84449 - protein, 166 aa, Homo sapiens
  MOD_RES (1)..(1): Any amino acid
XTTLASIIMIFLTALATFIVILPGIRGKTRLFWLLRVVTSLFIGAAILAVNFSSEWSVGQVSTNTSYKAFSSEWISADIGLQVGLGGVNITLTGTPVQQLNETINYNEEFTWRLGENYAEEYAKALEKGLPDPVLYLAEKFTPRSPCGLYRQYRLAGHYTSAMLCR

SEQ ID NO: 84450 - protein, 83 aa, Homo sapiens
MSQSGAVSCCPGATNGSLGRSDGVAKMSPKDLFEQRKKYSNSNVIMHETSQYHVQHLATFIMDKSEAITSVDDAIRKLVQLSS

SEQ ID NO: 84451 - protein, 10 aa, Homo sapiens
MWTADEIAQL

SEQ ID NO: 84452 - protein, 150 aa, Homo sapiens
  MOD_RES (1)..(1): Any amino acid
XEETIKDYFEARLALLEPVFPIACHRLCEGPDFSTDFNYKPPQNIPEGSGILLFIFHANFLGKEVIARLCGPCSVQAVVLNDKFQLPVFLTGSRSVVQAGVQWRGLQLTGVLTSQAQAILPPQPPNYLGLKMTVILFTHSALLQVPINSS

SEQ ID NO: 84453 - protein, 169 aa, Homo sapiens
MLLQSQTMGVSHSFTPKGITIPQREKPGHMYQNEDYLQNGLPTETTVLGFGITGSLSIISGKQSTKPFDLSSLTSNAVSSVTAGAGLFLLADSMVALRTASQHCGSEMDYLSSLPYSEYYYPIYEIKDCLLTSVSLTGVLVVMLIFTVLELLLAAYSSVFWWKQLYSNN

SEQ ID NO: 84454 - protein, 347 aa, Homo sapiens
MAQQANVGELLAMLDSPMLGVRDDVTAVFKENLNSDRGPMLVNTLVDYYLETSSQPALHILTTLQEPHDKMDTDVVVLTTGVLVLITMLPMIPQSGKQHLLDFFDIFGRLSSWCLKKPGHVAEVYLVHLHASVYALFHRLYGMYPCNFVSFLRSHYSMKENLETFEEVVKPMMEHVRIHPELVTGSKDHELDPRRWKRLETHDVVIECAKISLDPTEASYEDGYSVSHQISARFPHRSADVTTSPYADTQNSYGCATSTPYSTSRLMLLNMPGQLPQTLSSPSTRLITEPPQATLWSPSMVCGMTTPPTSPGNVPPDLSHPYSKVFGTTGGKGTPLGTPATSPPPAP

SEQ ID NO: 84455 - protein, 36 aa, Homo sapiens
MVSAKKVPAIALSAGVSFALLRFLCLAVWSCYRSEN

SEQ ID NO: 84456 - protein, 61 aa, Homo sapiens
MRKGVLKDPEIADLFYKDDPEELFIGLHEIGHGSFGAVYFATNAHTSEVVAIKKMSYSGKQ

SEQ ID NO: 84457 - protein, 618 aa, Homo sapiens
MLVPLAKLSCLAYQCFHALKIKKNYLPLCATRWSSTSTVPRITTHYTIYPRDKDKRWEGVNMERFAEEADVVIVGAGPAGLSAAVRLKQLAVAHEKDIRVCLVEKAAQIGAHTLSGACLDPGAFKELFPDWKEKGAPLNTPVTEDRFGILTEKYRIPVPILPGLPMNNHGNYIVRLGHLVSWMGEQAEALGVEVYPGYAAAEVLFHDDGSVKGIATNDVGIQKDGAPKATFERGLELHAKVTIFAEGCHGHLAKQLYKKFDLRANCEPQTYGIGLKELWVIDEKNWKPGRVDHTVGWPLDRHTYGGSFLYHLNEGEPLVALGLVVGLDYQNPYLSPFREFQRWKHHPSIRPTLEGGKRIAYGARALNEGGFQSIPKLTFPGGLLIGCSPGFMNVPKIKGTHTAMKSGILAAESIFNQLTSENLQSKTIGLHVTEYEDNLKNSWVWKELYSVRNIRPSCHGVLGVYGGMIYTGIFYWILRGMEPWTLKHKGSDFERLKPAKDCTPIEYPKPDGQISFDLLSSVALSGTNHEHDQPAHLTLRDDSIPVNRNLSIYDGPEQRFCPAGVYWGSWNLSPVNERMTVNKGGLRGCVELKHSVSSTLDSETTQLNTAVPPFIMYM

SEQ ID NO: 84458 - protein, 42 aa, Homo sapiens
MCDRKAVIKNADMSEEMQQDSVECATQALEKYNIEKDIAAHI

SEQ ID NO: 84459 - protein, 552 aa, Homo sapiens
MADSSEGPRAGPGEVAELPGDESGTPGGEAFPLSSLANLFEGEDGSLSPSPADASRPAGPGDGRPNLRMKFQGAFRKGVPNPIDLLESTLYESSVVPGPKKAPMDSLFDYGTYRHHSSDNKRWRKKIIEKQPQSPKAPAPQPPPILKVFNRPILFDIVSRGSTADLDGLLPFLLTHKKRLTDEEFREPSTGKTCLPKALLNLSNGRNDTIPVLLDIAERTGNMREFINSPFRDIYYRGQTALHIAIERRCKHYVELLVAQGADVHAQARGRFFQPKDEGGYFYFGELPLSLAACTNQPHIVNYLTENPHKKADMRRQDSRGNTVLHALVAIADNTRENTKFVTKMYDLLLLKCARLFPDSNLEAVLNNDGLSPLMMAAKTGKIGIFQHIIRREVTDEDTRHLSRKFKDWAYGPVYSSLYDLSSLDTCGEEASVLEILVYNSKIENRHEMLAVEPINELLRDKWRKFGAVSFYINVVSYLCAMVIFTLTAYYQPLEGTPPYPYRTTVDYLRLAGEVITLFTGVLFFFTNIKDLFMKKCPGVNSLFIDGSFQLL

SEQ ID NO: 84460 - protein, 128 aa, Homo sapiens
MASSPAQRRRGNDPLTSSPGRSSRRTDALTSSPGRDLPPFEDESEGLLGTEGPLEEEEDGEELIGDGMERDYRAIPELDAYEAEGLALDDEDVEELTASQREAAERAMRQRDREAGRGLGRMRRGLLY

SEQ ID NO: 84461 - protein, 24 aa, Homo sapiens
MASTEEQYDLKIVKVEEDPIWDQE

SEQ ID NO: 84462 - protein, 59 aa, Homo sapiens
MDMWTALLILQALLLPSLGISWTPQSGTSARSPTAICASTMGLKTHWVALPMWRSAPKR

SEQ ID NO: 84463 - protein, 339 aa, Homo sapiens
TQLLQAAAAEASLNKSKSATTTPSGSPRTSQQNVYNPSEGSTWNPFDDDNFSKLTAEELLNKDFAKLGEGKHPEKLGGSAESLIPGFQSTQGDAFATTSFSAGTDLQRESNPCPVITVEHFKESLGVKGLPLYPDPSRVPGTKTQNNLESDYLARDGPSSNSSFHSSEEEGTDLEGDMLDCSGSRPLLMESEEEDESCRPPPGKLGGAVPFAPPEVSPEQAKTVQGGRKNQFQAFTQPATDGLSEPDVFAIAPFRSSRVPNDDMDIFSKAPFVSKSSMAPSQPEESDVFLRAPFTKKKSMEELTVIQCTSQELPAQTGLLSQTGDVPLPAGRERAVYTS

SEQ ID NO: 84464 - protein, 101 aa, Homo sapiens
MVSHFMGSLSVLCFLLLLGFQFVCPQPSTQHRKVPQRMAAEGAPEDDGGGGAPGVWGAWGPWSACSRSCSGGVMEQTRPCLPRSYRLRGGQRPGAPARAFA

SEQ ID NO: 84465 - protein, 107 aa, Homo sapiens
MSELDQLRQEAEQLKNQIRDARKACADATLSQITNNIDPVGRIQMRTRRTLRGHLAKIYAMHWGTDSRLLVSASQDGKLIIWDSYTTNKVHAIPLRSSWVMTCAYAP

SEQ ID NO: 84466 - protein, 262 aa, Homo sapiens
MTSSGTGASRPMLRRAWKEMPQDLRSPARTPPSEEDSAEAERLKTEGNEQMKVENFEAAVHFYGKAIELNPANAVYFCNRAAAYSKLGNYAGAVQDCERAICIDPAYSKAYGRMGLALSSLNKHVEAVAYYKKALELDPDNETYKSNLKIAELKLREAPSPTGGVGSFDIAGLLNNPGFMSMASNLMNNPQIQQLMSGMISGGNNPLGTPGTSPSQNDLASLIQAGQQFAQQMQQQNPELIEQLRSQIRSRTPSASNDDQQE

SEQ ID NO: 84467 - protein, 179 aa, Homo sapiens
GDGDKLKACEVSKNKDGKEQSETVSLSEDETFSWPGPKTVTLKRTSQGFGFTLRHFIVYPPESAIQFSYKDEENGNRGGKQRNRLEPMDTIFVKQVKEGGPAFEAGLCTGDRIIKVNGESVIGKTYSQVIALIQNSDTTLELSVMPKDEDILQVNLEFSTFYKNTIAKFLQLSDMEMLC

SEQ ID NO: 84468 - protein, 394 aa, Homo sapiens
GGREPQGLAEKSPLQTIGEEQTQNPYTELLVLKAHHDIVRFLVQLDDYRFASAGDDGIVVVWNAQTGEKLLELNGHTQKITAIITFPSLESCEEKNQLILTASADRTVIVWDGDTTRQVQRISCFQSTVKCLTVLQRLDVWLSGGNDLCVWNRKLDLLCKTSHLSDTDLSFVTGSHVGELIIWDALDWTMQAYERNFWDPSPQLDTQQEIKLCQKSNDISIHHFTCDEENVFAAVGRGLYVYSLQMKRVIACQKTAHDSNVLHVARLPNRQLISCSEDGSVRIWELREKQQLAAEPVPTGFFNMWGFGRVSKQASQPVKKQQENATSCSLELIGDLIGHSSSVEMFLYFEDHGLVTCSADHLIILWKNGERESGLRSLRLFQKLEENGDLYLAV

SEQ ID NO: 84469 - protein, 165 aa, Homo sapiens
MTLSPLQIRVMVDLCNSTKGICLTGPSGPPGPPGAGGLPGHNGLDGQPGPQGPKGEKGANGKRGKMGIPGAAGNPGERGEKGDHGELGLQGNEGPPGQKGEKGDKGDVSNDVLLAGAKGDQGPPGPPGPPGPPGPPGPPGSRRAKGPRQPSMFNGQCPGETCAIP

SEQ ID NO: 84470 - protein, 307 aa, Homo sapiens
MAAKCCSTFFLGCEFSQFLPLFLLGIISSNGKRWKEIRRFSLTTLRNFGMGKRSIEDRVQEEAHCLVEELRKTKASPCDPTFILGCAPCNVICSVVFQKRFDYKDQNFLTLMKRFNENFRILNSPWIQVCNNFPLLIDCFPGTHNKVLKNVALTRSYIREKVKEHQASLDVNNPRDFIDCFLIKMEQEKDNQKSEFNIENLVGTVADLFVAGTETTSTTLRYGLLLLLKHPEVTAKVQEEIDHVIGRHRSPCMQDRSHMPYTDAVVHEIQRYSDLVPTGVPHAVTTDTKFRNYLIPKSFDNKIMLAA

SEQ ID NO: 84471 - protein, 149 aa, Homo sapiens
  MOD_RES (1)..(1): Any amino acid
XKTLLRRHLTTKFNALIGPEAEQEKREKMASPAYTPLTTTAKVRPRKLGFSHFGNIRKKKFDESTDYICPMEPSDGVSDSHRVYSGYRGLSPLDAPELDGLDQHQWKHMNFDAGPETMDTPTRLSSQAPPTLQLREKLKCLRPVDHSLG

SEQ ID NO: 84472 - protein, 38 aa, Homo sapiens
MAAAEPMGPAQVPMNSEVIVDPIQEHELNNYSCKKAHS

SEQ ID NO: 84473 - protein, 396 aa, Homo sapiens
MAHWPAMAAASLCRRESEPGIGGKRAEAARQKKPQMASKHGEGHDPKEPEQLRKLFIGGLSFETTDDSLREHFEKWGTLTDCVVMRDPQTKRSRGFGFVTYSCVEEVDAAMCARPHKVDGRVVEPKRAVSREDSVKPGAHLTVKKIFVGGIKEDTEEYNLRDYFEKYGKIETIEVMEDRQSGKKRGFAFVTFDDHDTVDKIVVQKYHTINGHNCEVKKALSKQEMQSAGSQRGRGGGSGNFMGRGGNFGGGGGNFGRGGNFGGRGGYGGGGGGSRGSYGGGDGGYNGFGGDGGNYGGGPGYSSRGGYGGGGPGYGNQGGGYGGGGGYDGYNEGGNFGGGNYGGGGNYNDFGNYSGQQQSNYGPMKGGSFGGRSSGSPYGGGYGSGGGSGGYGSRRF

SEQ ID NO: 84474 - protein, 180 aa, Homo sapiens
MGKKLYICPPSRWSPPSLGQGYVTCPSPQGDLAVICWSSEFSFIQSPHHTLQYLPENPAPAIRISAWFGPPASTPASTMSIRVTQKSYKVSTSGPRAFSSRSYTSGPGSRISSSSFSRVGSSNFRGGLGGGYGGASGMGGITAVTVNQSLLSPLVLEVDPNIQAVRTQEKEQIKTLNNKF

SEQ ID NO: 84475 - protein, 89 aa, Homo sapiens
DEGKLFVGGLSFDTNEQSLEQVFSKYGQISEVVVVKDRETQRSRGFGFVTFENIDDAKDAMMAMNGKSVDGRQIRVDQPLRPSVLCAPQ

SEQ ID NO: 84476 - protein, 56 aa, Homo sapiens
  MOD_RES (1)..(1): Any amino acid
XLLEKIWDYLKLVRIYTKPKGQLPDYTSPVVLPYSRTTVEDFCMKIHKNLIKEFKY

SEQ ID NO: 84477 - protein, 445 aa, Homo sapiens
MYPQGRHPAPHQPGQPGFKFTVAESCDRIKDEFQFLQAQYHSLKVEYDKLANEKTEMQRHYVMYYEMSYGLNIEMHKQTEIAKRLNTILAQIMPFLSQEHQQQVAQAVERAKQVTMTELNAIIGQQQLQAQHLSHATHGPPVQLPPHPSGLQPPGIPPVTGSSSGLLALGALGSQAHLTVKDEKNHHELDHRERESSANNSVSPSESLRASEKHRGSADYSMEAKKRKAEEKDSLSRYDSDGDKSDDLVVDVSNEDPATPRVSPAHSPPENGLDKARSLKKDAPTSPASVASSSSTPSSKTKDLGHNDKSSTPGLKSNTPTPRNDAPTPGTSTTPGLRSMPGKPPGMDPIASALRTPISITSSYAAPFAMMSHHEMNGSLTSPGAYAGLHNIPPQMSAAAAAAAAAYGRSPMVGFDPHPPMRATGLPSSLASIPGGKPVLIPCEC

SEQ ID NO: 84478 - protein, 520 aa, Homo sapiens
MEEKEILRRQIRLLQGLIDDYKTLHGNAPAPGTPAASGWQPPTYHSGRAFSARYPRPSRRGYSSHHGPSWRKKYSLVNRPPGPSDPPADHAVRPLHGARGGQPPVPQQHVLERQVQLSQGQNVVIKVKPPSKSGSASASGAQRGSLEEFEETPWSDQRPREGEGEPPRGQLQPSRPTRARGTCSVEDPLLVCQKEPGKPRMVKSVGSVGDSPREPRRTVSESVIAVKASFPSSALPPRTGVALGRKLGSHSVASCAPQLLGDRRVDAGHTDQPVPSGSVGGPARPASGPRQAREASLVVTCRTNKFRKNNYKWVAASSKSPRVARRALSPRVAAENVCKASAGMANKVEKPQLIADPEPKPRKPATSSKPGSAPSKYKWKASSPSASSSSSFRWQSEASSKDHASQLSPVLSRSPSGDRPAVGHSGLKPLSGETPLSAYKVKSRTKIIRRRSSTSLPGDKKSGTSPAATAKSHLSLRRRQALRGKSSPVLKKTPNKGLVQVTTHRLCRLPPSRAHLPTKE

SEQ ID NO: 84479 - protein, 512 aa, Homo sapiens
KNTDFFPGLSAFLSQEEINKSLDLARRAIADSETEDFDSEKEISQIFSTSPASLCEHPSHKETKLGEHASRRPQDNRSTPVQPLAEKQTKSISSPVSKRKPAMSPLLTRPSYIRSLRKAEKRGAKTPSTNVKPKTPHQRKGGPQSQLCDKAANLIEELTSIFKAAKPRNRSPNGESSSPDSGYLSPKNQPSALLSASASQSPMEDQGEMEREVKSPGARHCYQDNQDLAVPHNRKSHPQPHSALHFPAAPRFIQKLRSQEVAEGSRVYLECRVTGNPTPRVRWFCEGKELHNTPDIQIHCEGGDLHTLIIAEAFEDDTGRYTCLATNPSGSDTTSAEVFIEGASSTDSDSESLAFKSRAGAMPQAQKKTTSVSLTIGSSSPKTGVTTAVIQPLSVPVQQVHSPTSYLCRPDGTTTAYFPPVFTKELQNTAVAEGQVVVLECRVRGAPPLQVQWFRQGSEIQDSPDFRILQKKPRSTAEPDVLYVFVRVRCHQMKIQYYNLAHLISSWLSSFL

SEQ ID NO: 84480 - protein, 125 aa, Homo sapiens
MAEAKTHWLGAALSLIPLIFLISGAEAASFQRNQLLQKEPDLRLENVQKFPSPEMIRALEYIENLRQQAHKEESSPDYNPYQGVSVPLQQKENGDESHLPERDSLSEEDWMRIILEALRQAENEP

SEQ ID NO: 84481 - protein, 92 aa, Homo sapiens
MSVHQIRKHAVLPPIICRSDKEFLESVQRYIITETERLGCSEEGPADEYYIIYRNVFDKLLEKLEESLFHYSYFLRPSLSQVMLFHVLLMQL

SEQ ID NO: 84482 - protein, 203 aa, Homo sapiens
PQVVNVQELKNNPATPSTAMGSSVPYSTAKTPHPVLTPVAANQAKQGSLINSLKPSGPTPASGQLSSGDKASGTAKIETAVTSTPSASGQFSKPFSFSPSGTGFNFGIITPTPSSNFTAAQGATPSTKESSQPDAFSSGGGSKPSYEAIPESSPPSGITSASNTTPGEPAASSSRPVAPSGTALSTTSSFGSSNTGSVFGQAA

SEQ ID NO: 84483 - protein, 173 aa, Homo sapiens
MLREEAAQKRKGKESGMALPQGRLTFRDVAIEFSLAEWKFLNPAQRALYREVMLENYRNLEAVDISSKHMMKEVLSTGQGNREVIHTGTLQRHQSYHIGDFCFQEIEKEIHNIEFQCQEDERNGHEAPTTKIKKLTGSTDQHDHRHAGNKPIKDQLGSSFYSHLPELHIFQIK

SEQ ID NO: 84484 - protein, 600 aa, Homo sapiens
MNQRDQPFMTIQRNDSSDNLVFHMKNEMRNIKYKPVDYQQLRALTEAKKLASASAKLKIRKAMLTSKLSKEQTLIKQHKQVWWQEYQRLNEVRCKMESEIKSLLNEENIGNECLCDLTNFEQELSEQQCTYLKNVINPIQQLRADLKYRQHHTLQHSHPHIEFNSMKVLEEVDFVKKQLKTVFERLRLEQQRIENDLSDWSIKILDHSLEEKTNPLSELPIELESLECPYPDLKSSILSEFYKFTQKYQKKLQDFNLQLEDIYRNCQLSEEDHWIYQAILDQYPGDLFGRRTLYLDMLQRYFPHKSRHDLVEHEKYCDQYRFAIEQQNILISNWNKNKKDFIQKAVLTLTEACATHEMESMLAKDKKKQQELCADLKAKVRQWRAHQEEVARLEMEISARRREKEEEKEKLWKKKELLQRAEKKKKIKKYWAKKKQKWQEMEMRDLQRLEELKKLIAEQSLKDRERVKYRQELLERRLMEKKEVALQEAHEDKERARRLEALRKQVAVVAQFDPVRMMSDTMASKARMGIEIEEEFILQKPLFTLNTYNEQQIISDPRLRFELALREAGLHRTLYAKEILPKISPQKPPRKDMESTVFKI

SEQ ID NO: 84485 - protein, 197 aa, Homo sapiens
  MOD_RES (1)..(1): Any amino acid
XSEGTEKEEIMVQGMPQEPVNIEEGDGYSKVIKRVVLKSDTEQSEVTLCEPSILSSTSQFQAEPVEGRRVSKVVKTTVVLGERMEKHLGDSSLATDLPSAKDDFEEALSYTGSHMKVHLPSLVENEILKEDGSIIKRTTMSKAITQKRAVVKDQHGKRIDLEHLEDVPEALDQDDLQRDLQQLLRHFCKEDLKQEAK

SEQ ID NO: 84486 - protein, 321 aa, Homo sapiens; identical to SEQ ID NO: 49154

SEQ ID NO: 84487 - protein, 115 aa, Homo sapiens
  MOD_RES (1)..(1): Any amino acid
XFRFQEAAGPREALSRLQELCHGWLRPEMRTKEQILELLVLEQFLTILPQEIQSRVQELHPESGEEAVTLVEDMQRELGRLRQQSLTFPVRRSQAPRWDKEESYGIPVSRAARRA

SEQ ID NO: 84488 - protein, 162 aa, Homo sapiens
  MOD_RES (1)..(1): Any amino acid
XSCLLLAEPPLKFLANHTNILLASSIWYITFFCPHDLVSQGYSYLPVQLLASGMKEVTRTWKIVGGVTHANSYYKNGWIVMIAIGWARGAGGTIITNFERLVKGDWKPEGDEWLKMSYPAKVTLLGSVIFTFQHTQHLAISKHNLMFLYTIFIVATKSLNWR

SEQ ID NO: 84489 - protein, 111 aa, Homo sapiens
MAAVDSFYLLYREIARSCNCYMEALALVGAWYTARKSITVICDFYSLIRLHFIPRLGSRADLIKQYGRWAVVSGATDGIGKAYAEELASRGLNIILISRNEEKLQVVAKDI

SEQ ID NO: 84490 - protein, 1287 aa, Homo sapiens
MLSATPLYGNVHSWMNSERVRMCGASEDRKILVNDGDASKARLELREENPLNHNVVDASTAHRIDGLAALSMDRTGLIREGLRVPGNIVYSSLCGLGSEKGREAATSTLGGLGFSSERNPEMQFKPNTPETVEASAVSGKPPNGFSAIYKTPPGIQKSAVATAEALGLDRPASDKQSPLNINGASYLRLPWVNPYMEGATPAIYPFLDSPNKYSLNMYKALLPQQSYSLAQPLYSPVCTNGERFLYLPPPHYVGPHIPSSLASPMRLSTPSASPAIPPLVHCADKSLPWKMGVSPGNPVDSHAYPHIQNSKQPRVPSAKAVTSGLPGDTALLLPPSPRPSPRVHLPTQPAADTYSEFHKHYARISTSPSVALSKPYMTVSSEFPAARLSNGKYPKAPEGGEGAQPVPGHARKTAVQDRKDGSSPPLLEKQTVTKDVTDKPLDLSSKVVDVDASKADHMKKMAPTVLVHSRAGSGLVLSGSEIPKETLSPPGNGCAIYRSEIISTAPSSWVVPGPSPNEENNGKSMSLKNKALDWAIPQQRSSSCPRMGGTDAVITNVSGSVSSAGRPASASPAPNANADGTKTSRSSVETTPSVIQHVGQPPATPAKHSSSTSSKGAKASNPEPSFKANENGLPPSSIFLSPNEAFRSPPIPYPRSYLPYPAPEGIAVSPLSLHGKGPVYPHPVLLPNGSLFPGHLAPKPGLPYGLPTGRPEFVTYQDALGLGMVHPMLIPHTPIEITKEEKPERRSRSHERARYEDPTLRNRFSEILETSSTKLHPDVPTDKNLKPNPNWNQGKTVVKSDKLVYVDLLREEPDAKTDTNVSKPSFAAESVGQSAEPPKPSVEPALQQHRDFIALREELGRISDFHETYTFKQPVFTVSKDSVLAGTNKENLGLPVSTPFLEPPLGSDGPAVTFGKTQEDPKPFCVGSAPPSVDVTPTYTKDGADEAESNDGKVLKPKPSKLAKRIANSAGYVGDRFKCVTTELYADSSQLSREQRALQMEGLQEDSILCLPAAYCERAMMRFSELEMKEREGGHPATKDSEMCKFSPADWERLKGNQDKKPKSVTLEEAIAEQNESERCEYSVGNKHRDPFEAPEDKDLPVEKYFVERQPVSEPPADQVASDMPHSPTLRVDRKRKVSGDSSHTETTAEEVPEDPLLKAKRRRVSKGLHPKKQRHLLHLRERWEQQVSAADGKPGRQSRKEVTQATQPEAIPQGTNITEEKPGRKRAEAKGNRSWSEESLKPSDNEQGLPVFSGSPPMKSLSSTSAGGKKQAQPSCAPASRPPAKQ

SEQ ID NO: 84491 - protein, 64 aa, Homo sapiens
  MOD_RES (1)..(1): Any amino acid
XGVGYPQLSAVMECADAAHGLKGHIISDGGCSCPGDVAKAFEPQRERQWKFLLKEMWNIPSETS

SEQ ID NO: 84492 - protein, 43 aa, Homo sapiens
MQLLPPPIRTGTKLKWRLGKSRRPFSGKVQTVETTNENVLCLA

SEQ ID NO: 84493 - protein, 328 aa, Homo sapiens
MVGDKPVFSFQPRGHLEIGEKLDIIRQKRLSHVSGHRSYYLRGAGALLQHGLVNFTFNKLLRRGFTPMTVPDLLRGAVFEGCGMTPNANPSQIYNIDPARFKDLNLAGTAEVGLAGYFMDHTVAFRDLPVRMVCSSTCYRAETNTGQEPRGLYRVHHFTKVEMFGVTGPGLEQSSQLLEEFLSLQMEILTELGLHFRVLDMPTQELGLPAYRKFDIEAWMPGRGRFGEVTSASNCTDFQSRRLHIMFQTEAGELQFAHTVNATACAVPRLLIALLESNQQKDGSVLVPPALQSYLGTDRITAPTHVPLQYIGPNQPRKPGLPGQPAVS

SEQ ID NO: 84494 - protein, 285 aa, Homo sapiens
MSNLVPPVELANPENQFRVDYILSVMNVPDFDFPPEFYEHAKALWEDEGVRACYERSNEYQLIDCAQYFLDKIDVIKQADYVPSDQDLLRCRVLTSGIFETKFQVDKVNFHMFDVGGQRDERRKWIQCFNDVTAIIFVVASSSYNMVIREDNQTNRLQEALNLFKSIWNNRWLRTISVILFLNKQDLLAEKVLAGKSKIEDYFPEFARYTTPEDATPEPGEDPRVTRAKYFIRDEFLRISTASGDGRHYCYPHFTCAVDTENIRRVFNDCRDIIQRMHLRQYELL

SEQ ID NO: 84495 - protein, 31 aa, Homo sapiens
  MOD_RES (1)..(1): Any amino acid
XHSKAPEGLGELTAKQTVGPTDCRRTLSLMD

SEQ ID NO: 84496 - protein, 188 aa, Homo sapiens
  MOD_RES (1)..(1): Any amino acid
XCLEFLEDSPFLQSRGWVKNCVNTIKVYGDGAWVLYEEPNYHGRMYVVESGDFRSFSDWEAHSARVQSLHKVVNFFQPSPPTGMAGRSSGDRGNPLRSHPDLGTLGDKSPQSQRAASECSLGSGHPSPGRSWMIQGAFPDSQGPPGPGRGEWWGEVVRSNGDGAGPEPRPVQDSPGSLGALPLCDSAR

SEQ ID NO: 84497 - protein, 108 aa, Homo sapiens
  MOD_RES (1)..(1): Any amino acid
XTHKVIPLKGLWEDVAPTLPDGHFDGILYDTYPLSEETWHTHQFNFIKNHAFRLLKPGGVLTYCNLTSWGELMKSKYSDITIMFEWLPGAVAQVYNPSTVEGRGGQIA

SEQ ID NO: 84498 - protein, 140 aa, Homo sapiens
MADLSLADALTEPSPDIEGEIKRDFIATLEAEAFDDVVGETVGKTDYIPLLDVDEKTGNSESKKKPCSETSQIEDLPLPPHPASLSFHLPLDTPSSKPTLLANGGHGVEGSDTTGSPTEFLEEKMAYQEYPNSQNWPEDT

SEQ ID NO: 84499 - protein, 147 aa, Homo sapiens
  MOD_RES (1)..(1): Any amino acid
XICETILTSGENLARKRNFTAKSPLMYEWYQEYYVGAAHGLAGIYYYLMQVFREEKYLCDAYQCADVIWQYGLLKKGYGLCHGSAGNAYAFLTLYNLTQDMKYLYRACKFAEWCLEYGEHGCRTPDTPFSLFEGMAGTIYFLADLLV

SEQ ID NO: 84500 - protein, 66 aa, Homo sapiens
MESLVVGDIAELRPNQGTLSLFTNEAGGILDDLIVTNTSEGHLYVVSNAGCWEKDLALMQDKVREL

SEQ ID NO: 84501 - protein, 99 aa, Homo sapiens
VPHITVEEEDGEIRLLVIRAQGLLGRVTAEFRTVSLTAFSPEDYQNVAGTLEFQPGERYKYIFINITDNSIPELEKSFKVELLNLEGGVCEFLVRAGDE

SEQ ID NO: 84502 - protein, 150 aa, Homo sapiens
MPPKLLCAGRCVGQDGAAQAWHCPPGQGHSVWDAVRMPLGAGTPVNVQRREDSATEGSHRLILAANRDEFYSRPSKLADFWGNNNEILSGLDMEEGKEGGTWLGISTRGKLAALTNYLQPQLDWQARGRAQQRETSFATMGTEGSLILSF

SEQ ID NO: 84503 - protein, 111 aa, Homo sapiens
MHGVCKEGDNCRYSHDLSDSPYSVVCKYFQRGYCIYGDRCSRALRPMRRTWSSHLPCSAARTWCVGSAWRWSMRKPTPVSAASGSSPTATTPTVSSAFASGGVLSNLRARS

SEQ ID NO: 84504 - protein, 154 aa, Homo sapiens
MAQMEFLFRKNTLTAAWKPRHQETLRLEAGVPEQCKAAWCPEEAAEPQAMVPSRRTWNLGATPSLRGLWRVGRAPEPEPGMARPAPAPASPAARPFPHTGPGRLRTGRGKDTPVCGDEDSSARSAARPALAQCRALSVDWAGPGSPHGLYLTLQ

SEQ ID NO: 84505 - protein, 135 aa, Homo sapiens
MIKEIEDGWWLGKKNGQLGAFPSNFVELLDSGPPSLGNPDMPSVSPGPQRPPKTTEDKGWWEGECQGRRGVFPDNFVLPPPPIKKLVPRKVVSRESAPIKEPKKLMPKTSLPTVKKLATATTGPSKAKRKSTAAR

SEQ ID NO: 84506 - protein, 179 aa, Homo sapiens
MRLKISLLKEPKHQELVSCVGWTTAEELYSCSDDHQIVKWNLLTSETTQIVKLPDDIYPIDFHWFPKSLGVKKQTQAESFVLTSSDGKFHLISKLGRVEKSVEAHCGAVLAGRWNYEGTALVTVGEDGQIKIWSKTGMLRSTLAQQGTPVYSVAWGPDSEKVLYTAGKQLIIKPLQPNA

SEQ ID NO: 84507 - protein, 164 aa, Homo sapiens
MLALLGLSQALNILLGLKGLAPAEISAVCEKGNFNVAHGLAWSYYIGYLRLILPELQARIRTYNQHYNNLLRGAVSQRLYILLPLDCGVPDNLSMADPNIRFLDKLPQQTGDHAGIKDRVYSNSIYELLENGQRNLQMTAASRCPRRFSGTCGRRKRKRLLWAA

SEQ ID NO: 84508 - protein, 1068 aa, Homo sapiens
MSNKTGGKRPATTNSDIPNHNMVSEVPPERPSVRATRTARKAVAFGKRSHSMKRNPNAPVTKAGWLFKQASSGVKQWNKRWFVLVDRCLFYYKDEKEESILGSIPLLSFRVAAVQPSDNISRKHTFKVTVCWVDEAEASSTRCLSPQAEHAGVRTYFFSAESPEEQEAWIQAMGEAARVQIPPAQKSVPQAVRHSHEKPDSENVPPSKHHQQPPHNSLPKPEPEAKTRGEGDGRGCEKAERRPERPEVKKEPPVKANGLPAGPEPASEPGSPYPEGPRVPGGGEQPAQPNGWQYHSPSRPGSTAFPSQDGETGGHRRSFPPRTNPDKIAQRKSSMNQLQQWVNLRRGVPPPEDLRSPSRFYPVSRRVPEYYGPYSSQYPDDYQYYPPGVRPESICSMPAYDRISPPWALEDKRHAFRNGGGPAYQLREWKEPASYGRQDATVWIPSPSRQPVYYDELDAASSSLRRLSLQPRSHSVPRSPSQGSYSRARIYSPVRSPSARFERLPPRSEDIYADPAAYVMRRSISSPKVPPYPEVFRDSLHTYKLNEQDTDKLLGKLCEQNKVVREQDRLVQQLRAEKESLESALMGTHQELEMFGSQPAYPEKLRHKKDSLQNQLINIRVELSQATTALTNSTIEYEHLESEVSALHDDLWEQLNLDTQNEVLNRQIQKEIWRIQDVMEGLRKNNPSRGTDTAKHRGGLGPSATYSSNSPASPLSSASLTSPLSPFSLVSGSQGSPTKPGSNEPKANYEQSKKDPHQTLPLDTPRDISLVPTRQEVEAEKQAALNKVGVVPPRTKSPTDDEVTPSAVVRRNASGLTNGLSSQERPKSAVFPGEGKVKMSVEEQIDRMRRHQSGSMREKRRSLQLPASPAPDPSPRPAYKVVRRHRSIHEVDISNLEAALRAEEPGGHAYETPREEIARLRKMELEPQHYDVDINKELSTPDKVLIPERYIDLEPDTPLSPEELKEKQKKVERIKTLIAKSSMQNVVPIGEGDSVDVPQDSESQLQEQEKRIEISCALATEASRRGRMLSVQCATPSPPTSPASPAPPANPLSSESPRGADSSYTMRV

SEQ ID NO: 84509 - protein, 712 aa, Homo sapiens
MMQESATETISNSSMNQNGMSTLSSQLDAGSRDGRSSGDTSSEVSTVELLHLQQQQALQAARQLLLQQQTSGLKSPKSSDKQRPLQVPVSVAMMTPQVITPQQMQQILQQQVLSPQQLQALLQQQQAVMLQQDFLDSGLENFRAALEKNQQQQQQQQQQQQQQQQQQQQQQQQQQQQQQQQQQQQQQQHPGKQAKEQQQQQQQQQQLAAQQLVFQQQLLQMQQLQQQQHLLSLQRQGLISIPPGQAALPVQSLPQAGLSPAEIQQLWKEVTGVHSMEDNGIKHGGLDLTTNNSSSTTSSNTSKASPPITHHSIVNGQSSVLSARRDSSSHEETGASHTLYGHGVCKWPGCESICEDFGQFLKHLNNEHALDDRSTAQCRVQMQVVQQLEIQLSKERERLQAMMTHLHMRPSEPKPSPKPLNLVSSVTMSKNMLETSPQSLPQTPTTPTAPVTPITQGPSVITPASVPNVGAIRRRHSDKYNIPMSSEIAPNYEFYKNADVRPPFTYATLIRQAIMESSDRQLTLNEIYSWFTRTFAYFRRNAATWKNAVRHNLSLHKCFVRVENVKGAVWTVDEVEYQKRRSQKITGSPTLVKNIPTSLGYGAALNASLQAALAESSLPLLSNPGLINNASSGLLQAVHEDLNGSLDHIDSNGNSSPGCSPQPHIHSIHVKEEPVIAEDEDCPMSLVTTANHSPELEDDREIEEEPLSEDLE

SEQ ID NO: 84510 - protein, 149 aa, Homo sapiens
  MOD_RES (1)..(1): Any amino acid
XPAGLKKSSKKAEPVKVLQKEKKRGKRVALSDDETKETENMRKKRRRIKLPESDSSEDEVFPDSPGAYEAESPSPPPPPSPPLEPVPKTEPEPPSVKSSSGENKRKRKRVLKSKTYLDGEGCIVVLDMQSHSLDILEHYVEMPIQRLER

SEQ ID NO: 84511 - protein, 41 aa, Homo sapiens
MADSVKTFLQDLARMLESSKRERSSVEEGQVVSWHREEPRV

SEQ ID NO: 84512 - protein, 62 aa, Homo sapiens
  MOD_RES (1)..(1): Any amino acid
XEIKVLSDKLKEAETRAEFAERSVTKLEKSIDDLEDELYAQKLKYKAISEELDHALNDMTSM

SEQ ID NO: 84513 - protein, 225 aa, Homo sapiens
MWTLGRRAVAGLLASPSPAQAQTLTRVPRPAELAPLCGRRGLRTDIDATCTPRRASSNQRGLNQIWNVKKQSVYLMNLRKSGTLGHPGSLDETTYERLAEETLDSLAEFFEDLADKPYTFEDYDVSFGVNVAPVAVPSLRKSEDHALQTGHVLDYLCFCLLGFQSASEQRSNPDSVVHRMAGVRSTTLLSSPCEWDWHPGCSSRSKYSRKHRAVPVHGPRCQAPG

SEQ ID NO: 84514 - protein, 123 aa, Homo sapiens
MATDWLGSIVSINCGDSLGVYQGRVSAVDQVSQTISLTRPFHNGVKCLVPEVTFRAGDITELKILEIPGPGDNQHFGDLHQTELGPSGAGCQVGINQNGTGKFVKKPASSSSAPQNIPKRTDV

SEQ ID NO: 84515 - protein, 371 aa, Homo sapiens
MIRAAPPPLFLLLLLLLLLVSWASRGEAAPDQDEIQRLPGLAKQPSFRQYSGYLKGSGSKHLHYWFVESQKDPENSPVVLWLNGGPGCSSLDGLLTEHGPFLVQPDGVTLEYNPYSWNLIANVLYLESPAGVGFSYSDDKFYATNDTEVAQSNFEALQDFFRLFPEYKNNKLFLTGESYAGIYIPTLAVLVMQDPSMNLQGLAVGNGLSSYEQNDNSLVYFAYYHGLLGNRLWSSLQTHCCSQNKCNFYDNKDLECVTNLQEVARIVGNSGLNIYNLYAPCAGGVPSHFRYEKDTVVVQDLGNIFTRLPLKRMWHQALLRSGDKVRMDPPCTNTTAASTYLNNPYVRKALNIPEQLPQWDMCKWRCSAGPG

SEQ ID NO: 84516 - protein, 160 aa, Homo sapiens
MWLLLTLSFLLASTAQDGDKLLEGDECAPHSQPWQVALYERGRFNCGASLISPHWVLSAAHCQSRFMRVRLGEHNLRKRDGPEQLRTTSRVIPHPRYEARSHRNDIMLLRLVQPARLNPQVRPAVLPTRCPHPGEACVVSGWGLVSHNEPGTAGSPRSQG

SEQ ID NO: 84517 - protein, 85 aa, Homo sapiens
DSSVVAAVKQKQIRRGVKEVQKFVNKGEKGIMVLAGDTLPIEVYCHLPVMCEDRNLPYVYIPSKTVRSTWPPDLAQHWGVWDSLP

SEQ ID NO: 84518 - protein, 720 aa, Homo sapiens
MHARNPHSPFQRQHMMDCYLSAQQDTGTMQAVIGQDPMIAGQVSKPLLSVRSEMNAELRGEDKAATSDSELNEPLLAPVESNDSEDTPSKLFGARGNPALSDPGTPDQHQASQTHPPFPVGPQPLLTAQQLASAVAGVMPGGPPALNQPILIPFNMAGQLGGQQGLVLTLPTANLTNIQGLVAAAAAGGIMTLPLQNLQATSSLNSQLQQLQLQLQQQQQQQQQQPPPSTNQHPQPAPQAPSQSQQQPLQPTPPQQPPPASQQPPAPTSQLQQAPQPQQHQPHSHSQNQNQPSPTQQSSSPPQKPSQSPGHGLPSPLTPPNPLQLVNNPLASQAAAAAAAMSSIASSQAFGNALSSLQGVTGQLVTNAQGQIIGTIPLMPNPGPSSQAASGTQGLQVQPITPQLLTNAQGQIIATVIGNQILPVINTQGITLSPIKPGQQLHQPSQTSVGQAASQGNLLHLAHSQASMSQSPVRQASSSSSSSSSSSALSVGQLVSNPQTAAGEVDGVNLEEIREFAKAFKIRRLSLGLTQTQVGQALSATEGPAYSQSAICRHTILRSHFFLPQEAQENTIASSLTAKLNPGLLYPARFEKLDITPKSAQKIKPVLERWMAEAEARHRAGMQNLTEFIGSEPSKKRKRRTSFTPQALEILNAHFEKNTHPSGQEMTEIAEKLNYDREVVRVWFCNKRQALKNTIKRLKQHEPATAVPLEPLTDSLEENS

SEQ ID NO: 84519 - protein, 167 aa, Homo sapiens
WIKPARKRRRRSRKKPSGALGSESYKSSAGSAEQTAPGDSTGYMEVSLDSLDLRVKGILSSQAEGLANGPDVLETDGLQEVPLCSCRMETPKSREITTLANNQCMATESVDHEGNFMECQPESSISHRFHKDCASRVNNASYCPHCGEESSKAKEVTIAKADTTSTV

SEQ ID NO: 84520 - protein, 175 aa, Homo sapiens
MALQLGRLSSGPCWLVARGGCGGPRAWSQCGGGGLRAWSQRSAAGRVCRPPGPAGTEQSRGLGHGSTSRGGPWVGTGLAAALAGLVGLATAAFGHVQRAEMLPKTSGTRATSLGRPEEEEDELAHRCSSFMAPPVTDLGELRRRPGDMKTKMELLILETQAQVCQALAQRKLQNK

SEQ ID NO: 84521 - protein, 326 aa, Homo sapiens
MADVINVSVNLEAFSQAISAIQALRSSVSRVFDCLKDGMRNKETLEGREKAFIAHFQDNLHSVNRDLNELERLSNLVGKPSENHPLHNSGLLSLDPVQDKTPLYSQLLQAYKWSNKLQYHAGLASGLLNQQSLKRSANQMGVSAKRRPKAQPTTLVLPPQYVDDVISRIDRMFPEMSIHLSRPNGTSAMLLVTLGKVLKVIVVMRSLFIDRTIVKGYNENVYTEDGKLDIWSKSNYQVFQKVTDHATTALLHYQLPQMPDVVVRSFMPHTPPLPSPNRWQPPICSPSLVAAVISIPASSVSDPVSLQYHQRLALSIFLPLTILIGM

SEQ ID NO: 84522 - protein, 144 aa, Homo sapiens
  MOD_RES (1)..(1): Any amino acid
XFIHCTDDSPDPCIEYELVLRKWCELIPGAEFRCFVKENKLIGISQRDYTQYYDHISKQKEEIRRCIQDFFKKHIQYKFLDEDFVFDIYRDSRGKVWLIDFNPFGEVTDSLLFTWEELISENNLNGDFSEVDAQEQKRNQQEDD

SEQ ID NO: 84523 - protein, 237 aa, Homo sapiens
MTGKKSSREKRRKRSSQEAAAALAAPDIVPALASGSSGSTSGCGSAGGCGSVSCCGNANFSGSVTGGGSGGSCWGGSSVERSERRKRRSTDSSSVSGSLQQETKYILPTLEKELFLAEHSDLEEGGLDLTVSLKPVSFYISDKKEMLQQCFCIIGEKKLQKMLPDVLKNCSIEEIKKLCQEQLELLSEKKILKILEGDNGMDSDMEEEADDGSKMGSDLVSHQFTASSCCSSTGLDD

SEQ ID NO: 84524 - protein, 48 aa, Homo sapiens
MGTSSTDSQQAGHRRCSTSNTSAENLTCLSLPGSPGKTAPLPGPAQAG

SEQ ID NO: 84525 - protein, 116 aa, Homo sapiens
MSRGYSENNNFLNNNNQMVLDMILYPLIGIPQTINWETIARLVPGLTPKECAKRFDELKSSGSSPVDNQYNSLMAAGESPVETLATYIKSSLLDIHGEFQETPVGHDAVSKTGQTW

SEQ ID NO: 84526 - protein, 35 aa, Homo sapiens
MDLNRIIQALKGTIDPKLRIAAENELNQFTSDYSL

SEQ ID NO: 84527 - protein, 2152 aa, Homo sapiens
QMRQKSKQQAKIEATQKLEQVKNEQQQQQQQQFGSQHLLVQSGSDTPSSGIQSPLTPQPGNGNMSPAQSFHKELFTKQPPSTPTSTSSDDVFVKPQAPPPPPAPSRIPIQDSLSQAQTSQPPSPQVFSPGSSNSRPPSPMDPYAKMVGTPRPPPVGHSFSRRNSAAPVENCTPLSSVSRPLQMNETTANRPSPVRDLCSSSTTNNDPYAKPPDTPRPVMTDQFPKSLGLSRSPVVSEQTAKGPIAAGTSDHFTKPSPRADVFQRQRIPDSYARPLLTPAPLDSGPGPFKTPMQPPPSSQDPYGSVSQASRRLSVDPYERPALTPRPIDNFSHNQSNDPYSQPPLTPHPAVNESFAHPSRAFSQPGTISRPTSQDPYSQPPGTPRPVVDSYSQSSGTARSNTDPYSQPPGTPRPTTVDPYSQQPQTPRPSTQTDLFVTPVTNQRHSDPYAHPPGTPRPGISVPYSQPPATPRPRISEGFTRSSMTRPVLMPNQDPFLQAAQNRGPALPGPLVRPPDTCSQTPRPPGPGLSDTFSRVSPSAARDPYDQSPMTPRSQSDSFGTSQTAHDVADQPRPGSEGSFCASSNSPMHSQGQQFSGVSQLPGPVPTSGVTDTQNTVNMAQADTEKLRQRQKLREIILQQQQQKKIAGRQEKGSQDSPAVPHPGPLQHWQPENVNQAFTRPPPPYPGNIRSPVAPPLGPRYAVFPKDQRGPYPPDVASMGMRPHGFRFGFPGGSHGTMPSQERFLVPPQQIQGSGVSPQLRRSVSVDMPRPLNNSQMNNPVGLPQHFSPQSLPVQQHNILGQAYIELRHRAPDGRQRLPFSAPPGSVVEASSNLRHGNFIPRPDFPGPRHTDPMRRPPQGLPNQLPVHPDLEQVPPSQQEQGHSVHSSSMVMRTLNHPLGGEFSEAPLSTSVPSETTSDNLQITTQPSDGLEEKLDSDDPSVKELDVKDLEGVEVKDLDDEDLENLNLDTEDGKVVELDTLDNLETNDPNLDDLLRSGEFDIIAYTDPELDMGDKKSMFNEELDLPIDDKLDNQCVSVEPKKKEQENKTLVLSDKHSPQKKSTVTNEVKTEVLSPNSKVESKCETEKNDENKDNVDTPCSQASAHSDLNDGEKTSLHPCDPDLFEKRTNRETAGPSANVIQASTQLPAQDVINSCGITGSTPVLSSLLANEKSDNSDIRPSGSPPPPTLPASPSNHVSSLPPFIAPPGRVLDNAMNSNVTVVSRVNHVFSQGVQVNPGLIPGQSTVNHSLGTGKPATQTGPQTSQSGTSSMSGPQQLMIPQTLAQQNRERPLLLEEQPLLLQDLLDQERQEQQQQRQMQAMIRQRSEPFFPNIDFDAITDPIMKAKMVALKGINKVMAQNNLGMPPMVMSRFPFMGQVVTGTQNSEGQNLGPQAIPQDGSITHQISRPNPPNFGPGFVNDSQRKQYEEWLQETQQLLQMQQKYLEEQIGAHRKSKKALSAKQRTAKKAGREFPEEDAEQLKHVTEQQSMVQKQLEQIRKQQKEHAELIEDYRIKQQQQCAMAPPTMMPSVQPQPPLIPGATPPTMSQPTFPMVPQQLQHQQHTTVISGHTSPVRMPSLPGWQPNSAPAHLPLNPPRIQPPIAQLPIKTCTPAPGTVSNANPQSGPPPRVEFDDNNPFSESFQERERKERLREQQERQRIQLMQEVDRQRALQQRMEMEQHGMVGSEISSSRTSVSQIPFYSSDLPCDFMQPLGPLQQSPQHQQQMGQVLQQQNIQQGSINSPSTQTFMQTNERRQVGPPSFVPDSPSIPVGSPNFSSVKQGHGNLSGTSFQQSPVRPSFTPALPAAPPVANSSLPCGQDSTITHGHSYPGSTQSLIQLYSDIIPEEKGKKKRTRKKKRDDDAESTKAPSTPHSDITAPPTPGISETTSTPAVSTPSELPQQADQESVEPVGPSTPNMAAGQLCTELENKLPNSDFSQATPNQQTYANSEVDKLSMETPAKTEEIKLEKAETESCPGQEEPKLEEQNGSKVEGNAVACPVSSAQSPPHSAGAPAAKGDSGNELLKHLLKNKKSSSLLNQKPEGSICSEDDCTKDNKLVEKQNPAEGLVLATQSAVLGDPQHPHQQTLGAQMQGGFGCGNQLPKTDGGSETKKQRSKRTQRTGEKAAPRSKKRKKDEEEKQAMYSSTDTFTHLKQ

SEQ ID NO: 84528 - protein, 53 aa, Homo sapiens
TMIFVAIKCKRDNKEIRTYNCSQGPQQPDLIINGVPLPETENYSFDSNYVNSR

SEQ ID NO: 84529 - protein, 295 aa, Homo sapiens
MEGGGKPNSSSNSRDDGNSVFPAKASATGAGPAAAEKRLGTPPGGGGAGAKEHGNSVCFKVDGGGGGGGGGGGGEEPAGGFEDAEGPRRQYGFMQRQFTSMLQPGVNKFSLRMFGSQKAVEKEQERVKTAGFWIIHPYSDFRFYWDLIMLIMMVGNLVIIPVGITFFTEQTTTPWIIFNVASDTVFLLDLIMNFRTGTVNEDSSEIILDPKVIKMNYLKSWFVVDFISSIPVDYIFLIVEKGMDSEVYKTARALRIVRFTKILSLLRLLRLSRLIRYIHQWEEVRCIFFFFKSIS

SEQ ID NO: 84530 - protein, 264 aa, Homo sapiens
RKSAYKIVSGEAESVEVTPENLQDFVGKPVFTVERMYDVTPPGVVMGLAWTAMGGSTLFVETSLRRPQDKDAKGDKDGSLEVTGQLGEVMKESARIAYTFARAFLMQHAPANDYLVTSHIHLHVPEGATPKDGPSAGCTIVTALLSLAMGRPVRQNLAMTGEVSLTGKILPVGGIKEKTIAAQAGLTLTLPPGQARRGDVHRPASREQEGLLRPGSLHHRGPGGALRGTLPGDLRHRLPGRAGRGAGRGTVTATPGLQAADVRP

SEQ ID NO: 84531 - protein, 158 aa, Homo sapiens
MILNSLSLCYHNKLILAPMVRVGTLPMRLLALDYGADIVYCEELIDLKMIQCKRVVNEVLSTVDFVAPDDRVVFRTCEREQNRVVFQMGTSDAERALAVARLVENDVAGIDVNMGCPKQYSTKGGMGAALLSDPDKIEKILSTLVKGTRRPVTCKIRI

SEQ ID NO: 84532 - protein, 593 aa, Homo sapiens
MGQGLKAWPRYRVVGSADAGQYNLEITDAELSDDASYECQATEAALRSRRAKLTVLNPPTVTLSIEPQTVQEGERVVFTCQATANPEILGYRWAKGGFLIEDAHESRYETNVDYSFFTEPVSCEVHNKVGSTNVSTLVNVHFAPRIVVDPKPTTTDIGSDVTLTCVWVGNPPLTLTWTKKDSNMVLSNSNQLLLKSVTQADAGTYTCRAIVPRIGVAEREVPLYVNGPPIISSEAVQYAVRGDGGKVECFIGSTPPPDRIAWAWKENFLEVGTLERYTVERTNSGSGVLSTLTINNVMEADFQTHYNCTAWNSFGPGTAIIQLEEREVLPVGIIAGATIGASILLIFFFIALVFFLYRRRKGSRKDVTLRKLDIKVETVNREPLTMHSDREDDTASVSTATRVMKAIYSSFKDDVDLKQDLRCDTIDTREEYEMKDPTNGYYNVRAHEDRPSSRAVLYADYRAPGPARFDGRPSSRLSHSSGYAQLNTYSRGPASDYGPEPTPPGPAAPAGTDTTSQLSYENYEKFNSHPFPGAAGYPTYRLGYPQAPPSGLERTPYEAYDPIGKYATATRFSYTSQHSDYGQRFQQRMQTHV

SEQ ID NO: 84533 - protein, 116 aa, Homo sapiens
MYLWLKLLAFGFAFLDTEVFVTGQSPTPSPTGLTTAKMPSVPLSSDPLPTHTTAFSPASTFERENDFSETTTSLSPDNTSTQVSPDSLDNASAFNTTGVSSVQTPHLPTHADSQTP

SEQ ID NO: 84534 - protein, 52 aa, Homo sapiens
MAVFLEAKDAHSVLKRFPRANEFLEELRQGTIERECMEEICSYEEVKEVFEN

SEQ ID NO: 84535 - protein, 425 aa, Homo sapiens
MPERLAEMLLDLWTPLIILWITLPPCIYMAPMNQSQVLMSGSPLELNSLGEEQRILNRSKRGWVWNQMFVLEEFSGPEPILVGRLHTDLDPGSKKIKYILSGDGAGTIFQINDVTGDIHAIKRLDREEKAEYTLTAQAVDWETSKPLEPPSEFIIKVQDINDNAPEFLNGPYHATVPEMSILGTSVTNVTATDADDPVYGNSAKLVYSILEGQPYFSIEPETAIIKTALPNMDREAKEEYLVVIQAKDMGGHSGGLSGTTTLTVTLTDVNDNPPKFAQSLYHFSVPEDVVLGTAIGRVKANDQDIGENAQSSYDIIDGDGTALFEITSDAQAQDGIIRLRKPLDFETKKSYTLKVEAANVHIDPRFSGRGPFKDTATVKIVVEDADEPPVFSSPTYLLEVHENAALNSVIGQVTARDPDITSSPI

SEQ ID NO: 84536 - protein, 163 aa, Homo sapiens
MSAAPLVGYSSSGSEDESEDGMRTRPGDGSHRRGQSPLPRQRFPVPDSVLNMFPGTEEGPEDDSTKHGGRVRTFPHERGNWATHVYVPYEAKEEFLDLLDVLLPHAQTYVPRLVRMKVFHLSLSQSVVLRHHWILPFVQALKARMTSFHRCQKPMPEAQPKVA

SEQ ID NO: 84537 - protein, 226 aa, Homo sapiens
MELEKREKRSLLNKNLEEKLTSKSNDYLTLNAGSQQERDQAKLTCPSEVSGTILQEREFEANKLQGMQQSDLFKAEYVLIVDSEGEDEAASRKVEQGPPGGIGTAAVRPKSLAISSSLVSDVVRPKTQGTDLKTSSHPEMLHGMAPQQKHGQTPTTLPRAAGRETKYANLSSPSSTVSESQLTKPGVIRPVPVKSRILLKKEEEVYEPNPFSKYLEDNSDLFSEQQ

SEQ ID NO: 84538 - protein, 90 aa, Homo sapiens
MEQRGQNAPAASGARKRHGPGPREARGARPGPRVPKTLVLVVAAVLLLDTISQKTVEIASPANMDRTIALTGMTSFSACAAPGVIQVKWS

SEQ ID NO: 84539 - protein, 103 aa, Homo sapiens
MAPKGILGSFPTAMNLSLEGKVKETVHNAFWDHLKEQLSATPPDFSCALELLKEIKEILLSLLLPRQNRLRIEIEEALDMDLLKQEAEHGALKVLYLSKYVLN

SEQ ID NO: 84540 - protein, 43 aa, Homo sapiens
MASRRMETKPVITCLKTLLIIYSFVFWIHSHPKFTRTQPIKGS

SEQ ID NO: 84541 - protein, 249 aa, Homo sapiens
  MOD_RES (1)..(1): Any amino acid
XLLQEAKDGVLDLKAAADTLAVRQKRRIYDITNVLEGIDLIEKKSKNSIQWKGVGAGCNTKEVIDRLRYLKAEIEDLELKERELDQQKLWLQQSIKNVMDDSINNRFSYVTHEDICNCFNGDTLLAIQAPSGTQLEVPIPEMGQNGQKKYQINLKSHSGPIHVLLINKESSSSKPVVFPVPPPDDLTQPSSQSLTPVTPQKSSMATQNLPEQHVSERSQALQQTSATDISSAGSISGDIIDELMSSDGK

SEQ ID NO: 84542 - protein, 363 aa, Homo sapiens
MELLKLNRSVQGTGPGPGASLCRPGAPLLNSSSVGNLSCEPPRIRGAGTRGVSVSVSTLSLVAIALERYSAICRPLQARVWQTRSHAARVIVATWLLSGLLMVPYPVYTVVQPVGPRVLQCVHRWPSARVRQTWSVLLLLLLFFIPGVVMAVAYGLISRELYLGLRFDGDSDSDSQSRVRNQGGLPGAVHQNGRCRPETGAVGEDSDGCYVQLPRSRPALELTALTAPGPGSGSRPTQAKLLAKKRVVRMLLVIVVLFFLCWLPVYSANTWRAFDGPGAHRALSGAPISFIHLLSYASACVNPLVYCFMHRRFRQACLETCARCCPRPPRARPRALPDEDPPTPSIASLSRLSYTTISTLGPG

SEQ ID NO: 84543 - protein, 115 aa, Homo sapiens
MEGYPWWPCLVYNHPFDGTFIREKGKSVRVHVQFFDDSPTRGWVSKRLLKPYTGSKSKEAQKGGHFYSAKPEILRAMQRADEALNKDKIKRLELAVCDEPSEPEEEEEMEVGTTY

SEQ ID NO: 84544 - protein, 201 aa, Homo sapiens
MAQEVDTAQGAEMRRGAGAARGRASWCWALALLWLAVVPGWSRVSGIPSRRHWPVPYKRFDFRPKPDPYCQAKYTFCPTGSPIPVMEGDDDIEVFRLQAPVWEFKYGDLLGHLKIMHDAIGFRSTLTGKNYTMEWYELFQLGNCTFPHLRPEMDAPFWCNQGAACFFEGIDDVHWKENGTLVQVATISDLTPVQYPLRSLL

SEQ ID NO: 84545 - protein, 43 aa, Homo sapiens
MQWLNTMKELALGVRTSKTCLLFQDPCQLQQELELQKAWSEVV

SEQ ID NO: 84546 - protein, 309 aa, Homo sapiens
MLLILLSVALLALSSAQSLNEDVSQEESPSVISGKPEGRRPQGGNQPQRTPPPPGKPEGRPPQGGNQSQGPPPRPGKPEGPPPQGGNQSQGPPPRPGKPEGQPPQGGNQSQGPPPRPGKPEGPPPQGGNQSQGPPPRPGKPEGPPPQGGNQSQGPPPHPGKPEGPPPQGGNQSQGPPPRPGKPEGPPPQGGNQSQGPPPRPGKPEGPPPQGGNQSQGPPPRPGKPEGPPSQGGNKPQGPPPHPGKPQGPPPQEGNKPQRPPPPGRPQGPPPPGGNPQQPLPPPAGKPQGPPPPPQGGRPHRPPQGQPPQ

SEQ ID NO: 84547 - protein, 225 aa, Homo sapiens; identical to SEQ ID NO: 43850
  MOD_RES (1)..(1): Any amino acid

SEQ ID NO: 84548 - protein, 830 aa, Homo sapiens
MGQKGSSGLFRAVSAFGVVGFVRFLEGYYIVLITKRRKMADIGGHAIYKVEDTNMIYIPNDSVRVTHPDEARYLRIFQNVDLSSNFYFSYSYDLSHSLQYNLTVLRMPLEMLKSEMTQNRQESFDIFEDEGLITQGGSGVFGICSEPYMKYVWNGELLDIIKSTVHRDWLLYIIHGFCGQSKLLIYGRPVYVTLIARRSSKFAGTRFLKRGANCEGDVANEVETEQILCDASVMSFTAGSYSSYVQVRGSVPLYWSQDISTMMPKPPITLDQADPFAHVAALHFDQMFQRFGSPIIILNLVKEREKRKHERILSEELVAAVTYLNQFLPPEHTIVYIPWDMAKYTKSKLCNVLDRLNVIAESVVKKTGFFVNRPDSYCSILRPDEKWNELGGCVIPTGRLQTGILRTNCVDCLDRTNTAQFMVGKCALAYQLYSLGLIDKPNLQFDTDAVRLFEELYEDHGDTLSLQYGGSQLVHRVKTYRKIAPWTQHSKDIMQTLSRYYSNAFSDADRQDSINLFLGVFHPTEGKPHLWELPTDFYLHHKNTMRLLPTRRSYTYWWTPEVIKHLPLPYDEVICAVNLKKLIVKKFHKYEEEIDIHNEFFRPYELSSFDDTFCLAMTSSARDFMPKTVGIDPSPFTVRKPDETGKSVLGNKSNREEAVLQRKTAASAPPPPSEEAVSSSSEDDSGTDREEEGSVSQRSTPVKMTDAGDSAKVTENVVQPMKELYGINLSDGLSEEDFSIYSRFVQLGQSQHKQDKNSQQPCSRCSDGVIKLTPISAFSQDNIYEVQPPRVDRKSTEIFQAHIQASQGIMQPLGKEDSSMYREYIRNRYL

SEQ ID NO: 84549 - protein, 261 aa, Homo sapiens
  MOD_RES (1)..(1): Any amino acid
XRVMAPRALLLLLSGGLALTETWACSHSMRYFDTAVSRPGRGEPRFISVGYVDDTQFVRFDSDAASPRGEPRAPWVEQEGPEYWDRETQNYKRQAQADRVSLRNLRGYYNQSEDGSHTLQRMYGCDLGPDGRLLRGYDQSAYDGKDYIALNEDLRSWTAADTAAQITQRKLEAARAAEQLRAYLEGTCVEWLRRYLENGKETLQRAEPPKTHVTHHPLSDHEASRRWNLPEVGSCGGAFWTRAEIHVPYAARGAARAPHPE

SEQ ID NO: 84550 - protein, 597 aa, Homo sapiens
  MOD_RES (1)..(1): Any amino acid
XAPPVDVLRALRFPSLPDGVRRAKGICPADVAYRVARPAQLSAPTRQLFPGGFPKDFSLLTVVRTRPGLQAPLLTLYSAQGVRQLGLELGRPVRFLYEDQTGRPQPPSQPVFRGLSLADGKWHRVAVAVKGQSVTLIVDCKKRVTRPLPRSARPVLDTHGVIIFGARILDEEVFEGDVQELAIVPGVQAAYESCEQKELECEGGQRERPQNQQPHRAQRSPQQQPSRLHRPQNQEPQSQPTESLYYDYKPPYYDVMTTGTTPDYQDPTPGEEEEILESSLLPPLEEEQTDLQVPPTADRFQAEEYGEGGTDPPEGPYDYTYGYGDDYREETELGPALSAETAHSGAAAHGPRGLKGEKGEPAVLEPGMLVEGPPGPEGPAGLIGPPGIQGNPGPVGDPGERGPPGRAGLPGSDGAPGPPGTSLMLPFRFGSGGGDKGPVVAAQEAQAQAILQQARLALRGPPGPMGYTGRPGPLGQPGSPGLKGESGDLGPQGPRGPQGLTGPPGKAGRRGRAGADGARGMPGDPGVKGDRGFDGLPGLPGEKGHRGDTGAQGLPGPPGEDGERGDDGEIGPRGLPGESGPRGLLGPKGPPGIPGPP

SEQ ID NO: 84551 - protein, 308 aa, Homo sapiens
VSESVSAETVEKWLKRKNNKSEDESAPKEVSRYQDTNMQGVVYELNSYIEQRLDTGGDNQLLLYELSSIIKIATKADGFALYFLGECNNSLCIFTPPGIKEGKPRLIPAGPITQGTTVSAYVAKSRKTLLVEDILGDERFPRGTGLESGTRIQSVLCLPIVTAIGDLIGILELYRHWGKEAFCLSHQEVATANLAWASVAIHQVQVCRGLAKQTELNDFLLDVSKTYFDNIVAIDSLLEHIMIYAKNLVNADRCALFQVDHKNKELYSDLFDIGEEKEGKPVFKKTKEIRYADNTCHTVISFPPGPAS

SEQ ID NO: 84552 - protein, 54 aa, Homo sapiens
MSYALNHTNRKLTLEPKITVNAKIIVVGASSVGISFLETLVFWFPQRYSRILFF

SEQ ID NO: 84553 - protein, 239 aa, Homo sapiens
MDPKQTTLLCLVLCLGQRIQAQEGDFPMPFISAKSSPVIPLDGSVKIQCQAIREAYLTQLMIIKNSTYREIGRRLKFWNETDPEFVIDHMDANKAGRYQCQYRIGHYRFRYSNTLELVVTGLYGKPFLSADRGLVLMPGENISLTCSSAHIPFDRFSLAKEGELSLPQHQSGEHPANFSLGPVDLNVSGIYRCYGWYNRSPYLWSFPSNALELVVTGRYRPVQPCVWVGCPGPCHRAGI

SEQ ID NO: 84554 - protein, 57 aa, Homo sapiens
  MOD_RES (1)..(1): Any amino acid
XPSMVSAYMYPAGATGAQAAPQAPQSLPAISQPPQSSTMGYMGSQSVSMGYQPYNMQ

SEQ ID NO: 84555 - protein, 51 aa, Homo sapiens
MDGNLAFCLHGRTWPPFSSSLFHPRKQYLEEHRFSVVVVPSPFPCSEGCTD

SEQ ID NO: 84556 - protein, 180 aa, Homo sapiens
  MOD_RES (1)..(1): Any amino acid
XNTAASLQQWKVGDKCSAIWSEDGCIYPATIASIDFKRETCVVVYTGYGNREEQNLSDLLSPICEVANNIEQNAQENENESQVSTDESENSRSPGNKSDNIKPKSAPWNSFLPPPPPMPGPRLGPGKIIPPPPPICPDSLDDADALGSMLISWYMSGYHTGYYMGFRQNQKEGRCSHSLN

SEQ ID NO: 84557 - protein, 53 aa, Homo sapiens
SSQARHVNHSATEALGELRERAPGQGTNGFQLLRHAVKRDLLQPRTPPYQEMK

SEQ ID NO: 84558 - protein, 495 aa, Homo sapiens
  MOD_RES (1)..(1): Any amino acid
XDRINRLQAALASTQQFQQMFDELRTWLDDKQSQQAKNCPISAKLERLQSQLQENEEFQKSLNQHSGSYEVIVAEGESLLLSVPPGEEKRTLQNQLVELKNHWEELSKKTADRQSRLKDCMQKAQKYQWHVEDLVPWIEDCKAKMSELRVTLDPVQLESSLLRSKAMLNEVEKRRSLLEILNSAADILINSSEADEDGIRDEKAGINQNMDAVTEELQAKTGSLEEMTQRLREFQESFKNIEKKVEGAKHQLEIFDALGSQACSNKNLEKLRAQQEVLQALEPQVDYLRNFTQGLVEDAPDGSDASQLLHQAEVAQQEFLEVKQRVNSGCVMMENKLEGIGQFHCRVREMFSQLADLDDELDGMGAIGRDTDSLQSQIEDVRLFLNKIHVLKLDIEASEAECRHMLEEEGTLDLLGLKRELEALNKQCGKLTERGKARQEQLELTLGRVEDFYRKLKGLNDATTAAEEAEALQWVVGTEVEIINQQLADFKILWM

SEQ ID NO: 84559 - protein, 93 aa, Homo sapiens
MLKGGSKGPALLALRSGTDPRAQMSDDPAEGTLDPCSAPGLTDEKVKAYLSLHPQVLDEFVSESVSAETVEKWLKRKNNKSEVPRYEYAGSCI

SEQ ID NO: 84560 - protein, 24 aa, Homo sapiens
DEERDPLLHSFGHLKEVLNSITAL

SEQ ID NO: 84561 - protein, 21 aa, Homo sapiens
MAILSVRADFCQAQHSIFADK

SEQ ID NO: 84562 - protein, 849 aa, Homo sapiens
MPTAAAPIISSVQKLVLYETRARYFLVGSNNAETKYRVLKIDRTEPKDLVIIDDRHVYTQQEVRELLGRLDLGNRTKMGQKGSSGLFRAVSAFGVVGFVRFLEGYYIVLITKRRKMADIGGHAIYKVEDTNMIYIPNDSVRVTHPDEARYLRIFQNVDLSSNFYFSYSYDLSHSLQYNLTVLRMPLEMLKSEMTQNRQESFDIFEDEGLITQGGSGVFGICSEPYMKYVWNGELLDIIKSTVHRDWLLYIIHGFCGQSKLLIYGRPVYVTLIARRSSKFAGTRFLKRGANCEGDVANEVETEQILCDASVMSFTAGSYSSYVQVRGSVPLYWSQDISTMMPKPPITLDQADPFAHVAALHFDQMFQRFGSPIIILNLVKEREKRKHERILSEELVAAVTYLNQFLPPEHTIVYIPWDMAKYTKSKLCNVLDRLNVIAESVVKKTGFFVNRPDSYCSILRPDEKWNELGGCVIPTGRLQTGILRTNCVDCLDRTNTAQFMVGKCALAYQLYSLGLIDKPNLQFDTDAVRLFEELYEDHGDTLSLQYGGSQLVHRVKTYRKIAPWTQHSKDIMQTLSRYYSNAFSDADRQDSINLFLGVFHPTEGKPHLWELPTDFYLHHKNTMRLLPTRRSYTYWWTPEVIKHLPLPYDEVICAVNLKKLIVKKFHKYEEEIDIHNEFFRPYELSSFDDTFCLAMTSSARDFMPKTVGIDPSPFTVRKPDETGKSVLGNKSNREEAVLQRKTAASAPPPPSEEAVSSSSEDDSGTDREEEGSVSQRSTPVKMTDAGDSAKVTENVVQPMKELYGINLSDGLSEEDFSIYSRFVQLGQSQHKQDKNSQQPCSRCSDGVIKL

SEQ ID NO: 84563 - protein, 339 aa, Homo sapiens
  MOD_RES (1)..(1): Any amino acid
XTKGEKGAEGSPGLPGLLGQKGEKGDAGNSIGGGRGEPGPPGLPGPPGPKGEAGVDGQVGPPGQPGDKGERGAAGEQGPDGPKGSKGEPGKGEMVDYNGNINEALQEIRTLALMGPPGLPGQIGPPGAPGIPGQKGEIGLPGPPGHDGEKGPRGKPGDMGPPGPQGPPGKDGPPGVKGENGHPGSPGEKGEKGETGQAGSPGLQGVPGPKGEAGLDGAKGEKGFQGEKGDRGPLGLPGASGLDGRPGPPGTPGPIGVPGPAGPKGERGSKGDPGMTGPTGAAGLPGLHGPPGDKGNRGERGKKGSRGPKGDKGDQGAPGLDAPCPLGEDGLPVQGCWNK

SEQ ID NO: 84564 - protein, 47 aa, Homo sapiens
MSAHMSGLEIMDEDQLIKDVLDKFLNCHEQTYDEEFLNTFTHLSQGR

SEQ ID NO: 84565 - protein, 266 aa, Homo sapiens
MILNSLRYEEKATKDLERYNSQMKRAIEQESQMSLKDGRKKIKPTSAWNLAQKHKLKTSLSNQPKLDELLQSQIEKRRSQNIKMVQIPFSMKNLKINFKKQNKVDLEEKDEPCLIHNLRFPDAWLMTSKTEVMLLNPYRVEEALLFKRLLENHKLPAEPLEKPIMLTESLFNGSHYLDVLYKMTADDQRYSGSTYLSDPRLTANGFKIKLIPGVSITENYLEIEGMANCLPFYGVADLKEILNAILNRNAKEVYECRPRKVISYLE

SEQ ID NO: 84566 - protein, 70 aa, Homo sapiens
MVQLAPAAAMDEVTFRSDTVLSDVHLYTPNHRHLMVRLNSVGQPVFLSQFKLLWSQDSWTDSGAKGGSHR

SEQ ID NO: 84567 - protein, 105 aa, Homo sapiens
MHYDGHVRFDLPPQGSVLARNVSTRSCPPRTSPAVDLEEEEEESSVDGKGDRKSTGLKLSKKKARRRHTDDPSKECFTLKFDLNVDIETEIVPAMKKKSLGEVLL

SEQ ID NO: 84568 - protein, 137 aa, Homo sapiens
MASLQRKGLQARILTSEEEEKLKRDQTLVSDFKQQKLEQEAQKNWDLFYKRNSTNFFKDRHWTTREFEELRSCREQNPLYDTERCKVFQCDLTKDDLLDHVPPESVDVVMLIFVLSAVHPDKMHLVLQNIYKCHGCS

SEQ ID NO: 84569 - protein, 196 aa, Homo sapiens
MAEGGGPEPGEQERRSSGPRPPSARDLQLALAELYEDEVKCKSSKSNRPKATVFKSPRTPPQRFYSSEHEYSGLNIVRPSTGKIVNELFKEAREHGAVPLNEATRASGDDKSKSFTGGGYRLGSSFCKRSEYIYGENQLQDVQILLKLWSNGFSLDDGELRPYNEPTNAQFLESVKRGVTLIACMPEIQQLMLEIF

SEQ ID NO: 84570 - protein, 184 aa, Homo sapiens
MDGTEGSAGQPGPAERSHRSSVSSVGAREVQLKPKHQPYKLGRQWPELLLRFTSAPDDDVAMDEPFLQFRRNVFFPKRRELQIHDEEVLRLLYEEAKGNVLAARYPCDVEDCEALGALVCRVQLGPYQPGRPAACDLREKLDSFLPAHLCKRGQSLFAALRGRGARAGPGEQGLLNAYRQVQEV

SEQ ID NO: 84571 - protein, 58 aa, Homo sapiens
MQLKPMEINPEMLNKVLSRLGVAGQWRFVDVLGLEEESLGSVPAPACALLLLFPLTAQ

SEQ ID NO: 84572 - protein, 34 aa, Homo sapiens
ESIKHCIVLLQIAKDQSNAEKHADGMILYCVSLF

SEQ ID NO: 84573 - protein, 196 aa, Homo sapiens
  MOD_RES (1)..(1): Any amino acid
XFADVLVHRLLAAALGYRERLDMAPDTLQKQADHCNDRRMASKRVQELSTSLFFAVLVKESGPLESEAMVMGILKQAFDVLVLRYGVQKRIYCNALALRSHHFQKVGKKPELTLVWEPEDMEQEPAQQETKNPTSEIPQLGDPARPPSRASQSASPLVCSELPVTLLMPIRAQPGIALRGGKLHETKNKLRGEHRP

SEQ ID NO: 84574 - protein, 47 aa, Homo sapiens
MKEQGLLDAVTYLAGVSGSTWAISSLYTNDGDMEALEADLKHRFTRQ

SEQ ID NO: 84575 - protein, 84 aa, Homo sapiens
MGLPRGSFFWLLLLLTAACSGLLFALYFSAVQRYPGPAAGARARPADTCFTWPFSGTPTSVACSISPFQCCCGGTSSPQRSGTA

SEQ ID NO: 84576 - protein, 134 aa, Homo sapiens
MADKQISLPAKLINGGIAGLIGVTCVFPIDLAKTRLQNQQNGQRVYTSMSDCLIKTVRSEGYFGMYRGAAVNLTLVTPEKAIKLAANDFFRHQLSKDGQKLTLLKEMLAGCGAGTCQVIVTTPMEMLKIQLQDA

SEQ ID NO: 84577 - protein, 79 aa, Homo sapiens
MGAALGTGTRLAPWPGRACGALPRWTPTAPAQGCHSKPGPARPVPLKKRGYDVTRNPHLNKVMGQRAGRPALRSRGCRK

SEQ ID NO: 84578 - protein, 401 aa, Homo sapiens
MSVSARSAAAEERSVNSSTMGESGLGKSTLINSLFLTDLYSPEYPGPSHRIKKTVQVEQSKVLIKEGGVQLLLTIVDTPGFGDAVDNSNCWQPVIDYIDSKFEDYLNAESRVNRRQMPDNRVQCCLYFIAPSGHGLKPLDIEFMKRLHEKVNIIPLIAKADTLTPEECQQFKKQIMKEIQEHKIKIYEFPETDDEEENKLVKKIKDRLPLAVVGSNTIIEVNGKRVRGRQYPWGVAEVENGEHCDFTILRNMLIRTHMQDLKDVTNNVHYENYRSRKLAAVTYNGVDNNKNKGQLTKSPLAQMEEERREHVAKMKKMEMEMEQVFEMKVKEKVQKLKDSEAELQRRHEQMKKNLEAQHKELEEKRRQFEDEKANWEAQQRILEQQNSSRTLEKNKKKGKIF

SEQ ID NO: 84579 - protein, 297 aa, Homo sapiens
MLPWSPPRWGAGPEEAPEGPGLPAGKDQGEPWSAGADAPRELGTPPWDSPQPPSRSPSWIWREQLLLPHHLPGPATEQPPGAPDPRSPQVAWEVAPSRMTPLAPWDPKYEAKAGPRPVWGANCSSGASFSGRTLCHPSFWPLYEAASGRGLRPVAPATGHWNGQQAPPDAGFPVVCCEDVFLSDPLLPRGQRVPLYLSKAPQQMMGSLKLLPPPPIMSARVLPRPSPSRGPSTAWLSGPELIALTGLLQMSQGEPRPSSSAVGPPDHTSDPPSPCGSPSSSQGADLSLPQTPDTHCP

SEQ ID NO: 84580 - protein, 1046 aa, Homo sapiens
MTTESGSDSESKPDQEAEPQEAAGAQGRAGAPVPEPPKEEQQQALEQFAAAAAHSTPVRREVTDKEQEFAARAAKQLEYQQLEDDKLSQKSSSSKLSRSPLKIVKKPKSMQCKVILLDGSEYTCDVEKRSRGQVLFDKVCEHLNLLEKDYFGLTYRDAENQKDSEGVEIMLGVCASGLLIYRDRLRINRFAWPKVLKISYKRNNFYIKIRPGEFEQFESTIGFKLPNHRAAKRLWKVCVEHHTFFRLLLPEAPPKKFLTLGSKFRYSGRTQAQTRRASALIDRPAPYFERSSSKRYTMSRSLDGASVNENHEIYMKDSMSAAEVGTGQYATTKGISQTNLITTVTPEKKAEEERDEEEDKRRKGEEVTPISAIRHEGKTDSERTDTAADGETTATESDQEEDAELKAQELEKTQDDLMKHQTNISELKRTFLETSTDTAVTNEWEKRLSTSPVRLAARQEDAPMIEPLVPEETKEETEISEKVIFLQQGSAPFLESQGTEDWVIVDRIPTEVVDGDLKKIVTYKVVTVSSKTGDLPADMLKSGTIKMQSFEELAREMQLKEDSKQKIYTLGKSYDTVSGRIVTMTGKAKEGEKVEQPSTTEALQKMEKEIPESMKIIPGLAEYEVLETLADEKSKRGPEVQTTQRKLSESLAPIKEAESRRQSPEEDDLKKAPQLEKDVAVLPGLEGRRFSKTEQVPESEVLKVGLFGPRRKSLSEWRYSQEPAFTVATAHYVTESSASRVVTKQSSGEKLMDGSEIFSLLESARKPTEFIGGVTSTSQSWVQKMETKTESSGIETEPTVHHLPLSTEKVVQETVLVEERRVVHASGDASYSAGDSGDAAAQPAFTGIKGKEGSALTEGAKEEGGEEVAKAVLEQEETAAASRERQEEQSAAIHISETLEQKPHFESSTVKTETISFGSVSPGGVKLEISTKEVPVVHTETKTITYESSQVDPGTDLEPGVLMSAQTITSETTSTTTTTHITKTVKGGISETRIEKRIVITGDADIDHDQALAQAIKEAKEQHPDMSVTKVVVHKETEITPEDGED

SEQ ID NO: 84581 - protein, 95 aa, Homo sapiens
MRKSSSPSLSNCNSVLANKIFGIPLDELQQGGHPDNEVPFIVRHVVDYIEEHGGLEQQGLFQVNGNAETVEWLRQRYDSGEEVDLVKEADVPSAI

SEQ ID NO: 84582 - protein, 410 aa, Homo sapiens
MAAGRAQVPSSEQAWLEDAQVFIQKTLCPAVKEPNVQLTPLVIDCVKTVWLSQGRNQGSTLPLSYSFVSVQDLKTHQRLPCCSHLSWSSSAYQAWAQEAGPNGNPLPREQLLLLGTLTDLSADLEQECRNGSLYVRDNTGVLSCELIDLDLSWLGHLFLFPRWSYLPPARWNSSGEGHLELWDAPVPVFPLTISPGPVTPIPVLYPESASCLLRLRNKLRGVQRNLAGSLVRLSALVKSKQKAYFILSLGRSHPAVTHVSIIVQVPAQLVWHRALRPGTAYVLTELRVSKIRGQRQHVWMTSQSSRLLLLKPECVQELELELEGPLLEADPKPLPMPSNSEDKKDPESLVRSRMFTCSSQWEGGQEGQCSPPASVAPFCFKASLVRSLGLTHPVKPTGPPCTSSWCGNVS

SEQ ID NO: 84583 - protein, 972 aa, Homo sapiens
MRYRLAWLLHPALPSTFRSVLGARLPPPERLCGFQKKTYSKMNNPAIKRIGNHITKSPEDKREYRGLELANGIKVLLISDPTTDKSSAALDVHIGSLSDPPNIAGLSHFCEHMLFLGTKKYPKENEYSQFLSEHAGSSNAFTSGEHTNYYFDVSHEHLEGALDRFAQFFLCPLFDESCKDREVNAVDSEHEKNVMNDAWRLFQLEKATGNPKHPFSKFGTGNKYTLETRPNQEGIDVRQELLKFHSAYYSSNLMAVCVLGRESLDDLTNLVVKLFSEVENKNVPLPEFPEHPFQEEHLKQLYKIVPIKDIRNLYVTFPIPDLQKYYKSNPGHYLGHLIGHEGPGSLLSELKSKGWVNTLVGGQKEGARGFMFFIINVDLTEEGLLHVEDIILHMFQYIQKLRAEGPQEWVFQECKDLNAVAFRFKDKERPRGYTSKIAGILHYYPLEEVLTAEYLLEEFRPDLIEMVLDKLRPENVRVAIVSKSFEGKTDRTEEWYGTQYKQEAIPDEVIKKWQNADLNGKFKLPTKNEFIPTNFEILPLEKEATPYPALIKDTAMSKLWFKQDDKFFLPKACLNFEFFSPFAYVDPLHCNMAYLYLELLKDSLNEYAYAAELAGLSYDLQNTIYGMYLSVKGYNDKQPILLKKIIEKMATFEIDEKRFEIIKEAYMRSLNNFRAEQPHQHAMYYLRLLMTEVAWTKDELKEALDDVTLPRLKAFIPQLLSRLHIEALLHGNITKQAALGIMQMVEDTLIEHAHTKPLLPSQLVRYREVQLPDRGWFVYQQRNEVHNNCGIEIYYQTDMQSTSENMFLELFCQIISEPCFNTLRTKEQLGYIVFSGPRRANGIQGLRFIIQSEKPPHYLESRVEAFLITMEKSIEDMTEEAFQKHIQALAIRRLDKPKKLSAECAKYWGEIISQQYNFDRDNTEVAYLKTLTKEDIIKFYKPEVIQNMTEFKRGLPLFPLVKPHINFMAAKL

SEQ ID NO: 84584 - protein, 303 aa, Homo sapiens
MAYRRDEMWSEGRYEYERIPRERAPPRSHPSDESGYRWTRDDHSASRQPEYRDMRDGFRRKSFYSSHYARERSPYKRDNTFFRESPVGRKDSPHSRSGSSVSSRSYSPERSKSYSFHQSQHRNKERPVQSLKTSRDTSPSSGSAVSSSKVLDKPSRLTEKELAEAASKWAAEKLEKSDESNLPEISEYEAGSTAPLFTDQPEEPESNTTHGIELFEDSQLTTRSKAIASKTKEIEQVYRQDCETFGMVVKMLIEKDPSLEKSIQFALRQNLHEIAGADTIQCLPGQRGFEGTSWPHNKMHSVS

SEQ ID NO: 84585 - protein, 299 aa, Homo sapiens
MVVSAGPLSSEKAEMNILEINEKLRPQLAEKKQQFRNLKEKCFLTQLSGFLANQQKKYKYEECKDLIKFMLRNERQFKEEKLAEQLKQAEELRQYKVLVHAQERELTQLREKLREGRDASRSLNEHLQALLTPDEPDKSQGQDLQEQLAEGCRLAQHLVQKLSPENDNDDDEDVQVEVAEKVQKSSAPREMQKAEEKEVPEDSLEECAITYSNSHGSYDSNQPHRKTKITFEEDKVDSTLIGSSSHVEWEDAVHIIPENESDDEEEEEKGPVSPRTSVGSSEKGGPRGNRSQAQQGAAG

SEQ ID NO: 84586 - protein, 87 aa, Homo sapiens
MAQNLKDLAGRLPAGPRGMGTALKLLLGAGAVAYGVRESVFTVEGGHRAIFFNRIGGVQQDTILAEGLHFRSPHHRIVSISQLTTLC

SEQ ID NO: 84587 - protein, 278 aa, Homo sapiens
MTKKRIAVIGGGVSGLSSIKCCVEEGLEPVCFERTDDIGGLWRFQENPEEGRASIYKSVIINTSKEMMCFSDYPIPDHYPNFMHNAQVLEYFRMYAKEFDLLKYIRFKTTVCSVKKQPDFATSGQWEVVTESEGKKEMNVFDGVMVCTGHHTNAHLPLESFPGIEKFKGQYFHSRDYKNPEGFTGKRVIIIGIGNSGGDLAVEISQTAKQVFLSTRRGAWILNRVGDYGYPADVLFSSRLTHFIWKICGQSLANKYLEKKINQRFDHEMFGLKPKHRL

SEQ ID NO: 84588 - protein, 81 aa, Homo sapiens
MAAAAAAGPSPGSGPGDSPEGPEGEAPERRRKAHGMLKLYYGLSEGEAAGRPAGPDPLDPTDLNGAHFDPEVYLDKTPSGR

SEQ ID NO: 84589 - protein, 287 aa, Homo sapiens
MGSAVMDTKKKKDVSSPGGSGGKKNASQKRRSLRVHIPDLSSFAMPLLDGDLEGSGKHSSRKVDSPFGPGSPSKGFFSRGPQPRPSSPMSAPVRPKTSPGSPKTVFPFSYQESPPRSPRRMSFSGIFRSSSKESSPNSNPATSPGGIRFFSRSRKTSGLSSSPSTPTQVTKQHTFPLESYKHEPERLENRIYASSSPPDTGQRFCPSSFQSPTRPPLASPTHYAPSKAAALAAALGPAEAGMLEKLEFEDEVEDSESGVYMRFMRSHKCYDIVPTSSKLVVFDTTLQ

SEQ ID NO: 84590 - protein, 423 aa, Homo sapiens
MAEAVFHAPKRKRRVYETYESPLPIPFGQDHGPLKEFKIFRAEMINNNVIVRNAEDIEQLYGKGYFGKGILSRSRPSFTISDPKLVAKWKDMKTNMPIITSKRYQHSVEWAAELMRRQGQDESTVRRILKDYTKPLEHPPVKRNEEAQVHDKLNSGMVSNMEGTAGGERPSVVNGDSGKSGGVGDPREPLGCLQEGSGCHPTTESFEKSVREDASPLPHVCCCKQDALILQRGLHHEDGSQHIGLLHPGDRGPDHEYVLVEEAECAMSEREAAPNEELVQRNRLICRRNPYRIFEYLQLSLEEAFFLVYALGCLSIYYEKEPLTIVKLWKAFTVVQPTFRTTYMAYHYFRSKGWVPKVGLKYGTDLLLYRKGPPFYHASYSVIIELVDDHFEGSLRRPLSWKSLAALSRVSVNVSKKTMLKFI

SEQ ID NO: 84591 - protein, 66 aa, Homo sapiens
MDFENQDKEKDSNSSSGSFNGNSTNNSIQTIDSTQALFLPIGASVSLLVMFFFFDSVQVVFTICTA

SEQ ID NO: 84592 - protein, 52 aa, Homo sapiens
TGRAGGPGTGARRETPLTRGKEVAGGQARWNWGGGAQDVHGGDHPAHTAAGQ

SEQ ID NO: 84593 - protein, 437 aa, Homo sapiens
MQPAEEGPSVPKIYKQRSPYSVLKTFPSKRPALAKRYERPTLVELPHVRAPPPPPPPFAPHAAVSISSSEPPPQQFQAQSSYPPGPGRAAAAASSSSPSCTPATSQGHLRTPAQPPPASPAASSSSSFAAVVRYGPGAAAAAGTGGTGSDSASLELSAESRMILDAFAQQCSRVLSLLNCGGKLLDSNHSQSMISCVKQEGSSYNERQEHCHIGKGVHSQTSDNVDIEMQYMQRKQQTSAFLRVFTDSLQNYLLSGSFPTPNPSSASEYGHLADVDPLSTSPVHTLGGWTSPATSESHGHPSSSTLPEEEEEEDEEGYCPRCQELEQEVISLQQENEELRRKLESIPVPCQTVLDYLKMVLQHHNQLLIPQPADQPTEGSKQLLNNYPVYITSKQWDEAVNSSKKDGRRLLRYLIRFVFTTDELKYSCGLGKRKRIH

SEQ ID NO: 84594 - protein, 95 aa, Homo sapiens
  MOD_RES (1)..(1): Any amino acid
XFFHRLYDEDIVRDSGHIVKCLDSFCDPFLISDELRRVLLVEDSEKYEIFSQPDREEFLFCLFKHLCLGGALCQYEDVISPYLETTKLIYKDLVR

SEQ ID NO: 84595 - protein, 10 aa, Homo sapiens
  MOD_RES (1)..(1): Any amino acid
XIFFFSDKLT

SEQ ID NO: 84596 - protein, 198 aa, Homo sapiens
  MOD_RES (1)..(1): Any amino acid
XSRVEAMRLGPGWSHSCHAMLYAANPGQLFGRIPMRFSVLMRFDGLLGFPGGFVDRRFWSLEDGLNRVLGLGLGCLRLTEADYLSSHLTEGPHRVVAHLYARQLTLEQLHAVEISAVHSRDHGLEVLGLVRVPLYTQKDRVGGFPNFLSNAFVSTAKCQLLFALKVLNMMPEEKLVEALAAATEKQKKALEKLLPASS

SEQ ID NO: 84597 - protein, 112 aa, Homo sapiens
MPEQSNDYRVAVFGAGGVGKSSLVLRFVKGTFRESYIPTVEDTYRQVISCDKSICTLQITDTTGSHQFPAMQRLSISKGHAFILVYSITSRQSLEELKPIYEQICEIKGDVE

SEQ ID NO: 84598 - protein, 140 aa, Homo sapiens
  MOD_RES (1)..(1): Any amino acid
XFHTIPVIQRAGGAVLTKATVQSVLLDSAGKACGVSVKKGHELVNIYCPIVVSNAGLFNTYEHLLPGNARCLPGKRRVCTAPLAGSPMCPLLEPTCSVWVMLLLFLAGPLIVLKQQGENATSNIILTLAFNVGETEAHTD

SEQ ID NO: 84599 - protein, 134 aa, Homo sapiens
IYRPCLLLAARATRYFLGISSLQLPVVAFLVAFHQNKQLIGDRGLLPCRVFLKNFQQYFQDRTSWEVFSYMPTILWLMDWSDMNSNLDLLALLGLGISSFVLITGCANMLLMAALWGLYMSLVNVGHVWYSFGK

SEQ ID NO: 84600 - protein, 29 aa, Homo sapiens
MAKNRRDRNSWGGFSEKTYEWSSEEEEPV

SEQ ID NO: 84601 - protein, 56 aa, Homo sapiens
MAQGLVTFRDVAIEFSLEEWKCLEPAQRDLYREVTLENFGHLASLGLSISKPDVVS

SEQ ID NO: 84602 - protein, 211 aa, Homo sapiens
MLRGNQQMHRKTASLNSPVSCKEKPDRVEEPPDYSLHWPEGLKGEEIKKCGREGITLNKYNQQYHKLFKDVPLEEVVLKVCSCALQRDFLLQGRLYISPNWLCFHASLFGKDIKVVIPVVSVQMIKKHKMARLLPNGLAITTNTSQKYIFVSLLSRDSVYDLLRRVCTHLQPSSKKSLSVREFSGEPESLEVLIPEMKWRKVCPSSRSLSL

SEQ ID NO: 84603 - protein, 110 aa, Homo sapiens
MRKKQLKTEAAPHCELKSYSKNSATQVSTMVLGPEQKMSDDSVSGDHGESASLGNINPAYSNPSLSQSPGDSEEYFATYFNEKISIPEEEYSCFSFRKLWAFTGPGFLMS

SEQ ID NO: 84604 - protein, 1361 aa, Homo sapiens
  MOD_RES (1)..(1): Any amino acid
XNQFTCQNGRCISKTFVCDEDNDCGDGSDELMHLCHTPEPTCPPHEFKCDNGRCIEMMKLCNHLDDCLDNSDEKGCGINECHDPSISGCDHNCTDTLTSFYCSCRPGYKLMSDKRTCVDIDECTEMPFVCSQKCENVIGSYICKCAPGYLREPDGKTCRQNSNIEPYLIFSNRYYLRNLTIDGYFYSLILEGLDNVVALDFDRVEKRLYWIDTQRQVIERMFLNKTNKETIINHRLPAAESLAVDWVSRKLYWLDARLDGLFVSDLNGGHRRMLAQHCVDANNTFCFDNPRGLALHPQYGYLYWADWGHRAYIGRVGMDGTNKSVIISTKLEWPNGITIDYTNDLLYWADAHLGYIEYSDLEGHHRHTVYDGALPHPFAITIFEDTIYWTDWNTRTVEKGNKYDGSNRQTLVNTTHRPFDIHVYHPYRQPIVSNPCGTNNGGCSHLCLIKPGGKGFTCECPDDFRTLQLSGSTYCMPMCSSTQFLCANNEKCIPIWWKCDGQKDCSDGSDELALCPQRFCRLGQFQCSDGNCTSPQTLCNAHQNCPDGSDEDRLLCENHHCDSNEWQCANKRCIPESWQCDTFNDCEDNSDEDSSHCASRTCRPGQFRCANGRCIPQAWKCDVDNDCGDHSDEPIEECMSSAHLCDNFTEFSCKTNYRCIPKWAVCNGVDDCRDNSDEQGCEERTCHPVGDFRCKNHHCIPLRWQCDGQNDCGDNSDEENCAPRECTESEFRCVNQQCIPSRWICDHYNDCGDNSDERDCEMRTCHPEYFQCTSGHCVHSELKCDGSADCLDASDEADCPTRFPDGAYCQATMFECKNHVCIPPYWKCDGDDDCGDGSDEELHLCLDVPCNSPNRFRCDNNRCIYSHEVCNGVDDCGDGTDETEEHCRKPTPKPCTEYEYKCGNGHCIPHDNVCDDADDCGDWSDELGCNKGKERTCAENICEQNCTQLNEGGFICSCTAGFETNVFDRTSCLDINECEQFGTCPQHCRNTKGSYECVCADGFTSMSDRPGKRCAAEGSSPLLLLPDNVRIRKYNLSSERFSEYLQDEEYIQAVDYDWDPKDIGLSVVYYTVRGEGSRFGAIKRAYIPNFESGRNNLVQEVDLKLKYVMQPDGIAVDWVGRHIYWSDVKNKRIEVAKLDGRYRKWLISTDLDQPAAIAVNPKLGLMFWTDWGKEPKIESAWMNGEDRNILVFEDLGWPTGLSIDYLNNDRIYWSDFKEDVIETIKYDGTDRRVIAKEAMNPYSLDIFEDQLYWISKEKGEVWKQNKFGQGKKEKTLVVNPWLTQVRIFHQLRYNKSVPNLCKQICSHLCLLRPGGYSCACPQGSSFIEGSTTECDAGVLAATPENIVKWRFQKASLQEQPQ

SEQ ID NO: 84605 - protein, 285 aa, Homo sapiens
MQKHYTVAWFLYSAPGVDPSPPCRSLGWKRKKEWSDESEEEPEKELAPEPEETWVVEMLCGLKMKLKQQRVSPILPEHHKDFNSQLAPGVDPSPPHRSFCWKRKREWWDESEESLEEEPRKVLAPEPEEIWVVEMLCGLKMKLKRRRVSLVLPEHHEAFNRLLEDPVIKRFLAWDKDLRVSDKYLLAMVIAYFSRAGLPSWQYQRIHFFLALYLANDMEEDDEDPKQNIFYFLKNRSQIALFQKLRFQFFCSMSGRAWVSREELEEIQAYDPEHWVWARDRARLS

SEQ ID NO: 84606 - protein, 81 aa, Homo sapiens
MIYACVPLVEQTLSPRPPLISVSGVSQGFEFLFGIQDFLYSGQKNDSELNTKLSQLPDLLLQACPFGTLLDANLQNSLDNT

SEQ ID NO: 84607 - protein, 123 aa, Homo sapiens
  MOD_RES (1)..(1): Any amino acid
XPSSTYIRQLESKVRLLEGDKLLAQQAGSGEFRTLRKGFSPYHSESQLASLPPSYQDSLQNVLEVHENLDRQLQDSCEEDLSEKEKAIVREMCNVVWRKLGDAASSKPSIRQHLSGNQFKGPL

SEQ ID NO: 84608 - protein, 193 aa, Homo sapiens
MHHYQSGRTRALSTHLRSPAAGRSPCWAWEESQPRRGQSRGPGLTEWTQLRGSPSARVLPVVQENSPAQQAGLEPYFDFIITIGHSRLNKENDTLKALLKANVEKPVKLEVFNMKTMRVREVEVVPSNMWGGQGLLGASVRFCSFRRASEQVWHVLDVEPSSPAALAGLRPYTDYVVGSDQILQESEDFFTLI

SEQ ID NO: 84609 - protein, 357 aa, Homo sapiens
MGLSRKSSDASACSSSEISDFVKEFLAKAKEDFLKKWENPTQNNAGLEDFERKKTLGTGSFGRVMLVKHKATEQYYAMKILDKQKVVKLKQIEHTLNEKRILQAVNFPFLVRLEYAFKDNSNLYMVMEYVPGGEMFSHLRRIGRFSEPHARFYAAQIVLTFEYLHSLDLIYRDLKPENLLIDHQGYIQVTDFGFAKRVKGRTWTLCGTPEYLAPEIILSKGYNKAVDWWALGVLIYEMAAGYPPFFADQPIQIYEKIVSGKVRFPSHFSSDLKDLLRNLLQVDLTKRFGNLKNGVSDIKTHKWFATTDWIAIYQRKVEAPFIPKFRGSGDTSNFDDYEEEDIRVSITEKCAKEFGEF

SEQ ID NO: 84610 - protein, 668 aa, Homo sapiens
MGNGMCSRKQKRIFQTLLLLTVVFGFLYGAMLYYELQTQLRKAEAVALKYQQHQESLSAQLQVVYEHRSRLEKSLQKERLEHKKAKEDFLVYKLEAQETLNKGRQDSNSRYSALNVQHQMLKSQHEELKKQHSDLEEEHRKQGEDFSRTFNDHKQKYLQLQQEKEQELSKLKETVYNLREENRQLRKAHQDIHTQLQDVKTQVAEYKQLKDTLNRIPSLRKPDPAEQQNVTQVAHSPQGYNTAREKPTREVQEVSRNNDVWQNHEAVPGRAEDTKLYAPTHKEAEFQAPPEPIQQEVERREPEEHQVEEEHRKALEEEEMEQVGQAEHLEEEHDPSPEEQDREWKEQHEQREAANLLEGHARAEVYPSAKPMIKFQSPYEEQLEQQRLAVQQVEEAQQLREHQEALHQQRLQGHLLRQQEQQQQQVAREMALQRQAELEEGRPQHQEQLRQQAHYDAMDNDIVQGAEDQGIQGEEGAYERDNQHQDEAEGDPGNRHEPREQGPREADPESEADRAAVEDINPADDPNNQGEDEFEEAEQVREENLPDENEEQKQSNQKQENTEVEEHLVMAGNPDQQEDNVDEQYQEEAEEEVQEDLTEEKKRELEHNAEETYGENDENTDDKNNDGEEQEVRDDNRPKGREEHYEEEEEEEEDGAAVAEKSHRRAEM

SEQ ID NO: 84611 - protein, 123 aa, Homo sapiens
MEVLRPQLIRIDGRNYRKNPVQEQTYQHEEDEEDFYQGSMECADEPCDAYEVEQTPQGFRSTLRAPSLLYKHIVGKRGDTRKKIEMETKTSISIPKPGQDGEIVITGQHRNGVISARTRIDVL

SEQ ID NO: 84612 - protein, 108 aa, Homo sapiens
MLTMSVTLSPLRSQDLDPMATDASPMAINMTPTVEQGEGEEAMKDMDSDQQYEKPPPLHTGADWKIVLHLPEIETWLRMTSERVRDLTYSVQQDSDSKHVDVHLVQLK

SEQ ID NO: 84613 - protein, 595 aa, Homo sapiens
MILAPEGSSSGKLRIPAAQERDAGTYTCRAVNELGDASAEIQLAVGHAPQLTELPRDVTVELGRSALLACRATGRPPPTVTWRRGDGQPLGLRLGAGRGSRSRQPDSGVLFFESVAPEDQAPYVCEARNVFGKVQAEARLIVTGHAPPQIASSAPTVRVLEGQPVSLPCIVLAGRPLPERHWLKDGRPLPPGSRHSIRADGSLHLDRALQEHAGRYSCVATNTAGSQHRDVELVVQVPPRIHPTATHHITNEGVAASLPCVASGVPAPTITWTKETNALTSRGPHYNVSKEGTLLIAQPSAQDAGAYVCTATNTVGFSSQEMRLSVNTKPRIHMNGSRNADVPLQVTAKAGEEVTLDCEAKGSPPPLVTWTKDSRPVPPITNRYGLLPSGSLRLAQVQVGDSGHYECTASNPAGSASHRYVLGVQGRTSWQPQSLPVPHHPACLSGLSVPLLQPTPRSVRLCHLSLRAPLPPPFATPTSCLSQACLSSSTLSLHLSPYPLRGPGDAVQRPPTTQGRAQWGLGFGRTGVRGEPMKVGLRGSLPGTRGPAGSPGCGDGKRPVRCHRAPPAGSILMPPRGPSEPLLPPLPSTRHFVHL

SEQ ID NO: 84614 - protein, 262 aa, Homo sapiens
MRGGPRCLRRRGGPYKTEPATDLGRWRLNCERGRQTWTYLQDERAGREQTGLEAYALGLDTKNYFKDLPKAHTAFEGALNGMTFYVGLQAEDGHWTGDYGGPLFLLPGLLITCHVARIPLPAGYREEIVRYLRSVQLPDGGWGLHIEDKSTVFGTALNYVSLRILGVGPDDPDLVRARNILHKKGGAVAIPSWGKFWLAVLNVYSWEGLNTLFPEMWLFPDWAPAHPSTLWCHCRQVYLPMSYCYAVRLSAAEDPLVQSLRQ

SEQ ID NO: 84615 - protein, 69 aa, Homo sapiens
MAAPTPARPVLTHLLVALFGMGSWAAVNGIWVELPVVVKELPEGWSLPSYVSVLVALGNLGLLVVTLWR

SEQ ID NO: 84616 - protein, 311 aa, Homo sapiens
  MOD_RES (1)..(1): Any amino acid
XHLKHLAIAQELNDRIGEGRACWSLGNAYTALGNHDQAMHFAEKHLEISREVGDKSGELTARLNLSDLQMVLGLSYSTNNSIMSENTEIDSSLNGVRPKLGRRHSMENMELMKLTPEKVQNWNSEILAKQKPLIAKPSAKLLFVNRLKGKKYKTNSSTKVLQDASNSIDHRIPNSQRKISADTIGDEGFFDLLSRFQSNRMDDQRCCLQEKNCHTASTTTSSTPPKMMLKTSSVPVVSPNTDEFLDLLASSQSRRLDDQRASFSNLPGLRLTQNSQSVLSHLMTNDNKEADEDFFDILVKCQENGIQGREW

SEQ ID NO: 84617 - protein, 49 aa, Homo sapiens
MTRGFAPILPVEFHKMGSFRRPRPRFMSSPVLSDLPRFQAARQALQLSS

SEQ ID NO: 84618 - protein, 236 aa, Homo sapiens
MMVVLLGATTLVLVAVAPWVLSAAAGGKNLKSPQKVEVDIIDDNFILRWNRSDESVGNVTFSFDYQKTGMDNWIKLSGCQNITSTKCNFSSLKLNVYEEIKLRIRAEKENTSSWYEVDSFTPFRKAQIGPPEVHLEAEDKAIVIHISPGTKDSVMWALDGLSFTYSLVIWKNSSGVEERIENIYSRHKIYKLSPETTYCLKVKAALLTSWKIGVYSPVHCIKTTVCILGGRGRWIT

SEQ ID NO: 84619 - protein, 192 aa, Homo sapiens
MLMGEVMREAAFSLAEAKFTAGDFSTTVIQNVNKAQVKIRAKKDNVAGVTLPVFEHYHEGTDSYELTGLARGGEQLAKLKRNYAKAVELLVELASLQTSFVTLDEAIKITNRRVNAIEHVIIPRIERTLAYIITELDEREREEFYRLKKIQEKKKILKEKSEKDLEQRRAAGEVLEPANLLAEEKDEDLLFE

SEQ ID NO: 84620 - protein, 221 aa, Homo sapiens
MHVKEAGLFGLVNNAGVAGIIGPTPWLTRDDFQRVLNVNTMGPIGVTLALLPLLQQARGRVINITSVLGRLAANGGGYCVSKFGLEAFSDSLRRDVAHFGIRVSIVEPGFFRTPVTNLESLEKTLQACWARLPPATQAHYGGAFLTKYLKMQQRIMNLICDPDLTKVSRCLEHALTARHPRTRYSPGWDAKLLWLPASYLPASLVDAVLTWVLPKPAQAVY

SEQ ID NO: 84621 - protein, 48 aa, Homo sapiens
MEDLFETFQDEMGFSNMEDDGPEEEERVAEPQANFNTPQALRQLLLLM

SEQ ID NO: 84622 - protein, 117 aa, Homo sapiens
MTSSPVSRVVYNGKRTSSPRSPPSSSEIFTPAHEENVRFIYEAWQGVERDLRGQVPGGERGLVEEYVEKVPNPSLKSEWGLTWGQGWAGRPGLMGRRGLCPPPTALSPGSLQAHRPE

SEQ ID NO: 84623 - protein, 71 aa, Homo sapiens
  MOD_RES (1)..(1): Any amino acid
XFAEPLTMPGYGGAASAGASVFGASGLDNQPPEEIVAIITSMGFQRNQAIQALRATHMSYLHSSVTWEHPQ

SEQ ID NO: 84624 - protein, 629 aa, Homo sapiens
MAEAAAAAGGTGLGAGASYGSAADRDRDPDPDRAGRRLRVLSGHLLGRPREALSTNECKARRAASAATAAPTATPAAQESGTIPKKRQEVMKWNGWGYNDSKFIFNKKGQIELTGKRYPLSGMGLPTFKEWIQNTLGVNVEHKTTSKASLNPSDTPPSVVNEDFLHDLKETNISYSQEADDRVFRAHGHCLHEIFLLREGMFERIPDIVLWPTCHDDVVKIVNLACKYNLCIIPIGGGTSVSYGLMCPADETRTIISLDTSQMNRILWVDENNLTAHVEAGITGQELERQLKESGYCTGHEPDSLEFSTVGGWVSTRASGMKKNIYGNIEDLVVHIKMVTPRGIIEKSCQGPRMSTGPDIHHFIMGSEGTLGVITEATIKIRPVPEYQKYGSVAFPNFEQGVACLREIAKQRCAPASIRLMDNKQFQFGHALKPQVSSIFTSFLDGLKKFYITKFKGFDPNQLSVATLLFEGDREKVLQHEKQVYDIAAKFGGLAAGEDNGQRGYLLTYVIAYIRDLALEYYVLGESFETSAPWDRVVDLCRNVKERITRECKEKGVQFAPFSTCRVTQTYDAGACIYFYFAFNYRGISDPLTVFEQTEAAAREEILANGGSLSHHHGGLQLEGTCYES

SEQ ID NO: 84625 - protein, 52 aa, Homo sapiens
GPEASDRRAPGGTYLLGPGTEPTLKCSLPLPIFCALSACSTSPYCVLSHIVL

SEQ ID NO: 84626 - protein, 159 aa, Homo sapiens
MTPQSLLQTTLFLLSLLFLVQGAHGRGHREDFRFCSQRNQTHRSSLHYKPTPDLRISIENSEEALTVHAPFPAAHPASRSFPDPRGLYHFCLYWNRHAGRLHLLYGKRDFLLSDKASSLLCFQHQEESLAQGPPLLATSVTSWWSPQNISLPSAASFTF

SEQ ID NO: 84627 - protein, 217 aa, Homo sapiens [sequence omitted]

SEQ ID NO: 84628 - protein, 600 aa, Homo sapiens
MTMYLWLKLLAFGFAFLDTEVFVTGQSPTPSPTGVSSVQTPHLPTHADSQTPSAGTDTQTFSGSAANAKLNPTPGSNAISDAYLNASETTTLSPSGSAVISTTTIATTPSKPTCDEKYANITVDYLYNKETKLFTAKLNVNENVECGNNTCTNNEVHNLTECKNASVSISHNSCTAPDKTLILDVPPGVEKFQLHDCTQVEKADTTICLKWKNIETFTCDTQNITYRFQCGNMIFDNKEIKLENLEPEHEYKCDSEILYNNHKFTNASKIIKTDFGSPGEPQIIFCRSEAAHQGVITWNPPQRSFHNFTLCYIKETEKDCLNLDKNLIKYDLQNLKPYTKYVLSLHAYIIAKVQRNGSAAMCHFTTKSAPPSQVWNMTVSMTSDNSMHVKCRPPRDRNGPHERYHLEVEAGNTLVRNESHKNCDFRVKDLQYSTDYTFKAYFHNGDYPGEPFILHHSTSYNSKALIAFLAFLIIVTSIALLVVLYKIYDLHKKRSCNLDEQQELVERDDEKQLMNVEPIHADILLETYKRKIADEGRLFLAEFQSIPRVFSKFPIKEARKPFNQNKNRYVDILPYDYNRVELSEINGDAGSNYINASYID

SEQ ID NO: 84629 - protein, 102 aa, Homo sapiens
MGHPPVSPSAPAPAGTTAIPGLIPDLVAGTPWPRWALIAGALAAGVLLVSCLLCAACCCCRRHRKKPRDKESVGLGSARGTTTTHLVQPDVDGLESSPGDAQ

SEQ ID NO: 84630 - protein, 195 aa, Homo sapiens
DDTELRLLGRTHSACDALRTLAEARRLFPGRVSVDLMLGLPAQQVGPWLGQLQELLHHCDDHLSLYQLSLERGTALFAQVQRGALPAPDPELAAEMYQRGRAVLREAGFHQYEVSNFARNGALSTHNWTYWQCGQYLGVGPGAHGRFMPQGAGGHTREARIQTLEPDNWMKEAGGSFGPGATHRCGDHSPALAAV

SEQ ID NO: 84631 - protein, 98 aa, Homo sapiens
MCRLISDFQRHSISDDDSGCASEEYAWVPPGLKPEQVTRGQPSTLAVQWVHTNAHTHTHTLRHSTAQHWKRRKRKSSEPLASSGSGRIWGVASCASSR

SEQ ID NO: 84632 - protein, 540 aa, Homo sapiens
MEEPPLLPGENIKDMAKDVTYICPFTGAVRGTLTVTNYRLYFKSMERDPPFVLDASLGVINRVEKIGGASSRGENSYGLETVCKDIRNLRFAHKPEGRTRRSIFENLMKYAFPVSNNLPLFAFEYKEVFPENGWKLYDPLLEYRRQGIPNESWRITKINERYELCDTYPALLVVPANIPDEELKRVASFRSRGRIPVLSWIHPESQATITRCSQPMVGVSGKRSKEDEKYLQAIMDSNAQSHKIFIFDARPSVNAVANKAKGGGYESEDAYQNAELVFLDIHNIHVMRESLRKLKEIVYPNIEETHWLSNLESTHWLEHIKLILAGALRIADKVESGKTSVVVHCSDGWDRTAQLTSLAMLMLDGYYRTIRGFEVLVEKEWLSFGHRFQLFPTAFEFNEYFLITILDHLYSCLFGTFLCNSEQQRGKENLPKRTVSLWSYINSQLEDFTNPLYGSYSNHVLYPVASMRHLELWVGYYIRWNPRMKPQEPIHNRYKELLAKRAELQKKVEELQREISNRSTSSSERASSPAQCVTPVQTVV

SEQ ID NO: 84633 - protein, 107 aa, Homo sapiens
MMAADIPRVTTPLSSLVQVPQEEDRQEEEVTTMILEDDSWVQEAVLQEDGPESEPFPQSAGKGGPQEEVTRGPQGALGRLRELCRRWLRPEILRYRVKMGRTVIKTC

SEQ ID NO: 84634 - protein, 125 aa, Homo sapiens
  MOD_RES (1)..(1): Any amino acid
XSLLLEAVWHLHVQGIVSLQELLESHPDMHAVGSWLFRNLCCLCEQMEASCQHADVARAMLSDFVQMFVLRGFQKNSDLRRTVEPEKMPQVTVDVLQRMLIFALDALAAGVQEESSTHKIVRCCI

SEQ ID NO: 84635 - protein, 94 aa, Homo sapiens
MGASSSSALARLGLPARPWPRWLGVAALGLAAVALGTVAWRRAWPRRRRRLQQVGTVAKLWIYPVKSCKGVPVSEAECTAMGLRSGNLRDRMCA

SEQ ID NO: 84636 - protein, 159 aa, Homo sapiens
  MOD_RES (1)..(1): Any amino acid
XKTAVSDILKMSLMEAQIDTNVEHMIVDPPKKALATSMLTGEAGSLPSTHMVVAGMANSTPQQQKCRESCSSPSTVGSSLTTRKIDPPAVPATGQFMRIQNVGQKKAEESPAEIIIQVKTKELLSPGYPLEVVFYLPLSLQGYSSVCYSLSLQLQCGGG

SEQ ID NO: 84637 - protein, 131 aa, Homo sapiens
  MOD_RES (1)..(1): Any amino acid
XEDSDGRQDSPAGELPKTVQQPTESEPVTINIQDLLSCSNFAVQHRYLFEEDNLLRSTQKLSHSTKPSGSPLEEKHDQCKCENLIMFQNLANEEVRKLTQRYILFLHYASVWNAKNIIKTSHTLCRFYQLK

SEQ ID NO: 84638 - protein, 165 aa, Homo sapiens
MEATGTWALLLALALLLLLTLALSGTRARGHLPPGPTPLPLLGNLLQLRPGALYSGLMRLSKKYGPVFTIYLGPWRPVVVLVGQEAVREALGGQAEEFSGRGTVAMLEGTFDGHGGTKPRHRIHQQEHADDSHLFAVCWDDDGQHHGRLYPPAPDEIPSCPKVGT

SEQ ID NO: 84639 - protein, 365 aa, Homo sapiens
  MOD_RES (1)..(1): Any amino acid
XRRRPGRSIKDEEEETVFREVVSFSPDPLPVRYYDKDTTKPISFYLSSLEELLAWKPRLEDGFNVALEPLACRQPPLSSQRPRTLLCHDMMGGYLDDRFIQGSVVQTPYAFYHWQCIDVFVYFSHHTVTIPPVGWTNTAHRHGVCVLGTFITEWNEGGRLCEAFLAGDERSYQAVADRLVQITQFFRFDGWLINIENSLSLAAVGNMPPFLRYLTTQLHRQVPGGLVLWYDSVVQSGQLKWQDELNQHNRVFFDSCDGFFTNYNWREEHLERMLGQAGERRADVYVGVDVFARGNVVGGRFDTDKVGGGFRPRASGPVPPLGPHFLMDLPFPSAPQRNDSSCSSQSGDPVALRNRCPAPAKLCPH

SEQ ID NO: 84640 - protein, 301 aa, Homo sapiens
  MOD_RES (1)..(1): Any amino acid
XHGKEVGSIIGKKGESVKKMREESGARINISEGNCPERIITLAGPTNAIFKAFAMIIDKLEEDISSSMTNSTAASRPPVTLRLVVPASQCGSLIGKGGCKIKEIRESTGAQVQVAGDMLPNSTERAITIAGIPQSIIECVKQICVVMLETLSQSPPKGVTIPYRPKPSSSPVIFAGGQLTKLHQLAMQQSHFPMTHGNTGFSGIESSSPEVKGYWGLDASAQTTSHELTIPNDLIGCIIGRQGAKINEIRQMSGAQIKIANPVEGSTDRQVTITGSAASISLAQYLINVRLSSETGGMGSS

SEQ ID NO: 84641 - protein, 26 aa, Homo sapiens
  MOD_RES (1)..(1): Any amino acid
XANPPSGIEDETAENGVPKPGQKSKE

SEQ ID NO: 84642 - protein, 168 aa, Homo sapiens
MMLGTEGGEGFVVKVRGLPWSCSADEVQRFFSDCKIQNGAQGIRFIYTREGRPSGEAFVELESEDEVKLALKKDRETMGHRYVEVFKSNNVEMDWVLKHTGPNSPDTANDGFVRLRGLPFGCSKEEIVQFFSGLEIVPNGITLPVDFQGRSTGEAFVQFASQEIAEKA

SEQ ID NO: 84643 - protein, 92 aa, Homo sapiens
MRPLLGLLLVFAGCTFALYLLSTRLPRGRRLGSTEEAGGRSLWFPSDLAELRELSEVLREYRKEHQAYVFLLFCGAYLYKQGFAIPGSSFLV

SEQ ID NO: 84644 - protein, 170 aa, Homo sapiens
MNPYSNDILEYKNAHGKIIILYDDDERLASQAATTMCERGFENLFMLSGGLKVLAQKFPEGLITGSLPASCQQALPPGSARKRSSPKGPPLPAENKWRFTPEDLKKIEYYLEEEQGPADHPSRLNQANSSGRESKVPGARSAQNLPGGGPASHSNPRSLSSGHLQGKPWK

SEQ ID NO: 84645 - protein, 258 aa, Homo sapiens
MKSLLLLVLISICWADHLSDNYTLDHDRAIHIQAENGPHLLVEAEQAKVFSHRGGNVTLPCKFYRDPTAFGSGIHKIRIKWTKLTSDYLKEVDVFVSMGYHKKTYGGYQGRVFLKGGSDSDASLVITDLTLEDYGRYKCEVIEGLEDDTVVVALDLQGVVFPYFPRLGRYNLNFHEAQQACLDQDAVIASFDQLYDAWRGGLDWCNAGWLSDGSVQYPITKPREPCGGQNTVPGVRNYGFWDKDKSRYDVFCFTSNFN

SEQ ID NO: 84646 - protein, 214 aa, Homo sapiens
MAWVPAESAVEELMPRLLPVEPCDLTEGFDPSVPPRTPQEYLRRVQIEAAQCPDVVVAQIDPKKLKRKQSVNISLSGCQPAPEGYSPTLQWQQQQVAQFSTVRQNVNKHRSHWKSQQLDSNVTMPKSEDEEGWKKFCLGEKLCADGAVGPATNESPGIDYVQIGFPPLLSIVSRMNQGRWLYALLACLEKPLLPEAHSLIRQLARRCSEVRLLV
